United States Patent Application Publication US 2011/0183924 A1 - sequence listing, part 252

SEQ ID NO: 716984 - DNA, 149 bp, Homo sapiens
ggcagcttcactgccgtctcttcatacagagcgtagtttcggctctgcccattagactcattttatgtaggagttttaaatgtgtgttatatttcctttcaagtcttacaaagctaagactttttaggctcattcctttttgcatggat

SEQ ID NO: 716985 - DNA, 618 bp, Homo sapiens
gagaacggaagctcctgcccctcctaaagctgaagccaaagcgaaggctttaaacgggcaaggaaggcagtgttagacaatggtgtccacagtcgacaataaagaataagatccgcacgtcatcccacgcttcgcggcggtgcgatagatacctgccgacgtccggagtagcaagcccaaatatcctcggaatgagcgttctcctaggagaaagaagcttgagcatctatgctatcatcaagatatcgcgtctgaccacagtagtctctgcacagtgaagtaagaatagaatgaactaactaatctactacttgatgttcatccgttgtgatgtttgaaaggccaaagcgaagcgacctaggattacaacagtgctgctgtaagtagagctgctattgtacaattgcatgttgtgcctaagggtctaggatcacccctgtattcgggccctggagtggagtagaaagaaggcatatgattcgactggctccgtgattacgatagctttggatgttgccaacaacaattgggatcatctaaactagagtccagcgtgcctaattctagaatatatatatatatatcttttcaccatataaaaaaagagtaaagatagag

SEQ ID NO: 716986 - DNA, 302 bp, Homo sapiens
ggccgagagtctttaggcttttttctttttaaaaatggtttttttggttttttggaaaagcctttttgccagccgaagctgccgaagaagagctaatgagaagccctttcctaagggggctccaggagccctaaccgggctgcgtggcagggcagcatttaactttttggcttttggttaaaaaaagggagatgagtaagcccccgaggacccagcggttgcaacttaaccagcctccagttaaccccagcccaagccaggaagagaagcccttttcctgtgcagacaggcagaactactgg

SEQ ID NO: 716987 - DNA, 181 bp, Homo sapiens
cccgctgtaccagttgctgggtcagggcaacttccagaccattggcttgagtgcagccgcctgctttaaccagtgcacactgacacgcggcaacaaggtcatctccgtagatgacatcgggccaagcaaagcagggaagtcagtagggcagtggtaaccacccacactgagtgcatgcact

SEQ ID NO: 716988 - DNA, 479 bp, Homo sapiens
ctctggatgcaaagtgtctgagtctgctggggtgggccatttaaagggctgacggcaccactgcagagaactgtgggctaacacaccactagttgtcagtgacttcagctgaagggtcaaaacagttatagcaattaagtaactatgttgaatcacattcaggcatagccaaaattaaagtgaaggacaatacgtcattgttaaaaaaaatagcaaatttgcatatgagaaaagaatgttatttactatgattgtagatagaaattaaggcgattcttacctttcctaatgccaatcaagttagaaagtgaacagaaagaatggtcaacccgatattcaacagcatgacaaggacaatcatgattgaattagggcctgaatccgcttctttttccaaagcagggcatgaatcgttgcttgctggattctttggtatagcaagtacagacttcttagctttagggtcagctttgctttct

SEQ ID NO: 716989 - DNA, 341 bp, Homo sapiens
  misc_feature (50)..(50): n is a, c, g, or t
  misc_feature (65)..(65): n is a, c, g, or t
  misc_feature (76)..(76): n is a, c, g, or t
tgttttttaggggtttcactaaaaagtttcaggtttctatttaacatggnaattctgtataccanaatgtaccagnaaagggttatgttattcatgaaaaaaaaagagaatagttttgtctaattcaatagttatctaaaagttggttcaaattacagatttaaaaaggttattcataaaacaatgtagtaaggaatcattaggcaaaaaatgtgggaaaagtttaaatcataaaatattttttaaaccctgataaagaattggagacgtttggctaattaaacattttcataaagctgttagttttgattaaagtaaaataaaaagtcttgtaaaaatgc

SEQ ID NO: 716990 - DNA, 412 bp, Homo sapiens
cctccaaggcctctgaaaacctctccccttcttccagggtttccagacccaaacacgctacctctgaaagagaatgattgctggccaaagactattcccacagtactggctgcttgaccaaacacagacccagtatttctagacccaaaccttgaagcttggcaaaagttgaacccaaaggttgctgctgttgtggtgccagttaaggtaccaccaaagacagagcctccctgtccaaagccaggactctgcccaaaaccagaagcgttgctttggccaacacagcccccttctgtgtgttgggagaagcctgtccaaatgagaaggactctggagctatgtggtacttgaggcggcaccagacacacttcctctggtgtatgtgagagtagagaaagcctcgtgccgaatt

SEQ ID NO: 716991 - DNA, 259 bp, Homo sapiens
cgactcatagaggatcccgagtagtacagcctggggcagggggagtgtaaggataagaagcaagtgaggtagggcacggtggctcacccctgtaatcccagcatatagggaggcgaggtgggtagatcacgaggtcaggagtacaagatcaacctggacaagcttgaacccgggaggcagagatagcagtgagccgagatcatgccactacactccagcctgggcgacagagtaagactaccgtctcgggggcgggtag

SEQ ID NO: 716992 - DNA, 245 bp, Homo sapiens
cggaggaagtgttcctaaatagtcctgggggctgggcacggtgctcctaccagcactttggaagctaaggcaggtggatcgcaaggtcaggagtttgagatcagcctggcaatatggtgaaacccatcactactaaaaagtaaaaaaatggctgggcacggtggcccatttgccttccagtgatgagcctgcctgaacagaaacaccagatgcagctggaattcattgtggaaaacatggcgaaa

SEQ ID NO: 716993 - DNA, 188 bp, Homo sapiens
  misc_feature (2)..(2): n is a, c, g, or t
antagacccccacccccgtttttttttttcccctccccccctctttgccctgtagaaaggcggtgatggagtccccccccttgtttttatatattaaaaatttcccaatctgttttgggccttttttactgttgggaacttataatccaaaccttttctaggggttttaattaattttgtttttctta

SEQ ID NO: 716994 - DNA, 906 bp, Homo sapiens
ctagttctagatcgcgacggcgcccttttttttttattgtttaaaggatttaaaaatatatctatttggaaatattctgaaagtattattaatcacctatggggaaggaaagaaatcaacccaatgaaatttaggaagaaaattgcaaacgcagttgcaaaatcctgccccttccaccccaaggggcacagcccggaaaatagaagcttattttaggatcccaagtgcacgctctggtagaccggaggatgactttgtcagatctctctggctgaagggcccttggtccaaagtcaggatcagaaataggtcagctcatacatgctttggccttaggaaggtctggtagtctagatacaggtacaaagggccaggcatcatcaactgagggaaacatgggaacaaaccagacagagttgcacagagaacacatcgatcagacgaacgtggcaaccatataatagaactacgatatgggccccgacgcaccacccgggaccttgaacatgacccggccttcacccccaggggaaaaatcactagtaacacctatcacactatcaagctagggacacaccaacttagcgccacacgccgagggaaaaccacgcgaattcacgactggcaatgccatgaaaaacccaagaaagggaccataattaacactgagggatataacatctcaagaaagacagtggaaccaatggagaagggcacaagcaacccaatacgtatccgggccaataacatccccacatcgcccatagaagaaataaaaggaggaagacccaacagatatacacaaaagggcgcccccaagggcgaacacccagaagtaaacaacctacaacaaacccagaacgagagcagcacttaacaaggcaccaagacgacggacaacctcag

SEQ ID NO: 716995 - DNA, 134 bp, Homo sapiens
ttactcctcccggagtagcttcacgagctaagactgctgcaagtcactgccttcacaagtgcagcaacccagcccatgtagattgcctcttactaggcagttgctcaagccatgtatttatcctttatctggag

SEQ ID NO: 716996 - DNA, 192 bp, Homo sapiens
  misc_feature (47)..(47): n is a, c, g, or t
  misc_feature (83)..(83): n is a, c, g, or t
  misc_feature (99)..(99): n is a, c, g, or t
  misc_feature (142)..(142): n is a, c, g, or t
cttggacatggctacttatcggtcattcccgaatttgaataaaggantttagatgtgggcaacatgcacagtgctagcttggnttgccctttcctctanatcctggggccctattcttggcagtttaacattcatcttaagnccaagcaatacatagctcacaagattggggcctcttgtccttcagggtca

SEQ ID NO: 716997 - DNA, 156 bp, Homo sapiens
gggtgtgtgtgtgtgttacatcatagatcagtccagtggtgccttcacgggtgctgtgggatagtagatacatatataaagtgccttaaaatgcctaacacacaataggcacctaataagtactgatttccttctcttccaactgcatgcgtatat

SEQ ID NO: 716998 - DNA, 119 bp, Homo sapiens
tcagtgatgaaccttcttaccttcactgtcttgcagatataccgacactgtcacttgaccaatactgaccctctttacctcgcccacgcggaccacacgccctccgtgtagtcgctttg

SEQ ID NO: 716999 - DNA, 174 bp, Homo sapiens
tttggagacagagttttccggtctttaattggcccagggtgagtgcaattgggcggtggatccttcgggtcaacaataaacttacaaaccttcccgggggtttccaaaggcggaatttccttcaacgggccctttcaggcccttttccccccggaagttaaggccttgggggac

SEQ ID NO: 717000 - DNA, 862 bp, Homo sapiens
ccgggaatgtgcgctggctatgacatttatggtcgctcgagtgaacgctgacaacgatgcgcttttacgggcattacaataactctcataagcaggaagccataactgacggaacaatgaaaaaacctccgccgtggttgaagagaccagggcaggccgtggacaccacgtctacaacctgtcgcaacagaaacaaaagagtaagaacaataccgcattgattctcagcgcggtggctatcgctattgttctggcggcgggcatcggtttgtatggctggggtagacaacaggccgtcacatcagaccgccaccagcgatgccctggctaaccaactgacgcgccattgcaaaaagcccaggagcagccaaaaagccgagctggaaggcatctcattacgcaacaagctgcacaacttaagcaggcgaatcgtcagcaagaaacgctggccaaacagttggctgaagtccaacaaaaggtcgccaccatttccggcagtgatgctaacacctggctgtggctcaggccgattttctggtgaaactcgccggacggaagctgttggaggcgatcaggacgtcaacgaccgcagtgcagcgttgctgaaaacgtgcagacggccagcctgccggatattgaatgacccgagtctgatcaccgtcgtcggggccatcacggatgatatcgcaggcctttctgaagaatcgaaggttgcacttatgacggcatcatcctttacgcttaatcagcgtcaatcaggcacatacctgcgtctgggcgctaatggccccgagcgtcgccacgcacttcaacgccacaactcacacgtcccacagcggagcggctccacacgcaacacacg

SEQ ID NO: 717001 - DNA, 697 bp, Homo sapiens
  misc_feature (26)..(26): n is a, c, g, or t
gaggacatgaaaccttgaaagccacnagctagacgactgaccatattacgccaaccttggcacgagggattgacaatgccaccgggagcgatttcgggtataccacgaatgctgttcatgtggtgtataccactggctgccggaattacgcccacacagactgcccgggtcatgcagattatgttaagaatatgatcacaggcactgcacccctcgacggctgcatgctggtggtagcagccaatgacgggcccatgccccagacccgagagcacttattactggccagacagattggggtggagcatgtggtggtgtatgtgaacaacggtgacgctgtccatgactctgatatggtggaactggtggaactggagatccaggagctgctcaccaagttaggctataaaggggaggagaccctgttcatagtaggctctgctctctgtgcccttgagggtctggaccctgaggaaagcctaaattctgtgcataatctattgggtgctgtggacacttacatcccagagctggcaccgaacctggagaaaccttttctgatgcctgtggaggcagcttactccgtacttggacgtgacaaccgtgtgacaaggaaattagacctgggcattttatgaaggtagacgagtgtgagcctcttggactttctagaacattcgaactgtagttaaaggca

SEQ ID NO: 717002 - DNA, 1331 bp, Homo sapiens
  misc_feature (1113)..(1113): n is a, c, g, or t
  misc_feature (1116)..(1116): n is a, c, g, or t
  misc_feature (1128)..(1129): n is a, c, g, or t
  misc_feature (1164)..(1164): n is a, c, g, or t
  misc_feature (1226)..(1226): n is a, c, g, or t
  misc_feature (1235)..(1235): n is a, c, g, or t
gttgttatcttccttattttctccctcatgtgtttttcatacctttttcctctgatgttctatttttggacaatactatttgattctatactactgtgtattttcatatgcttcgctacatagacatgtgttcttcccagtggttttggtttcactgttattattgtgcccatataccgttgcgggcacatatatggccaactttgtcatgctttatattgcttgtttcttgacctagttctttctccaattaaatttgtttcgttgccctttccttatttattatgtctccggtgcctacccagtttacgtatgatgtcttactatgtttccagctgctctcgttggacccagacaatcttctgagagcaatggctctacattttccggggtaaaccctcgccattgccaaatgctggtatcgggttcacactttcctttgtgttatctcatttgcctcaaggtatgaacgtccattgaggtatccacagcccgggttctgggttgatgtgctgcgctctggtaagcttggagtcttgtaataaccctgcttgcagctaaggatcccggctactagtgggttctcactttctactttgtctcctccagggctatcatgaatggcgccttctgcgttgacagtccatgctttgatgacctgatggtgaagaaatcttggcggcagtactcaggaagatgcctgcgccggcgggttggggggtactctgagtacgctcagacagcctagcaagcagtgaagtccccgactcatctgcttgagtcacactgatgccacccgggagtctatggtcaaactctcaagtaagctcgagtgccgatgagcttcgccggggaattcggcagtcccagcacagatgccagtgccagtcgatgtcctacggcaatcttcgccttcgagggcattggagatgaggatctgtaatgctccactgcttggatgtctgccctgctacccgcagaggaatttacagaaacttgccctgtgtcctgtagtcccccatgctaggggcggagggcgtcgttttcacgttgcttgctgttccgtacgctacccgctgttgctacgtggccacggggcctcgtatcctaccnttnccgttgtcaccnntgggctggctgcaacagaggattgccccttctctnttcagagctggccctcgatgccaaattagcatttagtattttgcacaaagtctaaagggacnatggctgcntgccttggggaggaacatatctccctctgggcagcttctggcctcttggagccatgggccaaaggccataaaaggaaccgagagaggtactagtgt

SEQ ID NO: 717003 - DNA, 300 bp, Homo sapiens
cattaggcactttgatgttgccatgtcagcacagctgccaccagcaatttctctgctgtccgagacctctgtattgtcggaatgtcccaacatgaggcctgtctcatccacactctgcaaacccaacctgaggctgtgaaatgtatgttctatgctgatcatcaaagcatgcaacatagtctgaagggtcagacctgccgacttctgcttcgtgacgaggccacccacatctcaccggaagccaggaatctctctgctccagctatgaggcatctgtaccttctgtgcccatttccaccc

SEQ ID NO: 717004 - DNA, 153 bp, Homo sapiens
cgacgtccataacgaaccggggaccaccccggaggtggcgccgtaacgcgcgaactggttaaccgcgtagagcggtcccagttgccaccgcggggtccggaggtcatcggtgtctggccaccggggtcccgacatgcggcgcgggggcggccg

SEQ ID NO: 717005 - DNA, 282 bp, Homo sapiens
tgagctcacgcctgtaatcccaggactttggcaggtcaaggcaagaggattgcttgagcccaggaatttgagcccagcctgggcaacatagcaagacccagtctctagaaaaaaataaaaaattggccaggtgtggtgtgcatgcaggtggtcccagctacttgggagactaaggcagaaggatctagaggtcaggctgcatgattgcaccgccacacagcagcctgggcgacagagttagcccttgtctcaaaaaaactaactaaatatcattcaaatata

SEQ ID NO: 717006 - DNA, 578 bp, Homo sapiens
cgttgctgcagagtgactcgagaggatccccacccatgcgaagagtctggacggagactaggaacggcatcacacttggaatgccagtgatcgtctcaggtctatgagttctccgacgacttcatggtgatggtggtctcagtagcatctgtcacatgagcccttcttggtgggctgacattctccagattggtgatgggaaaatgctgtgggtctgcttgtcaaagtgtccttaagagcatagacactcacttcatatttggtggccaccataagtcctgatacaaccacggatgagctgtcaggagcaaggttgatttctttcattggtccggtcttctccttgggggtcacccgcactcgatatccagtgagctgaacattgggtggtgtccactgggcgctcaggcttgtgggtgtgacctgagtgaacttcaggtcagttggtgcaggaatagtggttactgcagtctgaaccagaggctgactctctccgcttggattctgagcatagacactaaccacatactccactgtgggctgcagccttcaatagtcatctctgtttgatctggaac

SEQ ID NO: 717007 - DNA, 3195 bp, Homo sapiens
  misc_feature (100)..(100): n is a, c, g, or t
  misc_feature (134)..(134): n is a, c, g, or t
  misc_feature (143)..(143): n is a, c, g, or t
  misc_feature (263)..(263): n is a, c, g, or t
  misc_feature (707)..(707): n is a, c, g, or t
  misc_feature (709)..(709): n is a, c, g, or t
  misc_feature (818)..(819): n is a, c, g, or t
  misc_feature (863)..(863): n is a, c, g, or t
  misc_feature (890)..(890): n is a, c, g, or t
  misc_feature (899)..(899): n is a, c, g, or t
  misc_feature (903)..(903): n is a, c, g, or t
  misc_feature (1409)..(1409): n is a, c, g, or t
  misc_feature (2496)..(2496): n is a, c, g, or t
  misc_feature (2501)..(2501): n is a, c, g, or t
  misc_feature (2528)..(2528): n is a, c, g, or t
  misc_feature (3165)..(3165): n is a, c, g, or t
tgaggcttaaacacctaatccttataaccaccttgaaggtaacaattcctcccacttgacaaatgaggaagtgacgcccagcaaggttcagacatctgtnctgggtctgacagcaaataagtcaccagccagtnacctgagcngccggagccagtttcttcatgtacaaaactgggggtgcagaggttgacggggtgactaatgagggcacacaaacctgaaggaggcccgggctcggtgtgacacctggctgcacccaacanatttaagttccttacttccctcccctggcacaaaggagccgagctggcacagccaggggcagtaacggagctgcgggggaggctggcagggaaagggaaacgcttccccagcccagactctagctccctctggctgcggggagccaaggccccggcccattagtcggtccttctggactggaagcaggctggtcccgtttgtttccagggaaagcgggttaggactgcctgtggaaggccccgttgcaggctcctcacaaccccagtggtagacattattccccccacgcagaggaaatgaaggctccgtgagtaactgacacggcgataaaccaagtctaacttggctcaagatcttttctttgctgggaggggctggtgaggctgcagcagagggtcccccaagctttctggccaagcgacctgggtgggtgtccgtgactntncctgctcagggcttgcctctagctgcctccgaaccctacccttttccaggctggtggcccaggggatgcaggaacagctctagtctactaagctgaacccggactcaannctaacgcgtgcccccaccgccttgagggttgggatgggcctgtnactaggccacctccaaggaaacaaatncctcttccnactnacgtcccgccgggacattcaggggcctcagcttgaagctagactggagcaatcgccaagcaccgctcccctgcaaggcagcacatccagagcgaaacaaagagtcaagggttgtggctcctggaaccggcattccctctgtccacagccgccccaggactctgctgggccggggtcggggcttcccactaggggctcccaagctacgagccaagaacccacgcagatgaaggtacggtggggtgcaggggcagaaagaggagggaaaatgggccggccagaaagccgacttggaaccctgcagtgtcatcgcagccaagtgtcttcacctcgcagggcccgagtcctcctcggtaaatgagtccactcggtcccatggggcggttgggtagctttaacaagccagtgagccccgggtcaccgcactctcctcacaggtgccccaacctggcgtccgtcacgctctcgggctgcggccacgttaccgacgactgcctggcgcgcctntgcgctgctgcccacgcctgcgcgcactgcgcctggagaactgcgcgcgcgtcaccaaccgcacgttggctgccgtggcggcggacgggcgcgcgctgcagacattgcacgtggacttctgccgcaacgtgagcgcggccggcctgcgccgcctgcgcgccgcgtgcccgcgcctggccctgcgggcagagcacagcgccgccatgctgcccgaccagcccccgcgcccgcgcgcgcccgccgcggccctcggcaagctgctgcagcgctagacgccgccccgccgctgcccccggggaaggagcgcagccccagaccgtcctggcttcgaacccagctcttccaccttcagaccaccaccgcatattctgagcctcattttccccgtctgcacagtggggataagaaagcctacctcacgttacgattttatacataggataaacgcaagattaaatggatatttggaaaacactcggctggttctcactcaacaccaccgcctttcccctcttgcttccgccccaggctttctgctgtgcgctccccacggaggcgggaggcgcctgcaccgtcctcggggactccgatcgccgttggaccgaaatcacctcggtggggaggacctgaccactcggagttcgccgacttgcgctcgggggtgacgggggccagggctgccgcgcgcaggggtctggggagcctccgggcggagcgacccagcgagaccccgccggctcccggagtgtcctggggaccgccacctccaggagccccggtggtgatctcggtgaagcaggaggaggggaagcaggggcgcacgggcagaaggagccaccgagccgctcctccttgcggttttgcccgcacgcgcgtctgcccgcccacctttcctggggcggatgcgttcccgcagtgaccgcactcgcgattgtagaaaattcgctcccaattgttgaatgcttacataaactgcatagttacccatattttctactgttctcataagggaaaaagaaatgatttggaagaaaaaaaaagcctcaaactaaacaaaaacaaaaccagcagccctggctaagctttngatantggaaccattataagctgacaagctanattttcacctgtggatttgctggacatgagcacaagcctaggcttccaatttgaatttcagggctgtagtcactgatgtgtcacatttagtgaaggctctcggccccccggcagccgcctggtcctgggtcactggggagaattctgggtgggtggaagaggcgaggagcactgtgatgggcgctgttcacactccggctccacccagcgccagctgcgacaaagccctttacccctcccaggccaggtgtttcttctgtgtgaaagaggagcttgatccctactcacaggttccttaattcattgctcaaatagggaaacggcaaggaaaaagacaaattctgttctcatgaagcttaccttctagtgggggaagagacaacaggtaactggtatataagagggtagaagggccaggtgcggtggctcaatgcctgtaatcccagcactttaggaggccaagatgggcgattcacgaggtcaggagatcgagaccatcctggctaacaaggtgaaacccccgtctgtactaaaaaaaaatacaaaaaattagccgggcgtggtggcgggcacctgtagtcccagctactcaggaggctgaggcaggagaatggcgtgaacccgggaggcggagctngcagtgagccaagaacggccacggcacccc

SEQ ID NO: 717008 - DNA, 191 bp, Homo sapiens
accctgagtcccgatgtattccctgctgatttgacctactacccaagtctccctgataaggattccagttgggggttaaattaatttatttctctcccccctccctttttccccatgagatgataagtgttctttttgtgcaccaacagactttaataacttcaaaagcaatggctttggtctaaccaggg

SEQ ID NO: 717009 - DNA, 3202 bp, Homo sapiens
  misc_feature (778)..(778): n is a, c, g, or t
  misc_feature (848)..(848): n is a, c, g, or t
  misc_feature (851)..(851): n is a, c, g, or t
  misc_feature (953)..(953): n is a, c, g, or t
  misc_feature (1416)..(1416): n is a, c, g, or t
  misc_feature (2503)..(2503): n is a, c, g, or t
  misc_feature (2508)..(2508): n is a, c, g, or t
  misc_feature (2535)..(2535): n is a, c, g, or t
  misc_feature (3172)..(3172): n is a, c, g, or t
agaattctactctgtctgcaagtaacaagtgttgcataaatggagcatctactgttgtcacggctatattcggaggcattctccaaaatgaggttaactgcctcatatgtgggacagaatctagaaagtttgatccattcctagacctttcattagatattccaagtcagttcagaagtaagcgctctaagaatcaagaaaatggaccagtttgttcgttacgagattgtcttcgcagttttaccgacttagaagaacttgatgagacagagttatatatgtgccataaatgcaaaaagaaacaaaagtccacaaaaaagttttggattcaaaaactacccaaggtgagtgttgaattttgagttatgaagcaatttcaatgggaaagtgcttgactgctaagaccatgtctataactttacactatgtgaactgttctgtatttttctctaggattttcagtaaaagctaaaccccttacagaatgaatgcataaggtatgcatggaagaatgattgatagggcagctaaaatgttatttactgaactgatagtagtatcaaactttgactgaaaggtaaattaggtgttcacaatctttgaccgcatctctgtcctccaggtgctatgcttacatttgaaaagatttcattggacagcatatttaagaaataaagttgatacatacgtagaatttccactgagaggcctagacatgaaatgctacttactagaggtaaggtggttacctttttagcatggtgaaaaaatggctctncagtaagattgtcatcacatggagagggtagaggtcatcgagatactgatgtcattgaccactgctcctnctnccttgttctgtagcctgagaacagtggcccggagagctgcctgtatgacctcgccgctgtggtggtgcaccatggttccgggtgagtacaacaccagcttcnggtggtgggaatacctgtggcagcccaatgacctgcagttttgtaccactcttgctagttcttcctattttgaaagctgatcttttgtcctcttcagggcttttcccttgtgccatgttgtctccagcaatatatgtggcttctggctcagagcttctgctgaggcagggcctcgcgctgagtcacatggctctcaactcgtgggcctcctcagtcaacaggtagcaagctcttacagaatccccacgatttggagctgcagtacctgggccaggatgaagtgacctcgcagggcccgagtcctcctcggtaaatgagtccactcggtcccatggggcggttgggtagctttaacaagccagtgagccccgggtcaccgcactctcctcacaggtgccccaacctggcgtccgtcacgctctcgggctgcggccacgttaccgacgactgcctggcgcgcctntgcgctgctgcccacgcctgcgcgcactgcgcctggagaactgcgcgcgcgtcaccaaccgcacgttggctgccgtggcggcggacgggcgcgcgctgcagacattgcacgtggacttctgccgcaacgtgagcgcggccggcctgcgccgcctgcgcgccgcgtgcccgcgcctggccctgcgggcagagcacagcgccgccatgctgcccgaccagcccccgcgcccgcgcgcgcccgccgcggccctcggcaagctgctgcagcgctagacgccgccccgccgctgcccccggggaaggagcgcagccccagaccgtcctggcttcgaacccagctcttccaccttcagaccaccaccgcatattctgagcctcattttccccgtctgcacagtggggataagaaagcctacctcacgttacgattttatacataggataaacgcaagattaaatggatatttggaaaacactcggctggttctcactcaacaccaccgcctttcccctcttgcttccgccccaggctttctgctgtgcgctccccacggaggcgggaggcgcctgcaccgtcctcggggactccgatcgccgttggaccgaaatcacctcggtggggaggacctgaccactcggagttcgccgacttgcgctcgggggtgacgggggccagggctgccgcgcgcaggggtctggggagcctccgggcggagcgacccagcgagaccccgccggctcccggagtgtcctggggaccgccacctccaggagccccggtggtgatctcggtgaagcaggaggaggggaagcaggggcgcacgggcagaaggagccaccgagccgctcctccttgcggttttgcccgcacgcgcgtctgcccgcccacctttcctggggcggatgcgttcccgcagtgaccgcactcgcgattgtagaaaattcgctcccaattgttgaatgcttacataaactgcatagttacccatattttctactgttctcataagggaaaaagaaatgatttggaagaaaaaaaaagcctcaaactaaacaaaaacaaaaccagcagccctggctaagctttngatantggaaccattataagctgacaagctanattttcacctgtggatttgctggacatgagcacaagcctaggcttccaatttgaatttcagggctgtagtcactgatgtgtcacatttagtgaaggctctcggccccccggcagccgcctggtcctgggtcactggggagaattctgggtgggtggaagaggcgaggagcactgtgatgggcgctgttcacactccggctccacccagcgccagctgcgacaaagccctttacccctcccaggccaggtgtttcttctgtgtgaaagaggagcttgatccctactcacaggttccttaattcattgctcaaatagggaaacggcaaggaaaaagacaaattctgttctcatgaagcttaccttctagtgggggaagagacaacaggtaactggtatataagagggtagaagggccaggtgcggtggctcaatgcctgtaatcccagcactttaggaggccaagatgggcgattcacgaggtcaggagatcgagaccatcctggctaacaaggtgaaacccccgtctgtactaaaaaaaaatacaaaaaattagccgggcgtggtggcgggcacctgtagtcccagctactcaggaggctgaggcaggagaatggcgtgaacccgggaggcggagctngcagtgagccaagaacggccacggcacccc

SEQ ID NO: 717010 - DNA, 104 bp, Homo sapiens
ctttcggaaatctaagaatatcctctttgtcatcacaaaacctgactgtctacaagtagccctgacttccagaatactatacaatacgttctttaggggaacgc

SEQ ID NO: 717011 - DNA, 802 bp, Homo sapiens
ccggttaccgggatatctggcgccatcgtccttcttgtgaggccaagcgctgaaaatgcgaagcagagaggcaggaccaataatttgaggcgaatccgaggaacctgacaatgggtctccgggtgcgtgtctctgaaactggaggatatcgggaggaaaggctctccgagtgcgtgagataactggggaagctcttggcgatggtaggctgtaggtacgtgataccggcaggagtcaggagatcaaatatggatacgccgactttttagattcgaaggaagcccttttctgagaacactttgccacaatgaaggtagatataaggatctagtttgacagctactaacgaagaatacacgacatcagtttgagaaagaggctctatcagaacagacacgaagttctgctaaaattgaagccaagagacaaacatcaaatatatgttgagcacttgggatgggaagaatgggtgaactagattgagtggctttagtgaagaagttggatagggagcagtgctccaaagaaagtcagtttacaaatggataactcgcttttaagaaggccataaggtaactgttgcaacgaagaagcccacaggtggccagatcatccacatcgagtttgtgaggaagaaaaggttagtgtcatgtcgtaacttgagagcaaaagccaaccaattaacagcgagaaagcaacagccaaggaccatagacatctcagctggttcaccttactcaatgttgactggaaaagcttcagcaaactttatacctggataggtaccaaaaccattggcccc

SEQ ID NO: 717012 - DNA, 3072 bp, Homo sapiens
  misc_feature (778)..(778): n is a, c, g, or t
  misc_feature (848)..(848): n is a, c, g, or t
  misc_feature (851)..(851): n is a, c, g, or t
  misc_feature (953)..(953): n is a, c, g, or t
  misc_feature (1286)..(1286): n is a, c, g, or t
  misc_feature (2373)..(2373): n is a, c, g, or t
  misc_feature (2378)..(2378): n is a, c, g, or t
  misc_feature (2405)..(2405): n is a, c, g, or t
  misc_feature (3042)..(3042): n is a, c, g, or t
agaattctactctgtctgcaagtaacaagtgttgcataaatggagcatctactgttgtcacggctatattcggaggcattctccaaaatgaggttaactgcctcatatgtgggacagaatctagaaagtttgatccattcctagacctttcattagatattccaagtcagttcagaagtaagcgctctaagaatcaagaaaatggaccagtttgttcgttacgagattgtcttcgcagttttaccgacttagaagaacttgatgagacagagttatatatgtgccataaatgcaaaaagaaacaaaagtccacaaaaaagttttggattcaaaaactacccaaggtgagtgttgaattttgagttatgaagcaatttcaatgggaaagtgcttgactgctaagaccatgtctataactttacactatgtgaactgttctgtatttttctctaggattttcagtaaaagctaaaccccttacagaatgaatgcataaggtatgcatggaagaatgattgatagggcagctaaaatgttatttactgaactgatagtagtatcaaactttgactgaaaggtaaattaggtgttcacaatctttgaccgcatctctgtcctccaggtgctatgcttacatttgaaaagatttcattggacagcatatttaagaaataaagttgatacatacgtagaatttccactgagaggcctagacatgaaatgctacttactagaggtaaggtggttacctttttagcatggtgaaaaaatggctctncagtaagattgtcatcacatggagagggtagaggtcatcgagatactgatgtcattgaccactgctcctnctnccttgttctgtagcctgagaacagtggcccggagagctgcctgtatgacctcgccgctgtggtggtgcaccatggttccgggtgagtacaacaccagcttcnggtggtgggaatacctgtggcagcccaatgacctgcagttttgtaccactcttgctagttctttcaactcgtgggcctcctcagtcaacaggtagcaagctcttacagaatccccacgatttggagctgcagtacctgggccaggatgaagtgacctcgcagggcccgagtcctcctcggtaaatgagtccactcggtcccatggggcggttgggtagctttaacaagccagtgagccccgggtcaccgcactctcctcacaggtgccccaacctggcgtccgtcacgctctcgggctgcggccacgttaccgacgactgcctggcgcgcctntgcgctgctgcccacgcctgcgcgcactgcgcctggagaactgcgcgcgcgtcaccaaccgcacgttggctgccgtggcggcggacgggcgcgcgctgcagacattgcacgtggacttctgccgcaacgtgagcgcggccggcctgcgccgcctgcgcgccgcgtgcccgcgcctggccctgcgggcagagcacagcgccgccatgctgcccgaccagcccccgcgcccgcgcgcgcccgccgcggccctcggcaagctgctgcagcgctagacgccgccccgccgctgcccccggggaaggagcgcagccccagaccgtcctggcttcgaacccagctcttccaccttcagaccaccaccgcatattctgagcctcattttccccgtctgcacagtggggataagaaagcctacctcacgttacgattttatacataggataaacgcaagattaaatggatatttggaaaacactcggctggttctcactcaacaccaccgcctttcccctcttgcttccgccccaggctttctgctgtgcgctccccacggaggcgggaggcgcctgcaccgtcctcggggactccgatcgccgttggaccgaaatcacctcggtggggaggacctgaccactcggagttcgccgacttgcgctcgggggtgacgggggccagggctgccgcgcgcaggggtctggggagcctccgggcggagcgacccagcgagaccccgccggctcccggagtgtcctggggaccgccacctccaggagccccggtggtgatctcggtgaagcaggaggaggggaagcaggggcgcacgggcagaaggagccaccgagccgctcctccttgcggttttgcccgcacgcgcgtctgcccgcccacctttcctggggcggatgcgttcccgcagtgaccgcactcgcgattgtagaaaattcgctcccaattgttgaatgcttacataaactgcatagttacccatattttctactgttctcataagggaaaaagaaatgatttggaagaaaaaaaaagcctcaaactaaacaaaaacaaaaccagcagccctggctaagctttngatantggaaccattataagctgacaagctanattttcacctgtggatttgctggacatgagcacaagcctaggcttccaatttgaatttcagggctgtagtcactgatgtgtcacatttagtgaaggctctcggccccccggcagccgcctggtcctgggtcactggggagaattctgggtgggtggaagaggcgaggagcactgtgatgggcgctgttcacactccggctccacccagcgccagctgcgacaaagccctttacccctcccaggccaggtgtttcttctgtgtgaaagaggagcttgatccctactcacaggttccttaattcattgctcaaatagggaaacggcaaggaaaaagacaaattctgttctcatgaagcttaccttctagtgggggaagagacaacaggtaactggtatataagagggtagaagggccaggtgcggtggctcaatgcctgtaatcccagcactttaggaggccaagatgggcgattcacgaggtcaggagatcgagaccatcctggctaacaaggtgaaacccccgtctgtactaaaaaaaaatacaaaaaattagccgggcgtggtggcgggcacctgtagtcccagctactcaggaggctgaggcaggagaatggcgtgaacccgggaggcggagctngcagtgagccaagaacggccacggcacccc

SEQ ID NO: 717013 - DNA, 632 bp, Homo sapiens
ggaacgaacttcatcggttcttaacaatcacaactcaagataagaaacaaattcgctatagccgcaacggcagcaaacatgattacacgggataacactgtcgcagctcttaaaacctacagaacgcaaggataaaaggattccatatctaagcaggctccaactcaagttatagtacaacagctgaccgcctaccgcagagatcactatgggatgatgctcgtggctttaccccatcgctggattaaacaccactactttatgattcgtggccattggccatggctgctgcagcattctctagctcagagccaggcgcagacatggcacttccattaccagcatctagaagcggagctgattgcataacttgaagaggtacaggagattttgataggtccctcaagaggcccttatttgcccacatgaggccacaggcattgcatagtgttcttggtccatcgggtccacggcgcatcatcggtgtagctgttgcattagtaccacaatgatgacattcggcagcagatggaggtcggccttcaactaatgcccaattgggggaagcatctacagctgtcatttctgatgctgctgctattcatcaagctttggttctgagaatgtaactg

SEQ ID NO: 717014 - DNA, 142 bp, Homo sapiens
cgagcggttatctttttacctattcacactgatgtgtgtatcctgctaacagtacggtagactgctaccagaatgtcgtccatattatcatatccttccatgaaagcgccctttaaaaaacaacattctgtgatagagactg

SEQ ID NO: 717015 - DNA, 434 bp, Homo sapiens
tacgaatcgagctctgtacctgcatacctgggcacactagaagagcatatgggaggcagggttgggtgtgggtgcacacaaaagcaagcaccatctgggattggcacacgtggcagagccagtgtatgggggtatgtgctgcacttcccagggagaaaacctgtcagaactttccatacgagtatatcagaacacacccttccaaggtatgtatgctctgtggttcctgccctgtcttcactgagcgcagggctggaggcctcttagacattctccttggtcctcgttcagctgcccacggtagtatccacagtgcccgagttcttcgctggttttggcaattaaacctccttcatagtggtttagactacacttacaacaaggaaaatgccccttcgtgtgaccatagattgagatttataccacataccaca

SEQ ID NO: 717016 - DNA, 165 bp, Homo sapiens
ggcagatggggtaggtggagtagagggaacttggcttgcacagtcacatcctggctgggattcgtgtagtgcttcatgtggcatgtcacggactctgcaggctagagtcactgtgctgaccggcagtgacagctgactgcacgagatgtacagtcccccggagtc

SEQ ID NO: 717017 - DNA, 733 bp, Homo sapiens
tgtctctgatgttgttccctgcatttctatcttcctcgctgcccgttgttgagtgatagtgctttcagcccctagcctggccagtccgctccttccgggaggtagctcactgtggtcagtccccgcaccggccagccgccccgcccgggagtcgagatgggggcgcctccgcccggccgctgtcccgtccgggaggtgggggttcgcctctgcccggccgccccgtctgggaggtgaggagcccctctgcccggccaccaccccgtctgggaggtgtacccaacagctcattgagaacgggccatgatgacgatggcggttttgtggaatagaaaagggggaaaggtggggaaaagatagagaaatcagattgttgccgtgtctgtgtagaaagaagtagacatgggagacttcattttgttctgtactaagaaaaattcttctgccttgggatgctgttaatctaagaccttacccccaaccccgtgctctctgaaatatgtgctgtgtccactcagggttaaatggattaagggcggtgcaagatgtgctttgttaaacagatgcttgaaggcagcatgctccttaagagtcatcaccactccctaatctcaagtacccagggacacaaacactgcggaaggccgcagggtcgtctgcctaggaaaaccagagacctttgttcacttgtttatctgctgaccttcccaaaactactgtcctatgacctgcc

SEQ ID NO: 717018 - DNA, 367 bp, Homo sapiens
  misc_feature (1)..(1): n is a, c, g, or t
ntgcagcctgctgagtagctgggattacaggcgcccgccaccacacccagctaatttttgcatttttagtagagaaggggtttcaccatgttgtccaggctgttcttgaactcctaacctcaggtgatctacccgcctcggcctccaaagtgctgggattacaggagtgagccactatgcccggcctacttttggttttattgatttttctctgttgtctttttgctttcagttgtgttgatttctgcttttatctttatttttccttccctctgcttgctttgggtttattttgttctttttctagtcttgagatgagagcttagtttattgatttcaggctttccctaaatttccctctcagcag

SEQ ID NO: 717019 - DNA, 663 bp, Homo sapiens
gcacggctccaacttgcagacggcctgttgtgggacacgtctctgtaatcgcgaaacgcaatcatggaagacctgggggaaatacaccatggttttatccacccgtgagatctttgaagcaacgttcatcatcgtcaagcgatgtgtgagggacggcatctgtgaactgtgcactattgtctagtcctcgagtccggccgggattcttcatgctacgcattggcgagtacccctaggcatgagctactgtctagacctggcagtgacaacgcaccgcagtagtcatgattccggtcttcgaacgatcgcgcacactcacctctcatgggtggaacggcgggacgaatgactgacatgactgggtagccggatgctacacaaatgacagggactcggacggctagacgccatggtatgatgtagccaagcccagggcaacacaagtgaccaggggacatctaatccgacgccgttgataggctcgtatcgtcagaacacaggaagtcatccctgtacgcgtcataccgcgacagtacgttcacgggagcggtggaggcccggggccggtagagagtaagagtgcagggacgcacgtcatggcagtcgcacactaggcaggtgatccagccagacacttatgcgattgctgccacgcattgagcg

SEQ ID NO: 717020 - DNA, 889 bp, Homo sapiens
tattcacaggattacccgtggcattcctctactgacttcctgcgagacagcaagatgtccctccgaggacgtcagaggcctagcgtcaaagacgttcctggtccggtagtgacttgcgacacggaacgtccagggaccctgcagtcggcacttgcatgaggatggcatcgcaatcctgaatggctgcaggatactgctgcggtgcagacggtctttggcgtgcgtcggcaccaggacctcagggagacatggccacgatgctacagctaggtccccctcctcacaagccagcatcaaggtagacacttaagacttcaccccatctccgtgaaccgctgcagagatatcgtgtgtaaatgacttggttcttcgagatgacatgattcctgccaagacactggtgcaagtggccatctatgctctgggccgagagcccaccttcttcttcgacccggataatctttgacccaacccgatggctgagcaaagacaagaacatcacgctacttccaggaacttgggctttggcctgggcgtgtgcggcagtagtctgggatcggcggatcgctgagctagagatgaccatcttcctcatcaatatgctggagaacttacagtagttgaaactcctaagcagcctgcagccgatgtagggcaccaacagttcaacgctcattcctgactgcctgaaaagcccatgctccttcaccgttctggccctttaaccaggagagcaacccagcagtgatcagagaggatggcctgcagccacatgggaggaaggcccaggggtggggcccatggggtctctgcatcttcagtcgtgtgtcccaagtcctgctccgtttctgcccagcctagctcagcagttgaatgggttctcagttaa

SEQ ID NO: 717021 - DNA, 239 bp, Homo sapiens
gaaaaaaaaaaaaaaaaggtttcccgtattttaaactttgggcttggggtttttaccatgtgccaatttaggttcatcatttgtaacaattttaccacgccggtgggggatgttgatattgggggagtttatgcatttgtggaagcaggggagatacggaaaatctctgtcaactcctcttaatatttctgtgaacctataacttctttaaaaaaaataaagttcttgaaaaagtaaaa

SEQ ID NO: 717022 - DNA, 109 bp, Homo sapiens
tactgacgactcttctttactttccttttttcgtaaccaccactgtaacacaactttacgacaacggtacgacgccgacgggggactcctctacgacgtcgacccggac

SEQ ID NO: 717023 - DNA, 1303 bp, Homo sapiens
gcgcgtggcccttgtggggcgacacacagggttggctatgcaccgtgggacacagtgtgttgggcgccataggtcctttaatgtgtatttgcgccacccattcgtaaagttgttggggagacctcccacgggatgctttcagcgcggttttgtccacgaaccaaatcttttaggggggcgtacccggatggcgttttttggttgtcgtggaaagggggtggggcccctgttttggtagacaccctggcgaaaaccgccaaggtcttggcattgtttccacgccagggtttgcgtgaaatggcccctgtcggggtgaaaagcgttcttggggaccaccactctcataggggacagcgaacagtagtttgttttttccccgggacacccgctggggagtgcccgccactctgatggaccaaagggttctttgggggggctttgcaacaatacctagactccgggcggtgggaccgagcacaccggggcccgtgccaccctgggggggacccaacagtggagagttcccccgcgaggagtcaaagacgctttctgggaaaaaggaaaatggtggagcccgaaagggtcggggaagacccacagggccacaaacgggagaccaacggggctccacaggggcaaaagaatgggaggcacaacgcagtggtgcccacgcggaccgccacagaggtctgtggagacacaaaccctggactggaaacaggagggaaagagcggggtgataactggccgcgggccgcctcgggggccctggcccacatgactcgccccgtcgggagttcggcgcccaacacaacccggtggctggactggtcgaatccagggcacaattcccgcgaagggaccccctgaaggccttgtccgaagaaaagcctggaaacccacccaatgctctcgacttgcggcggcgagcccagagaaagaggggccctcgctgcgcttttgtcgtcacacctggagaacacccacacactcgcggcaccttccacacgagggcccacgcgccctcggtgtggtgtgcttcttgaaggcgaagaaggccacccgagaggaagctgctggcctatcgaataggcgtgcgggcacagcgcttgaaggccctgctgtccctaacacctgagagcggcaccttttcaagcggctcacgcacggagccctcccacaggcccccgcttttcttggaactttcctttggcacaacatgaagcttcctgtgccggccaccgcccccaccccctggggaacccataaaggcgcatctgcccttagccaaaaaaaataaaaa

SEQ ID NO: 717024 - DNA, 873 bp, Homo sapiens
gggctggggcccggaagctgggaggccgcctgactcgagctccgccgtgcgggcccgactggtgagtccagcccggcagtcgcaggacccggccgcagccttctccctccacctctccctgcccccagcgccaggccgcgggctgcgcctcgtgtggcggttggggggcgcctcaggcggccattgggggagggcgtccgggggccggttccgggccggcgctggcttggagggcgctgaagggaagcccgtttggaagccgcgcggcgcacaatctgggccgcagcacacgttgcgagggaagacaccccggcataaacgagacgaccggagaggaggaggagttacacggcgagaagtggggaatcggagaggccgccgactagttaggacagagctgcacatacggggggacaaccgctggagcttgacaccccagggtgggaatacccgcgcgtcgtgggaggtgggggcccccagcaaaaactaccgataaacaccccgtggggagggagggcatccgccgcggtaacaaagatggggttgtttcccaccccaaaacgacgtgtggggggtggcaaccaactctctccagtatcgtgtgggtcacccagagggagggcacccacccgtgataggaaggggggaaccagaatgaggtgtggagaagcttatcccgccttttgattgttgggtgcgcacccacggggggcgacactgttgtaaacaaattatctacccccgatggagtacacgtgggactgtcgcctatcattgggatggggacgaaaacaacacgacgcctgggcaacgaaacaaccagcgtcggtgtgtgtgtcccacgtgtatgaagggggcagagctcatttagga

SEQ ID NO: 717025 - DNA, 374 bp, Homo sapiens
  misc_feature (105)..(105): n is a, c, g, or t
  misc_feature (107)..(107): n is a, c, g, or t
  misc_feature (114)..(114): n is a, c, g, or t
  misc_feature (140)..(140): n is a, c, g, or t
  misc_feature (145)..(145): n is a, c, g, or t
  misc_feature (162)..(162): n is a, c, g, or t
attcattcaacatggcggccagtgctttcaaaaaacatgaagtcaatgaggaaacaggcaccaatcattacagctttcattttaacatcaaggtctaaagggaantngattccnaagttatcagcgtctgtaaatgcctntctcnaaattccagtccagtcnttggaaatttgccaaccacacactatcatcagagattataatgctcgaaaatcaacagtctgccacagacagctgacacacaagcacatggaccactgtatgttctagtacatcctctcttttctcattttgaattgtaaactttggtagacatgggtgccaagtgatgaataacataacctaatggacaccggaggagcttggatttctat

SEQ ID NO: 717026 - DNA, 274 bp, Homo sapiens
attcattcaacatggcggccagtgctttcaaaaaacatgaagtcaatgaggaaacaggcaccaatcattacagctttcattttaacatcaaggtctaattagtggtgctgggttcttcccactaccctacacgcgtgctcggacagcattcccgtagggtttcgtgcccaactgcctcccggtcgctcgaggacacacactgtgtagcattgcatacgtggaatgatataaatacaagctttgagtgtgtcaggttggcgtggagctgtgacag

SEQ ID NO: 717027 - DNA, 95 bp, Homo sapiens
gaggtttacttgggtacatggcccgcagtggcttttgccccagaaaggggcaccgcacacgcgggtagatgatttctcgcacggcaggaagtccc

SEQ ID NO: 717028 - DNA, 207 bp, Homo sapiens
cgagctgcatcagctgaagcggaccctcttcatcaatggaatctccaaatatgcagagtctagaaaagatccacgaagcattttgaggaagcctatccccaatctgcacagcttctcgtaagcccgcccggtgttacaatcgtggctcgcctcaatgttcctcgtatgcagcagaggaaccaaggcgcgagcggggaaacgctgtac

SEQ ID NO: 717029 - DNA, 1013 bp, Homo sapiens
  misc_feature (240)..(240): n is a, c, g, or t
  misc_feature (286)..(286): n is a, c, g, or t
  misc_feature (314)..(314): n is a, c, g, or t
  misc_feature (316)..(316): n is a, c, g, or t
  misc_feature (397)..(397): n is a, c, g, or t
  misc_feature (525)..(525): n is a, c, g, or t
  misc_feature (556)..(556): n is a, c, g, or t
  misc_feature (766)..(766): n is a, c, g, or t
ggcggggacttggctgggcgacgtggacacccaagccaattaaccaaaaacttggaaggcagaaagtgggtaatttttgggtgtgtcacaccttcttgggaccacgcgcggacatggagattcttacagatagacacacaacaaacacggttggcgcaacatgggtcctggaaggccagcagatggtgtggttccaagtccagaggggcatggtttggggacagcctgggcagagttagnaccaggggcattcattctcctaccagaggtgtggtgagtcatctcncaacacacgtattacaccccacacatcntnttccagagtggcgcacgcacacatttaggcacacaggcagacgcacaatatctcataggcagagtatcaccctgtggcggnggggcccccagacacacacacacagacgcagacgttgagagtgtcgcagagggaaacgcccgcgttatacgcagagcagaggcccccgtgacagagtggcgcagaggaacactcattctcgcagaggntctgcgcataccttctcagaggtgacacacntattatccctttacagagcacatatacaggcgctcagggacacacaccctctttgttgtgacacacggcgtctacactatttatgttggtggttggagcaggcacaccattgtgggatatgccgggggtgttacccatctacaggcagattggggccacgttttcctggcacattgtgcagccatatgagtgccacagagggctcggccnacgttggatacgtctccaggcatatatacaaaaccctatgtgaacccaatgtgggcgcagatgtgaacccagcgatttggaaaagtggggcagcgccagatatccggcgcaggttgtggcagcaaatttggacccggtggtttaacccccctggtcatatggtgggtgtgccccatatggggccacaccctggatcccaagggggatgacccaggttaagaactcaacgtaggaggacctactaggc

SEQ ID NO: 717030 - DNA, 618 bp, Homo sapiens
agaatgtgaaggtcagaagggcaccttgcattaagcacatgatttacagctgtgatggtttagcatttgctctgctacttgagataatggagagcaggttcttttaactcaagttacagtcgatcctgggagagcaaggagccagcaagtctagacattccagagccacaggccctggattctatccaagccacgagggattttatgccctgggcttagattatggtgcgtcagggcagccttccaccctttagcacagagcttggtgttccaaagaccacaaggggttttagacccttgaccctggacatattccaagactcttttacattatgtcagaatgcaagccctgcctcagcttctcccaacactcagcttttcgcaacataatcccagcactttggaacgctgggtggattgcttgaacccaggagttcgagaccatcctgggcaatatggcaaaaccccatctttaccaaaaataaagctgggtgtggtggaacatgcctgtggtcccagcttcttgggaggctgaggttgggagattgcttgaaccccggaggtagaagctgcatggggccatgatcacgaacctgcactccagccctgggcaacaga

SEQ ID NO: 717031 - DNA, 294 bp, Homo sapiens
actagacagatcaaaatgtagtaagacggttatatcaccaattaaacgccaacatattgactcttagtagtgcatgcttgaagcacacattatgacacaacatcccgaagatctatatcgggtaagctgctcgatcaccacgtttcaaggtgtatctagtgatattggagagacttcctataccctgagtactagtcagtgactcacattattattttcagagcagatagttcaacaacctacctagatctatctacctcaatcaatctgccaggtcaacgaagcatcgggtca

SEQ ID NO: 717032 - DNA, 409 bp, Homo sapiens
  misc_feature (7)..(7): n is a, c, g, or t
  misc_feature (62)..(62): n is a, c, g, or t
  misc_feature (64)..(64): n is a, c, g, or t
  misc_feature (111)..(111): n is a, c, g, or t
  misc_feature (127)..(127): n is a, c, g, or t
  misc_feature (199)..(199): n is a, c, g, or t
aacgtcncccccatgagcctgagaggcacagacagctgctgctgcgggcccgtgcgcgccanantgctgtgacagggcagcgccgcgtttccagccctcccctgctcgcangttcggaaactttggncctgtggtgacttcttcacctcacagcagagagatcaagcgggagcagaggctcaggtccgaggctggtgangagccgggctgagcgtgctgcggaccaaggccatgcgggagaaggaggagcagcgggggctgcgcaagtacaactacacgccttgcttttgcgggcggttttgcgcccctccccgatggctgcctcctgcagggcactttctacgctcgggagcggctgggggcggtgtacgggttcgtccgggagggcccctgcaggagcggactgggc

SEQ ID NO: 717033 - DNA, 804 bp, Homo sapiens
ggaaaaaggaaaaaaaaaaaaaaaaaaacaaaagacaaaaaaaaaattaagggtaatttccctcaaagaaaaaacccttcccccaggggttaaaccgaaaaatcacggggccgggaaatttccaggggcactcaggggcccagggctttcacctggtttccttgacaggggcaaggctccagggacgtgcgtcgtaacccggctgtgggacgcgggggttctcattcctacggtccaacaaggccaccttgggtggcacttccggctccagatgagatctcctttgggtcacacttttggcgtcggtgggtcaccaacttacctacttcggtcccttttggacttttggaatttggaggcaccaaggcgaggggcactcaaggtatttccctttcaggcaggcatttggaaagaaggggagggatgtaccggggaaccaccgtggtctgggagtattgggtgcaacacggcggaaaaaaacgcttcaaactatttcaaaaaaacccggagggatttggaaaacaggagggcgctttagaaccccaaaggcttacggaattagaaattatcgcgtggagcctcctgagatgagaggagccccagcgctatgagagtgcgcctaatctgcggggcgaaggcgatgagaaggggagcgggacaggcgcaagagaaccccgggagaagggaagaaatggccatttggacccgcgcagaggagatgagatctccaggggagagaagagaaaccacggatgagatggcatttccaccccccaggttggacaacaggggaggcgaatattg

SEQ ID NO: 717034 - DNA, 323 bp, Homo sapiens
actgcaatcgtgcctcctggatttaagcaattctcatgcctcagcctccctagtagctgggaccacagacacatgccaccacgcctggctaattttttgtctttttagtagagatggggtttcaccactgttggccaggcaggtcttgaactcctgacctcaagtgatcctcctgccttggcctcccaaagtgttagaattacagccatgagccaccatgtctggccactttcctcttttggctcaagattgcttcgactattcagagtattttgtggtcccatacaaattttagtactgtattttctatttctgtgaaaaat

SEQ ID NO: 717035 - DNA, 99 bp, Homo sapiens
ccttgtgtcgcagacagtgagggtaataatgactagtgtggttgattgtagatataggtgctgcgagattgtcagttcagagtatgaatctgacgcagg

SEQ ID NO: 717036 - DNA, 268 bp, Homo sapiens
ctgttccgcatttgtcgcatgccgggactttgcggcgatggtggagctgctggggatgttggatgcccggctcggcgggcaattgagctgcttcgaggccctgtggccggagttctacgagctcacgacgacgccgcctgcgcgcagctcgcccatactgccctatggacaggggatttacgcgctcgttgaagcactcggagcagaccctgagtccgaccgtgagaggtttgagcgggttctttcggatgtgatggagagtggtttg

SEQ ID NO: 717037 - DNA, 120 bp, Homo sapiens
  misc_feature (70)..(70): n is a, c, g, or t
  misc_feature (101)..(101): n is a, c, g, or t
ccatccaaacatcttcactgtccagaacatttcttatcaaagctgattttctgtcagctcaatcacatcncttcttacttgaactatcacttctgcctgtnttccagtactgtatcctcc

SEQ ID NO: 717038 - DNA, 313 bp, Homo sapiens
ccatccttccttctctcacgcaactccttgaggtcgtgttgaactgactgactcatgccagccctacatatttgccctttatgtattggagcaacagcgtggaggctgggctgtttacctggatgaaattgaacacttcactgaagtggatgaagaccaatacccattgtgccccatgctcagcatggaactgttggatgagaaagagcctgaagtcttgcaggactcactggataaatgatatattgaatgcttcaggtgtatcttgaactgcgttacataagccaatcctacaacagtgctgattactcat

SEQ ID NO: 717039 - DNA, 121 bp, Homo sapiens
tatatttatatacaggtgaagaaataggataatttaatcaatgtggagtgcttgcgggtgcagtggttcacgcctgtaatcctgacactttgggaggccaaggcaggcagatcacctgagg

SEQ ID NO: 717040 - DNA, 122 bp, Homo sapiens
  misc_feature (101)..(101): n is a, c, g, or t
  misc_feature (103)..(103): n is a, c, g, or t
gcggccgcctactactactactactgctcgaattcaagcttctaacgatgtacggggacatgatgttgattttttttcaatgtggtgcaatatatacaatnanatttgtcataaccaaaaaa

SEQ ID NO: 717041 - DNA, 191 bp, Homo sapiens
tctgatggtgactcttagaggatcccgtaagatcgagctgaggagccagcagcccggagtcgcccccacagcatgtgactacacgaaggcttgggaggatgtactacaagaagcaagcgcaagtggacaccggatggtgtgtccaggagctcccccaggctccctagtccatgatctacgagtgccggccg

SEQ ID NO: 717042 - DNA, 358 bp, Homo sapiens
catatccaagtaagcataaacagtgtatgtaggttcaagagatagtagatgatacttaaattaaaactaccttcactaatatgcttgaactgtcgccttacctatgttaagcatctagactaaaagccaaaatatcattaattgctgccattctacaaacccaaaatgtagtactctattaacctgaaatgtacactagcccagaacagtataatggtacttactgagctatagcatagcagcttagttgttattgagattatttagtcaacacataatggaaccttctttcttctaaaagtagccagtgccacttttaagacgtgcatcactatatgtgatgtacaagttattaccc

SEQ ID NO: 717043 - DNA, 264 bp, Homo sapiens
  misc_feature (20)..(20): n is a, c, g, or t
  misc_feature (71)..(71): n is a, c, g, or t
  misc_feature (84)..(84): n is a, c, g, or t
  misc_feature (89)..(89): n is a, c, g, or t
  misc_feature (161)..(161): n is a, c, g, or t
  misc_feature (169)..(169): n is a, c, g, or t
  misc_feature (217)..(217): n is a, c, g, or t
  misc_feature (230)..(230): n is a, c, g, or t
  misc_feature (239)..(239): n is a, c, g, or t
  misc_feature (254)..(254): n is a, c, g, or t
catcaaggagcttacaagtnagtgggtgggtgtgggtacagagggacacttgggaccaggcggtgcccttnccacacccacctnatttncagggcgagggaagagcagggtgggccaggagagggaggaagggagagagggagaagggctggagtagagtncgcctggnaactggcacggaggggaccgggccaagcaagcagtgcccctccatcanaggagagccaggnagccctttnggtgaggtcgtcttnggatccctac

SEQ ID NO: 717044 - DNA, 252 bp, Homo sapiens
  misc_feature (18)..(18): n is a, c, g, or t
  misc_feature (21)..(21): n is a, c, g, or t
ccccttgggggggggaanccncccagggttcccccaatttcaaaccccggggggggcctttccttccccctttttttgtttccaccccggggggggggggcaccccctttgggggggggcttttttttttttccccccccccccaaccccccttttttggggggcccaaggggggtccccttttgggggcccttcccccggcccccccccaatggtggataaaaccccctttttttgggggtttttttttta

SEQ ID NO: 717045 - DNA, 271 bp, Homo sapiens
  misc_feature (102)..(102): n is a, c, g, or t
  misc_feature (104)..(104): n is a, c, g, or t
  misc_feature (226)..(226): n is a, c, g, or t
cgactcttgaggatcccaatgcagcggactcggatcatgcgggcgcggcttcgggagctaatgtcctgacccttatcgagaaggacatctgtacccccaatngnctggccatcgaccaccgtgcctgagaagctctacttctctgacgccaccctggacaatgatcgagcggtgcgagtattgacggctcccaccggctatgtgatcctaagagtcagagcctgtncacccctctcgggctggcttgtgtaatggcggagcacatttttct

SEQ ID NO: 717046 - DNA, 107 bp, Homo sapiens
tactggattctgggccagtgatgttgttaagggtgagccgacggagcctggagccagtcctcctctgtgcagtcctgagtgaatgtggggccacagccagtgtgtgt

SEQ ID NO: 717047 - DNA, 1721 bp, Homo sapiens
  misc_feature (1041)..(1041): n is a, c, g, or t
  misc_feature (1305)..(1305): n is a, c, g, or t
  misc_feature (1448)..(1448): n is a, c, g, or t
tggaaacggagtctcactctgtcgcccaggtgggagtgcaggggggcaatctcggctcacggcaagctccgcctcctccgcgggtttcacgccattctccgtggcctcagcctccgtggaggtggcgtgggaacgtgcaggcaccgtgccaccagtgcgcagctaatttttgggtattttatagtaaagaagcggggttttcaccagtgttgggcacaggaagtggtctcagatctcctggatgtttggtgagatctggcgccgctcttgggcctccccaaaggtggcggggagattacagggcggtgagatgtcaccggggctcgggcctttttttatttttttttataaaggggatttctttattaactccctgagagagtttggcgggcgtctcaagcgctccacaaagagtgggcgcgctccaggtgtagtgtgtaaccacacgggggaagtgtgcgagattttattcttatgcgcacaggcgcgcagagaaaggtgtacacacacttttgtgtgtggagcgggggtgtgggcgaacaaatgagacacccgcgggggaggttatacagagagagagacaagcgctccccgcggggtgtatatcacaggggggtgggcgcgctctaaaactacacatacagcaggggggggggaaatagtgttaggagagtgtgccgccccagtggtggtgtgcgcccacaaaaaacctccgttgtgtgtaagcgcggcccccaagatagaagagaccagagagaactcacgaggagtgttgagaccatgtgggggtgttcatcccatcccccccaatgtggttgcgagaacggcggggcgagaaattctaaaccaccacacaaaaagggcgccaaacaaacaccactgctcttttaaacaacacgtgggggcgaaaaaaggtcggcccccccaattttggtgcgtgcccaatcggggatggcccaccccccacaaagattggtgttgtgcgcaggggcggctccacatatcgtggggaggcgggaaccataacaacaagcgcagccnaattatgaggcggcggcgcggggcgagagagcttcaaacaaaccatacacaattaaacgcgggcgggcggcccacgcggtgggtggtggcggggcgtcaatatacgtgcctgtagagtagtgcccacaccaccctatcggtgtggcgagacgcgagcaacacaggcgcgcgaggaagaaacaacaattttggaggcgcccgatgtgttgcggcgaaccccatcttcgtggggacacccatgcgggagaaaaccccctctttttntaccaaaaccaatctacaatactatcggtcgggtggtgggcgagaacaaaaccacacgacaaataccaagaccagacacaccacgaagacacaactagagcaagtagaagtaactgtcagaaagcaataacaaattgcgcgtntcatgtttctggcgggtcggaacaaaatacgtagaggagcatgtagcaatcggtcatgacacaccaattgagaggaggagagctgggccctagtggttttaagggatgtgcgtgtctcgtgatctatcgtatcgttgcgtcgtgccaagagagaaaagatagacagaaataagacgacaggagaacgagaatgatgagtagaaagtaaatgaagttagtagatgaataagatacaatgacgatgaagtgaaacaagaaagaaaagagaggaga

SEQ ID NO: 717048 - DNA, 179 bp, Homo sapiens
  misc_feature (160)..(160): n is a, c, g, or t
  misc_feature (177)..(177): n is a, c, g, or t
cgagtctgtctgtattccaagaactctctgacgtcaggtcgtaacatggtaggatgattacaatcctctgaaggtacctttctaaagcggccctccgtttttcaagaaattctgccagaagaaagaatcttccttcccaactttcacttttgtcatcccntatgaggctcttctccngg

SEQ ID NO: 717049 - DNA, 193 bp, Homo sapiens
gtagtctcagtacagatgagctagtgggaggtctggggcgctccagagccccatagaaatttcggagtctgcctctatgagcccttggaagtgacgtattcgccagggttctctcgagacacagaactgataagatgtgtgtgtgtgtggagagcgaggaaggaatagatttatgtgaagaaatgggcttagg

SEQ ID NO: 717050 - DNA, 513 bp, Homo sapiens
  misc_feature (397)..(397): n is a, c, g, or t
  misc_feature (433)..(433): n is a, c, g, or t
  misc_feature (445)..(445): n is a, c, g, or t
  misc_feature (468)..(468): n is a, c, g, or t
  misc_feature (494)..(494): n is a, c, g, or t
gtcaaaagtctttagtggagcctctcctggctcagggagaagacctggaaagggagggggattcactacaggacgtagattgtccccacaagagacagctttacagggccatgtcagaatatgtcaaagaaatatatttttgggtaaagtacttctgtttctttcagggcctgcaatctgtcatgtgatgctatactagagtcaggttgaaatttggtgtcttattgctacaaagtctgttttgtcagtcttgggatctcttttaatgctaacgctggtcagctgtgcctggaattccatagggagaagggcattaattgaggcaagttcgaccccacatttcccatttatgggctttgaactagttttttcaggtttaactttgggaatgcccttngcccaagaggcagggagtcccatttcagtttgggtnggggggcttagnatttattttttcggtttataccntgctttactgatgtttggcccacggngcaatttcatttcattttt

SEQ ID NO: 717051 - DNA, 226 bp, Homo sapiens
ttttcctttttgggccccttcccccccccaaaaacccctttgggggggggggggtttctcccccccctggtggggggttggggttttttcccccccccccccccaattttgggttttttaattttttggttttccaaacccttaaaaccggggccccctttgggggttttttttttttttggaaatttttttttccccccccttttttttaaaaagggggttttta

SEQ ID NO: 717052 - DNA, 105 bp, Homo sapiens
ctgatctcgaggatcccccttcgatacgggatactcctatttattaccttcacaagttttttatctatcgcaggatttttctgagccttttaccactccagccta

SEQ ID NO: 717053 - DNA, 606 bp, Homo sapiens
caatagtttccgcctaattttcaccgccgatccctgtggtacacacatttagcaaaccgcctatggtcatcgccggacattttataattctccccccggcttacaacctccattacaagttggctacaacaaaaatctgatatctgataccactctacaatggcgacttaagatacctcttcttcaaaggacgctactaattcttcgtccccaccaaattgtgctttttgtggtaacttctttagcgcaaaccgttcgctaactgctgcctttcccccccactttttaacctttgtggaaaaaactctttctgtgtagttgaaaacagcttctgcctgtgtcaaaaatatcaccgtgtcctaattttgacagtgagctcgacatattttgttcgacacggccctaatatactctccttgtaccaaaattttaaccacccaccacacatgtggggctcaacttcatcacccccaccaccacattatcaaaacacttaacccctcttcgttcaccccgcagcaacacccccctcacatggtcttgccccttccccccttttcctccttttcccccacccccaacattcccgggttttctttaaaaaaa

SEQ ID NO: 717054 - DNA, 157 bp, Homo sapiens
ggagggagattagtatagagaggtagagatatctagcgtgatagtgagttcactggataagtggagttggcttggcatgattgtgaggagtacgagtcaggtagtcagtattaggaggggggttgtcagggggtcggaggaaagggttggggaacag

SEQ ID NO: 717055 - DNA, 1212 bp, Homo sapiens
  misc_feature (27)..(27): n is a, c, g, or t
  misc_feature (277)..(277): n is a, c, g, or t
  misc_feature (312)..(312): n is a, c, g, or t
  misc_feature (319)..(319): n is a, c, g, or t
  misc_feature (423)..(423): n is a, c, g, or t
  misc_feature (449)..(449): n is a, c, g, or t
tgttctgggttctcgtcgtatgttgantcctcctcgctgcctattgcatttggcacgctcgtgctagctagattaggtcgagcgtcacacttgcctcgaggtcgtaatctgcgctttgaaggcttgtttagtttagtatggttgatgagtctcgctcggtcgtcctcgtctcgcgtgtgttcgtcgttcggtcgtagtgctcggtcgctctccgccggttggtggctctgtgttgtctggctctgtgtctggtgtacgctagctagctaggtaaggngtaggtgtgactgtctcgtctggcatcatagcatnacatgtnttctctacgcgaatattcccgccccggcagtgtcgtagggagatggataccccggggttgctccgcgcttgtctccgtcctggatgttaagctcccgcccctgnccccccgcaggtctcgtgtttagtcncgcccctcctcattagttttggccgtcgggtttgcttctcccccccaaccgccgcgtctggtctcctgggctccgcccgtagggtcctttgtgggctgggggaatcgccgcgccgcgcaaatacttgtttggtgtgccgaaacaccttatcaccaaggtttctcgctgtcggccgtggccccggaccaaaattcccccgcgggttcctcgcccccctattcccgccggggtgggtggggggcaaaaccacccgtgatgcccgccggcccccttgggggaaccagaaggtgggcgcggctacccagggcagaagagttctacaatgcaccacgcctcggcgcgcaatgagtccagacaccccctgcgcgtctgctgcagttagcagaacaaccaaaagtgctgcccgggcgcccaactgcgctgaaccaccgggaaagcacacgcaccatgtgggggagtgcgagagcacagctggtgttgccccaggagctcggcggatattattataagccacgccgcgtgagcaaacaccaccggagaaccccacctcttctttgtgacaaagaccaacaaggtaatgccccggccggcgccacgaagcggcgccaatagtagccccagcatagctacgaggagcgggtgatggcacggagcgaattgccatgaaacgcccggaggggggagagggtcgccacaccacgggggaccccccccccccttttccgggggcacagggccaaaccccctttttctaaaaaaaaaa

SEQ ID NO: 717056 - DNA, 1206 bp, Homo sapiens
agcgggtggcggtggctggcagcggcggttaggggatgtaacggtcgcccgcctccgtgcgtgacgatgtgcggccgtaggggtccggaggctatgcgcggaacgatgcaggtgagaagctgccctctgtcatggcgggagttccggcgcggaggggccagtcctccccgttcccccgcccccaccaatctgcctaccggggcggacgcgactctcgacggcctcccgaggagacggtgcagaacccggggtgtcactcgagaaggtgctttggcaatcacagcccagaacagcagtgggcctaaccttgtgatcccccggccaccagtggccattgttggcctaccttgggccagggctgttgtggtgggtgattttgtgggacccccaaggagaacaaagcaagctagcagcatctttgaaacacccggccagggaaagtcctcctccagtggctctgggccttttcttccccctgattgggaagaagttacattaggtgcacacggcgcgagcaaatgggggcacttagggcccttgctggtgccgcacaatcctatgggcatgctggcagcgaacgcacagaaatccagtgtggcgcgaagacttgcttaggtgccaagcaaatgttaatttggtgttgggcctttgttgtttgcaccctatcctttaacgcccgaaataatttgacagtggcaacacttcggttgttccccagtgggggcttacccgcaaccatttgaccaattggggttgcctccaagacggtactgggcgacacttgggacagcaacgagacaccattcgtgtaaagtgggtacctatccaaagcaaaggggacaaatcctttggcatcagaagctcactatttggcccccctttcataccactttttcttcaaagaaaggtgaaccaagccacaggacgaaattatttggggtcacacgtgggttatggggaaaaacccaggcaccgacgtggtatgaagggaattgcaatggactacctttggtgaaacaagtattcctcccgcaactgtgtgacaccaacacatggggtgacaacgaaagaaaacagattgagggccacgcagtggttaatgttggaagctctggagggaaattaccagtgggtagtcgaagcctatcaacgagagaaacacaaatatctcacaagcgagggggagatggacactagtccggttcg

SEQ ID NO: 717057 - DNA, 227 bp, Homo sapiens
aacttgtcggctatgcaacatagattgtggatatcgagtataagagatcaggtgcgtccattcgatgttgtgtatggctatcatttgtctggaggttagttggattagtcatggctgggtggtgactggtgggttgttgatgagatatttggaggtggggatcaatagagggggaaatagaatgatcagtactgcggcgggtaggcctaatttctctcggaccaatg

SEQ ID NO: 717058 - DNA, 160 bp, Homo sapiens
atttgggaagacaaatggccaataaatatgaaaagaggctatttttactgaggttttccaattaaaaccatagcaatacgccatattataacccagcagtttcatttcaagagatactgttgcaggccattgtggctcatgcctataatcccaacacttc

SEQ ID NO: 717059 - DNA, 386 bp, Homo sapiens
aaaaggggattttaaatttgattttcctccagccccccccccggggtttaattttttttgaaaaaaatcttttttgggcccgggcccctttttttattttttaagcccccccccacctggggggcagtggtggggaaaaacccccggccttaaattttttttgctttcctttctgggaccccaagagagggccaccaaaaggggggggtttttcccccccccccgcctttaggaaaaaagggggttttttttttttccccccccctttttcccccgcccccagggatgggccccttttggggggggcaggggggccccaattgggccccccttaaaaagtaaaaacccccaacaaaatttttttttaatttaatttttggtttcca

SEQ ID NO: 717060 - DNA, 963 bp, Homo sapiens
agaatgatgaccgaacagtgaaagaatgtgccaaggagacaagaagtgtgtgctccggccccagctgtcgtgaagaagcaggaggctagatgagaatgtggtgaactccccatgttatgaggaaatagggcgctaagaacttttggcattgtgacagtgatcatccagtcctcaggaagagacctcagccgctttgtgacaattggcacccgctaatagtcatggttgcagcgtgccagagatgcctaattgctcttatagatggcggtcttgaaatatgtagtccctccttgacgtattatagaccatggtgtcatcccagggaccccttggaaccgtcgcaaaaaccagggcataacttcattctagccttaaagactggtgcccatcgaagtaccatgaccatagaggactaagagtcacatgacggacagaaaggcaaggacgacgtgtttgggccccccgggtgcccggacgacactgacacggcttggcttggactaagaggggcgtacagtactccgaatcggacaggaatgaactcaacccgtagttccctttccgtatgcaagtgcagttttaaagccaaccggatcgatccgagcccttttggcttgaggaggaaaccgagacgcaacaagcttccagactttgcggtgggctgaatttggcagccaacggaatcgatggggaattcccacaatgcggaaggcgttgcggtatgttcctgtgcattggcccctaggcgcccttgggtgatctgctactgaaaactcgcacgggggattccgctcgtttaagcatgtccattttacttcaaaggggcgacaaacagggtcggaatgaacatgggaggatccggtacttacggatgcccagcaagggaaatgaacacttgacgaaccaatccttgggtcagagccgtatcaggcaaccaaagtgattgaataccctcgcggaaag

SEQ ID NO: 717061 - DNA, 1092 bp, Homo sapiens
gaagtctccatcttatcgttagaacacctcggcgcaaccaagacacagcgaatagggggagctgtgttcgcgccctttgaacacgcccacaaatgttgcgtgtttgtcatcagcacaacactgtcgtcgggaagaagcccgctgtcgtgttcgaatattcttgtctcgtggatgatagctccgtctgtgttgtagaaaccccccccccccgcggctgaggagaagctctcctcttcgtggaagagccctcttatttgtagagcacactcgtcacctgtcttttatgagaccgcgctctttctcttattaggggggcaagacaccacgctgtttctcttcggtgaagtcgcagatgtaggtcactccccccccatcctcgcgacagaatgtgtgtccccctcctggggcacagagacacccccacacactcgagaaacttcttttcccccgagagagaaaaacctcccagcgctttctcaacatataacagagcacgagaatcgtccccccacacagctgtgtgccacatcgagggccaacagttggtgtggagaacacacgcgagagagcttatttcttcacacgcgccacgggagtgtctcacaaaagagaagaggctcacacagagaagaggacccctcttttcgaggcgaggttcacagaggagccacgacaccaccgagataaaacactttctttacacacaacctttgccaaagccacgccacactcactcgctgagtggtgtctctctcctcgctgggagaaaacactcgcgcgagacccttgttccaactctcccctctctctcgagtctctagtgagaatacacccagtgtgcacctctttcttctggccccccagacttttagtcgttctgcagataaagagagaactcgaggcatgcatttacaatctttgtttgcaatgttcacctccatggccattcagcattagtgaacaccagaattaatttctcacaatttctgcgtcgctgggggggggatcctatgggagtatgtaaaaaattttaaagagaaaatttcaaaaaaaagagaattttttccaaataacaattttcccgtcccttta

SEQ ID NO: 717062 - DNA, 161 bp, Homo sapiens
catgcacaagctatatgaaatgcatagctttgattcacctaaagatacagtttccttctttgtaacactccagatttaggatgctggcaaaggcagtgctggcacagtatttactgcaccatggccctgctattctactttcggcttccagaagtacgccc

SEQ ID NO: 717063 - DNA, 621 bp, Homo sapiens
atcgagctgcgaccctttccaacattcatttctcgagacgtgtctatataggcacaatattcaacataataataagatctataaaattacatacatatgagacatgtacaaacataattatgaaaataaacagtagatcaactttacaatcattataatagcatcacacaaattagtgttcacaagaaataaaactgtcaacatgattccctttcccctacttctcaaatgtcatctgaattactttttatgataacttgaaagaaaatactgtcatcttcctatacaattaaccaatttttataataactcataataaaatattttacttttttaactatagaaaagatacataattccacttatttaagtttatgattcctaaatcatacaattcgtatcaattcatcagttgagtgtaattaaaggtactgcagttactgaaggttaatttaacaaacctgagtcaaacattcattcaaatgccttttttaaaaacataaaacatgaacaagatgttttgatagaagcatatataatagactcaaggtaccctcccctaataaatacattataaataactcaatggttgggagtacagcacttcatatgaatccattt

SEQ ID NO: 717064 - DNA, 5580 bp, Homo sapiens
  misc_feature (136)..(136): n is a, c, g, or t
gacctcagggaattgatggagaaccaggtgttcctggtcaacctggtgctccaggacctcctggacatccgtcccacccaggacccgatggcttgagcaggccgttttcagctcaaatggctgggttggatgaaanatctggacttgggagtcaagtaggactaatgcctggctctgtgggtcctgttggcccaaggggaccacagggtttacaaggacagcaaggtggtgcaggacctacaggacctcctggtgaacctggtgatcctggaccaatgggtccgattggttcacgtggaccagagggccctcctggtaaacctggggaagatggtgaacctggcagaaatggaaatcctggtgaagtgggatttgcaggatctccgggagctcgtggatttcctggggctcctggtcttccaggtctgaagggtcaccgaggacacaaaggtcttgaaggccctaaaggtgaagttggagcacctggttccaagggtgaagctggccccactggtccaatgggtgccatgggtcctctgggtccgaggggaatgccaggagagagagggagacttgggccacagggtgctcctggacaacgaggtgcacatggtatgcctggaaaacctggaccaatgggtcctcttgggataccaggctcttctggttttccaggaaatcctggaatgaagggagaagcaggtcctacaggggcgcgaggccctgaaggtcctcaggggcagagaggtgaaactgggcccccaggtccagttggctctccaggtcttcctggtgcaataggaactgatggtactcctggtcccaaaggcccaacgggctctccgggtacctctggtcctcctggctcagcagggcctcctggatctccaggacctcagggtagcactggtcctcaggggaattcgggccttccgggtgatccaggtttcaaaggagaagctggcccaaaaggggaaccagggccacatggtattcagggtccgataggcccacccggtgaagaaggcaaaagaggtcccagaggtgacccaggaacacttggtcctccagggccagtgggagaaaggggtgctcctggcaatcgtggttttccaggctctgatggtttacctgggccaaagggtgctcaaggagaacggggtcctgtaggttcttcaggacccaaaggaagccagggggatccaggacgtccaggggaacctgggcttccaggtgctcggggtttgacaggaaatcctggtgttcaaggtcctgaaggaaaacttggacctttgggtgcgccaggggaagatggccgtccaggtcctccaggctccataggaatcaaagggcagcccgggaccatgggccttccaggccccaaaggtagcaatggtgaccctgggaaacctggagaagcaggaaatcctggagttcctgggcaaaggggagctcctggaaaagatggtaaagttggtccttatggtcctcctgggccgccgggtctacgtggtgaaagaggagaacaaggacctccagggcccacaggttttcaggggcatcctggtcctccaggtcctcctggagaaggtggaaaaccaggtgatcaaggtgttcctggaggtcccggagcagttggcccgttaggacctagaggagaacgaggaaatcctggggaaagaggagaacctgggataactggactccctggtgagaagggaatggctggaggacatggtcctgatggcccaaaaggcagtccaggtccatctgggacccctggagatacaggcccaccaggtcttcaaggtatgccgggagaaagaggaattgcaggaactcctggccccaagggtgacagaggtggcataggagaaaaaggtgctgaaggcacagctggaaatgatggtgcaggaggtcttccaggtcctttgggccctccaggtccggcaggcctactgggagaaaagggtgaacctggtcctcgaggtttagttggtcctcctggctcccggggcaatcctggttctcgaggtgaaaatgggccaactggagctgttggttttgccggaccccaggggtctgacggacagcctggagtaaaaggtgaacctggagagccaggacagaagggagatgctggttctcctggaccacaaggtttagcaggatcccctggccctcatggtcctaatggtgttcctggactaaaaggtggtcgaggaacccaaggtccgcctggtgctacaggatttcctggttctgcgggcagagttggacctccaggccctgctggagctccaggacctgcgggacccctaggggaacccgggaaggagggacctccaggtcctcgtggggaccctggctctcatgggcgtgtgggagatcgaggaccagctggcccccctggtggcccaggagacaaaggggacccaggagaagatgggcaacctggtccagatggcccccctggtccagctggaacgaccgggcagagaggaattgttggcatgcctgggcaacgtggagagagaggcatgcccggcctaccaggcccagcgggaacaccaggaaaagtaggaccaactggtgcaacaggagataaaggtccacctggacctgtggggcccccaggctccaatggtcctgtaggggaacctggaccagaaggtccagctggcaatgatggtaccccaggacgggatggtgctgttggagaacgtggtgatcgtggagaccctgggcctgcaggtctgccaggctctcagggtgcccctggaactcctggccctgtgggtgctccaggagatgcaggacaaagaggagatccgggttctcggggtcctataggacacctggtcgagctgggaaacgtggattacctggaccccaaggacctcgtggtgacaaaggtgatcatggagaccgaggcgacagaggtcagaagggccacagaggctttactggtcttcagggtcttcctggccctcctggtccaaatggtgaacaaggaagtgctggaatccctggaccatttggcccaagaggtcctccaggcccagttggtccttcaggtaaagaaggaaaccctgggccacttgggccaattggacctccaggtgtacgaggcagtgtaggagaagcaggacctgagggccctcctggtgagcctggcccacctggccctccgggtccccctggccaccttacagctgctcttggggatatcatggggcactatgatgaaagcatgccagatccacttcctgagtttactgaagatcaggcggctcctgatgacaaaaacaaaacggacccaggggttcatgctaccctgaagtcactcagtagtcagattgaaaccatgcgcagccccgatggctcgaaaaagcacccagcccgcacgtgtgatgacctaaagctttgccattccgcaaagcagagtggtgaatactggattgatcctaaccaaggatctgttgaagatgcaatcaaagtttactgcaacatggaaacaggagaaacatgtatttcagcaaacccatccagtgtaccacgtaaaacctggtgggccagtaaatctcctgacaataaacctgtttggtatggtcttgatatgaacagagggtctcagttcgcttatggagaccaccaatcacctaatacagccattactcagatgacttttttgcgccttttatcaaaagaagcctcccagaacatcacttacatctgtaaaaacagtgtaggatacatggacgatcaagctaagaacctcaaaaaagctgtggttctcaaaggggcaaatgacttagatatcaaagcagagggaaatattagattccggtatatcgttcttcaagacacttgctctaagcggaatggaaatgtgggcaagactgtctttgaatatagaacacagaatgtggcacgcttgcccatcatagatcttgctcctgtggatgttggcggcacagaccaggaattcggcgttgaaattgggccagtttgttttgtgtaaagtaagccaagacacatcgacaatgagcaccaccatcaatgaccaccgccattcacaagaactttgactgtttgaagttgatcctgagactcttgaagtaatggctgatcctgcatcagcattgtatatatggtcttaagtgcctggcctccttatccttcagaatatttattttacttacaatcctcaagttttaattgattttaaatatttttcaatacaacagtttaggtttaagatgaccaatgacaatgaccacctttgcagaaagtaaactgattgaataaataaatctccgttttcttcaatttatttcagtgtaatgaaaaagttgcttagtatttatgaggaaattcttcttcctggcaggtagcttaaagagtggggtatatagagccacaacacatgtttattttgcttggctgcagttgaaaaatagaaattagtgcccttttgtgacctctcattccaagattgtcaattaaaaatgagtttaaaatgtttaacttgtgatcgagacctacatgcatgtcttgatattgtgtaactataatagagactctttaaggagaatcttaaaaaaaaaaaaacgtttctcactgtcttaaatagaatttttaaatagtatatattcagtggcattttggagaacaaagtgaatttacttcgacttcttaaatttttgtaaaagactataagtttagacatctttctcattcaaatttaaagatatctttctcctcttgatcaatctatcaatattgatagaagtcacactagtatataccatttaatacatttacactttcttatttaagaagatattgaatgcaaaataattgacatatagaactttacaaacatatgtccaaggactctaaattgagactcttccacatgtacaatctcatcatcctgaagcctataatgaagaaaaagatctagaaactgagttgtggagctgactctaatcaaatgtgatgattggaattagaccatttggcctttgaactttcataggaaaaatgacccaacatttcttagcatgagctacctcatctctagaagctgggatggacttactattcttgtttatattttagatactgaaaggtgctatgcttctgttattattccaagactggagataggcagggctaaaaaggtattattatttttcctttaatgatggtgctaaaattcttcctataaaattccttaaaaataaagatggtttaatcactaccattgtgaaaacataactgttagacttcccgtttctgaaagaaagagcatcgttccaatgcttgttcactgttcctctgtcatactgtatctggaatgctttgtaatacttgcatgcttcttagaccagaacatgtaggtccccttgtgtctcaatactttttttttcttaattgcatttgttggctctattttaatttttttcttttaaaataaacagctgggaccatcccaaaagacaagccatgcatacaactttggtcatgtatctctgcaaagcatcaaattaaatgcacgcttttgtcatgtca

SEQ ID NO: 717065 - DNA, 477 bp, Homo sapiens
gcaagagatgccagctatgtaacctgctacagaaggttacaagcagtcagtcaggctttggaacattcactgcggggcttaggaaccacaaagcttgtacagtgcttcatgagtacgttcaaagcaggcgaacttcagcgagggtgtatggtatctgtcgtcatccagagaggaggacaacgcccctgtagaaggcgttgaggccttctgccttatacatttggggagctgcgtccctcagagtgtgggcataacgctggatgggtgtgaatgcggaaccttagcggcttcgcagtaggagccagggcaatgtcggcaaagaattcagcgctggcagaggcagccaaatatagtgatgtgcgccagagataagtagttcgtcctctccaagcatgtggctatacaagactttagaagacttcataaaagccaaacttgcggagtccctgcagggagtagcgaaggaaagtcggagcc

SEQ ID NO: 717066 - DNA, 3289 bp, Homo sapiens
cgttcggatacaattatgactactcttatgcagtatgattttgagaaacagagaacttctttttcatactgaaaaacctgtaaagctgtacccaacttattgtaaattccttgggtacagttttaccctggatagtttctgattttagtttgtcctcaacattagggtccagatggcccccctggtccagctggaacgaccgggcagagaggaattgttggcatgcctgggcaacgtggagagagaggcatgcccggcctaccaggcccagcgggaacaccaggaaaagtaggaccaactggtgcaacaggagataaaggtccacctggacctgtggggcccccaggctccaatggtcctgtaggggaacctggaccagaaggtccagctggcaatgatggtaccccaggacgggatggtgctgttggagaacgtggtgatcgtggagaccctgggcctgcaggtctgccaggctctcagggtgcccctggaactcctggccctgtgggtgctccaggagatgcaggacaaagaggagatccgggttctcggggtcctataggacacctggtcgagctgggaaacgtggattacctggaccccaaggacctcgtggtgacaaaggtgatcatggagaccgaggcgacagaggtcagaagggccacagaggctttactggtcttcagggtcttcctggccctcctggtccaaatggtgaacaaggaagtgctggaatccctggaccatttggcccaagaggtcctccaggcccagttggtccttcaggtaaagaaggaaaccctgggccacttgggccaattggacctccaggtgtacgaggcagtgtaggagaagcaggacctgagggccctcctggtgagcctggcccacctggccctccgggtccccctggccaccttacagctgctcttggggatatcatggggcactatgatgaaagcatgccagatccacttcctgagtttactgaagatcaggcggctcctgatgacaaaaacaaaacggacccaggggttcatgctaccctgaagtcactcagtagtcagattgaaaccatgcgcagccccgatggctcgaaaaagcacccagcccgcacgtgtgatgacctaaagctttgccattccgcaaagcagagtggtgaatactggattgatcctaaccaaggatctgttgaagatgcaatcaaagtttactgcaacatggaaacaggagaaacatgtatttcagcaaacccatccagtgtaccacgtaaaacctggtgggccagtaaatctcctgacaataaacctgtttggtatggtcttgatatgaacagagggtctcagttcgcttatggagaccaccaatcacctaatacagccattactcagatgacttttttgcgccttttatcaaaagaagcctcccagaacatcacttacatctgtaaaaacagtgtaggatacatggacgatcaagctaagaacctcaaaaaagctgtggttctcaaaggggcaaatgacttagatatcaaagcagagggaaatattagattccggtatatcgttcttcaagacacttgctctaagcggaatggaaatgtgggcaagactgtctttgaatatagaacacagaatgtggcacgcttgcccatcatagatcttgctcctgtggatgttggcggcacagaccaggaattcggcgttgaaattgggccagtttgttttgtgtaaagtaagccaagacacatcgacaatgagcaccaccatcaatgaccaccgccattcacaagaactttgactgtttgaagttgatcctgagactcttgaagtaatggctgatcctgcatcagcattgtatatatggtcttaagtgcctggcctccttatccttcagaatatttattttacttacaatcctcaagttttaattgattttaaatatttttcaatacaacagtttaggtttaagatgaccaatgacaatgaccacctttgcagaaagtaaactgattgaataaataaatctccgttttcttcaatttatttcagtgtaatgaaaaagttgcttagtatttatgaggaaattcttcttcctggcaggtagcttaaagagtggggtatatagagccacaacacatgtttattttgcttggctgcagttgaaaaatagaaattagtgcccttttgtgacctctcattccaagattgtcaattaaaaatgagtttaaaatgtttaacttgtgatcgagacctacatgcatgtcttgatattgtgtaactataatagagactctttaaggagaatcttaaaaaaaaaaaaacgtttctcactgtcttaaatagaatttttaaatagtatatattcagtggcattttggagaacaaagtgaatttacttcgacttcttaaatttttgtaaaagactataagtttagacatctttctcattcaaatttaaagatatctttctcctcttgatcaatctatcaatattgatagaagtcacactagtatataccatttaatacatttacactttcttatttaagaagatattgaatgcaaaataattgacatatagaactttacaaacatatgtccaaggactctaaattgagactcttccacatgtacaatctcatcatcctgaagcctataatgaagaaaaagatctagaaactgagttgtggagctgactctaatcaaatgtgatgattggaattagaccatttggcctttgaactttcataggaaaaatgacccaacatttcttagcatgagctacctcatctctagaagctgggatggacttactattcttgtttatattttagatactgaaaggtgctatgcttctgttattattccaagactggagataggcagggctaaaaaggtattattatttttcctttaatgatggtgctaaaattcttcctataaaattccttaaaaataaagatggtttaatcactaccattgtgaaaacataactgttagacttcccgtttctgaaagaaagagcatcgttccaatgcttgttcactgttcctctgtcatactgtatctggaatgctttgtaatacttgcatgcttcttagaccagaacatgtaggtccccttgtgtctcaatactttttttttcttaattgcatttgttggctctattttaatttttttcttttaaaataaacagctgggaccatcccaaaagacaagccatgcatacaactttggtcatgtatctctgcaaagcatcaaattaaatgcacgcttttgtcatgtca

SEQ ID NO: 717067 - DNA, 265 bp, Homo sapiens
tcgttgctgtgtgggagacaacatctagggagaagtgctacaggtagaccagtgctgccgtgggagtgtataacggatcgtgtcgcaggagagcacagcccagcgttggggacgggagcgctggcgcccgacgtcggaagcatacaggtatactatgcaagtgtattctgccacaacaaccactgtctttgttaccttattttgaacaagaatatatccatcctgcctaaccctgaggtatatggagcaccgccagttgtcctgg

SEQ ID NO: 717068 - DNA, 6202 bp, Homo sapiens
  misc_feature (136)..(136): n is a, c, g, or t
gacctcagggaattgatggagaaccaggtgttcctggtcaacctggtgctccaggacctcctggacatccgtcccacccaggacccgatggcttgagcaggccgttttcagctcaaatggctgggttggatgaaanatctggacttgggagtcaagtaggactaatgcctggctctgtgggtcctgttggcccaaggggaccacagggtttacaaggacagcaaggtggtgcaggacctacaggacctcctggtgaacctggtgatcctggaccaatgggtccgattggttcacgtggaccagagggccctcctggtaaacctggggaagatggtgaacctggcagaaatggaaatcctggtgaagtgggatttgcaggatctccgggagctcgtggatttcctggggctcctggtcttccaggtctgaagggtcaccgaggacacaaaggtcttgaaggccctaaaggtgaagttggagcacctggttccaagggtgaagctggccccactggtccaatgggtgccatgggtcctctgggtccgaggggaatgccaggagagagagggagacttgggccacagggtgctcctggacaacgaggtgcacatggtatgcctggaaaacctggaccaatgggtcctcttgggataccaggctcttctggttttccaggaaatcctggaatgaagggagaagcaggtcctacaggggcgcgaggccctgaaggtcctcaggggcagagaggtgaaactgggcccccaggtccagttggctctccaggtcttcctggtgcaataggaactgatggtactcctggtcccaaaggcccaacgggctctccgggtacctctggtcctcctggctcagcagggcctcctggatctccaggacctcagggtagcactggtcctcaggggaattcgggccttccgggtgatccaggtttcaaaggagaagctggcccaaaaggggaaccagggccacatggtattcagggtccgataggcccacccggtgaagaaggcaaaagaggtcccagaggtgacccaggaacacttggtcctccagggccagtgggagaaaggggtgctcctggcaatcgtggttttccaggctctgatggtttacctgggccaaagggtgctcaaggagaacggggtcctgtaggttcttcaggacccaaaggaagccagggggatccaggacgtccaggggaacctgggcttccaggtgctcggggtttgacaggaaatcctggtgttcaaggtcctgaaggaaaacttggacctttgggtgcgccaggggaagatggccgtccaggtcctccaggctccataggaatcaaagggcagcccgggaccatgggccttccaggccccaaaggtagcaatggtgaccctgggaaacctggagaagcaggaaatcctggagttcctgggcaaaggggagctcctggaaaagatggtaaagttggtccttatggtcctcctgggccgccgggtctacgtggtgaaagaggagaacaaggacctccagggcccacaggttttcaggggcatcctggtcctccaggtcctcctggagaaggtggaaaaccaggtgatcaaggtgttcctggaggtcccggagcagttggcccgttaggacctagaggagaacgaggaaatcctggggaaagaggagaacctgggataactggactccctggtgagaagggaatggctggaggacatggtcctgatggcccaaaaggcagtccaggtccatctgggacccctggagatacaggcccaccaggtcttcaaggtatgccgggagaaagaggaattgcaggaactcctggccccaagggtgacagaggtggcataggagaaaaaggtgctgaaggcacagctggaaatgatggtgcaggaggtcttccaggtcctttgggccctccaggtccggcaggcctactgggagaaaagggtgaacctggtcctcgaggtttagttggtcctcctggctcccggggcaatcctggttctcgaggtgaaaatgggccaactggagctgttggttttgccggaccccaggggtctgacggacagcctggagtaaaaggtgaacctggagagccaggacagaagggagatgctggttctcctggaccacaaggtttagcaggatcccctggccctcatggtcctaatggtgttcctggactaaaaggtggtcgaggaacccaaggtccgcctggtgctacaggatttcctggttctgcgggcagagttggacctccaggccctgctggagctccaggacctgcgggacccctaggggaacccgggaaggagggacctccaggtcctcgtggggaccctggctctcatgggcgtgtgggagatcgaggaccagctggcccccctggtggcccaggagacaaaggggacccaggagaagatgggcaacctggtccagatggcccccctggtccagctggaacgaccgggcagagaggaattgttggcatgcctgggcaacgtggagagagaggcatgcccggcctaccaggcccagcgggaacaccaggaaaagtaggaccaactggtgcaacaggagataaaggtccacctggacctgtggggcccccaggctccaatggtcctgtaggggaacctggaccagaaggtccagctggcaatgatggtaccccaggacgggatggtgctgttggagaacgtggtgatcgtggagaccctgggcctgcaggtctgccaggctctcagggtgcccctggaactcctggccctgtgggtgctccaggagatgcaggacaaagaggagatccgggttctcggggtcctataggacacctggtcgagctgggaaacgtggattacctggaccccaaggacctcgtggtgacaaaggtgatcatggagaccgaggcgacagaggtcagaagggccacagaggctttactggtcttcagggtcttcctggccctcctggtccaaatggtgaacaaggaagtgctggaatccctggaccatttggcccaagaggtcctccaggcccagttggtccttcaggtaaagaaggaaaccctgggccacttgggccaattggacctccaggtgtacgaggcagtgtaggagaagcaggacctgagggccctcctggtgagcctggcccacctggccctccgggtccccctggccaccttacagctgctcttggggatatcatggggcactatgatgaaagcatgccagatccacttcctgagtttactgaagatcaggcggctcctgatgacaaaaacaaaacggacccaggggttcatgctaccctgaagtcactcagtagtcagattgaaaccatgcgcagccccgatggctcgaaaaagcacccagcccgcacgtgtgatgacctaaagctttgccattccgcaaagcagagtggtgaatactggattgatcctaaccaaggatctgttgaagatgcaatcaaagtttactgcaacatggaaacaggagaaacatgtatttcagcaaacccatccagtgtaccacgtaaaacctggtgggccagtaaatctcctgacaataaacctgtttggtatggtcttgatatgaacagagggtctcagttcgcttatggagaccaccaatcacctaatacagccattactcagatgacttttttgcgccttttatcaaaagaagcctcccagaacatcacttacatctgtaaaaacagtgtaggatacatggacgatcaagctaagaacctcaaaaaagctgtggttctcaaaggggcaaatgacttagatatcaaagcagagggaaatattagattccggtatatcgttcttcaagacacttgctctaagcggaatggaaatgtgggcaagactgtctttgaatatagaacacagaatgtggcacgcttgcccatcatagatcttgctcctgtggatgttggcggcacagaccaggaattcggcgttgaaattgggccagtttgttttgtgtaaagtaagccaagacacatcgacaatgagcaccaccatcaatgaccaccgccattcacaagaactttgactgtttgaagttgatcctgagactcttgaagtaatggctgatcctgcatcagcattgtatatatggtcttaagtgcctggcctccttatccttcagaatatttattttacttacaatcctcaagttttaattgattttaaatatttttcaatacaacagtttaggtttaagatgaccaatgacaatgaccacctttgcagaaagtaaactgattgaataaataaatctccgttttcttcaatttatttcagtgtaatgaaaaagttgcttagtatttatgaggaaattcttcttcctggcaggtagcttaaagagtggggtatatagagccacaacacatgtttattttgcttggctgcagttgaaaaatagaaattagtgcccttttgtgacctctcattccaagattgtcaattaaaaatgagtttaaaatgtttaacttgtgatcgagacctacatgcatgtcttgatattgtgtaactataatagagactctttaaggagaatcttaaaaaaaaaaaaacgtttctcactgtcttaaatagaatttttaaatagtatatattcagtggcattttggagaacaaagtgaatttacttcgacttcttaaatttttgtaaaagactataagtttagacatctttctcattcaaatttaaagatatctttctcctcttgatcaatctatcaatattgatagaagtcacactagtatataccatttaatacatttacactttcttatttaagaagatattgaatgcaaaataattgacatatagaactttacaaacatatgtccaaggactctaaattgagactcttccacatgtacaatctcatcatcctgaagcctataatgaagaaaaagatctagaaactgagttgtggagctgactctaatcaaatgtgatgattggaattagaccatttggcctttgaactttcataggaaaaatgacccaacatttcttagcatgagctacctcatctctagaagctgggatggacttactattcttgtttatattttagatactgaaaggtgctatgcttctgttattattccaagactggagataggcagggctaaaaaggtattattatttttcctttaatgatggtgctaaaattcttcctataaaattccttaaaaataaagatggtttaatcactaccattgtgaaaacataactgttagacttcccgtttctgaaagaaagagcatcgttccaatgcttgttcactgttcctctgtcatactgtatctggaatgctttgtaatacttgcatgcttcttagaccagaacatgtaggtccccttgtgtctcaatactttttttttcttaattgcatttgttggctctattttaatttttttcttttaaaataaacagctgggaccatcccaaaagacaagccatgcatacaactttggtcatgtatctctgcaaagcatcaaattaaatgcacgcttttgtcatgtcagtggtttttgttttgtgaaattcctttgaccatattagatctatttcatttccaatagtgaaaaggagatgtggtggtatactttgtttgccatttgtttaaaagatacaacggataccttctatcatgtatgtactggcttataaatgaaaatctatctacaacattacccacaaaggcaacatgacaccaattatcactgcctctgcccttaaaaatgtcagagtagtattattgataaaaagggcaagcaatagatttttcatgactgaataaactgtaataataaaacatatgtctcaaagtgtatcacatatgaatttagcctaattgttttcagtttcattctcaatatttagtttacaacatcattttcccctaaactggttatattttgacctgtatatcttaaatttgagtatttatatgcctaaatacatgtgtgagttttgtttgacttccaagtccaaactataagattatataagttcatatagatgaatcagaaatatgtggtaatactattaagtcacaaacactaacaatttccaactatagaaataacagttcttatttggattttgggaatgctaccaataaaagcctgcccagaccattaaaa

SEQ ID NO: 717069 - DNA, 1283 bp, Homo sapiens
agcggacacctagactcgaatcgtgactcggcaggaagatccattaccaatcatcacctgggctgctgctcttccggctcccgtccgccgacgctccggccctcgtctccgacctactggcctccggctgctgcatcttacacgagtcctgaatgctctgtgtagctgacttcctgaggctagtttcaccatgcgcacagtgagacaccgcgacgaaactagtttgaacctacacgaagctgacaccgtccagcaactgggatggaaggacccgatgaaacggaggctgtgaaggaagaggatgagttggtcgtcggcgtagtggacccgttggagcgtaatggactgtctagcttactctctttctccaagaccaggtagatcgaaaactgtatgccacgagctgaccgacagtcctgggaaagcttagataggcagcgctctcgtgtagtcatcattccgtgtgactgagagcctagcgacctaaacgtagctctgaggacaggtagcgatgcgtcgcgagtccatgaggcctagcgtatgagatcacgccatgtagagtgcaagagcgccaccatgcttgtggagagagacttccctggagatcccgtttttcgcattgtcagccgagcgcctgagcgattccgtgttcaggcagagcgccaaatgggcgatgttggtcgatttcctgtgtggctcaggaactacttaaacttcatcgagtgacacttattgcgttcctgggtggcaagcccaccggtgttaccccgtcgtgatctgggacatttgtccaccagcgcatttgtacggagtacccccctcattatagttgtgcgtcataagataccacgggcgaggccctagggtccttgcgtggtgcggttaataaaaccttcctttttgtagtacttcaaacactttgcccccaaaaacttgcgttggagaatggaatcaagcgggcaattttccttgggaatttcctcctacggggagaatcttccaataagccaagattttccaaaattctccacatgggttgcgttgggcctaacttggcgcggaaagcaggggcattttaatccttgacgacttcacgagtggaggtcactcaaccccgaaaagaccagccaagctcttaccctttgaatcccttggaaaccccacgcagaaacaatttaaattaccgcgctgcgttgacagggccttgaagtcgaattgccttgaagatggtgggccacagatttcacttcccggaactggccgtatttaaattagcaacccta

SEQ ID NO: 717070 - DNA, 187 bp, Homo sapiens
cgggcgggtggagggaagcgggcaggaacagccctggagaagtgttcaccagttgcactatcctcaccgcaacattccttatccaatcccttaccgtgacgagtagcacagcccctctatggtttagatggcagtgctgcaaagggaggcaacacgaggagcagtctgctcttgcaaatcctacacg

SEQ ID NO: 717071 - DNA, 213 bp, Homo sapiens
gactctagcggatccctgagagaccgtgttgactgaagctgaggaggctactcagtaggacagtcccaccctcacacgattctttacctttcacttcatcttacccttcattattgcagccctaagcaagcactccacctacctactcttgcacagaaacgggatcaacacaacccccgtaggaatcaccatcccattccggataaaatcacc

SEQ ID NO: 717072 - DNA, 672 bp, Homo sapiens
  misc_feature (275)..(275): n is a, c, g, or t
  misc_feature (380)..(380): n is a, c, g, or t
tcctgaggctgtgtcatgggtgcacaccctcaaccttggcaaaataaactttctaaattaactgagacttgtctcagattttctgggttcacatttgggtaaccacagggggattctgagtggagatacccctgaccttgtgacaaatatcctgtggtgctgtggtaccagcatgagctaactttatggttcaaaccaataggacaattgtgccgtgcaccccctccagagaatccctgagctccaaaaattggttgagatcaaaagtttatttngctgtacaactcctcttttgagggagttttactgtgcttccaacaggaaggcaggttttctttgcttccatgatgatggaaggcagacaactcctttatggagtntgagcttgcttccaacagggaagatgaggttttttttcccttcttctaggatggtagagagcggtctacagcctggacccatcaccagtctatgtgcaacagaggctactctgtggttttcaagaaagagtgtggctgcgcggtggtggcctcatgcctggtcatcccaacacttgtgggacaccgaggcggggaggaatcaccgaggtcaggaggtccaagaccagctgggcaacctggtggaaaccctcatctctactaaaaatacaaaatttaggtgggcatggtggtc

SEQ ID NO: 717073 - DNA, 5507 bp, Homo sapiens
  misc_feature (136)..(136): n is a, c, g, or t
gacctcagggaattgatggagaaccaggtgttcctggtcaacctggtgctccaggacctcctggacatccgtcccacccaggacccgatggcttgagcaggccgttttcagctcaaatggctgggttggatgaaanatctggacttgggagtcaagtaggactaatgcctggctctgtgggtcctgttggcccaaggggaccacagggtttacaaggacagcaaggtggtgcaggacctacaggacctcctggtgaacctggtgatcctggaccaatgggtccgattggttcacgtggaccagagggccctcctggtaaacctggggaagatggtgaacctggcagaaatggaaatcctggtgaagtgggatttgcaggatctccgggagctcgtggatttcctggggctcctggtcttccaggtctgaagggtcaccgaggacacaaaggtcttgaaggccctaaaggtgaagttggagcacctggttccaagggtgaagctggccccactggtccaatgggtgccatgggtcctctgggtccgaggggaatgccaggagagagagggagacttgggccacagggtgctcctggacaacgaggtgcacatggtatgcctggaaaacctggaccaatgggtcctcttgggataccaggctcttctggttttccaggaaatcctggaatgaagggagaagcaggtcctacaggggcgcgaggccctgaaggtcctcaggggcagagaggtgaaactgggcccccaggtccagttggctctccaggtcttcctggtgcaataggaactgatggtactcctggtcccaaaggcccaacgggctctccgggtacctctggtcctcctggctcagcagggcctcctggatctccaggacctcagggtagcactggtcctcaggggaattcgggccttccgggtgatccaggtttcaaaggagaagctggcccaaaaggggaaccagggccacatggtattcagggtccgataggcccacccggtgaagaaggcaaaagaggtcccagaggtgacccaggaacacttggtcctccagggccagtgggagaaaggggtgctcctggcaatcgtggttttccaggctctgatggtttacctgggccaaagggtgctcaaggagaacggggtcctgtaggttcttcaggacccaaaggaagccagggggatccaggacgtccaggggaacctgggcttccaggtgctcggggtttgacaggaaatcctggtgttcaaggtcctgaaggaaaacttggacctttgggtgcgccaggggaagatggccgtccaggtcctccaggctccataggaatcaaagggcagcccgggaccatgggccttccaggccccaaaggtagcaatggtgaccctgggaaacctggagaagcaggaaatcctggagttcctgggcaaaggggagctcctggaaaagatggtaaagttggtccttatggtcctcctgggccgccgggtctacgtggtgaaagaggagaacaaggacctccagggcccacaggttttcaggggcatcctggtcctccaggtcctcctggagaaggtggaaaaccaggtgatcaaggtgttcctggaggtcccggagcagttggcccgttaggacctagaggagaacgaggaaatcctggggaaagaggagaacctgggataactggactccctggtgagaagggaatggctggaggacatggtcctgatggcccaaaaggcagtccaggtccatctgggacccctggagatacaggcccaccaggtcttcaaggtatgccgggagaaagaggaattgcaggaactcctggccccaagggtgacagaggtggcataggagaaaaaggtgctgaaggcacagctggaaatgatggtgcaggaggtcttccaggtcctttgggccctccaggtccggcaggcctactgggagaaaagggtgaacctggtcctcgaggtttagttggtcctcctggctcccggggcaatcctggttctcgaggtgaaaatgggccaactggagctgttggttttgccggaccccaggggtctgacggacagcctggagtaaaaggtgaacctggagagccaggacagaagggagatgctggttctcctggaccacaaggtttagcaggatcccctggccctcatggtcctaatggtgttcctggactaaaaggtggtcgaggaacccaaggtccgcctggtgctacaggatttcctggttctgcgggcagagttggacctccaggccctgctggagctccaggacctgcgggacccctaggggaacccgggaaggagggacctccaggtcctcgtggggaccctggctctcatgggcgtgtgggagatcgaggaccagctggcccccctggtggcccaggagacaaaggggacccaggagaagatgggcaacctggtccagatggcccccctggtccagctggaacgaccgggcagagaggaattgttggcatgcctgggcaacgtggagagagaggcatgcccggcctaccaggcccagcgggaacaccaggaaaagtaggaccaactggtgcaacaggagataaaggtccacctggacctgtggggcccccaggctccaatggtcctgtaggggaacctggaccagaaggtccagctggcaatgatggtaccccaggacgggatggtgctgttggagaacgtggtgatcgtggagaccctgggcctgcaggtctgccaggctctcagggtgcccctggaactcctggccctgtgggtgctccaggagatgcaggacaaagaggagatccgggttctcggggtcctataggacacctggtcgagctgggaaacgtggattacctggaccccaaggacctcgtggtgacaaaggtgatcatggagaccgaggcgacagaggtcagaagggccacagaggctttactggtcttcagggtcttcctggccctcctggtccaaatggtgaacaaggaagtgctggaatccctggaccatttggcccaagaggtcctccaggcccagttggtccttcaggtaaagaaggaaaccctgggccacttgggccaattggacctccaggtgtacgaggcagtgtaggagaagcaggacctgagggccctcctggtgagcctggcccacctggccctccgggtccccctggccaccttacagctgctcttggggatatcatggggcactatgatgaaagcatgccagatccacttcctgagtttactgaagatcaggcggctcctgatgacaaaaacaaaacggacccaggggttcatgctaccctgaagtcactcagtagtcagattgaaaccatgcgcagccccgatggctcgaaaaagcacccagcccgcacgtgtgatgacctaaagctttgccattccgcaaagcagagtggtgaatactggattgatcctaaccaaggatctgttgaagatgcaatcaaagtttactgcaacatggaaacaggagaaacatgtatttcagcaaacccatccagtgtaccacgtaaaacctggtgggccagtaaatctcctgacaataaacctgtttggtatggtcttgatatgaacagagggtctcagttcgcttatggagaccaccaatcacctaatacagccattactcagatgacttttttgcgccttttatcaaaagaagcctcccagaacatcacttacatctgtaaaaacagtgtaggatacatggacgatcaagctaagaacctcaaaaaagctgtggttctcaaaggggcaaatgacttagatatcaaagcagagggaaatattagattccggtatatcgttcttcaagacacttgctctaagcggaatggaaatgtgggcaagactgtctttgaatatagaacacagaatgtggcacgcttgcccatcatagatcttgctcctgtggatgttggcggcacagaccaggaattcggcgttgaaattgggccagtttgttttgtgtaaagtaagccaagacacatcgacaatgagcaccaccatcaatgaccaccgccattcacaagaactttgactgtttgaagttgatcctgagactcttgaagtaatggctgatcctgcatcagcattgtatatatggtcttaagtgcctggcctccttatccttcagaatatttattttacttacaatcctcaagttttaattgattttaaatatttttcaatacaacagtttaggtttaagatgaccaatgacaatgaccacctttgcagaaagtaaactgattgaataaataaatctccgttttcttcaatttatttcagtgtaatgaaaaagttgcttagtatttatgaggaaattcttcttcctggcaggtagcttaaagagtggggtatatagagccacaacacatgtttattttgcttggctgcagttgaaaaatagaaattagtgcccttttgtgacctctcattccaagattgtcaattaaaaatgagtttaaaatgtttaacttgtgatcgagacctacatgcatgtcttgatattgtgtaactataatagagactctttaaggagaatcttaaaaaaaaaaaaacgtttctcactgtcttaaatagaatttttaaatagtatatattcagtggcattttggagaacaaagtgaatttacttcgacttcttaaatttttgtaaaagactataagtttagacatctttctcattcaaatttaaagatatctttctcctcttgatcaatctatcaatattgatagaagtcacactagtatataccatttaatacatttacactttcttatttaagaagatattgaatgcaaaataattgacatatagaactttacaaacatatgtccaaggactctaaattgagactcttccacatgtacaatctcatcatcctgaagcctataatgaagaaaaagatctagaaactgagttgtggagctgactctaatcaaatgtgatgattggaattagaccatttggcctttgaactttcataggaaaaatgacccaacatttcttagcatgagctacctcatctctagaagctgggatggacttactattcttgtttatattttagatactgaaaggtgctatgcttctgttattattccaagactggagataggcagggctaaaaaggtattattatttttcctttaatgatggtgctaaaattcttcctataaaattccttaaaaataaagatggtttaatcactaccattgtgaaaacataactgttagacttcccgtttctgaaagaaagagcatcgttccaatgcttgttcactgttcctctgtcatactgtatctggaatgctttgtaatacttgcatgcttcttagaccagaacatgtaggtccccttgtgtctcaatactttttttttcttaattgcatttgttggctctattttaatttttttcttttaaaataaacagctgggaccatcccaaaag

SEQ ID NO: 717074 - DNA, 6004 bp, Homo sapiens
  misc_feature (136)..(136): n is a, c, g, or t
gacctcagggaattgatggagaaccaggtgttcctggtcaacctggtgctccaggacctcctggacatccgtcccacccaggacccgatggcttgagcaggccgttttcagctcaaatggctgggttggatgaaanatctggacttgggagtcaagtaggactaatgcctggctctgtgggtcctgttggcccaaggggaccacagggtttacaaggacagcaaggtggtgcaggacctacaggacctcctggtgaacctggtgatcctggaccaatgggtccgattggttcacgtggaccagagggccctcctggtaaacctggggaagatggtgaacctggcagaaatggaaatcctggtgaagtgggatttgcaggatctccgggagctcgtggatttcctggggctcctggtcttccaggtctgaagggtcaccgaggacacaaaggtcttgaaggccctaaaggtgaagttggagcacctggttccaagggtgaagctggccccactggtccaatgggtgccatgggtcctctgggtccgaggggaatgccaggagagagagggagacttgggccacagggtgctcctggacaacgaggtgcacatggtatgcctggaaaacctggaccaatgggtcctcttgggataccaggctcttctggttttccaggaaatcctggaatgaagggagaagcaggtcctacaggggcgcgaggccctgaaggtcctcaggggcagagaggtgaaactgggcccccaggtccagttggctctccaggtcttcctggtgcaataggaactgatggtactcctggtcccaaaggcccaacgggctctccgggtacctctggtcctcctggctcagcagggcctcctggatctccaggacctcagggtagcactggtcctcaggggaattcgggccttccgggtgatccaggtttcaaaggagaagctggcccaaaaggggaaccagggccacatggtattcagggtccgataggcccacccggtgaagaaggcaaaagaggtcccagaggtgacccaggaacacttggtcctccagggccagtgggagaaaggggtgctcctggcaatcgtggttttccaggctctgatggtttacctgggccaaagggtgctcaaggagaacggggtcctgtaggttcttcaggacccaaaggaagccagggggatccaggacgtccaggggaacctgggcttccaggtgctcggggtttgacaggaaatcctggtgttcaaggtcctgaaggaaaacttggacctttgggtgcgccaggggaagatggccgtccaggtcctccaggctccataggaatcaaagggcagcccgggaccatgggccttccaggccccaaaggtagcaatggtgaccctgggaaacctggagaagcaggaaatcctggagttcctgggcaaaggggagctcctggaaaagatggtaaagttggtccttatggtcctcctgggccgccgggtctacgtggtgaaagaggagaacaaggacctccagggcccacaggttttcaggggcatcctggtcctccaggtcctcctggagaaggtggaaaaccaggtgatcaaggtgttcctggaggtcccggagcagttggcccgttaggacctagaggagaacgaggaaatcctggggaaagaggagaacctgggataactggactccctggtgagaagggaatggctggaggacatggtcctgatggcccaaaaggcagtccaggtccatctgggacccctggagatacaggcccaccaggtcttcaaggtatgccgggagaaagaggaattgcaggaactcctggccccaagggtgacagaggtggcataggagaaaaaggtgctgaaggcacagctggaaatgatggtgcaggaggtcttccaggtcctttgggccctccaggtccggcaggcctactgggagaaaagggtgaacctggtcctcgaggtttagttggtcctcctggctcccggggcaatcctggttctcgaggtgaaaatgggccaactggagctgttggttttgccggaccccaggggtctgacggacagcctggagtaaaaggtgaacctggagagccaggacagaagggagatgctggttctcctggaccacaaggtttagcaggatcccctggccctcatggtcctaatggtgttcctggactaaaaggtggtcgaggaacccaaggtccgcctggtgctacaggatttcctggttctgcgggcagagttggacctccaggccctgctggagctccaggacctgcgggacccctaggggaacccgggaaggagggacctccaggtcctcgtggggaccctggctctcatgggcgtgtgggagatcgaggaccagctggcccccctggtggcccaggagacaaaggggacccaggagaagatgggcaacctggtccagatggcccccctggtccagctggaacgaccgggcagagaggaattgttggcatgcctgggcaacgtggagagagaggcatgcccggcctaccaggcccagcgggaacaccaggaaaagtaggaccaactggtgcaacaggagataaaggtccacctggacctgtggggcccccaggctccaatggtcctgtaggggaacctggaccagaaggtccagctggcaatgatggtaccccaggacgggatggtgctgttggagaacgtggtgatcgtggagaccctgggcctgcaggtctgccaggctctcagggtgcccctggaactcctggccctgtgggtgctccaggagatgcaggacaaagaggagatccgggttctcggggtcctataggacacctggtcgagctgggaaacgtggattacctggaccccaaggacctcgtggtgacaaaggtgatcatggagaccgaggcgacagaggtcagaagggccacagaggctttactggtcttcagggtcttcctggccctcctggtccaaatggtgaacaaggaagtgctggaatccctggaccatttggcccaagaggtcctccaggcccagttggtccttcaggtaaagaaggaaaccctgggccacttgggccaattggacctccaggtgtacgaggcagtgtaggagaagcaggacctgagggccctcctggtgagcctggcccacctggccctccgggtccccctggccaccttacagctgctcttggggatatcatggggcactatgatgaaagcatgccagatccacttcctgagtttactgaagatcaggcggctcctgatgacaaaaacaaaacggacccaggggttcatgctaccctgaagtcactcagtagtcagattgaaaccatgcgcagccccgatggctcgaaaaagcacccagcccgcacgtgtgatgacctaaagctttgccattccgcaaagcagagtggtgaatactggattgatcctaaccaaggatctgttgaagatgcaatcaaagtttactgcaacatggaaacaggagaaacatgtatttcagcaaacccatccagtgtaccacgtaaaacctggtgggccagtaaatctcctgacaataaacctgtttggtatggtcttgatatgaacagagggtctcagttcgcttatggagaccaccaatcacctaatacagccattactcagatgacttttttgcgccttttatcaaaagaagcctcccagaacatcacttacatctgtaaaaacagtgtaggatacatggacgatcaagctaagaacctcaaaaaagctgtggttctcaaaggggcaaatgacttagatatcaaagcagagggaaatattagattccggtatatcgttcttcaagacacttgctctaagcggaatggaaatgtgggcaagactgtctttgaatatagaacacagaatgtggcacgcttgcccatcatagatcttgctcctgtggatgttggcggcacagaccaggaattcggcgttgaaattgggccagtttgttttgtgtaaagtaagccaagacacatcgacaatgagcaccaccatcaatgaccaccgccattcacaagaactttgactgtttgaagttgatcctgagactcttgaagtaatggctgatcctgcatcagcattgtatatatggtcttaagtgcctggcctccttatccttcagaatatttattttacttacaatcctcaagttttaattgattttaaatatttttcaatacaacagtttaggtttaagatgaccaatgacaatgaccacctttgcagaaagtaaactgattgaataaataaatctccgttttcttcaatttatttcagtgtaatgaaaaagttgcttagtatttatgaggaaattcttcttcctggcaggtagcttaaagagtggggtatatagagccacaacacatgtttattttgcttggctgcagttgaaaaatagaaattagtgcccttttgtgacctctcattccaagattgtcaattaaaaatgagtttaaaatgtttaacttgtgatcgagacctacatgcatgtcttgatattgtgtaactataatagagactctttaaggagaatcttaaaaaaaaaaaaacgtttctcactgtcttaaatagaatttttaaatagtatatattcagtggcattttggagaacaaagtgaatttacttcgacttcttaaatttttgtaaaagactataagtttagacatctttctcattcaaatttaaagatatctttctcctcttgatcaatctatcaatattgatagaagtcacactagtatataccatttaatacatttacactttcttatttaagaagatattgaatgcaaaataattgacatatagaactttacaaacatatgtccaaggactctaaattgagactcttccacatgtacaatctcatcatcctgaagcctataatgaagaaaaagatctagaaactgagttgtggagctgactctaatcaaatgtgatgattggaattagaccatttggcctttgaactttcataggaaaaatgacccaacatttcttagcatgagctacctcatctctagaagctgggatggacttactattcttgtttatattttagatactgaaaggtgctatgcttctgtcatactgtatctggaatgctttgtaatacttgcatgcttcttagaccagaacatgtaggtccccttgtgtctcaatactttttttttcttaattgcatttgttggctctattttaatttttttcttttaaaataaacagctgggaccatcccaaaagacaagccatgcatacaactttggtcatgtatctctgcaaagcatcaaattaaatgcacgcttttgtcatgtcagtggtttttgttttgtgaaattcctttgaccatattagatctatttcatttccaatagtgaaaaggagatgtggtggtatactttgtttgccatttgtttaaaagatacaacggataccttctatcatgtatgtactggcttataaatgaaaatctatctacaacattacccacaaaggcaacatgacaccaattatcactgcctctgcccttaaaaatgtcagagtagtattattgataaaaagggcaagcaatagatttttcatgactgaataaactgtaataataaaacatatgtctcaaagtgtatcacatatgaatttagcctaattgttttcagtttcattctcaatatttagtttacaacatcattttcccctaaactggttatattttgacctgtatatcttaaatttgagtatttatatgcctaaatacatgtgtgagttttgtttgacttccaagtccaaactataagattatataagttcatatagatgaatcagaaatatgtggtaatactattaagtcacaaacactaacaatttccaactatagaaataacagttcttatttggattttgggaatgctaccaataaaagcctgcccagaccattaaaa

SEQ ID NO: 717075 - DNA, 806 bp, Homo sapiens
agcggagtccgggtaggccttaggtgggttcgtgcgccttctacctcgctgtttcggttttcctggctcctcgagcccttattctcccctgtaagcagctgggagcggacgaagcgcgaagctgggatttttatactgtctcctgcaagaatttaacacaaacatgtgtatcatcagaccaaaatcgatacaatttcatatcaacactatgaatgacaaaattaaaaaggaagacttgacgagatccctcatatgccctgttttctcagatttgagtcactgtggttggacattgtggctttaaacgaccactgaacgactgaggtggtgcatgtgcctttgatcatcatttaacggaactctgggctcatccacacaatgcctctgagaccacgctacaacggatttccattttatggtaaaccaatgcgactacagtcatgcaagcaacagatctcggcatctcctatcacaagcaatgcgtggcaactctttcgctgccaacgcccacagcaacacagacacagcacaacacagccaacacctgtgggaccaggactggcaacaaggcacggaacaagaagacgcctggccaagtggaaactcgaacatttcacgcgtaataagccacaggcaacatgccaaaagacgaaattccgtcaggggtcgcctgaagttagccgttccaacaataatagtttaatgtccgttcatacacttaccagaaagacgactaagtggagatgatggtaatcacatggtggtttaagtcagaggccatggctatcaggaaggtacgtctgtga

SEQ ID NO: 717076 - DNA, 5309 bp, Homo sapiens
  misc_feature (136)..(136): n is a, c, g, or t
gacctcagggaattgatggagaaccaggtgttcctggtcaacctggtgctccaggacctcctggacatccgtcccacccaggacccgatggcttgagcaggccgttttcagctcaaatggctgggttggatgaaanatctggacttgggagtcaagtaggactaatgcctggctctgtgggtcctgttggcccaaggggaccacagggtttacaaggacagcaaggtggtgcaggacctacaggacctcctggtgaacctggtgatcctggaccaatgggtccgattggttcacgtggaccagagggccctcctggtaaacctggggaagatggtgaacctggcagaaatggaaatcctggtgaagtgggatttgcaggatctccgggagctcgtggatttcctggggctcctggtcttccaggtctgaagggtcaccgaggacacaaaggtcttgaaggccctaaaggtgaagttggagcacctggttccaagggtgaagctggccccactggtccaatgggtgccatgggtcctctgggtccgaggggaatgccaggagagagagggagacttgggccacagggtgctcctggacaacgaggtgcacatggtatgcctggaaaacctggaccaatgggtcctcttgggataccaggctcttctggttttccaggaaatcctggaatgaagggagaagcaggtcctacaggggcgcgaggccctgaaggtcctcaggggcagagaggtgaaactgggcccccaggtccagttggctctccaggtcttcctggtgcaataggaactgatggtactcctggtcccaaaggcccaacgggctctccgggtacctctggtcctcctggctcagcagggcctcctggatctccaggacctcagggtagcactggtcctcaggggaattcgggccttccgggtgatccaggtttcaaaggagaagctggcccaaaaggggaaccagggccacatggtattcagggtccgataggcccacccggtgaagaaggcaaaagaggtcccagaggtgacccaggaacacttggtcctccagggccagtgggagaaaggggtgctcctggcaatcgtggttttccaggctctgatggtttacctgggccaaagggtgctcaaggagaacggggtcctgtaggttcttcaggacccaaaggaagccagggggatccaggacgtccaggggaacctgggcttccaggtgctcggggtttgacaggaaatcctggtgttcaaggtcctgaaggaaaacttggacctttgggtgcgccaggggaagatggccgtccaggtcctccaggctccataggaatcaaagggcagcccgggaccatgggccttccaggccccaaaggtagcaatggtgaccctgggaaacctggagaagcaggaaatcctggagttcctgggcaaaggggagctcctggaaaagatggtaaagttggtccttatggtcctcctgggccgccgggtctacgtggtgaaagaggagaacaaggacctccagggcccacaggttttcaggggcatcctggtcctccaggtcctcctggagaaggtggaaaaccaggtgatcaaggtgttcctggaggtcccggagcagttggcccgttaggacctagaggagaacgaggaaatcctggggaaagaggagaacctgggataactggactccctggtgagaagggaatggctggaggacatggtcctgatggcccaaaaggcagtccaggtccatctgggacccctggagatacaggcccaccaggtcttcaaggtatgccgggagaaagaggaattgcaggaactcctggccccaagggtgacagaggtggcataggagaaaaaggtgctgaaggcacagctggaaatgatggtgcaggaggtcttccaggtcctttgggccctccaggtccggcaggcctactgggagaaaagggtgaacctggtcctcgaggtttagttggtcctcctggctcccggggcaatcctggttctcgaggtgaaaatgggccaactggagctgttggttttgccggaccccaggggtctgacggacagcctggagtaaaaggtgaacctggagagccaggacagaagggagatgctggttctcctggaccacaaggtttagcaggatcccctggccctcatggtcctaatggtgttcctggactaaaaggtggtcgaggaacccaaggtccgcctggtgctacaggatttcctggttctgcgggcagagttggacctccaggccctgctggagctccaggacctgcgggacccctaggggaacccgggaaggagggacctccaggtcctcgtggggaccctggctctcatgggcgtgtgggagatcgaggaccagctggcccccctggtggcccaggagacaaaggggacccaggagaagatgggcaacctggtccagatggcccccctggtccagctggaacgaccgggcagagaggaattgttggcatgcctgggcaacgtggagagagaggcatgcccggcctaccaggcccagcgggaacaccaggaaaagtaggaccaactggtgcaacaggagataaaggtccacctggacctgtggggcccccaggctccaatggtcctgtaggggaacctggaccagaaggtccagctggcaatgatggtaccccaggacgggatggtgctgttggagaacgtggtgatcgtggagaccctgggcctgcaggtctgccaggctctcagggtgcccctggaactcctggccctgtgggtgctccaggagatgcaggacaaagaggagatccgggttctcggggtcctataggacacctggtcgagctgggaaacgtggattacctggaccccaaggacctcgtggtgacaaaggtgatcatggagaccgaggcgacagaggtcagaagggccacagaggctttactggtcttcagggtcttcctggccctcctggtccaaatggtgaacaaggaagtgctggaatccctggaccatttggcccaagaggtcctccaggcccagttggtccttcaggtaaagaaggaaaccctgggccacttgggccaattggacctccaggtgtacgaggcagtgtaggagaagcaggacctgagggccctcctggtgagcctggcccacctggccctccgggtccccctggccaccttacagctgctcttggggatatcatggggcactatgatgaaagcatgccagatccacttcctgagtttactgaagatcaggcggctcctgatgacaaaaacaaaacggacccaggggttcatgctaccctgaagtcactcagtagtcagattgaaaccatgcgcagccccgatggctcgaaaaagcacccagcccgcacgtgtgatgacctaaagctttgccattccgcaaagcagagtggtgaatactggattgatcctaaccaaggatctgttgaagatgcaatcaaagtttactgcaacatggaaacaggagaaacatgtatttcagcaaacccatccagtgtaccacgtaaaacctggtgggccagtaaatctcctgacaataaacctgtttggtatggtcttgatatgaacagagggtctcagttcgcttatggagaccaccaatcacctaatacagccattactcagatgacttttttgcgccttttatcaaaagaagcctcccagaacatcacttacatctgtaaaaacagtgtaggatacatggacgatcaagctaagaacctcaaaaaagctgtggttctcaaaggggcaaatgacttagatatcaaagcagagggaaatattagattccggtatatcgttcttcaagacacttgctctaagcggaatggaaatgtgggcaagactgtctttgaatatagaacacagaatgtggcacgcttgcccatcatagatcttgctcctgtggatgttggcggcacagaccaggaattcggcgttgaaattgggccagtttgttttgtgtaaagtaagccaagacacatcgacaatgagcaccaccatcaatgaccaccgccattcacaagaactttgactgtttgaagttgatcctgagactcttgaagtaatggctgatcctgcatcagcattgtatatatggtcttaagtgcctggcctccttatccttcagaatatttattttacttacaatcctcaagttttaattgattttaaatatttttcaatacaacagtttaggtttaagatgaccaatgacaatgaccacctttgcagaaagtaaactgattgaataaataaatctccgttttcttcaatttatttcagtgtaatgaaaaagttgcttagtatttatgaggaaattcttcttcctggcaggtagcttaaagagtggggtatatagagccacaacacatgtttattttgcttggctgcagttgaaaaatagaaattagtgcccttttgtgacctctcattccaagattgtcaattaaaaatgagtttaaaatgtttaacttgtgatcgagacctacatgcatgtcttgatattgtgtaactataatagagactctttaaggagaatcttaaaaaaaaaaaaacgtttctcactgtcttaaatagaatttttaaatagtatatattcagtggcattttggagaacaaagtgaatttacttcgacttcttaaatttttgtaaaagactataagtttagacatctttctcattcaaatttaaagatatctttctcctcttgatcaatctatcaatattgatagaagtcacactagtatataccatttaatacatttacactttcttatttaagaagatattgaatgcaaaataattgacatatagaactttacaaacatatgtccaaggactctaaattgagactcttccacatgtacaatctcatcatcctgaagcctataatgaagaaaaagatctagaaactgagttgtggagctgactctaatcaaatgtgatgattggaattagaccatttggcctttgaactttcataggaaaaatgacccaacatttcttagcatgagctacctcatctctagaagctgggatggacttactattcttgtttatattttagatactgaaaggtgctatgcttctgtcatactgtatctggaatgctttgtaatacttgcatgcttcttagaccagaacatgtaggtccccttgtgtctcaatactttttttttcttaattgcatttgttggctctattttaatttttttcttttaaaataaacagctgggaccatcccaaaag

SEQ ID NO: 717077 - DNA, 4602 bp, Homo sapiens
  misc_feature (136)..(136): n is a, c, g, or t
gacctcagggaattgatggagaaccaggtgttcctggtcaacctggtgctccaggacctcctggacatccgtcccacccaggacccgatggcttgagcaggccgttttcagctcaaatggctgggttggatgaaanatctggacttgggagtcaagtaggactaatgcctggctctgtgggtcctgttggcccaaggggaccacagggtttacaaggacagcaaggtggtgcaggacctacaggacctcctggtgaacctggtgatcctggaccaatgggtccgattggttcacgtggaccagagggccctcctggtaaacctggggaagatggtgaacctggcagaaatggaaatcctggtgaagtgggatttgcaggatctccgggagctcgtggatttcctggggctcctggtcttccaggtctgaagggtcaccgaggacacaaaggtcttgaaggccctaaaggtgaagttggagcacctggttccaagggtgaagctggccccactggtccaatgggtgccatgggtcctctgggtccgaggggaatgccaggagagagagggagacttgggccacagggtgctcctggacaacgaggtgcacatggtatgcctggaaaacctggaccaatgggtcctcttgggataccaggctcttctggttttccaggaaatcctggaatgaagggagaagcaggtcctacaggggcgcgaggccctgaaggtcctcaggggcagagaggtgaaactgggcccccaggtccagttggctctccaggtcttcctggtgcaataggaactgatggtactcctggtcccaaaggcccaacgggctctccgggtacctctggtcctcctggctcagcagggcctcctggatctccaggacctcagggtagcactggtcctcaggggaattcgggccttccgggtgatccaggtttcaaaggagaagctggcccaaaaggggaaccagggccacatggtattcagggtccgataggcccacccggtgaagaaggcaaaagaggtcccagaggtgacccaggaacacttggtcctccagggccagtgggagaaaggggtgctcctggcaatcgtggttttccaggctctgatggtttacctgggccaaagggtgctcaaggagaacggggtcctgtaggttcttcaggacccaaaggaagccagggggatccaggacgtccaggggaacctgggcttccaggtgctcggggtttgacaggaaatcctggtgttcaaggtcctgaaggaaaacttggacctttgggtgcgccaggggaagatggccgtccaggtcctccaggctccataggaatcaaagggcagcccgggaccatgggccttccaggccccaaaggtagcaatggtgaccctgggaaacctggagaagcaggaaatcctggagttcctgggcaaaggggagctcctggaaaagatggtaaagttggtccttatggtcctcctgggccgccgggtctacgtggtgaaagaggagaacaaggacctccagggcccacaggttttcaggggcatcctggtcctccaggtcctcctggagaaggtggaaaaccaggtgatcaaggtgttcctggaggtcccggagcagttggcccgttaggacctagaggagaacgaggaaatcctggggaaagaggagaacctgggataactggactccctggtgagaagggaatggctggaggacatggtcctgatggcccaaaaggcagtccaggtccatctgggacccctggagatacaggcccaccaggtcttcaaggtatgccgggagaaagaggaattgcaggaactcctggccccaagggtgacagaggtggcataggagaaaaaggtgctgaaggcacagctggaaatgatggtgcaggaggtcttccaggtcctttgggccctccaggtccggcaggcctactgggagaaaagggtgaacctggtcctcgaggtttagttggtcctcctggctcccggggcaatcctggttctcgaggtgaaaatgggccaactggagctgttggttttgccggaccccaggggtctgacggacagcctggagtaaaaggtgaacctggagagccaggacagaagggagatgctggttctcctggaccacaaggtttagcaggatcccctggccctcatggtcctaatggtgttcctggactaaaaggtggtcgaggaacccaaggtccgcctggtgctacaggatttcctggttctgcgggcagagttggacctccaggccctgctggagctccaggacctgcgggacccctaggggaacccgggaaggagggacctccaggtcctcgtggggaccctggctctcatgggcgtgtgggagatcgaggaccagctggcccccctggtggcccaggagacaaaggggacccaggagaagatgggcaacctggtccagatggcccccctggtccagctggaacgaccgggcagagaggaattgttggcatgcctgggcaacgtggagagagaggcatgcccggcctaccaggcccagcgggaacaccaggaaaagtaggaccaactggtgcaacaggagataaaggtccacctggacctgtggggcccccaggctccaatggtcctgtaggggaacctggaccagaaggtccagctggcaatgatggtaccccaggacgggatggtgctgttggagaacgtggtgatcgtggagaccctgggcctgcaggtctgccaggctctcagggtgcccctggaactcctggccctgtgggtgctccaggagatgcaggacaaagaggagatccgggttctcggggtcctataggacacctggtcgagctgggaaacgtggattacctggaccccaaggacctcgtggtgacaaaggtgatcatggagaccgaggcgacagaggtcagaagggccacagaggctttactggtcttcagggtcttcctggccctcctggtccaaatggtgaacaaggaagtgctggaatccctggaccatttggcccaagaggtcctccaggcccagttggtccttcaggtaaagaaggaaaccctgggccacttgggccaattggacctccaggtgtacgaggcagtgtaggagaagcaggacctgagggccctcctggtgagcctggcccacctggccctccgggtccccctggccaccttacagctgctcttggggatatcatggggcactatgatgaaagcatgccagatccacttcctgagtttactgaagatcaggcggctcctgatgacaaaaacaaaacggacccaggggttcatgctaccctgaagtcactcagtagtcagattgaaaccatgcgcagccccgatggctcgaaaaagcacccagcccgcacgtgtgatgacctaaagctttgccattccgcaaagcagagtggtgaatactggattgatcctaaccaaggatctgttgaagatgcaatcaaagtttactgcaacatggaaacaggagaaacatgtatttcagcaaacccatccagtgtaccacgtaaaacctggtgggccagtaaatctcctgacaataaacctgtttggtatggtcttgatatgaacagagggtctcagttcgcttatggagaccaccaatcacctaatacagccattactcagatgacttttttgcgccttttatcaaaagaagcctcccagaacatcacttacatctgtaaaaacagtgtaggatacatggacgatcaagctaagaacctcaaaaaagctgtggttctcaaaggggcaaatgacttagatatcaaagcagagggaaatattagattccggtatatcgttcttcaagacacttgctctaagcggaatggaaatgtgggcaagactgtctttgaatatagaacacagaatgtggcacgcttgcccatcatagatcttgctcctgtggatgttggcggcacagaccaggaattcggcgttgaaattgggccagtttgttttgtgtaaagtaagccaagacacatcgacaatgagcaccaccatcaatgaccaccgccattcacaagaactttgactgtttgaagttgatcctgagactcttgaagtaatggctgatcctgcatcagcattgtatatatggtcttaagtgcctggcctccttatccttcagaatatttattttacttacaatcctcaagttttaattgattttaaatatttttcaatacaacagtttaggtttaagatgaccaatgacaatgaccacctttgcagaaagtaaactgattgaataaataaatctccgttttcttcaatttatttcagtgtaatgaaaaagttgcttagtatttatgaggaaattcttcttcctggcaggtagcttaaagagtggggtatatagagccacaacacatgtttattttgcttggctgcagttgaaaaatagaaattagtgcccttttgtgacctctcattccaagattgtcaattaaaaatgagtttaaaatgtttaacttgtgatcgagacctacatgcatgtcttgatattgtgtaactataatagagactctttaaggagaatctta

SEQ ID NO: 717078 - DNA, 284 bp, Homo sapiens
  misc_feature (3)..(3): n is a, c, g, or t
  misc_feature (15)..(15): n is a, c, g, or t
  misc_feature (27)..(27): n is a, c, g, or t
  misc_feature (42)..(42): n is a, c, g, or t
  misc_feature (58)..(58): n is a, c, g, or t
  misc_feature (60)..(60): n is a, c, g, or t
  misc_feature (64)..(64): n is a, c, g, or t
  misc_feature (73)..(75): n is a, c, g, or t
  misc_feature (83)..(83): n is a, c, g, or t
  misc_feature (106)..(106): n is a, c, g, or t
  misc_feature (113)..(114): n is a, c, g, or t
  misc_feature (136)..(136): n is a, c, g, or t
  misc_feature (166)..(167): n is a, c, g, or t
  misc_feature (172)..(172): n is a, c, g, or t
  misc_feature (212)..(212): n is a, c, g, or t
  misc_feature (214)..(214): n is a, c, g, or t
  misc_feature (225)..(225): n is a, c, g, or t
  misc_feature (240)..(240): n is a, c, g, or t
  misc_feature (247)..(247): n is a, c, g, or t
ggnaggggcaggganccaggtggccgnagggcacagggcctncgtgtaccacatgaancngggntggcatggnnngcctcctntgtggtgcgaagcccgttcagcncccggannaaggggggcacccagcgggttntgtggaacacagactcccccaccttccagnngggcncgtccttcatgatgatggcctcgtcccgaattcgacgagngnaattgtaaatncgttttatttataancctggcnctgtattcaataaacatttctgcagcctttcatctct

SEQ ID NO: 717079 - DNA, 164 bp, Homo sapiens
tgcaggcattctttgctgaagcaggccatacatggcccttctaaacgctactccaagcctcaccccactactaggcctgcttctagcagcagcagtcaaatcagcccgattaggtctacacccctgactcccctcgaccaaagaaacccttccgcctaccgagc

SEQ ID NO: 717080 - DNA, 4314 bp, Homo sapiens
  misc_feature (136)..(136): n is a, c, g, or t
gacctcagggaattgatggagaaccaggtgttcctggtcaacctggtgctccaggacctcctggacatccgtcccacccaggacccgatggcttgagcaggccgttttcagctcaaatggctgggttggatgaaanatctggacttgggagtcaagtaggactaatgcctggctctgtgggtcctgttggcccaaggggaccacagggtttacaaggacagcaaggtggtgcaggacctacaggacctcctggtgaacctggtgatcctggaccaatgggtccgattggttcacgtggaccagagggccctcctggtaaacctggggaagatggtgaacctggcagaaatggaaatcctggtgaagtgggatttgcaggatctccgggagctcgtggatttcctggggctcctggtcttccaggtctgaagggtcaccgaggacacaaaggtcttgaaggccctaaaggtgaagttggagcacctggttccaagggtgaagctggccccactggtccaatgggtgccatgggtcctctgggtccgaggggaatgccaggagagagagggagacttgggccacagggtgctcctggacaacgaggtgcacatggtatgcctggaaaacctggaccaatgggtcctcttgggataccaggctcttctggttttccaggaaatcctggaatgaagggagaagcaggtcctacaggggcgcgaggccctgaaggtcctcaggggcagagaggtgaaactgggcccccaggtccagttggctctccaggtcttcctggtgcaataggaactgatggtactcctggtcccaaaggcccaacgggctctccgggtacctctggtcctcctggctcagcagggcctcctggatctccaggacctcagggtagcactggtcctcaggggaattcgggccttccgggtgatccaggtttcaaaggagaagctggcccaaaaggggaaccagggccacatggtattcagggtccgataggcccacccggtgaagaaggcaaaagaggtcccagaggtgacccaggaacacttggtcctccagggccagtgggagaaaggggtgctcctggcaatcgtggttttccaggctctgatggtttacctgggccaaagggtgctcaaggagaacggggtcctgtaggttcttcaggacccaaaggaagccagggggatccaggacgtccaggggaacctgggcttccaggtgctcggggtttgacaggaaatcctggtgttcaaggtcctgaaggaaaacttggacctttgggtgcgccaggggaagatggccgtccaggtcctccaggctccataggaatcaaagggcagcccgggaccatgggccttccaggccccaaaggtagcaatggtgaccctgggaaacctggagaagcaggaaatcctggagttcctgggcaaaggggagctcctggaaaagatggtaaagttggtccttatggtcctcctgggccgccgggtctacgtggtgaaagaggagaacaaggacctccagggcccacaggttttcaggggcatcctggtcctccaggtcctcctggagaaggtggaaaaccaggtgatcaaggtgttcctggaggtcccggagcagttggcccgttaggacctagaggagaacgaggaaatcctggggaaagaggagaacctgggataactggactccctggtgagaagggaatggctggaggacatggtcctgatggcccaaaaggcagtccaggtccatctgggacccctggagatacaggcccaccaggtcttcaaggtatgccgggagaaagaggaattgcaggaactcctggccccaagggtgacagaggtggcataggagaaaaaggtgctgaaggcacagctggaaatgatggtgcaggaggtcttccaggtcctttgggccctccaggtccggcaggcctactgggagaaaagggtgaacctggtcctcgaggtttagttggtcctcctggctcccggggcaatcctggttctcgaggtgaaaatgggccaactggagctgttggttttgccggaccccaggggtctgacggacagcctggagtaaaaggtgaacctggagagccaggacagaagggagatgctggttctcctggaccacaaggtttagcaggatcccctggccctcatggtcctaatggtgttcctggactaaaaggtggtcgaggaacccaaggtccgcctggtgctacaggatttcctggttctgcgggcagagttggacctccaggccctgctggagctccaggacctgcgggacccctaggggaacccgggaaggagggacctccaggtcctcgtggggaccctggctctcatgggcgtgtgggagatcgaggaccagctggcccccctggtggcccaggagacaaaggggacccaggagaagatgggcaacctggtccagatggcccccctggtccagctggaacgaccgggcagagaggaattgttggcatgcctgggcaacgtggagagagaggcatgcccggcctaccaggcccagcgggaacaccaggaaaagtaggaccaactggtgcaacaggagataaaggtccacctggacctgtggggcccccaggctccaatggtcctgtaggggaacctggaccagaaggtccagctggcaatgatggtaccccaggacgggatggtgctgttggagaacgtggtgatcgtggagaccctgggcctgcaggtctgccaggctctcagggtgcccctggaactcctggccctgtgggtgctccaggagatgcaggacaaagaggagatccgggttctcggggtcctataggacacctggtcgagctgggaaacgtggattacctggaccccaaggacctcgtggtgacaaaggtgatcatggagaccgaggcgacagaggtcagaagggccacagaggctttactggtcttcagggtcttcctggccctcctggtccaaatggtgaacaaggaagtgctggaatccctggaccatttggcccaagaggtcctccaggcccagttggtccttcaggtaaagaaggaaaccctgggccacttgggccaattggacctccaggtgtacgaggcagtgtaggagaagcaggacctgagggccctcctggtgagcctggcccacctggccctccgggtccccctggccaccttacagctgctcttggggatatcatggggcactatgatgaaagcatgccagatccacttcctgagtttactgaagatcaggcggctcctgatgacaaaaacaaaacggacccaggggttcatgctaccctgaagtcactcagtagtcagattgaaaccatgcgcagccccgatggctcgaaaaagcacccagcccgcacgtgtgatgacctaaagctttgccattccgcaaagcagagtggtgaatactggattgatcctaaccaaggatctgttgaagatgcaatcaaagtttactgcaacatggaaacaggagaaacatgtatttcagcaaacccatccagtgtaccacgtaaaacctggtgggccagtaaatctcctgacaataaacctgtttggtatggtcttgatatgaacagagggtctcagttcgcttatggagaccaccaatcacctaatacagccattactcagatgacttttttgcgccttttatcaaaagaagcctcccagaacatcacttacatctgtaaaaacagtgtaggatacatggacgatcaagctaagaacctcaaaaaagctgtggttctcaaaggggcaaatgacttagatatcaaagcagagggaaatattagattccggtatatcgttcttcaagacacttgctctaagcggaatggaaatgtgggcaagactgtctttgaatatagaacacagaatgtggcacgcttgcccatcatagatcttgctcctgtggatgttggcggcacagaccaggaattcggcgttgaaattgggccagtttgttttgtgtaaagtaagccaagacacatcgacaatgagcaccaccatcaatgaccaccgccattcacaagaactttgactgtttgaagttgatcctgagactcttgaagtaatggctgatcctgcatcagcattgtatatatggtcttaagtgcctggcctccttatccttcagaatatttattttacttacaatcctcaagttttaattgattttaaatatttttcaatacaacagtttaggtttaagatgaccaatgacaatgaccacctttgcagaaagtaaactgattgaataaata

SEQ ID NO: 717081 - DNA, 118 bp, Homo sapiens
acgctatacgaccgggtgtgctctttacgcgtgtctacggttgctcgtcgggtttcgggggtctacgctttggctctccttgctgtctacggacgcgtaactcggggactcctctacg

SEQ ID NO: 717082 - DNA, 1794 bp, Homo sapiens
acctggcccaataaatgttggcattgatagctggccggggacagatacagacccaaagtcagcccatatcgttcttcaagacacttgctctaagcggaatggaaatgtgggcaagactgtctttgaatatagaacacagaatgtggcacgcttgcccatcatagatcttgctcctgtggatgttggcggcacagaccaggaattcggcgttgaaattgggccagtttgttttgtgtaaagtaagccaagacacatcgacaatgagcaccaccatcaatgaccaccgccattcacaagaactttgactgtttgaagttgatcctgagactcttgaagtaatggctgatcctgcatcagcattgtatatatggtcttaagtgcctggcctccttatccttcagaatatttattttacttacaatcctcaagttttaattgattttaaatatttttcaatacaacagtttaggtttaagatgaccaatgacaatgaccacctttgcagaaagtaaactgattgaataaataaatctccgttttcttcaatttatttcagtgtaatgaaaaagttgcttagtatttatgaggaaattcttcttcctggcaggtagcttaaagagtggggtatatagagccacaacacatgtttattttgcttggctgcagttgaaaaatagaaattagtgcccttttgtgacctctcattccaagattgtcaattaaaaatgagtttaaaatgtttaacttgtgatcgagacctacatgcatgtcttgatattgtgtaactataatagagactctttaaggagaatcttaaaaaaaaaaaaacgtttctcactgtcttaaatagaatttttaaatagtatatattcagtggcattttggagaacaaagtgaatttacttcgacttcttaaatttttgtaaaagactataagtttagacatctttctcattcaaatttaaagatatctttctcctcttgatcaatctatcaatattgatagaagtcacactagtatataccatttaatacatttacactttcttatttaagaagatattgaatgcaaaataattgacatatagaactttacaaacatatgtccaaggactctaaattgagactcttccacatgtacaatctcatcatcctgaagcctataatgaagaaaaagatctagaaactgagttgtggagctgactctaatcaaatgtgatgattggaattagaccatttggcctttgaactttcataggaaaaatgacccaacatttcttagcatgagctacctcatctctagaagctgggatggacttactattcttgtttatattttagatactgaaaggtgctatgcttctgttattattccaagactggagataggcagggctaaaaaggtattattatttttcctttaatgatggtgctaaaattcttcctataaaattccttaaaaataaagatggtttaatcactaccattgtgaaaacataactgttagacttcccgtttctgaaagaaagagcatcgttccaatgcttgttcactgttcctctgtcatactgtatctggaatgctttgtaatacttgcatgcttcttagaccagaacatgtaggtccccttgtgtctcaatactttttttttcttaattgcatttgttggctctattttaatttttttcttttaaaataaacagctgggaccatcccaaaagacaagccatgcatacaactttggtcatgtatctctgcaaagcatcaaattaaatgcacgcttttgtcatgtca

SEQ ID NO: 717083 - DNA, 4128 bp, Homo sapiens
  misc_feature (136)..(136): n is a, c, g, or t
  misc_feature (4116)..(4117): n is a, c, g, or t
gacctcagggaattgatggagaaccaggtgttcctggtcaacctggtgctccaggacctcctggacatccgtcccacccaggacccgatggcttgagcaggccgttttcagctcaaatggctgggttggatgaaanatctggacttgggagtcaagtaggactaatgcctggctctgtgggtcctgttggcccaaggggaccacagggtttacaaggacagcaaggtggtgcaggacctacaggacctcctggtgaacctggtgatcctggaccaatgggtccgattggttcacgtggaccagagggccctcctggtaaacctggggaagatggtgaacctggcagaaatggaaatcctggtgaagtgggatttgcaggatctccgggagctcgtggatttcctggggctcctggtcttccaggtctgaagggtcaccgaggacacaaaggtcttgaaggccctaaaggtgaagttggagcacctggttccaagggtgaagctggccccactggtccaatgggtgccatgggtcctctgggtccgaggggaatgccaggagagagagggagacttgggccacagggtgctcctggacaacgaggtgcacatggtatgcctggaaaacctggaccaatgggtcctcttgggataccaggctcttctggttttccaggaaatcctggaatgaagggagaagcaggtcctacaggggcgcgaggccctgaaggtcctcaggggcagagaggtgaaactgggcccccaggtccagttggctctccaggtcttcctggtgcaataggaactgatggtactcctggtcccaaaggcccaacgggctctccgggtacctctggtcctcctggctcagcagggcctcctggatctccaggacctcagggtagcactggtcctcaggggaattcgggccttccgggtgatccaggtttcaaaggagaagctggcccaaaaggggaaccagggccacatggtattcagggtccgataggcccacccggtgaagaaggcaaaagaggtcccagaggtgacccaggaacacttggtcctccagggccagtgggagaaaggggtgctcctggcaatcgtggttttccaggctctgatggtttacctgggccaaagggtgctcaaggagaacggggtcctgtaggttcttcaggacccaaaggaagccagggggatccaggacgtccaggggaacctgggcttccaggtgctcggggtttgacaggaaatcctggtgttcaaggtcctgaaggaaaacttggacctttgggtgcgccaggggaagatggccgtccaggtcctccaggctccataggaatcaaagggcagcccgggaccatgggccttccaggccccaaaggtagcaatggtgaccctgggaaacctggagaagcaggaaatcctggagttcctgggcaaaggggagctcctggaaaagatggtaaagttggtccttatggtcctcctgggccgccgggtctacgtggtgaaagaggagaacaaggacctccagggcccacaggttttcaggggcatcctggtcctccaggtcctcctggagaaggtggaaaaccaggtgatcaaggtgttcctggaggtcccggagcagttggcccgttaggacctagaggagaacgaggaaatcctggggaaagaggagaacctgggataactggactccctggtgagaagggaatggctggaggacatggtcctgatggcccaaaaggcagtccaggtccatctgggacccctggagatacaggcccaccaggtcttcaaggtatgccgggagaaagaggaattgcaggaactcctggccccaagggtgacagaggtggcataggagaaaaaggtgctgaaggcacagctggaaatgatggtgcaggaggtcttccaggtcctttgggccctccaggtccggcaggcctactgggagaaaagggtgaacctggtcctcgaggtttagttggtcctcctggctcccggggcaatcctggttctcgaggtgaaaatgggccaactggagctgttggttttgccggaccccaggggtctgacggacagcctggagtaaaaggtgaacctggagagccaggacagaagggagatgctggttctcctggaccacaaggtttagcaggatcccctggccctcatggtcctaatggtgttcctggactaaaaggtggtcgaggaacccaaggtccgcctggtgctacaggatttcctggttctgcgggcagagttggacctccaggccctgctggagctccaggacctgcgggacccctaggggaacccgggaaggagggacctccaggtcctcgtggggaccctggctctcatgggcgtgtgggagatcgaggaccagctggcccccctggtggcccaggagacaaaggggacccaggagaagatgggcaacctggtccagatggcccccctggtccagctggaacgaccgggcagagaggaattgttggcatgcctgggcaacgtggagagagaggcatgcccggcctaccaggcccagcgggaacaccaggaaaagtaggaccaactggtgcaacaggagataaaggtccacctggacctgtggggcccccaggctccaatggtcctgtaggggaacctggaccagaaggtccagctggcaatgatggtaccccaggacgggatggtgctgttggagaacgtggtgatcgtggagaccctgggcctgcaggtctgccaggctctcagggtgcccctggaactcctggccctgtgggtgctccaggagatgcaggacaaagaggagatccgggttctcggggtcctataggacacctggtcgagctgggaaacgtggattacctggaccccaaggacctcgtggtgacaaaggtgatcatggagaccgaggcgacagaggtcagaagggccacagaggctttactggtcttcagggtcttcctggccctcctggtccaaatggtgaacaaggaagtgctggaatccctggaccatttggcccaagaggtcctccaggcccagttggtccttcaggtaaagaaggaaaccctgggccacttgggccaattggacctccaggtgtacgaggcagtgtaggagaagcaggacctgagggccctcctggtgagcctggcccacctggccctccgggtccccctggccaccttacagctgctcttggggatatcatggggcactatgatgaaagcatgccagatccacttcctgagtttactgaagatcaggcggctcctgatgacaaaaacaaaacggacccaggggttcatgctaccctgaagtcactcagtagtcagattgaaaccatgcgcagccccgatggctcgaaaaagcacccagcccgcacgtgtgatgacctaaagctttgccattccgcaaagcagagtggtgaatactggattgatcctaaccaaggatctgttgaagatgcaatcaaagtttactgcaacatggaaacaggagaaacatgtatttcagcaaacccatccagtgtaccacgtaaaacctggtgggccagtaaatctcctgacaataaacctgtttggtatggtcttgatatgaacagagggtctcagttcgcttatggagaccaccaatcacctaatacagccattactcagatgacttttttgcgccttttatcaaaagaagcctcccagaacatcacttacatctgtaaaaacagtgtaggatacatggacgatcaagctaagaacctcaaaaaagctgtggttctcaaaggggcaaatgacttagatatcaaagcagagggaaatattagattccggtatatcgttcttcaagacacttgctctaagcggaatggaaatgtgggcaagactgtctttgaatatagaacacagaatgtggcacgcttgcccatcatagatcttgctcctgtggatgttggcggcacagaccaggaattcggcgttgaaattgggccagtttgttttgtgtaaagtaagccaagacacatcgacaatgagcaccaccatcaatgaccaccgccattcacaagaactttgactgtttgaagttgatcgcccagcgnnggtaccgagct

SEQ ID NO: 717084 - DNA, 590 bp, Homo sapiens
gtcagaagcatcgagtgatctgagaatgtattatctccatgtgattgtggatcatattcatcatttcagtcttgtacttatacatttcttttcttttcttttattgagacagagtttcactactgtggcccaggtaggagtgcaatggtgcgatctcggctcactgcaacctccccctcccgggttcaagcgattctcccaaccagtctcccgcaatagctgggattacaggtgcacgacaccaggcccagctaatttttgtattttaagtagagacggggtttcaccatgcgggccaggatggtctccaactcctgaccttaagtgatcagcccgcctaggcctccctaagcactgggattacaggcgtgagccaatgtgcctggacaaaatatcctcttatttatagctgacttggcaacatctgatattcaggtgggatacgatagcaagctgtactagatctctcttgtgtgcactggctcaaacactcattacccgagttctgataccagtttctgtatcagctagaattgtgtagttgcaagcaaaagattattccctcttatgtcattacatcttcaagtcag

SEQ ID NO: 717085 - DNA, 458 bp, Homo sapiens
  misc_feature (1)..(1): n is a, c, g, or t
  misc_feature (40)..(40): n is a, c, g, or t
  misc_feature (42)..(43): n is a, c, g, or t
  misc_feature (47)..(50): n is a, c, g, or t
  misc_feature (56)..(57): n is a, c, g, or t
  misc_feature (338)..(338): n is a, c, g, or t
  misc_feature (427)..(427): n is a, c, g, or t
  misc_feature (429)..(429): n is a, c, g, or t
  misc_feature (437)..(442): n is a, c, g, or t
  misc_feature (444)..(444): n is a, c, g, or t
  misc_feature (447)..(447): n is a, c, g, or t
  misc_feature (449)..(449): n is a, c, g, or t
nccgacctctgccctctaaatcagcatctatcacagtagntnncctnnnnaaagcnnttaaacatcattgggaaaacttagagcaaatcaaaccaatgtttttcaatacatggaaggaaagatgtgtgtgcttggttttgttttttgctgagacccaaacattgttagtgcaagcccccgccaggggtgcaggtggagtcaaagctgaatgaagagctcgtcttcaatgtagctctccaagctttcagagcaagacaaccatggaccatcctcttcttcagactggcctgtcttcttcttgaacaatgtcactttgctcctcactgctgtcatcttgnagatcctggaatccatttcccatctgttctatgttcccattcaccaaggcggtcactctgtgaatgtggtcctgcttaggtatttcttntngcaactcnnnnnncncangngctcccatg

SEQ ID NO: 717086 - DNA, 364 bp, Homo sapiens
  misc_feature (1)..(1): n is a, c, g, or t
  misc_feature (40)..(40): n is a, c, g, or t
  misc_feature (42)..(43): n is a, c, g, or t
  misc_feature (47)..(50): n is a, c, g, or t
  misc_feature (56)..(57): n is a, c, g, or t
nccgacctctgccctctaaatcagcatctatcacagtagntnncctnnnnaaagcnnttaaacatcattgggaaaacttagagcaaatcaaaccaatgtttttcaatacatggaaggaaagatgtgtgtgcttggttttgttttttgctgagacccaaacattgttagtgcaagcccccgccaggggtgcaggtggagtcaaagctgaatgaagagctcgtcttcaatgtagctctccaagctttcagagcaagacaaccatggaccatcctcttcttcagactggcctgtcttcttcttgaacaatgtcactttgctcctcactgctgtcatctgtatggggggaaataaacccaatgctttg

SEQ ID NO: 717087 - DNA, 308 bp, Homo sapiens
tgcagtacagcggcacgggccagcagcgcccagagcgggcatcgctgcagttcctgcgaaatctacacggccctggccagtgtcccgtgaatgaccatggacttttatcaacgaacgccaccgacgtcaacgaatgccctgggctatgatgaacccgcttctaccgcgaaggcctcgttctggcgctgccaagaaagaaggctgctgctcttctcagaatggcaactcgcagggcgccacgccgctgccatcgaagaaaggccgtgcaggaagcccagcgggcaggcatcgagaatcttcgtggtggt

SEQ ID NO: 717088 - DNA, 132 bp, Homo sapiens
gatgcttacgatagccgaaggcaggtgtgggatattagacttctcttccggtcagagcaagggtcgtcgaaatcaaaaatacctcttcccttcatctcgccccggatacaaagtctgtcgggctactcgggg

SEQ ID NO: 717089 - DNA, 151 bp, Homo sapiens
cgctctctcgtgtggggcagacacttctcaggctcatgggtggggttaggcccaggacacctctcggtcccctcctctctacatccggcctccttgtcctccttcggtttttcctttggtctgtgtttcaggtcccggggaatggtggagg

SEQ ID NO: 717090 - DNA, 168 bp, Homo sapiens
cgcgatgggcttgtagcatagtgtggtcaaaaagcctggatcacggaacggtttggacggcaccagcctcttgaagccagtgcaggcagcgcagggcaaaagccagtgagcagtgtacgtccagtgagcctggtagccatatgccacttagtgttagcttgtcctaca

SEQ ID NO: 717091 - DNA, 294 bp, Homo sapiens
ggagataggaggcccaggtggcaggtagcaggaggcccagatcacccatcctcccctggggtacaggagaggccgagccccaggccactgttcactctttgttgggaggggacggggagtgaggttggccagtttggtggatggtcacccaggaaggtttgaccagggaaggaggcagctagtctttagatggaggatggccctgggtttcgcacaccgctgggttctgcccaggtgctccctggtatacaagtcccttcccctttttgtcccaagttttcctttttcctcaac

SEQ ID NO: 717092 - DNA, 457 bp, Homo sapiens
cagtggaagggtgccatgataacagcataagcagggcctataaaatcacagaaatggggcaaccaaccatggaggtatcagtctagagagacataaagcaatgtcatatattccatcattattcagttaaaaaagttattttttaataaaattcttagaccgggtaccagatcttcaggtgcacagtttatcagggctaaatcaccttggttgtcaaagcctttttgataatccggcgaatttgttgtcttcatcgcgttaggcctatacaatgattttggaaatagatctagtggccaggtaactctgcctaatatttccctcctcagtgtagcattgggccattcaaccaattgctttattcctgcagctagggaggctgaggtgggaggatcacttgagccccagaggcagaggttgcgggagctgatatagtgccactgtcctcaagctgagt

SEQ ID NO: 717093 - DNA, 83 bp, Homo sapiens
gactcagtatgctttccctgaggaatgaaaaagggattcaggagtcgcctgacttctgggtgggtggggtacaggcagttagg

SEQ ID NO: 717094 - DNA, 298 bp, Homo sapiens
  misc_feature (107)..(107): n is a, c, g, or t
  misc_feature (131)..(131): n is a, c, g, or t
  misc_feature (144)..(145): n is a, c, g, or t
  misc_feature (151)..(152): n is a, c, g, or t
tgtggtggcttatgtctgtaattctagcactttgggaggctgaggtgggtggatcacttgaggtcacgggatttcaatggacccatgccccttggccccaaatccantgtgccttggacaacatcttcccnccattccctctannctaacnnaattacataacacactttaagccctttggggcaacttgcttggcgcttgggtcaacggttgccctacagtcccagctacttgggaggctggggcagaagaatcacttgaacgccagaagtggaggttgcagtgagccaagattgca

SEQ ID NO: 717095 - DNA, 217 bp, Homo sapiens
  misc_feature (70)..(70): n is a, c, g, or t
  misc_feature (164)..(165): n is a, c, g, or t
  misc_feature (189)..(189): n is a, c, g, or t
gtgactagaggatccgcgcctagcacttccagttcatctgtgccaggctgtctcgaacttctgagctcanagcaatcctcccacctcagcctccctaaacatattaggttcttaaatgttttgattggtgaatgaattaattgatagttgacccaggactttcnnttaactggatagcagatggaaacnttggggggaagtagaagggaaggaacag

SEQ ID NO: 717096 - DNA, 451 bp, Homo sapiens
  misc_feature (342)..(342): n is a, c, g, or t
  misc_feature (420)..(420): n is a, c, g, or t
  misc_feature (443)..(443): n is a, c, g, or t
  misc_feature (448)..(448): n is a, c, g, or t
ggcacgaggtttggctgagtgtccccacccaaatctcatgttgaactataattcccagtgttgagggaaggacctggtgggaggtgattggatcatggggatggatttctcccttgctgttctcatgatagtgagttcttatgagatctggttgtttaaaagtgtgccttctctctcccgtcgccatgtgaagatgtgcctggttccccttcaccttctgccatgattggaagtttcctgaggcctccccacccatgggagaactgtgagtcaattaaacctcttttcttcataaacaagccagtctcaggtagttctttatggcaatgtgagaacggactnaattacaaatatcttgcccattttagacaaaactggggtttgtgttcttcccggaatattgagatttcttccagatanttctagggtacaagtccctttantcatnata

SEQ ID NO: 717097 - DNA, 249 bp, Homo sapiens
agcagcacaaaggggatgtgtgacatggactgcaactagtaacggttcaactttgatggtggagagtggtgtgacccctgaaatcaccaatgtcactcagacttgctttgaccccgactctccacacagagcctacttggatgtataatgagctgaagaacattcttaaattggatggatcaacacatctcaatattttctttgcaaaatcctcagagaaggagtaggaagccatgcgtggattgccag

SEQ ID NO: 717098 - DNA, 150 bp, Homo sapiens
  misc_feature (6)..(6): n is a, c, g, or t
gagggntcccaggtgtacccagtgagaccatatgaccattttggtttgaccaattggttagagacagctattcacaaacaacctgcgggcacaattgaccctctttccacacgttagcacccttcagcaggacccttttaaagctctctc

SEQ ID NO: 717099 - DNA, 360 bp, Homo sapiens
agtagaagagctggattcattgagcatagctgtattttaccagattatccccgaacttactatgtattctataaaaaggagaagtgaggtgtgcccagtatacaactctcacaactacttatgaggacttgaccaacatctctgggatttgactggggatagtataccaataaacagtactaaaaaggattacatttaccaagtatctcttctctgctccccttgaccactgaagcctcctctttggcaccttgaagttagctgcttaaagttggaaatgcagacagcaggtaatcatgctgcaagtactttctggacctatggcaaagggagtggtcaatgacagacatcgaaaccttg

SEQ ID NO: 717100 - DNA, 118 bp, Homo sapiens
ttctaatgatgggctttaaaataaatgttacaataatttctcattttttcagtgctatattatccaattttggcttatatatattctatcttctatacttctccaatacttgtcttag

SEQ ID NO: 717101 - DNA, 162 bp, Homo sapiens
ggcaccagaaagacgcatgcgggcatgcttcacagctctttgagtgaagcccagctgccgtggctcaaacaatgagaaccccacacatgcgtgctgtcgcagcgtgaaacatgctgctcaagaattgagtggctccgctctcgctgacaaccccgatgaacc

SEQ ID NO: 717102 - DNA, 109 bp, Homo sapiens
tcgggcgaggctatattacggatcatttctctactcagaaactgaaacatcggcctcgcccgatgtgtaggaagaggcagataaagaatattgaggcgccattggcgtg

SEQ ID NO: 717103 - DNA, 237 bp, Homo sapiens
gctcaccggaggggtggcctgagatcttgatcacttccctaggcggttgcaataggaaaccggggcttccttgacgaactctagcgtctcaaacagagggagggccatgatgactgggcttggtttaaaaggaacatggcctttaactttcccggcaggcccgggcaggggacaagggagccagtcctcaatggttaaatgatatccactttactgggtgggttggtcttttttttt

SEQ ID NO: 717104 - DNA, 560 bp, Homo sapiens
accccacagcacctgagtcccatattgggaaggatgaagaaattccagatagttctaagattagtctgggctgtaaaaaaacaggttctaagaagaaatcctcacaatctgaaggcatctttcttggttcagaatctgatgaagattctgtacgcacttcttcaagtcaaagatcacatgatttaaaattttcagcaagcattgaaaaggaaagagattttaaaaagagctcagcacctttaaaaagtgaggatctagggaaaccttcacgatctaaaacagacagagatgataaatattttagctattcaaaacttgaaagagatactcggtatgtatcttcccgatgtagatcagaaagagagcgacggcggaaaagatctcactctaggtctgagagaggctctagaactaatttatcctattccaggtcagaacgatctcattattatgactctgatcgtcgctaccataggagctccccttatcgagagaggacgcgctattctcggacatacacagataacagagcacgagagagttctgactcaggtggtgtg

SEQ ID NO: 717105 - DNA, 519 bp, Homo sapiens
  misc_feature (29)..(29): n is a, c, g, or t
  misc_feature (65)..(65): n is a, c, g, or t
  misc_feature (67)..(67): n is a, c, g, or t
  misc_feature (69)..(69): n is a, c, g, or t
  misc_feature (76)..(76): n is a, c, g, or t
  misc_feature (78)..(80): n is a, c, g, or t
  misc_feature (107)..(107): n is a, c, g, or t
  misc_feature (173)..(173): n is a, c, g, or t
  misc_feature (211)..(211): n is a, c, g, or t
  misc_feature (238)..(238): n is a, c, g, or t
  misc_feature (243)..(243): n is a, c, g, or t
  misc_feature (247)..(247): n is a, c, g, or t
  misc_feature (293)..(293): n is a, c, g, or t
  misc_feature (324)..(324): n is a, c, g, or t
  misc_feature (333)..(333): n is a, c, g, or t
  misc_feature (339)..(339): n is a, c, g, or t
  misc_feature (348)..(348): n is a, c, g, or t
  misc_feature (361)..(361): n is a, c, g, or t
  misc_feature (504)..(504): n is a, c, g, or t
tcaggaaaattacaatcatgttagaaggngaaggagaagcaggcacatcttatatggccagagcnangngggaganannngggaggcaccacacactttgaagcaancagattgttttgaggtttctattatcaggagaacagcactgagcgggtggtgctaaaccgtttgtnaggactctgccccataatcccatcgggcgtcgcgaccngggggcttacatttcaacatgagattnggtgngganacagatccaaaccacatcaatagtgcatttcatgcttttgattatnttttgtaactatgttattgaactataatttntataccatnctattnaccaacgtnaagtgtgtaattnaatggtcttaagcatattcagagattgtgtgaccatcgctacagtcaattttaggacatttttatcaatgcaaaagaaagacctcaatcttcccattcctcccatcccggagcaaccactaatctacttcctctatatggagntttgcttattctgga

SEQ ID NO: 717106 - DNA, 630 bp, Homo sapiens
  misc_feature (609)..(609): n is a, c, g, or t
cctcatccgactcctggatcggcgaagctgctccgccgcgcgcctcctccgccggcgcggactccggcagctttatacgccagagtccctgaaactctgcgctttcttatttaatgcccctgcatcggatcaccgggtgccccaccatgtgagacgcagccgtagacaccagctccgaaatcaccacaaggacgttacaggcagaagaaggaagtgtggaagaggcagaaaatggaagagacgcccctgctaacgggaatgctaatgaggacaaatggggagcaggaggctgacaatgaggtagacgcacgaagaggacgaaggtggggcaggaagaggcaggaggaagaagaaggtgatggtgcaggaagaggatggctgatgaagatgaggaagctgagtcagctacggggcaagcggggctagctgaagatgatgaggatgacgatgtcgatgccaagaagcagaagaccgacgaggagtgacctagacgagcaccgaaaggtacaagttacacactagacaaagaagggggccgccgtgtgacctattcaacccgtcctattttcccggtcttccagaagatcgtaaagacgggggggtccacgntttccggagatagaaggaggg

SEQ ID NO: 717107 - DNA, 388 bp, Homo sapiens
agttgaaggctccctctggcaccccagcctgagccacagacgttgaggtgcaatgaagatggggatactggacacaactcctttcgcacatgtcaaagggaagacactgagagtcagacaaaggccaagtgcccagggtgcacaaagaaccagttaacaagataaaacatattatgggagcaccacctccatttcccacagcccaatttttcactatttacaacatgaagcacattagacaatgatgatatcaaaaatctcaaacaatattttcatagccccatggtcggggatgtggacaggcaagtggtatccctgtgatccagacaatcaacaccctagaatccagggactccagtacttccatcctctgacgctgccccagatg

SEQ ID NO: 717108 - DNA, 182 bp, Homo sapiens
atcgcactcgcgctggtccccattcggccggggccaggctccggcatcacttggcgcctctccccatgcaactctgccaccgctgggggcctcccacctggggctcccagtggcaccctgctttccctcatggtttggcttccacttgccccgggccgccttggggctcctctcacatcgca

SEQ ID NO: 717109 - DNA, 341 bp, Homo sapiens
cagagaatgacccagtccatagaagaactatgggataagcttcaaagctaagtgtgtactattgccatgattatacagtagactcagagtaccatatattataaagctgctgtgaagctgtagcactcaggaatgaaaattcttagccgggaaagaattcagagcgtgaagcaaagcattgacttcatggctgacttggagaaaactcgaaagcagaaagatggaacagacacctcacagagtggggaggacggaggctgctggcagagagagagagaggactctggagatgccgaagcacacgccttcaagagtcccagcaaagaaaataaaaagaaaga

SEQ ID NO: 717110 - DNA, 250 bp, Homo sapiens
tgcagggtgtatcgacggactcaaggtgatcaagaatctctaatagttggtggtggctcacgccttgtaatcccagcacttggggaggctgaggcaggcggatggcctgaggagttggagaccagtctggcctcgacggcgaaaccccatctccattaaatatataaaaaaattagctaggtgtggtggtgtgcacctgtaatcccagctactggggaggctgaagcaggggaatggcttgaaccaggga

SEQ ID NO: 717111 - DNA, 303 bp, Homo sapiens
atgcgctcatcagtgtatgccctcatccagtggcatgccctctatcagtggcataccctcatctcatgccctcatccagtgtcatgccctcatccagtggcatgccctcatccagtggcatgccctcatccagtggcatgccctcatccagtggcatgccctcatccagtggcatgccctcatccagtggcatgccctcgtccagtgcggatgccctcttcgcatgcccttcacatagtggtatgcactcatcccatgccctcatccagtggctgagggcatgggatgagggcatgctactgg

SEQ ID NO: 717112 - DNA, 244 bp, Homo sapiens
gctgtggggcttggtgcgtccccaccaaatttatcttgatgtagttcccataatccccatgtgtcgtgggagggacccggtaggaggtaatcgaatcatgggggcaggtttttcccatacatgttctcgtgatagtgaatacatctcacgtaaatctgatggttttataaagggcagtttccctgcacgtgctctcttgcctgctgccatggaagacatacctttttgctccttctttgccttc

SEQ ID NO: 717113 - DNA, 210 bp, Homo sapiens
acaaggcacagacagaggaatgttcagcggtccaatccgttctggaagcgccagagcttgctagagacgtaacgtacagctgattagatatttccttgttacaatcatctctgtgagcaggagtttcagaatttaaatcaatcgtgctcaggatgcactgttagctgaacacacatccttatttggctttatgtctcttaagctggtggc

SEQ ID NO: 717114 - DNA, 584 bp, Homo sapiens
atgactttccaaaagaagagacttatgatagagtcaaggtttcttaattacagaattcattttaagtggtttgtggaactttaaagtttttaagtaacatgcatgggttccctcttcactaaatggttttcaagcaaattagggcaacaaaagttggaagaaagcttatggttggggacgacttttgctctgtccaattgtgcgcacagggctctcaggggcgcgcaattcacattttatcgtcgaattcgaacgtaaggggcaatttaattcaggaaacagaacaacaatttgggcaaacctttgtggactcccttggggggtgccccccaaaatcaacgcataagtgggtttttagaagcgcgcccatatggcggccgccacgaaaagtgtatttccttgccattttccgccgtaagtgccaagaacccctctttgggggagggatttaaagccccacgaacgtggtggattataaatggggtttccaaaccccttgtggggggcttcttcgggggggacacaaacatgctagtgtcatacgtctacagcccacctactattcgtacgtaacatgtgtatag

SEQ ID NO: 717115 - DNA, 345 bp, Homo sapiens
tcagagaatccgatacaacaaaaccccgtatgactgtaatgcatgtactgcacgctatcaccgtcgtcactccttccttattacacatcagagaattcatgctggagaaaagctctatgaatgtgatgaatgtggtacagttttcacttgggatgcatcccttattcaacatacgaagagtcacactggagagaaaccctatgtatgcagtgaatgtgccaaagagtacattgggacaagcatgctccttgtacatcagcgaactcatactggggagaacacttatatatgcaaagaatgtggcaagggctacaccatgaagagtactctcagtatccatcagca

SEQ ID NO: 717116 - DNA, 978 bp, Homo sapiens
gcacaagactgagtataagtttaacgatgcagaatagaaagagcggttctttatcggtatttattgacttgtgggaacacctaattaacagcacgaagaagaacaatgtacctctgaaactaactgtaaatttattgaagacaggctccatctctgactaccacatcttcttccactattatagcgcacaggttcacatataggtgagtattcagttaagattgaagagcaattgcacgtttcactgtacatctcggtcgtaaggggtgcactgacataatcgagctgctatagacgacaaagctgccggtcagtgctgtggacaattgtgaataaaggaagatgacatttcataaatataggacaagaggagaaccttgcgtagcgattcggataccttgctacgtttacgacatgtaaaatggtacttccccccgtcgctcgagtggagtgaaagtggctatggccgagtaatagggtgatgcgaggagatgggaagcaggatggactgataaatctgataattgtcatttcaatcacgactgagttaggcgactcgcgagttgttatgcaacaaattattagtgagtatagtggggtaattcgaggatgtgtgagttactcgagcgcaagtttctattctcatgtgttaaaatgatatgagatagattgcgcatactcttattcgaaatatgatgaagagacgtgtactgctactactactatgacggagatatgtgatgaagcacacacaggacaaagagtaatgccaaatgaagaagaagacgagacagcggcatcttgtcaaggatctgttgacattgcgcagtgagaggagtgggtgagtaagtggtcggttctaattctattgcgtgttgttacccacaaatatatctcattacgatagtatcaatgtgtaagatgatggctggattataagtacacatgctagtatttatagatgtgtatagtgtgtag

SEQ ID NO: 717117 - DNA, 819 bp, Homo sapiens
  misc_feature (128)..(128): n is a, c, g, or t
  misc_feature (292)..(292): n is a, c, g, or t
ggtgtaacgacgtttataacgcattgccgggatctggaactttccaaaagttgcttgaaaaagctcacaaatgttggttggactgaaattatgagggctgattccccatgaggctttaaacttcatangaacacttttggctattacactccatgaggcatctgaaacggcaacagctaggtctcttacagtgctttcatatgtcatgacaagtctcagcatcagcacgtcagagtagtcagaatgactttcgtgcatattcatgcatgaacatgctcagatagacatcctntgcgtcagcatagcatgtgcatacatcatgacgatcaccaagatcagcaactaatagagccgattcagcaggcatctcatcattggtctcgtcgacaatgcagtgggtttttactacagtggttcgtcacagcattcgttcatgtaactgtagctcgaatcttgattatcacagatatacttggcaaggtacatcctgtcatcagtcatttcaagcagatctccatgacagcgctccgtgtggactgtggtaagatctgtcactaactaggaaacgtctgcatactcagctttgcgaaatctctggctcaggcgagctactgcccatgctttaacagctctttctccaaatttatggagactggcacacttgagtctatgtttggcagacgcagccttcccttcatccagaagttcatcgagctttgccagcaggcaggcagctttatcaccaactcggcggcattctgtcaaagcagctttataccttttagcaaagaaaaggagttacggggcataatagctggt

SEQ ID NO: 717118 - DNA, 450 bp, Homo sapiens
ggtgtggccagacctgctattctagattagatcagtgcccataccaatggtaaaaattttaggatatcattcttaaatgtatacataccacatatgtatggtaatatttacgtgtgctatattagaaagtatttattctgttaaatatatatatgtgtgtatatttttaagtcttccgacagacttctttgacatgttatgtcttcaggaagccataggctctcatgggaaattggtgtctggaattatcactgcattaatgtaataatatatatttactagaacagtggtttgacatatgaaaatcttaatttatacaccaagcatacttgaatgtagacttttccttctctatagaccagaaaccatggcatttatttggaattgcttgatgtcactttaaattgagacattcaatccattcctcttttgaatatgaaaaactttttc

SEQ ID NO: 717119 - DNA, 622 bp, Homo sapiens
  misc_feature (223)..(223): n is a, c, g, or t
acaaacacaggccgatgctatagattatgatgtgacttcgcttgagattaggatcagttccacatatattcgactcattcaacgcagtaacaagactgaggctgaagatgtagtatagaagggcgacttgatttggcaacaagtttataggtatgctagcgttgcttcgttagcgacacattaagtcagattatatgtgacatatcgtatcggcgcgcctttntcgactcttataatcatatcaattgtcttgtcgtgtcatcgcaaccaacgatagagtgggtggtgcggttggcatatcatattaccttcatacaacaaatatagttcggtgacatccctaagcaggcaagaaaggtacaaattaaatacatagtggtttggtttaagttagttccagtggtgggtagggtgttgttacaaaccctgttgggtggtatttccagcaacgaatgtgggtgggtgatatcctgctgcaggtgggttttgggggggcttactttgggggaaaaagagatccagtggtgggattttttaagcgaacaaaatttgttcccctgttggacgttgtcccacttcttgttttaactctgtgtcaaccgggtggggcgtggtcgccctc

SEQ ID NO: 717120 - DNA, 1003 bp, Homo sapiens
  misc_feature (665)..(665): n is a, c, g, or t
gtttccgtctggttccacagttgggggcggtgtgttgtgtgcaacgggcggtgatgtttggtgtagcgaaggcgtcgcccctggtgtgtcttgctcacgcggggtgtttgcgggggtgttgtgtgtggggccgcagcttgttttcagctgcccgccggggaggccgccgttgtgccactgttgtgtgcttgacgctcccgcccttgggggggccgcagcccgacgggggttgcgccccgccggcgtggtcttggggtgggcgccatcttggtcaggtggtgttagtgtgtgtccgagcggctcgggtgtttgtgttgggaggggggggtgtgtgccgccctgttcgcccctcctcccagtcggtggtatgcttgtcgcggggggtggccccttcttcgtggcacagtggtccccgccgcggggtggcgcgacgcacacttgtctgtcgctcggcgcgcagttgctctgtgagggcccccttccccccttgtttgtccccacgggagggcacgctcccggagatattgggttcacacggcctcttttcttctggccccacgcttctcggggaaggaaaacactcggaggtgggtgtctccacagaatgtcgcctctccacgtgaccacacttgagagtgtgagaatgaccacactatgaggcttgngcgcacaggcctcttcacgctatgggctctccacgacccgcagagggccaagatgtccccccacgaggcgcctcttcacagccatattcttcctcaaaaaggaggccctccccgatatgttgtttcttgtgatgtcttcgttcaccactccttctttgtttccttctttttcacccacgcctaaggccctggctgacaccacggagagcccaccgttataacttgcacggtccaccgtgaacatagaccacccccaagagccaccttgctctgtgtattcccccccctcatgatcccccttttattttcataataaagagtgacgttaccccttgtta

SEQ ID NO: 717121 - DNA, 305 bp, Homo sapiens
gtggagaccaggacgccatccccattgatgacatcctgggacgagtccagggtgaacaggccgctgatgaagcgggtcgccgcgttggacaagcgggtgttgttgttcagcgtgacctcggtctcccggtccggcggatagacgaggtggaaatccgaggcgaagttctggatggtgccgaggaggacttctcctgaggtcagcttgatcttggcgcgaacggtcattggtctccctacatcggtgctctcagagagcgtgtatctctgattattctacaacatcggtggtcaccgagtcgagaa

SEQ ID NO: 717122 - DNA, 451 bp, Homo sapiens
aagcaatagtggctatagacaacggatcaacaaatgagcctggtcatgtaatcataaaacttatacagactctgatattttcatgagtcgtgaaatgtaattcttcaacagactttatttttcaaccatttaaaaacataaaaacccctttaatacatgagtgtgggccaggtttggtctgcaggctgccagcctatgctttaggggattgggtgccacgtgcctggaggggtggacttcgaaggcttctgagatgctggtaaaattctgtcctgctgtttacatgagtgtgtcttttataaaactgctttgagctgtacacttgtaatttacatatcttcctgtatgtgtatttcaatacaaaatgttttttgaaagtgcttttaaaaaagaaaacaatttaaaaattaaaacaaaatttgtctacaaaaacctaatataggtgaccaac

SEQ ID NO: 717123 - DNA, 1040 bp, Homo sapiens
gtctgcagggctggtcgtggacgtcgctcgtgctctggctggctccctccccacagcgcgctggtgtgctcggcggacatctggctcgtgggggagggcgttcgggacgcgctgctgaggcgcccctcgtcgtagacgggcggcttcgggcctttcttcttagggtcgcgctctcgattggagtcattcggggtcctaaatactcggactcggtgggacggtcgacgtgacagaagcgcgcgagagggtcgtcgggcgccgacgcgaccaccatccaaagtgcgtgttccctaagatgtgcgcgtcatcccatcctcttcgggaaggcaggggtccctcaagcgtgatgtttggtcgtctgaataatgtgtcgaatcaacaggagtttccaaggaaacattgaaggggttgggatagaggtccttcagaacgacgcggaagggacgcggctggcgtaagggcggcaagggatatcgagcgagatggttctttcttgccatgagatgatgcaacagagaaaggaagacaatctaaatcccgtgggaagggggaagaagggcgcagggacggcattcactggcggtttgggtgcgaattctttaggggcgacagagcattcatggtcttcgataagtaaagccgcggtaatggccaggcgcttttttgtcaagacatgactctgcctttgtccatcgactacaaagggaacctcgccgggttattggcgcccgtactaatttaaagttggacacacgcttaaatttgacttagcccaaactgaaggaaggacaaaccgaacgtggaaggtgactccttcgggggtaattaagtcggtgccttgggggcccctctgaggttctagcctgggcccctataatagaaagaaaaacaattggatttttacttgcccagcgactccggaagtgagtaactgccctatcacaataagaaaggaaaaggcgcttgaaccttcggggtacttcaagtcgcaattaccttttttgcaggtcaaaagtgactaccatggaaggtcaagggac

SEQ ID NO: 717124 - DNA, 917 bp, Homo sapiens
gatcagacgtgcgtaacgcgtagcaaggtatgtcgatggggtccctcggcgtggttgagtcgaggaagatggggcgtcgttgtgattgctcctgtggtatatattcctggtgcagacgagattcaggcggtgtcaacggaattgcataagtccacgatgctctatcttgctcaagaatgcgattgctcttccaaggaacgcacttggtgcacagtagtcgtcaattatgacttgcatcgtttgaactgacgtttgagtacctgctatagagagacgcgagacggcacgacaaaggaaaaggggggtctgctccgatagttgcttagtaatccattaatttccttgtcgagtggttcatagagtctcaagactcgacatggtcgtaagttatcctctgctagtgcacagcatgcagacggatcttcattcgttagtaacacgaaggcgcattaccatgtgcgtatggtcatcggttctcaaggtacatcttattactgatgggtcttctgatagatgcagagatcagtatagttattacgtgaggtaatattggtacagtcggtagatttacaggaacatagtaagagcgtaatcgcaaacgaactgttatggggtggcataggaataggggggtcaggagggtttttcctccatggcgaggggattggacggtatgagtagtccatccggaaggtggggctataagtacagttgtcctagggagttgggaacggctccacggaggttcctactacgaggtcgctgacgtgcccaggcgtgcagttatcaagagtccgcagttctcagatgatcagacgtagattgcgccggctctcctggaacttcgacggttccaaggacgtcgtttccggcgaaacctcttggccaactctgttctgagattccgggccagacca

SEQ ID NO: 717125 - DNA, 514 bp, Homo sapiens
aattcggcactgaggggaagctccggctgcaacttcagttctgaccagaggttctgtgaaccttcaggatttagcaggtttccaggaccggtgggtgaatctacccggggaagttttggtggacaagagctgctcgccagctgtcggagtgggagaggccagcgtgctgcgtccatccacttcacctaacacctctgaagtgtctgccctgcagtgtggcaagcgtggtgctgagcgcttctaaatccgtcgctttaaagatcattagtacaatgttgtgagagggttagctccatttgaaaattattttcccgtgattacaaaagaagcgatgctgactgcagaagttagaactgggagaagactcatcacccccatgatcatgtcaacaactgccctccttcagttttggtttgttttgtgtgtactctgtcatctttccattgaggaaactcaggctagaagaaggataaaaacaaaacagaaaacaaaacaaaacaaaagtgccctgtag

SEQ ID NO: 717126 - DNA, 240 bp, Homo sapiens
cctcctctcgttccctcactgatcgtcctttcttcattatcagcagacaccattacgcaccaattcatggcagcctttcacatgttcactcctaatctcagcgcacagctatcccatatttcccccctgcatttttacgggcacttctcctacgtgggttatcaggcaccctaatccttggcggttccgggaacagtcctatacagcaccatgcacattgcattctaatcaaggattgaa

SEQ ID NO: 717127 - DNA, 259 bp, Homo sapiens
tttttatgccccacccccccaagttggggagtgtttttgggggtccaaagccctcccccagccaggaaaaaacctcccggaggggttttttgtggggccctgtgtcccctgctcgggagtaagggtggttttggggtcctccctgcacggacccccctgggcctgccgagtgttgtgtttttcctcagtttgggtgtgggcaggagcggcctgcccagtttcccccagggtgagggcaaaataaaaacggggagtgtta

SEQ ID NO: 717128 - DNA, 498 bp, Homo sapiens
cacgaggtctttttgccatcaaaagtcctttttggggtttattttcatccccacttcacactgcatgcaggatttgaaaggctaagtgtagacactaaacaggtgtctgaaataacaattcacctctctctcccccgagggaaatcaggtgtcgccacaatgttctaactcagacttaaactatctgaagatcagtgcatgcatctcttctgggaacagcataacgttccatctcagctggtgggagatgaatggagctcagatggtgagctttggggtgaaatttcccaactttcaggttatccctacctaccaacgcactacaatctgggtaggacccagcagggcgtggagccaggcaacgcattgtgtaggaatcccagccaggcagcagctcccggagtctggcagcccctcctcgtgccctcagcttccccaaggatgccttcggatgcccagctcagaagcacacagcctcatcactagcctcatcactaa

SEQ ID NO: 717129 - DNA, 446 bp, Homo sapiens
tggccttatgcagcaggcccaggtcgtcattaaggagtgacccctttcctgtaacctgcactttgggatggtagaagtttctttacctgctgacaggtttggtggcactgctgttacccctgggccctgatggagctaaaatcacatttggtaccagcagcacatatcccaagtgtgatccttcatcccaacactacctcttggagctgttacactgggtagagctagcatgccagcagattctgcaggctccaaacacaggccagaagccagactccagcatgctgcctgaatctgcattccctatttccggtttccctaaaccaacaatggtttttccaggccttctagggacccttcacctaagtaggcatttactttattggtcttacctatgcactttagcttataaagccatttaaaaacgatgattagagaaaaaaaaa

SEQ ID NO: 717130 - DNA, 534 bp, Homo sapiens
ctcacgactgggtttcaagactagttcgaggctgaggctggatgtcccttcccatactgccaccttggcactagagggggccctagggaaaatgcctacttgtattgaggaggctgtgctatgaatgagctgggcacaagacggtaggctcactgtgcatgcccaacaaggcagggtgctatattgctggccaggcgctttctcttccgctgcccacacccccacaccctggcccagcacatggtctggcaccagcacctggctcggctcatcatcagagctggttctttagtggatgaagggaaggaggacatacctgagggagcaggatgcagctcagagccatttaattttaacatgcaaagaaatgtgagcttaattagtactcccccaccctgatgggtgtgagatagaatttattgttcacagatttattcagtaagctgatgagaagctctttaaaggggcaaaaaaaaaccgttagcggagccaacatgagctcatcaaaagccagtcttgcgaaaacaaactcat

SEQ ID NO: 717131 - DNA, 331 bp, Homo sapiens
  misc_feature (62)..(62): n is a, c, g, or t
agccaagtggggcaccggggcccaatggggcagcaaggcatcctgggcatctctggcccccngggtcccatgggccagccaggcaaggttgccccctttgtttcccttgattgttttggcccatcccaatggagcaccagtccccccccccataaacccatgaagggcccttttggttgaaattccccccccccctttggatgaaaaacccctttgggaaaaaagggccaaagcttaaaggcctttgtgccaggttgggaaggtttttttttttgtggtggtggtttttaatggcggttaaaattttttaaaaaataaagaacccaaccta

SEQ ID NO: 717132 - DNA, 298 bp, Homo sapiens
  misc_feature (50)..(50): n is a, c, g, or t
tggctcctcttcagcaagctatctgtaaaaccagctcaggtgggcatagncctgaactccagggttgaatcagtccctactgtaccctcattttatgctggagttttggctttcaatggccttcatcgtcagaaatcccttggaattcacaaggctcattcccttcaccgggtgtctccaggtagctttgcttaatgttcttccgtattcagggcatattcatttcaatcttccttcccacggtggactggctcatattggtaaagtcccctcccattttcactaagattagtgggta

SEQ ID NO: 717133 - DNA, 361 bp, Homo sapiens
  misc_feature (40)..(40): n is a, c, g, or t
ctgatccggagcgccggatgctgattgaggcgctgggtcnctctgcgggtgccgaatgatattgaaggcatccttgcgcggcggcgcggcccaccttggcgcgcatctgctcaaggcagagaacgaacatgtcgaactgcatgaagtccggggcttcatggccggtgacgtgaagggcgcgatgaaagaggcgcaggccgtcgcccaagggacgcgctgcaagcagttcctgttttcggtgtcactcaacccgccggaacaagaaccggtgtccgtcgaaaccttcgaacgggccatcgagaaaatcgaagaacgcaccggcctcaagggtcagccgcgcatcgtcatcttccacgaaaag

SEQ ID NO: 717134 - DNA, 113 bp, Homo sapiens
ctgaaactggggcttcacatgctgacagaacagctacaaaatctggggtatcccatcctacacgttcggtcatttagctagcataggtacaccagaactacaggaaaagatgg

SEQ ID NO: 717135 - DNA, 725 bp, Homo sapiens
  misc_feature (8)..(8): n is a, c, g, or t
  misc_feature (87)..(87): n is a, c, g, or t
  misc_feature (99)..(100): n is a, c, g, or t
  misc_feature (118)..(118): n is a, c, g, or t
  misc_feature (126)..(129): n is a, c, g, or t
  misc_feature (131)..(131): n is a, c, g, or t
  misc_feature (141)..(141): n is a, c, g, or t
  misc_feature (146)..(146): n is a, c, g, or t
  misc_feature (176)..(176): n is a, c, g, or t
  misc_feature (180)..(180): n is a, c, g, or t
  misc_feature (197)..(197): n is a, c, g, or t
  misc_feature (199)..(199): n is a, c, g, or t
  misc_feature (225)..(225): n is a, c, g, or t
  misc_feature (230)..(230): n is a, c, g, or t
  misc_feature (251)..(251): n is a, c, g, or t
  misc_feature (259)..(259): n is a, c, g, or t
  misc_feature (268)..(268): n is a, c, g, or t
  misc_feature (377)..(377): n is a, c, g, or t
  misc_feature (379)..(379): n is a, c, g, or t
  misc_feature (383)..(383): n is a, c, g, or t
  misc_feature (397)..(397): n is a, c, g, or t
  misc_feature (471)..(471): n is a, c, g, or t
  misc_feature (490)..(490): n is a, c, g, or t
  misc_feature (502)..(502): n is a, c, g, or t
  misc_feature (513)..(514): n is a, c, g, or t
  misc_feature (517)..(517): n is a, c, g, or t
  misc_feature (530)..(530): n is a, c, g, or t
  misc_feature (545)..(545): n is a, c, g, or t
  misc_feature (623)..(623): n is a, c, g, or t
  misc_feature (644)..(644): n is a, c, g, or t
  misc_feature (650)..(650): n is a, c, g, or t
  misc_feature (664)..(664): n is a, c, g, or t
  misc_feature (724)..(724): n is a, c, g, or t
tgcgagancgccacctgagcctcaccgcttagttcataaaacagccctgtgtcctttctacaaagccaggtcgtgttttctacccanagttcaggactnnagcgtagacagcaaacanaaaacttnnnnantttttgaaanaaaanagtcttagtagaagcaaaacaaacaaccanaatntaaaccagccgcgaggnanaatttcctagctggaaaggagaatangtcanaagaaaaaaaaaaaaaaaaanatgggaanatgcctgtnccacacccttgaatgtggtccacagattcaccagctccaaggcagcatctctttccaaagcacctgcagcaggaggctgtgtggggcaacaaagtcactcctgatacananaatncccccccgcccgcngccatccaaatggctccatgcacagctggcccctccgcttctcaactgtgcgctcatgtggctttgttagagtnttgggggtgaaaggtgtgngttataggtggnagcgtggctcnngtngggccatttagtngggcggccgggtgtngggggccttctcctggacttcatcatactgcggtggaggagtcaaaggctctatcggggggggagggacgtttttttntgggaggttgatcctaaaatntttgangtgaagcttttcanatttaatccttcgaactttcagtggtttcagtcgtttggccaacttagagttctgcctgng

SEQ ID NO: 717136 - DNA, 297 bp, Homo sapiens
tgaaagcacacccccaggtgccggacggggtggaagtgcgcggcaagcaggtcgcggcttatacctgggatgaccgccaaggcaaaaacctgctggtactcgccgagcaagtcggtgagcgcgatgacgatggtacccaatcggcctttgtctacgcggcgcaatacgtgctgggtggcgagcgccccaagcgcgtttggatgctgtacgacgatgtgcagcactgcgaattcgacgccgggctgcgctttgaccgggctgccaccaaggtcaccgacctgctgggcgacggcaata

SEQ ID NO: 717137 - DNA, 266 bp, Homo sapiens
gccgacagtatctccgaatactttaatacttgggttgaaaaggaagcatgcactgtttcccacgtgttgtcccagtactttagtgttatgatctcatttgggttttggtaaaagcaggcttcctacaagcctagtaaaggaaattctttctttctcatttggccaaatgtagcatttaattgattttttttttttttttttttttttttttttttttttttttttttttttttttttttttatgtgggggggagagagaggggcga

SEQ ID NO: 717138 - DNA, 830 bp, Homo sapiens
gagaacctcaacgggaaggagtctacacagtcttcgtctcccacatatgaaggccttccgagccctgtcaccaagagaacggagcagactcttggtgagatgccaaggaacttgccaactatcctgaaataccacattggtgatgaaatcctggttagcggaggcatcggggccctgcgtgcggctaaagtctcatccgaaaggtgacaacgctggtagagtcagcttgtaataaacgagagtgtggtgagtgtcaacgaatggagcctgttgtccgagcctgactatcatggccacaaagtggcggtggtccgatgtcaatctaccaatgtttctgcagcctccagccaagcaagacctcaggaagagaggggatgagacttgctagactctgtcgcttgtaggatcttcaggacaagcagtcagcgcttttgccaggggcttcccagaggtctgtgcgacgtaggcccctgtctagtcaaaagttagttagagaggatgaagcattagctgtgaagcactacaggaggaatgcatgccacggtagctctccgccaatttctctcagatttccgcagagactgtctgaagtgtttgtcaaaagccaagtatcacactttaatgtacatgggtcgcaccataatgagatgtgagcctcggtgcatgtgcggggaggaccgagagagaatgtactttgtcccatcatgttcccctaagacatggtgtgaacccactgatgcaggaaacttgggatgtcactgctgacgattcacttacagagaggacctatccaaatgtggaattgggggctatgccaagtcctggaaagc

SEQ ID NO: 717139 - DNA, 265 bp, Homo sapiens
ctgtttttttttgtgtgagcaataaagctgtttatttcacctgggtgcaggtgagctgagtccgaaaagagagtcagcgaagggagatacgggtggggcccttttataggatttgggaaggtaaaggaaaattacagtcaaagggggttgttctctggtgggcaggggcgggggtcacaaggtgctcagtgggagagcttctgagccaggggaaggaaattcacagggttaatcactcagttaaggtggggcaggaacgtcgacg

SEQ ID NO: 717140 - DNA, 640 bp, Homo sapiens
ggtaaaacgggagatgcgccaatcttgaagtttggtgagtgcccacctgtgatatgggtcccgcaaaccccagtgtgttgagaaacttttctagacttatcacaccctttgggtctcctttctgtttttgtgattatgtagacccagaacagttgtcggtggggggtctatctctcaacacagtgggcacaatagaaaggcttgctgggaactgggctcaaggtctaccccagtctctgctccccagataagacgtccaggataggcgcttataatggattattatctcccttatacactgcgccacccccacattttaataccagatggtgggtagaaacaggtttctcagaaacatggtttgttgttctctattggctcattttagatgtttaggttagttaaagaactggggtttatagagtaccaatagctgatctgtgaaaccctgctcagaagagaataaggaggaatgtttgttgtgggcccctcttgggttttttttttgcgtgtggcccattttaagagtatattagatttttataataccagaaacattttttaatgggaaccacttggaccccaaaatggtcaccagaaaatgtggagacccccattaaaaaggtttaatggaggaaaa

SEQ ID NO: 717141 - DNA, 219 bp, Homo sapiens
gctcgaccaacctaataaattccttatttacacctggtaagacagcccatttcttttgtttttgttttgttttgtttttgagacaaagtctcgctctgttgccaggctggagtacactggtgcaatcttggctcactgcaacctccacctccagggttcaagtgattctcctgcctcagcctcccgagtagctgggactacacacatacgccgtcgacg

SEQ ID NO: 717142 - DNA, 120 bp, Homo sapiens
  misc_feature (4)..(4): n is a, c, g, or t
caanctctcctgtttccctgtctctactaaaaatacacaaaattagccaggtgtggtggcgtgcacgtctgtagtcccatgctactctgtggagggctaatgacaaggagaaatcaactt

SEQ ID NO: 717143 - DNA, 828 bp, Homo sapiens
gcatcatgttgcccaggctggtctcaaacttcaggattcaagtgatcctcccccagcactttgggaggctgaggcgggtgggtcacgaggtcaggagatcgagaccatcctggctaacatggtgaaacccgtctctactaaaaatacaaaaaattagccgggcgtggtggtgggcacctgtggtcccggctacttgggaggctgaggcaggagaatggcgtgaacccgggaggcagagcttgcagtgagctgagatcgcaccactgcactccagcctgggcgacagcgagactccgtctcaaaaaaaaaaaaaaaggggccattcaccttccaccattgcccagttcacattgtcctgggttctctgggccttctcttcctccctcaagggaagtcctactcccctctgcggggtgactggttggtgcccccacccatctcttccccaagcactcacctgggctgggaccaggtctcacgtctcagtggggccgctccccggggaccacccaagcccttccctctttcccaggactccacccctggtgactggtgctcacgttgggtgcatccctcgtccggtctccctgccaaggcctgtgggctctgcagaaggtgcccattgaaagctggtcctgtgccctctaacctcagaggggttcagagccaagctccgaggaccccctgcgtgtcaaacagtgtcccctgggaacacgttgcgggaacagtcctgcaagcaggggactgttggccctgtttcggaacagctttctggagaagccagtgaaggcccagaagttggcgtgaacaattaaatattcttaaaaa

SEQ ID NO: 717144 - DNA, 916 bp, Homo sapiens
  misc_feature (114)..(114): n is a, c, g, or t
  misc_feature (144)..(144): n is a, c, g, or t
  misc_feature (150)..(150): n is a, c, g, or t
  misc_feature (164)..(164): n is a, c, g, or t
  misc_feature (204)..(204): n is a, c, g, or t
  misc_feature (207)..(207): n is a, c, g, or t
  misc_feature (230)..(230): n is a, c, g, or t
  misc_feature (310)..(310): n is a, c, g, or t
  misc_feature (336)..(336): n is a, c, g, or t
  misc_feature (342)..(342): n is a, c, g, or t
  misc_feature (387)..(387): n is a, c, g, or t
  misc_feature (403)..(403): n is a, c, g, or t
  misc_feature (429)..(429): n is a, c, g, or t
  misc_feature (457)..(457): n is a, c, g, or t
  misc_feature (459)..(459): n is a, c, g, or t
  misc_feature (572)..(572): n is a, c, g, or t
  misc_feature (579)..(579): n is a, c, g, or t
  misc_feature (597)..(597): n is a, c, g, or t
  misc_feature (691)..(691): n is a, c, g, or t
  misc_feature (711)..(711): n is a, c, g, or t
  misc_feature (720)..(720): n is a, c, g, or t
  misc_feature (766)..(766): n is a, c, g, or t
  misc_feature (803)..(803): n is a, c, g, or t
  misc_feature (835)..(835): n is a, c, g, or t
  misc_feature (884)..(884): n is a, c, g, or t
ctcacagatctcctgaaaggtcctgggaccctttggacaaagaactgctgtctacagaaatacttgtatacaaagattctcactgaagcaatattttgggctggttggtttttnttttttttttttttttttaagacagtgtcnggcccngtgtcccaggctanagtacagtggggggatcttggcttcccgcaacccccgccntcngggcccaaacgatcttcccaccncagcctcccaagtagctgagactctaggcacacgtcaccacacctgcctaattttttttttttttttgtagagaaggggnttttgccatgttgcccaggctagtcncaaacncctgagcccaagcaatccacctgcctcccaaagtgctgggattanaggcatgagccacagnggccaacctgaagcagtgtttttaanagcaagttatgagaaacaatataattgncnagctgataacttttttcactggatgttgagatttagcaagcccaccaccccccagggcacccattcatgtgaattatcttctttcttgtgtatgtagaatggcactagtttanatcatcngggggaatttttaaaaanagtcattcaaataaatttttgttatgtggttcagatgaggaacctcagttgaaagaaactgttaaggaatggtaaattggggtacatttttctncagcagttaaagagaataanacaaatctntcatgaaatgaaaaaatattcatgacagtaagtgaaaagttgaggncaaaatatatagtatgatcctattttgtcttaaaaanaaatcccaaagcagaactgtagctgggaattncatgtgtaaatttacagacagaggcctagaagtttctcattaaaactcntaactggctacatctgctaagtcaagtagggg

SEQ ID NO: 717145 - DNA, 742 bp, Homo sapiens
  misc_feature (91)..(91): n is a, c, g, or t
  misc_feature (140)..(140): n is a, c, g, or t
  misc_feature (155)..(155): n is a, c, g, or t
  misc_feature (171)..(171): n is a, c, g, or t
  misc_feature (176)..(176): n is a, c, g, or t
  misc_feature (190)..(190): n is a, c, g, or t
  misc_feature (202)..(202): n is a, c, g, or t
  misc_feature (206)..(206): n is a, c, g, or t
  misc_feature (210)..(210): n is a, c, g, or t
  misc_feature (217)..(217): n is a, c, g, or t
  misc_feature (249)..(249): n is a, c, g, or t
  misc_feature (258)..(258): n is a, c, g, or t
  misc_feature (261)..(261): n is a, c, g, or t
  misc_feature (286)..(286): n is a, c, g, or t
  misc_feature (300)..(300): n is a, c, g, or t
  misc_feature (310)..(310): n is a, c, g, or t
ggccgagcccgcgccccccagaccccgagagctcgcagctccggcccggcggcgatggcgcggagcgtgcgcgtgctggtggacatggacnggcgtcctggccgacttcgaggccggcctccatgcggggcttccgccgncgcttccctgaggangccgcacgtgcctgcntggangcagctgcacgcanggcttcctggcnccgncgangcagtanccgcgtcccctgcggaccctgacctggcggantaaagtggncangtgtgtacgaagcccctgggctttntcctggacctggangcccatcccngggagccttggacgctgtgcgggagatgaacgacctaccggacacgcaggtcttcatctgcaccagccccctgctgaagtaccaccactgtgtgggtgagaagtaccgctgggtggagcagcacctggggccccagttcgtagaacgaataatcctgacacagggacaagacggtggtcttgggggacctgctcattgactgacaaggacacagttcgaggccaggaggagaccccaagctgggagcacatcttgttcaccttgtgccacaatcggcacctggtcctgcccccgacacggagacggctgctctcctggagtgacaactggagggagaatcttaggatagcaagcgcggagctgcgcaggcgggaatgagcggggatgccggggcagcagctgaaagctaacgggaggggcaggccaccaggg

SEQ ID NO: 717146 - DNA, 760 bp, Homo sapiens
  misc_feature (609)..(609): n is a, c, g, or t
ctcttgagaagggaagttgcagagtcttgggcgtcatttacagcagtatttcaacctgttgtaatgtatgccagataacggtgtggcagagaagacacagcttctgaatattgagtgtaccgtgctacttggtatgctctgtgtcttgtgcatgaatggtccaggtcctccagatcaaataccagtatgctgaattaggcaaattatactcagtagtgtcagagcctgtatctcgcgtggtgtgacatactgtcatcattgcagagtagactgcagttctgtcaattcaaatggtaaatcctgccatcgtatcccaactcctgttatggctgaatcctcaacttgtatctaacaaccctagtatagtggtcgcatatctacaagtcgagtagagtgtagggcatggagctacttttgattatgtagaagaacgagaagatatattgatgagaggcaacatatcatatgagagtccttgctggtaaattgcagtacggaaaacgcggtacaagattcgctctcgatcttttctcgctggctgaggagtaatcctcgagttctcaatctactgatcctcagatgaagctactctggacaggttgacagtanttcctaataaccctatgaacgtgcggaccctagtttggagtcgtggcctttgtgcagaaatcattactagatctgaggaactcctgggtcaaaacctcgaagaaattcataacctgcactgaaagggaattcgcagatgaccgagagtggg

SEQ ID NO: 717147 - DNA, 785 bp, Homo sapiens
  misc_feature (380)..(380): n is a, c, g, or t
aagaaatgtgcagatcctgatatgaatgctgtcctttataccaagccggtcaggagctcagtactatctgggcaattttctgtgctgctctcaatagatgtgacagcttgcgcagatagctaaatacacctggccacacgtcaatagcaataataagtaggtgccttatgccatactgagaagctgaaacactttgccgaggccgtgaactggtgtgatgagggactgcacatatatgccaaaagataagaagcttctggaaattgacgtggctaaatgcatcacaagctgtaagcgcaatatgacacaagagcggcatgtgaggcaacaatgccaacattgaaacaagaacacgaacgtgagaggaatcacaatgaagncttgtactccaggtccatcaaggagctatggaatatcagcgctctcaaagatgctgcctgtgaggatgcaagatatcacgcactcgatgaaggggtctagagtgagacttattcctggtatggcagctcgatgcactagagaaccccgcatggagccaggctgagtctagatggccagggcaggactggagctgggctgtgctctttctgtacccagagtagtgcccatgtcggagttcatctctgtctttgtcatgaggactccaggcttgtattgatcatctaatggtgatgtttggtgaaacagcctcgttgatcacctagagcaaaaatattgcccggactaagtttggcggtctactgtgaggatgaggaccggcccaatactccggggagctgcccaat

SEQ ID NO: 717148 - DNA, 187 bp, Homo sapiens
  misc_feature (157)..(157): n is a, c, g, or t
atgggagtggttctcctttgaaggtttgaaggttctccaaacctgtatataacaacagagttaccacaaggctgagggggtagctttgcgatttggctccacatgtgtgcttaactgggtcagtggcaaagaggcagtcatggcgtccacgcagatnatagtaagattaatcctagtaatgacgaag

SEQ ID NO: 717149 - DNA, 248 bp, Homo sapiens
agaagcttgtatttatagcacacattgccacaaagacctaggttaggatgatagaattttccacggctgtgaattcctgccctaccatcaatacctgccactctgtacatcacaaagttgaaatccatgctgctttctcatatttcctcgtccactcacgaatagaagactatcattaaaacttctgtatctcctcaacgtttctgtgaagaacacaacctcataccaatggcacaacaacacaaaac

SEQ ID NO: 717150 - DNA, 793 bp, Homo sapiens
catggtggcttacacataatctagcacatttggaggccaaggtgggcggatcgctttgagctcaggagttcgagaccagcctaggcaacatgatagaacccagtctctgataaaaacaaaaaaaaaaaacacaaaaattggccgggggccacgggccgtgtagtaccaactacctcaggaggcgtgaggcgggagaatcgcttggaacccagaaaggcagaggtgtgcagtgagccgagatcgcaccactgggactccagccggggcaacagagtgagacctccgtccccccaaaaaaggttaatacttctatattggggaaaagaacaagatatgctctaaaagacaagccaagacctggggaaaaacaatctaattacttataaccaaagggggattagtacgtacgaatttaaaaagaactccaaagaatcaattaccaaaaagataacccaatttttaaaagggccaattggataccaagaaagctatggattggggaccaccccaactacctaataatactacccttttgtgcatatttataccatccccatatacattttagaccttcactagtaactcctagtacaacgacctaaagtacccgggtcttctggcctcatttttccctagctagaaaaacatttatctcaccaagaaccacgccctggcatgcgcgtgggacaacacagaactcatgccgtgggggattttgaaacggcatttggcagccctggcgctcctcgtcaccttggggcacactgttcctaagcccatccttcggggagcc

SEQ ID NO: 717151 - DNA, 204 bp, Homo sapiens
gcggccgcctactactactactgctcgaattcaagcttctaacgatgtacggggacatgatggcatacacctgtagtcccagctactccagagactgaggcaagagaatcgcttgaacctaagaggcggaggctgcagtgagctgaaatcgcagcgccactgctctctagcctgggtgacaaagcaagactccatctcaaaaaa

SEQ ID NO: 717152 - DNA, 279 bp, Homo sapiens
  misc_feature (275)..(275): n is a, c, g, or t
tttttttgatttttttaaaaaataaaatgtgtaatcctgtttctaaaagaaacacatgtaattacatttaagtattgtaggcatagcgttcagatgtgactggcgcaggcgttcctcggacaagcttgcattccccgtgatcacgcccacctcaagcccatgggggtgcagcccagccagcagatgaattgtacttttgctttcagaaccacttagtccttttgtatcaaagaaaaaaaaatgtttcgtacaatgtcaataaaaaattctttgtntgga

SEQ ID NO: 717153 - DNA, 208 bp, Homo sapiens
tgggaggctcaccaacatatatatgagcatttactttgtacacttcaccagatcctaaatgcttcacgtgcatcctctagtttaatcctcagaacaatcaggtaaggaaagtattcttatgatcctctactttcccactacagacaacgggacatgcctgagaagttaaataacgtcgcctataggcccataatttaacgaagaagca

SEQ ID NO: 717154 - DNA, 223 bp, Homo sapiens
caacgcacgcgtgtgcttggatggggtgccctagccagttttatggtatgagaaggacactgttgtggtccaggatttgggcccatcttcactcgtcctgccactcaatgcggatgtggcatcaggcactgctgcgctcaggggataaagtgcgcattgaccccccctgtcaccaacacaacagctgcttccacctacctcaacaacccgtacggtgcgttgg

SEQ ID NO: 717155 - DNA, 370 bp, Homo sapiens
tatacatcagaatcacgcttctccggctggtgtagactttctcgtgacctttcagcctgcaaggttttctggggtgggagagtctcctctgggcttggggctccttctcaggtgaggaagtgctctaggtgggacctgtcacttggctgcacctcaggctccgatgccaggtgcccgccatcctccgctggcttccgggccctgctcagctacctgcttgcctccagccggctgaccctgttcgccctcctcaagcactgctcttgcgggctccagtggcttccctctccttctcttctgccttctgctttctccgagatcatctggctgaagctcttgcgctgcaggtgctgaggagggcggacagggt

SEQ ID NO: 717156 - DNA, 378 bp, Homo sapiens
cagtcactctgggaggtggtggatggtattactgggcccgtttttcattggggaaactgaggctccaacactgaaataattcacttcacctggagttgagccaagattctctttactccaaagccagcactccttctgagaacaggactttgatttggatggacggatgttgctgggggcctcagcacagggtctttgggctcacagctggacatgcagctgttcagcggcagctgcggtctgtccacccaggcggagactggatgcaacagtttcaggcggggttcctccctccccaggtgcctgcccacctctcccttacatgggatgtctctcttcttcctccttgcctggtccctaaagcacttgagtttgtgg

SEQ ID NO: 717157 - DNA, 919 bp, Homo sapiens
  misc_feature (726)..(726): n is a, c, g, or t
gcccggcgcggtggtcacgccgtgtaatcccagctctcagggaggctaagaaggggaaggatagtggagcccatggagttcgagaccgtgcctggcaatatacgcagagacccgtgtttctccaagaaaaggtgacacaaatcaacaaagccaaagacggggccaaaaaaagaagtaaggggggaaagttccctcctaatggggaatctccaaacctcgcgggggtgtttcccaaggggggatttcccgggtgattagaaggccccccaaaaggggggagggcggacacaccacggtgggggtctgtggctctcaaccaagttcggcgcgcgcgaccaagggttttgtgtgcgacattgtgcaaaaggtccagcaacacgaggggagtagttaccaccccacatgtgttgttgggcgacccagagcgggggtggggactgctagtgacgaaccctccgtggggtgacccactaagaggaattggtaccccccaccgcacaaagcttgtgggcccccaccaccaaaagagcgggcccagagagtgagaccacacacgagtctctttgtgtgcacccccaccaccgggtgggttctttgcagcgcaggtggcccaaaaacaacattttttttaaggtgaggaagaccgaaaacagttttttagtgtgttttcaaagaaaaaagcgagtggtcttcaacaatagactgtttgtgaccgcatgggtgganaaaccagcaaaagagtgggtggtctcaacacaccctgtggtgatacactcacgagaaggcaccgggtgggagagaacgcactggaggggcacaatctacttgggtcgcgagtggaacaataaagagcagtgctggtgtcaagacgcttcacagagagttgtctctagtatgaagacaacaaatattagcggcg

SEQ ID NO: 717158 - DNA, 93 bp, Homo sapiens
actcgcgagcagcggcggccccgccggcggccgaattgggggaatgcggcggcgctcgcggatctgctctgcttcgccttcctgtgggtgctg

SEQ ID NO: 717159 - DNA, 527 bp, Homo sapiens
tgggatgggagtgatgcccctggaggggcagggctgagggttggattcccatagaggacagaggagtgtttcagggcccactttggaacccacactgagcctctggtccagtgtcccagcctggctcatccctgccctcctcaggtctctctgttgggaggtaacctagaggccgctgaacccttagccagatcgttcccgaacctagtggcatttttaccttctacctggaagaatgtattttatacctttactcccattaattatatagaactcaatgggtattcctttattattattattaatttggaagggagagatttatttctcatcaggggttacagcctgcatagacattcttttttatttttaatttcttatttatttatttttttttttaagagatggagtcttggccgggcgccggtgcgctcacgcctggtaatcaccagccacatcgtgcgagtacagccgcataggggcacggtgcgatcgatctgaggtcaggagtttgagaccagcctgcg

SEQ ID NO: 717160 - DNA, 129 bp, Homo sapiens
ctgggccgcgacacacactacgacgacccctgcgccagactccggaggcacaccaatgcagcgctcgacgactttgcgtctctgtactgggcacccagcctctagggacccctcctccctttttccttg

SEQ ID NO: 717161 - DNA, 1229 bp, Homo sapiens
gggatgggaggcagaggaggcggaggcagaggcagaggcagagcccgggtgccgagagcaagcgagatgaccggcggggctgggcctcgcaaagccggctcgaggagctctacacctgaacccgagccggggaggaaaagcagcgaatcctcgctcgcatccccgggagcctgactccagactggaccggtagtcatggggctcagtgagcagatcccgatggcaggcgtattgcgtcagcctccgacgatgggctggccctttggaatggctgccttcaacagcctggaccatgacattgccaccaatgaactgagaattccactgtcctgcccatgcgtgacaaagaccaagctgggccaatgggctccaagaagtccacagaccagcaccaagtattcagacatgatcgtggcttgccatccaggccgagaatgaacctgcgctgggtcctcgcgccacgtccattcaagaaagtatatcaagagaccactaccaacggctgggtggagacactgctcactcggcagatacaagtatgtccatcccaagccgcctggtcacacaaccggatgtcctccaagcagcacccacaggggtgggggagcccggaggtcccaaccgggctatgccaagagcccgagcgaaccccaatgaaagtcaagtgggccttcaatgaagaaccaagaaggggagatcaacggaagcgtagccaactgcccaacgcacaggcgattctaggcccaaggaagtggttggcgtccaaatgctccgaagccaaggagacactagaggcacccccgggtctgaagaaagtggccaaaggaaaggacagtcttggctggcagacgcgccgaagggaacagccgcaagaacacccgcaagaacatgctcagaagaccaagtggcggttccaaggggatttcagaagtagactacagagaaggtggcgcaaacaccatgtttgaaagtagcccaaaacagtcacaaagattcactttggcgcaatgaaagtgtcggttgccgtcaggaaccgtagaagtttgatcagagttgaaaagtagtatattatatatgtgcgtgatgaacagactgccattacgtggtgtgttagcgtatcaattatcttttgctgaaaagactaagcttttgctactgtctcataactccacccactcacttctggatgcttgtatacagcagacccggacccttatttggccccccct

SEQ ID NO: 717162 - DNA, 170 bp, Homo sapiens
cgtctgatgctgcggtatgttgtgctcagtattgaacagatgttgtctatcgacctcaaataacccattgctcgatatgctgatttatcgttgccgtggcaccatttataaagcacaaatcgaccatgatgatatgcgtggtttaattcgtcaccttaaagatggcgatg

SEQ ID NO: 717163 - DNA, 218 bp, Homo sapiens
  misc_feature (92)..(92): n is a, c, g, or t
  misc_feature (192)..(192): n is a, c, g, or t
gcaaaaatttccctgcccgagcacctcgggccgcccttttcattccggtttcctttgacccatttttgggtgagcgccagtgttttaaaaangggagtaaaggccaggttttaaaatggctttcccccccccccctgagatcaggtttggaatgttaaaagggcattttgtacatcccctgggaataaattnccttgcccttgggggcttcctttgca

SEQ ID NO: 717164 - DNA, 1390 bp, Homo sapiens
  misc_feature (1390)..(1390): n is a, c, g, or t
gatcaacatcctgctggagcggctccgtcctgcgtgggcagacacaaggtttgacacctactcgataggtcacttcggccgcaagctgccatgcgaccgatgacgcgttcgctcgacagcgggcaggacggaccccgtcccatcggacggtgcgggtgtgcggttggtgcgagtacgatgcgggacggtgcctagcaagcagcccgaggagcggggcatcggctcgctacgttcacgtgcaggaacttacagcggactcctggcctcaggtgccgtcagagtgccatggagctttatcatacggacgccaagcgacgttcaacagagtgcccatggtgcgtagttgttgagcccgcgcattcatagcgcgcgagggtcctcgatcttgggcgctttgcgcatacgcacatgatgggctggcctgcttcatatcgtcgaggaatggcaaaccgtcggcgacgtggccggcgcaactgcccccagacttgctcagttcggacgcagatgggccgagtgctagggacacggcgccaggtgaggccaagggcttttcgaacgactcgttcagtggggctccgggatcgtgggcgtccccgccacacggttgaaaatagaagcgccgcagcaattcctggcgctcccctcgggttctacactagggccaaggcgacggggccctgcacgttcaccggaacaggtttggggccactcatcgtggccgcatggaggccgcagcgcatgggttttcgcggttggttccgcccaagggcgtaccgcgagggcccctttggttcccgggcggggggtgggttcgttttcccaggccaaaggaatccaacgcttccttcccatgcgaaagggggttggggctcgccttggggggcattaagatcgcacaagcaaccttggcaatcagggcaccgggatcgaccccaaacaaccctcatttgattccctttcgcagcaaacacgcgcattcccccctacaaacgtccaattccaatcttaaaaaaccacggaacgttaaacacatctggttttgaacttgcacaggaactttttttctcacgcgaatgcacaaaaccacgtggaaattttccgcctattgagagttttggcctctctgctaacacgcgggcggcaagaggcggctttggggcagaccgcgcccagggggacccggcaaaagttggcgttcgagattgccctctggggttttattgggtgccaaaagggggttcccctccgcccgggggggcgcaatccaaagggccccccttgtgctgttgtgtgggagttttagcgcactttgaggcggcagagggggtcccctccttctttgtggggctgctaccatcgccgcctgatgtgagcgccaccagcgtggcgn

SEQ ID NO: 717165 - DNA, 154 bp, Homo sapiens
  misc_feature (147)..(147): n is a, c, g, or t
agccactgcccctcttgtctacgtattcccaaaattaaactttgatgcctgactttttgcagtcagttttaagtgagctccctgaggtgccaaggccatggtgtccccctgctgcgtctgttcgtcagctgagttcttgtgaatctntgtttag

SEQ ID NO: 717166 - DNA, 163 bp, Homo sapiens
agaagtataacagcaatttcatagagacattttaaggactgcacattaaaagaccaggccagatggtttacagggaattaacttaattatcaaggaaccatttagttccaatgctacataaattatttcaacaaaataataattggaggaaatttccaacctc

SEQ ID NO: 717167 - DNA, 380 bp, Homo sapiens
tcctttgggtcccgtttgcactctagcttaaccaataggctcagagacagcaaatacccttctgagaccacacgttggattgtggtcaggaactccactctctggccaccacacttcgtcctggtcacatctcactctaaccctcgctggagtcagaatgataagtttacaggccagtctggtgtgactttgtaagaactacctctctggaggccaagtttaggtccctgaccattaactctgaaaacccattaccccttcctcctctgctctcctccatcccgctccccgcaatggccgatggaccccctgtgggcatgatagatccatccctcctaagggaccgatcctgtctatctccctgtcccaggtactttaag

SEQ ID NO: 717168 - DNA, 228 bp, Homo sapiens
  misc_feature (66)..(67): n is a, c, g, or t
actccacctaactacaagcgaaccttagccaagccatttacccaattaaggattagaccgttagannttgaaacctggcgcattagatatagaaccgcacgggaaagatgaaaatatattacccaggcatattatagcaaggcctaacccctatacctcctgcatattgaattaacctagatatacctctgccaaggggacccaaagctaagacccccgaaaccagac

SEQ ID NO: 717169 - DNA, 221 bp, Homo sapiens
  misc_feature (42)..(42): n is a, c, g, or t
ccggtacccgcggtatgtcttacggaatagaatgtggtaggncagaggatagaacaatggcaaaaaaaccatctcctctgtttttttctagggtgaccagaaacatgtgttttcttggactcatccaaatttattcctgttatgctgatgctaattatgaactcaactacttccactattataagaattccttttaggatgatcgtaagacataaccgcgg

SEQ ID NO: 717170 - DNA, 342 bp, Homo sapiens
  misc_feature (4)..(4): n is a, c, g, or t
  misc_feature (66)..(66): n is a, c, g, or t
  misc_feature (68)..(68): n is a, c, g, or t
  misc_feature (75)..(75): n is a, c, g, or t
  misc_feature (91)..(91): n is a, c, g, or t
  misc_feature (98)..(98): n is a, c, g, or t
  misc_feature (119)..(119): n is a, c, g, or t
  misc_feature (140)..(140): n is a, c, g, or t
  misc_feature (142)..(142): n is a, c, g, or t
  misc_feature (159)..(159): n is a, c, g, or t
  misc_feature (166)..(166): n is a, c, g, or t
  misc_feature (170)..(170): n is a, c, g, or t
  misc_feature (172)..(172): n is a, c, g, or t
  misc_feature (184)..(184): n is a, c, g, or t
  misc_feature (187)..(187): n is a, c, g, or t
  misc_feature (189)..(189): n is a, c, g, or t
  misc_feature (197)..(197): n is a, c, g, or t
  misc_feature (208)..(208): n is a, c, g, or t
  misc_feature (237)..(238): n is a, c, g, or t
  misc_feature (243)..(243): n is a, c, g, or t
  misc_feature (249)..(249): n is a, c, g, or t
  misc_feature (270)..(270): n is a, c, g, or t
  misc_feature (281)..(281): n is a, c, g, or t
  misc_feature (287)..(287): n is a, c, g, or t
  misc_feature (290)..(290): n is a, c, g, or t
  misc_feature (293)..(293): n is a, c, g, or t
  misc_feature (297)..(297): n is a, c, g, or t
  misc_feature (314)..(314): n is a, c, g, or t
  misc_feature (321)..(322): n is a, c, g, or t
  misc_feature (328)..(328): n is a, c, g, or t
atantattacaagaactcatgtaataaatggctaccaatttgtctctcccctgcttccccccaccntnggggacnaccccctgggcaaccncccttangcggcttctctagggcgttcnccctccagctttggtccagcncntgaggctgagtgtcatngtccctngacncnctttcaaagcgngcncngctgcggngaggagagccnctgggatctggaggttactaggttagggnnatggnttcgtnttttttttttttttttggganaagagccggcncctggngcnagngccnacccccaagcaaagggngtcttcnntgttcncggttccttctttt

SEQ ID NO: 717171 - DNA, 287 bp, Homo sapiens
atatttaccagcaatgaaatactgaaacatggtacaacattgatgaaccttgaaaaaaataggctaagtgaaagaaaccagacaacacaaaatatcacatagtactgggcacccataatattagaaaatgtccagaaatagtgcaatttgtagaccaacagtagatcagtggtttcctgcagctgaagcaagctaacatgactaacacccataattacatccaacctcctccccctaggaggcctgcacacgataaccggctttttgccccaatgggacaatatcga

SEQ ID NO: 717172 - DNA, 248 bp, Homo sapiens
tgtagtatcgccggaccagcgcacgtgttaggacccggaaagatggtgaactatgcctgggcgcgctatgccgaagggaaactctggtggaggtccgtagcggtccgtgacgtgcaaatcggtcgtccgacctggtctataggggcgaaagacttgtcgatccatctagtagctggttccctccgaagtttccctcatgatagctggtgctctcgcataccctacgcacccccgcccacgcattttta

SEQ ID NO: 717173 - DNA, 101 bp, Homo sapiens
  misc_feature (47)..(47): n is a, c, g, or t
  misc_feature (49)..(49): n is a, c, g, or t
  misc_feature (58)..(58): n is a, c, g, or t
ttgaagagtggcagaggctactataaaaagcaaccttttcattttcncnaagagtttnaaagctattgtattattaaaaagtctttacaatgcttgtttca

SEQ ID NO: 717174 - DNA, 555 bp, Homo sapiens
  misc_feature (4)..(4): n is a, c, g, or t
ggcngacgcaaagcagaaaaaggcagagaaagaagaggccagaaatgactcagggagcagagtagtgggaaaaacagaagtgagaagggaaaagagggaaggatgggcccccagatggattaaaaacttccaacgaagggcactttaaaggatcctttatcagaaaaggcaaaattggccagatcctcagcttctccctgcacccacttcctcacgtggctgcccctagatcccttctgtagccagctctgggacccatccctcccttacctgcagcctggcaggaaggtacacacagctcaggccctgacatatatctggactcaagtctgcctcggaaaggacaggaaagttccggtaaaggaggaggatcagcatgttggggccgtccaaggccattcggggccagccaaggggcaggctacattctgaagctctttgtaagaaaatcctcactaactgatcccactaattcagaatccctgtcagtttggatgttggcaatgctaaagttgcctttatactaaccatgaaataaagagtataaaagcaaaa

SEQ ID NO: 717175 - DNA, 415 bp, Homo sapiens
  misc_feature (17)..(17): n is a, c, g, or t
  misc_feature (347)..(348): n is a, c, g, or t
  misc_feature (395)..(395): n is a, c, g, or t
gggaagcatacatagtnaattccttgcatacagctttgcctgatgtgtgttttaactctcctgctaggttgaaagctccctgaggcctcagatgcctctgtatgcctgcaagcctggcacaatgcttggcataaggactaggggcagacaagtctgtgctggcatggtcccaacagctgtaaccagggctcccgcagtgcatttgctgagcaggcataaaatgggaaaggcatggccttggagtggtgtttcctctgatcactggcatcagaaacaccttagggaggatttttgtttgctcattttatataatgcagcttcttagactccacccccagagatttttnnttcaacagtttttgttcaacaagttgaggttaggccaaggggttccnccatttcttaaaccaagtta

SEQ ID NO: 717176 - DNA, 119 bp, Homo sapiens
tactgtctccccaggtgctgcttgcactcagctgtcacactgaacagtttcaatgcagctcttaatgctcctgcgttccgaagcctgcccaatgtcttttttctgggctctgttttttt

SEQ ID NO: 717177 - DNA, 456 bp, Homo sapiens
tcccagccccggtcaccggaccctgcagccgcaaagatgtggatgcctaaaaaaaaccggatggccattataggaaacctcctttttaaaggagggagtctcagtgggtggccaagaaaggagtgtctccacatgtgccttaagcacccgggagcgtggcagaacaaaaagtggtgcccaaccttctcagtgttctgtaaaggccagtgcgagctctctctctcagagtctcccgagagggctcagcgtgtgaagaggaaacgagtgtgtgtgcctgtggagagacacattttcttagcgtggtgtcaccttatcaccaatgtgagagggtttctcccgagattactctctcgcggtgagattatcaccttctacatctgctgtggcacccgcggagagaaagtgtgtgtgtcgccgtggcccacccctatagcgcgcgcgtgatagccccgcgtg

SEQ ID NO: 717178 - DNA, 564 bp, Homo sapiens
  misc_feature (13)..(13): n is a, c, g, or t
  misc_feature (38)..(38): n is a, c, g, or t
  misc_feature (49)..(49): n is a, c, g, or t
  misc_feature (240)..(240): n is a, c, g, or t
  misc_feature (418)..(418): n is a, c, g, or t
  misc_feature (444)..(444): n is a, c, g, or t
  misc_feature (517)..(517): n is a, c, g, or t
cccccccccgcgnggggttgttattgtctattcatttnctcttttctgntaatatagcagttatacttttttgggggcatagggtctgactctgtccctcaggctggagtacagtggcacaaccatggctcactgtagcctcaacctcccaggctcaagagattctcctgccttagcctcttaagtagctgggactacaagcctgcaacaccatgcctggctaattttcaaaattttttngtagagacagggtctcactatgttgtcccagttgctctcaaactcctggattcaagtgatcctcctgtcttggcttcccaaagtgctgggattacaggcgtgagcactttgggaggcagacggactacttgagctcaggagatcgagaccagcctgggcaacatggcggaaaggccgnctttactaaaaatacaaaaaattagncgggcatggtagcacacgcctgtaattccaactactggggaggctgaggcacgagaatcgcttggaacccggnaagcgaggttgcagtgggcaagattgcaccactggacccagtctggg

SEQ ID NO: 717179 - DNA, 170 bp, Homo sapiens
atctcttgctatactaacatcaactcaagatggggttaaagacttacacatgaggcatgacacctataacatcactattaatgcaggagacaattggggacacactttaggcacattggtctaggacagcattttatggatagcactcacacacacagacacacacacac

SEQ ID NO: 717180 - DNA, 848 bp, Homo sapiens
agagtattatttcttcagtgttattgttttcagagccacatttgttgcatatttgctagtactaatcagtcaaagggcaccattcttttttttttttggaaaccaaagcgtgtctcagaaaagggccaatttaactttacagtaacaatagacagcacaacacaaactctctcaatacagataaactcacacatacgggagaatatatatataatagatttttataaaattatttcaaaggcatggtaggtgtaatatttatgcatactatacggtataacagtgttattcaaagagggatggccatttctggagacacagtaacaaaaaaagtgaggaaattatctggcttcctaatttaataggccctttgggtccaaaggtctcaaagggacttttaagtggcttggcaaaagtgggttccacgtttggctataaagtgctctcactcacagtcactttcaaaatagtgactctaaacaaagaagaaagcagcacggtcatcagatgcttgataaaccaaattttgaaattggggaactggtttaattaacctagtaatggggggggtaaagtacattgggtgaattccatatggggataccagggacaggtaaggtatggtccagattacctggcttatagccttaaaaagccttttacaaatcttacacacaaattcagatgtgcctacaggttttaacgaagtggaatcatccaaggggaattcctctttctgggaggtttgggactttcgcagctagtaagggatatggagcctggtacagcagtcctaaaattgctgactttaggggccaggccacgcgtactcatagactggatgtgac

SEQ ID NO: 717181 - DNA, 340 bp, Homo sapiens
tttttttttgagatggagtctcgctctgtcacccaggctggagtacagtggtgtgatctcagctccctgcaaactctgcctcccgggttcaagtgattcttctgcctcagcctcccgagtagctgagccctgctgcctgttgctttttgagtcactttctcaagcatcacctcatctgcttccctgaacagtccagtggggttggcaaggcagatcaggttttatccattttagagatgaagactctggggtctagacagggggagcaacttccccaagcttccttcaccagggccatgctggttacctggccccacaattgggagtgggaagacagaga

SEQ ID NO: 717182 - DNA, 334 bp, Homo sapiens
cagactcctgagtagctgggattgcaggcacatgccaccaagcctggctaatttatagtatggcagtagagacagggttgcaccaatgtaggacatgcatggtcttgaactcctggtctcaagtgatccgcccacctcagcttcgcgccaagtgctgagattacagtcctgagctactgctcccagccttacagaatcgtttcattctggggcattcagaagtctgacataaaaattaacttgagactaccatgtacattctttttatcttccagtttctttccttccttgctttaaaaataccttggacttattttctgccctcgatacagcg

SEQ ID NO: 717183 - DNA, 794 bp, Homo sapiens
ggtacgcgtggtacaaataaaaaattataacaaaccctgagaatcacaatgaacgacaatctgttcgcttcagttcattgacgccccacgaatgcctaggcctacccgccgcagtactgatcattctatttccccctctagttgatcccctacctcacaaatatctcatctaacaaaccgtatctaattcaccacccaactaatgactaatcacatactaagcctcaaaatcaacatgtataagccatacacaacagctatacatgtgacgaacctgcatctctatatactagtatccttaatcatttttatatgccacaactaaccttccatcggactcctgcctcactcatttacaccaaccacccaaatatctataaacctagtccagtggccatgcccccttatgagcgggcgcagtgagttataggactttcgcttctaaggattaaaagatgccgctagcccacattcttaccagcaaggcacacctaggacacccgttatccccatagtagttatatatcgaaaccatcagcctactcattcaaccaatagccctggccgtacgcctaaccgcgtaacattactgcaggccactactcatgcacctaagttggaagcgccacacctagcaatatcaaccattaaccttccctctacacttatccatcttcacaattctaattctactgactatcctaaaaatcgctgtcgccttatccaagcctacgttttcacacttctagtaagcctctactgacgacaacacataaaaacaaaaacaatccacg

SEQ ID NO: 717184 - DNA, 252 bp, Homo sapiens
tggtccgtctattggtgtactaaaagtgtcttaaaaaatagtctttttaaagagacaggtcttgctcctgttgcccaggctagagttcaatagcacaatcacagctcactgtggcctcaacctcccaggttcaagggatcctcctgcctctacctccagagtagctaggactataggcacacgccaccatgcctggctaatttaaaattttttgtacaaacagggtctcaccacgttgcccaggctggtctc

SEQ ID NO: 717185 - DNA, 300 bp, Homo sapiens
gcgtgtatataacccaatggtgttgcaatacaaaatgagtttctttttctttaagccaaatttgaatttgctccaatagcttaaacagacacccatagcggcgagtccctgtgggatactccttgattgtccccatgaccgatattaacggatctctgctacagtagggttttattgagcccaacgtttagcaaagagcctagattactctgaccctacttaaacttcccgtgattctttaaagggtgtaatatatagatacgaccattgtgacttagggtaccgacgctcgacattcgt

SEQ ID NO: 717186 - DNA, 108 bp, Homo sapiens
caaattttttttcattgtttaaaaaaacggaagtgttccaaaataattttttcctggactggaagggtaggattttaaagaattgattataaaatattttccatccca

SEQ ID NO: 717187 - DNA, 1060 bp, Homo sapiens
ccatcgcgtcgcggacggcgtgggatagcgaggtcgggcttgggaagggtcatgcgggaggcctgagtgcgccgtggcgctgttggcaggcggtgcccggggtccagccgagagggtccgggcgccaggcaacgcgattctgcgcgggggtgaaccctgtgggaggcgggcctgtgctcccctgttctggggacctttccggtgctgtccctgagcgctgaacacctgcccgcgctcggggggctttggggagcctcgtggggccgcgaggctgtgttgggaaagcaaagtcctccttgtggcgtggggtggccggacgggacgacagggacagcgacgggtcgcggcgggaccagacgccccagtccccggcctggccgcgacctactgaagggcgctgcccggccttgaaccttggaacacggggcacattgtgttaccagagcttcccacctgggacctgtggccggcgcccaacaaggaccattgcctcctgggagctgcctgacttcccaagctggttgagcgggccgtctccctttgcggcaggggcgtgccggccctgcccttggcgccccggtcctcttgggagttgcctgggacagacccggagtacttgcgtggtgcccccttttacacagacacaatcggcccgggcccgggacccaaggggtgacgggtgcacggccctcttcttcccccttaccggccaaggagcggggtgaccccatagaccttggggacggccttggcacacgtgacgcaacttggcttgggggccccccccgacggaggacacggacattgcttccgtcatatagaagacacccacccccgttggggtccagtaaggcgcctttggaggccttacaaacgggtgtgtacccggcattgactgtaggcctttggcccccagatcacgcctggcgcaatattacccggggacaaaccccggccacgggggtgaaacatggtgtgaggccatcgcaactccggctatacaatctccattaacaccgaaacgtggtatcccggctacccataacccgcagaaattaag

SEQ ID NO: 717188 - DNA, 728 bp, Homo sapiens
tggcacgagggcgtggtggcacatgcctgtagtcccagctgcttgggagactgagacaggagaattgcttgaacctggaaggcggaggttgcagtgagctgagattgcaacattgtactccagcctgggcaacaagagggaaactccatctcaaaaaaaaaaaaaaagttgtaactgaggctgggcatggtggctcatacctgtaatcccagcactttgaaaagccgaggcaggtagatcacttgagctcagaagttcgagactagcctgggcaacatgacaaaaccccatctctacaaaaaatacgaaaaattagctgggcgtggtggcatgcacctgtagtcctagctacctgggaggctgaggtgggaagattacttgaagctgcagtgagccatggttgtgccactgccctccagtctgggcaacaaagtgagaccctgtctcaaaaaaacaaaaaaaaattataactgatgtaaactggcagtttaggctgggtgtggtggctcaagcctgtaatcctagcactttgggaggccaaggcaggtggatcacctgagttcaggagttcgagaccagcgtggccaacatggtgaaaccttgtctctattaaaaataccaaaattagcaagatgtggtggtgggtgcctataattccagctactcaggaggctgaggcaggaggatcgctggagccagggaggcaaaggttacagtaagcaaagatc

SEQ ID NO: 717189 - DNA, 516 bp, Homo sapiens
  misc_feature (445)..(445): n is a, c, g, or t
aaatgtcgaggctggtgaggtggtatcttatgcctgtaatcccagcactttgggaggcagaggtaggtggatcacttgaggtcagcagttcgagaccagcctggccaacatagtgaaacctcatctctactaaaaatacaaaaattagccaggtgtggtggcacacacctgtaatcacagctactcaggaggctgaggcaggagaatcgcttgaacccaggaggcagaggtggcagtgagctgagatcgtgccactgcactccagcctgggtgacagagcaagacttcgtctcaccaaaaaaaaaaaaaaaaagggggggggcaaacaatttttcctttgtcttttacccctggaacatataggggcaatctgcctattgagaggtaactcatgtaggtcatgcctaagactatttggttaaggtgatagcgagtgtggcctatnacaacagccatttccctaattctcctccccaggtcctaatttcattcagtaatctaccctcctcaatatat

SEQ ID NO: 717190 - DNA, 299 bp, Homo sapiens
tcctacgtatctagtgacttggacacatgggagtagggggagggcaaccccctcgtgcagttgaaaatctgtgtataacttttgacttccctgaaacttacctactaatagcctacgttcaccagaagttttattaataatgtaaatagtcagttaacacatatttcttctatgtattatatactgtattcttacaatagagtgagctagaaaaaagaaaatgttattaagaaaatgataagggtgggacacagtgactcatgcctttaatcccaacaccttaggatacagtagggaga

SEQ ID NO: 717191 - DNA, 311 bp, Homo sapiens
gaatgtagaaacccccccagaacaaagttaaaaccccccgagaccaatgttttaagcgcccgagagcacccttttaacagcgggagctaatttactagaacaaggccaaacctgaactgttatttgaggcgaatccacaggggtttaagcttcaaatccagccaggaatttggttccaatctctttcagctttgcatttgatggttctgagatctttccatcagcctggatagtgcccaacaggtctgggtgctggctgacgacatgagacaggaaagcattctcaaactttgtaatcttgctgcgctcaa

SEQ ID NO: 717192 - DNA, 805 bp, Homo sapiens
aaccccgacatcattaccgggttttcctcttaaaaaaaaaaaaaaaaaaaaaaaaaaaaaaaaaaaaaaaaaaaaaaaaaaaaaaaaaaaaaaaaaaaaaaaaaaaaaaaagggggggggcgaaaattccccgcgggggggcccaaacacccccccacttttgttttgtaaaagagggggcctcctactataataggctgtacttattatttatcaaggtccagtgtcccatgtcggcccgtatcataataaaaccaccgcgcgtagtccagagaacaacacgtcccgatctgtgagccgtctcctctgctggcagagagaacacccccaatattctggtgggggaggacgcaaacacaagttgtgggcacaaaatcatcctcgcacttgagtaatatataagcaagactccagtgaaggcagaaatatatatcactctttccaagcgagtcttatatgcgggtggtcaacacacgccggcgcacatctaattttccggctgccgatagtaccaatagtcttgtcggcccctcgtaggagttctattatttatttagacagaaatttttattcacacgcggggggttttttgtaatatataatcctccgccaagccagataagcctagctactgccagtccacagcagcagccgatccgactacctcgcacccttaactgaactacgtaacgacgagtcgctacacttcacgtcatcgaacgactcgctgagacgacctaaccgcagcgacgtccgactccacagcgttgcggctgcgcagccgctcgctactctactgcctcct

SEQ ID NO: 717193 - DNA, 528 bp, Homo sapiens
agcgccggcggagaatggatccagcgccatccacttgatgggcaccttggcccccatctgcatgatactctgatctcgatcaagtgtccagtcagccgatggcagcccgaagtctgtaattttgacatggttgggactcttgaccaggacgttccgagcggccaagtccctgtgtacgagccgcacatcctccaggtagctcatccccttggcaatctgcatacaccagttcagcaggtcctgggagcccaggcgtccgcggttttcccggacatggtctaagaggcagccatagggcataagctgtgtcaccagctgcaccgtggatgtcaggcagatgcccagaaggcgggagacatatggggagcccacaccagccatcacgtatgcttcgtctaggatttctttgttggctttgggggatgtgttttccctcaacactttgatggccactggaattttcacattctccccatcagggatccagatgccattgtagactgtgccaaaagcgccagatccaagcac

SEQ ID NO: 717194 - DNA, 308 bp, Homo sapiens
  misc_feature (202)..(202): n is a, c, g, or t
acacgagcactggggctggacacaaggtcggtggcccatataaagagtgctgaagttcctgctgcagcatgctttaaaacgcagagagtaatgctgaactttatggtttatgatttagattctctggctcattgaggcctagtccgagtcaacaaagcacctaagtatgcgccgccggtacctacatgagctcatggtcggnattcacccatacatgagctctccctgccacattgagtatatcctctatggacaacgaacagacttgttcctaaaccagaacacgaggttgcccactgctccagagt

SEQ ID NO: 717195 - DNA, 201 bp, Homo sapiens
gaaaacagcaggaccacaattttagtttctttcttgaattgtttgtgataagccacccttttctatcaatttaagatgatgatcatgcccaccagctcctcctaaccatttagtatctacagaggggactgaggatattagaggccattcgacgtaaacaccagggcctagaggacacccatgagtctgttttccaagagt

SEQ ID NO: 717196 - DNA, 527 bp, Homo sapiens
acttgttttctattttttttcttaataaaatggaatccactgtgttgaagactcttgatatcatgtgctcgtctacccattttttgttttataaattagaataaaatatagttgtgataatggtcatcgaatggatttgtttggaaagctacatcttatttgtgaaatgttttttaaatcagagtaactatcaactgattcagctttttgttgttttgttcttggctataacacttgtgactcatgaagaattattgttgacaaacagagataaattcccacatgcatctttattctcccacgtgatgttgatataaactctctatttcttgtgtgaagcgtgtgtactgtctaaactcacatgttcacacttctttaatatcatcttctttgcagaagagaatgttccagattctgaacatgtgtactcattctcccttcacaaagtgaaggggacaggtgcctctagcttaaaataaaaggcattgcaggattatctatatatatagaaaataaataaaacaata

SEQ ID NO: 717197 - DNA, 872 bp, Homo sapiens
ggttcatgttacaaactccaattgacagctaagtctatgtatagtgaagtgggggattaacactctgtgtaccatacataagttatcataggtaagaaccatgcttctgtcacttttatttacatgtaagactagatataagttaaggtagtacgcctgttaatacctagtctgccatctctattataggtttacgatggtggttagagagtaggttgactatagtagtaaggtttgatgctgagctcttagtgtgtatctgctttgcaagtggattgaaatacttttcgcgtgtcgtcatgatggtaatgactcctcttttcagttccatgatagcatggactcccttgaggcgtttcttgtaagacaaaaagctcaggtattggtcaggatggtcagtacttacccaagtaaatctatagattcagtgaaatcacaattgagacatatcagaaaggttcccgaggtctcgagaaatctacaattctaacattttatgtagagaaagatattgatgcactatccacaatttttaaaaggccttttagtaaattgaggtggtttcccataggagtttacactaggagatcattactttattgttcaatggagggggaagaagactatgagatagtattattaagccaaaataattgttcatattattaattatgtcttaagcattgacttgtaagttaggtggtggcctgttggatattatgcccagaagggttaagttcggataacttagtacgggggggagacaaggttgcttttgttttgatagagattttttgggttttaaggtcttaaagcaatcagggttggacaacggacaagtgaaagagttgtggtcttcgtgacaagaatgc

SEQ ID NO: 717198 - DNA, 194 bp, Homo sapiens
aagccacacgccaccagggcccacggggtgtccatgtgtgcccaatgtgttcgcgacaggaccaagcgtgctttccttatcgagccccccaaaatcgttgtgaaagtgttaaaaacacaagcacagagtcagaaagctaaataaaaaaatgaaacttttttgagtaataaaaatgaaaagacgctgtaaaaaaa

SEQ ID NO: 717199 - DNA, 580 bp, Homo sapiens
ccccttggaaaaagggttttttcccccccccttttttccccgcccttagggcccaattcccggggccccacccaaggggccccctcccggaaaaaaaaaaaaaagctcccccaccccccgggccgggggaaaaaaggggcaaagggggttcccgggggaaaatgggggcccccccccatgggtgggggccctttttttttttggcccccggttttcccccaaaaccccccgggattttcccaccgggaaaccccgttaaacccctccccggggggaccggccaaaaaaaccccccccgattttttgggtttagcccccccccctggcaaataaaacccaagcccccctggggtttctttaggggcccccaaaaagggggggggaaacaggggcaaaggggtgtcccggggggaaatggttccccgcccacattcccacccaaaaacgcgccgggggaaaaaaggggaaaccccgcgggcgcgcctaaggggggcgccactccccattttgtgggggcgcccaccccgcccgcctttacgggggggaaactctggggcccccgttgttttaaaaaccgccg

SEQ ID NO: 717200 - DNA, 549 bp, Homo sapiens
  misc_feature (9)..(9): n is a, c, g, or t
  misc_feature (134)..(134): n is a, c, g, or t
  misc_feature (458)..(458): n is a, c, g, or t
  misc_feature (476)..(476): n is a, c, g, or t
  misc_feature (491)..(491): n is a, c, g, or t
  misc_feature (516)..(516): n is a, c, g, or t
  misc_feature (522)..(522): n is a, c, g, or t
  misc_feature (542)..(542): n is a, c, g, or t
attcggcanagaaaataaccgcagatggggctcagggacctgctaggcccactgagacagacctgagctaaaactccattgatcacttgacttcataagcccctactctgactgctggaccacagcgaagtttnggtcccctagaattagtgttagttcagaagccagtgtctagtaatccccaaaaaatcattgtttccccttctgcaaggcaaatagccataggtccctttggggaagggtaggagaaagataaacaggaaagtctcctcaagaggacacagcttcccttttcattaaggagattctgggtctgtaaactagcttcatttctggggaattgcttaaggggccatgactctcttcaggtgatttcaaattatacttctgttttaccagacctggattcttctggttatacagatcaagtaagagttagtaggatggcccatctattntctttttaggggacaccnggttcaaccacccantgctatagggtctcaggcagtcagnctatcnggttactggtttgggttcantattttt

SEQ ID NO: 717201 - DNA, 885 bp, Homo sapiens
  misc_feature (536)..(536): n is a, c, g, or t
  misc_feature (654)..(654): n is a, c, g, or t
  misc_feature (697)..(697): n is a, c, g, or t
ctggcccatcaggctttattttcataatgctagctcttaacacaaaaataaatgctatactatgtacttaagacagtgtggtagcttgcgtcaaaacagcccatcgcaactaactactacgcttccagatctaccttgagggtcggcctgtggccttataaatgggagaatcttgcttaacagcataccacacaacatattaacgtaataatgtttacccataaaagcaggaactttctatataatactttgggacttagacaacaaatatcctttgttacatctgtctgagttcaagtgtctcatcttgatgagtttacattccaagttaaagatatggtcttcttttgaaatgatcattaagtataacgtcttttttataaacagagtgttcatacactaagtcaacttaaaaccaaattcagaggttggggacttaaattagaatatggatctttgcaaaggcggccacaagtgggaaaactggtaataagagcacttctgtattccttgggactagagttcattgtacattntaacagcagctggtgtagaagaatactcctgaggcactgaagaagtaatctggatgaatgaataaaatgtggggataatgcagaaagtgaagactggtcctttcttttctaaactatntgcattaaagcttggttgcaatgaatcctatcttgtacagaanagattcctttgcacatgttccaagtcttgttaaagaatcacagaaagagaccctctttggacattttccttgccacaggtacttgtgctcaatgggcaaagtacctcttacctatggtaaaagatggattttcatctggctgcggtactgatcgcctccattgcatttacttttgttttctggccaag

SEQ ID NO: 717202 - DNA, 381 bp, Homo sapiens
atggcaaaaaactcagaccttttcccactttccaaatgttgcattggtcagcatcaggagtgggatgggaaggaaagccccatacccaaaaaattgaaaaatgggaaattagtggtggagtgtgtcatgacccatgtcccccgtcctcggatctatgaaaaagtaaaataaaaattccctcctccctttggcccggagtttattaaaagaatggcccagctccgttcaatgagcaaatcccccaactgtttctttcttttttttttccatactgtgttccattatctttatcataaaccttttacatgcagctatttcaaagtgtgttggattaattaggatcccccccttggttaataaataaatgtgtttgtgctaata

SEQ ID NO: 717203 - DNA, 897 bp, Homo sapiens
attttggggaccaaaaagtttttctgtgcaaaccccgtcgcgaggtgacccttatcattgcacggttgagcacgtgggtgtaaaacccaaaagcgttaggttctcctggattttctggcgatgtccccctctgccctcacagcgatttttcccggggtcgcacgagtctctcgttttaagcttctaaagtccttctgggggtgaccacagagttcggccacaagccaccacgcacttgggtgggtgccaccaatacataagctatagaaagttctctccaggcgccaccacgccgtgatattattggtgcatcagagagacagtttgtggagtaatagaagaagcaggggcccccataacgcacttggtggagtggagaaaacgcacggagggacaataaggtgcgcttcccccgcaacaaaggccctggcaggccccacaattaatcggtggacaatagacgtaccaacgcgaaaggcgagcctggtgcagtggcgtgccacacccccaccaccccgaggtgaggggtaaaggccaaaccgacggcgcccactccgcacgctccgctcgcacgcacacactcgccgcacctccggtgggtggagggtcgccctccacaagaggggcgtgcacatataggtgctgttagactatgtagaccgggagccacgaaatatctttatccgaagaaagcgatgatacatgagtaagcctccttgactactaaagaattaaaatacctccgccacacacagtgtttttataagtggcggcgcgcgctccccgcccctatttctagctggtggggagagacgatgctgcccgcccagcacaccctcaggctcgccccccctgacaattgaaaacatcaatttccggggcgacccacatagacaa

SEQ ID NO: 717204 - DNA, 158 bp, Homo sapiens
  misc_feature (121)..(121): n is a, c, g, or t
gcagggcaaggcgtgtcgtgtgcggtgcagtcgccttcaaagggcccggggacaggtggtggcccgagccagagtggcgtagtgtgcgtagagggcaaagaggttggagcttcgtatcgtnaggaaaatcaaggcccgcaaaggcaaataaatccgtt

SEQ ID NO: 717205 - DNA, 1668 bp, Homo sapiens
gcaggcagggggttcgtgacgccggctgggtctgggggctgtgggccagccgagccgacccgggcttctgggggaccgcgggggccgtgagcactcagagggtgcatcccaggcccctccgggacccggccagcctgaagatgccgacgaacggcctgcaccaggtgctgaagatccagtttggcctcgtcaacgacactgaccgctacctgacagctgagagcttcggcttcaaggtcaatgcctcggcacccagcctcaagaggaagcagacctgggtgctggaacccgacccaggacaaggcacggctgtgctgctccgcagcagccacctgggccgctacctgtcggcagaagaggacgggcgcgtggcctgtgaggcagagcagccgggccgtgactgccgcttcctggtcctgccgcagccagatgggcgctgggtgctgcggtccgagccgcacggccgcttcttcggaggcaccgaggaccagctgtcctgcttcgccacagccgtttccccggccgagctgtggaccgtgcacctggccatccacccgcaggcccacctgctgagcgtgagccggcggcgctacgtgcacctgtgcccgcgggaggacgagatggccgcagacggagacaagccctggggcgtggacgccctcctcaccctcatcttccggagccgacggtactgcctcaagtcctgtgacagccgctacctgcgcagcgacggccgtctggtctgggagcctgagccccgtgcctgctacacgctggagttcaaggcgggcaagctggccttcaaggactgcgacggccactacctggcacccgtggggcccgcaggcaccctcaaggccggccgaaacacgcgacctggcaaggatgagctctttgatctggaggagagtcacccacaggtggtgctggtggctgccaaccaccgctacgtctctgtgcggcaaggggtcaacgtctcagccaatcaggatgatgaactagaccacgagaccttcctgatgcaaattgaccaggagacaaagaagtgcaccttctattccagcactgggggctactggaccctggtcacccatgggggcattcacgccacagccacacaagtttctgccaacaccatgtttgagatggagtggcgtggccggcgggtagcactcaaagccagcaacgggcgctacgtgtgcatgaagaagaatgggcagctggcggctatcagcgattttgtcggcaaggacgaagagttcaccctcaagctcatcaaccggcccatcctggtgctgcgcggcctggacggcttcgtctgccaccaccgcggctccaaccagctggacaccaaccgctccgtctacgacgtcttccacctgagcttcagcgacggcgcctaccggatccgaggccgcgacggagggttctggtacacgggcagccacggcagcgtgtgcagcgacggcgaacgcgccgaggacttcgtcttcgagttccgtgagcgcggccgcctggccatccgcgcccggagcggcaagtacctgcgcggcggcgcctcgggcctgctgcgggccgatgccgacgccccggccgggaccgcgctttgggagtactgaggccgcgcccagaccagcctgtcgcgcattaaaaccgtgtctctcccgc

SEQ ID NO: 717206 - DNA, 1046 bp, Homo sapiens
ttgaacacctaccgtttatcaatgaatattttcagacggttaaaaaaaaaaaaaaaaaagaaaaaaaaagaaaaaaaaaaaaaaaaaaaaaaaaaaaaaaaaaaaaaaaaaaaaaaaaaaaaagaaaaaaaaaaagggggggggggcgacgcactaataagaagaaccggagggacgcgacacaagacaagcaggcgaacactgtagaacgatgggcccacaacgaacaggactacgccgagagcagcaccagacaccaacagcgccgagacaacacacaacaacaacaaccaaaagcaaaacaacacaccacagacgagaagaaagagaagggcagaaaaaacacaacaggaaaaagaagcaacacacgaacaaaagcaagagacgagagaaaaacaccaatcccagacacgaaacaactaagaacaaaagagaacaacaacacagcacatgacaaaaacgagaaacggagaacaacataagacaaaaagagagaacaaaacaacaagagcaaagcaagaaacacgacagaagaagcagaaaccaaccacaaacaaagaagaaagaagaaaagacaaactcagagggagcaaatcaaagaaagaaccgaactacagaggaaaagagaaacagaaacaacacagaagccgaaccaacagcagccagcaaggaacacataacacacacacaagcaagcagtacagaagatagagacagcaacagaagaaacggagaggacgaagaggacgagcgacaaaaaacaagcgaacacaaatcaaaagaaaaaagacacagacaaaacaagagaagagagaaagccgcaagacacgcagcacacacaaacgaggacacaccagaaacaggaaaagaaacaacaccaacacaaaaggaagaggcaacagaagacaacgaaacaagagaaaggcagaagacgtaatggagtcacgagcgaacaaacagaaaaggaatagagagacaataatgaacagaaaggaaaagagacacgagcacgaccacagacacacgcacaaacaacccaaccaaca

SEQ ID NO: 717207 - DNA, 456 bp, Homo sapiens
ctagtttagaagttcatagcaatttattgctagtctcgggggtcttgctaagtctgtgcctgctattgacacggcgtattctccctgcttctctgggtgtccgggttttgcaagttctgtttcagattatgggcagcttcattaataaatcctttccataacccggtaatctaggttccccccttatgtacaattataaagcaattcattcacaactgtgatttaataattattggtgcaattctttcttaatgcccatgttctattctatactttaagtgtgacgatatcctggcccagcacataggaggtacgcaacaaaatatgatgaatgactgaaagttgtcttcaacctccatggagcacagacttaaagtataaggcagtgtgatgtagttgatagcaggtggatctcgggctgctattgaaacttctaaaactaggggggatcctcta

SEQ ID NO: 717208 - DNA, 1740 bp, Homo sapiens
gcaggcagggggttcgtgacgccggctgggtctgggggctgtgggccagccgagccgacccgggcttctgggggaccgcgggggccgtgagcactcagagggtgcatcccaggcccctccgggacccggccagcctgaagatgccgacgaacggcctgcaccaggtgctgaagatccagtttggcctcgtcaacgacactgaccgctacctgacagctgagagcttcggcttcaaggtcaatgcctcggcacccagcctcaagaggaagcagacctgggtgctggaacccgacccaggacaaggcacggctgtgctgctccgcagcagccacctgggccgctacctgtcggcagaagaggacgggcgcgtggcctgtgaggcagagcagccgggccgtgactgccgcttcctggtcctgccgcagccagatgggcgctgggtgctgcggtccgagccgcacggccgcttcttcggaggcaccgaggaccagctgtcctgcttcgccacagccgtttccccggccgagctgtggaccgtgcacctggccatccacccgcaggcccacctgctgagcgtgagccggcggcgctacgtgcacctgtgcccgcgggaggacgagatggccgcagacggagacaagccctggggcgtggacgccctcctcaccctcatcttccggagccgacggtactgcctcaagtcctgtgacagccgctacctgcgcagcgacggccgtctggtctgggagcctgagccccgtgcctgctacacgctggagttcaaggcgggcaagctggccttcaaggactgcgacggccactacctggcacccgtggggcccgcaggcaccctcaaggccggccgaaacacgcgacctggcaaggatgagctctttgatctggaggagagtcacccacaggtggtgctggtggctgccaaccaccgctacgtctctgtgcggcaaggggtcaacgtctcagccaatcaggatgatgaactagaccacgagaccttcctgatgcaaattgaccaggagacaaagaagtgcaccttctattccagcactgggggctactggaccctggtcacccatgggggcattcacgccacagccacacaagtttctgccaacaccatgtttgagatggagtggcgtggccggcgggtagcactcaaagccagcaacgggcgctacgtgtgcatgaagaagaatgggcagctggcggctatcagcgattttgtcgggcccccaccccgcccggcctggacagggaaggtggcgggaggggcagcgcagcagacgctctccccgccaggcaaggacgaagagttcaccctcaagctcatcaaccggcccatcctggtgctgcgcggcctggacggcttcgtctgccaccaccgcggctccaaccagctggacaccaaccgctccgtctacgacgtcttccacctgagcttcagcgacggcgcctaccggatccgaggccgcgacggagggttctggtacacgggcagccacggcagcgtgtgcagcgacggcgaacgcgccgaggacttcgtcttcgagttccgtgagcgcggccgcctggccatccgcgcccggagcggcaagtacctgcgcggcggcgcctcgggcctgctgcgggccgatgccgacgccccggccgggaccgcgctttgggagtactgaggccgcgcccagaccagcctgtcgcgcattaaaaccgtgtctctcccgc

SEQ ID NO: 717209 - DNA, 404 bp, Homo sapiens
cagaaatctaattgacgagagcacttgaagaagtgaagaaattattggtacctgctgccgaaggagaatacagcctgaagatgatgcagctgatggagcttgcgattctgaatgtggcctacagagatgccaacattaaatcaccagcccttgccttgtctcttgcagtaacagcccacgctgtttcaaggatcattactgggcctgcgccgggtcttccaccagctgtcctgcgtactcctacgccagctggccctaccataatgcctttgagcagacaaatacagaccgctgtcatgcccggaactcctcacccaactgctgcaatagttgctccatggcccgaagctggtttaatctatacacacctatgagtacccgtacacattggcaccagctacttt

SEQ ID NO: 717210 - DNA, 324 bp, Homo sapiens
gacaggaaatgagctacttgcttgcattacagggactcgatgtctcctgaaaaatatacaacaaataaattgtttaaccttggagatatcgatttgtctgcaaagagccaggcttgcagtaatgaagaaatggtgataaaaagaaaattctaaacaaaacaaaacctttccaggcaggtctgtgagcatgggcaggctgactcttagacaccaataggccttggctttctagttccatcatttgtgatgagtgacggctttgtgtatgtatcaattccaaggatttatttctaacagaggtatttccagcataaaaatgtgccg

SEQ ID NO: 717211 - DNA, 224 bp, Homo sapiens
catggacaacacatggtggggaattcggcttccagacagcatcccgggtcgctgtaccacggtgtgtggatgctgaagacatggagtcatagatggcagggtcctgcacctggagagtcaaccagtgccccatcggtgcttgggtccggagcccaccgcgcatgcagcaccaagggccattctgaggatctgctcccccgggaccccggcccggagcgcggccg

SEQ ID NO: 717212 - DNA, 353 bp, Homo sapiens
attttcatttgcttcaaccaaaatagcacattgtggctgggcggggcggctcacgcctgtaatcccagcactttgggagaccgaggtgggcagatcacttgaggtcaggagttcgaaaccagcctggccaacatggtgaaaccttgtctctcctaaatgtacagaagttggccgggcgtggtggcatgcacctgtaatcccagctacttggaaggctacttgggaggctgaggcaggataattgcttgaacccaggaggcagatgtcgtggcgagccaagaccgtgccactgtattccagcctgggcgacagagcaagactacgtctccaaaataaacaaacacataaagcta

SEQ ID NO: 717213 - DNA, 128 bp, Homo sapiens
gggcgtcacaaatataagtgcaagaggaactgctggccacgtagtacgcgggtgtggccatgaatcctagtggatgcatccgttttggcaggttgcaaacagcatgcacactcggcaagcccttccac

SEQ ID NO: 717214 - DNA, 230 bp, Homo sapiens
ggaccgtcacagctgcaggtggctgtacatactatagattgtcatcgcagtaggtcgggctgctagtcagggcgaattagtaggtccagggcgggccccctattcctgttccaggcacaatagtagtaccgggtgcgatgtctttgtgggtaggtgagtataggcaacgatttacgaacataggtaaaatggctgagtaagcattagactgtaaatctaaagacagaggt

SEQ ID NO: 717215 - DNA, 206 bp, Homo sapiens
  misc_feature (147)..(147): n is a, c, g, or t
ggcggttgctcagaggatccctcacgcttatactttctcaacgcatacttcctcaacgctttatacttcctcaacgctttatactttctcaacgctttatacttcctcaacgctttatactttctcaacgctttatacttccgtatngaattcaagtataatattaagtatgcatggaagtataaagcgttgaggggtaccgagct

SEQ ID NO: 717216 - DNA, 165 bp, Homo sapiens
aaaaaaagggggtttcccccttttgggcgggggtttttttaacccccccccccgggggttccccccccccccccccccccaaggtttgggtttttgggggggggcccccccccccgcccctttttttttccctttttaaaataaggggttcctttttttgggcca

SEQ ID NO: 717217 - DNA, 104 bp, Homo sapiens
gctgcggacgctccggcccccttacgttgtggcatgtgctgagtgatgctgctggggaagatgtgcgcgccgatggtacccctccgggggcacctgggaggcca

SEQ ID NO: 717218 - DNA, 239 bp, Homo sapiens
taaacacagctagatgctcttttgttgacttataagcatgtgttatgtgctaaatttttgtgttttcatactttgtttataattcatttttcattactaaatgaagtattgcattatttacaaactgtctaagaataattggtgttttttaagatcattaagaatgagtaaataaatgattaaaaaactatataaatgaacatttatacatttactattcaggcacccactgagggcta

SEQ ID NO: 717219 - DNA, 195 bp, Homo sapiens
taatgcgtgggtgactgtgcagtgagtgtctggggtgagtgcgatgctagtcactgtcccagtatcttctcattactttatttgtgagtggttggtcagtggcagcttgcagatcaggctagtttttgagccacatcctccctctgagtggtgctcatttgaattgagccacaggcccacgggcatagggtgggg

SEQ ID NO: 717220 - DNA, 352 bp, Homo sapiens
  misc_feature (280)..(280): n is a, c, g, or t
  misc_feature (348)..(348): n is a, c, g, or t
agggaggccaaggcaggaggattgtttgagctcaggagtttgcagaccagcctgagcaaaacatacaaacctagtctatacaaaaaatatgaaaattagaaaggcgtggtggtgcacacgtgtagtatcagccactcagggggctgaagtgggaggattgcttcagcctgggaaataaaggctgcagtgaactgtgatcatgctactgcactccagcctgggcaacaagagcgaaattccatctcaaaaaaaaaaaggtgggtaaagggccatgagccanaaccactaggttgttcaccttttcatctggaaaatgctttactctggactatgtgctattgggttttntttc

SEQ ID NO: 717221 - DNA, 281 bp, Homo sapiens
ggtacgctcagtctcatgtcatgcagacggctgtctgtaggtgggtggaccttagagaggttgggatgtgccacatcctggcagtactctgataccgtggaaggtagaagccaagaccctctagatgtagctgaaaaggtttaggtgtgggatggtcttctagtttcttctatttgcatgatgaagctaagcatgcatatttatctcccattctctgcatcaaattagggagaggatatgttacaaatatggtactcacattcaagctgcaccctctgata

SEQ ID NO: 717222 - DNA, 900 bp, Homo sapiens
tcgccgctgggagaagtagaattttctggctctgacactgagaaacattaggtggtctctccagtagaattggcttatccaagtgaccagattatgcaaaaagttctcatgatgtaaaagaggaacatatcaggaacattcaagggacacatgaacacagaagcagaaaagatggacatcatattccatgcccatcagcatgaatttcagcggagatatgcaacaatgttctggagcttgaacagctgaacaaggacctaaacaaagtttgcataaagtgcaacagtattgctatgagcttgctccagaccagggctccagcctgcagatcaggcaacagatatgagacgctggtgtgaggaagaagcacaggagatgtccggcatgcaaattcctcaacaggacagccctgcggtgaaaatgaagaatctgacagacttaatttccaggcttacaggtatttgttacaaatcaagtgtctagcagaaggaggagacctgaattccttgaattcagatcacttacggactcattaaatgactctccagagtacaatcagacgctccaaatatcagtcgtttcagaatactgtcagaaatccatgtggcacataattcagagtggcccgaggcagatgggaacgtaacttggcttggcgcaaatacaccgacagggacgagttaagattcattattacaacgccggacagggttgggaagcttaccttatatggctcaacgcaataactagcgggacagggacttgctccaaagggcttatggagcggcacacacggcctcactatacacaccgcagggcgctgcaagtacacgaaaaacaaacaggacacacaggcaacgccaaacggaaacacgagaaagcacagccttttctagcggc

SEQ ID NO: 717223 - DNA, 286 bp, Homo sapiens
gctgagctcccgttctcgctgatacggctggacgtttggattggtgtctcccggcgcgacatacgaatgagacattctaggccgagctattaagcagaatgaaggagcacctgggcttccagcatgcctgtggacctgaagggtggcacagctctcggaacaggaagagccatcttccaggacacctgtccctggtcagcctggacgcacgcactgctggagccacactgcagtcaggggtcgtcattaagtccctcagaacatacaccatatatacctcatcagc

SEQ ID NO: 717224 - DNA, 350 bp, Homo sapiens
aattgggttcctccaaatcccatgttgaaatttgatccccagtgttggtgggggatttaatagcaggtgtttgggtcatgggaacaggtccctcatgaatgaattaatgccctcactgggaggaggggataagtaagctttcactcatttagttcccaagacagctggttgtttaaaagagccaagggccaacttttttctggcttcctttcttgcggggtgattttggcacaagccagctcccctttgccttttaccatgagtggaagcagcctgaggctttcacctcatgcccagttttccagccaccagaattgtaagccaaataaacattttttttttataaatta

SEQ ID NO: 717225 - DNA, 380 bp, Homo sapiens
gcgtcgactagaccagcaacagctccagccccaggttctggttgatcgcctgatgcagctgcagcaggtcgccgctctccagtgactggtgaaagctctgcaccagcagttgcgggccgtagcggtcgatcgtcaggccgccagcgccttcctggctgccgtggaacaggcgatacacatcggtaccttgtgcatgcagctcagcgagcaggtcctggcgatgatcgagggcggcgccacgtgattcaaggaagacatagtgcgcgccttggagagtaattggggcgcgggagtttaacagttatggctccagcaggcccattcgcctgtgggcccgttgcaccgaaccattgcgcatggcccaacgcaacaacggcgcg

SEQ ID NO: 717226 - DNA, 140 bp, Homo sapiens
gctcggtaccaacttgggcgagctgcttcccagcggggactcgcctactgaaccagaggatgacggagaacctgctggccagcctgtcggagcatgaacgcgcagccatcctcagtgtacccgcagctcgcccctgagtt

SEQ ID NO: 717227 - DNA, 1479 bp, Homo sapiens
  misc_feature (647)..(647): n is a, c, g, or t
tggaaaaagggtctcactctgtcacccaggctggtgtgtaggggtgtgattccaccactctcacgtgcagtcttttgaccctcctgtgggcctcaggtgtgatactctcccaccctcagccctcttcaagttagcgtgggacgtgcaggtgtggtgttgccaccagtgccgtggcctcttatattatattttttttttgtttttgtgtgagagataagaaacacagagcggacacctcttgtgtgttcacacccagagaggcgtggtctctgtgagagagtctcccgtgctggccctcaagaggagaactcaactctccacctctctcaatatatctctctaaacgcagagtgtgtgtgtgaaaccccacacacaaagtgcgccgcgtgtgcgcgtcttttaaattatatatattatattattatatattatatatagagagagagagagagaaggagggctccccacccacagcaggggcgtgtgaagaagaagagagagaaggagcgagaaagagacacacaggagcgcgcccacaagtgtggagagacactctcatcacacactctctctctgagagagcaccagagagagagagacatcacctctcacacacacactcatacacaccactcgcgcgagagagnacagagcgcggagagacacaaaagagagaaccacacacagcccacacacacagagcgcgcgcgaggaatataataaaacacagatgagacatatatatatctatataagaccaggacgtgtgtatcatatatatataatatatgatctatctctcatcatctctcatcatcttatataatatattattactataagaaacacagaagagggcgactcaacacactctctgtgtgttgcgccacaagaataaacagagagagcgggggcccgcgctgatagagacaacacaaaaacaaatctcaaccgagagtggacaggacaaataatacaaacaccaaccccccaagcgaagagacacaacaaagaggaaaaacctccacactacaaaaacacactaacaaacgactctcccccaaaaaagaatacacaggggggcgacccacaaaaaaaagagagaaaatatagggaggcccccaccacagaagatgagtgggggaacaacaaactatatgacaaaaacaagctctagagtggagacgagaaaaacaagagagaagagcaccccaaataggtggtgacgaacacaaaatcggaccccaacaaaacacggcggagagcaaaacaagaaaagaggacacacacacagaagacaaaaaaagcaacaccccacaagaggggcgcggagggaagagaaaaacaaaacaaaaacacatataaaaaaaaaaagaggaggaaaactcaataacaacacacaccattattataaaaacccgccgcgacggagagatggaaagaagaaaccaccgtattattataaacacaaggaccact

SEQ ID NO: 717228 - DNA, 159 bp, Homo sapiens
ggggggggggaaaaattttttttttttggcccggggggtccccccccccctccccccttaaaaaaagggggggggggggggggggggccccccccccccctttttttttcccggggggcccccaaaaccctttttcccctttggggggggcccccccca

SEQ ID NO: 717229 - DNA, 121 bp, Homo sapiens
cggtcctcctgttctgccgcttctgctctgcttgcttctgcttcgctcctggtttctgcttctgcttgtttctgcttctgccggttcctgcttctgctggtttctgcttctgcccagggtc

SEQ ID NO: 717230 - DNA, 760 bp, Homo sapiens
atatactgcacgtcagattcctacttacccacgttactacagtccctccatggttactcctattcttgggtgacgctgctaggtctacggggggtgacacagccatgccctacttaacttcttatggacagctgagcaacggagagccccacttcctaccagatgcaatgtttgggcaaccaggagccctaggtagtcatccatttcttggtcagcctggcttttaactttactttcccagtgggatagacttctcagacatggggaaataacagattctcagggacagtctactcagagactctggatatagtagcaattcatgctctatgcacctaggctccttaggtgtgagccatgattgatggacacgtcagcttctgccaatgagaccctcaatcacggctcctggcatgaatactatagaccaagggatggcagcactgacagtgggtagcaccgcagttgcaccgcgatgttccacacagtcgtacggttctgctgttggtagcgggtccccttactagtacacatcgtggcttccaaatagtctggctcccagccacacattgcatcctcctacaacacgatcttgggctgatatagctagcaatcgcctgccaaacacgccacctacactgaggaccacgaatggctttgccacggcccagtccttcgacacccccgactaaagcataatcatgcactctggacactggcataacaccgcgtccgttgttacagccctcacggctacgtc

SEQ ID NO: 717231 - DNA, 172 bp, Homo sapiens
gagacagggtttccctgcattgcattgcccaggctcatctcaaactcctgggctcaagtgatccttgatctgcctcggcctcccaaagtgctgagattataggcatgagccaccacacccagcctacaaactttatttcttgaattttaagccacccttctgtcgtcttctc

SEQ ID NO: 717232 - DNA, 111 bp, Homo sapiens
cttagaggtatccccccttgcaccattcctccctctccctgcggatgctcttcgccaatttgccttagactcgatgcgtcaccgacaatgtaatgggtaccgaggctcgat

SEQ ID NO: 717233 - DNA, 373 bp, Homo sapiens
taaggggtctcctgcgttacttaagctgcgaaagatgatattacagcacaagatggctgtatccgtggatccgtttgtcaacgctgttgcgagatagtgataagcttagaatggtccatgtcgtgactacaagttgtgtgtgatggccatctcgatctcgtctgacatcaattatcatgctattgaactatgtatgggttggacagacttagcacatgtgcttcccaagttcactccctctcagctttggcccatgtgaagctgctctgaggttcctgacacgctgtcctgagaggcgtgtatacctccagcaccacagatcctttgagcaccaccccgtccccgccatcctccatcaacagtagctgttgta

SEQ ID NO: 717234 - DNA, 1159 bp, Homo sapiens
  misc_feature (240)..(240): n is a, c, g, or t
  misc_feature (266)..(266): n is a, c, g, or t
  misc_feature (281)..(281): n is a, c, g, or t
  misc_feature (318)..(318): n is a, c, g, or t
gctgtcgggtacagtccggtaccctaacgcagcacccgttgattctgtccatggctaggacacccgtgagtgaatcagattgtgggatgtcgtctccagcaagtggcctgacaagagggaatcgtcatcgtgcgagtggtagactcgcgagtgatgcagctctgcaccgcagcgagaggataggcagtcacacttgcactcgtccatgtgctcgctcgcggagcgactatgtagtgcgtncgctcctgcggtggctgcacttgggngcggcaacactcgtnctcacgtacgcgtgctgccatttaacctgtacacgcnagtacataccaccattgcaccatttcgcgcgcaggcgtgtgctatgccaggggtaaccttcgcttcgactacgccccttgtgtcctacgtcttgtgcatattcgcactgagccttgtgtgtcgcacgtgcacatcgtcaccttcctcagagcacacgcggagaacatattgagacaccaagagttagcgtaagggaaggttgagagcactctaccatgcgcatagccacatgtgaaggctatcgcaggataacgtgctgtaaaacagagcggcacacattaggcctctctatcgtagcatccccatatattgctcacctaacgctggtgcgcttggttaggagtggagattcgctcgcgtactaccatcttcgcccgcgtatgtatgacatggacagggcgtctgtagacacgagtggtggacgcgtggtttagtcatatacgaatccgttgtcacctctcacggtcctacacatctagatggtaggctgaggccgccaagaagaaagcggtggggcttgcgaggtgctgcaaaggccaggcggtccgtttcgcgtgcggggtagaggcctgaatgtgtgcccctgtaggttacgccttgaacctgggttaggggccgatctcctagcgccagggagccctgggggcgttcctcccggacttattcctttcccctgctatggtccgggccgggcgggctctggcctgttcggcctgtgccggttcaggattggcatggcccccggtgggggctcccctgttagtggggggaaccctccctgccgggacgaaggcgaggctttcgcccccggcctttcccttttcgacaggggcgatttcct

SEQ ID NO: 717235 - DNA, 707 bp, Homo sapiens
cgcaccatctgttgccatcccggcctggacgaggccattgcagattttggaagatgtgcacagttcatagacaccctgtgatccagagacaacccctcaggctggaggtccctgtgcggttccctgagcatgtttctgtggatatgccctaccatgcctgttcatgcaaatgtgatgatctgtgctatgtgaaatgtgttagcatgacttgtgacagtgatgccacaataccagatgatacagatgtgtatcagcaaattaatgtcactccttctcatgcttttgtgtgtgttgtgaatgatcatatattgctttatatctccgatagacgagatgtgactgagaatgctacgccttaccaggacttgtgtgtgataacaagcggcagccacagcgacgaaagaacggtgccatagcccaggcgggacatacggagatagaagaacttttggccccatgaagggacaccatcactgcaatgcaggagcacaaaggactctgtactgaggacacattgtattgacatggttacaagaccgtggcatgaatcactggccgtacagaagtagtccagaactaggaacatgatgcagacgtaactgctatatcgacatgctaggatagacaggttccatgcaaacaaatctttggagtgttatggcatgcaaactgtgagatcatgaaaatcaacatgaaaaacacctgag

SEQ ID NO: 717236 - DNA, 580 bp, Homo sapiens
  misc_feature (563)..(563): n is a, c, g, or t
  misc_feature (567)..(568): n is a, c, g, or t
  misc_feature (571)..(571): n is a, c, g, or t
aggctacttagaggatccggtattgagtggcatgtagagggaagcacaagagcttgggtgcctgcagcaggtgatgggagagacttgtgagctgaggagagagtgtgcagacccaggccggtgcctctgggcagaggcaggtgcggagacagaacccacacctaggtggcctgagagttggtgtggacccggtgggggagagtgagtgttcagaggcccgtggatgcagatggttagggctttgttttccctggccagcaggcttgagctggatccctgagccctgggggacccgtttggagcccatctagtcataggagtgacacaatgggaggctcttgaggaccacatggaagacatttgggccagcagagcctgggagacagacgaggctgtcagtcagagcccagcctggcctcagctattaattcaccaggccattgcccagacattctcccatgtttccgtgactggcacagatgtgttctgcatggacagccagttactatttccttgttacttactgatgtgtgcctttaaaataaaaaaccaaaccaaaccantatnnaantaaacaaaa

SEQ ID NO: 717237 - DNA, 276 bp, Homo sapiens
atggtcctgagtgaatgagggtgtctgtcactttctctagtggccctgcttggaatatagcatccctgtctctattggtcttgcatgaaaagtagtgagcttatgtgcactagacctggtggcagtgcgattagcctctacatactcatcaactgctttattataagctcaggagggacgctgaccagcagagaagtaaggaacacaggtgaaagtatcaggcgagtgtctgcatgtgtgagaggaaaagagagcacaacctctgaccatcactat

SEQ ID NO: 717238 - DNA, 912 bp, Homo sapiens
cacccattgtcagaagcagttttcaggaaacttgtaaccgatcaaaacatctcagagaattggacgggtagacagcgcggcaacttcccgggtatgagatagggaaccccccctgactaccgagaggcagagactgcatgaaagaggcacgggggttcccatgatgccacgattgtccgtgcagattaccacaagaagatttctggcacattttgattatatactatgtactggactgaaagcaatcctgagagatttgaagtagacaaaagtaatcaacgttaaacacctgcaagagctacacattgaacctacttgtggagctactgatccacaagaaacaagcttattattgacagatcccctcttcatgggaactgactcgtgactttgacgacggtgtaccaagcagtgtgtcaggtgctgcagagcgttcttggagaagtgccactgaggcaggttcgtgccctgctgcggacagcctgactagaacccaccctgaggtccttgcatttctcagtcggtgtgtaatcacgttccagggcccaaagcccagctctttgttcagttgacttactgttttcttaccttacaaagtacttgtagatgtgaatcaagttgtgtatggcaggagaatcaattatcttttgagtccgacagcttatggggtatcttaagcattcttagactagttgaacatcttactttggccagcttacaacattgtagaacaagcaccctcaaccatgcaggaaacctccttgagtgccagtcactcttagccggtgagctcgatatcgataactctagaaggcggtgatgccgaggcagtccttgtcccggtacttcttcaaggccagcgatgaccccgtgacccgcactggtatccacccatgcgttttacagggcctg

SEQ ID NO: 717239 - DNA, 106 bp, Homo sapiens
ggatcccctgcctctggcaggcagctcgtgcgcccgcgccagtaccaggccgatcaccttcgcgtccaggcgttcccagtcctcatcggtcgcgccggccatgaag

SEQ ID NO: 717240 - DNA, 295 bp, Homo sapiens
ggagttagacagtgggggtcatctacctcttagtattatcctaggctgtgctttgcctacggtctttatatgctctctgagataatattgtctctagtactatgtaattagtacgtttcaaacctatatcagtgctcgtgcaagtaaaattaatcagtctctttatccgggcgtcgatccatccatccgtctatctatctttcgacctatcaatccttccctccaattgtctggtaattgtctctacttgcgtgatccccaggcactctgtactctacatgtctaaatgcagtca

SEQ ID NO: 717241 - DNA, 264 bp, Homo sapiens
cacttattcgtgttgcaccaccactactggtgataattttgtttttgtttttaatttgtagagatggggttcaccatgttgcctagagtggtctcgaattcctcagagcaagtgatctgcctgccttggcctcccggagtgctgggattacaggagtgagccactgcgcccaaatctcagaactttgttgattatatgttggcagattgcttccagggagaaagtatttaaggtctcccttaaattgaatataccctggtggac

SEQ ID NO: 717242 - DNA, 247 bp, Homo sapiens
ctggccgtcgtttttacactgtccgtcgtttttacactgtcctgttgttttacatcttggcctgtttttattcctcatggttcgtatgttttttaatctttttccttatttgtttctactttttctttctcttttttattttcttctttgattatttttctttttctttcttttctgattttttttttttttcttttttctgttttacttattttctcttgttatttgttgttctgcttcttcttcc

SEQ ID NO: 717243 - DNA, 112 bp, Homo sapiens
gttgggtttttttttgggttcccccccagccccctgtggccccccgcttggggggggtgccttaagattaggggaaataaaaatgtccttccccttttgtccttttccgtta

SEQ ID NO: 717244 - DNA, 187 bp, Homo sapiens
  misc_feature (39)..(39): n is a, c, g, or t
  misc_feature (63)..(63): n is a, c, g, or t
  misc_feature (114)..(114): n is a, c, g, or t
  misc_feature (124)..(124): n is a, c, g, or t
  misc_feature (155)..(155): n is a, c, g, or t
gtaacagttggagaaagctatcggtctcgttcaaccctnggacactccagatctcattggagncagggttcaagttctcatgcaagtcggccacaggagccacggaaccgcagnaggatttctnctgttatacagcccttgaggcagaatgcagnagaagttgtggaccttaccgttgatgaagatg

SEQ ID NO: 717245 - DNA, 379 bp, Homo sapiens
  misc_feature (344)..(344): n is a, c, g, or t
  misc_feature (362)..(362): n is a, c, g, or t
gctgcggatatgcactcggaccgctattaaaagatgaggccgggcgcagtggttcacgcctgtaatcccagcactttgacaggccgaggcaggtgatcacctgaggtcaggagttcaagaccagcctgacacacatggaaaattgccatcgtctactacaaatacaaaagatcgtctgcccggggctcgcgccgtgttgtatcgagatagctcgcaggaccgcactggacgcctcgcggcgcccatctccgccactccggattcggtgatctgaacccgactccctttcgatcggccgagggcaacggaggccatcgcccgcccctttttaacagcggcttgcncatctctcaggactcggnagccgtggggtaccgag

SEQ ID NO: 717246 - DNA, 546 bp, Homo sapiens
agcgggttttctcccccctggggggggggagcaccccctttttgtttggggccccccccaccaaaaaatttggtttttgccggaaaaaaaaaaccccccttttctccataactggggcgaggagggggggcccccttttttccccccactattttcccaaaggcactataaaataaggggtggtgggttcccctccaggcattcttcccacggcaaaaacaaaatggggggggggggttttttttcataagaacaaaaccttccccctcccttttttttttgccgggccccccccacattgtggttttcccccctgggggcgccccaaaaaaacacggggatgtttttttttttagggggccctgggaaaacaaattgggccgctggtaaaaggggccccaagcccccccccttaaaaaattggggtccccggtttgagcacaaagaaaaaaaacaaagaaagccacaccaagaggggatgttggagtaattccggaacgacagaggccccggtaaaataagcgcacaccagtgcactgcagcctg

SEQ ID NO: 717247 - DNA, 455 bp, Homo sapiens
gctttaaaccctgcgtggcaatccctgacgcaccgccgtgatgcccaggtaagacagggcgacctggaagtccaacatagcttccttaagatcatccaaactattggatgattatccgaaatgtttcattgtgggagcagacaatgtgggctccaagcagatgcagcagatccgcatgtcccttcgcgggaaggctgtggtgctgatgggcaagaacacgcatgatgcgcaagggcatccgagggcacctggaaaacaagccagctctgcgagaaagacttgcatggccgtcattattccgggaggcagatgtggtgctatggatgtttcaccgaagcgaggagcctcatctgagatcagggacatgttgctggccaagtaaggtgccagctgctgcccgtgctggtgccattgcccatgtgaagtcactgtgccagcccagaacagtggtctcg

SEQ ID NO: 717248 - DNA, 113 bp, Homo sapiens
gtcacacaaaacacagatctagtcatgcaaggtgactcgctatcgtcgggccattcaacgcctccgcggagcgtgaatggccaccccgctgagagggccagcatctgcaaagc

SEQ ID NO: 717249 - DNA, 407 bp, Homo sapiens
ttagaagaaaccgcaacaatccatctctcaagtagtgtatcacagtagtagccctcccaggtttccttaagggacaacatccttaagttcaaaagagagaagaggcacccactaaaagatcgcagtttgccctggtgcagtggctcacacctgtaatcccaacattttgggaacccaaggtgggtagatcacgagatcaagagatcaagaccatagtgaccaacatagtgaaaccccatctctactgaaagtgcaaaaattagctgggtgtgttggcacatgcctgtagtcccagctacttgagaggctgaggcaggagaatcgtttgaacccgggaggcagaggttgcagtgtggtgagatcatgccactacactccagcctggcgacagagcaaaacttggtttc

SEQ ID NO: 717250 - DNA, 117 bp, Homo sapiens
gcacgagaacgtgatattccttgaagtagatgtggatgactgtcaggatgttgcttcagagtgtgaagtcaaatgcatgccaacattccagttttttaagaagggacaaaaggtggg

SEQ ID NO: 717251 - DNA, 141 bp, Homo sapiens
cgaaactccgtctccaaaaaataaaaaattgaggaacaggtccaaagagggtaagggcggttctccctttaaaaaacagttaaagaccttggggggcgctgctccttgtaattgtcacctacttccgggggaaagaacgcg

SEQ ID NO: 717252 - DNA, 170 bp, Homo sapiens
tcataggttcgcaggggacaaggactcggtccgacttctggctctgccacaaagacgctataaccttcaataagtcacactcacattgtgttccacgttttgtctattataatcactgagctggggctgcgcacagtggatcatgcctgctaacctatcagggtacctga

SEQ ID NO: 717253 - DNA, 3064 bp, Homo sapiens
  misc_feature (1012)..(1012): n is a, c, g, or t
tcagtagcaactccatatctcagacgatattcaactttaccctttgtcttacagtagataataagcagcactatcgtaactccacctcctattcattgaacgattacttcatcctctggcctatcgtggattctctagaagtcactcctgtcgcgcattccaagcttgttactgagctgtcatcagacactggcagctcgaagacacgacgtccatttgtcgaaagaacaggagagccgcctacccactactggctgaaaagcaaaggggcccacaccaccatggcagatgccctctggcgccttcgagatttgatgctccgggacaccctcaacattcgccaagcatacaacctagaaaatgtttaatcacatcattacgtttcttttatatagaagcataaagagttgtggatcagtagccattttagttactgggggtggggggaaggaacaaaggaggataatttttattgcattttactgtacatcacaaggccatttttatatacggacacttttaataagctatttcaatttgtttgttatattaagttgactttatcaaatacacaaagatttttttgcatatgtttccttcgtttaaaaccagtttcataattggttgtatatgtagacttggagttttatctttttacttgttgccatggaactgaaaccattagaggtttttgtcttggcttggggtttttgttttcttggttttgggtttttttatatatatatataaaagaacaaaatgaaaaaaaacacacacacacaagagtttacagattagtttaaattgataatgaaatgtgaagtttgtcctagtttacatcttagagaggggagtatacttgtgtttgtttcatgtgcctgaatatcttaagccactttctgcaaaagctgtttcttacagatgaagtgctttctttgaaaggtggttatttaggttttagatgtttaatagacacagcacatttgctctattaactcagaggctcactacngaaatatgtaatcagtgctgtgcatctgtctgcagctaatgtacctcctggacaccaggaggggaaaaagcactttttcaattgtgctgagttagacatctgtgagttagactatggtgtcagtgatttttgcagaacacgtgcacaaccctgaggtatgtttaatctaggcaggtacgtttaaggatattttgatctatttataatgaattcacaatttatgcctataaatttcagatgatttaaaattttaaacctgttacattgaaaaacattgaagttcgtcttgaagaaagcattaaggtatgcatggaggtgatttatttttaaacataacacctaacctaacatgggtaagagagtatggaactagatatgagctgtataagaagcataattgtgaacaagtagattgattgccttcatatacaagtatgttttagtattccttatttccttattatcagatgtattttttcttttaagtttcaatgttgttataattctcaaccagaaatttaatactttctaaaatattttttaaatttagcttgtgcttttgaattacaggagaagggaatcataatttaataaaacgcttactagaaagaccattacagatcccaaacacttgggtttggtgaccctgtctttcttatatgaccctacaataaacatttgaaggcagcataggatggcagacagtaggaacattgtttcacttggcggcatgtttttgaaacctgctttatagtaactgggtgattgccattgtggtagagcttccactgctgtttataatctgagagagttaatctcagaggatgcttttttccttttaatctgctatgaatcagtacccagatgtttaattactgtacttattaaatcatgagggcaaaagagtgtagaatggaaaaaagtctcttgtatctagatactttaaatatgggaggccctttaacttaattgcctttagtcaaccactggatttgaatttgcatcaagtattttaaataatattgaatttaaaaaaatgtattgcagtagtgtgtcagtaccttattgttaaagtgagtcagataaatcttcaattcctggctatttgggcaattgaatcatcatggactgtataatgcaatcagattattttgtttctagacatccttgaattacaccaaagaacatgaaatttagttgtggttaaattatttatttatttcatgcattcattttatttcccttaaggtctggatgagacttctttggggagcctctaaaaaaatttttcactgggggccacgtgggtcattagaagccagagctctcctccaggctccttcccagtgcctagaggtgctataggaaacatagatccagccaggggcttccctaaagcagtgcagcaccggcccagggcatcactagacaggccctaattaagttttttttaaaaagcctgtgtatttattttagaatcatgtttttctgtatattaacttgggggatatcgttaatatttaggatataagatttgaggtcagccatcttcaaaaaagaaaaaaaaattgactcaagaaagtacaagtaaactatacacctttttttcataagttttaggaactgtagtaatgtggcttagaaagtataatggcctaaatgttttcaaaatgtaagttcctgtggagaagaattgtttatattgcaaacggggggactgaggggaacctgtaggtttaaaacagtatgtttgtcagccaactgatttaaaaggcctttaactgttttggttgttgttttttttttaagccactctccccttcctatgaggaagaattgagaggggcacctatttctgtaaaatccccaaattggtgttgatgattttgagcttgaatgttttcatacctgattaaaacttggtttattctaatttctgtatcatatcatctgaggtttacgtggtaactagtcttataacatgtatgtatcttttttttgttgttcatctaaagctttttaatccaaataaatacagagtttgcaaagtga

SEQ ID NO: 717254 - DNA, 306 bp, Homo sapiens
cttttggggtctttgctactgttgattcgctatggtgcccggactgcacttaaactcctagtctcaagcaaccctcctgtctcagcctcccaaacaggtaggactacagctgcacgcgaccacactcagctaatcgttttatttttattttatttttattgtggaggcagaatcttgctatgttgctcagcctgtgcttgaactactggtctcaggcattcctcctatctcgtgctcgcacagagttgagatctcagacaagcggcaccatagctggctgatctggcttcactcataccttaacac

SEQ ID NO: 717255 - DNA, 2158 bp, Homo sapiens
gagatggagttttgctcttgttgcccaggctggagtgcaatggcgtgatctcggctccagcctggcgacagagtgagactctctccaaaaaaaaagaatcatgacacaagtatgtaatcagtgctgtgcatctgtctgcagctaatgtacctcctggacaccaggaggggaaaaagcactttttcaattgtgctgagttagacatctgtgagttagactatggtgtcagtgatttttgcagaacacgtgcacaaccctgaggtatgtttaatctaggcaggtacgtttaaggatattttgatctatttataatgaattcacaatttatgcctataaatttcagatgatttaaaattttaaacctgttacattgaaaaacattgaagttcgtcttgaagaaagcattaaggtatgcatggaggtgatttatttttaaacataacacctaacctaacatgggtaagagagtatggaactagatatgagctgtataagaagcataattgtgaacaagtagattgattgccttcatatacaagtatgttttagtattccttatttccttattatcagatgtattttttcttttaagtttcaatgttgttataattctcaaccagaaatttaatactttctaaaatattttttaaatttagcttgtgcttttgaattacaggagaagggaatcataatttaataaaacgcttactagaaagaccattacagatcccaaacacttgggtttggtgaccctgtctttcttatatgaccctacaataaacatttgaaggcagcataggatggcagacagtaggaacattgtttcacttggcggcatgtttttgaaacctgctttatagtaactgggtgattgccattgtggtagagcttccactgctgtttataatctgagagagttaatctcagaggatgcttttttccttttaatctgctatgaatcagtacccagatgtttaattactgtacttattaaatcatgagggcaaaagagtgtagaatggaaaaaagtctcttgtatctagatactttaaatatgggaggccctttaacttaattgcctttagtcaaccactggatttgaatttgcatcaagtattttaaataatattgaatttaaaaaaatgtattgcagtagtgtgtcagtaccttattgttaaagtgagtcagataaatcttcaattcctggctatttgggcaattgaatcatcatggactgtataatgcaatcagattattttgtttctagacatccttgaattacaccaaagaacatgaaatttagttgtggttaaattatttatttatttcatgcattcattttatttcccttaaggtctggatgagacttctttggggagcctctaaaaaaatttttcactgggggccacgtgggtcattagaagccagagctctcctccaggctccttcccagtgcctagaggtgctataggaaacatagatccagccaggggcttccctaaagcagtgcagcaccggcccagggcatcactagacaggccctaattaagttttttttaaaaagcctgtgtatttattttagaatcatgtttttctgtatattaacttgggggatatcgttaatatttaggatataagatttgaggtcagccatcttcaaaaaagaaaaaaaaattgactcaagaaagtacaagtaaactatacacctttttttcataagttttaggaactgtagtaatgtggcttagaaagtataatggcctaaatgttttcaaaatgtaagttcctgtggagaagaattgtttatattgcaaacggggggactgaggggaacctgtaggtttaaaacagtatgtttgtcagccaactgatttaaaaggcctttaactgttttggttgttgttttttttttaagccactctccccttcctatgaggaagaattgagaggggcacctatttctgtaaaatccccaaattggtgttgatgattttgagcttgaatgttttcatacctgattaaaacttggtttattctaatttctgtatcatatcatctgaggtttacgtggtaactagtcttataacatgtatgtatcttttttttgttgttcatctaaagctttttaatccaaataaatacagagtttgcaaagtga

SEQ ID NO: 717256 - DNA, 698 bp, Homo sapiens
gagtttcgctcttgttgcccagcctggagtgcaatgatgcgatcttggcttactgcatcctccacctcccaggttcaagcgattctcctgcttcagtctcctgagtagctgggattacaggcgcatgccaccatgcctggctaatcttttgtatttttagtagaaatggggtttcaccttgttagccaggctggtctcaaactcctgacctcaggtgatctgcccgcttcagcctcccaaagtgctgagattacaggcgtgagccactgtgcccgggctatttagcctttttaatttgagcaattctagtgggtaagtagtggtatcttactgtagtttttatttgcatttccctaaatactaatgatattgtgcatcttttcatgtgcttatttgctatccaaataacaacttcttccccttccccttcctcctcctccccctcccacctccccctcttcctcttcctcttcctctccttctccttctccttctccttcttcttttcttcttcttcttcttcttctacttcttcttcttcttcttcttcttcttcttcttcttcttcttcttcttcttcttcttcttcttctacttctacttctccttctccttctccttctcctccttctccttctcctttccttctccttctactttttcttctccttctccttctccttcttcttcttccttcg

SEQ ID NO: 717257 - DNA, 3683 bp, Homo sapiens
  misc_feature (1012)..(1012): n is a, c, g, or t
  misc_feature (3302)..(3302): n is a, c, g, or t
tcagtagcaactccatatctcagacgatattcaactttaccctttgtcttacagtagataataagcagcactatcgtaactccacctcctattcattgaacgattacttcatcctctggcctatcgtggattctctagaagtcactcctgtcgcgcattccaagcttgttactgagctgtcatcagacactggcagctcgaagacacgacgtccatttgtcgaaagaacaggagagccgcctacccactactggctgaaaagcaaaggggcccacaccaccatggcagatgccctctggcgccttcgagatttgatgctccgggacaccctcaacattcgccaagcatacaacctagaaaatgtttaatcacatcattacgtttcttttatatagaagcataaagagttgtggatcagtagccattttagttactgggggtggggggaaggaacaaaggaggataatttttattgcattttactgtacatcacaaggccatttttatatacggacacttttaataagctatttcaatttgtttgttatattaagttgactttatcaaatacacaaagatttttttgcatatgtttccttcgtttaaaaccagtttcataattggttgtatatgtagacttggagttttatctttttacttgttgccatggaactgaaaccattagaggtttttgtcttggcttggggtttttgttttcttggttttgggtttttttatatatatatataaaagaacaaaatgaaaaaaaacacacacacacaagagtttacagattagtttaaattgataatgaaatgtgaagtttgtcctagtttacatcttagagaggggagtatacttgtgtttgtttcatgtgcctgaatatcttaagccactttctgcaaaagctgtttcttacagatgaagtgctttctttgaaaggtggttatttaggttttagatgtttaatagacacagcacatttgctctattaactcagaggctcactacngaaatatgtaatcagtgctgtgcatctgtctgcagctaatgtacctcctggacaccaggaggggaaaaagcactttttcaattgtgctgagttagacatctgtgagttagactatggtgtcagtgatttttgcagaacacgtgcacaaccctgaggtatgtttaatctaggcaggtacgtttaaggatattttgatctatttataatgaattcacaatttatgcctataaatttcagatgatttaaaattttaaacctgttacattgaaaaacattgaagttcgtcttgaagaaagcattaaggtatgcatggaggtgatttatttttaaacataacacctaacctaacatgggtaagagagtatggaactagatatgagctgtataagaagcataattgtgaacaagtagattgattgccttcatatacaagtatgttttagtattccttatttccttattatcagatgtattttttcttttaagtttcaatgttgttataattctcaaccagaaatttaatactttctaaaatattttttaaatttagcttgtgcttttgaattacaggagaagggaatcataatttaataaaacgcttactagaaagaccattacagatcccaaacacttgggtttggtgaccctgtctttcttatatgaccctacaataaacatttgaaggcagcataggatggcagacagtaggaacattgtttcacttggcggcatgtttttgaaacctgctttatagtaactgggtgattgccattgtggtagagcttccactgctgtttataatctgagagagttaatctcagaggatgcttttttccttttaatctgctatgaatcagtacccagatgtttaattactgtacttattaaatcatgagggcaaaagagtgtagaatggaaaaaagtctcttgtatctagatactttaaatatgggaggccctttaacttaattgcctttagtcaaccactggatttgaatttgcatcaagtattttaaataatattgaatttaaaaaaatgtattgcagtagtgtgtcagtaccttattgttaaagtgagtcagataaatcttcaattcctggctatttgggcaattgaatcatcatggactgtataatgcaatcagattattttgtttctagacatccttgaattacaccaaagaacatgaaatttagttgtggttaaattatttatttatttcatgcattcattttatttcccttaaggtctggatgagacttctttggggagcctctaaaaaaatttttcactgggggccacgtgggtcattagaagccagagctctcctccaggctccttcccagtgcctagaggtgctataggaaacatagatccagccaggggcttccctaaagcagtgcagcaccggcccagggcatcactagacaggccctaattaagttttttttaaaaagcctgtgtatttattttagaatcatgtttttctgtatattaacttgggggatatcgttaatatttaggatataagatttgaggtcagccatcttcaaaaaagaaaaaaaaattgactcaagaaagtacaagtaaactatacacctttttttcataagttttaggaactgtagtaatgtggcttagaaagtataatggcctaaatgttttcaaaatgtaagttcctgtggagaagaattgtttatattgcaaacggggggactgaggggaacctgtaggtttaaaacagtatgtttgtcagccaactgatttaaaaggcctttaactgttttggttgttgttttttttttaagccactctccccttcctatgaggaagaattgagaggggcacctatttctgtaaaatccccaaattggtgttgatgattttgagcttgaatgttttcatacctgattaaaacttggtttattctaatttctgtatcatatcatctgaggtttacgtggtaactagtcttataacatgtatgtatcttttttttgttgttcatctaaagctttttaatccaaataaatacagagtttgcaaagtgatttggattaaccaggtttggttgttctgttaaagtggtgtcagatgtttcaagcagatttaactcctgcaagccctgatttcatgctgacaaggatgtatgtgactgccaatttaagagaacaaagctccacagatggagatgaaagtcagtgtccagacctctggttcagggctcgggctgcattaacacagagccaaatgtagtcagactgcagactgaagtgccccacgccacgnctcaggctggcagtcaaggaattcctacatgtcctcagcatgggcagaaatgcaggttgaaattaaaattggagaattactgagggcggaaagtgaggaaagcatgtaagcagtatagcccacttcaaatagcttgtctgtggccagaagaaacaggtggcccaggtgtctttaacatctttataaactcttaaaacatgaccatgcttttaatagaaagtgttggtaaaagcaaccaactgttttcctctaatatcactttgcaaatccctgtggttctgttctcctgaatttaggatagtaccggcatctgtgcccctgagcatattttgaacaatcattgatgtatagctagacatcccatctgaacactgagcaaac

SEQ ID NO: 717258 - DNA, 3135 bp, Homo sapiens
  misc_feature (1012)..(1012): n is a, c, g, or t
  misc_feature (2399)..(2399): n is a, c, g, or t
tcagtagcaactccatatctcagacgatattcaactttaccctttgtcttacagtagataataagcagcactatcgtaactccacctcctattcattgaacgattacttcatcctctggcctatcgtggattctctagaagtcactcctgtcgcgcattccaagcttgttactgagctgtcatcagacactggcagctcgaagacacgacgtccatttgtcgaaagaacaggagagccgcctacccactactggctgaaaagcaaaggggcccacaccaccatggcagatgccctctggcgccttcgagatttgatgctccgggacaccctcaacattcgccaagcatacaacctagaaaatgtttaatcacatcattacgtttcttttatatagaagcataaagagttgtggatcagtagccattttagttactgggggtggggggaaggaacaaaggaggataatttttattgcattttactgtacatcacaaggccatttttatatacggacacttttaataagctatttcaatttgtttgttatattaagttgactttatcaaatacacaaagatttttttgcatatgtttccttcgtttaaaaccagtttcataattggttgtatatgtagacttggagttttatctttttacttgttgccatggaactgaaaccattagaggtttttgtcttggcttggggtttttgttttcttggttttgggtttttttatatatatatataaaagaacaaaatgaaaaaaaacacacacacacaagagtttacagattagtttaaattgataatgaaatgtgaagtttgtcctagtttacatcttagagaggggagtatacttgtgtttgtttcatgtgcctgaatatcttaagccactttctgcaaaagctgtttcttacagatgaagtgctttctttgaaaggtggttatttaggttttagatgtttaatagacacagcacatttgctctattaactcagaggctcactacngaaatatgtaatcagtgctgtgcatctgtctgcagctaatgtacctcctggacaccaggaggggaaaaagcactttttcaattgtgctgagttagacatctgtgagttagactatggtgtcagtgatttttgcagaacacgtgcacaaccctgaggtatgtttaatctaggcaggtacgtttaaggatattttgatctatttataatgaattcacaatttatgcctataaatttcagatgatttaaaattttaaacctgttacattgaaaaacattgaagttcgtcttgaagaaagcattaaggtatgcatggaggtgatttatttttaaacataacacctaacctaacatgggtaagagagtatggaactagatatgagctgtataagaagcataattgtgaacaagtagattgattgccttcatatacaagtatgttttagtattccttatttccttattatcagatgtattttttcttttaagtttcaatgttgttataattctcaaccagaaatttaatactttctaaaatattttttaaatttagcttgtgcttttgaattacaggagaagggaatcataatttaataaaacgcttactagaaagaccattacagatcccaaacacttgggtttggtgaccctgtctttcttatatgaccctacaataaacatttgaaggcagcataggatggcagacagtaggaacattgtttcacttggcggcatgtttttgaaacctgctttatagtaactgggtgattgccattgtggtagagcttccactgctgtttataatctgagagagttaatctcagaggatgcttttttccttttaatctgctatgaatcagtacccagatgtttaattactgtacttattaaatcatgagggcaaaagagtgtagaatggaaaaaagtctcttgtatctagatactttaaatatgggaggccctttaacttaattgcctttagtcaaccactggatttgaatttgcatcaagtattttaaataatattgaatttaaaaaaatgtattgcagtagtgtgtcagtaccttattgttaaagtgagtcagataaatcttcaattcctggctatttgggcaattgaatcatcatggactgtataatgcaatcagattattttgtttctagacatccttgaattacaccaaagaacatgaaatttagttgtggttaaattatttatttatttcatgcattcattttatttcccttaaggtctggatgagacttctttggggagcctctaaaaaaatttttcactgggggccacgtgggtcattagaagccagagctctcctccaggctccttcccagtgcctagaggtgctataggaaacatagatccagccagggnttccctaaagcagtgcagcaccggcccaggcatcactagaggtgctataggaaacatagatccagccagggcttccctaaagcagtgcagcaccggcccagggcatcactagacaggccctaattaagttttttttaaaaagcctgtgtatttattttagaatcatgtttttctgtatattaacttgggggatatcgttaatatttaggatataagatttgaggtcagccatcttcaaaaaagaaaaaaaaattgactcaagaaagtacaagtaaactatacacctttttttcataagttttaggaactgtagtaatgtggcttagaaagtataatggcctaaatgttttcaaaatgtaagttcctgtggagaagaattgtttatattgcaaacggggggactgaggggaacctgtaggtttaaaacagtatgtttgtcagccaactgatttaaaaggcctttaactgttttggttgttgttttttttttaagccactctccccttcctatgaggaagaattgagaggggcacctatttctgtaaaatccccaaattggtgttgatgattttgagcttgaatgttttcatacctgattaaaacttggtttattctaatttctgtatcatatcatctgaggtttacgtggtaactagtcttataacatgtatgtatcttttttttgttgttcatctaaagctttttaatccaaataaatacagagtttgcaaagtga

SEQ ID NO: 717259 - DNA, 165 bp, Homo sapiens
aaactggcagacggggctggcgaaagaacaagggcctgcaagtgacccgtgcagatcaggggccccccagagtcaccggtcgcaggagtccttctggtctggccctccggcggcgcagaacatgctggggtggtacagcgggtcatagagcttactggagacctc

SEQ ID NO: 717260 - DNA, 696 bp, Homo sapiens
ttttttttgaatatggctgacccagctagggcttccctaaagcagtgcagcaccggcccagggcatcactagacaggccctaattaagttttttttaaaaagcctgtgtatttattttagaatcatgtttttctgtatattaacttgggggatatcgttaatatttaggatataagatttgaggtcagccatcttcaaaaaagaaaaaaaaattgactcaagaaagtacaagtaaactatacacctttttttcataagttttaggaactgtagtaatgtggcttagaaagtataatggcctaaatgttttcaaaatgtaagttcctgtggagaagaattgtttatattgcaaacggggggactgaggggaacctgtaggtttaaaacagtatgtttgtcagccaactgatttaaaaggcctttaactgttttggttgttgttttttttttaagccactctccccttcctatgaggaagaattgagaggggcacctatttctgtaaaatccccaaattggtgttgatgattttgagcttgaatgttttcatacctgattaaaacttggtttattctaatttctgtatcatatcatctgaggtttacgtggtaactagtcttataacatgtatgtatcttttttttgttgttcatctaaagctttttaatccaaataaatacagagtttgcaaagtga

SEQ ID NO: 717261 - DNA, 1017 bp, Homo sapiens
accacgcctgtcggaatagatacgcttgggggtgaggaagttggttaggtgggtgaagttgtagagagaggctgttgcgttaggcccttacctgggataggggtttgggtgagttggggagctggttgatgacctcgagctcatatgactagaatagttagcgatctgtgggattcgggcgactggcgatggtgggcgacccgtggagtctcggtgagcgcgtgcgcggcggaggcaaggctcgccaatgatcctggattagacaggggggtggggtgatgaagtgttgatcggctccttttctcggctgcctgcctgccttctggatgttggcgctctctgcctgggtctcaatcggcacatcgcgcgtgacggcggggacccagcgtgcccctaggccgtcactggcaccccacatggtccactcccgggcccgatgcgcgtgcgcatggcacgtctaccggacatgctgtgagagtgggaggccccaggggcggagacccccagcctggtacacatgggtctcgctggcgcttggccagagcccaatcactgggttgggtgcttcacagccgcagccccggagctccgcgggaggtgcccctcgtgcttacggcttgacaattccttcgatgattcagagtattgtggcctgtggctgtggctcatgatacattggctccttgtaaaaggagccagtttcgcggtcgggaacagcgtggtgcgacgtcatctaccaatggggcagcttggtaggtgagcgacggccagaaccctgggtggcctttatcgtgccctccagatggtttttgcactggcacggtgttcccgagacgttggtgcccgaatcccctgccgtcgggtccgggcctggccctccggttggggatcgtgctgggggggccctggtgtcctgctggttggtgggtctcggttgccgacaattcgggctcttccggggccttggggggttcgcctctccccgctgtgtacccgtccggagggaggccattttgg

SEQ ID NO: 717262 - DNA, 362 bp, Homo sapiens
gcatgtgttacatagaaatctcatttatttagctaccatcgcagacgccaacacaagcagtctcacaaaggcagtggagtagttttccagaaggctgtaatgaggactgattggaacccatctcctgggaatcagagagctgctcagaacatgggcaaaaagtcccattcattttagactgtgaagaaactcgctaccaactctactgtattctgactataaatatttattaataaaacagatcccacggtagaacctgaggacctgcgaggacctgaggtgtatgacagcggtgtcattgtcaacaatagtgattatctgatgacatgtaataaatgatacacgtccgtcaaaaaaaaaaa

SEQ ID NO: 717263 - DNA, 731 bp, Homo sapiens
tccccgcactgttgaagtttccgcccaccactcctcttgtgtgtggggcccaccctggattgtttgataaaggggcggcctccctcggaccgtacaccacaaccactcacggggtgtgaaagaaccaccggctcgttcctgttgtacgaacgcaagtaagttgtgagtcgagcagactcgcgaggatattcgcccccacactcgtgtagagcatatggtgagtgtcttgggatgctgtctctttcgcccggcagcactttcattatgaatcgtcgcgcgctgcctcggtcccgctcgcacatatgggggtgtgcacccagacgtgtatgtattctgtgtgctacaccgaaagaacgtagttctattgtttctgttctgtgcagcacgctcgctcgctcgctttgttctaaaatatcatagaagatgtcctccactcgcgcgtctctctcccacacatagtgctgcgtgatgctacacacgcgcggcaaggtggccacaccgcggcttaccgctgcgccccgcacaactgggggcctatatagaagtattatacaaggtagaaacacctgtctacaacggcgactaactgttatctacgtagaaaaaacaataaatacggcgaatatactctctctatgggacaccagatggttctgcggcgccacataagtgttttgtggagttttgctcctcgcctaaccaccccggcccgacaaatagaccaacacaaa

SEQ ID NO: 717264 - DNA, 299 bp, Homo sapiens
  misc_feature (233)..(233): n is a, c, g, or t
tgcagctgcatgaaacggttccagcgttcttctttaacttcttccggaacctggtcaggcagggcattggcgtctgcaccttcaaccgggctgtatttaaagcagccaacgcgatccagacgcgcttctttcaggaagtcgagtagcatctggaaatcttcttctgtctcgccagggaagccgacaataaaggttgagcgtagggtcagttccgggcagatttcgcgccactntttgatgcgcgccagttggcgactcacagaacccggacgcttcatcagtttgagaatgcgcgggct

SEQ ID NO: 717265 - DNA, 141 bp, Homo sapiens
ggttcaggccgggggaaagaggagaacgggagaggaaggaatgtcctactccactgaacacagacaaaagcaacatgaccctcactaggatccaatgacaccggggccagctggcagtctgtggtggccgtcgacgcggcc

SEQ ID NO: 717266 - DNA, 891 bp, Homo sapiens
  misc_feature (37)..(37): n is a, c, g, or t
  misc_feature (84)..(87): n is a, c, g, or t
  misc_feature (94)..(94): n is a, c, g, or t
  misc_feature (144)..(144): n is a, c, g, or t
  misc_feature (153)..(153): n is a, c, g, or t
  misc_feature (156)..(156): n is a, c, g, or t
  misc_feature (165)..(165): n is a, c, g, or t
  misc_feature (174)..(175): n is a, c, g, or t
  misc_feature (177)..(177): n is a, c, g, or t
  misc_feature (182)..(182): n is a, c, g, or t
  misc_feature (186)..(186): n is a, c, g, or t
  misc_feature (189)..(189): n is a, c, g, or t
  misc_feature (196)..(197): n is a, c, g, or t
  misc_feature (208)..(208): n is a, c, g, or t
  misc_feature (211)..(211): n is a, c, g, or t
  misc_feature (214)..(214): n is a, c, g, or t
  misc_feature (219)..(220): n is a, c, g, or t
  misc_feature (235)..(235): n is a, c, g, or t
  misc_feature (242)..(242): n is a, c, g, or t
  misc_feature (249)..(249): n is a, c, g, or t
  misc_feature (256)..(256): n is a, c, g, or t
  misc_feature (304)..(304): n is a, c, g, or t
  misc_feature (310)..(310): n is a, c, g, or t
  misc_feature (314)..(314): n is a, c, g, or t
  misc_feature (351)..(351): n is a, c, g, or t
  misc_feature (393)..(393): n is a, c, g, or t
  misc_feature (411)..(411): n is a, c, g, or t
  misc_feature (440)..(440): n is a, c, g, or t
  misc_feature (480)..(480): n is a, c, g, or t
  misc_feature (503)..(503): n is a, c, g, or t
  misc_feature (526)..(526): n is a, c, g, or t
  misc_feature (539)..(539): n is a, c, g, or t
  misc_feature (585)..(585): n is a, c, g, or t
  misc_feature (828)..(828): n is a, c, g, or t
  misc_feature (877)..(877): n is a, c, g, or t
gggagacagagtaggttcaacaagacaaattccctgntgcaaaccaccatgatccactctgactttggtccaaactctgctaannnnaattctntacgttcattgttcccaagggtcattttaaagggtggtggccaccacccnttagaagcnggngggagggtnggggggggnntnggtgntgtnggnggcgagnngtttcttgttnttnttnttttnnttttttttttgcagnttggttnttgtcanttagggnttggtcacaggcagggtttggttcagtatcttgttaggggcaagagcnaagctntttnggagggttgggggatgcaggaaggatgtgtgggaatnaccaggccattgctgcatttggggtgacaggctgagtttgcnaagctggagggagctttnaggtttcatcttcactgggggtttttttnttggaagagtgctgaatgttaactcccaggcctcctcttncagcattaaggaagctatgtttnagaggggaagggcaagatgtgcnctcagcttcactnaatgagctccacgtagttggcagggaacatgccaaaatggccatcnggcccatagccacgccaccagctttcgtcgatcacctcgatgcccgtgatgaggttctcggggtcaaaggagatctctgtgtcgtcggctgcctggtagtcgtacagggcacgggcacagagcccttgcccactgagcccctggccctgaatgtggtggtcaatgtgctcagagccagcaccttgctgctgcaccagtgggggctgctcgtagaaggtctcctgctctggaggttcctcatanacagcctcctcttctgcctgcaccagacatggaggagtgctgggcgccngctcctcagcaggg

SEQ ID NO: 717267 - DNA, 480 bp, Homo sapiens
  misc_feature (239)..(239): n is a, c, g, or t
  misc_feature (243)..(245): n is a, c, g, or t
  misc_feature (249)..(249): n is a, c, g, or t
  misc_feature (251)..(251): n is a, c, g, or t
  misc_feature (253)..(253): n is a, c, g, or t
  misc_feature (259)..(259): n is a, c, g, or t
  misc_feature (357)..(358): n is a, c, g, or t
  misc_feature (360)..(360): n is a, c, g, or t
gtgttttagatgaaagtagaaatgagttgagggtggaagaaagggaaaaaaatcttattttttcaaaaggaaaaattggtaagcttaacattccttaaatatcttagaatttttccaaataagtatcttaaaaataacaaacctcccatcagtttttcctagatttgattttgcagcatctggggcctgccctgtgatctgcctgtggacatcgctcttaggggcggctcaccagcgtncacnnngtgnanantttggncctggctcgtccgggggacaccacactgcaggacactccaggctggccggcttctcagagcttcagatcctcatttttcatatgaagctcctaatgcnncncttatgggggactctgaagggttaatgggaggaatcatacagtgactgacccctgagaagtgtccagtgaagacagggcttagctaggattgctgttttgcctaatgctctgcgggatta

SEQ ID NO: 717268 - DNA, 1310 bp, Homo sapiens
  misc_feature (319)..(319): n is a, c, g, or t
  misc_feature (518)..(518): n is a, c, g, or t
  misc_feature (759)..(759): n is a, c, g, or t
ggtcagacagtgaggaggaggcggagacgctggctcaggtgaagcgttcagagggaggagccaccagatcagaggtgccttgcgctccgtgaccgaaggaagtcccccgatgaaaggggctagctcctaacaacatccgtggggaagacagggaccttcgtggcgtgccaggcacggggaacgcaggatgactcaggtgagctatgcatgcgaggaatcacgtacagtgatgtggagaggctaccggcgagctagtagactctcttgaccccagagtgattaaaagaccctcgtactggatttcttgtacgacaccgtnaatcagtgagtcctaacttggacctatgattgccttagacccagttatcgacgcccatggtcttgctataggagactccctgcaaggtagatggggccccgaaggcacttccgtgaaagaagtcaactacgctcaagggaggcgtcttactcatctcgaatggaagtcggtgggactcgaggaccgttgatacacccgncctacaagaagtttggctttgaactgctcttgggctactacacgtaatctaattgtggagttgaggcattgcccaagtaggcacaactccaagatagtagccacccaaaggcacaggataggctaggggccaagcagccaaggcaaggacgttccaagtccggactatctaagattggccaagaatacagggagtggactcaggcaactccggtgtcacagagtgagacccagtattgacntacgcagttggaacctagggttgctctgagaaggtcctcggcccaggaaaggcaagtgagggctcagtctcctgttggcagtgactcagcttcaagtgggggttgacaggtgctgtgggggaacactccctggaaaagtcccccagaaggcccttcgcgtcaggccgagagggaccaaacaaggtttgcaaaaacctgagtttctggggggcccacgggggcaccaaagagcctgttaagctaaatttacgtgtggaatcatcacagagatcctcggtagggacagtgacttgcaccaggagtgtcgaattacaacacaggggagcacacccaggcatcagagaagcaacgggtggaaagccagcaacaccacggagctacatgggcggccaaccgctacacagaatcgcgagcaagagatagagcaaacagagtcgatccagcactaccgcgagcagcagagccacccggccaataaggagaaagaagagcgaatcgtccgcctgtcttcttcttgctctgcacgtacttgtgggtgggggggggggcgc

SEQ ID NO: 717269 - DNA, 402 bp, Homo sapiens
cttgagattccttgtgaagttaaccccttttgcaaagcccttgggccggaaccccttttttcgccaggccaggattcccaagctccgggtggttaaggcagtttttgcagcaggggccctccaagccaattcaaattaaaaggcggcggttgcaggcaaaaagcctttggtaggtaaaaaaggaaaaaaggctcctgttggtgttaaaaacccaaaaaagcctttggtggggaaaaaggcagcggcttccaagaacccagcccctgaaaagaagcctgcagagaagaacccttctccagaggagaagaagcctgctgcataaacttttaaatttgatttttccataaaggtcaaatccttttggccagctttttttgaataaagccctgtttttccgggcca

SEQ ID NO: 717270 - DNA, 843 bp, Homo sapiens
  misc_feature (664)..(664): n is a, c, g, or t
  misc_feature (680)..(680): n is a, c, g, or t
  misc_feature (702)..(702): n is a, c, g, or t
  misc_feature (712)..(712): n is a, c, g, or t
agcggctcgctcccggggcgacgcccgcgtgcgccagagtcgccgaggtcgtccccggcaccggaagtgaccctggcgggtttgtcttcaaattctcggcgagcaggagccgcgccggcaggtggtgttgacgattgaactgggcagtactggggccgtgagcggagagcaaagtgggctggactgggtcaggccctccttcctcgctgccgggatctccactccgccaatcccctgtgcctggcgttgggcggtttcccgaggagcttgggccgccgcagcttacagttgaacatgagtcttcttatgattagtgagaatgtaaaattggctcgtgaatatgcattgctgggaaactatgactctgcgatggtctattatcagggagttcttgaccaaatgaacaagtatctgtactcagtcaaagatacatacctccagcagaaatggcaacaggtttggcaggaaataaatgtggaagctaaacatgttaaagatatcatgaaaacactagagagctttaaactggacagcactcccttgaaagcggcacagcatgaccttccagcttctgagggagaagtctggtccatgcctgtacctgttgaacgaagaccctcaccaggacctagaaaacgccaatcttctcagtacagtgaccctnaaatccacatggtaantcgtccaagtacaactgtcagnagttcaccgntcatctgccagaatgttcacatgacgaggggaaagctgttcgttgtcgtgaaaagaaagaccgaataaggagaaggaaagaaaattcccggtggggtaagaaccgaaaataattggtgaccggatatagat

SEQ ID NO: 717271 - DNA, 540 bp, Homo sapiens
  misc_feature (11)..(11): n is a, c, g, or t
  misc_feature (105)..(105): n is a, c, g, or t
  misc_feature (218)..(218): n is a, c, g, or t
  misc_feature (220)..(220): n is a, c, g, or t
  misc_feature (238)..(238): n is a, c, g, or t
  misc_feature (510)..(510): n is a, c, g, or t
ggccacatgcnttttttcaagggttgagtcctccatcattatacacaaaaaaactcatgcagtgtttttctctcacacaatctcaattcataattctcccacaanaaataactatacattatcctccccccataacatctacaacctccatcctctcagcaatactctcatatacaagctgcaatttaaaattttttatttggagggtggggtgactncncaacccccccaaaccccnttcaataaataaaactcctccaaacattttaaatctactaaataacgacactttccataccaacttatatcaacaacccctcctcaaaatcaaaaatttcttcaatttaaaactccttcaacctacccttccattcctcttcctaatcagggcgttcatcctcttcttttctctctttttatatatactacactttcaattctcttcttgaacgcacccccacccgcccccctctctcctcgcttcttatctttctcatcttctctcaactnctcctcctcctcatccctgcttctctttta

SEQ ID NO: 717272 - DNA, 950 bp, Homo sapiens
  misc_feature (109)..(109): n is a, c, g, or t
  misc_feature (160)..(160): n is a, c, g, or t
  misc_feature (163)..(164): n is a, c, g, or t
  misc_feature (178)..(178): n is a, c, g, or t
  misc_feature (227)..(227): n is a, c, g, or t
cgggttttctttgcccgcctcttttgtgttttttttgccccgagtgttccccttgtgttccccccgggccccacggcggcgaactcctttctcatgttctttgtaaaanccatgttttttttaaaggagtgaatagcatgagcacacatatagagatggnaanntggtatgtgtgatngtttcttgaggagccctggaaagtattttgtaataactatacttatttntaagagacatgtaaacctaaagtgtttctttttttcttcttctttttagcttacagttgaacatgagtcttcttatgattagtgagaatgtaaaattggctcgtgaatatgcattgctgggaaactatgactctgcgatggtctattatcagggagttcttgaccaaatgaacaagtatctgtactcagtcaaagatacatacctccagcagaaatggcaacaggtgagagtaatggctgctgtatgttttaatggcttaagtactcggaagagaaaatttagatcagatgtcaatgctgtatgtagttacatgttaagactgtatgactaccgagcacagtacacagtggctcactcctgtagtcctagcactttggaaagccaaagcagaaggatcacttgaggccaggagttcaagtccagcctagacaacatagcaagacttcattctacaaaaataaaaaaattagccagatgtggtggtgtgtgcctgtagtcctagctactagggaggttgaggtgggaggatcacttgagcctgggagattgaggctgcagtgagctatgcttgtaccactacactccagcctgggcaacagagctagaccttgtctcaaaaataaaaaacaaacaaacatgagtatgtgagttattacacagatttctatataatattactgacactttattatatgaataataatccactttcaccatcagcc

SEQ ID NO: 717273 - DNA, 1205 bp, Homo sapiens
cctatggatcgaccttattatctctcagttctcttctgtttttacgttgggtatattccctcgtcatgactaattggtaccaccccatgtgtccggtgtctcgctgtgtgtggggggttctcctgttgttgtgtcatcttttgttgggcatctgcgtggtgttgtcctttttatctctcctattagtttgttagccagagcatggactgtgtccgtgatgtggttatctttggtttttgtttcatatagttatggtatgagagtgttggggtgaggttgtgtgtggcagggatttgtatttggttattctgtaatggtgatatgggttttatatgttacaatgagagtatagagtcatgttgtagggagttgctgttatttgggattatttatagatatgtatttcagttcgttgacttcgcggggtttttgtcctcggcttgggttggtctcttgttcagcctcggtcgctgttcgtgcgccgttgttctgggtagtgtgatttcttctgtgtgtatctctgtggagtacagtcccgtattgtttttgagttgttgggataggtatcagccttcttcttctcagtcagcgggtagtgtgtctaagcgatgtgtgtgtagtgtcgtctttctgcttatggacgtacgtggctgttcacaggtggctaaagttgatgtcacttgggttatagatctgatgttatttccaaagttgaggctcgggatatcacagaaatgatctgatcataggctgtgccatgagagacctgttggttgtgtagataatatgcagttttcattgcctcactggcctgggtagcacaagctagaatatagattactagagcacacagtggggcaggcaggcttctagttactctggtaactgggctgtctactaaacctcctagcatttttcaggtgagaatagcttttaggataaagttctctctcctagttagtactatacacggagttttctttgtcttaccccatgcgctcgcttcggaagtgaactggatatattatatgctagctagctagggatataagcgtgaggagatatgtactactcatcacctccctacctgtgataagcccctcttcagacaaagaagtatactactataatctattgtctcttcctttgtggaatagaatacaggactagctagtagctacgtatgcaggcaggttggcgagact

SEQ ID NO: 717274 - DNA, 1017 bp, Homo sapiens
  misc_feature (323)..(323): n is a, c, g, or t
gcttctggagggctcgttgcggggtgagtgcttcgaggcgcagagctggctccgtcggaagagcgcacctgtgcagtgagggagcatcccgggcctcccggacgggcgtagtgcgaagtggctctcacatgacggtctaggaacagtagctatgaacgttagctgtgtgtgcctaccgcctgatttcatatggtgaaactgggcagcgtcagttccaatgatccgtgcaacccgtgttcatcagtaacgaagagcagaggcgtcacacgtcttccaatgacgtcttatcgcatcattgcgcagggccgtcaacccgatggagnacgcatcccaagagaagcgcagagaatacctaggctcaggggacgcatcgtgccctctgttattgaatagcctcgctctgacccgggtagtggctgttcttcttcgagagtatttcattccactcctcagtgcgagggagagtgagtgatcgacataaaaagttcacatggatgggtgtctatcatactgacttggaggagatgtgactcctcgatatgtggcgaatgattaggagaaccttgaggcgctagaggacatgaatggctctagctgtggggacgcatttctaggaaactctattgttctggtgcgcaatgactaggattggtgggtctcgagcccaccatcattgtgaggaagtgcagctgagtagcgtctttttgggacgcattactggtacagctgcagcatctaaccggtgagctggtgaatgtggagatgctctagataggatacagtgagggctgtatctggaggagtcttcaggagacgaacatgtatgaatggagtgtggagttgaaagcggcttgacaggagtggcagactaaaaggtaggctgggtctgtacagagggaagggggactggtgtgtcccagtgaggctgggaaggacgtttggacaaaggaggcgctgagaatttgtggggaaaatgggggtggggaaaggtcaaggggtgtgggtgagggttggttg

SEQ ID NO: 717275 - DNA, 683 bp, Homo sapiens
cttgagcctatgagtgcatgaccagcctaggcaatgtagtgacacctcatttatatttattctagaacaaagagagagtactactgaagaactctaaaaaataaaatataagcttaccttggattcttggcttagagtagatgtttctcttaagttatggaggaaacatgcttgtgaaagttcactgacccactgtagatgctgcaagaacaatcatcccttccatgtatgtcttgagagagaaatcacagaagcatttctcaccagtactctttggcttaaaatgttcagcaaaattgggctgtgggggtgacttttctgatattaatgatatctacatccaatacactgaatcttgctttacaggtaagactctaatatctatactgaaaatatgggagttatatggcactactgtaagtactgtttttcacaaagctcttatttggaagctagcaatgctagtctcttgaatgattgtttggactcattcattcctgttaagctgccacaagttaaagtgcactattgtatattgttaagaacacatttgaaatggaattttgatgctcctcagatcacaagaaatacaaatgtatatagtataatcggcacccaattcccctatagaggagtccattacatttactggccgtcgttttaccgcctgactgggccttggc

SEQ ID NO: 717276 - DNA, 134 bp, Homo sapiens
cagcttgagtaatggagccactgaataatatctgtgtatttggatgttcgattagagactttgccattctctcaatgagcgaccccttaatttgcaccaagtaatggtcatggtgaacaatggtgtcattcaca

SEQ ID NO: 717277 - DNA, 1055 bp, Homo sapiens
ccatttggtccggctctgtatccctgcgttgctctccagtctctcgcgatgccgcagatcaccatgaggtttcggatatcatgtagcctagacttgtctgggctctactgtggtccttgattatcgtgttgcgggttccgagctgcatcgatggttatgtggctatgactcacacatgatgtgtccgatatctgggatgccgtggttgcttacctggacccgcccttaccgatctattgtgtaactcgcccgtacgtatttgggtgatacattcacactctcacgatctgttacaagcctcggtggaggtcgtcagactgcccaggtagtgaatataaaagctgtaagggtcaatcttattggttccttgtgctgattgttctgggtactacataacgacgtgaagtgtgaatacttacaggcctcttattaagaatgacttgatgactatctcgacacaaatgggtgatctgactgaatgcatgattgagagtagatctagagcttatactgggctctatgtggcaccgtaacatctaggatactattattgaatccaacctgcgcccaataagagatccttgtcaggtgttatggcaagatggtttgtcaatgcatttactagatgttgaaaccttgtgcattgagtgaagacgacggagtgtgtgctgaaggtgaagatgcgacgtgcggtcaaaggctattaccatgcaggacgggtttaaatctcgtgggcctcatctgctactgcgtgccagctgtggaatacaggctttcagaagactgtcgaggtacgacgttgtgataagagtgacagactcaaaagacgttgggaacggatagtgcgggggcccgaggcccgagtactgggtcttggaaggcactgatgttaccaacacgagttgccctgtgcctgggtggcttaaagaacccaaggaccatgcttgcatgttggaatttgaattcccttatttgtcagtttacattcctttcaacgggggggcgccattggttcccccatggcctttccatcttccggctcccgttaaaaggca

SEQ ID NO: 717278 - DNA, 101 bp, Homo sapiens
gttagtcaggtcgatcattctatttccccctctattgatccccacctctcaaatatctcatcaacaaccgactaatcaccaccctaacaatgactaagtca

SEQ ID NO: 717279 - DNA, 333 bp, Homo sapiens
atctcatccttcaggccttcctctaagctggaactaggataagaattaacgagcccagccaggcgcggtggctcatgcctgtaatccccgcactttgggaagccaaggcaggtggatcacttgtgctcagcagtttgagaccagcctgggcaacagggcaggaccctgtctctaccaaaagtacaaaaattagccaggcacagtagcctataatcccagctactcaagtggctgaggtgggaggatcgcttgagactgtgaggcagaggttgcactgagctgagatcatgccactgcactgcagctgggtgatgaagcaagaccctgtctcaa

SEQ ID NO: 717280 - DNA, 158 bp, Homo sapiens
aaagataaatatgaggataagacttccaaggaagttggccaggttgcagtggctcattgccttgtaatcctagcactttgggaggctgagacaggcagattgctttgagcccaggaattttgaaaccagcctgggctaacattggcgaaacctcatct

SEQ ID NO: 717281 - DNA, 139 bp, Homo sapiens
cttctagtggagctgctgttatcagatgcacactggtaaaactgccacttgtggtgctgtataccttgagatgggtagcacgactcccagtgtgactaattaccaggcaatactatactacaacagcagggatcactgc

SEQ ID NO: 717282 - DNA, 659 bp, Homo sapiens
cacagattttaaactaccaaatttgccttaaaacctaagagattcctacagtgccctgatcccaaccttctgcggtgcgggctaggagtacaatagtcttagcgaactactatacttaatggatgcagggggtggacgcaacggaacaggttaccctaggatctaacagcgcaaacgttctctagagttcctatcaacactatggttaaccatctttacgttaaatcatcacatcacttttgatgcagccgatgttaatggactgtgtgggataactactcataatcctacatgaattagaagaaaacaccatcaggtaataccaggactataatattatttagcaccatattccttcattgtactcaactggtacaccttccctatttagctctcattatcactcacttaaccacttattcactgccttgactcatattactcgcttcacagcttcttatctctatttacacaatcctatcatcccattacttatcatctaaatcacatattaaactacatatctctagtccatatttcttcactactgcacacaatttcaactacatagtgtctatttttactcacttctgaatctcttataaacctcctatctccatacttccaatttatatatactaactaaaccccgtctatct

SEQ ID NO: 717283 - DNA, 578 bp, Homo sapiens
  misc_feature (47)..(47): n is a, c, g, or t
  misc_feature (71)..(71): n is a, c, g, or t
  misc_feature (81)..(81): n is a, c, g, or t
  misc_feature (83)..(83): n is a, c, g, or t
  misc_feature (99)..(100): n is a, c, g, or t
  misc_feature (107)..(107): n is a, c, g, or t
  misc_feature (110)..(111): n is a, c, g, or t
  misc_feature (117)..(117): n is a, c, g, or t
  misc_feature (121)..(121): n is a, c, g, or t
  misc_feature (124)..(124): n is a, c, g, or t
  misc_feature (127)..(128): n is a, c, g, or t
  misc_feature (130)..(133): n is a, c, g, or t
  misc_feature (141)..(141): n is a, c, g, or t
  misc_feature (147)..(147): n is a, c, g, or t
  misc_feature (156)..(156): n is a, c, g, or t
  misc_feature (160)..(160): n is a, c, g, or t
  misc_feature (162)..(162): n is a, c, g, or t
  misc_feature (165)..(166): n is a, c, g, or t
  misc_feature (168)..(168): n is a, c, g, or t
  misc_feature (174)..(174): n is a, c, g, or t
  misc_feature (177)..(177): n is a, c, g, or t
  misc_feature (181)..(181): n is a, c, g, or t
  misc_feature (186)..(186): n is a, c, g, or t
  misc_feature (192)..(192): n is a, c, g, or t
  misc_feature (200)..(200): n is a, c, g, or t
  misc_feature (210)..(210): n is a, c, g, or t
  misc_feature (231)..(232): n is a, c, g, or t
  misc_feature (236)..(236): n is a, c, g, or t
  misc_feature (246)..(246): n is a, c, g, or t
  misc_feature (279)..(279): n is a, c, g, or t
  misc_feature (281)..(281): n is a, c, g, or t
  misc_feature (291)..(291): n is a, c, g, or t
  misc_feature (305)..(305): n is a, c, g, or t
  misc_feature (352)..(352): n is a, c, g, or t
  misc_feature (359)..(360): n is a, c, g, or t
  misc_feature (369)..(369): n is a, c, g, or t
  misc_feature (386)..(386): n is a, c, g, or t
  misc_feature (390)..(391): n is a, c, g, or t
  misc_feature (394)..(394): n is a, c, g, or t
  misc_feature (436)..(436): n is a, c, g, or t
ctacataaataaatatagttttaaaagtggacctttaaacatcagtntttcccttccgtcatggcattccnacgacaaggncnaaacaccccccccccnnacctganaanncccgcnaccnacnacnncnnnnaccatgancaccanccccgccanaacnanacnntngtcacntcntggngagcnagaganatgaaganaacaaaaganaatcatgtgcgagtttaatgnnattnatccgatacntttttcaaaaagtcacactcacgtctgcatganantattagaggnatataatgtatganagagaattccaataacataatgtacaaaaatgttgtcacatacagangagcganngtctacgtnttgggggctattgctgngggnnggngggcctgatcttcatactcatcttcctcattgagtaccatgnccccttccaattcatccatactacaccatcatctgtgccatgctttgccatgtcccaggtgtactgtccaccccagtagtatctgccgtttggattggctgcatgacatctattataccaccatccaccaccgtcttcttta

SEQ ID NO: 717284 - DNA, 746 bp, Homo sapiens
  misc_feature (725)..(725): n is a, c, g, or t
  misc_feature (729)..(730): n is a, c, g, or t
  misc_feature (734)..(734): n is a, c, g, or t
ctggcttacccagcccaaaggaccccactcccgggggtctggggacctgaaggctcttgtctgacccctctccccacctgtatttcctggctggccttgcgtgcctctgtgtttagaagaaccgacgagtttattagagaaggaaagactgcactgtgtgaccttgaataagacagttcgcccgtgcctcagtttccctgactttcacgcaaggatcaccacggtttcctctgtcaagttcctgagatgggcaggggggatttttgttctcccagcacctgcggctgttgagaccagagaagctggtggtcgaccaaaagcctggggtattagttcaccccttagcttctcccccagcgagaccccccagggcccttgggcacaggggattaagccctctatctgcttacgtgcaagcggaagaaataggcccagagagcaacagtggcgggtctgcagtcacacagcccaacttgcgcttgtggcagtggcaaggttggaagctggttcagtggggctgtcgaccacaggtaccaaccctgccctcccctacagagtatgtgacgtagcacagccaatgactgcatcccagtgcttcgaccagtcacagggtcaagggtgcagtggctcacacctgtaatcccagcactttggagtcccaagcaggcagatcgcctgaagtcgggagtttgagaccagacctgggtgaaaccccatctctaaanttannacantacaattaaaaa

SEQ ID NO: 717285 - DNA, 774 bp, Homo sapiens
  misc_feature (25)..(25): n is a, c, g, or t
  misc_feature (27)..(27): n is a, c, g, or t
  misc_feature (604)..(604): n is a, c, g, or t
  misc_feature (613)..(613): n is a, c, g, or t
  misc_feature (646)..(648): n is a, c, g, or t
  misc_feature (673)..(673): n is a, c, g, or t
cgccgtcgggccttctccctccagngnccaagagccactggtactcagtgtctgggtgggggcaggggggatttttgttctcccagcacctgcggctgttgagaccagagaagctggtggtcgaccaaaagcctggggtattagttcaccccttagcttctcccccagcgagaccccccagggcccttgggcacaggggattaagccctctatctgcttacgtgcaagcggaagaaataggcccagagagcaacagtggcgggtctgcagtcacacagcccaacttgcgcttgtggcagtggcaaggttggaagctggttcagtggggctgtcgaccacaggtaccaaccctgccctcccctacagagtatgtgacgtagcacagccaatgactgcatcccagtgcttcgaccagtcacagggtcagaagttctgagggtacccctcactcaagctccaggcgtcaggaaaagaacattccacgaagtccatctggaagacggtcctttccctgctgcccccagcttctagaacattccctggaacacagcaagtgttcagtattgttcatggagtgacagatgtctcagccaagaaggtacantcacagggnagaatgacttcaactggtcttgacttcaacctnnntccagcctggttcccttctcccacntcctagagcccacagaagatcttttccaaactggaagtctgtccaggtcattcttctgctctaagggtttcagtagctccccttttcccaggaggaagtca

SEQ ID NO: 717286 - DNA, 1008 bp, Homo sapiens
  misc_feature (888)..(888): n is a, c, g, or t
gcagctctttgtcctgcgtcccaggtagctacacagccttcgaggtgaccggaccaggacagacggtcgcccagatcaatgctcatgtagcctcactggagggcattgccccggaagatcaatgtcgtgctcctggcaggcgcgcccctggaggatgaggccacgtctggttccagtgcgggggctggagcgctccctgactactcctggaaatagcatgcccgcagtgcgttggcagcgtaaagtccgatggtgttccctggcccggtgcctggagaacagtgaggaggtccagacgtcctagaggtggctcaaacaggaggaaccaagacacggaagtaagacaggtcagcgtgctaaagcggtcgcgatgtcggatactaatccgtgcggcatttggacgacaccgattgttgcctcccagcacgtctatggggccagaggacatgaaaggggcactcctagagtgtcctagacttctctgagagtctgtggctgatacactctgcctgtgcgtatgtcgtccatgacagtgaaaaacagaaagcgcgacattctaaggatctcaaggttcagagtcctagatatagagaacagacattagagcatagagacacacaagaacagaccaaggcgcggcgccaagcccggctcgcaaaagagagagtttgcactcacgcgcacagcgagggggagcgcccattttgcgttactacccccggggatatacccgccgcacgaggtcgttctctggtgtgtagtgcaaaccaaaacggggggcgagcgcccacccttttggattacgacgaggcgaggtcctcagcttgcatactaaggtacgagcgcattaacccacggcagaacctgtgaccttccacacgcacttgnccggtcctctgatcgcagacccttgccattggaagggcgcacgtgaagccgacccatgcaccgcggtgctacacacaccacgctgcgccgcgaaacacgccacgcttgtaggtgtacgaa

SEQ ID NO: 717287 - DNA, 343 bp, Homo sapiens
cgcctcctgcatctattcctggggtaaaatccccgcccgttggacacgtgaccactgagcctgcactctgcgcttccattggccagaccacgccccgccccttgggctccgggcacttacgtccgctagtgggcacaatctacagaggtacggaccgtggagattcgaggctgcagcctggacatcgcctatgtcctcgatagtgagcacatccctcataacactgagcggagtgtgacggtggataagtcggcgtgaggctagaaagagctggttgtgaagggacgggaagacccggcatagcagtccggacttctttgggagtggcggctcccatgttgat

SEQ ID NO: 717288 - DNA, 943 bp, Homo sapiens
  misc_feature (512)..(512): n is a, c, g, or t
  misc_feature (524)..(524): n is a, c, g, or t
  misc_feature (773)..(773): n is a, c, g, or t
  misc_feature (782)..(782): n is a, c, g, or t
  misc_feature (815)..(817): n is a, c, g, or t
  misc_feature (842)..(842): n is a, c, g, or t
ctggcttacccagcccaaaggaccccactcccgggggtctggggacctgaaggctcttgtctgacccctctccccacctgtatttcctggctggccttgcgtgcctctgtgtttagaagaaccgacgagtttattagagaaggaaagactgcactgtgtgaccttgaataagacagttcgcccgtgcctcagtttccctgactttcacgcaaggatcaccacggtttcctctgtcaagttcctgagatgggcaggggggatttttgttctcccagcacctgcggctgttgagaccagagaagctggtggtcgaccaaaagcctggggtattagttcaccccttagcttctcccccagcgagaccccccagggcccttgggcacaggggattaagccctctatctgcttacgtgcaagcggaagaaataggcccagagagcaacagtggcgggtctgcagtcacacagcccaacttgcgcttgtggcagtggcaaggttggtgagtatctgantcttcaggccanggcattttccgctcgagtggagcctgcctcagcctgttcctttaacatcagcttctgaaactatctctgcagaagttctgagggtacccctcactcaagctccaggcgtcaggaaaagaacattccacgaagtccatctggaagacggtcctttccctgctgcccccagcttctagaacattccctggaacacagcaagtgttcagtattgttcatggagtgacagatgtctcagccaagaaggtacantcacagggnagaatgacttcaactggtcttgacttcaacctnnntccagcctggttcccttctcccacntcctagagcccacagaagatcttttccaaactggaagtctgtccaggtcattcttctgctctaagggtttcagtagctccccttttcccaggaggaagtca

SEQ ID NO: 717289 - DNA, 708 bp, Homo sapiens
  misc_feature (25)..(25): n is a, c, g, or t
  misc_feature (27)..(27): n is a, c, g, or t
  misc_feature (323)..(323): n is a, c, g, or t
  misc_feature (335)..(335): n is a, c, g, or t
  misc_feature (538)..(538): n is a, c, g, or t
  misc_feature (547)..(547): n is a, c, g, or t
  misc_feature (580)..(582): n is a, c, g, or t
  misc_feature (607)..(607): n is a, c, g, or t
cgccgtcgggccttctccctccagngnccaagagccactggtactcagtgtctgggtgggggcaggggggatttttgttctcccagcacctgcggctgttgagaccagagaagctggtggtcgaccaaaagcctggggtattagttcaccccttagcttctcccccagcgagaccccccagggcccttgggcacaggggattaagccctctatctgcttacgtgcaagcggaagaaataggcccagagagcaacagtggcgggtctgcagtcacacagcccaacttgcgcttgtggcagtggcaaggttggtgagtatctgantcttcaggccanggcattttccgctcgagtggagcctgaagttctgagggtacccctcactcaagctccaggcgtcaggaaaagaacattccacgaagtccatctggaagacggtcctttccctgctgcccccagcttctagaacattccctggaacacagcaagtgttcagtattgttcatggagtgacagatgtctcagccaagaaggtacantcacagggnagaatgacttcaactggtcttgacttcaacctnnntccagcctggttcccttctcccacntcctagagcccacagaagatcttttccaaactggaagtctgtccaggtcattcttctgctctaagggtttcagtagctccccttttcccaggaggaagtca

SEQ ID NO: 717290 - DNA, 159 bp, Homo sapiens
tgtgactctcattacgaattgtagagacgtccttgcccgagtggtacgctcgtgcttccaggattctctccaggttgccagacatccgtactggctagccaccaaagcacacggagattctgtcaggcgctgagacaccacagccttttcaatcttgtc

SEQ ID NO: 717291 - DNA, 572 bp, Homo sapiens
  misc_feature (66)..(66): n is a, c, g, or t
  misc_feature (402)..(402): n is a, c, g, or t
  misc_feature (411)..(411): n is a, c, g, or t
  misc_feature (444)..(446): n is a, c, g, or t
  misc_feature (471)..(471): n is a, c, g, or t
gggggatgatgagaggcaatgtggcatggtggttaagcgcgtggacttggagccagacggctgggntgaatcctggctccgctctcaccaactgtgaccttgggcaaggaagctggttcagtggggctgtcgaccacaggtaccaaccctgccctcccctacagagtatgtgacgtagcacagccaatgactgcatcccagtgcttcgaccagtcacagggtcagaagttctgagggtacccctcactcaagctccaggcgtcaggaaaagaacattccacgaagtccatctggaagacggtcctttccctgctgcccccagcttctagaacattccctggaacacagcaagtgttcagtattgttcatggagtgacagatgtctcagccaagaaggtacantcacagggnagaatgacttcaactggtcttgacttcaacctnnntccagcctggttcccttctcccacntcctagagcccacagaagatcttttccaaactggaagtctgtccaggtcattcttctgctctaagggtttcagtagctccccttttcccaggaggaagtca

SEQ ID NO: 717292 - DNA, 123 bp, Homo sapiens
ggctgagcaagctgcaggctgcagcatagacgccgacatcgacgtttcatccaggcaagagcacgggcacagagccccccgctccggtgccctaccagaactattacgatcgggaggtcaccc

SEQ ID NO: 717293 - DNA, 103 bp, Homo sapiens
tcaggtgcgagctgtttactcagtgtgcgagctgcactcagtgagcgagctgccgattccggagtagggagcctgagaaacggctaccacatcaacggtaagg

SEQ ID NO: 717294 - DNA, 3545 bp, Homo sapiens
  misc_feature (8)..(8): n is a, c, g, or t
  misc_feature (1395)..(1395): n is a, c, g, or t
  misc_feature (1397)..(1397): n is a, c, g, or t
  misc_feature (1507)..(1507): n is a, c, g, or t
  misc_feature (1535)..(1535): n is a, c, g, or t
agcggagnagcctctgctccaccgcggcgagaggcatgggcacgtggctgccgagggtggccgagctctgggaagaaaagcccgtgtgcctctgcatagcgtcgctacagcgctgactcggtgtggattgattggaaaggtttgagggagtacttgggaagcatggtggcacatgatgagactggaggtctcctacctattaaaaggaccatacgagtcctagatgtcaataaccagtccttcagagaacaagaggagccaagcaataaaagagttcgacctctggctcgtgtcacgtccttggcaaatttaatctctcctgtaagaaatggagctgtcagacgttttggtcaaacaatacagtcatttacccttcgtggtgaccacagatccccagcctctgcccagaagttttctagcaggtcaacagtcccaacacccgccaagagaaggagcagtgcactgtggtcagagatgctggacatcaccatgaaggagtctctcaccaccagggagatcagacggcaggaggcaatatatgaaatgtcccgaggtgaacaggatttaattgaggatctcaaacttgcaagaaaggcctaccatgaccccatgttaaagttgtccatcatgtcagaagaggaactcacacatatatttggtgatctggactcttacatacctctgcatgaagatttgttgacaagaataggagaagcaaccaagcctgatggaacagtggagcagattggtcacattctcgtgagctggttaccgcgcttgaatgcctacagaggttactgtagtaaccagctggcagccaaagctcttcttgatcaaaagaaacaggatccaagagtccaagacttcctccagcgatgtctcgagtctcccttcagtcgaaaactagatctttggagtttcctagatatccctcgaagtcgcctagtcaaataccctttactgttaaaagaaattcttaaacacactccaaaagagcaccctgatgttcagcttctggaggatgctatattgataatacagggagtcctctctgatatcaacttgaagaaaggtgaatccgagtgccagtattacatcgacaagctggagtacctggatgaaaagcagagggaccccagaatcgaagcgagcaaagtgctgctgtgccatggggagctgcggagcaagagtggacataaactttacattttcctgtttcaagacatcttggttctgactcggcccgtcacacggaacgaacggcactcttaccaggtttaccggcagccaatcccagtccaagagctagtcctagaagacctgcaggatggagatgtgagaatgggaggctcctttcgaggagctttcagtaactcagagaaaggtaaaatcagncnttcaataatttaaagaaatagaagctcagaactgaagtgaatttagttttgcctttaagaattctagagatgaaatgctccattgtcctatacttgttacatccattganttgtcaggccttcccagctcgaacaccngcaggtgtatctaagaaataatgcataggcttaatgtattcacattgacataaataaattgccataaattgacagtcacgttaagattgtatgaccactttgtctagaataaacctttttttagcctgatttctttttttttccattttttttttcagctaaaaatatctttagaattcgcttccatgacccctctccagcccagtctcacactctgcaagccaatgacgtgttccacaagcagcagtggttcaactgtattcgagcggccattgcccccttccagtcggcaggcagtccacctgagctgcagggcctgccggagctgcacgaagagtgtgaggggaaccacccctctgcgaggaaactcacagcccagaggagggcatccacagtttccagtgttactcaggtagaagttgatgaaaacgcttacagatgtggctctggcatgcagatggcagaggacagcaagagcttaaagacacaccagacacagcccggcatccgaagagcgagggacaaagccctttctggtggcaaacggaaagagactttggtgtagagaaggctctgtgtgttaactgatgggagagactgtttgtttataaatgtgtacagttttgttttctcgtaaggggagcatcatagggttactttataccagttgtaacattttcattgtttttggttgttcttttttctttttttaatggcagctaaagatatacagattactgttaaattgcagtccttttttttttaaagatattttcttgagttatttagaacatggtaagcctggtattttttaatcaaacaaaatatttatgaaatgggttttctcttaattctggattcatcatggctttctaataccaattgtaatatttacaatattcaccaaaacttagaattttgcaaatgctggaattctgccagtgtttctttgctaagccttgcatgcaaaatttgaaattttaacattggcacccaaaacctacatggaatgtatgtctggagtatttcaaactttacattgaaacataatttccttggaaaacaaaccataagcctgaggaggtttttatcaactggaatgctttatattagtttgtttttcactgtacattcctcattttacattcatttaacctgccgattatttaatttttttattgtaaagtagtttttagcatttgcttttatttttttactttgatgccttttcaaattggcatgtctttaaagtatttttcttcctgattaaaaatgtgtgtgtatgtgtgtgtgtgtgtgtatatatatatatttttttaaatcacattaattttaccaagtgaaaccaagccatactgtttttgagccaattaagaaaattgccatttttaaagtgtagcatttcagggtaaagacccatgaaatggcttgatgtattctagactactgaaagaaaaccacttcaaagattttgttgaaagttttagtgttgtctgaaatgcaagagggaaggtgattggtagtgagttaaaagaaaaagagaggaaaagagagtagttttgtcttcaagtaaaatgtctggttgtgccagacatttcacaagtgtgaaaggagataggagaagctcaacttgagggcgtgtagtaagttgtagaaggctcgaggggacgtggacttatttgccttggtttgcaatacctgcaaataatgagtttgaaaagaaacaatgaaatgtgttaaaaatttgaccatattagataaattttggtggatttagtcataagatggaaaaagactggtgaatcttttattacaaaatgtttctgttaaaatgggatcatcatctttgaaaggggggaggaggagtaaaagcccgattataatggtgatcaattcaagtcagtgttgactattctgtgaaatatatttggccagtggaaatgataatcagaaaagactgtaaatagatccatccaaatgatttctctgtacaaatgaatgatactatta

SEQ ID NO: 717295 - DNA, 1445 bp, Homo sapiens
  misc_feature (445)..(445): n is a, c, g, or t
ggtagacggtgatcactgtggacacttaaggcggcaggctaaaggccaagtgacagtgcaccgctgtgcactgcctgatggctcagatggtggatgtgtgatcgtggtgagagatatgaggactggcgactttcgacatctttctatcgactggcccgcccaagcctgggcgtacttcccgtctgtctggtgtgcgctgtggtggcgagcacagtgcccaatcatgctccctttccagatggtgatctggcttctggcttgggtgaccagtcctcgtcgtggtgcacgtcgcaccctcgtagcgcgttcgttcagcatgcgtgggccccagcacgattagcaacacattacgacacaccaagaggtctgggtcgcgaaggcgaaggaacattggggtgcctcccctggaaacgtagggcccacccgtggggtagcgagttagttnctagctcgtgtgccgtgggcaatagatgtatccgatggcgcgtagaaagtggcaacccgtatcttgacacttctgattttatccaccacttttcaaacacttattcaacgaaaaggggactgagagttctaccgaagtggcagacagtgtttccagcgtattggcccccactccaaggggcgatagaggtttggcgagcaagaggtcgcaaacgcaattaaacctttgagcaaaagcaaatattgagcaggccatccacgggtcgcaacccccgtttgtctgagttcattggcaaccacccgaaaggctgaaagggtctttagagtccctttgccaaccagaaagaattggtgaaccatttcgcaggcttaagtagaccagatcgatttgcgacgacttccccctagggggaaaaggccccccaatttggcaattggtggtcatatatttcgtttgggatttgtaaccaggtcacatatcggttggtgagggcccaatttgttcaacatttggccgtaatttggggtgccccgttgggctcatctaacccccaagttgtggaagttataggttgaggacctaaagggccctttagcaccgacaccgttttcaacccagcttccaaaaccaaaccgaaagggaattcgccaaggaggaaggaacgtgggggggggagcccatgtggtccagtaccctgggggcgcccattttgggaggggggcgccccggttcacaaaataggccgacgtgaaaacacatttccaaaggccattgggcaacctgtgaaccaacaccacccaagggggaattggggggaaaccactttgccaacacggcagggtttggttcccttaaactccataggcgccctttggtttgccattgccccagtgggtggtgacgaaccttcacacaagggagacagtttcctgaaggattccacaagaggtaacccaaaagtctgagaagacacatggagcagacagtgtttcccaccaag

SEQ ID NO: 717296 - DNA, 519 bp, Homo sapiens
ctagaggatcccgacgctctctctgtgggggcgctctctctggggtctccgcagagaggggcatggactgctggctttacctgggttggggcattgtctggaccagtggccttcattgccacacttgaaataggcgccaggtggaggtggattttaaggaggcttctgtgtggagctgcggccccgtgggcctgcagggcccctgatggtggaggcaagcatttgaaactctgcctgttttggccttttactttcctcattacaatggttgaagactttgaaggctaaattaagaaggacttgtggtggggtttgacggccgtcgtcaagcttctggagcttgagccaaacatggggggtggattaggagatgaactgaaggtttaaaatactgattccttctgagggtttgaaggggaaagcgcggttgagttaataggcaggggaggatagacagaggcgtacggtggcaggataggtttaaaggccccacagagagagcgtcccccacagagagag

SEQ ID NO: 717297 - DNA, 2829 bp, Homo sapiens
cagtggagaatcattaatactttattgtttagtgtcgaagcataaatcaacttgttaggccaggggttcctgtctaaatacagtattagttccataatgcttaataaaaaagcatccttcaaaaaaaacttctaagagtttatcttatgcttatgaaagtggtttttcgcactacataacaaatttctgaagcagattgaatgaatgcaaatgtattttttaaatgctaattataaaagtacctgctagaactaagtgcagtcacggaatggtatttttgtttcatcatgcattttcaaaagcccaatttataagttggagttttgtttaaaaaaatttgaaatctgacatctttgatttttccctcacgaggggaaaatttataaaggtataaatttgtgtgggacaaaatagaaccattaacattttaccagcttgcatttttaatccctccttcgtgttagaaaactgtggtatacaacgctagtgtttcaagtcatgttgctactaataggtctttgtgatgcagagcattcacttagctgctgcttaatctgatattacataccaataagaaacattttatttattctgagattggaaaaactttccaaatagaacatgcttagccttgaaattgccatctttatggattactagatttgtcacttagagagatcttcgaaaaataaatctgatgaaattaataatgtcgagttattttagcaatatatttcagtcacttaaaaacacaagtttcctatttagcgtttgtttcccatttctccagaaactttacattttcctgtttcaagacatcttggttctgactcggcccgtcacacggaacgaacggcactcttaccaggtttaccggcagccaatcccagtccaagagctagtcctagaagacctgcaggatggagatgtgagaatgggaggctcctttcgaggagctttcagtaactcagagaaagctaaaaatatctttagaattcgcttccatgacccctctccagcccagtctcacactctgcaagccaatgacgtgttccacaagcagcagtggttcaactgtattcgagcggccattgcccccttccagtcggcaggcagtccacctgagctgcagggcctgccggagctgcacgaagagtgtgaggggaaccacccctctgcgaggaaactcacagcccagaggagggcatccacagtttccagtgttactcaggtagaagttgatgaaaacgcttacagatgtggctctggcatgcagatggcagaggacagcaagagcttaaagacacaccagacacagcccggcatccgaagagcgagggacaaagccctttctggtggcaaacggaaagagactttggtgtagagaaggctctgtgtgttaactgatgggagagactgtttgtttataaatgtgtacagttttgttttctcgtaaggggagcatcatagggttactttataccagttgtaacattttcattgtttttggttgttcttttttctttttttaatggcagctaaagatatacagattactgttaaattgcagtccttttttttttaaagatattttcttgagttatttagaacatggtaagcctggtattttttaatcaaacaaaatatttatgaaatgggttttctcttaattctggattcatcatggctttctaataccaattgtaatatttacaatattcaccaaaacttagaattttgcaaatgctggaattctgccagtgtttctttgctaagccttgcatgcaaaatttgaaattttaacattggcacccaaaacctacatggaatgtatgtctggagtatttcaaactttacattgaaacataatttccttggaaaacaaaccataagcctgaggaggtttttatcaactggaatgctttatattagtttgtttttcactgtacattcctcattttacattcatttaacctgccgattatttaatttttttattgtaaagtagtttttagcatttgcttttatttttttactttgatgccttttcaaattggcatgtctttaaagtatttttcttcctgattaaaaatgtgtgtgtatgtgtgtgtgtgtgtgtatatatatatatttttttaaatcacattaattttaccaagtgaaaccaagccatactgtttttgagccaattaagaaaattgccatttttaaagtgtagcatttcagggtaaagacccatgaaatggcttgatgtattctagactactgaaagaaaaccacttcaaagattttgttgaaagttttagtgttgtctgaaatgcaagagggaaggtgattggtagtgagttaaaagaaaaagagaggaaaagagagtagttttgtcttcaagtaaaatgtctggttgtgccagacatttcacaagtgtgaaaggagataggagaagctcaacttgagggcgtgtagtaagttgtagaaggctcgaggggacgtggacttatttgccttggtttgcaatacctgcaaataatgagtttgaaaagaaacaatgaaatgtgttaaaaatttgaccatattagataaattttggtggatttagtcataagatggaaaaagactggtgaatcttttattacaaaatgtttctgttaaaatgggatcatcatctttgaaaggggggaggaggagtaaaagcccgattataatggtgatcaattcaagtcagtgttgactattctgtgaaatatatttggccagtggaaatgataatcagaaaagactgtaaatagatccatccaaatgatttctctgtacaaatgaatgatactatta

SEQ ID NO: 717298 - DNA, 860 bp, Homo sapiens
  misc_feature (850)..(850): n is a, c, g, or t
ggcaggagcaagcgtctgccgcggtggccgggtgcgatgtgacaagatcaaagctgcggaaaatgacagtgaggtcagagagatggaaggatctggatggatgatgatgcttgggagaagacaagctgccttatgaggatgtcgcaataccatgaatgagcttcctgaacctgaacaagacaatggtggcaccacagaatctgtcaaagaacaagaaatgaggtgacagacttagccttacagtacctccatgagattgtccccccatgggaaactgacgctgtggtcctttctgtgtggatggattttctcaaagtacacagataaaggcatggtggttcagtctccaaattcaaacccttgtgagtaataaatcagcactcaaaatgtacaccccatttagttgggtggtagcaaagtgcaatgcgaaatggatgaggaaactgagattctcagataatggtgaatattccgtcttaaaacctaaaactcttcatggagtagctaatattgaccatgatgtgttaacatctggcctctacctctgatttgcttgtgtggtcaaagtttaacaccttccactacttatgtgtgtcctgtaacacagctgattgacgtatgagagggaaggcaagacaaggcaggcagacactagagaatattactctcatacttcccaatgggagcatcgggggattagccgtaattgggaatttgacatccatccggtgtgatctaaattcaaggttcactgggattcgttaaaatctgcggacctgtcccaacttggcgaaactggggggaattcactcccttcccacgctttttcttgcacttttgtgctcatacncaaacacaca

SEQ ID NO: 717299 - DNA, 3138 bp, Homo sapiens
  misc_feature (988)..(988): n is a, c, g, or t
  misc_feature (990)..(990): n is a, c, g, or t
  misc_feature (1100)..(1100): n is a, c, g, or t
  misc_feature (1128)..(1128): n is a, c, g, or t
cagtggagaatcattaatactttattgtttagtgtcgaagcataaatcaacttgttaggccaggggttcctgtctaaatacagtattagttccataatgcttaataaaaaagcatccttcaaaaaaaacttctaagagtttatcttatgcttatgaaagtggtttttcgcactacataacaaatttctgaagcagattgaatgaatgcaaatgtattttttaaatgctaattataaaagtacctgctagaactaagtgcagtcacggaatggtatttttgtttcatcatgcattttcaaaagcccaatttataagttggagttttgtttaaaaaaatttgaaatctgacatctttgatttttccctcacgaggggaaaatttataaaggtataaatttgtgtgggacaaaatagaaccattaacattttaccagcttgcatttttaatccctccttcgtgttagaaaactgtggtatacaacgctagtgtttcaagtcatgttgctactaataggtctttgtgatgcagagcattcacttagctgctgcttaatctgatattacataccaataagaaacattttatttattctgagattggaaaaactttccaaatagaacatgcttagccttgaaattgccatctttatggattactagatttgtcacttagagagatcttcgaaaaataaatctgatgaaattaataatgtcgagttattttagcaatatatttcagtcacttaaaaacacaagtttcctatttagcgtttgtttcccatttctccagaaactttacattttcctgtttcaagacatcttggttctgactcggcccgtcacacggaacgaacggcactcttaccaggtttaccggcagccaatcccagtccaagagctagtcctagaagacctgcaggatggagatgtgagaatgggaggctcctttcgaggagctttcagtaactcagagaaaggtaaaatcagncnttcaataatttaaagaaatagaagctcagaactgaagtgaatttagttttgcctttaagaattctagagatgaaatgctccattgtcctatacttgttacatccattganttgtcaggccttcccagctcgaacaccngcaggtgtatctaagaaataatgcataggcttaatgtattcacattgacataaataaattgccataaattgacagtcacgttaagattgtatgaccactttgtctagaataaacctttttttagcctgatttctttttttttccattttttttttcagctaaaaatatctttagaattcgcttccatgacccctctccagcccagtctcacactctgcaagccaatgacgtgttccacaagcagcagtggttcaactgtattcgagcggccattgcccccttccagtcggcaggcagtccacctgagctgcagggcctgccggagctgcacgaagagtgtgaggggaaccacccctctgcgaggaaactcacagcccagaggagggcatccacagtttccagtgttactcaggtagaagttgatgaaaacgcttacagatgtggctctggcatgcagatggcagaggacagcaagagcttaaagacacaccagacacagcccggcatccgaagagcgagggacaaagccctttctggtggcaaacggaaagagactttggtgtagagaaggctctgtgtgttaactgatgggagagactgtttgtttataaatgtgtacagttttgttttctcgtaaggggagcatcatagggttactttataccagttgtaacattttcattgtttttggttgttcttttttctttttttaatggcagctaaagatatacagattactgttaaattgcagtccttttttttttaaagatattttcttgagttatttagaacatggtaagcctggtattttttaatcaaacaaaatatttatgaaatgggttttctcttaattctggattcatcatggctttctaataccaattgtaatatttacaatattcaccaaaacttagaattttgcaaatgctggaattctgccagtgtttctttgctaagccttgcatgcaaaatttgaaattttaacattggcacccaaaacctacatggaatgtatgtctggagtatttcaaactttacattgaaacataatttccttggaaaacaaaccataagcctgaggaggtttttatcaactggaatgctttatattagtttgtttttcactgtacattcctcattttacattcatttaacctgccgattatttaatttttttattgtaaagtagtttttagcatttgcttttatttttttactttgatgccttttcaaattggcatgtctttaaagtatttttcttcctgattaaaaatgtgtgtgtatgtgtgtgtgtgtgtgtatatatatatatttttttaaatcacattaattttaccaagtgaaaccaagccatactgtttttgagccaattaagaaaattgccatttttaaagtgtagcatttcagggtaaagacccatgaaatggcttgatgtattctagactactgaaagaaaaccacttcaaagattttgttgaaagttttagtgttgtctgaaatgcaagagggaaggtgattggtagtgagttaaaagaaaaagagaggaaaagagagtagttttgtcttcaagtaaaatgtctggttgtgccagacatttcacaagtgtgaaaggagataggagaagctcaacttgagggcgtgtagtaagttgtagaaggctcgaggggacgtggacttatttgccttggtttgcaatacctgcaaataatgagtttgaaaagaaacaatgaaatgtgttaaaaatttgaccatattagataaattttggtggatttagtcataagatggaaaaagactggtgaatcttttattacaaaatgtttctgttaaaatgggatcatcatctttgaaaggggggaggaggagtaaaagcccgattataatggtgatcaattcaagtcagtgttgactattctgtgaaatatatttggccagtggaaatgataatcagaaaagactgtaaatagatccatccaaatgatttctctgtacaaatgaatgatactatta

SEQ ID NO: 717300 - DNA, 1934 bp, Homo sapiens
  misc_feature (8)..(8): n is a, c, g, or t
  misc_feature (1395)..(1395): n is a, c, g, or t
  misc_feature (1397)..(1397): n is a, c, g, or t
  misc_feature (1507)..(1507): n is a, c, g, or t
  misc_feature (1535)..(1535): n is a, c, g, or t
agcggagnagcctctgctccaccgcggcgagaggcatgggcacgtggctgccgagggtggccgagctctgggaagaaaagcccgtgtgcctctgcatagcgtcgctacagcgctgactcggtgtggattgattggaaaggtttgagggagtacttgggaagcatggtggcacatgatgagactggaggtctcctacctattaaaaggaccatacgagtcctagatgtcaataaccagtccttcagagaacaagaggagccaagcaataaaagagttcgacctctggctcgtgtcacgtccttggcaaatttaatctctcctgtaagaaatggagctgtcagacgttttggtcaaacaatacagtcatttacccttcgtggtgaccacagatccccagcctctgcccagaagttttctagcaggtcaacagtcccaacacccgccaagagaaggagcagtgcactgtggtcagagatgctggacatcaccatgaaggagtctctcaccaccagggagatcagacggcaggaggcaatatatgaaatgtcccgaggtgaacaggatttaattgaggatctcaaacttgcaagaaaggcctaccatgaccccatgttaaagttgtccatcatgtcagaagaggaactcacacatatatttggtgatctggactcttacatacctctgcatgaagatttgttgacaagaataggagaagcaaccaagcctgatggaacagtggagcagattggtcacattctcgtgagctggttaccgcgcttgaatgcctacagaggttactgtagtaaccagctggcagccaaagctcttcttgatcaaaagaaacaggatccaagagtccaagacttcctccagcgatgtctcgagtctcccttcagtcgaaaactagatctttggagtttcctagatatccctcgaagtcgcctagtcaaataccctttactgttaaaagaaattcttaaacacactccaaaagagcaccctgatgttcagcttctggaggatgctatattgataatacagggagtcctctctgatatcaacttgaagaaaggtgaatccgagtgccagtattacatcgacaagctggagtacctggatgaaaagcagagggaccccagaatcgaagcgagcaaagtgctgctgtgccatggggagctgcggagcaagagtggacataaactttacattttcctgtttcaagacatcttggttctgactcggcccgtcacacggaacgaacggcactcttaccaggtttaccggcagccaatcccagtccaagagctagtcctagaagacctgcaggatggagatgtgagaatgggaggctcctttcgaggagctttcagtaactcagagaaaggtaaaatcagncnttcaataatttaaagaaatagaagctcagaactgaagtgaatttagttttgcctttaagaattctagagatgaaatgctccattgtcctatacttgttacatccattganttgtcaggccttcccagctcgaacaccngcaggtgtatgcttacagcatgcatatttgaggttctaatgacagccaggaccctctccccaggaaaaatgtatgtacatccacatccacatgactttggaacttcagggatattcccagacaccctgtggatgccaattgagatcctcttgtctgtcctgacaggactccagggaacctgtcattccttctgttcccttcagcttcttcaaagatgatgccaagttcaaggtcatgacaactccccgtggacggagcctctgcttctttcccacgtgggtccacgtgaggctctgccccaccaatgcccggtgccttctagaactcagtagctcagctgtccactgccactcatgaagctgatctgagcccctcagtgggaagggcagagtcagtctc

SEQ ID NO: 717301 - DNA, 312 bp, Homo sapiens
atcccccaggttcacacttgctgcatgtgcacggacaccaccctgctcacgctgagagactgagtggtagactcctggggaagttacagagggtggccctcaggagcatggaacacaacctctacaattggacccctgttccccacagggtcccggaagctggactatgtgaggccagacatggcatgagcactgcttcctgtgcagtgcctgtgaacagccactgagctcccgttcttttgtgcccaacaagagtgctcactactgcgtgccctgctactgagaacaagtttgctcctcgctgcgccccgc

SEQ ID NO: 717302 - DNA, 463 bp, Homo sapiens
cagactagggggccgttccttgtagagtcaagtacctctgtcccaagaggaacccaaccgttgggttgtggaggggaagggagccacaccttacaacttttgccccgtaatgaagggggtttttgtgaaaccgacccaaatcattgtggaaaccattatttaagttttttcgggtcgagggggccgggggcttttttgttgtttactaacattaaattttcataggaccaggtttacaaagctttatatttgcccaaggatttttttttttttgtaattgtcgcagaaaatgtaattgtgggtatgtgtgcgggcgtgtgtgtgtgtgtgtgtgtgaatcgggggggtgtgttttgttttaatttgggggattttttttacaaaaaaaaaacccccgggaaaatgtccgtggaaaggcaaagcttttattttgaattaaatgttttttatgggaatttggtta

SEQ ID NO: 717303 - DNA, 1129 bp, Homo sapiens
  misc_feature (8)..(8): n is a, c, g, or t
  misc_feature (1103)..(1103): n is a, c, g, or t
  misc_feature (1110)..(1110): n is a, c, g, or t
agcggagnagcctctgctccaccgcggcgagaggcatgggcacgtggctgccgagggtggccgagctctgggaagaaaagcccgtgtgcctctgcatagcgtcgctacagcgctgactcggtgtggattgattggaaaggtttgagggagtacttgggaagcatggtggcacatgatgagactggaggtctcctacctattaaaaggaccatacgagtcctagatgtcaataaccagtccttcagagaacaagaggagccaagcaataaaagagttcgacctctggctcgtgtcacgtccttggcaaatttaatctctcctgtaagaaatggagctgtcagacgttttggtcaaacaatacagtcatttacccttcgtggtgaccacagatccccagcctctgcccagaagttttctagcaggtcaacagtcccaacacccgccaagagaaggagcagtgcactgtggtcagagatgctggacatcaccatgaaggagtctctcaccaccagggagatcagacggcaggaggcaatatatgaaatgtcccgaggtgaacaggatttaattgaggatctcaaacttgcaagaaaggcctaccatgaccccatgttaaagttgtccatcatgtcagaagaggaactcacacatatatttggtgatctggactcttacatacctctgcatgaagatttgttgacaagaataggagaagcaaccaagcctgatggaacagtggagcagattggtcacattctcgtgagctggttaccgcgcttgaatgcctacagaggttactgtagtaaccagctggcagccaaagctcttcttgatcaaaagaaacaggatccaagagtccaagacttcctccagcgatgtctcgagtctcccttcagtcgaaaactagatctttggagtttcctagatatccctcgaagtcgcctagtcaaataccctttactgttaaaagaaattcttaaacacactccaaaagagcaccctgatgttcagcttctggaggatgctatattgataatacagggagtcctctctgatatcaacttgaagaaaggtgaatccgagtgccagtatcacatcaacangcagaanaataacaatcccaagagcc

SEQ ID NO: 717304 - DNA, 1520 bp, Homo sapiens
  misc_feature (988)..(988): n is a, c, g, or t
gcggtggcggctgcagtccgctgagaggcgctttctgcctggcagaggctggcgggcatcgtgcccgtccctgccggtctcccgggcacccggccaccgccccaccccctcctccgtgccatggagcccgagctggcggctcagaagcagcctcgaccgcggaggcgaagccgccgggcctctgggctcagcacggagggagcgacggggccttcggccgacacctccgggtcggagctggacgggagatgttcccttcggagaggcagctccttcacattcttaacacctggccccaactgggacttcactttgaaaagaaaacgcagagagaaagatgatgatgttgtaagccttagcagccttgatctgaaggagccaagcaataaaagagttcgacctctggctcgtgtcacgtccttggcaaatttaatctctcctgtaagaaatggagctgtcagacgttttggtcaaacaatacagtcatttacccttcgtggtgaccacagatccccagcctctgcccagaagttttctagcaggtcaacagtcccaacacccgccaagagaaggagcagtgcactgtggtcagagatgctggacatcaccatgaaggagtctctcaccaccagggagatcagacggcaggaggcaatatatgaaatgtcccgaggtgaacaggatttaattgaggatctcaaacttgcaagaaaggtcagtaaataactttttatcagatgccctagtttttaaaaattacatttcacaaaatctaaaggatagttttcttaacctttagaagtagaagaatagaaaatatctactggtgaatacattttttttaggtgaggtctagacacatcctcaaatacaagtattagtaagagagtttatttggggattaatacatactaatttattttatgtgtagcaaacagaatccacgctagcttttatgtaattaattctctttgattccaagtatagntccctcatgttttcctcacatgatctctctgtgacacatttctcccctctgacaggcctaccatgaccccatgttaaagttgtccatcatgtcagaagaggaactcacacatatatttggtgatctggactcttacatacctctgcatgaaggttagatgtgccacttaattgtcattaaatctaaagagccagcggtgcatgtaattttcagtctaaacttctaatgtagtgctgacctattttttaaataaacctgttaatggtgtttatgcttttttatcacttcagatttgttgacaagaataggagaagcaaccaagcctgatggaacagtggagcagattggtcacattctcgtgagctgggtatgtagtgagttgttgaccccagatacagtttcttacagatgtgccatgttgcagtttctgatgaatatgagacagatttgatcccacaactctgttctacaaacacataaggcgttaaaactgaacaaatttacagtgacataagaagttacagtctgttta

SEQ ID NO: 717305 - DNA, 1695 bp, Homo sapiens
  misc_feature (85)..(85): n is a, c, g, or t
  misc_feature (1177)..(1177): n is a, c, g, or t
  misc_feature (1441)..(1441): n is a, c, g, or t
gatccaggggaccgggtggaggaggtggacgctctcgcgaggtgggagaagagtggagcgagtcagtcgatcagacgatggtggnactagggcctagctggcatcatgtgtcagggacgctcttcactgcgtccacatgacgcgtggcgtcgtactgacccaggggaatcgaaggctagggcttgggcgcacgcggactggtgcattcctcattacctctagggaggccgggacgcactggctgttgactgtgagcggttccatcggcaggcacctcgggctaggtcaccaacaggacttacgaaaggcatcctcacttcggtgcgcggaggcaactcgctgtcatggcgcttgtacggaaacgcatggatacgtgtggccaaattcatacaatagcatgtcgcgcgccatgtcacacggtacgctcgctccttcagttcggcatcgtccggttggaccgcgctggacatactatgcacatggttcccacctcgacatccgtcgcgtagtccattccagtaacacatgggaaggtgatcgcgaaaccaatccatgagtcacaccccgcctgcacaaggcaaggcgtatagggaaacgctaggaagacgttattccaacccctccacggccggtaaacttggttctatagccacatgttcgcatatgccgtgcgcagaatcggaatcttacttgtgttgcccacttgcgccccttgtccgtgcgcgcggtacttttccatgcgaatctgcaagctctctaaccgagccgtcatggccccaggagcagtagggaagcctgggcgtgtcattccgagctgagcgctgccctgtagcgtgcgctctgagtgacacaggggcctgacgtgggtcacagacgcacgcacaagtggctggtgcctatttaccgattcggagaacgcgtcacattcaccctttgttaatcgggactgcaaagggaatcggggccagaaaggggcagggaatcttttcggggggcttaaacccagtgcggggccatcgaaggcgggtcacttacattctggctcagagcgcattaccgagaacccctaggggtaatcgccgtaggggaacccttatggcgcttcccactttctgggaaacccttttggcgaaacctgtcccccatggggcgccccaaaggcgtaggtatggcctgngagaggttaggggggctggggcgtatactcagagctcatggaatctttgacccgtgggcacctgggcggctttgactgtggtcccgggagctgtgtttgcctacggccccttgggctttgtggaagtacccgcgaggggcgcactcggaagaccggttcaaccgcagtaaagaggcaggggcctcaccggaggaggactatccccagacaatataccctttctatgcccgatggcactcccgcaggccaaagacgagggcgggnaatttaagggggaagcccgggggacgcgagcacgccaccagagcgcggcagcggggccccccacgccggccaggggccgcattccgccgaccgcacctccagcgacggcaagcgcacagggcgggagctcacgcagcccgaaaaaacggcaggcaacgcgccgagaccaccgcgcacacgagcgaccaccacagcccgccataggcacaccacaccacagcaccaacgcaccaccaccaccacccacacaggca

SEQ ID NO: 717306 - DNA, 135 bp, Homo sapiens
  misc_feature (39)..(39): n is a, c, g, or t
gagcggcctcccagagtgctgggttgggattacggcgtngccgcgtcgctaggacccagtttggctgctggttccagcaggggactcggggatatcgtgtgcacaatgagttgtctcaaattttgcgtgtctgca

SEQ ID NO: 717307 - DNA, 546 bp, Homo sapiens
  misc_feature (104)..(104): n is a, c, g, or t
acaaagtgtcaaccagtgttttcctatgggaatacagagcaaaacaaagatgagaatacttcacagtccacatttagtctttagtatagacaaacccatctgangaaggaatctgaacagccagcaaaagccactatatgcctttggagctcaaactagtactacagctgatccaggtgccgcaaagccagtttatagtttcttgaacaacagttcctctagttcacgtacaccagccactatctgctggtggtggcatatattggtagttccacctcttcctccaatccaactgtggctaccttagtgtaaggacagtccagcaatcctagtgagcagctctagcctttggtaacaactgttgaatccagcacctactcagtctttgctattttctcaagatagcaaactagcaaccacatccagcacaggtacagctgtcaccccatttgtctttggtccaggagccagcagtaataataataaccaactactggtatcggctttggagccacaaacacattagctctgcggatcctccttgta

SEQ ID NO: 717308 - DNA, 345 bp, Homo sapiens
attagggtgtgcaggaaatctgcaaattaccttcaagagtctctcaacagcgctaggcacagtctctcatgcctgtaatcccagcactttgggagccaaggcaggtggatctcttgagccgaggagttcgagaccaccttgggcaacacggcaacacaccgtctccacaaaaaacacaaaaattagccgggagtggtgcccatgcctctagtcccagctactcaggaggctgaggcaggaggattgcttgagcctgcgaggtcgagactgcagttgcagtgagccgtaatcacaccactggactccagcctggatgacagagcaagaccctgtctcaaaaaaaaa

SEQ ID NO: 717309 - DNA, 222 bp, Homo sapiens
cccccccccccaaaaccttcttaggaactctcttttgtcacacagcgaaacctggaagtctaacagaggatgtcattattcaacagatgttggcttagtttaatctctctaaagagttgtttaatagagaaaatgtacacagactgatttggagaaacaattctctgaaaatactgtaaataggttgggggatttgttaaatgtgaaataggatggtgtttt

SEQ ID NO: 717310 - DNA, 93 bp, Homo sapiens
gaaagacaaaaggaaatagaagaaagggaaaaaaggcgtaaagacagacatgaagcaagtgggtttgcaaggagaccagatccagattctgat

SEQ ID NO: 717311 - DNA, 1174 bp, Homo sapiens
  misc_feature (1155)..(1155): n is a, c, g, or t
  misc_feature (1166)..(1166): n is a, c, g, or t
ctcagcatcagaagaagttgaattcagcaggagacgggagcccggtgtccatgagggaagaggggtcgcgcttggtttctactgacccccatgaagatttcagacttgcagtgcggccacctggccctgccctgcctctctctttctcatacagctttaaaactttactacttttatttaaaaatgaactggatgggagagaagtagcgtcccctaccctacaagtcacacattccggggaggggggtggggggtggaggcaggaagtcatgggggtgggggtgggagcacgggaacagctttcttaaggcctcagggtcctgttttccctggcctcttctagagggcccgtggacaggtcgcagtgcgtgcttatttggaaaccaggtgtgtgagccgaatgcctgccaggccatgcactcagcagaggagcccttgtacctggctgccctgagaggagcaagaggccacctcccatgtggctctagacaccacgtgggctcattagccccagcgtctgtgccggctccaggtgcctgcctctgggtgtgtgagtgggagactttgctccctggcctcatcctagagaggcccctggtgcctagtgctgaggcctctggggctggaaagcctcagcagaaaggaggcactactgagcaactatgcattgtcattgtcgggtttggggctttcggtggttccttggtgactgggaattgcttgtgtgcatgtgttgggtgcatgcttccgggtctcagctgccccaggcccgcacaggcaaccccttcccatccaaagccattggtggagcttctctggaatcatttgccaaaagcccaaggcagaatccaagggtccaagaccatttccatggagctcatgtttttcttttctgtaggaacttttttttaaccagcacccaccataattccgaaggccacgtttcatctttcctggatcactacagtgaagtattacagttgtacagttcccagtctggccttggttgctcggataaaactttgtatgtattttgtatggcatagatctatattgtatgatgtcctatgccaaaagaaaaattatacgaaattgtaaattttattgttttaacgtgtatgcatgtttagtgacgtttacattttgaaataaatntgatcctttanaaaaaaaa

SEQ ID NO: 717312 - DNA, 424 bp, Homo sapiens
gccatcccgctgccagctgcgttgtcagtgtggcattgctgcctgggattaaccttctggcggtagtcaggcacgtgctgcagcgggacctgcggtccgtacgtgcgctcggtcccatggtgccggcaccccctaccaggtggagctcccatcagcagcttcactggcggacgccaagatcatggcttgcagcatctctgtgtcaaactggttgttgggccaggtgccggtgtcatcgccattttgggagccgctggtgccgggtctctgggcctgagagaaacgccagtccgtgttgggcggggcttgctgaagtaggttggaatctcctttcatttcaagtaaatcctgagttatcagaagaggctcgcttttctcacagctctcctggctgatgagcgtgtccgcatagttcggctgaggc

SEQ ID NO: 717313 - DNA, 168 bp, Homo sapiens
tttgggcacagaaattaaagctcctgattatgtattctttcagtgttttcagtgtatctatagtagaatctgtaatctcatttgtgacagtgttcacagtttaaatttgaggcccaaggttaatgggttctctcccacaccctgtggctttggtgtgtggttgttggg

SEQ ID NO: 717314 - DNA, 599 bp, Homo sapiens
  misc_feature (115)..(115): n is a, c, g, or t
  misc_feature (144)..(144): n is a, c, g, or t
  misc_feature (247)..(247): n is a, c, g, or t
  misc_feature (599)..(599): n is a, c, g, or t
agagaagatagaaaactaaacaaaatcagaaaaatgatgcatgaacaaattgagagtatcattaaatagattttttaaaaacctagtaaacagaacaaacaaattctggaactgncaaataaaataactgaattgaaaaattcnctagaacagatgaaagtagacttgatcaagcagaagaaggaatcaatgacttcaaagacattgaaatttcaaaggtcacatgaaattatcaagagaataacancaacaaaagaacaaagaaaagtgttgaaagcctaaggaacttataagacaccatcaagcagagcaatatatacattataaaagtttcagaagaagagagagactggggcagagagcttatctgaagaaataattcccaaatctgagaacgaaacttgttgtccaaattcaaaaagctcaaggaactatacatgttgatgaatgtacaaaaggcccacactaagacacattataaagtcaaaagacaaagacaaaaagagagtcttaaaagcagcaagagaaacagtaactcatcacatacaggggaacttccataagattataaagtggatctctcagcaggaacacctgcn

SEQ ID NO: 717315 - DNA, 1068 bp, Homo sapiens
  misc_feature (1049)..(1049): n is a, c, g, or t
  misc_feature (1060)..(1060): n is a, c, g, or t
ccattttcttcaaacatgcaaatgttttcccagactgcgtctattatcatgtcttccattttatagtggtatataggccatgcttgccagtaatagataggaggttgaggaacccataggactcatagaaataaatagtgaaaactacaaacccttattttgggacttcagttctcgtggtccataggaacagctttcttaaggcctcagggtcctgttttccctggcctcttctagagggcccgtggacaggtcgcagtgcgtgcttatttggaaaccaggtgtgtgagccgaatgcctgccaggccatgcactcagcagaggagcccttgtacctggctgccctgagaggagcaagaggccacctcccatgtggctctagacaccacgtgggctcattagccccagcgtctgtgccggctccaggtgcctgcctctgggtgtgtgagtgggagactttgctccctggcctcatcctagagaggcccctggtgcctagtgctgaggcctctggggctggaaagcctcagcagaaaggaggcactactgagcaactatgcattgtcattgtcgggtttggggctttcggtggttccttggtgactgggaattgcttgtgtgcatgtgttgggtgcatgcttccgggtctcagctgccccaggcccgcacaggcaaccccttcccatccaaagccattggtggagcttctctggaatcatttgccaaaagcccaaggcagaatccaagggtccaagaccatttccatggagctcatgtttttcttttctgtaggaacttttttttaaccagcacccaccataattccgaaggccacgtttcatctttcctggatcactacagtgaagtattacagttgtacagttcccagtctggccttggttgctcggataaaactttgtatgtattttgtatggcatagatctatattgtatgatgtcctatgccaaaagaaaaattatacgaaattgtaaattttattgttttaacgtgtatgcatgtttagtgacgtttacattttgaaataaatntgatcctttanaaaaaaaa

SEQ ID NO: 717316 - DNA, 203 bp, Homo sapiens
aagaaagtgagcgcatgagtagcatagcatttagccaaaagggccccagatactaaataaagcaaactaagaagcacaatacaaaagcattgtggctaaagtactaacgcacctactctatggtacagataacaaaagacctccctgattggatctatatatgaaataaaaccagtagcaagttgatccagagctctgtagcc

SEQ ID NO: 717317 - DNA, 129 bp, Homo sapiens
tagaggacccctcagctgccccaagcttgtgtagagcttaaccaacgataacggcggcgacgcgcgaacacctcgcgagctcgcagtgcgcgggtgccacggccctgggccttggacgactggcaccaa

SEQ ID NO: 717318 - DNA, 124 bp, Homo sapiens
  misc_feature (9)..(9): n is a, c, g, or t
  misc_feature (100)..(100): n is a, c, g, or t
  misc_feature (104)..(104): n is a, c, g, or t
  misc_feature (106)..(109): n is a, c, g, or t
  misc_feature (111)..(111): n is a, c, g, or t
tcagctaantcgattgctaagacaaaatcaagatagttacctggcagatgattcagacaggagtcacagaaataatgaaatggcacttctagaatcaaanaatntnnnnangtccccaaaaaaa

SEQ ID NO: 717319 - DNA, 344 bp, Homo sapiens
cataccgagtggtcctgtggggcatggtttacaacctgctgtgtgagtacaacatggagctcatgtggaatcattgccttcccacagtttagcccaacttaatttctttattatttagtgaccttaaagactgtcagcaacctttatttctagcccatcattctactgaaatctaattcctcctttaataaattctttcttcctgtttcctcctctgaaagattttccttctatctaatgtaaatctcctcctagaatttaataaccactcccttgatcaatattgcaatgagaatcaatttgacctgttgtttaattttgtggctgtgtggttttcctttgct

SEQ ID NO: 717320 - DNA, 277 bp, Homo sapiens
  misc_feature (205)..(205): n is a, c, g, or t
  misc_feature (235)..(235): n is a, c, g, or t
  misc_feature (255)..(255): n is a, c, g, or t
  misc_feature (265)..(265): n is a, c, g, or t
tgactctagttggtcaccagagccggtccatttcacctgccagaggccctctggttcactgtccaggttaactaaggactgtggctacatccatctacccatgcccaccctcagtctgctctgggccagccactgtgtgatacctgagggatgattctaaaaattcacattctctctctgtccaaacggacacttctaacccttncatgggcatcctgttgctcttaatattaangtttgaactgccgtggcttnccctgggcancccattggaaca

SEQ ID NO: 717321 - DNA, 310 bp, Homo sapiens
ctagcagagcacagctcagcagacacagagaggtttgcagtatgtagatcagggataagccaggtggaaagggttggtgccagccctcagtccagtgagctctctgcactcccttgcagcatccggtacagattgggcggatgtgggaaggttggcacagtccagagccaggagcccatgtaacaacttggaaggtgactcaggtgaggctgtcaatgagggaatcccgcatgctggtggcaatggtgctaggctgggcttcattcagcttgaagacactctccaccactgaccactaggtagcagtacc

SEQ ID NO: 717322 - DNA, 850 bp, Homo sapiens
  misc_feature (548)..(548): n is a, c, g, or t
tgggctctaaagggggtaaagggggtgctatagggtaaatacgggccctatttcaaaaattttataggggaattaattctaggacagatgggcttgaaactggtgggtttggctcccacagatatttccagagctattggcaccgtaagttatcacccccgggtcgttgtacgcggtgaaatgtggtgtttggtgtttaacactgctccgggcatattgcgctatctggttttaaaacgcctatatgggggggcacagctctatggatgtggcaagaagcgttcttggtgtgatgtgtatacattatattataaataccgaaatgtgggggccttctcacatctcgggagagtataacatactctcgaatgtgtgctcacacgcgtcttcaagggagtctcgcacaggtctcgcccgtgggtctcataggaaatataatgtggggggaacagttagtgttagggcagtgtttgagacaaactatcttatgttcccccgccgcgtaatgatcagccggtgtgtcaacctccgctaagtgttcacctgtnacccctactgtgggtgtgggtgccccacattgtgtgtattttgtagtatgcgtgtccaaagcgcgcggaggtgggactccccgttttgcgcacctcctcccggtctctgttgtgtctaatgttgttcgaccaagggaggatggcgcggtacacgagaggattggggggaaatggggcgccagaatagggaggggcccttcacgggcatgggcatggcggcggggggcccacagggtatttatggttcccaaggaacggggtgttcactaaatttacacccttgagagagccggttcttggga

SEQ ID NO: 717323 - DNA, 198 bp, Homo sapiens
tgtacgaaccgagctcggtacccccttctacgtctcatcactgaagtgccaatccatgtgggagatttctctcgcaaaggttttcagagccttgaggccaacctacaccttgccactccattcaaaccttcagcttccaacccatcacatcatgacagccttcttccttgtgtggcaacagtgatgagacgtagaagg

SEQ ID NO: 717324 - DNA, 370 bp, Homo sapiens
aagaagtatagtcggagaggcgggctctacaggaagcagcaggcacgtgccaggtggaagccagctgcaggcgggggaggaaggaggccctatactacttacctatcttgtccatagggaccatctcactgcagcctgcagacttatgcgtagctccatccagcaagcggtacgtactccttggatgaggccctcagcactgcttccgcatggcacagaaactggttaacagctatactctagtatttaagcttacgtgctggccagacttacgtcctttagacttctgcaggtcagccttcaggctacctgttctcttcctccaacttacacctaagcattcccgacatccaacttgctaccggtcgaa

SEQ ID NO: 717325 - DNA, 157 bp, Homo sapiens
  misc_feature (43)..(44): n is a, c, g, or t
  misc_feature (52)..(52): n is a, c, g, or t
  misc_feature (54)..(54): n is a, c, g, or t
ccattgggttttgggtagattatttccttttaaaatgaactannttttaaanantgtttaaattaaggggtgcccactttaaaattttatttttatttaccacccatgaaataagctggatttaaaaagaacccaaattattttctagttaaaaaaa

SEQ ID NO: 717326 - DNA, 626 bp, Homo sapiens
tcgtgcgccatctgcagggtccaggtgatgcatgcctgtcttagatgtcaagctgaaacaaacaagaggactgtgtcgtggtctggggagaatgtaatcattccttccacaactgatgcatgtccctgtgggtgaaacaggacaatggctgccctctctgccagcaggactgggtggtccaaagaatcggcaaatgagagtggttagaaggcttcttagcgcagttgttcagagccctggtggatcttgtaatccagtgcccggcaaaggctagaacaatacaggggatccattcttcagatagcagccgatggttctgtggtcctttggcgactcatgaaagccttggtttagcgccccgtcagttttatcttcagaaattgtctgcgattaacaccatcatttattcaaggtggtccttcgcccctctgtggggtcgtgtagcgcacacagcttagaagtgctataccaaaggaaagcagttgccagttggtccacccttataatttacccattttttgcctccgccagcgcaagcggtttcatagaactttttgcatgtttatggttgttcagttaagttagaatgtcccagtaacaaataaagtgcagtttaaaacccaaaa

SEQ ID NO: 717327 - DNA, 350 bp, Homo sapiens
  misc_feature (336)..(336): n is a, c, g, or t
  misc_feature (340)..(340): n is a, c, g, or t
caaaggccctcgagatcatgaacctcccccaattgctccctgtagataatattattattgtaaaacctaacatgggtgtttgaggtatttttcagaccctgccttctgatggatcagctggcaccacccagacccagtaaactggctcatctggtcttctggcccccacccaggaaccaactcagtgcaagaggatagcttcaactccttatgatttcatccccgacccaaccaatcagcattcccgcttcccgagccccctgcccgccaaactacctttaaaaaaccctagcctccaaattttcagggaggctgatttgagtaataataaaaccnacanactcctgttt

SEQ ID NO: 717328 - DNA, 248 bp, Homo sapiens
atcggtcactggtctacattatatgtcttggcatgactccaggctgctctagtttgtggctccagcacagtatgagttaagtgagttcggttagagtgtggggacaaggacacagggaggaggggtccctataggcttgggtgcccattacatatgactcaaattacgtcaattgcgctgcttaggtgttgccctagccggatctagacgcagaggtcttagtatttagtctcgtgcccagctcgcaa

SEQ ID NO: 717329 - DNA, 214 bp, Homo sapiens
  misc_feature (40)..(40): n is a, c, g, or t
  misc_feature (143)..(143): n is a, c, g, or t
tccggagtttcgcaaacacaacatcggacgcatgcttctnggccgctcccgggaagtgcttgaacaatggtcgcgcgatcacccggacgaggccgtcatgggggttgctggagtaatccagaatcctgcgctggtcgcaaagnagcggcctccgacctcgccggtgggcgcctttacgctggtgggatacacgcaagagggcgaacagatccgc

SEQ ID NO: 717330 - DNA, 298 bp, Homo sapiens
gaggagtggctggatgacaaatcgtcagaaaaggtcacgcgagaaggaagccaggtttatgcccacgattctccagatgtgtctccagaaaactggctgaagacctatggcttgctcgccacgaaactcaccctcatggacgccttgtcactggcagcagtcccgcacagctccacctatgttcccgtcctggacaagcatgtcatgtctacgctctttgatgaggcaaactgattgtctatacgtccctacttgaggccattttcattttctgctcaaatacaaagtagtccaattt

SEQ ID NO: 717331 - DNA, 558 bp, Homo sapiens
  misc_feature (316)..(316): n is a, c, g, or t
  misc_feature (331)..(331): n is a, c, g, or t
  misc_feature (367)..(367): n is a, c, g, or t
  misc_feature (394)..(394): n is a, c, g, or t
  misc_feature (425)..(425): n is a, c, g, or t
  misc_feature (428)..(428): n is a, c, g, or t
  misc_feature (439)..(439): n is a, c, g, or t
  misc_feature (501)..(501): n is a, c, g, or t
  misc_feature (503)..(503): n is a, c, g, or t
ctcagtatactctaggttaggcagcctccatcagcagtggactgggaagtggatactactgtgtgccactgacccatgaacattttcttcagttgcctccagtttgggattggtcatcaagtactggatggactctcttcactttaacagaatcaaagctcacggtggtatttgcttgatcaaacattggtcaaaatgtccctctttacctgttttttttttaattaggtaaaagcctaatgcagtttatatttctaaatctcttctgtctatatgtggatttctaccaaatctgcaaccatcaaacagtaagacntttaccagatgtccnattagcagtgtttagatgtggcatttaagtcagaanaaagatatgatataattcctgaccatnaaaattgattgtctattttgaggggtggtgntgnagatttacgcnaatattaacacacatttatctaatgcctacaatctgcacactgatcacacagcccttgaganantacaatattcaaacaggcatacaagtacttaatgtttgtactactgaggtgtaag

SEQ ID NO: 717332 - DNA, 301 bp, Homo sapiens
atatagccaaaatgtcaaacaaaactatatatggggccgggcgtggtggctcacgcctgtaatcccagtaccttgggaggccaaggcgggcagatcacctgaggtcaggagttggagaccggcctggccaacacggcgaaaccctgtctctactaaaaatacaaaaaaatttgcagggtgtggtggtgcatgcctgtaatcccagccactcaggaggctgaaaccggagaatcgcttgaacctatgaggcggacgttgcagtgggccgagatcaggccagtgcactccatcctgagtaaca

SEQ ID NO: 717333 - DNA, 274 bp, Homo sapiens
tctggcacacgtgtcgccagccaacaggatgtggacgcctggcgccggctgcgagcgcttcccggcgcaagcactgccgaacctggcgattgaagccaatgccaaccaagccgctggaagcgctgtcgaatatcctcggtgactttcccggccgcgtgctgtttaccgccgagtccgccgggcgccgcgaggtgctgctggagttgctggaacgcctgaagctacgggcgaaaaccgtcgagagctggccggactttgtcgcgagcaaggatcg

SEQ ID NO: 717334 - DNA, 418 bp, Homo sapiens
  misc_feature (299)..(299): n is a, c, g, or t
  misc_feature (308)..(308): n is a, c, g, or t
  misc_feature (310)..(310): n is a, c, g, or t
  misc_feature (313)..(313): n is a, c, g, or t
  misc_feature (315)..(315): n is a, c, g, or t
  misc_feature (320)..(320): n is a, c, g, or t
  misc_feature (328)..(328): n is a, c, g, or t
  misc_feature (335)..(335): n is a, c, g, or t
  misc_feature (338)..(338): n is a, c, g, or t
  misc_feature (347)..(347): n is a, c, g, or t
aaaggatggaagccaatcctgataattttggcttattatccaaaatcctttattttttattgcagagacccagcagatgtaactctcattggagccatcccaaagaaaacccttctttgccctttgcagggccccttatttagggaactgaagtggatttccaggaccatttgattttgaactaagatttgatatagagttggaattgcttacataactctttgaaaatggatcatccctgggttctcaggtgaaggaggccattccaaagtaaaaaagaatattcgaataccataaanaccctctgntntcncnccaangctgtttnttagctnacntgcttgacnacccactgatggaacttctttattaatgtgaaatatttatattttgaaataaaattactagtggtgaatga

SEQ ID NO: 717335 - DNA, 344 bp, Homo sapiens
ttttataaaaaaaggaaaaaaaccctttaaaactaaaaaatatttttgggtgttttccccacccaactggcttttaaataaatttgcccccctattggttgaataagcccaaacccatttaactgagtgggaagtgaataaaaaaaggctttagggatcgattccctatttttccaaccccaatatgttaatgctaaggaaagtaacccaaaaggaggttcccctccttgtaatttaaaattgttattaaaaccttaatggatcccattctttaccctttggggttaaaataaaattacttggccatgcttgcccttttaaataaccctttttttattgtttta

SEQ ID NO: 717336 - DNA, 118 bp, Homo sapiens
actgtcagttcagtgttttagctgacgcggttatgcggaaaagactgttttcactgttacttatactaccattagttcttctatagggtgatagattggaccacatttgggtgtgagg

SEQ ID NO: 717337 - DNA, 258 bp, Homo sapiens
tgagacagtgtcgctctcattctgtcacccattctgtaatacagtggcatgatcatagctcactgcagccagaactcctgagctcaagcaatcctcctgcctcagtctccagaatagctgggaccacaggtgttccccacacccagctttttttgagacggagtctcgcgctgtcacccaggctggagtacagtggcacgatctcggctcactgcaacctccacctcctgggttcaggcaattctcatgccgtcgacg

SEQ ID NO: 717338 - DNA, 475 bp, Homo sapiens
agggatgggtgcatgatcccaagatggccagtataaataagatccaggaatttattttaactcttacttaaaagacaattggctggatttgctgagggaagatttaaacatctttgtggacatgtttgccaccacatggggagagcattcctgaacatgcagcaatagagaacaaagacgagagataaagagatgataagagaaggaccaagttctagcaacagtgcgtgaggcctgaatccagccatgccggaagcatgtgaagcagtaacttcgttcttattaagacaactgcagctggattttctgtcatttgcagtttcaaatgttgactaacacagatatgaagtatcttttcacagtaatatatttctctctatcataatattcttattttctactagtataaaactaatgaatgctcaatgcagaaaatccagaaaacaaacaaacaaaaataaataaagcaaaattc

SEQ ID NO: 717339 - DNA, 555 bp, Homo sapiens
  misc_feature (3)..(3): n is a, c, g, or t
  misc_feature (5)..(5): n is a, c, g, or t
  misc_feature (32)..(32): n is a, c, g, or t
  misc_feature (36)..(36): n is a, c, g, or t
  misc_feature (158)..(158): n is a, c, g, or t
acnancaattaatcatcggtcatcttttcccnatcnccctttaaaagacctttagtttcttccttataagagcccaacatgcggaaccttgtttctacttaaaaccccaaaatttagctcggcgtggtgacttgagcctataatcccagctacttggnagactgaggcaggagaatggcttgaacccacgaggcggaggttacagtgagccaagaatgcgccactgcactccagcctgggcgacaaagactctgtctcaaaaaaaaaaaggaacttaactggccaggtgtggtggctccacttttggaggtctaggtgggcagatcgcttgagttcagtagtttgagaccagcctgggcgacatagcaagatgctgtctctataaaaaacacaaaaacaattatccaggaatggtggtgcacacctttagtcccagctactcggggctgaggcaggaggattgcttgagcccaggggccagaagttgtggtgagccaagattgcgccactgaactccatcctgggttggtggcagagcaagatgctgtctcattt

SEQ ID NO: 717340 - DNA, 204 bp, Homo sapiens
taaaaagttccttagagtcactataatctatccagaaataatttctatttctggaattttaaaaatctccaattctgaaaatttagatgagtaaatggttttctgggaaaataagatttatcaaaaggaatccccgggagacagaaaatccaggtagataaaataacaaatagcagcctgaggatcacttgagcccgggagcca

SEQ ID NO: 717341 - DNA, 602 bp, Homo sapiens
  misc_feature (600)..(600): n is a, c, g, or t
actcctgcggataatcacaaacctcatcttgagttgacctgacctccttctacactaaccattaataaactcatctctgaaatgaggctacccataatcagaccacagaatagcagtatgaaatataaaactttagatataaagacaaaaggtacaaagttttaaatattgagcccaccaaaatccataatccatgtaacccaggacaatccactaaacctaagtttctcataaacttaaacctcattttgctcatctgtaaagtggtgatgaatatcttcctgcagggttatagaaaaacgtaaatgagctaatacatgtaaagtatacagtgtctggctttacccaaatatcaattaaatagtaagttcagagttacagtctttcttgtagtttgaaaattcttaaaatttccgtaaggtgatttttgaataccctaacatcaattctaagttttccttcattaaaaaagaaaaattggcaaggctaaggcaggaggattgctttagcatcaggagttcaaaacctcaactctacaaaaattttatttaaaaattagccaggcactggtggcatatgcctgtgatcccagctacttgnaa

SEQ ID NO: 717342 - DNA, 288 bp, Homo sapiens
  misc_feature (18)..(18): n is a, c, g, or t
  misc_feature (51)..(52): n is a, c, g, or t
  misc_feature (54)..(54): n is a, c, g, or t
  misc_feature (59)..(60): n is a, c, g, or t
  misc_feature (72)..(73): n is a, c, g, or t
  misc_feature (92)..(92): n is a, c, g, or t
  misc_feature (125)..(126): n is a, c, g, or t
  misc_feature (175)..(175): n is a, c, g, or t
  misc_feature (205)..(205): n is a, c, g, or t
  misc_feature (211)..(211): n is a, c, g, or t
  misc_feature (287)..(287): n is a, c, g, or t
gatatatatatatctctnatttcttttttaaaattcattattttatatatnncnccctnncagtgtaaggtnntttaaagacataaactggnatgtattacaaagcaaaagaataaaaaatactnnaattataattcattgccttaaaatattcttgtttaatcacttggataangatgtaattgtgtaatttattacataaatnttttcngagatttcgagattccttgccctttcattttaccttttttatgtttatatgagaaatagcttagttataaacctcnc

SEQ ID NO: 717343 - DNA, 299 bp, Homo sapiens
  misc_feature (248)..(248): n is a, c, g, or t
  misc_feature (280)..(280): n is a, c, g, or t
aataaagtcatcactgcccccgctgtcagcctctaccctgctggcttctctttctcaaggatgtggcagtcagacctcctcctccctgtcccagtctccacagccacctcttcaacttcctgagctgaagtcctgacttgctgtcaggcatcacaccacccccacctcctgtagcccctgtctttgcccaccaggttctctacctgtgctcagcaccccacagggactttattcctgcagagacactntcctctgggctcagctgtttctttcttggcancagatcatccatcagtata

SEQ ID NO: 717344 - DNA, 519 bp, Homo sapiens
ctgccaaaaaaaaaaacagtaggaaacagaacaccaacaagatacagcatccctcagcagaggcccacactagcctcggtctccggcctttcctgggggaatggtgctgccagaatccacctggatgggggagtagctgggtttggagggcagaacaatagacgctggtcctctaagtggcttaggggatctagcatcccaggctcaggactcactaaatcagaaggaggtgtgctcagattcttagttttcatactggcatttatcttaaagggtcctggagacctcataaaggcaatggtggtctatcttaaccgagaggttggatggggatctggttatcacctccacttaaaggaagagcaaatagatttttagggcaggtttttcatggaaaatggtacctcggcctccggttcccaactctcctggcatcccacaaaaagagcacacagaagggcatttttccttggaattggtggacctggtcttccaattctgccttacagcaagggttca

SEQ ID NO: 717345 - DNA, 587 bp, Homo sapiens
  misc_feature (526)..(526): n is a, c, g, or t
ctagaggatccctggccaggcctctaccttggccaggctcttcgtctctcggtctttattggatccaccggccaccgttcttgaacttgtcacctcaaggcatatgactccggagtcatcagggccagtactaaatggtcttctaattgggtactccaaaacttctaactactggtgggatatcttcgccggaatatcctacccctcaaattatcaggtaccaatctaaattaaattcaatatctaaataatggactggaaattccgtaaacaattttggacaaatacaaaagttatggccatcacagcaagaaaagcttggctcttcctccggattcatacatcaaacatttacggagtctctacaaggggggagtgatgaagtcacaaagctgaaaaagataatcccggctctcacgaagctcagtttcaaggacaagggtgtaatcagaatacacagggctgggatatgagacctggcaagataacgtgagagcacataggaaggatacctaacccagacggngagcagggagggggtcagggtgcccgggaagacttctgggaagaagtgacacttaccttga

SEQ ID NO: 717346 - DNA, 1456 bp, Homo sapiens
  misc_feature (134)..(134): n is a, c, g, or t
  misc_feature (256)..(256): n is a, c, g, or t
  misc_feature (347)..(347): n is a, c, g, or t
gcgaatacgttcctattgtactccctggaatatgactcacttccccatacgtcaatcggacagcatcatgtaactacgtcaactgggagcataggcatcgaatgagcatgaattcgtacattacgtcgacatcntgcgacttgacgcgcatatgacaacctatcgggacctccatgaagctactcattcttcactgagtgagtagcatatacaaccaagtaggctctttcataaggtcccattatcacccctgctntttatcgaggaattcaccccattaatgtacatcgccagtaaagagcacacgtttgttccgcaaggcacacgcgcatcgcatggggctcaangctagatacgattgcacggagatgagtccttggagaacgtatggactggactatggagtatcttactgctctcattcatcgctgcatcaaaccccctgtacttaaagccacgattaggcgctaagccctccttgcactgtgtgtgaccttaattcccttagtgtacgagtcagtgagactcttatttgatcgatcgttcttcccactccttgtctcgtgacggcattgatgatctaggatctcatactaatgcagttccactttgccatttgatcctttcaggggcaaggcccgcattaagccccttcgtcaggtgcaatgtcccatatgtactgttattcccagaaattcactccccttgtgggagaggtatttcctccagaggtcggcccacgtgttagttccctcaacataggggtatggattcccaaggttaaagtaaaaacggtttcccttcaagttttacttactcttggtggaacctttatgttccccattaattttcccaaagttatattgtcacaactgctctttctaccatcaagggaaaagtcctttaagtgggaattcccggcgttccgaacaaggaggattcctatccaataagtttcctaaggtaccccgctgggttatttaaagccatatatactggatgtggagcgtaaacataaggacacattgggccttctcgacttgagggtccattctgggaatttatatcccccactctagattatttcccgtggcgctaagcggagggggagaaaacctttctctccttggttggatgaaagatgaaaacgcgacggtcacatcccttggtctccacactttttttgtttccttcctaactttgaccggcgatcgtccaacaggttaccataggttccacataggtcctagtataaaatttcccccgcatagtattttttttacgccgcagaaacgcgcatgggggggcgaccacaattctcccccttggcgaaactataaaccacgactgtatgaagccctctcatttttaacgcgagaaagaaagtccccgtattgtgtgtgctctcgacagtattagccagcgagatattatcgtgatcgttataaccgcagaa

SEQ ID NO: 717347 - DNA, 311 bp, Homo sapiens
ggaaaaatcaatcagttaagtgctaccagaaagtgtaccaatttttataaaaattaagaatgatataaatttcacaatctaaaattttaattttgtgcattatttcattaatgcatgtgtatttgagtaattgtaagataaatgaatttttaattttgtgagatgtagcttaaactgtcttcttaatcaaccacttacaattccgttgttgctgcatcctttatttaaggcttgtttaaagcgttttgccacactctggaaatctcttatagtgtgaagtgctctggggcatggcctctatacagggaaaa

SEQ ID NO: 717348 - DNA, 150 bp, Homo sapiens
tgctggttaaacaaaccgtctgcagctggatttagcttgcaagctgccaagtcctagttttagaagtttcaatagcacatatagttagacaccacaggtgctattgaaacttctaaaactgctattgaaacttctaaaactagggggtac

SEQ ID NO: 717349 - DNA, 763 bp, Homo sapiens
cagaggctgcaatctcggcactttgggaggccaaggcaggtggctgggaggtggaggttgtagtgagccgagatcacgccactgcactccatgctgggcaccattgagcactgagtgaacgagactccgtctgcaatcccggcacctcgggaggccgaggcagtcaggcgtggcggcgctcgcctgcaattgcaggcactcggcaggctgaggcaggagaatcaggcagggaggttgcagtgagccgagatggcagcagtacagtccagcttcggctcggcatcagagggagaccgtggaaagagggagaccgtggggagagggagagggagagggacgaatcatttttattcacaatccaatctggcagctaacagaaaagcaggtctttgggatgtagaaaaccttggtttcttgaagagcccagcttgtaagaccgtggttgtcattaggctttcaacactattcatggaaaccacagaacaactctgtaatagaatcggatatacctgcctcctagggagaccaaacgcaactgaacaaccttttataaaggaggatcaaaattaaacgagcaaacaacgggagaaaaagaaaaacgacaaaataggggagagaaaagaaaagaaaaaagtttaaaaaagaaaaataagaagggagaggagaatagcaaagaagaaaggacaaaaagagatataaagaaatataaaagagaagaaaaggggcaaaaaaaaagaagagagaagaagaaaaaaataggaac

SEQ ID NO: 717350 - DNA, 326 bp, Homo sapiens
cccctttaacatctcatttctcttccttaggacttacaacaaaatcaaacagctaggcaccaggtgcagtggctcacacctgtaatcccagcactttgggaggcccaggcgggtggatcacctgagcccaggagttcgagaccagcctgggcaacatggtgaaaccacatatctacacaaatcacaaaagttagccagatgtgatagtgtatgcctgtagtcccaggctgaggtgggaggatttcttgagcccaggaggtagaggttgcagtgagccaagatcatgccattgcactccagcctgggcaagagtgagactccgtctc

SEQ ID NO: 717351 - DNA, 484 bp, Homo sapiens
  misc_feature (400)..(400): n is a, c, g, or t
cccaaggtctatgaaattgcctcaaagagtaacaacttcatcttcagtaagaccctcccaatccccttccgtcggtaaccttaactacatctgcctgtgagtccccagatttccagggccctgtagcttttctcagtataaaggcttcttccatggctggggtgagcagcctgagacatctgcaggggaggctccctagaaagagctgggtctttaataatctcctccctgggtgagagaggactgaaaacttacaggaaattagctctgataacagacccccttttcccacagctgccaccccaggattcccacccactcacaaacatacccataaattgatgtgtccacactcctcccaggactaggcaccaccctcaggtgatctacctgcctcggnctcccaaagtgctgggattacaggtgtgagccactgcgtccagtgtctcagttttttttttttttaaggtagacatatcattta

SEQ ID NO: 717352 - DNA, 935 bp, Homo sapiens
gggttgtctgtggccggaggctgatcaggtgtctctaggaacagatcaggacatttggtaatgatgcgctggaaagtaaagcactagaccagcgctcgaacgaaggcagacgagggttcaagtccctgagcagagcatggtgtatcacgtgattggatgcaaacatgacgaatgaaagattgggaggctggagtgagcatagaagcaattggtcactctggaacggagagacattggacgaaaggagtgattggcagtcgatgcttttaggtggtcttcgttattcaaacacctgaataataaggcttcgtgctagcagcagaagatcagatgcgtaaagattacctttccaaggtatgtcttgtactgaatacgtgtacgtagtcatccatggaagcaatcgcagtccgaagcgttgaggaaaagtgacgtcgccttgggagtgaggtcgagcgagcagcagaagacggctgaacagctgagtcataggaataacccttgggaacgcaggttcctaccagaaggaacattcgaattatgtcaacacgaattgcactacgaaagctcagtctggatggtcatctagggggttgaacattgaacattcgatgtaccatttacgtcggtcgagcgaagaatggtccactcttggaacttccagatcccaatgacgattacaaaggctattggttatagtgttcgaaacggaacgaacttaaaaagaacctgctggaacaaaaggcagtccacgtgcgtggaaacattccaacgaattaaccgcccatgggttctcaccagcattgatttcgcaagtcgacctaatctctttctaaaactggctggggatacaacttcaagagtcaattgtgaagtccaggttagggtggaccatggacacaaattatcgcacaatgggtgaactcatccacggtaac

SEQ ID NO: 717353 - DNA, 163 bp, Homo sapiens
gccgcgtagctattcttgagtatcccacgaacaccctactctttccaacatcagctatcctggagcaagaggtagaggaaggaagcgtggcgcggagagcccagtttgaagaccccagtggaggcaacgatgcttgacggatgttgtggcaagctttagttgg

SEQ ID NO: 717354 - DNA, 317 bp, Homo sapiens
acctgtgagagcgtgcgtgcacctctcgaacccgtcgcattcaaactcaatggctaagcaatgtgtctaacaagactggtgctggtagccaggtttctacttcaatcacctgattggcaaagctatcctgatccacaccaccccaaggctccgtcgtcaaaacactggactctttgagaatatggatacctcgagttcgcagttagtcaatggcttgctccaagtttgcttgcttatctcccatattacttcctagagcgataaaggcccgttgtttgcgacggcgaatggtcaccgagcaggtatccaatggtaaa

SEQ ID NO: 717355 - DNA, 276 bp, Homo sapiens
caagtatacctgctcttgacacaccggaattcgtctctgacccagacagtttataggccttaacactgtacaagactttagcataatgcagtttttaccaatacccagctccaactccgtctacatctgtctgggctgaaccgccccttctgtccctctctacagcttcctggacacgtccggcacgtgtatgaacagtttatcacagcagtgtatacaagcaggtaccaatactactggaaatacagaataggaagcttaaaatgcagaaattga

SEQ ID NO: 717356 - DNA, 354 bp, Homo sapiens
  misc_feature (119)..(119): n is a, c, g, or t
  misc_feature (308)..(308): n is a, c, g, or t
  misc_feature (323)..(323): n is a, c, g, or t
agggactgttgcctgaagccaaaaaacctaggcttttacatggcaccctaattatgaaagacagtaatttccggctggtatcctcagagcaagccctgaaggagctgggcctggcaganaccaacttcgcttcacctgtcgtgtgcacctgcaggacacacgcaaagaacaagaaacagctttacgtgtgtacagccatctcaagagcaccctcaaggaccactgtgtacagcatctccccgatggctctgtgactgtggagtccattctaatccaggctgccgcccattcgggaggacccttggtancaaaggttgctaatnggtctcctgggactttaccaggattgaaaga

SEQ ID NO: 717357 - DNA, 440 bp, Homo sapiens
  misc_feature (310)..(310): n is a, c, g, or t
  misc_feature (385)..(385): n is a, c, g, or t
ggccttctggtcagtgtcggacgagtcgggtgttgggcgtagaacggtcgggccgataagggcgcccaagcaccctggcggggtgatggtctcccttgatctgagaatggtacctctcgatatgagccagtggtgaaatggtgtcggtgcctatgggacagtgtacaaggccgtgatccccacagtggccatttgtggcctcaagagtgtgagagtccccaatggaggaggaggtggaggagtgcttcccatcagcacagttcgtgaggtggctttactgaggcgactcggaggcttttgagcatcccanatgttgtcctggctgactggaccgtcttgtgccaacatccctgaactgacctgggagatcaatggtaaccctggntgtttgacgcatgtagcaccaggacctaagggacatatctggacaagggacccca

SEQ ID NO: 717358 - DNA, 108 bp, Homo sapiens
tagaggatccagcacttagcctgcgggtactcttaccattacctggatacgcccagatgtacttgaactggggtttacgtttataggccacaagcttccctgcaggag

SEQ ID NO: 717359 - DNA, 314 bp, Homo sapiens
tacatattcgaatcgagctcgtgtaccctcgcggctgcagcgtggtgatgcttggtcgtgtggtccccccggcctcctggactcctggtcccgctgttcctgccagcgctggtttcgacttcgagcttcctgccccagacacctcaagagaaggctcactgattggtgtgccgctagctaccgggctgatgatgccaatgtggttcgtgaccgtgatctcgaggtggacaccaccctcaagagcctgagccagcagatcgagaacatccggagcccagagggcagccgcaagaaccccaaccgcatcacccgtt

SEQ ID NO: 717360 - DNA, 359 bp, Homo sapiens
tccccccgggaaaagggggcctcctcccttccctccttggggtggggggtgggcaaaccccagtgggggccagggcccccccaagcgcagggtggggtggacccccctttttgctccagggggtggccggtttttggggggggagggtttccccccttgcggccccccccctgcactccgtgaccttttaaaaccccgggggccccccgttagccccagggttttccgtttaaagggggccccccggcccccgggccctgtttttccgctaaaggcccgtcctccttttggggggtttccgggcccccttccccctcccctcccggggggggcaaaataaatgtttgtttgggttttta

SEQ ID NO: 717361 - DNA, 255 bp, Homo sapiens
agatcgagctcgttaccgtctgagcagtgggtactgggaatttccatgccggaacagcccagcagctgtgcccgccggagtgagcatgatttgcctccccagggagcaccaggagagggtgggctgggtgtcagatggtctggtagatgctgcctcacgccgggactgcagtaaattcatatggtgaggttgtgcccgtgtgagtgatcccgcacgagtctctcccacatgcgttcaccactgggcagtgtggcg

SEQ ID NO: 717362 - DNA, 217 bp, Homo sapiens
agtcagaagtaggaggagaacgcgccgaaggctggttggggcatccgagatcattaaaaagggctgaccctaacaataggtacgagaagtataaaatgtgaagtaagagaatacaaacaaatttcctttttggagtacttttaagaaaaaaagcagggccttggaagttttggttcttttttcctcccctgttgcaaattctcatggttagggttgg

SEQ ID NO: 717363 - DNA, 449 bp, Homo sapiens
tccaatatcagcagcggttgtagcgtcggaagggctctccctaccggccctataaggaacttctacaaagtaccagtgccacatactagagtggcgcacagcgactccagaatgatagagctatgggcatcgggtcatagaggcgaagaactgggatcatacataaacgggtacagggcgacgcattgatccctatacagagtaagggccagacagaacaagaggcatagctaccgtaactagcccccaattacacactacaacatatattacgcgaccaaaaggcgctgcaccgggtagcgagcctaggtaatacccaacgccgcacaaaggaaacaggtaacaattaacctatagcaggaccttggtctccaagaggaatcacctacacgttccagtagcacctagaaaccagtatacccctccccttgataactggataccccaaa

SEQ ID NO: 717364 - DNA, 204 bp, Homo sapiens
ctcgcgcgggcagcaggaattctcgcgagagcagcaggaattcagcagcaggaattctcgcgggacagcaggaattctcgcgggagcagcaggaatctcgcgagagcagcaggaattctcgcgggcaggaattctcgcgggagcagcaggacatctcgcgggagcagcaggaattctcgcgggaccagcaggaattctcgcggg

SEQ ID NO: 717365 - DNA, 696 bp, Homo sapiens
  misc_feature (218)..(218): n is a, c, g, or t
aggcagtggttcagtacctcaggcagtaattctggttggcattcactactttctccatcaaaggtcatccttagcatagtgctcgccctttcagacgcataagggtcgctgtactctacaacggctggatagctatgggtatgtcatcatagtacatgcgctcagcagcagcagtcccattgtcaatgactggtcagtcatgcccagtgacagcactngtatagcttcgagtcgtgccaaggttgttggcactgagaggcaagctgcattgctatatccctcagtgatgcactcttgagccagtacgctctacagatcttaggctacagtcatgtacagagtcggtgtatgtaagctgacagtccatctgtcatcattcttcagacacttggttgtacttcgtggataagcctctatccaggttgctgtagatcatcctcctcagtcagtagtagattggcgtgcgcatagcacaggtatgtcatcagcagcattgatctggacagcatctaacatgtctggctgttactctagcttcatgtcttcatcgtaggcataagtacgctggtcatctggtatcgtgcagatagttcttcaacggtgtccgtatcttccaagggtctctcacctttgcgctttatggtagatgtatttcccgtgagcaaccttctcctcgtaatcgttgatctgtttcat

SEQ ID NO: 717366 - DNA, 217 bp, Homo sapiens
gagagagaagaggacgacgatgactccgattatccggagaggatggaagacgacgacgacgacgccagttactgcacggaagcagcttcaggagccatagtacctacagcagcacttcaggtaggcgaaaccaagagtacatcggcctcgttctcctatattggagaaaagacatccgcccttgaatttccaagtcctcttaggatttaatggtgcc

SEQ ID NO: 717367 - DNA, 340 bp, Homo sapiens
cgcgtcgacctggtacctggaggcttggcagcagcatgccctccttcctcctgctctttgcctcagtctttgcgtgcagaaatgggattgctgttagccctatttcgtagggttgatatgggatgatgcggtattccatggtgtttctggtctttctcagggcagaataaagtttacctctgccatgatgatggtggtgctggtaatgtggttgatgatggtggtggttggtagtactactgttggtggtgatggtggtggttggtagtattactgttggtagtgaaaagggcggtagttggtgtcgacccgcccgcgaatttagtagtagtagtcgacc

SEQ ID NO: 717368 - DNA, 309 bp, Homo sapiens
atcctcattccagagggggccctgccacatagccaaaaggaagaagtgcttgttcagacaggtcaagaaggattttgacagacaggcctttttgggtttccctactcaatttattagtattagggcatatcccttttggccagtcatattttttcatgactgttcataccttgttgaacctaagggttaaaatggtcaattttccctgtgtctttggtcttcattttgaagggttatgttggaaatgtggtgttcaaatttcatgtaaaggtatgatcaaataaatttgtatgccttttttcctcttta

SEQ ID NO: 717369 - DNA, 105 bp, Homo sapiens
ttaaaatctccatttatatcttataagctttgaaatgcaagtacagctttaaagcatcataatggagattttaaagtagaaataaatatgtattccatgttttta

SEQ ID NO: 717370 - DNA, 393 bp, Homo sapiens
  misc_feature (293)..(293): n is a, c, g, or t
  misc_feature (360)..(360): n is a, c, g, or t
acaaaagaagtgaaaatagccagttcctgccttaactgatgacattccaccattgtgatttgttcctgccccaccctaactgatcaattgaccttgtgacaatacaccttccccacccttgagaaggtgctttgtaatattctccccactcaccccacgcccgcacccccgcacccttaagaaggtattttgtaatattctctccgccattgagaatgtgctttgtaagatccaccccctgcccacaaaaaattgctcctaactccaccgcctatcccaaaccttacaagaantaatggataaatcccaccaccctttggtggatttttttgggatttaggcccacctggcacccggggnggatttaaaaaaaggttttatttgtttcaacaa

SEQ ID NO: 717371 - DNA, 516 bp, Homo sapiens
ccaaggccccttctacagcccattggtgccagaacgcttcatgagctgaagctctggacaggctctcgggaggagctgctcgaggagaagattcctgaagacggcccctaaacactaccaaatagctcttctggggcagctgggccatgtccaaagaggctgcccctctcaccaaagaacagaggcagcagaaagctgcccctgaactgatgcttcctggaaaaccaagggggtcacccccctccctgtaagctgtggggataagcagaatatgcagcagctggggttgggtgacatagagcatcctattcctttgacattgtcataggataagctgtgttagcactcccccaggaaatgagattgatttttacaatagccaataacatttgcactttattaatgcctgtatataaatatgaatagctatgttatatatatatatatatatatctatatatgtctatagctctatatatttagcccttccctggaaaggggccagggaaaaacaaa

SEQ ID NO: 717372 - DNA, 207 bp, Homo sapiens
tttccaaatccaacccttatttgggacccttcagtgatgacccagcagacctccaaaaagcctcctttgcccagatctccagccgggtttggggctgggttgcggaggggagggtttgggagtccacacttttccaccaacttcccttcccacttttttattccacattgcagtgtttggaataaaccatgtttttatgcctcctca

SEQ ID NO: 717373 - DNA, 1009 bp, Homo sapiens
acggaatggtgcgaacaggcaaagcagatgcttactcatgcactgtagtctatctcttcggtcagcgcttccattccaagcatgatctactgactcacgtgcgcacctgtagactctatcggacacagcttatggaaggtaaagacacaaagaccagatctatatgaaactgtctggcaataacaggggcgtgcgtgagtagaaaaatgcgtcagaacgggggtctcccatctcggaggctcatgcctaagcgcgatacgtttgtgcatgacagacgtcgtatatatgcatgcggacggtcgcatccagatgtgctgtcgaactctattgtgcatgactttcgccttgttggagaaagactcctagatgagaccagaagagatctgtcatgatagaaactcatcactagtactgtccttacgaggaaccaaacgatatagatgtgcaatttcatggataggggccattattctgtgagtattagcacccctcactgaaggatggcatggcagttgaatgcgtttgaatatatggacacctagagtgctcatacacggttgtattaggtgcaatacctcgtgaaagcaatgatgcattacatggtactttacgctgctgaagtgtaacaactatcatgcatggtcggttgggttttgaacaacaatatgcgcattggcccctaagtattgcgccaaaactttatcacgtggagcactgatgagtattgaggaaaattgagagggtagtaaggtcgaggtgttatatgattaatagacgttttagggtataaacgtttcaccttagaaaaaggcttttaataaatgaagacaagtaaacttaggatttgcgtaattggacagaggtatatcactagttggagggaggtgctaaattagtataacttactttggcatatagggttgccacacggggtcttggaagaattgttacacgcgtaaggggaaggggtttactggacaagttggattggccatgggcttgtttgcag

SEQ ID NO: 717374 - DNA, 1262 bp, Homo sapiens
tcgccttgtggttggggggatgcgttgcgtccgtgccgggtgctccactggcattggcgggtctcggtttccggggcgtgtgtcccggcgttcctttccggggttggtgtttttccggcttctccggggcaccccttcggcgctcccttatggagggttcacgtgggcatatctcccctggcgtcttgtccgcccccaccccgaggccttttcgggggggcacccccccccatgtggtttcgggccattggctgcccaacggatgccagtaagggggtttcttccccccctgggcgcccctgcgccctctgtgtgggtcctaggttcttgtcgctaccctcccgaggggtgcctagtttcctccggtgtgggatctcggtggcgtcccatccctgggcgcgcttcccggggcccccccgttctcccggccaggatggggggatttttgcccctctccctgtgagtttcccgccggaatttcggggccccctgcccgagtcgggtcccccccggcccgaaaatgcggttcttcttagccccgggaccttctcccccagtattgcggttacgcccattgtgcgtgcccaatgggggttatatttgaggagaatttaggggaaattttgcccccctgggccccaagatgccgcaacccccctccatatgcggtaggcctttcctccgcggaacattggagtaattacgccctttctcgggaaataggaaaaattgtgcccttgaaagcctctgttatttctgagaatatccgccacctcggagattggtatgaagactctgcttgcctgagatttttgagccccctgtattctgaaaggttaacctcggttccccctctggtatttaaccgctgttcccggggctgaggtgttcttgggagtttcttcttaaggggcctggccaggcaccccgttgttttgtcttttccgggtcttgtccagggttggcaagtctcccacgcccgttgggcccccgttttcctttctcttatgcctgaaagtctttggcccaggaccccctgggctgttacattgctttgagttggaagccggtttgccatttacgccctgtaaatagtattccattcttaatattatagtaaggttttttttgtaccgccattttccgattctttgtaagagatgcacccaccaattttggttttctactgttatgtgaggaccttaggcccccagccacccgtccttgtgtaagggaaaattaaagtgctgcccgtaacccca

SEQ ID NO: 717375 - DNA, 415 bp, Homo sapiens
acccatggtttcttaagcctgcaatatcagcacttagggaggctaaggcgcctggaacttgttgtcaggagaccaagactcagcctggggaggatgaagaaatcccggcggaaccaaaaatagcaaaaagtacccgagcgtggtgcagggtgcctgagatagcagctactcggtaggactgggtaagagaatggctagaacccggcagacaggaaagcagtgagccaagatcgagccagtgtacgctagcctgggagacagggcatgacttcatggcagaaaaataacactgggaaatgggaaagtctctaaccatgacagacgcctcggccaattcgactttagactcgagcgagcatacgcatgccgccgaaatgggtcaacggccaaccctccctatagagtgccgaactcc

SEQ ID NO: 717376 - DNA, 119 bp, Homo sapiens
tgagcggtccatagcgacacgtacatagcgacaccgtacccccttccccatactagttattatcgaaaccatcagcctactcattcaaccaagtagccctggccgtacggtgtcgctat

SEQ ID NO: 717377 - DNA, 264 bp, Homo sapiens
tggagttcttgcagatcggggtcaggtgcccatcaagtggatgtgctggagtcattctccgccggctgttcacccaccacagtgatgtgtggagcttatgtctgtgactgtgagaaccctgacgacttttggggccaaaccttacgatgggatcccagcccgggagatccctgacctgcagcccccagcctgaatatgtgaaccagccagatgttcggccccagcccccttcgccccgagagggccctctgcaaggaacccacg

SEQ ID NO: 717378 - DNA, 215 bp, Homo sapiens
taataagtggttataacttttgagtcagtggtttatgttttgcattttttttgttttgagacaaagtctcgctctgtctcccaggctagagtaccgtggcacaatctcagctcattgcaacctctgcttcctgggctcaagcactctgcccacctcagcctccagagtagctggaaatacagatggagtctagctcagttctcctaagctacagt

SEQ ID NO: 717379 - DNA, 344 bp, Homo sapiens
cagcggactcggcagtgaagaggggctcgggcaggtcacgggaggtacagctttcaagcgtgcctgcgatggcgttcacgtccatctcggtcatcatcaccgagacgtccttgttattgacgtcgaaggcttgccttcaaggcctggatgtccgtggccacaccggaaacgccgggtaaatgccacctcctccatggctcggcgctcgatctcctccaagcactggggcacgatgtagggcaccttggagctctctctcttggtgaccccgccatcttgagtccgaagaccctgtctgtttccggacggggtctcttaagctgaatccctgttgttgaatttac

SEQ ID NO: 717380 - DNA, 325 bp, Homo sapiens
gggtctgccgtaatttttcttgtggttaccatgggcttacattttaaaaactgtgtagttataataggcaatttaagttgataataacttaacttggctacatgcaagtattctagacttaccttctacctcccaaatttgtttattttttattaaaagacatttttttttggagattcgagtctgtgcttggttcgcctggggctagaagtacaagtggtgcaatctgtggctcactgcaacctctgtctcccgggtttcaacgcaattctccggtcctcagccctccgtgagtaccgtgggactgcagggacccactcgggga

SEQ ID NO: 717381 - DNA, 198 bp, Homo sapiens
gcatcactgttccaaaaccgtcgctcaattccctccgcgcgaccgagtcgacagctgcgccggaacagcagcgcgccgggcccgtcagtactcccaacagtggtgctccacacccctgtggcggcgcactgaaacatccccttcccacacgcggctcgggaaagcgtacttaattgtggggagtcacgttctgcagca

SEQ ID NO: 717382 - DNA, 165 bp, Homo sapiens
aacatccaggactatggtaaataccaggaactagtgctgaaaaccgggaaattctcctattatcctaaaacatacgtgatgggtaacaaattcaaggtgcatcgatttacctacatttaagttcaccattaaaaagtatgattgaggcggtgcatgtggggagcg

SEQ ID NO: 717383 - DNA, 189 bp, Homo sapiens
aaaagtgtctgaacaggtagttcccttatctgagattgggctttccatggtttcagttacccatggtcagctgcagtctgaaaacagatgagtacagtatcatattttcagagagaaagagagaccacattcacataacttttattacagtatgtggttataactgttctattatttatcagctgtggg

SEQ ID NO: 717384 - DNA, 315 bp, Homo sapiens
ccccccttaaaaacccccccctttttttttagggggaaggggccggtcttttcccaggtccccccagggggggggaaacccttcctttttggtaaatttttaaaacccaaattttttttatttcccccccccaacccttttttttttgtttttttttgaaaaaggggccttggggccccccccccccccttttttttcccccccctttaagggtttaaggggttttgtttcccccgggggggggggggggccccccgggtttccctttcccctttttttggccccgtttattaaaggggcccccctttaaattta

SEQ ID NO: 717385 - DNA, 216 bp, Homo sapiens
cagatcagccacagcctgatgcctgcagccccactttgctcaccctttcccttcccttcctcctttccttccacaaaagaaggcctaccttttctccattccatgcttaaccataggccccctttccttgttgaccttgggaccctccattggtaccctggttaggcttttaaacttctcggggggggtgggggccacactcttttttggcctcta

SEQ ID NO: 717386 - DNA, 167 bp, Homo sapiens
cgtctagcatctagagatcctaatttgcaccacagctatagattcaacaccaaatggctattgggagagcgcccctcatcagtgggctcctcccccccagtggcccctgtatcctcccaggcttgtccacacccccgtcttgccacctcagtgcattaaggtcgggg

SEQ ID NO: 717387 - DNA, 160 bp, Homo sapiens
tccaggcacctaacgatttgttttgctcaatcaaacgcagacaggcgtctccgaagtaccaccactgggatatcctcggaccagcgcttaaaccgaatccccacaatctcaaactcaaccaggccaaagggaacacagtgacacaacaacagggttccaa

SEQ ID NO: 717388 - DNA, 385 bp, Homo sapiens
acagtgtgagactctgtctgaaaaaaataaaataactaataataaccagactcccgacatccaacaatctcaggcacttattaagtacctgctgtgtgccagaaattttgctgagaatccagaggaagcgatcctagcaggtggctgggcaacagcctggggtcctgaggtggaggcaggaggggctggaatccctgtaaacggcctccctccaaggaagcctggcccaggcgcccacccttcagtcaccctcccctgtttagctcacacagctgggtcagtgccaggcagccccacccaacgtggagctgtggggccctagaactgaggagccgccatcatttctggctctgccaccaagaggctgcccagagccaggcccact

SEQ ID NO: 717389 - DNA, 351 bp, Homo sapiens
tggacccattatgactcccaactcagtatttatgattatttttgaggcagggtctcactctgtcgccagactggagtgcagtggcaggatcaggctccgtgcagccccaaccttccaggctccagcaatcctcccgcctcagcctcctgagtagttgggagtagagatgcgtcccacatcgcctggctaatttttgtatttttgtggagaggggatctcgccacgttgcccaggcttgaagccggatcaagcaattgggttcttcggatttccgaaatagaccccaatattctgcctttaccccggaggatgcagatgtaccttctctcaggccgttgagatcaggcatgt

SEQ ID NO: 717390 - DNA, 255 bp, Homo sapiens
gaagttcagtaccggtctgggtaacatagtgagaccccgtctctacaaaacaagaattagctggatgtgatggcacatgtctgtagtcccagctactcaggaggctgaggctggagaattgcttgaacctgacagacggacgttgcagtgagctgaaattgtgccactgcactctagcctgggcaacagagcgagactctgtctcaaacaaaataaaaagagaaagaataaaagaaaatgttctcatttctctta

SEQ ID NO: 717391 - DNA, 331 bp, Homo sapiens
atgggatataattttgtaacatagggactaaatgaacaaatattcttattaaacaaataaaaatctccaccaggggtgaaggaataatgaattctaccaaacattgaagagtagaagaaatgattttaatcacattctgcacacttaattgactcctggcatccttttagatgttaaaacaaacaaacaaaacaaaacaaaaaaacaagcattggccaggtgcagtggctcgcgcctgtaatcccagcactttgggaggccgaggcaggcggatcacgaggtcaggagattgagaccatcctggctaacacgctgaaaccccgtctctact

SEQ ID NO: 717392 - DNA, 159 bp, Homo sapiens
catgatatagttcaaaaaggatacatgagtacttttatgagcaatgtaataggatccatgttttctatcccctgaagaatgttgtactagaatatttatgccatcaaaatttctgatttacaatcatgatatacaacttgaaagatgtacattaatgga

SEQ ID NO: 717393 - DNA, 393 bp, Homo sapiens
aaaacaacccccagccttctctgatgcccaggagactaatgggtactcggcttaacacttggatgacaaaatgacctgcacaacaaacccccatggcacaagtgtaccgatagaacaaacctgcacgtgtgcccctcaacttacacaaacacaagttaaatttaaaaaaagtcttgtgagggccgggagttgtttcatagcattattgtctactcggcatgtcgcagggaagaccgggcaggatgggaactggaggacctctccgagggccacacagctcgtcgtggattttcatcccagccctccatgatctgggttgcttacaacttcgttacagtgaatatatatcgatcatatgtttatcatacatacgcccagacctggcaaactcta

SEQ ID NO: 717394 - DNA, 388 bp, Homo sapiens
  misc_feature (2)..(2): n is a, c, g, or t
  misc_feature (37)..(37): n is a, c, g, or t
  misc_feature (214)..(214): n is a, c, g, or t
  misc_feature (382)..(382): n is a, c, g, or t
cngaaacatccccccaaagacatgccccagaaataangctttaccccacatgtcctatgtaatccctcaatcccagtcaaattgacacaaagttaactatcatggctgggcacagtgactcaccccctgtaatccccagcactttgggaggctgaggtgggtggaatcgctggagctcaagagcttgagaccagccctggcaacatggcgaaanaccgtctctacaagaattagccgggtgtgctcatgtctttagtcctagctacttggggtgctgaggtagaaggattggcttgaacctggtagttcgaggctgcagtaagccgagattgcaccactgcaatccagcctgggcgagagtgagatgaccttgtctcaaatnttaaaa

SEQ ID NO: 717395 - DNA, 193 bp, Homo sapiens
tctcaggctctgtctgttctctcgcggctgtttctcaggcaggcatgtttctcagccaggatgtcttctcagccagtgtatgtcttctctggcaggatgtcgttcgtcagccagggatgtcttctcagcccccatgagagctgagccccatgggaacaaaggctatgtctgattcattcttttttcttttttt

SEQ ID NO: 717396 - DNA, 138 bp, Homo sapiens
gagactccggcaggtgtaggggacaggcgtgggatgtgtcagtgcgcagggttggcagcggtggcacttctgcgtgccttaactggcagagcgtgctcaggtcgaagtgcaggctgcgccccctccttggtgctctag

SEQ ID NO: 717397 - DNA, 1037 bp, Homo sapiens
  misc_feature (8)..(8): n is a, c, g, or t
  misc_feature (61)..(62): n is a, c, g, or t
  misc_feature (67)..(67): n is a, c, g, or t
  misc_feature (81)..(81): n is a, c, g, or t
  misc_feature (88)..(88): n is a, c, g, or t
  misc_feature (95)..(95): n is a, c, g, or t
  misc_feature (107)..(107): n is a, c, g, or t
  misc_feature (109)..(109): n is a, c, g, or t
  misc_feature (119)..(119): n is a, c, g, or t
  misc_feature (122)..(122): n is a, c, g, or t
  misc_feature (131)..(131): n is a, c, g, or t
  misc_feature (141)..(141): n is a, c, g, or t
  misc_feature (147)..(147): n is a, c, g, or t
  misc_feature (154)..(154): n is a, c, g, or t
  misc_feature (169)..(169): n is a, c, g, or t
  misc_feature (171)..(171): n is a, c, g, or t
  misc_feature (174)..(176): n is a, c, g, or t
  misc_feature (179)..(179): n is a, c, g, or t
  misc_feature (186)..(186): n is a, c, g, or t
  misc_feature (214)..(214): n is a, c, g, or t
  misc_feature (216)..(216): n is a, c, g, or t
  misc_feature (219)..(219): n is a, c, g, or t
  misc_feature (223)..(223): n is a, c, g, or t
  misc_feature (226)..(226): n is a, c, g, or t
  misc_feature (229)..(229): n is a, c, g, or t
  misc_feature (256)..(256): n is a, c, g, or t
  misc_feature (266)..(266): n is a, c, g, or t
  misc_feature (268)..(268): n is a, c, g, or t
  misc_feature (279)..(279): n is a, c, g, or t
  misc_feature (299)..(299): n is a, c, g, or t
  misc_feature (332)..(332): n is a, c, g, or t
  misc_feature (350)..(350): n is a, c, g, or t
  misc_feature (357)..(357): n is a, c, g, or t
  misc_feature (381)..(381): n is a, c, g, or t
  misc_feature (387)..(387): n is a, c, g, or t
  misc_feature (408)..(408): n is a, c, g, or t
  misc_feature (414)..(414): n is a, c, g, or t
  misc_feature (422)..(422): n is a, c, g, or t
  misc_feature (436)..(436): n is a, c, g, or t
  misc_feature (440)..(440): n is a, c, g, or t
  misc_feature (456)..(456): n is a, c, g, or t
  misc_feature (462)..(462): n is a, c, g, or t
  misc_feature (464)..(464): n is a, c, g, or t
  misc_feature (466)..(466): n is a, c, g, or t
  misc_feature (477)..(477): n is a, c, g, or t
  misc_feature (481)..(481): n is a, c, g, or t
  misc_feature (514)..(514): n is a, c, g, or t
  misc_feature (519)..(519): n is a, c, g, or t
  misc_feature (575)..(575): n is a, c, g, or t
  misc_feature (580)..(580): n is a, c, g, or t
  misc_feature (586)..(586): n is a, c, g, or t
  misc_feature (597)..(597): n is a, c, g, or t
  misc_feature (643)..(643): n is a, c, g, or t
  misc_feature (663)..(664): n is a, c, g, or t
  misc_feature (671)..(672): n is a, c, g, or t
  misc_feature (682)..(682): n is a, c, g, or t
  misc_feature (705)..(705): n is a, c, g, or t
  misc_feature (715)..(715): n is a, c, g, or t
  misc_feature (818)..(818): n is a, c, g, or t
  misc_feature (828)..(828): n is a, c, g, or t
  misc_feature (840)..(840): n is a, c, g, or t
  misc_feature (959)..(959): n is a, c, g, or t
  misc_feature (989)..(989): n is a, c, g, or t
tccttacnaatgacgtgttgccggggcctaatgttctcacataacagtagaaaaccaaaannaaaantcatctcttcaaanaatcganaattgcntacaaaaaaaancntacataaatnaanaatgaatanatttacaggngtaaanacaaacngcttccaactcaaancnagnnncancccaccncgttctggccaaacacatcagccaaganangcnaccnccnccnccggcttggcctttccaaccctgacanacccgcaagncnaaacacctggntcttgccagcctctagaganatcccagaacactcagccctgacacgttatttncctgcacagatcagaggntgctggncacacagactcaccaagccacagntttgtnttccacaagctcgttcttttnttagcnacgttgtnccaagccacacgtnctanaggttgatctcaaagntatgtncntngtattaaacanatantttggggaacagttaacttcaatacaaggtcanttttngcaacaagttctacaatccagtgctgatatcagatacaagcttcaaggacaatttnttttngaaggnttattccagtntcgtgagggtagcatgaggggtgtgcgttggcgaggggcaaatttntattctcaattaacccatgnntcaaatnntacgcatctnctgagtccgtttagaagcatttnctgtggacgntggaggggcccgactcgtcgtactcctgcttgctaatccacatctgctggaaggtggacagtgaggccaggttggagccaccgatccacaccgagtacttgcnctctgggggngcgatgatcttnatcttcatggtgctgggcgccagggcggtgatctccttctgcatcctgtcggcaatgcccggatacatggtggtgccgcccgacagcaccgtgttggcgtacaggtctttgcggatgtncacgtcacacttcatgatggagttgaaggnggtctcgtggatgccgcaagagtccatacccaggaaggaaggctggaa

SEQ ID NO: 717398 - DNA, 269 bp, Homo sapiens
tgcagctacttgggaggctgaggaggagaatcgcttgaaccgggagtctggagtgcagtggttgtgatcataagcttgttggaaacttaggactcccgagttcaagaccagcctgaccaacatggagaaaccccatcccttactaaaaatacaaaattagccgggcgtggtggcacaatgcctgtaatcctagctacttgggaggctgaggcaggagaatcgcttgaacccggggagctggagtgcagtggtgtgatcatagcttggcg

SEQ ID NO: 717399 - DNA, 535 bp, Homo sapiens
  misc_feature (9)..(9): n is a, c, g, or t
  misc_feature (283)..(283): n is a, c, g, or t
  misc_feature (346)..(346): n is a, c, g, or t
  misc_feature (361)..(361): n is a, c, g, or t
  misc_feature (368)..(368): n is a, c, g, or t
  misc_feature (397)..(397): n is a, c, g, or t
  misc_feature (413)..(413): n is a, c, g, or t
  misc_feature (439)..(439): n is a, c, g, or t
  misc_feature (459)..(459): n is a, c, g, or t
  misc_feature (465)..(465): n is a, c, g, or t
  misc_feature (473)..(473): n is a, c, g, or t
  misc_feature (510)..(510): n is a, c, g, or t
  misc_feature (525)..(525): n is a, c, g, or t
tttgcactngcttggaaacagtactggtgtgctacaggtactcccccagcccaggcaacattcagaatcatgagtgtcaaccaccctacagaagtacacacagatacctgactggtgtggggtatgcctggtactgtaataggagcctaagacagcgcacctaccttttcaggatttagaacctaaaattagaaagagaatcccagctgtcattgttccttccccagaagctaagagccagcctcagagcctacccaggagctgtgaaggggcaagggtcaanctgactcactctaccaggaggagaccaggttgcagtggcgtaaggccccctggtttctctggncacactccaaggcancacagtnctgccagtgaggacagcttgacaaccagncagggaaaccattctngtctttattctgggggcttccagggnctgtcctggattggtcagancccggnttgccatntaagttttccagtaggttgactccaaggctcagcagngggctcaggttgggnttgccagggg

SEQ ID NO: 717400 - DNA, 404 bp, Homo sapiens
  misc_feature (404)..(404): n is a, c, g, or t
taaattgacaaaaataatatatatttatgttatattacttgatgttttgatatatgtatacattgtggaatgactaagttgagcttattagcatatctgttacctcacatccttaccactttttctgtggtaagatctactcttttagcaattttcagatatacaatacattgttattaactgtagtcactatgtcactacaaaacaaaagagcacagcttctgacaaccgaccttttccacccagccttctctaactcatgtttctgtaactgctctctactctggccccttctgacctaggagttgtggtgaacttctgctgttattatcaagaggggtggttctaccccttgtggtttgcctatactctactaacttctttgtaaataaccttttaattcn

SEQ ID NO: 717401 - DNA, 476 bp, Homo sapiens
cgcaaataaaccctctccaaatactcgccccctctataagtcaaacggctcccacttgagcctgagaagacacacggtttcctatttcctaagagaggggttgtaagactctttcttgcctcccttgtggttgtgaaggagagaccccagggtgcctccttattctcctctttaagcggttctgcctccctgggaacctctctttgggggaatccggccaaacacgggtaacccctgagggtcccacagtgccacagaggtgggcacacacacacagcacatgtgtctgtgtaatgtgtgaaatgtgaaagagacaccacgccctcctttcagaaggaaaaggggcctgaaggtgccacagctgtgtcctgggttaggggttgggggtcggccccttccagggcccggagggccggttcccttttctggtgctgctgcttgcaaattttagaggaaataaaaagggaagtgagaga

SEQ ID NO: 717402 - DNA, 167 bp, Homo sapiens
gatagcggatgaggggtccgctattaaaacttacgatcgccacccacacactggaacagacctagttcaacgaatctgaggaggccactcagtagacagtcccatcctcacacgattctttatttttcacttcatcttggcctggcattattgccgccctagcagca

SEQ ID NO: 717403 - DNA, 326 bp, Homo sapiens
gcattcagactctcctgtccacaaaactcccaagtcagagaacagagacaacaaaggaaaaacccaagcccgaggcatatgacatgatggttcgcgagctggcttagaaatgaaggcgcagccctctaacaggatgaagacggacggcacgaatgggcacacggacagacgcacggacgcaccctcaggaagctggacggctaagacgaccttcgaagaatgcttggaaaggatgaggactgaaccactgttaagaaaccaaaaccatatgtcagcagatgactctgacatgatggcttcgctgctagactaccgatgacaggcgt

SEQ ID NO: 717404 - DNA, 83 bp, Homo sapiens
tctctacaaaatttttttatcctcattgccagttaaatacagagttttacttgcatagcttaacaatgaagggtcatacactg

SEQ ID NO: 717405 - DNA, 390 bp, Homo sapiens
gtgaataaacaaaatcacggtcctgcacagtagctcaaaatgaaacctatgacgtcaaacactactctatctatggtacccgctacatcttgtctgatgcaattataacattaagtatatcttgtgaatctagcacgtatactaacccatcgccactccctaagcccaaaccttcatcatctctcttttgtggatgattgtcctggaaccctggtcccttacctttttcgtatatcctttgaaaggtatcttgagttatcttcttagaaatcttatgtaattatgctcctcttctgcttaaaaaccttgattgccttcctgttacctgtggttaaatctatgcttcaataatcttctttacattctggccttaactaactttattctgta

SEQ ID NO: 717406 - DNA, 180 bp, Homo sapiens
gcctctgacagccgtcttgacggcgcggtgggcttgtggtttggtggtcgggtcgggtgtggcgtgggtgatgggtgtggtgtgcggtgatgtgggtgtgttgtggatgggtgtcgtgtgtgtcggtggtcgggtcggtgttgctggcgtggggggtgtgcgcgtggtcggggggtgtgg

SEQ ID NO: 717407 - DNA, 247 bp, Homo sapiens
tataccccagcgtcacagttagctgtcacgagctggacgctctgcaaagagagcaggagctggtagcttcctacagtggtaggtcggaggaggcgccttcttagtgccaccaggtttataactgtgtggatcccacgggacttccatggttgccaaatccacaagcaatctactttgcttgcatttgtcttcactcttgtcccaagcagttaatttgacaggttaccactactcgcggaagttggtc

SEQ ID NO: 717408 - DNA, 405 bp, Homo sapiens
  misc_feature (386)..(386): n is a, c, g, or t
  misc_feature (396)..(396): n is a, c, g, or t
gacgtggcggcacagctgggcgagtatctggaggagctggaccagatctgcatttcttttgatgaaggcaaaaccacaatgaacttcattgaggcagcactgttgatccagggctcagcctgtgtctacagtaagaaggtggagtacctctactcgctggtctaccaggctctcgattttatttctggcaagaggcgggccaaacagctctccttagttcaggaagatgggagcaagaagactgtcaactcagaagactccctggtgaaacagagaatgagttcctggtcacttggacgacttcccctgactcccgggcttaatgttggatctggaaaaatgattcagggcatccagtgaacttgcttatccataccccctacttngcccatgggncctgggtgg

SEQ ID NO: 717409 - DNA, 278 bp, Homo sapiens
agagcttcttctaaactgactaccgaacactcggggccgtggcgagtgactatacgtgcgactaatcactatttaaatcgtgaattttcactggaacgctgtcgtgtatagcgacttaataaaatgtaaagttgtctgtgcgatagggccactgcctactacaccgatactcgtaggagcaccgtgaagaactcgaactgcaagcgcagccgaggcagctgtacgagccgcactaatgcggctggcctcgatgaacgcataagcatagccgttatctg

SEQ ID NO: 717410 - DNA, 894 bp, Homo sapiens
ggtctgtgtcctattctacttggaggcccaagcctctgtggccctgtgacctgcaggtattgggagatccacagctaaaaccccaggacaccctggaagcatagaaatgtctccctctgatgccgagccgaagctggactgtactgctgccatctcggctcactgcaacctccctgcctgattctcctgcctcagcctgccgagtgcctgcgattgcaggtgcgcgccgccacgcctgactggttttcgtacttttttggtggagacggggtttcgctgtgttggccgggctggtctccagctcctaaccgcgagtgatccgccagcctcggcctcctgaggtgccgggattgcagacggagtctcgttcactcagtgctcaatgttgcccaggctggagtgcagtggcgtgatctcagctggctacaacctccacctcccagccgcctgccttggcctcccaaagtaccgagattgcagcctctgcccggccgccaccccgtctgggaagtgaggagcgtctctgcctggccgcccatcgtctgggatgtgaggggcccctctgcctggctgcccagtctggaaagtgaggagggtctctgcccggccgccatcccatctaggaagtgacgagcacctcttcccagccaccatcccatctaggaagcaaggagcgtctctgcccggccgcccatcgtatgagatgtggggagcgcctcttgcccgttgccccgtctgggatatgacggagcgcctctgcccgtgccggaaccccgtcttgggacgtgaggagcgtctctgactggccgccccatctgagagggtccatcttcttgtagcgcctgtgcagtttgctaaggggctccacttcagagacctattcatcctggttcc

SEQ ID NO: 717411 - DNA, 492 bp, Homo sapiens
tagtgcaggatggggagtcagtagagtgtgggggaaggtatgggaagtgctatctctgactatgttctttaggtcgactttctaccagaattttcatggaaaagcagcaggaattagaatgtattataatccacatttagaatacaattttttacaaacaattagcccggcgtcgtggcaggcgcctgtagtcctagctactcgggaggctgaggcgggagaatggagtgaacccaggtgggtcaccatgtcgagatagcgaccatcctggcaaacatggtgaaaccccgtctctactaaaaatacaaaggttagctggacatggtggcacatgcctgtggtccaggctctgcttccaagatggcactgcctccataggggaggaatgccgtgttctcacatggcagaaggccgaagagcaaaaaaacaacaacaaaaaaggccagtgcagtggttcacgcctgtaatcccagctactctggagggtaccga

SEQ ID NO: 717412 - DNA, 112 bp, Homo sapiens
ctcagtacaggcaaggaagataacagccagcaccaggcctgctggaagagccacccagagaacccgcaaggattatcctaacaacagctgggatgccattgaagggtcttaa

SEQ ID NO: 717413 - DNA, 146 bp, Homo sapiens
acctcgtcgtcatcatttcgcaccattttgtcaatttgatgtctaagaatagacgcagaagagatcagcagggcaaaataatacaggctgcagtctactctgtaaatgtgcttttcttaaagtatgttccaagaagatgaggccca

SEQ ID NO: 717414 - DNA, 359 bp, Homo sapiens
  misc_feature (2)..(2): n is a, c, g, or t
gnaggaaaaaaattccagaaaaatttgaacttcaaatattttaattcaactattaagtaaatttaaaaatccttctaggatgggactctgggtcatttcctggacatgtatttaggtaaaacttgttgccctacatttcttgagcataaaaatttaacttggcatgaggccatgtggaggaaaaaaataccagaaatatttgaacttcaaatattttaattcaaatattcaataaatttgaaaatccttctaggatgggactctgggtcatttcctggacatttatttaggcaaaacttgttgctctacattccttgagcataaaaatataacttggcatgaggccatgtggacgaaaa

SEQ ID NO: 717415 - DNA, 464 bp, Homo sapiens
cagcataaattcggagtaagaaagtacccgccttttcatatcaacatggtttctaagaacatgtctctgtctctatccctatcattttaaatggctggacattccagttgtttctggatttttctctattgcaaatgttataataaatattttcaagcataaagctttttctctacttcatcatgaacagcataactaaccatgaaaataacatcaaacagtgattttcaccgacagcattctgttgagattcaagacagcacatgtaacctatatctaatctcatttcaccatattaggttttcaacactcattgtttcagtgtgtttcaggatatagcactcattggatacattctgtattgtatcgttgttttccttgtctgcacttatctccgaaataattacaacctttgtttacagcatttctttcttgattcttgtacatttcctggttttaagaac

SEQ ID NO: 717416 - DNA, 322 bp, Homo sapiens
caaaaggaaaagggctttttgagtcccttccaagtgagattgtaaatgtagaattttccactgttggatctagatttttttccttttttttgggggggtggggttacaaacctgaccccttgtccaggcatgtacaaaattgtagaatgtaatttttttttaatatataaaaagcttgtttctacagtttccagtggctataaccaccccggcaattttaggattttttttttaaacataggaactaaaacgggcaagattttttttatataaaataaaaccatttgccttttgtgggggcaaaaaaacaatcaaaaagcca

SEQ ID NO: 717417 - DNA, 482 bp, Homo sapiens
ttgggtggtttattgtcatctgcaggttggagtagtttttggtggatgtgttgggagatttgaatgttacttagctgttattatctctactactttggtagtcaatattgaattttttcactgaatccagccaaacactttttttttttttttggtactaatttcttgaaataatgtattgattagataagagaagtatgttttcagcagttctgtctacagaaaggcttgttctaagaaccatacaataggaattttaaataaatcaaaagccttatattatggaaacatcttgcttatatttattctgttaatctgtaatgtaaagttagattaaaaaaaaaaagacagtgatacaacaataaatacctcccaaaagcaggcatagtcaactctgaatttcaaaggggcttattataggtggaaaaaatttcaacatttattaaaaaaataaagataatttttatagcattatctaaata

SEQ ID NO: 717418 - DNA, 131 bp, Homo sapiens
  misc_feature (85)..(85): n is a, c, g, or t
cgcggccgcgcgacacggctgcgaaagacgacagcaaggggtactactctgtagtggagagtgagtagcctattctgaggaatanaatgcctgaaccctctaagtctgctccagcccctaaaaagggtttt

SEQ ID NO: 717419 - DNA, 1582 bp, Homo sapiens
  misc_feature (766)..(766): n is a, c, g, or t
cgcccttctatgttatgtgtggtgtcgccccattcagtggttttttcgtccgcgggggtgacacgaccgtatttttttgtccgaagaaattggggcgtacatctgtccgggccgcctcctgcgtgtttgtaccctctccgcagggaacgggtaatcttaaacaccgaggggtggtccctgaaagcagtgtgcctccgttcgagaagagatgacccctctacgagggggtcgtctgccccccgcgcttgtgtttgccgctcgttcccctccgaagggctggtccgccccggcgttttcttcgcttccccaatcagaggtgggttgttctgcagaattgcccgccctgtgtggcgactggtactttttcatctgggtgccttacgccttcattatgtgccaccacataatccccgctgtggtccctcacgggcggaaaaaaatgggtttgtttggctctctccccttgttgtgccccaaagtccggggccactgtgcccccgttttcgccgggaacaacacccctgggcgtttgtgaagcgctcccccagacccactgcgccttggggaaggttggggccccccggagttgttccggccttgttgtgttccccgcagagtgcccctcagtgtctctgaagacgcgccaccggaacacacattggtgatactccacgcgtggccttttcggggtaaagaaagagggctgggcacccaccggagaaagaaggtgtttctcaaaggggagccccacgcccacggagggtanccccgcgcacaaggggataacacacacatggcggttgaaagagaatagggcacccctcggtgagcccccccccgcgcgcggagacttttcccgcgcttttgtgagaaaaagccccccacacgggataatctcacagagatgctctcacgcgcctccacgccacgagaaggcccccacggggggaccacactggaagagaaccgcgctctcacagaaagcggggagagggccactcggaaaaaattctcggtctctctagagagcgcctctgtggggacacaatcctctccccgtggcacaccgcgccacgcgtgagagagaggcgcgagattctaccacgagccacatatgagaatatccctctgtacaccactctctgtgctctttggttacaagggtgttccgctcttcgaagagagattgtataaaagccacaccacaagagaaaaataccccacaccaatagctggataagaactccagaaaaagaggaatggggggccagtgccacaccactgctggggcctggcaatacccccttgggcctttttctcggacactttctggtgtggccgcccctgggggcccagagccctctgcccatcctctccccataccttggtctctccagccaaatggccattagccagctgtcatccagaaagactgtggagggacacccaccagaattttggaaacgcacctggacacacacacatattgggaaagaaaagtggcacggcctgtctcctcctgcagggccccccctaagaaagtatttttaaacacactgaaataagtatttttcccctgtta

SEQ ID NO: 717420 - DNA, 441 bp, Homo sapiens
  misc_feature (22)..(22): n is a, c, g, or t
  misc_feature (31)..(31): n is a, c, g, or t
  misc_feature (43)..(43): n is a, c, g, or t
  misc_feature (52)..(52): n is a, c, g, or t
  misc_feature (56)..(56): n is a, c, g, or t
  misc_feature (77)..(77): n is a, c, g, or t
  misc_feature (84)..(84): n is a, c, g, or t
  misc_feature (115)..(115): n is a, c, g, or t
  misc_feature (121)..(121): n is a, c, g, or t
  misc_feature (142)..(142): n is a, c, g, or t
  misc_feature (153)..(153): n is a, c, g, or t
  misc_feature (397)..(397): n is a, c, g, or t
  misc_feature (422)..(422): n is a, c, g, or t
  misc_feature (431)..(431): n is a, c, g, or t
gacatgtacaaatttgcaactncaaaccatnccccagtccagnatacagggncagncgtgtaggtgaccacaccagnagacctncagacctcggtccttctcagaccgttcgggnataggnttccagggcattttttttaantctcagtaggntagcagtaaacttttcagtattgctgttaggcaagtttgtgtttgtccaataggatacccattatactaatgtgccaagtaaatgttcattgcacatctgcttccactgtgttcccacgggtgccatgaagtgtgtgaggagcccctcatctggagggatgagtgctgcgttgactactgctatcaggattgtgttgtgtggaatattcatctacataaattttatatgcacaggaatttcccnttttataaggcaaggaaccatttgnaaaagttanacccacaaat

SEQ ID NO: 717421 - DNA, 101 bp, Homo sapiens
  misc_feature (4)..(4): n is a, c, g, or t
ggtnactctaaggatccccccgccgtacagttgcgggtaactatgcctggcaggcgagacgggcggtggtcgccctcggcggacgcaactggtacggcggg

SEQ ID NO: 717422 - DNA, 256 bp, Homo sapiens
tcccttttttttttccgggggtttccccccggggggttttgccccatcaacccgggggtcagaggggctctttttggccctttgcattaactgcaagatccccctgttttgtttttcccccttcccggccggggcccccccttttttcgggtttttttgaacccgggattccttttcttttttaaaggggggggaaaatttgtttttcccccggcgaaatgttttgtaaagggggggggggttttttttcttttta

SEQ ID NO: 717423 - DNA, 1033 bp, Homo sapiens
gctcctgaaagttagccagtctgcgacagagttcgccttctttagagtgagggaggcgtccagacgatatccatcttgaaatatattatgtacttccacaaatgatggaaagggcgaacattcacggagcgggagtggaggcggaaagggagctccgataatagaaggaggggtcagttccgcggtggggctgggcggtcggagggcgtgggagccagaccgcatgggtgagaagacgttgttccttctagaccggacattagggacatattgtgcgcgttcccgattgatcgtcagtaagttcataaggatactgtgttcccgtcgctacgtcgagatggtgacatgatccctcgttcacataattgagtgaactcgccgtcaggattttattgagtttaagagccttgcagcccagcgaatcgtgatttccgtttaaagtaatagaacgtgaactgataatttgggttatggatgaataaaaacggatacagtagtattaatcaagagtgtgtaggactgtggtaaactcttgggttgttgacccttgtacagcatcgtttgaagcgtagccgggggttgtcagagccttaagaatagtaacctatctttttcgcataaagaacctgaacggggctccaattcgctccctggaaaagaatcacgctccccctccagtttagttcccctggatatggatctcgaagaccctgaagatcttatccactttataaagtgctgatctggtgctggcgtcttttgggaggacaatttggtcgtgggtcagcgtgaacatgataagtggggggcgcggcaaaatgtggacaagggcggggcggcattgaacaaatcactagctttataggaaaagggggcccatatgagaagagtaaaaaaggacaggggggggggtgaaaagggcgagaggggaaagtggcttgggttttgagaaaccccttcggggggaacatgggggaccagaaataaggccggaaaaatgttattgtaccgatttgtggaatctgttaaaagg

SEQ ID NO: 717424 - DNA, 185 bp, Homo sapiens
tcacgaccatgtcaaggagccactgggctatgtttgccattatatcacatcgtcccgttagaaaattccaggactggccagtgcatgttctacaacctcctaggcctcatgatctgtctcgccctccttcgagcctcgacagtgctggagattacaggcgggtaccgaagctcgaacttcagtaa

SEQ ID NO: 717425 - DNA, 166 bp, Homo sapiens
  misc_feature (1)..(1): n is a, c, g, or t
ntatttaactttagaaactttattaggctgtcttgccgctataaagaaatacctgagactgggtaatttatgagaaaagaggtttaattggctcatggttctgtaaggctgtacaggaagcatagtgctgacatctgcttctggggaggcctcttgttgggagctt

SEQ ID NO: 717426 - DNA, 1071 bp, Homo sapiens
ccaatttgttggcctgaagtatgggcctttgttttagtactcggcgatgtatattgttccatcgggtggcaagtgcgctatgttagtgaatcttaagcgtttagtaggaaaagttcgcacgtggtttcggcaggggtacgatttttggtggtaatcgatacgtcatgggacacggtgcgtacgaattcccgtcggcttcttattgccaatttaggaagttttcggcaggcttatgcgtgtccactgtgattggctcatggttcgcccatggcgctcagcgtgtgttccgcccttcgggcaacactggaggctggctggatggccgcaaggcagatctgcggatgtcaatttcttgcattaggtcaagcagatatgaggaattcccacggcatatactgcggcttcgtacctatggggtcacgcacctggcatttctcataagcacagtgtagacttggtcccctggtgcgtgcccagcggttgcgccatgggaggccaggggcatgtggaggcaccagcgagctcaagctccacacctagtggccgcaacgcgttcgaccacgtagcccagcccttgcaggtcagtccgtatcgcggtatcggcacgggcctccatcctagtctccttcgggtcgccagtgtaggtccagacgctgcgagtcctgtcgtgccgcctaatcagctcgtgactcgcgtcagaacagcttatggcacggactgtcatggggccatcaccagcgaaggagacgcagtgcaagccggggcaaggcgggtccacgctatgacgccaacatgcccctacgggagcacccccacatcgtgtgtgtgagtgtagcttgtctctccgctgcagcctgaaaggggtctcgatttgccatcgaagaaagatcaaccgtctacttttctatcttttgtattttgataaacagctgaagtctggagctgttaaaaattatctctggggaaacctcagaactggtctatttggtgtcgtggaaccatcttactgctattcaatacacgattagtaatcaactgttcttgtatacttagtcttcagttttcatttcc

SEQ ID NO: 717427 - DNA, 325 bp, Homo sapiens
ccttccggagccctgttttatagcttatgaaaaaaggaaaagtggcctggcacggtggctcatgcctgtaatcccagcactttgggaggctgaggcgggtagatcacgaggtcaggagttcaagaccagcctggccgggatggtgaaaccccgtctctactaaaaatacaaaaattagccaggtgtggtggcaggcgcctgtagtcccagctactcaggaggctaaggcaggagaattgcttgaacccgggaggtggagcttgcagtgagctgagatcgtgccactgtactccagcctgggcaacagagtgagactctgtctcag

SEQ ID NO: 717428 - DNA, 526 bp, Homo sapiens
aaaaaaaaaaaggacaaaatttagggggggggtggtggcacattgcctattaattcccagctactgggggggctgaggcaggagaattagaatcactttacccggggaggcggaggtggtagtgagcagatatggcacgattgcttcccagtcggggcaacagagcaagactccgtctcaaaaccaaaacaaaacaaaacagggtatcttttatataaccacccccccataataaaatatttaggtgtagatctaccaatggtgtacaccttctatatgaagaagctatagaactctgatgaaagaattcaaagaggactaaaattggaccagatatcccatggtccagggataggaagactcgatataatagagatactcattctccctacctggatatacacttccaatacaacccgtgattattatcccagcaaggtattggggggatatggataaccggactctaaaggttagagggagacgcaaaagacggagaattgccaacagagttataagggagaaa

SEQ ID NO: 717429 - DNA, 277 bp, Homo sapiens
ttgggagctgggtgttgtggcatgtggggtcttggatgaagaggtgggagggctgcactggagtgtccggagctgagtggccgtgcccagtgtgtgctcaaggtgacaatgggtctgtgagttctcatgtggtgctgtgtgcttcctctgtccccgagagaccatgctgcacgctgcttcagcctgctcctccatgcttctcctctggcctcccgctgtgggtggatctctctatgagtctgatcctgcatgtgcatgcaactgcttgtgcgactgt

SEQ ID NO: 717430 - DNA, 518 bp, Homo sapiens
  misc_feature (232)..(232): n is a, c, g, or t
tggcgtcgtataatcgcgaatagttttactgctgtttgattgagggccggtgtatagatgtgtcactctggtttaaacctcatcaagctgtatatacgtgatggcaggtgcgtgtcgtgcatgtagtaacatactattcatataccccattaactcaacaaccccactcctagaattactccacagacatatacacccatgcaaaatgacacattcagagatactctcgttnttactcgttctcacgtgaaagtaaagaaaggaagaacatgacagagacgcgggcgggggagcacagcagcagcagagcagagataagaacgtaccgcacagcagcacacagacacagaacgaacatcagcaaagaaagaaagagagagagagaagaaagaaagaaagagaaaagaaagagagggaaagaaagactgggaacaacctaagagttccccagctggggactattaaataaatgtggcatagcctagagtggaatctatttcgccaacacgcagaacgcg

SEQ ID NO: 717431 - DNA, 435 bp, Homo sapiens
tcttcctcccaataactcataacccgagtattttctatgaggaaagacgtcagacaaattccaatactaggcaacctataaaatacttggcctgtactcctcaaaactaacaaggtcatcaaaaataaagtgtgagaaattgccacatttaaaaagacatgacaacttaatgtaaagtggtatctgagatggaatcttggaacagagaaagggcattgaataaaagctaagaatctctaaataaactatgccattttaaaaataatgatgtgtcaatattggcttattaatcataacacatgtatcatactaatgtaaagtgtcaacgatggggaaactgaatggaaggtatctgggaactttctgtactgtctcctcagttgtttctgtaaatctaccactgttctaaaaaataaagtttgttaaaaagaaaat

SEQ ID NO: 717432 - DNA, 365 bp, Homo sapiens
  misc_feature (20)..(20): n is a, c, g, or t
  misc_feature (74)..(74): n is a, c, g, or t
  misc_feature (112)..(112): n is a, c, g, or t
tatattgtggacgaccttcnttcctcactcgtctaccttctttccttattagtcactttcttaccagtcttccntccttttctgtcttctttccttactcgtctgccttctntccttattagtcactttcttaccagtcttccttccttactagtctaccttctttcctcactcgtctaccttctttccttattagtcactttcttaccagtcttccttccttactagtctatcttccttccttactactctaccttctttcctcactcgtctaccttctttccttattagtcactttcttaccagtcttccttccttactatctatcttctttcctcactcgtccaaccaaataggtagcgagc

SEQ ID NO: 717433 - DNA, 217 bp, Homo sapiens
acttaggctctgtaccgtgaacagcgtggaggaaaagatccttgtggccgcaaaatacaagcttaacgtggttataaaagtgatccaggcgggcatgtttttccaaaagtctttaaggccacgggcgggaggggatttctttaggccctctttgggcttgtggagggcgaatgggcgcgcggttccgtatccccccggttgctgggtttgctgcccc

SEQ ID NO: 717434 - DNA, 369 bp, Homo sapiens
  misc_feature (61)..(61): n is a, c, g, or t
  misc_feature (70)..(70): n is a, c, g, or t
  misc_feature (73)..(73): n is a, c, g, or t
  misc_feature (81)..(81): n is a, c, g, or t
  misc_feature (140)..(140): n is a, c, g, or t
  misc_feature (157)..(157): n is a, c, g, or t
  misc_feature (166)..(166): n is a, c, g, or t
  misc_feature (334)..(334): n is a, c, g, or t
  misc_feature (362)..(362): n is a, c, g, or t
  misc_feature (365)..(365): n is a, c, g, or t
gaaaacggaagtctcgcctctgtcaccccgggctggagtgccagtggtgtgatctcagganactgcaaantgncgcctccngggttcacgcccattctcctgtctcagcctcctgagtagctgggactacgggaacccgnccacgtgcccggctaantttttgtanttttagtagagacggggtttcaccgtggtctcaatctcctgatctcgtgatctgcccgcctcggcctcccaaagtgttgcagtcacaggcaagagccaccacgcacagcccagcactttgggaggctaagatgggaggatcacctgaggccatgagtttgagaccagncctggtaacatagcaagacctccatctntancatt

SEQ ID NO: 717435 - DNA, 204 bp, Homo sapiens
  misc_feature (116)..(117): n is a, c, g, or t
  misc_feature (161)..(161): n is a, c, g, or t
ttttcaaaaaaccggggccgggggccccaatggggcaccccaaatttttggtttttttttaaaacccctaaaaaaaagttgaaaaaaaaaccctcccaagaagggtggattttttnnccttttttttaaggggggccttcccttttgggaccccccttttngggttaatttttgagaaatgggaataaaattgtttctttttta

SEQ ID NO: 717436 - DNA, 97 bp, Homo sapiens
  misc_feature (92)..(92): n is a, c, g, or t
tctgtacttccaagaataagctctgacaacagccattgtttctgcttccactcatattctctgtattaaaatgtgtagagaatatgagtggnaggag

SEQ ID NO: 717437 - DNA, 282 bp, Homo sapiens
  misc_feature (232)..(232): n is a, c, g, or t
attatctatctatctatctatctatctcatctatctacctatctggactatctagctagctacctaccttcctatctcctctctggtatgtcagtagtcatatagatatgatggataagaaactccgggctaagggtgaaactctgaaaagaaacctgtctgccgggccgggcacagtggctcagaccggtaatcccagcacttggggagtccgagaagggccgatcagggnaggtcaggagtttgagaccaggcgggcgtggcaaaaccccatctctatta

SEQ ID NO: 717438 - DNA, 176 bp, Homo sapiens
cccgtaggcctttcctcaaggcccttttctctgcgagatgcagatctttttcaagtcgctccgccggcctctccagctccttcctcaactggtcacactggattaaagcctggttttttcaaaactggcttcctcagatatttgcaaaacttgtatcaccctgttcataacgcact

SEQ ID NO: 717439 - DNA, 1076 bp, Homo sapiens
gcttgctgaccctattccagcccggattctgggatccttccctctgagaccaacatctgtggatccatgccttcgacaccacacccaatggacttccatacactatgacgtgacctggagatcttgccccagtggtgcccattgatcctggtgcacatgtgcccagcaagggggtcctgtggtgcctgagagccagcatggtggtgctgtgagaccatatctagactactaatcattgtgatttactaccggtctggggaacagagcagacggcacagatggggcagaacagactcacctgacgagttgtgtgaccacacacacaaagcacgacatacaacaatgtgtagtgccacgcacagttgcaagatactcgccctgtggtcaagttagagcacacattgtgcccagtggtccaggcggatcgacccataattgcacaagtgcaggtcgcatggtcgatagtagggattgggctacatccttacgatggatccatagaacgacaaagatggagcgattgcattggtccagtgcgttggcattccaccatgccatatacaccacaagggctgacgacgacccaacaacacggtacacagaccatacttgcacgggttacccagacgttggaagtgagcacccccaaacacaagacgctaggaacagtccccgttacacagatcccagcaatgggcaagcgggccccaaaacggggctccagagaccaaagacaccttgaacacacgggaccgaaaatcgaagagccgcgcaccccgaagagccccacgatgggcataaacacgtaacgcacggcggaagcgcgaccatccccaagacgggcacaggaaccacatttgggcaatacgttcacctttcccgaagaggattcaagtgaggaaggaaaacgcgcgaagttgaaacaaccttttgcagttccacgggacataacaagttctcggtggagccccaagtcattggggcaagttcgcgcgtggtccaaagacccaacaacagggccgatgtgcgagtatacccagcgaaaaacggggggcgtcttacacaaagttgagaaa

SEQ ID NO: 717440 - DNA, 384 bp, Homo sapiens
tcctaaccaggtgtccttcctgtagtcagtcagctcagccccattctggcagtatttctattcccaccttggcctataatgaacaagcttggggctacggtctttggacagaggatacttgtactgaagcagcttagatttctatagagggtagcggaggaaaagataaggatgaggctgcttctggaataatggtcatgggaatgaaagggctgttgaaagattagaggccagtgtgcctgggtacagggactggggtcataattatacttggtcttttactagtgccttaggtccaagtcactgaacgggcttaataaaattctggtctgaataatattatgcttggctctttggacttcactggcggtggcagtgaggctc

SEQ ID NO: 717441 - DNA, 687 bp, Homo sapiens
gcctcaccaagtagaacaaatagagcttcttagcaagaaacgaggttcagagacagtggttggcgaggcttgaccatggttccgccagaccagtcccatcaagtgagctggtaagccaccagcagcctcctcaggagaatcactggatttccacgtatgcaatcagccctattgacgaatagtcagtggtgtgtcatcgtggaggcgtcccgtggtgctagaggcttgatgaatggataccggggccctgccaatggattcagaggaggatatgatggtaaccggccttcattctctaagcactccaaagcagtggttatacacagtctcagttcagtgtctccccgggattactcgtggctatcaacgggtatggatatcagactagaatttcaagcagaggctctgggacagagtggaccacggtggagccccatcgaggtcgctggatgggctcgcccagagaaccaacagagggatgccgcaaatgaacactcaggcaagtgaattaatctgattcagaggatgatgtgtaatcgccaaaaacacactggacagtgtagcataatatgttaccagaagagttattatctatgtgttctccctttgcaggaaacgttatcgtaaagggactgttttgcatcccataaagacgggagtacgaattgtcagtttctattacctgga

SEQ ID NO: 717442 - DNA, 824 bp, Homo sapiens
tggagacggagtctcgctctgtcaccaggctggagtgcagtggcgcgatctcagctcactgcagcctctgactccctagtttcaagcgattctcctgcctcagcgtcctgagtagctgggattacaggcacttgccaccaagcccaggtaattttggtatttttaatagagacagagtttcaccatgttggccaggatggtctcaatctcctaacctcatgatccacccgcctcggcctcccaaagtgctgggattcacaggcttgagccaccatgcccggccagtttttgactgttttttaaactcacgtgtgtcaaaggtcacatctttctctgcttgctacatgggcttcccctttttaacaaaacactatgattggaccctaacgaattcatcattttattaaatatcaccaacatttttaagcgatgcgaattgtctcattataagatttttcatattaatgcaacatagtgaacatacttgccttaatgtcttaatacatttgacctcttgtcttctgacctcttgtgagtaaattacctgagatctgctttccctgttgactccagtttcaggagtctgcaagttctgttcccagatgtgactgatgtactcttgtgtcctgaggatacgctcctgtgttacaagggaacggcagtcatgggggattgccttgtagtccgtttctaattgcccctttgattataccagggtttgatacgtcatttacgtataacttacagccataccttgacgctttcatctccaagttctctaagtgcattcccccaattcctttgtccacatgctgtaatgtccc

SEQ ID NO: 717443 - DNA, 150 bp, Homo sapiens
  misc_feature (150)..(150): n is a, c, g, or t
gactctacaggatcttactcggtatcccacccactcccaaggcgatacactccttctccaccaagtgaaggctaagcaggccgggatgatggcaacgtgtgcttttcttgctctctcaccctccttgtacctggagctcaccaccagggn

SEQ ID NO: 717444 - DNA, 856 bp, Homo sapiens
  misc_feature (40)..(40): n is a, c, g, or t
  misc_feature (69)..(69): n is a, c, g, or t
  misc_feature (97)..(97): n is a, c, g, or t
  misc_feature (103)..(103): n is a, c, g, or t
  misc_feature (105)..(105): n is a, c, g, or t
  misc_feature (122)..(122): n is a, c, g, or t
  misc_feature (138)..(138): n is a, c, g, or t
  misc_feature (143)..(143): n is a, c, g, or t
  misc_feature (152)..(152): n is a, c, g, or t
  misc_feature (172)..(172): n is a, c, g, or t
  misc_feature (177)..(177): n is a, c, g, or t
  misc_feature (200)..(200): n is a, c, g, or t
  misc_feature (215)..(215): n is a, c, g, or t
  misc_feature (219)..(220): n is a, c, g, or t
  misc_feature (223)..(223): n is a, c, g, or t
  misc_feature (239)..(239): n is a, c, g, or t
  misc_feature (250)..(250): n is a, c, g, or t
  misc_feature (261)..(261): n is a, c, g, or t
  misc_feature (286)..(286): n is a, c, g, or t
  misc_feature (295)..(295): n is a, c, g, or t
  misc_feature (304)..(304): n is a, c, g, or t
  misc_feature (317)..(317): n is a, c, g, or t
  misc_feature (328)..(328): n is a, c, g, or t
  misc_feature (354)..(354): n is a, c, g, or t
  misc_feature (390)..(390): n is a, c, g, or t
  misc_feature (420)..(420): n is a, c, g, or t
  misc_feature (504)..(504): n is a, c, g, or t
  misc_feature (638)..(638): n is a, c, g, or t
  misc_feature (711)..(711): n is a, c, g, or t
  misc_feature (793)..(793): n is a, c, g, or t
  misc_feature (815)..(815): n is a, c, g, or t
gtgatttgattaaagaagacagacaacaagtgcttttatnaggaacaacattctgaatactcacgagtngttatcttgcacacttaaccctaggccngagggngnggggccaccacacaggnggaggataccagggcngcgtncatgttgtnttgcttataccacaggaggngtggnggctgtttttttcgtgggtgcgnctactacgtctatgncctnntcntgtcattcaataattnctccgcctttntgatgtccccnataccaactaatcaacgtagttgtnctggtggcngccgctgtngggggccggtganctgtcacatangcgttccatcatgtcgccgcttttgntggtgctttgcggtgccctccctttgctgttttcgntggtcggcgggtgctgtttgctggccaccngtgtcgcatgtttttacttcacataaatgtattacactgtcctaggagagcaaatgcatattatgtgggggaaaaataggactnattatctcgtaccacaaacaggggttacagaaaacacaaggctggacaaggccacactgagacaggttagtgacttttctggcaggcccctcataggcactgagatgaggcctaaaaatatgctggggtgagtnccgtccttccttctgtggttaccacctggattaggcttcctgagctcggtcggtttttccctgtgatccagtnatgggaagtttcaactaggaattctaagggtgttcaggagctgaagtcagcctcaggcattgatttcctgttcatcggggtntccagggtaaccgggagcacancaatggcggctgccccgggcggcatgcgctggttcttcccc

SEQ ID NO: 717445 - DNA, 626 bp, Homo sapiens
tccagtgctagaggcgacgaggtggtgtgaatgttgaagaggtcttctcccacctgggtcatatgcatttgaccgagcgggcagatagagcggtagtgcagcagggtgccagtgtgtgtgctcgcagtgcggggcaggtgcctggagagcatggcagcccctgggagcctctgggccaggaagggcgatgtgcactgcaagtgtgccgtgtagcaggtggcctcatgctcagttgtgttcgactaggtgtcccgaaaggcactcactgtgtgtaggggatgttatgcaacacacggcgggaagccctgaatgcagttatctcagcaagcgtgtatcagaccccgacgtagccacatacaggttcaggaagcctcacaacagtgggcagcaatgaaccaccaacagcgacgcgccaaggaccaggtgggcaagtaggcagcctgcaagggccaagggccgatcatgggagccctaagcggccagtcgcaagatcagggagccaccgtaggaccgaataggaaaaagccagaaagagcacggcggcggcaaccgggatgtgcagcgaactcggaggacacctaccaccacggtcaccgtggtcttgagcaacgacccgttagagggac

SEQ ID NO: 717446 - DNA, 411 bp, Homo sapiens
ccgctctcagggctagtatctctggttgagaatatcaaggtgtcttctaatttccaatcattctccaggagcccagttatcattatcatgggtcactccctctgaaaaaaaaaaaaaaccaaaacggggtttggcttccccaccaattacgggatgaagccaaaaattcttaaaagcttcgctaattcaagcgggtcagctttatcaccgtgtctccactccaagaaaatatcccaaaggcaccgtgcatgcttccagatctatacacaagagggtacctcggcccagagcacccttcaagtcttctcaaacgggaacgctccaatttcccttcaagactcacaaatcggtcatctcggcttcagaaagagacacaacataccaggtccccccagacttggtaaaatagcc

SEQ ID NO: 717447 - DNA, 173 bp, Homo sapiens
tagaggaccccggtgggtaaacatccacattggcagtaggttccagtatctagctttaattaatttttagcaatgacattaacaagatttggccaggttataaaaatgagggctttctggagaattacataaagtacaagtttcccggctagggacatactaaaggtgctgaa

SEQ ID NO: 717448 - DNA, 118 bp, Homo sapiens
aaaaagccctgggtggggggggggggggtaatggcacagggatcccccattttattttggggccatccctgacttgccttttgtttaaaaaccgcctattaaatgtttttttttgaga

SEQ ID NO: 717449 - DNA, 239 bp, Homo sapiens
tctctgcgttctactatgtgatgacaccgaagttcagaaggtcatggaagactgtatgaggctgcatgtgaagttcagagtgctacgggaggagaacaagcagttcacggaagaagatggactgcggatgaggaagacagtgcagagcaacagccccatttcagcattagccccaactgggaaggaagaaggccttagcacccggctcttggctctggtggtaacgtgctttatcgttg

SEQ ID NO: 717450 - DNA, 1136 bp, Homo sapiens
gcgtgacgcgtgggtcgacccacgcgtcgggacaacatacaggaagccactgccaatgagctccgccgagatagcacctgtgggctagggctagctgcttaaaggagccgcgacccctttgcagaccagagggtgacccgtgatgatggctggcggtgctggcctagccctggccttgtggctactaatgccaccagtggaggtgggaggggcggtgccctcagacaatccaggacggtgagttcacgatacctgttgccgtgcggggaggaagcagtgtttctaccagtccgtgccggtcaaagcaagcctcgagaccgaataccatggtgatcggaggtgctggactggacgtggacttcaagactggagagccctcaggacgtgctgtaggtcagacgagtcccgcaaggctgatggggtacacacggtggagccaacggaggccgcggactacaaactgtgccattgacaactcctacagacaccatctacagaaaagcatggtgacctatgaactgctctatgacagcctccagggatgacgaaggaagctcgaacggatgagacacagctgcggacgccccgaagcacgcatgcttgacatgatcacgaattgcgaaggacattcacagaacagtaacactagagaaccaactgaataaccacagagaaggaccgcaaacactcacagaatgccaacagcaacaagtcaccacccatcacaaagagcacaatgaccagataacatgtcacaaactcaaaatagtacatatatgataaagtataagaataaaagaaaaaactgcgaggcagaagcatgatagaaagaagaaagatagacaaaccaatcaatatccagaataaagccattacaaagaacacagacaaacagaaaatgacaaaaagaaaggagcagagggggagagaaatacgacgctggctagacaaaagaagccagagaaagaaagcgaaagccgactacaagaaggaagactgaaaggtcagaggaaacaacggaaaaaacagacaaagaagaggaaacaaagccagcaaaaaggacacaacgctacaaagcaacgaggaacacaggggcaacaaacgtccggacacgccgacgcaaacgagaagaaaaa

SEQ ID NO: 717451 - DNA, 367 bp, Homo sapiens
aatagagaccagtaaattgtatagcagtgttgaatatttgggttcgggtggtttctattagaattatggtgagctcaggtgattgataatcttgatgcgaagtaataagggatgtgttaaggagtggacttctagggaattaagggggttgatgccttttgggggccagtgccctcctaatgggggggtaggggctaggctggagtggtaaaaggctcagaaaaattcctgcgaaaaaaaaaatttctgaggtaataattagggatttatcccgtattcgaaggcttttttggacaggtggtgtgtggtggccttggtatgtgctttctcgtgttacatcgcgccatcattgcaacacggtctctca

SEQ ID NO: 717452 - DNA, 131 bp, Homo sapiens
ggtcctttgaaaggaaaacccccttttttgggaccccccggttttttttaaaaaatattttgaaataaaaggaaatttttttagccctccccccccaggaataaaaaaaaacttttttttttgttcctgga

SEQ ID NO: 717453 - DNA, 269 bp, Homo sapiens
ttacatcacagaggcgccaccagaagtgccggcctagctcttaggaagaagtaatagagtttttggattcccaggcaagatggcagaacaggaacagctccggtctgcagctcccagtgagaccaaggcagaaggcaggtgatttctgcatttccaactgaggtacccggttcatctcattgggactggttagaccgtgggtgcagcccatggagggccagcagaagcaggatggggcgtcgccttcacctgggaggcgcaaggggtca

SEQ ID NO: 717454 - DNA, 115 bp, Homo sapiens
aggatggcatctgcgtcagagtgattcagtcccctttcttagtatcgtgtggtgaatcagcactttcctcttctgcctattctctgcggtacccgtagctcgatacttcgttaat

SEQ ID NO: 717455 - DNA, 711 bp, Homo sapiens
tcgagccgtggcaccggaatcgcctgacactgctgcctccagctagttatttcgctgcctcttccgttcttcaccgccgtacaccttggtaggtgaacttctcaccgtgagtggctgtaaatgactcgttgtgaagaatggagagccaagataccaacggaagtcttctcaggaatggtgaaacagtatatcatttcagaggagttaatttcagaaggcaaatagtggtgtcatgcttgtaacaaacaacgtatatggatcctactggttaaactagaatttgggaatcagtgaaacgtacaaaccgaggaaagagcagactgcgcgatggtgtctggcggtcatccccgtgctgcagagaacacttcatctatgtagttgtatcgttctggtgaatacatgttccgaccaccaatgggtgggctactgcgtagagttccctgcaggtctcatagatgatggtgaaacccctagaagctagctgctctccgggagctttgaacgaagaaaggtggctacaaaggggacattgcgaatgttctccagcggtctgtatggacccaggcttgtgaaatctgtactatacacattgtgacatgtcaccattaacggagatgatgccgaaaaacgcaaggcgaagccaaagcatgggaatggaaagttgtggaagtcatttctaaacccaagaatgactggtgcaagacttgttgc

SEQ ID NO: 717456 - DNA, 205 bp, Homo sapiens
  misc_feature (143)..(143): n is a, c, g, or t
  misc_feature (149)..(149): n is a, c, g, or t
aacaagtccagaaaccccaagatgtctgtagagaatggttaagttgcgttaatacctttgtcttcaccattcctgatgaagagggaaagggtagcacccccaatcactgcatgggctcttttgtcggagttaacttctaaggntttctncctccaacctttacgcagaacacaccaaatttgagtttctatctcaaacatagaga

SEQ ID NO: 717457 - DNA, 489 bp, Homo sapiens
aaacagcaggatctgaatagagtacggaggatcacccaagtcagagtaccaagggccatggtcaagattccccggggacatccctcatcagatccacccattaaagatcattgtcacccagtggagagtggactaggtgggtgcactcaggtgtggcctggacagcattcgggacgggtcctagtggttagggtgagggtcaggttgcattatcgtgaaggaggcaagtggcagctgaggcagatctgagggaaatgataataacgcaggccggtgatgcaatgggtttggtaagaagaggaaagaggtttgtggtggattccagtgtttctaatctgaggcttgggtgaggtcattaacaaataagaaagagtacatgggcataaatggctttaagacttaggaacctgaatgtgctattggagacagtatggggcacgtcattgctcatagacctgcagtacacaaaatgctaaaagatttcactct

SEQ ID NO: 717458 - DNA, 313 bp, Homo sapiens
attcgacgtgacatgctgttcgcctcctaaaagaacaccatgtgccaagcagaatgaacgcaatggagctgcatggaaaagaggatggctgatgaggctatcactgcagcgacctgcctgacagaagctttggtggatcacctcaaatgtggtgtgtggcccagtgcctacattgaaccatgatgtgaagctggaccatgatggtgaatgaccctatatgtgtccagtgctgcccaaatttgccaatgcagacatggccatgtgtgatctgtgaattgggttgcatggtgtacctgagcatcgaattctgtaa

SEQ ID NO: 717459 - DNA, 171 bp, Homo sapiens
cctggcgggagtgatgaagtatcgggtccttagagggttgcgtcacgtgtggggcatttgtgtccgagaccggcacgccaggaccattggccgccgtggccgcaccgtgggtgtgaccaagaagaaataagtctgtaggccttgtcttgtaataaatagtttttatcccta

SEQ ID NO: 717460 - DNA, 411 bp, Homo sapiens
tagactagcgtctctgcagtattgcgtcacgagtacactcaatctcatttcccctgagtatgatacgcgtcaaatatccctgtctgtcagtgctatagagggtctgtgagtcccggatcacttgtcagtgctgaccatgaagtggactgtccctatagtatggtcttgatcggtctcagcaatcgagctcatctggcgtcagctggattgatcttgtatcaaccatttccccatggcgtccgactcattctgaggcagagtggatgtcgcttccaatggcagcgtcgctacaggcagtatccgccaggtggttgtcaatgtagtcggtcagttcgggcattggactgcatgtggcgctactcagagagcgatagcagggtcctcggactgagctatagctgacgctgacgg

SEQ ID NO: 717461 - DNA, 865 bp, Homo sapiens
  misc_feature (103)..(103): n is a, c, g, or t
gttagaaagaatgctgtgatttacctataggcaaaagtttaaatgccttaactgtagacaaaagttaaaatatcttacttttttaaaaatttcattgccaaantgctttcccaaagaatgtgccaatatgtgaacatggccatttcattctaccttccccatcgttggttttttttttaatggctggctattttaatagtgaaaaatgatgtcacatttttatggcatttctcaattacgtggtgggccatattcccatatattaatcatagtatttggtatctggtaaacattcttttaatgtccttggcccatttattcattgacgaatttcacagatttttttctcatccgttttatgagctccgtgattaacaacctcctttatagcatcttattggaatattttaatcaggctggttgctttcagcataatggggattcggtatagaccaatctatggataatttcttggtgatggttcattatttctaattaaatagccttccacctgaagacttacaaatattttgaaattcttcggcgggtctaatgacttcctggtccaggtttcctttcacttggtcacgggtatcacttgcaagtgagtgttaccctgaaccttttttcccaatttcctcatctcatttatggagtctttcctttcccttgggtccggattctcctttccacagtctaacactggttttggagaaaattacgagtgttgctaaggccacggttgctaacccctttaatcggataatctcaatctactcctgcaaaaacaacctgtgtagggacatagagacaccggaacctaaatacggtgaaactgacacagctagcaagataagcgttgccc

SEQ ID NO: 717462 - DNA, 1212 bp, Homo sapiens
gaataaatttcattgctaggtgatgacaagcgcatcaggaggtcaacataggacaagcatcagacatggagggaaaagaggccaaagctgctgatactgtcatgcggcctgtctggaggggctgaggcttcgcgcctcggcaggctgcagcaggaggcagggtaaatcggtcaggcactacaggtctctcccgattccgcagacgtaaaccgttccccctcctgccagggagcagcaatagtcgtaggcaagtcgagcacggtgccttgtgcacctcgtaggttagacactctcttggaggttcgcctagctagttagctcattatctcatcgttccggtggtccattgccggatagcaccacatgcactagttcgtcaggttccaccgagggtacctgtgagactaggggacaccacggcatacgacagacccagaaggatacacgggtcccgaacatggctagactatcctggcaagcccgtcttcattactcgttgcacagggccacaagctagacccccttggaggggagttggatagagcacacataggtacttgatgattaccatgggcgagcacaccaatatctgatcagccgcactgaggcgggtcacgacttggaaacagagtcccagatcaagatggtaccacggcgaacgccctgggccgatgaaaaggcgtgccattggttgaatcgactacattgggtcatttcttccgacacactccccccaacggatagcgcgcttgggtacaagctccaattggactcctttgggtcattcgcggatggggtagaacacatcgcctgagcggatgacatacagctagggccgcgcacagacctcccatttgcggcttggacagcaggtggcgatgccaaaacaccttaaaaacaggggttaccctcagttcccatgccccctctcctgtaacacagctaccttcccattttgtcgcttggctcgtgagccagaggcgttgcgggccccacagggcgaccaaatgtgattcgcaccacgagagccaccttcgggcctgaatgtttggcgcaccccacaacttagcacagcggacaactcagattaccacaacacaacatgtgccaacgctcaggaaatatccatctcctatcacaaaccacttgggagacagagggcgtcgatacacctccacacaatagactagcacgcactcagcattgagacag

SEQ ID NO: 717463 - DNA, 710 bp, Homo sapiens
  misc_feature (331)..(331): n is a, c, g, or t
ggagagaactagtctcgagttttgaggtgtgtgtttcctatttatacaaatttttttattatatttaattcaggatgacaagccatcggggggtcaacaacacaagcccagacggagggaaagaggccaaacggctgaagtgtcagcggccgtgtcgggaggggctgaggcttcggcctcgggaggctgaagcaggaggcagggaaccggtcgaggcatacgggtcctcccgatccgcagagataaacctccccctcctgtgcaggagagcaaagtttgaggaagttgagagggccttggtgcaccttgcgggggtaaaacctcttggggngttcgccagtgtgatagcctcattatttcagtgtggggcgtcaatgcgcgaacacccattgtaacgtgttgtagttccacgagtgacgtggggcagggaccatgtaaggaaagccaggggaaagggctccgacagtcagcatcgtggaccctctcaataggtggtgaaggcaggatagcccttgggggttgtgttgcccttgtcggggatccggggggccccattggtagccacggggggtcagcttgtaggccgtcagggtacaggagcctggcgtgaagctgcttgtgatgataagggacttctcgcaatcccaagaaggggttgtcagccagtgatctgggcaggggtggggacactccggggggggaaaacgggg

SEQ ID NO: 717464 - DNA, 757 bp, Homo sapiens
  misc_feature (498)..(498): n is a, c, g, or t
tctctcactcgctctcgctcactctctcgcgcctggcatctattgcaaatctcaaaggccctgcatggaccaccatggcttatgatgactccgtgatgaaagaagattgtttagatggtgatcatacctttgaggacataggatttgcagctggccgaatccaacgagagaaaaaacgtccttactaaagattttttaagggaagaggaagaaattgctgctcaggtcaggaattcttccagagaagaagttgagaggatagtgaactttacttcattggggacaggaacagagcagagaagaagaggaagcactcctctgatgattactactatggagatatttcgtcgttgtggagatcgtcgacgaggagaggaaacgagagaagaagagtccagcccacaggtctacgtgatacagctataggacctgcttgaaagcgtatcagatccccacgtgacagcagagctccaatgccctccaaagaagactggggangaaatcctctgtgctcttcaagccattacggagagtaaaaaggagcaccacaggaacgaaaagtcagtggcaagcagcggggaactacccctagaggatggtgtctcccacaaatcgcacaaaaatgaaacctctctatgtgaacacagagacactgtaccttcgggagcctgatggttagagaagtgaagacttattctgtcaccaaaggagaagggaagcagctctgttgatgaggagtcttttcaatatcctccca

SEQ ID NO: 717465 - DNA, 1376 bp, Homo sapiens
gctcaccctggaagtaacccatcgagcacgggatctgtccgctaagctgggacagacgagtggagaaaatctgggaccagcaaccttctacaagttgagtctgcgatgtggcgtcccggaggtagtcactctccggtgtctgtctggaccgaggacccccactgtaacgctcgcgaaggcacatactcgcgatgaacgaatgtagcccagatcatagtttgtagacctgtcaacatcctcgagccactgattacgctattgacatatccaagaggcatggtagcctagtccacgtgatacctgccttgcttgggccaggtatccgacgtgaggacattgctgttgactgtgagcatcacaggcttgtagctgtgggttctacacgctagctatcatgatgccctcactcgtaacagaagggtgggctactagcacgcgtcctcgctcgactggcacagtttccctgcctggtcttgggcaaccttgggacgtcgcgaacactgcgggaaactctttgcatcgttgaccgtatctcctacattcgcataggatacccttctaacacgtaagaccgccgggacttaccaagggctattcacctctacccgaagctgaggccccggaacggcggggtgacaatattgctggtggctgatcgtagactttcacaggggagggataggactcgttgccataccggttcttgcacctgtggtaggagctattccgtatgacctagtggaagactcgtgaccccattgtggcgattgtcgttcccatggtctcacattccccattgagtatgcatacgcatgccttagctggactgacgttgcccgtgaggacctgtgcgccacaggtgtccacatacaagcccaaattattgcgccaaatgtgggatagcctgcggtctctcccagggttggccccttttgaaacgtgcgatccgtcctttgttcaccatagcgctcgttgtcccctgttctcatttggggggcatttgtgggaccgtttccgtttggttgtggcaaattcccaatttgaacaacaagttaacactttttccaaactttcgcgattacgattcgacacgggttgtttgaactcgttggtgaaccatttcctccggccaaaaaggaatccccttggtgaacacgacccaaatctagcgaagtgtggcctatggtacttgagacggggtgagagccccaccccaattgtgtaagccccctgggggggaatgtgggcgcgagacggagagattttgcacggagatgtggaaatattatcacttcgggcccctggggcgacccccagagagtaacattgggagcactccaacgaaacacatttgtgtgtcatcaccttaagaggcg

SEQ ID NO: 717466 - DNA, 161 bp, Homo sapiens
tactatccctctcatttttcattttgaagaaaggtaagaaccctgttaccctccaatgttgaattactgaaggtcaaattctagtgcctataaactttgataatgtcttataatttactattttttacaggtgctacagttttttgtttgtttgtttgttt

SEQ ID NO: 717467 - DNA, 1530 bp, Homo sapiens
atcgccaatcaggacggctcgttctacttcatggagatgaacacccggctgcaggtcgagcacccggtgaccgagatgatcaccggccaggacctggtcgaatggcaactgcgcgtggcgccggcgagccgctgccgctgtcgcaggagcagctccgcatcgacggccatgcgctcgaggcgcgcgtcctacgcgagaatcccggacaagcagttcctgccgtcgaccggcacgctgcgtactgacctgcgcgacgcggtccgagtgagttatgcgggcgaagacgtgcacgaccgcggtggatgtggcgtccaggatggataccatagacatatcatatctgatcagcccgtattacgaccgcattgattgccaagctcatcgtctggggcaaggatcgcgacgagctggcgcgcatgcggcaggcgctcgccgcctatctcgtggtcggcctgtcgaccaatatcgccttctgcagcggctggtggcctcggagccgttcgccagggcggacctcgacaccggcctgatcgcgcgccatgaggccacgctgttcgcgccaccggcgcggtcggcatggagctgatcgcgctggcggaggccgcgctgctcgacgccgagacgcgcgaagggatcgatgccgcggatccacattggccatggacccatgccggcccgtggcggctgaaccgggcgcgcagcgggtgctgcttcgcgcatggcaccgacacgctggaggtcacgctgcaggcgcacgcgcgagggcaggcacgctgttctatgccgaccaggccgcgccgttccgcacgcattgcgttcggccgacggaacggtccaggacgatctcggcacgcgccggcgcgcgaacggccaggtgcatcgcgacgccgattcttccatgtgttcgccggcggacgcacgtcgcgctggaatggcaggaacccgtggcgcaggtcggtcaggtggatacgtggatattcttgtgcttgatagggagtttatgagtaccaacactatcaactccaccacgacgagcgcaatacccagcgccaacttgccgttatggtccaccggcgccaccgtcacgcgcacgccgctgctgtgatgagcgatgaagatgacacaccatcagcgcccgcacggcgtcgtcggcgaagtgctgtatggggtcggcgaccaggtcggcgaaggcgagcagttgctcggcttcgaggccaaggcgggttgaacttcgcgggcagggcgtgcggtacttgcgttgcgaaatgcaagattcgcttgccttcccgcaagccggctgcggcgtcgcgttgacaatggcccgatgccttgtcttcgcgaggcgggtgcccgggtgccccgcctgacatcgagcccacggcatcggcgctcgggttccccggggcgggcgccatcggcaggtcggcaccggaccgcatggcttcgcggcacgaggaaatcctcttcggcacatcctgagtttcccatgccccgatcaccctcgacgcctgcgcaccgccgccatgcaac

SEQ ID NO: 717468 - DNA, 759 bp, Homo sapiens
  misc_feature (15)..(15): n is a, c, g, or t
  misc_feature (17)..(17): n is a, c, g, or t
  misc_feature (19)..(20): n is a, c, g, or t
  misc_feature (22)..(22): n is a, c, g, or t
  misc_feature (325)..(325): n is a, c, g, or t
  misc_feature (437)..(437): n is a, c, g, or t
  misc_feature (481)..(481): n is a, c, g, or t
  misc_feature (484)..(484): n is a, c, g, or t
  misc_feature (489)..(489): n is a, c, g, or t
  misc_feature (505)..(505): n is a, c, g, or t
  misc_feature (509)..(509): n is a, c, g, or t
  misc_feature (512)..(512): n is a, c, g, or t
  misc_feature (518)..(518): n is a, c, g, or t
  misc_feature (524)..(524): n is a, c, g, or t
  misc_feature (545)..(545): n is a, c, g, or t
  misc_feature (548)..(548): n is a, c, g, or t
  misc_feature (550)..(550): n is a, c, g, or t
  misc_feature (555)..(555): n is a, c, g, or t
  misc_feature (559)..(559): n is a, c, g, or t
  misc_feature (561)..(561): n is a, c, g, or t
  misc_feature (569)..(569): n is a, c, g, or t
cggacgggcgtgggncnanncntgactattctctacaaaccacaaagacattggaacactatacctattattcggcgcatgagctggagtcctaggcacagctctaagcctccttattcgagccgagctgggccagccaggcaaccttctaggtaacgaccacatctacaacgttatcgtcacagcccatgcatttgtaataatcttcttcatagtaatacccatcataatcggaggctttggcaactgactagttcccctaataatcggtgcccccgatatggcgtttccccgcataaacaacataagcttctgactcttaccnccctctctcctactcctgctcgcatctgctatagtggaggccggagcaaggaacaggttgaacagtctaccctcccttagcagggaactactcccacccttggaagcctccngtagacctaacccatcttctccttacacctagcaggtgtctccntcntatcnttaagggggccatcanattntcnatcacnaacaanttatcaattataaaacccccntgncnataancccnantaccaaangcccctcttcgtctgatccgtcctaatcacagcagtcctacttctcctatctctcccagtcctagctgtggcatcactatactactaacagactgtaactcaagacaccttcttcgacccgcggaggaggagaccccattctatacaacactattctgatttttcggtcacctgaagttatattcttatc

SEQ ID NO: 717469 - DNA, 1490 bp, Homo sapiens
atcgccaatcaggacggctcgttctacttcatggagatgaacacccggctgcaggtcgagcacccggtgaccgagatgatcaccggccaggacctggtcgaatggcaactgcgcgtggcgccggcgagccgctgccgctgtcgcaggagcagctccgcatcgacggccatgcgctcgaggcgcgcgtcctacgcgagaatcccggacaagcagttcctgccgtcgaccggcacgctgcgtactgacctgcgcgacgcggtccgagtgagttatgcgggcgaagacgtgcacggccccgccggcgtgcggatcgattcgggcgtgcgcgagggggatgcgatcagcccgtattacgaccgcattgattgccaagctcatcgtctggggcaaggatcgcgacgagctggcgcgcatgcggcaggcgctcgccgcctatctcgtggtcggcctgtcgaccaatatcgccttctgcagcggctggtggcctcggagccgttcgccagggcggacctcgacaccggcctgatcgcgcgccatgaggccacgctgttcgcgccaccggcgcggtcggcatggagctgatcgcgctggcggaggccgcgctgctcgacgccgagacgcgcgaagggatcgatgccgcggatccacattggccatggacccatgccggcccgtggcggctgaaccgggcgcgcagcgggtgctgcttcgcgcatggcaccgacacgctggaggtcacgctgcaggcgcacgcgcgagggcaggcacgctgttctatgccgaccaggccgcgccgttccgcacgcattgcgttcggccgacggaacggtccaggacgatctcggcacgcgccggcgcgcgaacggccaggtgcatcgcgacgccgattcttccatgtgttcgccggcggacgcacgtcgcgctggaatggcaggaacccgtggcgcaagcgggcgatgccgaagtcgaggtgcggcaagctgaccgcgccgatgccgggcaaggtgattgccgtgatggtcgagccggcgcggcgccaccgtcacgcgcacgccgctgctgtgatgagcgatgaagatgacacaccatcagcgcccgcacggcgtcgtcggcgaagtgctgtatggggtcggcgaccaggtcggcgaaggcgagcagttgctcggcttcgaggccaaggcgggttgaacttcgcgggcagggcgtgcggtacttgcgttgcgaaatgcaagattcgcttgccttcccgcaagccggctgcggcgtcgcgttgacaatggcccgatgccttgtcttcgcgaggcgggtgcccgggtgccccgcctgacatcgagcccacggcatcggcgctcgggttccccggggcgggcgccatcggcaggtcggcaccggaccgcatggcttcgcggcacgaggaaatcctcttcggcacatcctgagtttcccatgccccgatcaccctcgacgcctgcgcaccgccgccatgcaac

SEQ ID NO: 717470 - DNA, 846 bp, Homo sapiens
  misc_feature (15)..(15): n is a, c, g, or t
  misc_feature (17)..(17): n is a, c, g, or t
  misc_feature (19)..(20): n is a, c, g, or t
  misc_feature (22)..(22): n is a, c, g, or t
  misc_feature (325)..(325): n is a, c, g, or t
  misc_feature (437)..(437): n is a, c, g, or t
cggacgggcgtgggncnanncntgactattctctacaaaccacaaagacattggaacactatacctattattcggcgcatgagctggagtcctaggcacagctctaagcctccttattcgagccgagctgggccagccaggcaaccttctaggtaacgaccacatctacaacgttatcgtcacagcccatgcatttgtaataatcttcttcatagtaatacccatcataatcggaggctttggcaactgactagttcccctaataatcggtgcccccgatatggcgtttccccgcataaacaacataagcttctgactcttaccnccctctctcctactcctgctcgcatctgctatagtggaggccggagcaaggaacaggttgaacagtctaccctcccttagcagggaactactcccacccttggaagcctccngtagacctaacccatcttctccttacacctagcagggttctctatctaggggcatcatcatcacaaaatatatataaacccctgcctaaccaatacaaagcctcttcgtctgatcgtcctaatcaagagtctatctctatcttccatctagctgtgcacactatatataaagacgaactaaacacttttgaccgcggagagagaccatttatcacactatctgtttcggcaccgagttattctatcacagttggatatccatggcattattcggaaaagacttgtctaggtgcgcgtgaacatgtcagaatgggaaaccatatcggaaaagtacagaattccgaataagaacaggaattagccacagaatatagtgggccgtttacggcgtacccacccaggcaagttg

SEQ ID NO: 717471 - DNA, 193 bp, Homo sapiens
cgaccggttctcatcacatctgtcagaatctgctaacagtacaagaaaacagacacctattaaattaattaaactggtaagcttgtccttaagacagcaacctgtctgagggtccttcagaaagccccatttacaatttcataaaacttgtgttcggattgacaccttggtaataacgggtaaacatcttcac

SEQ ID NO: 717472 - DNA, 229 bp, Homo sapiens
  misc_feature (23)..(23): n is a, c, g, or t
  misc_feature (58)..(58): n is a, c, g, or t
  misc_feature (103)..(103): n is a, c, g, or t
  misc_feature (116)..(116): n is a, c, g, or t
  misc_feature (137)..(137): n is a, c, g, or t
  misc_feature (201)..(201): n is a, c, g, or t
acagaagccagagctatgtgttnattattccccatctagtctctccctccatctcagnaggaacccctttcttggctagttaaccctcaggtgttcaagaggncatatctctcatngggagaggtcaaactgggtgntagggcaagagctgtggctttcaaattataatacccttttctatgttaagagtggttgtgtccncacaggttactgctaatactggctgaat

SEQ ID NO: 717473 - DNA, 723 bp, Homo sapiens
caacacccggtaccctcaaactggtcaccgtgaaaacccccccttgttctcggtaattattcgaccccccctttattttcaccctgcgcttaagttgcatcattacttcttgtgtttttaaaaaccccgtttgtcactcccatcatcatgtttgaccccacctttttcaaatgacaccccccacccggggtgcttcttaaacaagcgcgcctctcttattatcaaaagttatataaataatataggtataccacccccccaatttcaattctaaataggatcccgtctctccacggatccccattagtacaacaacccgtcttcctaccttcaattccttgaaaaatcaaaggcttcttatctattagggaggattcttcctaccgggcatttttatcaaatgcaccccgccccgtcttagattattctaaacaatgttaatgacaccccccccccccccctttttctccgcgttattattattctagctctatgaccacaatctattgcgagtgcgtcttctctccccccaccgtcatattcgaaggagtggtctattttatcaacaaacattatttcaatcttgtttcttgccggcaatctgtatcataacacactccgtcgtgtcccccgttccccaaaataaacccccattatcctatacttgattcgtcccaaataaaacgctcaacaaactcctataagctctgcccaacaataaca

SEQ ID NO: 717474 - DNA, 224 bp, Homo sapiens
aacaaatctaccttggacggaacaggtacccctgatacagagacggccgtgtaggggctgccgggcctggtggtgtgctgggtactcctactggacgcagaccatataccctgcgtctggcgggtgcccgcaagctgatggcctcacagacactgcgccgaatgctagcccgtggacgagtacccgcccatcatgttcgaccagcaccccaacgagcagtacaa

SEQ ID NO: 717475 - DNA, 290 bp, Homo sapiens
aatctcggagtggtctgttgctcctgcacccgcgccgtggccgaaacactcagccccagcaacgccccagccacgcacaccctgaacaacccgttggaaataatcacgcagactccacagccaaattaaaaacaccgtgacgagggacagcttcgccaacacctcagttaagacgtaaataccgggaataatttagcagccgcagatggttattcggacatgccggtatgtctccaggatgttaccgacaaaatttctacatctcgcgcttcatgatttcggctgctcgt

SEQ ID NO: 717476 - DNA, 209 bp, Homo sapiens
ccgtcttatcttagtgatgtcttttcttctgcttgggttgagttgggtttgtcttgttctctagttccttggggtttgagcgttagattgtctatttgtgctcttgcagatttcgagatgtatggatttaatgctataaatgtgtctcctagcactggcttaagtgcaagccggagcagattcatttaggcgggtagctaagctcgaat

SEQ ID NO: 717477 - DNA, 183 bp, Homo sapiens
tcggtccccctctgatgaggcatatgtattttgaccctaaacctttatatctgtcctgcccttgaattacacatttgctaacttatgaaattaagcctgagtatccaacggttcatggcaattatctgaaatccatctccttcccctactcatcgcactaatttacactcacaacaccctagg

SEQ ID NO: 717478 - DNA, 547 bp, Homo sapiens
tgctgaggtgatctaaggatcccatgccaataacctcccccttatgccgcgccatggtggcttgcatcgagctcatcaactgttcgtgtgtgagttgcggcccaagatcgaggcgcggagggtaagccaattgcagaagatcggtttcaatggcggtcatggcgaaatgcggtgcgcctcctgagtgttaccagttgtgagcgactttaccgtaataaaacgcagcgctgtaaccgtacggcgaaaaagtgccactgggcattaatcaacgccgccactcgtcaggatctggacggttaatcccgctactgtcagccccggttcagcctgggcgggcgccatgccgtcaaactagcgcgcacataacgacccacttagccgttcattacatcgactatcgaggtcgccccatgaaaaaatttcgattgcctgggctgttgttcctggcccaagccaccaccgcgctggcgagcgaaaccccactcgccaacgacgacaaaggcttctggtacgcccagaccagtgtctacacggaggttattggcat

SEQ ID NO: 717479 - DNA, 1012 bp, Homo sapiens
  misc_feature (70)..(70): n is a, c, g, or t
  misc_feature (104)..(104): n is a, c, g, or t
  misc_feature (106)..(106): n is a, c, g, or t
  misc_feature (113)..(114): n is a, c, g, or t
  misc_feature (118)..(118): n is a, c, g, or t
  misc_feature (132)..(132): n is a, c, g, or t
  misc_feature (139)..(139): n is a, c, g, or t
  misc_feature (146)..(146): n is a, c, g, or t
  misc_feature (157)..(157): n is a, c, g, or t
  misc_feature (185)..(185): n is a, c, g, or t
  misc_feature (222)..(222): n is a, c, g, or t
  misc_feature (234)..(234): n is a, c, g, or t
  misc_feature (259)..(259): n is a, c, g, or t
  misc_feature (284)..(284): n is a, c, g, or t
  misc_feature (401)..(401): n is a, c, g, or t
  misc_feature (417)..(417): n is a, c, g, or t
  misc_feature (432)..(433): n is a, c, g, or t
  misc_feature (445)..(445): n is a, c, g, or t
  misc_feature (458)..(458): n is a, c, g, or t
  misc_feature (520)..(520): n is a, c, g, or t
  misc_feature (538)..(538): n is a, c, g, or t
  misc_feature (548)..(548): n is a, c, g, or t
  misc_feature (553)..(553): n is a, c, g, or t
  misc_feature (566)..(566): n is a, c, g, or t
  misc_feature (592)..(592): n is a, c, g, or t
  misc_feature (728)..(728): n is a, c, g, or t
  misc_feature (784)..(784): n is a, c, g, or t
  misc_feature (788)..(788): n is a, c, g, or t
  misc_feature (804)..(804): n is a, c, g, or t
agacaggcttgggagaaataccagaaagggattgttcaaagatggcattgtttaatccccgtgtggcccncggttgtgcaatcacagatgagccagaagaggtntngcccccnnccgngtttgggctccganactcttntcaaacntcaatttttantcttgggatagaaaaatagtatgtgctntctctaatacgctacttcgatatttattaaagaagtntttttaatgtantgtccacaggctcatttcattgaanacaactgactatgatgatagacagntcctgattggcaaaagttcaatggtatattcagaattaaattttgccgcgcacctaaacactgacaacatttagcttaaaggtttcccatggagaagagtggtaagagctgtagttngcaaaattggcagccnctttagggtgtcaannccgtgctgcttngcaaattgttganacttttgattttctgtttggcaatgctagtcagcgttcacctcttacagattagccaagaanctttatctaaatgcaganacttattaangaaanccatttaaactanacttacacaacatttcgggaggcccngctggcaaaattatatatggatgcagaagtattgcaagagtccattttccatttttaaatctgcaatatctgattacattgatgaattccgttgtattgtatgtgtgaatataaatatctgaattctcccgggggncttggttttcgtccaaggatgttggcagtggacacttagtttacctcaggaattgnaatnatgtaagactatattnggaaaaaatgctggagtatataattttggatactgatataaaattcatcagagatggagagttaatgcagaattggtcacgtgatagtgccataagcgactttatataatgcatatattcgtgtaattgtgtttgtaactagcaggcaacattttatatatcttgtcaagtgtagtcatgttaatagaaaaaaataagcaatgtcata

SEQ ID NO: 717480 - DNA, 1005 bp, Homo sapiens
  misc_feature (16)..(16): n is a, c, g, or t
  misc_feature (65)..(65): n is a, c, g, or t
  misc_feature (86)..(86): n is a, c, g, or t
  misc_feature (95)..(95): n is a, c, g, or t
  misc_feature (114)..(114): n is a, c, g, or t
  misc_feature (117)..(117): n is a, c, g, or t
  misc_feature (172)..(172): n is a, c, g, or t
  misc_feature (179)..(179): n is a, c, g, or t
  misc_feature (214)..(214): n is a, c, g, or t
  misc_feature (223)..(223): n is a, c, g, or t
  misc_feature (246)..(248): n is a, c, g, or t
  misc_feature (250)..(253): n is a, c, g, or t
  misc_feature (264)..(264): n is a, c, g, or t
  misc_feature (267)..(267): n is a, c, g, or t
  misc_feature (280)..(280): n is a, c, g, or t
  misc_feature (284)..(284): n is a, c, g, or t
  misc_feature (294)..(294): n is a, c, g, or t
  misc_feature (302)..(302): n is a, c, g, or t
  misc_feature (304)..(304): n is a, c, g, or t
  misc_feature (307)..(308): n is a, c, g, or t
  misc_feature (313)..(315): n is a, c, g, or t
  misc_feature (317)..(317): n is a, c, g, or t
  misc_feature (321)..(321): n is a, c, g, or t
  misc_feature (327)..(327): n is a, c, g, or t
  misc_feature (330)..(331): n is a, c, g, or t
  misc_feature (340)..(340): n is a, c, g, or t
  misc_feature (358)..(358): n is a, c, g, or t
  misc_feature (366)..(366): n is a, c, g, or t
  misc_feature (375)..(375): n is a, c, g, or t
  misc_feature (393)..(393): n is a, c, g, or t
  misc_feature (468)..(468): n is a, c, g, or t
  misc_feature (479)..(480): n is a, c, g, or t
  misc_feature (752)..(752): n is a, c, g, or t
  misc_feature (768)..(768): n is a, c, g, or t
  misc_feature (773)..(774): n is a, c, g, or t
  misc_feature (777)..(777): n is a, c, g, or t
  misc_feature (782)..(782): n is a, c, g, or t
  misc_feature (784)..(785): n is a, c, g, or t
  misc_feature (793)..(793): n is a, c, g, or t
  misc_feature (822)..(822): n is a, c, g, or t
  misc_feature (849)..(849): n is a, c, g, or t
  misc_feature (916)..(916): n is a, c, g, or t
  misc_feature (937)..(937): n is a, c, g, or t
  misc_feature (987)..(987): n is a, c, g, or t
taagtaatctagatgntgatttaaagtatatgggagaatgtatgtagattatatggaaatatganggtattttatttaaagggacntgggcctgntggataccaaggaataacnaanggtaaaactgagcataagtggcctgtccatattttgttaaatatcagattattgntttgtgntcatcaacattttcccgcattcatgcagtgcggcntctgaaaanatggttgaacatcctatggaatnnncnnnnttttttgaganggngtctcactctggnaccnaggcgagagngcaatggngnganntgggnnnanggcnaccgcngcnngcgccaccncgggttcaagtgattctnctgcctcngcctccggngtacctgggactacaggnatgcaccaccacgcccggctaatttttgtatttttagacgagacagggtttcaccctgttggccaggctggtctnaaactcctaanntcgaggtgatccaactgcctcggcctcccaaagtgctgggattacaggtatgagccaccgtgcccagcagaattttttaactatttggttacgactaatttggataatgtagtgcatgcagctttgatttgtgccactaagagtgggcaaactgtcttcctttttgtgaatcagtaaaaattttccctcaacatgtgtttgacagttgtcattcactgctaagttaaggcatttggtaaaccacacagcctctgcatccttcctagcgacancacaagaaaagttggntatgnnttnttttntnntcttgtgnattgaactggaggcaagccccacttttcnttagaaaaagaagtagaacaaaaaacnaatattttcttccttgctcgatttctgtgccttcatggtacacaaaataataggacagtaatggcanaatctgttgactgctgttacntcgcccaatattcttaagcattcttagcactagctgtgtttgtaaattanagattcttaagtatgtag

SEQ ID NO: 717481 - DNA, 230 bp, Homo sapiens
  misc_feature (37)..(37): n is a, c, g, or t
  misc_feature (119)..(119): n is a, c, g, or t
  misc_feature (122)..(122): n is a, c, g, or t
  misc_feature (151)..(152): n is a, c, g, or t
  misc_feature (197)..(197): n is a, c, g, or t
  misc_feature (206)..(206): n is a, c, g, or t
ggttttggtgttaggataatactggcttcatagaatnatttaggaaggattccctctttctctatcttgtggaatagtgtcaataggattggtaccaattgtttgaatgtctgataganttnagctgtgaatctgtctggtactgaacatnntttgttggtggtggtggtaactttttaattaccatttcaatcttnctgcttggnattggtctgttcagagtttctatt

SEQ ID NO: 717482 - DNA, 333 bp, Homo sapiens
caaatagggcagacaggatgtaaacccgagagagcagagagtggcggtctagagctcagccccctcagagcattccacagaccctgccttattctagctggtgagatagccataggaaacaatgattaagatgcatgtacagagtttctccttacaaatgagatgagggttatggagaggaggccattccaggggagagaatgtgccagggcacagcctagagtcatgagcctctgcaggaggcgtgtggaaatgcaatgagggtgtggaaatgcaatgaggctaaagtgggaggtgctggcaactaaaactactagggggattgggtccaga

SEQ ID NO: 717483 - DNA, 903 bp, Homo sapiens
  misc_feature (264)..(264): n is a, c, g, or t
  misc_feature (280)..(280): n is a, c, g, or t
  misc_feature (284)..(284): n is a, c, g, or t
  misc_feature (305)..(305): n is a, c, g, or t
  misc_feature (398)..(398): n is a, c, g, or t
  misc_feature (418)..(418): n is a, c, g, or t
  misc_feature (483)..(483): n is a, c, g, or t
  misc_feature (494)..(494): n is a, c, g, or t
gaatccccctggcacaccccaaagaggggtccctgctccgtctcacagggatcttttgtatatttggcttagcatcatacatttgccatgttgtttcatcatctgcctaatttactgttttgaatatttcatttgtttctaattgttactacagataatgctggggtgagcaactctgtgtacataggtttatctcctattgaatattttctttatataggcgttttttttttccttttttttgggagaacagagtctggctcntgtggcccaggctggnagtngcagttggcgcgacgggagcntcacttgcaacctccacttcccgggttcaagtgatgtgtcccacctcagcctcctgaatagctggggattataggtgcttgctaccatgccgnggctacttttggtattttangcagagacagggtttcaccatgtggccagggtggtctcgaactcctgacctcaagtgatccgtcnggccagcattngggaggccaaggcaggcagaacacttgaaggagttcaagaccagcgtggccaacgtggtgaaacccggtctctactaaaattacaaaaatggttagctctgtttccataatagaagtgaagggtacagtgtttctttgaaagaacaggtttgttcctccaagaaggttgggctgaatcgaggggctgcctggtatggggtttaaaaacctgtatatgggtggggccaaaaggagcaagcaatctgtttggaattactggtcggccaatgtgaataattggggtggaaacactttgacccttgcagtaatgggtaaagagtgattttgtggcgtagaagtacacccaagatttttgtgtctcagctaagtttttacgaaggggagtgtatgtacccacatgtcgaacggg

SEQ ID NO: 717484 - DNA, 252 bp, Homo sapiens
ttgtcctacgctcagctgggtgacagaggtgaccctatctcaaaaagaacaaaaaaaatttcagctgggtgtggtggcatgtgcctgtagtcccatatacttgggagactgagtcaggaggattgactgagcccaagagatggaggttgcagtgagccgagatcacgccactgcactccagcctgggtgacagtgccagaccctgtctcagaacacaaaacacaaaaatttcacagtgggagacgcgcgggg

SEQ ID NO: 717485 - DNA, 541 bp, Homo sapiens
atgacaatagatctgcatgttctagcaggcaatgctcggcatttgcattgaaatccagctcggggtttgccttctgggcattatgctaaattatagtgtttccattcttttatctttgttttaagctttaatgaaccacttctgatgaactgatctgcttttgtgaattagggatataatgcgacataatgacaacaagcccaaccaacgcatttaacaagcaaaagcactaacatgaaaatggtgtggaagtgcattagccaagaggaccagcatcctgttaagtagcaattactgaaacaaattaaatgaggagataatctaagaatatatcagatcataacaatgataaggagactgtcaagtggtcaagcagtctataagcagtagcatggtagcagctgctaaattggcttgtcttccatagactcagcaagtaagaagcccagatggatttagacagtttagtatttactggaaaagaaagtcagcatggtgtcagctccctgtatccctagtatcacagcatgacaccaaacag

SEQ ID NO: 717486 - DNA, 970 bp, Homo sapiens
  misc_feature (237)..(237): n is a, c, g, or t
cagataccggtgttttattattggtcggcggccacatgtggcccttttctccgtgggaccttcttggggcggccaaaagtactcatttcaggggtccctcccaagatctctggcaagggccctggatggggaccctttaggtgccccggcaggatcgcgtgaggaggaacccagagacacagtcggggccagcggacacagtagctccgggacatagtgggtcaaccttctcttctncacgctgttgcaagagatgatcttcctgctggaaccgccttgggctctccaccaacgcgaagtcacttccaggattccggaggcggacctttactcagccaaaccgccggaccacgtcctaatcctccgctgatgcctccagtgctggtgctaccgctgaccacagagaggctcacggcactctggcattctccagacattctgtactcctcgccgtccacgcagttttgcgctagtgtgcgatctcgatgtccaaggccagcttcacactcatgagctcctggtactcacgcagcatttctgacagctcctcgttggcctgtgcagggcagcctccagctctacgcgatatgctgtgggcatcaataaggcatatctcaccatcggcccgctgtgcatcagccacggagacctgaagagtcacggcactgcgttcttgatgttctcgatctcttgcccgcagcctgtggatcatcaagttgagctccgcaatactcactctttggcgttcttcaggttgtcaccagtgattggtcaacggagatctggacctgctggaccttggtctggtacagggcttcagcctcagcgatgctcctctgggcaatctcctcgtactgggcacggacctcggcaatatgctcacccagttccagtcgcggttgttgtccatggaaaggaccacggacgtatcgctgacatgggtctgcatctgggacagaatccggatcaa

SEQ ID NO: 717487 - DNA, 415 bp, Homo sapiens
ttcacctggcacctctatcctgtaattgcacatcatggcagcagggctgtgatttcagaggtactccctaagtgttctagcaatatgattatggagtgtgattcagtgtacatgctgattgtctttgcctcggtcctatatccccttgtctttagaaatcccatcctgccttgtgatatttagaagcacaagtacgttaaacaagtgctaaacgctctggaaagcatggctttattttcttaatggatgtcttggtgtgtaggagcatgcatttgtaggcaccacaatccggatacttctgacacagaagtgatgctagaatgtgtctatagattgtattgctagcatccagactttctagtttgtccagatttcgatttgatcaattttcttgtccaataaaaaagcatttcca

SEQ ID NO: 717488 - DNA, 204 bp, Homo sapiens
tggagatgcgaaaagagaccaggcacagaaagctgcaggtgctggagatgccaagatgaagtgtgtgtataagtagataactgtatactatctggtgactgtacagttcgaaatactatttatttctcaagttttataaaaatgcagaattttgttttactttttttttttttaaaaagacaatgtggatcaagcacaacagaa

SEQ ID NO: 717489 - DNA, 456 bp, Homo sapiens
ttcacctggcacctctatcctgtaattgcacatcatggcagcagggctgtgatttcagaggtactccctaagtgttctagcaatatgattatggagtgtgattcagtgtacatgctgattgtctttgcctcggtcctatatccccttgtctttagaaatcccatcctgccttgtgatatttagaagcacaagtacgttaaacaagtgctaaacgctctggaaagcatggctttattttcttaatggatgtcttggtgtgtaggagcatgcatttgtaggcaccacaatccggatacttctgacacagaagtgatgctagaatgtgtctatagattgtattgctagcatccagactttctagtttgtccagatttcgatttgatcaattttcttgtccaataaaaaagcatttccaaatctctacttatccttttatatgacaccccaatagatttt

SEQ ID NO: 717490 - DNA, 455 bp, Homo sapiens
ttattgttccactgagacaatacaacaatctggataggcacggtggccggacgcctagtaatcccagctactcaggaggctagaggcaggagaattgcttgaacctgggaggtgcaggttgcagtgagctgagatcatgccactggactccagcctgagtgacagagcaagactccgtctcgaaaaaaaaaaacaaaaaatatatgtgctactttcttaactggtaatccccacctccgagtggatcttaacaacataaacttttagctcatatttataatttaccttccctggcaacctaactggttgatcctgacctctctatgggcactctaataatccttgttcaccccttgccaaacgggtgtccctaatacggcccggccatattacccactttccttatcaaacccccgtgcatacgggcactatatcaaaacgtacttgaggcattg

SEQ ID NO: 717491 - DNA, 613 bp, Homo sapiens
  misc_feature (18)..(18): n is a, c, g, or t
  misc_feature (67)..(67): n is a, c, g, or t
  misc_feature (69)..(69): n is a, c, g, or t
  misc_feature (86)..(86): n is a, c, g, or t
  misc_feature (90)..(90): n is a, c, g, or t
  misc_feature (97)..(97): n is a, c, g, or t
  misc_feature (100)..(100): n is a, c, g, or t
  misc_feature (105)..(105): n is a, c, g, or t
  misc_feature (107)..(107): n is a, c, g, or t
  misc_feature (120)..(120): n is a, c, g, or t
  misc_feature (129)..(129): n is a, c, g, or t
  misc_feature (141)..(141): n is a, c, g, or t
  misc_feature (155)..(155): n is a, c, g, or t
  misc_feature (157)..(157): n is a, c, g, or t
  misc_feature (162)..(162): n is a, c, g, or t
  misc_feature (164)..(164): n is a, c, g, or t
  misc_feature (170)..(170): n is a, c, g, or t
  misc_feature (234)..(234): n is a, c, g, or t
  misc_feature (253)..(253): n is a, c, g, or t
  misc_feature (255)..(255): n is a, c, g, or t
  misc_feature (282)..(282): n is a, c, g, or t
  misc_feature (305)..(305): n is a, c, g, or t
  misc_feature (325)..(326): n is a, c, g, or t
  misc_feature (328)..(329): n is a, c, g, or t
  misc_feature (345)..(345): n is a, c, g, or t
  misc_feature (350)..(350): n is a, c, g, or t
  misc_feature (353)..(353): n is a, c, g, or t
  misc_feature (356)..(356): n is a, c, g, or t
  misc_feature (415)..(415): n is a, c, g, or t
  misc_feature (482)..(482): n is a, c, g, or t
  misc_feature (490)..(490): n is a, c, g, or t
  misc_feature (534)..(534): n is a, c, g, or t
  misc_feature (598)..(598): n is a, c, g, or t
acaatttttatagaattnacattttgcaaaatgcaacaaacattttaatttatactatgaaaaatantnagttttcaaaagttgtnttcntttcaanttntttcntnttatttttgacanaatttctgnaggtaaaacatntttaaattttaccntnattancntgctcnttttatttaaaatcatgacaaaaatcttctctctttgtcatgtttcccattactaatattactnttatgttgtacttttagancnatatctcaatacaccataaatcccatngtatttttgttttcttcttgatnttaaagctgtttttctttgnntnnatgcagcagcaaaacncaaancanttnttcaaaaagcacttctgcctataactccaataattttcaggacacatcaaccgacagtngttttgccacttcccagttcttttaaggattacatctctgcacttttgccttgaatggacgtctgtnaaagcttnttctctgcttaagccagtttactgtctacagcctgtgttcgtanaaatttagttggtgtggtccatttatctagtgcagtatatcgtgcaccacccctcttctgatgntccagttcaaggagt

SEQ ID NO: 717492 - DNA, 124 bp, Homo sapiens
tgcttcttgtgctcgtgtggttcttgtcatggttatcttgttgcccaagaaaagaactctgctgtccagtgcactgcttggttactatcccagcaaagaactgggtacctgtgctctgaattct

SEQ ID NO: 717493 - DNA, 205 bp, Homo sapiens
catacaatcgacgctcgtaccttccaggcttgattgcaggcttcacaaagctacttcagagactataagttggaagtcctagtatagagtccttatgaaagcgactgttaatgcgtccgtaattggattcggctaggcagtatactaatgaggatattagtccgtgtgcgattctgagaatgactgtgccagtgactcttccggt

SEQ ID NO: 717494 - DNA, 405 bp, Homo sapiens
tcctgtgacgattctcagatctagaactaaaataccatttgacccagccatcccattactgggtatatacccaaatgactataaatcatgctgctataaagacacatgcacacgtatgtttattgcggcactattcacaatagcaaagacttggaaccaacccaaatgtccaacaatgatagactggattaagaaaatgtggcacacatacaccatggaatactatgcggccataaaaaatgatgagttcatatcctttgtagggacatggatgaaattggaaaccatcattctcagcaaactatcgcaagaacaaaaaaccaaacaccgcatattctcactcataggtgggaattgaacaatgagatcacatggccactcaatacggtattgaatggccactca

SEQ ID NO: 717495 - DNA, 498 bp, Homo sapiens
tgcgctgggatatagtaccgtaagggagatgatgaaaattataagcaagcataattatacatggactaacccctatatcttctgcatatgaattaactagaaataactttgcaaggagagccaacagctaaagtacccccggataaccacgacgacgctacctaagcaacagtctataaagagcacaccctgtctatggtagcataatagttgggaagatttataggtagacggcgacaaacctaccgagcctggttatagctggttgttctctataataatcttagttcaactttaaatttgcccacagaaccctctaaatccccttgtaaatttaactgttagtccaaagaggaacagctctttggacactaggaaaaaaccttgtagagagagtaaaaaaatttaacacccatagtaggcctaaaagcagccaccaattaagaaagcgttcaagctcaacacccactacctaaaaaatcccaaacatataactga

SEQ ID NO: 717496 - DNA, 169 bp, Homo sapiens
  misc_feature (23)..(23): n is a, c, g, or t
  misc_feature (166)..(166): n is a, c, g, or t
tcggccgtagcagcgcacattantgaaattaagagagatcatagagagagactcaccaaaattgctccaactgtgacaaatgttgcagaaccgagaatcgttcttcaaaaatcaccttgatcttgaagacccgctctgataccaattgatagctgcgctgctacgnccg

SEQ ID NO: 717497 - DNA, 729 bp, Homo sapiens
  misc_feature (13)..(15): n is a, c, g, or t
  misc_feature (24)..(24): n is a, c, g, or t
  misc_feature (414)..(414): n is a, c, g, or t
  misc_feature (420)..(420): n is a, c, g, or t
  misc_feature (524)..(524): n is a, c, g, or t
  misc_feature (528)..(528): n is a, c, g, or t
  misc_feature (531)..(531): n is a, c, g, or t
  misc_feature (535)..(536): n is a, c, g, or t
  misc_feature (547)..(547): n is a, c, g, or t
ggattgcgacctnnngagctgcgnccgcagcagcggcggcgggcatggcagaggcgcgatcccagccctcggcggggccgcagctcaacgcgctaccggaccactctccgttgctgcagccgggcctggcggcgctgcggcgccgggcccgggaagctggcgtcccgctcgcgccgctgccgctcaccgactccttcctgctgcggttcctgcgcgcccgggatttcgatctggacctggcctggcggttactaaaaaatattataagtggagagcagaatgtccagaaataagtgcagatctacaccctagaagtattattggcctcctaaaggctggctaccatggagtcctgagatccaggatcccactggcagcaaagttcttatttacagaatcgcacactgggacccnaaagtntttacagcttatgacgtattcgagtaagtctaatcacatccgagcttattgtacaggaggtagaaactcagcggaatggaatcaagggctatcttgatctgganggtnggnagtnntctcatgcttntcaatcactccatccgtagccagaagattgtgtgtacttacggatcatttccatggaaagttcgtggcatccatttgataaatgaaccagaaattgccaatgcgtctttccatgaacaacatcctgatgaaaataagacggatcctgatggaccacacaaaaagtgtaattccaaattcctg

SEQ ID NO: 717498 - DNA, 220 bp, Homo sapiens
gtacacaagggattcagagctagaaagagaagtagtatcgatggaagtgcctttagaggagagccggaattgactcaagcattagctccagaattgccagtggttgtttcatggccgtgatggattcgatgagcttttattgctgctttcactgggagcaccatccaggggcaatgcaggataagcactgtctagtgaagagcagtttctggaattcttt

SEQ ID NO: 717499 - DNA, 349 bp, Homo sapiens
gtgatctcagtgaacaaattgtattcattttaatgtacgtgaagttatctattgcttggtcagtttcttctatttgcatttttaaggccttctttattccaactttataaagataattttctcctgcaaagtttgaatttgctttttatatttagatcgttttcatctacttgcaatccaatagtcttttaacaaattggatcatcacgtatattgagtagtccattcttttctcagtgtgctttacattgcaatgaccaaaacagcacttcccgcacacatgtggccgtctcatcaaagttaataggttaaccccaattcatctcatctgaagcatggttgtcatagc

SEQ ID NO: 717500 - DNA, 299 bp, Homo sapiens
  misc_feature (13)..(15): n is a, c, g, or t
  misc_feature (24)..(24): n is a, c, g, or t
ggattgcgacctnnngagctgcgnccgcagcagcggcggcgggcatggcagaggcgcgatcccagccctcggcggggccgcagctcaacgcgctaccggaccactctccgttgctgcagccgggcctggcggcgctgcggcgccgggcccgggaagctggcgtcccgctcgcgccgctgccgctcaccgactccttcctgctgcggttcctgcgcgcccgggatttcgatctggacctggcctggcgggctggagtgcaatggcgtgatctcagctcaccgcaacctccgcctcccagg

SEQ ID NO: 717501 - DNA, 918 bp, Homo sapiens
gcgccttccgacgacatagaggaggtgagccagggctgctcaggctgctgggcgccaatcgcgcggaggcgcagcagcgagcaggtgtggggacgccacgagcaggtggtggagctggtgctggaaacgcaagacggtgccgagaagcagctgtgagagatcctcatcatggagaaggaagtggcccagagccttcgtcagaatgctgaaggagcaggtgcaccaggtatggcgtggatgctgcagcaagctggaacgctggggttcaggaggctggggaggaggacacccgtcgtgaagggcagtctccttcagtctcaccatgagagctggtaggagagctcaatgagattgaggtggatctggagcgagaggagagggaggtctgaggaggagacagacctgtcaaaaagtctcctcgtgcgtgtacagtggctcagaatttatagcatccagagttagtaagaacttgatgtgggacttatgagtgtgaggccgagggatggtctactaggcagtcgcactccatgtgccctagatgtggtacaagcgcatgcacactggtagatgatccagctctccaggatattgatcagggagtatctcgtggattctggtgtacaccagatgtggtgtccagggagtgggtcgtggttgcgatctttgccggccgaggtggtggcattattgcctggggtcaagaattcgattttttacttgagatgttgggcgacgtagatcgtaacctcatgtattcggacagacggataccccgtattgttgtccatctgtgatgcggtccaccttcagtcagaggaattcgtgcctcggtgtccacggcttggtgtaacccaaagatcgaattaggaatgccacccacgaattggatggcaaaggttcatggcgcgtttaaaatcc

SEQ ID NO: 717502 - DNA, 215 bp, Homo sapiens
aagattcgtgcgccccgccgcttcttactgccgggcgctcactgcactccagcctgggcaacaagagcaaaactccgtgtcaaaaaataaaaaaaaaaaaaaattgtgattttttccttcttcgggaaaatcggcctttttagaaattcgaatttggggggccccaaaattccttcttccgggccccctcttaaggtccattcctaaggaattca

SEQ ID NO: 717503 - DNA, 1039 bp, Homo sapiens
  misc_feature (791)..(791): n is a, c, g, or t
tggaaacgggttctcgctttgtcccccaggtgtgaaggggaagggtgcaaccacagccccacgtggggcctctcaacctctcccagaactctcaagtgtgactcctctccaagtatagcgtgggactcacttggactccctccgtgaaaatagcgtggaacgtgcagatttgttgtgtgccaccacacccagctaccgtgtgtgttgtgttttaattagaaacacaaaggtctctctccactatgtgttgtgccgtgggtgtggctctttgaaaactctccgtgggctttagagcagagcctctccgcgttcttcagcctctccgaaagagtgtgcggggaattacgggtgtgtgtgacccaaaggacccgcggctccaccacctgtgtgtacttctaacaaactttccaccccaactctccctgtgttcccccgcagagaacaggtctcgagtggtgctataaagtgtgtgacacagtggctaaaagagtatacccgctctctatatgagaggcgtttctgtggggcgcccctgtgaaaaatataacaacatctcgctatattgtgtgtgggttctcccgcgctataatatctctaatagagagacgaaatctcgacggggtgagacatgtgggcacaaaaatattgtttcatctaccccttgttgtggggtgataattataccaggatggtgggggtggtgctccacaaattttatgtgtggtgtctctccctcgctctacagaggttgtatttttttttctcccccacaaaaaatcttattctcgaanggtatacaatgctgctgttggtggtatacagaatacaacaagaggcggtcgtcttttataattatcgccccctttttagaagaaaaaacaacacaccgacggaaatcttaacgagggggggggcgggcggctatctaagacataataaatatattaagccggactatttcttaatccgaaagatgcaatatagcaacttacaatataacaaattaacaacataacataatcgaagtatagagctgcga

SEQ ID NO: 717504 - DNA, 211 bp, Homo sapiens
gacgtcacgcgcgcgctcaagggcgaataaccatggcaggcccaaacacctcccccatgacgctgttcaacgtggctggccgcgcgatgtccgcgcagctcgtgcgcatgaacgcggcggcatcgaacctcgctaacgcgggcacggtctcgtccagcgaaagcacggcctcccgcccgctgcgtcccgtcttctccgaagaactggcccg

SEQ ID NO: 717505 - DNA, 644 bp, Homo sapiens
cgatgattcattcagtgaaactcactccgagttcctgcatgcagcaacttgagggataactaccgatttgcacatacaaatgttgagactgtggtgaacgagtatgatgataacggatatggtatcatcttatttggctcttcacatgtcactaacaagttggaggacaagactgtggcatatacagtgcactgcgctcacatgacagacgacaataaagatttgatacagggcaaggactgacttattgcttactatgatgtggactatgagaagaatgctgccggttgcaactactggagacacagggtaatgatggtggcaaagaaattgctggatgctgggcacaaactcaactttgctgtagctagccgcagaacctttagctcatgaactttatgattctggctaggagagcactgctggagagattcctgttgatgctatcataactgctcgagagaagtttgtcatgcaggaggatctctcgcgtgatgggaatgctctggataggtctctgcacgaatactatgatggcaatctgaagagatacctgaagtctgaacctatgccagagagcaatgatgggcctgtgaaggtctggttgcagagaatttgatgaactagcgaataatgaagatcgg

SEQ ID NO: 717506 - DNA, 363 bp, Homo sapiens
tctttttgatagagggtcttgctctgtcacccaggctggggtgcagtggcatgatctcggctcactgcagtctccacctcctgggttcaagtgatcctcctgcctcagcctcccgagtagctgggattacatgtgcccgccaccacatctggctaatttttgtatttttagtagagacgcgtttcaccatgttggccatgctgcctggctaattttttaaacttttttgtagttatgaggtcttgctctattgcccaggctgatcgggaactccagggcttgagcaatcttcccgcctcagcctcccaaagggcttggattaccggcatgagccgacggtgcccggctccagcaggttttgat

SEQ ID NO: 717507 - DNA, 411 bp, Homo sapiens
gtcactatgtagtcagtcacttgccaccctctgtacactggaagacatcctgctgagactgggacaggctggagagccactgtggttcagagtgggccgatcactgggtgaccgatggtggcacagcacaccgtgaagtgtgccccgtgacccctttcaggagggatcctggggagaccgatccaggacatgtgcgcaagagcaggcaacaggtggctgtgtaatatgggtagacgcagagcctgggcctgtaccaccagtggtggcactttgtggagagctgtccttgcattgatcatcagggctgctggctgcagggttggctgttacagggagcgcttcctggagggccgcagttgaggagggcctcgggtgctgagggtctggttggtgctcaggcactggacctcc

SEQ ID NO: 717508 - DNA, 457 bp, Homo sapiens
gcatggtaaaaccctgtctctactaaacatacaaaaataagccaagtggtggtggtgcgcacctgtaatcccagcgtattaaggaggctacggcaggagaatcccttgaagccgggaggcggaggttgcagtgagccgagatggtgccacggcactccagcctgggtgacagagcaagactccgtctcaaaaaaacaaaacaaaacaaaacaaaaagccagacatggtagcttgtgcctgtagtcccagctacgcgggaggttgagacaggagaatcacgtgaacccaggagggggaggttgcaatgagccgagatcataccactgcactccaagctgtgggcaacagagcaagagtttgtctcaaaaacaaagaataagaataaaaggtatacagaaattagcccaggcacaggggctcatgcccataataccaacatttggagaagccaaggcgg

SEQ ID NO: 717509 - DNA, 177 bp, Homo sapiens
ttacctaatggctgtatatatacttgtctcagctataatgcaggaaataggtttacttccagcagtttagtctaaactgttcaaaaaaaactatgaacagagttcaaatacaggactgtttgtttgaagagactttcttaaagttgtacttacaaaccatagtaagtttttttacct

SEQ ID NO: 717510 - DNA, 275 bp, Homo sapiens
gttaggggatgcccttccttcatgcaggatggagactgagaaagcaagatgttggctaccagaaatggggtttcaaaaatttgctgggggcgctattggacaataaaaacatataatgcgatctgccaaattaaaaaaacagaagctctgtgcgcgtgtatcagtaagtagataaaatcaatgctgaactgtgcaaaacagtaaaacattttcaaaagtcatcaatattttggatcagggggtgtgaggtggttatatgagacttggaagaatag

SEQ ID NO: 717511 - DNA, 719 bp, Homo sapiens
  misc_feature (45)..(45): n is a, c, g, or t
  misc_feature (78)..(78): n is a, c, g, or t
  misc_feature (142)..(142): n is a, c, g, or t
  misc_feature (198)..(198): n is a, c, g, or t
gtattgtcgcgaactcttttccccggaccgcgtttatctgtgttnggtttttacggtcccttgagggtttgcgccccngggccaaatttggggagagggggtgcgcggcgccccccgcacctctcatgttggtgtgggtttnagggggggcgcgctgtgccccccctcctcccctcgggtttggtaaaaggggagagnaattggcccttttttagtgtggggcgggcgcccctctctgggggagtttctataaggggggggggggaattctccgggtatttatttgtttttccgcccccataattatttggggggtttgtttggaccccccccccctttcaagggccctgtccggggaaaaaaagggggggtggtcccccccaattttttttttttttcttggggtgggggcccagggccctgtttcccgaattggggggtttttggttttcctttttttaaaaatgaaccccgggcccccttggggaggggggtttcccccttttgggccggggggttttaaaaattttcccccaaggggccggcctttttttccccctccaaggggggggggtttcggggcccgacccccgggccgggccctggggacagtttttctggggtttttttttttttttttacccccctggggggggtttttttttttttttttttttaaaaagggaaaaaaaagaaggggcccccccccggcccaggga

SEQ ID NO: 717512 - DNA, 261 bp, Homo sapiens
  misc_feature (2)..(2): n is a, c, g, or t
  misc_feature (10)..(10): n is a, c, g, or t
  misc_feature (19)..(19): n is a, c, g, or t
  misc_feature (60)..(60): n is a, c, g, or t
  misc_feature (83)..(83): n is a, c, g, or t
  misc_feature (86)..(86): n is a, c, g, or t
  misc_feature (88)..(88): n is a, c, g, or t
  misc_feature (104)..(104): n is a, c, g, or t
  misc_feature (106)..(106): n is a, c, g, or t
  misc_feature (150)..(151): n is a, c, g, or t
  misc_feature (165)..(165): n is a, c, g, or t
  misc_feature (172)..(172): n is a, c, g, or t
  misc_feature (179)..(179): n is a, c, g, or t
  misc_feature (231)..(231): n is a, c, g, or t
  misc_feature (248)..(248): n is a, c, g, or t
cnggcattgngggctacgnggaaacccctcgcggcctccggaccttcaagactgtctttnctgagcacatcagtgatgaatgnaancngcgtttctataagaancngcataaatctaagacgacggcctttaccaagtactgcaagaaanngcaggatgcggatngcaagangcagctngagaaggacttcagcagcatgacgaagtactgccaagtcatccgtgtcattncccacacccagatgcgnctttttctctgcg

SEQ ID NO: 717513 - DNA, 529 bp, Homo sapiens
ttatctacaactgagtcttcattcttaagtatcacgaacaatctacagaacgtgcctgctgaacatttaatatctacagtgtccaatgatatgaaatcagaattaagcaatacccacatgattttttttttggagacggggtttgcctctggtggcccaggcgggagtgcaagggcatgatctgggctcacggcaacttcggcctccgggttctagtgattctccggccccagcctctcaagtagctgggatggcaggcatgtgccacaaggcccagctagtttggtatttttagtagagacagggtttctccatgtgggtcaggtggttctcgagctccagatctcaggtgatccacctgtcccggcctcccaaagggtgggaattataggcatgaaccaccaggtccagccggattttttattattacaaacagtacggcagtaaactactttttttacatgtatcttggtgtcatcgtgtatatctgcatgataactttataaaagtagaaccagcagatccaaag

SEQ ID NO: 717514 - DNA, 360 bp, Homo sapiens
  misc_feature (27)..(27): n is a, c, g, or t
  misc_feature (86)..(86): n is a, c, g, or t
  misc_feature (101)..(101): n is a, c, g, or t
  misc_feature (112)..(112): n is a, c, g, or t
actataacctagcctggcctcccatgnggggcgcagtgattataggccgctctaggttaaaatgccttagcccattcttaccacangcacacctacacccntatccccatantagttattatcgaacctcagcctactcattcaccatagcctggccgtacgcctaaccgctaacattactgcaggccactactcatgcacctaattggaagcgccaccctagcaatatcaaccattaacttccctccacacttatcatcttcacattctaattctactgactatcctagaaatcgtgtcgccttaatccaagcctacgttttcacacttctagtaagcctctacctgccacgacaacac

SEQ ID NO: 717515 - DNA, 105 bp, Homo sapiens
ggacgcgtgggtccggacgcgtgggccataatatataagaagctcaaagcaacatctacttatatacatattcacagaaccattatataaatgttgttagacctc

SEQ ID NO: 717516 - DNA, 206 bp, Homo sapiens
  misc_feature (150)..(150): n is a, c, g, or t
cccactggaagggacaccacggctaaccccatgcctcctggacatgaccactcagctggcctgccacccggctgtccacctccccatggccctcgggttccctcaccccctccggtgctcagatagaactacagctggttggtgggagtncctatgtggggtgccagcggtccagcgtcttgtaacagatctctgctcctagcttc

SEQ ID NO: 717517 - DNA, 959 bp, Homo sapiens
ggctgccaggcgcgggcgccgcggcacgtcacaggctgggtcgcgaggtggcgatcgctgagagtgcaggagtggccgatggcgggcctgggaggctggcctgtgaggtggggctgcctgttgggtgccggacctgcactgtggcttcatctgagtggcgcacggcccgttgatcgagcgtgcggactggcctcccaagcgtggtggtgacaagctgcctggagctgcaatgggcctgcggctggggattcttgttttggcctcctgggcgccgtgtggctgctcagctcgggccacggagaggagcagccccggagacagcggcacagaggtgcttctgccaggttagtggttacttggatgattgtacctgtgatgttgaaaccattgctagctttactaactacaggcttttcccaagactacaaaaacttcttgacagtgactactttaggtattacaaggtaaacctgacgaggccgtgtcctttctggaatgacatcagccagtgtggaagcagggactgtgctgtcaaaccatgtcaatcttgatgcagttccttgattggcattacatctgcgagctacaagtattctgcaagaagccaataatctcattgaagactgtgaacaagctgaacgattggagcagtggatgaatctctgagtgagggaacacagaaggctgtacttcagtggaccaaggcattgattgattcttcagatagttctgtgacgtgatgaccttcaggtcccttgaagctgactatgtccatcggtccttatcctgagggctacacttgggtacgggggccaggatgtttgaaagtttggatggtatctacgaagacatggttaagcacagcacgtaaagacgttaaatctgggtagggcaaggccaggaaaaacttaaaaggggaaggtctggtgtgagagattagcacgtttcggcaagaggtt

SEQ ID NO: 717518 - DNA, 195 bp, Homo sapiens
gagtatcgaacaaaaactgtcacataatttctatcccagcactccacaaaagcaaaatgatactacttgacaatttgtgattcacacgaaggaaaaaagcacatgaaatggacaaatatattagatatatatacaaatacttgtcttactttttaaacaatctctctgtgtacgagattcaacgcggggatcctc

SEQ ID NO: 717519 - DNA, 1102 bp, Homo sapiens
gacccacgcgatcggacccacgcgtccgaagagaacaatagaactcactgatacatgtaaagaaagagaaagtgatactgggaagaagaaagtagaactatgaaatttccagaagtgaaatggttgccacagcgcgcagcagctgcgtcttgcctcagacggctaccaagagccgaagcacctaggctgcagtggaacgaaagatagatcaagtccctggtaggctctctgtggttgagacaacaaatgcacagaatactagagatcaagactgtcgacgatttggaagagctggacaacttatcatggacagagtagaaacgaagctcgtagaagcaacagaggcacgcagtggcttactgaagcgccaagaacttccacatggaacagtctggaagtatgctgaattacgagcacgacaggcaaatggaacagccagcagcttggccagaatacctcaacaggcacaacagcactcaggaggacctggactggacccaaattggagcagcagggaaacctggcgatgatgcctcaatcaatagtccccattacgtaacactcgtgattcagcaagcagatgccaccagcttcatcaacaccaagacaaggtcaagataccagggcacaaggttccatggatgcccgggcatgcacaaatggccagggccgcctggattcccactgggttggagccaaagaatacaacaccctctagggaagtagggcctacacttccttgggatggccaccaatgccatggaaaccactttagggacccgggtacccactgaatagaagctaaacggatggtgtcccccatccaaacaaaggagacagaaaaacgggacaacaaaacaacctgcaacaatgggggacacacacagaagcacgggcacaggaacacgcaaggccattcaagcactcggtcccttaaacccgagacaaaaattacagaaaaaaccgccaaacaccaaaccaagaacacgagaagggagcaaaaaaagcaactagaaagcgaaaaaaaaatagaggcagaacaagaagaaaaagccaaaagacacaaaaagacaagcagccaacagcccagagcgcgcaccag

SEQ ID NO: 717520 - DNA, 649 bp, Homo sapiens
  misc_feature (17)..(17): n is a, c, g, or t
  misc_feature (111)..(111): n is a, c, g, or t
  misc_feature (132)..(132): n is a, c, g, or t
  misc_feature (274)..(274): n is a, c, g, or t
ggatagtagatgattgngatacgctgtataacatgaggtcgtatactagtctgattaagggttctatgatgtgaacgtgttgagtgagtgagcctcattgcgttgtgctanatatgtacagtcagtataggncttcgactagtatgttcagtcctgtagctagtagagcgatatttgatcaggagatcgtggttactagcacagagagttctcgcagtaggttaatagtgatgagtaaggctaggctagctaggcttgctagcagtcatcatanagctattactcggagtagagcttagagtccttaatagagcattatgatgcgtctgtgagtgcgttagtagtttgagtatgctaggcaggatagtcatgagtatgtcagtctgtggcgcattatgagaatgactgcactggtgaagcttcagtgggttcggatgagaatgagctctgtttgtcgcagtcagatgcagcctgtgatcattatgcctcatagtcatagggctagtgtagggtaggctatgcgtctcgtcatggggtttaaaatgagtgtaaagcgtattattccagacccgcctagttttaagagtactccagcttggcctattcatccagcgatgagcgagtccacatcagctttagggagtcacag

SEQ ID NO: 717521 - DNA, 537 bp, Homo sapiens
ggccacaacggctgggtaacccagtatcgctacataccccgcatgttcccggcacatgatcctctccggcctctcgaggataagacgcatcgatcatgtggatagactgaccagggatgagaccaactatggaattccacagcgtgtcgtgctgctggggtcactcccactttgttcagtgatgtggttatctcctcagatggccagttggccctctcgaggctgcctgggatggacaccctgacgcctactgggatctcacaaggggcagccaccaactaggtcgactttgatgtggcgcatactcaagtgatgatgcatgaagtgtgtgtgctttcttcactcgtgactaaccaggctgagattgtctcctgggatctcagaagataaaaaccagtcaatgctagtggaagtacccgtgggttgtgtgcaaagtacacgtgtccaggattgacgatgccacatcagagtgggtgtctgagtgtccagcttctcgcccaacagtcgagcaaccctatcatcgtcccctgtggctgg

SEQ ID NO: 717522 - DNA, 763 bp, Homo sapiens
  misc_feature (61)..(61): n is a, c, g, or t
  misc_feature (108)..(109): n is a, c, g, or t
  misc_feature (111)..(111): n is a, c, g, or t
  misc_feature (120)..(120): n is a, c, g, or t
  misc_feature (128)..(129): n is a, c, g, or t
  misc_feature (134)..(135): n is a, c, g, or t
  misc_feature (138)..(138): n is a, c, g, or t
  misc_feature (144)..(144): n is a, c, g, or t
  misc_feature (148)..(148): n is a, c, g, or t
  misc_feature (189)..(189): n is a, c, g, or t
  misc_feature (195)..(195): n is a, c, g, or t
  misc_feature (249)..(249): n is a, c, g, or t
  misc_feature (252)..(252): n is a, c, g, or t
  misc_feature (256)..(256): n is a, c, g, or t
  misc_feature (261)..(261): n is a, c, g, or t
  misc_feature (267)..(267): n is a, c, g, or t
  misc_feature (275)..(275): n is a, c, g, or t
  misc_feature (277)..(277): n is a, c, g, or t
  misc_feature (282)..(282): n is a, c, g, or t
  misc_feature (299)..(299): n is a, c, g, or t
  misc_feature (301)..(301): n is a, c, g, or t
  misc_feature (325)..(325): n is a, c, g, or t
  misc_feature (355)..(355): n is a, c, g, or t
  misc_feature (362)..(362): n is a, c, g, or t
  misc_feature (406)..(406): n is a, c, g, or t
  misc_feature (465)..(465): n is a, c, g, or t
  misc_feature (599)..(599): n is a, c, g, or t
  misc_feature (625)..(625): n is a, c, g, or t
  misc_feature (699)..(699): n is a, c, g, or t
  misc_feature (741)..(741): n is a, c, g, or t
tcgcagacgcgctcgggcggcgggtccgaggccggcgtgcgcggaggctgggcgggcagcncgagcggtggccgcagcgagttttcccattcccattttcttccccanncngcccaccancccccttnncctcnngcnggagcntganccgagcccggctggctgtgctgcgcggtgccgccgggaaanatggtngtggcgctgcggtacgtgtggcctctcctcctctgcagcccctgcctgcttatncanattnccgangaattnatggagcnanctgtnatcacggaacagtctcnanggcgcctggttgtcttccccacanatgacatcagcctcaagtgtgaggccagtngcaaacncgaagtgcagttccgctggacgagggatggtgtccacttcaaanccaaggaagagctgggtgtgaccgtgtaccagtcgccccactctggctccttcaccatnacgggcaacaacagcaaatttgctcagaggttccagggcatctaccgctgctttgccagcaataagctgggcaccgccatgtcccatgagatccggctcatggccgagggtgcccccaagtggccaaaggaganagtgaagcccgtggaggtggaggaangggagtcagtggttctgccttgcaaccctcccccaagtgcagagcctctccggatctactggatgaacagcaanatcttgcacatcaagcaggacgagcgggtgacgatgggccanaacggcaactctactttgccaa

SEQ ID NO: 717523 - DNA, 757 bp, Homo sapiens
  misc_feature (757)..(757): n is a, c, g, or t
agcgggctttcccgacggccatcttgggaatctgacggatcggaggcattagtgaggaggcgcgaatcaacgttagcaggggggaagagtcttagacctggccagtcctcagggtgatgggccctgaggaagaactgagggatctccctagctataggagagaagaaagccccgggcatgtactgcgctgacgtgagactggtgctccaggaaccaggtggtgacgaactgggtgtgaggcacacagtcctaaagtcagcacatgcagtaggaggcccaggcaagtgccaggagtcaaggcctgctggatctcatcatccagtatccctgtttgatacagtttagctgctgctcctgaagaagtcgtcgtgcgctcccgttccaggcgttccattccgcaacgttgactaacgactccccgaaactcagtggagtgaagaagactggggtagatgcacgagcatcccggcagatgaggaagaggaggaagcctcctccgcctcttccacttagtacttagtattttcccccgtcttctttctccacaatcctcttctctgattcgttggtggtcctgaggaggaggaggtggccatctggtgtgatagcaaatcttagcgagagcattcgcagtaagtcctccacagggtcctccacagggtccttcgcagagtcctctgagctcgtgctgggtcctctttttgcatggagcgtcattcagtgaaagaggtccagcagcggaacaggggagggatcn

SEQ ID NO: 717524 - DNA, 318 bp, Homo sapiens
gcgtctctctcccagacagcctgttcagttctgtgtgagacatgcgggctttgtatcgattgccgtgccgactctttggtgacgctcgtatgcagcccctcagtgcaaggcgccttttttaaacaccccggagggatgcatgactgcactccattggcacgtagaacgctgaagaggtcgagaccgaaagcactcgcaagcatcaaatatttgaggggatgatgcgttcccctcggcttgcgtaggatcttggttacccagcacgctggaagactatccaacgcatctctcaatataaggaactctccactcgcgggt

SEQ ID NO: 717525 - DNA, 1955 bp, Homo sapiens
  misc_feature (102)..(102): n is a, c, g, or t
  misc_feature (182)..(182): n is a, c, g, or t
  misc_feature (238)..(238): n is a, c, g, or t
  misc_feature (244)..(244): n is a, c, g, or t
  misc_feature (249)..(249): n is a, c, g, or t
  misc_feature (256)..(256): n is a, c, g, or t
  misc_feature (271)..(272): n is a, c, g, or t
  misc_feature (293)..(293): n is a, c, g, or t
  misc_feature (296)..(297): n is a, c, g, or t
  misc_feature (306)..(306): n is a, c, g, or t
  misc_feature (329)..(329): n is a, c, g, or t
  misc_feature (341)..(341): n is a, c, g, or t
  misc_feature (346)..(346): n is a, c, g, or t
ggaacaccaccagtgtggagcagcccagccaagcactgtcaggaatcctgtgaagcagctccagctatgtgtctctctatgcctctggacgcacaactggcnatcgtgcttggactctggagatggtgtcacccacaatgtccccatctatgagggctatgccttgccccatgccatcatgngtctggatctggctggccgagatctcactgactacctcatgaagatcctgactgancgtggnctatnccttcgntactactgctgagcnntgagattgtccgggacatcanggnnaaactgtgntaatgtagctctggactttgaantgagatggcacngccgnatcctcatcctcccttgagaagagttacgagttgcctgatgggcaagtgatcaccatcggaaattgaacgtttccgctgccaagagaccctgttccagtactaccttcatcggggatggagtctgctggcgtccatgaaagcacctacacacagcgatcatgaaagcagtgatcatcgcacatcacatggacaggacactctactgctgaacaaactgttcctatcacaggggctccaatctattgtacccttggcattgcgcgatcgattgcgacacgagaatcactggcctatgagccatgagacctgaaaaccagatatactcgcctctcgcgaacactattgacaggtctgagtgtccatctgtgcctatgccctcacgcatttgatcaacaaccgacaataagtcctacagaccgagataaaaccctaggccgtgctaccaaacggtcgtggagacgtgcatcaacaaacacggtcgccgacattgggggaagtcattagtgacgctagtacgctctcgtcacagtcaacgcatgagcaagacggagaccgaccaggctgcacacacggccactcccaggcaagccacacaccaaccacagcacaacagctcagaacgaagcagcacagcagccagcacagatacacaacgcagcagggcacagcctcgacagccaacagacggacaacgacaggcgaacacaacagaccaccagcatcaagacaaagcactgacttgctactcagactaccatatcacgcacactctaataagcacaagccattcaataacactcagcaagatagacaacaatacgacctcaatcgacaccacatcaaagaacagaacactcaatacacactaatatgtacacatcagctatgtaacacatcagtactacgcatgatacaagaacaaacaaagactgctacatacaccgtacactcgatgcgcacgcaccgatcaatcaaatacgacaaaatactagacaaaccactaaaatgaagcatataaatcaccaaatacatatattaaagaggacgagctaacgagactgaggtcagggctcacgcacagcgaccgaggcaaagggtacagccgagctggccgcacgccgaaacgtgcgagcgatgcgtcggcgaaccagacggaggagtcgccagatcgcgcgcacacagagcgcgccgcagcgcgccgcgccgcgatgcacgcgagcgtgcagacagatcaggaggaataagaggaagcgagcgagccgggatcccgaaagtaggagccaccggaacaggcataatgagagatatcgagaatacggatgatgatacacatgcgactagacgatacgtactaggcgcacgtgtcaagtaggataatgagcagtcgagctcacgcggagacgatttgagcggctgagctgcgaccactagtcctatctctcacgagtggaccctcagtgatgggtgaagacatctatcggacagcttgatgatccattccctgattcacatacgtgtcgacgtgaacacatacgtccacaaccaatcacatcctaaggctccatcactccaagatctgtcatccagtagacaacagcaccacagcca

SEQ ID NO: 717526 - DNA, 309 bp, Homo sapiens
gcttgttcgcaagcgggtttgcctgtcagaacacaggtgtcgtgaaaactaccccgtaaaagccaaacatgggacaacggaagaagactcgatatcaacgattgtcggtcgatctgagacagccgtagatttctggggcaaggtctcaccagcatactggtgcactcgtgcagtctaatacaactggcgcgtggccctccgaacaacaaggataccaatttgaaacaacactcttgcacgaacaggacgcgctggcctggagactgcggacacacgggctcccgttccaatgttatgccctggcgtctt

SEQ ID NO: 717527 - DNA, 2392 bp, Homo sapiens
  misc_feature (91)..(91): n is a, c, g, or t
  misc_feature (131)..(132): n is a, c, g, or t
  misc_feature (367)..(367): n is a, c, g, or t
  misc_feature (369)..(369): n is a, c, g, or t
  misc_feature (385)..(385): n is a, c, g, or t
  misc_feature (393)..(393): n is a, c, g, or t
  misc_feature (486)..(486): n is a, c, g, or t
  misc_feature (502)..(502): n is a, c, g, or t
  misc_feature (508)..(508): n is a, c, g, or t
  misc_feature (539)..(539): n is a, c, g, or t
  misc_feature (619)..(619): n is a, c, g, or t
  misc_feature (675)..(675): n is a, c, g, or t
  misc_feature (681)..(681): n is a, c, g, or t
  misc_feature (686)..(686): n is a, c, g, or t
  misc_feature (693)..(693): n is a, c, g, or t
  misc_feature (708)..(709): n is a, c, g, or t
  misc_feature (730)..(730): n is a, c, g, or t
  misc_feature (733)..(734): n is a, c, g, or t
  misc_feature (743)..(743): n is a, c, g, or t
  misc_feature (766)..(766): n is a, c, g, or t
  misc_feature (778)..(778): n is a, c, g, or t
  misc_feature (783)..(783): n is a, c, g, or t
ggaacaccaccagtgtggagcagcccagccaagcactgtcaggaatcctgtgaagcagctccagctatgtgtgaggaggaggacagcactnccttggtgtgtgacaatggctcttggctctgtaaggccgnntttgctggggacgatgctcccagggctgttttcccatccattgtgggacgtcccagacatcagggggtgatggtgggaatgggacaaaaagacagctacgtgggtgacgaagcacagagcaaaagaggaatcctgaccctgaagtacccgatagaacatggcatcatcaccaactgggacgacatggaaaagatctggcaccactctttctacaatgagcttcgttttgcccctnangagcatccaccctgcncacggagncacccccttaaaccccaaaggccaaaccgggagaaaattgactcaaaattattgtttgaagactttacaatgttcccaggccatgtaatgtgngctcatcccaggcggntgctgntctctctatgcctctggacgcacaactggcnatcgtgcttggactctggagatggtgtcacccacaatgtccccatctatgagggctatgccttgccccatgccatcatgngtctggatctggctggccgagatctcactgactacctcatgaagatcctgactgancgtggnctatnccttcgntactactgctgagcnntgagattgtccgggacatcanggnnaaactgtgntaatgtagctctggactttgaantgagatggcacngccgnatcctcatcctcccttgagaagagttacgagttgcctgatgggcaagtgatcaccatcggaaattgaacgtttccgctgccaagagaccctgttccagtactaccttcatcggggatggagtctgctggcgtccatgaaagcacctacacacagcgatcatgaaagcagtgatcatcgcacatcacatggacaggacactctactgctgaacaaactgttcctatcacaggggctccaatctattgtacccttggcattgcgcgatcgattgcgacacgagaatcactggcctatgagccatgagacctgaaaaccagatatactcgcctctcgcgaacactattgacaggtctgagtgtccatctgtgcctatgccctcacgcatttgatcaacaaccgacaataagtcctacagaccgagataaaaccctaggccgtgctaccaaacggtcgtggagacgtgcatcaacaaacacggtcgccgacattgggggaagtcattagtgacgctagtacgctctcgtcacagtcaacgcatgagcaagacggagaccgaccaggctgcacacacggccactcccaggcaagccacacaccaaccacagcacaacagctcagaacgaagcagcacagcagccagcacagatacacaacgcagcagggcacagcctcgacagccaacagacggacaacgacaggcgaacacaacagaccaccagcatcaagacaaagcactgacttgctactcagactaccatatcacgcacactctaataagcacaagccattcaataacactcagcaagatagacaacaatacgacctcaatcgacaccacatcaaagaacagaacactcaatacacactaatatgtacacatcagctatgtaacacatcagtactacgcatgatacaagaacaaacaaagactgctacatacaccgtacactcgatgcgcacgcaccgatcaatcaaatacgacaaaatactagacaaaccactaaaatgaagcatataaatcaccaaatacatatattaaagaggacgagctaacgagactgaggtcagggctcacgcacagcgaccgaggcaaagggtacagccgagctggccgcacgccgaaacgtgcgagcgatgcgtcggcgaaccagacggaggagtcgccagatcgcgcgcacacagagcgcgccgcagcgcgccgcgccgcgatgcacgcgagcgtgcagacagatcaggaggaataagaggaagcgagcgagccgggatcccgaaagtaggagccaccggaacaggcataatgagagatatcgagaatacggatgatgatacacatgcgactagacgatacgtactaggcgcacgtgtcaagtaggataatgagcagtcgagctcacgcggagacgatttgagcggctgagctgcgaccactagtcctatctctcacgagtggaccctcagtgatgggtgaagacatctatcggacagcttgatgatccattccctgattcacatacgtgtcgacgtgaacacatacgtccacaaccaatcacatcctaaggctccatcactccaagatctgtcatccagtagacaacagcaccacagcca

SEQ ID NO: 717528 - DNA, 757 bp, Homo sapiens
tccccctgcgttcaccttctgcctctacccgcctgttgggtttaccaaacccaaaggaaaaaaaggaaaaaaaaaaaaaaaacaaaaccagccgctctcagcccggtgatggccccacgtcagaatgtatcagcagaggtgtgaagatgatcttctggctgaccctcttacctctctggctgaggcagctggcctcctggatctctggccagcccacctctctctgcttgctccccgcttgtgcacaatgtcttcttacactgggacggcccactggctccctcagctgtccagtccccctccgtgggccggccccaggtctccgtggacaattaagcaacagattgatattgtgagttgctcgggtgtggggaagtgaggcccagacctctgctctcggccatgtatttgtgtgacttgcccaggactctcctcaggtggggctggccctactcaggaattacactgaaagttaaggggccctcgataagttcccgggtgagtggttttgggcacccgctcagggattccctaagggctgaaacagttgttctcccgttagggtctgacctccgaatgcctttcatcgtgggggacacacaaaccaaacagcaatattgttcggtcttgatctgtctacgtacttggggccctgctgctttcccccgtgggatgccgaagaggcccttttgcccggctctgtccttgccaggcctgccggcgtccgtgcccgttaatgtcccgtccccaaggtctc

SEQ ID NO: 717529 - DNA, 199 bp, Homo sapiens
  misc_feature (42)..(42): n is a, c, g, or t
ttgggggcccttttccccccccgggggggtttttttttcccncccccccccccccgggggtttaaatggcccctttggggggggccccaacccccgttttcccccttttttttgggggtttttccggggttttgggggggggccctttttttttttttttttttttttttttttttaaaatatcccgggggggggggga

SEQ ID NO: 717530 - DNA, 376 bp, Homo sapiens
cctgtattgacatctttgttctggttttgacttggcttgacttggtaagactagtctttggaacttgccccactccacgtgagtggaagcttggcctgatcacccacggtgtgcctgtattggcacttttgttctggttttgacttggcttgacttggtaagactagtctttggaacttgccccactccatctgagtggaaacgtggcctgatcacccacagcatgcctgcacgggcactcttgttctggttttgacttgacttgaattgctggatactttggttttggttttgacttggcttgaattttttggtactcggattttgaatttcgtgattttggtttggtataaacggtaaaagtgtgttcccttca

SEQ ID NO: 717531 - DNA, 461 bp, Homo sapiens
gactttacatgagagaaaccgtgtatattctttgtgtgcgaagaaacaccctgaaggattgctaacacaagcagctctatgttgtttttaagtgacgtacgacgatgagcgttcaatatacgagactacctgtcatgcccctgtgaggaggagcatcatttacctacgtgttcagtttgatatcactggggattgatgacctcgagaacaagtcgaaagactcacttgtagacctcatcgggatctgcaagagctatgaagacgccactaaaatcacagtgaggtctaacaacagagaagttgccaagaggaatatctacttgatggacacatccgggaaggtggtgactgctacactgtggggggaagatgctgataaatttgatggttctagacagcccgtgttggctatcaaaggagcccgagtctctgatttcggtggacggagcctctccgtgctg

SEQ ID NO: 717532 - DNA, 260 bp, Homo sapiens
tcgtgctgagagatattctttcttctgccttggagtccggccctccccagacttcagttatgctagtctaagacccagattctgacaacattggggcaggatgagagggctgagcctgggttccaaattcctctagtgatctcctcacctctcccactccatggataccaagtctttcccttcattcccccaaacatcctgtagctctaactggagcacattcacttacgaacaccaggaaatcacagggcccttgtctg

SEQ ID NO: 717533 - DNA, 702 bp, Homo sapiens
gcagaaacctgcggaaaatggtagcgctggcggctgggccgagtgggtgtctggtgccggcgtatgggctacggtatgttgttggcgactgtgcttcaagcggtgtctgctataggggctattgtacactcggaggcatagcagagagttaggcttatatctagcaacttgcttcgcagctcttgtgatctctctcgagcaccagttcaacctgctctcagctaggatccttgattgcagaggcatgctgtcaggaggcagcacaaatttgaaaccaaacaagctgtatgcaggagctatccttgacgttccgtggatgaaaacttggggaacggttccctcaagtccaagctttctgtttacggacgtagataaagccaaaacctgtatcagagcgacatgaaaattcaagtatgtccgtggttccagaccctgtattaacagcttatgtggacacgacaatgggaacattggcttgacagaacatgagcattctccacattgcgaaccacagacccgtgtcagcacgactacctagaagtgacaaccgcttggacacgcatattacatcttgcttaaacatctgtcctaatccctttagtaaacctttatcaacatgcaaactctttaccagcactaagacaatacattacagaatcgcttgcctcccatcgaaccagtcctatcacttggaggcttaca

SEQ ID NO: 717534 - DNA, 461 bp, Homo sapiens
tctatattcatgtatgttggtgtccatggattggtatttattttttctaaacaggtataggcctctatggactgagtcacgcaccacccccattacattactgaggactataattcatgttctgtctcacattctctaagtgatctttataaccctttaatacatttttcttccaaactgaggttagctggaaaaatttaagagattcaacaatgagcatctgtccttcctctataccagtactagagaaaggtattaatcacgtcgtagtctcccttccaacacaacaaaaccaacgaccaatcaaacctcatttccagcctatcacccctcacccactttacacatttgacacacaacctttcaccacacccaaatattcctgaattatagttaaaactggatttataaaccgagtaaactcaatagtactgtttagtcctttataaatttggtgatag

SEQ ID NO: 717535 - DNA, 893 bp, Homo sapiens
  misc_feature (8)..(8): n is a, c, g, or t
  misc_feature (66)..(67): n is a, c, g, or t
  misc_feature (72)..(72): n is a, c, g, or t
  misc_feature (131)..(131): n is a, c, g, or t
  misc_feature (135)..(135): n is a, c, g, or t
  misc_feature (169)..(169): n is a, c, g, or t
  misc_feature (297)..(297): n is a, c, g, or t
  misc_feature (306)..(306): n is a, c, g, or t
  misc_feature (308)..(308): n is a, c, g, or t
  misc_feature (330)..(330): n is a, c, g, or t
  misc_feature (339)..(339): n is a, c, g, or t
  misc_feature (341)..(341): n is a, c, g, or t
  misc_feature (889)..(889): n is a, c, g, or t
aaaaaaanaataaaaaaaaataatcacatgttcatgcagattaaatatgtgtcttcactgcccctnnaaggngagcactctcactgtcagctccttcaattggtgtgtcaaggggtgagtgtcaaagggancccncaaatgtaattccgaatggggggcaagttggaanaatactcggggaaaaggtaaacaagaaggaagcataacaacgcccatggaccattaagcttcaaaaggtcaaggaacatgcaaggaccattggccatttacaatggtacatggcaccaaaagatcttnatccttcanangcactgggactataggaacttnattcttcanangttcagggactatacgaccttgattctttggaggctgtaggactgtggggccttgatccttaactaatactgggagaatggggtcttgattcttcacggactcggggaccacaggaccttgattctttacaggtgccacaactgcagaatcgtgaacctttgcatgctctgggactacaacatcttgatccttgactggccctgagaccactaaaccttgattctttacaggctcagagaccatggaaccttgattctttatgggtgctgtggccatggcactttcatccttcggatgctctgggaccatgggatcttgatccttgataggtgctgagaccatgggaccttcatccttgacaggtgctgggactatgggaccttcacccttgacaggtgctgggactatgggaccttgatccttgacaggtgctgagaccatgggaccttgatccttgacagatgctgagaccatgggaccttcgtccttgacaggtgctgggaccataggagcttgattcttcacaggctcaggaattctaggaccntgat

SEQ ID NO: 717536 - DNA, 224 bp, Homo sapiens
cgctgactctatgaggatccccttcgactgtgggctcagaggcagaatgtggctgtcaacgaactctgcggccgatgcatcaacccctgtgccgggcgcagccaggcgtccgtgctctaagggcagctgttccacactcgcctgctatcaccgtgccaccatgtgtgcgcagcaagctcccagggccagccagttctacaggtctggagggggcgccgtatgtg

SEQ ID NO: 717537 - DNA, 223 bp, Homo sapiens
ccaggagctttggcggcgggttgggtcactgttatttcctagcactttgggaggaggctgagacaggcggatcacctgaagtcaggagttcaagaccagcctggccaatgtggtgaaacccagtctctattaaaaataccaaaaattagccaggcatggtggcacatgcctataatcccagctacccgggaggctgaggcaggagaattgcttgaactcagaa

SEQ ID NO: 717538 - DNA, 843 bp, Homo sapiens
  misc_feature (55)..(55): n is a, c, g, or t
  misc_feature (65)..(65): n is a, c, g, or t
  misc_feature (114)..(114): n is a, c, g, or t
  misc_feature (116)..(116): n is a, c, g, or t
  misc_feature (150)..(150): n is a, c, g, or t
  misc_feature (246)..(246): n is a, c, g, or t
  misc_feature (296)..(296): n is a, c, g, or t
  misc_feature (325)..(325): n is a, c, g, or t
  misc_feature (340)..(340): n is a, c, g, or t
  misc_feature (398)..(398): n is a, c, g, or t
  misc_feature (423)..(423): n is a, c, g, or t
  misc_feature (439)..(439): n is a, c, g, or t
  misc_feature (548)..(548): n is a, c, g, or t
  misc_feature (559)..(559): n is a, c, g, or t
  misc_feature (589)..(589): n is a, c, g, or t
  misc_feature (613)..(613): n is a, c, g, or t
  misc_feature (633)..(633): n is a, c, g, or t
  misc_feature (672)..(672): n is a, c, g, or t
  misc_feature (687)..(687): n is a, c, g, or t
  misc_feature (712)..(712): n is a, c, g, or t
  misc_feature (740)..(740): n is a, c, g, or t
  misc_feature (752)..(752): n is a, c, g, or t
  misc_feature (759)..(759): n is a, c, g, or t
  misc_feature (774)..(774): n is a, c, g, or t
  misc_feature (818)..(818): n is a, c, g, or t
aaacgcatgacagtctgaaatagctctctggtgccaacctccaaattcccgctgngtgacttcanacccccactagttgacagagcagcagaattcaactccagtagacttgantntgcctctgggcaaagaagcagagctaacgagganagggatttaaagagtttttcttgggtgtttgtcaaacttttattccctgtctgtgtgcagagggattcaacttcaatttttctgcagtggctctgngtccagccccttacttaaagatctggaaagcatgacgactgggctttttntcctatgtctcttgggaactgcagctgcnatcccgacaaatgcnagattattatctgatcattccaaaccaactgctgaaacggtagcacccgacaacactncaatccccagtttaagggctgaagntgaagaaaatgaaaangaaacagcagtatccacagaagacgattcccaccataaggctgaaaaatcatcagtactaaagtcaaaagaggaaagccatgaacagtcagctgaacagggcaagagtnctagccaaganctgggattgaaggatcaagaggacagtganggtgacttaagtgtgaatttggantatgcaccaactgaaggtanattggacataaaagaagatatgagtgagcctcaggaganaaaactctcagagancactgattttttggctcctggtgtnagttccttcacagattctaaccaacaanaaagtatcaaanagagagnggtaaaccaagaacnacctagaaattattcacatcatcagttgaacaggagcggttaanatagccaaggcctaagggatctagg

SEQ ID NO: 717539 - DNA, 869 bp, Homo sapiens
atgccgctcattcatataatttattatactaacatttaccatctcaattgtaggaagactagtatagcgatcaaacctcgtatctgtccctaaatatgctcggagaacggaataaatgacttatcgaccgtgtggcataaatagtctactctcaataaagccatcaattacccaatacatctcttagtcatgtgatagtgcccttatagcccattacttaggtgcttcgcaagcacctggtattgcggccgggatggcgcctgaggcactgtaactgagcttcatcaaaatacatcactaaaatgttataggccgtaagcagtacggttacaattatactcatcaggaaacctatgtgccaagtgacgtggtaggttcaatccagttcaatccatatcaaattttagttatttcaacgcacccatggggacattgcactctctcttagagaagggacacattaatggggagtccggcaacaaacacaacacccaacaagcacataaattattaagcattcatccctctgactaattgttttaacccaaaatcaaaacaacaaacctattttaggctggttccccgaaccttttgtcgctgccgacgccacccgtaaaggaaaacgccgcccgtgcctaatacgtaaactaacgcgtgaactcgcgtaacacgcgttcaggagagtcatgggcaaaagccaacagaccactttgatgcgcagggtgaaccaacttgagtccaagggaaaaaaaaaactcgtaagcttcttctataactgaagtctccccagtgacccaaattctccaagggagttccccaccctgcagaagcctaaaagaaaaaaaataagaagaaacccgcgagggggg

SEQ ID NO: 717540 - DNA, 203 bp, Homo sapiens
tacatcgagctcgctccgtttccccatacagagtaatcccagcttcacttcttgatcaccaccactgagtccacctcacacagtaccccaaggcttacacttctgtgattaccaccacggggatcacctcacacagtactctcagttttcacgttctttgatacgccaccagccgaaggagacacctccatacggtgactccg

SEQ ID NO: 717541 - DNA, 173 bp, Homo sapiens
attgtacatgacgtatgatgtctagccttctgccaggctagtacggacatactatctggtgggcactgtagcggaaacttgaggatgaaatcagtagagctgcatgcacttgaaaaggcatggcctgtactcctcacttgagtgcaaggtccatcgaccaaagccctgttctg

SEQ ID NO: 717542 - DNA, 324 bp, Homo sapiens
tcagaaaggcggcgccgggagcttgtagagatcccaggcccttcgggttccagtctggttaacatttgcccttggaactactcctgcacaaggtctcctaccaccttctgctggagctgtgcttgggcatcagcaatgagtatgccttctatagtgctttgtgttagctgacttttctgcaccctgttaccttaggatattcagttctctcaacctcaagattgagacggtggtgggtatgcttcttcacttccatatgaccttcatgctgtactggaatatcacatgctacgaggtcatccttcacactactagtaagccaag

SEQ ID NO: 717543 - DNA, 197 bp, Homo sapiens
caggttgcccttttgaatccacagattcatgaacatatatcgataagtatctccattctcacttaaaatacatacgctgaagcggcacgcggtatcatgtcgtggcgccgcacttaacgcgaattggtgatacctgtcgagtacctaagttgtactctattatatacgtgtatatcattgactttaatacagcttct

SEQ ID NO: 717544 - DNA, 185 bp, Homo sapiens
ctagagtatccccccatgctgctctcaggatcggaagtactggcaacctctgagggcagggggagccggccgcaggaccccttccttatcgccgaccagtggcccgcgctgcccctgcaagctggactcggtctttgaggacccgctctccaagaagcttttcttcttctctgggccgccaagta

SEQ ID NO: 717545 - DNA, 755 bp, Homo sapiens
  misc_feature (594)..(594): n is a, c, g, or t
  misc_feature (646)..(646): n is a, c, g, or t
  misc_feature (732)..(732): n is a, c, g, or t
gggggctgaactgaaatacactagaagaggctggctacagtatcctttattaccatgtcagattaaatagctgctttaaaaacctgtgatactgtgaaagcacccacagaaacatgcaaactgatttcctacaaaaaatgaggggattataaccgatcagagtcacatgtcgtaacaatataaagggtggcgaacgcaaaagcagggaccacatgatcacacaagatgccaaagtttgacagtgatcttaataaattaagactgagtaacatcctgcctttagaaaaaaataaccccgaggtggacaccagggcaggggtggtggagaagaatcatgagtccagaacaaccgttaataacatgcttgtgagctatgcggatgtataaatgaacacaccccgaactaggtatcgaaaaggctgcaaaaagatgcgatgggatcatacaggtgatccataattgttgccaagagaataaacaatgggcgtaaaacggcggttctaaaccttgaactgatggatttgggattggttcgtaaaaacaaaaaaaacactctgggaataataaattcacaggttttccaaaaaaataagnaccatttaaatatctgcttgccggtcggctagagcaccccatgttttaaccntgagtatcctatgggtaggggccgtaataaaagataatttggccatttagcctttgggggggtgggtccccttgtaaacggcgcgnccctataaaaagccggggtggga

SEQ ID NO: 717546 - DNA, 116 bp, Homo sapiens
ggagccatgtggggcgtcttggctggatggggagccagaagcctggaggatgcaagcattcttacttgctgcaggactctgtgcgcgagttgggctggcagtcagatttctggggg

SEQ ID NO: 717547 - DNA, 126 bp, Homo sapiens
  misc_feature (38)..(38): n is a, c, g, or t
ctgtgtcactctatgtattggaactgctgatatcattnatagtttggtgaacatgcagaagcacacgagtaagtactccctcatacaaacacctgtgtattcaaattaattttttggctttttttt

SEQ ID NO: 717548 - DNA, 627 bp, Homo sapiens
  misc_feature (575)..(575): n is a, c, g, or t
  misc_feature (581)..(581): n is a, c, g, or t
gaaaatcatgctcaagtgtgaccccggtgaccagaatccctgatgttgatgggctctgcacctcgatccccacagtcttgggatctcagggcacaatggtggcacatgggtgggctctgtatgcagacccatttctctttggaatgtcaggcaagtaagcgtaactacgaattcattgtgaacagagagtccttacagcagaggaattggtgtgccttaaagatacatttcggggatagtatgggggcagactgtgtagccagaatgccctgtgcatgctgagcaagagtccagcaagtagagcagagttgggcaggcaggtgcctaggaactccgcctgcttcctgtgagtgcctgcattgaggaaggaaatctggcccgttgggttgtcctggttccactgctactgacccagaggggaactgagggctgagttatgaaaagataacttcatgaacgacttaactggcccagaagctgatttgcatgaaaatctgcactcagggtctgggatgaaggcttggccagcacttccagtttagaaacgcaatgttgccctagaagaccattattgncggtcngtttggacggaacgaaagagaaccacacaacaatcagataaacatt

SEQ ID NO: 717549 - DNA, 404 bp, Homo sapiens
gtttttgaaagtaggaccacggagaagaagtgccattttcatcacatcatacaggcatactttggagacaatgcagatttggttccagatcactgcaatgaagcaaatattacaataaagcaagtcacacaaatttttttggtttcccagtgcatataaaattttatgtttacactatcctgtagtctggtaaatgtgcaatagcattatgtctaaaaaacaatgtacataccttattttaaaatactttattgctaacatgttactggcacaaacacgaagtgagcacatgctgttggaaaaatggtgccaatagacttgttggtcacagggttgccacaaacttttaatttgtaaaaaatgcaatatcagcaaagtgcaataaagtgaagcacaataaaacg

SEQ ID NO: 717550 - DNA, 640 bp, Homo sapiens
  misc_feature (550)..(550): n is a, c, g, or t
catactgagcctacagggctggagcattcaaagattcgcgaactgttgttgggtgcaggaccccaaagtaggagctgctctctttggaagagtaaaaccatgacaacctcagaagagagtctgggtctcctccagatgacactcagcgtgtgtacaaagaggagacatgggtacacattggtagaaaaaaacagaaagctctcaaaagtggccttagagacatgggatgccacaaatggggaaactgaggtccaaagtgtgagacaggctcagctcagagacccatgggcagcaagcaccaatgttagctaaacttttgcttcttaactcgggatccctgcgcccaaacaaccagttaggcttggtgtaatatacgctccactttgctcatttgttcatatgtcacgattattaatcaagtagtctaacagaaggtgagggcagaaaaatagacacagcccccaccatctaagtacttcctggctatagaaggaaatgcttgaacaccaggggagacaatgcttggagagggatatggcacagggatggngaaagtgctttggcttgcaggaaaccctgagaaagtgggagaaaagcattttctcccaaaggaactaataatctcattatcactcctaac

SEQ ID NO: 717551 - DNA, 234 bp, Homo sapiens
tgcggtctcatatttaggtaaagctctaagactcctgagccatctttatatgtaagctggcttacctaggctggggcttgaactaagtaaagaagccaaggagtacagatctacgatagcagtagaaataagtctcattctaacaacattgcaactactgttaagagtccaccccgatgaagctgtatcagcatagtgtatctatggactgaattctataatgtatatattggt

SEQ ID NO: 717552 - DNA, 750 bp, Homo sapiens
tctggctaccggtgactaaaatggaagcgtttgggggtcgcggtccgaacttggggcggggggtccggccccaggacagtttaaccgaattccgtccactcccgattccttcagggatccggcgtctgcactttacagaggtccaatcacgcggacccaaaacccctagggtagaccgggacctcagtcctcggcgtaaatgttcgagggcggagtgggtgattggccgcaaactaatgctggggatcctacggctcctgggctcgtttccgcaactattctctcgctattatgcgatgtcaacaacagtaccatggcttggtgtcgcctcggggcgaactaaccgctgggaattcccatgttatttggaacgcaatgttcctccggcgccagatgggtgagattggatgagagagacgctttctggggagacgatggggaccacagtctaatatgtcctctaaagagcttattacattccatgggctggaccaggggcccatggttacacgccgggcgctccgaaagtatgaacacctctttggtgtgagaaaccaccagtgggtccatccgagagggcttatgcgctggatggagaagaagacgtcttccctccggtatatgtgtggcgactatggctgcggtgtgtgtaacgccttatgagaaggccccctttcgtctggggcccatctggggttcatggggtggccataacttggggcctacaagctcttctggtctggcagaaaa

SEQ ID NO: 717553 - DNA, 347 bp, Homo sapiens
tcagcacaccgcgttggggttcgtttagtaaatttgaggcccacggcatccgtgcacggtacgaacgcgtacgtggccatcggccattcgcgtttcagcgccgcattaattcgggcgtacccgccgtttgcatgttggtccacatcacagtttcgccgtgcaccgtcgtcattattcatatacgtcgcagttagcgtgcgcccggcgtatatcggcgccatttcaatagccagaggggtcccagcgttcacacacatgaaagtgggtcagcatgcatctgccatcattcaacaattttccacggtaaggtttagaagtgtattataagggaacaaatatacgtggga

SEQ ID NO: 717554 - DNA, 241 bp, Homo sapiens
ggaccagcccgggtatgcttccaccatgttgtgatgcagcaagaaggccctcaccagatgaaggctcacaatctttgacttcccagcctccagaactgcaagctaaatatttcttctgtttacaaatatctagtttgtggcattctattataacagcacaaaatggattaagacaaaaaaattggtaccaagattggagttgttgctatagtacatacttgaaaatgcggaagtagctttg

SEQ ID NO: 717555 - DNA, 341 bp, Homo sapiens
tttttacccccttttttatgggggatttcaagtcccccttttttttcccggttttttccagggtccagggttaaggggtttttttccaaacccccacccttttgggaattttcccttaatcccccctgctcctcctgggggcctgaaaaaaggactggcaaaaccccctttgttgggttttgggctttaaaccccgaaaacccccccattttttttccccggtggggcccccaacggggggggccaggttttctttttcccccaagggttttgcccctttcccctttttccctgactccaggcctgaaccccccccggggggtaaaaaatttttgttatta

SEQ ID NO: 717556 - DNA, 210 bp, Homo sapiens
tgcctgtacttgtatcaaggttttgcatatattttgtcacacgcgatgtccgagaagctggcatcctccgccctagcagcacatctgccccacgtattcttcgtgtttccgtgctacctctatactcgttcagcagcctggaagtcgacagctctatcccagactttcttcatttggctcctatcattgtgatacgaaataggctcattt

SEQ ID NO: 717557 - DNA, 591 bp, Homo sapiens
  misc_feature (407)..(407): n is a, c, g, or t
  misc_feature (411)..(411): n is a, c, g, or t
  misc_feature (420)..(420): n is a, c, g, or t
  misc_feature (427)..(427): n is a, c, g, or t
  misc_feature (435)..(435): n is a, c, g, or t
  misc_feature (441)..(441): n is a, c, g, or t
  misc_feature (444)..(444): n is a, c, g, or t
  misc_feature (449)..(449): n is a, c, g, or t
  misc_feature (452)..(452): n is a, c, g, or t
  misc_feature (455)..(455): n is a, c, g, or t
  misc_feature (471)..(472): n is a, c, g, or t
aacacagatatcgcccaggagctctgccttccccccgttaaatgcactgctccatgctgggctgaagatgcaatccaggccgccctggctgatttcaattttaaacaagaaccccaaaaaggagaggcagagaagaaatgagccctccctcggggaagcctccagcaggccacaccagctgtttcccacctggtgtgcagtcaccttagatgttcagaaaccgcttcctttcccctgaagaggtatgagatacgccccatacttgctgttcccgttatgactttcatgcaagccaaaaacaccgtttcattgttttgaatcctgtggtttttttcagcccccttttatcgccttaacctagttaatgtatattttgaattgtgtgtatgacctcagaactgaaattnatantgaagtgcnagttttnatagcccntgaagngcntaagnatntantttacctgattatttnngggggaattacccgtagaatgccctggtttgaatattttatagaacccattgttgtacataaaacagatttgggcatatatatatatgtattaaaaataattaaataatgggagattga

SEQ ID NO: 717558 - DNA, 177 bp, Homo sapiens
  misc_feature (11)..(11): n is a, c, g, or t
  misc_feature (30)..(30): n is a, c, g, or t
  misc_feature (41)..(41): n is a, c, g, or t
  misc_feature (122)..(122): n is a, c, g, or t
  misc_feature (166)..(166): n is a, c, g, or t
gaattcggcanaggaaaaagacaagaactnagaagggcccnctgactttagccacaaggcaatctcttgtatccctgcaagtaagcattttagtgagataggagggcaaatccaagcttcanagactgaaatgtgactggaacagtgagtagaagtaagtcctttnttaaaagccat

SEQ ID NO: 717559 - DNA, 247 bp, Homo sapiens
gatgaaggcgtttagtgaaatctacctattttatggtatataagtctcattaagttgtccagctgtggaaagaataataacagatatttatttattgggccagttgctgtgggccacaaattatgctgagctttttttaatgtcagtttcattttattttattttttgagatggggtctcactctgtcacccaggctggagtgcaggggcgcaatctcagcttattgcaacctctgtcttccaggcc

SEQ ID NO: 717560 - DNA, 803 bp, Homo sapiens
gagaaaactgaaccgaaaccaaataagttcaacgacacgtgcgtcagttacaattttacatgggtcgtctattttacccgtcctacaagcctctagagatacttcgagatctcccttcaccatttccgacgcgtcatctacaggactcaacatttgttgtagccacaggctttccacggacttcacgtcattatgggctcaactttcctccacctatcgtgcgtctccagtccgctctaactcagatagttctcacgttgtcacgatcgcaaaactatctactattgtggctttcaggaagtccggactcgcctagatacgtgacaattcttcgtaagatgtggttggactatgttcctgtatgtctccatctattgaatgacgggtctctaaggaaaaaagagacagacaagaatacacaagagaacacatacaaaaagacacagattagaacaagacatatacaatacagaaacgccgtgcaacggaagcctaggacgcagcgaggagacaaaggatcctggaaaggcacagaggctgcatggggtgctagcagccagaaagcacctccgaggccatcgcccgcctacacggggcggctgtacggagcaggaagaatccagcagagcgcgtgcggcctgtgtcggcggaagaatgccaggcgaacggagaagcaggaggatcccacagaggggacaaaaagggaaaagggggtgggaggagacccctgagcaacctggcaggggcgcgctatgaaaggaggaggtgctgaagccgcgaagacgccgaggggcgggctgaag

SEQ ID NO: 717561 - DNA, 995 bp, Homo sapiens
  misc_feature (575)..(575): n is a, c, g, or t
gacccagagagccctgagcagtcccaccggcgccgcggtctagttacacatcacaccccgggaggagccgcagctgccgccagccggcccgcagtcaccatcaccgcaaccatgagcagcgaggccgagacccagcagctcgtcggcgccgcccgccttcgtcctgccctggcgtcctcatcccgtccgtcgagaccagggcctaccccgtactggatctcagcgcaaggcgcgggtgtgctcgtgtgcgactcacctgcgtcgcgttactgcgcgctggccagacaagccccgggtctctcgacgaacggaagggtcttgggtgacacaggctttcactgttgtctccaatggggtacccgggaatggccactattgcgtccccccattcacaatagggtacctgcagcacacataggccatgggatttgcttgtaggcgacagaccatccacaagggtggacacgataacaacgagacgcaccttgaatcctcctatttggcacaccattggccttcctctgcatgggtgtgttcgccagcatgtcgccgtatagcatctgctgttccacaanttctaggcactgtctttccctcgggaacgtgtgaccgacccaagttggcagtgtgcggacacaaggtgtcagagcagcccccagtggggaagatcaccgcgaaggaccccccggttgaccccggatttccagacgcacttcgtggtgggcgtgagttaggaagggacttcgttcccgccaggagtaagcgccttctatcctggtttcaccgttttaatgaccgtttggctcgctttccttacacaccggtacccatattatcacgatcgcgtacccccttttagacaggcctatatgtggttctccttgcgccccaaacagcaacatccacgattagcattattgctcgcagacgcaagttagaactttacagaggttctataccacaagggcggcccattcggcagtaagccctcggaa

SEQ ID NO: 717562 - DNA, 776 bp, Homo sapiens
  misc_feature (249)..(249): n is a, c, g, or t
  misc_feature (634)..(634): n is a, c, g, or t
gccaggccgaggctcaagcgtgcacagcccaggctcaggctcaggctcaagcccaggccacaggcccaggcctcccaggcgtgacagcagcagcagcagcagcagcatcagcagcagcagcagcagcaacagccaccaccacactttcagtctgatggggcagccccccagggtgggggctggtggggacagataccccaaccctgcagcccagtgttcctttgacctgaccccgtatgggacggcagnggcatcatgaggacatctggctcactgtcatcaccaccaccgttgacgtggagctgatggtcagcttttagagatccgtgctgtcgcccactggtaataggaagaagtggctctgcgtgcttctgtctaccactatctgggggaaaagtgcgtttcttgacagacaggacttgactacatcttcttgggcctatgacaccgatttgctcccaggatacatgcctttttctgaacttgtctttagagagaacatcacccctactgacttgaatggaatacggagctgatggatgcctgcatcaacgtccactcgttagcgaagcttatacaactggggggtcgctgctcaagggacagatatggtatgaccttatagaaccttgtnccaggggggcacgggccctatggcttccctccgtatgttagaaggctggactactgtaggactataggttgggcctcccagatctcagtgaggccccagatgcaccgccctattgtgcttttcgtgcctgctaccgaggttt

SEQ ID NO: 717563 - DNA, 883 bp, Homo sapiens
ggtggtgctcctgggctgctgggcctccgtgagcgcccagaccgatgccagcccggccggtgacgacagagggcctcaactccaccgaggtagccctggccaccttcgtgaactttgcccgtcggaccaggccccccgggatctcccaggtctccagtggccctcctctcgcgccccacaggtcctatcacccagttcaccggtacagttgggccgacagccaggttttgtattcaaaaagcaagtgcatctattcattgaagttttatcacgctaaacccatacctcaaatcagtatttgtaaatttgttgaccaggattaaatccaatctacttttctgcattcatattacactctagtaaacctgcattatcctttattaatcgcacaactaacctgatgcatagaagcaattttagatacagtctgagtgcagagacaccgatctgataggtatctacacttgagagtgctcgaatcatatgtttccttcactataccagactggatattcctactgctgctaatatattagtatggggttcctctgccagacttcagattcgtttctgagaatttccttcggtccctgacgatcattcttctgtgcactgaataataaccctgtcaagcgttatcttgggtgagacccagggctgattaaagttgcacctatgataagctacgatttggagaactagttgtgaagcacattgagtgccctccagctatgggtttttacagcaatggcccggaaatcttgacgggtacgctgattcaaggcaaacaaggtcctatcactgttcagtccacgccttcacagcctctaattaacgcctccccgaagggcacgaccctcatgtgccggcccccactctccta

SEQ ID NO: 717564 - DNA, 362 bp, Homo sapiens
  misc_feature (9)..(9): n is a, c, g, or t
  misc_feature (15)..(15): n is a, c, g, or t
cccaaaatncccttntccatttttggcccctcctactgtaattaagcctatgccatttgttttgtgtggttttccttgcctataccttaatcattaaaaaattccttgatacccttgtcaagtaagtacccatgaaattttaaagtaagttataaaagaattgtcactggtcaggtgcagtggctcatgcctgtaatcccagcactttgggattagccctggcgtgatgactcttgcttatagtcccagttactcaggaggcttaggcaggagggttgcttgagctcagaagtttgaggttatagtgaggtatgatcataccagtgcactctagcctgggtgacagagcaagacattgtctc

SEQ ID NO: 717565 - DNA, 472 bp, Homo sapiens
  misc_feature (17)..(17): n is a, c, g, or t
  misc_feature (103)..(103): n is a, c, g, or t
  misc_feature (194)..(194): n is a, c, g, or t
taattaacccttaaaantctgttgtactgcccttcctaaacttggccctcccatcaattcaagattacccaaaaactgtcctccttaaactggtttctttgtnctcccaaccttgtgcacttgcctatcctattcctgtgtgctgcagccctgagtttttaaaaaacagaaaatgaggggcccaggtgtggtgngtgtcacgccctgtaatcccagcaagttgggaggctgaggcgggcagatcatctggggtcaggagttcgagaccagcctgaccaacgtggagaaacactatctctactaaaaatacaaaattagccaggcgtggtggtgcatgcctgtaatcctagctactcaggagcctgaggcaggagaattgcttgaacacgggaggcagaggttgcagtgagcagagattgcgccattgtactccagcctgggcaacaagagtgaaactccatctcaaaaaaaa

SEQ ID NO: 717566 - DNA, 656 bp, Homo sapiens
  misc_feature (31)..(31): n is a, c, g, or t
  misc_feature (54)..(54): n is a, c, g, or t
  misc_feature (154)..(154): n is a, c, g, or t
  misc_feature (649)..(649): n is a, c, g, or t
atctcccaggaactgttctaggcattggaangagcaaaagaaatcaagaaagancgtatcttttgctttatatctgtactagtaattcaaaggataccgaattcttaataaaagtcaatagccttgctcattatgaatcagacttttatcattngtttaccactcactgaaaatgaaaagcagaaaatgcaagttacacttcctccttcctatcaatttcttgtaacatagtggatgattgttattctaatttctttgactccctaattagattttaagaagtatagtgaatattttttcttttcatatttaatgtctgtatagtggttgtacagatctctaaaataaggtggagaagaaaagagttctgaatgggggtaaaataaaaagtggaatgttgtgtgtctgtgtatgtaatataaaatatcttgttcatgtttttacttacatgtgagaatatacttattttcttctatagattcttcctattaaagaaattaaacactattcagtgcaaatagcataaaataaatatattaatatttttagataacattgtttcttcattgtataaacacataaaaatttttaagtcgtttcagttcattcagttacgagggggcttcacaaactgtggaaaatggaattnaagatat

SEQ ID NO: 717567 - DNA, 403 bp, Homo sapiens
gtggcctatcatatggtctatcttggagaaagttccatgcactgatgaataaaatgtgtattccatggttgttgggtagaatgttctgtaaatatctgttaaattcatctgttttacggtacagtttaaatcaattgtttctttgttgactttatgtcttgatgacctgtttagttctgtcagtggagtattgaagtcccccactattattgtgttgctgtttatattatttcttaggtctagtagtaactgtttcataaatttgggagctccagtattaggtgcatatatatttagaattgtgatgtcttcctgttggacaagaccttttatcattacataatgtccctctttgtcttttctaactgctgtggctttaaagtttgttttgtctgttataaat

SEQ ID NO: 717568 - DNA, 432 bp, Homo sapiens
tcatcaagtgaaggaaagcggctgggctatatccatcgaaatttggctggaaacagattttctgatcacgtagccctttaatcagtattccaagcctgggatgatgctagaaggggtggagaagaagcagagatacgtgttggtgagcacacaagacttaatatggctacactaagaatgacctgggaagccaaagttcagctcaaagagatttggattaattctgggtttccagacgatggtgcgttgacacaagtgtttactagcactggaccagataataattgggatgtggtaatctccctccgggccttgggtgtgtaccccaaggtatgctatcataaggaaacgaggaagattctcaccagtgaagggcgtaatgcacttatccacaaatcatctgtcacttgtcctttgagcagccaagacatg

SEQ ID NO: 717569 - DNA, 235 bp, Homo sapiens
cacgagggggatcattacattccattcttttgcggggttcaacggcctccaggaatggcgatccaggtgtttcgtccttcattgataattcctccgctctcaacaaccctcatgtcaatctgtaaaaaatgcacaatttaggccacaaaaacaacactccccccaatgagcctcagcctaatcagggtgtcaaaaagtctacagggcccttgaagaaatggcacttgattcaata

SEQ ID NO: 717570 - DNA, 191 bp, Homo sapiens
gctagtgaccatcattacgggatcactagaggttgtgatccttctgaccaacacgatgatctcccattctgaggtaatctaccgtaaaaataggagataaaaaaaaaatatctgggcgtggtagcacgctcctgtagtcctagcgactcgggaggcagaggcagaagaatcacttgaacctgggcctctag

SEQ ID NO: 717571 - DNA, 489 bp, Homo sapiens
ccaaaacctttaccagctagaaatctgcataagattcctgccagttagaataaattcgtacattcattcgttgattccaaagtatttccaaagaactgtttatgtgcaaaatcctgacgcaggtactttcatgcagtctgcttcatttaaatcttcaaaaaccactgttaaagtagataggattggggggaaatgaagagaagttggttgataggtaaaaaaatacaattgatagaaggagtaagttctaatattggatagtatattagagaaattgtagttaacaataatttattgtgtatttcaaaataactagaagagaagaattgcaatgttcccaacataaagaaaagataaatgttttagatgatggatatccccattaccctgatttgatcattgtatatcacacacatgtatcaaagtatcacatgtactccaaatgtttgtacaactatgatatatcaataaaaaaatacaaaataaaaa

SEQ ID NO: 717572 - DNA, 533 bp, Homo sapiens
  misc_feature (352)..(352): n is a, c, g, or t
ggttctttgtttttagttgtgttggcggcggtggttcggcaacaaggtttgtttccctgcgcggtattcccccctgagatgtctctgggtgagataacgccgtgtgttgcccggctccttaccgcgtggtgtttaaaccgcgccgcgcccctgatgatcgctgtgtatacacgacctccacctattatagggcgcgcgtatagctctctctcccgccagctccgtgacagagcccgatgccgccagcgtaggtcctcttgagtgccgagggggagaccgcgcccgcgcgtataccttctgtagtagcccaaaccacatataacgagagtgtatccacatcggccggtgtcgncggacaattatatcgccccggggaatctcgcgcccctttccgggcccgcggtggtaccacgaaatcaacaccccaagcatcaggtgtcttttgttggtgagccctttctaaaccaaagccccttgggtttttccccaaaaaaagggatcaaaattttttggggaaaaatgggcccaaaaaa

SEQ ID NO: 717573 - DNA, 203 bp, Homo sapiens
  misc_feature (158)..(158): n is a, c, g, or t
tctagaggatcgcatttgcgaggagtctcaactcctgactcaggtgatcactgctcagcctacaaagtgctaggattataggcatgagcactgtgcctggcaaacataacttttatatgcactgggaaaccaaaaaaattaatgtgacttactttatngtgatattcattttatttgcagtgcgtctggaactgaacctgcaa

SEQ ID NO: 717574 - DNA, 157 bp, Homo sapiens
gtcgaccaagtggatatttggagcgctttgaggcctaaggtggaaaaggaaatgtcttccataaaaactagacggaagctcagaaacttctttgtgatgtttgcattcaactcacagagttcaccttccttttcacagagcagatttgaagtcgacg

SEQ ID NO: 717575 - DNA, 240 bp, Homo sapiens
gcacatcacacactgacagagaggcactccggatggtggtgaggacagcgactcttaagatgggacatgggcgtgtctggccacactggaatccagtttaggctgtatgcggaattccacctggaaagccaggtgttttatagaggttcttgatttttacataagtgccaataatgtgtgagaaacttaaagaacagctaacaactaaagtgtgaggacggttaataagaaaacaaaaag

SEQ ID NO: 717576 - DNA, 421 bp, Homo sapiens
taaaacatgaccagtcccgaacgtgatgactttactgcccatctaccaactgtaacctcggcgccggtgacgtccctcccgctggtcaacactaccggaaccagaaacctgtgaaggtcgaaacagctgagtatcctgtaataatgttagcgttgttaataccacctgctttaggatagaatgtaaatatgagagctattgttcacataactcaacagtaagcgattgtcaagtggggaacacgacagactactgtaccgtaccacggccactccagtgccaacagccaatactacagctaaacccacagtacagccctcccctactacaactaccaagacagttactacatcaggtacaacaaataacactgtgactccaacctcacagcctgtgcgaaagtctacctttgctgcagcca

SEQ ID NO: 717577 - DNA, 222 bp, Homo sapiens
tttttttgggggggttaaaaccccccccccgggaggccccaaaaacccccttggaaaaaaaaaaaaacccccccaggggtttcttggggccccctgggggggggggtttcccccggggccctttgggccccttgggccaaacccaaaaaaaaatgggggttttggggaaaaccccaaaccccggggctaaaacccccaggggggcggggtttttttttttta

SEQ ID NO: 717578 - DNA, 266 bp, Homo sapiens
atgaccacatcaagaccgccctgtctagtaaggacgggctcctgcccactaagtaccggctcttccggtagaaccgctccgcggactgacaggcccagggacctgaacctggctcccgttcccgtgcgttttaggttggacactaatttagtcaagaagcctgtctggttgtatcaccggtgcacctaatgtcaccacagcacccacgctgtttgcattctttccggactcagtgtgccgatcagtggcatcagtatcaaccctga

SEQ ID NO: 717579 - DNA, 273 bp, Homo sapiens
  misc_feature (120)..(120): n is a, c, g, or t
ggggaagacctcacaatcatgtcagaaggcaaggaggagcaagtcaagtctcccgtggagggcagcaggcaaagagggtaacttgtgcagggagactccccatttttcaaaaccatcagntcttgtgagacttattcactatcacaagaacaacatgagaaagacccgcccccatgatttaattacttcccacagggttcctcccagaacatgtgggaattatgggagctacaagatgagatttgggtggggacacagagccaaaccatgtca

SEQ ID NO: 717580 - DNA, 268 bp, Homo sapiens
atctgcagtctagcagaaattgatagaacattgtaaaagagctacaatatataactttggggttgtgttgtctttttagggccacacccacagcatatggaggttcccaggctaggggtagaattggagctatagctgctggcctacaccacagccccagcaaaacaggatctgagccatgtctgcgatctacaccacaactcatggcaatgccagatccttaactcactgagcaaggccagggatcgaacctgagtcctcatggatg

SEQ ID NO: 717581 - DNA, 368 bp, Homo sapiens
  misc_feature (267)..(267): n is a, c, g, or t
  misc_feature (274)..(274): n is a, c, g, or t
  misc_feature (285)..(285): n is a, c, g, or t
  misc_feature (295)..(295): n is a, c, g, or t
  misc_feature (339)..(339): n is a, c, g, or t
  misc_feature (346)..(346): n is a, c, g, or t
  misc_feature (355)..(355): n is a, c, g, or t
  misc_feature (360)..(360): n is a, c, g, or t
tttgtgtccaaagtgtccccaactgccctgtgggctcatgcccttggggtgggcttgtgcccttgcaagggcttggccacttggcccttttggagcaaacactttgtgccccccatccccccccctcaattttagcccagtatcagcccctcccatttcggggctggggtagggggacccaggccctccccgcctcctccctggtacacagggttttgtggggcccccaagcccctcctgtgccccctcccatccatagtgcatggngtgtggngcccccagggnttcaggacanatcaggcccccccttgtgtttacccccatcccccctgtgaacgngcccctnaataaagtnggggnaacgagga

SEQ ID NO: 717582 - DNA, 335 bp, Homo sapiens
gggcggctggtctggaacttgagacgcacatcggtgatgtcaaaagattttcccaggtacagcgtgaggttgatggagttggggtactgcacccagaccagcatggtctggctttgcccccaggtggtgtcggcctggttgttgtagtcggtcaggaaggttgccccgtgatgaaggtggggctgcccggtgtcgcacaggtgacaggacttggtgacaccggtcaccccggtctgcacacagtattcctcgggcggagtcccacacgtgttggtggcccccacagtcacgttgaaagcggcgttgacgaaatcgggcatgcagcgctgcggccg

SEQ ID NO: 717583 - DNA, 2392 bp, Homo sapiens
tgctgtccagggtgacaattctcaggtgctgcagctccttggaaggaacgcagtggctggcctgaaccaggtgaataaccaagggctgaccccgctgcacctggcctgccagctggggaagcaggagatggtccgcgtgctgctgctgtgcaatgctcggtgcaacatcatgggccccaacggctaccccatccactcggccatgaagttctctcagaaggggtgtgcggagatgatcatcagcatggacagcagccagatccacagcaaagacccccgttacggagccagccccctccactgggccaagaacgcagagatggcccgcatgctgctgaaacggggctgcaacgtgaacagcaccagctccgcggggaacacggccctgcacgtggcggtgatgcgcaaccgcttcgactgtgccatagtgctgctgacccacggggccaacgcggatgcccgcggagagcacggcaacaccccgctgcacctggccatgtcgaaagacaacgtggagatgatcaaggccctcatcgtgttcggagcagaagtggacaccccgaatgactttggggagactcctacattcctagcctccaaaatcggcagacttgtcaccaggaaggcgatcttgactctgccgagaaccgtgggggccgaatactgcttcccacccatccacggggtccccgcggagcagggctctgcagcgccacatcatcccttctccctggaaagagctcagcccccaccgatcagcctaaacaacctagaactacaggatctcatgcacatctcacgggcccggaagccagcgttcatcctgggctccatgagggacgagaagcggacccacgaccacctgctgtgcctggatggaggaggagtgaaaggcctcatcatcatccagctcctcatcgccatcgagaaggcctcgggtgtggccaccaaggacctgtttgactgggtggcgggcaccagcactggaggcatcctggccctggccattctgcacagtaagtccatggcctacatgcgcggcatgtactttcgcatgaaggatgaggtgttccggggctccaggccctacgagtcggggcccctggaggagttcctgaagcgggagtttggggagcacaccaagatgacggacgtcaggaaacccaaggtgatgctgacagggacactgtctgaccggcagccggctgaactccacctcttccggaactacgatgctccagaaactgtccgggagcctcgtttcaaccagaacgttaacctcaggcctgcagggctgcctctgcccctttccctgactgtcaaggacaactgactcccccatcagctcctacttacttccgacccaatgggcgcttcctggacggtgggctgctggccaacaaccccacgctggatgccatgaccgagatccatgagtacaatcaggacctgatccgcaagggtcaggccaacaaggtgaagaaactctccatcgttgtctccctggggacagggaggtccccacaagtgcctgtgacctgtgtggatgtcttccgtcccagcaacccctgggagctggccaagactgtttttggggccaaggaactgggcaagatggtggtggactgttgcacggatccagacgggcgggctgtggaccgggcacgggcctggtgcgagatggtcggcatccagtacttcagattgaacccccagctggggacggacatcatgctggatgaggtcagtgacacagtgctggtcaacgccctctgggagaccgaggtctacatctatgagcaccgcgaggagttccagaagctcatccagctgctgctctcaccctgagggtccccagcctctcaccggccccagctgacctcgtccattcagcccctgccaggccaagcccagccactgccctcccgggcagatctgggcccaggcacctctgagtccatagaccaggcctgggagaatgccaagctgcctgcccgaggctggtcctgaaggcctgtctcccactaaccccgccttccagcactttctgtcattccaggctgggaaagtctagagccccctttggcccctttccctgactgtcaaggacaactgactcccaggcttcctggtgggtgcagcccactccctctgccctctgctccgttccctgggggctgggactaaagaaatgggtgtcccccaccccatcagctgggaaagcccaggccgcaggagtgggatgcccgttggactttgcccctcacactggcccagcccctcacactgccccaccccgagaaccctcagctctcaaaggtcactcctgggagtttcttcttcccaatggaagtggcttaagagccaaaactgaaataaatcatttggattc

SEQ ID NO: 717584 - DNA, 156 bp, Homo sapiens
ggcttggcttaattttttcccaattttttggttgattatggggttccgcctattttggccaaaattggcttggattctaaggtatatccaccctcggctctcccaagggtttatagaaataaaaagggtgtagagcaacccttccccccagaaaga

SEQ ID NO: 717585 - DNA, 296 bp, Homo sapiens
acttagattttgcgaggtggtgtatgaattcgaaacgtcttatgtgcgcatagtgcttatagtcatattgtggttttgctaccatgataccttatcgctgcaagccaactgcggggaagtcctggccctgtagaagtgccacctatgactaccaaattctctgctagttgcttcctggtgtctatcggacactgtataagggaatccaatattaaagtggcaactgattgctcttcattatcttgttcaaaaagaatttccacaactgaatctctgattgatccaaggatatgtaa

SEQ ID NO: 717586 - DNA, 742 bp, Homo sapiens
  misc_feature (421)..(421): n is a, c, g, or t
  misc_feature (424)..(424): n is a, c, g, or t
  misc_feature (584)..(584): n is a, c, g, or t
  misc_feature (598)..(598): n is a, c, g, or t
ttagggtcctggtggactaggtcggcttcgtctccttatccagtcgcgagtatctctgccgcaaatagtgctccgccagtatcatcggttcaaggccaagtacagcatccgtagacttgtatctccctcatcttattgctatttatatggaaacatgggagactacatggtagcaatgacatggtatcctcatggtcgatctggacataggttcataatccaggatgctatgttgggacaagagaattaacccaagagccctggaaacgagagacatgggtcccaaatggatcaacatcacgaaggttctactccagtcggacaatgtggtgattaccagcgacagctggaacgcaagggcacacgtcctagcattttcttaacactgcaaaatggttttgcacgtgatttaacggctgcntanttagagatggtacaggttctgtcctagaatgcccactatcacgccacaaatgtttcccactttaagtcccaggataatcattgtcctccctgccgtagaatgccattgaaaactccgatgtttggcaggatcggtcctatttgtgaaatctccctatgtngggagattaacaantggacttagaattcagataaattaacctggaaaggcaagagagtaacgacatagataaaaaccacatgtaacagtgacaaagacactttgtgtggggaccggtccgaggggcctccctccgaaagaaaacagttcttccagaac

SEQ ID NO: 717587 - DNA, 1301 bp, Homo sapiens
ggccgcagccggggcctggtgcagcctccgtggtcgctgtcagtggaagcgcagtgcgtgccaatggaacccgggagcggtcgctgctgctgagtgcggcagtgtcgtgcagtccaaccgctgattgccctgcaccccctccgcgtgtgtggtccccgcagaggatccaactaaaccttgaactaagaagaccaactgtgttgtgatgcagggggagccatcagctgcctcagtgccgttcagggacagcaacgggtgtttctcgaaggccggagcaccgtacacgaacgcacgtcccgtaatcaggattacacttggttgaactactccgggagccaagccatctaacgagaggatgaaccaggacctgaccgatggcacacttgaaactgacgactacttggcacagcctcgaaagctctggcctgctggcccatggggaagatacacgtagtcgcagcgctagccgcccgattgacacggccaaactttcgctgaggcccgcaattctagtagcacccaaccaagggcaattacaaaggagagcagaactcccctgattaacaagtgatcaatcaaccggaagaggagtgcacgaagacaacgtatcagaccacaagagcacatagacattgtgccccacacaaccaccgagggcacgcgggacgctgcatccgggctcgaacagggtacaactacgtcttaggagaatgagagagggcattgggcactgctcctactacggacgacggaagcacgcgagatggacacatagcgaccaaatagtcggacatgggaggcgggccgcgtacagacagtaccacgcgaacccctatgcaaccagacacgcgccaacaggacgaccacaactacacacgacacgacaggcccagtacacggaacacaacacgggaacaggagacaggcccgcacgcacaacgccagcaaagaccagagaacacacgagaacgaacaacagacacagaccgcaccacacccagaccacaagcacgaacagaacgccaggacagccagcgagccagcacgagaacaagccacagcacggggccgccaggacgaccagggccacgcgccgcaacacccacaacacacaagcagcagagaggcaaacaggcggacggaacgccagcaggccagaagcgcgcacccaaaacagcacagagcaccgaaggcgcgccgcgaaacacggggggccggacaggacacccaccaggcacacgagagcgaaaccaatgaccaaagacgcgacgccccgacaggggagccacacagcgacccgc

SEQ ID NO: 717588 - DNA, 154 bp, Homo sapiens
  misc_feature (9)..(9): n is a, c, g, or t
gcatcgtanctaatggtcggcatctattactaatggtcggcatctttactactggtcgattcttatactaatggtcggcatcttatactaatggtcggcatcttaactaactggtcggcatctttactacatggtcggcctctttactcatgat

SEQ ID NO: 717589 - DNA, 1861 bp, Homo sapiens
  misc_feature (1)..(1): n is a, c, g, or t
  misc_feature (576)..(576): n is a, c, g, or t
nctgtttgggatgtggttcggcgcctgttcgtgcttcgctgttgcagtcgacttcagtactcgtggcgtgtgtgtttttgttagtgtactgcgctgcatcgctcttctatgtggtagttgaacgcagtcttggtggcctccccccggtggttctttcatgtctgtcgtcgagatgtgccgctgtgtttgtgcttcctcctgttgtgggccgtccgctgctctttccctctccgggggggggttgatttttcttctccttcgtcctctgttgtggtgagattgtctcgtggtcgtccctcgtcctttcctccctttgtgactgtggtgctcacactggcgacagccaggtggtgtgttggaccgaccacgcctgtgttgttgctcccttggttgccaccggctgcgtggggccgaccacccctctttagtcttcctcttcgtgcgtgtttttcttcggggagacagctccttattttgttctcgcccccccgttgttgggtgtccctcccctacgtgttggcgccccttccaacagttgtggtggttgcgggagaacagacaccccacacgacaggnttttctcagcgcgcttccgttgtttcccctccggcgggttttacattacccggcaggccctccctctctaagggtgttggggccccccctgtccggcggggcactcacaggagagtgtacttcctgctcgcccgcgggcccctcaataagaggcggggttgcgcgcaaatagtttgttggagtacacccctctcttatatagagggacccaccccgggggggagataaaagttgttatcttgcgaccaccaacagagaggggctcttaataccttctccttattagccccctctcgtgcctcttaaataaaatcgaagcggagtttcttcttcgcgcgccgcctccacagacaaacgtctcacagaagaaattgggtgcctactgctaaacccacactcgtgtctctgccacacacgtctaaccccccaccacccacctctgggggagagactttttttggagaagataatatatttttgcggcgtgtttctcgcccttctgggttatatgacacacaggagcccaccccctttgcttacagcgagatccctcgcgtgttatattttcccccccccccagcggaggacctcctattccccacagcgacatcgtggggtatttcgagatatggcccccctccacagcccatattacactggagacaggtatatatggtcttccacacaatatatcgccccacacatcgtgggatatgagacacgccacacactgcgcacatatatcgcacatactatctcctcgcgtatactgtgcccacgcactgtcacacccccatggtgagattcggatatatatcccccacatagcgccaccacgggatatatattccccccagtataagaactctttcagaagatgctatacacagtgcacagatagtgtctcgtctctgtgtgcgcactaatatcgctctctctgtgtatatatatggtgtgtggtgtctatactcggagcccagactatagtgttatatgttaagacacacacacataggggacatctccacagaaaatagacgtcgccaggtgccacgccagataatattatggccgcccctttgttctgctatatttatagattggtataatttcttctgcaccacttccctgaacaacacatatttttagagtatttttgttggacatagaaaaatagcccgcgccactgtctttcccccaaagttaatggcccctgattctgaaatcacccattaatgataggccatagcctggcccttccccattaaaaataatttgaagacct

SEQ ID NO: 717590 - DNA, 190 bp, Homo sapiens
gaacagtggtatcaacgcagagtgcccattactgccgggccatactggtggaggcgggcgacatgtggttgtctgtgtgtttctgttctctgccatttctgaaggaatcagcagaattgggggaaaccccaaagggtgtctggggaaaaattttgaacaaaaaaagtcggtgtgttaatggtgagaggcc

SEQ ID NO: 717591 - DNA, 144 bp, Homo sapiens
tcatcgaaaccctacggaaacgcaactatagaaggcccccctaaataaccgcgttaattgctgtgcggtttagggtagatcaccaggttaatgaagggtttgatgaagggtttcgatgaggggttgatgaccagggtttcgatg

SEQ ID NO: 717592 - DNA, 822 bp, Homo sapiens
gttgtgctgctcgcgtggacaccgcaatgcccctcagttagcctcgtgcccaagatggcctgctttccactcgctagcattccgtcgggggtccgtgtcctgtctcggtggccggtaaccagggtcctctgatgccctgcaggcaagtacacctagcagccaatgtcgcgttggtcgcggcatagaccctgtgtgccttccaggagctgcttaccgtcgactgtgtgttccgcgccggcggcatcagaaactatcgcataagtagaggtactagcgagcacgatgcagcagccggccttggcatgttctattgtgtgtcccgtaatgatactcggtctcacactctggaacgcaagcacgcttatagataggccacgagtacattttacttaaatagcccacaggaacatcgagtcacagacggtgattgtatacgaatgaattacccagtggaccgacgcagttcgtcttgatccattatatgtcgagagtggcacgacaagagactcgtaaaccttggcacttattgactaattcgtgcacagtttgccttagcaaggcattaaacagagctactaacacggttgaccactactacttgcgaacggcgacaaggagggccgaacaaatctttcaactccagcatggcaagcccaaccgcttgcagcattgccccaattgggcgctcattagagtcgcgaagaagccttgacaaggcgaagaacccagtacgcacacaacggttggttcctatacggagaaatgcccatggtcagctctggacccatagtgctgtgcttgtcggcgattaccattggttgt

SEQ ID NO: 717593 - DNA, 890 bp, Homo sapiens
  misc_feature (27)..(27): n is a, c, g, or t
  misc_feature (311)..(311): n is a, c, g, or t
  misc_feature (330)..(330): n is a, c, g, or t
  misc_feature (888)..(888): n is a, c, g, or t
ggaattctgggagatatacctcaagtngagatttgggtggggacaaagccaaagcacatcattccgcccctggcccctccaaatctcatgtcctcacatttcaaaactaatcatagacacattcccaacagtcctgcaaattcttaactcatttcagcattaactcaaaagtccacagtccaaagtctcatctgagacgaggcaagtcccttccacctatgagcctgtaaaatctaaagcaagctagttacttcctaaatacaatgaggatacaggtattgggtaaattcagctatccctcacatataaangtgaacaacagtacataantttcctagaggtaaaataatttttgtttatataccccacaacaagtatgagtaatagaatattgtttgtattattatgtaattgtcctagaattcataaattactacattctcattccttggccaaatttctgtgatagaattggcagtaccatatattacattagtaccaagtacattttgtaggtgacaatactgctcttttcatcaataccactctttacatgatggattcatggctagcaaacagaagtgaattatcagtaaacttgatgcatttggcctttctgatttttagataacgagaaaattaaaagtaggtctcccagctgtttccattcacctaacatcatgtcatttatttattaacagacaccttatcttgtctcttgcccttgctatttattcatttgcatgctaaaatttatcctaatgttacaaaagataatgcttacattactgaatagaaatgagtaagtttattcatgattgcatgaagagaaaacttgtttcaatagggactgaagaggaagccaaaaaagtatatcaaaatgtgatnaa

SEQ ID NO: 717594 - DNA, 784 bp, Homo sapiens
cgcatgattcccagctcatagttcagtgtctacccggcagatgctgtacttcatgagttccttcagcaatgctggtgagcacatgatctgtggcaggtgtctcctgtgagtgcaaggatgccacaggtacacaaaccacaacccagccctgcctgccagaagcttctgtcctagggctgggagccacaaatggaaacgaactactgagtgttctcattaatgtcaggagggtgacaagagccacgggagggggacagagagcaatgggtggcacttaggggaggccctgagcagggacagccacgcagacacaggggtggggctgggacccaggaaccacagttcaccaactgaaacaccgagttctctctgaaaaagccccgcgtgaaattccctctgaagagggcctgcagaggccgggccgctggctgtaaggggcccttggcggagtaggaaagtgagtttcatccaggccttttaagtagacatgggcagggttcaggaaaaccagcaaaggagggggaagcactgcaggactgaccctagcgggagccactgaacatccaggagcgacaggacgacagagcccaggaggagcggatgctgccagagaggccagcggggggctgagcttggcagtgatggagctgcagaaaggatgttacagcccccacttctcccaccatctgggagagatcaggggctcaggtggcggtccacagaggccaacctcacagggcacagggagatctggggggcaacaagagcccctgccagcacaaag

SEQ ID NO: 717595 - DNA, 309 bp, Homo sapiens
  misc_feature (17)..(17): n is a, c, g, or t
agctgcgggaaatggcnagtggtggcggctccttcacccaaggtgcgtgcctagaagggcctcctgagtagctgggacctacgggtgcacacccacccatacataccctggctaattgtttgtattttttgtagaggtgtggtctcaccatgtcgcccaggttggtcacaaactcttgggctccagcaatcctcctacctcagcctcccaaagtgctggaattacaggcatgagccactgtgcccggccctttttgatttttagtagagacaaggtctcactatcttgcccaggctgaccttcctggct

SEQ ID NO: 717596 - DNA, 1223 bp, Homo sapiens
  misc_feature (536)..(536): n is a, c, g, or t
cagacattcagatcctggattctaatccagactcactcttcaggaactgtgagctcctcctcctcacacagtctaacatagaacgatgttgaaaaaaagcactggagagaataatgagcagttcgcaaatgaagactgtccccactcctcccggaaatgcgctgtcagctttgagcttatacgttaatactagaaaggtcctgcattagttttaaagactgggcgcctcagctagggcctaggtgtatacaaaactggtatgtatgtatcactgtccgtgtgagctaggggggaggagtcgatctgtgggcactaagtatttagtgacataacttcgtgtgtatcttcttcttgtcacagcggtctcttgctagcttcgtaggacacgcacttgttcctgttggcatcgcagttttacgctgtacatgcactttgtaaaaccaagcttgcgcctccatcttcgttgcatcaagtgcttaacttatctccctagactccattttctttctttttactataaagttttgcatcccatnttctcgatcaaccatacttttgttacccttaagatttcttttctcctcttacgacgtttttttgttagaatgaacgttcttaaacttacttttgatgcaggacaccttccttaaataacgttaacgactctttgtgcccttttctccaagacttgtctgtttggaacacttcctcttccttttccttgataccgaccctccatgtaaacgcggggtacacatctctggtaatatccttagcttactgcaagctttgcgccttgtgcccacttgtcacttacccaaaacttaaaacttttcaacaggagggttcctcttttacgtgacagacatcacaccaacggttctattggcccactgttaacagccttaacttacacaccacaagacagatacaccagaccccaaggcgcgggtgcgcagccgctgctctctctcagccgaacagctacaatccccgcattcgccaggggaggagccagcccagacggcctctcacaggagagaatgcacccaggcgcgctacatgcgtgggctcagcaccaaaggttgggaccccccctaatttcgtcgtgagacgcttgcgcacacacaaacaagacgccaacaacgggcacacgtgggccccggtcgcacctagccacgacaaccgctcgtcgctgaccctgcgggcaaacaacagcgcgc

SEQ ID NO: 717597 - DNA, 1431 bp, Homo sapiens
ctgctgaggttgcgcattcggtggggtcccgaattgcggggttcgatccggagagtcactggtgcatcccacgctagtagccgggcgaaatgtgctggatgccacaagagcaggacgaaatctagacaggtgcggataatacgtggatggatgctactgcgaaggctggagaggttctgcgatgtgcgaactttcatgcctactggcacacccagagaagtgcggtgcccccctgggcgttgctgatcttgccaaaagaatacaacagtgggggtcgcactggcacagggtgccatagacgggcaatggaggtgcagatgcagataggggccctggacgcgattgatcatgtgcacaactggagcctaggtcgtccacaaaagatgatggaccccaggatgcatgtgctaccgctggatgcacctgtctaggacctgcgtgcccctgggatccaatgggacatgagcgcgcataccaaggggtagaccctagcgggacgccagacatcaatcacaagtacagaccatccgatacaaaaaacccatgtaagtcgatagacacccgagctggagcgatgtagagtaagtatttagtttctgcgtgttagtggcaactaggctggccactctggcatcagcgggggcactcagggcctttgcggacacgtctagcaattgggctggggcaagaccgcggtctggatccccgtagtcaacgccccgagcccgcaaactggtctccccgatggagacacagccgaatctataataggcgaggattccccgttggggggggaaccttgggacatgagctgaaaaggcttgtgtggtatgagctaaagtggcatttgaatcagggggctgggcaccacatcgcattcgagtcgcacggattcatattgtgggattgaaaaggattcaataacaggagggacgcggctgtgctcgcttcgtgagcactgtgcccccatgggcccatgggtataccagggcagacaaccaccgagcatgaatgacgcttgtactgcaagtcctcacagacggggacggtcccattttctgtgacaaaatctggcgtagcaacacagaaatgatgtcacgatatgagaccacatgacagtacccacctacagtgcagtttccacagcaaagctataacctgaaatcgacaggggaccgccaccacgcgggtacacaccagcgggaacccgtgcagagcccaacggggagtagagacccgtccccgcggaagagcgagccccacacagtgagcgcacaacccacgagtagagatcacaagggggacccatgggggaacccatgggacgcgacaccaggtggagcaccacagcggagcagtacacgaggacagttgacacaacaacgggcgcaacacctgtcgccgaaactcgcatggcacgaaatgcgggag

SEQ ID NO: 717598 - DNA, 721 bp, Homo sapiens
cactaagtctcatgacagcattcgctgccatctgataggctatagcacttatcttacaagtaagcatgcttgctaggacgctctggctagcctgttgaaacgcatattataccatctctactagaattgagtgcatatactagcatgagactgacacaccagcttgttgatagatagacgcagtatgatcatttgaaccatgcaggtgagccttacagtgtctcatatatcaacatgagcactcgtatctgcatgacggacacagactcattttgacacaggatgacttcaatgctacacagtcgagcgcgtacatgcataagtcagagtctcatgcgtatagagcgcactattcatacacgtaggctccatacgaaggtatacaccaatctctagcagattaatctacagtcatgctatcactggctcacatatatgcaggtggtaggcatcatgcggaccttgaatcccggatgtccgctacatgtacgcataatcctgagtcgcgcacgtttaccatatgaagctggctacacggcgattatatgatcaccatattgtacttcactatgaccaggacactaagtacgtctgcagtaccactggacacggtaccctggataccattaacgtagttatactcacgacttttaacaggccaccaagttaagcaccttgcgcattccctcatttgcctagtagccttgaccccggtagcgcc

SEQ ID NO: 717599 - DNA, 290 bp, Homo sapiens
taggctaatgtgtgtgtgtcttagtttttttaaaaaaagtttaagaagtaaaaaaaattttgtttaatagtaaaaaaaggttatagaataggatataaagaaggtactttcgtgcagctgtaaaatgtttgtgttgttagcgaaacgttactacaaaagagtcaagtaaaaggccgggcatagtgcgtcacgcttgtggtcctagcactttgggaggccgagatgggcagatcgcttaagcccaggagtttgagaccagccaggaaaatgtggtgaaactgcgtctctgc

SEQ ID NO: 717600 - DNA, 240 bp, Homo sapiens
ctagcttggtcagtaccctttctggtcatttcttgtgtgtgttggcctttctttctttctttttgagacacagtcttgccctgtcaccagcatggagtgcagtggcgcaatcttggctcactgcaacctccgcctcctgggttcaagccattctcctgcctcagcctcccaagtagctgggattacaggcacccaccaccatgcccagctaatttttgtatttttagtagagacggggtt

SEQ ID NO: 717601 - DNA, 942 bp, Homo sapiens
gctgcaggatcagtgaggggccctgcgccagctcctgctagctcccttgccctttcgaggtctgaagccagcgtgccctatgggtcatgccgggctgagggccatgcaatggatggctctcaaggtgcgtgtccatgggcaaagatggtagtgggtgtcctgcctgtggtgccgccagtaccagattcccctgtgtcatcccatcattttccatatcctggtgccccccacccctggaagagcccagtctgttgaagttagcttaagtagggttaatatccagcttgaaaggcacgttgatttcgtgtaccctaccaggagcttcttgtttaccttgtaagggttagccttcatcttcctgtgtgctgaaacgctcctttgtgtgtgtgtcagctgaggctgggggagagccgtggtccctgaggatgggtcagagctaaagtccttcctggactgagagtcagactctctgcactgtgtaacttcccgggccaggctgcccctaatctctgtaggaaccgtggatatgtctgccatgttgccccgttatctcttttcccctttcatgttccaccgataggagcaactgcagactgaacagaggctcttactctttcctatgtcagtgttactgtgtgcttggtcttgttgactatatgccatctcaggacacttccgtaaatgttaggttccctgtcaagtatagtaccacgccgcccagtagtgcccagaaggaggtataatctggggcccaggcagggtaggctgaatatggcggaggccaacgtatgtgggacggggcacgtgaaactgagcgctggcgcagagcaggagggggaccgaagcgacgcagacgaacaacgggacagggcacgcgcgcaatggtggaaacacgcggacaacaccaaaaccatacagcgggcagccgaaaaccaaagagat

SEQ ID NO: 717602 - DNA, 441 bp, Homo sapiens
  misc_feature (7)..(7): n is a, c, g, or t
  misc_feature (20)..(20): n is a, c, g, or t
  misc_feature (37)..(37): n is a, c, g, or t
  misc_feature (55)..(55): n is a, c, g, or t
  misc_feature (68)..(68): n is a, c, g, or t
  misc_feature (80)..(80): n is a, c, g, or t
  misc_feature (155)..(155): n is a, c, g, or t
  misc_feature (176)..(176): n is a, c, g, or t
gctagcntcccaagcccaanatctgtcccccaaggcnggaggcttcccggccctngacccatcagacncccaagtccttnaattttgggaacttgaactggctctccttgctcctcaggttgcagcctattgtgggaccttgtaatcatgtaagntaatacttaacaaactcccgnttatatctatgtatctatctatgtatctatgtatgtatgtatgtgtgtgtgtatctatctgtctgtctatctatctatctatctatctatctatctatctatctatctatctatctatctgtccatcttattagttacgtccctctaagagaaccctgactaatacacacacaatctcttaagattgagtcaggaagaaattgaaaccctgaagagaacagtattgagttctgacattgaatcagtaatttaaaacctaccaact

SEQ ID NO: 717603 - DNA, 114 bp, Homo sapiens
aatcctacctttcttttcccctttcttcccttctggccactattacattattactgtaactactgagatatatcatcaatcataaaattctagggatggggacacgaatgttca

SEQ ID NO: 717604 - DNA, 224 bp, Homo sapiens
attgtttttgtggaaaccaaaagaagatgtgatgagcttaccagaaaaatgaggagagatgggtggcctgccatgggtatcatgtgacagagtcacagagctactggtctaatgatcaacatgaaagctctatctgatgctacagatgtgctcagagctagatgtgagatgtatgtcatcatatactactactctaagatatcgatgagactagtacacagcag

SEQ ID NO: 717605 - DNA, 345 bp, Homo sapiens
ttcttgtgctggagaggggagaaaagaggaaggatggagggaggggagggctgacttgtctggtgggaacagcccattgagtccatggctggggaagggaattctcacaagtggctgaagacgtgaacgcaaagggaacacagagtgaaaatccacacccaacagcaaaggataaagagccaggggacagcagggacagacaaaccagcagggatgcctagagaacgatttcaaggcctgggatgcttcaacctttatttttttctcctttcctcagggagcaggtaggatgccaggatgggactcgcatctgctctggttgatgaggcgctgtgaggatggcag

SEQ ID NO: 717606 - DNA, 380 bp, Homo sapiens
tagacacgggagactcgttaacaagggcgggagcagatcaaaagggggcacatgtagatgagggtgcaatatatccatgtggtaacctttgtggatggcactagggtgtcaatccagaaactcttcaccggtcttagggtccaacagatggggtcatacctttgggccgaaaagttttataatgtgacacttaatatttaaggtatgagatccattggggagagttaattctgtataagtcatgaggtttatggttaagattagcttttttttatttttaacctagatgtccaatggttctagcactgttggttaaaaatgctgttcttcctcccttgagttacttttatgccatggtcaaaaatcttttaggcagctag

SEQ ID NO: 717607 - DNA, 442 bp, Homo sapiens
ataatgtttaagatgtgtattgtgtgtataaaatctaaactacttacatgcaaagttttcaaatcagtgatgatcggctgggcgtggtaactcaggcctgtaatcccagcactctgggaggctgaggcgggtggatcacttgaggtcagcagtccaagaccagcctggccaacataataaaacccagtctctactaaaaatttaaaaattagctggacctggtggtgggcacctgtaatcccagctactcgggaggctgaggcaggagaatcgcttgaacccgggaggtggaggttgcagtgagccaagatcacaccagtgcacccaagcctgggtgacagagcgaaactccatctcaaaaaataccaacacatttttgaccctttggagtgtcaatggtcccagtgagcaaaagcttggggttacccaggcatagggaatc

SEQ ID NO: 717608 - DNA, 308 bp, Homo sapiens
ttagtgcagtgaatgttactaacaggtcttatatcagcaatgctcttaaagaaaataatcgaaagaattacactaaaattaacataacaatgaatatttaatatactaaattttaaatacctgtcgggagggcacagtggctcatgcttgtaatcccaccactttgggaggccgaggtgggcgaatcatgaggtcaggagttcgagaccagcccagtgaacacggtaaaaccccgtctctaccaaaaatacaaaaaattagctgagtgtaatgacggtcgcctgtagtcccagctactctggaacgtg

SEQ ID NO: 717609 - DNA, 201 bp, Homo sapiens
ttgttagagaaatttgggagaagctcagctctgtgggatcactccgtctgactttgtgacctacttagttccgtgggatccattggaggcggattaattactggcaatcagaacccattccaaacacatcaaatgatagtggcttagacctagggaagaagcggttgagcgaagaacccccaacaggtatgatttgagagt

SEQ ID NO: 717610 - DNA, 120 bp, Homo sapiens
gggtcgacacggccgtgtattactgtgcaaaagccttagatggttcggggagttatgggctagggagtgcttttgatatctggggccaagggacaatggtcaccgtcacttcagggagtg

SEQ ID NO: 717611 - DNA, 1788 bp, Homo sapiens
agcaagtctgtacggtccaagcggtcggtgcagtgctgttctgaggaacctgagtgagctatgagcacgttgagggcgaggttgttacatgtgcgtacctagggcctactgtagtccagtgagccatacgcgtcatctttcgtatgcattgatgcatgcaccatattaaacagttgtattctgtggaaacgtgcgcaggatctgcaggatgggactacttgaagtactatcatcagtagcgtaaggcccagcacggaccagcgtgctggtcggtcatacactgctagatagagctcaggggagcttgaggaagcaaacgagacgctgggggcaataccacttgtgtcgaagatccacgtacaattgttcgtaggcaaaccaagacacttagcgaaacaacacaatagaagagaaaaagcgaacggtctcttgcctaccgacagaactcaccgaaaaaacaggagcacagcaaacatacagaggcagaggggccagaaaacacagaaaagagtaagcgatcaaaaaacacacaaaagcaagaacaccgccaaaaaaaagagggaacacccaagacagaatcaaacgcacgcaacgacacccgtgggcacacgaaacacaacagagaaaacaacgatcatacacaaaacgtcaatacaaaaagcggaaaacaagagagggcagaaaaccaaataacaaagtacaagcacaaacacagcgataaacaaacacagaaagacaacacagataggagaacacataacctgtagaaagacaaacaagaaacaccaaacacacaacaacgaaaatacaacagctagacaaaaaaaaaagctgagagtaacacacaagagaaaccacaaagaaccaccgaagaaaccaaaaaccgccaagaagaacacgagcaggccaaatcagaccaacacacaaccgaaaacaaaacacaccaaacaacacatacagaccaacaacacacgaagagagacaaaacacaaaaaagcagaccacgaataacaaatacaccaccacaagagtacaaaccacaacaaccaacaacacaacacaacagagaacaaaacaccacccaaagacaccacgaaagacaaagacacgaagaacactaaagtgcagaagcaaacagaacacacaaaaaaaacataacaacagccaacaaagacaaaacaaaaaaacaaactacagcaaaaacccagacagaacacacagagaaccaacacaccacacacgcccacagacacaccacgacacacaccaaaacactaacggaacaagcaacaaaacaacaaccaccaaacacaaaacaccaaaaccaaacaagatagacaagaaggagcagccgagaacaagcaggacaaacagaagagagtagaagagaaagtcgagaccatacagacaagcaacacagagtagcaaaagacaaaggacagacacagcacagataacaagacaaggagttgatacaaaacgaaagccacgaagccacacacgaagcacctaacaaaggagaactacacaacgagcacaacgaacgaacaacgagagcaaaagagaacgcacaaacgagacaaacagacaaggcacagaaaagagataaaatagaaaaagaaaaaaagaagacaagaagagaatacgaagagagaaagagtgaaatagagaaaagagacgagtaaaagcaagaaagaaaaagcaagaaataagaggaaagcaaaacaaagaagcagagaaagagtagctaagcatacgaaaagaaaagcaaccagctcgtaggcgagg

SEQ ID NO: 717612 - DNA, 176 bp, Homo sapiens
cgtatagacatatgcagcttaggatgtctgacaactagagattttgaaggtggtacaacactaatggtgctagacaataagtgaaactattcaccgtcatgtttgaaatactatagtgaactcaactaacagtactgaacaggtttatacagttcggccgctttgggactatggta

SEQ ID NO: 717613 - DNA, 252 bp, Homo sapiens
ccaaaaatgcaaatgattccagatgatcattcactgtaggaaaggaattgatgggccggggcgtggtggctcatgcctgtaatcccagcactttgggaggccgaggcattaggatcacaaggtcaggagattgagaccatcctggccaacatggtgaagcccggtctctactaaaaatacaaaaactttgctgggcgtggtggcgcacaccagtagtcccagctactcgggaggctaaggcaggagaattgc

SEQ ID NO: 717614 - DNA, 435 bp, Homo sapiens
aagtacctggacatgaagatcccagacatttttctatagagataaaatactacagcttgagtcaagctctctgcttgttttgaaatgtgctatgtatgtgctcattagctaataaactatacagtatgggttgtatgttcttaaactgtataattgcatcaaattgtccataccattctttgccatcatgaacattcacagcatatatgccatcattcacctgtctcagagtttctctagggtatagacctaggagtgcaataaccgaggtaaagggtggaagtgtaacttcttaagcctttttgagggtaatattctggtacttatttaaagtaactatttatacactgttggatgctgtaactgcactttcataaagctatactagggctgggcacggtggctcacaccggtaatcccagcattttgggaggc

SEQ ID NO: 717615 - DNA, 170 bp, Homo sapiens
  misc_feature (14)..(14): n is a, c, g, or t
  misc_feature (38)..(38): n is a, c, g, or t
  misc_feature (60)..(60): n is a, c, g, or t
  misc_feature (135)..(135): n is a, c, g, or t
  misc_feature (139)..(139): n is a, c, g, or t
gttgcgtaagtgcngcacgaggagttttcccggcagcnaggaggtcctgagcagcatggnccggaggagcgccttcctggcggcgcgctctggctctggagcatactcctgtgcctgctggcactttgggcggangccnggcccccccgaggagagcctgtacctatggg

SEQ ID NO: 717616 - DNA, 996 bp, Homo sapiens
atcttgtagcaggagagtataggttactctgaaatatgtgacaaaagaccatcctcctcccgagaagcttgttcctggtttgagtatatagcctaggctaggctggaaggtggggttcatgataggaatacagatcatggaaggccaagatcgagtgtacgaatcttcggattagcacctgcacgatttaatactacaggcctctcgtagatcgccgacattcttcgtgtgggcttgacttcacgtgtgtactagtgtggccatacatcacataatgttcaatagaaccgaagaccgattcaatgttgctcatagtccgtgggccttcgtggatatggtgcgcatagtgtgggtcacacagagtccctgagattcgggggtgaaattctgcttactcatctagtctctactaacccgaccattcgagatgcggacattcctcaggacataccggaatcctgacccgaaatctacgcggggtcgtccgagtaactatcatcaaggctcactgaatttagtggtctcccacattctgtccggggattaaagtattaggccgtactaccgggggaacctgttgggggctgcatattgtatcttgctctagtccatctaaacaggtggacgccgtaaaggcatgccttggaagatcactactaattgtttcctggctttgcctatgtgggcagcagagtgctcctccgtgaaaatggcattgttggatggcttgtgacctagatctgggctatgtcaactgtggcactgcttcctgggggccctggctaactatattgccagaagattggaatttcccttgagaaagggaacaggggtgccttgagcgagtcgcagcgttggtacaaacaattaagttgggctgctccggaacatagtggtaaacccctatactggacctatgggagaacaaacagtaagagcgttgtcgcgcaaaggagaggataggtacactcaggcggcaagggatataacatacac

SEQ ID NO: 717617 - DNA, 951 bp, Homo sapiens
  misc_feature (354)..(354): n is a, c, g, or t
agcggattgaaccttctcccttgatcccctgcgacctggcagaacctctgactacaatcggaagataaagcggataagatggggatgtggtcatgagctagtaaagagacccgccatgccataatcagctgcaacagttatccggcaacatagcatatgtgcataaacactgtggcatttgaagcgagcataaacatgccaattaatattatgagcttgaaacctcaggtttgcagatgatttcaactacagacgagaaatagtacgcagcatagtatcctcgaagtatcgagtagtacagcatcaaatggtgagcctctaggacaggttaaaatataggtggcccgaagctcnctccgctgagtcacgagtcacaactggcccgagtggttggcatccctaaggatcggtgatcgtagatagatggtccaatatatcttgtatacgatctattggcgcatcaacatgagcatcttcatgtcaaagctcttggaccagccatcgataatggagcaagatcgggaagaaggtagttcctaacgctatccttaaaggcattttacgcacaacagtggattcactgtgaagtatatcttggatcattgggcaacttatcgcagtaatgtgagttacagtgtagttaaaatggttggcaagcggatttgaacttacagatgggtgatgaggagagagtagggagtgtatgacgaaacgaccggtcagtaagtggagagaatcaagcgtagatgcgggccatagactgaacacaacgtagctagagacttcatatgaacttgacaactaggaaatcccatacggtggtaataaccaactataggtccattaattgaaatggtgcctccgtggctaagtgcaggaaggcatacccacatttacacaatggtctgcccagacgcttgggggggaacacgacaggggcgcgttgggact

SEQ ID NO: 717618 - DNA, 123 bp, Homo sapiens
tagattgaggtctcgcacatcctcgcacgcgtcatctgcacgcaaagaacacacacctcgcacgtgctcgcacgcgtcatcgcacgcagaaactcacctcgcacgtcctcgcacgcgtcatcg

SEQ ID NO: 717619 - DNA, 383 bp, Homo sapiens
  misc_feature (47)..(47): n is a, c, g, or t
tggtttgaagaaatccccctgttttaagaccaaagccacgggtgatntgccccccagtcatcaggaaggatgaaatctggcaaggaaaccgtaaggatcagattacaggaagggcttgctcagggagaggaaggaagcaaggaagaaattagtaactgaaaagaggcaaggaggaaggcctcttcatcaggaggtgggggagtgtggggcagtggataactaaaacaaaacagctgtggttgtcataaacacattttgtcagaaaataacctggtgtgttattttctgatgtttcagccattgtgtcttgattcaggaacagctcccttccgagtttctttttgtttgtttgttggtttttgagactctgtcttgaaaaaaaa

SEQ ID NO: 717620 - DNA, 697 bp, Homo sapiens
gacagtgctgacactacaaggctcggagctccgggcaccagacatcatgagtggtcctgcccccggaattatcctacttctatgtcttttattctctcttcaacatgtgtagcatatgtgctaccagagacaactgctgcatcttagatgacagatcggtagtatgtccctacctgtggcatgcagattcctgtctacttatcaaaccagtagacaggatctacgtcttggaagacatcttacatcagtgaaaacaaaacatcagaagtcacagtgataaaagcaatccctcacttatatcctgatgatcatcaaacaatatgatagacgctgtacttgaagtccaggaaaatgttagaagaaattatgaatatgaagcatcgattttaacacatgactcaagtatcgatattgcggaaatatatattcaataatcaaaagatgtaacctgaaagagaagtagccagcttgaagcaccaggccaggaacctgcagaccgggcaatcctatatcacggaagatgtccgacatgcaataagagtaacgagcgggcttactttattaaccttaaagctaacagaatcttagtctactgtgaatcgatgggctggaatggatggctgtgttcagaagagattgatgggtgtcgattcaagaaaaactggtcctatagcgaagggttgggcattgtctccta

SEQ ID NO: 717621 - DNA, 1315 bp, Homo sapiens
  misc_feature (1315)..(1315): n is a, c, g, or t
tgggtgctacacaagaaatatttattaatgtcctgtggtatttacagttttaacatagcaaaccaagattgaatttaccacttggggcagaaagcacattctatttctacatttaataacccacgtggttttcgtgcttaacacattgtgtaaaagcaagttagtacagttagtgtttagggactcattcttcaaaagtttcccaagcttacttctcttttctttgtgcctccttaagttaccttaattccttcttcctttactctcccgagaactttgtggccttaatccaccgagggagaacaaagaggcaaaatagagggcgggtgtggggcgtgtgggggtgtgggggtgttgaaagaaagcgctcttacactgtattagaaacagaagtgttgctcaaagaaatttacccttttacaggctaatttaagctcttccacttgggtaatccctaggtggccttttcgtggtgttatattaccagggtgacacaaaaccaacctttttagacacactcccctttgaggtttcccacactaagaggctaccccgcagacacattgtggggtgcaatttcacggggcctatatttaaacaaatattttaaagtggctttaagtattacttttacccccaatttttaaagagacaccttattatttttgtggggaacccaaaacacccttttacacagctgttattttcctgggggccaccttaagtgcaatttgtggcgccttctccacagggggtgtctgtccaaataacaccgcacaatttgcggacacataaacattttctccctcagcaagtgtaactgctgtgcatacccgcggccacaaatcttagtggcggacttccacttggctcgcccaacaaaacccaccgtgggttccatacacccccacaacgccggttttcaaacctctttcttggacggaaaaaaacaccccccccttttgttaaacactgggggccgccggcaatatttaattacaccatatcccttttcacccaaacatacttttaaacttccccccacgggtctccaactattgaggaacactgtcgtggcgacctgtcacaattaacggccaacaaatatggccaccccccttatagcgaaattcacaggcggccaccagtgggcctcacgtcgccaatcctttaaaagttgtggtctccccaaaccgcgattctttaagcggacgtatttcaactcagcctcgcacaggactctgtttttgcacagagtctttttcaacaatattttcccccatacagtgtgtcccacgaatcaccacactcttcn

SEQ ID NO: 717622 - DNA, 232 bp, Homo sapiens
acgctgtaatcccacactttggaggctgagcgggcagttcacgaggtcaggagttcaagaccagcctggccaacatggtgaaacccgtctctacctaaaatacaaaataagtgagctggtgccacacgcctgttaatccagctactcagaggctgaggcagagaatgcttgaaccgggcgagattgcgtagcagatgcgcactgtgctcagctggcacgagcagactcatct

SEQ ID NO: 717623 - DNA, 146 bp, Homo sapiens
ttttacatcacgagagaatcctggagctactttagaggtctaggactatagtgtatgcattagaagagaatctcgacagccaggggatatgagtcagcgctgagggcatttggctaccagaccagagcacaagtcctctgacagca

SEQ ID NO: 717624 - DNA, 173 bp, Homo sapiens
ttgcctcccagtgaccctgttgggaccccaggacaaggaaaacagttttccctctcgaaaaccccaactgcccctaggctggagctggaagggtgggtgaatccagcttgggcatccccaatgaactttgccccgcctgggactctatttattttgattaaaggggttttcca

SEQ ID NO: 717625 - DNA, 83 bp, Homo sapiens
gggactggggtggatgaaattttctttttgggtttttttatatccttttggttttaaaacccaataaatgccctttttccaga

SEQ ID NO: 717626 - DNA, 118 bp, Homo sapiens
tcacggttctggctatctatctggaggatcctttccagtggctgaaacaatttaaggccgggactccacccatggcggggagggtaaggaagggttgggcaaccccagggatctggcc

SEQ ID NO: 717627 - DNA, 554 bp, Homo sapiens
taagaggatccccgcagtcttgctccaatcagtttcaaaagcttttctcatatagcttcctggttgttcccacaataggaccaggattcactccgtatttcacaagctgatccaaaagatcttcattagtgagctctgttacaatctagatcatctttatcttcttgtctgggtttatcagttttttttgtggctttctgtaaacaaagtccagtaatcatttccatataaattaaagtgttcacttactagataataacctgtataacataaacatgcaaactcactaccaaattggcttatagtaatattaggccttagcaattccattaaattaagagcaactcattattggagaacactttctaagttgaactgtaatcatacaaaccgcacagccaagcaagtaacttaaagacattgttgttaaaatagtccattttggattacctatctaaaagagatagtaatggcatcaaaaatgcaaaagcgcaactaaaagtaaaactgactttgggtaacattttcttttaaataacctttttttttttttt

SEQ ID NO: 717628 - DNA, 123 bp, Homo sapiens
gcggccgcctactactactactgctcgaattcaagcttctaacgatgtacggggacatgagaaataccaagaaattggcttttagtttatcagtgaataaaaaatattatactcttgaaaaaa

SEQ ID NO: 717629 - DNA, 694 bp, Homo sapiens
agacagagagagagagagagagagagagagagagagacagcgcgagccagcgggcagtgacgtgagataaccagcaaaattaaaaaagaaaaaaaaaaagtgggtagcgcccaggcagagagcaacgggagtggcatcaagcgctccccactcgggctcgggcggggcgccagagagacagtgagtgcagcatccttctgagcggggggccaccgtgctgtggcgctccccaagctgggggctagtgtgtccccagcttttcgtgtgccttgacttttagtgtacttacagcaggggataatcagggaagcagccgcgtgcccctgacacaagtgggctcagccttacgcttcgggcccagtgggctcccccgcagaacgggtatccccgcgggaatacagggcccctcatccccaccccgcgccagagtacacagggccagaccagggttcccgagcacacatataaaccgtgtaccctcccgcacagacgcactccgagcagagccgggggacacgagcgctcagagcgtctctggcaccgccacacagacagatgacgcagacaccgaagggatgggccaagccccagacacaaccttctgaaaacacggaaaaacaagtctcagcccaagcggggcgtgtctccaatatcccctacaggtcccgggatccggactcagacaagtgtgggc

SEQ ID NO: 717630 - DNA, 246 bp, Homo sapiens
gattaataggacatgtattgtcatctgtctgtgctgaggacatagaccattcattaaatagtcttggtgataactgtgcatgtacttcttttaatcacttatgattcagatggcactgtaagatgactcgacacaagccattgcctgaaccccagagcttcctctgttgtatggccgttcaagtccaggcattgcaacacaaactcctcaaagattcaccacaacatgacaagcatttcctaactg

SEQ ID NO: 717631 - DNA, 412 bp, Homo sapiens
ctctttgctctgattgacacctattctccctctgtgagggcccctagtctgcagagtacagcctgcggcaccccttgcagaactaatctgctgtccatcaccccgagggtcctcacaggaatggcttcaggtgttgcagcccactgactgagacacactttcttcaacgaaaaagtcatttaataatgcatgacggaatcacaattggcaattaagaagcagtcctgccacaccacgtatggatattgaaaaagactccttcatttcaaagatggctttttttaaatctctcagaatagtaagtacacaagccaaggcacggagagattataaggatcatccaaggatatgcagcaagtctatgacagagtccagtggctgatcaaaattgcagaaggcacgcctgacaggt

SEQ ID NO: 717632 - DNA, 124 bp, Homo sapiens
tctcaaatgcgccagaaatcagtacctgcttagacgacatcggttcaggctgagctgagggatcataagacgtgcttttcatggtagtccgaatttctttgaaaatttctcttagaactctgga

SEQ ID NO: 717633 - DNA, 535 bp, Homo sapiens
cggcacgcgctgggtcgtgatccagtcttgggtgacacacggtacaccagccatggggttctgcggcttcagctccgtgcacaatgtccaccacctatggccaggaacgacgttgtccctcgtataacctgtgagcacgtagtcatattgtattcatgctcgttccacgcctcgaggtccttgagatacaactccatggtagctcatctgaattcagcacttggcccttccaggtgggcatagcctgctgtggtttgaacaactggacagagttcaccgcgtcaaatctcaaatcccaagaacctgcagcgggattcgtggccgcccggttgcccacgtagccgcggatgacgtggctctgtactggagagcacccggcactcctcctccatgccgggcctggccgtggcggctgcggggccgaaggctgggggcacggtctccgccgctcgctcgggcctccgggtcggctcgcggcgtcgggctccgtgccccggtttccccttcggttggactcctggctctggcgcgccgt

SEQ ID NO: 717634 - DNA, 1175 bp, Homo sapiens
cagtcatgaaacatacaggtctattcttagtcattctcaatattcagcttttgtaaacttaatcaatgcttccaaacaagcgtttatttgtttcaacaacacaacaacacatgcatcattctaagaaatgcactcataggtaggggaggtgtaaataagtcataccattcttcaaacaccagacaaatttcaagtaaagtcttttaaatgaaacctgtaaaagtattgactcttctaccaagtagggtatgatattccaggcagctcaatgattatcacatttgagaccctgagtttgaagcattaacaggcaacggtacagcaacagaggtacctcttggtgtatagctatttacatactctttaaggtagaagaggcaattaatacccttataacacatggattagaacatttaacagcaataatcattaacccaaggataaggatgtaacggccaactgtcgcaaggagctaagatactggcttcacagatacaaaaaatactaccaacttaacaatcccaataaatactctgcacagcactacggagaagccaaaaaaaataaaagcagactcgtcacagtgcatccaacataatccaagaatcacacacagagaatcaacaaactaacaacaaaaaacacaaaaaatacgaaacaggccaaaagacaaaacacaaacgaccaactaaaacaaatgtacaatcaaacaccacaaacaacaaaacactcaccaaaaagacatcaaaacagaagaacacaaaaaaaagagaaacaaaaatgaccaacataaaaaaatcaacaacccaaaaaaccaaaaaaaacacgcaagaaaacactgacaaaaaacaaacaacaaaaatcgaaacgacacacaaaaacaaaaaacaacaacaaaacaaaaaacagcagacacacaaatcagaaggcacgaagaaaaacaacacagaaacaacaacaaagaggacgggtagagacgaagcggaaacacgacagaacgacagaccgcataaatacaggaagaccacagccactccagagcaagggaaaaaaaaggaacaccacgagaaccaccgcgagagaccaaaccacaacaacgacgccaaaaacaaaacagcaacaaaaagcaaaaccaaaaggaacaagaaaaaaagaaagaagacaacaacaggcaa

SEQ ID NO: 717635 - DNA, 350 bp, Homo sapiens
  misc_feature (10)..(10): n is a, c, g, or t
tcagctgganccccaatgaaacaggtttttcattttcttttttcctggcttcctcaatcctttggcctctcagccccttacctttctatactttctcgtctctctcttttctttctttaaagagggagtctcgctcggtcacccaggcgggagtgcaggggggtgatctgggttaccaccctcggcctcccgggtccaagcaattctggcctcagcctcccatgtagcggggatcacgggcacacggccattatgccgggctaatccaggcttttaagtagcgagggggttacaccatgcgggccaggtgggtttggacatcgggccctggtgatttggccgcctcggcc

SEQ ID NO: 717636 - DNA, 127 bp, Homo sapiens
acacatcattctcatttacattcaacagatatttaggtagcaagcacgcagtgctaggtatgttatatatcaacctgaatgcctcacaggcagccaaactcaacatgtgcgagactagaactattat

SEQ ID NO: 717637 - DNA, 140 bp, Homo sapiens
gaggtcatttgatgttgtgcagttcgcttagtgcaggcaggtgctgatgtggatgcagcagataagccggaaaatcacacctcttatgtcagcatttcgcaagggtcatgtaaaagttgttcaatatttggtaaaggcag

SEQ ID NO: 717638 - DNA, 137 bp, Homo sapiens
ggtgactatacaggatctttaccgactagccctgacaggatacccacctcttagcatgtgacatcaccaaatggctatcagaaaggcatgctctttcttggtatctcgtgcgtgcaatggagaccatgaacgatggg

SEQ ID NO: 717639 - DNA, 227 bp, Homo sapiens
  misc_feature (32)..(32): n is a, c, g, or t
ctttcgattctcggagcattgttggcctactnggcaaaatatttcccgaaagaccaggagcagcatctccaccagcaagctgggctgctgggtgggtacttccttcaaagctgagggagcgtcctacgcccacgcgcgcaggagggcgccccccgcaaagcaacgtctaggagaccacagtggatgccacagcgggcccgaagcggatcagccttgtgggatggcag

SEQ ID NO: 717640 - DNA, 736 bp, Homo sapiens
tggtccccttgccactttctaactccacgtggctaccgaatgaattctcggtgctggctggattccgtttgcaccctgtagactgttcataggatatgattgatgcactggttaactaaacttacgatagtgcaagttctgggaagctgcgtcttagaagggagacactcgcacaaggactgcaccatgacgacacgatggccgtagaccgtctaagtccactgacggggcagtcccatataacgcctttactagtgaagagtgttgtacatcgattgcccctcacactgtaggtccacagctagaaagagagctcgccactcacctcactacctgtggagatccgtgaattcgtgccaggaattggcaggggaagccttggcactgaggttagcgagagaagcatccgtgcgcacatgcgctgtgtcgagagaacccgtggtctccggtggcacttagtaacatcaccgtgcatgtcttcataggtctagtgtgtcgttcattcaatgccagctctaaggcttcacggcaagagcacagggttcacactcaagaaagacggtctcccgcactccgccatctcgggtgctgacgatggggggctgatggctgcccttgcgtggcatgagtccctggtccctctagaggcagttgacggggcagtcagatttttaaagttttgtacaaagttttcctttgtaatcagctcccatttgtacgtattcccccacttgtt

SEQ ID NO: 717641 - DNA, 275 bp, Homo sapiens
ggtttccccacgggaaaaggggcagggagggcaacccaattaatgtggggaaggcccctccttaggcccccccgggtttaccctttaaggttccgggtggtatgtgggggggaaatgggaggggaaaccaattttccccagggaaaaggtaaggccaagattaccccaaacttgaaattaacccccccaaaaggggaaaaaaaaggggggtccccccgggggggggccgctttaaaaaaaagggatcccccggggggcaggaattgggcccgaga

SEQ ID NO: 717642 - DNA, 185 bp, Homo sapiens
atttactcattgatatgcttatacacttccactttggtgcgcaaatgtagggttagtctaatgttcacatggacatgatctatctttatcattctactttgagatgctgtctccactgtttgatgtctctgcagcaggttgctccacaggatagctctcaggagggctggcaaacttagaaggtg

SEQ ID NO: 717643 - DNA, 149 bp, Homo sapiens
atggcgtagcctgggttccttggtccacctggtctagtgtttcgggaggagtcatgccttctcaggtgtcaatgagctacgcgctctaccactgagctggattatgcagcgcaaaccactcgcctgagcgggacaaatagtattaactg

SEQ ID NO: 717644 - DNA, 101 bp, Homo sapiens
aggaggtgagtcagatgagaccatttgctttctgggagtcctggcgtttttattaaggctgtcatgtgaagccacgagatataggatgtcttgtgcaacca

SEQ ID NO: 717645 - DNA, 358 bp, Homo sapiens
gttcaagcacattgtgaccatcctgcctgctgagatccatatgtgggtgcgggaacagtgtgcaggacgtgtataatggatcagaatccagcttctatgacatgacatgatatcacttaagatgctatctacaagctgcctaatatatgtagaggtgtctcatttcgtagtgttgcctcaagagatactacttgtgcacatatgctcatagcctgggatgcatctgagccacattgtgagagaccaatcctgcacatactctgatctagccctgtatggctctgaggctgactaactggatgggctgattacagaccagcatctcagagcctcactggtcccaatggtacctgaggcg

SEQ ID NO: 717646 - DNA, 278 bp, Homo sapiens
  misc_feature (46)..(46): n is a, c, g, or t
  misc_feature (60)..(60): n is a, c, g, or t
  misc_feature (84)..(84): n is a, c, g, or t
  misc_feature (90)..(90): n is a, c, g, or t
  misc_feature (113)..(114): n is a, c, g, or t
  misc_feature (121)..(121): n is a, c, g, or t
  misc_feature (192)..(192): n is a, c, g, or t
  misc_feature (203)..(203): n is a, c, g, or t
  misc_feature (211)..(211): n is a, c, g, or t
aatataggccaggctgctggtttagtctccctcttcttccatctgnctggtctggtctcncccatgccttggggggctggatgnggtganatctattatacatgcatctctgnnctggggnacatggcttggggcctcctggactgttctggtccccttgctatccccctacttccctgactgctgctcgtnctgtttgggcncattgtcntcccactcggcctggttacacgtgccatcctccggggccctgatctcatactttttacggttggacg

SEQ ID NO: 717647 - DNA, 302 bp, Homo sapiens
tgtctatgcaattggaatatatctaagtccatgccatgtgtcttgtggtttccgtattaccaaaacggtgactgaagaaacgcttgctttcaaaatacatcgaattggccaggtgtgctggcacacacctgaaatcacaacacattgggaggcccaggcagaaggatcacttgagcccaggagtatcgagcctgggcaacatagtgagaccctgtctctacaaaaaatcaaaaaattagttggccatggtagtgggcgcctgtagtcccagctgcttggctaaggttagaggtttgcttgag

SEQ ID NO: 717648 - DNA, 213 bp, Homo sapiens
ttgctcgcctagaggatccccctgttctgcttcttgaaaggaagtatgctgttctctatcagcctctattttataagcgatttgaaattattaatgctattcatgaacctacggaagaagaatgtgaatggaataccagatgaagaagatgagatttcggaggaattgaaagaagcaggactggaggaactggtttcaagaagcaggaactgg

SEQ ID NO: 717649 - DNA, 951 bp, Homo sapiens
gtccttcgacctctgctgcgccccgtgccggcgccgcgtcttgggatacagaggaagcggtagagcgagccaaagtcgtctgtcagccagtatctccagacgcgcagtcccgagcgagtgtaatgatggtccgccgtgcgcgcatggctcggccgtgtatccacccatgctctgatgtccgagctgtatccgagagtatgcatacagacgaatattctggaatcatgggtgatcgtcgaccagagaggttagtagggcactggagagggcatctagcggtatttaaagtgggggcccaaacatggggtgtctcagggtaatccaaagggagtgcaagaccatgtgcatgtcccgcagtcgacattgggatgaggtgcattgcccaaatttgtatgtggtgcacggtgctgtggacaacgtaaggagtggctggttctggtggctggtattgcagcagactttgtccacgacttatcatggggtgtatgccagagaacccattcgttggaagcaccaatggtgtctcatatgctatcctgtggatttgctgtgcatgaagctatggggtcctctctggtgggatgcccgctgccctcgattcgtgggccatgtaaccaaaattagttggttgacattgtggattcaataatcaattacggagtgtagttctggtatcttactgggatccgaaaactgagtattggtgcatgcagacgtaggtattgcaacgcatatcatgcacggtggacacccagcagaaggtatggcaagaggcttgtttggcgagccggctaggaaagttacaacatcttggggggggccgggaaggcaggtcatggtccaaagccggccaaaggtggccccgaaaaacgcgggggcgcgctgcaaccagaggggcgtagaaacaggacgagtaagcacggggggacccacagctgggacaaggcaaac

SEQ ID NO: 717650 - DNA, 153 bp, Homo sapiens
gtggtgctgtacagtaaatacagcaagattggagagcatgttatcctgaaggccaagaccgggacgaatacctttctctcgtgagcaggctcattatccattgttcgagacattccccagctgcagctccagcaggtggcgctgcagcagcag

SEQ ID NO: 717651 - DNA, 192 bp, Homo sapiens
cgactctcagaggatcccgcgtctggggctccatgcagggggcccctagagaatataccttagctttccctgcttccgggcatccgggaaagggggatacgcggggggccttcctttcacttggaaagcttacaccctcatttggactacacctaatactaaaagctgggcatctggcttgagactagggtt

SEQ ID NO: 717652 - DNA, 538 bp, Homo sapiens
gagcggagtgggtccctagacgacggctgcggggcggagagctgcggctgtgcccagcgctgcccacctgaggaggcggcggggtccgcaggcgtcgcgggacgaggagatcggagcctgtggagactcgcgcagcgccatggacccccattggcctcaagagctgttgtcggatgagacgattatgcactgatgtgataaacgcaaggtcaagaagaacgggggaatggaaggtgctggtggtgtgatcagttaagcatgaggatgctgtcctcctgctgcaatgatgacatgacagtcatgaccgaggggcataacagattgtggaagatatcaaataagcgcagagagccgctccaccaggcctggaggcatgtgtatctcagtcaggtccaatcctgaggaagtcgcgtccgagcgtctctcattcagatgtacttatacgtgacccgcacgaatggcttaaataccgggggctgaacaagcgtcattctttcaactgagctctttgtcccagatgcccttgtgttaatgaacc

SEQ ID NO: 717653 - DNA, 1379 bp, Homo sapiens
  misc_feature (1230)..(1230): n is a, c, g, or t
gccttggcccagttggcaggctgagtcgccctcctctgggctggtcccgtctctcctgacctccttagtgctcgacgctgctacctgctgtccggacacatccagagctgtgcgacgggatgcgcggtgcagtggcggccggcaacacatgcccagggaaagcatgatcaagggggctctgatggtgcaagcgacctcgtgtattcattagccggacctctacctaggaccggctcgtgagaactaggtgacttgtccatcatgttcgccacgaagccatgcatcatcagaacagcccgacgaccaacttcttctagttcccatgtacgatccttaaaccctgggatgcagggcagacatgactgtcgagacctggacttgctcggaccggaagaggctacttctgtcgcacaggccttgtgagtgacgatcccttgggctgctcgctccatacctgtcatggcttgagctcgagctttcaaaggccagagagtccctagtcgctagggacccgacatgggctgtgcttgctgcctgtggccttccccagatgcgtgcgggcggcaggatgctttggtgcccagcgtgcagcccttttcgagcgcatggcccaaggttgttggccgttcttgccctttttcccctggcctggcccccccggcctttcgttagtcgcgacgggttgccttaacaaggtggacacctcccggaaccgcaggcccaagggacccccattatggaggcccgacacacagacgacacacgaggcttggttgccggccgccttggccaggacaacggccagaggttgggacaggccgttgggacgcacacggaaccaggaaaaggggcgggggaccaaaaacggcggggaacgccaggaggcactcccgggccggcgggcagaacccgcgcgcgggacgggggaaacgacaccgtgcctgcccggttagccatccctttctctgcaggacaagggcgtcaggccacacggggttccttaacttggaacgctggtggaaggctggggctggcctttttccaagatggccaacgcgaaatgcgcgggtgattaacccccttgggttccaggggggccccacccgggaaagacctgccggaaaccgcgattggcgtttgggccccaaagggctggttgccttgtgctaagacacttccaatctgtgttccaacacctgccaaggctgtgccaaacgagcaaatctagtntggttatcccccaaggaaaaacacatcgcggcagggcgtaccaaagaggtttggccaaagggctggagccaatgcgcgggcactggggacacccactgaaactttcttggggaaagcggcatagcgtatgggggaggctttggcaaccc

SEQ ID NO: 717654 - DNA, 465 bp, Homo sapiens
ctgttactttattatcatacccattgaatcagattttagaaagtgtgctggaggccgggcaaggttggctcacacctgtaattccagcactttgggaggtggaggcgggcagattacttgaggtcaggagtttgagaacagcctggccaacatggtgaaaccccatctctaccaaaaaatgcaaaaattagttgggcatggtggcacacacctgtagtcccagctacttgggaggctgaggtgggagaattgcttgaacttggaaggcagaggttgcagtgagctgagatagtgccactccactccagcctggatgaaagagtgagactgtgtctcagaaaaaaaaaaaagaaaaaaaatcaaatgaggacataggaatgatcatgggattggggaccatggagatcatggatcatagtgagagctgcgtgtgtgtgtgtgacgtgtgtgtgtgcgagtgcagaa

SEQ ID NO: 717655 - DNA, 954 bp, Homo sapiens
  misc_feature (389)..(389): n is a, c, g, or t
ggcttttatttctccccccgccctgattgtcgccttctttggaccgcgggtggagcaccctttttttcgcggaaattggcgcccgctgatgaaatgcggccgcggggggtcattcgcgtcggtcctcctccccgattggtgcctcctctcacccactccgtttgttggggtccgccgcggccctttttttttctgcccgggcgctctcaaccatactagtcgctccctctccggtcatattcaaggattgggccggctcttcacctcccccccgttcgggcccgcctttggtacagtccggcgcccccccgcgtcccgctcgggagaggaaaatattggtctgcatccgccccgtcgccccctttgtcgcgagcatttctccctaccgnccgcctccggggtgttcttcgccccccgccccacgaagaccgcccccctctctctctttgtaaggcaactctcccctgcgaaggccctcccccccctcccgctaacaaatgacagtgagacagaccagagacgtcccacatccacaaacaaaacagaggtggggaacacccccccggccccgccaagctcctcgccccgcagcccgaggtgggtgcctcgcccccggagcgaaggttaggggatcgggcgagaggagacaatatctcttcctgggaaacaatcgggccactcttctctcacgaccacgcacgctattaatagcgcgccctctttatgaccccacaccccagagatttttttagccagagcgccccccctcgcacacattctatatatcggcggtcttcttcgccggaacatagctccactatgcaccctcccccgcataatgtgcgccgcgttcctttctatcatctagatctcctatccccagacctctgtgaggccccaccaggagacacaatacaaaccttgctttagacatgccccaatcaataatcacaa

SEQ ID NO: 717656 - DNA, 909 bp, Homo sapiens
cagatcagtgattgagcggggagaacttttgctcaggagaatatcactgtcatagaaacaaaattgcagatctgtgccatacgtttcatcaaagatggagcgaccatattgactcacgcctactccagagctggtcctgagagtcctggaagcagccgtggtggccaaaaagcgatttagtgtatacgtcacagagtcacgagcctgatttgtcatgggcaagtacctttctgttcagttatgtgcccgagccataattttagcagagcaaactgcggattacagtcctaacatggatcatgaacctagaatgtgcccccagtcttgccagcagtcagccactgccgttacattgtaccttttcctgcctttggaagaaaaatcactgaatttgcatgcaggccggagtatatgatctagggggttgcacgttaaggtagttaactccgtggaagagcagagatggtgattgagtgaagcactctcttgtatcaaggaagtaggctaacttatatctccctctctctagacgataagtcaaagcaaaacttcctccttttttcctgaatttagcagtctcttacccgagagtctaagagctatagattattccaaagaatagttcttctctaaagaactcaaattctggttgccttagtccaaagtattgggatctgccccttaacccattaggcgtcaatgtgagtttcaatgctaacatccactgtccacgattaggtgacatacatcactgtggtactgtcttgtactttgctctaagcgttctcaaaaatgtcatcttcagtaaggaaaatggcaaagccctctggcacgtcacgtcctgtcactgtggtgctaaagctgatgtacgggtgagatggccttttccccaggaaataactcccggag

SEQ ID NO: 717657 - DNA, 331 bp, Homo sapiens
cgacatggtggctcacacctgtaatcccagcactttgggagccagagaagggaggatcacttgagccaaggagtttaagagcagcctgggcaacacgatgagaccctgtgtctacagacaacaacaacaacgacacaaagttattttttggagacagtcttgcccgttgcccagggcggagtgcagtggcacgatctcagctcactgcaacctctgcttcctgggttgaagtgattttcctgcctcagcctcccaaatagctgggattacagatccgcaccaccatgcctagctatgttttttgtgttttgtaggagagagagagtttcgt

SEQ ID NO: 717658 - DNA, 728 bp, Homo sapiens
  misc_feature (118)..(118): n is a, c, g, or t
  misc_feature (437)..(437): n is a, c, g, or t
gggactacaggtgcccgccaccacacccggctaattgttggtatttttagtagagacggggtttcaccgtgttagccaggatggtcttgatctcctgacctcatgatccgcctgcttnggcctcccaaagtgctgggattacaggcgtgagtcaccgcgcccggctcattttaaaattttgtagatcagtgtactgtagtaagaaaaaaaaaattaagaaaagataaaaaatagattgtggtagtgataggatcccactgaggccggagaatagggtctgggagacaaagggagcattcacttgcagcctctggagttgggtgggcgggccaagtcttgttacataggggtggtaagccaagatagggaaacgctctagaaggggtactgtaaacgcccagattttctacacagggcactggttgagcctcatcccngtttctggaatgtacttgtgcttcaaataaatctgggggcttaggtgcctggcgacaaaaaaaaagaaactccaacataccacaaacaacactggggcggggccgctactgggaccgcaagaaagaggtttgtacaacccatgccgcttgggggcgggggcgcccaatgatgggatcaaaggaacagcgtccgaaacacggtggcccggagagaaacccgcgctccagaccaaggcccggggttctcacccaataaaaaacgccgggcgggacccggggttggaacactcg

SEQ ID NO: 717659 - DNA, 1376 bp, Homo sapiens
  misc_feature (913)..(913): n is a, c, g, or t
  misc_feature (1104)..(1104): n is a, c, g, or t
  misc_feature (1354)..(1354): n is a, c, g, or t
ggtttaaggtgtgcgccccggtcaggatttcgccctgggggaggacctcgctgattcgccgaacgccgcgtcttttttggcacccttctgctgctttgtgagatagcctctccggggggctcccggatttcctcagggctcttcgcccgggactttgtgttatgtgcccttgaggggcccccggtccgcgggtgcctcggctggtttacacccgcgcgtgtgtgtcaaccaccccacggggttaccctactgcgtctaattgtgggcccccactttttgtattgggccccttacttttttttaaggggggtacccaccctaattttgtgagtagccaaaacaggtttttgggatacccctacagaaataagagccaacggcctttcggggataatacccgcggttccccgcgagaattttttcctcccgggggaagattatttctggcgtgcgcgaagcacccccaacaccgccgcggttcctcctgcaccgcgcttggtagtaccccccctcggtgggatgttgggggaccttggagaccttggggtgggttgttctccccacagggaggccacacacaacaatgccggggggcgcttctacaattgattcgcccagacaacacagaggcgttctccacaacccacacacattggatgattccggtgagagacacgatgcaaagacccttttgtggggtctcgacgcactctgtggctctgtctctggtgagatatgggcgagatctccctctgtgtgtcacactcggggggaagagtctctctcgggaagagtgttctcttgagagctctgttggtgtggagaaaagggtgaacccctctggccactgtcactgtctgataagaacactctctcgtggcctctttgtggggcctgagaccacggtgccccnctgtgggtcacgaggcctttctacatctttgtatatgagcccgggtttgtgtgttatattcttgggtctcccctgagaccctgcgtctcacatctatatcacctactcacactctcgaaagtttgttccacacacatattgtggcgctcttgtggatccctctttctcgcgccaatctcccatccagcgcncccatagccagtggggtggggcgcactgtggcgttcgtggtgtccctgggtctttggtccttgatagcccaagatttggggaaagaggagacttaagaaagaacacatccccacttagggaagaagaagaagaactacactcccacacatccaagagaataatttaagattatttatttccaaaccagtgacacattttttggggaaatggacttaataggaatatgggactgagttcccagtctttttnttaataaaataaaatcaagcca

SEQ ID NO: 717660 - DNA, 272 bp, Homo sapiens
aaggatccccaagcagtataagactcaaagttgactatttgtgtgggaagcaggaaccccaaatggagggactggctgaagcagtgcagaagaacataaattgtgaagatttcacggacatttattagttccccaaaattaatacttttataatttcttatgcctgtatttactgcaatctctgaacataaattgtgaagatttcatggacacttatcatttccccagtcaatacccttgtgatttcctgatgagtctgtataaactgcttg

SEQ ID NO: 717661 - DNA, 148 bp, Homo sapiens
agtcgctcaactcacgagaaaaaatacttatgctgagcagttcgatttgcagaaggaaacgaccgtgcacagagggctcagctctctgagtaccccacactgtgacacacatctggctactactcctacagtgctagtaagcacagat

SEQ ID NO: 717662 - DNA, 571 bp, Homo sapiens
cggccaccaactttattatactcctaaatatatctgggatggtattaaaaaatactcccacagctctcatcagctgatgtattcaatgaactgctagttgacgctgtctgtctatgacatcttgccaccattcattttccccagaactatttccggtgagaggcatttgagaagcctatattagtttccatgtccttactttttcctggatatctaagataaaacattataaaccccactactctcctacacagacattttaaagcatggacgtaactttaaggagactgagaaaacatcagtagttttcacaaagcttcaatgaacaccccaaggcacaagtgtagaaaacggcctgtacactaaaacgtcacttttggaggtacaggtatgctgtgcttgcagagagaggatgactttatccctacttaaaagcaccaggtgtcaagttcagcctccatttacacaggatgcaccaattatccctatgatagtgactgtttcaagtactatactacatttccaacatgtcttttgcctatttgcttagtcggtcctggggttcttttaa

SEQ ID NO: 717663 - DNA, 434 bp, Homo sapiens
  misc_feature (9)..(9): n is a, c, g, or t
  misc_feature (98)..(98): n is a, c, g, or t
  misc_feature (110)..(110): n is a, c, g, or t
  misc_feature (145)..(145): n is a, c, g, or t
  misc_feature (181)..(181): n is a, c, g, or t
  misc_feature (257)..(257): n is a, c, g, or t
  misc_feature (265)..(265): n is a, c, g, or t
  misc_feature (275)..(275): n is a, c, g, or t
  misc_feature (280)..(280): n is a, c, g, or t
  misc_feature (284)..(284): n is a, c, g, or t
  misc_feature (302)..(302): n is a, c, g, or t
  misc_feature (308)..(308): n is a, c, g, or t
  misc_feature (368)..(368): n is a, c, g, or t
  misc_feature (372)..(372): n is a, c, g, or t
  misc_feature (402)..(402): n is a, c, g, or t
ttacaaaanattgtgaacaaaggaaaagataatttttcagcttgtgaaaaaaatactattttaatacaaaagagactgtgtgatatagtatcaaagtncgattataaaanacattattacaagtggttttgaaatttcatttgcncactttaatgttttcagtgatgataaaatgtttaanataaatgtcatagtgctttataaaaaactaacttgaatttactttttaaccataataatgttttaccagagtaggnattttacnggctcatggnatgcnaatntccctttaagggactgcnagaaanactcaagagtcactgaaattgtgtacttaaaataataaatattcttgggaaacaattgantgtnatatgagatacaaaattgtggtttgaagcntcatcattaaacagttgcatagcaacaaaagg

SEQ ID NO: 717664 - DNA, 138 bp, Homo sapiens
atgtcatctctaacggctcatcttcaagaccccagactctatggtatacaagcccggctgtgtagaagaagtagtctgagaggcccaggtataaccatgcggtctataggcagcgggaaactaccaacatgatggacg

SEQ ID NO: 717665 - DNA, 206 bp, Homo sapiens
tccagaggattcgattcaatgggggtgagcatctcagccaacccattctcttttgatggagaaggtttctcgttagcacctatatggttaacctagcatatagttggtaaaggaaagatagttttttttgttttgcatatcattaggcaatcactgattttaaattattgaatgcgtttcagtccattgcagttcctcctcttact

SEQ ID NO: 717666 - DNA, 591 bp, Homo sapiens
  misc_feature (117)..(119): n is a, c, g, or t
  misc_feature (174)..(174): n is a, c, g, or t
ttaccagaatacagtttatttcgtgaattctaaaaaacaaaaagatgaatctgtcagtgatatgtgtgtattataacttattaatcttgctggttgagctggtataccagtgggttnnntaaaaaatagtactgtttaatggctaagtaaggcagcagtcatttgtggtattcncaggctttttaaaaatttaaaaaaattttaaaggaaggccctgggttaaaagggcacaacactgcaaaaagcccacaaattgcacagacatgttcttaaaatgcgaaggcattagtcagcgagggtaaatcctattaccactttaggaagtattcaaaaatattcttctaaagaatctctcgccgccacaccactttacaattttacactttttcgtctcccaactttaagcgcacacaaaggcttccccctttcgttaaattttccccaaacaaaaacttccaattattttgcgcaccaaggaatggttttccccccttttcaaaggcgggccaaaaccatttggggggtatcctaaaacagtctattgacaagtaagctggattctttacactcggaattcccagcaaacttaac

SEQ ID NO: 717667 - DNA, 298 bp, Homo sapiens
gcgttatgcagctctctctgatgctctcatgagtagaaggccagcatatacagctgctagctgtttctctatcaatgaataccggagttcagctcctttccatagtagggaccaaaagcctactggcatacttaggcgctctgtgcatagccacaaagccctcaaccaaaaccgtctgtggacacatgcacctccagctcaaacaggtgcccctggttacttacttgtagggcttgtggctgctgaatagcgcacctggctgtttagtacggcagtctcagccacaccatcccagtcc

SEQ ID NO: 717668 - DNA, 123 bp, Homo sapiens
tccagtacccgagcatgcatgccttgcttgccggtcggaccgtgtattcaccactgcggatgccattgcgtcccatgacaagtccgtcagacccgtgagcaccggtgctgacctccaatatcg

SEQ ID NO: 717669 - DNA, 226 bp, Homo sapiens
  misc_feature (218)..(218): n is a, c, g, or t
gtgaaacccctctagaagtttcttcctggtcctggtccgatattccaccgccagcacgtaaatcccctttgccaatagtatgcctcctcttccactcctagtaactctgaacttcctgcatttcttgtctagacgaagcctttcttacttcttgcattgatgaccattgtatggctatgtgtgtttcgtgcaatacgattttatccacaggatcatgngtcatcaa

SEQ ID NO: 717670 - DNA, 391 bp, Homo sapiens
gcaagttatctagctaagatctagctaagttatctagctaagatctagctaagataactaatgaaggtggccacaccatacaacaggttttcaatgtagatgaaatagcctattcgaagaagataacatctaggactttgatagctggagagaagtcagtgcttggcttcaaagcttcaaaggacaggctgattgttgttaagggctaatgtagctggtttaagttgaagtcagtgttcattaaccattctgaaaatcctagggcccttatgctaaatctactctgcctgtgctctataaagggacacgcaaagcctgaatgacagcacatctgtttactacatcatttactgaatatttgaagcctgctgttaaaacttagtgatcagga

SEQ ID NO: 717671 - DNA, 326 bp, Homo sapiens
tgcgatagagatacaccttcgttgcttacacagttcaaatattgaaagggccacatagtaaagaattttgaagcacagcaagaactatagctaactattatatctggaccttcctatataaataaaaacatgcaccgtcattgttgcaagaggacacaaaattcacaacattaaggaaaaaccaaaaaacagttagcttactaaaatcataccaaatcctcagcaaaatcaaggaaagcaattatggagtgtatactatccctagaccttgtaaattgacatatacattttaaagaaaagaacagtaattgcatagaaaatatctg

SEQ ID NO: 717672 - DNA, 322 bp, Homo sapiens
gtcattttctagctagatgatctgttacgatgggagtggggtgttgaagtcctcagctattattatactgaagtctgtctctccctttagatttaataatatttgcgtttatacatctgagtgctctggtgtagggtgcagatgtatgtagaagtgttatagcctcttgatgaattaatccctttgtgattatataatgagtctctttgtcttttactgtgtttgacttaaagtctgtgttatctgatataggtatagctggtcctgcttgcttttggtttttatttgcatggaatatcttttttcatccctgtgtgaaaag

SEQ ID NO: 717673 - DNA, 178 bp, Homo sapiens
ttttagtctatcccactgatggggttgccgtctgtgtaatgccaccagtaggctccttatatatctagcaacagctgtcatttgagttacaggaagtacagctgactactgcttgatcgatgatgtgtgtgtcgtgctttaactaaaccagtaggcagtgctttcagatgctggctag

SEQ ID NO: 717674 - DNA, 105 bp, Homo sapiens
gaccttacattcccattcacttaacagctctttgggatgggtgtttcattccatttctgcccactcgctctcctctcctctctggtaggtttaattttatgcttt

SEQ ID NO: 717675 - DNA, 241 bp, Homo sapiens
cgctattagaactgatagctcccatggatgggtgtaggtggctcacgcgtgtaataccagtactttgggaggcaagatgggcagacagagccaggaccctggcagagaagcaggatggcagccgtgaacagcagttggagcctgggtgcagatcctcagactgtggggggcagtagtaggtgctcaaaacatcacagcccggattgacgagccactggtgctgaagtgtaagggggccccc

SEQ ID NO: 717676 - DNA, 165 bp, Homo sapiens
ttagatcactgtttgggaagaactgtactttgatatatacttttcgagtatttacagcaacatattgatataatcagctgatcttggcatggctaaggacttgatgtatagtgaacctggcttcccagcctcagttgacgatgtgtattcttgttgacttatgaa

SEQ ID NO: 717677 - DNA, 80 bp, Homo sapiens
ccaaaaataaattgtacttccaaaatccttcttaagagttactctttccctagattgtaaattaagtttggcattattgt

SEQ ID NO: 717678 - DNA, 431 bp, Homo sapiens
  misc_feature (278)..(278): n is a, c, g, or t
  misc_feature (431)..(431): n is a, c, g, or t
tccctgagaatccaaaattctccgtgccacctatcacaccccaaaaaaaaaaaaaaaaaaaaaaaaaaattttggggcggcctctcgcgggccccaggaagaaaacatttcagaagaaccatccgcgtggggccgccggcgggccgcagttagggcaacagtcggcaacgggcggtcacaagaggcggtcccctagaagagagcatccgcggggtcaccggaaccaaggggcgcggggatatctcctcccgaccaatataaaaaaaaagcgccgcggnggggaacaaccccgaagcggtctctcgaacacaatctccgcaaaagaagagtcgccggggaggcacatacaagcgggaccttctaaccacaacaggggagtcacagcacgagacgctccgaattacacaaattacgcccccagccgagggacn

SEQ ID NO: 717679 - DNA, 254 bp, Homo sapiens
cggcacgattctattagagaaattgtgaaattatgttgcactgcgcagctcagccgagaatgggctagctgcacaatgaggcacagggctggaggcaagttttatagggtcctgaggaagggagctacgtgtggaatgaggtcattgtgcccgcaggttgtttgtgattagctgtctctaacaattgttcatacaataattgttcattattgttctcaacttggggctctccccaacctggggacccttcctta

SEQ ID NO: 717680 - DNA, 138 bp, Homo sapiens
ccataaactgtccacgctcacaacaaatttgttgtaggaccaagataaagagccagatttaagccccctaatcctactgtatggcctccgcatagtattaacacatcaatttgtataaatcagtatctgacacgtcct

SEQ ID NO: 717681 - DNA, 485 bp, Homo sapiens
ggtcgggtgcggtgcttatgcctgtaattccagcactttgggaggccaaggcaggtggatcacctgaggtcaggatttcaagaccagcctgccagcataacatagtgaaactccatctctactaaaaatacaaaaaaattagctgggcttggtggcaggtgcctgtaatcccagctacttcggtaggctaaggcaagagaatagcttgaacccatgaggcggaggttgcagtgagccgagattgtgccattgcactctagcctgggtgacgagtgaaactgtctcaaaaataataataataataattaataagtaaatacaaataagaatcaaattaaaatacaagaagccaggataagccaggtgcagtagttcatgcctgtaatcccagcaatttgggaggctgaggcgggcagattgcttgagcccaggagtacaggaccagcctgggcaacatggcaaacccttgtctctactaaaaatac

SEQ ID NO: 717682 - DNA, 313 bp, Homo sapiens
gtgcacaacctagggtcagttttgcaggtggtaagccatttaccaagatagttgtaggtaagaagggcagatttattagagaaattgtgaaaatatgttgcagtgggcagctcagcagagaaggggctacctgcaaagaggcaagggctggaggaaagttttatagggtcctgctgaagggtgctacgtgtggaatgaggtcattgtgcccgcaggttgtttgtgattagctgtttctaacaattgttcatacaataattgttcattattgttctcaacttggggctctccccaacctggggacccttcctta

SEQ ID NO: 717683 - DNA, 214 bp, Homo sapiens
ttacagcggaccccaatgacggctgctgtctcctggagaaacttgtacaagaggagcaatgaattcgactacccatcggtggtgcagctggcgcacaagcttgctgaaaacaacatccagcccatcttcgcggagaccagtaggatggtgaagacctacgagaaactcaccgagatcatccccaagtcagccgtgggtgtgtccggctgtctga

SEQ ID NO: 717684 - DNA, 243 bp, Homo sapiens
  misc_feature (59)..(59): n is a, c, g, or t
cggtctactgatgcatcatcacgctgcatggaatccactgcattcaattggcatccatnttggccacacaacatggagtccactgcattcaatcaggatccattgggccaatcgtgcatgcaatccacgtgcattcactctgggatgcatttcacacgtgctgcatggactccagtgcattcaatcacactgcatggaatccactgcattcaatcggtatcaacggtaagagcgctcttaccg

SEQ ID NO: 717685 - DNA, 1640 bp, Homo sapiens
  misc_feature (540)..(540): n is a, c, g, or t
  misc_feature (778)..(778): n is a, c, g, or t
gggaggacagaaacctcccgtggagcctgaagggcaagaagctcgctgtgtactctatggagtattgtccaggtatcgcatatactaggaccgctgaacagtctggggccctcactggatcgcttcttgaccttgttgcgcgttggtaaagcacggatggtgtcatgataagagttaccatcgatgggcataactgtgcttgttggactggtccacagtcgcttgcatacgtcgaccgctcgcttctttgactccattcgtatgtcgcgctcttcctatcatatgtgagagccagactttcaccagagccgattcggaagttgttcgacctcatcctcacattagtgggacacccgtttgagctcggggagttaggaccagtcgctgcagaccacggtttacgttgtataccaccttacttgacttgcatgttgtctgcttggcccactggataaaattctctttggctacaggtaacgacggacgggaaaatcccggacatcgcgttctcccacggaaccattcttgggctgggtacanctgtttgaccttttgaggacttggatgggcaggtccctaaactggagagggccgggaaaaaggccgtaaccctacattcattggctgtggcgaaccttcaacttgaagcgtggaaaaaccgagacccttctttgagaggttccgggggatatctccccccgagggccccaagggtggcgcgggcaataatcggaaacttaagccgagggctcaaacgtaccggtccgctgcctgtggntaacggcccctttccgggggttttgggggccctcttacagcgcaatgagagctcctagggggttctctcgcgtcgcggcgctccgtgcggttctgctcatcttcctctggcggctctgtgtactcgtcccgtgcccacagtcgggcacactggagataatccacggacgacgggcacgctcccccccctgaagtcggctttctgctccatcttcgtgatgtcgccatgctagccccccgctcagtggttgtgaccctctcccgcgccctccgcgtcgtggcggcgcctacttgtctgcatttatccatttgtgctttgtactcgggcgcagcgtcctgtggcatccaggcctgcttccccgcatcatttgcctctgttcccactgctcacgaacaaccacctctcatgaactaaatacgactcccctttattctcccgaactaacaataaagtatcatcactgcactagacaactcttccaggccccacccatactacgcaacactcttaactcagaaccaacatctagccctccaaaaaatcgtcacactcatcttccggtggttcatgaccacctcgcgtgtccctcagtctcgtccacaacaaccaaacaattcgtcttcgatatcacctcccacaaccttagtcttagttctctatctatgtctcaccacgaatattctttatcgccgctacactccacttacatctgtcacatgacattgactagtccctccataaattcattatgaccagcataaattcacaataaacaccactccatcgctccttcttaccaaaacatactgatttgcaagatcattaacaactaactcacacaacaataccatatatacatcag

SEQ ID NO: 717686 - DNA, 500 bp, Homo sapiens
cttgggcacagggactatgggggtctgcttgaaacatgtaggtattggtaggattagtagctgtattagcactttgctgttggatggttcgtcagcagcccataaaacactggctatgcatcccagtgcctttgtaacttgttttctgttcctatgtttatgcaacagatcacggatacaatggaatagctcataaatgttcaaataaaacttgactgtaagcaggtgtaaagccatacaaacctgacaattaagggatatcacactttgcactttgaattgtagtatgtgcatccactgtacatccctgagtcaagtttgaacttttgctcttttttgttgctctttcccaaagttgttattgttaccaacctgtcgctgtatggccggggtgttttaatcaggtggggttagaggccagaggtgctatggggcggtagtcatttagacaatccagcttccctttatagtgttaatatggtgtcaggctgtgtcgacgc

SEQ ID NO: 717687 - DNA, 320 bp, Homo sapiens
ctttccctgtccagtgacgttacacctgtccacaagcatggaaaacaacttcgtcaacctctccgagggcctttatgctgaaaacgaaacgcgcatcctcatagaggacctgcatgctgcagggaagaccactatcgtgtacaagcttaaactgatccagatcgtgaccaccattcccaccataggctacaacgtgggaaccgaggcgtacaagagcatcagcttcactgtgtgtgaacatccaggccaggacaagatccggcccctgtggcgccactactttcagaacacacaaggcctgatcttagtggggagcagca

SEQ ID NO: 717688 - DNA, 696 bp, Homo sapiens
ccctccaggaccagcactgcgagagcctgtccctgtgccagcaacatctcagtgactgcagtgcaactgcatcctgtggacctcattggcacctgctggccccgcagccctgcttggtggcatgctagtggttctggccctgccctgcctttttctatgtgtgtcctgctacaataccacaaacaatgtgctacctgggatgtgcctggccaatggcagctgggcctgccctgctgtgaattactcctgatgtgccatggatgatcctcaagtgatgtgatgaaaaaaacgcaatggtgcactaccatgtctgcatgtcatcatcaactacctgggccacttgtatctccctgtgtggccctcctggtggcctttgtcctctttcttgctggctcaggagcatcctggtgccttgctgaaacatcatccactggaacctcatctcctgccttcatcctgctgcaactgccacctggttctgtggtccagctaaccatgagccccgaggtccaccagagcaactgtgggcttgtgtgcaggttggtgacagcctgcctacaactacttccattgtgaccgaacttcttctggatgtcggcgagggctggtacctgcacacagccatcgttgctcacatatccatgaccggctgcgcaaatggatgtccatctgaattgctgtgtttgtgccttccca

SEQ ID NO: 717689 - DNA, 236 bp, Homo sapiens
aaacatgagcgcaacacaaacctacaagcataaacacacagctgcacacacatgcacaaacacagcacacaaacaacacacacacatgcacacacacaaacacacatgcacacacacgaacacaagcacaacacacaaacacatgcagaaacacacatacaagcagaaacacccatgcacacacatgcacaaacatatacacacaatcacacacaagcacacacaaacatatgcac

SEQ ID NO: 717690 - DNA, 232 bp, Homo sapiens
gctattcagggtttcttttcctgataaaccctttgaaaattttttttggggttttgtttccctttttgaaactgttcccccctttaaaaatttttaatccccttgataaaatttatccttccccccctcgggttttacaaaagttgatttttattttaaatgtttaattgtatttgattaaccccttaactggattttggaataataaaactttcgtccaatttggctttta

SEQ ID NO: 717691 - DNA, 129 bp, Homo sapiens
ccggggttaaaaggataaaaggttgttttggaaaaattatttgttttgtcctaaggggtcctgcccacccctaattttttggccgccccgggggggggtttggttttttaacccgctttgtttccggga

SEQ ID NO: 717692 - DNA, 495 bp, Homo sapiens
ctcagtctgtcatatgtagtgaggtgctttcacgagagaaatgaaacctaaattaaaacaacatttagaaaccagacatcccagttgcagggaacctgtggactattttctaagacgactccaatagctgagggcatcacaaaagtgccgaacatcttcatgttcaaaacaagtacaagtacatcttactgtgctcaccttgtagcaatggccaagaaagcccacacaaaagcagaacagcaaataactgctgataattataaaatggttatgattattttaataattttacttcagtttgctggtttctgttcagttcaaccagatcagtgttaatgttttataaacagttcagtttagttaatggtaacttaacttttccttaccctaaccactgtttacagtatttgtcatttttactctgtaatatttctataatttgatacattttgttaaatgacagcaataaaatattgtttatttgtaaaaaaaaaa

SEQ ID NO: 717693 - DNA, 386 bp, Homo sapiens
gttccaagtggaagattaccttccaagaaccccgcacttaaggtcttaaaagcccgccatttacgacgacgaacgtcgatacggacgtagccgacgtcgaaaaccaagcggaatcggaggaataattaagatccaccaactaagcgccggaatcttaatatatatccgaagactctctcgtaagagcagacgtagccaaggaagaaaacccgaagtcaaaactagaaaattaagcctccggataacacacacaaaactctacgctagtcctcagcgccccctaaataatcgatatacaaagcaaaagaaagcaagggaccgatatttcctcgccccacggccgtcgtcgactacacccctcccatcccggacagaccttgccatgc

SEQ ID NO: 717694 - DNA, 291 bp, Homo sapiens
gctcaggatacctaccactacctgcccttcaggctgacgcaccggaggccacactggttaactaccaagaacagcatcgagcgtagcttgaaggccttgtcttcgtacgagcccctgaacttccacgccatgttccaggcctttcttgagatgatacatgaggctagtggctatgggggatccatgagagtcaatctgccagcacgttaactaggtactgcccgcatgtactacaacaaagcgactgggaaaacatacgccgatcccccatttaattcctatgcatcaacc

SEQ ID NO: 717695 - DNA, 131 bp, Homo sapiens
  misc_feature (22)..(22): n is a, c, g, or t
  misc_feature (88)..(88): n is a, c, g, or t
  misc_feature (106)..(106): n is a, c, g, or t
acatttctactatgatcagaanaacatgattttacaagtataacagttttgagtaattcaagcctcctaaacagacaggaatttaganaaagtcaatgtacttgtntgaatatttgttttaataccacagc

SEQ ID NO: 717696 - DNA, 317 bp, Homo sapiens
  misc_feature (129)..(129): n is a, c, g, or t
ctctctccacagctaggcaggcggtgcttctaatactggtgatgctagaggtgatgtttttggtaaacatggcggggtagagatttgccgatgtatccttttacttttttttaaccttttccttatgangcatgcctagtgtatgggattgacatgtgaggtgtaataagtgacttgtgtggttgatatgtagaatattgggctggttaatttgtcatgttacagtgttttacatctagacgcaggctttatgccggaggagaaatgttttcatggttactttatactaaacattagttcttctataggggtgatag

SEQ ID NO: 717697 - DNA, 902 bp, Homo sapiens
  misc_feature (1)..(1): n is a, c, g, or t
nggcagcggctggctcgcgcaagagtctgccacagagtgggacctccgggactaggagcaaacaaagaactctcaggagctcacgaacgctgggggcaccgaaagcccccacgggccgcgccccccccgggagatcccctgtccccccgcgcatataacccccgcgattcccccgtagtggagtcccgaacgcggcaaaacaaacaagctcgtctgggtggacaaaaaaccgactcccccgtcctcggcaacccggggcgccgcgcaatcttgtaaagcatgcgggcacaccccgcaggtaaaaacagtccctcgaagagcggcaaccctgcccggggggcgaccctttcccccaagcagccacccactccgggggcacgccaccactgctgcggtgagatgggacccccgaacacgccacccgcggggggagtacagtaccacacacgccgctcgggggcgcacccaatcgattggcactaggtccagcaggcacgcagcgtcccccccaatgcttcccccgagcccacctacgcgagagggccatcggcgtagatttctcacccccaacgcgcccgccccccccccccatacacaagcatcggcgggacatacgcgggtttgagaccctttgtgcattctcagccggcctcccttatcttagtggtcaaagaattcggggttgatcgagacccacagcgcatcttattagactccccgccctcgaacagataagtagaaagatctttcgcggcaccccacgtgttctatgtcggcgatgtggcaccatgagtacagttacggggtgctccaataaagcccagcacagtggtagtcgggcacgacagccccccgccaaaagtcggccaaaacttgggaaccccaaaaccagactacatgac

SEQ ID NO: 717698 - DNA, 1744 bp, Homo sapiens
  misc_feature (322)..(322): n is a, c, g, or t
  misc_feature (683)..(683): n is a, c, g, or t
ataatgattgttgttgtatgtccctcacgacgtcggtcgtgtggaagattattcgtcccgccgcggacgtgtgttgaccgctgagttctcctccccgcgataaaaaatactgccctcttggtgggaataaaaacaaagggggtatgctgctttcctgacgcctcctatctgtaatataccctacacattgtgggcgctttgctctacataaggggggttgttattaacttcgcgctggtgctggtggcgcaagcaccagccaccgaaagataatatgtgtcgttagcacccagcgtttacggagggctatattatataacgntcgcgtgattggaaacacaacataccacctgatgctgtcaataatatgtgttgtgtcacacacctgcttccctcgcggctcgtcgccacgaatgtatgataattgctgttcctgcgcgccattataattctcccccactcaacaccgagggcggcgcgtcccacaaaagagtgatatttttttatatagcccggtggtaatatctgttcgggccgtacaagacaagcgcttgctcgctgcccggcggggaaggcccacaacaatatttgtggacagaaagatgggaggtattcctgtggcacggctggacgaacaagttggccctttctccgtgggaagagccccccttcatggggggagngtctgctactatacctcggtgttcccctgtgtgtggcaccgccccgcccttatggggttggggggccctctcggagactttggggggccaacattcgtggtttagaatatatgggccacgacaaaaccgtgttcaatttgtctcacccttgattgaacaccatcttccgggtattgccttataccacgccggaaacaacacggcgtaagcataacaaccgcgtttcgataataggcctgcaacactcttctcccacaccatgatatgggttgcgccctagatgcaccacttataggggagagcccttggttaataatgtctggtcgccaacatactaacataataagggagaggaggcgctttacagatgtgtgcaaccgcttggagatgtttctcccccgctgatgatttgcgcttacacagggggggataatacaacaccctccgttataggagcccacaaaataccccttaagacgcggcgccacaaaaatatctccacatggtttcctacgcgtatatacaaataatatttcacaatcgcgggcgcgtagaaagatctgtaaaacgttgtgttttgtgcacgcacacacaaacacgcatgttgttgtgcggggccgcatatatctcggggaaaatgtccaccccgcacacgggttatactctgggagcatatactcccgccgagatggcgacataaacacgccacacacatgagaaaacacatccgctatatacacatctcgataagggctacaattctacatgttctgtttagaacacagcacagtgataataatgtaaataaatgtcttcacatggagatttgaggagaagccttcgcttctgaaagcgagaaagtcctaacataagtatgagagaacgcctccaaagaaacctggaggggagactaataatggagatgccccccacccctaggcacacacacacattcgagagaaacccggtaataacaatataaaatttagacaaaaaaggaaagaatcgaaccccccaaaactggtttcaagccaaccccccggcctccatgacatttttca

SEQ ID NO: 717699 - DNA, 125 bp, Homo sapiens
atttcatatttaacagtacaacatgtttacaaaacataaattttttttcaagtattaaaaccgtgtaactttaggaggccgaggcggatggattacctgaggtcagtgagttcgatgaccagcct

SEQ ID NO: 717700 - DNA, 202 bp, Homo sapiens
aatacacgatcataagctaaacaaaaactaaaactaagaattctcaaaagagggggtgccaaacagggaaagactgatgaaaagtaaaatggactacttttgtaacttacctgtttgttaggaaatggaatggtttctttgatttaaaatgaataaaaatagattattacgtctttggtattgagtctgtattaactgcttg

SEQ ID NO: 717701 - DNA, 1007 bp, Homo sapiens
gacgcaaaactgattgcaatataagtgtgataacgttctttaataagaggtaagagcaatgctgctttgcgagagcagcacaagagggactaaaggcatacatcttgccctgggatgaggccagggggacgcggaatatcaattccccattatctcattgtatagtcatttacgaagcgtctcttgcaagaaggattcccctgggttgtttgaaaatactacttgatgatatggctcgatggaatggtccacgtaatcgaatcctccctatcgtagacttttgcaaaccaaaggttgtacctggagtcgtgtgcactccgtttctaacctaggggagtaggcattggatcttgacggtttcatgcttacgaaggatgagtgcttctggggtatacgggccccggaatgtgttccctggtgtactcggcgagctttcgcattgcccctcgcgctgagtgcctcctcgtggtgcccctttgccgctttgctcaattggctcgtcctcttcaggaggtgcgtcccagctggtcctttgcattttggggtgttcttgggaccgactgttgcgcaaatggcatcttcgcgcgccgtggacaacaaactcttgctagtacctggcaataaagcacatctttattatcccgaggtccaaagcgatgggaagactgtatagaggaaatccttcgtacagagacccttctactgccatgtgatttctttgtcagagtacattgaacatattgaccatagatgtttgtcccctagagcagtcatgtggagcactcttcgggagaaaaggttctggaaagcagatctttgtaatactgttcgccaagaaattacaattgtagaaagggcctatttggccctaggaatagacactgtcgtcgaagaaacattcttcaaggagcctgcagttgccctattgaggaaattgaggtatccaccacaaggtgggggacacggtttacctttacaagggacctgtaaccaatactggttggtcg

SEQ ID NO: 717702 - DNA, 883 bp, Homo sapiens
  misc_feature (11)..(12): n is a, c, g, or t
  misc_feature (24)..(24): n is a, c, g, or t
  misc_feature (168)..(168): n is a, c, g, or t
  misc_feature (219)..(220): n is a, c, g, or t
  misc_feature (275)..(275): n is a, c, g, or t
  misc_feature (485)..(485): n is a, c, g, or t
  misc_feature (847)..(847): n is a, c, g, or t
catcatacccnnctattatacttnactcctcttacacatcttacccctccctttatcatccttttttcacaccatcaatttcaccactactcctatttatccacctcttctaaccacctcctttgacccgctaaatacaaattctgcccaccttcccctccactcctnccaaacgtgtgaatcctaaccgtcttttttacttgggtgatgacggtcccnnactaaccccaccaaccacccacttattctaagctaccgtaccccttttttacccncggttctaaaatctatctttacatatttcccaaaccaaccccaattcacattcttacccccctttatataaacaacctaaattctccctttgttagccttccatctataaaagtacccccaaacttttccccctattttttccaaaaaacctcactctccttaccactattacccattttctatcccaattcccttccacaccaatatcnccattccctcccaaaaaataccccctcttttcccttattctaccctatttttccctcaactcccctttcttcccccctgactttttattacaaagcccacctcttctccacacgccttgtcttttatcctttaaattaccatatccttctaagacacccgccctcattactcctttgatatacttcaccgcccctctaactccgcttttctcttcctcattttaatatagaaccgctccctcctatcccaatgaccttttgtgatataaacagctcaatccaagcttcccctattctctaaagaagagcatacattttattcaccaaagccctttttccaataccaccctcacaacccactnatctttatagcataataatctcttttcaacatcgct

SEQ ID NO: 717703 - DNA, 1829 bp, Homo sapiens
  misc_feature (351)..(351): n is a, c, g, or t
cgagcgacctgcggcggggcggaacgatgagccgggtgatcgcaaggatggatgggcttgcaggcgtcatcatgattcggtctggccttggagctcttcggagacaccggcgagggcggcagttatatggttccatgagggcacgacgtgtggcctctgcggcgacgttctcgtggtggcgcatggacgcgggcggtaatgtaggtggcgtgcgctggggcctacgagcgacggtagacgctgcgtcacgacacctactgtacaccctgggagtgagcgagtgtacggcaacaatccactgagcacatgcgaatgccaccatcacgctatccgctggcggcaacccctacntgctccgacgtacaccgcgttctcgtcttcggggtgcgtgctcttcggcggcctgtgtggatccatgggaacagtgcccatgacatctccaagggagtctctggagcctgctttggagccccgggtcatgcacagcgagccactcggggcatgttcaccatgagcgaggcagggcgcctggcctgatcactgctgtgccaagcgatgcagagaacggcacggacgctggcctctgataggagtgcccgttgacacaggcccagaggcgctcattcgctgggcgctagtcagacccccacaggcgaggctcgaggcgttctgggaaagcggcccgacatgtggggcagtaaggcgcccagatacataataggagaccgcggtggccgcggcaccacatggggcttcccaaggggcatccgcagagaatgggccacagcggcacaggtccggtgcagcacacgcgacaaccattgcgcggaaaacggccgcacttctgacacgaccatacgcctcggaccaatttgctggcacatgctatagcgttctcggaccgggcccggacacaggattagggacactttgcgcgccccacgcaacggcataggcgtcgcggacgatggcaagaacttaaccaccagaaaggagtaacgtaacgcacagacagcgcaatttcacacgtgggaaccctcaccgttgggcgcgacccccatgaacaggggcacaaacaccgcagaaagcggttaaaaccgaacattccaagggaccataggtccgcctacagagattgtgtcagcaccaggggtacgctctccggcgcacccaacgagggagccatctcgggcacccaaacacggagccgaccggagcaggagactcgccccagtgcagctggaggcgctcccaccacgagaggcgctgtcgaacagcgcgctcacaacagcatacaggggggcagcaccaatcggagacagcgccccagagagaaggaacgccaaacgcaccggacacacaacgggcgcaccagcgctgggcaagcaccaaggcgagacggggacaagccgccatgaaaaccagagacgctgagccacaactggggagctcaccacatcgctgcagacacagacacagagtagggagatcaagaccaggggaaacgacacacccggagatgtgcgccacgagaaaccagaacgagcacctggcgggccacatcgggacagacacacacaccccaaaagcgacaaacaacaagagggccccatagcaacggacagataagcccacggaacagggcgccagaccagaactcatagggaaacccacaggacggagaagtacaccgacagacaaggagagaacaacacagtgaccagctggcacaactcaagcaaacaagaggcaataacagcacagacaacgacgcgccagaacagacagcaaactgaataagcaaagcaaaaaccagagccaacaacccg

SEQ ID NO: 717704 - DNA, 132 bp, Homo sapiens
atctgagatccagcaccgtctagaatcgggcgtgtctagccacttcaatctccgtctcccaggttcaagtattctcccacctcagcctctagagtagcttggactacagtgctacaccaccatgccacgcgt

SEQ ID NO: 717705 - DNA, 207 bp, Homo sapiens
atgatctactcccctaatattaacataaaaacccaatgggaactatagaaattcaaatagaagtacataaacctgtcatcaatcgtaacaaaaaactatttgtggaacagacatggatgacaaatggactactgtgtcaattttagaatgaggcagacacaagttggaaggccggttacttttcccctccttctcatgcttcagttt

SEQ ID NO: 717706 - DNA, 841 bp, Homo sapiens
  misc_feature (36)..(36): n is a, c, g, or t
  misc_feature (122)..(122): n is a, c, g, or t
  misc_feature (222)..(222): n is a, c, g, or t
  misc_feature (236)..(236): n is a, c, g, or t
  misc_feature (298)..(298): n is a, c, g, or t
  misc_feature (306)..(306): n is a, c, g, or t
  misc_feature (393)..(393): n is a, c, g, or t
  misc_feature (415)..(415): n is a, c, g, or t
  misc_feature (539)..(539): n is a, c, g, or t
  misc_feature (615)..(615): n is a, c, g, or t
  misc_feature (630)..(630): n is a, c, g, or t
  misc_feature (650)..(650): n is a, c, g, or t
  misc_feature (655)..(655): n is a, c, g, or t
  misc_feature (692)..(692): n is a, c, g, or t
  misc_feature (702)..(702): n is a, c, g, or t
  misc_feature (706)..(706): n is a, c, g, or t
  misc_feature (745)..(745): n is a, c, g, or t
  misc_feature (747)..(747): n is a, c, g, or t
  misc_feature (756)..(756): n is a, c, g, or t
  misc_feature (773)..(773): n is a, c, g, or t
  misc_feature (781)..(781): n is a, c, g, or t
  misc_feature (802)..(802): n is a, c, g, or t
ttggatttaatgatctaaagctcaaagatgcatgcnacaactagctaaaagtacataaaaagcgcacctctggaaaaaacagcccttcctctggctgaagactgaaaagcattaaggatgcntctggattgctgcagcggcagggcaggggtttgcacaggcctgaactggtgtggctggagcccgggatcccctcctgggtgcggccccgaaaggcagggngggaggggcttgcnggggtgtgccatgggagcgctgccaaccaagtttgggtttctaaaagccaccctcagtttanaccaactnaacaggaaaaaggtggcgacagggccttgaagggtacatgccggcttcccttaagttgattagatgggaaaccaaaaaccgtctttnaagtttaaaggtgttccaagcnccctcagggaggaggggcgcggggtctgatcagggctgcctctcccctaaccagccggcagaggtaaacaggagaacagcaccagaaaggctgggggttggcagcggcccaagacagaatagcngacctgcagcagaacggctgtgggtgaaccggacagtcaggccctccacaagcactgtactggagtatcgtctgantaggtgaaccctctngcttttcgaagacgcagggnacccnactgccaccagccagttagccgactaggacacctctngacagggaantcanctcaaaatcggaggacaacctgatgcacccaagttacantngacccaggnagctgttcacaccaggnggggaggngtttggaacagttagactcancagttgataggtttctctagcacaaatggaatgtggtgt

SEQ ID NO: 717707 - DNA, 304 bp, Homo sapiens
tgcatgctgtgtaagctgctgtctcaagggcgtacaactagatgatggagaagtctttggcaaagtcaggcctcctaattgttcataggacagaaccaactctccttcacacacatgggaactagatagttggttcttgattgggagacaatttcctcaatgataggctaaggaaaacctctacctaccaaagtgggcgggtttttaaatatcttttttacaaaagaaaatcctctcttggcaaatatccaatctcttacttccacaaaggatttgaaatattaggttaaaatttatttaattt

SEQ ID NO: 717708 - DNA, 568 bp, Homo sapiens
  misc_feature (6)..(6): n is a, c, g, or t
  misc_feature (135)..(135): n is a, c, g, or t
ctgccnaatgggcatgaccagatgccattgcagcaaaatatcttcgaagtgatggataagctacgtgagatctaccctcaacgtaagtttgtgatgagccgctttgaagaggtatttgagaagatcgaagcgcancggataatctggcaaccctgaaagggaatttattgatggcaaatatatgcgcgtgcatcgcaccatcggttctacgcgtatggatatcaaaattgcccacgcgcgtattgaaaataagattgttaatctgctggaaccgctggcaacactggcctggacgttgggttttgaataccaccacggcttgctggagaaaatgtggaaagagatcttaaaaaatcatgcccacgacagtatcggctgctgctgtagtgacaaagttcatcgcgaaatcgtcgccgcttcgaactggctgaagacatggcggataatctgattcgtttctacatgcgcaaaattgccgacaacatgccgcagagcgacgccgacaaactcgtcctgtttaacctgatgccctggccgcgtgaagaagttatcaacaccactgtgcggc

SEQ ID NO: 717709 - DNA, 301 bp, Homo sapiens
ccatcgacattgccctattgggccatgttgcggagccatctacttttagtgtagttgtgttgttctcatattaagttttagtataatttgaattttataattgactaataggatttaatgctaaaggttgattacttaatgctgaatttaatgtcaaatgagttgaatgaaatcaaaaatggatcgggagccctagatctcaaaagggaaatgtgaaaagagaaaaagtaggttctcgttatacagagggtttatttataccctcttggaaataactgtttcaaatagggcaatgtcgatg

SEQ ID NO: 717710 - DNA, 918 bp, Homo sapiens
gaataggctaggtacgaggcttgtggtatatctggccgaggaagagaccttagcttaatgcagggtggtggagaacgagagacaaaacgctgtctccttttcagaagggaaactgaaagaaacgaggggaatgagtattagagaccattactggctgggcatggacactctcagcagctcaactgcccagatgtgaccagtggccacctctgaagatgtcttccacaaactggtcttgactcgtctgctgaacaaatcctctgacctcaggcctggactgtgaacgtagttcctgagagatagcaaacatgcccaacagtgagcccgcatctctgctggagctgttcaacagcatcgcacacacaatggggagctcgtaaggtccctcaacagcgggaaatgcgtcacaaggatgaaatagattctgcatgtaaagatgtaggtagtcattaaaaatgagctacaaagctgacgctgagggaggattacaaaggctgactgtcctccagggaacccaagcacctaccagtaatcatggcccagatgccaccagaaggcttgcaagaggatatagtggacccatggaacagtacagacaagccagtgcaaaaggctagactacgataaagctccatgtacgagatagaaagtagtaaaaattgcacaacagcagctaataaaacccgaatagaagaggagccaacgtgcaaggaccacaccaattccatgcgcaaaggcatctacttcctcagcaagagatatgaatagtgtctagactgcctaatgacaatatagaagcaataaatctgacacgggacggagcctctactgaaccaagcataaggctcatatacaataaatacacaatggcaagattataacggcctgaaacaaagaagcagatatagtagctgcagc

SEQ ID NO: 717711 - DNA, 184 bp, Homo sapiens
tggttttgggggtttttcatgttttagcctttggaaaaaaaaactgggccatgtaaaaactttccatgtttttttttcaaatgtttaaccccctagttgatgtatgggatctttaaaaatttgcccgtctgtttgctcaaaattgcttttaaaccaaaaaaaatttttttattttttaaggcca

SEQ ID NO: 717712 - DNA, 459 bp, Homo sapiens
agctcaccgtgtagcttacaattgttttaattatgtatttgccaagtgtgcatataagtacacttttttagtgtgatatgcgtagtttctgctacgtgtgatattcctggaggttgataactttgcttgcagtagattttctttagtaagaactgggcagttacatgcaatacattcagaagtattttcctgtgcaaaataacccagttatttaggtttggttggctatctaaattatggtgtgtatatctttgatgtgggcgacatttgtataattgtatcgtatagctgtattgaatcatgtccgtatcaaatattagatgtgatttccctagtgttaatcgaatttaaacccattttagtcacttttttttttccaaaaaaatactgcgcaaatgctgatgttcagcgtaatttcttggcctgttcagtccgggaagggggtgctcagttgtagaa

SEQ ID NO: 717713 - DNA, 291 bp, Homo sapiens
gacgttcgggaggcaaggcgggcagatcatgaggtcaggaaatggagaccatcctggctaacacggtgagggcccatctttactaaaaatacaaaagattagacgggcgtggaggcacgcgcctgtagtcccagctactagggaggctgaggcaggagaatcgcttgaacccaggaggcagaggttgcagtgagccgagatcgtgccactgcgggccagcctgggcagcagaatgagactctgtctcaaaagaaaaaaaacaaaacagtaaactcataaactctcaaaaaa

SEQ ID NO: 717714 - DNA, 202 bp, Homo sapiens
aggatctttgcgagtcatggtcaggagtcgatacagcctgtgcacatgtgaaacctgtctctactaaaatgcgcacaaaaaatagcggcgtgtggcatgtactgtagtccagctacttagaggctaggaggagaatatgcttgaaccgggagttgaggttgcagtgatccaggattgtgcactgcactccaggctggcaaca

SEQ ID NO: 717715 - DNA, 838 bp, Homo sapiens
tggggtcttgcccccggattaaaaaatcgggaacggtaaaggtaaccccagccggtgggagcgaactccccccaaattccacaaggtgcccagaaagacttttgattgcgcccatttgttgtttttattaaatattctcattcccaaatatttagaagatcgctgtgggtacacagagagtaggctccctgtgtgcacactcctatataaacgcccacccccattatcctctctctataaggagaaacatgtgcgcccgagtcctctctctctccccagatgtctcaccacccgagtggtgggagtgtgtgtatatcacgcattgccgcctgtctcgctggttgttctacacttatatgtgtctcgatgtgcccacaacatttcttcctttatatatctctctctccgccctctatatacatactttttctactatctctgtgtgtattctactattctgtgcggcacatgtgtagatgccacgccctttctggtgtgtggcccccccctctatctccccctcttctttctgtgctccccccccacacattatttgcgaaatagtgtttattgcaagaggggctttgtggtgctctccccgctgtggaaaacagtgtggggtttcagtcagcgccaacgcccgagggggtcatatcccgcctggcttaccccggtgccgcttcatgaaaaccacgccgttgtgaaaataaccaagggtcgcccaccctcttttaaaaaaagaatacaaaaccaaactaaataaaacgacaacacaaatcacaccaaccaggcgaggaccctaaactaaatagcggcggcaggcacaacaaacaaacag

SEQ ID NO: 717716 - DNA, 297 bp, Homo sapiens
ggggggggggggggggggggggggggtttttttaaccaagccttttttttttaccccccattttcccggggagcccccccccccttttttttccccccttaaaaaacccggggggggtccccccccccggttttttttttgggccgggggggggttttcttttttccccgggaaacccttttgccccttgggccctttttggggccccttttaacccgttttttccaaaaaaaggggggggggcggggggggtttttccggggtttttttgccccccggggcccccccggggcccca

SEQ ID NO: 717717 - DNA, 336 bp, Homo sapiens
tggtgggtagcagcaacctagggatcagttagcaggtggttacagccatttaccaagatagttcgtcagttacgaagggcagatttattagagcaaatggtgaaacatatgttgcatgctgggcagcttcagcagagaaggggctactcgtgccgggaggccagcgtctaggaggacagttttatagggtcctgtgtgaagggtgctacgtgtgaaatgaggtcgattgtgcccgcaggttgtttgtgattagctgtttctaacaattgttcatacaataatcgttcattatcgttctcaacttggggctctccccaacctggggacccttcctta

SEQ ID NO: 717718 - DNA, 1381 bp, Homo sapiens
  misc_feature (836)..(836): n is a, c, g, or t
  misc_feature (852)..(854): n is a, c, g, or t
  misc_feature (875)..(875): n is a, c, g, or t
  misc_feature (879)..(879): n is a, c, g, or t
  misc_feature (881)..(882): n is a, c, g, or t
  misc_feature (885)..(885): n is a, c, g, or t
  misc_feature (891)..(893): n is a, c, g, or t
  misc_feature (918)..(918): n is a, c, g, or t
  misc_feature (920)..(920): n is a, c, g, or t
  misc_feature (1081)..(1081): n is a, c, g, or t
gaattcgagacagtcgtagtccaagttaatatcttaccgcttgttggggtatacttgattgttaatgttcttgtatctccatcataatcaactgtaaaatcatgaaattggccgtgtacgtcagacttacttaacgcttgggaagttccatcaacatctttagcccaccatctttgaacttttattccatccttagtagcaacttcttcattttcagtatcaacaaatgtgccatatggagcattcatagaatccccattccaaccaaaatcattagagttagttgaatcgatttggctaccatctttatcagactgtggagcttgatgaccatttgaccatgtatcaagcttaaatcccagagcattttgcaagccaccaatacccaagttgccaccagcattaccaatatctgtggtattaccgttatgaaaagcaaagctaataccgtcagctccattaggattggatcctaaattaaccttaccagttaaagtaaaactagtattcatatcaattttactcttgagagtgaaatttccaactttattatattcatctggtgtaatagtcacaataccagtattttgatcataagtggctgatccgtttaatgaaaagtaagcaagaaaattatccttagtaacatgtgttagaacttctttatcagtcgccaaagccttacttccactggttgaatcggccttcgttgcactactacttgcgccgattgaatcggcctttactgcactactacttgcaccggttgaatcggcctttactgcactactacttgcaccggttgaatcggcctttactgcactactacttgcacnggttgaatcggccttnnntgcactgctactacttgcacnggtngnntcngccttnnntgcactgctactacttgcactggtngnttcagcctttactgcactactgttatttgcactggttgaatcagccttcactgcaccactacttgcaccggtcgtttcagcttttactgcactgctactacttgcattggttgaatcgtccttcgctgcactgctgctacttgcactggttgaatcggtcnttactgcactactgctacttgcactggttgaatcggtctttactgcactactgctacttgcactggtcgtttcagcccttactgcactacttgaggtactggtagctgccacatcagctgacactggccgacttgtaactggcacccctaatccaagtgcaaacattgatgcaccgataactagccatcctttgtgagatttaaccatttggaatcgagttgtttccttcctacataatgtactttattttttcttaccgatggattttacgcatgttttgttgtctccttccggaattc

SEQ ID NO: 717719 - DNA, 124 bp, Homo sapiens
atagaataaacagcataatcaggcactgttttagttggtttttggttatttttagagacaatctgctctgtggcccgcactgaagtgcagtggccgatcacggcttactgctggcttgaactcc

SEQ ID NO: 717720 - DNA, 304 bp, Homo sapiens
gggatgggtgtgtgtgccggaggttatatccttacgcgatacgtgactccgacgtgagcggataggatagggggcgtaagtctgtcataatcttctggtgcagctgtatcccgataagcccagattcagcgggtttccatctaccagtaacattggcggaataattgtcaaagacagtagggatatattctccaggaaatgcattggttgtgtaagtgatcagtaggcgagtttgacctacaggtccgtctcccaccaccacgcacttgatggcctgcatcagggccggttggttggtccgctg

SEQ ID NO: 717721 - DNA, 541 bp, Homo sapiens
atgaggagtgtcagagtagccagaagaccatgaagagtttcatccaagaagggagcccacctgacttggtgtgtccatgtgcagcactcaccataccctgcccgggctggcccctccaccacctccaggcccacgagacaaaccatcgaggttgctttcaatcttgaccccgcgttcttcgaggaccatctgtggactggcggccggctggcgtctgttgtccatgtgctgctggaaggttcttacgaaggattatcttcaacagctcatcttcatggtgctgttttcagcctcgtcagggcagcctggaggctggaggggaagtgcagggccaggtggttgcaagctggttcctgttccttggacacctgctggggccctgcctgggcctgtgggctgctgtccagatctgcaccggttacagcgccttgcccaggaatgtgcattggatgtgacgtgtggcaatgtaacatgtatttgtttccatgagatgctggcgacaatgctccatttttcttttttgtataaagtcgtctggtgt

SEQ ID NO: 717722 - DNA, 155 bp, Homo sapiens
  misc_feature (75)..(75): n is a, c, g, or t
  misc_feature (94)..(94): n is a, c, g, or t
ccagcagttcagtggtaatcaaaactctgctagagcagaaggaaactcctaataatcacgtctcgtccgtttggntccatatctccatgcatgncggatacagtgaaatctcgagcatgcatcttctcggtgagccagtccaccttcctccgggt

SEQ ID NO: 717723 - DNA, 774 bp, Homo sapiens
  misc_feature (254)..(254): n is a, c, g, or t
  misc_feature (261)..(261): n is a, c, g, or t
  misc_feature (360)..(360): n is a, c, g, or t
ttgtgccaaaaagggttggatgcttcaaaattaagaattatattttttggtggtaggtaaagtttgggtactgcaaaattttaagggtactcccaaggaaggtagatggctgaggcaagaatttaaggtgtgaagtcaaggccaagaatattgaacagatgttttctgtccatttctaatgtttttgctttcacatatcttaaaatttttttgaaatactacgcaccctctcacatatataagttgacctctanaatgttntgctataaacttcatgaattacaacaaatgtaatttcccgtatattgtctatactgtcttttttgtttttcttttcagacagagtcttgctctgtcacncaggctggagaacagtggcgtgatctcggctcactgcaacctccacctcccaggttcaagcgattctcctgcctcaacctcccgagtagctgggactacaggcatgcatcatgagacctggctaatttttgtatttttagtagaaatggagttttgtcatgttggccaggctggtctcaaactcctgacctcaagtgatccacctgcctcggcctcccaaagtgctgggattagagctgtgagccactgcacctggcctatactgtcatttttaaataaaaaatttaaatattacatggctcaaataagttcaatggaatctaagtgctataccacatatttttttaaatacctacaataagagttttaacattgcttttcccctaaaattgtatttccattccacttccccca

SEQ ID NO: 717724 - DNA, 330 bp, Homo sapiens
tgatagtcgattcctagaggtatcccgggaacttcccgggggcacacatctcactcatactcctactcgatgacgcttcccagtctctggctttttgaaagcaaagatgagcaacactcgaagctgagaaggtccataatatggcatgatgcgacatgtttcacaacatacactcagacgtgatgacagagattgataagccaagcctgcatgacgatgatgaagagagaacttccccgaacttccttacgtgcgctgtgacaaacaagggcacagacttaccatcgcctgatgctctttgtagaaataaggacagagaatgacggataa

SEQ ID NO: 717725 - DNA, 508 bp, Homo sapiens
  misc_feature (18)..(18): n is a, c, g, or t
  misc_feature (200)..(200): n is a, c, g, or t
  misc_feature (252)..(253): n is a, c, g, or t
  misc_feature (276)..(276): n is a, c, g, or t
  misc_feature (337)..(337): n is a, c, g, or t
tcccctgttacttagctnggacttagggcagctgagaggcagatcatcatgcctctactttcttagcagagacaaggaagactggggctgtttgttaatgaggaaggggaaaatgggacaaaatactcctctttcaaatgaacactgtggagaaaatctttctgggtttggggatgtctttgtgaagacttaggggagtnataaagccagagacccccctttttttcctttccctgccttggatctaaggcnngtgagccaaatttggaagagggngttggaatttaagcttaaggctgcttaatgtcttcctgggggctggtgttttgggagggcngactaagagaaacaggtcaacctcaaagctggtctgctcatcctcttagaagaggtctggtttcttgggggttgagccaagagaggcccccctgtgagcacagtttcccaatctgaagtattaaccgggttcttttttttcagcagttttcaaaagcatgttttccggggt

SEQ ID NO: 717726 - DNA, 379 bp, Homo sapiens
  misc_feature (378)..(378): n is a, c, g, or t
gcagaacgaataccgttacggggttgaatcggcagcacaggcgcctgcaaccgctggaacgcgcagagtgtgtcgttctcgtcgacatcgagccgcgccggaatcgtcggcaccgagatcgacgcgttcggtaaccacggcgtcgtttgcgctgtaccagcgcacgaccgtgctcgtgcgcagccgcagcacggtgcggtgacgccgcccgtgttggtcgcgcgttggcgagccccgccgcgatcgcgaatcccgatccaaagcaggcgaccgaatgggaggccgtcggtgaccgcttgcggttccgtgcggggcaaccttacgacgcggcgagcgaattcgtgttcgcatcaccgcacgttgcttgcgatcccgaanc

SEQ ID NO: 717727 - DNA, 150 bp, Homo sapiens
gcggcatggccatcctgagcatgctgcaggacatgaatttcatgaacaactacaaaattgactgcccgagcctggcccgggtctgtttgatgataaagaaggcctaccgctatcccccctaccacaactggccattcaacgcctacgagg

SEQ ID NO: 717728 - DNA, 377 bp, Homo sapiens
  misc_feature (320)..(320): n is a, c, g, or t
  misc_feature (364)..(364): n is a, c, g, or t
ttggataacagtaatttttaacaataaatttcaactaagggtgtgggggcaggtattcttgcagattgacttacttataggttctctcactattacttcagaacctcgtctaaggcaagggtcagcaaaatatggctgttttgtaaataaagctttattggaacatagccacagccattcacatgtatatcattccatagctgctttctggaaagatagagtttgagtagttgtggcagaaactgcaaaacctaaaatatttactgtttggctccttactgaaggagtttgctgacccatgatctaagggtacctattgngtcaattagtcactggatgtcattagggaagagacataaggtgngcaagcccaacat

SEQ ID NO: 717729 - DNA, 404 bp, Homo sapiens
  misc_feature (90)..(90): n is a, c, g, or t
  misc_feature (102)..(102): n is a, c, g, or t
  misc_feature (113)..(113): n is a, c, g, or t
  misc_feature (148)..(148): n is a, c, g, or t
  misc_feature (330)..(330): n is a, c, g, or t
  misc_feature (396)..(396): n is a, c, g, or t
ggccatattagcagcggttattcggtgagcggtggtgggtttaaattcttccgcggagttaagggctccgtggacatctcaggtcttcangggtcttcccantctgggaaacnctatactaacagttcagaaaacatgtctcgaaganctatgactcccagggaacccaacttacttatttttcctccaggaacgggtccgcttattaccaagggttgaacttattggccccatttgggggcaaaacgggcctttaattttgggggggaaccaaattttgccagggggcaaacccttggtttgtgggggaacatttcttccgccaaaaanaattggaaattggggggtggaataattgggcattttgccacgcacgaagagacgcaacatccacanagcttcct

SEQ ID NO: 717730 - DNA, 344 bp, Homo sapiens
  misc_feature (144)..(144): n is a, c, g, or t
ccggggggttttttccccccctttcccgggtccccccttaggtttgggggggggggttccaattttttttcttccccaaatttggggcctttttggggccaagggtttttttcccttcctttttgggggcccgggcccccacanaaggggtggggcccccggtaaggccccccggggaattttttggggaacccttttggggttttttttaccctttttggaggggctttggggggttttttttggtttttttgggctcccctttttttttttgggggcccccccggggtttcccccccccccctggggccccgggggttttttgggttcttttgcccctggga

SEQ ID NO: 717731 - DNA, 812 bp, Homo sapiens
gccacaccattttgtgtcccccacagtgagagatcggggagaccacatttggtgtggggacacccgctaggcccccgcttgtcagcaccgccccgcgccctttcggggggggaaatccccccctcggcgggggacacacccctcgttttgccacccaccctgcggccccctcctccagaagttgtggcccccaaccccccgtcgcacagaatctcttcttttttctgggggttacccccttctctctaggcgccctctctcttttagatacgccgcgcgagagagtgttccccccccccccctcctatctcatcatctcatcggagagtctctctctcgcgcgcgagcggcgtctcatcttatcttctctcttctcgtgtcgtccccccgttttttttcctcccccgcgcgggtttctcgcccccccccgccccgctcttttctctccccccacacagctgtcttttttttgtgagtccacatcaccaccccccccactggggggggcttctctggcttcatcttttcgggccccttctctcctcctcagcgggccaccccctctgaccccccgcttgttgtggcaccaagcttccttagtgttctcttcctgccccccccactggtcttccttgccgcgagagaaatttcccgcggtctcttcttttttttcgtgagggggtatctctcttacgagggttgttgtcccgcggggtccgcggacgattatcccaaagggggggcgccccccccccccttggggaaacccccctcctttaaaaaaaaggggccaccccccccgcccccccaca

SEQ ID NO: 717732 - DNA, 462 bp, Homo sapiens
accggctccactggttgctgagccaggtcttgaaatctgagcttgtgatccgccagtctcggcctcccacagtgctgaaatttcaggcatgagcactgcacctggcctaaaaatacaaaaattgactgggcatggtggtgaacacctgtaatcccagctacttgagtctgaggcatgaaaattgctttgactgatgaggcagagattgcactaagtcaagatcttgccactgtactccagcatgggttacagagtaagactctgtctcaaaggaaaaaaaaaaaggctggacaccgctggtgggtcacacctgtaaccccagcacttggggaggtcaaggcgggcggatcatgaggtcaggagttcgagaccagccgggccaacatggtgaaaccctgtctctactaaaaataccacaattagccaggtgtggctactggggattacacacctgtaatccca

SEQ ID NO: 717733 - DNA, 283 bp, Homo sapiens
agaccactctctactttcactaacaaccactccgtactgtaggtactacagttagtcttcctttgttgccttctctttagactactcgtctcttcatgtccctgaaatatcttgtttttttttttccccagagaaaggaaccctggcttttcctttcacactttgcaaagcgagaattccaccactttttaacaacctcaaatactacaatcctactcgaactccttaaaaaaacagaaaagaggggaacacttccttcaccttctgccatgattgaaagttc

SEQ ID NO: 717734 - DNA, 88 bp, Homo sapiens
ggtcactcttatgaatggatgttggttatacttttaatggacattaacattcctaataaagtattagtttcttaattcaaaaaaaaaa

SEQ ID NO: 717735 - DNA, 144 bp, Homo sapiens
  misc_feature (124)..(124): n is a, c, g, or t
  misc_feature (129)..(129): n is a, c, g, or t
cactggcctccaaatgccccaagtgcgacaagaccgtgtacttcgcatgacgggaagccgttctgccacaagccgtgctacgccacccctgtttggaacccaaaggcgtttaacatcgggggcncgggnctcctacatctacga

SEQ ID NO: 717736 - DNA, 256 bp, Homo sapiens
gtatacaggaagagactgtgctgtccaaggacactagagcccaggccctccagacacattctatttctcactgtacattagtaacatgggagctcatatgtacatcagctttaagagccaatttaacaatgagtctagttctacggcagggagccactctgagtgtagtcaaatcaggatttatagcccctcaggttaaaggttacacaccagacgctagggcagcagtcccccgggtcggcaccagggaaagaca

SEQ ID NO: 717737 - DNA, 292 bp, Homo sapiens
cccttctcaggatggtctagagtcaaaggcagacatctccgcatcctctcctagccaaggggacaaacagatactacctgaatccatcatcaatgtcatacctcgctgatagtcgaactcttcaagattggcctcgattacatcatcgaccgctaggtagtcagctatacttaacagcaaacagcaccggatgccagcaactccccatccttgactagggattcaacggtggcacaggcaacagcaatgtactctcactggctggcagcatatgaaagcggttgcacacctc

SEQ ID NO: 717738 - DNA, 770 bp, Homo sapiens
agagagcgtttactctaggagagagccagtcgctgagctgtctatgttttttagagtgccccacatcatgcactatcgacacgatatgttggcagacagatggctatgccagaatcacagcctatggcaaggcaaagcaggattatcttcagcacttattacataaagactgggctgtccatcatgatgaaaccggatctcctactagatatgtgatgctatagcacggctcaaggatgctctgcatttcaatgccattggaggcatgtatatctagacttggacaggcttatgtatacggccgcaactcgggctcactaggacacatgatgctataaggcttcagatttcatttaatgggccctggtgttacaaactactgactgctttatccctggtgtgacacaacttaattgatttatcacttatccgccttggacaggtttgctgatatcagaagccgcccggacccttggatgctatcaatgatggtaacatcctgaaagcaaatgtgtactggctgctgaaactctattgtcaaaaagcaggcctaatacctgaacaataacgtgatttttcaaccaatatgctataatactgaaaatgcgctatacatgaaactacttacacgcatcgggggaaagggggttctcgccttggacctgagacacttcaaaaatcttgggcgcaaaagcaaaggtttaaaaactgtttttggttaagggccaataagggaacgtaacattaatagttttatgggccccggcccc

SEQ ID NO: 717739 - DNA, 1101 bp, Homo sapiens
  misc_feature (1101)..(1101): n is a, c, g, or t
ggatgacacagcggaatcctctctgatgcatgatcgtccttccagaagtgggtgtagtattataaatcgtgttaggagctgcacatgacatccatctctgattctcatgagtatactcatcccgttttggaatctacaaggtggacccatgctcaacattggtgacgccatgatacgatgacttcttaaggacaagcttgccaatctttgccgatgttatagaaagtttatgcttcgctctcattgtcacaacgaccaaactttatagggtaccgcttatgtacgaacccatgagaatatccatcgtatcgtagccaagtagctgaacgatacaggagctgcgttcagagctcttgactctcggttggcctaggcatactaatcagcgtactcgtggtaaatgctgtggcgtcacgattctgacgattcagaagaaaaattgatggtccgctatccaagggcaacaatgtctcacatatactttgctacaccatcgtgggtctaatggatgagtccagagaagggacatatttccccaacgtgtaccctaatacttgacaatcgtcgcatcagagcgagcgctgcaccaaactatgggtggaaatcaccaatctgtaagttaaacaataacagaaagctttaaccatgcccttgagtggctgtaaacgcctgtaacatcgcagctgaattggggaggcttgaagcgcaggacgaattagcgatgaaaccggcagtgaggaggttgccagtgagcaaacgaaacccatgcggaacccaaacctgggaaacagcgagaccaacgcacaaacccggacgcgtctccgaaccggacatccaggcgaattgcagcagaacctcgagcggcaaagcacacgcgggcacaggaggaagtaaagagtgaaacgccaagcaacaatccccgcgcccacagcgcgatccccacccaccagggcagtgtcaacaaccaacgcacccagaacgagtcaacacaaccacagaacgcgccggcaagacaccacacggagcagagaaaagcgaacacgcaccaagcacacacacccagcgaaccaagaagcacgccgacacacagcgccacgcgcn

SEQ ID NO: 717740 - DNA, 296 bp, Homo sapiens
ccctcccaaacctgcttgggaggccaaaaaggccaaaaaaaccgaaaaccccttctgttgtgggcaacctgggtttgcaggcctgcaaaggctggggaatcctcaggaccttaggaccttcatccaagggctgggcttcgggtcttcaggaatgggccttggctggtgctggtgccatggactctgcccagaaccttcttgtttatgaacagctccagctacctgggcaattgtggtggggtggatgggaaggcccaaagcccaagggatccataataaaaaatgcttggccagca

SEQ ID NO: 717741 - DNA, 138 bp, Homo sapiens
actacgacggactcccacgtgccattgtgggactaacatatggcggtggacttcacgggacggacgtacgggggacggcttcgtggcagttaagctatcccacggacacactacgcttgacaacacggctctacaacg

SEQ ID NO: 717742 - DNA, 366 bp, Homo sapiens
cgtcgacacagtttgtgaggtgtgtccccagtgagatgggaagcaagactggcaagggcctctctaagtttggagtggtatgcagatttttttttaaagagtatcacaatccacagaaaacatatttactaggattactcaaaattacttaatctatccagcacatattgagaattcaccctccagtccttggacttctccaaggtagaagctttaatgaccagtacagtagagtgtgcttggatgcttgatgctggagttgtgaaatatgtcatgagaagagagagaggggagggtgcccagtctgcagatacaaatatacagtgagaaggtgagagggatgcttgctgggttgttcgtcgacgc

SEQ ID NO: 717743 - DNA, 191 bp, Homo sapiens
aagagtgagttccaggcccatgcacgggcagggcaggtccgcacacgacttgattcatatctccgtactctgtcatgagatcagcacacaggcaactgagccagccattaatgtccaaatcacacagcatccataaggctgcacagcaatcagcaccctttgctggcccatcaccacaattattcgtcaag

SEQ ID NO: 717744 - DNA, 158 bp, Homo sapiens
taccagagggtcgtgtaacagatgctactgagaccaacatcaccagacgctggagaaccaagactgatacgatcactggctaccaagattgatgccgttccagccaatggccagaatccaatccagagaaccatcaagccagatgtcagaagctaaaa

SEQ ID NO: 717745 - DNA, 252 bp, Homo sapiens
cgcctgctgagatggtggcgcccccctcgcttgttatgcaccgcacgttcgtgcgggaacctggtgctcctccattctgtagtgagcacgcatacgcctgtatatgtcacatgcactcgccggggtctgcgtgcttacttacgtgcccatggcccatttctgacagccccaccaccttcactgaggcggctccgaagctccgttccctgctgctccttacagacagtgggaggcagatatacacaaacgcct

SEQ ID NO: 717746 - DNA, 370 bp, Homo sapiens
  misc_feature (128)..(128): n is a, c, g, or t
  misc_feature (230)..(230): n is a, c, g, or t
  misc_feature (236)..(236): n is a, c, g, or t
  misc_feature (323)..(323): n is a, c, g, or t
  misc_feature (340)..(340): n is a, c, g, or t
aggaagcagcaaccagtttttgaaaaaaatatcccaacagggagttttcagttagcccaattcgtctggcacatttctcaagctcaaaagagggtatagccgttggttcttatgattcaggggctgtngcagcttatgggttcctcccagccctatattccagattctgtgagccgctcccaccaagccaaaggatcatggacgtcttttaacatatctgtgcccattanccaganctcgggacacaatgggccacaccccagtgtgcagcaaggcatcccttatatatgatcttgattttaagtttcagtatctgaacttcnggtaattagtaactttntagctgggaaagtatagcatgaaaccagag

SEQ ID NO: 717747 - DNA, 590 bp, Homo sapiens
gaagtgtggtggatgtgttttcatgcccgttctgaaccccttgggaacatctgtcctatctgcccagatcttcaagtaacgtctgagccatcttcctcctgctcttcctcctccctcagttctgattcatagtttttcccggcagagccatccagcgaggctcttggggtaggggaggtgctccatgtgaagacagagtccttggcacccccactgtgtctcctgggagatgacccaacatcctcatttgaaaccgtccagatcaacgttatccccacctctgatgattcctcagatgtccagaccaagatagaacctgtctctccatgttcttccgtcgactctgaggcctccctgctctcagccgactcctccagccaggcttttataggagaggaggtcctggaagtgaagacagagtcgctgtccccttcaggatgcctcctgtgggatgtcccagccccctcacttggagctgtccagatcagcatgggcccatcccttgatggctcctcaggcaaagccctgcccacccggaagccgccactgaagcccaaacctgtagtgctaccactgtccaattgcatcca

SEQ ID NO: 717748 - DNA, 432 bp, Homo sapiens
aaaatgatgatgaaagaattaaagaaagacatggcgcaaaatcaagaaaacaatgtacaaacaatgtaaatatcaataaagagatagtaaacctaaaaagaagccagaaagaaattccataaataaaaagtacaaaactgaaatgaaaaattcactagagggattcataagccgatctatgcaggcggaagaaagaatacacgtctgaagaccggacaattgaaactgttaagtccgacgaacagaaagaaaaaagactgaataaaagtcaacagggcctggaggacatgtgggaaacctatcagtggaccaacatatgcactacaggggccccatatgtagaaaaagaaaaagaggctgaaagatttttgaaaaaataatggttgaaaaatccccaattttgatgaaaaacatgattgtaaatctccaaga

SEQ ID NO: 717749 - DNA, 360 bp, Homo sapiens
ctagtggtttgggaccccccggaggggatttggggtgggccccggccctgggccggggttccaacaagtgggcgcccccccaagggtttggtccccttaagggggcccattttcccccccccccccaaaaccttttggggtttttcccagggcccgggggttctggccgcccaaacggggttttcctttttttttgggggcccggtaggtttggccccaaccccgggtttttgggttggccccggtttttttaagggggccctttggttccccccgggacccccgccctttggtttggttttaaaccccccccgggggaaggtttttcccttttttccattaaaggccggccctttttta

SEQ ID NO: 717750 - DNA, 267 bp, Homo sapiens
agctgtgattacaggagcatgccaccacgccccgcctagcttttgctagagatgatatttcaccatgatgttcaggctgctcttgaactctgtgcatcaagttatccatccgcatatggcctcccaaagcgcggggattacaggcatgagccacttgacctgttcaactttataagtgacatgtaaacaagctaaaagcgtttagtggcgacgtgtcgaagctgtctctagccgattcctttatgaatggcttaattcaggtgccaa

SEQ ID NO: 717751 - DNA, 203 bp, Homo sapiens
ccatgataaaggagaggccaagaaaaggtagcaaagacctattcttgtccttctgcaggcccctggacgactccaggtacctctgcgggcctagtcttgacccctcacgaggccacgtgtcttgcttctttcaaagcggaagctcccaggggatctgtgagctggcttctcgtctttctcgtcacgttgttagaacggcactg

SEQ ID NO: 717752 - DNA, 406 bp, Homo sapiens
ttgcagaggcagaaaagcaaaacctcagcaaaacaaagaactccatccctttaatgtcttctcattaaacatcatggattttacccacacaacagacaggaaaaggcagtctttcatccaaaataccgaggaatgccagctacatacagagcagaaaccctcttcacgtgacacacacttagccttccagaacgcagtggcccggtgtcagcagctcctgctgcacctgccaacctcgacggtccccaggcacagcgacccaccgcgggtagagaaacgtcagggagctgcccacacgggtgtctgtgcagatgctcagaacacagcctgcacagtctcagggggcgctcaatgccaccagccagtaaaacaaatccatacttcaactatgttatcaaccctttcg

SEQ ID NO: 717753 - DNA, 1737 bp, Homo sapiens
  misc_feature (1512)..(1512): n is a, c, g, or t
gaagtgactcattactacagatgatgatgaccattgcaagttcccgtcacttagtgaagacgatcttacagggcatggaagagcgaggcagtgaatgcagcacttgcagtgaagatgacacggtgagtgggctcagcagtcccttctgtagcaagctgcacacgagcctaggacaggacgcgatgatagctgtgagcgaaaaccaatgcaggaggcagcgcaggcggcgaagacgtgaggaggcccgggaggaaggtagagcagtcctactctttgagcatatcgacgacagctactgaactcatcaattgggagatcggtccaagccattaggtgattagatatgatgctaggctatgcgatagttgttcgaaggagcctggaaattgaccattgcctggatgagtggagcccagtccgctattggaacctaaagcaggaacgcaagttgcgggtggcaaaagaagcaaacgactacacgttcaaaagtggaaaatcaccagtggactggagtgctaaggggtgtacccttgcacagtgcggctcgacagatctgtgccccgcgctaccaataccaaactgagaaaacctgacgggaaatagaagggaagcaaatcatcaaccgtgcgtgccggggtgggaaacattggaacataccgtgatttccttcccatgttgtgaacgcgtatgtggatccaaccccgccctggggttgggcatccgttaatgcgaggaacaatagattggggataccccctttccgctaattggtttcgaagagcccctatagtatggccgcaacaacagccccaagagctatatattatcccttgtgcgaaggatacgaagaggtttcccacagcggccttggttggtagttccatatgggattgggcaatatggagaatccagatggaacattggcgtgggggcttttccatcagaggaaaaggattatcccgattcttggccggtaggcaaccaaattgtgggggcttacgtgttaacgtctccgcttggaacgcagtggccaaggcgctcgcacaacaggcacaagcaaacaaggtttgtgccaaaggggactcaagattgtgcgacacactaacatacacctatttgctaaaagggggacatgcaacattctgtcgtgacgcgcggatcacactgtgacagcttccggacaacgggacatggtccttatggtgcgacaacgttagcaaactctttcgtgctgtacatctgcacatgcggggcaaacgctacgaccgagcaggatgtgggacaccgacaccaatccacagagagcaaaatccacacactgcgaacgggaggcataccacaaagccacgacaaacgagcatgccagacggcacagaacacgactcgctagaagcacattaaggcgcatacaaagataaaaactaggaaatgagaaagacccccgtcgaagagtcacgaacagagtaacagggcaagaacagtgatagtacactacaggaggaagcactggangaaaacgaacactccaaggagacgaaccaccgtgagcacgcgacgtcaccacaaaggagatacgaaaaacggaacacagcaaccagagcggcgccccacacgagagacacactagcggagacagagttagcgtaacaccagccaaagacacaaaggagaggcacaaccgcaacgagaccacaagtggacgcccacaagcgtcgacgcactgaggagcaccaagag

SEQ ID NO: 717754 - DNA, 111 bp, Homo sapiens
gcagtgtgcctgaccgagtactgggcggctcccactccatgaggtatttccacacctccgtgtacctggccctggccgcggggtagacccgcttcatctcagtggtgctac

SEQ ID NO: 717755 - DNA, 1304 bp, Homo sapiens
  misc_feature (212)..(212): n is a, c, g, or t
  misc_feature (239)..(239): n is a, c, g, or t
  misc_feature (491)..(491): n is a, c, g, or t
  misc_feature (520)..(520): n is a, c, g, or t
  misc_feature (709)..(709): n is a, c, g, or t
  misc_feature (1291)..(1291): n is a, c, g, or t
  misc_feature (1298)..(1298): n is a, c, g, or t
cccgcccacgtcatggcgcctgaggagaacgcgggtaccaaactcttgctgcagagtttcgagcgccgcttcctagcggcgcgcacactgcgctccttcccctggcaggtgggcggcggggcgagcggagaggcctgcggggcttgcggaagtccagggcagacgggatgggtctccctgctgaaacccccggcgctcctgccacgtgagtncctgggctctcccggtcaggccacganacccggtccccgtccctggggcctggccagagtcgctctcacccctcctgccccgcgagctggcggcggaagctgggggcgtctccacagtcttggggggcagacgcgcgctcgtgtgtggggtacagttcacgatcattttcatgactttttaaaggcagtaatcgttctggtcactgggacacagctgccctcgcccattctaaaaagtcagcaccctcaggcccgcgggtaaccacctcctcctgagcncggtgaccaggtcaaaggctgtccctcgngcctcagtgttctcatctgtatgtcgagcactgcacagaatcagctcatgcgctgaggctttcactcctgtgatggaagagacagagaagggggtggcctctcctctccctggggacctgccattctcagcacaggcgcatggcaggcagcagcctcccttctgccagcagaggggcttaatgcacccngctccatttgtaattcatgtgcggtgagctcactgggatgagtcagtttggatatatattcctccctgggtctgccccattttatggggtgttgcttaatcatttgcgttattccattgacataaaatatttagcactcagagatcatttctggtcaggagaaatttgtgcatttttaacccaaaatagaaaccttcataaaagcatcataggtctccattcaatattgactataattgttcacatgcccacgctgaatgctaacttgggctcaccctcaacacccacgaggtgggtactattattatcactcacatttgaccagagggattgtttgattagggtgaagtagttgagagttcagacccaggagacagcctgcctgcttcgaatcctggcccaacccctggccctgtgtgaccttgggcaagtgactgcatctctctgtgctattgttttcttattaataaaatgggggatataatgatacctacctcttagggttgttgtcagcgttgagtacaaaagcctgtgggatcagtggcctggctcatggggaaatgcatgtcggtttttagccantgttttntatttc

SEQ ID NO: 717756 - DNA, 475 bp, Homo sapiens
  misc_feature (3)..(3): n is a, c, g, or t
  misc_feature (9)..(9): n is a, c, g, or t
  misc_feature (34)..(34): n is a, c, g, or t
  misc_feature (41)..(41): n is a, c, g, or t
  misc_feature (71)..(71): n is a, c, g, or t
  misc_feature (254)..(254): n is a, c, g, or t
  misc_feature (430)..(430): n is a, c, g, or t
aangaaggngcttttttagttaatggccaacctncggattnattggatgtcaaaggtcaggtgcacttaantattcttccaccggtaagtatggatttactggttttatatatctgggtgttgtacttaacagtgttccagaattctgtccctcttacccacatgcatcaaaaatcaccacgggatagttgttaaaaatgttaacgttggccgggcacagcggctcaagtctataatcctagcactttgggagncaaggcagtcaggagctggagaccagcctggccaacatagtgaaatcccatctctactgaaaatacaaaaattagccaggcgtggtggtgcatcctgtggccccagctactcaggaagctgaggcaggagaatcgcctgaacccaagaggcagaggttgcagtgagacgagattgngccactgcactccagcctgggtgacagagcgagaactcatctcaa

SEQ ID NO: 717757 - DNA, 374 bp, Homo sapiens
gaggcagacagagtttcaccatgttgtccaggctggtctctgactcctgacctctggtgatctacccatcttgtcctcctcatgtgtctggtattactggcataagccaccgcgcccagcctgattacttttagtatacagcattctaagcatgatccatgacagaaataattgattggccagacttcattaaaattaataaactgctttgcgacatatactgtctagagaatgaaaagtcacaaactaggaacaaatatttgcaaaagacacatttgataacggactgttaatccaaatatatcaagaactcttaaaactcaagaataggagaacactttcccactcgagaaggtgtggcaggtgcctggcac

SEQ ID NO: 717758 - DNA, 575 bp, Homo sapiens
agatctattcagcaggttaatggataaactgtggaacatccagaaagcttaaacattcttcaaagaaatagaaaacacaatcctaaaatttatatgggacccacaaaagacttagaatagtcagctatcctgagcaaaaggaatcaacctggaggactcatattacctgacttccaattattcaacagagctaaagtaaccaaaacagcatgatactggcataacaacagacacataggaacagtatagacaacccagaaacaaattcatacatctatggtgaccactttggacaaaggaatgaagaacatacacgggggaaacgataatgtctttaaataaatggtagtgggaaaacctggatattccatatgcagaagaatgaacagtagaccccccaatcttctttagcatataacaaattcagaattaattaacaggttaaatctaagacctcaaactatgaaacagttaaaagaaaacattcggggaatctctccaggacattggagtgggccaaagatttcttgtgtaaatacctgaaaaaaaggcaaccaaagcaaaggtgcacaatg

SEQ ID NO: 717759 - DNA, 337 bp, Homo sapiens
gccgctttatctgggggtgtcggggcgtgcatccaatgcagtctttccgggggaaggtttcagcctgtggtctggcgattggttttctgatcctcccaggtgtctctgttccttttggtggctgttattttacaccttcctctggattaatggaatattttggtgactcctttttattttctttctcaaggtggtttgggctatttaggatccttggagattttatataattttacaatgatgtttttttatctgcaaaaaatgccattagggtttggatagtgatggcattgaagatgtagatggcttggggtagtacagatattttaacagtctt

SEQ ID NO: 717760 - DNA, 169 bp, Homo sapiens
ccccccccctttttttggccccccccccttttttcctttggggggttggggaatttttggccccccccagtgggttttttgggggggccaggccccccccccctttttggttgggggggggggggggccccccggtttaagggggcccttttttccccttggggcccca

SEQ ID NO: 717761 - DNA, 157 bp, Homo sapiens
gcattgggagtctgaccaggtaggacttgaatgattcggctaccactagttcagaaggtgcagacaagaggtggcgagagcccgcatcatgcccctcaacctatcccgttccttctgcctacaaagtaaaaagtgcaggctggaactgatctcagct

SEQ ID NO: 717762 - DNA, 436 bp, Homo sapiens
  misc_feature (49)..(49): n is a, c, g, or t
  misc_feature (320)..(320): n is a, c, g, or t
  misc_feature (369)..(369): n is a, c, g, or t
cacatggtgcagcaggactatttccccaaggcccttgcacccctgctgntggcgtcttgaccaagcccaacagcgcgctcgaatcctcctctttcgccctccacagtctgctgcagacgctgtacaaggtctagactcaaaccctctcccatccttttgtcttggaccagtgagctggggagggactcggatgaactggagcgcagcctacgccattgccttggacaggactttcgccacaggcagggcgggtctgtgtcccatgtgtcctgtcactcccctgagtatgtgtgtgggtgtggcgcatgtgcaggtctgtncctctgtcgggatttgggttttaacgtcttctgctgcccagccctgctntgttgtggggagttggccccaggggaaagggctgtgagcctgccgccattaaactcacctccacctg

SEQ ID NO: 717763 - DNA, 439 bp, Homo sapiens
cctctgcaagggtgtgccaggagcaagggcacgagctacaactagcagccggacatgtacatcacttcttctaccctaaaggtagggccacagtgccatctgcttttcctaaggcctctgttccatcagcaattaggtggcagccaatcaagctgtgggaagctggccatccccacttccttgtgtggctgaggtgactggttgctttttgagccagcttggccttggccggcatgcccaagcttcagtgcaacaactgtgctacaaatggagccatatagaaacgagcagcaggctcaggagcagggtgtgcactgcctttggggctccagtccatgcctcaggcatcatatgtcactgcgggcttcttggtagccacgaggcagatcacaggtcctcttgaggaggactttacgttcaggtgtagaaagcagccagg

SEQ ID NO: 717764 - DNA, 475 bp, Homo sapiens
ctagaggtctcggtcgagatgacgtgaaatagaaaaagaagctagatgatccatggtcacccctctcatatcctcaagtcaactacccaccctatcagagaaggacaggctgactacatagactggccgccgctgctgacaagaaagaaacacctacttggagacagtcttcaagatctcggccaagaaaacaaaagccggggcccaacttgtaagtcacgtggaacaagagctgtattgtgttcatggaacccaagctctccagacagtcaaaaaaaaaaaaaatggcctggcaggtgtgtccagttagtctacacattttttccatacttctttttttttcccgttccggggaaaggggggtcttggaatatgtggcccggggggggtcctgaaagccggggccacaccactccctccattctcgtcccccccaaggtgtgcggcacaacgggcataaccaacggcaccgggc

SEQ ID NO: 717765 - DNA, 856 bp, Homo sapiens
ggcggccgcgcgggtcggttccgggcggttgggagcgcgcgagctagcgagcgagaggcagccggcccgcgcgcccctgtctgtatgccgtctctcccgggcggcgccgcgatcacagcagaggagccacgcgccgggtggatgtggttgggcggggttgaggaggccgccaagatgccgagtccaagtccggaagatcgcgatcctgggcataccggtctgtggggaaatcctcatgtgagattcattgtgttgacggccattgtgtggactcctacgatcaaccatagaaaacatttttacaaagtgtgatcacggtatctggacaagattatcatctccaattttgtagacacagcgggcacgatgattattctatctttcctcagaatatccatagatataatggctatatctgggtgtatctgtacatcaatcaaaagtttggaagtgattaacgttatccatggcaaatgtgtgggatatgggtggggaaagtacaattacctattatgtgggttgggaataagaaagactgatatggaaggggtgatcaagttctgaagaaggaaagctttgagaatctgtgaatgcagtttggggatcttctgtaagaaatcagatggtggggtgttttcgaaggatattggggggcgaaaaatggcgggacgttcaccaggagtttcatgccgggaggatttgtgaagcgtgggacgggataatttacgggaggcagggccggcctgaaaaaagtctttttccggaccgacaatggggagcgcccctatatttatgtgtgcagagtcctctatgccactattatttttttacaaacgctgggggggacaactctcat

SEQ ID NO: 717766 - DNA, 852 bp, Homo sapiens
  misc_feature (580)..(580): n is a, c, g, or t
  misc_feature (586)..(586): n is a, c, g, or t
  misc_feature (621)..(621): n is a, c, g, or t
  misc_feature (635)..(635): n is a, c, g, or t
  misc_feature (647)..(647): n is a, c, g, or t
gtgggcgaaagccctgccacaacgacgcgcatctccttcccgcggagatcatccacaggcgtcgctgaaagctcccaactagtgcggacccatcgaccactgcgagttggctcaggtgcctccgttgttacgggatgggggctatgcaaccgagttcaccgtgaatgcagccctccacggagttggcactcctgtcaccccgacgaggggacacaaggtgctgactgcagctaagtcaatcttcggaagctcatggtctcagcccaacactctaccttgaaggctcagagcgtgcagacttcctggcggaataccgaggcgtcagtctgtcgtgcgcctgcatcacgatcgcttctcgtgagcgtttacccatgatgcgatggacccgagatatggagtgagatctcttcatcacagctgaccacagccgatgtctcgattgcatggaagggctcccatgtgaggcccacatcttggcgcaagcttgaggaagatcgtgtgtccgttgcccccgaattcaccatctagaccaaggctgcaagtggccctccattcgtgtgtgtatttagggggtctgggnaggggnaggggcagagcttggaccttggtactcctcagctnagggtggtgacaanccccttccattngtcagcactttccagcctgccaattgcttcccctctgtgatctcatttcatctgcactgccatacgtggagtgagcaagacagggcttaccatcctgtctaccagatgaggaaatggcagttctgagaagtcactggtctagatcccgcaggtggcacatgacagctagggttcaaaacgttcatcaccaaatccaatgctccta

SEQ ID NO: 717767 - DNA, 392 bp, Homo sapiens
ccacggacaggtgtgtagaagctgctgggctgaaacttgggctgaacttccgctgcaggctgacttattcccatcagcaccaaagccgctggagggggtcatccactagcaaatgaagtgggggcacggattggaggctgtttcagaaggtcccactgagccacggactcaaggcctggccacagccctcccaagcgaggcccagatcatatttcaccacgctcagaaaaccttgccagctcatttcagtccacagtgactttgctttctttaggatctctcttgcactgtccaactcagagaatttcaaatcttgatggattccaatgatggagctaaatcaggcctcacctcagttttttaattacaatcaatagggctgcgtcccagca

SEQ ID NO: 717768 - DNA, 85 bp, Homo sapiens
tttctggatggatttgtatcctatattgtagctgtaattgtataaatgtaccatctgatgtcattaaaaaaagtgttgtagtgct

SEQ ID NO: 717769 - DNA, 478 bp, Homo sapiens
ctatacatcctttaaatcccgggcagagagccctcgcgggggtgaaatctcctgccctcactccccagaagagctaaccagtcctccctcgggactaacctccctttggagcacattctaatacctgcccatgggccagcgttcccttttccacagcaaatccttaaaggaagcgttcacgatgaagggctggcccatagaaaatgctacccaaatatttgttgcattaaaccgacaaaagttgacagcccttttgagaaccctgggagggggttctttcaatcctaagttttttagtaaacaggtgctctgacaatattcactcatcttaacgtttccatttcctttgatccaagttggggccacccctctttctttaacagatgtattagcctgttctaacgctgttaataaagacatacccaagactgggtaatttataacggaaagagttttaatggactcacaattccacatg

SEQ ID NO: 717770 - DNA, 1582 bp, Homo sapiens; identical to SEQ ID NO: 697926

SEQ ID NO: 717771 - DNA, 1582 bp, Homo sapiens; identical to SEQ ID NO: 697926

SEQ ID NO: 717772 - DNA, 200 bp, Homo sapiens
gcacccacagatacctataatgattatacacacctctgtatatacctcataacacctccctcactactatctaaagactacagagtacactacaaccccaagctccatagtctaggcctatcaggactattacataatactcagctctagcatgaccttctccaatagctgtacataagataacggacatacttaaggcc

SEQ ID NO: 717773 - DNA, 101 bp, Homo sapiens
gccgcgcctagcttttgattaaataataatagaagcaatcctttcacctaaccttccgaacaacaatttgtaatcaagaatttctttaggtagaaccttgg

SEQ ID NO: 717774 - DNA, 1949 bp, Homo sapiens
  misc_feature (1588)..(1588): n is a, c, g, or t
aaaaaaaaaaaaacccaagtttcttttacaaagttgtgcggccgctcgcgatgaactagcgaggatggccgtcatggcgccccgaaccctcctcctgctgctctggggggcagtggccctgaccgagacctgggccggctcccactccatgaggtatttctacaccgccatgtcccggcccggccgcggggagccccgcttcatcgccgtgggctacgtggacgacacccagttcgtgaggttcgacagcgacgccgcgagtccgaggacggagccgcgggcgccatggatagagcaggaggggccggagtattgggaccgggagacacagatctgcaagaccaacacacagacttaccgagagaacctgcggatccgctccgctactacaaccagagcgaggccgggtctcacaccctccagaggatgtatggctgcgacgtggggccggacgggcgcctcctccgcgggtatgaccagtacgcctacgacggcaaggattacatcgccctgaacgaggacctgagctcctggaccgcggcggacacggcggctcagatcacccagcgcaagtgggaggcggcccgtgtggcggagcagctgagagcctacctggagggcctgtgcgtggagtggctccgcagatacctggagaacgggaaggagacgctgcagcgcgcggaccccccaaagacacacgtgacccaccaccccgtctctgaccatgaggccaccctgaggtgctgggccctgggcttctaccctgcggagatcacactgacctggcagcgggatggcgaggaccaaactcaggacaccgagcttgtggagaccaggccagcaggagatggaaccttccagaagtgggcagctgtggtggtgccttctggagaagagcagagatacacgtgccatgtgcagcacgaggggctgccggagcccctcaccctgagatgggagccatcttcccagcccaccatccccatcgtgggcatcgttgctggcctggctgtcctagcagttgtggtcatcggagctgtggtcgctactgtgatgtgtaggaggaagagctcaggtggaaaaggagggagctgctctcaggctgcgtccagcaacagtgcccagggctctgatgtgtctctcacagcttgaaaagcctgagacagctgtcttgtgagggactgagatgcaggatttcttcacacctctcctttgtgacttcaagagcctctggcatctctttctgcaaaggcatctgaatgtgtctgcgttcctgttagcataatgtgaggaggtggagagacagcccacccccgtgtccaccgtgacccctgtccccacactgacctgtgttccctccccgatcatctttcctgttccagagaagtgggctggatgtctccatctctgtctcaacttcatggtgcactgagctgcaacttcttacttccctaatgaagttaagaacctgaatataaatttgttttctcaaatatttgctatgaagggttgatggattaattaaataagtcaattcctggaagttgagagagcaaataaagacctgagaaccttccagaaaaaaaanaaaaaaaaaaaaaaaaaaaaaaaaggaaaaaaaaaaaaaaaaaaaaaaaaaaaaaaaaaaaaaaaaaaaaaaaaaaaaaaaaaaaaaaaaaaaaaaaaaaaaaaaaaaaaaaaaaaaaaaaaatgggggcccctttggccaaaaggattttaaaattgggaaagtttaaaaatggggcccaaattgggggcaatttggcaaaattcccctaaaggggggcgtttaaaaaataaaggggcggggtttaaaaaaggtggaatgggaaaaaaccgggggttcccaaaataaaaccctttggaaaaaaacccctttttgcaaaggggggaaaaagcaaaaaggccccaaccgaaggccttttaaa

SEQ ID NO: 717775 - DNA, 201 bp, Homo sapiens
  misc_feature (12)..(12): n is a, c, g, or t
  misc_feature (42)..(42): n is a, c, g, or t
taacactttaancatctctccaagccaaggaggctatgacantgtagcttttatactgtccccatcggccacaataacaaacttttaaccctcataaaatgaatgaaatcatctttctaagaatctatacctacaattctctgaactaatcaatgaaaaagatgatcaattctgactaacaaagatatatcgattccattt

SEQ ID NO: 717776 - DNA, 1582 bp, Homo sapiens
  misc_feature (968)..(968): n is a, c, g, or t
  misc_feature (973)..(973): n is a, c, g, or t
  misc_feature (981)..(982): n is a, c, g, or t
aaaaaaaaaaaaacccaagtttcttttacaaagttgtgcggccgctcgcgatgaactagcgaggatggccgtcatggcgccccgaaccctcctcctgctgctctggggggcagtggccctgaccgagacctgggccggctcccactccatgaggtatttctacaccgccatgtcccggcccggccgcggggagccccgcttcatcgccgtgggctacgtggacgacacccagttcgtgaggttcgacagcgacgccgcgagtccgaggacggagccgcgggcgccatggatagagcaggaggggccggagtattgggaccgggagacacagatctgcaagaccaacacacagacttaccgagagaacctgcggatccgctccgctactacaaccagagcgaggccgggtctcacaccctccagaggatgtatggctgcgacgtggggccggacgggcgcctcctccgcgggtatgaccagtacgcctacgacggcaaggattacatcgccctgaacgaggacctgagctcctggaccgcggcggacacggcggctcagatcacccagcgcaagtgggaggcggcccgtgtggcggagcagctgagagcctacctggagggcctgtgcgtggagtggctccgcagatacctggagaacgggaaggagacgctgcagcgcgcggaccccccaaagacacacgtgacccaccaccccgtctctgaccatgaggccaccctgaggtgctgggccctgggcttctaccctgcggagatcacactgacctggcagcgggatggcgaggaccaaactcaggacaccgagcttgtggagaccaggccagcaggagatggaaccttccagaagtgggcagctgtggtggtgccttctggagaagagcagagatacacgtgccatgtgcagcacgaggggctgccggagcccctcaccctgagatgggagccatcttnccagnccaccatnnccatcgtgggcatcgttgctggcctggctgtcctggctgtcctagctgtcctaggagctgtggtggctgttgtgatgtgtaggaggaagagctcaggtggaaaaggagggagctgctctcaggctgcgtccagcaacagtgcccagggctctgatgagtctctcatcgcttgtaaagcctgagacagctgcctgtgtgggactgagatgcaggatttcttcacacctctcctttgtgacttcaagagcctctggcatctctttctgcaaaggcatctgaatgtgtctgcgttcctgttagcataatgtgaggaggtggagagacagcccacccccgtgtccaccgtgacccctgtccccacactgacctgtgttccctccccgatcatctttcctgttccagagaagtgggctggatgtctccatctctgtctcaacttcatggtgcactgagctgcaacttcttacttccctaatgaagttaagaacctgaatataaatttgttttctcaaatatttgctatgaagggttgatggattaattaaataagtcaattcctggaagttgagagagcaaataaagacctgagaaccttccaga

SEQ ID NO: 717777 - DNA, 488 bp, Homo sapiens
  misc_feature (49)..(49): n is a, c, g, or t
tttaaaatgaactgttacttagagaattactgtaatcggagcggaacgnttaacgctttttcaccccggcacaaagcacgccccttctgccttcctttcccagtcattcttcaggcgtgcgggaaaccgcggacaagcagagcacggggaccagcacgatcctcctgccaccactccagtctctgcaggtgccagcatagaagaaaaccacggtctcgcctccctctccgccactgcggtgcggtcccggggtggagccacggcgcgccccatcctgagaaccccacctggaggggagcagggacgcaggaagggcaccgttgggaggcatcactgggttcgctgaaggcacaatcgcgcgcgcacacacatacacagacacacatacacacacgcacgcacacacacacacacacacacagcgtcggtggcgcgggcgctggcgcgttacctgttctgccagccctggaggaggttggtgtatttgc

SEQ ID NO: 717778 - DNA, 1582 bp, Homo sapiens
  misc_feature (976)..(976): n is a, c, g, or t
  misc_feature (979)..(979): n is a, c, g, or t
aaaaaaaaaaaaacccaagtttcttttacaaagttgtgcggccgctcgcgatgaactagcgaggatggccgtcatggcgccccgaaccctcctcctgctgctctggggggcagtggccctgaccgagacctgggccggctcccactccatgaggtatttctacaccgccatgtcccggcccggccgcggggagccccgcttcatcgccgtgggctacgtggacgacacccagttcgtgaggttcgacagcgacgccgcgagtccgaggacggagccgcgggcgccatggatagagcaggaggggccggagtattgggaccgggagacacagatctgcaagaccaacacacagacttaccgagagaacctgcggatccgctccgctactacaaccagagcgaggccgggtctcacaccctccagaggatgtatggctgcgacgtggggccggacgggcgcctcctccgcgggtatgaccagtacgcctacgacggcaaggattacatcgccctgaacgaggacctgagctcctggaccgcggcggacacggcggctcagatcacccagcgcaagtgggaggcggcccgtgtggcggagcagctgagagcctacctggagggcctgtgcgtggagtggctccgcagatacctggagaacgggaaggagacgctgcagcgcgcggaccccccaaagacacacgtgacccaccaccccgtctctgaccatgaggccaccctgaggtgctgggccctgggcttctaccctgcggagatcacactgacctggcagcgggatggcgaggaccaaactcaggacaccgagcttgtggagaccaggccagcaggagatggaaccttccagaagtgggcagctgtggtggtgccttctggagaagagcagagatacacgtgccatgtgcagcacgaggggctgccggagcccctcaccctgagatgggagccatcttcccagcccnccntccccatcgtgggcatcgttgctggcctggctgtcctggctgtcctagctgtcctaggagctgtggtggctgttgtgatgtgtaggaggaagagctcaggtggaaaaggagggagctgctctcaggctgcgtccagcaacagtgcccagggctctgatgagtctctcatcgcttgtaaagcctgagacagctgcctgtgtgggactgagatgcaggatttcttcacacctctcctttgtgacttcaagagcctctggcatctctttctgcaaaggcatctgaatgtgtctgcgttcctgttagcataatgtgaggaggtggagagacagcccacccccgtgtccaccgtgacccctgtccccacactgacctgtgttccctccccgatcatctttcctgttccagagaagtgggctggatgtctccatctctgtctcaacttcatggtgcactgagctgcaacttcttacttccctaatgaagttaagaacctgaatataaatttgttttctcaaatatttgctatgaagggttgatggattaattaaataagtcaattcctggaagttgagagagcaaataaagacctgagaaccttccaga

SEQ ID NO: 717779 - DNA, 300 bp, Homo sapiens
cgcacttccccctcccctcacccgccgcggacttgacgccccttttcgatgggttacgcgcaggagcggccgttagagactatcgaccgacagcggaaacgcctggtcgagacgctgcacgcggactcgcaactgctgttggacgcgctgctgacgcggtacgtgctcaccgggccagagtacgaggcattggatgcactgcctgatgccgagcgcacagcgcgccagactactggtgctggtgcagctcacgggcaaagcctgcctggccgagctgctacactgtgcccagagcaccgc

SEQ ID NO: 717780 - DNA, 1399 bp, Homo sapiens
aaaaaaaaaaaaacccaagtttcttttacaaagttgtgcggccgctcgcgatgaactagcgaggatggccgtcatggcgccccgaaccctcctcctgctgctctggggggcagtggccctgaccgagacctgggccggctcccactccatgaggtatttctacaccgccatgtcccggcccggccgcggggagccccgcttcatcgccgtgggctacgtggacgacacccagttcgtgaggttcgacagcgacgccgcgagtccgaggacggagccgcgggcgccatggatagagcaggaggggccggagtattgggaccgggagacacagatctgcaagaccaacacacagacttaccgagagaacctgcggatccgctccgctactacaaccagagcgaggccgggtctcacaccctccagaggatgtatggctgcgacgtggggccggacgggcgcctcctccgcgggtatgaccagtacgcctacgacggcaaggattacatcgccctgaacgaggacctgagctcctggaccgcggcggacacggcggctcagatcacccagcgcaagtgggaggcggcccgtgtggcggagcagctgagagcctacctggagggcctgtgcgtggagtggctccgcagatacctggagaacgggaaggagacgctgcagcgcgcggaccccccaaagacacacgtgacccaccaccccgtctctgaccatgaggccaccctgaggtgctgggccctgggcttctaccctgcggagatcacactgacctggcagcgggatggcgaggaccaaactcaggacaccgagcttgtggagaccaggccagcaggagatggaaccttccagaagtgggcagctgtggtggtgccttctggagaagagcagagatacacgtgccatgtgcagcacgaggggctgccggagcccctcaccctgagatgggagccatcttcccagcccaccatccccatcgtgggcatcgttgctggcctggctgtcctggctgtcctagctgtcctaggagctgtggtggctgttgtgatgtgtaggaggaagagctcaggtggaaaaggagggagctgctctcaggctgcgtccagcaacagtgcccagggctctgatgtgtctctcacagcttgaaaagcctgagacagctgtcttgtgagggactgagatgcaggatttcttcacacctctcctttgtgacttcaagagcctctggcatctctttctgcaaaggcatctgaatgtgtctgcgttcctgttagcataatgtgaggaggtggagagacagcccacctttgtggcaattgggacccctggttccaacgccaatttggtttttccttccccaaatttttttttttcacaaagaggggcggtg

SEQ ID NO: 717781 - DNA, 457 bp, Homo sapiens
cctcggtaccaccaacattggctcgacccaccgggactcagtgtcgacgagagtaccgtcgaaatcccacaagacagcggcgaaaaaacggtcggcggtcgctgtgtgcgtctcacgtggcattgaaatagtttgcctccgggtgatggacgacgaaggcgtcggtggactggccaggatgaagctggaactcctctgacagttgtacaccgaatcctcgtcggatcgagtagtttcaccaccttgacgcgatcttcgaggttcggacaggtggcgtaaccgaaactgtaccggcagccacgagaggtttggtgatcgatggcgccaatgccaagggattcaccgtcaaggcggcaccggtttccgaccccatgagcatggtcccagtaagcgtcgtggactccggaaatgacgtcgagccaatgttgctggtggatactcaggaacagctatgaca

SEQ ID NO: 717782 - DNA, 1609 bp, Homo sapiens
aaaaaaaaaaaaacccaagtttcttttacaaagttgtgcggccgctcgcgatgaactagcgaggatggccgtcatggcgccccgaaccctcctcctgctgctctggggggcagtggccctgaccgagacctgggccggctcccactccatgaggtatttctacaccgccatgtcccggcccggccgcggggagccccgcttcatcgccgtgggctacgtggacgacacccagttcgtgaggttcgacagcgacgccgcgagtccgaggacggagccgcgggcgccatggatagagcaggaggggccggagtattgggaccgggagacacagatctgcaagaccaacacacagacttaccgagagaacctgcggatccgctccgctactacaaccagagcgaggccgggtctcacaccctccagaggatgtatggctgcgacgtggggccggacgggcgcctcctccgcgggtatgaccagtacgcctacgacggcaaggattacatcgccctgaacgaggacctgagctcctggaccgcggcggacacggcggctcagatcacccagcgcaagtgggaggcggcccgtgtggcggagcagctgagagcctacctggagggcctgtgcgtggagtggctccgcagatacctggagaacgggaaggagacgctgcagcgcgcggaccccccaaagacacacgtgacccaccaccccgtctctgaccatgaggccaccctgaggtgctgggccctgggcttctaccctgcggagatcacactgacctggcagcgggatggcgaggaccaaactcaggacaccgagcttgtggagaccaggccagcaggagatggaaccttccagaagtgggcagctgtggtggtgccttctggagaagagcagagatacacgtgccatgtgcagcacgaggggctgccggagcccctcaccctgagatgggagccagtcttcccagccctctatccccatcgtgggcatcgttgctggcctggctgtcctggctgtcctagctgtcctaggagctgtggtggctgttgtgtatgtgttaggtaggtagtagctctagggctattttcttcaaacaggtggataaaaggagggagctgctctcaggctgcgtccagcaacagtgcccagggctctgatgagtctctcatcgcttgtaaagcctgagacagctgcctgtgtgggactgagatgcaggatttcttcacacctctcctttgtgacttcaagagcctctggcatctctttctgcaaaggcatctgaatgtgtctgcgttcctgttagcataatgtgaggaggtggagagacagcccacccccgtgtccaccgtgacccctgtccccacactgacctgtgttccctccccgatcatctttcctgttccagagaagtgggctggatgtctccatctctgtctcaacttcatggtgcactgagctgcaacttcttacttccctaatgaagttaagaacctgaatataaatttgttttctcaaatatttgctatgaagggttgatggattaattaaataagtcaattcctggaagttgagagagcaaataaagacctgagaaccttccaga

SEQ ID NO: 717783 - DNA, 430 bp, Homo sapiens
  misc_feature (414)..(414): n is a, c, g, or t
cctcggtaccaccaacattggctcgacccaccgggactcagtgtcgacgagagtaccgtcgaaatcccacaagacagcggcgaaaaaacggtcggcggtcgctgtgtgcgtctcacgtggcattgaaatagtttgcctccgggtgatggacgacgaaggcgtcggtggactggccaggatgaagctggaactcctctgacagttgtacaccgaatcctcgtcggatcgagtagtttcaccaccttgacgcgatcttcgaggttcggacaggtggcgtaaccgaaactgtaccggcagccacgagaggtttggtgatcgatggcgccaatgccaagggattcaccgtcaaggcggcaccggtttccgaccccatgagcatggtcccagtaagcgtcgtggactccggaaatactnagccagtgtgtcgcag

SEQ ID NO: 717784 - DNA, 915 bp, Homo sapiens
tagagttggcgcgagtcattcaagaaaggaggctcgagcgatcagaactctgcatgggaaagttggagaaagatgaacatgcttccgatgattagacatgtaccaatacgctgtgtgtgcttccacagaggccgagtgagatcacgtgactggaagcatatccgatcggtattgtggacaagcaggtggcataagaagaactgtagaagatgagatgacaaagctcctccaacgatgggcagaatagtccacgtgtatgaaatctttacaagtgtcataacgagagtcgaggtgctttcatacacttcgcaagtggagcaacgcacttattagagcaaataacgaaaaacgattgttcatttcacaggcagtttggatagagacccgacgcttaaatctgagaaatcgatatagccactctaatgaccgattggatgcagtattcccagggaagctccttcggtgtgtagatgaacctaaagcagccaaaggacgtcctcgtagctccaaaacaagccaatgttcaggatttccagttctttcctccagcgtatattgtgaagttactggaaaaagaaattctgctttgacagaagaagacttttgggtacaaggtaccctcgaaaatgctgaggctgtctatatgcagcacaggccaacgtgtgactgtaacctggttacaacttgatgacgtctgaatccttagttgatcaacagttacagctagaagagaagcttctacagaggcattaccattggacctcacagaattacccagtacatcaagctaaggaagtgggccggaatacatgaagttccagcaaagcatgccaatcacaaaggtatgaatccgggttgacgtgagaccagacaaaacaattgcactcacgaggggtcaagaaacaaccgcaaacc

SEQ ID NO: 717785 - DNA, 1580 bp, Homo sapiens
  misc_feature (968)..(968): n is a, c, g, or t
  misc_feature (973)..(973): n is a, c, g, or t
  misc_feature (981)..(982): n is a, c, g, or t
aaaaaaaaaaaaacccaagtttcttttacaaagttgtgcggccgctcgcgatgaactagcgaggatggccgtcatggcgccccgaaccctcctcctgctgctctggggggcagtggccctgaccgagacctgggccggctcccactccatgaggtatttctacaccgccatgtcccggcccggccgcggggagccccgcttcatcgccgtgggctacgtggacgacacccagttcgtgaggttcgacagcgacgccgcgagtccgaggacggagccgcgggcgccatggatagagcaggaggggccggagtattgggaccgggagacacagatctgcaagaccaacacacagacttaccgagagaacctgcggatccgctccgctactacaaccagagcgaggccgggtctcacaccctccagaggatgtatggctgcgacgtggggccggacgggcgcctcctccgcgggtatgaccagtacgcctacgacggcaaggattacatcgccctgaacgaggacctgagctcctggaccgcggcggacacggcggctcagatcacccagcgcaagtgggaggcggcccgtgtggcggagcagctgagagcctacctggagggcctgtgcgtggagtggctccgcagatacctggagaacgggaaggagacgctgcagcgcgcggaccccccaaagacacacgtgacccaccaccccgtctctgaccatgaggccaccctgaggtgctgggccctgggcttctaccctgcggagatcacactgacctggcagcgggatggcgaggaccaaactcaggacaccgagcttgtggagaccaggccagcaggagatggaaccttccagaagtgggcagctgtggtggtgccttctggagaagagcagagatacacgtgccatgtgcagcacgaggggctgccggagcccctcaccctgagatgggagccatcttnccagnccaccatnnccatcgtgggcatcgttgctggcctggctgtcctggctgtcctagctgtcctaggagctgtggtggctgttgtgatgtgtaggaggaagagctcaggtggaaaaggagggagctgctctcaggctgcgtccagcaacagtgcccagggctctgatgagtctctcatcgcttgtaaagcctgagacagctgcctgtgggactgagatgcaggatttcttcacacctctcctttgtgacttcaagagcctctggcatctctttctgcaaaggcatctgaatgtgtctgcgttcctgttagcataatgtgaggaggtggagagacagcccacccccgtgtccaccgtgacccctgtccccacactgacctgtgttccctccccgatcatctttcctgttccagagaagtgggctggatgtctccatctctgtctcaacttcatggtgcactgagctgcaacttcttacttccctaatgaagttaagaacctgaatataaatttgttttctcaaatatttgctatgaagggttgatggattaattaaataagtcaattcctggaagttgagagagcaaataaagacctgagaaccttccaga

SEQ ID NO: 717786 - DNA, 328 bp, Homo sapiens
cctcggtaccaccaacattggctcgacccaccgggactcagtgtcgacgagagtaccgtcgaaatcccacaagacagcggcgaaaaaacggtcggcggtcgctgtgtgcgtctcacgtggcattgaaatagtttgcctccgggtgatggacgacgaaggcgtcggtggactggccaggatgaagctggaactcctctgacagttgtacaccgaatcctcgtcggattgatgattataaccatcttccacgcgatatccgtggttccaatagctaccgtgtacgacgacggcccagggacacacgagaaggccggctaattcggactca

SEQ ID NO: 717787 - DNA, 1586 bp, Homo sapiens
aaaaaaaaaaaaacccaagtttcttttacaaagttgtgcggccgctcgcgatgaactagcgaggatggccgtcatggcgccccgaaccctcctcctgctgctctggggggcagtggccctgaccgagacctgggccggctcccactccatgaggtatttctacaccgccatgtcccggcccggccgcggggagccccgcttcatcgccgtgggctacgtggacgacacccagttcgtgaggttcgacagcgacgccgcgagtccgaggacggagccgcgggcgccatggatagagcaggaggggccggagtattgggaccgggagacacagatctgcaagaccaacacacagacttaccgagagaacctgcggatccgctccgctactacaaccagagcgaggccgggtctcacaccctccagaggatgtatggctgcgacgtggggccggacgggcgcctcctccgcgggtatgaccagtacgcctacgacggcaaggattacatcgccctgaacgaggacctgagctcctggaccgcggcggacacggcggctcagatcacccagcgcaagtgggaggcggcccgtgtggcggagcagctgagagcctacctggagggcctgtgcgtggagtggctccgcagatacctggagaacgggaaggagacgctgcagcgcgcggaccccccaaagacacacgtgacccaccaccccgtctctgaccatgaggccaccctgaggtgctgggccctgggcttctaccctgcggagatcacactgacctggcagcgggatggcgaggaccaaactcaggacaccgagcttgtggagaccaggccagcaggagatggaaccttccagaagtgggcagctgtggtggtgccttctggagaagagcagagatacacgtgccatgtgcagcacgaggggctgccggagcccctcaccctgagatgggagccaaagccgtcttcccagcccaccatccccatcgtgggcatcgttgctggcctggctgtcctggctgtcctagctgtcctaggagctgtggtggctgttgtgatgtgtaggaggaagagctcaggtggaaaaggagggagctgctctcaggctgcgtccagcaacagtgcccagggctctgatgagtctctcatcgcttgtaaagcctgagacagctgcctgtgggactgagatgcaggatttcttcacacctctcctttgtgacttcaagagcctctggcatctctttctgcaaaggcatctgaatgtgtctgcgttcctgttagcataatgtgaggaggtggagagacagcccacccccgtgtccaccgtgacccctgtccccacactgacctgtgttccctccccgatcatctttcctgttccagagaagtgggctggatgtctccatctctgtctcaacttcatggtgcactgagctgcaacttcttacttccctaatgaagttaagaacctgaatataaatttgttttctcaaatatttgctatgaagggttgatggattaattaaataagtcaattcctggaagttgagagagcaaataaagacctgagaaccttccaga

SEQ ID NO: 717788 - DNA, 192 bp, Homo sapiens
tcgacttctgctctcacctcatcagctttgaccagtgtggccaaagtggtcagggtggctctgcctctgctgtagttttgcccctggccagtgattgctacaggttgtgattggccggagttgtggccatggcggttgtgcccatggtgctcagtgccatgggcttcacatgcggcggggaatcggcctcgt

SEQ ID NO: 717789 - DNA, 1653 bp, Homo sapiens
  misc_feature (1079)..(1079): n is a, c, g, or t
  misc_feature (1082)..(1082): n is a, c, g, or t
  misc_feature (1084)..(1087): n is a, c, g, or t
  misc_feature (1090)..(1091): n is a, c, g, or t
  misc_feature (1093)..(1094): n is a, c, g, or t
  misc_feature (1108)..(1108): n is a, c, g, or t
  misc_feature (1112)..(1112): n is a, c, g, or t
  misc_feature (1211)..(1211): n is a, c, g, or t
  misc_feature (1550)..(1553): n is a, c, g, or t
  misc_feature (1558)..(1558): n is a, c, g, or t
  misc_feature (1561)..(1561): n is a, c, g, or t
  misc_feature (1564)..(1564): n is a, c, g, or t
  misc_feature (1567)..(1567): n is a, c, g, or t
  misc_feature (1569)..(1569): n is a, c, g, or t
  misc_feature (1572)..(1575): n is a, c, g, or t
  misc_feature (1578)..(1578): n is a, c, g, or t
  misc_feature (1581)..(1581): n is a, c, g, or t
  misc_feature (1587)..(1587): n is a, c, g, or t
  misc_feature (1593)..(1593): n is a, c, g, or t
aaaaaaaaaaaaacccaagtttcttttacaaagttgtgcggccgctcgcgatgaactagcgaggatggccgtcatggcgccccgaaccctcctcctgctgctctggggggcagtggccctgaccgagacctgggccggctcccactccatgaggtatttctacaccgccatgtcccggcccggccgcggggagccccgcttcatcgccgtgggctacgtggacgacacccagttcgtgaggttcgacagcgacgccgcgagtccgaggacggagccgcgggcgccatggatagagcaggaggggccggagtattgggaccgggagacacagatctgcaagaccaacacacagacttaccgagagaacctgcggatccgctccgctactacaaccagagcgaggccgggtctcacaccctccagaggatgtatggctgcgacgtggggccggacgggcgcctcctccgcgggtatgaccagtacgcctacgacggcaaggattacatcgccctgaacgaggacctgagctcctggaccgcggcggacacggcggctcagatcacccagcgcaagtgggaggcggcccgtgtggcggagcagctgagagcctacctggagggcctgtgcgtggagtggctccgcagatacctggagaacgggaaggagacgctgcagcgcgcggaccccccaaagacacacgtgacccaccaccccgtctctgaccatgaggccaccctgaggtgctgggccctgggcttctaccctgcggagatcacactgacctggcagcgggatggcgaggaccaaactcaggacaccgagcttgtggagaccaggccagcaggagatggaaccttccagaagtgggcagctgtggtggtgccttctggagaagagcagagatacacgtgccatgtgcagcacgaggggctgccggagcccctcaccctgagatgggagccatcttcccagcccaccatccccatcgtgggcatcgttgctggcctggctgtcctttctctttggagctgtgatcactggagctgtggtcgctgctgtgatgtggacggaggaagtangtntnnnnttnntnnatatggatgggagntacnctcaggctgcaagcagtgacagtgcccagggctctgatatgtctctcacagcttgtaaagtgtgagacagctgccttgtgtgggactgagaggcaaganttgttcctgcccttccctttgtgacttgaagaaccctgactttgtttctgcaaaggcacctgcatgtgtctgtgttcgtgtaggcataatgtgaggaggtggggagaccaccccacccccatgtccaccatgaccctcttcccacgctgacctgtgctccctccccaatcatctttcctgttccagagaggtggggctgaggtgtctccatctctgtctcaacttcatggtgcactgagctgtaacttcttccttccctattaaaattagaacctgagtataaatttactttctcaaattctctgccatgagaggttgatgagttaattaaaggagaannnncctanaanttnagngncannnnaantgnaacacntgaaanaacacactatattacgggggccagaacgcttcccccccccctgggcgcacggtaaccccc

SEQ ID NO: 717790 - DNA, 800 bp, Homo sapiens
  misc_feature (453)..(453): n is a, c, g, or t
  misc_feature (547)..(547): n is a, c, g, or t
  misc_feature (704)..(704): n is a, c, g, or t
  misc_feature (709)..(709): n is a, c, g, or t
  misc_feature (711)..(711): n is a, c, g, or t
ggcttctttcccgagcttggaacttcgttatccgcgatgcgtttcctggcagctacattcctgctcctggcgctcagcaccgctgcccaggccgaaccggtgcagttcaaggactgcggttctgtggatggagttataaaggaagtgaatgtgagcccatgccccacaccaaccctgccagctgagcaaaggacagtccttacagcgtcaatgtccaccttcaccagcaatattcagtctaaaagcagcaaggcccgtggctgcatggcgatcctgatggggcgtcccagttccctttcccattcctgagcctgatggttgtaacgcggtggaattaactgccctatccaaaaaagacaagacctatagctacctgaataaaactaccagtgacaacagcgaataatccctctataacaactggtggtgggacgtggcaacttcaggatgacncaaaagccaaagtctcttctgctggggaaatcccagtacagatcgttcctcatctctaagtgcctcattgagctccggtgcatctggccaatgnagctctgctgagactcttgacagcgacctccagctctgctgcttcaacaacagtgacttgctctccaatggtatccagtgattcgtcgaagaggaggtgctctgtagcagaaactgagctccgggtggctggttctcagtggttgtctcatgtctcntttcngnctaggtggtttcttcatgcagcacttggttgcgatgttccttttttaccccttctttggccctttcccctggatttctgggttttacct

SEQ ID NO: 717791 - DNA, 178 bp, Homo sapiens
gcgcaagtaggtctacaagacgctacttcccctatcatagaagagcttatcaccttcatgatcagcctcataatccattttcctatctgcttcctagtcctgtatgcccttttcctaacatacaacaaacttactatacttacacctcagaggttcaggaattagaaccgtcttgact

SEQ ID NO: 717792 - DNA, 182 bp, Homo sapiens
caggatccttggaatcgtggtgctgctacaaagggattctttgaaggtttgggtccagcagaacctagggtctgcctgttaggctgtagtgattactttgggtaggtggttttatattgataattgttgtgatgaaatttgatggcccctatagatagaggagacacctagctagggtgtaa

SEQ ID NO: 717793 - DNA, 880 bp, Homo sapiens
tgttttgttaattttttataaagtgagggagtaggattttaattaaggcattacatcctcaagagttatcaccaacccctcagtataaaaaattttcaagttatattcagcatatacactggggtggtgctatcatttacaactcaggtgcctcaacagtggattacaggtgaagacacacaccaagggttccccctaagtggtgatgtgcatatgtgtcattttaacccagcttctcagaatcttacacactttttcagagggctttgtgcacacgtgcaacactatgtggcagtgcacagaggtggttccataaggtctccacaccttcacgtgcacacttcacgaggggtgcttggagtattccagaaagtgtttattgtgggtagaacatattacaaatttacacacctgtgtggtgcaacaaaaataagggtggcaatctatacacgtgtgcgctcttacactcacacccaaataccactgtgcaacagtgggtatacggggtccccacacacgggggcgctacacactacaggcactatatagggagggtggtccccacctctctacagagtttcccctataaaaaaagatagtgcactccaccattatttgtgggtataacgtctcaccgaagacactgatatttacaatcaacagtgtggggagttggccacccagccggggttaaaactttccagggttgtgggcgtgctactttcagacccaaaaaaatagtgtgtccgcttttatttacccagagaacaaaggggcctatattttcccaaaaaacaataatatttagcggatagctataaggatagggtatcttttatccttgggggagggtttaaaagaacagatttaccaccccaac

SEQ ID NO: 717794 - DNA, 202 bp, Homo sapiens
cagacacatacgcacacacgtgcacacatgtacacacggatacacacacacacacacacacacactgcatatctgagcgcgcccctcgcactgggtctcgccttgcaccttcttcaggattttatatgtgaagagatttttatatagatttttttcctttttttcggaggccctttattcttataaaaaacccaccccaagg

SEQ ID NO: 717795 - DNA, 176 bp, Homo sapiens
tggtatcctgctacacaacacacacacacacacacacacacacacaaaccctccccgccgcaccctctgttcacttgctatctccaccctgtataccccaaacaatgtggtgttgtaagtaagatttcataatcacataaactagcaaagatccctaagaggaaagtgtagaaagt

SEQ ID NO: 717796 - DNA, 163 bp, Homo sapiens
gaagcgtgtactgggagatggtcatattcaccgtgcaaaatctgctggaatcctttgctggtctccttcagcgagtaccagcttacccatatgacctgtgaagcactcagcaacctggaatggctgagacaatgaaatgctgtattttcctgtgcacggtgac

SEQ ID NO: 717797 - DNA, 114 bp, Homo sapiens
cctgacggggttactacttgactaactgtgtgactgacaatgactggccctaagactagacggacgacacctgctacggtgtaacggacgacacgactggttacggtctaccgg

SEQ ID NO: 717798 - DNA, 135 bp, Homo sapiens
gtcaggcaggcagatcatctaggtcgggagacgagaccactgatcacatggtgaaaaccgtgtctactacaaaattagcaggcgtggtgggcctgcctgtaaatccagctactccagaaagggtgaggggggaga

SEQ ID NO: 717799 - DNA, 618 bp, Homo sapiens
tttactagaatggaatgataggcgtcataaacacgtcatatgccactatagagtgtgcacagacaccttcaataaagtgacattcatttgagatgttacaatacagttatgcatgtgcttaataccacaggatgttaaggggtaagccatccaggatctccatgggaaagttggagcccagatatatttaggatttttcacttagaacacaagacaataaactgttgatttttacaaatggtatataaatccagagattaaacatgtacattattataataacaacaacttgctaaaaaacaacaattttcaaactaaatggaagcagatccctctgctgtatcctgaagtccatgatcatctcctttgtatggttgacattgagtgtgaggttattttcctgacaccacactccgagggccctcatctcctccctgtaggccgtctcgtcgaagttggtaatcagggctaccactgtagtgccgtctgcaaacttgatgattgagttggaagcgtggatggccacgcagtcaggggttaacaggcagtacaggagagggctagaaacgcacccttgtggggccccagtgttgaagatcagcagggtggcccgtcaga

SEQ ID NO: 717800 - DNA, 133 bp, Homo sapiens
cgcacgcggtgaagccgaagcgggttatccactggtgatcaatcacgccttgccgcattacctcactctgctggatcaggggttagatcctgaactggcattgctcgataccttgctcctactgatggcgatc

SEQ ID NO: 717801 - DNA, 1369 bp, Homo sapiens
taatgtgcaaaatggaaggattttattgtggtgaataccagtttaaaaaaccattattttacattctgctagcccacccaggaaacctgagttcagatacgtgctgattcacattatttcatttggaacttaatgtggaggatggtttctgacggcactttccaccagtaatcagcaagtgatttggaatttagataggttcccctttaaactctcgtggtatgtgaatctcccattactacagttagggaaatagttctctctcacgtggacactagacatattgacagaaagcttgacaaacttcctccagttcatccctccacaatcttttgtggcgtgtcttcacactcgtgacctatcccttcacattcattcgcgtgggaaattcattcctcatatctattcacaacatttcgttatctcccgggtggaatcttctctcgaagggcaagagatatgtgtcgtgctctgtgtgttcccccggtgaaaaagacaattatgtggaccagagcccccagtttatacgccccaaagtctcccattttcgtggctccttatttgaaacagtgcgtatatttcaatgtctataccagaaatataacggtctacaaaacattactacacataggggcattctccggagaaaaccctcttaaaatattgctggcgtctttccctttgaccatttccattaaacactaaacatgtgtcaacactaccttagtcgcgtgtgttggtttctctgggtgaaaaacccacgccccattttttaacatcttacacaaagcatcttctggtatattatgcgcccatcgggttcctttaaaggctcccatcatacattactaccccactggtacacgtctccccgtgggaaaacttttacttattaaacgcgacaaggtctatacatcttcttcattcggcaacactttcaacttgcccagacaaacagggttccaaatacaacattttgtgggcacaaaaaacgccccacgcaagatttataaccaaatgccccaagataatgtgacgcccaaaacatttcaattcttgcacccctttctatcgttgaactaactcatctcacctcgggaacattgttcaacaattccaaggaaggcataagtgggaaaaacaaagtgggccacacgtatacaaggacgccccatagggggaataaagaaccaaaacatgtaaacagggggtgaatacgccccccctcacagaacaaaccgacgagacagcaagaccaggccaccacaacggtggagctcccacaagcaagacacgcaccagaaacacacgcccacacgcacacatatacgcaacgaacgcgtcaaaaatcagacaataacgcacagga

SEQ ID NO: 717802 - DNA, 446 bp, Homo sapiens
ggtcggggctctgaggctccggcctgacctctccaccggctcgacagcaacgtctcaggatgccactagtcacaaaaggccgaccaggaggaggaaaccacaggcggagtccggggcaagcagcaccgcatcccagcctcaggactgcccgagggtgttggcgagagtctctgcaaaagtcgtgccgccgtgatctcgaggacaggtcggcctgcgtgttcctgggctgctctctcagacgagggtggttctcgtggagagcagaacctctttgctcctctggtaggcatttgaaaacgtgttttgggtcaggcataggcccccaaccaaacgggtcccaggtgttctttgattttccttggcattgagggaaaggtcactcgttccccccttccactggagcatgcctggacaccactgttttttcgccgtcgccccatatgcct

SEQ ID NO: 717803 - DNA, 119 bp, Homo sapiens
ttccacagcaagacttcaagacaaagtccacatgtgcacccgaggaccacctagaacatgctttctagtcacacctctttccacctccttatgaattctcatggctatccctagtgcca

SEQ ID NO: 717804 - DNA, 919 bp, Homo sapiens
tgttacgctgagtgatggccaagtttatttactctggacaggaatgtaaatgtcttactggaacatgacaagtttcagcttgatactcatcttctatatattaaaccacaaaaatgcacaatataacaagacaaacttatgataccagtactatagtacatatgtagatcaggtgttctccgtctcagtactacaatacaacattacttacacatgcacaccctaggacccatcccacagacaaagtccactagctaccattatcagtaaaagagtcgagagtctcaaattactgctccataggtatggcagtgcacacccctagtagtaccataggacgaacaggtataatcacagactctagatccacagtagtttgtctctagaagacaaacacagatacctcgtgaaagcttcaccaatagaatgaatgtgacctaaccgtacaaacatcaacatggctcccaggaccagacaacacaagaattacaacaccctgtgactaccaccaagaacattgttgacgcccatcaagacacgggatataactcggcgtacaacgttacagagaacttctgccaacctccggagagaggtaggcacacgaaactcgtatccaccacaagagagaccaccaaatgatccctttttcaccacaagatcctgtatctaaaccgccgcttagcgcccacgcaggtacttacaccagggaacagtaggatgcacatttataaaccaccaacaagagtaactgttatcaccgcaacccctggggttatccttaatgaaccacacgtgtatagtattcaagggacaactcaacacgtcaggggatactacaaagcactgtgtacgcgcttagaacccaaacttatataccctataccgttggcccacgcgacacccacgacgcactctg

SEQ ID NO: 717805 - DNA, 698 bp, Homo sapiens
  misc_feature (310)..(310): n is a, c, g, or t
gcaatttttaattctcggttaatatcaacagcaaaagcctagtgcatatgggagatgtgcaacctccctgaaaatcttctctgtatctggagtacttcaggggtgagcctctggccccagagcctttgccacagtgctcccaccagcccccacctcataccgtctgtattgcagagcactcatctacaggtccccactgctgccattcttatactacacttctgcgacttgggccagtcttatgattactttgcgctataagtcctaccattcgggcaggaaagtacacgtgttgcacaagaagtgctgntgattcacttcgagccccttccactcagaggccacaccagcgatgcagtgaaggggcacagctctcttcagttctcctgactgtgatctcactggggtagaattcccctgagagaattccctcactcacggtccctttgccagagtcagttcatcaggtctgatgtgagcaatttacacacttgtctcagaaagtccctcagggtatgtagaggactgcagggtggcatcgtgcgactcagctttactgcgcatcctgcagtgggggtgagcggcacaggctgagaactgctcttgggtgtggcccggtgtcacgtgcagtctccgacgagagaatagaaatatactcaatagggaaacaatataacaataactcaaaaatctactga

SEQ ID NO: 717806 - DNA, 361 bp, Homo sapiens
ctttgggtgccggggctgcgggttttgggtgcaacctctccggcacccgactgcattaaccaaagttttcccctaatggtatcatcccccagtgcccaatcatttatttatgttttgccaggggccagggctcggggtgggggagggcttgttttatttacatacaacccagcatgctaatggggtacccccttgacttcatttgtacttagttatgttggtcagtgttaaaggatccattttgggttcatctttcttgagtggagtattggttttaagtaaaaaaagttaaatgatcccttaatttgctaattggttgcctatgaaatcccattttttgttattaaagctttttccccta

SEQ ID NO: 717807 - DNA, 166 bp, Homo sapiens
aatcatagaatcccaggagaatgtggcagagatgaagatgggttttaggtccaggatagctagagtagtggcgtaagaatcgagtaagtcacaagcactctcaggaaggttgaggcggcagagatgcaagatcgcagcacttataccacgcgggcaacggaacctc

SEQ ID NO: 717808 - DNA, 207 bp, Homo sapiens
tggccaaagcgatacccaaatgctgaaatactagtgaggggtcgggtgtggtgacgcttgcctgaaatcccagcactttggaggccaaggcggacggatcacttaaggccagcatggtgaaagccatccctactaaaaatataaaaattagcagggcgtggaggtgcatgcctgtagtcccagttacttgggtactacgctttggca

SEQ ID NO: 717809 - DNA, 252 bp, Homo sapiens
gtctcctcagcctcttgagtagtagtcccccaactcatccttttggttcattctcctatatacgttttcatttaaaagatatacatttattcattcattcagggagtatgggagtgtctggtcatataccaggcacagtttcaagggttggaggtgtagcagtgaataaaatagttttctctctgtagttaaggttctagtagaggaaagcagataaatgaataaatctgaagaaaaatagcaggtgaaggg

SEQ ID NO: 717810 - DNA, 1215 bp, Homo sapiens
gcaacctcgtggacagcaatctgcagaagaagagagcttcaaaatggagccaactatgtaagcgaacatgcacgatgaagtaaaatgagaggggcctccgtcaggaaagaagacagctggtcctacaggagaagaatcgttgaaccagcttctccctaggagagatggggtggtcgctctgcagagaaccccgcttcaggatccggtgaggaagaccatgaaagaacaagctagaacgactcctgagaaaacggatggatggctggcagtaccagcgaagcacctcagagcccctcggaagaagagggcccgtggcagatcctcactgttgaagagtgaggatggcgatttaagaagtagaatggaggttaatagtgaagattccatgagggagtgaaagacctatggtcttgatggcaggacatgggactatagttaccaggctagaagcatgctgtctgcacacgtccctgtccaggacataatgtgcgatgcaattcgtggaggagctatgcaaatggccagacaatcgcagggaaatgtggataatcaggagatatgcggttaatgcagtgggcaggcgagagcagatagaacagaaatactgacaatgtgaactgataggagcactcagcttgagctagaaatataggagagcgcccagcatggctgacagtccatcgggggctcaccccggatgcatccaaatggtcaccaggttgatgtgaagccaccgacacgtactggccatttacgtggcaagaaattgaaagcaaaagatgtggcatataagccccgttgaatggaaaaagacatggacctaatatgacggcgaattgccatgcaatactaaacaactggaaaaaacaatgaacaacacaaacggcaatgagtgacgaacagggatccaagagaaacaacgagaacagtatagtgacgggaaacaaaacacaaaatatacgggggtacgagtccccatgaatgcacaaagcaacggaggaacagggcagctaacacacaacagaaaacaggagaaagacgcaggaggccacaacagatgaaaagagtaggagcaatagcacacaaacaaagcgacagagaaagaagacaacagtagatccagagacagcaggagacgcaaaaacaaaagagaggacgagctagcgagcaaaggaggggacacgagcgcttcacgagagtagttagatccgaaac

SEQ ID NO: 717811 - DNA, 274 bp, Homo sapiens
aattttttttcccccttttggggtccccccccccggggtctaaaggggaaaaaaaaatggggccccaataaagggcccaatttttttttcccccggcccccggttaaaggggggggccccgggggtttaaaaattttttttgggggggttcccccccccccccaagggtttaggggggggttccccccaggggggttttttggggggccccccctttgggttcctttttttttttttgggggataaaaaacccccgtttttttgggggccccga

SEQ ID NO: 717812 - DNA, 178 bp, Homo sapiens
ccgggtaatttttgtattgagcggagacggggtttcacgtgtgttagccaggatgatctctatctcctgacctcggtgatccggcgggcgtggccttccaaagtgctgggattacaggcatgagccacccggtgcccggccgagaaggaaacactaactcattctatgaggacagcat

SEQ ID NO: 717813 - DNA, 263 bp, Homo sapiens
  misc_feature (11)..(11): n is a, c, g, or t
accaacttgtnattaatttttttaatggtaaagggaaatatgtactttttctcacttaatttttctttatttattccccactaaagaaacggtttcctaaggtctgagctgtttcccagggtgggctagagtgggtgggcaggagctgccgacattttgtgtactatacctaaccctcctcgccttctccgtttgcctcaccacccggctccagggccctgaggggagttgtattaaataaaattgatttttactcttcagta

SEQ ID NO: 717814 - DNA, 525 bp, Homo sapiens
ttgagtagaataacagaggaaggggtgaagcacttgtctcatccccagtctggaacttgaaacttcttttctcttcactttgccctaccccacaaataatatgtacaaagtgtctgtatccattgagcactacctccctattccttccacctccccagcccctggcaaccactgttctacgttctgtctctacgaatttgacttctctaggtccctcatacaagtggaaaagtacagcatgtctttttgtgaccggcttatttcacttagcataatgtcctcaaggttcatccatgctgtagcatgtgtcagaattgccttcttgcttgaggctgctgatacctcctcatgtgtatataccgtattttgtttaatcactcatctgttggtggacacttgggttgcctccacctcttggctgttgcaaataacgctgtgaacatggatatacagatatctgaggccaggccaggcgttcacacctgtaatcccaatacgttgggaggccgaggcgggcagatcatc

SEQ ID NO: 717815 - DNA, 116 bp, Homo sapiens
ataccgatttctctctgtggggggtcacatagaggattcagaagtgcaggacatggagaggcagatggagcccagaagcacagatgtacacccaggatgagcatccgcaagacaga

SEQ ID NO: 717816 - DNA, 167 bp, Homo sapiens
ggggcccccccctgggcccccccccccccccggtttgggccccctttttttgggggggtttttgtgggaaaattttgggcccccctttgggttttccctgggggggggggttggttcccctttttcccgggttttttttggcgggttttttaaaaggggggttttta

SEQ ID NO: 717817 - DNA, 1063 bp, Homo sapiens
aaaaaaaaaaaaacccaagtttcttttacaaagttgtgcggccgctcgcgatgaactagcgaggatggccgtcatggcgccccgaaccctcctcctgctgctctggggggcagtggccctgaccgagacctgggccggctcccactccatgaggtatttctacaccgccatgtcccggcccggccgcggggagccccgcttcatcgccgtgggctacgtggacgacacccagttcgtgaggttcgacagcgacgccgcgagtccgaggacggagccgcgggcgccatggatagagcaggaggggccggagtattgggaccgggagacacagatctgcaagaccaacacacagacttaccgagagaacctgcggatccgctccgctactacaaccagagcgaggccgggtctcacaccctccagaggatgtatggctgcgacgtggggccggacgggcgcctcctccgcgggtatgaccagtacgcctacgacggcaaggattacatcgccctgaacgaggacctgagctcctggaccgcggcggacacggcggctcagatcacccagcgcaagtgggaggcggcccgtgtggcggagcagctgagagcctacctggagggcctgtgcgtggagtggctccgcagatacctggagaacgggaaggagacgctgcagcgcgcggaccccccaaagacacacgtgacccaccaccccgtctctgaccatgaggccaccctgaggtgctgggccctgggcttctaccctgcggagatcacactgacctggcagcgggatggcgaggaccaaactcaggacaccgagcttgtggagaccaggccagcaggagatggaaccttccagaagtgggcagctgtggtggtgccttctggagaagagcagagatacacgtgccatgtgcagcacgaggggctgccggagcccctcaccctgagatgggagccatcttcccagcccaccatccaaagattgtgaagttgtggatcttgagatgggaagattaccctggtgggcctgatgtaatcacaatggtccttataagaag

SEQ ID NO: 717818 - DNA, 159 bp, Homo sapiens
gggtcgatctagaggtcccagcgggaacaatcacttgaggtagattcaagacaagccggggtaacacagtgagaccccacctctaccaaaaaaatttaaaaattaggcaggcatggtagcatgtgtctgtagtcctagctgctggggaggctgaggtgg

SEQ ID NO: 717819 - DNA, 150 bp, Homo sapiens
  misc_feature (21)..(21): n is a, c, g, or t
cttacgactagcccgacaggnctagcgaggggttatggaacaattatggcctgtgccacaagcggcagtgccaaccatattttagcaaaagctaggagtagcttctatgctaaaacacatcaacccccaacactgtcgggctagtcgggg

SEQ ID NO: 717820 - DNA, 1440 bp, Homo sapiens
  misc_feature (977)..(977): n is a, c, g, or t
  misc_feature (980)..(980): n is a, c, g, or t
aaaaaaaaaaaaacccaagtttcttttacaaagttgtgcggccgctcgcgatgaactagcgaggatggccgtcatggcgccccgaaccctcctcctgctgctctggggggcagtggccctgaccgagacctgggccggctcccactccatgaggtatttctacaccgccatgtcccggcccggccgcggggagccccgcttcatcgccgtgggctacgtggacgacacccagttcgtgaggttcgacagcgacgccgcgagtccgaggacggagccgcgggcgccatggatagagcaggaggggccggagtattgggaccgggagacacagatctgcaagaccaacacacagacttaccgagagaacctgcggatccgctccgctactacaaccagagcgaggccgggtctcacaccctccagaggatgtatggctgcgacgtggggccggacgggcgcctcctccgcgggtatgaccagtacgcctacgacggcaaggattacatcgccctgaacgaggacctgagctcctggaccgcggcggacacggcggctcagatcacccagcgcaagtgggaggcggcccgtgtggcggagcagctgagagcctacctggagggcctgtgcgtggagtggctccgcagatacctggagaacgggaaggagacgctgcagcgcgcggaccccccaaagacacacgtgacccaccaccccgtctctgaccatgaggccaccctgaggtgctgggccctgggcttctaccctgcggagatcacactgacctggcagcgggatggcgaggaccaaactcaggacaccgagcttgtggagaccagaccagcaggagatagaaccttccaagaagtgggcagctgtggtggtgccttctggagaagagcagagatacacgtgccatgtgcagcacgaggggctgccggagcccctcaccctgagatgggagccatcttcccagcccnccntccccatcgtgggcatcgttgctggcctggctgtcctggctgtcctagctgtcctaggagctgtggtggctgttgtgatgtgtaggaggaagagctcaggtggaaaaggagggagctgctctcaggctgcgtccagcaacagtgcccagggctctgatgagtctctcatcgcttgtaaagcctgagacagctgcctgtgtgggactgagatgcaggatttcttcacacctctcctttgtgacttcaagagcctctggcatctctttctgcaaaggcatctgaatgtgtctgcgttcctgttagcataatgtgaggaggtggagagacagcccacccccgtgtccaccgtgacccctgtccccacactgacctgtgttccctccccgatcatctttcctgttcccaagacagcccacccccctgtccacaggggacctctagatcaccacagcaacactcc

SEQ ID NO: 717821 - DNA, 242 bp, Homo sapiens
ccctctcttgtgttgtgtgtgtgtgtgtgcgagactctctctctctcccccaccccctctctctctctctcccccccccccccccccccccctctctcacactagcgcactctctctctctccccctctcgcgctctctctatctagagtgtgtccccccccgcgcgcgagagagagagagagagagagagagagagagagagagagagagagagagagagagagagagagagcggcccgag

SEQ ID NO: 717822 - DNA, 1570 bp, Homo sapiens
aaaaaaaaaaaaacccaagtttcttttacaaagttgtgcggccgctcgcgatgaactagcgaggatggccgtcatggcgccccgaaccctcctcctgctgctctggggggcagtggccctgaccgagacctgggccggctcccactccatgaggtatttctacaccgccatgtcccggcccggccgcggggagccccgcttcatcgccgtgggctacgtggacgacacccagttcgtgaggttcgacagcgacgccgcgagtccgaggacggagccgcgggcgccatggatagagcaggaggggccggagtattgggaccgggagacacagatctgcaagaccaacacacagacttaccgagagaacctgcggatccgctccgctactacaaccagagcgaggccgggtctcacaccctccagaggatgtatggctgcgacgtggggccggacgggcgcctcctccgcgggtatgaccagtacgcctacgacggcaaggattacatcgccctgaacgaggacctgagctcctggaccgcggcggacacggcggctcagatcacccagcgcaagtgggaggcggcccgtgtggcggagcagctgagagcctacctggagggcctgtgcgtggagtggctccgcagatacctggagaacgggaaggagacgctgcagcgcgcggaccccccaaagacacacgccatctctgaccatgaggtcaccctgaggtgctgggccctgggcttctaccctgcggagatcacactgacctggcagcgggatggcgaggaccaaactcaggacaccgagcttgtggagaccaggccagcaggagatggaaccttccagaagtgggcagctgtggtggtgccttctggagaagagcagagatacacgtgccatgtgcagcacgaggggctgccggagcccctcaccctgagatgggagccatcttcccagcccaccatccccatcgtgggcatcgttgctggcctggctgtcctggctgtcctagctgtcctaggagctgtggtggctgttgtgatgtgtaggaggaagagctcaggtggaaaaggagggagctgctctcaggctgcgtccagcaacagtgcccagggctctgatgagtctctcatcgcttgtaaagcctgagacagctgcctgtgtgggactgagatgcaggatttcttcacacctctcctttgtgacttcaagagcctctggcatctctttctgcaaaggcatctgaatgtgtctgcgttcctgttagcataatgtgaggaggtggagagacagcccacccccgtgtccaccgtgacccctgtccccacactgacctgtgttccctccccgatcatctttcctgttccagagaagtgggctggatgtctccatctctgtctcaacttcatggtgcactgagctgcaacttcttacttccctaatgaagttaagaacctgaatataaatttgttttctcaaatatttgctatgaagggttgatggattaattaaataagtcaattcctggaagttgagagagcaaataaagacctgagaaccttccaga

SEQ ID NO: 717823 - DNA, 1522 bp, Homo sapiens
aaaaaaaaaaaaacccaagtttcttttacaaagttgtgcggccgctcgcgatgaactagcgaggatggccgtcatggcgccccgaaccctcctcctgctgctctggggggcagtggccctgaccgagacctgggccggctcccactccatgaggtatttctacaccgccatgtcccggcccggccgcggggagccccgcttcatcgccgtgggctacgtggacgacacccagttcgtgaggttcgacagcgacgccgcgagtccgaggacggagccgcgggcgccatggatagagcaggaggggccggagtattgggaccgggagacacagatctgcaagaccaacacacagacttaccgagagaacctgcggatccgctccgctactacaaccagagcgaggccgggtctcacaccctccagaggatgtatggctgcgacgtggggccggacgggcgcctcctccgcgggtatgaccagtacgcctacgacggcaaggattacatcgccctgaacgaggacctgagctcctggaccgcggcggacacggcggctcagatcacccagcgcaagtgggaggcggcccgtgtggcggagcagctgagagcctacctggagggcctgtgcgtggagtggctccgcagatacctggagaacgggaaggagacgctgcagcgcgcggaccccccaaagacacacgtgacccaccaccccgtctctgaccatgaggccaccctgaggtgctgggccctgggcttctaccctgcggagatcacactgacctggcagcgggatggggaggaccagacccaggacacggagctcgtggagaccaggcctgcaggggatggaaccttagaagtgggcagctgtggtggtgccttctggagaagagcagagatacacgtgccatgtgcagcacgaggggctgccggagcccctcaccctgagatgggagccatcttcccagcccaccatccccatcgtgggcatcgttgctggcctggctgtcctggctgtcctagctgtcctaggagctgtggtggctgttgtgatgtgtaggaggaagagctcaggtggagtctctcatcgcttgtaaagcctgagacagctgcctgtgggactgagatgcaggatttcttcacacctctcctttgtgacttcaagagcctctggcatctctttctgcaaaggcatctgaatgtgtctgcgttcctgttagcataatgtgaggaggtggagagacagcccacccccgtgtccaccgtgacccctgtccccacactgacctgtgttccctccccgatcatctttcctgttccagagaagtgggctggatgtctccatctctgtctcaacttcatggtgcactgagctgcaacttcttacttccctaatgaagttaagaacctgaatataaatttgttttctcaaatatttgctatgaagggttgatggattaattaaataagtcaattcctggaagttgagagagcaaataaagacctgagaaccttccaga

SEQ ID NO: 717824 - DNA, 1575 bp, Homo sapiens
  misc_feature (1133)..(1133): n is a, c, g, or t
  misc_feature (1472)..(1475): n is a, c, g, or t
  misc_feature (1480)..(1480): n is a, c, g, or t
  misc_feature (1483)..(1483): n is a, c, g, or t
  misc_feature (1486)..(1486): n is a, c, g, or t
  misc_feature (1489)..(1489): n is a, c, g, or t
  misc_feature (1491)..(1491): n is a, c, g, or t
  misc_feature (1494)..(1497): n is a, c, g, or t
  misc_feature (1500)..(1500): n is a, c, g, or t
  misc_feature (1503)..(1503): n is a, c, g, or t
  misc_feature (1509)..(1509): n is a, c, g, or t
  misc_feature (1515)..(1515): n is a, c, g, or t
aaaaaaaaaaaaacccaagtttcttttacaaagttgtgcggccgctcgcgatgaactagcgaggatggccgtcatggcgccccgaaccctcctcctgctgctctggggggcagtggccctgaccgagacctgggccggctcccactccatgaggtatttctacaccgccatgtcccggcccggccgcggggagccccgcttcatcgccgtgggctacgtggacgacacccagttcgtgaggttcgacagcgacgccgcgagtccgaggacggagccgcgggcgccatggatagagcaggaggggccggagtattgggaccgggagacacagatctgcaagaccaacacacagacttaccgagagaacctgcggatccgctccgctactacaaccagagcgaggccgggtctcacaccctccagaggatgtatggctgcgacgtggggccggacgggcgcctcctccgcgggtatgaccagtacgcctacgacggcaaggattacatcgccctgaacgaggacctgagctcctggaccgcggcggacacggcggctcagatcacccagcgcaagtgggaggcggcccgtgtggcggagcagctgagagcctacctggagggcctgtgcgtggagtggctccgcagatacctggagaacgggaaggagacgctgcagcgcgcggaccccccaaagacacacgtgacccaccaccccgtctctgaccatgaggccaccctgaggtgctgggccctgggcttctaccctgcggagatcacactgacctggcagcgggatggggaggaccagacccaggacacggagctcgtggagaccaggcctgcaggggatggaaccttccagaagtgggcggctgtggtggtgccttctggacaggagcagagatacacctgccatgtgcagcatgagggtctgcccaagcccctcaccctgagatgggagccagtcttcccagccacacaatcccaatcgtgggcatcattgctggcctagttctctttggagctgtgatcactggagctgtggtcgctgctgtgatgtggacggaggaagtatgtctctcacagcttgtaaagtgtgagacagctgccttgtgtgggactgagaggcaaganttgttcctgcccttccctttgtgacttgaagaaccctgactttgtttctgcaaaggcacctgcatgtgtctgtgttcgtgtaggcataatgtgaggaggtggggagaccaccccacccccatgtccaccatgaccctcttcccacgctgacctgtgctccctccccaatcatctttcctgttccagagaggtggggctgaggtgtctccatctctgtctcaacttcatggtgcactgagctgtaacttcttccttccctattaaaattagaacctgagtataaatttactttctcaaattctctgccatgagaggttgatgagttaattaaaggagaannnncctanaanttnagngncannnnaantgnaacacntgaaanaacacactatattacgggggccagaacgcttcccccccccctgggcgcacggtaaccccc

SEQ ID NO: 717825 - DNA, 1317 bp, Homo sapiens
aaaaaaaaaaaaacccaagtttcttttacaaagttgtgcggccgctcgcgatgaactagcgaggatggccgtcatggcgccccgaaccctcctcctgctgctctggggggcagtggccctgaccgagacctgggccggctcccactccatgaggtatttctacaccgccatgtcccggcccggccgcggggagccccgcttcatcgccgtgggctacgtggacgacacccagttcgtgaggttcgacagcgacgccgcgagtccgaggacggagccgcgggcgccatggatagagcaggaggggccggagtattgggaccgggagacacagatctgcaagaccaacacacagacttaccgagagaacctgcggatccgctccgctactacaaccagagcgaggccgggtctcacaccctccagaggatgtatggctgcgacgtggggccggacgggcgcctcctccgcgggtatgaccagtacgcctacgacggcaaggattacatcgccctgaacgaggacctgagctcctggaccgcggcggacacggcggctcagatcacccagcgcaagtgggaggcggcccgtgtggcggagcagctgagagcctacctggagggcctgtgcgtggagtggctccgcagatacctggagaacgggaaggagacgctgcagcgcgcggaccccccaaagacacacgtcttcccagcccaccatccccatcgtgggcatcgttgctggcctggctgtcctagcagttgtggtcatcggagctgtggtcgctactgtgatgtgtaggaggaagagctcaggtggaaaaggagggagctgctctcaggctgcgtccagcaacagtgcccagggctctgatgtgtctctcacagcttgaaaagcctgagacagctgtcttgtgagggactgagatgcaggatttcttcacacctctcctttgtgacttcaagagcctctggcatctctttctgcaaaggcatctgaatgtgtctgcgttcctgttagcataatgtgaggaggtggagagacagcccacccccgtgtccaccgtgacccctgtccccacactgacctgtgttccctccccgatcatctttcctgttccagagaagtgggctggatgtctccatctctgtctcaacttcatggtgcactgagctgcaacttcttacttccctaatgaagttaagaacctgaatataaatttgttttctcaaatatttgctatgaagggttgatggattaattaaataagtcaattcctggaagttgagagagcaaataaagacctgagaaccttccaga

SEQ ID NO: 717826 - DNA, 182 bp, Homo sapiens
cagaaaaattatcatttatttatttatttattatttagagacagggtcttgctctgtcacccaggctggagtgcaggggcacagtcatagctcattgcagcccccaactcctgagctcaagtgatcctcttgcctcagcaagtagccaggactataggcatgttccaacaccatgcccagtg

SEQ ID NO: 717827 - DNA, 224 bp, Homo sapiens
  misc_feature (21)..(21): n is a, c, g, or t
ggggatttgggttttttaaanttggggggggcccctttccccccaccccccttttgggggaaactttcccttgccggttgcccccctttgccccggggaaccaaaaaaaaggccctttcctttttttttttttaccgtggcccccccccccaaagttaggtttttattttttggctggtggaaattttttattttcttttccccaaaaaaatttttttggggga

SEQ ID NO: 717828 - DNA, 1593 bp, Homo sapiens
aaaaaaaaaaaaacccaagtttcttttacaaagttgtgcggccgctcgcgatgaactagcgaggatggccgtcatggcgccccgaaccctcctcctgctgctctggggggcagtggccctgaccgagacctgggccggctcccactccatgaggtatttctacaccgccatgtcccggcccggccgcggggagccccgcttcatcgccgtgggctacgtggacgacacccagttcgtgaggttcgacagcgacgccgcgagtccgaggacggagccgcgggcgccatggatagagcaggaggggccggagtattgggaccgggagacacagatctgcaagaccaacacacagacttaccgagagaacctgcggatccgctccgctactacaaccagagcgaggccgggtctcacaccctccagaggatgtatggctgcgacgtggggccggacgggcgcctcctccgcgggtatgaccagtacgcctacgacggcaaggattacatcgccctgaacgaggacctgagctcctggaccgcggcggacacggcggctcagatcacccagcgcaagtgggaggcggcccgtgtggcggagcagctgagagcctacctggagggcctgtgcgtggagtggctccgcagatacctggagaacgggaaggagacgctgcagcgcgcggacccccaaagacacatgtgacccaacacctgacccaccaccccgtctctgaccatgaggccaccctgaggtgctgggccctgggcttctaccctgcggagatcacactgacctggcagcgggatggcgaggaccaaactcaggacaccgagcttgtggagaccaggccagcaggagatggaaccttccagaagtgggcagctgtggtggtgccttctggagaagagcagagatacacgtgccatgtgcagcacgaggggctgccggagcccctcaccctgagatgggagccatcttcccagcccaccatccccatcgtgggcatcgttgctggcctggctgtcctggctgtcctagctgtcctaggagctgtggtggctgttgtgatgtgtaggaggaagagctcaggtggaaaaggagggagctgctctcaggctgcgtccagcaacagtgcccagggctctgatgagtctctcatcgcttgtaaagcctgagacagctgcctgtgtgggactgagatgcaggatttcttcacacctctcctttgtgacttcaagagcctctggcatctctttctgcaaaggcatctgaatgtgtctgcgttcctgttagcataatgtgaggaggtggagagacagcccacccccgtgtccaccgtgacccctgtccccacactgacctgtgttccctccccgatcatctttcctgttccagagaagtgggctggatgtctccatctctgtctcaacttcatggtgcactgagctgcaacttcttacttccctaatgaagttaagaacctgaatataaatttgttttctcaaatatttgctatgaagggttgatggattaattaaataagtcaattcctggaagttgagagagcaaataaagacctgagaaccttccaga

SEQ ID NO: 717829 - DNA, 1704 bp, Homo sapiens
  misc_feature (240)..(240): n is a, c, g, or t
  misc_feature (877)..(877): n is a, c, g, or t
  misc_feature (879)..(879): n is a, c, g, or t
tctgccgtggctggccccctataatcgcccggcggtgttttctttttttgtgttggcgccgccgtctttccaaggagtgtgggccgccgctgctctggcgtggcctcaccaccgtcgtgccttgtcgtggtggggaacacccaacgaaggtgggggggcgtccttctgcccccccgttgtcgtgggccccccctccgctcgttccccccccccggaaggtgtgtgggccccccccgcctnatatatggtgccctccaggcgtccccttttttctcctcgctggcggcgtcgttacaacaccctcttttgttgcgaccacaattccccctttttgttttccgtcggggggtcccatcttcttctcgggagaggggctcctttctatattgggcgccccaccgcccccacaagggtgggggtcccccccggtctccccctccttcgtggggggggccttttgcgctggcccccaacatgattgtcacccgcacgtgtctcctattttgtcatctccggggggcgtgtttcttcctcggcggctctaccacaatacttgttgtgttcccggcgttcctcaccccgccccaagacgaccctccgagagggtttccctttggtggtccccccctcctcctgggggaaccccctcttgtgtgatgataagaccccccccgccacgacccaccaaaggggggccccccacataatttagggggtccttcttcccccgacaaaattaggggggggacgcccgggcccgccttggttttcgtcttgtggggagcaccaccaaccacggcggggggttccctaatattcttatcgcccaagatcctccaagggggccgccgtagacctccccgtgggtgttcccccngncggttcttgccccgacgaaaccccgcggagggtgtgtcgcacaacagttggcgccccttggcgggccccgacaacactcctcgctctcacacggcgtctcctcgcggctttcgcaggggggtgacaccgcctcggttatgctcggtgcacgcggaatcacgcgggtggctccctcatccacggggtgatcatatttgccgcacacgctcgtgtgtttctcccccacaatttgggggcccaaatctcccccacggagtgcctttgcggcggccccccttgtctcgtgtgggtcttttctctgtgtgtaggcccgcccctcccgcgtctgcgtctgtgtgcgcctgtgagaaattgcgcccgcgcttttataacaaaggggagatcttccccgctgtggacatctctctgcgcccggtccttcttgtgttctcataaacagccccacataatattttatattgttaatatgtgggtgtgacgcgatctgtgatatgctttgctggacacctacacaatattttgtgggttcttacacaccacaatatacaccgcgcgtcccgcggagatggagaccaactcccgcgttcgtgtccagatagcctacatccccaatagttacccagaacggatgcacccaaaggggggaaccctcttatatttttccaccagattaaatagcaccagattgttagaattgataacacccacattgtgccatgggaagggggaacacccccagctttatttacctgctaaagatggaatttccggaaggccttgtgtgcaacccttgcgccataaattaaccccttttccccgggccca

SEQ ID NO: 717830 - DNA, 1595 bp, Homo sapiens
aaaaaaaaaaaaacccaagtttcttttacaaagttgtgcggccgctcgcgatgaactagcgaggatggccgtcatggcgccccgaaccctcctcctgctgctctggggggcagtggccctgaccgagacctgggccggctcccactccatgaggtatttctacaccgccatgtcccggcccggccgcggggagccccgcttcatcgccgtgggctacgtggacgacacccagttcgtgaggttcgacagcgacgccgcgagtccgaggacggagccgcgggcgccatggatagagcaggaggggccggagtattgggaccgggagacacagatctgcaagaccaacacacagacttaccgagagaacctgcggatccgctccgctactacaaccagagcgaggccgggtctcacaccctccagaggatgtatggctgcgacgtggggccggacgggcgcctcctccgcgggtatgaccagtacgcctacgacggcaaggattacatcgccctgaacgaggacctgagctcctggaccgcggcggacacggcggctcagatcacccagcgcaagtgggaggcggcccgtgtggcggagcagctgagagcctacctggagggcctgtgcgtggagtggctccgcagatacctggagaacgggaaggagacgctgcagcgcacggacgcccccaaaacgcatatgactcaccaccctgacccaccaccccgtctctgaccatgaggccaccctgaggtgctgggccctgggcttctaccctgcggagatcacactgacctggcagcgggatggcgaggaccaaactcaggacaccgagcttgtggagaccaggccagcaggagatggaaccttccagaagtgggcagctgtggtggtgccttctggagaagagcagagatacacgtgccatgtgcagcacgaggggctgccggagcccctcaccctgagatgggagccatcttcccagcccaccatccccatcgtgggcatcgttgctggcctggctgtcctggctgtcctagctgtcctaggagctgtggtggctgttgtgatgtgtaggaggaagagctcaggtggaaaaggagggagctgctctcaggctgcgtccagcaacagtgcccagggctctgatgagtctctcatcgcttgtaaagcctgagacagctgcctgtgtgggactgagatgcaggatttcttcacacctctcctttgtgacttcaagagcctctggcatctctttctgcaaaggcatctgaatgtgtctgcgttcctgttagcataatgtgaggaggtggagagacagcccacccccgtgtccaccgtgacccctgtccccacactgacctgtgttccctccccgatcatctttcctgttccagagaagtgggctggatgtctccatctctgtctcaacttcatggtgcactgagctgcaacttcttacttccctaatgaagttaagaacctgaatataaatttgttttctcaaatatttgctatgaagggttgatggattaattaaataagtcaattcctggaagttgagagagcaaataaagacctgagaaccttccaga

SEQ ID NO: 717831 - DNA, 116 bp, Homo sapiens
tcgctcggtaccaggctatttcacaaaagttaccaactgtttctctttctagaatgaagcaatgaagttaagaaattccttgaattagctgcctggtgtgtcttgtctgggagctt

SEQ ID NO: 717832 - DNA, 1582 bp, Homo sapiens
aaaaaaaaaaaaacccaagtttcttttacaaagttgtgcggccgctcgcgatgaactagcgaggatggccgtcatggcgccccgaaccctcctcctgctgctctggggggcagtggccctgaccgagacctgggccggctcccactccatgaggtatttctacaccgccatgtcccggcccggccgcggggagccccgcttcatcgccgtgggctacgtggacgacacccagttcgtgaggttcgacagcgacgccgcgagtccgaggacggagccgcgggcgccatggatagagcaggaggggccggagtattgggaccgggagacacagatctgcaagaccaacacacagacttaccgagagaacctgcggatccgctccgctactacaaccagagcgaggccgggtctcacaccctccagaggatgtatggctgcgacgtggggccggacgggcgcctcctccgcgggtatgaccagtacgcctacgacggcaaggattacatcgccctgaacgaggacctgagctcctggaccgcggcggacacggcggctcagatcacccagcgcaagtgggaggcggcccgtgtggcggagcagctgagagcctacctggagggcctgtgcgtggagtggctccgcagatacctggagaacgggaaggagacgctgcagcgcgcggacccccaaagacacatgtgacccaacaccccatctctgaccatgaggtcaccctgaggtgctgggccctgggcttctaccctgcggagatcacactgacctggcagcgggatggcgaggaccaaactcaggacaccgagcttgtggagaccagaccagcaggagatagaaccttccaagaagtgggcagctgtggtggtgccttctggagaagagcagagatacacgtgccatgtgcagcacgaggggctgccggagcccctcaccctgagatgggagccatcttcccagcccaccatccccatcgtgggcatcgttgctggcctggctgtcctggctgtcctagctgtcctaggagctgtggtggctgttgtgatgtgtaggaggaagagctcaggtggaaaaggagggagctgctctcaggctgcgtccagcaacagtgcccagggctctgatgagtctctcatcgcttgtaaagcctgagacagctgcctgtgtgggactgagatgcaggatttcttcacacctctcctttgtgacttcaagagcctctggcatctctttctgcaaaggcatctgaatgtgtctgcgttcctgttagcataatgtgaggaggtggagagacagcccacccccgtgtccaccgtgacccctgtccccacactgacctgtgttccctccccgatcatctttcctgttccagagaagtgggctggatgtctccatctctgtctcaacttcatggtgcactgagctgcaacttcttacttccctaatgaagttaagaacctgaatataaatttgttttctcaaatatttgctatgaagggttgatggattaattaaataagtcaattcctggaagttgagagagcaaataaagacctgagaaccttccaga

SEQ ID NO: 717833 - DNA, 1464 bp, Homo sapiens
aaaaaaaaaaaaacccaagtttcttttacaaagttgtgcggccgctcgcgatgaactagcgaggatggccgtcatggcgccccgaaccctcctcctgctgctctggggggcagtggccctgaccgagacctgggccggctcccactccatgaggtatttctacaccgccatgtcccggcccggccgcggggagccccgcttcatcgccgtgggctacgtggacgacacccagttcgtgaggttcgacagcgacgccgcgagtccgaggacggagccgcgggcgccatggatagagcaggaggggccggagtattgggaccgggagacacagatctgcaagaccaacacacagacttaccgagagaacctgcggatccgctccgctactacaaccagagcgaggccgggtctcacaccctccagaggatgtatggctgcgacgtggggccggacgggcgcctcctccgcgggtatgaccagtacgcctacgacggcaaggattacatcgccctgaacgaggacctgagctcctggaccgcggcggacacggcggctcagatcacccagcgcaagtgggaggcggcccgtgtggcggagcagctgagagcctacctggagggcctgtgcgtggagtggctccgcagatacctggagaacgggaaggagacgctgcagcgcgcggacccccaaagacacatgtgacccaacacctgacccaccaccccgtctctgaccatgaggccaccctgaggtgctgggccctgggcttctaccctgcggagatcacactgacctggcagcgggatggcgaggaccaaactcaggacaccgagcttgtggagaccagaccagcaggagatagaaccttccagtgggcatcgttgctggcctggctgtcctagcagttgtggtcatcggagctgtggtcgctactgtgatgtgtaggaggaagagctcaggtggaaaaggagggagctgctctcaggctgcgtccagcaacagtgcccagggctctgatgtgtctctcacagcttgaaaagcctgagacagctgtcttgtgagggactgagatgcaggatttcttcacacctctcctttgtgacttcaagagcctctggcatctctttctgcaaaggcatctgaatgtgtctgcgttcctgttagcataatgtgaggaggtggagagacagcccacccccgtgtccaccgtgacccctgtccccacactgacctgtgttccctccccgatcatctttcctgttccagagaagtgggctggatgtctccatctctgtctcaacttcatggtgcactgagctgcaacttcttacttccctaatgaagttaagaacctgaatataaatttgttttctcaaatatttgctatgaagggttgatggattaattaaataagtcaattcctggaagttgagagagcaaataaagacctgagaaccttccaga

SEQ ID NO: 717834 - DNA, 673 bp, Homo sapiens
aaataagcagccttgttgctcacacaaaacctgttggtggtctcttcacagcaacgcgaatgaaatttggtgccatcactcggatcaggggacctcccttgggagatcaatcccctgtcctcctgctcttgctccatgagaaagatccacctacgatctctgctcctcagaccaaccagcccaaggaacatctcaccaattttaaatcggatcttctcagcttagcggctgaagactgatgctgccagatgactttggaagccccctggaccatcacagatgcccagctttggataactcttacagtggaggacaggaatatcaggtctctgagcccaagctaagccatcatatcccctgtgacctgcatgtatgcatccagatggcctgaagtaactgaagaatcacaaaagaagtgaaaatggcgcgtgcctgccttaactgatgacattaccttgtgaaattccttctcctggctcatcctggctcaaaagctcccccactgagcaccttgtgacccccaatcctgcctaacagagaacaatcccctttgactgtatttcccactacctacccaaatcctataaaagggcccacccctatctccattcactgactcttttggactcagcccaactgcaccaggtgaaatacacagcttgtgctcacaaaa

SEQ ID NO: 717835 - DNA, 368 bp, Homo sapiens
tcgatcacaggagtcgagacagccaggccatatggtgaaaccccatctctactgaaaatacaaaaaaattagctgggcgtgatggtgcatgcccgtgatcccggctactctggaggctgaggcaggagtatggcttgaacttgggagggggaggttgcagtgagccgagagttacgccactgcactccagcctgggcgacacagcaagactgtcccaaaaaaaaaaaaaaaaaaaaaagggaattttgggggaatttttggaaattttgtgtttttatctccttgaatgtggggtggaattggtattttaagggttaacttaaaattttgttttcaaggggtgtgtcataggggttataggatattta

SEQ ID NO: 717836 - DNA, 623 bp, Homo sapiens
  misc_feature (99)..(99): n is a, c, g, or t
atgccgccgccgtgccgccttccgatggctgcgtcctgggaagcccggttccccgagcgctccggcctggcccggtgccccggactgagtgcgtccccnatggatgtgctgccctgggctgtgcccaggctggccgctgtgcggtgagagcgactccctgcaaggtgtggcggagggagacccccggacgggccgcccggggcttctgccccaagcccttgaggcgcatgtcggccgggagcccggccttgttgtacagccctgcacggactttggacaacgctggccaccggtggggcaactgggagaccagtaccgggggcgaggtgcaccctaggttgacaacggaagaaagaacatgccaaggcatttttctttcggccccttccaaagcggtgcatgaatgcaatttccccggagcgggtcaattccggggccttaaaaacggccatgagagcaaaacaactggttaccaaccagagtggagggacacggtcttggtcccctggaaaggggaactcgtcaaggcgcagaccccgggtttcccttcaattcaaggggccgtgggtcccttgggaaccgttgggcaatttgaccggaaggcacggctttccctcataaag

SEQ ID NO: 717837 - DNA, 599 bp, Homo sapiens
caatacggcaggtacaggcggtgttactcggacaggggagcactggacctatgcctgcacatggtgtggcatcactcagcccctacccctgcctgctctaagggtagaaaactccaggtcccctgccaccgactgcccagccactccaagccccctggcagctcgcccctcctgcgagcagaaagtgcctttatctcagccatccgcagacttgcttggccatgatgcggggacaggctcggaattgagggaggctgtcttcatctccctgccatccccctctcacgccacccccgccccactgggctgaggtgctgctgatgcgctgggatctgattgaggatcacaagtgaatcgagagatgacccctacccccatcatccacccagtcttttgaaaccggtctaagcaaacctgacttctcgtgttggacggagctgacgtggacggcgagccatggacacgtgccacgaaggacacggttgagcgggcggcggcacgctgtggtgccgtggcctctgggcttggtcacgacgttggcgttgagctcgccctgtggcgccttgaccttgcccaccgtgatccagggaacgtgtgtg

SEQ ID NO: 717838 - DNA, 288 bp, Homo sapiens
gcctctttcagagagggtttctggatccagattaagccacaattgagaaggatcaatgcatatagctcttcagaccatagaatcacagatgagagcagaaactaagaagcatccatctctatttctctctgcctctgtgtaaatatctccgaaagaggaacatcaatcatgggctctgaagcttactagagataagaatatctacctcatttgctctagtgactttgttcttggtggatccaggttgtgtggaacctgaagttttcacaattatggggttctttttta

SEQ ID NO: 717839 - DNA, 113 bp, Homo sapiens
tctcagcaaggtagaagggaggtgcatggggtaatcagtgctttggaaggcgaatttccttgctgtgaaataggcttgggttactgggtcaggacaaccattcagactgacag

SEQ ID NO: 717840 - DNA, 272 bp, Homo sapiens
gaatcgaatggcatcgaatggaatggaatggaatgcaatgcaatggaatgtattagaatgtaatgaactttaatggaatgtactcgaatggattcgacaggaatggaatgttctgaaagtgaatgaactccaatggaatggattgaaaaggaatgaaatcgtacaaaatggaatctaatggaatggaattaaatgaaaatgaatgaaatcgaatagtacagaatagaatgaaatgcaagcaaaaggaaaggaatggattggaatggaatgaa

SEQ ID NO: 717841 - DNA, 153 bp, Homo sapiens
gaacgggtatgcggttgagggataggaggagaatgggggataggtgtatgaacatgagtgatgtttactcgatgtgaatgcagggttttcatgttgttcacatgtggttgggtgcagtgcagcccgcattgttgttgttggtcaaatatgtag

SEQ ID NO: 717842 - DNA, 264 bp, Homo sapiens
gagagaacccaccatggagctgtctcctgccgacaagaccaacgtcaaggccgcctggggtaaggtaggcgcgcacaatggcgagtatggtcgcagaggccctggaaaggatgctcctgtccttccccaccatgtgagacctactccacacacttcgacctgagccacgcctctgccaggttaagggccacggcaagaaggtgcccgacgcgctgaccaacgccgtgcgcacgtggacgacatgcccaacgcgctgtccccctg

SEQ ID NO: 717843 - DNA, 257 bp, Homo sapiens
attaggtctcgcagagtaggcccaggctagtctccaagctcctggactcaagtggtccttcctacctaggcctccaaaagtgcttggataacaggcgtaacccactgcccctggcctaaatttcccttttttttttttctttggaaatggatttccacccctgtggtccgggcgggagttgcaagtgttcagctcctcagcctcagtaacaacctctccaccttctcggggttcaggcaattctgccctcagctttt

SEQ ID NO: 717844 - DNA, 233 bp, Homo sapiens
ttattagaggatgcttagaagattgtttcggtaattgttagtgtagacaggtgtggtggtggttgttctgtgagtcttggcctcttgttagctatcagggcatgaaagtaactccatgggttagtgaaagtgttatccagttaggtccaaaggacacagcagcagtgttttgcccctgtcatttctcacttatggacagtgtagggtcttctgtagaagaatgactcttgaac

SEQ ID NO: 717845 - DNA, 653 bp, Homo sapiens
ccgaagaagagacgggataaaagaggtgccgctaccagaaacagcccctcttcttgttcccggaaggtgggggctctaacctggggcacagggaccagtaaaatgaagtcagaatgtctccagagagaagtcgtttcttttaaagtgtgacaagagtcccatacccgcagccattaagatctgtttggggctcagtggttagttcaagttccacggttacccacacttagtatcacaagactgctggttaagtctgtcaagaacttttcagtctttagtactgtgtaaaaacattgatgaaggctctgatacttgcactagtccacgccaatagagcctgtaaagcctaacgcgggtaattttgtttaatcagatccagattttgtaggaatctcatcttcccaaatgtcccgcaagtgtctagagtatagaaatcttcgcattcgaatcagaatatgttgatcacagcctgtgtccaggtccgcacagatgtcactgcggtggggcaagccttgacactagaaatcactttagcccaggcacagtggctcacacctgtaatcccagcacttcaggatctaaaggtagaacaatctcttgaacccaggagtttgagactagcctgatcaacatagctaaaccctagccccatt

SEQ ID NO: 717846 - DNA, 450 bp, Homo sapiens
gggggggggggggggggcggcgggggggggggggggggggggcgggggggggggggcggggggagagggggggagggcagcggcgggggggagagagggggggggtgtggggagaggaggaggtggagggtcagggtgtggggcgagggagggggcagcggggggaggggaagtgggggcgctgggggggggagaatggtggacgggggggaggggcgcgggcgcggggagggggcgccgagagggggggagcgggcagggggaagggggtggggggcgagtgcgggcgggcgggcgaggggcggaagggaggagaagaagggttcgcagcgaagcacgggaggaggaagcgcgcgcgggcacggcgcgcgcgcagggcggccgcagtggtgcgggagagagaagcacacacgggagacgagcacacgaacaaagaacagaagaagaaag

SEQ ID NO: 717847 - DNA, 304 bp, Homo sapiens
  misc_feature (179)..(179): n is a, c, g, or t
tgataggtgcatgggtctgtggcgtgctctgccctacacgtatgaagcaaagcatcagtactgtgtctctggaggggccagaatggcgcgcccctgctgtgacacgagggtggttaggccagtacgaggcgctctcctgctggaggagcaggcaacggcacttcactgtcatcctcaancagctcaccagccgggacgccggcttctactggtgtctgaccaacggcgatactctctggaggaccaccgtggagatcaagattatcgaaggagaaccaaacctcaaggtaccagggaatgtcac

SEQ ID NO: 717848 - DNA, 469 bp, Homo sapiens
ctgctggtcatctctaagatccccgctcagccaacgtatgcaaacgtcactttcagatcattctgataaatttagtatttgctgacgtctttctattcatctgatacatctttgattcactacttgagtctatcaaggataacctgcccataatacaacccatagtatcttcaataacatctcgattatcaccattctctgcaaaaccttgctacaacaattttccgttcttatccatttcttcacacatttcctttatgtctttggcaagaatctcttggtttaaaagaccagtctctttttcttctgtgtaaagtgctgtggcaaacaaattaacgttcttctaacgtcatccaaccgagtttatgtggctgagactccatcatactaattctgctccatgtgtttactctgcctctttttccctccactctgggattaaacctcctcgaaggctttgttcagtcca

SEQ ID NO: 717849 - DNA, 976 bp, Homo sapiens
  misc_feature (107)..(107): n is a, c, g, or t
  misc_feature (151)..(151): n is a, c, g, or t
  misc_feature (159)..(159): n is a, c, g, or t
cacagaaggattaagaatcaaaaagctcaagtgaaaagcaggtattccaaccatggattcactttaacaaagaatgcttcacagcagatctgtccaatgcaaaactncatgtcaaactaacttcactacccaaacaccacaccaaaatatngtcccacnagtagttccaaaaacagtaccataaaccagtatttggaacccatgcaaacctgtaagtccatgacaagacttaggtaccaggtggatagtgtaattttgtgaaaacgcggtaggtgtaaatattgatgccattaagtgctacattagaactgcatttgtgatcgtcacatttaagagtgtgtttaggcttaccaaaattaccttagcttggcccacacttcaaccccaaaattttaaattttgaaactgttagtaaaaccatttaaaggtgataggattcaacaaatttttgccagaaaagctaatctgttagagatattaaaatttttagtttggcatcttgcacatgcaaataagtttcacttgaaggcctagttacattacgagttccctatcacccttaaaagtttttcaagcaatatatatgtacgttaccattcaattatgcacagccagcctttgatccagaaaaaagaattactttaagccgcttactccttattttaaccagcagtaaactgtataagcaggaaaaacttactagttttgggtttcaacaagctagaaatggtgaggtgaggctgccggactgaccatttctagcttattctaaccagcagtaaactgtataagcaggaaaaacttactagttttgggtttcaacaagccagaaatggtgaggtgaggctgccggactgacggccaggaagaatttgctgaaaaggttttgccagatgttgcgttggatttagttggttggcgaagggggtgttgtggatttttcctgcttttttgttagccgaaggcagctgctgta

SEQ ID NO: 717850 - DNA, 336 bp, Homo sapiens
  misc_feature (189)..(189): n is a, c, g, or t
tcatacttgacctaaaaaaataaacaaaatgtcataatgatcaaacactaatgtactttggcttggtcacatgcactgcttagtgagcgtggtgccagaagtctgagctcctttaaaagtattttagtgtgagcaaaccctcatgtccttagtagtttgtaaggatggagctcctttccaattcccaancagtaatattccaaagactgtctttttttctataccagctcccaaaacagaagcaccacagttgatgccatagtcaatataagcagttaatggtaaaaattacaattagttgtaaagaaaacctcatctcccctatatacataataa

SEQ ID NO: 717851 - DNA, 346 bp, Homo sapiens
cagagcagtggtggggcacgagcagtgggggggtcgtggggcactgtttggcacttgaatggcgttcgccacacatgggcactgtccgaggcgccctgtgtacttgctgagatacttaggacctgtgcagtggagggtgcccgtatcacagctggggaagctgaggacgtgtggctcacagtcctgggcttggtggctttgctgatgcttcgggtggcccaggtcttggccttgggcaggaaggctccctggtcaccctgagtctgtggccctgcatgtgagtcaggtgaggtggggcccctgggttgtgctggctcgagacattcggtcccacaagtgcctcgta

SEQ ID NO: 717852 - DNA, 115 bp, Homo sapiens
ctggaagtggtgcgtttcccttttgctcacattccacctgctagaactctgttaaatggctataacctaactgcacaggaggctggaaatgtcatctagttgagctgtgtgccca

SEQ ID NO: 717853 - DNA, 119 bp, Homo sapiens
tgatcgtcatactgactctctcaagtctgggtggacgaagttgttgctgcacactgccgagggaccacaccacacgcgcgcgcgccgcgggctgccccggcgcgctcctgtccactctc

SEQ ID NO: 717854 - DNA, 359 bp, Homo sapiens
  misc_feature (334)..(334): n is a, c, g, or t
gtggtgaacacctacagtcgatttcaccgggggatcatccttgagaatgagggcggccctcatcctatcagctgaaagctttaagagcaaaacccgaggtgtcccagagagggaattctgccttgagacggcggcttcccactcccactggatgtccagcccgcggccccacgggtgggtgagcccgtcctctcctcgtttctgtctcctatttgttctgtctctggacccaccgtgtggccccagaccctccagtgaggacctcccgtatttcttcagagcagcccttgcgtgctggaggcctgggcttcagagtgtccctgggtgccctggngcatgttctgtgacctcccagctcc

SEQ ID NO: 717855 - DNA, 910 bp, Homo sapiens
  misc_feature (449)..(449): n is a, c, g, or t
  misc_feature (537)..(537): n is a, c, g, or t
ctctataagaaaccaaacagctgctagtcctaggaaaatgctgtgaacagatccagccacgtcagtggaagccagctatatagagagaagaacacgcggctcccattctggttaaaggccagtctgtcatccatccaggcaagaactgcggtcacatggctgactggtgctagagagcgtaggacagatatcgactggcaaccagtggagatcaacctcaggatcaaggcctagacaacaagacaacgtcagagttgggcgacgtgaaactctgatcccactgctcattgcactaatgggtcgtaagtgccctggaaacatgataggccgagatctgtccgatgcgttttccccggtgaaggacttggtgaggagcacgaaggcgttcatcagctccgtgatagccccatcctttatgccaatggccagttccccgtcgtactcgcagnccctatgtgcttcaactccgctgaggtaaaaccactcgatgccgctacggtcgagacttacattgcaagaataggccccgtcactganagcagagaattgggtgtctcctggtaattccgtcatcgccaagtagcgagaccagctcgactgttttacatgacgagtctccagggtgtccctccactgggcggtcaagtggcccggtgagacgtttggaggttctcctgctgacactggctgctagtgccccctgagggccaggaccaagcttccctctgtctgatgtcccatgactttgctctcttctgcccctgtgaccccaaggataatgagtgcgcctccccatgccgtcataccatgctctcgaaagaccatatgtgagaccggagaaccgtcaaccaagaagggggagtcagggtctatccagcgtatatcagaactggccctgttatcccaccct

SEQ ID NO: 717856 - DNA, 1666 bp, Homo sapiens
  misc_feature (1092)..(1092): n is a, c, g, or t
  misc_feature (1095)..(1095): n is a, c, g, or t
  misc_feature (1097)..(1100): n is a, c, g, or t
  misc_feature (1103)..(1104): n is a, c, g, or t
  misc_feature (1106)..(1107): n is a, c, g, or t
  misc_feature (1121)..(1121): n is a, c, g, or t
  misc_feature (1125)..(1125): n is a, c, g, or t
  misc_feature (1224)..(1224): n is a, c, g, or t
  misc_feature (1563)..(1566): n is a, c, g, or t
  misc_feature (1571)..(1571): n is a, c, g, or t
  misc_feature (1574)..(1574): n is a, c, g, or t
  misc_feature (1577)..(1577): n is a, c, g, or t
  misc_feature (1580)..(1580): n is a, c, g, or t
  misc_feature (1582)..(1582): n is a, c, g, or t
  misc_feature (1585)..(1588): n is a, c, g, or t
  misc_feature (1591)..(1591): n is a, c, g, or t
  misc_feature (1594)..(1594): n is a, c, g, or t
  misc_feature (1600)..(1600): n is a, c, g, or t
  misc_feature (1606)..(1606): n is a, c, g, or t
aaaaaaaaaaaaacccaagtttcttttacaaagttgtgcggccgctcgcgatgaactagcgaggatggccgtcatggcgccccgaaccctcctcctgctgctctggggggcagtggccctgaccgagacctgggccggctcccactccatgaggtatttctacaccgccatgtcccggcccggccgcggggagccccgcttcatcgccgtgggctacgtggacgacacccagttcgtgaggttcgacagcgacgccgcgagtccgaggacggagccgcgggcgccatggatagagcaggaggggccggagtattgggaccgggagacacagatctgcaagaccaacacacagacttaccgagagaacctgcggatccgctccgctactacaaccagagcgaggccgggtctcacaccctccagaggatgtatggctgcgacgtggggccggacgggcgcctcctccgcgggtatgaccagtacgcctacgacggcaaggattacatcgccctgaacgaggacctgagctcctggaccgcggcggacacggcggctcagatcacccagcgcaagtgggaggcggcccgtgtggcggagcagctgagagcctacctggagggcctgtgcgtggagtggctccgcagatacctggagaacgggaaggagacgctgcagcgcacggacgcccccaaaacgcatatgactcaccaccctgacccaccaccccgtctctgaccatgaggccaccctgaggtgctgggccctgggcttctaccctgcggagatcacactgacctggcagcgggatggggaggaccagacccaggacacggagctcgtggagaccaggcctgcaggggatggaaccttccagaagtgggcggctgtggtggtgccttctggacaggagcagagatacacctgccatgtgcagcatgagggtctgcccaagcccctcaccctgagatgggagccatcttcccagcccaccatccccatcgtgggcatcgttgctggcctggctgtcctttctctttggagctgtgatcactggagctgtggtcgctgctgtgatgtggacggaggaagtangtntnnnnttnntnnatatggatgggagntacnctcaggctgcaagcagtgacagtgcccagggctctgatatgtctctcacagcttgtaaagtgtgagacagctgccttgtgtgggactgagaggcaaganttgttcctgcccttccctttgtgacttgaagaaccctgactttgtttctgcaaaggcacctgcatgtgtctgtgttcgtgtaggcataatgtgaggaggtggggagaccaccccacccccatgtccaccatgaccctcttcccacgctgacctgtgctccctccccaatcatctttcctgttccagagaggtggggctgaggtgtctccatctctgtctcaacttcatggtgcactgagctgtaacttcttccttccctattaaaattagaacctgagtataaatttactttctcaaattctctgccatgagaggttgatgagttaattaaaggagaannnncctanaanttnagngncannnnaantgnaacacntgaaanaacacactatattacgggggccagaacgcttcccccccccctgggcgcacggtaaccccc

SEQ ID NO: 717857 - DNA, 559 bp, Homo sapiens
  misc_feature (378)..(378): n is a, c, g, or t
  misc_feature (559)..(559): n is a, c, g, or t
aaaaaaaaaaggagcttgtattttttaaaatttcaattatgttccctgggtggacaagaaacaagggggacattttatgggggattttgaaaccaccctaacatggctttacattggatgcatcagtttttcaaaaagccagagaactgtgttccttgaagcatttggggacttcgatagtgccatctatacactgagcatcctctgtatagctacacttcttttccttatttttgcagaagaaagaaactttatcaccatgtagcattccattcttaaatttttcctgaatctttactctctctccttggtacaccacagtggcttttttcacaggtaatttacaagatgctttacaacttggcatggcagaccagnttcccagtttggtacattctattttttccggccatccagagaatatccatcatggcagccaaatgtggctttatccttgaataaaagcgttggtttgcaagataggtaacaaaatcatgggctgggcttgatgggaatgggcatttttacttccctgagtctgggaaattaagcccaattn

SEQ ID NO: 717858 - DNA, 512 bp, Homo sapiens
tactccccagaaaaggctctctcccgaaaatcttatgaaagttagagtttatcaaagaagatgattcttcatcaggaatttacagagtagaaagcactgagtgcatatactagcccccaccacaatccaagtgaggaagatccccaaatagcatctattcagaaatagttgatagtgggacacatgctagcagagctgaagtagtttgtaggaatctctgttgttgtacgaatctctctgttgctgtctgtgtagagagacttcttggtgaggactagacacatgatctatgagaactgcaggaaatctcagcacattaattgactctatctaagcctctgcattaagagaggaccagagtctagcatgatctctagcagtatgaggccctgtccctaggatgagcccagttcccctgctcctccattgaaatgcctacctgagaaagctcaatactgccaggtgaatttatttgcttcagccatgcctgaagacaggcctctgacctccct

SEQ ID NO: 717859 - DNA, 186 bp, Homo sapiens
  misc_feature (140)..(140): n is a, c, g, or t
cacccgatgaggcaaccagccagaacgccttaacgcaggcacatactttcctattctcaccctaggtaggcttcccttcccctacgtaatgcacttaattacacctacaacaccctaggcgtacctaacaatctacatcntacctgtacatcccaaggacctataaacgtcctgagccaacaacct

SEQ ID NO: 717860 - DNA, 875 bp, Homo sapiens
gcaggtgtatggattacctcaaatagtgacccaacaataaggggaaattctatatttaagtggaaatcaaggaggagtttacatctttggtgatggacgaggccttattgaaggaaatgactttgatgtgcattgcattagcaggaatccagattaggacaaacagttgtccaattgttcggcataacaaaattcatgatggccagcatggtgggattatatgtgcatgacaaagggacacaggagtaataggaagagaatgaagttccatagtaacgctctagctggagtctgggtgacaactgccagcatctccagtactgagaagtaaactgtagtacacagtggcaagcaggttggtgttcattctgatgacaatggacatggagtgctacgaagacaatgactatctataatcatatgtatccaggggtgcaggataggactggaagcaaccccaaaattagacgcaacaaaatctggggagcgacagaatggcggaatcctagtttataattctggtctaggctgtattagaacgaccatgacacttctttgcacactgccatggctggagtctggattaagacagatagtaatctacactaggaagaataatccatgatggcagagatgtggctcgtatttttaatggggtcaggcccttgagaacatgtttttcagattgtcccgccgcgtccctcagcctaatgtttccatctttggaaacgcaattggggttgcggcgtttgaatccaatcggactgtcattaggagggtttaacggtggggtttactcggattgcagaaaaacttacaaccgacgggtacgtatatacaacacgcactcgttccgactgcaacaacaaaatcgg

SEQ ID NO: 717861 - DNA, 435 bp, Homo sapiens
  misc_feature (43)..(43): n is a, c, g, or t
  misc_feature (47)..(47): n is a, c, g, or t
aggagaaataggggccttctgaccgctgatgacactggtatgntccncgactctttaggaaacccatacgcgctgcgagaagaggaaggaccccgagtcataagcctaccggatcacaccgggcaaactgatcaacacgtccgcagggccgttcgagccgtagaacaggaaggacagggcgaagaacgaccacagcagcaggacaagaacggcgcagcgcacacggtacgtgaagcgggagatccaaagacgacccaggacacagagaatgagtccatggccaaggacgctcagggcacgaacacgcaggctgcgccaggagcgagacagaggcagaactcactgcaaggggcaccgagcacgaatcggcaagcgagggcagagctagctgctgagggaaacagcgataagctgacaccatcgcacagacacacg

SEQ ID NO: 717862 - DNA, 1516 bp, Homo sapiens
tctcatgggtcactgaggctttaatttggagcccaaaaccaccggggatctagccttggttgccaccccgggatatgacacgaggctcacatgactctagaccactggggttgcaatgtgaggctgagaaaaacaagtgactggtggccaattacactgactggcaaagctagagctgccaacgagggctccaggggatgctagtgggttcagggtaagacctgttcctaaggagaaaagctgtgatacagacacctccaactgagtcgagtgatggtgagcgcgcatacacattatgcagtgtggaccctctgtgttcaagtttgtatagtgtctagtgtgtgtgcacctctgagagcttgccctttgagctttgacccactgattgtggtcaacggtgcggtctttgtttgatataacacacacaagtttggaccccagaaatgcaggactttgcctgtggccccacaaggtgtataacttaggtggccccaacgggggggttaacatggaaagaatatcacattgcagcgtggatcaaacacatattacgacctttagataggggccccaggaggacctaccgttaacaaaagaatactagacagagaagacatggggtatgacaccatatggggcgcaacaaaccagcaccaagaaaacagagaaacaagggggggccaccaaagagaacagagaattccacggcccccaaagtgcgagctaagcccccaaaacaaaacaaagggcgagagacacacacgcaaagcggagatcatacacgacacaaccgccccgggaaaacagaatagaaaaaaaccccgaaggaagtgcacacaaaacaacagaaagggcacgtgtggacccacaaatgtgggtgactgcgctcgtaagaaaagaacacagaggaagaacgggagggacaaaacaacagcgaggcaccacagggaaacaacaagaaaccacagctcaagaagccacccatcactaatacaagaccactaaggatagaaccacaacataagagaaacaagcaacccatggtagaataactacaacacgcacaaaaaagaccaaagctagcacccaaacaactagccgacgacatagacaacacagtacgcaaccaacacccaccgacatcgaagtatgacgcacgaaagggagcaagacgcaagaaagaaaaccaacagagacataaccaccaaacaaaaaaagaagaagtaaaaggacgagagaacactaaggacgagagagcaaagaccacgaaggtgaagcgaatagagaaaagaaacaaagcgaatagcaacacacaagcaaaacagcaagagcaacgacagacccgagaccacagacagaaccaaacgcacgcaacagacaaacgcacgcagacacgaaccaagagaaagaaggaaacccaacgaggcgaagtaaataaaaacaggtggacaggagcacaacataaacagaacaaaacagtacacagcgaacagacccatacacacaacacgacgtt

SEQ ID NO: 717863 - DNA, 105 bp, Homo sapiens
ttatatgtctcgatcgttatcggaattaagcagacaaatcgctccactattgtcctatgaccctgccaaatccccctctgcgagaaacacccaagaatgatcaat

SEQ ID NO: 717864 - DNA, 325 bp, Homo sapiens
  misc_feature (153)..(153): n is a, c, g, or t
  misc_feature (160)..(160): n is a, c, g, or t
  misc_feature (171)..(171): n is a, c, g, or t
  misc_feature (189)..(189): n is a, c, g, or t
  misc_feature (204)..(204): n is a, c, g, or t
  misc_feature (208)..(209): n is a, c, g, or t
  misc_feature (253)..(253): n is a, c, g, or t
  misc_feature (256)..(256): n is a, c, g, or t
  misc_feature (314)..(314): n is a, c, g, or t
gaagaaaaaatacgggaacagcaagtcaaagaacgaaggcagacagaagaaagaaggcagagtaacctacaagaagttttagaaagggaacgcagagaactagaaaaactgtatcacggaaaggagatgattgacgaatcactgaagattaanataaaanaggaattaganatggaaaatgaattaganatgagtaatcaaganatannagacacatctgctcacagtgaaaatcctttagagagatacatgncantcatccagcaggagcaagaccaggagtcggcagataagagctcaaaaaagatggacangaaggctccct

SEQ ID NO: 717865 - DNA, 966 bp, Homo sapiens
gtcttttctctgtttttgttgtctttgtttttcgtttttgtttgttgttttttttctttttccttggttttgtgagcagggaaaggagagatcatctgttgttgctttgtatggtttttttctttcttgattgttttttttgttttttgggttgccgccgcggaagagccaacactagtcaccccgttggccttgaccagggcccagggcccaaaacggttttaccgcgccgtctatccgcctagacaactgggtgcaatcgccgaggacatggcattccggcaacgccagccgcaaaccgggcagagaaccctcccccagacggaatatattgggcgcccactgcccaccccagattgcccccccgcatcccccccggccgttcggggaggtaccagaaataccctgccccgaggttgacctggggatttttccctggggctccgagtttgtactcgtaaaccaggatcactcgatgttgtctaccaagcatctaataaacgagctggttcgtacccagagccctggtgaagaattgcactcgtgctcaattgacagcacacccgtaccgacccagtggtatcgaggtccccctaatgcgctgccccctgggcccccaagaaagggaaccacaagctgaactcctgagggaaagaaagaagagttttaaaccaaaaacgagtctaaaaaaattcacgagagaaaatatgagtgaaaagggaaaagaatgcccaaaacagcacgtctcctggagggagccacgttccacagccagggccagctttttgcgtgcacatcgctttcaaggccgggaccacgtgtggccgagagcacagatggctatagtgctagagggccaagagattggagttttattctttagggaaatccaggccccccaaggccaaataaataccttgttttgtcttcaccccagtaataaaggtgtttattgttttgttcccc

SEQ ID NO: 717866 - DNA, 261 bp, Homo sapiens
ctagctcatgcctgtagttccagcactttgggaggccaaggcgggcggatcacctgaggtcaggagttcgagagcagcctggccaacatgcccagtccacggtgtgtgtgttttgttttgttgtttttttttttttttaatttttttggaaacaaatttttgtttttgtcgcccaggctggagtgcaatggcgcattttgggcccattgcaacttccacatcttgagttcaagtgattctcctgcctaagcctcccgagta

SEQ ID NO: 717867 - DNA, 334 bp, Homo sapiens
  misc_feature (133)..(133): n is a, c, g, or t
  misc_feature (268)..(268): n is a, c, g, or t
tcttgcgtgcaaagccctggtgaaccagtgcctgcaacagacgatgcacattgcttttattgagcatcagttgattggccagctcggtcacacccgagcctcgttcgtgcttggccagggcttccaggagcancaggcccttaacaaaagtcttgtccaatcgaatatcccatcaatcactaaaagtgcatgaattgtctcatggaaccgggccacaccatagccagacaagcccgtatagcaaagcggcaagcggctttcgcaacanattcatcagacatgcaggcagacgggcgtgcacacttgaaccttcaacagcaagcccagtcgacgc

SEQ ID NO: 717868 - DNA, 530 bp, Homo sapiens
  misc_feature (155)..(155): n is a, c, g, or t
ggcgtgactgctctcatcgtctcagcagatcagttcgaggtcacgtcctctgtcttgagactatatgcggacattgaggtggacgcagcaggtgagctgctctgtggacacagcagggcaggaagactatatcgactgcggctctcctcctaccngacactgatgtcatcctcatgtgcttctccatcgacagccctgacaagcctgggaaacattcctgagaagtggaccccaagagggtgaagcacttctgccccaacgtgcccatcatcctggtggggaataagaaggacctgaggcaagacgagcacaccaggagagagctggtcaagatgaagcaggagcccgttcggtctgaggaaggccgggacatggcgaaccggatcagtgcctttggctaccttgagtgctcagccaagaacaaggagggagtgcgggaggtgtttgagatggccactcgggctgcgctccaggtccgcaagaacaagcgtcggaggggctgtcccattctctgagatccccaaggcctt

SEQ ID NO: 717869 - DNA, 114 bp, Homo sapiens
ttcgatcgagctcgcgtccttacagacgattacgcgttctttgggttgctttccgcggttcccagggtttgatgaagggtttgatgaagggtttcgatgacagggtttcgatga

SEQ ID NO: 717870 - DNA, 242 bp, Homo sapiens
catgctgcgccgaaccaaatggcaggcggtgattgtggaggccagtggagggggtgcctttctggtgctcccccgtaagacaagtacgggccgcattgacaaggcctacccgacgtgtgtgtgtgcacacgggtacctgtcctggacatcgactggtgtcctcactacgactaattcttagccatgcgcctcagaggactgcacggtcacggtgcgttggcccaacacggtgcgttggccaa

SEQ ID NO: 717871 - DNA, 613 bp, Homo sapiens
accttcccaccagcaagacaggctatgctatagcacagccactagcccgcctcttagaacctctcatttcctttccatcgtggaaatctatcctcaaggaaataacttctcggtgttccatctgctattctactactcctcagggattattcaggccccctccctaccctacacatcaagctccaggatttgctcccacccaggactgacaaattagctttactcaacatgccccgagtcagataactaaaatccctcttagtctaggtagacactttcactggataggtagaggcctttcctacagggtctgagaaggccaccacagtcatgtcttcccttctgtcagacataattcctcagtttagccttcccacctctatactgtctgacaacaggtaagcctttattagtcaaatcagccaagcagtttttcaggctcttagtgttcactgaaacctttatatcccttacggtcctccgtcttcaagaaaagtagaatggactaaaggtctttaaaaacacacctcaccaagctcagccaccaacttaaaaaggactggacaatacttttaccactttcccttctcagaagtcagaactgtcctcagaa

SEQ ID NO: 717872 - DNA, 110 bp, Homo sapiens
taacagtatatgagtatatatataggtctatatagacagtgattctcaacctttattctcacactatgcacttacatacttcttgtccttaatacaagaaacatggttga

SEQ ID NO: 717873 - DNA, 452 bp, Homo sapiens
ctatgtgcaggcgggcatgattgaacatcttagactgtgtgcaacgagtgtgcaccatcgtcatctgagcaagtgatggcatgtgtttccgtgagcacatggctacatgacgtgtgtagaattatatatgggggaactaatcaattaagggcgaaaatagtgcaactttttggcccgcgggagactcaggggagggacttaaatagtaagcatgcttactaaaatacttgcaagagagtaatatcagcgggatatataagacggggtaagttttgttccagaaaatgtcatattaatctgatcgagtctcaagtctcatagtggtaaaacgctttatcggtgtacgtgctagcgggagccatgaaaggcacggggggaccagggtaagagggggttcttgtattgaaaacgctcgtggagacgagggcacacgtttggtccacatcgtgtgt

SEQ ID NO: 717874 - DNA, 111 bp, Homo sapiens
aagatcgagtaggtacttgttgagatgtttcgatggggtggaggtttgttggagacttgattgtatcttgcattcagcagtctggtggagaggtgaagacgtgacaaggta

SEQ ID NO: 717875 - DNA, 366 bp, Homo sapiens
  misc_feature (101)..(101): n is a, c, g, or t
ggcctctggggcgcattccaaccttccatgcctgcggactctgcgttagatagaatcaggttaactgtatttttgcttggccccaatacagtaccccttgnaaggccgaaagcaacaaaaattaaattttaaccatgagggaaactcgtgcacaatcaggctggtcagtgtggcaaccagatcggtgccaagttctgggaggtgatcagtgatgaacatggcatcgaccccaccggcacctaccacggggacagcgacctgcagctggaccgcatctctggtgtactacaactgaaagccacaaggttggcacaactatgtttccctcgtgcccaatcccatggttgggacttctaaggaacaccc

SEQ ID NO: 717876 - DNA, 1381 bp, Homo sapiens
  misc_feature (815)..(815): n is a, c, g, or t
gcccacagcggggcgagaaagggcacaggccggggagaaggaacaccacgtgtagtgtatagattatatttctactagtccgtaattactactagtggtgtctcgctagttgttagatctcacatttactcaagcccgcggggtgtatatttcccccctttgaacaacactccccctgtccgcgttgtggtgggagagtctctctcttgatggagaccaatgttagcaccttgtgtctgtcttctctcagcatttccccctggggggaattttctttacccggggacaagatacggtggggcccccccgtgatcagtctcctttgtgtgccccctcgtgccccagaccaaaatttgggggaaaggctctatgagacgtctcctctgaaagcggtttctacagggggaaaatctccttatgaatgtccccggggctatatggaagcgagaccaatgaagggccccggccacttccacaggagggattaatgggccctgattttgagggacccaaacaaggttcgccctttatttggggcaccctggggaattcccccccccattcgtcgtactattttgcccccccccccaagtctccgtctcccggaacgtgggagccccccgcgggtcccccccggtggatgcccagagggaggaatctttctagggccctgtttgcttgtcaccacatctggtgtgcgagtgccgccagaccttggaaggaggccactccacgggtcactcacacccgcgtgtatgaaagccccctggccacttctgacacatgttctcacacgcacacgacccaaggtgatntataagaacagatgatttgcccagagagacactgccacactggtggggtggcgcgcccaccgaatgtcactcggtccacacactcacccttgcaccttctttgcacctttcgcggggacctggggaaccacccggccctgggagtcctacaccactggcccaagaagagcctttcgagaacttttttctcaccccccgcctcttgcctgtgtgaggacctttgaatgaaatgtatgtaaggccctcgaaggctcacgagtatccccccgaggtcccggccacacaagtgagccccgccacctgaaggagggggtttgctccccctggcctggccactactgtgttccccttcggagtgcggagccacccctcacctggcttctcctcggccctcgggagaatctcgcttcctgcacgccccacgtcccacgccccctctccttctcgctgagcctcgctgagacctgtgcaccacccccctcccacctgggccccagcctcacccattcccaatctccccccctttttagacccattaagagaccaataccattttttaactccta

SEQ ID NO: 717877 - DNA, 1086 bp, Homo sapiens
aacactagacatgatcgaattcacctcgtacccccagcagcctaagtttggtctccaagaaaatccttgaacccttctttttcagggaaccagatcctcccagcctctcatctgcatccccgccaggtcgagggaatcttctattcattctggtccagaagagctgcccactcccccagagcctgactttccaccgcccctctcccgcccttgtggacagccacaccgtggggggcccagccactccatgctctcccctgtctgaagcctggcccctgactacctcctctgcaccacaggggagccagacttactccctggcccccatgagccctccccacctgggggctccctgacctacttagggaggacctcgctgagacacacaccagactccctcgacttgtgcattctgccttgggagacacagaccagctgaggagccaacagcccagtgccagtcccacaacccagtgaagcaccatacagttggcccgcccctgttggacgggcaagcccccgacaggacagcgcgtaccggtccagtctgagcatagcctgagcagggggcatggcgaagcctcacaacagtccaccatcttggagaggcattcaaggactgtgaaccaggccacgcacaggtggaacagaatggtggacaccccaaaggtctgcggggactcagcgtgtgccaggaaccacatcggccaagataataaccaactgacccaagagtgcgacacaattaagaacgggtccagcaagacgaggaacgggaccagacacacgagggacgaagcatgtaacgaagagagagcaaaaatcgacggaagaaggagacaacaagaaaaacaaccacaaacagcagacaaccaaggacccacacacatagaagcacacagccccgaagcagtgacagaacaaagaggcgcaaccgaacagaaccccacgcgacgaaagagacagagaaaccagacaccacacacaaccgacaacagccaaacacacgccgccgcccacacgagcaacacagcaaccacacagcacacctgcgccaccacaccacaaggaacgagaacagcaacg

SEQ ID NO: 717878 - DNA, 525 bp, Homo sapiens
  misc_feature (43)..(43): n is a, c, g, or t
  misc_feature (89)..(89): n is a, c, g, or t
  misc_feature (93)..(93): n is a, c, g, or t
gaggctgcagcgagcagtgtggatgcaccactgcattccagcntggaccacaaagggagaccacgcctcaaaaaaaaaaaaaaatacanctanctgaatgtacccagaccctctaccttccagaaaaggaagtgggctgaggagagaatcctcacaactttaatacttagctctctgtccccttaacgctcacgacagcaggctcttctgagctgccccgagctgtccactgttctcagcaccgagcgtcagtacacctagctcatcttcacactctacttagcaggtgctgtgagcactcccatcctaaagatgaggactcaggcacccagcaagtgaaccccgccccagataacagcggttagcggcagggccgggcctgatggaaagcagcaggagctcgcgtgcagcaggagcagtgaaagctgcttgggcctgcacctaaatcctgccggacccgccgctacctgggcgaccgctcctgaacctaaacccagccggacccaccgcttccccggcggccgc

SEQ ID NO: 717879 - DNA, 115 bp, Homo sapiens
catggatttgctggtgcagtacaactaggcttaatagggacatgtccctattaagcctcgaattcgagcttgaattcgagccgttagaagcttgaattcgagcagtagtagtagt

SEQ ID NO: 717880 - DNA, 932 bp, Homo sapiens
aatcgcttgaacctgggaagtggaggttgagtgagccgggaccgtgccattgtactccagcctgggtgacagagcgagattccgtctccaaaaaaaaaaaaaaaaagcccacctgaaagcctgtctctttccacttggtgggcccttccagggggattatcgagcatgtggttttttcatagtgccttttcccttatttcaagggtttgccttctgagtgtggtgtgtttttttttttaaaattggtttgggtttacaaaattagagtttaaagaacagtctccagaagcttttctcagccaatttgggtctccttacttcgtgggttaaatatttttccccctcgcgggcagggggaagccagggttagaagccaagaggagacaagcaggagtgtggaggaggtgaggcgtccctccgtgctgttacataagcccaggaggcttaaaggctccacgcttataaggggtggtagaccccctggggggttccaggggaccgtgtttgcccagggggtgcagcgtgtgatgtgtgatggggccaccgggcggcaaacacgggagggtgacccgcccagttctcccactatcccactgggattcggggctaaccacggggggcgtcggaagcctgtcctcacgtgccttcggggggtggtgggccccggccccttccttatttgccccctgtgtgaaccggcaagtcccaggacagggagcaggggaggagggacatttctgggaccgcagcctccagttgtaggcggttcattatctctatggcgggggtaccggggagagtactccgttccgcggttctggctcctaagatgggcaggggttacatctgtgtccctgacccgaccgtagtgtaggcgcctgggcaatgggtgctgtgtgccccttccgggggtggtggaggtgtccccctag

SEQ ID NO: 717881 - DNA, 197 bp, Homo sapiens
ctcctcatgtgcatgacgctgtgtccgtacatctttcttttcaccttctgccagggtgtgagctgtaccccctgctgtcactgcaggtctcttggtctttcttgcgctttgtgggcctggtggccgcaggacccctggacctgctggcaaagtagtgcgcccgctgtcccccatcgggtgctcctctcagagtcgcc

SEQ ID NO: 717882 - DNA, 931 bp, Homo sapiens
ccggcggggatgagtcggacccagggtccttcagtggtagatgtcccctggtatggtgtggcaccctgaatggctcctccctggcttatgccgtacctcagcacatccctgtgctacttgtagctggggcctctgggctcttggtcctctactgcctcctgcttttgctcttctggatctacagcagctgcatcgaggactcccacagaggtggctatagggctgcgcattgcacgtggccatctcagctatagccgtcttcctggtcttggtgtctgcgcatgtatccttcgatttggcagccaggtctctctgtcaagtccatcatctccttgaacactacaattagctgttctgaagcccagaagattccgatggacgaccccctgtgaactgctctgcagttatactgtcaacctacacaatgctgaaacctcttcttgggtgaattgggtattgtggtgtgtggtcttggggctccaggtcgtgcagtggaagtctgaagccacgcccataccgggctctggagaggggtgaccctgatctggagctctgagacagcatgctcttgtgggtacacgcttccccattcctgaagcataagcggagtgcttccgggcagccgaagactctatgcccaaagtgccttggtaaggcccggcacgactcaagggaccatgtaactgtggggaagcctcacgacggccgtctgccgacggggcgcgaggggcgcgacaacatagagaccagggcccccgccagcctccctactgccacctgttagtgccaaagacacttccggcgtcatcctacaacagacacacacgcacaaagccgccgcccaaaaccgggcacaacacacaccaacgccacgcccagcgccgcccccccggcacggcgaacggcccacgcgcccacccaccacggccgc

SEQ ID NO: 717883 - DNA, 120 bp, Homo sapiens
gtcgtatagatgcgtacgtaatgacatctgccacagtctccggctctccagcctcagccctgcttcagtcccttccccatgcttctgcctgatgacaataaagctgttgactcagctaag

SEQ ID NO: 717884 - DNA, 227 bp, Homo sapiens
acctgggaccttaaatatacagctatgatatgttggtcgaacagaccttcgtggcagccagatgtcctatcacctcgctagtcggtaagagggcctctttgagctctgtccacctagtcaggttggagacaccaggggatctaccaccaaaagctcccttctggttggaggccctgggtctccaattgacccttcaaatatattattctgttcttttgtgcatttct

SEQ ID NO: 717885 - DNA, 603 bp, Homo sapiens
cgagtgaaattcctaccagagtcaagtggttctcagctcttggctatacactgaaatcacctggggtggcttcaaatagtgatacctgtgtcctgttctcacttattctcctataatcggtctggggtgcacccaagccctgggattttcagaagttccccagatgattctcctgtgcacctgaggctaagaaccacagcatgagacataacccatggacaggtgttgacaatattaggctctgattataaattagtttggccaggtaatttctttcttgatccaaataagcctacagaaattattcccaagaaagaaatcttagtattttttttttgacacaggatattgctctgtcgcccaggtggaattacattggcacaatcatagctcactgtaaccttgaacttctgggctccagcaatactcctgcctcaacctaccaagtagctgagactacaagcactcaccaccacgcctggctaatttattttttttatttttattttttgttgtagaaacagggtctcaccatgttgcccaagctgggtggtctccaactcatgggctcaagcaatcctcccatcttggcctcccgaagtg

SEQ ID NO: 717886 - DNA, 126 bp, Homo sapiens
acaatctcctaattataacattcacagccacagacctattcatattttatatctgctcggaacccacacttatccccacctcggctatcatcacccgttgaggcacccacccagaccgcctgaccg

SEQ ID NO: 717887 - DNA, 428 bp, Homo sapiens
aaagagtttcgaacgaatgataagacagtgccaggacggataggtgcgactgccggcggttctccccgctcctgcatgctctctttcccctcgtttctcctcgttccctttcttttcaccctcctctttctctccttcttttcttttttccccttttcctccttccccttctctccctcttctttcccccgttcatctatccattgtcctcgtccgcaccacttccccttcgctttacactctccctggtttctctcttactctggctcctttcctctctgcttcctcttcctttactctctctctctctctttctcctccctttcccccttgacatcccatttctcgtttatttagcctttctcctttttctctctcctctcttgcctcttctgctttccgcctttcttttcgtcccctttctgttt

SEQ ID NO: 717888 - DNA, 586 bp, Homo sapiens
catggtggtgggtgcttgtaatcccagctactcaggaggctgaggcaggagaatcgcttgaacctgggaggcagaggttgcaatgacccgaaatcgagccactgcactccagcctgggtgggaggcagaagttgcaatgacccgaaatcgagccaccacactccagcctgggcgacagagctagactctgtctcaaaaaaaacaaaaaaacaaaaacaaaaaaaaacaaaaaaaccttatcagagtgaatcaacatcatatataaactagcacccagaatctgaccaaggatacaaccgagaaagtgtgatgtcactgcttaatattcaagttacgaacagctgtgtgcttggtcagagacataaggcctcagcctggtcgcagtggctcacaggtgtgaatgcccagcagcgtcgggcggtccaagagtgagggagtgcttgagctcaggagttgaaatatcagcctgatacatacatgtgaaactccagtctctacaaagaacgagaacagaagaaaaaaaatacaaaaactgccaggcatgggtgtgtgtctatattcctaattactccaggggctgagatgg

SEQ ID NO: 717889 - DNA, 129 bp, Homo sapiens
  misc_feature (20)..(20): n is a, c, g, or t
  misc_feature (33)..(33): n is a, c, g, or t
  misc_feature (81)..(81): n is a, c, g, or t
tagatccaccattccctctnatggtgtctacanccgtcatactaccagctgagatggtggtgggcataaggagaatttgtncctataacccttagtgtgttctggttttcctttttttaatttttaaat

SEQ ID NO: 717890 - DNA, 413 bp, Homo sapiens
aaatttggtacaactttgaaataagcaggactttgtacagaagcaccatctccttaagatatgttgtaaatgccagtacagcctagtggctttaattagtttgttcaatacaaatgaaaaaatatgagtagcttgtcactgttacccagtcaaaatggtgtttttaatatgtagagcattatgtgtgacttgaagatggtaggaaagccaaatgcctgtagctgatggaggccagtgcccatgagaagttcactttcctggcatcagacccaaatgggttctggctctgctgtgattgatttggtgggcgcagtcataattccaattcacagcccaggcttctcccagtggtccaagacagtctcagtggggcaggtgtggcaccctagtagaatgtggtgcacctaaagtat

SEQ ID NO: 717891 - DNA, 899 bp, Homo sapiens
  misc_feature (720)..(720): n is a, c, g, or t
gctccggcttcggcgcggaggggcggtcggtcgggggaggcggcggcggcggctggtattcgcaggagccatgttgtcagaagtcctactggtgtctgctccggggaaagtcgatccttcatggtaggaacatgccgtggtacactggcagaggtagcactggtctgtatccttgaacttgagaacattcctccggcttcaatgcccacagtagatgggaaacgtggaccgtcatacttacccaacattgggtatcaagcgggcctggtgatgtggccaggcttcagtgcagctggacacaagctttctggagcaatggtgatgtcacaacacccactctcagagcaagtggagaagctaaaggaggttgcaggcttgcctgacgatgtgtgctgtacgccgagcgcctggctgtgctggtcttgcttaacttatacctgtccatctgccggaagcagaggtggaccaaggaggatttggagctaattaacaagtgggccttccaaggggagagaatgattcacgggaagcccctccgagagtggacaatgctgtcagtacctggggaggagccctccgatagcatcacgggaagatttcagtccttaacgaggtcgccaggtctccagatcctggtgaccaacacaaagtccctcgcaataccagggccttgtggctggcgtcagaaacaggctgctcacgttcccagtagatcgtggntcccacatcctgaagctcgagtagatggccatctccttggagtgtgagcgccgttgctgggcagagattggggggaaggccccagagcccgtaaacacatgacctgtggctggaacaacggcttggggtgacaggggccctctgaatgccctcgggttggccggtccaatctgtggaca

SEQ ID NO: 717892 - DNA, 801 bp, Homo sapiens
cgggaggagtactttccaccaaaggtgttgtgtggctgtggactacagccacgacaaactggtgggagcgagccgtggccatcgtcctggctggtcctgggcttcctgtggcctctactcactgctcacgatttgttacactttcatcctgctccggacgtggagccgcagggccacgcggtccaccaatgacactcaatggtgtgtggtggcagtggtggccagtatctttatcttctggtttgccctaccaggtgacggtggcataattgatgtccttcctggagccatcgtcagccaccttcctgctgctgaataaagctggactccctgtgtgtctcctttgcctacatcaactgctgcataaacccatcatctaacagtggtggctggcagggccttccagggccgacctgcggaaaatcacctaccaacaagctcctccggaacgtgtatgactgaagagtctgtggtaagggaagagcaacgtcattcactgcgctccacagtggacactatggcccagaagaccccaggcagtgtaggcgacagccctcattgggccactgtggaccgagtgtccccttacattaccggccagtactccctcttgttactccacatatcacgtctcccggggaggatggggtaacccattaggataacctacacgtctccatccaaaggtgcctgacgataccccaggaaatggtcctcactatatcccagcgggacccattgatcatcccgtacctcaatatgccaagggtgaacactccacactaagagagcacacgccgc

SEQ ID NO: 717893 - DNA, 131 bp, Homo sapiens
tgacgaggcagtgctgccaggctgctcttgattgggaactggctgtcctctgctctgaagcccaagagacctgagataggcagctgctgggagggcttttctgaggcaggagaatggcgtgaacccgggag

SEQ ID NO: 717894 - DNA, 303 bp, Homo sapiens
cagcaagggctgacatgttggagaaaggagctgtgagtagaaccgttagttgggatgagtttggggctgcgtagttatggaggaaacaagctcagagaaccaaatctctgaccttctgctctgactctccccctccacccccagatgcgattcatgctgctgttcagccggcagggaaagctgcggctgcaaaaatggtacctggccacatcagacaaggagcgaaagaagatggttcgggagctcatgcaggttgttctggctcgcaagcccaagatgtgcagcttcctcgagtggagggac

SEQ ID NO: 717895 - DNA, 126 bp, Homo sapiens
tgcttactgtggcgttggagtaaattctgtggaaatgatggataaagaaagaaacaaagacaaaatgcctgaggatgttacattcagccctcaagatgaaacacagaccgcaaatcatacgcccag

SEQ ID NO: 717896 - DNA, 278 bp, Homo sapiens
ccccccattttgtgcctacccttaaggatttttgggggcattgctggaaattagccccctgggtaaaatgtccaaaatggggtaaattaaacccgggaattggggggcaatttattaaaagcccccttaaagccagtaacttccccttagggggggggggggaaaaggttaaattttgtatccaggggtttttggggcacttttggggtttttaaaaaattgtttttgggggggtttaggcccaacccatgttttttttcagggccaaaaaaatttag

SEQ ID NO: 717897 - DNA, 201 bp, Homo sapiens
  misc_feature (91)..(91): n is a, c, g, or t
aattttccctttttttttccccccccccccggcccttgggggggggttttttttaaaaaaaaaaaaaacccccccccggggggggggggtnaaaggggtttttcccttaccccggaaaaaaaggggggctttttcccccccgcctttttttaaaacccccttgtttttttattccccaaaaaaactttttttttggggtta

SEQ ID NO: 717898 - DNA, 190 bp, Homo sapiens
gattgctccggctgacatctagagtatcccgaaacctaatatacgcagtcgtaatgggctggtgttgtcactgcagctatttggtcactgctgtgggttctatccctggcctgggaacttccacatgccactaatgtggccaccaaaagggctttgagttcctagaaagtcaggaccacatcttctattt

SEQ ID NO: 717899 - DNA, 108 bp, Homo sapiens
tttgccgcttctgcttctgtgttctgcttctgcgcttcctcttctgcttcctgcttctgccgcctcctgcttctgccgcctcctgcttctgcccctcaccaagaccct

SEQ ID NO: 717900 - DNA, 376 bp, Homo sapiens
  misc_feature (34)..(34): n is a, c, g, or t
  misc_feature (39)..(39): n is a, c, g, or t
  misc_feature (51)..(51): n is a, c, g, or t
  misc_feature (110)..(110): n is a, c, g, or t
  misc_feature (340)..(340): n is a, c, g, or t
  misc_feature (352)..(352): n is a, c, g, or t
gcactgagccgccgccgcttccggaagcgcagantccgntggtgccacgtntatccccttacatcctcctaggacccggtcggtagtcgtcgccccagcccgccggggcnagcgccatgagcgcggccctcgagacgggaccgagagcatcatgggcagcactgtcccgcgctccgcactccgtgctgcttctgctgctgctcctgcgccgggccgagcagccctgcggggccgaagctcaccttcgagctgccggacaacgccaagcagatgcttccacgaggaggtggagcagggcgtgaagttctccctggattaccaggtcatcactggaggccantacgatgttgantgctatctagaggacccccagggg

SEQ ID NO: 717901 - DNA, 255 bp, Homo sapiens
  misc_feature (51)..(51): n is a, c, g, or t
cgtataccagatggcgagcacatgcccagtgactgcgggaaagtttggtcngaccgcgcagaatgagtgacgatgggtggcgcgttcgtgcagttccatcagcgtcagcacaatcacccacaccgacatcagcatccccaccacggtcataccgacgattttatcctgcaacaaccacggcagaagaatcgacaagaccagcgtgacgaccagcgccacgcccagattatgccattttttgcgtcgcgtaacttt

SEQ ID NO: 717902 - DNA, 1611 bp, Homo sapiens
tggtgaatcatgttgtctctttccaataacgggctataaacttttcccatctctcttgaaacaaagcagtctgtcttttaaaaagcgcggtaaatggtctttctttactctttatattctctttggaaaaatgaagagctcttttctcttaaagaatatgtgatcttaaaaggtgtgtgtggtcttatgtggctataaacaacaggttgagaccaccccatctttattgtgtgaaagtgtgagaaatattgtgtccacactggctattgtgcagaatgtgggcacctatggcaaatattctctggtatatgtgtctctccagtatatggctatccctctaagaataatataacaacgtctcttatgtgtgtgagaaccaaggaggaaaaaagaaagaaacaacaaaacaaaaaacaaaacaacaaaagacaacaaaaacaacaacaaaaaacaagaaaaacaaaaaaaacaaaaagaagaagaagagagaggaggcgcgcgcgagcaacaatagaaaagacaacaacgcgagagaggagagaggaacaaaaaaaaacaagcgctaccccaacacagctcttagagagaaaaaagagaggaggacaaccaaagagagaggaaggacgactacaaaaaaaaaggacagcaagaagcgacgcgcagcgaatataataagacaacaagagaaagtagacaagaaaaggaagacaaacaaaacacatacaaaacacaacgtagagacacaaaaacatagtagaagaaagaacaacaacatacccataacaacgaagggggtagcagcacaaaaataaggtatagaacaacacaaacaccaaacagaagagaacaattaacgcatcctcatacaagagcagcggtactaaaacaaaacaaacactcagcaatagacagagtagacagatcaacaagaggaggcgagacaaccaaacagcctaagggaaaaaaagcagacgacaaggcgacgcagaaaaaaaaaaaaacaggtacagcacaagccgaagagagatcatgaattcaagagacagaaaaaatatatatacaccaacgcaggaggggcacaacacgaaacaacatacgagcggcagcgctgacgggaactgaagaagatagaacagtacgagagtaatgtggaggctgcacaatcaaccgacaatatttaagaagtaccgagtgtgatacaatgaagaatgaaagacgcttagcgcgtgaaggagtacggtctgagacaagtgagaggcacagagcagctaacggaggggcgcgtatgatgatgagacggtcagagcgataggagacaatagagaggcagtcagataacgagatgagacaggggaacgacgcagacgactgaaggctgcgcatggcgaagtacaggaaacagagcagaatagaacagagggagagagagcagatgggcacgtcgagacagaatcaacaaggaacgtagatagtgagaggtagagcagcatggagtagagcgaaaggacatgatgagggagcctgcggaaaatcgcatgacgaagcaggagagacgtcaaagacagagagagtcgagagaggcagacgagaaagtcagatcatcagaacaga

SEQ ID NO: 717903 - DNA, 284 bp, Homo sapiens
  misc_feature (69)..(69): n is a, c, g, or t
  misc_feature (221)..(221): n is a, c, g, or t
caccagcgcgagacctgccgtcatcggcgacagccgaggacgagctgcagatgctgcgacacgaatagnaggaagccgaccaagagccacgacactgagcaggttgaccaggatcgccccggagaacgacccccgcttgaacagcgccatgtcgagcatcggcgtcttggcacgcagctggcgccgcacgaacaggaaacccatcgcgaggccgagaagtncccacggaccggcctttcagactcggaccatccacgggccagcgactttgatcgcgtagacca

SEQ ID NO: 717904 - DNA, 209 bp, Homo sapiens
tacgcatctttggaggacaaaaggcttgccatatgttagaataaatttgaatctcataggtactcacaacaatgagcagcattgtaagtagtgattgcattcatttgaattcggaacattctcaatcagtccttccactctaagttaatctttgtttctcacagaacactaggcagttcaaagggcctctggtttcgcgacgcacactg

SEQ ID NO: 717905 - DNA, 160 bp, Homo sapiens
aaacacatcttcacgggaaacttactggcgtcaagtgcatcgacgagaccatgaagctggcgggcatgcattacctgcatgtcaccctgaagcccgccatcgaggagatatgccagagccacaaaccctgtgaaatcgaccctgttcggttgagcggaga

SEQ ID NO: 717906 - DNA, 1015 bp, Homo sapiens
  misc_feature (822)..(822): n is a, c, g, or t
cgtgagttaaggaccctcaatcatccagaaagtggtttgaaccctgtggtgtcgcacctgatgttcgttcctacactcaatctgcgaggaccgtgaaaatctactcgcgcatgcaaatacgagtacaggatagctctgtacaagactacacaggtgcccattctaactatacttagatcgtggactattatgacaacattcgggttgcacgactatatcacggaattgtatgctttaaactcgaagacatacatgcacacacacttcgttccattctccatcccctgggtcgtgcatgtaattaaacaaaacccgaccattcactaggactaaagaccctaaccgatgtaggcaaggaatcagtcgatgggtgcatcgtgagctgacaggtatctcaagagaacattaacatagtagccgaccataacgccatgactactatgcgacatgactgaagactctccagagagctcctcgagagaaggataactcacgctaagacacgtgaccgtccatgcaacaagagactctcctatgaacccttttaagcttacactcgtgtatctctcattgatgtggttgagcacggcctcttattcatagtagaatcgaaacataccctatctccgggcacgagagaggcgtggatgagatccgaaagcttgctgtatgggaacttcacactacggaattccctgaattacatactcacacgttggcacacgctgtaacgtgcagcaatgttcaccggattgactgctcgggatttactttgctacgtgtgatgttctcattccatgtaaaatgaggatttatggagcntaatattgtcaaggcgagacccctgcacataaaggcggaagccccacgaatgaaatatgataacaccctgaggccaaaagccctttttgaaattcccccttcgcacagagtcaagggcccgaaagagggtgatggacctaatactgactgacagcataggttgttccggatcctggcgggtaacgaaactagg

SEQ ID NO: 717907 - DNA, 175 bp, Homo sapiens
cagacctaacatcgctcactagcatactcttcacatcacgccaccatagccctcgtagtcacagccatactcatccaaaccccctgaagcttcaccggcgcagtcattctcataatcgaccccgggcttacatcctcattactatactgctatagaaacttctaaaactaggcct

SEQ ID NO: 717908 - DNA, 505 bp, Homo sapiens
  misc_feature (16)..(16): n is a, c, g, or t
  misc_feature (39)..(39): n is a, c, g, or t
  misc_feature (70)..(70): n is a, c, g, or t
  misc_feature (77)..(77): n is a, c, g, or t
  misc_feature (82)..(82): n is a, c, g, or t
  misc_feature (87)..(87): n is a, c, g, or t
  misc_feature (90)..(90): n is a, c, g, or t
  misc_feature (100)..(100): n is a, c, g, or t
  misc_feature (110)..(110): n is a, c, g, or t
  misc_feature (113)..(113): n is a, c, g, or t
  misc_feature (123)..(123): n is a, c, g, or t
  misc_feature (128)..(128): n is a, c, g, or t
  misc_feature (137)..(137): n is a, c, g, or t
  misc_feature (140)..(140): n is a, c, g, or t
  misc_feature (166)..(166): n is a, c, g, or t
  misc_feature (169)..(169): n is a, c, g, or t
  misc_feature (175)..(175): n is a, c, g, or t
  misc_feature (180)..(180): n is a, c, g, or t
  misc_feature (185)..(185): n is a, c, g, or t
  misc_feature (192)..(192): n is a, c, g, or t
  misc_feature (201)..(201): n is a, c, g, or t
  misc_feature (204)..(204): n is a, c, g, or t
  misc_feature (227)..(227): n is a, c, g, or t
  misc_feature (262)..(262): n is a, c, g, or t
  misc_feature (285)..(285): n is a, c, g, or t
  misc_feature (344)..(344): n is a, c, g, or t
  misc_feature (357)..(357): n is a, c, g, or t
  misc_feature (417)..(417): n is a, c, g, or t
  misc_feature (440)..(440): n is a, c, g, or t
  misc_feature (480)..(480): n is a, c, g, or t
tatctgaaagcaatanatttattaagtatccccgaaaanataaacacaaaccagtaaaaaacaaaaccgnaaaacgncaggnctggngcngcaataaganagagacaggngcngcccacacgnggccnagggggggnggncgaggccataaatactgcaggggggnggnaagggngcccnagggngaggggnaagcagggngtnggcagcgagaaggctccgggggnttagacactgctggcttcggccccggccgccaccngcctctcactccagccgcgagcngcttcacttggggccctgggcctccgactcccccccgtcgtcttcgtacatctcgcccncttcctcggccgnggcgtcctggtactgctgggactcggacaccagggcgttcatgttgctctcggcctcggngaactccatctcgtccatgcccncgcccgtgtaccagtgcaggaaggccttgcgccggaacanggccgtgaaccgctcggagaagcgc

SEQ ID NO: 717909 - DNA, 751 bp, Homo sapiens
ctgttgtctcttccgtgcgttatcccgttcttatttgcttggtttcttatcgccgtgttgactcctgccagggtgattccggggacccctgtccagcgtggttgctgatgggcggatcttccaggccggtgtggtgagctggggagacgtctgcgctcagaggaacaagccaaggcgtgtacacaaggctccctctgtttcagggactggatcaaagtgtactatctggggtataggggccggggcctacccatatgtgtacacctgcggggcctaccctatcgtcctaccccagtgtgcacgcctgcaggctggagtactggaccgctgactgcaccagcgcccccagaactatacactgtgtaactcaatctctcagggctcctaaatctgcctagaaaacctctcgcttctctcagcctccaaagtggagctgggaggtagaaggggaggacactggtggttctactgacccaactgggggcaaaggtattgaagacacagccatcaccccgcacagccaccaagcatgggcacgaggcagcagtttgtgcatatctgccatcccacatgtctctaaggagcagcgggaacggagcattcaggggcctcctcagtgaaggtggtggggctgccggatctgggctgtggggcaccttgggccacgctcattgaggaagcccaggcatcaggaggaaccatggaaaacagacaggtcatgagacatgaaaattgatacaccagctgccca

SEQ ID NO: 717910 - DNA, 204 bp, Homo sapiens
  misc_feature (176)..(176): n is a, c, g, or t
gtgccatatcctatctattgacagtaaatggacagctcatgggaggccaagtggtggatcacctgaggtcagaagttcgagaccggctggcaacatggtgaaaccctgtctctactaaaaatacaaaaaattagttgggccgtggtggtgggtgccctgtaaatccccagctactnccaggaggctgagacatgcatattcagg

SEQ ID NO: 717911 - DNA, 128 bp, Homo sapiens
agatgtgcgtatgtaagcactagctttctcgggatctgatgcgcgctggttctcggctggtacacggcacctgagtggcacatgctgctcggccgagatacatcgaacgcgcctgtggtcgtgagcct

SEQ ID NO: 717912 - DNA, 388 bp, Homo sapiens
tgatgtgaaaatatgtctttatttctcgtgggtaaattacgaggagtagaattgcggggtcttatagtgagcttatgtttaactttttaaaacgtagctggcagggcgcgggtgctcgtgcgctgtggtcgcgcgagctcttaaggaggcgcgaggcgggtggatcacgaggtcaggagattgagacggatcctggctaacgcggtgaaagcgcgcgtgtgtactaaaaacggaaaaaattagctgggcgaggtagcgggtgcggtgtagtcccagctactggggaggttgaggcaggagaatggggtgagggtgggagcgggagcttggagtgagggaagaggatgggagtcgcctccaggctgggggagagagcgagagtggatgt

SEQ ID NO: 717913 - DNA, 195 bp, Homo sapiens
  misc_feature (6)..(6): n is a, c, g, or t
  misc_feature (150)..(150): n is a, c, g, or t
  misc_feature (174)..(174): n is a, c, g, or t
accatntcagtgcaccaattactgttatcgttgtgggaacaggctgctatcatggaattagatgacactttaaaatattccttccttcaatttgaccccagcgcctcgtcgtggtgagcctcatgttacacggcgcaccccagactactntcctataaattcctcctggggaancctgcctttgtatgtgggaag

SEQ ID NO: 717914 - DNA, 903 bp, Homo sapiens
  misc_feature (903)..(903): n is a, c, g, or t
gcagtcatgtcggggattcgacgatcctggcattttctacagcgatagcttcgggggcgacgcccaggccgatgaggggcaggcccgtgaatcgcagctgcagaggcgcttcatttggtagttccgtgcgcgcagtaccgaagtgggcacgcgaccgcagggttgtccaccgttcaaatacagggcatgaactcaagcggctattacaacccgtgcgggcgagtactgcattgaggtgcgcagatggaggcatctggccagctttgatgaggaccgtggccgactacgttgtacaagcagccagccgagcaccgtgcagctgcttgaggaagctggcaaggaggtagctgatgaggtgacccggcccggccttcgtggggaggaggtgctccaggacatccaggtcatgctcaagtcggacgccaggccttccagcattcgtagcctgaagtcggacatgatgtcacacctggtgaagatccctggcatcatcatgcgcggctcgtgaggtccgtgccaaggggcacccgcggtctctatccgagtgccgcagttggccggacaccctcagcaaaatgtgccatgcgcctggcctcggggggctatgccctggccaggattgtgcaccaccagatcaggcttggtgcggcccgaaatgccatgtgaccgtacttcatcatgcccgacaatatgctaatggtggacttccaaacctggaaatgcacgaactgcttgagtgcgtcccccacgggagaagccgacacttgggggctgctgcgacaggtcctgtgtcacgggggccgggacacgggtcacgtgggtaaccacaacaaaatgggtagacacaaggcggaaggggggggcaagcaaacaggtggccggggaaagttcgtttggggggan

SEQ ID NO: 717915 - DNA, 153 bp, Homo sapiens
tggggagggagggatcagaagagctcgtcggttatgtaagggatgcgtatggatgggagggcgaggaggactaggatgatggcgggcaggatagtgcagagcggtttctagtttcctggagcggtctgaagatgttcggtattgagttcagtt

SEQ ID NO: 717916 - DNA, 371 bp, Homo sapiens
gtccaaaaaaagaaaaaaagggcccaagatgaatggcccttatgccccccttagtttacctttgaaaggtttgaaaatataaagtattggctgggggtgggggttcacccctccaatcccagaactttgggaggtggaggcaggtggatcccttgaggtcaggggtttgaaccaagcctgccccacatggtgaaccctctttttttttaaaaaaccaaaaattagccagggggggtggggcacccctgtaatcccagctatttgggggggtgaggggggaaaatcccctgaacccggggggtggacgttgcagtgagttgaaagggcccttttgcattccagcctaagcaacaaagaaaaactccttttca

SEQ ID NO: 717917 - DNA, 129 bp, Homo sapiens
cttcccccttggaaatcctgggggttttcctcttccctctttgggggttctgttttgtaatttaaaaaaagctattcatccccgtaattattattattttttccaaaaaatggggcctgggcccaggga

SEQ ID NO: 717918 - DNA, 732 bp, Homo sapiens
gccaagctgcgcgggcagaagcggtccggggcctccgcggccccgcggcctccgcggccgctgccttggcacccagcgccacccgcacacggcgctccgctacgccagtgcctgggatgcaacgagccatgtgctggtgtgagaagccgcctgtcggagaagcctgcgtgctgagtgctgctcgtctgcctgcggtgcccacgtgaggatgtggccctggtggtgacgcctgccgccgcctgatgcttggctgttgctcccgccacccgcctgcctgccgccgccgactccctgcgaccccgacgtcctcggcgtccaacctggacctgggcgagcagctgggagcgctgggagacgttccagaagcggcagaagcttaccctccgagggtgccgccaagctcctgctagacacctttgaataccaggcctggtgaagcacacaggagggctgccactgtaggagcagttcgtttcgaagttagggcctcagcagacttgcatatatttgacatgcaagtaccggaattatatatgactaacataagcacatacgaatggacattactcacaattggagaacttgaccaggctactaacaatagcagtccagattggcaaaagacgcaactgttggaactaaccttgtgagagggattctgtgctacacatttagaacttttcacaaggttggctgacaacacgaggggacttcagtttaattcagagatgg

SEQ ID NO: 717919 - DNA, 124 bp, Homo sapiens
ggtcctaactcgtactccccttgctgcagctcggtgcgtatggacatgataacttggccaatgtgaaccctggccacaagtgccctggggctttccaaaggcacctcgcatgcctgtatggagc

SEQ ID NO: 717920 - DNA, 162 bp, Homo sapiens
gctgcaggaattcggcacgagctggaaatgaatcggaaccagagggatccaacaatgaggcctcagatagaggcacagaacatgggtcagatgatagtgactaggttttatttcatcatagcttcactctctctgagaaacctttttatattatgtgaaagc

SEQ ID NO: 717921 - DNA, 415 bp, Homo sapiens
  misc_feature (35)..(35): n is a, c, g, or t
  misc_feature (44)..(44): n is a, c, g, or t
tagagacacacaccagctggtcaaaacacgaattnctggggcanatctaatgagggcgttttctgggaagacactgagataaccatgacccaatgtggatgggcactgaatatggtttggctgtgtccccacccagatctcatcttgaattgtagttcctgtaatacctacatgtcgtgggagggacccaatgggaggtgactgaatcgtggtggtggttactgccatgatgttctcatgacagtgagtgagttctcatgatctgatggttttataaggggcttttcccctttggctcagcacttcttgttgctgccatgtgaagagggatagctttgcttccccttctgccatgattgtgaggcccctgcagccatgtggaactgtcagcccattaaacccctttgttctttat

SEQ ID NO: 717922 - DNA, 158 bp, Homo sapiens
accctacaagagacaacgagatgtacaagatgaagagacgagatgatgggcattgagagagactcagggaagaaggatgaaacgagcaatcatgcagcttggtacaactcttttgtcgctttatcatattctcagtcgttcaattggtgtttgctata

SEQ ID NO: 717923 - DNA, 820 bp, Homo sapiens
ccttacctctgcaggctcagaagtgcctgctccagatgcgtggcttctccagactcccagatgtctgctccgggactgagcaaatgtttaagtgtcaagtcctggtgcgctttgcaacccggccgtggtgtgcgtacactctgttgtgcatgccctgccatgccatgcccccatgtcactgcctctgccccctccagactttgtgtgtgccaacagatgcacggtggagtgaatgtgcttgaaatgtgtggcacttgcatgtgtccccacatgtgcactgtgatatgccatgtggcatttgcgagtgtgacaaaccttgtcaaatagtgcactgcatgtgatgtgcacgatatgtgttacccctgggggttgtgaatatgtgggtgctgggtcccctgtgatgaaagaccccaactatttgagacagaacatgtgtgactgcatcattgatggtgccttgggtgggcccttggtctgcggttccccacgttgggactgtccaacctgtctgagtagacggttgaagagaacgtattttggttgtttatatattcacaggcacctctgcccgaatgtgccaactcccagtgtgaccaagtcaagcaacatcagctttaccttcccttcaagaagcccatgtatgaaagtccccaggatctcaatgcctaagacctctgccactggtgatgagttgtcaagtgattgaacctagcctttgcggactaaagaagctatctcacttcccggggctcctccttctctccctgaagatcgtggccaactccttcagggaccactgttgcttgcagaattgggacta

SEQ ID NO: 717924 - DNA, 121 bp, Homo sapiens
acacccgggtgtccgcctacatcgactggatcaacgagaaaatgcagctgtgatttgttgctgggagcggcggcagcgagtccctgcaacagcaataaacttccttctcctcgggcaaaaa

SEQ ID NO: 717925 - DNA, 207 bp, Homo sapiens
cggtttaaagacctaatcaagtgctcagcataatgaatgataaagaccaaaagggcacatcatgaaatttcagaatgtggggaaaacaatctaaaacatctcgagaggggcaaggacacggtatatatataggatatggtttcacactagtacagtagagctggaggcaatagaggatacctcaaatttggaggaaatgttataact

SEQ ID NO: 717926 - DNA, 922 bp, Homo sapiens
  misc_feature (922)..(922): n is a, c, g, or t
agcagtggctcacgcctgcaataccaacactttggcaggccgagacagaaggattgcttaagcccaggaattcaagaccagcctgggcaacacagcgagaccccgtctccacaaaaaataaaaaaaattagccgggcatggtgacaaacccatttagtcccagctactgaggagactggggcgggaggatcacttgagtccgggaagtcaaggctgcagtgtgccatgattgcaccacggcactccagcctctgtgacagagtgagaccctgtttaaaaaaaaaacaaaggtgtgtatcttccatggttacttaatttttacttcaaaagaaaacctgtaagcaatttttgaaccctagtttaatgacttgcatgcctaagtgtatgtagatcaaagctgaacacaagtgtctgcaattcatgcgcggaatgcttcagaaaattcacactgagttgatgggccggtaccgtgatcacacaattgctagatatgggcataacagcaagttaatagccaggtccaggcagggtggctcatgagtgtaatcccaagcacttctgggaggcccgaggtggccggatcatctgaggtcaggagttccagaccagtcccaccaacatggcgaaacctatttccactaactcaaaaactttagcccagggcggtgatgggcacttgccttggatatcccaggcgctggggaacggcttgcaacattaccagggcacaaacccacccacggcccgggttaatactggaatttcggtacgacaatacgcatttcgccactgtgggcccacgcttggccttgaaccgtctgatctccagggtaacccggatgcccatgtgctttcacaaggggcgggacaacagacgagttgagccccggtgcatgtgccacaaatttcattctcaaggtgn

SEQ ID NO: 717927 - DNA, 240 bp, Homo sapiens
aggtgcttcaaagtactttgggccagcaggagccaggccgtggcctgctgactgcatttgccaaatgactaccaatgtttagctgaaagcagagaacccagcaaaggattttgggaaggtcctgggggatggcagagccagcaaaaaaagggtatggatcccccaggcataggatggaacagagcactattgaccccagtgaactggggcatgggcaatcaataaacacatattagatta

SEQ ID NO: 717928 - DNA, 539 bp, Homo sapiens
ttggggcccattcagtgaggtgtacaggtgatagttctcacgagttcagatgataggaagcacatgccaaaaggtaggggcaggacagggaaaaagtactaaagcaagcccctagagtgctaatttacccatgtatggtaagattcaaaccaaaatacagggaacaagcagggtatgaggtcctagtaaatgaactaaatacccagaagtttccaatattaacattaacagaccatccaatattaacagaaacccagttcaagaaggtatgcagagagcctctttcagcttccagggctcaagacggaatacaagttaaaaattttacaatttaaaaaaaaaacaaaggggaaattaggcctaaacatgttatgaagaatgaacagtagtgggaacagtgggactctaatcctagtgctccttacacacactatgtaacttaaataatttaatctctctaaagcctctgtctccttatctataagagagaacagttctgtccatctcaaaaaagtactgctgaagataacgtgagacag

SEQ ID NO: 717929 - DNA, 488 bp, Homo sapiens
caagtacaatctacagcattgaagtgtgagaatcatagacgctactgacaataattctgaaaaatacagtaaaaatgtagcaaaagacgaaggtaaagaattcgcttttgtattttgacgcatcactagaaatcactaatgtaactcaaaaaatatttggtgcaactaaacatagggaatctatcagaaaacaaggtatttcagttgccaaaacgtcgctgcatatactttttgacgcacgtggatcacagattctagtgccagaaagtcaaatctcaccagtcggagaagagctcgttagtttaaaggaaaaatcaaagtcctcgctgtaatttgctactgcttcaaaatatatcaaaaacagtgacaaagggaatagaaataatagtcagcttgagaaaaactactcctagcaaaagaaaaatgtctgaagcatcaatgattgtttctggtgcagatagatacactatgagaagtccagtgctttt

SEQ ID NO: 717930 - DNA, 468 bp, Homo sapiens
  misc_feature (82)..(82): n is a, c, g, or t
tggtgtctagagtgatccttctctgatcgctcgccaggtcgcgcgctcgcaagctcacggaccaccaaatgcatctcaatgnacacgcatggaacatgatgttacattcacaatcgctggggataaggctacttaacaaggaggacctgagagtactctggaaaaggagtccctggatttttggaaaatcaaaaagaacctctggctgtggacaaaataatgaaggacctggaccagtgtagagatggcaaagtgggcttccagagcttcttttccctaaattgcgggcctcaccattgcatgcaatgactattttgtagtacacatgaagcagaagggaaagaagtaggcagaaatgagcagttcgctcctccctgataagagttgtcccaaagggtcgcttaaggaatctgacccacagctatccccatagaaggaattcatgagcgatcagagaaagggtacgag

SEQ ID NO: 717931 - DNA, 473 bp, Homo sapiens
ctgtgtcgagagtggagaatagaatctgttttcaccatgttgaattatgagcactaacgggatatctacgttgacatgtccagtgtacagctattcatactgaaactctgaggcaagaaattgcttaatttactgaagtgtcaggagctaatggtctttcctaaccagcacccagttcctacttgctaggttgaattgtgaatgacgatcacccactttgaaaagggaatggaaatcaataggatgggctgggcctgcatgggattcactggaaggggaagagagcaaggtgaccctgaactagttcatgggtaaggacaaagacagagggacacagccaaaagaccagaaggccagaatgagaaatagcaaatgggacaaagatctaaatcaaaggttcatgccccaaagggactaagagaatggtgctgctgaacggtaagagcacaggccagctagaagggcttgagtag

SEQ ID NO: 717932 - DNA, 163 bp, Homo sapiens
gtcctagacaatgtactcaggtgtggatgagtggtggagtgtggccgtgagacacccagagtaggacgttcagaggctactgcaaacacaggtgtctgggctcaggagtggccgaggagatcaactgacatggtcaatctaaggggcggactatgtgtggggt

SEQ ID NO: 717933 - DNA, 215 bp, Homo sapiens
catgtagtgaggaactagatgggtacaacagtctcagcttcactgcaggtgtcccagtcagatccaggagtgggcgccctagcttggcttgctagtcctggtctagagctatgccactaaaatatctaatcctaattcttaggtccttgccggtgagatatgaggtcttagagtagagcgcagagctcccagcccttctcctcattacatggcat

SEQ ID NO: 717934 - DNA, 344 bp, Homo sapiens
ccgagatcgcgccactgcactccagcctgggcgacagagcaagactccgtctcaggaaaaaaaaaaaaaaaaaggtcccagtaaagcaatttttaaaagagcccaggtgtccgggtgtccctataatcccagcacttgggaaccctgagatgggagttttgtttgaccccgggatttcaggacgggccggggcaccataggggggctccctctctactaaattacaattaatttagccgggtgtggtgtcacttgcctgtcgccccagctactctggagggtggggctgaaaggtggttgagcccaggaggccaaggcagcagtgaccatgatggtccactgca

SEQ ID NO: 717935 - DNA, 177 bp, Homo sapiens
ctgaatcctctctgcttcgtccttcttgagtgcgtctcaaccacagtgcgtgaatccagatagtttctaaataacgaacaggccaaaaatcagtaaaacgagtctttttttgcaaaaaccaagttaccattttactgacacaattatcatttgtggggaaaaggcacaggctcgagg

SEQ ID NO: 717936 - DNA, 381 bp, Homo sapiens
tatgatcatgtataagcatcaccttttctctgcgcctcaccaggatgtttatattttgagtttataataatagccatttcgactggtgtgagatggttatctcactgtggtttcaatttgcatttctctaatcagtgatagagtttttcatatgcttgttggctgcatacatgacttcttttgaagtgtctgtttatgtcctttgcccattttaatgggattgtattcttcttgtaaatttgcttaagttccttatagatcctggatattagacctgcattgtttgcaaatattttctcccattttgtacattgtctgtttactgtgttgatagtttctttagatcgctgggttctaatggaacacagaaatgtaaacagc

SEQ ID NO: 717937 - DNA, 793 bp, Homo sapiens
ggcccacggcccgacatcgatgccaggtacgcaccgtcaccggcagcgcctgtaccagctcgtcagcacccggcgcgatcccgaccgcacgttcgcgatcgagtttctcgatccggtgtcgatgcgtacgcattcactttcggttgaacacgggcgccccgtcatccgcgcaccgtcttccacccgcattccgaaggagcaaacgatgaacccgattcccccccgcgatgccgcccgcgacggcgcgcggccatgctgcgccgcatcggcgcgatcgccgtccggccccaccgtgttcggcttccagcgcatcgtcaattccgccgaaccgatgcgcaccgtgcccgcgccgacgctcgacgaaacgcccggcgcgtcgcacgacgagacggccgtgttcgccggcggctgcttctggggcgtgcagggcgtgttcgagcacgtgaagggcgtgaagcaggtcacggccggttatgcgggcggcgcgtccgaaaccgcgcactacgcgctcgtcggctccgggctgacggggcacgcggaatcggtccgcatcgtctacgacccgacgcaggtcacgtacggccggctgctgcaggtgttcttctcggtcgcgcacgatccgaccgagctcaaccggcaaggccccgacgatgggccgcagtaccgctccgcgatcttcccgaccaccgcgcagcaacgcgcgtcgcgaccgcgtacatcgcgcagctcgcggcgcgcacgtgtttcccgcgcccgtcgtcacgcgcgtcgagcctacaagggttctatccgc

SEQ ID NO: 717938 - DNA, 195 bp, Homo sapiens
aggcgactctagagtgatccctaaaaaaaaaaaaaaggttattggctgatatttccacagtggttctggcttgaaatggtaaaatcccaattttctattgtaataccaagatttatcctaaattaacaataggcggggtttctaataagctttgcatatatggtcggtgtgtataatcttcgatttggacgcgtt

SEQ ID NO: 717939 - DNA, 337 bp, Homo sapiens
cggactctagccctcatctgccaggcaggccaaacgacagaccctcactccagagagtcagggagctatggatagtgaaacgggcctggtggtgcgatacagctatatagcaaacaccagtcccctcccacaaggcatcttcaattccaaaagtgaccctattctaaaattaccaagtggcaggtggccaggccaaaaatccatatccaatcagagctaatggactgtaagtagcgatttcctcatatatagctgcagcactgctatgaacaccctgggtcggtggtttgagatttatttaactaggagaggtcacggcaccccagcaccgcaagca

SEQ ID NO: 717940 - DNA, 456 bp, Homo sapiens
  misc_feature (339)..(339): n is a, c, g, or t
aagcaagtaaaacaaccccaagccccggattatgccaagaagaaacggacaccttacccagacctggacgtgaagttgattgcaatacattcatcgccattcacctctcctcaaccagcggcaccatcacatcacgcgaccaggaaaccatcacctgttgtccggccgtgagcgtggcaggcagttcttcgcctgtcatattggcctgacttacaagcagtttttcaccgccgttcaatttcagttcaaaacgagttgccgcgccctgatattgcaccgcctggatcgtgccattggcctgcagttcaccaggggtgttgaggcggatatgttccggtngcagggcgaagcttcccgtcatgccacaaagtttctctgccatcagtccattaaaaacattcgatgtaccaacgaacccggcaacaaaccgccgtcgctggcggcatatagagattg

SEQ ID NO: 717941 - DNA, 308 bp, Homo sapiens
  misc_feature (247)..(247): n is a, c, g, or t
  misc_feature (279)..(279): n is a, c, g, or t
  misc_feature (288)..(288): n is a, c, g, or t
tgaagctcagagaagttaaggaactcactgggtgcagtggctcacgcctgtaatcccagcactttggcaggccgaggtgggtggctcacttgaggtcaggagtttgagaccagcctggccaacatggcaaaaccctgtctctacgaaaaatacaaaaattagccaggcgatgtggcacgtgcctgtaatcccagctactcaggaggttgaggcacaagaatcgcttgaaactgggaggcagaggttncagtgagccaagatcatgccactgcacttcanccagccttnggtgacagagtaagaccctt

SEQ ID NO: 717942 - DNA, 230 bp, Homo sapiens
agagtatcccgatcttctgtgatgacgcaggacgcatacatagttggcttcatatatgcaattttcaacgtgacggtctgcctaaccaccccgcactgacaaaaatcccatgtgctaaatataagaggaataatattttcagcttgatcaaccttcatccataattacagctttgccatgtctggaccaggtaaagatgcacagcaacaggccaagcaacgcaaccaagc

SEQ ID NO: 717943 - DNA, 689 bp, Homo sapiens
ccgccccagccctgtgcgccaaaggatatcgtatgttcatggtccaaacgctcggggctggtgctggctgactttgtgcgaagtcgtgtggtccccgaccggtgaggaatggcgtgcagcggcggcggctgtgtgtgcggcgacgaggatgggagcttggtgcatgcctgatgctgatgcctggcccctgctggtgcaagagatgggctggatggctgcgtgcctgcgtcctgaagtcctgccctggtatgccccgctggcggcccctggtgacgcatgtgggacagctgaggctgcccagtggcgctggggatggctgccggctgcgcatgtggtggccccccgatggcccatgtcggagccagggtgcctggcgctgggagctccctgctggacgtggcggagccgggaggccctgggctggctgcccgagagtgactagcgagacggtgacctgctgtctcttttcggagcgggacgccgccggctgcgccccgggacgccagagaccccctggccggggcggccctggagccggcgggcgtgccgaggcggagtcgcgaagcgcgctcgcgtgtgctgctgctggagcaggaactcaaaccgtcacgtactcgctgctgaagcggtcaaggagcgctcgctggacacgctgctggaggcggtgagtccgcggcggcgtgcgggcg

SEQ ID NO: 717944 - DNA, 90 bp, Homo sapiens
  misc_feature (27)..(28): n is a, c, g, or t
  misc_feature (61)..(61): n is a, c, g, or t
tctacaaaacagatagagaaaagtacnncagaaactagctcgggaatggactcagacgtangcgatagtaagtctaaagaagtctattcc

SEQ ID NO: 717945 - DNA, 1487 bp, Homo sapiens
cgttttctgaagaacgcacccgtctctactatctccaccttacagcctctggacgcctgtttctgtttctcacgaggtagtggagtgttctttcgagctacaccccaacaacagcaggcggggtcgtgttttagtctccagcccactgcctgtgtagccagcaccacgtgttgctcagggtcgctcttgtttgagtagacgcagtggtgccccgtgcctgttgtggaggtagtacgcccctcttgttgtctgggttgttttctgttgtctcagcgttggttcatcacgcggagccgccagttttcctcccggcttctctcctgtgttgggtttgtcttcgcggttgttacccctgctctgtcgcgcctcttgtggtgtaggagtcaccctccgttggtcgtccaccacctccgggtggcccctctgttgtggtacccctgtgggttcacgtcaccgcgcgctgccactcttcttacctgttgggtttttatccccccccacatgattttgttgtgtggcacgaacccccttctggggggtacaacacaagcctcctagtacccccctcgtggcgtttttttatgaagaaaaagtgggggtcgcctgctcgtgcggtgtgcggccgccccccaaagctcgcttgtggtgaggtcgttcctctgcacgaggggtgtcccacccccctgtgtgctcccccctcttgacagcggcgtggtgctacatacccccctcgtatgatattcctttggggggaccccccccgccaccgcgggttacgcacctctcctcccggtcgctcgaagatgcttttttcgacgccctctttggtgcacacacactgggggccgcccttccacgcggctcttccctctcttcgggtggtcggagaacatttttccctctccgcaaagttgtttgcgaggagagattggtttgccccccccccgcgtgtgctctctgggagacctcctgggtggctcctctttgtgtctctcctccgggagggccccacgcacccgcacagaatgttgttccggacgccacgacggccctcttttttacccgcggctctctccacaacttctggatgttgtgtctccccggccaccccagccctcgtggtttggtgttgcaccccgcgttgctcctccgtggggcccacacgtgtcctcccgcgcgcacgcataggacccccctttggggctgaatcctcctctcggtggggagacagactctttccccgcggctctcaagccttttcccctctcatgactcgggccccccccctgggttgtgatgtccccctctcctcccccacgcttcttgcagccgccgcccgttcctcatgtgtggcagcgtagggggggaccccacaactgtgtctctgtcccctggtcttccacacgaagcgggggagcccccgggggggggggggggggttttttgtggaattttttaaaaaaacccccccttttcctcccccccca

SEQ ID NO: 717946 - DNA, 291 bp, Homo sapiens
  misc_feature (12)..(12): n is a, c, g, or t
  misc_feature (76)..(76): n is a, c, g, or t
  misc_feature (174)..(174): n is a, c, g, or t
  misc_feature (248)..(248): n is a, c, g, or t
  misc_feature (274)..(274): n is a, c, g, or t
  misc_feature (286)..(286): n is a, c, g, or t
ccgcctgctttncccccacgccgccggaagccctgcacacgatgcaggaagtgggagatgctctgggtgtcggggncctggtgcaccgactccggctcactgggtgtccagcagcggggcggtgagcaccgtccagcgcactggctctggcggttcaggaagccagcttggccnggacgtctgagtactcggccttgctgtcgttggcgtctgctgcataggatggctggggagatgccagcttcctnttcgccgccgtcgtttttttacctcngcatggccatgnggccg

SEQ ID NO: 717947 - DNA, 118 bp, Homo sapiens
aaaaaaagagatgagccggtccgaagcgactcgtaaggggtggatttttctatgtagcgtgagtgtggtagtcaaaatgtaataattattagtggtttccgccgtcggggtcatcagg

SEQ ID NO: 717948 - DNA, 490 bp, Homo sapiens
actgctctatgaaaagcaatgttatactctgggagttgaacacaagcctcacaaaggagtttctgagaatgcttctgtttactttttacgtgaggatgttcccgtttccaaagaagtcttcacagagttccacctatccatttgcagatgctagcaaaagagagtttcaaaactgctccatcaaaaggaatgttcaactctgtgagttgcatgcaatcatcacagagaagtttctgagaaggcttctgtctagattttatgtgaagatatggccgtttcgaacgaaggccacaaagcgctcccaatatccacttgcaggtcctccaaaaagagtgtttcaaacgtgaactaccaaaggaaggctcaactctggactttgaatgccaacgtcagaaggatgtttctgcgaaagcttctgtttagttaggtgacgttatcccgtttccaacgaaatcctcagagaggtccaaatatccacctgcagagtcta

SEQ ID NO: 717949 - DNA, 185 bp, Homo sapiens
  misc_feature (28)..(28): n is a, c, g, or t
  misc_feature (177)..(177): n is a, c, g, or t
atgaggctgaacgggatgttgtccaggntgggcattgtcaggaaagctgcagagttattgaaccacttggtcacctttccctgtgggtccaccaacttggcccccaggtagagctgagatggtgtcaccctcgagtggcaggatacagaatggtcaaactccatgacggtcaatgcntgagggaa

SEQ ID NO: 717950 - DNA, 243 bp, Homo sapiens
tcggagggcgaggggctgcgagaggcagggacccggaaacagcgtatcactgagaccgagtcggcttatcaggagctccaggctcagaggtcggatgtctactgcgacctcaacacacagaggccgtattacaaattagccctaatcatgacagtcagcaacatgatacctggatccagccattcctgaagcccaacctggacctcattccaagccctaccgcgatacatacccacagagtgc

SEQ ID NO: 717951 - DNA, 437 bp, Homo sapiens
acatggcggtcgattttacaatcgatcgttgactggtgacaaccctgtgtgggagcccgacgcgggcggatcacgaggtcaagaaatccaaaccatgctggctaacatggtgaaacgccctctctactaaagatacaaaaaattagccaggcgtggtggtgggcgcctgtagtcccagccactagggaggctgaggcaggagaatggcgtgaacctgggaggcggaggttgcagtgagccgagatcgtaccactgcacctccagcacgggcaacacagcgagactccatctcaaaaaaaaaaaaaaaaaaaaattcagatctcgtgagaactccctcactatcatgagaacagcagggggggaacgggcccccagtgatctgatcacctcccaccaggtccctcctttgacacgacacatggcacgcgacatcgccg

SEQ ID NO: 717952 - DNA, 1151 bp, Homo sapiens
  misc_feature (299)..(299): n is a, c, g, or t
  misc_feature (372)..(372): n is a, c, g, or t
  misc_feature (501)..(501): n is a, c, g, or t
gccagagacgataggtgtcgtgaaaaaataaccctaaaagccagaaatgggactgggaagcgactcatatcagacattgttcgctctattggcatcacggtaagacttcgaggctaacgtcgctacctacctactggtctagtcgtgatctatacatactgcggtgtgctatctgcacctacatacacgaaccgattcgcacaagaactttgaagatacggacgtgcctagcatgatactgtgcgaaacacgagtggcctcccgtgtacgaagttactgaccgtgggcgctacctatgngcaatacataacctgggatagacgtcgttgcaagccggtagtagagcggattgcgctcaatccatcgccattntcgtagtaagtgcgtgcacattagttcgcgaaaagacttgtcgcacgtaacacaaagctagaggataacactaatgttggaaccgtgagtctacttagtcatcgcacccgatgtgcacaactaggaaanggagctctctaatccacagaacaagtggcattcactattgggaacgagtcgtcccaggcaatgactcgtcgcattgctcactttgtatttggttgcgttgccttgactaggttcgtgcttgagactttgttgacacgcctgggttcatacgtcctcgacaggacactgggtggcaagaacgctcgcatggagacctagtgcgccctcttctcgtccatttacgaccatctcgagcctgttagaacaacatacctcaaatgcgttcgccgtgcttttgacccaatatgatggcatttcccaaccttgcagcttccgagcctctcattagctcacgagaggcaagcattattgcgagcggaaaaattagttcaccggggaaggtcacgagctcactttgacaatttacatggacacacactcgtggcattacatcccccggacccctagataagccatttttgtggcgcatactcttccttggctttgtgacacttcggttgcactacatgctttgccttgggaagcccccattgttgccttaaacaattggcccttgaggtgtccccgaggggagtgggccaactggtgccaccccggtaaacagggactccgccaatgtccccgttcgtggcacccacggttggccttga

SEQ ID NO: 717953 - DNA, 222 bp, Homo sapiens
agtcttactacacgctgtaagacaaccttccatggagcaggcaggaaaacaattgtcacaacgagacatagcacacagaaggacaggcagctgaggaaaccagtttgcaccgcacactgacctcaggatacctagcctcgtacctcttctccgtccatggaatctatcatgctacacaccctcgaaaggtaattgacttatttatgtgtctaatgatctcga

SEQ ID NO: 717954 - DNA, 246 bp, Homo sapiens
attcgcggccgcgtcgacaatttattaaaaacctttgatattctgctttgtaatcaatcattttctcttactggaatgtttatgaaacacaaattgggaaattcgtaggaaaatgatttcatatttaaaaacaacattatgttatgatttcataaggtaatcccaatagcagtaaccgacaaacttaagttgcttttttagattcaagagagctaaaatagctctttatatttaaaacaaaacgat

SEQ ID NO: 717955 - DNA, 128 bp, Homo sapiens
gcaatctccccatgaggaaagcaagcctgacccaccgttgacacattcagctcacatggaaccaccacaggcaggccctgtccatctgagcacacactgaatgtttttgcaacctccttggtataaag

SEQ ID NO: 717956 - DNA, 137 bp, Homo sapiens
gggcagttactcctcctcctgaatatagtggcactataaatgggtggacaggtggatggatagcataggtcgatggaaggacagatggataggatagtagtaggtagaaagggtgtatagtatgtatagtgtagtat

SEQ ID NO: 717957 - DNA, 201 bp, Homo sapiens
cccgtcaatttctacacatgatggattttgtggatatgtgttgcctgtgctaagtgtgttttgcacatgtttttaaagcagtttgtgtttggactttgcaatttctgggcaaatggtgtattttgcagttcaatcacagtcacccaaggcttgctaactgctgagtgaggcttgaaacttgcaagtggtgtagaaattgaa

SEQ ID NO: 717958 - DNA, 154 bp, Homo sapiens
gcctggaattcctgctgctgaaggttcggtgctttgacagattgccttggacttggtcagaagcaagaagttatcatcaccaatttcctttgtaaaggacctctgttgaagaaaattttgctgaaaataccaaaccaaaagggtggcctttcgc

SEQ ID NO: 717959 - DNA, 349 bp, Homo sapiens
tgtgtgtatgtgtgtcagtgtgtctgtgtgcatgtccatgtgtatgtgtatctgtgtctctgtgtgtctgtgtgtgtctgttcacatgcctgtgcatgcgcacaggcatgtagtgtgttccagtcagttccattggagttccaggagcatgggaagagcgttattttcaaagctgtgaatgatagttacattatttttctctcataggcacccacagaattattaagaggcttccaataaaggacatctccaaaacagctgtgattatggtcaaatagtggtgactggtggatttattttctgtacattttctgtcgacgcggccgcgaatttagtagtagtagtagta

SEQ ID NO: 717960 - DNA, 585 bp, Homo sapiens
ttaaattaaaatagagaggtaggcaccacagatgccagaggaccactgtggtttttggtggacggccccagaggaattcagggttaaaccttgagtgcctgcgtccgtgagaattcagcatggaaggtctctactatttcctgggatttctgttcctggttgcaagattgccacttgatgccgccaaacgatttcatgatgtgctgggcaatgaaggaccttctgcttacatgagggagcacaatcaattaaatggctggccttctgatgaaaatgactggaatgaaaaactttacccagggtggaagcgggaagacatgaggtggaaaaactcctggaagggaggccgtgtgcaggcggtcctgaccagtgactaaccagccttggtgggctaaaatataacattggcggtgaacctgatattccttagatgccaaagggaagatgccaatggcaacatagtctatgagaggaactgcagtgaggctggttaatctgctgatccgaatgtttacaactgggcagcatggtcagaggacagtgacgggggggcaccggcaaggccataatcggtttccttgtggg

SEQ ID NO: 717961 - DNA, 236 bp, Homo sapiens
tctaagacttacggaatggagaaatttgtatctacccatccaacaaagatctatatcagaacttacaggaattaaatcaaatttacagaaaaaaacaatccataaagtcagcaaggatatgaacagacacttctcaaagaagacatttatgtggccaagaaatatgaaaaaactcaacatcactgatcatcggagaatgcaaccaaaccacaaagagatagcatctcattcccagg

SEQ ID NO: 717962 - DNA, 1187 bp, Homo sapiens
  misc_feature (23)..(23): n is a, c, g, or t
  misc_feature (102)..(102): n is a, c, g, or t
  misc_feature (1187)..(1187): n is a, c, g, or t
cgctctgtgcgcatctggtgttncaccatgacagctgactgccacccatgtgtcccacatataccactgcatgctccactgccctattcgctcctcgtgccnctgcaaatggtgcaccctgcgacgacgagtaacgactaacctacttataaaagtattgtaccttattgtggagcattcttggttgtatggaacagagtaatctacctgtactacgaatttactacgaaattgagtattaatctatggaacagcaatgagcacacatatggtatgtacgatgttttgcaacaaagaatgcactccatgtgtttgattgtgacaatatcacatcaaatggcacaagcatatagtggacacaatgcaatgtggcaacatgatgctgatacctgatgtctataaaacaatacagacataatatatacgttggagcttgtagtgtgccttaataatgggtttaatggacatttgctaaaaacaatctcacattatgaaaattgtagaggctgatgggcttgaaagaacttgatgatgatctatgtcttgatagtaaacaataggtaatcatgcatatgtgggcaaataagagatgatactatgtcaatctcaagggcaagttacctacagatgaaagcaagagcttttgtctaaatgaatggtttgtacatacataagaaaaattcggaccatagatctacaatttgtttgaagactgattatcaggacaatatttaaaagagacttacctgaattgtgtctccagatagaaagtgtagacaagaagagaaaatgaattgtattccaatgacaacaaatgaggagtccatataccaagttcaccaacaagacagtaggaaaacaaggccaacggtggcgttggtcggccagacactttctacttgacttattctctactccttataggttggtcgtctacagcacttacacatgaggggagagagtagaaaaaaatagaggaattatatgagcaaaaaggggaaaaaagaaaagaaagaagagaatgcgaagtaataatagatatataaaatgtatattggtatagtttcgtattattgtggtagtgaagtaaaaatagaggtggagcacaagacaaaatatacgttgtttgtttttttcgtgttttttttgcttttttgttttcttgctggttgattattgaagagtgn

SEQ ID NO: 717963 - DNA, 139 bp, Homo sapiens
gggcgcgtggtctacggccgagtgacaaagacgctcaggctgtgttctcaggatgacccagttggagacaacagcacacacgccgttgcacgagagacccagagcactcacagctctctttgggagtgtgaggcacccc

SEQ ID NO: 717964 - DNA, 305 bp, Homo sapiens
aggtctacaacatggcatcaactctagggaccccaggtactaggctattaacactggtacatgactgaggacgagatgtctaggaaaaacatatctaactacataaaaaaaaaaatatgaagggaaatctattcaaaacaacaaaaaaagatacaccaacaatacaaaatctagaatatttactggtagaaaatttactgtaagaaaactatagtgtttcacttaaacagcataaggttaaggaaatatgatttctttctaaacatcagttaaagtgcaactgcacttctagtgggtagagcatt

SEQ ID NO: 717965 - DNA, 957 bp, Homo sapiens
  misc_feature (38)..(38): n is a, c, g, or t
  misc_feature (66)..(67): n is a, c, g, or t
  misc_feature (932)..(932): n is a, c, g, or t
  misc_feature (939)..(939): n is a, c, g, or t
gatgaggcagatctactggagtggagagtaacctggancagatcgaggtggccaagctggatgggnncctccggaccaccctgctggccggtgacattgagcacccaagggcaatcgcactggatccccgggatgggatcctgttttggacagactgggatgccagcctgccccgcattgaggcagcctccatgagtggggctgggcgccgcaccgtgcaccgggagaccggctctgggggctggcccaacgggctcaccgtggactacctggacgaagcgcatcctttggattgacgccaggtcagatgccatttactcagcccgttacgacggctctggccacatggaggtgcttcggggacacgagttcctgtcgcacccgtttgcagtgacgctgtacgggggggaggtctactggactgactggcgaacaaacacactggctaaggccaacaagtggaccggccacaatgtcaccgtggtacagaggaccaacacccagccctttgacctgcaggtgtaccacccctcccgccagcccatggctcccaatccctgtgaggccaatgggggccagggcccctgctcccacctgtgtctcatcaactacaaccggaccgtgtcctgcgcctgcccccacctcatgaagctccacaaggacaacaccacctgctatgagtttaagaagttcctgctgtacgcacgtcagatggagatccgaggtgtggacctggatgctccctactacaactacatcatctccttcacggtgcccgacatcgacaacgtcacagtgctagactacgatgcccgcgagcagcgtgtgtactggtctgacgtgcggacacaggccatcaagcgggccttcatcaacggcacaggcgtggagacagtcgtctctgcagacttgccaaatgcccacgggctggntgtggantgggtctcccgaaacctg

SEQ ID NO: 717966 - DNA, 410 bp, Homo sapiens
  misc_feature (71)..(71): n is a, c, g, or t
  misc_feature (112)..(112): n is a, c, g, or t
  misc_feature (213)..(213): n is a, c, g, or t
  misc_feature (239)..(239): n is a, c, g, or t
cacctgtagtccccagctactcaggaggctgaggtgggaggatcatctgagctcgagaggtagaggctgcngtgagctgagaccataccactgcactttagcctaggtaacnaagtgagactctgtctcaaaacaacaaaaccccataaaaaaacaaagcaaaaactgatggctcctcagtcagtctattagccttgttcttccctggggttncctgagggatataaacccatgccccnaggcacccatttctgattcctcctctcttttgcagttagaatggttctctgagcatccttggaagggatgaggggctggcacagtggctcatgcctataatcccagtgctttgggaggctgaggtgagaggatcacttgaggccaggagtttgagaccggcctttccctga

SEQ ID NO: 717967 - DNA, 423 bp, Homo sapiens
tcaccatcttgatgccccttatgcaggtcagggatgttcacaagaagtggccgtgcttggaagatccaggtactgtggatcatctccctcctcactcagactcactattccacctcggaatcccgacacggttgtcaggaagcgtgagaccgcaggagaccacaaagctactggctgtgatttcggtcccagcattctgcaagtggccacaagcaggagtaatgagggagtcgtctctcctgtctcggtattgctggtcacgggtgtgctggtgctggtggtggtgatgtcccagcgagtcacttcttggtggtcgtactgctggatgctgatcagctggccctcgtctatcacaccaggcttcaggcctttgatggtcgttgacctttagtggcctggtatggtagcttccttccaacggcc

SEQ ID NO: 717968 - DNA, 1512 bp, Homo sapiens
gctctgttcctccttgcggtgtctgaagatatgatcgccgatcatgaagcgagcatccgtgagactatcgcgctagctatgaaagttacatagaccagatccgactagcttcagcaggatgacgaaatgggtcatccgagtgtcctctcaccccgtggaaggctgatcaggtgcctgaagcactagtaagattcgggagaaactagcctgaaatgtacaagacgcactagcgcggatgtcatctgttgccatttcggaattcagcaactgcattttggtgtgctggtcagagacagactgcgattttggctatgatgttatgacttccctgggattgatgcatagggagagcatatgaatgccaaagcatagacttgcacagacatggcctgtactgagaagaaaaggacctcacgaaagcaacgaaacggaacgctgagaccagactgccgacacgtcagcgggactgcaatagggcaactgtcggtgctggcaaaaagccgagaggatgtcccggtgctgcatggtgtagcgtgtgcgccactggtgtgactgtttcgcatgaactgttagtaaacgtattgaactttccggtctggctacaagctgcagaagggcctaaatttttggcgccggggccgcgaccaggttgaaacgctcctgtggagcccagcgctgaaaatcacagatcaccgttggtacggaccggccgatgtggggaccccatgagaactcagggcgcgcgctgtggcaaacagggagttcagcttgggaatccaaggccgattacctacacgcgcgcacaatatgaggacacacgatgttaatcaatgtgagttgctaccgctctgtgtcgtttttttgcataacatatttcttttcgccctaaacacacccacacgcaattagtacacgtagctcgagccggcaactctcgaacataggacaaggacggggagtgtgggggtggggcgaaggcgtcattccggccgcggcgtggaggacgggcggggggaaggaggagggaacgacggcgggcccggcgccgacgcagcaagacacacgccaacgcggcaggagagagaccagacgacgctggccgcagctgcaaccagaccgcgcggcgcagcgcagacccaaccgcagccacctatacccaacgaaataactaacaacaccctcgacacgcaacgagaacgcacaacacaccacctctacacccataccgaaaatcacgctcttagcctggcgctatgcatctatatcaatctaagtcccatcgggacagggaggggtgaggcggcgtacagcggaggagccagggctgggcagcgcggagcggctgtgcaagacgggcgacagcgagcaggagggcgagcccgagtgcgcgagaaggaagcggaggagggaagagggcgggccgggcgcgtgcgccgaggacggagcgtggagaggcgggcggcagcggcagcgacggacgagcgggccagagagacgcgacggcgcgagagc

SEQ ID NO: 717969 - DNA, 127 bp, Homo sapiens
agaagaaaccagatagtagaggctaaggtagaggtgggctacgtagcctaacagtcccagagctctggggggcaccaaggtgggatgggaagatcactatgatgccaggcagttcaagaaccaaccg

SEQ ID NO: 717970 - DNA, 1077 bp, Homo sapiens
gttccaaagggtgtctgctttggccaggcgcagtggctcacgcttgtaatcccagcacttgggaggccgaggcaggcggatcacaaggtcaggagttcgagaccagcctggccaacaaggcaaaaccccgtctctactaaaaatacaaaaattagccgggcatggtggtgtgcgcctgtaatcccagctactggggaggctgaggcagaagaatcgcttgaacccaggaggtgaggttgcagtgagctgagattgcaccactggactacagcctgggtgacagagcgagactccgtctcaaaaaaaaaaaaaaaaggggagggctgccggcttttggtaccttgaaaaacgggacttctatgttatttgtcctcagggttaaattttttcccaataaagttttttaaagggaaaaaaaaaaaaaaaaaagcaacaacaacagacgacactgatccacgcacacaaaccacagaccaaaaagaaacagaacagcaacgcataaagagaaccagaaaaaatgaagcgaggcccaccaaaagacaagaccatggcaggggccccggaaaacaatctacttaggcgcgacgacgcagacatagaccaaagggaccagccctccatggcagagcagacaacaccagcaagaggccggaggtcggcagccacatcgacagggcgcagagcacgccagcacacggaactggcgagccacactggacgaaacaggcaccaatggcggcggacacaaccaacagcggagagagaaccgaagcaaagacacagaagacgcgcaaacaagaacagacaagagacgcgcggcaagagacgacagcagaggagcggggggcgcacaagacagacagcggacgcagcgcaaaggaaacaagatcagaagaagagtaagagagacgggcaacgacggaacgaacgcaaggccagaagcacaagcacacgacgcgacacaaccgacagccggcggaacatgcaggcaagcgcagccggcggacggcgaccccgacgagcgacgaacagcccgacgagcgcagcccgcacggaggggaggcgaggcaggagcca

SEQ ID NO: 717971 - DNA, 307 bp, Homo sapiens
tttgttgggcctttagccctaaaacctgcaggtggtgggggcggctaccaaaaaggaacaaaggtttttggggaggagtttgggtggtccagcccttatgattggccccccctcctgttgccccataacccttttttcatttggggtttttcatttaccctcatttagagccctttgcagagatttaaaaaaatttccagtaacgaatggattcctatataaagattatttttttactttttgcagcaaaaggaaattgtaatttttgtccagggttcaagtgaataaaaaccatgcctaaggctta

SEQ ID NO: 717972 - DNA, 380 bp, Homo sapiens
gcgtcgtgagctgggcatctgactttgggctgggcatctgatgtgggctgcgcttcacctactttttgtcctcgtcagtgcgtatctattatttacttttaagaagatgccccgcagatatgactcaagtgatgaaagcacttgaccgcgtgcaagtggaagacactcagccccgcgagaggagggcggtttcgtaaacagatgaagcccaaggtgggccggcggcgtggcagagcaaatgtgttggggctggacctgggagcctccactcagactcagccagacctgctgggctctgcggagagatgcacatgggtgcccgcaacatggccagggagcaaatgtgggaaggcggggaggccacgcaggaggagaccctg

SEQ ID NO: 717973 - DNA, 863 bp, Homo sapiens
tgcggactcggtgcatagtaggtgatgagtggcgagtacgttgaagtaagcttccataatggatgtgctagaacttcatgtaatctcgtattggtagatagcagtggcgatctggatagcttcccaagggcgatcggccccagcattgctgacgttaaacaatcgagtgacctgctcgaagttgtgatgtgcttgatcgcttgtacaagaatgtagcgctggaggtcgcccgatggaccatagggcgagtcttaacttgtataactcgtcaaggatgagcatcacgcaataataatcataatcgactggtggacacatagtatcttcgcaactctcttgaccaggttgtgctcaagcgctgcgactccatggactcttggtgtaggacatttggccaaaagtccacagaaggatgtcgtagaggtgtgagtgaatgggtgtgcatcatcaatctagatcgtatgttggaatgcagatggtttgtgaacgagaaagtgaggaagctaattggttggaggagagggtatggcgggggcatacgagagttagtcattcgagatggttacgcagcgacaggccaacacaggtgagtagcttaaataaagataacaagaagaattgtctacagaagtgttggaacgaaagggcataattcacaagatgggagctagagcgacatgctgttgtcaacaacgttgtggcccatggaggggttgcattgatctcgcaagagcatgagatgtgccgaggcaatgaatagattgtacgattagggtaaatgaatggtgggtggtggggaagtgatggtgctctgatggattttgggtgaaaggttaaaatggttggaatcgagaatgtgtcag

SEQ ID NO: 717974 - DNA, 155 bp, Homo sapiens
atattgtgacagatgattgactaagcatttcacacccttcaattactccacatcaagaatgaggggaaagcgtagtaaaagtagactactgccatgctacttatacttcttgctatagaaccaggaagcatccatatcaagagagttatcatctc

SEQ ID NO: 717975 - DNA, 295 bp, Homo sapiens
gcacactccagctggtgcacgaacggtggttgtggcaacgcccattgctgagacatcactcagcatatgagggtatcatttatgtgcttggatccagtattctgtacgcagaagagctacaaacaccgacacaggacattgactcgctcactgtcacacccatgcagacaaggcctcagccaatcagtgagactggcaagtgcaggtcgggtggcttgccggcaagtgcttccgcctgtataccgcctgggactatcagcacgagcttgaggaaaacacagtgcctgcgatccag

SEQ ID NO: 717976 - DNA, 311 bp, Homo sapiens
cccccgcgggagcagcggcaggtggatctccccggtggctcgctttgtttttgttttgttttttcttttaagacggagtctcactctgtcgccgagatcgcaccactgcactccagcctgggcgacaaagcgagactccatctcaagaaaaaaaaaggggattgcagggccaggtgcggtggccctcacttgtaatcccaacacttggagcggccaaagttggaggatcgcttgagcccaggagtttgaggctatagtgagctgtgatcatacccctgcactccaggcagggcaacaaagaccctgtttca

SEQ ID NO: 717977 - DNA, 996 bp, Homo sapiens
atttatttatattatattaattataatgctaaatattagtttattttatcagtttttgtaatactatccagtataactcacttttagtgtaagtcgtccagtttgtgtacttcattccactatatgatttactgccagtagactcatacttagttactgcgagattattctacttgcacatagtttgcatatttgtcaggtactgagactcttgttcccgaagctctagatagattatactctattttctcacagttgtgtcccgtttaaaaacattctatgagccaggagaagagattacagtattatcctgcatagccaggtgcttatgtatttcctgagtgagggattatgaaatgtatattttgccactgattatagagactgttgttccatcaatcactcttgttctgttcatccttattgtattgtccattttctctagtaatcgttagtaaaatatggagctcgattcgtatatactaagttatctgatgtataaccaaacacagatctattattttattttgtaacattagtagtcttaatcttatatggttactcaattttcaccattttgtctcattcttgattgattaacttgaactctctgaatctttttcttttatctctatccatctattattgccctctacaatctcatacttttcctttagtaacatcttgtatattcttattattattttattaatgtaacatacggtcttcatcttagttacaactatattgatatttaaatgttcttaccctacatttccaattttaagataattatttctactatactcttgtacagtttacataataaggtgtatttattttaccccgcattgtagttagtttcaaacttctcttcactatttttaaccctaccactcatgcttttattatttaccgtatattcgatttcattacctcgttcactttatggatttaagactattctctaatgtatatttcttcaggattatcaat

SEQ ID NO: 717978 - DNA, 371 bp, Homo sapiens
acggaaccagatgtcccttctcctagaagggtctcttctggccttagctggagtgtcctatttatgtgtccaatattcattatctactttatactatccttgtactgaggctactttatacaagggaatacgaaaagacacattcgtacctttgggcacaggaactggtacctggacttttttaatgttgtacttgtaactgggccctctggcccaggagtatggctgtgtgtttatcctctttgtatagcctggttcctccttcttctcgtttgcctttttctgcttctgctgcatgatctccgagtccctctgcttgcgggcggcagaagaaagcccgtcatctcggcgctttcccttaaccgagtcgc

SEQ ID NO: 717979 - DNA, 339 bp, Homo sapiens
  misc_feature (5)..(5): n is a, c, g, or t
ctttntaatccgcaacatgtctgtcatcgcccacgtgaccatggaccgtccaagtttgacagactccctggtgtgcaaggcggcctcatcgcctcggccgggccggcgagactcgcttcactgatacccggaagcacgagcaggagcgttgcatcaccatcaatgtcaactgccatctccctcttctacgagctctcggagaatgacttgaacttcatcaagcagagcaatttttgtgccggtttcctcatcaacctcattgactcccccgggcatgtcgacttctcctcggaggtgactgctgccctccgagtcaccgatgacgcattgatggtggtg

SEQ ID NO: 717980 - DNA, 776 bp, Homo sapiens
gagcgggcgtgtatgtagtgtgtgtcccgagaagcggttagatactgagactgcatttgcctttactgtggagtttggttgccggttatgctccctaatcttccttttctgacagtgcctgagcatgtgcagatgagaatctgtgagatagcgtgagctgaaaacaggtttatattgtcagagacatgccaagcgagcggacagacgggggcacagaatcactgaaggggaaaaatacagaaaatatgggtttctacggacagcacttaaagcatgactttgatagcaaagatgaaaacgaaagttggaggcatggtgtctgaggtccggcttcttatttcttagggaaagaaaccatgcaaagtctcaggaatatagaaagtagccactgggactatgtaccactgtgcagcaaacacaacaacttttggggaccgtcagagcagccaagtggccaagggcaaacaacgacgccgaattacaatctgtccagaacagctaccaggctccaggaatggataaaaactgtttcaagagactggacgtggaccagagaaacttgcgttgctcttagaatgaactcattgctagttgtgaaaccaagaacaagtaaaacatatgatgcaagtgactagaaaccccaagattccaaacgaagcacttacaattcacacaggctccctaacaggcgatggaacaccacatgagcgcgcaacacccctggacacccaaagacaatgctacaaacacgacaaaaacggtcgctcactggagaa

SEQ ID NO: 717981 - DNA, 273 bp, Homo sapiens
  misc_feature (1)..(1): n is a, c, g, or t
nttacggaggtgtacgtgaccaccgtcttcgagaactactgtggcgacattgacggtggacggcaatgctggtggagctggcgctgtgggacacggtgggccaggaggactacgaacgcctgtggccgctctcctaaccggacagcgaggtcattctcatgtgctactcgggggacaggccggattcgctggagaacataccctagaagtgggtcccgagttgaagcacttctgtcccaatgtgcccaaatccgtactgggcctggggtaccg

SEQ ID NO: 717982 - DNA, 279 bp, Homo sapiens
  misc_feature (1)..(1): n is a, c, g, or t
ntaaatttgtggctgtgttgatggtgggtgcctgtactcccagctactcagaaggctgaggcgggagaatggtgtgaacttgggaggtggagcttgcagtgagccgagatcgtgccactgcacttcagcctgggagacagagcgagtctcaaaacaaaaacaaaaagcaaaattagctgggcatggtggtgcatgcctgtagtcccggctactcaggaaactgaggcagaccacaggacggggtcgacccggccgcgaatttagtagtagtagtcgacc

SEQ ID NO: 717983 - DNA, 275 bp, Homo sapiens
aactctggccaggtagcggaagcgagcggaaacgcttaccagaaccggaacgtgtcaagagctcttgtcctgatagattacccagcctcgggtatgcctttatagcaacacaaagggagtaagacacagctacaacgaagactggaatgttttaacttcatttactctccttcatgacttattggtgactattttcatgtattgatgagaattctaccttgattgaccccatagatatgattatattgactaaacaattagtggggtttttagga

SEQ ID NO: 717984 - DNA, 180 bp, Homo sapiens
taggtaaaggctctaagactcctgagccaactattatatgtacctggcttcctaggctggggcttgaactaatgtaactgaatgccaaggagtacatgatctagatcgcagagaagtcagtctcattctataaccattgcaactacctgttagacgtccaccccaatgcaagctgtactc

SEQ ID NO: 717985 - DNA, 535 bp, Homo sapiens
gggaccagagagaatggcatggactgctgtaaagggtcacagtgttggggccttgctgtacatgatcccaatgactcagaactacattctacgcacgctggcctggtgtcctggagaccccatcgtagcacctatgtcctctacacacggcgtgatgaactatgttgcactgtttcttgaatactatgcattgactctcccatcccccgtgacgactatctccatattcatcactactagatctctcctatggtggttaccaatgcattaccttctgttccttatgatattctcattatttcatcatgactgaaagaagacacgagcgaatgatttaaatagaacttgattgttgagacgccttgctagaggtagagtttgatcatagaattgtgctggtcatacatttgtggtctgactccttggggtcctttccccggagtacctattgtagataacactatgggtggggcactcctttcttgcactattccacagggataccttaattctttgtttcctctttacctgttca

SEQ ID NO: 717986 - DNA, 351 bp, Homo sapiens
  misc_feature (147)..(147): n is a, c, g, or t
  misc_feature (211)..(211): n is a, c, g, or t
  misc_feature (277)..(277): n is a, c, g, or t
  misc_feature (301)..(301): n is a, c, g, or t
  misc_feature (322)..(322): n is a, c, g, or t
  misc_feature (331)..(331): n is a, c, g, or t
ggaaatccagctgaaccatgccaaccgcatggcgtgctgaggcctgaggaactacaggaacacccaaggcatcctcaaggataccagatccacctggatgatgctctccggaccaggaggacctgaaggaatagctggccatggtgnagcgcagagcaacctgctgcaggctgagatcgatgagctgcggggccactctggaacagacagngaggagcagaaaatccgcagaaccaggagctcctgggatgccagtgagcgtgttcaactacttgancacccagaacaccaaggcttgatnaacacccaagaaggaagcttngagacaagntattttccaaaatgccaggg

SEQ ID NO: 717987 - DNA, 123 bp, Homo sapiens
acaatgcagacagttctgtctgttcatgtacaaggtcaggaacctttgagctgcttccatgttggcagtctgcccctacctcaagacgcaaagcaaatgttagggtgaacggcatgtttccta

SEQ ID NO: 717988 - DNA, 309 bp, Homo sapiens
  misc_feature (4)..(4): n is a, c, g, or t
accntatagagagagagagagagagggagagagacaaggagacacacagagagaaacaaaagcaaagatcgatgcaaagagatggcaaaaggtcaggcgcggtggctcacacctgtaatcccagcactttgtgaggctacggcagaaggatgacttgaagctaggagtgcaagaccagcctggccaacatggtgaaaccccatctctactaaaccccatctctactaaaaatacaaaaattagccgagcatgatagcggacacctgtattcccagctactcaggaggcaggataatcttttgaacccag

SEQ ID NO: 717989 - DNA, 654 bp, Homo sapiens
  misc_feature (151)..(151): n is a, c, g, or t
  misc_feature (278)..(278): n is a, c, g, or t
atgaaccgtggaagtagggaaacccgccccctttccccgtgcaccaaagtgccactggaatccgggctctcaggaaggatctgtattcggcctcctctcccaaatggttaatgggcctggggggaggcccgctgctcttggggatataccngcgtggcgattaaaaggaagaacttcacctcttaccggagtgggttcttcggaaaggggacatgggtctgccttccggaagcagttgatataatctcgctttgtacgagtagcctgcatgcgctaanagcattactgctcttgctaaacgggaacaggcatgtcagggtcaggcatcactcgtgggcagatacatgcccaggctggcatcgagcggctggcatagaaccgatactggcacagcggtgtgtagtccttaggacacgcgcttattggcttacccgcaatcaatggcagctaagtacccatgacgtgtcactccctttcaagtttacaaagtccagcagggtcatcaaaattcacaagaagtgcactaggctcctgtcaacaacatacccagatcagctgcattatatgtacacgcccaacttttttttaaaataacatcttttgagtaccatgcaggactggacacaataatgacaatgtgtgcaagaaattact

SEQ ID NO: 717990 - DNA, 802 bp, Homo sapiens
  misc_feature (462)..(462): n is a, c, g, or t
taggcccccggagcgcctagttgccgcataagccccgcgagttcgtcagcacttgggaacattgccaggggccttctgctccttggaatcgcaaggcctagcccagcccgacacctcatagtggcaggtctctccctgaggatgctggaactaggctgctcaacggctgggggctgcgtcgcggcaatcgcaccgttctgacggatggaatggactcgcatctacggtaggccttccagcctcctgagtggacatgcgtacagcccactggataaggcgttcccgttcacaagctccagcctcagcgaatttcgaacgaggccaagaggctgtcagccgcccctggccgttactcgtgcttgtttggggaccctgaccattcaagtcttctggcaggactaattgaggaaggaagtataacgtacgggcattccgtgagatgcgacgaaggactagcgggcntgcccggccgatgcctcgcccagcgatcctcatatgtcccatcaccgattcatgcgggaaacagagctcctccgtatacatccacgctgtcgccggccaagacagtgggagcgcagccaccccacgtcacttgcagtcctggaggccagcccccactcagcatgtatgcctgggaaccttcgccctgcaaggcgtttgctatcttcagccactgggcggagctgcagccctggaggagggggagggtcgagactgcgtggtgatggggtctccgccaacacgacctgaccagggcagggctaggagctgaacagaagccagtgcctttaagtcaggttaa

SEQ ID NO: 717991 - DNA, 112 bp, Homo sapiens
agctgcccctcctttagagcaacctggtggtcccccggctcccgtggaggtcaccatacttgatgccgcaacttacgtgcggaacacccagagtcggcataagtcgcactac

SEQ ID NO: 717992 - DNA, 384 bp, Homo sapiens
tatagtcccagctactcgagagactgaggcaggagtgattgcttaacgcccagaaagttgaggctgcaatgagctgtgattgcaccactgcactctggcctgcgcaacagagcgagactcttgtcttccaagaagaacaaaaaaaaaaaaaataaaataaaaaaaagcaaacaaaagatggtcaggcagaaaaaaggggcagacagccagacaggtcacccctagaggaaggcgcacgcagacagaataggatgagatgagcagggaaggagaagtgaggtgcagagaggatgggaactacagattcagagtgggaggcctctgaacttgtacacagttccttgttccctccctaggtcagcaatctgaagatgggcttacgga

SEQ ID NO: 717993 - DNA, 1369 bp, Homo sapiens
  misc_feature (298)..(298): n is a, c, g, or t
  misc_feature (1130)..(1130): n is a, c, g, or t
acaccaggatgcgattgcccctgagaaataattgaccttacctgacgttgtacacttgcttggggttcgcttgtggactagtgtgccaacccgtggaactcttatcttgggtgaaggagcaggttgaaccccatatgaccctaaacatacggtcaaatacatctaagctcagtcatttcacaaggtagccgcagaatttcgtactatggtcattggacacaaggtcaatacgtagtgtacatatgtagcgtatcggtgtgtacatagctactacgcaatagtcgcgccagaggagccntcacctggaatatacatgcacaccataggaaagcacatgaatacactatgtacttgctgatgttctcgtgtaaaactcggagctacatagcgtggaaaactggacacaagtttggtgagcttaggtcaggataatatctctcgatgaatggacagaacacgaagaccgcaacctaagcgggcatatacctatgcggtatgcgctagaagaacacgtatagccccccacccggggaccgattgggattgaaatgccccaggtgccaaaaatccgcatcagaaattacccacatgtggatcgcgtcccaaacgtaacctcgaaatcggcgtttgagatttgcgaaattagagacctacaaattccgttatttgaatgtttggaaatcgaaatttgccatccaaggctgtgtggcccctttcttattggatgaccaaggaaaaaggagaagaacgtgaaaaccattattcctctaatgcaagtgaagacattccctattccgggggaaccgagttttagagcaactaccataggtatagcctgggcaatctacgttttgacttccaaattacgccgtcacacaatttagttaaaacatgtaacccaataaggaaaaacgatcattgtccttccaaaacgttgaaaagcaagtttaaggccccaacaggtgacaaattaagttctcccggcaacaatattttggcgacacatagggaaatagttgcatctattccgtcatcacaaagagaccgtacatcgggatggaagaacaaggcaccctaggaccatcgtttcggtgtccaaaccattaacgcttgtccatagtcgacgaagnaaagctcctctgttggaaactgttgccgtagccttggttacaacggaaagatcgcacacgtggacaacggcctaactatactcctttaatttcgtacactgggaatgcccatagcatgttccacatctctcaagtatctcaattgtcaagcaacgcccctttaacacacattcatcagagcgcacgcatattgcgtttctcacgggaacccaagatcctcttatgaaaaagcaggaaat

SEQ ID NO: 717994 - DNA, 416 bp, Homo sapiens
gcctgtagtgcatgtggcaacatcatagttcacttgtaaccttgatctcctgggttcaagtggtcctctcacatcagcttcccagatagctgggactgttggcatgtgccatgacaccttgataattttttaaatatcagttatgtaaacatgcaatctggctatattgcccagtcttcagttctacttcctctttcttttcttttttcttttacttttctttctttctttcgttctctttctttcttcttcttcttttttattttttccagtaagggggcaataggtcgcatttgtttgcttgaaagatttctttgggtgttttctgagattttgacgcacctttcttctgacctgtgtacagtgtaccctttgtgtagtcttttgtccctcactgccttccctttttttctctc

SEQ ID NO: 717995 - DNA, 336 bp, Homo sapiens
tgaaaatttggtccccctttttgtttcccccttttggtttttaataaaaattgggaaaaacttttttttggggttaaaaattggggggaaaaaaaacaaatttacctttttttataagaacctatctcacttataaaagttgtgtggtccacaatatagccaaaaatttggacccggtggtaaacccgtatgtagctcttattatcaaaaaaaactgtgtatcttgtggcactagtggggagtgatgatacgtgttttaattccactatagataattaatagtggtgtcctctcgtagtgctaatcatggcacaaaaaaaaaaacaagaagcgcgg

SEQ ID NO: 717996 - DNA, 329 bp, Homo sapiens
aattttttttttccccccttaaggcccaactattggaaaacatctcccctgtttcctatgaaacttgcttttccaggccaatcacccttgctcccttaaacttttttttttcctgaaaagttattctttttttttttttaaaaaacccccccctgccccttccccaaatccaagtgaaatagtgaaaaccaaaaacccacccccctctttttgggggtccttattaatgttttttgtttcccccccaattgttttttgcctgaataataaccccccatgtgggggtttgtatatatatccttttcccttaaaagggggttttgaaggta

SEQ ID NO: 717997 - DNA, 289 bp, Homo sapiens
cccccccccgctggttccgctcccccctggccggggtggtggtttgggcctgctgtcaaaaccctgggggggggggatggggccccccttagacccggaggaaacgggggtttgcctggggtttcggaaaaccccttaagggggggggccggcccaaccccctgtttcaaggggggtgggggggggggggccaacaaagcatccccccccctgggcaaaaacttttttttgttttttaacccccccggccccctttccccttggaaaaaaggggggtttttaaacccga

SEQ ID NO: 717998 - DNA, 890 bp, Homo sapiens
  misc_feature (232)..(232): n is a, c, g, or t
  misc_feature (737)..(737): n is a, c, g, or t
  misc_feature (739)..(739): n is a, c, g, or t
  misc_feature (743)..(743): n is a, c, g, or t
gtggacacggaacgtcgtctgtcgtcgctggcaccggtgggagctaggcgcgaggctcggagtgcggccagcgggcggaggcggtctcgcatcggcggcgacggagggctcaggcgtcgtcgtttgggtggggggccgctgaactgacaagcgacatttcagctcctttcaccctgcctggaaccccgggagcctgtgggccctgctcagcctggctgttaccatgaccaanggcctggtagcaatggtgctgggaacctcctgctgacaaagcttggactgtgcaactgaacttggacctgatgcctcagcgacctgaatgacggtccctggtgaaggagctggctgcccttccaaaggccaccatcctggatctgtcttgtaataaactgactactctaccgtcggatttcttgtggcctcacacacctggtgaagctagacctgagtaagaacaatgctgcatgcagctgccagcagactttggccgtctgtgtcaacctccagcacctggatctcctcaacaacaagctggtcaccttgcctgtcagctttgctcagctcaagaacctgaagtggttggacctgaaggataaccccctggatcctgtcctggccaaggtggcaggtgactgcttggatgagaagcagtgtaagcagtgtgcaaacaaggtgttacagcacatgaaggccgtgcaggcagatcaggagcgggcagaggcagcggcggctggaangntagnacacgtgaggccagagacagacaggcgttgacgggcttacccccagcaagccatagcggaaggcctccaggacccgggaacactgccggacaccgcggaagacacggccgaacgcagcacggagccccggacacacggacgtctgac

SEQ ID NO: 717999 - DNA, 286 bp, Homo sapiens
ctttcccagggtcgaaggcccagccttcaggcaggcagcctcctgcttccagagccctgagaccttccttccaaggcccagataatacggccttctccagggagacttgccgccccctcaagagctctagctctaactggcccctatgctggtttggcacttgatacaggtgacagtgccggcgcatctcttgcaggagttcagggtactgaccgtccaagattgagcaacagcctcgatcaatataaaaccccctgccataacccaatacgagacgcctgacact

SEQ ID NO: 718000 - DNA, 206 bp, Homo sapiens
tggcttaatttagtactgatggtatgggtacgtatgaacgtaacctgtgagatgggttgatcagcacaccgccgccgcctggcctagttaccatcacaccccgtgtgaggagcctgcagctgcctgcagcctggccccagtcaccatcaccgcaaccatgagcatgctgatggccgagacccagcatgctgcgtgacgtgcagaaa

SEQ ID NO: 718001 - DNA, 246 bp, Homo sapiens
tattctaacattagttcaggctcccaccgtcctcgccagcctgcgtcccagggcgggcgggacagcacagaggcagcgccacctcgcttgttttcaaacaaaagactattaccagttggatggacactaaaggaatcaagacagcggaatcagaaagtttggatagtaaagaaaacaacaatacaagaatagaatccatgatgagttctgtacaaaaagataacttttaccaacataatgttagag

SEQ ID NO: 718002 - DNA, 916 bp, Homo sapiens
gcatggtgccatgtgtctatagtcccagctgctcagaagtctgaggtaagaggattgcttgagctcaggaggtcaaggctgtagtgagccatgattgcaccactgcactcccagctggatgacagagtgagacgttgtctcttattaaaagacaacaaataaatgctggtgaggatgtggagaaaggggaactcatacattgttggcaggaatgtaaattagtacagctgttatggacaacattatggaggttcctcagaaaattagaactaccatatgattcaacaatcccactactaagtatatagccaaagaaaatgaaatctgtatattgaagagatatctgcaatcccatgtttattgtaacactgttctgaatagccaagatatggaatcaacctaaggtgttcatcaatggatgaatggattttaaaatgtgctatatatacacaatagaatactattcatatgtaacaaaggacaaaatcctgtcatttgcagcaatgtggatgaacttagaagacgttatgttaagtgaaataagccaagcacagaagaacaaatactacatgatctcactcatgtggaatctaaaaaagttgactcatagaggtagtatattagttagttttggatagtattaaagaaatacctgaggttgggtatttataaataacagaggtttattaggtcagggtctgaggtggacagggagctagtaccggatctggttctggtgatgttggaccaaaggttggaggatgttgacctgaaggagacgggatcaccttactaccacgtggagagagagcctatcaagaaaagaaacgagggagatgtacagagtaatattaaaggaagaagaaaagaagaggaagaggaaaacaaaacaagagtacagattatattttttttt

SEQ ID NO: 718003 - DNA, 126 bp, Homo sapiens
cccatacagagtacgtgtgcatctttacgtttgtttacatttctctcaatgtggatggtaccatatacggtctgtaagagtttgtgtgcataagttttgataacatctcacactttttattaaata

SEQ ID NO: 718004 - DNA, 1076 bp, Homo sapiens
cccagtagagacaccagtagtaacccaccatggccccctttgagcccctgtgcttctggcatcctgttgttgcttgtgcgctgatacgcccccagcagggcctgcacctgtgctcccaccccacccacagacaggccttctgcaattccgacctcgtcatcagggtccaagttcgtgggtgactacctatcaagtcaaccattacgcaccttatatccagcgttatgagatcaatgatgaccacagatgtataaagggttccaatgccttagggtgagtgccgcatgcacatcctggcttcgtctacacgccctcgtcgatggagcagtgtctgctggatacttccactaggtcccacaaccgcaagcgaggagtttctcattgctggtgaggcaccgttcccgcgaccctgtgccacaccaaccagtccctggggcgcgtcctagcaatcacgatgtgggcgaggctcctgatcgggaatgcgtcccagctggaaatggggaccactcccaattgtcaggtctatcagaaaggccaggtgcctttgccatcttgagcagctcatggcaatctacaaagctgctttgtcggatccccgaccccggcttatctcccttaggaaaatctagcacggatggacgtcttgcacatcgatcgtaccgtgcaagttctcgatggcgtcccttggcaacagtcctgaagcgttagctcagatgccggaggcttcgaccgaagacctacactgtttggctgttcaggaatgcacatgtgagtgcctggaccccttgacctccaagcggggagatccttccccggcggccattcccttgcatccgtgggcttggttcttgctccctcgtgtctattctgttgtccctggttggctgttcctccaacgcgtaagtgggctgtccccttgatctctcttggctattgccccaagggccgagactgctcccttacaaattctggctggtcccttttccttgtgtccataccggtgatcggctgttcctccctggtccctctaattttccttggtgactatcggaatcccgtcccggttcttggccccg

SEQ ID NO: 718005 - DNA, 347 bp, Homo sapiens
  misc_feature (23)..(23): n is a, c, g, or t
  misc_feature (80)..(80): n is a, c, g, or t
  misc_feature (114)..(114): n is a, c, g, or t
  misc_feature (329)..(329): n is a, c, g, or t
  misc_feature (339)..(339): n is a, c, g, or t
ccacagcttcctccttgaggggnagacccctgcccaaaatagaaaaggggcacctagagtattcagggtagataatagcnctttgatatggcctatttatggggtcctagaaanactgatggtggagccaaggtctcaggaagttgtcagtcatcatatggaatgtaagattgtcacagtccatcattgggatggcccaccatctctgcacactttggaatgtttcagtccccttcttcctaaattgtacatgctactgtagtgagaatgtgtcttctcagtaaggttcatggtactttgttcttagtacttccttatttcagagaagntccttaaagnaaatacct

SEQ ID NO: 718006 - DNA, 308 bp, Homo sapiens
  misc_feature (71)..(71): n is a, c, g, or t
  misc_feature (74)..(74): n is a, c, g, or t
  misc_feature (78)..(78): n is a, c, g, or t
  misc_feature (87)..(87): n is a, c, g, or t
  misc_feature (106)..(106): n is a, c, g, or t
  misc_feature (109)..(109): n is a, c, g, or t
  misc_feature (115)..(115): n is a, c, g, or t
ctagctctctcatgtagatatcattacaattatctttttatacatgataaaattgaaacttgggagcctgnaangaancaaatgaangggtgggggcaaagccctnatncaatanaactggtgtgcttgtgagaataggaagatgccaggagtgtgatgcacaggagaaggaccatgtgagaatgcagcaagaaggcagccatctgcaagccaaggaaagagacctcaggagacaccggcggggggggacaccttggtcttggactttccagcctccagaacagtgagaaaataagtttctgatgttt

SEQ ID NO: 718007 - DNA, 431 bp, Homo sapiens
tgcaggggacagcttattttgttatactgctttttctaatggaaataactaacattctgggggaaaaaggctggaattgtttgtcttttgttttttcggccgggggatctttattttaaaaatcacacctacttgttcccataagcccttactatcaacaagataattatttgtaatcacttttttatcccaggttgcaattgctttccccttctaagttattttcccttaataatatttatgacaccagcacactgagggtttaatagcaactgtactgaggttttcaaaaatcctgcatatatggcctcagttctttagttattcgaattatatctccctatattattttatctaccttgggttctcacaagattgccaattttaacactcaatagcacagatttctcttctattcaggtcgggtccct

SEQ ID NO: 718008 - DNA, 784 bp, Homo sapiens
catgaatgagttcactaatatgccatcttagcttcaaaaccgggacaagcgctggagatagagtcgagagggatattcgagcgctgggagctgccattcgagcccacatatatgtacatgactcctgacagttaacaataggtcaagcctgtctgacaggggtcgactcggaagactgcttgagtgaatgttatctataggcgtatcattctaatgttggactctcattgaggaaatgtggagccttatcgaagctgctcatcaccacagtaattgtgagaacatttatcgatttccggaacgtgacccaagaagagccaggtcggtcgaatgaagagagagcaggaatgtaacattaggtgcacatggagagcgaggagtgacactggtgagacaagtgggcccccggaacaagatttcccgtcagaccgcctaggcggtgatctcgtccagatcgtccaagtcaccggcatgttcggtggagacatcaggtctgctggtttactcagcagagttcagaagaatctggtcacatttgcaagccatttaatcacgtcgcagtatggggtatccatgttagacaaagatatcgtcacagtccaggatgcactgtgagagtgtgtggtggccataggagaagtctgtacgcgggggttatatcgaaaaaaatgaaagaagaggtgtgacgatacagtcgagagagtgagatctggaaaaactcctctcctgtgctcgatgattggagtggagaagatgcgtttatgagaagactggtgggtgcaag

SEQ ID NO: 718009 - DNA, 470 bp, Homo sapiens
aggttcatagcgttcagcacgatggcaaatcgctcctccagttcacctggtctggcatcggcagcttcaaagcacttgtgcgccctgaaatcggtctgctgcgaatccatgctccctggttgcccatgtcggcggcgcgccggggcgggggctgctccgggcccctaggtgcgcgtcggaaatcagaacagctcccggcggtcgctgcgccgaggcgcgacctgcccgctccccgccctccgccgcgcccaggcgggtgtgcggcggcaccgctccctagcagcgctccaagcagccccccccggcctccctcatgctctcaccccccagcgcgccccggcctcttttcctcgggaggggtagtcggcgtgggcgcctatgtgcatggttccgctgcacaccgccccctgccagagatcgcgcccccggcgcgtggtccctcctaacagcccttctgccggccgcggccc

SEQ ID NO: 718010 - DNA, 575 bp, Homo sapiens
agtggataggcagtctatgttttacattgaacttttcttcacttgatatataaagattatatataatgtacttattgatgagctctaagaaaggttaggcatattattcattaaggtggaaataaacgacttgatatatataacctggttttatcaaaaatttaatcgagtggcttgcagtatgagatcttgttcaaagagtattttcctgaaagatttatttcatgagattatgtacagatcctgtagctggtgtaattttaaaattaattgcttgtgaacctcagtttactaataatagtagtattgatctttcgctaataatgcgattgaactgattaatcaggtgtttaaagtttttataatacatactcttgcaaagaagtttagttctgaaaaatttctagatggtctcatgagtttcaaaataataatttttgtgtatgaacaaagctgttgtttttaccatgcagtattgcatgattttaagttatgtggaattaacataactgattttgttttaattgtaagttgttaactcctgtatatatcattaacataacatctgaagttcg

SEQ ID NO: 718011 - DNA, 128 bp, Homo sapiens
actataatggtggctatggcaatgtaccaagccttgatgacctccccttttcccaggtcacaggggaatttgtacttgcgatccagactggagtcaaacttatgtgccatctaactagccagcctagt

SEQ ID NO: 718012 - DNA, 579 bp, Homo sapiens
  misc_feature (176)..(176): n is a, c, g, or t
  misc_feature (180)..(181): n is a, c, g, or t
  misc_feature (186)..(186): n is a, c, g, or t
  misc_feature (196)..(196): n is a, c, g, or t
  misc_feature (200)..(200): n is a, c, g, or t
  misc_feature (202)..(202): n is a, c, g, or t
  misc_feature (206)..(207): n is a, c, g, or t
  misc_feature (209)..(209): n is a, c, g, or t
  misc_feature (211)..(211): n is a, c, g, or t
  misc_feature (213)..(213): n is a, c, g, or t
  misc_feature (215)..(215): n is a, c, g, or t
  misc_feature (221)..(221): n is a, c, g, or t
  misc_feature (227)..(227): n is a, c, g, or t
  misc_feature (248)..(248): n is a, c, g, or t
cttttggggttttaagaattttttgaatttttatagccggcctcaaatttggatccttattttttttattttgtcaggggcccaagataaccttccttttttagccttcttttttgtccccaccatttttatttgggggccatggaattggaaaaaggccgcatgatctttttggntccnntcagngtttaaggcncccngnttcnntngntngnatcccncagacnatttccctcatcctatttaangcagcaaatttttccttagttgaagagagtgggtttatttccctttaaaaccccaacctatcctgaagggttggtcattgtttgcctttaaaatccttcctcttttttcctcctctattttttaaaaaatgatgggggtaagttaaacccaaagctccctttacaaaatatttcctcagtactttgcagaaaacccccaacaaaaatgcccttttaaaaaagggggatttttttttttaaaatgtaagctcctcaaaagcagggacaatgttttttgtatgttttattgtgcctagtaccctgtaaatgctcaataaatattgatgatggg

SEQ ID NO: 718013 - DNA, 151 bp, Homo sapiens
gggataagccgctaagttctctgccgttgtaggtcaggaggctgcaggcctcttggaactcttgctaacctgttcagagccaggaagtgagactgcacagtatatgaaaagcacagccgtcaggtccggctctgcgtctccctctctgcag

SEQ ID NO: 718014 - DNA, 394 bp, Homo sapiens
gcctcatgctatctacccaatctgaacgacaccgagagacaaaaagataaaacataggacacgaacgactgaggaccgaagataacgggaagacacaacaatgaagtcccagggacggctgactaactatctaaaagtctgccatgccaactactggaatcctagaagacaatcatagggtagaacacgtatttgcagaaatactatgcaacaatgtctaaaattgggagaaatatattgttatacaaccttaaggaagagtaatacaacttcaaacaaaatacagataaggcatacctacccctatctataagagatcacctttaaagagacaggtagataaaccagtcaatgaatagaaggatacataccatgcaaacagttaatcttaaga

SEQ ID NO: 718015 - DNA, 731 bp, Homo sapiens
  misc_feature (176)..(176): n is a, c, g, or t
  misc_feature (180)..(181): n is a, c, g, or t
  misc_feature (186)..(186): n is a, c, g, or t
  misc_feature (196)..(196): n is a, c, g, or t
  misc_feature (200)..(200): n is a, c, g, or t
  misc_feature (202)..(202): n is a, c, g, or t
  misc_feature (206)..(207): n is a, c, g, or t
  misc_feature (209)..(209): n is a, c, g, or t
  misc_feature (211)..(211): n is a, c, g, or t
  misc_feature (213)..(213): n is a, c, g, or t
  misc_feature (215)..(215): n is a, c, g, or t
  misc_feature (221)..(221): n is a, c, g, or t
  misc_feature (227)..(227): n is a, c, g, or t
  misc_feature (248)..(248): n is a, c, g, or t
cttttggggttttaagaattttttgaatttttatagccggcctcaaatttggatccttattttttttattttgtcaggggcccaagataaccttccttttttagccttcttttttgtccccaccatttttatttgggggccatggaattggaaaaaggccgcatgatctttttggntccnntcagngtttaaggcncccngnttcnntngntngnatcccncagacnatttccctcatcctatttaangcagcaaatttttccttagttgaagagagtgggtttatttccctttaaaaccccaacctatcctgaagggttggtcattgtttgcctttaaaatccttcctcttttttcctcctctattttttaaaaaatgatgggggtaagttaaacccaaagctccctttacaaaatatttcctcagtactttgcagaaaacccccaacaaaaatgcccttttaaaaaagggggatttttttttttaaaatgtaagctcctcaaaagcagggacaatgttttttgtatgttttattgtgcctagtaccctgtaaatgctcaataaatattgatgatggggggcagtgagtttttattataagggggaaaaactgaaatccccaaccctgttttgttggttgttttattatgcccccaaattaaattgggaaaaattggcccttttgaaaaattgtccccaaaattacattcaaataaaagggcaatgggga

SEQ ID NO: 718016 - DNA, 1026 bp, Homo sapiens
ggaggccttacccccttttcccacgggacggcgggaatgattcttcaaagggaatcgagggcgctttaattgggaaacataaggtgtcccggagtagccctctccaaattgatgcgctttgccctctggggaaattcattgtacccccatcctttcctcccaattcgctgggctgtgttacgctaagggaagggatactgccaagattggccttactcactggcaggcccactgcccaggggtcgcgtccaactggtccttccctcgggggaaccccttctgctggcaggaactgacacaggtatgccattgctggcctcgacttgctgaggagagaagaactgagatacctcggtgttatatatcgctctcagtatgacatgacgccgtggactacacgagctgcgtagcaaggcaagtgacacgagcgtagcaaagtgttgcgtattttcagtacaaaggcttcctgtcgtaatgtgcttggacactgtacttagaagttgcctagtgctgcgggtacctaggctggataagaagctgtatgaaaagaggcatgttacttcccttgcgtttcgcagagccaagctttcgctcggagattatgaatctgttggttagttttgcaaactagagaagaagtagtcttggccacttgaacaaactttgactttatagaagtcctttcaaaattagttcctgtttctagaaatgttaccaatcaaggtgtcaagagcagtactttgtcgatagatcttttgttaggtagcaaagtgataaaagtgtataaagtgcacatggaactgcgcatagctacttcattgtggatagtaaagagtgtatgatatgtattggaaggttttagcataaagtcaagaggaagaaagcacatttaaaatgagaaactaagaccaatgttctgtatttaagaggaaaaagaatgcttgatgtatcataagtattgttatttgttgtctttatatccggtgccttgcttgagttgcttgtgaatgctctgtgagcccgtca

SEQ ID NO: 718017 - DNA, 555 bp, Homo sapiens
tgagatgaaatgaaatgaagtgaaatgaaataatgaaatgaaattgaaatgagatgagatgaaatgagataaaatgagatgaaatgagaagaaatgagatgaaatgatgaaatgaaatgatgagatgagatgatgaaatgaaatggtgagatgaaatgatgagatgaaatgaaatagtgaaatgaaattgaaataaaatcgaaatgagatgaaatgatgagatgatgaaataaaatgatgaaatgatgagatgtgatgagatgaaatgatgagatgagatgagatgacatgaaataatgaaatgaaattgaaactgagataagatacgagatgagactgaacctgatgacgatgaaactgatgaaatgactgagataagatgacaacgggtcgagactgatgagatgaaactgagactgacaacagatgaaatgactgagatgaacactgacactgatgacgactgaaactgacggtgaaatgaaacttagatgaacatgtaatgagactgaaatgaaatgacctaatgaaactgacataactgaaatgagatgc

SEQ ID NO: 718018 - DNA, 142 bp, Homo sapiens
ttgtttaaaagtatcattcaattcacattcaaataacataatgcttcctatgtgtcagtcactgtcgtacgtgctgaagacagagtccttgcctcaaattcacattcagaaggctcctcattaacacacacacaaacacaca

SEQ ID NO: 718019 - DNA, 447 bp, Homo sapiens
tgtgatcgttctaaggtatccccccggctgcactgcagagtgtgatcttggctcactgcatcctctacctatctgttgttcaagccattctggtgtcctcggccaattgagtagttgggatcacaggtgtacaccagcaggcctgtcttatagtttttgatatttctactatagatgagttttgccacattggccaggctggcctgaaactcctggcctcaagtgatcttgctgtgttggcctcccaaagtgttggtattacaagtgtgagccactgtgcctggccctgaaactcattattctatttccattaatattaatctctactcgttttccaatcattgtttgatttcacaagtattagtcccctataatcattgaatggctaataatattatttatagcaaacagattatttatctgccagcagtctgatattagtttcgg

SEQ ID NO: 718020 - DNA, 371 bp, Homo sapiens
ttacccggaacgacttcgcgtttcatacgccgacggggtgatgtatgtgccatgatccagaggaaccagagcagtatagaaactgtatattggtggtctgagctttgagactacgcatatagtttacgagaacattttgagaaatggggcacactcacagattgtgtggtaatgagagaaccccaaacaaaacgttccaggggctttggttttgtgactatattcttggtgttgaacaggtggatgcagcaatgctgtgctcgaccacacaaggttgatgggcgtgtagtggaaccaaagagagctgtttctagagaggatactgtaaagcctggtgcccatctaacagtgaagaacatatttgttggtgg

SEQ ID NO: 718021 - DNA, 190 bp, Homo sapiens
  misc_feature (88)..(88): n is a, c, g, or t
  misc_feature (112)..(112): n is a, c, g, or t
ccacctactcaggaggctgaggtgggagcttgagtctggaagttcaggaatgcagggagctgtgtttgtgcttgtgaatagccactgnagtccagcctgggcagcatagcangacctcatctcttaaaaaaagaaaaaaactatttatttttaattttcaactcaaggggcacatatgcaggtttgttac

SEQ ID NO: 718022 - DNA, 774 bp, Homo sapiens
  misc_feature (648)..(648): n is a, c, g, or t
aggcattgaggcagcaggcagaggttctgctgagggggaggcggagttttgaggaaaccgagataagttttctctttggaaagatagagactaatgcaatacttaaaaaatatagtcaataggtcactaggatatggctaagcgtaaaagtttaacgcgtaatttaaatagcttaagatttaccgagacactatgaagattacgaaagagtagccaatgaggaaggcacacgctcacaaggtttctaaaacatgacggagggtcgacgatgaagcttctccagggacgtacacacaatgtcttaacacgacacatcgacgagaaaaggactcaagagcgccgaattaaactcaccaatagaaggcccaaggcttgagatcaaaatgaagggtgacctttaaacagcttaaacgtagagtttaaaacagtgtgtcaggtgatcaacataacttggaagggcgatcttttaaaaaggacgatcaacgcggagggtggatcaacaagaccttgaaacctcctgtgacaggcacggggcaggaacctggcgtcaatttaaagggccctaagctaaaaggcattttaactaacagtgcacaggaggacaacatctggacaagaatcaactgcggggaggtggctaggaacttnaaaccaattgggggagacaagtattagacatttgggaaaggtggaccactgtggaaacgacagacagttcggggacaggcgaagcaccaactcatggagacacatcagggaaacttacacaaccaa

SEQ ID NO: 718023 - DNA, 211 bp, Homo sapiens
tctgcccagcaactgcctgtacaacctcacgctgccttcacccttgttaatgatctttgtagccaaagataaattttcaaaaaaactatgtgcccagcgcacgcgcccgcctatcatcccaacattttgggagcccgaggcaagaggatcgcttgaggccagtagttagagaccagcctggccaacatagtgagatctcgtctttgaaaaa

SEQ ID NO: 718024 - DNA, 414 bp, Homo sapiens
  misc_feature (214)..(214): n is a, c, g, or t
  misc_feature (216)..(216): n is a, c, g, or t
  misc_feature (292)..(292): n is a, c, g, or t
tcgacccagactggagtgcaatggagtgatctcagctcaccacaacctctgcctcccggcagcaattctcttgcctcagcctcccaagtggctgggatgacgggcgcgtgccatcatgcctggctaattttgtatttttaatggagaacagggtttctccatgttggtcaggctggtcttgaactcccgacctcaggtgatccgcctgccttgncntcccaaagtgctgggattacaggtgtgagccactgcgcccagcctagaaaataattttaataaaatctaattttanggccgggtgcagtggatcacttgaggtcaggagttagagaccagcctgggccaaaatggtgaaaccccgtctctactaaatacaaaaacttagccaagcgtggtggcgtgcgcctgttgtcc

SEQ ID NO: 718025 - DNA, 152 bp, Homo sapiens
gccggaccgcatcttctcccatcagatttattttttaaatggaatggattttgagagaaaacaacgtggcagaagtatggaatagaaaataaatacaaatgtagtgctattctgctaattgttttataaccacctgatgggacgcagactgg

SEQ ID NO: 718026 - DNA, 630 bp, Homo sapiens
gggccctactgtgcagagacacaccggcgggacacactcttctgcggtgaccctcatcttgcaggcccgggcctatgtgggaccgcatcgtcctggacaggtggtgacccgcacagggttctgcacggcaaaagggggcctggtgagctcctatcgttgcgacccgccggccctatctaatcttcatatgttctactaaactactagctatgaagattatgttggctggcccttctctgttcctggctctctctcggtgaccatctgacagcatcttctatcctcataccgaaacctgggtgcctctgaatgagattgtaatccagggctctcgatctggtgatcgtggtgtgtgccagctgcccatgcctgctgccatgactgtgtgcacgctctactgcccagagccgactgcggagacagggcattttctgcatccacccactgcgcatcaacctggggggcaagctgcagctggtgtgtttcgacaagacgggcaccctcactgaggacggcttagacgtgatgggggtggtgcccctgaaggggcaggcattcctgcccctggtcccagagcctcggcgctgcctgtggggccctgctcgagcactggcagctgccatgccctca

SEQ ID NO: 718027 - DNA, 136 bp, Homo sapiens
accgcagctgccccatcaggaagatattaggttggtcctttcacggggcatcaacacttatgaggtggtttagacaaattaatgaccacttccatgtaaaaggatgctcttatgttctatataagcctcatgggag

SEQ ID NO: 718028 - DNA, 543 bp, Homo sapiens
ctctctctcccgctctctctctaactgtctctccctgaatgaatgtgtctctttcaaaaaatcgatttttgttgatacaggggcattctcgatactgcaatcaaactggtgagagagacatgaaacgttagacaattctaggtgcatcgtgattaaaagatacagtgggaatttggataaactgttgtatctctctctgggcgatatgggcaacatcagcgcctatttgaccaatataacaaagacctggaaacttttggggggtcaagacttctgcctttttgagaggcggagagggattggtacgaatagctaaccgttgtacttggctcgagctgttgagtggaaagtgccataaatcactattgggcaaagtgagaggtgccttctccgaccctattggccatatgtgccaattcgtgccgaatgtctggggcccggcggatccacgaacgctagagcgggcgccaccgcgaggggaccaccagcgtttgtctccttaagagagggttaatgcagagcttggcgtatttcatgctatag

SEQ ID NO: 718029 - DNA, 216 bp, Homo sapiens
  misc_feature (57)..(57): n is a, c, g, or t
tacaaccggccaagcgatcgctgggtgtttggctgttgcattagatgatcgctgggngtttggctgttgcattagatgatcgctgggtgtttggctgttgcattagatgatcgctgggtgtttggctgttgccttagataatcacttgtctgtttggctgttgcattagatgatcactgggtgtttggctgttgcattaatgatctccttggcgtt

SEQ ID NO: 718030 - DNA, 446 bp, Homo sapiens
attcgcggccgcgtcgacgaaatttcaactcttatggagcttccattctgaaattgttttcattttacctttttagaatgtgtgtgaataattttggacttacataaagtttaaaaaaatctatatatggagttcccacatccatttcatacagcttctactaatgttaacatttcctgtatccataatataactgccaaaatcaagaacttaacattaattcaaaactattaactaatctatacgtcttatttacattttcacctcatttttgaagggcagtttttttcctgagataaattctaggttggcagctgttttaccattccattatcttttggtttctactgactttgttgagaagttgctctcagttttattcttgcttctttgaaaataatcctttttttaaatctctggatggtttttggaattttctactttgg

SEQ ID NO: 718031 - DNA, 153 bp, Homo sapiens
attctctatcagatccttcctctcagcgtgcatgcactacgatactcacctcataaagtaccatttccaatcagtgttgccagtgtgtgcttcaggatgtacttaggaattacttagccatagtatttgcaacatatgcacatgcatagctga

SEQ ID NO: 718032 - DNA, 162 bp, Homo sapiens
ggtttgtctttctgagcggtgtgaggtgtggtttgtcttcctgagcggtgtgaggtgtggtttgtcttcctgaacggtgtgaggtgtggtttgtctacctgaacggtgtgaggtgtggctttgtcttcctgaactggtgtgaggtgtggctttgtcttcctg

SEQ ID NO: 718033 - DNA, 804 bp, Homo sapiens
  misc_feature (1)..(1): n is a, c, g, or t
  misc_feature (715)..(716): n is a, c, g, or t
  misc_feature (772)..(772): n is a, c, g, or t
ntttacttttttgtcactagcgcgccatgtgttggtaacgggattcggcctttggccgggccttttttttaggggggggccagagccattcctaaactcctcgaataatcctccggtatggggtgacaattcaaattgctgcggagatccacacctattactggggactacctgaacaaactttttcatttaagacagggggggtgaaaaaccaggccttttcattaatggtttaggtcatccctgtaaccggtctatgatgatactattaaatactttttatcaagaaccaatactttccagatctgaacaacatggccccctaacaacgcccattcagaccgaagaaaagtttagaattcaagttatgaaaatgccttttcatctttaacccaagcaagggaccataagccgcgaaaaatcttaatgaaaacaacctccgctgcctggccctctaacataataacctcaatagagaaggcccggagatgttgcgcctaatcccatctttctaggagaagagaacggttttcacttctcaagagaaggattcacaatggtcttttattccaagcgactctttttttaaagggacacacgtgtgaattgcccctttgtcgccaaaaatacacgttcctatcctccctccctgttaaaaaccttttaaatttaaaagaaccccccctaaaaaacacccctctgcaatttaggatgnngcccacatttaaaccctcccctaggcctctctcccaatgggaagatttgtatttanccccaacccccaccgggttttattattcctcg

SEQ ID NO: 718034 - DNA, 221 bp, Homo sapiens
tgattgtataggaggtgtataagttggccgtagcggaatcgggggtctgcttgtacaaatacataagagcagggaggttagaagtagtgtgtcttggttgacaaaaatatgtttgtagtagagttcatggggagagtgcgtcatatgtttgttcctaaggaatgattgtatgtggtgatgggtgtttattcataatacatgttttgtgtatactggctata

SEQ ID NO: 718035 - DNA, 417 bp, Homo sapiens
gtgctccgctgggggaaatgctgactgatctgaaatctgcttgtgccggttatatgtgttattgagtttaggtacttttacaaaccaccataacccactgagataaaaggacaaaatgggttatttctgcaaaacctgaattgctagttttagaatttaatagagtcattaaaaattaaaccattatgagtacattgggatcaaagaactatgaagtatttagtagaagtctgaaggattttgtactcaaattgtaaattttggtactcaaatatccattatgtaattggtggtgggtatcccaattatacatacaaattgtatgaatgtattaaattaccacagtaccctggaaatatgtacatctattatgtatcaataaaatgtaaaattttaaaaaggtaaaaataataaaaa

SEQ ID NO: 718036 - DNA, 1156 bp, Homo sapiens
gaggtgctgtgtaatcatcaaggagcggagtgcgttaggagctgctaacctgccggattacctcggtgccgatcagatggaagaccaaagaggatgagaaggacgacacagcccatccgagctctggactgagggggataatatgccttgtttgacacagacttactggtcagagcacttactctaggcagatcaagcacaggttgacagcattgacgcattgcaggcaaacttgctccgaagacacaagtcacagtgagcctcacctggtatttcagaggcaattctgatcactggtgcctgggatcccacaaccaagaaacctcgtgggaactcttgggccttgcaagactaacgggcgagacagctccaggaagtgcaccaggccgtattaacacgggttggcccaggggtggtacacaaacggactaacgtcacagggcctggactttcgcgaaggaaccccaaagaccataccatttattccaccgttaaaaggacacgtgaaggccaacagatcacggttggatgggaacccgttcaggtggatccacgggtggatcactctaaagtgcgcaatttgcacgaacaggggcaataagcagataggcgcgttggactcagcaacactagcacttatcacaacatgcacacttagccaatatgtggcgtcctcaaggaattcgaaccccaacaagttatgagcatggaatgccagagatggaaagcagtaaacacccgtgcatatcaagcatatgacagcgtacatgatcaggagcggacaggaaaagcgaaacaggaaattagacgacaaccatgcgagggacagacagcggaaaagcaccccataaagagcacaacccacgaaaaaggtataggcgacaaccaacgggcaagtagaaaggactacccaaagggcggagacgagcaaaccagtagggaagcacaccgggaaaacgaggccacacaaaacactagagtgccgacgagagaacaagacacacggggacaagagagcagagtcacagcggaccaaaactaacagcacaccggacagtacagagagaacaacaagcggagggacgggagaaacaggaagcggctgcgaaaacacataaagaaccaggggagaacaacgaaagggcagaactgagta

SEQ ID NO: 718037 - DNA, 200 bp, Homo sapiens
aaaatatgtattgaaattacaaatcaaactttttccatatgattcccaaggaaggttaaccaaaaccaaccaaaccattaaaaggcattcaaacagctcttttatacatcacagtgttagtggcacaaatgtactgacatttcaaaacacaatcaatctgtttgtttgttacacactgtcaatctacgtactgtgcatga

SEQ ID NO: 718038 - DNA, 106 bp, Homo sapiens
gcacatgcccgcagagaattgtcgtggatggtctccaccgcccccacggactcggtgcggacgtccacgcccggcgcgcacttcactgtcttcatcttgtaccggg

SEQ ID NO: 718039 - DNA, 1675 bp, Homo sapiens
agcgggtccacgcctccctataagacaaagcgcggccgacgggctccgagcgcggcccctgggttcgaacacggcacccgcactgcgcgtcatggtgcaggcctggtatatggacgacgccccgggcgacccgcggcaaccccaccgccccgaccccggccgcccagtgggcctggagcagctgcggcggctcggggtgctctactggaagctggatgctgacaaatatgagaatgatccagaattagaaaagatccgaagagagaggaactactcctggatggacatcataaccatatgcaaagataaactaccaaattatgaagaaaagattaagatgttctacgaggagcatttgcacttggacgatgagatccgctacatcctggatggcagtgggtacttcgatgtgagggacaaggaggaccagtggatccggatcttcatggagaagggagacatggtgacgctccccgcggggatctatcaccgcttcacggtggacgagaagaactacacgaaggccatgcggctgtttgtgggagaaccggtgtggacagcgtacaaccggcccgctgaccattttgaagcccgcgggcagtacgtgaaatttctggcacagaccgcctagcagtgctgcctgggaactaacacgtgcctcgtaaaggtccccaatgtaatgactgagcagaaaatcaatcactttctctttgcttttagaggatagccttgaggctagattatctttcctttgtaagattatttgatcagaatattttgtaatgaaaggatctagaaagcaacttggaagtgtaaagagtcaccttcattttctgtaactcaatcaagactggtgggtccatggccctgtgttagttcatgcattcagttgagtcccaaatgaaagtttcatctcccgaaatgcagttccttagatgcccatctggacgtgatgccgcgcctgccgtgtaagaaggtgcaatcctagataacacagctagccagatagaagacacttttttctccaaaatgatgccttggggtggggagtggtagggggaagagctcccaccctaaggggcacacactgagttgcttatgccacttccttgttcaaaataaagtaactgccttaatcttatactcatggcttggagttaccttatattcaggtatatgtgatattttgcctggtttgttaaaattgccccatttagattccttctataattgttcttatagataagtaatttatatatgagctgtgttagtattttttcagtgtgagatctctggattctttcacaataaagctgttgaattttaacaggagtattagtacataaattttctactcaacaattccgagataggattatgcctagtttgtcatatcacagaaaaactccaagttaacttcatgttttggaagggcaggtcgtttttaaagtatttctttttttaactggatgaaaaatcttcatgttaggattaattttcttaatcacctccacactgtacagaggaaactcaagccttaaatgtttaagtaaactctgtctcagttttaggattaaaatacccaccggtggtgtgatgatgccatataccgcagggcttgcttctgtcaagtgtgactctatctcagtaattaaaataagtgctgatctactga

SEQ ID NO: 718040 - DNA, 132 bp, Homo sapiens
ctgtctgtcagtgtaggtgtggctacaacgcccgcattggaggggtgcgcatgcgtgcatggcgcggtgaccgatgcagtggaggcacgctcgttgggcctgaagcccaaacacatccacatctactgtgcc

SEQ ID NO: 718041 - DNA, 1143 bp, Homo sapiens
agcgggtccacgcctccctataagacaaagcgcggccgacgggctccgagcgcggcccctgggttcgaacacggcacccgcactgcgcgtcatggtgcaggcctggtatatggacgacgccccgggcgacccgcggcaaccccaccgccccgaccccggccgcccagtgggcctggagcagctgcggcggctcggggtgctctactggaagctggatgctgacaaatatgagaatgatccagaattagaaaagatccgaagagagaggaactactcctggatggacatcataaccatatgcaaagataaactaccaaattatgaagaaaagattaagatgttctacgaggagcatttgcacttggacgatgagatccgctacatcctggatggcagtgggtacttcgatgtgagggacaaggaggaccagtggatccggatcttcatggagaagggagacatggtgacgctccccgcggggatctatcaccgcttcacggtggacgagaagaactacacgaaggccatgcggctgtttgtgggagaaccggtgtggacagcgtacaaccggcccgctgaccattttgaagcccgcgggcagtacgtgaaatttctggcacagaccgcctagcagtgctgcctgggaactaacacgtgcctcgtaaaggtccccaatgtaatgactgagcagaaaatcaatcactttctctttgcttttagaggatagccttgaggctagattatctttcctttgtaagattatttgatcagaatattttgtaatgaaaggatctagaaagcaacttggaagtgtaaagagtcaccttcattttctgtaactcaatcaagactggtgggtccatggccctgtgttagttcatgcattcagttgagtcccaaatgaaagtttcatctcccgaaatgcagttccttagatgcccatctggacgtgatgccgcgcctgccgtgtaagaaggtgcaatcctagataacacagctagccagatagaagacacttttttctccaaaatgatgccttggggtggggagtggtagggggaagagctcccaccctaaggggcacacactgagttgcttatgccacttccttgttcaaaataaagtaactgccttaatcttata

SEQ ID NO: 718042 - DNA, 403 bp, Homo sapiens
agcgggtccacgcctccctataagacaaagcgcggccgacgggctccgagcgcggcccctgggttcgaacacggcacccgcactgcgcgtcatggtgcaggcctggtatatggacgacgccccgggcgacccgcggcaaccccaccgccccgaccccggccgcccagtgggcctggagcagctgcggcggctcggggtgctctactggaagctggatgctgacaaatatgagaatgatccagaattagaaaagatccgaagagagaggaactactcctggatggacatcataaccatatgcaaagataaactaccaaactttgaagttcattctgaatgtgactgggcactatcatgcaaggtactagggggactcagtgactccgctacttatggcccaagc

SEQ ID NO: 718043 - DNA, 915 bp, Homo sapiens
ggctcgggctgcgctgtcgtctgcaggcgccaccgctgcctctttccggctgtggaccctcctcgccgccgagcgcttggctgcgtcctccgactccccgggcctgcgagaccaggctcccgctccggtttgccggcgcgtatcggccctccgcagagccagaccactgaggcgattcatgacgatgcgcagtgtcgttcctatggtgtgaacggaaaccatagaaacttgggcattctactcctcctacttcactcgttgggcctcatgtgactgctgcccttccaatcatgactccgcacttctaatccgtctggtctacgtacgagtgaacgttggctcgcaacaacgtgggagtccaggtatgtcgaatacacgattggtgagagatcgatggccatcattgactcgacgtacgtgatctcataccccattgcgtaatttgcgttcggcttcctgggagaattgccttcagccttggagagtgccggatcgcgcacgtgatccagagaaaggcaagcatacgcccactggctgagtgcacgataccggacgtacacattggaccgtttggctacaaacgtactcttggaatggaatgaattcgaactagatgggcccaattcggctgtcccgacatgacagcaggttagcaacgtacacttttgtaggagcacgtcgcgcttacatcgcgcgggggtacaagggggtcacacgtacaatttgcccttcatggacccagattggcaaacgttgccccgattcctatggtcaaccatatggtaacaccaaaggaggaaaatggtttgattccccacaggatgggtgcacgtgatcccagtggacccattggttagagcccttgtggacgcggaatcctaagggccgttcctggagagttgtagtcaattaccg

SEQ ID NO: 718044 - DNA, 810 bp, Homo sapiens
  misc_feature (603)..(603): n is a, c, g, or t
  misc_feature (650)..(650): n is a, c, g, or t
tacaagctaaattaatagcactaactcctgccctaactctaaccaaaggacgtgcatgttaagtatctataccaaatccaaatatgcctatccagtattctacctacacactcatgctgtcagtacttggggcagaaagaggttttcttcactagagaagggccctctattatcaatgctcacgtaataagagccctccttttaggactgtcccgtcccttccagacgcaagagctggaggtaatctgctgctaatgggtatcaccgaatagaacatctctgaacgccattgtcctccaggataatacctgatgtccggataataagcagcacaaaacatcgcaggcaaactctcccgggtatctggcatgcacgcagatggcgtgaatacttgtcatctgtatgctgcatcatagtacacgtccataccatgaactgcatcacttctctaaacacacttaagactaccagatcagattcccaattcaacgagcaacctgtgtatgaatagatcaatggaagagctgcgattcgtccgctgcggtcgtcaaagacttacttactgtcctttcgatcacttgtcacgatggtagattccaggtngagaactatacaaccatttgaatctcagcatatgatattagaacctncgtcatatgaacgtttgtccgaggctagggtagatcagtagcgagactgcttagtctctagtaaggagtttacacaataagcaaaaaagttcctagcacaaaagaggtctgcaccgaaggagattctcccaagcgggggcccgcagaattgcaggacccg

SEQ ID NO: 718045 - DNA, 320 bp, Homo sapiens
gactttatatcagctgaatgatgtcattagtgcactgtcttctctctgcatggctgagatttccacaaaacatgaaaattttttgctgtgcttcctctcaagacagaccagtctcgtttaagacctttaagagtataaagacaagggaaaaatgtcactctcaaattagtacacgcggtttacacgtgtaaaaacaaacaagaaaatgttcaagtggctcctcgaattgtctacacgaaaactaaggattaaggacatacactctaaatgctattatacagtatataattaaaatcaatggttcaacaacttgcagaatg

SEQ ID NO: 718046 - DNA, 350 bp, Homo sapiens
gagagttagttgagggttgaaaaaataacaaatgataaatttggagtataaaatcatattggagatccagaaagagaatgtttctacatctccttgttaatctgagctcttgtttttggtgggttaactcttttagctggatgctgacaaatatgagaatgatccagaattagaaaagatccgaagagagaggaactactcctggatggacatcataaccatatgcaaagataaactaccaaattatgaagaaaagagttccgctcttgttgcccaggcggaggttacagtcagctgagaccgcaccattgcactccagcctgggtgacagagcaagattccgtctcaaa

SEQ ID NO: 718047 - DNA, 2388 bp, Homo sapiens
  misc_feature (1685)..(1685): n is a, c, g, or t
agcgggtccacgcctccctataagacaaagcgcggccgacgggctccgagcgcggcccctgggttcgaacacggcacccgcactgcgcgtcatggtgcaggcctggtatatggacgacgccccgggcgacccgcggcaaccccaccgccccgaccccggccgcccagtgggcctggagcagctgcggcggctcggggtgctctactggaagctggatgctgacaaatatgagaatgatccagaattagaaaagatccgaagagagaggaactactcctggatggacatcataaccatatgcaaagataaactaccaaattatgaagaaaagattaagatgttctacgaggagcatttgcacttggacgatgagatccgctacatcctggatggcagtgggtacttcgatgtgagggacaaggaggaccagtggatccggatcttcatggagaagggagacatggtgacgctccccgcggggatctatcaccgcttcacggtggacgagaagaactacacgaaggccatgcggctgtttgtgggagaaccggtgtggacagcgtacaaccggcccgctgaccattttgaagcccgcgggcagtacgtgaaatttctggcacagaccgcctagcagtgctgcctgggaactaacacgtgcctcgtaaaggtccccaatgtaatgactgagcagaaaatcaatcactttctctttgcttttagaggatagccttgaggctagattatctttcctttgtaagattatttgatcagaatattttgtaatgaaaggatctagaaagcaacttggaagtgtaaagagtcaccttcattttctgtaactcaatcaagactggtgggtccatggccctgtgttagttcatgcattcagttgagtcccaaatgaaagtttcatctcccgaaatgcagttccttagatgcccatctggacgtgatgccgcgcctgccgtgtaagaaggtgcaatcctagataacacagctagccagatagaagacacttttttctccaaaatgatgccttggggtggggagtggtagggggaagagctcccaccctaaggggcacacactgagttgcttatgccacttccttgttcaaaataaagtaactgccttaatcttatactcatggcttggagttaccttatattcaggtatatgtgatattttgcctggtttgttaaaattgccccatttagattccttctataattgttcttatagataagtaatttatatatgagctgtgttagtattttttcagtgtgagatctctggattctttcacaataaagctgttgaattttaacaggagtattagtacataaattttctactcaacaattccgagataggattatgcctagtttgtcatatcacagaaaaactccaagttaacttcatgttttggaagggcaggtcgtttttaaagtatttctttttttaactggatgaaaaatcttcatgttaggattaattttcttaatcacctccacactgtacagaggaaactcaagccttaaatgtttaagtaaactctgtctcagttttaggattaaaatacccaccggtggtgtgatgatgccatataccgcagggcttgcttctgtcaagtgtgactctatctcagtaattaaaataagtgctgatctactgaaaaaaaaaanaaaaaaaaaaaaaaaaaaaaaaaaaaaaaaaacaaaaaaaaaaaaaaaaacagaacgaaacaagaagaaaacaacagaaagacagagacaaacacaaaaagagagaaggacagacaagacgagaaaaatacaaagaagaggaggcaaagcgaggccgggagcggggcagccgccgcggagacacacgacgacaagacgacagtgacggggggcgcgagacggggcggcgggtagcagcacactcaccaggtcagaacaaagaacgaagaggaaccggggcaacaaaacgaggcacgagctgacagagaggagccatagatggacagagaaacgagagaaggagcggaacaacaacaacaagcacaggggagcaaacaacaaggcggcggagactaaagcacagagagaagacaaggacgaaagacgcgcgaggcaagagaagtcgagcagtcaggcacacatactatagagcgcgggagcacgcgccaaggaggagagaagaaaaagaacaaagaaaggcaacgagacagccagggcgaaaagcgagaggaaggaggcgcgggacacaggacgaagccacagcagagcgaaacaagaacagcgcacaacaaccgacaaagaacaagaaaagaccgggagcagccgagagaaaagaaagaagcgagggaacacgagagccgacaagacgcgagacacaagagcc

SEQ ID NO: 718048 - DNA, 738 bp, Homo sapiens
agcgggagcccagctccgggtttaatgactcctggcccggcccgtcgcacagctctgctcataactcctggccgccccgttccgtccatctgtcccgctgccccgcggtcctatccaagggtggcctagctccactcctcggaaccaagatgacggtcagttgccagaacggtgtattacatgtcggagactcagctcagacacgatagcctggcccttaatgggtccagggatacgacaggcaggacgaagtcctgaccgacaagcatggtcgaccaggctgaaccgtgcaggacatggatagctacgattgcacagaactcacagtcagctttcccatcttgacactcttgacggcaccttgtggagcaatgaacccactcttgatatggacattgtcgacgtgggctagctattgaagccgtttcctgccattctgttactcatgccaaaatcgccttaatgctagggccaacagttgggcttacccttcgtttttgggaccgatgcggtggttggactattcattgggctttaggcttttaatgggacagaccaattggcgagaaccctgtgccgtggggaaggccatgagtaacccgcgccacagggagcttgattgccaattaaccgccgcgtgactgcctgcggttacaacgaggttggctgccaacacagcttcaacttgtgacaggcccttgtgcaatcagtgtctttcccagtgggcaatgtttcgca

SEQ ID NO: 718049 - DNA, 254 bp, Homo sapiens
ggatcccaacgcgcgatagctcccgagtagcgggatacaggtctgtacatcacacctaattattattattatttgtagaggcagggtctcatcatggttgtccagtccgcggtgtgaactcctgggctcaagtgaaccaacttgccttagtctcccaaaattggcagggaccacagggctcgcaccaaccacgcccaagccacttttgtgtatttttgtgtagaagaccagagttttttggtcatggttgctta

SEQ ID NO: 718050 - DNA, 104 bp, Homo sapiens
gtaatggttgctgcgtcaggactctggagaggattttttatttggaacgatataatttttggaatggccttaaagggaaaaatacatattgcttaattataaaa

SEQ ID NO: 718051 - DNA, 262 bp, Homo sapiens
  misc_feature (176)..(176): n is a, c, g, or t
  misc_feature (198)..(198): n is a, c, g, or t
  misc_feature (208)..(208): n is a, c, g, or t
  misc_feature (224)..(224): n is a, c, g, or t
  misc_feature (246)..(246): n is a, c, g, or t
  misc_feature (258)..(258): n is a, c, g, or t
tcaatttctacactcggaaaggaggtctacatcaagaatggggataagaaaggcagctgtgagagagatgctcaatatgccccaggctatgacaaagtcaaggacatctcagaaggtggtcacaccctcggttcctttagtactgagaggagtagagtccctaatgctagaccccnacatacttgcagaggtgattcntggcggcccncttgatagttcacaangagaagtcgtttcattcaagtnggtgtagaaatntgaa

SEQ ID NO: 718052 - DNA, 502 bp, Homo sapiens
gacagacagacaactgtaagtagagatacttggcaaaaatatgtcatataaatgctcagtagcatagagttgaaggcacacaggcatttgtataagagagtgggttggtatgctggttcccttgctatgaggtcttgagtaaattacataatctctgggcactcatttttccatttgtgaagtggaaatacgaccaactttgcagtttgggtacatgggaaatgatatgcattggtgtccagagcaatgttccctgcactatggaaggatattaaacagttgccattgttatttcagtaatgggtcatgtgcaaactgaacacacattttacctccttccccatgttatctattgtcctccacagattattgtaatccaaatatgcaatgggattccatactggtggaaaggcgccccgaaatggatatgttttcccctagaacataaaagcaaacagaatcaatcaaaaagagtaatatcttaaatttgaatggtgttcta

SEQ ID NO: 718053 - DNA, 1613 bp, Homo sapiens
  misc_feature (28)..(28): n is a, c, g, or t
ttaggcctaagtagagccctggagttangtcggcgagtggccgacataacgactgcgttgtcagctgtattgacgagccggcgacggggaccacgccgaccggcgcagtggctgagcagctgcggcggctcggggtgctctactggaagctggatgctgacaaatatgagaatgatccagaattagaaaagatccgaagagagaggaactactcctggatggacatcataaccatatgcaaagataaactaccaaattatgaagaaaagattaagatgttctacgaggagcatttgcacttggacgatgagatccgctacatcctggatggcagtgggtacttcgatgtgagggacaaggaggaccagtggatccggatcttcatggagaagggagacatggtgacgctccccgcggggatctatcaccgcttcacggtggacgagaagaactacacgaaggccatgcggctgtttgtgggagaaccggtgtggacagcgtacaaccggcccgctgaccattttgaagcccgcgggcagtacgtgaaatttctggcacagaccgcctagcagtgctgcctgggaactaacacgtgcctcgtaaaggtccccaatgtaatgactgagcagaaaatcaatcactttctctttgcttttagaggatagccttgaggctagattatctttcctttgtaagattatttgatcagaatattttgtaatgaaaggatctagaaagcaacttggaagtgtaaagagtcaccttcattttctgtaactcaatcaagactggtgggtccatggccctgtgttagttcatgcattcagttgagtcccaaatgaaagtttcatctcccgaaatgcagttccttagatgcccatctggacgtgatgccgcgcctgccgtgtaagaaggtgcaatcctagataacacagctagccagatagaagacacttttttctccaaaatgatgccttggggtggggagtggtagggggaagagctcccaccctaaggggcacacactgagttgcttatgccacttccttgttcaaaataaagtaactgccttaatcttatactcatggcttggagttaccttatattcaggtatatgtgatattttgcctggtttgttaaaattgccccatttagattccttctataattgttcttatagataagtaatttatatatgagctgtgttagtattttttcagtgtgagatctctggattctttcacaataaagctgttgaattttaacaggagtattagtacataaattttctactcaacaattccgagataggattatgcctagtttgtcatatcacagaaaaactccaagttaacttcatgttttggaagggcaggtcgtttttaaagtatttctttttttaactggatgaaaaatcttcatgttaggattaattttcttaatcacctccacactgtacagaggaaactcaagccttaaatgtttaagtaaactctgtctcagttttaggattaaaatacccaccggtggtgtgatgatgccatataccgcagggcttgcttctgtcaagtgtgactctatctcagtaattaaaataagtgctgatctactga

SEQ ID NO: 718054 - DNA, 382 bp, Homo sapiens
  misc_feature (1)..(1): n is a, c, g, or t
ngtgtgtttctagatgtgtctctccttctcagaaagtgtgcatatatccgcatgaaaggtatatgtttcaccattacactctttggaaacgtatgtttcatcgacttccagagctgaaaagcatgttcgcttctcatgcaacacacatacctggttcaggcccgcgaatagatagtcttctgcacaggccattctttttgcttcagaatgtttacacacatttgctgcccacttttcataggtttcttgacactctctacaagagttgaagttgacacttggggtactctcttggtgtaacgacctaatagcgcattctggaatttgcactctacaatctgctcaaagagctcacaattgtgtgagattaaactcctcgtgc

SEQ ID NO: 718055 - DNA, 893 bp, Homo sapiens
gactggcgaaaacaagacccatcacatgagggtaaataacaccaggagcaaatatgtagaaccacgcgtcgactcaacacccactccctcttagccaatatgtgcctatgccatactagtctatgccgctgcgaagcagcggtgggactagacctactagtctcaatctccagcacatatggcctagactacgtacataaactaaaactatccaaatgcataagaagatacagtcggtaccacaaccaattatgtgtttccataacgcagatgacactgacgtgataccaagaaaacacagtaatgttagaactcaacacaaagacacaccacagcactaattatgagaactccataacccctactagtatactacaacaaaatacaagaaagcaagcctagtttagctggtatccccaaaagacatatgtccgcgtaccgaaaacgcacgcgtaaagaaaggaccgcgcactcccatcaaaataccgataaagctaacgcctgaccgtcacatcagacaccgtcgacaaaatacaatgggacagaagcagcaaggcgaccaacgaacaactagaaaagaggaacgcacatgaggaaaggaacaacgacacaaacgtacgaggacgcacagataactaacaagaggcaacataacaagaagaaatacaccaaacaatacaaacagaaaaaacaaccaagacaagcacgacaaccacaccaccaaactgacgaccccagaacaacacacgacaacaccaacacccgaaaaaagtaaacacaccccactgggactacacccaagccacaaccgaaacgaaagagacagacacgacacaagagagcacacacacacaacaaagaacaccacgaacacaagtcactaaacaacacaa

SEQ ID NO: 718056 - DNA, 1609 bp, Homo sapiens
tcctaaaggcccaggctgtgtggccccgtgtcctgcaggtattgggagatccacagctaagacaccgggacctcctggaagccaaaaatgccggtccctccattcggggtccctgacttcctgcaacactggagtttgttgttcactggatgctgacaaatatgagaatgatccagaattagaaaagatccgaagagagaggaactactcctggatggacatcataaccatatgcaaagataaactaccaaattatgaagaaaagattaagatgttctacgaggagcatttgcacttggacgatgagatccgctacatcctggatggcagtgggtacttcgatgtgagggacaaggaggaccagtggatccggatcttcatggagaagggagacatggtgacgctccccgcggggatctatcaccgcttcacggtggacgagaagaactacacgaaggccatgcggctgtttgtgggagaaccggtgtggacagcgtacaaccggcccgctgaccattttgaagcccgcgggcagtacgtgaaatttctggcacagaccgcctagcagtgctgcctgggaactaacacgtgcctcgtaaaggtccccaatgtaatgactgagcagaaaatcaatcactttctctttgcttttagaggatagccttgaggctagattatctttcctttgtaagattatttgatcagaatattttgtaatgaaaggatctagaaagcaacttggaagtgtaaagagtcaccttcattttctgtaactcaatcaagactggtgggtccatggccctgtgttagttcatgcattcagttgagtcccaaatgaaagtttcatctcccgaaatgcagttccttagatgcccatctggacgtgatgccgcgcctgccgtgtaagaaggtgcaatcctagataacacagctagccagatagaagacacttttttctccaaaatgatgccttggggtggggagtggtagggggaagagctcccaccctaaggggcacacactgagttgcttatgccacttccttgttcaaaataaagtaactgccttaatcttatactcatggcttggagttaccttatattcaggtatatgtgatattttgcctggtttgttaaaattgccccatttagattccttctataattgttcttatagataagtaatttatatatgagctgtgttagtattttttcagtgtgagatctctggattctttcacaataaagctgttgaattttaacaggagtattagtacataaattttctactcaacaattccgagataggattatgcctagtttgtcatatcacagaaaaactccaagttaacttcatgttttggaagggcaggtcgtttttaaagtatttctttttttaactggatgaaaaatcttcatgttaggattaattttcttaatcacctccacactgtacagaggaaactcaagccttaaatgtttaagtaaactctgtctcagttttaggattaaaatacccaccggtggtgtgatgatgccatataccgcagggcttgcttctgtcaagtgtgactctatctcagtaattaaaataagtgctgatctactga

SEQ ID NO: 718057 - DNA, 411 bp, Homo sapiens
  misc_feature (5)..(5): n is a, c, g, or t
  misc_feature (319)..(319): n is a, c, g, or t
  misc_feature (321)..(321): n is a, c, g, or t
tcgangctgctgtgaaccgtgtaatggcaatgatctcagctcaatgcaacctccacttctcctgcctcagcctcctgaagtagctgggactacagcgcccgccaccacacccggctaatattttgtatttttagtagagatggggtttcactgtgttagcccaggatggtctcaatctcctgacctcgtgatctgcccgccttggcctcccacagtgctgggattacaggcgtgagccaccacaccaggtttcagacacaatttttaaacaatttctaagttgctggctaggtactgcagtcgtcgtccctccagcagntnccaagtgggccgactcctcccacctgcccagcacccggtgttggagcttcagacaagtcacatggcctcgctgtctatgggaacttgtgt

SEQ ID NO: 718058 - DNA, 211 bp, Homo sapiens
caacaaatatttatcgagtgcctagtatacatttgacattgtttctaggcactggtgacacagatatgaacaagataaaccaggcccttgtcatggagctgaaattctaagggcgaaacctacaataaacatgaaaaagcaacatacgaaataaaacagggtaaggtaaccaagaatggctggtggctattttagatggggtgggacaagg

SEQ ID NO: 718059 - DNA, 104 bp, Homo sapiens
ctcccaacgatgaggaatagaccctttggaatttgacgtatacgacgactattgatgatggggattaaggaaaagggcacagatggcaacgccgggagaaactc

SEQ ID NO: 718060 - DNA, 1610 bp, Homo sapiens
agcgggtccacgcctccctataagacaaagcgcggccgacgggctccgagcgcggcccctgggttcgaacacggcacccgcactgcgcgtcatggtgcaggcctggtatatggacgacgccccgggcgacccgcggcaaccccaccgccccgaccccggccgcccagtgggcctggagcagctgcggcggctcggggtgctctactggaagctggatgctgacaaatatgagaatgatccagaattagaaaagatccgaagagagaggaactactcctggatggacatcataaccatatgcaaagataaactaccacatcctggatggcagtgggtacttcgatgtgagggacaaggaggaccagtggatccggatcttcatggagaagggagacatggtgacgctccccgcggggatctatcaccgcttcacggtggacgagaagaactacacgaaggccatgcggctgtttgtgggagaaccggtgtggacagcgtacaaccggcccgctgaccattttgaagcccgcgggcagtacgtgaaatttctggcacagaccgcctagcagtgctgcctgggaactaacacgtgcctcgtaaaggtccccaatgtaatgactgagcagaaaatcaatcactttctctttgcttttagaggatagccttgaggctagattatctttcctttgtaagattatttgatcagaatattttgtaatgaaaggatctagaaagcaacttggaagtgtaaagagtcaccttcattttctgtaactcaatcaagactggtgggtccatggccctgtgttagttcatgcattcagttgagtcccaaatgaaagtttcatctcccgaaatgcagttccttagatgcccatctggacgtgatgccgcgcctgccgtgtaagaaggtgcaatcctagataacacagctagccagatagaagacacttttttctccaaaatgatgccttggggtggggagtggtagggggaagagctcccaccctaaggggcacacactgagttgcttatgccacttccttgttcaaaataaagtaactgccttaatcttatactcatggcttggagttaccttatattcaggtatatgtgatattttgcctggtttgttaaaattgccccatttagattccttctataattgttcttatagataagtaatttatatatgagctgtgttagtattttttcagtgtgagatctctggattctttcacaataaagctgttgaattttaacaggagtattagtacataaattttctactcaacaattccgagataggattatgcctagtttgtcatatcacagaaaaactccaagttaacttcatgttttggaagggcaggtcgtttttaaagtatttctttttttaactggatgaaaaatcttcatgttaggattaattttcttaatcacctccacactgtacagaggaaactcaagccttaaatgtttaagtaaactctgtctcagttttaggattaaaatacccaccggtggtgtgatgatgccatataccgcagggcttgcttctgtcaagtgtgactctatctcagtaattaaaataagtgctgatctactga

SEQ ID NO: 718061 - DNA, 164 bp, Homo sapiens
agagtctgggcatggttgttgatactactaataaaccgtgcagtcattctgccaggtcgctcggagaattttaccacaatgttcagaaaatagagacacttccggtatctctgagcacaacggcccgggagcatgcattaacctgcatagagctcgcgatcgag

SEQ ID NO: 718062 - DNA, 1618 bp, Homo sapiens
agcgggtccacgcctccctataagacaaagcgcggccgacgggctccgagcgcggcccctgggttcgaacacggcacccgcactgcgcgtcatggtgcaggcctggtatatggacgacgccccgggcgacccgcggcaaccccaccgccccgaccccggccgcccagtgggcctggagcagctgcggcggctcggggtgctctactggaagctggatgctgacaaatatgagaatgatccagaattagaaaagatccgaagagagaggaactactcctggatggacatcataaccatatgcaaagataaactaccaaattatgaagaaaagattaagatgttctacgaggagcatttgcacttggacgatgagatccgctacatcctggatggcagtgggtacttcgatgtgagggacaaggaggaccagtggatccggatcttcatggagaagggagacatggtgacgctccccgcggggatctatcaccgcttcacggtggacgagaagaactacacgaaggccatgcggctgtttgtgggagaaccggtgtggacagcgtacaaccggcccgctgaccattttgaagcccgcgggcagtacgtgaaatttctggcacagaccgcctagcagtgctgcctgggaactaacacgtgcctcgtaaaggtccccaatgtaatgactgagcagcctttgtaagattatttgatcagaatattttgtaatgaaaggatctagaaagcaacttggaagtgtaaagagtcaccttcattttctgtaactcaatcaagactggtgggtccatggccctgtgttagttcatgcattcagttgagtcccaaatgaaagtttcatctcccgaaatgcagttccttagatgcccatctggacgtgatgccgcgcctgccgtgtaagaaggtgcaatcctagataacacagctagccagatagaagacacttttttctccaaaatgatgccttggggtggggagtggtagggggaagagctcccaccctaaggggcacacactgagttgcttatgccacttccttgttcaaaataaagtaactgccttaatcttatactcatggcttggagttaccttatattcaggtatatgtgatattttgcctggtttgttaaaattgccccatttagattccttctataattgttcttatagataagtaatttatatatgagctgtgttagtattttttcagtgtgagatctctggattctttcacaataaagctgttgaattttaacaggagtattagtacataaattttctactcaacaattccgagataggattatgcctagtttgtcatatcacagaaaaactccaagttaacttcatgttttggaagggcaggtcgtttttaaagtatttctttttttaactggatgaaaaatcttcatgttaggattaattttcttaatcacctccacactgtacagaggaaactcaagccttaaatgtttaagtaaactctgtctcagttttaggattaaaatacccaccggtggtgtgatgatgccatataccgcagggcttgcttctgtcaagtgtgactctatctcagtaattaaaataagtgctgatctactga

SEQ ID NO: 718063 - DNA, 1282 bp, Homo sapiens
tggtaattaagttttatattccataatcataactttaactctgcaacccagctaggcttgggagggaccagggaaacactgtggaccccaaagagggaacacgtgcagcgaagacagccacaaagaatctctaggaactcacgtgcgaaccaacagtgggggtggagggggtgcctcctccgtgaaccctcacagaagaggcaactgactcggggtgcgtaaacaataacacagccaagagtctaaacaccttatatccgaagtgtgtgctccgacagagttacgagcagagtgcggtgaactcttatcgtgtgcgcgggtctcgtgtggcacaatctcgcgtggacaccacaagaggggccctccgagatggccatcacaaacaatatctcagtgcccttttatatagcccactatttgtgcgcacaaacacacaccccacagtgtgtctgtgtgccaactcccagaacagccactctcaggaggactcgtggggacaaagtgtggcagagacagtgaaacaacacaccgtggggacacacgccaaatatgtagcgtcgatgagggggtctccagaggcaatatagtgtgacccaagtgagacaccgaaagcgaaagtggccgcgaggagacaaccccgcgagaaaagtgacccatatacagaggggacagctaagacgagccctctcaccaacaagtaccttctccaaaaaacatgaagtcacatcgcccccacaaatcgagaaagtgggccacacatgggcaccacaacgccaaggagaggcccccaaataaaggatgcgggcagctgtaggagtaacaagggtcaagcaagcgacaacaccgccgaggacacacacgcaatgtaagagcgcgccgcggtggggaaacacataaaagcctgccgtagagtcaaagacgcaggcgaaggagaacaccccgcgataagataatcaagagaccgcaacaagagcacaccatagtaacacataaccaaccaccgaaggaggcggcaactcaccgcaggagacgggagcgcggacaaaagaacaatacatacacgacgcggagacgcgaggaaccacatcacagggggagggcacacaccccttgacagcttcacgttcggaagcaacagagcaagacgagcctcgacacacaggagggtgaaagaacaagcgaggcggggccaccccacagagaggagggagatctcacccgaccgccacgacgcagacgacaggcgacggcaaaagagtccggctccgacggaccaggagca

SEQ ID NO: 718064 - DNA, 849 bp, Homo sapiens
tcgtcccaacgctgctcacaaagactggtgggtccatggccctgtgttagttcatgcattcagttgagtcccaaatgaaagtttcatctcccgaaatgcagttccttagatgcccatctggacgtgatgccgcgcctgccgtgtaagaaggtgcaatcctagataacacagctagccagatagaagacacttttttctccaaaatgatgccttggggtggggagtggtagggggaagagctcccaccctaaggggcacacactgagttgcttatgccacttccttgttcaaaataaagtaactgccttaatcttatactcatggcttggagttaccttatattcaggtatatgtgatattttgcctggtttgttaaaattgccccatttagattccttctataattgttcttatagataagtaatttatatatgagctgtgttagtattttttcagtgtgagatctctggattctttcacaataaagctgttgaattttaacaggagtattagtacataaattttctactcaacaattccgagataggattatgcctagtttgtcatatcacagaaaaactccaagttaacttcatgttttggaagggcaggtcgtttttaaagtatttctttttttaactggatgaaaaatcttcatgttaggattaattttcttaatcacctccacactgtacagaggaaactcaagccttaaatgtttaagtaaactctgtctcagttttaggattaaaatacccaccggtggtgtgatgatgccatataccgcagggcttgcttctgtcaagtgtgactctatctcagtaattaaaataagtgctgatctactga

SEQ ID NO: 718065 - DNA, 109 bp, Homo sapiens
  misc_feature (96)..(96): n is a, c, g, or t
tcactcggtacctatctgtgttcggggttggggcgggttgttgggctgggggttccatctacaggcacggcagccagggagacctcagccagaggnggatgcctgaggg

SEQ ID NO: 718066 - DNA, 1005 bp, Homo sapiens
tccaaagaacagttaggagcaggaaaaacaactactactatctttcaagccagtactgccgaaatttcttcatgatcacgttgatctacaagtcagtgccctgtatgctctccaggtgcactgctataacagcaacttcccaaaaggcatgttacttcgcttttttgtgcacttctatgacatggaaattattgcacagacagcacagctcttcttggcttggcaacaaagcacagcaatcatccaccccaagagtttcccgggcaaaaggccacaggcttttgttcccaggtgaatccagtggctaaccctggttagcacaactgctgcaagcacacgaagcacatccagcaggcacagccaagctgcactcaacagcaacccagcccaaagccctttccacattgtgcacacaccatcactgtctgctcatgcatgtaactgcattctgaccctaaccactgcgaaaattcattccgctgtaatgtttctcacaatatttaacgcagaagcacgtcagttcaggatttccttctgcataaggttatctcgtcagtcgtaatgtccttaatccatagtctaccatcaactattcacggagtctctctaatgttctcagcatagtatattagccgcatgcaataattacatcataagttctcaagcacgaggcagtctattgcagaccttctttcgctgccagttatccatagctgtttgaagtagcaaaacctgactagcaccactgactctgtagacaatgcacttgctcagtatacttgcagtgtgcccatactttgaactatcccatttggttggtcccagaccaactctctcaccgtcattgcacgctctgtgccgacatctatctgctggtctcgttaactccacaaagggagtcagtgccacacctcatatcctgcaccgggccacggccagtcttacacaacgttcccgccacacgcacctacagagcgtacccccaccggtccgcggggcaacagg

SEQ ID NO: 718067 - DNA, 647 bp, Homo sapiens
tagtattaaattagtggatttatttaatggtaatttcaaacaattaaattatgaataaggcaaggtacagtaaaatcacgtttggattttattaacactggaccaagtttaactccatatgaagtgtaagctgtgatatcgttaatgatgtctatcaactggtgaccaaaaggtaaaacatttaaaaacaatcatctggaatggtcaagttttctctccataaagggactggccaccttaagggaccccaagtctggcgctgaaacatggagccacatcaaggccgggtaaaggcctgcatagacctaatctggcgatccgggaaacctcttttggcctggagctccccagccccaaactaagctgggtctggggagagggacgcaggcaggtcccaggagtcaagcacacgctggagcaagcagcacaataatccatcttaagactcctcattcggggagggctccacctcgcgggccttcgggggtacgtgccccgggatcttcagcacccggggccgccatcgccgtcgctgggttcttcgggactcatctggggccactggtccggttcacactccgccgccatcagggtgaagctcgcgaaggcgggtaaaaatcagggggaccccaagaaaatggtcctcg

SEQ ID NO: 718068 - DNA, 483 bp, Homo sapiens
gcaacaatagacactgggactactggggaggggagaggaaaggaaatgttgaaaaactgttgggtactatgctcagtgtctgggtgatgggatcattcatacaccaaacctcagtattacacaatattacctagataacgaacctgcatatgtaccccctgagtctaaaataaaagtttaaaaaatcctaaaaatgccaaaagatttataaaaacaacaacaaaaagacattacatggggtttccaaattgatctcttaaaaatcagaagtgggaggagggtgagtatcaaacaactacctattgggtactatgcttattacctgggtaatgaagtaatctgtacaccaaaccgtcatgatacacaattttcctatgtaacaaacgtgcatatgtacccccttaacctaaaataaaagttggaaagaaaaaagtttaaaaaattaaaattaagaaaataaaaaacttggtactaactgaaaaa

SEQ ID NO: 718069 - DNA, 171 bp, Homo sapiens
cacgcgttcagaatacgacctcacgtgccacttgacatggcctagagagatgcctcaggtgtcaccttcacctggactgccctcaatgtggggagacgcgctgttcaatggaccacctgaccgtgacctcgtgtggcttgctacatgggtgtccatgtgtcctgcctgggc

SEQ ID NO: 718070 - DNA, 183 bp, Homo sapiens
attcgcggccgcgtcgacgaggacgtttaccactgcagggtggagcactggggcttggatgagccttttctcaagcactgggagtttgatgctccaagccctctcccaaagactacagagaacgtggtgtgtgccctgggccttactggggttctggtgggcataattattgggaccatctac

SEQ ID NO: 718071 - DNA, 114 bp, Homo sapiens
tctaggttaagcatcagtttgccactctggttgctttgattggatgcacttcgtgagttcgtgcagagcgtcattctgcaatccggattccgtggtccgcccgcaatttttcga

SEQ ID NO: 718072 - DNA, 430 bp, Homo sapiens
  misc_feature (13)..(13): n is a, c, g, or t
  misc_feature (35)..(35): n is a, c, g, or t
  misc_feature (97)..(97): n is a, c, g, or t
  misc_feature (136)..(136): n is a, c, g, or t
  misc_feature (138)..(138): n is a, c, g, or t
  misc_feature (187)..(187): n is a, c, g, or t
  misc_feature (254)..(254): n is a, c, g, or t
  misc_feature (265)..(265): n is a, c, g, or t
  misc_feature (328)..(328): n is a, c, g, or t
  misc_feature (330)..(330): n is a, c, g, or t
  misc_feature (336)..(336): n is a, c, g, or t
  misc_feature (349)..(350): n is a, c, g, or t
ggggggggggagngggggggagggggggggggagnggggggaggggggggggggggggggggggggggggggaggggggggaggggggggggggggnggggggggggggaggagggggagggggagcgaggggggngnggggagggggcgggggagcgcagggggggggaaggggcggaggggccangagcggggaaggcccggggggagaggggggggacaggggcggggagcaaggggggaggggggcaggngaagggggggngggggggggcggggggacgcgcgcgggggcgcgggacggggcgagatggaggaagggaggaananaagggnagggggggggagnnaaaaccgcaccccattcctccccacactcatgggcctacacgctactccacctattccccttttatactaataatcttat

SEQ ID NO: 718073 - DNA, 615 bp, Homo sapiens
tcaggttatttaagttcattggatgggggctttgtccatatttcttgggttttttttgccttttttttctttaaattaggggaaatgtttaacctaaataaatttggggggtttttcatactgattggtttggattttttggaaaaattagggattttgtgtcaatttgaagggggggccgagtccccagatccgccctgtacagtagactttaacatttatttggccgtggtttaaaaactgcgggactggaaatacattggatagtgtgcttatggctgaatggctagtctttcaattgcgatagggataccttcggtagattctctaatggccactttagatccttttaatcctgggctccttccacgcctttcgctaactgtatatgtatcctttattacttgcaagtatgatttttatcttttcgaagactttttggtcatggtaccacctctgttattttcaactatgatgcccctattattttatgcttgaattgtccttagtataatatccatttattatggtaatgatctttgttttaatggtgtttttagttatggctctctccccttttttatagggtttatttctcaaggtctttcaataata

SEQ ID NO: 718074 - DNA, 292 bp, Homo sapiens
  misc_feature (63)..(63): n is a, c, g, or t
  misc_feature (93)..(93): n is a, c, g, or t
  misc_feature (119)..(119): n is a, c, g, or t
ataaggaaagctatataggaatacgcaaaacaggacacagtctctaaccccgtgaccttctanaaagtggacagacctctgctgatgacgcanggaacagcacctaagccctgtgcttnggcatccccgttttctgggttcatgcaatgcttcatcatcagcagtgcagagagctcaacagtctttatgagatgggacataactaagtgcactccaaacataccatgcttttcaacaatctcaaatcaaaatacgaatctacttttaagaaatgtggtaatagtttatgctg

SEQ ID NO: 718075 - DNA, 867 bp, Homo sapiens
gctctatcgcacgcctaagtctgccattgtctattcacccaggggctctctcccacttccaggtcaaggaaactcaacgcctcatatcgatttgcgcccctctcccattctccacgtcaaccttaccttgtacatattctcgtcttttacgcttttatcgaaccccaatacatctggctcccaaccttgccgactattcacttccacggcaatctaccttcccctctacgaccactcggtcaagtagcttacttatctctctggatatcgatctcgggtacattggagacggaaagggagtgataggcggctatatccgtgaccaccttaaatcgtaagcattactagatcattctcaatgcctagtatagtcctgatattgatgtgatctttcgttctttgtattacacctctttccatagattcatggcccaacacagtatataaaagagtggggaaggaactgcatttgcaaatagttcaaatcattgctccatctcaactacgcagttcacaaagtgtgaagaaatttgatcatctcaataaagataatggggaaaaaaatatgttttgttctgtgactttaaagtcctgcaatattttacataaatgataatgggtgctttaataagaactcttgatacttttgctattgtattcaatatatgcatataatacaacaggatgatattgttttggatttggaatgtattctttcttatgcaatcttatgcagtatatgttgaatatagtactgaattatattgttttttttgagttgttgtatatgacaactctacatatctggtgccggatcagtcattagtactcaggtatatttctcaactaaactgacaggtgatactt

SEQ ID NO: 718076 - DNA, 1088 bp, Homo sapiens
ccatcatgtctagtcacgtgttttggtttcggcaccatcagtatcaaatgtacaaacggttcttgctaaccaagcgccaggtatatctgatgttcagatgagttccaataaagagataatttttcttgttttttcaaagggggtctttttcttgagtgctggagggcttccaagcaagtccagacagctctgtgtagccccacgactagtctagctctcatctgggccaaagctgttatctcattggtgtcaggggagtccttcaaggtaaattgggggtccaaactgggagggcttggggggcaagaaagtgggggtgtgagtcctgaggtgggaaatgagttcaggtgtcttcttccagggcagcagggtccagtgagcacatgtaagttggggcagtagatcctctgagcctactttctcttctactcagtgaggatgctgcttcctgtggcaggtgatggtgatgtgaagcttagtaagtcatagacgtgcaggtgtctggagagtcctgacatgcagtgggggttccgttccctttgggaatcttcaaaggcagcgatttcatatggcctcaaaccctggcgggggcggggggctcgtgggaccactgtgggggacctgctaaatcctcttcagtctgagcagttcagccatggtcagttaagtatgggtctcggatttcacttgcagaaagagcttgcttctataaaggactttaaaagtactccaaagagatctagttggggagtaaggggagacggttctcaacttagggcgagcttgagatgctcaggcagtagccctttcatcagttccttggcgggtcttgagcaaaatgatggctctagaccgtgctgccaattgtagcgtatcctgtgcactgtaggcctgtgaacggtgtgggtccaaactgtgatacatgcaggtgtaacagaagacgaatttgaaggttggattgtataccaacagaagggtgttacatttgcacaagttttatattgtgtgacattggattgggtgaaaacattattagtgagaaagaaaagaaataaacaaacaatataaataaataaaagaaatcataa

SEQ ID NO: 718077 - DNA, 129 bp, Homo sapiens
cacttaaggacccgcacgttaggaccgaaagatgtactatctggaggcgagcagagaatctgtgaggtcgtagcggtctacgtgcaatcggtcgtccgacctggtataggggcgaagtcacgatgtgtc

SEQ ID NO: 718078 - DNA, 1421 bp, Homo sapiens
ctcactgcgtacgggaagctgcaggctgacagcgggacggggagaaccagatgtccccagtgcgtgaactgatgatacactggagaaagagagactatccacacagggagcagctgcgcgacactcgtaagagccaagatacgcaattcgtctggtgcaacagtgggcagcgcgcgctaggaatgtttcacgtaatgtgtagttggcaaaccgtgtgtagtgttgtggcttgtattgattgttattattaacaatacattgacggaacaaacgcatgggaaaagtagatacaatagggacgtacttgtaaaatttgtggtaggtaccattgcggattattcacgggacgatgcaaattatctgatcagactatactcaacttgaagatcatgagtaagcgaggtggtagagaacggatgggcacacgaagagggaacacacccagggggccaccaccaggtaccatccccgggggagaattgggaggatccatggtgatgatggaccacacagtgcaaccggggccccaagaaagagagacatgaggatgggggaccctaagaacgcaaacccaaaggcacccccagtgagacgcaagacagaaaggggccccgaatggggggatacaccaatatgggaagcaacaacccatcaagctgacagagcaagggcacagggaaaccaccaacagcgggggacaagatcaccacgagcaggagcaaataacacccaaggcgataggaccatccaacacatggacaaaaaagaggacacacacacaaaaaaaaggtgcatagaagagcaccaaacaatctacactcctaaaacacaagagagcccaatccgagcagcgtaacacgaagaccaccacaggggccaaccatatgagcagagaagaaccgccataagatgcagacaagaagtccacaagagaccaaaaatcaaaggacgaaaagaggacatggcaacaatccccacaacagaaacaccgactagaaggcaaaaaaaagaacaacagcatgcacaccatgaggacagcatgaacccaaacaacacaataaaacaacccacaacaaaacacagagaaaaaccaacgaactagcagacaacaccaaaccggcaacaagtacacccacaaccaagaacaagcgaagaacacagacaactatgagagcaaaaaatgaaaaaaacaagcacactcaacgacacacacgcaccattgccacaccacaacaggatacaaacaaacgaacaaccagaagaccaacaacgcaaccaagcaaacaaaaccacgcagaccaaaacaacagaagataccacgaaaacagcaaataacaacgaaccacacccacccagacaacccccacccacacagaacaaaacaagaaagaaaacaaccagaagcagaagaaaacaaaaaa

SEQ ID NO: 718079 - DNA, 247 bp, Homo sapiens
ctccccgatacagggtcaatccccacccaccaccctgtaatcatcatgccacagggagctctagcactagagtgtaagtgggcacccccccatgtaatccccatgttctccttatcagggaaagacaaagaggtggcatcagctccttaagcatctcaatcatgcagattagccagacactgtcttgagccggttcccggactggatcgtcctttcactccagcggactgcaaagcgggtgggtgag

SEQ ID NO: 718080 - DNA, 174 bp, Homo sapiens
gggtactggggacagtgggcaacaacgtaaatccacacaattacaagcaggaaagctttgatcagggagtcacttacacagagcgtgacacagaatcacaaacacagagtactatacacagcccacggaaaattcaggcacaggctccgttggcaggcaggggttttttgcagc

SEQ ID NO: 718081 - DNA, 256 bp, Homo sapiens
acgggtcaaacatgtaggtggatgtgtatatgcacgaactatgggtgtatctctgttcacacacaccctagtttggaccatatttggcttcattactacattatgataacatgggtaaagcaaaaactctcatttaacagaaagctgtagtaaacgacgcaatcagcagccaggtatagactctacatcccaaaccgaacacgaggctatatatttacgaaagaaaatcatttacctccaacaaccctacattggt

SEQ ID NO: 718082 - DNA, 383 bp, Homo sapiens
cattagcccctgaggctatgatagttaaatctaagatcctgtaacccatcttcccttcgaagctactgggaatggctgtataccttatacacataattgtgtaactgtctatgaatccaggagaacggagacaaagcccaggtaaatgcgaaatttaagccattctacaggcatgtaattaagtaactgagctgatgaaacaattaaaattaaaaaagaaagagagagagaaaaaagacgccatttagagctatgcgtgacaaagcacgagagagaccttagtttgcggaaagtgatggctgataagggacaggccacagatcattaaaatgctgggggaaagcaaaatggctcataaaatgtgatatcatcaggctggaaat

SEQ ID NO: 718083 - DNA, 1126 bp, Homo sapiens
ggcgtgtcggcccgggatttttgggatccaccggaccaggagtgtcctgccggactggagaggtcaggtgtgacgtggctcaccctcgtgagcctggtgaatagtgaggacttgcctgtgacatgacccagggatctgctgctggcttctggcagacagggccttgggctgacttctcaggttgtattgaggcctcctgactagcggagttcccaggctagaggtgattggctgcaacaaagatgcttctattagtctattagcagtgccttcgggaccctgggattttgctctctctagaaaggtgttatatatttttaaatttaattatctccccctttattcctggcttagctccagggattagagtattatgcctgtatatagtcctgctctattaaaaaacgggattgaaaactcaagcctattcctgattcaaaccataaataatacggatacttaaagataaacatgaaaacaagttagggcataatgtggacaaggggcatggacagcatcggaagacatccgccatgcaaggaaaggcaatcttctcgcacatctgaaggcaaaagagcataaagcccgatggaaaactcccacgtagaggtagaaagagatgagccagcaaaaattaggaacaccaaagaaacgacattgacataatacagccaaagccaaactgtggaggaacacaataccagaaagataagcaaatagagagactcactatgaagttttaacacacacgatcacaaaacagaataagaaccttatacacaactaaacacatccagagaatagacaatcacccaccagacaaaatcaagagagaataaaggcaacaaataacaaccgaagagaaaagagagaacacaaacgtggcacacaacaacaaaagataatcacaagcccccggatgggagaacgaggaaatatatgtaaaatcacatccaatgaccacattcattacaccaaagagaagaggaaaaaaacacaaaagaggacaagatagaaaagtagacgacataacaacttaacaaaagaagaaaaaaataccactagagatacaccacacaccacaccaaagacaagcaaagtgaaaccagaacacacaacaaaaaaa

SEQ ID NO: 718084 - DNA, 147 bp, Homo sapiens
ggtcgctctagacggatccctctatcgacggtgtactgggataaatatcaacataaaaagcacgccggaactgtttgcacacacagcactcgtttggtatatgctataatacagagttcttcagcaaagtctttatatatacgattt

SEQ ID NO: 718085 - DNA, 871 bp, Homo sapiens
  misc_feature (213)..(213): n is a, c, g, or t
ctcgcgtttcagcggctcactgtttgtgcgcgggccccttggtggggggaaacggccccccacttggtccgggaacagagcacgtgttctcggccacgggcggtccggcgggttgtcgctggcgcccccgttgttagagtgggcccgttatgcgccgttttcgggcccccccattagtggggacagcccgcgggcacaccaccgacgtgtttncctgtgagtgcggttctctcccccagggctttacaatctaagagggacacctccccggggctgtcccactccccccctgcctgtattctatgggcgaaacagcgttatttggggaacacccgcccgcccggaaaggcgcagaccgctcagaaccccggggtgcacctacagtaagccgccccccctgccgccgccccccaccggttctacccccatgcctcccccccccccacatagatgcgagagcaccaagacattaccaacaacccggcagaggaccaagcgatatgaagacaactccacaactaacaatgggggaggggactcactagcccaaaaaaataaagggatctccaacagcagggtacaatctggccatagagacacaggccaccacctgcccactgcggcgttaggcaccccaagacccaccgggaacaacccaatgtccaccgccggagcaaacacggccactaagaactgataagaacccgaagtagagaagatacaacatggacccgggaggcctatggcgtagtgggcccagcgggacgccagcaccacgacggggtgagtcgcgagcagagacaccccccggagttgcaccagagtgagggcccacccgcgggcccccaggggaacttctccccaaaaaaca

SEQ ID NO: 718086 - DNA, 249 bp, Homo sapiens
ccccccccccccctgcccccttccaaccaatgaaaattggattttgggggggtggggccccgtcccctccttaaatggtggcaacccaatggcccccccttcaggcccttgggggattcccccagtgggccccaaacacccccatattttgggggggcaccttttttggactttggagttggggggggtccaacccccccggaactgtccccccccccggatgggccaaaaaattggtggggggcggga

SEQ ID NO: 718087 - DNA, 876 bp, Homo sapiens
agattgctacagcatgcgtctgactggcgagccctgcctggttactgaaccctggtgataggctgtcctatacgagagtcctgagagggccccattgggggcatgcacatacagtccacaagacggctggaggtgaacgagggcttctagagatcagtattccaggaattgcgaaggttcatgcacggtacgattaactggagtctcataaagagcggatgtctcaacccggagtggcgcatatctaagatccacaacctggcctgaggctcacgaggctgcacggagggaggacttgggcacagcctgagtctggggtgactccatttcagtgacctcacagaggaggagtttggccagctctatggctatcgcgagggacagctggaggggtccccagcatgggcagagcaaataaggtctgaagagccagaggagtcagtaccctttccagctgtgaactggcggaatggtggccgggccatctcacccatcaaggaccagaaaaactgcaattgcttgctgggccatgggccagcggcagtgcaaacatagagaccctgtggcgcaatcagttcgtgggatacggtgacaagtcttccgtgcaaggaaactgctggactgtccgccgcatggggagatggcctggcaacggggctccgactggaaccgccgtcataacgtgtcctcacaacaggcggcctggccacgtgaaaaggactaccggtccacgacaaggtagagccaaggtgccacccaagagtacaaagggggccggatcaggacttcatatagtgaaaaacaacagacagaatggcaaactggccataggccaacggcactaaagaacctgcgtaccgaagtgtcgcccacatt

SEQ ID NO: 718088 - DNA, 126 bp, Homo sapiens
taaatcagaatcacagaaacgctgatcagctgaggcatggtggttttgagtgcaatccggccatgctctgagtcagaggcagcccatccagcacgtgctaggtgttcccatacgcccaggtaaaca

SEQ ID NO: 718089 - DNA, 382 bp, Homo sapiens
  misc_feature (51)..(51): n is a, c, g, or t
  misc_feature (100)..(100): n is a, c, g, or t
  misc_feature (186)..(186): n is a, c, g, or t
  misc_feature (291)..(291): n is a, c, g, or t
agcccccggggaaggccaaactggaactggtggggggaaaaaaaccccctnaagggactttggtgtggtggtggtggtggtgtggccctttttctctccnagcttcaatcactggataagaagatttcacccagaactcccccccaggattgccctattttcccagccatcttgttaaaaagttgntccttgtgttaaactaaatttgtctttgaataccttggtccctggctgagcctcctgataccctgcagatgcagtccacccatcatccactcaacagcctttcanccaggcaaggataatgaccatgttggcattctccccacctcctgctcactgtctttttcctatttttttttactgagagcccatctcatta

SEQ ID NO: 718090 - DNA, 153 bp, Homo sapiens
ggtctcaaaaacaaaacaaattacactacagtaaaattctagtacagcaaatcgggatagcaaattagcaaaggtgtgatattctaaaagtaacctagggttggactaacaggaaagtctatccaagggcggggcgtaggggctcaccagggg

SEQ ID NO: 718091 - DNA, 532 bp, Homo sapiens
gtctgggcgcgcgcgacgtcagttagagttctgtgtactccccgcccgtgtccgaccgaccgtgcccgcgatgctggcgctggctgcggtcccgatggtcggcctgctctccgtacccggctccgtgccagtggcctccccgcggccgcgcctgcagcaagggctccggatgacccgtcctcttcctcctcctccgggaacccgctcgtgtacctggacgtggacgccaacgggaagccgctcggcgcgtggtgctggagctgaaggcagatgtcgtcccaaagacagctgagaactacagagccctgtgcactggtgacgaagggcttacggctacaaaaggctccaccttaccacagggtgatcccttccttcatgtgccaggcgggcgacttcaccaaacacaatggcaccaggcgggaagtaccatactacggaagccgctttcctgacgagaaactttacactgaagcacgtgagggccaggtgtcctgtccatggctaattgctggtcctaaaaacaaaggtcaca

SEQ ID NO: 718092 - DNA, 598 bp, Homo sapiens
atccagttgttgtcacacctcttgtacaaatggcgaggttcaccctgcggcttccaaggcgctgtgatgataggacgtgagccgcactgtctgctggcgggtgaattttctatgaggtacgacagcccaaaggtgccgctatggacgcggaagcctgtggctacaatacaagctgagccaccgttgcctatggaaatttgtaatgtcgcctctagatactaatagcattgggagcgggcactgcatgaacgcagtaatgccgcactgaggagtgcacggatgagtcgaaaacggtggctgcctaaaacactaaggcgagcgaatgacgatggtgctcctgatgcagagtcctacgggagtacagagtttagacacgtctacaggatggacacaagcactctctgtgggactgcagagcaccaataggttgggaacacggaaatccgtcggtataggaggactgcgtagaaaaagggtagcaagggagaaacttcccaggttagtaggcgggcactctcggttttcaaacctttggggtcaacctgtgttgtctagacttgttaaacgcgtttgccacctaccaacctacctttgaata

SEQ ID NO: 718093 - DNA, 339 bp, Homo sapiens
taaatgcagagtactactggaaagtgcctacaggctttcatagccatcttcgtgtcattctaacatcagaatgaaacttactaaaaatctcttccatataatctagataatggtcccttactgatttcctctttaatgctgtgcttatttccagctgttatcagggccgaatttgaagacagaaaagagactatgttaatacgcagtctccctgaaagcaggaaggaagtcctttggactgattaaggccagcatgacgttcacagcgaacaagctcattctggcgaaatcaaagcagtaattccagtgtttgttccctgtcagccatgtcagcagcca

SEQ ID NO: 718094 - DNA, 484 bp, Homo sapiens
  misc_feature (30)..(30): n is a, c, g, or t
  misc_feature (73)..(73): n is a, c, g, or t
  misc_feature (216)..(216): n is a, c, g, or t
gggaattccagtaatcagagatttgggggnaagctatgtggctattattattaaaactgagttctaaccaggncaaatccagagttgaattacttctaactctggtaccacagcagttgcctttttttcaccactaacaaactttcttaaatatacgtacgaaatatttaaagcaccagccaccccaacaaagagctgcttatggccgggcggtgngtgtgacgcctgtagtcccagcagtttgggaggctgaggcgggtggatcacctggtcgggggatcgagccatcctggctaacacggtgaagccccgtctctactaaaaatacagaggattggccgggcgtggtggtgggcgcctgtagtcccagctactcagagaggctgaggcaggagagtggcgtgagcccgggaggcggagcttgcagtgagccaagatcgtgtcactgcacttctgcctgggcgacagagcaagactctgtctc

SEQ ID NO: 718095 - DNA, 872 bp, Homo sapiens
aaaggctttgctccaggggcaaaatcctagagaattctgcacggagctatcagctatcccagtttgcacaattcatgcaagacacttatgccgggggtcacctggctacaaactcatgaggcatctcctggaaagcttaacttcgttatccatcccatctcttggacagatgatgccagttaattaatctcgaatgggtctgtcacacgcagcccaactcaacatggagtccatgatgaaggtgaacagatccatggatggatggccagggaactcaccagaagtccccaggcatcagaacaaggtcgaagcatcctgattagggtaccagtaggccctaggcagtacttttgtggtaaacgaggtacagacctttggctcctcactgtcttcaagcccacatagaaagcatagagcagatagtaagacagacgagggcccatctggcccaactacctgttcttgtaaataaagctttattgaagccaggtgctcaccttctagcacattcttcagagtagttactctgaggcaagccagcacgccatgtcatgaggacactcaagcagctccatggagaggtccgatgggcgaggaacagaggatcccccagctctactagctcacatgaggaacaggcctcctgccacagccgtgacaaagccggagacagccaaatatgatcccgcttacctattacttaggatgcccctcttgctaatgagcacaacgtagctttcactgcaccaccaacaggagcgtacctgaagcctctcgtttttcagctataaagccttcccctcggcctgcctttgagtataccacgaaggcaggacagtgcgcataccggggagctcgtaaaacatggaccc

SEQ ID NO: 718096 - DNA, 398 bp, Homo sapiens
  misc_feature (21)..(21): n is a, c, g, or t
  misc_feature (180)..(180): n is a, c, g, or t
  misc_feature (186)..(186): n is a, c, g, or t
  misc_feature (236)..(236): n is a, c, g, or t
  misc_feature (377)..(377): n is a, c, g, or t
aagagatggggtatcactatnttgcccaggctcggtctcaaactcctggactcaagctatctttctgccttggcctcccaaagtgctaggattacaggcatgagccactgtgcccagctagttgcttacttcttaagtgacctaatggtgacttcagtgctccgagggcacttcctaggntatttnggtgggccctcagtaataaagagattgtataatctttgtaatactgattnagccaatttatcttccgtacagtatcatcactttcattttcgatactacttgcaacctgaaaaaactaaagcctactaacatatgctaaccaaaaatacctacctttttagtgccattaaattgtaaaattccaaaggtcntggaattttcccaaaaatttt

SEQ ID NO: 718097 - DNA, 162 bp, Homo sapiens
caggctcttttccatcaaatgcgttgttgtactttcagagcacgtttaaacgtcagtttgttttccctatatccgacttgttggcctctatgaaattccctctgccgcgacctttgtacgcccatctactgtctgaaggggaacaactgcgtttcacgggga

SEQ ID NO: 718098 - DNA, 275 bp, Homo sapiens
cctccagggttcagttcaagcaattctcgtacctcagcctcccaagtagctgagataataggcgtgcatcaccaagcctggctaatttctctacttttagtagagacagggtttcaccatgttgaccagatgggtttcgaactcctggcttcaagtgatccacccacctcggcctcccaaagtgctaagattacaggcataagccactgcacccggccacattctctcttttccttagatgcagataagtcaagagagagcgatcagagaaaggg

SEQ ID NO: 718099 - DNA, 264 bp, Homo sapiens
tcttgcgcttgccatagtaaaactccttgtaagctgtttcgattatgaagaaatgccacaaagccttaccagtatagaagtgtttaatctcttaagcggttaaacggtaaaaacagttaaaaataattaataatatgtacccagtattaacgacgctgtatgggcgggtgcatttgggctagcgttcggtgccgcgggcgatggcggtcaatgaagcgccactggggtgcgaggatggaccgaagctcgccggcgagtgcaacg

SEQ ID NO: 718100 - DNA, 1276 bp, Homo sapiens
ggagttgctcaccgtgcttggagtctgtccatgctgaggaccctgtgaaccagaggtgtgtcgcgtgtctccgtgttgcactatactggcactgactataattcatgttaaccatagaagagatgtccctcagaaaatgaagggaaatggtcaacatatgctggtgtagctggtcatggaattcaagaagacaacactcctcacaccactggaaccacctaggtgatccctcctggactcagcactcagcaaccagcacaaacgctactggtgtccctctgtctccacgatctttccctgagtacaaacaggtagccctgcgtgagtaggcatcttccatcatcagagatctccaactgaagctggagctgcagccagtcacctggttcttcagcaccaggacaagaaatggaaactcagtttaaaaagatcacgtcaaaaggctaaatggtacaagatgacccatgggttgggaaagacagaccccttatatgatttattgactggttacttcaggtatggaatattctcacattggattccacatgttaacttagtaatgtccttattgggcgtcctacttgattcttagatcaatatgcctgcatctctatctaaagtgtgtgacgaaactaactctgatagtagaggctgaattttacacgccaattcttggaagggtgaatctcggaccattcctggcctgtgtgtgcgcgaataggcaactccagttagggggcgccttcccaggaagaagcggggctgcgggatgtcttcttacgcctccagagcgacatgttgtcgtgctgttcactggactctcttaaataacaaacaatgcgccgccgtcccctactcactcctccctccgcgacacgcgctcctgccaagaccgcagcccgccggccgaccgtgctgcacctccgtagactacaccagctccgcgatgcggcatcggcgcctgctcccattcctccgacacttcctaccttctgactatgcctcgtctgagcgggcacggccggggacgagagcgacggcgcggcgcgcccacggcgcgccacggccgcgacgcttccgccgccagccgtcgcggtggcgaagcagcaggatgccgccgtgcacgccgcccgcgcctgcgtccggctgctggacgtctctgtgaactgcacccgccgactgcatggacgggacgagtgtgtgagggagtcgttgcagcgggctcgcgtcgagcgcgaacgtccaggtgatccgatgcgagtgggcctcactccgc

SEQ ID NO: 718101 - DNA, 344 bp, Homo sapiens
  misc_feature (212)..(212): n is a, c, g, or t
  misc_feature (224)..(224): n is a, c, g, or t
cagtgaagtttaataaaagtgctggttaagggtggacagaactagaagaggtagatagggattttcacctgtgaggtccatggtgtatactagtttgcatacgacgttcactgcaaggggggcaacgtgtgggttgctatattaaagaacaacgagcccgtgatgtagaggtgggaggagtaggaggagtgagggcaaatcaaagaggtagntgacaaacatanataggagattgaaattagggagatgtggtatacatgttaaaatataagaacaggctgcaggactgtatgctgggcagtatgtccactcctccttgggaggatatttattgtatcccatgt

SEQ ID NO: 718102 - DNA, 1331 bp, Homo sapiens
  misc_feature (1321)..(1321): n is a, c, g, or t
tccatgatccaacatcgaggtcgtaaaccctattgttgactatggacctctagaaattaggattgcgctgtttactcccatagggtaacgttggttccgtgggctcgaacgttatgggactcaatgtgagtatagtagtatcgcttagactggtgaagctctaagcatgtactgcctcgagaggtggggttctgctaccgaggtcgccccaaccgaaattcttccaatggcaggttagggtaagttaaggacctggtgggtatggtcaaggtactgagttcggctttcatataattttaagagtctccataagggtacttctacgtactaggctggtggtcatgagcccgctctcttcacgggcaggtcaatttcactgggttcaacaatgtaaagaagacagtctggaaccctcgtgggagccattcctatacaggtccctaatttagggaacaagttgacttatgctacctttgcacggtttagggtaccgcggccgttaaacatttgttgtcactgggcacggcgggtgcctcataaatacgggtgatgctaagaggcaggcaaatgttcttgggtaaaacacgggcggggtacagactctgcccagagttcctcttcacttgtttctataaaccctttccctttattgaaagcattgttcttgttcttcgcgctttagacacgtcgcacggcgtaaccacctgcaactatggctctcggcagacactcggtaacaattctggagcaccgtgacacatctggccaccaggcccacgggtgtcaaaacaccctcgtgacacccacgcaggctataatcatgaccggcgcgagcgaacaccaacggtgttcccacacgcggcgccacgctacatacccaacacgcataaagtatgacaacccaaaaaaaggggggcggacagcaaacagtgccgcccccacaggcgggcgcttgcgagagagaaacaccagccaactcgttccgagtggcgagaataataccggaaccaagacgggtgcagagaacaaacagcatatacagagagaacgagcggaaaaagagccgacccacaaggccgacgaaataaaacgactcactccgagacgatgagtcctcgttaacaacaacaacgtcgtggtcgtactagcaaaacaaaaggagcgaaaagagatggacgacaaaactaagcatcatttactcacaacatgacgatgagtgtgcgccacttcaataacgatgcagaagtgactcaggtgctcatctctcttctcttgttgcttgtcttcctctttctgtccgtcctgttttgatgctatacanaagaaaggaa

SEQ ID NO: 718103 - DNA, 200 bp, Homo sapiens
tggatttgaaatggtttttctccatggcaaaattaagctagggaaacactaacccaaaaactttctgtagagcggatccttggaaggcagcatcacttatgggcagtaaagactcagtataaaagcaccagaggtaacccttaatttaaaacaccaataaaataggtgtcacaggagaaaaaaggtcaaaaaaggggcgg

SEQ ID NO: 718104 - DNA, 474 bp, Homo sapiens
  misc_feature (297)..(297): n is a, c, g, or t
ctaacttaggtgcatgaagagtcccatctgagcaggaagacatttctctttcctgcatatgccacttcttgctcgaggtagcagtgctctatcttcgtcctcagtggtcgtgctcgtgtttccttgtgtgccccagctggacggttccctgaggtggaacttcctctgagaatctggcgatgagctagggagatgaagtcggccattcttctgtgcaaagtattctacaggcaaaagtgatgcgcagtttcctctgagactgctaggagtaggagaatccaacgagcgatgccctgngagactctgggcattcctgaaccattatccatgcatgaaaaacccaaagtggtccttaccctatatcactctgaatgttgtgttttctccactgtctcagcacgcctcctaaattgaagtgcctagtgaagagtcccatcatgagcaggaagacatttctctttcctgatatgccat

SEQ ID NO: 718105 - DNA, 193 bp, Homo sapiens
  misc_feature (8)..(8): n is a, c, g, or t
gacgggtnacatgttggccaggctggtctcgaactcctaacctcaggtggtaccacccacctacaattaattttagtcttgcggttaagttaaagggacagtggcttctagctgcccttactgatctcacttagtggattagtgtataaaccgaggctctacaacagcccaagatgtcactttgaatctggga

SEQ ID NO: 718106 - DNA, 186 bp, Homo sapiens
  misc_feature (174)..(174): n is a, c, g, or t
ccaggtaggaatagatacagtcagtctggttcagagcctgtatgacaacctgtagttagaagtgaattgagagcaagatggaatatcaaaatgcctttaccatcctgtacagataagtgtttttcctattccgaaaagatggctgctaagtaggtatttattggtgcatctgtnatgggcagggca

SEQ ID NO: 718107 - DNA, 684 bp, Homo sapiens
  misc_feature (4)..(4): n is a, c, g, or t
  misc_feature (92)..(92): n is a, c, g, or t
  misc_feature (165)..(165): n is a, c, g, or t
  misc_feature (180)..(180): n is a, c, g, or t
  misc_feature (188)..(188): n is a, c, g, or t
  misc_feature (255)..(255): n is a, c, g, or t
  misc_feature (328)..(328): n is a, c, g, or t
  misc_feature (403)..(403): n is a, c, g, or t
  misc_feature (421)..(421): n is a, c, g, or t
  misc_feature (423)..(423): n is a, c, g, or t
  misc_feature (448)..(448): n is a, c, g, or t
  misc_feature (462)..(462): n is a, c, g, or t
  misc_feature (464)..(464): n is a, c, g, or t
  misc_feature (494)..(494): n is a, c, g, or t
  misc_feature (498)..(498): n is a, c, g, or t
  misc_feature (552)..(552): n is a, c, g, or t
  misc_feature (579)..(579): n is a, c, g, or t
  misc_feature (591)..(591): n is a, c, g, or t
  misc_feature (615)..(615): n is a, c, g, or t
  misc_feature (657)..(657): n is a, c, g, or t
agtncaggatttttttcaccagaggacattgcttggtccccagagctcaggaccctgtgttttgtcttacttccacccacagagctcctgtntccaggcatcaactccaactcccacttctggaggccgaggcaggaggatcacttgagcgcaggagttcgagancagcctgggccacanagtgagancttgttttcacacaaaaattttaaaaatagctgggcttggtggtggcatgtacctgttgttctagcnactcgagaggctgaagttggaggatcactttgagcccaggaggtggaggctgcagttagcagttatcactgtnctccagcctggtgacagagcgagatcctattaccgccccccgccccatcaaaaaaaaactgagtagacaggtgtnctcttggcatgaaaagtntnaagttccctcccagaactgtgaaanttgacaggtgtgtntncctctggacctcggtgtccccatctgagtnaganaaggtagttgggaggtggatcttccagttgaagcggtatagaagcacgttttanaagccataatccaaggggctccaagtncagcgcacagtnccagaagggcccagcaaggcagcnagggcggcacaggcaccaggtcccaaccttcttccctgtttncccactcttagaccccggagttcatca

SEQ ID NO: 718108 - DNA, 311 bp, Homo sapiens
atcgaggtactgtcgagcgcccatatcaactttaccgatgcctcgccgatgaagccatgggccaacacacccgctgttgcaacgcctgggttgtcagtttcattggcagaacctgtggttaccgcgacttccaggatttcctcgacgccctgagttcacgcaaggccgcaaacatgctgcgcaacagagcgcgacacaagtggcagggcagggtatcgagttcgagtggttgcaaggccatgagctgagcgaatcccagtgggcaatatgtttacgcctgctacgccaacacctacgcggtggtcggcaat

SEQ ID NO: 718109 - DNA, 148 bp, Homo sapiens
  misc_feature (51)..(51): n is a, c, g, or t
  misc_feature (97)..(97): n is a, c, g, or t
gcttttcggaaggcggctaagtcccggcagcgggaacacagagagcgaacncagcctggctttcgaaaacatctgggcctgctggagaaaaagaaanattacaaacttcgtgcagatgactaccgtaaaaaacaagaatacctcaaag

SEQ ID NO: 718110 - DNA, 872 bp, Homo sapiens
taaatatgagaatattttaattatttaatcatacggaaaagattaaatgtccacatacatgctttttggaccattttggtagtcggttttaattttttaatcttatttactatatgcttaaataaaatggtcattttgtggataattatagattcacatccatggtaagaaataatacaagatactatacaaggataatatctggccaaactacaggacaatattatacccaggatatggacatgtgatacagttaagatatagaacatttccatcatcaaagggggtccctcagtgtggccttattacagccacacccagttccctcccacatcaacctgtccttgactcccggaaaccgcataatttggtcactttcaagaatggctatataagagggaatcatatattctatgattgaacaaatgaccttgtgagatggccttttttacttcataattggcgggaaattcattcaggtggctgtatcaatagtcattccttttcactggctgaggaataattgctgatgagatatacatgcttcttttttagcatggtcctagaaaattaataagaacagcactttcaacctagataggtctttcctaaggtctaaatacttatattgtgccgggtgttgggtggctcatggctgtaatatccagcctttggaacctgagcaaggtgaatcgctgaattcacgagtgagagtcccggccacagggtgaatctttccaaaatacacattactgcctgtgttgtaccacatagagacaggaggagaacggacagagtagggttaggccattgtcactcaccctggtgataaaacgacatatatgattacgaaaacacgactggatgagaca

SEQ ID NO: 718111 - DNA, 363 bp, Homo sapiens
  misc_feature (34)..(34): n is a, c, g, or t
  misc_feature (67)..(67): n is a, c, g, or t
  misc_feature (121)..(121): n is a, c, g, or t
  misc_feature (132)..(132): n is a, c, g, or t
  misc_feature (342)..(342): n is a, c, g, or t
gttctttgatgccaggcatggtggcccacaattntaatcccagcactttgggaggccaaggcagggntcacttgaggccaggagttcaagagcagccttagcaacatggtgaaaccctgtntctacaaaaantttaaaaaattagctgggcatggtggcatatgcctgtcattccagctactcaggaggctgaggtaggagcattatttgagcctgggtagttgagggtgcagtgagttgtggttgcaacactgcactccagcttaggcaacaaagcaagaccttgtctcaaaaaaaaaaagatttattctatttgatagttaaagaattcaatgctgggtnattctgaggcagaccaaattt

SEQ ID NO: 718112 - DNA, 503 bp, Homo sapiens
cgcaggcaatcataactcattggaggataaagttagtgctggatatgtggttcctgatgcatttgacttgtctgggaaaatgctttatcttgtactttaaatgatttatttcaataaaactaattgggaccacccgtatttcagtaggacctgggtagggattggaagtacttggcagggcagcagcaatcttgctgtgtttgatataacatgcatccttgggcaggttgcccttaaatcttacactgtggtgaagggatgtttttttttgtaatgctgcagtagagttggagtacttagttctcttgttgtccagtatatctaataagtgtttttcatattatttccacgtaagggaaataaggtagtacttttctttttatatttctatgcttaaaattctctttcctagtcaaaaattgcccaaatctgtgtttgctttctgcttgctacatttgtctcccttacttttcttgagctaaagacaggctttttccaccggc

SEQ ID NO: 718113 - DNA, 815 bp, Homo sapiens
  misc_feature (472)..(472): n is a, c, g, or t
  misc_feature (815)..(815): n is a, c, g, or t
taaatgcagtaccacgagtatagccctggatgctggagaatgagtttgaatcctggcttcaccacttatgatggaatctacttaagttctctgcacttctttggacttcagtttcctcactataaataattataataataagatctccctcactgggtcattgtgagattgaatgcatgtcatccatgtaaaatgcctagaacagtgcctgacacatagtaagttatatgaatgtctgctattatgataaggtagtatgatattctgctatggtttgagatcaatatgcaaaaattggtagtattctaaacactgcaacaaatagcgaaaatatataatttgtaaaagatcacttttatataacttgtaatagcataaaaataaggtacctaggaataaatctaacaaatgaggcgcatgatctttaaaaagaaaattataaaattttatcaaatgtaattaaagagactanaaaaaaaaaaaaaaaaaaaaaaaattttgggggggcgggccgaaaaagttttaaaccacttcttgggcggggggccatgtttattacactggccaaggtccaaggaaacctcggcgctgagtatctgtgttggtttccccataaaaaaccgcggcgcaccggcgctgttggacatccaaggcgttcgggctaccggtttcacgggtccacgatcgtagccccccctcgccgtgcttggacccatcaaatcaccaacgccacattataattcttcaaatattaactaatagcgacaattatcgaacagaaacattcactttttattctcatctatttagctaan

SEQ ID NO: 718114 - DNA, 395 bp, Homo sapiens
gttatttgatctaaaccatcaggtctatgccgaccccagataagtaactcatacaaggagttaaagcgcaattatgtgttttatctccagtacattgccatcattgtcagttatgtagctgctctacagataatctcagtgcgtccttgctgggatgacacaaatctactgccggagaatatcaacaccaaacacattggttcaccgttccacgggagcgaacagcacacagcatatcataatgttctgaataatggccaaatctactgccggagaatatcaacaccaaacacattggttcaccgttccacgggagcggacagtacacagcataccataatgttctgaataatggccaagtcgtcgacgcggccgcgaatttagtaatagtagta

SEQ ID NO: 718115 - DNA, 347 bp, Homo sapiens
  misc_feature (295)..(295): n is a, c, g, or t
  misc_feature (329)..(329): n is a, c, g, or t
  misc_feature (338)..(338): n is a, c, g, or t
acaagctaactgtaaaggctgtttcaaatagcagcacacaagccatatcaacctgggaggcagtaaataaacttagaatccccaagttcatattccacctttcaattgaatgcaggtggaatgcaccaaagacctcgtgtgttttgttgtttttccctgcggtgtgtagtctttcatggctagacctactaaaatgctaaccatcactcctatgttggcttggctttggcatcaaacttgagagcagcaaattgagcattccctctgtgtgtggtgtggggaacgcaaccgaggnttctcatactgtgccagggatgagggataaaggnaagtgtgtncattaaaat

SEQ ID NO: 718116 - DNA, 105 bp, Homo sapiens
tggaatgatttggatgtaggaaaatttacagtagaattcacaggctttatgtgagtaaaggctcccccctttcattaagtgctgccatatctcttagctctgtaa

SEQ ID NO: 718117 - DNA, 136 bp, Homo sapiens
cacgaggggaggatagacgcctttgctcagatggacctcgacacccaatcggaggacgacacaataaatggaaggcttctaactccaaggagaccgaccgttaaaagagcctcccggatccccacctgatgtcacc

SEQ ID NO: 718118 - DNA, 495 bp, Homo sapiens
  misc_feature (133)..(133): n is a, c, g, or t
tatcttaaagacatggggtaggttgagggcactgtacacttggtccagtgatggtgctctaagcaacagaatcacagggtgttctcagtaactgatccccatggtggcaggacagtatctttaattagaatanacccctactcccaccccaccccacctcagtgcaattcccaggagcgcttgctaatgatcgttgcccttctgaccttcactttccgaacttcattggcctggaattcaggtgtacagttgtggtggatgaagccaataccgcctgtaagctacaggataaaaagagactactactaagtgacaagaagcaggactgaatgcctttggggaaaggcgatggagtccttgctccttcccccacaccccatggggctcaccgccattgctatggccatcccagccttggtcagagcagaagtcaggtcctgaggagacaaacgtcaaccagtgtgggaaagcatcccttacacctcaaggtgttac

SEQ ID NO: 718119 - DNA, 603 bp, Homo sapiens
agtgggtcctgccttgacctcctaaaatgcgggattacaggtgtgagccacgtgccggctggatggtgcaaattctttaaatgctggtagaattaatcagcaaagccttaaggtcctgggctttactttattgggaggtttttgattactgattcaatctccttacacagttatagttatattcaggtttctatgtcttcatgacattcttcctaggttgtgtatttctagcaattcatccatttcacgtagactattcaatttgttggtatacaaatgttcacagtactctcttgaactcctttttatttctgtaaaatcagtagcaatgtcccctttcatttttgatgttaattatttgagtcttctttctcttagtcaatctagctaaagatttatccaccattttcttgatcttttcaaacaaccaactcttggtttcattgattgcctctgtcgtttttctattctttgttttacttatctctgttctaatatttgttatttccttcctctggctagctctgggggtttttccttttcctagttccttaaggtggaaagttaattgttgatttagacctttattcttttttaatgtaa

SEQ ID NO: 718120 - DNA, 183 bp, Homo sapiens
agcaagaagaagaagagaagaagaagaattgagaacacacgagttccatggaccattgaataaagggcaatagactgacctgtgtatgtgtatacgtacaatacacactcacgcagtccaataattgaaaataggtcaaattagaaccagagagcagaactacctcgtacctacttggaaaac

SEQ ID NO: 718121 - DNA, 101 bp, Homo sapiens
gcgcagaagtgatagttcagtaagaaggatgtgattgagctgacagacgacagcttgataagaagtctggaagtgaagatgtttggatggttgagttctat

SEQ ID NO: 718122 - DNA, 538 bp, Homo sapiens
gcagagcttttgcggcgctttccacagcagaggcctaggacagcacacctgctctgtctctcctcctcctgccccatttatttcttctttacactaagcacttccagttccttcttcattcctctagggttcaagtttccagcaccttcagccatcctaaaatgccctcttcctttccttcctttattcttgtcccagtgttcaatcacctggttgctgagctgacctactgctcatgcaattgggctttttgcagagagctaagcattttgtctggagttggaagaaggggaacaggagatctaatggattcatggggctaaggctgatccaattaagaccctggcaggatcacctgcctttctgaccttgaccttgaactgccatctttgacataaatttgaactagtggggacatcataactcctaggaagcaaagaagacaaagaggtgaaaagtgacctcactcaacctcaaagacatacagagcccgagtagtctcgtgtccccaataagtcatgggaaagggcaccgcaaa

SEQ ID NO: 718123 - DNA, 120 bp, Homo sapiens
cgttcttactggcaggtcttcttgaccagtggcttagcatacaggcaggatggctgcgagtatcacagactgttcctgcgcaggtgtgagtgggtgggtccctagggccatcctggcctg

SEQ ID NO: 718124 - DNA, 985 bp, Homo sapiens
ctggccctacccaccctatgctcatgtgcctggcagagccagcgctcgcggatgcggctggtgcgcagtagcgggcctggacagctggctcgtgggcttgcagtggagggcggatctcgtgtgtcggacccgcatgccccagacgccgggcttggtgggttccccccgcccctggactcctgacagtcacgtaccacacccatagcctctccaactgagctctggcgccgtggagaggattaacgacccatggaatggcagtggtggactcccgtttatccaagtgaggtgggctgtgcatgtgtgtgcaccgacaggtggcagtgaaccagcaggctggggcactcctggagtcgaggagtgacgtgggcaaggttgacttggacatcagtgcagcactctcgagacagggccctactccgacatcaggcatgaactccaggaccagatctgctaggggctggttcagcagcacgccaatccaactctgaggtctgacctggaagctgccacaagatgggccaggctccgagagcaactaaacctcaggcccaagaggccacgaactatacagtgacaccagaatccctgatgcagctgggaggcacggccgggaagttgggtaacccaatggctttcctgtccttttggggaatccatcacgggtgacaacaggcctgtgcaggacggcctaggggcatctggcaacactccaggacaaacgaagagggctggagcaacgctaactacacacagagtagatgggcaccaaagtgtaacaaaacgtatcggaagcgccaaacagggaagggaaacgaaaggaatggacgacaggggaaaacaagagtgatgcagtgcattagaagacaataggctaccggagaacggccgggacctacatggaccatggggcgtggggaaacgcacccggatccgtggggccactgtgtagcggcaaagaactagctcttgggctgacacaagg

SEQ ID NO: 718125 - DNA, 231 bp, Homo sapiens
tagcatcctcaggagtagtgtaacgagcaaattctggaaagtaagtcctcaatcttcgatttcacagcaaggactttctcagcgagcagatcttgcattgtagaggaacagggtcacagagatggtgcgcagccatctgttgttccagattgtacttgaagaggttcagagcctcctgcaagcggttggtctggtagtcctcccggatgaacatgttgtagctgctgctgg

SEQ ID NO: 718126 - DNA, 178 bp, Homo sapiens
tcagatcgagcgaggatagagtcagttatacttttgggattccttctaggtagcggagtgttgagcttgaacgctttcttaattcggtggctgcttttatggcctactatgggtgttaaattttgttactactctcatacaaggttctgatccctagtgtccaaatgagctgttcctc

SEQ ID NO: 718127 - DNA, 971 bp, Homo sapiens
gggaaggtctggaaggccggggggttcgagatcggacccaggtccagatagaacatgacgggtgggatgaggacgtgaacagaacatggccaaggcaaggatctgggggagacagagcaggacgaggcggagctgatccgagaggacactcgcaggggtgctctgcactaattaccggtgcgcgcgccgcggggacgcgcaggcggcggcggcgtcaagggccacggcgaggaggagttgcagcgcgacgtgtcggccgtcgatgagagcccgcccctggaggacgccagtccggtcaggccgcgcagagagtcaagactaccgtatcagcggggcgcgggccgcggacgaccccaggcgagagcccattcccgaggccagaggaggcgcagaggccttgagccggtggggacctcgagcaacgctgatgtacggggcctccccgtgaacctgtgagttccccgcggggtcctgatcctggacgagatggctgcgggcggagacgggaaggtggagcgatcctgaaggcagagtgttcgacgagcgatacagagctttgtatcgagggctgtcgaactcggcggagcgcggacagggatgcttggagacaccgggaagcgcgggcgaggagccggggcagggacggctgggggtaaatgaggcaccctggggcgtgggagtattgaaagacgcatgccgaagatctgttgcagagagaggaccccgggtctgcccccagggtttgcagctagccgcaattggcagggtgaggattgacgggccaagttataaccggggtgcacctgtcgacttgatggccagggtgtgggagcccgcgatacccatatgcgtgggcgaatgtatacactctgaggggatggggagctcgggcacacgggcatcggcagggaagtacgaggtgtggaaaaaaaacgtatcacatggccggggtggagataagagagacaagg

SEQ ID NO: 718128 - DNA, 266 bp, Homo sapiens
tatttatattggttttttaccttctgttttgattgaaattcattatcagtaagcccagagccctttatgacattgttgaacaggcggtcgttcctgctattcagtgttaaataaaattcctattatatctctaatctcagattataaaatacctaatgtagtactatatgcatattatagggtcttttatgatcactgcattcccttgtattaaagaaagaaagaaaattctgtgtaatagatccttggtaaaaacttgaaactgt

SEQ ID NO: 718129 - DNA, 438 bp, Homo sapiens
ggcggaagtggagctaccgccagcgccgtcgccgattccggagccggggtagtcgccgccgccgccgccgctcgctggcgagcctactgctaggcgagcgtatgccgatcggcctggagtagtgggcttaggacggaagaggtcatctcgctcggagcttcgctcggaagggtctttgttccctgcagccctcccacggcagagtctccagagattcgggccggtatgaaaacagtgcattgttgcccattcggcatgtggatcagagaagcaggaagagcactggacttggagtcagggaatgagaatgtgataacacatgtgagctggtacagaacagccaagctcgctgagcaggctgagcgctatgatgcatcatggctgcagccattgaccggcagtcaccagagacaggggcatgaactctccaacgaagcg

SEQ ID NO: 718130 - DNA, 398 bp, Homo sapiens
  misc_feature (13)..(13): n is a, c, g, or t
  misc_feature (34)..(34): n is a, c, g, or t
  misc_feature (42)..(42): n is a, c, g, or t
  misc_feature (59)..(59): n is a, c, g, or t
  misc_feature (88)..(88): n is a, c, g, or t
  misc_feature (101)..(101): n is a, c, g, or t
  misc_feature (139)..(139): n is a, c, g, or t
  misc_feature (256)..(256): n is a, c, g, or t
  misc_feature (351)..(351): n is a, c, g, or t
aaaatggacatcncttggtttgagaaccctgagnaaacttgnccctgtcctagttaaanatcaacatgaatgtacggtgttttagtanttattgaatacancgattttaagaaacctttgactcttctttttcattaanttagctatagcagcctgttctgtttttgtttgtttgtttgtttttgagacggaatctcgctctgtcgcctaggctagagtgaagtggcacgaccttggctcactgccagctctgtancctgggttcacgccattctcctgcctcagctactcgggaggctgaaacgggagagtggcatgaacccaggaggcggagcttgcagtgagctgagntcgcaccactgcactccagcctgggtgacagagtgagactccatctc

SEQ ID NO: 718131 - DNA, 553 bp, Homo sapiens
actgcactccagcttggacgacagagcgagactctgtctcaaaaaataataggccaggcatggtggctcaaggtctgtaatcccagcactttgggaggccgaggtgggcagatcacaaggtcaggagttcgagaccagcctgacgaccaacatggtgaaacctcgtctctactaaaaatacaaaaattagccaggcctggtggcacgcgcctgtaatcccagttacacagaagactgaggcaggagaatcgcttgaacgcaggaggcagaggttgcaggagctgagatcgcgccattgcactccagcctgggcaacagagtgagactctgtctcacaaaataatactacaataaatgaacacacatgctgctgagtccgcaggggggcagagcagaggacagcgtgctttcgtgtactgttggaagactggctcctccgtgtacagcaacctcgtgagcccattgttgcacccgacctgaccaaggggcaccgatccaggtcctgggccggtgtgaaccagcacaaaagctgactcgggcaagcaaggctaca

SEQ ID NO: 718132 - DNA, 551 bp, Homo sapiens
tatacacccggatgaagaacattgagtgcattgagctagggccggcacctgctcaagccgtggtacttctccccgtaaccacaggaacctcaccacattgcctgtcctactacctgtgcgagttctgactcaagtacggccgtagtctcaagtgtcttcagacgtcatttgaccaacgtgtgacctacgacatcctccaggcaatgagattaaccgcaaggggaaccatctccttctatgagatagatggaccgtaagaacaagagtatattcccagaacctgtgtctttaggcccaagtgtatccttgaccatacagacactgtactatgacacagaccctttcctacttctacgtcatgacagagtatgactgtaacggcttccacatcgtgggctacttctccaaggagaaagaatcaacggaagcatacaatgtggcctgcatactagccctgcctcccctacagcgccggggctacggcaagctgctaatcgagttcagctatgaactctcccaagtggaagggacaacagggacccctgagaagc

SEQ ID NO: 718133 - DNA, 109 bp, Homo sapiens
aatgcagcggactcggaggaacgatgtctacagaaaggtagacaaaaggaggaagctggggaaaaagaggtgtgcggagaccaggtcaaaggaccggacaaagaggagg

SEQ ID NO: 718134 - DNA, 281 bp, Homo sapiens
cgggtgatctagagcgatccctactgtctcagtgtagatataattcgtatgtagttcacaaaagcccgctaggtatttcccaaattcttacgtctttttcaatactcaacttggaaaatatatatggctcacactttttttttttaattttttttttggaggattgagtctcagctcactgcaacctctgcctcccaggttcaagcgattctcctgcctcagccttccaggtagctgagactacaggtgtgcgccaccatgcctggctaattttttttttg

SEQ ID NO: 718135 - DNA, 967 bp, Homo sapiens
gagtgtggacgagaccctcatgtggctcttgtccagatcctcaagggccgccgacaagaacaagggggaaagtagcggggcgagttcaggtggggctggaatcgcgtggcagggccgagccgcgatcgaccgcgcaccgccgctggcatagttctctgcgctaagagctcaacgaagattacgtccccgcgagacaagcaaagcctgtgcgcgcagatgatgggagtagacttgttcgagaaggtctatggctgggcagtggctggagggagggggtacaccgcgcgaaacctcgcatcgagggcgcctcgcgtggtccacggggggatcactcgggaggccgttgggctgtacttccagtcgtgtatgtgctctatttcttaaactggaataatcgaattgatgccacgcgcggtccagaatccgcctgaggggtccctgggttacccctgggctcgtgagagtcctaagtggggttggaacctaggtcggcaaagcacgggaatcccccgggggggaggaaccgacacggagctcgtgcaggacactacccaccggggcggaccaccgggacagggcggcaccggggataccggagggggggtaccttcgccagccgcgttgggcttttgtgccccttcgaagggggccctggggcacgcccggggatacctttggggggggggcgaataggcagggaaattcatatgggggtgccttcgttgtggaaacacttttaggtgcggtgttccaggaaatggcatggcgggacttttttctggcgaaacagagaagcaaggagagcattcccacgggtttgtgggtatcaaacacggagcggtacagattcaagaacagcacacagcacggagaggagggtataacaaaggaggggagattatagacagaggaaaggacaaacacttggaataaaacaagggggaaggagagaagaacagggaaatgg

SEQ ID NO: 718136 - DNA, 1002 bp, Homo sapiens
gcgagactccgtctcaaaaaaaaaaaaaaaaaaaaaaaaagggtagtttcggggggtggggatttggccccccaaggggggggggccccaagggtgggaggtcatctgtcacctgttggtcgcaaaaaccggctcggcgctgggggggtaatcgcctctatttacgccgttttactgagaaagcgctaataaccgtagcacttgctttggggagcttccaaataggcggcactttaaaaccttcttttccccaacttgtgtacttgggccccattacgcactcggagtggggctttatattctcccaaaatggggcgtcttggcgccttataaaacgcccacaaagggcgtggtggtgctcttgggggggcgccaacaaaaattggtgggtttggggcataccataaacgcgcccccaaggggacttcttttaacaggtttataatttttggctcatctcatacaacagaggttaatcatgtggggcgccaggtttttaggaaaaaagcgccgagaagattacgttacacactattacgaggagaaggaaacttcatatcaaagggacttctgtaggccccgagggcatctttaaaagaagcaggaccagaaaggacgacctttggggggggatctttctcttcccccagcggccccagaaacaaccaagcacaaaagaacagaaaaacagacaaactgttttcgcgcggccacttgggcggcgcccagagaaaagaggtttccaaccaacaccatgggtgtgggggcgcggcggcaccccacaatgggtgatgcggaaacgcacgtgggcaaacagggcgtaccacaagaggaacacgcgggcgatacaaacagggggggtgggatctccgcccgaaagataaaagagcgcggccgggggacaaaccgagcggttctgtgaaacaccaccggagaggggatgcgaaaaggaaacaggggagatcacaacaggaggacccaaagcgaggacgataaaaatgc

SEQ ID NO: 718137 - DNA, 315 bp, Homo sapiens
  misc_feature (4)..(4): n is a, c, g, or t
  misc_feature (6)..(6): n is a, c, g, or t
  misc_feature (25)..(25): n is a, c, g, or t
  misc_feature (57)..(57): n is a, c, g, or t
  misc_feature (117)..(117): n is a, c, g, or t
  misc_feature (287)..(288): n is a, c, g, or t
tatncnagagggagaagtctgtttnccgatcgccactgctatcaattttcaggtatnctgtcacaccttgaaagcttcggttccacatccgctgagtgacgccctccccccagtaanatttccccatgtgccagagtctccgtcactggctggatatagagcaggagcccgtcgtggaaggatgctgggatggtgtttaccaggccatccttcatggtgaagttgaactgctcataggccaggtgttttaactgcttcaggaattccaagtactcgggattatctgnntctttatatgtaatgattttgtaagac

SEQ ID NO: 718138 - DNA, 203 bp, Homo sapiens
ttatcatggctctaggttgctcaatcgtagagacggagtattcaaatttcatcagtaacacttttttccaaggggagaacgcagcccgcagtcatgcgttgcagtaacgagtaggagcgtgtcccgttcgtctcgttttaatcgtgaactcagttcctcacgtcattcttgtgtctttcattgtttaaacgagtgcgtgatca

SEQ ID NO: 718139 - DNA, 194 bp, Homo sapiens
tttttttttaaaaactcaaacccttcccacggggcatgggccaaaaccgggctagtttcctcattgtggcctattccccaagcaacaagaccagtaaatgacatggttaggtaccatcccattcccagcaaacccaaccaccttgtttgtttttggttccttccagtcctggttcataaaacttttccctcgca

SEQ ID NO: 718140 - DNA, 166 bp, Homo sapiens
ctgcatgctcccgagtagctaggattacatggcatgtgcatcacgctcaggtaattttagtatttcatgtgtagagactggtgttttccccatcgttgagcagtgctggtctcgaactcctcacctctaagtgatccacgccgcctcggccctccctaaagtgctg

SEQ ID NO: 718141 - DNA, 395 bp, Homo sapiens
aaaacggccatgtagaaactttattaaaactcactcatgactgctcacattccagcgacatatgcccagcaggctaaagccatgataacatgtagctagtcagcatttaccataatcctcctaatatctttgcagctacattaatatttgtgcaaatctgtctatctgcacgaattcgcatgtaatgtgtcatttacaacatatatctaagtatcttgaatactcagactgcaaaacggccaatttaactaattgataatatttcaaaaaaatagtcttcgaatgtataggaagtagacatgcattaactgtgaccttattgcacctcagtttttttctttctttttttgggcaacctgagtactatctataggacatttgttatgttcgttttt

SEQ ID NO: 718142 - DNA, 106 bp, Homo sapiens
gaatttgggggcccgggcccccccccccttttttaaagggggttggcgccgcccttgggtttttttttttaaacccccggggggccttaaaaggtggtctttttta

SEQ ID NO: 718143 - DNA, 142 bp, Homo sapiens
  misc_feature (69)..(69): n is a, c, g, or t
  misc_feature (141)..(141): n is a, c, g, or t
ggaggggtatgccctcccccatgccatcctgcgtctggaccttgcttgccgggacctgactgactaccnaatggaggatcctcaccgaggcggggctaaagatttaaccaccagggccgacggcgggaaatcgtggagttna

SEQ ID NO: 718144 - DNA, 380 bp, Homo sapiens
aagctatagttggggaaatttgtgggttttttttaaataaaaaatgtttatttttgtccttatatttaaacatgatggaatttgtaaatcttggcattgattgtaattctgcccttttggaagaattttttctcccagcatgttaggtgagaatattctcttttttataaataataagaagtagggtgggttttctggtttctttataccagggctttttagctcaggatcatctcccttcatgtaagcagcacgtttttacttttaggaagctgaatgttgtgttatccctaatactttggacaggtcccctgcctactttaattgtccttaggacttggacaggctttatcattaaaaagggttttccttatccccga

SEQ ID NO: 718145 - DNA, 229 bp, Homo sapiens
tataccacaaagtatgtgttactacctattatttaattaactggtgtaaagcacatagaacaaagactagctcacagataattactcaaaaatgctggtcgtgatgataagccaaaaattcagcatcaggtcctagagatctttcctaaatggcagacaatattccaggctcactcaaaaaaacctatttgccccttcatgaaacgggacatactcttgagtgggagac

SEQ ID NO: 718146 - DNA, 592 bp, Homo sapiens
cttctgctcacctggggctgctagcttctcttcccgtggaacccttctctttacgtggtgtgtcctttttaccgttggtgtctcagcaatactttatagcatcatacagggccatcgactcacacagtgacactgcgcccaagacagcccggcaactggggctggttaagtgcagggtgaggaaccagcggtgggtattgggaaaggcctggcggaaagaaggctctagaaccggcttatagagccacaacagggtgcagacaactgtgatgtcagccaatgtcactcgtgcgcccagcagaaaagtcctcgtcttcaagtgagcatccagcagccccagaattcgcctcacttcctcctttgcattctcagtggcctgtttgttgtggtgcatgatgcccaaggtggggaacacccaggtactggctgggggcactatatcggaatcagcaaagctcacccactgcaccacctgggctgctgcctctggagtacttccccgcagctcctcattgctcacatagtaggcaatggcgttgctctcaaacacacagaatccatcatcaccctcaaatgctgggaccttgccggc

SEQ ID NO: 718147 - DNA, 968 bp, Homo sapiens
agggcgaaagggcattcgacttactgtctgctgaacgagagagataacgaggctcgccccaccaaacagcaccagctggcctaacattgcactagcagcactactcttctttttctcttgcacaacataaacagctgcaattcctcgcctaacaaacaacaacacccaaacaaaacaccaacaaaccctttgcgcgcccccccccgccccctccacaacactcctctcccccccccaccccccccggccgccccccgccccccccacgccccccccccccaccgcggccaccacaccagtcagactccaccactgagagcacaatcccagccgccccaccgtacatcaagcctgcagcgcgcactcctccaccaccgataccaacacacacagcccgtctgcgcccccaccccgacccgcctctctcgccaacacccacctcccatacctgagcagcccctcgcgaagcggcactccactcctgcgtgagccacccccctcctaccacgcgcgcctctccatccgccaagacgccatgaccacactccacacactatagcgaacccccccgcaaatcaatgcataattcaacctcctaaccccctcacccacatcacacacaccacccttctactacctcaccacacaccctacccagactatctccacctccacaaacaccacaccaccacatactactacccatctcagactgtcccagtcaccgccactccacttacctcactccttcccactctctctcctctctcctactcctctcaccgaccacttctcttatcacactatcactacttccacagtgtactatctatttccactccatagcgtgaacacacccgccacgctgctgtactacctctgactgctccacatcatcagcgaccgcttctgcctctctctgtatcctcaattctcacacacccctacgtctaccacgtctcctttct

SEQ ID NO: 718148 - DNA, 1209 bp, Homo sapiens
  misc_feature (544)..(544): n is a, c, g, or t
cttgtcaagtccaatgtacaatgcctccatcaccgacctcgaggccaagattgcacagctggagtgagcatggctggacaacgagaccaaggagtcgccaggcgagtcctgtcaaatcaggtgcgtcggaccgagaagaagctgaatggatgtgctgctgcaggtggatgacgagcggaggaacgccgagcagtacaaggaccaggccgacaaggcatctacccgcctgaagcagctcaagcggcagctggaggaggccgaagaggaggcccagcgggccaacgcctcccgccggaaactgcagcgcgagctggaggacgccactgagacggccgatgccatgaaccgcgaagtcagctccctaaagaacaagctcaggcgcggggacctgccgtttgtcgtgccccgccgaatggcccggaaaggcgccggggatggctccgacgaagaggtagatggcaaagcggatggggctgaggccaaacctgccgaataagcctcttctcctgcagcctgagatggatggacagacagacaccacagnctccccttcccagaccccgcagcacgcctctccccaccttcttgggactgctgtgaacatgcctcctcctgccctcgccgtccccatcccgtccctccaggtgtgtggggcattggcttcctctgctgcatccccttccagctccctcccctgtcaaatctgatacaaagagacagggcccgggcccaggcagagagcgacagagctcctcagcctctctgccaaaaagcacaagatgtgaggcgagcaggcagccccggggaggggcaagtttctatgaatctatttcttcagactgaggcctttggtagtcgacccgcagcgtagctccctgagttgcacaggcccccatctctcttcttgtgttgcaatcacagtggactcaaactctgcctggctccatccatgtctggggtcagaagacagcctggctcactctgtcgggaaaagcgggtgggaaggatctccaccgaccagcgcgcaagcagagatctctatctaagtcaggcagcgcccctacggagctgtgcagagcggaaggaagcaagccagcctcagctggcacataggaagagacaagacagaggcgccaggagtcgggcggaaccaaaaaacacagaggaagaccagaaaccaagacggccgaaaaaggagaaaaaaacaac

SEQ ID NO: 718149 - DNA, 233 bp, Homo sapiens
gccggcggctatctgtcgtggtgggaggctgcttcatcccgggctgccccatggcctcagcttcctcccttctgccctgcgcagcgcggaggcggccttcggtagtgtcggccgcgacctggtgctgtcagactcccgcatctctcccccaagccttcccgttctgccctgcgctgcaagatgtgaaacgctgctgtctcccccaccctcccgaaagttgtctcttgagccgc

SEQ ID NO: 718150 - DNA, 946 bp, Homo sapiens
  misc_feature (10)..(10): n is a, c, g, or t
  misc_feature (69)..(69): n is a, c, g, or t
  misc_feature (80)..(80): n is a, c, g, or t
  misc_feature (83)..(84): n is a, c, g, or t
  misc_feature (88)..(88): n is a, c, g, or t
  misc_feature (106)..(108): n is a, c, g, or t
  misc_feature (113)..(113): n is a, c, g, or t
  misc_feature (129)..(130): n is a, c, g, or t
  misc_feature (143)..(143): n is a, c, g, or t
  misc_feature (174)..(174): n is a, c, g, or t
  misc_feature (186)..(186): n is a, c, g, or t
  misc_feature (197)..(197): n is a, c, g, or t
  misc_feature (209)..(209): n is a, c, g, or t
  misc_feature (215)..(215): n is a, c, g, or t
  misc_feature (236)..(236): n is a, c, g, or t
  misc_feature (249)..(249): n is a, c, g, or t
  misc_feature (255)..(255): n is a, c, g, or t
  misc_feature (257)..(257): n is a, c, g, or t
  misc_feature (259)..(259): n is a, c, g, or t
  misc_feature (263)..(263): n is a, c, g, or t
  misc_feature (278)..(279): n is a, c, g, or t
  misc_feature (293)..(293): n is a, c, g, or t
  misc_feature (298)..(298): n is a, c, g, or t
  misc_feature (315)..(316): n is a, c, g, or t
  misc_feature (320)..(320): n is a, c, g, or t
  misc_feature (324)..(324): n is a, c, g, or t
  misc_feature (361)..(361): n is a, c, g, or t
  misc_feature (375)..(375): n is a, c, g, or t
  misc_feature (378)..(378): n is a, c, g, or t
  misc_feature (382)..(383): n is a, c, g, or t
  misc_feature (495)..(495): n is a, c, g, or t
  misc_feature (516)..(516): n is a, c, g, or t
  misc_feature (543)..(543): n is a, c, g, or t
  misc_feature (583)..(583): n is a, c, g, or t
  misc_feature (616)..(618): n is a, c, g, or t
  misc_feature (633)..(633): n is a, c, g, or t
  misc_feature (821)..(822): n is a, c, g, or t
  misc_feature (828)..(828): n is a, c, g, or t
  misc_feature (933)..(933): n is a, c, g, or t
ttgttaagtnttgccggtgaccccaacctccaccccctagcccctgagaagagatttggctgggcaganatcaatctatnttnnaaangccaccagcacccatcannntttcnactggcaccctgaaanntgcccaggttggnccgccagcttcgtccacaggccttggccagntggggccctcanggaagcaaccnagctcgcatctngaaggncaggtagtcccctcgggtggnttgcttgttgatntctctntntngttntttggttacgatttnntctaggacctcgcnatctnccttaataagctttttnntttnaggntctccgttcagcaaggaataggcaggtcccctaatgntagatgagcagaancanaagnngccggtagatgggtcccagggctcccaccccgcagccttgagtggacagaccctggggcctcacccactctccctgatgaaggcagtggagctgggctctgccttgctagcntcagcccggccaacaacagcnctttcaagatcctcctccaggcccttncagcccctgcaactacttactccaagttaacgtatttttnctcacatttggtctttttcgggcaccaggaacnnngaccggaaccactcntcacgagaacacacatcttcagccaacactcccagatcctgtggtgtaagtcaggccgaaagctccccacctggtgcgccccgtctcagggtccaccaccttgcggatgatgctctgccgggcatcccactcctccttggtcatgggcttcatggcctgggattcgggacttctgctcatccgtcagnnctgggncatcctcttcctccccagctgatcggtgccactggtccagcgaggggcccggcagagctccacctgctgtgcttccgccttctccttgccttcttcttcagcttnttctcttcttctt

SEQ ID NO: 718151 - DNA, 211 bp, Homo sapiens
ccactggctcccaaatgtgctgggattacgggcactacaggcaccttggctaactttctttatattgcggtagaggcaggttctctgtcacccaggcttgagtgcagtggcctgatcatagtgtcactgcagccttgacccctggggttcaagcaatctatcccacctcagcctcccaagtagcggggatcataggtatggtgcaccaccc

SEQ ID NO: 718152 - DNA, 454 bp, Homo sapiens
  misc_feature (201)..(201): n is a, c, g, or t
ggcgacggggttctcactaggttctggcctggactctcggatatgctgagctacatgcagagcgggcgcaggggcagacccaaacacaggcaggggaggagggcactgaacaacttttatgccccatctcacgtcctctgggcccacattcctacccggaccgtagctgcactcaggtgaaatcaaagacctcctcaccgntttctctcatgctccttctaggagccttctcgtgcgtgatgcagggtgggaagccgtgcaagagcccctcagccgtttcgggcatatgcaagtcggggacggcaaaggggtaaggtctcccgggcaaatcacggacaagggatgatgaaaccatgggacaaacaaccagcctcctaggcttgggggggagacagaggaccaccaattagatggaagcccatggtccacaggggtaaccagctcaataccctag

SEQ ID NO: 718153 - DNA, 170 bp, Homo sapiens
cagaggttgaggtgggaggatcctttgagccttggaggtggaggctgcagtgagccatgctcatgccactgcattccagcctgggtgacaaagcaagaccttctctccaaaagggggtgggggaagaacagttatggtatcaagtaatagaggagagaagagatggcatc

SEQ ID NO: 718154 - DNA, 205 bp, Homo sapiens
acggatactagatataagcagcatcaggttcgtcctttacatgttgtagtctggttatcatctgtctggcggttagttggatgagtcattgctgggtcgtgactggcgaagacgctgacgagatatttggaggtggggatcaatagagggggaaatagaagggtcagtactgcggcgggtaggcctaatttctctcggaccaatg

SEQ ID NO: 718155 - DNA, 366 bp, Homo sapiens
  misc_feature (1)..(1): n is a, c, g, or t
  misc_feature (87)..(87): n is a, c, g, or t
  misc_feature (141)..(141): n is a, c, g, or t
  misc_feature (148)..(148): n is a, c, g, or t
  misc_feature (183)..(183): n is a, c, g, or t
  misc_feature (195)..(195): n is a, c, g, or t
  misc_feature (237)..(237): n is a, c, g, or t
  misc_feature (298)..(298): n is a, c, g, or t
  misc_feature (304)..(304): n is a, c, g, or t
  misc_feature (360)..(360): n is a, c, g, or t
ntgcaggcatcaagacggagctgacacagatcaagtccaatatcgatgccctgctgagccgcttggagcagatcgctgcggacaaanaggccaatccagatggcaagaagaagggtgatggaggtggcgccactgctcggncggcggntggtggtggcatcggtggcgatggcagtggtggtngcggtggcggtngcagcagcggccaccagccccccaagagaacacaacttcttnaggcaggccttccccagggggaaagcacggacccgagacgacggcgattgaagggaagggntccttnacacacagcgaggaaagagcttggaacacagccagggacacagacgcggtttattnggacta

SEQ ID NO: 718156 - DNA, 172 bp, Homo sapiens
caagaattgtctgcgaaacctcaagctcgaagttacgctgcagatacgccggaggacacatcatcctcgacgtggacatcaacaaggacagccggggcgagaccacgcttgccgggattcgggatcaacaccaagcacgtaaagacccaagtactgttcgagaacggcggcc

SEQ ID NO: 718157 - DNA, 120 bp, Homo sapiens
gtggcctgcacccaggtgtggctgtcaggacaccagcctggtgcccatccttccgacccctacccacttccatttccgtggtctccttgcactttttcagttcaaagttgtaccctgtta

SEQ ID NO: 718158 - DNA, 130 bp, Homo sapiens
aaaatgatatcgcagcgtattctaaatttgggccaagagtcaaaaaaatgcatttgaaggtttggaacgtgcccacataagacaggaggctgatcccgaacagtagttgggggcagatacccacaaacca

SEQ ID NO: 718159 - DNA, 645 bp, Homo sapiens
agatggagttgtcactcaggctggtgtgcagtggtgcaatcatggctcagtagaacctccaccttatgaattccagtgattctcctgcctcagtctcccgactagctgggattacaggcacctgccacaatgcccggctaatttttgtatttttagtagagacgaggtttcaccatgttggccaggctgttctcaaacttctgaccacctcagcctcccaaagtgctgggattacaggagtaaaatagccaagatttgaaagcaacttaagtgtccatcgacagatgaatgaataaataaaatgtggtacatatccacaatgaagtactattcagccataaaaaataatgagatactgtcatttgcaacaacatggatgaaacgtgaagtcactatgttaagtgaaataagccaggcacagaaagacagacatcgcatgttctcacttaactgtgggagctaaaaattaaaacaattgactcagggagatagagagtagaaggatggttaccagaggttgagaaggggaagttgtggcaggagcgtggtagagaacttgaaaatttacccccttcctaagggctccaaaagagcttttttgtgaatccaaaatggtccaagggaaaaattttttattggtcaaaa

SEQ ID NO: 718160 - DNA, 801 bp, Homo sapiens
acagtttaggacctgggcatttttccccccctggttgcccgaaaacatccccttgtgcattcccggttttaggggccccccctgccccagtgacaccagtgtaaccggccgcagtacctttccgtgcaaaggtagcataatcaacgtgtgtccttaattagggacctgttatgaatggctccacgaggggttcaactgtgctcgttactgtttaacccgtgaagattgacctcgccccgctgaagaggcgggcatgaccacagcacagacgagagagaccctatggggactttaatttattaatgccaaaccagtacctttaccaaacccacaggtcctaacttcccaacctgccatttaaaatttcggttggggcgacctcggggcagaaccccacctccgagccagtacatgctaagacttcacccagtcaaagcggactactatactccattgatcccataacttgacccacgggacacagttaccctagggagtaacagcgccatcctattctagagtccaaatcaaccaatagggtttacgacctcgatgttggatcaggacatcccgatggtgcagcccctattataaggttcgtttgttcaacgatttaagtcctacgtgatctgagttcagaccggagtaatcccggtcggtttttatttacttcaaattcctccctgtacgaaaggacaacagagaaattaggcctacttcaccaagcgccttcccccgtaaatgatatcatttcaacttagtattatacccacacccacccaagcaacccgggtttgttta

SEQ ID NO: 718161 - DNA, 821 bp, Homo sapiens
  misc_feature (39)..(39): n is a, c, g, or t
  misc_feature (41)..(41): n is a, c, g, or t
  misc_feature (57)..(58): n is a, c, g, or t
  misc_feature (62)..(62): n is a, c, g, or t
  misc_feature (67)..(67): n is a, c, g, or t
  misc_feature (108)..(108): n is a, c, g, or t
  misc_feature (113)..(113): n is a, c, g, or t
  misc_feature (436)..(436): n is a, c, g, or t
  misc_feature (623)..(623): n is a, c, g, or t
  misc_feature (646)..(646): n is a, c, g, or t
  misc_feature (668)..(669): n is a, c, g, or t
  misc_feature (682)..(682): n is a, c, g, or t
  misc_feature (686)..(686): n is a, c, g, or t
agcgatttcatcttcaaccctggattacaccactcaccntnccagtgtgcttgaganncaanctgcncccactgaactccgcagctagcatccaaatcagaccttganattangaggccttggagactcagatcctgaacaagtagagaacaaagatctctacttggatggaacttccattctgtggggaagagactgacaataagcaattaaataaataagaactcagcagtaggccttgcctcagatccaaggtcactcggaagaggccatgtctaccctcaatgacactcatggaggaaatgctgagagaagcattcagatgcatgacacaaggtaagactgccaaaaatcttgttcttgctctcctcatttggttatttgttttatttttaggagttttgagagcaaaatgacaccacccagaaattcagtnaatgggactttcccggcagagccaatgaaaggccctattgctatgcaatctggtccaaaaccactcttcaggaggatgtcttcactggtgggccccacgcaaagcttcttcatgagggaatctaagactttgggggctgtccagattatgaatgggctcttccacattgccctggggggtcttctgntgatcccagcagggatctatgcncccatctgtgtgactgtgtggnnccctctctggggnggcnttatgtatattatttccggatcactcctggcagcaacggagaaaaactccaggaagtgttaggtcaaaggaaaaatgataatgaattcattgagcctctttgctgccatttctggaatgattctttcaatcatgg

SEQ ID NO: 718162 - DNA, 105 bp, Homo sapiens
tggcagcacagtttatcaggaaaacaacgagaatatgagaaaagagttctggccattgttgaacaaatgctggaatgattcataatagacaactggtctgttaag

SEQ ID NO: 718163 - DNA, 556 bp, Homo sapiens
  misc_feature (39)..(39): n is a, c, g, or t
  misc_feature (41)..(41): n is a, c, g, or t
  misc_feature (57)..(58): n is a, c, g, or t
  misc_feature (62)..(62): n is a, c, g, or t
  misc_feature (67)..(67): n is a, c, g, or t
  misc_feature (108)..(108): n is a, c, g, or t
  misc_feature (113)..(113): n is a, c, g, or t
  misc_feature (171)..(171): n is a, c, g, or t
  misc_feature (358)..(358): n is a, c, g, or t
  misc_feature (381)..(381): n is a, c, g, or t
  misc_feature (403)..(404): n is a, c, g, or t
  misc_feature (417)..(417): n is a, c, g, or t
  misc_feature (421)..(421): n is a, c, g, or t
agcgatttcatcttcaaccctggattacaccactcaccntnccagtgtgcttgaganncaanctgcncccactgaactccgcagctagcatccaaatcagaccttganattangaggccttggagactcaggagttttgagagcaaaatgacaccacccagaaattcagtnaatgggactttcccggcagagccaatgaaaggccctattgctatgcaatctggtccaaaaccactcttcaggaggatgtcttcactggtgggccccacgcaaagcttcttcatgagggaatctaagactttgggggctgtccagattatgaatgggctcttccacattgccctggggggtcttctgntgatcccagcagggatctatgcncccatctgtgtgactgtgtggnnccctctctggggnggcnttatgtatattatttccggatcactcctggcagcaacggagaaaaactccaggaagtgttaggtcaaaggaaaaatgataatgaattcattgagcctctttgctgccatttctggaatgattctttcaatcatgg

SEQ ID NO: 718164 - DNA, 554 bp, Homo sapiens
tacgaaaatctttatgcatagggtgacgtctgtaataccagcttctcaggaggctgaggcacgaggatcacttgaacccaggaggaggaggtagcagtgagctgagatcatgccaggcaacagaatgagacttgtttaaaaaaaaaaaaaagtgatttgatttgaggggaaaaattgacgggttatatccagtcagatatggcaaaaagtctcagggggttcaggtgaatgataagggtctgggggggggtgtcccctatcagactacagggtgttagaggcacagaaaagggtgcagtggggttcttaaggtgaaaggatgagaagcacaactccagtgtgtctcttggtgtagaaggtcagcagacacccctgtgttagatgtgcgggatcaggggaaagcattcccattggttactagatggtccagaagtttcaatttatgaggggggggggggctcatgcccgtggtcccagcactgtgggaggctgaggcaggaggatcatctgaggccaagagtccaagatcagcctgggcaacatagtgacaccct

SEQ ID NO: 718165 - DNA, 417 bp, Homo sapiens
  misc_feature (33)..(33): n is a, c, g, or t
  misc_feature (97)..(97): n is a, c, g, or t
  misc_feature (115)..(115): n is a, c, g, or t
  misc_feature (118)..(118): n is a, c, g, or t
  misc_feature (136)..(136): n is a, c, g, or t
  misc_feature (140)..(140): n is a, c, g, or t
  misc_feature (143)..(143): n is a, c, g, or t
  misc_feature (149)..(149): n is a, c, g, or t
  misc_feature (155)..(155): n is a, c, g, or t
  misc_feature (165)..(165): n is a, c, g, or t
  misc_feature (173)..(174): n is a, c, g, or t
  misc_feature (182)..(182): n is a, c, g, or t
  misc_feature (211)..(211): n is a, c, g, or t
  misc_feature (220)..(220): n is a, c, g, or t
  misc_feature (296)..(297): n is a, c, g, or t
  misc_feature (299)..(299): n is a, c, g, or t
  misc_feature (301)..(301): n is a, c, g, or t
  misc_feature (305)..(305): n is a, c, g, or t
  misc_feature (309)..(309): n is a, c, g, or t
  misc_feature (328)..(328): n is a, c, g, or t
  misc_feature (339)..(339): n is a, c, g, or t
  misc_feature (350)..(350): n is a, c, g, or t
  misc_feature (398)..(398): n is a, c, g, or t
aattagccgggcgtggtggcgggcgcctgtaancccagctacttgggaggctgaggcagagaattgcttgaacccaggaggcggaggttgcagtganccaagatcgcgccactgnacnccagcctgggtgacagancganacnccgtcncaaatnaaaaacaacnaaaaacannaaaaactnaaaattctttgcttgttagtgaccttgancatggttcnctttgtacgatagttgggcatctgtatttccacttgtgtgaatttgcctttaaattttggttatgggtttcacctnntnanatantcanacatatttatcttttcctntgtgataggtntttttctgtancttttcctgttaaacacacagacccctccccaatctggacattgaatnaatattcattttcctttgc

SEQ ID NO: 718166 - DNA, 399 bp, Homo sapiens
gatatcaaacagtgccagttctgcttaccaaaaatggcccgactaggcagcgtcgtattccacgccctgctctgcgcctgcgagctgggctatcttacgcttttcaaatttgagactatgtggagatcgtttcgtcccctagagttctaatgattcgctttaccggataaaactgcgttcggttgggtgcgttcgttctgggaaaacgcctgctatcctgagggaaacttcggagggaaccagctactagatggttcgattagtctttcgcccctatacccaggtcggacgaccgatttgcacgtcaggaccgctacggacctccaccagagtttcctctggcttcgccctgcccaggcatagttcaccatctttcgggtcctaacacgtgcgctcgtg

SEQ ID NO: 718167 - DNA, 397 bp, Homo sapiens
gaccccgtctctacaaaaataagtaaataaattagccaggcatatggtgcccacccatagacccagctactcaggggcctgaggcgggacgattgcttgagcctaggagttcaagaccaacctgggcaacataggagactttgtctctataaataatttctaaaaattagccaggcctagtggtacacccctgtagtaccagctactcagcaggctgaggcgggaggattgctggagcccaggatgttgaggcagcagtgagctgtgatcatgccaccgcactccagcctgggcaacagagcaagatcctgtctctaaaaagaaaaaaaaagaagaagtattcgtaggaggatcacagaagacccccaacaccctggtgatgtcaccctgaagtcca

SEQ ID NO: 718168 - DNA, 369 bp, Homo sapiens
gaattgggattgctgcatcaaatggtggttctatttttaattttttgaggaaccgccatactgttttccataaaggctgtactaatttccattctcaccaacagttcactagggttcccttttctccacattgttgccaacattctttatcttgtgttttttaataacagctatcctaacaggtatgaggtgatctctctcattgcggtttctgattgcactttcctaacggttggtgatacttgagcattttttttatacaccgggtcatttagtctatgatgttgacttgactcccttatatagtttggatacttgctgtggccttgatgtttgggtgcacaaaaaattcggatattggactctcat

SEQ ID NO: 718169 - DNA, 626 bp, Homo sapiens
  misc_feature (253)..(253): n is a, c, g, or t
gctctgggtctccaggcccgctgacgtccgccagtcgtcccgaggccactcttcacctccaccatgagcctggacatccagagcctggacatccagtgtgatggagctgagctgacgctagatgtggccgatgctcctccctcttgctccagcatgtgccaaagtgggtcagtgctgggactgacttgtgtgccttcagcgcgaaggcagctggctggcaatgggacgagttcatgtcgttcatggcaagctntccgaatggttcaagccccgtggcaacttggggcagaactgctcgaagccctgctgcagctaactgagcttgggcgcatgtctggctgtgcgattgcggtgctccgaggtgcctgcatgacccctctcctgcgaagatccatgaatgctgagcctccagagactgctgcctgactgggggcccgggctgcgggggtccttgtccatgcacacttacgcagcccttgcccacccttgcatggagcgtgcaacgctcaagctgacgaaccctcttggggcggaatgcggggcccttgcagccttgcctcgtgggcgagaaaggggaacttccctttgtggaaccccccgcccaaggattggtgcccggacccttg

SEQ ID NO: 718170 - DNA, 159 bp, Homo sapiens
cagctgggccttccactccttccacttggcgctggccgactccccatcctgcccgcttccctgtgtgtgcatgggtgtgtgtgtgtgtgtgcctggggtgtgtgccgtgtgtctgtgcatgggggtgtgtgtgcctgtgtgtgtgtgtgtgtgcatgct

SEQ ID NO: 718171 - DNA, 686 bp, Homo sapiens
  misc_feature (17)..(17): n is a, c, g, or t
  misc_feature (39)..(39): n is a, c, g, or t
  misc_feature (604)..(604): n is a, c, g, or t
acctcctaccccacgtnactcttataggtagtacaggantattaacctgttctgccatcggcctcaccgttcggctgagccttaggacccgactaaccctgatccgattagcgttgatcaggaaaccttagtcttgcggcgagggggtttctcaccccctttatcgttacttatacctacatttgcttttccacacgctccagtaaagctcacgcttcgccttcaacgctgagtggaatgctcccctaccgatccattaggatcccatagcttcggtaaaacacttaatgcccgattattatccacgccaaactcctcgactagtgagctgttacgcactctttaaatgaatggctgcttccaagccaacatcctagctgtcttagcaatctgacttcgttagttcaacttagtgtttatttggggaccttagctgatggtctggattcttctcctttaggacatggaccttagcacccatgccctcactcctgagatagaactaatgcgcattcggagtttatcaagacttgataggcggtgaagccctcgcatcttatcagtcgctctacctcacattagtaactctcaaggctgcacctanatgcatttcggggagtacgagctatctccaagtttgtacctttcacccccaccctcagctcatccggaagcttttcacgcta

SEQ ID NO: 718172 - DNA, 441 bp, Homo sapiens
  misc_feature (359)..(359): n is a, c, g, or t
atatgagtcataaatgattccactgcttcggtagacaacttatgcccgattattatccatgccacaatcctcgactagtgagctgttacgcactctttaaatgaatggctgcttccaagccaacatcctagctgtctatgcatcgtgacctcgtttaagtcaactgagctgtcatttcgggaccttagctgatggtctggattcttctcctttaggacatggaccttagcacccatgccctcactcctgagatagaactaatgcgcattcggagtttatcaagacttgataggcggtgaagccctcgcatcttatcagtcgctctacctcacattagtaactctcaaggctgcacctanatgcatttcggggagtacgagctatctccaagtttgtacctttcacccccaccctcagctcatccggaagcttttcacgcta

SEQ ID NO: 718173 - DNA, 181 bp, Homo sapiens
  misc_feature (142)..(142): n is a, c, g, or t
tctagaggatctcccatcatgactaacacatcttttcaacaggtgtgggataacccatatcctaatttagaccaaatcacgtctaagaatcctactggtaaagaacagcaggtgagaatctaccaagaagttctagaggttntacgaccttcattatccgccctctatctaaatcacctag

SEQ ID NO: 718174 - DNA, 457 bp, Homo sapiens
  misc_feature (17)..(17): n is a, c, g, or t
  misc_feature (39)..(39): n is a, c, g, or t
acctcctaccccacgtnactcttataggtagtacaggantattaacctgttctgccatcggcctcaccgttcggctgagccttaggacccgactaaccctgatccgattagcgttgatcaggaaaccttagtcttgcggcgagggggtttctcaccccctttatcgttacttatacctacatttgcttttccacacgctccaggatcaatcaatatcaccattcaacgcatatagaatgctcccctaccgatactttttatatacaatgctatcccgcgacttcggtatctgacttatacccgattattattcatgcccggatcctcgactagtgagctgttacgcactctttaaatgaatggctgcttccaagccaacatcctagctgtctcggggaccagacttcgttagactaacttagacagaatttcgggaccttagacgacgtaaggagtg

SEQ ID NO: 718175 - DNA, 397 bp, Homo sapiens
  misc_feature (70)..(70): n is a, c, g, or t
  misc_feature (273)..(273): n is a, c, g, or t
tgtcccagattcaaaggagaatggggttgagccctttgagaacgcagtctcccgggccccctgcatcttngagtttcaatgtccaaccttttggtttttgggccaggcaggattctttaaaagaagttttattttttggggccctctgctaatcatgtgggtgagccagtggaacagcgggagacctgtgttagttttacaaattccctcctaatgacggggctcaaaaggaaaccaagtggtcgggggttgtttttgcccccctgttttttnctcccccaaggaaaatggtttgggagaacccagcttttcctgtttttgaaaaattccagcttcccccggtcaagttaccaaggaaggcctgggccaataaaaggtttttcccccttgaggttta

SEQ ID NO: 718176 - DNA, 564 bp, Homo sapiens
gtccctcgagtaacgctgtttctactcctcgtatactttgattattgaacggatctccagtaacactagtctgggcatgcttggctttacactcatataccgtgcgcatggttcataatcttccttccctatgattatatttgccaaagactgctcctttgcttggatgtctagtaaacgtaatgtgtgcttgccattttgtctgtcttcttcactttgtctaggatagatgctttcaggtctccaatgtgtctgtccaatgtacaatatcaactgtcgtctcccaaattgtatggctagtctctcacagtcagcctacaggattattatggaggcctggtcagataactctataaggaattcccagctattgtgctgcttagaacaagatcactgtgtgttgtggccccaaatggatcaccaaccacaaggaatgcaacatcactgatatcagcatcctttaaaatattatctgcttcttgttccacttcttctctatcagcaacaaccaattttcttccataaaactcttccaaggcttccttccctacagttaggactgag

SEQ ID NO: 718177 - DNA, 114 bp, Homo sapiens
tatgtatacacctccacacacatagatctgaaaggcactttctgcttagaggcaagcagtcatggaataaagcatgtaacgaggcgggcttctctgtaccacaccagccaatgt

SEQ ID NO: 718178 - DNA, 338 bp, Homo sapiens
agcatgtaccctatatatagcaggacatggaagaagcagttcagtggttgatcagtgtgctcaagacaaataaaattaaataaaaattacaaatggcagaatggtagctcaaccactagagaacaggttaatgaaattacttggtactatactctcaaacatatacgtaaaacgaagtgaatgaaactccatttaaagttgtcgcaaaaattagcacactacttggcagcttcatccaattcaacacaggaaacaaggtaagcagacacattcattagatcaaaagaaattagatcaagttcactggaatcagtctgtaactactcaagtcacaatga

SEQ ID NO: 718179 - DNA, 715 bp, Homo sapiens
  misc_feature (13)..(13): n is a, c, g, or t
  misc_feature (40)..(40): n is a, c, g, or t
cagtggaattcanccagtgtgcctgtacccagagtttgcnggacagcgatccttgccttcagtcctacctttatcccatgagcacatggtgatcaccggaccggcatcggagaacgtggacaacctgggcttcttcatctaccgactgtgtcacgacaaggagacctacaaactgcagcgccgggaaacaattagaggtattcagaagcgggaagccagtaactgtttcaccattcggcattttgagaacaaatttgctgtggagactttaatttgttcttgagaagtcaagaaaaaacgtggggaggaattcaatgccacagcataccctgcccctttgtattttgtgcagtgattgttttttaaaatcttcttttcatgtaagtagcaaacagggcttcactgtctcttcatctcaataactcaattaaaaaccattatcttaaaaaaagaaaacaaaacctttcttttttctaagtgtggtgtctttgatgtttgaattagcaaatgtgcaggttcctagataagattcgcttctccttagagcttacctactaggaagaatctaaattgcttggaaatcactaatctggatttttgtgttaattctgcacttccatgagggaaagatgcctaaagaatagtcattcgcatatgttaaagggaccacagtgacttgcttgtagatgctagccctgctacctagtctgttagc

SEQ ID NO: 718180 - DNA, 1539 bp, Homo sapiens
tgttaaggaacctcaatgtaattttaatgacctcagaccagtgaccaagggcagaactgaccagtgggctgtggttggggactcccagagcaaccctcaagggcgtcctgtggtgtgctttaccaccgtggaacaacgtggtgaggtcgtggtgggagaaactccgtgggtggacccttagcgtggacagccttctccacgttcaatctcctctgcaagcgtcgacggcgcactcacggcgtagacctacgcgcgccgcacactcagtgggtgccgccccgcgctctgctcagcacacggctcctgtgcacgacacaacgcacacgcgacacgccctgacgcgcagcggcgacgcacttgcccagctcgacgcgcgccctcacatgccgccgctacccctccagcgcagactcccctccaacgcccacacctccttggcgccccacaaacagcacccgcccacccatagctaccccaaaaccccgtgaccacgcgccccatggtgaccctaccacgggctccccacacacgcgcgcacccgacgcaagtgtaacctcacagcgtccgcgaacaacaccccgcacagccacaagatgccccccctgctcaccgagccccagcgccggcacaacgcgacagcacaacggcagcccaccacacagcaccccccagcactggccaacatcaccacgcgcacccgcccggcaagcacacctccgccacctccccccaaccgacacccccaccccaccacccccccgctcaccacctgcgcacccacgccaacacgccccacccgccccccacgccacccccagaccccccgccccccccgaacaccccacacccgccacgccgaaccctccgacacccccccacccacacaccagcgcggcaccctccgcccccaaccaaccaccgcacacctcgaccccccacaccaccccgcacccaccaccctcccaccctccccccaacacccttcactcaagcacaccacaaccgtacccactcatcacacccccaacggcacccacctctacaccacacactccctctccacacacacacacaccccacatcacacccacatcacacatccacaaccttcaacccaccacccaccacaccctaccacaccctcccccacccctcaccctcgctaccccccccaaaaaccaccaaccacacaccaccaaacgctctccattcccccaccacaccctcccacacccacaacctcacctcacactccccacactctcccacccaacccccccaccacaaacccgcaccaccctcgctttccacacctatcagcctcacatcccacacatactcccttccccgatcctcaaatctcacaacaccacctaccccccaccacctcgactaccctaatcccaccctactctgaccacgccttcacttcttcacaacccataccatccatctacaacatcctacataccattcccacacacccatctccccaccacgtttctacactactccacactcccgatctaccatctacat

SEQ ID NO: 718181 - DNA, 692 bp, Homo sapiens
cgtggtggcagacgcctgtagtcccagctactcaggaggctgaggcaggagaatggcgtgaacccgggaggtggagcttgcagtgagccgagatagcgccactgcacttcagcctgggcgaaagagcgagactctgtctcaaaaaaagaaacactaaactgaaataccataaaagttctggctggatacaggggctcatgcctgtaattccagttgctctgggaggctgaggcagggggaatcacttgagatctggggttcaagaccatcctgggcaagcatagcaagatcctcatctctaccagaacaattccaaaacattggccgggctatggtggctcatgcctgtaattccagcaactttgggaggccgaggtgggtggatcacctgaggtcaggagtctgagaccagcctggccaaaacggcaaaacctcatctcagccgggtgcggtgagccatgcctgcaatcacagcatcccgggaggccgaggtggcgtggatcacgaggggtcaggcagatccgagtccggtcctggcctaacacagttaaaaaccccagggtcgtcccacctacgaaccataccaaaaagaggccaaactaacgcggcggccctgccgggaggggccgaccggcaacccccaggctacccgggcagggctggcgcgccgggcacactggcggtgaactccc

SEQ ID NO: 718182 - DNA, 579 bp, Homo sapiens
cggggtagccgcgtggtacaaactcgtgggccccaacacaagcaaaagttggacacactttaaagggcagagtcccagcccactgcggggcaaaaggattattcgccccgtcccgcggaaaagggagccccccccgtggttcgcgcccaagcaatgcagcacgagctgttgtgcctacgagacagcacaagacccacgctcgtgcataccagagaccgcacggcacagaccagacgtcggctagttccaccccacccgggacaatgcccaaagttgtgtagatcctagcagcgcaccctattcgtggcgcctctgggagccccctttggcgacgacccccccttgagcggcaaaattgtcccccacacacatcgtggtgcgaaatgttctagttagagtttggatgataacgcacctcctttgcgtataatttggtctaatgccatagtactgcagttctttcaagaatcaatcaagggtcaagcaaggaggactcccaaaaattaggtgacaattccgtcttttttcaaacatgttttgggggacaatcccccccgaactttttctgcccgacatgac

SEQ ID NO: 718183 - DNA, 293 bp, Homo sapiens
gggtacctcctcagtagacgcagctccagtctaatatgaacgggttcaagctttttttcatcttcctcccgttccacagtcaaagagccttttcaaaccttttctcgtgtaatcgctccaccatggaacttgtgtttctttttttttttttttttttttttgtcttttggccatttctagggccgctcccgtggcatacggaggttcccaggctaggggtctaatcggagctgtagacaccggcctacgccagagccacagcaacgcaggatctgagctgcgtctgctgagag

SEQ ID NO: 718184 - DNA, 299 bp, Homo sapiens
agccagcaggcgctcgaggccttggctggccccacatcgccttttcctccccggatcacctgctgtggacttggtgttccagggagcgaggagctcctcgggccctgtgtggactctgggtcctttatcctgtctccgccactccctctggcggcgctggccgtggctctgtctctctgaggtgggtcgggcgccctctgcccgccccctcccacaccagccaggctggtctcctctagcctgtttgttgtggggtgggggtatattttgtaaccactgggcccccagcccctcttttg

SEQ ID NO: 718185 - DNA, 236 bp, Homo sapiens
ccccgcttatggaatcatttggaaaataccacgactttaaatgtggccagctatgagacagcggactacgcaggaactggggagtttgggagaagctctcctggtgttgactatagggatgaaggctccatgctgctgccacaaatggagtcaccataagaagaactgtcttctctgataatgatgtcccaccattttcatgctgttcgtcacagttccacaggtccttcttgcag

SEQ ID NO: 718186 - DNA, 414 bp, Homo sapiens
cgggcataagagagaagaaagaaacaaaaaacaaccacagaaccgggagaactaaacatcaaaatcaagtctctcccaaacagcaatcagatttctggtccggattcctcttggccatctatcttggatgcttcaattactgtagccagtaaactatcagcatggactttcagtcatggaagttactacatcttcgggtcacaaattccccggtaagatgagtatccctatatccttttccctgcagtacacacacggatttacacagttagtgtaaaacaaattatcactggcagctgctagaacagggcatgtcaggttctattcagaaaggcaatttatagaatagtacattcaacttggatttttacaacaaattggtcagacactcaaatacagcatttggtcgttgct

SEQ ID NO: 718187 - DNA, 241 bp, Homo sapiens
  misc_feature (197)..(197): n is a, c, g, or t
  misc_feature (223)..(223): n is a, c, g, or t
gccttcagaatcgcttagcctagccatacccccacgggaaacagcagtgattaacctttatcaataaacgagagtttaactaagactatactaaccccagcgtttggtcaatttcgatgccagccatcgctggtcactcgtattaacccatagtcaatcaaaagccgtgcgttgatgagtgttttatgatcaccccnctccccacatacagtctaagactcancctgagttgtattaaaac

SEQ ID NO: 718188 - DNA, 1366 bp, Homo sapiens
aagataacttaatctcactatgaagatttgaatcacactcagcacattcatccatgctgcccacaactccatttgctcgcagcttgtctgtcaatgtctcagtggggcttccatccatcctgcacaaagcacaggcagaccagcggcatttttcccaacagcagccaagcaaagtcaccacactatctcacttactattcctatccatttatactcctctctatatccttaacttctatcatcttactatacatttttcaacacatatattagaagacaaccagatcatgtcatctgcatactcaaagtgtaacacgaactcctcactacaacgaacaacaatccaagagacaacacccctgctgaacaacactacatgcagcaacccacaaaccccgaaaccactgagcgcagacacgcacagacccaaccccatgaatacagcagagacacgagagggcagagagtacaccccacaccaactcggaacgcacgaaacacagggacacaacatgcacaaccacctcacacacaacgatgcaacgtcccccccaaacccaagagcacaacaaccggcctaccagaacaacgcaccacacacagagaacaccacacacccactacacctaacccagccaaccactcattattgagtacacaacttctactgcaacaacacgtcgcaactactctccccatactgaacaatacaacaccactcaacttaatactaaatcactaacccaaccaaaaccatccacaaccacactcccaccttcaaataccacccaaccctcatcaccaactccagcattacccacctcactccctatcaccccatcctctcacctaaatactatcacacataccccttcctcccacctgcttacacactactccatctccacactacaccacactacaccacatttacaccacctcctacctccacagcacacaaccctccaccaaatcacctaaactatcccgccaacacaccccacacaaccccatcaatacaaccaccacacaccctacgtcaccacacactccctacccacacacacccctcactcacacactccctcaaatccatcacacaacaccacatcacataccatacaccccttatatatctcacaatcatatatcacaccacccaaccaccatctaaccaccatcatacactcaacacaatacataactaccacaccctcacaccaccccacaaccacccccatcccaacaactcacaccacatcaccctccaactcccaaatatatactcctactgcaccacttcatcatccatacatacctatcctatactccaacagacaataccacatacaagatacatcacatc

SEQ ID NO: 718189 - DNA, 364 bp, Homo sapiens
gtacgcggtgacatccagtatactgattcctctggtatctgtcccctagcacgcgctcctggtccttctactctcagctgttgctggcacctaagtctcggatgtactgatgtttccctcttgtattatatttcctttctataaaataatatcgatcacttaggaaacaaacgaaagaaaacacgttgggagttacattactatgtcccaagacttctctgggcttggcattagcagggaggaagagcaccaagggagccacttcctatggtgattgcagcatgctctcgtgtatttgcacagagagtcctaacttttcctttcagagctgagcatctgttgaatcctaatcagtttgtgtcac

SEQ ID NO: 718190 - DNA, 312 bp, Homo sapiens
  misc_feature (15)..(15): n is a, c, g, or t
  misc_feature (22)..(22): n is a, c, g, or t
  misc_feature (55)..(55): n is a, c, g, or t
  misc_feature (91)..(91): n is a, c, g, or t
  misc_feature (147)..(147): n is a, c, g, or t
  misc_feature (279)..(279): n is a, c, g, or t
gagacagagtttttngctcgtngcccaggctggagtacaaaggtgcaatctcggntcaccacaacctccgccccttgggttcaagcaattntcctgcctcagcctcctgagcagctgggattacaggcatgtgccaccacgcctggntaacttttctgtattttcagtagagactgggtttctccatgttggtcaggctggtctcaaactcccgacctcaggtgatccgcccacctcggcctcccaaagtgctgggattacaggcgtgagcaaccacgnccggccaggaagccatttttcatgggagggata

SEQ ID NO: 718191 - DNA, 95 bp, Homo sapiens
  misc_feature (59)..(59): n is a, c, g, or t
tgacagaccccagcgccgactgagcctctaaagcgacttcagatctgtcccaccaacancaccgcgcgcccgggaacagacgctccgggaagaaa

SEQ ID NO: 718192 - DNA, 918 bp, Homo sapiens
  misc_feature (3)..(3): n is a, c, g, or t
  misc_feature (36)..(36): n is a, c, g, or t
  misc_feature (81)..(81): n is a, c, g, or t
  misc_feature (85)..(85): n is a, c, g, or t
  misc_feature (125)..(125): n is a, c, g, or t
  misc_feature (132)..(132): n is a, c, g, or t
  misc_feature (165)..(165): n is a, c, g, or t
  misc_feature (179)..(179): n is a, c, g, or t
  misc_feature (208)..(208): n is a, c, g, or t
  misc_feature (212)..(212): n is a, c, g, or t
  misc_feature (215)..(215): n is a, c, g, or t
  misc_feature (250)..(250): n is a, c, g, or t
  misc_feature (271)..(271): n is a, c, g, or t
  misc_feature (275)..(275): n is a, c, g, or t
  misc_feature (285)..(285): n is a, c, g, or t
  misc_feature (310)..(310): n is a, c, g, or t
  misc_feature (313)..(316): n is a, c, g, or t
  misc_feature (326)..(326): n is a, c, g, or t
  misc_feature (353)..(353): n is a, c, g, or t
  misc_feature (366)..(367): n is a, c, g, or t
  misc_feature (730)..(730): n is a, c, g, or t
  misc_feature (773)..(773): n is a, c, g, or t
  misc_feature (850)..(850): n is a, c, g, or t
  misc_feature (857)..(857): n is a, c, g, or t
  misc_feature (915)..(915): n is a, c, g, or t
acngcgggcgctgctgctgtggggccgccgcctgcngcctttgctgcgggcgccggcgctggcggccgtgccgggaggccnaccnattctgtgtcctcggcggcccaccgcccagttgggccccnggcgacnccccgcctggcgcttgccggccggccgcctgtnccgcccgccgcccnccgcggccaaggcggcacccctgccctcncttntcngccgccccgagagcgtgccgggttccccttccccncctgcgttcccggccgcgccncagnagcttttggncattgttgcccggtccctgtcctcngannnngaggtgtttnttcgggagctgatctcccatgccagcnctgccttggaaannctgcgtcacaaactggtgtctgacggccaagcactgccagaaatggagattcacttgcagaccaatgccgagaaaggcaccatcaccatccaggatactggtatcgggatgacacaggaagagctggtgtccaacctggggacgattgccagatcggggtcaaaggccttcctggatgctctgcagaaccaggctgaggccagcagcaagatcatcggccagtttggagtgggtttctactcagctttcatggtggctgacagagtggaggtctattcccgctcggcagccccggggagcctgggttaccagtggctttcagatggttctggagtgtttgaaatcgccgaagcttcgggagtnagaaccgggacaaaaatcatcatccacctgaaatccgactgcnaggagttttccagcgaggcccgggtgcgagatgtggtaacgaagtacagcaacttcgtcagcttccccttgtacttnaatgganggcggatgaacaccttgcaggccatctggatgatggaccccaaggatgttcgtgagtngca

SEQ ID NO: 718193 - DNA, 129 bp, Homo sapiens
agactacgaactcgagctggtaccaattcggccggggcataaagggtgggattcggaaacagccatgaacttgtgtgaactgtggcagcctgcgtctacaaaagtcgctctgctgctattttaaggaag

SEQ ID NO: 718194 - DNA, 167 bp, Homo sapiens
gatcgagactctgtctcaaaaaaaaaaaattaaggaaggaaaggaaaagaaagaacccccatctttactaaaaatatttttaaaagtagctaggtgtgggggcagtggcctgtaatcccagttcatggggaggttgaagcagggggcatggtttgaaccagggaggt

SEQ ID NO: 718195 - DNA, 552 bp, Homo sapiens
tgctggtctgctccttgaggatcccctactgacgttgcctctactatgggaaggtctttattgtggcttaggatggacctggtttctatctatcgcaggtgtcttgcgcccatcatgtctgtgatgtcttccgaattctccatgaagcgagttgacccgattaatgctgggttccctgtgcactagctttggctttcctgtgggtgccggctcactgataaatgaagttcgtccgtatgtaccgagaatcaatgcttcgcataagatctgggcaaagtctttgagggagactgttctgagaagcgaacatcgcagaattgctgacacgagcattgtgtccacgggctatcactagtctctgtcttgtggaacctggtgggcatctatcaggagggtgtgaagaggaaggatttgaattctgacatggatagtattttagcgagtctgaagctgcctcctaagtctgaggtctcatcagacgaagacatccagttccgcctggtgacaagatttgtgaatgaggcagtcatgtgcctgcaagaggggatcttg

SEQ ID NO: 718196 - DNA, 699 bp, Homo sapiens
  misc_feature (683)..(683): n is a, c, g, or t
cgccgactctttcagtttctagttcatgtccctccttctcttgcactctgcatggctcctaattcttctcgaacgttcttctttataccacgtgcccagtttccgtgctatcctctcgactctcctgcagtgctccaatgtcatccctcaagtccaggccctgcgtattctgggctctagtatagatgagcaagtcgtgccctccccagggcaccacgctccggcactcttggcggcctctccgtggtgcacaaagttcctcgatgtcatgcactctccaggcccagctcctcctgcctcccagtggacttcattcagccaccagcccagctcatggctctcagcggccttacccaggtcccgctcttgacttttggcggcctctgtcaggcccagaacttgacctccagtcggaccattcggcaggcccggcctcctgcttactcaaaggcctgcacagggcgccggcctcggcctcggcctcacagcggactctccacgcccagctagctctcgcctcactgtggcctccaccagtcacaaagctcctgccttatgcggccacttcagcaggtccagctcctgcctgccagcggcactcgttaggcccagctcattcctcaccaacggccttcccaggccccgtttttcccttccggcagatacttcgcagggggtggacntttgtagttttagtcc

SEQ ID NO: 718197 - DNA, 200 bp, Homo sapiens
catgctgaaaaatgtttttattagtataatgctaattatactgactccctatatatttaggcatatagattcaaggattattaggcacattagggtggatacctcaatagcccattcctcatctggtttcattaggaatgtaaaattaatctaaatttaccatgaagggtcagaatagctattgaatgctactttgaacc

SEQ ID NO: 718198 - DNA, 1165 bp, Homo sapiens
ctggcgcggtgtggtctcccggcccatggcgcaactcctctcacgcccgtttttcttgcgcatctccgggggttcctctccgttctccccggagggtatatttatattccccgccgacattttacacacgaggttgctttttctcgttctgctgggagcccgcggcgcccccactatgtgataccttattggggagcgcccacacgggggggaattttgggccccagcttggtttcgggaagttgaagcttctcgccccagaggtccgcaaagggttaaagtaacaccctgggaggtttaaaaggagccctccatttcccggagtttccctccaacaaaatgtttaatgaaagtgaaaaatccttggggccttagtggaatcccaagactccagaaaggtcgcccgctcccgctgtattcttctacttcaaccgaccagggcttgccttttaaatttgcaccggtgcgcgtgaaatattcccaaccaatggttataccccgccttttgcccaaaaaccccccttcactaagaaaagttaacccccacacgcgtattccccccacgagacgccccccgaggaatttaagttgaggaaaaactcttgagaaaagtgccacccacaaggcctcatttgtgggctcgcccactccacactgggagttcctcgccctcgggaaggagaggagactctgagaggttcgccactctttcaatggccccaataccacgaatagcccacccataagacaccaggaaaacaccagtaattaggtacccccctggaagattttgtcctgggggcccttacccgaggagccgcggaggccaccacccaagagcctgtcccccaaatgtgtgtggtgtgccctgcctgcctttggaccaatgatgcctgacctggtagaagccaattctgcgtgccagaccggcgccacaagaaaaatgggacctggttgaccccacactggtggaaccccctgggacccacggacttaaacctcccagaggaaccggcaccatagaatacctagaagaagttgccaattacttttgcccaaggactagctgataagaagatctctccccaagagagaccagggattggtgggaaaattgaccgcgtatgccctgactattccctttgtccggccaccggtttaccca

SEQ ID NO: 718199 - DNA, 105 bp, Homo sapiens
acttaaattgtaaatatgcactgtactaaaggattcttaaaatgtatttttttgttatttctactccagatgctatcccatggctaataaaattctagtaatttg

SEQ ID NO: 718200 - DNA, 936 bp, Homo sapiens
ctccctccgcgcggctacaatcgactgaccgcacagcgcaacgaaaaagccacggccgggtctcggcgttaactgcaacgtcgaattgcgcccccagtaccacttgcgggccgtcaacgcgcgcgcgcggagtgtgtgtgcgccagcacactgggcgcgcgagcttcacgcgctgcccgcatgttaaatcaccgccaaatgggctcgggactgcacctttcatagacagggggaacccacccaacaccaggggggggaaccggacacaccctggtggcgggacgcgaggcccaccccttcaccagcatatcggcctttcaaggcccttataaagcatttctccgggcccttctcatcctcattagggtttttctcctgcgcacccctggcgtgtatgccccctcgtgggcccgcgtagttcgttggagcactctgtgccgccttacgtgtggcgatgccgcatgtcaatgggcccaaaacgtgggcatgcttccccccccttggctagggtatcacttttgcccccgtggacaccatccaccgctcgtggtgtgcccactcacaagcaggccacgccaaaccattttctttccccgaccccgagaaggtgtccgctgtggttctttttgaggaccaactgccgaggctggtcaatcccccgtggccccacacactcctgtctgatagtcttgttgtcccctagtagaccacccacatattctcggactccgcccgctacagtgcagggtgaatacacaagcacacccctctcttcaacaccaggggcaggagagccccccctattttgcccgtcaggaagaatcgaccctagcaggggctgtgggcatgcgtcctgaggcttccattaacgacatcaagtggacccacccctcaactttcgccagtcttagacaaacggccgcggcccacataaca

SEQ ID NO: 718201 - DNA, 295 bp, Homo sapiens
tcattattgcattgtcttgttaccagaaacaaatttgccgagcttttttgccctatatttcccagcataatttgattaggaagtacaaaaaagggccaggcgcggtggcttacgcctgtaatcccagcactttgggaggccagggcgggtggatcacgaggtcaggggatcgagaccatcctggccaacatggtgaaagcccgtctctactacaaatacaaaaaaattcgctgtgcgtgatgatgtgcgcctgtagtcctgccttcccgggttcaatgcaattttcacatgcctc

SEQ ID NO: 718202 - DNA, 696 bp, Homo sapiens
gaagcgctgcggattgtccccgcgaagaccgtgccgccgtctctaaggtcgcccgggtcccaccgccgcaccatgcctcggggaagcgcagcgggcctcccggcagcagcggccgggcttgaagggggcaccaagcgggccctcggagcaggcacaagcgcccggctccttgcgggcaagccggggggcatcagtgcaccaaagatgggagaacccgcggaccgcagggtccaagcaggatgagctcggcatgggcgaacacggtcaatggcacagacgcatggaacgcgaaacactcaggccaagggggtaagcttcggagccacaccaacagcgtgggcatgacaaggcagcgcaccacacccggtaggacacccaagcactgttggtaattattggtgcccttgttcccctatataggacgacatcacgacacagtctaggggaagtgtatcccaaccaatctaccagaggtcgactgcgtcaccagtggagtaggaggggctataagggcggagcccactagaaaagcaagagtagaagcatatacagaagggaggtggcagccccgaggcctgtaagaagctgcggaccagacccgggggggacactgtcggtacaccatcttatacacccagcgaggacagacaagcaacgaaatcacagattgcacccaattcggtagattggaaagtg

SEQ ID NO: 718203 - DNA, 751 bp, Homo sapiens
ccgatttggacccaaaccgaacggtttggagggacattattgtgtcccaaaagattgggccaaatttggcacctgggtggcctatgtattttaccaaagtcaggttactgaccaaaatagtgaatgttgggactccatcagttattcccaatgaaagccagttttggcctatagtggcaaggactatgtggtcatgactaacatgtgacaagtattctcaggacatctgttcgtattgcaaggataagagtcttgtagggcactgcttatcattagaatgatgtataaccttcagaccagtctcttgcagaaatagtggcaactaattattttgcgattctgtaagactcctaattcaaaagtaaagttctcaatcctttggagagcgtataggttcatctctgatactgccagtcctgtctcgtgctcgactgatctgcctcctgagtcccctaggcatatctctgcatgctgcggttgctccgagtaggtctcatatccaacccagtactgtgctcatgtagtcacgccatgttcctcagccttcagtactgtctgctggaggctccatagtgctctctgagcagagctgagcactagtggcctgagccatgagcgactaggcgcgcgtgagcgctctcctcttcgtcagttcggctaagtcgcatctggaggtgcctctactgactagaatcgagtgagtaggatgcgtcgtctgaggccccgatatgttcagcgctgactggtccac

SEQ ID NO: 718204 - DNA, 731 bp, Homo sapiens
gaaaaaaagttggcagaaggtgtggcagtcctcattatactgtggaatctgcaagaagcccacgcagatattaattcccactctagattctgtatctagatcacacatggacgaccatggacagaacgtcgactgcgacgctgtctagacctttccggaactccggtggaccagaagtcctgaaattgcgatcagatattgcagtaccgattccaaaagaccatcaggttctactcaaggtccatgcatgtggtgtcacagcccgtgcgcgaccatacattcgctctggtacttactagtagaaaaaccactcttaccctatactacctggcttcagatgtggctaggggtgatagaacgctgtcgccagatccatgcatctgctttcaagaccggtgacagagtatttcactcagcagccacgatctcctggggcctcctgccagagtatgctcttgccgacagaccacaactggttcacaaacctacctgacacaccctggactttaaaccacggagcctggccacggcattcccatatatctcctgcttactcggagctccttgatccaacaagtgcctgtcgtgacaagctggacgcacaccttatcctgcgtccccatggggccaagttccacgcccttgcgcactcagcaactcccatgcccaccacttggctaacaagacctattggcttcacagacttccggggccactgcatggaacttgag

SEQ ID NO: 718205 - DNA, 139 bp, Homo sapiens
cgtccctgccgatgatcgcatcgtgtccgaagcgctgataggcgccctcaccttccagcgatgatcccgactgcccgtagcttgccatcgttctcctacagtaggtcaaacatattgtgtctggtctcggtgtcgatgc

SEQ ID NO: 718206 - DNA, 797 bp, Homo sapiens
gctttccggcggtgctcgcaagcgaggcagccatgtcttatcccgctgatgatatatgagtctgaggcggcttatgacccctacgactgtatcccagagcgacctatgatatgcagcacaggagatccaaaggcaggagccgtgcttagtgaagcgtcagtatgagacagacaaaccttatcagggtgatccctgaggtgactcgaacaaccttcatccagtattgtccatcaaaactggtctcagatttgattgaccagaaagtgtatgagctacaggccagtcgtgtctccagtgatgtcattgaccacgaaggtgtatgacgatccaggacatctatgacgaacagctggaccaatgctgatctgagacgattcttcaatgaattacagccttggtccgaggctgaagccattgtctccacaggttggcaactgatgctgtcttcctgatttgatacaaagacattatacctacaggcacatatatgccaaggtcagtgggggaccttaccttggagcagaggttggaatcctattacaaacttactggcaatctcttcaaattagattcttaatggccgatggtgcctgctaccccttggatctaccccaagccagtgggtctggggatatgatgcgattgagttacatctgaacagtctatcagtcattgcagtccagcaacggtgtaagactgcgcaagaaagtccgacgcagggattgatttcttcgcgccaatcccaaaattgtgggatgtcctagtggctcaagggcctcattccggtcgggcatcaa

SEQ ID NO: 718207 - DNA, 145 bp, Homo sapiens
ccgttcgcggtgtactcacgagacaactttaccacatcttgttacgcacgttcttccacctctcttgggttccttgacgcccgtgtctctctgcacgacacacacatacactcacgacacaccacacacgaacgacactgtacaa

SEQ ID NO: 718208 - DNA, 214 bp, Homo sapiens
tccagctagctcactgtcatttgagtttcacatttgacgcttgctgggacatttcttgtgacattgaatagagtgagtgtcctgttgccattggacagctgctgcctggcactgacctgactgctctgattgtttacccaccacaggcaggttgcgtcctgagtctcaggatcacattcgaagaccacagcatccttgtcctccacgggttttg

SEQ ID NO: 718209 - DNA, 207 bp, Homo sapiens
gcggtaccagcaggctgggccagattaagatgtcagaatagagtagtgggcctgaggaaataaaagtattttaccccaaaatctattcttgacatattttgaaatggccctgcaaaaccatattttgtggaggaaaattgcatctgtggagaatctccttctgtttccaggtctttttctgatccagaagagatttaactaagagtc

SEQ ID NO: 718210 - DNA, 354 bp, Homo sapiens
  misc_feature (326)..(326): n is a, c, g, or t
cagggtataatgagagggaaaaggatgttctttatcaactcactcctttgatccattcgtcctgtccggggtatatggtggtcccagtgtatcggtggggcataataaggtgagtacagcctggaggaagaaatgaaaagtgggagagcaatctggtggagggaatgggaaaaggagccctaactcattggcctcatcttcttgcaagaagtggcatctacatacaagaggcatgaatggattgactctgggggagttcaggactcctaaataaaggaaagagaaggtgcgacaatggccctgtggtttcctggtgttcgtaagtnaatgtgctccagttagagcaacaggatg

SEQ ID NO: 718211 - DNA, 473 bp, Homo sapiens
cccacccaaaatgtggtagaatcaagacgaactttgcatcggcattactttcttatttatcaataagtctgggtctcacgtctgttgcccaggctgaagtgcagacggggtttcacacgtgtaagccaggatggtctcgatctcctgaccatcatgatccacctgcctcggtcaccccaaagtgctgggattacaggtgtgagccaccgcaccccaggccagtttttaacctcttaagttataggttaatgatccatttaggattaatatcatcatatcgtgtaaggacttggtccagctctcttacttgggactatagatatagagattacccaccaccattggttgaaaagactatcttgaagatagttggatcttatatgtctgggctgatttcctggtcccgtatctgtaacatcagagtaccctgtctgtcccttggcccagtatcatattgtttaaattactatagc

SEQ ID NO: 718212 - DNA, 211 bp, Homo sapiens
gttagggttggaggtctctgggggcggggggttggtgctggctagcttggtggctggggttgggagcgagtctccatctcaaaaaaaaaaaaaaaaaaagttcccccttggtacttgtttaattagggaagcgggttgccaatttaggagattcacaacttcgggtgagtctcccatataatgtgtaagcccctaaggagggcggggacgt

SEQ ID NO: 718213 - DNA, 405 bp, Homo sapiens
gaatttcccaatcctagtaagcctggaggctactgcaggagaccaggggtgtatttcagtcctttatctcaaccgcataaagacagacactcccagcacggccatctatagacctcccccaaggaatgcattccttccccagggttattccttgctgggaaaagaattcagcaatatctctgctactcacacatacatttataagctctctgcagaggaaaagtatggctctattctgccagacccgcagacagtcagaccttatggttatcttcccttgttcctgaaaatcactgttattctgttcttttttaaggtgcactgatttcatattgttcaacacacatgttttacaatcaatttgtgcaatagtgggcctgagggtacggtcattctcaccttatg

SEQ ID NO: 718214 - DNA, 267 bp, Homo sapiens
gctgatccggagcctctcggacatcggactacgcaggctgctcggctcggctcggatcaaatgtatgcacacgcaagcatattgacagccaaccttcacttagttatatgcatgcacacacacataaccggcttgggaagaatggcctcgataaccgtctattccgactatgtatgtccttactgcctcttagcggagcaggtgctgtccaatgtgatcggggatcgggacatccgcatcgcctggcgcgcgttcgagttgcgcccc

SEQ ID NO: 718215 - DNA, 965 bp, Homo sapiens
  misc_feature (965)..(965): n is a, c, g, or t
gatagcagagagatactcagttccaggttgtctcctcttcgtctctattcttatctcttgttattatacgatttcgaaagacaatatacatgaatatgtagagacagtgcggacatatgttaccgttgcgaatcttctcgatgcggcatagctctacatgagagcgcgatgatctcttagcgagtaaagcacgacccgggatcttagctcatctggagaatctatcagaactctattcgatcgctcgtgtgcgttgagagcaaacgcatgagcggatctgtctcatttgcggtaggtcgcacgacagaaacatatctatctctcactcgctctctgagaggaaacgtctctcacttcatacacagctagcgatctctgtctaccaagagaggactggatgaagcccctgtgtggagctattttcagagaggcaactcgtgcgtacaccgaaagacttacgcgacacgacactctcatacgtaccgacgaagctgattgcctcggctggacagtgatctagcgaggagcgcacaggagtgacattcttaacaaatcgccgagtatcccacaatatatttctatgtagggagagctttggagaataagacgttcgcaaacagcatttgcctccacacgtcgcacctttttgtggcttaggtacgcgttcagcacgtacacacgcgctgttggaggcacactccatgagcactacgacgcaacttaaaaccacatctgttgagggtcgcgcccaacctgtgggggggcacccaatgtggaaactcccgcgcgggtggaccaagtcgagcgaaaaacgaagtttacgctgtgagtgtgtccccgaagaatacagctggttgtcgtgatctcccagatcacagtggtacggcgacgcgtgggagtatccaagcccccaaaatcatcgcgtgattgccccacgaggacctttattcctccccgccactgcn

SEQ ID NO: 718216 - DNA, 783 bp, Homo sapiens
aactgctgctccggcggactggaggcgtctgatggcggcctggacagcgccgagttggcaggctgagctgggcatggagcaccagtgcgtgtggtgggcgccgtgaagagccttcatgcgctgtggctagtgtcatcgaggctgaacttctggtccaccaagcactggtgagcttactgcggagtggcgaggagatttgccctggtgagggcagccatgagtgccctgtgtgtttcgaagcattcccccagagtgtgcctgtgcccagagcgagcttatgcgactgcccagtggcaaagtgggcttcagcaagtgccatgtccaacaatgtggattctggtgtgtgacaatgacgttgctgtgctgactgtggccccgtggtgttaccgagtggtggacagacatggatggatgatgtgtgcagctggctgtgctccagctgtgtccgggtgtgggacatgtgctgatgaagctgggggagaaggagaggagcgagctgaggaagagggaagctgtatggcttgaaagttgactcttgaagacactactggtgtgagcaacgtgcagttgccttatgataccacgcatctccgaaggcagagacaaagctgatgccccagagatgatcgtcctggtggctcttggttggaccggcctttcagcctacaacttctttgggcctctgtgtctccccgacagggcaccttcccctgtgtcaggtccggtcccagtccgcaggtctctggagcgtgggtcacgggtgcgattgtactcttggagtcc

SEQ ID NO: 718217 - DNA, 1018 bp, Homo sapiens
  misc_feature (74)..(74): n is a, c, g, or t
  misc_feature (86)..(86): n is a, c, g, or t
  misc_feature (89)..(89): n is a, c, g, or t
  misc_feature (97)..(97): n is a, c, g, or t
  misc_feature (102)..(102): n is a, c, g, or t
  misc_feature (144)..(144): n is a, c, g, or t
  misc_feature (148)..(148): n is a, c, g, or t
  misc_feature (190)..(190): n is a, c, g, or t
  misc_feature (202)..(202): n is a, c, g, or t
  misc_feature (528)..(528): n is a, c, g, or t
  misc_feature (531)..(531): n is a, c, g, or t
  misc_feature (533)..(533): n is a, c, g, or t
  misc_feature (537)..(537): n is a, c, g, or t
  misc_feature (547)..(547): n is a, c, g, or t
  misc_feature (557)..(557): n is a, c, g, or t
  misc_feature (597)..(597): n is a, c, g, or t
  misc_feature (602)..(602): n is a, c, g, or t
  misc_feature (607)..(607): n is a, c, g, or t
  misc_feature (620)..(620): n is a, c, g, or t
  misc_feature (634)..(634): n is a, c, g, or t
  misc_feature (640)..(640): n is a, c, g, or t
  misc_feature (655)..(655): n is a, c, g, or t
  misc_feature (659)..(659): n is a, c, g, or t
  misc_feature (672)..(672): n is a, c, g, or t
  misc_feature (689)..(689): n is a, c, g, or t
  misc_feature (698)..(698): n is a, c, g, or t
  misc_feature (705)..(705): n is a, c, g, or t
  misc_feature (716)..(716): n is a, c, g, or t
  misc_feature (722)..(722): n is a, c, g, or t
  misc_feature (732)..(732): n is a, c, g, or t
  misc_feature (735)..(736): n is a, c, g, or t
  misc_feature (739)..(739): n is a, c, g, or t
  misc_feature (742)..(742): n is a, c, g, or t
  misc_feature (744)..(745): n is a, c, g, or t
  misc_feature (750)..(750): n is a, c, g, or t
  misc_feature (761)..(761): n is a, c, g, or t
  misc_feature (763)..(764): n is a, c, g, or t
  misc_feature (766)..(766): n is a, c, g, or t
  misc_feature (784)..(784): n is a, c, g, or t
  misc_feature (790)..(790): n is a, c, g, or t
  misc_feature (874)..(874): n is a, c, g, or t
  misc_feature (887)..(887): n is a, c, g, or t
  misc_feature (927)..(927): n is a, c, g, or t
  misc_feature (1012)..(1012): n is a, c, g, or t
ttcggcataacgtaatccatttcactgtagcctaaactccagtccgaggttggatattgttcaaatgagcaggnccgagctggaancanaggagccngcccngtgccgctcctcccttgccctcaggcaggtccctgctggaanggcntgcatcttcctgtcagccctggtttccatggtgactggcgtnacgcagccaccngagtatggctgaccttcctgcagagagaggagccgcagtcttttgcttgtggaaggagacgctgggctgtgcggtgcggagggtgatgaggatgtctggtgacagccgtgcggacaccactcctctctgcagcactgcctcccagcgccagggtcgcgggcacatcccactgagagcgggggtcctgccccatcttagagtcaaaggcagaggggcttccaggcctggatggggtattttggtgtcacctgaagtccctctgacatcaccttgtttcatcattttttatgacagaattagaaacccatccttcaagcacaataatnatnanaganttgagtttgnttaataaagnaaaggataagggtttgtttggaaaatttttttgatttatnaaatnaattnatttttatatttncccaatatatatanaaactnaaaaaaaaccaaacnaacnaacccaaaaaatntttaataaattaataanacattactnataagcntttataaaatnaaacanatttaaaaanaannttnacntnnctttnaatcaatcacntnnanttgttttttagcatgganactgcnagcaggacagacagggatggagtaaaccgaagtcaatttcagggctcttggcgtgttggacacagaagaaatcctagtgcagcntttggtagctaanagtcactgattttataattggagaatgcgtaaagattcanttttcaaggagaagagcctgcaaatggccaatgaaggaggtaaataaactaagatattccgagggaagggacccaggccacatanattaag

SEQ ID NO: 718218 - DNA, 179 bp, Homo sapiens
  misc_feature (1)..(1): n is a, c, g, or t
naccccctagcagcttccttacaaaaccatcagatctcgtgataactcaccactatcagaacagcatgggggaaccacccccatgatcctatcacctcccaccaggtccctcccccaacacatgggggattataattctgattacaattctagaataagatttcgggtggggacacatg

SEQ ID NO: 718219 - DNA, 303 bp, Homo sapiens
gacactaccagtcacctttgatacgcgacttttaatttatgattatacttagcctcctcctcctttttttttaccccaagtttgacttgacttggctttttcccccccaagtaaaacaaatgctagctcccagctggaaggtaaaactccagtgtggagtgaatttggtgtctatttataaccctgtacaccaaaactcagacttctggtcactgttcttggctttgagatggtcccctgtaaacccccctttaaaagctattatggcttttagtcacagcagctctttttggaaatgttagg

SEQ ID NO: 718220 - DNA, 527 bp, Homo sapiens
tcagctacaggaactttgctcttatgtggtctagtctcgtctttccacattcaggagaccacgtttacacggctgcattggaactggctatactagagaatcctcagcttggttctcagctgttggtccccaggcgacaaggaggaagaagagttccgcaggagctttgtgagaaatgtattatcacatatcttctactccatttaattaataatcttctggctctaagattatatttgaaatgataatggtattaaaatggataacaaaattgtcacattgttattttttttttatttttatcagtttactaagtgttgttatatgtctctcatttctttcattaagaaacagccctgcaccttatgttgtatcagttaagaaactgtagtttgcaagtaaaacaaaattcaacttaaactagtagtggcagggaaaatgttggttcatcaaagtgaaaagcctaatttctttcaagtgtggcttaatccggagattcagatgacaacacttagtaaactgataaa

SEQ ID NO: 718221 - DNA, 285 bp, Homo sapiens
catttgtggtaaagatttgcattccctaatgactgatgatgaaatctttcatgtgcttattggccactggtatgttgtcttatggagaaatccgttagcccatttttacagtgggttatttgtctttttatcattgagttgtaagaattctttctgtggctggacgcggtggctcacacctgtaatcccagcaccctgggaggccgaggtgggtggatagcttgagtccaggagttcaatgaccagcctggacaacatggtgaaaacctgtctctacaaaaaaaa

SEQ ID NO: 718222 - DNA, 382 bp, Homo sapiens
acaggttgccaggaggttctgtttggcagactattattataggtttgttagtatgcaagggcaatggccagactgatgggtacttgtttttggtgattcagtttgtctaatatgagtatgtgagttattgaattgagtccgtaatatagtggagttactagtggtggtgattttggagaaggctgggttatatggtggtgttttttggaagtgtgggcaaagagtaatatatatatatattactcttatatatagatcacttatcaacaatctatctatataatctgagaatagccacctgaggtgtatactacttggggatccgtgcacgttaacgatgactaggactatgcagaaaccagagagtttaagaaaccggttt

SEQ ID NO: 718223 - DNA, 777 bp, Homo sapiens
gcgcggttcggtcctcgcaccggcaggccgcactggtgcttggagctgctaggaagcccctatcgccgaggctcgttggagcttgaacccattggtcacccctccgaatcaacggcccaaaaaaaaaaaaaaatgtttgaacaaatgccaaggaaggctctacatgggggggctaaatacggaaactaatgaaaaagctcttgaacatatttggaaatatggccacttggggaatactcttgatgaaaaccgtgaaaccacaaatcagaggattggattttggtcaccttttgaaagcccagcagacggctaaggattgccgccagaaacctgcaatggaacagtctttagatgcgaaaaccaccatccaggggggaacacgccaccaaaccctcattccgaacacgtggtagaagtgtggaccggcctccaacgctccaagaagtagaggccctccagaggtcttagaggtggaacaagcaaggacgtgaacggaacacagagaaacctccttaacggagaaggacaaattcacattacaggggacatttccaaacacaatgttaaacacgtgaagtacttcccagggaaccaatccacgatataacgatgacacaccaccaaaacaagttgggttcccaatcctaaaaaaaatttgccgcttcggcgaacacagtgaacaaaacagcgtaaactgcaagagaagagtctccctgtcccaaggtgcgaacgaaaaactaataatgcagtcccacctacagcgaaacgagttgacct

SEQ ID NO: 718224 - DNA, 144 bp, Homo sapiens
gtactgatgagattctctggcgaagttacacccttaagaattgagatctcttaaggatggcagaagcaggaagacacagtggcatcttcttctggagaggcctcagggagctctttactcatgacagaaggcagaagcaggaag

SEQ ID NO: 718225 - DNA, 263 bp, Homo sapiens
ccctcgggcttctaaggattcggatataccatctttcagcaagagtatctggctcgcatttacagctagcatagacattggtatgcacttctttccccagataggaagtcaaggaggatttcgttgcatgaaaaccggatgttaaacattgattacataggagtacagatgaatgagctgcaatacttcagtcggacgctaaacaataagatcagggaaggtaaaaatacctactgtggacactattttgaatcgtaagcttt

SEQ ID NO: 718226 - DNA, 168 bp, Homo sapiens
gagaggactggagataggggaaaagagaaaaggagggtaggagagggctggagagagaagggaagttaagaagggaaggagagagacagacattagggaagaaggtaaggagaaaggaaaaattacaaaaagggcagagagaaagaccagcccggccattgtcccttg

SEQ ID NO: 718227 - DNA, 186 bp, Homo sapiens
atagcgtttatttacttgttaggatttagtgacttcatttgctatttctcttatagtgcagagttcatttttgcccctgaaatgctattgctgactttgctgaagatattgtatttcaacctcatccatgaaaatacaaacaccttctgttgtggatggtgagcctctgatgccgcttatttgccg

SEQ ID NO: 718228 - DNA, 249 bp, Homo sapiens
tacctacagctggggacttcacggggcaatacgcttctgatgggtgtacagtccctgcacttgtccatagaatgttggttgttatcattctgtaatgtgttgtctcgatatttctattatgctgtgttcaattataaagttgaacagaacgcggttcccagtcatatcaagttcagcatctaccctcccattccaggagaggagagctctctgaggtgggcaggaaagacatctgaggagatcccaatg

SEQ ID NO: 718229 - DNA, 104 bp, Homo sapiens
ggcaggcctgcccgggaggcccgcccagaagtcggcgtgaacaccccggggtgggcagcacagggggtgagcgggcccaccctgcccagctcagggattggcgg

SEQ ID NO: 718230 - DNA, 589 bp, Homo sapiens
  misc_feature (233)..(233): n is a, c, g, or t
  misc_feature (278)..(278): n is a, c, g, or t
  misc_feature (281)..(281): n is a, c, g, or t
  misc_feature (297)..(297): n is a, c, g, or t
  misc_feature (304)..(304): n is a, c, g, or t
  misc_feature (310)..(310): n is a, c, g, or t
  misc_feature (322)..(322): n is a, c, g, or t
  misc_feature (364)..(364): n is a, c, g, or t
  misc_feature (577)..(577): n is a, c, g, or t
gaatgagaggccctggtagcaaaccagtggaagaagttttactaggagcagttgtatcattcgtgtactttttttgtgtcatacaagtgagagtaaaatggtccatgtctgtgttttgaggaattttttgcctttcttttcagaaactaattctgaagcaagcccttatagttgtgctgcagtggtgtttcaatcacaattttagtgttcgactgtatgctttagtgtgctcntaaagaaactctggactgtgtggaaaagtgttaaagtggttgaangantttgatgccctgactncctgtgnatttgnaatccaggcctnccatcaagttggaaaagcatgcacgggagccagggggaatgnccaaagaaagaattgggcaaacgcatttcagggagccattttctttttttgcaacatttcaccccactccaagggatttattggtctagagaccatattttacatccttccacgcctttcaggccttattgaagatgaatggatcaccattggataaatttaccagattcactggatgttcctttagctgcgggatttcagtggtaccttctnaaactccagctt

SEQ ID NO: 718231 - DNA, 1267 bp, Homo sapiens
gccactgaaccaccgccacccacgtctcagttttgatctgcaaaatgggataatcctagtacattcctcggagggtggctgggacccggtaaaaatggggtctggggtctgggttccctattgaaacaatctattcccagcctctcccactggagattaagtcagtggaggtggggcgggactggagacgctgatccctggtgacatgtatgatcaggcaaatttaggatacactgatgggtggggaccttgcctctattcttgttaactgccatccccatcagaagacagcgtggaagtcagaggatattggatatacctcaagccagcccagatgaacataaaatctcagtgggaaaggtgtgtctcttatgcaaggggaaaaaaaccccaagacgcatgcacgccttggccctctcccctccaacgaccttccctcggaaccccacttgggatagatttagaattgattccgggagtcccaggtcttgaaggacccgagtttaaatgtaatttccttaggagaaattttcagagcaggttcaaggcctagggctcagaatttgttccagaacttcatggtaatcttgcagccaagttcaagcttcatcctggtctggagggttctgattgctgatggcttgttactgtgggtgggaaggttgaaatctgggtattccctggggtggtgttactttttaatttaggaaatgacatttctttgtttgctgaagtcaggcattgagttaaaggcagctctctctccttcccatctagataagggctttcttttcagtgagtgttacccgtagaattctttttaaaagggcccctactgtttgtgtagatcctatgtgaatctttttatagcttccgtttgatttccattgcctccttacagttcaatctgaaagcaatctgtagctagcctgcctttttaacagaaatctgtttccagttctggggttttcctaaagattgacaacttcgttttgagggtgtgggcagggttgttgagagctgccaagttactgtacaaaaaaggccagagttttaacttattttcaaatggaataaagcccattgtaaaggaaatacaatgggcaacagttgaaatcttcagagcaatggttagacttcacttattcattcagcaaatatttgttgaacgtctactatgtgccaggcaccctctaggccagccccgaccaacagaagtctaatgtgagccacgtatgtaatttaaaatgttcaagtagccacatta

SEQ ID NO: 718232 - DNA, 299 bp, Homo sapiens
agtagctgacacttatggagatgaagaaagcaggtgtgagctacgggttcatcacaagtgtgaggcagagtctgcactcctgaagcaaaggggaactcttccttaacagggagaatattgtatcacaaggatgtctggaggtagacacatccttctcctgtcacattcatgtattccccaggcagctctggcaatgagacctgctgcagtcacaggcggttgttgttgtccactaggactttgctggaaaatgtccctcacgactggcatagtcacctgtgccgccttcagataaaatg

SEQ ID NO: 718233 - DNA, 502 bp, Homo sapiens
  misc_feature (6)..(6): n is a, c, g, or t
  misc_feature (11)..(11): n is a, c, g, or t
  misc_feature (114)..(114): n is a, c, g, or t
ctgctncgaantgacccagagataccccggccctttgcagcatgagaaagccccccaaagctctggaatttacctccacatccaataataagtgaatgttttcagggttacatngtgttgtgtcatttgaattcaatttgactacgcttgggctttggagagggactgttgagtagacgcaggtactttctgagcttgatagctgacaattctaaagcgcatgtgttacacaagttttaaccagtcaggagatttttacatagccagtgatagatactttatgttttgtataaattttgtttaggctgcaatgtttagcttttaactaactcttgctgtcttaagttcataactatgtttaatggcacacttacaagatatttagcatgtaaaaagcaagacttttgtttttttgtttttaacggcttcatattgaagctgagactttaccacaaacaagttgagtggcaggcctggtatgctgtatcttgttacataaagc

SEQ ID NO: 718234 - DNA, 590 bp, Homo sapiens
aaattaatttttttttaaataaaatactttaaattaaattttttcaattaaccccgtaaaaaaagaacaaatacctgcaaacaaaaaaaaaggccagcttcccgaaaaaaaaaaaaaaaattcgcccaaaccccggggtttgaaaaaaaaaagcccaaatctgccacaaaaaaaaaaaagcccgcccacaaaaaccgctacaggctcttcaaaatttggcccctcgtttccaaccaaaaaaccccagtaaaatcccaaagggagacaaccgttaaaaccaccaccggcgaatctgttgaataaaactcaacccctatttctggataaccccaccaccctcgcaaggacaagctagcgccaacatgattccctctaaaccaccccaaaaaaccccgccttaataaaaaaataacgccgtccacgttggaaaaataaatcccctcaaataaccacaaaaaaacaagcgggaacaaaaaaaggaaagacccgggggcaaaataaggcgccaacacaaataaattgcgggggaaaaacgacccactaccagagcaaaaacacggcccacaccgcaaaaaaaacacacccaaccg

SEQ ID NO: 718235 - DNA, 114 bp, Homo sapiens
gcagaggctcatgcagccttgacctccaggtcccactcagcctcccaagtagtgggaccacaggcacgtgccccatgcccagctaatttttattttggtagagcaaggtttccc

SEQ ID NO: 718236 - DNA, 396 bp, Homo sapiens
  misc_feature (32)..(32): n is a, c, g, or t
  misc_feature (182)..(182): n is a, c, g, or t
gccttactctccaaaatgatctcttctgtgtnactaatggattgactgaaggctgccagcccctaggtagcttcaagatgggggctggtcatcagagagacataggcaggattagagggttggactttcatcccaccatcccacgtactgggagggaagggggctaaaggttaagctgttcnccaatggccagtgatttattcaatcatgcctacgtaatgaagcctacacaaaaacccaagaagaccgggttcagagaacttctggtagctgggcacatggaggttcctggagggtgccaagccctggaagctctgtgctccctcccacatgccttgccctatgcatctcttcatttgtatcctttgtaatatcctttctaataaactggtaaat

SEQ ID NO: 718237 - DNA, 231 bp, Homo sapiens
taatttttgcttatctatccgactatcatggcacttgagttgtttctgtattttagctattgtgaataatgctgctataaacatgggggtacaaaaaaaaagcttgtttttgtttgtttgtttgtttttttgttttgcttttttttttgagacggattctcgcactgtcgcccaggttggagtgcagtggcgtcatctgggctcactgtaagctccacctccggggttcag

SEQ ID NO: 718238 - DNA, 710 bp, Homo sapiens
tctgaattatataatcagctgaaatttccagtaaagccgggagatttgaaaaagagaatgaatctctgatagacagagactatatggagagagacaagagacaatccgaatcagtaccactacgtgcgctgacgcatctgtcagacggttccccttcatgaaacactagaatgtaccctcagagcaggaagcacacctgtgccatttctgggactctgattgatccagctgtggacattggaaggcgaaggaagggaggtggctcctgggtcatctttcacaaggctcaagacttcaacctgcagatgtatctttattccctccagtttttcctctagttcttttgagcgcactttaaccatcgttctcggtaacctctgtgcaaccataacttgtgaccgatgggacaacgaagatgttactaaaagcagaagttcctttaaaaggtctgtcctatgtgtcccaacacgctgcaagttctggctctgtcactcgcttgtgtgatcattgagtgcacaaatgaacgaagaccctagatgctgcattctttagctctgaagattccttaggtatccctgaagacagctcgctcagatgatcagcataaagagtggaacacgagggcccttcatggggtgaaccattagaaaggagccagggttcaaaggctggcgaactgggtgacgccacctaagacactggggccctca

SEQ ID NO: 718239 - DNA, 192 bp, Homo sapiens
cgcccagttaacatcagatcacgccaatctcagcatatagctaagactaacaaccaactgaggcaccagaaacatgaatgaagcatcttggacatcccagtcaaagccaaacccactcctgagtggatctgcatgatgaacccagcaatccgcaccatggagcaaaggatccatccagtcaaaccaaagaat

SEQ ID NO: 718240 - DNA, 309 bp, Homo sapiens
caatacgcatcaggcgataatagagctggcaactagcaaagcagtgcgctaccacccataaatataggtggggagacaattaacatccactaagtttctctacataaactattcttttaatgtcatttttttaagacacagttgcaaatagactacataatatacgtgggcacaacaggccatcacgtgactctctcgaaacactaactgtctacataaacagcatattatcaacatttacatgattcacatcaaactgcagacatcctcaagagtattcctttgcaaggatagcatttataaataaca

SEQ ID NO: 718241 - DNA, 278 bp, Homo sapiens
  misc_feature (9)..(9): n is a, c, g, or t
cccccaggnacaaaacactgtgtcccccccagtgcaggaaccgtgataagtctttctggcgtcggagcacgtaaatacgtccctctacagagtagtggggatattttgttatagtttgcactttgtatatatggttgaaactgttatcacttatatatatatatacacacatatatataaaatctatatatttttgcaaaccctggttgctggatttgttcagtgactattctcggggccctgtgtagggggttatagcctctgaaatgccaggtacg

SEQ ID NO: 718242 - DNA, 409 bp, Homo sapiens
  misc_feature (399)..(399): n is a, c, g, or t
tacccccttatatatatatgaaaactaaaggtgtgtttaaagagcaatcacttcacgtttagttcaaataactcataagtcaatcccatctatactttgacttacccattgcttcaagatccctacttgaggccgggcgcgtgtgcacgcctgtaatcccagcactttgggaggccgagacgggcggatcacgaggtcaggagatcgagaccatcctggctaacacggtgaaaccccgtctctactaaaaatacaaaaatcagccgggcatggtgccgcgtgcctgtagtcccagctacacgggaggctgaggcaggagaatggcgtgaacccgggagggggagcttgcagtgagtcgagatcgcgccactgcactccagcctgggcgacagagcgaantccgtctcaa

SEQ ID NO: 718243 - DNA, 1326 bp, Homo sapiens
gcacagaatcagctcaaaatggctcgtagtcaccattgtgtgatgggaagatggggacaaggagtcagcttcaaagacgtggcaggaacatgcacgaagccaaactaggaagtccgcgagtttgtggattatctgaagagcaccagaacgcttccatccagcttgtgatgccaaggatcccaacagggctgcacatgtctgctcgtgcccaccctgagatgtgagtgaaagacagctgctgtgccaatggcggtagtgccactggatggctcagtgtgcccttcctggcgatggccgagccagagttcgtggaggtcattggaggcctcggcagctgaccgtgtagcggagacctctattaaggaagcccgagcccgggccccctgcatcgtctacatcgatgagatcgacgcggtggtgcaagaagcgctccaccaacatgtccggcttctccaacacggaggaggagcagacgctcaaccagcttactggtagcacatggatggaatgggtaccagggaccatgttcatcgtcctggctgtccacgaaccgaagctgacattttggacggtgctctgatgaggcccggccgactgcacaggcacgtctacattgatctcccaacgctgagagaaaagggtagagcgcagccaacacatgctggatagcaggcctggaaaacactcacggcggctccacatccgggacacagcacagcagagacaccgacgcgaggccaccaaacggtaaaaaaaaaagacgcggtcccacgtacacaagagggcactacgaaaaacaacaacaagaacgggaaacaaccgaagagatcccaccgagtcactgaaccaaattgggacaaaaaccagcgggaaatcttggttctctggtgtgttgttcgtctaacaaaaaaacaacaaaaaaacaacaacaaacactaacaaataaaaacaaaccaaacaccaaagacaaaaaaaaaaataacataaaaaacacacaaaaaaaaaacaaaaaacaaacaaaaacaacaacaaacaaactaaacacgccacacacccaataacaaaacaataaacagacaaatacttatcaaacaaaaaaatctgaccactacaatagataacccacatacaaaacaccaaaccacacaaatatcagaaaccatacacacacaaaaaaaaccaacaaagcctcactccaacaacaccaaaaaacaccaaccaaaatcagacaactcaaaacctacctaaaagaacaccaaaacaaaaacgaaacaacaaagaacaaagcaaaaaaacaaatcaaacaatataaaacaaataaaaaat

SEQ ID NO: 718244 - DNA, 365 bp, Homo sapiens
tagtctgatactgcctttactctacagcgacctatgccatagcctggtctaggtggtcactctcactgaaggacgcaatgtgtcgtgagaacacacgcacacctgtccaaacccaacgacatggacctgcaggcacaacgaacaacgaaagtgcgccttttaatactagtctatgcaagatcgggtgtctaggtgaagcaggaacatccaggcagtcacaacaggtaattcctctcctagcacataagtcctacccccagttacctacactaatcaagtactatggcgtaaccaatcttcccggaccgtcacctaagttacatacatcccacttggaaagatcgagctacaggtaccgagctacg

SEQ ID NO: 718245 - DNA, 553 bp, Homo sapiens
ttagacgaacagaaacagacaaaaccaaaagataattttttgaaaagctcaacaagattgacaaatcttgggctagatggactaagaaaaaaagacaagacccaaattaccaaaatcagaatgaaagtgggaacattactccaggttacatagaaataaaaaggatataagagagtaccatgaacaactgaatgccaacacaatggataaactcctagaaacatgcaacctaccaggactgaatcataaagaaacagaatctgaatagaccaatgactagcaaggagattgaatcagtaatcaaaaacctcccaagaaaggatggtttcactggttaaattctgccaaacatttggagacgaattaatatcaatccttctcaaactcttccagaaaaactgaaaaggaaggaagtacttcctaactcattccatgaggccagcattatcctaataaagccagacaaagacactacaagaaaatgcaggccaatatcccctgtaattctgatgcacaaatcttaataagtactagcatccaaatcagcagcatt

SEQ ID NO: 718246 - DNA, 342 bp, Homo sapiens
gagtctagaggcatccccgtaagtaagtcaaatgcagatgcactaaaatcaagaaatggtaaatgactagtatagcatttaataaaaaaaactcttaagaacaggtactaaatctgaatcatagtttaggagcttgtttgcagtacttataaaaccttatccacaactggatttgacgtagagaaagtatcagccatatagcatttcacgttggggtatctagacgcctgtactctaagctgctggctcaaatctcttccccagctacttcttataccactatactttaaatgtttgcctactcatacgcacctcaacacttgaatacatactctaaaaatc

SEQ ID NO: 718247 - DNA, 508 bp, Homo sapiens
ttatgtttacgaagctggttttgtgccgtcgcgtgcgacggggcctcggcgctaagcggcccagctggctcagggagcatggctgtggtctgggcgcagaaggccttcccgcgcccaatcctgcttccccacgaaggagaacccgtgggcagtgtgattcgggtgccggaaacccccagcaaagcagcagggcccacgtaagacataaccgcgggcgtgagcgatgtcttacgcaggatccgagtcccgtctgtgatctgcacgacagctcatggcaacactggatccttaacccagtgagtgaggtcaggattgaacctgcaacttcatggttcctagtcagattcgtttccgctgcaccacaatgggaactccgtaagacataaccgcggccgcggttatgtcttacggagcaatgaagggaaacagtggctctcagtttacatctacttatgttgtatatccactaagaaactttagttacaaggagtctcatcgtggctcagcg

SEQ ID NO: 718248 - DNA, 313 bp, Homo sapiens
  misc_feature (148)..(148): n is a, c, g, or t
aaggccctgtgtaagaactttgagatgctatcacatgtggatcgtaatggcaagaccagcttgctctgttccctgtgcttgaccacttcttacaaagtgaagcagggagggctcaactgcccttcacggaccctgcagcttttgccgncgcaagctctctgaaccctgttactacaacaagggtgaccgcacaggctaccagttttgcaggcccagctgctgaaacagttccaacgacaagccctgaggggggcatcaactgagctggcactaatgtacaaccttttcagtggcaacctgaagcttggactgg

SEQ ID NO: 718249 - DNA, 295 bp, Homo sapiens
gtaccctacgataatctggattctttatcagcgtactcgtctgcgcttaatcccagtgtttactatactggatgatctcgctttcgatgaatttcgtttataataacccggtgacaaactatccaggctatatattcgcaatcataatatcgattttgttattatcaattagaacgccggagacgggttccgtgagtcgctcaagaaagaatgtaggttatgtgcaatcgctacattgacacggtattatttaaaattgcgaggtaattaatgatttatgtcaatgcgcgattct

SEQ ID NO: 718250 - DNA, 273 bp, Homo sapiens
gactcctttttaaggagcggagtcatggtggccacggaaggatgtccacatgtcctatgcacccgcgagctggcatgacagagaatgtgcccaaccttcatgtcatgaagggccactgcagatctctcaagatcccgaagtgctatcgtgaagcgaacaagtttgcctgcgcagtcacatttctacaggatacctataccaactgaggagtatccagctatctcctgtaattacgcttcatctgcccccgggagattgtgcctgtcaacacta

SEQ ID NO: 718251 - DNA, 440 bp, Homo sapiens
ggagctctatcgctgacacagccgtgcttctggaacattgggatactcgcgtagaagtcattagggccatcaagtttcaccatcaggtctgagggtgcctccccaaaaagagtgttatgggagaaggtacaggcccaaagttggctgacccagagtcggtcattcagttcaactcccatcagggggtagaagtgtgtcacaagcgatgccccagtctgatagccagacagaaacaggctgaggtaatgctttgcttcatgtggcggcagagtctgttgataccagagggatcgagcaaagttgagacacaattgctggtgtatcagcattactgcctgcattgaattctgggagaggagagctgggtttgtgcctgcttcctcttcttgcccatctgaagttcctttgttctcctccaacattgggtgccccataatatc

SEQ ID NO: 718252 - DNA, 118 bp, Homo sapiens
atacgacaattagagtgtcaagcggccgagcgctgatacgcagtagatatgcataggacgcgttctatttgtggtttcggaactgggcatgattaagaggacggcggggcttcgtatt

SEQ ID NO: 718253 - DNA, 789 bp, Homo sapiens
  misc_feature (590)..(590): n is a, c, g, or t
cctcaaaatcacccatttctgtcaagcatatattggcctcgtcccatgtctcagtgttgcctgggaattgctcccaggacttgggggtaggggtgaaaagcgtacaacaagatacttaaaagggctccgtggggtgacacaagcccagtcagggtcctgagtgacaggccgggggcccatccaaatgctcagtggtatatagcaagactcatctactacccgtaagttctccgaaagtgtcacgtgtctagcctatcctcaaggttctgatatctaggacaggtcttgacatataccagaggaacattaaactattgcttagtatataaattaaacatgtatagataataaaaaagacaaataccacgtggtcgtgtccgacgtcaatacagtttattccacctgctggagcgtggtcctcgaaggctttaactgcaggtgaacgccgacacatgtattcatgtgtttacgaaaagttgggggtcactataagtcagccttgaagtttccgttaattcaataaccgcaataaggtcccctgaggccggatcgtttgtcacaaacgttctgtgactgggagaactagtggntacagatggggaatacctgtgctgagaggtaacttttatcttactggggttgtgacatacctggtgaacaaactgtaaccttacagagactagacaagttattaaaggtcaactatggaactgttacggtgtcttctggggttaaactacgctgaataatgatttgctgttgagaagtgggctaacggagtataatata

SEQ ID NO: 718254 - DNA, 223 bp, Homo sapiens
aaagcaagatacgaatcgagccggtacctaaatctctatgaatcggggtggtaagcaagctcagagtacgctcggtagtccatctacagtcggtacagcgtcgctcgattccaagggtcgtgggtcatggggagcactggatgcttcttctctggctccatgtctctccctgtctctgtgtgtgtcttggcctctcttcctttttctgtcgggctagtcgggg

SEQ ID NO: 718255 - DNA, 478 bp, Homo sapiens
cagacgtagtacgtgacatggtcggtatgagagtatagctaaacatgtttcacctgtttctggcgtgcgcgcgtttcagctccatgtttggtcgctccctcggaagcgtgtacggatcatcactccactcctgggagtaataagtggccgcatcctcagtctccagttcgattgatagtgagcgcatacgacggtcccagacgcccctgccactgacgcgaaaagggacctccaggacgccacgtaggatgtgtcatcaatcacggacgtctgggggcggctcccggcttctgtaggtaccaatactctgtaccgtatacttgagctgttagtgcaggtcatggtgaccctctcccctggaggactgcagaccatgagggctggacactgggtgagctcactgtcagctccgccaccgacagagccatctccgcctgaagcgtctccacatgaggagacggtgagcgtggtcccttgg

SEQ ID NO: 718256 - DNA, 297 bp, Homo sapiens
caggacccggcatatccagatgcagactcaggctcggccttgggccctagggacctgagatgctatcggatatccagcgatcgtaacgagtgctcctggcaccatgagggtcccacagttggggtcagccacttcctgaggtgttgccttaactccaggcgctggtggtacttccccgccggctcaaccaccacgctgaagaatctcccaccaggctggggtgtctgtgctgtacactgtcacactttgggtggaatactgcgccaagaaccagacagagaagtctcctgaggggac

SEQ ID NO: 718257 - DNA, 180 bp, Homo sapiens
ctaaaatcggaggccctagctagaataacaaagaaaaaaagacatgagactcaaataaataaaaccagagatgaaaatggagacattacaacagatacctcagaaataaaaaggatataagggagtattatgaacagttataatcaacaaattggatacctagaggagacaataattctg

SEQ ID NO: 718258 - DNA, 210 bp, Homo sapiens
catccgttagataggaatttgggcagataaaaaatcagagttcgtcctcacacttaacctctgaagttctcaggtgcattcgacgagcgccaaccttggtggtccacacctctctctgagccccaggtcttgtctttctcaacaaggcaggatgacccctaagaaatctccaccaatggagcacagagctgcctggtgagaggcgtcacc

SEQ ID NO: 718259 - DNA, 515 bp, Homo sapiens
  misc_feature (317)..(317): n is a, c, g, or t
cggcatggtgtctgtagatagggaagagtgtgcttctggggcataaccagcaggagcccaagcacaaacgtgcacacctgcatggcatggagaggcgcagagaaaccaacgctggggccttccggagaggcaggggccagccaaagagagccacccaactgggcttctactgcaacatggctttgccacatctacttgctgggtgactttagggccataactttacctctctgaaactcttttgtcaaccgtagctcctttaagaattcttaggaggctgggctcagtggctcatgcctgtaattctagcactttgngaggctgaggcaggtggatcacctgagatcaagagtttgagactagcctggccaatatggtgaaaccccgtctctaccaaaaatacaaaaattagccaggtgtggcggcatgggtctgagcttagaagtcagtgactaatgtttgagatgtccctagcggtgtgctactgctcaatagacatttctgagaaagctttg

SEQ ID NO: 718260 - DNA, 462 bp, Homo sapiens
ggttgaaaatttacaaagtgtgtcgtcgaacgatgctacgagtcaaaaagtgcactcccgatttcttcatagtctgattctgaagtagtctcatcgcatggagtttgtctggcaattgaatgaacttggtctaatatttcttcaagtaagtaattaaggaagtcctgcttccttgcatttcttaagaaaaggaactttcacaggtgcatctgtgtgtctgccatgctcttctttcacttgtcgttatgaatgtattacatttcattgtttcgggtggctgtacatgattgcctgagaggggtttcttccttcctctttttcttttcactcctgaaaatttagctaaaaatataaaccatttaaaaattggaatccataaaggaaaagattactgtttgactacatgaaatatacaactcatatgccaaaagtttttacaaagtcaaaagatatggcaaactt

SEQ ID NO: 718261 - DNA, 171 bp, Homo sapiens
cgtttcagagcaggaactgaagcatctcatccttgcaagcagctgatggatttctgtaatgtggtggctgctgagacaggccgagtgatttatgtgtctgactccgtcacccctgttctgaaccagccccagtcagagtggtatgggagcacactgtatgcacaggtgcat

SEQ ID NO: 718262 - DNA, 1187 bp, Homo sapiens
  misc_feature (808)..(808): n is a, c, g, or t
ctttttttttttagtaagaaaaaagaaaagaaaaaatatttgtgtcatacccttttttagttatattattattattttttttatattgttactattttgttatttgtttggaattatttttttatatgtttttgtttttatttttatttcttatgtttatttgtttgagtggggttttgtttcgttttttggcttcttattttttttctttctttgtttttggtccattgcctttttgtgtttttattgctcttgtgtttgtgtccttgtatggttttgtttttttgcttcttgcgtaggtcctttcttgttttctctgtgttgtttttctgcttctgtctcttttcatgtttttttgctttttatctattgtttctggttctttttatctctcttttttcgtggttttggttatttcctctttgtgtggtttctattgttcttttctggtctcttccggggattatttgtgtgttctatctggtgttttggcttttagaaatgtggttggacttagtatgtctgttctcttatgactcaattttggggtatgaagctcatatatgttgaacccttttttaatgttcctgtaatcatcgcaattctctatattctgtcatggtttccacagtcatgccgtgttaatcgtgtctttcataaatgtgggcttaattttgttagtttaagttcttttgatggtatatgtatttaatgttaaatgttttacggtgggcttaatttgtgtgatgtccatgaattgtgtgatggttcattttatagcgtctgttacctattaggtatcatagtnactatttatgtcttacgtggaattattgttgtcctactttggtaatatctgtgagactgggttgtttgctattaataaccacacataccaatacatatatatcttatacactctgcggtactttcatcttcaagtctggtctttttttcccctagtgttaaggcaatcctgcctacttaacgaacaccttacttactgtaacactccattctgtgaagctgtatcgcagtgaagggggctaggcagggcatttgtgccatactaagtatcaccaggtgaccctaccatatagtgacctatcgcagttttgaagtcgtttctccccaatctccctactcctgaaggttgctgccttgcatatttactcttcattagtggg

SEQ ID NO: 718263 - DNA, 183 bp, Homo sapiens
atacttttccccgcactaaaaaccctgttaaataggggatatgaatcacaaatggcttaatcacaaatgggtgtcccaaatatccaatggtttggaacacagacacacccacaatgacctccctttgcgaaagttggcaaaccataatttttgctttcttgcgcttccaaacaacctttatcc

SEQ ID NO: 718264 - DNA, 377 bp, Homo sapiens
  misc_feature (153)..(153): n is a, c, g, or t
ctaagtcctgcattcctgttaaacccccttgggtcataagaagggagtaaaaaatgaagtctgactagaattttattgcagaggccaagtacatttagtagggcattgagttgtgaaaaagttttactttgatgggcattttgaatttcagcnccccccagatagacggtaaattataattaaaaatgctgtaccccacttatttaataaaattggccccccccccctattttgttgactatgaaaaagttaaaagtttatgttaatttttagggtctgaaaaaaaatttcatgtgtattccaggggtattcaaatgctatgtctttaaactttattttcaaaagcttaaggcccaaaaccaaacttttttggaata

SEQ ID NO: 718265 - DNA, 554 bp, Homo sapiens
atatagtattctttggctgtaaatccagtcttctagtgtctgcatactcgaatgagggcatggaaaggtaaggccagaaagaacaggtcagtcggcgttctgtaagtactgtaaggatactgctcaccttgtagcgaggaatgctatccttgtgcagctcctcttccccatattcaagaacctggggagagcaggatgagaggtgagtgataatctcattgattggtataaagaccctacctcgtgccctatgtaggtctcagtcttggatccggcgattattgaagtagatcctagacactaaggacctgctgaagcttatgatacggtgtttgctggattcctaaaagtggtatagcctggtcaaaaaccttcagtaggtctaataatccaaggtcaccctgcttgtacagtggcagagtagagcaatcccatctaaacttgtagccactaaactgtactgctatacatccagggtgtgtgcggaagttgtgttgcattgagttaggtcgacacacgatcatgatccaccagtctaggtggctcccaggacg

SEQ ID NO: 718266 - DNA, 166 bp, Homo sapiens
tttcttaggctcgagtgcatgctgagatcgtgttaagcaggagcgtggtaatttttaaaattttttgtagagatggaatctcgctatgtttgcccaggctggtcttgaactcctggcctcagatgatccgtcctaccttggtctcccacgagtgccagcaattaca

SEQ ID NO: 718267 - DNA, 139 bp, Homo sapiens
acccgtgtagtagtacaatgatggtaaaagtgtagcttactggttgtctccgattcaggttagaatgaggaggtcttgcggctaggagtaaataaagtgatatggtatagttggggctgaaatattatagctttgttgt

SEQ ID NO: 718268 - DNA, 911 bp, Homo sapiens
taagcgccatctgctcggggagccgcctctggtctcctcccgagtgtgtgccgatgccgccctgaattcatggccgtgggacagttcacggccgcctgtggctccccatacatagtctcgccggttaaagaaaccagggctatagaagaccgtgtcttcacagtcgttatcgagaagggaatgcaacactcgtgggtctagggtccaaatctattctcgtgcgtgtgaaggaggacacctcatacagggagatctacatgtgattaccatgttctgtgggccttgcaggggagaaatattgggagttcattacaacatgtggcagactttgacaagacaagaacagtcgtgaattggatcaagattgggcatgagtgtgtgaaaaagtagaagaagaggaacagtggtgtacatgagaaaaacaaaaatccaacagtcgaacgtcaggctacaccatgttcaagactagatgacaaacactccatcgagaattcctattgccagcacctttacgaaaaaaagaccttgaacatggccgtgggtacgacacacacccaacgaggggattacattggaaaacgcacgtcgcctaaggagataaatacaaaaagacagaagttgacagggcactctaaagaaagacagctggtaatgttaataatggtggtggcaacactgatatagtgaaagggcaaaaacaagtttcttattggaaagggaaaaggtaatacaaggagagttcttgtgaagaagagggaaatgttatagctttggttacattctaataaagaacctctttattggtgggaatagagcggaattggagaaaataattcagaatgcaaattttaattgaaaccataaagagggaaaaaatgacagtgtagaagtgggaaacacacagggatgaa

SEQ ID NO: 718269 - DNA, 207 bp, Homo sapiens
agctgttctagaggagtccctgaacacagtgcatgtatgaacaacagtgcaggttaacaacagtgcaggtataacaacagtgcaggtataacaacagtgcaggtataacaacagtgcaggtataacaacagtgcaggtatgaacaacagtgcaagtatgaacaacagtgcaggtatgaaccacagtgcaagtatgaacaacagtgca

SEQ ID NO: 718270 - DNA, 586 bp, Homo sapiens
gcacttgtgatagagtgtggcacatcaaatatgtttggctggaataactgaacatctcccagaaggaatatctgaagtgccatagggttacagatagcctgttcctcagcttaaagtcgtaaaacttaggtatgaatttcttatttatacataaatttttaggtccatgaggagtttgatgtgaaatatgtgaagtagctttcttccctttctaatcaggaagccagttgtctccattccttctaaactcttccccactggatttgaaatgttagcttttacataaactatattcccacaagtgtatgtgtcttcgattaattttttaggtgggagaacaaattcctgcttatcaatgactgcagcttgggtggtcaatactctttgaaaagttgtacggggtgggggagacattttgggtgggaaagtgctggtgttccctgttgtctagcatgtggaggggaggtgaaagtgtgtacatactgcctgttttgagggaggaagagtagagtatgtgccacatagaggagcaggcgaatgcctagaagctcagggaggagcacagctacgtccagctgagagcact

SEQ ID NO: 718271 - DNA, 326 bp, Homo sapiens
ttctgtatggctttgccaggtggcccttttttgggccccggctttgatccttttctttcccttctctgcagggctggtccaccggccgaattgcccacattccggtgtactttgtcaatgcccagtttccacgtttttgccccgtgcttgggcgggccccggaaccccctggtgggggtgggggcttttttcatggcctgcccctctttaatgggacatccccaacctttgccccttggggcccttttccagggcccccacctggtctgccccactccccacctttccccctttaaggataaataagttttccttttgttttccca

SEQ ID NO: 718272 - DNA, 120 bp, Homo sapiens
  misc_feature (61)..(61): n is a, c, g, or t
  misc_feature (65)..(65): n is a, c, g, or t
  misc_feature (84)..(84): n is a, c, g, or t
cacgagggcgcgtggttcccagcgacctgtatcccctcgcgctcgggttcctgcgcgatancctngtctaaaatgtggacatcntgttcgtcaaagggagaggagctacacagtaggatg

SEQ ID NO: 718273 - DNA, 386 bp, Homo sapiens
gcggccgctactactactactactactaaattcgcggccgctcgacgaaaataagaatttttaaaatcagtggtttaagctaccagtttaagaagctaggaaagggccaggtgtggtgtctcccacctgtggtctcagcactttgggaggtcaaggcgggcggattacctgaggtcgggagttcgagaccagcctggccggcatggtgaaacccatctctacaaaaatgcaagaattggccgggtatgatggcgggtgcctgtagtcccagctactcgggaggctgaggcgggagaaacgcttgaacccgggatgcggaggttgcagtgagccgagatcgcaccattgaactccagcgtgggcgacagaacaagactccgtctcac

SEQ ID NO: 718274 - DNA, 235 bp, Homo sapiens
ggagctcggtaccatgcaagcttggtcttgattggcagtacgaatcactagacgtgaaagcggggcctcgcgagccttctgaccttatgggtaatacgcaggaggtgtcacgaaaagtcaccacacggtgatagaccggctgtgtgcggccaagcgtgcagtagcgacgtctgcttatagatccttcggtgtcgggtcttcctatcattgtgaagcagaattcaccaagcttgca

SEQ ID NO: 718275 - DNA, 540 bp, Homo sapiens
  misc_feature (79)..(79): n is a, c, g, or t
agataatgcaatgtaagtgtttgctactaaaaattattattcaagcacacaggataatgaaaattgcttgtacttgaanagtcgagtcaggaagaaaactgtgtaggcagttcttcaagggagaaagaaagggacaagataaaatgataactaaaaattggacataagagagacagtgtccaggaaagtacatttgcattaaaaagtgcaacggacagaaagattagcaacacattcatgaagtggacataaaacaaggcaagtggcaggcatcctaccaaggaacaaacagagaactaaagcagttcagcacagtatgctggaaagaagaaataccgaaagggactgagcagtgaatggcgaacagaaggaggtgcctgacagcaagatcttagtgaatacacaggagtgacacacagtgtatgggtggttaacaatgtgctcttccaaggcagaaaaagaaaaacaacagaataaagggaaaaggcatttaaaatttaccttaggatgggaaaagtcatgcgaggaaaaaaacctaaa

SEQ ID NO: 718276 - DNA, 211 bp, Homo sapiens
cgaagagatgcctgcgacttggaccgcgcgcctcccggacgggcccagccaccctgcgcccgcagtcccgctctcacctgccacggagtcggcgttgtccatcctgccgtcccgccgcgaactcacgcgccggctggcgcacgcggcggacagccggagggatgcgcggcaggcaggggcggttcagcctctgcccctccgaggccgcacc

SEQ ID NO: 718277 - DNA, 342 bp, Homo sapiens
gaccacactgaaggtatttgttaatgagggatccagaagcgttaaaagtagcaccaccaaaagccgggtgtggtggctcacgcctgtaatcccggcattttgggaggccgaggtgggcagatcacgaggtcaggagatcgagaccatcctggctaacacggtgaagccccgtctctactagaaatacaaaaaattggccgggtgcggtggtgggcaccagtggtcccagctactgggaggctgaggcgggagaatggcgtgacgcgggaggcgaacgttgcagtgagctgatatcatgccactgcactccagcctgggcaacagtgtgagactccatctcag

SEQ ID NO: 718278 - DNA, 104 bp, Homo sapiens
gctgcggcgtgtactcaatgtagggcgagacagcgacgggacaggggcggctgggatcaccacgctggcctgcacgatggctggtgggtagatgtagtgcgggg

SEQ ID NO: 718279 - DNA, 308 bp, Homo sapiens
gggggggggggggcccccctttttttaaacccccccccccccccccccggggagtttttttttaaggggggccgggggttttctccccccccttgggggggggaaaaccccccccaaggcccccctctttttaaagggcgcccggtgcgggggggggtttttttttaaaatctttccgttttaaaggggggggtggggtgggacaaaccaataaagctccaaactccccaccaagacaaaaaataggctttataaaaaaaaaagatcccgttaaaaagccagaaaaaaaaaagatatcaaaacaaaaa

SEQ ID NO: 718280 - DNA, 1533 bp, Homo sapiens
tccgattaacaaaaacaggtcccctctaaaagggatatatagaagcaccgccaggcccttggagtttaaagctgggggctcgtaagtggtgcctgggcgagcagtttgtggtgtggtattaacactggtgggagtgttaagggctaaaggctataaggggggttatctaatatccccgagttggggtgtcttaagctatagggtggtgtgtccaatattatgtgttaaaacgcccatctttctcggtgatgtctatattttgggtgcgtcaactgggagagtgttttatatcacaaaccctccagggtggatgtttataccctcttatatggggggagaaggggggtggactcttaaaaacacacctctttataccgccggggggtccctatttgagaacatggggggtgtaaacactcgtgtgtgtgaagaccgcgcgggtggggcgtgagcgcccacggaaaatatgtggcacccaaaaccctcgggggggtggttctaatgtatataaagccgtataaggttaaaacacttttcgcgcgtgttaatgtggcgtaaaagaggggtgtaactcacacgcgggcgtgggttcccccgcggggggggggtgtgggcacaagaggaataaaggcgcggttgtgagagagccgtgacattgtgggcgtgagcgagtgccctgtgaaagtgcgcgtgggggtcccccttgtgagaaaccgggggggagaacataaaaagagggggggggacaccctcaccggtgggcagaccgggggggaaaatgtggcgtggcgccaattgggcgtgataacaactcttaaaccaactaaagggcgaccactccaaaaggtgcccggagggggcgcggaggaaacaacacaaggagggcggaaaccgtgaacacggggggggcccaagtggggggtcaaaaaacgcgcggggtgtcccctgggaacccccaaggctttttttcttgtgttcaccccacaagggctgcggaaacacttcgggcggcggggtcctcccccttaataaggggaggccggaataaaaaattggcgaaataaagcccgggttaaaccctgctagatatctgtcgctgatgtcaagcaaaaaaacggaagtaaaccacccgaccgacaccacaacagcagaacccataaaacaacaagagcaacacacaacacaaagacgacaacaaacaacacaaaaccagacagacaaacgcaaagacaaaagaagacacaaccaaacaaaaaaaacacacacggacgagacacacaccaccatttcgagaaaacaaaacacgcggtgacgagacaacaccagatctaacagagggtgcacaagaaaacaatcctagtaagccacaacacaaagcgacaaaagagacaacaacaacaaaccaagggccagacgacgccaaaaacaggagagaaagaccaacaagcaaagcaaggcaacaaaacacggagcaaggaacaaagcacgaccaaaaaagaagaacacgcaaaacgaacaaaaagaaaagcagga

SEQ ID NO: 718281 - DNA, 480 bp, Homo sapiens
  misc_feature (6)..(6): n is a, c, g, or t
  misc_feature (13)..(13): n is a, c, g, or t
  misc_feature (29)..(29): n is a, c, g, or t
caatcngataggnccgcgcgccattgtgntgataccccggaattcgttcattatggccggcgatcaacacctgactgaagctacgccagccagaacctcttctctgagaactggaaatttgcaaagggaggcgttgcttgagcccaaggtaaccctctcgccactttaacacacgaacccaggagccttccataggcctacgtgccctaccggcgctcagcgccccagcctacgccgactgccaacgcgcacgaacgacgcacagcaccaccctgcagccccgcgacccagccggtcacagacgcccactgcctgcacccccagcaccccgccacgccaacgcctcccgcaccccccggagaaccacgccccccccctcccgccctctcaacaccctcgactctccactctcccctctcccctcacaccccgctatccgcccgcccccgcccacccgcccgacccccgcgcccccccccg

SEQ ID NO: 718282 - DNA, 829 bp, Homo sapiens
aaaatttcccggcaaattgggccgcttgaaaaagcacggaaccaccggggtcgaaaaccgggcatgagaaacagttgtgcgccaagaaaagcgtggccgaaccagaaaccgcaactgtccgcgaaatcagccccccaaaacgggcaaatatgtggtggttccacagaccaacaagacaaccaggggcgccgagtgtgtggccccacccccccgtgccggcccactctggggagacgcccgtctctcgcgagaaccataaaagtgctggatgctaagagttgtgttgcggacaccccgggcaaatctgtgaataagaaaacgcagcacgccggagggggaatagaaaccacccgactgcaggaaggcaacacgtgctcaacaaagcccggcaccccggggacgaaaagcagccgtttggcgcaatcgagagggggcatcgatcctgaaagattaaggggcaggcaagggccggggaccttctcgcaacaaagatggggaggatcagagagcacgatccccgggggtggctcggagcccacgtgaccccgcggaatgaaggttcgagatagccatagtcagtgagacaatgcagccaccagcacagcgcaagcgcgaaactaggcgggaaagagtacggagagtgagtccccaagggggcacacaaagatacaacagattttacagagcggagcaccccgatataagtgtgcttctcgcaaaggcaagtacttggcaggagaccacaccccgtaacacacaaaggtgcgcggcaaaaggaaagaaaaccatctggggtatgaaaaaaagcaaagaaggcgggcaacataac

SEQ ID NO: 718283 - DNA, 251 bp, Homo sapiens
gagctcggcaccccgtaagtaaattgttcccggttgttcaatcatttgataaccagagtcattctttgataaatgatcactatgagtcagactcaatagaatttgatcaatccttttttctgccgttaaggtggagaactgaaccaagaattctctttctttatcatcaatcgaatcactgttcgcgacccaggattctattttatcatcaatccaatcaccgctcacgttttttctttttcttatcaatg

SEQ ID NO: 718284 - DNA, 131 bp, Homo sapiens
  misc_feature (17)..(17): n is a, c, g, or t
  misc_feature (19)..(19): n is a, c, g, or t
  misc_feature (33)..(33): n is a, c, g, or t
  misc_feature (64)..(64): n is a, c, g, or t
  misc_feature (81)..(81): n is a, c, g, or t
  misc_feature (89)..(89): n is a, c, g, or t
  misc_feature (112)..(112): n is a, c, g, or t
  misc_feature (117)..(117): n is a, c, g, or t
  misc_feature (123)..(123): n is a, c, g, or t
ccagttttgggtttcantntactgacaaacctnagctggcatcatggaccatgaagaagcaagncgaaaatcatcacaggngggaaaancctgggattctttttctagggangtaanacatanatttacaa

SEQ ID NO: 718285 - DNA, 261 bp, Homo sapiens
tccgtaatatgtaaccatgatttataattatttaagttacttatgtacaataagacacacgaagtgctgtagggttttctggcatgagcccttggatgctgtgttttagcattcatgatcattctctgggccactttattcttacacagaccttttttttttttttttttttctagatgtttcaagtcctggggtgcctgtggacaacgcgcgggtcggtgacatatgtgacatctgagggggggtcgccgagctcgaatt

SEQ ID NO: 718286 - DNA, 204 bp, Homo sapiens
ccaaaaaaagggcccccccctttttggggggccccccccccggggggggggggggtttttttcccccccccccttttttggggaaaaaaaaaaaaacttttggggtttttgggggggggggggggtttaaaccccccgggttttttggggggggggtttttttggggggtttttaaaaaaaaatttttttccccccttttttta

SEQ ID NO: 718287 - DNA, 801 bp, Homo sapiens
ggtgcgtgccgcgttgctgttggctgcgaaccacatgtgtcctcggctgtttgggccctttttgtgccgccccctgttttattaacgtgtgcgccagtcccctgggttgtccccgcaagcggtgttctgtgccgcggatcgaccatctgggcccgattgggccatcatgacgcgccgggtgtgcccagcttaagtactggttaaaggctgcttttttcccgcattctctccgtgcttcgtgcgtggccttactcggaagcctgtgtggcatctgtcttgtctgcgtgtgcccccacacccttccgtgccccacgtgcacggttttgccaatcccttacccttggccgtctcccccacgtgaatgtcccataaccccgtcacaatcaacccagtatagcgtcccccagcacatcacacgctttcctcctatcttgcgcaacttacaccctaaatagccgtacactcaccatttgtccaagttcctcccgctccccctcaatcctctttttgcacctgtttagccacacatcgatattgggaacatcattcctcctctgctccctcacagatatgccccatttactctcctaagctttcatcgtgggaccgctttctgctatcccgtttacggtgacaacccaccggaaaagaatattcattcaacatagttcatagaacccctagattaaaagaaataaccaccattacaacaggaacaccactacaaaaaggataatacacaacaacaaaaaacaaacagacctaacaaaacaaaataagaaaatatagtatacataaaca

SEQ ID NO: 718288 - DNA, 505 bp, Homo sapiens
  misc_feature (347)..(347): n is a, c, g, or t
  misc_feature (389)..(389): n is a, c, g, or t
  misc_feature (453)..(453): n is a, c, g, or t
gcgtgctttttatgacacctacaaggtttgaagactttgatttcatattaaaaatctgggtttcaggctgggtgtggtgttgcacttctgtaatcccagcactttgggaggctaaggtgggtggatcacctgaggtcaggagttcgagaccagcctggccaacatggagaaaccccatctctactaaaaatacaaaattagctgggagtggtggcacatgtctgtaatcccagccactcgggaggctgaggcaggagaatcgctcgaacctgggaagcagcggttgcggtgagctgatattgccccactgcactccagcctggacaacaagggagaaactgtctcanaaaaataaataaataaataaaataatgtagatcttgaaaggnggtcggtttatgctggtgtatgtactttccaaagttagtaaacttacacttaaggttatatatnttggccaggcgcgggtggtcacgcctgtaatcccagcactgggaggcccgag

SEQ ID NO: 718289 - DNA, 359 bp, Homo sapiens
  misc_feature (259)..(259): n is a, c, g, or t
gtgtagttaaaaattaaggggctggtcaatacaaaaacttgtacacaaatatttatagcagaattattcataatggccaaaagctgaatacaacccaaatgtctatgaactaatgaatagataaaccaaatctggtatatccatacaatggactatattattcagccataaaaagaaataaagggccaggcacagtggctcacacctgtaatcccagcactttgggaggctgaggcaggaggattgtttgaggccaganatttgagaccagcctggggcaacatagtcaaaaccctgtctctacaataaatactttccgtacattagtgggttgcctaaggcttggattggggggtgat

SEQ ID NO: 718290 - DNA, 364 bp, Homo sapiens
atattgttctaaaattaacggctgggttctttctccccttagcagagtcttctgaagagagagtctgatgataaaatagcagatcagagattctgaagtgggtgatttgtatccctgatatataacatcgagcctttatatcctacatactactgtaagaatgagaccttcatgaatgctttccttgttggtattcggcctaggataattggcgatcgaacatcacgacgagagtgaaagtgaaaaagatgaggacgttgaagaggacagatgaggactgccgaaggaaaagatgacagaaaatggcgacggacagagatacagcaagtgacaaagacattaaatggaaattcagcctttgcaa

SEQ ID NO: 718291 - DNA, 449 bp, Homo sapiens
  misc_feature (274)..(274): n is a, c, g, or t
  misc_feature (349)..(349): n is a, c, g, or t
  misc_feature (357)..(357): n is a, c, g, or t
  misc_feature (369)..(369): n is a, c, g, or t
  misc_feature (428)..(428): n is a, c, g, or t
  misc_feature (443)..(443): n is a, c, g, or t
gaagaaagatacacaatgcaaacagtaattgtaagaaatctggaggggctatatttaatatcagacaaaattgacgttaaaacaccaaaaagttactagagataaagagcaaaattttataatgataaaaggatcaatccataaggaggatatagaaattataaacacatatgcaccttaaccacagaccactaaaatacatgaagcaaaaaatggagaaacttgacagagaaatatacaattcaacattaatagttgggagacttccctactntctttaaatatggggtaggacattagggcggtgtactaatggtggtataggagacttggaaccaaagttttaccntttggacntattggaccttnttattcactccctttttattaccgccggttacacttttttttccaggctttttgggggncttttccccgggttncaccct

SEQ ID NO: 718292 - DNA, 148 bp, Homo sapiens
agtattttattgatggaggttcatcctgcagccacaggagaaaagagcctaagagtcaaagcccgagagccagctaggtcagggatggagcccagcaaaggcggggcagatgtgtgcatagggcactatggaggtcttggtaaagaca

SEQ ID NO: 718293 - DNA, 1046 bp, Homo sapiens
tggtgccttctattaatacatcattccagctcttgctggtacattttgtcacagtatagtgtatgcacattgctgtgctgcaaagcccaaacagctggcaaaatgttgacaacaatcatcgaaatgtatacacacaattgcagtatctttaacaatcagtacaacatggcactagcactattactttacctatggttcttcagcttaaccaactttgtgttctcctgctgggcagggagcggagtccttgtgctgctcacgcgcgcgcgcagcagggcaaggcaggcaagtccagtaacatcttgcagtaagccctcaaagattgcactttatctctctagcctgcaatgtgcgacgtcgcaacacatatcactttccagggctctggcaccacagttcagctcacaccttgcacgtacacatctcccagtgcaccattctcacaaaagcagtcagacttctactaactgggccaacgctaagcctgacagtgcaggaatacttggccaatcatacggaccaacagagaacaagctcagctcttaaacagcttgtcctgggcatctacctaatactggcacggcgggcagtgacacacctgtccactatcatctttgggcaccaaatccctttgcaacctggacctggtcaggcgagcccccgcaaacgaggtgctccatggacacttccaacggttcattgagcaccgaacaaattcttttaaacttactatacctctgacactctgtaacaagcaacatcctgctgacggccaaagcgactagagacgccagctggagctatttggactaggatctatcaaagccagttcccaggtaaaaccacccacaggtatgaggcacacggaacacccaacagatcgaaagcctgagaacgcaacagggaaaaacagaaaccgagcgcaacaccgcagcagcgggcgccaccaaggtcaaccaccacagagtgcgcgaactggaagaactcacacccaaacaggaaaccacaccaaactgtcacggcgcacaagccagggccgaccacaa

SEQ ID NO: 718294 - DNA, 369 bp, Homo sapiens
ttctcttaaaaaaaaaggggggggaaggttaacccccagcccccctttccaaaatttttccccgggttttcgcagaaacccccccccaaaaacccctttttaaaaaggggggttttttttttttaaaagtgagccccccccaacccggggccaatttttttttttttttttttttcccccgcccccccttaaagccccccaaaattttttattggggggcccggttttttttttttaagggggggaaactttaatccccccccccgtttttttggtttttttttttttcccccccatttaatttgggaaattttccccctttttatatttttcccccatttttcctttcaattaaagggccctggggga

SEQ ID NO: 718295 - DNA, 435 bp, Homo sapiens
tgacggtgaacaagactttggcacagtattaatcgatttgggtggtggtcagacaacaacgtctatcattcatgatcggaaacttaagtttaatacagttgatttggaaggtggcgacaacgtcaccaaggatatttcgactgttttgggcacatcatatgcaaatgctgaacgtattaagcgcgattatgggtttactgacccaactcaaacgcgtgatgaccaaacattcttgatcgatgtggttggtgaaagtcaaccacaaacattctctgaaaagtatttgtcagaaattattgcagcccgtttagaccaattttcacacgtgcctttgaaccattacaggccgttaacgactgaatatgccaggtggttttgcttaaccggtgtaatgcgactccctgaatggttgactttcgaaaccattcttggtag

SEQ ID NO: 718296 - DNA, 457 bp, Homo sapiens
tctacgaggatctcgacatttccacgagtcactccctagagttagcaaagtatgcaattactagaattattagtcccaatttacataagatcacactgctggcactatactccagttccagactcttttttccactattgaatgccacagaaacataaaaaaaaaaaaaatggaaggatctttaaaaaccatgtagctggattttttttaagatgatgaaaactgaggcccatgaagagagtcacattagctcagggctcctactaaagccaaataatttcgtgcaaaatcatctccctctgattatcattatctacacacacaaatacataatttttcttttggcctttctgaaaatcgggaggtctgaaaagactttaagatttctctcaagttaaaaatacacgttggtacgtgtaaccagagggcaagttttctatggtccacatgttttctt

SEQ ID NO: 718297 - DNA, 761 bp, Homo sapiens
gtggaggtggaggccgtctgtgcgtggcgcgggcgaggtggaggcccaggactctgtaccctgcccctgtccttcagcaaggcccccggcagcgccggccactacgaactgccgtgggttgaaaaatataggccagtaaagctgaatgaaattgtcgggaatgaagacaccgtgaggcaggctagaggtctttgcaagggaaggaaatgtgcccaacatcatcattgcgggccctccaggaaccggcaatgaccacaatgcattctgtgcttgtgtccctgggcccctgctgggcccacgtcactcataagatgccatgttgtgatactcgaatgtcttcaataatgacaggggcattgacagtttgtgacggaataagaattaaaatgtttggctcaaacaaaaagtcactcttcccagagatggccgacatagatcatcattctggtatgaagcatgacagcgatgtaccgacggagcccagcaagccttgaggagtaaccatggtaaatctatctctaataaccactcgcttcgcccttgcttgtaatgcttcggataagatcatcgagcccattcagtcccgcttgtgcagtcctcccggtacacaaagctgaccgagcccagatactcaccaggctgatgaatgttatcgagaaggagagcggtaccctacactgatgacggctagaagccatcatctttcacgggccgggagacatgaggcaggcgctgaaacaacctgagtcaccttctcagga

SEQ ID NO: 718298 - DNA, 584 bp, Homo sapiens
caaaattggaataatttttatcaaatacaaatgaaatgctacatgaattctgatacagtgtttttctccccaattcactgaactaaagcgaggcctttattggagcactactagtagcatagcaaacatgcatgcattattgtactggtgaactagctactgcttgctttcttcctgctgagaagaacaacccaacaactcgcgactcgtgactcgtgacaggcagatacacacaaaacacgtggctctagtcctgtaatccactgagcactgatggacaaggatcacagcatgagcgcccacttctgggtgggagtgggactcccagtggcgggcttcgacacgacgacctggccgctacccgcagacgatggcctgacgacgtccaagaccatcccggtgccggtgttgaagatggtgccgtcgttgcggaacacccagcgctcgcaagccgatccagcccagtcgcagtatttcaccctcacacgcccgctggcatcagcggccaggcactgccactgaaggagcagccacgcgggcgggcggatggagccgtcggggtagaccgaccactgcacgccgtc

SEQ ID NO: 718299 - DNA, 1350 bp, Homo sapiens
  misc_feature (514)..(514): n is a, c, g, or t
  misc_feature (536)..(536): n is a, c, g, or t
  misc_feature (538)..(538): n is a, c, g, or t
  misc_feature (550)..(553): n is a, c, g, or t
taccggttttggtatataaaattcatgtttccaatctctctctccctgatcggtgacagtcactagcttatcttgaacagatatttaatttggctaacactcagctctgccctccccgatcccctggctccccagcacacattcctttgaaataaggtttcaatatacatctacatactatatatatattggcaacttgtatcgtgtgtatattttttcttttattttggacaggtatataggggatcctgataaaatagacttggcatattcggttttaatatagtgtaaaaacaaaaggagaaaaatatagagaattctacatactaaatctctctcctttttaattttaatatggttatcatttatttatggtgctagtgtttatccgtaataattgtggggaaaagatatttaacatcacgtctttgtctctagtgcagtttttcgagatattccgtagtacatatttatttttaaacaacgacaaagaaatacagatatatcttaaaanaaaaaaagctttggtataacanantttaattctgannnnaaacaaaaaaacaaaaaaaaaaaaaacaaaaaaaaaaaaaaaaaacaacaaaaaaacacaaaacacacacacaacacacaagcaagggggcgcggcgccgcgcgacgagagagatagttttatcttatataagggaggagcgcacagcaagcagttcatggtacacaaacaagaagaggagtcttgtgtatatgaggagggggcggccttctttgttgggcggagtccctattatattctaggggagaagaagagggtggtcggctatattcaaacacgagaggggcgaacgaggggaggagaaaagcgggcgattaaagagggaagacaaactacgggcagaaggagcggacaacatcatcaaacgccgcggggaagggagaagacacagcgagagggaagacaacagacaacaggaaccagcaacggacagatacagaaacaaaacgaagagagcgaacgaacacaaaaaagaaaatgaagagagcaagaacgagcaacgagacagggaggtgaacacaacaacagacacaaaaagatagcagcagacgcggagaccaggcgagaactcagagtgctgagagcaagcaacgcgaacagacctacaattctaaccacaggaagagaaccaactataattaaaaacaacacccgcggaagcctactacaccaaacagcacacgcaacccaccaccaaacaacagtaagcaccccacacaaccaccaacgccgcaacaccacaacccacgccaacaccaacccccaccagcacacaccacacccgaccgccgaccagg

SEQ ID NO: 718300 - DNA, 485 bp, Homo sapiens
tgatctagaggaccccgtctgagaagctgggagctgaggtgggaggattgttgagcccaggaggttagggctgcagtgagtagtgatcatgcgactgcactccagcctggggtgaccctgtctcaaaaaaaaaaaaagcaaaagagccagcaggaaagacctggtgtccaaagcccctttgggaaaaagggcagaaaagagacagggggtttatgagacacatgattaaccgtagaagctgtgggtctcctggggttggtggagcccacgggttattggtgcttgggtagaaggcgtgtccctgtagctcttggtgcctggtagattcccggagggtttctctcatgtcccagggcggatgagtggggggtagcctcttggtctggccttttctctttcctctttattttcaaacagtccctttggttacattctcctccagggcacagttctttcaattgcctggggcgtggaccatccctagg

SEQ ID NO: 718301 - DNA, 140 bp, Homo sapiens
gaaaaagtccaatcccaaagttggtttttgagtgcgtgtatgttacgtgtttttgttttggttttttttttattccttcctctatttttacctctgacatttactcctcctctgagcatcttcgacccgcagcttacctg

SEQ ID NO: 718302 - DNA, 379 bp, Homo sapiens
  misc_feature (63)..(63): n is a, c, g, or t
  misc_feature (93)..(93): n is a, c, g, or t
agttggtgactgttgtccctaatttgtgccctcattatctccattgtcagcaccccccccccnccccaaattcacaattatatcccaccaggnaccaatgtgacttccagaatggtttttgtccagcttggctctacttaatgtgttttacacagtctggttggcactaggtcatgttgctttctttaggtggtattttcactatcatccctttgttttatgaaaccccgtctctactaaaaatacaggtgggcgcctataatcccagctactcaggaggctgaggcagagaattgcttgaacccaggaggcggaggttgcagtgagccaagatcgcgccactgcactccagcctaggtgacagcgagactccgtctca

SEQ ID NO: 718303 - DNA, 515 bp, Homo sapiens
acaaggtctacttaatcttacttttttaaagcggtagtcgcagtccacttgcgattctgtagaaattttaatttttgggtgcactttcactttaaaagttattagtttaaaaggtaattacatttttatgacctttagggttggctaatgacaaaagcatgcaatcattatgacctaataagtacatttcttctgtattttctgcttgcttgattttcctttatggctatgcgctacatttgagctatatttcattccataaagagactgcttcatttgatagtcaaataactctgctgtagcctgtaaaaggaaccttaatggaattgttgatttctatggtggtcatagcaaagtaattttcagatttagttgctgttgtctgcgaagatgtatttaagcattattattattattattcattttgtgtcgcaaatgctgcgtaagaatattgatctaagaaaccctgcaccaaaaattcactgtagagattaattagccttttgctgctttta

SEQ ID NO: 718304 - DNA, 173 bp, Homo sapiens
tcccacacaggccaggcagagcgcacagacatcgcgacactgtcaaccagccatcacgactgctgacccggcactacctctgcgtgacaccagccctgcaggcactgcccaggcccggatccaagtggttgtcctaacagcctaagatgccagcccaccgccggacaagattg

SEQ ID NO: 718305 - DNA, 416 bp, Homo sapiens
caggtgctggcacatagatggtggcatggtagatagcgaaaggacaagggccctgggactggccgtgcctgggatctgctgcaggcagctgtgggatctgggacaagtggcttcatgtctctgtagccgcccttcttctggaaagtggaggtaaaactttattcaaaagactgtcacaggaactgaacatgtgaacctgtataaagtgccccgcacagtgcccagcatacaatgttcattaatgaacgtaagagtctctgttctttagagccgggtgtgatggcccacacctgtagtccaggctgctcagatggctggggcaggaggatcccttgaggcctggagttggagaccagcttgggcaacatagagagaccctatctctaaaaaaataaaataaaatattctctgcaaaa

SEQ ID NO: 718306 - DNA, 220 bp, Homo sapiens
ccacgatacaaccgaggaggaggatggacactggcaggcagaaggcaggggggaaaaaggaacgatagagagggacaaaagaaagggcggttagagagaaagaacggaaggggaagtttgtgtcggtgacgtaaaacagactatcaattctactttcagtctctgaatgttgggacatcataaatctatctagacttagtgatcttataaccattggccc

SEQ ID NO: 718307 - DNA, 852 bp, Homo sapiens
tctatcgttccctcccttaggagtatttttttcccccccacacatttttgggggagagaccctctggagtaaaaggggagcgccaccacaatatttttttttgtccccccactattttattctcccccaggggtgtcccacaaagggcacagaaagatattcctctctgagagaagagattataagggcgggttataattgtgtgtcccccccgcggcgctctccctctgtgggtgtcaacactcggccctctcttttggctagacacaccggggctttctctctgagagccccacacccgccccctctggggggcgcacaaacctctgcgcacactggcgcaccacagtatagggtctacacccacacaccacagtttgtgtgctcgagagaatatggcacccctcggtggagagaaccctctgcttgtgtgttggccacagcgcttttttggtgttcgaagtgtctcgtgaacaagggatatatgtgttcctcttagtctcttctcgagcgcaccctgttgtgagcccctctgttccacacgaagaaagggggcacagaagaaaaattaaatgtggcctcttgttccaaaaggtgcaatgccacgtttaaagtgaaagtggcacggaacacgggagacttgaaccacaagccctttggttctgtaagaccgcgtcctgaaatttttcacactaagaagcttcctcactcacggttaacccacagaaagtgggtgcccacatccacccactccacaggtgtgcttggaagttagttttccaaccccttcgaggtgtaccctgtgaaaaatttgggggcactgctttataaataaaatggaaaatattttta

SEQ ID NO: 718308 - DNA, 877 bp, Homo sapiens
ggccacatctgtcagagcctggagtctgcgaaggccgggacccggttccccggccacagtgggggtgtgcaagacccgagagaactgggaagtgccgtccagaagcgataactgactgactgtctaatgtctatctgaccgcagtcgctgcaaaccgtctacgacttagttgaccgtaactgccagagcgctgcccgtgaattcctgtccttactccctctttaagattgcgtaccctacatgcagagatgcgtgaagacggggtagccacgaggttgcaagaattcgtggaagaatcagcatcatgtcggcagctgagtattggaagccaggagcctgccatgaggtgtgagaacagagtgctgttgttacgagctggcagctagcatctcagctccaagagaaggttatattcccatgcaggtatgtctagtcccaaggaccagtagctgccatcagtttggattgctgaaagactaagctggctatcaacactgggtgtagaaacatgcttgccttatgtatcatgaggacatgctcagcagatcccaagagatatatttgggaacttctttctatgacaaggcacattgtggtatcattcattcacatttcttgagtttgattgggtagaagcgctgtgtgtccggagacagtctggctaggtttggcccgtggctgcggttgtgcgcccctcgctccacggtactgggatcgtgatgcacggccggctttgaggtcgctccccctgttattggggctgccggtctcagggctcgtcttaaatgtgtcgggggcggctcttatgtggccaggggtccaggccctggctcgaggcctccccatcaagggcgcattttcttgcttgctgcccggt

SEQ ID NO: 718309 - DNA, 440 bp, Homo sapiens
aggcagtgcaccttgattctgcatgttgatctagagtgatcccattcccatgcatcaactttacaaaaaataattgaatggagtgggagtgaagttggagtgaatgagaaaagagggaataagaagatggtcccctgaccctccagtggtgccaatcccagcctgcctgtgtgcatctactctgaaggtggtcacaaatcagaccaaacttgtgcatctcaccaactatgtgtgtggtgcaagctgttgcagtggaagcttgggagacaccatccaggccaggaaggtgctcctgtgtattccagtttaagcagacagaattcggggtggggtgagagaatcccgatttgtgataaaatgtgatcctaagtccttagttgcagcagtgagttggcttgtgaagtgtagcagggcccacatgcaaactccatagccttcct

SEQ ID NO: 718310 - DNA, 202 bp, Homo sapiens
tatttgtagtacagacagggtttcaccgcgttggccaggatagtctcgatctcttgaccttgtgatccacccgcctcggcctctaaaagtgctgggattacaggtgtgagccactatgcccagcctttttttttttttttttttaaatatcaatgcttcctgttttctcaggaattaaatatggttactttagggtcttgct

SEQ ID NO: 718311 - DNA, 109 bp, Homo sapiens
gctggaccacacgataaactgacctatacaagatgtaaagaattttaaatggagtgtctcgtaaacctgtgcacacattgtctcatcagcgatatgctgggtaccgagc

SEQ ID NO: 718312 - DNA, 101 bp, Homo sapiens
  misc_feature (26)..(26): n is a, c, g, or t
  misc_feature (50)..(50): n is a, c, g, or t
taaaatttgttgaaataatttgattntcttatttgaatcgtgtgaatatngaagaaaatatcatctttgacttaacatattttaactgagtatgtaatagg

SEQ ID NO: 718313 - DNA, 483 bp, Homo sapiens
gaagatcctaacagatctcttggggtcactagctgatggtctgggaatacttcttggggaaggggttctttattttaaatcatcttaaatttggcacaaatacagagcattacccatagccatggagcaaatccctcgctgtggccagtaactcatggctgcttagacgtagataggaccaggcccggggcagaaaccaacccaggcaggagcgctgttgaagagctcacacgataaacacagttgactcttttttttggagacagagtctcactctgtcctccaggggcgcgatctgggctcactgcaacctccgcctccgggttcatgcaattcccccacctcagcctccagaatcgctgagattacaggctggcaccaccacactcggcctttttggtgtttgggtattttaagcagagatggggtttcaccgtttgggccaagctggtctcaagctcctgacctcaaatgatctacccg

SEQ ID NO: 718314 - DNA, 332 bp, Homo sapiens
gccgaggtgtggggtgtgcgttgcccgccgcccttggtgtggtgggcgaggggcagaggagctgtgctacatgcccgtactgctggtggtattaggccgagagaggtccggtaaagagggtctctgcatccggggcagttctgggagtgaggcccggctgctgtctgtatcatcctgaggacgcccgctgacggtatgatactggaggccttggcggaagcagctcgagaactgggaatttgcagggttgggctaaccagctaaggtttctctgaaccaatccctttgggtccccacaggtcggaagttcaagcattccttctttgaaaaga

SEQ ID NO: 718315 - DNA, 891 bp, Homo sapiens
  misc_feature (891)..(891): n is a, c, g, or t
gagcggaggaggcggtggcagggggaggtggaggctgtggagcggcagcggcagcagcgggtcccgggactgaggcagcagcgggggcggcggcagggcggaagctgagagtgacgaaggcatgcggcggcggccggccgtttccctcacggtggcggtagaccaaggcggcggtcggcggacggggagcggcctggtgcccggctccccgtgctcgattggcatgtggcattgtggcgcgtgggggccggcccggtgtcccgcccccccggcgggtcccccttcgcggtcgtccctcgcgtaccgcgggagcacgcgcgcgggggcctggacgccggccgcgccgacgtcaggactggcttgacgtgctactgcccgacgcgccgagggggagtctggagagcgggtggcgcggtcgccatggggacggggctggtccttctggtgggggatgatggatgccggtaacttgtccccgtctgcatggtgcgcgctggcatccggggactgggcgatcttacgtaacgaaacggagcccttgtggtagagtggtattgtcccatggagataacctcttgtcaacgctcatcattcgtctaggcaaagccaacttggcaagaagtgagagatcacagcagtccgcgttaaaggcgggggattggtatcgggtcgctagctgagcatttgcgagattgacctactagattgaagggcacgaactcgcccggaccggggggattcaagggcctggaagggttccaatgtccttcaaggcctacggctgacctgcgggttgtgaacatatattgtcaccgaagcaaagaagtcgtccagaagccagccttgcagggactaccaaggtgtaaagcggactaggtagattcccctccn

SEQ ID NO: 718316 - DNA, 277 bp, Homo sapiens
acgtgtgcccgtgcgctgcttgagagacaatgacatggatgccccggccctgtctcccggcgcctcatcctccagcaccgctggtgccatccactgaccacatatactttggctgcgacttgatatacacctactacgtccagcgacccgccggggtaccactgacctctgcgcccgtgcgggctccagagcggtcctacggcgctcatcatacgtcttggctctggtctctgtggtcttcattcggctccactggatcgctcaccggcaattcaat

SEQ ID NO: 718317 - DNA, 777 bp, Homo sapiens
gttaagtgaaataagccaggcactgaaaggcaagcttcacatgttctcacttatttgtggaactaaaaattaaagcaattgaacccatggaggtagagtagaatgatggttaccagaggctgggaagggtggtggagtggtggtaaggggaagtggagatggttaatggctacaaaaaaatagaaagaatgaataagatttagtatttgatagcacagcagggtgactgtagtcaataataatgtaattgtacatttaaaaataattaaatgaatataattgaattgtttgtaacatagaataaatgcttgagggagatggtcacttcatttaccctgatgtgatcattacacattgtatgtctgtatcgaagtatcttctacacctcataaatatgtgcacctaccatgtacccacaaaaatttaaaatttaataaatagcaagtgtatatctatatactagaatacttggttaccaaaatcaaaaataaacatatatgtaaggttgctcaaaaaaataatacaggtgtcaatctaacaaagcatatattggatcttatatactggtaaactataaaatgctaatgaaagaggtcaaagaagttccttataaatggagagatattacttaaacatgtacatgaatttttcatacgtaaaattgtccaacatagccaaaaatagaaatgatccagatgtcttgagtggtaagacaggtgtgtgataccttcatttcatggatactaatcagcactagaagaaatggatcatgaaatc

SEQ ID NO: 718318 - DNA, 1008 bp, Homo sapiens
cgtatcctgaaaagtggagggcttgaagggctctcatcgctgatcagtacagtggggctcaggtccgggtgctctccgctccatccaacttccattatggtcaaatcaagcgaaccccatgcaatttactccgaagaattttccttggcggtaatggtcccatgcagttgtagaggggtgacttgagtggattcgtcgtgtgttgtgagaggcgagacagcacagtgtgccgtactatgttagccaatgaggagctgcgtgggaagtagtccgagaggtcgacgtacggccagagtggtgcaatggggtgacgcgttctgggtgattccgataatatgatgtgcctcatggcaagtagcctggtgatgtctcctccaccgttgggcatcaatgcaccacaaaacaaaacaggtcaacatgaagaaaatgcttaaaggaagtgaccggtgaggctcaaattcctgggggctgctggatgcttacgttgaaacgaagaggactatttacttggtgagtagagaagcgagttgaccatatggcatgacaatccacagttccgttgtgtaaacccttgtattgttggctctataacgcaagtgtgtctaaaaaagccttcatttcccggacaggcctgtgtccgcaaactaaatcagagacggatggggtttcactcatcgtggtataacacccattgtcatcgaggttttcccgggggctggtcatttgggtgcgacagtgtagagacatgtgtggagaacagatatggtcccacagattttgaattggcgagacaacactagtttgcatggagatcccaaactttagaatagtggcatcagcaagagaaacagacgaaggcggtcacgtggaaagaagatgcagacatgccgtagggcctgagccggaacgaggtggaaacaagggggggagcctacgcctgaggaggatcacggttcaaatgtgagccgggcgcggaggtgggccaaggaaggcacttgtacaggcaaa

SEQ ID NO: 718319 - DNA, 366 bp, Homo sapiens
catgagtgactgcacagattttggaggctgaagcgggtggatcgtttgagtgccaggagttcaggaccatgcctggcaacatagtgaaaccccattagccaggcatggtgatgcacgcctgtaattctagctccttggagggctgagaatcgcttggacccagtgaggcggaggttgcagtgagccaagatcacactgctgcactcctccagcctaggtgacagagtgagacggtctcaaaaaaaaaaaaaaaaaaaaaaaaggtttttggattccccttttaaacccaaagaaggcggggggggggttgcgcaaccaaaggcaggcgttttggcccccaaagggttttaaagaaatgggggggcg

SEQ ID NO: 718320 - DNA, 1815 bp, Homo sapiens
cacatgcaatgatatgtgcgtctcgtatccagtgaattcccatgacatccaatgagatgcgcccatcgaatgaagaacgactgcgtgctgctctctcaggggtgcatgatatttacacttacgaccaaagttatactgtgcatgctctgcgtgcctgcacaggtgcgcacgctgggttgatcaagtacatctacgaacatgcgaataaggtacaggcactagtctgttgtccacctcgtcttgtgctaaggtgatccacgactccgcgacagaggagaacattccctgcacattacctcccaagcacctctgtgtagcctgtgtagtgactcactaggtagtttctctctcgtcacatttatctgactactgagctgcgacgcacgctgaatttgtcccgaaggtctccaaggaactattaaccttaccatggggatcttcgatgcgtccgttcccatgtgagggggccatgtgacatataagtagtcaagtgctagcgctctgggggcgggcaaacgattcgacacgagttgatagcgtaatccatcactcaacgtggatgtctgggatattaaccattcctattgccaacgacgtcgcgcattgttgaccacacgttgtgcatatttccatgtgccccatttatacgcacaacgcatgtgtatgtcgtatcgcgtgtacgcattcctagaggaagcaacgaatggaaagacgcgcggtgagaggcccgcggaaaaggaccgcgaacgtaactaggatctgtgtaaattcataggggccatgaatactatgttcttggcggtagccacactggggtgccttgaacagcggctgcccctaagaattttccttattgaccggtttgggggaaggagaccttcacaacttgcagggtgccaccactctttggacaaggtcaaacagaggttcgaggagtcagaacattaatctcttgcgcaaaggccaaatgcggggtccctctttgaaaatgcctctcaaaactgcccctatcgccacgtggttcggcaacagatccgaccaaaaccaactgaggtataagaggttcgcgtccaaagttacttcggtttaacacattaaattccagggtggggatttgcctaaggagatgccagggcgacacgtttttacccactcctgtttgcgaaacacaggtttacgggcacaccatggtgacacattaaggaggcacacacaagccaaaccacacatgggcgctgttgcgcattgatctcacccctctgggggggagaaattcacgcccacagaaggggtatgctcttccccaacagatgtcttctgggcccacgaatctgtcaaattgtttgcccccccagatggaaatgggcaaggtggccctaggagagaaatagtgcattcgacatcttggtgcccaggagcacaacttttggcccaccgagacaccgcagatggggtctagcgcacccggaaagcggaatagtggcgctataagacaatactcgacgagagggtcatagagaaccagcacaaatagagcccaaagcgagtcacgaccaggtggggggcgcgtaccctatgtgagaaccacgctgatacacaacaacgcgcgtgataacacagaccaaccacaacgacgggtcaagcaatgcagcatccaggcgccggcacagtggagaactcgcgaccaagagtacgctgcaccacagacaacagaaaggaccacataacagacacagcggaaagtagacaggcgcacaccacagcagaagagcacgagaccacaaccagaggccaccacagcccacgcgcgcgcac

SEQ ID NO: 718321 - DNA, 569 bp, Homo sapiens
ggattatccccttcgacggtgttctgatacaaatatcatacaagtcaggttagattacgaacaaattatcagccttggactatagatatttaactctgaatctcaacctttctgtaacacagtcaaagctctttgcagtctgaaaatggtgctaactaactaatgatatgtcatctgaatcgttttgtttttgtttttttttcacaaggcacgtagacaaagatattctctgttgtactaggccagtggccaagtaaagatcctgatgtaaagtagtgctattcccatctactacctgtgtttaatcatctgaggcaaatacttgaaatgttgaaaagacccaaatatggtcataaatacgtgacttgcaaaaaatgtcaagacagcaaatgaatccatctttctgagtactatgtgctcagcattgtgtaagacactacaattataggaaacataactttaaagctgacattgaactgactgctacctcagggtttagaatcattttgaaaaacaaatttaggccaggcgcggtggctcacgcctgtaatcacagaacaccgtcgaag

SEQ ID NO: 718322 - DNA, 599 bp, Homo sapiens
  misc_feature (419)..(419): n is a, c, g, or t
taaaaaaggggatcttgctccttgggccgggggggtcccaaaccccgggccggaagggacccttctggcctggtgccccccaaaatggcgagaaattggtgagggcttgagaccccgccatggcttaccccagttgggtgcttttgtggtgtacttcccacgtgttttcacaaaagaaacaaaaatttaaattgtggagtgagaatgccacaattatatttaaatttttaaaaaataagagggggattttttgtggcgcaggtcttaaaaaactttgtgtggtcttagtctccatgagggcccataattctctctccttgtgtggtttctctctctctataaatgtgtttttattatattttatacacgatgtgtgtataacgcgtgttataatatattatatgtgtatctctatattntatatacatgtgttctctcttctctcagcgtgtgtgtgcagggtgttttatagtgtgtattgtgtgtgtgtgtggtgtgtgtgtaatagagagagccacactatatgtgtgagtgtgtaggtgtgtctctatatgtgtgtgtctctccccacgcccccctcttgtgtgtgtgtgtgtgac

SEQ ID NO: 718323 - DNA, 220 bp, Homo sapiens
gtcccatgcatacgatgttcatgtccctgttgcacattgggctgactgtgcttgcggactgtgaagtgggaaatatctgaatgaacacttctgtatttacagaaaatgataacgatgacgatgaagatgttcaagttgaggtggctgagaaagtgcagaaatcgtcttcccccaggtaacactgaatactcaggaacaattaatggatgggcccgacctt

SEQ ID NO: 718324 - DNA, 903 bp, Homo sapiens
  misc_feature (900)..(901): n is a, c, g, or t
  misc_feature (903)..(903): n is a, c, g, or t
cgtggtggctcacgcctgtaatcccagcacttgggaggccaggggggtggatgacgaggtcaggagatcgagatcatcctggctaacacggtgaaaccccgtcgctactaaaaatacaaaaaaattagccgggcgtggtggcccggcaccctgtagtccaagctactcgggaggctgagatcacaggcaagcaccaccaaccagctaagttgtatttaaatatatgtccatttttataacacacgtgattgagaacacaggattaaaagtcaattagcagaaccaacattaatttcttagtttggtcactgatggcagttcttcatatggttaccattagggaaagcaagggtgaaggtgtttattaaaaaatgtggtacactatctgtgtaaactttttctgtaagcctaaaattatctcaaaataaaaaatttgtggcggaggaggtggtcagctgtaaatccagcacttgtggaggcgagggaggggatcacgaggtcaggagatcgagacatctggtaacaggtgaaacctgttcattaaaatacaaaaagagtctcagaataagagaatagtcgtaaaaccttcagaattattattctagcttaggtgtggattgttgtgtaattttaggaatgacagtcatttatataatgctttctagtagggtaagttctggatatgcgtttacatttagccttcttagaaggtgggggtatatttccccaaaggtagggttgatttcgaaataatgtcttttcctgtggaggtggtctggtgggagatggacaaattgttaacgggttcataaatttgtgggtgggttataccgtgtgggagtgtgcaggttgtgtgtgttaaaaaagcggggtgggtgggtttgtgtgatttatagtttnngn

SEQ ID NO: 718325 - DNA, 137 bp, Homo sapiens
cttatggaatcctcctcctccttattgagatcagcagcactgcctttctgaatcctattatccacaaacatcacggcataattgacggcagggccctggaggaatgccgcgacttccttaaagaactgtgatccact

SEQ ID NO: 718326 - DNA, 345 bp, Homo sapiens
ttctctaaaggtaatatggaaaccaccttatccaccacgcattataagaaaagcactcgcgttctgcacaaaattctgcctataaggaacgtgtgtataaataccagttcttatataagtgctaatagtcacacgtttaatttggtaaccaccaccaccccgaggcatttccaccattaaccagaattacacaatttgaatgtgaaaatccataggacctatgtttcttggctcaataatttttaagtcctagtctcacaaggatctaatgtgtagtaattacatatgctccacatatggcgaccttcacagtgtagtcagcaacacagtatgtgcctcgtgccg

SEQ ID NO: 718327 - DNA, 534 bp, Homo sapiens
gcgtgctggtgactctagcaggatccttcaggagagagaactggagagtgcggagactgtggtgcagattgggcggctgctcccttgctcctgtgttggcgtgcgggtagctgagtcctcagcgggtggtcttggtggaactggtcgcgggaagagattaactttgcaatcctggacctcttccacaatggtacgcacctgacgggtggtcaccggttctttcttgtactgagtcaggtgggcatcctctccctccagcaggcggcggtaggtgggcaatctcctgctccagcccgcgtcttcacatcctagcaggatattgtatacctggttctggtggtccatcttggcagcgaagttgggccagctggtcctccacgctgccaatcatgccctggatctgggaaaggttgacgcagtagcggttctctgtctccgccaggttggcctcccagggaatgcttccatgctgagctgggacttggggctctatctcgcaaggctgcattgtgcgccggaggtccgaggatctta

SEQ ID NO: 718328 - DNA, 380 bp, Homo sapiens
  misc_feature (6)..(6): n is a, c, g, or t
  misc_feature (33)..(33): n is a, c, g, or t
  misc_feature (81)..(81): n is a, c, g, or t
  misc_feature (153)..(153): n is a, c, g, or t
  misc_feature (301)..(302): n is a, c, g, or t
cagtgnagccttctaaattctggagggaagtantccttcccaccttagcttccggaggagctgagaccacacctgattaanggcttttctttttaaatttttagtagagatgggaactctatgttgctcaaactggtcaccaactcctggctntgagtgttcctcctcttcggcctcagattgctgggattactgcatgagccaccgaacccagactacctcactgttttaaaaagcaattttttttttttttttttttttgagacagagtcttgctctgtcacccaggctggagtgcagnnttgcaatctgagcccactgcaccctccacctcccaggagaattgcttgaactggggagctggaggttgcagtgagcca

SEQ ID NO: 718329 - DNA, 1177 bp, Homo sapiens
cccctccgcgggagtgctgagctggagagcccagaggtgatgccgtgatggagtgaggacagatggactgatgatgtgatggtggtgagaggagtgcccccgcgtccatgtgatgtgtggctgtgtgcaagtcttgatgtgtgcagcaaccactggccgactgggctatccactgtgctgatggcttgcctgagggaacgacacgtgagcttgtgacgcaccgttgacctatgatcagcaagtgccatccatcagtgtaccgtgccatatccactctgtgcaatgaagtgatcaggcatgcaaaggtcacttgacacgtgttgtgcattgacttccatgcatcctcaaggatgatcgtgtgtgctcagtccatgtgatgcctaaagacgtaccatagagaccatgtatcgacatttgccctattgaacatgggcgctcgagagagtccggtcccagatgtccaaaaagagaggacagaatacccaagggcaccttgcgaccttctgcctcatgcatgaatgcttgacccgcatcaagaagccgtgggccttccacgactgcgtgcactaacaggattggagctcgcaacgcgacggcgcctatgggtccattgtgggcatccgctacggcaaactggggctattcagggatgcctggtcatggcgtggggaacccccctcggaaggtggagacaggggttggtttgcttgacggcgcagtgagcacaaagcaagaaccaccattactgatgctgttccgacaggaggcgactgatcgcaccattgtaccagaccaccacgcgggcccaatcacattcagatcaaaaaaccacctgcactgtgaaccgactaagccctctcaagccagcaagctaggcccgttaacagtggactcactccctggcccttgtaatcagcaccttggcatccacaggttgcccaacgttacggcgaatattgggggagttctaccctttgatacaccgcaccacgttctctatacgaaagacgacaccattagtgcccaataggctattagagcgaggacaattgccgatgtcagctcccacaagcaaaacaaacgaacggtcgccgacattgcaacaagcgaccaatgagacaaacatacatacaactgagacagacagtcatatatgccaaaagacacactctgcaaa

SEQ ID NO: 718330 - DNA, 144 bp, Homo sapiens
  misc_feature (29)..(29): n is a, c, g, or t
ttgtcagtgaggccacgctggggagtggnggagtgcttgtatgtgagatgcatggagggaggctgacacaaacgtgcggccatcgggggccagggacagggacatcacatccccactgtgtccagcaaaacccactgacaacgg

SEQ ID NO: 718331 - DNA, 846 bp, Homo sapiens
gaagacagagcatctcaaatcggctgatatctagcatctggaaactgccttcatcttgacagaaaagctccaggtcccttctccagccacccagccccaagatggtgatgctgctgctgctgctctccgcacatggctggcctcttcgagtgcggcagcagggacaacgcactttcatacttgaggcaacgctgccaccaaatcctccgagtgcacgagagacactcccgacgctgacatacacgtatctcggaaccatggtcacgaacacttgagacagatcccaaacaaccttatgcacgatctgcgcccggctgccatccaggaccaaactaactcatctaactggaacacacggcacacacgacccaaagctgctcaacacacccagcgcacccggcaccacgaccagaatgcgcaacctagacgcaactccaacaatcgcaaaggacgcaaagaccaaccgcacagctcacaccttacaacaagagcacacagcacacaggcctagcacaagacctaaccacacacacccatgacgaaaccacagcacaatacgacgccaacccagccaactagcccacaccatgaaacacatcccacgcaccattaatgcaaacaacacatctaatgtcctccaacacattgataactttccccttactaacacctgtcaccatcaacattcccaaaaccttaaataaatcaaactaatagacaactcacatatactattcagaaaatcacatcagaacctcacacccaactatccctcttcaaccactattccacactccccaagaaaacataacaaacaatacacacctccatccactcaaacaacca

SEQ ID NO: 718332 - DNA, 1242 bp, Homo sapiens
cccgcctccacccgcccgcgctacctcggcctgtgggttttactggcagagggtgacggctaggcatggcagggatacggctacctggctcttctcttgcgctggattctccagcccttgcccgctgttgcttgactctgctgagagatagcaggccatggcacgcggctggtaagaatagttcagctggcggctggcctggcagttgccctctggcgctcaagcagcaatcattaactagcgcagcgggcaatgcacctgtacgctagctgggctactactgcccagcctgcacagcaggcaacgtggctcgcactccttgaccactggcctggcggctatccctgagcgactgcagcttacacacccttctccactgctacctggcggcgctctgcaggccctaccagcgactcagcactgctcgacacctgcacgacaggccctcatcacaaccagccctggcccgcctgcatggcttcgcctccgtgccaccccacccatccctcactccccggcgccctgacgcgccagcgccctctccccggctctcctgccgcagcccgccctcgcgcgcccctccgctcccgccaactcgccccgcccacccccccgacccctgcgccgctcctcgcaccacctgacacccccgccacctgggccccacccaccccgccccctgcccccccggcctccccctccccctcgccctccccctgctcccacgccctgcccccgactgcaccttcccggccacgccactgccccctacctcctgccactgctgctcacccccgccctgccccccgcgcccccgcccctccgcgccggcccctcccccctggcccccgcgccccctcctccccccgcctgcccccactcccctgctggcccgccccctgcccatcacgcccttgccattcccttgccctcccagtcgcacccgccaccaccctctctgccccctccggctcccccagcccttgtccgcggcccctcccccaccccccccagtcttcgcgcctcccctgcccttgccacccgctcccttgccccttcccccggagctgacgccttggcctagcctcgccgtagccccgtatcctgtccccccgccctcccaccgcccgtacccctgactcccactcctcaccaaggcccctcccgcttcaccgcggccccgaccctgcggcccaccccccccccccccactcctcctttgcccgaccctagccacctggc

SEQ ID NO: 718333 - DNA, 390 bp, Homo sapiens
catcaagcgaatgagagcgcgagtgtgtgtgtggagggagcgaacggactcaggcgactaagagtgcgtgagtgtgtgtggagagagaacggaatcaggcgaatgagagtgtgtgtgtgtggagagagacgaacggaatcaggcgaatgagagcgcgtgagtgtgtgtggagagagagagacagggaatcaggcgaatgagagtgtgtgtgtgtggagagagaacggaatccggagaatgagaacgcgtgagtgtgtgtggacgagaaggagaacggaatcaggcgaatcagagtgagtgagtgtgtgtggagagagaacgggatcaagcgaatgagagcgcgtgagtgtgtgtgtggagggagagcagggactcaggcgaatgagagag

SEQ ID NO: 718334 - DNA, 216 bp, Homo sapiens
ggaagaaggtaccgtccccgtagaggcctggacctggacgcctgatatcaatgagccactctcggacagcgagtcagaggacgtacgaggcccagagccgtcttccacgaggaggagcagcggcgtcccaagcacctggccgtcggaggcggacgaggaagagctggctcggcgccgagaggcccggaagcaggagcaggccattcaacgcctccg

SEQ ID NO: 718335 - DNA, 218 bp, Homo sapiens
cgttaagtacctaagcactgtgacgtgatgcaccatcgcgcaatgctcctgacgcgagcactactactcacacatagacaaccagagacacgctcaatgtatccaggaacgatgcccgacatgacgtcagaggccggaggctggcgctccccgcgtctgattacttacccaccaactggcgctagttactcggcgatcagctcatctcatcattgtgg

SEQ ID NO: 718336 - DNA, 115 bp, Homo sapiens
atggtgtaagagcacgtactgactgtatctgctagtcagtggccttgatgtatcatacttagttgtctccacgtccttctgaatcactcctctcctggggtatataagccctggg

SEQ ID NO: 718337 - DNA, 196 bp, Homo sapiens
aaaccacaaagacttggaacacatctattaatcggccatagctggagtcctaggcacagcctaacctccttctcgagccgagctgggccagccaggaacttctaggtaacaccacattacacttatcgtcacagccatcattttaatactcttcatagtagccacataacggaggcttggcaactgactaggccta

SEQ ID NO: 718338 - DNA, 166 bp, Homo sapiens
acgctcctctgtggggtctgaggcagttcataatatcggcttcctggaagatcagccccttcttcaaggtatgtcttcgcctctcagcacgcatggggtgttctgcggagggaactgcccttggatttctcctgcaggcttctaggcctgttatggacccgcatgg

SEQ ID NO: 718339 - DNA, 287 bp, Homo sapiens
tcggtaccaacatgcgaacggactgatcataataggaggggaaaaaaaaaagataaccccctgaaggtacatgtgaaaatgcaggggtagagccctgtttaagaacagatttactttagtgcataagtatttggcttgatttaagccccatttgatttgaacatcgacaagatctggagcactcttcagaagttcctacattactagacatggcctagtttgctcacatttatcgtgggaggtgggttgggggaattagcacgggattctgattccagacaaattca

SEQ ID NO: 718340 - DNA, 390 bp, Homo sapiens
tggagcacaacccagttggcaaaaaaggagggagtattagcctcaaaaaaggggggtggagcaaatttttcgccccattttttccaggctttatggggggcctggtgtccctgggggcaacagttgtggcactcaagccccccagggggaccccagccccggccccatcattaaggaggttgattgaatggccctttgtgaaaagtcacctgtgactgtcaggggtatgctatgggccttttaaactgttttttatgatcccgcccttcaaaaatgaactttccccccaaaggaagaacttttttcccaggaaaactgaagttttttgactttttgcggggagggcggttcatccttttttgcttcaaaaaaaaagtcattaatttatta

SEQ ID NO: 718341 - DNA, 225 bp, Homo sapiens
gcggaccggatgtgtgggtatgtctagagacaaatcattttattgtattcatgtacattgtactccccttattcacatttccatatacctcacttgtatcatctaccatatgatgaatgacccaccacttgcacatttgtgctcttgcttccgccttgatttcctttactccatgctctttatatccatgtatgcatcatggcctacccataacaccacacaatt

SEQ ID NO: 718342 - DNA, 125 bp, Homo sapiens
ggcgggcgggggagcagcctagggagagcccccatcagggccaccacccagtcggggaggggcttcatcctttacctatccccttccaccctccttgggctggcttaataaattctggaactggg

SEQ ID NO: 718343 - DNA, 114 bp, Homo sapiens
ctgtcagtgcaactttcagtctgaggagatttctcatcttcaacatcaataaaagtactcatatctagttcctcgggaaatgtcattcgatcattcagtttaatccactgctgg

SEQ ID NO: 718344 - DNA, 239 bp, Homo sapiens
ttaaaaaaaaaagggggcctagtgtttaaaagggggtttcctggagcccaaaagcttgccttttaatccccgcccccccccaaattttttttggggttaacccttttttgcccccgcttccctttttttaaaaaggggaaaaagggcccctttttgtaaagttttttggaaaaagaaaaaaatttccttaaaaactttaaattgtaggggggccgattaaattttggatatgggtttta

SEQ ID NO: 718345 - DNA, 267 bp, Homo sapiens
  misc_feature (153)..(153): n is a, c, g, or t
cgcacttatggatacagctgctcagcccgggctgcaacggcgcccatgtttgtgcaacatccagacctcaaggcactttcagctccagttcctgctggcaagatgtgcagtgttgactacgcggatttgctgcagattaccaggtttcatatntggatgagctgacagcccgctggttctgccaaatccaggtgaagacttttggcaccctggtttcaattcctgtctgcaacaagtcgtctgtgcaggtgggtagtctagaccagg

SEQ ID NO: 718346 - DNA, 255 bp, Homo sapiens
gactctagaggtatcccctcataggcttcgcaggtgaacacttttgtaggtaaaacggtttacttttcaccagtctgttctggcactgcttctaatgatatcgagtcacctggatcaatgatttccagtgtgcacactctgctattattttccgcatgcttgtgcccagcttcaatattattgccacgtgatagttgttggacaccagtttttagccaaccatagctatagctactctatttcatgatttccttc

SEQ ID NO: 718347 - DNA, 323 bp, Homo sapiens
atattgtattctcggcgaagataccggttacctacagtatgacggaaggaccccatggagctttactgcagcttggtttagcgttttggcattgcatgtgtaggatagttgcgagactatgatgtaatggcgctatgctgtatcggagtcatcggtggaataccaaccattcaatgctgaaattgtaatctgtggtttgaagccacggatacagtgctaggtgtgcagtatgactgggacggtcgcttccgaacgattaacggaggagtacaaaggttctctcatgttggatggaaatcatccatacagtgcaatggcatcag

SEQ ID NO: 718348 - DNA, 382 bp, Homo sapiens
tctgaggtgactagagttaccctcgaatcgacggtcctcaacattggtgagacttcaagctcatggagcagttggcaacctgggcatgcggcatgtgctggacagcgagggcttccctggaggacaagtgcctgcctatggccatccggtcacacaggaacatctcagccctgaagcgagacctggacgcccgagccaagaatgagtgctaccgagccacgttccggctgcccagggatgagcggctagacgtgcacacaagctgcaccctgtggacgccgttcaacaatgctgcacatccctggccagatgttcatctccaacaactacatctgcttcgccagcaaggaggaggacgcttgccacctcatcatacccctga

SEQ ID NO: 718349 - DNA, 1082 bp, Homo sapiens
  misc_feature (1082)..(1082): n is a, c, g, or t
ggcctccttcagccccatcatgggaataattaattttctcaatgtaaaaaaaaaaaaaaaaaaaaaaaaaaaaaaaaaaaaaaaaaaaaaaaaaaaaaaaaaaaaaaaaaaaaaaaaaaaaaaaaaaaaaaaaaaagggggggccctaatattcccggagggggaaaacccccactggttttggtttgtagaaaaggggccccctatatggagagacatatataataaatataacacgagaaccaactgcacgatcgttaaaaaaaaacgcttctgagtgtaggacaaacaacccttgtgcaactgggtattctttgatggggagaaagacacccaatttcgattgctagggtagtgtagcaaattagttgggggaccacctaacctacaacaactagatactaactcctcctggtgatccgtacaataaaactaatactagagacgttaatagtggggtagcaacacaccggcatcatacatggcatgaccgagagagaaaaaacgagtagatccacagactcgaagcatgaaaaataacaaaaaaattcatctaccccgacgcgcacgatctgacatatcaaacagcaggaagaacgataacggacaacagacgagcgacgcagcaaggacgaggcagacgaacagcagaaccgaacaacgaagcagagcaaaataacgagaaacgacaacaaggaggagcaccaaggaaagaacgaacaaccgagcacagcaccaacgaacagacatcaacgaaagaataccacagcagtagcaaaaaacagaaaggcgaaagagcaccagatacaagaggcgaagaacaagaacagaccaagtgacacagaacataggcgagagacaacagagtagagagagaaaaccgagagaacacaaggcgcagacagagcgagaaatagcagaaaaggaggacagaagggaaactcagagcacggaagacaggaaagggaaagaacgaagaaagcgaggacgcaacagacggccaagagaagtaggaacgaacagcaagagaaaggaaagaggagcagggcacgacgatccatcagtgagtcgcgccgcggagn

SEQ ID NO: 718350 - DNA, 300 bp, Homo sapiens
  misc_feature (99)..(99): n is a, c, g, or t
  misc_feature (109)..(109): n is a, c, g, or t
  misc_feature (179)..(179): n is a, c, g, or t
  misc_feature (198)..(198): n is a, c, g, or t
  misc_feature (254)..(254): n is a, c, g, or t
atatcatctcaacttagtattatacccacacccacccaagaacaggggttggtaaggactggttgcattaaataaaataaaagctccatagggcttctnggcttgctgngcatgcccgcctcttcacgggcagggcaaatttcactgggtaaaaggaaagagacaagctgaaccctcgnggagccattcatacagggnccctaaataaggaacaagggaatatgctacctttgcacgggtaggggaccgggggncggtaaacatgggcactgggcaggcggggcctctaatactggggaa

SEQ ID NO: 718351 - DNA, 230 bp, Homo sapiens
tcctatctagggctgaagaaggtgctggcaaggggacgtccaacgaagagacacctgtcttcgagcaggagttaacaccgtcaccaccttgggggagaacaagaaagctcagacggatggtgattgcacacgacgttggatcccatcagagctggtcgtcctctatgcctgccactgtgtcgtaaaactgggggtcccattactgcattatcaagggaaaggcaagactg

SEQ ID NO: 718352 - DNA, 283 bp, Homo sapiens
tttcttaaacccctaacctcgtaatccacctgcttgggcctcccaaagcgctggtattacagacgggatccaccgcacccggccagctgccattttttaaaacaaaatccaagcccttagcttttgagccataaaaaagaaatagagctatctctatactggatccacctcaattttagcaacgcatctttgcatctccacaatgccattttcttaaaaacatttgcttgtttttaacatctggaataggtggaataagggggagaacttaggcttgcagaaa

SEQ ID NO: 718353 - DNA, 370 bp, Homo sapiens
  misc_feature (147)..(147): n is a, c, g, or t
  misc_feature (152)..(152): n is a, c, g, or t
ggacgactctacgaggatccccattcaaaaatataagccatttatatgggaatattgactttcagtaatattcatttatacttttgcatgtaactgttctttaagttactctttaaaataacaattaactttttttttttctttttngaganggagtctcactctatcgctcgagctgaagtgcagtgtcgcgatctccgctcactgcaacctctgtctcctgggttcaagcgattctcctgccttagcctcctgagtagccgggaccacaggtgcacagccccatgcccagctgatttttgtatttttagtagagatggggtttcaccatgttgcccaggctggtctcaaactcctgacctcaggtgat

SEQ ID NO: 718354 - DNA, 889 bp, Homo sapiens
atctaattatgaagtgttcccagtgccacaccgtttcaaaagggatggcaagcactagactgggacagctctccatggtctctttgggtcggcagacaggtcaggcccctggcatcgctcttacactcagcccgtccaatatagtaactaataaggcatcatctgcgggagcaggcatacacgtgatggagtcattatggtagcaatcccaagaagtacattccttggcaaccaagatgatcgtttcgtcggcaattacgcacagccaggccagaaagggctagacttcaatgagcttatctccaataataagctcactcacatgagtaatacctggcccactgccttttatttattcgcaaaaaccagcacaattgtctccatgcagtgttcactttatgtgtacctcatctcattctacatcagcatctcgatcacaagcaagtaatctcagcatccattgcaatcgactgggacagcaatcattgtcggttgcgggccagtccttggattttaaacatactaaagcacttggccttcgtggattcaacattgccatcattgttccagtcccttcgaatccccaaggcagtcaactccaattcagtgaagatggtataactgtttagccctttctaaaagatctgattagacttcgtaagtaatgtccaacttttcacaacagatggtgaggtgcaatcttataacttactggagcatgtggtcttcaatcctctcagatgcatactaactggttatgtggaatatgttttacatacctggggaacttggttccttgttttataacctaggaaagagtcacctgtgctttgtggtcatgtgcatttgctctaaaggcaaggtgacgcatcataggttgcagttatag

SEQ ID NO: 718355 - DNA, 514 bp, Homo sapiens
  misc_feature (110)..(110): n is a, c, g, or t
  misc_feature (467)..(467): n is a, c, g, or t
  misc_feature (469)..(469): n is a, c, g, or t
ataaatatgcacctactgcgtggtgccttacacccgtggtgaagaggtaagccgtccgtccgacgatattctgtttgagattgcccagcttgcggctcagggcgtgcgtnaagtcaacctgctcggtcagaacgtgaacgcctggcgtggtgaaaactacgacggcaccaccggatcgtttgccgatctgctgcgtctggttgctgcgatcgacgggatcgatcgtattcgctttaccaccagccatccgatcgaattcaccgacgatatcatcgaagtgtatcgcgacacgccggagctggtgagcttcctgcatctgccggtacagagcggttccgatcgcattctgaacctgatgggccgtacccatacggcgctggagtacaaagcgatcatccgtaaactgcgtgcggcgcgtccagatattcagatcagttctgatttcatcgttggcttccctggggaancnccgagacttcgagaaaacgttgagctgtttgccgcgcaatttcga

SEQ ID NO: 718356 - DNA, 265 bp, Homo sapiens
tcgcctagagttccaagcatcgactgtctacaagttatgattactaggggactatatatctatctaccccaacggggatgctggaggccaagatgcatgccactggctactccatacaagcttctacacccacgaggggctgcgctacggagtcgcgtgcacatccacctagaattggcaacatacacacacacttggtgcactaccgcgtatccctggctgtggcgggcaccaagaacagcttccaaacactacagtcgaggct

SEQ ID NO: 718357 - DNA, 447 bp, Homo sapiens
tctgcttcaaactctcagagtctttataagtcttattctcaagagttgtgtcccagcgaagggaatccgccttggaaatcgcggcttcctccttgcacgccgctcgctgtttcagcgcaagccggatctcccctcacacccaacagcaccaccttccgagactagcggctcattaccgcccagtccccgcggccggcgcaagaactcctcgccgggccccattccaggctgggtcgggtctttagaataaggaccagttgtgtgtctccctgtcgctggcagcggatcactttctggctgaagaaaagacaaaacgacgagggaaacaataggacctgtatgttttacacacagttctcattcgaaatgtatcatgatcatatttttaaagatgcgtgttacctttcataaatacctaaataaaacttactttctgttgaaaaaaaa

SEQ ID NO: 718358 - DNA, 163 bp, Homo sapiens
gtgaattggtgcatcttccccaccatacacacacacacacacacacacacacacacacacacacacacacaccccacacctttacatgggggtatgctgcgcaccctcacaaacaccccatctcagatgtggtctctctcatctgataccctggctctagtag

SEQ ID NO: 718359 - DNA, 116 bp, Homo sapiens
tctacctcgcggtgctcctcggtgctgtagtccagctacttgggaggctgaggcaggaaatggtatgaacccaggaggcggagcaagaatccgtctcaaaaaaaaaaaagaccggg

SEQ ID NO: 718360 - DNA, 183 bp, Homo sapiens
tcatgcccactctccaccagagaggctgggagggcaggcatggcttgagatgagcgggagctgggaatagacctcgttgtgccttgaaagggcttctctccctatattgattcttgtatattagagttgattttagtagagtgttaacagtggtttcaaatgtgatcatatgtgtctattttt

SEQ ID NO: 718361 - DNA, 169 bp, Homo sapiens
cgactagaggatccagatcccctttcatcatcataaatgtcatcatctggtgtgtggagggaatattcctccacttacactcgtgactgtggctgctaatatcatcctgctctgcaacatcatcatatacttctatggtcatcttcaagtaggtcttgcagggggcacc

SEQ ID NO: 718362 - DNA, 281 bp, Homo sapiens
tgcaatttaaaacttcctagtaaccacattaaaaagtgacagtgagctgggtgcagtggatcatttgcggtcaggagttagagaccagcctgaccaatatggtgaaaccccgtctctactaaaaatacagaaattagctgggcatggcggtggacaactgtaatcccagctacctgggaggctgaggcaggagaacagcttgaaccaggaggcagaggttgcaacgagccgagatcgcgccattacactccagcctgggcaacaagagtgaaactcctctc

SEQ ID NO: 718363 - DNA, 379 bp, Homo sapiens
tttgagatacctgccttttgtccaccaatgtatcgtcctcgtatatccaaggctgtgtctccctttagcatctcctctcggtttttagcagactgaagccatggtttttagttctgtctctagtgatgagcagaaaagagggatgaggaagaggctttactgtaccaaccagaaagagaagctaagaatccatgactggattctctcccttggacaccccacagaccaatatctcactttgcaggagaagtccgttccagctcttggttctttaaacttattaacttagttttcttcagctagactcccaaacatcagcttttacaattcagcatatggttcaatcactatggcaagataaacatttgttcaggtgtga

SEQ ID NO: 718364 - DNA, 968 bp, Homo sapiens
ttccacaattcgcaactcgcctgccttccttcaaccctggcacatttaccgtagtccctcagttgtacaggtccttcttccttggctcccgtgaagttgcatcccctggtgcgtagcatggattggcctcaggttatggaatggcttctcactaaacgtttcggtctagaatgactccttgacccgcttggtgataggaaccaacatctcaccgtgcatatagacgaatgcgggtttctacctgtgttgatagtatgatatctagtatagccagtccatgtgctgatgtcgcgcacatggtagtttacgttctttatggctgtgctcgctcccttggcctctcttgtatggatggaaggactgtcattgatatgtcgaaccagggcgtcttggtctcgcatggagccctcaatgtcgcaaggactcctgttcggcgctacctgcccatagagctacctttgtgcttcggatgaatttaagctgcaatgtatctcctaacatcgaggacatcactcgtctgttggcacttgccatactatctgggacgcactttgataaggacggctggtccctgtggtatctcacgatgtatcgcttccctgaagaagctcactcagaccttgcatgagcggcaatctcatcactggaatgttccacgcgactggacaagctgaggaacgaatgccttcgccagtgtcatcctgtctcggaaccggacaatagcagatccatttctggagtcttgggtcattccgaggccaggagcattgcactttccgctgagatccagagttggcaggtggactacgagtcatacacatgtgcggaaactggatcctggcagcgaggagacccagacgctggtttcgagagtacttttcctgggagggggccttccagcatgggggccaaagccttcaatcagggcaagatcttgatagtgaacatataacgccatgacctagcgc

SEQ ID NO: 718365 - DNA, 245 bp, Homo sapiens
ctgtcagcacagaggttgaggcaggatctcttgtcttggtgtagtcctagcctcccgtgtccttagtcagtagctgccattggagctttcacgacactaccacatctcccttctcccatgaacacattgtacactaccccaccctccttgatacagcatcactggggcagcagatcagcagttttaaaaagatgctttccctttggtctcctgctactactttgcttgtggacattggctgttat

SEQ ID NO: 718366 - DNA, 353 bp, Homo sapiens
agctctacgagatccccgatttacctcttctgctgtttattactagttgaaggctaatggatagctacattccttcccaccttaagacagaacatatctataactgatgatcaggagcgttacagtgcaaatcgtttacacacgctaatgctggtcacatgcactcttacgtgaggaggaaaccatgctgatactagaattgtctctggccttaagtgttgtccaattatatctactttacctgaattaccatgccaagtctgaattatgaaattacttttatagtatatccggaccgttaccaccgtcttaccaccctggccaccatcacatcaccttagtcacactcccga

SEQ ID NO: 718367 - DNA, 261 bp, Homo sapiens
cctttcatatactagtcagctttatacgccactaagctatgttctccgcagcctccttcctgtcgtttccatgtggcacattctgccagataccttagtagtcccctttcattttataatagaaaaccttggactcgccagtgattaactagcttcagtagaggtgtttagtctcagtatcattctcagaatagtcacaaccagatataactttaaggctcagatctcaaccatttgcctagaatgagggggatcctctaa

SEQ ID NO: 718368 - DNA, 589 bp, Homo sapiens
  misc_feature (513)..(513): n is a, c, g, or t
aaatccaagcttcattattatcattgtacacccttttggcctgagctagagttctatggattgtctgacttgctggttatagctttgggagagatttcattcattcattcattcattcattcattcattcattcattcatccatctgtccatccatccatttgttcaggcataattattctctcatttattcatttatttgattatcttgcatttataagctattatagctgaatatatgctagtgcctgtgtgtcatggaacagacagatggacaaaaacctgtacaaaagttcagagagtccggtgggcctgtaattgcttcacttttggaaggacgaggcgggtggatcatgatgtcaaggaatttagatccaacctggccacatggagaaaccccttcttacttaaaatacaaaaaatttaacccggtggttttgttgcacccctgctttccagttgtttggaaggctgaggcaggataattccttgaaccccacaggggggattcagngagcggaaataatgcccttgcttctcaccctggcgaaaaaggcaagcctctgtttaaaaaaaaaataaacccggac

SEQ ID NO: 718369 - DNA, 375 bp, Homo sapiens
tgagacagagtcttgcactgttgcccaggctggagcacaatggcacgatcttggctcactgcaacctccacctgtcaggcgatcttggctcacggcaacctccacctctcaggttcaagcaattcccctgcctcagcctcttgagtaactgggattatgggtgcccgccaccacgcccagctaattttttgtatttttagtagagatggggtttcaccatgttggccagtccggtctcgaactcccgacctcgtgattcgcccgacttggcctcccaaagtgctacaatcacaaacgtgagccacggctcccggcctgatacacctttctaagtttcaattatcctatatataatatagagttaataataaggac

SEQ ID NO: 718370 - DNA, 103 bp, Homo sapiens
acccgcggcgagttcatgcagacagatttgagaaatggctaattaattaattaatttttgagatggagtttcgctcttgttgcccaggctggtgtgcaatggc

SEQ ID NO: 718371 - DNA, 703 bp, Homo sapiens
  misc_feature (469)..(469): n is a, c, g, or t
atcttccagggggagaagtgtctaggttcccctacggtgactaaactcctccaaatagagtaggatgtggcactaatacatgcagtgtaaattgtgcgatcggagtacgtagcctgccgatctcatagaatattagatgctccataatagctcttccatataatgtgcccgccctgcgtcgcacacttacaaaaactcaccgttataatctatggattcatacctgaccgaatgagatgaagaaagggaaaagagccgctataacagaatccgtgtgcctatgtgcatgttacctattgattgcgtagaagcgcagtccttccaatgtcatgggatggattgggttagtatctatacgagtatagccggagctttgatgcgctgctaaattgccccacacctacttctaccggcatagatatatgctcccagtatgattgagaataacaaccatgctatgtacgtgttnggtctgggaaccgcgtggcaaggttctagcataccacattcctaagagatctggcccatggcatggttagcttcgcaatacaacgagagacgactgtactgcgcttattgaccaagaggtgctacgatgtctgagggtgtagggctcgagttatctatcatgtacagaagatgaaccgcgaatgccaataaggttcgacgcaaaggaacagagataaacagacaaaaaccacgc

SEQ ID NO: 718372 - DNA, 273 bp, Homo sapiens
agggtatggcggtcccccttcgctgggaggcaccagtgaggggggtcgctccagaatgtaaggcactggcagcggaggcgtagggggcgcaccggcttgccagagcccacccccgctccccggcagtagcaatcttctgtaacgtaactacaggaatgatggacatcacatcccattaccttcactgtgttctcttggttagaagcaagtcacaggtcgccacccacactcaaggggaaggaattacacaaggcatgaataccaggagaaagg

SEQ ID NO: 718373 - DNA, 976 bp, Homo sapiens
  misc_feature (32)..(32): n is a, c, g, or t
  misc_feature (416)..(416): n is a, c, g, or t
  misc_feature (448)..(449): n is a, c, g, or t
  misc_feature (497)..(497): n is a, c, g, or t
  misc_feature (507)..(507): n is a, c, g, or t
  misc_feature (976)..(976): n is a, c, g, or t
gggcagctgtcactgctctggggcttcaaggnggtcttgcgatcatccggaatggaattggaatccacgagcatgccagcattgacttaccaggcatcaaaggattatggccactgcggtctgaccctaatcgtgagactgatgacactttggtgctctcttttgtgggccagacaagagttctcatgttaaatggagaggaggtagaagaaaccgaactgatgggtttcgtggatgatcagcagactttcttctgtggcaacgtggctcatcagcagcttatccagatcacttcagcatcggtgaggttggtctctcaagaacccaaagctctggtcagtgaatggaaggagcctcaggccaagaacatcagtgtggctcctgcaatagcagccaggtggtggtggctgtaggcngggccctctactatctgcagatccatcctcanngagctccggcagatcagccacacagagatggaacatgaagtggcttgnttggcatcancccattagagatgacagcaatggacatgtcccctctattgtgccatatggacctactggactggacaatcatacggacatcgtatctttgaatatatgacctctttatgaaatactgcacaaaggagatgcatgaggttgagagatgaatcattaccatcgctcccatccatgaatgaccaaccgtttagcagatgtagccaattagctacctatagtgcacttgatgaggataggacgctgcttatacaatactattgtaggctccaagcatttgagacccagggcataggaagagccagaccaggtaagaaaaggttgacattgggcgcccgagaccaacagtatttagaagaactaaacagtacatattaatactcaccagaagtctatagattgtcatagacagcccattactcactatagcagcaaccacaaatgtacttctaagatgtaacacaggacttatn

SEQ ID NO: 718374 - DNA, 821 bp, Homo sapiens
ctgccgcatctcattttattcattcagatgtaggggtgtgtgaaacacaaaaatataaataatgaacaatggaaaatatttattaaagtatattagaaatgtatagatccatattgtcatgtttagttggataacatcagaaatttgtatgggcaagatatataaaattattttatttcctataaattaaattaaatctgactttgaattgcccaacctggtaaaatatagattcatatcagtcattatgggaacacatagaaaagaatatgtctttcttcctttccttccttggtcctctccaacccaagagtagcgcaaaaacctaagaatcttttaggaaaaaagaaaacaaataggagatgggcccacttgtctgcagttatcaccatcatggactgatacccttattgaataagttctgcttcaagtccgatgacattattacttttctggtcaagcttggacatgagagtctctcttgattgtgaacccccaggaactacagtccagcctcccaaggtactccatccagccatttcttctttgaggccttgccatttgcttggagacagccaggaagtaggattcagggcacaactatccctggtggggctgaacattattccaatttgggcaagctggctttagcaggctacttaccaccctcccttacagtcgaaaggtgatgccttaacgtaatcttccacaaaaggatcgcggagggtgacgaccgcagatagcccgtgcttccagtcagaatctgattagtgccgagcatggctaccctctgtcgtgtgcctactcgggcgggtgtcccc

SEQ ID NO: 718375 - DNA, 405 bp, Homo sapiens
  misc_feature (397)..(397): n is a, c, g, or t
gcctatttcttccacagtcagatggaagtcagcggaagggctcagagactcatagggaagatgagtgagtggaggagataagaagaaggaacgcaggagcagggggacacaggagcctggcggtttcttctgcagaaacttcaaggggttccctaacgcctctcttcaaagtgaacaccagtgcctgggccctgaccagcagcaggtgtggcagccaggccccgaccagcaaaggcctcgcagtagataatttgttcaggcttttgtgcttctatcttggcttttcaacttgatctgatgaaccaccccttgctccacctctcccccacttatatcgcactagaaaatcagcctgaactaaacctccccaaatccaacagaataaaaaattaattcncgaataaa

SEQ ID NO: 718376 - DNA, 663 bp, Homo sapiens
gatgtggttgactatttctgtatgtctccatctattgatgagggtcttaaaaaaaaaaaaaaaaaaaaaaaaaaaaaaaaaaagagagaagaacaacaacaaaaaataaaaacacacaagaagagaaaccaaaaaaaaaagacagaaaccaaaaaaaataatagaaaacaaatggagggacaaaaagaagagaaaccatatagacaagcacagcaaggcgacgcgacgtcatataacaccacagcgaccgacagccgcacggggaaaaaacgcgcgcgacgaccactggggggacaacacctctgcggccaacctgagaaccactgtcatcaactctcggtggaggcgggagaacaccacacccgtgccggcgccaccaaaccacacacaccaacagagagacgcacatacaacacccctcctccacacagcgcgcctcaccatccatcaaacaagaagtaaatcaaaaaccgggggatgaaaaaacaccagagagggcgccaccacaacaacgaggcgcgcagagccacataagagcgaagagcgaccgcgcccccaggacaccgacacctatatcagggcacacacacaagcgtgagagccgaaagggaaaccacctcatcaggcagaccacccaacaatataagacactaaccaccaccg

SEQ ID NO: 718377 - DNA, 2121 bp, Homo sapiens
tataagcgcgtcatggtgccatgaacctgttcgccactgggaggtggacggctccagccccagctgcgtgcccaggttgtgcagcctgactctgaagaagctggtggtcttcaaggagctggagaaggagctgatctccgtggtgatcgctgtcaagatgcagggctccaaacgaatcctgcggtcccatgagattgtgctgccccccagtggacaagtggagacagacctggccctgaccttctccttgcagtatcctcacttcttgaagagggaaggcaacaagcttcagatcatgctgcagcgcagaaagcgctacaagaacagaaccatcctgggctacaagacgctggccgcgggctccatcagcatggctgaggtgatgcaacacccgtctgaaggtggccaggtgctgagcctctgcagcagcatcaaggaggcccccgtcaaggcggccgagatctggatcgcctccctgtccagccagcccattgaccacgaagacagcaccatgcaggccggccccaaggccaagtccacggataactactccgaggaggagtatgagagcttctcctccgagcaggaggccagtgacgacgccgtgcaggggcaggacttggacgaggacgactttgacgtggggaagccgaagaagcagcggagatcgattgtaagaacgacgtccatgaccaggcaacagaacttcaagcagaaagtggtagcgctgctgcggaggttcaaagtgtccgacgaggtcctggactcggagcaggaccctgcggagcacatccccgaggcagaggaggacctggacctcctgtatgacaccctggacatggagcaccccagcgacagcggccccgacatggaggatgacgacagcgtcctcagcacccccaagccgaagctgcggccatactttgaaggcctgtcgcactcgagctcgcagacggagattgggagcatccacagcgcccgcagccacaaggagcccccaagcccggctgacgtgcccgagaagacgcggtccctgggaggcaggcagccgagcgacagtgtctctgacacggtggccctcggtgtgccaggcccgagggagcaccctggacagcctgaggacagccccgaggctgaggcctccaccctggatgtgttcacggagaggctgccgcccagcgggaggatcaccaagacagagtcccttgtcatcccctccaccaggtccgaggggaagcaggctggccgacggggccggagcacatccttgaaggagcggcaggcagcacggccccagaatgagcgggccaacagcctggacaacgagcgctgcccggacgcccggagccagctacagatccccaggaagactgtgtatgaccagctcaaccacatcctcatctccgatgaccagcttcccgaaaacatcatccttgtcaacacctcggactggcaggggcagttcctctccgacgtcctgcagaggcacacgctccccgtggtgtgcacgtgctctcctgcggacgtccaggcggccttcagcaccatcgtctcacggatacagagatactgcaactgcaattcccagcccccgacccccgtgaagatcgccgtggcgggagcgcagcattacctcagtgccatcctgcggctctttgtggagcagctgtcccacaagacacccgactggctcggctacatgcgcttcctggtcatcccactgggctcccaccccgtggccaggtacctaggctccgtggactaccgctacaacaacttcttccaggacctggcctggagagacctgttcaacaagctggaggcccagagtgcggtacaggacacgccagacattgtgtcacgcatcacgcagtacatcgcaggggccaactgtgcccaccagctccccatcgcagaggccatgctgacctacaagcagaagagccctgacgaagagtcctcccaaaagttcattccctttgtcggggttgtgaaggttggaattgtggagccatcctcggccacatcggccgtcctgcccgcctaagagatgcccccagcaccgcacactcgtggttcccaataaactcctgcctgcggcggaggttttatagcagcaga

SEQ ID NO: 718378 - DNA, 571 bp, Homo sapiens
  misc_feature (12)..(12): n is a, c, g, or t
  misc_feature (18)..(18): n is a, c, g, or t
  misc_feature (26)..(26): n is a, c, g, or t
  misc_feature (28)..(28): n is a, c, g, or t
  misc_feature (33)..(33): n is a, c, g, or t
  misc_feature (40)..(40): n is a, c, g, or t
  misc_feature (48)..(48): n is a, c, g, or t
  misc_feature (54)..(54): n is a, c, g, or t
  misc_feature (64)..(64): n is a, c, g, or t
  misc_feature (66)..(66): n is a, c, g, or t
  misc_feature (78)..(78): n is a, c, g, or t
  misc_feature (93)..(93): n is a, c, g, or t
  misc_feature (104)..(104): n is a, c, g, or t
  misc_feature (107)..(107): n is a, c, g, or t
  misc_feature (111)..(111): n is a, c, g, or t
  misc_feature (114)..(114): n is a, c, g, or t
  misc_feature (121)..(121): n is a, c, g, or t
  misc_feature (129)..(129): n is a, c, g, or t
  misc_feature (131)..(131): n is a, c, g, or t
  misc_feature (133)..(133): n is a, c, g, or t
  misc_feature (142)..(142): n is a, c, g, or t
  misc_feature (146)..(146): n is a, c, g, or t
  misc_feature (150)..(151): n is a, c, g, or t
  misc_feature (155)..(155): n is a, c, g, or t
  misc_feature (169)..(169): n is a, c, g, or t
  misc_feature (195)..(195): n is a, c, g, or t
  misc_feature (204)..(204): n is a, c, g, or t
  misc_feature (219)..(219): n is a, c, g, or t
  misc_feature (242)..(242): n is a, c, g, or t
  misc_feature (245)..(245): n is a, c, g, or t
  misc_feature (251)..(251): n is a, c, g, or t
  misc_feature (282)..(282): n is a, c, g, or t
  misc_feature (287)..(288): n is a, c, g, or t
  misc_feature (300)..(300): n is a, c, g, or t
  misc_feature (312)..(312): n is a, c, g, or t
  misc_feature (318)..(318): n is a, c, g, or t
  misc_feature (323)..(324): n is a, c, g, or t
  misc_feature (330)..(330): n is a, c, g, or t
  misc_feature (335)..(335): n is a, c, g, or t
  misc_feature (355)..(355): n is a, c, g, or t
  misc_feature (357)..(357): n is a, c, g, or t
  misc_feature (363)..(363): n is a, c, g, or t
  misc_feature (371)..(371): n is a, c, g, or t
  misc_feature (378)..(378): n is a, c, g, or t
  misc_feature (381)..(381): n is a, c, g, or t
  misc_feature (397)..(397): n is a, c, g, or t
  misc_feature (405)..(405): n is a, c, g, or t
  misc_feature (411)..(411): n is a, c, g, or t
  misc_feature (415)..(415): n is a, c, g, or t
  misc_feature (428)..(428): n is a, c, g, or t
  misc_feature (433)..(433): n is a, c, g, or t
  misc_feature (440)..(441): n is a, c, g, or t
  misc_feature (444)..(444): n is a, c, g, or t
  misc_feature (475)..(475): n is a, c, g, or t
  misc_feature (483)..(484): n is a, c, g, or t
  misc_feature (499)..(499): n is a, c, g, or t
  misc_feature (503)..(503): n is a, c, g, or t
  misc_feature (548)..(548): n is a, c, g, or t
tccgaaaaaaangtttangggaattnanccaanaaaaaantaattcanaaaaanctcaaaagtnanaatgaagtaaanaaaaaaaaaaaaaangaaaaaaaaanganaggnaanagtgaanagcaccanananccagcgcanaccnaaannagancaagcttctttccntccactgccagggtatcggcccgggnagccccccncccccccgctttccncccccgctttccctaacccggcncgngggggnatctacgccccgtccccgccccccccccccncgaannccccttgttcgncggccggggggncctggnactgnngggacncgganaccagggcgttcaagtggcncncggccncggggaantccaacncgnccaagcccccgcccgngtaccagngcaggnaggncttgcgccggaanaaggncgggaanngcncggagaagcgcttgaaaagctcctggatggncgggctgnngccgaggaagggggncganatcttcaggccgcggggcgggatgtcgcacacggccgttttcacntttttggggatccactccacgaa

SEQ ID NO: 718379 - DNA, 1152 bp, Homo sapiens
cgggtcacacacagtgcggagaccgacagtcccggatcccgggccatgttccacctgtccccgcagcgccgttgatcgcgctctacctagccgacagcacacgcgagccgccgtctagacgccccgacctcgccaccatgagagccctgctggcgcgcctgcttctctgcgtcctggttcgtgagacgactccagagaggcagctagtgaacttacaacaagttccactcgaagctgtgactgtctaaatggaggaacatgtgtgtccaactaagtacttcatcgcaacgattcactggtgcaactgcccactagaaattcggagggcagcactgtgaactagataagtcatagaacactgctatgaggggaatggtcacttttaccgaggaaaggccagcactgacaccatgggccggcctgcctgccctggaactctgccactgtccttcagcaaacgtaccatgcccacagatctgatgctcttcagctgggcctggggaaacataattactgcaggaacccagacaaccggaggcgaccctggtgctatgtgcaggtgggcctacagccgcttgtccaaagagtgcatggtgcatgactgacgcagatggcaaaaaagccctcctctcctccagaagaattacaatttcagtgtggccaaaagactctgaggcccccgcttttaagactattgggggacagaatcgaccacatcgagaaaccagaccctgggtatgcggccatcctacaggagggacaccggggaggctctgtcacctaacgtgttctggagggcagcctcatcaagccctttgctggggtgatcaagacgacacacaacctgagtcattgattatacccgaaagacaggaggaacccacacatccggccacacccatggagggaccggcatccaaggggacgattaatcccaaacaacggcaaaagtgggaacaccacgacgacgtggaccggctgcgaacaaccccacaagccgcagacaacaacagcgcgacaccacaccagacgagcaacccccgtgatccacaccgacgaagagcactagccagcctgcatacacaagcacgcgtgcacacggacaagggacaagagagcagcaccacgacacccgagagcaataacagaaca

SEQ ID NO: 718380 - DNA, 148 bp, Homo sapiens
aaaagtttttcccgggggggggggttggtttttccccgttttcccccgcctttggggggccccaattggggggtttttttgggcccggggttttggcccccccgggggcctttttttggcccccccctttttttttttttttttttta

SEQ ID NO: 718381 - DNA, 150 bp, Homo sapiens
gagcttctgttagcagttgacgcatgtcatgtggcacaggtggacctcagtgctccaggcctgtaagcttggctcgcagtgcctgatccacatcagtgaggccccacagcctcctctgggtgtccaatcaccctgagtgagtcacacacc

SEQ ID NO: 718382 - DNA, 366 bp, Homo sapiens
cgtgcgccaacagccccgcggcactgcggctttctcggtgtcgatctggggcaaacattaattacagggtgaacggaacgccaatgtcaatctggctgcccgccttccttcttctactacggcctaccattaaacgcttcctcgcggtggatttcccgctacaggatacctgatcccgctgcggaaaaaccggtcgaaagcatcagataatgccaccattggcacgcagggtttggccgttgatccaggcaccgtcgacaccggccaaaaatgacactgccgccgcaatatcctgtggctggcccagacgctctaacggtgccatttttgccaggcgctctatcagttccggcgttttgtcgacgc

SEQ ID NO: 718383 - DNA, 384 bp, Homo sapiens
ctagaggatcccccatgttacatggtacctgctctaccaggtatgggggcctctctcttatgacacaagatcagattaaagtcttgtaaagatcatctggggttagtctagcaggttcaacgtgtgaagagcactttctgagctgaatctccatgtgccatgtctagttcaagagactggatagagattagcaatttggagaatgctatattaagaaatggcaaaggttagcctacagagattccaaagttgcatcgtgaggttagtgtctgagaaagtgtgactccggctgccactgcccagaggtattcttagaagaggagactgaggtcgtgataatcaaggcattagtgttgcagccggtgtggcctgtggtaccgagct

SEQ ID NO: 718384 - DNA, 920 bp, Homo sapiens
gagtattggggacacagagaggtccgggaaaggaggagggtaaggacggggggggagtagtgcagagaggggaagaagctattcaggtcggaggactgagaggcatcacgaatcaagggaacttagagaggactggggaaaagtctgcacttgcgaagccgaagtaacagaatgagggaaccggagacatcagagacaatctgatcaaggcataaagagaattgtcccggagagaactggaaggtcgcaaggctctctgatgcttcaagacaagacagaggctaatatcactgactgatcaaaatgctctttctggaaatgagggacttacagtcacaatctaagtgtgataaggagagagaacctgctgcatgtcactgacaccggtgtaggaatgacccagagaagagttggttaattaaccttggtaccatagccaaatctgggacaagcgagtttttaaacataaatgactgacagcacaggaagatggccagtcaacttctgaattgattggccagtttggtgtcggctttctattccgccttccttgtagcagataaggtctattgtcacttcaataacacaacagacgatactcaagcacatctgggagtctgactccaatgaatttctctgtacactctgctgacccagagaggaaacactctaggacggggtacgacaattacccttgtcttgacagaaagaagcatctgattaccttgaaattggatacaattcaaaatctcgtcataaaaatactcacagttcatagactttcctatttatgtatggagcacgcaagactgaaactgttgaggagcccatggaggaagaagaagcagccaaattcgagcaagaagatctgatgatgaagataacgcgcgaagagagatttacgctgtcccctctttggt

SEQ ID NO: 718385 - DNA, 260 bp, Homo sapiens
caaagggttaatatccagagtatatgaagaagtcaactcaatagccaaaaaaaaaaaaaaaaaatccaatttaaaaatgagcaaaaggcctgaatggacatttctcaaaagaaaacatgatgatgactaaccaatatatgaaaaaatgctcagccaggcacagtgactcacacctgtaatcccaaagtgctgggatcttaggcgtgagccactgcacctggccaatcagttgcatttttattcactaccaatgagctatc

SEQ ID NO: 718386 - DNA, 949 bp, Homo sapiens
actgggccaatgtccagggtccaatgcgccaaatgttaggagctggccgggggtgtaccgcgaaacgggcatggcgcctttaccccccggacataacagtttgtgtcaaagcaggtggtaagcaaaaacctttcttttgagggcggtcgcccctgcgggtgattctttgcccccccccccagctgtgggtgccagagcgcctgtgcagaagttgtgcctcgttagacgctgtgcgaaaaaaccccgtgtatgaccggcgtctgttgcccaattgaaccccgaaggactgtgtcggtctcatttcccgcgagaagattgggcgccccctccaacaaaagaatgggggacaccatcagacccgtcagtagacacgcaaaaattggtgccccctccctgaggggtaaaattgttcggttcttcacgaggaggacccacaatagggggggccaccctgtatatcaccaaaccacatggcttggttgtttgtggcaagaactaggtgtacccagaaaaccggggtgaccaccccggtctggtcgttataaaatactaaggaattgtcgtgaagaagagctccacttatatggaggtgttaaaaaaaaggtgcgggagcaccaaaacacgaggcgccataccacaggtgatggtacaacaccaactctactcaacttgtgcgagaccggggggccaccaaaagccaccaacaaaatgtgagctcccggcgacacacaggttaagcctgttgttttggaaacaactcagccttcgtcggggtcatttttgtcgatgtccagtctttggtcccactagggaataaaatgtgctccttgtagtgcgaagagtcacggaaaaccgctgttttccccgtgtgaagtcagagagatgtgacgcggattcccaagattaagagccaaaacaaaaacaagtatgtaccctctctgacaaaaca

SEQ ID NO: 718387 - DNA, 112 bp, Homo sapiens
gttacaagtttgcctctatactgggattatccaggcacttactcaagggaatttactcgggaaatattcttggagtttaggagagataccacttattagtttctgacttact

SEQ ID NO: 718388 - DNA, 313 bp, Homo sapiens
cacaaattcctgggctcaagcaatcttcctgcctcagcctcctgagcagctgggactacaggtgcatgccaccatgcccagctaacttttttatttttatttttagtagagacgaaatcttggtatgttggccaggctggtctcaaactcctgacctcaggtgatccgcctgcctcacctcccaaagtgctgggattacaggcataagccaccacgcccggcccccaaaatcaactttttaactacaattgtagtaacttcttattatatttaatatgactcatcacaaacaacagaatgaaacagcatatca

SEQ ID NO: 718389 - DNA, 373 bp, Homo sapiens
tgtgaactaaagctttatttattgtcatattttttttccttgatttctttgcaaccctgcacctaaaccaaaagcatcgtcatctcgtcacactcctggcaagtccaccggagatgttccttgtgaaccatggatgtcattccactagggaattctttaatcattgtacatggtgtcttgtacaagtctgagttttcctttcaatgttcctgggctgggcttgtccagaaatctcgtcgcccttctgtctacagcagtttagggctcctttgtgtgtggttgtgggttgtgtgtctgtttgtcttaaatgcataagcaaagttttagtcttaacacctgtaagccagtactggtgctgctctgtcctaaaatg

SEQ ID NO: 718390 - DNA, 998 bp, Homo sapiens
ggcagtatatctcctctatagttgcagtgatatgcagcagagttatactccgtggatttagatatcaggcaaggcggattgctacatgctcccagacacattacagaaagcaagatgcaaggtattgctaggtctagagtaagatgccggaagctgaaccgttgtggactgatgtgtcggcgtgagatcccatctctgagcatcctgtagagctgacactgctcgaaagcgccgagacatatcgtctagtgcaggtgcttatcccccagtaaactagataaccttctaggtctggaaagtctagccgacaatatccaagaattgggtctagatggtcgtctcgatgcttgaacggtgaggcaactactctaccgtggactgactagccaagaatgatagtgcctcgctttatgcttggtgctacggtaggtccatttaccgtacttacacgacattcgctggaagcttacgcatattgggaactgtcgaatcatctcatggggatgtgcctaccgggggcctacctccataatggggggagatgtcttgaggcctagattcactcgcagcactgtcttatcctagagcaatcgaacagtttccggagtaggatttcctcatagttgggcagagcttttatggactcgggagaggacgtgactgattatgacattgctctcgtgtgctgtcgtgtgggtaaaagggcttggtgtgcatgggcacgatccgtctgcgtggagtttgcgtagctggacctgtgtccgttgtggggtgtttcagaatcgctgtctctgtcctccatgggggtggaatgcatcgcctctatgatggggtacgttcgttcaggtgttcggggcccgagcgtgtggtggaccttccggtggcgggcccctggtggggaggggcaccccccggacacttcaggggggcttgtcagacgggccggaacccgtgctcgtgggggtctaactctagggggtttgcccccaaaggggacc

SEQ ID NO: 718391 - DNA, 960 bp, Homo sapiens
  misc_feature (261)..(262): n is a, c, g, or t
tctcatttaacttttttaatgggttctcaaaattctgtggtgacaaatttttgggctcaagttgtgttttccatttaaaaagttccgtgatttttaaaaccttaattaactttaaaacgtgccacacgcaaaaaagaaacaccaaaggtggctccacaaaacatttcctccttttcctttcgtgaaaggtttacacgaatgcctatgtgttatatctattaacaccgagttcttttcactcatctaacatcttaatgtggnnccaatgtgaacaaccaacacgagcttcgtgagaacacgcgtttcttcgacacaacgtgaatatataagagaccgtgttgggagtgtggacaaggatatatatagggagatatacaatatatctcattatatagcgccttctctatagaagctattctctgtgagagccaagatctttagtggcgtagcacctttttggccaggctctcacaagacaacgcacttctctatgtgtctccacagtggtggcgctctctgctgtgatcatgagcacacgcgccacgaaacccgaacgaacatctgtgtgctaccgtggtctctcttcatattatcctcccagcagaaccaaacacgcacaaaaatgcgcggtaaccccccaaataagtggtctgcgccatattagctttctgtagagacacacggcttctctccaacacacacccctattttgcgcctttgcccccaaggggacacccccatgtttctccaccaacacatgtgggcaccaggctatctacatcaccgaaaaactcttctcagagacaattttttaaggggggccccaacattcttttccccaggaccctacctatatgcaaccccacggaacagccgggcggacacttccaatctccgtatttctccccgtttcaggcttctcacgcgcaacaccttgtggcctcgtgccaattgtgttca

SEQ ID NO: 718392 - DNA, 109 bp, Homo sapiens
cggtaccaatgcacgactaagagaacagaaaaatgcaggacctcggcgcttcaccgagagcatggttgtctttgggtgccccaactgaccacacccccattctccacat

SEQ ID NO: 718393 - DNA, 909 bp, Homo sapiens
taattagcctgatggattacaccaggtgtatacatgtaatgaaacatcacatgtgtcccataaatatatatattattatttgtctgtatttgtactatctttttgttaggaaaagggaggcatccaatcgtggtacaccgggggcggggagtagcgggggcaaggctcacaaaggaatcaaaaacaacacacacacatcgagacgagagaacaccccacggctgttaaacgacacacgaacgtagccagaaacaaacaacaaaaacgcatccaccaacgagcaaaccaaacagcgcatgcacgaaaacgaaacacacgaccgaacgtcaccagctcacccccaagaacgacggagcgagatacaacaacaggaagagggcagatgaggagaacgaaaatacgacaccaaagctgcggacacacacagatgctggggagacacacgccaaacagagcggaccagacacgacaagggagggcttacgggaacagacacataaaccaaaacagcaacgcagcctcaagagaagaacacaaaataaacaagagcgataatggccacccaagaaaaagctgagaaacaggagcgcaccgcggacggcactcgccatcgaacgggggcgaaacccaaaccaggatcctatgcttgtccgcagcagagagagacgaggaaagagccgaccgcgagcgcccaacccaggaagactctctgcgagaccgcacagcctcctccggaccgaacaacaaaagcggcaggcgacaagcaacaccgccaacagaagcagacacgcatcagaccacaccgcaccgcaggagaccagaagacgcacaaccagggacgaaagaccacaccgaaggagcagcgagcgcaccgacccacggggccgtacctccacagtaaccagccga

SEQ ID NO: 718394 - DNA, 527 bp, Homo sapiens
tccagtggcccaatgcctgcccaccatcctcaggctgtgtcctgcaggctgagcccccaccagctccctgcaaatacattcacaccctcctgcctgtggaatagcattcacggaggtctcattcagttctggaaagctagccatgttcactcgtgggaagttagacaaggcagaagcctattaagaaaaaaatcggccgggcgcagtggctcacgcccgtcatcgcagcactttgggagggcaaggcgagtagatcacttgaggtcaggagttcgagaccagcctgaccaactgatgaaaccctgtctttactaaaaatgcaaaaattagccggccgtggtgacgcgcgactgtagtcacagctactcgagagactgaggcgggagacccgcttgaacccgggaggcggaggttgcagtgagccaaggtcgcgccactgcactccagcctgggagacaaagtgagactccggctcacaaaaaaaaagggggtggaagtccgccctcttgagctcttggtaacctcag

SEQ ID NO: 718395 - DNA, 152 bp, Homo sapiens
  misc_feature (71)..(71): n is a, c, g, or t
  misc_feature (74)..(74): n is a, c, g, or t
  misc_feature (114)..(114): n is a, c, g, or t
acacggtcccttcgattggcgggcacttagaggtggggagcagagaatctcttatccaacatcaacatctnggncagatttgaactcttcaatctcttgcactcaaagcttgtnaagatagttaagcgtgcataagttgcccgccaatcgaa

SEQ ID NO: 718396 - DNA, 281 bp, Homo sapiens
  misc_feature (73)..(73): n is a, c, g, or t
  misc_feature (220)..(220): n is a, c, g, or t
  misc_feature (228)..(228): n is a, c, g, or t
ccccggcgaccgcttagccgctcctgaactcggcttccagtggggccaccactgaaaccggcgaccgtttccncctcgctgcctgccgctcggagtgtactatttcttgaacctcctgtccgcgggccgcaacatctagatcgtggaagagagggcagttgttttaggattctacctagggttggccgagaaaggaggagaaatacggtgtctgcgctangcgtgcgncccggggttagactttggtgcgcccagcggacgtggtaggtgggtgggtgggt

SEQ ID NO: 718397 - DNA, 504 bp, Homo sapiens
cccatgcacagttcaaactcaaagtatacaattcaggggtttttagtatattcagagtggtgccaccattaccacaatcaactttacaaggtttacatcaccccaaaaaagaaaccccatactaattagcagtcaccccttggtcctccccaacccttcagcctaagcaacaactaatcggccttctctctatatatattcgccggttcgggacatttcatataaatgaaatcatataatatgtggcctttcaggtcgggcattcttcactggatatgttttcaaggttttgccaggtggtggtgcatatcagtacttcatctctttttgtatggcggaataatattcctggtatggatatgccaggtttggtttattcactggtaagtggatagaaattagggcggtttcaatttggggctattataaataaggcggcaaagaacatcggtgcacaagttttggtgtagacatttgtttttatatcacgtgggtatccaccaa

SEQ ID NO: 718398 - DNA, 357 bp, Homo sapiens
  misc_feature (12)..(12): n is a, c, g, or t
  misc_feature (38)..(38): n is a, c, g, or t
  misc_feature (59)..(59): n is a, c, g, or t
  misc_feature (105)..(105): n is a, c, g, or t
  misc_feature (185)..(185): n is a, c, g, or t
  misc_feature (241)..(241): n is a, c, g, or t
  misc_feature (347)..(347): n is a, c, g, or t
cccaaacggacnccttcctaaccccttcccatggccanccctgttgcctccttaatatnaagtttggaacctgccgtggccttcccccggcacccccccttgaancaagcctcctacccctttgcccagcccagcccttgtgatctcctgagccttagggaagtgcctcgcacataggaagcacntcataaatattaatgaatataagcagaaattcaagagaagggtctagaaatgcagnaagtagaacaggattaagaatgtatgtgccatgcaatgtgaaactaggacatatatattatgggttgcaatgaaaattgttagaattttctcagaaagccatttgnaaatacatat

SEQ ID NO: 718399 - DNA, 245 bp, Homo sapiens
tgttccagaggatcccgtcgtcagcatcacggcaacagatgctgtgcctggagcggcataaagagccacccaaggagctggacacggcctcctcggatgaggagaatgaggactggagacttcacgtgtgtactgagtgccctgggccttggcccctgacctggggaaatggagtgtgcgcaacccgtctgttcgaccacgccgtcactgtcctgcgcccctgctcggcccccagtctcacctgc

SEQ ID NO: 718400 - DNA, 453 bp, Homo sapiens
  misc_feature (97)..(97): n is a, c, g, or t
  misc_feature (412)..(412): n is a, c, g, or t
ggcgatgaggtctcagcttcttagcctggcagccacaaccccttctctaggtggcccagagctctctttttattttacctctacaggtttcccactncacttcagcctgggagacagagcaagactccgattcggaaaaaaaaaaaagaaaaagaaaaagaaaaaaaatttaaaaattaaagaagtccacccttgccactctacccaggctgagctcattttcccttgtcgtttccaggacacattttggccctcagcgcattctgcctcatgctctctggagcagaccgagagagattctctgagacatagaactttcttttttttttttgagacggagcctggggtgacagcgagaccccgtcttcaaaaaaaaaaaaggggaaagctcggggcatgttggttacccttncatggaaactctttttgcgttatctccctaggatttttgag

SEQ ID NO: 718401 - DNA, 282 bp, Homo sapiens
  misc_feature (150)..(151): n is a, c, g, or t
  misc_feature (159)..(160): n is a, c, g, or t
  misc_feature (173)..(173): n is a, c, g, or t
  misc_feature (251)..(251): n is a, c, g, or t
ccaattgggtgagccatcaggcagggtgtaagaagcgcaagaggacatgatgcttaaggctctggctctgggtgtgaaagaatgaggtggaattgtagcagattcattcctgagtcaatctgtttttggggagggctgcaggattccagnngcctgccnnatgtgcaatggangtgctgccctctatatctctctgggcaccactctcgcctcaaacactatcccctggccacgtgtcactacacagggancagaagatttatctctcaccactctcacaca

SEQ ID NO: 718402 - DNA, 271 bp, Homo sapiens
  misc_feature (9)..(9): n is a, c, g, or t
  misc_feature (61)..(61): n is a, c, g, or t
  misc_feature (119)..(119): n is a, c, g, or t
  misc_feature (131)..(131): n is a, c, g, or t
  misc_feature (151)..(151): n is a, c, g, or t
  misc_feature (201)..(201): n is a, c, g, or t
  misc_feature (235)..(235): n is a, c, g, or t
  misc_feature (257)..(257): n is a, c, g, or t
agaagcgangctcgcaacgcggacgtgtttctgcgctcgcgtggtcatggaggcgctgcgntgcatagccgcgacaactccggaccacggccgccaccgaagcatgcttctgctgccgntactgctgttcntgctgccggctggagctgtnagggctgggagacagaggagaggcccggactcgcgaagaggagtgcactngtacgcgggtggacaagtgtaccgggagaggcanccgggtatcggtcgcgacacanccgtgcacctaagc

SEQ ID NO: 718403 - DNA, 916 bp, Homo sapiens
ggcgggcccatggaggtgggcgtgtgtacggactcggcggacccgatgtggagctgcactcgtgtgtgaacgttcactcgggcgccatcctggtcgacctaccgcgggggccacgcgtgtgtgacccccgccgcgccgtgtgctgctgcttccaaatggcggacgtatctgcctggtggcgcaggtggtccaagaattacgtcactcgcctgtgagctccagcgtgaagggaccagcgtccagacagaatgatcatgtagccccgggcctgtcaacctgtctgacgtgcatcagcccaagtggtctctacgtcgctggcaggagttgcatgaacgcattcacctgtgggaggtctcgcaccgggaaccttctggtcatcctgagtcgacactaccaggtactgtctcctgccttcagttcacaggggacagcagtccacttcatctcagcggggcaatggactgcctgtggtgctggtttggagcctctgcagcagtgctgcgatggccagatcctctccaggattccggcagccccaggacagtctggatctcatcatacgctccccatcagggacctgctctgcggctttgggggcccctgagccgggtggcacctcctcgctggatcagacggtgaagctatgggaggtctcctctgggggagctgctgcttctccgtcctctttgacgtgtccatcatggcaagtgaccatggacctggctgagcaccatatgttctagcgcgagggcagtgcagggctccatcttccaggtcggagctcttcaacgtggcccggacagaggcgagaggggcttccaccaagagcaggacgccgtgaagatcttcaacagggcacaggaaagcaggtgaattgccttgtcagttgtccacttgaggcaggttggtggtctca

SEQ ID NO: 718404 - DNA, 1850 bp, Homo sapiens
ggccctggtctgagtacacagcattccaggaagagagtctaccgctgctaccgtgcgctgctctcgtcgtcagtaggtggggactgcgagattgttcgtcgaaccgtaggcctcaatgtggataacggagcgactgcagcctctctcagagttcgtgagcacgtatctggagcgagcgatggccgacactggtcgagaggcccaacgagtcctgagacagcaggcaaggtgatccctttccttgaagcgagacagagcgttggagtgcctgtttggctcgttacataggacacggctggtgcatatgaactggcatcgatgaacaccatagatcatggaactagcgagaccattactgaggcatatatgacagtccgagccttggtgccaacccaggggtagacttgcgctcttgttaggaagcgctggggcatttgtcgaggtactacttgcgggtcggagaccaagccccttggtaccataggggggaagagcacgtccaattactatcttccttccggaaaggtcgctttgggtaaccgcacccgggaggggtaggatgctaagctctaattttccgcatggaccaattagcttctatatgagcacggtgggtgactttctcggacattgaataaacctgagaattgaggcgataacacccataactcgtcgaggtgcacgggcctatggacgggtttgtaggaagtgccctctagtgggcttggccgaggtcccataggccagaggccatcggggcaaggcaattggggaagcggtcaacccgcctgtgtctgtcgaaattgtaaacggagagcccaaatttgcggaagggacactatgcaggggtcgctggagctcgattggtctaaacccaggtgagcggtggccgtactccgccattggtgtcaagccatccgtatgcggaggacagtgggccacgtagagaacggttcggccgctttgcgaacattaagtcggctaggacaacctagtgaattgaaaccattctaatttcacccttggtaccgtaaccgcgtttgtcagagggcccaagtacgttaaggcgcaacgccacaattgttgccggaagatagactccagaccgggtaggcagcacacaaatgggcgacaaggaccaaagggggaacacttgtcatatccccctttattctgaagtgacggacacaaggggttgtgtttgccataagggacggtaccgggatgaaagcagggagatataagggcatggacgtggcctgccgaacgcctgtggaatgtccacgttaacagaacactttgcggtgagaggatgtgcgacgttttgttcgaacacctgagggtgtgttaacgggtgtgttacccagggggtggaaatgaggagaacacataatgcgccaaaagcgaatgaagaataacaataataaccggcgctataacgtgttggaagcaggggatttacgacaaatatagtaatattgagtggacaacaacgtggttaacatacgagggggggggcatacaattaagaagagacgagagaagagagttatgtagagtagagaaacgacgaagaagacgatgtcgaatataaaacgagcggagagacaacatagagcagaacaagaaagaatgaagtacacagatatgaaagtaggagtcggacagagcaacaactcacgcgaaacggatagatagtaagagcgcggacaacgacaaatgaaacaagaagaaacataagctaataaagtagaacatatatagaataaggagcagacatataccgatagatgaagtacagagctagatcagatcacgattattaatcagaacgcagcatcataactcaa

SEQ ID NO: 718405 - DNA, 265 bp, Homo sapiens
  misc_feature (60)..(60): n is a, c, g, or t
cccctgggccctttttggggcccctataaaaccagttttttccaaaaaacggggtgggcncgggccggaatttcccggaaattgggggtttttttccccaacccaggggggggggaaacccctttcccccccgggggggggggggattttttggaccgtttttccccctttttaacccacccccccctttttcccttttttggggggggggttttttttttttccggggaggtttttttcctttttaatggggggggaagcccca

SEQ ID NO: 718406 - DNA, 316 bp, Homo sapiens
ctgcctggattcagtggccaggatgtgaaagcaccgagaagaaggattacttccccacgcgtccaagatatgcaggcacgcaatgtggcagctctgactcctgcaggagaaggcaccaagctagggcgagtagagatagtgctgtgcagggcgaaaactctggtcgttagacctcctctgagtccaggaagcagagggaagagattcagcgatcgaccaggactccattatgccccactgccatgccagaccaaagtgtgctgagaggagaagctgcacacgagttctggatcttctccggaagatccgctatcga

SEQ ID NO: 718407 - DNA, 1146 bp, Homo sapiens
  misc_feature (179)..(179): n is a, c, g, or t
  misc_feature (692)..(692): n is a, c, g, or t
gaaaaaggaaaaaaaaaaaaaaaaataaaaaaaaaaaaacaaaaaaaaaaaaaaaaaatatgggcgtaaccttcccctccaaagaaaaaacccccccccctttccccctgggtccttttccaaaaattttgtgtaaaaaaaaaattggtgttccagcgggccctgcctgttagacaaancttgaggtttattagggggtgttaagcaacatccagttgtgtataagaccaatattaccgggggttttgtgaccccggtggccttataactcaaattctatgtccctataagaaagatactccgtgttcagaagaatagcatcggatgtcgcagagtgaaacatttattagagaaatctcctcttatgcgagggagaaaaccaggggagagagaaatatctcctcctccttttttatagaacaacacacaacgcagagagcgagcgggggcggcctttttatatatatcacacaccacgctagaaagagaattatctctctactaccacagagtatgtatctccctttttatatatctctcgtgtgccaccaacacacacgaaaggcgaggagttggtagatataaacagtgcgagcgcccaaatcacagagagtttgtgagatatcctccaggtgggggagagagccacaaaatttctatgtgtatgtgctcacccaacgggcgaaatatanacatctctctctcgctgagagagaagagcgataataaggatgatataaccctccctgtgtgctgatgagacgagagatgagagatatcacccacgtttgtgaggtgcggcgacaaatcataaatgtgcggagcaagaagaatatgaggagacaagaacacacggtaggtattgggctcctatatagcgtgtagggtgtggagaagagcagtctacatagtagaaagaacgttgtgtctcttgtgaagacagaaaccagaacttctttgggagcaaaagagtggtctcaacaacaatagagaggaatattgtgggggatgtttggggaagacaatattctctctaatatatattatacagacgagagatagggggcagcgtatggtgggacgtttttgtagagagcgcaaattataataaaatgtggcgcgccctacagaaaggggaagcatggg

SEQ ID NO: 718408 - DNA, 265 bp, Homo sapiens
ctccagaggctgttcccctggcttctgtgtctcctcttgatctctccacccgaatgcagcagcgcagtaagggtccctcctggacttaacagtttgggtatccccaacgaccgcagacctggtagcaaagcaaaagggttccttctattacttctgtgagtagcagccctgctctgaccatcgccatggccatgcggcggggacatcagtatctagcagcagcatcgactggtcacagggacttggcaggctccacgggccctgt

SEQ ID NO: 718409 - DNA, 325 bp, Homo sapiens
tcgagggtaccgactgcatctgtgcctcatatcaagtttcaaatgtctaggatcccacagacattttattttattttatttattttttatttttgagacggagtgatgctcttgtagcccaggctggagtgcaatggcatgatctcagctcactgcaaactccgcctcctgggttcaagcgattctcctacctcagcctcccaagtagctgggattacaggcacctaccacctcgcccggctaatttttgtatgtttagtagagatgaggtttcaccacgttggccaggctggtcttgaactcctgacttcaggtgatcagcctg

SEQ ID NO: 718410 - DNA, 157 bp, Homo sapiens
ggaaaggtacgctgtaactgatctgaaagcagagagaaggagtaataggtactttagggggaagagactccttgaaaggttacatgtggtggaaagtttggaggcaggagtggctagataaggcaagcgaggtgaaggcactttatgagcagtcacc

SEQ ID NO: 718411 - DNA, 651 bp, Homo sapiens
catttttggagggtcatgggtgtaatataacgggtcgtgaggccccgtcgggcggatttctcaagggcaagagttccagagcagtctggccaacactgcaaaaccccgcctttataaaattacaaaaattacctggatgagggatcaccagggtactacagggtcttcacgctgaaacgcacttggttcctgtcggcggcaggtgccgtgagctgggatcacaccactgcactccagcctaggcgccagaaaagtaagcttattataatcataatcccctttatcttcgtcgatacaggcctgatctcactgtcgtctttatcagtccggcgcattcagtttctctaccggtccggtccccgggcggacttgaaactgtgccctgactgctgaaatgaaaactcgcgcctccttgctacatcgcctcctctcggttcctcatctctggccggtccatctggattgcgtctaaaacttggtcgcccgctctcaccggctatctcttatttcactacggctttaccccgcgccgtatgtggcccacttggccattcccccgcttgtgtgtcgggcctaactctctcgctccgtgtttcgacgcagagctggcgccctcgcgggtactcccagttacatccgttctcacagact

SEQ ID NO: 718412 - DNA, 128 bp, Homo sapiens
ccaaagcatgcctgcccaccctcgctgtgccttagtcagtgtgtacgggtgtgtgtgtgtgtgtttgggggtggggggtggtagctggggattggcccctctttctgccagtagaggaaggttgcagt

SEQ ID NO: 718413 - DNA, 758 bp, Homo sapiens
  misc_feature (66)..(66): n is a, c, g, or t
  misc_feature (106)..(106): n is a, c, g, or t
  misc_feature (159)..(159): n is a, c, g, or t
  misc_feature (202)..(202): n is a, c, g, or t
  misc_feature (227)..(227): n is a, c, g, or t
  misc_feature (352)..(352): n is a, c, g, or t
  misc_feature (508)..(508): n is a, c, g, or t
  misc_feature (518)..(518): n is a, c, g, or t
  misc_feature (521)..(522): n is a, c, g, or t
  misc_feature (626)..(626): n is a, c, g, or t
  misc_feature (740)..(740): n is a, c, g, or t
ctcattctgtctgcgttccaggtgcttattattactgtgtcgcttgctccgcgccgcctcgtgttntctgttggcgcgctcgtccgggttcccgcctctgcccggnccttggggcttgccctgcccacctgcgagtggtgcttccgtccccgtcccccntgggcctctccacccctccctctgcggcttgtccgcgcccctncagccggtctttggtggctcctcancctcttgtcgcctctctgtgcttgctcttcggtcgctggtctcgccttctggcccagacgtgtttttcggccccactgaccctcgctttttgctacctccgttgtggtctggccccttctctgtntttctctgcccaccaactgctgtgagtgctccgcaggtctccccaactggttctctgtcgcgccagggtcgcgctcactccccgctgcacgtcttctctcctccataaacattaaacagctaaagtgtttgatctggcgccaattatctcctaccnaagtttaaanttnnccaaacattttttttcttaaaaccgaaaacacaaggcagtactaaccacgtgcttccagggaatggcctgtatctacccaaccactttctatacctctcttccnaccaaaagtcttaatatgggaatatccctcaccacgatcctaatactgtcagtagctgtcctgctgtccacagcagcccctccgagctgccgtgaagtgttatcagtctttgcnctacagaggggagatgca

SEQ ID NO: 718414 - DNA, 167 bp, Homo sapiens
  misc_feature (26)..(26): n is a, c, g, or t
  misc_feature (54)..(54): n is a, c, g, or t
  misc_feature (56)..(56): n is a, c, g, or t
cagactcttgcaagtgatagcctcgntgttgacattgtgaatttcagttttgcntnatccactttttttgctatttatttagggggtcgttcaacttcccacaaactgaggaatgaattccacgagcctgttctgaaaatgtggacgtaagacaaacacgtgctcgt

SEQ ID NO: 718415 - DNA, 981 bp, Homo sapiens
  misc_feature (76)..(76): n is a, c, g, or t
ggcggcgcccatcttgcggtccttttcctggggccggtggtctggtaccctaaatctctcagtattgttgcccttngcggctgcgctaaggcccactcgggcgctcaggggttactggcagcgcagcaacgctcgaggtctgcttcaaggacttcttcccggcagacggggacgaaaatagagctcccagcagcctcttcgaccgctggcccggcgagttttccccaaaccatttactgtgcgcttcgaccccacggcagactcgcttcactgctgcggctcatcctacttgcgcctgctgggcctgtctcattcgcagcgagcgggccacaacgctgactcgcgctggtggcgacggcgccacggccgcgccatgggagacccgagcggcccgtaccaacggaaccgcgaggcgcctgcgcaccaccagcagcgcgctccgagcccaacgcgccgagcctctgcgccctagcggccttgaggcccctgcccggctactcacccagccagctcttccacctgcatgggcgctcctggggcaccccttcccctgtgctggcaccctccggcctgcgctacccacaagcagccacctggtggacttcctgccggcccgcgcgcgggtccctcccccctgcggacgctgctgacccggcagagcgtgccgctgccgctcacgagccccgaggccttgaccttggccgacgttcttctcccgggtgctccaggcctttactctattcctctccccgctcttgcctccggccccctgcgccggtcgtccccgggcccccttccggccataccccaacactgccgccacccccccgcgccccgccccaacccgcccccgccaccgcacccgcgccccccgcgcacacaaccccccccggcccccgccgaccacacccgccccccccccccccccgccaccccgccccgccacccagcccccccccccaccccccccccccccccgct

SEQ ID NO: 718416 - DNA, 180 bp, Homo sapiens
ctctagaggatcctggtcttctacaagagcttttttttttcttttgtggagtctcactatgttgcccaggctgatctcaaactcctggcctcaagccgtcctctaccttggcctcctaaagtactaggactacgtgtgtgtgccaccatgcctggcttgataatacaaatttaaaaaaca

SEQ ID NO: 718417 - DNA, 227 bp, Homo sapiens
gaacaacggctaggtattctaagggcatttaaggttaacacactaggttcttttctttttattattttagttattattatactttaagttgttagtgtacatgtgcacaatgtgcaggttgagttgacatagtgtatacatgaacatagctaggttatttgctactcaagaattcagactagggaccagcagctgatggcaagttcatgaaactcctcaagctgccg

SEQ ID NO: 718418 - DNA, 382 bp, Homo sapiens
  misc_feature (61)..(61): n is a, c, g, or t
  misc_feature (83)..(83): n is a, c, g, or t
ttttaagttaaaaaagattttttttttgatttgtttttgagacagggtctttgctctgccnccttaggctgaaattgcagtgntgcaatcatagctcactgaagccctcagactccctgggttcaagcagtcctcccaccctcagcctccctaaggagctgggaccccacaggcatgcagcacccacaccctggccaacatggtgaaaccccgtctctatgaaaaatacaaaaattacccgggcatggtggcgggcacctgtaatcccagctactagggaggctgaggcaggaaaatggcttgaacctcggaagcggaggtggccgttagccgagatcacgccactgcactccagcctgggcaacagagcaagactctgcct

SEQ ID NO: 718419 - DNA, 448 bp, Homo sapiens
  misc_feature (37)..(37): n is a, c, g, or t
  misc_feature (59)..(59): n is a, c, g, or t
  misc_feature (80)..(80): n is a, c, g, or t
ctttgattaaaatggaagaaagccttcagatttctcntcaaacagcaaaaagtggattnaagtggaaagaaataatttantgacccatgaagaccaggctgctttaaaaatatacaggccagaggagaccaaaaaagaataaaatggaatgaaacattgcctgcttggccgggcgcggtggctcattcctgtaatcccaggactttgggaggcttgaggtgggtggatcacgaggtcaggagttcaagaccagcctggccaagatggtgaaaccccgtccctactaaaaatacaaaaattagccaggtgcagtggcaggcacctataatcccagctactttggaggctgaggcaggagaattgcttgaaaccgggggggtggaggttgtagtaggccgaaatcgccgcattgcactccagcctaggcgacagagtaagatgccatctc

SEQ ID NO: 718420 - DNA, 726 bp, Homo sapiens
caaggaagtcttttttcacgcttaaaatgggtccaccttgaacccttgcggtcaatctgtgtctgatgaggatagaatctctggatgtgcgctgtcagtcaagggtcccccaggcctcgatatcatatgggaaaagtcatagttttaaaacgttcaatcccggcccctgtgctgttaatagtggtgaaaatgtcatagtttaaaaaaaacaccgggacccaatgtgaccctgtgcaaatattggtagctgaaaatcttcaaggctactgatgggtggccccctaatcttgtctttgattgctgtgtgcagggaaaggtgtccccctttgttcatgctgttttggggggttggggggtatttgccagaatactccttttgacataaataggtcctcttgtcacgagatctctctaccaccacgacactttatatgctgagcacggagccaccactggagttgattgtagtccacctcaccccttgacgatggcacttgagcgtagctagcttatttccaatcactacgtgtttttgagcttgctcttacgttttaagaggtgcacggggtacaatttttgcatctgtgaattctaaagatgttttaaaaaacacttttcaccaaaatagtcctttgtcattacattatttactcatgtgtttgtacatttttgtatggtaatttatggatgattttttccagttaaaaatacatattcaaggaccca

SEQ ID NO: 718421 - DNA, 664 bp, Homo sapiens
  misc_feature (16)..(16): n is a, c, g, or t
  misc_feature (64)..(64): n is a, c, g, or t
  misc_feature (73)..(73): n is a, c, g, or t
  misc_feature (79)..(79): n is a, c, g, or t
  misc_feature (84)..(84): n is a, c, g, or t
  misc_feature (87)..(87): n is a, c, g, or t
  misc_feature (91)..(91): n is a, c, g, or t
  misc_feature (103)..(104): n is a, c, g, or t
  misc_feature (119)..(119): n is a, c, g, or t
  misc_feature (135)..(135): n is a, c, g, or t
  misc_feature (141)..(141): n is a, c, g, or t
  misc_feature (143)..(143): n is a, c, g, or t
  misc_feature (149)..(149): n is a, c, g, or t
  misc_feature (156)..(156): n is a, c, g, or t
  misc_feature (171)..(171): n is a, c, g, or t
  misc_feature (197)..(197): n is a, c, g, or t
  misc_feature (207)..(207): n is a, c, g, or t
  misc_feature (215)..(215): n is a, c, g, or t
  misc_feature (220)..(220): n is a, c, g, or t
  misc_feature (242)..(242): n is a, c, g, or t
  misc_feature (265)..(265): n is a, c, g, or t
  misc_feature (330)..(330): n is a, c, g, or t
  misc_feature (335)..(335): n is a, c, g, or t
  misc_feature (337)..(337): n is a, c, g, or t
  misc_feature (349)..(349): n is a, c, g, or t
  misc_feature (369)..(369): n is a, c, g, or t
  misc_feature (387)..(387): n is a, c, g, or t
  misc_feature (401)..(401): n is a, c, g, or t
  misc_feature (447)..(447): n is a, c, g, or t
  misc_feature (480)..(480): n is a, c, g, or t
  misc_feature (500)..(500): n is a, c, g, or t
  misc_feature (582)..(582): n is a, c, g, or t
  misc_feature (660)..(660): n is a, c, g, or t
gccacaaactaaactnattatcaaacacatcagttatttccagactcaaatagatacacattcnaccaataanctgagnaagangcntttnatgttctctttnnttttgctataaagcnttttttcttttgactnaatgcnangtgagntattgtnttttttctccttttnattgtcctcagaagatgcactatctnattcatgagnaatacgtnatttnaggtgtttttcttcttcctttnttttggggtctacaaccagcttntcttcgtggctgtgttattcgtggctgtggtattcgcggctgtctttgggaagttcctgactatnaatcncntcgggatgctcnttgctctcatcattagcttnccgcttatataatctggnctgcttgtggctgngggtttcagcactctggtcatccagctgactcgtttcataactgtncttcccacggctgtcccaatcagaaggcgcgtncaggtcctgggcaacggggntggccttgtatgcaccattcaactcctcgctttccatgtgtgtggtgatgtcctcgtctgtagcatcagggtactggatgtnagggctgcgaaacttcttagattttgacctcagtccataaaccacactatcacctcggccatcatatgtgtctactgngggg

SEQ ID NO: 718422 - DNA, 225 bp, Homo sapiens
ctgcggggtgactccatgcacacagactagaattgtagaaccacttccaggtcctatctagatgaattctaattgcataaccagtacctcggcaattgggacagcacatctactgctcctttcttacctcctctaccttcacatttgtcacaaatcacattcttatgcagagccagtccacttgtagcaccataatataagtcttctagaggtatactgaaacgc

SEQ ID NO: 718423 - DNA, 97 bp, Homo sapiens
tgcagaattgtggagtgtttttacattgattttttggtaatgcaattagcattatgtttcccccgtatgacttaataaatccttgaataataaaaaa

SEQ ID NO: 718424 - DNA, 117 bp, Homo sapiens
tgatgacccacccccaagaggaagtagaaagcatgacttgataatatatgccttgagaatgatttattaggaatgaaaactttctttaaataatgtaagtaaataagtgttacggtg

SEQ ID NO: 718425 - DNA, 756 bp, Homo sapiens
tgtgcttgttaaacacgatgcttgaaggcagcacgctccttaagagtcatcaccactccctaatctcaagtacccagggacacaaaaactgcggaaggccgcagggacctctgcctaggaaagccaggtatgtttgcttaagagaacttcagatggcccaggaggctgctggagccctcaaggaattcttgggcaatatcatataagagagaagatcgggtcagagcaacgacccccagacacatagctgctgctgatgacgcgttgtcttcaagtatcattcatcgtatcattcttatgctctgctacactgtccgtgtatcaggccaccccacctgataagacaatctactcggagaagactaggccaattacaaaatacagcaggttccacatgtggactacatagtcccacccacgggcctggggggaaaggccccttccacaaatccatgggcgggacacggccaagcgaagggaaccaacggttcaccatcctaaccaggcgcatggccagcaggccaaacaacgaataaggtcgcacacttggacgcaacaacccgaagttgcaaagcagaaacaatccccacgtgactcgccccccagcaacatgatgtgcccaggccgaaagacagtctggtgcaatccgacacgacgcgtgtgctgccaattctgcccggtacatcaccacaaccactgccttctcctataccacttttatcagctgtcaccctggcaacgatccaagaggacgga

SEQ ID NO: 718426 - DNA, 283 bp, Homo sapiens
gctttaaaatagccgaggtctggctaggttcatggagctgtagctggtggctacgccagagccatagcaatgtgagatccaagccacgtctgcaacctacaccacagctcatggcaacgcgggatccttaacccactgatcgaggcaaggatcgaatccgaatccttgtagactgtagtcgggttcgttaactgctgagccactacaggaactccaaattcaccttttaaaggtacagttcagtggtttttagtacatccgcaagatggcgtcggctaaattt

SEQ ID NO: 718427 - DNA, 215 bp, Homo sapiens
  misc_feature (17)..(18): n is a, c, g, or t
  misc_feature (90)..(90): n is a, c, g, or t
  misc_feature (96)..(96): n is a, c, g, or t
  misc_feature (123)..(123): n is a, c, g, or t
  misc_feature (131)..(131): n is a, c, g, or t
  misc_feature (141)..(141): n is a, c, g, or t
  misc_feature (148)..(148): n is a, c, g, or t
  misc_feature (150)..(150): n is a, c, g, or t
  misc_feature (154)..(154): n is a, c, g, or t
  misc_feature (156)..(156): n is a, c, g, or t
  misc_feature (161)..(161): n is a, c, g, or t
  misc_feature (163)..(163): n is a, c, g, or t
  misc_feature (181)..(181): n is a, c, g, or t
  misc_feature (199)..(199): n is a, c, g, or t
  misc_feature (201)..(201): n is a, c, g, or t
  misc_feature (214)..(214): n is a, c, g, or t
ctttttctaaataattnnctattacttgggtctttaaaaatatttgaactcacctttttatggtagggctcagggtgaataacttctgtntttctnttctagtctgcgaaacttgtatctgtnttaaaganggcacttganattacanangtangnatgangncttctcagatagcttttngtgagaaaacggaactgntntccagacgttctna

SEQ ID NO: 718428 - DNA, 286 bp, Homo sapiens
  misc_feature (155)..(155): n is a, c, g, or t
  misc_feature (236)..(236): n is a, c, g, or t
  misc_feature (254)..(254): n is a, c, g, or t
ccactgcgcccagcctgcttttgacttttacgacatcgacccttctatgatacatcactgaaactaaaacaaatggtggaagaattggtatctcatagaaacatttttagagaaatgaaaaagcagaaaagtcaagacaaattatagtgtatttntgtaaagttacacagaatgtgctagcctctcctgcctccccctccacttcttctgcctctgccactcctgagacagcaagnccaaccctacccttctgnctactcaacagtgaagataatggggatgaagg

SEQ ID NO: 718429 - DNA, 550 bp, Homo sapiens
ggcaccgaccccgcccgcaaggaaagatggcagtggcctgatccgggcccgttggcggctgtcactgacgcattactgctccggctccgtacggatcgcctgagcgtcggtggaggcatgaccgaactgtgaggctgcttgtcgcaccagttcctgcaggccgtcctggaggacactagagcaccgtccgtttggtgccctggtggtatttggattaggagccagggacctcacattcctcactctgcccctgcccggacccctcccagcacctggcccacaccctgcagcccagaccccatggtctggccctgggtgtgcgatggctgtccaggtggggtccccttcattggcctggctcccgttgctgccttctgtgcctcctgggggccagtccttctgatggacgcgtctgcaacggctgccaaccactcgtccactcgagaagacaagtagccacacacgggaggaagaacgagatcctgcccccagacacctgacacggggtgaagctggaccatggacgggcacctcaatcgcggcttccacc

SEQ ID NO: 718430 - DNA, 824 bp, Homo sapiens
  misc_feature (638)..(638): n is a, c, g, or t
gtagacatggggcggttttcgtgaaggggtatgtcccggagcgggaacagaggagagatgaatgcgtagtgtggtttggaataaatctgggctgttgctgaaagaagaaagattgctaaagcttccgtgtcagatgactaccgtaaagatgacaagatatacctcaaaggtcttcggaagaaggctcgtcgaaggtaattctagatgaattcgtctacaaaatgactcgtggttaccctccaggatgggtacattttatgaggagattaatggatgaagtgaccccagaacatttaaggtgtatgagaactcgggacgtcaaatatgtagaaatgaagagggttgcagaagcttaggaaaaatcgatagactacgatcagagctgccatctgtggttttccagggtgacgcaagagaacaagcttgtgtgctttttggacaccataaaggagttgatacagtctgtatgtctgcagtcatctgggaagaagtccggaggctagtcgacagagtgttcattaggccaggatagagaccttgggcatgaaagagttaagggagtaccatcagatggacattaagcgaatagctaatgaaagggaaaagcagtataggtgctgacaagggattggtgaggnagaattgtcgtattggtcagaaaattactcgcaagatttatggttaatcggaatggggtcagaagaaggggaacccggattatactccgagggggacagggggttgaaaacggttctgtccaaacagggggcatataatccacaaggggggggggcacaaaaacggggaacttggcaacccccgcg

SEQ ID NO: 718431 - DNA, 320 bp, Homo sapiens
gtaccactcatccagtgaaagatcaaggcaggacaatgagcataacgtaagcgagagggcgactatcaatgttaatgtgagaagcacattatcctttaaaagcctgcatacgatagaattattgcagcctagctaattcagaccgtgtgaaatggtgtcaggataaagaactgaagggctgaacgacttaattttcacttcatgtaacacacccagatttacaatgtcttaagtgcaccaaaaagcattgcttatagtgaagtactcatggtctctctgtacactaatctgccttactctttgggcgaacattcgatcct

SEQ ID NO: 718432 - DNA, 111 bp, Homo sapiens
tagaggtccccctagtttatgaagtttaatacagcaatgcccagccaaaggataatggggacgttggccaggactgcattcagatcctagttttagaagtttcaatagcat

SEQ ID NO: 718433 - DNA, 451 bp, Homo sapiens
cctcgtatccctctcgacagctccgactttaaggcactgtcatggcaataggctcacacctccgctcgtgcagcttgtagaacctggctgatctcacacttgttcacctccaggccacgttatgggcatgtagcccatgcccccgctgggactccttggaacttgaacatggatgagatagttgcaggaaaaggggcctctggaaggtaatcgtcaaacgtacctggattgacgctgtcaccctttgccacatgaggtaagacgagtgttaggtgtccagggtcacaagacagggcagcagccacacctgctgctgtgtgtccaagctcctagcagggacgagcggctacctcgcaggtgcttatgtgtcccacaagcgccaccttgccgctcactcaatgcggctagcagcccgatgatcacggatcttccccttccgacgagggcgaat

SEQ ID NO: 718434 - DNA, 948 bp, Homo sapiens
gcctactctttctggtgttagatcgagctaccctctaaaagcagtttagagtggtaaaaaaaaaaattactacccccaaaggctcgaggccaaaaaagggattgaaagttctcttctggaaattcctccggggttcctcccgatatactggagtcgtcttgctcctatagaggtccgttcgtagaaagcttataattttcccataaggaggcagcaagaattcagctcaccaggccgaaactggctggccgatataccagcgaagtggtggggaagctgggtaatgtcggtacgactgcacgtgccatattgaattgtggctagactttaaaaagcaaggagtggtttctacctggggatattatacattaagccattgtggactgggaggaatacaccagcttgcccatagacctgccaaggagaacggggctgccaaggggtttcacataccctttggtggcagtagactcgggcacggcacacacgacgcaacgagatttattaacaggctactgccaaaaggggaacgcggagaaatgcgcctgaaactcgggacaactgtaacggtactttttcacgcttacagctaattgcctgcgtgtaagtcttaataccatcaggactttgggttgggcttaccaccaaggaatcgctcaggatttgagaaacgacttttctgccacgatgacatcggtaccttgcgacattttcgtggggcgcttacaaaagggccaattctttgtctttgcaattggttctgatgtattaatccatggggccattactggctgcccttcgtggctatcgggaaggtttgggacaattgtcctggacccctatttaaacgggcgctattgggtacacccaagtttggtcttgcggggaatccttaaaactttggaagaggtacggctccctaacataagggggcaacaacctggttgg

SEQ ID NO: 718435 - DNA, 378 bp, Homo sapiens
tctctctctctctctctctctctctctctctctctctctctctctctctgctgagactgcctggcaacggctgatgccccaggtaggaccttttccatttcaaagtggtgttctaagtctgcgtccaacactgtgtaggaaaaaggtgggcgcaaaaatattcctgggcatccacccattaaaatagttagatgaggctattgccttgatgacagctgtccacactcctcatgaaataaacccgtttgccggggcatttccaaatgtctcactcgtgaatttaacccttcccccggggccttttcaaatgtctgaaagaggcattggggccttttagggggaaaatttttttccttggaaacccctgacccctttttg

SEQ ID NO: 718436 - DNA, 737 bp, Homo sapiens
  misc_feature (145)..(145): n is a, c, g, or t
tggaagtaccaggcagtgacatgccaccctggaggaggaagaggaaacgacgaaagcctaagatccactaccggtaaggaagaaacagctcatgaggctacggaaacaggccgagaagaacgtggagaagaaaacttgaccaaantacacacgcatcgtcctcaatgacccaccggactcctggttctgagcccaactaaatcactgttaacttcctcaataataaaaaacacaaaaacatcacaaaatacatcaaatataccaaagaaaataaaaatgcccgaacattatttgattcagggtgccctgatgaggaagagtatcacactcggtagatcagttcgagccgagaggcttgggttactgacaaggacgcacgcaactatctttgtgtatttgcaccccaggggcgttgaaattatccagcgggtcactgccgcctcatcattgggtattctcccttttgtccctatttcccttgacgcacctggggatttccggagcaatgtgtttgtaccaggggtctaaaactcttcagaaaaccttacctgggaagccccatcggaattggtgcaagatcgaaacaaagaagttgagggaatgattgaagtcctggggggctaggaagagctccaccaggggagggagccttgaagggcaaaatttgcaagagggagggatttctaccgaacaaggctggcagctttcaatccgccccagaaatatacgggccatga

SEQ ID NO: 718437 - DNA, 248 bp, Homo sapiens
aaaagccatttctactaaaaatacaaaaaatagctgggcatggtggcatttgccttactcccagctactcgggaggctgaggcaggagaatggcgtgaacccgggaggcaggacttgcagtgagccgagatcgtgccactgcactctagcctgggtgacagggcgagactctgtctcaaaaaaaaataataaaaataaatttaaaaagtatgattaggggctgtgctcaggtcctccaggagcttaca

SEQ ID NO: 718438 - DNA, 115 bp, Homo sapiens
gtgatgtgtcaagtgattcagtgattgtcaagtgatgttcaagtgatgtcagtgtcatagtgattgtcaagtgattgttcaagtgattgttcagtgatgggtacgagctcgaatt

SEQ ID NO: 718439 - DNA, 660 bp, Homo sapiens
aagctagagttcggctgttcggaaacaacttttccgttcatgttcttcaaagttttaacgtctataaatttggcagtttctactctcgactgtttgattttcaaatttgtttcaccatccaagttggcagtttcaatgtagcaaagaccctccggttccgaagatgacaaaattatggtatcagcaggaataggttcctctgattttactctaattatgtcacctacacgaatatcaatccatcgtttctcaacaaagtcatcatgtgcttctgaaaatatttctgctgtcgaattatttaattctttatcagaattagctctcttgatatcttcgatacattccttcatggcagaaacaatcaaaaccactaataaagtaccaattgtggtgtatctattagttggcgagacgtgaggcacctgttgaatggcagatgtacataaaaaaaacagattagcgtatttggaaaattcttggaacaaaaatttaggcagaaaggtcgcaaaattatacttggtggtagatatatggttgtcactatagccgaaggaggaattagcgagagaatcgttgatgtggatgactcttggttcaccattgccctctgcgtcgccaacgttctttcttaaaatgtaccggttgaaaagaattttaatg

SEQ ID NO: 718440 - DNA, 103 bp, Homo sapiens
gacgggagccttaacctccaactcagagggctccagatccgctctgaggtctttggagtacctcttgctcccaggcacagccctgacttttgagggctcccgg

SEQ ID NO: 718441 - DNA, 333 bp, Homo sapiens
acgagacacagacactgccctgtcacccaaacttatccctcacaccctgcgctcctgccaccacaggaagtgacaacatgacgaggggtggtactggcgtcgaggtgacagttcctgcaggggctatctgggaaatacctaggaggctccagacaaggccaggacctctcccactaccctgtggcaccagatcttccatcagggccggagtacatccctatagtgcctcaagtgccactctccctggcagccatcttgtcccctctatacctctagggagcactgtgcccactcttactgggttttcccagggaatgggcacacattatggag

SEQ ID NO: 718442 - DNA, 837 bp, Homo sapiens
gagagagccctgagggatcgccaaccctctgctggactggtgcctgtcaccgagccctgagcactcgagcccgagcgtgcggctgctgccctacagcctccagccagacgctccctgactggacattggccagtcctgccagagtgccgatgttcccagtgccactgccacccggggacccctgagaagcctgggtcctggctgtgtagaccccaggacctgcacttggcattcctggagccctccgggcactggacctcccagcactggtgtgccaagcatctgcaggaaatggagacaccttgcatccacggaacgccaggagctccagaccccagggacataggtgccgcaggaggctgcccatgttggaaacatcactattccgagctaaggcgaacgaacaactatttgactgggaacaacaactttgcataaattcatgaactcccctttcgaaggaaacgggtatgcccaggaacatccgcgatgggcctccgcacgagcaagggggttgggaatcgatgacaccgaacatcggtgagatcaccaacgccaagccaacaccttacatggatcattcaatcacttcaacacgcggtataccccggaatgacagaaccagcagaacccccgggacacaggagcaggagccacaggacacagggacaaccggcaacgcggcaaaaccctaacggacaagggggtgaaaaacccctgggcattccttttcaccagtaaggggccatacccatgagaaacggaccacacggaacgaggaacgacctataattctgggccccaggcagggccgcaaggacaccacatccgacaacg

SEQ ID NO: 718443 - DNA, 190 bp, Homo sapiens
taaggagaaacgtaattgtaagtagaacgcaattcggcgctcctatttttataactctacctggggaccgattaaggtgtcaacattttaaaattactcaagatatgggccagaaaagatgattatggcctttaaaactatgtggacataactgatgctatttaacattgggtcacagccattgtaattt

SEQ ID NO: 718444 - DNA, 137 bp, Homo sapiens
cgtcggatgcaagtgttctgtggtatagggtagggtgaagagtgtgctccatacctgtggagaggaacgcacagacatccaattttggagccgatggttctagcttagttggttttccaagcttttattcagacagc

SEQ ID NO: 718445 - DNA, 957 bp, Homo sapiens
  misc_feature (193)..(193): n is a, c, g, or t
  misc_feature (725)..(725): n is a, c, g, or t
  misc_feature (750)..(750): n is a, c, g, or t
  misc_feature (863)..(863): n is a, c, g, or t
ctgatcaggggtggcacgaagctgtgagtctctgcttctcctactgagtggtgttcccgagcgttgtgtctcgtgtaccgttttgccacacagtggggactttcgacagcgcttgggatcaccctttggttaacggctgggggtctcttcagtagtctaactccctttatgttacacagtggttggtcccctncgcgtacatagacctgtccggcctgtgtcttacctctcccggggtcccagtcccatccgtgtgaagaggtcccccccctgaatattcccccattacatgagcgagcactcgctgaaggcaggtgccgacatcacgccgcgcgaaggtgatgagcttgcccggctgccctacctacggacctggttccgcacccgcagcgccatcatcctgcacctcagcaacggcagcgtcagatccacttcttcccggatcccccccagctcatcttgggccccctgatggcaacccgtgacctacatcgacgagaatcgggaattccgcacattccgcctgagttctcctggaggagtacggctgctgcaaggagctggccaaccggctccgctacgcccgcactatggtggaacacagctgctgagctcacgctcggccagcaaccgtttcaaggcctcctaatagctgccctcccctccggagctggtgccctcctcactcccaccctgcattctggggcccatactggttggtcccncggtgccatgtctgcagtgtgcccnccagccccggtggctgggcagagctgcatcatccttgcaggtgggggttgctgtataagttatttttgtacactgttcgggtgtgggttctacacgccttgtccccctccccntcaaccccaccatatgaattgtacagaatatttctattgaattcggaactgtcctttccttggctttatgcacattaaacagatgtgaatatta

SEQ ID NO: 718446 - DNA, 224 bp, Homo sapiens
  misc_feature (4)..(4): n is a, c, g, or t
  misc_feature (54)..(54): n is a, c, g, or t
  misc_feature (69)..(69): n is a, c, g, or t
  misc_feature (148)..(148): n is a, c, g, or t
  misc_feature (174)..(174): n is a, c, g, or t
  misc_feature (192)..(192): n is a, c, g, or t
  misc_feature (212)..(212): n is a, c, g, or t
gctnatggacgagctggcaggcccaggcagaccgtccttggacttcccttctgnccccagcctgggagntccgacccacagatgcagccccaccccacggagctgccaggaccagacttactgactctgcggaagtctggggtcagcngaacgcactctctgccccaatgacanctacatgtggtcggcatnggagcactgccgaggggccnctgggacacagg

SEQ ID NO: 718447 - DNA, 954 bp, Homo sapiens
  misc_feature (193)..(193): n is a, c, g, or t
  misc_feature (725)..(725): n is a, c, g, or t
  misc_feature (750)..(750): n is a, c, g, or t
  misc_feature (860)..(860): n is a, c, g, or t
ctgatcaggggtggcacgaagctgtgagtctctgcttctcctactgagtggtgttcccgagcgttgtgtctcgtgtaccgttttgccacacagtggggactttcgacagcgcttgggatcaccctttggttaacggctgggggtctcttcagtagtctaactccctttatgttacacagtggttggtcccctncgcgtacatagacctgtccggcctgtgtcttacctctcccggggtcccagtcccatccgtgtgaagaggtcccccccctgaatattcccccattacatgagcgagcactcgctgaaggcaggtgccgacatcacgccgcgcgaaggtgatgagcttgcccggctgccctacctacggacctggttccgcacccgcagcgccatcatcctgcacctcagcaacggcagcgtcagatccacttcttcccggatcccccccagctcatcttgggccccctgatggcaacccgtgacctacatcgacgagaatcgggaattccgcacattccgcctgagttctcctggaggagtacggctgctgcaaggagctggccaaccggctccgctacgcccgcactatggtggaacacagctgctgagctcacgctcggccagcaaccgtttcaaggcctcctaatagctgccctcccctccggagctggtgccctcctcactcccaccctgcattctggggcccatactggttggtcccncggtgccatgtctgcagtgtgcccnccagccccggtggctgggcagagctgcatcatccttgcaggtgggggttgctggaatagtgataaatgtacattttaaaatctcaatatactttttagaaaaggagcccntcaaccccaccatatgaattgtacagaatatttctattgaattcggaactgtcctttccttggctttatgcacattaaacagatgtgaatatta

SEQ ID NO: 718448 - DNA, 920 bp, Homo sapiens
cggagtatggatatcgtcgacccacggcgctccgggcttgcatccgtcactatgggcaatgcttctaccctccaggcccccttctcccttagcctgtgttcttaaaaacctaaaacctcttcaactcacacctgacctaaaacctaaatgccttattttcttctgcaatgccacttgaccccaatacaaactcgacagtagttccaaatagccagaaaattgcactttcaatttttccatcctacactatctaaataattcttgtcataaaatgggcaagtggtctgaggtgcctgatgtccaggcattcatttacacattgatccctccctggtctctgttacccagtgcaactcatcccaaatcttccctctttccctcctgcctgtcccctcagtcccaaccccaagcgtcgctgagtctttctaatcttccttttctacagacccatctgacctctctcctcctcgccaggctgagctaggtcccaattcttcctcagacctctcctccatccagcctgtaatcctttatatcacactaccctcctcacacccggctccggtttacagtttccttacggtagactagacctcacacaactgacagcaagttcctacttaaacaacggtggctggagctaacaggcatagtcaaggtatcatgctccttttaccttaatccaaatcagaatagcgttaggcctcttattcactcaaatactaaaccccagtccagttcatggctcatatggcaagcaaccgtgagatgctttacacgcccgatgaacgctaaaaatgttcaaaaggctgtcttactctcaaaattaatatatttacccaatctgctcacagacattaacttaaactcaacaattaattccggccataacccgacactagcataatcacccgcttaaa

SEQ ID NO: 718449 - DNA, 475 bp, Homo sapiens
ataggaatccagagccaaagtatttcaggtactatctctatgacgatgacccctacaatcgtgtgtctttagccccactctctcctgacttgtgtatatgcgattgctactatcccatgtcacttgattgacagattcccctttccctgtctcaaacccaggtccgtcctcatctcattgaatggtaccaccatccattcagttgctcagggtataagccttggtgccattcttggattctcagtttgcctcatcacccacatccatgcaagccagcaaattctgttggctcctctcagtcctgactggcaatccacctttctgtaacatcaacaccctagtcaagatgatcactcttctcacataaattattgcaagagcctcttaagtggtcttcttgtttctgcttttgcccccatggttcattctccacacagcagccagaggcatcttttaagagtgtagctcaggtcac

SEQ ID NO: 718450 - DNA, 941 bp, Homo sapiens
aataggatctctctcacatgttcaaggtcgtcccagattgaggaagagtttaccaagttctcacatactagccccagtactcacatggagtgttaagctccaggcgcttgactagaggctgaggagatcatgttctacccctaggtgaaaagctggctgcattctgtgatggagttccctggagtgggcagaagctataaaagaccgagcattgggatttggatgtcctccatgtatgaacttctcgtgctctggacaattcccatgtaaggcttctcatgtcaccaagcagattgctgtgcgatgcctcctgtgatggttgacgaggtaaagtgccttagcgtttggcgtgctcgtggtttatcaacatgtggtactgccgatgggccatgcaccctcgagtatgccatgcgggctcgaacgtgtcacgcacacagggaacatcgcagtgatcgcgtcgagataatgaggtcttagtaatagtagagacaagggggaccactggtattgttgaccatgtttttcaaaacccgcaattttagtgtgtcgtaacccgcccgtcattgcaccaggggaatcctagggggatctcgttggatcgttgtctctgggtggagttttggtgggtctcacttcgccttgatggtccacgcttctgcttttcttgcgcccacaggctggtgtcgcgctcgtgggacatgtctcggggtagcgtggacgccgagaactcgatcacaagcattgggctcatgtacaggatgcaaagccgccgagaagtcgttccaggtgcacccattgtcggataaaattctgccttctggactggccacataagaaaagtctcttcatccggaaatttgtccccagccccccagatgggttcgaacaccagggcccagcttgggacggtaaacctctattgggctaatgtgggttcccct

SEQ ID NO: 718451 - DNA, 1603 bp, Homo sapiens
tcttcgtgtagtcgtggcgtgggctgcttccgaggggttcttcttggctgctcgtcgtgtcccttgtgtgggtctcccctagagggctcttggtctccccgatggttgtgccgccaggtgcgagagtgtgggctgcgctgtttcgtgttgtgcaggagcggtggttggattcttgctgcgttttatatgttgtgggttggtgggggcctccagagatcgtttgcttgttgtgcgccggttgtccctcggtgggaggtcccggagcactgtgtgttgaggggggagaggggttccagggtttttgtcctcaccccggggggttctccggagccccggttgtgtcgttggtccgggccccgtgttttcgggcgcaccctggtgatgtgggccccccggagcagttccctgggggggtcaccacagggtgtggtcgccaggaggtgggtcgacacggtctgacaccgggggggcgcgatgcaggttgtttgtgccgcgcgttggtgtttgccacagccgaacagaggtgtggcccgtgcgcacgttttgtttgcaccccacggacagtgtctcgggagtgggtgggggtcttatttgtatattggcgtgccgcggttggtgggcctcgcccgcgctgccccacttgtggcgccactctcctggtggggatgtgtcccttcccacaggtgtccacgcgtgtggggtggggccgtttactctcttgttgtagtgttctcttgtggagagagacccgttgatgtgttgctccctctcgcagtggaggggaggccctggggtgttgtccccacgcgcacacaggggtgtgatggtctgtctctgagactctctgttatcaacgaggggcgagggtcgcccccccccaccctcttgtggaggggtctttcacttctctctcgtgagtgagtaaactggttgtctccctctgggagacacacaactctgtggaagacccttctccgcgcgagaaagagagagtttgtcaccacagagaaccccgtgtgggtgagaacacccacacacacaggtgggggctccacaccacggagaacactcagagggagagggcccacaaatttttgttgtggtgggggaacaagggtgtggagcgcacaccacaggaacaataggcgcgcgccacttctattttttctctgtctgtgagagggcgcaactctcaccacaggcgcacctgtgaagctgtgagttggcccacactgtccacttggcgccctctccacaggggagtatgcgcctctgagttcgaggctcgcgcgccacagactgtggagaagctcccacagagaggacacttccgctgtaccaccgtcttcttcacacgctgttctggaacacatctcacctacactgcccaacggggccagatccgggcgctctcccaactgcccccactgagggcccccccatgccatgcacacctccgcgggctgtaatgggcccccagaccccgatgatttttaacacacacaaccttccttttgctcccccccccacaaatccctttgtaaatttcatgattggctttaaatgtaaggaaattaaggttaaatcccttcaagatttttta

SEQ ID NO: 718452 - DNA, 460 bp, Homo sapiens
atacagtgagagatgcgcattcaggtgggatctgcgcttcttcctccaacaatatggacgagatatattttggtcggcgagtgtgtcagctatcctggtctctttagtttatgctcagcacagttgccagtatcgatgggaggcgcgggttgtacacaggcttaactccaagactgtgttcgggagtccttggcactgtggtccatggtaaagtttgacagcattaccaggagagtgacaagggtgaggagttaggacctggcaatgtacagaaagaagtctcatcttcctttgaccacgttatcacggagacaactcgcgagctgatcgcacgttctgctgctaccctcatcacacatcccttccatgtgatcactctgagatctatggtacagtccatgggaagagaatccaagtcctgtggcactatcgagcatccataatacccatctatcgggaa

SEQ ID NO: 718453 - DNA, 1042 bp, Homo sapiens
  misc_feature (601)..(601): n is a, c, g, or t
  misc_feature (606)..(606): n is a, c, g, or t
  misc_feature (632)..(632): n is a, c, g, or t
  misc_feature (642)..(642): n is a, c, g, or t
  misc_feature (645)..(645): n is a, c, g, or t
  misc_feature (773)..(773): n is a, c, g, or t
  misc_feature (778)..(778): n is a, c, g, or t
  misc_feature (783)..(783): n is a, c, g, or t
  misc_feature (802)..(802): n is a, c, g, or t
  misc_feature (817)..(817): n is a, c, g, or t
  misc_feature (824)..(825): n is a, c, g, or t
  misc_feature (828)..(828): n is a, c, g, or t
  misc_feature (834)..(835): n is a, c, g, or t
  misc_feature (844)..(844): n is a, c, g, or t
  misc_feature (884)..(884): n is a, c, g, or t
  misc_feature (915)..(915): n is a, c, g, or t
  misc_feature (917)..(917): n is a, c, g, or t
gggcatgatgaggacctatgcacattaggcttgaggctgaattccggaggaccccctgaaccaaggcgccttctaggtactcatcatctctgaccctaggacccgatgccaaaggcccttcaatcatcccttgaacagttctcggagactcgagatcaggaaaaggggtccctgtgaaggtgaccaacgtcaaggatgcaccacccaccagacctccttggagctcttcatgtacctggtacgaagtcgcgggcaagcatggcagtgggccgtattgacatgctgtggagaaccgctctcatgtggaactcgaagtctccgagcgtatgctatcgagaccctcagtcaggcagccatcctgttcaccatagctcatgtgtagaccatcgagtgaccttcacccatggaccagggaagctgcgctagaaatccaaactaaggtcctgggctctgaaatattgactgagctgcgctgtatactcggttttctggcacacaccctgagtgctgaactttgtcagccatctgcatcgaccaagctcccaggagcgtagtggaacggtgaaagctgcaggtgtccagtcctcaagggccaggtgtncatcntcggccgggagtccccactgtctctntacaatgagnagntggtgagcatgaacgtgcagggtgattatgagccaactgatgccaccgggttcatcaacatcaattccctcaggctgaaggaatatcatcgtctccagagcaaggtcactgccaaatagacccgtgtncaatnagganctggggcctcctcaatttncagatcccccaagtncaggcgnnaantgttgnnataatttgnaattgtgacttgttctccccggctggcagagtagtggggntgccaggccccagctttgttcctggtccccntnaagccggcaaacgttgtcatctaaggtaagggtgggggtcacctccggtgggcagctataaaaatgccaattaaaagagacgtctagtcttttttttctaaaaaaccttaaataaattatagaca

SEQ ID NO: 718454 - DNA, 369 bp, Homo sapiens
  misc_feature (100)..(100): n is a, c, g, or t
  misc_feature (105)..(105): n is a, c, g, or t
  misc_feature (110)..(110): n is a, c, g, or t
  misc_feature (129)..(129): n is a, c, g, or t
  misc_feature (144)..(144): n is a, c, g, or t
  misc_feature (151)..(152): n is a, c, g, or t
  misc_feature (155)..(155): n is a, c, g, or t
  misc_feature (161)..(162): n is a, c, g, or t
  misc_feature (171)..(171): n is a, c, g, or t
  misc_feature (211)..(211): n is a, c, g, or t
  misc_feature (242)..(242): n is a, c, g, or t
  misc_feature (244)..(244): n is a, c, g, or t
tccctcagggccctgacgggctttcagagcctccaggtgtaaagggctgaaggaatatcatcgtctccagagcaaggtcactgccaaatagacccgtgtncaatnagganctggggcctcctcaatttncagatcccccaagtncaggcgnnaantgttgnnataatttgnaattgtgacttgttctccccggctggcagagtagtggggntgccaggccccagctttgttcctggtccccntnaagccggcaaacgttgtcatctaaggtaagggtgggggtcacctccggtgggcagctataaaaatgccaattaaaagagacgtctagtcttttttttctaaaaaaccttaaataaattatagaca

SEQ ID NO: 718455 - DNA, 511 bp, Homo sapiens
  misc_feature (42)..(42): n is a, c, g, or t
  misc_feature (80)..(80): n is a, c, g, or t
  misc_feature (100)..(101): n is a, c, g, or t
  misc_feature (136)..(136): n is a, c, g, or t
  misc_feature (142)..(142): n is a, c, g, or t
  misc_feature (186)..(186): n is a, c, g, or t
  misc_feature (276)..(276): n is a, c, g, or t
  misc_feature (380)..(382): n is a, c, g, or t
  misc_feature (385)..(385): n is a, c, g, or t
  misc_feature (406)..(406): n is a, c, g, or t
  misc_feature (420)..(420): n is a, c, g, or t
  misc_feature (457)..(457): n is a, c, g, or t
cgtcacttctaagcgcgcaggggtggccaatctccactcccncgcggactctgcctttcttctagaagttagtataggcntcgtgtgggtagggaccacnntgaggcggtatgggaaggggaagtcggttcacttncgcgcnatctccgcagaatatgactagaggtggggttggcgccctccccnggctctccgtgcgctacagggcgtagcccgagtctccagggcaagggccagatgccctgggacttagctcggtggagggagtgtatgggnatggggtgcggcgtgctggttctggcggctgcgagagccgctgccgccttttctgggcggcagttggaatacagaagctaagctcaccaaaatcctattggttnnngtntctagtgaatttcccagtatnatttttagagtagnctaccaaactaccctttcttaattaaaaattcattanaccactaaaacccctcccatgcactttttcttgcaaatcagatatttgtataaa

SEQ ID NO: 718456 - DNA, 203 bp, Homo sapiens
cgttcgtgcttaacgggatcctgtaactatccatatgatgctatatcacgatgtccatttcctctagtctcagctttcctctgcctgctgtctgatgcgcgctttgatagtcgttgttcagtatcatattgtctgaccggcgggagctggcgattccagctctatggtcacaggcccatcattctgaatgtgcaccagcacga

SEQ ID NO: 718457 - DNA, 174 bp, Homo sapiens
cgtcacaacgaatggctgtgagttacgactgaggatcaggatgatggatgccaatgatgaggccagcgtggaagggtacccccgtttgttctcagctgcactgtcatctgtagaagctccattatcttctagatgtagtgctatcttggtatcctcttctgtacgggacggttg

SEQ ID NO: 718458 - DNA, 1163 bp, Homo sapiens
  misc_feature (163)..(163): n is a, c, g, or t
  misc_feature (592)..(592): n is a, c, g, or t
tagggactaccgcaccttgtttgtgtatcaaaacgactaaagggtgccaccacaatggcgatatgaacaacatcttattgtgttgtgtgtttggggactatggatatgatttgatgaaaggccggcacaaaaatctatcctcgcccccaacatttctggaggncgaccaaacattcaacatgtacgtgcagagatgtgtaggcagcgcctcgtgccgctcatatagtctcttgtagtggggagcggagagcaactcatcctactatggagtgagcaaaatagcgctactcggcggcttcttgtgttgtcgccaccaccgtgttcgccgagtgagaaatcgtactacagatgtatgcgccgtctccaactgttcttgtacatcatctgttatgagggaaaacattggctcttctgttcctacacagcagccaccactgtgatgactacgtgggagggcccgcccaagcacaacaataagctgctgctgtaggtgcgtgcaacaatgctgcgggtaaatatgtgttgcggcacaacagccgcgtgccatcatggtgcgcaaacaaatactgcggagcagaggagcagaacatanacgcgtatggttcacccaacaagtgcgtctcgatcgcgcacgtgtgtgttcggggccacacacacccaaataggggcgcaccattgccgcgctctgtgtgtggagcgatgtgcacggtgtctatctgtgcacataagccacacgagaggggtatttccacattttgtgccaaattggagctgcgccaatatctggggcacacagatggacacgttgctgagatctattatcacacacattgggccgagaaatctgtgaggcccagtggcacccgacggagatcctccgcagacctttgcttgttaaatatgtcggttcttcctggcatagcgcgtgcccttccacgcattcctggcgccacaacaccctcgcagtaagcggaacatattttccaaaccacacttttatattccatcacctctttctacctatcaccacattcaccatataacaggaaacacatggggtcacattttcaaaaacttgaactaatttttaataaaaaaagataaaaaataatcgtcgatgcagtgaactcagggtccgaaaaagtatagtcttccctttttct

SEQ ID NO: 718459 - DNA, 132 bp, Homo sapiens
atatcgcccaacaccccattataaagtaagctcctttaaatatttgaacatggcaagaaggacataatttttcaaaaagagagtgagctccaagcaatccgtgactgtctgtcttattcatggtgtgtcgtg

SEQ ID NO: 718460 - DNA, 317 bp, Homo sapiens
acagtttcactatgcaagctactaattctccccacagctgtccagatttggcctttccaacattagttgccatttacaaatgtgtacactgattcaccatcctctctgtggataaatgtatgagtcctcctagggtctgcccattagtgcattagttgacaattattaggttgatgcaaaagtaattgcagtttttgtcattaaactaatggcaaaaacagcaattacttttccaacaacctaatacttggcctgcagaatgcacaatactagatcttcatccaaaatatcttttgagacattctcttaaaagttaa

SEQ ID NO: 718461 - DNA, 244 bp, Homo sapiens
  misc_feature (37)..(37): n is a, c, g, or t
ggtaacaaaaataagcaatggggaaaggactctctgntcaataaatggtgttggggtagctgggtggtcatatacagaagactgaaactgggccccttccatacagcatatacaaaaatcaactcaagatgaattaaagactcaaatgtaaaacctaaaacctcaaagataacctaggagataccattctgatttgacttttgtgcatttttggctggagtatctcgtatagatttcttcactg

SEQ ID NO: 718462 - DNA, 908 bp, Homo sapiens
gttcttccgccgctccgccgtcgcgtttcttgtgccggtcgcaaggtgcagacgagatctggcctgcgcgtggtctacttgacacattgcgctccggtcactgtgcatagagctggttttttggcttggggacagatcgctccgccggagccgtagtgtccattccactcggtcggggcgaccccaagacgaccacgtgggcgtcactggtgtggctactgtggaccgatgaagggacatccctacgatgggctgatagaggcctcgagagctagaggacggtgatgcatctctgaggccctgaagagtacacccaatttgaagcaatggacaagtcgtacactctatagcttgtgtgaacggaacagtggtatgcacaagaatgctcgtggcgaactcgaattacccttgtgctgatcaaatcgcacgactgtcggcggattgggcactcccgggtaggggaaatcgatacccaagggttggctggtcgtggacctggagggcctcgcattggtaaagccgccaaagggctcataaaaatgggaatgaatgaacacgaagtgtgaaaccttccaagcaactataattcaggtatcttggaggaatccccttttgctagaccaaacccaacactagtggtcgccaagggggtatagcggaatgggggctcccaatgtcccccgaggcggccaccgggaatggacaaattggggtaaacttgcattccgattaagcgcacccccattgctgaagtgggcgggccaacaacaaacaatgatggccatatattgtattccacgtgtgaatcccttccttgtggatcaagaaaccgggggggttctccaatcactacacaaccgggaatggcctcgtaagttctattactagacggtcgctaagagcagcga

SEQ ID NO: 718463 - DNA, 974 bp, Homo sapiens
atgcaggctggtacctggtcctgagagtttatggatccgaagccgatgccgagctggcgggcggcagcagcgcgcggagtgctggctggcttggcgcggtagcccatggtggctccgcttgtccggatggtgagtgccccagtgtgctggatgaagctggctgcatgcaccatgtcatcatgtgtctctatgccatgcccagcagcaacctgggccgacccccaggatgagctggggtggcaggggcatgcagctagcaagcggaaatgccagaaggccctgtgaggccctgctgtgggcctctcatccttgagcatccacctgggcatggagtccgttcgattgtggtcaccgagtgtgaagccggtgcttgtcgctgtaggaccttcggctttgggagcaggtgacctgtgaccccgtgggacggccgattggcacagcagagtgtcgccgcgcgttgaacgacccttccgtgggtacaccaagtggccactgtggccccatagtcgtcgtcccgggtcggccacacgtccatggatcaatccgtgaccaaaggaaggccgtgtgactccaccaatgagggcttgtttgccttgggacaagacccggggttgaggacagggcaccattgggtaccaaattgaaatccagggtatccgagccgttggcggaattcgttgggcggcccgggatacgcccgcattggccgcgccgttaagctttcgagctccctgtttcggaggacgctttcgcgccacctggagaaacgagtgatccccagtttccaggggagacgcagatcagtggatgagagatttagggccacacaccacaaggagagacagagtgggcaccacgggatatcgtgcatggataaggtgacaaagagggtaacgattacgagagcgggcaaaagactaggattcccgagttccacgaaagtaacagaaacagtggaggagagttaacaattg

SEQ ID NO: 718464 - DNA, 1422 bp, Homo sapiens
tgttagtcccacatgcgacagggtgggtggacgcggcagtcggtggtcccctgagaagtttgtgtttgacgcactgagagattcgcatcatataatcatgcacatagtagctctcgggagtgatcacgggtgcgagcctgcgcatttagctgatcctctggtattaaattgtgtgaggtactgtttttgagctagaagaagcactggcagtgttgtgcaaccaacgtgtatgggcacacggaagggggtgtcttccaaaactctccgctggtgccttcgagaggttatttctccgcctctatgcctgctaatatgcttgtgcgcacaggtgggcgtggcggagtttatcaccacggcggcggtgtgatggctcaccgtcatatagtattgtggggcccctcttgcgcagaatttcggttgttctaagacgttttgaaaacgggatgtttgtggctatggtaaggatgtttattgctcccgagtctgaaagtgtgcttaccgatctcggggaaaaaatgtcgggcgcacagtatagttggagagtgttcacaggggagagggggggggatagtttagagttagcccttggttccaagaagtagtgcttgttgggagacaagtagggtgcgtgtgtcgccacccgcgatggtgagtgtgctcgtttgaagggtttgtgtggaggtgtctaagatagcgcgaagtgttgtttgcatgggagaagggggtttagtcttgtcgtgtttatatcgactatggtctatatagactggagtgcgagactgttatgccccatcgggaaattgggggggttcccacggttctccaagtggagcccttttgggggggtatccaaagtttggtaaaactctctatagaaaagtgttgtaatctacaactttttgggtgggacaacgtttgtggggcgatgatataaggtgcacatttgtgttgacctgtgttcgagagacgtgcatgttttcaattggccacgtggtttggggttatatcaatataagatgatttcaaaggagagagttatattgtagtaaaataccacctgcccttcttggggggtgcactgtgaataagaaagaggagtgaggagaaatagagtgagaaaaggtgtgcctgagaagatatcgggaggagcacggctcttcttaccttgtccacaagaaaaatgaaagcggattggaccgaggctgggaaacctcctttagccacgagtgctgagctggcacctggtggtgttttggtttcgtagcacgtatccacgcacaatagctgaggcggctgggtggtttcagtcttgagaaattatttttggtgccttcatgtttcactgcaatctttgtgtaaatttttcaaagatttgaagttaaatcaattaaattcatttttaccaaagaagaaaataaaaaa

SEQ ID NO: 718465 - DNA, 619 bp, Homo sapiens
tatgaggccgccaccgcagaccccggacggggtgcgcctgaccggcaactgcgctggacccgggcctgggaaagaccgagtccagtccccatcgtcggacgagtagggtgtcaccaacgaagccatccattaacagtggtctcacttccttcatcaacgagacatggacaagcatgacgccatagagaagaatccagcgccaatggaatgagagtgccgaggcccgacctgcgagtagctgatggagaccatgcaccgcatgagccacctcccacccgactttgagggccgccagacggtcagtcctatgttggctgcagaccctgagcggcatgtcggcgtcagatgagctggacgactcacaggtgcgtcagtattgctgtatcgacctgtgagtcaggcgctgagcgaacgcctttcaagccgcttcctgcatgcctgagtcccggggccactaggcgccttgtctacagaatgggcagagtctgaggcgatggctcctggtcccctgtccgccacacaggccgtggtcatccacacaatttcactgtctgcagcttgtctgtctggtgtctgtcctttttggctgtcagaactttgggggccgggcccctcccca

SEQ ID NO: 718466 - DNA, 1686 bp, Homo sapiens
caaacacatacaggaagcgatcaaacctaccaaggcagtctcacttctcaatgactggactgtgtgggtactctgctccagacatgcgtggcctcagactcatcatgataccagttgagctgctactttgctacctcctgctgcaccctgtggatgccacttcatatggaaagcagacaaatgtcttgatgcactttcccttgtccttggaatcccagacaccctcctcagaccccttgtcctgccaatttctgcacccaaagtcactgcctggtttcagccacatggcccctctacccaagttcttggtaagcctggctctaaggaatgccctggaggaagctggttgtcaggctgatgtttgggctctacagctacagctctaccgccagggtggtgtgaatgctacacaggtcctcatccagcatcttcgagggctccagaaaggcagaagcacagagaggaacgtgtcagtggaagccctggcctctgctctgcagctgttagccagggagcagcaaagcacaggaagggtcgggcgctccctcccgacagaggactgtgagaatgagaaggagcaagctgtgcacaatgtagtccagctgctgccaggagtgggaaccttctacaacctgggcacagctttgtattatgctactcaaaactgcctgggcaaggccagggaacgaggccgagatggggccatagatctgggatatgaccttctgatgaccatggctgggatgtcaggggggcctatgggtctagcgatcagtgctgcacttaaacctgcattaaggtctggggttcagcagttgatccagtattaccaagatcagaaagacgcaaacatctctcagccggagaccaccaaggagggtttgagggccatctcagatgtgagtgacttggaagaaacaactactctggcttctttcatatcagaagtagtaagttcagctccctactgggggtgggccataatcaagagctatgacttagatcctggggctgggagtcttgagatataaaagaatgtggtaaccacagaattaataactgtctaccctgacaagctatatacatgtcttcaaaattttaatctgatttatccaggaggaaggctgtacagtaaaacgtaagaacgtaaatgtttgggtgttgaagtcacagggtttggtttcgaatctaggctccacttgttagagcctcggtgatcactgaatagtaacttctttcttgaactaagatcagttttgaagtttctaaaggagatagaatgattttaacctcaatgagttgccctgtaaatttaaaatgatacaatgaatctaaaatgcttatcacagtactttcaataaatagctattagccaggtgcggtggctcacgcctgtaatcccagcactgtgagaggctgaggcgggatgatcacctgaggtcaggagttcaagatcagcctgcgcaacatggcgaaaccccgtctctacaataaatagcaaaaaattatcctggcggagttatgcacgcttgtagtcccaactacctgggaggctgaggcgggagaatcacctgagcctgggaggctgaggcgggagaatcacctgagcctgggaggtcgaggctgcagcgagccgagatcgcgccgctgcattccagcctgggtgacagagcgagaccatgtctc

SEQ ID NO: 718467 - DNA, 406 bp, Homo sapiens
atgagagcaaaggtgttcagatactttgtctggagagaggagcctgtttgtgatgagacaagacatgtgtgtgccgtggccaagaatcagggctgcgaacatatcagctagtctgggaatttggctatttaggggtgagttaacagagcatctactgtattgtcaaattacctggagtgagatagctttgtttctgaaaccctaaagaataccactctcagtctgtagggatacctgacctcatgggaagcttactttgaggagggaatgtgggaagtattgttagaataatgccctattcccttatcagtaatttctgccttagcagagatgggcattagtctgacataaagcaatgaaaatgctacagtgccttttcaattttttttaaagagagacttagcaa

SEQ ID NO: 718468 - DNA, 438 bp, Homo sapiens
gaccaaacaaacaaacaaaacacaaataaacaaacaaacaaagaatagctttctcatgacattgactactctgcctctgagcctctatttatagaccttcaatccatccaaccttactcagattgtgctaaaaggaaacagggcttctaaaagagtctatcgggctgggcatggtggctcatgcatgtaatcccagcattttgggaggctgaggtgggcggattacttgaggtcaggagttcaagaccagcctggctaacatggtgaaaccagtctctagagaaatacaaaaattagctgatcatggtgtgggtacctgtaatcttagctacttgggaggctgaggcaggagaattgcttgaatccagaaggcggaggttgcagtgagccgaaatcatgccactgcactccagcctgggtgacagagcaagactccat

SEQ ID NO: 718469 - DNA, 1032 bp, Homo sapiens
  misc_feature (1032)..(1032): n is a, c, g, or t
ccacgacgtccggtcggaggggccccctcaaggtgcatcctggcgctacagctggagtcaccagtgtggttctcctctgacttcacacatgcgtacaccctatctccatccagccgttctgagcgcttggggcttggcagttgcccttcgatcgagcatctttgctcatggcttctaagtttcctgggtatgagcatacgagatattggccgtatgagcgaaccagtggatggtcggaccatcgatggtcccaacgatggtcctcaccaacggtgagtacagaccacgctgggagcacacgagccaccaagcagggaagcaacaaaagacggcaacgacgtagcatggacccgtcgacctgctgtgggagaagttcccgttgcccaactactcaagtctcgccactaatccacgcacttgtacatctcgcctctctatcccgtcgtacaagatcttcgctatgggtaagaacgcgccatgtgggacacgtagggggcagcgcggccaatcagtggtagcactgctacccttatggtttcaattaggtagctccaattcctagagtggacataagttacgcccattgataggcctcccaaaaacgccagaaaacatagagagagagagagcacagagcaacgcgtgtgcgagaggggcaccgccactctgtagagaagagtgtttctcacactagtgcgaaaaggacgggccccacaagtgacgccatagtacaacgcggccagattcagccgcaacaaaaggatatagagtcggtgtggggctaccccaaaccagggggtgggggcgccacccaataataataaagacgaggaagcgcctcgagaagtgagataaaacaataggaggcgccaataacagcggccacatactagtggaggcacacggcgcgaacacggtagtagcacaaccaacaggcgcggaacaccgacggcgtacgaacgcacatggggggaggcaaagagagacaagcaggcggccataacgcggcgcgataagggacaggagaacgcn

SEQ ID NO: 718470 - DNA, 225 bp, Homo sapiens
  misc_feature (51)..(51): n is a, c, g, or t
  misc_feature (63)..(63): n is a, c, g, or t
  misc_feature (97)..(97): n is a, c, g, or t
  misc_feature (207)..(207): n is a, c, g, or t
gcgaaagctctataatcacttgcgcccgctcataaggggtatggccatggncttaggtttatnagtatagttgggtggtctggtgtaaattgagtgnaggacaggagctccgagagaggtatagtgtgtggcaattaaaaatgattaagggatacctagtattaagagatcaggtctcgtcctttagtggttgtgtatgggttatcnatttgttttgaggttagg

SEQ ID NO: 718471 - DNA, 131 bp, Homo sapiens
ttgctccgggactcattcccttcccccccccctattttaaagttttatttgggtcgtctgtatcaatttagaccgagataaattaagccaaagaaagtaaaataaatcgaaataaaatataggaatagcta

SEQ ID NO: 718472 - DNA, 191 bp, Homo sapiens
  misc_feature (12)..(12): n is a, c, g, or t
  misc_feature (20)..(20): n is a, c, g, or t
cattttgagcanagtctgtnagcagtgcccttcctctcccacttgtcaagatttcccctttagcgtgcttgctcctcaccccacctgtacctccctatgtccccatccttgcccagtctcgacgtgcaccaagggcacaagagtggcagtccagatctgccacttgttttaataaagccttctctctcacc

SEQ ID NO: 718473 - DNA, 120 bp, Homo sapiens
gcacagaggacgtgcacctccctgccctcctcctccctgggccttcaccgcaccccatttgcttaagtgctcggaaccccgtcacctaattaaagtttttcggcttcctcagagaaatga

SEQ ID NO: 718474 - DNA, 233 bp, Homo sapiens
cgatcaacaaggcatctcaagagacttgcgttgatgatacagtcctctggcaacacagtgcttctcctcatactgtgcatgcagcactccttcccagagcctggcagattgtatcttgacctcattctggccatcttggcactggaactcatctgttccctgatatgtctcctcatttacacagtgaaaatccggagatttaataaagctaaaccagagcctgatatacttga

SEQ ID NO: 718475 - DNA, 759 bp, Homo sapiens
  misc_feature (394)..(394): n is a, c, g, or t
  misc_feature (683)..(684): n is a, c, g, or t
gctgttctagaggatcccatagcgacgacgtacattacaggtgtgagcatgcacctggactgggtcttcatttctgaaggctctgatcactcaggaaattacaagtgttttaggagctctgtgtaaggaaccagacaaagaccaactatctattggacaaagaccatatatgtatttctcatcacatgctgtgttttatgtttctcctcctcatgcaacacagtgcttctcctcatactgtgcatgcagcactccttcccagagcctggcagattgtatcttgacctcattctggccatcttggcactggaactcatctgttccctgatatgtctcctcatttacacaggtgagaattacaacgagcctgttcttataggaacttcgaactgcntcctttcctcccagtttaaagtatagcccattagcgacaaggaagttctctgtgtatctgagtggtgaccacatgcagacttctttaatttcaaaccaacaggaaggtacagccaccaccagtgagaccccattcctttaagattgtgtcattaataaatttttgttaatgcaagtgaaacttttccattaaaacaagacacaaactttttgggctgggaatggtggctcaagcctgtaatcccagctctttgggaggatgaggcaggaggatcacttgagctctgganntcagaccagcctggacaactgatgactccatctctacaaaaaatacaaaaaagtagccacgtacgtgtcgctatg

SEQ ID NO: 718476 - DNA, 1299 bp, Homo sapiens
attctagaggccgaggcgggcggatcaccaggtcaggagatcgagaccatcctggctaacacagtgaaaccccgtctctactaaaaatacaaaaaaaaaaaaaaaaaaaaaatttggcgggggggggggggtgagcccttattggttcccagttactccaaaaaaaaaaaaaaaaaaaaaaaaaaaggccaaaaaggggggaacaagggggttattattaataaccacagatggaggaaaattgttaaggagggcgggggttgtgggacatctgttttacaaaaacttataagagggagaattttcaacacagatataatgatgagggatgagggacgggagactaatgtgtagaataacaagatttgttgcagcaaacaccgggaggaagaaatagacccccctctataaggggaggcgggaggcgagacaacaaaagtcttcctcacacaacaagcggggggccacttcatgttgtctacaaagcttttgcgcaccacaaatgtgggagcaacaaagacgaagcgataacaaagcggcggtacacaaaaaaacagcaggggatgacaaaccccccacgtggtgggcagatgggaagataccccaactgtgaaagcgagatcacacaactcctataaaagcagagaacaaatgtcttagcgacagggagagaagagggcgaaccaatatgcgacggaagagcacaccacgtaatgtgggcaatcagggtgggggcgacgacatgcatatcacaccaaactggggggggcccaaataaaaagcgtctctcccacaaacgaggggctgcacacaggaagaaacgactgttaacaacactgctgagtaaacgcgggaggagaagtgagggggagaccaccccgcgggtagtacaccgacgacaacttgtgagacgaagcgcgacagtcggcgggcagcaccaaaagaggcgtagacagtagctacgacaaccacgaccgtgggccacgagtgtggtggaccaccccgcgcgggttcaagtagaagaccaacaacaacttcagaccgcgaagatggggggacgcacccacagggagtgcgcaacaaaaatcggcggcgcggcggcggcaacaaacagtcgtggcaccagtgtcacgaacagtagtggtgtgaggcacacaatactgcgccgaaccagtccccccgccggggtgggcaacaaacctcggcagaaaaagaaacaaacaaaccaacacagtgggaggcggccgcgacgaagctcgtaacactacggtgacagcagcgcagacacagacgacagtg

SEQ ID NO: 718477 - DNA, 1188 bp, Homo sapiens
  misc_feature (1188)..(1188): n is a, c, g, or t
gctgcgggatgctgaggcgctggggcagaggctcggagaggtaggctgcgatgggggaatgtctgaggtctgagggaggagtgctgctgagcgaatgtggtacgtatcgaggtcctgagaccaagaggggatcgcgtggtgcgtgaatgcgtgcatgtggcgtatgtttggcataattagctattatggatcaaggccagccaatgaagcctcaccgaatccgcatgactcataatttgcatgctcaatctatggtctctaccggaaaaatggaatatcgtatcagccctcacgagaagccaatgctgaggagatgaccaagttacgcacagcgatgacgtacacttaaattcttgcgctccatccgtccagataacatgtcggagtacagacaagcagatgcagagattcaagcgttggtgaggactgtccagtattcgatggtgctgtttgagttctgtcagttgtctactggtggttctgtggcaagtgctgtgaaacttaataagcagcagacggacatcgctgtgcaattgggctgggggcctgcacatgcaaagaagtccgaggcatctggcttctgttacgtcaatgatatcggtcttggccatccttggaactgctaaagtatcaccagagggtgctgtacattgacttgactattcacaatggtgacggcgttggaaagagggccttctacgccaaggaccgggtcattgaattgtgtcctctcatacaggatatgggcgacgatctttccccaggatcttggggacctacggggaaatcgaggctgcgcaaacgggcaagttttacgccgcgtaaaacaaccggaacggaaacggctttgtgacaagatccatcatgagcaccttgtaagggcgctatatccaatatgagcgaagtattcacgccaaagggaggagctacaacagaggaggcacaagacaccactctcgggggaatagtgagaagatgcacagcacaaccatcgagcagaccacacgaggtgtatactcttattgacacgagccgcctagattatgggagcggccaccacacataactgagggacataaaatggagcatgaataatcatcagacaccatactaaagtgaacccgctcaccggacagagacgattcccccgtgagacactaccagactactttcttgtattaccgatan

SEQ ID NO: 718478 - DNA, 236 bp, Homo sapiens
aatagagcacacacatggtcacccaacgaagcaaggcgtccctgtaaactgtgcggctgactcattggggacaacaccagggctgacctgagaaaagggcaaccagtactcccagcgatgacttcgggtcggcagaaggaaaagacctgagcgctaagagcatgagatacgagtcaggaccatccttaggggaaaacgactgacaagagagagggagcgcaggccgagccgcaacg

SEQ ID NO: 718479 - DNA, 962 bp, Homo sapiens
gggtcggggggcggggaaagggaggcccactgatactgtgtatctcgttgttaagaccctcaagtaacaggatcatgttatcatccatccaatcagtgactgcgtatactagttgatttcgaacagttcacattatgatgaaacactctcagagaaatgaggaatagaagttatgtttcctcaaccacaaataacaggccatcatgaacaaaaggcaaagctaagcatgatactgaataaggaaaagcgtgaaagcttttcatctctgagatccggaacaagaacataatcatccccacattgcagacccttcttattcaacaatagatactggaagtcctagccaaaggacattatgccacgaggtagaaaatagaactcaatacctacgtaaggcaacagagacgcaagttcgaaatgtgtctctggatatgtgagacagacactcaaatcttcatattgatggaaaaactcttaaactggtaggtcacgaaaaaactaaaataaaaaacgtaatacaacaaaatactgttaaacttgcagaaaatcagcagacgtaagcagactgactgtattgcttgatagaacaaaatctatgacaacatacagttgtaaaatcccaaatcaataactaacaaaaaatgaagtaattagtggaagtgaagacataatcatagagtgagcgacttacacatgcaccccgagaaagagcgacaagcagcgcaaaaccgccacaggaaatcatgctccagagatccagagacatatcaagcaacaggacaagagagagaaaaaggagaagcccaccacaacagcaagcggagaagtggaagcgaggtacagaatgaaaagacgaacaacagaacaaaccaagaagagacaagacacatagaaggtaacaacagcaaaaaaacaacaaaaaaaagaagacaaaagaaagaggcgcacaaggaagagaacat

SEQ ID NO: 718480 - DNA, 87 bp, Homo sapiens
tccaatcacacttggtggaaaaacatttccagggactcaaaattccaaaagggtggtcaaattcgggaagtaagcatttccgtcttt

SEQ ID NO: 718481 - DNA, 308 bp, Homo sapiens
gaatgttggggatatccctggatctactctgatcatcaaccaggacccactgggataattctcagcaatattggaatattactcgactctgtgacgtaggcgatcagagattcgcaatgagtcctctgcgtcataagtagcgatcaatatctagtgtaaagttcagactgtgtcaggcaaatcgcagagatcatctcagttgactaagcaacgtaaggagagcagtgttgagggggcagagaactcagggggtccttgggaaagcaaaggtcatataaaattactgcaggtacttacctctccttctg

SEQ ID NO: 718482 - DNA, 117 bp, Homo sapiens
ttggaagcatgcaggaaatgcctcctacattctgtcgcccaccaagactaagatctttgctgcatgtctgactgacagagctgtaagataataaattcgtgtcacgactttgtgatt

SEQ ID NO: 718483 - DNA, 197 bp, Homo sapiens
atctttattagggtgtagttggtgcaatgcttcgttgtatttagtcagcgtttacaagactaggtatggatgtcagagtgccccaagctggcgttcttgtcccttcctgccccacaagctccttttcctgaatttcctacctaaatattatccatatgcctagtctctgaaactcaaaacttggaccaccctcctgt

SEQ ID NO: 718484 - DNA, 110 bp, Homo sapiens
taagcggtaccatcattacccgattgcacacgcggtgggagagccggggagacggtgtagggtggggagaggtgcgaggttggggagaagcgactcttccggacaaggcg

SEQ ID NO: 718485 - DNA, 311 bp, Homo sapiens
tacttttccacagcggatgatcatattctttctacgtatagtggaaatacaaaacgtaagcgtttaaaccaaggtgaaattatgctcttaaacattaagagagatcttatttcttttggcttagccaatcaataaatattcactatatattccatggagagcatcataatacgtatgcctctgcaacgctacagaaatctataactaagttactcaatctttcattaggccatcagccacacaagtcagtatttctaagctcttctacagaggtactcccagcactacaggagacgtttatatgccctgtg

SEQ ID NO: 718486 - DNA, 325 bp, Homo sapiens
gacgagggctgcagcggtatatctgcattgaagggttgccagctcactcgcttatctttggtcccagtttgatctgacagtccgcgtctctactgacgatcttatcaggttcatttatggaggagatggcttaaatcctgctgctatagagggaccttacgacactttggggtttaacaaggttctgggcaacattagcccatccttcccgtgtcccagtcagcctgctcacaggaacacccactggatcctgacaacagactccatcatggtgaagagtgagttcctctgctgccaggacagtttcctgcacgaaataaccaca

SEQ ID NO: 718487 - DNA, 404 bp, Homo sapiens
ccttttaaattatttcacttattgaacagatattagtgaacttctaggtgctgaggaaacaacaaagagcaaagcaaagtccctgtcccccaggagttcgcgtttaccggggaagaaagataagtcagtccaatggccccttgtgaggacatggagcagttagaggtttggtttgcaggtagggtggtgccacgatgctagcgtctgtcacgccattagagcctgtggtagtgaatagccaccttgtgggtgtgtgagccctcattatgccagcttgttccacccctctttcatcacctttcggtatggtggaaataacccccgtccccaagataacagcataggtttttttcatgttgcagataaaagctttagccactttacaaaaggtaaaatgtgcttaa

SEQ ID NO: 718488 - DNA, 103 bp, Homo sapiens
ctgtacccatgaacaaaaacaatctcatagtgatatgatgtaacctctacctcccaggttcaatgctgattctccatgcctcagcctccctgatgttgctttg

SEQ ID NO: 718489 - DNA, 808 bp, Homo sapiens
tcttgccgccagaagacagggtgtcgtgaaaacttaccccgtaagacgtccatactcatgttgacaaggacgaagactcatatcaacattgtcgtctacttggagagcgtagatacgcgcgcgaaggtccaccagtacgtgggccatctgagtctataaatgcggatgcgccatcgtaccaacagaacgcatcgagaagaatctggacgaaacggagcgcgagcgtgagtagatgggtacaccgtggcttccttctcacaggataatgcacgtgaggttcgtaggcaatagaacgtcgaaagcctgaggcgtgcaacgtggtgctcaccacttgatagtctcgcttgtttggaaccgtttgactatgccagacaaggtactaatgtgactactcaatcgagtgcgcccaggaacaccacgagaacttgtgtcataacaacatgacttagcagggcaacatgtctcagcgtttgacctgtgactgtcctgaattggttgctgctggatgattggctgacacttgtgatagctggctagtctccagagaatggggcgataagcctagtagtcagtgtgcctcttcatggacttagcatcactgggtgatgaaggagaaccgtaattgtcgggtgttaccaagagagtggacttccacttgagccaccctacatgtccagaagagagtactgacggaacattgctgaacggagagtcatcacttacgattctgacaattggggtacaaccccggacgacacgtagccattgatgccaaattcgtggttggaatggtgacaacttgcgtgga

SEQ ID NO: 718490 - DNA, 4450 bp, Homo sapiens
aatgctgacttctctacatgggggacaagtggatctcagggactatctacacaaagttctgcttatagtagcagttatggctatccacctagttctcttgggagagctattactgatggacaggctggatttggcaatgatactttgagtaaggtgcctggcattagcagtattgagcaaggcatgactggactgaaaattggtggtgacctgacagctgcagtgacaaaaactgtaggtacagctttgagcagcagtggtatgactagcattgcaaccaatagtgtgcccccagttagcagtgcagcacctaaaccaacctcctgggctgccattgccagaaagcctgccaaacctcaaccgaaacttaaacccaagggcaatgtgggaattgggggttctgctgtaccaccacctcctataaaacacaacatgaatattggaacttgggatgaaaaagggtcagtggtaaaggctccaccaacccaaccagttctgcctcctcaaactataatccagcagcctcagccattaattcaaccaccaccattggtgcaaagccaactgcctcaacagcagcctcaaccaccacaaccacagcagcaacaaggacctcagccacaggcccagcctcaccaagtgcagcctcaacagcagcagctgcagaatcgctgggtagctcctcgtaacaggggagcaggcttcaaccagaacaatggagcgggcagtgaaaactttggtttaggtgttgtacctgtcagtgcttcaccttctagtgtagaagtgcatcccgtgctggaaaagctaaaggccataaacaactataatcccaaagactttgattggaatctgaagaatggacgtgtgtttataattaaaagctactctgaggatgacatacatcgttccattaaatactctatctggtgtagtactgagcatggtaataagcgtttggatgcagcttaccgttccctgaatgggaaaggcccactctatttactcttcagtgtgaatggcagtggacatttttgtggagtggctgaaatgaagtctgttgtggactataatgcgtatgctggtgtctggtctcaggataagtggaagggcaaatttgaagttaaatggatctttgtcaaagatgttcccaataaccaattacggcatattcgcttagaaaataatgacaacaaaccggttaccaattcaagggacactcaagaggtacccctagaaaaagctaagcaagtgcttaaaataattgctactttcaagcataccacctcaatctttgatgactttgcacattatgaaaagcgtcaagaagaggaggaagccatgcgtagggagagaaatagaaacaaacaataaccgtatgaagatgtcctgttaaatttacaacactaacgatgtagactctggaaatgcctaataagtcaaagaagacgtattaaagctcttttctgcttaaggtgacatctttgaacactttaacacaaagttgactcttctcgtaatggttttcatcagcgcatctgcccttatactcttcaccaaacacacttgagaactgtaacttcgtcaagcactttctgtcctgaagcttttaccagtatctgctgtcttttgtaattatgcatcctagctaaggcacagaagactgaatgaatgcaaggattcattaactctttgaatttgttaaatactaacagttaaccattagaagtggttcaatgatgtaagagtcacactgcttcaactttttctttgttgtagtttttaaattgtcgatttttagctatttgacagattaaaagcaaaataatcatgccatatttagtcctggagttcaagtctaaatgttgatgtgaaaaattattgtagtaaacttttaatatggcaaagcaaccttaagctctattttagccaaatgaaacataatctgaaattatattagaacatttcccttgtcttcaaactgtttggtgtaacagaatattgatatgcagcttggtggatttcaccagttaatgcacattcttcttccctcctccccccattaatatgtatactgaaaaatgtgcatttgtctgaggaattattttgtttgctaccacttaatgaatctcaaaattttgagtaaatgtacctcagtctaatcagactttttatgacctttataactacatttaaaacccttaattcctatttctgggtgtttgcgagcctgattgctatcatgaagtaaaaatttattactctaggtattcactagctaaataaacatagttcttgtttagcaagcatatgttgttcctcagctcttttctccagcttttgcagtgtcctggcatccttaaaatactttgaaaatatggccttgatccatggattaaatcagtatctaagtgaatgtgttgatgttttattgatcagatctatataagtgggaatacagcatatatctggatattcttatagttatctttttaacatcttatttttttcattaattacatatcaacattaattttgtatcttgaagcaaattgattttgtataattaaatgtgtcaagcatctgtattaattgatttgatggcataaggttatgaaaataatgtactgccccatgtattactgttccaaaaggagaaagctatgtagaaagatacattaagggtgaaaatagcaatacagtagatttgaataccttgatgttttgcattacttcatttatgtttacatcatgtttagaaatgttttcatttactgtggtctttggtcacttcagctcaaagacctagtgatggatatttctttgaggctttcatttatataattttattttgtacaatgttttttttaaatgtgcaaatactgtattcaagtgaaaaaaatacagtatttgtagataaccatagctactacacagttcttcggtagtcccagtgtagttatatcagtgtttactgaagggaacatcaaaatattaatggtatattataaaataaagactttcttaaaggaaaattgcacctattttacctttttaagagtaagccatgaaatcttgtaacatgtctcttaactatttataatgaaaagtggcatttgggtatagtcaccacagcaatgttctacatccctaagattatctaggtaggacatgtcaaagatgactgttgtcattctggaggtcctattagagaatattataaaagggtgaccttgtaggaaggatctgagtcctccccctgaggttctctttttcttggtgctttattagcaactctggatatttttataaaactagttacattataaacggtttcaaacatgtttaatttacattaggtttttatgtaagagtgtcatggaagcactcagcaagcaggctgattgcaatagactcagacatgcgaataaatgtaattgagagtctattcatggtgaggagtacatcccagtgcctttaacctggatttctaatcttaagtgaaatgggtgcagcattcctttggaaaaaaaaatctttttattttcaagtgataattttgtgtttttctcatataagttttctccagagcacccaccttctcttccttcttggtctgtcattatattgcaaaatatttttcctctgaatgaaattatcacaggttgtctcaagcacaaccaactgaatgtctcttaactgtggggaccaaaagggagagagcctggggtctacaagaggagacacatcatcaaatgtttgaatgatcacaaattaagacattatcagcccagtaaatttcttgcttaatgtttttccaagttctggcttgaatatttcttattaaagctatcttatgtgggtattttattttgaaaggtattatagtttgtatatttaacagtaaggaggaaactgtaaccaaaattagtatttctctatacgtattggtacttgaagattcctttcaaaagaaatccagcgttttcctaattttagtacttaatttctctttttaatttaagtgatctttctaattcgaaagctgtgttctttttgaataccgtgcatgggggttaagctgatgttaaaacagtttgcaataaaaaaaaatgaatcagcttaagtcatttaatcatttcaagtgcattctgcatcctttaaaaataagtttaagaaatttaagagaattgtgttttcattaagttttgcatatcttttgttatgccatgtaaattccctttttcgtatgattaaaggaaggttatgataaaatgattagttcatttacattcacttgtagcaattacatgagaatttgaattttgtcgtgtttgggtttgttcattcctgtgaatgatggtacagttaggtgagattttctgttatggtacccaaactcaccatttggtcctctttaatctttgagggtttcaataaaaattgttcactc

SEQ ID NO: 718491 - DNA, 491 bp, Homo sapiens
  misc_feature (85)..(85): n is a, c, g, or t
  misc_feature (97)..(97): n is a, c, g, or t
  misc_feature (255)..(255): n is a, c, g, or t
  misc_feature (258)..(258): n is a, c, g, or t
ggctccccgctcaggcgcacatctgagtcaccacctcctccacctcccaacccacagctcagcatgtccgtggctcccacaccanttttcagtcatntttaacatactgaattcctgatgctgttctctggagaccctatgctccagagacctatgctctggagacccagatgctcattcctgcatctgtttgagtctgtgcctacctgtgcacctgtctgccatgtgctaccttgaaatgcaacaatggctttnggngagagagagaggagggaagggtgacaaaagagttgaccaccttccatctctgctgcctaggggacagatggcttgaaggtataagctgggcccaacatggctgcaaagagaatgggaggtttttcctcccttctatctccttccttcagtcgagcatcttctgtatacaaagcattgtgcttaatggaaactacagggagatgtaagctgtgacttgatcaagaagactttgt

SEQ ID NO: 718492 - DNA, 4898 bp, Homo sapiens
aatgctgacttctctacatgggggacaagtggatctcagggactatctacacaaagttctgcttatagtagcagttatggctatccacctagttctcttgggagagctattactgatggacaggctggatttggcaatgatactttgagtaaggtgcctggcattagcagtattgagcaaggcatgactggactgaaaattggtggtgacctgacagctgcagtgacaaaaactgtaggtacagctttgagcagcagtggtatgactagcattgcaaccaatagtgtgcccccagttagcagtgcagcacctaaaccaacctcctgggctgccattgccagaaagcctgccaaacctcaaccgaaacttaaacccaagggcaatgtgggaattgggggttctgctgtaccaccacctcctataaaacacaacatgaatattggaacttgggatgaaaaagggtcagtggtaaaggctccaccaacccaaccagttctgcctcctcaaactataatccagcagcctcagccattaattcaaccaccaccattggtgcaaagccaactgcctcaacagcagcctcaaccaccacaaccacagcagcaacaaggacctcagccacaggcccagcctcaccaagtgcagcctcaacagcagcagctgcagaatcgctgggtagctcctcgtaacaggggagcaggcttcaaccagaacaatggagcgggcagtgaaaactttggtttaggtgttgtacctgtcagtgcttcaccttctagtgtagaagtgcatcccgtgctggaaaagctaaaggccataaacaactataatcccaaagactttgattggaatctgaagaatggacgtgtgtttataattaaaagctactctgaggatgacatacatcgttccattaaatactctatctggtgtagtactgagcatggtaataagcgtttggatgcagcttaccgttccctgaatgggaaaggcccactctatttactcttcagtgtgaatggcagtggacatttttgtggagtggctgaaatgaagtctgttgtggactataatgcgtatgctggtgtctggtctcaggataagtggaagggcaaatttgaagttaaatggatctttgtcaaagatgttcccaataaccaattacggcatattcgcttagaaaataatgacaacaaaccggttaccaattcaagggacactcaagaggtacccctagaaaaagctaagcaagtgcttaaaataattgctactttcaagcataccacctcaatctttgatgactttgcacattatgaaaagcgtcaagaagaggaggaagccatgcgtagggagagaaatagaaacaaacaataaccgtatgaagatgtcctgttaaatttacaacactaacgatgtagactctggaaatgcctaataagtcaaagaagacgtattaaagctcttttctgcttaaggtgacatctttgaacactttaacacaaagttgactcttctcgtaatggttttcatcagcgcatctgcccttatactcttcaccaaacacacttgagaactgtaacttcgtcaagcactttctgtcctgaagcttttaccagtatctgctgtcttttgtaattatgcatcctagctaaggcacagaagactgaatgaatgcaaggattcattaactctttgaatttgttaaatactaacagttaaccattagaagtggttcaatgatgtaagagtcacactgcttcaactttttctttgttgtagtttttaaattgtcgatttttagctatttgacagattaaaagcaaaataatcatgccatatttagtcctggagttcaagtctaaatgttgatgtgaaaaattattgtagtaaacttttaatatggcaaagcaaccttaagctctattttagccaaatgaaacataatctgaaattatattagaacatttcccttgtcttcaaactgtttggtgtaacagaatattgatatgcagcttggtggatttcaccagttaatgcacattcttcttccctcctccccccattaatatgtatactgaaaaatgtgcatttgtctgaggaattattttgtttgctaccacttaatgaatctcaaaattttgagtaaatgtacctcagtctaatcagactttttatgacctttataactacatttaaaacccttaattcctatttctgggtgtttgcgagcctgattgctatcatgaagtaaaaatttattactctaggtattcactagctaaataaacatagttcttgtttagcaagcatatgttgttcctcagctcttttctccagcttttgcagtgtcctggcatccttaaaatactttgaaaatatggccttgatccatggattaaatcagtatctaagtgaatgtgttgatgttttattgatcagatctatataagtgggaatacagcatatatctggatattcttatagttatctttttaacatcttatttttttcattaattacatatcaacattaattttgtatcttgaagcaaattgattttgtataattaaatgtgtcaagcatctgtattaattgatttgatggcataaggttatgaaaataatgtactgccccatgtattactgttccaaaaggagaaagctatgtagaaagatacattaagggtgaaaatagcaatacagtagatttgaataccttgatgttttgcattacttcatttatgtttacatcatgtttagaaatgttttcatttactgtggtctttggtcacttcagctcaaagacctagtgatggatatttctttgaggctttcatttatataattttattttgtacaatgttttttttaaatgtgcaaatactgtattcaagtgaaaaaaatacagtatttgtagataaccatagctactacacagttcttcggtagtcccagtgtagttatatcagtgtttactgaagggaacatcaaaatattaatggtatattataaaataaagactttcttaaaggaaaattgcacctattttacctttttaagagtaagccatgaaatcttgtaacatgtctcttaactatttataatgaaaagtggcatttgggtatagtcaccacagcaatgttctacatccctaagattatctaggtaggacatgtcaaagatgactgttgtcattctggaggtcctattagagaatattataaaagggtgaccttgtaggaaggatctgagtcctccccctgaggttctctttttcttggtgctttattagcaactctggatatttttataaaactagttacattataaacggtttcaaacatgtttaatttacattaggtttttatgtaagagtgtcatggaagcactcagcaagcaggctgattgcaatagactcagacatgcgaataaatgtaattgagagtctattcatggtgaggagtacatcccagtgcctttaacctggatttctaatcttaagtgaaatgggtgcagcattcctttggaaaaaaaaatctttttattttcaagtgataattttgtgtttttctcatataagttttctccagagcacccaccttctcttccttcttggtctgtcattatattgcaaaatatttttcctctgaatgaaattatcacaggttgtctcaagcacaaccaactgaatgtctcttaactgtggggaccaaaagggagagagcctggggtctacaagaggagacacatcatcaaatgtttgaatgatcacaaattaagacattatcagcccagtaaatttcttgcttaatgtttttccaagttctggcttgaatatttcttattaaagctatcttatgtgggtattttattttgaaaggtattatagtttgtatatttaacagtaaggaggaaactgtaaccaaaattagtatttctctatacgtattggtacttgaagattcctttcaaaagaaatccagcgttttcctaattttagtacttaatttctctttttaatttaagtgatctttctaattcgaaagctgtgttctttttgaataccgtgcatgggggttaagctgatgttaaaacagtttgcaataaaaaaaaatgaatcagcttaagtcatttaatcatttcaagtgcattctgcatcctttaaaaataagtttaagaaatttaagagaattgtgttttcattaagttttgcatatcttttgttatgccatgtaaattccctttttcgtatgattaaaggaaggttatgataaaatgattagttcatttacattcacttgtagcaattacatgagaatttgaattttgtcgtgtttgggtttgttcattcctgtgaatgatggtacagttaggtgagattttctgttatggtacccaaactcaccatttggtcctctttaatctttgagggtttcaataaaaattgttcactcataaaaaaaaaaaaaaaaaaaaaaaaaaaacacaaaaataaacaaccaaacaaacaaaaaaaaaaaaaacaaaaaaaaaaaaaaaaaaaaatacataaacacacacacaccaatcaaaacaaaatacatatacaaaacatatgctcgtccagacacacatactattttctcactccattactcctttagttggaaccggaaacgaagaaatcatgcagagataacacgacaaatcattccatctgtcatgtacacccgacacgaacaaagaaagactgcacgggagagagagggagcgcaatcataccaaccaaaaacagagagatgtggatacgagcagatagaccagtggttacatcaacaacagcgagttagtaggcggatagattcaatgaacagcgaacgaggtggatcaacacaaacaaacagtggaaggcttgatagagga

SEQ ID NO: 718493 - DNA, 340 bp, Homo sapiens
  misc_feature (98)..(98): n is a, c, g, or t
aaaagccaaaaaaagaaagaaaaaaatattttttcttttctgttttatttgctaattaaaaatggggagggggaaagtggtccctatttcctcctccntgtttcctctcctcccctgtaggtgccccagcattttggggttttttaccaatagcaatagttttagtgaatgtgtgaaaccaaaaacccctttgtattgtgtggggacccccagtgcgggccagtaaagtggatttaactcccaagtgtgtcgggccggaccccgggccctggacatgttgtttccatgttcagtcccttcccggtttttgggtgttttttttttcccccctcccccccta

SEQ ID NO: 718494 - DNA, 326 bp, Homo sapiens
caacccccgggttcctttaacaaaatgtttccggcattcccggggggggcagggggtcctccaaaaaacccttggggttgccccccgggggggttggggggggtttacaaaaggggggggaaggtggggggggggggccctgggaaaaatttttttgggggggggggggcaaaaaagccgggttgttttcagggtttttccagggggggttgccctaagcagaaggggccttttggggtttttttttggggggtttttaggggggttgggtttttttttcccccggttttttgagggtttaaataaaagggggggttttcccttta

SEQ ID NO: 718495 - DNA, 183 bp, Homo sapiens
gctgacctacaggttaccccgtacgccaaccctagtaggataaggaagcatattttatttaacatttatatgatagctgcagtgtgtctcaatcctaagtgtattttttacaatagccctatggtgcaggttataattatcattttcatatttgtggccaaggaaaaaaaaaccaaacacgaa

SEQ ID NO: 718496 - DNA, 1631 bp, Homo sapiens
  misc_feature (966)..(966): n is a, c, g, or t
gtggagcgagttggtgcgaagatggtaaccatccgtcggaggggctcgggaggatcaacttagagagtgttgtgggggcgggccaccaagcatcgtggtgaggaaagcacgaagggggcgtttttttaaataaaagggggcgggagcgcagattaatatttgatcaagggagaggtgccctcctttgtcccgccagtgtgcgcggcccgaagaaatatgtcgccgccgggtttgtggagggttctggctccaaggacgccccgcttcctggcgaggagagagggcgacttctgttcactcgcccgcgcgtgggagaggagagttgtgtctctgccccccgaatgtaatagacccgggtggccaatgtgcccccccaacaccccgcaatatgatcccccttggtgtgtttccattttgggctcccccccagatagagaagggcgccccccaccttgggattgggaagaattcccacgggggtgtaatcctgggaggggccaaccgtgtgggccccggaggaaaagctttggaacttgggggccccccccggtaagaaaggcttttgtaggcccacccaaggtgaacactcggtgggaacccacaattggtgtttggcgcacaaggaatgtaagaattgtagtcggacaagtgcctcatctcggggggtgtacccccaaagggcccaaaaggcgttacccaaaaaagggggttctcacaccaggtgctggtttgggcgcaacacgccccgcagagagagagctgttggcccccccccgcgctatgagctcctcgctccggaggggcgccgtgcgcgcccaacatggtggggccctctgtgagttttggggcgcacttgggcactgtcctcgcgtttccggggttaagggcctctggtctgtctgtgtgtggcgcacaccgcccgtctctgggcgcacagaaaaaagggcttacaccactgtcaccctncgcactctcggagagagtgtcacacgcacacagagaagattttgttataaaaaggagtttgtgggccacacaagaggcttgtaagccctctgtagtgtcacacaggagacccgcggcacacagctctgagtctctcaacagagacacatagtggcctctctccgctctgagcttatagtgagcgctcattgtctctgagacacacagagagcgatatcacaaaccctctctctcggggttggggctcttttgtgcccacactcatttggtgggaaagttgagccacacaagaactctgtgtgtcactcgggctcgagaaaggggctcgcttgtgtggtgtggggagacaccacacgaaagccgggggtggtctctcacaccctcccgccacaagtgtcctcttgtgctggtcgcacagacgaaagcgcgcgggcttctggaagaaagattgacccttaaagtttacattgagcacccaccctccccaagtttggccacatggccgcctttccacgacccacatggaaggaagaaagaaaagcactttcactggggaaccactcgaagaaaagaacccaattgccaagagacaaagagagcttaatagcccgggaccagattttgccacttggtggggtctccaataaaaattattttcccctgta

SEQ ID NO: 718497 - DNA, 103 bp, Homo sapiens
ctaagatcccctgcgtacagttgcgggtaactattcctggcaggcgagagggcggttgtcgcctcggcgagacgcaacttgtacggcggggggtacagaagct

SEQ ID NO: 718498 - DNA, 664 bp, Homo sapiens
ggtctcgagtatttttttcttttacgggtagggggtgtagagcttgaacgctatctaaatggggggctgctttaggcctactatgggtgtaaaattttaatctctctacaaggttttccctattgtccaaagagctgtcctcttgggactaacagttaaaatttacagggggattaacgagggtcacgggggggcaaatttaacgttcgacactcaagattctatctggcgacaacccagtctatacaccaggtctcggatagtgttggtacgcctctacctataaaatctatcccactaatttggctcacatagacgggtgtagctactatcataagcatggtacctctaaggtaagcctacgacccgggtattccgggggggtactataagctatagggctactccctatgacaaaagtatattctcctaaagctataaactacccatatatgggcacagaaaggggtaaatcaagggggtaacaagaccctcgtgcataataatttacatcgccctgggctataaataaactcattctcaccaattcatttttccccctctatgacagagaccaactaaatactacaactctggcgcgcacaagtgatatcaaccaatatacacctaaccgggccattataactacaataagggggtaaca

SEQ ID NO: 718499 - DNA, 1212 bp, Homo sapiens
ctatacatgaaagattcctattgtgattagactgttggtacctcagtattgccgtgatatttgcgagctcaatcgagcacgagatccagatgatagcttatattcttctgacctaagcaaaatgacatgataagctagtagccgagatatactagataatggctggatggattgtgggagaggaaaagagtgaagcgtggggttggtgtctaatatcagatatgcctacgagacatcccaggtagagctgttaatgaggcacttatcgtcctgaggtcaagagagtaggactagaatataaagatttgaggcatacataggtgttaagtggaatgtaaaagcatgtgactgggagagtatgtggtaaacaggggaaggaagccccagaagagccaggcagaggagagaagagccggccaacggaaaggaagaggtcttgtgctcgatagagagacaagaccagcagagaggtgccatggaatgctaagaagaaagatgatttccagaagagagtgcgcaggtgtcctgttatgaaagagcaagctatgcccaaaacttagtataggcagcccaaagtcacaagatttgggactcttgtacctaattcccctaattgtccttcacaaccatgtagtgagaccacggaatggtcgacagatttagcttagatggccaacagagtggtaagacggccttcggagcagagggggaggaggtaattagtgcctgatagcatagggaaatgtgaattgtgtcaagctcctgcttgtggaccatgccttaattagagattcacgtcacatcataagccactatacaataatctcacccttggatattcacgtaaaacctcaccggagagcaacccacatatagagaccaaccttgccaaggacacagggtaccacaagagacgacgcgagtctataacaaagaggagttgccaccagaaggagagatgtgacgatatgggcccgggggcgctgctgcaggccatctctccaggtgaaaggcactgcgatagacgagcgataacgcgggagactaatgaggtacagagagacagcgggaggtgcacagaaagaacggtgacgagatatcgagagatggaagcacgatcgacgaccactaactataggcaactggtaggggacgacgactatgcgatagcagggaaagggcgtgacaaagacaagggacgacgcgagctaa

SEQ ID NO: 718500 - DNA, 249 bp, Homo sapiens
cccccccccgtttttttcccccccttaaaaacccccggggccgttcccccccccggtttttaccttgggccggggggggggacacctttttcccccggaacccgttttgccctttggccctttgcgaaaccttttttggggccccctttaaggggcccccccccgggtcccggtccggctttcccgggtcccccccgggttcccaattttttttttttttttttttacccttttttttcccccccccca

SEQ ID NO: 718501 - DNA, 173 bp, Homo sapiens
actctgaatcgacggttctcatagataacttcaaggagccggtgcaggagtgaggcctcagcaacgtatattgggtggcagggcagttgtgagtgtgcccacatcctgcattcatgataaacagtttgcagtttgataatatagtctccagcggaacgctgagttggtcatga

SEQ ID NO: 718502 - DNA, 341 bp, Homo sapiens
tgcggtgatctagaggatcccactagtccacggttggctccatgcaggtctgttcggcctctgcatggagacaacgggtatattctgtagaaaaatcattaggtctgtgtgcatgagaggaggatgggactggcagaccggctctgtttctgcagtcacaccttgtcaaaagtcatggctgtgggacacctagttctcactttcttattttagtagcttccctggtaagaaagttcatcaacaaaaaaaactaattacggatacatataacaattggtgcaaatctcagaagtgctgtgtttctgcagtcacacgtggtcaaaagccaggcgtggactagg

SEQ ID NO: 718503 - DNA, 563 bp, Homo sapiens
  misc_feature (1)..(1): n is a, c, g, or t
  misc_feature (5)..(5): n is a, c, g, or t
  misc_feature (33)..(33): n is a, c, g, or t
  misc_feature (81)..(82): n is a, c, g, or t
  misc_feature (128)..(128): n is a, c, g, or t
  misc_feature (160)..(160): n is a, c, g, or t
  misc_feature (166)..(166): n is a, c, g, or t
  misc_feature (168)..(168): n is a, c, g, or t
  misc_feature (227)..(227): n is a, c, g, or t
  misc_feature (378)..(378): n is a, c, g, or t
  misc_feature (464)..(464): n is a, c, g, or t
  misc_feature (512)..(512): n is a, c, g, or t
  misc_feature (540)..(540): n is a, c, g, or t
  misc_feature (561)..(561): n is a, c, g, or t
ntaanggacacaatggcgcccaagcggaaatgnaatggtcattgaaagccccacttccacaaggaatggcagcggcgcgtnngccacgtggttcaaccagccggcccgtaagatccgcagacgtaagnccggcaagccaaggcgagccgcaatcgccccncgcccncncgtcaggatcaccatccaggcccaatcgtgcgcatgccccacggttcggtaccacaccnaaggtgcagcgccggccgggctatcaagcatggaggagctcagggtggccggcattcacaagaaggtggcccggaccatcggcatttctgtggatccgaggaggcggaacaagtccacggagtccctgcaggccaacgtgcagcggctganggagtaccgctccaaactcatcctcttccccaggaagccctcggcccccaagaagggagacagttctgctgaaggacttgaaactnggccacccagcttgaccggaccggttattgcccgttcggaacgttctnttaggatggaggaagcttcgagttcttncttgagggagagaaggttttnca

SEQ ID NO: 718504 - DNA, 904 bp, Homo sapiens
tacctgtcccggtttccttgtctctcctccgccttttggaatcccttctctaaacttatttccgccgccgaaatccgattttcttctgcggcacacttgttgtccgtacgacatctttgcagaggcggtgcacagctcccgcagttttgcaggaacagagtgcctgtgtgtcgccggggaacacgaagtggcccaatggggccatccttgtgctcccctatgtcccgagccctgcgtcgctcgtgggttccctgctgttcggtcgcacacaaaggggacccccccccactgggtctcaaggccccagaccgatgcgcagtctccccttgttggagcgacacaaatgggccgccatgaccatgtcaacacccaaatcgtctgagacagcccgtggtgccccaaatgtaacggacccttcgggtgcggctggcggaccctcggccccacccgccccccgcaaaatctcgcccccagtggcaagcaaaggagtgtctcaagaaaattaataggggggcctggcagtcggcccaactacttgctcacaacgactcgctgtcgcgcactagtgtaccacccgactcgtgccctcttcctgacgaggcgaatgtcatagagagagaagaaacagtagttacaggccgaggaaaaatgaggaatgaaatattattgaagattcacctatggggggctccccaataattcacgggacgcactcatatgagggatgtaattctttaaatgcccctaaatgattttcccgcgagaacacgtctgaggttgtctccccttctccaaagccccactcggggctcctttcctatataagggggtaactctaaataaaacaatacaaggaaaataaaaaagacaaagaaaaaacccaattttaagcccgaaaaaaaca

SEQ ID NO: 718505 - DNA, 267 bp, Homo sapiens
agctgactctagaggataaacaaatggccccggagcactggaatgtctcggtggatagccccagaggataaaccatttactgagataggagaaaaccaccttaggactggtgctgggacatgcatgacagcaatactgctctttaaggcattgagatgtttctgtatatgcacatcaaaagcacagcacttttttctttaccttgtttatgatgcagagacatttgttaacgtgtttacctactgatcttctctccactattatcct

SEQ ID NO: 718506 - DNA, 617 bp, Homo sapiens
gcacgaggatttcttatggaaataaaaatagaactaccattccacccagcactcccactactgggtgtctacggaaaggaaaataaatcattacattaaaaagatgccattgggagaccaaggagggtggatcacgtggtcaggatattgagaccatcctggccaacatggttaaaccctgtctctactaaaaatacaaaaattagctgggcatggtgctgcgtgcctgtaatcccggctgctccggaggctgagacaggagaattgcttgaaccagggagtcaaaggttgcactgagccaagatggtgtccctgcactccagcatgaagacagagagagactccatctcaaacagaaccaacctaaatagccatcaatgtgttaactggataaaagaaatgtggtgtatatatacactgaggaatactacacagtcataaaaaagaatgtaatcatgtcctttgcagcaacatgggtagagctggaagccatgatcctaaatgaactgattcaaaacagaagtgaaatactgcatgttctcgcttattaaggggaacttggagcaatggatacacattggccttaaatatgagatatcacttgggactccaggagg

SEQ ID NO: 718507 - DNA, 250 bp, Homo sapiens
aagaagatgatacccagtggctgacctactgggtagtgtatgggtgtgttcagcattgctgaattcttctctgatatctccctgtcatggtccccttctactacatgctggagggtgggttcctttttgtggggcagggcccccggcccttttaatggggctggactctcttttaaaaagggatatatcccgtctcttttttccctgatggacgcgtgcccacactggcactttagggtacgggcctttc

SEQ ID NO: 718508 - DNA, 1745 bp, Homo sapiens
cgcccaccgcgtccgacgccctgggctggcactggagtgtgggcatgccacgcctcaactacacacgagcatagggctaagagccgacacaggctaggcctaggcaaggcgaggttgcgattggcgcagtggtgccacctccagaacagctccaccaaggacttcggggtccaggcaacacgtggcatgcggtgggcccgagaacttgccgcccgattggtcgccgcacataatccgaccagcatgggagcccctcagcatagcagctggggttggacttgtattcttgcgtgccctatgtggcgaagttcatccagtacctaagtgcagcagccaaaacatacgagcattggctggagcgtggttgcaccacaacaaagggataacccatgagaacggaggccattcgccatgagaagatcgtcgatgcgcacccgcagttatcaaggaatcaggaggcaacagtctggtcactgtgacggatggcacgggactgctgaggagcacacgacaacgggccaaggcgttccaacaccgcccgtggaaggccacgtggccggggaatccccccaaaaatcgcccccaacgcaaggcgcaacgaggcagagcactgaagggcaacccccgcgacgagacgcaaccccccgccgctcccacgcgggcaccagacgacgccagtgcctcccagaggcacgacgccacaagagaccagacgagccgcccatgccgcagacgccaacaacccatccagacacaaggaaggccacctaaccgcagaaggggcccaccgcacggtgcccaccccacaaggaacccggtggcacatacccaggacaacagacaaggcgagccagctgcgaacaacacgcggccccacatcaccgcagcgtccccccgcgtagcaaaccctagtcacaaggcgcacagcgccatcgcgacgcgggatactcggcccccccaagggccacatccaacgtgacccgacgacagacaacaagagaaggcacaacgaccagcacacagccggcgccagccccatggcccacaacgccggtgcacaccaacagtcgaaaccaacccttgcagccagtaggacccacaccaacgcacaatgggcccgccggggcgagcacacaaccaccagtacacatagcacaacccccccatcggtcgaaagacacgaaaagtgcacacgtagcacgaacgcgggcacggacgcaccgaagactagccaacactcacccaaactcgacatcgaacgccacgacggcccagacgtcagacaagcggagactcgtgcaaaagcacgggagcgccgagtaggggacacgacgagcgcagccgaccgcaggaaaagcgaggcgcagaaatcgggacgccagagcgactacacaccggcgagaggagcaccgcgaagcgcggatggatcgaaagaagtggtacgccgcaacaaggccgcaccacgcgggaacacacagccgaccaacacgccacaccagcgcgcacagcaacgagcagcacgcacaaaccagcaggcgaccacggacgcgcactcagacctgaaacgcacagacgcctgaaccacggatcagagcgtgggaggacgccggactgaacatcgacgtcacacaagccgagcgacggcaacaagagcagactcagggcgacgacacagaccgaccgacgacacagagcgaccacacacgcagcagatgcgaacaaccgcaacgcaccgacgacgagac

SEQ ID NO: 718509 - DNA, 291 bp, Homo sapiens
aggatgtggaagcccaagttgagaacaataatgaacaattattgtatgaacaattgttagagacagctaatcacaaacaacctgcgggcacaaatgacctcattccacacgtagcacccttcagcaggaccctataaaactttcctccagcccttgcctctttgcaggtagccccttctctgctgagctgcccactgcaacatattttcacaatttctctaataaatctgcccttctttacctacaactatcttggtaaatggctttaccacctgcaaaactgaccctagg

SEQ ID NO: 718510 - DNA, 270 bp, Homo sapiens
attataaacatctttaaaacagaagtccttgaataatctgatataaaaaggcatgcctctgtaaggcatggggagggctggggaggggcggaaggagctttccttacgtagtgatgaactctccaggcgggggagggtcccagtgggggggggaatgggctgttcctgggaacctgtgatgtccacaggggggtgacgggggagagatggtcgggctgggctccttcactgggtggagtgtggcacatgggtgtgacctgtgccttgggc

SEQ ID NO: 718511 - DNA, 560 bp, Homo sapiens
  misc_feature (47)..(47): n is a, c, g, or t
ggaaatattttttactttgttttcatttttctgttttagttcaaggngggaacttttttattcatgggaacccttcaaaattttggctttttcaatgaatcccccttgcccgaattttcaggtggaacaggtactcattttccctatttttgaacactttaaggggcttcctttgggggagcccaacacacaaaacgtcccttttagcaaaatcttagagggggtgcttagggactaacacaaactttaagggcacaaaaccattggtggaacaattttctgctgggcttttctgaaaaagaagaccgttctggctcttttatttttggggaaacttactaaggccccaggattctagcttattctttagaaggaggtcccaaaagcatttaaccagatcttctttcaaaatgggggatttcctttaagaaaaggggtggtttccgggaattttctaaaccccaaaggtggtgggatttttttggggggccctttttttttttgacacggcccttttaataaaaatttgggggactgggaaatgggccacaaacgctttc

SEQ ID NO: 718512 - DNA, 296 bp, Homo sapiens
ctgcatgagaggagcgctatgagcgtagacatcatcactcagccgtctggctgtaagcgcgtgacccaccagtcctgtgagctcgcatgcagaaatgggtcttcccgaccacaactgcaacagcttcagcgtggcccctacgcgccctcctcaccccagcttgcgggcgcctaaagccccggacgctacttgctgacacgggcgccacgagttcacctatgcactgatgccgcacaagggtgagtgctggggacggtggggccttcctgcagccctagacacctctctgcccttct

SEQ ID NO: 718513 - DNA, 130 bp, Homo sapiens
ctctagaggattgtcccagaaggaggagttaggcaaagatttggaggagtcgcctgggtgaggggtacagtacagggtaaatggcctggatgctgagatggaccttgctttttagcattttacactcatc

SEQ ID NO: 718514 - DNA, 235 bp, Homo sapiens
ctggaaaggttttttgggttagggggatccaggacctccccaacctcgggcccctgatagccctttccccctaacatttgcattttttttgccctaaagcctctgttccatttgtctccttctttgggctccccccccttttttttaaacaaacctttccctcctttctttaggggaaaatccttgttcccttccctttaatacaaaaaccccttttttaatgccagcttgttta

SEQ ID NO: 718515 - DNA, 376 bp, Homo sapiens
  misc_feature (99)..(99): n is a, c, g, or t
  misc_feature (178)..(178): n is a, c, g, or t
  misc_feature (260)..(260): n is a, c, g, or t
aggccatccttttattccgttttggggcccaggaagtggggaaaagtaggttttcggtacttaggacttgatcctgtggttggccactggccatgttgntgcccagttttacccctcccagggacctacccctcccagggaccgacccctggcccaagttccccttgttggggggggntgggtgggccctgcactttttaaggttccccatcatgggcaaggaagggaattcccccagccctccagggtattgaggggantggcctagccatggggaattccctaccctgactccttccccaaacccagggaaaaggggtttcaattttttatttttaatttttgtttgaaaaaaagtccttagttagccccttga

SEQ ID NO: 718516 - DNA, 178 bp, Homo sapiens
cccctctactccgaaaggcaacatagcattctacagcaggataaatctattatcaagtaacagtcaccctggcttaataacaagtgatactgatcagttgctggtataggcttggttggttggcatgtgggtgtgtgggtgtataggtgtgtgtgggtgtgtcgccttgcggagaaga

SEQ ID NO: 718517 - DNA, 455 bp, Homo sapiens
  misc_feature (355)..(355): n is a, c, g, or t
ccgaaatccggcgatgggatcacttgaggtcaggagttcgagaccagcctggctattatggtgaaaccccatctctactaaaaatataaagattaggccaggcacggtgggtcatgtctgtaatcccagcactttgggaggccaaagcaggtggatcacttgaggttagcagtttgagaccagcctagtcaacatggcgaaaccccatctctactaaaaatacaaaaaataagccaggcatggtggcatgtgcctgtaatcccagctactcaggaggctgaggcaggagaatcacttgaacccgggaggcggaggttgcagtgagtcgagatcataccactgcactacagcctgngcgacagagcaagattccatctcaaaaaaaatgcattattcttctcttatctttggccatgacataagcaggacagcttaagttatagagggaggacgtg

SEQ ID NO: 718518 - DNA, 255 bp, Homo sapiens
aaaaggaagcattattttatctgtatgccaaatgattacataattgttaacaacttcccgaaggtcctaataaatatggtataataactatcgcattatataaatagcaagaaatgttttgagctttatcccctatgtagcaagatgacaccacacatttctagttatttgacacttaatatagatgaattaaaaatgtgcatttattatataaagatttgaaaatggcacgctttcaaacacaaaaaaagacaa

SEQ ID NO: 718519 - DNA, 254 bp, Homo sapiens
ggatctaaggagctactcagtagacagtcccacctcacacgattctttaactctcacttcatcttgcccttcattattgcaggcctaacagcactccaacttctattcttggacgaaaagggatcaaacaaccccctaagaatcaacttccaattcggataaatcaactttcaaccttaataaaaaattcaagaaggccctcggttacttttttttctttttttctttattgacatttgcaaaagggtttctca

SEQ ID NO: 718520 - DNA, 328 bp, Homo sapiens
aatatagaatgagtactacacgagatactgatagtataataagcatactaggcattttccctgctagcagctactccctcctgctagtacatagtgaagatttctagctgtccagtaagggtagcactagctatgtgtgacagtttagattagtgaataataaaataaaagaatacaatacaggggtaccttgatatccccttacaccttacctaccatgatatagggtaccctgaggcctctctggccatggggaactatgagtcaattaaacctcttttctttatgaattacccagtctagggtgtttatggcagtgtgagaaccg

SEQ ID NO: 718521 - DNA, 280 bp, Homo sapiens
tgcacagggggttggtttctgctggtgttgtactttccaaggttccgtacacttacacttgaggttttcttttttgtgccaggcgcggtggctctcgcctgttatccccgcgctgggaggctgagtgctggccgatcacgaggtcctgagatggccaccatcctggcgaataccgtgaaaccccgtctctaccagagacatacaatatattagccgggcgtaatgtcgggcgcctgtagtcccagcttacttgggaggctgaggttgcagtgaggggata

SEQ ID NO: 718522 - DNA, 330 bp, Homo sapiens
tcgacagaaatcaatggcatttgaaccaccaaaaagaaataaagggctgagtgtggtggctcacgcctgtaatcccagcactttggggagcccaggcgtcgagattgcttgaacccaggagttcaagaccagcctgggcagcatggtgaaactctgtatctacaaaaaatacaaaaattagccaggcatggtggtgggtgcctgtagttccagctacctgggaggctgaggtgggaaaatgacttgagcccaggaggaggaggctgcagtgagctaagattgcaccactgcactccaacctgggtgacaagagtgaaactgtgtctctca

SEQ ID NO: 718523 - DNA, 866 bp, Homo sapiens
ggctgcgtgcatctgtgtggaaaatgtgtggctgccgtcttcgctggagcctggagcctacatggtttccagtgctgtcgctacggaatgcctggtccactggctcgtgtccgtagccgtgtggaaggcgtgacacgccactgacacgtgtttattgccctctggcactacctagccttagtacttcgaccttcagggttgcatgtacgcaatacatgaaaatatccagatatacgtagcaacagcgatgtgctgactcctgcgccattgatcatgtgaagagagagaaggattgtcctggtctacccattcactcgtatgggctggttctcacagctgattttcacagttctctggctgtctctcagattttgttgctattctcctagcaagcgttttacatagtgccctacaaaagtgcacctctgtggtcacatacgcgtgcacaccaccttcctagccagctggcataaagaaatctggtatgatgtggtgttccgtatgcaggagagctggatattactgttgcttgtctatatcaacttccactactgggtggaataaagcaccagactggaagcttcaatgcgagtcaagaagatttcacggaagtgaagagcagttgtaccaacaaagcgtacaaaggtatcattgatgcttttcatcagatcattcgcgatgaaggaatctcggctttatggaatggctacatttccctcgattgctgtgtggtcttcaatcctgccaatccagttcaatgtattatggaaggtttcccacgggcgcttttttagaaccggctggagctttcttccctggggtggttcatcattggggccgcgggtcaagcgttggccccccggggc

SEQ ID NO: 718524 - DNA, 630 bp, Homo sapiens
gtatcaacgcagagtggccattacggccgggcacagtggctcacacctgtaatcctagccctttgggaggccaaggtgggcgcatcacgaggtcaggagatcgagaccatcctggccaacgtggtgaaaccccgtctctgctaaaaatacaaaaattatctgggtgtggtggcaggtgcctgtaatcccagctactcaggaggctgaggcacaagaatctgtggaatctgggagtcggaggttgcagtgagccaagatcgtgccactgcactacagcctggcaacacagcgagactgtgtctcaaaagggacaaacaacccctcacaagaacagtgacaaattggcgaaacatatgtataccacatattccacagccataggacaaattcccttaatcatatccacacacacacagtgctaagtccaactacagacacaacgaccctgttaacaccttcaccacacgaacatgggcaaaccaatcacaccagtctgtcccctacagtattcccattgaggaaactgggcgtcccaggaacccccctacgaccagaaaccccacaatctctcccagcatggctcatagctcccttaactataacgcgtgaacaacagcccatatggcaatg

SEQ ID NO: 718525 - DNA, 239 bp, Homo sapiens
  misc_feature (105)..(105): n is a, c, g, or t
gaagaaatgaactgggacagatatctcaagacacatggttctttggctgggcgcacggtggctcacgcctgtaatccagcactttgggaggctgaagagggtggntcgcctgaggccaggggtttgagaccagcctcggtaaaatggcgaaatcttgtctctacaaaaaaatataaattagccaggtatggtggcgcatgcctgtgagtcccagctactctggaggctgatatgtgaga

SEQ ID NO: 718526 - DNA, 798 bp, Homo sapiens
aaatcaagtatacagaagaatcggtgaagagaggtttggaattcacgcttatggtagtgggtgaagtctggatggggaaagtcgagcattaatcaactcattattcctcacagattgtattgctccgagagtatccaggtccttctcatagaattaaaaacgactgtacagggtggaacaatccaaagtctgaatcaaggaaggtggtgacagtgcggctcagaatagttgataccccaggattgggagatgcagtggataatagtaattgctggcagcctgttatcgactacattgatagtaaatttgaggactacctaaatgcagaatcacgagtgaacagacgtcagatgcctgataacagggtgcagtgttgtcttgatacttcattggctccttcaggacatgggacgttgaaaccattgggatatggagtcttgatgaagcgtttgcatgagaaaagtgaatatcatcccacttagttgccaaagcagacacactcacaccgagaggaatgccgaaggagtttaaggaagacatgataatggaaagaaatccaagaacataagaattgaagaatatacgaatttccagaagacatgatgatgaagaaagagaaataaagttgttgataagataaaggaccgtttacctcttgctgtggtaggtagtaagtactatcagtgaagtcaatggcaaaagggtcagaggaagggagtatccttggggttgttgctgaagtcggaagttggtgaacattgtgattttacaatggtaagaaatatgttgaataagaag

SEQ ID NO: 718527 - DNA, 1100 bp, Homo sapiens
gcttccaagaggtcttagagggcctctacttcttggaggtggaggccctccaagaggtctcagaggtggaagaggaggaagtggaggaaccagtgcgacctccctcctagggcggaggacgacatggatgatcggtggagtattccatgatacttttaagcatgatgttcttccaggggaccagctcccagtataatagagaggatctagcaccaagaagtgggggtcctccgtcctaatgagatctgcgccttcatggaccatgttcgcagtaccaagcttggatacctcggcgaccggaaccgagcgctccgtggattcacccagttgcgaaagacgattatcgtgtactcgagatgagtccattctcggagatgtgcgagacgctgcgtcgccgcgtcttcggtagaccactgtttaattattggtacccccaagaactactacatggccgtatttgggtactttgacagaggatccacagcgtgacttgcctacgtggcgatagaagattctactcgcgaaacggtcgtttcggcttgactagctaccgaccactcactcgccacgctagccaaccccccgctctaggcacttccctcactgtgtactcttgctgcacttatcactaggatcaacaactcaagggctcaccatcgagtttcgaacctcgactctcattcacaactccaacgcgaaagcggtagagttatcgtacgacaacagatcggacctgcgcccactcttgcgttccccgcttgcgtcccggcggacccctacttgtcagggcctcttaccgccccaaccccgttgtccaccggtcgacctacaacccgtcaacgcatcccgcgaaaatctcgtacgggaataattcaataggccaacaaacatcacttgcgtgacggtagacctgcccactgccctcacctttccgcaccagagcggcaccctctcacaaggcaagcctagacatcggctctggaggcagcgccaagtgtactcggacatggctctgaacttgcccaaccgcggagcacgcttaacaatgcataccctggcaagtcacttaggcactgcaggaaaagtatcccggcaggtac

SEQ ID NO: 718528 - DNA, 532 bp, Homo sapiens
gtaacacttttctattttaaaaactcaggtccccactatgtactttccaacataattatgtttggaaccaggattctcataataggagaaggggaattcagtagaggaaagatgaaggagaactctattgtgttgattttgcattgtccctgaaaagggccccaaaactgagcacacctggcccccagaatttggtttctaaagttttctttctctaaaagaaatcagaggtccttggagaaactgccatatcagatctgaaagtaaggcaagatgagcttagagcaagcaagtgctcgcagactaataggaacatgccaaaggaaaggggccttccactgaacaaatttggaaccctttgggcatgaaaaagaatgacaataatagcgtactaacaaacggaattgaaaactacccataagatatcctctagtccctgctacttgggaaggtgaggagggaggattgcttgggcccaaaagttccagaccagcctgggcaatataaaggaggccttgtttctataaaagga

SEQ ID NO: 718529 - DNA, 361 bp, Homo sapiens
  misc_feature (208)..(208): n is a, c, g, or t
  misc_feature (306)..(306): n is a, c, g, or t
  misc_feature (321)..(321): n is a, c, g, or t
gatagagcgtcggcgggatgttgatggtgttatccagcaccgtggtcactgcgttggtagccgagtcgcccgtggtattgaactggacctggctgctgtcgctgctgccacgtgaggtggcccacgcgcccagatcgctgatcaagctgaccatgatggccccgccaaaccgctcagcgaagtgcgtgtagatgaagccgtctaggcntgcttcgcccagggagccggtgccaggggaatccagattgataacgacgcccttgggcgtctccagccgcgaccatacgacaccgacacgtggctggncttgtgccagcacgncttgctgatagccgatgaatcgcgtccctttgtcggtcag

SEQ ID NO: 718530 - DNA, 140 bp, Homo sapiens
gacggggttcaggtctggctccataggcagatgaggctgcatggttgtgaggttcatgaggcaggagaggttgtagggtatggctggagggtagcctgcgcgcagctcaacctggtccagggatctgcaggcgtgttgcc

SEQ ID NO: 718531 - DNA, 800 bp, Homo sapiens
agtttcaccatattggccagggtgggtctcgaactcctggagctcaagtgatctgccgtgcctcagccttcccttaagtgctggggattacacgcgtgagccaccactacccgagcctccaatctttaaacttgctagaatgtgaaattctatcatgtaccgttagcctaagggaagatgtatctttcgctatttctgactggtgcctttcccctttttaggagcaacgaagaagctactctcttaggttatgttcttgtgatgtgacaaaagtgtcaaagaagataggagaagagaatatcgttgaatttcgtggatgctttagtatcccagagtgtgaccctaaagttcagcttgtaggagtggacattctttcatgtcccttccctttactcatgccgaaactatcaactgggacatttggtgctttgggtttaaaagttaatggatattatagctttggttttatctagaaaagttaaatgtatttgcctttgacaaaagactgagcacaagagcaaaataagctttaaaatcgggtgttatgtgctttcctccatttttgagcatattatccaaaatggtctgtactaatataaatgagaatgatgcagtttaagtaagctaggtgatacccattggtcatggacccccgtggtcataaaggccatttctaggtagtagggacaagcaggctatggggattgtattccagattccactgtgtgacatgttgactgggcgactctgtgtcactttgctcaataaagggtagtgaaaccatcacacaacaaacaggg

SEQ ID NO: 718532 - DNA, 809 bp, Homo sapiens
  misc_feature (1)..(1): n is a, c, g, or t
nccacaaaattttccccaagttttattaacaattttttaaaaattctccacaattttaataaaaatggccccccattgtttaaatttcccgaaccacaaaacatccccatgccaataccccctttaccggggccccgaccccgttaattttagtgcttgggcacccgccagtaatgtctattttcacaaatccccgttaagcctcttttttttccacaaaatcccttttttaaacttgtcaattttccaatgaccctctccttcccaaatagtttactggtaaagcatataccgtccccccaaatattatgcacactttttaaatcaaagaaactaatcatgaatctacctgctccatttcaacgtaatccaactcgaagtccaaggctctgaaacatcatcttatatctgttatggatcatttcgcactcctctgtaaaaacctgatgcaaggcttgcccttaacaaaacatttgttcctcatacgtgtaaacacttttctactgcaacttcatccccccaagacttccaacgtagcctttgttatcctatcacccagccatgagaatatccaaaatcaaatcaagatcaacaggttattcatccgcttttcttaaatgtgttgtgtcaaagcaccagcctgtcttctgatcatacatttctttgatcaatgtgcttaatttctcttcccttccaataataaaatattcaaataatctaaaaaaaaaagcgataactctagggggggctttcaacagggtccacaaatagttcccatagggacttagaggaaatggttaaatgataat

SEQ ID NO: 718533 - DNA, 361 bp, Homo sapiens
ccctgaatatgattcagcccatatatacctgtctgcccgtgctctacagtgtctgttgttctgtgatcacttctaagtgctcatcatgtatttgaccgtcccatatatggagtcatcttgattctagcgattggttctcactggtgcgtgcgctattgatcttatgcactgcggttctcctatgggtccatcgttgttctgcagcatcactggatctctgttccattgacaccagtgctactgacagttgccaccagttcctttccatactagtgcgtcagtgctcgcaatcgactgtatgtagcgcaaggtagataacaatattatagtggtttctcaaaactatatctgagcatgtccc

SEQ ID NO: 718534 - DNA, 198 bp, Homo sapiens
atgttactgggatgtcacttccagtaactagtcctttcctggcccccctcctgcttgccttgacccggaacctttctggatcagatccacggcgtgtccttggtctcgggaggcagtgtgctccactgctctgtcttgtccatggtagcgtgaagcagccagtgtcggagccaagtagatcatggtttgctccccaca

SEQ ID NO: 718535 - DNA, 343 bp, Homo sapiens
aaaaatggcccccctttggggtctttcttttggccccattcctggattggcggggtgaaacccctcaaaaatttgggggacccggtgaccaccttgggcaaattgggggcgcccaattttggcttggcggaatatttttttgacaagccccccctgggggccagtgttaatgaaagttaagcctcgggttattttccccatagccgtggggtgccttccctggtccccaaggcagggcatgcatgttggggtttcctttccctttttttttggttggccccaaccatccccttaggttttttgttttgtccccttccttcaaataaagaattttggtccccca

SEQ ID NO: 718536 - DNA, 1103 bp, Homo sapiens
agcggggggcacatctgaggaggtgtggctttgtgctgtaatagtttaagctttcatttgtgtgtctttttagatagatattgctgctggtggtttaatgtagtgtagtgttgggttacatgcagctgtcaacagattatcgggcaaggtgtgcagctttgttctcggaggtttagtagagagtaaggggaaccccaagcatggcaagtcaaatcaattccagtcaggcgtagctacttaagcaggtgttaacaacctgatctgctgaccggccatcaccacgcatattggtaccatgtgaaagcatggcaaaaaaacacacctaatactcaaaccagacaagcaaggctgcatgggattgacgcccttgggaaacccacgacaaacacacaaaaagcatcacacctgatgaccacatattccaagaaacacttgtctacatggccttccagccgttggtaaagtaggtacccaggagcatagaaacataggcgttagagaggggtccaagaacgacaacaccacacaggaacgaccacaaacatcatcaccggagaccaaacaccaggttggaggcaaccctataacaaaacaaccaccatctaaaaccttccacgtgggtctgaaaccacttgcacgaatagcactaggaaacggggggatgcaacattacccagaaaccactatgtggtaaaacacggttcgcaccattcgcagtacatcactagcaacagccatgagagatagcattatcacaaacaacaagataaaataacatatccaaccatagtagagcttggattccacagccctaagtgaaccagaagaggaataggattaaagcaaaagaaaccacccatttggttcgcacttaggatgagggacctaacgtagtagaactataccaccaatactgtagaaaaccaatatcaaaagccaagacaacgataccaccagcatatagtataccattagacaaccccggccgtatagagggaccttaccacatcgaggtcagacagctataccgaaggacactaccctcccatcagagaaacactagacgacaaccagcaacacaagcaacaatatgggacaaacag

SEQ ID NO: 718537 - DNA, 439 bp, Homo sapiens
  misc_feature (26)..(26): n is a, c, g, or t
  misc_feature (38)..(38): n is a, c, g, or t
  misc_feature (70)..(70): n is a, c, g, or t
taaccccctatttttagtctaattcngactccattttnccttccttcctccttatccctgtctttgtgcnaccctgcttctcaatatcccagaaaaaaatcagtaattaaacacacaggtatatggtgtagaggatttcagtcagtgaccatggtgggtaaacagtttaaggaaaaactaagaaactattgtattcatatttgacttgtaacctctcttttccccaaacttgtctagtgttggtatttatgtcttagtttacaagccaagaatgttttttacatttttaaatggttacataagtacctatgtaatatccttaatttttgcctcttgacttacaaagcctaaaatatttcctgtttggtcctttatccacctctgtcttagatgaatatacttttgtgtttatcctaaataaaatatatacctaaaatat

SEQ ID NO: 718538 - DNA, 816 bp, Homo sapiens
gagacgtcgctgaggggcttgcctgaagcgaggggatctaacattttcagagaaccttgtggaaagaacaagcctacttcaataaatgaaggagaataaagaaaattcaagcccttcagtaacttcagcaaacctggaccacacaaagccatgttggtactgggataagaaagacttggctcatacaccctcacaacttgaaggacttgatccagccaccgaggcccggtaccgccgagagggcgctcggttcatctttgatgtgggcacacgtttggggctacactatgataccctggcaactggaataatttattttcatcgcttctatatgtttcattccttcaagcaattcccaagatatgtgaccaggagcctgttggcctctttcctggcctgggaaagggtgaagaaacccccaaaaacatgtgtcaggtatctcttcaaacacgagtctgcgaagctcacattacaatgatgtacaacttgggccagtttgggcagcatgacccaaaggaggacgtaactggttctggcagagaatcttactgcagaccatcaagtttgatcttaccggtagaacatccataccagttcctactaaaatatgcaaagcaagctcaaaggtgcataaaaacaaaattcaacaagttggttcaacatggcatggacattctgtcaacatgaccagtctctgcaccaccttgtcactgcagtgggaaccagagatcatagcagtagcagtgatgtatctcgcaggacgtttgtgcaaacttgaaatacaagactggacctccagacccatgtatcaggaca

SEQ ID NO: 718539 - DNA, 80 bp, Homo sapiens
ggacagcgagcggagccgcggtccggacggccagggccgtgccccgagctctccgtctccccccggccgacagccgagga

SEQ ID NO: 718540 - DNA, 897 bp, Homo sapiens
tgcagtggctcacgcctgtaatcccagcacttggggaggccgaggcgggcggatcacgaggtcagaagtttgagaccagtctggccagcatggtgaaaccccgtctctactaaaaatacaaaaaaaaattagttgggcgtggtggcgtgcgcctgtggtcccagctgcttgggaggctgaggcaggggaatgcttgaacccgggaggagaaggttgcagtgagccgaggtcgccccactgccctccagcctgggcgacagtctcaaaaaaaaaaaaaaaaaagaaagcttacttctctgagggtaaggtttaatcagggggctcaaagattgggcagggtacagcctggtaaagtggcgcttacaataagtggctaacgtccttggtcttatggggtttataatttccacattcctcttcagatacaattctggaaaactggtggactacctgtggtgacttggcaaaatttttctatttaatatgggcttatataggggttcatagtacatcccagttcctttatcttgaatacaaggcgttggggttttattcccagtttctggggccagaaacaataaattacctaagaagctccggttctaatgaggggcatgtcctatttgaattgacgaactgtgtgttcatttctcaagggtttacggacgtttacttaaaagttaaggggctccggggatcggcaagggttccgctcctaaccctccttggttataacctttggcttctaaaaacgtttcgacccgggagggtgtgcggccgaaattacttgggttttggcatcgggggcattttattctggcccagagggcgcaaacatatgtgtgcacgtggtctgcgggcctcggggtgtgcaatccgcacatcacactcagagga

SEQ ID NO: 718541 - DNA, 104 bp, Homo sapiens
tctttcattttctcatcttgttctatcttcccattttcttctcagtttgtacattttgcccttcgctttttgtttcctcgcttgtcttttttcttctgcttcct

SEQ ID NO: 718542 - DNA, 617 bp, Homo sapiens
gtgcttgtcctgtcgaaattatagcctgaggaggtgtctgtgtgacccactgcaactttctgaatggggagcctcgagaatttagcccatgaggccgacatgcttctcctgccacccggaatgccaaaccatggagggcactgacacactgcaatggctcgggctctgatacttgtgctcaatgtgcccattttctgagatgggacccactgtgtgagacaagctgaccccatggagtccataggtgccaagggacccaagtactacaagtacccagatgttcaggaactgaatgtcggccctgaccatgagaactgcacccaggggtgtaaaggaccagagcttcaagactgatttaggacaaacactggtgctgatcggcaaaagccatctgacaatggctttgacacagtgatagccaggattggaagtgatgagcatgatgcctgcccggcactatcactctaactggacctgggcgcccggatccacgcaaacaaccgggctatgaagcgcgaaacacaggacacgggcgtgacgagcactacgacaccccaggaaccccagcgagaagacctccagaacacactcggactgagcccaagacaagtaatccc

SEQ ID NO: 718543 - DNA, 621 bp, Homo sapiens
agcggatcttcatccaggcgccatggccgcagcctgcgggccgcggagcggccgggtactgcttgctcctcggcttgcatttgtttctgctgaccgcgggccctgatctgggctggaagcgaccctggacagaatgttgcttgcgcggatgttaaagctctgtaccctccgactagtgaccgactataccacctctccgctaggctggatcccatcccagcagttgaaagtgtggtcggaggcacacgctggttgtgatgcttataccccaaaagtcatacgtgtgtcacaacaaaggctgggatgggtatgatgtagcagtgggaatgtaatgacggacttacgatattgcatactaatttaggcaaagaagctgtggtgagctgttgaaggctatgagtcctctgaagaccagtatgtactaagaggttcttgttggctaatggagatctcacttttgacttatactggaacttgtgcctgcagaacatctgacggagtctggaaacgcagcacggcctttgcctcttactctgagttatatcactaagtggtcctcgaactggattcctgtaacactgagtggattgattagcctcgttggaactccttgggatcgcc

SEQ ID NO: 718544 - DNA, 634 bp, Homo sapiens
atacacctcattgctagcctcagcgaaagctggaataagccttcgataagcaaattgtccgttgaagcttgtatctgatatcagcactggagttgtagaacttggttgctgattttgacctctgtattgaagcttaactgtgtcccctgtggtatcttggtatgtaatgaccctgtacatatctgttgagcttcaacctttagtacctgtggctctgctcacttcgtggctaacggtcagaacgtgcttgtggaagacaagtctgctggcttggtgagtctgtgtggccagcagcctctgagtctgtgcagtgtatcttaacgtgtcaggcgctgacgatgattctgggatttctctagagtctggcaagaaccagttgttttgtcttgcgggtctgtcagggttggaaagtccaagccgtaggacccagtgtcctttctatagctcgatgtctttggccagcagcatccgctggcggctgttacttgctactgagttggaagcggtgtatgcatcttacgcctgtccaatgtattcattcttaatttatgtaaggtcttttttatgtactcgattcgtcggattctttgaagagatgacgacaaatttgtgtggttgtcaaaagtactgcgag

SEQ ID NO: 718545 - DNA, 740 bp, Homo sapiens
ggcgtcttcccgagccagtgtgctgagctctccgcgtcgcttgtcgccgcgctggctaccgcggatcccggtgcacgctctgcttggctcgccatgccggtggacctcagcaagtggtccgggccctgagcctgcaagaagtggaacgagcagcgcagcaccgtgatgtcactacgccggggcggggtggacgagctggcaagtgctgacgcccaccaggttagaatagaccacagcattcggggatggtctgatcaggaagctctacacttggtctgacagacccggatgctccagcggaaggatcccaatacagagatggatcattctgtggtcaacatgaagggcaatgacatcagcagtgcacagtccctctccgatttgtgggctcgggctcccaaggcacggctccaccgttgttgctggttacgagcggacagccgtaaggtgacgagccatctcagaacgattggaacacgtggaatcaagtggcgtcttcgtacaagttgagctcaggcccgggctgcccgtgtccggcgagtggatgactatggccaaatgtcgacctgtctggagtcggggtagtggggacctgatgctggggccagcctgtcccgtccgcgtgctgttctggtctctctctgccctggctgtgcactgcggcccatggatcggggcttctgcgcggccctttcttcccctccctgttagctcggccgttgactcctggggggtcggcc

SEQ ID NO: 718546 - DNA, 271 bp, Homo sapiens
ccggcagtatacgtcagcacaggaacgccagatctgagccgcatcgtgcgagctacaccacagctcactgcaacaccagatcgttaacccactgagcgaggccagggattgaacccgcaacctcatggttcctaatgggattcgtttccgctgcaccacagtgggaactcctctttttccttacttaggcacctgtccttcccatagtgatatcgaaccggcatctctttctttctctcttgtccagtgaccttcttccttcttctatccc

SEQ ID NO: 718547 - DNA, 171 bp, Homo sapiens
gagcaggtgtctggtgctaagtcatcgtcaggcctgaaacgcaagatgtggagtacatattggcatcgtaggatccagtgaccgaatcgcattgctgccagcagtaggcatcaagtacatcgggatgaggatgagcaagcggcttgttatgctgcctccgcgattggatat

SEQ ID NO: 718548 - DNA, 291 bp, Homo sapiens
aatggtgagcagtctgtagacggcgtcacagggcttcgcggcggcactcagcagaacgccactttgtactcacaggcagcaacgagagatgcagaattctctgccagatattccacggacatcatgcaaatagcccaacaataatgcaaggctatttctcatcacggggcgtataggccaacattgctccaattcttacaaatcatctcagtaggtgctggtgctccataaacctgggacattggagcatcagggtgagccaagaggatttcagcatccaggggctcactg

SEQ ID NO: 718549 - DNA, 223 bp, Homo sapiens
aatttaggatttggggaaaaccccccttttaaacagccaccatcaagtttgaaaagcaattgatgtttcccttaatctttttttggggggaaaaccttagttttaaggatttaacctcccgtaagggaagtttaacaaaacagtattccaaaaacacccctttttttgtcagccccctgcctgtttttaaaaaaaaaaaaaaaaagggggggtttatttttta

SEQ ID NO: 718550 - DNA, 1445 bp, Homo sapiens
taaattggcaactttaactttagaatttaggaggtcgtgcgcaggttggtccatggggtatatgggtgtgagtgctgagctggggagtgcgaattgactccgtgttcacccagggtaggtgagttttagcacccaggtgaaacgtgatagtcctcagtgccaggcacgtggtgctagcccacatcgtggctcattaaattccctctcttcttgagggagagagggagaaccacagggttcccccattgtgaccagaagtgtcagaaagagagaggttccacgaggtgtgtgtgcctgtggattcgtggtccataaaacgcgtttccgcggaaagctttcccgtgggtggtggggcgcatttataaacctataattctctctacaattcgaaatctccagaacacttatttatactctctgtgttttcacacgaggtgaatatacgtggtgtatcatagagagttataaagagggaggcaacagttcccattgggagtgtgtatacctataagaaaagtggcttatctcccgaggggtggcgaaggtttctccttataagtgttgtgaaggggctttcacaaattcccaatacgaggccacatttaaaaaatttcccatttccagtgagagtttgtggacaactaacgtggcctcgtgagtgagacaccctgggggacaaattaacaccaaattccagacaaatgcggtggggggcgtggaacacactggcactcggctggggccataaacaaaggaagaggggggaacccttctaaagcaaacaaacaccctaaacaaaacacaaaacacaaaaacacaagaggggcgggggagcgcgaaggcccccaaaagaaagactatcatacaccccgagacaagggggggacccccacacaaggacttatcaacacaggagtgacaacaccaccagaggggactattcgctgggtgtcatacacaccagcagggggggggcacccccaacatatagtaagggagagagcgatcgagcacaaactcttaaacaacagaggaactaggaagcaaacacatgcgtggacgcgcgggcctgcgtaaactaaaacccaagcgtcgcggaatgaaacgcggcggaacaagaccagctcagcgcgaccgaacacggagcagaacaacacatcaagggagagaggagggagccaccaccataaacacctgaagagagggcgaggggggaagaaaacaaacaagtgggggccagacacagaccacccctacccacgaagacagcaaataaaacggcccctcaagcggaagaaccaacaacatacacacaatctaatagacagcggactgataacaggtagtgtgtcaaaaccccacacacacggaaactatgtcaatcatcagcgcaggatagaagaattgtcaacgaacgaagggtagatatactatcggacacatgc

SEQ ID NO: 718551 - DNA, 338 bp, Homo sapiens
  misc_feature (48)..(48): n is a, c, g, or t
  misc_feature (100)..(100): n is a, c, g, or t
  misc_feature (172)..(172): n is a, c, g, or t
  misc_feature (200)..(200): n is a, c, g, or t
  misc_feature (328)..(328): n is a, c, g, or t
  misc_feature (336)..(336): n is a, c, g, or t
cccaaatttgaagctttattaaaagggtattctatttccaactggctncccttaacttgaataaaatttactccccagtgccgtggctcatgcctgctgnaatcccagccctttgggaggccgaggcaggaggatggcttgaggccaagagtttgagaccggcctgtgcaanatggcgagacccagtgtccacagaattnaaaattaaccacgcagctgtaatcccagccacttgggaggctgaggcaagaagatgacttgagccctggcatttggctatgatcttgccactgcactctagcctggcaacagagtcagactctgtctnaacaaacnaa

SEQ ID NO: 718552 - DNA, 100 bp, Homo sapiens
tagggcgctgcgcggcgcaggaaaaatggcggcttcaggtgggcgcgcaaggccgttgtcctctctttgtgctcttttaccttctgtctgtctgtctggc

SEQ ID NO: 718553 - DNA, 729 bp, Homo sapiens
  misc_feature (1)..(1): n is a, c, g, or t
naggaccgcgcgaggcgtggagagcagagggaggggagagtcgcccccaagggcgcgggtccgacgccgtgcgttgggagagagccgccgaggggagagactgcggaggggtaaagctaacgccgtatggtgcgcgcgcacgggcggttggagtgcgcccagcggtgaaagaaatggagaggggggggagagggtgccacccagagggccgcccacgttgtgttgaacaaacaagcgagggcggtggtgggaggggcgaggtggccacaagatgtggcagtaggacacaaggcttaaggcggccgtgcggcgcacgaggtaagcccccctgggtgattacagaaggtgggggcgccattccccaggcgcgacagatgtgtgaaatgtcgtggagtaggacagaggaggagatgatgggcgaaagatggagtatggacaatggtggggtgcgtgtggggggggagaaggctgaaagagggcgagaaggaggggccgcggggggtggggagagcgccacgaatgctgttcacgaggaggcggcgtgttaaccaatacgagggggcgacgcctgtgaggcggaggaagttgcccacagggccacatggggacaagcccctatgggccatcgtctgtctaggggccccgtgcgggtgtcagacggctcggatgctcaaccccgggctaataaagaacatgcctcgagcaactgggggaaactaatgacaaaac

SEQ ID NO: 718554 - DNA, 606 bp, Homo sapiens
cctaggtatatgtcgtgccatgtgtaattcctttctatggcggaatagtattctaatatgtggatatcccatattttgtgcatccattcatttgttgatagacactctggttgttcctacctcttgactattgtgaataatcttgctaggtacatgggtggacaaatatctgtctgactccccgctttcaactctagaaagctttcttttaaaatcggtctatttaagtttctttaaaaagttaatttaagaaaaatactaaggtaaattgtagaacaggtgatatgtcaatatgaccccaaaaattgtaaagatggaagacgaatgcctgcagtttgggaaaccggatgagaggaaagacctggaagctattgtaaaatctatgctgagggtctggtgactactagaccaagggcatggcagcagagggcagctgaaagacttcaggaaggaaagatataagaattaagaaaggggcctggtgcagtggctcatgcctgtaattccatcaccttgggaggtcaaggcaggatgatggcttgagaccaggagttcaagaccagcctgggcaacagagcaagacctttttttaggaaaaaaaaaaaa

SEQ ID NO: 718555 - DNA, 509 bp, Homo sapiens
aacagggtattttagtttctgttctgggcaaatgtaaagcatccccccaaggggtttaatgagatttttttttttgccccccccgctggtgattgctaaatgtaacagtctggttgtgacgccgaaaaaagtgctttttttttaatgtgccggggcaaggtagttcactcttaagccctcttggggaatttcccccaccgggggaagttagaattccttcagggggacgcccgggtttatttgggatttatataccccccgcttggggggagaagcccttgtttttggaacccctgggggaggtgaactgaaagttaccgttgtgccccgaagttccccctttaaaggggttcccccagccaaatcctgggatggttattaaagggattggtggcccctcccatgccaaaaattttaattgaataatggggccccataaaattataaatggggaagaaggttggggatcccctttcatggggaatccaaaaacgattttatttttttga

SEQ ID NO: 718556 - DNA, 175 bp, Homo sapiens
cccccgtctggccaagtggcatcatacaactttggtatcgtgtaaggactcatgacacagtccatgccatcactgccacccagaagactgtgtgctggcccctccggtaaactgtggctgtgatggcctgctggggttctccatgcacatcatccctgcctctacgtggtgctgc

SEQ ID NO: 718557 - DNA, 100 bp, Homo sapiens
cgtttggactggctggttctcttggtggattcctcagattatgaacctgtgctggctgcatctgtagattatgaagacttgagaggtgggaggagaggaa

SEQ ID NO: 718558 - DNA, 507 bp, Homo sapiens
tagtttattactacctacacacgtttaatgggttgctttattcatacatgctacataccaatggcctgaccacatcgctcactgaggccattcttaccaacggaagaaaggctggtttctccaccccctgtaggaaaggcctgccttgtaagacaccacacttcggctgaatctgaagtattgggaaaaactaacggaaagaaaaaatacagaggaggttttgttctaatggctgtccaccgcagcctgggactacaacagcccatcgctcactgctgcttggagaaatatactttgctcttgtggacatcaggcttgatggtatcactgccaggttttcagccagctgggcacactttcccatgtttgacagtgaactggaaggcctgaactagtctcaaagtctcatccacagaagcgcccacagggaggtcatttacagtgatctgccgaagaaaacccttattatcaatgataaaaaggccccttgacgagatggcttcatct

SEQ ID NO: 718559 - DNA, 237 bp, Homo sapiens
gctgaggttatctagggttcactatccattgtgttgtaaatgtgtgtcagaaatgcagccagtgtttgtgggtctacaacactaaccagacgactttttcatcagtgctttactttagtcttcatgtacgtccattccctggctggaaccttcgttgttggtattggtattcagcagcagtgtgcagttttgctggccagagcgtcattctcctggctttaggttgtaaagaaaagg

SEQ ID NO: 718560 - DNA, 125 bp, Homo sapiens
  misc_feature (32)..(32): n is a, c, g, or t
  misc_feature (40)..(40): n is a, c, g, or t
  misc_feature (78)..(78): n is a, c, g, or t
  misc_feature (87)..(87): n is a, c, g, or t
tctgactcttcccccactccccatcttactgntttaattnaatttttcactccccagagtctaatatggattctgacncttacagtnttccgccccctcactacctcctttaatacaaattcaat

SEQ ID NO: 718561 - DNA, 733 bp, Homo sapiens
agtctgaaggcctcgctggtttctgtgatggctttgcagtaagtgccgcctgggctgcatgcattggctaacaggctgcagaatggcaaggaaggactctgcctagagattgtcgattggccaggagaatcatacggtcacttcaggtaacaagacccctggcaaattgggcacttggactatgtactagattggttgggatggtggcaggggtgtggggtccttcaaccctgcctgaattctcttttggcattctgtgctctgtatgctgctgtccccaagggctctttcttattatggcagggagtggggatggtcctactattctttctctggagaaggaaagcctccaagacatccatgtgcttgggcacgcttgagaaggcgttcatccaccacgcctagcaggcagaccttgaagccgtcacctttagtctatctgcagaggtattcagttcctggcacagtgggactaggggcatgtagagtatatgaggaggcagtatggctgtgcaagagccttcatttcagcttcaattaatagggaagactttatgataggtctatagatgctgaaaaggtatggcggtaagatgtaacaatccagcccttattaaaactcttagtaaattaagtctggaagaaacacgtagtctagataaaggtctgttcagaaagcaaagtgatgggcattctagagagtcagaggcggaggcattcccattaagtcaga

SEQ ID NO: 718562 - DNA, 797 bp, Homo sapiens
  misc_feature (23)..(23): n is a, c, g, or t
  misc_feature (61)..(61): n is a, c, g, or t
  misc_feature (64)..(64): n is a, c, g, or t
  misc_feature (79)..(81): n is a, c, g, or t
  misc_feature (85)..(85): n is a, c, g, or t
  misc_feature (92)..(92): n is a, c, g, or t
  misc_feature (97)..(97): n is a, c, g, or t
  misc_feature (113)..(113): n is a, c, g, or t
  misc_feature (141)..(141): n is a, c, g, or t
  misc_feature (186)..(186): n is a, c, g, or t
  misc_feature (195)..(196): n is a, c, g, or t
  misc_feature (200)..(200): n is a, c, g, or t
  misc_feature (202)..(203): n is a, c, g, or t
  misc_feature (210)..(210): n is a, c, g, or t
  misc_feature (219)..(219): n is a, c, g, or t
  misc_feature (230)..(230): n is a, c, g, or t
  misc_feature (234)..(234): n is a, c, g, or t
  misc_feature (237)..(237): n is a, c, g, or t
  misc_feature (251)..(251): n is a, c, g, or t
  misc_feature (255)..(255): n is a, c, g, or t
  misc_feature (263)..(263): n is a, c, g, or t
  misc_feature (266)..(268): n is a, c, g, or t
  misc_feature (271)..(272): n is a, c, g, or t
  misc_feature (281)..(281): n is a, c, g, or t
  misc_feature (289)..(298): n is a, c, g, or t
  misc_feature (300)..(301): n is a, c, g, or t
  misc_feature (311)..(311): n is a, c, g, or t
  misc_feature (319)..(319): n is a, c, g, or t
  misc_feature (322)..(322): n is a, c, g, or t
  misc_feature (332)..(332): n is a, c, g, or t
  misc_feature (336)..(336): n is a, c, g, or t
  misc_feature (340)..(342): n is a, c, g, or t
  misc_feature (344)..(344): n is a, c, g, or t
  misc_feature (354)..(354): n is a, c, g, or t
  misc_feature (360)..(360): n is a, c, g, or t
  misc_feature (366)..(366): n is a, c, g, or t
  misc_feature (369)..(369): n is a, c, g, or t
  misc_feature (371)..(371): n is a, c, g, or t
  misc_feature (397)..(397): n is a, c, g, or t
  misc_feature (403)..(404): n is a, c, g, or t
  misc_feature (448)..(448): n is a, c, g, or t
  misc_feature (454)..(454): n is a, c, g, or t
  misc_feature (460)..(460): n is a, c, g, or t
  misc_feature (474)..(474): n is a, c, g, or t
  misc_feature (482)..(483): n is a, c, g, or t
  misc_feature (488)..(488): n is a, c, g, or t
  misc_feature (490)..(490): n is a, c, g, or t
  misc_feature (507)..(507): n is a, c, g, or t
  misc_feature (510)..(510): n is a, c, g, or t
  misc_feature (522)..(522): n is a, c, g, or t
  misc_feature (528)..(528): n is a, c, g, or t
  misc_feature (545)..(545): n is a, c, g, or t
  misc_feature (548)..(548): n is a, c, g, or t
  misc_feature (571)..(571): n is a, c, g, or t
  misc_feature (573)..(573): n is a, c, g, or t
  misc_feature (576)..(576): n is a, c, g, or t
  misc_feature (584)..(585): n is a, c, g, or t
  misc_feature (589)..(589): n is a, c, g, or t
  misc_feature (592)..(592): n is a, c, g, or t
  misc_feature (605)..(605): n is a, c, g, or t
  misc_feature (625)..(625): n is a, c, g, or t
  misc_feature (629)..(629): n is a, c, g, or t
  misc_feature (641)..(642): n is a, c, g, or t
  misc_feature (661)..(661): n is a, c, g, or t
  misc_feature (663)..(663): n is a, c, g, or t
  misc_feature (679)..(679): n is a, c, g, or t
  misc_feature (681)..(681): n is a, c, g, or t
  misc_feature (692)..(692): n is a, c, g, or t
  misc_feature (698)..(698): n is a, c, g, or t
  misc_feature (703)..(703): n is a, c, g, or t
  misc_feature (731)..(732): n is a, c, g, or t
  misc_feature (755)..(755): n is a, c, g, or t
ttattctgtctgttctttttggngttacacatcctgggagtgttatacattgaacaaattnggnactaccttataattnnntctngcttggnaagantcctttaaaaaatgcnctgaggtacaaatcccctatgtcttaancatgggtctctgccattatacaaagggtttaaccaaatttatcanacacttccnngccngnngctctcnccccccctntccccccggcncccngcnccccctgttccccncttncccgtccnccnnngtnnccccttgcngcggcccnnnnnnnnnngnngtttttctgntttttggngtnttcttctgtngggngggnnngntcgggggtgngggttngggggnggngngtggggggggggggtggggggggggngggggnnggggggggggcattgggggggggggggggggggtgggggggtgngggggngggcgnggtggtggccgggngggggggnnggttngngtgctgggcttgcacanttnttttcgagatcncttccnattcttctaaaattttnttnttttttttttcccgatatttctnancanattttttnnctcnagngctttctcttccnttttccggggctgccgggcngctnccggctcaattnngccgggaaaccacaagacncngctcaacgtccaaganancaacccggganaccgcngcatnttcacgctcagccaaccctggcgactgnnccaatcgcgccaccgtctctcancagcctcgggattgatcaacttcctggtcttcaaatgggccg

SEQ ID NO: 718563 - DNA, 473 bp, Homo sapiens
gccccggtgatctagaggtccccagcgcgcgcaagtagtagcggtacagataaaaagggctttcttttctcctacagtctctagggcttggtaggtggcacataagtagaggagttaaccttcatctttggcagatgagctaaattggctaaaaatccactggaagatctcctcagtctcatagctcagagaagcacaaagaaggccgagacagcaagctccctccggtctcagctccggaagcaattggctactttcattaagcacatcaggtacagcagccaagatatccaatggtttaactagtaccagcttatttgcgggtggcggaataaattctttcaacggctttacagtagccaatcttcggtctcggtcgtttcccggggtgatcctctgaagaagattggacagtcgagactcatcacaataagacatggatctctcctttccgtcatgcggtatgggccagg

SEQ ID NO: 718564 - DNA, 496 bp, Homo sapiens
  misc_feature (129)..(129): n is a, c, g, or t
  misc_feature (342)..(342): n is a, c, g, or t
  misc_feature (446)..(446): n is a, c, g, or t
  misc_feature (451)..(451): n is a, c, g, or t
atccgtggtgtggcatgtggagtgctgctttcctttttgtagctgagcaggcctccacggtgcgggtggactgcatgctgtttttccgcgcctctgtggatgggcgtctgggctggtggctgccgggancggtgctgctgggagcgcgcatgttcgggaactcgcttggcttctgctttcagtggtctccttttatgccctccttcccctcacccctctcgctcttcagcccgccctgcccctgcgcccatcctctgtgtggctgcgtctgtaaacctgagtgtgtccttggaccttgtgcagtcctagattccggagcctgcaggtgtgggtccagatacncgccctgcctcctgctgctgtgtgaccatggacaggccttcgagtctctggtctctggtgggtgtctgagtctgcatgggaggcagaggttgcagtgagccgangactntgccactgcactccagtctgggcaacagagcacggctctgtctca

SEQ ID NO: 718565 - DNA, 199 bp, Homo sapiens
ggaggttgggggaaccgcccgcgacctccgtcggacacaccgccgctcaacccagacggccccgctcccgtgcccgcgcccggtccgcgcgcctcgttcccaccacctttcggtagccctggtttcggcgcgcccgggcccggcatgcattacgcgccgcctgcggccgcagcattcggtataatagacgacgcggccg

SEQ ID NO: 718566 - DNA, 180 bp, Homo sapiens
tgaatatcttttcattcacatctcctctgccttagtcacaatggcaacagtacagaaaaaggatgcttgatatcactaatcattagaggaatgcaaatcacaaccgtaatgagatatcacctcacacctgttaaaatggctgttatcaaaaaaatcaaaagctattaagtattgataagg

SEQ ID NO: 718567 - DNA, 134 bp, Homo sapiens
ttgcaaaacaggacagacaatcaaagatgtggtgtgtgtggaatacaccagcgcttgtcacactgcccataatctccaatggtacttttaaaatcaacaaaaagcgaaacggtggcccagaggctgctcctttt

SEQ ID NO: 718568 - DNA, 243 bp, Homo sapiens
ttcagttaccattactcgtaatcactggtcaattttatgaccgcgactttctggaaataaaatgtgtaattaccttttactctgagtcataatctcccaccttgtcttagaggttattcattccattatttagagggcctctattgccttgtgcctggtattattctataatcatcactttatgaagaataaaatctgtctttcctgccttcaaagttctcgtttgaatatttgctactacca

SEQ ID NO: 718569 - DNA, 3345 bp, Homo sapiens
ttggagtcagtggcaataaccagggcaataaccaggcgtgtcccagggggagccccgctctgcagccctgtgcgccgtagagagctggacttaggctggcagcatggccgagttcagggtcagggtgtccaccggagaagccttcggggctggcacatgggacaaagtgtctgtcagcatcgtggggacccggggagagagccccccactgcccctggacaatctcggcaaggagttcactgcgggcgctgaggaggacttccaggtgacgctcccggaggacgtaggccgagtgctgctgctgcgcgtgcacaaggcgcccccagtgctgcccctgctggggcccctggccccggatgcctggttctgccgctggttccagctgacaccgccgcggggcggccacctcctcttcccctgctaccagtggctggagggggcggggaccctggtgctgcaggagggtacagccaaggtgtcctgggcagaccaccaccctgtgctccagcaacagcgccaggaggagcttcaggcccggcaggagatgtaccagtggaaggcttacaacccaggttggcctcactgcctggatgaaaagacagtggaagacttggagctcaatatcaaatactccacagccaagaatgccaacttttatctacaggctggctctgcttttgcagagatgaaaatcaaggggttgctggaccgcaaggggctctggaggagtctgaatgagatgaaaaggatcttcaacttccggaggaccccagcagctgagcacgcatttgagcactggcaggaggatgccttcttcgcctcccagttcctgaatggtctcaaccctgtcctgatccgccgctgtcactacctcccaaagaacttccccgtcactgatgccatggtggcctcagtgttgggtcctgggaccagcttgcaggctgagctagagaagggctccctgttcttggtggatcacggcatcctctctggcatccagaccaatgtcattaatgggaagcctcagttctctgcggccccaatgaccctgctataccagagcccaggctgcgggccgctgctgcctctcgccatccagctcagccagacccccggcccaaacagccccatcttcctgcccactgatgacaagtgggactggttgctggccaagacctgggtgcgcaatgccgagttctccttccatgaggccctcacgcacctgctgcactcacatctgctgcctgaggtcttcaccctggctaccctgcgtcagctgccccactgccaccctctcttcaagctgctgatcccgcacacccgatacaccctgcacatcaacacactcgcccgggagctgcttatcgtgccagggcaggtggtggacaggtccacaggcatcggcattgaaggcttctctgagttgatacagaggaacatgaagcagctgaactattctctcctgtgtctgcctgaggatatccggacccgaggagttgaagacatcccaggctactactaccgtgatgatgggatgcagatctggggtgcagtggaacgctttgtctctgaaatcatcggtatctactacccaagtgatgagtctgtccaagatgacagagagctccaggcctgggtcagagagatcttctccaagggcttcctaaaccaggagagctcaggtataccctcctcactggagacccgggaagccctggtgcagtatgtcaccatggtgatattcacctgctccgccaagcatgcggctgtcagtgcagggcagtttgactcctgtgcttggatgcccaacctgccacccagcatgcagctgccaccacccacctccaaaggcctggcaacatgcgagggcttcatagccaccctcccacctgtcaatgccacatgtgatgtcatccttgctctctggttgctgagcaaggagcctggagaccaaaggcccctgggcacctatccggatgagcacttcacagaggaggcccctcggcggagcatcgccaccttccagagccgcctggcccagatctcgaggggcatccaggagcggaaccggggcctggtgctgccctacacctacctagaccctcccctcatcgagaacagcgtctccatctaaatcccaggggaacacaggcccagatgacatccctttgaccacatcgctctaggataactggcacccagagaaaaggactcctcagaaaaaacaggcccccatgtgcctctcctgggacaaccagactctgtaactcacccccaccaccatacacacacacaaaaacagaaacaaaatcaaaacagagaaagcagaaaatctaccaagaacagagtctcaggacagaaccactgagtcttttggaggctccaagcctcaaagtgcccgcagagcccaccttgagggttttgctagttggttttgttttgcgttttacagccgtggggggaagcacataatcccgccccagggcccactagcatccactgattggaccttatggtcacccaactcaaggacagccaccaagaagtggctgccaaagagactgggcgcagtggctcatgcccataatcccagcactttgggagatggaggcgggaaaatcatttgaggtcagaagttcaaggccagcctggacgacatagcgagactccacctctaccaaaaaataaaaatacacaacgtagaaaattagaccccctggtggcggcccggctagagagtccccgtgaaaattttcaaagcccagctccgcaaggggagggggcgaggcaccaacggggagctacggtcggggaaaacggggcctagaagaggagccgcaaagaaaaatccacgggagcccaagagctagggcgtggaagccgcaccaccaatataaaagacgcgggcggggggagagacacacggagcccatttaggcaaaaacccctccgcaggcgggtctgacggggaacatcgggggacccaactcggaggaggtccaagcagcccgtatagaaagaaaatactggcgccaccgggggaagatgacaccattctcctcccgcacataaggcccggcgtgtagacgtgagagagcacgtgaagtggcgaatctaaccagccccaagatgctacggagcacccacaaaggacacacaaagccacaaacagacaacgaaagacaccaacgcctgcgcgcgcgcccagagacacggaaaacaaacggagggcgcgccacgagacaggagcgcgaaagagccggagagcgggaagaagaggcacacaacacaaaaccggggcacggacgccgcacccggaggggggcggcacacgcgcagggaaca

SEQ ID NO: 718570 - DNA, 254 bp, Homo sapiens
agcggcgtcgcactcacacccgggcgcaggaggcgggcggcccgggccccgagcggcccccatggacgcccccagcacggggcgctgagaacccccgcgtcgctgcccacccggtccggcgcgccacgccgagggatctctggacaggacaagactccgaactactcacccagcacacagcccgggacccacaaacccagtgccaagataactgcgggagtggggacgggaacttattgggcaagggcaataca

SEQ ID NO: 718571 - DNA, 499 bp, Homo sapiens
  misc_feature (237)..(237): n is a, c, g, or t
  misc_feature (239)..(239): n is a, c, g, or t
  misc_feature (276)..(276): n is a, c, g, or t
  misc_feature (285)..(285): n is a, c, g, or t
  misc_feature (312)..(312): n is a, c, g, or t
  misc_feature (316)..(316): n is a, c, g, or t
  misc_feature (321)..(321): n is a, c, g, or t
  misc_feature (326)..(326): n is a, c, g, or t
  misc_feature (345)..(345): n is a, c, g, or t
  misc_feature (347)..(347): n is a, c, g, or t
  misc_feature (374)..(374): n is a, c, g, or t
  misc_feature (378)..(378): n is a, c, g, or t
  misc_feature (393)..(393): n is a, c, g, or t
  misc_feature (401)..(401): n is a, c, g, or t
  misc_feature (413)..(413): n is a, c, g, or t
  misc_feature (482)..(482): n is a, c, g, or t
ttggagtcagtggcaataaccagggcaataaccaggcgtgtcccagggggagccccgctctgcagccctgtgcgccgtagagagctggacttaggctggcagcatggccgagttcagggtcagggtgtccaccggagaagccttcggggctggcacatgggacaaagtgtctgtcagcatcgtggggacccggggagagagccccccactgcccctggacaatctcggcaaggaggntntacctgccgggctgccggacggaggacatatccaggntgaccgccncgctggaggactgatagcgcctgaagntgcnctgcnctgcnatgccgcggctgcgaccanangtgcagccccccccaagctgctatgcncccnctgctgtgggggcgnccccctgngccccagaggantgcccatggggtatcttgctctgctgtgcgatttcccaagcctggactactcagcacagcaggggagcnggcgcaaacacactcca

SEQ ID NO: 718572 - DNA, 3258 bp, Homo sapiens
ttggagtcagtggcaataaccagggcaataaccaggcgtgtcccagggggagccccgctctgcagccctgtgcgccgtagagagctggacttaggctggcagcatggccgagttcagggtcagggtgtccaccggagaagccttcggggctggcacatgggacaaagtgtctgtcagcatcgtggggacccggggagagagccccccactgcccctggacaatctcggcaaggagttcactgcgggcgctgaggaggacttccaggtgacgctcccggaggacgtaggccgagtgctgctgctgcgcgtgcacaaggcgcccccagtgctgcccctgctggggcccctggccccggatgcctggttctgccgctggttccagctgacaccgccgcggggcggccacctcctcttcccctgctaccagtggctggagggggcggggaccctggtgctgcaggagggtacagccaaggtgtcctgggcagaccaccaccctgtgctccagcaacagcgccaggaggagcttcaggcccggcaggagatgtaccagtggaaggcttacaacccaggttggcctcactgcctggatgaaaagacagtggaagacttggagctcaatatcaaatactccacagccaagaatgccaacttttatctacaggctggctctgcttttgcagagatgaaaatcaaggggttgctggaccgcaaggggctctggaggagtctgaatgagatgaaaaggatcttcaacttccggaggaccccagcagctgagcacgcatttgagcactggcaggaggatgccttcttcgcctcccagttcctgaatggtctcaaccctgtcctgatccgccgctgtcactacctcccaaagaacttccccgtcactgatgccatggtggcctcagtgttgggtcctgggaccagcttgcaggctgagctagagaagggctccctgttcttggtggatcacggcatcctctctggcatccagaccaatgtcattaatgggaagcctcagttctctgcggccccaatgaccctgctataccagagcccaggctgcgggccgctgctgcctctcgccatccagctcagccagacccccggcccaaacagccccatcttcctgcccactgatgacaagtgggactggttgctggccaagacctgggtgcgcaatgccgagttctccttccatgaggccctcacgcacctgctgcactcacatctgctgcctgaggtcttcaccctggctaccctgcgtcagctgccccactgccaccctctcttcaagtccacaggcatcggcattgaaggcttctctgagttgatacagaggaacatgaagcagctgaactattctctcctgtgtctgcctgaggatatccggacccgaggagttgaagacatcccaggctactactaccgtgatgatgggatgcagatctggggtgcagtggaacgctttgtctctgaaatcatcggtatctactacccaagtgatgagtctgtccaagatgacagagagctccaggcctgggtcagagagatcttctccaagggcttcctaaaccaggagagctcaggtataccctcctcactggagacccgggaagccctggtgcagtatgtcaccatggtgatattcacctgctccgccaagcatgcggctgtcagtgcagggcagtttgactcctgtgcttggatgcccaacctgccacccagcatgcagctgccaccacccacctccaaaggcctggcaacatgcgagggcttcatagccaccctcccacctgtcaatgccacatgtgatgtcatccttgctctctggttgctgagcaaggagcctggagaccaaaggcccctgggcacctatccggatgagcacttcacagaggaggcccctcggcggagcatcgccaccttccagagccgcctggcccagatctcgaggggcatccaggagcggaaccggggcctggtgctgccctacacctacctagaccctcccctcatcgagaacagcgtctccatctaaatcccaggggaacacaggcccagatgacatccctttgaccacatcgctctaggataactggcacccagagaaaaggactcctcagaaaaaacaggcccccatgtgcctctcctgggacaaccagactctgtaactcacccccaccaccatacacacacacaaaaacagaaacaaaatcaaaacagagaaagcagaaaatctaccaagaacagagtctcaggacagaaccactgagtcttttggaggctccaagcctcaaagtgcccgcagagcccaccttgagggttttgctagttggttttgttttgcgttttacagccgtggggggaagcacataatcccgccccagggcccactagcatccactgattggaccttatggtcacccaactcaaggacagccaccaagaagtggctgccaaagagactgggcgcagtggctcatgcccataatcccagcactttgggagatggaggcgggaaaatcatttgaggtcagaagttcaaggccagcctggacgacatagcgagactccacctctaccaaaaaataaaaatacacaacgtagaaaattagaccccctggtggcggcccggctagagagtccccgtgaaaattttcaaagcccagctccgcaaggggagggggcgaggcaccaacggggagctacggtcggggaaaacggggcctagaagaggagccgcaaagaaaaatccacgggagcccaagagctagggcgtggaagccgcaccaccaatataaaagacgcgggcggggggagagacacacggagcccatttaggcaaaaacccctccgcaggcgggtctgacggggaacatcgggggacccaactcggaggaggtccaagcagcccgtatagaaagaaaatactggcgccaccgggggaagatgacaccattctcctcccgcacataaggcccggcgtgtagacgtgagagagcacgtgaagtggcgaatctaaccagccccaagatgctacggagcacccacaaaggacacacaaagccacaaacagacaacgaaagacaccaacgcctgcgcgcgcgcccagagacacggaaaacaaacggagggcgcgccacgagacaggagcgcgaaagagccggagagcgggaagaagaggcacacaacacaaaaccggggcacggacgccgcacccggaggggggcggcacacgcgcagggaaca

SEQ ID NO: 718573 - DNA, 181 bp, Homo sapiens
atagtcaaactggtatccagtaagtaccaagtcctcatttatgtccgggaagacttttgaatactttcaagtgcatatattatattatcacctgctcgtaccattaatgtagataatatagttaccagacaacaacttagagttttatactagcacagacttccaacttttccgtcaagtc

SEQ ID NO: 718574 - DNA, 3030 bp, Homo sapiens
ttggagtcagtggcaataaccagggcaataaccaggcgtgtcccagggggagccccgctctgcagccctgtgcgccgtagagagctggacttaggctggcagcatggccgagttcagggtcagggtgtccaccggagaagccttcggggctggcacatgggacaaagtgtctgtcagcatcgtggggacccggggagagagccccccactgcccctggacaatctcggcaaggagttcactgcgggcgctgaggaggacttccaggtgacgctcccggaggacgtaggccgagtgctgctgctgcgcgtgcacaaggcgcccccagtgctgcccctgctggggcccctggccccggatgcctggttctgccgctggttccagctgacaccgccgcggggcggccacctcctcttcccctgctaccagtggctggagggggcggggaccctggtgctgcaggagggtacagccaaggtgtcctgggcagaccaccaccctgtgctccagcaacagcgccaggaggagcttcaggcccggcaggagatgtaccagtggaaggcttacaacccaggttggcctcactgcctggatgaaaagacagtggaagacttggagctcaatatcaaatactccacagccaagaatgccaacttttatctacaggctggctctgcttttgcagagatgaaaatcaaggggttgctggaccgcaaggggctctggaggagtctgaatgagatgaaaaggatcttcaacttccggaggaccccagcagctgagcacgcatttgagcactggcaggaggatgccttcttcgcctcccagttcctgaatggtctcaaccctgtcctgatccgccgctgtcactacctcccaaagaacttccccgtcactgatgccatggtggcctcagtgttgggtcctgggaccagcttgcaggctgagctagagaagggctccctgttcttggtggatcacggcatcctctctggcatccagaccaatgtcattaatgggaagcctcagttctctgcggccccaatgaccctgctataccagagcccaggctgcgggccgctgctgcctctcgccatccagctcagccagacccccggcccaaacagccccatcttcctgcccactgatgacaagtgggactggttgctggccaagacctgggtgcgcaatgccgagttctccttccatgaggccctcacgcacctgctgcactcacatctgctgcctgaggtcttcaccctggctaccctgcgtcagctgccccactgccaccctctcttcaagctgctgatcccgcacacccgatacaccctgcacatcaacacactcgcccgggagctgcttatcgtgccagggcaggtggtggacaggtccacaggcatcggcattgaaggcttctctgagttgatacagaggaacatgaagcagctgaactattctctcctgtgtctgcctgaggatatccggacccgaggagttgaagacatcccaggctactactaccgtgatgatgggatgcagatctggggtgcagtggaacgctttgtctctgaaatcatcggtatctactacgatgtcatccttgctctctggttgctgagcaaggagcctggagaccaaaggcccctgggcacctatccggatgagcacttcacagaggaggcccctcggcggagcatcgccaccttccagagccgcctggcccagatctcgaggggcatccaggagcggaaccggggcctggtgctgccctacacctacctagaccctcccctcatcgagaacagcgtctccatctaaatcccaggggaacacaggcccagatgacatccctttgaccacatcgctctaggataactggcacccagagaaaaggactcctcagaaaaaacaggcccccatgtgcctctcctgggacaaccagactctgtaactcacccccaccaccatacacacacacaaaaacagaaacaaaatcaaaacagagaaagcagaaaatctaccaagaacagagtctcaggacagaaccactgagtcttttggaggctccaagcctcaaagtgcccgcagagcccaccttgagggttttgctagttggttttgttttgcgttttacagccgtggggggaagcacataatcccgccccagggcccactagcatccactgattggaccttatggtcacccaactcaaggacagccaccaagaagtggctgccaaagagactgggcgcagtggctcatgcccataatcccagcactttgggagatggaggcgggaaaatcatttgaggtcagaagttcaaggccagcctggacgacatagcgagactccacctctaccaaaaaataaaaatacacaacgtagaaaattagaccccctggtggcggcccggctagagagtccccgtgaaaattttcaaagcccagctccgcaaggggagggggcgaggcaccaacggggagctacggtcggggaaaacggggcctagaagaggagccgcaaagaaaaatccacgggagcccaagagctagggcgtggaagccgcaccaccaatataaaagacgcgggcggggggagagacacacggagcccatttaggcaaaaacccctccgcaggcgggtctgacggggaacatcgggggacccaactcggaggaggtccaagcagcccgtatagaaagaaaatactggcgccaccgggggaagatgacaccattctcctcccgcacataaggcccggcgtgtagacgtgagagagcacgtgaagtggcgaatctaaccagccccaagatgctacggagcacccacaaaggacacacaaagccacaaacagacaacgaaagacaccaacgcctgcgcgcgcgcccagagacacggaaaacaaacggagggcgcgccacgagacaggagcgcgaaagagccggagagcgggaagaagaggcacacaacacaaaaccggggcacggacgccgcacccggaggggggcggcacacgcgcagggaaca

SEQ ID NO: 718575 - DNA, 354 bp, Homo sapiens
  misc_feature (318)..(318): n is a, c, g, or t
  misc_feature (341)..(341): n is a, c, g, or t
aggctaaatactcaacttgaactgcctgaattcaattcccagctctgccacgtatagctgagtgaccttgcggatttatttcatctctgtaggcctcagtttccccggtttattttatttttatttctatttgtattcattttgctttttagggccgcacccggagcatatggaggttcccaggctaggggtctaatcggagctgtagccgccagcctctgccacagcaacagcaacacaggatctgagcctcgtctgtgacctacaccacacagctcagggcaacgccagatccttagcccactgagcgaggccagngatcgaacccacaacctcatggntcctagtcggatt

SEQ ID NO: 718576 - DNA, 1777 bp, Homo sapiens
acgcatttgagtggccccgtccccgtgtccccaccctcaaggctcaccctcaagcctccgcagcagggtcctcaggtccctggaagccccatcccagcccagctctccttgcaggtataccctcctcactggagacccgggaagccctggtgcagtatgtcaccatggtgatattcacctgctccgccaagcatgcggctgtcagtgcagggcagtttgactcctgtgcttggatgcccaacctgccacccagcatgcagctgccaccacccacctccaaaggcctggcaacatgcgagggcttcatagccaccctcccacctgtcaatgccacatgtgatgtcatccttgctctctggttgctgagcaaggagcctggagaccaaaggcccctgggcacctatccggatgagcacttcacagaggaggcccctcggcggagcatcgccaccttccagagccgcctggcccagatctcgaggggcatccaggagcggaaccggggcctggtgctgccctacacctacctagaccctcccctcatcgagaacagcgtctccatctaaatcccaggggaacacaggcccagatgacatccctttgaccacatcgctctaggataactggcacccagagaaaaggactcctcagaaaaaacaggcccccatgtgcctctcctgggacaaccagactctgtaactcacccccaccaccatacacacacacaaaaacagaaacaaaatcaaaacagagaaagcagaaaatctaccaagaacagagtctcaggacagaaccactgagtcttttggaggctccaagcctcaaagtgcccgcagagcccaccttgagggttttgctagttggttttgttttgcgttttacagccgtggggggaagcacataatcccgccccagggcccactagcatccactgattggaccttatggtcacccaactcaaggacagccaccaagaagtggctgccaaagagactgggcgcagtggctcatgcccataatcccagcactttgggagatggaggcgggaaaatcatttgaggtcagaagttcaaggccagcctggacgacatagcgagactccacctctaccaaaaaataaaaatacacaacgtagaaaattagaccccctggtggcggcccggctagagagtccccgtgaaaattttcaaagcccagctccgcaaggggagggggcgaggcaccaacggggagctacggtcggggaaaacggggcctagaagaggagccgcaaagaaaaatccacgggagcccaagagctagggcgtggaagccgcaccaccaatataaaagacgcgggcggggggagagacacacggagcccatttaggcaaaaacccctccgcaggcgggtctgacggggaacatcgggggacccaactcggaggaggtccaagcagcccgtatagaaagaaaatactggcgccaccgggggaagatgacaccattctcctcccgcacataaggcccggcgtgtagacgtgagagagcacgtgaagtggcgaatctaaccagccccaagatgctacggagcacccacaaaggacacacaaagccacaaacagacaacgaaagacaccaacgcctgcgcgcgcgcccagagacacggaaaacaaacggagggcgcgccacgagacaggagcgcgaaagagccggagagcgggaagaagaggcacacaacacaaaaccggggcacggacgccgcacccggaggggggcggcacacgcgcagggaaca

SEQ ID NO: 718577 - DNA, 115 bp, Homo sapiens
gctgccttctcagactgaaatttcttttcacacttcaccaggtcctccacagacaccagctcgttcagcacggcctccatggcactgcccccgcgagcctcacactacagtctac

SEQ ID NO: 718578 - DNA, 239 bp, Homo sapiens
  misc_feature (6)..(6): n is a, c, g, or t
aagtanagatgccaggacccgctgaaagcctagaaatggtgagattgccagttccgacatctggagaggggcaagggctggttggaactggtgggaagcagctgtggtgggactcaggcctccccgcagtcagctccacaatctgcaccctgagttctccttgcccaggttggcatctgtcccctgcagccataagatggcagctaggctgacagccgggcccccgggcgtcctgtctt

SEQ ID NO: 718579 - DNA, 95 bp, Homo sapiens
tcttctcttctcccctcccgcatccgggtagcagcatagtcactctgcgtctctcccttgatccccgcccgcatggctgcgtctcctccgcacgg

SEQ ID NO: 718580 - DNA, 230 bp, Homo sapiens
  misc_feature (22)..(22): n is a, c, g, or t
  misc_feature (37)..(37): n is a, c, g, or t
  misc_feature (49)..(49): n is a, c, g, or t
  misc_feature (53)..(53): n is a, c, g, or t
  misc_feature (229)..(229): n is a, c, g, or t
ccgcaggggctcggctgttttncgcgcggcaggcggncccatggcgcantggngaaagctgctcaaggagcagaagtacgaccggcagctgaggcggagtctcgctctgtcgcccaggctggagtgcagtggcgcaatctcggctcacttcaagctccgcctcctgggttcacgccattcttctgcctcagcctccgagtaggttgtggggtgatcatgggcaagaggnt

SEQ ID NO: 718581 - DNA, 256 bp, Homo sapiens
  misc_feature (149)..(149): n is a, c, g, or t
  misc_feature (155)..(155): n is a, c, g, or t
  misc_feature (191)..(191): n is a, c, g, or t
  misc_feature (233)..(233): n is a, c, g, or t
acccagagatacttctgtgccacgacccaaggcctggttctacacaaattggtgctgtttggaagacaccaactagagcagagtttttgccataaccagtgggtctgaaatgcaacgaggagaaccatcactccctgaaaggagctaantagganccagtagctgctctgtggtcccacctccacagagcncagctagctaagtccactgcttgaaatccttgtgccagcacngcagcaatctgagctctacctgg

SEQ ID NO: 718582 - DNA, 208 bp, Homo sapiens
gcattatccgggacgtacttatggctgactcatccgctaccttcacgccaatggcgcctcaatatactatatctagcctctagcctacacatacggaagaggccatatagtaacggatcattatctctagctcgagaaatcctgataacaatcggctattatcactccttgcgttgcaacatattagcacacagcacttcattagagc

SEQ ID NO: 718583 - DNA, 135 bp, Homo sapiens
gaccgtgaactgcctgatatgatggaactgcccgaccacccctggttctgtcggcgtccagttccacccggtaggttcactgtccacccctgcgtgacggccatccgctgttctccatgctacatcctgcgccgc

SEQ ID NO: 718584 - DNA, 3530 bp, Homo sapiens
ttattaaacaatctcatttaacatttaaaagaacaatagtattcactttgcttattgagggtggtactgcagaaagattcagaacataggctctggagtcagactgccaggctttctatcccagcatcttctcttgctcttgcgtgacctggggcagattacttaaatttttttctaccccacatgcctcatttgtaaagtggagttgtagtggtaatacttcatatgattgttggggagattaaataaataatgcatatacagaatttaaagcagtgctgaaacaggaaatatccatgttaaataactgatcattttctttttaaagctcagtttccttttcttctctcaatacttaaaaggtcagaataggtaaatgtaagcaaacaagactgaaaaattaaccagcattgttttattttctaaaatcaggtgggaaagtctgtgtctcatgagaacaaagaacaagattcttattcagtagaaagtgaaaagaaaccagaagttatggctccagtcagttctacacgtttgagcaaacaagtccttcctcatgatagtcttcctgcaaatagccagccatctcggaggggccgctgggggaggaagaacagaaaaacccaggaacgttttggtgataaagattctaaactgctcttggaagagacgtcttcagctcctcaggaacaatatggagaatgtggggagaaatcagaagccacccaggaacaatacactgaaagtgaagaacagctggtggcttctgaggagcagccaagccaggacgggaaacctgaccttcccaagagaagactcagtgagggggttgagccctggcgaggacagctcaagaaaagccctgaggctctgaagtgcagattaacagaaggaagtgagaggctgccccgtcgctacagtgagggtgacagggctgtcctcaggggcttcagtgagagcagcgaggaggaggaggagccggaaagccctcggtcaagctcgccaccaattctcacaaagcccacgctgaagcgaaaggtaacgcatttctttccaggtcttctcttcctccaattccagtttatcttacaccttctcgttttagcttacagttctgaaagagtataagttagaaattcctagtgcattgctttataaaccttaagcctctgtatattgtagctcaagatcttccaagtgaacatttgagatgtgtgtgtgtgtttgacttctttgattcatgggaattcacttagaaatcataagcttatttaagggcttcacctcctgggatgcaaacaaacttttttttagcttactggtttgatgttcaaatcatgacttttaggggcttaaagccctaaaatatctttaaaagatatttttaaagtatgtacagattagaagtgtttatattagaaaaggaggccaaaatattacataattaattggaaagtgaacatagtgctgccctatattttggggtactcagagtccagtagctcatcttgggtgctattgttttctctctactctccccacttctcacacatccctccagtggtttaacgtggtctctcttgctttaaaaatattttctaaactatattccatcataatgatagccaattagttattaaataatgtacaatgatgataatgaattctgttaagccgtttaccagaaacatcccaggctatggagtggattttaagcattgccaggaggcagccagactgaagcgaggctgctccctggaagagccactcagccagcttccagccaaagcagcacaatcgttcctttccttacagggtcttaaaaagcaagacaggatcttttgttttgttttgttttgttttaagaataatatcttcagagcagttttacatttacagaattaatgcaaagaaagtacagagagttctcgcataccccagccagtttcctctattattaatcccttgcgttggtgtggtacatctatcacagttactgaaccagtgtagatacatcagtaactagagttcatactttattcagatttccatagttttccctaacgtcctttttctgttccaggatcccacccagcatatcgcattacatttagtagtcatgtgtctttaggttcctcttggctgtggtagtttctcagaatttccttagtttcgatggccttcatagttttgagaatgactggtcaggtattttgtagatgatccctcatgatattagaatggggtaatatattcttgagaggaagaccatagaggtaaagtgccattctcatcacataattaaagggtacctgttggcatatatctatcagtatgtatagggaagctgggcatagtggtcactcttgtaatcctagctacttgggaggctgaggcgggaggatcacttgagctggaggctgtagtgcacaatgattgtacctgtaaatagccactgtagtccaacctgcgtgacatagcaagactccgtctgtaaaaataaaaagaagcaagtatcaaatataagggtattatcaatttgatttttccctattgaagttaactttgatgacctggcttaagatattgtttgtcaggtttctacttttcttttccctttactggaaggaagtcactgtgcatagccacacttaagatttctaccccctcagagtggaggctcagcataaattatttgaatttctgcttgggagatttgtcctttctccctcatctgtttatttatccaagcatttatttatatcattattggcccagatatttacgtgatacttcactttataatccaatactactgctttttaaaatttgttgctcagattgttccagttttgaccattagaagctccttcttttagtttccctcttgggctgctgctgctttttttttttttttttttttccttccccagatggggtcttactctgtcacctaggctggagtgcagcggcatgatctcagctcactgcaacctccacctcctgggatgcaagcaacgctcccacctcagcctcttgaataacttggactacaggcatgttccatcacgcctggctaattttttgtacttttgatagagacagggtttcgctatgttgctcaggctggtcttgaactcctgagcttgggcggtccacctgccttggcctccaaggtgctgggattacaggtgtgagccaccgcgcctggcctcctgtgtttaacatatatactgttgttgtcattgtggggtctttttgtttgtttttaagcatttcctttctggcactacaagatgcttcaagttcatcttgtatatttcatgcccttgtcctagaatcagccttttctccaaggaccagggccatttttaatctaatttgaaaattacattctcgattgggactattaagtttgaagtagagaaaaattgaacattgactaactgctgttcattgcatgatcatgaagaatagatctttgtcatcctagcacttgtattgccaatttatgaagtaaaacaaatcatgtt

SEQ ID NO: 718585 - DNA, 829 bp, Homo sapiens
agcgggctgcaccttcgagctggggcagttccggccgccgccgcgcgccctctgcctcgtagctggccgcctgccctgcggtcgacctgggcctagccggccgccgccgccaggtcacttccagcgcggccgcctcatgctccagctgccgccagtctgtcccctggccgcgctgcatggcggcttgagtgaggccggctcctgtctgctagttggacggcgctgactacgccgggcgccctggctggtcttcggggcgcagtgcgagtgcctggtggcgggagcacgggctaggccgaccgcgtgtgcaagttcggctgtccggcgcgaccctcttccctgtcccggcggtcacccaagcgctcgggtgcgccgtggtcccgatggccccagtcccgtatcgcggacggcggcgcattgcttgtcacttctggaaacttcccagggcatacggtgagacgccccttctgtcccgacacggcctctggtgcgccctttctcggggagctagtcgctcgtgtcctagttgcgctcgaaaggttcgtcccaggcacgttcgttgtgcgtggagttggcatcgcgttcccattgcagagctcaggaccgggcaccggccaaaatcgctttgctatagcccgcgagaggcacttcgcctcgagggaactccccttggagtgaaagcgctacttctcattcgggcgaggagctgttgaacgccacccgcgcgaaccgtgttccaggtgaacaaaggctagcgccgttggtgccactgtgtgttcccctggatggagagcgtcgttcttattttcctcggcgtggcgttgcccac

SEQ ID NO: 718586 - DNA, 1074 bp, Homo sapiens
  misc_feature (428)..(428): n is a, c, g, or t
  misc_feature (915)..(915): n is a, c, g, or t
gcggctctcgggccctggggctgttgagttaagtgcgagtgggggagtcccctctcgcacattaactcataacgggtgtctcggagccctgggagctgttgtttactcggatgtttgttgttgaacgctcatggtgatctcacgtcgtgggctgcagcagggcagaaagaattgatgaaagttatgagaactttgacgggtttctctccaagaggtcatcagagagctcactttgcggaggtgcatcaagtgtggcgggtgcggaggcaaaatcggtggtcctcgtctggtggcgctcttcggtctccttaggtgctagctatcttccgttcgctccatgctctcttctcttcgtgacacgagcgttggcgatgaatctttggccgagggatcctctcccttgagctcgagggcgggccatcggaatntggaggtttccagattgatagcgctcgaggcgttgattgcactttgcttgtataggggtgagatccttcgtgggggaacggaaacgtgcgggccccgtgccctctgcggtggcccgtgcaagagtcgtgggctcagagtgatagctctgtgggagcgtgttgaacaaatgtgaacccgtgtatatacggggaaggaagcccggcccagggggagccggtgcctttggttaggaaccattgaggaagtgtcatcaagcttgtcccgcccagcgcttgtgtgttgcccaagataagcgcaatatgggaagggggttccaggaaggccgccgtcattgtgggcggcgaaggggaaagatttggcgttgtttccaaggtttccagttagggagcacattgggttagaacggggtggggacacgatttcgttcgttccaccagtgggggggctttaaggttgaaactttgggccccagagggggcccccttnttagcaccagtggttgacccctattctttctacacgagcaaagagacccaaaaggggccgtgtgagggactgtggcgttcgttggggcagaaaaggagcgtcctggggagagaaccaccttgagttggcgaaggcccttgggggcttgggggttcccca

SEQ ID NO: 718587 - DNA, 142 bp, Homo sapiens
aagagtgctcaggtctgcggaacgctcattgctctggtgatgcactggcctgtcaggcagctcgtagctcttctccagtgaggagctggaagcagccgtggccatctctatgctcgaagtccagtggcgacgtagcacagct

SEQ ID NO: 718588 - DNA, 256 bp, Homo sapiens
ctgtttccgcgatagcttcgtctccggaaataaaacacttcgcggatgcggactccgtcgcgttggtcgcctctggaaagctcatatacagcagagcgtgtgcctcctgtcacggtaagcgacttcaaggtcagccgctttggcaattgaaggatcagttcgaaggaagacgtgcccccgcgcacgatcaaacgggccacacctggagtcattcaggggaggagcttttccacaaggttcagaacggaaggttcct

SEQ ID NO: 718589 - DNA, 659 bp, Homo sapiens
ctatgattcaggcaccgaaacttactgcgaacacctgactgtcgtcaacgaatatgccgattacggctatggtaatatggtctatggctcttcacatagtcattgacagattcgaagacagtactgtcctatacacaatgcacccaatgaccactatataagttgcataagtatggccatgaagtcactcctagtatatagccctgcatgacagactacactatagatgccataccgcggcatggactgacttattgatgactatgactaagacgcatgagaagcatgctgccatttccatcctactgcagacacttggactgatgaccgatgtatatgactgtatgctgctcgcaggcaaactgtgctgtgactcgccatcaaacctcgactatgaccaatgagatgactctagcagagcgctgctggagagaccgctgctgacctatcctgagctgatatcgagacaagcttggtaatcatgaggacttataccgctatagggatgctcatgacaggcttctgcagcatacatctgatggcattctatggaggatattgaaagcatgaacatctgcatgatggctatgattgacctgtgacgggactggtcgcagagaatcttaccaactccttcgttatggtccatatctggatgg

SEQ ID NO: 718590 - DNA, 108 bp, Homo sapiens
gattttttttttttccccctttttttttttcagggaatcatttccccccccgccccggggggcaaaaatttgttgggggcccccacccaaaaaatgtttgttttccta

SEQ ID NO: 718591 - DNA, 668 bp, Homo sapiens
  misc_feature (233)..(233): n is a, c, g, or t
  misc_feature (269)..(269): n is a, c, g, or t
  misc_feature (305)..(305): n is a, c, g, or t
  misc_feature (316)..(316): n is a, c, g, or t
  misc_feature (320)..(320): n is a, c, g, or t
cctgctactgtcacaggaccttaaatctactcaccttccgggttcaagcgattctccgctcagtctgctgagcagatgggatacaggcgcctgccaccatgcccggcttatttttgtatttacggtggagacggggattcgctatgtggtcaggctggtctcaaactcctgaccttagtgatccacctgcctcggcctcccaaaatgctgggattacaggcgtgagccaccgnacccagcctaaaattttactataaattcttggcttnagattagatggtgtaacagcataaaacaaggcaacnggagggttcanatanaatgagacattggagctgtaatgcctctttcacataagccccattttccccagctgaggcacaggcctttcagagaccacagcaagccatcacaacacgagaggtgctgtgcaccagaagcttctctgactggaaggtgagataaggacccattagggtgatccgaggagcagatgacgtgctttgggatatgatggaagactgcagatatcaatgcatcttgctggaaatacaactggagcttttttgcttgggttgctaataaaatctttacccagttgtcttatgtcttctcttactatcatttttccaagcttctgccttattttctgaattgtgcggatggcc

SEQ ID NO: 718592 - DNA, 137 bp, Homo sapiens
gatcccttactaaatggctgtcatttcacccagtatagcaagtgcgtgtacaaagaagtatattctgaatacattatatccattcatttagcacaaataaatcatttagtttcactttgcagtggaacactgagtca

SEQ ID NO: 718593 - DNA, 217 bp, Homo sapiens
cctctggctactaaagtggtgactagcagaagtcacagaccgtgacttggccttgtgttgctggaagcgtatgttggcagagccacagcgttgcagccctgacaagatcaagcaaaagtttcctgtctatcacatttgaaagtcttttttcacatcaaggactgggcatgtagattcttttgtagtctggacaaatcacctacttgcgccatctttc

SEQ ID NO: 718594 - DNA, 246 bp, Homo sapiens
  misc_feature (219)..(219): n is a, c, g, or t
  misc_feature (222)..(222): n is a, c, g, or t
ataggcacagcgctgaactgtgtgcttcagttccaaagtacctacctcaggagcagagatttgatatcgagtgctgggcttagtctgctgataaatctagtggagtatatgctcggaatcggcactgtcttgtcaacatggcatcgtgctctttgattcttccatctgtatggagaaggggatgatagtttaaggatagtggacgttcatgctgtccangcnttatgcagctattccttgagcgag

SEQ ID NO: 718595 - DNA, 223 bp, Homo sapiens
aattgatgtagcaatgctgaatttgccgtaatattcacacgcccaacttctacgataggcgtcttgctgtgttgcccaggctggtctctattcctggcttcaagtgatcctcttgcttcagcctcccaaagtgctgggattacaggtgtgagccgctgagcctggacccccttatagtccttgcttcacccctggaaatcactcctctgtcctctagctttgg

SEQ ID NO: 718596 - DNA, 287 bp, Homo sapiens
gaagctgagccccaccgcgtaatcgcttcagctctgcagcagcgacatgagaggaaaagtccaggatgggacaagcgcccttagtcgtgtcccgagtactgaccacaggtgccagtgcaacatgctgcattgcagccctgggccagaccatgtcccgagacctgggtcacgaggtggagcagagagtgcagcagcagcaggaccaagtggctcagagtccaacccactggatgtcgtggactttggtgccaagactatagctgtcactccctcctggtgtcacactg

SEQ ID NO: 718597 - DNA, 2547 bp, Homo sapiens
  misc_feature (41)..(41): n is a, c, g, or t
  misc_feature (46)..(47): n is a, c, g, or t
ttgctaggtagaggtctggattaaatcgggaggcggtccgnagtcnnttcctgcagctgtttccctgtgggtcgggttggactgacttttgacagtcagccttcggctgcggagggggctcggcggcggccggcggagaaagttgctccgagaagaggctgggtcgagctgggccgagccgggcgcgcagggcgggcgtcgcgggcgtcccgggcggacgcggcgcggagactgccggcgcgtcccgggggttccgatttgaagaccttgcttctcatcacccactggattatgccccaggctttcctacccaatgatcctcttgcaacacgccgtgcttcctccacctaagcagccctcaccctcgcctcctatgtcagtggccaccaggtctacaggaaccttgcagcttccaccacagaagccttttgggcaggaggcttccttgcctcttgcaggggaagaagagttatcgaagggaggggagcaagactgtgccctggaggagctatgtaagcccctgtactgcaaactctgcaatgtcaccttgaactctgcacagcaagcccaggctcattatcagggtaaaaatcatggtaagaaactccgaaattactatgcagcaaatagctgtcctcctcctgctagaatgagcaatgtggtcgagcctgcagctactccagttgttccagtccctccgcagatgggctcctttaagccaggaggccgagtgatcctggccacggagaatgattactgtaagctctgtgatgcctccttcagttccccagctgtggctcaggctcactatcaagggaagaatcatgccaagaggctgcggctggcggaagctcagagtaactcattctcggaatcctcagagctgggtcaacggcgggccaggaaagaagggaatgagtttaagatgatgcctaacaggagaaatatgtatacagtacagaataattcagcaggtccttacttcaatccccgctctcggcagagaattccacgtgatctggccatgtgtgttactccaagtggccagttttactgctcaatgtgtaatgttggagctggcgaagagatggaattccggcagcatttagagagcaagcaacataagagcaaggtgtctgaacagcggtacaggaatgagatggagaatctgggatatgtatagtgattatcatattaagatagagcagcttttcctgcctgttgtttgccttttgtcaacttgccctgctttgtggtctttttgatatgagtacattcctctgcttaatgttaatacgtgtaacccacagtggtaccatgagatgtcaaaacctgggggcccgggggcggggcggggggaggtgggtgtgaagaacgtgcttcttaggtcataacgcttttgcagggtcaatggtgttgagccgctcatagcatgtgacctacctaccccatcagaaataactttttatcttgctcaagttctggtcaactagtagcctgacggcttagaactttgactatttaaaagtttcattttcttttgcaattttagttttatgtactgttaaagaattgtactgaattctttttagatcacagtaaaaataggttggcagagatttcagtttcccagggcttaaccagaaccgccacctcaatgcattgtcagtagaatacattattagaaactgttaaggtctttcccgggacatttttttctgccattttcttttgcaattgtagttttatgtactgttaaagaattgtattgaattctttttagatcaaagtaaaaataggtcagcagagatttcagtttcccagggcttaaccagaaccgccacctcaatgcattgtcagtaggatacattattagaaactgttagggtctttcccaggacatttttttttctgtatcatgtctccccatcattgaagcgcaagttttcttgaattcaaatactcccaatgagcttgtatacttccaaacagctaaacttgatttccagttgtggatttcacacatataattgccgccttcttccctcctcttttttcccccctagttgaatcagcttgtctaacaagcccattttcatgccccagctgtgctgtgggttttccaagcctcatatttgaatattcaatgagtttaagatggatatgatttcaaaaaatagggccgggcgcggtggctcacgcctgtaatcccagcactttgggaggccgaagcaggcggatcacgaggtcaggaggtcgagatcatcctggctaacacagtgaaaccccatctctactaaaaatacaaaacattagccgggcgtggtggtgggtgcctgtagtcccagctactctggaggctgaggcaggagaatggcgtgaacccgggaggcggagcttgcaatgagccgagatcgcgccactgcactccagcctgggtgacagagcgagactccgtctcaaaaaaaaaataaaaatttattctttctgggggggggccccggccccaatctccccttaggggggcgtattaaattcactggccgg

SEQ ID NO: 718598 - DNA, 814 bp, Homo sapiens
gggcaagtggctcatgcatgtaatcccaacactttgggaggctgagttgggcagactgctcaagcccaggagcccaaggccagcgtgggcaacttggcaaggctgtgtctctgcaaaagaatacaaaaattagctggagtggtggtgcacatgtgtagtcctagctactcgggaggctgaggtgggtggatcgcttgagcccaggaggtccaggctgcagtgagccatgatcgagccactgcactccagcctgggcgacagagcgagaccctgtctaaaaatattacagagataggccgggcgtggtggctcacgcctgtaatcccagcactttgggaggccgaggcgggtggatcacgaggtcaggagattgagaccatcctggctaacacggtgaaaccccgtctcaactaaaaatacaaaaaattagccaggagaggtggcgggcgcctgtaatcccagctacgcaggaggctgaggcaggagaattgcgtgaaccccggtgggtggagcctgcagtgagccgagatcgcgccactgactccagcctgggcgacagcgagactccgtctcacaaaatatgtatatatattacagagatagccataactacttaacaggggttagagaaagccaactcttgacaatgcttgggagcaagacctacgaaaacctgtggacagcccttatgacagcacagttcctgcggttccaggggaagttagttggcaaaggatggcaggctctcctgggatacagccactgaaggcaacaataattgaaccttgtcatgtggatgcgacctcgatataca

SEQ ID NO: 718599 - DNA, 2443 bp, Homo sapiens
  misc_feature (41)..(41): n is a, c, g, or t
  misc_feature (46)..(47): n is a, c, g, or t
ttgctaggtagaggtctggattaaatcgggaggcggtccgnagtcnnttcctgcagctgtttccctgtgggtcgggttggactgacttttgacagtcagccttcggctgcggagggggctcggcggcggccggcggagaaagttgctccgagatttgaagaccttgcttctcatcacccactggattatgccccaggctttcctacccaatgatcctcttgcaacacgccgtgcttcctccacctaagcagccctcaccctcgcctcctatgtcagtggccaccaggtctacaggaaccttgcagcttccaccacagaagccttttgggcaggaggcttccttgcctcttgcaggggaagaagagttatcgaagggaggggagcaagactgtgccctggaggagctatgtaagcccctgtactgcaaactctgcaatgtcaccttgaactctgcacagcaagcccaggctcattatcagggtaaaaatcatggtaagaaactccgaaattactatgcagcaaatagctgtcctcctcctgctagaatgagcaatgtggtcgagcctgcagctactccagttgttccagtccctccgcagatgggctcctttaagccaggaggccgagtgatcctggccacggagaatgattactgtaagctctgtgatgcctccttcagttccccagctgtggctcaggctcactatcaagggaagaatcatgccaagaggctgcggctggcggaagctcagagtaactcattctcggaatcctcagagctgggtcaacggcgggccaggaaagaagggaatgagtttaagatgatgcctaacaggagaaatatgtatacagtacagaataattcagcaggtccttacttcaatccccgctctcggcagagaattccacgtgatctggccatgtgtgttactccaagtggccagttttactgctcaatgtgtaatgttggagctggcgaagagatggaattccggcagcatttagagagcaagcaacataagagcaaggtgtctgaacagcggtacaggaatgagatggagaatctgggatatgtatagtgattatcatattaagatagagcagcttttcctgcctgttgtttgccttttgtcaacttgccctgctttgtggtctttttgatatgagtacattcctctgcttaatgttaatacgtgtaacccacagtggtaccatgagatgtcaaaacctgggggcccgggggcggggcggggggaggtgggtgtgaagaacgtgcttcttaggtcataacgcttttgcagggtcaatggtgttgagccgctcatagcatgtgacctacctaccccatcagaaataactttttatcttgctcaagttctggtcaactagtagcctgacggcttagaactttgactatttaaaagtttcattttcttttgcaattttagttttatgtactgttaaagaattgtactgaattctttttagatcacagtaaaaataggttggcagagatttcagtttcccagggcttaaccagaaccgccacctcaatgcattgtcagtagaatacattattagaaactgttaaggtctttcccgggacatttttttctgccattttcttttgcaattgtagttttatgtactgttaaagaattgtattgaattctttttagatcaaagtaaaaataggtcagcagagatttcagtttcccagggcttaaccagaaccgccacctcaatgcattgtcagtaggatacattattagaaactgttagggtctttcccaggacatttttttttctgtatcatgtctccccatcattgaagcgcaagttttcttgaattcaaatactcccaatgagcttgtatacttccaaacagctaaacttgatttccagttgtggatttcacacatataattgccgccttcttccctcctcttttttcccccctagttgaatcagcttgtctaacaagcccattttcatgccccagctgtgctgtgggttttccaagcctcatatttgaatattcaatgagtttaagatggatatgatttcaaaaaatagggccgggcgcggtggctcacgcctgtaatcccagcactttgggaggccgaagcaggcggatcacgaggtcaggaggtcgagatcatcctggctaacacagtgaaaccccatctctactaaaaatacaaaacattagccgggcgtggtggtgggtgcctgtagtcccagctactctggaggctgaggcaggagaatggcgtgaacccgggaggcggagcttgcaatgagccgagatcgcgccactgcactccagcctgggtgacagagcgagactccgtctcaaaaaaaaaataaaaatttattctttctgggggggggccccggccccaatctccccttaggggggcgtattaaattcactggccgg

SEQ ID NO: 718600 - DNA, 449 bp, Homo sapiens
accttggagcttggacatgtctctcaagtctcatttaagtgtgtgtctataactaaacatagggtccagatatgtctgaaagacttaacctcaaatgggatactgtcatttcataatgtatgctggagtaggcttagttacaatttgaggaatatcatgtgctgcaacttcttttcctagaaagtaatacttttgatgtttctcacaaattataatttctaggactctgagctgcctacttctacttactcctttatagtaaagggttgtagtagtagtagtagtagtccttactggttactgcttttaactcctaaggtctttttttcaaggccaatttcacttaaccttagctattaagcccaagtggaggtgctaaggtgatttgaaaaatggaaatatcttaatttaaattgcacaaacaaacactatcgtgcatatttgagaag

SEQ ID NO: 718601 - DNA, 1939 bp, Homo sapiens
  misc_feature (151)..(151): n is a, c, g, or t
  misc_feature (169)..(169): n is a, c, g, or t
  misc_feature (193)..(193): n is a, c, g, or t
attcttacaagtagaatttttggattaaagggttagcataagcataagacttctgatataatgcttggaaattaaagtatttttaaaagcgtattcacttttttagagacacagccatttggaatttgggtttggctctaaagcaattttnctgacaatagttggaggnatcattttatctttttagatcgancctgtgtaaaattgtaattttaaaaatccattaacttcacattcacttaaagctaagaatctgtgaattttataatttgaacttagaattacaaattacagtgataattggtcaggttgtcattcacttaatgaatattttgaatatattatttttatctcttgctttagcaggtccttacttcaatccccgctctcggcagagaattccacgtgatctggccatgtgtgttactccaagtggccagttttactgctcaatgtgtaatgttggagctggcgaagagatggaattccggcagcatttagagagcaagcaacataagagcaaggtgtctgaacagcggtacaggaatgagatggagaatctgggatatgtatagtgattatcatattaagatagagcagcttttcctgcctgttgtttgccttttgtcaacttgccctgctttgtggtctttttgatatgagtacattcctctgcttaatgttaatacgtgtaacccacagtggtaccatgagatgtcaaaacctgggggcccgggggcggggcggggggaggtgggtgtgaagaacgtgcttcttaggtcataacgcttttgcagggtcaatggtgttgagccgctcatagcatgtgacctacctaccccatcagaaataactttttatcttgctcaagttctggtcaactagtagcctgacggcttagaactttgactatttaaaagtttcattttcttttgcaattttagttttatgtactgttaaagaattgtactgaattctttttagatcacagtaaaaataggttggcagagatttcagtttcccagggcttaaccagaaccgccacctcaatgcattgtcagtagaatacattattagaaactgttaaggtctttcccgggacatttttttctgccattttcttttgcaattgtagttttatgtactgttaaagaattgtattgaattctttttagatcaaagtaaaaataggtcagcagagatttcagtttcccagggcttaaccagaaccgccacctcaatgcattgtcagtaggatacattattagaaactgttagggtctttcccaggacatttttttttctgtatcatgtctccccatcattgaagcgcaagttttcttgaattcaaatactcccaatgagcttgtatacttccaaacagctaaacttgatttccagttgtggatttcacacatataattgccgccttcttccctcctcttttttcccccctagttgaatcagcttgtctaacaagcccattttcatgccccagctgtgctgtgggttttccaagcctcatatttgaatattcaatgagtttaagatggatatgatttcaaaaaatagggccgggcgcggtggctcacgcctgtaatcccagcactttgggaggccgaagcaggcggatcacgaggtcaggaggtcgagatcatcctggctaacacagtgaaaccccatctctactaaaaatacaaaacattagccgggcgtggtggtgggtgcctgtagtcccagctactctggaggctgaggcaggagaatggcgtgaacccgggaggcggagcttgcaatgagccgagatcgcgccactgcactccagcctgggtgacagagcgagactccgtctcaaaaaaaaaataaaaatttattctttctgggggggggccccggccccaatctccccttaggggggcgtattaaattcactggccgg

SEQ ID NO: 718602 - DNA, 495 bp, Homo sapiens
acctcacacacggctaacactccccccgggcccgtctccggcatggagagagagcggaaagtgagtatgcggctgcaccgcggggcccccgtcacatctccctcgtccgacctcacaggccgacaagatacctctcgcatgtccacctcacagaggagcagggacatggcatctctccggctgcacgcggcccgccagggcacccgctgccgtccccagcgcccacgacgcacctactgagggccccggcggcctctgaccgggctcccagccacgcaggccactgctggccacgagggcaggtgggtgttaggtgtccaggacaagcccaagcgctgggccgggctggatggaggacagggtgcaaagaccagccctgggcactgaccacaccacgcacactgccagccaggcagaggggcgaaaaagggaaggcaggagggtcctgtttcttaaacacagcagtgcataaagtggcttgttccccctcaaaaa

SEQ ID NO: 718603 - DNA, 163 bp, Homo sapiens
gactcgtcacgtcgcactctggggcccagcaggttgccaccaagctggaaggcagtgatttagaccttgtgagaataggacactggcaggagggaaaaggaagaggacaaaggagggtggtggccaaagtggcagagctctgttgctgtttaacaaaagaggc

SEQ ID NO: 718604 - DNA, 1869 bp, Homo sapiens
  misc_feature (107)..(107): n is a, c, g, or t
  misc_feature (116)..(116): n is a, c, g, or t
  misc_feature (127)..(127): n is a, c, g, or t
  misc_feature (149)..(149): n is a, c, g, or t
  misc_feature (182)..(182): n is a, c, g, or t
  misc_feature (194)..(194): n is a, c, g, or t
  misc_feature (210)..(212): n is a, c, g, or t
  misc_feature (225)..(225): n is a, c, g, or t
  misc_feature (243)..(244): n is a, c, g, or t
  misc_feature (248)..(248): n is a, c, g, or t
  misc_feature (266)..(266): n is a, c, g, or t
ggaaactgaaatctctgctgacctatttttactttgatctaaaaagaattcgatacaattctttaacagtacataaaactacaattgcaaaagaaaatggcagaaanaaatgtccngggaaagaccntaacagtttctaataatgtatnctactgacaatgcattgaggtggcggttctggntaagccctgggnaactgaaatctctgcnnncctatttttactntgatctaaaaagaattcnntacnattctttaacagtacatnaaactaaaattgcacaagaaaatgaaacttttaaatagtcaaagttctaagccgtcaggctactagttgaccagaacttgagcaagataaaaagttatttctgatggggtaggtaggtcacatgctatgagcggctcaacaccacttgaccctgcaaaagcgttatgacctaagaagcacgttcttcacacccacctccccccgccccgcccccgggcccccaggttttgacatctcatggtaccactgtgggttacacgtattaacattaagcagaggaatgtactcatatcaacttgccctgctttgtggtctttttgatatgagtacattcctctgcttaatgttaatacgtgtaacccacagtggtaccatgagatgtcaaaacctgggggcccgggggcggggcggggggaggtgggtgtgaagaacgtgcttcttaggtcataacgcttttgcagggtcaatggtgttgagccgctcatagcatgtgacctacctaccccatcagaaataactttttatcttgctcaagttctggtcaactagtagcctgacggcttagaactttgactatttaaaagtttcattttcttttgcaattttagttttatgtactgttaaagaattgtactgaattctttttagatcacagtaaaaataggttggcagagatttcagtttcccagggcttaaccagaaccgccacctcaatgcattgtcagtagaatacattattagaaactgttaaggtctttcccgggacatttttttctgccattttcttttgcaattgtagttttatgtactgttaaagaattgtattgaattctttttagatcaaagtaaaaataggtcagcagagatttcagtttcccagggcttaaccagaaccgccacctcaatgcattgtcagtaggatacattattagaaactgttagggtctttcccaggacatttttttttctgtatcatgtctccccatcattgaagcgcaagttttcttgaattcaaatactcccaatgagcttgtatacttccaaacagctaaacttgatttccagttgtggatttcacacatataattgccgccttcttccctcctcttttttcccccctagttgaatcagcttgtctaacaagcccattttcatgccccagctgtgctgtgggttttccaagcctcatatttgaatattcaatgagtttaagatggatatgatttcaaaaaatagggccgggcgcggtggctcacgcctgtaatcccagcactttgggaggccgaagcaggcggatcacgaggtcaggaggtcgagatcatcctggctaacacagtgaaaccccatctctactaaaaatacaaaacattagccgggcgtggtggtgggtgcctgtagtcccagctactctggaggctgaggcaggagaatggcgtgaacccgggaggcggagcttgcaatgagccgagatcgcgccactgcactccagcctgggtgacagagcgagactccgtctcaaaaaaaaaataaaaatttattctttctgggggggggccccggccccaatctccccttaggggggcgtattaaattcactggccgg

SEQ ID NO: 718605 - DNA, 2668 bp, Homo sapiens
  misc_feature (41)..(41): n is a, c, g, or t
  misc_feature (46)..(47): n is a, c, g, or t
ttgctaggtagaggtctggattaaatcgggaggcggtccgnagtcnnttcctgcagctgtttccctgtgggtcgggttggactgacttttgacagtcagccttcggctgcggagggggctcggcggcggccggcggagaaagttgctccgagaagaggctgggtcgagctgggccgagccgggcgcgcagggcgggcgtcgcgggcgtcccgggcggacgcggcgcggagactgccggcgcgtcccgggggttccggcatttcacgtggaccaggtggatcatctgtgcgtgcagctgccttggccctctcagttgcccccgccccgtgggagtcgggggattccatccttcgtgatggcatccataccgggttgagatttgaagaccttgcttctcatcacccactggattatgccccaggctttcctacccaatgatcctcttgcaacacgccgtgcttcctccacctaagcagccctcaccctcgcctcctatgtcagtggccaccaggtctacaggaaccttgcagcttccaccacagaagccttttgggcaggaggcttccttgcctcttgcaggggaagaagagttatcgaagggaggggagcaagactgtgccctggaggagctatgtaagcccctgtactgcaaactctgcaatgtcaccttgaactctgcacagcaagcccaggctcattatcagggtaaaaatcatggtaagaaactccgaaattactatgcagcaaatagctgtcctcctcctgctagaatgagcaatgtggtcgagcctgcagctactccagttgttccagtccctccgcagatgggctcctttaagccaggaggccgagtgatcctggccacggagaatgattactgtaagctctgtgatgcctccttcagttccccagctgtggctcaggctcactatcaagggaagaatcatgccaagaggctgcggctggcggaagctcagagtaactcattctcggaatcctcagagctgggtcaacggcgggccaggaaagaagggaatgagtttaagatgatgcctaacaggagaaatatgtatacagtacagaataattcagcaggtccttacttcaatccccgctctcggcagagaattccacgtgatctggccatgtgtgttactccaagtggccagttttactgctcaatgtgtaatgttggagctggcgaagagatggaattccggcagcatttagagagcaagcaacataagagcaaggtgtctgaacagcggtacaggaatgagatggagaatctgggatatgtatagtgattatcatattaagatagagcagcttttcctgcctgttgtttgccttttgtcaacttgccctgctttgtggtctttttgatatgagtacattcctctgcttaatgttaatacgtgtaacccacagtggtaccatgagatgtcaaaacctgggggcccgggggcggggcggggggaggtgggtgtgaagaacgtgcttcttaggtcataacgcttttgcagggtcaatggtgttgagccgctcatagcatgtgacctacctaccccatcagaaataactttttatcttgctcaagttctggtcaactagtagcctgacggcttagaactttgactatttaaaagtttcattttcttttgcaattttagttttatgtactgttaaagaattgtactgaattctttttagatcacagtaaaaataggttggcagagatttcagtttcccagggcttaaccagaaccgccacctcaatgcattgtcagtagaatacattattagaaactgttaaggtctttcccgggacatttttttctgccattttcttttgcaattgtagttttatgtactgttaaagaattgtattgaattctttttagatcaaagtaaaaataggtcagcagagatttcagtttcccagggcttaaccagaaccgccacctcaatgcattgtcagtaggatacattattagaaactgttagggtctttcccaggacatttttttttctgtatcatgtctccccatcattgaagcgcaagttttcttgaattcaaatactcccaatgagcttgtatacttccaaacagctaaacttgatttccagttgtggatttcacacatataattgccgccttcttccctcctcttttttcccccctagttgaatcagcttgtctaacaagcccattttcatgccccagctgtgctgtgggttttccaagcctcatatttgaatattcaatgagtttaagatggatatgatttcaaaaaatagggccgggcgcggtggctcacgcctgtaatcccagcactttgggaggccgaagcaggcggatcacgaggtcaggaggtcgagatcatcctggctaacacagtgaaaccccatctctactaaaaatacaaaacattagccgggcgtggtggtgggtgcctgtagtcccagctactctggaggctgaggcaggagaatggcgtgaacccgggaggcggagcttgcaatgagccgagatcgcgccactgcactccagcctgggtgacagagcgagactccgtctcaaaaaaaaaataaaaatttattctttctgggggggggccccggccccaatctccccttaggggggcgtattaaattcactggccgg

SEQ ID NO: 718606 - DNA, 809 bp, Homo sapiens
tgcagtgccccccagaggttcccgtcctaggggaaggggggctctggccttttcttatgcttgtgttgtggctcttgtgtccttcggttctggactgccctggccattttcagccggttggtgcctttttcccctgagtgtttttctgtcttttctgttttcctgtctccggtggacggtacgaaggggtcgctcgagttcttgcggcgccaatatcgcaagtgggctgcgtccgccttgcggtttgcccactatcttggggaaagagcaagccacgggatgctggggttgactggtgggaagcgcggtgccgcgttagcctcccgctctgccctgcgttcttgggtccggttggaggcccaggcgtttgctaggatctgcatcagttgtacctgctttgcactatttcgtctcttgtaacacttggccctgtgtgaagtattctcgaatctcctccttgctctgataatcttcagcgattgccacttgtgataatgcgcactagtgacagcagctgtctgtcggtaatcggtactactttattaaggatctttcagattactctgtatagtagtccatatggcacccctaccccatccctttcgtgccactcctgtcctccaccccgtaccccctagtgtgtataagcatggcatttcgccagctctgtactgtagcattgccactcagtgaatataatggacattattatgagaaccgtggacttaaccgaagatggaaccaacggacattctatccgtgttgtacactagaatgatgaagggttccactgttgttgtatgtcttta

SEQ ID NO: 718607 - DNA, 81 bp, Homo sapiens
aagacagcagcatatatctctgcagcgctcaggagcgggagatcgagcagtacttcgggccgggcaccaggctcacggtca

SEQ ID NO: 718608 - DNA, 1481 bp, Homo sapiens
  misc_feature (501)..(502): n is a, c, g, or t
ctctgtctcaaaaaaaaaaaaataaaaaaaaaaaaattaaaggggcatgggttccattccagaaacaaaagtagagtattccatatattccctggaatttataacttggccactggtccttcataaaaaaaacctggaataaaatttgtcccatgggccgggtgcatgtgggctcattggccttggtaattctggaggcactttggggagaagcggccaagggtggggtggcgactccactttgaacgtcagggatgttcaaagaccacgccttgcgccaacaattggttaaaccccattttctacaaaaaattacaaaaactagctggggtatataggggcataagcccccggttaaaatcccctaagcctaaatcttgaaagcgggctgcgaaggccagggaagaaaatgcgcccggaaaatcccgggaaggcccaacaagttggccaggtggagctcgcgaagaatatcacgtggcccccatgggacatctccccagnnccggggggttgaaataagaaccaagaatctctctgggtgttctcccaaacaaacacacatacacacataaccaagaccatatatctacccccccacccacacacccatcgcacaaaccacacgcaccaacacaccacacaccacaccctcagcacccacgcactctattatacatcactgtgtgtccaatatggtgtcataacatcacctctgtatattcctatctactgtcattctcttatcacattatatccattttgtcggacgccccaccactcatatatgtaagctattaacaaacacgacacgacattatgtctgccgcagtgactaatctatccacagcgtgctctacccaacacagacgcgcgcgcctttttcagacacatcaaacacaccggcaggggggatgagataccctccccccagtgtcggtgtaacaacaaaaagaaacatggtgtggcacaagcagtccgcgacacaacgcacagacgggccccccaaacaatatagatcggcccaacggatgacacccactcatgtacacagcaaccgcagacagcggagaccacccgcagtgcggcgacaaaaacacgctccgagacgcacggcggtcgcgcgcccccgacagatggtctgcgcaccgcagaaacagcaccaacagtcataaagtcagcgcggcgggccgccagcatgcattgtcagaccaacacaccgccgcctatccctccgccgcagagagagaacaccgccaggcacgaacgcacccgccccagcgagacgctccgctcatccagatcgacgacaacacacacttccccacccgccgcggcaccctgcgcgacaccaacccttaccccatcgacgcactcagcaccgccgccggggagagcacaccaacctacacgcacgcgggccacccaacgagccaagcagacacacaccctcctcgtgtgcaacaaacgcgacacgaacaacc

SEQ ID NO: 718609 - DNA, 194 bp, Homo sapiens
tgtgccttaacctgagctgaggtgtctctgggctgacccgctgctgtacgtgccagaactggggttggcatctgcgcatccatttgagtgcaggatagatggaacggtaggcaacagaggaaaacctattcctgctgtgacacacatgcccttgtccacgcagcctaagtgcagtgagcgtgatgaagtcatgg

SEQ ID NO: 718610 - DNA, 235 bp, Homo sapiens
tttgattttttttaaaaaactttgggccaaaacgggtttaatttttcccccctgccccaaggggtgggctgggggggggaaactgggattttgggccccgggattttccctaaattgggcccccctttactccccctttattttttttcccttagacccccccagcccgggaaccaggttggggttttttttcctttttttttttttaaccccggccttttacctttggacccca

SEQ ID NO: 718611 - DNA, 153 bp, Homo sapiens
ggctcagcttcaggagcagcaggtccaggtggagatggacatgtctaagccagacctcactgccgccctcagggacaatccgggctcagtatgaggccaatcgcggctaagaacatttcttgaggcttaggggtggtcaagatgaaggtgtaa

SEQ ID NO: 718612 - DNA, 408 bp, Homo sapiens
tgaagcgtcagggcacatatactctcggacatgacataacaatactacaatcatactcttcattataatcataatggtatagagataaataggaatagccctttcattctgagccagaggttaccaaagcaccctctgacatcggactgtacttctcacatgacgaaaactagcccccatctcaatcatataccaaatctctccctcactagacgtaggccttctcctcactctctcaatcttatccatcatagcaggcagttgaggtggattaaaccaaacccagctacgcaaaaatcttagcatactcctcaattacccacattggattttaatataccttagcacccttggtttatacctttgatctatactttgcgcccctcttcaattacactctcatacctc

SEQ ID NO: 718613 - DNA, 286 bp, Homo sapiens
gaataagtgggaacaaatgaaagaaggtacaattcctgcattagaagtttcttttttactacctcttaatgactttattggagtactgcactattaacactaaaattttttttaaaaaaaaaggaaagcagaatttttataagtaccattcagtagatcaagttgaagaaataaagaattaatgtatttaaaacagtgattttctaataatttaccaaggattttagaggtcattgcttatattgactgtttattagacagaaagtcattgaagactataaaaaaa

SEQ ID NO: 718614 - DNA, 721 bp, Homo sapiens
  misc_feature (3)..(3): n is a, c, g, or t
ccncaccagaatttgaccaagctgcccccgttgggcatgccaccaggtcatttttcccatgacgcatgggaacccggattcacgtgccggtttggatgcatttgctcagactactttcatgtactccccctttccaaccattttgattggctggataatcgggcgtccaggcgccaaaatccattagatccgtccaatgtttggggcgccgatccaaatttcgaaccccgtggaaggattttctgataggccgggttccctccctgggtttgctgccagccttagcctgggtcaatatttaatcaaagtcaggccttcctcggaaacgggtggcctggggggccggttaaaccatgccgaattctcccaaattccccttttggtgttcccccccccccctgatccctttgtggagtttttgaaccggcaacgattcccgggttttaataggttggtaattttccggttttaccccctttttcctcccctcggggttttttaattaaaggggttttattcccttttttggtcagctggtgatggtgagatccctatttagttttataaggttttccccgggtttttttttttttttgggtttttttttttgggtcatgaatttttttgtttgtcatggaaaagtaagagtggaatattaatacctttccgtttagttttgtaatgtccgggatttttccaaaaaatttaaagatgggctgga

SEQ ID NO: 718615 - DNA, 576 bp, Homo sapiens
cttcgggtccattagctgggtgtggtgctcaagtgcatcttgcctcagctgagatcttcttccagcgcctcagaggctgtgcaagatgcatgatctccacggatgccggacgacggtaaacgtcccgccaatgattgcacagaatcgtggtgatgaatctgtacagcggctgccgtctctctgtgtacttgaccgtgatggggcttaggtcttaccggtacctgattgcaaagatgatgcggcccgtgtggctgtaggcgacgtattccttgttggccaccgtgtactggtaggagtaccgctgcttgccactcttgtcctcataaaccgtgggcacaatcttcaggatgtagtcgtgggaggccagggggttggaggtgagtctgtctgctcccccgagagcattgaaagctccgtggatgttctggacctgtagcgtgtccccaaaggagagcttgtggatgacatgcgtcatgtctgggttctgtggctgggctgtggcactgagtgtggacacgtggaagttgccggggaccttgttgatgctgaactgcccctcgaagcggcagcctggcc

SEQ ID NO: 718616 - DNA, 650 bp, Homo sapiens
acgcctcatcttatggggggggagggattacaaactgtactcgcgtttcttcagacgctgttgtctttaattttgtttgagacggttctgcctgtccttctcttcactcaattctactcttacacgttttgtgagttgttagattagggtgtgtgccccaagtggcggcggaggctggtcgctgtggtgtaagcttactcgtgtcactataagacacagtgggccgcgcccgccgcgcaagtgtctctgattgtccaccgcgctgctgacccctaccattacgtgacggctggtcttcttgccagggaggtacgtagttatgtatgtttctcttctgttctacgtttctccgtggcatgaggtgtatattgctttatattctgaggtagtgggctgtattactccagaatgtgctagggccgctttctttgttgttctttattcatcataattctgtacgccttacagtgacttctctctgttagagtatacctgataggattatgagtgatgagatgacaatcccgacatattatatatactagtatccaattagacccttttggttgatattgttttagttatacatctctctctatgagtggattataccacgacgtatttttcaagttttctgtttttcttttctt

SEQ ID NO: 718617 - DNA, 131 bp, Homo sapiens
cctaattacgtgtagcacgtacactcatatgtacaggcgtggagactcacttgtactgtataagaatattctgacagtgagtgacccggaagtctcctggctgtacccgtcttaccacgtcagctgcctgc

SEQ ID NO: 718618 - DNA, 691 bp, Homo sapiens
aaggtcccgcggcgcgggggaaccgggctctcggcaaggtgggtaaggccgtcactgtcatggcagagggagaatgaggagcaaagtcatgtgttacatggtggcaggcaagagacagagcttgtgcaggggaactgccatttataaaaccatcagatctcatgagacttattcactaccaggagaacagtatgggggaagctgcccccatgattcagttatcttcacctggccccgcccttgacacatgggaatcattacaattcaaggtgagatttgggtgggcgcacagccaaaccatatcactctgcctgggacttccccatctccccagtctgctgccaccgtgtcagtctcagtgaaaatgtcgtcctctctgaaagccctttcttgatcattctgtcaaaagaacccatctgccaccttgactcttacattcttcggtattcttttccggacatcttgtgataggttatccctttacttgtgtgtctctttcaggaaaagagaagctttgtgagaacaggccttgggcttgtacacttctgtgtacgtagtggccaacaacccagtggtgctcagtcaatgttatcgaaatgatgaatgaagtcacagagattgttgaggttcctgtgacaggctatgccctgtgggagacggtccgagcccaatcggaacagggctagctgtc

SEQ ID NO: 718619 - DNA, 659 bp, Homo sapiens
tgccgcggcagttcgcgtgcccgcgtatccggctctcggttcaacagtgtttggacggcacagattcgtcaactctgttccagtctgcgaccgccctccgatttcatctccgcttgcaacctccggcaccatcttctcggccatctgctgcttctgggacctgccaggaccgtttttgacgatagctcgttcttgccaaccaaccatgagctcccagattcgtcagcattattccaccgacgtgcagtcagacgcaagcagtctcggcaatttggacctgcaggcctcctacacctacctcgctctgagctgctatttcgaccgcgacgatatgcatctccaaggcgtgagccacttcttccgcaaactgcacgagaagcagcgcagaggctacgagcgtctcctgcagatgcaaaaccagcgcgtcgtgcgagctctcttacagcacatcaagaagccagctgcagacgagtgacataaaatcgcagacgccatgaaagctgccatggccctgcagcgctgaaccaggcccttttgcatcctgatgctctgaattctgaccgcacggacctccatctctgtgactatctggagactcagttgctagctgaggaagtgtttatcaagaagaaggccgactacctgctccctccacgccc

SEQ ID NO: 718620 - DNA, 661 bp, Homo sapiens
  misc_feature (25)..(25): n is a, c, g, or t
gcctgggcaatatagcgagaccccngtcctccagaaaacaggaaaaaaaaaacaaaaaacaaaacaaaaaaaacaaagagacacaacaaaaaaaaaaaaaaaaaaaaaaaaaaacatgtgtggggcgcccccggcccccttgatgaaaacgctttcccaaacccctcggtgtgggggcggggccccccaacgggaaagagaaacatggggccacacaacattgtgcccaaagagagaacactcgcgggactcagaaccaaggcgctcggggatttccccaccacaataaaaaaaacccccgccgaggaggacaacaccaggactgctgtcctgcaaaacaaaatccacaaggagggggtcccgagagcgccaaaaaagggagacatacaccaacaggagcccccaggagcggccagaataaaaaaaaaatatacgccccggggcgggtggagacaccaccaagaccacacaagacgcaagtagcaaacacagcgagcacacctgaagcccacccagcagacacgctcaacgaccacgcaccacaaccacacgaccagacccacagcaaccagcacaacaccacgaaccacgcaccaccaacaccagacaagcaacacagaccaccggacgcaagcagaagaccaacagcaaccaggcaacc

SEQ ID NO: 718621 - DNA, 914 bp, Homo sapiens
gcctctcccctagtgcaccgttggcgtctccttctgctgccgctcctggtgctgtttgtgtgctcgtccggtgcgggacctggatacctcttttgtgaagcggcatgcttggggagactccgtgcgcttcgccatggactgatgagtagcccaatggaaggagtctcactatctgagaactagacgactctggtattatattctgaaggtggcgggactggcatggatgcctgtgtgtgcacgtcgtacccattctgagggtggtataccacttagtacaactaggtgagggagcctactgtgaagcgacaggcggatgtccatgaggcagatcagattccgatgttgagggggtaaccgatcaatgagtcagaacatcacctgtagagtggggaactggaggatgaatgatacatacttgatgtgttccagatcatgcaggacgggaggtgttctacttgataatagtggatccctgcttctttagctccaagatagctctgtgtctttagaaggaccgaagacttagcctttctcaatttagaaagagctgtcatggtggtctctcaccattatcctgtactacctaagcgtgatagtttgtgctctcatgctttcatttccccactttctgccagttcgtgtgatggtacacttaaagtaccctggtactatgttgcacaaggcgatactgcatttccatggtttctaaatggaaaacgggcagctggtattgttttgctgtggccccatggggggaccgggctggggcaaattctggttttggggggatccccccttttccaatgggggggggccctagggcgcttatgttatattccacaagggattggggcccgggtgccagaaaacagcgacccgtaaattcttgctggggcccgcggaaacagtgc

SEQ ID NO: 718622 - DNA, 422 bp, Homo sapiens
cggatgaggaaatgctgtttatttatggcccccccaaccaagcaactgtgggggccataaaaacaaaacggcccgggatgttggccttcccgggcaaggccaagtgggatgcctggaattagctgaaaggggcttcccaggaaaatcccctgaaagcttccctccccaaagtagaaggggtaaaaaaaaaaaccggggattagagagacgggatttggtttctggcccctgggtttttcctaaactgagacaaacccctgtttttttttaaacccgggggggggggggattggggaaaaaaacccgttaaccccgctactcaagggggcccccccaccgggtttaccaaattagggggtaaaacgattactgccttcccctggggggtttttttttgaaaccaattaaaaggggttttgttc

SEQ ID NO: 718623 - DNA, 288 bp, Homo sapiens
tgagcggactgcagattgctgacaaaatagagaagatcagaacgggaaatggtttggacgggaagacgaggggtccagctgtccacgttttgagcaacaggtcccaggaggactttcagctggggccgtcattcagctagaaatccaggaccaggtttcaggataggggcagagatgtctagcatcgttctggggcacagtgacactgtgactgctgtgaaggatcagggtctgagcggaggaacattaccagtgaagtgcaggacatgaaatgttacttgcacagaa

SEQ ID NO: 718624 - DNA, 1069 bp, Homo sapiens
cgcacatcgcagaacgcgagcgctcgacaaggaacacgtctcctagtctgctactctttgggggtctctggtttatgctaccgctcgttcgcttcttttcttcgcgcctcactcttctctatagtcgtcgtgccccatgtttttctccacgcctgtgttatagggctttctggttcctgtggttcccctggcacgtttcgcaccccgatccacgcgtcgtctctgccagtttttcccagagaaaatattttcccctttaaataaaggctcttaagtttttaaaatctacctcccttttgattaaatcccctttcctttacgcaacccaaccctgttccccccccccacgatagagagaaaggtcccctggagattttccagacctatttggtatagctattttcttccctgggaagattccgttccctctcacggtacttttgtgcgccgtcatcttgatgaccagaatgaagcttgctctgcctcctgcccacccagaattggtggcgggacttggggataccagcgtgtaaggtggggaaattgccccgccagaacaccagaattgaagttgggaaactctagagtctgggccaaatgtttggctttttctcctttaaaaaaattccccccccttgcccaaagcaaaggtaaggtggccacccttatttttaatagtttgaaatgatgataatcctatattatattcaaatatatatattaacccccatatatatagtgattttctaaagatttgtttactctttgtgttttgtgtttactgtactatagaacttgtcctcttctcccttgaatccaagttaggacctgcatcatcctcctaattttaaatgttggctctgattttataagtggtgcactttgagttccacgcccttggtaatggaagagtttgccaacacacaccacgcggcccaccagcttcaccgctggtggtgtgcacgtgtgaggcacgctccttggctttcctggttttcaccaccagctagagattttccaagctacacttttgagtaaaaacccttattctaaagaaaaacatgattta

SEQ ID NO: 718625 - DNA, 225 bp, Homo sapiens
tctgtccctcaaatgggcggcagtctctagagggcgtggcccttcccctgaggtcttatggcctagctctgtcacaaccaggacacaggaagccctgcttggctagcctgaggcctagtctctgcttggtccccgagatggggtgggaggggacctacgttgctgggtctacctcttcccctctttagcatcccccactcactaatcccctttaccagaagcgta

SEQ ID NO: 718626 - DNA, 1284 bp, Homo sapiens
cacgttgctgctctctgttctccgtcttagcagtttcggctggactgtgtgtcggtgcgctcgccggttgttcgtctccgcgttggttggtgcgtttgctcttcgctcgtccttgtctagagtcgggcgcttggtgcctgggttttttgccgtccggggcgagttctgttgtgtactggcgcgtccttctcgtgcgcccggtttgaaccgtctggtgtgattcgcatatggctgcatctgggcatcttgtgtggccgccggtactacgcgcgggagtggccctttccctgtgtgattcctcccgtggtgttgtctatttccgcccttccggctcgttgtgtgcttgtggtcgctatgttgatgcctttgtcaggggaggtgtgggctaccacgggcgtaatttggtgattccctccccttgaatgtgcggggtttatcgtgcacgaggattgtctgagtgctttatatctgaatattgctatcattctcagaggaaaggaggtcctgggtaccaatgggttcaactggtcgcaaaattcaccactgcgcccgatatgtatctggccccccactttattaccacgcgctttgagagcaatatggtgggagtgtatatagagttccacttctcgtgtctatggggagacctcatttcacgagtccgtcccactagtacacgcccccactgtgagcggtatgattctctctgaatggtgtgcctcgccgctttttgtgagaaactgggaccgcacgaattgtcaacgagttggcccactggaggcacggcccacgcttgtttaaagggagaagaaattgttttgagaggcacatcacgaatccactattcacggttcactgtgttgcacattctttgttggagatatattggcgcagttgcgcgcaccacccacggagcccactagcactattgagaatgcccggggctggccgccacactattaacccacgcagttttctttggctgcgaaatgccttatacgcactgccaaactatttgttgtcacggagaacttatatgttctaatgaggtattgcacccccgcgatgatgacgtggtttagctattttaccacggacgtccacccacgataattataatattcttggtgttcttgtttctaattgtgtggcttttttaaaatgaccacaaatatgtacctgtgttgtgagtaaaaagtattttatttgtttcatgatatgcatgctttttttctgtaaatatataatccatcttttgtagatatgtcccaaaaaaaataaaaa

SEQ ID NO: 718627 - DNA, 242 bp, Homo sapiens
ccatcttggcttccaaaatgctgggattgcaggcgtgagccactgtgcctggtctctcatgtatgttatacttcataaaagttttttattttttggagacggagtcttgtactgtcacccaggctggagtgcagtggcatgatcctggctcatagcaaacctctgcctcccaggttcaggtgattctcctgcctcagtctcccaattagctgggaccacaggcacaccccagcccggcccgg

SEQ ID NO: 718628 - DNA, 190 bp, Homo sapiens
gaacataaggaggtggtggaggctgtgacctattgtagagacaccacccatggctggttctggggcattgtgggctacgtggaaccccctcgaggcctccgtgcaccttcaagactgtctttgctgagcacatcagtaatgaagtgcatcaggcgtttctataagacttggcatacatctcagaagaagg

SEQ ID NO: 718629 - DNA, 255 bp, Homo sapiens
ctagtttagaagttcaatagcagttttgaaggactgattggcaaacatcagacctgtcttccaaggagcacaagtcctggctacattcgcagcgctgtagttacagctgcagacaggccatgtgagccacacgctgccagcacagagcgtccttccccctgtagactagtgccgtagggggtaactgctgccccacgtgactgtggccccctccgtgatccatccatccccaggcagcaatgtgctattgaaact

SEQ ID NO: 718630 - DNA, 491 bp, Homo sapiens
ggtttctactgggagctggacacttgggtaccctctgcctggcatatactaaaatcctagattcccagaagaaaagcaggtcagctgttgagcataaaccacattgtttgtataatcagtttaggaatactatcagttaggatagtgagaaccctccccaaatccaaattcccagatgccagccaagggacagttttgtaatcaggcctttcaaaggatggcagtcaggcctgctatgttaactctgcataccagtacatgtgcgtgaagaattctgtgaaagtacaggaaataaaatgaatggttaacattgcttctgagtttgaacgtttcagagtgatggggactcagcatggttctgccaagtttgaaagtgacaattgctcacattcgtaggaatttagttaatctcattttaaatgttccttttaggtattttcatgcatttcctcactaattgctttctctttccctcaaatcacatccagcta

SEQ ID NO: 718631 - DNA, 387 bp, Homo sapiens
atgggaattttgggggaggaagcagaacactgggaaaaccacaaatattggcccaaatcgccctctcgatggcctctcccttagccctttggggacagacccttcctcttctgggctctatttttcctcacacttccattttgtgacccagccggctaaggccaactgggcctggccgacggaggccccatccggcccacgatcccaaacgtggccgtctttctagcactcgccaagtgcacctgcggctttcaaaaaaaaatcacggaagaaaacaaaattaactcgtgcaagcttagcctccactcgacaaagaaagccagacgtgcccactgaaattgttcaagaaccacgggtcaggagactttcttttttcttctctaaatc

SEQ ID NO: 718632 - DNA, 419 bp, Homo sapiens
tagaggatcacacctccatctcaccatagagccccccacagccgaaaaagccctcccacatccagttcccccagacacttggtggcttttcaggagacacggttctaacacccatttcacagagaagagcactgagtccgtctctggccgtgaggctatggcagggctgggactggaagcagggcctttcatttgacttcttgtaggtttcttccggggcaccactttgtttttgtttttgtttttgttttttgttttgttttgttgagatggagcttcactcttgtggcccaggctggagtgcagtggtgccatctcggctcactgcaagctccactccggggttcaagcgattctcctgcctcagactcccgagtagctgggattacaggcgcccgccaccacgcccggctcttttt

SEQ ID NO: 718633 - DNA, 270 bp, Homo sapiens
ttatgcgcgatattcgccggtgttcctacgttatttatagaaagtggttttattatttataagcgcttcgttaattgaaaaccctattatttcacaaagacgcgcggtagtgcgccgtccgccgttgttaattttcatggtattcgtgtgtaccgcgttccgcgtgtgtagggcgtagcggtacggtacgcgtttccgcatgtgttcaggcacccggttcggttggcggtacgtcatgggtaccgcgtaccgccgttccgtatccacgtt

SEQ ID NO: 718634 - DNA, 445 bp, Homo sapiens
tctagacgatccctttggttcttgtgctggaagagacgtttggtttggagatagccagtagaagagatggttggagctgagggagtaataccatctcaatgggaggagaggccatttggatgcctgagggtggatggctgggagagctggagcccagtgctgagaagggtctgtctcatgactgctgatgccctcctctgcttggagagttgtggtttcatgctccacgtttcaacacttcctgttctagtaacccctgtgaaattctgcactactcatatgtcctcgtcccctccccagaagggaccatttggacagcttcaagggtcacacagatagttatatgctctacagaacaaaaaaagtccttttgaaacagttgatgatgatgatctctacctcacagactatctttacatcacgtctacgagatgatacctgggtg

SEQ ID NO: 718635 - DNA, 250 bp, Homo sapiens
ctgaagcatatatcagatgaaggagcttagggctgagactatggagtaaatgagagtatagaattcagtcatctgcaaagagacgtagttagacttccctcttcctatttgaataccctttatttctctctcttacctgactgccctggccaggacttccagtactatgttgaataggagtggtgggagacagcattcgggtcttgtgtcagttttcaaagggaatgtttccagcttttggttatttcag

SEQ ID NO: 718636 - DNA, 241 bp, Homo sapiens
cgtcagaggatccccttcgacggtgttctgctgtaatatcattcacaatgtcctcccgaatcattgtgaagtactcacaagagagcgataatataatagtcaaaaagagtggttctcgctcagttatttgataccataaacatcaattcactcctgatacattatacctaaatgtacattcccttctgtcttattgaagactgaactgctagcccatctatttcctcggaatgtgcctgat

SEQ ID NO: 718637 - DNA, 161 bp, Homo sapiens
aggcgcacgtgcgtctaaaatgatggagcagtctgtttcaacaagtctcagaaggactgtgcaagtcaatgagtcgcttgtggctgcggatctggaaaggatcccacgtcttagaaccttcaccacaaggactttttcttgtagtgattctccaaagtctt

SEQ ID NO: 718638 - DNA, 163 bp, Homo sapiens
aagggatgcctgctggtttagagtactgaccccttgccccaccttcagagcctggggtctgtatgctggggccgtgccatctgcttcccctgctgtcacctggctccccctgctgggttgctgggtctccatttctccctccacccaccctcagcaggctaca

SEQ ID NO: 718639 - DNA, 100 bp, Homo sapiens
gagtatcccccgcagctcgggcatgatgggtcttggtcttcttccacttcttggtacttttcaatttcatccagttcaacagccaagcccctagctgcgg

SEQ ID NO: 718640 - DNA, 161 bp, Homo sapiens
tctagaggatcccagtcttctcactctccttaacctcctcaagggacgaaaataccgagactccggggaacaggtacgtcggaccaacagaggtaatgccgggggcagcagagcttcagcaggttaatggtctttccgcagacgtatatgtcgtgggcaat

SEQ ID NO: 718641 - DNA, 684 bp, Homo sapiens
  misc_feature (559)..(559): n is a, c, g, or t
tgcttgatttaaaaatttcagtcttgttaaatttatctcataggattctgacttcctcctctgttatcttgaatttcattgggcttgctcaaaacaggtattttgaattctctgaaaggtcaagtatctgtatcactctgggattgtcactggtgccttatttagtttatttggtgaggtcatgtttctcgggatggtctcgatgctttggatgtttgttgatgtccgagcattgaacggttagatatttgttgtggtcttcacagtcttggcttgtttgtacccatctttcttgagaaggctttctaggtattccaagtgtgttgtgtgttgtaatctaagtctttggttactgcagctgcatctgcattagggggcacctcaagccgagtaatgctgtgactcttggcagatgcgtggaagcactgtcttggtgatctggggtaagatccaagagaattccctgcattaccaggcagagactcttttccccttctcttgccttcctgcaaacaaatggagtctctctccatactgagctccctggatcctggggcangggtgacacaagagcccatatggccaccaccactgggactgcactggatcagacctaaagccagggcaacactgggtcttgcctaaagcccacagtgaccactggctgctattgctgatgttcac

SEQ ID NO: 718642 - DNA, 158 bp, Homo sapiens
atttaatttttattaagatttttcttaatgctgccaacacaatatttattccatttgttcctttaattatggtgggggtgaggtacaatggctgagtgaagatatttaatatttaatactaagctttaaaaagaaacctgctatcattgctatgtatc

SEQ ID NO: 718643 - DNA, 836 bp, Homo sapiens
cacggtggctcatgcctgcaatcccagcactttgggaggccgaggcgggcggatcacaaggtcaagatcaagaccatcctggccatggacaacgtggtgaaaccctgtctctaccaaaaatacaaaaattagctgggtgtggtggcatgcacctgtagtcccagctactcgggaggctgcggcaggagaatcatttgaacccaggaagtggaggttgcagtgagccgagattgcaccactgcactccagcctggcacagagtgagactccgcctcaaaagaaaaaaaaaaaaaggaaacgcgaggacggggattctctcataatcaaagctagggtgaagaacatatttagacgaaactggaccacggtttacttccaacttttagatcccaaaagctggccacaccattggtcaaattttcttacaggaaacaacaaacatcatggggtcagatccaagattctttctccttaaggcacaaccttttacagaaaaaacttctccttaatcttaggatgtgaccaaactggtgccggcttctttaattctcaaccaggtctatcacatactcgtactcgtgggaacccaactcctgtgggttagaattccaaatggcttggctctgggcacaaggaagaggacaaattttcccgatgttaatatattccaaagttcgatgttcaggaagaactataccaggggatccaaaatcttggggcttctcacatgctccgaacttgccacatttgatcaggccagaaagcaatggtctatctgaagaaattttggaataccaggtacacgaaagggccaaggcttagatataaccactatg

SEQ ID NO: 718644 - DNA, 266 bp, Homo sapiens
  misc_feature (21)..(21): n is a, c, g, or t
  misc_feature (33)..(33): n is a, c, g, or t
tgtttatcgactgccacccangtcgttcccaanggtgcggggattacaggcgtgagccactgcaccgggcccaggtaaggcattctaagtcacaggatgagacaggaagtcaacaaaaaatacaggtcataatgactttgctgataaaacaggttacagtaaaggggccagccaaaacccactaaaaccaagatggccacgagagtgagctcgggttgtcctcagggctacactctcggggcatcgataaacaccgggtaccgagc

SEQ ID NO: 718645 - DNA, 201 bp, Homo sapiens
ttcatagtaggccacgcgaaaagctattttcttcagggaggaccgtctttccacttccagcttcaccctccacacacattgacagagttcacagtggccaaagacctcaggcagcaccagaggttctggcacaggttggctgatgtgtttggaagcactagacagatcacagcccagcaaggggtccgtggcctctatgaa

SEQ ID NO: 718646 - DNA, 494 bp, Homo sapiens
  misc_feature (34)..(34): n is a, c, g, or t
  misc_feature (72)..(72): n is a, c, g, or t
  misc_feature (124)..(124): n is a, c, g, or t
  misc_feature (142)..(142): n is a, c, g, or t
  misc_feature (151)..(151): n is a, c, g, or t
  misc_feature (173)..(173): n is a, c, g, or t
  misc_feature (398)..(398): n is a, c, g, or t
ccccccagagagggaagcagaaggcagcaaaacnccccatgtggaaaagtcacaacatgaacccacctaaangggaagggtacccttgggccccaggcacgtgctgagcccttttaacaggttntcctcaccttaacccctncccaatcanccctttaaatggtagggtattnccttattttccacattttccctctatttaccttttaatttatattcccagcagatgcatttttaaaattcatatcaatatggctgggcgcggtgactcacgcctgtactcccaacactttgggagccaaggcgggcggatcgcttgagctcaggagttagagaccaacctgggcaatatggtgaaatgtcatctctcaaaaaatacaaaacttaggccgggcgcnggtgcacgcctgtaatcccagcactttgggaggctgaggcgggcggatcacaaggtcaggagttcgagaccagcctgaccaacaatggtgaaaccc

SEQ ID NO: 718647 - DNA, 377 bp, Homo sapiens
ggctttgccctcctgatctctcactctgggaactctttcccagggtcaatcttcaccttattgggagccacccattcctccctattaacttttcatccacttattgccaacaaccaggtgggcaacaggaatccaggcctttaacccctggatctttcaactctggcaaatccttcccaggtcttccctcaacttctgggagcaaccattcctcctatcactttcatcaataatgccaacaatgacagcagcagtcagcactcccatatgcatgttacagctggccagacaccttcatatgcactgcagcagccttataaggcaaattgggaaggaaccatcagtcccatttaacccaggagcaaagcaactttacc

SEQ ID NO: 718648 - DNA, 415 bp, Homo sapiens
atgacaagtcggctgaatcgcggtacaggataatctacttggcccggggaacacggtagatcttgggatgagcctttctggtatcttccagtcagaaaagtgcgtacttagggactcacttgatcaagaagaaccccttatgtctgggttatggcttaaaatttcatatacctttgattttctgctgtgaaggttaatgtccagtttttccctgaaagatgagtgggcttccagcctaactttcctgtggaaaagcactttctgctcataaaagttctgcaaaactttctcagtgatggcaagataagaatgttagtttaccatcttcctctacaaggaatcttggcggaaatatctcacaaaccaggcatgaaatatttatgtagtttgtaaaaggggattaaggagagagaaa

SEQ ID NO: 718649 - DNA, 140 bp, Homo sapiens
tcgagctggcaccggtaggaatactatttgccaggactgtggtgcttgtgactggattctacaatctgcagagtgggcaaggctgtgagaggtgtgactgccatgccttgtggctccaccaatgggcagtgtgacatccg

SEQ ID NO: 718650 - DNA, 278 bp, Homo sapiens
cctgcactgacaacatggagaaaccccatctctactaaaaatacaaaattagctgggcatggtggcacatgcctgtaatcccagctactcgggaggctggggtaggagaatcgcttgaacccaaaggcggacgttgcagtgagccgagatcatgccattgcactcgggcctgggcaagaagagtgaaactccgtctcaaaaataacataaataaaatgaatgggagaaaatcgtgtagccgcacctctacagagcaagaccttcatcccaaaaaaaaa

SEQ ID NO: 718651 - DNA, 184 bp, Homo sapiens
cctagaggatcgcattggcgaggagctctgctctggtctagcgaactcgtgctcagcctcctgagtagctgggatttcagttgcacgcaccaccccagctaactattggtattttggtagagacagggtttcaccaggtttggccagcctggtcttgaactccagatatcaggtgatccaccca

SEQ ID NO: 718652 - DNA, 632 bp, Homo sapiens
ggaggattttacgaatcatttataaatggcgccgaagcaggaccagtagcgggaatttcaggagggtgagcgagtgctgtgctttcatggccctattctttatgaagcaaagtgtgtaaaggctgccataaaggacaaacaagtgaaatacttcatacattacagtggttgtaataaaaattgatatgaatggtttccgaagagcagagtactcaaatacgtggtcaccaatttgcagaaacagagagaactttataaagccaatcaggagcagtatgcaaagggtaagatgataagcgcatgccccaagaaagaagacatctggactgcaacagaaaaatgatgaagtgaaaactaaaatgaacaaacagaaaacacccgtaaatgaaaatggtggcaataccatcggaaagcttgtagacaaggactctcactcacttatgcttgcatctccattaaaccattttcgatcttaacctaactattgctcaaacgatgtcctttgaggaacttagggatatcaattgatgttcgcttataggctatttaaacagcaaaaaattaaggcggtaatagactccttatcctcttttactttatatttaatttatattgcctactttcaatacaca

SEQ ID NO: 718653 - DNA, 585 bp, Homo sapiens
gtcaaacatgacccagtacccgaacgtgacgaatataacgcccatctacaacgtcaactacggcgccggtgacgtcccatcccgcatggatcaccactaccggaaccagaaacctgtgaaggtcgaaacagctgcgtatcctgtttaaatgtaagcgtatgttaaatactacctgcttttggatagaatgtaaagatgagagctattgttcacataactcaacagtaagtgatttgtcaagatggggaacacgacagacttctgttccgtatccacggccaatccagtgccaacatgccaattctacagctaaacccacagttcagccctccccttctacaacttccaagacagttactacatcaggtacaacaaataacactgtgactccaacctacacaacctgtgcagaaagtctacctttgatgcagcccagtttcattggaggcattgtcctggtcttgggtgtgcaggctgtaattttctttctttatacattctgcacatctaaagaacgaaattaccacactctgtaaacagacccattgcctacataaggactgggtcatgttctgtgggtaccga

SEQ ID NO: 718654 - DNA, 876 bp, Homo sapiens
ggatctcattgggtagccctctggctctaattgcttggtgtgcctctcacattggccagattggcgacacaaacgtgtgcgccgcgtcgctgggtaagcctccttctgagacgttccccgttgtcccccccttttaacgcgtgggagcgtgttcttgcccctcatagggagaatatttttgcctcgcgaagacgggtcgtctgttctcttggcaccccgcttgccgggcttttccagggccccggagatattgccccattatctacctgagtattcggcgcggacctgacacacacatggattcggcgccagatataccaggtatcaggcctccccccacgggtgagtcaccaacgaccgccccagggacaagtggtgtgaagcggggaacacaagagtgaggtgggccttggcccccccacacttgtggcaatcagctggccacaaggggacctcccgggtggcatgttccccccgacggcgcgatacactgtcaacacggtcgaagccccaaagacgagtcatggtacaaattgaaggctatgcttacactggccctcgatctctggacaggtctttggcgcctgggcccctccctcgggggtggtcaccacccaccaattcccacgtaaaagattgtgggctccaaaagttgtcgccaccaaagtcaaacatctcaagcagggccgcttcccgataatatctcttatgaggggtgacctcattcaatgccaccaaaagtatcttgtttccatggcagttagaaaaatatcacggcgctgataacaatggagctggcatctggatgattgggcacacgttacagggcagcatgtccccggccacaaacaaaccaatagtgcgccccacatgacg

SEQ ID NO: 718655 - DNA, 1389 bp, Homo sapiens
gacgtgttcgactggaacatgctcaaatttggtgccagccgggtgccgccgatgacgccgagcgtggagcgcagtggaccgagaggagcggctgagacactcgcggaaccctggctaccctgctggcctcccttccacatgcctcctggcctgcctgctgtggtgtgactgcatggaatgtggctcctccgcctcacaccgcctcagccctaggctcagaacagcggctaacaccgtccccgcctgtggcctgtctcctggcattggaaggacgatgatgcggacacgttgatgtattgcgtgctgcagccgtgtgggcgccccggtggaagagtcgtccgtcgtccgagcctctacagggcctgacgaaggatacgctctcgcgatgtccaggcgtcacaggaataggcagtatccgtttgcgaagcacgcaacggtgcgaaggtacgctgcgtcggtcgtcgccatcggacaggccaggcaacgtggatttccctgtgtcggtgtggctttccaaggtggttcgttcaggtcgtgctcggtgcaccgaagtgaggaaacgtcgtccttgatggcgtgtgaacggggcagacacagtgcaatggcttgattctagcatcttgtttaccaagtggggcgttgtgacgttaggcttgaaagagggttacggcgcagggattctagggaatcggaaacagtgggtttaagcaccggggtggagccttacttcgcgtaggcgcgcaagggtcgatcgcccaagtgcgggaacggcgttcggatgcgtgtggggaaaacacagaggtttacgttaagtagcgggacataggaagtatcgcgcagaaagagccttggacgacccggttgggtggtgacttgggaacgtggagagggcccagagcgaaaggggtaggagaccctccgaaggcgtggtcaacccccggggtgtcttgtgggcgaaagggaaaaaagggcaaggtagtcaggaagatacaatgtcgccatgcaggagaagttcagcgagagatggcgtgttgtagcgcagggggagaccgattcgaggggcgttgcgcagtcctgagagggcgttcgtggagccgcgggccgccggggagcggtgcccggttggaggcacaggtgccacagcgtggggagcggtacgccaaagccagagcagtaacggttggggggtagcggaccaggggtcgcggcggacccgcacgggtaggacaggaagcgcactagggggggaaacgcaggctgggtgacacgggagcgagcgcgcgccgggaaccacactcgggcgccagagcaggctgcggcaacagcgggggctcagaccagcggggcagagcggcgagagcaacagaccaccacgggacaccagctctg

SEQ ID NO: 718656 - DNA, 178 bp, Homo sapiens
  misc_feature (161)..(161): n is a, c, g, or t
tctacaggagttatccccggttctgggtagcatcagtgaggtacacctctacaacaaattttaaaaattagccaggtatggccagacgcggtagctcactcctgtaatcccagcactttgggaggcggaggtgggtggatcacttagaggtcacagagttntgagaccagcctaagct

SEQ ID NO: 718657 - DNA, 468 bp, Homo sapiens
ccccttccattcatctgaggtgaactattaattcatatccaaaagggcagaactctggcatgtcatgtccctcatactttaacagggttactagctgttcccctgttaagacttcatgtctgtgatcctcactgatgttgctgtagaaagaatggccagggcttatcggaggtggtgggatatcatacgagcacctccagatcttcatctggatctcatcctacttgacagcagtttctactttattgacgttaggcccccaaagtgccactcaccaaagtgcaaaatccttagtactgcagctgcatttgatcaatgacatctagcactgtgcagagtattggaattgctctcttctgcactgaggtgaggcagatgtcaaagtcatatccagaatctccctgtacctgcctgccatgcttcccttcctcctgttcctcaggcttcacatcagagttgtaccagcta

SEQ ID NO: 718658 - DNA, 248 bp, Homo sapiens
atcactcggccggtatagcggctgggttaaaatcttgtcggtaacatcctggacacataccggctatgtccgaataaccatctgcggctgctagattattcccggtatttacgtcttaactgaggtgttggcgaagctgtccctcgtacacggtgtttttaactttggctgtggcagtctcgcgtgattatttccaacgtggtcgttcagcggtgtgcgtgtgctgggtgagacctgctctctaccgt

SEQ ID NO: 718659 - DNA, 491 bp, Homo sapiens
cgaacgggggagtgaaggggaaagttggggaacgccaggggttagttccccgttggtaaaacgccgggtagtggattttttttttcaatttcagatcacagatttatttaccttttaaaaagataattttcatcaaatatctactaattataaaaataaaaggttataggggaataaaatggtaaattttttttttaaggggggaaaaggattttggttggtttcaaataaatttttatttatgagagaatactaaatatttaaatctagggaaaggttggattttttttatagaatggaaataggaataatttgtaaggttttaggttaaagggaggttttatgaagttttaaaataaaataattattcaacatattaggtatttttagagttaaatagataaaaatttaattaataaaatgagacagaaggattttatggtttcttttattttggtataaaggatttttttttttgggtaaatgtaaag

SEQ ID NO: 718660 - DNA, 246 bp, Homo sapiens
  misc_feature (1)..(1): n is a, c, g, or t
nagacctcagcttcctttgtgaaagcatacatcttatgtggaaaatcttatgctaggtaaacgagtcatttcggtaattataaaatctgtaaatcctctgacactttctgtgtgcttttctacatgcgcgtacccatgcatctttttttttttgggttcaaattaagggttttatttccatctttaacactagcagaggagtccaaagcagacggatactccaggcctatagtctaaaggcaatca

SEQ ID NO: 718661 - DNA, 380 bp, Homo sapiens
  misc_feature (329)..(329): n is a, c, g, or t
gatattttgcaactcgctctgtgcaaatgcctggggtgcacttttttggctcagttggtgccataagttgtggggcaccttctgagtcagctacagatgcccgtacacctcaggagcccctttcatttcccggaatgctaaactccccttacccagtttaagtatgggctgggcgcggtggctcatgcctgtaatcccaacactttgggaggccaaggcaagcggatcacatgaggtcaggagttcgagaccagcctggccaacatggtgaaaccccatctctactaaaaataccaaaaattacccgggcatagtggcgggcacctgtnataccagctactcaggaggctgagacaggagaactgcttgaacccaggagg

SEQ ID NO: 718662 - DNA, 287 bp, Homo sapiens
tagggcctccccaggtttaagacgggggaataagaggaggaagatatctgcctttagggactgcaaggttatttctatacctttcctcactggagctaccagaacagatactgggaccatggggacggtgtttctcctacgttggattgttgccttctcatctttaacatcgaaacatcatttcgtccccacactgtcgttcctcttttttcgttttgtagttgaacatctctgaatcccattcttagcagccttgtgtcctaacaccctgaacttccagttagtta

SEQ ID NO: 718663 - DNA, 369 bp, Homo sapiens
taaattcgcggccgcgtcgacgttctgtttctttttaaagcctggttaatggccgggcgctgtggctcacgcctataatcccagcactttgggaggccaaggcaggcggatccctgagttcgggagttcaagaccagcctgaccaacacggagaaaccccgtctctactaaaaatacagaattagtcaggcgtggtggtgggcgcctgtaatcccagctactcaggaggctgaggcaggagaatcgcttgaacccgggaggcggaggttgcggtgagctgagatcacgccattgcactacagcctgtgcaataagagtgaaactctgtcaaaaaaaaaagtcgacgcggccgcgaatttagtagtagta

SEQ ID NO: 718664 - DNA, 219 bp, Homo sapiens
aggtgcaagccttaaggggggttggccaaggacctggtaagggtttcggaaacccctttcccctaaccctccagggttcttgtggggctcctaaagctgaaaccttgtgggaccttgagccccacaccccccccaaagggggactatgagtgtggtaaacctataaactacaataaagaccacatatatctctccccccctctagacgacgtcgcaaca

SEQ ID NO: 718665 - DNA, 152 bp, Homo sapiens
gatcgagctcggtaccatctcgacacgtagtgcagagagtagaaatggaagagagcaagagccagagtgaccaagatgctccagatgaagatgagtcgcctccacctgaagatgccccatttgtaccccctattcacctggatccaaggttc

SEQ ID NO: 718666 - DNA, 240 bp, Homo sapiens
ttggaggtgaggcaggagaactgcttgactgggaggcagaggttgcagtgagccaagatcgcgccactacactccagcctcggcgacagagcaagactccgtcttgggaaaacaaacaaacaaaaagaaatacattgtttttggcccatgaaatggcaggacatgctcataagcaagtgaggcaatggaggctcagtggtacctgagctctgaattctgtaaatcattggtcattagctt

SEQ ID NO: 718667 - DNA, 320 bp, Homo sapiens
aaaaaaaataggttttttctaaaattaatccaaataattgaaatttttgggaagggttttaaaaaaaaaaaaaattcccagaccggggaaagccttaaaaaaaatagggtgattaaaacttcaaatcaggaaaaaggttctcaaaaatttgactttgcctacccaggtacagttgggggctttcaaattaggactcagtaattccttgtgtcactgagggaaagctgctcattgttgccaaaaacctacaaaaaaggcccaggggctgacctccacctttttggagcacgaataagccccccaaacccgactttttaaat

SEQ ID NO: 718668 - DNA, 501 bp, Homo sapiens
  misc_feature (96)..(96): n is a, c, g, or t
tattcttttgtggatcttcagttactctaggcatctgatgtatacgtgcagtcacagggatgcgatggctggctgtgtcagaggctgacattctgngcttcttatattataagacaataaaacaaaatagtgttgaagtgttggggcagcgaaaatttttggggggtggtatggagagataatgggcgatgtctctcagggctgcttcaagcgggattaggggcggcgtgtgagcctagagtgggagagattaagctgaagggaggtcttgtggtaaggggtgatatcatggggatgttagaagaaacatttgtcgtatagaatgattggtgatggcctggatacggttttggatgatttgagaagctaaacggaagatacaaggtccgaataaaaggaggagaaaaatgggtattagatgtctaagaattgggaggacctaggacatctgattagagggtgcctaaggagattccgcataagtctgccaagcacagatac

SEQ ID NO: 718669 - DNA, 835 bp, Homo sapiens
  misc_feature (548)..(548): n is a, c, g, or t
gcaaaatgatacacatgttataagcgatgctgtagcgtccaaagtattaatgactgtgacatgatagtcttatggatccctcgagtcacctttagagtgggatgaggaatgaacgcctaaacctcgttccgttgagcattgtgccgtattgccttgaactcttcgcctagtatttatgtgcctttgtcgatttataatgccggtgtaagaggagggataatttctaactgtgatcgatttgttttataacttgtaggttttgaagctgcaaacactacaatgcttgagggggtctgtgcctgaagctcaggagtgtggatcagacagtctaaagatcctaaaaacttgccaactggatcttggtttagcaaactcactggaaatgaacacttaatggaatttttaagtctgttctgttaggtagatggtgatgctcttgttattttcacttattcagactggattacttcttacttagttactaactcaatgaggaaaaatccctacaggatctttttttggaaacaactgatatatgcagacaaatnttgtgacaaattcaccttttaaacacacttaaccattgtgtgaaggttttctttaggcttacattttaaacatacacaataaacactaatcctccaaattcagtggttttatagtatgatttacatttgaggttggcaatagtaagtctcatgatatatcagtggtgttaaattggccgatcaggtaggaggtgcagctaaccaggggaggtaagaatatacctgagggggtgttggcaaggggggaaaattggcgagctgggttggttaaaatggacgtgaaagtt

SEQ ID NO: 718670 - DNA, 198 bp, Homo sapiens
ctagcaggctttaaacggagctgaactacggcgagggtcacgcgggagcatgcagctctggagactcgcaaccttgtgggccgggctatcatcaccaagagctttgccaggatccacgagaccaacctgaagaaacagggtctcctgcctcctgaaccttcgctgaccctggctggactacaacaacgattcaccctg

SEQ ID NO: 718671 - DNA, 107 bp, Homo sapiens
atcaaccctgagccttttatcagtctcctggtctttaaactacgccactgaggaagtgatttggtgggattcctgtaaactatgaaaaatgtctctattatttattg

SEQ ID NO: 718672 - DNA, 500 bp, Homo sapiens
  misc_feature (9)..(9): n is a, c, g, or t
  misc_feature (179)..(179): n is a, c, g, or t
  misc_feature (188)..(188): n is a, c, g, or t
  misc_feature (200)..(200): n is a, c, g, or t
  misc_feature (366)..(366): n is a, c, g, or t
  misc_feature (386)..(386): n is a, c, g, or t
  misc_feature (419)..(419): n is a, c, g, or t
gaaactagnggaggtaaaggatgttctaaagaagagactgaaaaactattataagaaggcagaagctgatgctgaaaggaggaggcaattttgctgacagttattatgactacatttgtattattgactttgaaggccacttgtgaaggaaggaaacccaccggaggtttgtacatganataattgantttccggttgtnttactgaatacgcatactttagaaatagaaggacacggtttcaggcaggtatgtaagaccagaggattaacacacagctgtctgatttctgcatcagtctaactgggaattactcagggatcagggtaggacaggagctgataccttccctcagggtactaaaaanagtaattgactgggatgganattggaagggattagggaacaaaggtataaatnctcacttttaacagatggttcttgggtatgagtaaggtcttgacattcagtgtcaactcaggcaggctcaaatacctcctt

SEQ ID NO: 718673 - DNA, 104 bp, Homo sapiens
tagagtgatcccctctgtgcacctccattcagcatccccacattgataggcaggacttcttctttaactgccacagaggtctcttctgtgttaacatcactagg

SEQ ID NO: 718674 - DNA, 446 bp, Homo sapiens
gggggtttggttttatttatcaaattttacaacaaacttttcaataaaaccgctgctaacaatgcgcacattattagctactcacatatctccctttcactacagcctcttacctctactcgtcttctttttcttctttgctcttcattccttcgcgattttttcgtctgttctttctcctctctggcccccctctgcccctcctgtcttcttccttcggtcccttttttctctcgggtcctatcttcgtctccgtggcccttttcctccttttggggggccctcccccttccttggccgccgctttccccccggctgtggtggggacccccggggggtccccctcccttttccctcctgcggtctctccccctcttcctccgttggttcctcctccttggtgccccctcctgctgctccttttcccccctgggcccttcccggcg

SEQ ID NO: 718675 - DNA, 322 bp, Homo sapiens
gatcgacccagtgtctatagtaggtctcctaatgtttctaagggccagacatggtggctcatgcctgtaatcccagcactttgggaggctgaggcaagccaatcgcttgagcccaggagtttgagacctgactgggcaacatggcgaaatcccacctctaccaaaaatacaaaaatcagctgggcatgatggggctgcatctgtagtcccagctgttcagaggctgaggtaggaggatcctgtgggtccagacattgaggcttcagtgagccatgattgcgcctctgctgccagcccaggtgacagagcgagactctatctc

SEQ ID NO: 718676 - DNA, 145 bp, Homo sapiens
gtccggacgcatctgtgggccagagcacagagttctgaggtataaagagcgactaacggagaacccgaagtttactggagaaactgcgttgggtgacctgtaggctaccattataactgggaccagtacagagcaagtagacgct

SEQ ID NO: 718677 - DNA, 339 bp, Homo sapiens
tgtgtctacaggatccttagctttggtcaggcacagtgactcacgctgtgatcccagcacttgggaggcaaggcaggattgcatgagcccagaaattctgagaccggcctgggcaacaaagtgaaatcgtgtctctaccaaaaaatcaaaaaaattagctaggcatggtggcatcctcctgcgatcccagctacacaggatgaggggatgaggcaggagaatcattcgagcacaggaagtcaaggctgcggtgagccagtgttcgcacataccgcactccaaatctcgagcgacaaaaggcgagaacccttgtcctcaaaaatggaaaacaaaaacaag

SEQ ID NO: 718678 - DNA, 177 bp, Homo sapiens
ctgcgtacctcatatataggtaaagctctaagactcctgagcaacttttatgtaactggcttccctaggctgggggcttgaactaagtaaggaagccaaggagtacagatctaagatagcagcagaagtaagtctcattctataaacatatgcaacatactgtaaagcagtcccacc

SEQ ID NO: 718679 - DNA, 199 bp, Homo sapiens
caggcgcttgtttggatggtgctcagccagaagaagatgcaccgcaggccacaaccagcggccactttcctgccaaatgcagcttgagaacgtgtcggtggcgctcgagtacctggaccgcgagagcatcaaaactggttgtccatcgaccagcaagcgccatcgttggacggggaaccctgaagcttgactcctgggg

SEQ ID NO: 718680 - DNA, 1010 bp, Homo sapiens
  misc_feature (400)..(400): n is a, c, g, or t
agcggagttcctagcgaggaggtcgccgccgccatggtcgctctctcggtgagcgcagccccgatctccgggccgggccattcgcgtggccaccgagtgccagtgggccagatgcggcaatcacctccgtccaagatcgatgctggtctctattcttcaatcctcagtcttctgtggtgggcagtctggctattggatatgctactgttgggagccctatgatcttcatcactttattgatggactattgacgcacttctttgtaagatgtgtacacgcctcattccctgactgtgaatgatcgatagcttgtagcgagtccctgacttcttgcatccattgtgggctatatatggtctgactgtgccacacatccggggaaagtcgactgtggactcgnccacgttgtggtcagtcatccttgctctgtgggtgttcttggtcacaagaagattggttgctatgtggggtgtctcggcgagtactgcttctcacgagatgccagagaggggtgcgcaacacagtgacggtttcgagtcggctagccaatatcacgtagacagtgttataaagcacctcaccaatggaaaccgagagctctgccatgtgctgcctaagctcgtgggctaattgcattatgctgagcagaagtaccatgctgcccattcgatatgttgcgtacattgcacgatactgactcctgggaactggaggaactaaataacagacatggggcttccacaggaaatccaaaaagaaccaagaagtgtcccatcttatctgctgcacgacgagactgcccagcacaattgttacatggcgagtcctggcccaccctttcctgactcgtcttatgcttgaagggggtgtcgaggactctagttggtcgaaagacacctacgagaaaactccagtgatgcatggagactctggggccgtgacgagggcatttcgcagctattcagctgctggggcattgctgggatgcttggaatcgtgttgggcagaaa

SEQ ID NO: 718681 - DNA, 381 bp, Homo sapiens
taatttatagctgtagttatctgtagtttcttttctctcggggacagttctgcttctacagaaaaaaatcttttatttctcatgattgtggaaatgatcctggttcctgtggttctggaattaaaaggcagatggatagggaagagatctatccttcagtatgcagattctcatttagtccttattctgggtatggcacatcaccattgcccttctctatgcctgatatctctatactgggtgcctctctggttcagtttcttctacagaataaacttcctgtctctcttaggagtgggggagaggtagttccttgtttacacaagatgagagcaggaatcttgtctctaaataatatttttatttaaacacgatttcagt

SEQ ID NO: 718682 - DNA, 421 bp, Homo sapiens
cacaggctacgttatggagcctcctgtgatctgtctgtgccacaaggcagagttctgcctgtgtgttcagttccaccacttgaggttactcaacagccgtgcggagaaccaggtgatgcacctgcagtgggaagtctaccccagagataactgacctggttggagaatggaaacgtgtccggacagaacggctcaacgacagagaacaaatggtactaactggatgagctggccctggtgaatgtactgccaaggatgatgtgactcactgccaggtgagcatgacgggcaccacggtcacaaaaccatgactgaagttcagccaccgaagagcaggctcaaataccgccgctggtgaggctctatttcagctgacccagcttttttaaacttttagttttgtgggttttttaaatgttaa

SEQ ID NO: 718683 - DNA, 281 bp, Homo sapiens
  misc_feature (222)..(222): n is a, c, g, or t
ggccttgcccagcagccgagcccaggagaaacaagcctaacaaatacagggccggcgccagctgcagagagttctccctgactgccagctacactgaaccacaggaaagagaacgaaactcttccacattcttttctgaagccagacaccaaaacacaacaaagacagcattcgtgcccacagacgcctcacgtgcgaccacagcacagaagccacggtgtnggcagacatttgccaagagccagcacaacgccccaaacggggcccctgcagggagggag

SEQ ID NO: 718684 - DNA, 902 bp, Homo sapiens
gggagccagcagtgggaacctggtagggtccccttccacactgtggaagcttggttcttgcgctcttcacaataaatcttgctgcttctcactcttagtgtccacaccgcctttaagagctgtgacactcactgtgaaggtctgtggcttcactcctgaaatcagcgagaccatgaacccaccaagaggaatgaacaactctggacgcgccacctttaagaactgtaacattcactacgaaggtctgcggattcactcctgaagtcagcgagaccatgaacgcaccggaaggaatgaacagctctggacgtgccacttctaagagctgtaacactcactgtgaaggtctgcggcttcactcctgaatctcagcaagaccagaaaacccaccagacaggaagaacactcgtggacacatctgaacatctgaaggaacaaactctggacaacaccatctttaagaacttgtacacatcagcgcgagggtcatgcggcttcattcttgaagtcagcagaccaagaaccactggaaggaaacacatctagacacatatgggtgacccagatgggactattgcctatcgcaaggcagaatggcggccatcaagctacagatgggcttacgaatggaatcccacatgagctcgagtaaccaatttctatcagaggaccctttggactggcctgctgggcctattcacggcctagagaagaacccctctgggagggacgaccaactaagtggacggggcccgtgcatatggccccggcacagcagggaagacagctcaagctgggcaagcggcaaatcacaagagcacaacgaggcggaccagttagacgggacatgggacaactaccgcacgggcatactgggaaaggcgcaaactgggcgaacaaac

SEQ ID NO: 718685 - DNA, 498 bp, Homo sapiens
ccagtatctatgcctatgatactgggatcgggagaatactgggggttgtccataactgggtggataccagtgcctgataatctgcgttgggacttacataccaatcagaaaataaagggtcctgactgaataaaaccgaaaaactgaatgaagcgggccaagaatcgattgattcccagagactcacaaacactgaggactgttacgagccacaggagcatatccgcgtgagaccaggactgcgagaggaagcagcgaagagaacgaggggaatgcaggcagaatggaacgagaaaagaggacagacgagcaaaggaagacagcaagaaggcaggaagtatagagcggagaaacgagacggaagaccgcaaagcgacagacactacgaacaacaaccaccagaatgagaagggggcagacatgagaagtaaaaacaaacatgaagggacggagcagcacagcaaacaacgccatcgccaggaccaaagaacatgagaa

SEQ ID NO: 718686 - DNA, 281 bp, Homo sapiens
cgttggttcgtgggctggttcaatctcattacctgggttattgggtggtgttttgtctaaacgacttcagagaacgctcttccgacagtctatcctatatattaaactcagaagcacacctagcctaaccttcaaggtcctgcacaactcagccgcaacctagattcataggctcctgttcagacctaaataaagagatcatgctccagtcaaaccagactgatctctgctgtcctcttagcataccaccaaaactgaccctgaccaaaaagcacaaacga

SEQ ID NO: 718687 - DNA, 107 bp, Homo sapiens
tggtgagcttcgttcttccgtgaaggtaatcagatctacaatgaagggccccaggtcaaacacgcctccttccttgtccttggggacctcgccatcaggcccatgcc

SEQ ID NO: 718688 - DNA, 476 bp, Homo sapiens
ggcaaggcggcgcgaagcctgcccctgggcgccaggtgtttcggggtgcgggtctccccgaccggggaaaaggtcacgcaccctggccaggtttatgatgataaagactacaggagaattcggtttgtaggtcgtcagaaaaaggtgaatgaaaactttgccattgatttgatagcagaccagcccgtgagcgaggtggaaactcgggtgatagcgtgcaatggcggcgggggagttcttggcccaccccaaaggggtaaataaccttggccaaagaaccaaaacccggcccatgcggttactgtgggctccagttcagacagcccccccactagagggtgtggcaccccgggggtcccccagcatcctgtgagcatttccgcggggaagctgagcacgtgaagctcgctggttttgtgcgaagggtattcctggtgctgaataaagggtgttgctgtcaaggccaaaaaaaaaaa

SEQ ID NO: 718689 - DNA, 872 bp, Homo sapiens
  misc_feature (37)..(37): n is a, c, g, or t
  misc_feature (92)..(92): n is a, c, g, or t
  misc_feature (97)..(97): n is a, c, g, or t
  misc_feature (116)..(116): n is a, c, g, or t
  misc_feature (148)..(148): n is a, c, g, or t
  misc_feature (165)..(165): n is a, c, g, or t
  misc_feature (178)..(178): n is a, c, g, or t
  misc_feature (188)..(188): n is a, c, g, or t
  misc_feature (195)..(196): n is a, c, g, or t
  misc_feature (217)..(217): n is a, c, g, or t
  misc_feature (230)..(230): n is a, c, g, or t
  misc_feature (250)..(250): n is a, c, g, or t
  misc_feature (252)..(252): n is a, c, g, or t
  misc_feature (255)..(255): n is a, c, g, or t
  misc_feature (263)..(264): n is a, c, g, or t
  misc_feature (344)..(344): n is a, c, g, or t
  misc_feature (351)..(351): n is a, c, g, or t
  misc_feature (370)..(370): n is a, c, g, or t
  misc_feature (381)..(381): n is a, c, g, or t
  misc_feature (384)..(385): n is a, c, g, or t
  misc_feature (401)..(401): n is a, c, g, or t
  misc_feature (405)..(406): n is a, c, g, or t
  misc_feature (416)..(416): n is a, c, g, or t
  misc_feature (426)..(426): n is a, c, g, or t
  misc_feature (433)..(433): n is a, c, g, or t
  misc_feature (436)..(436): n is a, c, g, or t
  misc_feature (472)..(472): n is a, c, g, or t
  misc_feature (546)..(546): n is a, c, g, or t
  misc_feature (552)..(553): n is a, c, g, or t
  misc_feature (562)..(563): n is a, c, g, or t
  misc_feature (569)..(570): n is a, c, g, or t
  misc_feature (572)..(572): n is a, c, g, or t
  misc_feature (579)..(579): n is a, c, g, or t
  misc_feature (614)..(614): n is a, c, g, or t
  misc_feature (629)..(629): n is a, c, g, or t
  misc_feature (631)..(631): n is a, c, g, or t
  misc_feature (635)..(635): n is a, c, g, or t
  misc_feature (679)..(679): n is a, c, g, or t
  misc_feature (838)..(838): n is a, c, g, or t
attaaacatcattcactgagaatttccaaagcactgntgtggtgcctagacctgtgtaccagcgctctggcgggtcgggagaagtctaaggnacggnccctgccctggcgcacggntccttctccctgggaaggcagctccactgganaaaggccactgaccaantccagaccctgangacgacgaangcctcgnngcagaagcctgaaaaaatcangacccactggaanaaggaggaggtgcaggaagnanacnctgcccannccccaggctgagctgtggggaaagctatgacccagtttgctgagagctgcaatgacgaacattggctctgtgcccagacncccaagncggccatggactgggctgncctttcctggnccnnggggaaggaggaaganctcnngcctagcagncccgtctatnccctggngangcagggcctgacttctccctttagagcttgcatcangaggaggctcaggagagagagacttgcatcagaacactccagacagccgatctcccactcagtattcctctccngggggnnccacccagnncctgcnngnccctggntgctacgtggagcagagaccctggagtaatttggnttggggacgtccccncnccangtccaggccagttagtcacccaggctacagcttagggtaggggntggggaggatcccggtcactccttcttactatgcgaacagaggcagaggagggacaggtgcccagccccagtttgggtctgtgctggggctggcagatcccgtgggcatgaagcttccctgccccatgtgacacctcgctacggccccacatgtcttgnttcatccttggggctgggcatctggttggcaagg

SEQ ID NO: 718690 - DNA, 331 bp, Homo sapiens
atttggggcttggctgacgtgtcagagaactagagctaaagaagcctctaaggacatcaggaccaaatcttccaatatgtagatagaaacaaaggtcctggccaggcgcgatggctcacacctgtaaccccagcaccttgggaaggctgaggtaggtggaacacctgaggtcaggagttcgagaccagcatggccagcatggtgaaaccctgtttctactaaaaatacaaaaaaattagctgggcatggtgtggtttaaaacagtggacaaccaaacagggttttcacttgtctgcaacaagatgagaaaaaggccaagccccagctgcgg

SEQ ID NO: 718691 - DNA, 243 bp, Homo sapiens
gtagaccggattaaggcgctattaccctcataggtaaaggattaaattggcaaaagctagtcctgtgaaatagctccgtttatcacttgggaccctactaagttccgtggtctcccattggatatgattaattctggccaatcagaacccatccctaacacatcagatgatagggacttagactagggaagaagaggttttgagcgtttgaatccctcaacaagttatggtaggagagtctag

SEQ ID NO: 718692 - DNA, 194 bp, Homo sapiens
tcagaccggagtaatccaggtcggtttttatttacttcaaattcctccctgtacgaaaggacaaaaaaaataaggcctacttcccaaagccccttcccccgtaaatgatatcatttcaacttagttttatacccccccccccccaaaaacagggtttgttaaaatggcaaagcccggtaatcgcataaaactta

SEQ ID NO: 718693 - DNA, 781 bp, Homo sapiens
gcgggtaggctgccggtcttcaaggtcttgggaaggttcgtcgggccaacagctgagacccgaaagcttcaacagtcagtcggtgaaatccagtttggactctgggacttactcccttaaacctttgttaaaagcttactccctttagcctttcggtggcacagtaaggacaatggtcttaatgtttctgagcatcttagactttatactaaaccctaaaattgtgatagctaccttccaggaggcatgatgaaaggaagactttttaaattttatgagccgcttgagctttcttattcggacagcggcagcttagtctacagggactactttgtccttttagtatttttttttaactaatataaaccagtttaaaattgtttagaataggtagcatttaacccacccaaaaatgaatacctctttggagggtatatttttaagtatattaagtcaaagtgaatgaaaagccaaaaatattttttgggagttggagtctcactccagcctgggcgagagagggagactccatctcaaaaaaaaaaaaaacggcaacaacaacagcaaaaaaacactgattggattccaaccttccttttttaacattttctccagtcccggggagcaagttgcagttcaagggtgataaggttacagggaataactctctgggtgctcagtcgcccgtgtcttgagggtacttttctctacactatagttctcaacttatttggggggaaatacttcagcagaatacaatgggcaaacgagtcttacccct

SEQ ID NO: 718694 - DNA, 181 bp, Homo sapiens
taccggtccgctgactcttccttcacagtcataaagctatctgctttgccatctaatatctaagtagcataggaaatatccggggacatttcaaatattgttccaaccaggggtacatattaaagagtctagtcatagttgtctcctagtagattacctaagggaagaggtcagcgtagta

SEQ ID NO: 718695 - DNA, 157 bp, Homo sapiens
gcgttgctgtcttcttatgcacagctcgtcttccagcactccgagagcaacaggaagccttccacattacctcaaccggcccttgtagatgttctgacttggaaaaccccgggggcgacacgatgcagtacatcctcaacccgatctgcacctggcc

SEQ ID NO: 718696 - DNA, 293 bp, Homo sapiens
  misc_feature (291)..(291): n is a, c, g, or t
gctcgacaactcagctcggcaccaagcagagttcaagtcctggatatctttgttaacctcctctctcgttgatctgtctaatattgacagtggggtgttaaagtctcccattatcattgtgtgggagtctaagtctctttgtaggtctccatggacttgttttatgaatctgggtgctcctgtattgggtgcatatatatttaggatagttagctcttcttgttgaagtgatccctttaccattatgtaatggccttctttgtctcttttgatctttggtcgacgcggccngc

SEQ ID NO: 718697 - DNA, 312 bp, Homo sapiens
agctcatcggagaatccacactggtgagaaagcctataaatgttatcagtgtgacagatccttgtaactgtagttctcacctcattgcacaccggagaactcatactggagagaaaccatacaggtgtaatgtagtgtgggaaagcatttaatgaggagttcatccctctattgtgacacctgagaaaccactactggagaaaagcccgtacaaagtgttatcagttgtgaaacaagcattttgtgaagaattcttacccttattattcatcagagagatgcactacgtgggagagaaacgcgtttatattc

SEQ ID NO: 718698 - DNA, 318 bp, Homo sapiens
tgggttttacagagccatctaggagattctgatgtatgttagagtttgagaaccctctgacccaaggaagcggtggtgtttcaagagtggaaacctccaaaaagaaaatgaataaacatataatattttcatattgccagcttcctaggcaatctgatttctctgggtctctgactcccatgacttggaactcccaaccccttttttctttgcaagtagatacagtgtgatgttacaggggtgcatacacatactgatcccccctatttttttttccttttttttttttttttagattcagagtctcactctgtctca

SEQ ID NO: 718699 - DNA, 732 bp, Homo sapiens
gctgaaggttgggggctgcgggtgatcacaggggagaagcaaatggacaaatgataaaatacagtgttgtgcatcagaggctcacagtttagtaaaagatgatcctactttacatggcaatgacaaaagagatcattgactggtgtgcaaagtgtgtagaagacagaagaggaggctagcaagctctcccctagctccagctaggacagtagacaggccttatcaagggtgacgtgagagatctactagctagagaagaaagggaagaggaacagtattcaggatagatgggggaggcggaaaactgaagactgaggaaaccagttagaagcctatgaattcttgaactgacatgctgacgactatagaatgaatgggatggttttgagataggtcttagaaagaagtggcatggttggtggagaaaaggagggctcagagagcactgcatggtgtctatgctaaggcacatgctatccagtgaggtgtgggacccaggtgggtgagggtgctggactggggtggtgggagcacatgcgatagatgatcatgttgagcatccatatacttctacaggaaatctaggtcagaggaaatctcaagtctggagctcagtgtagaagagggagatagtcagatactctgactctcagatctataagtgtcggtaccaatgtgcgagtgcagtggtagtgctggaaacagaatgaaggagtcggctgaatacaggag

SEQ ID NO: 718700 - DNA, 239 bp, Homo sapiens
gtcggacgtccatgccagtatcacgataggtcttcatactatcactcattcatgtggaattcagttgaattcgcaatcacccacaaaatggacattggaacattacatggcctcaggcaaaatttttctgtttgtagcgcaaaaatgagaaggactagaaataatacacatgttgggagttgttggagagcagaatgtgctgcattcggtctcgtgagagccaactgtgcatgtgaccg

SEQ ID NO: 718701 - DNA, 787 bp, Homo sapiens
  misc_feature (123)..(123): n is a, c, g, or t
tacgaatgactacatacccgcttatcaaagaagtgacagagatatccaatctttgctatacagacaggctgatcatgttaaattctgtacaggcgtaatccgctactgataacctcggggtgnaggttctggagagcctgtgaagatatagcaactcgattactatgctgagtatgtgcagcatcatcacagccactcacagagcagtgttgtcgccgtcccccgtcgagaggtcatttgtagtgtaagatagggctcaaagccactcactggatggtaagacagatactctcaaagattttccgagtatggattctctggaagttggacccttagcaactgagttgttgcgagtaaactagtacaattagatcacgtagtttagatgtataggcagataaaaattaaatgcttgaaagtgatacgagtgcttggaggatggaagaaaatactaaaacatgtgtgcgtcctaagtcgagtagcctctgctggtgctgactctgtcaatatgcattatcggagtatccagcgatgactgttctcagaggagtgttggctcccagatccgcagagatttacatcagggtacattcttctgtagtgcaatcgttaaaaatcccacagattagtgatgatcactttaggaacagaacaaaacaaagtagacattttccctagcccaggggtgtcaggagtccggcgggtggaactccacttggagaactccaagataggttgtcgattcagaccacgtgagctgccctgcaatcgacgtcgtcagcctagg

SEQ ID NO: 718702 - DNA, 300 bp, Homo sapiens
tgaaattttacttatgcaatacaactcaatcctttgtggtgagtcttattgatgctcagattatccactggtgtccaatgagagcctctataagttgacccctgagtccttttgacatcaccccagtagtctttgatagctttcttatcttatatgagactaggtagagaggcttatcttatatatgtcttgccttagattggaatcagtcatttatctaaagagcctgatttctctgagtgtaaatggtatttagagagcacaatctgggcagttcataccgtgtttaagaaaatattt

SEQ ID NO: 718703 - DNA, 183 bp, Homo sapiens
atgtcactggagaggccgcttgacggttgaccacctttaactcggtacactacctacctactaccggctactcatctgttccggacaggcaaggtaggggccatcccggctgaccggggtggcacccaccggggaccaagagggctatgcagtttgggggggtactggctcggcattgcctat

SEQ ID NO: 718704 - DNA, 812 bp, Homo sapiens
  misc_feature (231)..(231): n is a, c, g, or t
ctacgggcgcctctggttacgcgtacgtgcgtgcctgcagagggcggacggtgacccggcggcaccggcaggcctacgtgtgcctgtccaaggcaccgggtggagcagctgcgcaagggaggcaggcagcatgcaaagccccgagaaataccagcagagggtggtccgagtcaaactagctagcgacgaccgtggtgagcttgcagtacctgacgccgctcatcctcaccntcaactgcacacttctgctcaagacgctgggaggctattacctggggccttgggtcccagctcgctctactatcccacgcgacccatcgctcagccagcgctgccacccatcggctctggggtaggacgaagtccagcagactcgcagtcgcggattgcctggggccctgggtggcctgcttaactcccctcgttcctccgtggcgtgcctggccttacctcattctggtcggaacggctgccttagcacaagctagctcagccagccttaatcggcatctacttccaaccagcagcttaggcaggctccatatgctgcctgcagacccctcctaggggcccactgaggatctgttcctgggagcagcgggacactagcctagccccctctgtttgcgcaccccgtgtcacccagctgcaaggtggggccggactccccggcgttcccttcaccacagtgccatgacccagcggcccccccttggacgccgagtttctgcctcagaactgtatctcctgggcccagcagcatgaggtcccgaggccattgtctccgaagcgattaccaggttgagtggacg

SEQ ID NO: 718705 - DNA, 184 bp, Homo sapiens
atcagtgtatgctggcagttgaactagggatgtggtgaatatcttgcaatggatggaagtggagaggtgaaatgcagtgagcatgcagagtggagtgaaatgctcctctacaaagagagagaagagcaaatgtgagaaatgttggaagaaagcagagattagggtaatgtgagagacagtgcag

SEQ ID NO: 718706 - DNA, 602 bp, Homo sapiens
  misc_feature (410)..(410): n is a, c, g, or t
accgtggctacccggaccttatgccgcttggccgaatttttaaaaaagggttaatttatgcccaagaaccggggggcttttcattcctttccggttccttcccctcactttccaggggtctcttctctggttgggcttagtgtcctacatggggttgtgaagcgatggagctcctcactggactcgcctctctcctctcctccccccaggaggaacttgaaaggagggtaaaaagactaacatgagggggaacagagttcactgtacaaatttgacaactgtcaccaaaattcataaaaaacaatagtactgtgcctctttcttctcaaacaatggatgacacaaaactatgagagtgacaaaatggtgacaggtagctgggacctacgctatcttaccatgaaggatgntttgcttattgtatatttgtgtatgtaggggaactattttgtacaatagaggactgtaactactatttaggttgtacagattgaaattcagctgtttcattggctgtctgaggaggtgtggacttttatatatagatctacataaaaactgctacatggcagaaaccacacctaaagaaattttaagaattt

SEQ ID NO: 718707 - DNA, 92 bp, Homo sapiens
taaattcgcggccgcgtcgacttttttttttgtgagttttttacaactcaggtgagttttagctttattggggagggggtgatctaaaacac

SEQ ID NO: 718708 - DNA, 439 bp, Homo sapiens
ccccactacgataacttagctgggcatgatggtgcatgcctgtggttccatgctacttcgcgaggctgagatggggggatcacgtgagcccaggcagtacgaggttacagtgagctaggattgtgccactgcattccagcctgtggtgacacagagaccctgtctctaaaaattataatgttaataaattgtgttaaatatcattctatatatctattactaagaactcataccacattcaatagatcagttctggcaaatgtttatatacgtgatttgcagttgcttttatagatctaacattctttcaactggcattagatattgaagaagcattccgtcctcatttattgactaccactttttttttaacctttactgacatactattttactgatatgcgactctcatatcatcccgtccaccaattgcaagtgt

SEQ ID NO: 718709 - DNA, 1948 bp, Homo sapiens
gtctacgcgtatggtcggctacttacccgattacgcgaatatatgagtgtgcacagagactgacgcatgacgcgactcattgatgtgtcagtcaaacagtaacctgcaattatgattgccagttatctaggcaggctatgtgaaacgtgatactgttacggtgtgctgctatctaatagtcaactagcaccactgcaacgtattaggtgcactcatatgattcgctacagagcgaaagccagtagcgacggtgctatagtactagtgggtctctaatacacataggtgtaatagccacgtactgatacagagtaccgtgcacgatgtctggattcacctgtgagcagtacagacttgaccaaagatggctgatgtcaagcgaaccttaaaggcagacccgaagttatacatcgccaattgcctacatttacatctttaacagtacgggtagtcaagcactagaaaaaaggcgcgtcaacaagcgacagatggtcgcacataatatgtaactaattcccgtcaccgaacatttttacgactatgacaccgccatactacaggtctggccaaacaaatacgcgacatattacataaagacatactcgatccaattatcaaacgaactggagcaaaccacaccatattcctaaattatccaagtaaaattgccccaacattttaaggcaccctaaggaggtgatgagccccagatgaactagaaaaaccacaccgccaccaaattgttcaagcgaaccccacatgtttaagccacacattcgagcgatgtggtgcacacacggcaaccattattatcgaaaagtaaagacattataaattaactctcactactgaacagcagtaaaacacacgctgtgaagagcaccacttgaataacagatatagagcataccgatcaaattaagatatcaaaacctccattcatcgcatatgtagcgttcattagaccaatatctacaaagacaacacgcacaaaagatattattactgacacctttccaataaatacattcactaatataacccccaacactactctccaccctctacatccaactaaccaatataccattataccacatacgcaactacaaccggtagcatccctaacaaatcacactaacctaacgtaacaataccaaaaaaacccacaaatcaccattataaaaaaaacataaacacgattatcatatcaaaaccgactaacttgctatcaaacaaaaaactataatcagaactaccgaaacaacatttctgggaccctttaagactatacccataaagacgtatcatatactttaaaacctattgggaagaggaaccaaaaatatgacaattatagtagacaatcaatgaggacacacagacttagaacgttcacacagatggtgcttgacaacttaatatataaccaacgagtaataaatataatcaatataataacaacatagcggcaacacaaactcaagatatattacaacaaatcaacagaaagtaatgcgagatcaatagatcacaatacaaagcgaaaaatcaacagacgcattagagaacacacacttcaggagcaaatagatgattaacctaaacatccaatacgaatatgctaatataatcataacaacaatcacaagttagaaaaagtagaaacataatgatgtacacattcagacaagaattaatagaaaaatacgaaagaaaacaaataaacatgctactaataaaaaaaaataactacgacaaaagaaaaacaaatacaccagatagcccgaagtaagagaaaaatgagtcaaaaagatcaaacgacaacgatgcaaaatataactaacaaaacaaacgacaaaactcacagaaaaacaacaaagaaaaaaaacaaaaacaattcacaagtacaacgagtataatctagataaccacatcacactaatac

SEQ ID NO: 718710 - DNA, 212 bp, Homo sapiens
attatctgaacagacagtagtagcacagcagcatgaccccatctaaaataatgaagaactcatcccctggttcatccctgcaccacaatctactgacccatctatcaaactgcactggtaccaatgcatcaactaccgtaagacgttcccaattatccagagactctgaaatagagactttactacggaattcctcatacatcttccgcttt

SEQ ID NO: 718711 - DNA, 162 bp, Homo sapiens
  misc_feature (109)..(109): n is a, c, g, or t
gtagattggagtcaatagcttgtggatcagacagacaggtagggaacagtgggagtgcccaggtgaacttggcaggtggggccagaaggaatgcaccccccagcacctntggcagtggaacatctctacccttaccttgcagggcctcttcattctttcctt

SEQ ID NO: 718712 - DNA, 545 bp, Homo sapiens
ctgtggtctttcttggcaagcacaagagttttatcttagattcgctggtctcaagtgatccttgttcgttgatgctatcttgtatgggtgaatgggttccccgtcaaaaggatgttcgaagtcctagtgccctaggtagctcagaatatgatcttatgtaaagttggaagtaaggtgttgcagatggtaattagtataggatgatgtccttataagaagatggtcatgtgacgacagaaacatactgggagaatgccatgtgggtccacggaggcagagataggaggtttggcatgctggaagccaaggaacgccaaaagattgctggcaagagcaccagaatctaggagaggagaggaaggattcaccgacaggtttcagcagggagcacggcctgcgagacaccttgacttcagagcttccaggcttccagaacatgtgagagaataaatctccttcgtgtgtcttgtacatgcggccactcagttggtggtcgtctataatggcacttctatggagctaagttacactatgctcttaaagtg

SEQ ID NO: 718713 - DNA, 172 bp, Homo sapiens
tcgatggccgactccgctataattgcaactcagaaatacattgctacttggctgcctctactctattattgtacaccttgaaggtgagagttaattaagtcctgttgtggggtttggagggctggaatttaattttaggagttttatttaatgtcaggagcggattggccat

SEQ ID NO: 718714 - DNA, 132 bp, Homo sapiens
aagagatgactgtcacctcagggaggagcttagagagggggccagcgtgctggaggcagctgggggggaccagggaaggaggaagggttggagcagttcctggcccaggtccactgttatattggccccact

SEQ ID NO: 718715 - DNA, 764 bp, Homo sapiens
acacacgtgcctacgacccgccgcggcgcctgcgcggtacatcgcgagtcggtgcttagtacgccgtggacctttactctcgcggcgcggaaacccgttgtgagctcggtatcctagtgcacacgctttgcaagcgaggggggccatgagttctgacttccagttccagcgtaacggaggttgaattggattcgcaagcaggtttaccaatttggtggctggggacagttgcaatgtgggtttattctaaaggcttacaaaaaggattttcttgttaaacggattcatcggaagataaaaggtttatgataaaattttaatattcaagaaaggaaaaacccaagggataagtaccagttgtttttgtggaccagtggagggaattcgggaaataaagctgggtacctgcgcggttgttggggcggtcccaaaaaaggttccccatttcttgtgatgggggggttcaccacaagaattataacgaaggagagctgggcgacaatgtgggcgacctcttgattcaatcaaaggaaaaagggaaactttaacgttggcgcacttttttgatggctgaaatcagggttgtcgtgaaagtaccctgagttggtgtaactttagaaattgactaccactttgttttgtttaacctttggtgatcctaaaagtgtggtcttatgggcagctgggcggttcacatttgtgccctggtctgttgcaactcgggctgccctttgttttaagccacacacaacaacaaacaaaca

SEQ ID NO: 718716 - DNA, 91 bp, Homo sapiens
ccctctgggtgttttttttggtcccccaggagggtgggtggagcaggtggactggagtttctctttagggccataaaagttgtcatggtga

SEQ ID NO: 718717 - DNA, 1492 bp, Homo sapiens
  misc_feature (254)..(254): n is a, c, g, or t
  misc_feature (683)..(683): n is a, c, g, or t
  misc_feature (760)..(760): n is a, c, g, or t
gatcatggctgtcagaagtgaccaagggcctcagtccttcctagtctgtgtataactgcgaagtcctcgtactcaggtcagtatctgagagatcactcgtgtacctcctagctgagtctggaatttctacacattgctggttctacggagctgtcgtccagtgactgggtgcatggaatgggcttctgtcgcgtgaccggagagtggcgtgtctgggatgcgctcaatgaaactctgtcgttcgtcgagtatangcgttgttgcacgtcgtttggcaatgtcgcttgaaggtgtgatcgtagaataagctagacatcctcgtgaacgctctaggtgtccgtcgatctgcagaatggcggataatatattgtccccgagggggtatatttacgacccatgtttccgtttcagggagggtcacccatgatgggtctcagggtcctgtggcaaatttctactgtagtcctcattagccctaggtcctctcctcttgtgaccctgtaaagggtcagggtgaatcagatgggggactgagcaagtagctatgactgcagatcatgtaaggaacgggactgacaagaagctcccagatgctggggagaatgaagagctaaaatagatcctaggtgctggatgctttgtcatccatgcgtgcacatatgggtgctggcagagcccccaangactctggcctctcgagttctcctatcttctccattctagatgcttcccttgtatccagtgatgtgctggagctggnctttgccaagcttgtgagagctggttgctacattttcaggatttctacaacgttcggtaaaccacatgccattataacaaaacttaaacgtggactgtctacaatcttaactacatttaaggtaagtgacatttaaaacgaaaaattagtactcccaaattcacttacttaattttgctacctgtcactattactctgtgcttttgaggctatttctacattagtaactcttatggaggacctaggggagacaccgcgcatctcttgcctgattccccactcaatgacatcatgtgagtctttaggtgtgcttaacgtggctgtggggagtgtattgtatcacaaagattagagaggactacacatcaggccttgatttatgttgtggatttgctagacttcagaacatgctggataaaatgtcagtaatgcaaattaaactttaaagtatgtctgggttggtagccaatacatggtgtatagcaccaaaaaatggagggattattcttccagtagttggaccctgtcatccgtctcagctgacgctgctcaaatcatttacgagggttctggccttcctttccttgttactttggtctctcctagtgtgaccaacatttaccgttctgcgactttccctttcggctgggcggtcggctctaggggcctggccactgcccccggggggttttgcccggggccaatttcacttttgcacgttggtgggaatcc

SEQ ID NO: 718718 - DNA, 170 bp, Homo sapiens
acagtcgtgcacgcatatcaaaagtatataagttataatcttcattggctgctgtaagaaatgaaagcttccatagggttccaagagcatgtatttgttctcatatctaagataacctttttcaaaggagtagctggcctcatatcgtacagtactatattcctgtcaga

SEQ ID NO: 718719 - DNA, 222 bp, Homo sapiens
accatatcatgataggatgcttggggctggttatcttctgaaggtggtctcccctctggcctgggggttttggtcgtgggccctgccacatgccttctcttgtcctattctgctttgcctggagtggggttggtttgggtcttgtccccctactctgcttctgaggctgactgtaatactgtacatctgtttctgaccattttttgctgttgttctctgtat

SEQ ID NO: 718720 - DNA, 135 bp, Homo sapiens
tggcccaagatgggtagatggacattattcccagacctactggaatcttctgcatccgcctggcttcgtctggggaagcccagctccttccctagaggaagtatcacttgatagaggacaagagtcagaaacatg

SEQ ID NO: 718721 - DNA, 1172 bp, Homo sapiens
  misc_feature (730)..(730): n is a, c, g, or t
caagtcgacgtcataactgcccgcccctgctcttgggaggttcctcgccccccctggagtggttccccatctattctcgggggggaagacacaacttgttgtgggttatcacgcctttgtcgcgtctttctccacatagggtgccccacgtttgataaaaaacattgtgtgtttgtattctttctggtaaagaagaaaccgcccctggttgcaaccccacgcgtgtttttttaatagcgagcgttctccacgttgtgaggagagaaaggaagtttgtaaaatttggggagaaaaacattgttgggggacacccctttgtgtcctcccccccgaggagggcgcttgcaccccacaaagaggtctcccccgcccccccaatgtctgctgtcgttataatagtggaaagagagtttctcccccgttgtgaagagaagtcctcctctttagtgggagcccctatcacccttctgtgtcgtacacctgggacacgccaccgtgggttcttattgaagcttctcccactctcacgccactctgtgagagagcccccctctggtgtcaacagacgaccacatggtgtgttggagagtcttctgtgagtatattgcgcccccccctctgtgggacgacactcttctcactctctactttctctctcctcacatatgagtcgctcctcttatattgagagagagacgcttctgtgtgtggtgcgcctctccccctctgnggccacacacgcgctcacacctcccggccgcacactgtggtgtgagttcgccccccctcccctctgaggccccactcttgtcccaccgcacggaccctctggcgtctcttcacacaccttgtgcccagcgaaatcttggcgcacaccctcgctgttggagagaacccaccgcgaccgcggtgtgttttgagccaccacaacccgggcacacctacacgcgcgggctatactattcccagagaacccgcagaaggaccggctatccccccaaaacgaagggctaacaatgcccccccgtgggtataccccccgccacccacactttcacagagcggcctatctgagagctttcccactctctgttttcccccctcgggccacatcccacccctgagaatccttaaccccccccccgtcccctaaaggttttttttaaaatgta

SEQ ID NO: 718722 - DNA, 982 bp, Homo sapiens
cgcccccctctcttcttttttttgtcttgcgtcgcgatgaacggattatacaatatgtaagaatactttgactgtgtaagcggtgaagtgcttctatagagaccctcctctttgtataagtagtggctccactactgtgttgctttctagccggcctcgctgtcttggtctcgccgccgcgcggggactcacttctcgtgttcgctcccttaacgacgcccggggtttagttccgtcgggaatccccaaaggtggtcctttcctgagggatgtgtcaagaaagagttctccccgaccgttgaaacccgatgctccctgggagcaattttgaaaaactccggtggtgagtggaaatcaacacgtgacccatgtccaaatagggggaactggaaagaagtcacctgtgcagataaaccgtgaattgctcaccttgcccgccaccatcatttggggaagaatccaccgttggcgtgatggaccgagtggatgaaatgacccagatatagttaaataccaccacatacctgaggaatactagttaaccaccgccgcctggacatccgtatcagcagcgtctgcccgccggagaatattccagcgcccgagccgaggagaacccccgctccctgaggaggacctgtcccaaacatctttccaaaccccccccagccgcctgcccggatggactcgctgctcattgcaggcccagatacacacttactgcccagacatccaggagttcactgccccaaacttaggccagctcttcatggccccggctcttcaagaataccaccacttaagaaaaggaagtttcccagaaaagaagttaaccatgaactcttgaagtcacccccgggccactcttggaagaaatatatttgcatattgaaaagccccgaggatttctttagtgtcattgccgattttggctataaccgtgtctttctagcccataataaaataaaaccaaattattgga

SEQ ID NO: 718723 - DNA, 106 bp, Homo sapiens
  misc_feature (102)..(102): n is a, c, g, or t
catatgcagttggcaggcaacacaggttggggcaccagctacacatcaggttgttgttgcatttgggttaacacacacatcagtcagcagggcatgcatgcntcaa

SEQ ID NO: 718724 - DNA, 389 bp, Homo sapiens
actctagaggatcaacctgctgcccgttacgcgctgatgcagcgagcacctgaagcgcgagagcaaaccatcgccaacctgcagacggacctgagcgacggggtgcggcttatcgcgctgctggaggtgctcagccagaagaagatgcaccgcaagcacaaccagcggcccactttccgccaaatgcagcttgagaacgtgtcggtggcgctcgagttcctggaccgcgagagcatcaaactggtgtccatcgacagcaaggccatcgtggacgagaacctgaagctgatcctgggcctcatctggaccctgatcctgcactactccatctccatgcccatgtgggacgaggaggagcatgaggacgccaagaagcagacccccaagca

SEQ ID NO: 718725 - DNA, 133 bp, Homo sapiens
cagtacgcctaccaggatctgtcggtgagctggctggttgctgagggagagcagagaccatgtcttgacatagaagaggtggtggaagagtacgatgagtaggagcaggaggagcagctgttaaggagcagaa

SEQ ID NO: 718726 - DNA, 647 bp, Homo sapiens
gcaacggtactaccctgggttccgggcaggggtggaactgtgattctgcctggactggggatcggatgggggtggaggttcgactttgggaagcagagcacagcagcccaaactttgctcgtaactggcggcggctacagaacttgacttcttgggaacagaacacagcagcctgaacttgacttgttactctttggcagctacaggcacgaacaagaaggccaaacagaagcctccaccaacttgtcctccctgcaggcaacgcatcaaattgaacaactactccacacaaagaagcactcttaactgagcacactgacaaaactccaggctgaatgactcatagtacctggcttcctaacttcataccactgaaaggggcactgacagatggctacggcacgagcacagctcttgcacacttgctaacaccaatccctgccccaatctcccagtagcttgctgctgtggcacggcaacagcagaatctgtgtgtttaacgggacgcagagagggcagtgactcgtgggactttgcgtcggaactcactactgccctgttacagcacgacaagcaacaccaggcataactcagccggtacccacacgagggagcattctagaccagccctaaccagtggtcacgaa

SEQ ID NO: 718727 - DNA, 404 bp, Homo sapiens
ttagggctccactcggggggggacgggtacagaggagcggccggggctctcggctctggtcccgggtgtgtgcagctgcggggggcagagctttagaattcagacgcagggggcctgacttaactctcctgagcctttgaggtcacccggaaaaatccccatttctcagggtggggaagctgaggccgcggccaaggcaccagccagggctgtgcagtgtcccgctccaggcacagcttcgtgcggccagcttgtgtactctggcggattccaactttcccggagaagcccagcacagaggctgcagctatggtttgcgaggagcccacttggttcaggggcacagggttgggcctacagccggagctgcgtggggtgacatgtcgtccctgttcttacaagaa

SEQ ID NO: 718728 - DNA, 703 bp, Homo sapiens
ggagagaactagtctcggttttttttgtttttggataactaactcgtgttttgaaagcagtaaaaggttccacgacccaaataaaccagttctgaggtttccccaagaataattttaacagctccagcttacagtgtttatcaaaatacaaaagaaaaaagtaaaggtggtcttttcgatggcaaatcggacccttgacaggctgagggagagaaagctacatcacacacagaggtggggtgacccccgaggggctgtgggtactaggtggaccgcctgcccggtttgcacgcgctcctgctggtgaggccccaaaacatcctgccaaagtgtctgagcgacacacaattgttggggacgacggacccactctggccacacggaaccgagggacagatggggccctggtcccaataggcttgcctagaaaggtgggtaaggggcggcctgcggcatacatggggtggcctgtgagctcccagccatggccccttggaataacccgggtgggaagcacagcggacaaagcaacagtggcatattggaactgcaaggggtgaacccaacgggaccaagcgactgcgggagaataatccaacggtgacctatgccaaaattgacacggcagtttgatgcgacaaccaaccaccattaatgttccccaaagcaggaccacgatgacgcgtggaagatggtaaatccg

SEQ ID NO: 718729 - DNA, 285 bp, Homo sapiens
acccccccccccccgggggggggggggtggggggccccttaaaaccccccccctttttccccccccttttttttaaaaaatggggggggggggttttccccccggccccccttcccaaatttttccccggggctttccgggaaccccccccccaaaagcccctttttaaaagggggggttttttttttttaaggggggcccccccccggccgggggcctttttttttttttttttttttgggcccgggcccccgggagggcccccttattttttttttgggggga

SEQ ID NO: 718730 - DNA, 795 bp, Homo sapiens
ggtacggtcccgcgtgactgcgcgcggcgctctgggagtacgacatggcgcgcgactgcgggcgctgctgtgtggggccgccgcctgcggctttgctgcgggcgcgggctgcggcgtgccgggaggaaaaccaattctgtgtcctcggaggaccacagcccattgggccccagggaaacccagcctgagcttgcatggccaggacgacttgtcagcacgcagaccgccgaggacaaggaggaaccccttgcactcgattatccaggcaagcacagagagcgtgcagggttccactttccaaaaccatgagtcccaggggcgagacaaaaggaagctttgggccacatttgtttggccccggtcccttgtacctcaggaacaagacgaggttgttaaataccggggaagcttgatctccaacaattgccgagggccgaattgccctttggtaaaaaaaaacagccttgggcgggttcaacaaaaaaactgttgggcgattaggtccctttggaaccgctggggccccacagagaggcccaacctttgtggccccagggaagacaagcttttggcgaacacaatttctcccacttttttgtgccacaaatggaagccccaaaaatttggccctggaaagaaaaacagggggcacccacaatttcaaacccatttcccaagggggattaacctgggagatactccggcggcactgaccaccagggaaaggacggctggcttgttccaaacccttgggggaacgatttgcccaggatcgggggctcaacagccctccct

SEQ ID NO: 718731 - DNA, 867 bp, Homo sapiens
gaagaaagtgtcagagccgctccctggactgtcggaagcggagttgtttgtaaaggcaaatgcagacgcctcctcctcctgtcacttcgggacaagttaacaatcttcagattcgttattaaagcctcgtgtaccctatgtgatctatcaggttcggctttagagtgtggtgaagggtacttttcatggtgcatggaggaaagccaatgcgcaggtaggcgatttaggaagaaaacctttggtttcactgattaaagattcagcatgtaataatttaaatttttaaagaaagagtttcaatcttactaaattctgcttggaactaatgagtcttgttctacaataaatcaaagagtaatattaagaattaagtagctttttaatagaataaaatacagaagtggtttctgaaaagtgctgtggattgtatgtagtgctaaacacttaaattttccttttttcatgttttttacagtaaataatcattaagttcattatgatactatatggatttattataatcttcagttccctataaaatgtagaggattctgttcccatgtaagaatcataattatttataatatactgtactgcatgcctaattatggttaggttatttccttgatgttcaatcatacatttgttctggttaattaaaatagctgcatgtagggaagatgtatcaggactaaaataggtattagacattataacttagtccatagaaagcatagaacaatgtctggggaacaatatagacactcacatagggccctccaaagcctagaacttcactaatggttgttctacattttggtgctaaacaattgagacttagaatcttaatggatccagaaatcatcc

SEQ ID NO: 718732 - DNA, 767 bp, Homo sapiens
tggaggatcccacctcagccttcgtgactagtgaggtgcgcaaactgcccgagttttccctggtgcgcgggttcctgcctttgcagtgccctccacccttcctggtgtctagaccctgccttcctttcccagtgcccttttgtaccctgtccctggaaagcctggctgtcctgccgcgctgattgcccctgctcggacttcttcccagtgaggggcctggggcttcggcttgctcagccagttcctgcgaaccggtccattaggaggcattccgtgccaccggtggaacgtgatcctgtttagccaaaatgcccacggtttgccagacggccaagttgtcaaccaattcccaaatgtgaaaaggcgagcatcatcgatgaaaaccagaatttccattgaattacagaggatcccccccaaaaaggggggataacccgaggggggcaactttctttaacggtcccctttccgagcccaattaattggcgcctctgagctggaaccgggcgatgcaaacacaccgaatctacccgtttcgggacgacttgtaggggcagtcacctaactttacacagacgtccatgttggagcccccattcttctactaaaaacgactcctcgatgctatccacaatgtttggttagtatacctactaactataacggtgaccgagatacaatttgggggaaccaatgtccacaccgctcaaagtgtcccaattctatgggaaaggcccattatagcaaagtcagggaaaacatacacc

SEQ ID NO: 718733 - DNA, 283 bp, Homo sapiens
gaagaaagtgtcagagccgctccctggactgtcggaagcggagttgtttgtaaaggcaaatgcagacgcctcctcctcctgtcacttcgggacaagttaacaatcttcagattcgttattaaagcctcgtgtaccctatgtgatctatcaggttcggctttagagtgtggtgaagggtacttttcatggtgcatggaggaaagccaatgcgcaggtgtaccaacattcgacagagagactggatggatgtaacagccgctgcacccttggggacccacaaact

SEQ ID NO: 718734 - DNA, 963 bp, Homo sapiens
  misc_feature (959)..(959): n is a, c, g, or t
tagagagatgaggtgaaatatcgtaagtgttctctgttcccggaaccgaaatcacctgtggtccatgtgtttgatgaatacaaaaggatatcacagaaggatattgaccagagtataaatctgaaacatctggtagcttcgaagatgctcttgctggcctatagtaaagtgccctgaggaaccacatctgcatatttgctgacaagctctatacatcgatgacgggcttgggcacccgatgataacaccctcatcagagtgatgccttctcgagcagaaatggacatgtggatatccgggcacccttcaagagactctatggacaagtctctgtactcgttcatcacagggtgacaccattcttggagactacaggaacagtactgctttggtcctcctgcgagacggaagatgattaaccctcaacaaatcccagaaggaccacgcgaggcttctcaacacaactttgaattctcccacacctttcattttttctacacttgctattactcatcatctcagaatgcttattcccaattacacacgcctacacgctgcctcctaagacatatagactgtctgtctcattattcacctataatcagtccatcaacgactgccttcacaagctgttacttgcctttcaacagcttataaacatatcactggagattcaccgtgaaataacctctgttttccagctcaccagactcactcaactgggtccaccgccctgactctttacatgtcatatctcttccgggacgcttccaactgcgatgtctacaaccacctgtgcccctaaccaattcaaggggacgccaccatgaaagtaacacggagtaagccccccctaattggccaccccgagccaatatcctcgtgtcaaagactaaatacgcccaacatgcgcgcccactatacacccacccagcatctacgtcccaccccaccatttncccc

SEQ ID NO: 718735 - DNA, 1445 bp, Homo sapiens
agcgggttggttccagcctggagaggccgaaccagcgcgggggtcgaggagacctgagcctgccatactgagtctatggacagttccacagaaagaatcaaattctgctgtagaggacctggttagaccaactatgtgatagtgctaaacggtagcggaaaaacatatttcccatgtattccctcatcaataaacgaacatgaaaattctaacgaaggcagaaaaaaccagaataacgcacaacaaatgacataaacaatgactagtaaacacatttgcacgcattcaaaacaataaacgatgaagacctacgtaaataaacaagggataacatacacacatctaacaaagaagatacacccgatatagatcaaaaacaccataacataaaccgaacacgctgaacaaggcaaaaagaaacaataaacagagcatatacgataaaaaaccctgaaaaacgaataaaacatacaaatacaagaccaacagcagaagaaacgaaacacataaaaacatactcgcaaaaaaaagtcaaactgagaaacaacccaataaaagcaacaaaattagcaataaaaaaaaaagaaaaaaaatatacatacaaaaatgaaagacactaaaacacaaaacaaacataatgatagaagataacataaaaatgaaaattcacacatacacccggaataatatcaatcaataagtatatcagagccggtgacgaaaataaatatagacggcccataatatcacggaaagtggatagcactaaaagaaacaatcccttgaacaattgaaccacagaaccgtagaataaaattaaagaaaaccaacaaggtaagggggaaattcatcactatgttcaaaccaatgccgtccgctaattccgtacaattacaatatccacaggtgcggttcctacaaaacgcctgcacatttctacaatcactctatgtgtaggaaaagccgcaatggaaaactgtattaatttaagcttaacctaatttacccttgaatacagatgaccctccattttcactcactccgaattatgcgccagcgacgtgactataatagcacgtaagccatttgttcatggcgacccgccatatacgataaacaaactcgaatagaatactcaagtccccaacgtctgttcaaggcgatatgttaaaccttctatttagtaccagtattagccgccatactcgcaattgtacatccccatcataatggcagttctccactacaaatataccgtcacagacactgtgacaatatgcccgtgaaatttccctaaccctacgtccagtggtttacactaatgtcactaacttcgcgcatcatctatttatctcctatttgtgcctagtcaactgcatagccatacttcgcctattataaattcgtattttacttgactatatcttcataaggacatttaattg

SEQ ID NO: 718736 - DNA, 258 bp, Homo sapiens
  misc_feature (79)..(79): n is a, c, g, or t
  misc_feature (142)..(142): n is a, c, g, or t
  misc_feature (191)..(191): n is a, c, g, or t
  misc_feature (213)..(213): n is a, c, g, or t
  misc_feature (221)..(221): n is a, c, g, or t
  misc_feature (227)..(227): n is a, c, g, or t
tttgtcgcctttgccgcactctgccgcaaagactgagctttctaaaacataaagtagagttcgatgttattcccctccntaaaaggctttcagaggatctccatggccataggaagaacttcgagattccttagcgatgctnacgagaactcaccaggatcaggcctccttatttctctaatttattttcnaccgacagaatcctcatgtgtnaccttaanattcgnagactcattaaattacttaaattttcctgat

SEQ ID NO: 718737 - DNA, 446 bp, Homo sapiens
  misc_feature (7)..(7): n is a, c, g, or t
  misc_feature (63)..(63): n is a, c, g, or t
  misc_feature (103)..(103): n is a, c, g, or t
  misc_feature (188)..(188): n is a, c, g, or t
  misc_feature (208)..(208): n is a, c, g, or t
  misc_feature (218)..(218): n is a, c, g, or t
  misc_feature (233)..(233): n is a, c, g, or t
  misc_feature (290)..(290): n is a, c, g, or t
  misc_feature (303)..(303): n is a, c, g, or t
  misc_feature (314)..(314): n is a, c, g, or t
  misc_feature (321)..(321): n is a, c, g, or t
  misc_feature (330)..(330): n is a, c, g, or t
  misc_feature (333)..(333): n is a, c, g, or t
  misc_feature (346)..(346): n is a, c, g, or t
  misc_feature (387)..(387): n is a, c, g, or t
  misc_feature (401)..(401): n is a, c, g, or t
ttttggnaacatgtttcacatgggcaagtggttattagagaatgatgcccgtgacacggctanagctatagcacacccacaaatagattcatacttggttgtntaatttgcatgcttgagtatggtgctttctccatgccactagttcatatatgccttttccagagtcagtgcaggatccgtatttntgcatgtctttttttatgtntgctcccttnccaaattttaccctnatttatctgagacagccttcctgtgacaaattctttatgctgcttttgctttcaaanggtcatttctgantattaattttngctgtcntgggttccngcntcacataacagantctgtttgttagttattttaatgtcagttcgctggctgtgngtaaacgtagctanacatatccccatgcttggtatctggactttgggatcggtaacctt

SEQ ID NO: 718738 - DNA, 505 bp, Homo sapiens
gcacgagctggtccccgaggccgacccatcctgggaaccctgtgtgcagctccctgccatgcttgacctttgccctgtgggtggctttgagcgggggagacctgggtctggtggtgggcagggcaggggcggaggtggacttgggtctttgtgacactgcaccaattcccatggattctgccggcacccactgccctcctgagcagagcaaaggcagcagaggcggatgccagggtccggaggtggcatctactcatcagacactttctgtagttttataacaaatttggggcctcatgttagaccccagccagaccaggctcctgtcctggggctcagctccctccaagctgcttcaggttcagtttcctccatgcttacgaaaccgaagggcaacgggcacagtcagggaggcgtcagaggaggcaccggctccactgttcacactgggaccttctgcagacggggctcccagcctcgaccagccccggaacccccagcacgg

SEQ ID NO: 718739 - DNA, 649 bp, Homo sapiens
agactggctcctacatattcgtggactatgcaacacgttctccagcgacgccctgaaggtgacgtgcctcatcacccgcctcacagggacccgccctgtgagatgggtgatcccctacatcaagaaggtagagccccctcctctaactgattaccggcggctttctggcctgacgatgaacgccgagtcttttggatggcgccggacgtgacgaggacttctaggcccgtgcgatgaccctcggccctggcgcggcgcggtcgctcatgcgggaggggtccgcttgtgttactaggccgccgtctttagcatcgccatcgctggcgcccgtccacatacctgtgccgtcctcctctcccgctctgactcctgcctgtatcatccccttgcgctccttgttcccttcccgcgtaggtgcttgcctttgttcccaggaattagcgctccatggctccttgctgccgcccctgggcctcactctggagcgagccgccgccctctccttccagccagccagcccctcccatgtacatttggacgctgtcctgcgctccagctgcaagctgggctcctgttacacactggacagaccacccactgccgccgctgccaagccctctcctccccaccagactgccagacgactact

SEQ ID NO: 718740 - DNA, 255 bp, Homo sapiens
acgctcatttacttacaagaagttacttatctcattattatgctatctttctttctttgataactgtttgtatatcttcatgatactttgcttctttttttgttgttatactctaagtttaagggtgcatgtgcacagggtgcaggtttgttgcatatgtatacatgtgccatgttggtgtgctgcgcccattaactcgtcatttacattgggtatatctcctaatgctatccctccctcctcccccaaccccac

SEQ ID NO: 718741 - DNA, 139 bp, Homo sapiens
tacgaggacttatcggggcattctggactctccctgtatgagggcacttcaccaggacctgaccctcatggggaaggtgaggaccactgaggcccccctccacaccctgccaagggccttggttggtgtctgtaatctc

SEQ ID NO: 718742 - DNA, 824 bp, Homo sapiens
  misc_feature (13)..(13): n is a, c, g, or t
  misc_feature (148)..(148): n is a, c, g, or t
  misc_feature (173)..(173): n is a, c, g, or t
  misc_feature (194)..(194): n is a, c, g, or t
  misc_feature (211)..(211): n is a, c, g, or t
  misc_feature (247)..(247): n is a, c, g, or t
  misc_feature (270)..(270): n is a, c, g, or t
  misc_feature (290)..(290): n is a, c, g, or t
  misc_feature (365)..(365): n is a, c, g, or t
  misc_feature (379)..(379): n is a, c, g, or t
  misc_feature (418)..(418): n is a, c, g, or t
  misc_feature (428)..(428): n is a, c, g, or t
  misc_feature (430)..(430): n is a, c, g, or t
  misc_feature (434)..(434): n is a, c, g, or t
  misc_feature (443)..(443): n is a, c, g, or t
  misc_feature (453)..(453): n is a, c, g, or t
  misc_feature (484)..(484): n is a, c, g, or t
  misc_feature (494)..(494): n is a, c, g, or t
  misc_feature (570)..(570): n is a, c, g, or t
  misc_feature (648)..(648): n is a, c, g, or t
  misc_feature (715)..(715): n is a, c, g, or t
  misc_feature (800)..(800): n is a, c, g, or t
atgtttgccaaancaaccagcgcaattttcttgagaagaagttgatgctgatgagtgacctagattgcgagtatcaaatctcgaatgactactgataagtatacagctatctaaagtctggtgacaaaaaagaagagattctggtgcnggcagagacccaagtaccagttttnatccctcacccttggcgatgnactcatagaagaccaanttccgagctccacgtgagtcgtggagtcggactttntgaaatacgagggcaagtttgcnaaccacgtgagtggaacccnggagcactcgcactcgcggcgaaggtcaagactgaacctcggggggcagcagccgcgtagagagccagtcttcanttaggaaccctgancgaagcaggaggtggatttgcagcagctcatcagagacnctgccgaganancaanaaatctganaaacactgtncatccagcagcgtgctggcagggaaggaatnaggtcctgtncgttttgacacagaagatcacaacgatgcagaagtgtgtgatctctgagcacatgcaggtcgaggagaagtgtggnggcatcgtgggcatccagaccaagacggtgcaggtgtcagcgacggaggatgggaatgtcaccaaggactccaacgtngtgctggagatcccagctgccaccaccattgcctacggtgtcattgagttatacgtgaaactggacngccagttcgagttctgccttctccgagggaagcaaggtggcttcgagaacaagaagagaattgactctgtctacctggacccctngtctttcgagagtttgcaatcaaa

SEQ ID NO: 718743 - DNA, 146 bp, Homo sapiens
tcgattagaggatcccatttaatgtttagagacttataaaaaaatctaataggtttttgtgtgtctctagaataacatatttaaaaaaacaatttacaaataatgtaattgaaagtgataagagtcattgcccccgtgtgttaacg

SEQ ID NO: 718744 - DNA, 170 bp, Homo sapiens
tgtgggtgaccgtggtctttgggcacaatcattggaattccttggagccactgggattcataggctttgtatccaactagcatccaggcctgaggctgctgacgttcgacaccaggtccagtagagagtgcccttttgtatcttaagccaggctcaacccacaagccacg

SEQ ID NO: 718745 - DNA, 214 bp, Homo sapiens
aaaggaaaaaatggggggaaggaaaagtaaaaaaaaaaatcccccttcccggcccaaggggtttttgcccagtttttttaaaaagaattttccccagggatgggttcctgttcaccaaatggggcccgggaaaactgaaaaccttttgcttaaaggggcctttttgcccgctgatggggggcccccggaagcccataaattttttaattgttta

SEQ ID NO: 718746 - DNA, 523 bp, Homo sapiens
  misc_feature (186)..(186): n is a, c, g, or t
ggtgggtggggtgggtttccccgctcttttgttgtgcaaagggttttgtgcgcaccgcccttttgtggggggttccttttgtcccccacacgcttccccaggggccggtgtgggggcggagggatatggccttcccgggtgtttcccctttttacccccaattttttgggggtgggggaaggggtntttgcccccccgggccccccccccaaaagggtttttttttgggggggggtttttttccccccccgggcccggggtggggggaaaccccccccccccttcaggggggttgggggggggttgcccccccccccggggaaaattagggtttttttcaaaaggccccccttttttttacccgggggaattttgtttttgggcttggttaaaaaaaaattaaagggtgggtctggggcccccccccccctgggggggtttttcccccccccctttttttgggttaagcccctttttccgtttttgggtttgcccccccttaaaaaaattttttcccccccca

SEQ ID NO: 718747 - DNA, 149 bp, Homo sapiens
acatgcccttggtatctaagacatctaaatcacggctaggcactaccatgcctgtaatctcagcactttgggagggcaaggtgagaggactgcttgagctcaggaattcaagaccagcctaggcaacatagggagaatctgtctctact

SEQ ID NO: 718748 - DNA, 205 bp, Homo sapiens
  misc_feature (110)..(110): n is a, c, g, or t
tggctagcaggtcatggtgggcttgatgactcagtggtcaggggtcgcttgccaggtggtcacggggtccggactcggtgctggtgtccatattgtgcttggatacaggncatctctggagagagaggagaccccaggcagggaaaggagagtcagtgtgacaagcctatagccttgtctcaaagtatttgggcccccgagcagc

SEQ ID NO: 718749 - DNA, 837 bp, Homo sapiens
  misc_feature (403)..(403): n is a, c, g, or t
gaccacgcgtcgctctttccccggctggttcccggcgcggatgtgaggggttctctcctctacgcggaatccgtcggaaccatggcttccctttccctcgcacctgttaatatcttcaaggctggagctgatgaagagagggccgagacagctcgcctgtcgtcgtttatcggtgccatcgccatggagacttggtgaagagcacttgggaccgaaggcatggacaaaattctcctaagcagtggacgagacgccgctctgatggtgaccaacgacggtgctaccattctcaagaacattggtgtggacaaccccgcagcaaaggttctagttgatatgtcaagggttcaagatgatgaagttggtgatggcactacctctgttactgtcttagccgcagagntgctccgggaagcagaatctttaattgcaaaaaagatacatccacagaccatcatctcaggttggagagaagccacaaaggcagcaagagaggccctgctgagctccgctgtggatcatggttctgatgaagccagattctggcaggacttaatgaacattgcaggaacgacattgtcctcaaagtccttatcaccaaaaggaccatttactaaactggcgtgaagcggtctcagactgaaggtctggcaactggagggatcatgtctcagaactagtggagttgggagatctattagaagaaggtgttggtaaaattgggtaattacccaggattggatggaattttttggatctgggggtgccaaagatttggccggaagggtccccagtgggataaagttaggaaaggaggggtttcggaaagtttaagga

SEQ ID NO: 718750 - DNA, 1320 bp, Homo sapiens
tggttaaaacattctctatttttaatttccaattttataatacgattacagggaaggatggcttatggaaacaaatactatttggtgttcagtacatggtctttaaatggatagacttataagtatggtaaacaatctatactaataaaagggttcccaaacgctggcctggtaaagaaatcagggcaaattataaccataaggcaataaaccatctcacaaggccttaccaagaacaggctcaccatagccgcaccagaatgggcaataaggctataaaccaaaaaaaaaaaaaaaaaaaagaaaaacaaagaagggggcgcgcgccggcaccaagaagaaatctccccaggaggggcgcgccacaagatcaccgcgaccacccacagattctctgtggtcacaaggaggggaccaccaataaggcgggacgcgagaatataaaaaccgcacacgaggaccgtgggcacgagagatataacaaaacaaaggggagaggaaaccgggcgacaacaacgcgcgtgagcaaacatgcgagaacacatctgagaagagaagagaaaccaaaaacaacaagcgaggcgcgaggcgaccgacacaaaagagggcgaaaccaacaacaacacccacccacaaacaaacaaaatacaaaaccgcccaagagcaggaaaaaaaaacaccacaaacctcctcaaaaagaggaaaaaaaagggggcaaaacacacaagaaaggcaaaatcaacaacagccgacgacaacaaaaaagaaccgacaacaacagcgacgaaacgacaccacacaacacaacaactagtactccaccacgggggaacccaagaagaaagacacaccccgaccgacaacacggaacagagccgctaaagacccaccaacaccgaacgaaccggcagccacacacccaacgacaaaacgaagcaaagaaagcaagaagaccagacaccacagcaaccacgacaacgagcgagaacgcacacaacagaaaacaagcaacagacaaggcaaaacaacgagagaaggcgagaagggaaaagcagaagcggagcggggagaggacgagaaggcagaaagaggaaaggggaggagagagagggagaaagacacagacaacaggagaggagacgggcgagtgaagaaagagacgagaggaaagagaggggagaggcgagggacacagggggtagcgtggaacgaaaatcaagaggggagggggaagagagcgggaaaaaacggaagaagaaacaaggcgaagaaaagagacgcagaagaaggagaacgaagagagagagaaaagaggagaga

SEQ ID NO: 718751 - DNA, 499 bp, Homo sapiens
taagggttggaggggggaatgcgggaaaatggtaacggggtatggagacatatcatataagttaagtgctgaggggtggaggtgggtaggaaagttttcccatagggagggtgtatgaagtgtgggcctccgcgatagcgcgggaacactgcgcggaaggaaaagagagggaggaagcaagaaaggtgaatggtgaggaaagagggatggagcatgaaaatgaagagacgcctgactcacctacgggcccacgggggagggacaggagtagaaaagactggactggagggagtgcacgggatgtttcgaaatacccacagaagacgacacgaaaagaacgcgaaacgaaaggtactggcactagcacgagccaaacaaggggaaaagttcacaacataaaaaacaacacagagggcccgccgggaaccaatattcacccctcccaatgccgggttcgcaggaatcataaagggtggcaaaccctgcggaggtaaagggg

SEQ ID NO: 718752 - DNA, 163 bp, Homo sapiens
acagtcagaagaccctaacagccacctaaaaacattgataagaatagttctgtaccttacatcagtttttcagatgagaggagagtcccctgtatggtatggttttaaacgaagtctccaccaaaatattggattggatgctattgaaacttctaaaactagg

SEQ ID NO: 718753 - DNA, 317 bp, Homo sapiens
gcggtagattctagaggaccccccggtaatgtagatactgtgcctggaaatgtagatactgtgcaggtcgaagtgcacatgatgcaaccatagcgccactgcagcctccactcctgggctcagcagtcatcctacctcgcctcccaagttactgggactatagtgcatgcaccatcacaccctagctaattttactttttagtagagacaaggtctcgctgtgttgcccaggctggtctcaaattcctgagcccgagtgatcctcccgcctctgcctcccgaggtgctgggattacaggcgtgtagccactatcaca

SEQ ID NO: 718754 - DNA, 557 bp, Homo sapiens
gcctgtaatcccagctctcagggaggctaagaggcgggaggatagcttgagcccaggagttcgagacctgcctgggcaatatagcgagaccccgttctccagaaaaaggaaaaaaaaaaaaaaaacaaaagacgaaaaaaaaaaaaaaaaaaaaaaaaaaaatgtgtgtgggcgcgcgccgccgcgggccccgcgcgagaaaagcttttaaaacccatcgcggtgtggggggcgggggcccccgaggagaggtaaggtgagaacgaggggcccaaagaggtggtgtccccagagagggaacaccggggccacagagacaaagagggggcgggatttcctccccacaaataataaaaagacccgcggggggcgaaaccgagaggggcgtgtttgtggaggacaaaactccacaaagaggaggagctgtctgcaggaggagggacaatatacaaggggggagagtatatatataacaagaggggggggagcccaacaagagggagagcccgcgaaagctatcaaaaatttaaacccccccgcagcacgggggtgggcca

SEQ ID NO: 718755 - DNA, 410 bp, Homo sapiens
  misc_feature (194)..(194): n is a, c, g, or t
  misc_feature (200)..(200): n is a, c, g, or t
  misc_feature (215)..(215): n is a, c, g, or t
  misc_feature (226)..(226): n is a, c, g, or t
  misc_feature (242)..(242): n is a, c, g, or t
gatccctgaatatgctgttcacgggagtataagccttaccggatgtcccggcagatcgcgcagaattcacgtttccgcgttatcaggatacactacgtctcgtcatgcttcgaatacgggattatcaccctctatgattgttctttccagaacattcttctcacaatctaagtacgacagcgtggtcctacaanccctgntaagcgttgccacanagcaggtttgngctataccccgttcgntcgccactactaggggaatcattatttattttctcttcctaaaggtactaagatgtttcagttccctatcgttcgcctcactacttttgtagtgataacaggtcttcaacctactgggttgtcccattcggaaatccttggatcaaaggttatttgcacctacccaag

SEQ ID NO: 718756 - DNA, 1475 bp, Homo sapiens
gatgtcttatctcagacttcgaccagaagggggacataatacagaggagccaggcagggccagaggaataggtgagattacccagcagagccccagtgagagagacctggtagtttcgaacactcagtatattgctgtgcttggagttatgacaaagtacatgaagaagactctcagggtatgggtgcacctcagcgtgagatcgcaaggtagaagttgatcgtgatagcgagaaggcgacatgtactggctgaattgactgacgcgttgctacagtgcaaaagacatgacaaggacgctctggcctagaagtaccatcgatgtgatgacaccatgaagcgattaccaagatcacacatttttcatcgtatccttccacacaagcaaagcagccaacataggactggcatgtttgatcaggcactgtatggggcatatgtcatggagagaaccacaggcaggtctcgtgagcaggtaccagctgtgaacaaggcgcttatctgaggaggagcggctccccagggcacgagcgtggaaccccttgtccctgggagaagacgccttcctgtacgcgtgcacctgaagcggtcggaacactttattaacctcttgaggtatgcgcgggctgcacgccgttagatgcacgctcgttcctcggacacgtgcccagagattagagggcttagccatgcccatggcggtagttctccttcgatattgcgcatacgcgtaactagattggtggggaatgggaaatccttcggaaggcacacaaatgcaacatatgtttgtgcgtgggaaaccttccaaagcccccaaatggttgagttcaggccccccaagttgtgcagagtaaactgtgggacacgaacgagcccccccgtgtgttaggccttcgtggatatgccccccgaagggatggcccggtattacaaagggccacacacatctttttcgcatggttcccacacacggggtgagcgaggggatcgccttttccaacgatccaggtcccagagacgatacgcgactaaagtggacaacgcaaagatgggtcccacagtcacgcaaagagagacaagtctgcggcacacgggcaatagctgtgttagaacgcccctaacgaagcgattggatgtggcccctacgtggaaccacttgcttttcacatcgtacccatccgctaccgagtatcaaaaacgcaacacttttaaagcgccttaactacgcaaataacagttataccggggaggatacccaatttaaaacacaatggagcaagttatcgtgaggacacggtcacctttctgtggccctccatgggttcctgtgtggaattttgggccccggaaaagggacaggcacttttgagcaatgtggacacacaatgaggaggtcagcgagaaattacaacacacaggagcccacgacggcaggaggaaaacgccacaatatgggcaaaaggcgcgaaaaag

SEQ ID NO: 718757 - DNA, 323 bp, Homo sapiens
  misc_feature (107)..(107): n is a, c, g, or t
  misc_feature (113)..(113): n is a, c, g, or t
  misc_feature (128)..(128): n is a, c, g, or t
  misc_feature (139)..(139): n is a, c, g, or t
  misc_feature (155)..(155): n is a, c, g, or t
aggagtagtgataagccaggaatacggtatactcaggctctatgattgatccggtgcgatgcaagattcacctacgcaatctaatttcaccagcgtggtcctacaanccctgntaagcgttgccacanagcaggtttgngctataccccgttcgntcgccactactaggggaatcattatttattttctcttcctaaaggtactaagatgtttcagttccctatcgttcgcctcactacttttgtagtgataacaggtcttcaacctactgggttgtcccattcggaaatccttggatcaaaggttatttgcacctacccaag

SEQ ID NO: 718758 - DNA, 314 bp, Homo sapiens
gtagcacaacctagggtcagttttgcaggtggtaagccatttaccaagatagttgtaggtaagaagggcagatttattagagaaattgtgaaaatatgttgcagtgggcagctcagcagagaaggggctacctgcaaagaggcaagggctggaggaaagttttatagggtcctgctgaagggtgctacgtgtggaatgaggtcattgtgcccgcaggttgtttgtgattagctgtctctaactattgttcacacaataattgttcattattgttctcaacttggggctctccccaacctggggacccttcctta

SEQ ID NO: 718759 - DNA, 332 bp, Homo sapiens
gattggagggaaaaaaaaaaaacccctcccggatggtatttttcatcctggttttccccttggggctggtatggccaaattttaccggataggaaattttaaaatggccccctttttttttggttcagccaggtatggaaaaagccattaattatggggatggtaaaggagggctttaaaaaaaggtttttatcccaaggtggttttggaaatttaaaaggctccccttattttttggaaagggccgcatactcctttggggataattctactggtccgatgttttaaaatattcccaaaacttcctttaaaaaaatattttttttttagga

SEQ ID NO: 718760 - DNA, 172 bp, Homo sapiens
aatgatgggatccaaaggctctgatcgatcgccgagcgattggtccgcgaccggtatcagcgcgacccctcagacgcgtgtgagcattacagcctagaggtaccggtcgtggagggtatcccgtagagttatcctgcggactttcacgcgggctctgatgcgtctggtgaga

SEQ ID NO: 718761 - DNA, 426 bp, Homo sapiens
gcatatgcacagtcaaggtcacttaaagggtcttatgaaacaatttgagccagagagcatctttcccctgtgcttggaaaccttttttccttcttgacatttatcacctctgatggctgaagaatgtagacaggtataatgatactgcttttcaccaaaatttctacaccaaggtaaacaggtgtttgccttatttaattttttactttcagttctacgtgaattagctttttcacggctgttgcccttccatctcctcctttctttccctcttctcctatgcccgctttctccccctcactaatcttcgtctacttctccctccccctttctccccctccttctttctcacttactgcagttacttttgacccatgtgcaaggattgtacacgctgatgagaatcatgcactttttctcctctgt

SEQ ID NO: 718762 - DNA, 117 bp, Homo sapiens
caggatccccccggtaacactagatggctattgaggagtatcctgaggcatgggggtcaggagttgaggtcttggtgagtgttttattggggttagcgatggaggtacggattggtg

SEQ ID NO: 718763 - DNA, 187 bp, Homo sapiens
ccacgctacagccactgtaatcagtcattagattactgacttattcctacaatcctaaaatatcaagaggtggacaaggtttaagtcaaacccgaggaagtcttcaccctatcactctatctataacagaagggagctggcatagaagttaggataggcttactgcatcacgcagctcaaaggtaag

SEQ ID NO: 718764 - DNA, 152 bp, Homo sapiens
ggtttgccgccagaacacaggtgtcgtgaaaactacccctaaaaggcaaaatggggaagggaaagactcatatcaacattgtcggcattggacaaggagattcgggcaagttcaccactccttggcatcttatctattaattcgcgtgtgca

SEQ ID NO: 718765 - DNA, 563 bp, Homo sapiens
ccccttaattttgtgttcttcggggggggtcttttcggggcctttcggagggggttttttattcggcggcgccccgcgccaccctttttttggggggggtaccggggccccccggttggcctgttggtggggttctccctccccccgttttttaaatcccccgggccccccggggggcgtgctcccattagggtaggggggaaaaaaacccttttggctttggccatttgaaagttttcccccccccccctttaaggggaatatgccccccgggcccccttttttgggggggtggggggcccccccaaaaagggggccttggttttgggcccttttttttaaaacgcccttttcccatttccctggggccttggggggaagtttttttagccccccccccccccccccccccaaggttttttgggctttgggccccagaaaaaacccgggggttttttttttttggttttttttttttccccctttcggggcccaaaggcccccttttgtttgggggggggggggggccccccaaaattttttttttttaaaagggggggcca

SEQ ID NO: 718766 - DNA, 199 bp, Homo sapiens
cacgagagctctcttatcgcctctgtgagccacactgtgtgtgtgggtcagtcaagtgcctgataggaagggtgatatgagcccaatgagactcaagaatattatcacgtctggacacaaagggcgagaactcaattggaacaattccgcatgccggcaaggaaagaccttctggcttgcgaaatatagcttaccgggt

SEQ ID NO: 718767 - DNA, 331 bp, Homo sapiens
cctagcggtccatagtacttgctgagtactcttaaaactaggcgggtatggtataatacgcctcacactcattctcaacccccgtgaaaaaaaaaattaagcttacccctttcttggttactattccttattgaggcttaattttaacaagctccatctggcctaacgaaaaacaaggacttaaattcggcccatggcttactcttcactcagccaacattagcccttcgtagtaacagccatcctcatccaaaccccctgaagcttcacgggcgcagtcattctcattacttgcccacgggcttacatcctcaattactattctgcctag

SEQ ID NO: 718768 - DNA, 143 bp, Homo sapiens
cgcggtctgtatgcatgggccacgctccatggaatcaactgcattcaatcaagctggatggaatccactgcatcaatcgggatgcatttaccacgctgcgtgtaatatactgcattcaatcacgctgcatggaattcactgca

SEQ ID NO: 718769 - DNA, 899 bp, Homo sapiens
  misc_feature (899)..(899): n is a, c, g, or t
ctgctgttggccatggctgggcctgggcctgggctccgccgttcccgtgtgtgctggccgaggactgacctcggctgcatcatctgccagtgggctgctggactggcccgccacgctgccctgcgtgccacagcttctgccgccactgcctggatggccctgtggggctgcccgctgacgccctgccgctgtggcctgccccacttgcctgccatgtggctgcctgctgcatgcatgcctgcagctgctgtgaagaacactgctactgcatgtgacctgtgccgacaatgtacctgcctgctgccagcactgctgatgatacacggcgtggctcctgacccttgcccatctagccccgtgcccggagctccagtcccctctccagctgctggcctgcggatggcccctggctgccttgccctgaaccttgcagctggcgtagggacggcctggtgccctgcagtcgtccccttgtgctcccgcactgtgggcttgccctgacggaccgttgagcccctttccgccagtgttgtggctcgatacccccctattcctacaggcccgttctcacttttcaccgttcctattaacgtcacgtctaaacacgtccgaagtacccgactccttcgagaaggcaactattgcgaacagtccactaaacagtaatgaacgacagctaccacaaaaaaccaaagttccccagtcttcccgacaacgcttgctcaactatacgccctggcacaacaagctatcggcccatactacaccacacctacctatccgccaaagccggagtctacagagacctcatttcatacgtgaagccttcagaacaaccatggtcggtcgcaccggaacaacaacaagagatccaccgcaccatggcccacggaccctgn

SEQ ID NO: 718770 - DNA, 126 bp, Homo sapiens
gggagactgaggttgaaggatcccatgagcccaggagtttggaggcttttagcgatggagtgagccattatcacaccactgcactacagcatgggtgcagagcgagaccccgtgtccattgaaaaa

SEQ ID NO: 718771 - DNA, 930 bp, Homo sapiens
gtatcaccaaacccttgccggctcttattggcatgaaacactcctcccgctgcctgctcctgagtgaggaaaatggctggagaacgctggcctgagagcaccgaggtgaacagccccccctcccagccccccaccctgtgtccctgctaatcccgttgctaatgcgtcctactcatgtgtccacctcatgcccagcgtgcaccatggacggtggcataagatgtccaaggctgctgaaccgcagagcgtagatgaccgtcgcagaggattatcagcgttcgagcgtcgctatgcccactattgggaatccactgcggaacatgctcgacggacgtccacgcgctcgctagcgacacgacctccaccagtagcaaccgagacgaccatcccaagcagtaagcacagacaaaaaccacagaccagcgggtagggtccagaacgagacaaacaagaggcgatcagccctcggacaatcgatcggagcgaaagataggagtaaccaggaaggagcaagtcagcggatccgacagtacggatagcaagcccgaggccaccaataggagcaacagagagcagaccaaaccgagacccaggcgcaagtgaccagggggccacatcccgaagcagatggacgctccccccagctcaatctgacgcgatgggcaacgcgtgaaccgaaccgagacacgcacaggacaagtcacaaaatcacgacagggtgccccagagacgcgccaagccgcctgcgagaacggcgacaacagccaatcgcacgaggcaaacgcgccgaaagacagctagagcgaacgccggggctcaaaccacgcgagcgcagccgagaacggcacatgcaccggaacgaacggcagcacgagacacgagcagccacggggcagaccagaaggcggcagagaaagagaatacacaatc

SEQ ID NO: 718772 - DNA, 493 bp, Homo sapiens
gacaaggtgcatttattcaaccagcaggtatttttggaccgtaaatgacattggcttctcctgaaagataataagaggatgtagaagagacgtcattgaggaaaacgaatatttcccagcttgtattaacatgtgaacacaaactttaagtcagaatttgccaggggaatgaataatttcatgcttgactaatatcacagtttgtcttcgatctgtttttatgctacactgcaatattatttctatatttaatctattaaagaccctttaagtgcatttatatttcttctaaattgatgatagtaagttaaggtaacaggattgtgtagaatgtttgtgtctttcgggtctgtattgttatgaaatgccaaattgtatcttaagcgcacaatctttgaatatgcataagctatatctgaagagtcttcatttctgaaacaagatggttcagctgaccagtttaataaaaggttttaattgtgaaaaaaaaaaa

SEQ ID NO: 718773 - DNA, 192 bp, Homo sapiens
tccaacatctcattaccccttccaacatctcatcgctcctttcaacatctcatggctccttccaacatctcatcgccccttccaacatctcatcccaggttcaagcagttctcccaccttggcctcgcaagtagctgggatgagatgttggaaggagccttccaacatctcatcgcgacctcagatcagacg

SEQ ID NO: 718774 - DNA, 231 bp, Homo sapiens
tagactgagataactagactactagtgttagaagttcgcaagaaatttatacaaaagcatgccacaactatagcagaagcaaaagtcacactactcttcaccgagtgtaggtttgactttaccataaagatctttagtgttttcagttcacaaatgtgattcaagcactgataagggcctgcaggatttaggctgataagggagaggggatccgtgcacgttaacgattac

SEQ ID NO: 718775 - DNA, 912 bp, Homo sapiens
gatcctcttccccaagcttcttgcctggtcggtgtccgctcatcgcccaaggtcccagtccgtagagccccaacgcctgccggctaccttctcccagtagccttagtgctttaggtaggaacgcgcatgctagagaaagaagagtgactgcccatctatgtgcagaagagtactcgcgggtccgatgttctcccttttcctctaatgtgatgcgcgtgatgacggaagaagtggtgtggccaaacactgcagggttcggcatggtctcctggccttcttgagctcagccatggggcaatgtgcccccagaggctaacagtagcaccattgctgcactgccagctgaacgtatcacatggcatcccgcggtgccccattcgaagggtccaggcttgcactcaccacgtgtcaagcgccacgtggtcataccgcgtgcacttccacggcaccactttcctggcgcacacgcaggcccctcgcccatggcagcttggcctagatgcacttccccctcaacgtccttcgactagtgccctccgcacacagactttgccccggcctcatctgcgtggcacgcaccaccagtcacaacctatgcagcgccccacttcttccacctcaacaccaagctgtaggccagtcccagtggtccgcttgtgaacactgctggacgtcgacaggggccatacaacaggcaggctactgctgccagggggctcgtgaactagtgcatgctaccacatggacacccgggcaactagccttggctgggcagccatggcacaagtgaagaagaaggcagtgggcaaaatgggtttatctcaaggcagcagccagagcccaggagcagaggacccagttgttaaaaggcgctgggagagatggcagcttacgcccgagagcgagctcgaa

SEQ ID NO: 718776 - DNA, 375 bp, Homo sapiens
agtcactgaggcatccttcccaggggctagtgctcaggcggcttccccagctcgtggaaaccgtttatatgttgttttctgtgtgcccgatggtgtttattacacctacttaaaagatatctccaatcctttactaatatatagtttaacgcattgttgttaacgccattgtaattgcttaacattttaagagaaaacatcaacacttataacaggagcatgaggcaggtatagatactaggcttctaaaacatgacagaagttgagatgaaacttcttcatggagcagaaaccgtatttaaaagttgcgagaaaggactacatgagccccgcatactacccagacaggcactgctgttagactttgtacgtgcc

SEQ ID NO: 718777 - DNA, 640 bp, Homo sapiens
tgggaccccaacggcaattgccttattttagtatatattcttactgatcgggatgcatgagctgagcataaaatttgcattgatattacccaccgatctatgcaagaaaaacagtaagaaaaatgtgtcaatgtcaccaccaagggtttgcaccctgatcaaaacgagtgtgaaaagaataataccacatgcacttatggactgtcttggaggccttctggggattattggtgagatatgtcttatcagctgcctctcttcagaaatgaactgtgatggtggacacagctatgtgaggaattacttacagaaaccaacctttgcattaagtgagctttatcctgctctgataaatctctgggaagcaggaaaagataaaagtacatcactgtttgtccaagcgactgatataggtttaccaacaaatatgtcctaaaaaccaccaaggaaacctactccaaaaatgaacaaaaaaaaaaaaaagcgaaagactgcagttgtgctaaaaacaaaacaaaacaaacaatcaaacaaaaaagtcaaaaaagattactttcgagagagaagtttaagctttaccaatgctgctcctgaccaatggaaatatgtacaacttcagcattttaaggaaactggcttc

SEQ ID NO: 718778 - DNA, 449 bp, Homo sapiens
ccccgccgtaccagttgcggccggctgcaacagagcctggactcgaacccagaatcctagtggcacagcaatgcaatgccttagaccactgcaccactcaggaggcctcaggcagatatatatatttttttcaaatcccttatctacattatttattgcctgccacacacttgtaattctgaaaagtgaaagcatgtctgtaagaagggatgccctggtagtagttgtaggtttttatacagtaaccaagaccaatctgtgagttcatttgaccattggaaaaagagctactgtgtaaatactgcaatgtgagttggattgaattcgtcttaatttctaaggtgatgatggcacttttcttcccaacacaataccgcaataaatgtgagtccacatttattttgcgtcccatgggggattcgaatttacaccgcaactggtacggcggg

SEQ ID NO: 718779 - DNA, 859 bp, Homo sapiens
  misc_feature (2)..(2): n is a, c, g, or t
  misc_feature (191)..(191): n is a, c, g, or t
  misc_feature (205)..(205): n is a, c, g, or t
  misc_feature (209)..(209): n is a, c, g, or t
  misc_feature (214)..(214): n is a, c, g, or t
  misc_feature (265)..(265): n is a, c, g, or t
  misc_feature (282)..(282): n is a, c, g, or t
  misc_feature (302)..(302): n is a, c, g, or t
  misc_feature (311)..(311): n is a, c, g, or t
  misc_feature (328)..(328): n is a, c, g, or t
  misc_feature (339)..(340): n is a, c, g, or t
  misc_feature (345)..(345): n is a, c, g, or t
  misc_feature (358)..(358): n is a, c, g, or t
  misc_feature (360)..(360): n is a, c, g, or t
  misc_feature (433)..(433): n is a, c, g, or t
  misc_feature (453)..(453): n is a, c, g, or t
  misc_feature (482)..(482): n is a, c, g, or t
  misc_feature (492)..(492): n is a, c, g, or t
  misc_feature (509)..(509): n is a, c, g, or t
  misc_feature (526)..(527): n is a, c, g, or t
  misc_feature (535)..(536): n is a, c, g, or t
  misc_feature (550)..(550): n is a, c, g, or t
  misc_feature (565)..(565): n is a, c, g, or t
  misc_feature (568)..(568): n is a, c, g, or t
  misc_feature (576)..(576): n is a, c, g, or t
  misc_feature (593)..(593): n is a, c, g, or t
  misc_feature (605)..(605): n is a, c, g, or t
  misc_feature (607)..(607): n is a, c, g, or t
  misc_feature (648)..(648): n is a, c, g, or t
  misc_feature (672)..(672): n is a, c, g, or t
  misc_feature (699)..(699): n is a, c, g, or t
  misc_feature (725)..(725): n is a, c, g, or t
  misc_feature (749)..(749): n is a, c, g, or t
  misc_feature (759)..(759): n is a, c, g, or t
  misc_feature (771)..(771): n is a, c, g, or t
  misc_feature (773)..(773): n is a, c, g, or t
  misc_feature (778)..(778): n is a, c, g, or t
  misc_feature (780)..(780): n is a, c, g, or t
  misc_feature (782)..(790): n is a, c, g, or t
  misc_feature (797)..(797): n is a, c, g, or t
  misc_feature (799)..(799): n is a, c, g, or t
  misc_feature (825)..(825): n is a, c, g, or t
tntgggcaggctggtgggattgttcagtctccttttgtagcctgtgcaaacctttaagaattccagcttgatgcaaatattttacgtgtctcacatgggcacaaggcgaattgtctctcatctctgcccagggattaaaatgacgagccccttcccttgaggtactttgctcaagtgtaagttcctttggntatgtgtcgtaagnggtngtttnttgttgtgattttaaataccttttatgtttcaggtacctacaaatctttanttcaccatatttatgtntgtgtaatgggagaagattntgcacgtgntcagtcctccatgttgntggaattgganntctgngcctttatctgtnantgtggtttgaaaggttttgtctgcccaatttcaggcaagagtgaggtgagcaggcgcttgtgagtggtctctntttttttttttttttgagangaagtcttgatcttgtgccccaggctggngtacaatggngtgatctcacctcactncaacttccacctccggnnttcaagtnnttttcctgcctcancctcctaagtagctnggnttacaggnggctgccaccacgcctngctaacttttgnanttttcagtagagatggggtttcatcatgttgtccaggctgntctcgaactcctgaattcaggtgntccacccgcttcggcctcccaaagtgntgggattacaggcatgaaccatagtncctggccttgtgggttttctcttncttctgaaancccactaaattntnttttngntnnnnnnnnnctgagtncnggagattcgggctggggaaaaaaaanaggggggaaatgggggggggggggaaattgggga

SEQ ID NO: 718780 - DNA, 970 bp, Homo sapiens
ggttgactattctctacaaaccacaaagacatgtgaacacgatacctattatgccggcgcatgagctggagtcctaggcacagctctaagcctccttattcgagccgagctgggccgagccaggcaatctctctaggtaacgaccgacatctacaaggtgatcgtcacagcccatgcattgtaataatcttcttcatagtaatacgcatcataatcggaggctttggcaactgactagttcccctaataatcggtgcccccgaatatggcagttgccccgcataaacaaacataagcttctgacctcttagctccctctctcctactcctgctcgcatctgctatagtggaggccggagcaggaacaggttgaacagtctaccctcccttagcagggaactactcccacaccgtggagcctccgtagagctaactcatcttctccttagagctagcaggtgtctcgctcgtatcttaggggccatcagtttcatcagaagcaattatcaatataaaacccctgggataacccaagtacaaacgcccctctgcgtctgatccgtcctaatcacagagtcctattctcctatctctcccagtcctagctggtggatcactatatactacagaccgaaactcaaaccaacttcttcgacccgcggaggaggagaacccattctataccaaacaacctaatctgatattgcggcacctgaaggtatatcttatctagcaggcgtcggaatactcccatatgtactactactcggaaaaaagaccagggtactaggatgggcgagcagaaacaagggtcacagggaacggtcagggacccaaatcacgaggaacacggaagcaagcggatcactcggacacacacgctcccccggcaacaacagcgaccagaaaacacagcgacagcgcacacacacacacaggggcgagaaaaacacacgcagagatgacacaa

SEQ ID NO: 718781 - DNA, 148 bp, Homo sapiens
ggttgctgtgtcataacttcaagatgcaggaggctcaggtgatctgttgtgaggagagcacctctaggcagacctgcaggggaataacatactgggccgttctgacgctgttggccagcagtatacacacggacatgtgatgaaattc

SEQ ID NO: 718782 - DNA, 762 bp, Homo sapiens
  misc_feature (548)..(548): n is a, c, g, or t
tggcccccccgaccttgcccccccttttttggggcccccacccctggggttctaaacaccccccccggggaatggaagggaagggggtgcccccccggggaaggagaaccctttggggggagaagagacggtgtggcgctggtgtgagaaaaagaagcataggcccccgcgggcccaggcgcttgtgggcccccgaaaactggtcttcttgtagacacttcgacagttagactctgggccataaaggcgctgtcgacaaatgtcctgtagacctggagaccacaccttcgggtgtgagaaatctgtgtgtctccccccacaaatgttttctgggggcgctccactctagggggcgcgcattgagaaagggcgcacgcgcgcctccgtctgtgtgccacatggggggggtttgtgcacacagagagagaggccgagagccgccactctctctctttctcttagagcgacaccgtctgtgtatcacatcgtctgtgacaaacacaccgccgctatattgtgttggggaggtctccctctaccgtgatttnggaaacccccccgcccgggcacaagcaggtgtgggggtctttccctctccaagaggagggctgttgtgtaaaagaagtgtgctttgcgccccgcgacaatataggggctatctactctcggcgacgggggggcgccccccgagatcaacgggcccccgccctcttcctctcgcgcgccacaacaccctcttgagaccccatcctggccaaatgg

SEQ ID NO: 718783 - DNA, 365 bp, Homo sapiens
ggaaaacctgggacagcatactattcattctctgctacaagttccaggaggagaccactccatgactctgcagcgcttgatcccttgcaagcaaaaaaagtcagaaaggtgcctcctggtttgccttcatctgaatttggggatggtgcatatacagaagaaggcaaaccaggaggcaccatccccaaattcagatgatttcaaccgtgaatctcctagttatccatctcctaagccaccaaccaggatgttcgctagcactttctttatgcaagatgggacccacaattcttctgacctttggagttcatcaaatgggatgagccagcctggttttggtggaattttggggacctccactttcc

SEQ ID NO: 718784 - DNA, 172 bp, Homo sapiens
  misc_feature (32)..(32): n is a, c, g, or t
gcgcagctcgcatcgagctcggtccaggggcngccttttgtttcgatcagaccctcggcactgctccttaccaccgggcaaattttatgcatcccatgaagcccagatacacaaaattccaccccatgatcaagacactccgggctccacctacagaactgggtgctaaacg

SEQ ID NO: 718785 - DNA, 435 bp, Homo sapiens
gatgctgctgaggtgactctaaggatctgtgtcatcccccttcgtcaggaggagtgtgtgcctgtctgaactctgtcagaagtggactgtactgggacgttatgcttgagaactacagtaacttgttgtctcactggatttggcgtcaggctattgaaataagagtttaccttaccgaaaaaaacattcctgaaataagggcttcccaaaggaattcagatagaagaagtaaattccttgtggcggaactggattattttcagtgtacgcttgaaagaacaaagggataccaagggaggtatggtcatcagattatcctcaattatggtcaaaaggaactggtaataaagaagggaccccttcttagaaaagattcagagacctcctaagggagaattccttttgattgaatgacttgtgggacggcctttccac

SEQ ID NO: 718786 - DNA, 233 bp, Homo sapiens
cccccccccccccccctggtgcttttttggggggggggccatttttttcctgggttccctttgcccccccccccccccctggtaaagtaagcctcccaccgttttgaccccccccggaggtcttcccccccccccccccgaatggaaaatgtggggccttttattttaaatgggggccccggggggtttttttaacccggggggattttttggggaaaaaaaatttcttttta

SEQ ID NO: 718787 - DNA, 413 bp, Homo sapiens
gtgggtgacttgggcagtacctaacatctctgggcctccctgtcttcttctggagagatataatagcttctacctagaggatccatatttcccgcccaaagtggacttgcaggtctcgcagtggattgtcggcgaacagcatgtgaggcctggtcaagcagcaacccgctccctcggcttggcccgcagcccacgttcaccactgagttgtagaggtgggcacgcccctaactgccctggaaggacttggagatgaggtcgtcgtggttggccaggtgagcgccgcagtgggcacagctataatctccgggggacaatccatcccaggtaaggcctgaaaacgtccttgtggatgatattaaacccggaataggctttgcccggggtaaccgaggctcgaaattccgaaatca

SEQ ID NO: 718788 - DNA, 118 bp, Homo sapiens
ttggtttagcttcctagcttagtctttgattgccaggtagagttgatagtacaaaaaaaaaaatattttggtatggtcttctataactagtatatcagtgaggaacatgaaagtgtca

SEQ ID NO: 718789 - DNA, 155 bp, Homo sapiens
tgaggaggatcttatacatcatcactacacagcttcctaagagtgatggcctagacctctcctacttgtgctgagctcagagcaattgagctctttgcaaatgcaagtcatatttgcacaaccaagaaagaatgttttgtggcaagactacagac

SEQ ID NO: 718790 - DNA, 273 bp, Homo sapiens
agacaggtggccagctcgtctttaacaattccattgtgccgggagcagtggtgtatgcctgtaatcccaaccgctcaggaggcagaggcaggatcgcttgagcctgggagttcaaatccagccggggcaatatagcgagaccttgtctcttgaaaaaacagaaaagagaattccagtgccttcttcgacctctttttttcccccttcagtgggtttttcccaagtgatttaaggatggaatcaaagctaagcagctcttggctggttccgctg

SEQ ID NO: 718791 - DNA, 449 bp, Homo sapiens
tctaagtgcacaaagaactgttcctcatagtataagcagatagtttgcatacgaaatataatcggccctgtcggcaatttcacagctatcttataaatcagcgttagggtaaccgccatatccatgagcagtaggttcgctgccactgccgattgaccaacgtatgatctagtatcatagttgccagagcgggctcaactgtacgtatctaacagtacaatgacatggcttcttagattgggcacacctgactgaagtaattccagataaatctgaaagcatatgccatagtcgtgtagcactaggtcttatgcgctcagtaatataagatcttcattctactacaggcatcaggtaaattgcgcctgaatacactttagacataattaggtacaatagtgtaaccgatttgtaaatagaggtatggtagcctctaagatagtaaaaat

SEQ ID NO: 718792 - DNA, 256 bp, Homo sapiens
  misc_feature (4)..(4): n is a, c, g, or t
gggnggggggaattttgggaaaaaaaaaaaaaattgttttttgggagggggggtggaggaaaaagttccaaaagcaacaatttcctttttgcaaccttgccaaaattttaaaagggggcccggttttttttaaaaaggaaaaaaaaaacccccagcccggttagccctttgccttttttaaagtttttaaaagggggggggtttttggggggtttccccaccttaaccaaaaaaaaaaaaaaaattttggtttgga

SEQ ID NO: 718793 - DNA, 209 bp, Homo sapiens
  misc_feature (142)..(142): n is a, c, g, or t
tagccggccaggatgccatctctctgctctttctgttttttcttgaggcaaacactgacagtctctctgagctcctgcatcctgcctcataaatggtaaataatgcacgtgaaagcactgcataaactttagatccccatantaagactagctcttattattattttccaagacactgcttccccaactctgtcactacagtttatatg

SEQ ID NO: 718794 - DNA, 621 bp, Homo sapiens
  misc_feature (507)..(507): n is a, c, g, or t
  misc_feature (552)..(552): n is a, c, g, or t
  misc_feature (570)..(570): n is a, c, g, or t
  misc_feature (582)..(582): n is a, c, g, or t
  misc_feature (621)..(621): n is a, c, g, or t
gtggcctctggtatacctgctggctggatgggcttggactgtggtactgagagcagcaagaaatatgccgaggctgtgggtcgagctaagcagattgtttggaatggtcctgttggggtatttgaatgggaagcctttgccaggggaaccaagtcactcatggatgaggtggtgaaagccacttctaggggttgcatcactatcataggtggtggagacactgccacttgctgtgccaaatggaacacagaggataaagtcagccatgtgagcactgggggcggtgcaagtctagagctcctggaaggtaaagtccttcctggggtggatgctctcagcaatgtttagtattttctttcctgcctttggttcctgtgctcctaagtcaacctagtgttttccacatctccatttggtgttaacgccagattcagctagtggctgagatgtggcaccaggaacccttaaacagttgcacagcatctcagctcgtctttactgcatcangatttgtctgtgttcttcaagatccatttaaatccctagtgactnaaccattgtgcattgtanaggcgctattanatctgcctgagaaaggaagtgactttaaagctgactctn

SEQ ID NO: 718795 - DNA, 1686 bp, Homo sapiens
  misc_feature (252)..(252): n is a, c, g, or t
gtgactcatgacatgcctccgccgggtgggctatgggcccatcgactacaatacggaacttgctgcgttgaggactgtcgggctacctagtggtgctggccatatgtgattggaacctctgtattctactgggtcactgtgaggcataaatgatattggaaccgtgtatgcgctagtgcggccgtacaatatcgatggattcgttcgaggctcgcatcagcgactgtttgccacttgttaccgatgggtcangacaccgaccggaggaccttgctgcatgcgttcgtgaagagaccgtgggtagtgagtgaagcgcccaagtccactccatgtagacggaatcgatgacactcggtacttgagtagatgcgtcgaggcggaagatcttgatgtttaccaaacgaaattgtcgcgcttaggggttgccccctcaccattagattcggggggcagacttgttagcgggagacatagcggtccaccccaacaaggatgggaagggtcgttcgttccaatgacccaaaggtgcaacgggagtcttacgatagttagggtaaccacggttaggggcccttgatgcccccttcgctggggttcacaccttgggaatttcgcacttggacacctccttttcacacgcaaagttgagaggaaacggagtaaaattaataggatcgcattacttgggtcaaagaataccctttgagcaataaagaacaaaaagacacaccattttacctacctaggagaagtatatggacatacagggaacagacctcccaagttttgggcaaggaagccgcattaaaacattttggtgaacaattacttggtagtagcccactatggaccatttggttcaattcagggggcgcagaaagagcaacgagaacagagttggttccaatttgggtgagcgcccaataggcagtgtttggagcccagaggcaagcacaggtatactttgaagacagcacggaacgctttaagcaaggagattagcgatcagcagaaaccaaaacgattgcgtttagttccccaccagtagcattgcacgcgcagttggacttcgaagcacattggtttgaacgaaagctggcaacagcacttggggatagcccccccaaggcgagtatcacatcagaaacagggtcacttcaacggtcaacgtcaatcacggagcgcgagcgggcatcgttcccctagagtgcacatagttaccagagaccgaagcatgagcacacgcgcgatagtctggtggagcaccaaccacatccaactagaccgtatacaatccttcaaggcagtcgagcggcagcggaagacagatgtgttgcgaattccacagccacttagttgtggcgacctattgccttgcacgaggtgcaccacattgagacgcatggcgcgaactttccgggcagccgttagcaaattcggtgtacgtcagtgtacatcacacacaaatacacagccttgcaacgtaggaataaggagaaccgcagtcggacatatttatccaacgtaggtatttgcgacagcagcccacattgcatagtcccactgaacagatataacagatagttattcacgcacgctggcttgtcgtcacaacaattccacccagcatataaagacgcggcaccacccttgtctatgcgtacactgagatcgcgcaatacccct

SEQ ID NO: 718796 - DNA, 1336 bp, Homo sapiens
ccagatccttcagcgtctgcatctcgtgcgtcgccccagcgtacctgtcgccctggctctcctgcctgctctccctggggtgttctggggcactctgcgtcccacatgtctgtgtccgtgcttcacgcttccccatgaccttgagtagctcgctactgtgcacatgtgttctcaggcaggcacttgtgacttgaccttccactgtgactttcgactcgagctgcggcctgactgcacgcacaactccttctggacatggcttattgaaacgcgctctcgcgccacaagactgcagcgcacgagcagtccgtgcactcctgctttgaccaattccctgcaagctacactgcttcaagcagcccagtgacaactcctcttgccaagccattctctaacgaacttcctgctctctcgcgcacgcggaattcgttccttgcgactcgaacccttgacacattcaccgaaccttcagcatgggacacacacttcccgacacacacacttcaactctggctgcgccctccttggaacttgcacaaacccattctttcgcgccctttcaactgcaactgcctataactgaccaccttgacacaccacttggcccctatgcaccagagcggaacgcccatggggcaatccactcgacttgcgaacaaccaccacgttaaccttggactctaatgcaaacgacctttcacctactggcccatctccaaaacgcggaacccaaccccgtttgcaccaccggcacacgaccccttggccgcgcaaaggccccccagcgttccaacagacctcccacaagtgctatctcaccttcgcaaacgcgtgaaactgccaacaaccttacattgcggtccctttcaaacacgcgccccccattgcggcgcacacgccaacatttgaaaaccacggactgggctgcctgggagctcgtggcgagcgaacccccaaacccgcgtttctagccaaagggggggccgacttacaccctcctttgtacaccccccaaacgcgaccctgtctggcacacgctgtgcaatactaagggaccgacccatggtggggctcttattccccccttctcccccgtttatctccaccgtcagtgccccccctcgacacccgcccacaggccaaccaggcaaagcccccccccccggtggagaccgcgtgggccccccactgggggcaccacacccctctccgggccacccttgcccacccgaccggccccccctctccacaaaaaccgcccataaccagccgcaccatcccccaccaccggcccgaacattggggcccctctccccagctggcggccccacctgtc

SEQ ID NO: 718797 - DNA, 957 bp, Homo sapiens
  misc_feature (441)..(442): n is a, c, g, or t
  misc_feature (476)..(476): n is a, c, g, or t
  misc_feature (480)..(480): n is a, c, g, or t
  misc_feature (485)..(485): n is a, c, g, or t
  misc_feature (488)..(488): n is a, c, g, or t
  misc_feature (491)..(491): n is a, c, g, or t
  misc_feature (506)..(506): n is a, c, g, or t
  misc_feature (510)..(510): n is a, c, g, or t
  misc_feature (515)..(515): n is a, c, g, or t
  misc_feature (518)..(519): n is a, c, g, or t
  misc_feature (543)..(543): n is a, c, g, or t
  misc_feature (572)..(572): n is a, c, g, or t
  misc_feature (640)..(640): n is a, c, g, or t
aagagttagatagtaatggtggtgaactttccaaaatcagacatgtcctttattgacactctcttaaattgtcactagaagaatggagcacaagagccaactagcgacagctatggacttattgtgcggttgtgatgcatagtggcattacaattagtagtgggcattacactgcttctgtggccagtcactgaccttaacagatttacgaactagataagaggaaatctgtggttgaccaagatgtgtgaaatagggtaagccagaagccattgagtgcggaggaagcaaggggtgtggttgagaattataatgatgacagaagtgtcgattagagttggtggaaatacacagccaagtaaagttttgaacaaaaaaaatgtagaagctatggacttcttggaggacaaaagagcaaagcagattatgagctatagaacnnaagcctctaatcctgataaggttgctagtacagngttngctgnaanaantagaaattctgagantagngatantanngggacccatgaatctgatagaaanaaggaatccagtgaccaaacaggcattantattagtggatttgagaacaaatttcatacgtagtgcaaagcttaaaggagtatgaggggaagtggtngctttttgatgattctgaagtcaaagttactgaagagaaggactttctgaattctctttccccttctacatctcctacttctactccttacttgctattttataagaaattatagagtgagtgtattttccttgtgtatatattaaacacacccatacaaacatggtaaagttgattacatcaaagaatctttagcttatctttgtgaagctactggatattattggtctctctaggtttttacataaatagtgaaatttgaattactgaaaacatgttaatttttagaatcattgttctcagtagagactagtgag

SEQ ID NO: 718798 - DNA, 623 bp, Homo sapiens
aatcgtttaattcataagtttgctgcaaagtatcgagttccctttgcattctacccatagatttacgtaacttatcgcccagagtcctaaccagcggttctacctcttcaatcaaatctaattttgatctttcaacatcatattcgggaactaaacggaaaacccttttggtttgcaacattgtcgatgcaaggttcgtgcttggctcatttgcacattttaaagactccacagaatccttcaatactgaaactgttccctccaacgcaaggacgctctgttccaaagcatctgtcatggttattttgcctatccttcaattcgtacacagatatatgcgtctgtgatctgtttattattcattttcattgttgctaactactacgccctgtgaaaacaaactttataatcgccaataataaatacataatgaaagtaaatcgcaatccggaccccacggatagtcaccagtctcaccaactggaaattagaaggaaggaagacaactgtaaattcttggcatggtagaactggaaaaaagaagacggccccctccgcaactgcaacattctccctatgttagggatcaatcaaattcgcagggacccccaaagacgccagaa

SEQ ID NO: 718799 - DNA, 150 bp, Homo sapiens
  misc_feature (26)..(26): n is a, c, g, or t
  misc_feature (117)..(117): n is a, c, g, or t
acagatagaatcgagctggtacccgntggtgtgtcatgcaggttgaagatattttttatgtttttcaacttactgtaaataaaaatatatcaatgcttagtgtcaagaaggaaacantgtataccagtggggggagggggggggggggtg

SEQ ID NO: 718800 - DNA, 206 bp, Homo sapiens
agtgttcttcatgaggaaaacccgatagtgttgtatgagtgcattcagatcatccttgacttctttatatctgagtctcccatcaaaggacgtgcacagcctttatgatcccaagtttttacgactgaaatcctagtgattataggtaggttttacaagtgagtgtttgactgacctgtcgcggcaccgccccggtgtggatttcc

SEQ ID NO: 718801 - DNA, 440 bp, Homo sapiens
  misc_feature (78)..(78): n is a, c, g, or t
gtcagaacacacacagcattgattgattaagttctctgccttgtatgagcgtggtttgtggcactccaaaacaattanagtagtaacatcaaggattacagatcaccataacagatacaatgacaatgaaaacgtttgaaatattgctagaattaccaaaatgtgctgttggaaaagaggcatggaaagacctgcagagttgccaaaaccttcagcctataataaacacaatgtctaaaaaacccaagtaagagaagcactgtaagctgaagtgtgcctctatctttgggcacatgtgtgagaaattcttagaagtaggaagtgttagatcaaagaatattgatgttttaaatctcagtccacaatcaaatatgtacgctctccaaagagaccacaccaattattcctccagcctgggccatagagcgagactctgtctc

SEQ ID NO: 718802 - DNA, 101 bp, Homo sapiens
  misc_feature (51)..(51): n is a, c, g, or t
gaggatccttaggtggtctggggtgagagaggagcactgtggagaggcagnatagtgtgggagggtctgggttcaggttttcatggcagcatttgcccttt

SEQ ID NO: 718803 - DNA, 180 bp, Homo sapiens
atcttcccaccataacctggatgctccttaagccatattatccaaatcctttctctttggtgcatcctctcctgcaagtctcgtcccatctttaagattaataactggaactggcctttctgtatcaggcattccttgcagttgagtataggctcagtgctggctttcatccctgtggca

SEQ ID NO: 718804 - DNA, 201 bp, Homo sapiens
  misc_feature (64)..(64): n is a, c, g, or t
gcatagttggtgttgacgaccgcagcgccaacttgagggtcttttagggatgctgctgtttgtnagccatcaactggggtgatcttcaaatgctttggatttgaaataatgtcctttggtgtggcttgagtcgtatctttgagcttgataagaccagcatcggccaacaaatggagaccacgggtttcgtttgttggatcg

SEQ ID NO: 718805 - DNA, 360 bp, Homo sapiens
tgagatggagtctcgctctgttgcccaggctggagtgcagtggtgcgatctcagctcactgcatcctctgcctcccgggttcaagcaattctctgcctcagcctcccaagtagttgggattacaggcacctgccaccatgcctggctaattttttgtatttttagtagagacaggggtttcactatgttggctaggctggtcttgaactcctgacctcgtgatccacccgccttggcctcccaaagtgctgggattacaggcatgagccaccgcacctgggccttccctgcttcctctctagaatccaattaggggatgtttgttaactaattcatattgattaaaacagttgaacaaac

SEQ ID NO: 718806 - DNA, 209 bp, Homo sapiens
cggtacctgttctccccgttggaatatcacgatccctgtttttttttttggtaatggtgtctcattggtgttccccagggcgggattgcagtgggcttaattcacagctctcattgcagcctttgacctccgtggcttcatggcaatctccccttttccttcagccttctccatgtacctgggagactacaatcgcgctgtgccaccac

SEQ ID NO: 718807 - DNA, 822 bp, Homo sapiens
attccttctatggctgcaagtatgcatcagtgcttcccacttacctgatttggtctgtcggttggtcccatatggaaaccctgcgtgtctgttggcataatagtttacaaatggtctgctgcagtcctatccaacatttattgaaccaaacaaaaataatttacttctgccctgaagtaatatagcagattgaagttgttcattctgctggctttgattctctccagtgtggcactcattctgtcagcctctttcatagtgtgcataatcgattcttatcattctaacatggtgactctctgcccttgggcccatttattatcgcacagatggggagaacctatctgctgtggatcctctgtggaccacagcgttcctgcgccctttctgccctcctgatccagtcccacttctgatagtactcagttactgtatccagccactggctatttatactcctcccttttgccttaagcactgtgtctgagccacacttgcttgtttctttttcttggactactttaaattttggactccttctgggtttgcgatgaccagggaatgtgcaaacgctgtccatgtacagacaaacacggtttcaagtgatgaggaggacaaaacacttgccttttcaaaactttttacccgattctcttacgattttcacagaactctgtgaatggtctgggtatcttaatcaaacagggaaggtaacgattggtctaccactttcctcatttggggtcctgaaaggggggaccccgttcttactagaaccacttctctttatgccacgtttaaatccccccctggaatttggca

SEQ ID NO: 718808 - DNA, 325 bp, Homo sapiens
gccagtcatctttgcctgttacgctcagcgcgctcacagagtgcaacttgcgggggtcatccaccaccaagaactttcgcacgcagggcctccatgacttcacgtgcccttgtgcgtacagcacatgcggtttcttgtacagcatccttgggcaggtaaaacgaagtgcggcgcctgacacttgtgccccgtcctgggccccgccgggcatcctgcaaggagggtggcttcttgctggagggcacagagacagggcgcaccagcttcagctgaaccttgatgaagcctgtgtaagaaccgtccttgttcaagctcatgaagagat

SEQ ID NO: 718809 - DNA, 623 bp, Homo sapiens
ggatcaggttggggggcagccccccagtccctttctgtccccgctcagttttccaaaagacactgacatgtaattcttctctatggtaagggttcccacttagtgtgcttccgatgaattaaattcctaagtcatttccgaaaaaacaaacaaaagacgcacaaacaaaaccaatcgtctgtgggcgcggcggcctgtggcacataaaatatgtttccccaaaacccccattgtggtgtgggcggcccgccgcccccgattactcgtccacttcgcctttgtgcccagtgacccttgtctaccgcacaagccgcgcagctcggtgtgaccacaaacatcaatcgagggtatggctacttctcccacaccagagcaaaaagaagaggccccacgcggcgctccgggagtacaccaacgacctcttgctactgtgtcatcatcagagacagaccgacctcgtatattcctacacagacatatctagccacttcatcatcctgcgacaagcctactcctcctacgtcccacgtctcggtgcaacatctccactcatcacgcggctggagtagcgcataatcctccccactcacgcctcgtccgctacccccagatacaacaattcc

SEQ ID NO: 718810 - DNA, 478 bp, Homo sapiens
aagaattcggcacgaggaaggaattgagaagatcccgttggtaccgcagtttccaaggatttgtctagtgcgttttttggatgtggaatgaacaagcgtccaatataggagacgggattcctcctgcccttaaaccctgttgcggggtcaaccgacgtgggtgggattttgctggcggcgaggggagaaggtgacatgtgtgaacccatgatcggaagtctggactgaattcttagatgcgaggtggaaaatgagcgtgggaggggaatcttgagggatgaagtatgaccttcccatctcataccaggcaggagggttatgatgaaggtatggttttgctggtatttcactgtggctaagggcagtcccacaggtacagtcaaagatagagtccttaagtcatgctgtacaatgcttcttgtagtccgctgttacctccttatatgaatatgatgtaaataattctcctcattcctta

SEQ ID NO: 718811 - DNA, 143 bp, Homo sapiens
aatcagctatacacccttactacacaatcaaagacgcactcggcttaagttctcttcctatctctcgcttaatgacattaaacactattactcaccgagacctcctagagcgacccagacgaattataccctagaccaacccc

SEQ ID NO: 718812 - DNA, 508 bp, Homo sapiens
  misc_feature (89)..(89): n is a, c, g, or t
tgtggggctgtgcactggcacgatcaaaatggtggccccttcccgatttgagcgcttggcccaggcaccccagctcctcaaaatttaanaggaggtgggcagcaagggttagttttccggcaggaacttcaaaaaccccttggccaagtaaactgtgggcaggcaagccctttggtcccctgttgggtacccaaacccccccccttgggttaggtcagggaggttgagggccccgaccaacccttgcaggggtccctgttagttagggccccccccccgtggggtttggcccgcttccttagaattttttcaaaagcccagctccctggggccctgttggcagctctagctttgccgtgggggaattgggcccagtccttgttttttttccccccctttcccccaagggtttaaagtcatgtgagcctcgggttatttccgggggggccccagggtagatccccgggggttttggggtcaaaataaaaagcccccgtggcccctggga

SEQ ID NO: 718813 - DNA, 870 bp, Homo sapiens
cgtgtggccgggtgcgtgctggtatagccgtgggagcgtgaggggtgtcctgttgggccgccgctcggtgttaggcgccgcctgtgcgggcggtgggggttggtcgggacggtgcctcctgttgggggcttctgtgttgttgcgcggcgtgtgtccttggggggccgaatgtgttgtcagttggcgcggtgtggggttgggccgatcggtttgctcctggtggcgcgatgtgggactggtggtggtggtgtgtgaggtgactcggggggtggagccgcgggtggtggtcggtcgtggggtgcattgggccaaggatgttggacgggggcgcgcgatggtgcagggaggtgcgtgttgtgaacccacgggggggggtagtgttctgactgggtgagccagttggtttctctgcaggatggtggttgtattgaaggcagcgtcgagtttgggggccaccacggtggagatacaccccgcggcgggttgtctcgctgagtgacggcgcgcgactggatgagtgtggtcggccgtgggaccgcagagatgcggcctggtggggtagagcgactaggaagtcccgcctcctggggggggggtccccactccaggctgcggcgggaatgagtttggaagaggccgggtgcctagaagggacgagcagtctgttgttgaagtggttgtaatgttgggacgggcaggcagattatattactggtttgctatgggaccactagcacttctcaaagattacctcttttttgcagtggcaatagccccctgtgggacctcccttacagtttttagtcgtgaaatatgtgacccccgagcttggagcaaaaccagttttttcatttagaccccaacattgac

SEQ ID NO: 718814 - DNA, 207 bp, Homo sapiens
aggtgaggcaggagaatacttgaatccgggaggcggaggttgcagtaagctgagatcatgccattacactccagtccggcaagaggagtgacactccatctcacaaaataacagaatcaagctttcattgccagcctgggcccaggacacagcggtgaatcattctggcttccagatctctgtgcaggggagcagcagggaaagaca

SEQ ID NO: 718815 - DNA, 1549 bp, Homo sapiens
  misc_feature (361)..(361): n is a, c, g, or t
  misc_feature (710)..(710): n is a, c, g, or t
tgcgtctgtttagtcactccctcttgtaggtacttgtgttgtgtcaccacctccgcgtctttcctctatctagtgttgttcctgtcagtcgacatttgttcctctttcttcgtcatcaacacaccacaccaacctgtggttgttgaagtcacacaagtccccccgctgtggccacaaacaggggtttatttctccactcttggggcccacacctcacgtttttggggttgattttctctgcttggcgtagatgggaagcctcttctcatcttggtgcccgcatcaccaccggtggtgccacacgtgcccgtcaatttttgatccgttgtggccctactcccctccaatggaatgatacatnccttttgtggttgtagtgttggctcccacccaccctttccccccgggggggtgataatacttctgttggtggtctcctctttggtaagtttgggtccaccacaccctgggggtgatcatctccttcttcccactgtagaaccatatgtcttagttgtgcccccctgtggcgccgttcttttatacgtctgggtccggcgtcgtttgccccaacaaaagcgcctttctttttgtgggggcaaccataaggtggtttctaattgccccccgttgggagctcgttgttgtcacccgtggggtataagacctcttccaaccttggcggcccattttggccccccttattcccncgggtgtgtgctccgccccccaacagatgtcgcgctacaaaacagaattgttgtctcacgattggtggtttgtggtaccaccacttggaaccactctcgccccgcgttttttttttagagatatatcaccctgtggtcctccctcaaaatttatttggtagtgtcaccacattctcatcaggatatagagtttgtgtttgtataacacacaggagcgctctctcggggaggggccccccacactaatctaatagagggcgaaaatctctctgtgggcgtttcacacaccctgtgagacccacccacagagtgggggtctctctctctctctgtgatactttttctactcacggccgatacacactccactctcctctctcacacacctcttttggacgacctctctgcggcgtctctgcgcacttttggcgccctctcacacctgagaccacactctttgtgtcacaagtgtgcactctgttctctcgcgtgattgagacacacccgagatttggcgtaacacagcacaacagggtgtggttggagcctccactggcgccacacactggcgcctcccacacaggaggtataagaaccccctcggagccacccacagccccaccgcacaagaggcacaccaagaggggaaagaagaagagagccctcacactgctggggaagtccctgccaccacactcacgtcccccacccaccacctgaattctcccctccctcaccacgttgccacatgtagagccccttgaaagaaggggaaggggcctaagggagagccgcaccttgtcatgtaccatccaattaagtaccctgtggtcaaccca

SEQ ID NO: 718816 - DNA, 844 bp, Homo sapiens
  misc_feature (5)..(5): n is a, c, g, or t
  misc_feature (68)..(68): n is a, c, g, or t
  misc_feature (90)..(90): n is a, c, g, or t
  misc_feature (104)..(104): n is a, c, g, or t
  misc_feature (115)..(115): n is a, c, g, or t
  misc_feature (118)..(118): n is a, c, g, or t
  misc_feature (128)..(128): n is a, c, g, or t
  misc_feature (130)..(130): n is a, c, g, or t
  misc_feature (145)..(145): n is a, c, g, or t
  misc_feature (158)..(158): n is a, c, g, or t
  misc_feature (167)..(167): n is a, c, g, or t
  misc_feature (182)..(182): n is a, c, g, or t
  misc_feature (237)..(237): n is a, c, g, or t
  misc_feature (250)..(250): n is a, c, g, or t
  misc_feature (253)..(253): n is a, c, g, or t
  misc_feature (260)..(261): n is a, c, g, or t
  misc_feature (266)..(266): n is a, c, g, or t
  misc_feature (299)..(299): n is a, c, g, or t
  misc_feature (305)..(305): n is a, c, g, or t
  misc_feature (310)..(310): n is a, c, g, or t
  misc_feature (338)..(338): n is a, c, g, or t
  misc_feature (341)..(341): n is a, c, g, or t
  misc_feature (420)..(420): n is a, c, g, or t
  misc_feature (451)..(452): n is a, c, g, or t
  misc_feature (528)..(528): n is a, c, g, or t
  misc_feature (532)..(532): n is a, c, g, or t
  misc_feature (560)..(560): n is a, c, g, or t
  misc_feature (578)..(578): n is a, c, g, or t
  misc_feature (611)..(611): n is a, c, g, or t
  misc_feature (628)..(628): n is a, c, g, or t
  misc_feature (646)..(647): n is a, c, g, or t
  misc_feature (672)..(672): n is a, c, g, or t
  misc_feature (693)..(693): n is a, c, g, or t
  misc_feature (724)..(724): n is a, c, g, or t
  misc_feature (772)..(772): n is a, c, g, or t
  misc_feature (838)..(838): n is a, c, g, or t
ttggnagggctattttctggatactgtaaaaaaaaaaaagaaagaacacacacacacacacacacacnctcatagcagagctgctctgcncggctctaaggccnctttggggganggncagtgccagnangcactgaccggtggnatgggtgggcccngcccctccncaggcagccagctcngccatggccctgtccaaggggtccacagaccagtaatcatcatcccagccaaggngccagccctcganggngggtggnncaganccttggttcaccacggtgatgggcgtccgccgntcccgnttggntgggtccgtctcgatgtacctgcttagnagnagtcaaggcttctgtcttttcttgcttcttgcagaatcctcttccaacccagacaaagacctggtcccaggtgtccagnagcatgaggtcatccgtggcgcaggtcttcnngcatgagctcaccaggaacctcttcgtgtcgagcgaaacgctccaatcttgttgggggcaggcaaagaggcgaggngggntggggcatccatcttcttgttccttcanccgtgggggatgtgcggnaggcagccttcccgcccagggcctcccagaagncatctggctcgctgccntctgccacctgcacaggnngggcccgcagcaccctgagcagctnctgggcccccgtcttctctgnctttctggctcctgtacccacccacaggtangcggctgagggggttttcagaacaaaggcatcgttggagttcagtgcnccagccttaggcaatacctcaacagcccgggtgggctccagcgctgttggcgcggacctggaagangcgggt

SEQ ID NO: 718817 - DNA, 1357 bp, Homo sapiens
gtcaggagagatagcggttacggtagagcggtgtttgtttgtgtgtcgctgatctgccgtgtgctgatggcggtgctggtggtggttggtctccgtagcgaggtcatggttcagtcggctcgttggcgccacccctccttttggtcgtctgcctagagggcacgtgcctcgcttcgcggcattatgtctggctgcaggtggtggtgttttctacccgattgtgtgtccttcgtctccgtcgttcctgttcggttgtttgtgcggttctcccacaggcttgtcgtcccccctgtagggtttgtttctcgtgagtcggggtgggctgatgtggggcgacaattgctctgcggtggggggttgtcgggggggcgcaggcgcatgttgctcgcgttctcctgttattttccgcggcggtgttttcctccccacactgtggttgtctgtgtgccgccgcccctgtttgggtcttctgtgggaggcgccgcctttttttacagacgggtgtccatcggatggtgtttggttctcggccaccacgggtgtgttggggttagacgagaggtgtgatgacctgagaggccacaggggggggcacagcatttcttctggcgatgttttcgtaagtctcgttggctcgtgtttttgtcttgctgttgttggaggccggacgcctgttgtcccccgcgtgtttgtattatttctctccccgaggggtgtgtgccgcatgcacctgcctgcccaacacttttttatgtgtgccccccccccccccctcggttctccgggtgtcgccacacccccgctggcgttggtttactggtggttcaccgagttctcggggacaccaccttgtgagaatcggttctgcccccctctgtgtggcacttttgcgcgcccctcccgctcctctgggggccccaaagcccacagatttttgtggttgccccgctgttttctctcttttgtttctcatccccctgcgcccccaagctttttttggtggggttaatatccccctgggcgcacttgttttttgtggagagtgtgtagaaattctccggaattttttcacaataaggtccgagagtgttcccagagagtcagccacccctctttataaggttgtatattaaacccttagagcgtgtggttatccacgcgcccccccagcgttaaagagaggcgtccccccagaaacccctgttccacgtgccccccgtgtttccccaccggttttaaaatgtatccaggggcccctctaaagaaacctttggttccccccacagagaaaatatattttcacacactcgcaaacaatcttaaatatatataataggagaaaaaaacaacttcccca

SEQ ID NO: 718818 - DNA, 920 bp, Homo sapiens
ggcctggagtccgacgtggaagttgctggctgactgggcttgcagaggaaaccgcctcggagctgcagccgaaggccaaggaatcactgaagatcggcgagggaggacagggggttcatcatgggtggctttttctcaagtatattttccagtctgtttggaactcgggaaatgagaatttctaatttcgggattcgatggagcaggaaaaaccacaattttgtacagatccacaagtgcgcgagaagttgttactactatacctaccatcggatctcatgtagagacggtgacgtacaaaaaccttaaattccaagtctgggattcaggaggacacgacaagtatcaggccatactggagatgtcactattcaaaacacagatgcacgtcatctatgtaggtagacagttgtgaccgagaccgaatcggcatttccacaatcagagtacactggccatgtctggcggaacgaagagctgacgaacagccatctagtggcgtctgccaacattacacaggacatggaaccggccctgacttcctcagcagatgggcacatccacttgggtcacctgcttgccggacccgacacagtgggcgcgatatccaacacgttcgcagaccaaagggaccgggacctgcatgaggccaatgggacatgggtagctgcacccatcaccacagcagacgcaactcagccaatgctcttccccgcacatgcagaccagtaccgtccccttggaaacgcacggacgaacaacacagtcgacgcctgacaggctaggcgccccaccggccacggaaacgaacgcggacgcccaacacgagcaacgggcccaccgcacgggggacaccacgccacaccgccgccaaacccaccaccacgccaccccgagagagcagacccgaaacgcaaagt

SEQ ID NO: 718819 - DNA, 1099 bp, Homo sapiens
  misc_feature (252)..(252): n is a, c, g, or t
  misc_feature (1061)..(1061): n is a, c, g, or t
agcgggaatttatcagatcgatgtaaatcagatctttgctacaagctacctatccaggcctattgtgttgaaatgtctcaaagtcagtgatctagaacgagatgaatcaagataaagatatgaaagtttaaggtgcaaagaaagagtaaaagaaatgaaccatcaactccgaatggaaggacatatgacgctcaagggatgatgagatactgtataggagggtggattaataaaggaaattgataaaagggnagaattaggaatattgagaatgaaggatacaaacaagaacaatcatgggacctaacttgatagtgaccgaaatatcttaaatataggacatagtaattgattggaacacatggatagtacggagatatcttaataaaacatatccaagacgaatgtttgacagaggtgcttaagatggcaagatgtgatccctagagggctttacattacaggaaaacaaatagagcagtttcaatgatggaagggcagtatgtcctcagataaatggaagtcgcctgcacgaatctggtagtaaaaccaattgagtttaggggaaacaaggtgggtaatgcatgtgataattacgccggcaaacaggggcacgattagcaacaataggtcacactgccgaaaaccaagattcattaaccattctatataagcgtaaatgcatgtagattctcgtgggaactgatctagaaggtgcggcgggtacgagacctaaacacagcactaatggaacggttgtctacatggatgaagatttaagttgcagggtaaagcttgatttgataagaccaagtgttggcttgcaagaaaagtgccttctttttggaaagaccacactcgtacacatgtgatttgtggagcctcattcgacttgctggaacagtgatagatttggattggcgattcttaagtggtaaacaaacaccttttctcggaaacggagttttaacggatttattggcgttcacaaagaattgcggtcacatgagatgcgccccacttcgtttggaagttgggcgtcattccacgcgtaactgggntaatttcgggtgaacttgagggaagatttcttcacggg

SEQ ID NO: 718820 - DNA, 283 bp, Homo sapiens
aagggagtgttatagggtgccagtatgtctgggagtcttcctgtggacaggagaaggcttgtaggggtggattcattttacaacaccttatatataacaagacccttcttctcagttctccagatggagacagaagcccgtgtgtgtgaccgaatgggttaaatcatgcttgttgaatgatgaaggaggagccgttgtgcctctaagtgtatcttcattcatcaagttaaattttggcctcaaaagactaatctctgacccagcaagcaacattctgcagggg

SEQ ID NO: 718821 - DNA, 216 bp, Homo sapiens
cgtcgacccgtgacagcacctgctacaccaggattggcaggttaacggttaacgactgcggactaacagcgactgaaaggctttgctggtggtttcattgtccgttttctttctcttctctctttctttctttctttctttctttctttctttctttctttccttctttccttctttctttctttctttctttcttccttctttttttgtcgacgc

SEQ ID NO: 718822 - DNA, 843 bp, Homo sapiens
gtgctcgcttcggcagcacatatactaaaattggaacgaatacacgagacagattagcatggccccttagaaagatagaacaaaattgataaaacaaaaaagcctttttctggcacggctgtgtgccccttctgaagaaatccttttaagacaatcaatgttcgtttcgggtcaccgcgtggggccactagccaggtgcaaaggggacatttgcggttcataagtgtgacttcgccaataagagaagaaacctccgggctccatgtgcacctacggggtcccttgtgggcaatttctctctcccacccagaatctagacaaagagaccgcccccgtggggtgaccgaaccccagagagccgttttctgtgtgaacacaagaggtctcgcgcaaagatgtgcggagtctcctgtgaagagcctcaattatcacatggggagacctcattattccacacagggaaagtctccccaagggggggagcaagcttactccagaatatatttgtccaaatatgttataagccccccccgcggcacccgtgggtggagatacagcccaccaacacagcatagtcggaaaaactacaccagagcaagcagccgcacccacgatacaaagaaaaaacaaaaacgacacaaaatatgaatagaataatctcatacaatcgaacgggtgacatgcaaaatgcaacacgacgaatgacacacaataacatgacgcaagaaagaaacgtgtgagatcaatacaatcaactggacagatcagagactaacccacacaaaaataagtaaagaaacacatagactgaacagacgcccgcacgacaaaccagatcgtagc

SEQ ID NO: 718823 - DNA, 111 bp, Homo sapiens
ggtctttgttctgttttggggggggtagtttttaatcagtaaacccagcaaatatcatgattttttcctggttagaaaaataaataaagggtatttttttatttccctcca

SEQ ID NO: 718824 - DNA, 109 bp, Homo sapiens
cgcgcttacgactagccgacagctcctgagcagtatgcaccgcaccaagactgcgcctgttgagagcatcccactccctttcccctcttccctgtcgggctagtcgggg

SEQ ID NO: 718825 - DNA, 328 bp, Homo sapiens
tgtttctcctgtgtgtcatcactcttctgatatactgtcacatccctgatagattttattacatgtcttaatcatagcatcttaataactgatcttatgtatttaaatctagacgcttctttgaagactactttgataatgaaacgtttcatgtatatggacttttttgcgttaattatcaacatgatcaatattctccaaataacttctgtaatgaaagacattttggtgagagtgaatgtaaacctataactctaacattgacgatcctcctgcagctgtgataggattatggcttaaatattttgaatttctgtttaaaaatcaa

SEQ ID NO: 718826 - DNA, 256 bp, Homo sapiens
  misc_feature (129)..(129): n is a, c, g, or t
  misc_feature (185)..(185): n is a, c, g, or t
tcagcacgtttcccagcattagccttacaatgacaaaggcaaatgcagaagtgtgcgaacttccaggacaggtccggagatggctgttccagagaagagctagggtggatggcaggaagcggcactggngatggaacctccagtccatatgtggcacctcttttacatcttcatcgtaagccctnccaggagtttgaaatgcaaaagttttagaaatataaaccaggttttacttagtaatattcattaatgacct

SEQ ID NO: 718827 - DNA, 222 bp, Homo sapiens
cttcatggacttatagtgatctaccgtctcatcctcctgagtaggtgtgactagcgtcatacactcgcaggcctagttagttatgtatatctcctagcggagatggctgttactctctgtcgtccgggctggtcttgaactctgggggtcatgcaatctgccagcatgggcctcccagaaagttaggatggcaactcgaaagccccaagcgggggatcctct

SEQ ID NO: 718828 - DNA, 337 bp, Homo sapiens
ggaatctacaattggctctatcatgaagggtgaggacgataaatagctgatggacgcctcgagcaaggagatataatagaaacgaggtaaacaaagatcaactattgagaacattagtaatgacaactacagtccggagtactgcagagagacttgagcacaagaccggggaccatcaccctagactgtagccacagtgctgggacccaagtcccacgtggttgcttcacatttgcccaggcagcgagcccatccggccccttgaccctgcgggctgagtctcccacactgcagccataagtcttggcttccatgcatgtcaggcagcaagcccatt

SEQ ID NO: 718829 - DNA, 1158 bp, Homo sapiens
  misc_feature (168)..(168): n is a, c, g, or t
  misc_feature (237)..(237): n is a, c, g, or t
  misc_feature (574)..(574): n is a, c, g, or t
  misc_feature (673)..(673): n is a, c, g, or t
  misc_feature (780)..(780): n is a, c, g, or t
  misc_feature (807)..(807): n is a, c, g, or t
  misc_feature (839)..(839): n is a, c, g, or t
  misc_feature (995)..(995): n is a, c, g, or t
  misc_feature (1002)..(1002): n is a, c, g, or t
  misc_feature (1028)..(1028): n is a, c, g, or t
  misc_feature (1109)..(1109): n is a, c, g, or t
ggcaagccgcgccatctgtgcggaggccactcctggttatttccgtcccatctaaggcccgcgaaccctcagcggtgcgtgtgtacgagagtgagggagtcgaaaggccggcgaaaccgagagagtcaggggcgccaacgcaatcttgaggatatttgaagacgaaanactccatggtcagcagcggtatacactccgaacctctaccttcatttctatactgtaagctgtgacctntacgggctgagatgtttcgcacaactataaccaatcaatcaaatgataattcagcaagtgcacgaagacgaccgcagaacaacacaatatacattatatactagctaactcacgtcaaagtagctcatcaggtctcacccgccccatccctccctcggcccgctccgcgccccccgccgtccacacgctcgcgagtagcgcatcccccctaaattgtctcatcctttccgctggatccgcatagaagattactttttagtattttatttataattatttcttgcagtattgtcacatgttgggtttactcctctatctctctcctgtctgtactatnttgtgctggtaatacttgcattctgactacttatccaacagagacacagcattctgtgcgaaccctccgtctctcgcatcattcgcaccatcgttcgcncgccaccctccacactacgacccgctcatacagactcatgtttccaacaccttgtccgtgtactgctcacgactacgtactgactcgcacgatctgtctcttctccngtctctctctcatgactcatcgcactntcactctatgttacacctatctgatatctacntacgcgagcgttagtccatcatgctcgcgctagtaataccgcggtaacattattgttgtagatccactagtatttatctctattcatcaattggtctgtctgtcacatcggcgcacgtagtcctctttagcgacatcgcgttcatgagtacgtgtngtttgtntatagtcaacgctatagttcctgttnttcgtcacagatatgtgtaccgtcctcgatcgacgcgatgctcacgtgtctgcggtcgttcagagacacttatatctatcntatcctatgtattcttctctcgcttcgttactgttcgtatgttatatat

SEQ ID NO: 718830 - DNA, 222 bp, Homo sapiens
gctgctattacaggcatgagccatcatgcccggcgagcggggatattgtctgtacagattcctagcactgtcgaaaacctatagctgcattggatcaagagtgtgcagatgttactgcagtccttgccgagtcatgtctcgaaacccatcgtgcctggggagtggcagtccttccaggccaggctgtccaggaatgccctgcacctcaggctctggccacaa

SEQ ID NO: 718831 - DNA, 505 bp, Homo sapiens
atggagcctgtccagtttgaagatggacagaagatcgtggtgcaaggagagccgggggatgagttcttcatcattttagagggcacagctgctgtgctgcagcgtcggtcagaaaacgaagaatttgttgaagtgggacgactggggccttctgattattttggtgaaattgccctgctgatgaatcgtcctcgggctgccactgtggttgcccggggccctttgaagtgcgttaagttggaccggcctcggtttgaacgcgtccttggcccgtgctcagacatcctcaagcggaacatccagcagtacaacagcttcgtgtccctgtccgtctgacccgcgcctcctgtgcctcctccccagtccatgcttcactcacgcagactgctttctctccctagccgcagcgcccagtggccactgcttcacagcttcttgtctctttatactaaaagttgctttattgcaccatttttcattgggagcgttattaaatgctcattca

SEQ ID NO: 718832 - DNA, 203 bp, Homo sapiens
tcgtcgagtaaaacagaatggtccttctgatctaacacaatgataatatcgcctggctccagtcctgggcctctgctcttatggagacaggtttcaccgtgttggctgggctggtctccagctcctgaccgcgagtgatctgccagcctcagcctcccgaggtgccgggattgcagacggagtctcgctcactcagtgctcaa

SEQ ID NO: 718833 - DNA, 907 bp, Homo sapiens
  misc_feature (172)..(172): n is a, c, g, or t
ggcgcagtgtggggacggtctgggtgtcggaaagcaagcctacgtggctcactattacgtataatcctttgctttgcaatgatgcctgaggaagtgcaccagtggagaggaggaggttggcagactatgtatgccgtattcaggcagaaagttgcccaaggtcattgctgcnctcactcagtcgacataccgtgtcgtatgtccaagccaaagagagaattgtaccatgtcgtggaggttgactcgtcataactgctgtcgtgaatggcctgcgacagaagatttcgctatgagagcctgacagacccattcgacacgttgagacagtggtgaaatgacgctgaaaattgacatcatcgcaccaaggcctcaggaacgtaccctgacttcggtagacagcaggcattggcatgagcaaaggctgatctcataagtaatttgggaaccgattgccaagtcgtggtactcaaagcattgcatggaggctcttcaggctaggtgcagacatctccagtgattgggcagtgtggtgtcggcttttattctggctactgtggtggcagagacacagtgggcgtgatcacaaagagacaacgagtgactgaacagtatgcttgaggagtcttctgcgtggagggtcccttcagctgtgcgtgctgaccatggtgagcccatggacagagggtacgcaaagagatacctccagtcttaagagaaagatcgagacagagtacctaagaagagcaggcgggtcgcccagaccgtcagtgcaacgaacagcataccgcaagtgcctcaggctaacccgcatacaccctgtacctgggacgaagggccacccaaacaacggagaatacgagacgatgagggcacgcggagacagaacagcacaggaacacacagggaa

SEQ ID NO: 718834 - DNA, 447 bp, Homo sapiens
  misc_feature (72)..(72): n is a, c, g, or t
acgagatattcaatagctatccttaaatttaatctatttgttccaaaagaaatctaggtgctagcctgctanatgtagcccagtattttaaaaatcagcttccagcccatatggtggttcatgcttgtaataccagcagttgaagaggctgaaatgagaggattccttgagcccaggagttcaaaagcaacctgggcaacataacaagacccagtctctatcaaaagttaaaaaaaaaaaagtgggcatggtgatgtgcacctgttgtcctagctatttgggaggccaaggtggaaggattgcttgagcttggtaggctgaggctgcagtgagcatcgattgcaccactgcattctagcctggacaacaaagcaagaccttatctcataaatatattataataaaattagaaaaaaataaaaaaaatggtctcggagcccttaacgt

SEQ ID NO: 718835 - DNA, 376 bp, Homo sapiens
ctttttattagctcttagtaagattacacatgcaagcatccccgttccagtgggttccccctttaaatccccccgatcaaaagggacaagcatcaagcacgcagcaatgcagctcaaaacgtttagcctagccccccccccccgggaaacagcagtgattaccctttagcaataaacgaaagtttaattaagctatactacccccagggttggtcaatttggggccagcccccggggtcacccgattaacccaagtcaatagaagccggggtaaagagtgttttagttccccccctccccaataaagttaaaactcccctgagttgtaaaaaactccagttgacccaaaatagactacgaaagtggctttaacata

SEQ ID NO: 718836 - DNA, 263 bp, Homo sapiens
accccccttttttttttaaaaaaaaaaatttttggcggggggttttttttaattaaaaaaaaaccccccccccccccctttaagggggggtttttgggggttattttttaaaacccttttccccccccaaaagaagtttttttttgggtttttttttttttgcccccccggggggggggggggggggggggggccaaaaccttaaaccttttttttttttggccccccccagtttttttttttaaaaaccaaatttcccccca

SEQ ID NO: 718837 - DNA, 135 bp, Homo sapiens
ctcatttacagctgacactgaccagaactgtaacttgtgctcagcataggcatacaggaacttcacaaagtatctggcccaggtctgggggcagacgtctccgggctgttccttgagtgaccccttcccttcacc

SEQ ID NO: 718838 - DNA, 314 bp, Homo sapiens
  misc_feature (38)..(38): n is a, c, g, or t
  misc_feature (81)..(81): n is a, c, g, or t
  misc_feature (83)..(83): n is a, c, g, or t
  misc_feature (107)..(107): n is a, c, g, or t
  misc_feature (127)..(127): n is a, c, g, or t
  misc_feature (135)..(136): n is a, c, g, or t
  misc_feature (167)..(167): n is a, c, g, or t
cccatgtagctgatttgggctcctaagctcacggggangtggacatcgtttctattagctgcgtcctgccccctcaacaancngatggctccttgcgggcaggcccncaagggcgcgtcatgggccnccacacanncctggaacacacaagtgccccacacctgganacagcctggaggagcttgtgaggcatgagggcgcgggagccacactctcaggtgcctgttttccacatgtccccatgcagcccgggcttccaaccacatcttaaaaaataaaaagacgaggaggagaagaaactttggtcctaaaaa

SEQ ID NO: 718839 - DNA, 307 bp, Homo sapiens
ccttcctggtatctttatctttcatgatggtacctttacaactttgccatacttggaaaatatccggtacaagtcattgtttgtcacgggaaaaaggcaagatggatacatacactgtggtctataaatgagagccaatccaccactcatttcttcaagtgggatgggcctgggagaccagaagagtgcgagccctcgggtcagatggggctcaaacccgactcttcgtagccgctcgcaggggcctaggggatcacgagtcctgagaggggtcaggcgcggaagagcagattgaagaggtcagcgt

SEQ ID NO: 718840 - DNA, 451 bp, Homo sapiens
gacagctgttactgaaagatcctgaggtctcccaaacggatctgactggttgaagccacgacttctgctaacatctgcctatgtacggaagaccgtattatgttgactatcgatttgcataagacttgactattattgccctcattgtgcagctctcgccggatctgtactgaaaccctccggttagactcagtgcggtgacatgttgtgatgttagactgagggccaagctcctggtactgagctcgctgaagtgcataaagactgcatcgagttaatgtattggcttgatgacatccaacattgatcgaccgcctatttggtgccaccgggtatctccgaagcatgttgactttgagagctaacgactcccaggaagacccactcacacgaagtatccatggtctctagaatttatactttctggaatactgtcatagtcttacagcgg

SEQ ID NO: 718841 - DNA, 331 bp, Homo sapiens
cgtgaatttaaaatttgctgtgatgtttcgggcatgtcattgtcattgattacatcttatcatgtgagactgggtctgagagcagacaactggtctgaccaaaatttattaggcaggaatttcctcgttcctaataagcctgggagcactctgggaaactggggcttatttcattcccacagctgcgaccatcaaatacagctgccctgaagcagtcctttcagaggcctaccctcatggatgcattctctttctcatggatgttccttgctgataaaaataattcagtgatgtttctcccatttgcttttgacagaagagaaatttggct

SEQ ID NO: 718842 - DNA, 439 bp, Homo sapiens
tggtaagcatatggaaaagagaaactctgtgtttgtatttgttcactccaggtgatacttaagcattaaaatgaagtaaacttgtatttgcaggtaaacactaatgcttgtgatataacctaaatatatattctcagtagggatccaccttcatagttttctactaagagacagttatgtcaccatttcctgaaggcttaaacagtcatctgactgaacttatctgagttgtgttctattattagttcatgtgttcccagatagtaaattcttactgtaaaacattatttcattggtgagtacacattaatttaactccatcaagatcaaacaatctgattgtcattgggctatttttttttttaatttaagttatagggtacatatgtaactaacctgcacaatgtacacatgtaccctaaaacttaaagtataataa

SEQ ID NO: 718843 - DNA, 129 bp, Homo sapiens
ctaattggttcttcgatgacgtgggttaaggatccggcgttgctgtgagctgtggtgtaggactcagatgcggcttggatcccatgttgctgtggctctggcataggccgtcatcgaagaaccaattag

SEQ ID NO: 718844 - DNA, 1484 bp, Homo sapiens
tggactggtcctaaatggttaattaacgtcatgacttttacaaacttatactttattttcagcggtaacgggggacctggagagttatgtgcgcctttcttccaagcgtgcccggcgagagccaccaaataggtggtgggtggaacttgggtggcccttttccaaggccagggactttttcggccgtgcaaagtgttcagcccacgcattctcccgtggtgctgtggtggagcgtggttggggtgatctccacgtgggtgtgttcaggatttctcttcgtgataatagcctttagtggacatgtggactcacagtgacggattaacctctcaaaaaatttgggtatgtggtggacactctctcacacaaccccgagtttagagacatattcgaggacactctcttagagagagcccccaaagagtgtgggcgttcccaaacttcgcgctccttctgtgcaaacggacatgtgaggggcttccgagagccaaaacttttaggcgtgggtttaacacacccaggaactgggaccagagggctttagcgcgggataccgttttgcgcaccccccttatagagaaaacgtgggggagcgtgtattctccggggccaccacaacggggtgtagaaaccaccagaaactcccttaactatttattaagcgaggtaaacccttttgggcgtctggcgcctttggttaccgcccccaagctcggagccagccgcctttcaactcagaggccagggtgcgtggggagccagagagaaacgcccccctttagtttggacagacacgcaagaagactgcttgggaggagaacttttggccacaccatatgtcggatgcaccctttccaagagaagaaaacacgcccgcattgactactcaacaacatggggatttctttattctaccaaaattagcctcccggtgggaagtgctaccaaggataatttagcaccaccaattcctggtgggctataacccctagtatattagcacaggctctgtgaacccagaacagtacgtcacctttctcaaaattttaaactctctctagggggcccagtgatacatccgaggacggtggtacactccgcgagtacatagggtgtccccggtcatggccacccatattgacggggaaaacaggggccactgctcccttttcgcgcaaaaagaagattatgtggccaggagagagattacgcacgccagcacaattcacaaaacgggccgtggtgcccacactaggacgggaaaacgacgctgtatgagagacgacagacgaccacacaaaaaaatatcggcgacacactgaacaagagcacctagagaccacattgcaaccaccgatagcgaagcgagagccataccgagagacgacacagaggacattcagtcaccaaagcacattcccgacaaaaaacaaacgtacgcggcaacacccacgtaatgttaccacgtcgggacagcatagcag

SEQ ID NO: 718845 - DNA, 292 bp, Homo sapiens
  misc_feature (57)..(57): n is a, c, g, or t
  misc_feature (172)..(172): n is a, c, g, or t
  misc_feature (254)..(254): n is a, c, g, or t
ccgaagagcgaggagtgctgatgtacaagggcaggagaagatggatgtcacagctcnagaagcgagaacaaatttgcccttctatctttttgttctattcaggtcctcaatgaattggatgatgtccatgcacattagggagggctgcctcttcattactcggtctaccaantcaaatgctaatctcttccggaaacatccccacagacacacccagaaataatgttttcccatctatctcagtaccccatganccagtcaagtgaacatataaaattggctgtcacatctc

SEQ ID NO: 718846 - DNA, 413 bp, Homo sapiens
ctcaacgctttatacttcaggaaattgttgacgatctcttcatccaattatattctacagtacgtgaggcggtatctgaatattattcattgaaaatgtatgcagttcactgtccctcttgactagaaggtgagctcatggatggcaggtactacatttgtgacatgtgctcttgggagcccagaaggcagaatagggattcacaaggaataggtgccagtcaatacatttccaatgacggacctcggagtccagcaaactgctacatctgaggcatgtttgtggcacagatagtgtttgggtactgggagtcgccaggcttatgttccaggctccatgaagcagtcgattcatttggagatcctgtcagattctggctacgaccaggagatccgtgagcaaatccctggaag

SEQ ID NO: 718847 - DNA, 526 bp, Homo sapiens
atgtgacaacggtctgcgatccctcacgagtacgaccttcaatgttggatgaaaccttttattggcacaggcattccttgttcacttgacgaggtgaagctgtaattgttcaaaacacgagtaaaagctggtttctcctcagactattttccttggtggtagtagcgctcagtgggtcagaaacaactcctgaccacttggtttccttttgagccgcgtcattaggcaggccatctgtcaaacactagcacaggtctcccgctgtaccggtggctcacccaaatgataagcagagtgcacgaaaaaaataaaacttctattaaagcaatcatgctgagcacaagctcagcgaggttgtgacattgcgcaactcgatagcatgcagggcgccttgggggactggcgttctccaaagggcatcccaacaccatctctcctctgatttcagtgacaaatgtggcacgctacttgcttggaggtactgggggcactgatgcgggcccttcatcctgtatagaaactccgc

SEQ ID NO: 718848 - DNA, 306 bp, Homo sapiens
agcaggcccgcaaggccgaaagaggtgcaggcctgggcgcagcaaaggagcgggaagtgctgcagctgcaggaagaggtgaaaaacttcatcacccgagagaacctggaggcacgggtggaagcagcattggactccggaagactacaactggccatcaccagagaggggctggtggtcaggccacaacgcagggactcctagggcccagtaaggacagtgccgccagacccatgtatgtatcatgcgagattgccctacctggataagcagtgtttgctatagagttcaccttatcagccagctc

SEQ ID NO: 718849 - DNA, 326 bp, Homo sapiens
aaaacccctcccccccggtttttcccggggggaatttttccaaccgggttcctttttttaaaaaaccccccaaaaatccaagaagggcccggggttttgtaaaccgggcccccaaaggttttttgggaaaaaggttccaaaaaataataaaaccctgggggggagggggggggtttttttttccccccagggtaggcccccggcttttaaaaaaccctgggttgggggatttgccggtcttttccgggggaaaaatttttaccgggatttggctaccttgaaagggtgccaaaaagggggttccgccccccccggttttggtttta

SEQ ID NO: 718850 - DNA, 761 bp, Homo sapiens
  misc_feature (724)..(724): n is a, c, g, or t
  misc_feature (731)..(731): n is a, c, g, or t
  misc_feature (736)..(736): n is a, c, g, or t
  misc_feature (747)..(747): n is a, c, g, or t
tctgaggaagacaaaaaaacaccgaccagcatcgagaactggttccgctgcatggacctgaacggggacggcgccctgtccatgttcgagctcgagaacttctacgaggagcagtgccgaaggctggacagaatggccatcgaggccctgccattccagaactgcctctgccagatgctggacctggtcaagccgagaactgaagggaagatcacgctgcaggacatgaagcgctgcaagctggccaacgtcttcttcgacaccttcttcaacatcgagaagtacatagacaacgagaagaaagagcagatctccctgatcagggacggtgacagcggcggccccgagctctcggactgggagaagtacgcggccgaggagtacgacatcctggtggccgaggagaccgcgggagagccctgggaggacgggttcgaggccgagctcagccctgtggagcagaagctgagtgcgctgcgctccccgctggcccagaggcccttcttcgaggcgccctcaccgctgggcgccgtggacctgtacgagtacgcatgcggggacgaggacctggagccgctgtgacgccgcccgcgagaacgccgccgcggggccgctccccacgtgccaccaccgggccaccgcggctcgtgtaaaaactgttgtggaaaatgagtgcgtttgtacggaatgataaacttttatttaattcacagaagcctttttnatttgcngcttntgggtttcgtnggcttgaacttgcc

SEQ ID NO: 718851 - DNA, 879 bp, Homo sapiens
  misc_feature (518)..(519): n is a, c, g, or t
  misc_feature (842)..(842): n is a, c, g, or t
  misc_feature (849)..(849): n is a, c, g, or t
  misc_feature (854)..(854): n is a, c, g, or t
  misc_feature (865)..(865): n is a, c, g, or t
gtcccacaggatctctgagagtctgtgtggtccgtggccgcgctgggttccccggagcagcgccgacgtcactgccgagaccttaagggaaggcgcgcgtccagtcctcgcactgctgcgtgttctggtcagaacggaagtggtagcctccactgggagcttctgtgctttgggagaatgtgtctaaactgtggtcctgttcgttctccagtcctgtgtggacaccacgaccagttgtaaacacaggtcccgtgcagctcgctttggggaagaggcgcgcccgcccaggtcctctgtgtgtagctcacgcccggggctccgtcccgtcctgggtgggttttcacctgcaccggggcccctcccccgggagcattcgtggagccggcgtcctcagccaggagcgcgttgctggctcagcggctggagctcaaggtcggctcaggggactgtctcgtgctggaggttggcggccgagcagcctgtgtttcccggaaaacggccaggcctgtccgcgctgnnggccacgtcttcgccatcccctcgttgcaggttcgaggccgagctcagccctgtggagcagaagctgagtgcgctgcgctccccgctggcccagaggcccttcttcgaggcgccctcaccgctgggcgccgtggacctgtacgagtacgcatgcggggacgaggacctggagccgctgtgacgccgcccgcgagaacgccgccgcggggccgctccccacgtgccaccaccgggccaccgcggctcgtgtaaaaactgttgtggaaaatgagtgcgtttgtacggaatgataaacttttatttaattcacagaagcctttttnatttgcngcttntgggtttcgtnggcttgaacttgcc

SEQ ID NO: 718852 - DNA, 359 bp, Homo sapiens
agacagagaggagacagctacatgccacgaacatgcccacagactgccctggcatctcctgctcacactgaccaagaatgccgcgtgcaaggcatactgaggtgaaaggacaattgaatgacaggtgggcaaagggagaacttccccttctaggtgcgaggaaagtcacaaatttaaaaatgttgcttccagcccagatcctaaatgctagttctcagcagctgcgtggcttaccgttcgccatttccaccaccgacagctgccagcaccgctacagatcacagagatgtgaacagacaatggaaagcactcttagccttgcagtggtctacattttttaggaaccaagttatgttata

SEQ ID NO: 718853 - DNA, 336 bp, Homo sapiens
  misc_feature (43)..(44): n is a, c, g, or t
  misc_feature (70)..(70): n is a, c, g, or t
  misc_feature (72)..(73): n is a, c, g, or t
  misc_feature (100)..(100): n is a, c, g, or t
  misc_feature (128)..(128): n is a, c, g, or t
  misc_feature (131)..(131): n is a, c, g, or t
  misc_feature (190)..(191): n is a, c, g, or t
  misc_feature (219)..(219): n is a, c, g, or t
  misc_feature (239)..(239): n is a, c, g, or t
  misc_feature (243)..(243): n is a, c, g, or t
  misc_feature (333)..(333): n is a, c, g, or t
ggcggacggggactggcaggatttctatgagttccaagagccnncccggagcctcctggaccaggaaaantnnaacggaaaccccgagcctggggcggangcgggggccggggcgggtgggggcgccnacngtttcccggccctggcctgcagcttggaggagaagctgagcctgttcttccgcccctcnnatccgggcgccgagcccccgaggacggncgtgcggcccatcacggagngcanctcctgcagggggacgaaatttggaatgccctgacaaataattattttaattttattcctttatactttaattcaactcaaactattacnttt

SEQ ID NO: 718854 - DNA, 304 bp, Homo sapiens
atgttgattcacattccggtgttttattgcaatactatggtctaactgaggcttcgttctacactgtattgtttggtgttgccagagctattggtgtgttaccccaattaatcatcgatagggctgttggtgctccaatcgaaaggccaaaatcattctccaccgttaaatacaaggagttggtaaagaaaatcgaaagtaagaactaaggaaaatttgatttttgattcagggtatgcgactattcaaacacgtattttcatatacgaatgagtagtttataatttatataaatatatattac

SEQ ID NO: 718855 - DNA, 307 bp, Homo sapiens
agcactgccccgctagtttgccagtcccctgagagacgaggccaataaaagttgttttccctcctttctcgaggtgggggcggggtgggaaactagagtgcttggagttggacctgagccccgtttgcagggtccgaactgggttcttcttgtatggtatgggtactaagaaattttcaggttttaggattgtcacgtcacccccatctacccacatttgaaatgttatctgtcgattctcttcacattgcagggaatcgtgctccgggagtataagtcataggatagttttggacacttacagaca

SEQ ID NO: 718856 - DNA, 169 bp, Homo sapiens
tggacagcacagaggaggtggacagcactggacagcacagaggaggtggacagctggaccgcacaaggaggagcgtgagcgcggcatcaccatcgacatctccctctggaagttcgagaccacctctgtgcctcctctgtgctgtacagaggaggcagcacagaggagg

SEQ ID NO: 718857 - DNA, 389 bp, Homo sapiens
ctcagaccacagagtgtcttacacctgaatcctgttcgcagactacaagcaatgttggcttcccaatcgatgcctcctgtgtatccttcagttgacattgatgcacatactgagagcaatcatgacacagcattaacacttagctttgtgccaggttggtcatagagaccttgttatcttgtctcattgccacgggttagccaaatatgaaccacagaagacacaaaaggttttcacacctcttatcctggcaagcaccagcagggcatgttggagttgtttgagatccttctctgagaaagggggagatgatagaggcgcagtctgaccgatctaagggtactccgctcttcatgtgcagtatgctggtggacgtcacaggtggtaga

SEQ ID NO: 718858 - DNA, 566 bp, Homo sapiens
agtaagtcgtgagtagtgtcaagctggatgtagaattgtcctaaggcagttgaccccaccttccaacatgttttcactttatttgcccctccctacatttgggttaggttccatttggatttgcagcaataatgactttatttctctcttggtcaggatttggcacataaaatccttttattatagaactagctattttagttacatagtaatgtaactaatggagagatttatagagaattttgtttttgctgtcatatatgtccattttggagacagatatgatagaactagaaattaagttgcatttctgcaagtgccatttgaatgaacttcaagtatcttcttaattattaaattttctgatgaaggcattgtaacaaatatatagtattattaaatctaattaatatttggaaatattaataaataggtattttatttactgtaaaaagtcaaacttcattatgtagataaatcttattcttttcattctttcccctgtttacatcctttttacaaagcttagtcaccaattaaagctttcctatcaaaatcaaaaaaaa

SEQ ID NO: 718859 - DNA, 451 bp, Homo sapiens
gggagagaggttgcagtgaactgagattgggtcactgcactccagcctgagtaacagagcgagactctgcttcaaaaataaaataaaataaaaatataaaaattagccaggcatggccgggcgcggtggctcacgcctgtaatcccagcactttgggaggccaaggcgagtggatcacaaggtcaggagatcaaaatcatcctggctaacacggtgaaacaccgtctccactaaaaaaaaaaaaaaaaaaaaaacaataagcggggcaggggggggggcaccggtagtcccagttaccccagaggcggaggcgggacatgggcggtgaaccggggaggcagagcttgcagggagtcaagatcgcgccatggcactcaagccggggcgatagagcaagactccatcgggtggtgggtccgagctcgtccccgggccgggggtcctggggcgg

SEQ ID NO: 718860 - DNA, 120 bp, Homo sapiens
acccggtgctccttgccttactgctgctaattctggtgctactagcctctttaggtgttcagtcgacacagcttctggaggcttttcttgtgtttgaggatggctggcagtacctcctca

SEQ ID NO: 718861 - DNA, 348 bp, Homo sapiens
  misc_feature (11)..(11): n is a, c, g, or t
  misc_feature (61)..(61): n is a, c, g, or t
  misc_feature (131)..(131): n is a, c, g, or t
  misc_feature (133)..(133): n is a, c, g, or t
  misc_feature (140)..(140): n is a, c, g, or t
  misc_feature (142)..(142): n is a, c, g, or t
  misc_feature (150)..(150): n is a, c, g, or t
  misc_feature (217)..(217): n is a, c, g, or t
  misc_feature (287)..(287): n is a, c, g, or t
  misc_feature (337)..(337): n is a, c, g, or t
caaaagggcanaggaggacgaggacgaactgggaatcgtagggggctcccatgaaaccttnccccccagacccagacttgggccattgctctgacatggacacagcccaggacaagctgctcagacctgcntnccctggntnggggtganggaaccagcactgtgcggagaccagcttcaaggagcggaaggctgcctgaggccacacagctggggnggggacttctgtctgcctgtgctccatggggggacggctccacccagcctgcgccactgtgtcttctctnaagaggctccagagaaaatggacaccaatcaataaagaactgagcagaancaaaaaaaaaa

SEQ ID NO: 718862 - DNA, 938 bp, Homo sapiens
gactagtgtatgctacgcgagtatgaatattcatctcaattcgtgatccatcaaatcatattggcttgtatagagaggaatgcgaaatgcttgaattatgactgcgttagcgtgagatttaatatatagtataggttgatcggtaatagttatgatgtaatgagcttatggtcgtctattacccgagttatgatagtctttatccagtaaggtaggaaatacgcaagtatctctcatctgtcagcagcttttactatgcgtgatctttgttaactcctcatattaatcaaaaattctcttacggaagacatagtattagaattttgcatcaagaatattgcaggggtatgggtggtctagagtatttatgagcattgaaagtcatacccgttctcgagtaattgttagtgggcaaggctacaagaatcctttgaaattcgacgtttaattttacttcaagtgggattgaagggacagaaatctacagtggatgggggggaagagaagttcactgatagtaaattttagcggggatgagaggagaatttgggtggagtggccttggggtttgggagtaggggggtctcgccatgaaacccggaccatagcgggacttagcgtgtgggtacagatatttcttgaccccgactggagatgaggtctctgtagcacggtaaattgccccctggttaattggactccaagaaaggtactcgcgtccacccgaggactgttcatgggtgacaataggcgcttttaaggccccatgggggaactctgtgaagaaaggaccatccgtgtatcgcatatgttcccgtttgggaccccactgtgggtctatactcagtgttgggatgtcgaagttgtttccgtttcgggtaccccttgcgtgaaatgaaggagctcagcactggaagtcgtcccttgcggaacgaaag

SEQ ID NO: 718863 - DNA, 150 bp, Homo sapiens
atgcggacccctctctggtagttataaggaaactgtttattgacttacttataatttttttttgagacaggttcttgctctgtcgcccaggctgaagtaccatggtgcaatcttgtgctcaccgcaacctccacctccagggctcaagct

SEQ ID NO: 718864 - DNA, 339 bp, Homo sapiens
  misc_feature (25)..(25): n is a, c, g, or t
  misc_feature (29)..(29): n is a, c, g, or t
  misc_feature (70)..(70): n is a, c, g, or t
  misc_feature (102)..(105): n is a, c, g, or t
  misc_feature (111)..(111): n is a, c, g, or t
  misc_feature (125)..(125): n is a, c, g, or t
  misc_feature (138)..(138): n is a, c, g, or t
  misc_feature (148)..(148): n is a, c, g, or t
  misc_feature (150)..(150): n is a, c, g, or t
  misc_feature (155)..(155): n is a, c, g, or t
  misc_feature (159)..(160): n is a, c, g, or t
  misc_feature (167)..(167): n is a, c, g, or t
  misc_feature (186)..(186): n is a, c, g, or t
  misc_feature (190)..(190): n is a, c, g, or t
  misc_feature (238)..(238): n is a, c, g, or t
  misc_feature (262)..(262): n is a, c, g, or t
  misc_feature (329)..(329): n is a, c, g, or t
atattatccctgtatattgcatgantganagatttcccatatttccatcagagtaataaatatacttgcnttaattcttaagcataagtaaacatgatatannnntatatnctgaattacttgtnaagaatgcatttnaagctatttnanatgtntttnnatttgtnagacattacttattaaganattngttattatgcttactgttctaatctggtggtaaaggtattcttaagantttgcaggtactacagattttcanaactgaatgagagaaaattgtataaccatcctgctgttcctttagtgcaatacaataaaactctganattaagactc

SEQ ID NO: 718865 - DNA, 126 bp, Homo sapiens
actgggtctgtagcttgatgggtctcgagtgtgtgatgctggatctggactatgtggtcgcagatacttctaaagataatgactcgtcgcagaagataaattccttcttcggcagcacagaccaca

SEQ ID NO: 718866 - DNA, 244 bp, Homo sapiens
ttcccccccaaccccccctggggcctcaagagggtggtacctaaaaaagttttccctccccccccccgctagcctggtcagtggtcagcaaattggaaaaggatccgatgggggggtaaatgttagacccaatgttttgattaaacccgtttggggtttagctttgtatttaaacaaggaaataaacttgaaaattttttgtcttcataaaaatgaaacaaatttaaatattttttgcccggca

SEQ ID NO: 718867 - DNA, 346 bp, Homo sapiens
  misc_feature (32)..(32): n is a, c, g, or t
  misc_feature (56)..(57): n is a, c, g, or t
  misc_feature (71)..(71): n is a, c, g, or t
  misc_feature (86)..(87): n is a, c, g, or t
  misc_feature (91)..(91): n is a, c, g, or t
  misc_feature (95)..(95): n is a, c, g, or t
  misc_feature (194)..(194): n is a, c, g, or t
  misc_feature (197)..(197): n is a, c, g, or t
  misc_feature (206)..(206): n is a, c, g, or t
  misc_feature (256)..(256): n is a, c, g, or t
  misc_feature (270)..(270): n is a, c, g, or t
  misc_feature (319)..(319): n is a, c, g, or t
  misc_feature (325)..(325): n is a, c, g, or t
  misc_feature (330)..(330): n is a, c, g, or t
  misc_feature (336)..(336): n is a, c, g, or t
aaatatttagatgtaccctgttaacagccagncattttgatttacttatggaatcnngtgaataaaaggcnacataatttgggggnngtantctnatatctaataaaaacagtttgagtggttgaagacatctgcatgaaattgcacctaggtgcattacttgatataactctcccctaaaactgttgtaattncantttttcccntttcttggcacccctttagaaatgtactgaagtctcatttttcacccatntcagccatgggacntttttcataatattaatgtaaagatgtttgtgttactgtttataaattncaattntaaanaaattnctagttttcc

SEQ ID NO: 718868 - DNA, 200 bp, Homo sapiens
gtcggcagagagcattgaagacacctagatggcaatttaaatttttgcttcagtacgggcgggaaaccctataacgtgttaagtatatttttgcccatatggggtctcactgatattgtccaggcgggactcaaagtccggagctcaagcaatcctcgcacgtgggtctccagagcatcgggagacaaggtagagccgag

SEQ ID NO: 718869 - DNA, 568 bp, Homo sapiens
gtgtgctgttctagaggttccgaggatacggtctgcgcgttgtgatttggcaggtaccctgtatgggtggtggctgggctgcggggaaggctgtagattcttcagtgaggcccgaggtggtgctgtcctcagtgaacagtgttgtgtgagttgaggctggccggctgtgaacagttgtcggctcttcaccacgaactgaggtcgtggtgctgcgaggggacactgtgatttcagttgagcctgggctgctgctgtagacggtggtagattcctcactgaggcctggcgtggtggtgctggcaggtgacactgttgagtgagtggaacctggttggctacgggaggtggtggattcttcaccgacgcctaggcttgtcatactggcaggtgagagtgtagtggttggtgatctggggctgctgtagacggtggtagatgcctcactgaggcctggtgttgtggtactgccaggtcacgttgttatttcagttgagcctggactgatgcgtgaggttgtagattctccacgacctgaggttgtggagtgagcagatccgctatacagggt

SEQ ID NO: 718870 - DNA, 931 bp, Homo sapiens
tctctctccttccctgcagcaagtggccggtttccagctgcctactttctgcccggatctctggctcctcatctctccggtctccgcagactaaagcccctcgggaatatgcagcagccattgcctggtgcacacgctgagccccggagccccgtccgcccccgccctacctttgccgccgtgcggaccagggatccctgtggcataccgtgcatacgggggccggcaaagtggtggagcccggaaaccgagcgctgtggacgcgccttggaggccgaacaagggccaaggtacgtcaagaagccttgcacttggccaacaccctgccatggagcctgtgcagccccttgcttgtccaaacagccgctcttcagccctgagatctcgccgcacatgggctacacggccacaagccagcacgagcccttgcctgggcccctggccagaccggcccccagtctgggacctgggacatcctcagaacgcctcaatcagactttgttgtcgacaggcccctgtggttccccagtgcctgatggcacatgcccggacacactcctgtggacctggcgccctaatgagagagccggagccggatcacatccccacaaaaggaaaaacacattcctgagagaaccgcacaagccacaaaatacacatccatgagagccccagaccagagagtggcaacaacgctcaccaagaaacccccacatgagcccccaaaccacacagacccagaggcaccccggagaccaccctaagccccccaaaatacaacccaccgagggcacccacagagccccggcagcagaccactccccaagaccccacacaaacacccacgggacgaacaccacaagagggaaatcgagacacaacacgccaatccccaaaagcgtacgggaaaaatacgaacaacacaaaaaac

SEQ ID NO: 718871 - DNA, 182 bp, Homo sapiens
gtatagtgatggagatggtgatggagatggtgatggtgatggagacggtgatgatatggtgatggagatggtgatggtgatggagatggtgatggagatggagatggtgatggatatggagatggtgatggtgatgggatggtgatggtgatggtgatggtgacgcaactggtacggcgggc

SEQ ID NO: 718872 - DNA, 545 bp, Homo sapiens
  misc_feature (10)..(10): n is a, c, g, or t
tgagattggntgactttcttaacccagatttttaaatgtgacagaatgctggttaggtgaggctggataaagggctacgacagtggtcaaaccggaggagggtaccggatgggcatgatgggtgctacacatgtagtaccaggccaagagtccagcagctagggccacaccagtggacaggatgaactgcaggctgggctttctcagcacagccatagctgttcggaagggacagctgctgccctccagggcacctttgtcttgttcagcagcgtagaaagggcatttacgcatgtctcctttcccatcgtgtacagggaacccatcctccaaggtctctctggccagtgtggagaccggctggtccagttcattgaatatctgcatggtatactcaaaaagctttgtggccttctacacgatcctctctttggacttatgatcaggtcagggcggtattctggcccgtagaggtgcttgaactgtgggcattggccacattttaaacaaggagaactgggccccttccctgtgttgggaagtcg

SEQ ID NO: 718873 - DNA, 962 bp, Homo sapiens
aagtccttttaaaaaagtggatcaggaatcctgttatgggccttgattgttccagacattagaagtaaatatatttgatgaaggaaatcttgaaaaaatactgactagataaaaattgtaagccaagctttctgactgaaaaatgctacctagccacagatcattgctgttatttggttcattgcatgagtgtgtatgtgtgtgtatatatgtatacacatatatatgtgtgtgtgtgtgtatgtgtacacacacatatatgtgggttttggggggtatggataagatggtgctatgaaaataatttgtctcttgttttaattaatgaagcttctgtcatgccaagtagtctttagggagaagtcagaatcttttcattaaaagtcatagggaaacagaagttgtacgggtgctgcttgccaaggacagactagaaaagacactgaggcagttactagtgctgacacactggcccaacggagagagaatgtatgggaaggaatatgtcttacttacggtgactttgtggttcttaatctgcatgttttgagttgtctgcagcgcctgccgttgctgtgcacaacaaggagctccttgctgataaaccagtgatatttcttgatgtgtcacttcgaagtaacatttctttctgggtatttccggtgttggggccagatagatgggtccctcagaatactaacttatgcctgcactggtcgagattgctttcacccgacttcccaaggaaaagtccattacctgaacttgccggagacatgattgggccagacacgttttagaacctctaacgtcaggtcacacatggccctcatgtgtaatttgtatcattctcaccacgggtatctaacgtggagaattgcaagtacaacacccgtaccctcacaacatacactacctttatcaaaacacaacacgagacataaaatacacttctaccaaaa

SEQ ID NO: 718874 - DNA, 161 bp, Homo sapiens
ttagaggatcccgggagcagaacacaagccggccaccatgacactctcggatgggcatcctcggctggatctggtaggccagaactggtgccctgagcctcaccctcctcaggaatatttcctttctcttccgggtctcacgtgaaaccggggtgctccta

SEQ ID NO: 718875 - DNA, 347 bp, Homo sapiens
gtcatccgtacaggcgtggtggtgggcactataatcacagctacccgggaggttgaggcaggagaatcacttgaacttgtggggcggaggtcgcagtgagccaagattgcaccacttcactccagcctgggcgagaaagtgaactctgtctcaaaaaaaaaaaaaaaaaaaaattggaccaaaaaacccaatttgattcttttggcaatgaggcgaagtatacaatatatttattttaaaaaaccagctctatgtttcctgaaaacaaggacacccctaggagaactgtgttgaagaaaaggacaacacaacgtataaaagtgacacgtgcctatattttctccacg

SEQ ID NO: 718876 - DNA, 205 bp, Homo sapiens
ttcaagcgtatacccaaatgctgaaatactagtgaggggtcgggtgtggtgacgcttgcctgaaatcccagcactttggaggccaaggcggacggatcacttaaggccagcatggtgaaagccatccctactaaaaatataaaaattagcagggcgtggaggtgcatgcctgtagtcccagttacttgggtactacgctttggca

SEQ ID NO: 718877 - DNA, 133 bp, Homo sapiens
atcccacctaacattggactcgaccttacttcaacatcgcagacgacgatctacggcggcaggcaacgatgtgcaccggcactcgtcgctcagatacccctgggggttgtgagatggacttcgattcacgcga

SEQ ID NO: 718878 - DNA, 204 bp, Homo sapiens
gtcggtcctcggtctacttgttctccaaacaaaacagaacaaaaacaaaaagtagccaggtgtggtggtgtatacctatagtcccagctacacaggaggttgaggtgggaggatcccctgaccccaggtggttgaggctgcatgcagtcagctgtgatcacaccactgtactccagcctggataacagaatgaaaccccataac

SEQ ID NO: 718879 - DNA, 441 bp, Homo sapiens
agatacagaatcaacctaagtgcccatcagtaacagattggataaagaaaatatggtacacatacaccatggaatagtatgcagccataagaaacaatgagatcatgtctcaggaacatggatagagctggaggctattatccttagcaaactaattcaggaacagaaaaccaaataccacaggttctcagttgtgagtgggagctaaatgatgagaactcatgaacacaatgaagggaacagacactagggtctacttgagggtggaagatgggaagagggagaggagcagaaaaagtacctattggtgatgaagtactctgtacaacaaacccgtgacaagagtttccctatataacaaaccttcacatatacccctgaacctaaaagtttttttaattgtaaataaatggatcattaaaaaaaattttaataataaaa

SEQ ID NO: 718880 - DNA, 115 bp, Homo sapiens
cgccaacagtttaactcaagctcatactcaacccccagtgttggtcaatttacgtgcccagccacctgctggtcacacgcattaaccccacagtcaatcagacagccggctgtaa

SEQ ID NO: 718881 - DNA, 325 bp, Homo sapiens
ccggaggacggggccgagggggcccccccccggttccctgcaagggagttccggggcccttttaagggtttgtgggggttctcccccaggtttaaagaccctttggggttccccccttcccgtgggcttaggttgaccctgccttaaaattaaatttttggggggggggtcctttcctcccctccttaaggggagggaagggggtcctttaccccttggggggtggggtgggtttcttgggttgggggagagttttggaaggggggggaaatggccaggggtttttttttgttaccccctgccaattaaaagaatggggccttga

SEQ ID NO: 718882 - DNA, 148 bp, Homo sapiens
gtattgggctgtcgtgccgatgtggaagacactacaggaagtggagctacagatagctaaagatagatgactgacattgacctctattggatactgatgactgaggacggaaagtgacagaagcaaacgaggctaacgggaagcaacg

SEQ ID NO: 718883 - DNA, 129 bp, Homo sapiens
tcagccggtccaatctgctcgatctccaggcacaataataaactccaaatggctgaaagacttaaatataagacaggacaccatcaaactcctagaagaaaacataggcaaaacactctctgacatcaa

SEQ ID NO: 718884 - DNA, 395 bp, Homo sapiens
ccctctgctgtctggggcacatctttgtccagagtcatccagttggcttcttcaatgacccacttgtcaaagccgggctcgtgccgccggttccagcgctccttaagtgcatacttcagcttcttgtcactggcatccacacttgtcacattgaagccttcttccaccagcataatgaagtccaccccagtgccacaggttacgtcaagcaccctctgacacccgtgctggcgcaacagcccaaccagccatcccttgtactcgccggtgcgcctccggtgtgtctccaatatacagttgccacacgcgcgccgcctccgtgtgcgcgttgtggtccgagagcccttcggccgccacccacagagagcgggtccggtacactctgtccaacatcc

SEQ ID NO: 718885 - DNA, 1502 bp, Homo sapiens
  misc_feature (757)..(757): n is a, c, g, or t
  misc_feature (796)..(796): n is a, c, g, or t
tcaccggtgcccactaagggttgaccgaaggcgcctctggggggcccacaatatttccgcgccacacgaggcgcccccacgaagagtgccgcagcaatggggagaaaaggatcaggcctctaacgggggaaaagacaaaaagagtgggcctcccgcggccccccacgagattgttccgtgtgaaaagagaaaccccacggagagaccttaaaggaaaaaaagtgggggagacacccccccgcgtgttggtgaggagaaaaagggccctttataagaaaatttttgggcggcaactttggggaccaacggggaccatattctcctagcgcccccttcacaaatggggggtcctcccttctccccccgccgccttttttgttgtggaaaaatggggcgccccccccgctttattatttcacgggtgtgtccacaccgcgccctggaggggtccccattgcccttcttatttataggccgcgcctgtagacaaaggtgccgcgtcccctcgtccggagttgtataacccccggtgttcaacacccacaccggggccccttgggggagacccggcgccgccagagcgacgcgcttatctctctctcaagcgtgtgcgttttataaagcttttggccgcccccacccaaagggtgccccaggagctccatggagtgtgccctaatacgcccaaagagagagaagtagaaccccaacggagagaacccctgttgttgggcccccccgggcgcccccgagaganaaagaaataagcgctcttctctctggcgcacaaacaagnggggaaaccttgtcccctcaccggcatatagaggaccccacccgctcgttgtccttttcgcagagcccaccgcagagagttatgacacacacgcgctgtcaacacacaccgctctttggttgtggagagagactcacacagagataagtgctccacagcactctgggtgtggtgtgagattggcacacacccgacaccgtgtgagatctccacatctgagagctctgggtgtgttctcttcttgtgccctgccccctgtgtgttctgttaaaaaattgtgggggtctcccgttatcctgcacattatctcacacagtggagaaaggcccacagaactcgggaacgcttctatagtgcccaccacaggagaagacacctcgcaccccacctcgtttgccgctcttacacaccacaggtgagaactccggagaagaccccacaaggcgcctcttgggctataagtctctggtggaaagctaattctacggaccacattacccatggcacgatacgcatgagatccgcccgctcacactggggtggccatagttcctgggttcctcaagattctgtgggctcgctattcccccaggctcgcaaaaggcccaagggtaaagaacttgccccttaactgggtttaatagtaccctgttgagattttctgtaccattaaaataattgaaataatcacccattttcccttcca

SEQ ID NO: 718886 - DNA, 875 bp, Homo sapiens
  misc_feature (16)..(16): n is a, c, g, or t
  misc_feature (113)..(113): n is a, c, g, or t
  misc_feature (141)..(141): n is a, c, g, or t
  misc_feature (157)..(157): n is a, c, g, or t
  misc_feature (169)..(169): n is a, c, g, or t
  misc_feature (176)..(176): n is a, c, g, or t
  misc_feature (180)..(180): n is a, c, g, or t
  misc_feature (207)..(207): n is a, c, g, or t
  misc_feature (219)..(219): n is a, c, g, or t
  misc_feature (230)..(230): n is a, c, g, or t
  misc_feature (241)..(241): n is a, c, g, or t
  misc_feature (264)..(264): n is a, c, g, or t
  misc_feature (280)..(281): n is a, c, g, or t
  misc_feature (283)..(283): n is a, c, g, or t
  misc_feature (286)..(286): n is a, c, g, or t
  misc_feature (291)..(291): n is a, c, g, or t
  misc_feature (295)..(295): n is a, c, g, or t
  misc_feature (309)..(309): n is a, c, g, or t
  misc_feature (317)..(317): n is a, c, g, or t
  misc_feature (383)..(383): n is a, c, g, or t
  misc_feature (399)..(399): n is a, c, g, or t
  misc_feature (410)..(410): n is a, c, g, or t
  misc_feature (435)..(435): n is a, c, g, or t
  misc_feature (438)..(438): n is a, c, g, or t
  misc_feature (471)..(471): n is a, c, g, or t
  misc_feature (473)..(473): n is a, c, g, or t
  misc_feature (476)..(476): n is a, c, g, or t
  misc_feature (530)..(530): n is a, c, g, or t
  misc_feature (536)..(536): n is a, c, g, or t
  misc_feature (656)..(656): n is a, c, g, or t
  misc_feature (679)..(679): n is a, c, g, or t
  misc_feature (689)..(689): n is a, c, g, or t
  misc_feature (774)..(774): n is a, c, g, or t
  misc_feature (872)..(872): n is a, c, g, or t
ggaaaataagaatggngaaagaaaaaagaagaaaaaaaaaaaaaaaaaaaggaaaaaagaacacacatacttacaaactctcctgagccaagtatgtgcaagaattaataagngggaccccttacccccatccactcatgngggtctggaaaaagtngtgccttttagntttttanagtntaagtatgctctcggcatctaatgagntttttaaaagcnagtttaaagtnttcattaaaantcgtatagagcagagggttgatnagagaattcaaataanngngcnacgtnaganagtggggcatttcngaggacanggtgtagatgctcagacccacaatcaactctttgatgaaaaatgggagccaggataaaatgaatgnacccagaataaaaacnaggatgggtgntgccttccgttccctggtgctaganatntgctgacgttctcctgggtgatctagatcattntnggngggggggatcctgatggaggcatggaacttttcaaactctgtggtagggtctgnggtggngaagtcagatacacagaaagtttgtgtaagtttacaatttggaaaagaattctggctatctgtgcttctgttgcttaagtgccgacttgatccccttttctggtaaaggctcttgggcgngtggtaaatctggtaatagagantcagtatcanagtcaaggggatataaaacgcacccagcgtggagtaaatggtgtagataacatggtcgtgctggatggtgcactgactggggggngggcttaggcggcggtggcttctccagaacagagggggcatggagatgaaaatggagatggtccagacggtaaggatcatcagcgcggccctcttggncgt

SEQ ID NO: 718887 - DNA, 920 bp, Homo sapiens
  misc_feature (530)..(530): n is a, c, g, or t
  misc_feature (571)..(571): n is a, c, g, or t
  misc_feature (666)..(666): n is a, c, g, or t
  misc_feature (720)..(720): n is a, c, g, or t
gcaggtgtagtcctggcactctgatatgtatacaaaccagaagcccagccatccctccggtattggggtgggtcagaaaaagtctcacctcaatttgccgactagtgtcgactctgcttgccataaggaatggtcatccttaacctgcgtgccagatttagactcgtctttaggcaaaacctacaggcgcccccccctcaccccagtatctacatgaatcatagttcttcaagggatggggccaggaatctgcatttcctaatgcgctccctgggcaacgcttcagatgcgttgaagttggggaccacggtgcctgggccagagtcagcagcagctgcgctcgagtaaactgcatgggagtaatcgttcactcgtgagcagcatgcgaggaggctgacatgcaacgcctccacatgcaggtccatatacaccttggcctccatcgtcactggctgtctacatctagggccccaaaactccattcctgagccatgtgaactcatagacaccttcagggtgtggggtacagnctccttcccatcttatcccagaaggcctctcccttcttgtncagcccttcatgctacacctggctggcctctcacccctatttctagagcctcagaggacccatccaccattcattcattcattcattcattcatncacttcatcaacataaatcataacttgcatgcatgtgccaggcacaggggatanccttagagacaatctcctcctagggctcatggcctagtggaggagacagattaaaacttaataataaaaaaggagcagtggctcatgcctgtaatcgggagccgagccgggtggatcacctgaggtcaggagttcgagaccagcctggccaacgtgatgaaaccccatctctactaaaatacaaaaactagctgggcatg

SEQ ID NO: 718888 - DNA, 485 bp, Homo sapiens
  misc_feature (22)..(22): n is a, c, g, or t
gagatggcggtagctttgggangactagggcttttagggaaggatggtgttttgggtaggctaggtgttttagggttattggggctccttggttagattggtagagaaggatggtagggtttgtcaggagtaagaggattgtctggtatcaaaggtgaaaaaggggacattggtattggcattgtaggagaaaatggtttttccggccccccaggtctttaaggtccttcaggctatggcaagatgggtgtaataggatcaatgggctagtaaggtatccttggtatccttgggcccccgggtcccatgggccagccaggcaaggttggccactgtaatccctttgaatggtttggggccatgccgatggagcagcagtacccacccatgaaaaccatgaaggggccttttgggtgaaattccccacctgcctttggatgaaagactccgttgggaataaatggccaaagcttataggactttga

SEQ ID NO: 718889 - DNA, 152 bp, Homo sapiens
aagagaaataaaaggaacctccgtgaggggggtccacccacattcattttatgaatggctcacctcccctacctcaaaaggcttgagggaggtacggctaccattacagggttccttattacatcggccacgtgcctgaaggtgtgggcacc

SEQ ID NO: 718890 - DNA, 676 bp, Homo sapiens
  misc_feature (27)..(27): n is a, c, g, or t
  misc_feature (142)..(142): n is a, c, g, or t
  misc_feature (170)..(170): n is a, c, g, or t
cccatctgtttatcttttaaaagatancccatcagcgacagccacaaaattccgttgcaaggttgaagagattaaccagtccgttgccccgtttcaccattgcccaggtgtttaattcttcatctgatgaaggctacttccntaaattttctcccgtgtaaccaaagtgnatgcaccggtgcagggaatgttgaccattgtgattattcagagtggattggcactgatgaccattagcccgtcgctaaccagtcagttcaacgtgctggttaacctggccgtggtgaccaatatcattccgtatattctgtcaatggcggcattagtcattattcagaaggtcgctaatgtgcccccctcaaaagcgaaagttgcaaactttgttgcttttgttggcgcgatgtatagcttttatgcgctgtactcatccggggaagaagccatgctgtacggttccatcgtgaccttccttggttggacactgtatggtctggtatcaccacgctttgaactgaaaaataaacacggttaataaaacaaagtaaaaaagggcgattgaatgatcgccctttctgtttgttggcaaatagttcgttatttatgccgcatccggcagatgtagggtctaaacgcgatcgaacacagcaactatttgcgtaattatatggggcatctg

SEQ ID NO: 718891 - DNA, 302 bp, Homo sapiens
tgtgaggtaagggctgaggttcgtttttcctcctaccaatacgcagttttcctagcactaatttttttttcacaccccttgaaaaagaatttcatcccaacacccagaccaaaccacaacacagccctaacacttcccaaaaacttcactttttagacttcaaccctcactcccctcgactttctcaaacacccaaccctaaaaaccccacacttttctccccactctcagggaaccaaaacccccccccccccccctcgtccaactaagacccaacgcacccaaagcctctctaaacctga

SEQ ID NO: 718892 - DNA, 311 bp, Homo sapiens
cagcgtagaccttgctagcatttgccagcattccgtcttccagcagggatttaatggctcgaggctcgggttccacccccgatttgtggaaaagttaaactccagggcccttttgagaccgaaaacggggcttttcccttttttagggccccaaattaacacttttcaaatttcccaaaaaatttagggttttttaaaaatccccttaacttgggcctttaaatttcccgtttaacttgggggccaaaaaataaagggggaatattttaagggggaacccttttttggacaatttgggaccaattttttgg

SEQ ID NO: 718893 - DNA, 183 bp, Homo sapiens
ttgcggcagtctcagcaaggatggacatgaggcatttgtgtgatccacaggtgctgagtagccagcaacttccttcttgaaagtggaacagcgttgaaggtctgtttaaagaaataatcctaatttagttccagaagcatatcccgtaggagcagttgctactaggcccgtgacttgggcctg

SEQ ID NO: 718894 - DNA, 593 bp, Homo sapiens
tgagacagagtctcactctcgtcacccaggctggagtgcagtggtgcgatcccagctcactgcaacctctacctcctcggtccaagcaattcttgtgcttcagcctcccgagtagctgggactacgggtgcctgctgcctacctcaagtgatccacccacctgggcctcctaaagtgctgggattacaggtgagccaccgcaactggccttttttttttagagccagggtctcactatgttgcccaaggtggtctcaactcctggcctcaagtgatcttcctgcctcaatcccccagagtggtgggattacacgtgtgagccactgcacctggctggcatctattttttatttaaagcgttcagctacactgatcaagaggaaagccaaaacccttcaaagaaagcagggtcagtcggaaagcctgatgtggttaaagactggcgttgctggacattcagaaccaggtgtgggaaaccatgcaccaactgcaaagtgttccagagcattcagtgtgaagctggagcaagtattcccaattcattgctgtaggcaaatcacagaatccaacagagatgatattacatatgaaga

SEQ ID NO: 718895 - DNA, 598 bp, Homo sapiens
gttcgaaggagtgttgagcgggctaagaagtatatccttggaaatcctctgaccccaggagtcactcaaggacctcagaattgataaggaacaatatgataaaatacttgcacctcattgagagtggcaagaaagtaaggggccagaatcgtggcaatgtggatggaggcccgcgggggaagtaaaggcgtactttgtccagcccacagatgttctctaatgtgtcacagatgattatgcgcattgccaaagaggagattggggcaccagatgcaggaaatcatgaaggttctcaaatctttgaaatgacgtgatcgataacagagcaagacaatactttctatggcttatcagcaggagtgtttaccaaagacattgataaagccataacaatctcctctgctctgcaggcacggaacagtgtgggtgacattagtctatggcgtggtaagtgcccatgtgcccctttggtggattcatacgatgtctcaacaatggaaggagaactgggcagagtacggtttccatgaatattgcagaggtcaaaacagtcacagtgacaatctctcacaagaactcataaggaagaatacgagag

SEQ ID NO: 718896 - DNA, 675 bp, Homo sapiens
  misc_feature (411)..(411): n is a, c, g, or t
  misc_feature (661)..(661): n is a, c, g, or t
ctacagccctgactttgagaaactgaagccagaatacttggaggaactctctacaatgatgcagcacttctcacagatcctggggaagaggccatggtttgttggagacaagatcacctttgtagatttcctcgcctatgatgtccttgacctccaccgtatatttgagcccaactgcttggacgccttcccaaatctgaaggacttcatctcccgctttgagggcttggagaagatctctgcctacatgaagtccagccgcttccttcccctctgtacacaagggtggctgtctggggcaacaagtaatgccttgaaggccacgaggtgggagtgaggagcccatactcagactgctgtccaggctgtgcagcgcagctggactcttgattccaacacctgcctcctcgntcctttctcctggttatatccatctttacccccaagactttattgggcctcttcactttccctaaacccctgtgccatgcaggcccttttgaggctcagatacccacttttctttatgaacaatccccttccaacactatcctttcctgtacttaaggcaggctgaactttctttctgttagagggtggatctgcgttgaaggggctacctcgggcccttcctgtggagagttcctgagctgttccccgngttgcatgacgctt

SEQ ID NO: 718897 - DNA, 197 bp, Homo sapiens
catataaacgatattaggagtgtcacgcacggctacacacgtagtcgacgcgaacttgtacagggaggcatgcaccgcagatggtgaatacacgtcgaccaggctccagcttaacgatatttcggcggtcagcacggtagctcacgtgtcgacggaacttgtccagggaaggcatgcaccgacagtggtgaatacac

SEQ ID NO: 718898 - DNA, 596 bp, Homo sapiens
tccccagctatgatcatcgcaggctcctgtattattttcctatttctgctgtaacaaatgctacaagcttagtgatttaaagcaacacaaatacagcatcttacagttctacagactcaacaggggtctcactggctaaaatacaggtgttggcagagctgtgttccttctgggggtttttgggtgaatctatttccttcccttttctggcttctggaggccacctgcattgcttggttcatggccctgtgtgactctgacttctacttccattttgttgttgttgttgttacctctcccactctgactcacctatctcccactttcagttagtaaggcccttgtgattacactgggctcatttagatgatgcaggataatctccccatttcgagatcttaatcacatctacgaaatcccttttggtcatataaggtaacaatatccacaggttctgggaattaggacatggacaccttttgtgggggggcatgattctgcctgtcatagctcctggaggggaaagtagaattcgtttttattgcctgggttttcataggaaatcgatttgttgctgaaatccctcaaggactatt

SEQ ID NO: 718899 - DNA, 124 bp, Homo sapiens
agtctgaattaaacatttcaccactctttgagtacttgactacgagtacagagagagcatgagttgttatgtgctagtaatgatctggattattacacagaaattgtctctcaagaccaggtgg

SEQ ID NO: 718900 - DNA, 203 bp, Homo sapiens
gctgcacctcttatccctgctactcataatgctgaggcaggataattgctcaagtcctgggagttctaatagctgttgtgagctatgattagctccactgcactccagcctgagtgacagagcaagaccctgtctcttaaaaataaaataacaacactatgtaaatctatttctcaagactgtttgatacattataagagtaa

SEQ ID NO: 718901 - DNA, 554 bp, Homo sapiens
  misc_feature (10)..(10): n is a, c, g, or t
  misc_feature (22)..(22): n is a, c, g, or t
  misc_feature (63)..(63): n is a, c, g, or t
  misc_feature (114)..(114): n is a, c, g, or t
gggatacttnagtcatgccccncaataaaatgtttccggttaaggcccaagttccatatgtgncggtgttctcataagattataatagaatttaaaattcctattcctaagtgncattcatagttgccataccatcacagcccaatgtgttactcacatgtgcgtgatgatgctggtataaacaaatctattgtgctgccagtcatatgaaagtatagcacatacaattgtgtatggtacataatgctaatcatgataataaagattatgttattggttgacatacttactatcctatatttgttattttagaatgtaccacttctacttataaaaataagttaactataaaacaacctcaggcaggtccttcatgagatattccagatgaaggcattattacagagatgatagctccatgtatgttattgcccctaaagacttctcgtggagcaggatgtgaatgtggaggacagtgatactgaacctgaccctgtatatgcgtggattaatgtgtgtgtttgtgtctttttaacaaaacagcttaaaaagca

SEQ ID NO: 718902 - DNA, 577 bp, Homo sapiens
tgcagagggttagaaagtaactatggggtacggggcttagtaccggcgtgatgaaaaaaatctgtacgacaaggaccccgtgatgcaagtttcccttcacatgtaccccaaacctaaaataacagttaaaaaaaaagtttactggagccaagtggagaggacagccaccgggaagactcagacccaggtcacctgggatatgagctcggttaggccttggacagaagcaggttttccaaagcaataagagggacagggagtgggctgatacagcggttggtcaggaattcccatgggttagacaaataagatggattagggatggactatacatgggtgaacgggggggtatggagtatggtgtccagggagtggcctggctgggttagtggatagctggtggtggcagcagttgggtctagagcccacatagcaagcagtttcaagagctgattacttagctcaggggggggggggggagggactggtgcctcactctcatgcctcggggggtctataattaatagcaggcttgctttcctcagataaagtttcttttctttctcaatttctatac

SEQ ID NO: 718903 - DNA, 1196 bp, Homo sapiens
ccctgtggaactggcttgggagtgagctgggccgaatagtggtgagagcctggcaaggtcgcctggcccaggcccacggcttccagtgattcctgcgggatgctctgtcagtgctgagtgtgctgtgctcagcagccaggaatattgttctgtctcacactggagatgccagtggacactccagtgctgctgatgctgccattaaaaaactggcggacttcatgaagcaccatgtgactgccaatgggtgaactggatccagctgtggctccttgtgatgtgcttggcctgcacaagcatgtgtatcttgaatgtgcaatcatccactgcctgacaagattcggtgaaaatggcagactccattgagaggaggcacaatgaatgaatcacagactgcagactgcagcgaatttcttgggcctgtcttcgaggacaaccgggagcagcagcaatttcctgcaagatttgtcactgagctgaagctctggatcgacgagaagatgctgacagcccagtgacgtgtcctatgactgaggccctgaaaaactgcatactaagtggcagaaggcaaccaggcattcatggccgagctggctgccaactaaagactggctggacaaaggtggacaaggaagggcgagagctacaccttgaaggaagcccatgagcttgaaagccctggtgtcggaggaagctgaagaggaccttgcacaatgcgctcgggacgaagctgagaccaccaaccaaagccaaagggcccgaaggacgtacatagactgtcaaccgagcatgacatgtatggccaagagctgctgtgcctgtgaaaagattgcatggataagcttgaatgccaagttgcaatcggatgatacgggaaggacctaacggggtacatccgtgcaagaaaagaaatcctggaagggcaatgccgaacaaaacaggggtggacgcagacaggacaggcaaacgcgacaaagacacaggctcggcacacaccaacacacgaccggcaaaacaggcttgcaaacaggaagtgagcgacgggatggaacaacaggaatgaaaaagcgtcagggaacaaaccagagagaagagaagataaacacaaagacgacgaggcaacaaaaagcagaaaagatacaggacgcctagaatcgtgatgcaaacaaaacaaacaaagagaagagaaagaaaag

SEQ ID NO: 718904 - DNA, 322 bp, Homo sapiens
  misc_feature (145)..(145): n is a, c, g, or t
agcgggccttcgacgtgacttaggccggttggcttggtctcaaaatcggctgtcgccatggctagtcgagtgctcagggagtattcgagaccgagcctggctgcgaggctcgcagaatcggcgcggcaagtcgcaccataccggntcctcccgatgccaagagacgagtagacggagcatgaggtcggtgatgacttacgtgtgagggagatcgcagatggtgtgtcctggatgcttgatgaagtgacgaagtactctcactcttcgaatgtatttgaattgttgttgtgattcaactgaatacgttgtgagaatcgttggg

SEQ ID NO: 718905 - DNA, 435 bp, Homo sapiens
cggagaagtgtctcactgaaattatattctgagcaacaagaatgatctgtctggtagaaaaaaaaaaaaaaaatgtttagagaagatcagcaaaaagtgactgtgtggggagaagctaaaaggggaaggtaaaactctttgcctcataagtttatgggaaagtaaattccaaagggcccaggaaaacgtagatataatgtctgaacgggagcttcaaaaggaaagatgacttagagtttgaaaaatgacgtgtacttcatagagtcccgagtgattactgcagggaacagggagccacctaaagagacccacattgcttcagggggcacagttcgagctgagatttggtctagagatgacaaggggacttgtaaccaaatagcaaataaagaagtgtgtgcaacctccgagaacagtgtctggagccccagatgg

SEQ ID NO: 718906 - DNA, 680 bp, Homo sapiens
  misc_feature (308)..(309): n is a, c, g, or t
  misc_feature (422)..(422): n is a, c, g, or t
  misc_feature (613)..(613): n is a, c, g, or t
  misc_feature (667)..(667): n is a, c, g, or t
ttctgtgctagtcagtcagtagcacagcacacgagcaagagcgcagacttcctaggtgtcgtgggccagctctgcctctttctggccatgcgaatcttgatcaggttatgtaatcttctgagccttgatgtcctcatctgtcaaatggcgttaatgatagatagtacctacctaccgtatatgagaagacatgtaaagcaccatggctgtccatagtaatgactcaataaatgcaaactattatttattatcatatgcaagagtaggtgctgcagaggttaaagagagactgttggtttccagttggnnagtatggaaagtgccagtcgtagtgcacagtgctcgagaggttcaaaggaaacgatgatggcacccggcagagatgggagctgctggccaccccctagtggactctgcatagnccatggccagtgcgcccttgccatggtctcgaggatggaaaagccaggtcatcatgtgatttcccactcacataatagacaccaacttactcatttttgttttttgtttagacagggtcttcactctgttggccaggctggagtgtagtggcatgatcatgctcactgcagcctcaacctcctggctcaancgatcctcctgcctcaacctcccacgtagctggactagaagcaatgaccaccantcccagctaatta

SEQ ID NO: 718907 - DNA, 147 bp, Homo sapiens
gtttttcgctagcttcacaccaaatcgttagcgctccttccttcttcctagctatcctgcggcaaatcgcactggctcctggactcttttcctatcttcaccacgaacggctgctagctacgctagctcctcagtcctagcttcatc

SEQ ID NO: 718908 - DNA, 144 bp, Homo sapiens
  misc_feature (1)..(1): n is a, c, g, or t
nccattccactcgggttgattccattctattagtttccattccattccattcccttccattccactctggttgattccattcctttccattccactcgaatacattctctcctattccactcggaacgattccattccattccc

SEQ ID NO: 718909 - DNA, 263 bp, Homo sapiens
tttccttccctcttcctcactgacttccccttgcacaggggcttctgttttatcccatttattatttgtggcgcctatatcaatgtggggtttgtaataggtgagaaatattggcttggagaagctcctgtgcggttagcctggcaatgagtggccgaccatgtgggaacgctcagtttgtcgtatgtgctggaggcctttatgatgaaagtaagcctagacataaaatctggagagaaccatgcaataagcaagtatttttg

SEQ ID NO: 718910 - DNA, 973 bp, Homo sapiens
  misc_feature (826)..(826): n is a, c, g, or t
ggccccagtcactgagccgccgccgaggattcagcagcctcccccttgagccccctcgcttcccgacgtccgttcccccctgccgcttctcccgcacgcgcgcgcttcgagccgtccaccgacggaatacagagaatcgtatcgctatgtccgctatccaggaagccctccacttgctttcgaccccgtttgactagagtgcaaggtaagggttgactgaaccctggctgtccctgcctgggccaactcgcggatcgactactccacctatatacgcacattacaagcagcagcacccaccggcacggacagcaccccttacctacctagtcccaaagggcatcgcttgcttgcattcagcgattacaggcaaagacaccctagctggacagggcgctcttacaagacaacaaaagcacacgcccctgccaacctgcgtcagcacgaaccaccggaacgcctccccgcgacactcatggcgacgacacctacactaacagcccccaccgggcatgcaccccacccgcccaacgcacaccatcctgcccagcgggccactaccaccaacgcacttgcgaaccgccccgaaagaaccgccccaaccctgcacagcgcacccagcagcggcccaacgcgcgtcgatgggcccacattcgaacgctttacaccgtcgacggcgactccccccgtgagcagacacggcaggcacgagcgataccacgctttcgtcctcaccggagcagaccacgggtcgcgaaacgaaccgaacagcaagcgacagagtcaactcgccacaccccataaggagagacccgagacgaaaacngagcgaccgaacccgagcacgacctacagaggccacgaacacttgaagcagcgcacccaggcagccaactccaggagaccctaagtgtaagaccgccggtcacagaacgacggactcgaagcagcaacgcggcaaccacacgaacag

SEQ ID NO: 718911 - DNA, 119 bp, Homo sapiens
  misc_feature (1)..(1): n is a, c, g, or t
ncagtgggtggggaaaggtatgtcccaagcgtcagttcagactagaactttgaatctctctcctgtctcggtctctgcttcctgcttctgccagctaatttttgtatttttagtagaga

SEQ ID NO: 718912 - DNA, 640 bp, Homo sapiens
tttattgagagtttttagcatgaagggctgttgaatttgtcaaaggccttttctgcatgtatgagataatcgtgtggtttttgtcattggttctgtttctgtgatggattatgtttattgatttgcatatgttgaaccagccttgcatcccagggatgaagccaacttgatcgtggtggataagctttttgatatgctgctggattcgcccccctgtccctcccccaaagggaataaaataactaggaatccaacttacaagggacatgaaggacctcttcaagaagaactacaaaccactgcttaacgaaataaaagaggacacaaacaaatggaagaacattccatgctcatggataggaagaatcaatattgtgaaaatggccatactgccgaaggtaatttatagattcaatgccatccccatcaagctaccaatgactttcttcacagaattggaaaaaactactttaaagttcatatggaaccaaaaaaagagcccgcatgccaagacaatcctaagcaaaaagaacaaagctggaggcatcacgctacctgacttcaaactatactacaagggctacggtaaccaaaaacagcatggtactggtaccaaacagatatattgcccatagacgaa

SEQ ID NO: 718913 - DNA, 1049 bp, Homo sapiens
tggcaaacgggaagcaggcggggggggcccggaaaaacgcagcggaggtttcccggggttttcggaccccaggcggccggagtggtgaaatcctcccgtgcaggcggactcctcaatagccactgtttcgccagagagaaggaaggggataaacccaggcgccaccatccacgccagcgcgcacacatgccgttcctaagcctgtcacagccgcggcggcagacagcagttgaaagtttccagggttcttcccttccacgtgctgtagataacccgggctccggggccttcgggtgggtgcctccgtgaatgccccttcaccacacccctgagaagatatcccagggtgggccgaagggaatattagtcagagagggaatacacaattctttcagactaaacttaattctactcccgaatgaatccggggtgaaagttgtaacaggaggaaatctaagcgtccaagcgaacaaggagcgaggcattttcctcaagcgttccagctccaggacctcaccgagaagcgcacaaagcgcctattaaccgtgggcgcaaacaggtgcctgagcgtggccggaaagaccctctatacattcggagaaatccgcgggggcggacgccgcccatgccccgaaggggggaagcgcaagaggggacccagcttttgtgacaaggatctcctccccgtgggaagatcatcgccttgaagaggcaaccaccaggttttgcaagagtacgcagaccacatgtgtttcatctcaatgtgaggcatttaccgacacagaaaaccccgcagaagggaccagaagccccgcccgtttgactccaagaaaccattccagcgcttatggggggccttaagaggaatcggtaaaaaaacccgggggggacaattcccccctttgtgttccccccaaggtaagacacccaggaacggcatatggcataacatggggcctataaaacgtgttccggagacaacagaaggttcctacggggaaacacgagaaggacagcaaataagcggacaccagcactccggggctaag

SEQ ID NO: 718914 - DNA, 405 bp, Homo sapiens
gtggaatgtggttagccaccacggcagcagcggtccccacagtaaccttgtggaatgtggttagtcaccatggcagcagtggtccccacagtaaccctgtggaatgtggttagccaccatggggtccccacagtaaccctgtggaatgtggttagccaccatggcagcagcggtccccacagtaaccctgtggaatgtggttagccaccatggggtccccacagtaaccctgtggaatgtggttagccaccatggcagcagcggtccccacagtaaccctgttgaatgtggtaagccaccatggggtccccacagtaaccctgttgaatgtggtaagccaccatggggtccccacagtaaccctgtggaatgtggttagccaccatggggtccccacgtcgacgc

SEQ ID NO: 718915 - DNA, 1067 bp, Homo sapiens
  misc_feature (92)..(92): n is a, c, g, or t
  misc_feature (173)..(173): n is a, c, g, or t
  misc_feature (442)..(442): n is a, c, g, or t
  misc_feature (459)..(459): n is a, c, g, or t
  misc_feature (464)..(464): n is a, c, g, or t
  misc_feature (518)..(519): n is a, c, g, or t
  misc_feature (529)..(530): n is a, c, g, or t
  misc_feature (570)..(570): n is a, c, g, or t
  misc_feature (594)..(594): n is a, c, g, or t
  misc_feature (598)..(598): n is a, c, g, or t
  misc_feature (600)..(600): n is a, c, g, or t
  misc_feature (620)..(621): n is a, c, g, or t
  misc_feature (646)..(646): n is a, c, g, or t
  misc_feature (662)..(662): n is a, c, g, or t
  misc_feature (667)..(668): n is a, c, g, or t
  misc_feature (678)..(678): n is a, c, g, or t
  misc_feature (684)..(684): n is a, c, g, or t
  misc_feature (688)..(688): n is a, c, g, or t
  misc_feature (699)..(699): n is a, c, g, or t
  misc_feature (703)..(704): n is a, c, g, or t
  misc_feature (715)..(715): n is a, c, g, or t
  misc_feature (721)..(722): n is a, c, g, or t
  misc_feature (727)..(727): n is a, c, g, or t
  misc_feature (729)..(729): n is a, c, g, or t
  misc_feature (736)..(736): n is a, c, g, or t
  misc_feature (738)..(738): n is a, c, g, or t
  misc_feature (758)..(758): n is a, c, g, or t
  misc_feature (761)..(761): n is a, c, g, or t
  misc_feature (763)..(763): n is a, c, g, or t
  misc_feature (766)..(766): n is a, c, g, or t
  misc_feature (771)..(771): n is a, c, g, or t
  misc_feature (778)..(778): n is a, c, g, or t
ggcggagggtgcgtgcgggccgcggcagccgaacaaaggagcaggggcgccgccgcagggacccgccacccacctcccggggccggcagcgncctctcgtctactgccaccatgaccgccaatcggcacagcccgaggcggttgcagatccagttcggcctcatcaactgcgngcaacaagtacctgacggccgaggcgttcgggttcaatggtgaacgcgtccgccagcagcctgaagaagaagcagatctggacgctggagcagccccctgacgaggcgggcagcgcggccgtgtgcctgcgcagccacctgggccgctacctggcggcggacaaggacggcaaactgtgacctgcgagcgcgaggtgcccggtcccgactgccgtttcctcatcgtggcgcacgacgacggtcgctggtcgctgcagtccgaggcgcancggcgctacttcggcgnggacngaggaccggctgtcctgcttcgcgcagacggtgtcccccgccgagaagtggagnngtgcacatcnncatgcaccctcaggtcaacatctacagcgtcacccgtaangcgctacgcgcacctgagcgcgcnggcngncgacgagatcgccgtggacnngacgtgccctggggcgtcgactcgntcatcacctcggcttncaggnncagggctacngcgtgnagancggctgacacngttnntgggccacganggcgcnnggtgngngcccgancnggcatggtaacgctggagtncgncnggnagggncttcggnatgcgaggcggactgggccgacgggaccagggagcccaaagggggcagggcaccaggttggcaaggaaaaggcctttggccgggcccaagtgtgcccagtacagtagcaggggccacaacgcagggtccagcccagggagtgctgctgacactatgaggcaagggagtaaacccgaggacatgcccgaccacgtgctctcaaccgcagattgcgtaggcccgggtgcaacagaaagagtcgattggggtgccaccgtgcagagttatcccagttcggcggaaaagcacg

SEQ ID NO: 718916 - DNA, 602 bp, Homo sapiens
  misc_feature (99)..(99): n is a, c, g, or t
  misc_feature (159)..(159): n is a, c, g, or t
gagcctgggttatttaataaagaaaagcttggcttgtccagaacacttaacaaagttcaggatcaatttaggtaaaagagatgagtgagacaccagcgnttagtgcagggaccataggctcatacattctaggctttatagtacacttactgtgatctncatgcagctctcacactttagcatacaatgagactatatatttttggcagaagggatctatcaaaagtagccttggactatgaggaatcgtattttaaccaccaggcagtccaaggaattatttttaaagggacagctgagtatttcacgtatatactattaaggcatctaaatttttggtgttttcagtatataattttactgctactttttattcttttttttcatattgtacaactatgatattaggtattaagcgacgtaattctttctctactagtgaaccagtttatttcacttagcaaactctaaattgagggaaatatataatctgagaacacacagaaaaatatattgaaaaaccaatagagaattattttaaccatcataaaactcatctaattaatgatagttttaattaaaaaaggtatcgaagaaatggt

SEQ ID NO: 718917 - DNA, 844 bp, Homo sapiens
aagattcctccgctcctctggagtgcacgtgtgtgtgtgtgtgtgtgtgtgtgtgtgtgtacagacccacacacactgactctgtgtacacacacacgggccctggaccaagatgtgagggtctccacgtgacaaaggaaatgagtagaacaatatcaacatgagttctctccctctgaggcctcgacaacagagcgcgtcaagagcacacgatctaacatcataccactcttatataaaagccaaacagcccaaagtgcgacatcgtcgccaacgtggacacgagtctgcaggggataatgctacacggagactacatccagaaggaatcgagctggcaggaagacggcagggtggggggtgaagcccacgacgttcacagaccaaacgacgaaggccagacgaggacgagcacacgcacaccgaacacaagacacaccaccagctgtgcgaccagaagcaggggtggcagcaaacgaagcatggccaagaccatctaaagctgaaccaagaactaccctgacatcctccaacacacacatgatacaccatataagcaaagtggaggcatccctatacagcgaccaataaaaagggggcccccaagaagcaagagagctagagggcgcacggcagaggccaacacacccctgccacaagaaccatagagaaagcagagacacaaaaagttgccccacacgtctgctagcacatcaccacaaggaggagcacgaaacaatcccaagtgggtgatacccacccgaaagaagagcaaaccacggaccaaatagcaccaccaacacgagaaaggacacacccatacactcactcacaaacaaaaaga

SEQ ID NO: 718918 - DNA, 763 bp, Homo sapiens
  misc_feature (92)..(92): n is a, c, g, or t
  misc_feature (173)..(173): n is a, c, g, or t
  misc_feature (442)..(442): n is a, c, g, or t
  misc_feature (459)..(459): n is a, c, g, or t
  misc_feature (464)..(464): n is a, c, g, or t
  misc_feature (537)..(537): n is a, c, g, or t
  misc_feature (544)..(544): n is a, c, g, or t
  misc_feature (571)..(571): n is a, c, g, or t
  misc_feature (586)..(586): n is a, c, g, or t
  misc_feature (604)..(604): n is a, c, g, or t
  misc_feature (653)..(653): n is a, c, g, or t
  misc_feature (670)..(670): n is a, c, g, or t
  misc_feature (729)..(729): n is a, c, g, or t
ggcggagggtgcgtgcgggccgcggcagccgaacaaaggagcaggggcgccgccgcagggacccgccacccacctcccggggccggcagcgncctctcgtctactgccaccatgaccgccaatcggcacagcccgaggcggttgcagatccagttcggcctcatcaactgcgngcaacaagtacctgacggccgaggcgttcgggttcaatggtgaacgcgtccgccagcagcctgaagaagaagcagatctggacgctggagcagccccctgacgaggcgggcagcgcggccgtgtgcctgcgcagccacctgggccgctacctggcggcggacaaggacggcaaactgtgacctgcgagcgcgaggtgcccggtcccgactgccgtttcctcatcgtggcgcacgacgacggtcgctggtcgctgcagtccgaggcgcancggcgctacttcggcgnggacngaggaccggctgtcctgcttcgcgcagacggtgtacaagaagagaagtggagagtgaaaatagaaatgaaaantaaggtnaaaatataaagagtaaaaagtaagagntaagagaaaatgagngagaggaaggaagaaganatagaagtggaaagagaagtgaaatggggagtagaatagataataaaantagaattaaaggaaaanagataaagagtgaagaaagaagaaaaaagattaatgagaaaagaagggagaatggtggnggaaaagagaaggaaaatggataaaagatggagt

SEQ ID NO: 718919 - DNA, 147 bp, Homo sapiens
gctgaccacaaggactttagaggccaaggctaaatcgcttgagctcaggagttcaagaccagcctgggctgaacatggtgagaccccttctctaaaaaaaacacaaaaactagctaggcatgctggtacacccccatagtcccagca

SEQ ID NO: 718920 - DNA, 319 bp, Homo sapiens
  misc_feature (1)..(1): n is a, c, g, or t
nccggactagagcctcaatcaaaggtcaaaggttaaaagtaggacaaacatggagccttcctgtggcaggagagacaacaaagcgctattatcctaagagtacaagagaagtgtacagcctcacctgaatatttatatagataatagatggactatagcctcaaactaccctacttatctagagagttgacagcatcctgaatggaattgctatgaaacgtaaacccctgagagcttcctctataaacatattaacggcaacgctagtataaattatcagggcagactactataaattaaaataaacaggccacaaaat

SEQ ID NO: 718921 - DNA, 426 bp, Homo sapiens
caggagggtgatggcgagcgccgccgggaccctgaagcgcctgaccctggagctcggcggcaacgacgcggccatcgtgctcgaggacgtcgacccgaaggaggtggcgccgaagatctatgccgccgccatggccaacaccggtcaggcgtgcatcgccatcaagcggctctatgtccacgactcgatctatgatgccgtctgcgacgagctgggcaagctcgcgcgggagacggtcgtcggcgacgggctggactcgaagacgcagatgggcccgctccagaacccggcgcaattcgagaaggtgaagggattcctggacgacgcgcggcagaacggcaaggtcgtcgccgggggccgggtcgtcgagcgggagggttacttcgtctcgccgaccatcgtgcgggacatctccgacgacgcccg

SEQ ID NO: 718922 - DNA, 111 bp, Homo sapiens
gagagcatgcgtcttccagcctccacatcagcgttatggatgccttcctctaggtccgtcaggtggcgatagacgttgctgtccgaggcgccatacggtgcgttggcccaa

SEQ ID NO: 718923 - DNA, 615 bp, Homo sapiens
  misc_feature (4)..(4): n is a, c, g, or t
  misc_feature (6)..(6): n is a, c, g, or t
  misc_feature (10)..(10): n is a, c, g, or t
  misc_feature (12)..(12): n is a, c, g, or t
  misc_feature (16)..(16): n is a, c, g, or t
  misc_feature (37)..(37): n is a, c, g, or t
  misc_feature (116)..(116): n is a, c, g, or t
  misc_feature (132)..(132): n is a, c, g, or t
  misc_feature (135)..(135): n is a, c, g, or t
  misc_feature (160)..(160): n is a, c, g, or t
  misc_feature (179)..(179): n is a, c, g, or t
  misc_feature (187)..(187): n is a, c, g, or t
  misc_feature (198)..(198): n is a, c, g, or t
  misc_feature (229)..(229): n is a, c, g, or t
  misc_feature (245)..(245): n is a, c, g, or t
  misc_feature (266)..(266): n is a, c, g, or t
  misc_feature (273)..(273): n is a, c, g, or t
  misc_feature (295)..(295): n is a, c, g, or t
  misc_feature (343)..(344): n is a, c, g, or t
  misc_feature (347)..(347): n is a, c, g, or t
  misc_feature (352)..(352): n is a, c, g, or t
  misc_feature (364)..(364): n is a, c, g, or t
  misc_feature (371)..(371): n is a, c, g, or t
  misc_feature (388)..(388): n is a, c, g, or t
  misc_feature (394)..(394): n is a, c, g, or t
  misc_feature (407)..(407): n is a, c, g, or t
  misc_feature (413)..(413): n is a, c, g, or t
  misc_feature (449)..(449): n is a, c, g, or t
  misc_feature (452)..(452): n is a, c, g, or t
  misc_feature (469)..(469): n is a, c, g, or t
  misc_feature (474)..(474): n is a, c, g, or t
  misc_feature (481)..(481): n is a, c, g, or t
  misc_feature (493)..(493): n is a, c, g, or t
  misc_feature (522)..(522): n is a, c, g, or t
  misc_feature (587)..(587): n is a, c, g, or t
tacnancaananaaanctctttttattgggacttcanaatctttttcaattgaagaggatttcctttgtcacccagcagggtcctggaacttcttggctggaattcaaaaaaccanagttctggttacctanaanatctattctttacgtagtagcttanaagcctcaaaggccacccncacctgangcttggccggntctatgccccccaaaaaagtcttcatgtccncctgcttgtctaaatnagcccctgcttgaagtaaaanatctgcnacatccgtttgtccattttcanaagcataggttaaggctgtgtctcctgttgctgttgtggcatgcacannagngccanaagccagcaaanatttaancaattccaggggtcccncctganaagcctccatcanaggggnggggcagccaagttctatatcagcccctgccttaanaanaaagtctgcaacttcanaaaancctccanagcaagccaaantaaaagcagtttcttgagtttcttctgtntgggcatttatatttgctccttgtgctaagagtagtgccaccatttcttcatgtccttcccgggnagcttccatcaagggagtgtttccttca

SEQ ID NO: 718924 - DNA, 661 bp, Homo sapiens
gtaaagtgggttattgtaaaaaaaccatgccccccaaccatgaaacaacttgatagtgcttgataaaacaggcaaaaaaccctttaaaggggggggggccgtttaaaaatgggcccacaattgggcgaaaattttggaaaaaaatatgttgccaccccattttagaaggccccccctggggggggaattttttgttgagaaaacccccgcctaaaaaaaaccccgggccccaaaaggttttgaaacccccaagtggggcaaggttccaaaaaaaaaaaccacggtcgtaatcaccctcccccgattaaaaaaccaaccttttaagcccccgcccccccagggggggggcccgcgacccaaaattcccttatggggggggaacaaaaattcaggggcccgtataaaacaaccggtgacgtggaaaaccccgggggaaccccacaaataaagcggtggaaaaaacccccctttcccacgggtggaaaaaaaaaaaaaacgccccccagattcccctttccaaaagtgtgcccccccgaaggggggaaagggaaaaattagccccctaaatttttggaaaaaaacgccgggaatattttttgtaaaaaaacccttttttttaaaaccaacaggggccaggaaagggcaaaaacccctttataaa

SEQ ID NO: 718925 - DNA, 166 bp, Homo sapiens
tctaggaggatcccccctcgctttaagtagctccccgggtacccacacctaatgccccctgtggaagcggtctgctccttggcttggagggtgggaaggggagacaaaaatcacagctttggaacagtggttgggaagttatggggaactttggtcaaggtatgaa

SEQ ID NO: 718926 - DNA, 355 bp, Homo sapiens
gttagagtcgtatcaacattcatgtaaatttcatgttttcgcacactccaaacatattgcactgatatttctcgaaacctctaaatatctctatactataaataaacatctgacgaagttaaaagtcaaaatgcattaagatgattttactcacatattatcatcattacactattcacttttaaacaatccaactgagatcaggactctctaattaacgaccgggtgcagtggctcacacctgtaatcccagcaattggggaggcagaggcagatagatggcttgagcctaggagttcaagacaagcctgggcaacatggcaaaacctcgtccctcttttaaaaaaaacacaaa

SEQ ID NO: 718927 - DNA, 702 bp, Homo sapiens
agcgggatgctgcttgcggagacgtggtcaagggagcgccgggcggtagccgccgcggtccgtggctcggtaagtaccaggatcgggtcttggcagcgccgaagggcacgtccgaggatgccgctgctccgggggcccgcactcgtcggggtaggagccccggcgcctctccaccacgcgtgttgggactgagccgggaggatcgcgcgctggcctgccgccgaaggaccccttcgactcctctcctccatcgtgctcttacctgatgtccccagtcccgagacatctgtggatgtgggcccgtcgtattcgccctttgcgtgtacgatggtaagtcgatgctcgcgtgatgacagcgggctctactttctgcgctcgttctacctcacgggtattcttggcctggcacgcgtctccttggtgcttgactggagtcgcacgttccgtggtgtctccctgtgtggcgacttggggccgttcggtacatttgcggaagcgtgcattgattgcgcgcgcatacgaacaacgcgtacggtaggttaacacactaaagcgtgaaatggcttcgcgtttaggcggttgtacatgctcccgctgttaatttccccttagggcgtaggaattagaagccagggggacagccgaacgggacaagaacttggcctaataagggaccactttcaacggcctgggaatgacgac

SEQ ID NO: 718928 - DNA, 285 bp, Homo sapiens
aattagcttggcacaggtaaaaagaactttaattaaaaagtaaattgcagtttgagtgcacctggtaatgtgtgcaatggccttaagccaattaagaagaggtttcccttttatcctttccttcaccaggttgaatgtattgcttggcttttacagaaagaagaaagagaaaaagcaaaaagcgacaaggcatcttcataagagaccccacctcccgggtcaggagatgaggcgggatgtcaaggttgtgcgtcgcagcagccgggcctcctgtgcgcagctaat

SEQ ID NO: 718929 - DNA, 242 bp, Homo sapiens
tccttgcttttatttttattattgatttattcaacaagcatcgttattgaaaatttggtgcaaagtgggtcaaacaattttttctataggcctgaagacctgcattctgagatttctgactactagaattgttctgataaactttcattatgttcagtccagttgattgcattcattggacttcagccgcacaactttcactccttgtaggatgaaatgcgcagagtatagagagctaatgt

SEQ ID NO: 718930 - DNA, 236 bp, Homo sapiens
ctctgagctgccgtcagcaactgagtattcattcatgagcgctcaaccagcacatgggatgatcacgagaagacttgcgaggggaagtaatacatctctgcatcggatcctccaattatcctctgtttcgcttcaaagggttctctggggactccagagacggtaacacatttcggacgctccgggcccagcacctcatacacccagctcccgttaaggagaacgcgtcaaaatcg

SEQ ID NO: 718931 - DNA, 801 bp, Homo sapiens
gagtgaacaacaagtcttactgtaaagacatgagcacaaccccgtctctttgtctccgttgcgtcaagatcattcacttcttacaaagtctaaatgttgtttcacacatgaccatgtacagagagcaaacgcagagattcagagatgaaatcaaatatgggcaggagatccctaaaccaatacaagaccctaagaaccttggaacactaggggtaggcccctttcatcgcactattactagacttgtaatcaatcggcacaccgtttcctgtctcgtatggcggttatagtcttttgactaatgtattactacaagagattgattctcactataccggttatatgattaaccacgggtgtgatgctctcgtacacatctccccgatgctagtaatcacgtcatgaaactcagtcgccgattagtggcctgatttacgcatctggactcgccgaaagagggaaaacggagatctttctccattgcaaagaggttggatctgacgtatcttactaggcatatgggttcaacaggtttcctaaaaatccgtaaatattccagtattgtatagcttatcatgatccctattacatactaaacatgacagtttacatacctccattgactccagagacgacgtacaaaaattttgaacttcccctttgccttagaggggccggcgcattgtgaagcaccacgtaattcggaaggaaaaagccatggggccgtagatggggccggtaggggccaggcaaaggccttccaaaaaatgcaaaaggcaaagtttggggacacggtaagga

SEQ ID NO: 718932 - DNA, 764 bp, Homo sapiens
cgcagtggctcacacgtataatcccagcactttgggaggccaaggcgggtggatcacctgaggtcaggatttcaagaccagcctggccaatgtggtgaaaccccgtctctactaaaaatacaaaaatcagccaggtgcggtggcacacgcctatataatcccagctactcaggaagctgaggcaggagaatcgcttgaacttgggaggtggaggttgcaataagccaagactggcactactggcactccagcctgggcaacagagcaagattctggtctcaaaaaaaaaaaaatttaattggaaccacttgtttaaattgggccaacattgcccttttaaggggtgtccaccattcacttagtcaagggaaatggcagattattccactttggagatactactttccaacaattcaggagtggctaacctggaaagactggacaatttgaaggcaccagtccgtgcaaggctccttccatgtacgcgtaaaagggccacttgagacatttagaacgattaacttgccaaaaactcatagtctggaagggagacttaggcaagtgacagggtccagggtggaatcagggataaatatttagaatactaggcaaaacaagttcaactcagtcatcaggtccagggaaacacaactctgggtgctagacaacgtactcaaaattactacctaaattccagcgggtgaatcctacgcatatggccataagggcaaccttttacaggttatctaaaatttccattttaa

SEQ ID NO: 718933 - DNA, 422 bp, Homo sapiens
  misc_feature (410)..(410): n is a, c, g, or t
aagagggaatagggagtgaaagggaagtgagtgtggttactaagggcaacatgagggatccttgtggtgaagaaaatgttctatatcttgactatatcacgtgaatatcttggttctgatagtgtattatagtccaatttctccaaactacaagtaaatgtacaattatctcaaatggaaagttagttaataaaacattgtctattctactatttttcaacctctccttcctagagactgaaagaggactgcctgtttaaaaccttgaagctgatgggaggagggtactcctaagaacgtgcaaccacatgctggtcttcatgatgatttgcagccccaattcacaccacctggtggtaaaaaaaaaacaaaactccaagccaagaattaaattgaaaatggttctaaantagtgatattcc

SEQ ID NO: 718934 - DNA, 1342 bp, Homo sapiens
  misc_feature (510)..(510): n is a, c, g, or t
ggagagaactagtctcgagttttttttttatttttgggtaacggcagcactttaatttttccttacacaatgactttttgctggggcctaatgtcccacttacacagtaaaaacccaaaatttgtggtcatctcttcaaaaaatcgaaaattggcgtacaaaaaaacaccttcctataatttaagaatgatatcactatttcccgggcgtaacatgcaaaccgtttccaactcaaagcaggtacacagcccccggtgtacctggccaagcgactatcgagctaagaagggaaatctgggtgccctaccggtcttaggactcttatccacccctggacaagacccgcaaggatcaaaacaacttgggtcttcttggccagcctcttaagaagaaatccccaagaacacttcagcctctagacactgttaattccccaggggagaccccagttaatcttacaaataccgaaggggccaacaaatcccgcgcacaacacagtgcttcctccanacacttcccaggttggctgaggataatccgaagattacacaagcgttctcagaggggcagacaattatccctattatgcagaaagcggctaaactccccgaggtttcggtgagaaggcttacgcattgacgtgtgtagtcgcaatttgcgccacaggggcgacacaaattttttactaatttcttcacaaaatataagcgcccccagagtgcacgaggcaaagaatgtggctataagcagccattttggtggtcgtgtgaagactcccggtttataaggcaagggcgatttatgtgcaggggctggacaccagacattgcgacagtgggtccccccccaacattgtggattgtgagtagccctcccgatggcattatgacaacaactcccgacacttctgtgggcgttaccacactggcgtcgtgcgcaccacagtgcagcagcgccccagtagtaaatgagataccccacccacgcagcgaattacagaaccacgacgaagaggaatacacttagcgaccccccactgatggaccggagagtacggcacgagcagtcagacaatggatcgcgaaccgaccaccaacgacggagtgacctcagtagcgcgccccacacgggccagggggaacatactgcccgggttgtgagcaagctcccagagttcgacaacaaatcgcccgcgggagcaaaccaaacgggtcaggagtgaccgccgccgcacaacagcgacccacgaggatggagccgccacacagcggtcatcaacgacgcggaggacgactcccacacagcagaccgccactaccgaatacacaacgaacgttgaacg

SEQ ID NO: 718935 - DNA, 110 bp, Homo sapiens
cagagtttcgccatgcccgggcccaagaagcacttaagtcgtttttgcaccaccgagcattgaatcctttaaacactaacgggggtatttgcccctcttccatcgcaagt

SEQ ID NO: 718936 - DNA, 711 bp, Homo sapiens
atacaaataaaaaacaatacagtataacaactatttacatagcatttacatttattaggtatttttagtaacctagagaagatttaaagtatttgggaggatgtgcgtaggctgtatataactgccataccactttatataagcaacccaattttgatatccacagggggcctggaccaatcccctttggataccaaaggaccactgtgaatagaaactcgagcactcataagtgaagtagtgatggcagtagccagagcggtattaatattaggaatagtagtagcaatagtagttaccaactatgcccccaggtttactccaggctcatgcagagtttgatacctgcactgcctctcctaaggcttggcaggaattagtagtagtgacagtagtaacaggcttctattttttttttttttttttgttaaaaattgggaaactgaaagttataaaggttagaaaatggttttcaaatcaggcagttggtacattgggaggagtgtcgcattgggaccaatcccgtggactcttaaacactatgtctatcacagtttgtgaagatacacaggttagggagaggaagctaatggtcttaaagatagaggtgtacacatagtcatatgtgacgaaagactttttgagattaaccgataatatataaaggtagataattaaatcctgtatatacacagaatagatgctagaata

SEQ ID NO: 718937 - DNA, 955 bp, Homo sapiens
  misc_feature (955)..(955): n is a, c, g, or t
agcagtcagacagcgagggccggcggggcagggggacgccccgtcggggcacccccccggctctgagccgccgggggccggctcggcccggagcggaggaaggagtcgcctgaggagcagcctgaggccccagagtctgagacgagccgcgcgccccgccatgcggggaggagggggaggaggagcgggaggagggacgagcttgctcgggagacgagcgaacaagaacttttgagacttttcctgttgccgctgggagccgcgaggcgcggggacctctttggcgcagacgctgccccgcgaggagggcgggacttgtgggaccccagaccggcctccctttgccgccggggacgcttgctccctccctggcccctttaagcgaggggtgtcccatcgagggcggcaccccaaatttcggggaaccgaggcccttcgggagaggtcggccagaccaaccggggggctttccgctgcaaaaaggactttatccccacaaagaaccctcggagagggacaagccccgccttgaaacggccgggcccttcaatccccccgggcctttgttctcgtgtgaagccccacggcgcattccctatgaccccttttctccctcccgagggacgaacgagggatcatccatcttccgggaccctgtggccaacgagagattcccccgttaattttcacaggaaagcgcgcaccgcagccgtttttcttggcgtaccgccaaggaattcgggagcacacagatacataaggggtaaaatataccccgggtgcgaggactcacctgtaggagaaccacgcccccgaggttcgagagggcgttcacgccttcagcgaacgttgcggcccatttctaccctttaaaggacccctcacacgaggttttacccattccgaagacgcactatccatacctggtttcatggccgtaggaagagaccacgcn

SEQ ID NO: 718938 - DNA, 860 bp, Homo sapiens
ctagacagcgcttcagcattatgcttggaggccgtttcaaacagtgaaatcaacaacaagaagctcaaaactgcaaaagaagtggcactatagagaccatgagaagactggtttgcaggttgagagtaggaacaagaaggcagcgtggggccctgcatggcctccgctgggaggcgatggctcaaattgttgccctactctgcacatgttttcctgtgactgtgaaagcaacacgagtattgattcgggggttaaaaatacattttaacaagcagaaaagttcacaaatatgaaatagtggctagtgaggaccacccccatgctggagctgcagacagaggcttttgtgagtgcaaggcttgctcctatcccgggagcttctggttgccaccagcaccttgtaagccagggagtggtgtcacctgtactgtagcaaaagcaccttttctaaatgtgaagtatggcttgaagagaggaagatggaagatggctgtgttagggatgaagcaaggatgggggtggattgaccaagctgggccagaggtgcgaggagctgatctgcgagccctgtgtgcctgtgagtcctggcggagtggccgtgcgtggtgacagggaggaggcatccaggacagcacccacgttcccgcctgaggcacatgagggtggatgacagggttcggggccctagccttcaagtcagacacacctgagttcaaatccagactccaccactgactggctatgtagccttagacatgttccttcacttccctaagcgtccattttctcatgtccaatacatagattactatgccataggaatattaaatcactcagtgattttgaggttaaaaaaaaaa

SEQ ID NO: 718939 - DNA, 724 bp, Homo sapiens
ctagacagcgcttcagcattatgcttggaggccgtttcaaacagtgaaatcaacaacaagaagctcaaaactgcaaaagaagtggcactatagagaccatgagaagactggtttgcaggttgagagtaggaacaagaaggcagcgtggggccctgcatggcctccgctgggaggcgatggctcaaattgttgccctactctgcacatgttttcctgtgactgtgaaagcaacacgagtattgattcgggggttaaaaatacattttaacaagcagaaaagttcacaaatatgaaatagtggctagtgaggaccacccccatgctggagctgcagacagaggcttttgtgagtgcaaggcttgctcctatcccgggagcttctggttgccaccagcaccttgtaagccagggagtggtgtcacctgtactgtagcaaaagcaccttttctaaatgtgaagtatggcttgaagagaggagaggaggcatccaggacagcacccacgttcccgcctgaggcacatgagggtggatgacagggttcggggccctagccttcaagtcagacacacctgagttcaaatccagactccaccactgactggctatgtagccttagacatgttccttcacttccctaagcgtccattttctcatgtccaatacatagattactatgccataggaatattaaatcactcagtgattttgaggttaaaaaaaaaa

SEQ ID NO: 718940 - DNA, 426 bp, Homo sapiens
  misc_feature (31)..(31): n is a, c, g, or t
  misc_feature (34)..(34): n is a, c, g, or t
ttagagtagcaatcatatacatacaagtatnaancttgagtatttacaaatgtattcagcataaatgtaacagcaaggatgggggtggattgaccaagctgggccagaggtgcgaggagctgatctgcgagccctgtgtgcctgtgagtcctggcggagtggccgtgcgtggtgacagggaggaggcatccaggacagcacccacgttcccgcctgaggcacatgagggtggatgacagggttcggggccctagccttcaagtcagacacacctgagttcaaatccagactccaccactgactggctatgtagccttagacatgttccttcacttccctaagcgtccattttctcatgtccaatacatagattactatgccataggaatattaaatcactcagtgattttgaggttaaaaaaaaaa

SEQ ID NO: 718941 - DNA, 219 bp, Homo sapiens
atgacgacgacactgatggcggactttgtgggtagaaactaaccgaaggtgtggacgacagacgacaggagcatgtgtataattcagggcctaagacatgaagaggaacactaggagatggttctcacattgtccccaacaagacacaacaaacaactatgtcagggacctactcacgtaccctctgacatgacgagtcctatccactatccagtctac

SEQ ID NO: 718942 - DNA, 261 bp, Homo sapiens
aaaaaggtttccaaaaaaaaaactaatttttttttttatttaaaaaaatcccaattttttaaaatccccaattggggccccgggaaaattcctttccgggcctttttttgggggaaaaaagcccaggaaaaggattttttagggttttggaattttaggtttccacccgatttttttttgcaattttttgagcccgaaccccttttagaagggaaattaaaggctttaaaaggtaaaaaaaaaaaaaaattttttttttta

SEQ ID NO: 718943 - DNA, 112 bp, Homo sapiens
tgaaggtagggactgtttgtcttgggacttcgccgccagtccttagaacagtgtctgggccacagtgtgttctctcatatttgttgctggaatccttcaatgaactaaaaaa

SEQ ID NO: 718944 - DNA, 290 bp, Homo sapiens
tgctttggccttcaaaagtgctgggattacaggccagcccttctttttacgagacaggatctccccctttcacccagcgctaccaggctggtgtgcagtggccgtgatcatagcttactgcagcctcaaactcctgagctcaagcaatcctaccacctcaacctcccaagtatctgagattacaggtatgcaccaccatgcctgcctaattcttaaaatttttttagagatggggtctcactgtgttgcccaaattggtctcaaactcctggtctcaagtgatcctccca

SEQ ID NO: 718945 - DNA, 351 bp, Homo sapiens
  misc_feature (108)..(108): n is a, c, g, or t
  misc_feature (140)..(140): n is a, c, g, or t
  misc_feature (328)..(328): n is a, c, g, or t
  misc_feature (339)..(339): n is a, c, g, or t
ttacaaggtaaagctgcaagtggtgatttaaaagttgcagcaagtcatccataatctagctaaaatcattgatgaatctttagttgccacactcaacaacaggttatnaatatagatgaaatagccttctgctgtaagangatgccatctaagactttcatagctagagataagatatcaatgcctggcttcaaagcttaggctgactcatgagttagtggctaatgcagctggtaactttaaattgaagccattgctccatttacccttttgtaaatcataggtcccttaaggaattatgctggaatttaactctttcctatggtcncataaatgganacaaccaaagct

SEQ ID NO: 718946 - DNA, 493 bp, Homo sapiens
ggaatgactgcgcttcactagaacaacgtgtatacttcttatgtcgtgaaataccctcgagctgtttcccgagcatagaccactgtctttacagaacgaagcagagcggcgttcgttcctgatgtgacagacaagattctaggagtttggaaagggtgaagagactgggtcagcgaaaggaacattccggtctttatgttgggatgcaacgtatagatacatgggatgagagccaaaagagccggcagaggtttgtcatcgtgctcgcaaggaaactgccggtagctgatcccgtaaaggatacacatacctagagcggagcctaaagatgcatccagcatgacgggtggagccacgatgcttggactcgagctctgctcctgtgcgttccgtgatcaatggcttatactacctgcacctcagtttttcccgggcaaaaaaggaagcttgctgccggtgcgttggcacctgccttaaagtgccagctactcag

SEQ ID NO: 718947 - DNA, 309 bp, Homo sapiens
gttcgggaaggagttcagtggtcctatcatggctcattatagcctcaaactcccaggctcaagcaatcctaccatgtcagccttcccagtagctgggactacagctgcaggacaagttcgagcatcttaaaatgattcaacaggaggagataaggaagctcgaggaagagaaaaaacaactggaaagagaaatcatagatttttataaaatgaaagctgcctctgaagcactgcagactcagctgagcactgatacaaagaaagacaaacatcgtaagaagcaatagtttctcttactattctgagagc

SEQ ID NO: 718948 - DNA, 275 bp, Homo sapiens
gctcggcatcccaaagtgctgggattacaggcttgagccaccgcgcccggccaatttgtgtatttttttagtagagatttcactatgttggccaggctggtctcgaactcttgacctcaggcagtcctccttccttggcctcccaaagtgcttggattacaggcatgagccaccgtgcccggccctcagtttcctcatctaaaacagaggatttggtagtgctgacccctcagcgggctcctgggagagtccggtgagaaattgcacatcgacac

SEQ ID NO: 718949 - DNA, 166 bp, Homo sapiens
ctgagacagagtcttgcactctcgctcaggctggactgaaacaatcctcccacctgggcctcccaaagtgttgggattacaggcacctgccatcatgcccaactaattttagttattttagtagagtcacggtttcaccactcgtagttgtctttcgtttgttccg

SEQ ID NO: 718950 - DNA, 197 bp, Homo sapiens
atgatcagtgtgtcagcgtggggagcatttcaaatctgctagccatttgaagcttacattaagtatagtcaccgtactatgctatcaagcattaaaacttattccttctatctaactgtatgtgcgtatctacccattaacctaccttccttcatcgccccaccctgtacacccactacccagcctctggtaactat

SEQ ID NO: 718951 - DNA, 291 bp, Homo sapiens
acaaccatagctgggggcaattgcttaaagtcatttcgttcccgactagctgccttgcacattatcttcattttcctggaatttgatacagagagcaatttatagccaattgatagcttatgctgtttcaatgtaaattcgtggtacataacttaggaactgcctcttctttttctttgaaaacctacttataactgttgctactaagaatgtgtatctgtcccggacaacttgtccccatacagttgggttctaaccctcatgcttggcccaaccaaactctctacttat

SEQ ID NO: 718952 - DNA, 647 bp, Homo sapiens
  misc_feature (269)..(269): n is a, c, g, or t
  misc_feature (295)..(295): n is a, c, g, or t
cccggaaaccagttgtttgggcaggatagatgtgagtcctccgggggtgtccagggcaaagggtacaaagggggtaccagtggtgggccacaaaaaaattgcccccaagacccacagggccctggcaaaaggggcctggatggggcaaggcatctgctccgtgtagctttttctgtgggcgcggtgggggagaaagggttcatccccgcctttaggtcacacaaaaaatttattagattggcccggggtcctcttcaagggcgggaaantggtcaagaacaatgcctcccctggntattacctattttcaaaaaggaacaaccccctgggggggtttggcccctatggggaagggacccaaaactttgtccttcttaaagggtgggtgggggggaccaaaaaagggggggtccccccccccaagtcccttttggggcaaaaaaaaaggcggggtttggagaaaaaatgaccttaaggttatttaccccccccccaaggttgggcctgggcggtttccgaccctgggggggaaaaaagcctttttggggccccttaaaaaaggccgaattgccaaggaaaaagggggtttatgcccgggaccaatttttccggggggggggggtccaaaaaaggtttttttccctgga

SEQ ID NO: 718953 - DNA, 265 bp, Homo sapiens
ggacctggacatcagctgcaaacacccggccacgcactgcacatctgcgaactatcatcttgaagagactgttcctgtttcaacagcatcaccgctaccacgcagtttctgtgaactcagctgagtttttatccaattgaaatagtaatttatgtccttgccttttcccggttcttttccccaagctgctaacttggcaataattcttgctgccatatgaacagtgaagggatcctggcgattcaacataggcagaagcaggaag

SEQ ID NO: 718954 - DNA, 941 bp, Homo sapiens
gatggcgactggcgtactcggcttggagactggcgcggacgtcgtgtccgtagttctctgaaacgggtcacgtagtttcccggtagttcaggctgctcatgaatagaacagcaatgagagccagacagaaggactttgaaaattcagtgaatcaagtgatactcttgaaaaaggatccagagaaacgaagtgaagcataaggaactctacgcgctatataagcaggtccactgaaggaccttgtaacatgcccaaatccaggtgtatttgacttgatcaacaaggcaaatgggaggcatggagatgcccttgcgcaggctgcccaaggaagctgccacggcagaacttatgtggatttggtgtccagagtatgagtccttcattggaatcctctagtcaggtggagcctggaacagacaggaatatgcacactgggtttgaacaactctggtgtgtgacctccgaagatggcatcactaaaggatcatgtaacacatcgcggcccatatgagaaaaatgccataaacactgagatgtatcatgaaattatgcgtgcacttaatagctgccagcaaggatgagtcaggcatcactgtgttagctaggaaatggtgactattacagtagtgggaatggtctgactaacttcacttgatattacccctggtggagtatgagcgaagagagctcacgcaaatcaatgtcggtttgactgctggcactccggcggggggtgttcatgagatcagagtaaacctcctgatgtgtcgcgggcaaaggggtccaatcgcggggatatcatccctactctacctggcttatggatgcgtggcttccatcggcggggcggccttcaatacgcatgtaaacctagagccaactggaaggagtcctgcaacctttcctgataaagccaccggccccatgtatttggaaacacg

SEQ ID NO: 718955 - DNA, 316 bp, Homo sapiens
gggaggggcaatagtcctggtgaagaggaggggggagcggcaccagctggagtggggcctctgccgctgcctcttcctgctgtggtttctccggcttagactgcccctctcacctggcttgtctgtggggagatctttgttctctggctgcttttaagactttctccttaacagtggtttcagcaattcgattgaggcaaaaaggagctgcagaagccatgtctgtagcatttgtggcctccccttctgtataatagcagccatgttttggcctctgcagggctaaggtcctctgagcagctgcttctccacatct

SEQ ID NO: 718956 - DNA, 189 bp, Homo sapiens
atcagttacacacactctgtcgagacgtaaattacggatgagattattcgcatatctacatgcaaacggagcatccatgctctctatttgcctattcatccacgtaggccgaggcatatactacggactcctatactattcctagaacacactgaaaccacttggacgtacgtcctaactaattatacc

SEQ ID NO: 718957 - DNA, 387 bp, Homo sapiens
aaccaaatagacaagccacacaatgatccatgcaagaagacagcccgatacgaatatgaaatggaagacaacaaccatacaaccaaggtaaaaataatagtatagacacatgtactaataaaatactcaagagaatggaaacgataataaacacccagaccgagaatacactgccacctggtcaatttaccaagaccaccttttataccatttgtaaaacctacagctacctacccccgcctctgaaagagactgtattcccaagtctccctacagagttcctgccacctcgtcaagacccacaccagagtctccgtcaacggactcaggctccagctgtggcacaacatagggtttttaacaagaaaaataaagtgaataagcgtg

SEQ ID NO: 718958 - DNA, 695 bp, Homo sapiens
tatggaaaaaatggtattcaaaaccaagattgggcttccagcctgggcaacagggcaaagccccatctctacaaaaaatataaaaattagccaagtgcagtggtgcgtgcctgtggtcccagctacttggggaggctgaggtgggaggatcgcctgagccttaggaggtcgaggcctcagtgagctgtgatcgcaccactgaactccagcctgggtaacagagtgagaccctgtctcaaaaaaaaagatctgagcttgaggggtgctaatgctactgaggtgtcaggtgacatttatttcaggctttctcagctgacagagcaaacagatatatgtgggtatactaacctatgtaaatacacatatctataaatatttctgtatgtcgtaatctgtatctgtgttgagttaaacatgaattcttactgatttcttgagctctgatccattattacatagatcattctaaaccctgtcccttatgtgatctggaaaatctccactccagcaattgagaatcttttaggccgggcgcggtggtcatgcctgtaaatcccagcactttggaggtggatgcaggcagatccacgaggtcaggagatcgaagaccatccctggtaacatggtgaaatcccgtctctactaaaggtgcacaaaaattatctggtgtggtggcggtgctgtgggcccaggaa

SEQ ID NO: 718959 - DNA, 216 bp, Homo sapiens
tttgtggtcgctaggtggatggcgagccgggcagagatgctcctcacctgtacattactgggcaggcaggcagagggactcctcactgtcccagtgcgatgggcggacaggcagagacgctcctcacttcccagacggggtggcggccgggcagaggctgcactctcagcactttgggaggccaaggcaggtggctagataacggttgagcggaga

SEQ ID NO: 718960 - DNA, 928 bp, Homo sapiens
  misc_feature (810)..(810): n is a, c, g, or t
tatgaagtgtttgacttcacttataaaccttctggaatgtgtggttctaggaaggaaaagaaagtttgccagaattttctcatcccaggatttcctgtgtgtgcttccgtgtcagtaatatagactcagtgctcaccctcgtcatctctagagccagatcggatttaaatgttctggatcatccttgtacttaggaaatgggaaatgccaatagtgttttataatctatacatggctcagtgtctccactgcaaaatcaaagggactaggagcaaatttcccagtgatggcaggaattttataggaatgctgaagttttacaaaggatcctgcctttcagagtgtaagcagacagtaacagtaatgagctgctactgtcctgtcacactagcttgggatctttgtcagagctataatttgattcattgggctttataataattgaagcattaatgtatatctgtactttcagaatttacgtaagcttctggattttctgaatatagttctatgtgtctcttccggttgttaccatggtatttttagcataagggcgtacatttgtgagcaccaaggtgtaaaaatgagccctgagtacagtaagtggtgggctgggcgtggaggtacacactgtactctcagtcttggagggtgaggcgtgttatgaatgggacggccatctaggtattggtggcttgccggaggggtcatcatccccggtaagggggtgacacagaacgggtgcgtgagaacccctggaaaggggaacgccaactttgtgggcgccccttctagccaagggctattaangcggcaaagagcgccacagcaaaaccaggaagggaaccgtccgcaaagaaaaaggccacaaaacacacacgaagagacgcaaaaaaacccaggaaacgagcacgatcaacaacacccg

SEQ ID NO: 718961 - DNA, 189 bp, Homo sapiens
tccaggttacgtgatctcctacctcagcagccgagtaactgggactacagacatgccccaccacgcacggtaatttgtatttttagtagagatggcgtttcaccatgttgaccaggctggtctcaaacccctgacctcaagtgatccatctgcctcggcctcccaaagtgctaggatacagtagggaga

SEQ ID NO: 718962 - DNA, 118 bp, Homo sapiens
tgtatcactgaagtctgaggtttcaaaagtgattttttgtcccacaagaagtttcaagcacttaagctagaactttcagtgttaactttgccctaaagaagttaagacattctgtata

SEQ ID NO: 718963 - DNA, 114 bp, Homo sapiens
caagacgatcccggccgtgaactcgaagaccggcaccttaacggtttcactggtgaacaccaaaacgcggtggttcgccgacgagatgccatgcttcgccaaatcgctccgcaa

SEQ ID NO: 718964 - DNA, 468 bp, Homo sapiens
aagagcatgtgtaaggatgtagactcgggagaaagcacgacatggttagtgaatgacaaggacagtgcgcagaagtgaatgagcccagtttggaaagataggttgcaataataatgagaagactcttttgggtcaaatgaaagcacttgaacttgttcacaggtaggtgggcagttttgctctggtgaaggcttctaaacagtagtgagcagactcagggtcattttgggaaaatctaatgttcgtcagccgttggcaaagcttctgcccttgaggctgggcccactttcttagactttgaggagagattgaacatggaaatcacggctgcaccagtctcctgtctagaaaaaacatctagacttctgtttagaaaaaacagctagttgcatctgcagcttcctgaagctcttcattcctgaatatgaaattctatatgtctgcccgggcatttttatagcactgaaa

SEQ ID NO: 718965 - DNA, 583 bp, Homo sapiens
  misc_feature (6)..(6): n is a, c, g, or t
  misc_feature (121)..(121): n is a, c, g, or t
  misc_feature (318)..(318): n is a, c, g, or t
  misc_feature (356)..(356): n is a, c, g, or t
  misc_feature (373)..(373): n is a, c, g, or t
  misc_feature (375)..(375): n is a, c, g, or t
  misc_feature (382)..(382): n is a, c, g, or t
  misc_feature (387)..(387): n is a, c, g, or t
  misc_feature (438)..(438): n is a, c, g, or t
  misc_feature (455)..(455): n is a, c, g, or t
  misc_feature (463)..(463): n is a, c, g, or t
  misc_feature (486)..(486): n is a, c, g, or t
  misc_feature (505)..(505): n is a, c, g, or t
  misc_feature (522)..(522): n is a, c, g, or t
  misc_feature (550)..(550): n is a, c, g, or t
tttttnttgcttttgaaggtttccctagagcagacatcattctattgcacagatgtgtcattttggcattatagaaagttgcagttaaaaacgctttctccaaaataaaaagacaaatganatacccagcatatacagttgaaggcaaaggagggcaggctttagagggatggggtccattgcttttgctgtgcatcacccttgattagcagttacattttggtagtacttcttacccccaatttctagaaatccttttcaaaatccaagatcaagtggggccccaatcatttcaggggaatcaaccccttcaaggcngcctgattcaaagaaggactgaacccattactggctgnattaggatagctgcagngngctgggngctgncccaacacttgttggagcaagccctgtttgtcttaaagcaaggcgggtggnattccaaatgctggagnggggcatnccgtgggttcccccattcttcangctttgtaaaccccggtgnccggccccccctgtggngacctgcccgcttggccgacggcttctngtcctttcttaagggtttcttcaaccccttttt

SEQ ID NO: 718966 - DNA, 161 bp, Homo sapiens
  misc_feature (16)..(16): n is a, c, g, or t
  misc_feature (57)..(57): n is a, c, g, or t
  misc_feature (80)..(80): n is a, c, g, or t
  misc_feature (86)..(86): n is a, c, g, or t
aaggagcttgccgaanagtgagaaaagcctgccaagtaaagcagcaggtatacaaanaggtagtcatttcggcactcaanagatgncactaatttggcagctcctattcactgaggaaaacgccatacactgaggcagaaactgagtcaggtggaggaaat

SEQ ID NO: 718967 - DNA, 295 bp, Homo sapiens
ctgggtactctaaggatcttagccgaatgtcgcgtcatgtggaagcggcgtcagctgcgcggcgcgagaaggttgcacgcatccggtcagatcatccgacagcgaactgcgaagaaacgtgacttgggattcgctgtgcgcatcccggtttcgccggaagtcgaccgtatcaagtcgctgctgcgcaaaccacaatgtttgcacacgcgtatgcgaagaagcctcctgcccgaacctgggcgagtgcttcttctgggcgcgcacccgccacgttcatgatcatgggtgacatctg

SEQ ID NO: 718968 - DNA, 121 bp, Homo sapiens
tctcagaatcctgatccagccttccctagctcagtaaagggcactcccttcttccagtgttcaggaaaagtatcttgaagtcatacttaagtttttctcaacctgtgggtagtcccggttc

SEQ ID NO: 718969 - DNA, 531 bp, Homo sapiens
aaagctctacatctgattgcatgttttaatgagtctgaatcgttcatgaaggggaaatatattatttttttttcccaatgactcccagtctactcgcaaacaaataccattgtagaaaaacagtttatttgctggttatagtttgaatcttgaaatacaattcttcactgatgatactggtataaacatggtggttattaattcatgctagcacaaccaaaactaatttaaccattattggtaaaaatgagtcatttttgaatctctattaaaatctgaaacacataaacaaatctgtgctaaaactgggactggcttctcactctacatataattaaacttccagcttcaaccatctgatgttgaaatctaaaggacctccatgagttaaatgtccccgacaaaccatgtagatggacaaacaagattggtggtctttaattgctggcgacagaaaaggctgcagtttagtacttaaacctgcagttagtggtcaactttctatccaggcagagtaaactaaggagagct

SEQ ID NO: 718970 - DNA, 127 bp, Homo sapiens
cgtagattgtttatagttgactcatagaggatcccgaattacgctcctacacgcacgcgagaggaagtgaaagaaacgcatgctggctgcgtgttacccaagctggtcatccgcgtgcctccaggta

SEQ ID NO: 718971 - DNA, 445 bp, Homo sapiens
agtggtcattgctgctctccgtcctgagcgtcgtgcatctcttcaccaaacatctgcggctgtgggtggcggaagcgctctgaaggaagagggctcctggctgggttggtagggagctggagggtgctgggggcccccgcggcgcgcgtccctgatgagcttcccgcgtgttggagtcgtagatccgaaactcggggccacggtgggtcttgggaagaaccggcatcgggtggaacaaggcggtggggggcacagcctcccggtcgggacagggcgcacggctgtactccctctgtgccttggtgtgatcgtccctgagcgggaagagctgctcctccaacttgtcccagcgctccaggcaggtccacagccagtcagggttgaccacgtgcaggtgtccgcactcctgtgccttgcgcaccttctctgtgcccgctcgcgcggg

SEQ ID NO: 718972 - DNA, 111 bp, Homo sapiens
tgctagctgactatttagttgaaatagaagagcccgttgtagtagtatgtcaccattggaacagattgaccggtatgtaccgaatccaacagaggtggtgcacacagtaaa

SEQ ID NO: 718973 - DNA, 172 bp, Homo sapiens
  misc_feature (129)..(129): n is a, c, g, or t
  misc_feature (139)..(139): n is a, c, g, or t
gatcaagacatactcatccagtatgaccggacctggctggtagctgaccctacgtcgctgcgagtccaaaaagttggaggccagtgccgcgctcgtaccagaaatcctaccgataagccatcgtgactnaaactcactngtataataaacagttttgagggatttaaagttc

SEQ ID NO: 718974 - DNA, 1001 bp, Homo sapiens
gcgaggcaggcggatcacttgaggtcaggagtttgagaccagcctggccaacatggtgaaaccccatctctactaaaactacaaaaattagctgggtgtggtggtgtgcgcctgtagtcccagctactcaggaggctaaggtatgataatgcttgaacccgggaggcggagcttgcagtgagcgaagatcatgccactgcactccagcctgggtaacagagtgagatcctgtctcacaaaaaaaataaagggaatgtggaaaagagggacaggggagaagggacacgaatggagaagggaagctaaacagacacgactggacgcaaggcaagagttggcgacggccagccgcaggacagggtacccaaaacatttcggaacacggacaggtccccgcttcccaactggcgtatttgaccaagctaaagcaatttatagaaggcaatacccacgagataactcacgaagcccggacagggaaaaatggcagggcatacacgaaatggcccggggcggacgggtgtccacaaactggcaacggaaatcccaaaagcccactaccaagaagtcacaactaacgatggaagaaacacagcagaattggggagcagggatccaagattctacatggtccccactggacctcaacccaccatggaggccctaaacggatacacaacggggcgacaaactctagccgaaaaacacgccccttaggcgacagacaactaccggagtcccaaaactccacaccactggcccatcgggagacataacccaagggaaacggacgggcacagggccaataacacacacaggaaacaaggaagcgaccgacagcagcaacagcacgccgacagaaaggacgaacaaacgagacacacccacagccagcagacgccaaacacagaacaaacgccaacacaccaagacaacccgcaacacccacagcaaagcaaaaaacgcacaaccacgacccgacgcagaaacaccccagacaa

SEQ ID NO: 718975 - DNA, 2773 bp, Homo sapiens
aggaagcagacctgcgacgggaccgaggaatggaggggtggtcgggtgtgtggatggccagagtgacagcttagggagaagccggatgtggaaggggaggaactgtgtggtatgcccaggcccctgggcccagccctggcttggcagcccttgctccctgctgagggccctgcctttccttcccctgaaacagctcccggagccctgcctgttccctgtccatccaggccagcagctgaaggagcctcacctgcctcccttctctgagtagcacggatttgaggagaagcagcgaagatgtccagcgagcctccccctccttatcctgggggccccacagccccacttctggaagagaaaagtggagccccgcccaccccaggccgttcctccccagctgtgatgcagccccctccaggcatgccactgccccctgcggacattggccccccaccctatgagccgccgggtcacccaatgccccagcctggcttcatcccaccacacatgagtgcagatggcacctacatgcctccgggtttctaccctcctccaggcccccacccacccatgggctactaccccccagggccctacacgccagggccctaccctggccctgggggccacacagccacagtcctggtcccttcaggagctgccaccacggtgacagtgctgcagggagagatctttgagggagcgcctgtgcagacggtgtgtccccactgccagcaggccatcaccaccaagatctcctacgagattggcttgatgaatttcgtgctgggtttcttctgttgcttcatgggatgtgatctgggctgctgcctgatcccctgcctcatcaatgacttcaaggatgtgacgcacacatgccccagctgcaaagctacatctacacgtacaagcgcctgtgctaacggagctgggactcgggactcccccgcctgtcagtctggccccctgtgctttgctccctgcgctcagtggtcactttcccgctcccacttggggctgggagccgtgccaccatcccctagaagtcctgtcctcttcaccctgccctacctgagccgctgactcttctggcaaaaattctgttgggatttaaggccaagggtcagtgggtggcagggggctggcaatgagcttgtgtgttgttggtctgcttggtgtgtgtgatcgggaagataagctgggaggggtctcctgctggggtcctgatgcctctgtttccaaacaaggtacaggttcagtccagactctttccccctgggaccaacagcagccagagcagttagccagttagtccccaggcctgtggcacaggcgtttctgacctgctgggccgagaatgggtaagttgtctggagtcaggtgggcccacgtaggacagggtcacaaagcctgggtttgtttctgggtactttgcgcctctggggtgctagaggtggggcatggtggctggaagtaaaactgccaactctggccctcagaactctcaggtatagaagcccaggatgtctaataccctgtcccagtgcccgagagctgcctggtgtcaggtagagaggacactgtacctgggtgaatgatcagaccctggtagctaagaaggaacttgtccctttgagtcagtgtgcagaccccctttcaggccatgcgtctgtgaaccctgtattgctggggccggaaggagcccgtgagcctagccccttcccgtctgccctgtgtcctcactgcgtgtgggtatgacctctgcctggtggctggtgtatcccaactggggaagagatggcagagggtcccccttgtgggtgcgcttggatgtgcagagccttctccatggattttcttccctgtaagtgccgggcccctcaccccagctgacaggctgttgctgtgcctgctcacacctgctcctgcaggcacactgggctagggacgaggaaggagcagccacaagtggtagaactgccttggtggacaccagcctcgccctgtctttatttcctgaatggtttgtgaacttgctcacctggaccactgtatcctgccactgtccttcctggtctcgcactgccactgcatggcctcctgtcactgtgaatcgtggcccagtctcagtttgtagtttctcattaaattggccctttcactcccccttggccctttcactcccccgccctgggcctctgctctcttgcctggcttccttcttttttgagggaaagagggtggggctgcaggcagtctactggcaggacgggaggctgagtcctcagggtctcacaccctcagtgctgatgccatgccaactgcctgggacaacaccaacacgtaaggacctaattaaaccaaaccagagtcgggtgtagaccagccctgggatttccagctgtgactgggccagggcacacgttggtctcggcagtggctgtaaggtcaccttccttcctctgatgctggtttcaaccatctatatatggcatccacgcatgggatctgcaagctggagccctcctacccgcaggcttgagcacagcatcatccagccctggggaggcgcacccttaagcaagacagactgggctgaggctgacaggcagaagactaacagagcgcagtctgcacacgcaggttctgggcgacctctggccctggccatctctgcactaactcatctgaattatgaaggtggcagtcttggtcagtagtttaaagagtttccctactttttaaccctttttgaaataaaacttttacaggt

SEQ ID NO: 718976 - DNA, 186 bp, Homo sapiens
agcgagggaacagagtgaaaccttgtttccggcaaatcaaaagaggacaaaacaaatcaaaacaaacttcagaaattttttggaaatgcaaagagcctcctgaactctgtaacaggaaatgggaatttggcctttaaccacatgaggacaaattaaagttagtgcgcctccccaagttacccatat

SEQ ID NO: 718977 - DNA, 266 bp, Homo sapiens
ccgtgggtcggtgtactcgtggggggggtaccattggggggcacgttgattggatggtgagggagggatcgttgagctcgttagtcatgtagaggatgcgtagggatgggagggcaatgaggactaggatgatggcgggcatgatagttcaaacggtctctatatcctggggcgtctgagatgttagtattagttagttttgtttgtgagtgtcagagaaaagggcatacaggactaggaagatagataaggaaaatgattatgac

SEQ ID NO: 718978 - DNA, 104 bp, Homo sapiens
cttgggtgggaggattgcttgggcccgggaggtctaggttgcagtgagccatggtggtgccactatactcagcttgggtgattgattgagaccctgtctcaagt

SEQ ID NO: 718979 - DNA, 111 bp, Homo sapiens
ctaccgtggttattggagctccatcagtacaggagcttaccaacgtggacggtcaagccagtgcctgcatctccccgatccgaagacacacggtgtctgcccttggtgcaa

SEQ ID NO: 718980 - DNA, 924 bp, Homo sapiens
gacaaatctgatgttaatgttgctcttagaagtcatactccatggtcttcaaagaccaaaaaatgaggtttgctttgtaatcaggaaaaaaaaaaattaatgaaccttaaaaaaaaaaaaaaagggtttggaagggaaaaaaagggggttccacctctggttatccttaaagtcacttcagggcctgttggaatgtggcaggttacaagcgagagagaatggtctttcattgtgaagagtgtgggccttgtgtgaaagggagatgtgcgtgtgggaatctgctttccaagccgccagggtcctgacggcagcaggagaaccctgtggtgggtcttcggggaaagcctgaccgtgtgttcggacggactggctctttccggaagttctcagtaatggagcccagagtaactggccaccgccttggtggcagctcggggagctccaccaaactctcgggcctggccagttctcaagcgagctaatctggccataaatcggataaaagcaaaactcccgaagtgaggacctagtaacttggctctcaacattttaaaatattggcaagtggcctctagtgaatggggcgtaaggggcctgtctctgcaccggtgtgtccatctgcttgcagtattctcacccatgtggaatgcctgctgctggttaaccctgtggaaaccctgggggtgaccaagggtgggaaaggccaccttgaagaccactctcataagcagggaagggcttaagccaggttcactacaaacagaagatggggactggccctggcccctccagccgagatgacctattaactccccaggccaggtccccactaaggcaaaccaaacgtcaaggatttgacctgatccgaaccgtaccactcaagaactggccgccagtggggaggttgcccacttccattaaggg

SEQ ID NO: 718981 - DNA, 219 bp, Homo sapiens
ctcagactatcagagtgatttttcacatcagccacaagaatgacctgtccggcgtacaagacacttcttaccatgtaatgcaagggagaaaaaagctcaggtacttcaataagatgtaggaaaagaagacttccactctaataggatgaaaagatgatcatttatttacatcattctggtttcttttaattgcttcacaatccactataaagaagattc

SEQ ID NO: 718982 - DNA, 162 bp, Homo sapiens
cataggctgggcccagattagatgtaacagcttaaggcaagctgatcttaacctgctgatcaagaccaggatcaaacccctatccttctggacactgtgttgcatccttaacctgctgagccacaacgggaagtccatgttacagcttcttgtcactgagtg

SEQ ID NO: 718983 - DNA, 176 bp, Homo sapiens
aacgaaaagcatgtctatatcaaccaacacctaaactggggtccgatgagcgtcgagaatcgaggcgcctataagacacggcgatgcggattcatacccgcagacgccagatactgcattaccaaaagtggaccactaggcactcgaataccacgcccggctccacgccagcgagc

SEQ ID NO: 718984 - DNA, 945 bp, Homo sapiens
ctacaacacaagagccagccatgtggattactaaaagatgttggcttagtacaagaggaagtagatgtggcagtcataactgccgcagaatgtttaacagaagagggccagacaagtgctttgacctgcagccttccgacaaaactgcaagatttatgcttaaatgattcaaattcaagagcatgacaacactttcaacacttacctgacttttcctttcaggacagactaagcactgttactaaaacaatctgcacaagcaagcactcaaacaacgtttagacccttaaggataatgatgtaatccaagattcctcttcagctttacatgtatccagtaaagatgtgccgtcctcattgtcctgtcttcctgcgtctgggtctatgtgtggatcattcatcgaaagtaaagcacggggtgatctcccctacctcagcatgaacattaaccgatcatatacaagatgcagtgactatacatgaagaaatacagaacagtgttgttctaccgtggggaaccattcaaagagaatgatcttttgaaccaggaaaaatgtccacgcatactccttcagtcattaacttgcacgcggattggacacaccaagaaacgcatagattcctgcacccacacacgtcactcaccacctgagtccactggactggccgggcgacaccacgcccctacagcagccgcactcctcacacaagaggcctacttaccttggggaccacctccacatggttcccccaagaagactcaactcctcgcaaacatcggtcgcatcgaaacccggataccaactacactcacaccgactaacacacgacccaatcccaacatcagagcatcagtgcacccacagcactcaagaactaatccacatcagacaactcaaactacagtacacagagggacccaccacacaggcaaccccaccaata

SEQ ID NO: 718985 - DNA, 319 bp, Homo sapiens
  misc_feature (54)..(54): n is a, c, g, or t
  misc_feature (62)..(62): n is a, c, g, or t
  misc_feature (144)..(144): n is a, c, g, or t
  misc_feature (146)..(146): n is a, c, g, or t
  misc_feature (169)..(169): n is a, c, g, or t
  misc_feature (268)..(268): n is a, c, g, or t
gcctcggctcctgagtagcttggactatgggcaatcaccaccatgtccagctantttttttngtatttttagtagatatgggggtttcaccatgttggccagactggtctcaaactcctgacctcaggtgatcccaaggtgctngnattgcagacatgagccaccacgnctggcctagaaaattatttatcttgggcattgattaaattgcatttctagacactcgccgtcagtagactaaaagatttttttcccctctgaataaganaaccgttcgttcaaggatctcaatattaattaatttttggcaaaacatccc

SEQ ID NO: 718986 - DNA, 109 bp, Homo sapiens
aaggatcccctccaagatgcgggagaagtggcaggacgaggcggcagtgagtgtcggctctgggacccctccccaggccccctgaccggaagccgctgtcggcctcctg

SEQ ID NO: 718987 - DNA, 663 bp, Homo sapiens
  misc_feature (4)..(4): n is a, c, g, or t
  misc_feature (100)..(100): n is a, c, g, or t
  misc_feature (178)..(178): n is a, c, g, or t
  misc_feature (180)..(180): n is a, c, g, or t
  misc_feature (183)..(183): n is a, c, g, or t
  misc_feature (185)..(188): n is a, c, g, or t
  misc_feature (232)..(232): n is a, c, g, or t
  misc_feature (239)..(239): n is a, c, g, or t
  misc_feature (241)..(242): n is a, c, g, or t
  misc_feature (356)..(356): n is a, c, g, or t
  misc_feature (359)..(359): n is a, c, g, or t
  misc_feature (400)..(401): n is a, c, g, or t
  misc_feature (404)..(404): n is a, c, g, or t
  misc_feature (411)..(411): n is a, c, g, or t
  misc_feature (417)..(417): n is a, c, g, or t
  misc_feature (424)..(424): n is a, c, g, or t
  misc_feature (429)..(429): n is a, c, g, or t
  misc_feature (431)..(431): n is a, c, g, or t
  misc_feature (442)..(442): n is a, c, g, or t
  misc_feature (470)..(470): n is a, c, g, or t
  misc_feature (473)..(473): n is a, c, g, or t
  misc_feature (478)..(478): n is a, c, g, or t
  misc_feature (483)..(483): n is a, c, g, or t
  misc_feature (496)..(496): n is a, c, g, or t
  misc_feature (499)..(499): n is a, c, g, or t
agcngggacacccagttaaactgctcgttcagctgctccagcaaggaggaggtgttgagcatcttccactggtaggactttagcagctcgttttattttntggttaacctcttagcgacctggagggattcgtcgagctcccgccgcagcttagcctgggaggggttgttggtggaanantcnannnncaagatctcccggcacttgtcacactggtccttcatccgcagtnagcccgngnnttgtggcggatctcccggcacacagtccggtcatcgtcgccttctcgtatgaattctgttggcgggtgctggaaggccgggctgtggaagtggatgtccatggcctgctgagcntcntgtatgatctcgaggaagggctggaacatggcgtggaagtnnagnggctcgnacgganagaaggncatcnanctgcggacgangcgggacttgggaaaaaaagtgaggctncgntgggncagantaaggcagtagtngtngtatcctgaggctacccggctgtagaaccagtcctggaagagatggtctatgatgtctgaacgcccggaagaagtggtcagcaatacaaccagatgcgcgtatgttgccgtatcgttctacaagacagagcagatcgaggacgatcactcatgtgatcgcagaa

SEQ ID NO: 718988 - DNA, 1065 bp, Homo sapiens
  misc_feature (77)..(77): n is a, c, g, or t
  misc_feature (80)..(80): n is a, c, g, or t
  misc_feature (111)..(111): n is a, c, g, or t
  misc_feature (113)..(113): n is a, c, g, or t
  misc_feature (134)..(134): n is a, c, g, or t
  misc_feature (147)..(147): n is a, c, g, or t
  misc_feature (158)..(158): n is a, c, g, or t
  misc_feature (215)..(215): n is a, c, g, or t
  misc_feature (223)..(223): n is a, c, g, or t
  misc_feature (244)..(244): n is a, c, g, or t
  misc_feature (250)..(250): n is a, c, g, or t
  misc_feature (257)..(257): n is a, c, g, or t
  misc_feature (465)..(465): n is a, c, g, or t
  misc_feature (468)..(468): n is a, c, g, or t
  misc_feature (470)..(470): n is a, c, g, or t
  misc_feature (475)..(476): n is a, c, g, or t
  misc_feature (479)..(479): n is a, c, g, or t
  misc_feature (532)..(532): n is a, c, g, or t
  misc_feature (535)..(535): n is a, c, g, or t
  misc_feature (552)..(552): n is a, c, g, or t
  misc_feature (603)..(603): n is a, c, g, or t
  misc_feature (677)..(677): n is a, c, g, or t
  misc_feature (709)..(709): n is a, c, g, or t
  misc_feature (718)..(718): n is a, c, g, or t
  misc_feature (724)..(724): n is a, c, g, or t
  misc_feature (733)..(733): n is a, c, g, or t
  misc_feature (741)..(742): n is a, c, g, or t
  misc_feature (779)..(779): n is a, c, g, or t
  misc_feature (789)..(790): n is a, c, g, or t
  misc_feature (793)..(793): n is a, c, g, or t
  misc_feature (828)..(828): n is a, c, g, or t
  misc_feature (840)..(840): n is a, c, g, or t
  misc_feature (902)..(903): n is a, c, g, or t
  misc_feature (913)..(913): n is a, c, g, or t
  misc_feature (915)..(915): n is a, c, g, or t
  misc_feature (917)..(917): n is a, c, g, or t
  misc_feature (919)..(922): n is a, c, g, or t
  misc_feature (929)..(930): n is a, c, g, or t
  misc_feature (942)..(943): n is a, c, g, or t
  misc_feature (946)..(946): n is a, c, g, or t
  misc_feature (960)..(963): n is a, c, g, or t
  misc_feature (966)..(966): n is a, c, g, or t
  misc_feature (976)..(976): n is a, c, g, or t
  misc_feature (978)..(978): n is a, c, g, or t
  misc_feature (988)..(988): n is a, c, g, or t
  misc_feature (990)..(990): n is a, c, g, or t
  misc_feature (992)..(992): n is a, c, g, or t
  misc_feature (1004)..(1004): n is a, c, g, or t
  misc_feature (1056)..(1056): n is a, c, g, or t
gggcccaggaggagggggaataaagaaggtggaggatcctggctaccactctgaatccgataccgcttctcttaganctnagcgacagaaaaagggaagggtgtctcatcncncttcctcctctcctccctgtnctgagccttagcnatggccgaggnaggggctgggctgagcgagaccgtcactgagacaacggttaccgtgacaaccgagcncgagaacnggagccttaccatcaaacttnggaaanggaagcnagagaaaaaggtagaatggacaagtgacactgtggacaatgaacacatgggccgccgctcatccaaatgctgctgtatttatgagaaacctcgggcctttggcgagagctccacggaaagtgatgaggaggaagaagagggctgtggtcatacacactgtgtacgtggccaccgcaaaggacggcgtcgtgcaaccctaggaccgagnccnanactannccntccgcagcctcctgacccttccgcagccccctccagggccaatgcagcactanatnccctctctcctccagcnttcctgtgtctgtctggccctaaagtgtatccatgtggctacttctccagncccctccttccctctcttctgcctgatagagggaagaggaagaggaggacgaacagagatcctgaaattctganttgcgctattccagaacccagcctcctgggtntccccagtnctcatntttcctccnaatacccnnccttctctctcgagggatctaggcacctggtccccangtcttccttnngtnctcactgccaaactgcctgtcctgggatctagttntcttggccctgnactctcaacatgagtagcgaacacttaagttgggttttcaccagtcccagctttcactgccnnggtcccagtnanantnnnngaatttnngccctaactttnnttnttactcctggtttnnnnctntcccactaananatttaatctnantnttagtccttgcntgtgagatatgaggtttacaggagactcagagctccagcctttttcttctgntaacctttt

SEQ ID NO: 718989 - DNA, 195 bp, Homo sapiens
taataacataaaagttaacctgtcataagtgcttatgtaggtgaaacaagaggtggaaattagcaactgtcttatggaggagcgacggaacaacgctggagacaatcgcttgcttcagcaaagggcttgactaccgctacccagtccggccccagctttagggattgcgaggtcacatttagggggtcaatttgc

SEQ ID NO: 718990 - DNA, 285 bp, Homo sapiens
  misc_feature (80)..(80): n is a, c, g, or t
  misc_feature (136)..(136): n is a, c, g, or t
  misc_feature (203)..(203): n is a, c, g, or t
atggcttcaaggttacttcgcggagtggaacgctggccgcgcaggcctgagggctcgcggccccagtggcgcggccgcantgcgctccatggcatctggaggtggtgttcccactgatgaagagcaggcgactggnttggagagggagatcatgctggctgcaaagaagggactggacccatacaatgtactggcccaaaggnagcttcaggcacaggaagacctaatttagtccctccatctccacaagagatagtaggctgcatctgtaagagacaatacagc

SEQ ID NO: 718991 - DNA, 81 bp, Homo sapiens
gcaaagtgggttaatggtggcgctaaaactgctggaaactttggagtgtttttgtgttctttcggattacttctgtggtat

SEQ ID NO: 718992 - DNA, 374 bp, Homo sapiens
cttaggacagctcctgggccttccgtgccagctgaggacggaggtcgattcttatctactctctgctcgaggagagatgagatctgagtgctgcagatggcagtattaggttggtgcgcacagaaattgtggtatttgccattacctttcataggaaaagccacagttacttttgcaccaacctaacagtagcttccttaataactaacctgctctagtgcacaccagccaagtcctattcccatcattcaaattctcaagctcagtaaatggggagcagcagatgctcctcatgcctgtgtctcagaggggaaaaaagccgtggttgccattaatactaatgcgacacagcacctatattgcactttctatgt

SEQ ID NO: 718993 - DNA, 115 bp, Homo sapiens
  misc_feature (39)..(39): n is a, c, g, or t
aggtgacttagaggatccccaggcctctcagaacagggntctctcagaatagcatccccctcaggctctcagaacaggattccctcagaataaagttcccggaagggagcccaag

SEQ ID NO: 718994 - DNA, 694 bp, Homo sapiens
agagagagagagagagagagagacagtttcagagagactgccacacagagggattgtcatggggatcgcggtagtgcctccttcaacgccgcatgccatctttggcagcaccggcagctgacagatgaacaggtacataaagctgatcgcgcacagcagccgatcattcaatatacgtgatcgcgcaaccgagttgggaagaccgcttagtcggtttgcactagccattgtgcgacatatgttcgaccagacatgccccagattgcgtatttcgctggacacttatgaccggacgtgccagagccatatcctaaaggatgactcattcactctgacccagagccagctaatctcacaagttaaccccgcaagggatgagctgaacacacatagctttttccctcaacgtgttcaaacatttcggtcccccccctttaattaaacacctgtataccaacgccaggtggtaaaagcatgattacatcccctatgtgaagacccggttccctcacccgctttcaaaacagaagcccatgtgcacaataatggtccaagatgccgcaccaagagggccatgtgttaataagaaccgccttaaagttaggccctgttcgactaaccccaactgaagaaaattcccttctccccactgtccctgtcactcaagggggactccccggcttgcaatgtcttt

SEQ ID NO: 718995 - DNA, 361 bp, Homo sapiens
tcagagaacactataaacatctctacgcaaataaaccagaaaatctagaagaaatggacaaattcctggacacaaacaccctcccaaaactaaaccaggaagaagtcgaatccctgaacagatcaataacgagttccaaaattaaatcactaataaaaaacacaccaaccaggaaagaaaaaaaaaaaaaaggccctggcccagttgtattcacagttgattcctaccaaatgtacaaaagaaagttggacccattcttactgaaccctttcaaaaaaatcagggggaggggtttcctccttaattcattctacgaaaccggttttatcttgataccaaaatttggaaaagacacaccggg

SEQ ID NO: 718996 - DNA, 223 bp, Homo sapiens
cgtgctgaggtgtgacggacagtgacggacagtgactggaacggtgactggaccagacggacggacagtgactggaccagacggagtggcagtgatggacagtgacgggcagtgatagacagcaacagagagtggaggacagtgatgaacagcaacagacagtggagggcagtgatggacagtggaggacagtgggggatattttcctgcctggctgctccag

SEQ ID NO: 718997 - DNA, 460 bp, Homo sapiens
caccatgttggccaggaagcttgaactcctgacctcaggtgatctgcccatgtcagccttccagagtgctgggattacaggcgtgagccactgtgcctggcctaaaattttagtgttttttttttttttgaaaatgaatttgggctcttatggcccaggcaaaagtgcaggggcgcaattccggaacactgcaccctctccgaatttcggatttcaagcaatttctccggcctcagcctctcccaagttcgcgtggaattccaggcgcccgccaccacgcccagcttatttttttgtgtattttaagtaaagagggggttttcccagtgtggttgaggcgtgtcctcaaacgtgtttacctcattatccacccgctttggcctccaaaaggtgttgggtttccgggctgtacccattactccgggcctaaatttttattaacttttttttgggccggggt

SEQ ID NO: 718998 - DNA, 107 bp, Homo sapiens
tcagctcggacaggtgatatcctgaacatccaggccaataagcgcggtatgcccctgtattggatatcacctaagcagtgaagccagctgaagaaaagagtgcttgg

SEQ ID NO: 718999 - DNA, 200 bp, Homo sapiens
gagtatccgaagcgtcaaatcgaagatagattggcatggcttattcgtatttttgtatggttggtatttttttttttggggttggatccaggtttaaaaactggaacgggataaaggtaacagcagccgttggaaggaagattccccaaaattccacaaggcggccgagaatttggatggcccttggtggtttttaaatt

SEQ ID NO: 719000 - DNA, 363 bp, Homo sapiens
aggtcgtcatacctacagaagaaattgaagaaggatgtgcaactcagcaaagaaggtggtctgtttccccaacaaaaaaggttgcatgttgccacaccagccaagaaagcagctgtcactccatgtgcaaaaatgtgcatgctgcaacacactgccaatgaatgacagttacaccatgccaaatgcagttaccacacactgtgcaagaagggagccacaccagtgcaaagcatatgtgtagcaactcgctggtaagaagggtgctgccatcccagccaatggggtgcaaagaatggcaagaatgccaagaagtgaagacagtgatgaagaggaggatgatgacagtgaggaggatgaggagga

SEQ ID NO: 719001 - DNA, 385 bp, Homo sapiens
ctcattaaaggatggacaagagacactcacacctgactccactgggggccatttatgttgggttgcgatattcaacaggggaggtcttccttctttcatctgggggcgagtttcacgcaactatgcatgtactctcatgatgaaactttacaaattaacactttagaaaacaggacgtgaaggacgcccgctaagaagtgcattcacctgcaggtttactcagagcagcgccatctgtgacaaaggtcccgcgggccagggggaccctgatgtggacatgaacccagcgcccatgcccgattcttctttcccacacttccgcatgcttaaccattaagtaccatgaggttcgcccaggagctgggaggttaatatcggaaaatgt

SEQ ID NO: 719002 - DNA, 821 bp, Homo sapiens
gcatgtgcctgtgatcccagctgcttgggaggctgaggcatgagaatcgcttgaactggggaggtggaggttgctgtgagccgagatcacgccactgcactccaccttgggcgacagagtgagactctgtcttaaaaaaaaaaaaaaaaggtagcatctatccttcccagaatcattttttacgaagttttgtgtattattgtggtcggtcattattattattattttggagacaagggtctcactctctggtccagggctaaagcacagcgggggttcaatcaggggctctctgcagcctcaatttccctgactccagggatcctctcacctgggcctcgggagcacgctggggactgcaggtgttgtgccactatgcctgggccaattaaaaaattttttttggtggagagggagtctggctgtgttgcccaggcaggtctcaaactccggggctcaagtgatcctctggcctgggccttccaaagtgctggccatctcgtcgggcctattataattttagagatagggtcttgtctgtcactcaggctgagtgtaggggtgtaatcatggtcactggaagctcaaactatggctcagggatctttaacactcaagctgccgagtagggggcactgcaggcacgtgccacatgcccagctaagtttagaacatttttgtaaaaagggtccccatatgttgctaaggggtccaactcgggttcaaggaactctgcttggcttaaaggcgggtacgggtaacccgaccggcaagtatctattaattaagcccaggcagacacgttaatcgggggccgagga

SEQ ID NO: 719003 - DNA, 673 bp, Homo sapiens
gcggtcagtgtcagctgccgcggcctcgggcccggcgactccgcccccagccccccttccctccgcaggcagcggctccctccctccccagaacagctgaaggtctcactcactccgaggggagcgcaggggacggggagcgggcgtgaggacagcagcgagagagcgccgacgctggaggagagcacttgattttttgccgtgcccgccgaccgcggacaccgtaggctgccctgggcaacgaggggagcagatacatcactatcaagcgaaaccccacactcctcacagaagctcacacacatcaccagggcacgacggcgtagtaaaacgtcatccgaccaccgcacaccggcagcgttcaccaagcagaggcaactctagccgagcgcgaagcgcattcagaactacacacccgacgcaggatggccgcgcgactaggccaccgaaggcaccaggcgccagcccgcacgcgaacagactcacggagagcagggaggggggaaacctgacgggggacaaccgaccagcagagagaaccaggagaagcgagacacacaaggcgacacacgaaaaggccaagccacaggcccgggccaaggcgaccaacacacccagacgcgaaagaagcgcgaaccagaaagacagccaccaggcgccagcaggaacccac

SEQ ID NO: 719004 - DNA, 330 bp, Homo sapiens
ggtcgaccttacctggtataatcataaagaactcccaatgagaaactcaagactagtggctgggtgcggtggctcacgcctgtcatcccggcactttgggaggccacagtgggcagatcaagaggtcaggagttcaagaccagcctgaccaatatggtgaaaccccgtctctgctaagaatacagaaattagccgggtgtggtggcacaaacctgtggtcccagttactcagatggctgaggcaggagaatcgcttgaacttgggaggtgggggttgcagtgagccaagatcgcgccattgccgtccagcctgggtgacagagtgagact

SEQ ID NO: 719005 - DNA, 385 bp, Homo sapiens
gtccacaggaggttcttctaggccaccacctatgttcacttaaagtccaaagtctcttccgtaagcttgtggtgaatgctgccaggctagcaactcacccgtcagggcagtgggctcccctcgggcccaaggcaagagcagaaatactatccaagagcctaggcctggactgggggaacccaatatccggctggtggctctacccaactgtgacttcactggtacctaggatgcaacacaaagtccccttggcttttccctctgcttttctcgaacagaaggagtctttcaccatagccaccacagctgtgaacgtgctgggtcacccctgaagcctgcatgtctcagggcccaaggcccacagtatactccatgggtatcactg

SEQ ID NO: 719006 - DNA, 214 bp, Homo sapiens
tagaggatctccccgactagccgacagcacaggtctcccaggacagacctactcacccagcatgaactacaggagagggtccccatcctactatgacaacaggattcccttcaacaactgggatgacaagagcattcgaaaggccttcatccgcaaggtgttcctaggtgcttgaacttgcagctggtcggtgaccctgtcgggctagtcgggg

SEQ ID NO: 719007 - DNA, 633 bp, Homo sapiens
agatgtggtatcagcctgagtcccattaagcgtgcgattgcgtcgaacgtgcagaatgactatgtataaggacatgctgaattggatcacctagctccaggcagagcaaagtgtaatgcacagatcatcactccatagatatcaagcccgtgtctggactagacaggcaaaccttgtagtgtactcctgacaacctcatcttgacttcaccttggtggtgtccctcggtagatcatcgccttcagagatatgccagcataattctgggacgcctcgagctgccgaagtaaattgctcgcaaactagtggcatgctcgacgtctggcatcttaccatgggtcaaacacataagagcaccagaagtctgacttgccgcttatgcaaaattcttttggaatcagatactagatggagagccaatatgcttcaagtgatagtggaggtcttaaaggctgatgaaggaattcgtaaacgaacctttgaaagtcattgaatgataaaggcatgcttgggtaaatcatatgaagggtgacttccctgttgaccgggcagtgataatttgagataatttaaatataaccgttgctgaggaaagggaagggtgctagtggtggcagttgaagaacgtagctt

SEQ ID NO: 719008 - DNA, 1013 bp, Homo sapiens
  misc_feature (124)..(126): n is a, c, g, or t
  misc_feature (128)..(128): n is a, c, g, or t
  misc_feature (132)..(132): n is a, c, g, or t
  misc_feature (884)..(884): n is a, c, g, or t
  misc_feature (898)..(898): n is a, c, g, or t
cctagcaatctaacattaagcttccctctacgcttatcatcttcacaacttctaatgctacgtgacgtatcctagaaatcgctggtgcgccttaatcgcaagcctacgtttcacacttcgtagnnnancctntacctgcacgaaacacataatgacccaccaatcacatgcctatcatatagtaaaacccagcccatgacccctaacaggggccctctcagccctcctaatgacctccggcctagccatgtgatttcacttccactccataacgctcctcatactaggcctactaaccaacacactaaccatataccaatgatggcgcgatgtaacacgagaaagcacataccaaggccaccacacaccacctgtccaaaaaggccttcgatacgggataatcctatttattacctcagaagtttttttcttcgcaggatttttctgagccttttaccactccagcctagcccctaccccccaattaggagggcactggcccccaacaggcatcaccccgctaaatcccctagaagtcccactcctaaacacatccgtattactcgcatcaggagtatcaatcacctgagctcaccatagtctaatagaaaacaaccgaaaccaaataattcaagcactggcttattacaattttactggggtctctattttaccctcctacaagcctcagagtacttcgagtctcccttcaccatttccgagggcatctacggctcaacatttttggtagccacaggcttccacgggacttcacgtcattattggctcaactttcctcactatctgcttcatccgccaactaatatttcactttacatccaaacatcatttggcttcgaagccgcgctgatactgcatttggngagtggtctggcantctgatgtcccctctatgatggcgcttgcgcacaccacaacaagagacacaacacatgtgcggggcgccgccccgagaagttacactgtgggcgccccggcagaaagaagtctcg

SEQ ID NO: 719009 - DNA, 1326 bp, Homo sapiens
tagattaaaaaatgcctttatttttaaaatggtgggcttaactacttgcaaggtactggagccagtttgggaatccacccgggtattcagagttaaaacgtggaccaaaggaagtgtgaagttcagggcctccgggctgtggtcacctcctctccagcaacctcaattctacagagcatttcttcagcgtgtttttgtggtgacggtggtgggtgaatctcgtttgggaattccctctgtggttgtgacacagaacaaggctccgaacctttggaggaaagaacgcggttacccccacgttctttcgtgcatttaagtgggggtataagagaataagtggccgtggactggtggtagacaaacccttgggagaagaaagctcaagctttgtgggaaaagccccctcgtggggtgttccccatgtggtggatctccatatgtgggaggctcgtggagtgggtcctttataaatatgtgccaaagtgggtgcgagataacacgtggagctatgtggacacgccacctcagaaacccgtgatgtaggacgcacgctgtgcgggtgagcagtgatggcgcgcatctcccacaatgtgaaataaacatcacaatttttgtggcaaaatattcttaaaatcttatattatctttggcgatggagaacccctctcaagggggggctcttataactggaaagacacaccccggagggagtgctatatacaccatttggggcccacttgggggccatattaaaggggcaccacaaaaacaccaaccccccaatgttacgagccccccaaagcccaggagtaaagtgggtataagggtgtcccaaccagttcaccttttggggggatatacacttccggctttctcaaaaggagatttacccccttcattaccctcattatgacaaaagaaaaattcttctctaggcatgagaccattcaatccccccccaagaggaaaaaaaggcgcatcccctataaaaaaaaataatgagccatataaggggtagacaaccacccatcctctacaatataccacaagatccctctaatgtgtgggcggcagattgttgccacgagcaactctccacgggaaggaggaagaaacgacgggtgggaacaaagagagagacacgaaaaagacaacaccaacagtaggccacccaccgttataaccacaccacaagagggccgaaaacgagacacaacacatggagggaacccacataaaagggagaaccaactataaacaagcgacgtgggaaaccccaacatcaaaaacaaaaacctcactgtgtcccacacaataacaacacac

SEQ ID NO: 719010 - DNA, 677 bp, Homo sapiens
  misc_feature (124)..(126): n is a, c, g, or t
  misc_feature (128)..(128): n is a, c, g, or t
  misc_feature (132)..(132): n is a, c, g, or t
  misc_feature (547)..(547): n is a, c, g, or t
  misc_feature (582)..(582): n is a, c, g, or t
  misc_feature (639)..(639): n is a, c, g, or t
cctagcaatctaacattaagcttccctctacgcttatcatcttcacaacttctaatgctacgtgacgtatcctagaaatcgctggtgcgccttaatcgcaagcctacgtttcacacttcgtagnnnancctntacctgcacgaaacacataatgacccaccaatcacatgcctatcatatagtaaaacccagcccatgacccctaacaggggccctctcagccctcctaatgacctccggcctagccatgtgatttcacttccactccataacgctcctcatactaggcctactaaccaacacactaaccatataccaatgatggcgcgatgtaacacgagaaagcacataccaaggccaccacacaccacctgtccaaaaaggccttcgatacgggataatcctatttattacctcagaagtttttttcttcgcaggatttttctgagccttttaccactccagcctagcccctaccccccaattaggagggcactggcccaacaggataccccgtaatccctagagtccatctaacacatcgatnctcgataggagataatacctggctactagctatancaccgaaccaatattagcctgttatacaattactggcttattacctctcgctagagncttgggttcttacattccgcgggattcggtacattttg

SEQ ID NO: 719011 - DNA, 437 bp, Homo sapiens
  misc_feature (5)..(5): n is a, c, g, or t
  misc_feature (29)..(29): n is a, c, g, or t
  misc_feature (50)..(50): n is a, c, g, or t
  misc_feature (67)..(67): n is a, c, g, or t
  misc_feature (139)..(139): n is a, c, g, or t
  misc_feature (143)..(143): n is a, c, g, or t
atacnccaattacatattatacatatacncacaccatacaaattaacagnaagaccatatggatggnatggccataggagcctaaatagtccataatctggaaacaatcccaaattttaatcagtaatagaaatggatnaatngtgggcctggcacagtggctcacatctgtaacccttagcactttgggaggctgagctgggagaattgcttgagcccagaagtttaagaccagcctgggcaacatggcaaaaccccatctctagccaaaaaaacccacaaaaattagccagttgtgatggtgcacacttgtagtctcagctactacttgggaggcttaggtgggaggattgcttgaggctggtaggtggaggttgcagtgagctgagatcccaccactgccctccagcctgggtgacacagcaagacctcgtctc

SEQ ID NO: 719012 - DNA, 142 bp, Homo sapiens
caggtcgagcgcaggtcctcagtcaatggctgtggtgttgttcagcatgcacacagctctctgtaccctggccaggtctccacgcgaggcaccacagatgggaggctggtggagacctggccagggtacagagagctgtgtg

SEQ ID NO: 719013 - DNA, 872 bp, Homo sapiens
  misc_feature (124)..(126): n is a, c, g, or t
  misc_feature (128)..(128): n is a, c, g, or t
  misc_feature (132)..(132): n is a, c, g, or t
cctagcaatctaacattaagcttccctctacgcttatcatcttcacaacttctaatgctacgtgacgtatcctagaaatcgctggtgcgccttaatcgcaagcctacgtttcacacttcgtagnnnancctntacctgcacgaaacacataatgacccaccaatcacatgcctatcatatagtaaaacccagcccatgacccctaacaggggccctctcagccctcctaatgacctccggcctagccatgtgatttcacttccactccataacgctcctcatactaggcctactaaccaacacactaaccatataccaatgatggcgcgatgtaacacgagaaagcacataccaaggccaccacacaccacctgtccaaaaaggccttcgatacgggataatcctatttattacctcagaagtttttttcttcgcaggatttttctgagccttttaccactccagcctagcccctaccccccaattaggagggcactggccccccaaaacaaggggcaatttcaaacccccgggtttaaaaatattcccccctttaaggaaaaaagtttcccccaagttccctttaaaaaacaaccaattttcccgggtaatataacttcccggccaatttccaaggggaagggttaatctcaccaagtgccaacaccccttggaagggcttttcaacccaacttaagggttcctacacatttaaggaaaaacacaccaagggccggaaatacccaaaattcaattttcaaaggccaacttggctttatttcacccaaatttttaacctggggttcttcctaattttaaccccttcccttaacaaagggccttccagaagtaactctccgaagtcttgcccc

SEQ ID NO: 719014 - DNA, 162 bp, Homo sapiens
tggcgtctggtcataatttggttttccatccgggaactgtggtctccagtggttatagaggtttcacatactaataatgtccccagagacgtaatgatccctttctacatcttaattatagagcaccctaagtatttagcacatggtgccgatgaatagcga

SEQ ID NO: 719015 - DNA, 613 bp, Homo sapiens
gcacgagatggatggaggggtgtatagatggaggggtggatggatgtgtaggtgggcagatggatgcgtgattgaatagatgggtggatgatgggtggatgatgggtggatgcccaactggccagcaaccaatccctgaaatttgccccattcctatcctggccgagaagctccatgaacaaatttacacggtgaccgggccaagccgaatccctgccatcaaggataggcacgacatgccctacatggatgctgtggtgcatgacattcaacggttcatcaccctcatgccctacaacctgccccattaaccaacccgagacaccattttcagaggatacctcatccccaaggttaagcaatgaacctgcagcacacagcatgaacaccatcctatcagctaatctccttcctgccagcgagcacgatgggggccctatgacccttccctttgactggggtcactgactgcaatggctggccccactcccacccttgtgggatactgcatctccagcagtgcttacattggcctggtgacccaaacagtcgcaggccttcacctatctctcacagccctcccctggggtcaatccccccagaggttggcccc

SEQ ID NO: 719016 - DNA, 555 bp, Homo sapiens
aaagcgggcgctgtcggtggtgaagtgcgcatgtacgccaaggcgcctctcgtggttggcgtgctgcagcgacaggcggcagcacagcacctgcacgaacacccgccgaaactgctgcgaggacaccgtgtacaggagcgggttgatgaccgagctgaggtagaaaaacgtctccgagaaggggaggaggatcatgtacgcccggaagtaggacctcgtccagtcgtgcttgggtttggccgcagccatgatcctccgaatctggttgggcatccagcatacggccaatgtcccaacaatcagccctgggcagacccgagcaggagggagagccagagaaaaaaaaaacccagcatgagaacccagtaaataaataaaaccataaaatatttagcccctttttttttgggcttactggccaggaaatggtaccaatttttcagtgttggacttgacagcttcttttgccccaagcaaaaaagaatttaaccctgtttcaaacccgggggagttggctgtgttaaaaaaagacccttaaatgctttagccagtgta

SEQ ID NO: 719017 - DNA, 479 bp, Homo sapiens
  misc_feature (443)..(443): n is a, c, g, or t
tccatccacaggaagtcatgcatcttcagagattgaaaatgtcagggaagtccagcgggcaggaattctcttcttccgaatcatgctgctcgagctacaggaaagcatccaactactcaattccatggaatttgtgtcactgttgctctatgaccatactcttgtaacagagccaaattctcctcaagacagcaaatctatggagttggaagccaacgtgaaactagtgcgtgacatcctgaaggcggttatcttgttctttcatccagagttggaattttcaagtgactttggaagttgggataagtgtaaattttatgttaacaaatatttagtcaacaatatttgtgcctttgatccaactgccaagcatgtggaagttaatgtacagcttattgatgaatatatcagaggtaaatttccacttaattacagcctaaatntatgccaacagcaataaaacccagttgtgattttta

SEQ ID NO: 719018 - DNA, 479 bp, Homo sapiens
ggtttttggtggaacaaaactaagttgtgacgccatcatttacgggcgaaggcgctatgagaagtggctcttatgctccatcgaccaagcgaacatggtggagttcgttgcccattgaaaccgagctgacttactcccgtttgaacaaaggtctcgaaagaaggtaatcggtgaccaaacggacctttaatcggggctggaccatctggatgccctgagggggcatcgaagtcctcttccctatgtgagatatggactctggaataggattgcgctggtatgcctagggaacacgagccgttgttcaaggtgttggatcaattgagtatagactgccgatatgactggtgaggacttgagatagtcccgctgggaggataagctctgatgtgacgcgccccgggcgcttgttcatatctaacctggtacgtacggatcagtgccaatgtcaggcactcgttgcgctagaaaattcaaga

SEQ ID NO: 719019 - DNA, 662 bp, Homo sapiens
attgttttttcccagaggtcttcctttttgaacggccaaattctttttacgagggccctggaagaaccccagggtaatgggaggctcttttataaaccctcccccctgataaaaatcggcgtaaggggtttaaaaaaaaccttttccatcttctcctagaaattaacggcatggtgtcatataagtaattcccacgttaaatcttgaacccgaagatataattctcccagagtttgaaatcagtgattatattactgtctgagcaagatagtgtcgttactggccttttatacccaatctttagaaatattatgtccatatgtctacaccataattggcctaaagtcctgcttttgtttaaccgtcaggacacaattgtgcagcctctggcactttctttgtgtgcggttcatgcaaagatggacattactcgctgttttcgtaccctcaaagaaatggccaagatttatctcgctaactggtgttactaaacattttttcccactccttgttcccccaaaggagttaattatgttcacccagaagacaggccctatgagaaaaatgggagcaaaatcctgacagcttagtttgtacactgtacgtaccgtacctttctgagtggggctggactgatgaaaaaagaaagatttaccttacat

SEQ ID NO: 719020 - DNA, 464 bp, Homo sapiens
  misc_feature (370)..(370): n is a, c, g, or t
ggctcagtgatctaccgctggctctcaagtgctggatacgacttgagcaacgagctggcccagtatgctttttaaggaagccagttgggagaaaaatatgctaaataaaatagaggaaaaaaaaacccaaaaagactcacttcacacattgcaaagtaagtaccagacagattaccgatttaattggttttccaaaaaaacaaaactgtgtcagcatgtagttgaataaattttaaaaaccttaggattaaatacaaacttgcaccaaatgtagaatctataaagaaggtgaaaagtaatagctcagacaccttttgtttggctgtgtttttaaagctttgagttaggtgcccaaaaaactattagctgncaccacttcagagacatcacatagccactccagcttctactgaactatgagcagacctgagaattttgggcccatttttccatatgtacaacta

SEQ ID NO: 719021 - DNA, 688 bp, Homo sapiens
  misc_feature (672)..(672): n is a, c, g, or t
tcctctagtaaggaaggcgataataaagagatagtcattaatatccacagagactgtcttgagaatggaaaggaagatcttctagaagaaagaaataattatattctttcattaattccttatttctttcttctagaagaaagaaataaggaattaatgaaagaatataattatttaaaagaaaaactgcttcagtgtgaaaaagaaaaagcagaaagagaagtaagtatgaagaaaactataaacttctggaaagaaaatttaaatatttcattctggctatatgttgaacctagttcaatatacaaataaatagatgaaaatgtgtttaccattctgtataattccatttacatgaatcatccaggaaatacatctatagggacagaaagatgattaatgtttgtgtaggcctggggctggaagcgggtcgtgactgctaatgggcattagggattgtcctggagtgatgaaaatgttctaaagttggattgtagagatggttgcacgacacagtaaatttactaaaaatctttgaactgtttgttaaaaaagataaattctataaatcatatttcaacaaagctgtttgaataaaaatcatatttcaacaaagctgttttagtaaaccaaaaaaggtgtttactatatcagcttggaaacatgctttgnttccaggagataaaag

SEQ ID NO: 719022 - DNA, 184 bp, Homo sapiens
cgcatgggggtgggtctgaggcgttatctgcttctacccctgtctgtaggcagtggcgtggttattcctgaggtccggccctgggaggtcgtggtaagtgtggacgtgcgtgcagacgctcctcaatgcatgctgccctcgtctgtgcctcacactcatgtagaggactggtacgtgggctctg

SEQ ID NO: 719023 - DNA, 468 bp, Homo sapiens
cttttcttaatatcatattttcctcgtgctattttctttgggtttactttgccattctttccctagggatttgagatagatcatagtttattagtatccaatcttttttttctaacatacacatttgctactctaaagtttcctctgtggcttactttagcttcatctcaaagtttctaatatgttacttttatcatcgaattcaaagcattttagaaatatatttttaattttcaaaataatatgttgttttctggcttgattacattttattcatggaacatattctcataaaagtttttgaagttgccttatggtcaatttttgaagtgttacatgtgtacttgaaatatattcatttaagtgtttagtgtacatattgcacttcattgtttatatacaaatattttgatatattattttactatgtattttaaatatttattaaatatcattgtttaaatctta

SEQ ID NO: 719024 - DNA, 301 bp, Homo sapiens
gctcttggcggtgggagaggcgcagtggctgcaggctgccccctgccggccacaggggagcagcgtccgcgctggcgtcgaccggccctacggccatctcctcagcctgctccctgggaggcaggctccagaagcaccccaacggagggccttattaagcgcgagaagcctttgcagcgagtcatccccgtgagtcctatctgcggcaggcaggatattcgatctaacatgtgtatcaacgttggttcacaccacttaccatgtgtatgagttttaaggaacttgtattgcatttataaag

SEQ ID NO: 719025 - DNA, 562 bp, Homo sapiens
agtgggatacaacgaaaggagggatttccccctttctatggaaacgggggtacccgtctctccacgtgcatcgctacagctagtttcaagccgcggagcaccatgaggtggtggccgtggaggaagccgatctgatagagggggaggcaaaagcagatactagaaacaaacaaaactttggaccaaaatcccagttcaaagaaacaaaaagtggaaactattctatcataactacccaaggactactaaaaggaaaaattgtgttactttttttaaattccctgttaagttcccctccataatttttatgttcttgtgaggaaaaaagtaaaacatgtttaattttatttgactttcgcattgcttttcaacaagcaaatgttaaatgtgttaagacttgtactagtgttgtaactttccaagtaaaagtatcccctaaaggccacttcctatctgatttttcccagcaaatgaggcaggcaattctaagatcttccgcaaaacatctagccatctaaaatggagagatgaatcattctacctatacaaacaagctagctat

SEQ ID NO: 719026 - DNA, 599 bp, Homo sapiens
taacaccattaacaggccatgctgagactaacgtgagctgagagaaatgctacccaccgatcttagaatcgatgttggtgcgtatagtctgactagtttcaaggagactgggcgaagactctggccagaatgatctgtggatggaaaagcgccagcttgctagtggagaggatgatgatgatgaagattaccagagtactatgttggaagaagtgtccctgcatggagcgctatccaagcaatgaggtgcacatagctgcaagttggatgtacatactttctagaagaattagagaccatgaagagagtatcactagggaagctggctagtctctatatacttatcgagctgtctctctgtaatgcaagatggatggggtgtgatgggaggtctgatcccatcatagatctctactattgataaacgcccaagaccccttgggacactgcaagctcttttcagattacgtcttaatacactagttcattctgtctggagctaacttgaaagcactgaaagaaagcctgggaatcatggttgtgaagaacataaagattaatgaaaaggttcttatgcctagttaactgacatcaaactg

SEQ ID NO: 719027 - DNA, 376 bp, Homo sapiens
tccccctcgttccccagtgtacagatgggagggaggcaacccgtacatgaccttttaatggttttttcgagctacaaaattgtcacaaaggagcacaatattagaacagttgtctgttatttttatatcaatgaaaaaccacctaaacttggttagctcgaaatgatatcacacaagaagacatattggagcatctaaaaaagcacctgcaaggacaaggattcagggagaatggtggaaagagagcctgcgataaatcaggcacatctattttttaccagtttcaactgtgtcccttctaccactatatctcttatacacttgtgctttgaaagtcattgctccccattggggcatgtatacaggcttgagagta

SEQ ID NO: 719028 - DNA, 117 bp, Homo sapiens
tgtgatagaacagaggaggctccccgacatactcgcagatgaaggtcccctgtgggatggtctgcagggcgcggaccccccagcccctcttgctgtccagctgtccacctcctctgt

SEQ ID NO: 719029 - DNA, 879 bp, Homo sapiens
taagcgccatctgctcgcggcgccgtctcctgctcctcccgctgctgctgccgttgccgccctgagtcactgcctgcgcagttccggccgcctggttccccatactaagtcgccggtaaagaaaccaaggtcttagagacctgctcacagtcgtttcgtgagggaatgcacactttctgggtctagggtccaaatctatctcttcacagcagatctacttgattaccaattctgggccttgcaggggaggatattgggagttcttacaacatggcagactttgacaacaaagaaacagtctgaacttgatcaagaattgggatgatgttgaaaaatggtagaagaagaggaaacgggtgaagaaacaaaatctcaaagcacgtcagtaactgttcagatgatgcaaaatcctcagatttcttgcagcctttcaagaaagatttgatggtcgggtagaaaccccaacgggatactttgaaagcctgctagggtagttaaaagacgagtgattgctctcaaaaacctgcaagttaaatgtgcccagatagaagccaatttctatgaggaagttcatgatcttgaaaggaagtatgctgttctcatataaagctctatttagataagcgattgtgaacatttttcagtggctttatgaaacctacggaagaacggtatggtgtttggacccatatgagaagatgagatttcggggggaattgggaagaaagggcatattgggagatgagaactggtggagaaaaaaagaccccagggaattctgaattgggtcacttgtttcaaaattgggcttgtcgggatgttctggaccgtgaccttttgagcgtgagaaataagggagttcacatggagcagtatggt

SEQ ID NO: 719030 - DNA, 719 bp, Homo sapiens
ctgtacggctcggaattacgggatggaggcggaacggcagtgcagcccgaagccccgcagtccccgagcacgcgttgcatgcggtccctgctgactcccgctgccgctgctgtctggcgctcctgtgcctcgctcctgtgcctgcgcccccggtggccccggccgaggccccgacctggtgcatgtggacgcggcccgctgcgctgtggcccctgcggcgcttctggaggagcacaggcttctgccccccgctgccacacagccaggctgaccagtacgtcctcagctgggaccatgcagctcaacctcgcctatgtgggcgccgtccctcaccgcaggcatcaaggcaggtccggacccactggctgctggagcttgtcagccaccagggggtccactggacggggcctgagctacaagttcacccaactggacgggtacttggaccttctcacggaagaaccagctcctcccagggtatgaggctgatgggcagcgcctcgggccaattccactgactttgaggagaagcagcaggtgtacgagtggaaggacttggtctccaacctggacaggaccatacatcggtaggtacggactgcgcgcatgttaccaagtggaactttcgagacgtggaatgaggccagacccacacgactctagacaaacgtactccaataaccatgccaagggcttcctgaacctactaacaatgcctg

SEQ ID NO: 719031 - DNA, 197 bp, Homo sapiens
gtcagctctgcaccctgggaccaggcaggctccgaaggtaagccggtccctaaggcgctggggaccacgcttgtccgaggctgagttaatggttaacccacaatgcaaaaggtgcctgcaggcgtgtgaagaggtctgggctgcctggggcgtgagcacacagccaagtatgagctcaacacttgcagggcgtgggg

SEQ ID NO: 719032 - DNA, 1277 bp, Homo sapiens
ctctcattcggacgggcgcggaggacgctgtctggaaggaacgccgcgatgtgctagcgcgagggtagagtgcaccaggatccatgttcaaaccttgtgatgggattggtgatggtaggtactgggagaaaatcggacacttcgatgaaacgttcaattatgacttggttgaattatgagaagaagtatgtagcgcatccttggtgtgttcgagggttccatcgcgcacattagtgtaaccgacgagccagaacaggaggacctgattgaatgtatcaactgtattgggacgacaggcgcggctcgaggtagcaaattcgtgatggagctgatgcgatggcgtacttgatagtcgcatacggcgccaggttgtgctcatacgatagagtgtttagacttgtagacatacgatgaggtttacttgaaccaaggaattgttgtcctaacaacgtgtggcatgagcagactcttgggtaaccgaagtgtcgttgagaaatcagtgcgccacgatatgttgttaggttgtgggcagatcgacatacgctggcatcatgtacaggaccaggcaaacgtggagagggcggaaaataccacatttgtcctgtcccaccggagatgagcacagacatcttcgaggtaactcacgacgagttgccttgccagaacaggttaactacagacttatgacaatagcccttgcctactggcttggctaagggaagcttcgtatgggagtcccttgaacttgggaatttggtcggacatagcctggctctacggccccagccaggaagttgtcattggacccagctttgggcagccacagtaatgaagcaacgacttaggagggttgtctcagaacacatgtggctctcccggggattgagggcatgaagacctgtgagcaattggatgctgggagccccacgcgtccgaaaagctcaggaaaataggcgagctgtccttgttgcatgtgatgggactgccatgattgttgtccaccacccattattcatcaagctaacagggaacacggttgcaccaccacgaggagaagcagaaggcacaagcaggacgccgcacgagagtggggaacaagcaaagagccgaggggaccccgaaaacgcggcaggaccggggccgcagacacaccaagagcgcgcacccaaccccacggaacagccagatactaccctacggagaaaaactagtactacaccgagcgccactccccaaaccacagagaaatccgctcgaccaacccgtccacaccagct

SEQ ID NO: 719033 - DNA, 351 bp, Homo sapiens
aaccggccgcccttttttttttaatttatctttttttaggagctaaaaatggccccctatatattcaacgtctcaacaggactgtatcattcgcccaattacattggctgaattgagggaaagataatttagtaattctggtgacaaaactgtccatcaaacgcaaacgctatacacaatcttactctcttcgttcagctatgtacaaaccttaataaaaatagtaaatgttaaatctaaaactcttgccaatatcaataatcatctacctaaagacaggcttttgtttggtcagtgacaatttaacgtctcctttcataacaaatcccacaaacctatcatcttcttcca

SEQ ID NO: 719034 - DNA, 154 bp, Homo sapiens
gctaccgccctgctcacgtaccttgattgcgcccttcaccgggcctgaggcagggtgacctttataaccccctattggggggttgcccatatatttatcctgaatatcacattccaggccactggaaaattacagctttcagcagggaaacccc

SEQ ID NO: 719035 - DNA, 456 bp, Homo sapiens
gcgaccttacagggcgtaagcagctaatttgttatgtcagaaagtaagacagcgcttatatataatcagaggacagagcatgttgaaagggcacaggaggccagcctgaaagaggtgccagtggcaaaaggtggaacaacggtagcagcaaatcaagtagtggtaacattaaattataacccaaagaatggccagatggggtggctcacgcctgtaatcccagcactttggaaggccgaggcgagcggatcacctgaggtcaggtgtttaagacacacctgaccaatatggagaaaccccatctctactcaaaatactaaattagccaggtgtggtggcacatgcctgtaatcccagctactcgggagactgaggcaggagaattgcttggacccaggaggcagaggttgcaatgagctgagatcgcaccattgcactacagcctgagcaacaaga

SEQ ID NO: 719036 - DNA, 377 bp, Homo sapiens
  misc_feature (322)..(322): n is a, c, g, or t
  misc_feature (349)..(349): n is a, c, g, or t
  misc_feature (366)..(366): n is a, c, g, or t
catgattgtaagtgttctgaggcctccccagccatgcttcctgtacagcctgcagaactgtgagccaattaaacctcttttctctatatattacccagtctcgggtatttctttatagcagtgcaagaatagactaatacagggttcaattcagcaagaggatataacaaatataaatatatatgcactcaacactgcagcacccagatatataaagcaaatacgattagagctaaagagagagagtgaccccaatacaataatagctggagacttcaacaccacattttcaggcactgggacagatcttccaggacagganaattaaaaaaggaaacatcaggacttnattctggcactgttggntccaaatgggt

SEQ ID NO: 719037 - DNA, 317 bp, Homo sapiens
ggggcagacaggagatggcagatggacacctgggaggggctcactgagctccgcctctccatcaacggaggccccgtctaggttgtggaggatgcttgagagagccctgatgttctgacctcccaaaaggtcaagggtgctggcagccggtgagacgccgcagtttgctctgctccccggggctgtgcttgccaggagacatttcggctataagcaggcgagaatacctccagaacacacatcaggaagacagatggtgtgcaggtggggctcagggctgtcatcccctgaagctgcttctgaaagagctgttcttt

SEQ ID NO: 719038 - DNA, 120 bp, Homo sapiens
gctgcactacatccgcaagtacaaccccttcgagaagcgcacaagaacatgtctgtacaactgttccccttcttcagggacgtgtcagatcggtggacatatctcacacgttggcgctgt

SEQ ID NO: 719039 - DNA, 202 bp, Homo sapiens
acagttttctctggagcagaagagcctgtcgctgaaaatcatgcatgtacttttcccacttcatcatgatcaggaaatcccaactacccttatagagttctcacggtaaagtaccctacatttgctaaccccctggtcctgactattgtaccccggtgtctggatggacagaagctacttaggagcgaacatgaacatgcgt

SEQ ID NO: 719040 - DNA, 319 bp, Homo sapiens
cgtatgataggcaaagcataccaccgtattgctgacatggagaaagtttagtggtattaatggaaggataaagcagccacagcattcccttagtccaaatcctaattaagagcaagatctcaaaactcttcggttctatgaaggctgagacaggtgaggaagatacagaagaaaagctggaagctagtagaggttagctcatgagatttaacaaaagaaaccatcgctataacatagaagtacagggtgaagcagcaaatgctgatgtagaagctgcagtaagttatccagaatatctacctacaataattgatgaaga

SEQ ID NO: 719041 - DNA, 357 bp, Homo sapiens
  misc_feature (14)..(14): n is a, c, g, or t
  misc_feature (20)..(20): n is a, c, g, or t
ttcacttttctttntctttntgagagccggagtctccttctgttgcccaggctggagtgcagtggctcaatatcggctcactgcaacctctgcctcctaggttcaagccattctcctgcctcagccccctgagtagctgggattacaggtgcctgccatcatgcccagctaagttttgtatttttagtagagacagggtttcatcatgttggcccagctggtcttgaactcctgaccccaggtggtccacccgcctcggcctcccaaagtgctgggattacaggcgtgagccaccacgcccagcctgttttcactttcagacattttctgaaatgaattcccttctgtcgtcttctc

SEQ ID NO: 719042 - DNA, 415 bp, Homo sapiens
tgtggggaggagagttctagcctgagcagtgccttgctgtaaggaactgagggttagggtggggcagctgcagccagaagctgctgtggcttctggtcacacctgctgtgtcagcatcactgtggacagtccccatccctcccactttcaaatgtggcccagtctggtgacaaattagagttgagagacaggtttggggcaaggagaggtggggaggggtcttcgggatcaggacaggaatcccagagtagcatcagtgagccgggagagtctcatagagttggggagaaatcagtagtagataagtacagaaccaagcaaacagagcaagaggactatgaaccgggggggagacttccgtaagtaagcaaagatgccctgagtaaaacacccaggtcagatatccctttaaatt

SEQ ID NO: 719043 - DNA, 385 bp, Homo sapiens
ctataggtgggctgcgaatttgagtgcagagatatgaactgagaccaacaatactgtcgtgactaaaaatattgctatcgctacttggcttagcgtgtataaagggactaatgtaagacctagccgatcctgtacacccttctggacactctgtagtgaatgcgatgtcagttattatagtaaaccttgatttgtatcttctgcgcagggctctggtccagaagatgcactgtgtgcttgagagcctgctagaagtggaacacttaccagctttggatccatgtaggcaaagatttgaacctccatgatgatctagcatctgactgtgtgatcgtagcaagttgtttcacctttctgagctttattttctcttctataaaatggg

SEQ ID NO: 719044 - DNA, 855 bp, Homo sapiens
ggagagaactagtctcgagtatatatgtattttttaaatatatactttaagtttaagggtacatgtgcacaacatgcaggttggtccatatgtattacattatgccaggtgggtgtgctgcacccattaaactcgtcattaaacattaggtatatcccctaagtgctatcccttcccctttcaccccaccccacaacaggccctggtgtgtgattgttcccctttccagtgtccatgcgtcctcatgtgtctcagttgtgcaccgtgaactttgggagtgggccagggtgcaaacttacgtgacattaaatcaaacgcaaaggtgactacttggggcgtggcttgccgcaaaacactcaacacctttctcagttagacgacaacctagtccttgggagtactacgctatacactgtcttcgcgcatatcttgtgaaagacacagcaaggcaaatcaatcattcactacccagcgcgtggggtctatcccacgcgtggacgcaaacacgtggacaggcccacagagaaggacagctcgaacgagctgcagacacacactcaccttctgcgaacgaggtcaaacttccgacagtagcaacaccaaagttgtctaccccaaaaaatccacgccgtgtacaaacggggtcaacgcgctcccagcgacaagaaaagccccccacaacaaaaacagataggaacgcaagccgtgacaggtgtaaaacaaagagcggcaaccaagaatacgtaaccccgacagggagggaaatcaacaaaccttcaaagacggggactggaaacacacgtgaacaatcatggtacaacagacaaggtaaacgcgcagccataactcagaact

SEQ ID NO: 719045 - DNA, 194 bp, Homo sapiens
caggagcagacgtaatatataacaccaattcaaatccaagggatgctttctacagtttgggtgaacggctgctcacgcccctgtagaaaccgatctctgaatttggattgtggaaatatcctaaatcgcttccatggacaaaatccaaagtcacatctcttttatattatcgtgttttttgcagcctgtagcca

SEQ ID NO: 719046 - DNA, 344 bp, Homo sapiens
tgtcccctagcgggtctcatgatagtgaataaatctcaggaaatctgatggtttcataaagggcagttcctccgcacatgctctctctcttgccttgctgccaggtaagatgtgtctttgctcctcctttgccttctgtcacgattgtgaggcctccccagccatgtggaactgtgagtccactgaacctctttttctttataaattacccagtcttggctatttcttcacagtagtatgaaaatggactaatacagtaaattggaactgaggtagtggggctctgctataaggttaacagaatatgttgaagcaacttggaacagggtaacaggcagaggttg

SEQ ID NO: 719047 - DNA, 396 bp, Homo sapiens
  misc_feature (174)..(174): n is a, c, g, or t
ggactctagaggacccctccgagaagagttgtgctcccatatagtaacttactactccggaaaaaaagaaccattaggatacataggtatggtctgagctatgatatcaattggttatcctagggtctatcgtgtgagcgacaccactatatttacacgtaggaatagacgtangacacacgagacatatttcaccgtccgctaccgatattcatctgcgatcccacaccggccggtcaaagctatattagtctgactacgccacacgtccagggtaagcaagtatgcaaatgatctgcttgcagggctctgagtccctaaggattcaatctttcttttcaaccgtaagggtggcctgacctgtgcattgtaattagcaacactcatcactaggac

SEQ ID NO: 719048 - DNA, 254 bp, Homo sapiens
gctcggccgtgttcgatcactgtactatgattggcctgactgaagtgggctgtgactatagattgaaaaatcaagacagaaatgctaaaaacaaacaaccttagctaccataatgtataaatctcaaaactcaccagacaatccaatttctaaagaaactgatggaataaatgcttccccttaacatgaactatggtaaagatagcattgatctgtcaggaaattcaccaagtccagtacgctgactctttatg

SEQ ID NO: 719049 - DNA, 499 bp, Homo sapiens
tttttgtctctggatttgcctgttccgggcatttcatacaaatggaatcccccttgtttgtctggcttcttccatccagcatcgtgtcttcaaggttcatctgtgttgtagtgtggattagcacctcagtcctttttatggctgagtaatagtccactcactgtatggataaaccatgttttcttcatctatccatcatctgatggacatgtaggttttcactttttggctatgatgagccatgctgataggaacatccgtacaaggttttgcgtggacgcgaaggtatgtttcatgcctcactgtgtatcaggccccattcctttctgtggctgaataatattccattgtacacagagaccacattttgtttatctcttccccccgttgatggtcacatgggctgatttgataatttttaaagatgcaccttctgaggcgggaggatccttgggaccgggaggtcgagactgaagtgggctatgactgactaccgcgc

SEQ ID NO: 719050 - DNA, 885 bp, Homo sapiens
gagcgccgccgcatgttctccgggctagcgcgagcgccctgagcgttgtagagcagctcaagtggaggctgcgtgagagatcaggtctctcaggcagctgaggagttcaaacagtaattgtattgcagaatgttgaaggatgccctgttgggggtgtgtcccagttgaagtacccctttcgggggagccaagatcgtggggtgttaactctgaaagaatctagggagaggaggtttgctggaggaaattgccttcaaggcacaagggttggttgaattggattgccttcaagtttcttccagggaaaacattttctcccctcaatttaaaggagatatttacacgccttttcctgtgtggcttgttcttattaggcaaaattcacagttatcatgagttcctactttgagtgtttgtgagacaacttgggttgacaggggaaatacgcgaaattttttacagcaattaagggtaaaataaacaggtgggggttggtggtaaaaaagtgtggggggggcggcccaagagggcgttatcaccccttttttttcaaaaaacatttttaacccgcccttttttttaacacgcgggggcggggagcaatttttattttaaaacaagaacgcaggcgcgcgccaacagaaaagacagaagaagagaccagcaggcaactcaccccgccccccttttttttttttttttttaatagcagcccccccgcaccaacgcaaagaagcaaatcccccccaccagcacaaagcaagaaagtaaagacaacacatcaatacctcaccacagctccgcccacaccccatataatattatttttttctttttatctccacacaccccgacccacgcacaacctcacaagcacaaaagagg

SEQ ID NO: 719051 - DNA, 357 bp, Homo sapiens
  misc_feature (66)..(66): n is a, c, g, or t
  misc_feature (253)..(253): n is a, c, g, or t
cttgccccggtagattggtgaagcctttaattaattgccacaactgctaaggattgtgactcacanctagtgatagtgcggacgtgacatggagcttgttataatcacgagcagatttaactctttcaaaggccaaaaggcttctgatttcaagagacatgtttccccaagaactcacacatgctcatttcatgcatgcacgccaggctctggtccccccacactggggatcctgaggcagcagaagtgcagnccctgccctgagggagtgcaccgtctaggaagagtgacaggctaagaactacacagaccattatagtgggtaccactcaccaattccctacattagggcggctg

SEQ ID NO: 719052 - DNA, 737 bp, Homo sapiens
ctggtgttgccatgtcctcatcgccaactgccttgtaatcattgacatctagcctttacaagagcttcctccatgctgggcgccggtcctgatgcgtgggtcctgacgctggcctggcagtccggctttgccatcggcatcgtggtggtacggctggcgttgtcggggtcaccgcccagcatgccccgactatttcgtggtgcatgatcctgattctcatctgtctggccgaggtgctcggcctctacggtctcatcgtcgccctcatcctctccacttatatgtagaccgctctgccgagcccaccagtccacagaatagttatgtaaagaccacccgctcctgcattccagaacgaacagccttgacacatatcgtacggggaccgctcgctccccagtagttggtcttgtacatgcgcagtgtctgtagtgcccatcgtctgttgccccggccttgctccccgacccgtccccgtgccgtggacatatgggcccactcatcgcccctaccaggccccttggcgacctccacgccacctagagtgctctgtgtatagcggatgatttagaattgtcagtttctctttactgaatgtttagtttactaaagatctggccagttcctgcgtactgcggagcggcccctgtctcccagctatctataaccttagctagagtgtcgtcattgtgggttcctgttgctgaacttcatacgtcgagcggccctcaccgacc

SEQ ID NO: 719053 - DNA, 233 bp, Homo sapiens
  misc_feature (172)..(172): n is a, c, g, or t
tctttgggaagagagaagaacagagtgtccgattctgcctctatttatgtttctattcgggaacaaaggtgggtggtgtgtgtgtgtgtatcctggtgtgggtttttaaaagaattgggaggaagaaaaaaaatttctcggcccttttcctcgatctcgctccccctttggnttcttacgacgggtcccccttcctttttgggtcctggtgaggtctggtttggctctgagcc

SEQ ID NO: 719054 - DNA, 190 bp, Homo sapiens
  misc_feature (59)..(59): n is a, c, g, or t
  misc_feature (62)..(62): n is a, c, g, or t
  misc_feature (108)..(108): n is a, c, g, or t
ttgtaacagtctgctggtagatccatgacattgacattcccagtgggcctgggttccanaanttccagtcaagagagctttctcgactgtgcttgtatattacagagnttgggagccagattgttagcccttcattttgggataagagctggagcttggcccatttaaggctagttattaatctgagaaa

SEQ ID NO: 719055 - DNA, 89 bp, Homo sapiens
cctttgaacactgattttttttttttaaattgtcaaacttggtacaaagcaccagcatggccaagtttctatagggacttcatttcatt

SEQ ID NO: 719056 - DNA, 209 bp, Homo sapiens
cgggcatgttgctacacagtagtaagcagggctaaagttagcacgtcaatccagtccatacactcagaccaaccaaagatattattatcgcatggcaataattggttagtaataaagaatgttttaaaagcatatagtagtaataatcaaagtggtataaggtttagatataagaagcaagtgtatcatgaaactgcattattttatac

SEQ ID NO: 719057 - DNA, 355 bp, Homo sapiens
  misc_feature (13)..(13): n is a, c, g, or t
aaaaaaaaggggngtgtgggggggggttaattttttctttaaaccccccccgggggaaggggcggggcgggaaaaaggtttttttttgctttggttcccggggaccagggttaaagagaaaaggcccccccggggtttttttaagggttttggtaaaaaaccccccttgggcccagggggggggttggggcccgaaatttttttttcccccttttggggggaaacccccccttttttcccccccggttggaaaccaaaaaaatggcccccctgggaaagggggggaatttttttccaaaccccggggaaattttaaggccccgggccaaaagggggaaaatttaaaatttttcca

SEQ ID NO: 719058 - DNA, 140 bp, Homo sapiens
gaggggcggtgtggacccaggcgattcatggagctgggatgccacgatgttctcaaatgaccttgttcgtggccatggcccttcctgtcctggcctccatgtggggcaccatgatctccacccagtgctgtgactacccc

SEQ ID NO: 719059 - DNA, 862 bp, Homo sapiens
ctggggcgtctcagcgagcgcgcgagttgacgcggatcgtgggccggagcggagccgaggcgtcagatgcacagtctctgacatcagtctctggaccctccaagagcactagtgtctaaaggcctacggttgggggggaaagagctcagagatgaggagcagacagctgaagcgataagaacaaatgatgtgaaagaatggagacagtgttgagatgagtcaagataaaaatctatacaaatcttggtaccagctgtccctatatacatggcatggtgaagtaaaaggggtgtcctgttgatgctcttggtgggttccaagagacaacaggagaagggacctctcttcgaggggacataaaatgtttgcattgttgggtgacccaagtacagctaagagccaatttctcaagcacgtggaggagttcagccccagagctgtctacaccagtggtaaagcgtccaggtgctgctggcttaacagcagctgttgtgagcagcatgaagaatctcatgagtttgtcattgaggctggagctttgatgttgggtgaataatgggtgtgtgtagtattgatgaattttggtacagacggacggtgcgggatccaagttggtcattcatgaaggtcttggcacaaggagaccattatttcctccataaaagcaggagtagaagggtactcttggaaggccggaggcacattttgggggcggagaacccaacatgggctcttagacgatccatctttggcacggagtcaattgggggcccacatgtcgcggggacatccaaattgggggaggatagggcagacatcttgccggctgaaataaccacaaagacagatctatccaaataaa

SEQ ID NO: 719060 - DNA, 198 bp, Homo sapiens
gattacatatgctgaggctgagggtgtgggggtgtgtggtgtgtgtctggagtgtgtctgggtggtgtgtcgggtgtgtgtgtgtctggggtgtggtgtgtgtgtccctgcccgttcttcacggctggtaccagggtgactgactatagtaaatgtgcattgctagccgcatgacaaagctttttcagcagtccatcc

SEQ ID NO: 719061 - DNA, 209 bp, Homo sapiens
gtttgaacctgggaagtggaggttgtggtggcactccagcctgggcgacagaacgagactccatctcaaaaaaacaaacaaacaaaaggccagccggggtgtggtgaggcaggtggatcgccagaggtcaggatttggagaccagcctcaatggtgaaaccctgtctctactaaaatacaaaattggccggggcgtggtggtacgtcct

SEQ ID NO: 719062 - DNA, 440 bp, Homo sapiens
  misc_feature (244)..(244): n is a, c, g, or t
  misc_feature (364)..(364): n is a, c, g, or t
  misc_feature (380)..(380): n is a, c, g, or t
gtacactccacactgtgggagctgcccgagcagcggctcaagggtccagacacagaatcttcttgggtccaaataccccctagaagtatcccattggccacttcatgctcacctcatgtaaatgaagtggtagcttgcattcagtctgattggtggcagaaagcagccaaccagaggctgaagtggttacaaaggtcacactcctgtgcaaacatctgattggttgcaaaaagcaaccaatcanaggctaaggtgaagttacaaaagttgcatttctatgcagactaagactcagctcgcaatcaagtatggttggttgtggacagcccaatttcccccaattttcccacctgccagggcgggnaaaggtggggatttgnaaagggagtaaccctctggtctttttgttacttaggcgtgggagaagttaggattttccc

SEQ ID NO: 719063 - DNA, 334 bp, Homo sapiens
  misc_feature (59)..(59): n is a, c, g, or t
ccggagtatcgcccaacacaacatcatgtagcacttataggaataaatttacttatggnattagaattacctagagggatgttttaagaattctgaatttgacgctggaaaatcaacagtgaattgtcgtaccactccagttgcggagagatttttcaccagttccacctctctgactctaaagcatgctgcatgatatccaagtgaaatcctgcatccgcacgtagtgctgctaacatcagacatcgtagtcagaatctactcactacgagagccgcagacaccgactaacgtgataatactttcagaagccgtagagcaaagtctagtactc

SEQ ID NO: 719064 - DNA, 282 bp, Homo sapiens
tacttactctcgttggtgataaggaacagctaacacaacacacagggtttttctgctcccaaaatgggattcttcagtgcaccaaatcgaagaaagcactggacgtcacgctggtttctccattgtttctccttaacattggaacccgtaacttttgtctaattacattcttacattctcaattaataattgtaaattaaaagtaaaactttccttcaaaagggaacaagttattgtaatgacaaggtttttaattaataaagctcttgcgaatagctaaaa

SEQ ID NO: 719065 - DNA, 190 bp, Homo sapiens
ttttccagtgtgcagtctgcagctgggtgtgcgtgggacttgcgtctgttggggtgtgtgtgcgtggggtgcgtggggcgtgtgtgttgggggtgtgtgtgcgtggtgtgcgttggctgtgtgtgttggcagtgtgtgcgtggtgtgcgtggggcgtttgtcttggggggtccggctgtctgcagggtca

SEQ ID NO: 719066 - DNA, 165 bp, Homo sapiens
ctgagcaggacaccaaagttcctgtgccaggctacacaaaggtaccagagccatgtcctatcaacgatcactaccaggcccagctcagcagaagaccaagcagaagtaatttaggtgcacagacaagcccttgcagaagccaaccaccagatgctaggacaccct

SEQ ID NO: 719067 - DNA, 329 bp, Homo sapiens
atattgcagcttaattgtgtgttgtttcttttctcttgctgcttttaggatcctttctttattacagaccatgtttttatccttgacctttggaagtttattaaatgctttgaggtacttttgtttgggttcaatctgctttgctgctctataaccttcttgtacttggatattgatatctatctctaggtgttggaagctctttgttattattcctttgaataaactttctaaccctgtctcttgctctacctcttctttaaggccaataactcttagatttgcccttttgagactattttctatatcctgtagggatgcttttttat

SEQ ID NO: 719068 - DNA, 952 bp, Homo sapiens
aaggagaaacagttccacgaaagtgatcacacgaatacctgaatgcccaagagtcaggccaagcagcgccaggctgaacctgtggcgctatggagactttcgagctgatgatgcagactgaatttggtcgtacagtccgctaaggaggggatctgggtttggcccccagcgcccgctcacgccagtccctcttcctctgccgggagggtgttttcaactccaaaccccagagaggggttgtagattgggtccagctttgcttcagtgtgtggaaatgtctcgtggggtggcatcggggctgcggggtggggaccccgaaggctttctggcggcagacccttgtcctctgtggatgatgggcactgctatccacagtctctggcagttggttacatttggaggttggtgggcttgtttgaaaagagaaaaggtcctcaaatcaggaatgcaagcatcagagactatgtcctagtgggacgggagtaatccgaaaaacccaggctggccgcctgctggcacctgcctctatcccagagtgccctcgtcccagtgtctctgtcgcaactggtggactatgtgcattgccggatacgctccatgctcgatttgccggttgtgttcgcgtcgttcgctctgggccagcccatctgtattgaaggtagagagggcgcccaagtaacgtagtgtaacgtgcgtgcctggcaggccccttattggaatagacctgaacagctactaaagaggacgaaccgagggaaactaggaaaaagggaatacggaaggacctgagccacacggcactgtggctgtaagtacgactaacaatggatcataattgtgcttaggatgacatgtggaaacaacagtctagaatgacatgaatcataaataggacaacgtcccagtgggaataagggcgcccaggccctgtataaaaacagaaaaaagtaga

SEQ ID NO: 719069 - DNA, 151 bp, Homo sapiens
cccttttttggggggatttttttccccggggtcccccccccccttccttttgggggggggttttttttttagggttttttttttgggggggggcccccgggggtttttttttttttttttcctttttttctttttaccccctcccctttta

SEQ ID NO: 719070 - DNA, 167 bp, Homo sapiens
  misc_feature (39)..(39): n is a, c, g, or t
  misc_feature (150)..(150): n is a, c, g, or t
  misc_feature (156)..(156): n is a, c, g, or t
gacagcagcccaggcaaaggccaagaccacaggagcctnccggctcatcctgcgctaaaggctgcagaggccccccaagatccgtaactaccattatggactgacttcttcccccacccgcccactgggtgctcggggccttcgcatggngcctgngctttcacctc

SEQ ID NO: 719071 - DNA, 782 bp, Homo sapiens
  misc_feature (1)..(1): n is a, c, g, or t
nccgcaacaatggtggccctggtaaccccgacataaaacagaggtgtgttcctgtgtaatagtgacgcacgccctctctttttagtaagtacaggtagcgctttctatggaggctcaatttgtatggggtatacatatatatggcgaagatggggtcaccacatgcggggcggcttaattatttttatagcccctccgaggtggggaaatggatgacactcacgctacgtgtctgtgtctatcaagatacaaagatatcgaaagctggcggaggagcctcaacttttcggggttacatgtggcacacacatttgcgaacttaaacgaacttgctgcaacatgccgcccctcgcacccaggaactttgggaacgcccccccgcggtggccgaattgattcaacgccacccgggtggcgagagagcgagcccggcaccacacagcgggggtatacaacttctcaagagacagacacaagacagcttgcaggcacccccctgggatgtaaagacaaggcacacctggggcgtgagtcagagacacagacacatctctattcaaagacggcgtgtacaattagataccccctaaccctcgcgaggaaggggaaaaagtctgcccgctacccttgtgtcgaaagtattggattacatacgagtcgtccacagactttgatgaaataggcaccatctatgtggggccctaacttaacgccgcccacggatataaccaggcggttgagccaattttcttccgtaaaaaatatcacacaaatgaacgaaa

SEQ ID NO: 719072 - DNA, 329 bp, Homo sapiens
catcatacatttcaaaatatacaaaggcaatcctcattgaacgcctagacagctgggtcatatacaatagacacatcggtaatgggaccatatttagagaacacttctctatatatctctgtctgtggtgtacaagctcagtcccaaatactccaagacaacagttaggatcaggatttgcccgattcccaatatgacgcctgcgagatagacatgggagaatggctgtggctgtgccgtctacgatcatctcgaatgtaagacctgctacgtgatcgtctatgggagcgggagcgagaccgtgaccgggtataatgccttcgggagct

SEQ ID NO: 719073 - DNA, 393 bp, Homo sapiens
  misc_feature (331)..(331): n is a, c, g, or t
gacacccgtgaagttttactcttaagcacagcccaataagagttgccaaagagcaatgagggtactgttggtgtgaacttgataataaccaaatagtcatcttcatttatttcttgaacttccacacaactctctgtgaccacttccagttcttctaaagtattgggcttttctgggtcccggatagttcgaatcaaatcataaacttctagcgctttctcttccatgatccggggtgccaggcagctccgtgctcagaaaagcctgagagccataggaccctgctcagcgtccaggaaagcagcccagacactcgctccatcctcacgtntccccatccctggcgactgtcccaaccgagccaccgtctttccgcagccgacctcgagagag

SEQ ID NO: 719074 - DNA, 132 bp, Homo sapiens
gcatctctcggctcaccaatatggacccaccgagaaaaatccccccaggctgctatgactgtggagatggcttctataaccccaccaccagggtcatcaaggattatctgaaccgctttctgagaaatgcag

SEQ ID NO: 719075 - DNA, 1318 bp, Homo sapiens
agcgggggacgagccgatcgccgttagcagggagcgggcggtcgccgctccgggccggggtcccgagggcgagcagatcctcacgaatggccctatgggtgctgcgatcgcgacgtgctgggcgtcctgtggcccatggtcagccgcagcggtgggctactgcgatgactgctccaggtgcctggaccctgccatcttaatgactccaggtcttcagcatccatccaccgtggttcaagtgccccgggttgccgtctgtagcccggatgctccaccaggggggcgcccaatggtgcccgcgcctggggctccgcgcgatgcatttggtgcatgcccctcggacgattgcgcactccggcacttgtgtcccccgacgcggacgatgggacgtcccggccctgccaaggtcggaggcaagactgccctcgcgcgggctcgagggtaggatccgctgtgacgtagaaggtcgggggtcccttggaccgggttgctgggccggacgcgcctgcggcgctccggaccccgtgccggtggccggggagcggaggcggacgggagttggcttcgatcgatcgtagttcccctccctccttcgcgtggggttgccccgggcgatgcttgcgttcccccttggggttcgctcgagcgcgccttttgccccatgaagcaccactgtcactatgaacgcgccgactcttgccacacgagcgtcacaatctgatgcgcaatccggaacactcccaattcgtatgtccgagagcaaaagccgtggcggtagtgggaccgactcccccccacttgggcagggcgcataccgttgtccaaactcgacagggctgcccacacaatgcaaaatgccgaagacaaatcccgggtggagagcaccttgggcgaggaaccttcctgtgaattcattcctttggcgaccaagcaaagtaggttcctatttacgaccccctggatggcagagaaacgagcgcattggaactggcggtttgacgaagtatagtgtccccccgcaatccgcggcgaagagacaattttggccgatcccccttgtgaagaagggcgcagacggaggagattggcacacgagcgggagaagagagcctatctcttgttcgcactgtagtcccgctcgatatcgcaattgagcctagcaatatagtcccggacaagagcgcttttccttgcagttagcaatattgtgctttctactcaacgcaagtgtattggatggaccaaccttcggaagagacgtggtccaaccaatagaggaaacatctgtgtacattttggcccgcctttgtaacccacc

SEQ ID NO: 719076 - DNA, 279 bp, Homo sapiens
atcgagctcggtaccgcttggaacagcagtttcagattttggaacattgtgttatacttactggttgagcatcactaatccaaaattcaggccgggtgctgtggctcatgcctgtaatcccagcactttggaggcctgaggtgggcagatagcttgagctcaagggtttgagaacagcccaggcaacatagggtacccccatctctacaaaaatgcaaaaattagccaggcatggtggtgcatgcctatagccccagctactctgtatgggggatctcg

SEQ ID NO: 719077 - DNA, 219 bp, Homo sapiens
gtcagactgattaatgtctactgtgaaaatttggtagtaaattttcatttgatattagatataaatatctgaatataaataattttaatatactagtcatgatgtgtgttgtattttaaaaattatctgcaaccttaattcagctgaagtactttatatttcaaaagaatgaataacatgtgataataaaatcgctactttaaggggtttgtccaaaaa

SEQ ID NO: 719078 - DNA, 280 bp, Homo sapiens
tagaggattccgtatatgctgtctcaatttcttggaaggcataactcacatttagaaatggacaccagtccagcctgggcgcggtggctcactgcctgtaatcccagctctcagtggaggcaagaggcaggaggatagcttgagctcaggagttcgagacctgcctgggcaatatagcgagaccccgttctccacaaaaagacaaaaaaaaatggacaaaaaaaaaaaattagcgatactccccttaaaaatgggcccccaggccttagggcagagattc

SEQ ID NO: 719079 - DNA, 1822 bp, Homo sapiens
tccgcggcgcggcggaggctctggggttacagcgagagtcttctaatccgcaggcgctgcgggcaggtccattcatcattttggcagcagcacaccagcattcacagcacagtcaccaccaggctgctcaccccaagtagttctgcacatgttcctgcaacagacagcagtcaaccatgtatcagcaacagtggcactccagcagtcagctatcgagcacagcactcattgggcctctccaaccatgccaccagtctggccacatcatgggcattagcatgctaggcacagtcagcatcacagcacacacatagcaggcacagcacacccaattggcacaccagcccaccagtatgacatagggcagcccatcaatggctatgtcacaatgggcggcaacgcacaaggcacagcagcatacccacagttacagcatcgtagggcaaacattgcagcatttggcacacacatcatagcgcgtggcgatccatcatcccaaatgagcgcttcaatcacactcccaaagccaggcagcgcaggcaactgggtcatcacgtcaatggcccgcacacaggccattatcgttctaaacgcaggccgtatgggaccaaaggcaagccataggataggcacacactctccgtgtggcaataggaactcgtcacagtcagcccaacaaaaccgaggaccgagcacatttggcgggcaggcacaagcgcagcaggccatttgcggcacaccgggttaggcacagccgcgtagcgggcacgcgtccagaatccgcatgaccgagcaaagccagggcaatagcacaaagaggcacaagcgatggcgaaaacacgccacatagaccacgcaaagccaaaagggtaaggaaaagacgggcaagcgcaaccatatcccaatcggcgcccacacaaggcatacacgcatcgcaagagacgcatcacatagggcacactaatcggagaacactgagggacaccacacaatacaaatcggagagcggaaccaccacaaagcggtaaggacactacaaacagtcacagtcacgaacacagcatcgagacatgcacacaagatacacggtacacaacagggcacacctatacacccggccaggggaacatcgacaatgaagtaaacacaccaccgaacaccgaggcgaactgcaacgtacactacaggcgtagggggaccgacaccagccacacatacacagtgggcacgcatggcactatggcacatgaagctggcgcgaccgcggctccgtccaggcaccgcccaaatgagctacaagtaacaaagatgcgctgatatgtggaacgcccatcgacgcgcacacgcaggatgaacacagcacgcaacaagcgagcaacagacacatcgtacactgcgagaaccatacacaccacaagaggagagagcacacacgaaacaacgcagaccagtggccacgaccaccagtggcacaatactaccaccacagggcacagactgacaccaaaaccacggcgagcaacgaggcgcaatacaccacggagcacggcaccacatgtcagcgacacacatcgcgcgaccaagacaggaggaaccgaacgctacacgagaacgcgcaaccgcaccaagcacagcacaagaacgacagcggcgacacacaggcgagatgaacagcacaaaagacgacatcgagcacactgaggaacagaccgcacacagagagcacgatgacacagacagactcagacacacacgcacagagcaacacaccacgaacagaaccgcataccgcacaccaagacagacgaacagcaactcaccg

SEQ ID NO: 719080 - DNA, 288 bp, Homo sapiens
  misc_feature (89)..(89): n is a, c, g, or t
  misc_feature (131)..(131): n is a, c, g, or t
tcatagttaatagaccatacttagcaatcatacttttaaagtgggaaagctgaatgacacttttcagacaatgaacattatcaaaacanaatgtataatttcttaatttgaataataaattaagcgtttanatgctattggtagtcttgatatacagaaataacataattagggtgggtctattttcatttggggtagtataagtgtagaatgtactatcatcttcattagttcaattggtatattttcattagtatttaggaaatagcatatatgcagcacccgcaa

SEQ ID NO: 719081 - DNA, 886 bp, Homo sapiens
gaaattaggcaatagggatggtaggattcaaatgtgtgtcattgtagaagtggaagctattagcaccaatgacataaatacatacaagacatcagaactaaaatgtcatgtattaacagttataggtgtcatttaaaaatacaagttcctttatatttctgtcccatcaggacaaactgacaggatatggggaatccattggttatcttccatgtgtcacttctttatggacaggagctaatggaagtgaacagtcatgttcaaaggcaagcatttatagaaaaaacaggagataatgtttaaatttcattatcaaactgggccatctgttttgtgtaactccccgactagttggatgggagagtccccatgctaaaattcagctactcatagataaattcagaaactgggtcaacggcaacctgctgttttagtgtgtgaaccagacgatagacttgcttcagcgagacaattcaatcaattccctatggccagacgaactgggttcagcctaatgtcacaatgtactgttgtaagaactgttactcatcttaagagtgcctatattaagatagatgcatgtctcacacacgggcgtgcaaggacatataaccgacactctcactgcatcacaaagcaagacaagaaggagtgcaatggccatcgctactgacctgaacgtaaggaccaagccaagaatcctcgcgagaggcaggagatcatcctacaggccaaacacacacgcgacaacagcacagggaccaccaaaaacaaaacacaccaagggccagaccatcagaccaagggcgacagacaagcaacacgagcgacaacccacacaaaccacacaacgcacagacaaacaggacagacgaacacgacactc

SEQ ID NO: 719082 - DNA, 334 bp, Homo sapiens
ggaggaaactgaggccccaaggagtggtgacttcccaaagtcaagcaggcaggaagctcttcagccagggctcacacctcagacagaggaccctatgcttttcctgtgtgactcactaacctcatgaatgtgaccctgatggagcagagggcccaagcaggtgcccagccgggatggtccgtgacatccgctttcctgagttggcttgatcaccgtgcttcccctcttctctgtcgttgcagcctccaagtacaccaaggtagagcagctgaccctccgggagcggctggcccgtattcaacacacacaccctcttccaagaagaccacccggc

SEQ ID NO: 719083 - DNA, 286 bp, Homo sapiens
actgttacaacctacattttcattaaactatatcaatatttaccatgtaagtgtatataatattgatatagtttaatgaaaatgtaggttgttaaacagtaggcatattatagcctcatttgggtttgtatattgtaatttaggcatagaaaaatgtcctggcaagcactcagcaagactaatcaaagaaaaaaagagagaagaatcaaatagatgcaataaaaaatgataaaggggatatcaccaccgatcccacagaaatacaaactgtcatcagacaatgtat

SEQ ID NO: 719084 - DNA, 286 bp, Homo sapiens
aggaatgcactcaagtgacctgggccagcaggtatgacactaaatcgttactggcctttctcacccagttaatcagtctctgtactggtctcccttgtggaaacaagtgtctcggttaactaattctgttttatggttgtgctcaaaattcatagcaggtgccgttcattcttgtgcttttagatcaaacccattcccatcatcagcaattattcctgggtttatactcatcagcatcatttaggactttacaagttagttcattgagtagtttatttcaattgtc

SEQ ID NO: 719085 - DNA, 164 bp, Homo sapiens
  misc_feature (76)..(76): n is a, c, g, or t
  misc_feature (161)..(161): n is a, c, g, or t
ggatggcagctggacagggtggtggaggtggcatctgtttgcggacttctggatctcccccaacagatgccacctncaccacctgtccagcaggcagagagctttttgatgatccctcctatgtcaacgtccagaacctagacaaggcccggcaagcagtnggt

SEQ ID NO: 719086 - DNA, 290 bp, Homo sapiens
ccgtaccaggcgcacttctcccactctccaccctctgacaggtccccggtgtgtgttgatccccctctatgtgtccaccgtgtcgtcagttatgttgtttcccctgttataagttacaacatgccgtatcttggtcctctgttcctgtgttagtttgctacggatcatgtcttcctctgaatttactctattatctctcactttcctcatgtcaccgaattcctggaagaaacaatctgcacttgtctccatattctccacttgaccaactccagaagtgcgcctgggtg

SEQ ID NO: 719087 - DNA, 475 bp, Homo sapiens
cacttaaacacataaatactagtgtgattatatctttggagtttgcaatatagcataaaggacaagtagaactgcacattaagattacctaccgaagcaactagatgtggctgggacacaatcaaaggaggaattttgtccacaggaaggtgaggaaattccaaatgaagcctagatcttcagtatcataaaaaggcagagctggccaggcacagtggctcatgcctgtaatcttatcactttgggaggccgaggcgggtggatcacttgagatcaggagttcaagatcagtctggacaacatggcaaaaccctgtctctacaaaaaattagctgggtgtggtggcacgcacctgtaatcccagctgctctggaggctgaggcatgcgacgcttgaacccaggaggcggaggttgcagtgatccaagatcgcaccactgcactccagcctggaagaccaaacgagactctgtatc

SEQ ID NO: 719088 - DNA, 345 bp, Homo sapiens
gtaggaacggcggtcacttctccttactatagtcgtggaggatacagagtcacgttccagatctcgatcatactcaactcgatgtctattagagcatgaagactttctgaaacctgccctagagctgggatatcgttagtgggcaacattgttaatggtgtctggtttaaaaagtgaacagttgcctagtgaagttaggtgacttgggacacctttaacagatgactagtttgggtggagttgaaatgctgttcgcattctgcatttgtgtagtttggtgctttgttccaagttaagtgttttcagaaaagtatgttttgcatgtatttttttacagtctaaatg

SEQ ID NO: 719089 - DNA, 582 bp, Homo sapiens
tggggaagaagtagggttcttggccatggtggctccagctactaatcctggttttaaaattacgcaaagaacgatactggcgtatcaatcttcaaatggagttttctacccttaacctggccaattattcacagaaactaatgtcacgggcgcaccggcctataaagctatactggcgaaagatggtgcaaaaagacaaggcaatggccaatttccgagatggtgattctttttataaattcaagaattctccaaatggtgttcacatacctcatcaccataaaaagatagccccaaaatatggtgttctggaggggatatcctgggcaaagcagaaaaatctaatggggataatttccttcaattatactcttcccaaattttaagatttattattttaaaagaaggggttttaaaaggggtaaggttttaaaaccttttttaagagaaaggtccaatttcaatattatcagccttatatggaaataggggccctccgggcagtgagccaaagtactatatactaaagattggacccaaaagatgaccttagaagtcctctggccctcaaggagttagaag

SEQ ID NO: 719090 - DNA, 380 bp, Homo sapiens
gctaatcccttgtaaattaactgtagttcaagaggacagctctttggacactaggccaaacccttgtagagagagtcaaaattttaacacccatagtaggcctaaaagcagccaccaattaagacggcgttcaagctcaacacccactacctaaaaaatcccaaaaatataactgaactcctcacacccaattgggcccactctatcaccctatagaaggcctaatgttagtataagtcacatgaaaacattctcctccgcataagcctgcgtcagattaacacactgaccttacaattaacagcccaatatctacaatcacccacaggtcatttttcccctcactgtcaacccacacaggcatgctcataggggaggtt

SEQ ID NO: 719091 - DNA, 174 bp, Homo sapiens
gtatatacttcaagaaatttaatctttaatctacagattataatatacgcatctagttgattcaatacccatctctcatttatacttacgtaaaatcagtaaatcaatcactgaaactgctttgcgaaattatgacagtaggataaatctgacatagctgactctatcttgcgg

SEQ ID NO: 719092 - DNA, 409 bp, Homo sapiens
aagcagtggtatcaacgcagagtgcccattacggccggcaaaaaaaaaaaaaaaaaaaaaaaaaaaactttttgggcggcgcttaggcccctagaaagaggttttctgaacacaattgtggttggggcgcgcgcgaggccccaagtatgttatagcagacatggcggacatcggggtttcacattagaagagacctcaggcggatagagaacacaaggggctgggagattcctcccccaaatataaaaaaagcccggggggaaccacgcgacgttgttatgcacaaaaactctccagaagtagggcatcaagagggaccaaatagagggggaactcaactaaaacaggggctgtcacaagcagagagctcgaaaataatcaaaaataggacgcccgggcgtaggggggg

SEQ ID NO: 719093 - DNA, 200 bp, Homo sapiens
  misc_feature (13)..(13): n is a, c, g, or t
  misc_feature (44)..(44): n is a, c, g, or t
  misc_feature (200)..(200): n is a, c, g, or t
gagatggactgtnactctgttgctcaggctggaggcagtggcanaatcctggctcactgcaacctccgtctcccaggttcagtctctttgctgttctaaatataaacatgtgagtacatgtgtctttttggtagaacagtttattttcctttgggtatatacccagtaatgtgattgctgggccagatggtaatcttaan

SEQ ID NO: 719094 - DNA, 2376 bp, Homo sapiens
gatccctgctggcggttgtggtgctgcttgcgctgccggtggcctggggtcaatgcaatgccccagaatggcttccatttgccaggcctaccaacctaactgatgagtttgagtttcccattgggacatatctgaactatgaatgccgccctggttattccggaagaccgttttctatcatctgcctaaaaaactcagtctggactggtgctaaggacaggtgcagacgtaaatcatgtcgtaatcctccagatcctgtgaatggcatggtgcatgtgatcaaaggcatccagttcggatcccaaattaaatattcttgtactaaaggataccgactcattggttcctcgtctgccacatgcatcatctcaggtgatactgtcatttgggataatgaaacacctatttgtgacagaattccttgtgggctaccccccaccatcaccaatggagatttcattagcaccaacagagagaattttcactatggatcagtggtgacctaccgctgcaatcctggaagcggagggagaaaggtgtttgagcttgtgggtgagccctccatatactgcaccagcaatgacgatcaagtgggcatctggagcggccccgcccctcagtgcattatacctaacaaatgcacgcctccaaatgtggaaaatggaatattggtatctgacaacagaagcttattttccttaaatgaagttgtggagtttaggtgtcagcctggctttgtcatgaaaggaccccgccgtgtgaagtgccaggccctgaacaaatgggagccggagctaccaagctgctccagggtatgtcagccacctccagatgtcctgcatgctgagcgtacccaaagggacaaggacaacttttcacctgggcaggaagtgttctacagctgtgagcccggctacgacctcagaggggctgcgtctatgcgctgcacaccccagggagactggagccctgcagcccccacatgtgaagtgaaatcctgtgatgacttcatgggccaacttcttaatggccgtgtgctatttccagtaaatctccagcttggagcaaaagtggattttgtttgtgatgaaggatttcaattaaaaggcagctctgctagttactgtgtcttggctggaatggaaagcctttggaatagcagtgttccagtgtgtgaacaaatcttttgtccaagtcctccagttattcctaatgggagacacacaggaaaacctctggaagtctttccctttggaaaagcagtaaattacacatgcgacccccacccagacagagggacgagcttcgacctcattggagagagcaccatccgctgcacaagtgaccctcaagggaatggggtttggagcagccctgcccctcgctgtggaattctaggtcactgtcaagccccagatcattttctgtttgccaagttgaaaacccaaaccaatgcatctgactttcccattgggacatctttaaagtacgaatgccgtcctgagtactacgggaggccattctctatcacatgtctagataacctggtctggtcaagtcccaaagatgtctgtaaacgtaaatcatgtaaaactcctccagatccagtgaatggcatggtgcatgtgatcacagacatccaggttggatccagaatcaactattcttgtactacagggtgagttggcagcaacatctcttggtttaagagttccagcacagcgatagtactttctagccacatctcagcaaggaaactaggctattgccacctgctcttaagaggcttgaacacaggtgttaactcctgattgaaatgaacaaagataggagaagattagggggaaaatctgtatccttgctggaaaccagggcagtgcacatataagagtatgctgttcactggatgggaaagaaaaaaacttagaagtgtagtagtcaaagcacacaaacaaccctaacccagagtagacattgctggaagaaagggaagaccatgtagcagctgtgtgagagaatgaatcttaatgataacagcatgatcccttgctagggctgccatcaaaaagtacaggccttcctcgttttattgtacttcgcagatgttatgctttttacaaattgaacgcttgtgggaacgctgtgtaagcatgttcgtcggcatcatttatccaacagcgtgtgttgacttcgtgtctctgtgtagcattttgattattctcacagtatcccagatgttttcattattatcatgtctgtgatagtgatctgtcatcagtgatctttgatgttactattgtcattgtttggggtccctacgaactgcacccatataagacagaaaacttaatcaataaatgtgcgtgctttgactgc

SEQ ID NO: 719095 - DNA, 225 bp, Homo sapiens
accgagtattggagttcagcacggtgctcactgtgtcgacggaacttgtacagggcaggcatgcaccgcagtggtgaatacacgtcgaccaggctccatctaaacgagctgtggaggtcaacaaggtgctcatgtgatcgaaggaacttgtctatgggaggcatgcacggcagtggtgaatacacgtcgacctggatgcatgcttgcagtaggtaaggtactgga

SEQ ID NO: 719096 - DNA, 516 bp, Homo sapiens
caccgatacgctcctaacggcaggttgcagtgagcagatcacgccattgcactccagccaggcagcagagcgagactgtttccaaaaaaaaaaaaatacaaaatttagccagacgtggtagcatacgcccgtagtcccagctgcttaggaggctgaggcaggaaaatcacttgagcccaggaggcagaggttgcaatgagccaagatcctgccattacacttcggctggggtgacagagccagactccatctaaaaaaaaaaaaattctctttaaaaactcaggcacacgggtgtgatctgactggcagttttcccaggctcgggggggcagggacgccggggggaggcttggccctgagatgggagactgggcctcaggactttagagcgaaacagaggaggaggggatgggtcgggatatccaaggcaggatctgccgggagatacgctgtggggggggcacaaagacctcaagaccgggtccgggctgtccctgtcacttgtgactttgtggc

SEQ ID NO: 719097 - DNA, 843 bp, Homo sapiens
  misc_feature (1)..(1): n is a, c, g, or t
  misc_feature (75)..(75): n is a, c, g, or t
  misc_feature (82)..(82): n is a, c, g, or t
  misc_feature (105)..(105): n is a, c, g, or t
  misc_feature (134)..(134): n is a, c, g, or t
  misc_feature (145)..(145): n is a, c, g, or t
  misc_feature (149)..(149): n is a, c, g, or t
  misc_feature (154)..(154): n is a, c, g, or t
  misc_feature (159)..(160): n is a, c, g, or t
  misc_feature (162)..(162): n is a, c, g, or t
  misc_feature (176)..(176): n is a, c, g, or t
  misc_feature (183)..(183): n is a, c, g, or t
  misc_feature (216)..(216): n is a, c, g, or t
  misc_feature (223)..(223): n is a, c, g, or t
  misc_feature (225)..(226): n is a, c, g, or t
  misc_feature (252)..(252): n is a, c, g, or t
  misc_feature (256)..(256): n is a, c, g, or t
  misc_feature (258)..(258): n is a, c, g, or t
  misc_feature (270)..(270): n is a, c, g, or t
  misc_feature (324)..(324): n is a, c, g, or t
  misc_feature (326)..(326): n is a, c, g, or t
  misc_feature (385)..(385): n is a, c, g, or t
  misc_feature (407)..(407): n is a, c, g, or t
  misc_feature (438)..(438): n is a, c, g, or t
  misc_feature (445)..(445): n is a, c, g, or t
  misc_feature (447)..(447): n is a, c, g, or t
  misc_feature (450)..(450): n is a, c, g, or t
  misc_feature (459)..(459): n is a, c, g, or t
  misc_feature (471)..(471): n is a, c, g, or t
  misc_feature (476)..(477): n is a, c, g, or t
  misc_feature (482)..(482): n is a, c, g, or t
  misc_feature (484)..(484): n is a, c, g, or t
  misc_feature (488)..(491): n is a, c, g, or t
  misc_feature (495)..(495): n is a, c, g, or t
  misc_feature (510)..(514): n is a, c, g, or t
  misc_feature (516)..(517): n is a, c, g, or t
  misc_feature (546)..(546): n is a, c, g, or t
  misc_feature (549)..(549): n is a, c, g, or t
  misc_feature (563)..(563): n is a, c, g, or t
  misc_feature (572)..(572): n is a, c, g, or t
  misc_feature (575)..(575): n is a, c, g, or t
  misc_feature (603)..(603): n is a, c, g, or t
  misc_feature (698)..(698): n is a, c, g, or t
  misc_feature (707)..(707): n is a, c, g, or t
  misc_feature (768)..(768): n is a, c, g, or t
  misc_feature (820)..(820): n is a, c, g, or t
ncgtttctatttacatagttccattaattctattagtttgaattagattttaagtccaattttgaaaagcttgcngaatttnttctgaaattacttaaaattacngtatgcgtaaacttacaaaaacatatgcnataccaagggngagnaaagnaaaanngngaagtggctacaanggtcccnggggcatcacctgctcacctaggggccaggggngctgggngnngttccgttactggtaacctatctggntgtnanggttcataagtnacaatgctttttttgtttaaaaaaaaaaaaaagtctgtactttacaagccaaangngaaaatgccacacatcctctttacgctttcatgtaccctaggtcactccatttggttgntaccaactagggtacaatttcngggatcataatcttttcatgaaattaaagcngaaaacngnccnggaaaatcnggcttcaaagtnggggnnacttngngggnnnnatgnaaattctttggaatnnnnngnngggctataaccaatcaggggctctttgcngcnatcatccgcaagtngatccactngcncatgtggttgatcataaccgaggggtgngggggcttttattacggttatgagctcttgtccttctgtttttatttcacctttattatttgggggaaattctgagtcagataaggagctatgtnattccaganagctggaatcagtatcaaaaccatttctggagtgatcactctcagaacaatttctggagtnatacgagtttaaagcgatgctgccaggttcagactggttactacttaaaggngaagaactctctctctctattgg

SEQ ID NO: 719098 - DNA, 2009 bp, Homo sapiens
agaagctagaaagagggcatccgggttgtgcaaatttcagacacacggatatcccgtggcgcctgcgtccggagcccggccctgctgctggactgtccccggccacgcccgccgcccctcccgcatcctggccccttccccacccgacggaatcccggggaggctggaagtacaaagaaaagagcacttccctgctggggcagaggccaagccagagccctggccccatcacctctctgccctgcttgagtctggaatggacctccctgcctggaagctgcattgcccttggtcctgggcctgcctgccccctggggaacacaggcagcagccacattggcagtgaggccgtggcagcgtcggcagcagaggatgccccaggccctggagcgtgcagatggcagctgggcctgggtggtgctgctggccaccatggtgacccagggcctcaccctgggcttccccacgtgtatcggcatcttcttcactgaactgcaatgggagttccaggccagcaacagcgagacctcttggttcccctccatcctcacggctgtgctccacatggcagggcccctgtgcagcatcctggtgggacgcttcggctgccgagtgaccgtgatgctggggggcgtgctggccagcctgggcatggtggccagctccttctctcacaacctcagccagctctacttcacagcaggattcatcacaggcctgggcatgtgcttcagcttccagtcaagcatcacggtgctgggcttctactttgtccgccggcgggtgctggccaacgcgctggcctcgatgggcgtctccctgggcatcaccctctggccgctgctctcccgctaccttctggagaacctgggctggaggggtaccttccttgtcttcggcgggatctttctccactgctgcatctgcggggccatcataaggcctgtggccaccagtgtggcccctgagaccaaagaatgtcccccgccacctcccgagacacctgcacttggctgcctggctgcatgcggccggaccatccagcgccacctggccttcgacatcctgcggcacaacacaggctactgcgtgtacatactgggtgtgatgtggtccgtcctgggcttcccactgccacaagtcttcctggtgccatatgccatgtggcacagcgtggacgagcagcaggcagccctcctcatctccatcatcggcttcagcaacatcttcctgaggcccctagccgggctgatggcaggacggccggcctttgctagccaccgcaagtacctgttcagcctggcactcctgctcaatgggctcactaacctggtgtgtgcggcatcaggtgacttctgggtgctcgtgggctactgcctggcgtacagcgtgtccatgagtggcatcggcgccctcatcttccaggttctcatggacatcgtccccatggatcagttccccagagccctgggactcttcactgtcctggacggccttgctttcctcatctccccaccactggccgggttgctcctggacgccaccaacaactttagctatgttttctacatgtccagcttcttcctcatctcagctgccctcttcatgggtggcagcttctacgccctgcagaagaaggagcaaggcaagcaggctgtcgcggcggatgccctggagcgggatcttttcttggaagccaaagacggtcctgggaagcaacggtcccctgagatcatgtgccagtcttcccgccagccacgtccagctggcgtcaataagcatctttggggatgtcctgcctcctccaggaccagccatgagtggctcttatggccaaaggcggtactgcaggccaagcaaacggctctgggctggaatagccctacctgagtgccctgtttgactccgccactatctgccatgtgagttgggcaaattgttgaccacctctgagccttgaaaaagtaggaggttactttgttagagcaaaataataaaatttaatttta

SEQ ID NO: 719099 - DNA, 1271 bp, Homo sapiens
gaggaaacacactgggtatctttttattaactcaaatattcttgatttcttggtctctaggtcactgtcaagccccagatcattttctgtttgccaagttgaaaacccaaaccaatgcatctgactttcccattgggacatctttaaagtacgaatgccgtcctgagtactacgggaggccattctctatcacatgtctagataacctggtctggtcaagtcccaaagatgtctgtaaacgtgcgtaaacttgcgttggatctttcccatgtctgcaaaagcttcttatggaattatttcaaatgtgggatatgagaaaccttttctgaaaagtgttcggatagatggatgtaagagtttttcttgtaggcatccttgattgttgcttgaaatgttaacttcacgagaatgtttcaagaaatagttgtagagaaaatcttcattccctggctccaaaacattttctttcccacagaaatcatgtaaaactcctccagatccagtgaatggcatggtgcatgtgatcacagacatccaggttggatccagaatcaactattcttgtactacagggtgagttggcagcaacatctcttggtttaagagttccagcacagcgatagtactttctagccacatctcagcaaggaaactaggctattgccacctgctcttaagaggcttgaacacaggtgttaactcctgattgaaatgaacaaagataggagaagattagggggaaaatctgtatccttgctggaaaccagggcagtgcacatataagagtatgctgttcactggatgggaaagaaaaaaacttagaagtgtagtagtcaaagcacacaaacaaccctaacccagagtagacattgctggaagaaagggaagaccatgtagcagctgtgtgagagaatgaatcttaatgataacagcatgatcccttgctagggctgccatcaaaaagtacaggccttcctcgttttattgtacttcgcagatgttatgctttttacaaattgaacgcttgtgggaacgctgtgtaagcatgttcgtcggcatcatttatccaacagcgtgtgttgacttcgtgtctctgtgtagcattttgattattctcacagtatcccagatgttttcattattatcatgtctgtgatagtgatctgtcatcagtgatctttgatgttactattgtcattgtttggggtccctacgaactgcacccatataagacagaaaacttaatcaataaatgtgcgtgctttgactgc

SEQ ID NO: 719100 - DNA, 383 bp, Homo sapiens
  misc_feature (28)..(28): n is a, c, g, or t
  misc_feature (372)..(372): n is a, c, g, or t
acctgctgtcagggaacacacagctganttggggggaggcctggtaacactggcctaacttgatctctgttccccagggttgctcctggacgccaccaacaactttagctatgttttctacatgtccagcttcttcctcatctcagctgccctcttcatgggtggcagcttctacgccctgcagaagaaggagcaaggcaagcaggctgtcgcggcggatgccctggagcgggatcttttcttggaagccaaagacggtcctgggaagcaacggtcccctgagatcatgtatgttaccagcgtctaagacccagggttcatctgtgtgaccagtgtctgagtcctgggatcactgagtgaacactgtctcancccaacccagg

SEQ ID NO: 719101 - DNA, 495 bp, Homo sapiens
  misc_feature (441)..(442): n is a, c, g, or t
  misc_feature (452)..(453): n is a, c, g, or t
gaggaaacacactgggtatctttttattaactcaaatattcttgatttcttggtctctaggtcactgtcaagccccagatcattttctgtttgccaagttgaaaacccaaaccaatgcatctgactttcccattgggacatctttaaagtacgaatgccgtcctgagtactacgggaggccattctctatcacatgtctagataacctggtctggtcaagtcccaaagatgtctgtaaacgtgcgtaaacttgcgttggatctttcccatgtctgcaaaagcttcttatggaattatttcaaatgtgggatatgagaaaccttttctgaaaagtgttcggatagatggatgtaagagtttttcttgtaggcatccttgattgttgcttgaaatgttaacttcacgagaatgtttcaagaaatagtgcaaaaatagtttttnnaccccgaggnncggttgaaagacggaacccgccgggccaagagcgggcccccc

SEQ ID NO: 719102 - DNA, 423 bp, Homo sapiens
cagcgaactccagctctgacacaccagctccagctcctgcttgcgggctgccagcctcccccgctgtctctcggcctctgcacacagttctgcctctgctcgcaattgctctgccaggcgggcgcgctcctcttccagctgtgccactcgtgccctggatgctccccacacttcagcgggcgctctcgctgctgtagctcctcgcactttcttgcagctccgtgggccctgtgcgctgcatgcacctcaatcctgcctgcgtcaccctgcatgcggtggcttcacccttggtaaacgagccgccaccactgccatgtgtctcatcgcttgtggtagtgccgcgcagttcctgctgcatcaccctcatgggcgctctgctgctgctggcgcttctggaaggccctgcgagccaggtatccctgc

SEQ ID NO: 719103 - DNA, 1943 bp, Homo sapiens
cggcgcttggcccagtcccgcggtcctcgtcgcgaccggcccgggccgcaggacgccgcgctcgggggagctgagccacctctccgccaggcccgtgcgagcggtacaaagaaaagagcacttccctgctggggcagaggccaagccagagccctggccccatcacctctctgccctgcttgagtctggaatggacctccctgcctggaagctgcattgcccttggtcctgggcctgcctgccccctggggaacacaggcagcagccacattggcagtgaggccgtggcagcgtcggcagcagaggatgccccaggccctggagcgtgcagatggcagctgggcctgggtggtgctgctggccaccatggtgacccagggcctcaccctgggcttccccacgtgtatcggcatcttcttcactgaactgcaatgggagttccaggccagcaacagcgagacctcttggttcccctccatcctcacggctgtgctccacatggcagggcccctgtgcagcatcctggtgggacgcttcggctgccgagtgaccgtgatgctggggggcgtgctggccagcctgggcatggtggccagctccttctctcacaacctcagccagctctacttcacagcaggattcatcacaggcctgggcatgtgcttcagcttccagtcaagcatcacggtgctgggcttctactttgtccgccggcgggtgctggccaacgcgctggcctcgatgggcgtctccctgggcatcaccctctggccgctgctctcccgctaccttctggagaacctgggctggaggggtaccttccttgtcttcggcgggatctttctccactgctgcatctgcggggccatcataaggcctgtggccaccagtgtggcccctgagaccaaagaatgtcccccgccacctcccgagacacctgcacttggctgcctggctgcatgcggccggaccatccagcgccacctggccttcgacatcctgcggcacaacacaggctactgcgtgtacatactgggtgtgatgtggtccgtcctgggcttcccactgccacaagtcttcctggtgccatatgccatgtggcacagcgtggacgagcagcaggcagccctcctcatctccatcatcggcttcagcaacatcttcctgaggcccctagccgggctgatggcaggacggccggcctttgctagccaccgcaagtacctgttcagcctggcactcctgctcaatgggctcactaacctggtgtgtgcggcatcaggtgacttctgggtgctcgtgggctactgcctggcgtacagcgtgtccatgagtggcatcggcgccctcatcttccaggttctcatggacatcgtccccatggatcagttccccagagccctgggactcttcactgtcctggacggccttgctttcctcatctccccaccactggccgggttgctcctggacgccaccaacaactttagctatgttttctacatgtccagcttcttcctcatctcagctgccctcttcatgggtggcagcttctacgccctgcagaagaaggagcaaggcaagcaggctgtcgcggcggatgccctggagcgggatcttttcttggaagccaaagacggtcctgggaagcaacggtcccctgagatcatgtgccagtcttcccgccagccacgtccagctggcgtcaataagcatctttggggatgtcctgcctcctccaggaccagccatgagtggctcttatggccaaaggcggtactgcaggccaagcaaacggctctgggctggaatagccctacctgagtgccctgtttgactccgccactatctgccatgtgagttgggcaaattgttgaccacctctgagccttgaaaaagtaggaggttactttgttagagcaaaataataaaatttaatttta

SEQ ID NO: 719104 - DNA, 1919 bp, Homo sapiens
ccctcctgtccttcctgccacctcctgccaggctggctctgggaagtgggtgaaaggagatgccaaggccaacgcgtgggcctctggccacctcccagggtgtggtgcccctctgtgacacctggtacttgggtatgaggaagggatggcttagctgcccagagaaggtggcaggtgggccaggagagacggacagcctgctgaccaccaggctccattctgtcccctccccaggcagcagccacattggcagtgaggccgtggcagcgtcggcagcagaggatgccccaggccctggagcgtgcagatggcagctgggcctgggtggtgctgctggccaccatggtgacccagggcctcaccctgggcttccccacgtgtatcggcatcttcttcactgaactgcaatgggagttccaggccagcaacagcgagacctcttggttcccctccatcctcacggctgtgctccacatggcagggcccctgtgcagcatcctggtgggacgcttcggctgccgagtgaccgtgatgctggggggcgtgctggccagcctgggcatggtggccagctccttctctcacaacctcagccagctctacttcacagcaggattcatcacaggcctgggcatgtgcttcagcttccagtcaagcatcacggtgctgggcttctactttgtccgccggcgggtgctggccaacgcgctggcctcgatgggcgtctccctgggcatcaccctctggccgctgctctcccgctaccttctggagaacctgggctggaggggtaccttccttgtcttcggcgggatctttctccactgctgcatctgcggggccatcataaggcctgtggccaccagtgtggcccctgagaccaaagaatgtcccccgccacctcccgagacacctgcacttggctgcctggctgcatgcggccggaccatccagcgccacctggccttcgacatcctgcggcacaacacaggctactgcgtgtacatactgggtgtgatgtggtccgtcctgggcttcccactgccacaagtcttcctggtgccatatgccatgtggcacagcgtggacgagcagcaggcagccctcctcatctccatcatcggcttcagcaacatcttcctgaggcccctagccgggctgatggcaggacggccggcctttgctagccaccgcaagtacctgttcagcctggcactcctgctcaatgggctcactaacctggtgtgtgcggcatcaggtgacttctgggtgctcgtgggctactgcctggcgtacagcgtgtccatgagtggcatcggcgccctcatcttccaggttctcatggacatcgtccccatggatcagttccccagagccctgggactcttcactgtcctggacggccttgctttcctcatctccccaccactggccgggttgctcctggacgccaccaacaactttagctatgttttctacatgtccagcttcttcctcatctcagctgccctcttcatgggtggcagcttctacgccctgcagaagaaggagcaaggcaagcaggctgtcgcggcggatgccctggagcgggatcttttcttggaagccaaagacggtcctgggaagcaacggtcccctgagatcatgtgccagtcttcccgccagccacgtccagctggcgtcaataagcatctttggggatgtcctgcctcctccaggaccagccatgagtggctcttatggccaaaggcggtactgcaggccaagcaaacggctctgggctggaatagccctacctgagtgccctgtttgactccgccactatctgccatgtgagttgggcaaattgttgaccacctctgagccttgaaaaagtaggaggttactttgttagagcaaaataataaaatttaatttta

SEQ ID NO: 719105 - DNA, 697 bp, Homo sapiens
gggttgttgctgtagtggcggacaggaggtggtactgcatatggcggaatcagtcgagaatccttcaccatggcatccagcccaggtccagcgatcgagcgaggcattgatcctctcgacctccagccctggcgaagctcccggcgtactgatgccctcactccagccctggcgtgatcttccacacatttgaggatgagtccgatgtgctccataggttcgacagaggggcgccctggaggaagacgaggatggagaggagcgaccagtcggagctggcgatgggagcgggactacgcgccatcccagatgctgggcgcactatgaggcgcgagggagtgcatctgtatcatgaggcatgtagatgatggagacggtcaggatcagatcgaggagccaagagggccctgctgcccggttgacccggtgcgatgggtgggcccgcaggacacgaagaggtgcggagatgaggccgcgaagatcgctgatggtgccgccgggagtgatcctggagcgacgctgcgccccctggtgcaaaaggacggcccaggtgtggagtgtgtgtcacaggcatggcacggaggaatgccatgaattgcagggatcactgcattggagagatctggaggaagctggacgcgcatcatcccggggacctactgcagctgtatccgcgggtgaacgcttggagggagct

SEQ ID NO: 719106 - DNA, 602 bp, Homo sapiens
cagggtctcactctgtcacccacagtggattgtgtgatgcaatcatggctcactgcagccttgaactcctgggctcaagtgatcttcccatctgtctcctgaatagttagaactacaggtgtgtcccaccacgcctagctaatgtaaaaaatatacatttgtagagatggggtctcactgtgttgcccagactggctcaaactcctggcctcaagtgagtcttctgccttggcccctcaaagtgttggtattataggcgtgagccagtgcacctggcctcacatgacttttattgcattatactgttataactgttctcttttattattagttggtaatctcttaccgtgcctattttataaattaaattttatcatatgtatatatgcataggaaaaaacatagcatatataaggttcagtagtatacacagtttcaggcattcactgggggtttttgaatgtacccaacacaggtaagggggcgatacttgtaatacatttttaaacgtaaaagtagatatttttgacatacaacatagtttttaagattaagattttttgttgcacaccgccgaaataaaagatggaattctactgaag

SEQ ID NO: 719107 - DNA, 2004 bp, Homo sapiens
  misc_feature (133)..(133): n is a, c, g, or t
  misc_feature (136)..(137): n is a, c, g, or t
  misc_feature (142)..(143): n is a, c, g, or t
  misc_feature (148)..(149): n is a, c, g, or t
  misc_feature (277)..(277): n is a, c, g, or t
gagacagagtctcaccgtcacccaggctggagtgcagtgacgtgatctcggctcagtgcaaactccgcctcctgggttcaagggattctcctgcctcggcctagttttttatttgtagtagagacagggtgtnacnntgttnnccagnntagtcttgaactcctgaccccaggtgagccgcctgcctcggcctcccaaaatgctgggattacaggtgtgagccaccgtgtctggcagggctgaattttgaaagaccagttgactggagaaaccgctngatgggaggggaggctggagagccgactgggcatccatacaggcagcagccacattggcagtgaggccgtggcagcgtcggcagcagaggatgccccaggccctggagcgtgcagatggcagctgggcctgggtggtgctgctggccaccatggtgacccagggcctcaccctgggcttccccacgtgtatcggcatcttcttcactgaactgcaatgggagttccaggccagcaacagcgagacctcttggttcccctccatcctcacggctgtgctccacatggcagggcccctgtgcagcatcctggtgggacgcttcggctgccgagtgaccgtgatgctggggggcgtgctggccagcctgggcatggtggccagctccttctctcacaacctcagccagctctacttcacagcaggattcatcacaggcctgggcatgtgcttcagcttccagtcaagcatcacggtgctgggcttctactttgtccgccggcgggtgctggccaacgcgctggcctcgatgggcgtctccctgggcatcaccctctggccgctgctctcccgctaccttctggagaacctgggctggaggggtaccttccttgtcttcggcgggatctttctccactgctgcatctgcggggccatcataaggcctgtggccaccagtgtggcccctgagaccaaagaatgtcccccgccacctcccgagacacctgcacttggctgcctggctgcatgcggccggaccatccagcgccacctggccttcgacatcctgcggcacaacacaggctactgcgtgtacatactgggtgtgatgtggtccgtcctgggcttcccactgccacaagtcttcctggtgccatatgccatgtggcacagcgtggacgagcagcaggcagccctcctcatctccatcatcggcttcagcaacatcttcctgaggcccctagccgggctgatggcaggacggccggcctttgctagccaccgcaagtacctgttcagcctggcactcctgctcaatgggctcactaacctggtgtgtgcggcatcaggtgacttctgggtgctcgtgggctactgcctggcgtacagcgtgtccatgagtggcatcggcgccctcatcttccaggttctcatggacatcgtccccatggatcagttccccagagccctgggactcttcactgtcctggacggccttgctttcctcatctccccaccactggccgggttgctcctggacgccaccaacaactttagctatgttttctacatgtccagcttcttcctcatctcagctgccctcttcatgggtggcagcttctacgccctgcagaagaaggagcaaggcaagcaggctgtcgcggcggatgccctggagcgggatcttttcttggaagccaaagacggtcctgggaagcaacggtcccctgagatcatgtgccagtcttcccgccagccacgtccagctggcgtcaataagcatctttggggatgtcctgcctcctccaggaccagccatgagtggctcttatggccaaaggcggtactgcaggccaagcaaacggctctgggctggaatagccctacctgagtgccctgtttgactccgccactatctgccatgtgagttgggcaaattgttgaccacctctgagccttgaaaaagtaggaggttactttgttagagcaaaataataaaatttaatttta

SEQ ID NO: 719108 - DNA, 451 bp, Homo sapiens
  misc_feature (3)..(3): n is a, c, g, or t
  misc_feature (19)..(19): n is a, c, g, or t
  misc_feature (45)..(45): n is a, c, g, or t
  misc_feature (112)..(112): n is a, c, g, or t
  misc_feature (286)..(286): n is a, c, g, or t
  misc_feature (289)..(290): n is a, c, g, or t
ganatgagagctgatgggntggggaagtttgagagaccgggtgtngtttaaggccggtatgaacagcaggatgtaaccagcttgcttctgtgctcagaagttaggggaggcngatggaggggaaggagggaaggagttgaggtcttaagaaggcaacttctgggcaatcttccattgtgaggtggggtccacgtccccacaacccacgaacttgggttgccgtgcggcatgtggcaaacctgaggggtgactccaagatgcttcactctgtgtgctggaccgggangcnnccctggcagctgacctgcaggcgctctggccaaccacccggggtgagcccagccattcctgccgagggtgcactggcttggggcagaagtctctggatggctccagcctgtcccgcggagccggccccaccactcacgtcttcccaccggaggccagcacc

SEQ ID NO: 719109 - DNA, 1791 bp, Homo sapiens
cggcgcttggcccagtcccgcggtcctcgtcgcgaccggcccgggccgcaggacgccgcgctcgggggagctgagccacctctccgccaggcccgtgcgagcgcaggcagcagccacattggcagtgaggccgtggcagcgtcggcagcagaggatgccccaggccctggagcgtgcagatggcagctgggcctgggtggtgctgctggccaccatggtgacccagggcctcaccctgggcttccccacgtgtatcggcatcttcttcactgaactgcaatgggagttccaggccagcaacagcgagacctcttggttcccctccatcctcacggctgtgctccacatggcagggcccctgtgcagcatcctggtgggacgcttcggctgccgagtgaccgtgatgctggggggcgtgctggccagcctgggcatggtggccagctccttctctcacaacctcagccagctctacttcacagcaggattcatcacaggcctgggcatgtgcttcagcttccagtcaagcatcacggtgctgggcttctactttgtccgccggcgggtgctggccaacgcgctggcctcgatgggcgtctccctgggcatcaccctctggccgctgctctcccgctaccttctggagaacctgggctggaggggtaccttccttgtcttcggcgggatctttctccactgctgcatctgcggggccatcataaggcctgtggccaccagtgtggcccctgagaccaaagaatgtcccccgccacctcccgagacacctgcacttggctgcctggctgcatgcggccggaccatccagcgccacctggccttcgacatcctgcggcacaacacaggctactgcgtgtacatactgggtgtgatgtggtccgtcctgggcttcccactgccacaagtcttcctggtgccatatgccatgtggcacagcgtggacgagcagcaggcagccctcctcatctccatcatcggcttcagcaacatcttcctgaggcccctagccgggctgatggcaggacggccggcctttgctagccaccgcaagtacctgttcagcctggcactcctgctcaatgggctcactaacctggtgtgtgcggcatcaggtgacttctgggtgctcgtgggctactgcctggcgtacagcgtgtccatgagtggcatcggcgccctcatcttccaggttctcatggacatcgtccccatggatcagttccccagagccctgggactcttcactgtcctggacggccttgctttcctcatctccccaccactggccgggttgctcctggacgccaccaacaactttagctatgttttctacatgtccagcttcttcctcatctcagctgccctcttcatgggtggcagcttctacgccctgcagaagaaggagcaaggcaagcaggctgtcgcggcggatgccctggagcgggatcttttcttggaagccaaagacggtcctgggaagcaacggtcccctgagatcatgtgccagtcttcccgccagccacgtccagctggcgtcaataagcatctttggggatgtcctgcctcctccaggaccagccatgagtggctcttatggccaaaggcggtactgcaggccaagcaaacggctctgggctggaatagccctacctgagtgccctgtttgactccgccactatctgccatgtgagttgggcaaattgttgaccacctctgagccttgaaaaagtaggaggttactttgttagagcaaaataataaaatttaatttta

SEQ ID NO: 719110 - DNA, 251 bp, Homo sapiens
tgaacccagcaggcttgtgtccttcccctaagggcaatgagttcccccaggctccacgcaggtccagagcggctgtccaggtgcctgggcctcgactcagaaaccttagaaatctacctggtactctattctactgtggctgagctagtgccgaaaccaccaaagtccttcccactcttccctccactttccccagggtgaggcagtctccctacgtctcaccacatgcccatacggcacaagcaacaagc

SEQ ID NO: 719111 - DNA, 1443 bp, Homo sapiens
tggtctaaatttaatgtttacgggtccttcgaattgtgtggtaggggggggggctcccatttggtctcccctccaggtttaagtggagggtttcttcttacttatttagaaactttccgctttcaaagcgaaggcttctcaaatctcatgtgaaaatttatttaatattacgtgcgtgttagaaaaattgaattgagccatacaggattaatataggagtgtttccagtgtgtgggtgttatgtgcctctcggggtatatcccgagtataaccgtctcggggccattcccggaaataggcccgagaaaagtgtgtctgtggtgggaaaaaagtttaaattttaccgcccgaattgaaattattaatatagtgtgcaaaagtcggatttggggggccgtataggttctgggccccctagggtgtgtatagcccgtggaaaaatttgagggagaacactccaggtgaatgttgaaagccccctccatatttagagtgcgcaaaaattcacgagcctccccatattgtggagtggggcaccaatagtgtgtgaaagtgtgtacgccatacaacagcgttttaataccgcgtgtggttcgggtggtatagatctacaggaaattctcaaaaggtgacaataaaaaattggggccataaattatacacaattgttgcccccagttttcgaggggccccacactattaacggggatagcacacagacgacacaggcaattgtgaaatctccccataaggggggccttccaaaaaagccctctgtgggaccacgcgacgaaaaatcaattttatccaatattattgggcaatccccccggttgagacaatgatttgtttggcgccagaaagttctcacagggataaaacaatatacccttttattgaaaacgccgccccgcggggttgtgggagaaaaatataagacgaagtggacacatatctattatgggggtataccacccgcgagaaggcggcgcgtgccaacacaattatatttgccgccccccgaacgagttgagtatcaactaacgcggtctaataaataacccccaatacgttgtgaacacaatcataatgtgggaggggtgtgcctcacacaccacagacaaataatataaaccccccatgttagtaagagccgcccatgttgtagtactaatcataagtatggctgaaaaaaaacgcgataaaccctgagtttttttccaccccaaaggggtgaccaccatataattcaccccgcgggaagcacaaataaacagagtatcgacacaacaggtagggggaagacgaaaatatatcctccacgaagcgacctggtgtcgtcgagactaaaagaataataaattacaaccacggaggagcagcagcacaaagaaaaattcacaaataaatgcaggtgaggtactagtaaaaaaagagggcgcc

SEQ ID NO: 719112 - DNA, 1828 bp, Homo sapiens
actgagcaactagcggaatccagtagcaggccctccggacttttttccttgggtaccaggtactcggggccaggaacctgggtctgagccctgctcaggtttgtcccagccggctcagcgcagctggctgtgtgttgctgctcctacagctcaatgcactggaccttctcgtccagcctggatgcctctatcatttctctttgtctttctctggcctccataccgttctgaagagctcaccttcctctaggttcctcctgccctgctcttcccaagtgacccagccctcacctgtagggcagccaaggctggtggtgcagctgcccccagtgaaggtcattgggcatcgcactgggcagtgcagaggtccaggctgaggagttgagtggcgcgcccatcctggcgcctgtgcagagaacgggaggggggcccctggcttggatcctagaatcggtgaagtctgagggcccccctgcagtctcagcaggacctgctctatcaaggggcttcctccttcctttccccaccctgtctccttggcggggaggattagtgccaggtgggggaagccagacatttgactgacgggagaggaaggcttgccaggcagcccgaagactgttgtgaaaatggggctgcttttgcaagggaagctcttttactccccattcctgtcctccagaggccccccttttccctgccgtgttattggtgtcaaccctggggtaagtggctggctggactcacccctgctccccgtacacctgtgcctgtgactggcggtccaagctccccacacacacatcttgctggtgcctttccctgaagtcaccacccaggggctggctgtcatcagcccattcttgtcccagcagggtaccgagggaatgataaaacagaatgtgtttgaattacacacaaaaatgttccctgcagcaggtcataaactctgtgaactaatgaagctgacaaacagagctggagtacgtttcccctcacccttcctttcctcctagctcagcaaggggtgctcaggttcaggatgttgtttgttgattcaggctcaaccaggctccgcaagaaaaccttatcaggagattttattttcatgaacaggtgccagtcttcccgccagccacgtccagctggcgtcaataagcatctttggggatgtcctgcctcctccaggaccagccatgagtggctcttatggccaaaggcggtactgcaggccaagcaaacggctctgggctggaatagccctacctgagtgccctgtttgactccgccactatctgccatgtgagttgggcaaattgttgaccacctctgagccttgaaaaagtaggaggttactttgttagagcaaaataataaaatttaattttaaaaaagaaaacgtaggaggttcgtttggatgagctagtctcttccggttgaaaagtctgactcggtgagcatcctgacgactccatttccttctggctccccacccagtcttacacttggccttgccatatgccacatgctctgaagggagagtgcttgcatggactttgccaaatcctgtctgctccatctcagttgaatggaaaaggagggaggtggggctggtagataggtgcatttggtgctagtatccaccaggttttgtgtgcatcccgtaatgagcccacttcctgaaaacatttaaagaaaaaagatatcagctggagatggcagtgcgcacatgtaatcccagctactcgggaggtttaggtgggaggatcactcaaacctgggagtttgaggccagcctgggcaacacagcaagaccctgtcttttttt

SEQ ID NO: 719113 - DNA, 515 bp, Homo sapiens
  misc_feature (54)..(54): n is a, c, g, or t
  misc_feature (62)..(62): n is a, c, g, or t
aagaaaggtctctgtattttgaggaactcttatgtagtagaaaagacaaatgcnagaactantaataattttaagtcagggtgagtctattaatagccagcagtgatgcaagagactgtggtcaaagaagggaagctaactctttgtagaggcatcaaaaatgcttcacagaggaggtgacagatttgttaaggatattccaggccgtggagtaataggttttaatttggtgctttaatttggaagaatatctcaggagatggtaatatgtattttaggtctttttttagggctttacaatttctaaaaaatatatttgggcttttatttggaaataactttagacttacaaaaatggcacaaatggtacacagagattatatatgccctccatccagcctcccgtaatgctgatatcttctgtaaacatagtgtagttatttaaaacaggaaatcaacagcagtggtgctattaactgatctacagaccttatttgaattttgccagtcgtctc

SEQ ID NO: 719114 - DNA, 251 bp, Homo sapiens
atggtttgatctcagactggtgcagtgcgtttacaaggctctgtcttaccacagctgtagagtagatcacagccgtgtgtttgccaggtcccaggaacttctatatagtctaggggtaacaaaccaacaaacaaacaaacaaaacaaaacaaaacaaacaaacagaaaacaacaaaaaaacctgcagtgtgtcagtaggctgtggaggtataggacggtaacaccacacgtattttgtaccgacgctcgaa

SEQ ID NO: 719115 - DNA, 174 bp, Homo sapiens
caggaagtcccttgccatcctaaaagcccccccccttttttttaaggagaatgggccagtcctttcccaagtccccacaggggaggtgatagcattgcttttgggtaaattatgtaaagcaaaatttttttaattttcgccctaaaactttttttatttggttttattttgaaa

SEQ ID NO: 719116 - DNA, 2382 bp, Homo sapiens
cggcgcttggcccagtcccgcggtcctcgtcgcgaccggcccgggccgcaggacgccgcgctcgggggagctgagccacctctccgccaggcccgtgcgagcggtacaaagaaaagagcacttccctgctggggcagaggccaagccagagccctggccccatcacctctctgccctgcttgagtctggaatggacctccctgcctggaagctgcattgcccttggtcctgggcctgcctgccccctggggaacacaggcagcagccacattggcagtgaggccgtggcagcgtcggcagcagaggatgccccaggccctggagcgtgcagatggcagctgggcctgggtggtgctgctggccaccatggtgacccagggcctcaccctgggcttccccacgtgtatcggcatcttcttcactgaactgcaatgggagttccaggccagcaacagcgagacctcttggttcccctccatcctcacggctgtgctccacatggcagggcccctgtgcagcatcctggtgggacgcttcggctgccgagtgaccgtgatgctggggggcgtgctggccagcctgggcatggtggccagctccttctctcacaacctcagccagctctacttcacagcaggattcatcacaggcctgggcatgtgcttcagcttccagtcaagcatcacggtgctgggcttctactttgtccgccggcgggtgctggccaacgcgctggcctcgatgggcgtctccctgggcatcaccctctggccgctgctctcccgctaccttctggagaacctgggctggaggggtaccttccttgtcttcggcgggatctttctccactgctgcatctgcggggccatcataaggcctgtggccaccagtgtggcccctgagaccaaagaatgtcccccgccacctcccgagacacctgcacttggctgcctggctgcatgcggccggaccatccagcgccacctggccttcgacatcctgcggcacaacacaggctactgcgtgtacatactgggtgtgatgtggtccgtcctgggcttcccactgccacaagtcttcctggtgccatatgccatgtggcacagcgtggacgagcagcaggcagccctcctcatctccatcatcggcttcagcaacatcttcctgaggcccctagccgggctgatggcaggacggccggcctttgctagccaccgcaagtacctgttcagcctggcactcctgctcaatgggctcactaacctggtgtgtgcggcatcaggtgacttctgggtgctcgtgggctactgcctggcgtacagcgtgtccatgagtggcatcggcgccctcatcttccaggttctcatggacatcgtccccatggatcagttccccagagccctgggactcttcactgtcctggacggccttgctttcctcatctccccaccactggccgggttgctcctggacgccaccaacaactttagctatgttttctacatgtccagcttcttcctcatctcagctgccctcttcatgggtggcagcttctacgccctgcagaagaaggagcaaggcaagcaggctgtcgcggcggatgccctggagcgggatcttttcttggaagccaaagacggtcctgggaagcaacggtcccctgagatcatgtgccagtcttcccgccagccacgtccagctggcgtcaataagcatctttggggatgtcctgcctcctccaggaccagccatgagtggctcttatggccaaaggcggtactgcaggccaagcaaacggctctgggctggaatagccctacctgagtgccctgtttgactccgccactatctgccatgtgagttgggcaaattgttgaccacctctgagccttgaaaaagtaggaggttactttgttagagcaaaataataaaatttaattttaaaaaagaaaacgtaggaggttcgtttggatgagctagtctcttccggttgaaaagtctgactcggtgagcatcctgacgactccatttccttctggctccccacccagtcttacacttggccttgccatatgccacatgctctgaagggagagtgcttgcatggactttgccaaatcctgtctgctccatctcagttgaatggaaaaggagggaggtggggctggtagataggtgcatttggtgctagtatccaccaggttttgtgtgcatcccgtaatgagcccacttcctgaaaacatttaaagaaaaaagatatcagctggagatggcagtgcgcacatgtaatcccagctactcgggaggtttaggtgggaggatcactcaaacctgggagtttgaggccagcctgggcaacacagcaagaccctgtcttttttt

SEQ ID NO: 719117 - DNA, 180 bp, Homo sapiens
gaggagtctcgtgaggcagggtctcaggagtgagtgtggggggtgagctggaaaggcccagatcagaccagactgtggggctggccgaggctcgtcttttcccaatgggggggaacaccggggcggcgccttttcccttcccttggcggtagacttgggagagaggctgactggtggccc

SEQ ID NO: 719118 - DNA, 1389 bp, Homo sapiens
actgagcaactagcggaatccagtagcaggccctccggacttttttccttgggtaccaggtactcggggccaggaacctgggtctgagccctgctcaggtttgtcccagccggctcagcgcagctggctgtgtgttgctgctcctacagctcaatgcactggaccttctcgtccagcctggatgcctctatcatttctctttgtctttctctggcctccataccgttctgaagagctcaccttcctctaggttcctcctgccctgctcttcccaagtgacccagccctcacctgtagggcagccaaggctggtggtgcagctgcccccagtgaaggtcattgggcatcgcactgggcagtgcagaggtccaggctgaggagttgagtggcgcgcccatcctggcgcctgtgcagagaacgggaggggggcccctggcttggatcctagaatcggtgaagtctgagggcccccctgcagtctcagcaggacctgctctatcaaggggcttcctccttcctttccccaccctgtctccttggcggggaggattagtgccaggtgggggaagccagacatttgactgacgggagaggaaggcttgccaggcagcccgaagactgttgtgaaaatggggctgcttttgcaagggaagctcttttactccccattcctgtcctccagaggccccccttttccctgccgtgttattggtgtcaaccctggggtaagtggctggctggactcacccctgctccccgtacacctgtgcctgtgactggcggtccaagctccccacacacacatcttgctggtgcctttccctgaagtcaccacccaggggctggctgtcatcagcccattcttgtcccagcagggtaccgagggaatgataaaacagaatgtgtttgaattacacacaaaaatgttccctgcagcaggtcataaactctgtgaactaatgaagctgacaaacagagctggagtacgtttcccctcacccttcctttcctcctagctcagcaaggggtgctcaggttcaggatgttgtttgttgattcaggctcaaccaggctccgcaagaaaaccttatcaggagattttattttcatgaacaggtgccagtcttcccgccagccacgtccagctggcgtcaataagcatctttggggatgtcctgcctcctccaggaccagccatgagtggctcttatggccaaaggcggtactgcaggccaagcaaacggctctgggctggaatagccctacctgagtgccctgtttgactccgccactatctgccatgtgagttgggcaaattgttgaccacctctgagccttgaaaaagtaggaggttactttgttagagcaaaataataaaatttaatttta

SEQ ID NO: 719119 - DNA, 681 bp, Homo sapiens
agcggaaaaagaaaccggtgtgatggttcaggcctgtaatcccagcacttcgagaggctgaggtgggcggatcacttgaggccaggagttcgaaaccaccctgaccaacatggcaaaaccccatctctactaaaaatacaaaaaatctgccagtgtggaggtgcatgcctgtaacccaactacttgggagctgaggcaggaggaatcgcttgaacccaggaggcagaggctgcgtgagcccaagatcacacctactgcattgcagcctggcggagcacagacatgagaaaaccaacgtgaatccgaacaagcatgacttaaggtgactgcctattacctcctggataggttagactggacatcactcaaggaatctgtgctcctgtccctagacatttttcataacgctttagtacagctattagagatttatctataacctaaagtcaggatctgcaagttgttgccatctatctgggataacattaaattcccttcttgccatttatggcactttctgtaagacacgatttctgtgctagagctgcattctaagactgtctattctaacccaagttgtgtctcctcaggacctagcatttgaataggtcggaatatccttctggaaaatgattgactccatcagggaaagagtcaagtcccagtctctgagcgaagata

SEQ ID NO: 719120 - DNA, 2236 bp, Homo sapiens
  misc_feature (133)..(133): n is a, c, g, or t
  misc_feature (136)..(137): n is a, c, g, or t
  misc_feature (142)..(143): n is a, c, g, or t
  misc_feature (148)..(149): n is a, c, g, or t
  misc_feature (294)..(294): n is a, c, g, or t
  misc_feature (369)..(369): n is a, c, g, or t
  misc_feature (432)..(432): n is a, c, g, or t
gagacagagtctcaccgtcacccaggctggagtgcagtgacgtgatctcggctcagtgcaaactccgcctcctgggttcaagggattctcctgcctcggcctagttttttatttgtagtagagacagggtgtnacnntgttnnccagnntagtcttgaactcctgaccccaggtgagccgcctgcctcggcctcccaaaatgctgggattacaggtgtgagccaccgcgcccggcccaattggggtttttaaaagataactctcgtgctacacctaggggaacagggatgcccnggcagccttgggagggcagatctggggtggggtgcctacagggaggtggcgaggccagctgattccatggtcagnccccaggacttggagctgggtatggactagaaccagaggagggcaggtgtgtgaaatgaccantgaccccacccctgggtgcaggtggaaggccccagtgcgcctccaggctggtttcccctcttgccccgcaggcctgggcatgtgcttcagcttccagtcaagcatcacggtgctgggcttctactttgtccgccggcgggtgctggccaacgcgctggcctcgatgggcgtctccctgggcatcaccctctggccgctgctctcccgctaccttctggagaacctgggctggaggggtaccttccttgtcttcggcgggatctttctccactgctgcatctgcggggccatcataaggcctgtggccaccagtgtggcccctgagaccaaagaatgtcccccgccacctcccgagacacctgcacttggctgcctggctgcatgcggccggaccatccagcgccacctggccttcgacatcctgcggcacaacacaggctactgcgtgtacatactgggtgtgatgtggtccgtcctgggcttcccactgccacaagtcttcctggtgccatatgccatgtggcacagcgtggacgagcagcaggcagccctcctcatctccatcatcggcttcagcaacatcttcctgaggcccctagccgggctgatggcaggacggccggcctttgctagccaccgcaagtacctgttcagcctggcactcctgctcaatgggctcactaacctggtgtgtgcggcatcaggtgacttctgggtgctcgtgggctactgcctggcgtacagcgtgtccatgagtggcatcggcgccctcatcttccaggttctcatggacatcgtccccatggatcagttccccagagccctgggactcttcactgtcctggacggccttgctttcctcatctccccaccactggccgggttgctcctggacgccaccaacaactttagctatgttttctacatgtccagcttcttcctcatctcagctgccctcttcatgggtggcagcttctacgccctgcagaagaaggagcaaggcaagcaggctgtcgcggcggatgccctggagcgggatcttttcttggaagccaaagacggtcctgggaagcaacggtcccctgagatcatgtgccagtcttcccgccagccacgtccagctggcgtcaataagcatctttggggatgtcctgcctcctccaggaccagccatgagtggctcttatggccaaaggcggtactgcaggccaagcaaacggctctgggctggaatagccctacctgagtgccctgtttgactccgccactatctgccatgtgagttgggcaaattgttgaccacctctgagccttgaaaaagtaggaggttactttgttagagcaaaataataaaatttaattttaaaaaagaaaacgtaggaggttcgtttggatgagctagtctcttccggttgaaaagtctgactcggtgagcatcctgacgactccatttccttctggctccccacccagtcttacacttggccttgccatatgccacatgctctgaagggagagtgcttgcatggactttgccaaatcctgtctgctccatctcagttgaatggaaaaggagggaggtggggctggtagataggtgcatttggtgctagtatccaccaggttttgtgtgcatcccgtaatgagcccacttcctgaaaacatttaaagaaaaaagatatcagctggagatggcagtgcgcacatgtaatcccagctactcgggaggtttaggtgggaggatcactcaaacctgggagtttgaggccagcctgggcaacacagcaagaccctgtcttttttt

SEQ ID NO: 719121 - DNA, 298 bp, Homo sapiens
tatctgagcacgcggcgctgcagagaattttagtataaatgaaattctcacagataagaagtacaggataattatttgccaagtttgaaactgccattatatttcaaggcattctcttttgggagtggttttatattttaggtttgacatttcagatgatcctcacatcttgaaggtgttatacggagcattacagggtgagtcttatatacatgcaggtgcgatttaatttgaagatacttccatttaaactttatgctgccagagttggccagctaatgcaaaagaattctgatag

SEQ ID NO: 719122 - DNA, 1501 bp, Homo sapiens
gctcagctttgcagagcgcccgacttccccagcagagaggcgtggtttcacgatagggctatggtgccattgtattgggccactgtcctgtacaatgcatgcctgcgcctcctctcgacgcgtgccgagggccgatctggtcgcgagggccgatgctcttctctattcatagctctgcgtttgtacaggtctgggtctgtagggagccagggtgtcagggttgcgtcttgcttggccatcttcagctttcacatctagtggtcctggccaggagaggcccgatgcgcgtgtatcctggccacggtgcatggatgagtcatggacctgtgtgaatgggcgtgttcttatacgatttgtataaagctgggttggaaacactcaattgaaccagatcatgagttcctatgtaaccatggaacaatcgatgcagcagtctccactgatctattccatgtcactcatggcagcaaataccatcatagtgagtgaggaatgtccatggcgccattggccgtagtccatgatacgcaattggtgctttcatgcgtggtcgcttctcgccgtctgtagttgacatagcggggacttggcataaacggttggacacgattgcgccttggggaactttgacaggagcaggaaagcagtccccttcgcgttcgacccgagcgggacttctggagtacatcttcccaagcgccatgtgatccgtgggcggggacctctagactcatggagggggcgttctctgtgggtgtctggtcacgacctaggacgtgtgccgtatgagcgcttatcgcctttgtggataaaatctcgcgatacacagagcgacttcccgtggccctttgtggatcccccgttgtgacgggattgtggcgccttcccctatttcgtgtccgagggccattgcccggcattgtggcgttggtggttggttccatggacatgcgttgtgggccgttgaggccatgggcattctcgtatggcgcttggggatcacctcgtttggcaccttttggaattagggaccctgcgatcttccatgggattgtcctgcgctcggtacccgagagagtcaattgccaccacggaaatgattagccgtccatatatcaaggattgccgcattggaggctttggaacacacccatgtgttcacgggcagcatggttattactaaagaaagggaaaggggggcagctacatttgggccccactttgcgacacaccaaggagaacaatgcacggagagaccccacaccaagtcgtttgttcccattggtcgcaccccttcgtctgaacttagagacgtctgcataaggtgcggatacttaggacactctggggaacgaattttatgcacaactcctggtgtttggcccaattcttcggggaaggtgaatctacaacttcacctttccagagagtgatatcattccgttagggcactcactatcccggagaaatatatcacagaagtgaagacacattggctctg

SEQ ID NO: 719123 - DNA, 838 bp, Homo sapiens
  misc_feature (393)..(393): n is a, c, g, or t
gacacaccctgggtgtctctttgtcctgccggcacgtgaggactcatccagtctgcagcagcgtggggcccctgggatggagacgccatgatccccagcttcacggctctgctctgcctcgggctgagtctgggaccccaggacccatcatgcaggcagggccgcgaccccaaacgcacacctctgggctgagcaatggcgtcatgtgagtcaggtgtgggaacctcatgtgacacatcgtggtgttcaggggacgcctggaggcttcgggagttaccgtctgcataacagaggaaagccctagaaaccgtgggacagacatgaaccctagtggagccatcgaacaagggcagattctcctatcccgatccagtgacatgaggagctatgcangggtagaatacccgaatggttgagcatatcgcatgaccatgtatggctggtcgatcgagggcgcagtgatcccactggtagctggtgattgaccaggaggctacacgtaaaggctaactcctttgcagggcctggccgagtggctctaggtgtggacgctcagcgaaaacgtagccgtggaaacctgcctagtagtcgaagtcagaggactcgccaactggagccctgttgttcttgctgaatcgaggatgcgggatagtcccataccgatacttgaatcgggagagtacacgaagcaccggagctcgatgaagcacaaggctggaacttccccaatgagttcctgtgacctctagtgcactggggggacgttacaggtgctacaagtcacagggcttcttcgcatacctgcaggtgaaacccgagtgaccacgtggagtcatag

SEQ ID NO: 719124 - DNA, 714 bp, Homo sapiens
  misc_feature (346)..(347): n is a, c, g, or t
  misc_feature (351)..(351): n is a, c, g, or t
  misc_feature (355)..(355): n is a, c, g, or t
ccttcccacaggacacgggtgtctcgcagagcacggcacgggcagttctctgggctgcactctgtgacttttcctgctgtaattgctgggcttatcacacagcatgtcagtgggaggccgggggccgggctgcctccactgaaccccttttgctcattcactcggctctgattgggagcaagctccagtgacctcccagcttcagcttccccacctgtagaatgggctgtcacaagcccaagtaaggcccaaatgaggtgacaattgcaggtcgtgatctttctttcttttttttcttcttttttctgagacagagtctcactctgtcgcccaggctggagtgcannggcncganctcggctcactgcaagctccgcctgccgcggccacgccattctcctgccttagcctcccgagtcgctgcgactaccggcgcccggtaccaggcccgggtacattccttgcgttcctggtcgatatggcgctccaccgcctcagccaggatgggcccggtctgggcgcgtcatgctccctacggctgcgattccacgcccttgggacttctcccgggtccgcaccctttcgcccggacgcgttaccttctcttcgcaccctggtgcccgcgctgctctgtcacagtgcagccatctttcgcgcgcccccctgaccgtgccgtgctactgcactctcttcggcgtcttgccgctaggtccg

SEQ ID NO: 719125 - DNA, 711 bp, Homo sapiens
  misc_feature (8)..(8): n is a, c, g, or t
  misc_feature (81)..(83): n is a, c, g, or t
  misc_feature (85)..(85): n is a, c, g, or t
  misc_feature (92)..(93): n is a, c, g, or t
  misc_feature (96)..(96): n is a, c, g, or t
  misc_feature (104)..(105): n is a, c, g, or t
  misc_feature (110)..(112): n is a, c, g, or t
  misc_feature (116)..(116): n is a, c, g, or t
  misc_feature (251)..(252): n is a, c, g, or t
  misc_feature (254)..(254): n is a, c, g, or t
  misc_feature (269)..(269): n is a, c, g, or t
  misc_feature (290)..(290): n is a, c, g, or t
  misc_feature (299)..(299): n is a, c, g, or t
  misc_feature (306)..(306): n is a, c, g, or t
  misc_feature (338)..(338): n is a, c, g, or t
  misc_feature (376)..(376): n is a, c, g, or t
  misc_feature (386)..(386): n is a, c, g, or t
  misc_feature (399)..(399): n is a, c, g, or t
  misc_feature (403)..(403): n is a, c, g, or t
  misc_feature (414)..(415): n is a, c, g, or t
  misc_feature (418)..(418): n is a, c, g, or t
  misc_feature (440)..(440): n is a, c, g, or t
  misc_feature (442)..(442): n is a, c, g, or t
  misc_feature (445)..(445): n is a, c, g, or t
  misc_feature (465)..(465): n is a, c, g, or t
  misc_feature (467)..(467): n is a, c, g, or t
  misc_feature (470)..(470): n is a, c, g, or t
  misc_feature (476)..(476): n is a, c, g, or t
  misc_feature (488)..(488): n is a, c, g, or t
  misc_feature (499)..(499): n is a, c, g, or t
  misc_feature (516)..(516): n is a, c, g, or t
  misc_feature (698)..(698): n is a, c, g, or t
caaaaaantttcatgttagagatcaagaaactttcatgttagagatctagaaactttcaagattcgaaatgtaacaaaggnnnanggggggnnaanaaaatccnncaaannngggnggcacatgctgatactgctcattatttcattataacagcccttccaaatcttgaatttgcatttttaaccagtgttagcaaatcctgtatttccctctttgggaaatatgggaagcatgagccagggcatattcnngnggcgaaatctcaggncatcaccccccacaaacaagngatcaagangctttcngtatttatttaaaaaaaaaaaaattccagaanggggaagagaacaatcatcaagggtgtaggggccaganacaggggggnggggggggggggngggnggccttagggnngtnaaagggctagcctcattccaancnggntttaatagggggacctaatntnaanggcgangtttcccatggntctagattccnctgccccacctacaaanatggcacagccagcttgacttgcaaggcctcagttgaaggaccccatgtacatacaggccagtacagcagtactaggctaactagaaggatctcatccccatatgtggtctcatttcaagtctatggatgactaccttcattgctgtgtgcgagatggtttcaccccttgaaaatatggtcncttcagcataaaa

SEQ ID NO: 719126 - DNA, 154 bp, Homo sapiens
  misc_feature (12)..(12): n is a, c, g, or t
catcatggcggnccttggagcttgagatatcagagactgcgaggcaggtggttagcgcctttacctaacagactctgatctggtactgaatcaaagactgactaagactagcagcttgagatattcttctgaccctatcccctagaacaggaaa

SEQ ID NO: 719127 - DNA, 1192 bp, Homo sapiens
tccggcactgccatcggtacggcatccgggcagcagccacatgatccatgccccagtctattcagctgccacctgggcagagcctcatccgatgggggccccccgaaggattcctcacgcccgggtcccagccgccagtcctgaacaccagcagagagccctctcagcatggagatgcaacaggcttccacgtttgccgacagtaaaccagaatgtcccttcaggaggccccagtgccatcgccacagcacctacaggcaaaaccacacgcagtggatgagaaacccagcctgggagccgtgacagctgcaggcaggcccccatcggcatgccatccacagcatgcaagcgcaaccgggcagcgatcaaagcctcgcggctgtccaacagatggagaggagagtaaggcctgacaagctgccatggcatgccaccatcgaccatctcccatactgaggcacaggatgccagacaatgccggcctcgacaacagccgacaacatacgggcagccactcaccagcatccacccgtcccaaattgcagtggcaccaagaacgtgagagaccctaccacatccatactaccacatccacgaagagctcccgaatgtacaaccgagacatatgcaccccgatggactatacatggcccatttgcacccaccgaatatggcattcttgacccaacgcaaacaccaaaacaagagacagacactgacatcactttccatacccaccatcatgccatcactaaacagatgaactgctgagatgatgaaagccatccactagtgtcaggtggcagagacatatggcgacatcacattggactttcatcacacttgctacatgacagcgcacaaacacaggggcagcccttcatcaaacaagaagcaatgacgaggccacaaacctgcaacaactccacttgggcacacgagcatttcgacagccatggggtccaattaacaccattgcacggactgagtgtaagaaaacaaactgtcagcccacggactattcaccctgtgtcacccggtaacgacaaaaccaaaacagcaaccccaccgagcacagccacaaccaaccaagctaacacacagcaacacagagacaccatcacaactaccacggccgtcacagccggacagaacacgcaacgacaaacacccagcagcgcgcccacaccaa

SEQ ID NO: 719128 - DNA, 275 bp, Homo sapiens
  misc_feature (152)..(152): n is a, c, g, or t
gtaccaatcagtctaactccaggtggtagaagacggctagagtctttgccaagcggcagtgggtgacacttttctcagctcccaactactgtggcgagttgacaatgcgtggcgccatgatgatgtgtggacagagacccttcatgtgctcntttccagtatcctctaagcccgcgcgacaacgaacaagtgggaagtactgggcagttccagtggccgtgaacccgtggagtgtcgcagcagattgggagatccatctagacgtcgaccgtgca

SEQ ID NO: 719129 - DNA, 135 bp, Homo sapiens
tctagaggatccctgagagacctgtttgaatggagctgccatcacattgggagcagaaaatgggatgaatgtgagcatgagcaatggtgggagttgatgaacaatgaggggagagagtggatgcgggaatgtggc

SEQ ID NO: 719130 - DNA, 249 bp, Homo sapiens
  misc_feature (65)..(65): n is a, c, g, or t
  misc_feature (87)..(87): n is a, c, g, or t
  misc_feature (96)..(96): n is a, c, g, or t
  misc_feature (99)..(99): n is a, c, g, or t
  misc_feature (112)..(112): n is a, c, g, or t
  misc_feature (211)..(211): n is a, c, g, or t
  misc_feature (225)..(225): n is a, c, g, or t
atttcgtgagaattcactctattttgaggacagcaccaagaagatggtgctaaccacttcaaganaaaccgccccatgatccaaatnccttccgcnagncccaacttccacnattggggataccaataaaccattttgaatggagacacagagccaaaccatatcacgctccttccctgagtccttgacctgaagtagatgcctgggttgnctccatttttcaantgaggctgggactgacatcaggcc

SEQ ID NO: 719131 - DNA, 179 bp, Homo sapiens
ccgctgtaccagttgcggtatagcgggtgtaatcatatgtatacatattgcgctcagatggattgtctaggactcaaatgtgcatctccctaaccgtaaggtacttcatcctgtatccacatcaaatgtgagttgctgccagcaggtggagtcccccctgaaaaatggtacggcggtca

SEQ ID NO: 719132 - DNA, 628 bp, Homo sapiens
gtgagcatcaaactcaaactacgccctgatcggaggatggagtaacaggagtccgcacaaatcggtcatatgaagtaacctagacattattctactatcaagcattactaataagtggctccttaacctctcaatccttatcacaacacacgaacacctctgattattcctgacatcatgcaccattggccgataatatgatttatttccacactagcagtaagaacatactcgaacccccttcgacacttgccgaagggggagtccgaacgtagtctcaggcttcaactatcgaatacgccgcaggccccttcgccctattcttcatagccgaatacaacaaagacattattataataaacaccactcaccatacaatcttcctaggaacaacatatgacgcactctcccctgaactctacacaacatatttgtcaccaagaccctacttctaagcctccctgttcttatgaattcgaacagcatagccccgattccgctacgagcaactcatacaccctcctatgaaaaaacttcctaccatcaccctagcattacttatatgatatgtctccataccattacaatctccagcattccccctcaaacctaagaaatatgtctgata

SEQ ID NO: 719133 - DNA, 427 bp, Homo sapiens
attcagctcgagagtcgcttcgagagaacaggtgcctaggatgtaaattgaggcttaccttctatgattctgtgttccacactacattgttggttgggctcataattccagaaccatagttctctttctactacattcttcatagttgtttctgtgataaaagccattgtgatttctggatatcgtgtgtttttttagaccggaagattttaggatctgtatctctacctgagtttggggatttcatgataatgctgtggaatagggtctatttcattcattatgctgagtgttttgccttattaaaatcggagcttgtaatttaaaaaaattctagagtaattgaaaatattagtgctctagaattggctaatggtttctacaagaactcttaaggcttatttagacataaataaaaaataccaga

SEQ ID NO: 719134 - DNA, 478 bp, Homo sapiens
  misc_feature (145)..(145): n is a, c, g, or t
gcaacgcgcgatagcctccgaagctgggattacaagcgtgcactaccacgccggctaatttttttaatttttagtagtgatggggtttcaccacgttggtcaggctgatctcgatctcctgacctcgtggtccgcccaccttggnctcccaaaatgcccggcggcttattctgtttttaaataacagctttattgagatattaatcatatactgtaaaagtgaacctgttaaattatccaattaaggggtttttagtatattcacaaagttgtacgaccattgccacagttagtttgatgtttcaaggttcatctgtgttgtagaatatatcagtacttacttcattcccttttttttctttttttgagacgggagtcttgctttgttgcctaggctggagtgcagtggtgtgatctcagctcactgcatcctccgcctctgggttcaaacgattctcccacctcagcctcccaagta

SEQ ID NO: 719135 - DNA, 180 bp, Homo sapiens
accagcgcactagcctcatgctggagagggacaagtgcaggttagaattacagcttatgttagacagatactgtgtaaagcatagtgccggacacacggcattagcggttattttatgagattccatcagctcggcctcggtcctctttcttctaacatgaaggtatcatgagaagagaa

SEQ ID NO: 719136 - DNA, 371 bp, Homo sapiens
ccagcactcccagtggtaccaccaagagttaaaccaatggaagagccacaaatgagattcgttggtaatagcctccagtggcccccacagtattggagccattgtgccacccgtaaagcctggaggtgcttttcaactgaatggcgtccgtggctgacaaatggaataaaagagctatgctgtggtgctcaaaatagacacagaaaaaaaaggatcccaaagagagaaagagagagagagagagaaggccaagaagaagaagaaaatggcacacacatgagaggatagcttgtggaaccctctaaaaagcccaatgttaacacagacccatgtatatgactctcacatcctgtgtagaattttttttttct

SEQ ID NO: 719137 - DNA, 243 bp, Homo sapiens
tacaagctcactgacaccctctcggccacggcccaggtgatgaccaagtaccgcgccaccggcgagtacaagcctgatttcgactgggcctttgccaaatggcaggccgctcctgccgtggctgtgcgcgtgggccgcatcggtgccccgttcttcatggtgtcggacttccgtgacgtcggttacgccaacaccactgtgcgccccccgctggacgtctatggccaagtgcctgtgagttct

SEQ ID NO: 719138 - DNA, 141 bp, Homo sapiens
gcatttcctgatagccgtctactagagtttgtatgtgtaccatggagtcatctaaattgtcctaaaatgtgttctttccaggagaatcatctaaattttcctaaaatgtgttcttctaaggaggtagactaggacattatt

SEQ ID NO: 719139 - DNA, 223 bp, Homo sapiens
catatataaatcaagttaaccttctacatactaacatcattttgccatgcaagagtcaaattataagactcacagaatgttaaagccggatgccattaaatagttataactggaagaacttcggtgaattcaccaaaaagtaccaggtattacataatgtgcaggcagttaataggttaacgggataatatgcttaggtggtaatgtgacacaaaatacattg

SEQ ID NO: 719140 - DNA, 175 bp, Homo sapiens
tttttccgggggggggggccccctttttccctttccccccccccccccccccggggggggggagttttttccccccctttccttttttgcccccccctgtttccctttttccccccccggtgtttttcccctttcgggggcggggttcccttttttttaaggggggggtttttta

SEQ ID NO: 719141 - DNA, 307 bp, Homo sapiens
  misc_feature (65)..(65): n is a, c, g, or t
  misc_feature (71)..(71): n is a, c, g, or t
tatttaaaagctgttatggattttctgagccatcagggaaattttctagataattttattggtantgactnctactttaattctattgtgatcagaatatgatctctgatatttcagtcttttgaaatgtactgagacttactgtcttagagacttatggactggcacatggtctatttggtcaatgttctatatgcatgaaaaaagtatattctgtagtttggggtatagtgttgtataagagtcaattaggtttattagttgataatgtttggatcttctataattttactgattcgtttttgcc

SEQ ID NO: 719142 - DNA, 223 bp, Homo sapiens
  misc_feature (210)..(210): n is a, c, g, or t
  misc_feature (218)..(218): n is a, c, g, or t
ctgcctggatgttttatccattattgaaaggggagtgttgaagtctaccgctattgttgtattgctgtcggtttctccattcaggtatgtcaatatttgctttgtatatttaggtgctctgatgttgagtgtgtgtatacttataattgttatatcttcttactgaattgatcattttgtcatgtgatgacctttatctctagagacaanttttcaanattta

SEQ ID NO: 719143 - DNA, 211 bp, Homo sapiens
  misc_feature (67)..(67): n is a, c, g, or t
  misc_feature (97)..(97): n is a, c, g, or t
  misc_feature (165)..(165): n is a, c, g, or t
agcgggaacaatcacttaaaaaagattaagacgtaaatttatgttatgtgttttttgtctgtgtttnttgaatctctactttgggagcccaaggcangagaatcacttcacaccaggcgttcaagacaagcctaggcaacaaagcaagacctcatttctccaacnaattaaaaaaattagccaggtgtgaagtgattgtccccgctgcacc

SEQ ID NO: 719144 - DNA, 741 bp, Homo sapiens
  misc_feature (168)..(168): n is a, c, g, or t
  misc_feature (184)..(185): n is a, c, g, or t
  misc_feature (213)..(213): n is a, c, g, or t
  misc_feature (250)..(250): n is a, c, g, or t
  misc_feature (264)..(264): n is a, c, g, or t
  misc_feature (325)..(325): n is a, c, g, or t
gaatgataccctgaaaactttttgacacttagacgctcagcttgacactaggcattattacacagggaactacaatccatatttggatctgctaagccggcgctctataactacatggattccacaccctgcaggacttcacctcggaaggcctgtctgaagcatcanttctgtggtgctgctnngggatggactccatgcacagtccacttnttgacacattctcacactgtggctggagacccatttnttccatcccatgtngaatgagaatcttgagttgcccacagacagacttgacctttgtgccagaactgtccagagntgtgagttttgttactgaattgcctgtccctgagcttggcctgctggagcatgatgctggaggctgtgtgctggcaggcttgtgctccccttggagaatggctgctacttaacaaggaagtcctggccacaggagtcccctactggctgcacaggacgaagcatgaagcatgccgtggatcccacatgcacttgggcaaggcagccaggttccatagcatcatgcatgtgcattatgggtaccaggtggccagttaaggcccgaggaccactcagcagaattccccacgtgccttacccttaatactcataggatttctgtcaggccctaataactgtgttatccggacaaggttggctggccctaaaatcttaggaactgggacctccttctttagggacccattgtaactttta

SEQ ID NO: 719145 - DNA, 102 bp, Homo sapiens
ggctaggtctttgacctgttagagcagattcaggagagcggtgcctctacacgtagcctccttatcccattcgtccaggtgtacgctatgtgaggtagacca

SEQ ID NO: 719146 - DNA, 112 bp, Homo sapiens
  misc_feature (59)..(59): n is a, c, g, or t
tcttacccacagggtataccctatgtaaatggtgattgggaaactgggaaatactcgtntttataaactacaaaaacgagtacttccaagtttccattcacatttacatagt

SEQ ID NO: 719147 - DNA, 392 bp, Homo sapiens
  misc_feature (237)..(237): n is a, c, g, or t
gcgggcaggcagagactctgcgtgctaggccaagggcgagccctggagctgtttcgttgttgcgtgagagcctctgccagtctggaatagttcgtgctttctgtgctccttgaccagtcccaaggctggcctaggctccccgctcagggtcaccacatcaggtcgtgagtgagagtggctgtacgacagtgggtggtttggagaccttcgacagcctcacggacctggtggagcatntcaagaagacggggattgaggaggcctcaggcgcctttgtctaccttcggcagccgtactatgccacgagggtgaatgcggcttacattgagaaccgagtgttggaactgaacaagaagccggagttggcctttttcgcgggttaccaagtcgaa

SEQ ID NO: 719148 - DNA, 369 bp, Homo sapiens
cagaagcacatgtattataacagagattggtacaagcgcaattttgccatcaccttcttcatgggaaaagtggccctggaaaggatttggatccagcttcaacagaatcacaagaagagcagcccctagtagtcctctttgaaccagccagagtacaggtttccacatgtagcagatggagctcctgttcacaggggctgtcacaaaaactgtagctgatctcgtttagccccacatcttcttcagtggcgccatggcctgtctcgcggcacggtaggtcctggggcactgttgtgcgcctccatcaggtttggtttataggtcagcctgttttctcgaacgtgctgtaaaataaagcccaagcactag

SEQ ID NO: 719149 - DNA, 1371 bp, Homo sapiens
gagatggtgtcagatggcagatgacggaacttgtcgggaactagaacaaacggtgaactccttgctatacttttacaaagagactagatggactttattgccccatgacctaggagctctgatggaacttttaacttgcagacgagactgacttctgcgacgctatctgcgcagcaggcaacatttctaacgcaagcaaagctgcttcacacatgctgaccatgcgctacatcgtctacaacagtgcttcacgctctctactagccattcgacaacagcagactggatctctgcgaactctggcaaccttgactgctcttaacacaggcgacacgcacgacgccactacaacacgctcttgggaacacatctggaccagccgcttcaaccaagtggcccacttcacacacacacgcacaaagacccacacttattcctcttcggcctgcacacctcccagacgaccttagcccctgccagcacaccactctcctgcccacttctgcgggtcacacttgcacgcaaacaaccgcgaaccacatggggctaaacttcgagccttaaaaggcaccacaagtaacgacagacaaaccacttggtaacatcaccgggagcccccaaatgcgttcgacgtaacgcgcggccgttgtccaagccaagccccatagtcgctcccctcagttcaccccgccaaactggctatcctcaaacaggccctcttaaagggaaacgcggcctctgactcaacgctacggaaatggcacacagcgactcacaaacagcatttatcgcttccaatcaccggactttgagagctggccattacagatatgcgcactcccccaccacggcgtcgtccctttcagcgcgcatttggcgctttctcctaagatcggtccaaacggcacctctcgcttccccgaccagcaacaagtctcatcgattccccgagtttgagcccaccccccgtatcaggccgcacagtatcacccgaacaacaaacagcagcagcaacaacactatggaacagcatctctaatatcacacaacccacaaggctcggggtgccagcactccccacctcaacactggtggcctgtaagactcaaacaggccccacctacccaacgggagcaccatcatgaaataagtacgaggaaatacaatcgccacacctggagacaaagcggaggagattgtgcctacacaatggtggtgaccgaccgccaaaccgcccctacgcacgtttgtgactagcctcaaggaggcacctcagcatagccgaccactgaagctaatagacgcacaagagccaataaagacgacaagacgcacacatatcacaccaacaagcagccacttacacgacaa

SEQ ID NO: 719150 - DNA, 3985 bp, Homo sapiens
ggagggctggccagtgaggctcggcccggggaaagtgaaagtttgcctgggtcctctcggcgccagagccgctctccgcatcccaggacagcggtgcggccctcggccggggcgcccactccgcagcagccagcgagccagctgcccgtatgaccgcgccgggcgccgccgggcgctgccctcccacgacatggctgggctccctgctgttgttggtctgtctcctggcgagcaggagtatcaccgaggaggtgtcggagtactgtagccacatgattgggagtggacacctgcagtctctgcagcggctgattgacagtcagatggagacctcgtgccaaattacatttgagtttgtagaccaggaacagttgaaagatccagtgtgctaccttaagaaggcatttctcctggtacaagacataatggaggacaccatgcgcttcagagataacacccccaatgccatcgccattgtgcagctgcaggaactctctttgaggctgaagagctgcttcaccaaggattatgaagagcatgacaaggcctgcgtccgaactttctatgagacacctctccagttgctggagaaggtcaagaatgtctttaatgaaacaaagaatctccttgacaaggactggaatattttcagcaagaactgcaacaacagctttgctgaatgctccagccaagatgtggtgaccaagcctgattgcaactgcctgtaccccaaagccatccctagcagtgacccggcctctgtctcccctcatcagcccctcgccccctccatggcccctgtggctggcttgacctgggaggactctgagggaactgagggcagctccctcttgcctggtgagcagcccctgcacacagtggatccaggcagtgccaagcagcggccacccaggagcacctgccagagctttgagccgccagagaccccagttgtcaaggacagcaccatcggtggctcaccacagcctcgcccctctgtcggggccttcaaccccgggatggaggatattcttgactctgcaatgggcactaattgggtcccagaagaagcctctggagaggccagtgagattcccgtaccccaagggacagagctttccccctccaggccaggagggggcagcatgcagacagagcccgccagacccagcaacttcctctcagcatcttctccactccctgcatcagcaaagggccaacagccggcagatgtaactggtaccgccttgcccagggtgggccccgtgaggcccactggccaggactggaatcacaccccccagaagacagaccatccatctgccctgctcagagaccccccggagccaggctctcccaggatctcatcactgcgcccccagggcctcagcaacccctccaccctctctgctcagccacagctttccagaagccactcctcgggcagcgtgctgccccttggggagctggagggcaggaggagcaccagggatcggaggagccccgcagagccagaaggaggaccagcaagtgaaggggcagccaggcccctgccccgttttaactccgttcctttgactgacacaggccatgagaggcagtccgagggatcctccagcccgcagctccaggagtctgtcttccacctgctggtgcccagtgtcatcctggtcttgctggccgtcggaggcctcttgttctacaggtggaggcggcggagccatcaagagcctcagagagcggattctcccttggagcaaccagagggcagccccctgactcaggatgacagacaggtggaactgccagtgtagagggaattctaagctggacgcacagaacagtctctccgtgggaggagacattatggggcgtccaccaccacccctccctggccatcctcctggaatgtggtctgccctccaccagagctcctgcctgccaggactggaccagagcagccaggctggggcccctctgtctcaacccgcagacccttgactgaatgagagaggccagaggatgctccccatgctgccactatttattgtgagccctggaggctcccatgtgcttgaggaaggctggtgagcccggctcaggaccctcttccctcaggggctgcaccctcctctcactcccttccatgccggaacccaggccagggacccaccggcctgtggtttgtgggaaagcagggtggacgctgaggagtgaaagaaccctgcacccagagggcctgcctggtgccaaggtatcccagcctggacaggcatggacctgtctccagagagaggagcctgaagttcgtggggcgggacagcgtcggcctgatttcccgtaaaggtgtgcagcctgagagacgggaagaggaggcctctggacctgctggtctgcactgacagcctgaagggtctacaccctcggctcacctaagtgccctgtgctggttgccaggcgcagaggggaggccagccctgccctcaggacctgcctgacctgccagtgatgccaagagggggatcaagcactggcctctgcccctcctccttccagcacctgccagagcttctccaggaggccaagcagaggctcccctcatgaaggaagccattgcactgtgaacactgtacctgcctgctgaacagcctgcccccgtccatccatgagccagcatccgtccgtcctccactctccagcctctccccagcctcctgcactgagctggcctcaccagtcgactgagggagcccctcagccctgaccttctcctgacctggcctttgactccccggagtggagtggggtgggagaacctcctgggccgccagccagagccggtctttaggctgtgttgttcgcccaggtttctgcatcttgcactttgacattcccaagagggaagggactagtgggagagagcaagggaggggagggcacagacagagaggctacagggcgagctctgactgaagatgggcctttgaaatataggtatgcacctgaggttgggggagggtctgcactcccaaaccccagcgcagtgtcctttccctgctgccgacaggaacctggggctgagcaggttatccctgtcaggagccctggactgggctgcatctcagccccacctgcatggtatccagctcccatccacttctcacccttctttcctcctgaccttggtcagcagtgatgacctccaactctcacccaccccctctaccatcacctctaaccaggcaagccagggtgggagagcaatcaggagagccaggcctcagcttccaatgcctggagggcctccactttgtggccagcctgtggtggtggctctgaggcctaggcaacgagcgacagggctgccagttgcccctgggttcctttgtgctgctgtgtgcctcctctcctgccgccctttgtcctccgctaagagaccctgccctacctggccgctgggccccgtgactttcccttcctgcccaggaaagtgagggtcggctggccccaccttccctgtcctgatgccgacagcttagggaagggcagtgaacttgcatatggggcttagccttctagtcacagcctctatatttgatgctagaaaacacatatttttaaatggaagaaaaataaaaaggcattcccccttcatccccctaccttaaacatataatattttaaaggtcaaaaaagcaatccaacccactgcagaagctctttttgagcacttggtggcatcagagcaggaggagccccagagccacctctggtgtccccccaggctacctgctcaggaaccccttctgttctctgagaagtcaagagaggacattggctcacgcactgtgagattttgtttttatacttggaagtggtgaattattttatataaagtcatttaaatatctatttaaaagataggaagctgcttatatatttaataataaaagaagtgcacaagctgccgttgacgtagctcgag

SEQ ID NO: 719151 - DNA, 729 bp, Homo sapiens
cccttcccgggccatatggattattgcgccgggctttgagggcctggagtcatccgtggctgtgccgcggtagggggcctgctggcactgtttttgccaaggcgtcgcgggtggccgcggtgctaccgcagacaccggactacgtgtggtgggcaccgtcgcccgtaatggcccattccataggatcgtgtattttccacactatagagccctccattcacggaggtccccctctttttcacgggacaccccttggcgccaaccttcgcccgaatcgccgttgtgcctatctatattctctccgtgcgtggttaattcgtacgctttgtttcgccccgccaccaacacgtttttcagcgcgcctatctccgggatgcccccgagcggcttactttctcgggacgtatcccgccgatggcgcattacaccccctggacatccctcatcattctctgagtctccaatcacattctctcaccaccccctggataattaataaaattttccatagaattgagaaaacctcttcgcttttcgaaacgaaatttcctctatattagagagaaccccccctaaaccctcggaggtggaactatatggatgcccccccccctctcccccacctttcggagcacccgtatacattaaattcttagacccaaaaagggagggatcgacccccccaaacggggttcacaacccaaccccaggccccccagacttttccca

SEQ ID NO: 719152 - DNA, 2545 bp, Homo sapiens
ggagggctggccagtgaggctcggcccggggaaagtgaaagtttgcctgggtcctctcggcgccagagccgctctccgcatcccaggacagcggtgcggccctcggccggggcgcccactccgcagcagccagcgagcgagcgagcgagcgagggcggccgacgcgcccggccgggacccagctgcccgtatgaccgcgccgggcgccgccgggcgctgccctcccacgacatggctgggctccctgctgttgttggtctgtctcctggcgagcaggagtatcaccgaggaggtgtcggagtactgtagccacatgattgggagtggacacctgcagtctctgcagcggctgattgacagtcagatggagacctcgtgccaaattacatttgagtttgtagaccaggaacagttgaaagatccagtgtgctaccttaagaaggcatttctcctggtacaagacataatggaggacaccatgcgcttcagagataacacccccaatgccatcgccattgtgcagctgcaggaactctctttgaggctgaagagctgcttcaccaaggattatgaagagcatgacaaggcctgcgtccgaactttctatgagacacctctccagttgctggagaaggtcaagaatgtctttaatgaaacaaagaatctccttgacaaggactggaatattttcagcaagaactgcaacaacagctttgctgaatgctccagccaagatgtggtgaccaagcctgattgcaactgcctgtaccccaaagccatccctagcagtgacccggcctctgtctcccctcatcagcccctcgccccctccatggcccctgtggctggcttgacctgggaggactctgagggaactgagggcagctccctcttgcctggtgagcagcccctgcacacagtggatccaggcagtgccaagcagcggccacccaggagcacctgccagagctttgagccgccagagaccccagttgtcaaggacagcaccatcggtggctcaccacagcctcgcccctctgtcggggccttcaaccccgggatggaggatattcttgactctgcaatgggcactaattgggtcccagaagaagcctctggagaggccagtgagattcccgtaccccaagggacagagctttccccctccaggccaggagggggcagcatgcagacagagcccgccagacccagcaacttcctctcagcatcttctccactccctgcatcagcaaagggccaacagccggcagatgtaactggtaccgccttgcccagggtgggccccgtgaggcccactggccaggactggaatcacaccccccagaagacagaccatccatctgccctgctcagagaccccccggagccaggctctcccaggatctcatcactgcgcccccagggcctcagcaacccctccaccctctctgctcagccacagctttccagaagccactcctcgggcagcgtgctgccccttggggagctggagggcaggaggagcaccagggatcggaggagccccgcagagccagaaggaggaccagcaagtgaaggggcagccaggcccctgccccgttttaactccgttcctttgactgacacaggccatgagaggcagtccgagggatcctccagcccgcagctccaggagtctgtcttccacctgctggtgcccagtgtcatcctggtcttgctggccgtcggaggcctcttgttctacaggtggaggcggcggagccatcaagagcctcagagagcggattctcccttggagcaaccagagggcagccccctgactcaggatgacagacaggtggaactgccagtgtagagggaattctaagacccctcaccatcctggacacactcgtttgtcaatgtccctctgaaaatgtgacgcccagccccggacacagtactccagatgttgtctgaccagctcagagagagtacagtgggactgttaccttccttgatatggacagtattcttctatttgtgcagattaagattgcattagtttttttcttaacaactgcatcatactgttgtcatatgttgagcctgtggtctattaaaacccctagttccatttcccataaacttctgtcaagccagaccatctctaccctgtacttggacaacttaacttttttaaccaaagtgcagtttatgttcacctttgttaaagccaccttgtggtttctgcccatcacctgaacctactgaagttgtgtgaaatcctaattctgtcatctccgtagccctcccagttgtgcctcctgcacattgatgagtgcctgctgttgtctttgcccatgttgttgatgtagctgtgaccctattgttcctcacccctgccccccgccaaccccagctggcccacctcttccccctcccacccaagcccacagccagcccatcaggaagccttcctggcttctccacaaccttctgactgtcttttcagtcatgccccctgctcttttgtatttggctaatagtatatcaatttgcactt

SEQ ID NO: 719153 - DNA, 775 bp, Homo sapiens
cagatatttcaagtcaggtatccatgtcccctttgagaattctctaagctaagtatggccaagtccctcaaacgttccttatatgatatggttttcagacccctcaccatcctggacacactcgtttgtcaatgtccctctgaaaatgtgacgcccagccccggacacagtactccagatgttgtctgaccagctcagagagagtacagtgggactgttaccttccttgatatggacagtattcttctatttgtgcagattaagattgcattagtttttttcttaacaactgcatcatactgttgtcatatgttgagcctgtggtctattaaaacccctagttccatttcccataaacttctgtcaagccagaccatctctaccctgtacttggacaacttaacttttttaaccaaagtgcagtttatgttcacctttgttaaagccaccttgtggtttctgcccatcacctgaacctactgaagttgtgtgaaatcctaattctgtcatctccgtagccctcccagttgtgcctcctgcacattgatgagtgcctgctgttgtctttgcccatgttgttgatgtagctgtgaccctattgttcctcacccctgccccccgccaaccccagctggcccacctcttccccctcccacccaagcccacagccagcccatcaggaagccttcctggcttctccacaaccttctgactgtcttttcagtcatgccccctgctcttttgtatttggctaatagtatatcaatttgcactt

SEQ ID NO: 719154 - DNA, 228 bp, Homo sapiens
  misc_feature (127)..(127): n is a, c, g, or t
  misc_feature (167)..(167): n is a, c, g, or t
ctaagcactgtaccagggcaaggcaaggccagcctggccgacctggggtggaggggaaggaggctgagggccaggtccttgtcccagtggggagctgggggccagcatccctgtgcccccaacaccntcaaccgagcaaactcgggggctcaaggctttcgggtgcncccatccgtagcccctgcccttcctcgctttgtgggtgcgtgctcctgcccccgccactcc

SEQ ID NO: 719155 - DNA, 430 bp, Homo sapiens
gcatggggtctgtttcccctcttcgtggtggtgggagctctcctgcttgctctgaggaaatggagctgcagaacaggatgggggagagaagaagggcctctgtcctttcccagatatctgggctttttcctgatttctccgtagagttagacagttctgggtcttttcaatctgagagggcctagagcatgtctggggcttaggggtaaacttacggagtccccttattcccctgctcctgctgatgtctaatgccagccctgtgctctgcctgcagccccctgactcaggatgacagacaggtggaactgccagtgtagagggaattctaaggtaagattctgactttgatctccactcctaaaacttacctatacccttttccagtcacgttcacctgttggtgacaccaattcccctgaggccacca

SEQ ID NO: 719156 - DNA, 646 bp, Homo sapiens
atctggtgatcaaatttgcatgaatgaggaattgcttcttacggatgagcaaagtaagtggtttcttaagtaggaatgtactcctgatgaagaagctgtgaacattgttgaaatgataacaaaagatttagaatattacataaacctagttgataaagagtggcagggtttgagaggattgactccaattttaaaagaagtcctgcgagtaaaatgctatcaaacagcatcacatgctacaaagaaatctggtatgaaaggaaaagtcagtcaatttggcaaacttcactgttattttaagaaattaccacaactgcctctgccttcagcaaccgccatcctgatcagtcagctaacatctacgagacaagagcttcaccataaaaaagattgtaacttgctgaagactcagatgatcattagcattttttagcaataaagtattttaaaattaaggtatgtatattgtttttagacactactattgcacacttactagactacagtataatataaacataacttttatttgcactgggaaaccaaaaagttcatgtgactcacttcattgctatattttttatttcttgtggtggtctggaatcaaacctgcaatatcttaaaagtatgccttcattcaacaatg

SEQ ID NO: 719157 - DNA, 159 bp, Homo sapiens
gcggccgttgaagcgtgcgggggccgcgcgctgcttctctgaggcaggacggcactgccggaggcgcgttaacaacgacggcggtggtgacgggcaccgggctgcgcgggtgagacacagtaaccctgtttaaactctgcattctgaaaacgtgaaaga

SEQ ID NO: 719158 - DNA, 3679 bp, Homo sapiens
ggagggctggccagtgaggctcggcccggggaaagtgaaagtttgcctgggtcctctcggcgccagagccgctctccgcatcccaggacagcggtgcggccctcggccggggcgcccactccgcagcagccagcgagcgagcgagcgagcgagggcggccgacgcgcccggccgggacccagctgcccgtatgaccgcgccgggcgccgccgggcgctgccctcccacgacatggctgggctccctgctgttgttggtctgtctcctggcgagcaggagtatcaccgaggaggtgtcggagtactgtagccacatgattgggagtggacacctgcagtctctgcagcggctgattgacagtcagatggagacctcgtgccaaattacatttgagtttgtagaccaggaacagttgaaagatccagtgtgctaccttaagaaggcatttctcctggtacaagacataatggaggacaccatgcgcttcagagataacacccccaatgccatcgccattgtgcagctgcaggaactctctttgaggctgaagagctgcttcaccaaggattatgaagagcatgacaaggcctgcgtccgaactttctatgagacacctctccagttgctggagaaggtcaagaatgtctttaatgaaacaaagaatctccttgacaaggactggaatattttcagcaagaactgcaacaacagctttgctgaatgctccagccaagatgtggtgaccaagcctgattgcaactgcctgtaccccaaagccatccctagcagtgacccggcctctgtctcccctcatcagcccctcgccccctccatggcccctgtggctggcttgacctgggaggactctgagggaactgagggcagctccctcttgcctggtgagcagcccctgcacacagtggatccaggcagtgccaagcagcggccacccaggagcacctgccagagctttgagccgccagagaccccagttgtcaaggacagcaccatcggtggctcaccacagcctcgcccctctgtcggggccttcaaccccgggatggaggatattcttgactctgcaatgggcactaattgggtcccagaagaagcctctggagaggccagtgagattcccgtaccccaagggacagagctttccccctccaggccaggagggggcagcatgcagacagagcccgccagacccagcaacttcctctcagcatcttctccactccctgcatcagcaaagggccaacagccggcagatgtaactgggccatgagaggcagtccgagggatcctccagcccgcagctccaggagtctgtcttccacctgctggtgcccagtgtcatcctggtcttgctggccgtcggaggcctcttgttctacaggtggaggcggcggagccatcaagagcctcagagagcggattctcccttggagcaaccagagggcagccccctgactcaggatgacagacaggtggaactgccagtgtagagggaattctaagctggacgcacagaacagtctctccgtgggaggagacattatggggcgtccaccaccacccctccctggccatcctcctggaatgtggtctgccctccaccagagctcctgcctgccaggactggaccagagcagccaggctggggcccctctgtctcaacccgcagacccttgactgaatgagagaggccagaggatgctccccatgctgccactatttattgtgagccctggaggctcccatgtgcttgaggaaggctggtgagcccggctcaggaccctcttccctcaggggctgcaccctcctctcactcccttccatgccggaacccaggccagggacccaccggcctgtggtttgtgggaaagcagggtggacgctgaggagtgaaagaaccctgcacccagagggcctgcctggtgccaaggtatcccagcctggacaggcatggacctgtctccagagagaggagcctgaagttcgtggggcgggacagcgtcggcctgatttcccgtaaaggtgtgcagcctgagagacgggaagaggaggcctctggacctgctggtctgcactgacagcctgaagggtctacaccctcggctcacctaagtgccctgtgctggttgccaggcgcagaggggaggccagccctgccctcaggacctgcctgacctgccagtgatgccaagagggggatcaagcactggcctctgcccctcctccttccagcacctgccagagcttctccaggaggccaagcagaggctcccctcatgaaggaagccattgcactgtgaacactgtacctgcctgctgaacagcctgcccccgtccatccatgagccagcatccgtccgtcctccactctccagcctctccccagcctcctgcactgagctggcctcaccagtcgactgagggagcccctcagccctgaccttctcctgacctggcctttgactccccggagtggagtggggtgggagaacctcctgggccgccagccagagccggtctttaggctgtgttgttcgcccaggtttctgcatcttgcactttgacattcccaagagggaagggactagtgggagagagcaagggaggggagggcacagacagagaggctacagggcgagctctgactgaagatgggcctttgaaatataggtatgcacctgaggttgggggagggtctgcactcccaaaccccagcgcagtgtcctttccctgctgccgacaggaacctggggctgagcaggttatccctgtcaggagccctggactgggctgcatctcagccccacctgcatggtatccagctcccatccacttctcacccttctttcctcctgaccttggtcagcagtgatgacctccaactctcacccaccccctctaccatcacctctaaccaggcaagccagggtgggagagcaatcaggagagccaggcctcagcttccaatgcctggagggcctccactttgtggccagcctgtggtggtggctctgaggcctaggcaacgagcgacagggctgccagttgcccctgggttcctttgtgctgctgtgtgcctcctctcctgccgccctttgtcctccgctaagagaccctgccctacctggccgctgggccccgtgactttcccttcctgcccaggaaagtgagggtcggctggccccaccttccctgtcctgatgccgacagcttagggaagggcagtgaacttgcatatggggcttagccttctagtcacagcctctatatttgatgctagaaaacacatatttttaaatggaagaaaaataaaaaggcattcccccttcatccccctaccttaaacatataatattttaaaggtcaaaaaagcaatccaacccactgcagaagctctttttgagcacttggtggcatcagagcaggaggagccccagagccacctctggtgtccccccaggctacctgctcaggaaccccttctgttctctgagaagtcaagagaggacattggctcacgcactgtgagattttgtttttatacttggaagtggtgaattattttatataaagtcatttaaatatctatttaaaagataggaagctgcttatatatttaataataaaagaagtgcacaagctgccgttgacgtagctcgag

SEQ ID NO: 719159 - DNA, 478 bp, Homo sapiens
tggtatggcgggatgatatgcaggagctgaggcagtatgtatagtaagttgaacaccttggcatgaagaatagtagcatggtcttgctgaagtgtcccccgatgcccaccacggcaaaggtcatgccagcgaagtaacagaaggtatctcccacaaacacccgtgatgcggacctctgtaggggaatatgtactccgagcccgttgacagaggcattaacaatcccttctctcacattacaccctatgtgccctgggacctagccctgatcctaggttctgactcagaggagaccccatgttgtgcagcaactctgcaggatccaaggccctaaattcatctattccttgggcctccacgcactcatcccttactactactgggtagagagaaatttcagaatacgaccaactgaagacgcagaaaactccatagaggtatgcgcaggtatagcttcaccaccaccaagggtgggtta

SEQ ID NO: 719160 - DNA, 3132 bp, Homo sapiens
ggagggctggccagtgaggctcggcccggggaaagtgaaagtttgcctgggtcctctcggcgccagagccgctctccgcatcccaggacagcggtgcggccctcggccggggcgcccactccgcagcagccagcgagcgagcgagcgagcgagggcggccgacgcgcccggccgggacccagctgcccgtatgaccgcgccgggcgccgccgggcgctgccctcccacgacatggctgggctccctgctgttgttggtctgtctcctggcgagcaggagtatcaccgaggaggtgtcggagtactgtagccacatgattgggagtggacacctgcagtctctgcagcggctgattgacagtcagatggagacctcgtgccaaattacatttgagtttgtagaccaggaacagttgaaagatccagtgtgctaccttaagaaggcatttctcctggtacaagacataatggaggacaccatgcgcttcagagataacacccccaatgccatcgccattgtgcagctgcaggaactctctttgaggctgaagagctgcttcaccaaggattatgaagagcatgacaaggcctgcgtccgaactttctatgagacacctctccagttgctggagaaggtcaagaatgtctttaatgaaacaaagaatctccttgacaaggactggaatattttcagcaagaactgcaacaacagctttgctgaatgctccagccaaggccatgagaggcagtccgagggatcctccagcccgcagctccaggagtctgtcttccacctgctggtgcccagtgtcatcctggtcttgctggccgtcggaggcctcttgttctacaggtggaggcggcggagccatcaagagcctcagagagcggattctcccttggagcaaccagagggcagccccctgactcaggatgacagacaggtggaactgccagtgtagagggaattctaagctggacgcacagaacagtctctccgtgggaggagacattatggggcgtccaccaccacccctccctggccatcctcctggaatgtggtctgccctccaccagagctcctgcctgccaggactggaccagagcagccaggctggggcccctctgtctcaacccgcagacccttgactgaatgagagaggccagaggatgctccccatgctgccactatttattgtgagccctggaggctcccatgtgcttgaggaaggctggtgagcccggctcaggaccctcttccctcaggggctgcaccctcctctcactcccttccatgccggaacccaggccagggacccaccggcctgtggtttgtgggaaagcagggtggacgctgaggagtgaaagaaccctgcacccagagggcctgcctggtgccaaggtatcccagcctggacaggcatggacctgtctccagagagaggagcctgaagttcgtggggcgggacagcgtcggcctgatttcccgtaaaggtgtgcagcctgagagacgggaagaggaggcctctggacctgctggtctgcactgacagcctgaagggtctacaccctcggctcacctaagtgccctgtgctggttgccaggcgcagaggggaggccagccctgccctcaggacctgcctgacctgccagtgatgccaagagggggatcaagcactggcctctgcccctcctccttccagcacctgccagagcttctccaggaggccaagcagaggctcccctcatgaaggaagccattgcactgtgaacactgtacctgcctgctgaacagcctgcccccgtccatccatgagccagcatccgtccgtcctccactctccagcctctccccagcctcctgcactgagctggcctcaccagtcgactgagggagcccctcagccctgaccttctcctgacctggcctttgactccccggagtggagtggggtgggagaacctcctgggccgccagccagagccggtctttaggctgtgttgttcgcccaggtttctgcatcttgcactttgacattcccaagagggaagggactagtgggagagagcaagggaggggagggcacagacagagaggctacagggcgagctctgactgaagatgggcctttgaaatataggtatgcacctgaggttgggggagggtctgcactcccaaaccccagcgcagtgtcctttccctgctgccgacaggaacctggggctgagcaggttatccctgtcaggagccctggactgggctgcatctcagccccacctgcatggtatccagctcccatccacttctcacccttctttcctcctgaccttggtcagcagtgatgacctccaactctcacccaccccctctaccatcacctctaaccaggcaagccagggtgggagagcaatcaggagagccaggcctcagcttccaatgcctggagggcctccactttgtggccagcctgtggtggtggctctgaggcctaggcaacgagcgacagggctgccagttgcccctgggttcctttgtgctgctgtgtgcctcctctcctgccgccctttgtcctccgctaagagaccctgccctacctggccgctgggccccgtgactttcccttcctgcccaggaaagtgagggtcggctggccccaccttccctgtcctgatgccgacagcttagggaagggcagtgaacttgcatatggggcttagccttctagtcacagcctctatatttgatgctagaaaacacatatttttaaatggaagaaaaataaaaaggcattcccccttcatccccctaccttaaacatataatattttaaaggtcaaaaaagcaatccaacccactgcagaagctctttttgagcacttggtggcatcagagcaggaggagccccagagccacctctggtgtccccccaggctacctgctcaggaaccccttctgttctctgagaagtcaagagaggacattggctcacgcactgtgagattttgtttttatacttggaagtggtgaattattttatataaagtcatttaaatatctatttaaaagataggaagctgcttatatatttaataataaaagaagtgcacaagctgccgttgacgtagctcgag

SEQ ID NO: 719161 - DNA, 95 bp, Homo sapiens
tgatactgccagggatgctgcctgacccaagaacgtgcacatttttgtgagctggatgattgcccagagtgtgtacggcatgcaggggcttggtt

SEQ ID NO: 719162 - DNA, 269 bp, Homo sapiens
ggcccctgctggaccgtggatcccgggcgggcgtgcgggcggcacgtacgaggcccttctactcgcccgggtttccggtgcctcgttctccctgggaccctttcgtcaacatcgaggcctgccaattaagcttttaccatcatggacccatttttttcgggcgcccgaagacgcaaaagacctacttcggcaaaaccaagaggcccttaaccgtcccattcgggacttgcccgcaccaaaaacctagacccacagagaaacatcataca

SEQ ID NO: 719163 - DNA, 3024 bp, Homo sapiens
  misc_feature (1)..(2): n is a, c, g, or t
nnctgagggtagggcagagctgtagcattgtagattaggccttgtttttctgcgttgagcagggcatggggatactggggagagtgagacctggggagaaatgacaccctctctgtcacagacatggctgggctccctgctgttgttggtctgtctcctggcgagcaggagtatcaccgaggaggtgtcggagtactgtagccacatgattgggagtggacacctgcagtctctgcagcggctgattgacagtcagatggagacctcgtgccaaattacatttgagtttgtagaccaggaacagttgaaagatccagtgtgctaccttaagaaggcatttctcctggtacaagacataatggaggacaccatgcgcttcagagataacacccccaatgccatcgccattgtgcagctgcaggaactctctttgaggctgaagagctgcttcaccaaggattatgaagagcatgacaaggcctgcgtccgaactttctatgagacacctctccagttgctggagaaggtcaagaatgtctttaatgaaacaaagaatctccttgacaaggactggaatattttcagcaagaactgcaacaacagctttgctgaatgctccagccaaggccatgagaggcagtccgagggatcctccagcccgcagctccaggagtctgtcttccacctgctggtgcccagtgtcatcctggtcttgctggccgtcggaggcctcttgttctacaggtggaggcggcggagccatcaagagcctcagagagcggattctcccttggagcaaccagagggcagccccctgactcaggatgacagacaggtggaactgccagtgtagagggaattctaagctggacgcacagaacagtctctccgtgggaggagacattatggggcgtccaccaccacccctccctggccatcctcctggaatgtggtctgccctccaccagagctcctgcctgccaggactggaccagagcagccaggctggggcccctctgtctcaacccgcagacccttgactgaatgagagaggccagaggatgctccccatgctgccactatttattgtgagccctggaggctcccatgtgcttgaggaaggctggtgagcccggctcaggaccctcttccctcaggggctgcaccctcctctcactcccttccatgccggaacccaggccagggacccaccggcctgtggtttgtgggaaagcagggtggacgctgaggagtgaaagaaccctgcacccagagggcctgcctggtgccaaggtatcccagcctggacaggcatggacctgtctccagagagaggagcctgaagttcgtggggcgggacagcgtcggcctgatttcccgtaaaggtgtgcagcctgagagacgggaagaggaggcctctggacctgctggtctgcactgacagcctgaagggtctacaccctcggctcacctaagtgccctgtgctggttgccaggcgcagaggggaggccagccctgccctcaggacctgcctgacctgccagtgatgccaagagggggatcaagcactggcctctgcccctcctccttccagcacctgccagagcttctccaggaggccaagcagaggctcccctcatgaaggaagccattgcactgtgaacactgtacctgcctgctgaacagcctgcccccgtccatccatgagccagcatccgtccgtcctccactctccagcctctccccagcctcctgcactgagctggcctcaccagtcgactgagggagcccctcagccctgaccttctcctgacctggcctttgactccccggagtggagtggggtgggagaacctcctgggccgccagccagagccggtctttaggctgtgttgttcgcccaggtttctgcatcttgcactttgacattcccaagagggaagggactagtgggagagagcaagggaggggagggcacagacagagaggctacagggcgagctctgactgaagatgggcctttgaaatataggtatgcacctgaggttgggggagggtctgcactcccaaaccccagcgcagtgtcctttccctgctgccgacaggaacctggggctgagcaggttatccctgtcaggagccctggactgggctgcatctcagccccacctgcatggtatccagctcccatccacttctcacccttctttcctcctgaccttggtcagcagtgatgacctccaactctcacccaccccctctaccatcacctctaaccaggcaagccagggtgggagagcaatcaggagagccaggcctcagcttccaatgcctggagggcctccactttgtggccagcctgtggtggtggctctgaggcctaggcaacgagcgacagggctgccagttgcccctgggttcctttgtgctgctgtgtgcctcctctcctgccgccctttgtcctccgctaagagaccctgccctacctggccgctgggccccgtgactttcccttcctgcccaggaaagtgagggtcggctggccccaccttccctgtcctgatgccgacagcttagggaagggcagtgaacttgcatatggggcttagccttctagtcacagcctctatatttgatgctagaaaacacatatttttaaatggaagaaaaataaaaaggcattcccccttcatccccctaccttaaacatataatattttaaaggtcaaaaaagcaatccaacccactgcagaagctctttttgagcacttggtggcatcagagcaggaggagccccagagccacctctggtgtccccccaggctacctgctcaggaaccccttctgttctctgagaagtcaagagaggacattggctcacgcactgtgagattttgtttttatacttggaagtggtgaattattttatataaagtcatttaaatatctatttaaaagataggaagctgcttatatatttaataataaaagaagtgcacaagctgccgttgacgtagctcgag

SEQ ID NO: 719164 - DNA, 4120 bp, Homo sapiens
ggagggctggccagtgaggctcggcccggggaaagtgaaagtttgcctgggtcctctcggcgccagagccgctctccgcatcccaggacagcggtgcggccctcggccggggcgcccactccgcagcagccagcgagcgagcgagcgagcgagggcggccgacgcgcccggccgggacccagctgcccgtatgaccgcgccgggcgccgccgggcgctgccctcccacgacatggctgggctccctgctgttgttggtctgtctcctggcgagcaggagtatcaccgaggaggtgtcggagtactgtagccacatgattgggagtggacacctgcagtctctgcagcggctgattgacagtcagatggagacctcgtgccaaattacatttgagtttgtagaccaggaacagttgaaagatccagtgtgctaccttaagaaggcatttctcctggtacaagacataatggaggacaccatgcgcttcagagataacacccccaatgccatcgccattgtgcagctgcaggaactctctttgaggctgaagagctgcttcaccaaggattatgaagagcatgacaaggcctgcgtccgaactttctatgagacacctctccagttgctggagaaggtcaagaatgtctttaatgaaacaaagaatctccttgacaaggactggaatattttcagcaagaactgcaacaacagctttgctgaatgctccagccaagatgtggtgaccaagcctgattgcaactgcctgtaccccaaagccatccctagcagtgacccggcctctgtctcccctcatcagcccctcgccccctccatggcccctgtggctggcttgacctgggaggactctgagggaactgagggcagctccctcttgcctggtgagcagcccctgcacacagtggatccaggcagtgccaagcagcggccacccaggagcacctgccagagctttgagccgccagagaccccagttgtcaaggacagcaccatcggtggctcaccacagcctcgcccctctgtcggggccttcaaccccgggatggaggatattcttgactctgcaatgggcactaattgggtcccagaagaagcctctggagaggccagtgagattcccgtaccccaagggacagagctttccccctccaggccaggagggggcagcatgcagacagagcccgccagacccagcaacttcctctcagcatcttctccactccctgcatcagcaaagggccaacagccggcagatgtaactggtaccgccttgcccagggtgggccccgtgaggcccactggccaggactggaatcacaccccccagaagacagaccatccatctgccctgctcagagaccccccggagccaggctctcccaggatctcatcactgcgcccccagggcctcagcaacccctccaccctctctgctcagccacagctttccagaagccactcctcgggcagcgtgctgccccttggggagctggagggcaggaggagcaccagggatcggaggagccccgcagagccagaaggaggaccagcaagtgaaggggcagccaggcccctgccccgttttaactccgttcctttgactgacacaggccatgagaggcagtccgagggatcctccagcccgcagctccaggagtctgtcttccacctgctggtgcccagtgtcatcctggtcttgctggccgtcggaggcctcttgttctacaggtggaggcggcggagccatcaagagcctcagagagcggattctcccttggagcaaccagagggcagccccctgactcaggatgacagacaggtggaactgccagtgtagagggaattctaagctggacgcacagaacagtctctccgtgggaggagacattatggggcgtccaccaccacccctccctggccatcctcctggaatgtggtctgccctccaccagagctcctgcctgccaggactggaccagagcagccaggctggggcccctctgtctcaacccgcagacccttgactgaatgagagaggccagaggatgctccccatgctgccactatttattgtgagccctggaggctcccatgtgcttgaggaaggctggtgagcccggctcaggaccctcttccctcaggggctgcaccctcctctcactcccttccatgccggaacccaggccagggacccaccggcctgtggtttgtgggaaagcagggtggacgctgaggagtgaaagaaccctgcacccagagggcctgcctggtgccaaggtatcccagcctggacaggcatggacctgtctccagagagaggagcctgaagttcgtggggcgggacagcgtcggcctgatttcccgtaaaggtgtgcagcctgagagacgggaagaggaggcctctggacctgctggtctgcactgacagcctgaagggtctacaccctcggctcacctaagtgccctgtgctggttgccaggcgcagaggggaggccagccctgccctcaggacctgcctgacctgccagtgatgccaagagggggatcaagcactggcctctgcccctcctccttccagcacctgccagagcttctccaggaggccaagcagaggctcccctcatgaaggaagccattgcactgtgaacactgtacctgcctgctgaacagcctgcccccgtccatccatgagccagcatccgtccgtcctccactctccagcctctccccagcctcctgcactgagctggcctcaccagtcgactgagggagcccctcagccctgaccttctcctgacctggcctttgactccccggagtggagtggggtgggagaacctcctgggccgccagccagagccggtctttaggctgtgttgttcgcccaggtttctgcatcttgcactttgacattcccaagagggaagggactagtgggagagagcaagggaggggagggcacagacagagaggctacagggcgagctctgactgaagatgggcctttgaaatataggtatgcacctgaggttgggggagggtctgcactcccaaaccccagcgcagtgtcctttccctgctgccgacaggaacctggggctgagcaggttatccctgtcaggagccctggactgggctgcatctcagccccacctgcatggtatccagctcccatccacttctcacccttctttcctcctgaccttggtcagcagtgatgacctccaactctcacccaccccctctaccatcacctctaaccaggcaagccagggtgggagagcaatcaggagagccaggcctcagcttccaatgcctggagggcctccactttgtggccagcctgtggtggtggctctgaggcctaggcaacgagcgacagggctgccagttgcccctgggttcctttgtgctgctgtgtgcctcctctcctgccgccctttgtcctccgctaagagaccctgccctacctggccgctgggccccgtgactttcccttcctgcccaggaaagtgagggtcggctggccccaccttccctgtcctgatgccgacagcttagggaagggcagtgaacttgcatatggggcttagccttctagtcacagcctctatatttgatgctagaaaacacatatttttaaatggaagaaaaataaaaaggcattcccccttcatccccctaccttaaacatataatattttaaaggtcaaaaaagcaatccaacccactgcagaagctctttttgagcacttggtggcatcagagcaggaggagccccagagccacctctggtgtccccccaggctacctgctcaggaaccccttctgttctctgagaagtcaagagaggacattggctcacgcactgtgagattttgtttttatacttggaagtggtgaattattttatataaagtccttaattctattaaagaatggagccgctttttttatataagatggcgtggaaaaaaaaaaagggggcaagatccaggccagtgcgtccgttgtgaaggccaaggccataaagaagcggggacaacgggggaagggttgggaaccctggattgacccaacccggtaatttggccggggaac

SEQ ID NO: 719165 - DNA, 222 bp, Homo sapiens
gtctcacatgttgcccaaggctggtcctgaactcctgggctccagctaattccccccgtgcttggcctcccaaagggctgggataacaggtgtgagctccttggacctggtccgaaatgctgcttttgatttccgagtactgttggaagtgtgagggggaaccacgcctatttgttaattgtgagcttccagatgtttctttgctctttggtattctaagat

SEQ ID NO: 719166 - DNA, 517 bp, Homo sapiens
  misc_feature (32)..(32): n is a, c, g, or t
  misc_feature (91)..(91): n is a, c, g, or t
  misc_feature (176)..(176): n is a, c, g, or t
aaagacggggcccagcagagctaggctggganagggcaaacaggtggagcccagaggaccttagggtgatgtgtggccgtgacacttctgnaaagcccaagtgtacatcgagtgacccccatgatgtgaactattgacttcgggtactatgacagaacctgtagtattagaagtgnccatgatttttaaaaatctaaaatatgaatattgggttcaaaagcagagacaaaggcactgcacgaatgtgacgtgttactgacaggggagagggcagatctctctgtacgtcctactcaattttcctacagatataaaactgctctaaaaaatgatattaacaccaacaaaattccatgtttgtagtgaccgtctgggcatttctttacgtttcagaagtaccaggaggatcacggcgcccacagcctggcagctgctccaccacaccttctcacccggtgccgagtgcagctgttcctgtctgaggaggctcagtttggaagcagcccctcttgggact

SEQ ID NO: 719167 - DNA, 4132 bp, Homo sapiens
  misc_feature (3460)..(3460): n is a, c, g, or t
  misc_feature (3509)..(3509): n is a, c, g, or t
  misc_feature (3615)..(3615): n is a, c, g, or t
  misc_feature (3634)..(3634): n is a, c, g, or t
  misc_feature (3649)..(3649): n is a, c, g, or t
ggagggctggccagtgaggctcggcccggggaaagtgaaagtttgcctgggtcctctcggcgccagagccgctctccgcatcccaggacagcggtgcggccctcggccggggcgcccactccgcagcagccagcgagcgagcgagcgagcgagggcggccgacgcgcccggccgggacccagctgcccgtatgaccgcgccgggcgccgccgggcgctgccctcccacgacatggctgggctccctgctgttgttggtctgtctcctggcgagcaggagtatcaccgaggaggtgtcggagtactgtagccacatgattgggagtggacacctgcagtctctgcagcggctgattgacagtcagatggagacctcgtgccaaattacatttgagtttgtagaccaggaacagttgaaagatccagtgtgctaccttaagaaggcatttctcctggtacaagacataatggaggacaccatgcgcttcagagataacacccccaatgccatcgccattgtgcagctgcaggaactctctttgaggctgaagagctgcttcaccaaggattatgaagagcatgacaaggcctgcgtccgaactttctatgagacacctctccagttgctggagaaggtcaagaatgtctttaatgaaacaaagaatctccttgacaaggactggaatattttcagcaagaactgcaacaacagctttgctgaatgctccagccaagatgtggtgaccaagcctgattgcaactgcctgtaccccaaagccatccctagcagtgacccggcctctgtctcccctcatcagcccctcgccccctccatggcccctgtggctggcttgacctgggaggactctgagggaactgagggcagctccctcttgcctggtgagcagcccctgcacacagtggatccaggcagtgccaagcagcggccacccaggagcacctgccagagctttgagccgccagagaccccagttgtcaaggacagcaccatcggtggctcaccacagcctcgcccctctgtcggggccttcaaccccgggatggaggatattcttgactctgcaatgggcactaattgggtcccagaagaagcctctggagaggccagtgagattcccgtaccccaagggacagagctttccccctccaggccaggagggggcagcatgcagacagagcccgccagacccagcaacttcctctcagcatcttctccactccctgcatcagcaaagggccaacagccggcagatgtaactggtaccgccttgcccagggtgggccccgtgaggcccactggccaggactggaatcacaccccccagaagacagaccatccatctgccctgctcagagaccccccggagccaggctctcccaggatctcatcactgcgcccccagggcctcagcaacccctccaccctctctgctcagccacagctttccagaagccactcctcgggcagcgtgctgccccttggggagctggagggcaggaggagcaccagggatcggaggagccccgcagagccagaaggaggaccagcaagtgaaggggcagccaggcccctgccccgttttaactccgttcctttgactgacacaggccatgagaggcagtccgagggatcctccagcccgcagctccaggagtctgtcttccacctgctggtgcccagtgtcatcctggtcttgctggccgtcggaggcctcttgttctacaggtggaggcggcggagccatcaagagcctcagagagcggattctcccttggagcaaccagagggcagccccctgactcaggatgacagacaggtggaactgccagtgtagagggaattctaagctggacgcacagaacagtctctccgtgggaggagacattatggggcgtccaccaccacccctccctggccatcctcctggaatgtggtctgccctccaccagagctcctgcctgccaggactggaccagagcagccaggctggggcccctctgtctcaacccgcagacccttgactgaatgagagaggccagaggatgctccccatgctgccactatttattgtgagccctggaggctcccatgtgcttgaggaaggctggtgagcccggctcaggaccctcttccctcaggggctgcaccctcctctcactcccttccatgccggaacccaggccagggacccaccggcctgtggtttgtgggaaagcagggtggacgctgaggagtgaaagaaccctgcacccagagggcctgcctggtgccaaggtatcccagcctggacaggcatggacctgtctccagagagaggagcctgaagttcgtggggcgggacagcgtcggcctgatttcccgtaaaggtgtgcagcctgagagacgggaagaggaggcctctggacctgctggtctgcactgacagcctgaagggtctacaccctcggctcacctaagtgccctgtgctggttgccaggcgcagaggggaggccagccctgccctcaggacctgcctgacctgccagtgatgccaagagggggatcaagcactggcctctgcccctcctccttccagcacctgccagagcttctccaggaggccaagcagaggctcccctcatgaaggaagccattgcactgtgaacactgtacctgcctgctgaacagcctgcccccgtccatccatgagccagcatccgtccgtcctccactctccagcctctccccagcctcctgcactgagctggcctcaccagtcgactgagggagcccctcagccctgaccttctcctgacctggcctttgactccccggagtggagtggggtgggagaacctcctgggccgccagccagagccggtctttaggctgtgttgttcgcccaggtttctgcatcttgcactttgacattcccaagagggaagggactagtgggagagagcaagggaggggagggcacagacagagaggctacagggcgagctctgactgaagatgggcctttgaaatataggtatgcacctgaggttgggggagggtctgcactcccaaaccccagcgcagtgtcctttccctgctgccgacaggaacctggggctgagcaggttatccctgtcaggagccctggactgggctgcatctcagccccacctgcatggtatccagctcccatccacttctcacccttctttcctcctgaccttggtcagcagtgatgacctccaactctcacccaccccctctaccatcacctctaaccaggcaagccagggtgggagagcaatcaggagagccaggcctcagcttccaagaaccaagaagaaaccaccacagaaaaaagccagaccgagaaggagagcgcaagggacctaaaacgatcaaacgaacatatacagcctgatgaccccgatataaaccgatatatatcattgaagatanccacctactaggagccgcgctaaatagcctccacgatgaaatactccancgcggaagcctaataccatatgaacccctgaaaactagaactcctgatcgctagcccgaaaaagaaatataaccgacgagatccctcacgcaaccctatatccaanaaaacccgatgattcaaantatgaattaatcaantaaagcataacaaaaaattagctaaagcgcaatcagattacatcgaatcccgacaattatgagaatagcaacgatgaatgtgcgacataagagaaaacatgtataaatcaataaaagtatcaaaatcccccaatcatacccccccaatcataggtcaaataaagaaagataatgggaggcaaataagggcaaaactcatgcctcagctaactgaaatcacaatgaaaatcacaaaagattcatagcttaacatgaagaaagccccaaaatgcatcacaaaaaaccccccccagactgacgccacgacggtaaactcgctaacaaaaaaccaccaaagaacttctagactaaaaaccttgagaattacaactcgactattaagaaatatgggtgaaaccatggcaagtaggtgaacgtagagttaaagagcttcctgtgtaaatgaaccaagtgtcaaaaaaacagcggtaagaaagacgacga

SEQ ID NO: 719168 - DNA, 260 bp, Homo sapiens
attttccctgctttttttttttaaagggggttgttttgcagtggagaaaaccttttgggggccagacttttggttaccctttcctattttggtgcccatttttggtttcccccccttttataaccataaacctgaaaatgagtaaaactggggggttttttattaaaccaccaccaaaacagcagtttgtgatataacagagggtttaatgggccccccccttttatgcccttcaaaaaatttaattttttttagaatga

SEQ ID NO: 719169 - DNA, 100 bp, Homo sapiens
tctgggctccagaatggtgacgcgcatgaactggatgaagcgagattcccactgatcctacctaccacccagcatgacgccctgtatgccccccagcatg

SEQ ID NO: 719170 - DNA, 394 bp, Homo sapiens
  misc_feature (265)..(265): n is a, c, g, or t
  misc_feature (285)..(285): n is a, c, g, or t
  misc_feature (358)..(359): n is a, c, g, or t
tctcatcttctgatcccaaggtggctctggggtcttgggaacagagagaggtagacaagattaaggtcaaaatgaggattatgaaccgctttctgtaacagctaagtacatagtaagacatcaagaagaggtgtcattagaaggagttttcataagatctaggaaagggaacaacgtgatgatcaacgtttggcagatgaacagttgaacaacacaaaataacacaaggattatagcgaaaatggaacagaagcaaacaaactangaagcttaaaatgctaccancttaaaagtccacagcgtaggtggtccacggcatggcgtttccactagggtcacagaacccgcagttcttctnnttctggctgtctggccgcgcttggctttcattcca

SEQ ID NO: 719171 - DNA, 903 bp, Homo sapiens
tcataaatatacaggtagaaacaaccgtggtgtgccctctacacctaaccagctacctgtcgctcactaatacaaatttccttaaacccactgcgacattgggtgtccctcaccaggttaaccacgagagatgtgtcaacgccaattcttctgggaaacatcaccttggctactgttaattggttacccctgttctcaagccaatagatcgttgttcaagcccttaagacaaattctgtagaacggctattggatgccaacccagtcgcccctcccttcccccaaaatcacctgggtctttcttgagcagattactatgattccctctcccttacgagatcttcgacccgcttttccaaacctttgccaccccccctagcgcccaattttcgaatcatggaaatttgctggaaagtttcaacctccgaaccctaatctcttaacatataacagccatggttagattaaagcgccccttggaagaaattttttataaaggaaagggaataccctcccccatcaatggccaggtactcttctacttaaacacctctttctcactatgatttgcaatatcgcaacataaattttattataattgaggacaaattttaaatattgcgacctctttgaataatcatacaaatataatacgccccgtggacaatatatacgccacaaagtttggggccctaaccaccggaaaacaccccttggagaaaatgttcagtgaagattatacccccccgaccacggacaccattgggttcgattcttttgaaacttttcccataggactggataagttctttaattgtatatataatgacttttttcccaaaaaaaaaaaaggcccaaatggtggacacaaagggaaaaaaaaccctttttttaaaacccaca

SEQ ID NO: 719172 - DNA, 1051 bp, Homo sapiens
acggggaaagaatttcttggacagaaagctccctgattcatcagaagttcaccggacgcgaggggaaacccacagaggtgtcaacaaaccgggcccctaaggggtaagagagcgccctcccctcggggggggcgcgccccccggtgcgcctgcaagggcttttgcacggggcgtgcggttaaacacaggggtttcgccccctttaaggccccttcacggggggtccccttccccaataccgtgggcttctttggcctctcgtccccgtttacccccccattccctttctgactacctggcccctgcaactggcccgagccccagtccccctgagggcccacagcgggggagaacatctggcccccgcctgccccccgggaaactccaaagttgcgcgttggggacccccccgatcattgcccttgttgggaagggcccgcttgacactttccccttggcaccggggtttttggggccttgggggttcgggaacaaaaccctgagcccccccttcccacccccctaaagattgccccctcccccaccgagtcctgaggcacacggtgccctccggcaagaatgtttcaagcgaagcacaggtatccggggacgaatgccttggaatggaagagcgaatgaccctgggtgaatcgaacaatcccggaggtgagaccggtgaacaatcacacgcacaatgcccacaccaccgggccccgccacggcgccctccccgtgccacgcaacaacaccgaggtccacgcttcctcggagggtgtttaattgaatgcccacagctgccacatgctccggccacctgaacaccacacccacgagaaaaggggtaaaacaatgcaccgggtgtcccccacggagggtggcacggggccctgccttcaaaccccggccccctcacacaggggacagttaatttaaaacgagtggccgggaggcatctgccacacctgctggggaggcagagaccctgcaatggccacctctttaaaagggcagctgtacagggctaggttttttcaatgaagtttctgtatta

SEQ ID NO: 719173 - DNA, 981 bp, Homo sapiens
  misc_feature (534)..(534): n is a, c, g, or t
cacagactgttcatgaaaagtttcctttttctagagggtacaggaggtataattgcatgcttctgggtcaagaatgttttagcatattaggagtctaacatagtaggacttcattgcattatgcaaatcttgtatcgtcaccgacccttcctcccatgaaagaatagagataaacagaacatcatgctatgctgagttgcctagtcgcttctatgatgtagagttaatgcaaagaattcacatagcccagcaagtccttttagcagggcattgaatggtcaccaagcgtggtgaatataatttattatacgaagggaattattatcagtgcaattctacaattggaagaagaaaatcattattacttcctgggaagcacccaattcgtctctcttaaacagcgatcacctcttagcacctgagttgaggttctctactcctcttcctagcagtcacaagtagtatttctatataataaatatgctaagggtcccacttaaatttcagagtttcgcgccaatatcagctttcagnccttggagttccgtatatgaaagaaaagctggcaagattttaactcttgtgttaccttatggcgtactctcagaatattccgcggtagaaactttcctttcaaggggataaaagacgggctgatttgtcaactgttggcccactgtattctaggaaatataaccatagcgacgttgaccatttgctttaaaacctcaatgaaccccgtgtgctcaggcataggaatctccacctgggacccggggtgttttccccactctttggttcgcaatttggctggtccactcacattcataaaaaaccccgtgtccatgaaggcttcccatggcgttgagggcaagtagagataagagacataccctgaaataccaaggccctttacaaaatggggctgagaaatctgacagacccccttggctcggcccaatgcttggtgtccctcctata

SEQ ID NO: 719174 - DNA, 267 bp, Homo sapiens
tagaggatccgtcctagctcgcagtgacacatgcttcaggaagccactgtgctgaagcgcattatgctgcttccattactagcagaactcttcatgatcccttaatttctagaaaagctgcaacgtgggggggctacatcgcgctgcagtatgcagtgtcagggcaagtttatgtgtactggcgaactagaaaaaatgtcccaagtttccttccaccatttcctgacacaaagtacagttgcattgctttcttgccttcgcaatccc

SEQ ID NO: 719175 - DNA, 155 bp, Homo sapiens
tactttcttctataaccgccgctttagctatgtaggagaaattctggtatatttagtctttgtcgtcatacaatttcaaggatttaaaaaaaaatttaatacttatgccttaatttcattctttaccccaaagtctttcaagaagcaggaactgg

SEQ ID NO: 719176 - DNA, 81 bp, Homo sapiens
ggcacgagaagaagagaaagagtcggaagacaaacctgaaattgaagatgttggttctgatgaggaagaagaaaagaagga

SEQ ID NO: 719177 - DNA, 255 bp, Homo sapiens
cgttcccgttcctgagtttcttgacttcgccagcttgggtgtctctcccgaggccgacgttctagttgtggctcatccagctgacgctggaacttctcttgttccttctgtacccgttcttcgggcggaaggccgagagcttgtcaagggcttcagctcgggtcgactcgctcatacacgtcagtgccgagatggactgacgatatgccgccagcaagatggcgacgagggtgtccattcgctctttggctgctg

SEQ ID NO: 719178 - DNA, 199 bp, Homo sapiens
cttacctgaattattatgtaatgccttatatttgatactagctacattagctacagattacatcacttttcagagttagagtaacataataccttgtaaaactatagcaaacagcttgaccaaagcaagagtactttaatttcctacattttatcctttaattcttaagtgaccacattttctttgtttcaggttgtaa

SEQ ID NO: 719179 - DNA, 967 bp, Homo sapiens
  misc_feature (727)..(727): n is a, c, g, or t
gctagttctatatccaagtatgttgtggatctttattactgatctctattgtaaatgtgatccaatcacaagattcgggctccaagtcggtctcatatctcgagagtttatttagtaatattatccgtacgttcttgtatggtatatctagatgacccttgcttattcattgcgcagtccatttccaacactgccatctctatacgctctgccgtgatcatcgtctcgataaatgtcgtacaagcatgtatgtatgcatatggttaaggctgtgtcactcatgcaaattctcgtcttggagtttggttgcttacataattctatatatgactgaggtgtagagtgacggtaatctagaaagtccatcgtgttggcatgagtttttttggttccactatacgttggtagctgcaagtagtgttaatggcatactgatgttcggcattgaattgaattcttggatagagtcctataatacaattgagcaatgtatacccacacttggcttcagaagcattcttcatacaggttggttccttaacccgattcatggtaaatgacacagtttgtttcatctattggtactcatgtacttctggcaccgtgggacattcattgcatatagtggtatggcactccgccagcacatgtgggaccctgttgagtttcgttaaacctcactctcctttataaattacccaggctaggggtaaaggggttaatcagncagcgaataagaacagacgtaaatacgaataatggtctcagtggactctccgacgtcgagctattctcgggttcatggaataatttccaggaacctctgatgtccagagacacggtctcccagcaggaacctaaatggcctccaacttacgtcgagaggcactttctggggctggaaagaaatgttgtccatgcatagggagcctgggaccttcaggttggaaacctcgatcctggcggc

SEQ ID NO: 719180 - DNA, 194 bp, Homo sapiens
gccgcgcgtagttctacgccgccggctatggctggattccggtctaccccgtccgacgttcgcaaggtcatgctggaagtagcccccgtgagcgaattgccgctgaccgacgcgaaggtgcgcgccgcggcgcgatcatgctagtttgcgcgcgtgggaacatgaactgggttcgcgtacaagcacgtgccacg

SEQ ID NO: 719181 - DNA, 124 bp, Homo sapiens
tgccttcctatattataggaagtctccactgtgctagatttccataccatcctttaaattcacttcaattttagctccctctcccctcattccctccgtctacccccatcttctgagtcgacgc

SEQ ID NO: 719182 - DNA, 328 bp, Homo sapiens
acacagggaggcagcaccctggcatctgctatactctgctgcagcagccataccttggtcccaccatcacagtgggctgctaaccttgaggagccagagaacaaagttggggcccactacaagtcttgcagagttacagcatgcagaccaggagttgggagctaagtgttggccccctacagtctttcagaaatgaagccagttggtttaatcaaccttatgccacaatcaaactctcaaggtcatcaaataggataaaaggggcaaaaaatccaaaggtcagcaacctcaaagattgaagatagataagctcacaaagatgagaagg

SEQ ID NO: 719183 - DNA, 217 bp, Homo sapiens
gcaggcctccgcagtcacggcttcaacctccgtgatgcgcagcagcgcataattcactggccgcgcaaaggttcgggcgtcgagcagcgtctccgccttgaacttgagcagtggcggcaggccgaggcgctcgtgctcgagcatgtttcggcgccttggcggagcgtgtcccagaagaggatggatcgttcgctgaagtccctctggtagctcaacc

SEQ ID NO: 719184 - DNA, 481 bp, Homo sapiens
aaaaaaaaaaaaaaaaaaaaaaaaaaaaaaaaaaaaaaaaaaaaaaaagggggggggggtttaaatttttcccggggggggccaaattttgggggtcaccagttttttttgtaaaggggggcccaaagggggggggtttttaaagaaggggggggggggcggttaataacacaggcggagcggtgggagaaaaggtgctgctgtgggactttttgggggaagagagaccccattcattgtgtgggggggggggcgagacatattggtggggacacatactcccactaagagagaattattaaagcgactctagggggaaatatatttacatattcagagggtgttacatgggggttacaccaacagcggtagtatattgccagcgcgggacagaagattgtcgatctacgcgggagtttattgattttgatgcgaaatattttatttcaccaggaggagagtgtttttgatataacaaggc

SEQ ID NO: 719185 - DNA, 750 bp, Homo sapiens
agcgggggttacgtgcgcgcgggagcgcccgggcgtacttttgcgtggttgctccaccccctcagccttgccttcgccgccgttggggctggaagttcccgccagggtcccgtgccgggcgagagagatgctgcccgtgccgcctcggctttgaggcgagagaagtgtcccagacccatttcgccttgatgacggcgtacagagcctggccagacattgtccacagggttctccttcgggtccgggacctctgggctccagcacgttggccgaccggccgggaccagcacaggcggcgtttactccttcggaaccgggaacgtctagcaaccccttctgtggggctcaatatgggaaatctgtggacagtacttcaagctccaggcaactacatctggtccttcaagtgggtcttgggaaccgggctctttgggctctaaaccttgccacctgggttcacctctaggaggaaccaactacacggcaattagccaccaactataacttacagggattaactcctgggaaacgccagccacctacattctgcagctacaacagggccttcaggtcttaaggcgatctcagcgtaaagcctgcaagcactactggccaagccatttggctcttacctaatttaccctctaacctcagctaagggtctcggactcatatcggccgggctctgacattcaactccaggcagcaatccaccaggcatatattctagataaatttggtgtgggacca

SEQ ID NO: 719186 - DNA, 623 bp, Homo sapiens
ggctgtacggccggaattagggattcagcaggcggatcggcgtgctgcttaagctggggcgcaggagtgcgatcgctgcggatctgagctgggcacggcgaacgcccgcccggacggtgggactgaagggactcctgaatgtccgcgggacgtgttgcggggcgcccagcacggaggaggcaggcagggagggaataaaggctcaggcaccggcagttctactctggagcccaccagctctcagaggctccggtgactggctctgtgtctccccctggatggacatgtggacggcgctgctcatgctgcaaggcttgtgtgctacccctccttggctgatggtgccaccccatggctgcgctttgtaaccgtgggatgactggggaggggtcccaatgccccattccacacggcccgggaaatggccaggtgccaagtgagatcgctcggactgtgcatatcctgggtggcgagacttcatcctgtctctacgggacaattgtttacttcacgtgggtgtgcaagacatcaatgacaagaggttccaggagacctttgaggacgatattctctgaccgtcccttcgcaagagtgccctggtacgtgctaggcggaaaccatga

SEQ ID NO: 719187 - DNA, 113 bp, Homo sapiens
acctccacagtattcggtggttcagttcacctggatagaatcatctaagctccatgtattacgcactccctcatcattcgactcatcttgacaaagctccatcgctacgatct

SEQ ID NO: 719188 - DNA, 1163 bp, Homo sapiens
  misc_feature (1161)..(1161): n is a, c, g, or t
agcggaggcggggccgggagcgggccctgggcggcccaggagaagcagttcccgctcggctgcgtgatgagtttgcttcatcataacaagcgcgggcttcgggccgcgcagagggacaggaggaaaataagatgtttatttgtatcatccaaagtgaggtagaaaaagaatgagaagattagaaatgtcggacttgtgtgacgctatgtgtacagtttacaaggacatttaagcccatcaaaacctgcaaaatctttacatacacagaagaacagacagttcttcaatgaaccagaagaaaatttctggatggtcatggtatgtcggaatcctataattgaaaaaccagagtaaagatggaaaaccagttattgaatatcaagaggaggagttgtgggacaaggtttatagctcggtgctgaggcagtgctacagcattgtacaagcttttaactggtacatgtctgaaagcatggaagacggaggggtaaagcttctgaaggaacaggattagagaaattcttccatcgggtattgtgaaaacgctaacatttgggagttcatggtgacctaacttgaccatttggggtggaatcaagttcgttcacgttggataaagggacttatttgacaatccagtcctttattaatagaatggagcgaaagcctgaatatagtcaaattaacactggttgtctctaataacggatcaagtcatctgggagtggagatagacaaagattgcctgggaattttatacaaattccttaggaactcctttttccaagggcaattgagacctgagctaacacggaggagagtccccataaagaagcgacattgcgaggagacacttcacacatgagagagattctacgggagctgtaaaccacgagtcataggaggaagatagagattccccaaaatttttggaataaaggaggctttaaagagaacgtgacatgtttaaacagaaaaggagaggggggatatatgaggtgtggacttagcaggtgtgctcacataaaagcatgttgactccaacgtaatgaatcatgagactagtataaatagtgaggcgaggaacttaatattcatgatattcatcacgcaggaagattcataatatatagcatgttgattgtcatgatgatgtggagngc

SEQ ID NO: 719189 - DNA, 1626 bp, Homo sapiens
  misc_feature (1626)..(1626): n is a, c, g, or t
taaatgtaaaaccattggtttaattctaaatcaaatcactttcacaacagtgaaaattagtggactgggttaaggggtggtgccacgtgtacattattcactcattttctcgtgacgtggggtctcaggaaccgtggctccatagctccacaagggtgtggcaggaaggaggggtgagaggctaaaacacacagaaaaacacaacaaaaaaaaggaaagcgtgccttggaaaaaggattgagggtggatagacgcttgccgaagagatggttggagaagggggcctcccgtgttgggggccgagccaggagttcccaagttcagctctccgtgcctatactatagctccgtggcgagaaggggtgagtgtggggcacctcacgaagggttcaaaactcaaatgtggccattgtggccaagccgtgggtttatactataacaggtttcccgagaagagtgccctcgtggtgggcagtgaagactcctcgcgtgggggcactcacactcccattatctcatttgtgagaaaaagtctcgcgaaatgtgtattctccaattattgcctataaccacaacaaagcttatttacaattgttattttctctctgtgggaaaacccccatatttcgtgggtgtgaggtttccacatcgtggagctcaaaaagatccatcatacataccctacacatcataagtttcggggggccgcactcgtgggcccgttagatggggggggggttcccccaagcacaaaatatcctcctttctcagacagcacagagagcaaccatctccctagaaagtggccccccgtgtgcaaaccttttgtggccggggacatttttcccccgacaaacggcgggtgcctccaacagacagacgaaggcacacgaatcccctgctgagcacggggggcgcgtatgccccccacgtcgcaccatgatgccttcttcacacacagaccccctacaactcaccggaggccacgcgaactctaaaaaaaacagggcagcggcggcgggggggaaaaccaacatgctcgcagatcacccccaagtgcgggtggacaactccgcgcgaagcaatatctgataggaagcccccccgctataatacaacagcagacacgtcaccaaattcacacggcgggccctcggcgtctcaaacgccagactggaagaaccaccccgtgggccgggatcgatgcacacaccgcggatccacacgatcagcagacggaaacaagagcaataggcgtgggctcaccatgcaaccgacagcgaggcgagagagtgatccccccacccattgactcctcccaggagcgcccgttgtggaccccccacaaaacacgcggaggccacagtggggtcgacaaacgacctcccaggcgggagggcccacaccccacagcgggcgggacagagcagggggggacgacccacactgaccgagtagtctagagaagcgagtcatagcgaaaggacagcacacagaggacaaccaaccacccggccgcgacaggcagctgcacgccccagacgatgctctgtatgacgaccatcggaacgaagacagaacaacacagacgagctcaacggacagactgggcagcacaaacgacgn

SEQ ID NO: 719190 - DNA, 125 bp, Homo sapiens
  misc_feature (21)..(21): n is a, c, g, or t
gtgagccaaggattggcggcnctttgcactcctcagcctgggcaagagagcaagactctgtctcaaataataataataataataaagctggagacttggccacacctgggctaaaggaaaaaaaa

SEQ ID NO: 719191 - DNA, 217 bp, Homo sapiens
agtgtggtgccccacggagacgttcatggcccagctcccaggacccgcgaatgcggccttacggaaaaaggcgtctttgcagatataattaaggatctcaagatcatcctgcatttgggctgggtcctaaatccagtgacatgggtccttacaagagagagaagtggagaggagcacagaggaggaggccacgtgaccccagagcagattggagtca

SEQ ID NO: 719192 - DNA, 1374 bp, Homo sapiens
ctcaagacaccttccgagcgtcatgtcactccccttccaccctctagctccaccctcagacagatgataatatcaaagacacctgtccgtagcagtctgcagtggagagccgcttcctccgaccctctaggccgatgagtaatctcaagcacacctccgcttagctactacacggaggctgagcggcagaaaaaaccgacgcaaaacccaagaggcagagggcggctgcgtatggaatcctaccttctccgaatcctcaatgcaggcggaggcgctcggtgacgtggaaccggtcacgcgaacccaagtaggcggagggccgctgacgtggaacctatcatcacccgaaccctaatgagtgcgtgaggcgtcggtgcatgtgtgacagccggtgcaggcaagacccgatcaggcgtgaggtgcctgcgtgtaccgtggtggagacccatgcatcgaaccctgaagccctgaagaggctggagagagtcctggatcactgtcgagaacccgttcaactgcaacagccctaggacgtgccgtgacgcgtggcggctagactgtcggtaaccatcgattaccgcggcaacccaacgacccgcggagcgtttgcacgcttgacggaaggacgtgcctaagtgacaaactcaaagccctgcacggcaagtagggtacataagaccctgcaggttgacgcacactaacatattaaggaccatttccgagaagagaaccattgaaggaaaaaagccccgatcacatccgaaggaacactcaactatagaggaaattgcagtcaagctccattttatgacagagtattgacaaaatgccgagcgtctcgagcagagccagaatcggagcttcgtggaaccacgaagcttacttgcgaacccaattgaaacaccatagagaacaccactaggcagacgcgacacacacctctgtcgtgacagaggcacacggacggttccagacgagtgggccccattgaaagaccaaaagaagctatccgtttggggagaatgacagcccttagagccccctttgtgaccgaacggaaccacggaacccgtcggccacgaacatgacacaacgacatacgggaaccacggcacccatgaacaaccgggaagcggaacagcatagtggcaaacagcacacacagagacgggaccacggacaccccaatgcaacgggaaccggcaaccaaaattcgaataggaatagcacaaggagaaacgcgctcctagcaccgacaggagtgaccacaaattacgatgcacaagagacggacagacagtgaattggcgaagagagacaacagtcagagtcatagcaggacaagaacagcacacagacatcacaacgacgaac

SEQ ID NO: 719193 - DNA, 215 bp, Homo sapiens
cctgtgcacccggggtattcttaaggaaaaactcatcgcaccagcttgcggaaaaagaggcaacaggtgccaaacaagtaagatcactgtactgggtgttggacaagataggtatggcagtgtgctatccagcatcctgggcaaacgtctctaggctgagtgaacattagctctgtgtgggagtgttattggcaaggcaggtttataagtacaca

SEQ ID NO: 719194 - DNA, 224 bp, Homo sapiens
acgcgggcaggacgccggagtgggtcccctctccggccttcccgagggcctcagctgcctgctcggcgcctggcccggccgcgggcgggtgttctctgacgtggtggtctgtgaggggttgttgatcaagcatgtcttgagtgtggtcggtgacgccagttagtttgcagcgagaaggttcacacaccccctcttttcattcctcttccacaggtgtgcggccg

SEQ ID NO: 719195 - DNA, 847 bp, Homo sapiens
gaggcatggaggcagccagcgcaggggcttctggctgagggggcaggcggagcttgaatggaaaccgcagataagttgtgttgctctttgaaagatagagactgactacaactacttagaaaatatagtcaactagggttactaagatatgcttagcgtcatagctccgggtaacgtgaattctataaagtagcgttaaggatttttgagagaaaaatgatgaagagtgtagaagagtagcatggggaaggaaaagataaaaggtttctaaaagatgacggaggttgagcatgaagggttcttcatggagtaaagaaatgtattgtaaaagaaaattgagagaaaggactacagtagccccgaattaataccgaagatagagagggcatatgcttggagattaaagtgaaggtgatttaaacggtttaaagtttagtttagaaagtcgtgaggtgattaaaactaagtttgagggcgatctttctaaggagagattaaatcgaaggtgattaagagaccttgtaaatcatatgacgcagggagaaatggtcaatttaacagcctagtgaaggcatttggctaaatcgcagacgaaatgtggaaagattcaattgggagtggtagggatgagacccattgggaaagatagaagtttgaacgtggggaaactggaatgactgtagttcgggaaggcggaggatgcgcattagcagaagatggggaacttagatgataacaacgtgctttaggagataataggttaattaaacctgaaaggttggagggacaacaaaaaagctagggaccaaatgtagggaatgtcacctggagaacttggagttgaaac

SEQ ID NO: 719196 - DNA, 183 bp, Homo sapiens
agctgagtgtgcgctgacgtgtgactattctctacaaaccaccaagacacttggcaacactatacctattatttcggcgcattattctggagtcctaggcacagcatcttacgcctccttattcgagtcgagctgggccagccaggcgaccttctaggtaacgaccacatctacaacgttatc

SEQ ID NO: 719197 - DNA, 262 bp, Homo sapiens
aaagatgagaaagacgaaagcagcttcctctacaagatgagggattctccgagcatccaaggaacagcgtggtgcgctaacgcaccacgttttactattcagcttgaagaggcggtatctgagtttacattgggctcacagactgcttggatcagctatgacgtttacctggttgtcgccaggaaggctggtctccccaccctcttcttctcatgcgacttgacttcccagttcacctgcgccatctcttctcttctcttta

SEQ ID NO: 719198 - DNA, 184 bp, Homo sapiens
cattctggctgcatgcatgtgtatctgtgtgtcgtcgtcttctgcttgtgtgtgcgcgtgtgccatgtggtgcgaactagtgtgcatttgctatatacatgtccccgtccgtccatgtttgcacatggtggccgatggggggtggctgggaggcctaggcagccactgagcctaggtgtgcagg

SEQ ID NO: 719199 - DNA, 323 bp, Homo sapiens
ctttgatgagttgagagaagaaggcttcagaagatcaaactactccaagctaaaggaggaagttcgaacaaatggcaaagaagttaaaaactgaaaacaacattagatgaatggatcactggaataacccaatccagcagaagtcccttacacaggaccctccatggcagctgcaacaacccaccagccaggcagcaactaccgtgcatgcacatgcaccacagcctccagtcacacctgcatgcgatcacactggaacaacgggtatccagtgatggaagacaaaatgcaatgaaatacacagtgagaagagaagtttagag

SEQ ID NO: 719200 - DNA, 115 bp, Homo sapiens
aatatatagcagctcacttcaagctcatgtatatagcaaatcccgagaaatagcagtagcacacaaccagtcctgtgttcagcaatcaggaatgtggtgatcttgtagggagctt

SEQ ID NO: 719201 - DNA, 174 bp, Homo sapiens
ccccccccctttttttttaaacccaggggcgggggtttgcccttttttcccctgttttaggccccccttttccccaaaagggggccggggggtccccaaaaagcaaaaaaaacttttcccctttttccccccccccctttttgttggggtttgcgggaaaagggtttttaaata

SEQ ID NO: 719202 - DNA, 184 bp, Homo sapiens
acatacagcagtatcacgacaggtaatatatagctgtactgtatcagaaatgtgttatacctggctttacacacagtgaatttttaatgagtgtactatatgtgaggtgatgttatttgccaaggagaaacgtttcaaaaatgaagtgggacgggcacggtggttcatgcctgtcatcccagca

SEQ ID NO: 719203 - DNA, 913 bp, Homo sapiens
  misc_feature (3)..(3): n is a, c, g, or t
  misc_feature (84)..(84): n is a, c, g, or t
  misc_feature (130)..(130): n is a, c, g, or t
  misc_feature (232)..(232): n is a, c, g, or t
  misc_feature (265)..(265): n is a, c, g, or t
  misc_feature (269)..(270): n is a, c, g, or t
  misc_feature (277)..(277): n is a, c, g, or t
  misc_feature (283)..(283): n is a, c, g, or t
  misc_feature (290)..(291): n is a, c, g, or t
  misc_feature (295)..(295): n is a, c, g, or t
  misc_feature (300)..(301): n is a, c, g, or t
  misc_feature (308)..(309): n is a, c, g, or t
  misc_feature (319)..(319): n is a, c, g, or t
  misc_feature (322)..(323): n is a, c, g, or t
  misc_feature (337)..(337): n is a, c, g, or t
  misc_feature (341)..(342): n is a, c, g, or t
  misc_feature (349)..(349): n is a, c, g, or t
  misc_feature (363)..(363): n is a, c, g, or t
  misc_feature (366)..(366): n is a, c, g, or t
  misc_feature (372)..(372): n is a, c, g, or t
  misc_feature (375)..(375): n is a, c, g, or t
  misc_feature (389)..(389): n is a, c, g, or t
  misc_feature (420)..(420): n is a, c, g, or t
  misc_feature (429)..(429): n is a, c, g, or t
  misc_feature (438)..(438): n is a, c, g, or t
  misc_feature (446)..(446): n is a, c, g, or t
  misc_feature (529)..(529): n is a, c, g, or t
  misc_feature (548)..(549): n is a, c, g, or t
  misc_feature (556)..(556): n is a, c, g, or t
  misc_feature (594)..(594): n is a, c, g, or t
  misc_feature (599)..(599): n is a, c, g, or t
  misc_feature (610)..(610): n is a, c, g, or t
  misc_feature (626)..(626): n is a, c, g, or t
  misc_feature (634)..(634): n is a, c, g, or t
  misc_feature (650)..(650): n is a, c, g, or t
  misc_feature (733)..(733): n is a, c, g, or t
  misc_feature (757)..(757): n is a, c, g, or t
  misc_feature (762)..(763): n is a, c, g, or t
  misc_feature (839)..(839): n is a, c, g, or t
  misc_feature (907)..(907): n is a, c, g, or t
tangactataaatctctttagttaaatatgtacacattacatggtatttgtataaagaatggaaatggataaagtttttcaggnaaatctaatgcacaaatacaccatcttttagagtataatgtcagtntatcattcgttaacagctgtgttagacagtggctctgctttgtgcaaaacgtgataaacaaaattaggaaaaattctgcaaaattatttagttccccaaggnaattactaaaatagaaaatggcaaaagaaaaanaggnngcgcacnggggcntgattgnntacncaggnnacaatgnncagcactgangtnncccccatatctgcnaagnncttgggnagctttagtctgangtnaaaacnggngtcctagcaattgngctttttatgcagccacatggccaataaggnagatattgncataaaggngccctacnaaatcttcactaatattttgggcagcgcggcggggatttcggataaattccctttttgacattttattcttcacatgagggcnagtgagggcaatgggaagnngaatcanagagtagcacagtacatagacagcatcagggctaaggncaagngctcgcattanatcagggtggcgagcncagaatcnatgtgagagctttgtnataagagtgtcaagatactctccacgctcttcaggggcatggatatgacgaaaaaattctctcagtgcatttggcaagaactnatttctaaaattatgcaaagttanaaggnnaaaaaaaaaatctctcctttcatcaagatagattctcagttttttccaatttagtgttcttgtacagaagataaantttgctatttcctttggcgaatcatccaggatacccttggacataaagtagttcactccctcatctgnggttgg

SEQ ID NO: 719204 - DNA, 667 bp, Homo sapiens
ctcggatgtgtcatatcttgttatcccatcgcttaggttacgagacccatggcgtggctgatcattcttgatgtgtcatgtttgagtactctatgccttatccatacttgcattgaaaacctgaaatctgaactggattaagagagacgatggatggctcacactatgataattcccagctatcttttgggaggctgcagcgctggccccattgcctgaggctcaggagttggagatcatgcctgggcacaccagtcatgaagccccattttctagctaccacatacattagagacacttactctgggcatggctggtgtagcacccttgtaggaccctagcctgtctgaggaggctaaaggcaacgagaagttgcttgaacccgggaggcaggaggcttgcagtgagcccaagatcatgccactgtcgactccaggcgttggcaacagagcaagactcttgttctccagaagatggaggagataaataacattgtgattaacatcctgcatagtttatctgtcctcagtacctagcaagcaaagaaaatgttgaaccatctctcaagaagagggtcatcccaaaaggcctcttaaagatcatgtttgtccccagtgcttaacacacattagtatgttcgatctgcggaaaatggactaagaaatct

SEQ ID NO: 719205 - DNA, 139 bp, Homo sapiens
ctcacgtgatcctcaccgaggggcagaagcaggggaggcgggagatcatcagaggggggaggtgaacccagatgccattgagattctgcacgtcaaaaagaagaaggcccggcggtggtgagccaggtccacccggatg

SEQ ID NO: 719206 - DNA, 328 bp, Homo sapiens
ggagacgggggtctcacatggtgggccggggccagtctcgaactctggaggtcaagtgatcttccggcctcgattccggatatcaaggtgatcttcccgcctcggcctcccagagtgctgagattacagacgtgaacccatgccgggccaggaatttggtttttaaggaaggctttctactaatgggaattcctgggcctgtgagaggatgttactttagaagggaaagggatttttttggttattaaacagagccaccttaagctgaagattccctgtgagaacaaggtacggtccctaagtttcccagtggctgggaatatagaaa

SEQ ID NO: 719207 - DNA, 363 bp, Homo sapiens
gtcgcgtccggttgcggcggctgacggccctggctggatcccgctagctggtgttgcggctgggctggcggtggcaggcggataacaacaaaccccggagccggagccagggaggctggacgggacgggatgggcgacagcgggcgggactcccgaatgcccagacatgctcctcccctaaagtccccttcccgcagtggtagatcccgtcgcgcattctcttcgctgtgtggcacctattctaagggcatacaagtagagacgagtcgcggcagtgcatgatcagggggaggttgtaacaggtaccaaaaggacaggacgagtggaacgcgagcaacggaagtcctagtataggcaggcgca

SEQ ID NO: 719208 - DNA, 391 bp, Homo sapiens
agatgatgctccaagaacaatagcttctttaatttttcttggcttcattctagcaaattctgccagttgtttgggatctgagaggtcaatgccaggtattcctccaggaggaatacctggcattgacctctctgatgccataatcaggaggtgagttcgtctccattgatctgtcttcaaccaatgtctcgatggtcgagtatctttttattcatgcgtgattgaccacagtggtgaccgagaactctgccctccagggtcttgatctgctacctgcttctgctcccacttcttgattgcccgaaaaaaggccgcccgctgccgccgcgccggccccgccgctgaggtaactcttcttgccgcatcttcttgccgccgcccttcttgagcg

SEQ ID NO: 719209 - DNA, 645 bp, Homo sapiens
ttcacgatgcagaaagaccatgagaacgctcaaaccccgcctctcggagccaggtatgtgaaatagtgagtggcccgtatacaagggcaagatgagaatataccgagttagctctggggtcaaaaggctctgaacctcctctctaccagtggtcttctctcccggcctccgaatctacagctcctaggccgcttctagctagatctttaatttttacagaatgtcgcttgattgcgaccaggccatcgagagctagcacataggcgccatccaatggctcacatgcacctccaccttccgggctccaaagcgattctccagcactcagctctcatgtagtagcataggaactgcaggtgcatccacacacgcccggctaaatttcttgtactttaatagtaagacgatggggtttccccaggtcgaccaggctggtctcgaactcctggcctcaggtgtgatccgccggcctccgcctccccaagcgctgagatgtacaggtgtgagccaccgtgcccaggccctcagtaggtatgaaggagtccccagccatcctcccttctgggcctgaccagcttagtactggtccatcttccccggctacatgccccgccaagtactgacaagggaccccccacccaggta

SEQ ID NO: 719210 - DNA, 112 bp, Homo sapiens
gcttcgttaccatggtggagcgagaccgttcccttgggccaccagaagccccattggagggagttccgttttgacctgaccagatcccgcttgggaaggccgttaacagctt

SEQ ID NO: 719211 - DNA, 882 bp, Homo sapiens
ggagagaactagtctcgagttttttatgtttttttttcaataaattgaaagcttttaagaaaaaggcacgttttccttgaataggtaaaaaaagctccccatctgtcccctcccttttggagggagcagcccctattgggaactcgtatgggtaccccagaaactttcagcaaagcaaccattagcctcccgtgacccctctccccgtttccccagcagctaggatgaaggcaacatattcctcacaggtcattgtgatcttgaggtccttcaaggctgactccaagcttcttcacattcccagattacctcatgtgccgccattccagtgccaggtggttgcaagaactgggagcacgtgtggcactttgccgcgcgttgagcaccgagattctggctgacgctgtcctgtgtgcagcgagtctataggcccgcggcccgcagcctgtgccaccctcggagctcgccttcttggtccaggttctggaagcgctcggagggccagtcaagccagcgctgcaaagctctagttaggaacgtccagccgcccgccgaagctcagcatccccggggcgggcgtacataggtgaacagacaccgggaagcagtcgtggcccgttgccaccaggctgttgtctgtgatgaaggtcagcgccagcagtggtagtgttccagaggccaaagtcgcgacggccatcttcttgtcaggcatcgagccaggcagaccggtgctagtcgtgagtaaccccaggcacacgcgggtccccgctggctgacgaaacggagccttgtacccagccgcagttaatgtgggaatcgaacatacagttcccaaagcgcttcttggagccccaggggatggttgcggccgtcccaccttag

SEQ ID NO: 719212 - DNA, 1405 bp, Homo sapiens
atacgtagttgtgtttggtgtgtagacgccgtcactagcaccacagtggagggagtcaccctcagtctgatctgcttattgtcgctctaccatatatagtgcggataccagaagagtgtttcacctcggggggactttctgtatattagtgcctgcacaaacgctgattagttgtcaacacacgggggtatctctgcctgtggtgtgtgctcgcatcacacgggggggtctatccatatggttccaaggtatagtttgttcccccacaggttgcttgtcccccactccactaggggggtagcccctgttcttttcaatagggatataaagtgtgtgccccttttttaattgggctgtgtgaatacacccacggggaaattacccctgttggtatataatcgggggtattcaacatctatattgcaactgtggggggcgcgcaaaacggaatccacccggggttgcaaagaagcgcctaagggtgcgtaaactttgtctgccccctcaacttgccgttgccttaagcccacgccctttctcacgggagtattctttctttaaccgcactctgtggagagctctaaggaatggtgatatattctcgttgtctgggtggcatcttttagaccccctctgttgctcagcacatagagaatgttttcggggtcttcctctgtgtgtgtcctcggtgggtgttcctttatacctcacacagacgcccagtgagaagtgtagcccgcatctgccgacatttggagaggtggggttttatcgagagcgagtgaacataactccgagctctcaataggctgccttctgggttctctctagagaagtaaagagagtgtgggaaaggagaagggggtggggccctcaaatagaagtgttgagagcttcttctggaaacctggcataaggcgtcgcttgggaccaagtgatcaccctggttctttctctctagagattgcgcacgtgcacctggagagtttccactgtgtctttccacaaggttgatatttttcttcgtgcgcctctctgaatagcccacagaaatgggagaggttcgatccacagattctcgacacactgattccctctccttgtttttgacacctcgcttggggtagtgcaacatatctctcttgcttgaagtccacgcgtttggaggtaagagaggcttaagaagacagattgggtgagaaaccaacccaaatctttatcatggtctctcagtcagtaatccattaggcgggaacctctagacccaaatgggtgttaacagttcgtgtccctgtggacactgtgggattgggctgggccaggggaaaggtgatatccattttttttcgataaactagactcggtactgagaagcttttgaataccaactcttggcttaatgaga

SEQ ID NO: 719213 - DNA, 974 bp, Homo sapiens
gctcagcggctctcgggtcccagcgtcccagcgcgcggcccgcgctcctccgccccgctcctcctcctcctcattccatcctcctcctccatctcataggcacccccgatccccatcacatatccagcggctgcagccccacagccccaacatcatccgacgctatacatccatggagacgcgcgatccatcgcccccagtcctattgcatatccatataccatatccattacactatactatcacatatacacatacacccacatggacaatccacgaccacatcaccatcatacacagggatcgacacacatcacacgaggaggaaacaagaaataagtcaatcgaggtgacaccacacgacaacacatggaacacgaggaaaacaatgaacaacagggttcagtccagtcgcacgatatgagccaacagtgacaacaaatggaagggatacggaccacagcgggccggaagtcggtgcacaggagacagacaaaagaaaacaatcagaaccccggacacgcggagaaggacccacccaaacggacaacaaccaagacagagcgccaggaagaacacccacgagacacaaggagaccaaacagcgggcacaccgccgggggacgtaccaacgaacggactcgattccgcaccataggaaccctcactacaaatacaacaggccaacccccggacaaggcgacacagagaaagccacccaggagacaacaccatgaacatgaatgaagcaacagggatcaccagccacggaggagagaaccagcacacgatcaggcgagcggagcgacaacgagagacatatccacaagaggagatatgagagcaaggaccacaacaacaggactgcaagcggcacaaccagttccaggaactcacaaaagtacacagcacgcacaaggagcaaggcaccaccacacaaggagcagccacgttgagcaccccagaggtgaccc

SEQ ID NO: 719214 - DNA, 166 bp, Homo sapiens
gactgtaggaggctagaagtagagatgaaggtgttggtagggttggttccttttgagggttgtgaggaagaatctgtcccatgcctctcctctagcttctggaggtttgctggcaatccatggcgtggaggagcagagtcccagtctctgccttcatcttcatata

SEQ ID NO: 719215 - DNA, 858 bp, Homo sapiens
  misc_feature (100)..(100): n is a, c, g, or t
  misc_feature (106)..(106): n is a, c, g, or t
  misc_feature (108)..(108): n is a, c, g, or t
  misc_feature (112)..(113): n is a, c, g, or t
  misc_feature (151)..(152): n is a, c, g, or t
  misc_feature (156)..(157): n is a, c, g, or t
  misc_feature (165)..(168): n is a, c, g, or t
  misc_feature (170)..(170): n is a, c, g, or t
  misc_feature (172)..(172): n is a, c, g, or t
  misc_feature (188)..(188): n is a, c, g, or t
  misc_feature (194)..(194): n is a, c, g, or t
  misc_feature (210)..(212): n is a, c, g, or t
  misc_feature (219)..(219): n is a, c, g, or t
  misc_feature (223)..(223): n is a, c, g, or t
  misc_feature (225)..(226): n is a, c, g, or t
  misc_feature (234)..(234): n is a, c, g, or t
  misc_feature (240)..(240): n is a, c, g, or t
  misc_feature (254)..(254): n is a, c, g, or t
  misc_feature (257)..(257): n is a, c, g, or t
  misc_feature (263)..(263): n is a, c, g, or t
  misc_feature (267)..(267): n is a, c, g, or t
  misc_feature (269)..(269): n is a, c, g, or t
  misc_feature (273)..(273): n is a, c, g, or t
  misc_feature (276)..(277): n is a, c, g, or t
  misc_feature (285)..(286): n is a, c, g, or t
  misc_feature (290)..(290): n is a, c, g, or t
  misc_feature (294)..(294): n is a, c, g, or t
  misc_feature (300)..(300): n is a, c, g, or t
  misc_feature (303)..(303): n is a, c, g, or t
  misc_feature (305)..(306): n is a, c, g, or t
  misc_feature (311)..(311): n is a, c, g, or t
  misc_feature (313)..(313): n is a, c, g, or t
  misc_feature (317)..(317): n is a, c, g, or t
  misc_feature (319)..(321): n is a, c, g, or t
  misc_feature (323)..(323): n is a, c, g, or t
  misc_feature (325)..(325): n is a, c, g, or t
  misc_feature (327)..(327): n is a, c, g, or t
  misc_feature (330)..(331): n is a, c, g, or t
  misc_feature (333)..(333): n is a, c, g, or t
  misc_feature (335)..(336): n is a, c, g, or t
  misc_feature (340)..(340): n is a, c, g, or t
  misc_feature (345)..(345): n is a, c, g, or t
  misc_feature (355)..(355): n is a, c, g, or t
  misc_feature (373)..(373): n is a, c, g, or t
  misc_feature (376)..(376): n is a, c, g, or t
  misc_feature (383)..(383): n is a, c, g, or t
  misc_feature (395)..(395): n is a, c, g, or t
  misc_feature (399)..(399): n is a, c, g, or t
  misc_feature (405)..(405): n is a, c, g, or t
  misc_feature (407)..(408): n is a, c, g, or t
  misc_feature (418)..(418): n is a, c, g, or t
  misc_feature (420)..(420): n is a, c, g, or t
  misc_feature (427)..(427): n is a, c, g, or t
  misc_feature (468)..(468): n is a, c, g, or t
  misc_feature (480)..(481): n is a, c, g, or t
  misc_feature (529)..(529): n is a, c, g, or t
  misc_feature (551)..(551): n is a, c, g, or t
  misc_feature (728)..(728): n is a, c, g, or t
  misc_feature (815)..(815): n is a, c, g, or t
ttcccgggatgggtctgtcctcgggaactgcaaggccctgtgagcgggaggactgggatcccggccgcggctgctggaagcgtcgaagctcagcggggcngcgganantganntgtgcttagaactcatcctggcccgcagagcctgccgnnagtnnctggcgtnnnntntngcgggctcttggagcnactttnccgagcggaagtcagnnngcggctnggantnnggcggganctgctnggaggaatggcgcngcngggttnaagnantgtnttnntgttggcnntganaatnatagcnagnanntgggntntgangnnnantnantanntnannaagnatgangtggagagantaaaagcctcgctggatngcnctttcanaaatttggaatntgcnttctantnnatcgtgggantnagcagcnttggtgctcaggtgccagatgcaaagaaagcatgtacctanatcagatctaannttgatcccagcaatgtggattccctcttctacgctgcccaggccagcnaggccctctcaggatgtgaganctctatttcaaatgagaccaaagatctgcttctggcagctgtcagtgaggactcatctgttacccagatctaccatgcagttgcagctctaagtggctttggccttcccttggcatcccaagaagcactcagtgcccttactgctcgtctcagcaaggaggagactgtgctggcaanagtccaggctctgcagacagcatcccacctgtcccagcaggctgacctgaggagcatcgtggaggagattgaggaccttgttgctcncctggatgaactcgggggcgtgtatttccagtttgaagaagga

SEQ ID NO: 719216 - DNA, 131 bp, Homo sapiens
acccttctacctctctgtgggtttgtcttgacctgtaaacttgggcttaaacttagaaaaaattcttacatgataactcagtgatgctttactcatagtttatggagctccttatagataagatacaaacg

SEQ ID NO: 719217 - DNA, 291 bp, Homo sapiens
atgggagaaattttttgatttaaaatgggggggggtggagtttcccccccgaaatgatagaaaaatggggaagataaggccttttttgggggttccgtggggtaatatttgcaaagtacctacaatgttctggcccctagtaattaattaagaaaatcgggccccccttatttcccagaaagcaggggtgttagttttttggttgactttttttttgccgggcgttcccccctgtttttgtgtcctttaataaaaaatagtaacaataaaggtttacatttttttagtgga

SEQ ID NO: 719218 - DNA, 117 bp, Homo sapiens
gcggcaggtatcacacatggttccatcatgcttgatgcctggaagcatcgtttcagcccattctccatgtcctctttgtagacgttaaatacgtcccaggtcataacaaatttgtac

SEQ ID NO: 719219 - DNA, 308 bp, Homo sapiens
aacgctgatataataaaaaagaaatatacttttatcgaaggtgtatcagaaatccaagaagagcatttacatttttttttaaagccgggcatggaccgggcacagtggctcacacctgtaatcccagcactttgggaggcgaggcaggcagatcacctgaagtcaggagtttgagcccatcctggccaacacggtgaaaccccatctctactaaaaatacaaaaaattagctgggtgtggtgatgcacgcctgtagtcccagctacttaggaagctgagacaggagaattgcttggacctgggaggcg

SEQ ID NO: 719220 - DNA, 263 bp, Homo sapiens
gagacagctgcgctgccataagaagacctacgccttgagcggaataccctctgcccacagtgtagattgccatccgtaacacgggcgatgcgcaccagtgttgcccactgctggagactctgacagacgctgagatggagaagaagactccgcgaccaggacaggaacacgaggcgaatgaggcgctctgcaaacacggccccggaatgaataccagcccattcagcacacggctcccacggacgcatctcagacagattggg

SEQ ID NO: 719221 - DNA, 1857 bp, Homo sapiens
  misc_feature (8)..(8): n is a, c, g, or t
  misc_feature (249)..(249): n is a, c, g, or t
  misc_feature (1847)..(1847): n is a, c, g, or t
caggaagnttgccaaccctgcctgtatagccagcaagaatttctaattatagcaaacagaaacacttgcagaaaaaaaaaaaaatgagaacgggaacatgataattttcaaagaaagagtcttctttcaaggaaagtcaggttcatggttacgaagctgctgaccccaggatcccagcccgtgggagagaagggggtctctgacagcccccacccctccccactgccagatccttattgggtctgagtntcaggggtggggccccagctggaggttataaaacagctcaatcggggagtacaaccttcggtttctcttcggggaaagctgctttcagcgcacacgggaagatatcagaaacatcctaggatcaggacaccccagatcttctcaactggaaccacgaaggctgtttcttccacacagcactttgatctccatttaagcaggcacctctgtcctgcgttccggagctgcgttcccgatggtcctcctttggctcacgctgctcctgatcgccctgccctgtctcctgcaaacgaaggaagatccaaacccaccaatcacgaacctaaggatgaaagcaaaggctcagcagttgacctgggaccttaacagaaatgtgaccgatatcgagtgtgttaaagacgccgactattctatgccggcagtgaacaatagctattgccagtttggagcaatttccttatgtgaagtgaccaactacaccgtccgagtggccaacccaccattctccacgtggatcctcttccctgagaacagtgggaagccttgggcaggtgcggagaatctgacctgctggattcatgacgtggatttcttgagctgcagctgggcggtaggcccgggggcccccgcggacgtccagtacgacctgtacttgaacgttgccaacaggcgtcaacagtacgagtgtcttcactacaaaacggatgctcagggaacacgtatcgggtgtcgtttcgatgacatctctcgactctccagcggttctcaaagttcccacatcctggtgcggggcaggagcgcagccttcggtatcccctgcacagataagtttgtcgtcttttcacagattgagatattaactccacccaacatgactgcaaagtgtaataagacacattcctttatgcactggaaaatgagaagtcatttcaatcgcaaatttcgctatgagcttcagatacaaaagagaatgcagcctgtaatcacagaacaggtcagagacagaacctccttccagctactcaatcctggaacgtacacagtacaaataagagcccgggaaagagtgtatgaattcttgagcgcctggagcaccccccagcgcttcgagtgcgaccaggaggagggcgcaaacacacgtgcctggcggacgtcgctgctgatcgcgctggggacgctgctggccctggtctgtgtcttcgtgatctgcagaaggtatctggtgatgcagagactctttccccgcatccctcacatgaaagaccccatcggtgacagcttccaaaacgacaagctggtggtctgggaggcgggcaaagccggcctggaggagtgtctggtgactgaagtacaggtcgtgcagaaaacttgagactggggttcagggcttgtgggggtctgcctcaatctccctggccgggccaggcgcctgcacagactggctgctggacctgcgcacgcagcccaggaatggacattcctaacgggtggtgggcatgggagatgcctgtgtaatttcgtccgaagctgccaggaagaagaacagaactttgtgtgtttatttcatgataaagtgattttttttttttttaacccanaaaaaaaaaa

SEQ ID NO: 719222 - DNA, 1689 bp, Homo sapiens
tgcggaggccggctctgcgcttcgaggccgacccactccgcacaccgaccccggtcacacccggcacttacatatcaggcatgtctccgactgccctccagcggcagacgcagctcctcaggcgcccggcggtacttagtcgggtcggcggccgtcagggaattcgccagtggactgtggattggcgtcgaaccggccacatgagatgcagcccccgacggcagagcagacgctcacagcatccatgtccccacggcctggataccgggagatcatgaggacgccagcgatcagacaagagcagagacatccgccagcgacgcagcaagcacacggcgcacagacacgacccagtggccacacagacgacggccacatgccactacactgacgcgcccaccactggccgtctcacatcatcatgccaggacgagagctcacacgatagcgctgcagagaggaccatttcagagccacaggcaggagcatcacacacgccgagcaccacgcgcgccaactcacgcgcaacaaggaccctcaaccacacacaccagttgccacgacacaccggtgggctcagccactcaaatcctatccaagccctgcaccacctcatccccaccctgcgcataactccaacacatcactcgccgccacgggcgcccccagccgcctcagcgaccacgccggccccgcatcgccgcacgagctaccacgcaatagccgcacggcgaacggacgccacctcgcacgcacctcgcgcaccacccaccaataccactcccacacacggcacactacccgccacaccaaacagacccggacgcgcggacacacacccagagacttacgtcccacaggcacactgcacgcgccttaccaacagccggcaacgcggcacccccacctaccatggagaggccacacacctcccgcttcgccacagctggctctgcgcccccccgcacacggctacggggacgccaaccacacagcgccaggccagccccccgcacaccaaacgacacaaccctctccggccaccaccatcacaccgcacgcccccccacccacctcacattcaccacacggcgcacacactcccaccacggcagacacaaacacggcaaacaacacagccactacagggcacagcccgaccgctccgcgaggcatgcgcccacgcgcagaccacaagcgcgaacaaacagcgacaagcgaccgaaggaaccagcagacagccgctaccccgccggacaaccccagacgaacacccacacacaacaacgcagacacacacgctgccgccccaggaccctgccagccaccaagcagcgataaccacacaccgatacacagcctagccacagtgcccgaccaccaccgaccacaacgacgccaacccacacacggccccagaacgcacacaccctggcagggacggcaggcgcagacgcagaccacccaccaacccacaccgagcgcagcacaccaccgagcgcacgcgagacaccaccaacggcagcacaccatccaccccagaccaccaccacacacctggacgagcgacacagacgcacacagcccacccagcgccagccacccagcgcacgctcacccaccacacagagcaacaagcaccacacacaccgacacgagcgacccgacaaccacgacacagccagcccc

SEQ ID NO: 719223 - DNA, 541 bp, Homo sapiens
  misc_feature (106)..(113): n is a, c, g, or t
tgctgggatgacaggcgggagccactgtgccgggcctcaatttaattatttttaagtttaatggatttccggggagttacgccgagtcggaaaaaaaagaccactnnnnnnnntgacacacacagtgatttcattaatacaactgtcttgaaatggcaaaattttacaaatagaaaacagtctcctgggttgcagggatataagcaggagtgagagctgagagaggtgggtttggctgtaaaagtgctccttggggaggccgggcgcagtggctcacgcctgtaatcccagcactttgggaggccgaggcgggcggatcacctgaggtcaggagttcgagaccagcctggccaacatggtgaaaccccgtctctactaaaaacacaaaaattagccgggcatggtggctcacgcctgtaatcccagcactttgggaggccgaggcaggcggatcacctgaggtcaggaattcgagaccagcctggctaacatggtgaaaccccatctccactaaaaatacaaaattagccaggggtggtgg

SEQ ID NO: 719224 - DNA, 1544 bp, Homo sapiens
  misc_feature (548)..(548): n is a, c, g, or t
  misc_feature (631)..(631): n is a, c, g, or t
  misc_feature (633)..(633): n is a, c, g, or t
  misc_feature (659)..(659): n is a, c, g, or t
  misc_feature (681)..(681): n is a, c, g, or t
tgggaccccgaacatttctggagccgggggctggagcgagctgcggggagccgctccgggtgccctacccccgcgcgcctcagtggtgcctgtgcctgagggcagtgctcgcggttgcggggctctgcgcctgctgtcagtgctggggggcgcgcgagctggcgccagctcggggcagcggaacccagagaagctgatggtggggcggtagctggctggcgacggtgacgacttgacgactcccgcttctgtgtgcccagcctcttccctgccgccagccgcccttttcctccctcccttacgtcccctgagtgcggcagtaccgcctccttcccaggcgctgctggttcctccagacctctcggcgcgggtgagccctattcccagaggcaggtggtgctgacccgtgtagacccaggaggaggaaacagctgtgtaagctcatcatatggtaactggtgggcaccatgtccttgaagcttcaggcaagcaatgtaaccaacaagaatgaccccaagtccatcaactctcgagtcttcattggaaanctcaacacagctctggtgaagaaatcagatgtggagaccatcttctctaagtatggccgtgtggtcggtgttctgtgcacaangngctatgcctttgttcagtactccaantgagcgccatgcccgggcagcntgtgctgggaagagaatgggcgggttgctggccgggcagaccctggatatcaacatggctgaagagcctaattgcctgacagaacctcaaggggctaaagaagagagcagcaatctgccatatacacggctcttcagactatcgggggccgtctgatcgtccgtgcccagtgcccatggcggtccctgtgaagcgaccccgggtcacatgtctgctttggtccggcgtgtcaaaacttaacgtaccctgtctaagtctctttgcccgctcatatacgatttgttcacccgagcgcacactcatgacctaaaggatcaatgttataatgacgcacgatgacgctgacagtgtcgcatcaagaccgtgagtctgactacagatcaagtccaagctattcgatgccctgctgagccgcttggagcagatctgctgcggagacatacggccagtccttatggctagaagaaccggtgatggaggtggcgcctgatggctgtgcggcggcggtggttggtggcagcgcgctgtcggattgcactggtggtgcggtggctgtggttgcagccttactacagccccccaggagactccatttgatgcttgcctgtctcctggggtgagctagacccgatactgacgggactggtagggtcccgaccatgtgccggagagctgcttaaccgttcccacgccgtcggggctttccaataggctgaaggtcggcccccgtaagggtggcccgctatggggcacccggtagcccccgttttgaaaggggggcccccgactttgtcggggtggtttccccccttccgggggtcccccccccttttgcagccgcccctaacgtattttttttttcc

SEQ ID NO: 719225 - DNA, 314 bp, Homo sapiens
tagccgggcattggtggagtgcacccggaaccccaactactggggaggctgaggtggaaggatagcttgagcctgccaggaggaggctgcgttgacctgagacggaaccactggactccagcctatgcaatatagccagaccttgcctcaaaaataaaaagaaaaaagaactcgagggggggcgccggtcccaattcgacctatcaggagtcgtttgacaattacactggcctggcctacaacaccgcattgactgggaaaacgcgtgctttacccatcttaatagccttgcagcagattcgcctttcaccagc

SEQ ID NO: 719226 - DNA, 818 bp, Homo sapiens
  misc_feature (200)..(200): n is a, c, g, or t
  misc_feature (463)..(463): n is a, c, g, or t
  misc_feature (484)..(484): n is a, c, g, or t
  misc_feature (506)..(509): n is a, c, g, or t
  misc_feature (512)..(513): n is a, c, g, or t
  misc_feature (516)..(516): n is a, c, g, or t
  misc_feature (518)..(518): n is a, c, g, or t
  misc_feature (520)..(520): n is a, c, g, or t
ttcccactgacaagacaccccctgggccttggtaataaagaccgagccgggcggattcacaagtccaggagatcgagaccatcccggccaaacacgggtgaaacccgatctccgggcgtgttggcggcgccctgtagtcccagccactcgggaggcagggccaggagaaccgcctgaacctgggagttggagtctgtganccgagatcgtgccactgcactccagccttgccggcctgctgggcacagtggaagtccctggcgctccccgtgtcccgagcaccaggcagacagggatccctggtggtctttccgctcccttagggttccagactggggctgggaggtccggaagtcgctcccggtcctggtactcaggtggcctggcggacgtcgctgctgatcgcgctggggacgctgctggccctggtctgtgtcttcgtgatctgcagaaggtgagcccncgagggcgtccgcgagcgtcncttgtttccagtgtgaccctgnnnnttnntcncngnaggtggtctgggaggcgggcaaagccggcctggaggagtgtctggtgactgaagtacaggtcgtgcagaaaacttgagactggggttcagggcttgtgggggtctgcctcaatctccctggccgggccaggcgcctgcacagactggctgctggacctgcgcacgcagcccaggaatggacattcctaacgggtggtgggcatgggagatgcctgtgtaatttcgtccgaagccttcgaagaaggccttgcccccctcatctctgaagatcttcctcccacagtcgcacggtgcccgt

SEQ ID NO: 719227 - DNA, 361 bp, Homo sapiens
ctatgaaatccagttcgaaagaatgtgtgtttcataatgacttttaactggctacaaatatttacttgctagggaaatacttgatgtatggttatccttatatttcagagtaactctggatgtgttctttgtctaaaaatagtctgttctgtcagtccttcaaaatattatttattctgaagattgtccctcttgcacttggcagtttattttcggggatacattgtcgggggagaggggtttctgccactctttccagattgagtctgtgctgtttaaggaggactaccatcctgcaactctttttctaattggggctcagaggatgtcgctaaagaaaagttgaagagccctttcagca

SEQ ID NO: 719228 - DNA, 507 bp, Homo sapiens
  misc_feature (106)..(113): n is a, c, g, or t
tgctgggatgacaggcgggagccactgtgccgggcctcaatttaattatttttaagtttaatggatttccggggagttacgccgagtcggaaaaaaaagaccactnnnnnnnntgacacacacagtgatttcattaatacaactgtcttgaaatggcaaaattttacaaatagaaaacagtctcctgggttgcagggatataagcaggagtgagagctgagagaggtgggtttggctgtaaaagtgctccttggggaggccgggcgcagtggctctttcatgtttgtgaacccaggtgggaagccttgggcaggtgcggagaatctgacctgctggattcatgacgtggatttcttgagctgcagctgggcggtaggcccgggggcccccgcggacgtccagtacgacctgtacttgaacgttgccaagtaggtgtgcccgtgggcagaggccgggctgtccctggtgcgggtgccatccgcgtgggggtcgtcccccaaccttacc

SEQ ID NO: 719229 - DNA, 360 bp, Homo sapiens
gcgttttttagtataaccaacacatagacagacaaagcaagtaaccatcggctagtctatggcatcaagcgtgagcttcaactcattgtctgccattttctgaccatggaacacattttgtcacgggttagatccatgccattggaagttagtccggcatgttttgaccctgtaacatcttcagtaatcagcttgaattttctatatgcagcttcatcattctgcaaatcagctagactcacttcaaacatcagcgacccttgagaccatcagatgctatttcggttccttgggtcctggtgacgagcgtcttgcccatatttcttatatcgaacatagcacgtgctttcacatccttaa

SEQ ID NO: 719230 - DNA, 1623 bp, Homo sapiens
  misc_feature (8)..(8): n is a, c, g, or t
  misc_feature (249)..(249): n is a, c, g, or t
  misc_feature (1613)..(1613): n is a, c, g, or t
caggaagnttgccaaccctgcctgtatagccagcaagaatttctaattatagcaaacagaaacacttgcagaaaaaaaaaaaaatgagaacgggaacatgataattttcaaagaaagagtcttctttcaaggaaagtcaggttcatggttacgaagctgctgaccccaggatcccagcccgtgggagagaagggggtctctgacagcccccacccctccccactgccagatccttattgggtctgagtntcaggggtggggccccagctggaggttataaaacagctcaatcggggagtacaaccttcggtttctcttcggggaaagctgctttcagcgcacacgggaagatatcagaaacatcctaggatcaggacaccccagatcttctcaactggaaccacgaaggctgtttcttccacacagcactttgatctccatttaagcaggcacctctgtcctgcgttccggagctgcgttcccgatggtcctcctttggctcacgctgctcctgatcgccctgccctgtctcctgcaaacgaaggaaggtgggaagccttgggcaggtgcggagaatctgacctgctggattcatgacgtggatttcttgagctgcagctgggcggtaggcccgggggcccccgcggacgtccagtacgacctgtacttgaacgttgccaacaggcgtcaacagtacgagtgtcttcactacaaaacggatgctcagggaacacgtatcgggtgtcgtttcgatgacatctctcgactctccagcggttctcaaagttcccacatcctggtgcggggcaggagcgcagccttcggtatcccctgcacagataagtttgtcgtcttttcacagattgagatattaactccacccaacatgactgcaaagtgtaataagacacattcctttatgcactggaaaatgagaagtcatttcaatcgcaaatttcgctatgagcttcagatacaaaagagaatgcagcctgtaatcacagaacaggtcagagacagaacctccttccagctactcaatcctggaacgtacacagtacaaataagagcccgggaaagagtgtatgaattcttgagcgcctggagcaccccccagcgcttcgagtgcgaccaggaggagggcgcaaacacacgtgcctggcggacgtcgctgctgatcgcgctggggacgctgctggccctggtctgtgtcttcgtgatctgcagaaggtatctggtgatgcagagactctttccccgcatccctcacatgaaagaccccatcggtgacagcttccaaaacgacaagctggtggtctgggaggcgggcaaagccggcctggaggagtgtctggtgactgaagtacaggtcgtgcagaaaacttgagactggggttcagggcttgtgggggtctgcctcaatctccctggccgggccaggcgcctgcacagactggctgctggacctgcgcacgcagcccaggaatggacattcctaacgggtggtgggcatgggagatgcctgtgtaatttcgtccgaagctgccaggaagaagaacagaactttgtgtgtttatttcatgataaagtgattttttttttttttaacccanaaaaaaaaaa

SEQ ID NO: 719231 - DNA, 1462 bp, Homo sapiens
  misc_feature (1452)..(1452): n is a, c, g, or t
ttttgtctgtatgattccatttattccctatgtccagatacaagcaaatccacagagacagaaagtggatgagtggttgccacaggctggggaagaggaaggacgggtctttaatgggtctggagtctccttttggggtcgtgacaatgttcaccgctttccctccagaagcagctccttctgctgtgagcaccaggctctggaaggggcaagcgtccttcattacccacaacccagtttcacagccagtccccgctgcctgactctcttaggcagtgaacaatagctattgccagtttggagcaatttccttatgtgaagtgaccaactacaccgtccgagtggccaacccaccattctccacgtggatcctcttccctgagaacagtgggaagccttgggcaggtgcggagaatctgacctgctggattcatgacgtggatttcttgagctgcagctgggcggtaggcccgggggcccccgcggacgtccagtacgacctgtacttgaacgttgccaacaggcgtcaacagtacgagtgtcttcactacaaaacggatgctcagggaacacgtatcgggtgtcgtttcgatgacatctctcgactctccagcggttctcaaagttcccacatcctggtgcggggcaggagcgcagccttcggtatcccctgcacagataagtttgtcgtcttttcacagattgagatattaactccacccaacatgactgcaaagtgtaataagacacattcctttatgcactggaaaatgagaagtcatttcaatcgcaaatttcgctatgagcttcagatacaaaagagaatgcagcctgtaatcacagaacaggtcagagacagaacctccttccagctactcaatcctggaacgtacacagtacaaataagagcccgggaaagagtgtatgaattcttgagcgcctggagcaccccccagcgcttcgagtgcgaccaggaggagggcgcaaacacacgtgcctggcggacgtcgctgctgatcgcgctggggacgctgctggccctggtctgtgtcttcgtgatctgcagaaggtatctggtgatgcagagactctttccccgcatccctcacatgaaagaccccatcggtgacagcttccaaaacgacaagctggtggtctgggaggcgggcaaagccggcctggaggagtgtctggtgactgaagtacaggtcgtgcagaaaacttgagactggggttcagggcttgtgggggtctgcctcaatctccctggccgggccaggcgcctgcacagactggctgctggacctgcgcacgcagcccaggaatggacattcctaacgggtggtgggcatgggagatgcctgtgtaatttcgtccgaagctgccaggaagaagaacagaactttgtgtgtttatttcatgataaagtgattttttttttttttaacccanaaaaaaaaaa

SEQ ID NO: 719232 - DNA, 811 bp, Homo sapiens
  misc_feature (23)..(23): n is a, c, g, or t
  misc_feature (36)..(37): n is a, c, g, or t
  misc_feature (43)..(43): n is a, c, g, or t
  misc_feature (55)..(55): n is a, c, g, or t
  misc_feature (80)..(80): n is a, c, g, or t
  misc_feature (88)..(88): n is a, c, g, or t
  misc_feature (95)..(95): n is a, c, g, or t
  misc_feature (107)..(107): n is a, c, g, or t
  misc_feature (146)..(147): n is a, c, g, or t
  misc_feature (150)..(150): n is a, c, g, or t
  misc_feature (154)..(154): n is a, c, g, or t
  misc_feature (157)..(157): n is a, c, g, or t
  misc_feature (196)..(196): n is a, c, g, or t
  misc_feature (211)..(211): n is a, c, g, or t
  misc_feature (224)..(224): n is a, c, g, or t
  misc_feature (228)..(228): n is a, c, g, or t
  misc_feature (234)..(234): n is a, c, g, or t
  misc_feature (267)..(267): n is a, c, g, or t
  misc_feature (278)..(278): n is a, c, g, or t
  misc_feature (283)..(283): n is a, c, g, or t
  misc_feature (303)..(303): n is a, c, g, or t
  misc_feature (305)..(306): n is a, c, g, or t
  misc_feature (317)..(317): n is a, c, g, or t
  misc_feature (351)..(351): n is a, c, g, or t
  misc_feature (355)..(355): n is a, c, g, or t
  misc_feature (365)..(365): n is a, c, g, or t
  misc_feature (381)..(381): n is a, c, g, or t
  misc_feature (386)..(386): n is a, c, g, or t
  misc_feature (405)..(405): n is a, c, g, or t
  misc_feature (416)..(419): n is a, c, g, or t
  misc_feature (429)..(429): n is a, c, g, or t
  misc_feature (432)..(432): n is a, c, g, or t
  misc_feature (439)..(439): n is a, c, g, or t
  misc_feature (447)..(447): n is a, c, g, or t
  misc_feature (797)..(797): n is a, c, g, or t
tagtgccttagattccagcgagntacgcaaacaatnntggtcnagccgagcttgnttccccaaatcccgtaatccttgancttattcncccaaanaagcggtctccngggaaaggagcgccctggcggagaagactcgaacggatnncanaganggncgttggggtaaaggccactcttcacctccaccatgagcntggacatccagagcntggaaatccagtntgangagctnagcgacgctagatgggccgagctcctccctctnctccagcagtncaaantggtcaggctggacgacttntnnatcacggaaanacggtgaaaggacatcagctctgcacttcgagtnaacnctgcactggnagaactaaacctgcgnacaancgagctgggcgatgtcggngtgcattgcgnnnnccagggcctncanacccccncctacaanatccagaagctgagcctccagaactgctgcctgacgggggccggctgcggggtcctgtccagcacactacgcaccctgcccaccctgcaggagctgcacctcagcgacaacctcttgggggatgcgggcctgcagctgctctgcgaaggactcctgggacccccagtgccgcctgggaaaagctgcagctggagtattgcagcctctcggctgccagctgcgagcccctggcctccgtgctcagggccaagccggacttcaaggagctcacggttagcaacaacgacatcaatgaggctggcgtccgtgtgctgtgccagggcctgaaggactcccctgccagctggagngctcaagctggaga

SEQ ID NO: 719233 - DNA, 1370 bp, Homo sapiens
  misc_feature (106)..(113): n is a, c, g, or t
  misc_feature (1360)..(1360): n is a, c, g, or t
tgctgggatgacaggcgggagccactgtgccgggcctcaatttaattatttttaagtttaatggatttccggggagttacgccgagtcggaaaaaaaagaccactnnnnnnnntgacacacacagtgatttcattaatacaactgtcttgaaatggcaaaattttacaaatagaaaacagtctcctgggttgcagggatataagcaggagtgagagctgagagaggtgggtttggctgtaaaagtgctccttggggaggccgggcgcagtggctctttcatgtttgtgaacccaggtgggaagccttgggcaggtgcggagaatctgacctgctggattcatgacgtggatttcttgagctgcagctgggcggtaggcccgggggcccccgcggacgtccagtacgacctgtacttgaacgttgccaacaggcgtcaacagtacgagtgtcttcactacaaaacggatgctcagggaacacgtatcgggtgtcgtttcgatgacatctctcgactctccagcggttctcaaagttcccacatcctggtgcggggcaggagcgcagccttcggtatcccctgcacagataagtttgtcgtcttttcacagattgagatattaactccacccaacatgactgcaaagtgtaataagacacattcctttatgcactggaaaatgagaagtcatttcaatcgcaaatttcgctatgagcttcagatacaaaagagaatgcagcctgtaatcacagaacaggtcagagacagaacctccttccagctactcaatcctggaacgtacacagtacaaataagagcccgggaaagagtgtatgaattcttgagcgcctggagcaccccccagcgcttcgagtgcgaccaggaggagggcgcaaacacacgtgcctggcggacgtcgctgctgatcgcgctggggacgctgctggccctggtctgtgtcttcgtgatctgcagaaggtatctggtgatgcagagactctttccccgcatccctcacatgaaagaccccatcggtgacagcttccaaaacgacaagctggtggtctgggaggcgggcaaagccggcctggaggagtgtctggtgactgaagtacaggtcgtgcagaaaacttgagactggggttcagggcttgtgggggtctgcctcaatctccctggccgggccaggcgcctgcacagactggctgctggacctgcgcacgcagcccaggaatggacattcctaacgggtggtgggcatgggagatgcctgtgtaatttcgtccgaagctgccaggaagaagaacagaactttgtgtgtttatttcatgataaagtgattttttttttttttaacccanaaaaaaaaaa

SEQ ID NO: 719234 - DNA, 1660 bp, Homo sapiens
  misc_feature (8)..(8): n is a, c, g, or t
  misc_feature (249)..(249): n is a, c, g, or t
  misc_feature (1473)..(1473): n is a, c, g, or t
  misc_feature (1494)..(1494): n is a, c, g, or t
  misc_feature (1516)..(1519): n is a, c, g, or t
  misc_feature (1522)..(1523): n is a, c, g, or t
  misc_feature (1526)..(1526): n is a, c, g, or t
  misc_feature (1528)..(1528): n is a, c, g, or t
  misc_feature (1530)..(1530): n is a, c, g, or t
caggaagnttgccaaccctgcctgtatagccagcaagaatttctaattatagcaaacagaaacacttgcagaaaaaaaaaaaaatgagaacgggaacatgataattttcaaagaaagagtcttctttcaaggaaagtcaggttcatggttacgaagctgctgaccccaggatcccagcccgtgggagagaagggggtctctgacagcccccacccctccccactgccagatccttattgggtctgagtntcaggggtggggccccagctggaggttataaaacagctcaatcggggagtacaaccttcggtttctcttcggggaaagctgctttcagcgcacacgggaagatatcagaaacatcctaggatcaggacaccccagatcttctcaactggaaccacgaaggctgtttcttccacacagcactttgatctccatttaagcaggcacctctgtcctgcgttccggagctgcgttcccgatggtcctcctttggctcacgctgctcctgatcgccctgccctgtctcctgcaaacgaaggaagatccaaacccaccaatcacgaacctaaggatgaaagcaaaggctcagcagttgacctgggaccttaacagaaatgtgaccgatatcgagtgtgttaaagacgccgactattctatgccggcagtgaacaatagctattgccagtttggagcaatttccttatgtgaagtgaccaactacaccgtccgagtggccaacccaccattctccacgtggatcctcttccctgagaacagtgggaagccttgggcaggtgcggagaatctgacctgctggattcatgacgtggatttcttgagctgcagctgggcggtaggcccgggggcccccgcggacgtccagtacgacctgtacttgaacgttgccaacaggcgtcaacagtacgagtgtcttcactacaaaacggatgctcagggaacacgtatcgggtgtcgtttcgatgacatctctcgactctccagcggttctcaaagttcccacatcctggtgcggggcaggagcgcagccttcggtatcccctgcacagataagtttgtcgtcttttcacagattgagatattaactccacccaacatgactgcaaagtgtaataagacacattcctttatgcactggaaaatgagaagtcatttcaatcgcaaatttcgctatgagcttcagatacaaaagagaatgcagcctgtaatcacagaacaggtcagagacagaacctccttccagctactcaatcctggaacgtacacagtacaaataagagcccgggaaagagtgtatgaattcttgagcgcctggagcaccccccagcgcttcgagtgcgaccaggaggagggcgcaaacacacgtgcctggcggacgtcgctgctgatcgcgctggggacgctgctggccctggtctgtgtcttcgtgatctgcagaaggtgagcccncgagggcgtccgcgagcgtcncttgtttccagtgtgaccctgnnnnttnntcncngnaccatcctgagaattatcattattatttttgtgatggagtctcgctctgtctcccaggctggaggcagtggcacgatctgggctcacagcagctctgccatcccgggttcaggcatactggtacaagctc

SEQ ID NO: 719235 - DNA, 838 bp, Homo sapiens
  misc_feature (71)..(72): n is a, c, g, or t
  misc_feature (94)..(94): n is a, c, g, or t
  misc_feature (97)..(97): n is a, c, g, or t
  misc_feature (132)..(133): n is a, c, g, or t
  misc_feature (540)..(540): n is a, c, g, or t
ccgtgctccatctccctgatggtgtgggagatgcgtgtgagcgagacaccctcagctccaagggtggcacnntgctccgtggaccaggctgtgnaancaatgcctgtcaaatccacacatgtatattctctnnatgccaggcccatctgggggagggcagcccagagacacgtgtgcacctgtgtgggctgacctatgcgcagtgtcaccaatgtctgtgacattgctgtaatggcaacaaagctggaggcaacccagatgcccgtggaaggaagaacagccacaggaagacccagttctggcagctcagcatgcagcccagaaacagaagaacaaagctgcagatacacagctgggaaaggccaccgagatgctttgataagtgagaagaggaaagcccaggagccggcatagacttttcattccttttgtattaaaaatgcagtgttggggaggtaacgctgtatatttctgtttgcaagcaatctttggagggtgttgcataacagaagatgtatcaggtctttgtcctggatcctnggaggaagcttctaaaccctgggggtttctcagaagtgtggagcgtctgcattagtcctggcgggcccctgggaccacacctgagtttatgctaatgaggtgactcagggtgggttcctactgaatttcaggatggggactgtctgctgaaagacccgttattagagggttggggctttgagccacgggatgtcagcccaacctcccagcagtcagagaagtgggcttcaatcacctaaccaatcactccaccgatcacgttacacagtgaaaccccaataaaactctggacaccaaa

SEQ ID NO: 719236 - DNA, 314 bp, Homo sapiens
gcagaggctcccctggacacagcacgttcatgttcctgtctgcacatccctgccactggggaggaggggcagctcctacagaggcagccctggccctgggccctttcaccctctgagcgcctgccctctgtccgacatcgtcccacctctgtgtctgcacttgggcacgtccctggggtatcctccccttcctctgcctgtctaaaatccagcccaacctcccagcagtcagagaagtgggcttcaatcacctaaccaatcactccaccgatcacgttacacagtgaaaccccaataaaactctggacaccaaa

SEQ ID NO: 719237 - DNA, 211 bp, Homo sapiens
cggagtctaccgactagccgacagcccccccgagtatgcgtccaggctggacagggcttcaccgctgagcttctcgatggctcggtgctccccgctggctgcagtgctggggggaggcagaagccactggatgctgtggcccgtgcgcacccgcgagctcagcactgtagttggggtccaggtcgtcgccgccctgtcgggctagtcgggg

SEQ ID NO: 719238 - DNA, 164 bp, Homo sapiens
  misc_feature (16)..(16): n is a, c, g, or t
  misc_feature (116)..(116): n is a, c, g, or t
catcatggggtcctgngatacacgatattaattaaggagtgacttctgttagcaagcacgtagacattcatacatactccggtggtaagactggtttctgagatgctgattgcgcngtccaaagcgcaaatgcttggatcttgcgagtcaggagtaatggtccc

SEQ ID NO: 719239 - DNA, 1204 bp, Homo sapiens
  misc_feature (906)..(906): n is a, c, g, or t
ctcaaactgggcctggagggccttcagctcctcagtcgtggcactgatggtggcctgcggggagaagggagcccacggtggcaccagggagctgggcccagcagtggagggtgaggctgctgggatgaggagacgtccacggcccctgacagctgtgatgtcgccctctcccgctgcgcagtgccctggggatggggcacaagccctccatcccggctccgagtcaccgagcgtcccccaaggccccgctgcctggacgccccggccccccagcaggcggcctgcgtgtgcctctgtgcagtcagtgagaagggctcccgttcagaatgggcagagaagggggctgcctcccgcgcctggcaccatggcctgtgttctgttcactgcacactgaaccatacattccgccagtcaggactcaatgtgggtgtcctttcctgccgagagtttcctctggtgcagggccagccgcctcgggttgtttctcctttggaaggatctctctggcccatctgggggagggcagcccagagacacgtgtgcacctgtgtgggctgacctatgcgcagtgtcaccaatgtctgtgacattgctgtaatggcaacaaagctggaggcaacccagatgcccgtggaaggaagaacagccacaggaagacccagttctggcagctcagcatgcagcccagaaacagaagaacaaagctgcagatacacagctgggaaaggccaccgagatgctttgataagtgagaagaggaaagcccaggagccggcatagacttttcattccttttgtattaaaaatgcagtgttggggaggtaacgctgtatatttctgtttgcaagcaatctttggagggtgttgcataacagaagatgtatcaggtctttgtcctggatcctnggaggaagcttctaaaccctgggggtttctcagaagtgtggagcgtctgcattagtcctggcgggcccctgggaccacacctgagtttatgctaatgaggtgactcagggtgggttcctactgaatttcaggatggggactgtctgctgaaagacccgttattagagggttggggctttgagccacgggatgtcagcccaacctcccagcagtcagagaagtgggcttcaatcacctaaccaatcactccaccgatcacgttacacagtgaaaccccaataaaactctggacaccaaa

SEQ ID NO: 719240 - DNA, 1150 bp, Homo sapiens
  misc_feature (852)..(852): n is a, c, g, or t
ctcaaactgggcctggagggccttcagctcctcagtcgtggcactgatggtggcctgcggggagaagggagcccacggtggcaccagggagctgggcccagcagtggagggtgaggctgctgggatgaggagacgtccacggcccctgacagctgtgatgtcgccctctcccgctgcgcagtgccctggggatggggcacaagccctccatcccggctccgagtcaccgagcgtcccccaaggccccgctgcctggacgccccggccccccagcaggcggcctgcgtgtgcctctgtgcagtcagtgagaagggctcccgttcagaatgggcagagaagggggctgcctcccgcgcctggcaccatggcctgtgttctgttcactgcacactgaaccatacattccgccagtcaggactcaatgtgggtgtcctttcctgccgagagtttcctctggtgcagggccagccgcctcgggttgtttctcctttggaaggatctctctggcccatctgggggagggcagcccagagacacgtgtgcacctgtgtgggctgacctatgcgcagtgtcaccaatgtctgtgacattgctgtaatggcaacaaagctggaggcaacccagatgcccgtggaaggaagaacagccacaggaagacccagttctggcagctcagcatgcagcccagaaacagaagaacaaagctgcagatacacagctgggaaaggccaccgagatgctttgataagtgagaagaggaaagcccaggagccggcatagacttttcattccttttgtattaggagggtgttgcataacagaagatgtatcaggtctttgtcctggatcctnggaggaagcttctaaaccctgggggtttctcagaagtgtggagcgtctgcattagtcctggcgggcccctgggaccacacctgagtttatgctaatgaggtgactcagggtgggttcctactgaatttcaggatggggactgtctgctgaaagacccgttattagagggttggggctttgagccacgggatgtcagcccaacctcccagcagtcagagaagtgggcttcaatcacctaaccaatcactccaccgatcacgttacacagtgaaaccccaataaaactctggacaccaaa

SEQ ID NO: 719241 - DNA, 269 bp, Homo sapiens
tctactcggctagagtcaataagagccagagtatatgcatacagctacttgaactaatacatccaaatgtactgaggttaccacacacttaactacggatgtgatcaacactaacaaggaaacaaatacaaggacaacctgtctttgagcctgggcaggcctcagacaccctgcctgtgggccccgcctccacttcatcctgcccggaatgccagtgcttcccgagctcagacagaggaagccctgcagcaagttccattcaggctgtt

SEQ ID NO: 719242 - DNA, 129 bp, Homo sapiens
cccgggggggggccggggttaaattttgggcccccccccaagggggaaaaatggaaaaatttttttttaaggggaaagggtaaggggggggttttaaaaacttaaaaaaaaaatttttttcccggggga

SEQ ID NO: 719243 - DNA, 342 bp, Homo sapiens
ttcgacggtgtctgataattctgtggctaacaatggaaattgttttgctttcagtgaagcaatgacatatttattctcacacctgtaatcccacccccttgggaggccgaagtgggcggatcacttgaggtcaagagttcaagatcagcctggccaacatggcgaaatcccgtctctactaaaaatacaaaaattagctgggtatggtgccaggtgcctgtaatcctagctactaggtaggctgaagcagaagaattgcttgaacccaggaggcagaggttgcagtgaactgagattgtgccactgtactccaggctgggtgacacagcgagactctgtctc

SEQ ID NO: 719244 - DNA, 175 bp, Homo sapiens
agctgtcactaattgcatggcaataagctactttacctaatgacactttttcattcattgatgtattttcaaagttcgtcatactgtacacattgcttaaaacacatgataccagcatgcaactgaaaatgaatgccgaatttggtacacatgtgttatctacgctcaaggtaac

SEQ ID NO: 719245 - DNA, 389 bp, Homo sapiens
gaatcacaaagccaggttaatgtgttctgggttaaccctgtgaagccagcacttggaaaggggcacggggccagatgaagttagtgcctgtatcttcctggtcattgctgggttctcagcacccttggcccccactagagttctaggtagagcccagtgctggggcacagggtcctcttcctgacagtacagcctgtggaatcacttgcaaggtcccatatgaaggtagggggtggaatgttggcctgcactggggccagcgtcctcagaaaggtgtcttgaagaaggtggcgacagctgcccctttcttcttgtctggggccttcaacagtgacagcttcttggacagtctgctgctggctttcatcaccgcgtcatgctcgatcttc

SEQ ID NO: 719246 - DNA, 366 bp, Homo sapiens
aatctctctgatttcaaccagtttcttgctaaacaggcaagccatgtacatgcataggcaaggaatgccagtgtcatgagatggcatgaatagggaaggtatattccttttcaggcctgcggagtgtccctcccgttggctccagaacgaagatccacacttgaggactactctcagtcgctgcacgccagaactctgtctggctctccccgatcctgttctgagcaagctcgagtcttcgtggatgatgtgaccattgaggacctgtcaggctacatggagtattacttgtatattcccaagaaaatgtcccacatggcaaaaatgatgtacacctgatagcaagaagctaattcatatgcttta

SEQ ID NO: 719247 - DNA, 253 bp, Homo sapiens
atttttaacccccgggggaccccccatgccccggggtggcctaatttggggccttcccgggattcccaaaaaaacccttttcccccaaacccaaaggttttttttttttattaatccccttaaccccccgggtttcctttccgggaacccgttttttaaaacccaatgggaaagcccccctaagcccccaaaaaaaaaaatgtttttttttccttttccccaaaaacgggggggggggggggggtttttccta

SEQ ID NO: 719248 - DNA, 369 bp, Homo sapiens
  misc_feature (57)..(58): n is a, c, g, or t
  misc_feature (70)..(70): n is a, c, g, or t
  misc_feature (75)..(75): n is a, c, g, or t
  misc_feature (87)..(87): n is a, c, g, or t
  misc_feature (92)..(92): n is a, c, g, or t
  misc_feature (191)..(191): n is a, c, g, or t
  misc_feature (198)..(198): n is a, c, g, or t
  misc_feature (253)..(253): n is a, c, g, or t
tctacatcacgggcagctggtgaccagcttatgcctatggctgctcttagaccatgnncgggaaaccgcnacgcntggctccagganctgcngaactggtgtatgcgattgccaggggatgagctacctggaggatgtgcggctcgtacacagggacttggccgctcggaacgtgctgcgtcagagtcccnaccatgntcaaattacagacttcgggctggctcggctgctggacattgacgagacagagtancatgcagataggggcaaggtgcccatcaagtggatagcgctggagtccatactccgccggcggttcacccaccagagtgatgtgtggagttatggtgtgactgtgtgggagctgat

SEQ ID NO: 719249 - DNA, 188 bp, Homo sapiens
ctatatatctgtatgtctgtactcttcagaaccgagaagaagccgcttatcagttagaagcaggagaatctagtgctcctctcaggctgaactcatctgcaacacagtaggatggaagcggactctgtgagactctccagagtgcagttgaccttcccgcagcctgcgtcccaaagcaaaggggttag

SEQ ID NO: 719250 - DNA, 807 bp, Homo sapiens
  misc_feature (1)..(1): n is a, c, g, or t
  misc_feature (133)..(133): n is a, c, g, or t
  misc_feature (147)..(147): n is a, c, g, or t
  misc_feature (276)..(276): n is a, c, g, or t
  misc_feature (282)..(282): n is a, c, g, or t
  misc_feature (297)..(297): n is a, c, g, or t
  misc_feature (302)..(302): n is a, c, g, or t
  misc_feature (334)..(334): n is a, c, g, or t
  misc_feature (349)..(350): n is a, c, g, or t
  misc_feature (446)..(446): n is a, c, g, or t
  misc_feature (477)..(478): n is a, c, g, or t
  misc_feature (510)..(511): n is a, c, g, or t
  misc_feature (594)..(594): n is a, c, g, or t
  misc_feature (648)..(648): n is a, c, g, or t
  misc_feature (664)..(664): n is a, c, g, or t
  misc_feature (782)..(782): n is a, c, g, or t
ncaactttttaatggtaaacaaagattttagtacaaaacatcaaaatacgttatcagtagttctaaacagccatagtagtgacagtcccagaagtgaggtcactcacatttttaaggaaatataattcactcnatttcagctcgcgnatccatgttctggacagttggaagagacaacatggtggagcgcgttactcttgtgcaataatcgttattcactttattcgaaagtcagctttcttttctggttccttgcttggcatttctaaagaaccngttcanttctccttttttgtnaaaancgctctaagaactaaaagggccgttccttacnggaataaaattaacnncacatgccatacatttctgggtcaatgttggctggttaaattccctcagaattagcaattcatagaaaattaattgtgaagttatcgcactttcangccaaaagtacaatttagagttcacaatacnnggccctgtggtataaagtgcctatgagcagcnncccatcatacactgagcgctacagaacttccttggcagaacagacccattgttggcataaactgtagtcactgtaggcttctnagatagaatgttctggatgcggagaacctctgacgagggaggattgttcgggtnatacacgaagagcttntggccattaggatgacagcctacccagatgtcccccgaggaaggatcaatagataaattatccaccagtgtatccagctcaagtaccttcaactgagtgaaattcatattagtgtgtntttccaaaacatgaatttcatgagc

SEQ ID NO: 719251 - DNA, 404 bp, Homo sapiens
  misc_feature (12)..(12): n is a, c, g, or t
  misc_feature (348)..(348): n is a, c, g, or t
  misc_feature (372)..(372): n is a, c, g, or t
  misc_feature (384)..(384): n is a, c, g, or t
aacctgtatttncagagtttatcaaatctaggatgtcttgggaagtatgatgcttactcagacatcctagatttgataaactctgaaaagcagcatttcctttgtggagaagtgggattatagttggatttttaaaggactgtggaacatatttaaccaccaaataccacttggcataatatgctgccaccctaaagagaccacatcaacaaaacccgtgttcgtttcagaagtatgctttagatatatttacattcacttatctaaatctaaattctgtagttttaaaatatcacataattttgagttaccagggaagttagtagttgtacagtaactggtcctatnaaagataataaatttttatccttnaatttgattttntgtgattaaaataggtatca

SEQ ID NO: 719252 - DNA, 667 bp, Homo sapiens
  misc_feature (570)..(570): n is a, c, g, or t
tcacgccaacttctaatttcccttaaattggtaaatttaaccacagaacggtctcgatttttataaaaatggatcccaagatccacctttcggccggggcctgccacagtccaggttgagcttttcctcctggggagccacacacgtgtgttgtttcccgtccagcccaagggggagaggctgtggggcggcggggcgggaaggcgccctgttgcctggttggcacgggacacgggtgctcactctgcaggagtggccacgaagacaaagggcacagacgaaagacaacagcaagacacacgagccgggtcttccatcctcaggactaaaacggcgctgagagcaattcacataatctcgtgagaacgggcttccttactggtgcgcagcgtgagccggtacatctggggtctgtgcaggttcggctccaagcgcagaggccatccacatcgggggggtttccgtgtggatgattccacgctcccacgaaattcgcaggattaggatcaccttcttcaagaagtgcagaccaaatccaatgatctgggctgggggacttctgtgtccatngggtgcttgcttggacgatgttctgcccttcctgctgtggatggctcactgctttccaaccgtggagaggacattctgagaagccattcgtcggtgg

SEQ ID NO: 719253 - DNA, 470 bp, Homo sapiens
  misc_feature (359)..(359): n is a, c, g, or t
tctcagagagttgttctcagcccagaggagggagttcaggcagagggaacagcgtgtgcaaaagcccagaggctgggaaagaagcagaaagaggactgtggggctggagcgtggtgggcaacaggagagaggtgtggtgggcagacagattgtctgagacccagccgtgcaggggcagaggagatagaggatccttgcaggcccccagctggggctgaggcacagagacaatgcaggtgggcaaagggaggagacatggagaaatattttggaggcatgtcctgatgaatgagcccaggatgcacccttagtgtcagtgtggagctcctttcttggctgtgtgataagctgaacccggnggtattttctggacatcgaagtgctacacccagagtccaggacagactaagtgagcaccagcagctcctggcccacctcaaaagcaggaaagacaggggagactgtggagg

SEQ ID NO: 719254 - DNA, 400 bp, Homo sapiens
caggtagtggaatacattcagcaataaatgttctggctgctttgcctcctcaggaactcaatacccaggaatgatgtgctgcagaggacacaggttccattcatgtatttaaaactctcaataacttttctaaacttactatttagctaaaagattccaggtttgtgaagtcctaagccttcctctcctctctattttgaggctgcaggaccatggaaaacactgatagaatttctgggcccttctccaccctgactgcacttgtggagatctgagaaatactgttgcccagaccacaccccaaatccataatatcagaatttctggaggtgggacccaggcacgagattttcattaaaaaaaagagaaaaagtttccgcaaatgtctttttgtcttatg

SEQ ID NO: 719255 - DNA, 1143 bp, Homo sapiens
ccagagcagcaccgaaagcgcaaaatcgacgcaggtaccatggcagagccctcggcttcgcccagcaagcgccgtgacagcggggacaacagcgccccgagcggccaggagcgtgaggaccacggtctggagacaggcgatccgccgctgccgccgccgcccgtactgcctggggcctgggggaggagctcccgggcgcccggctcccggtggggctgggtggcgacgacggggcggggcgcgcaggacccccgcgggtgagactgggggggtcgcatcgcgccagcacaattgaacgaattttggcagtataatacctttccagctactggaggaatccttttgcctcctattgatctgcgcagagcattgacacgatttacagtgaaagacaaccccttgacaagaaggcaaacaactttcaggggcaggaattgaagggggcttgaggttgacatggagtcctgatgtagggagccgaagcaggtggggattggctgatttgaggagaatgtctctaagtgaatctcgtattcttaaggggaaaagttattttccatactttgaagttatattccaaaacctgaggaaatgaaagaaaagattgttctgacattaaaatacctacagttactactgaagcctcttaactaagggattgtcaagggataagagtacagttgtaggggaagtattatggtatgcatttcttagagcaaaaagtttggttaaaattctagaaattgaagggttactgatcttataagagaagaaaattctaggaagtttagaaataggtggggaacaaatcaaagtatccttcctatttgaacgaaaaaggttaatttgtggtattatagcattggatatagggtatagtacgttgttcactaaagtttgatttgctaattaccagaaacagaacaacaaggggggcgacggtgcttaggagatttttcgtccggagggggacgcagacttaagggcggtacccaggcgtttttggtcaaaaggtgtgtcacttatagtgggggcgatatatagagaatgcagattgcgcgtcgttgttgaacattggtacttggcaaacggcataccggggcatagatggagagggaacgactacttgtggcgggtgaacaa

SEQ ID NO: 719256 - DNA, 275 bp, Homo sapiens
tgtgagctgcattacatgctcatatatgcctacgtttctatacagcagaggaaaccattgtccacaagactgatgttcttttggggttttatgtacagacttgtccaatcatgtgtgtgtgtatcctgcgagttgcatgatgactccgcatatgaagctctctgagttctttgattttaagtatgggtttatggactctattcaaatgtaggaaggcgtgtggttctatcctgccctccctccccttttggaaatatgaaagcacatgtatagaa

SEQ ID NO: 719257 - DNA, 275 bp, Homo sapiens
caatcccagaacacttggagggaatcggacaggtgatcccatcagttcctgctcctctgtcagggaagacaggcagagcccacagagcatggtccatccagagtgttccttgagcccccaccaccttactggaacccctattcagtctaggaagtctgaaatgggtgctaattcccttgctcatgaaaccagggccctcttccttcatctaatgcaaacattcttaggtgaagaagtgggaataattggaaataaacatcagttctaatcgttca

SEQ ID NO: 719258 - DNA, 434 bp, Homo sapiens
tctcgtccagcatccccccttctgcacgccgcttgtgcttactcgttagtggcgctgcgcattacctgcgccttgagctgtatcgctcggtctatacctggcgtcaaaccgatttcggctggaacgccaatctgatcacggcaatatactcatgacgtatgccatcgaccagaccaaccccgaagggactccaggcgccattgttgtcagttgggagggcgttgaggttgcgactttcactcatcgcgacagcgctgagtatttcgtggatcgtgacttagcgaatcgtcgcgaatcggatcagcccgacgcttaggaataacccatgcgttacatgctcagcgttgctcgccactacctgacaggaaaaatcacgactgagcacgcggtttatgcgcttcgcgatcgacctgttgccgtggccagtaaaggtc

SEQ ID NO: 719259 - DNA, 142 bp, Homo sapiens
tcgtgtagaccgattcatacaggtccctcgttaagggacaagtgattatgctaactttgcacggttagtggtaccgcggccgttaaacatgtgttactggacaggcggtgcctctaattctggtgggacacgaatgttcagt

SEQ ID NO: 719260 - DNA, 113 bp, Homo sapiens
caccgcggcaagctggagaccgcccgcgcccgcgctgaaaaggtgaccggcgagttgtccgatctcaccgtgcagatcgatgaactgcaggagcaaacgcgtgacgcccgcgc

SEQ ID NO: 719261 - DNA, 148 bp, Homo sapiens
attctagaggatccctgctgatgcttctcacctgtggtctgcgcgtcagcacaagccacgcttcaccaccaatgaggcccaacaccttcttctaggtgcagtgccctcgtccgtggtgtgccccaaataaactcaggaacgccccggt

SEQ ID NO: 719262 - DNA, 438 bp, Homo sapiens
tggtttgtagaggcagaggagatggtactaagttagggcggtggatgggctgatttacagtttgtggaatatgtatctgttctgcccaggttttcaggttgaattgtacacgatagtgtgtattaactctttcatctagtgttacttgcatctctttacttttcttgattaatcttgccagaagttggtctatcttataaaatcttttgaaataactagcctttgattttgttcatctatattttgttgatttattctctaatttctgcccatatgtttattgcttccctgggttattttgtcaatcttcctaagtttctttttgagtactattttagctgtatctcacaagttttggcatgtagtgttttcagtgttatacatttataaaatatttggtaatttccttggtgattggtttaacctgaagaattacag

SEQ ID NO: 719263 - DNA, 642 bp, Homo sapiens
  misc_feature (84)..(84): n is a, c, g, or t
gcggggccgcccagtgggtcaggcacaggagcccccggtcctatcttagagcccctgagcttcagggaaggggcgggcgtgtcnccgcctctggcatccctccggttgccttacacacgccttcacctgcagtcgcctagaaaacttgctctcaaacttcagggttttttcttccttcaaattttggaccaaagtctcatttttgtgttttgcctgcctctgatgctgggacccggaaggcgggcgctcctcctgttttttttgtgctctttttaccgcccccgcgtcctgtcccgggggctttcctaggatcccctttccgtaaaagggtgtaacaagggtgtaaatatttataattttttatacctgttgttagaccccaggggcggcggcgcggttttttatggtgacccaaatgtatattttgctaacagcaattccaggctcagtattgtgaccccggagccccaggggaccccccgcccattccgttgccttacccgatggcttgttacccggaaaaaaccgattaaaaccgttttagaaactcctcccttgtttagccctgtgtttcctgtggaccctgtaaaggcaggttggccagtttggacctgggcttcgaataaattttttgtatcccca

SEQ ID NO: 719264 - DNA, 174 bp, Homo sapiens
ctcgtggcgcgggccagaacattggtctctgtttttcccccccgggccccgtcccccggacccgggggacacccctcccccgttctctttcccccccccctcttttatggtgttttacaattccctttttgaaataaaaaagggacccccgcctcccctccctttttttcccca

SEQ ID NO: 719265 - DNA, 225 bp, Homo sapiens
ctatctcatcgacggtttctctatctgatacctcttctcattatgctatagtgtattttttttttttaaaccccagaaatctcttaaagtcttaaccaaaagtgtaagacggtcctgtgcatacatgggtactggggtccctgaacccaaccaaccacagatcaaccatattggaggcaaaacaaaatccacaaagtcctgaagagtcacaactggaattggccc

SEQ ID NO: 719266 - DNA, 125 bp, Homo sapiens
tgctgtaggccagcgatccccaggtctcgcgaattccctgcgctttgagaatggtgctctttataacgttccccatccagacacacacacagacacgctacacacacataccccaaacatacaca

SEQ ID NO: 719267 - DNA, 895 bp, Homo sapiens
  misc_feature (1)..(1): n is a, c, g, or t
nattctagctcgcacgggtaattatgagggcgcggtgtccgttggcggcctctgttttcaaaacctgttgtgcccctgatgtatccccttgggtcacttctgcagatcactgtggtcctgagccctctccgtctttgctatttcgcccctgggggccacaacgggttttccaagagcacagtggtctgtatgacgcggcccccattaggtcgccaacttatctctacggggcgattgtaaccccccggcctgtgatttgtttcaatagcatttgaaaacttttctttcgtaaacaccttaaccacgcaatttcctccggggaccaaacccccctgtgaataatgtccggccaagaaactttccagatatccccaaaatatttattcacagttaacatctccccttatttcaattcttttcccagcgcccccccagtcatacaattaccccctcgccgtgaggattaagtagtcctgctcgtccctatctccccccccccaaaatcgggaaattaatctcctcgtgatgacatataatacgccccccttgtgaacaaaacaattgtcttgaacgacccccacgcgacttgtaatagtaaacaagggacaccccacgcaataagggtttttaggcagaacaaaccccgtcacgcgagtgacccccggtcacaagtagctttggcaaaggccccaaggctttcccccacgccacagtaggaaagaaaaacaatgtcgccccgccaaaaactcggtggggtacacagactatagtggtagggacttctaaattccgtaaggcccacatactactacctcgcatccacaacccccggatcaaatataaggggcttgacaaacccccccccgaagcaccggcccccgggaagcccacatca

SEQ ID NO: 719268 - DNA, 364 bp, Homo sapiens
aaaacaccaccaggccgtaccacagcctgcccagtgaggcggtctttgccaacagcaccgggatgctggtgtcggcctttggcgtgctggtgctctacatccttctggcttcatcttggaagcgcccagagccggggatcctgaccgacagacagctgctgctacactgaggcctggatccggctttccctgtgacttagtgtctgtcacggagcagcctacaaatcctggtgctgtctccaagaacagagcctgtccaatgtcccatagcgatgagtaacagaggtggctgtggacttcctctacttctccttgctggatcagggccttctgctcccgctggcaggtctggcttgctctcttg

SEQ ID NO: 719269 - DNA, 724 bp, Homo sapiens
agtgggtgcaacagagggcaaggctgaaggggggcatccgctttgggggcagagatttgtctccttggcccacccaagcactggtgcgttggcccaagccccacagaaccgaaccaggtctcttctgtcctctcattttcatataaatcattcaacaagacaaggggtctccactcctaggcaggcgccaagacttgggagttggcaatctgttgttgcatttggggctccaagctgatatcttcccaacatccaggcgttcccaacagcccttgggcattacctggcagttgagcccagtgttgtcccaggcgtctttcgttacaggtttacaacccagttgttgggccattccaattgcaaggtggaacattgggccttggtgatgctgtgtgagtcctttggtgaccatgtctcaggcgcatttttcagcagtcaagggttctgggtacacaaccattgggtttaacatttgggggccctaacccccaagaaccgtccaaattcctctcagggccattccaaggcaacaagcgcggaatgccttgggggtgtcgcgaattctgtaattatgtgcttccacacgtgtaaaccccgtctggcacgggtttgtaccacgggccgtggttgttgttggatccatgcttggttatcacatggactatttgggcaggctgatgcaggtgggctaatgaaggcaggagttagactcccctggctgtgt

SEQ ID NO: 719270 - DNA, 418 bp, Homo sapiens
cattgacgggatggcggcgctccggtttcatatccgcaagcagattgttgcgaagaagacgagccctgtccatcaaaagcttggaggatgacattcacttgcaggggcagattagttcattctatgattgcgacgatcaggccaagatttctggacattggaatctgttcgaagaccgaaccgctttcctgaacacgggaggctaaaatttgaatctcgtggaatgcgttctcgagaatgatcatgttcgccttgagccgctatcagaagggcaccgtgaaccgctgcgcgaggcggcaaacgctgatcgcgatatttggacctcaatttaccctttctcgcttgagggagatcaattcgaccccacgtggacccgcatttaacgggatcgcgaaacgcgaacgtggatttccttttc

SEQ ID NO: 719271 - DNA, 144 bp, Homo sapiens
aactgttgtcctaggcacagtctaagcctccttattcgagccgagctggcccagccaacgcatcttcagtgataacgaccacagtctacgacgttactcgtcacagctcactgcctttgtaactactcttcttcatacgtacta

SEQ ID NO: 719272 - DNA, 292 bp, Homo sapiens
aacacaactgacagactgacttcgatgctgtgaacgcattagtatcctgccaccatctgacacaacataccatttgaccttaaccgttacaatactgcacacattggtagcgtgatccgcatgatgatggatgagttagaggcgaacatacatgtcccgccacctgagctgcagtctgacatcatcgacatcacgggcctctctgcaaatttgtaccgggccatggctgtactgctgaagcgtgtgaaggagctacaggccgagcaggaggaccgtgcttgaaggagtttta

SEQ ID NO: 719273 - DNA, 172 bp, Homo sapiens
cctgaggttatgtgtgacgcttgcaacatgtaacagttcctccttcacttctactttctgggcacgtgtcctgggccgtctctttgagcttgttgcggtgtcttctagttctgtgtgatgatttgcacgggtattttagtaggtttttgtcatcatgtcatttgattcttca

SEQ ID NO: 719274 - DNA, 104 bp, Homo sapiens
atataaaatcgctgttcgatttggtagctcagggaagggtctgaggcctggcatagtagtaggagttggtgtaaatgagtgaggcaggagtccgaggaggttag

SEQ ID NO: 719275 - DNA, 179 bp, Homo sapiens
ggatcaagtcccatagcctttattcagggggcctatcaacccttccagttcttgccccagggttggcctgctagcgcttcaaattcccaggtgtccctaatttcagaagtaaccttttgaatagcattagaccctggctgtcccctccccaccaatataaacatgatatttcattctca

SEQ ID NO: 719276 - DNA, 2039 bp, Homo sapiens
  misc_feature (206)..(206): n is a, c, g, or t
ggttcacgacccggcgcgtgtccgagtgtagcgtccatgctccgaaatacctagaatatagtgaggacacgtatcttacggtggtcccagagactcgaacatctcacgtgacaatccaagacatcttctctaaggtggactggaagcactgagcgacaatgcttatcagattgatctttccatcaagtctcttccctggggtgatntcgagtcgaatatatggcacgtggctattaggcaagagctgagtatgcctggagcattacattgcttcttgaccacgactcacaaagatcgacctcatatacacgatcccgcgactatgtgatcattcctacatactcaatagagtccacaagtccatgaggagtgtgccttggtgattgtgcccagtgatgcagctttggccgctgtgatcgacttgcttgtgtaattccagcgatgaccagttcgcgaacacaaccacaactgtggtcaccatcacatggacaaatgtacgcaatgcgacgccagggtccgcacaccgtttactgcgaagacacggattggacaacaagcaggaggtaactcgaaaaaccacgtgggcagttacgagttccagcgatgaaagctcgctttggtctcgcggttctcattaccaatggggccccacaatatgagtatttctataaccaagctttgttgccgacgcacaatggctctctctccttgagaggagcccccaactttgtgctactctatgagcccatatggcgtctctctccatagcctgggagattatcttctcacccaaatttctatccacaggagcgatcaaaggggcacctctgggagattgtcgcagcgataagctcagagctttccggtaggacaggcggactaaatcctaatcgttcaccatacccccaagggtgggcgacaccaaccttctccgacacctctgtgactacccattctcgaaccagcggcacagcgcagcaacaggcggacacagccgcgaactttaggcacccctatcgattactcttccatttcagacgcgcacatacagcagacggcaacttaacaacatcttggaagccgaagacaacgagacacgcgcagccgcacaccgagactaccctctctggcctggccactggaaggtacccacgagcacaccacgccgcatcccgcgtcggcgtatcaaccacattaccacaacccaaccatcaggacagcacgacggcaaggagaacacaaacacagtgcgaacgacagcatcatccgctagaccacagcgccgaccaacaggcctacaccaccgacacggcgacgcacaacaagcgcgtacgagcacgcccaacatatcgacgctgaccacaacaagcgaagcgcgacccctacaaccatgccacagcactccggctacacgagcccaaccacaaatacgtgcaccccggggcaacccaccgcaacacccgtggcgacgacacacacacacactcccgccgcggaacactatcccccccaaactataagcagcgagtcccaccagacgacaatgcaccccaccgacaacaccacacacgctcccacgcaagcgttagacaacggcgggcgcaaagcaccatgactcacgatcaacatcccacacacatgcaccgccacatgaccccacggcacactaagggcacggcacaccacttacctccacccccacacacctgtcctttatcacctataacccgcggctacctgcaccacccactactcacacgagaacaaaacattacactccctctctcacaaacacaaccacctcctaacctcaaaaacaaccccccaccacacacacaacactccacatcccaccacaccatcactacactgaccaaatcataacacacacacagcccatacgacaccaacacaaccataactaatcccccaagcaacaacaacaatacacacacaacaacgcaccacacacacaccaacacaacctacacacacctccttaccctcaactagctccactacctacataccgcttcata

SEQ ID NO: 719277 - DNA, 221 bp, Homo sapiens
aagctcggtacccctctactagccaatcacttcattactcctagccgcatacctcctcattctaacctgaattctggaggacaacccagttaagctacccttttaccatcattgtacaattatcatccgtactatacttcacaacaatcctcatcctaataccaactatctccctaattgaaaaccacatactctaattggcacatggccctgtactcgag

SEQ ID NO: 719278 - DNA, 120 bp, Homo sapiens
gagccagaggttaggtaacctgtgcgaaaatggacacaactagtatatgactagtcctagcttatagccggtttcatactgacttcaaagcctacattcactactagtatgctatacagg

SEQ ID NO: 719279 - DNA, 346 bp, Homo sapiens
gaggcagatgagggacagtagataatggataccagatacatacaggagggtgaatgaacaacgacttggaagtgtatgtggagaaggcaagaggaatgaatgatgatatctgaagcagcacaactcacaattgcgaagatgtggaaccaacctaactgcccatcaagcaatgagtgaattaagaaaatgtggtatatatacaccagtggaatacttactcagtccacaaaaaggaactgaaatactaccttattgcaggaacttggacggagctggaggccatatatcctaagtaaagtaattcaggaatggataccaaatatcatatgttcccacttatgagtag

SEQ ID NO: 719280 - DNA, 409 bp, Homo sapiens
caagcaaaaattcctcacttccatagggattaaatgtgcaaggaaagttgcagaaaataaaggagttcagtatttatgcctgtaaagatggaaaaaacattgtattttacaaccatagccacattggtgtctttacatacaaaagtagatcttaaaatagtcatatcttagcggaagtcaatatctgatctttctgtggttcttataaattatgtaacatgcctatcatcaattattttccttccattctctcagtttatttccagagtcctaaaaatgccatatattacctccagaaagctgctacagactttgttgtagaaccttccctctattttttgattgttggttggtggatcgctaacagtatagaaacatcgtacgtcagaagtaatattcacgatctagg

SEQ ID NO: 719281 - DNA, 768 bp, Homo sapiens
ctgccgcccgagcctcgcgagcagagggacgtggagcgagcgggtggaaaccaggcggccagccagctggaggaagctggcagggctggagatgctggaccacgccgtcctgcttcaggtgatcaaagaacagcaggtgcagcaaaagcgcttgcttggaccatgcagtgatgaatgcttgctgtgctgtgtgatctgagtgagcatgcacaatggatgatccaccatgcagatgtgcatggagtgacgaaggatggataaacccagtgcatgtgtgtgatgtgttgcatcaagaagcccgtgtggcatgcgtgtgcccagatgtgccagtgatggcccctgaaggcaatggccagtggatgactgtgtgtgatgaatcttgcctcccctgcctttgtgaccctgtcctcagatgctcctgtgtgtgtgcctgccctgctccatcccagtgaccttaaccatgcgctccctggagcactctgagtgggcctgtgtggcatgataccctgctggccctcctgactggcggccctgacacatgagcctcgtggcagcccaggccaagctgagagatggccagaaggatgccgaccccagggcagcttggcacttgtgaagggagctccccaatggcccggagcaggtgcccgtgccagaccccgccaggaagccgggggcccagaggagctgcctcgcagaggaattcctgggcaaagtcaggacgttactggcggttcccagacaggaaaactggaagatgtgcagcaa

SEQ ID NO: 719282 - DNA, 238 bp, Homo sapiens
  misc_feature (18)..(18): n is a, c, g, or t
  misc_feature (25)..(25): n is a, c, g, or t
  misc_feature (35)..(35): n is a, c, g, or t
  misc_feature (44)..(44): n is a, c, g, or t
  misc_feature (148)..(148): n is a, c, g, or t
ccgtacggcgtactctanctcgganacgggggtgncatgagggnagcatgctgagaacaatggcagcattcattccatagatcccttttctgcatgttcaccaccgacccatgatccatcctgtgtaggttatctgaacatgtcagcncgattccacggttgttaaagtaagtttgtagaattttcaagtttgctacaccgacttgtatcataccactcggtgattgttttaaattaa

SEQ ID NO: 719283 - DNA, 197 bp, Homo sapiens
tgtagactaacgtcttttcgtgggtacttgcgcttacttagtagaccttcatcaggattgcatgaagactggcggtatataggctgagcaagaggtggtgagagttgatcggggtgtatctgcttacagatacaggtctccatctagcagagggtatgataccaccggcctagtgtccgtttgtatgtttgaaagac

SEQ ID NO: 719284 - DNA, 416 bp, Homo sapiens
atgctgaggtgatctagagatcccactagtccacggttggctactagtccagttggctactagtccacggttggctgggctggcccaggaaagacccttgcaccattctggggtcttttttttttttgggaaacggagtttcactcttgttgcctaggcgggcgtgcaagggcatgatcttggctcattgcaacctccgcctcccaggttccagcgattctgctgcctcagcctcccgagtaccggggattacgggcaagtgccaccacgccgggctaattttggtatttttagtagagagggggtttcaccatgtgggccaggcgggtcctgaactccgggactcgggtgatccacccgcctgggcctcccaaagtggggggattacggtcgggagccaacgggggactaggggg

SEQ ID NO: 719285 - DNA, 108 bp, Homo sapiens
tgcggaaactgcgaccaagagaccatttagcaggaagctagcaggctcttcttcaagagttggagttgacatttggctcctcttggactgggccgactgtcatctcag

SEQ ID NO: 719286 - DNA, 1195 bp, Homo sapiens
gctccggcgcgggttgcgaggcgtagcgctgcgaacccctgcacccctgcgaacatatgctgctgctgagtggtgcggagcgtgctgggcccttgctcgtgcacctctgctgctgcggtccctgttagcctgcctgccgcccgtgccctgactgatggccactgtgcagcttggtgtggttgtgtgcgcctgtcctgtactgcttgcgcacttggaccctgctctgctctcggtgcgtaaattcacatgagacaacacggacatgggtaacaacagaaaattggcattggaacagtgggaatcagcaaattttgcacaggaagcggttgggagatgttgttatcgtagtctccctgaagtcgggacaaaattgaacaaacaagatgagctatggtgcttagggaaagtgtgaaagcttgctagtgaactctattctccttatatcaggacgacagtacctgaaacttaatgaagctacttgcaggaaaatccaggacttgtaaagcaaatcttggtatgaagatggtaggatgatcaaggatgaactgagtaacccttacagaactagcagtgacccattattgacgtgaagcacaagcctactgcagacaatacgtaaccaacctatttgcgcgacgtgccacccatggcacacctcccttacggtacagctcgtcctgcacctccacccgccagccccggcacagcggacttaaacagctcagctggggtaggactaagcaaagagatacacaatagatacaacatttctagacagttagcggaaatgggggaacaaacaaagcttaagtggtatatacgcgagtctattgtaagaaaacatgtcccttaatgtgttcaaaagtagcacatacaaaacaagttgaacacgtgggctttatttacagaattactgcaaagtggtgtggaggacaaatagcgctcccaagtatgacaaacgtctgttggaagttcgccagtgaggcgacaaccacggttataagcagataaagtgcaacaagcagaaaagtatagtctaaagccacaccgaccaatcatgacaccgctaagttccaccagaggggaaggcagagacattcagagtagcatatacgaagaagacgcaggaagcgcaacgacgagagaggaggaaacacgagagaaagctacgtaggagcgcccagggacgaaccgg

SEQ ID NO: 719287 - DNA, 187 bp, Homo sapiens
ttttaaaaggcaaaatttttaatctaattgttttttaaaaaaagttttggggtaggggggtattttaaaaccccccaatttttggactatttgattattaacaaaaatgttttttaaggcccaaactcaaatgtttaaaaaaaatatttactttggactcaaataaaatccccttttgcaattccta

SEQ ID NO: 719288 - DNA, 233 bp, Homo sapiens
gcaccgagaacgcacacatccatacagtccacaccatcacacacactcatctatacagtccacaccatcacacgcacacatccatacagtccacaccatcacacacacacacatctatacagtccacaccgtcacatatctgtacagtccacaccgtcacacacacgcccacacccgcatgccacacatccatacagtccacattcacgtatgcccatatgcatccattcaca

SEQ ID NO: 719289 - DNA, 223 bp, Homo sapiens
  misc_feature (54)..(54): n is a, c, g, or t
  misc_feature (153)..(153): n is a, c, g, or t
gctatgatggcagtgaggggcgcatatgatctatgctatatattcggagtatancgtagcggtaagttacaacgtacctctagaatatagctagcatgcgcaattaaagcgctgatatcgatcgagcgcagatctgtcatgatgatcattgcnatttggatccatatatacggcgcggggttataattaacctcaggtcgacgttccatgggcattcgaattc

SEQ ID NO: 719290 - DNA, 196 bp, Homo sapiens
taagccctaagatgggttgatggcctcaacaagtcctgtccccgagccacaggacttgcgcctgaccgtcaagatggatctctcatcgcagggaaccgtcagctcctttgtggccaagcttttcatctttgtgtctgcagagttctgagcactcgcttccgcgtcgcgggttctcccttcctgttggtttccctaa

SEQ ID NO: 719291 - DNA, 383 bp, Homo sapiens
tgaccacatgtgcccaacttcaataaaagaaccaaaggaccctcatttttttaggtgcttggcttttattcagggctttgcaaggggttaaaaactgactgtaaaaatgggaaaaggccacggaaaacatttatttttcctttggatttttgggaaaacccaaccctggtaaggaaaaggtaagggggattattcccctccatatttcctaaacaggttgtataaggaacccgtggcaagaggaaggctgttttcccaaatgacttgtaatgttgtgattaaaaaaattcctatatttttttgcaaatccaacgtttttttcccatccaatccagccttggttttttttttaatttaatattaaaattaccccttttttttta

SEQ ID NO: 719292 - DNA, 283 bp, Homo sapiens
  misc_feature (177)..(177): n is a, c, g, or t
  misc_feature (254)..(254): n is a, c, g, or t
tcgatctagaggatccctgtaaaatcctcaacaaaaccaatcagcagcatatcagtgggattatatactatgatcaagtgcgtcttattcctggaatgcagggatggttcaacatatgaaaatggttcaaggtaatatacacattaaacagaatgaactgggagaaaaccacatgantggtgtcaattggatgcagaacaaaacattggacaaatattcacgcattctttcagtgatttacaaaaaacactaanaactagaagtaaaagggagccagggtgca

SEQ ID NO: 719293 - DNA, 314 bp, Homo sapiens
  misc_feature (10)..(10): n is a, c, g, or t
tatgcacaantaaggaagggtccccaggtggggagaaccccaagttgagaacaataatgaacaattatgtatgaactatgttagagacagctaatcacaaacaacctgcgggcacaatgacctcattccacacgtagcacccttcagcaggaccctataaaactttcctccagcccttgcctctttgcaggtagcaccttctctgctgagctgcccactgcaacatattttcacaatttctctaataaatctgcccttctttacctacaactatcttggtaaatggctttaccacctgcaaaactgaccctagg

SEQ ID NO: 719294 - DNA, 135 bp, Homo sapiens
ttctagaggctccctcattagcgagcaggcagaatattatcctggatgatatgcacccagcactagaatacacctttcattagaatgaagacaacacaacatacccccagcaggcgtgaccgctccgcttactga

SEQ ID NO: 719295 - DNA, 277 bp, Homo sapiens
agggcatgggaggagtctaccgagattggtagggatcctagagcctccaacaaacttcttcttggttttgtaccaataagaacgcaattagcttgtaaagggactcaccagacctgctcaatgatgttggctttcatgaagactaacaagtttgtcacaagtgtgaaacattagttgtctacattgatttcagaatagaaggccacctgaggtgtatactacttggggaaccgtgcacgttaacgattactaggactatgcagaaaccagagagttt

SEQ ID NO: 719296 - DNA, 161 bp, Homo sapiens
cctcacagaccctggtttaactggcagaagcaggaagcaggaagcggcagaagcaggaagctgatgtgggaagagcacttgagcccgggatgtcaaggctgcagtgagccaagatggtgctactgcactccagcctgggcaacagagcacaatcttgtctc

SEQ ID NO: 719297 - DNA, 127 bp, Homo sapiens
tgtcagaggtacaggtgtggagtagggtggtgtatttggagaaccgtaaatactgacatgcatcacttaacaacagggttatgttgtgagaaatgcattgttaggcaattttacccctgtggaaaag

SEQ ID NO: 719298 - DNA, 494 bp, Homo sapiens
tctctccctttttttttgagacagagtttcactctgtcacccaggctggagtgcagtggcgtgatctcggctcgctgcaacctccgcctcccgggttcaaacgactctcctgtctcagcctccccagtagccgggactacaggtgcccacaaccagacctggctaatttttgtagttttagtagagacagggtttcatattggccaggctggtctcgaactcctgaccttgtgatccacctgccttggcctcccaaagtgctggaattacaggtgtgagccaccgcgcctggcaagagacgctgtttctacaaaaaaataaacaaaaaaaattagctgagcatggtggcatgcacctatagtcccagccacttgagaggctgaggcaggaggaccacccgggcccggtggctcaaggctacagtgttcacaccactgcactccagcctagtgtgcagactggagtgatggagtgagactctgtctcacaaaaaa

SEQ ID NO: 719299 - DNA, 104 bp, Homo sapiens
cggcacgaggcgagctgtggcctcgcccctccggtggatctccgaagttcactgttcggacaattacacgccatgacttttgaaacgtcttaattaagcggccg

SEQ ID NO: 719300 - DNA, 531 bp, Homo sapiens
  misc_feature (229)..(229): n is a, c, g, or t
  misc_feature (311)..(311): n is a, c, g, or t
  misc_feature (363)..(363): n is a, c, g, or t
  misc_feature (434)..(434): n is a, c, g, or t
  misc_feature (438)..(438): n is a, c, g, or t
  misc_feature (520)..(520): n is a, c, g, or t
cggcacgagcttacatctcccatagcagcagcacacatttagacaacaaacagtttatgcaactggcgcctatgagcatgatgctgaatctactaatcaccatgagcccccacctgagtgtgtgctgctaggcatgtctacaggatgcgccgaccaaacctgccggccggccaaggtaactttgaaatgctaacttttgtgcctagagcaatgagacttttaaagaaanctgcctaaggcaaactccttctcccttattaagtgatgcataaaatatccatctatagctttagcatccttccaaaacctcncagagcattgcggtgctgggctcatatcacccgcggggcaggctgagcacantcctacagcacatctctagtctgtgcacaccagaagctgagttatttccagagtctgaaaaaattctgtgncctnaacagagaaaaactccactgtagttctctatagaaaatgacttaactcatttctgcttaaatacactatgttaataaagaancagaccttaaa

SEQ ID NO: 719301 - DNA, 703 bp, Homo sapiens
tgtaagtaaacagaatattatcaaacaatttatttgggctttatggaaaaaagagtattgggtctaaatgtgccaccataggtgtcaaattctcctatctgcattggtctttatcctaatatggtgtaccatttcttttcttaataatttacttggtggtggtgtttctacactttcatccctgtttttaatctggtatatcatcaggaaatggtgattttaatcattaacatgggtttctttggtggatgtgtggtaaaaatcaacactaggctcagggctacatattcttaactcctgctacattggctggttaactatcaacttggtaacctcgtgtttatctactacagtgtgtatatatacttagagcatttcctctaacacatttcacagtgtcagtacttcttttaaaagggtcttagaccagtctagcaaatggtcagtccaacgctcattacttcacatttacacaaagcagtcttctccgggtaaacctttgtgggtattcggtacacctacttcggaagggtcttcaaatttccttccttgggtaacagcggcaaaaggttctctcttaaagttttatagggtgggccatgtgaaggccacaaagctgggtcgattcactctgattcacacccagacattttcccagatcgttaccaagcggccatccagtcacgtactccagtacgcaagg

SEQ ID NO: 719302 - DNA, 3317 bp, Homo sapiens
  misc_feature (219)..(219): n is a, c, g, or t
  misc_feature (3306)..(3306): n is a, c, g, or t
atatcttccctctccctgccccttcacttcccgttcctggcccttcagctgagggaggagcagagcccatggctccccaggctggggggcatttttctccaggggtgtggggtgggcgctcccttccatccttctggaagacaggaggggtcatgagactcctccactgtggaaaatggtgcttccttccagcacagggtgctgtatcgtcccgggaangtgcctcttgttcagcataatgacctgggaccctcggggccagaaatccacagccccagcttccccgtctcccagggaaggcatctgttggctgaccatctgctaaccagtcgctcctgtttctgctctgatacttcccaaggcatcccgaagcacctgtcttagctgccccttcctgtcccacagaggattggcacttggttttgacaggatactttaccagctttgatgttaattctccttcccttgtctcctgtagggtccagccacagcaggcccggcgtcccggtggaaggcagccctgggcggaacccaggcgtttaacggctcactaggcagccccagatctggggaacagatgagcacgtggggagctggagtgagctgagcagaagttttgtgcccgcctgcccccatcccctccaggccacgttttagatggcccttgtagttgcgggtcctgggtgtcctcagaactagacatcaatgcctggatccttcagccggccctgccctcctttaggagacaggagtcaccagggcacagccctccaggcccgcctcaggaaggaatgaaaggaatgccatcatctctagttcccagggcccagccttccccttctcccccggggcagggacagtgcggcatattcagattcagacctctttgggctgagccaccttgtgagtgcagttactgcctttgtgtggccgtgacctctatttgtttgcttttaatttgccaacctatcgctgctggcagcactttttgagcaagccgagagcacccattttggctgggggttcagatcgatggccttgtccatgttgtcctttctggcttccctgatggtgtcatgtttcagcgcatgcgccccagcctttcccatgtgccaaaccagaagctccactgcccgtaggctgtccctgtagccctgctccctccctggaggctgctcttctgattctgagagctggcctagtggtgctgagggcccctttctgcttctctgcccacctgctgagttgccactcgcagtgttgtcagttcccgtgttctgagaagaggtcatgcctgggaggaagggatcgtcatgctgcatcgaatcctctctccgccgtgtggcccccaggagagtagctgcctgttgcacctgctccacacctccccacagcctccctgcaggtgctgtgtggccgtgatgtgcagagagcagtgagggagggttcatgaaccaggtggatcctctttaaaaaaaaaaaagtttttgttatatctctagaacatttcaagtcttttcctttttttctgttcctagctatggggttttagagaagtgggaacaggaaggcatttgtctttttcttctagtttactacattttccttccgtagttcttcagctgtgtggaaacgggcatcacaaggacataggatcatagattgggtagggagggaggaggatttctggaacttttctcaaaggaatttggacccttataaatgggactgaaggtcaaaacaacagtgatatccttgcttagaaattgtcctcaaggaataaactctgagagcaagcccgggttggaaacagatgctttaaaatcctctctccagaacagtggttttttgtttgtttatttgagatggagtctcactctgtcacccaggctggagtgcagtggtgagatcttggctcactgcaacctccacctcccaggttcaagccattctcctgtctcagccccctgagtagctgggattacaggtgcccaccaccacacccggctaatttttgtatttttagtagagatggggtttcaccatgttggccaggctgatcttgaactcctgacctcaggtgatctgcctgccttggcctcccaaagtgctgggattataggtgtgagctaagatcagggattcttaaccttggctgcacaccagaatcacctggcaaattaaaaatacgtggacctgccaccagagcttgtgatttaatcagagtcggcatcagagttttcaattttttatttatttattattattattattattattattattattgagacaagatcttgctctgtcgcccagactggagtgcagtggtgtgatcacggcttgctgcagcctcgacctccctggttcaggccatcctgccacctcagcctcctgagtagtagggactacaggtaggcaccaccacacccagctaatacttttaatttttttttgtagagatagggtctcattatgttgcctggggtagtctcgaactcctaggctcaagcgatcctcctgcctcggcctcccaaagtgttgagattataggcgtgagccaccgtgcccagattcacagaagtttcatacacctttcacccaggttcccctaatgttaacagcttacatataaccttggtacatttatcaaaactaaaggtgcaatcatactaatagctagagtttatttggattttaccatttttcccaatgtcccttttctgctgcagcagccaatccaggatgccatactgcacttagagctgttgctttcttttttcctaactttatattttgaaataatttcagatgataggaagttgtaaaggtaagggccccacgcacccttcatctagtttccctccatggttacatcttatatggttgtaatgcagtattccaacaaagactctgacactggtgcgatgtgggtggacagtccaaatcatttgtcacatgtacatctgtgtaactaccactgcaatcaggataaagaagtcccatccccacaaggatctccctccccaccttccctaactcctggtaaccactaatcgttcatctcttcttattttgtcatttcaagaatgttgtataaatgggagcatagtgtgtaagcattcgggattgtcttttttcactcggcgtcattctcgggagatcatccaggcattgcatgtgtcaacagtttgctcctttttattgctgagtggtattccgtggtgtatgcattggccccctgaaggacacctgggatgtttccagtttggggctattccaaataaagctgctacgactatcttngagaaaaaaaa

SEQ ID NO: 719303 - DNA, 2433 bp, Homo sapiens
  misc_feature (2422)..(2422): n is a, c, g, or t
tgccaagaaaaaattcttcctgggtggggcgcagtggctcacgcctccaatcccaggtctttggaaggcccaggcaggcagatcacgagatcgggaggttcgagaccagcctggccaatatggtgaaactccatctctgctaaaaatacaaacattagctgggcgtggtggtgcgtgcctgtagtctcacatactcaggaggctgaggcagaagaatcgcctgaaccagctttgatgttaattctccttcccttgtctcctgtagggtccagccacagcaggcccggcgtcccggtggaaggcagccctgggcggaacccaggcgtttaacggctcactaggcagccccagatctgctgagttgccactcgcagtgttgtcagttcccgtgttctgagaagaggtcatgcctgggaggaagggatcgtcatgctgcatcgaatcctctctccgccgtgtggcccccaggagagtagctgcctgttgcacctgctccacacctccccacagcctccctgcaggtgctgtgtggccgtgatgtgcagagagcagtgagggagggttcatgaaccaggtggatcctctttaaaaaaaaaaaagtttttgttatatctctagaacatttcaagtcttttcctttttttctgttcctagctatggggttttagagaagtgggaacaggaaggcatttgtctttttcttctagtttactacattttccttccgtagttcttcagctgtgtggaaacgggcatcacaaggacataggatcatagattgggtagggagggaggaggatttctggaacttttctcaaaggaatttggacccttataaatgggactgaaggtcaaaacaacagtgatatccttgcttagaaattgtcctcaaggaataaactctgagagcaagcccgggttggaaacagatgctttaaaatcctctctccagaacagtggttttttgtttgtttatttgagatggagtctcactctgtcacccaggctggagtgcagtggtgagatcttggctcactgcaacctccacctcccaggttcaagccattctcctgtctcagccccctgagtagctgggattacaggtgcccaccaccacacccggctaatttttgtatttttagtagagatggggtttcaccatgttggccaggctgatcttgaactcctgacctcaggtgatctgcctgccttggcctcccaaagtgctgggattataggtgtgagctaagatcagggattcttaaccttggctgcacaccagaatcacctggcaaattaaaaatacgtggacctgccaccagagcttgtgatttaatcagagtcggcatcagagttttcaattttttatttatttattattattattattattattattattattgagacaagatcttgctctgtcgcccagactggagtgcagtggtgtgatcacggcttgctgcagcctcgacctccctggttcaggccatcctgccacctcagcctcctgagtagtagggactacaggtaggcaccaccacacccagctaatacttttaatttttttttgtagagatagggtctcattatgttgcctggggtagtctcgaactcctaggctcaagcgatcctcctgcctcggcctcccaaagtgttgagattataggcgtgagccaccgtgcccagattcacagaagtttcatacacctttcacccaggttcccctaatgttaacagcttacatataaccttggtacatttatcaaaactaaaggtgcaatcatactaatagctagagtttatttggattttaccatttttcccaatgtcccttttctgctgcagcagccaatccaggatgccatactgcacttagagctgttgctttcttttttcctaactttatattttgaaataatttcagatgataggaagttgtaaaggtaagggccccacgcacccttcatctagtttccctccatggttacatcttatatggttgtaatgcagtattccaacaaagactctgacactggtgcgatgtgggtggacagtccaaatcatttgtcacatgtacatctgtgtaactaccactgcaatcaggataaagaagtcccatccccacaaggatctccctccccaccttccctaactcctggtaaccactaatcgttcatctcttcttattttgtcatttcaagaatgttgtataaatgggagcatagtgtgtaagcattcgggattgtcttttttcactcggcgtcattctcgggagatcatccaggcattgcatgtgtcaacagtttgctcctttttattgctgagtggtattccgtggtgtatgcattggccccctgaaggacacctgggatgtttccagtttggggctattccaaataaagctgctacgactatcttngagaaaaaaaa

SEQ ID NO: 719304 - DNA, 2291 bp, Homo sapiens
tttttttttattttgagacggtcttgctctgtcatccaggctggagtacagtggcgcattcatggcttactgcagcctcaacttcccagactcaagtgttcctcccacctcagcctcctgagcagttgggactacaggcgcatgcaccacacccgtctaattattttatttttttgtaaagacacggtctctctatgttgcctaggctggtgttgaacttctggccttaagtgatcctcccgcctcagcctcctaaagtgctagggttacaggtgtgaatcactacatctggcctaaatttaaaaaagtttttagtctacatccagtgacctatcagggatgcttgttattttatacaagctgctttgttatcatatcagcattctcttcagccagctccaaggcagatagtcacccctctctctgtgtggttggggtgggagcaggccccgtggagggagcggtgctgaggacatgtccctggcgttccgatgctgctccatcgaggaccccctggcctcaggaggaaggagcaggcgatgcagccccttagtgtggtcgtgttgactgacaggtggctgatgcctgagcgcgccctcttcttccatcttaggagacaccgtggtgaagaggaagcctgcttctctgatggcccctctgaagcggaaggaggagttctccttgttcaaggtgtctgatgatgaatataaagtaacaatctcgcctcagctgctcttggccacccagcgcttcctgtcccgagaagtggatgtattcagcccgctgcgcatctctgagaaggtcctgctgcacctgttgaagcatcccagtgtcaaccaggaagtgaggtttgacgagagcaaccggctggccacacaccactacctgtaccagcgcagccagccggtggattacttcattctcatcctgcagggcagggttgaagtggagatcgggaaagagggtctgaagtttgagaatggggccttcacgtactatggagtgtcggccctaactgtgccatcctcggttcaccagtccccggtgtcctcgctccagcccatccgccatgacctgcagcccgacccaggtgacggcacgcattcatctgcgtattgtcccgactacaccgtgagggcgctctctgatctgcagctcatcaaggttacgcgactgcagtacctcaatgcactcctggctacccgagcccagaacctgccacagtcccctgagaacaccgacctgcaggttattccaggcagccagaccaggctccttggtgagaagaccaccacagcggcagggtccagccacagcaggcccggcgtcccggtggaaggcagccctgggcggaacccaggcgtttaacggctcactaggcagccccagatctggggaacagatgagcacgtggggagctggagtgagctgagcagaagttttgtgcccgcctgcccccatcccctccaggccacgttttagatggcccttgtagttgcgggtcctgggtgtcctcagaactagacatcaatgcctggatccttcagccggccctgccctcctttaggagacaggagtcaccagggcacagccctccaggcccgcctcaggaaggaatgaaaggaatgccatcatctctagttcccagggcccagccttccccttctcccccggggcagggacagtgcggcatattcagattcagacctctttgggctgagccaccttgtgagtgcagttactgcctttgtgtggccgtgacctctatttgtttgcttttaatttgccaacctatcgctgctggcagcactttttgagcaagccgagagcacccattttggctgggggttcagatcgatggccttgtccatgttgtcctttctggcttccctgatggtgtcatgtttcagcgcatgcgccccagcctttcccatgtgccaaaccagaagctccactgcccgtaggctgtccctgtagccctgctccctccctggaggctgctcttctgattctgagagctggcctagtggtgctgagggcccctttctgcttctctgcccacctgctgagttgccactcgcagtgttgtcagttcccgtgttctgagaagaggtcatgcctgggaggaagggatcgtcatgctgcatcgaaccctccctcactgctctctgcacatcacggccacacagcacctgcagggaggctgtggggaggtgtgaagcaggtgcaacaggcagctactctcctgggggcacacggcggagagaggattcgatgcagcgtgacgtcga

SEQ ID NO: 719305 - DNA, 1263 bp, Homo sapiens
  misc_feature (1252)..(1252): n is a, c, g, or t
tggaacggtgtctggcacacagcaagcatgcaataaatatttgaatatttattttaaaaagctattggttgtgagctaagatcagggattcttaaccttggctgcacaccagaatcacctggcaaattaaaaatacgtggacctgccaccagagcttgtgatttaatcagagtcggcatcagagttttcaattttttatttatttattattattattattattattattattattgagacaagatcttgctctgtcgcccagactggagtgcagtggtgtgatcacggcttgctgcagcctcgacctccctggttcaggccatcctgccacctcagcctcctgagtagtagggactacaggtaggcaccaccacacccagctaatacttttaatttttttttgtagagatagggtctcattatgttgcctggggtagtctcgaactcctaggctcaagcgatcctcctgcctcggcctcccaaagtgttgagattataggcgtgagccaccgtgcccagattcacagaagtttcatacacctttcacccaggttcccctaatgttaacagcttacatataaccttggtacatttatcaaaactaaaggtgcaatcatactaatagctagagtttatttggattttaccatttttcccaatgtcccttttctgctgcagcagccaatccaggatgccatactgcacttagagctgttgctttcttttttcctaactttatattttgaaataatttcagatgataggaagttgtaaaggtaagggccccacgcacccttcatctagtttccctccatggttacatcttatatggttgtaatgcagtattccaacaaagactctgacactggtgcgatgtgggtggacagtccaaatcatttgtcacatgtacatctgtgtaactaccactgcaatcaggataaagaagtcccatccccacaaggatctccctccccaccttccctaactcctggtaaccactaatcgttcatctcttcttattttgtcatttcaagaatgttgtataaatgggagcatagtgtgtaagcattcgggattgtcttttttcactcggcgtcattctcgggagatcatccaggcattgcatgtgtcaacagtttgctcctttttattgctgagtggtattccgtggtgtatgcattggccccctgaaggacacctgggatgtttccagtttggggctattccaaataaagctgctacgactatcttngagaaaaaaaa

SEQ ID NO: 719306 - DNA, 510 bp, Homo sapiens
  misc_feature (10)..(10): n is a, c, g, or t
gagacggggntctcacattcatccagatggattgtatggctgtgaccttggggcccggaggggcgcctcctccgtgggcatgaccatgttctgcctacgagggcaatggattacatctgccctgaacgaggacctgagctcctggaccgtggtggacagcgtggttcagatcacccagcgcaagtgggaggcggcccgtgtggcggagcagctgagagcctacctgggagggcctgtgcgtggatgtggctccgaagataccttggagaacgggaaggagacgctgcagcgcgcggacccccaaaagacacacgtgacccaccagcctgtctctgacccaatgaggccaccctgatgggtgctgggcccctgggcttctaccctgcggagatcagattgaccttggcagtgggatggcgaggaccaaattcagtacattgagcttgtggagaccagaccaggaggagatagaaccttccagaatgtgggcaggtgtggtggttggcttct

SEQ ID NO: 719307 - DNA, 742 bp, Homo sapiens
  misc_feature (731)..(731): n is a, c, g, or t
gcttacagtggcgagggttcaggatgtcacttgttcttcggcctgcctctggctgatcttgggattgggctatcaagcccaatcccaggagaaggacaacgatccgaaccagacggatgaggaagtgttccatttcctgggattgggctatcaagatagcccaatccaggatgccatactgcacttagagctgttgctttcttttttcctaactttatattttgaaataatttcagatgataggaagttgtaaaggtaagggccccacgcacccttcatctagtttccctccatggttacatcttatatggttgtaatgcagtattccaacaaagactctgacactggtgcgatgtgggtggacagtccaaatcatttgtcacatgtacatctgtgtaactaccactgcaatcaggataaagaagtcccatccccacaaggatctccctccccaccttccctaactcctggtaaccactaatcgttcatctcttcttattttgtcatttcaagaatgttgtataaatgggagcatagtgtgtaagcattcgggattgtcttttttcactcggcgtcattctcgggagatcatccaggcattgcatgtgtcaacagtttgctcctttttattgctgagtggtattccgtggtgtatgcattggccccctgaaggacacctgggatgtttccagtttggggctattccaaataaagctgctacgactatcttngagaaaaaaaa

SEQ ID NO: 719308 - DNA, 137 bp, Homo sapiens
cgtacttgcgcgggatataaggtacatgggagggtgctgaagactcacaacagccacagaattagttacttgttcgaagcttacagcttgttttccaggcatcgaataactgttgagattgttctactgttgtcgta

SEQ ID NO: 719309 - DNA, 325 bp, Homo sapiens
agcgctgagcaatcatcataaagggtatttctaggccaaatatgcagataattaggttccagggcataatctccgttcttagggggaatagtcaactccatgtacccatgaggaacgtactggctgacggtaatcaaagcgaggttccttcatcaggtgagatctgacagtggaataggctccatcacattcctacaaggaggtcacaagttgacatcttggggaccttggtcagatccaagcacggtgatcattccttcctcgggatttacatttcaacagccgggggctaaagtgcattttcacatgggggtatggcccaggg

SEQ ID NO: 719310 - DNA, 1014 bp, Homo sapiens
  misc_feature (968)..(968): n is a, c, g, or t
  misc_feature (983)..(983): n is a, c, g, or t
  misc_feature (1009)..(1009): n is a, c, g, or t
tttttttttattttgagacggtcttgctctgtcatccaggctggagtacagtggcgcattcatggcttactgcagcctcaacttcccagactcaagtgttcctcccacctcagcctcctgagcagttgggactacaggcgcatgcaccacacccgtctaattattttatttttttgtaaagacacggtctctctatgttgcctaggctggtgttgaacttctggccttaagtgatcctcccgcctcagcctcctaaagtgctagggttacaggtgtgaatcactacatctggcctaaatttaaaaaagtttttagtctacatccagtgacctatcagggatgcttgttattttatacaagctgctttgttatcatatcagcattctcttcagccagctccaaggcagatagtcacccctctctctgtgtggttggggtgggagcaggccccgtggagggagcggtgctgaggacatgtccctggcgttccgatgctgctccatcgaggaccccctggcctcaggaggaaggagcaggcgatgcagccccttagtgtggtcgtgttgactgacaggtggctgatgcctgagcgcgccctcttcttccatcttaggagacaccgtggtgaagaggaagcctgcttctctgatggcccctctgaagcggaaggaggagttctccttgttcaaggtgtctgatgatgaatataaagtaacaatctcgcctcagctgctcttggccacccagcgcttcctgtcccgagaagtggatgtattcagcccgctgcgcatctctgagaaggtcctgctgcacctgttgaagcatcccagtgtcaaccaggaagtgaggtttgacgagagcaaccggctggccacacaccactacctgtaccagcgcagccagccggtggattacttcattctcatcctgcaggtagctgtgggtcccaggcctggagtccctcctgnttcctcaggccaggnaagggtctaggagaagaggggagcangggcc

SEQ ID NO: 719311 - DNA, 231 bp, Homo sapiens
cggagatcgcgccactgcactgcagcctgggcaagagcgagactctgtctcaaaaaaaaaaagaatccttcctcccaaaatgaaactatcattaatatccttaatcatttttattgccacaactaacctcctcggactcctgcctcactcatttacaccaaccaatatcaccataattacccccatactcctgcctcactcatttacaccaaccaatatcaccataaatac

SEQ ID NO: 719312 - DNA, 2101 bp, Homo sapiens
  misc_feature (1307)..(1307): n is a, c, g, or t
ctcataacgttgcctcattgccacttgatagataactcaatacaaccgtctgtctaaaattacccgcgtatgtgtgaagtgattcatatatagaagcgctgccggcatcaacagactcccagcacgttgatcattgaggcacgaatgatccagacgtcatgagtcaagtcaagtcatgagcagtagcgcgctgatgtagcggctatactctcgtccctgcggggcacctcagctggggacaactccttccgtccattgtataacctcgcggtaagtaccgtctcatcatttcaagcacagggccatttcgagtcctgtcccagagtgctggcgcggtagaaaagtttgcagtcgacaggtgcgatcatggggcgcgccaagggacatacttaggctcatgaggtgtaaggattacgtcctcccaatttcaacgcgacgttacagactccattacgggagcgaaagtccgctgttattgtgggggtcctcgctgtcacgcggtctcataaacaaatatctgcacttacaacttgcgatatccagaggtccatattgttgctacagcgagtacagagagtcgctaacttcgtgaagagaaaatattctgggaatacacaaattgagtcggtgatacctcaggcaaatgtgtctgccgcgaatgaattccaccatgtgggggaacagcattcaaaataccgcaatttgttcttggcaagatcaaggagatgaaacgcaaagcgctaatgaaatgggaggttccccgctactgtagcaccaacttttgtgccattaagcggccggataagtaccaggggatgtgaattaccaagtgcggttgcgataccccgcactaattctgtgcccacgtaaaggtccgttgggcactatgcgctaccacgtacaccgagcttgagtgggggtaactcacgtatttctatcatccgatgaggtataggacatattaagagatacacttcatcaacattaacataacaagcgggttctgggccccaacacttcactcgtgggtgttgtggaggaatccgattcatctaacgacaacgagaaagagttcgccaacaatcatcttattgcccggtgttgtacacaccactagacgtgacatttccactgataagatatgccagagagaacatatagccacatcatactcaaagagagcagtcccaagatgtctatatagtgcacactgaggcgtcattgtcacaaccgtgtataaggttaaaattcaacatatcagaaatattacacagaaactaacagaaattgtcgggcggggtgtcccncgagggtctaatagcgggggagggaccccaaataacacgtcgacgagtccaataacaacgggaattgacaatacaaggtcaagcggagcatagaataaaaaagacgagaaagaaagaaagatatatgtgacaccaacaaccaggtacagcgcgggagccaatatgaaagagtgggagaacaagagaaaccacaacagaacactaagaagaacgacgacgaagaggagacgacacacaacaacgaagtgcgcacacgacacagaacaggaggagccaaaagagacgacacgagtgcgatagacaacacgaccgaaagcgagaaagactagggcaaggaggcccagaaagaacagcaggaagagacagaaagagagggcacaacgtagacgaaggacagaacaacgagcgaaagagacggagagacaaagcgaggcgcgagacggaggacgacgcggagagaatgaggaaggagagcaagacagcaaaagaaagggaacaaggaaaacaggaaagaaggacaaaggatacgaaagagagcagacagaggagacagaaagaagagcaacgcacagcgagcgcgaggacgaagtcacgaagcagcggagaggagaagagaagcgagaagaggcagagcagaacggcagagagaaggagaagcagagaagagagaagggaaggaggaggaaaaggagaaagcgacagacagacaagcagagagagaagaagaagaggcaaagacgagacgaagaggaaagagagaggggaagaggagaggagagcagagggagagaggt

SEQ ID NO: 719313 - DNA, 312 bp, Homo sapiens
caggtggttttttcccccaaaaaaaaaatttaagtgtttattgcaggagaaacgtcccttgcccctcccccctctcatcaggccaagtggagggttggccagagggcctgcacatgcaaaatccagtcccctcccttaaaaaagctgaaaagggtcccccggttttttttttcagggctttgcatgggctttattccccctttgcctctcccccccttttttggggcaaggaaaagcagctgttttgggtaacaagctcttttggccagggtttgttcatgtaaaaaaaaatttcttttccttttgcaaata

SEQ ID NO: 719314 - DNA, 541 bp, Homo sapiens
  misc_feature (530)..(530): n is a, c, g, or t
gtacatatctatactgacgcgagtgaaaaaagacaatcccgaatgcttacacactatgctcccatttatacaacattcttgaaatgacaaaataagaagagatgaacgattagtggttaccaggagttagggaaggtggggagggagatccttgtgggtggacagtccaaatcatttgtcacatgtacatctgtgtaactaccactgcaatcaggataaagaagtcccatccccacaaggatctccctccccaccttccctaactcctggtaaccactaatcgttcatctcttcttattttgtcatttcaagaatgttgtataaatgggagcatagtgtgtaagcattcgggattgtcttttttcactcggcgtcattctcgggagatcatccaggcattgcatgtgtcaacagtttgctcctttttattgctgagtggtattccgtggtgtatgcattggccccctgaaggacacctgggatgtttccagtttggggctattccaaataaagctgctacgactatcttngagaaaaaaaa

SEQ ID NO: 719315 - DNA, 97 bp, Homo sapiens
gcggccgcctactactactactgctcgaattcaagcttctaacgatgtacggggacatgatgactcaaggccaataataaagacatttcctacctgc

SEQ ID NO: 719316 - DNA, 256 bp, Homo sapiens
  misc_feature (150)..(150): n is a, c, g, or t
  misc_feature (207)..(207): n is a, c, g, or t
  misc_feature (218)..(218): n is a, c, g, or t
gaagaaagatacacaatgcaaacagtaattgtaagaaatctggaggggctatatttaatatcagacaaaattgacgttaaaacaccaaaaagttactagagataaagagcaaaattttataatgataaaaggatcaatccataaggaggntatagaaattataaacacatatgcaccttaaccacagaccactaaaatacatgaagncaaaaaatggngaaacttgacagagaaatatacaattcaacattaatag

SEQ ID NO: 719317 - DNA, 205 bp, Homo sapiens
tgtgtcatgcactacggtggttgagtcagctcgcccaagatgagctgcagccccccagagagagctctgaatgtcaccaagtaagcaggccccagcctccaggccccaatccgccatgctctccccgctctggatcctgcactactaacactcgactctgctgctcatgggaagaacagaattgctcctgcatgaacagagccag

SEQ ID NO: 719318 - DNA, 210 bp, Homo sapiens
  misc_feature (155)..(155): n is a, c, g, or t
tcaagcttctaacgatgtacggggacatgcacaaacggtaagttcttgtgtgttggctgcgtccactgttcctcttgccacgcctacaggaggaaaaacgcaagggcttacaagaaggcatgttccgttcaggagggaaggcagcacctaaaagncactctgaagtcaacgatgagctgggaaaccatctcaataaacacattttggaca

SEQ ID NO: 719319 - DNA, 764 bp, Homo sapiens
gaacttgaaagaaaaatcatctgtgagtcccttcaggttctcactcatagtcatgatccttcaagagggaatatgcatgcgagttaaagtaagggctatgatattggagggtcccaaagtacggcaggctgaaaaagtagtgaaggaaatgtgtctcaacgtgtctgggaaaaaattagttaggaatttggatgggtaaaaggtacccttgctttactccatcttattttcttagcccccttgtgagtgttaacactggtttcatgtcctagtaggaagtgcatctccatcctcatcctctgccctcccaggaagtcagtgatggtctttcggggcttcccctccaaaggaccttctgcagtgaagtgccacatccagttctttctttgtggctgctgtgtcagataatggaagagatcttgtgtgccacaccaggattttttttttaaaagaaaacctatagttgaaaaatttactaagtgaacgggtgttgtactgtggtctgggggggtggcaacattttaaacaataacagggtaggccccccttaagggaggcttgagaatcctgtggtcccctgtagacaattttcacaatggagtgtggctaattcacttaaccaagaacaaccacccaccgcaacgaacacacataacaatcaacatgacgagcagaccacagatacgcactgaaaaacacaacacaacaatgttggggggcgcgccgccaaaattataacaaccgtttgggcggccaatgatgaa

SEQ ID NO: 719320 - DNA, 339 bp, Homo sapiens
  misc_feature (39)..(39): n is a, c, g, or t
  misc_feature (46)..(46): n is a, c, g, or t
  misc_feature (52)..(52): n is a, c, g, or t
  misc_feature (81)..(81): n is a, c, g, or t
  misc_feature (99)..(99): n is a, c, g, or t
  misc_feature (117)..(118): n is a, c, g, or t
  misc_feature (171)..(171): n is a, c, g, or t
  misc_feature (181)..(181): n is a, c, g, or t
  misc_feature (214)..(214): n is a, c, g, or t
  misc_feature (241)..(241): n is a, c, g, or t
  misc_feature (271)..(271): n is a, c, g, or t
aaagttttattttgagtttttctttttgggcattgtccncaagccngtattntccaggaaacttgtccttttggaaatcanattgaatgatatttttanatccaagtgaggtagggnnggtattaaagtgaaagggaaggtgatgcctttattttgggttatgcttgaagngttaaatggntaagtattaaaattatcccaattaaatccttancagtcagaacccttgcttccctaaaanatgcccactgccaatcatgttgggctgagntaatttgttcctctttttgaaactattaaggtaaaaaattaccaataaaaatttttttataaaggcca

SEQ ID NO: 719321 - DNA, 698 bp, Homo sapiens
aagaagttgattccagccctcatggatgactttgagggctcaggatgtcagtggaggaagtccctgcagatgtggtagaaatcacaagacaactagaattagaattagggccttaaggtgagatgaaattgctgtaaactcatgatgaaacttgaacaaatagggagttgcttcttatggatgagcaaagaaaatattttcttgagatggaatataatccaggtggagatgctatcaacattgttgaaatgacaacaaaggatttagaatattccataaacctagttgataaagcagcagcagggtttgagagggtttactccaaattttgaaagaagttctactgttgataaaatgctgtcaacagcatcacatgctacagggaaatctttcgtgacaaggaacaaacttcactgtcttcaaccaattgacacaggcttccaaccttcagcaggccccacactgattagccaagcagtcatcaatatagaggcaagaactctcacagcaaaaagattatgacttggtaaggtcagatattcattagcatttctaagcacctgacgtattttaacttaaggtatgtacaaaagtttattagacatgctataaaataactaactttaataactattaaataactcattaaaactaacaatatagttaaaggcataacttatataaagcatgtgaattag

SEQ ID NO: 719322 - DNA, 284 bp, Homo sapiens
  misc_feature (25)..(25): n is a, c, g, or t
acttaaaaaagttgggctggatatnagtgtggcgcctgtaatcccagcactttgagaggctcaggccggagggtcgcttgagcccaggagtttgataccctgtctgagagagaattagctgggcatgttagtgtgcgcctgtggtcccagctactcaggaggcggggcgagagggatccttccaggctgagatgtgagggttctttgagcccaggaggtccatactgcagtgagccatgattgggccactgcattctagcctcagtgacagagtgagactgttt

SEQ ID NO: 719323 - DNA, 251 bp, Homo sapiens
  misc_feature (53)..(53): n is a, c, g, or t
tccgacggtaccaacagcatggtggtggaacacccgagttcctcaaggcaggnaaggagcctggctgcagatctggcgtgtggagaagttcgatctggtgcccgtgcccaacaaactttatggagacttcttcacgggggaaggctaaggttaatcctgaagacagtgcagctgaggaacggacaatctgcagtatgacctccgactacttggctgggccaatgaggtgcagccaaggatgagaagcgggg

SEQ ID NO: 719324 - DNA, 348 bp, Homo sapiens
  misc_feature (53)..(53): n is a, c, g, or t
  misc_feature (66)..(66): n is a, c, g, or t
  misc_feature (81)..(81): n is a, c, g, or t
gcagggagtaagcactcagtgaatgggagagcctattcctggagatgagttcncagcaggatcctnatgctgtcagagccnaggggccttgcatctgaaaggtagttcagagctgcagggccttaggctggagctgacaaggtcagaagaggtaggaaggttccctggggtagtatacccaagaaagtgcaggtaaaggtttaggacagagccttgagcagcactcacctttaggctcaggaggaagcaagaatcccagagaggagatagaaagggggaggacggtggggctggaaacagatggcagggcaagaaacccaccactcccaagaagggcggcggcacccc

SEQ ID NO: 719325 - DNA, 616 bp, Homo sapiens
  misc_feature (198)..(198): n is a, c, g, or t
  misc_feature (216)..(216): n is a, c, g, or t
  misc_feature (234)..(234): n is a, c, g, or t
  misc_feature (284)..(284): n is a, c, g, or t
  misc_feature (328)..(328): n is a, c, g, or t
  misc_feature (337)..(337): n is a, c, g, or t
  misc_feature (343)..(343): n is a, c, g, or t
  misc_feature (349)..(349): n is a, c, g, or t
  misc_feature (371)..(371): n is a, c, g, or t
  misc_feature (381)..(381): n is a, c, g, or t
  misc_feature (386)..(386): n is a, c, g, or t
  misc_feature (401)..(401): n is a, c, g, or t
  misc_feature (415)..(415): n is a, c, g, or t
  misc_feature (420)..(420): n is a, c, g, or t
  misc_feature (431)..(431): n is a, c, g, or t
  misc_feature (434)..(434): n is a, c, g, or t
  misc_feature (447)..(447): n is a, c, g, or t
  misc_feature (450)..(450): n is a, c, g, or t
  misc_feature (463)..(463): n is a, c, g, or t
ctgagtacatcttctactatcctattattagcttctatctcttagtgtaacttcaaaacttttaagagcagtgaagttggtcaggtacactgtggccaccgttattacaacctaaagaaaacattcgttccctgttcattgattttaggggccagatctaacattgtagtgtctttcaccagatagacttctactgtntcatcaaactcccttctnaactagacctagactttntactccaatcaggctaatctacttactgaatgtgacatatttattcctanttccatacctttgcacatgccctactctccactaattatacttnaaagtccanaaattntttctntagtaacagacttaggtactgnctaagcagtnattancacaatattccttanttttcatatgtggntattnatatgtctatntanatgtatatttatnttntatgtatgtaacnatgtaaatatggtttgcaggggtcgtacgtagtggcaatctcgtgctttccgtatgagttgtaagctccttgagagcaggatccatgtcatccttgattatataaattattcccctatcattcctttaagtgctagtgctagtcattatgtgt

SEQ ID NO: 719326 - DNA, 374 bp, Homo sapiens
ccacgattgcagtggtggggcacgaggcagtgggggataagctgttaacatgagggtgtttctcgttgtaaatagggcttttactgttgttaatgtgatggtgtgagtcatgccccattgtgcttgtggctaaatatatccagggagtatatggctgtgtactagtatgttgagtcctgtaagcaggagactgatattagatcaggagaacgtggttactagcacagagagttctcccactatgttaatagtggggggtataggcgaggttatcgaggcttgctagaagtcttcaaaaagctattagtgggagtagagtttgaagtccttgagagaggattatgatgcgactgtgagcccaccactggctcgtg

SEQ ID NO: 719327 - DNA, 145 bp, Homo sapiens
gcagtttaattttcttgttttgtatttcgttgttgtggtttctgtagtacaattttaaaagcatcagttaagcctaggtaaattttacctaggaatttggccttgaagggcccaacagtttacttcagcatttttttggaggaca

SEQ ID NO: 719328 - DNA, 605 bp, Homo sapiens
  misc_feature (198)..(198): n is a, c, g, or t
  misc_feature (216)..(216): n is a, c, g, or t
  misc_feature (234)..(234): n is a, c, g, or t
  misc_feature (284)..(284): n is a, c, g, or t
  misc_feature (328)..(328): n is a, c, g, or t
  misc_feature (337)..(337): n is a, c, g, or t
  misc_feature (343)..(343): n is a, c, g, or t
  misc_feature (349)..(349): n is a, c, g, or t
  misc_feature (371)..(371): n is a, c, g, or t
  misc_feature (381)..(381): n is a, c, g, or t
  misc_feature (386)..(386): n is a, c, g, or t
  misc_feature (401)..(401): n is a, c, g, or t
  misc_feature (415)..(415): n is a, c, g, or t
  misc_feature (420)..(420): n is a, c, g, or t
  misc_feature (431)..(431): n is a, c, g, or t
  misc_feature (434)..(434): n is a, c, g, or t
  misc_feature (447)..(447): n is a, c, g, or t
  misc_feature (450)..(450): n is a, c, g, or t
  misc_feature (463)..(463): n is a, c, g, or t
ctgagtacatcttctactatcctattattagcttctatctcttagtgtaacttcaaaacttttaagagcagtgaagttggtcaggtacactgtggccaccgttattacaacctaaagaaaacattcgttccctgttcattgattttaggggccagatctaacattgtagtgtctttcaccagatagacttctactgtntcatcaaactcccttctnaactagacctagactttntactccaatcaggctaatctacttactgaatgtgacatatttattcctanttccatacctttgcacatgccctactctccactaattatacttnaaagtccanaaattntttctntagtaacagacttaggtactgnctaagcagtnattancacaatattccttanttttcatatgtggntattnatatgtctatntanatgtatatttatnttntatgtatgtaacnatgtaaatatggatatagcagttgttttatcgatgtggaataatgtctgttcagtataagatgtaagcatccatgtgagacgcaggattccatggtcaattccgttatatatttactatattattccccctatcattgccgt

SEQ ID NO: 719329 - DNA, 679 bp, Homo sapiens
aagcattcagggcaagcgatggatcaactaggccagtgacccgcaagaatgggtacccgatcttgaccatcactatcactgcctactttatataaaggctaataaggaaggagtataatgtatggctttaccaagctacatcaagaactcagctgagctgtgcctaccaggggtcccctatcttacccaggactccattcttctccttgaatatatatgtccattataacacttcctggttgcaagagtgatgtgcctccattatttcctccacagtattggtatttgtcagacatttgttctgctgtctatcaaatccagccaacgtctgcacaagaagtaggggccatctccactgggacccataagttatacttccttgtcatttgataggatagtatacaaggaaacccctccatatttggccctatctcagaaatggagagctagtcgtgaaaaactgcttcctgaaactttcctgctatatgccttaaagctacgtcttgaacctgagtacggaaaggattcttttccaggaacttacggcgataggctttgacttgggacgttcttccagactcacagttgacacatgatggctggtacgagctcgatcctattctgtctacggatccaagcctagcacttaatcaaaaaatatcctaccacactcgccagc

SEQ ID NO: 719330 - DNA, 337 bp, Homo sapiens
  misc_feature (117)..(117): n is a, c, g, or t
  misc_feature (171)..(171): n is a, c, g, or t
ctgttcctgtcctgggaatgagagcaaggtgggtaccgtgtcacgctcttaccctaagtccaactcttccaaggagtatgtgtgacctgggatctccttgccccagcctgacacgantgggagtgtctagatgcctgacaggccgtgggcgtgagctcagcatgtggcagnggtgcgtgacaaaggcctcctggtcactctgtccctgcactccatgtatagtcctcttgggtccggggcccgggggtgccgttggtgggagagacaaaaagagggagagtgtgctttttgtacagtaataaaaaataagtattgggaagcaggcttttttcccttc

SEQ ID NO: 719331 - DNA, 796 bp, Homo sapiens
  misc_feature (794)..(794): n is a, c, g, or t
  misc_feature (796)..(796): n is a, c, g, or t
aacaaaaaacactttatttataaaaaaataaataatacattttgtgagtatttgagacatagatgatgaataagaggatgtactaaacaaagataagatatcagtaaacatatacagcaagatcgaataacatgcatactacacaacacagtaactcagaataaacatagcatatcaatattagctatactacgctagtataaaaacaacaacacaacacagacacatatcaaacgcaactgaatacaagagtaagaattcagtaacagtatacttataaaaaacaaaacataatgttattgatgtagacatgcaagcgagatgcaagatgaactcgtcaagggatatgcatgtcagtgagtataagagtatattagataggagaccggacggagagatatgacttagtgtgataacgtgtactacagtttcatagtgtagagtttaataaatagcttgaatatagtattgttataggatgtaagaaaaagaatttggtgtaatttattagaagaaagttcaacgtattacagcgagtaagaggatgtttctgccttaattgatgagatcttatgattccacgacgtcgcgttagtaccgagatagttaatctcataatgcaatagacattagatgacagttcagtagtagttagagtcttaatggtaattattccagtttatcttttaactctttctactctaagagacgcgtagctgaacatgagcctcctcttctacatacttcatacacataagctatctgtagatatagcttagatcacactcacaatntn

SEQ ID NO: 719332 - DNA, 203 bp, Homo sapiens
gtatgccgaggctgagcatctgtatatatttgacttccaattgagatgtggcttcatttctttgtttaccccaataaatcgcccaatccttagcacgtgtgactctgtattaagcccaaggagaaagctgagactgtgggtctggcctccattccagacaatatgtctggctcagtcagaaccacctgtcgaagggggtaccg

SEQ ID NO: 719333 - DNA, 116 bp, Homo sapiens
aatgcggagccgtggaggacatccaattcaataccgacgtatggatataaacgatcgcaaaaacatcgatctgagccagtttacgcgcggcggttacattatgccggggacttacg

SEQ ID NO: 719334 - DNA, 153 bp, Homo sapiens
gagctcggtacccaatttggcggggctttaaatcgtttgaacccgggagtggaggttacagtgagccaagatcacgccactgcactccatcctgggggacagagggagactccatctcaaaaagcaaacaaaacaaaactgaggctgcctaga

SEQ ID NO: 719335 - DNA, 553 bp, Homo sapiens
ccagatttaagaaaactaaacggatataacgttagaaaaaattacataaactttattaacaactgctgtttaagcctacctttgacttacctcttttaatatagttaatatgtttaatatatatatttaatatagttaatacaaatacaaaaaaataacagtgtatgagacattaacattaacatgaagagtacatgatcaattttgggaaaatattgagaaacaaagttaaaatcggtagttgccttaatgtcctaaatacctcaacacgggctgggtgcagtggcttacgcctataatcccagcactttgggaggctgaggcaggtggatcacctgtggttgagagttcaagaccagtctggccaacatggtgaaacctcgtctctattaaaaatataaaaattagccaggtgtggtggcatacacccataatcccggctactcaggagactgaggcaggagaatcatttgaatttggaaggtggaggtggcagtgagtcgagatcgtgccactgccttccagcctgggtgacagagcaagactctgtctc

SEQ ID NO: 719336 - DNA, 510 bp, Homo sapiens
  misc_feature (17)..(17): n is a, c, g, or t
  misc_feature (33)..(33): n is a, c, g, or t
  misc_feature (42)..(42): n is a, c, g, or t
  misc_feature (121)..(121): n is a, c, g, or t
  misc_feature (134)..(134): n is a, c, g, or t
  misc_feature (142)..(142): n is a, c, g, or t
  misc_feature (175)..(175): n is a, c, g, or t
  misc_feature (500)..(500): n is a, c, g, or t
ttctgaaccctgctggnatctttgaagtttgcnaggtcatanaatcaagacatgaaaaggcttctcttccaacgtcattggtcccctggctcccttttacagatgagaacacaggtcccanaggtggagaaatnactcctancagggtcaatagaatttgttagtgcagctcaanatgggacttaaactcaggcctcctgatcacccattccccaggctaggaaacaggtctctgctcggtgtggtggttcatacctgtaatcgcaacactttgggaggctgaggcaggagcattgcttgagcccaggagttcgagaccagtctgagcaacatagtgggaccctgtctctacaaaaacttttaaaattagctgggcatggtggcacacatctgtattcccagctactcaggaagctgagacaggaggatcgcttgagcccaggagttggaggttactgaactatggtcgcaccactgcactccaagcttggtgacaagtntgccctcaaa

SEQ ID NO: 719337 - DNA, 133 bp, Homo sapiens
acaaaggcaaagttgaaagaaaaggcacagttaacaaaacaagggtggctagatttatcttgggtgatgtgaggacatccagagaggaatgctcttgtaaaggtggtctgtggatctgtctgaatagaaagag

SEQ ID NO: 719338 - DNA, 233 bp, Homo sapiens
cccaagtaaagtgaagggggtaagggggtgggagggtaaaagtttttccaagttgtggcaaaggaaactaaccttttcctttttaaaaatgtaaataaaaaagtttttaccgggtttatatagatttccctataaataagccttttaagactggcaaatgttgaactggacaaacatttatcagcaaaactgcccagtttttttggggctgaagttctgtaagtagaattcca

SEQ ID NO: 719339 - DNA, 624 bp, Homo sapiens
cggaaacaagagcagaaaaggaagccgatggtccttccccatgggtcgttctgggaagcactggcgtagactttttcctcaaatcacagccgtgtgaaagacagcaccaatcactgccatggatttcctttcatatctcttaccctttgactcaaacagaacaggcaccgaatttagcattctgctcttgagttcatggtgatataccatggctaagagtaactttgggtcaattttctccaggccacagagagcctgagcgatgaagcagctgctggataggtctgtagacgacctcagagcaggaggagctaccctctagcctgtgtggcctgtgagtcaccagcgccagcctcagcagcactggtcctgcccgtgcgggtccctgcgtgagcccctctcaacctgggccgaggactcgacttcattcacaggatggccagtgacctggcacagatgcagagaacttttggttccctggatgctgctctttctaaaacagtgtctttggctgggcacagtcgtcacgcctgtaatcctagcacttttggaggccaaggcaagtggattgcttgaacctggggggacaagaccagcctgggcgacagagtgagactccatctc

SEQ ID NO: 719340 - DNA, 550 bp, Homo sapiens
tctcgggtaccataccccctcggccacgcgcccacacgtcagctgtctccagcccccccgggctgaggaggagatcaggccagatggcactggacccctcatttgcaatacccgggggtgcctcacgacgagagcgagaaggatcgaagagttgcgcagagaataccagacgactcgatatacaccgtgaacgatgctacgcacgcatgacacaagctcgggctacgtgcagagcatgcattcgtggcgacacgacgcagtgcactacctcatccaagcaggcctctgtgccatcacgaccacctaagatactgctcaaaccccgcagagtgagtcacaggacacccatggccccgagcggcctggagttccacgtgcaaataccatgacacaatacgtcacagagcgactgcgcaacgcaaacgggtcaggcaagccaccgcgacataataacctatgcctgcccagaagcagaccattacgtacaaaggaagcgctaccaagctgcatatcctgccggtgagggaccaaagccccagaagaagcctaa

SEQ ID NO: 719341 - DNA, 420 bp, Homo sapiens
  misc_feature (60)..(60): n is a, c, g, or t
  misc_feature (62)..(62): n is a, c, g, or t
  misc_feature (101)..(101): n is a, c, g, or t
  misc_feature (103)..(103): n is a, c, g, or t
tttggctgtgggaggaagaaaggctagcgggcgttggccgtatgtgggtgtcttgaggcngnttttcagttctttcatttaccaaagtgacatgcacctantnggtgccaggtgtttagacgtacatacaaccctctgcaaaatctttcagtgtagtcctctgtatgaaaagtttccagccaagaattgccactgcacctgagataagggggatcctggccattaaggaaaccttgccttcgaaactgagccgtgaggaactatacaaaatgggaaattgggacaaatcccagtggctcatgacactaagaagtaaattacgaactcactgagctggaagtcattcaacgggaattgataggtaagctactatactgggaaatgaaggagtaggaaagaaggaaacctcaagttacaaac

SEQ ID NO: 719342 - DNA, 369 bp, Homo sapiens
ggcgctttccgattggacagcgtcacccgctagaagttcgccgcagaagatgagggcggcgatcacgtccatcgcgtctcgtggcgcgaagccggccaataaatgctgtttggaggcccactttccagccaagaattgccactgcacctgagataagggggatcctggccattaaggaaaccttgccttcgaaactgagccgtgaggaactatacaaaatgggaaattgggacaaatcccagtggctcatgacactaagaagtaaattacgaactcactgagctggaagtcattcaacgggaattgataggtaagctactatactgggaaatgaaggagtaggaaagaaggaaacctcaagttacaaac

SEQ ID NO: 719343 - DNA, 185 bp, Homo sapiens
cgaggcaggctgtgaggaaaaaaggcatgagggctcgtcttcggaatctgtgccacccggcactaccgtttcgagggtgaagctcctcgacaccatgggggacacttttcctcagaagctggtcgccgccgtcagctaccagagattcactgactgctataagtgcttctaccaggtgcagcctg

SEQ ID NO: 719344 - DNA, 172 bp, Homo sapiens
cacggttacttccggactacgaaggctgtgtcaggaaggacacgagtcacaggagtggcagcctctatccaggttctgacagacacacacagggtcctaggagagcaagggtggggcactggagcataggggcaaccacccagaagagtcagtgcgggtttgagagatgtgg

SEQ ID NO: 719345 - DNA, 836 bp, Homo sapiens
caagatgctggtatactgagcataacatttactgaagacatggggctgctgccctgcctcctgtatcagttctaaagttcaaggtagggcatttttcagggatctgaagccactggtacgtggactactcactcctttctcctccccaagaagattttcattaaaaactcgtttgcatctttgaagaataagcatagcagttgttttgaaagaacgtgcatatacgtgaaagtggcttttaagggaagattacagtgttagagatggtggcgttgatccagtgtgtgctgcccactgccatgagagctgtttgacaactacatgcaacaagatgcccatgaattcttaaattacctactcaatacaattgctgatattctacaagaagaaagaaaacaggagaagcaaaatggccgattacggaacggagacgtggacaacgaggataacaacagcacaccagacccaacctgggtccacgagatctttcagggaacattaactaatgaaaccaggtgtcttacttgtgaaactataagcagcaaagatgaagattttttagacctttctgttgacgtggaacaaaacacatcaattactcactgcttaagagggttcagtaaacacagaaactctgtgcagtgaatataagtactactgtgaagagtgcccggagcaagcagggaagcacacaaagcggattgaacgttagaaaatggcccgatcctgggtctggacctgaaagaggttagtctttgggccattcccgggaacgaaactttaacggggggatcctaaaacccgtgtcacgttgggagggacaaccggaatttgcc

SEQ ID NO: 719346 - DNA, 127 bp, Homo sapiens
cgctaagaggggaggtagctcccaccattttatgggtgcatggcaccctcgagcagacatcatgtgggacgggagatactgatgcaggcatcttaggaaacattctacttagctacttatatgctag

SEQ ID NO: 719347 - DNA, 912 bp, Homo sapiens
ctctcgcgtttcggcccgctgaatactgttggtcgagacaatacgggagaagctctaaaattactcatcgcgtgaagcaccgtacatggatacaacaaggaatagacaatattactgatgatcgtagttaaagtgcttacactatctttctgatgtgacatctgttcactgtcgaggctattgatctctccagcgcaataatatcaaacaagttcgtaatagctaggaagaactattaaataagattgtcttgtggtatatggattgccttcgaccttaaccggaatcatttcaaatgatctcgcgcatacagtaagaagacgcctatcaaagctaggggcataaacagggagcgttctcggcgagggaagttttttaagcgtttgcgagaactcctcatgccaccctgtgcttggagtccctgaggactactgagccggcaggtgggttgaattgacaccctctatgccttcaacagtggcaaacggtaagagcggaaaccaggacctctgaggactgttctggggccaaaacagcctgatttaagcaggctaatgaagcccgagctactgacgaacaattacaagttgtaggtgcctacagtggagatgacctttcacacgagcctgacccaattcacagacaactcacttttgacggacactggccaaaagttgctaacaaatcgcgggtgaatgaggtggagcttctgttgatggaggccctttacgatggggcttgggtgaacgggcatattaagacgaggtggacaacagaagtccacatgacctgtgttgcagccccgagtgtaggatttggaaaagatcacagggattgacaggaccgctggagttctggtgccggatttgaaagaacatagaatatgtgggaaccacggccatgacatctcca

SEQ ID NO: 719348 - DNA, 251 bp, Homo sapiens
  misc_feature (210)..(210): n is a, c, g, or t
atcatcgagctcggtaccactagtccacggttggctagtcacaacactctaaatgaagtttgaattctttttccattctgggtggttccctgccaagtgggaaagaaactggcctggaagtctctgttgtggcgcctactggcagaatccttggtagtcatgcattctgcctggggagaagaggctagggctcctcagcccctatccccngaaaaggtcattcttctctctcacgattgccttctctggaa

SEQ ID NO: 719349 - DNA, 122 bp, Homo sapiens
cgagtaggcgtatgcacatgtaagcagcatcatggaggccaaggaggttcgaagctcagtggccagctgggtggccagactgcagtggcgagtggccagactgcagtggccagagagtggcc

SEQ ID NO: 719350 - DNA, 144 bp, Homo sapiens
cgatcgtgacatggtactacaattgacagtattctcgcatcataggctgctgattgttcatctgatgcacgagccgagtgatccaccgctaagagtctgtacgtgcttgtgtttggaatggctggcacggcacactagcccccc

SEQ ID NO: 719351 - DNA, 514 bp, Homo sapiens
aatatgtcgagctcatcgtagcctcaacctcctggggccagcaatcctcctaactcagccttctgcgtaggtgggaccacaactccgtggctcaagcgatccacccaccttggcctcccaaaggcctgggattacaggcttgacgcaccatgcccagccaaattgacatctttatgatataaaatcttcttaatcaagaacatggtatagctctccatttatttagggttcgtttgtctttgtttactggagacagggtcttgttctgtctctcaggctagagtgcagtggtgcgattatagctcgctgcaacctgaaactcctgggctcaagcaatgctcccacctcagcctcccgagtagctgagactacaggtgcgcgtcaccatgtgcagctaatttttgaatttttttgtagagcgggggtctccttacgttgctcatgttggccttgaactcttgggctcaagtgatcctccttcctcagcttcccaaagtgctgggattacaagtgt

SEQ ID NO: 719352 - DNA, 383 bp, Homo sapiens
  misc_feature (339)..(339): n is a, c, g, or t
  misc_feature (355)..(355): n is a, c, g, or t
  misc_feature (376)..(376): n is a, c, g, or t
taacggtcacaagaagtttttggttttgtttttgatttttaatctttttttttatagctcagatttcattcccctcctggaccaccttctgactgttccatatcccatacctttccctaacctcccatctccattaggatgtccccagtcacaagcccctgacccatcagacctccccactccctggggcctcaagtctcttgagggtcagttaggtgcatcttctctgactgagtccagacccaccagtcctctactatatatgtagtggggggcctcataatcaagctgatgcaaggctgctgggttgggtggtccagtggtttggagatatctcangaggttcaggtaagtngaaatgctgggtcctcctaanagagttg

SEQ ID NO: 719353 - DNA, 493 bp, Homo sapiens
  misc_feature (478)..(478): n is a, c, g, or t
tctcactgacttcaagaatgaagccacagaccctggtggtttatttaacaatgtgaagtagtcctgggaagttgtactttgagcaaggtccgcaagcagtattcctgcacttctccagtcatgccccagcgccaggtcggaagctgtccacatgcggggatggagcctggcgtcctgggcccacaaggacagggccctgaatatggacttagcagaacaaagttgggaaggcaactgcactcaccccttgtgcctcctgtggtacctgcccttcacggttcctggtggggacactcaggcaccagcttcatggctggactcagatgacacaacgccaggaaaaaaagtaaaagccccattaccctttccaatgcctagataaaatagatgtctaataaaaacctgctaataatcatttattgtttgtttatatacaattaaaacaaacattaaaacaatatttaaaaacactcttttntaatgagtgtgggat

SEQ ID NO: 719354 - DNA, 510 bp, Homo sapiens
  misc_feature (495)..(495): n is a, c, g, or t
agggaaggtgtgagctgccgccgagggtcccaggcggaacgcgggaagggagcaggtttatttaacaatgtgaagtagtcctgggaagttgtactttgagcaaggtccgcaagcagtattcctgcacttctccagtcatgccccagcgccaggtcggaagctgtccacatgcggggatggagcctggcgtcctgggcccacaaggacagggccctgaatatggacttagcagaacaaagttgggaaggcaactgcactcaccccttgtgcctcctgtggtacctgcccttcacggttcctggtggggacactcaggcaccagcttcatggctggactcagatgacacaacgccaggaaaaaaagtaaaagccccattaccctttccaatgcctagataaaatagatgtctaataaaaacctgctaataatcatttattgtttgtttatatacaattaaaacaaacattaaaacaatatttaaaaacactcttttntaatgagtgtgggat

SEQ ID NO: 719355 - DNA, 356 bp, Homo sapiens
cgtgactgggggtgtccaatcattgatgacaccaaaaagttgtccttcataagggttttctaaaaaaagtctgtgggggattccctcatccttaaaaaggaggaggagaaacacaagacctgtaaccatcagtggcttggggaacacgggaattctcatcagatacgtcagtataaaccagtaaaaagcgtatgtgtggaaaatacggaacgctaaatttgggcaaattgggaagcctgccagacaaaaaccgctcaagtatttattagaaaatatttaaaacatactctgggtatcactaccagtttaaagtattttggagtattctctggcaggtggtatggctatataaaaaa

SEQ ID NO: 719356 - DNA, 1149 bp, Homo sapiens
cataagactcccacgtgtgggagcgcactctagtacggtgtgatcattggcttagacttgctatcgctctacgccaacgtacagagtgcagggacataggcgggaggagtgaagattactatgattatgtgatctgttgagcttggtgtagtcaatgggcagtattcgggttataggacggacagaatgtgctgatgttacattcgaagtaagagaaaaattaaaaatactggtaataagaaagttacttatacaatactcttgacaacggtgaagacatagagtagaaggtactcaataattgacgtttgaggtacatcattgctgtagtaacaatcttggatcggaaagtgtttggagagctcataggtgccgttagggagtatcagagtcaagattgaattcattatgtgggtccactaaagattaaggggaacgatatctgatttgacatgatgggaaaacgtagtaaatttacaaatagagaaggtttacggaggaagttgccaatctttaaattattcaggagaaaatgaagcggaagcgcaaggcatgtggaatcgtagaggtattcagtacctcaaacgtataccaagttgaataccttgctacgaaatcgtggcacctggcactttgcccctgtacgtgggcggcaaatttcagacccgccgtcggctcacaccaaacattagaaagcgacatatgaacgtccctagcaatgcctcccgatggcgcaccactcctggcgtaatccaactggcgagccaccaatcctacttggcggcaatcatgtggcgaacggttctgacgaagatcttctcaggatagaccagtctgcttcccataggagcaagggttcttttaacgtcggtaggtataccccgggaaaatatcactatcgcgcgcgcaggtcaccactccgtttttcgagcaggttctccactccatattcacgcgtaaagatcgggtaaaaaaccgccccttaggcagcgtcacccatctactggcggctactcgctcaacagcaaactcttttgccgcctgtggaaaataacgtgtcgcgctcaactcaagaccatagcgtaataacccttcacaccccctcatagtgggctcacaagttctcacttcgacgggtattgcaactcc

SEQ ID NO: 719357 - DNA, 1211 bp, Homo sapiens
  misc_feature (445)..(445): n is a, c, g, or t
gacgctatgtccatcatgggctccgtggttctggcctacagtggcggtctggacacctcgtgcatcctcgtgtggcatgaagcgaagcaacggactaatgactgtcacttgccctaatctggccaagcaatgggccatgatagggataggactttcgacggaatgccacggatagaatggcatctgataggttttgggggccaacacaagggttgttcaattgaaggagtagtcagtcatgtggcagtgttgtaggatgtgagttcactctagggccgtgactctatccatgatcacagtcggcgaacatgatactgagggatccgcgtactctcactggcgacatccttcttcgttggcctagagtcccttgatattccgtccctggccacaacgatacgtgggacaatacagtccccagaaggcgtagggtggtgccgatagnttatggttgatacacacaacggcccagccacattgagtatacatggggaagcagcacttctagtggtaccggagatctgttgaacgccttgcaaaagccttggctaaacttatcgatcatgggacactcgcactctagtaattacatagggttccactttggacttccacctggggaagcgacattggcctaaggaaatttcttaaacagatcgcggggtttctcaatggtgcgcgagaaaccttgaaccgtcgcactgagcatgttaacgcaaatatgcaaaacgaactgggggaccttctcccattccctcgaggatcgaccttcccctagaagtaaactctctagtgggatggtaatggtgcgttgcaagtaagaaccccttcaaatgggccacagatacaagttcattaacggaccggggatctgagaagacaacttcccgttggtggaaggaaaaagcgacccgcataaagaaaaaccctatattaccagccccagcacgaggaggttccattcctaaccaaacatgaatgacggaacccaccaagggaaccccccaaaggagcgaataaaaggccccaccacaaaagcaagcccctcacttggaacaatattcctacaaggaagaattctcggataggtttacgaccataaaataggcggggggtccccctgtgttgtcaaaaacggtagaacgcaacaggagagactacaccggggagatgtgtggcgacaaagaccaccaaaacaaagaacaacatag

SEQ ID NO: 719358 - DNA, 444 bp, Homo sapiens
cattttattgataagcccagagaggttaagtaactcatgcaaggtcacaccgtggtgaaatcagtatttaaatacagggtagcttcactccagtgtctgaactgttaacatttatgccatgtgtaacattattttcaggaatgaaacaatgttattggttgccacttttcagagaattggcaagtgctcaggtttaatgcaggtgggcagaggcagaggtgtcactgggtgctctagcctctgtatcctgaacttccagcttcctcttactgtccatttgtgatcctgggagagagaaacactgtctcctctgtgcctgatccactcttgttcaagtgtccagcaccctttccctgaattactgcaaagacctctcaaattatctgtggtaaaggaccatttcccaccccaccccctgagtccattgtagccttatatttttat

SEQ ID NO: 719359 - DNA, 887 bp, Homo sapiens
  misc_feature (879)..(879): n is a, c, g, or t
gtgtagttgcaagaggatcagcttcgatcattgctctcaattggtttttgtcagcttcctatggccggccgtataccactcatcttcaaggctctcgtctcctttgcaaaactttttgaaccaccattgcactgcatgttcgttagcagttcctgggccaaatgcgttgatgttgcaagttgtctccactgctttatgacccatttgtgaactcgaataagaaaattactcacattgtgtttttgtgtctaacatcatttccatagtctaaaataaacataaacagcaagtaataagttattagccagaaaacataaagcgagaaatgctcattaaaatgatgtataacataaccacacttatttaagaacatattccaatatcaaacggcaaatttcaacagtgcaaaaaccacaattacgtttgcaccaaccttaatatttatttatatctgtgacttaagaatgcataagtaaaaataatagcaacaaaacatttaaaatattagtgatcatgtatttcatgtaactagtcatcaatataggacagtacaacgtggtttgcactaagcttaagatctttggaatgcttgctaaatttccaagtttacatgaatacctctactgagagtgatggatagctgccttctaataccgcacacatacttcgaacgggcttggttatcagcctatatagggaataccaaagtattgggctctcgccccatttaaccctgtttccggtcggaaaggaacaagctcgcacaccacgccgcggtccacaaagtctccgcctaaaatctcgaacgggcgtttacacatcccatctctcttctctcctttcctttcctctctcttctcagtattttctgttcatcangaaaaaaa

SEQ ID NO: 719360 - DNA, 318 bp, Homo sapiens
tttatttaaagaaaatcttcccacaaagaaaactctaaactgggcgtgttggctcactcttgtagtcccagcactttggaaggctgaggcgggtgaatcacttgggctcacaagttcgagaccagtctgggcaaaatggcaaaactctgtctctactaaaaataaaaaaagtggccaggtgccatggtgcgcacctgtggtcccagctacttgggaggctgagttgggaggctcacttgagcccaggagcagaggttgcagtaagccgagatcaccgcactgcactccagcctgggcgacagagtgagacctcatctc

SEQ ID NO: 719361 - DNA, 628 bp, Homo sapiens
  misc_feature (15)..(15): n is a, c, g, or t
  misc_feature (29)..(29): n is a, c, g, or t
cttgactccctcccnggccccctgcactnccttccccaggacctccacccaagggatgatgagatggaaacagataagcaggaggagaaagaagtccctaagtgtggatttctccctgggaatgagaaagtcctgtccctgcttgccctggttaagccagaagtctggactctcaaagagaaatgccttctggtgattacatggatcccacccctgatccccaagattgaagatggaaatgattttggggtacccatcccggagaaggtgctggagagggtgaatcccgtccagcccaaagtggaagctttcccgacaaccctttccaagttcttctcagaacgtggggatgctgtggccaaggcctcccaggagactcctgtaatggaataccgggccttggtgcatgagcgagattaggcaccctatggggagcccagggccctggtgctggacctgagggccttttatgctgagctttatcatatcatccgccgccccctggagaaaattgtccaccccaagggtgaagaaaagccctctatgttctgcacccggggctagaaggacaaatcctcctttctcttctgtgccgtcaaccccgactcaaaaccgagtattcatcaaa

SEQ ID NO: 719362 - DNA, 181 bp, Homo sapiens
gctagatttacttcagtataaattattttatgaaaacccaattttaaaagccccaggggttgattgttataaaaaaacatgctgccctttttgattgctaaagtttttgttagtactttggatgcaattaaaactatgggctatcccatgtgaaaagcttaataaattccctcttcccgta

SEQ ID NO: 719363 - DNA, 133 bp, Homo sapiens
ctctcccactggccattctaaccattttgtgcagttcggtggcattaagaatattcacgttgttttacaaccgtcaccactgtccatttcccaaatgttcttgtcttcttaaactgaagctctgtccacatta

SEQ ID NO: 719364 - DNA, 1286 bp, Homo sapiens
  misc_feature (40)..(40): n is a, c, g, or t
  misc_feature (749)..(750): n is a, c, g, or t
tggcgctcgcgatctagaactagtccggacgcgtgggtcngctgctgccatgtaagaagtgccttttgcctcctgccgtgattctgaggcctccccagccatgtggaactggctcagtgtggtcaaaagaagactatagaatcaaggatgaagagaaggaacacagaataaaaggacgtctcagcaggaagctctgtgactactatgtaattcttacaatacagcaaatgatgccatacagtgaagcaccttgaaagattgctgggataagctgacagcatggcagccaaaatagtgaccccaggcttgcgaggaattctgtgctttctggaggaaatggtcatgggtttcccaaactgccttttaaactaaggaccgagctgaagaagcccccgtcttccagcgcatgttattcccatgacagatgctaaaagttcaaggggagagctacaagaagtgcgttttcctgtggctactttcatgtctggatgcaatgcctagacctgcatccatcttgcgaccaacctgaagatgaacagaaaggaaggaaggatggcccaatagcctgggaagaactggtgttcctgataccatcattaaccacagaatctacaatcccggaaccccccatccttaaccatggaatctacaatcctatctctagaccctttgtccagatgctacagtttctttgttcaatctagttgtgtcaggattctgtcatacatcaaaagtttctatactgtagnnaagcactggagaagttttcactttgtctttaaccaaagaagacttccaggaaacatctcctcagtgggtttctccctcaccactggatttttatctctgtactagtgctttgatttgttttaggagtctcacctctccacctgtcatatttccctggcaggctcatttctgctaatgcccacaatatgtgtatcaatgagctttcaacgttaggtacacagctcttcaggcatgttatagcacattaatctgtctgcttctaagtggtctgttgacatgttttggttgccagttatatctacaaggtgtgatcattgtccctgggttattcctggttggtcctctctgcaaggatgcatttaggacaacacaaggcccatggccaatcacttttaccattctaggaattcaaatcttattttccttgtgcaattccctggaaaacctcctgttcttggaaaccccttttttttcaacaattcccactggaatgttcacttcataagccaacggtcttgcgcgttgcacaaatataa

SEQ ID NO: 719365 - DNA, 915 bp, Homo sapiens
  misc_feature (40)..(40): n is a, c, g, or t
tggcgctcgcgatctagaactagtccggacgcgtgggtcngctgctgccatgtaagaagtgccttttgcctcctgccgtgattctgaggcctccccagccatgtggaactggctcagtgtggtcaaaagaagactatagaatcaaggatgaagagaaggaacacagaataaaaggacgtctcagcaggaagctctgtgactactatgtaattcttacaatacagcaaatgatgccatacagtgaagcaccttgaaagattgctgggataagctgacagcatggcagccaaaatagtgaccccaggcttgcgaggaattctgtgctttctggaggaaatggtcatgggtttcccaaactgccttttaaactaaggaccgagctgaagaagcccccgtcttccagcgcatgttattcccatgacagatgctaaaagttcaaggggataattcaatacaagaaagaagatttgcttgggaaggtctgaatggccctagctttgtttgttaaccataacctctaccagctggaaacacaatgccccactaatactaacagtgcctgcttgtccaaacagcattctggccacttacagcaattgacacaaattctaacaggtctgttaatgtttttcagatcctaaacttgtagtagatttttatgttctctggcaatcaggttttgttcaggcggcctgcagggtgtttaatgcgtgctgggatgctaaattctcaccattcacaatagtttattctttacacaccaaatctcgagaattattcctcatttggcaaaaaccccatccaatatttccctccttatcttccggtgaaggggccaaccttctgtgtaacgccccaatattccagggaaggctggggaaacctgtccctcgattcatggccggcccccggccg

SEQ ID NO: 719366 - DNA, 219 bp, Homo sapiens
ggtactgctccggtggagcaggcggaatattataggcaagtgttggcatagagacatgatagtcggattgtgcagcagtaaagaacagaggctacgggtagaagagcaacaagaggagagtgcgggaagctagaaggcggcaggaacgtgaactgcgaagggcagtaacaaggaagaccggaggcgtctagagtagttcgtagagacggcgcaaagaag

SEQ ID NO: 719367 - DNA, 890 bp, Homo sapiens
  misc_feature (40)..(40): n is a, c, g, or t
tggcgctcgcgatctagaactagtccggacgcgtgggtcngctgctgccatgtaagaagtgccttttgcctcctgccgtgattctgaggcctccccagccatgtggaactggctcagtgtggtcaaaagaagactatagaatcaaggatgaagagaaggaacacagaataaaaggacgtctcagcaggaagctctgtgactactatgtgtctcatcttcagcacttctaaactgtgggaaactatgtgaaaacaaatggagtggccaaacacaccattcatcactgtgcttctggacagctgcaagtccatacgtgttctgatgaagtctggctctgttgcccaggctggagtgcaatggcacagtctcggctcactgcaacctctgcctcctgggttcatgcaattctcctgcctcagcttcccaagtagctgggattacagacatgcaccaccatgcccagctaatatctcgtatttttagtacaaacagggtttcactatgttagtcgggctgatcttgaactcctgacctcaagtgatccactccccgaagcctcccaaagtgctgggattacccggcgtgagccactgcgcccggcctttcagcctgattttctaatccaagaagttatatcagtcttgtctgcaggtagcgtcaaagcactctctttttaaaggtgcaggactaatccacctcggactatcgcaccagggctccgcgacgggtatttccacgttatggaataccagttatttgataaatgttaagttcatcctggttctgtcctggtcctgcgctggggacgcccatgtccacgcgcgccatccgggccgccagacactcaccaggacgaaacgggcagacgactcgcgacgccgctcgccaac

SEQ ID NO: 719368 - DNA, 87 bp, Homo sapiens
gcggccgcctactactactactgctcgaattcaagcttctaacgatgtacggggacatgctttgaaagaaaaccaggttcttcgtgc

SEQ ID NO: 719369 - DNA, 467 bp, Homo sapiens
  misc_feature (239)..(239): n is a, c, g, or t
agctgctcccagggtggcaaccgtgggcggaggctctgctgcaggatccgggaggcccagagaaggcacctgcatttcacgctgagcgcatctgaggatgcgatcaggaagcagccccggcactctctctttatggatgcccacttccagtttaaccgtggcatcccgggggcaagggcgccctccaagctgtgcttcactaattccctcagggtttggaactatttgcccagttcccncgatgggcctttaagctctcgtccttcctaacctaaggcaacttcaaccatctgataaatctaataataagttacaatcgaggccgggcacagtggtctgtaatcccagcaccgtgggaggctgaggtggaaggattgcttgagcctgggaggtggaggctgcagtgagccatgacagtgccactccactccggcctgggcaagacagcaagaccctgttttcaaaaa

SEQ ID NO: 719370 - DNA, 424 bp, Homo sapiens
ggattccagtaacctagtagtaatcagctcaacaccaccatcctctctcacctcaatttaattcttataggactaatgacctgtcacatgccatggcataattatttatttccaagctatcatcaatgattagaactaaaaaaaattgggcataaaaaaatcacaattcagcataaataacgctatctacagcttcaccactagctagcatctctaagcattgtagacttaagtactataaccttgacaatatacgaccgggtgtctagggttaagtgaaagtaatgcatatctgaaaagtgaaaagcttctaacattattgcacagacagtattacccaccccacataatgaatcgtacgatatatttaatgtacttaatacccacatgtatgacgcatgacactgggttcctgtagtacaga

SEQ ID NO: 719371 - DNA, 607 bp, Homo sapiens
  misc_feature (42)..(42): n is a, c, g, or t
tgatcatcagtgccaatgagtaagtcagtcaggcttatgcantgaggcttctataaagcccaaatgggactgactttgaatagttacagcatagctaatacctatcttgtagggtgatgttcctgtacatggtatggaagctctaagccctttccctcagaccttgccatatgcatcgcttcatctataacctctgtaacagcctttgcagttagccagtaagtgtcctgtccagagttctatgagatgcgtagctaattagccagccgcatgcagtgagttgtgagccatagatccatacaagggtatagaacctgccaaaggaattcactctgtagactggtgaatgccacatgtgcaaaaattagaactgaggaaattatgacagtgaaagagatcagacataattgactccatcatgtatctaaccattgggctgttcttgttcaatgctgggtgtaggtcagaataaccttgggaaggaattcagtgcacggtttgactctaaagcaaaactggtaccagccctttctcggaaagacccccttcttgcttggggaccagtctgcctttgaaggactagcaaattagcttcaagattagcaat

SEQ ID NO: 719372 - DNA, 841 bp, Homo sapiens
ctcgagatcacttgagtcaggatgcagaggttgcagggagccatgtttgcaccactgcactccagcctgtgcaacagggcacaaacctttctcaaaaaatgaaaaaaaaaagagaaaatttcctctgttaaactgtctatagtttataacaatttggtaaagtgtacttttgtaaactaagatggaaagatttgctttttctttctgctcgattcctccagaatttggaaactatttgggaaatattcttacggcagtatggttatttacacaggtccagtaaaaacctgctcttggtgtctcattcaactccaacatggcaaaaatctccagccctacagagagtccgattgctgttttccagaaatagactggaaaggatggttacgatagcattcactccaagatggagttcccaagcttcatgaatacagaactggatgccttcacgaagaaccagaaggccccagtgtccttgaccacatgatgaagaaactggacctcactagtgatgggcagctagatttccaagaatttctgcatctgatggatggcatgactgtggcttaccatgactcttttctcaaggctgcccattccaagaagcagatctgaggatcccctgggcctggtttccaagccaccccctttccttccaacctcaccattcaccatctgctcacagcccacacataccctggggccagcacacctaccacctcatgcaggccctgcttgcaggtagtaataaaaccattcttcctgactgcagttttccactccctctcccccttctcctcctcccccgcccttcctctgcccttgtcttctcctcccctcc

SEQ ID NO: 719373 - DNA, 446 bp, Homo sapiens
taccggagctttatattgagtggccatgtgacccagctccattaccaggaatatacccaagagcacagaaaacacatgtctatacaaaaacatgtacaagaatgtccacaggtgcatttgaaagagccaaaaactaggaacaacccatcaactaacggataaacaaaaatggaaaactgtttgaccaggaaaggagggaggactgacgcatgctgcaggatatgccttgaccggcatcacgctggggtgaagcagccggggagcagagggacacgtgggccatgactccatttacatgacacgtgaacaggcaaatccacagaaacaaagtaatcagtggttaccagagggcagagggtggagggaatgggagggactgccagtgggtttcttttaggggtgatggaaaggttctagaattatccaactcacatggccactcaata

SEQ ID NO: 719374 - DNA, 199 bp, Homo sapiens
cgccgccgatgccgccccggctggcgcgctgcggacggtcgcggtcactctccgcggaacgccggcttgcgccgctcgaggaacgcgcgcgtgccctcgcgcatgtccgcggtcgagaacatcaggccgaattgcgcggtttcgtagccgaggccttcctcgatcgcgcattcgccgccgacgttgacgcagtcgagga

SEQ ID NO: 719375 - DNA, 108 bp, Homo sapiens
taattcctgccccgacttctagaggatcccgtctgagcagctgggaattttctgctcatagtagctgggcaaggcaatgcaccgttgacagacttcacaaagatcacc

SEQ ID NO: 719376 - DNA, 570 bp, Homo sapiens
gatgggtcagatggacgaatggatggatggatagatggatggatgaatggatggatggatagaaaatcaacaaacagaagatgatggatggatggatggatggatggatggatggctggatggatggatggatatcagttcacaccactctcaaaaggctctgcaaaccagtctataatataataattgaaggtcttctggtagaaaatgttaattttctgatttaaaatattatcttccccaacaatgcacgctctttcacctcattttcctcccaaacctccaaattatgaagcctaactgtatcaattaagaatcttctggcttgaattaacagaagagccaaccatatgcaacttaaccaaaaggggctcatcaagtaaatatcatccccgaaataatacagtctgagagaaggaggtatgagtgtctcaagaatgacagtgctctcagtcagtgtagctataaatctaggcacctgttcatagtcatacatagtggctgacatagctccgacaattatgtcctcacctgacagactccagagcaggatgaaaggatgcaaagaaa

SEQ ID NO: 719377 - DNA, 223 bp, Homo sapiens
  misc_feature (9)..(9): n is a, c, g, or t
  misc_feature (14)..(15): n is a, c, g, or t
  misc_feature (24)..(24): n is a, c, g, or t
  misc_feature (31)..(31): n is a, c, g, or t
  misc_feature (35)..(35): n is a, c, g, or t
  misc_feature (39)..(39): n is a, c, g, or t
  misc_feature (47)..(47): n is a, c, g, or t
  misc_feature (49)..(49): n is a, c, g, or t
  misc_feature (52)..(52): n is a, c, g, or t
  misc_feature (63)..(63): n is a, c, g, or t
  misc_feature (67)..(67): n is a, c, g, or t
  misc_feature (71)..(71): n is a, c, g, or t
  misc_feature (74)..(74): n is a, c, g, or t
  misc_feature (77)..(77): n is a, c, g, or t
  misc_feature (88)..(89): n is a, c, g, or t
  misc_feature (103)..(103): n is a, c, g, or t
  misc_feature (107)..(107): n is a, c, g, or t
  misc_feature (122)..(122): n is a, c, g, or t
  misc_feature (132)..(132): n is a, c, g, or t
  misc_feature (161)..(162): n is a, c, g, or t
  misc_feature (191)..(191): n is a, c, g, or t
  misc_feature (223)..(223): n is a, c, g, or t
aacacaagnccctnngttggcgcnagttacnccgngaanattgtggntnganggcttcccagnaggnagantcnaangaaaatccctnntccagtatggaccnggancctggctggtagctngaccctccgngccgctgcgagtccaaaaagtttggaggnncctggtgcccgcgctcggctaccagaaancctaccgataagcccatcgtgactcaaaactn

SEQ ID NO: 719378 - DNA, 263 bp, Homo sapiens
tgcattttcactatgtgtaacttgactacgtttagtggtacttgcgcgtactttgagctcatcaggtatgtgaagatgcggatataggctgagcaagaggtggtgaggtgatcgcggttatcgataacagacaggctctctagagggtttgaatcaccgccagtcctttgagtttaagctgtggctcgtagtgttctggcgagcagtatcgtagattaagctgttgaggtccagggctaagcatagtgtggtatctaatccca

SEQ ID NO: 719379 - DNA, 352 bp, Homo sapiens
atcaccacaatcagatgcagaacgtttccatcgctcccaaaaattcaaaaacaatctggtcaatctttagttacctaataacagataagaggggtcctgggttaattaaggtctaacgatatcctataaactacaatctagccaaaactatatgacagcttcagtctcatttcctggcaaatctttcccccccaaatggatagcatttcataaaatttataaatatttgattaataacttcttcaggaaggttttcattaatccatttaatttttgcatgggaaataataactttattttatagtgtaatttcatttgggttctaaaagtacatgatgttacatattacggg

SEQ ID NO: 719380 - DNA, 120 bp, Homo sapiens
agagacagatacgaatcgagcccggtaccgctagttgtagaagttcaatagcaatctcagaagcttacaaatagatttccatgaagatatttggtgcttcagaattaaaacagtgccctt

SEQ ID NO: 719381 - DNA, 520 bp, Homo sapiens
actgtgtctagaggatcccggcacgagcatcgtataaacacatctcgataagtgcaactactattaaaaggtgttaccacactattcacgtggatggatttcaggatggccccataaactccagtgaaatcataggcaaaaattggtatctatgatatgcatggcactaaagtaatataaaacatttggcattatacaatgacattttagatgtggttggcctttgaccaagcagcccagtccacatatccaatacatcagcaaatccggtgggctctaccttcaaaaggtcagaaatccaaccacttccctccgggctcaactacaaccccagtgattccacgtcaccatggtctttctccggggcgactctaatggtctcgctttatcgctctttcctcgttatcatatgtgctccataacacagccacagttatccctttcgaaacccaagtgtggctgacagatctctcagggtggcccctgtgaatgcctgcctgttggtgtccatgccatttgt

SEQ ID NO: 719382 - DNA, 406 bp, Homo sapiens
gcagcggggtcttcttctatcacgagttggcagctggcatgtgcggaaccgagcaagtgctgcgtccacgttgcttgttctctaagcgatgaccaagtgctccgcgccaggttgttttcttttttgtcatagttatttcctatttctcagcttgacttctgtcatgaatcagcgctctctgggaggatgcaatactctgtttgggcattaattggtagcaggttgtctcaaccaaaaagacaggaaacagcaaaagcctctctgaaattaagaggaaagttactctccccacacccatcagagtctttattggagccaccaggtgagctgtgcagcctggacaggcctgcagctataggccaccttcccagtttaggtcctcagcacaggggagcccaagtcactg

SEQ ID NO: 719383 - DNA, 149 bp, Homo sapiens
tacgggtacttgtgattactctgtaactcgagtgacaatgagctataatcttattgttgttggatcatatagtgtgaagtcccatccagacaaatacttcaaaacaatttttcatcaatacttcaaaacattttctctctagggtattg

SEQ ID NO: 719384 - DNA, 787 bp, Homo sapiens
gagcgacactgagtggttgtgtggtcgctgtctcggaaaccggtagtcgcttgcacatatggttgagcaactgactgaagagcagattgcagaattcaaagaaagcttgttatcactattgttgacaaagattggttgatggtactataacaacaaaggaatggtgcgaacttgtcaattgatgatctcttgcggcatgatattcctacaagagagcgtgagttacaggacatgattaatagaatgtagattgctgatgtgtaatgggcaacaaatttgacttcacctgaatttctgcacaatgatgggaatgagaaaaaattgaataggactacatgacatgtgaagaaagaaaagttaatgaagaagcattcctgtgttgtattgatacaggatgagcaagttggctatacttaagtgcttgcagagacttctggccatgttgaatgatcaaaaacctttgggagaacgaaagttgacctagagtgaacgaatgtgtgatcgacgtattgaatccagcgggagaggcaagaattatgtgatggtgaatggctcaaagatgagaacgtatgcacagaggtttgtgagcaaagtgattgatcaggcacatagtgtaagaacccttggttaacagagatgtgtaaagatttttcttggtagcgacaaaatttgttgtagtttgacctatttgcttagtggttatgtagacttattttggattaaaagagggctttgggtaccccgtacttgttcaaaacgcaaagttatggcgcatgcttatagtgta

SEQ ID NO: 719385 - DNA, 451 bp, Homo sapiens
gctgctgccgcttgacagatagaaattagacgcagctgacagtaagagctgtaatcgtcaggtctgaggccacaggtcacggcgttgccacagaatcaggagaggtcctgaacccaagatatgaagtgggtgaggtctctttgatgctgcagatgcacatgccattgaggaagtaaaccttgcttatgagaacgtcaaggaagtggatggactggatgtttccaaagagggcacggaagcctgggaggctgctatgaagaggtacgatgagaggatcgacagagtggagacccggatcaccgctcgccttcgggatcagcttgtgacagccaggaatgccaacgagatgtttaggattttctccaggtttaatgcactggttgtcaggcctcacatccgtggggccattcgcgaataccagacccagctgatccaagcgcgtgaaagatga

SEQ ID NO: 719386 - DNA, 905 bp, Homo sapiens
ggcgggcagcggtctggctggagccggcggtctcctccagctcctttctcgggtgaaacctgggtgggtgattgccgcccacccgggcccgagtctggcgcttcgttaactttgctggtaccgccatgggagaaccgtccacccagtgaaagaaattattcccaagggaaccccttattcaggaaagaaagaaatggccccaggggtttgggtcagttaccccaaggaggggaattgcttacaagcacctggggaaccttggggccaggccctgcgggcagcggctattcacgggtttccttaaaaaccttctttatcacccggcaagagggtttatgtcgcgaagcacagactttggaccggactctcatgagtgctgaggccaacctggctggactcttcctcccaacggggatgcagccgcttcaacccgaacaatctcgtggcagcctattcctgtgcaccactggttgcccattcactgaggaccaggcctgctggaaggttcccgttggggcccatgtcccccgttatgagcagctgcagaaacgagacccgggaagacaccaagaagtatcagaatgaaagttctcggaattgccccatttcctggcacctggtggcgcacggaggaccggcgttccgacccttgacacttgggagaccggtctggggaatgggtcctattgacccacctccttctggttagggcaaaccgcgccggcttggccctggcgcgcctggggctctcccccaaccttggaggttgttcacgaccgggttataggggcattccgagttgcgcgttctctttcggaatcttcccgaggggagaaaggccgcggtcccgggggggccttgctcgggtccctaggagagcttggctcattgggggcactccccgc

SEQ ID NO: 719387 - DNA, 289 bp, Homo sapiens
gaattccagcctgggaaacaagagtgaaactctgactcgaaaaataagggaaagaaagaaatagaaaatgcgaaatggtaagaaaaaacagcataataaacatttgtatggtgtcgatggacaatgcatatgaagataatatttgaaaaaatcatattacaattaatttctgttctcactcatgggagcttgatgccctgaaaacttcgtcattggaccacctctggtgctttaaaagaaaaaaaaaattcacatcctcacacaggtcaggatcagatctcagcatgga

SEQ ID NO: 719388 - DNA, 199 bp, Homo sapiens
acagtgtggggtgtgtgaggcttgggggctgcgaggctatggagctgacgtcgcgttgagacagaaatgctggccaagatgaggaccacttcattacagtggacgctgtgggttgcttcgcgggtgctgaagaagaggcagaggatgatgaggatgaagaagagatcgaggttgaggaggaactctgcaagcaggtaag

SEQ ID NO: 719389 - DNA, 488 bp, Homo sapiens
tctgacacggggaaagggacatttagcatacacggggctacaatgtaaatatttctgtggaaggagataatgaatttcgggtgacaaaatatggttccttgaccttgacatggtcttgcataacctccagggcattttttttttaagagatggaatctgacgcaatcacccgggcgggagtgcaggggcataatcatagctccatgcaacccagagcttcggggctcaagatgtttccggaatgggtaggttctgggtctcgctgacttcaagaatgaagccgcggaccctcgcagggagtgttacagttcttaaagatggtgtgtccagagttggttccttcaaatgtccagacgtgtcgggagtttcttcttgcgggggggtacggggtctcacgggcttcaggagtgaagctgcagaccttcgcagggagtgttacagctcataaacgcaggggggacccaaagagtgagcagaagcaagattta

SEQ ID NO: 719390 - DNA, 553 bp, Homo sapiens
tttcggctccattaagggttggggctcattcagggcatcatcatctaccggggcggcctacttcgggcgtgtacgatacgggccaagggcatgctccccgacccaaagaacacgcacatcggggtgagcgggatgatcgcgcagaccgtgacggccggggcgggcgtggtgtcctaccccttcgacacggtgcggcggcgcatgatgatgcagtccgggcgcaaaggagctgacatcatgtacacgggcaccgtcgacggtgggaggaagatcttcagagatgaggggggcaaggccttcttcaggggggcgtggtccaacgtccggcggggcagggggggcgccttcgggcgggtccggtacgacgagctcaagaaggtgatctaggggccgcggcctcctccacacacacacacacaccaggggaaccaagagacccacgtagaatcctcaagcgggcggaccatcaaccttcgagaaatccagtggtcttccccccagccgcatccggccggtacatggccggggacggctctacgaccgggggcgcatc

SEQ ID NO: 719391 - DNA, 677 bp, Homo sapiens
  misc_feature (190)..(190): n is a, c, g, or t
ctttttaaaatacggctgaggcgggctggccctattctttgtctgctgccggcgtttgggctacggttgttcctggcgactgtgcttcacgccttctcttcttttgtcccccccttctcctcgcctccccgccgcctgtttcccctttcccagcaatccccatttttatttggtgttgggcccccccccnccgcgccccccctcaataaacttcctccctattctctcccccctgctcacccctctatacccctttcttccctttctttctcttttccgcctcttcctttccctcctccccgtctcctctctcacctcccatcggtctctcccggtttttttttttttttcccctttttctctcccccccttttcttctcccccttccttcttcctcctcttgtttttctccccctcctctccctctcctcctctcctgtcgctttcttgtttccttttctcttctcctcctcttctcccttctcccctcccccctttcctccctcctctctccttcctcccttttcttttcttcttactctctctttttttcttaaacccttcttttctttccccctctttccattcttcctcctctcctctctcccctcccccccccctccctccctctctccctctcccctccctctcttcttccctccttcctactatcataa

SEQ ID NO: 719392 - DNA, 390 bp, Homo sapiens
  misc_feature (11)..(11): n is a, c, g, or t
  misc_feature (21)..(21): n is a, c, g, or t
  misc_feature (53)..(53): n is a, c, g, or t
  misc_feature (60)..(60): n is a, c, g, or t
  misc_feature (110)..(110): n is a, c, g, or t
  misc_feature (251)..(251): n is a, c, g, or t
ctcaacaaganactacccagnacccacggttaacagaggatggaaaacacctncacaagnctccccagagccgatcgtcctctccaccgccccaccccgtgcttcagccntgcagggagagtgatgctccaggcaacacggttctgagtcaccttctgacacgagctccctctgcttgctttccaggtcttgaaaatctgaattcacttcagtttagtttatgaattttaggtttcatgataagcctcaantgtagttggacttttattgaatccttcctaagttattgaaaaaatgtcttttcatggtgaatgacaatatttatgttgcctttagcttcttgaagatttagaagttatataaaaaattaatttaaaagcaaactaaaaa

SEQ ID NO: 719393 - DNA, 355 bp, Homo sapiens
gccaaaattcagtcactaaattttagaaagtttgcaaatgtcagactgcataagcttcaattgaaagaaaagaaacaaacagctttgccctgttccgctttgtgaataaacaagtcacattttttcttagctttttataatacagtctactgtgaagctctttaacatttgtacaaattgtatacctatgttccttaagtcatattgtaatattaacaaaataaccaatgaaagcattaaggaatgttatttaccagtagcatgagcctcacctctttttgtattcttcaagctgttaatagtatggatacaaaatcatgtttatatttcattcaaataaagctagcccccatca

SEQ ID NO: 719394 - DNA, 471 bp, Homo sapiens
  misc_feature (191)..(191): n is a, c, g, or t
  misc_feature (332)..(332): n is a, c, g, or t
tcgaataaggccgttgcctcccggtgtcatgtgcacgacacttgtgaatatagattattcagaactttcgaattagagagaattcgcgttcacagaatcgcttccagcaccatgttgacatcgtatgaaaacgaggctcagtctggcagacatgatcgtcctctccaccgccccaccccgtgcttcagccntgcagggagagtgatgctccaggcaacacggttctgagtcaccttctgacacgagctccctctgcttgctttccaggtcttgaaaatctgaattcacttcagtttagtttatgaattttaggtttcatgataagcctcaantgtagttggacttttattgaatccttcctaagttattgaaaaaatgtcttttcatggtgaatgacaatatttatgttgcctttagcttcttgaagatttagaagttatataaaaaattaatttaaaagcaaactaaaaa

SEQ ID NO: 719395 - DNA, 107 bp, Homo sapiens
gtcatctgagcatcccatttatcgtgatgcggcaatggtgccggtctattatgacctccctttaaaattctttgcgtcttgttataggtcagtttatcgtttggtcc

SEQ ID NO: 719396 - DNA, 330 bp, Homo sapiens
gtacagagctagcccaagcaatataggcacatagtgctcaaatatctgcatgaacaaaccaacctttgaagaatgctctgagcataacttctggatgaagcgaagcatacaggcccctatagaaagtcttgtacaggaagatgccaggtagtactgattaacatgttacagctcagcagaggcactgaatcaggggcatgtttcagtgtataacacaaggtgtcacttaatttacctcattttatacattaatttataaatagtagtaattcatgaatataacactttcctttgaaaagaatcattaatgttttcaaactgtcggtaaca

SEQ ID NO: 719397 - DNA, 649 bp, Homo sapiens
  misc_feature (3)..(3): n is a, c, g, or t
  misc_feature (158)..(158): n is a, c, g, or t
  misc_feature (210)..(210): n is a, c, g, or t
  misc_feature (230)..(231): n is a, c, g, or t
  misc_feature (241)..(241): n is a, c, g, or t
  misc_feature (337)..(337): n is a, c, g, or t
  misc_feature (353)..(353): n is a, c, g, or t
  misc_feature (357)..(357): n is a, c, g, or t
  misc_feature (465)..(465): n is a, c, g, or t
  misc_feature (502)..(502): n is a, c, g, or t
  misc_feature (534)..(534): n is a, c, g, or t
  misc_feature (554)..(554): n is a, c, g, or t
  misc_feature (572)..(572): n is a, c, g, or t
  misc_feature (582)..(582): n is a, c, g, or t
  misc_feature (629)..(629): n is a, c, g, or t
atnaaaacaacacatatttcatgttagttttaataagagattccctatcctctgccccagtaaaacctaaccaagccagcctgacaggttatatcaatacagggagctggagtgggagccaagggtggtgttagataggggtggggtacagatcaagnggggcctgggagactcagtgactggaagtctctgcccctcactcttggtgantagctaatttcagcagctgnncttcataagngaggagtcaggggttggttggaggctcctcccaattccagatccacttcctcttctccttctgtctcctggacacttaggtcttactgagatggtnttcccacagtaaaganaggngggggcagagtactaagggtcaggagtgtgactctttcccatgactcaggcctctgtgctagaggtgacccttataggaaggggagacccgcaaatccttgtagccantgagtggtggggtgcatcactcaccagcagatgccancttggactctggggcaggacaccatacacagngcacagcaccccattgcggntcaagccagaaggaaganaccccaccanggatgggcggatattggttgagggtgggccccatctgtcgtgggcantcttggtgagggcagggcct

SEQ ID NO: 719398 - DNA, 94 bp, Homo sapiens
  misc_feature (76)..(76): n is a, c, g, or t
gcggacccatgagagccctgagcagccccaccgccgccgccggctagttaccatcacaccccgggaggagccgcanctgccgcagccggcccca

SEQ ID NO: 719399 - DNA, 715 bp, Homo sapiens
  misc_feature (11)..(11): n is a, c, g, or t
  misc_feature (368)..(368): n is a, c, g, or t
  misc_feature (529)..(529): n is a, c, g, or t
tagcctcccgnaactgggataagccttcgataagaaattgtcccttgaagcttgtatctgatatccgcactggattgtagaacttgttgctgattttgaccctgtattgaagttaactgttccccctggtatcttgtttaataccccggacaaatctttgagtgtccacccgttagtacgctgtggctctggtcaccttcgtggcctataggttaagacgcgtgccttgttggagagacccaagtctcgtggctctggtggagctctcgtgtgtgcccacgccacgcccttctgaattctgttgccacgcggtattttacgctgctccggggctgacagtgtttctgggaattttcttctatgaaggnctcgtgccacgagaccacgcttgtgtgttgtgcttgcgcggtctcgtcacgggttggaaagtcccagcccgctatggagccccgtttcctcttcttagcctgatgtcctttggccccgaacccccgctgggctgcttaccttgctttgaggttggagagcnggtttgcactttacgcctcgtataatagtattcacttcttaaattatgtaaggttttttttgtacgccattttcgattctttgaagagatgaccaccaattttggttttctactgttatgtgagaaccttaggcccccgccacccgtccttgtgtaaggaaaaataaaagtgctgccgtaacccca

SEQ ID NO: 719400 - DNA, 88 bp, Homo sapiens
gtgtggtggtatcggaagggccgcgttggaggccgctggaagtgaggatgccgtgccggacagtggcacctgggaagcctgggagtgt

SEQ ID NO: 719401 - DNA, 145 bp, Homo sapiens
gcggggacgagcctggagcatggggccagtgcatccccaagcaagcaagcaagcaagcaagcaacagccaacaagcaggtcagcaattggtttcctgcagtcagtgcacagcacccacttgacaagctcggcaggcagcaaactc

SEQ ID NO: 719402 - DNA, 1512 bp, Homo sapiens
  misc_feature (1305)..(1305): n is a, c, g, or t
  misc_feature (1308)..(1308): n is a, c, g, or t
ctttccagagtaggtagagggatgatgctaataagtaggctgtgggtggttgtgatgaccccaattatgtgttttttggaaagcatgcccctcatttacataaatattatactagcatttaccatctcacttctaggaatactagtatatcgctcacacctcatatcctccctactatgcctagaaggaataatactatcgctgttcattatagctactctcataaccctcaacacccactccctcttagccaatattgtgcctattgccatactagtctttgccgcctgcgaagcagcggtgggcctagccctactagtctcaatctccaacacatatggcctagactacgtacataacctaaacctactccaatgctaaaactaatcgtcccaacaattatattactaccactgacatgactttccaaaaaacacataatttgaatcaacacaaccacccacagcctaattattagcatcatccctctactattttttaaccaaatcaacaacaacctatttagctgttccccaaccttttcctccgaccccctaacaacccccctcctaatactaactacctgactcctacccctcacaatcatggcaagccaacgccacttatccagtgaaccactatcacgaaaaaaactctacctctctatactaatctccctacaaatctccttaattataacattcacagccacagaactaatcatattttatatcttcttcgaaaccacacttatccccaccttggctatcatcacccgatgaggcaaccagccagaacgcctgaacgcaggcacatacttcctattctacaccctagtaggctcccttcccctactcatcgcactaatttacactcacaacaccctaggctcactaaacattctactactcactctcactgcccaagaactatcaaactcctgagccaacaacttaatatgactagcttacacaatagcttttatagtaaagatacctctttacggactccacttatgactccctaaagcccatgtcgaagcccccatcgctgggtcaatagtacttgccgcagtactcttaaaactaggcggctatggtataatacgcctcacactcattctcaaccccctgacaaaacacatagcctaccccttccttgtactatccctatgaggcataattataacaagctccatctgcctacgacaaacagacctaaaatcgctcattgcatactcttcaatcagccacatagccctcgtagtaacagccattctcatccaaacccccttaaacttcaccngcncagtcattctcataatcgcccacggacttacatcctcattactattctgcctagcaaactcaaactacgaacgcactcacaatcacatcataatccttttttaaagactttctttaactcccactgattacctttgttgaacactttctacccctttctttaactttacccttaacctccaactatgaaccctaactggcatct

SEQ ID NO: 719403 - DNA, 163 bp, Homo sapiens
cctcacgtctgtatcctacactttggagacacagcatgacacgcgccctgcaataattaacaacattttcgtttccaaaaccttatttaagtggcagaagcaggaagcagccatcaagagaagggcagaagcaggaagcaggctttggtgagcggcagaagca

SEQ ID NO: 719404 - DNA, 228 bp, Homo sapiens
tattaaaaaaaaaagtttttatttttttggtttttaaaaaaagggaaaaaaaaaaaagggaaaaatggggggggaattgggtgttttttcggggtgtaaaatatgaaggaggtttttgtcgagacgatcgcactggcggggtgttgttatacatatgggaagtacataataataccaagaagaaacatataaacaaacaaaaataaaaaaaacaaaaagaggaggcgg

SEQ ID NO: 719405 - DNA, 1781 bp, Homo sapiens
ctttccagagtaggtagagggatgatgctaataagtaggctgtgggtggttgtgatgaccccaattatgtgttttttggaaagcatgcccctcatttacataaatattatactagcatttaccatctcacttctaggaatactagtatatcgctcacacctcatatcctccctactatgcctagaaggaataatactatcgctgttcattatagctactctcataaccctcaacacccactccctcttagccaatattgtgcctattgccatactagtctttgccgcctgcgaagcagcggtgggcctagccctactagtctcaatctccaacacatatggcctagactacgtacataacctaaacctactccaatgctaaaactaatcgtcccaacaattatattactaccactgacatgactttccaaaaaacacataatttgaatcaacacaaccacccacagcctaattattagcatcatccctctactattttttaaccaaatcaacaacaacctatttagctgttccccaaccttttcctccgaccccctaacaacccccctcctaatactaactacctgactcctacccctcacaatcatggcaagccaacgccacttatccagtgaaccactatcacgaaaaaaactctacctctctatactaatctccctacaaatctccttaattataacattcacagccacagaactaatcatattttatatcttcttcgaaaccacacttatccccaccttggctatcatcacccgatgaggcaaccagccagaacgcctgaacgcaggcacatacttcctattctacaccctagtaggctcccttcccctactcatcgcactaatttacactcacaacaccctaggctcactaaacattctactactcactctcactgcccaagaactatcaaactcctgagccaacaacttaatatgactagcttacacaatagcttttatagtaaagatacctctttacggactccacttatgactccctaaagcccatgtcgaagcccccatcgctgggtcaatagtacttgccgcagtactcttaaaactaggcggctatggtataatacgcctcacactcattctcaaccccctgacaaaacacatagcctaccccttccttgtactatccctatgaggcataattataacaagctccatctgcctacgacaaacagacctaaaatcgctcattgcatactcttcaatcagccacatagccctcgtagtaacagccattctcatccaaacccccctggaaaggcttttcacccggggcggccaaggtcatttctcaattaaattcggcccaagcggggctttaacaattccttcaatttaacctatactctggcctaagcaaaactccaaacccttaacgaaaacgccaccctcaccaggtccggcaatcattaaatcccttcttcttcaaatgggagctttccaaaaagttctaacgtaccccaactaattaaggctttctttggaagggaacttcctaaggacaaaggccttcggcttaaaaccttcggcccttataacccccccccaacttatttaaaaccctagctgtggcggacggaacactctacttgtagcctaagtaaaacccaccgtctctccttgaatccaagattaatacaaatacctcctaactttaaccagggacgctccaaaccatacctaagtcaacaaggcccctaatacttcccctcctaccattatttaaccaacaacaacaatg

SEQ ID NO: 719406 - DNA, 626 bp, Homo sapiens
tggaccgggtgtggtcgctgatgaggttcctcatcaagggaagtgtggttggtgggcagcgtctatctggtgtacgaccaggagcatgctgttgggcccagcgagaagagaccaggcagccctacagaaggctggggaggtggtccccgcccgcacatgtaccagttcagccagatacgtgtgtcagcagactaggcctgcgagataccccaggtacgtacgggccgggaacgaggccacggagtttggcgtggatggtcagcgtctggagaggtccctcgcagtccctgtccacgattgttgtccgtccattattgagtgctgaccgtgagttctccggacctgtccatcctccctccgtcatctgagggatggtgctgtcctgagtcgctttgcaccagttctttctagcctcactcttctttttcaccaggtccctagacctcctccaaagattgactttccacatccgtgactcctggtaatgcaggtaaggcactccaggtatctttgcttggagggagacaaccccaggtcgtagcccctcgtccccagcttccatgggcacttaccgtttctgtccactcgcatccgttcctgcctcgactaggtgtctcttagaggat

SEQ ID NO: 719407 - DNA, 1881 bp, Homo sapiens
  misc_feature (1783)..(1783): n is a, c, g, or t
  misc_feature (1789)..(1789): n is a, c, g, or t
  misc_feature (1791)..(1791): n is a, c, g, or t
  misc_feature (1793)..(1795): n is a, c, g, or t
ctttccagagtaggtagagggatgatgctaataagtaggctgtgggtggttgtgatgaccccaattatgtgttttttggaaagcatgcccctcatttacataaatattatactagcatttaccatctcacttctaggaatactagtatatcgctcacacctcatatcctccctactatgcctagaaggaataatactatcgctgttcattatagctactctcataaccctcaacacccactccctcttagccaatattgtgcctattgccatactagtctttgccgcctgcgaagcagcggtgggcctagccctactagtctcaatctccaacacatatggcctagactacgtacataacctaaacctactccaatgctaaaactaatcgtcccaacaattatattactaccactgacatgactttccaaaaaacacataatttgaatcaacacaaccacccacagcctaattattagcatcatccctctactattttttaaccaaatcaacaacaacctatttagctgttccccaaccttttcctccgaccccctaacaacccccctcctaatactaactacctgactcctacccctcacaatcatggcaagccaacgccacttatccagtgaaccactatcacgaaaaaaactctacctctctatactaatctccctacaaatctccttaattataacattcacagccacagaactaatcatattttatatcttcttcgaaaccacacttatccccaccttggctatcatcacccgatgaggcaaccagccagaacgcctgaacgcaggcacatacttcctattctacaccctagtaggctcccttcccctactcatcgcactaatttacactcacaacaccctaggctcactaaacattctactactcactctcactgcccaagaactatcaaactcctgagccaacaacttaatatgactagcttacacaatagcttttatagtaaagatacctctttacggactccacttatgactccctaaagcccatgtcgaagcccccatcgctgggtcaatagtacttgccgcagtactcttaaaactaggcggctatggtataatacgcctcacactcattctcaaccccctgacaaaacacatagcctaccccttccttgtactatccctatgaggcataattataacaagctccatctgcctacgacaaacagacctaaaatcgctcattgcatactcttcaatcagccacatagccctcgtagtaacagccattctcatccaaaccccctgaagcttcaccggcgcagtcgtcattctcataactcggcccagggacttacgatccgtcattactatgtcgtgccatagacaaagcgtcaaactacggaaccgccagcgtcacagctgcgcaatcataaatccctctctcaagggacttcaaagctcgtagtcccacataataggctttttgatgacttctaggcaaggcctcgctaaacgctaacctcgccttaccccccactattaacctactgggagaactctctgtgctagtaaccacgttctcctgatcaaatatcactctcctacttacaggactcaacatactagtcacagccctatactccctctacatatttaccacaacacaatggggctcactcacccaccacattaacaacataaaacctcattcacacgagaaaacaccctcatgttcatacacctatccccattttcctcctatcctcaaccgaaatcattacggggttccccctnaaacancncnnnggggccgctcaaagtcccgccggggccacattcgcaccgcatgtggtagggccaagggtgtagccgccggctgaccgacggaagta

SEQ ID NO: 719408 - DNA, 1802 bp, Homo sapiens
ctttccagagtaggtagagggatgatgctaataagtaggctgtgggtggttgtgatgaccccaattatgtgttttttggaaagcatgcccctcatttacataaatattatactagcatttaccatctcacttctaggaatactagtatatcgctcacacctcatatcctccctactatgcctagaaggaataatactatcgctgttcattatagctactctcataaccctcaacacccactccctcttagccaatattgtgcctattgccatactagtctttgccgcctgcgaagcagcggtgggcctagccctactagtctcaatctccaacacatatggcctagactacgtacataacctaaacctactccaatgctaaaactaatcgtcccaacaattatattactaccactgacatgactttccaaaaaacacataatttgaatcaacacaaccacccacagcctaattattagcatcatccctctactattttttaaccaaatcaacaacaacctatttagctgttccccaaccttttcctccgaccccctaacaacccccctcctaatactaactacctgactcctacccctcacaatcatggcaagccaacgccacttatccagtgaaccactatcacgaaaaaaactctacctctctatactaatctccctacaaatctccttaattataacattcacagccacagaactaatcatattttatatcttcttcgaaaccacacttatccccaccttggctatcatcacccgatgaggcaaccagccagaacgcctgaacgcaggcacatacttcctattctacaccctagtaggctcccttcccctactcatcgcactaatttacactcacaacaccctaggctcactaaacattctactactcactctcactgcccaagaactatcaaactcctgagccaacaacttaatatgactagcttacacaatagcttttatagtaaagatacctctttacggactccacttatgactccctaaagcccatgtcgaagcccccatcgctgggtcaatagtacttgccgcagtactcttaaaactaggcggctatggtataatacgcctcacactcattctcaaccccctgacaaaacacatagcctaccccttccttgtactatccctatgaggcataattataacaagctccatctgcctacgacaaacagacctaaaatcgctcattgcatactcttcaatcagccacatagccctcgtagtaacgaggccgattcttcatccagaatcccccgtgaagcttcaccggcgcagtcattctcataatcgcccacggacttacatcctcattactattctgcctagcaaactcaaactacgaacgcactcacagtcgcatcataatcctctctcaaggacttcaaactctactcccactaatagctttttgatgacttctagcaagcctcattctccaccccttgacaaaacacatagcctaccccttgcttgatctatccctatgacgcataattgttacaagatacatctgtctacgacaatacagacctaatatcgctcattgcatactcttcaatcagccacatagaccttgatgtaacagccattctcattcaaacccgctgaagctttaccggtgcagtcattattatacatcgtccacagacttacatcctgattactattatgactagcagactcaaactacgaacgcactcacagtctcatgataatacactctcaatgactctaaactctactgccacttataactttt

SEQ ID NO: 719409 - DNA, 1854 bp, Homo sapiens
  misc_feature (1756)..(1756): n is a, c, g, or t
  misc_feature (1762)..(1762): n is a, c, g, or t
  misc_feature (1764)..(1764): n is a, c, g, or t
  misc_feature (1766)..(1768): n is a, c, g, or t
ctttccagagtaggtagagggatgatgctaataagtaggctgtgggtggttgtgatgaccccaattatgtgttttttggaaagcatgcccctcatttacataaatattatactagcatttaccatctcacttctaggaatactagtatatcgctcacacctcatatcctccctactatgcctagaaggaataatactatcgctgttcattatagctactctcataaccctcaacacccactccctcttagccaatattgtgcctattgccatactagtctttgccgcctgcgaagcagcggtgggcctagccctactagtctcaatctccaacacatatggcctagactacgtacataacctaaacctactccaatgctaaaactaatcgtcccaacaattatattactaccactgacatgactttccaaaaaacacataatttgaatcaacacaaccacccacagcctaattattagcatcatccctctactattttttaaccaaatcaacaacaacctatttagctgttccccaaccttttcctccgaccccctaacaacccccctcctaatactaactacctgactcctacccctcacaatcatggcaagccaacgccacttatccagtgaaccactatcacgaaaaaaactctacctctctatactaatctccctacaaatctccttaattataacattcacagccacagaactaatcatattttatatcttcttcgaaaccacacttatccccaccttggctatcatcacccgatgaggcaaccagccagaacgcctgaacgcaggcacatacttcctattctacaccctagtaggctcccttcccctactcatcgcactaatttacactcacaacaccctaggctcactaaacattctactactcactctcactgcccaagaactatcaaactcctgagccaacaacttaatatgactagcttacacaatagcttttatagtaaagatacctctttacggactccacttatgactccctaaagcccatgtcgaagcccccatcgctgggtcaatagtacttgccgcagtactcttaaaactaggcggctatggtataatacgcctcacactcattctcaaccccctgacaaaacacatagcctaccccttccttgtactatccctatgaggcataattataacaagctccatctgcctacgacaaacagacctaaaatcgctcattgcatactcttcaatcagccaggatagccctcgtagtaacagccattctcatccaaagccccctgaagctggagcggcgcagtcatgcgattctcataatcgcccacggacttacatcctcattactattctgcctagcaaactcaaactacgaacgcactcacagtcgcatcataatcctctctcaaggacttcaaactctactcccactaatagcttttgatgacttctagcaaggcttgctagctaacctcgccttaccccccactattaacctactgggagaactctctgtgctagtaaccacgttctcctgatcaaatatcactctcctacttacaggactcaacatactagtcacagccctatactccctctacatatttaccacaacacaatggggctcactcacccaccacattaacaacataaaacctcattcacacgagaaaacaccctcatgttcatacacctatccccattttcctcctatcctcaaccgaaatcattacggggttccccctnaaacancncnnnggggccgctcaaagtcccgccggggccacattcgcaccgcatgtggtagggccaagggtgtagccgccggctgaccgacggaagta

SEQ ID NO: 719410 - DNA, 1223 bp, Homo sapiens
  misc_feature (346)..(346): n is a, c, g, or t
ggcggacggaccggttacgcggctggtcgtgcgctattgctggtacctgcatgaaatagcgacgagcagcttcgacgctcagtgggactggcgtgcacgtgccctgcctcatagattgctcctccaggctagaaggtctaggggctgagccaattgtagtgcttggccgtcgaatatcctcatgtaatagagggctttgctcgcccacggtgtttgtacaacagtccctagtggcatgccgacaagaggtgcaagcacatgggttgggacgctctcacagttgccgttggctagattgcgtagaggaggtctagctagagcaatttagtactaggggagccatggntcttagcagacgttcatcgtcaggcgcaacgttactccaatcccagactctagtggtgggtggaaggcgctttgatgtcctgtggatgcctccgagcatcgtagtcgaccagatcgtgccttccgtgtgatctatggaacctcaagaaaacgggacgagttacttggtggccataggggcttgcttctgcttctttgcgcgttcggtcgtgtgggcttgacgggccctggaggtgcgccttgccattgcgctagccttttcgttcgttccacctcgttcgtcgtagcgtcgcgcttgttgtaaccttttgtacgcgtaccactcgcctgtctgcgcaggtggcccgtccgcgacacttggtcgtcgcgatcgcccatggggtcgaggttcgcgctcgttggagtacgcgtcactctccgattcgcgaatggtggcaatgggcaaagtcgcgaaaatcggtcatctctagctatagctgtggggccatagctagcgaaggggcccccaggggcattgctttctgaaagcccactcctaacaaaggtacgttctacggcctgggccttggttacactagggcagggtgccatgctccccctttggggtcgcgtcgggacacttcctttactggacgtatttgctcaagcgtttctgacgggaacccatggcgccgggacggaagttctccccggcctgtaacttgggggcattgggggggatggcccttttaagtgttgggattccttcccctttccttccgtcatggtctggaagtccgggccgcgttcgagttcggccccgggtggcgcagtgtctgtggccgtcgcttttccttacccttgggacacgatgtgcggataactacccgtgcgccccg

SEQ ID NO: 719411 - DNA, 1068 bp, Homo sapiens
tgttttcttgtgtttcttttgtctttttatttgggcttttttgttgtctgtttcttattttgtttttgttttatgtctttcttttggtgtttttgacctacctttgttctcttgcccctcttgtatttgtgtgttctccatcttttccctcctgtgtcccctgtccatgctctatgctgacctccgcttgttggctgtctactgggtccccttcccacgtctccatttctttatgccttggctttgcccctctcaccagtccgtggtagtccagcagtatcgagctctcactgtgccggtactcacccagcaggtcttcgatgcctagtacttgatggctgcctgtgacccccgccacggccgatacctctccgtggctgctgtcttccgtggtcggatgtccatgaaggtaggtcgtatgtagcagatgcttttacgtgcagttacttagttactagcatgcttacttttgtggtaatggtatcctcctatactatattgttctatagtactagtccgttcttgtgttactatccctctaccttcgttggtcctctatagtatggactagtctacctttcatatggacatatgagtctacttgccattctcaggtatgctctttcaatgctgcatttctcgtgatgcagttgtcatctgcctattgtttcctgctctggataaggcctcttgccttcgcaacgtgtgtaactacacacaggacagacagggctattgagatcgagtaatggacgcttcaaccagaagagacctgaagagccaaacaatgaacagaacctcagctcatcatagaagataatcaagacaagtacacaaggaatgccaacctgcaagaaagaaggaagagaagagaatatatcaggatgagggaaggacacgaaagaagagaaggcactaaaggcagagtccacccaatcaaccatcaaggcattaatcagttaccttagaccgtcatacatcaactgcccctttcctcatcccatcaagaaattatgtgtttgctagccatcatagtcattgttttttgtctttttacctacggggggg

SEQ ID NO: 719412 - DNA, 1412 bp, Homo sapiens
  misc_feature (1273)..(1273): n is a, c, g, or t
ctttccagagtaggtagagggatgatgctaataagtaggctgtgggtggttgtgatgaccccaattatgtgttttttggaaagcatgcccctcatttacataaatattatactagcatttaccatctcacttctaggaatactagtatatcgctcacacctcatatcctccctactatgcctagaaggaataatactatcgctgttcattatagctactctcataaccctcaacacccactccctcttagccaatattgtgcctattgccatactagtctttgccgcctgcgaagcagcggtgggcctagccctactagtctcaatctccaacacatatggcctagactacgtacataacctaaacctactccaatgctaaaactaatcgtcccaacaattatattactaccactgacatgactttccaaaaaacacataatttgaatcaacacaaccacccacagcctaattattagcatcatccctctactattttttaaccaaatcaacaacaacctatttagctgttccccaaccttttcctccgaccccctaacaacccccctcctaatactaactacctgactcctacccctcacaatcatggcaagccaacgccacttatccagtgaaccactatcacgaaaaaaactctacctctctatactaatctccctacaaatctccttaattataacattcacagccacagaactaatcatattttatatcttcttcgaaaccacacttatccccaccttggctatcatcacccgatgaggcaaccagccagaacgcctgaacgcaggcacatacttcctattctacaccctagtaggctcccttcccctactcatcgcactaatttacactcacaacaccctaggctcactaaacattctactactcactctcactgcccaagaactatcaaactcctgagccaacaacttaatatgactagcttacacaatagcttttatagtaaagatacctctttacggactccacttatgactccctaaagcccatgtcgaagcccccatcgctgggtcaatagtacttgccgcagtactcttaaaactaggcggctatggtataatacgcctcacactcattctcaaccccctgacaaaacacatagcctaccccttccttgtactatccctatgaggcataattataacaagctccatctgcctacgacaaacagacctaaaatcgctcattgcatactcttcaatcagccttgacggtgccatggaatttgncatgggtggaatcatattggaacatgtaaaccatgtagttgaggtcaatgaaggggtcacttgatggcaacaatatccactttaccagagttaaaagtagccctggtgaccagcgcccaatacagacccatccgtaccg

SEQ ID NO: 719413 - DNA, 255 bp, Homo sapiens
  misc_feature (56)..(56): n is a, c, g, or t
ctagctgctctaacccttacggtgacgactgcgtaggacgggggcgggacgtggcngcgggaactctagacacggaaatgtgtagtccggggataccgggacacttactcttacgcggggggacagactggatgagtggggtaccttatcgtcgtggtacgggcggaatatggaagtggtattacgtcaggtgcgggagggatctgaggaaacaggacctgatacgcggtctggtgtttcggtgggagttgagta

SEQ ID NO: 719414 - DNA, 573 bp, Homo sapiens
tatgacacatctgtgagatgtcaatgccattcactctactctagattttctattacataaagaaaaaaacaagtgagaatctctggagtctcataaatttcctgtattctgtgtttctaaaagtgaaacaaatatctaaatttctgtaaacttattaaacactgaaaaaatagctgactttgtttaaagaaaaaagccatgcctcatgttaaatcatatgctattttttaaacttagagaaaaacaacgttattacttttactcaagttaagtacagttaaaaatactaacctttcaataactgaggtgatttaaagagagaaagaatgaactctagcaaatcagaaagatggccagcttgacttatttcacaagaactgcatctaataattttttaacagaaagcactcgctaaaactgacgccagttaaggctcagcaaaaaatgtattattaagttggcctgcttatatcctattacagactgcttatgaatacttgattctattttatacaactgacaagagtcaacaggcttaatgacaattaagatcaactcgtgtatgtgtcacat

SEQ ID NO: 719415 - DNA, 1206 bp, Homo sapiens
ctttccagagtaggtagagggatgatgctaataagtaggctgtgggtggttgtgatgaccccaattatgtgttttttggaaagcatgcccctcatttacataaatattatactagcatttaccatctcacttctaggaatactagtatatcgctcacacctcatatcctccctactatgcctagaaggaataatactatcgctgttcattatagctactctcataaccctcaacacccactccctcttagccaatattgtgcctattgccatactagtctttgccgcctgcgaagcagcggtgggcctagccctactagtctcaatctccaacacatatggcctagactacgtacataacctaaacctactccaatgctaaaactaatcgtcccaacaattatattactaccactgacatgactttccaaaaaacacataatttgaatcaacacaaccacccacagcctaattattagcatcatccctctactattttttaaccaaatcaacaacaacctatttagctgttccccaaccttttcctccgaccccctaacaacccccctcctaatactaactacctgactcctacccctcacaatcatggcaagccaacgccacttatccagtgaaccactatcacgaaaaaaactctacctctctatactaatctccctacaaatctccttaattataacattcacagccacagaactaatcatattttatatcttcttcgaaaccacacttatccccaccttggctatcatcacccgatgaggcaaccagccagaacgcctgaacgcaggcacatacttcctattctacaccctagtaggctcccttcccctactcatcgcactaatttacactcacaacaccctaggctcactaaacattctactactcactctcactgcccaagaactatcaaactcctgagccaacaacttaatatgactagcttacacaatagcttttatagtaaagatacctctttacggactccacttatgactccctaaagcccatgtcgaagcccccatcgctgggtcaatagtacttgccgcagtactcttaaaactaggcggctatggtataatacgcctcacactcattctcaaccccgcaacacatactaccctctgtctatcctatagcatataacacctcataccaactctcatatcctctagacaccaca

SEQ ID NO: 719416 - DNA, 359 bp, Homo sapiens
  misc_feature (98)..(98): n is a, c, g, or t
  misc_feature (111)..(111): n is a, c, g, or t
  misc_feature (133)..(133): n is a, c, g, or t
  misc_feature (145)..(145): n is a, c, g, or t
  misc_feature (147)..(147): n is a, c, g, or t
  misc_feature (168)..(168): n is a, c, g, or t
  misc_feature (297)..(297): n is a, c, g, or t
tgaaccctgacctttggctgccttggccagagtaccaaaaatgagtgacccagacctctgaccttgacccctgatttctttcatccccagtccagggnctgggctccccanatggaggcagtcagcctcccanccaggccctaananccaaaccatgggctggtcccncttggacctgtggccaggaccacctcagcccctgggcctgcactgcctgcaggtgtggcccccttggcctggacctggggcctgaattgtgggaagggtggtttctttctttccttttttttcttttcntttttttttttttttttgtgcttcggagacatcagaattaataacactatttttgattttga

SEQ ID NO: 719417 - DNA, 1790 bp, Homo sapiens
  misc_feature (1692)..(1692): n is a, c, g, or t
  misc_feature (1698)..(1698): n is a, c, g, or t
  misc_feature (1700)..(1700): n is a, c, g, or t
  misc_feature (1702)..(1704): n is a, c, g, or t
accgccgacaccccccaaacttacggctaggtagcgaggcctcggtggttgattatactagcatttaccatctcacttctaggaatactagtatatcgctcacacctcatatcctccctactatgcctagaaggaataatactatcgctgttcattatagctactctcataaccctcaacacccactccctcttagccaatattgtgcctattgccatactagtctttgccgcctgcgaagcagcggtgggcctagccctactagtctcaatctccaacacatatggcctagactacgtacataacctaaacctactccaatgctaaaactaatcgtcccaacaattatattactaccactgacatgactttccaaaaaacacataatttgaatcaacacaaccacccacagcctaattattagcatcatccctctactattttttaaccaaatcaacaacaacctatttagctgttccccaaccttttcctccgaccccctaacaacccccctcctaatactaactacctgactcctacccctcacaatcatggcaagccaacgccacttatccagtgaaccactatcacgaaaaaaactctacctctctatactaatctccctacaaatctccttaattataacattcacagccacagaactaatcatattttatatcttcttcgaaaccacacttatccccaccttggctatcatcacccgatgaggcaaccagccagaacgcctgaacgcaggcacatacttcctattctacaccctagtaggctcccttcccctactcatcgcactaatttacactcacaacaccctaggctcactaaacattctactactcactctcactgcccaagaactatcaaactcctgagccaacaacttaatatgactagcttacacaatagcttttatagtaaagatacctctttacggactccacttatgactccctaaagcccatgtcgaagcccccatcgctgggtcaatagtacttgccgcagtactcttaaaactaggcggctatggtataatacgcctcacactcattctcaaccccctgacaaaacacatagcctaccccttccttgtactatccctatgaggcataattataacaagctccatctgcctacgacaaacagacctaaaatcgctcattgcatactcttcaatcagccacatagccctcgtagtaacagccattctcatccaaaccccctgaagcttcaccggcgcagtcattctcataatcgcccacggacttacatcctcattactattctgcctagcaaactcaaactacgaacgcactcacagtcgcatcataatcctctctcaaggacttcaaactctactcccactaatagctttttgatgacttctagcaagcctcgctaacctcgccttaccccccactattaacctactgggagaactctctgtgctagtaaccacgttctcctgatcaaatatcactctcctacttacaggactcaacatactagtcacagccctatactccctctacatatttaccacaacacaatggggctcactcacccaccacattaacaacataaaacctcattcacacgagaaaacaccctcatgttcatacacctatccccattttcctcctatcctcaaccgaaatcattacggggttccccctnaaacancncnnnggggccgctcaaagtcccgccggggccacattcgcaccgcatgtggtagggccaagggtgtagccgccggctgaccgacggaagta

SEQ ID NO: 719418 - DNA, 255 bp, Homo sapiens
gcgtatgttacaggcacactggcatgaactggtaggtccagatgacagtgacccagctgctataactgttagcagtaccttgaagccttagtcttaggaaaaccccctaacctctacttctatttactgttggtggggctacacatacagggagagtagaccacaggccagagtccatccattccactcacattccacagaagggtcattgtttcttttccttggaccattttcttcagcccaggttagaccttg

SEQ ID NO: 719419 - DNA, 1423 bp, Homo sapiens
  misc_feature (1325)..(1325): n is a, c, g, or t
  misc_feature (1331)..(1331): n is a, c, g, or t
  misc_feature (1333)..(1333): n is a, c, g, or t
  misc_feature (1335)..(1337): n is a, c, g, or t
gtcggaccccacacacctgagtccccctaagtgtggcagcactctagtatttgttgaacacatgaatggattaccagcctcaggggtaccacaataaattcttcagactgtgttattcctttgacctttaactttcctaaaccccctcctaatactaactacctgactcctacccctcacaatcatggcaagccaacgccacttatccagtgaaccactatcacgaaaaaaactctacctctctatactaatctccctacaaatctccttaattataacattcacagccacagaactaatcatattttatatcttcttcgaaaccacacttatccccaccttggctatcatcacccgatgaggcaaccagccagaacgcctgaacgcaggcacatacttcctattctacaccctagtaggctcccttcccctactcatcgcactaatttacactcacaacaccctaggctcactaaacattctactactcactctcactgcccaagaactatcaaactcctgagccaacaacttaatatgactagcttacacaatagcttttatagtaaagatacctctttacggactccacttatgactccctaaagcccatgtcgaagcccccatcgctgggtcaatagtacttgccgcagtactcttaaaactaggcggctatggtataatacgcctcacactcattctcaaccccctgacaaaacacatagcctaccccttccttgtactatccctatgaggcataattataacaagctccatctgcctacgacaaacagacctaaaatcgctcattgcatactcttcaatcagccacatagccctcgtagtaacagccattctcatccaaaccccctgaagcttcaccggcgcagtcattctcataatcgcccacggacttacatcctcattactattctgcctagcaaactcaaactacgaacgcactcacagtcgcatcataatcctctctcaaggacttcaaactctactcccactaatagctttttgatgacttctagcaagcctcgctaacctcgccttaccccccactattaacctactgggagaactctctgtgctagtaaccacgttctcctgatcaaatatcactctcctacttacaggactcaacatactagtcacagccctatactccctctacatatttaccacaacacaatggggctcactcacccaccacattaacaacataaaacctcattcacacgagaaaacaccctcatgttcatacacctatccccattttcctcctatcctcaaccgaaatcattacggggttccccctnaaacancncnnnggggccgctcaaagtcccgccggggccacattcgcaccgcatgtggtagggccaagggtgtagccgccggctgaccgacggaagta

SEQ ID NO: 719420 - DNA, 815 bp, Homo sapiens
cgagacgttgtctctacaaaaaattttttaaattggccaggcgtggtggcctgcacctgctagtcctaactacttatgaggctgaggcggaggatcacttgagcccaagaagttcagggctgcagtgaactatgattatgccactgcactccaccctcggtgatagggcgagaccctgtctctaaaaataatagtaataataataaaccttatatttgacatttgctaagagagtagatcttaaggattctcattacaaaggaaaggaaagggtaccaggtaaggtgataactctgttaattagcttgatcataccaatcatttcacaatggtatacatatatcaaatcatcatgttatataccctgagtatatacaatttttatttgtcaagttataccgcaataaagctgaaaaaatattaaaggacatccttcaggtcgaaagaaaatgaggtattaagagttattaaaatggcacagcaacagcaaatgaagcaacgctggaaatggtaaatatgtgattaaaatatcacagaatatatatatattcatgctttgacaaatgttaaatcgcttcaaggaaataatggcaacaccattagtttataaacttagagttgataatatcgctgagatcttaaaaaatttataacaagcgcaaaacataaattatgatatgtaacatataattggtgtaaaaaaagacgcacaagtctctggcagggtgataagagtggctaattagtgcaatgcatatttataagggtaatagggagagggaagagggggagagaaagaaagagagaaaggaaca

SEQ ID NO: 719421 - DNA, 1351 bp, Homo sapiens
  misc_feature (1253)..(1253): n is a, c, g, or t
  misc_feature (1259)..(1259): n is a, c, g, or t
  misc_feature (1261)..(1261): n is a, c, g, or t
  misc_feature (1263)..(1265): n is a, c, g, or t
gagtccgagcccgattacgtactccttattatgctgttccccggtgttatattgtgatccgcaaaaaaaccccctcctaatactaactacctgactcctacccctcacaatcatggcaagccaacgccacttatccagtgaaccactatcacgaaaaaaactctacctctctatactaatctccctacaaatctccttaattataacattcacagccacagaactaatcatattttatatcttcttcgaaaccacacttatccccaccttggctatcatcacccgatgaggcaaccagccagaacgcctgaacgcaggcacatacttcctattctacaccctagtaggctcccttcccctactcatcgcactaatttacactcacaacaccctaggctcactaaacattctactactcactctcactgcccaagaactatcaaactcctgagccaacaacttaatatgactagcttacacaatagcttttatagtaaagatacctctttacggactccacttatgactccctaaagcccatgtcgaagcccccatcgctgggtcaatagtacttgccgcagtactcttaaaactaggcggctatggtataatacgcctcacactcattctcaaccccctgacaaaacacatagcctaccccttccttgtactatccctatgaggcataattataacaagctccatctgcctacgacaaacagacctaaaatcgctcattgcatactcttcaatcagccacatagccctcgtagtaacagccattctcatccaaaccccctgaagcttcaccggcgcagtcattctcataatcgcccacggacttacatcctcattactattctgcctagcaaactcaaactacgaacgcactcacagtcgcatcataatcctctctcaaggacttcaaactctactcccactaatagctttttgatgacttctagcaagcctcgctaacctcgccttaccccccactattaacctactgggagaactctctgtgctagtaaccacgttctcctgatcaaatatcactctcctacttacaggactcaacatactagtcacagccctatactccctctacatatttaccacaacacaatggggctcactcacccaccacattaacaacataaaacctcattcacacgagaaaacaccctcatgttcatacacctatccccattttcctcctatcctcaaccgaaatcattacggggttccccctnaaacancncnnnggggccgctcaaagtcccgccggggccacattcgcaccgcatgtggtagggccaagggtgtagccgccggctgaccgacggaagta

SEQ ID NO: 719422 - DNA, 288 bp, Homo sapiens
caggcaccaggctggcagctgcggttcatcgaagagtcgcgcctgcgtgagcagcatgaaggcgttgtcggctcgcaggttcttcttcaggggccattcaacgcctcccgggccattcaacgcctccgggccattcaacgccctccgggcattcaacgcctccggggccattcaacgcctccgggaccattcaacggctccggaaggcgttaaatggccatccccttattagcgggcgcagtgattataggcttacggtctaagattaaaaatggcctataccaattt

SEQ ID NO: 719423 - DNA, 933 bp, Homo sapiens
  misc_feature (512)..(512): n is a, c, g, or t
  misc_feature (522)..(522): n is a, c, g, or t
  misc_feature (529)..(529): n is a, c, g, or t
  misc_feature (545)..(545): n is a, c, g, or t
  misc_feature (562)..(562): n is a, c, g, or t
  misc_feature (644)..(644): n is a, c, g, or t
  misc_feature (693)..(693): n is a, c, g, or t
  misc_feature (702)..(702): n is a, c, g, or t
agaaaaagaatcagaagaaacctgaaaatgatgatgatgtggagattaagaagcagttgtccaagtatgaatctcaactttcaacaaatgaggagaaagtagatacagatgatcgaactgaaggctatttacgagcagactcacaagagccctcccactttgattctcagcagcctgcagtcttggaagaagaagaggtcatgatagctcatgctcatccacaggaagtctacaatgaatatgtacccagagggtgcaagaataaatgccattcacatttccacgatacactcggccagtcagacgatctcattcaccaccatcatgactaccatcatattctccatcatcaccaccaccaaaacaccatcctcacagtccccggcccaggggctaatccctgcggaaggagcgtgaagagagtgcgcgggtgtcgccatcttgtggcccgtggtagtgtgttataagtggggtgagtggcctgcacaaatttcagcgatggcctagcaatntggtgctgcnttttacntgaaggcttatcaagntggtttaacgtacttcntgttgcttgtgttccttgtcatgagttgcctccatgaattagcgtgactttgcttgttcttaactaaaggctggcattgacncagttaacgcaggctgtcctttataaatgcatttgtcagccatgctggncgtatcttnggaatggcaacagcgaattttcattcggtcattatgcgtgaaaattgttctatgctggatatttgcacttacttgctggcttattcatgtatgtcgctctggttgatatggtacctgaaatgctgcacaatgatgctagtgaccatggattgtagccgctgggggtattccttttacagatgctgggatgcttagggtttggaattatgttacttatttccatattcgaac

SEQ ID NO: 719424 - DNA, 386 bp, Homo sapiens
tgagcccttcacagtgttaagggttttagaaacccttagtgcttacaaaatacacacttctctccccatttgtgcgtgacatcggtctctatagaagagggaagaatgtcatagacacaggtctggtattcaacacagcgcaagtcctttaatctgtcgcctcagttcttcatctctaaatatgggacctgttacctgcctccagatttcctcatagggccgtgtcagaattaatctcaacgcaaaacacataagtgcctatataaattctaaacgcacccgtctgtgagtataaagaattaattttaacatatatatatatatatatatatatttttgtgacacggaatctcactcgtggtgcataggctcgggcgcaatggtgc

SEQ ID NO: 719425 - DNA, 154 bp, Homo sapiens
ctgagtacactttgctgtagtttaatgtttcactgtaacatatgcttctgtcacccacatatgtcacagtgaaacattaaaactacagcaaagtgaaacgcggtctgatgcacctgccacctcccagcctccatacccgtcccccccccgcact

SEQ ID NO: 719426 - DNA, 1287 bp, Homo sapiens
gcagccgtggctgagtccagaactactgagacaggatttacatagggtactaaatgtagaagtacagatatttacagtagtaagggattacagcatgtagaatatagccagtgggcaggtagcctttccaggacatgccatacgaactacagcatgctgaatacagcaaactgacaaggtacctcctatataagcccattagcgatatacacgctaatttatccactcaactcagaactaccagaatgaacaacatatcccaagtcaggtgtacacctctagggaattgcgaagacaacgactgctagcatatgcctcatccaccatgcgcaaactcaccaccagtaccactagcttgacccgcacttacacaacacacatccctcaaacaacccactccctctccctgaccttactatcaccctcgcgtaccagccatcccgatcatgccaaacccacgcaactccctgcacgacaaacggccccatccacccacacacacgcaataatcaggccccaccaggccacacccctcaacaccacaataaaaacgcaacgacaagcccaccgcagaacaaaacacacacccctaccatgactacgacacaacccatacccttacatcaacccacagaccacatacaccaacatccctctacccccaaacaaaaataatatcacacctacagccaccacttcaaccccaaaaaaaacttatacaaatcaccccaaaacacccaccaaaaaaaacactcactatcccactacgacacccttctctcacacaccactcaaccaacaccacagcacacaaagctgcactactcatacacttagcaaaacctgtaaatagcccagaccgacaacaaaccagtacaagtcaataacacaacaacacaacactcaccacacaccccataccacgacacacaaaccgacacacgcagacccagcacaacatccacaacaaaaccacaaccgaccccagcaacaccaaacgcacaccccctcctaaccactaccacctaaccacatcaccacactactccctcacacacaacacacccacactctcccacccccctcacgaccaccaccgcaacccctcaaacacgaccaccaccaccactcacacccacacaaccatccccacctacactcacccacaatcacacacaaacccacacacacacactacctccccccccacacctcacctcacaacccccgcccccacacaaaatctccaaccaccgcaccactcagctcacgctaccaaacacaccc

SEQ ID NO: 719427 - DNA, 1270 bp, Homo sapiens
agcgggagaggcggggcggtgcccccaccgaggcccgggcgccctctgcaggccacaggcagcgactcaccagttgcctacatctttcctctcctccctcttggggcttacctcaggccacatttactgtgtgtctgggcagtctctcaggctccgactcccgtccctttcttcccacttccagtgcgggacgtgtgagtgtcttcgcgggaaaactgccaataaagtagtacttcttctcgctcccaagatccccgactccccttaaggcaccgcgagatctgacggcgcggctaccatggcggcggcatttgaagcctcgggagccttacgcagcagtggcgatgctatgccggatgagcatgtgtgcgtgcaggtcccgtgcccagaagcaacaacccgggcctgtgaggatcctgcggaaccgctcaggatctcagcaggaccccgaggacccgcaccggggcgatgtgctgtctggcggagccgggacgacttcgagatcactgcctgcttacgcggcaggtgctggaggggactgcagggcggcacggctctcgaagaggaccatcgaccggtgcaagctccacggacaatgccgctggggggcgcagagcaggctcgacatagtagctccaagctagatctggcaccgggacaacacttgtagagtacatacaacacaaagctttggactctagtagaacaagacaacttaaaggtacgccagacacctaggaatccttgcggagccctaacaacgacagcaacacttgtgaggcgacccagacatacattacctggtacataaccaagcccaagttgggagtcaacaacgatgggccagcggtacacaaacggcaacgagcagcaacaatgcgaaaggcgacaacccaaaaaacaaacagagacacaacaccacagaaccaagacaggggacacaacggagcacagaaccgaccccgcggccaccaaaataccacaccaaccaccaacacaaaccggacgacatacggcagaacccacaagggcgcaagagaaaagcagccacccgcagaccgacgcacagcaacaccccaacgcgtggacgcaaaccacgagagcccccgaagacccaccacaacagagtcagcaacacacgacacatgccatcaccgccaaccacaagcaggatagaaacaccacccacgcgcagacgaaaggcggtacgcgcagacgagagagacacacaccagacatgacaacaatcacccctcccacagaacgacag

SEQ ID NO: 719428 - DNA, 883 bp, Homo sapiens
gtccacctctgggggcctcacttagggcggcttctctggttggctccccggggtgctcgtccacgacacaccttccgctggatgctcgcatgttgaagggctttcataggtgagcatagcctttgcagtgggcgctgtgaatgcccgtggtctcttccgggtctccgccgcggcgtccctgttgcctgatcagcagggtgaaggctctttgccggtctgtgccctcccacgttccagggcacgcctgtcctccccgcaaccggggggttttcctttctccccctcaggcgcccatcttgtcgtcggcgatcccctagcgccgcctactcccccccggtttcggtgaacaggcgcttgttcctctgcccccagcgggtgcccccctttcgctcccactgaatggggaggatttcttacccggattctagggcccccagagggccctctcacagacatctgtgcccacagggggcagtgtcttctcttaaagaagaactgtccgataccacaagttcgttggacaaaaagtctccgcgccttatgttcccacctccatgcgcacaccccagagcagtctctcgcggcggccgcccctttctatacacgaggagctggatcgcttccccctcccgccggtgagagcacaatttgtgccgcacgatgctttgtccccgcgaatatgtttcgcgccacagaacccgcacttgtttcttggtgacatacaggggagcgctccacccctctatcgttcgcgtctggatcttatcatacgggatagctgcactgcagagcaagatatggagagcgggcggacgcagagggaaagttcggggggcccaaaaacaacccggcaaacaccccatcttgataacagcccacatgc

SEQ ID NO: 719429 - DNA, 113 bp, Homo sapiens
  misc_feature (56)..(56): n is a, c, g, or t
attgaaagattgatgagtgtgactttgactgttaagtggttgcagctgaccatgtntgcataggcaggactcggtccccttgcgtgtcccctccctctcgtcggcattcaagc

SEQ ID NO: 719430 - DNA, 744 bp, Homo sapiens
agtgcttggacggaacccggcgctcgttccccaccccgggcggacgccatagccagacctccgatcacctcttcaccgcaccctcggaatgacccaaggaccaccgacgaagctccagcgccaagcagacaccagcagcgcgccgccatcatccattagagcgccgcaacattgacagagcgccgatccaccatcagcaggtgcgaccagaagctacacaccaaggacatcagagagcacgaacatcacaccgacagactcaaaactaggagcatctcacgccatcctacggtagtaccagataccatgtcgttacatacatttgaacagcagatgatgtggcttagaagaactttgcacaaattactaatactatcaccaactctcacatgaagagagggaacatgctgacgacaactgactgaccctgcagaaccaaagaggtggacgaatctctccttcaggatatcaagaaaccagactgtgatgactggcgagagcgggctgacatgcaatggacttgtgccataacaatttggacaaacaaacatgtgaaatacagacaactacatggaaactgacacaacacagcgcactgacaacaaatgaacaccataagagtgactaacatatgagaaaacataacctgaatgagaaaggatgaaaaccatcaaagaatagcagagaccacgatgaacacacgttgcgccagaaggaacacgacaaacatacatggggaaaaca

SEQ ID NO: 719431 - DNA, 102 bp, Homo sapiens
tctgggacagcttagagcattagggagctgctaaagagaagagggctgaatagcaagcaagagttacgtgtgctcagagggaggaggaagcctcccaggtgg

SEQ ID NO: 719432 - DNA, 278 bp, Homo sapiens
  misc_feature (18)..(18): n is a, c, g, or t
  misc_feature (63)..(63): n is a, c, g, or t
  misc_feature (69)..(69): n is a, c, g, or t
  misc_feature (71)..(72): n is a, c, g, or t
  misc_feature (79)..(79): n is a, c, g, or t
  misc_feature (83)..(83): n is a, c, g, or t
  misc_feature (91)..(91): n is a, c, g, or t
  misc_feature (118)..(118): n is a, c, g, or t
  misc_feature (146)..(146): n is a, c, g, or t
  misc_feature (183)..(183): n is a, c, g, or t
  misc_feature (210)..(210): n is a, c, g, or t
  misc_feature (218)..(218): n is a, c, g, or t
  misc_feature (224)..(224): n is a, c, g, or t
  misc_feature (257)..(258): n is a, c, g, or t
  misc_feature (264)..(264): n is a, c, g, or t
gcggctcggagggcgggngcccgcgcgggtccccggtgcgctgcgggcaggcggtgaggctcncgcatntnnttacggngcanagaacctncacacgaaccacttcccgtcgccgatntccaacaaccaggaggtgagttcctttngggaagacggcgagggcgacgacctggacctatgganagtagcagctgctctggacagcactgnggagcgtnaggctnctgtgcgcttccagcatgatgggcacgtctgannttcctntcagtcacgggtga

SEQ ID NO: 719433 - DNA, 318 bp, Homo sapiens
tcccttcgctgatttgaagcagagtatacaactgcggcacgggagaccaggtgctgggaatggggctctcctgggaaccaaacaatgctggttctgcaatccgcttgcgtctagactactctccagaagaggataaaacatggccttgagcaactgcctagaagaggcaatctccatacggctgcgttgctgcactctggcatcgcagtgactcgcagcaagtccttatctcttgcacacgctcttcccgggaggaggaggtcgtgcacaccaatttgacgctcgagctgctacccccgcctgcgaccctgtcagggc

SEQ ID NO: 719434 - DNA, 598 bp, Homo sapiens
  misc_feature (162)..(162): n is a, c, g, or t
tagattcctgtaaaaagttaggtccttggattatggacctaagaagaacctgtgaatacctttcctataggtaaaggcttgattagcaggtccgcgatacagttatctaggccttaaccggcaggaccaaatgttcatggacacggttatcttaaaaaactnggttcatcaactctcagccgtcatccggtcaagggtatattgaggatctcatcagacttgattcgaaaaaaaatctggtttgaaccaataggtcctctctcagacaaggcatctatgtttgaaacgttaaaggtctcgtacccctgtggaaccttcccaagggtttatcgcgtggccactttattcttacaagggtctaaacgtgttcgcattgtcctcaatagagaatgctgttaacccccagactttcctttgacccaaattttctggacctttcatgccaaagtgaacttttgtaaaaagaatttaaaatgcttcatttttaaaaaagggtgtttaaaaacagggctggaattcttatgcccatttattaacccttcaagtttttttgacggcgtggacccaataaaatttggcattttgatagaaaacaaca

SEQ ID NO: 719435 - DNA, 683 bp, Homo sapiens
tgtacatggcatagctgttcctatgatgtacctagtatccgcaatccagtcagcgacgttagtaccatgctcgtgggttgggatgggtgtgtgtgtcctcacacaaccagctgaggtctagcactgagctgggttggcttgcctttggtccctttactcctctgactggaaatgcaggagactctggacagattcctctctgccaagtctgctaagcccagaacatgagtaaccacactgggacactgccacctggggcctcaagtccttctccacaaacttgcttcccatggtcagcattgccactgcctgaacacctccaacagggtccctggtgtcactccaaacacatcgctctctcacaaccccatgcaatgattcattcctggggtcctttcggtcttccatctaaacaccaccataggatgcttcctccacaccatactgaactgtcactcggttatcagtcactactgcagacattgggagagaagatgaagaactgagaatgtccagcgtgaccatcgcgcgtctctgtacccatggcttttgcctcccaagccctgtagcaggtgcacttagtcccaactgctcctccccagcgctgtgtaaaatcgatgactgacaatgagtactaatcccctagagtgtcctttctcgcactgtacttgacaattattctg

SEQ ID NO: 719436 - DNA, 84 bp, Homo sapiens
gcctgcgccgaccaccccttccttttcttcatccagcacagcaagaccaacgggattctcttctgcggccgccaccgcgtcgga

SEQ ID NO: 719437 - DNA, 317 bp, Homo sapiens
  misc_feature (7)..(7): n is a, c, g, or t
gtttttngttgtttgctttaggtttttgaaacagccccggaaacgcctttattggttttgggccttggcaacggccgttgtcatggttactggcccctaggcgccaatggcaaaggccgcgcctcccccccgggcggggtcgttggttggccgggcccaggggcggggggacgcggaggccgggcatcctttcccagctccccaccctccttgcctttgggggggcgacaaacaatcgctccggggtcagggggggggggtttttcccttcattccatgggcctttttttgggcacaataaagcgtttaaaccttta

SEQ ID NO: 719438 - DNA, 156 bp, Homo sapiens
ctgacggtggtacagggggacatgaacaaacctcctgtaattaatcagctttcagtttctccccctagtcactccttcaaaaacataggaggatcctccccttctttctgctcacgggcttatctaggctatcccagggcccaggggccgagagta

SEQ ID NO: 719439 - DNA, 279 bp, Homo sapiens
aatgcgttgaagggagaaaaggagagagtatatatatagcacacagacacacacacacacacacacacacgaggcacacacacacacacgcgcacacacacacacacacacacacactctgtatggtgtggtgtttctctttattgtggggagaattctatctaacatatctactgtggtgtatagagatgtgtggacagtgctctctatatgaggtgtgaggatagatatatacatgtgtgcgtggagagcggacagcgagctagaatgcgtaaatat

SEQ ID NO: 719440 - DNA, 214 bp, Homo sapiens
tgcgactgtagtgcgttcgtagctatgagtttgctaggcggacctagtaatgatggactgtaagtccgtgggcattatagaatgactgcgccggtaagcttcagggggtttggatgagaatggctgttactacaagggctatgtggctgattgaagagtatgccatgagcgattttaggtccgtttgtcgtaggcagcttggggtaccgaggct

SEQ ID NO: 719441 - DNA, 1282 bp, Homo sapiens
  misc_feature (1184)..(1184): n is a, c, g, or t
  misc_feature (1190)..(1190): n is a, c, g, or t
  misc_feature (1192)..(1192): n is a, c, g, or t
  misc_feature (1194)..(1196): n is a, c, g, or t
aggaagtactacaggacatattttggtgtgaaattttgaacaaataaaatttcaccaagaaaccactttgaccatatttacgcaagctcaaatttaacccgctctaaagggcacaaaaactgaaaccccacctaggtggagcacgctctaaaactagtgattcccccggatacaagaaattccgaaacgcgtcgactaaggctacaagaagacgacaaaagggaaccagactaacagcctgaacgcaggcacatacttcctattctacaccctagtaggctcccttcccctactcatcgcactaatttacactcacaacaccctaggctcactaaacattctactactcactctcactgcccaagaactatcaaactcctgagccaacaacttaatatgactagcttacacaatagcttttatagtaaagatacctctttacggactccacttatgactccctaaagcccatgtcgaagcccccatcgctgggtcaatagtacttgccgcagtactcttaaaactaggcggctatggtataatacgcctcacactcattctcaaccccctgacaaaacacatagcctaccccttccttgtactatccctatgaggcataattataacaagctccatctgcctacgacaaacagacctaaaatcgctcattgcatactcttcaatcagccacatagccctcgtagtaacagccattctcatccaaaccccctgaagcttcaccggcgcagtcattctcataatcgcccacggacttacatcctcattactattctgcctagcaaactcaaactacgaacgcactcacagtcgcatcataatcctctctcaaggacttcaaactctactcccactaatagctttttgatgacttctagcaagcctcgctaacctcgccttaccccccactattaacctactgggagaactctctgtgctagtaaccacgttctcctgatcaaatatcactctcctacttacaggactcaacatactagtcacagccctatactccctctacatatttaccacaacacaatggggctcactcacccaccacattaacaacataaaacctcattcacacgagaaaacaccctcatgttcatacacctatccccattttcctcctatcctcaaccgaaatcattacggggttccccctnaaacancncnnnggggccgctcaaagtcccgccggggccacattcgcaccgcatgtggtagggccaagggtgtagccgccggctgaccgacggaagta

SEQ ID NO: 719442 - DNA, 335 bp, Homo sapiens
gcggccgcctactactactaaattcgcggccgcgtcgaccaggaataacctcaactctcctaatggaagttcttcttttccattctagccattctcatctcagtatgatgatgaacagcagaacactttcaaggatgacgtacgaatatttcccgaaagtggtcaggctatctgtcgctgcgaggtagtgaggggattgctatccatcagtttcatagccatcatctccaacgcatcttcaatgcctcatccaatgatatgaagttaaaaccagagctatttctgacacagcaatctttgagcgggcatttgccaaaatacgaacaagttcgtcg

SEQ ID NO: 719443 - DNA, 1113 bp, Homo sapiens
  misc_feature (13)..(13): n is a, c, g, or t
  misc_feature (1015)..(1015): n is a, c, g, or t
  misc_feature (1021)..(1021): n is a, c, g, or t
  misc_feature (1023)..(1023): n is a, c, g, or t
  misc_feature (1025)..(1027): n is a, c, g, or t
ttaactctagganggcttgcccagctggggtaatcataggctcgattgacggtaaccatgtgtgaaagcctgaacgcaggcacatacttcctattctacaccctagtaggctcccttcccctactcatcgcactaatttacactcacaacaccctaggctcactaaacattctactactcactctcactgcccaagaactatcaaactcctgagccaacaacttaatatgactagcttacacaatagcttttatagtaaagatacctctttacggactccacttatgactccctaaagcccatgtcgaagcccccatcgctgggtcaatagtacttgccgcagtactcttaaaactaggcggctatggtataatacgcctcacactcattctcaaccccctgacaaaacacatagcctaccccttccttgtactatccctatgaggcataattataacaagctccatctgcctacgacaaacagacctaaaatcgctcattgcatactcttcaatcagccacatagccctcgtagtaacagccattctcatccaaaccccctgaagcttcaccggcgcagtcattctcataatcgcccacggacttacatcctcattactattctgcctagcaaactcaaactacgaacgcactcacagtcgcatcataatcctctctcaaggacttcaaactctactcccactaatagctttttgatgacttctagcaagcctcgctaacctcgccttaccccccactattaacctactgggagaactctctgtgctagtaaccacgttctcctgatcaaatatcactctcctacttacaggactcaacatactagtcacagccctatactccctctacatatttaccacaacacaatggggctcactcacccaccacattaacaacataaaacctcattcacacgagaaaacaccctcatgttcatacacctatccccattttcctcctatcctcaaccgaaatcattacggggttccccctnaaacancncnnnggggccgctcaaagtcccgccggggccacattcgcaccgcatgtggtagggccaagggtgtagccgccggctgaccgacggaagta

SEQ ID NO: 719444 - DNA, 1094 bp, Homo sapiens
  misc_feature (996)..(996): n is a, c, g, or t
  misc_feature (1002)..(1002): n is a, c, g, or t
  misc_feature (1004)..(1004): n is a, c, g, or t
  misc_feature (1006)..(1008): n is a, c, g, or t
tccatgctgtgccttctcttcaccctatcagctatacgcatacaatgcctgtacgtaggacactactatgctataccaaccatagtcagctcctcttcccctactcgtcggtactaatttacactcacaacaccctaggctcactaaacattctactactcactctcactgcccaagaactatcaaactcctgagccaacaacttaatatgactagcttacacaatagcttttatagtaaagatacctctttacggactccacttatgactccctaaagcccatgtcgaagcccccatcgctgggtcaatagtacttgccgcagtactcttaaaactaggcggctatggtataatacgcctcacactcattctcaaccccctgacaaaacacatagcctaccccttccttgtactatccctatgaggcataattataacaagctccatctgcctacgacaaacagacctaaaatcgctcattgcatactcttcaatcagccacatagccctcgtagtaacagccattctcatccaaaccccctgaagcttcaccggcgcagtcattctcataatcgcccacggacttacatcctcattactattctgcctagcaaactcaaactacgaacgcactcacagtcgcatcataatcctctctcaaggacttcaaactctactcccactaatagctttttgatgacttctagcaagcctcgctaacctcgccttaccccccactattaacctactgggagaactctctgtgctagtaaccacgttctcctgatcaaatatcactctcctacttacaggactcaacatactagtcacagccctatactccctctacatatttaccacaacacaatggggctcactcacccaccacattaacaacataaaacctcattcacacgagaaaacaccctcatgttcatacacctatccccattttcctcctatcctcaaccgaaatcattacggggttccccctnaaacancncnnnggggccgctcaaagtcccgccggggccacattcgcaccgcatgtggtagggccaagggtgtagccgccggctgaccgacggaagta

SEQ ID NO: 719445 - DNA, 1070 bp, Homo sapiens
  misc_feature (972)..(972): n is a, c, g, or t
  misc_feature (978)..(978): n is a, c, g, or t
  misc_feature (980)..(980): n is a, c, g, or t
  misc_feature (982)..(984): n is a, c, g, or t
catggacagcgtagtatgcttgtagactgggaaataccttggtattctttaacctcaggtaagctcctttcgcctagttcatcggaaaactaatttacactcacaacaccctaggctcactaaacattctactactcactctcactgcccaagaactatcaaactcctgagccaacaacttaatatgactagcttacacaatagcttttatagtaaagatacctctttacggactccacttatgactccctaaagcccatgtcgaagcccccatcgctgggtcaatagtacttgccgcagtactcttaaaactaggcggctatggtataatacgcctcacactcattctcaaccccctgacaaaacacatagcctaccccttccttgtactatccctatgaggcataattataacaagctccatctgcctacgacaaacagacctaaaatcgctcattgcatactcttcaatcagccacatagccctcgtagtaacagccattctcatccaaaccccctgaagcttcaccggcgcagtcattctcataatcgcccacggacttacatcctcattactattctgcctagcaaactcaaactacgaacgcactcacagtcgcatcataatcctctctcaaggacttcaaactctactcccactaatagctttttgatgacttctagcaagcctcgctaacctcgccttaccccccactattaacctactgggagaactctctgtgctagtaaccacgttctcctgatcaaatatcactctcctacttacaggactcaacatactagtcacagccctatactccctctacatatttaccacaacacaatggggctcactcacccaccacattaacaacataaaacctcattcacacgagaaaacaccctcatgttcatacacctatccccattttcctcctatcctcaaccgaaatcattacggggttccccctnaaacancncnnnggggccgctcaaagtcccgccggggccacattcgcaccgcatgtggtagggccaagggtgtagccgccggctgaccgacggaagta

SEQ ID NO: 719446 - DNA, 1333 bp, Homo sapiens
gcaatggttccgcgccgggcgtgcacggtgtggggcgtgtcccgtgtcccgcagatactcgttcctagctgactgccagcgtcctcgtgccggccctgaggatggacccaggagatccctgctggtagaccctgccgctaggcgagcgccagcgcatgggcacccacaggcttctacagcctacttctccacctaagcagagtggtgatgttttcaaagtgcaacagcccagctagcagggcccctgtgaacagactcggagccccactggaacactaatggccctccctggaacagacacggcaccaccaacctgagaacagcctcgagtgcccccatggaacatgcctcagcagccccctggaacactaatggccctaccctggacacagagaatggcatcctcaaaccgaagaacgagtctctggatgccgcccgtgggaagcagcatcacgcgagagccgcctgtaccaccagactacgtagtgcccataccctagggtcgaccacgattcacgcgcaccccctgcccatcagacagtccctagggaggccagcatgggagacaccaacgttgactccctacaccagcacaccatatccataccgacatcacccacacttataaaactattcaaactacatccaacccatcttcacaccaccacaacccaatcacacaccaccatacactccaccacttcacaacatacaccacacatcaccatacaatacaaactatagtccacacctccgacaccacctccatatgttacggacaacacctgacaacagatcttcaacggaccacatccagacgcactcatccgatcaagctagacaggacccgaccaacacaagtcaaccaattaaacctctcagaccgccacaccgcaactgccaaacataccaacagagcaggaacgccaatcaacaaacaaaagatatgtgctaccctccgacccttcccacacatagctacaccagcagtcgcacaacccactcaaccacccacccactaccccaaaccaccccccccacaactccccttccccaactgcccccattcaccctccaacgatatgactcttcccacccgccaccacccaaacacatactcaccccacactacccatacaaaaccactgacacactacaccaccaccaacccatcccagcaacatatacctcacaactaacacctttcgtccacttttacccaccgtatcacctcatactccacagtaaccctcactcatcatactcaactctacaaaatcacaaacacacacacccataccgcaccccgcacgataacagccaacaaaacaaa

SEQ ID NO: 719447 - DNA, 1032 bp, Homo sapiens
  misc_feature (934)..(934): n is a, c, g, or t
  misc_feature (940)..(940): n is a, c, g, or t
  misc_feature (942)..(942): n is a, c, g, or t
  misc_feature (944)..(946): n is a, c, g, or t
cttcaggacccagagaggatatgatgcgactgtgagtgcgtcgtagtttgagtttgctaggcagaatagtaatgaggatgtagtccgtgggcgattatgagaatgactgcccaagaactatcaaactcctgagccaacaacttaatatgactagcttacacaatagcttttatagtaaagatacctctttacggactccacttatgactccctaaagcccatgtcgaagcccccatcgctgggtcaatagtacttgccgcagtactcttaaaactaggcggctatggtataatacgcctcacactcattctcaaccccctgacaaaacacatagcctaccccttccttgtactatccctatgaggcataattataacaagctccatctgcctacgacaaacagacctaaaatcgctcattgcatactcttcaatcagccacatagccctcgtagtaacagccattctcatccaaaccccctgaagcttcaccggcgcagtcattctcataatcgcccacggacttacatcctcattactattctgcctagcaaactcaaactacgaacgcactcacagtcgcatcataatcctctctcaaggacttcaaactctactcccactaatagctttttgatgacttctagcaagcctcgctaacctcgccttaccccccactattaacctactgggagaactctctgtgctagtaaccacgttctcctgatcaaatatcactctcctacttacaggactcaacatactagtcacagccctatactccctctacatatttaccacaacacaatggggctcactcacccaccacattaacaacataaaacctcattcacacgagaaaacaccctcatgttcatacacctatccccattttcctcctatcctcaaccgaaatcattacggggttccccctnaaacancncnnnggggccgctcaaagtcccgccggggccacattcgcaccgcatgtggtagggccaagggtgtagccgccggctgaccgacggaagta

SEQ ID NO: 719448 - DNA, 983 bp, Homo sapiens
  misc_feature (885)..(885): n is a, c, g, or t
  misc_feature (891)..(891): n is a, c, g, or t
  misc_feature (893)..(893): n is a, c, g, or t
  misc_feature (895)..(897): n is a, c, g, or t
tcagggagacgggtatgactgggggtcgtgatacatggggaacgagctaactaactgggcgagagttatcaacggggtgagcgtactactggggatgactcgctgaccgggccagcgtgtatagccagaggagacctctttacggactccacttatgactccctaaagcccatgtcgaagcccccatcgctgggtcaatagtacttgccgcagtactcttaaaactaggcggctatggtataatacgcctcacactcattctcaaccccctgacaaaacacatagcctaccccttccttgtactatccctatgaggcataattataacaagctccatctgcctacgacaaacagacctaaaatcgctcattgcatactcttcaatcagccacatagccctcgtagtaacagccattctcatccaaaccccctgaagcttcaccggcgcagtcattctcataatcgcccacggacttacatcctcattactattctgcctagcaaactcaaactacgaacgcactcacagtcgcatcataatcctctctcaaggacttcaaactctactcccactaatagctttttgatgacttctagcaagcctcgctaacctcgccttaccccccactattaacctactgggagaactctctgtgctagtaaccacgttctcctgatcaaatatcactctcctacttacaggactcaacatactagtcacagccctatactccctctacatatttaccacaacacaatggggctcactcacccaccacattaacaacataaaacctcattcacacgagaaaacaccctcatgttcatacacctatccccattttcctcctatcctcaaccgaaatcattacggggttccccctnaaacancncnnnggggccgctcaaagtcccgccggggccacattcgcaccgcatgtggtagggccaagggtgtagccgccggctgaccgacggaagta

SEQ ID NO: 719449 - DNA, 836 bp, Homo sapiens
  misc_feature (782)..(782): n is a, c, g, or t
gctcttcctaagccggagctcggtgaagttctcccaggatgatagccatgttcagtgcgaccgccaagatcgtgaagtccaatggtgagaagccggacgatgttcgagtccggtcatcatactcaggctctgtctggatgctaggaggatgagactcggactctcgaaagggtcaatgcctgcaagggagctgaatacttacgtgcagcgtaatggaaagtcgagagttaggtggtgggtggggaaagctatctgatattcatttgtgccctgttgcgtcaattgaaatctttctcgatgaaaatcctaagatccggggtagtacgcggaattggagaaaaatgttcagtgggaacgcgatgtacgtctcttgatcagctcacgaggagatagttcctgctcgtaataggccagattgcagagataaaagctctgtacataggagacatcatagcaatatagcgcttccacgtagctcgtactcctgacagtctgttgcgcagattgccatccgttgacggactctggtcgttccacaagcaagaaagttgtgggctaaagggaattcgcgttggtataactgagtatgggtcacggcgcggcattcagtaacaggttgcattcttggacgagaaggcatgcagtcagagacaactggtgggcaacgagaaaggtttgcaagaccgtttgcttcttgagtggtcctaatttatagaaagacttacaactggcgcgacaggactgtttgaggtctttatgcaaatttccccagggaggttttncatacttggtaacaaccataagatatggacttaaattgaaacacacgttattat

SEQ ID NO: 719450 - DNA, 748 bp, Homo sapiens
  misc_feature (650)..(650): n is a, c, g, or t
  misc_feature (656)..(656): n is a, c, g, or t
  misc_feature (658)..(658): n is a, c, g, or t
  misc_feature (660)..(662): n is a, c, g, or t
cgacgctagaggacccctcatagggatagtacaaggaaggggtaggctatgtgtttgtcaggggttgagaatgagtgtgaggcgtattataacaagctccatctgcctacgacaaacagacctaaaatcgctcattgcatactcttcaatcagccacatagccctcgtagtaacagccattctcatccaaaccccctgaagcttcaccggcgcagtcattctcataatcgcccacggacttacatcctcattactattctgcctagcaaactcaaactacgaacgcactcacagtcgcatcataatcctctctcaaggacttcaaactctactcccactaatagctttttgatgacttctagcaagcctcgctaacctcgccttaccccccactattaacctactgggagaactctctgtgctagtaaccacgttctcctgatcaaatatcactctcctacttacaggactcaacatactagtcacagccctatactccctctacatatttaccacaacacaatggggctcactcacccaccacattaacaacataaaacctcattcacacgagaaaacaccctcatgttcatacacctatccccattttcctcctatcctcaaccgaaatcattacggggttccccctnaaacancncnnnggggccgctcaaagtcccgccggggccacattcgcaccgcatgtggtagggccaagggtgtagccgccggctgaccgacggaagta

SEQ ID NO: 719451 - DNA, 901 bp, Homo sapiens
taaaaacccccctcaaaaaagggaaaaataaaaaaaattaaccccattttaaaaaaggccaattagggggggggttttaaacccaaagtttatgtgttgggagttggatagaagagaactaattataggtgggggagagtagaaagaaatatatggtgaggagaaatcgtgacgcacaataaattgcagtagaactactcggttagaaccctgtggtgtctacacaaaatagtgattagcgcccgatataatcggtggaaaaatgttgtaagggagaagatcacaaatatatcctggaggttgtgtgggggggatactaaataaaatagaccccagaacaaaaaatttgggtaacacaagcacgcgggcgcttcgcaaaatataatgtggagggtgacccgcgagagtggttactcactataatacaacaaacatgggggagacgaccgccggggtagtgagaatactcacccccggtgagtgagagaaacaataaaacagcgggagagtgcgtgtagtaaacaaagggagggagagaccactactcagagggaggaaaacgtaacggagcggggttaacgtcaccagtggtggggagggggcacgaacgagcagcctcctctatatgggggggagagaggggacaacgagggtgaggtggtggataacacaggggtacaaaaaaatctcttgtggtgaaaaaaaaaaaattgtcgggagggtaaacaacaatagggagattatccccagaataatgaaagggacgttttatgggaacaaggtgatggtgatttagtaggagccataggagatatggtgattatcgtggtgattataatattgggggcacatttaggtgttatgaggtatcagatttagtgatatagaggcctaatataga

SEQ ID NO: 719452 - DNA, 631 bp, Homo sapiens
  misc_feature (533)..(533): n is a, c, g, or t
  misc_feature (539)..(539): n is a, c, g, or t
  misc_feature (541)..(541): n is a, c, g, or t
  misc_feature (543)..(545): n is a, c, g, or t
ctgggcacgttctgtcccggaggtcagcgcaggtggcctatcagatgtgggaacttagtgcatgtggcccgagtagagctgaagcttcaccggcgcagtcattctcataatcgcccacggacttacatcctcattactattctgcctagcaaactcaaactacgaacgcactcacagtcgcatcataatcctctctcaaggacttcaaactctactcccactaatagctttttgatgacttctagcaagcctcgctaacctcgccttaccccccactattaacctactgggagaactctctgtgctagtaaccacgttctcctgatcaaatatcactctcctacttacaggactcaacatactagtcacagccctatactccctctacatatttaccacaacacaatggggctcactcacccaccacattaacaacataaaacctcattcacacgagaaaacaccctcatgttcatacacctatccccattttcctcctatcctcaaccgaaatcattacggggttccccctnaaacancncnnnggggccgctcaaagtcccgccggggccacattcgcaccgcatgtggtagggccaagggtgtagccgccggctgaccgacggaagta

SEQ ID NO: 719453 - DNA, 966 bp, Homo sapiens
gttctatgatcgcgagcggcgcccttttttatgtttctattttttatttattgtttttatttattttaatataaataatggggagaatcttttttttctcattttttctttatattgttatatttttttgggagaaaaacgaagtattcctgtcgtctgtgtgaaccgcacgggggtgcggcgtgcgcgcaggctactcgagtgctccactcagcccatgcgtcgcgacaacacccctgcctccactgagggtgaagaggagatgctgtcgcgtgcgtgcaatggtccgcccccctgtgttgcgagtggaggagatcacttgagcggtcagtgcgtggcacacacaactcgcgtgggtgaaacaaatgtgtcacactagtatgtgttcgggaaacaaaagaagagagaggtaaatcaaacacgctgtgtcgtgtgtgagccacagtgagtgtgcgtttcagagaaaactctcacaggcgacagtccaccacgagagaggagacatgtgtcgctggcccgcagcgtgcgcggtgaggttctcacacacgacagagggtgcgcaggggggagatataaacgagagggtgtgtgggagaacgcccaagtgtgcccccacgcgtgaccgccgagagagagatgtcaatgccactcttctacatacctatatatattctaacctgtgtgatggcgtgtattatacacactagcgcccttcttgggatatatatactagacctccacagataagagcgcggtgtaaaacctacgttgtgctgcgcgctgcgtcccatacactataatagaccaaacgtggtgacagtaacccatggtttctgtgctgcggtggcgaccacaaaaaaagcacagggcacacaaaataagataccccacaagacgagaagaaggcggggggggcggggcacggccgattcttataatccgaaaaaattttgcacccccggcgaa

SEQ ID NO: 719454 - DNA, 539 bp, Homo sapiens
gagctcggtaccccttgcatgtaccgggcccatacccttgcatgcaccggcgcagtcattctcataatcgcccacggacttacatcctcattactattctgcctagcaaactcaaactacgaacgcactcacagtcgcatcataatcctctctcaaggacttcaaactctactcccactaatagctttttgatgacttctagcaagcctcattctccaccccttgacaaaacacatagcctaccccttgcttgatctatccctatgacgcataattgttacaagatacatctgtctacgacaatacagacctaatatcgctcattgcatactcttcaatcagccacatagaccttgatgtaacagccattctcattcaaacccgctgaagctttaccggtgcagtcattattatacatcgtccacagacttacatcctgattactattatgactagcagactcaaactacgaacgcactcacagtctcatgataatacactctcaatgactctaaactctactgccacttataactttt

SEQ ID NO: 719455 - DNA, 549 bp, Homo sapiens
gccgctcggacccactttcagagtagccattctcatccaaaccccctgaagcttcaccggcgcagtcattctcataatcgcccacggacttacatcctcattactattctgcctagcaaactcaaactacgaacgcactcacagtcgcatcataatcctctctcaaggacttcaaactctactcccactaatagctttttgatgacttctagcaagcctcattctccaccccttgacaaaacacatagcctaccccttgcttgatctatccctatgacgcataattgttacaagatacatctgtctacgacaatacagacctaatatcgctcattgcatactcttcaatcagccacatagaccttgatgtaacagccattctcattcaaacccgctgaagctttaccggtgcagtcattattatacatcgtccacagacttacatcctgattactattatgactagcagactcaaactacgaacgcactcacagtctcatgataatacactctcaatgactctaaactctactgccacttataactttt

SEQ ID NO: 719456 - DNA, 504 bp, Homo sapiens
  misc_feature (318)..(318): n is a, c, g, or t
gactagaagggaaaggggtgcaatttcttgggtcctctgtgtcctcaacagctttgtggtataacagcagaaacttgctaaaggttcatcaagtgcttgttctgactgggtcccctgactctggcctaaatggcattgggaggggactgggactagaaaatttaataatgcagtggttttgcaaaaccaaatagacttatatctgggtcttaaaaggcatagcccaggccaggtgcagtggctcatgcctgtaatcccagcacatcgggaggcggaggtgggtggatcatgaagtcaggagattgagaccatcctggncaacatggtgaaaccccatctcttctaaaaatacaaaaattagctgggtgtgatggcatacacctgtagtaccagctactcaggaggctgaggcaggagaatcgcttgaatccgggaggtggaggctgcagtgagccgagattgcgcgactgcactacagcctggtgacagaggaagatactgtct

SEQ ID NO: 719457 - DNA, 830 bp, Homo sapiens
  misc_feature (231)..(231): n is a, c, g, or t
  misc_feature (235)..(236): n is a, c, g, or t
  misc_feature (283)..(283): n is a, c, g, or t
  misc_feature (285)..(285): n is a, c, g, or t
  misc_feature (289)..(289): n is a, c, g, or t
ccaatctgcgggctgccgtgccgctgcagacggtgccggttgatctccagcgctacattggccgctggtatgtcatcgcgaatatcccgtactttggcgagcgcggcaacgtcggcagctacgccgagtgggcgctgcggcccgacggccgtatcgacgatgcctatgtctaccgccccggcggtttcgatgcgcccttcaagcgcatgcagtttgtggattcggtggtancggnnagcggcggtggcgagtggcgcgtgcgcttgttctggccgatctacgntncgcnacagacgctgtatgtcgacccggaataccgggtgacgctcttgggctatcccgacaagagcctcggctgggtgttctcgcgtgaccccgacatgagcgatgccgactatcgcgcggcactcaaccgcttcgaggcgatgggctacgacacgtcgcgcttccggcgcgtgccgcaattcccgagccagattgggcaaccaggcttccagtcgccgggggacgacaactagccgtatgcgcatcactgtgactcgcccagcagatggtggcgcagggcaggtgcccgggtgccgggggcgagccagatatcgaagaaggcgcgggcaaaggccgggtcgtcaacctcggtcgtcagttgcccgttggcatagaagcgcgcaccgcggtccggctggtagacgccgcacagtgtgtcgccgggcttcacgtccacgaacgcgggcatcatcgcctcctgccatcgcgccaaagtggcatcggatggcggaggcatctgaatccgccgaatctcatcaatgccgtttgtgattcaggctactccg

SEQ ID NO: 719458 - DNA, 243 bp, Homo sapiens
ctgatattccaatgtgaaacaagttgtgtatgatgcataaaaaactacacttaaggtagaaaagggaaaactaaaactttctaaatgcaactgagatgcagtaagaagaaacgttttctaacctgaaagtaaacccatttgtttcacaaaatgggaatgtgttcttgttactttaaatagtacaatttaactgttaaattatagaccaaaaggcaaaacaaatattttgttatttaatgggtc

SEQ ID NO: 719459 - DNA, 338 bp, Homo sapiens
cgtggagtcccatgggagttgggtttgtctgtcgttgcctgcctctgttgtcgtaaaatgggggtcccttgactgcgattatcaagggagaaggcaagactggtgacgttctagtccatctaggaagactctgcaccactgtcgccttcatcacagggtgaagctcggatagacaaaggcgctttggctaagctggtggaagctatcaggacctaattatcaatgacagatacgatgagatcctctcgtcactggggtggcaatgtcctgggtctctaacgtctggtggctcgtatctgccaagctctgtaatatggcaaatggtctaaagaacgtgg

SEQ ID NO: 719460 - DNA, 405 bp, Homo sapiens
  misc_feature (36)..(36): n is a, c, g, or t
cccactgttggcctgagtcctgccccttggaaaccngaataaatatagctctccttccatgcgtctgcttctaccaaaaatttggagcccagtgcttaggtttttcctttcttcctaaaattctggtttgaataattccctgtcttccagttgttcttcacaccccatgagctttctcattttgttcattcattctccacatgtattgagaagttactgtgtgcaagcaactctgttttaagtattgggatctatagtggacatttcagataaggttccctgttggggaaaagggaaataaacaagtgagcaaataaggcaatttaaggtagtcaaaaagtacttttcgtgatgaatgattagaagagagctgttttggataaaatattgagagaaagtgttttg

SEQ ID NO: 719461 - DNA, 229 bp, Homo sapiens
  misc_feature (1)..(1): n is a, c, g, or t
naattagatattttatttcattcaacgtgtaagagcttttagaaaatacacatctactttcataatgtaaaagaaaaatattttcaaatcaaaagtaatcacaatcataattttcttacggtgttttttttttgttttgctttgttttgttttaaaaataaagtctccctctgtcgcccaggctggaacgcagtggcgtgatctcagctcattgcaacctccacacttc

SEQ ID NO: 719462 - DNA, 118 bp, Homo sapiens
cctcacagaccctggcaaagcaggaagcagataccttcatcttttgtttctatttgatttcttttttcttttttatatttattattatgaggcttctcaaatttgccttaagtatttt

SEQ ID NO: 719463 - DNA, 601 bp, Homo sapiens
ggcggtacctgcttacaaaagcacatagtaaaataacccaaacatccacagtaagaggatgaggctgggtgcggtggctcacgcctgtaatcctaacactttgggcgtctaaggtgggagaattcctcgagcccaagagtttgagaccagcctgggcaacatcgggagaccccgtctataaaaataaaaaaaattagccaggtgaggtggtgcatgcctgtggtctcagctccttgggaagctgaagtgggaggatcacttggacccagggagtcgaggctgcagtgagtgtgatcttcccactgcacattccagcctgggaatcagagcaagaccctgtctcaaaaaaaaaaaaaaaaaaaaaaagttttaaaagagtgtgaggaaaatcataaagagcagggctccactccaagtgttttaataagtgggatccccataacccctgctccacccgtgatttctggggaaaaataggccacaaaaggtgcccagatttgattgccctcggggttggtgatgggtccactctggaccccagttcttcccctgttgtaccctttattggccttttgggaaacgtgggaaaatagctctaagg

SEQ ID NO: 719464 - DNA, 1275 bp, Homo sapiens
  misc_feature (30)..(30): n is a, c, g, or t
  misc_feature (65)..(65): n is a, c, g, or t
  misc_feature (128)..(128): n is a, c, g, or t
  misc_feature (223)..(223): n is a, c, g, or t
  misc_feature (322)..(322): n is a, c, g, or t
  misc_feature (379)..(379): n is a, c, g, or t
  misc_feature (475)..(475): n is a, c, g, or t
  misc_feature (489)..(489): n is a, c, g, or t
  misc_feature (567)..(567): n is a, c, g, or t
  misc_feature (661)..(661): n is a, c, g, or t
  misc_feature (698)..(698): n is a, c, g, or t
  misc_feature (727)..(727): n is a, c, g, or t
  misc_feature (767)..(768): n is a, c, g, or t
  misc_feature (770)..(770): n is a, c, g, or t
  misc_feature (784)..(784): n is a, c, g, or t
  misc_feature (818)..(818): n is a, c, g, or t
  misc_feature (826)..(826): n is a, c, g, or t
  misc_feature (834)..(834): n is a, c, g, or t
  misc_feature (842)..(842): n is a, c, g, or t
  misc_feature (859)..(859): n is a, c, g, or t
  misc_feature (916)..(916): n is a, c, g, or t
  misc_feature (949)..(949): n is a, c, g, or t
  misc_feature (959)..(959): n is a, c, g, or t
  misc_feature (989)..(989): n is a, c, g, or t
cggattgcgtcggggcgccccgaggaactntgggaggccgtggtgggggccgctgaacgcttccnggcccggactggcacggagctggtgctgctgaccgcagccccgccgccaccaccccgcccggncccctgtacctatactgcccatggtcgaagagcccttgcggaagcaacgcgccgttacctccacaacatcgcactggcccacaaggctgccactnctgctcggcctcctgcacccccaccaacaccacaaccacccaatcccacacccaacccaccccggcctaccctggccaaaaaagacaacgaggaggacnaggataagcccacaaaaacaaaaacctccggggagcagctgggcattaatgataatngagggctctttttgatggatgaagacgccaccctccagaaccttccccccttctataagtcaaaccccgaaaatacaaataatggcagcctgaacnaagaaacccccgcnggcccccccacctgctcaatgcccccaacctcaaccctacccacacagcagtacgccaagtccctgcctgtatctgtncccgtctggggcttcaaggagaagaggacagaggcgcggtcatcagatgaggagaatgggccgccctcttcgcccgacctggaccgcatcgcgncgagcatgcgcgcgctggtgctgcgagaggccgaggncacccaggtcttcggggacctgccacggncgcggcttaacaccagcgacttccagaagctgaagcgganntnttgaagtccagggngggagcgcccgggccgcgtccgccccgtcccacnctacgccnccgccccnctcccggngcctgctaatctgaggncgatccgggaccggcctccttgcgtctcccattcccaagattgtccgcctctgccantccccgccgtccttccagccacgacctgccggncgaggagggnatctgtcccgtttccgattgggtctgtcantctctcatccgcctagctgacggagtcccgttctagttgatgggattcggcctcagctgagattcgtacagccctatgatgggtccaactcctttgtttgtcctgcgctagcgacgcagggattttgctcgcgacggcattggctccatcccctagtcggctggaccagctccttcggttgagtcggctccactcctgtaaagggctttgaccaggcttctacactggtcccgtgcgggttccccgagtttcccccccatgggcccgcgtccggggggtgccgcca

SEQ ID NO: 719465 - DNA, 149 bp, Homo sapiens
atgcatgacagacgccaccacggtagagggtgggtctggggcaggcactacttttacctttctagacctttgaggttagcaaaaacctgaaaggtaaagcgcttactggaaagcgcagagctaactgagagcagaactagtgacctgta

SEQ ID NO: 719466 - DNA, 128 bp, Homo sapiens
  misc_feature (62)..(62): n is a, c, g, or t
acggccgtgtattactgtgcaagagatctcttggagcaaacgaccatgcggcatattgtagnagtaccagctgctatctactactactacatggacgtctggggcaaaggaccacggtcaccgtctcc

SEQ ID NO: 719467 - DNA, 257 bp, Homo sapiens
attctgaatttaggggattatcaaaagataatattttacatccactgtctgttatcgcacttcatggctcagctctggggcagcaccctctaaatcaccaccttaatctgctgcaacaaactgtagaatattcagacacactggatccataaagactaagtagcccataaggggtcaaattttgctgccaaatgcgtatgccaacaaattacaaaaacacttcgttcgcagagctttacagattgtggaatgtcgga

SEQ ID NO: 719468 - DNA, 282 bp, Homo sapiens
ctcccccgctatttacaactatctcaaggtgggtggatcactgaggtcaggcgctcgagatcagcctgagcaatacaacaagaccccatctctatttcaaaaagtgtttttaattagttggacctggtggtgcacactagcagtcccagccactgagggggtagaggctggaggattgctggagccaaggacatcaaggttgcagtgagccatgagttgcaccactgcactccagtcttgggcaacagagcaagaccctgtctcagatagttgtaaatggcg

SEQ ID NO: 719469 - DNA, 536 bp, Homo sapiens
ccctaccgcgttgtggtagccctgagtctgggtgcccgtgccagccggcagacccccaagcctagccaccgcatacccaagcagccccgaccctacttcccctacaaccaccggaccaggcccgccactggaccagaccgcctgtcaactagcacgtcagccaccatgcacctgtgccgtagcatcagccgcttaccacccctgcacatccacacacgacccagccccgcttagaccctactacgcgctataccaccctatgcggccacgaccgcgcacgccatcttcgagttgcgccgcctagactctcgtactcccctttctcgccgttccttggcgaccgcggcgttgccacggccaatagccgaggtgctactctcggttacaccacgacaccccccacccccaaactcaccctctacctcccataccttccccaccacccaacgacacgcgcaccctacaacacgcctccccacgaccctctacccaatcttcccctcacaccccaccagcccaccacctgacacacaccc

SEQ ID NO: 719470 - DNA, 503 bp, Homo sapiens
gctttgtcggtgatgtgaagtccctacgcaggtgtagacagctcggtcggtgaggaagtccctacagcaggtgtagacagctcggtcggtgaggaagtccctacagcaggtgtagacagctcgttcagtgagtgaagtgcctacagcaggtgtagacagctcgtccagtgagtgaatgtgcctacagcaggtgtatgacatgctcgtccagtgaggaagtgcctacagcaggtgtagagagctcggtcggtgaggaagtccctacagcaggtgtagacatgctcgttcagtgaggaagtgcctacagcaggtgtagacagctcgtgcagtgaggaagtccctaaagcaggtgtagacagctcggtcggtgaggaagtccctacagaaggtgtagacagctcggtcggggaggacgtccctccagcaggtgtacacagctcggtcggtgaggacgtccctacagcaggtgtaaccagctcggccggtgaggaagtccctacagc

SEQ ID NO: 719471 - DNA, 172 bp, Homo sapiens
aagctaatcagtaatcgttagtgttagtgtattttatgtgtggcccaagataattcttaattcttccaatgtggcccagggaagccaaaagattggccacccctgtacatgctcatatacttaatctttattctttccaggccctaatctggtaagtggttctgcattttgc

SEQ ID NO: 719472 - DNA, 234 bp, Homo sapiens
gaaagcgctggtgtgaaaatagctgttaatgaaagcggctgctgaataaaaccatattcacctgcctagagctccccaagcgttctttccgctcatccacccactcccctcggaccgcagcatgggctggacctggacccccaggatctgaaaaatgtatttgttgaagaaatacaattcttgtccatttaaccctgcattgctaatgcataggcggtcctttttttttttttg

SEQ ID NO: 719473 - DNA, 869 bp, Homo sapiens
atgagcccaatacgcaaaattaaccccctaataaaattaattaatccacgtcattcatcgagactccccactcccatccaacatctgccgcatgatgaaactatcggctcactccttggcgcctgccatgaatcctccaaatcagcacaggactattcctagcctatgcactactcaccagacgcctctaacccgcctttacatctgatcgcccacatcacgtcgcagacgtagaattgatggctgagatcatccgctacgcttcggtgccaaggacgcctcaatcattctttatctggctcttcgctacacatcggccgagggccaatagttgacggatcatgtctctactcaataaaacctgaaacatcgggcatgtatcctcctgcttgcaacgatggcaacagccttcataggctatgtccttcccgtgaggccaaatctcattcatgaggggccacagtacattacaaacttactatctcggcatcccatacatgtgcgactagacatgagttccaatgagtcctgcatcgaggggtactcagttataactgttcccaccctcacacgaattctttacccttggcgggtacaatacttggcccttcatcattgaggccctaagcaggaactccacactcctattcttgtggggagaggtgatcaaacaacccccctaggaatcaccgtccaatccggattaaagtcacttgcaccttacgatacatcaaagacgcgccggcttactttcttccttttcaccttacgaaattggagatttgacagacatctagcgacagatattataccaactacacttagccccccaaataaccgagaaacatgcgaaatccgccgccaaatgg

SEQ ID NO: 719474 - DNA, 405 bp, Homo sapiens
gcctcagccaaaattcggccgaggcaaataaagataaaaaatggaaaaggttgttttcacacacttgtaagcatgttggtataagaacctaagtcctgggtagtgtaatcaggtgccattattctttcacctcctccaagttgtgcctgaagttgcaacaagtcaactgccctaaaagcttattcctacattgaaaaaccaaagcccagcaaaggaatagaattctacttgaaaactagcacataggtgaaagagttaagcaagatgaatgattttttctgttttgtttgtttcccaatgcaaaaaaatgggtagggtccaccatactggtaattggggtactctgtatatgtgtttttctttgaacgaatcattaatcccctgtttttttaaatggtctttttt

SEQ ID NO: 719475 - DNA, 556 bp, Homo sapiens
aggtcacatagctattatttggtagagttgggatgtgaatccaggcagtgtggtttcagagcctgtgctcttatctcctactttttgatcttgcccccacacatgataattgtttgatttgtctccttactgctgagcacttcaaatgagtggctgtttccattgattttacttatctagcacttatttttattttgacttctgttactggctttagttttttaccctcacctttggaatatctctcttcaaggtcaccactgatttttatagccaatacaatgggttatttaagcttctgtttctctttgatcttttcctggcttttgataacagtagccatttatatggaattacaactttgacttctgtgatgttgaacttgcttgttttcgccttgtctcactgaggcaccttggttttcttctttctctacgcattccttagaccattgccatcttttggattgagtttgaatttaggtgtgttatataagaagccccttaatgttaattttatatttaaatcaggacgaataaaaagatgaaatacaaaa

SEQ ID NO: 719476 - DNA, 444 bp, Homo sapiens
  misc_feature (430)..(430): n is a, c, g, or t
tgaaaataaaattgaagtatttctgtagattcatctggcaatgttaagtccacagcaggctgacactactcactcacaattcaccacaatgggaagcagatccatgctggtgttacagacagtctcttcctagcactactcaaaagtcacagggctcacctcagattacgattggtttaaagcaaagtgcatacagagattacaacaattttaaggacaaaagaaatagaaaataaggtcctattttgtggtcccaacaacaaactcaaaaatctgatagatggaggctccaatgagcttttttataaatactttagtttaggtacagttatacagaaagtcgagttcgtttcaaatcttcaaaaaaaaagttcctgttattcctcaaatggtgcttgttatggtttaacatttctgttaaatgcgtgcnttgagtctcgtgcc

SEQ ID NO: 719477 - DNA, 1079 bp, Homo sapiens
agcgggctttgagctcctggttatcgctggggccgggccgcgtcggagatatgcaggcgactatgcagtggcacacaacggtgcctcccgccgcacatggcgtgccctaccgagctcctcgcgtgcgtctgcgggtctacgtttcgccgcagcgccggagccatctcgacctgtgcccggctgactgactgcctgcctattgtctgctgtcgttgcgtgcgactgctgcgagcacctggcgatcggtggagactgttggctcagcgttggtgagcgccccggtggctgcggtcgaaggtgcccaggggctctggcccaagggttggtctggatctaggtgctgccgcgctctaattcccttcatcctgtgtgatcattgccgctcgctgggtcagcgtccgtggaatcacatcgatttccaacagggagcttcgtcgagatccgctctagtcgatccggaggtgcacctcgcgctattacagcttgttcgtttggtgaatacttgggcacgaccaaatgagttcgtaaccgcaaggtaggcttgcgaaactttcgccaagcagatagtagggcaaaacgaggtgcctaatcggcctaggcggacccaatcctcgctagtggggatgacgccatggggctgactgcggggggctttccccggaggattggcgggaccccgacttggcaggcactcgaacgccacgcaaaactagcctagtgttcttgttcgtgcccatgtaacctgtcttgggacttggcactttgcgtgaaaattattgtgggcaaggtgaagggcccgctggcttgcgtatgtccctggtagatgggtttggccccggttggtccttttggtcatccgacggatgccaggcattgttggagcccagaggtggtgaagtaagatttctacacccctggtgaagcggcggtttagggtgaggggcagctacggaggggcgccctgtctgggcctccgccagggtgccctcagtttcgtgggcctggggctccgttagccatttgtttcctttacctcccttgttggcctccgcgcctctgggtcctccgttgggtggggg

SEQ ID NO: 719478 - DNA, 315 bp, Homo sapiens
atgaaagcattactttccatgcatttgccacagaatggtaatggagtctttacatgggtggtatgtctctcccctccataagttaggggtggtgcttggtggaggcattcagagaaattattgggcatgccactagtgatacttagggtcatgggtgttggggatgatattgttgagctagtgaggcttgtgtgggtgaccatcccatcttggagatgaatagttagatgttgcagctgctgcttcatgtgaatggatagtctcggtggatgtatctactggatagggcacaaaatcccggtgggtaccgagctc

SEQ ID NO: 719479 - DNA, 145 bp, Homo sapiens
  misc_feature (145)..(145): n is a, c, g, or t
agaggacacggcagcagtacgggccagcttgctggaagctcgggagcgcccctacgtagggcggctccttcaggttgaggacggtgtgcggaaccggggactcccccaacacacacggtgcgttggcccaacggggatcctctan

SEQ ID NO: 719480 - DNA, 562 bp, Homo sapiens
caccaagaggtgtggtgcacaccattcatgagaaatctatccccatgatccattcacctcctatccagggcccacctccaatatcggggattacaattcaacatgagatttggcaggaacaaatattcaaacatcagggtctctctatctcagtgtctctgcctcttaatttttattgttgataatttacatgcaattttataacatgctgttacttaaaattttatgacttctcatgttatcaaaagaaagcactgaacatatattaatatttatgtaatctagtgtataaatataaaatcatttgattaaccattttacagatactgaaatggctgtacagagagattaactttccaagattttacagctatttggtaccaagcctgggcagtcagacccatctgtgtcctggcctgtgtgtatctgagtgtagttttgtatgtgtatgcttcacaggcaccagctctaggggcactggttttgtccagtagctcagaaccttccatcacaacaccccactcaaacaagccctgtcttggggacacctttgaagttgtac

SEQ ID NO: 719481 - DNA, 1021 bp, Homo sapiens
  misc_feature (105)..(105): n is a, c, g, or t
  misc_feature (113)..(114): n is a, c, g, or t
  misc_feature (125)..(125): n is a, c, g, or t
  misc_feature (136)..(136): n is a, c, g, or t
  misc_feature (148)..(148): n is a, c, g, or t
  misc_feature (158)..(158): n is a, c, g, or t
  misc_feature (181)..(181): n is a, c, g, or t
  misc_feature (576)..(576): n is a, c, g, or t
  misc_feature (613)..(613): n is a, c, g, or t
  misc_feature (824)..(824): n is a, c, g, or t
  misc_feature (827)..(828): n is a, c, g, or t
  misc_feature (865)..(865): n is a, c, g, or t
gaagttgctttggaggtcctggaccgcggagtcgtgccatgtcgcaaggatcccaagcaacccggcgcggacgatgcgccggacgtggcaggcatggctccgggncagcatgnngggcttcgtgntgactgtcaancaagagcgcggngagggtccangcgcgggcgagaaggggtcccangaggaggagccggtgagaaacgcggctggcccaagggcaagaagcggaagaagattctgccgaatgggcccaaggcaccggtcacgggctacgtgcgcttcctgaacgagcggcgcgagcagatccgcacgcgccacccggatctgccctttcccgagatcaccaagatgctgggcgccgagtggagcaagctgcagccaacggaaaagcagcggtacctggatgaggccgagagagagaagcagcagtacatgaaggagctgcgggcgtaccagcagtctgaagcctataagatgtgcacggagaagatccaggagaagaagatcaagaaagaagactcgagctctgggctcatgaacactctcctgaatggacacaagggtggggaactgcgnatgggttctccaccttcgatgttcccatcttcacgtngaagagttcttggaccaaaacaaagcgcgtgaggcggagcttcggcgcttgcggaagatgaatgtggccttcgaggagcagaacgcggtactgcagaggcacacgcagagcatgagcagcgcgcgcgagcgtctggagcaggagctggcgctggaggagcggaggacgctggcgctgcagcagcagctccaggccgtgcgccaggcgctcnccnncagcttcgcctcactgccggtgccggcacgggcgaancgcccacgctgggcactctggacttcttaactgggcccggcttcacagggaccccatcgaagcgcgacccgcccagcacgagaaggctcatcgtccggatcacgcaaatcctggccccggtcgccactggcacctgtgaggactggccggcccagc

SEQ ID NO: 719482 - DNA, 1305 bp, Homo sapiens
  misc_feature (389)..(389): n is a, c, g, or t
  misc_feature (397)..(398): n is a, c, g, or t
  misc_feature (409)..(409): n is a, c, g, or t
  misc_feature (420)..(420): n is a, c, g, or t
  misc_feature (432)..(432): n is a, c, g, or t
  misc_feature (442)..(442): n is a, c, g, or t
  misc_feature (465)..(465): n is a, c, g, or t
  misc_feature (860)..(860): n is a, c, g, or t
  misc_feature (897)..(897): n is a, c, g, or t
  misc_feature (1108)..(1108): n is a, c, g, or t
  misc_feature (1111)..(1112): n is a, c, g, or t
  misc_feature (1149)..(1149): n is a, c, g, or t
gccgggccctgagagggggcgggggtgcagtggtcccagggccgggccggggtctttcctggcccgggggaaaccggaccagtgcctcccgtgggggtggcaatcgcccaatcaaaggattcttggtggcgcccgccctcgaggagcttccctgctccctggatccggtccctcctcagcgcatccgggcccgggcatcccggggctctccgatcgcggggtaccccgagttcgcggtctgccatcgggcaagcccgggcgctactcacgctccgtcccgcgatccgtgttccagtgtccggcccggagcggcgcatgtcctcacggccccaaagtctagcccggacgcaggccgcctgtgccgagctgggcggccaatggctccgggncagcatgnngggcttcgtgntgactgtcaancaagagcgcggngagggtccangcgcgggcgagaaggggtcccangaggaggagccggtgagaaacgcggctggcccaagggcaagaagcggaagaagattctgccgaatgggcccaaggcaccggtcacgggctacgtgcgcttcctgaacgagcggcgcgagcagatccgcacgcgccacccggatctgccctttcccgagatcaccaagatgctgggcgccgagtggagcaagctgcagccaacggaaaagcagcggtacctggatgaggccgagagagagaagcagcagtacatgaaggagctgcgggcgtaccagcagtctgaagcctataagatgtgcacggagaagatccaggagaagaagatcaagaaagaagactcgagctctgggctcatgaacactctcctgaatggacacaagggtggggaactgcgnatgggttctccaccttcgatgttcccatcttcacgtngaagagttcttggaccaaaacaaagcgcgtgaggcggagcttcggcgcttgcggaagatgaatgtggccttcgaggagcagaacgcggtactgcagaggcacacgcagagcatgagcagcgcgcgcgagcgtctggagcaggagctggcgctggaggagcggaggacgctggcgctgcagcagcagctccaggccgtgcgccaggcgctcnccnncagcttcgcctcactgccggtgccggcacgggcgaancgcccacgctgggcactctggacttcttaactgggcccggcttcacagggaccccatcgaagcgcgacccgcccagcacgagaaggctcatcgtccggatcacgcaaatcctggccccggtcgccactggcacctgtgaggactggccggcccagc

SEQ ID NO: 719483 - DNA, 372 bp, Homo sapiens
taattcgcactttatggtatcatcgtcgacacgttcctgttcgaatagtatcgcgattatggtctttaatagcatgatgacatagtctctgtagagtacgttgactatagagtttacaagcgtaggactcgtagacgcactagtaacgctagcatggttggaatacatctgctgttgtagacgctgcagctgaaagaccagatagttgcaatctgtactaaatgtctcaatgatgcatcgagtctggacgagagagtcagttaaccaatgacgtggattatcatacagacgttgatcgacggccactcatgtacagactggcacgctggtacgtccagtcagtaccagcttagggtttaaaatgaggttcag

SEQ ID NO: 719484 - DNA, 440 bp, Homo sapiens
  misc_feature (13)..(13): n is a, c, g, or t
  misc_feature (46)..(46): n is a, c, g, or t
  misc_feature (87)..(87): n is a, c, g, or t
  misc_feature (103)..(103): n is a, c, g, or t
  misc_feature (138)..(138): n is a, c, g, or t
  misc_feature (156)..(156): n is a, c, g, or t
cctcagcctcccnaaagggccaggatacagggcaggagtcacccgngcccagccagccataaggcatttttaaatatatttttaggncaatgcagacatccgnacaattttcccctaaacgttggcaacatgccctantcattacaggtccagtanttttccaggattttttttttttgtaaaatttacaaagaaatgtggaaatcttagttgtgcattagttgagttttaacaaatacctaggctttatcgcaacctctatcaagatacagaacattgctgtcattctagaagcctctgtaatgtgccttccccagtcaatctctttttccatggccccagcagccatcattctttcaatactttaaaaaacattcttatctgaagggaaatttcatatgtgccaaagtcatctctagatttctccaagtcttaaccac

SEQ ID NO: 719485 - DNA, 215 bp, Homo sapiens
accagtgtgccaagcagataaataccaggccactgatttaccacccaatttatctgatcatataatcttttaacaaacaagaaaaatggcaatatctggtgcacagtattaaaaagcacaagttgcgcattggcatcagaagaactccaaaagtgcccttcataaaaaggacacctcactgtagaaacatctatgcacttagtaagccctactca

SEQ ID NO: 719486 - DNA, 699 bp, Homo sapiens
  misc_feature (222)..(222): n is a, c, g, or t
ggggttcactgcaacctccgactccctggttcaagcaattctacctggcttggctcctgagtagctgggattacaggcgtgtgtcaccacgtctcggctaatttggtatttttagtagaggcagggtttcaccatgtcaagcgggtcttggactcctgacgtcggtgagtccaccgcactagggctcccaaagtactgggattacaggtcgtgagccactgntgtcccggccgttttacttaaagtgagcttaatttgtgaactcttagtgattcatatatgtacataaatctgtgatcccatttcttattgcaccatgtcaggaacagctttatataaatgagtggcgttcattattggcactattattgagtagtatcatggttccattacaggcctattaacatcatacatgtcattagtcttgaagaagaactatgtaaatatatatgtgtacccatgacgaatttctctctaaagcagggcttagaatctgcgtggcaacaagtttcgacacgagcataccacatgaattcaggatgttacctcaatgctaagagtcatgttagttaggacacaggcaggtcatcatgagctcaggtagaaaccactagatgctttgacgtttatgtagcttttagaacttgaacacagtttggaattactctggaaccaagcacttattcgaaacacattatc

SEQ ID NO: 719487 - DNA, 89 bp, Homo sapiens
  misc_feature (79)..(79): n is a, c, g, or t
ccttctacgtctcatcactgagatacacctaggtgttggaatcatagctattatatagctgtacaacatgatgtagaanccctcaactg

SEQ ID NO: 719488 - DNA, 223 bp, Homo sapiens
  misc_feature (144)..(144): n is a, c, g, or t
gggaaagtcttccgccagggaactcaagatggtggggaagctggttgtccacctcaaactcacttttccagtgtagaaacttctgccagggaactcaggatggtggagaagctggttgtccacctcaaactcaattttccagtntagaaactgtgagttcgcgggagatttccagcagcttggtgccaggcagaatgggagagggcatctcatatatggatct

SEQ ID NO: 719489 - DNA, 432 bp, Homo sapiens
atgatggtaggggctgacggagtagtaggaggggtccactccaagtggggggtgcgtgaaatgggcgtgggaccaacaggacaggggactctaggtttatgagcgctccatacccgttccacagcagcggggtacccagcgccagcctcccaggtgagcctgtccttatgtatagggtccaacctctgatgcgagcagtcaagtgtctgccccaatcctaaggtccccggatatgtctctagcgactggaccatctcgtgttccgtgggactggggccagcctctggtctgcccacttccctctcattagtcagatagccccaaaggctctatctttagctcccagagaacttttgggtcctcagtatttcccttcccctttccttcctattccccacaactgggggagggaagggagaacaggggcacctg

SEQ ID NO: 719490 - DNA, 775 bp, Homo sapiens
aggaagaggagtgtcagttccttgataccgtctgggagaactgagggtctttctgagaaaggaactcagataagacaaacataagtttcaacttttaagaccaggagggtcaatttctatttttttttttttttttcaaaaaaggccataaacatcagttctaggggaaaatagggccagttcaataaagagggcttgggtactgagcactccattgggcacacaaacttgtgtgcgggaaaagattgaaaagatagggatgctggaagagaagaccgctgtgttgaaccaattttccaggacattccccgggagaccgtgtgaaggacggggtggacaggttggggggagaactcagagcttaagggtgtttgtgactcattttttacacattattagggctggtagccccactaagggggggggccataaaacaagaagtgggccaacttagaacagctaaggggttaccatagaagcgggagaccaggggtggggaaaccccggtttagaggggaaacagagaccaggaagagccacgcccggcctctctgaaactggggcagagcagagagaagagtctcaggcctggggggaagggtaattggaacggttttttaacgaaacacaaaaacccctattgggttctttaattggagactggacaaatctggttataatgaggtaccatgtgtctttaaaccaaaaaagcacctttgaaaagtcttacattggggttctggtaatcttccctctttttaagcctcttttatgg

SEQ ID NO: 719491 - DNA, 490 bp, Homo sapiens
agtcggtacctggtctggtttctcacatgaaagtattttcttttctcaagtccataaatgagaataaatagacgtaaaatagatcttttcgaggatgaagtaaatggaatgaaaaacaaaacccaagctgaccagaaatcatagagggaagaaaaggttataaatatatggatttgtcagagtgattttaagctattaggaatcagttaaatgttgggggattttgtctgagaatgggctaaaggagaatgtcccttttgccttctgaagtttccctgaaaatcactaataggaggcagataaatagtagaaaaggcatacaggtttctgcaatgtgtgtacactggagccattagaacgaagacccagacacacgatgcgtgcagaagcttatctaccacatgaagtttacagaaagaatggggtcttggatcacaggaaaaaaacaacgacggttatgtgacaaaaggaccctggttagcaccagtgg

SEQ ID NO: 719492 - DNA, 144 bp, Homo sapiens
cattaaatgactcaaaggagtgaatctgtacatgtcagtcacagggttggcttgggcaccaccgtagtgtgcgccactgtgcccctctgaccacctgtagagcctgacctggctgccacagagacctcagagtgccagaagaaa

SEQ ID NO: 719493 - DNA, 422 bp, Homo sapiens
aaggttcaactttgtgagatgaatgaacacatcagaaataagtttctgagaatgtttctgatctagtttttatatgaaggtgtatccctttccaccataggcctcaaagcactccaaatattcacttgcagattctacaaaaggagtgtttcaaaactgctcaatcaaaggaaaatttcaactctgtgagttgaatacacacaacacaaagaagtttctgagaatgcttctgtctagttttcatttgatgatatttccttttccaccataggcctcagagcactccaaatatccacttgcagatcctacaaaaagagtgtttcaaaactgctctatcaagagaaaggttcagctctgtgagttgaattcactcatcacaaagaagtttcggagaatgcttttctctagtttttatgtgaagc

SEQ ID NO: 719494 - DNA, 148 bp, Homo sapiens
tcagacggtcctgctgatatttctggagtccgtttaaggttgtcaagtagccactgtttctctttaggccctatacaaaggcaagaaggaaagacaagatcataaatattaatggtgacaccactgtagtaataaattttcatatgcc

SEQ ID NO: 719495 - DNA, 447 bp, Homo sapiens
aatttccaagaacacttcatttattaagatattgtcttcatgcgaacttggtatcctgtttccatcccagccttctataacccagtaacatctttgttgaaaccagtgggtgagaaagacacctggtcaggaatgtggaccacgggccacctcgggctcgcccatggtgtcagactaaagacaaacaaggactctctgtataaggtactggtcgtgtgtgtgttagtggagatgaagcctgtgccctacagacagggagtcacacagacacttttctataatttcttacgtactttgaatgttcaagtataaagtctaatgttaaatttgattgaacaattgtatatttgtgggatattttggaatggaacaccaaaaaatggtaatagtggttctttctggattgaagacaaacttttcttttttaaaataaattttattttatat

SEQ ID NO: 719496 - DNA, 257 bp, Homo sapiens
  misc_feature (4)..(4): n is a, c, g, or t
  misc_feature (187)..(187): n is a, c, g, or t
agantaagtaaggccaaaagtagatttgttgaagacaatattgtctgccaagactaaggaaaaaaaaaggtctatataaataatatcaaaaatgaaaaagacaactacagatgctatagagattttagaaagggcaccatgaataactttatgtcaattaattttaaaactcacacaaaatggacancttcttagaaaaatttatttattaaatttattcaactaaatagaaatccagggcaaaactgtaaaatgtg

SEQ ID NO: 719497 - DNA, 722 bp, Homo sapiens
  misc_feature (276)..(276): n is a, c, g, or t
tgccttcagcctttaaattctccatgcattggccagatcttggcccattagactttagtgagacgcaaccatgggtatatataatgacccttttgtggaacacgtagtttatagacgagtatactctacagggaatttgcccgaagaccctgttactgattggcaccacgttgtgcgtcaccataccaaccttgttcataggaccatgacctgccttcccacacctctcaacgtctgagccgcgttagtagtgaatgtataagagaagtatccaanccggaactcccgtgctttgttaatgtctttaattaagctggccccgttctcacgggacactcttaaccacgatggccacaaaaaaccaaaactttttttccaactcctatgagtggccaactgaagttcttaattgttgggagaagaacacctagtcctacctctgcccctaatgaggtgtttggaggaggtaccacgccactattatagggggtgtaatgtgtgaattttgtttaaaactctactgtatattgaaatgagaattcactttatttgtcttgacacaatgttccaatgatgtagacttgtcttagaatggatattcataagtactcaggacttttaagatgccgatgccccccctgaggagctataattcctaatgtgtattgtattcccaccccattttactgggactattgaataaatcttttattttttttcca

SEQ ID NO: 719498 - DNA, 127 bp, Homo sapiens
ccgaaggacaagagctggactggaggcccctggagccagatggaatgagggtgacagatcacttttctgtgtgtactctgtccagttcctttagaaaaacatgggtgctcagaggactcccaaccct

SEQ ID NO: 719499 - DNA, 810 bp, Homo sapiens
ctttttcttattacccataaaaatgggtgagctgctaggtttctctgtctacgcctcccgagaaaagaaaggcatagttataggaaactggaaagataatgagtggccccgtgaaaggatcattcagtattatgggcctgccacatgggcacaagatggctcatggggataccgaacccatctacatgctcaattggatcatacggttgcaggccatcttagaaataatttctaatgaaactggcagagctttgactgttttagcttggcaagaaacccaaatgaggaatgctatctatcagaatagactggccttagactacttgctagtagctgaaggaggagtttgtagaaaatttaacttaaccaattgctgcctacaaataaatgatcaaggacaggtggttaaaaacatagtcagggacatgacaaaggtggcacatgtgcctgtacaggtttggcacgagtttaatcctgagtctttatttgaaaaatggtttccagctataagaggatttaaaaccctcattgtaggtgtattgctagtgataggaacttgcttgctgctcccctgtgtattacccttgctttttcaaatgatcaaaggtttgtagctactttggttcatcagaaaacttcagcacacgtgtgttatataaatcactatcgctctatctcacaaatagactcaaaaagtaccagatgagagtgagaactcccactaaaaagtgaaaatgctcaaaggggggaaataacgtatgagaccaccactttctcctggtgtccttcccagtttctcccaaactccca

SEQ ID NO: 719500 - DNA, 1563 bp, Homo sapiens
gtcctctgccagtctcgctccgaggtccccgcgccagagactgcaagccggcgctcccagcacgccactattccaccgcgccctcgttcgcctcttctcctgggagccagtccgcgccaccgctgccgcccaggccatcgccaccctccgaagcatgtccaccaggtccgtgtcctcgtcctcctaccgcaggatgttcggcggcccggagcaccgagagccggacgagactccagccggagctacagtgacgtacgtccacccgcagcctacagcctgggcgagcgcgcatgcgcaccagaaccagccgcagactctacgcctcgtccccgggcggcgtgtatgccacgcgctcctctgccgtgcgccatgaggagcagcagaggcccggaggtgcgcgatcctgcaggactcggaggactacatcacaggccgacgccatcaacaaccgagtccaagcaacacccggaccaacgaaaggcccactgcaagagcggaatgacggctcgcccataaatccaccaggagcgcaactggaagcagcagaaaaggacctgagggccgaagctcaaacaaggcaacggccaaggcagcgcgccggcggacccgctacgagcaggaacgggaagcgccacgcagggccggcacacgcaatccgcacggggacacaaccggacagaatacgggcccgcaaaccggagaatcgcaacagacacacgaatccgatcacaccggcaccacaagacgacaacgcacaagaccaaaacatacgttgctgtctctttgcgcctcggcgtgcgcttgcgtctccgaggcacgaaaagacgacaaccaaacgagcaacagacacaagaaagaaagaaacaagagaacaacaagacaacacaagtgacgcagacaacaacacgaaagaaagaacgaaagacaaaagaaccagagccagccaacgcacaacgaaagaagaaccagacaaaacaagcgaggagcgccgcagggagcgaccacacccggcgagacacgagggagaaccgaggacgcggaggggaccgaacgagccggagaccccgaggcccaccgcgaggggaggaagaagaaggaggagaagcaagcagaacacccacacgggcgagacgacgaaggcgacacaggcaacgacaaggagcaagacaagagacgacaggggacagggtgaagaagcagaaacaggaagcagaacagagcaccgagcgcagcgaagtgaagacagaaagaacgaggaggagagaaggacagaagcgaaggggagcacaaggaaggccgcgccgaggggcgacgggcaaggggaagaagagactcagaagaaagacagaggagcgaagcaagaagagaagaagaggaagagcgcaaaacgggcagcaacgcaagaaagcgggacggccacagagcacacacgaacgcagagcaagagcggcaaggagacgacagcacagaagccgcagcaagagagagagaaacacacagccaagcagcgaagaaagcgagagaataagagggcatggaaaagacagaacagaagaagcagag

SEQ ID NO: 719501 - DNA, 90 bp, Homo sapiens
gagacagggcctctgtctgttggccgggctgaagtgcagtggcgccatctcggctcagtgcatgcaacctcccccttctgtcgtcttctc

SEQ ID NO: 719502 - DNA, 107 bp, Homo sapiens
ctgtgttgaactgttcaggaagtggatttaaggaggctcctctgtatctcaaagtagcggattctggagtcaccctgtttgggaggggcgctcagcaccagcacggt

SEQ ID NO: 719503 - DNA, 168 bp, Homo sapiens
agcgtagattgcgtagatttggacctgggatcaattggtcatagctatctcgtagcacgctggttgtgtacaaagttgtatgatgttagacagttaatagaatagaaatttttaaatagccttgttcctcatcaagtgactctgtagcctcttttatttttccttttt

SEQ ID NO: 719504 - DNA, 665 bp, Homo sapiens
gacggccctgagtggagggaggggagggaggggagggaggggaggtgagccgtagcctcccagcgcggctcatgctggtgcctttttgagctccttgtgcacgctctcgcaccggtgggaacggccgcgcgcgtccgctgaaggtggtcatcctgccggctgcctccgggccatcaccaatggagcagctggatggagcaggtgcgcccgcatggaagcaacatcgacgtacttcgaggttcgttcgacgtgctaccatgagtcattattcctcatctcatattcaagtagcttactattaattcttagggaatccttgattgatcatccgttcattcttagagatcgtctttgattggactatgatctgtccttgacacgtcaaaggctctagaagtatcctgcaggtggtagagtttgctgccattccagcaagatagcccaagaatgaagctgagtagacaagagatgccaatgacttggaagacgattgcagatgatccaaaaatataaggaagttaatttagaaatctagtgagtggaggaagagtaagaacattgagcaaacctgagactctggatgggggagatggacggcgaagacgagtagagactcatagatagaagaaccacagcatacttatgagaatatattaaatatagaa

SEQ ID NO: 719505 - DNA, 232 bp, Homo sapiens
tacagtccgcctatgttcggagtctgtcgtcatggaggctgtggataatggatccggagcatatgaatagtatgcttgaagaaagcgtgcatgcagatgtgaagaaatgctaggtggggttggttgatgccgatggtcactattatcaagcctagtgggctggaagttgagaaggctacgattttttggatatcatttggtgtgattgcacatagggctgtatttaaggtgg

SEQ ID NO: 719506 - DNA, 243 bp, Homo sapiens
ctgagtgggtcccagcgttatccctgagcctgacctcctcccagcgttatccctgagcctgagttcctcccagcgttatccctgagcctgagttcctcccagcgttatccctgagcctgagttcctcccagcgttatccctgagcctgagttcctcccagcggtatccctgagcctgagttcctcccagcgttatccctgagcctgagttcttcccagcggtttccctgagcctgagttcctc

SEQ ID NO: 719507 - DNA, 1013 bp, Homo sapiens
gggagtctcctcccttttggtccgctgcaggcccgcaggcccgagtgtcgccgccatggttcgcggagtctgccgcgcgctggtgtcggcgcaatgggtggcggaggcgctggggccccggcgctgggaagcctctgcaggcttgtggacgcctcctggttaccatggccgaaagttggggggcgcgacgcgggaaggccggagttcagaagggaggggccaacatcccagggggggccggttattctttcgaaattgcgcacccagtggcaaggcgacccggaacttcgccttaaggaaccaatttgtctgcccaggtgggcacagaaggacatttggggggggagtaacacacaaggccgctctggtgtgttggggcacggcggccacccaaggtggtgaatataagcgacgggccgagaggaccagggggcctcatactcccgggcccgcgcggtgtttatggagagaatgggtccggagctattgcggcccaacaacgcctggtgttcaattggcatatgatgcggggcctcccggacatgtgggttggggcgccagaaaccatttcgcgggatacagttcggggaaaagacgcaatggtggctcacagcaagagatacacggcagcataagtacgggacccgggtatttagaaaaaagactaacgaaggacattacagcgaaaacttggaaaccgcgcgcgcctacaagcgggtgagaaccaccagagcaatggggcaacgttaccggaggaacgaaccccgaacccccagaaaagagtatgaacgctggccaattccaggacggagaatcccttaaaagatttcttaacacaggggtctgggaaaaacatagagagaccgcattagcaagaaacaagggccggtaaccagtggcgcgtgtggcttgctgaaaccacgggaaggcgaccttgggaacaaacgaccatcacagacgggaggaaacgccacagagaaataaggggacaaccggacagcgcgacccaattg

SEQ ID NO: 719508 - DNA, 806 bp, Homo sapiens
  misc_feature (707)..(707): n is a, c, g, or t
  misc_feature (768)..(768): n is a, c, g, or t
agatgaccctactgctgagtgataccagtgtcttgctgttactgaagaaatgtccaccccgttggaaggagatgacggacactatcacgcatggaagaagtagactaatctctggctgagggatgacttacctgttcagtactctcacaagttcctctgataatatattttcaaggatgtttttcttgtattttggttaatattaaaaagtctgtatggcatgaccactactttaaggggaagataagatttctgtctactaagtgatgctgtgataccttaggcccttaaaccagagctagtaatgctttttgagtttcatgttggtttaattttcaccagattggggtaacgtgccctgtaagacgtatgtaacactgatgttaactttgtgtggtctaaagtgtttagctgtccagccggatgcctaagtagaccaaatcttgttattgaagtgttctgagctgtatcttgatgtttagaaaagtattcgttacatcttgtaggatctactttttgaacttttcattccctgtagttgacaattctgcatgtactagtcctctagaaataggttaaactgaagcaacttgatggaaggatctctccacagggcttgttttccaaagaaaagtattgtttggaggagcaaagttaaaagcctacctaagcatatcgtaaagctgttccaaaataactcagacccngtcttgtggatggaaatgtagtgctcgagtcaccttctgcttaaagttgtaaccaataccngatgagtttaaagaaaaaaatagaaaaaaaaactcgac

SEQ ID NO: 719509 - DNA, 803 bp, Homo sapiens
  misc_feature (707)..(707): n is a, c, g, or t
agatgaccctactgctgagtgataccagtgtcttgctgttactgaagaaatgtccaccccgttggaaggagatgacggacactatcacgcatggaagaagtagactaatctctggctgagggatgacttacctgttcagtactctcacaagttcctctgataatatattttcaaggatgtttttcttgtattttggttaatattaaaaagtctgtatggcatgaccactactttaaggggaagataagatttctgtctactaagtgatgctgtgataccttaggcccttaaaccagagctagtaatgctttttgagtttcatgttggtttaattttcaccagattggggtaacgtgccctgtaagacgtatgtaacactgatgttaactttgtgtggtctaaagtgtttagctgtccagccggatgcctaagtagaccaaatcttgttattgaagtgttctgagctgtatcttgatgtttagaaaagtattcgttacatcttgtaggatctactttttgaacttttcattccctgtagttgacaattctgcatgtactagtcctctagaaataggttaaactgaagcaacttgatggaaggatctctccacagggcttgttttccaaagaaaagtattgtttggaggagcaaagttaaaagcctacctaagcatatcgtaaagctgttccaaaataactcagacccngtcttgtggatggaaatgtagtgctcgagtcacattgacgccttatagttgtagcaatacagacgagtctcgctcgctcggggggtgcgggcgcgc

SEQ ID NO: 719510 - DNA, 193 bp, Homo sapiens
aagatacaacagacacctatgcatgaaacaaggatagacgagacatataaacgactggaccgccggataccattgcgccgtgactacaccctacgggacttcggcatacggaccgggcgtggccagtggcacgttccgctatggctattccgataacctgactctggagagccacgctgaagcctccagcgaa

SEQ ID NO: 719511 - DNA, 784 bp, Homo sapiens
  misc_feature (779)..(779): n is a, c, g, or t
  misc_feature (784)..(784): n is a, c, g, or t
agatgaccctactgctgagtgataccagtgtcttgctgttactgaagaaatgtccaccccgttggaaggagatgacggacactatcacgcatggaagaagtagactaatctctggctgagggatgacttacctgttcagtactctcacaagttcctctgataatatattttcaaggatgtttttcttgtattttggttaatattaaaaagtctgtatggcatgaccactactttaaggggaagataagatttctgtctactaagtgatgctgtgataccttaggcccttaaaccagagctagtaatgctttttgagtttcatgttggtttaattttcaccagattggggtaacgtgccctgtaagacgtatgtaacactgatgttaactttgtgtggtctaaagtgtttagctgtccagccggatgcctaagtagaccaaatcttgttattgaagtgttctgagctgtatcttgatgtttagaaaagtattcgttacatcttgtaggatctactttttgaacttttcattccctgtagttgacaattctgcatgtactagtcctctagaaataggttaaactgaagcaacttgatggaaggatctctccacagggcttgttttccaaagaaaagtattgtttggaggagcaaagttaaaagcctacctaagcatatcgtaaagctgttcaagaaccacatcaggccccagtcctgtgagatgtagatcgagcgcccgcagtgacagtccgcgtagacatcgaaaggaagacagatgcgnccagn

SEQ ID NO: 719512 - DNA, 110 bp, Homo sapiens
tatgtggattacatgtgaaccctaatccaatgctattgaaacttctaaaactaggaaataatcaggagagaatctattcatgcactagttggatacagctaaattcttta

SEQ ID NO: 719513 - DNA, 135 bp, Homo sapiens
tacaactgatctataacatgttttctcaatcaggctttagtgactcctccagcttcaagtggccttcactactcagaaaccaatactacctcttttgctttcttcgttcttcttctatcttcttgagtggtatca

SEQ ID NO: 719514 - DNA, 867 bp, Homo sapiens
agatgaccctactgctgagtgataccagtgtcttgctgttactgaagaaatgtccaccccgttggaaggagatgacggacactatcacgcatggaagaagtagactaatctctggctgagggatgacttacctgttcagtactctcacaagttcctctgataatatattttcaaggatgtttttcttgtattttggttaatattaaaaagtctgtatggcatgaccactactttaaggggaagataagatttctgtctactaagtgatgctgtgataccttaggcccttaaaccagagctagtaatgctttttgagtttcatgttggtttaattttcaccagattggggtaacgtgccctgtaagacgtatgtaacactgatgttaactttgtgtggtctaaagtgtttagctgtccagccggatgcctaagtagaccaaatcttgttattgaagtgttctgagctgtatcttgatgtttagaaaagtattcgttacatcttgtaggatctactttttgaacttttcattccctgtagttgacaattctgcatgtactagtcctctagaaataggttaaactgaagcaacttgatggaaggatctctccacagggcttgttttccaaagaaaagtattgtttggaggagcaaagttaaaagcctacctaagcatatcgtaaagctgttgtaactggccagttacaacagctcctagtaggaggtgccagtttgtcagagacatttatattggaaatcgccacgtgatagtgtgtgatcctctctatacaagaggagggtatcaatggagaaaccaactcaatcaatagacttcaatcagcatgataataaccccagctgtgtactgg

SEQ ID NO: 719515 - DNA, 287 bp, Homo sapiens
tgggtggatcaccagaggtcaggagttcaagaccagcctggctaacatggcgtaaccctgtctctactaaaaatacaagaatcagcgaggcgtggtggtgtgtgcctgtggtcccagctacttgggaggccgaggcatgagaaacgcttgaacctgggaggcggaggtagcagtgagccaagatggcaccactgcactccagcctaggcgacagaacaggaccctgtctcaccaataaatgaataaaaactacaatcatttgagggataaaaatctagccttcaact

SEQ ID NO: 719516 - DNA, 584 bp, Homo sapiens
actacatacttccgaggggaggagtcctgtgtatagatgccgttcgtttctggcagacccctgacccctgcgtgcaccctgtgccatgcagtgacctgagccaccgctcaccgcaggtgtgacagcgtttgcagtttgaatctaatgaaattaattgcctgctaagtagaaacattgattctcttcagaggaatatcacagaattccagtgtcttcacaatgtaacgtttgcaatgtacagggtacagttcaaaatcactcaacatatgaagagccaggaaaatgtgagccattctcgaagggaaagacaacagatatcaattgtgttatgacctagctgttggaatagtcaaaaaagcactttggagcaggtttagtgtctgtgctcagtgaagaaaagggaaatgcacgcataatgaacaaagtgccggaaatctcagcgaggaaacatgtttaaatgagccactgtgcttggccaagatctgaaattttaaaattcactgaatgaacataacagaagggaaataacagagaaaataggcagagtcctcaaagacagaggaatacaaatcatccaagctgga

SEQ ID NO: 719517 - DNA, 273 bp, Homo sapiens
gcaatctcctgcctcagtctctgagtagctggtattacaggcacgtgccaccacacctggctaatcttttgtattttctaggagagacgaggtgggaacgtgttggccagtgctggtctcaaactcctggcctcaagtgatccacctgccttggcctcccaaagttctgggattacaggcgtgagccactgcacctgtcctggattgtgatcttgaagtgataggaacacgtgtgtcgtggggttcgtttgtctttggtggctttggctcata

SEQ ID NO: 719518 - DNA, 245 bp, Homo sapiens
acagtaggtggagtgagtaagcgtaacgcctcagtcgctacgtctagccaggcttgtcactgatgtctcgctgcatagcgctcagtcctcatctcactcaagccggccgtgttggtgcactgcagatccaccctgtggaaacattacatctgcaatatcttaatcctagcgtcagtgaagctcatcacaagacatgggggttaaattatgttgagttcttcttggaccaaaccgtgttttgatct

SEQ ID NO: 719519 - DNA, 624 bp, Homo sapiens
tgtcccgaagactgagtacccttcctaaggcgattaattgtccgcatacgtctattacacatgatgataatgtgtagccacactaatatctgagtctaagtccgacataggctagtgatcatatgtaaccctccctcgcgacaaaatcaatggaaagaggaacgaccgccagacaacagaacccgtgtcagggtgcgcaagagctcgcggcggggagcagaggactaccagaaatgcggaatccacccctactgcaagacagggtcttagcaacctgggtcagaatggtggcaggggagcgatcgacattcgtctcaggatagccctactggccctacctcagagctgaaacttaaaaagcagtgttgtgcacaccagttatctacctcgagctcataaaaattctatgactgaatacctccctgggactcaagacacctcccgagtgtttgggcacacccctgggaggcgggagcgcataaaatctcaagagagtcccgagtgtgtggccggccccttccacccacagcggatgataatctaagacactcccgaagtgtgccactccccttcaacctcaaggatgaaatctcagacactctgagtgttgctcatcccttcact

SEQ ID NO: 719520 - DNA, 620 bp, Homo sapiens
  misc_feature (606)..(606): n is a, c, g, or t
agctccagcgtgcacgtggaaagtgttaagatgctaatcacttagaggaatgaacagcgtgcacgtggaaagtgttaagatgctaatcacttagaggaatgaacggtcaccgtctctgcctcatcgggaattgtagcgttattatcttttatggaaatgagctgtgcctgtgtttggcactcactgatctagttttgcagtaggcatcatgcaccctctgtcattgagaaagagagggcagagtgaatctgtggatccagagttctaaaacctgaggaagagtatataattcggggagaaagtgattctctataagctctgagaggtcaatggttgacatccttgcttgtaaaagatcggacaggtagggggtgtatcatcttgtttcagacactgtttggaaaaacaaaataaagtggttttatttgaagatgtaggcttggttaccccatagccttaaatcatggaagtaggtaaccatgtcaatttgcatggggagccgcgtgcagtggctcatacctgcagtctttgggaggccgacgagagaggattgcttgagtttaggagttcgacaccagcctgggcaacatggcgaagccccatgtntagaaaaaaaagaa

SEQ ID NO: 719521 - DNA, 144 bp, Homo sapiens
gtgggcgtctagaggatccctataagtagtaccaacactagcattagtacacgactattacttaaacacacacatacacacatacacacattcagtgattctggtgctataagtgagaagcacgaatgtgtgtatgtgtgtatg

SEQ ID NO: 719522 - DNA, 981 bp, Homo sapiens
ggcgagtgtcgcgtctgcagtgtgtggggttcgcggggcggggggtagagttgagcatttctgtcatctgcacaataattttagccaggtggcacgtgtctggcctgtggagtaagacagtacctgcctcttgcctctgacgtagggttctggcctatcaggaaccaagacattttcagtaatggaagaaggagcttccagagctggggaagatcatcatttccagtggtcagcttgaccctgagcatgcatacctgcacaccaacttcatgggaagagcccagaatagacagaagagagagaacatactagagataagctagcccctaagagttgaacgacaatgggccacggaccagctgacacataccaggaaccacatgaaaaatgccacagaagtacatgtctgtgcggagaagagcaaaggaagaacatacacggggaggggctcatagacacatacgacagaatgatggcaagatgaggcatacaaccacgggaacgacgctgacaagaaaaacgggacccagatccaccagacagagtctagatacaaacggacagataaaagatatggaagaaacatacaaatcaacaccatacagaacatcacacatcaggagggcaaatcggaaggggcacaccaacaggaccaggaaaaaacagcgttcctataccaccacgataaggagaagcacaaaagagggacagcaaaaaacagccacacgactgggacatagaggcaaagacaacaggggaaagaccacggccccaaccaaacgacccaagaaaatctgggagcgccaaggggtatacagtcgggccagttccacaaggaacaggtagacgaaagagcactaactaggacaacaagacaaacacaacggcacatgaacggtagaaaatagacagctaagaggaggaggaaaataataggaagcgaaacaacaagagacgagggcaaccacacatgaatacgat

SEQ ID NO: 719523 - DNA, 347 bp, Homo sapiens
agctcccgtagctccgagctgctaggggaggcagctctaaacacggtactccacgaagatgacatattgcactcacaagatatgtttaacgaagatggtcttaatgacagcacatcttcaataccagcgagcttgccccctccatgaactatatgctgcagaatcattatacctgggctgctttcatggactctgtgcttcagcactttgctgtgggggccacagtgggagtgaaggtgggggcgcccaaggatgactttctcgaaggcgcagatgcctgagactacacaagaattgggggtcgatgagtcatgagcggacaccaccctctatggacctcccctgtc

SEQ ID NO: 719524 - DNA, 262 bp, Homo sapiens
ggtgaatttcagttctgggctcggcacacagagtcactttttcctcctgggattccaggctgcaatgggaggaacttccacaaaagtctctgacatgccctggagacattttcttcattgtcttggtgattaacatttggctccttgttacttatggaaatttctgcagtgggcttgaatttctcctcagaaaatgggattttcttttctattgcattgtcaggctgcaaattttccagacttttttgctgttttcctttgg

SEQ ID NO: 719525 - DNA, 555 bp, Homo sapiens
  misc_feature (291)..(291): n is a, c, g, or t
tgcaaatctggcagcccccgagaggggtttggaaccttagcacccaagtctaagtcaacttgcatagtgtgaacatggctacgcctcgttcattccgcgtccatgccgagccccctgatgcagcattcaaaggccgcacggaggttgagccgggcacagaaactacaggcaagcggtgaggcagccaatcaccagcactgccaacagacgagctcatcgtgcgcccttgtgtttgagaacgcttaaaagttctgattccacctagggagaccatggacctggcaccccggntacacaacacttggtgtgctcaagaaagcaaagcacacatcaagaaacttgacagaagcgtggcaaacgaaataagccaagtaccaagctcgagaattgggaacgagaacagagatttttaaagtggcgactggaacagctgcagggtcctcaggagatggaacgaatacgaatggacagcattggatcaactatttctttccagaaatttcggatacctggaatttccagaagcgaagaaggagcattgcaagtggatgttga

SEQ ID NO: 719526 - DNA, 232 bp, Homo sapiens
gacggtggtacccagtgacgtcgactcgagtactggacggatccgtctagatcagcaggactccagatatactgatattatggcggtcagcacggtgctcactgtgtcgagggaacttgtacagggaggcatgcaccgaagtgtgaatacacgtcgaccaggctccaggtaaccgatatttggaggtcagcactggtgctcacgtgtcgacggaacttgtccagggcggcat

SEQ ID NO: 719527 - DNA, 248 bp, Homo sapiens
cattaccatccgacgtgatgagcattatccgcgtttatggagttgtattgcataccccttgtagaatgggcacatgtgtaggtgacccctgtaaggggaggtcatcactgatgcccagtgtactggccagagtcgtacatggatatgcacagccttggatagcaacgtacattgctggggtgttgaaggtctcaaacataatctgggtcatctactcgcggttggccttggggttcaggggggcctcg

SEQ ID NO: 719528 - DNA, 440 bp, Homo sapiens
  misc_feature (353)..(353): n is a, c, g, or t
aaaagttgctaggttgctgtgaggaaattcgcaccattgcactccagcctgggtgaaaagagcaaaactctgtctcaaaaaaaaaaacccaccaaaaactgcttctgaatggaattgtacatacaattttgatgaaaaaaattatcaagtgcataagttcataatagaaaaaccaataatactccaggcacaagttagtactaaaaaaaatatgttgaatattctctaatacaacatgctttttcccttcatgaacaatttgtgttttactgaggaagagtcattgtttatgggtaggacattaggaccacagatgaatatgtacttttaaacactcttaggttactttcttnaatttttattatctggctggctttccatggcttctgttttatttttccattctttcccaatggtccccattctaggtaaatttggaa

SEQ ID NO: 719529 - DNA, 298 bp, Homo sapiens
cctaacgtggaatcgcgccgaatataagacaagacgccatcaaacttctggaagagaatgtaggcaaaacactctctgacatcaaccttacaaatgttttcgcaggtcagtctcccaaagtagcagaaataaaagcaaaaataaatcaatgagacctaatcaaactgacaagcttttgcacattaaaggaagccaaaaataaaacaaaaagacaacttagaaatgggagaagatagtttcaaataatgcaactgacaagggcttaatctctagaatatgcaagcaacttatacacctc

SEQ ID NO: 719530 - DNA, 727 bp, Homo sapiens
agcgttcaaaatatttgatttttaaggtttcaactcagaacaaacgattgccgagtttttgtttgtattttaaagagatggggtctcgctatattgcccaggctgtactccaactcctgagctcaaactgtcctcttgcctcagcttcccaagtagctgggactagtcttgggcaaccacacccagctctgcagagtattttttttttctgaaacgtactgtcaagtaatattaacttgaatttcacccttttttcttaaataaacggttgcttaaaaatctctattagtagatgaagtgatttcccccctcctgttttgtttttttttttcttaagagatggagtcttgctttgtttcccgggctgatctggaactcctggcctcaaggcattctccctactagctggaactacaggcggttgccaccagcaaggctcattctcgacattgtttttgtcttaactagcttttgcatttgtaatattttgaaagcagtacacaagttatttttccctcctttttaaagatcaaagagatgaaaatttaatttttcaaaggaaagtaagaatgagttctgttgtatttttactgaaatattcttgaaagacactgttttatggatagatgagacgtaagagaaagtaaaggaattaacatttattgagttcttttttcaggtattgtgttaaatgctttacatatattaaaaacatttgaatctgaaa

SEQ ID NO: 719531 - DNA, 459 bp, Homo sapiens
  misc_feature (1)..(1): n is a, c, g, or t
  misc_feature (137)..(137): n is a, c, g, or t
  misc_feature (187)..(187): n is a, c, g, or t
  misc_feature (225)..(225): n is a, c, g, or t
  misc_feature (255)..(255): n is a, c, g, or t
  misc_feature (265)..(265): n is a, c, g, or t
  misc_feature (290)..(290): n is a, c, g, or t
  misc_feature (317)..(317): n is a, c, g, or t
  misc_feature (343)..(343): n is a, c, g, or t
ngggaacatacatgacttagagtgaaaataattctagaaaggtttcactgggtgggtgtgcgggttcttgttctggcactgcttctttcggtgcgtggggcttcatgtattttgcggtgttcttggcctcggtgtcngccacctgttttttggccgggcgggtttgggtgtgtccggatggtttggngcgggggggtggcggtccctgtgtgtttggtccgggcnttggggggcggttcgggtttgggggttgtngggcttggcnggtttccgtgcggccggtggggggntttgcccgtcgtttggcggtgggggtncccccccgctgggtttgcgggtcaancgttgggtttggtgtctgttcgtgtgtgtgtgtgtgtgcttgtggtgggttgggcctgcctttcgtcttttctttggcccccctccctgtttcccacccctttccctcgggttttc

SEQ ID NO: 719532 - DNA, 1863 bp, Homo sapiens
  misc_feature (655)..(655): n is a, c, g, or t
tatcctactcgagtaacgggattctattcttgtagcgatgcggacagaacattagacacagactgcgaaatctcgaacgggactccgagacgccgttccgtagagcagggtcaagcgaaatggcgccataccacgtctaacccgtatgatcgtcagccagaggacgagagcaggttctctctcatgaatgtttctcatttgtgacgctggagattacctcgtgctttgtctgtatcacatcacacatacacaataccaacgagaacatacgcacagcacagacagagacgagagacagacgagagcgctctgagagagatactttgcgacgctggtggtctaccctcacgcgccgccaagaacatacacacacgcttgtgcccttactctagagaacctggtgtgcgcaacagaggtgtgggcgagtggtggcagcggcgacacgagagaacatactctctatcacgaccaggagttgctcgacacaactactagaagatcctctgtgttcgtctctcctccggtactacaatagcaccagcaggattactcagccacaagcagccctgtaggcaccccgcttagttcataccactagcaccatcagtcttcttcctcaagtcgtccgtcatcctggttgcggcgtccaccaccngccagctagttggacggaactgatacgaacaacagtgtcgtctcttcttgttcccgttgcttcaacactacccatggcccgcggcgctcaccaccaatctcttgctcttgttgcaacaacgaccaacaatcacagcgacaaacaccaccgacaacaggaccactactaccttcttcctgccgatggactacggactcggtggcgattcacacgaacacaatcgcgcaggatcgcaacaaacacttacacccacattctcgagcacccacgcaatgccggcggcgctcgtcgagcgctatccaacaaccggctccctgtacggacgggttctagccaccagcaagggaggtcttccactcatggaatagcatcgtcgcttactccacacacaagcgacgcaccaccaacgttcctcctcttcgatcacacacgcaccaaacacctctttgttggtcggagaacaaataggcctcctttcatcctcagtatactagttactctatagatactcgcgcccactccatgacgcagcctgcacaccaccggtggctgtactcttcctccttcgacggggcgcgccccatccataaccgcccgctggtgcaccgctcgcgttgtgttgtctcatgtgtcttaccccccccgctcctggccattactaggtgtactcggcctgatttcaacccacctatggccgaaccaccccgcccgcgtacgatactccggcccccgccgctagctggggcccattctttccggggcgcacggccctcttgctgcggcaaggcacccgccccctcacacacgcgatcagacccgcctcaaccgcgccttgcactcgcgcgcacaacagcgacaccctggcacacgcagtgccctcgccgaatgcctggacgctaccccccacgccacacaacgcaaccatcctccaccctcccacccgggaccacacccgaaccaccgcacctctcctgacagcagacacacgcccgcgcgactacaatcggccccgctcggcgaagcacccccaccgcggcgcgaccgccgacaacatcaaaacaccgcgcgacctccggccgacccgacgatagcagaccgcggccaccagcaccgactccgcaccaccacagccggacccccgagcgccacaacgtagtcggggccaaacaaccacaacacacacgacagcgaccaaccacaacagggcc

SEQ ID NO: 719533 - DNA, 1531 bp, Homo sapiens
  misc_feature (1404)..(1404): n is a, c, g, or t
cgataggttcgttgtttctgcggtgtgggtgacgacgcgcactgtgggtgtggtggtcggcggcgttgtgtggttgggcagccgtggtgggcgacctgtggggggcgttcgtcgctgtggggtgtgggtgcgtctgtgttgacagccgaagtgtgttggcgatgcgtggtcgggttgtgccgtcacgatgacatcgtggtcccctcacatagttggtgcgcgacggcccatgctggtgtgttgccctgcgtgtttgttggttcactgcagtcgaggtgagatgcgcggtcgtgctttgttcgcttcgtaggtgtgtttctctccgtcgtccccatcctttggtgggggccccccgctctgggtcgggctccccttgttgagggagaacggcccccgtgcggggccctcaaccatggggcgaaccgtgtcaccctttccaccgggggagaaccgccggggggtttgaacacgcccaggggggtgggggggcctccttgtcaagtcaggtgcggggggtcgcagcatcttgttctgtctcagtcgcgcggtattttcctagtcctggtcctggcctagcatgccggcaacatgggcgctctggggtgggtttccggggccaagttggtgtgtaaaagggtgggtttggtgttgttataagagaagcggtgcgcaaggggtggggggcccccaaccacctgggtggggattcacggccgcgagactcccggtttatatagtggagggggccccgctgcacgggatctgtcttttgcgaggggggggggccacggtaaggaagtaatgagggataaaaggggagggggccgcgagaaattgtctcccacccctcagtcaccaacagcctcgtgtgagcccacttgaggccacgcaaagtcgtgtccctctcggggaaaacgtcccaccttggggttgggaatgtggcctctcccgtgtcaccacgccccctctggggagaggggggccccaggcacacctcctcccagagaggaggctttgcacaagcgccctgtggcctcggcctcgggtaacactgggcccctctgcttgtccacacgtgggctgtgcgccaccgcttgaaccacacccgcaccacattcccccaaaccccacccggcgccccctgtggagacccacacccaccccccgcgagggagggagacccgcgcccccgcaagaggcctacggcaccacaccctccgagagttttctgcggggccccagaaggatcttataggaggagaagcacccgaaggagccccccgcagaagcaccccgcccccgggccccaagcctgtgccaccctcgtgataagcaagcctcggggcctcccacactctctggcccgaaggaaagggcccccaggcacagaccacgcctcgggcncttctaaccacgccactttgtcccgagacttgaacttcgtgtcccttccattggtaaatgcgttttttatagaaactcccataatatttcctttccttttaaaaaatatttgttttaaactttaata

SEQ ID NO: 719534 - DNA, 101 bp, Homo sapiens
aatgcccgtggatagggagtttgtttgggcctttgttgtaatagacctcctagatagttccattttttctattcattaacgtgccctgggaatccaaaggc

SEQ ID NO: 719535 - DNA, 555 bp, Homo sapiens
tcacggattactcaaactcctggtgctcaaaccattctccgtgccgttatccttctaaagcactgggatcacagattagagtcgctgtttgggaaaaccctttgggttttaagacagtttccatgtgattaagtgaacaataatctatttctacttgttttatgaacaattttatcaaatattattctagaacctgtagagatactcatatgattttttttcatctattaatatcagaaattatgacttactaagccattctcgtatctggtttgaatcacacctggtcacttgggtttattcttttaatgtgctagattctatctgttaacatttttcacttagaattctttgccccatattcatgtgatagtccaatcattctattttgtctttattctatttttgtcagtactctgcatcactgttagcctagcttgctaaaaagaatttggaagctttccctgtgctctgagacattaaatagtacagattgagtatcctttatcctaagtgcttgggaccagaagtgtttcaagatttttttggattttg

SEQ ID NO: 719536 - DNA, 264 bp, Homo sapiens
gagtaatggatgagtgtggctagcacagagctgcgggtcagcccctcagtgagagggagttgctggtcgaggtgcaggtgctgaggcatgagaaacccagaccgcccagaggccacactgtcaacatcgcccagtctggccccggttgaagacatgcagtttcctagggactgggtctctttaacctagttctttggaaccccaggggtacccaccataattgtgtcgtggacactacagcaggtattttgcaacgagaaatcg

SEQ ID NO: 719537 - DNA, 222 bp, Homo sapiens
aagaggtcccccgtcacattggcatatgaggagcgggcagggcagagaagaggagacacgggtctggcagcaacagcttctactaccagccctgggggcactcaccccggtgatcaagcaatcatggtcaatgacaaagtgactatggaagttataatggtattaaattaaggctaataattgggatatttaatttaatggggggcggctcgggtaacttta

SEQ ID NO: 719538 - DNA, 233 bp, Homo sapiens
cggaccactcggagagtgcagggtggtggtcactcctgtgatcctagcactttgggaggcaaggctggtggatcacttgaggccaggaagaccagcctgggcaacatggcaaaaacccatctctacagaaaacacaaaaacagctgcatgcaccttatagtcctcaggaggctgaggtgggaggattgcttgagcccaggaggttgaagctgtggtgagccgaaatttcagca

SEQ ID NO: 719539 - DNA, 200 bp, Homo sapiens
ccagaacacaggtgtcgtgaaatctacccctaaaaggccaaaattgggaagggaaagactcatatcaacaatttggtaattggcacgtagattcgggcaagtcccacacttcttgccatcttatctattaattcggtggcatcgacaaaaggacccttgataaattttagaaggaggcttcttagataggaaagggctcc

SEQ ID NO: 719540 - DNA, 349 bp, Homo sapiens
  misc_feature (2)..(2): n is a, c, g, or t
  misc_feature (12)..(12): n is a, c, g, or t
  misc_feature (51)..(51): n is a, c, g, or t
  misc_feature (93)..(93): n is a, c, g, or t
  misc_feature (98)..(98): n is a, c, g, or t
  misc_feature (110)..(110): n is a, c, g, or t
  misc_feature (199)..(199): n is a, c, g, or t
  misc_feature (206)..(206): n is a, c, g, or t
  misc_feature (286)..(286): n is a, c, g, or t
  misc_feature (300)..(300): n is a, c, g, or t
gntcctcatggnctcagtcctggtcctcagtagctctcgtttctgtgtggnccttgcatggaatggaactgtgcctagcattccttccctttntgatnttcagttgcatntacgtgacagtggggttctcagttctcctgcatatggaggtagtgtctgtgtgtgctctgtaaggcacgccagggatttccacagaacnaaaaacnaaaggttgcaaaggagaccaggatatacgaaacaaaatgactgagtatttcagagagagcgactgagttaattcacctantcattcattgaagnaaattaatggaacacctactttgtgccacatgctgtggtaggtgcaggg

SEQ ID NO: 719541 - DNA, 165 bp, Homo sapiens
tgggggggggggtttttaaaatcccccccccccccggggggggggggccaatgcccccccgggccggggcttttggtttttttccgggcctttggtttttttttttccccccaaatttttttttttgggggggggggccccctaaagtttttttttggggggcca

SEQ ID NO: 719542 - DNA, 98 bp, Homo sapiens
  misc_feature (94)..(94): n is a, c, g, or t
taatcctgatatcatctgcaagcgatcttctgttatttggtatttttaagattcgaacgccaatcttctggtggcttagtttaggaagtccccntacc

SEQ ID NO: 719543 - DNA, 1859 bp, Homo sapiens
  misc_feature (1)..(3): n is a, c, g, or t
  misc_feature (1844)..(1844): n is a, c, g, or t
nnntcgggggtcggcgtgcaccggctagtagtgttgttttcttctttgttgctgtgttctcgttgggttgtctgttactttgttctgtgttggtgtgtgtctgtttgtttcagttagtgtgtctgtgttgggttcttgcctgttgtgttttgcttggtgttagtttgttttgtcttctttgtttttcgctgttttttcttgttgcattctgtctttctttgtttgttttgtgttcctctgcgttttgattggtcgtcttctctattgttgtttgttttgttcgtagtagttgtgtccctcgtgcttcttcgtatgtggcggtgtgtgttgtggctttgacagatggttttgattgtgtgggcagtctaatatctttgctgcgtgtgtcgttgttttataggtcgtgaccgggtggctccgacgtatgttgttcggctgtggttggttgtggctgcagcttgtctcacgtgttgtggtggtgtgcttttccgttggtgtgttgatgtgacgtagttcacaactgtggtggggtatgtgtttctcacatcaggtgtgctgcctggagttttttttttcgcaggtgggtagtgacctctgtgtctacatgtgtcgtgtctgcacgtgtttccgtgagagagcttgttctcctccggtgggggctcctgaagggccatcatgcgtcgccttttctctttgttggtggggcccacacacagatgggggggtagttcaagtgctgctggtgatgtctttatgtttggtggggtgtttgtgctccgcccggtgggggattgtgagtttttatgaatgtttttctcgttgtgggttgcgtcacccgtgtgggtttctcccacatggagtgtacatcgttgttttctggggcgtcctctatattgttcttgctctccctctgtgcttgattgtcgggtggcttttatttggggcccaccccacaaatgtgggtgtgtggttacacagggggtgtgtgtgacactctttgggaggcccgtgtctcgcgctcggtgtcgccttatgctctggctgtgtccccctttgggagggaagcccccacgggggtgccctggttgtttttgtggtgtgtccgctggccccccgtggtgtgcgcaccgacgctggtgtttgtgccccccgcgtctttcttctgtgtgcccaacaggtctcggtggggtgctcgtctcttctgtgttctcccgttgtcacgtgtgcacatggcacccacaggggtcacacatgtgtggcccgcgtgtgttccacacaccacatctccacacaccctccagtttgtctgtagccacacacatggggaccacattttccggcgctccacctcaccgtctacgaggcccgttgtctgagatgaccacaacacactgtggtgacccacaccactggggccacttgcgggtctccttcgtccgtgtgtccacagccgtgtggttattagagaggggagattgtagtgagaatgtctcccttgtgttctgttgtgtgtttatggtgcacgtctggtccacatgcccacaggtgtgcgcgcccctgtctctgagcacgtctacccaccacgcgtcttgaggcacgcacttgtccgccggtcctgtcacggggtatatgtccgccccccgttcgtctcccacccacgtctcgtctccgttccgtccgttgaacgtgttggaactagaactggcctcgggcctgccccgctcagcgttatccctctggttccataattatttagatattttaattttttatttaatttattgaaataaaattaaattgagaaaaaaaaagaaataaaatacttcgagcatatagctcggggncgagaagagtatgta

SEQ ID NO: 719544 - DNA, 543 bp, Homo sapiens
  misc_feature (41)..(41): n is a, c, g, or t
tctgattcaacattgtgtttttttgagcaagggggaaatantaagtcacaccaaaaatttttatctggcataaagtataatagcaggatgaatcaaatttcatttcttctcttgcgcctactggcaaaagaatgtgccaaaaatagagaaagagggtaagatgatgggaaaaaacagactaggcggcgacataaatcatggggtccaactctacaacagggtatttaattaatatcaatttctgggatctaaaggggggacatggaatatggtttaaaacttaaacactcaataacattataaaccaaaaattcaaaccttttaaggggcctatatgggagaatcatattttaaaggggggaaaggggggcctaatactcttactgggttaaaacccatttaaaggcgaccataaagggggaggggggtttataaaaggtggtttaaaggtattagattttactcttccaaaaagctcatttaccataaatccttttttttggtcaacgggagggggttttcttcccattgggcccaggtgtg

SEQ ID NO: 719545 - DNA, 463 bp, Homo sapiens
gtcactctaagctgtgtggctttgacatcagttacttcatctctctaatcctctgcattaggtatttgattttatttacttatttatttatttattttttgagacagagtttcgctctttcacccatgctggagtgcagtggcgggatctcggctcactgcaacctccgccttcccgtgtcaagtgattctcctgcctcagcctcgcaaagtagctgggattacaggtgcccaccactacgcccagctaatttttgtatttttagtggagacggggtttcaccacgttggccaggctgctctcgaactcctgacctcgtgatctacccgcctcggcctgccaaaagtgctgggattacaggcgtgaagccaccgtgcccggcgggagtagggttatttaaatagactatctcaaatccttaaataatatgatgagagtggcatcgataaacacggggatctct

SEQ ID NO: 719546 - DNA, 98 bp, Homo sapiens
ggatttgctggtgcagtacaactaggcttaatagggacatgccttagtcacaagtaataaagtaaacacagaagctgcaaaaatccatcaccagagga

SEQ ID NO: 719547 - DNA, 878 bp, Homo sapiens
gcatttgaagaaaaaaaataagtctgtttgtcatatttaagtagcctgtggctatttttatactgatttgatatcatgtcttttcatagtcgtatttgtgccaccgtaaacataaaaaaaaaaaaagatttccaaaaggccgtttccagacccggggtttaaatagcagtcatggaattggtaagcttagtagttgcagaattggaacactagcgtggccctcagttatcttaccagggggaagttcctgttacaatgtgtggacttttctttcactatgtgtaagaaataccccaaacttgaaaagatggtttcggaccatatgcttgtatgtagaatattttggcagacgcagaaggattattgtagacgtggtggatataatttccagaagtcatatacattgtaagctacaatttggaggttgctttataaaccttagatattttttttaacttttaattcatagcatttgtaaaaataaaataccttgtggaaaagccctttttcacaatatccctaagctagggaagagggagggaataacacctcacgtgaaaagatggcctcccagtttctggaatgaaaagctaccggttggaaataaattaagtgtgtggtggcagattttgttatccccttattggggtaagggatatttaatcactgggcaggcgggagggaagggtagggttggctgattggagaaaccttacgggagtcccatataggttgagggaccttaaaaaagacaaggggggtagtgacccaaaaccacaggggctttgtgattaagagagcgtctagaaaaaaaatatatgtggggccagattaaaaggggcaggaaaagttcatagaagaagtgataaacgcgcaga

SEQ ID NO: 719548 - DNA, 124 bp, Homo sapiens
  misc_feature (42)..(42): n is a, c, g, or t
gataataggttttcaaatgtttcctcgtcacccaaaacagantaaatgtgcaaacatcgataaacaggggaaaaatcaacaagatcctgaacagttaaaatctcttcttcattctcatcctctt

SEQ ID NO: 719549 - DNA, 143 bp, Homo sapiens
  misc_feature (71)..(71): n is a, c, g, or t
tcaagccagcctcctgccacagcctctctagtagcggggtctacaggcacacaccataagtaagcctggcntatttatctttttttgtgtgtggtggagacaggatcttgctatgttgtccaggctggtcttgaattcctgag

SEQ ID NO: 719550 - DNA, 695 bp, Homo sapiens
  misc_feature (323)..(323): n is a, c, g, or t
tcccctggcaccacagcccccatggatcgcagcttctagtcgtctttccgatcttccgacaatgcccagtccgtgacccctagtccggatgcactgccgctccctggcaccagctcgagctgcaaggtcgctgtacgacttcgagcccgacgaacgacggggagctggtgcttccatggagggcgacgtcgatcacgcttgaccaaccagatcgtatgagaactggtacgagggcttgctggacggccaagtcgggcttcttcccgctcagctacgtggaaggtgcttgtgcccctgccgctatgtgactccaccgcggtgtncgccccgcctctcggcgccctgccgttccgatcactttgtggccgggcgtgtttctactaagaatggggggcttgtccccttgcctgtgtccccacgggtctttgccccccttgcctcgtccccgaggaggtcgcgaaagttacttggatgccaccttgacgccggtggcgaccctaacacctggggggacccccccgggtcccgcattgtgggaagtggcctacacattcgccccgttggtagggcccaggcggaaaccccccaaaacaagcctttgagcgtgattgcggtagggtgagggcctttctaacttccattggcggggattgcgggattgaggagggaatgtgctcccattggtttgttaacca

SEQ ID NO: 719551 - DNA, 395 bp, Homo sapiens
gtactgcagagcacaggagcaaatctccctactcaaggccaggagcccaacccttgctttagcatgccctgtatgtgagacatggagtaaaaggaaattttggaactttaagtttcagtgagtgtcttgctgggttttggacttgcatgaggcttgtagcccctttgttgtggccaatttctcccttttggaatggtaacatttactcaatgcctgtatccccactgtatcttggaaataactaaattgctttagcatttgcaggctcataggcagaagggacttgccttgtctcagataagactttggaattaggctttttgggttaatattggaatgagttaagactttgggggaccatgatgggggcatgattgtgttttgaaatgtgagaa

SEQ ID NO: 719552 - DNA, 534 bp, Homo sapiens
ggcagttactgagaactcataagatgaaactaaagatccctcttcggatccacagtcaagcgcacctgtaacacatcctgacaaaaagcccaggagaaaggagcgccatggattattacagaataatatgtcagctagtctttgctggtcgacattgtcggctgtgttctagcagttgttctccctatttccagctcctggatgtgcagcgattgcctcgagaatgcacgctacaggaaaagccattcttctcccagccgggtgccccgaatacttcagtgcatgggctgctgcttctctagagcatattccattccactaaggtccaagaacgacgatgttggtccaaacagaacgttacctcagagtccacttgctgtgtagctaaatcatataagcagggtcactagtaatgggggggtttcaacagtgtgagaaccacatggcgtgccgactgcagtaacttgtcattatcacaaatcttaacatgttttaccaagtgctgtccttgatgactgcttgatttttctggaa

SEQ ID NO: 719553 - DNA, 1501 bp, Homo sapiens
  misc_feature (60)..(60): n is a, c, g, or t
  misc_feature (620)..(620): n is a, c, g, or t
  misc_feature (908)..(908): n is a, c, g, or t
  misc_feature (1007)..(1007): n is a, c, g, or t
gggtctcatcaatcagtgaagttgactcctctgttggtgctgcatccgtattagggtgtnttcgctggtgggacgcatgtcgccgctagaaaggcctttgtcttgacctccagaaaacgaggggttttgttttgtggcagagcgagccgcaccacaccgactggtggttgcctctcggtggcctctttctcgccagcacatcgaggtttttcctcgaagtgaggggtggtgtatttccttcgttgtcgctcctctggtgggcgtcgctcttctcgtgcctcctcctgctttgtgtggaggtgggtttcccaacgggatgtctcctgctgtggttgttctccttctccctctggtgggggccgccccaagttgtgagccttccctccccttggtgtggtagtattttcgggccggcggcgtccacaatataccctggggcgcctcgctcgacagggtcaccaacaccgcttgccggacgcgcaaagcaaattggtgcggagcacacgcccacaacacaccaggggatgtaattttgtccgagaggtattcggggccgccccccgtgccgacattacggggtgcccgccccgcgcacaaaaatggccggtgttctaattagngccggcggagaccatatatgtagaccgcttatgagtgtggtgcccgttgtagacaaacccccccgtgtgtctgtgtgagcacacaaagcgctctaaacagttgtggcgcgcccgagggcaactcacacagagtttgagagagttttggcacacatggcgcgtttattattttggtgtgttttgctttcgtgctgttgtgtgtgtcttggtgtcttgttgctttttttttttttcggggctttgagacttctcaccgggagttttattataaaatactggggagacctngtgtgtgagacagcgtgtgacacacagccacagtttcgggtgtgtggaggaggcgagagacactgctcccccacaaaagtgtgtcaccacacttgtggnggcgcgagaggagacttttgagattgccacacacattggttgggttttgtttaaaatatggtcacatgtccccacaatatatgagagaatgtcacattggtacacacgggagaaggtccctcgtgccacatccttagaaagccacccccacacttcttctttataaggaggaaatggcgccacagtcctctttcccacaagtccacacacacacggggagaggtgaataagcacattgctcttctgggtaaaatataatgtaaatgccaaaatttttttaaattttctgccttaatacttttttattttgttttaattttgagatgaatgaggccttcgtgcccccccttcccccttttttgtcccccacaacttgaagagatgtaatgaaaggcttttggtctccctgggagagtgggtggaggcagcccgggcttacctgtacactgaacttgagacccagttgaattaaagtgcaccaccctttaaaatga

SEQ ID NO: 719554 - DNA, 154 bp, Homo sapiens
  misc_feature (23)..(23): n is a, c, g, or t
  misc_feature (42)..(42): n is a, c, g, or t
  misc_feature (45)..(45): n is a, c, g, or t
  misc_feature (52)..(52): n is a, c, g, or t
  misc_feature (56)..(56): n is a, c, g, or t
  misc_feature (63)..(63): n is a, c, g, or t
  misc_feature (89)..(89): n is a, c, g, or t
ccggcctatgccctgccactgancaaggcgcctgtggacctnctnggtgttncccncaacaanctcatggcaatggcccaggagactgnagataacctgtactggggctcagtcactggttctcagagcaatgccgtgtcgcccaccccggctc

SEQ ID NO: 719555 - DNA, 336 bp, Homo sapiens
  misc_feature (254)..(254): n is a, c, g, or t
  misc_feature (320)..(320): n is a, c, g, or t
  misc_feature (329)..(329): n is a, c, g, or t
ggcatggtggcacgtgcctgtaatctcagcctcccgagtagctgggtctacaggcgcccgcaccacgccctgctaattttttgtatttttagtagaggcgggatttcactgtgttagccaggatggtctcgatctcctgacctcgtgatccacctgccttggcctcccaaagtgctggggattatagccgtgagccaccgcgcccagcacatgatacaagatttatctctcttcctttcctctgcttccctggntctttgacaacctcatcttcccaagattcttcctaacccttttaagggggggaggggatttcaaantttaatttncaagata

SEQ ID NO: 719556 - DNA, 430 bp, Homo sapiens
  misc_feature (43)..(43): n is a, c, g, or t
  misc_feature (65)..(65): n is a, c, g, or t
atgtaatgtgatgcgggtggtattgttcatgagttttggtagntatttcatgtgcattgccgccnagatgcatatctacacagagcatcatctatgctctatactcctctttcaacacccacgatcctcttccccgactgcctttctccagcctggcgatagtcttgagcatttccctaaactccgctgtccgctgttcattcccacaataccgattgaaatgatcaaccaacatctgcgtcggcgccgatcctccatgggcgacgaggaagtcacgaatcatcaccaggaaatctttgcctttaggctgttcgcgaccacgtgcacggccgcctggagtgcttgaacagctggaagacgcggagccaccttgcctcgactgcaggtttgcgtcgacgcggccgcgaatttagtagtagtaggcggccgc

SEQ ID NO: 719557 - DNA, 1014 bp, Homo sapiens
  misc_feature (1014)..(1014): n is a, c, g, or t
agcggcgcaggctttcgaggctctcgtcccgccgtgcgggatgggagcgtcgcccctccggtcttcctcgtacctccgctggattcgcggagctgattctggggtcacgagactgccttacacaagtgcacgagactcgggcagggtgcttgatggtactacaggacgccgaggtccgaggatcgtgggcccatcccatgaccgctgatacgtacgacggtcggggaccactgcttgacttgatggtactgacgggatgcatatgctgtcgcgactgaccatggatgagctgcggcgaggcccctggagcgaccctcgcgactggggatggatgaaggagcttcggacttccagcgaggacagagggccggctgcctgcttgctgcatggactgcggggttcatgtccaaggtcgctgacgggcggtcgcgttccgatagtagattcatagtgctccagggatggtagccgggtatcagaacctatgttctgacccgacggagtgcagaccctccggtctacgaggggtgtccgtggtcttgctaatctgagaacttgagagtggtttcagtaaataagcgtctaatgaacgtgccgcttgatggagcagccgttgtacagagttccacgctcgtccaattgcatggctctaatcacgtgtcccagcattctgggattgaaaatgcggggagggaccaggaagcagtcagggcggcaactcgaggttgccgtggtcgtgaacaagctggccttgaaccatctggcatggggctccttatgcacaagaggaccccccttgatcaacccaactagggggcatggccttcagcgggaattgcacaatggagacagcgggggaagaaagcttggtggtaccacatggttgaccgccatgtgttcaaatgccttgttagcgttctattggcagaaaatgaaccagggtgagttcttgaagcttctcatagggcccctagtaagagaaggatacaggcggccccttaaagttgccccccn

SEQ ID NO: 719558 - DNA, 718 bp, Homo sapiens
  misc_feature (36)..(36): n is a, c, g, or t
  misc_feature (84)..(84): n is a, c, g, or t
  misc_feature (130)..(130): n is a, c, g, or t
  misc_feature (351)..(351): n is a, c, g, or t
  misc_feature (391)..(391): n is a, c, g, or t
  misc_feature (457)..(457): n is a, c, g, or t
  misc_feature (504)..(504): n is a, c, g, or t
  misc_feature (524)..(524): n is a, c, g, or t
  misc_feature (542)..(542): n is a, c, g, or t
  misc_feature (557)..(557): n is a, c, g, or t
  misc_feature (565)..(565): n is a, c, g, or t
  misc_feature (569)..(569): n is a, c, g, or t
aatcagtgagcatgaagataggtcacaggaagtatncaacccaaagaacagagaaaaacaaagtcaaaaaggagaggctacaangacagacagataaaacatttaaagaaacaattacaacttcccaaantctaaggtaagcactaatctacagatccatgaaacccaagaagccaccaaatacaataaatacagagaactacacctagacaaactgtagtcaaagtactggcagataaagacaaagaggaaaagttgaaaagagaaagaaaaaaaaacccacaaggaagtaacgatatgattgactttgcatcagaaaaaaaaattttgacagaaggcagtggaatgacntactcacagcgttaaatgaaagagaaaattatcaagtgtncaatgaaagagcaaagtatcattaaaagtaatgggaataaccgcaattacttttgcaccaacctantatattcttacataactatccttcaaaaaggaaggcaggtgaggatnctgggaagatactgaaagangaagcaacagaaatcagntccccacctagacantaattgcncggncagaatcaatttgatgtgaggaagcttgtcctccaagtactgaggttctgcactctgatcactgattgctgctttttgtcatagaagagcagacagaagtgatcacctttgcactttggcccaatgttgcagtccctcctccttggctg

SEQ ID NO: 719559 - DNA, 307 bp, Homo sapiens
tgaagagaggtcagttgtgttacaaggtggcctttgcatgagtttggagagtacccctcgaagtgctccccgagcatgcttatccgcgatgcacggcctgaagacgcgttatgcatgggcgtgctgggcatgcaggtttttctcgatacctacgccacagaaggcattcgcgactcaatcgctgccgaggcgctgcaagcgtttgcgccccagacgatttccgcgctgatcgcccagccgggcacggcgattatcgtcgctgaatcaaatgggcatctggtggggtttgcccaggtggcgatggaca

SEQ ID NO: 719560 - DNA, 800 bp, Homo sapiens
tcatggaggtgcacggaaatgggaagaggcccagtccagagaggtgagcagatgagctttgctgtccttgccttcctggaaccgcactggtcctcccctttgcttataaaagagagagaatttgattgctgtggttgtaatgtctcaaactttttttgagacaaggcctggctctgtcgcccagactggagcgcagtggtgcaatctttgctccctgcagcctccatctcctgggctcaagcgatcctctcacctcagcctcctgagtatctgggattacaggcacgtgccaccatgaccagctaatgttgtcgtcgtcgttgtggtcgagtggttttggagagatgaggttcttaccgtgttgcccaggctggtctcaaacttgtgagctcaagagatctgccgctcaactcccaaagtgctgggattatatggatgtgagccacatggccagccaatgtctcagactttctgtggttattttggttgattccaatacctagctgataatacatctaaaatctatgggagtagcttccagacatgagtattgtcgggactctttcagatgctgacaaccggtaagaaaactctatctagaagaatttatgggtcgactggtccagaagctcagagtacagttctgctttttctgatgctgttgtgaaagattggggcaaaagaaagaaggaatgaaaaaaaaaagaaataaattcggcaaggctttatataaaggattttgggctggaaatggaaaaatgcgcaaatttaaatttgggaggaactttgggaaacaaaga

SEQ ID NO: 719561 - DNA, 453 bp, Homo sapiens
  misc_feature (409)..(409): n is a, c, g, or t
aggtttgactttgcacagctgccattactgctgctactcagattcttctctcaacagttcttatctatttatttatttatttgagacaaggtctcactctgtcatccaggccggagtacagtggcgagatcttggctcactgcagactcgacttcccgaactcaggtgatactcccacctcagcctctgagtagctgggactacaagcatgcaccacaacacctgtctaattttttgtattttcagtagagaccagtttttgtcatgttgcctaggcttgtcttgaactcctaggctcaggtgatccatctgcctcagcttcccaaagtgctgggattacaggcataagccactgtacctgcctggaacttaccttttttttttttttaaaaaaaaaaattgtttacantacattaattttgtggggtaatgtatttcaaagcaaaaatttta

SEQ ID NO: 719562 - DNA, 1651 bp, Homo sapiens
gggagaatgctcccagcgaggggctgaagaacgccactagctctgcgaacgctggaaggctactcgctcagctgcttcatccacaacacccttttctactcctgcttgctcctcagccgccactggggcgcgagcgcggctcaacggcgctgacgcaagctaccgaccacgtcaacgctgccaaaccctgcccacgctccgctccggccccaatccccatcagcctggcgcacgcctggccctgaccgccccactctcaccctgcgcacgcgctcccccctgaaccacccctagcgacactgccaccacaaccccgaaggcccatctcctccagcacccaccctgcgcacgcacccgcccacacacgcgcccacgcgcacgcgccacctgcccaagcatccgagcctgccacgcacgcgcacccaccagcacctccctctctaccccttgcccacccaaacctccacgcaacttgggctcaaccgcccacccaacgccccacgcaggacacaatccccccccacgccggacgcaccgtctcttggtgtgttaatcattgtcatacggagaaagaagattcaaatcctattaggaatatggatggggaatgggggggcaacaacggaacaaaaaagaaaacaacttataaatgtccaaaagagccacgaccggaaaaccaacctctaaccgccaaccgcgctttcaaccccataagctcaaccccacacccgcacaaaacaacccactatcccttatccgcccccttgacaaaacgccactcactactcgcacttaacaacaaccccccccctatataaaaaacggcctcacgtcttacacaccggccgcacccttcatcccaacagccactcactaggaaaaccccccctcacttatcacatatcaccccttactatggcagacacttacatccccaaactaccccaaacaatctaccccttaggcacgcgcgcacaactaagcgcgcaacaacccctttcttctaacccaacttcacaacaaacacagcgccctggcccacccacaattcattcgggcgacacccacgaacccgtacggccattcgacaaccccctcgtaaggcagcgcaggcacaaacagcgcaccactttccacccacattatgggcggggcgaccccgccgcgccgcctcaacagacgggcctctcccccatcagtgcataggcaaaccccccacggccagcacacccacacacacctctccccacccacacacacctctcctacccgcgccaccgcacgcgcactccccaacccaccgcgcgacggacccccccatatcggcgcacaacgcgctcgaaaccgaaacccaaacaagcactacaccacacgcaccccacacgcatcacgcgcctcgcgcacacacgcgcacacaacccccaaacccactagctaccaccacacccccgctctagcggccaacaccacacgcggcaccacaacacaccacacacaccgtcatcacccacaccgcacaggcaccccatacccccccccccctcgggcaccacaccgcgccccccaacaccagccaggggcacaccacacacacacaacaccacaaagcacccttcaacatccacacccccctcgggcgccctcaccgcgg

SEQ ID NO: 719563 - DNA, 277 bp, Homo sapiens
gagacgagatgggaaaggcagcgcgcgggcttcgctggtcagtagttctctgatgtgaaaggggcggcacagtcatataaacttgatccaacctctttgcatcttacaaagttaaacagctaaaagaagtaataataatgaaggcgatgcttgtggaatgtgcagtgcgtatagggggcgcacgcctcattacgatacgcctgcttgcttctcctgtgcaatcgtgtctttggaaggcagtggatttttctcttgcgtctcgtctcttctcttgtgt

SEQ ID NO: 719564 - DNA, 280 bp, Homo sapiens
tgtactgggccacatatagcccatgttgaactcgtccgagttacctagagaaacattgatccgctccatattcggactgtccagccgtaggtgcagggtcccagtgcagcaataggtgtaagacagaagtctgaaagggactagcacgttctcaatgcttcttatctaagaatttccgacgggacccgtgcagaggtttcgcaaacttggtcattcctgtttccatcttcttcttctcctccttatcctcaggcagctccagaccctcctcggtaactga

SEQ ID NO: 719565 - DNA, 130 bp, Homo sapiens
aatcataccttcatcaaaaccttcatcaaaccctgatctcaaccctggtcatcaacccgtcatcaaaccctcatcaaaccctgctccacaaatccatttaatatattgtcctcggatagggtttcgatga

SEQ ID NO: 719566 - DNA, 218 bp, Homo sapiens
cccttgcacacccgataaatccgaaataccgggacttcatccttggtctacagcctatgtcaagtgaaatcgatgggggttcacaatacccgggcctcgctcctctcatcgtgagaacacgccctataactaaagtgcctcctaccaccagttccctggggatagactccccccagtaggtacccctgctcttccctaaactgacattacacgataca

SEQ ID NO: 719567 - DNA, 832 bp, Homo sapiens
agcgggtttcgcttcgaagattgtttcagaagcgttgggcggcgggcgtccctgagagaaattagaatctggaaactgttcttcaggacacgaaacccattagtttggaacctggacgaacttcctttgcatcacgactcctacaaactgacacagaacccaccttttacgcgtggtgacgtgtgaccacaggcacgctggcactcaccacgctgggagctgctacgactgacaacttaaggaccagaagcccgagcaatggctcaagaaggtacttgtcactacggcacatcagctccaagacaactacaggacgaactgaacctgacacagactacaactggctgtagttctctcacgacgagctggcttcagcaggttgacttgcagcgcattccaggctatatactctgagcatccatctgcgcgtgaaataaaactgctttcccttcaggtttccaacacacacgctcattcagggttatcctagtgctgcgttcgtcaacaccacacacttctccacgaacgggcacaaacctggcttactccagagcgacacggatcgtgctcagacttttctagctccaataccattgcactcactgacactacacttctcactctcgctcagtctcacgcagttcctctctaagcagcaactatgttccacactcgctcacacacagtccataacaactggacagggaaccttacgagcactcacgtacacattctttcagccagatgtccccagaacagcattgcacaacaggctgacacgccggacacgcactctcagtgttagacactcttaacatcccaaaggactgtg

SEQ ID NO: 719568 - DNA, 1681 bp, Homo sapiens
gcgcgcgcgctaattaatgagaacgccgtttggaggtgtggagcagaacagcaaacgccggttgtttgggcacgaccagtagtagtggctagcgcggtgggtggaggtggctccgaaccgacagggtgttggtgcgaccgaagaaaagcaccggagggcttttgtttgtagagcacgccccggcgcgccctagttactcttttactgaccgcgcgtgctctgttagaagggtttgtacgccgggaggggctcctgtgggggtggcgcggaaaatattgtccggcgcccctgcgggaagcgggtacacaaaggtgccgctttatgtggaaatgatgtgagggtttagacaacgacacgctggctgccgtcgtgtggacgtccggcctgttggaacacgagggggggcgccatgcgttgtggtgcgtacgcgacgcccgtgtggtcgctgctgtgtaagggtgggactctcttgtcgccgggggctgctgttataggcccaccagattgtgggagatgtgtgtggccagaacgatgtgtgcgcgcagcaagcgtgcgccgcgtagttggacgcggcgcgtgccgcgttgtctgagatggaagtggtaatggggggcgcctgtgagcgtgttggacgccctggtgactgcacacgagcgttggtgacgccgcgatgttaagtgcgccccccacgaatgtggaattggtggcccgcccggcagatgggtgtgaacgtcaccccgggagggtgtagtacgccgctcacagcattgtgtgcgccgcggagggggcgccccgacgccgcgacacacagaacacgccacacaggtaggtgcgccccccagaaagaggggccgcccttttctgggaattgacacccggggggagttagtattccccccttaatgtggtggaggtggcgcccctgccccagggaaaagttttgttgttgttttttttcccccaaagggaaattttttgtctctgggaacccccttttgtgggacccccaaattccccagagcccctttgggccccccgtgtacccccccccccacatttaagaggagaggccacacatgggcccccccccaaacaaagagctcattcttgcacctcgccctttataagtctcccccgttagaaagggtctccccacatctctgtgtaacacacacagttctcggtgagttacattcgcccactccagaggaggttatccaagtctcacactggtgtagactctctcacccaataagagtctgtaatgtagagaaacacgccacccggaacaccccacaagtaaaattccaagaccacggtgcgttatttcacacaatgtgtttacctggggtcttcttaatgttgtacaccgtctcgtaccaagccctctagaaggtaccttctgagatcttctccgttccacaccatttctcgacggcaatttacggcgtcaaacacgtttgtttgtagccaccacgggcttccaccggacttctacacggtcacattaattggctcaaactttccgtcacactagtttgcgttcaatcccccacactaaataatttcacctttaacatcccaacatccctttggctttgaagcccccgcctgatactggccttttgtaaaatgtggtttgactatttctgtaagtctccatctattgatgagggtctta

SEQ ID NO: 719569 - DNA, 434 bp, Homo sapiens
  misc_feature (21)..(21): n is a, c, g, or t
tagaggatccccgccgtacangttgcggatgctttctggtaaaatagctgaaagaaaagaattttttttagagacggggcgcagtggctcatgcctgtaatcccaacactttgggaggcggcggcaggcggatcaactgaaggtccagagtttgagaccagcctggccaacatggcgaaaccccctctctactaaaaatacaaaaattatgtgggtgtggcattgcgcacttgtagtcccagctactcaggaggctgaggcaggagaatcgcttgagcccgggaggcagaggttgcagtgagccaagatcgtgccaccacactccagcctgggcggcagagcgagactccatctcaaaaaagaaaaagaatatatattttttaaaagctagaagtgatcgcaactggtacggcgggcgcaactggtacggcggg

SEQ ID NO: 719570 - DNA, 727 bp, Homo sapiens
  misc_feature (194)..(194): n is a, c, g, or t
  misc_feature (304)..(304): n is a, c, g, or t
  misc_feature (341)..(341): n is a, c, g, or t
gcctcccaaagtgctgggattacagctgtgagccactgtgcctagccctagctcagttttaaaaattacatttagtaggtcttattctccattatcagagaaatgcagattcattctagaacctttggaaaagatagacaaacacaaaagaaaaatatctcccattgactaccctccagggagcactggacccnaactaggatctggttgcttttctgtgaagatgtcctatttcatctttaaggattatgatcttttaagtaatggaagttgtgcttcatattttaagaacttttaaaatganctttatttcatatttaatttatatacaataaaaggcnctcattttaagtacacagtttgatgcattttgacacatgtgtagacatgtgtaaccaccaccctaattgagacacagaacaccttccatcgcaggagagagggttccctcacttccctctgcagtctgcagccccccaccctccccagcatgcacactccctgccccaggctaccccaacctactttgagtcatccaggatttttccttggttttagaatttcataaacatggaatgaaacagtagactgtgttttgcattcgacttcttttgtgtgatgttctcaaggttcacccatgttgttgctagtgtcagtagtttttccttttctgttgctgagcagcattccagtctgggctggtgacaaagtgacaccctgtctccaa

SEQ ID NO: 719571 - DNA, 407 bp, Homo sapiens
agtgcaatggtgcgaacttgatttactgcaatctgccggttcccgggtacaagcgatactcctgcctcatcctctcgtgaggtagcgtgtacgtacctgcgagatacagtgatcatacccggtcatactgtttcatatttgaataaagacggggtttcaccgttgttgcccaggctgatcttgaactcctgagctcaggacaatccacctgccttggcctccgaaagtgctaggattacaggtgtgagccaccacgcccggccagttgtattcagttcacttcatgtctctttgtatatgaatttcagttcttgactttactggtcttgtgtctcctccgtaattaaatcagcataaccatttggtgaatataaaacttcatgtggttgtgtgtagtggctcatgcc

SEQ ID NO: 719572 - DNA, 501 bp, Homo sapiens
gaccgcgtgtactctgtcacgtcagtcactcagtctaattcagaacgcttgctggagagctagtgtggtcatatggagaaaagaagatactctagctttttgagttgtaggaattcttgcactggttctttctcatccttgtgggctgatgttccttcgatttttaaagttgctgtcctttgaatgagttttttttttttcattaatgctattggatgaccttggaggatatgtctggggatcctgtaagtactgagatgactgacgtgacagaaatagaattcagactatagataggaatgaagattattgagatataggagtatgttgaaacctaatccaagaaagctaagaatcacaataaaataatacaggggctgacagacaaaatagccagtatggaaacgactgtaactgacctgatatagctgaaaaacacactatacagactttggtaatgcaatcacaagtattaatcgcagcatagaaacctgaggaaag

SEQ ID NO: 719573 - DNA, 758 bp, Homo sapiens
  misc_feature (742)..(742): n is a, c, g, or t
acagccctacctggcaatgcagatgtgtccccaaaaggcactgggggcagctggagtgctgtgcctaggcgggctcacccgggcagcggttcgctctgattgcagcggtttcccaccagctccttggagagctggcagatgacccagccccacagcaggagccgggaatggcagaacgagatacaacaatttgatatccacttgccagatgagccgggtgtcctcagtcgcctggctctgtgcccaacctctttttacataaacacttatgaattgagccaggaggaaaagcactctgattatgaattgagcagaaggaaacaaagttctgcagataaacaccaatgaaacaaaaaaccacgaataagaaaaatgacagaaaaggagaaccttcccagaagcctcctgccagtgaacggtcaccagagcaagagcatggaggccctgggttttgaactgtgagataaggaagatgatgaaaacctccctagcagccaggcaagcacaagattcctgtgaaatccaggtctaagtgttttgacaacagaagtaatattatgtcataggtgagagctgtgagttgctgaacccaaagtgagttcaaatccgagctctgcctcctgctacctgtgtgactttgagaagttccagcactgctttgtgcctcagttttgtcatctgttaaatgggcgtaatcacagctcctgcctcagagttgttgtaaattaatacatgtaaagcnctgaaatcaaaaaaaa

SEQ ID NO: 719574 - DNA, 199 bp, Homo sapiens
actagtccaaggtgggctggtcctatgaaaaaagtactaatacctgtgtgagtgttttgggtaaagacagagttatcaccttttctggccttaagaatatatatatttcgggctaagcacagtggctcatgcctgtaatcccagcacttggggaggccgaggcaggcggatcacaggcatgagccaaccgtggactagt

SEQ ID NO: 719575 - DNA, 299 bp, Homo sapiens
gcactttgggaggctgaggtgggcggaccatgaggtcaggagttcaagaccatcctggccaacatagtgaaaccctgtctctactaaaatacacaaaattagcccagtgtggtggtgtgcgcctgtagtcccggctgctcaggagggtaaggcgggagatcgtgtgagccaggaggcagaggttgcagtagcaatatcgcacattgcactcagccaggcgacagtccgagactcatctaacaacaacaacaaaggtgatttactttctacctttcatctgtcgacaggactattatagg

SEQ ID NO: 719576 - DNA, 320 bp, Homo sapiens
  misc_feature (291)..(291): n is a, c, g, or t
atccccggttctgggtagattggcaggacaatgtgggagcagatggcctgcctttgcgtgagagggctacctgcacatgccctcccccaacaagatctcttggactcagggcttaaaagcctggctggttgtgagtgtgtgtccctgtgtgtgtgttgcgggaggggaggactggggctggaagtccagcaccccaaggcaagatcttgtccctcctgttccttgggaaagcgtttggccttgacgggtttcttcgggcttctacccctcaccctttctggccagtgatcnccgcaggggcaacaagcccccattctgct

SEQ ID NO: 719577 - DNA, 119 bp, Homo sapiens
  misc_feature (84)..(84): n is a, c, g, or t
gtagggttagctggtcagtagtacttttgggggcactgcttgcctatggccagggctatgctgcaggtagtctacgtaaggctngttctctactagtacgtatactgtctagtctacgt

SEQ ID NO: 719578 - DNA, 105 bp, Homo sapiens
cccagtactttaggaggccaaggcaggtggatcatttgaggtcaggaattaggacaccagcctagccaacgtggtgaaagctcgtctccacaaaaaaatacaaaa

SEQ ID NO: 719579 - DNA, 249 bp, Homo sapiens
ggacagtgaaattttggtggggcagctgctttcctttgacattggtgaccagccagtctttgagatacccctcagcaaagtgtcccagtgcaccacaggcaggagttgaggtgacattggatttccaccaaaaggttgacgcagagtgtttttctaatggaggtgcgtttttacgtcccacccacccagagaggatgtgtgtggacccctcttagaggcctctcccccagaatgtgtttgtaaaagcgc

SEQ ID NO: 719580 - DNA, 161 bp, Homo sapiens
caggatctttccagtgtcagtgcctctctggctaccatctgtccagggaccggagccactgcgaggacattgatgagtgtaactaccctgcgagctgtatcgggggtgatggcatcaatacaatcggtcctcagatttttttgccccaggaaataggctac

SEQ ID NO: 719581 - DNA, 401 bp, Homo sapiens
aaggtgccgtctgatgcggcagaggctgacaggaccaacctccaagaggacaaaaaggcagagatcgagcaggcccgagtcggcatctgaagtgagggagagagttcagacagtcgcagcgtcaacgatgagggtagcagtgaccccaggggcatcgaccaggacaatggcagcacgtccccgaggatccgcagcccgcaggacaatgagagtgactcggactcgtgagcccacagcgagatgctgcaggcccagccccgcagttgcaggctccgagtgggtcaccccagcgtcgcctcctcagctcgtccagggacgcctcaggtgcccacgcgcagggccacggggtgtgccactgcagttctcccacaggggtcccccagcgcgtcccaggcccctgg

SEQ ID NO: 719582 - DNA, 447 bp, Homo sapiens
  misc_feature (50)..(50): n is a, c, g, or t
  misc_feature (80)..(80): n is a, c, g, or t
  misc_feature (92)..(92): n is a, c, g, or t
  misc_feature (153)..(153): n is a, c, g, or t
  misc_feature (232)..(232): n is a, c, g, or t
  misc_feature (234)..(234): n is a, c, g, or t
  misc_feature (248)..(248): n is a, c, g, or t
aacctggaaccaaatccattcccattcagcaaatgttgatcaaagtggcntgtaggggatacagagatgattgcatacanagatgaaaaagnaaacgtttctgccagggccaggcgcggtgactcacacctacaattccagcactttgggagncaaggcaggtagaattgcttgagtttgagttcgagaccagcctgggcaacatagttgaccttatctctacttaaataanantaatcagccaggcnatggtggcatgtgactgtagttccagctactttgggaagctgaggtgccattgcactccagcctggtcagcaagagcaaaaaaaaaaaaaaaaaaaaatgtgcacatcaaagatcatagccccggcacatcgaagctgcaatgagctatgattgcatcactgcactccagcctgggtgacagaatgagaccccgttgca

SEQ ID NO: 719583 - DNA, 261 bp, Homo sapiens
gcatatccgatcggttgtattctctgctgcagagacgccgaaggccggtatggcagccattgtgggcccagacggaaattgactagtggtcttaggaagccccatttctaaccagatggcacgtgacaaacacgcgtgctgtattatgccccccaggcagagaaacaaactcaatgtaccggccccgcgaaaggaaatctcggcaacaagagaaagggccccaggagacacgccaagtcgacagcgctggtaatcagcccg

SEQ ID NO: 719584 - DNA, 1362 bp, Homo sapiens
ctggctgccgcatggtgcttattcttttttagtgcagctgggagagagcgggagtgtgctgccgcgcgagagtgggaggcgaagggggcaggccagtgaatgagtgcgcagtgagcctttgcagccacgtcgctgctgccttaccctgtacttgatgttgcttacgcgagtgtagatgcgtggctgctgcggcagcgtgcggggattacttatgctgctagtttcggttcgctggacagcgtgcgtggtgctagtctctggctgtgcagcgtgcgtgagacactagcactatgtcggaggagcagttcggctgcgggacggggccgcgcgtgcatgcggcaacgtgccggcggtaggcggcatcggccgggcgatgcaggagggagccatggtggcggccgacacaagggggcagccggtgtgcggcgggaacagcggagcccgggaccgagggtgcggcaaccgcgctctggcaggcaccgacaggtcgggcaggcgccgagatcggagcgtggcgcgacagcttgacggccagctaacgaaccgacggaggactgcaaggccattcaaatctcctcccctacgaacacctcttgcaggccatgccgacccggcaccacgccgggcaaccacacttggcaccacccttgtctacatcaggacgcgccttacgcttgcgcgcccagctatcagagccgtaaacgcactcgtcgcaccgtgacctacctttctcccaagcactttctgcgctgcagacgctcggctagccacccttgtcccgccgtccctcgcagccgcttaacggaatccgcttaagtccacgcacggtcggtccggatccacacggcgcagcacgcaggggccgctctagcgctgcacatacttctctacagcgctaacactctgcggagccacgtgttccgcacatccgcctcgcccacatcttgcacatccaaccacgcacaagaacacaccacttatccactttgccactattggcctcaaaccgcactctgaactatgtcacctcccttataacacagtgtgttccaccaacaatccccctgttctcaactccctccaaacactcgcacatcccccccgctctccaccacacacacacatttcctctcgttttcatacactcgatacccccctagtcatctttcccgcaacatatctaccgccccgtcttactcgctcggaatcaaccttatactccgtcgcaaaccacccctcatacgcgtcgatcacctctctcgccctcacgcctcgttcgccaaccctcatatcatcagcctctcccctctgtgctctccatacagtccacctaccaacacaaaaccctacttcattcactcc

SEQ ID NO: 719585 - DNA, 105 bp, Homo sapiens
gcatgtgatgtgatagcaagcaggggcgcagagtggagcaggagactcatgaggactgtacagcgtgtgacgggtcggccacgctcttcgatgcggagtgaacag

SEQ ID NO: 719586 - DNA, 456 bp, Homo sapiens
tctggtccgccccaaaagacgcctcggttcccccagcgtccctcccctggatactcgcctggacgtggctcgcccgcggtcgttcctgcaactgcacggtcgggagtccctctccccagcccagcccgcccggagtcttcgggggacacttcagaaagatcgggtgagtgtgattcccccgtggccatacccggagtccctcccccgccccacctccctccaggcgctgtggcgcagcccgcgactccgagccccggggctgctggacacccggaggggttgaggtccgggcacccagagaggcggaggtccgagcccccgggcggagagcgggcgggtccacaggtcgctgcgggtcgcagccccctcctgagcgagccttcgcggcccgcccccggcctccgctcgacccccccagcctgacgtcaaggggaagggggcggagagccgcggccg

SEQ ID NO: 719587 - DNA, 391 bp, Homo sapiens
tctaccagttctgcagcccttctatcaaatagtccatatccacctcatctactcctcagctcaatgcaacctggctaactccctaccattctatcaacgcttcccatcaccaaactcaatggtctcctccattctttgcttctgtgatctctctacagcagtggtccccaaccttttgtgcaccagggacaggttctgtggaagaccattcttccatggacccaggggggtggtttcagggttaaactgttccacctcagatcatcaggcattagagtctcataaggagtgttcacacgcacagttcgcaatagggtttgtactcctctgaaaatctaatgctgctcatctgtcaggaggtggagctcaggctgtaatgaaggagaaatct

SEQ ID NO: 719588 - DNA, 126 bp, Homo sapiens
gtctagattggactttttaattaaggatgtcttaattttggacttttaaaaagggttatgacaagggatttctggatttatagatcacaggggctttataaatgatcaagatacatgtacaaacaa

SEQ ID NO: 719589 - DNA, 297 bp, Homo sapiens
acacacgagataaagatatacatagtgtatccattctataaggtggcatatcgtatctcttgtagatgattgatagagataggattatatataatactgtacagagtttagaacataataggcactcaaaaaatattagccaggatcacgaggtcaggagatcgagaccatcctggctaacatggtgaaaccccatctctactaaaaaatacaaaaaatgagccagacatggtggtatgcgcccgtagtcctagctacttgggaggctgaggcaggagaatggcatgaacctgggag

SEQ ID NO: 719590 - DNA, 157 bp, Homo sapiens
tgagagaggagagaagtagcgaggcgtctttgattgtgtagtaagggtggaaggtgattttatcgcgaatgggaggttattcctaaggggttgtttgatcccgtttcgtggcagaataggaagttgagttctggtaaggcttgcataattaagggcc

SEQ ID NO: 719591 - DNA, 857 bp, Homo sapiens
  misc_feature (184)..(185): n is a, c, g, or t
  misc_feature (206)..(207): n is a, c, g, or t
  misc_feature (222)..(222): n is a, c, g, or t
  misc_feature (231)..(232): n is a, c, g, or t
  misc_feature (271)..(272): n is a, c, g, or t
  misc_feature (317)..(317): n is a, c, g, or t
  misc_feature (340)..(340): n is a, c, g, or t
  misc_feature (353)..(353): n is a, c, g, or t
  misc_feature (378)..(379): n is a, c, g, or t
  misc_feature (409)..(410): n is a, c, g, or t
  misc_feature (445)..(445): n is a, c, g, or t
  misc_feature (515)..(516): n is a, c, g, or t
  misc_feature (526)..(526): n is a, c, g, or t
  misc_feature (543)..(543): n is a, c, g, or t
  misc_feature (550)..(550): n is a, c, g, or t
  misc_feature (553)..(553): n is a, c, g, or t
  misc_feature (565)..(565): n is a, c, g, or t
  misc_feature (583)..(583): n is a, c, g, or t
  misc_feature (614)..(614): n is a, c, g, or t
  misc_feature (617)..(618): n is a, c, g, or t
  misc_feature (633)..(633): n is a, c, g, or t
  misc_feature (662)..(662): n is a, c, g, or t
  misc_feature (757)..(757): n is a, c, g, or t
  misc_feature (760)..(760): n is a, c, g, or t
  misc_feature (763)..(763): n is a, c, g, or t
  misc_feature (772)..(772): n is a, c, g, or t
  misc_feature (781)..(781): n is a, c, g, or t
tgtaagggcacatccgcgagctgccgcccagcgcgcagacagagcccaggtgagcaagagaacgggcgggcggtggggctcacggcctagggaggcgcggaggcatctggcagaggcgggtcgggctgggccagctggggtagagcggaggagctgggtgcctggctgaagctggggctggtgnngctgcgtgagcgctgctgggnngcaccgacaccaccntcaccggcnngcctgggtgctgagtgtgccgcggtgtgggtgcgcgganncagtcagggcgcagtgtgggcagcgcgcacgtgctgccagcccgnggcgccagaatcctgcgctgcgnggcctgagagtgngctgccgctgccctgccgcagcctnngagctttcctgcgaacctctgtggcgcccnntgacggctggcggctgacgtgctaccgtgctcaanggagtggcgtgctggagaagcgcagcggcgggctgcttgcagctgtggaagcggaagcgctgcgtcctcnnccgaacgcgnggctgcagctcttcganggccaanggngcacggggcggncggcccaaggagctcagnttcgcccgcatcaaggccgtggagtgcgttngannagcaccgggcgccanatctacttcacgctggtgaccgaaggggngcggcgagatcgactttccgcttggcccctgggaaggatcccggcttggaaacgcccagaatcagcctagggcctggtcaagttcaaagaaccanganggncatccaganagtgcgggnccggcagagcctcgggaccgggacctcgtggtcctagaacaccgggcgcacatctatccttcattgtaccaacaac

SEQ ID NO: 719592 - DNA, 109 bp, Homo sapiens
agtaggtatgagcggccggggacttgggggcgaggtggacccccggcttcaggcctctcgttagcacatctttccccaggtcgtgtcatcgctccacagtgacatgcgc

SEQ ID NO: 719593 - DNA, 285 bp, Homo sapiens
gacaaagctggacaaagcagatgtgatgaactggatgtgcaagcgcaagatataggacttcttcagcatcagattggatcacaacatgttcctaacccatgaggtagactgatggatcaataacatcaggatacagccatgtgctccaccctagccccaacacgctgccccttggcttactggctgctgagtggcacccccgccccgcagggttgtctacaaccggagctctgggctcgtgtccaacgcccctggtgtccagatccgcgtccccaccttgtccag

SEQ ID NO: 719594 - DNA, 460 bp, Homo sapiens
acatccttccggtcaggacatagaaagccacctcaatcttgccattttgcaattttcacaatggatgggctggcattccatgaattgaaacacttaattcttctcctttgaagccatgtgaatagtttctaatggttttctgtgatcaataattttgcaataaagggctaattcacataactgggcttccttttcattttttttgtagtatcagtctcccaaaatgaaattataaggtcaacaggaataaaaaatatttatgacttgatgacatccagtaaaaaattgttttccaaaagagatgtgctagtttcacagtaattgcttcggcactgagtattatcatcaacaaaaatcttttgagcatttgctttgtttttggaaacagggtctggctctgtaacccaggcgggagggcagtggcttcaacatagctcactgaagccttcatttcccaggc

SEQ ID NO: 719595 - DNA, 1827 bp, Homo sapiens
  misc_feature (411)..(411): n is a, c, g, or t
  misc_feature (449)..(449): n is a, c, g, or t
  misc_feature (1016)..(1016): n is a, c, g, or t
  misc_feature (1185)..(1185): n is a, c, g, or t
  misc_feature (1812)..(1812): n is a, c, g, or t
gcttggacgcctacaatctggttctgatcgggcacggtgtatgagctgcatggtagcctggagaaccgcgttcagctggctgtgttacgaggaccctacctgcagtcgccggagtgtgcctaggaaggtaccgcggaacgcggctggcggtggtcagtgcgctaacgaagtatgcttggcttatgtacgttatgacgatactagctgtagtagcttcgagtgtcgtgaagcaggagcgatcctggcaccctcgtggtatcaggtgcgtataactcgcccaattggaatcaggactggtgcgcttgtcccatgttcgtggtgtacgcgacttagggggtgcctctacacagtgcatgtccggcacttaatgcgcgccggttactacacctgcggggtactccagtacggggnctgtggaacacgctgctttgcatacatgctacttgtgntagaggtgtcgccaagtggggtgcaacgatgtcggtgggaacaggcgagcctccccgtagttgattggggtcagcgcaatccgaacccatcgcgggatctgggaaaggcctcttgagactatttcaccttttgtcgttatacatgggctaaagcaagtttccacttgggggacagggaatccgccatagggggttaattgccagtgtaacggcatttctaccccatgggagatgccaatgcgagggatttatagctccccatacccctttggttttgaacggccatgggtgcggtagcgccaccagggaagttacatactaaagtattggctccaatgcattgtcatttcttcgcccacctcgtaattcgttgggggaatacggtgggacgcagtggaattacacttcatgtatgccacccctacggaaatcccgaacccggggaccgtgtggggagaacacgcgtgttgcttagccttggatttttagcgaaggtaccctaatttggggttagaatcgatatggccccatccgcgggaggcgttgccacattttggttcccacatntggcgaattacgtgcggtgcaagaggcgaggttccatgccgttccgtatggatagggaacagcgggcataatatgccgagtggcgggaaggcgcctagatataaacccttggttgcggtaccttgggataaattttccccgcaaatattgtgtgctcaattgtcaaacnttggggtggaccccaaagcgaacccgtttcggaaaacgcggctataaatccaggggggcccctatttgcccacacgtaagcaatgagaggggagaaatgtaaacacaaggactcgggttatggtgggcacaacaaaagtggccagtggtgcacacatatgttgtgtgtgggctgtatccaccgacgtggtgacacaggggttgtcaaaggcaaggttgtcaacagagtggcgccgaacacgtgataagacgagatatgagggggccgccacagaggagggacacaccactgtcgtgtgtgaaggctatatgggtgagccccttgttgagcgacttgcacagacaggtggaaaggagtgatacaccagcaaaggcaagacatttagccggcgacttattgtgcatgagatcgtgaaaggggtggaccaaggagaggtacaccttaatgatcggtgcgaacatagagtgtgagaggcgggcccatgcatcatcacaaagaagaacgagagacgaagaagacgagattgaaggaagacggcaatcaactctaatgagaagccgaatcatcagatgcagaagaaaacggatgtgatcgttgatgattacacactttccatgtggagtgacncaaaggagtcatgcc

SEQ ID NO: 719596 - DNA, 140 bp, Homo sapiens
  misc_feature (1)..(1): n is a, c, g, or t
ngtttattgtcctaaaggcaggtcccggattttccaagtcaggcttataactaaagcttagggttttttttgttgtgtggtttttttgagatggagtctcactctgtcgcccaggctggagtgcagtggcacgatctcgg

SEQ ID NO: 719597 - DNA, 188 bp, Homo sapiens
tcgacgctctataaccagctgatcacccaggataaggtcgatctcctggtcgccgattccggatcggtgctgacggcgcccgcggtcgcgatcgcgcgcgatcacaagatgttcctgttcgaccagaccggcaccggcgcgagcttcttctccaaggacaatccttatatcgcgctgatggccgaccc

SEQ ID NO: 719598 - DNA, 696 bp, Homo sapiens
  misc_feature (1)..(1): n is a, c, g, or t
  misc_feature (172)..(172): n is a, c, g, or t
  misc_feature (323)..(323): n is a, c, g, or t
ntccccaaaaaaaatttcccaaaggccgggcacatggctcaatgcctgtaatccaaaatttctaaattacaaggtgtaagccgctacacctgccaaaatgttcttatttttgctttttcaacgccacatatacctgaagcatcctctttctaataagtcctcatgacctccntatggcatgcagaaaagcccaccctatggctaacctgcttggaagaagccagaaaagcgattctgcctgtaccttagggctgaagaggtgttgaaagaacccactcagcacccttgcttggccctgggggtggcctccaagcccctcagcncaggcctcagccctgccgcaccttgtctttcaggtcccgcccagctgcagaccctccaggctggaggaccagccgccctccttccctcttggatggaagtaaaaagccaagctttctccccaccctctgtgggccacacgtgcacttgcacccaccacacacacacacacacacacacacacacacagacacacagacacatacgcacacacgtgcacacatgtacacacggatacacacacacacacacacacacacacactgcatatctgagcacgcccctcgcactgggtctcaccttgcaccttcttcaggattttatatgtgaagagatttttatatagattttttccctttttttccaaaacacttt

SEQ ID NO: 719599 - DNA, 468 bp, Homo sapiens
cacgagggcacgtcagattggctgcgatttcctcattaccgggcccgcacacagcaaaattctcggcgaaaaaatgctcggcagcacagcggcccgcattgtccggcgcgcatcgcagcccgttctggcggtcaggcggcggcccgaaggtccttacaagactatcgtggcaggggtcgatttctccgaggcatcgagaaccgcgctcatgaggggccgtgcgttttttccatcggctcaactgactgctattcatacttacagtgtttcgcctaactgggccggaccaaacgcagacaagtcgatcgacgtcgtcgagaccgaggaacgggcccgcgttgtcagggaggccgagcaggacatggctgacctcgttgcaggcttaaatgacgcgccgggtcgtatccagaccgtcctcatggagggcgcgcctgaaacgacgctcgcggacttcgtcgacaagaagtg

SEQ ID NO: 719600 - DNA, 361 bp, Homo sapiens
ccatgaatacaatccagtcatatgttgcctacatgcatgcactatagcggtcctactgttctgtgagcagttctaagagctcatcacagattagatcgtcccgagtataggtagttcatcagcgctataagacagatatccatggctgccataccgtgcggtctgacgttatgtttgtctatatgcagctcattatgttcgtaggcatcatagagtcctgttccactcatcccaggtctagtcacagctgtgacaaatggctaaccatattagtgcgtcagtgctcaccagcgtcagtatgtagcagaaggaggcttacgttcacaccatggttcatcaagactagcccacaggcacacag

SEQ ID NO: 719601 - DNA, 507 bp, Homo sapiens
  misc_feature (9)..(9): n is a, c, g, or t
aataacctncttttacaatcactaatatctctgtccagcttatgatatcattaccctcagagttcaagaagactgagaaaataaaatcccttaagtagattacattcgcttcctattctgaattggttttacttgaattaatctaaattaataaaacatttacagtcaattataccaataataagattcaaccaatctgctctggtattttaatgtgataaacatcctaatttactaacttatgcaaatttggtgctatagtttttatcttttttaaagtttccaacttgctatcaaaatcatagttttccttattttttgaccaaaacaccatccagaaatttcaaacaggttctacttttttccattcaacttaagctaccatacttttttcttctgctattagtgttctgtttagttatgctcttgttataaaatcagttacaatatataatccaaaacatcatcctacaaaatacttttaactgttctacctatcctttttct

SEQ ID NO: 719602 - DNA, 87 bp, Homo sapiens
acatctgtgtacttctgtgccagcagtttatctttgggtttcggctatggctacaccttcggttcggggaccaggttaaccgttaca

SEQ ID NO: 719603 - DNA, 403 bp, Homo sapiens
tcatgtccgtcccaacgatggtctcagtgttacgacctgctggattagagcgcccgccatcacgcgcgggtaatttttgtacttcttaatattgactagtctggccaacatggtgaagccccatctctactaaaaatacaaagaattagctgaggtgtggtggatcatgcctctagtcccaggtactcaggatgccgaggacagagaatagcttatacccaggaggcgggggttgcagagattgtgccactgcacttcagtctgggtgacaaagtgatactccatctcagaaaaagataaatacaagcatttgaacagtattatgtgcgtgcttacaatgtcaattctaagtaacagtagtttaccaagtgtagagtaagtccttggagatggccatcgtagg

SEQ ID NO: 719604 - DNA, 166 bp, Homo sapiens
  misc_feature (14)..(14): n is a, c, g, or t
  misc_feature (42)..(42): n is a, c, g, or t
ggtgtgaactaagnttgctgctaaagtaatatatcctgtttntattcccaagtgtataatgttggtgtggagttttcatgacagaatatacacattttgtaaatctgtactttttttcaaatattgaatgccttatttttgaattctttagatttttaaattggag

SEQ ID NO: 719605 - DNA, 913 bp, Homo sapiens
  misc_feature (546)..(546): n is a, c, g, or t
tggaaatggattttgttgcccaggctggattgagtggcacagtctcggctcactgaaacctccacctctccgtgggtttcaagcagtttctcgttgccgcagccctcccaagttagcgtgggactacaggcattgcgccaccacgccaggctaattttggatattttatagataaagagtggggttacaccagtgtctcaaactccttgacctcaggcgactccacccaccttcagcgtctcccaaaggtgcgtgggattataggcgttgagccaccgaacctgtggcctattgaggtggctctttaaatttaggaacaaattctatgtggaaaggaaagtttgactgaagtttggcccacaggagattgttgaaccgtgggcgagtgcctttcagtgaaaggtttgcccacctttgggaacgccccaagtttatcacggggggtgttttgtgcggaagttgcgaaaaaggcttctcgtggcaagctgtgccgtgggtttgggccaagaacccctgtgcctctccccttcccgcggcggccaaccncctatatttcccctttccgtgttcctcccactttgcattctcaggggggtgagcgtgcgtgttccgtgaaaacactttaaacactgtggggaagaaaacaagatggggcagctcaccgcgtcggactccctaggggggggggggccatttaactcttcgttagaaaacttttctcagataaaatccccaagagatttataagagacccccccccaatttatattttcccacggtgtggggccaattgttgccggcgctcatagagccaagttaaccccgtgaaagtgcccctggcgtgtcgtagaaagaaaccctgcttccacagggaagggacaggtgggtgggccccctgggacaatttgggccc

SEQ ID NO: 719606 - DNA, 399 bp, Homo sapiens
  misc_feature (67)..(67): n is a, c, g, or t
  misc_feature (268)..(268): n is a, c, g, or t
aagaattctaaatgaagtacacatccaattcagtgagaaattttatgaactcagcagtaactacttnctttagtattgcctattctcaaaagtttttgagacctttaaagattgagaaccccaaagagctcttgtttatttgggtgatacctgtcaacatttgccctattcaaagttcaaacaaatttgcttaaaaataacaataaattaagcgtattgcattttaagatagcatatttttaggaaaaccgtttttcaaaattaaaangctgtagtgcagagagcagccttgctttccacttgtgcagctctgccatctggctctgtagatctgccatggcattcacctgcctcacggtcctgcctcatacagcatttggaagactcccggtgttctcg

SEQ ID NO: 719607 - DNA, 364 bp, Homo sapiens
ggatccggtcccatcacagttggaggaggagtgcgctgctcaggtgcgtgccgggccatagagctgttcagcatcggtgcctgaggagacaggtgacaagcctcgtggttctgggcagtgcatggagctctgcgggaatgactcggtgtacgcctaacgctcctccgtgtaccggaagccaggagtcgcggaggcgaagatccagtacgcgatcatcgggactgggaagctgcgagcttgctcagggggggtgtaaggaggtggtggaactcgaagagggtgggctcgggggcgtgctggtcattcgggtgggtaaaggccttgattgacctgctggggggaggattcttcacttgtggccctt

SEQ ID NO: 719608 - DNA, 1130 bp, Homo sapiens
  misc_feature (1130)..(1130): n is a, c, g, or t
agcggggcggtgtatggagcgcggtggcgcgcgagcgtcccgtgggacgccgtcgctgctgacggcggcgaccgcggctcggaggtcgtgcgggggtctcgtgaggcgggtcgtctcagtcatgctgtgctcagtagtgatggtccaagttgttactaagagtgcttgtctcgcgtgaaagtgccttgtgcatcaattggtggccagtccatgttgtgatggataagtgctgtaggaaaggagatgcatggatagagacagatttgaatcattgccttaacacaggttgagtcggggaataatagagtactggaatgtcaggacacttgcattgagagggatatacagcgaacaaagtgggatctattgacgaagacctaggaagcacgtaaaaacgaagcaagattcatggtgacagcgaacagagaacttgtgcagcaatcttgggcgcaatgtgcagattcagactgttaagacaaacccgggggactactttgcaaggataagtccaatgcgacctaacggtccgacacagaataccgaagtgaaatgaacttatagtgtggagcagaaccgcttaagtacggaaattgcccgcttaaaatggacctaaatgtgataagaacaacacagatgttggaagggcccggcgcaaaattgctgaggaagaagaaatacttgaatagagagaacttgattaccgtgaccaagaattggtcatgcgatgaaccagagaaacatcacaggggtaatcacgcgaatatgcaagtgatcatacacccaaggaaaacgatagagcaagaggctttcttataccttgtggaacatgggtggagatgtgatcaacccatgaattaatttgacctgattggttacagatagagaactggaggacatgtatgagagagaagacataggattacacttgatgaaaagcggagaacaagtgtcttcacatgacaagagcatagtcgcctagaggagatacgaactttagagagaagactcttcgcgagagaaggaacgacagcacaacatgagcaggtcgctcaaaggagatcaaccaccaaaactatggggtgattgatagcggctctagtggacgtaccccacgatagtagtaaggcctn

SEQ ID NO: 719609 - DNA, 240 bp, Homo sapiens
tgcaagtgactcacgtggaggataaacatttgtgcgcttctaaccccccgcttaacaccacagaaagcccctaggaccccaggagggggagccttaggagagacctagcgcagccctccagggacaggacggacttaaccacggagaacacgtgcttccaattcggaacttcaaacctggaagtttttcacatagaggataactcaggctgatcgcaacatatagggtgtgtaggggggc

SEQ ID NO: 719610 - DNA, 324 bp, Homo sapiens
  misc_feature (228)..(228): n is a, c, g, or t
actaagaccctcgatcgagttctctatcatatgtctgtatggattgatagggaagctttgttggaatacagagccagaagaatcatgaataaagaccactaaaagtcgatgaccaggagcagtgatgagctgaggacatgaagaagccatgataggatgtagatgaactcaataacaggtgagcgagctgtccagctgtacaaagaaagccaggctgagctgagggtnacaggaagaggaatctctagaggattgtcacagctgaatatatccataagcagagcatgagaaactgatgcattgacaaacgtgtccagggctaag

SEQ ID NO: 719611 - DNA, 192 bp, Homo sapiens
caggaccttgtctagccccgccagtgcctggaatacatggcatgtgccactacgcccggctggttttgtatctttggtggagatggggttctcatgctggtcaggctggttcaaatctcccgacctcaggtggtccgtccgcccagtcctcccaacagttgctgcgattacaggcattagcaagtgcagcca

SEQ ID NO: 719612 - DNA, 335 bp, Homo sapiens
tgctcaccagcccatgtgggttctgactgctcttggaaagttgttctctacttttgtagtcattatttccttggcctcatacattctttagcctcatgttcacgatttagtcttcagtgacttgagaggaccccatttcagatttctggaacgttttctctatatagattccctctcactgatactctctgctcaggcaaattccatctcaaaatccttgaactttggctgggtgcagtgtcacgcctgtaatcctaacactttgggaggcagagacagtaggattccctgagtgcaggagttggagaccagcctggccaacatggtgaaacccc

SEQ ID NO: 719613 - DNA, 330 bp, Homo sapiens
  misc_feature (32)..(32): n is a, c, g, or t
aatcagaaaccctaggcttggggtcctttaantattagattttttaaagctccctcagtaattccaatggccagtccagtttgagaaccccccatttaaatttccagtttggggggatttgaaaatttaagcccttccccattcgaagcccgctaaaaatgtagaatgattttgagccccttgtgggggataataaaagaattaatgtggcttcaatgcttggagcctttttgttcaagtggccccggtttggtgaaacagggctcccctgtcatttgcccgtcccggcatattttggagttttgccggaaataatattcccctaattga

SEQ ID NO: 719614 - DNA, 842 bp, Homo sapiens
  misc_feature (281)..(281): n is a, c, g, or t
  misc_feature (304)..(304): n is a, c, g, or t
  misc_feature (307)..(307): n is a, c, g, or t
  misc_feature (325)..(325): n is a, c, g, or t
  misc_feature (339)..(339): n is a, c, g, or t
  misc_feature (345)..(345): n is a, c, g, or t
  misc_feature (385)..(385): n is a, c, g, or t
  misc_feature (433)..(433): n is a, c, g, or t
  misc_feature (487)..(487): n is a, c, g, or t
  misc_feature (506)..(506): n is a, c, g, or t
gctgaacaacagtgagatgttattggaggtgtggatgagggagtttgttgttgcagtccttctttgcaccttattttaaagaataaatgaaacatttttctggttacttttttaaaaatttaaaatggaagggaagaataggggcagggcattattaggctatttctgatgcttcagtgttataaattcaacatagaggctgacaacctaaattcatggtgtaacacagctcttttccttttcctttttttttttttttgggtatctgtcaatgaaaatanggtatgacccagtttttacctantcngactagaagttattccanttcagggtctgaantagganttttaccttaaaaaacaacaacaaacaaaactatcacacnggatagataagaagatgggttaaccagtttggtgtagatctttggggngctgaactatgacttgagccttatagatggtaaaatagggatagtgggaactantgtccagaataaatttttnaaactttattggcggttaaattctggtgaagttccagttatctaaattaattttcccaatttctgacattctcacggtttcagattggcagggtacattatgtaatagtagggttcggaaaaaactctggtctaattttaactagtagtatttggattggtaccgcataaattgtgttacactggacttcatttaacattcgctggtgtctgattaataatgtgagtcctgatttaagattgtgtgcgcaagtgtggcgtttaaaacttttgcaaggttgttggcgagataggtttttttggaaaaaagtatataactttggggtgcccgaaatgg

SEQ ID NO: 719615 - DNA, 359 bp, Homo sapiens
agaagaggagtgggtcttgctatctcacgggtggcagagatggaagaaaatccatctataagtggacccataaacttcaaacctgtgatgctcaagggtcaactctgtaataaaaaatgtgcgtgtatgcgcatgttctcactcataggtgggaactgaacaatgagaacacatggacacagggtggggaacatcacacaccggggcctgccggggttcagggaagcggggagggatagcattaggagatatacctaacgcaaatggcaagttaacgggtgcagcacaccaacatgtatacatatgtaacaagcctgcacgttgtcaccatgttactctattaacttaaagtaaaatta

SEQ ID NO: 719616 - DNA, 485 bp, Homo sapiens
gagagggctctcctcccagccggcccctgcagcctcgtggagggcaggtacaggtgccacctcggatgggagcctgggtccctgctgccgctcgtgcccctgggtggctgggaggagtaggccctctccgggggctgaccatgtggcgtcagccgtgggaagccccactcctccatccctggagtctgcctgagtccctcgagccggagcgcttccgcttggactgtgcccttgccgtatatactccctcttcatgaattcttggttgtgtgacggacggcgcccccgatgttacgtgtgatctttccccaggaagaagcacaataaacatgcagtgataccgaggcacaaaaccccaacatacacgaagagcacgggctcgctgcggggtaccacgatctattcccctcgggggggcaataacattcagccgggtaccccccgcctctttggctcccaaaggtggcccctaataaggtagaaca

SEQ ID NO: 719617 - DNA, 246 bp, Homo sapiens
caactcttcatacgtgatatacaaaagatgcgggaaagaagaggaccctctatggctaacggagatgaaacagttagctctatgacacacttgatcgaatatgacagacactgaaaatcacgttttcatccccctccaacacctctacctgttgcccgccgatcacaacctggaatgcagtctgaaagattccctaggggcctaggatccaactgcccactgtaggactctgtaggcctctgtatt

SEQ ID NO: 719618 - DNA, 88 bp, Homo sapiens
  misc_feature (12)..(12): n is a, c, g, or t
cggcacgagccngatccatatgaaaagcgtcattccatccgatggtcccagtgttgcttgtgtgaagaaagcctcctaccttgattgc

SEQ ID NO: 719619 - DNA, 763 bp, Homo sapiens
ggggctggtaccggccggagatgttaaggatggacggtcaggtgagacctccatgggcgcagggaaggacgtgaggagtgggaagcgggctggggaggacccccacagcttctagcttccctggacaggtacgtcttctaccaaggccctgccccggagctaagccagcactgacatgcgtggtgcctccaggaccgctgcgggtggtaaccaggtggaagaccaccagcaccccagggatgaggaatcccgttcgtatcgccccagccagtgataattaaagctgctcctccgcataagaagaagaacaagaaacaaaaaagggattaaggaaacaagggggttcagcgaaagaaaggaggcggggcgcataacgagtgatacgcacaaccggccagggagtggcccgcccatgtactggccgcgggaccacgcccgcccgtgggtcatggtgtccggacgacgtgagcacacccaccaatattacgcttgcggccggaacattgatagagccctcgggtccactgtcgcgatgggtacacgcgtggctgtgataaatttcacccaggagctacgttcgtatgctccctgcttggagacatacacctctccggctaccactcatagcaagagaaaactattgtcgtagcgagcaggcgagcctaccccacaatcatttatgctatagtaagagggtcgtgcagctcaccaacaacgtgtgcgtagggagacagctaaactctcttctcttcgaaatcagaat

SEQ ID NO: 719620 - DNA, 1047 bp, Homo sapiens
aaggtggcggttgtacaactctctgatcagtgtcttttcagcactcttgagcatttactatggctcatttagtctacctttagtagcgcatggttgggaggaaaaagtgcatgcatcattcctatcactcttctcttgattccagccgatagctactgttggccttgggctcagatggacagacgacgatgaggctgacgcagatgatgaggatgccagatgacagatcgcacgtgaaggatggaatcagcaaaagaaactcagggagactacagccagccaatagtagagaaaagctgcagaaagttgagaccatgatgcaaagaccaacagaacggggtcagaggatgaataagaagagcagggtgaagagggacaacgatgacggcacgacgcatcgccataaaaactgaacgagtgaacgcatgactgaatagtgatcgccgcgaggggaacgattgccgagtacagtagcaagaaagctcataattgtaactatcctgtgttactttggcaagcaacgagacatcgtactctttttagatagacattgctcagaagggctgccaatatatggacgattaggtatcccaacataaatcaatctggagatgtgtccaggttggcacctccataggaaccaaatttatcagttgcagcattgaaatattggtattgaaggtggcgattatagtggacatggcctgtgctgtggatgaatgttgccatatgtctctaggccatacgtattgtttagaattgcactcgttgctatagcgagatggattctaactgaccaactaagggttccttcggagggccaactttacgagcatacacgatggctcaataggcgggcccggggctaagtacgcagtaacaaaccctggatgatggccagcactgaccggcgctggaaataggagaccgacacccggaagaagcagaaagagaaacaacacccgcgtacaccaaaaattcgcccgcaacacaggcgggcaaaacaggacgcccagcaaatagaagcaaagagtatacacggaaaga

SEQ ID NO: 719621 - DNA, 334 bp, Homo sapiens
agctcaagttaggaagaagtaaagaatgtggccttaagaaaggacactttggccaggtgcagtggctcatgcctgtaatcccagcactttggaaggcctaggcgggcagatcacctgaggtcgggagttcaagaccagcctgaccaacatggaaaaaccctgtctctactaaaaatataaaattagtcgggcatggtggctcatgtctgtaattccagctactcgggaggcggaggcaggagaatctcttgaacccaggaagtgaaggttgtggtgagccgagatcgtgctgttgcactccagcctgggcaacgagagtgaaaatccatctcaa

SEQ ID NO: 719622 - DNA, 426 bp, Homo sapiens
  misc_feature (333)..(333): n is a, c, g, or t
  misc_feature (345)..(345): n is a, c, g, or t
  misc_feature (355)..(355): n is a, c, g, or t
  misc_feature (392)..(392): n is a, c, g, or t
tcccatctcacaaaaatacaaaaattatcgaaggctgggcacagtgctcatgcctgtaatcccagccctttgggaggcagaggcgggtggatcacctgagggcaggagttcgagaccagcctggccaacatggtggaaaccccatctctactaaaaatacaaaaattagcccaggggtagtgcctgtaatcccagctacttgagaggctgaggtgggaggaatgtttgagccccaggacttcaaggctgcagtgaggcaagattgcgccattgcaccccagctttggggacagagtgagagaccctgtctcaaaaacaaaataaggctgggcncagtggactgtnccgggacgtncgtggttcacgcttatagtcctagcactttgggaggnccggggtgggcagaattgcctgagactcaggagg

SEQ ID NO: 719623 - DNA, 115 bp, Homo sapiens
gggttttgccgccagaacacagggttgtcgtgaaaactaccccctaaaaagccaaaaattggggaaagggaaaaaggacttcatattcattaattggtcggtcattcggacaagg

SEQ ID NO: 719624 - DNA, 132 bp, Homo sapiens
tggtttttggtaccacaaaaaacttgtagaaattattttcaatattaaatttgggcgtttttaagggatgtgttggctattatctgtatttttaaaaaaaatatttgtggtatataaatatttatgtgtttt

SEQ ID NO: 719625 - DNA, 709 bp, Homo sapiens
  misc_feature (271)..(271): n is a, c, g, or t
ggcaacagggatggaagatggatggagtgcagctgggtagtctagtcgatgtgtgaaagtacaatactatgcacatcaacgatatcatcccgagagagtgtggacgcaggaagaggaggcctcccaagactaggctggtatgtcaagaggagtgggggacaaaggttcatgcagtcgataataaggccaaaggcgacaggatctagctcagaaccctggaaatagaaagagatctgaattatgatatagccttaaagtgggtgcttgctgnttgacgtcacagaggcgacaagtccgaaagtcagagagaagatacatgggtacatagactgaagatggcgagaagaccctgcaaaatctgctgtacagagatatgctacgagagctttgacgcgtatgcattcgaaccacgcactgccgagcctcctgcgctgtgaagcgtcactgatcaccggagaacagatgtgccactgcgtattacgcattcagttctcacccaagatggcccaagtaccaatggaagtattagggcagagtcgcactttcgtctgtcagaccagtcggtaatggaagagctaaacagtgcacccgttcaagagagtccaccgttggacatgcgctcctggggaactcacatggtgctagaagggggctcaatggggtgaagttgaaggagaaccctacctttctatggggtaaatccgtggat

SEQ ID NO: 719626 - DNA, 377 bp, Homo sapiens
ggtctctttacgatcaggtgagtcatctgctgaaatctttataatagacttctaccttgatggaatgggttggactaacgaggaaccaccattactccaaggcccagagcagagctgggccatcaactgtctccacacttcctgtattctaggtgccaccctgatccctcattgcctttcagctgcatgtctaatccccaccccacccctcatctagttggctttgattccaaggacctaggactggagtagggctttcacaaataagacagcaggaatgtaatgcaacctaatgagcagactaagaaagcatctatacagaagaacagacatacaaataccaaggcagataagagtgacaaaagacaaaaaaaaaa

SEQ ID NO: 719627 - DNA, 121 bp, Homo sapiens
ggacccgtcctctgatccagtctgggagttcaatctacaggcccagatgttggccaggcatggtggctcacacgtgtaattccagcactttgggaggccagggtgggcggatcatgaggtc

SEQ ID NO: 719628 - DNA, 744 bp, Homo sapiens
agcttgggcaacatggtaaaaccacatccctacagaaaatacaaaaaaaattagccgggcatggtggtgcacacctgtagtttcagctactggtgggagtggtggggatgctgaagtgggaggatcgcttgaggctgggggttaaggctgcagtgagctgtgatcccgccactgcattccagcctggatgacagagggagaccttgtatcaaaacaaagaaagttgtaaggagtctttattctggatgtagcatatggtttgcaaaattttctcccagcctataggatatttaattttcttaactatgagatagttaatattcttaactgtcttttaaagagaaaaagttttaattttgttgagatccaatttatctattttttcttttatggtttatattttttgcttcctctccaagaaatctttgcttaagtcaaagtcacaaatatttttttccctatgttttcttctagaaaactttaaagattaactcatacatttaggtttattgatcgcttttttttccaacgttaaattttcgtgtatggtgcaagttaaagggtcgaggtttgtgtttgcacgtggattaattcatttgctgaagagactgtcttttccctttcacatcagtacctttgtttaaaattaactgattatgtgtttgggctggtttctggaacctctattctggtcatgatttttggtaactaatttcatattgcacctctggatggagttaagga

SEQ ID NO: 719629 - DNA, 99 bp, Homo sapiens
gggattaaactttctagttaaatgttttaaaagggttcaaaagcagggttttttttttacttgaagacattcctttgcattaaaaatatttggaagcca

SEQ ID NO: 719630 - DNA, 459 bp, Homo sapiens
  misc_feature (10)..(10): n is a, c, g, or t
  misc_feature (17)..(17): n is a, c, g, or t
  misc_feature (51)..(51): n is a, c, g, or t
  misc_feature (65)..(65): n is a, c, g, or t
  misc_feature (102)..(102): n is a, c, g, or t
  misc_feature (104)..(104): n is a, c, g, or t
  misc_feature (119)..(119): n is a, c, g, or t
  misc_feature (182)..(182): n is a, c, g, or t
  misc_feature (455)..(455): n is a, c, g, or t
tgtgtccctngcctgcntgcctgctgattggctcttgctcttaatgtgcanacatgctgtgttanacttacccctaccaactgttacccaccaagctttccnanagcttccctcccatnacccacgtgcagcataaccccaggccagcctgaggagagttgctgatctctttctctttggtnactggccatccttggaacaagtagctctcaacctgttcccacaggctggatgtggtttctgtgctttgagagggtcccagcctgggcaacatggtgaaaccctgtctctactaaaaatagaaaaattagccaggcatggtggcatgtgcctgtagtcccagctactcaggaggctgaggtgggaggatcacctgagcccagggaggtcgaggctgcagtgagctgagatcatgccactgcactccagcctgggtgacagagtaagacccgggntcag

SEQ ID NO: 719631 - DNA, 118 bp, Homo sapiens
atagatatgagtatgagacattttttttttttaactggtagctcccatttttaccacaaaaggggtacttggagatggatgatggtgagcagcgggttggtcggctatccttcccctt

SEQ ID NO: 719632 - DNA, 148 bp, Homo sapiens
cataccagtcgcccatcacatacttggtattcctgcctgcatgcgaacttctgccaagacgcgcccagtcatcctgtatcaacaggcgatcttcgatagacaccagtgcgtagtccttgatgaacgagaattgtacagcgtcagccac

SEQ ID NO: 719633 - DNA, 779 bp, Homo sapiens
ggcaccttcgttcttctcagcaccctgtcctggttggggctgttccgggaatgacatcctatccctgtggatcatctcagggtcctgcccagtcccggtccctggcctcaggtgaggacctcacgggattcctggagattcctagcagtggaactcctatgcccctgcgctcccaaacgtgaccatggatcgtgagagtggcccattgggttcctgccatatatgactttcagacagagtctgctgtggtccagtgccatatctccaggagtgaccagctcggcctcctctgctcggcagagctgaatcatccctgtcggaagcgggttgagatgcggctttctgctgcatcccagctactgattgctcgacctatgggcactccccttcacgagctatcggcgatcgaatcacgccgttgatgctccctacctacagggtcctttgcgatcgtgcggcctaccactgtgcgaaaagtttcgtcagcttcccgtcacagtgcttcatacgaatgcaatcatggagtccagtggcatcatggcatggactaattctccctacggcgttaacaactgccaagcaacgcttcgcatccgtcgttttgatatttatggttaaagcgttatgaacaatgtattaagaaagagtgcagctcgagagagattcagagatggaacacaccagaccccagatcacaaatgccaacaaccccccagcacctcccagcacccccagccccacgaccatcgttctgaattctgacgacaccgtgagcctaa

SEQ ID NO: 719634 - DNA, 985 bp, Homo sapiens
  misc_feature (442)..(442): n is a, c, g, or t
tattgttgctcttctctgtcacttcggcgatgctcccccgtggtcgtagggcgatgttttgcttcggcccccgttccatcaccgctccctcgttattgccggcttcttttccgggcctttccctgcctttggcccaaagacagttgcaaaaacgggttccgcccgatcccggattctgcccaggtccgcgctgctttcgcacgccgagccggttcctcccagggcctgccttcaaccttcgagccatacttgcacccaatgagaaattagctttaggaactagagagtccccgcaacaatggatggatttgaaagcccaagcttacttctggcacagtatcctaccaggccgccacatgcagcatgtatgctctataccatccctgaccacttatgatgcacattggaaataaagtcgttcccagatttaggaagtgctttnggagtacttagcatcgggactcgccaatgttaggacccgggttgtgtgttggatttgacatagatgaagaccccttggaaatatttaataggaatcccgaagagtttgagtttcaccaaatattgcaccatggttccaatgtgaagtgtgctttattatctacaccagaatgtcccagatccattccgatcaccgttaattatgaatccctcccctttgggcaccccaaaataataaagggaccagatatggcttttctaaagactgctttggaaatggccagaaccacccagtatattcccttaccaccaaatcctccaactagagaaccatgttccaaaagaaagctgccagaatgggaaatccagatagattattatagccagaacttcgataatgacctgcccagcatcataaccagtttccaccaaaaagaaatccagtggaccattgaagtggacctaattcggttttcctttttaaagcccccccaaccaaagtcgttttaaacctattttaaatgaataaaaaattggtttacta

SEQ ID NO: 719635 - DNA, 775 bp, Homo sapiens
ggttcttctgcggttctcggtgacctctcctttacggtgccctcaaacaatggcctccagtgtggctgtcctctagataggtgtcatcaatgatgtgcgacaaacatgaatcgtgctatccaacgtcattcaactcctaacgatgtgatacaagcagactctaagtgcggtacccttcgtgcctgaatgacggcacttgaatcaaccatcatctctgttgcaccgaggaccacacggcatgatcctcggtcgtcccgatgatgcggccagcaactgtcgagcctagtccacttagcggctgaacttttgtgcagcgatccatgccgagataggggactgtcgcatcctgagcctcgtatgcatgcgaatccttcaatgagacaacaagacgagacgcgcagcagggaggatcttgggtggtcaagtcgtatgtcgtcacccgagcactggtgcgccctcttactcaccccgattgagttgtggcccatgctcggaaagagagcgcgcactacacccggacaatagcttactgcgtaatctccgcaatgcctgttgccagcagcgaccgtgctggcgaagcacgtcaggggaccgatgatctcttggcaggaaaaagttgatgtggctgagacagcatcaccctgaatggcaacgcgcgatgagatcccgttctggaacccctgactagagaatcttggcagcccacactaccttgggagttgaaagctgccccttcgtgcagaacgagcagcctgggcggaacccaccagagtga

SEQ ID NO: 719636 - DNA, 342 bp, Homo sapiens
  misc_feature (8)..(8): n is a, c, g, or t
  misc_feature (10)..(10): n is a, c, g, or t
  misc_feature (17)..(17): n is a, c, g, or t
  misc_feature (34)..(34): n is a, c, g, or t
  misc_feature (51)..(51): n is a, c, g, or t
  misc_feature (53)..(53): n is a, c, g, or t
  misc_feature (64)..(64): n is a, c, g, or t
  misc_feature (76)..(76): n is a, c, g, or t
  misc_feature (85)..(85): n is a, c, g, or t
  misc_feature (95)..(95): n is a, c, g, or t
  misc_feature (118)..(118): n is a, c, g, or t
  misc_feature (170)..(170): n is a, c, g, or t
  misc_feature (201)..(201): n is a, c, g, or t
  misc_feature (211)..(211): n is a, c, g, or t
  misc_feature (320)..(320): n is a, c, g, or t
cattaganantgttatnaaaaactatacactaanaaattggaaaacctagngnaaaaaaagtcnaaaaaatatatntcctactangattgaaccnggaagaaacagaaaacctgaaanacaaataatgagtaatgagattgaatcagtaatgaaacatcttccaacaaanaaaagccgaggaccaaatggttttactgctnaaattttacnaaaattataaagaacaggtaacgtcaattcttctcaaactattccaaaaagtggaagaggaaggaattcttcctaactcattctatgaagccagaattaccctgatatnaaaaataagacaaggacatgac

SEQ ID NO: 719637 - DNA, 593 bp, Homo sapiens
gtgacgaatgcttgctgacctgggccggagctcttcccttacgcaagtctcaggcggtcgtcgtcgagttcgcccgctcgctctgaggctcctgaagccgaaaccagctagactttcctccttcccgcctgcctgtagcggctgttgttgccaggtccgctcaccatgttcgaggcgcgcctggtccaggctccatcctcaagaaggtgttggcaggcactcaaggacctcatcaacgaggcctgcgtgggatattagctccagcggtgtaaaccttgccagagcatggactcgtcccacagtctcttatggtgcagctcaaccctgcggtctgagggcttcgataggctaccgtgacgaccgtaactgggcatgggctgtgaacctcaccagtatgtccaaaaatacgtaacaatgcgccggcaatgaggatatcatgacactaagggccgacggagaacgcggataccttgggctagtattgaagcacccaaaccaggagaaagtctcagactatgagagtgaagttgaggacttgagactgtggaacaacgtgggaatccagaaggggagtaagctgtgtagaacagatg

SEQ ID NO: 719638 - DNA, 500 bp, Homo sapiens
  misc_feature (41)..(41): n is a, c, g, or t
  misc_feature (51)..(51): n is a, c, g, or t
  misc_feature (62)..(62): n is a, c, g, or t
aacaaaaaagggagagagcaatcattgtttccagaagcacngaaaggaacnacccagccgcncttatttttaattacatacggtcgccacactccatctatcaagatggtgaagcagatccagagcaaaactgattttcaaaaaaccttgaacactgcatttgataaacttttagtaattaacttctcatccacatggaaccatccttgcaaaattatcaatcctttctttcattcaatctatgaaaaatattccaacgtgatattccttgaagaaaatgcagattactgtcagcatattacttcagagtgtgaatttaaatgcattccaacattacacttttttaagaacgaacaaaaggtatcagaatttcctatagccaataaagaaaactttgaagccaccattaatgaattaatctaattatgaattttgaaaacataaccagccatagcctatttaaaactgtaatttctttaactacaaaaatatacaatttc

SEQ ID NO: 719639 - DNA, 713 bp, Homo sapiens
gatggtgccaggggaggagccagcgggcgaggcttatggcggttctgttgactccgaggttccgtggagttgtcagtgcagtaatgagcttgcgggcccaggctgaatgggtcgaagttccaggaatcgtagagatgggttctgccggaaaaggaggacaggatgtcttcgtggctcgtttgaaggctactcagaatatgggatggtattattcactgctcttcaggcccaagtggaattgacatggagaagggggcaatcatttaaatgacatagaagaggactgtggtcactgggtgtctgatgcggtgtgcgatgtggtctgtaagtcatcttatgcaaaattagtgccataagtagcaatggacatctgtggtcttaaagggggtgcatcttatgcaagttctaagtgaagtcactaaagtattggaacccaagggaggaatgaagaagcttttcaaaatgggaacgggcattagaagttggaagatttcaagcagtagtctctacgaggtggcctaggcaataaattcagtcttacgagttgtggaaatgacgaaggggatgcttgagaatggagtccaagtgaaactctgtgaagaccaggatttgacattgatttcagatcttcttagcacaggagattggtgaggaacagactcgagggaataattcatacaaataaatgggaatccagctttatgtccaaataa

SEQ ID NO: 719640 - DNA, 402 bp, Homo sapiens
  misc_feature (76)..(77): n is a, c, g, or t
  misc_feature (86)..(86): n is a, c, g, or t
  misc_feature (242)..(242): n is a, c, g, or t
ggttcaacatgcgttatcgaaagagtgttatttcgtgttcggggcccatctatcctggacacgcggcattgatgtnntcgtccgcnaacgaatgtgcacaggggtgttccagaattttggcaaaatctaaatggtcataaaacactttaaaaagaagcgccaatcctcgcaagaagttaagggtggaggaccaaaaagccatttccggggaacaggcaagctggggtaacacgaagcttacnaggtggagtaatttcaatgtgtgagcagttctgggaaacaaaaagggtaggaacagtggaagcgctaatcagaaatacgcaaggcgaagcaggccgtaagttggggaaaaatttaagaaagaaaaagcgtttaaattttgtgggaaattgtggccgggaa

SEQ ID NO: 719641 - DNA, 283 bp, Homo sapiens
acccctggttgactccctgctctctgccagcccctttctacaccccgtgggtccccacgtccccgtggctctctcccctcgtgctagaatctcgctgaggagattgatggggagggggtggtcacgcacgtgggtggagatctggtgccccctgaaggccggacagaaagggccagggcggacaaggtctttgagaactcggtggcatcccgctcctgatggcctgggtcccaccgcccctcccccagccttcctgacagccgaggcgatcgatgttgctgcg

SEQ ID NO: 719642 - DNA, 693 bp, Homo sapiens
gggaggggaaccttagttaataataaaatactacttatttgagttactgatacagattcaaaaaaaaaaaaaaaaaaaaaaaaaaaaaaaaaaaaaaaaaaaaaaaaaaaaaaaaaaaaaaaaaaaaaaaaaaaaaaaaaaaaaaaaaaaaaaaaaaaaaaaaaaaaaaaaaaaaaaatgggggcccctttggcccaagccattttaaacctgggaaagtttaatcaaggggcccaaaatgggggcaaattggcaaaatccccctaaaggggggggataaaaaattaaagggcccgggtttaaaaaagggggaaatggaaaaaccctggggttccccaaattaaaccccttggaaaaaaaaccctttttccaaaggggggaaaaagccaaaaggcccaaaccgaagggcctttcaaaaaatgggccaacccaaaggggaaatggaaaattgaagggtaaaattttgggaaaaaatcggggaaaaatttgggaaaataaaccaatttttaaaccaaagggccaaaattgggaaaaccctttaaaatcaaaaaatttccccgaaaagggttgaggggtctcccaattggaaaaagggtcccttttaaaaaacggggctccaaagtaaaagggaaaaaacccttataggggaagggccccaagggaaacatcccctttttttgggctcagggcccc

SEQ ID NO: 719643 - DNA, 455 bp, Homo sapiens
  misc_feature (116)..(116): n is a, c, g, or t
  misc_feature (121)..(121): n is a, c, g, or t
accaccagaccgcgaattttccccgcctgcattttggcgatcagttcctgacggttatcgctgatggtggcgtcgatgtagggcgaaccggtcatggtgtgggttgaaatccagcngcccntcctacgctgttccagtaaaatcccgacccgcagcttgctggagtcgaggttaatgccgtaaccaaaaataaacagcagtagcagcgggatcactaccgcaatcagccagctactcggatcgcgaacgatctgccgcgtctctttaagcacagcgcccgtacgcgacgccaggacaggatcgggttactcattgctatgctccttatcccagtcgtggatcaactgaataaaggcttgctccatggtgggatcgggttgctcatcgttagccgactgtgctttcaaatcgtccgggtccgctggcgattaatttcccgcggtacaccaggccga

SEQ ID NO: 719644 - DNA, 268 bp, Homo sapiens
atgaccaaccattttgtcactgtcctcagagtggtatcctttgccaagcaatgggttgtttgtggagtggccaagtggctatatggcgtgcccaacgggtgctcactttttatgcaatgtgaagaccttatgtaactttaacttttctttgaacacttctcttggattggggtaaatgagtttgagctttttgcccaatagtcccgttgtgtgggcctatcttggttggcgtgactaccaatttgtgaattgtgatgacatgttgggg

SEQ ID NO: 719645 - DNA, 568 bp, Homo sapiens
ttgccttcacacttgtctcactgcttcttatctctttgcctatctctgcctacgtgttgtctttctctggcgtcgctctctctcccttgggctttctctctccgttctctctctggctcactgtttctctctctcgctttcttgctgtctctcgctctctctcgctctcgtgttccacttccccatcttgcctgccatcccccaccctaccagccacaccaggcgcaggcccctctgtgaccagcctccttcgccctcaactccccctgcgtgccctccctgctcctgcgctgtagggtctcggtggcacctaccagacgcaggttgggatgccgaagcgagcgctactggagcgccatcgcgtatcaggctgtcccgtgtggacgcccggatcactcaatggacgctagatggaggagcgccgtggcacgtgaccggcgtggcacgaggaacctgtggcccttcgtatccgatgcccggccccacggccaggctcccaggccgctgtcacggcccgctgtcggtcactgacacaagaacaaggctggagtaaagcccgggcgggccc

SEQ ID NO: 719646 - DNA, 929 bp, Homo sapiens
  misc_feature (194)..(194): n is a, c, g, or t
  misc_feature (929)..(929): n is a, c, g, or t
gagcgggctcacacttaagcgtctgtgacaggagccggaatcgcattctcccttgtaccatggttctagccaaagatctggctgagtgagccctaagaggtagaatggaggctggaggacatgatgagcgagagtagtcactggagttcctgaagaggatgttcccttgtctacagctgctggaggactggacntgcatactactatctcctggcatgtggctacgtgcagcagaactcctggcatgactagaacgaaaaagacttgtcgaccttggtacggagaaaagggtaaagagtcagagaaagagttggttctagtgaagaggctgaaaccactgtttaactaagaagctttgagagcagctgtgggccatgggttgcagacacatacactctacactcttgcagtggctgtgccgggaacgctggcaatccagcacttctggggcaggcctggttgcaaatcaacgaatagacgtaactgtggaaggatgacaagtgggtacgcgcgagactgcagagcggagactctactatcgttcgaacggagagtaagtcggcatctatgcttgatctatacgcgggggtgatgcaatagtgacaagccactgtggctacaggagcaagggtcgtgcagtggtgatgatctcctgtcaatcgacagcaaccctagtcggacacatgtttaaaccctgtgtcctgaggagcgtggcaaagtccatagatcgtttctacctcttggagatggagtaagccagcttggtcctcgttcacccaaaggatctcccgctcagtgttcggttccatcgttacttgtcaccgtttgccatgaactggtttgccgtaaatgttgtggcggggggttcctataccaggcgaactgggtatggggcagccaaaaggaatggggagccgttttctccaacn

SEQ ID NO: 719647 - DNA, 149 bp, Homo sapiens
ttctcacacacgtgataatcaatgcctcttgtaggactcagtttttactctgtccaatggcaggaagtgtcttcttctcaggatggttctgaagattacatgcggaggatgctggtgagatgtctggaccatgataagtcctcatcatc

SEQ ID NO: 719648 - DNA, 512 bp, Homo sapiens
gggggctgaggtgggaggatcacctgagcctgaagaggtagaggctgtggtgagctgtgatcatgccactgcactctagtctgggcaacagagactctgtttcagaataaaaaaaaaaaaaaaaaagaaaaaggaaaagacaagctatattttagtcttaaattggcctttgtcaaaattaaaagcttgtgctgcaaaggacactatcaagaaagggaaagacaacccacagactgggaaaaatatttgcaaaagataaataactcaaaatattggcaaggggccaggcacagtggctcatgcctataatcccagcactttgggaggccgaagcaggcagattacctgaggtcaggagtttgagaccagcctggccaacatgatgaaaccctgtctctaccaaaaaaatacaaaaattagccaggcatggtggctcatgcctgtagtcccagctacttgggaggctgaagcaggagaatcgcttgaacccgggaggcggaggttgcagtgag

SEQ ID NO: 719649 - DNA, 444 bp, Homo sapiens
tcgaatataaatgtttttattgaagcagcagtcacatgaccttatatctagcctttagattaggcctgacagagggagccagccctaaaaaaatgatgtttctttttgccctaagaaacataacatgtttacatacatcatccaatattggaaaagagcagactcaaacacaacatggggtgggtccctgggaggtacagcccccctggtcggggtggccatattttttacagagacccccaaagaccattactaataggatgaaagttaaaagaaaatacggcccccccaaatcatggaccaccgttattcaaaaacgcagcttattcccatttaaaaaactggcccttttaaaaggtggtttccttttctttttctaaacagagtctgggaaaaactttcctcttacataaaaatatcaaagggttcccaaaggggggaaac

SEQ ID NO: 719650 - DNA, 152 bp, Homo sapiens
agcagagtgtggctagaggggaccacagtgagggagaagcagagactgtctggaaaggggtggttagattgaaagctaagggggcccagttgggacacaggggagagaaaaacaaatctaaatgaaatatatatttagcaaccaagaggggt

SEQ ID NO: 719651 - DNA, 246 bp, Homo sapiens
tgtcatatccgggacgggacagtaaccatccccgtggtccgactacagtcatgtgccaactacatcaatgaaccagctgctaggccctgctgtagaacgctaagacctacatcgccagccagggctgtctggaggccacggctctatgacttctggctagcattgcgtggccggagcaacagcctgtgttcatcgttcatgaccatcccatagtaggttgggaacacacaggccggtaacaagagt

SEQ ID NO: 719652 - DNA, 792 bp, Homo sapiens
tttctcatagtttagggatagcttgctggtgagcctgggttccctaggaatacggttatacctaaaaaacaaactggatagattcagccagactttgaccttgttaattcatgactcaacctcgacaaaggcctctccctttttttttgtggcaaaatatacataacatttaccatgttaatcatttttaagtatacagttctgtcatgaagtatagtcacattgttgtgcaactggcagtctttcatttggggactttgtggtttgatgaggtacaagaaataaaaggagggcagacaggaatgcaagtcagtctgttgtgagaagagactgcattggggtccagaagctgagtgctagttctgggtccaccctacagtgtggcagttataactcgacttcttttttctggagtgtgacaggagagtaacagcagtgcccacctgtctcatggatgctgtaagaacctcacggagcagcatctgtgggtacacgttgaacatcagagtgcagcgtctggctaagggattattttcagaacagttaattgttacatgatgggggaataagttctaacggaaattcttttttgtctttggcgttatcaagaaatccagacacagccttatgggtggacacagttcccctttccaaaggtgaaaaagggaacttaatacaatgtttttttaaaataagattgtaacaatctattgttttgaaagccagtgacatgttcattgaggaaatttggcaaagaaggaaaataaaatcatataacagagataaaaaaaa

SEQ ID NO: 719653 - DNA, 713 bp, Homo sapiens
ccttatgcgaatatgagtccaagtccatctaaatttctctcgtgcagcattataaacaagacatatagctgaaatattgtcagtcctaaaaatatctgtatttctctgcccagatttgcagtttgggtagatcgtgctgtaaggaagatatatcttgctataagatagctgccactgattagatttattcttagtctattttaatcaagattattagcctatgataagtctttcctttttcattctctaaatttctgaaattctatcatttcatgttccccaggaaagactagtaagacgtgtttttattcaataagacattatccgtcatttccaccatgacataacttatgggactttcatgtatccaagattactccctacattgaactgctggacacattaccaccatgaaagtaatttgtcgatatgtcgtacacacgtcaaacccaagacagcagtcaagaagcaatcacctttattacactcttattaaaaagaaagcatatcgttcattcatcacaaggaccatattattccccttaggatccaagataatcaaacagttcgttatagtaggaaagccccacgggccccttgagcgggactttgccaggatcttacaaagcaatttacacaacaccttcaaacaggtcatttccaatccattcatggcttttcccttcgaaccgctttcccgaggcaaagcccat

SEQ ID NO: 719654 - DNA, 88 bp, Homo sapiens
  misc_feature (20)..(20): n is a, c, g, or t
gatcataaatattaataatnaaaactgagaaactattcacaatgcattccttataaataaatgctacatttagtaactcatttcaccc

SEQ ID NO: 719655 - DNA, 208 bp, Homo sapiens
cagcgccacgatgcccgcgtatcgttcgaatcctcggcagccagctgggaatcggaagagagaacccacccttgcgtctttcgctgcggcgtcaactactacatgctctataacggcaacggctacggccgcacgggattcggcatcgcccgcctgctgaatcccgacagcctgctcgcctgaggaatcggcccccgccacgcggcat

SEQ ID NO: 719656 - DNA, 793 bp, Homo sapiens
  misc_feature (1)..(1): n is a, c, g, or t
nggacccacccctgggcgcgctttgtgcattgcgtcaagggattcgggaacctcgatttccgaggcggtttaaggggagtagggcccggcccaataattgctcaaggctcgtttgtggggctccctataattaactcttttaggagctcggattgggcaggcgccgccattttaagcgggggccccgtagggcaaggaaatttcgacagaaatgtatcgctcatggtgaaaataacgccccatgtaaggtttcaaaaatggattccccacgggggggccgaccaccagagaaaggttggtccgcccggccggcataatttcgccccagggccacaatatggtctctggcacggatggtcactcgattttacacggccgagtttaatgtctcccgggtatgagtcttggacgttcaggggtccacatagctgaaccaaaagaagtggcagagtcaaggcctgcctggcacaggtgaagaagtctcttctcagctagtgatagtcagcaagggcgggcacggaggccctgtacagtaggacataccggcccgcgggatatgagaaaagcatggtctgggcacgccagagcgcggcagccatgagccctgcttcgggcatttgcactcccccaggtctttctgtgtgaaggtagaggagtaacagccagaaccccctgcagtggtcaaggggagcgtctcctcctcccctgatcacacagggttcgtcagaatgccgccgtcccagtagatctggcatcctccgctcatctttagcctgcattcttttcaatcaac

SEQ ID NO: 719657 - DNA, 104 bp, Homo sapiens
tgttccactgagagtgtagctccttccatagagcagggcatgatgatgtactcactctgacaccattgtgagtgccacatttccttcccaaggtccttgtcacc

SEQ ID NO: 719658 - DNA, 907 bp, Homo sapiens
tagatgtccgcatgcaggatatcagtatggatcttgttccatgagagataggttgatagaatatataggctcaggtgattcctattgaagaatttgaaggaccgcctccacatattaacgcgaccacaagtgtgtctaataaatgcatgattgattatggtcgaaaccacactatgtttagatcatggctgtgacagcagggttacattttcttcactcaaatttggcgaatctcaaaattagatcctaagatgtgttcttatacatataacatgcgtttatggaaattctatattataagtacagaatcttgtttgaaaataacctaattcaatatattaaaattccaaattcatggcatgcttaaattttaactagagagtttctaacagccattctcgatatattgaccgttccaggttgaagtcagtggaactctgaacattctcctgtggaaggcagagaaactctaagctgtgtctgccccaatgcagtaatggacacactgccatgaaattacctggatgtactttttaccgaggtgaccagagttggggaacagcaactcccattaacaactgaccaagtttctcttctacgatgatatttgaccaggtaaccatttaatgctgtttttggaaagtccaaactcagaagataagtctggaaaggctggtttggacacgacagggagatgaagtcaaggtgtgttttaagatgggaattattgctagctgggaaagcaataagctcaagtgaatgtatgctcccctttagacaggtgatgagttcagtttacagtttcatgcattacttcaagaaattacagggccagcgcaggggttcaatttaaggttgggatttgacacataaaaggggtagaaggaattgtgagggggagaaaaaa

SEQ ID NO: 719659 - DNA, 348 bp, Homo sapiens
tcggtacctctgtcactgtggctggagtgctgtggcgtgatcttggtcactgcaactctgcctccgagttcaagcgattctcctacctcagcctaccgagtagctgggattataggtgcctgccaccgcgcccggctaattttttgtatttttagtagagacggggtttcaccatcttggccaggctggtcttgaactcctgacctcgtgatccacccacctcggcctcccaaagtgctgggattacaggagtgagccaccgcgcccagctaaatttattttttatactgttccatccacccctcaaacccaacacttgaccacaatgcaaaaagacaaagggaaaca

SEQ ID NO: 719660 - DNA, 824 bp, Homo sapiens
  misc_feature (439)..(439): n is a, c, g, or t
agcggagcgcggccgtgtgtgtatcacgccctacgctcgcttgctcgccggcctcagggataggcatcgctgggcgcgggagaccccgccgtgggtccgaggagttgtgggccgggcgtacgagtgaccacgcgttacgagcgctccatcgccctaatgtccgtcgagcgcgtggcgaaacgccggtgcgaacgcagcctatcccctcatggtcaacgctgctctagtctcggagacatagacgacctcatcgcggacaggctcggagcaagcgagcatgcgagggacgcagaatgtgcgaaggccttgtggagcccgacggaggtcgaagcgattgattgcagtcttgctcgttttccgttggcgacaattgtggaaatctgcgtgcgagtcattacctgccgaccatcacataacgctagactgttgtactacacanaagtatatagatcggctcaaggggattgagcactacgctattttgacaagttggaggagctttggttggaggtcttacattgggccgtatcccttagtagaatcgtgtagtgaaccaagcgagattttcgtcccgaaaacaatctgaacgattaacaccgactaggacatcgatcgcaattaggtcccgccttatgggcagagggcagatttccatagaaagtcgtagctttctcgaaagatataaattttcgtccaggcaggagccatcccagaggagttttcatgattgcttgcaaagaattgaagacattggggcgcaaaatttcgtaccttaggctcggcgggttgcacccttgtagcgttaatatcgttaggacacaata

SEQ ID NO: 719661 - DNA, 566 bp, Homo sapiens
  misc_feature (528)..(528): n is a, c, g, or t
gctataaggaagtacctgagactgggtaacttataaaggaaagaggtttcattggctcatagttgctcatggctggggagacttcaggaaactaaaatcatggaagaaggtgaaggggaagcaaggcacatcttacatggtagcaggagaggcagaacgagagaggggaaccaccgcacacttttaaaccatcagatcttgtgacaattccctcactatcatgagaacagcatgggggaacctcccccatgatccagtcacctacaactaggtccttccctcagcacatggggattacaatttgagatgagatttgggtgggaacacagagccaaccatatcagatagctaccaataagccaagacagtgaagactacaataaacacctaactcttcaatgcccagacaccaaagaacagctactaacaccaacaccattccaggaaaacatgacctcctaaatgaactaaataaggcacaataacacatcctggagaaacagagatatgtgaccattcagaaggagnaattaaaatagctgtggtgggaaaacttcaagattttc

SEQ ID NO: 719662 - DNA, 104 bp, Homo sapiens
aggccccctttccaaagcccggggggttccctttttcctttggccccccccccttttttttttagctttttggggccccctaaattggggggggggtttcccca

SEQ ID NO: 719663 - DNA, 113 bp, Homo sapiens
tcacatctcacaatttccactgctcccccagctcctggcaaccaaccattctattctctgtttctatgagtttgattccacatataattgacatcatgcaatatcttcctttc

SEQ ID NO: 719664 - DNA, 1502 bp, Homo sapiens
  misc_feature (1079)..(1079): n is a, c, g, or t
ctaaaacggtgccagtgagaggactcaacacgttgggaccaagagaagcagacagtgttccagtgacccagactcgagtagatgcccagtcagtccaggtcaaggcgcctggggacagagcgcacaacactggaggggctatttcgcccaaggtatcaggcccaggctagagcaggggtcgaacaggagctagacatgaacttgtcgtgcttgtgtcctggcagctcgcgaagagcggctgatcactgcaggagggcttggtgcaagagcttcagcaggaacccaggtggaatttgccaggcacagcaacggagggggacgtgaatgtccccaacgtaggagggacgcaaggcagaggagggcgtgccacgagcgatcgaggaaggcaggcgccgtgtctccaagtgcgaggcccacacgcagaatcgtggtcctcttctgacggtcagggagaacctgtgggctcctatgcgccaggtccttcagctgcatctgacggcggccaaggacatcgtccatttccacggtgggcctcaagaacagactggcatgtcgtcacgaggggaacctaggcagccacattcgcaaggcctagcacgcgcagcaactccactgttgggcaaaccgattcccgaatggctagtttcctcgccccggggggatccccgttgccgtcgtcccttgcaccggagggaagagctcgcaacattccccaatcacgccttgtggccttcccttcgcctgcttttgcccccctcgttggggccctgggtcgtggggtccttcgtgggcatgcccgttccgtagtagcgcagcccatttaagcctcgtcgatccgcaggggtacgttcgtacgggaagccagggcccgttggtgcgaaccctcgttggctagttgtgctggcggcacccaagggttgccccccccgaaattgtcccggccctagtcggagtgtgctgcgccgcgatcttagaacgcgggcggctaattttgcgcccaaggccatggtggaaaagtcctgttcacccggggcacttccaaaccggctgctactggacacggaaccgcattcggtccnaatcggcatctgccttgcccgcgcctccaagcccgcgcccttggaacctagcgcattagtagccacgagatactcggccacttctcatcgacccctatcggcgccacagcaccccgcggccaaccttgcggccaccggagtccgtttcccatgcagactgcgaccgggcattggttcccccttggcgcggaggagtcttacccgccgccagcgctaggggcaagcgacggcccctgcacatccgcccttcgcgggcccgcccacggctcgtcaccacgcatcctgtccttactggtgcgcgctctacggtcgaggcctgtcgtgtgtgttcccgcggcgccgtgcagccactcaccgcttcttttgtttccctcacggccacgtgttgagcagcagttctcccctcctgcgctcgctgtcgcg

SEQ ID NO: 719665 - DNA, 763 bp, Homo sapiens
ttactacatgtgaagacagttactacagatatttcatccacgtcagtatgtatcaagaaaatggaaatgatgcagctataaagaaaagctgttatttactgtagttgtagatgtattcactacagaatcatcatttttcagcaggccacagtccagccagatcctataagatccttgagaagaagcgtatagaaaaggatagacatttctgatgtaagtaaagccgcgaagcgacttaatatccatctgtcagtcatcaacttttcccctagattttttttttaactagttgtgaaagtgtcaagaatagcttccctttccaccctacctaggttccctccttgctggcataaaggccaagcagtgaaatgaaccttgggttagagttatggtaggcaaaaagaaaaggagtatttaggaaatgaatatgctataaacaaggtgcagtacagtgagagttaacaatcctaggaatcgggccggtccaaggtcccagttaccggtcattttatcttcatgattagaagtgatattccatttaactattacagaaagcagtagctatgcagactatgtaatagttcacacaaaagggttaagagcttaaaaataatttttaggaaacacaatattcagaatctaaacacgctgataaattattaagattaagattatttatgtgataaatgaaatgctcgggccaatccatacagccaaaaaaagccaagaaaagcagttatttcatttcaggttagggctccaa

SEQ ID NO: 719666 - DNA, 656 bp, Homo sapiens
ttgatgtcaccatagacagattatccgcagtatgccaaagacacctctgggcacatgtactaggtgtgtatacggcacgtgacttcattgtcagtgtacatgtgctggtctacagtaaccaaacgagcatggtacgggtaccagagcagacatacagaccagtggaacagagcagaggcctcagaaataacaccacacgtctacaaccatctgatctttgacaaacctgacaaaaacaagaaatggggaaaggattccctatttaataaatggtgctgggaaaactgactagccatatgtggaaagctgaaactggatcccttccttaaaccttatataaaaattaattcacgatggattcaaagacttaaatgttagatctaaaaccataaaaaccctagaagaaaacctaggcaataccattcaggacataggcatgggcaaggacttcatgactaaaacaccaaaagcaatggcaacaaaagccaaaattgacaaatgggatctaattaaactacagagcttctgcatggcaaaagaaactaccatcagagtgaacaggcaactacagaggggagacaattctgcaatctaccatctgacaagggctatatccgattctcatgactaaccaattacagaaaaccacccttcaa

SEQ ID NO: 719667 - DNA, 584 bp, Homo sapiens
acgctatctgacaggattgtcgcgaggaggacatcagctgatcgcagtcatacatggaagacttggctgttgtcggggaggaaatctctggctcagtgctggacttctaaccctccgcacagggccaggcatgtcttaagcacttgctaattatttgtgggatgaatgacttggcaaagattgtaaataactattgcctgcaattctaaacttactatttaaatttcatgctctatacccctgtgttctaattcatctctaattttcaagatgtagctgaatatttacctttatagagtcttcccaagtgtacctgtctgtatccctttcccaatttatagtacttattttttccactcaagagctggttggtatggtgggcttttcttcctgtattatttttacctaatcctcagaacctgtggatgtcttttcccaagactttatcaagaaaatttccaaatacacaacaaagttgatagaatttaagtcaatctaatgaacacccatatacacactacctagattttaccattatcattttactactactaggttaacaatatgcctgtccatctatccat

SEQ ID NO: 719668 - DNA, 134 bp, Homo sapiens
acttgacatgcgccagcatgccaggcctaaacattttgtgtgtgttttgttaaaatatacatatatataatttgccattttaactattttaaagtatattgttctataggcattaaagtacattcactctgata

SEQ ID NO: 719669 - DNA, 522 bp, Homo sapiens
ggatgtcggtctcacattggagatccccaagagtgtcactatgaagaatgtgtagtagctaccactcctccttcaattcagaatggaacttgccgtttctgctgtggtagcacagatttatgtaatgtcaactttactgagaattttccacctcctgacacaacaccactcagtaagtaaagtaaccaacttttctttgtatttcctttctccaaagatttgcaaaatataaaaaaacttaaaaaacattcaaggttgaagccaggcgtgatggctcatgcctgtaatgccagcactttgggaggccgaggtggatggatcacctgaggtcagagtttgagaccagcctggtgaaatcccgtctctgccaaaagtaaaaaattggccgggcgtagtggtaggcgcctgtaatcccgctactcaggaggctgagacaggagaattgattgaacccgggaggcagaggttgcagtgagccaagattgcaccattgcactccagcctgggcaacaagagtgaacc

SEQ ID NO: 719670 - DNA, 106 bp, Homo sapiens
  misc_feature (35)..(35): n is a, c, g, or t
  misc_feature (98)..(98): n is a, c, g, or t
  misc_feature (105)..(105): n is a, c, g, or t
accggacgccgtcgatggtcagctcgacgaatccnccggcattggggctggacatgagtgggtctcctcgttggtcggtggctgacgtggattacgcngcgagcnc

SEQ ID NO: 719671 - DNA, 253 bp, Homo sapiens
gcgtgaagacacatatgatatgtagtagaatatatctgaccagatgagtgacccggagtctctgggtagtaccctcttaacccagatcagctgcctgcgagcagtcattgaatcctaaaggtttacaagtatttagaactctatcaattcagggcaaaatgttcatgaagtaattcctctaaaacatggttaggaagctaatgacgtaattgcattacagtctggcattacgtttctagcaataattttacca

SEQ ID NO: 719672 - DNA, 159 bp, Homo sapiens
atcgcccacggtcttacatcctcattactattctgcctagcatactcaaactacgcccgcactcacagtcgcgtcatactcctctctcaaggactatcaaacatctgctccccctactagctttgctgctgacttctagcaagccccgactaaactcgc

SEQ ID NO: 719673 - DNA, 118 bp, Homo sapiens
gtagatatgtagatcgagtaggatccccagaattcaggagtaactgagaggatgcatattagcatttcatacgtacccacggtagcatgctgttttgtcaatcaatataaaatattta

SEQ ID NO: 719674 - DNA, 1645 bp, Homo sapiens
gaactcgcgtggctgcgccactgcgcagaccagacttcgactcgctactcgctgcgcctcgcttcgcttttcctccgcaaccactgctctgacaaaccccgatatggctgagcactcgacgaaacttcgactaagtcgaaactgaagaagacagagcacgccaagagcaacacatccactgccttccacacgaaacgattgaacaggagaagcaagcacggcggaactcgctactgaggcgctgcgccgccaatatgccacctgtacctttccacaagctattgcctttcttatctccaccttctattcagccatgatttacctttcgctacagatgccaagaggtcggatcaaggctctacatgactgtgctgccccctttcacatttccacagaaacctaactgaacaaccgaaagcgcccgcgaccttgccatttcccccatctgtcctaatctattcttggcctgcccgccgccagcgagagtgaccttggcatgctcgcgcgaccgccaccagtcgcgccgccaccccgtgcgcggtgccccgaccgcttaaaacctacagctcaaaccagcctgccccacgtgttcctcccgccgtgtaggcgcgctcacaccgaagtggcccaccctcaccggcgccaccgctccacacatgtggacgcccacctcgacaaccgccgccagccccacacccacccaccccgccgcgccccccccccaaacctcacacctggcgcgcgcgcacacaacccacgctgctctaccacgccgacgcgtccacaccgcgcgccccccaccagctgacgaataaacgcagcacaaccgcgcgcgctatatccgcaaccttcctctcacctgttcctccctataaccaccccacaccctcccaacaaccaatcagcccacacagtacttctatccattacatcacaccaacacaacaaacacttcccccaccacacgatatcagcacccaaactactcaccaaactacacctcacaactaacacacacctcatctaccacaccgtggcttcttccgagcgcccactctctatggcgttgggtctctcgtcctgcgttcctcctctcctgcaccgtctatctcgaagactccgtcccagcgcagagcccgacgcgccgacgagacgccacccggcgagccatccactcttctccgcagccgccgttgcatcaacacgcctccccgcagccacagttctcactccacacacttcccctgcccccaccccctcccctacacccacccccctccacaccacccccacaccctaccacccaccctcccccggcccccccctctcaccccccctctacccccccccgcccctcttctcttccacttcccccctccgcaccccccccctgccacgagcctagtcccgtacgccgcgacgggtcgctgccgtgcacgctgcgctcccccgcgcgccgcccgccgtggggccgcgtacgcgcctcggccgccggctgctggtctgggcggacgcgggtctctccgctcggccagagtgcgtttcttcattgagcggggggcgccggcccgtctgtcggccgtctacctgctgcgcgtcgcggcgccgccaccgcagcggagccggccccccggacgcggtggcg

SEQ ID NO: 719675 - DNA, 238 bp, Homo sapiens
tctgacggactccccacgactgtactctgcttggtgggccacgctgacggctggggcacaccctccacgtggactgacgacctgggacacccggctctactggggaccgtgtttggacacccaactgctgctgacactttaacgacccaacgacctgacggacacgacactacgacttgactcggaccccgcttgggtggccacgctggacgtgggtaccgacgactcgacattcagt

SEQ ID NO: 719676 - DNA, 86 bp, Homo sapiens
tcaaatattgcctttatctcgtctcctcagaatacagcgtcccattttccaattttaaatagatgcagcattcctatcaaatgatt

SEQ ID NO: 719677 - DNA, 424 bp, Homo sapiens
tagaatatagtgcgatgatatattacggggagcgctgtgagtagctattctctgtcttcgtacgggattgaagtagatagaacgactgtactcgtctgaccagatacacgtaggactttatcgttgacaaacgaacctttatagcggctgacatcgggatgtcctgatccaacatcgaggtcgtagaccttatggtggatatggactctagaataggattgcgctgttatccctagggtaacttgttccgttggtcaaggttatgggatcaatttgacgtataagtaaggtttcggcttttgacttggttggaaagtcttagccatgtacttgctcggagggttgggtcctgctccgaggtcgcccaaccgaaattttaatgcaggtttggaagttaaggacctgtgggatagaaaggaactga

SEQ ID NO: 719678 - DNA, 1003 bp, Homo sapiens
  misc_feature (31)..(31): n is a, c, g, or t
  misc_feature (222)..(222): n is a, c, g, or t
  misc_feature (361)..(361): n is a, c, g, or t
tggagaccaatggcaggacaggcctgtgtanttggacgaggggtgtctcctgcgcaggagcgcaggcgtaggcagcatggcgccagccggaatggcatggtcttgaagccccacttccacaaggactggcagcggcgcgtggccacgtggttcaaccagccggcccgtaagatccgcagacgtaaggcccggcaagccaatggcgcgccgatcgccccggcncctggtgggtcccatccggcccatcgtgcgctgccccacggttcggtaccacacgaaggtgcgcgcggccgcggttcagcctggaggagctcaggttggccggctaattcacaagaaggtggcccggaccatcggcatntctgtggatccgagggagggcggaacaagtccacggagtccctgcaggccattgtgcagcggctgaaggagtacccgtccaaaatcatcctcttccccaggaagccctcgcccccaagaggggagacagttctgctgaagacttgaaatggccacccagtgaccggaccggtcatgcccgtcgggagcgtctataagaggagaaaaggctcgagtcaatcagtgaggaagagaagaatttcaaagccttcggctagtactccgtatggccgtgccaacgccggttcttcggcatacgggcaaaagagcaagggaagccgcaaaacaggttttgaaaagaaaaataaaggcctcctgggacttgggatcaggcggagccatgctggtcccacgtgggtgttccgtggaccactggcctggatggggttcactgctggtaactcctctgccagggattggggtctgaaagacagcaggctgaaaaaaaaaaaaaaaaaaaaactcggggtttttcggggagaagagtataaagcactttcattttctcgcccctttaggggattcgtctttagtatagtttctttatatatatcatataacgaaaagaaaaaaaaacacaaaccaacaaccaagatactgtcag

SEQ ID NO: 719679 - DNA, 1517 bp, Homo sapiens
  misc_feature (96)..(96): n is a, c, g, or t
tttcttgtgtgtcgtcgtgtgtctcgtgttcgtcaggtttgtgttctatctcactcgtctctgttgcgcgtgtggcgggagggtggtagagtgttngtccgcggctcctttgttctttctataggccgcgtcttcgtccttttctttcgcgcggggttacttattcgcggactgttctccctgtcctttgtgggcccattagtgtgttgtttcaccacgaggcgggtgtttgttcgtatttctgcgggttttttctcccccccgtcgcccccttctatcggcgccataaggggcgcgcccagaagtggggtcgcgccctttttttaagagaatgggtgtaggttggtcagcccccccctcgttgttgctaatatgaagagtatttgttggtgaaccgtcttgtttctctgccggggcctcctcggtggcccctactattgggtgtttcaatggtgtgtttaccccaagggggtcgctgtttgttttgtaagcggaggtgttcttcttgtgagtttgtcgtcccctctttgttgatgagggtccgcctctttttgttggggatcttcttgctcccccgtggttgtgcttggtagaaggagttttcttctgggggggggtttttattttcgccctcctcgcggctcgtttgttttttttcccctctgcggatcgggggtgtgtttttttcccctccgcgggccgacgcgcaacaatgggtggttttccacctggggtggcctcacattggtgggcgccccgcccctcctctgggttgtgtttgggcgccttctcctctcgcgttgatggttgtttttccagaggaattttcccgcgcgcggggtttcgtatgcgcttgttgtttgtctcttgttgtctctttcggttgtggggtcttttattatattttatataaaacactcgcgccctcctctcttctcgagatatccgcggagagaatctctctctcttatgtgtgtgtgccgcccaccacacagtgggctcggcgcccaccactctctccgcgaatataaagaagtaggtgtggaatctttctgtgcccccggaggagggcacagccaacacatatgcttttataataataggggcgcgcacacagaaagggagatctctcccgcccccacctctgtgtgatataaacacacacaagagagaagaggagcttcgccccactctcttttttaactcctctctctccacacagaagttgtttgttgttgtgagagaaagagagtaaatatagtgtgctggagagaagacgcccacacccttgtttgtattggtggatcctctctcgtggggctctctctttgtggaagcgccaccgtgtttttgtggaaaacacaccccgggggcagaaacaaccagggggtaaaatgtgttcgcagagggtgggggagagaagagcgcccccccctccccaaaattttttttataagcttccccccctcccaataggggcccaataaaaaagagtgtttttttggtggggtgttata

SEQ ID NO: 719680 - DNA, 538 bp, Homo sapiens
atccagagatgccatagggcacaaatattaacagtacaagacagctttagttttactagaaagacttgtacaaaaaacatcagttcatggattctacatacccaaaaaactgtcttcaaattaattatagtaaaggaagtttaatatcatcctgaaagttgaaatacattacttaccagttataaacagtatgaaggttgtataatgatatccaccaaaacggatccattccacagaaacttttatgtaacacctactctcaaatattatttccatcttttttggcactcagaactaaaaatttgcgtaagcagcgcaagcaatggagatttacctcactacatcttagttttacaaagatgtggaaagcaatattagatgcatcagcttcacccaccccactctagcatccagtattatcttaatcttctacaacagtttccaacaacaaaccctctacttccatgctccatctcccacacctttacataccatgattatcttgcaaactggatcatagctcctcgacaataagcat

SEQ ID NO: 719681 - DNA, 282 bp, Homo sapiens
  misc_feature (236)..(236): n is a, c, g, or t
atacaaaaatttcaaacatcactgcggtagatatacctccagcgtcagtggggcaacatcctgaaacttgcatctccctgctgcagctagggtgccacgctgcatcacggggaacacagcctctcctggatgcaggaagctgcaagcatctggaatgcttattactttaccccacaaataaatccacaaggtcaatcttcccaggggaaatgagtgccatcgatgaaggtgttttnctgatgagaatgctaaaacgaagagttgtccctttaccagagccta

SEQ ID NO: 719682 - DNA, 1233 bp, Homo sapiens
  misc_feature (516)..(516): n is a, c, g, or t
  misc_feature (528)..(528): n is a, c, g, or t
  misc_feature (530)..(530): n is a, c, g, or t
  misc_feature (621)..(621): n is a, c, g, or t
  misc_feature (1021)..(1021): n is a, c, g, or t
ggggggtgttccaccccaccgggcgcggccgtcccatatggccccgcctctcttgctccacgttgtgccccagcactctgtcgcgggtggccccaagagggctccccgctcatcccctgtttctcaatgcgtcatgtgctgaagccatcctactcttctcttctcctctgcgcttgttcccgtgtgttggtccccgccccacttgccggtcccggccggtcgccgcacactttccccaaggtggtccccgccaacgaacctgttgcctccccctcggtgacgttactctgagaggcgccccccccccgattctagatcccccgcctctcagcagttcccgaccctggggaggctttttaagcccgcctgcccgaaacgggttgtagccctggggcccacaaggtcctttaacctaagctctttggaccccgccgcatagagagttggtctctttgtaaagagaaactctgtggccccgaaagaagcgttgtctgtgccacgcccatatcttcaatngaggaagagagngngaagcaactgtctgtaggagaaactctgagttgagaagctttccacgagaccccaacccgagaggtgggccccgagagtctcttctccctntctcaaggagttattctccaagagaacccccagagccctggtgaatgaccttgtggaagaaagccgggccgctgagaatcgcccaatgtgaagtgttcgcgcctttaacacatttggtgagaaagaaatgtgtgagaatcacgctcacactatactggagaacgtgcaccccaaactgggccacctgagcccacagaattgagcccccacatttgtggtgaaccttcacattgagagagcaccacttatcctctggaatgagagccagggtgtaaagcccctccaagagaattgggtgagcccaccgggagcccaactttgcgcccaagaatgtggaggccgccccgaaatcttggccttgtgccggaaatattcttctctttgagccagcatccacccntgggagagacccgtgaatatatgaagctatagcctcgggctaatttccccactagccctggggtgacttccctggtcaccccaaggcccgtgcacatgcacatgttggggtttccctttaccttttttatatataagttgtacccaaacatccccttaaggttttttgatttgtacccttcccttccaataaagaaatttggtaccccggga

SEQ ID NO: 719683 - DNA, 525 bp, Homo sapiens
gagcctctgtcataatgctctgccctccctcccccgaagtttctctgtggtgatgaccgcgtctctcgcctgccctccccgcttcctgacctctgaagaggttgggaagtgaccatttggatgtctgggccctgccaaggcgacagggagggtcgagagggcaggccggctgcttcctgcccctcaccctttccgccgggcctgcttgtgctgcatttggtgccaaggttagccagtcccccctgttgtgttccgtgtgcgtttcactctgcctcatctttccatcccgtcgccgtgacccggcagcgtccccaaagaatggaaacgtcagcatcaggatatggggccactctctgtgagtccagcatgtacctgtctctccctagatgtcccttcagcactgggactgaacagtgccgcgactctgggcttgaccagttcccaatctcgtacttcatgtcccacaagttcttcagcacaagtggggctaatatccattccaggtaaactgggccatcttaacaa

SEQ ID NO: 719684 - DNA, 110 bp, Homo sapiens
cctgtttacctcctctccctcaattaaagaactaatacttatgagtggctcagagagcaaacattaggaacaactcagaactgctatggaaaacaagatagcaattctcc

SEQ ID NO: 719685 - DNA, 199 bp, Homo sapiens
  misc_feature (111)..(111): n is a, c, g, or t
attttccagcagatagtgtatgtacttttctcttaaaatttctgtctataatcctaatttaagagtgtgagactcaaaggaaaataagtgtgcttaaatggcacagaattngtttatcataggtctagtgctggaatctgggacagtgttgaacaagatcagtataagcatttcaacattgcattttctaattaagatg

SEQ ID NO: 719686 - DNA, 703 bp, Homo sapiens
  misc_feature (401)..(401): n is a, c, g, or t
gggggatgcaccttaacccggcagagggggggcgcattttaatatcccttcaattcgctcacggatcaccatctgttgtaaaaccctctaggctcagaactttcgcaaaaatcaagactgagttacatccttgtgagagagttcagcttttgagccttgacattcgctatcttcacaatctggagggggggctaccccaaagagcgtgccttgggatgcacagatgatctcacaaatcctgaaggatctgcgtgattctgactctgagctcatagtgttatacgacaagtttgagtcaggcttgcaatctgaggccgtcattgtcgatgacgcaccattttattaaacgcctgctaagaccgctacttgtgatgctgctgatgtacgattgacattacagngcagggctgatcagacattttcctatcataccccaagagatttttcttatatatcgaaaggctaaaaaattaaacccctttggccttaatcaccttgtttacagtcctacagtgtcaactggaaaatactggtaacaactccaaactttggctgaaaatttaccgaaggtggatcacttctgaggaaaatttacttcctgggggtaagtggtgggtaactcctagcggaacacgttttttacccttggaaaccacccccataaaaatgcttgtccaacaaagcgtgggcccccatgtccccc

SEQ ID NO: 719687 - DNA, 329 bp, Homo sapiens
agagggtgtatacgtagacagaatccaatattacaacaatacttgacgctagaaggggaagttggttaaaaatcacatcaaaaagctactaaaaggactgctctaatttacacaaaaactaacgcacaacgcttctggaatagttagaagaattcggaatgccttaaatatagtatcttagtattcgaaaaatgtgaaggactttcgtaacgcgaaataattcacgatcaacactaatcaccaacttaatgtatatgcatcgaactctgactaaagataatcatataaatcctgaagactagcattactagacagctgacccacgtgct

SEQ ID NO: 719688 - DNA, 125 bp, Homo sapiens
gcaggacccttaagattttgagcatcacacaatctatgccacaaaatatccttacctccaaaagtttttcctgccctgttatttatttatttattgtaataagaacagttaacataagatcttgg

SEQ ID NO: 719689 - DNA, 493 bp, Homo sapiens
  misc_feature (264)..(264): n is a, c, g, or t
ggttgtccggcagcgccgcgctggcatccggggagccgctgtggcagcgtatgctgccacggggactgggaagatggcgccgcagaggtgagattccgggaggtaaacggttgtcctccaaccccgctggaaatccgtgttcttttctgaaacgggatggtaataaatggctaccatatttttccgtgcgttgtgaaacttgtttcattatttgtcgggtattaaagcgggtgtcctgtggcgatacccaagtagtcccgaacnaggcttaaacccttaaggtaaccttggggcatgggtggggtggattggcttgccctcttcgcgtatgatactcggttggggggaaatttgggagaagggttaaatttccggcccagtggttatatctgtgtagcggtaaccaaacacggggaaaaaacccattcatgcccaagggcggaacaggaatggcacggcatccaggataatgaacgcgggtggggcccttgga

SEQ ID NO: 719690 - DNA, 245 bp, Homo sapiens
tcctagcgtagactgtcatcacttccaaatcagaacaagacaaaaagctcaggcttgagttgtccactagtgcataggttccgccagtgatgaggagctcgtaaggcaggatctctacatccttctggacaacacgatgcaagcacacagcatgtcctgcagctggaatagttgcatagtgccagtgttggcccagaatcacaatgcatcatgataacttgtagcttctccacaaattagagcct

SEQ ID NO: 719691 - DNA, 137 bp, Homo sapiens
  misc_feature (99)..(99): n is a, c, g, or t
ccatgcccatgtgctccccaactcgtgatcttgaatgtggtgcttccagtgatgtgtggtgcctgatgaacttgactgtcaactcatggtaaactgccnattctccctgatggatgtgatgaatgcatgcatgtggt

SEQ ID NO: 719692 - DNA, 560 bp, Homo sapiens
  misc_feature (1)..(1): n is a, c, g, or t
ntacacatgctgcaacatggatgagcttgaaaacatggacatggcaaggcgcagtggctcacgcttataatccgagcactttgagaggccgaggcattcagatcacttgaggtcaggagttcgagaccaacctggccaacatggtgaaaccctgtctctactaaaaatacaaaaattagccggatgtgcttgcttgaacctagaaggtggaggttgcagtgagccaagatcgtgccactgcacagagtgagactctgactcaaaaaaaaaagaaacatggaggccaggtggggtggctcatgcctgtaatcccagcactttgggaggctgaggcgagtggatcacaaggtcaagagatcaagaccatcctggccaacatggtgaaaccccatctctactaaaaatacaaaaaattagccgggcatggtggcgggtgcctgtagtcccagctacttgggaggctgaggcaggagaatcactcgaacctgggaggtggaggttgtcgttagccaagattgcaccactgcactccagctgaaaacagagcaagactccatctc

SEQ ID NO: 719693 - DNA, 159 bp, Homo sapiens
atgtatttcgttgttcgccccttcagtaccccgcaaaagctattttatagtggtcaatatccagtttatctccatagttcaattcggcgggttcatgcgtataacccattgcccccatttccgttttggtcgtttctttcattatcttccgcatttgtt

SEQ ID NO: 719694 - DNA, 466 bp, Homo sapiens
tactgtcagatctcatgtatatctctcccagaatatactggggggacatagccagaatagcatcttatatcttcaaaataacatactttcttatatgcccttacagatagaccttttaatgtccggttgttagattactgagtgaaatagatgttaaaccatatgttatatttccgtaatacctagtttactaattttttattttctaagtatgtggttacgattatggctttattttcctgttgtctcagttagcataccaccttagtttacattcaaatattattcaaatattattttttatcaaaaacttttaacccctttaagtgaaaatatacaaaaagctgtgagtaataattagcttatttttaagcactcccaggaagaacagcgtactgtaaaccaaaaattatcggaaaagacatttgacggaaagtgactctaatgcagtgaacagtttgcagta

SEQ ID NO: 719695 - DNA, 891 bp, Homo sapiens
aacacaggcatgctcataaggaaaggttataaaaagtaaaaggaagtcggcaaatcttaccccgcctgtttaccaaataacatcacctctagcagtcaccagtattagaggcagccgcctgcccagtgagcacatgtttaacggtccgcggtaccctaaccgtgcaaaggtagcataatcacttgttccttaattagggacctgtactgaatggctccacgagggttcagctagtctcgttacttttacaccagtgaaattgacctgcccgtgaagaggcgggcatgacactagcaagactgagaaagaccctaatggagctttaatttgatcaatgcaaacagtacctaatcaaacccactaggtcctaagtctaccaaatcctggcatgatcaatttcgggtaggggcgacgctcggagcagaatccaagctccgagcagtacatgctaagacttcaccagtcaaagcgaactactatactcaattgagccaataagtggagcaacggaacaagttaccctagggataacagcgcaatcctattctagagtccatatcaacaatagggtgtacgacctcgatgtcggatcaggacatcccgatggtgcagccgttattaacaggtctcgttgttcaagcgattaaagtcctacgtgatctgagttcagaccgaagtaatccaggtcggtttctatctacttcaaattcctccctgtacgaaagggaccaggagaaataaggctaagttcacaaaggcgcttcccccgttaatgatatcatctcgaagtaacattataaccagaaccacccaagaacagggttgtcgaagcagaaaacgaaaaaaaaaattttggtgaggcctggccccggaaagtttaacacacaattg

SEQ ID NO: 719696 - DNA, 170 bp, Homo sapiens
aagcgaggtgggctatttgtctcaagagcattgatacagaagacaagttgaataaatgttagttttcagtgaaaaggaagttaaaagtaaaaggtgaggagtaagaagaagggtagtaagagaaaaaaaatggttattaaggctatttatatactacctctcgcggcctt

SEQ ID NO: 719697 - DNA, 153 bp, Homo sapiens
  misc_feature (49)..(49): n is a, c, g, or t
gctagcggatccccagacagcggaccccacgtgtggctgcgatccaggngttggtggtactggctatgtgcttgtgattgcgatggactatatttatgtctgtggaaagctaacccagcagttgctttgtggcccttgtagttgtgtactggg

SEQ ID NO: 719698 - DNA, 124 bp, Homo sapiens
cagtttttcccccccattggggagtaatgccatgaatggggccaaatttttcttggggcccaaatgctggggggccttggggtccaaaaaggcatcatcaataaaccagttggcatgcatccca

SEQ ID NO: 719699 - DNA, 249 bp, Homo sapiens
tgcccggcgtcggttggtggagatctttatttctcacatgaaataaattgcgcgagagttgttactgtggtgtgtctcgagtcactctagaaaaactgttgccgggtatctgaccctcgttatgtagttctcttccccctcctcaccatttctaccttgaccgagtccgtctttcttcacactaacacacatactacactactgctgcaagacacaaaaatccaaacgattgcccagccccagctgcgg

SEQ ID NO: 719700 - DNA, 329 bp, Homo sapiens
cgcgtgtcgtagttcaggagaggcgtgcaggccaggtccaggcgggaggtgggcatgtgcccggcccaatacacgtgccaggcaggtttgtaggttgccggcagcagttgcaaaatctcctctggcgatgatccagatctgcctgtttcctggtgcctccatgaaggtgaccgagcgagcgcgagttgttggccggatcactggctccccataaaaccatgagcttcacaaaagacgctcaggacaatcacaccatttaccaggcataagagaagagtagggttcatccagtctaaccaggccccataagctgactcgaatgaggggac

SEQ ID NO: 719701 - DNA, 274 bp, Homo sapiens
agggcccgtaagtggtttttatgtgttttggggggaaaattttatttccccttttttttgatatttaaaaaattcatcgatctttccagatgaaccaaggttttttaaaagaaaaatagggaccccttccttctttataaaactttctataatgccctatttgaatgttaattttatgggctttttaaaaaatgggtgaaaaccccaacttatggattatccctaggttatccagcatatattagtctttatcagaataaaatgaaatttccta

SEQ ID NO: 719702 - DNA, 141 bp, Homo sapiens
aaggcacttgagtcccattaagcccaggtcaccgtaaccacaaatggtgaaagtggtaaaatgtcaagtgatgggcctgaaggggcaggtctgggtaaccaggtacagggcgagcatttggttctggcagcaccgggtaat

SEQ ID NO: 719703 - DNA, 382 bp, Homo sapiens
cgatctagaggaccttctctctccacactgggactgctggaaacatgtagttaaggaatcatgggtgttgagagaaaaaaaaaaaatcttttaaaagcggccattggaggtgatggcttctcggtacttacgccataccccagaaatacaataaataagcaattagaaaacagatcaattggttacaatcactattgggtagagcaaactttacccccaaaaggaaaaattaaattaaaaaaaaaaaccctttaaaaaattggaagacttattttttgggtcatagggaatacataacacctacggtataagttaatcaattacaaggctagggtatagaatatcaccactagcatccaggggggagagaggggaaacggag

SEQ ID NO: 719704 - DNA, 218 bp, Homo sapiens
ggaccgatgacagggcgactcctatatgttagggacggatcgacattgtgtaggcgaactaggaaatatcattcgggcttgatgtggggaggggtgtttaacagggttggctagggtataatatgtcttgggtcgcctaaggacgtcttgctgagcaatagttgttaatcgtcattcaccggagagaacggaacgagacagtcaacgccgcagcggcg

SEQ ID NO: 719705 - DNA, 883 bp, Homo sapiens
tccagctggggggttccctctttttggatgtgcctcctaccttccccccaaaatttcagtcccttccaattacccccaaaaaaaagggtagtgaagggaagggatggcgggggttcggagcccctggggcgtcaaaaggggaacagaaaccaaaaacaactcagcggggtgtggtgacacagaagctgacaattcaagaagtcatacagcaggagggggacaggggcgggcagagacagggggacagaacggagaagggagagttacaagagtgccaactccacaattacccctcctaagagaggcgtggagagaaaagccacaaacttaggaaggtgccggtccgtgaataagggaggggtggtggttgagaccttgaaggaggaggagggcaagcaaggggggggccacctctactcttggtagaatggagacccccctccagactcagggggcagcagtcacacagaccgtaacaccccttcccgcacacggtcagcacaaggtcagagaaaagaagtctcctccacgggttgtcccgggtacacagctggacccatgggggcgctggtcggggttgacctggaccttgggttggacaaagcaacaacacaggggcactcctcgagtcgagaaaggaacaccgctgcgggatccaaagaagtcacacggaccaatgggtgaagaccaaaaggaccagcgtatcactatacgccagggacccctatccagagtgtgggaaccttgctatatcacgcgggcccgggcgcgggtatacatacagaatcatctcgcccaagagcgcggtctcgaagggacggctcttggacagaaattatccttggcaacagcccctggtccagaccggtgcggtggcccaacc

SEQ ID NO: 719706 - DNA, 261 bp, Homo sapiens
gaggttatggctctcttgatgtcttcatgacatagatggcaggagccatgctggcaccagatcttctctaccgatctgctgatccttggacgaggctagtgatcatcttcaccatcttcatcggtcagtatcccctacagcaaccttgttggtccttcttggccacgtggtatggctcaggatgaccagtggcaaaagcccagggcaagcccattggccagtgttgcacgggagcccatccatcagtatgttagtgcatat

SEQ ID NO: 719707 - DNA, 125 bp, Homo sapiens
tcgctattcatcggcaccaggattcggctacgcccgcaagcgcggcgagaagtccatggctctgcgtctggctggtgagctgctggatgctgctgaaggcaaaggcgctgctgtcaagaagcgtg

SEQ ID NO: 719708 - DNA, 1812 bp, Homo sapiens
  misc_feature (105)..(105): n is a, c, g, or t
gcgctgtcccatcaagcccaggtgaggggccagggcaagggcggctgacacaggagaaggaaaggcaggagctcctgcccttcgggtggggccgagcggccacangctgtttctctcgcccccaggagacaggtactgggtgttcaaggacaataacgtagaggaaggatacccgcgccccgtctccgacttcagcctcccgcctggcggcatcgacgctgccttctcctgggcccacaatgacaggacttatttctttaaggaccagctgtactggcgctacgatgaccacacgaggcacatggaccccggctaccccgcccagagccccctgtggaggggtgtccccagcacgctggacgacgccatgcgctggtccgacggtgcctcctacttcttccgtggccaggagtactggaaagtgctggatggcgagctggaggtggcacccgggtacccacagtccacggcccgggactggctggtgtgtggagactcacaggccgatggatctgtggctgcgggcgtggacgcggcagaggggccccgcgcccctccaggacaacatgaccagagccgctcggaggacggttacgaggtctgctcatgcacctctggggcatcctctcccccgggggccccaggcccactggtggctgccaccatgctgctgctgctgccgccactgtcaccaggcgccctgtggacagcggcccaggccctgacgctatgacacacagcgcgagcccatgagaggacagaggcggtgggacagcctggccacagagggcaaggactgtgccggagtccctgggggaggtgctggcgcgggatgaggacgggccaccctggcaccggaaggccagcagagggcacggcccgccagggctgggcaggctcaggtggcaaggacggagctgtcccctagtgagggactgtgttgactgacgagccgaggggtggccgctccagaagggtgcccagtcaggccgcaccgccgccagcctcctccggccctggagggagcatctcgggctgggggcccacccctctctgtgccggcgccaccaaccccacccacactgctgcctggtgctcccgccggcccacagggcctccgtccccaggtccccagtggggcagccctccccacagacgagccccccacatggtgccgcggcacgtcccccctgtgacgcgttccagaccaacatgacctctccctgctttgtaaaaaaaaaaaaaaaaaaaaaaaaaaaaacaaaaaaaaacaaaagaaacaacaaacagaaacaacaaaagacaaacaagaaaaaaaaaacaaacagcgcgaggcgcgcgcgcgctctaagaaacgggctctccgatgggggcgacacacaagatagacgcacgccccccacgaggtatttattgcacacaaaagcgtgccccaaaaagagagagagcgacgaaaatatataaaaaggcgacgaaggcggagggcagagcggatatataccacaacacgctgacagaacgcgggagaaacacacagcggcaagacaggaggagaacactctgagtgcagcgaaaagcacaccaccaatacgcggcgggcgagcgccacacacaccaggcggagcgccacaccacgccagccacgagcggagcgagcagaaagaaacgcccccacccagaggcagcaacagacagacaacgaccaaggcgcggaagaagcaggagggaccacaagacagcagcgaacaggcgcgccgcaggacaagcgcaaagttgggagcgcacggaacaagactaacgcgcgcacgacct

SEQ ID NO: 719709 - DNA, 393 bp, Homo sapiens
  misc_feature (291)..(291): n is a, c, g, or t
tagaggaccccgtccagtaaggtgtgcccagagcacttttacttgagaactacacagagcctcacggcctccagcaggctagaagagccaggaaatgaatgcctcaagagctggcctcaactaatgactcctccagggattgggacaccaacagccttcggctctctcacccgtggggtcaggataattcttctctttcctgtgcgtcacttcccgtacctccgctacggggtgtttcctggcatctcgccaaatgagctgctgtgtactcaatttcctgtgttctctaangaattcaggtctatgacactaagtgatgttagaaatgctaacgtgagaaattaaactggtaagtgatcattttacaggggggaatgggcacacatttatggg

SEQ ID NO: 719710 - DNA, 3007 bp, Homo sapiens
agcggagtctggcgggggcgccgcggagagcggagggcgccgggctgcggaacgcgaagcggagggcgcgggaccctgcacgccgcccgcgggcccatgtgagcgccatgcggcgccgcgcagcccggggacccggcccgccgcccccagggcccggactctcgcggctgccgctgctgccgctgccgctgctgctgctgctggcgctggggacccgcgggggctgcgccgcgccggaacccgcgcggcgcgccgaggacctcagcctgggagtggagtggctaagcaggttcggttacctgcccccggctgaccccacaacagggcagctgcagacgcaagaggagctgtctaaggccatcacagccatgcagcagtttggtggcctggaggccaccggcatcctggacgaggccaccctggccctgatgaaaaccccacgctgctccctgccagacctccctgtcctgacccaggctcgcaggagacgccaggctccagcccccaccaagtggaacaagaggaacctgtcgtggagggtccggacgttcccacgggactcaccactggggcacgacacggtgcgtgcactcatgtactacgccctcaaggtctggagcgacattgcgcccctgaacttccacgaggtggcgggcagcaccgccgacatccagatcgacttctccaaggccgaccataacgacggctaccccttcgacggccccggcggcaccgtggcccacgccttcttccccggccaccaccacaccgccggggacacccactttgacgatgacgaggcctggaccttccgctcctcggatgcccacgggatggacctgtttgcagtggctgtccacgagtttggccacgccattgggttaagccatgtggccgctgcacactccatcatgcggccgtactaccagggcccggtgggtgacccgctgcgctacgggctcccctacgaggacaaggtgcgcgtctggcagctgtacggtgtgcgggagtctgtgtctcccacggcgcagcccgaggagcctcccctgctgccggagcccccagacaaccggtccagcgccccgcccaggaaggacgtgccccacagatgcagcactcactttgacgcggtggcccagatccggggtgaagctttcttcttcaaaggcaagtacttctggcggctgacgcgggaccggcacctggtgtccctgcagccggcacagatgcaccgcttctggcggggcctgccgctgcacctggacagcgtggacgccgtgtacgagcgcaccagcgaccacaagatcgtcttctttaaaggagacaggtactgggtgttcaaggacaataacgtagaggaaggatacccgcgccccgtctccgacttcagcctcccgcctggcggcatcgacgctgccttctcctgggcccacaatgacaggacttatttctttaaggaccagctgtactggcgctacgatgaccacacgaggcacatggaccccggctaccccgcccagagccccctgtggaggggtgtccccagcacgctggacgacgccatgcgctggtccgacggtgcctcctacttcttccgtggccaggagtactggaaagtgctggatggcgagctggaggtggcacccgggtacccacagtccacggcccgggactggctggtgtgtggagactcacaggccgatggatctgtggctgcgggcgtggacgcggcagaggggccccgcgcccctccaggacaacatgaccagagccgctcggaggacggttacgaggtctgctcatgcacctctggggcatcctctcccccgggggccccaggcccactggtggctgccaccatgctgctgctgctgccgccactgtcaccaggcgccctgtggacagcggcccaggccctgacgctatgacacacagcgcgagcccatgagaggacagaggcggtgggacagcctggccacagagggcaaggactgtgccggagtccctgggggaggtgctggcgcgggatgaggacgggccaccctggcaccggaaggccagcagagggcacggcccgccagggctgggcaggctcaggtggcaaggacggagctgtcccctagtgagggactgtgttgactgacgagccgaggggtggccgctccagaagggtgcccagtcaggccgcaccgccgccagcctcctccggccctggagggagcatctcgggctgggggcccacccctctctgtgccggcgccaccaaccccacccacactgctgcctggtgctcccgccggcccacagggcctccgtccccaggtccccagtggggcagccctccccacagacgagccccccacatggtgccgcggcacgtcccccctgtgacgcgttccagaccaacatgacctctccctgctttgtaaaaaaaaaaaaaaaaaaaaaaaaaaaaacaaaaaaaaacaaaagaaacaacaaacagaaacaacaaaagacaaacaagaaaaaaaaaacaaacagcgcgaggcgcgcgcgcgctctaagaaacgggctctccgatgggggcgacacacaagatagacgcacgccccccacgaggtatttattgcacacaaaagcgtgccccaaaaagagagagagcgacgaaaatatataaaaaggcgacgaaggcggagggcagagcggatatataccacaacacgctgacagaacgcgggagaaacacacagcggcaagacaggaggagaacactctgagtgcagcgaaaagcacaccaccaatacgcggcgggcgagcgccacacacaccaggcggagcgccacaccacgccagccacgagcggagcgagcagaaagaaacgcccccacccagaggcagcaacagacagacaacgaccaaggcgcggaagaagcaggagggaccacaagacagcagcgaacaggcgcgccgcaggacaagcgcaaagttgggagcgcacggaacaagactaacgcgcgcacgacct

SEQ ID NO: 719711 - DNA, 2871 bp, Homo sapiens
aagagacaagaggtgccttgtgggcagatagggggctgggagggggcctgcccggaagcagtggtggcccgtggcaggcttctcactgggtaggaccgggccctctgttgcaccccctcaccctgctctctgccctcaggagtggctaagcaggttcggttacctgcccccggctgaccccacaacagggcagctgcagacgcaagaggagctgtctaaggccatcacagccatgcagcagtttggtggcctggaggccaccggcatcctggacgaggccaccctggccctgatgaaaaccccacgctgctccctgccagacctccctgtcctgacccaggctcgcaggagacgccaggctccagcccccaccaagtggaacaagaggaacctgtcgtggagggtccggacgttcccacgggactcaccactggggcacgacacggtgcgtgcactcatgtactacgccctcaaggtctggagcgacattgcgcccctgaacttccacgaggtggcgggcagcaccgccgacatccagatcgacttctccaaggccgaccataacgacggctaccccttcgacggccccggcggcaccgtggcccacgccttcttccccggccaccaccacaccgccggggacacccactttgacgatgacgaggcctggaccttccgctcctcggatgcccacgggatggacctgtttgcagtggctgtccacgagtttggccacgccattgggttaagccatgtggccgctgcacactccatcatgcggccgtactaccagggcccggtgggtgacccgctgcgctacgggctcccctacgaggacaaggtgcgcgtctggcagctgtacggtgtgcgggagtctgtgtctcccacggcgcagcccgaggagcctcccctgctgccggagcccccagacaaccggtccagcgccccgcccaggaaggacgtgccccacagatgcagcactcactttgacgcggtggcccagatccggggtgaagctttcttcttcaaaggcaagtacttctggcggctgacgcgggaccggcacctggtgtccctgcagccggcacagatgcaccgcttctggcggggcctgccgctgcacctggacagcgtggacgccgtgtacgagcgcaccagcgaccacaagatcgtcttctttaaaggagacaggtactgggtgttcaaggacaataacgtagaggaaggatacccgcgccccgtctccgacttcagcctcccgcctggcggcatcgacgctgccttctcctgggcccacaatgacaggacttatttctttaaggaccagctgtactggcgctacgatgaccacacgaggcacatggaccccggctaccccgcccagagccccctgtggaggggtgtccccagcacgctggacgacgccatgcgctggtccgacggtgcctcctacttcttccgtggccaggagtactggaaagtgctggatggcgagctggaggtggcacccgggtacccacagtccacggcccgggactggctggtgtgtggagactcacaggccgatggatctgtggctgcgggcgtggacgcggcagaggggccccgcgcccctccaggacaacatgaccagagccgctcggaggacggttacgaggtctgctcatgcacctctggggcatcctctcccccgggggccccaggcccactggtggctgccaccatgctgctgctgctgccgccactgtcaccaggcgccctgtggacagcggcccaggccctgacgctatgacacacagcgcgagcccatgagaggacagaggcggtgggacagcctggccacagagggcaaggactgtgccggagtccctgggggaggtgctggcgcgggatgaggacgggccaccctggcaccggaaggccagcagagggcacggcccgccagggctgggcaggctcaggtggcaaggacggagctgtcccctagtgagggactgtgttgactgacgagccgaggggtggccgctccagaagggtgcccagtcaggccgcaccgccgccagcctcctccggccctggagggagcatctcgggctgggggcccacccctctctgtgccggcgccaccaaccccacccacactgctgcctggtgctcccgccggcccacagggcctccgtccccaggtccccagtggggcagccctccccacagacgagccccccacatggtgccgcggcacgtcccccctgtgacgcgttccagaccaacatgacctctccctgctttgtaaaaaaaaaaaaaaaaaaaaaaaaaaaaacaaaaaaaaacaaaagaaacaacaaacagaaacaacaaaagacaaacaagaaaaaaaaaacaaacagcgcgaggcgcgcgcgcgctctaagaaacgggctctccgatgggggcgacacacaagatagacgcacgccccccacgaggtatttattgcacacaaaagcgtgccccaaaaagagagagagcgacgaaaatatataaaaaggcgacgaaggcggagggcagagcggatatataccacaacacgctgacagaacgcgggagaaacacacagcggcaagacaggaggagaacactctgagtgcagcgaaaagcacaccaccaatacgcggcgggcgagcgccacacacaccaggcggagcgccacaccacgccagccacgagcggagcgagcagaaagaaacgcccccacccagaggcagcaacagacagacaacgaccaaggcgcggaagaagcaggagggaccacaagacagcagcgaacaggcgcgccgcaggacaagcgcaaagttgggagcgcacggaacaagactaacgcgcgcacgacct

SEQ ID NO: 719712 - DNA, 793 bp, Homo sapiens
tttttttttttggaaactcgctttgtcacccaggctggagtgcaagggcacaatctcaactcaccgaacctccgcctcccgggttcaagcgattctcctgcctcagcctcccgagtagtggggattacaggcgcctgcctccatgcctggctaatttggtattttatagtagagacagggtttctctcatgtgggtcaggcgggtctcaaactcctaacctcgtgatccgcctgcctcgacctcccaaagtgctgggattacaggcatgagccaccatgcccagccaaagatcattttttaatatagacttcagcccttggtaaatatggtaccgggggcagtatagagtaggaaacacaagtatacgttaacacactttggttctacaaattaacctttaaaacatataataacggctaaacaatagagtgctgtacacttagggaaacatttagtgccatttgggaaatgagatctggtgccataaatacagtctgaacggaatatacattggttcacaaattatggctgtccacggactatgagttacagccagaacaacttttaaacccagcaaccatttcaacagctccgtagtgtgatcaaaaatgatcatccagaattctcattataatccttgtgtacagaggtacacataatcctgggtggtccttaataaagggcacattttcaatccccccaaattggcattccattttccaggacacaacattcggcccagaactctcgaatttccttaatattcttacctcgccaacacggaacggttgg

SEQ ID NO: 719713 - DNA, 2969 bp, Homo sapiens
agcggagtctggcgggggcgccgcggagagcggagggcgccgggctgcggaacgcgaagcggagggcgcgggaccctgcacgccgcccgcgggcccatgtgagcgccatgcggcgccgcgcagcccggggacccggcccgccgcccccagggcccggactctcgcggctgccgctgctgccgctgccgctgctgctgctgctggcgctggggacccgcgggggctgcgccgcgccggaacccgcgcggcgcgccgaggacctcagcctgggagtggagtggctaagcaggttcggttacctgcccccggctgaccccacaacagggcagctgcagacgcaagaggagctgtctaaggccatcacagccatgcagcagtttggtggcctggaggccaccggcatcctggacgaggccaccctggccctgatgaaaaccccacgctgctccctgccagacctccctgtcctgacccaggctcgcaggagacgccaggctccagcccccaccaagtggaacaagaggaacctgtcgtggagggtccggacgttcccacgggactcaccactggggcacgacacggtgcgtgcactcatgtactacgccctcaaggtctggagcgacattgcgcccctgaacttccacgaggtggcgggcagcaccgccgacatccagatcgacttctccaaggccgaccataacgacggctaccccttcgacggccccggcggcaccgtggcccacgccttcttccccggccaccaccacaccgccggggacacccactttgacgatgacgaggcctggaccttccgctcctcggatgcccacgggatggacctgtttgcagtggctgtccacgagtttggccacgccattgggttaagccatgtggccgctgcacactccatcatgcggccgtactaccagggcccggtgggtgacccgctgcgctacgggctcccctacgaggacaaggtgcgcgtctggcagctgtacggtgtgcgggagtctgtgtctcccacggcgcagcccgaggagcctcccctgctgccggagcccccagacaaccggtccagcgcccccaactggattcccagtgaagttgtcttgagagctggtattgccagaggccggtagaagctgtgaccttgtgccacccagccccagatgtcacaggaccgcccaggaaggacgtgccccacagatgcagcactcactttgacgcggtggcccagatccggggtgaagctttcttcttcaaaggcaagtacttctggcggctgacgcgggaccggcacctggtgtccctgcagccggcacagatgcaccgcttctggcggggcctgccgctgcacctggacagcgtggacgccgtgtacgagcgcaccagcgaccacaagatcgtcttctttaaagggaccagctgtactggcgctacgatgaccacacgaggcacatggaccccggctaccccgcccagagccccctgtggaggggtgtccccagcacgctggacgacgccatgcgctggtccgacggtgcctcctacttcttccgtggccaggagtactggaaagtgctggatggcgagctggaggtggcacccgggtacccacagtccacggcccgggactggctggtgtgtggagactcacaggccgatggatctgtggctgcgggcgtggacgcggcagaggggccccgcgcccctccaggacaacatgaccagagccgctcggaggacggttacgaggtctgctcatgcacctctggggcatcctctcccccgggggccccaggcccactggtggctgccaccatgctgctgctgctgccgccactgtcaccaggcgccctgtggacagcggcccaggccctgacgctatgacacacagcgcgagcccatgagaggacagaggcggtgggacagcctggccacagagggcaaggactgtgccggagtccctgggggaggtgctggcgcgggatgaggacgggccaccctggcaccggaaggccagcagagggcacggcccgccagggctgggcaggctcaggtggcaaggacggagctgtcccctagtgagggactgtgttgactgacgagccgaggggtggccgctccagaagggtgcccagtcaggccgcaccgccgccagcctcctccggccctggagggagcatctcgggctgggggcccacccctctctgtgccggcgccaccaaccccacccacactgctgcctggtgctcccgccggcccacagggcctccgtccccaggtccccagtggggcagccctccccacagacgagccccccacatggtgccgcggcacgtcccccctgtgacgcgttccagaccaacatgacctctccctgctttgtaaaaaaaaaaaaaaaaaaaaaaaaaaaaacaaaaaaaaacaaaagaaacaacaaacagaaacaacaaaagacaaacaagaaaaaaaaaacaaacagcgcgaggcgcgcgcgcgctctaagaaacgggctctccgatgggggcgacacacaagatagacgcacgccccccacgaggtatttattgcacacaaaagcgtgccccaaaaagagagagagcgacgaaaatatataaaaaggcgacgaaggcggagggcagagcggatatataccacaacacgctgacagaacgcgggagaaacacacagcggcaagacaggaggagaacactctgagtgcagcgaaaagcacaccaccaatacgcggcgggcgagcgccacacacaccaggcggagcgccacaccacgccagccacgagcggagcgagcagaaagaaacgcccccacccagaggcagcaacagacagacaacgaccaaggcgcggaagaagcaggagggaccacaagacagcagcgaacaggcgcgccgcaggacaagcgcaaagttgggagcgcacggaacaagactaacgcgcgcacgacct

SEQ ID NO: 719714 - DNA, 191 bp, Homo sapiens
tccactcacagtgttaggggccttagagtgctctccatttatgctcactgatttacacatggaagaagtggtaggcagctatggatttagaacacagacctgtactcagccccatccactttacatcagtggagggtacatgtagcagcgcctgaggcagaaggaaggccgagactggggcaagtataaat

SEQ ID NO: 719715 - DNA, 123 bp, Homo sapiens
ggcatgcagagctcctggcagtcaggctagggctgcccgccctgcatctggcgaggcaggcagctgctgtgcgcagtgatggagctaggacgaggaaacatgcgcagacaccccgtgttccca

SEQ ID NO: 719716 - DNA, 220 bp, Homo sapiens
tgctgagattacaggcatgagccactgcgcctggcctatattcagatttttatacaacatatctttagattttttttttttccttaagagatgggatctcactgtattccccaggctgttcttgaactcctgggttcaagcaatcctcccgtcttggcctcccaaagtgctgggactacgggtgtaagccaccctacttggcctctttagaaatttttta

SEQ ID NO: 719717 - DNA, 893 bp, Homo sapiens
agcctctgggtgcgcattccaaccttccagcctgcgacctgcgtgagaaaaaaaattactatatttatctatgacccagccccaaaaaaagggttaaaaacccaaaaaaataaaccctatggtcatcgctgtggagcagaccgcccacatgccatttgccccagatcaaacgagcgacaaggacaactttacgtaaaaagaaagacaaagttaaatacattttacacaacaaaaccacccacaaatttttgggacatcgctgggcttggcacacaacaaagttacaccactggtggagcatttggtgagagtcgcgacaaagcgcaagaacacaaattatcagcaccctcaataattgtggatcatacgaggagctcacacagtttatatggatgcgcaaagtaggtttacccgcaaaaaagtgtgagactatatatgggcaggttatgaggttgggcacacgacaagaaaggccaagaccccgaaaaaggggcgcaaaaaagatattccccatgtggggcgcaacatgtggtcggcgacacaacctacagcgagaagaatgataatttgtcgtcgggggggcagaatgacaagtgacacaccaccaccaaggaacacgaccccaccccccgcgaccagcagactagtaacacaaacaaaacatacacacagaaacaaccaaccacaacacaaacagaagcgaaagcagtaggagcaagagacatgagagcatacgaaaccaacgacagaggcatctacgtatattaatcgagcataagaatcaatcaccgccaagcgatttctatgggtgggtgcacggaacatggacaaaaacgagtcagggcgatatatgggtgcacaaacagcttcccaaacagggacgtcgaaacgta

SEQ ID NO: 719718 - DNA, 309 bp, Homo sapiens
ttaaagatgttcttatttgggggccaggcgtggtggctcatgctgtaatcccagcactttgggaggccgaggcaggcggatcacctgagatcaggagttcgagaccagactggccaacatgacagggtgagaccccatctttacaacaaatacaaaaattacccaggcatggtggcacacgcctgtaatcccagctactagggaggatgaagcaggagaattgcttgaacccgggagtgggagattgttagttgagttgagatcgcacaactggcattccaacctggggggacagagagaaattccttt

SEQ ID NO: 719719 - DNA, 276 bp, Homo sapiens
aaatgacccagacacagcaatagcacagaagccccatcatatacatcccaaaactggtaactgagtagtgtatacgtgttatagtgtgacccttgtcagaacatagatacaaagggctacccaaaatgccgggcacaaatgtgtctgcaaacagatggaagtaaacagatgcactggaccaaatgcttcatgagtcagttagatttttgcaatgcaacttttgcatccattgaaactagccatgtcatggagtgtgtggactggggtaactgtgag

SEQ ID NO: 719720 - DNA, 992 bp, Homo sapiens
gctgctatccttcgagggcgtgccagcgcctagagaggaagtcgttcaagaggagcaaaaatgagcctgcggctctgggaccgtgcaatggagcgtggggtgttagagcaggatcacagacaggatgagtccccgggcagcacctcctgtgcaggcggacattcctagtgacctgtcattggtctcctcacaacggaaacacagcttgtgagttgcatgtcgagctgttacactaagtgtgtttgaacgtcccattactgtggacttagctggtaatctcatctaagtgcctgtctgtgcgttatggtcgttgtcttgccgcgtgtctgtccccgatttctccgttctgtcctgtgtttctcactgcttccgtatgatgttgccctagctgagacaccatggggttcctcggagggagcaggaggtggccggcgtgggggggcgttagggctgcggtgctgcgtcatttttcctttgctttctctttactttagacacttggtccaactccagtgcgttctcctttgcattccctcagtgcttgctcttctgacctgcatgttgagttctgtattgctggggcttccaacaaaaaccatgagtcactgacagagggaacagcagagaccttgtgtggtattcagctgtgatggatactagagaatcagaggcaccttgttttcacaactaggctcaaaatatctgcagggtcctttccattcctatttagagcggagtcctgggctccatgagccccttccgaagtggcctgtccaaaggcagataggcgtcacaccgagaaaccagtgaggctcgcacggacggggctattgggaacgagccgctaaggggagtccccggcaccaagcatgccgtgcatgcctgcatgcattcgacacgtgcatcttcgcacccgctcatcactcctttcagcctcctgatgcacgctgcctctctggctggtgcatattgccacgcggtctccccgcggc

SEQ ID NO: 719721 - DNA, 472 bp, Homo sapiens
tttagatcgaaaaaagggaatcttgatcttcaaacacaagggcgcatttctgaaggtgcaactaccacttatacacacaaattcaaggccttcatttgcagggggagcctcagtccaggaggaaacggagctgtatgaaccccaaagtgtgatgtgccaggtccaaattgttcatcctgaggctgctcgcatatcaggtagctcttgttgtacatatggatctcggggttgaagtttcacactgagcatcacactgtgcctcccaaggggcagcagaccaagccttggaactgggttccacagggcgacttgttcacccattagttgaccgtactggaccagatcaacacacatataaccctcctaacgtgatctactatcagcgaggcacagtggcctcctgagagaaatccctctacttagggaggcaggctgataactagacgtcaggcgtacgtgaccaagctggacc

SEQ ID NO: 719722 - DNA, 121 bp, Homo sapiens
cctggtgattacggagcttatagtgttagatcaaaatatctgtgatgtaggattcaaggagagaaaacagccagtattcttttttaccttctttgtgttactgtctcttctgtgctcactt

SEQ ID NO: 719723 - DNA, 214 bp, Homo sapiens
ccgttagagcggctgttgctggtttgatccctggtctgccagtgggttaggatccggtgttgctgtagctgtggtgtaggctggcagctgtagctccaaatggacccctagcctgggaacctccataagccgtgggtgtggccgtaaaaattaaaaaaaaaaaagtggataaattaaacataggagaccgctcttaccgagaccgctcttaccg

SEQ ID NO: 719724 - DNA, 592 bp, Homo sapiens
agcagagatcacaaatgcttggtttgagccagcaaccagatggtgaaatgggacccttgccatggtaaaaacaagccttgcggcctgttaccccgtggggaggtggttcccaaagatgtcaatggtgcctttgccaccatcaaaaccaaggggaccatccagtttgtggattggtgcccccctgggttaaaggttggcattaattaccagcctccccctggggggcctgggggaaacctggccaaggtacaaaaagctgggggcatgttgagcaataccccagctgtttccaaggcctggggttgcctggcccccaagtttgccctaatgtatgccaagggggcctttgttccctggaacgtgggggaggggatggaggaaggcgagttttcaaaggcccgtgaggaaatggctgccccttaaaagggtttatgggggggttggggcaaaaagtgctgccggaaaggatgagggtgaaaggtattaacctgggggggggacttttacactcctttgtttggggacggttttatttttgtttgggaaaggtttattgccggaaattgttaataaaattgaggtttccctttta

SEQ ID NO: 719725 - DNA, 625 bp, Homo sapiens
  misc_feature (611)..(611): n is a, c, g, or t
  misc_feature (625)..(625): n is a, c, g, or t
ctcccgccctgctcgatcgctctccagcttgtgatggacggctacctgcgggtcgtgcgctcgctctgcagagcctcaggctcgcggccggcctgggcgccggcggtcctgacagaccccacctcgcaagagcagccgcggcgccactatgccgaccgtattatcacggcagttcatcaaggagaagctcattctgtcccacgtggacatccagctaaagtatttagacctcgggctcccaaaccgtgaccagactgatgaccaggacaccattgactctgcactggtcacccagaatgacagcgtggctgacaagtgtgccaccatcagccctgatgaggtccgagagtgacagttcaagctgctgaatatgtggataggtcccaatggaactatccggaacatcctgagggagactgtcttccgggagcccatcatctgccaatacattacacgcctagtccctggatggaccaagcccatcaccattggtaggcacgcccatggcgaccagtgcaaagacacagacttcgtggcagaccgggccggaactctcagaaggtcttcactccgatgcagaggtgacaagaatgggtgtccacttgcccgangcggtgtggctggn

SEQ ID NO: 719726 - DNA, 245 bp, Homo sapiens
ccacctcagcctccccaatagctggggccacaggcacgcatcaccacattggcgactttttggatttttgtagagatggggtttcaccgtgttgctcaggctagtctcgacctcctgggctcaactggtctgcctgccttggcttcccaaagttctgggattacaggtgtgatgcccccacatctggctctgggtcttcttattcagtggtgtttggtgggacctgagctgtatttagtctcgtg

SEQ ID NO: 719727 - DNA, 255 bp, Homo sapiens
tcttctggagcaattgcttaacttccgggagcagatttccaaggagggacagagaggcttttcaaggaccattcagtgccccaagcttacccaccagagagctctctctagaggaggggatgcgctatacacaccccagtttttcgtacacctatacacagggctctaacaaaggctctttttagcagcagtttaacagggccctgcggctcccctggggcgcgcctcccctctgttgctgttggtttgcgttgg

SEQ ID NO: 719728 - DNA, 668 bp, Homo sapiens
ggtttttgaatactctgaacacggggagcatcacacttgaacttttccctgatcggcgcactgcgagcaacaggccacagaatgttaaatgaaggcaccctacccacaattctactatccacattactaaatgggggctcattgaacatctagacccttatcacaacacgagagcacaacagacgacgcctgccagtatgacacgtgctcatcataagacttatctacacactagcagtgagcaacccgaccgccagtgaccatgccgaatgggagttcgaacatagtcataactataagagcgtgtacatcgcactgcacactggaataggacacaattcgaaacacagaccatagcatagtgaagatgctcaccaattcgaagtatgtaggaacaacatatgacgcactctcccctgagcagtacacagccatttcgacaccaagaccctacttataaccatcctgatattatgaagtggaacagaagactcctctgtacgaatcgaccgacttatacagctcctatggaaaaacggtcgtacagtcaccctaagagtacttatatgatgtgtggccgacccattacaagatctagggtgcccccttaaacctaagaagagaactcgagtggttatagatttatttaaggacggctcctttttgcc

SEQ ID NO: 719729 - DNA, 279 bp, Homo sapiens
gaggctgactagaggatcccactgtgagctccttgtcttgtcttatggtcactgtacttgctccaaatcccagaattcttttcccccaaatattcacgtctttgtttaaaagattatcttcgtgccagggacggtgactcaagcctgtaatcccagcactttgggaagccaaggggggtggatcatctgaggtcaggagttcgagaccagcctggccaactaaaaataaaaaaaaaattagctgggtgttgtggcaggcacctaaaatcccagctactc

SEQ ID NO: 719730 - DNA, 462 bp, Homo sapiens
gttgattgagctcaaggggacaagagggctgaggaccggctccacatggggacaaggccaggctttctggcctctggttccagccagcatcagattggtgggggcaaattctcagtccaatcaccctggccgcaggcctggcgtgggaggatgtggcaggctctgtctccttctggggttcctggtctggaggagtctccccaacagcgccaaagctggctgttttccgcccaaagccccagaactttgaggtgagaggcaaatctaccctgaatgcacctccctcctaggctgggtgaggtcacgcagacacagaagggcaggacagaactccccatcttctgggggccaattcgtctgggcactgtgcggtcagcttcctttttaaagtgccagtatcggtggggcaggaagggactctcagggctgagcagagccttctccagcgcggctcagtcgaac

SEQ ID NO: 719731 - DNA, 1651 bp, Homo sapiens
  misc_feature (1)..(1): n is a, c, g, or t
  misc_feature (329)..(329): n is a, c, g, or t
  misc_feature (517)..(517): n is a, c, g, or t
  misc_feature (601)..(601): n is a, c, g, or t
  misc_feature (1341)..(1341): n is a, c, g, or t
ngtctctcattaattaaacgtattttatgttattagttattctcttttcgtctttcttctgcatattctttttctttcctctttctcttcattttatactttcttgtatttatttctctttgatttttcctattatctctcaccttattatcttctatcaacaaatttttctttatattatagctttcttgttttccctacctatttttctttcatttttttctctaccagtcgttcttatttcacaatatgttctttttatatattggtcacatattccccacccgctttttttatcgtttttttcctctaatttttgtattcctaanccctccttgacccacttgggggcctccaacgagcgatacacttttatctttcctttaaaattttctctgtcgcctggggttaaaaccccccctttttgttgacaaggggcccacacatgagaaacttgtgacaccctgagagtgccaaccctgggatttgtttagagaagatgtcagtatgtcccctngtgtgttggaaaccccatgggagtggaaaagaaatctttcccagggggatgcttgttctcccatctggtaaaatttctccacgngggtaacccacatgttaggaaagagttggaacccacttgtacctggtagtgcccacccaccacaaagctctttgtttgacttcccagcgtggctttgccccaggggaaattttagttctccgtagaaaagcccacctttgggaatattttccccttgggagacccaaaatatttttgggcacacatatttgaagccccccctctcggggatttcccggtttgtacacacacgccccacgatatgtatacgccaactgtgtgcccccgcataccctttaaccccataggacgcctcataataattaaattttctctttgtgtgcccacacaatgggagtggagacgccccccacattgtgtcacaaggccacaatccctgtgttctacatatattggagaaagagatggaaagctttggagattgagatatattttttgtcgtttatattggagatgaaaaacttcacccacacggtctcgccacagttttatatatacctttgggggcaaaagagtgtattcccataggatatgctcccagattttgtcccagagagctcatagatatgcgcccctggttacccatatacaccacacattttttgatatatatgtataggaaagattccacgcctgtgggatacccccagagagacgtcttcgtctccgaatagtctcacctgagatgagaagagaagacagtatccacagtttgagatctcccccgagaaaattatatnttggagatggaagaatctcgggagaaaagtaatcttggagggagtctcctgcctttttgagatatcccattatcctcttactgagcgcccttgtttggcacataactcacgagtcactcactgagaaaccaaatattgtgaatctggaggtgtagccacaaaccttgtaactacccacaaacgagaggtcactcactcacataatttatgataaacttagtttggaggaagaagagagtgaaagttaaccacattactatgaaccccagcttattatagatctttcccattgggaagaaccaagccaaga

SEQ ID NO: 719732 - DNA, 141 bp, Homo sapiens
ttgtttcttttaaaccactcacagcagtgcaacatccaggttcttccacgaacagcatatgaatcattgcagcagttctttaacaggcaacagagggggcaagcaaaaacacagcccacagtgacataaacacattgcaca

SEQ ID NO: 719733 - DNA, 374 bp, Homo sapiens
gcggccgcctactactactaaattcgcggccgcgtcgactgatgtgtgtaaagtgcaatatcatagcctgagctgataagaaattaatggaggccgggacgtggtggcttatgcatgtaatcccagcactttgagaggctgaggtgagtggatcacttgagaccaggagttcaggaccagcctggccaacatggtaaaacctcatctccactaaaaatacagaaattagccaggcatggtggtgcacgcctgtaatcccagctacttgggaggcagaggcataagaatcacttgaacctgggaggcagaagttgtggtgagccaaggtcacaacactgcactccagcctgggcaacacagtgagactctgtctg

SEQ ID NO: 719734 - DNA, 212 bp, Homo sapiens
  misc_feature (155)..(155): n is a, c, g, or t
gtaacaaggacgttacccattcacgtattccgtcgctatatcaaggaccctacggcattgtacctgctgggattctatctctcgaatacaagaaaggagaaagccagactgacattgagattacacgagaggaggactttaccccaattctccanaatggaggaagagtacatccagcagctctttcaggacatatccactgaagcccgatg

SEQ ID NO: 719735 - DNA, 169 bp, Homo sapiens
agatcccaaaggaccgtaggtagggcaataaaaataggttggctgtaacaatgactatgcttttaacatgaccattcagttagtactgtgaagaacttgtcttacctccatgagaagcgctgctcggcagttggtggacaccgcagccttggcgtcactatcagatcca

SEQ ID NO: 719736 - DNA, 121 bp, Homo sapiens
ttctacacggatcccccattcgaaccctagtcactatatactttgtgattggcagtggcgacgcatttgaatggccttaactgcagagaagtgagagcacttgatatgtggcgcatatgct

SEQ ID NO: 719737 - DNA, 1473 bp, Homo sapiens
ggtgatgtgtatggcagaagagcactggcgatgcccggacgtgcgtgccacgcgagtaagatactgcgtggacacgccgacgacccagcagtccagtcggtggtcaatggctagaagatacctgcgcatagaagggcagtgggccgcaggtgtgaaccctctgtgtacgcaagcttcattattccctcacgcataggctagtgagcgtagcgctgcgtcattgcacgtaccaaacttcgttgccgtggaaacgctacgcatgagagcgcagggcactacgcgacccgttgagattgggagatatcgtaatgtgcacgtgcgagatgcgcatagtaaagtcacatgatgtaaaagcatggcgcagcacacgcgcaaatggaggtggaggcttgtgtgtgtgggcccacttgcgtatgcggcgcgtgcgccaggtatcgtatacaaggcacctttccaataacgggttcctattcgggagagcgcaatgccttgcattcgagttcgttcgctttcttgcctatgcccccctattcaatccgaagatatgaagttgtggccactgacgtggagaaaagcgattggatctcctcaatagaggtgcccagaccaccatggtggggggccatcgagaacaagtcttgagattgacaccctcacacggggccaattctttcactctcaccgaagttcactatgtcaccaaatccagaacaaatgccgaagcaagtgtgtaaggttccagacggacacatcgcggtccacaggcaacgagggcgggagaaccggtgttagttattgcacccacgtggaaacatctcttccagcttctgcggaccgcatcgccccagagcattacagcggattctctcaaggccacccagggcggtcttatttcgcgccggagtggttggagtataaggggaccagctagggttaggcgcacacgacgttacataagcaaattcctctagacccctgttgaattcccatatgttgggagcaccttggaacattttgtccacggccggctcgagcacgttgtcggccatgtccatgtattgcccgaccgtgcctgtggtgaggcggctcataggggcggacctgacgggtgtgtccttcatgtaggggaggatgtgcctccggggaccgactggggtgttgcaccgaacagaaaggtgaacaagccgtaatggggtttatccagggccccaatttgggtaacacgcgtttggtcgttaggagcacacaaaggataggatcgtcggccaattccagagggaatttgaagaagtcgaagttgcggcagaagtaccccccctggggcgcgttcttggcccaccaggagggctcgccaattccgttttgcactaacttacaggcgtgtgcctgataccaggaacatccttgggtgggggaaacttggcgcccccaagtggaccaatttttggtctctcgggcgagttgttccaacta

SEQ ID NO: 719738 - DNA, 299 bp, Homo sapiens
aggtgctggaatacggctataacacataaataactataagaaacaaatcacacaataccatatcagaaactcaacatatctaaataacttaattcacaataagttagtcataaaagtcatgctacaacaactcctgtgtataacaagataataaccaaggtatacatagatataaaaatgtacttcagaatggagtaggttctagaagccaaagatactggaatgatagctcgtaatcatagactagccaacctaggtcgacagttctaaagccgaaatatctagcagataataccata

SEQ ID NO: 719739 - DNA, 600 bp, Homo sapiens
ctcctcagattgacagacccagatcctcatacctataagagatcgtacctcctaagtcactggaagacacatctcctcattcctgtaccagatggtaagctcctcagactttgacagacgcagatcctcatagcctgtaccagaattcctaccctcctctagatattgagcagacaccagaatcctcgattcctcgtaccagagtggtaactctctcagcacatggactagtcctagaatcctcactaccaggtgccagtatcttacctcctttagacatggacagacccagatcctcataccaggacccgatcccacctcctcagatactgatggacacagatcctcatacttgtacccagcctcacttccccagacactagaagactcagggcttcatagctgtgccagatgctatctcctcaggcactggaagcccaagggcctcaaacctgagtccaaactcacctcctcaaacactggaagacgcagatcctcatatctgtgccaggtgctacctcctcagacatggaagacccatatcctcatacctgtgccaggtgctacctactcagacacgggaagaaccagatcctcata

SEQ ID NO: 719740 - DNA, 173 bp, Homo sapiens
tcacaggacttaactttggtcaggagtcagagcacagcttgtgctgagatggtgaaaccccgtgcctactaaaaatacaaaaattcgccgggtgtggtggtgcatgcctgtaatcccagctatcttgtggagcctgaggcaggagaaatcattgtggaccccggaaggtggag

SEQ ID NO: 719741 - DNA, 246 bp, Homo sapiens
gactaggctaacactgtacctgctgcataatgattgaactagaaataactttgcaaggagagccaaagctaagacccccgtaaccagacgagctacctaagaacagctaaagagcacaccctctatatagcagaatagtgggaggatttataggtagaggcgacatacctaccggcctgtgatagctagttgtccatgatagaatcttagttcactttatatttgccacagaaccttaaatgccct

SEQ ID NO: 719742 - DNA, 340 bp, Homo sapiens
gaggcgatctcagaggatttccccaggcgcttgttaggggacgtgatccagcgctttgagaggcggggcttcacgctggtggggatgaagatagctgcaggaaccagagagcgtccttgctgagcaactaccaggacctgcgaggaagcccttctaccctgccctcatccgctacatgactctgggctagtgtggcatggtctgggaagggtacaatgtcgtccgcgcctcgaggccatgataggcacaccgactcggatgaggtgcccaggaaccataaggggtgacttcagcgtccacatcagcaggaatgtcatccacgccaacaagcgcctggggg

SEQ ID NO: 719743 - DNA, 352 bp, Homo sapiens
tgattcatggatttgcattttatggatatagtggttcagtagaatactcattgtctcagtaacagccgtacactgcagtagttctcagaccattagtttatagagcaactacacagctgtagtacatgtatgcaccaaactcaccaggtaggacattactttaactgcagtggtatcaatacttcctagttgagcagataaaggatccttacgttttttcctataaggcctaaattgaaattgttaaccaaggaaacagggtcagccttgaaaaatcaaggaattcattgtacctaataactgaagtaaaaataactagttgttcaacttttcctaaactcaaatctatttt

SEQ ID NO: 719744 - DNA, 953 bp, Homo sapiens
  misc_feature (12)..(12): n is a, c, g, or t
  misc_feature (875)..(875): n is a, c, g, or t
gagctctgaatntaattcgagctttccatgctatagaaagtctcctgcagagtgatggtgatgattttaattacatcattgcatttttccttggaacagcagcctgcctttaccagtgttatttacttgtctactacaccggctggcggaatgtcaaatcttttttgacttttggcttaatctgtctatgcaacatgtatctctatgaactgcgcaacctctggcagcttttctttcatgtgactgtgggagcatttgttacactacagatctggctaaggcaagcccagggcaaggctcccgattatgatgtctgacaccatccttcagatctattgccttggcttcagggggataaggagggaacatatcataactgcactgtgatgaagaagctgttccccacagaggagaagctctgctttctttctctccaactttccttttttaaaatcagcatgatgtgcctgtgagcatggaagaaggaagtcctctcagaagaatgttggccatgagactatcattcagaggaggaggggatttctctcttcaaggccataacagtggaagaacagtcatatgccattggaagtcttggccagcagtcctgaatccttcctgaagagttcagaaaatagatgtggtattgctctgaggaccaggcaggaggaactctacaacctgagtttgcctttgtgaggcattagtatagaccaaataaaaagctgcagaaattggaaagtttatgttttaaataaatgactgtgataaatttcagattatttgcacatttatggtactacgagtttataaagtccaagatggtgtgaaaaaataaaaattaagattaatatgattatatgatagaggaaatntggtatatgtgagtgagttgggagaaaaaaaaaatattgcccttttggcctagcggggagtcttgggcctttccttat

SEQ ID NO: 719745 - DNA, 1180 bp, Homo sapiens
  misc_feature (12)..(12): n is a, c, g, or t
gagctctgaatntaattcgagctttccatgctatagaaagtctcctgcagagtgatggtgatgattttaattacatcattgcatttttccttggaacagcagcctgcctttaccagtgttatttacttgtctactacaccggctggcggaatgtcaaatcttttttgacttttggcttaatctgtctatgcaacatgtatctctatgaactgcgcaacctctggcagcttttctttcatgtgactgtgggagcatttgttacactacagatctggctaaggcaagcccagggcaaggctcccgattatgatgtctgacaccatccttcagatctattgccttggcttcagggggataaggagggaacatatcataactgcactgtgatgaagaagctgttccccacagaggagaagctctgctttctttctctccaactttccttttttaaaatcagcatgatgtgcctgtgagcatggaagaaggaagtcctctcagaagaatgttggccatgagactatcattcagaggaggaggggatttctctcttcaaggccataacagtggaagaacagtcatatgccattggaagtcttggccagcagtcctgaatccttcctgaagagttcagaaaatagatgtggtattgctctgaggaccaggcaggaggaactctacaacctgagtttgcctttgtgaggcattagtatagaccaaataaaaagctgcagaaattggaaagtttatgttttaaataaatgactgtgataaatttcagattatttgcacatttatggtactacgagtttataaagtccaagatggtgtgaaattggttctttttacttttatatttttgcttgaatcttaactctggaaatcacctgatgtagaagaagactgtgatgagctcgtctgtggaacatcacaagtatcgaaaatacagtaatggatgtttcctttctaatccacatttattgtttcttttgaaatcacgtctaaaaaatatgactcagactatagccgttgtttcccaaacttcagtctctttagtactacttgtattattttcttaatatttatcttttaaattttaaagtttttttaaaaaaatgaatcctgctccaagtggaaaaccagtatcagtttgccataaataaaaggtaaccacaaaataaaa

SEQ ID NO: 719746 - DNA, 90 bp, Homo sapiens
cgttgaatggccattcaccaccttacagaggctctgtcctgagttcctgtctcttatccctctggggaactggactagttaaactagatg

SEQ ID NO: 719747 - DNA, 1076 bp, Homo sapiens
  misc_feature (24)..(25): n is a, c, g, or t
cgcctgggcgactctacggatccnntcgggtgacacggctggcggaatgtcaaatcttttttgacttttggcttaatctgtctatgcaacatgtatctctatgaactgcgcaacctctggcagcttttctttcatgtgactgtgggagcatttgttacactacagatctggctaaggcaagcccagggcaaggctcccgattatgatgtctgacaccatccttcagatctattgccttggcttcagggggataaggagggaacatatcataactgcactgtgatgaagaagctgttccccacagaggagaagctctgctttctttctctccaactttccttttttaaaatcagcatgatgtgcctgtgagcatggaagaaggaagtcctctcagaagaatgttggccatgagactatcattcagaggaggaggggatttctctcttcaaggccataacagtggaagaacagtcatatgccattggaagtcttggccagcagtcctgaatccttcctgaagagttcagaaaatagatgtggtattgctctgaggaccaggcaggaggaactctacaacctgagtttgcctttgtgaggcattagtatagaccaaataaaaagctgcagaaattggaaagtttatgttttaaataaatgactgtgataaatttcagattatttgcacatttatggtactacgagtttataaagtccaagatggtgtgaaattggttctttttacttttatatttttgcttgaatcttaactctggaaatcacctgatgtagaagaagactgtgatgagctcgtctgtggaacatcacaagtatcgaaaatacagtaatggatgtttcctttctaatccacatttattgtttcttttgaaatcacgtctaaaaaatatgactcagactatagccgttgtttcccaaacttcagtctctttagtactacttgtattattttcttaatatttatcttttaaattttaaagtttttttaaaaaaatgaatcctgctccaagtggaaaaccagtatcagtttgccataaataaaaggtaaccacaaaataaaa

SEQ ID NO: 719748 - DNA, 959 bp, Homo sapiens
  misc_feature (12)..(12): n is a, c, g, or t
gagctctgaatntaattcgagctttccatgctatagaaagtctcctgcagagtgatggtgatgattttaattacatcattgcatttttccttggaacagcagcctgcctttaccagtgttatttacttgtctactacaccggctggcggaatgtcaaatcttttttgacttttggcttaatctgtctatgcaacatgtatctctatgaactgcgcaacctctggcagcttttctttcatgtgactgtgggagcatttgttacactacagatctggctaaggcaagcccagggcaaggctcccgattatgatgtctgacaccatccttcagatctattgccttggcttcagggggataaggagggaacatatcataactgcactgtgatgaagaagctgttccccacagaggagaagctctgctttctttctctccaactttccttttttaaaatcagcatgatgtgcctgtgagcatggaagaaggaagtcctctcagaagaatgttggccatgagactatcattcagaggaggaggggatttctctcttcaaggccataacagtggaagaacagtcatatgccattggaagtcttggccagcagtcctgaatccttcctgaagagttcagaaaatagatgtggtattgctctgaggaccaggcaggaggaactctacaacctgagtttgcctttgtgaggcattagtatagaccaaataaaaagctgcagaaattggaaagtttatgttttaaataaatgactgtgataaatttcagattatttgcacatttatggtactacgagtttataaagtccaagatggtgtgaaattggttctttttacttttatatttttgcttgaatcttaactctggaaatcacctgatgtagaagaagactgtgatgagctcgtctgtggaacatcacaagtatcgaaaatacagtaatggatgtttc

SEQ ID NO: 719749 - DNA, 832 bp, Homo sapiens
  misc_feature (12)..(12): n is a, c, g, or t
gagctctgaatntaattcgagctttccatgctatagaaagtctcctgcagagtgatggtgatgattttaattacatcattgcatttttccttggaacagcagcctgcctttaccagtgttatttacttgtctactacaccggctggcggaatgtcaaatcttttttgacttttggcttaatctgtctatgcaacatgtatctctatgaactgcgcaacctctggcagcttttctttcatgtgactgtgggagcatttgttacactacagatctggctaaggcaagcccagggcaaggctcccgattatgatgtctgacaccatccttcagatctattgccttggcttcagggggataaggagggaacatatcataactgcactgtgatgaagaagctgttccccacagaggagaagctctgctttctttctctccaactttccttttttaaaatcagcatgatgtgcctgtgagcatggaagaaggaagtcctctcagaagaatgttggccatgagactatcattcagaggaggaggggatttctctcttcaaggccataacagtggaagaacagtcatatgccattggaagtcttggccagcagtcctgaatccttcctgaagagttcagaaaatagatgtggtattgctctgaggaccaggcaggaggaactctacaacctgagtttgcctttgtgaggcattagtatagaccaaataaaaagctgcagaaattggaaagtttatgttttaaataaatgactgtgataaatttctagcgtgtctcaatggtcacctgccatctcgcaccaggtcgtctcgttcacaggga

SEQ ID NO: 719750 - DNA, 325 bp, Homo sapiens
cccccccccccccccccccttttttttgggggggggggaaagggccccctctttttcccccggggtgggggggggggagggggggcctaaacccccccccttttttttttttgcgcaaaaagggggggggtaaaaaaaccttggggccccccttttttcggggccccccccccccccttgggcccggggggggggtttttgggggggcagggccccccctctccccccgtgtttttttttcccccccaaggggcccttttttttttttaaagggccccccgaagggggggtgttttcccttgtttttttttttttttggggggga

SEQ ID NO: 719751 - DNA, 202 bp, Homo sapiens
gggatcatgccactacactccagcctgggtaacagagtgagattccatctacgaaaaacacaaaaacaaaaacaaaaaaaagcaaggaaggaaggacgacaaggaaaaggaaggaaagagaaatgctacacatagccaggtgcagtgagattacaggcatcatgcctataatcctagcactatgggaggccaaggcggtgga

SEQ ID NO: 719752 - DNA, 130 bp, Homo sapiens
tttaggtgatactctgcaagttctgggcaagagatgcagactccgtctcaaaaaacgcttgtccttaagtgggtggcttcccccagatctataaagtagtccagaattggaggtcttagtgtcagtcaac

SEQ ID NO: 719753 - DNA, 171 bp, Homo sapiens
  misc_feature (17)..(17): n is a, c, g, or t
  misc_feature (84)..(84): n is a, c, g, or t
  misc_feature (105)..(105): n is a, c, g, or t
gccctatactccctttncaaatttcccccaacacaagggggggccctccccccccccatttacaacataaaaccctcattcacnggagaaaacaccctcagggtnaaacacctatcccccattttcctcctatcccccaaccccggcatcattaccggggtttcctcctca

SEQ ID NO: 719754 - DNA, 902 bp, Homo sapiens
gagtaagaaatttaagcacccatagtaggcctggaaaaggagccagcaattacgaaagcgttcaagctcaacacccactacctaaaaaatcccaacacatataatcggaactcctcacacccgattggaccaagtctatcaccctatagaagacactaatgttagtataagtaacatgaagacattctcctccgcgaataagcctgcgtcgagattaaagacactgaactgagtaggatgaagcagcccaatatctacaatcactccaacagaggtcagttattaccctcactgtcgaacccaacgacaggcatgcgtcgataaggaaaggttagaagaaaagtaaacaggaactcggcaaatcttagcccgcctgtttaccaggaaaggatcacctctagcatcggaccagtattagaggcagccgtcgtgcccagtgagacatgtttaacggccggggtaccctaaccgtgcaaaggtagcataatcacttgtcccttaattagggacctgtatgaaatggctccacgagggttgcagctgtctcttactttggaaccagtgaaattgactgcccgtgaagaggcgggcatgacacagcaagacgagaagaaccctatggagctttaatcttattaactgcgaaacgagatacctaacagaacccaaaggtcctaaagtaaccaaaactgggattacagaatatagagggggcgactcggagcagaaacccaactcggagcagtacatgctaagacgttcaccagtcaacgggaactactatactcactgatgcaataatttgaccaaggaggaagtaccctaggatacagcgcatctattctagagtctatcaacatgggtccgactcgcagtgcatccgcatgcaggggccgaaaaag

SEQ ID NO: 719755 - DNA, 521 bp, Homo sapiens
  misc_feature (255)..(255): n is a, c, g, or t
  misc_feature (301)..(301): n is a, c, g, or t
cgtcctcctgctgctctcggcggccctggccctgaccgagacctgggccggctcccactccatgaggtatttctacacctccgtgtcccggcccggccgcggggagccccgcttcatctcagtgggctacgtggacgacacgcagttcgtgaggttcgacagcgacgccgcgagtccgagagaggagccgcgggcgccgtggatagagcaggaggggccggaatattgcggatccggaacacacagaatctgcanagaccaatcacacgagacttaccgcagagaaccttgcggatcgcgnctcccgctactacaacctagacgcgcaggccgggtctcgacaccgctccagaggatgtacgcgctgcgaccgtggggccggacgggcgcctcctccgcgggccataaacccagttcgcctacgacggcaaggattacatcgccctgaacgaggaccctgacgctccatggaccgcggcggacaccgcggctcagatcacccagcgcaagtgggaggcggc

SEQ ID NO: 719756 - DNA, 250 bp, Homo sapiens
ttgtaagatccggttttagcaaagaacactgctaagtcagtttggcaacactgctaagtcagtcagtcagtgtcctcagtgtctgatcaccctccatatctgatcaggttcctcattctctactgtcccccaggtgatgtctgattaccttggcctatgtgaacccaaaatatctgagacaggtctcaatcaatttagaaagtttattttgctaagattaagaacatgcccatgacacagcgggtaccga

SEQ ID NO: 719757 - DNA, 386 bp, Homo sapiens
cttgagtaccctggttatctagctaccccagacacagacgtcttagaagtgcgctatgactgtacgtgattaagcagacagacagttgccgtgggtgtcatcaaagcagctggacaagaaggctgctggcagctggcgaggtcaccaatgtctgcccagataagctcagacaggctaagatgaatattatcccataaatacctgccacccctactcttaatcagtcggtggaagaacggtctcagaactgtatgtatcaataggccattaaagtttagtactaaaagactggttaactgatgacaatgcatcgtaaaaacttcataaggaaaggagaatgtatcgtggaccacttatggtttactttttggcgtgtagaagttgaa

SEQ ID NO: 719758 - DNA, 269 bp, Homo sapiens
  misc_feature (21)..(21): n is a, c, g, or t
  misc_feature (29)..(29): n is a, c, g, or t
  misc_feature (100)..(100): n is a, c, g, or t
  misc_feature (147)..(147): n is a, c, g, or t
  misc_feature (173)..(173): n is a, c, g, or t
  misc_feature (184)..(184): n is a, c, g, or t
gatccaagtacaatcccttcngcccccanaagtctgttcctggtgtaaatggatccaaaggtttcccaaccatccttatgatccagtgatattccagagngctacattgagcctgtacaaagcttatcctgtaacactgtgccctantatacaacttctactttcgtcagtcntaacatctacntctctgattttctgatttctatttcacagggtattgttttatatacactggcagcagcatacaataaaacttagtatgaaacttt

SEQ ID NO: 719759 - DNA, 226 bp, Homo sapiens
aggcgtctaggtggccaagaggcatggagcagctctctccattccctggccgaggggcatacataggtttccagacatcgaagggggtgggtacatgaaaactataggagtgcgaaaggagtaatacgcatactgcaggtggtgtttacctgccactctgtatcttccaggccctaacatatggcgctgagcaaaactccataaatatgacctctatgtcacatga

SEQ ID NO: 719760 - DNA, 107 bp, Homo sapiens
gcggccgactactactactactgctcgaattcaagcttctaacgatgtacggggacatgtgctttgggatgagtgtaaataaaacggggctgtggcttgggaaaaaa

SEQ ID NO: 719761 - DNA, 110 bp, Homo sapiens
gcggccgcctactactactactactgctcgaattcaagcttctaacgatgtacggggacatgataattctttgtatataaaataaacatttgaaaaaacccttcaaaaaa

SEQ ID NO: 719762 - DNA, 293 bp, Homo sapiens
ttcaattgggcacagaatgttcagctacctgtcttagactgcgacggtttggctgagctgagggatcataggacgtgcttttcatggtgttgaatttcgttagaacatttcttcagaaactctggagcccacgtgccaggtctggagtctttgtttctcccactttctagttagctgtccttcacccaatgttaccttcatttctgggcctccatttcctctctctgcaagtttctgtgcccttttcccgggttccgagcttcaacttcgatatctcatcggtcatgctcttt

SEQ ID NO: 719763 - DNA, 305 bp, Homo sapiens
  misc_feature (281)..(281): n is a, c, g, or t
  misc_feature (287)..(287): n is a, c, g, or t
attcggcacagaaagaatagaaagaataaaagcaaatatgtcaatctctgttcacagaaatgtatgagagatgagacatattcacttataaatgtaacacaaagtagaaagtgtcaactgaaatcaaagggacagagctaaagtactctttcctttgagttaaagagaagctatattctgggtgcagcctcattttggcttcagtttggataattagtctgtctagcctgtcactggcagaatctgaaataattggaacccataaggagtaagattttctngaggangcactgcaaagtaagatg

SEQ ID NO: 719764 - DNA, 739 bp, Homo sapiens
tagtagaaacggggtttctccatgttggtcaggctggtctcgaactcccaacctcaggtaatccgcccgcctcagcctcccaaagtgctaggattacaggcgtgagccaccacgcgcggccccatcatacgaagttactgaagttatggcgtaaacattctggttttagtcatccttgaggatcgttttaactccttgatctgtaaaactggtcttaagcatcttaacatgttacatcacggggtttaagctcagatttccaaagagccatatttttggatgcatatttccagttgaattccaggtgtgaatttccagtggtacttggcattcggattcttggatattggaactgggccatcgtgggggtgcaactctcgtaagactaaaggggacctacgtaaatacgaacagaggataaccagttctaccaagaaactttaccaaccaaacctccccgggttctttttgtcagacttgcctttggcctttcaacctcttaaacttgtacagggagagattcaaggttccctattattcggcttggactcacattactaaattgaccactgtgggactccatggaactctttacagtgtgttcccgatttacaataaggcgccagtgtttacagttttccgagtagtctcagcaagtgggatctgtagtttcaggacctggttgtaaaagatcaagatccttaatgtgtccaagaagtggcgttttccatttaagggg

SEQ ID NO: 719765 - DNA, 287 bp, Homo sapiens
cgctacaacataaattgtttccatgagctcctttccgttcatctcatccacagccttccccccaaaaaaaagaaaaaaaaaaaatcacaaaactttcaacttacagttcatttcctttaacaggttaagacaaatttggtaaaggtcacaacaagctaaaggacaaacccattcccaaaaatctcaagggtttgggcgacaattatagggtaaccaatttaaatactctcaaaccttaaggcattaaaagtgcaaaataacgtgaaaattataagaaacagtgtcaa

SEQ ID NO: 719766 - DNA, 216 bp, Homo sapiens
gatatccccagatcttctgtggtccacttgaggatcttgcccaacgatagggtcctggccagtctggcccggccaggctgggcttctcgagggggactccagctgcccttctgccccatagaggagacgactcagatcccgttggcctcattcccgttacgaggcaacgtgagggtcatggttctctagacgtcccttcatgtgtaaaacatgtca

SEQ ID NO: 719767 - DNA, 240 bp, Homo sapiens
agatcccttaccgactagcccgacagccactgcttcttgtaagctttgtctctaagcttctgtccagctacaaacccacccaggtgccagtggtctttgtgacaccagtgagccaggtgtacacattccctggcaggagtaggaggttgacatgaagcaggagtgcgatgcacaggccaggtaccagagtatgatcaggaggatgctggtgttccccacttgtcgggctagtcgggtggt

SEQ ID NO: 719768 - DNA, 170 bp, Homo sapiens
  misc_feature (115)..(115): n is a, c, g, or t
tcttacccgagtggtaaatctctggtacgacccttttaaaaagacatgtaaatatatactcagatttatacacttggtgttttcttcatagctatatacagagcccccagtttgnggctggggagggcgtgtgggtggcagtcagcggcgtttgagtccgccattggcaa

SEQ ID NO: 719769 - DNA, 538 bp, Homo sapiens
ttctttgttttctgctaccctgctgtgtgaagctgtgaaatgaagccatagccttctcttctcaggcgtggactgccatgagtttcacaacctcaggccctggtgtaggcttctacatcagaaccctgggcgtcagcaaggcgctgcacaaagaggcctgcaacagaagccaaacacttgggtttaagtcctggaccggcacagccttggtttctcagagtgttgaagataaggggaatgagccccagaagtggttctcaagcaggggtgtatggcaaagtcacccacggaacttaaaaaggatttcccaggactcacatgcaacctagcagatcaggttaccatttcctagggtggggctcaggcatatggtttaaaattctccctagttgattttgatgcctccccaccctcaccctatgatgacaatgtttagactggctgatctgtagctgctttcactccaaggatgaatcctggaagttgcagttagctgcagtttgcataacaaagaaaatgcagtagacagcaaaaaaaa

SEQ ID NO: 719770 - DNA, 177 bp, Homo sapiens
agatataccagacctcgtacaagcctatagtattctactacatacaattacaaaggaacagtagatagcaataaaagtacacaaaactccactatgctgtatagttacctatatatactacctagggtacagcacagctatatattactagcattcattaaacaccctatcttatag

SEQ ID NO: 719771 - DNA, 318 bp, Homo sapiens
ttttttggggggggggtttttaagtttggcccccccgaaaactttgggcgggggacccctttgttttccccccgccccccccccccgcatggggttgtttgttttttttcggcccccccccccccctttggaagcccctttttttaacttttttttggggggggtccccccttaaaggtggggtatcctaaaatcccggggcccccttaccccccccccaaaattttttggggggggccctttttttcctttttaaatgtttgggggacctttcccccgaataatttttgtccatttttttccggggtttttttggta

SEQ ID NO: 719772 - DNA, 238 bp, Homo sapiens
atacagccggaagccacatacatactgccggaagcctcaacagagacaagtaggcgatggctgactccttcttactacacaaggtatataatattagacacccacgctaagagtcccatcacactaatcactccgaggtaggcgagcacaggagcgcaaaccttaacacattcattctgtgatccaaataagtaaatcgtaaccaccacaacctccatagtataggcaaccggaagta

SEQ ID NO: 719773 - DNA, 125 bp, Homo sapiens
gcccaggtagatttggagttatttattggttcagatgtaacttctgtgataactctatttctttaagcaaattagacttgaattattaataagtataatctaggccagatttagaagacacacgt

SEQ ID NO: 719774 - DNA, 148 bp, Homo sapiens
gaggtaataaacttgtattggcacacagtcccattcattcatgtacaactgtctatgtctgccctctcaaagacagatttgggtcatcatgacaaagaccttatggtctgcaaagccagaaatatttactatctggcccattacagaa

SEQ ID NO: 719775 - DNA, 400 bp, Homo sapiens
gaaagttcgagatacatgtgctgaatttaagctgagaaatcagaataagatcattcatgtataacagagggacaggactgcctgtgttatttttatgccattgttgtggtggatagacagagtttggaagacatctcacaggtagtggataggttatatatcattattgcactggtgatggaagcagaacttatagcttaagtctcggaagattgaaggattactatgttgttacacttgtgattgggtgtatccactgtgaggccatatgagataagctgtaaggatgcatggatgtaatcacatgaatcaggagggcggtacttgcttgataacgtataccgttatcgaaggactgggacgtgatggagaatgtgtctcttgtgagcacatagcacgt

SEQ ID NO: 719776 - DNA, 480 bp, Homo sapiens
  misc_feature (426)..(426): n is a, c, g, or t
  misc_feature (469)..(469): n is a, c, g, or t
ccacaggggtcaaacatcagggagtttaaaaagccgttcaatgagcaatctctttcataccggtctgcatctgttttcttggcctccctgatcaggcagccacggttagctgtcagtggctccggagttactttcctagcttttcaacggatattcaagccagttcaaacgtgcgtcatagccctggttttggcagatagggtgtgctacccatccatcttccacctggctgtgtccatggggcaaacatcaggggttcttcccacacggtgcacgccagacttcctcagggttacatcatttattccactcacgccctggtcctggacatctgcgtggattgcaggcctttgccatgacagacagcagtgtggtgaccttaaacggtccgcctgtgtgccaggactcaacaaacgcgtcccaggnaggggcactcgggccatttcagtaggaatcagtaatgtgccgntcaaccgacat

SEQ ID NO: 719777 - DNA, 591 bp, Homo sapiens
  misc_feature (2)..(2): n is a, c, g, or t
  misc_feature (4)..(4): n is a, c, g, or t
  misc_feature (8)..(8): n is a, c, g, or t
  misc_feature (61)..(61): n is a, c, g, or t
  misc_feature (74)..(74): n is a, c, g, or t
  misc_feature (80)..(80): n is a, c, g, or t
  misc_feature (124)..(124): n is a, c, g, or t
  misc_feature (207)..(207): n is a, c, g, or t
  misc_feature (209)..(209): n is a, c, g, or t
  misc_feature (498)..(498): n is a, c, g, or t
  misc_feature (515)..(515): n is a, c, g, or t
  misc_feature (517)..(517): n is a, c, g, or t
  misc_feature (531)..(531): n is a, c, g, or t
cntnggangttgctgcagtgttgtgagttggaagctggggagctcggcatggcggtccccntgcagccatgggncctcgngttgggcagagcggccggctcgatggcccgtggtgctcagtganagcggcccgtcgcgctacgtgcttgggatgcaggagctgttccggggccacagcaagacgcgcgagttcctggcgcacacaangngttgcactcggtggcctggaagttgcgacgggcgtcctaagcctcggggtccttcgacaagacggccagcgtcttcttgctggagaaggaccggttggtcaaaagaaaacaattatcggggacatggggatagtgtggaccagctttgttggcatccaagtaatcctgacctatttgttacggcgtcttggagataaaaccattcgcatctgggatgtgaggactacaaaatgcattgccactgtgaacactaaaggggagaacattaatatctgctggagtcctgatnggcaaccattgctgtangnacaaagatgatgtngtgaccttattgatgcaaacacaccgttccaaagcagaagacagttcaattcaagtcacg

SEQ ID NO: 719778 - DNA, 842 bp, Homo sapiens
tgttctgtgcatgcacacctgcatgcctgatgccctgatgctgggtttgctggctgccatttgctgtgctgcttgggcttgctcacactgtgtgccttgctcctggcctgccctgctgccccgtgccaccatacccacagtacccctgctggctaccccacatgcttcgctgccctgaccccatggtgtgccctgcccgtgaccacactgcctcgttccatctgactgtttttcctgccacaagcaggatcaaggaactgactgcactgtcgaaagcttcctcagttctgacgtgaagttccatgcaagttaccgttttgcctgacttgcggtgcttcctcaggcacttagatggtgactgcttgcctgtgacacgttgttaaaggcagggccattttgacttgcggcgagtctcgacactgaccgaacttctaacgaagagctaggagaacaaccgttgttgttgaccttacctttcgtcgacgccaccccttgagggatgttctatccctgggctctgtgtgccttgtgcttggaatatgcgacactctggcttggaaccctgctgccatattgcttcggcttgtccacttggacttgccatccctaatgctttggacgatactaacgatgtgtgccctccatagatgttggcaccaagtgtctgttgcacactggcttccctgcctgccgcggatgaccggttaatgccagtcctgccgacccttacagacgctcggcttggagaggtggccgtcagtatacacctttgagggcccagctccccatggcttggcggtgacacacttctagagatcgggtggagtggcagcagccgtgct

SEQ ID NO: 719779 - DNA, 1052 bp, Homo sapiens
ctgtctttcttgtctgcagggtgagaatgagcgagaaggggggccatgaagagttggttggccgctgttgttgcgaggtgtttcttgccggtcgagaggttttttttttcctttcgtgttggtgccgaaacacaggggcccactgggttgaccctctctccaaggggtgtcgttcccccccagaggcgtagggtttgacattttggtggtttcctgagtatctcgggggaaccccctctgtcttggggacactccgtggtcttgggcccttggcgcccacagtggggtgtgcggtttattgcgcccaatggggactggctttttatgtcatttggttaatcgtgggcacccctatttgggaaggtgtggggaaagtcacaaaagaaatttggggaagatcaacacacaacccaggctgtccacgaagtgttgggacacccctggaaggggaggaaaatttttgggagcgcccaacaaggttcttggcccctcctaatggccggtgggggagccacgcataaacattttgcccaaaacaccccggaccacccagaggggggctaatagggccgggtgccccaacccaacgagaccagataaggctgatgcgccagcggggccaggaagaagttttaaataagggaacacccaagcgcttgcaccgaggagagggaggagcccccgaagaaaatgacccagcgggaagacttcacacagggttaccaaccagagaagttgtgggaacacctcagccccagccaccacatggtggccgaggcctctaacctgctcaccacaagatacaccatagttttagcacccaaaacatccatgggttatgggcccaaaaaacattgagggcctgtgatttgtgacattaattgtatacaccagggtatattttagtttttgttttgtgggaagaggtaaagaccaatccccccaaggggtttaatagtaggaattttttttttgcccccccacgctgttggttgctaaaagtgcccgtctgatcgtgaccctggataaaagtcttttttttaatgggccca

SEQ ID NO: 719780 - DNA, 237 bp, Homo sapiens
atgtcgttaccatgacacagttgcctaacaaagccattctcagaagatagcccaggcattatgcaacacatgactgtcattggtgacagggaaggagtcacttgtgccattttcaatgttaaaattacatcatgagattgcaagcattcagtaacttgcaagctccaatttgaattctagttgtctagctatttccaccacatctgcaattactttctccactgaaatcttgttttc

SEQ ID NO: 719781 - DNA, 385 bp, Homo sapiens
atacactcatgtgtcaggctctgtatggaaaaaatgcctttgtgtgctgcaaccgagttgcttccctcttttccccacataactgcagtgtgccctgatctcgtcttggcacgtacttacctgtattgaactatgatgaaagattctctctgcttacctatttgaattgtaggagagcaataagacaggtgtgctacctagagctcctctgtgactttcttcaccatctctctcttttacccctcacatctctgcagctgaaatagtttttgtaggaagcataaactttggaatacccttagcatttataggagataattggagcaggatgggagtcttacttggacttgatgagaaattttaaaaagttgttaggtctacctgg

SEQ ID NO: 719782 - DNA, 183 bp, Homo sapiens
gaggaagcttttgatcttaatactagtatctatatcacatggtgttgatgaccaatcatctaacatcaatctattttacaatagggatttcctcctgacaagttcttacttgctacctactacccacaaaggactgatatgtacagtaccgggattgttcaattttagcaaagattccatgca

SEQ ID NO: 719783 - DNA, 119 bp, Homo sapiens
caagcacatggcggccaccgcgggggctccctgctgcaacacgtgggtggggaccaccgggggcactcggaggagggaggcgaggagcagcctgtgacgcccgcccccgccctgtcttg

SEQ ID NO: 719784 - DNA, 899 bp, Homo sapiens
gaggcaaaaggaaggtacgcgagcgtccctgacggtccccgccgcctgtgtcttcacctctcttttgccagccccttcagggagcggacagtctccctcttcctgtccaccctcggtgggtgttgcctcgcagccccttcctactgctccggtcccagtctcttcgcgcccctgggagggaggtgggaggctctaggctccaagacgccgtcgcttgagattgtctttgggctatagacgttttttttctttaaacgattactaaactatagcaggaagttgataagacagtatcatccatcagaagcatcatttcatcacttcaatttgaagaaccaggggtgatatataatagcattaaaggtgctgggtgatgtgttaggagcatattagaaggaatggttagtctaatatggctggcatgagtcatggtggtgagacatcagagtctatatttggggggccaaaaattaaagtggaagtcaccaaaaggaaatcttatatataatagcaatatttgggttgaacccaagggaggtagataagaactggaaaccaattgactcagaaagaaggaaggacaggtgttagcattatgacatgttttcacgcgtggaatcgaggtccataacggtgacttcaggaggaaaaagtttccaagaatttatcaaaacaggtcattgataaataatcgtccagaattgaagtagcctgaaacatattattagaatagacaaggtgactgaataaatttttgggtaaaacttataaatataacttcccaaattattacctgccaaggaaagaagcattagatagccggttagttaggagagacgctatgagacaatttggggtgtacaatagagtaaggcctgaaaaaggggcgggattaatag

SEQ ID NO: 719785 - DNA, 128 bp, Homo sapiens
gtaagatcctgtctttacaagcataaaaattgctgggcatgggtggctacacctctagcccagctgctcaggagtttgaggcaggaggatcactgagcctaggggtttaaggctgcagtaagttaggt

SEQ ID NO: 719786 - DNA, 633 bp, Homo sapiens
gagcggggtggtggtgctgggagtgtcgtggacgccgtgccgttactcgtagtcaggcgtgcggcgcagtgcggtggggcaggcatagcgcacagtgcgccttagcagcagcatgcagcatgcagcagcatcggaggtacccccgaccgtcgcagccccgcgctggatgctagacagcccatcagctccctctgatcttcctcccttcagatcgcaccatggatgatcagctgaacgaagaacagattgctgaagttcaaggaagccttctccctattagactcaccgatggcgatggcaccatcacaagcaaaaggaacttggacactgtcatgaaggtcactgggtcagaaccaacagacgctgcacttgcatggatactgatcaactgaagtggatgctgatggtaatggcaccatagaacttccccgaactttccgacctactgactggctatcaacacaatgaacagcatcacagatcgtgaacgaacgaaactccagtgcaggcctacccgagtcttttgaacacaggactgcgcactgcgttatactcaaggtgccagcagaaactaacgtcacgtcattgacacacacctcacggagaaacaactaacccagactgaacgcaaag

SEQ ID NO: 719787 - DNA, 411 bp, Homo sapiens
  misc_feature (368)..(368): n is a, c, g, or t
  misc_feature (376)..(376): n is a, c, g, or t
tgctcatcaggatttcagacagataagtctgataatcaagtagtagaactctagccacttggtaaagttcaaaggcattccagtcccagggaatggggaattgaaaggagcaggaaagacgttcatttggccgggcgcagttgctcatatctgtaatcctagctttttgggaggctgaggtgggcagatcaccagaggtcaggaattcgagaccagcctggcccacatggcgaaaccttgtctctactaaaaatacacaaattagccgggtgtggtggcacacgcctgttaattatccagcttacttcggggaggcttgaggcagggagaattcctttgaacccggggagacagagtttgcagttagnccaagttnttggccaccacatttccaacctggggccaacagag

SEQ ID NO: 719788 - DNA, 421 bp, Homo sapiens
gctaatgaacagctcaactgtctggcagagccaggctccttctgccatgatacagtttggatgtttgtccctttctaatcttatatggaaatttgatccccagtgttgaaggtggggcctggtgggagatgttcctgttatcgggatggatccttcatgaatagcctggtgccatctttgtggtaacaagtgagttctcacttgattagtttctgtgagaactgtttgttaaaaagagcctggtggcacctccctcccttcttcctccttctcttgctatgtgatgctgctgccctttgccttccgtcatgagtggaagctccctgaagcccccaccagtagcaaatgctggcaccatgctgcttgtacagcctgcagaactgtgagccaaataaacctcttttctttataaattaaaaaa

SEQ ID NO: 719789 - DNA, 161 bp, Homo sapiens
gcgtctgatgcgcagttccctttatagcgcggcaagccgaatcctagagctaacccgcagtaggaggagaagttgcttctcaccaatagctgagcgttcagatgtcaggacgtacctacgtgtctgttccagtctcgtcgctgtctggaagttctagcagt

SEQ ID NO: 719790 - DNA, 100 bp, Homo sapiens
tgcctgcatgcatcagactagccactcctgccaggccgctggatggtccttctccagttagaatgcaccatggagacgtggtgggactccagctacgtga

SEQ ID NO: 719791 - DNA, 1059 bp, Homo sapiens
  misc_feature (193)..(194): n is a, c, g, or t
  misc_feature (220)..(220): n is a, c, g, or t
  misc_feature (405)..(405): n is a, c, g, or t
  misc_feature (489)..(489): n is a, c, g, or t
  misc_feature (720)..(720): n is a, c, g, or t
  misc_feature (738)..(738): n is a, c, g, or t
aatgatccatactatgacccaaagaaggatcaaaacccagacagtagtgtcaagcatgcgatgtgtaagctagtgatcgtatgtaggaccttgagggataacctagcacttgtaagtatgcctaaacacaactcttatttagcttacagccttatgtttttggtaattttcttggtagactaggtaatttttnnttaaaggacaggaaactgatattttnaagaccaattgttctacctagcattttaactagtttttctgccagctatgttgaatgcacaaattctgtcacgcatgttcattcattgctacataatttggttcttctggaatatttttatgtagctcttggagtacagctatgaaaattaacaactgttaaaggaaataccttttttttttttnggtaatttttcccttgaagaaccaaagtatttttccagcgggtggtggaatagggtaaagtccgctgggattagctgtgccttncattacttggttacagaaatgcagtgacttatactaagacaatttatggtttaaaaaaaaattgggcaagacacctattatggttaaaaatttccagtatgaccacacccaataactgttataagagtgtcaatgggataatggtgttaaggtgacatagttaactgtaaagtaccctgactcagtatagtatacgggtaccacagtgaggtgaataacaacggggatttncagaagttagcctgaatnttaactgtattttaaaatttaacctccattaactaagcatctcttcttggtgggaagggtctaccttctgtcttccctggaaaggatgaattacacatcatttgacaagcctattttcacgcttatgtaaatttaacctccattaattaagcattctttctggggggcagggtctaccttctgttccctggcaaggttgcatttcgctcatttggccacgctatttccgttattgtgccgtaggcctgtttggtgtggccgcaattgtttttcactctatttgcgggcctcgaagccggttgggcagttttgcgtgaccat

SEQ ID NO: 719792 - DNA, 1326 bp, Homo sapiens
  misc_feature (911)..(911): n is a, c, g, or t
  misc_feature (956)..(956): n is a, c, g, or t
  misc_feature (1040)..(1040): n is a, c, g, or t
  misc_feature (1094)..(1094): n is a, c, g, or t
  misc_feature (1112)..(1112): n is a, c, g, or t
gccgacagagcaagactctgtctcaaaaaaaaaaaaaaatacaattaagaggtgtatactgatgattcttcccactcatttgtttgtccagaagtaaataaatgtcggaagttttccaagtaactatttgttttttggggggttttttagttagagtcttggtctgtcacccaggctggagtacagtggcaggatctcagcttgctgcagcttccatctcccaggttcaagcgatcatgtgcctaagcctcctgagtagctgggatcacgggtgtgtaccaccacgcccagctgatttttgtatttttagtaaagactttcgccatgttgtccaggctggtctcgaactcctggcctaatgatctgcccacctctgcctcccaaagtgctgggatcacaggcatgagccaccgaacccagccttattctgcttaaatttaacgtgttttttgacttcttaattaacttggtcatatactaaatgtgatctcctgtggattaccacatgcattaaaaaatttttcaagctgggcctagtggcgcacacctgcaatcccaacactttgggaggccaagagaggaagattgcttgagcccaggagtttgagaccaatctaggcaatgtagtgagaccctgtctctaatttaaaaaagaaaaagaaaaaaacattcccagtggcagcctgcctaagactgtcttaccttatgttaaggaagtcaggtatttaaaatgttacatatgccggcgcagtggctcatgtgtgtaatcccagcactctgggaggctgagacaggtagatcatttgaggtcaggagttcaaaaccaacctggtctacatggtgaaaccccatctcaactaaaaatacaaaaaatacaaaaaattagccgggcgcggtggctcacacctgtnatcccagcactttgggaggtggaggcgggtggatcacaaggtcangagatcgagaccatcctggccaacatggtgaaaccctgtctctattaaaaatacaaaaattagctgggcgtggtggcgcatgcntgtagtcccactactaaggaggctgaggcaggagaatcacttgaacccagagtngaggtgcatgaccggatnacactgcattcaactgggaagaatagatcctctcaaaaaaaaaaatcaaaattgcggctggggcacgcgaactcgcatgggacccggaaccacacacgcgaaggggggaatacgcactcacggtagaacattgcaaatacaagtgtggacactagaaacggaccactcatcaactatagtgaacatctctgttttattgtgtaaataacctagg

SEQ ID NO: 719793 - DNA, 1540 bp, Homo sapiens
  misc_feature (1191)..(1191): n is a, c, g, or t
  misc_feature (1195)..(1195): n is a, c, g, or t
gattgttctgtcatggtgggagagaacacgtcgccggtgtgagaagatgttgtgggggggcaacacccttttgtgtgttgtcgccgctccccgacaatggaatgtgttgaacgaccagatgggtctcccggttgttggtttgtgacacaaccccatcggggaaaactagtttggggggagtggcactagtagatagtgtagatgaagcccccgccgcgggtgttttttgtgattgacaagatggtcagttctggggtaaaagtactcaggttgaagtagttaaattggtgggtggcttttagagactggttggccaacgagagacgctttgtgtggggtggttgttgattaacccaaacggtcggtttgtccccttgtgccggcggcccccgttgtgaggccgcctttctcttttatggagaatatgggcgcacgtcctttatgggaagataataaagagatgtgtggtgttttctcttatggggggagggagtttgctaacatgaaagtgtgtccatgctggggaggatgggccaacgtgttgcgccctacatgacgatcggcgacgagagcagcgcgtttaggcggtcgacaacagtggttaagttaaagatgtgttgccaacaatcttggagaggaaatgggccacataggtgtggccaccattttggagaggggagtgtgtcacaacgacctgtgacacacaatagaggagagcttgtgagagagacatcgtttgtggtccaaacaaatatggcgccgctttgttaaagcaacatgcgcgtatgagatggagacaagagcttttcttgtggggagaagtgaatatattgctctctctttcggcggcgcgtcttgtgtatcacatcacacgggtggcgttgtctgtgtgtgggtttcccacgcgcgtgggggcacaccccgtctttcgtcgtaagggtcttttgtgtgtgtgtgtgtgtgtgggcgttataatgtggggtgtaatgtgtgtgccgtcgtataatatatgtgaagagggggggtcacaacagagagacactttcacacgagatttttccacgcgagagatagatggtccgcagacacgcgcgtgtgcacatatagatgtgagagacccgccgcgtcggcgtgtgtgtatatgttgtgtgtgttcttttgtatagatgtatactcagttgtataaaggcncgcncacgtgtgagcgctcttctggagatattctcgagaagtggtgataataacctcccactatgtgttctctcgagaaacacacacgagaataacttcttaacttgtcctcgataattttccactagagctcgcctttcccacggtggagttgaggagaacactaagagaagaatgtgtaacaccactttatgtttaacttctaaatgagttcttttaacccctcgtgtaagctaattctttgtgtgtttcctccaaactttattaattaccacgtgattgcatttttagcatcccagttgtaagatgaataatattaaacagctacccagtgttggtgatacctcca

SEQ ID NO: 719794 - DNA, 632 bp, Homo sapiens
  misc_feature (282)..(282): n is a, c, g, or t
ggtggggcgaggcatgcacggagatgaagcgcggagtacgaccaggtgtcttgcaatcgctggttccgccgtagcaaatgttctcaacggggtggacagctccgtgtgggacccggtggcatccgactctcttgcagagcgctaccatgcagggttgattcactacatacgcgaatgatgaggtagacaagcagattcgcatatgagaagcgactaggatgcttcagtcggtgcgcgatgggtccatggaagagacacgccgtcgtaacaattctgcttttntatagaaactcgtgtgaacccgagatgcgaccgcctttggacagggggagtttttcccgctatacgatgcacgagcagaactatcgatggaagctacctgaggatgtttgttgggtccaacacgtcacccattcgtggatgaacatctagttaggggcacgacttcgagggcaattgttggaatggaaggcgcatagctttgacggggaggacacggaaggggacgctctttgtgagatctattctcgttccccgtctcccgtaagtgagatgtttttgcccttgcgtcccaaggtgtgtgatgacataccattggactcggagagcctacgatctttgtacgaatgtga

SEQ ID NO: 719795 - DNA, 1181 bp, Homo sapiens
  misc_feature (766)..(766): n is a, c, g, or t
  misc_feature (811)..(811): n is a, c, g, or t
  misc_feature (895)..(895): n is a, c, g, or t
  misc_feature (949)..(949): n is a, c, g, or t
  misc_feature (967)..(967): n is a, c, g, or t
cagcctgcctaagactgtcttaccttatgttaaggaagtcaggtatttaaaatgttacatatgccggcgcagtggctcatgtgtgttatcccagcactctgggaggctgagacaggtagatcatttgaggtcaggagttcaaaaccaacctggtctacatggtgaaaccccatctcaactaaaaatacaaaaaatacaaaaaattagccgggcgcggtggctccacctctgcctcccaaagtgctgggatcacaggcatgagccaccgaacccagccttattctgcttaaatttaacgtgttttttgacttcttaattaacttggtcatatactaaatgtgatctcctgtggattaccacatgcattaaaaaatttttcaagctgggcctagtggcgcacacctgcaatcccaacactttgggaggccaagagaggaagattgcttgagcccaggagtttgagaccaatctaggcaatgtagtgagaccctgtctctaatttaaaaaagaaaaagaaaaaaacattcccagtggcagcctgcctaagactgtcttaccttatgttaaggaagtcaggtatttaaaatgttacatatgccggcgcagtggctcatgtgtgtaatcccagcactctgggaggctgagacaggtagatcatttgaggtcaggagttcaaaaccaacctggtctacatggtgaaaccccatctcaactaaaaatacaaaaaatacaaaaaattagccgggcgcggtggctcacacctgtnatcccagcactttgggaggtggaggcgggtggatcacaaggtcangagatcgagaccatcctggccaacatggtgaaaccctgtctctattaaaaatacaaaaattagctgggcgtggtggcgcatgcntgtagtcccactactaaggaggctgaggcaggagaatcacttgaacccagagtngaggtgcatgaccggatnacactgcattcaactgggaagaatagatcctctcaaaaaaaaaaatcaaaattgcggctggggcacgcgaactcgcatgggacccggaaccacacacgcgaaggggggaatacgcactcacggtagaacattgcaaatacaagtgtggacactagaaacggaccactcatcaactatagtgaacatctctgttttattgtgtaaataacctagg

SEQ ID NO: 719796 - DNA, 293 bp, Homo sapiens
cacacagtgtatagccagtggaatgtgaatgttataacttaaccgagatttgtatgggagattagtatagagaggtagagttcttttcgtgatagtggttcactggataagtgctcgttggcttgccatgattgtgaggggtaccgagtcaggtactttgtattacgaggggggttgttagcggggtcgcgcacggaaaaggttggggaacagctaaatagcgtcgttgttgatttggttaaccaaatagtagagggatgatgctaattattatgctgtttgtggaggctgca

SEQ ID NO: 719797 - DNA, 254 bp, Homo sapiens
cccaaccatgatgcgcggccatcgagggcaccgacacccagcttcgttgggagaaactgctgcctcatatccgggtgtgggctggcaccaaggaggacctcactgaggattcagggacatggctggccaataaggtgccagctgctgcccgtgcgtgccatgccccatgtgaagtcactgtgccagccagaacactgggttctccgggggtcccccgagacagacctcctttttccaggctttacggtatcacc

SEQ ID NO: 719798 - DNA, 1005 bp, Homo sapiens
  misc_feature (590)..(590): n is a, c, g, or t
  misc_feature (635)..(635): n is a, c, g, or t
  misc_feature (719)..(719): n is a, c, g, or t
  misc_feature (773)..(773): n is a, c, g, or t
  misc_feature (791)..(791): n is a, c, g, or t
tattaagctgttagaaatgcaatcaaatttgttttttctgtgttcctaagaactcaggcaattttaaggataaaaactaacattggccaccgaacccagccttattctgcttaaatttaacgtgttttttgacttcttaattaacttggtcatatactaaatgtgatctcctgtggattaccacatgcattaaaaaatttttcaagctgggcctagtggcgcacacctgcaatcccaacactttgggaggccaagagaggaagattgcttgagcccaggagtttgagaccaatctaggcaatgtagtgagaccctgtctctaatttaaaaaagaaaaagaaaaaaacattcccagtggcagcctgcctaagactgtcttaccttatgttaaggaagtcaggtatttaaaatgttacatatgccggcgcagtggctcatgtgtgtaatcccagcactctgggaggctgagacaggtagatcatttgaggtcaggagttcaaaaccaacctggtctacatggtgaaaccccatctcaactaaaaatacaaaaaatacaaaaaattagccgggcgcggtggctcacacctgtnatcccagcactttgggaggtggaggcgggtggatcacaaggtcangagatcgagaccatcctggccaacatggtgaaaccctgtctctattaaaaatacaaaaattagctgggcgtggtggcgcatgcntgtagtcccactactaaggaggctgaggcaggagaatcacttgaacccagagtngaggtgcatgaccggatnacactgcattcaactgggaagaatagatcctctcaaaaaaaaaaatcaaaattgcggctggggcacgcgaactcgcatgggacccggaaccacacacgcgaaggggggaatacgcactcacggtagaacattgcaaatacaagtgtggacactagaaacggaccactcatcaactatagtgaacatctctgttttattgtgtaaataacctagg

SEQ ID NO: 719799 - DNA, 802 bp, Homo sapiens
  misc_feature (51)..(51): n is a, c, g, or t
  misc_feature (88)..(88): n is a, c, g, or t
  misc_feature (124)..(124): n is a, c, g, or t
  misc_feature (153)..(153): n is a, c, g, or t
  misc_feature (166)..(166): n is a, c, g, or t
  misc_feature (179)..(179): n is a, c, g, or t
  misc_feature (218)..(219): n is a, c, g, or t
  misc_feature (271)..(271): n is a, c, g, or t
  misc_feature (274)..(274): n is a, c, g, or t
  misc_feature (278)..(278): n is a, c, g, or t
  misc_feature (282)..(282): n is a, c, g, or t
  misc_feature (287)..(287): n is a, c, g, or t
  misc_feature (290)..(290): n is a, c, g, or t
  misc_feature (296)..(296): n is a, c, g, or t
  misc_feature (303)..(303): n is a, c, g, or t
  misc_feature (327)..(327): n is a, c, g, or t
  misc_feature (516)..(516): n is a, c, g, or t
  misc_feature (591)..(591): n is a, c, g, or t
  misc_feature (599)..(599): n is a, c, g, or t
  misc_feature (602)..(602): n is a, c, g, or t
  misc_feature (609)..(609): n is a, c, g, or t
  misc_feature (647)..(647): n is a, c, g, or t
  misc_feature (655)..(655): n is a, c, g, or t
  misc_feature (675)..(675): n is a, c, g, or t
  misc_feature (681)..(681): n is a, c, g, or t
  misc_feature (696)..(696): n is a, c, g, or t
  misc_feature (699)..(699): n is a, c, g, or t
  misc_feature (713)..(714): n is a, c, g, or t
  misc_feature (722)..(724): n is a, c, g, or t
  misc_feature (733)..(733): n is a, c, g, or t
  misc_feature (740)..(741): n is a, c, g, or t
  misc_feature (799)..(799): n is a, c, g, or t
cggtcaagatgttacatgcagtctgctgtgagactccaagataagggtgcngggaggccttaggcaagtgaccttacttatctaagantgtttccccacctggaagatgccctacaagcctccngtggctgtgtttagaaagcatgcccggcntttcttgaaagcnagccaacccagangatggcagggcaaggaagactgtaaggagtcagagtgcnnccctcaggtggaaggaaactgggccaactctacatttgtaagccaataaggngcnaggnagcncgggnacnctgagnctgtgcntccactgcccccgcgtggccagtnaggtgcagctgctcccagagatggagggtgaggaacagacgtgggagcaccagagggacagagctgatggcctgacgctctcttcaggagggcacacccaaggggcctctgcttcctcagtgccccctgagctttatcagcagaggggtgttttccagccaaaaggagctgtatctaaaactaatagantttaaactacaagactggatccaggagagaggaggacggacactaggttgaggggccaggccacactcactctgnaccacctnttnttcccgngtcaagttcccagggtcacaccagcctgcctctgcagnacaagagnaccaagctgcccttgagtgnacactntgaggctggggctcntgntagctcttcacacnnaccaaacnnnaaaatcagnaaagctnntagtgcctggagcttcactcccagccagggcagcacctctggcctctaagcagaaagncct

SEQ ID NO: 719800 - DNA, 280 bp, Homo sapiens
ctccacctgaccggataaactatatcgagcatactacagctgcaatactacgggaaagtctacatggctctctgtctatatgaagttgcaatagtaatatcgaggtcctctatcttcctatctgccatatttatctaccagacaacatcttcagcatcgtatcggatctagaaactcctactagcaacagcaatacacagacagataggacagcttctatataatactcttatcttgtactagaaaaccctatccaatcaggctatgaaatacaaagcat

SEQ ID NO: 719801 - DNA, 883 bp, Homo sapiens
  misc_feature (546)..(546): n is a, c, g, or t
agcgggccgtcccccggttcggtgcccgcggtcccgggagaggaggtgccgcgccaccggcgctccccccctcccgctgccctcgagtgccgggctgggtcgagctgcgatgccctcggacttcatctcattggctcagcgctggaccttagaccgtggaatcgctccaagttcgctctactctgcgagaatctgtctatgatcttctccccaggaggagttgacacgttgacctccatctagaagaaacatctgtatgcatccatgcagtcagacaagcggaggtgaggcaaggctcgcctcctccagcctgtagtcgcctgcatgaatgcttcattcagaatcccactcctgttctgtccgtccaatgaggcgggatgcgtgtgacaagaagtccgttatagccaagacatcatataccagacaccctatccaatgttaattcgtacactacagtacagctcgagctagtcagaggcgtactggcaatgtggaagatggcctgctccctctagacacagtggcgagaaacaaatcattgccttnggacatttcaatgagtagccagcgatctttctgcccatctaagcagctagtgcccacctttatatgttgccacaaacaatcacgcagggaatggccaaccacaatgtagacccatatcctggcacgacagtctcatccgctgagcctcaattcgtcaagccgagaagcaattcaagcggaacatggttacgtttaaataatgggacactttcagatagaataaacttgggtcacgtgcaagccattattagacccttcatgggaacccaagtgtaaacctttgcgcttgaatcaaccttgaatgtgcccataaagttccagtccacgggcccaagca

SEQ ID NO: 719802 - DNA, 874 bp, Homo sapiens
ggcttagagatcggggaacccggtccttgtgcttcgcagggatcccctcaaagggggaagaaattctttgcggggcacaaaacgtgtggagaataaagacgggacattttaaggtttgaccgcaaaaacggggttttttagcggcaccacgaggttcattccttggctgaagggatcatacgccgccgtgtatgtcccggcgggttggatagtagtggcccctaagccgatatggatctggctgtgagctcttggtatgcgccccccccgggtgtgtgtaccgttttctcctccttccccgcgaaatgtgccttcttgtggaagggcatccatcagacgacccgcggccccgaggcgccgagaagacagcgggtgttccaaaccacggggaaaaatgcgcgcgagccagccagggacaacccccctcttacacggcgggcgagcaaaaccccgcccccacggggggatcgtcggagacgggcacccaagctagacaataataggggggtattctgtccaaaatacccacttcggagccccacggcggcaagggtccccaggcgagggcaacacaatgtccgggagtgcaccacagaggagcccccaggcccgtgggctaaaaacacgtccctcatatggcatggccgtacaaggaaaacccacatggttcgtgacagtcctgaagggccagcgaatgcgcggaggccccaacagaggatccccccctttaaggggcccccggctgcgagagcccacacggggcgactgaggtcaaaaaaagtctttttctctcacagcgcgccacggccggacacaaaacttccccggcggcggcaaacctgggggcaaaaaaatttgggtcacaaacaaaaca

SEQ ID NO: 719803 - DNA, 272 bp, Homo sapiens
tgaggatcccagcactgtgagacctccgtttgagctccgaggaggcctggccaaggtggaaaaaataccctgatgtcgaaaaatgtctaaaaatccacagactggaattttcaaaaatgaggagaaacctccctgcggcaggcaaggcagctgagactcctgaacactggtagcaatgcactcttggacagcactcactgtcatgaaaaatgtacatcattggtttcatggaaacaatgccccaaccatggttgcgcttgccttggatgatg

SEQ ID NO: 719804 - DNA, 340 bp, Homo sapiens
ttgagttaaaagacataggcagctgggcacagtggcgcatgcttgtaatctcagcactttgggaggccagggtgtggagattgctagagcctgggaattctagacgagtctgggaattctagaccagcctgggcaacatggtgaaacactgtctctactgaaaatacagaaattagctgggtgtggtagcatgcacctgtagtcccagctactcaggaggctgaggttgggaggatcacctgagcctgggagttccaggctactgtgaaccgagattgcaccactgtactccagcctgggcgacaaagtgagaccctgtctcaaaaacaaaaacaaaaac

SEQ ID NO: 719805 - DNA, 550 bp, Homo sapiens
  misc_feature (6)..(6): n is a, c, g, or t
  misc_feature (13)..(14): n is a, c, g, or t
  misc_feature (24)..(24): n is a, c, g, or t
  misc_feature (28)..(28): n is a, c, g, or t
  misc_feature (36)..(37): n is a, c, g, or t
  misc_feature (48)..(48): n is a, c, g, or t
  misc_feature (54)..(54): n is a, c, g, or t
  misc_feature (57)..(58): n is a, c, g, or t
  misc_feature (62)..(62): n is a, c, g, or t
  misc_feature (64)..(64): n is a, c, g, or t
  misc_feature (74)..(74): n is a, c, g, or t
  misc_feature (81)..(81): n is a, c, g, or t
  misc_feature (91)..(91): n is a, c, g, or t
  misc_feature (111)..(111): n is a, c, g, or t
  misc_feature (115)..(115): n is a, c, g, or t
  misc_feature (120)..(120): n is a, c, g, or t
  misc_feature (180)..(180): n is a, c, g, or t
  misc_feature (195)..(195): n is a, c, g, or t
  misc_feature (219)..(219): n is a, c, g, or t
  misc_feature (236)..(236): n is a, c, g, or t
  misc_feature (254)..(254): n is a, c, g, or t
  misc_feature (256)..(256): n is a, c, g, or t
  misc_feature (262)..(262): n is a, c, g, or t
  misc_feature (264)..(264): n is a, c, g, or t
  misc_feature (268)..(268): n is a, c, g, or t
  misc_feature (279)..(279): n is a, c, g, or t
  misc_feature (303)..(303): n is a, c, g, or t
  misc_feature (314)..(314): n is a, c, g, or t
  misc_feature (319)..(319): n is a, c, g, or t
  misc_feature (324)..(324): n is a, c, g, or t
  misc_feature (350)..(350): n is a, c, g, or t
  misc_feature (359)..(359): n is a, c, g, or t
  misc_feature (367)..(367): n is a, c, g, or t
  misc_feature (376)..(376): n is a, c, g, or t
  misc_feature (384)..(384): n is a, c, g, or t
  misc_feature (399)..(399): n is a, c, g, or t
  misc_feature (419)..(419): n is a, c, g, or t
  misc_feature (426)..(426): n is a, c, g, or t
  misc_feature (431)..(431): n is a, c, g, or t
  misc_feature (487)..(487): n is a, c, g, or t
  misc_feature (491)..(491): n is a, c, g, or t
  misc_feature (502)..(502): n is a, c, g, or t
  misc_feature (530)..(530): n is a, c, g, or t
  misc_feature (536)..(536): n is a, c, g, or t
  misc_feature (546)..(546): n is a, c, g, or t
tgccanttgctannttttattttnctantagcttannaaaaaaaaaangcaaanaannaaananaaaaaaaaangaattanagtgaaaaanaattctagaaaagtttcacnaggnaagtntgcaaattcttattctaaaaaaacttctttaagtgcatgaagcttcatgtattttgcaanattcttggcctcaanatctaccacctattttttaaccanaaaaatttgaatgtatnaagaaaatttggggcaananagtaananccanatgtatttaanccaagctttgaggaacattaaganttaaggattanaaaanttggnggatttccatgcaaccagtaaaaggntttgcacanaatttganagtagaaanaaaaaaanactaaatttacaaanaaagcattgagtttgatgtntattcgngtatntgtgtgttttcttgtgatgaaaaaggcctgcctttcatcttttctttaaaaaaaanaaangtttacaaaanatttcccccagattttaaaattcatggnagtaanaaacagtaanaaaa

SEQ ID NO: 719806 - DNA, 244 bp, Homo sapiens
  misc_feature (71)..(71): n is a, c, g, or t
tccctggttgtcaagatagaatcttagtcactttaaatttgccacagaacctctaaatccccttgtaaatntaactgttagtccaaagaggaacagctctttggacactaggaaaaaaccttgtagagagagtaaaaaatttaacacccatagtaggcctaaaagcagccaccaattaagaaagcgttcaagctcaaaacccactaactcaaaaatcccaaacattattacccgaacttcctca

SEQ ID NO: 719807 - DNA, 322 bp, Homo sapiens
cgtcgaccaaccggcctttgtcggatgtcgatgaagacgcttctgctagccccggcctgctaactttatgaacggcgtgtctccagcttgctagcgtaataacgacttccctgtttcatctattgctgttcactggaccctatgatcacctgactacatagctgatgcctgctcggctgttcattaataatggtactaaattttgtttgttttgtttacctgtcggccccagcctcgaattcaggccctgtgtctagttaactgaccctctctgcccattcatcgccattttacctgttgttgttgtcttaactgttgacgc

SEQ ID NO: 719808 - DNA, 189 bp, Homo sapiens
atgagccggtaccggcactctagatccaggaaccggttgacaatgcccttggctatctaagaaatctaaatcagggctaggcactaccatgcctgtaatctcagcacttgggagggcaaggtgagaggactgcttgagctcaggaattcaagaccagcctaggcaacatagggagaatctgtctctact

SEQ ID NO: 719809 - DNA, 160 bp, Homo sapiens
gctgaccttacaggacctaaatctctcgcagcctcaaatagctgggattacagacatgacctaccgtcccgggcctcaagttcatatattattcttgagccgcttggtcaggttgattcgcacactccctctgcagtgactccaggagcccttaccacag

SEQ ID NO: 719810 - DNA, 531 bp, Homo sapiens
tgaggcataagagaagagccccagaatgaagaaagaaggagaatatggctttattcacagctgactcactttgggagagtcacggcttctctctggaactcagtttcccacttagaacatggggaaggtagaagtgtgtggagtgtgtagagtggtcaagagcctggatcaggggcttaaatcctggctgccttaccttgggccacttcaccgtgctgtgaatttccttctctgtcaaatagaggccttgtgcaaattgtttgaaagcctttgcagcaatgcttcgagtgtggtgttgtttgagtatcagtgtttgccattattcttataacaaggttctctttggtcccttctggctctgtttttatttatttttttatttctacttcctctgccctcaaattttcaaggacaggctgatttttattttattcttcaacattaaggtaactgcaaacatattgttgaaggaaaataaaaggtacttctcaggctttcgtctgcaataacttaaagaaaaggacccaaaaa

SEQ ID NO: 719811 - DNA, 204 bp, Homo sapiens
tcagtgggcggatcataatgcacagccgtaactcctgggccatggttgcagtgagctgtgattgtaccactgcattccagcctgggtgacagtagcaagattctgtcccaaaaaaaataaatacctggccgggcgtagtggctcacgcctgtaatcccagcactttgggaggccaggtagggtgggggggatcctcgtagagtc

SEQ ID NO: 719812 - DNA, 204 bp, Homo sapiens
  misc_feature (144)..(144): n is a, c, g, or t
agtgccatttaaaatgttaaagactcttaattaactaagtgtgtaaatggggtcaagcattaatcaaaaccctctcaaagtcattgttaatatttgctagacttataaatacgacaataagattcctaaggtgattttaaaagngttaaggaagagctataaatttctaaatctctaaatttaataaattgaatactgattttc

SEQ ID NO: 719813 - DNA, 1344 bp, Homo sapiens
  misc_feature (248)..(248): n is a, c, g, or t
  misc_feature (250)..(251): n is a, c, g, or t
  misc_feature (336)..(336): n is a, c, g, or t
aagaagaaggaggttcctgtcgtgtgccagaagacccgttaaagaacaaagcgaaggaactttcgcagagcatgacaatgatcgaatgcgtccgtgagatagagaacgcttgtggcccaaagacgatgcttcgcatacaggcaacgtgaggacagctgtatcatattgaaagaagcgaacatggacagctactctacaaggaattagtaggcacgatgatacgagagactgtaagattgctgagatgngnncgaggcatggcgagaagacatcagagctgtggcagagcgtatcataatgttagccgtgacgagaagcaccaaatgtatggcgcgnttgggtcattctagtacattcatgaagcggtatacaactggaaatgtgagtccctacaaggtttctgacatagcgtgctgtagcagcctctctatcggcccttcgatcaaaatcttctagatggagaatcctattgctggaaagcgttcgaaacgaaggtctctcgcattctcaaacagtgctcgcagtgattcgtagggatgccgagtatttattgacagtggggcgtgtacgccccaaatcgtagacaggtcacgtgaaatagaaagctagagtcatacaatggcgtgcgttgatgcgcagaaactcaactagagaaagcgacactttgcatttgaccaagataagcgactttgagtctcgctccggatactctttgagtatagataccggcaatcatcatgcatgggagggagtcggatggcagtgagatcatataacctgttgggagaaagcgccttcaagagagggcaaagtaactatcctgtgggccgctgcagaatcggtcttctcgcagaaggctgggaagtgcaaggaactaaggagcacccattcgtagcaagggtgggacgatgctgggctaccgggtaggacccagatccatccaggcttgttgccaaggaatgatagctaacgggtgttacacgatgacattatatgtcctaaggctgggttggttattaaaccagcgaactggggtctcgccactggtgcgcaccactacacaaagggggcgcggacacaaaatattcccgaggggccaacataactcggacgaaatgtggtccaaaagagggcccaggaggagggcgacaagcacaaaagaagccaggttcaaacagcgtgggcaaaaggagacggagacaggggggaaccacacggggggaacaacgaacaaaaacgaagagacagcgacaacatgacatgagcacaacgagcgcacgctaatcacagaaacagagatcagacagcaaagacagacgacagacaacgcgcagatgagcacac

SEQ ID NO: 719814 - DNA, 379 bp, Homo sapiens
tgaactctgaagcagctgcacttcctgtaccaccgatgatgagtgatcagctgcccctgcgaagcttcacagcaaactctgactatggcacagataagcactgaactgctgctggaacgatgggttgttgttgtcccagagtcgccaacgcattgtctgacttatttcctttgtggctagtgtgcaggtgaccaccattgacctctcagcctccctagttctgaacacttgcatcattcactaccggcaccaggaattctctcactggctgcacctgctagcactggaaacccaagggtctagttcacctgttctaaagcaaaggaaaaaaagaaccttcccccaaatcctggctcccatcatctttagcacctccatc

SEQ ID NO: 719815 - DNA, 715 bp, Homo sapiens
gtggggcagaggggtccatacggcgttgttctggattcccgtcgtaactatagagggaacactttcacaatgtccggacgcctttgatgtcctgcaaatgacggacggaggatgtccttaaagttccttggaagcgaggaacccacttaggttggcaccaatcttgaccttccagatggaacagtaccatcttataaacaggaacaagtgatggcactctatattcataaatctcaagaggacctggaagaagcttctgctggcagttcgtgcacattgttgccatttgaaaacccctgctgatgtcagttgtaatatcctccaggaattacttggccagagggctggtgctagaagtttgctgctgccaattggagccaccttccaattggctgggccggttacacttcctgtggacaccgttcactacaccagattccaggcaggccttccgggaagccaacggcttcctgggatagagataaccctgacccccaagggtcttgaaccaccaaaggccttactcaaccggggagagccattcttaagttgttaaaccccttaaccataccaaatttggccgcatggtggtacaccacagagaatttctcgcttcttggggccataattggttcggacctattttgccccattccccatttgcaaaaaaacaagggggaagcttcactccaggtgggcgatcacgatgcgtgac

SEQ ID NO: 719816 - DNA, 198 bp, Homo sapiens
agacagatacgaagtcgagcgtcggacctgtcttaaaactacaaaagatcattatctcacagtctgtgggtcaagaatttgaaagcagtttagttgagtggccctggattgtggtcccttataagcttgcagaccagctgtcagccaaggatggagtcatctggatgctttcctggggctggaggattcacttttgag

SEQ ID NO: 719817 - DNA, 236 bp, Homo sapiens
tgtgggtagacataaggaaggggtcaccaggttggggagagccccatagtgagaagcaataatgaacaattcgtggtactgagcaattgttagatgacagcgtaatcacaaacaacctgcgggcacaatgacctcattccacacgtagcagccttcagcaggaccctataaaactttcgtccagcccttgcctcttggcaggtagccccgttctctgctgagctgcccactgcaac

SEQ ID NO: 719818 - DNA, 317 bp, Homo sapiens
ttatagcacaacctagggtcagttttgcaggtggtaagccatttaccaagatagttgcaggtaaagaagggcagatttattagagaaattgtgaaaatatgttgcagtgggcagctcagcagagaaggggctacctgcaaagaggcaagggctggaggaaagttttatagggtcctgctgaagggtgctacgtgtggaatgaggtcattgtgcccgcaggttgtttgtgattagctgtctctaacaattgttcatacaataattgttcattattgttctcaacttggggctctccccaacctggggacccttcctta

SEQ ID NO: 719819 - DNA, 522 bp, Homo sapiens
  misc_feature (91)..(91): n is a, c, g, or t
atgaaaatattgttatacatacattgtctgtcaaactccaaaaaccatggtagccttcagtgagatttccatcttggctggtcactccctnactgtaactgtaggggaaagggtttttttgggggtgtgtctggttttagtgtcaaaagggaaataaaagggtaaggaggaccctttaaaccccttggggggagttttgtaatttcccagactattttcaagcaacctggtccccccaggattagtgaccaggttttcaggaaaggatttgcttctctctaaaaaatgtttgaaaggattttattttttgatgaaagggggtatgaaaaaaccccccccaaataacttgcttaactacaaatagattcaaggggggcaaaattttattttggatattaaatgctatataatgggggccaatttatattatactgggtatggcattattaaaaagctttttcattattttttatcccaggaattttaaaatgggtaaaaattaaaaccagtgactcccgttta

SEQ ID NO: 719820 - DNA, 587 bp, Homo sapiens
ttgaggaccccattgtgtagcggatgagggcgtgaagattacttctttctcaaagagtacttgtgtggaagtttgcaagcagcgtcacccaatgtcactcttcttaagatgaagatgtagcatgacatcagccgagcatcttctctttgcaaaattttctgagtctgatcatcagagaacttcagtacggtggttataacttttgccatggtcttagtcacacgacccatcatgtactcaaaatgcacttttcgcaaatactcaaattctgtaggttctccacaagagtgagacatccgtatggtacaaattgccacctttgtaaggtgtccccacagttgttgcatatacattcttttcatatttcttcaaacgatcttctaaattgtgaatctgttctctgaactcttgctctttcaatttcgaatcactgattaaagtcgtcttctgtgctagctgtgtctgtagctccataattgttacattatcattgccagggttctcctcctgctctagcttttgctggtatttcttctgcagctcctcaagttgagtctgcaggtcccttcatccgcttatcaatgggg

SEQ ID NO: 719821 - DNA, 543 bp, Homo sapiens
ctggcgctcttcaactgcacttgaagttagaacccttcaggttctcagttacacgagccaataagcagctcttatggtttaagctggtctgaaatggggtttctcctggtcatatgggttcttccactttcaggatcctcagaacccccagcaatgccaacaagaactccaccctttcctcaaatggctcagatttcctgacaacaaacacaatttcctagtgcacagaacagacccctggcttgcttccctcagactgtgaagcaaaaggacaaagtaacaaaggttaactttcgttggtaccttcctctctgagcccatctcttgctcctgactattcctctccttcaggacactcgggccaatttcgagttccaaaagcaggtccgatatcagctctgaaattccactaagtctccagatactactggcactcctgtgcctaagagtgagtgtgtgaatgcaggggtaagcgtgtgaatatctgcgtgagtgtaatggataagtgtaaatgtaggaatgcgtgtgtgagtatgagtatga

SEQ ID NO: 719822 - DNA, 112 bp, Homo sapiens
gcctcagttcaccttttgacaatgagggtccctggctcagcttcttgggctgctaatgctcaagggtgtttgggaccccgtggggataatgttgaaggcttaaagcttccaa

SEQ ID NO: 719823 - DNA, 82 bp, Homo sapiens
  misc_feature (18)..(18): n is a, c, g, or t
gtagattatttgaggtcnggaggatcccttaagcccaggagttggagaccagactgggaaacaaagtgctgcctatctctac

SEQ ID NO: 719824 - DNA, 544 bp, Homo sapiens
tcttctgcatcttgaattgactagaaattactttgtcaaggagagctagcagcataaagactccccgataccagacgagctacctatgaacagctataatagcacacccgtctatgtagcataatattgccgaagatttatatgtagaggcgacaaacctaccgagcctgcttattcctagtctctttctgtaaaatattagttcaactttaaatttgcccacagaaccctctaaatccccttgtaaatttaactgttagtccaaagaggaacagctctttggacactaggaaaaaaccttgtagagagagtaaaaaatttaacacccatagtaggcctaaaagcagccaccaattaagaaagcgttcaagctcaacacccactacctaaaaaatcccaaacatataactgaactcctcacacccaattggaccaatctatcaccctatagaagaactaaatgttagtataagtaacatgaaaacattctcctccgcataagcctgcgtcagaattaaacactgaactgacaattaacagccca

SEQ ID NO: 719825 - DNA, 169 bp, Homo sapiens
tatagtttccttgtgggacacacagagagacaaactgagaaggaaaagggaacctgtcaaaacccccaagtccatggacctcatgatcccccatgagtcacagctatcctctgtctttaagaatgactagttttatagctttttaacaccccaacaattaggtaaccct

SEQ ID NO: 719826 - DNA, 363 bp, Homo sapiens
ggaatccaaattttggccatagctgtttccggggcgaaaaaaaacgccaagcaaaccttaaattttgcttaggggtgttcccgggggggtacagtccacaaacacgcagtacacacgttgcacacgcaagctcccacgctgcacacacacatgcgcacacacacgcacacttgcacaaaattggttgaaaacagataagcatatctaagcaactacgatttctgtgtggatcaggccaaagtcccgctaagattctccaatgttttcatggtctgagcccccctcctgttcccatatacactgcccctcggccctgtctgtgccctgcctttcagaggagggggctcagattgtgcggcctga

SEQ ID NO: 719827 - DNA, 184 bp, Homo sapiens
cagacaacagcatctatcatcacagagcagcacgtagtcatttcacacaccagcatctcatgattacggtgctggtgtgtggatagatacgtgctgttgtgtggattcgataagatgtcttggtgtggtcgtaatatgctgttgtgtggttggatcaggtgctggtgtgtcgtctggataaagg

SEQ ID NO: 719828 - DNA, 505 bp, Homo sapiens
gcttaaggaaatcacacagcgtcatagacggtgactgccttctgtttttaatgacacatgatttttttaaagaaacatgagaaacatgtggatgtagttatttaagaagccttcatttaaccagtatcaaggaaatcagtttaattatgggtgaattccacagcaaaataaaattagctttgtatataaattaacttggtcataatctgttttatacttgctgcttataatgtgtgcagtgtgtatgactaactgtttgtgctacacataaatacaatattttaataatactaataataatttggctgttatttgtaagagatcatagcaaaatgttgcatttacaattactcacccgacagattaaaataacatagcacattgatgctttttttgtttttgttttttactgcatctttgttctggtctaatgtacatagtgattttatacaggacttcattggtgtttatcaataaatctcttatttttcaacaaaaaaaaaaa

SEQ ID NO: 719829 - DNA, 283 bp, Homo sapiens
atataaatgtagtggagtcatgaagtgagacattggagacaaatagagaagattattataattgtctatggtgtagtactcgagagtgtagcgcctaaccggcagcagcagttacagcagggaacttgttggacatatagattcatggacctaccccagatccactgagatacgaaactcgggaggggggtactcacctatcactgtttacataccgtccttttggtgattgtgatgtctgctaaagtgagaaccaaagcctatggaaaagatatgggggagg

SEQ ID NO: 719830 - DNA, 259 bp, Homo sapiens
ccttccaacatctcattgcctctctattaaaaatacaaaaaatgagccgggagtggtggcggatgcttgtaatcccagctactcgggaggctgaggcaggagaatcgcttgaacccgggaggtggagattgcagtgagccaagatcgcaccattgcactccagcctgacaagagcaaaactctgtctcaaacaaaacaaaacaaaacaaaaaccaaggagagagaaactgtttatatagcgccatgagatgttggaagg

SEQ ID NO: 719831 - DNA, 553 bp, Homo sapiens
tggcgtgatatctgagcgaacctgatggcccgggtgtggtcgctgatgagtgttcctcatcatatgggaagtgtggctgggggcgccgtctacctgagtgtacgaacaggagctgctggggtgctagcgaaaagagccaggcagccctacatgaaggctggagaggtggtcccacaccggcatgtaccagttcaggcagtacttgtgtcagcagacaggcctgcgagataccccagctcccagacccctccaacgatttactttcccatccgtgactcctggaatgcatggcatcatgacggtgatgtcagctctgtcggtggtcccctccatggcccgtgagtactccaaggatgggctggtgagtatgtgaaggctcgaccaagtagccagagtcagctgggtgccgttgctgcctccggtcagaacgggcagggaatgtcgactgacctgaagactccggacgtgggaccccactcttgagggcagctcccgttgccttgcatggccaataaaggacttcagaatgtggaacaaacgacttcacctccct

SEQ ID NO: 719832 - DNA, 736 bp, Homo sapiens
cctgaacttgtgtgatgtcaagtacaaaacagatgtcgtaccaataaaaaatgaaagaaactgatacacactaaggaccaaagataagaaagagttgacaaagaaggaacagtactttataaaacaccaagcttggaccaccttacacaagtatctgaagagatgagttcatactatgattcttacaaacagtggtctcaacattccccatgtcgggcaatatgaatatatttctaacataaaaattaagtacagactctggtggcgctctactccctatagatgtatctccttttgaaggcccaaatctgtcaatcgtttaagtgacaccagccttcggatttcacacaatctgcatccgaagatgccttctcactgcttgtcactccttatcagatagaacatggagtcattgtgctgactagattcaatctagccagaacgattggcctactggcctctgaagaacttttatggtcaagttgtcatattaacggtggttccatgaatctttgggccccttttggcattgtcgaatactgatcgtagcaaagactctaagagaagtccattgtccaatcacattaggcattcgtcctagatgtgtccttcggacaaccagacataacacacacaaccaatagaccaatcaacgtaaacccgcacccagaacaaaaactctctgacggcttaaagatctagcccttccaaaaaaaaatcccataacagcacccgc

SEQ ID NO: 719833 - DNA, 139 bp, Homo sapiens
gcaccccgataatctgaccttaacatgtaacagcgtgagccccagcagaactgagacactaaatgaaaattaatccagcttgaggctgggcacttattcgatgcattcatcaccaagaagcatctctttgcctctgtcc

SEQ ID NO: 719834 - DNA, 164 bp, Homo sapiens
gctctagaggatcctgccgccgtacagttgcggctaaggctaggtatgatttaaaggttttactgctaacctacaaagcatctatctttgtaggtctagcatctatcttttccgatttggtccttgccgtacatacctacacgtacgcaactggtacggcggtg

SEQ ID NO: 719835 - DNA, 1328 bp, Homo sapiens
  misc_feature (213)..(213): n is a, c, g, or t
  misc_feature (456)..(456): n is a, c, g, or t
  misc_feature (622)..(622): n is a, c, g, or t
  misc_feature (834)..(834): n is a, c, g, or t
caaccccccctgccgccgcgccggtggtggcgtggggagtagtaaccaaaaggacctcccggtttttaagtgttaaaacgcccgtcgcaggaaatgtcgccccccctggggaagaacctccccaactgtcgccacacagcccgcggtgttgtgtggaacaacctcccccaattaaggaaaggaacctaccccgggggggggccccccggagtncctccacggccgccttcctccgggggaagcctttcgtaagcgccctccttataaggggccgcccgcgccgggcgggggactgcccgcggaatgttacatccgacaacttggtgttcggacaccacccaacggggggagaaaaacaaccggtcttatatggagcccccacctcataatgggccgcccctaatatttataaagggggtgaaacaacacttaaagatataggggaaaccacaacgngtgtggtgggaacgacgacaaacataaaagaagccccacgcgggcctggggggtgtataacaccgggggtctcgccggggagaaaattttcttcgccgcgcggagatatatctcgtcttctcggaagaacaacacacacggcgcggtttcccgcgcctctttgttntttgtggggggggatatatggaacacagggttatatggagacacacacaaaacaaaggcgctctgtgtccggggagaaacgcgccttttttcttcgggcgcgcttttttgggtgcccccctctgggggttcgtacactgtctttcccccccatcattttctctcgtgggccctaaactcttttgccctcgagagtgttctttgtctaaaccnccccgccacagtttgcgcacagaccacacacttgtggggagagtttctcgtgtgttgtgttccaccaattggggttttgagagctctgtgtctctgttgtttcgctggggagagatttctgggagaactcttggacaaacaacgtgcacactaactcggggggagaggtggtgttcctcgcttctaagctcttccaccgcagtagagaggcggccctctctgtgtaacctatatctctctcttcacatacacactgaacttctcttctttgaaagcacctattaatttaaatcttccgcctgttctgcgctgcacgcacgtaactaactgtgcaaacaataagggtaaaatggtgtttcacaaaaggttaaccacagtgtggaacttggtggttaagccacacgctgtttaactcaaacagtacgtgtcctgtttttaaaaaatacaattatttttataaaataaaatataaatctgtacaccttacaatttca

SEQ ID NO: 719836 - DNA, 935 bp, Homo sapiens
tattctcccctcgtgtgtcctgccatgacgattatttttctctggtgccatttgggtcgctctatacaatttctggtcggcaatccggtccctctcgggcgtctccctccctatggcgcctctccatcctagacgtctgcacgcgcgttttggaaccgtgtccccgtcttttaaaggctctggtcccgcgctgttacgcagacttttggtgctctctcccggatccgtgctccgccgccccctggggctgtctaggccgggatccatgttctgcggccgtcgttcttccgaggaagtgcttccttacaatacgcttggtgttctggaacggcattatggtgtcaacggcacgagccccaccccaccggcgggctcaaatcgcgaaaaccacccccggcgggttcatccccatgtgccagacagaacccggggtctcacaatgtgggagcacaaagaatcctgttttggatatgcgaatgtccaccagtgattgtgtggacatctaaacaacgctcctggccacccctcccactgggcgccaaataagtggactcgtattgccccttttcgcgccctcccgtggttttccccgaagtttttctcccctggataacaacgagcgccaaaacgggtcttgccgggattctcctgtatagaaccacaatctcctgcccgcctccggaataccacacgacagtatcgccgctgattgtttgcacccccagaaaggttgtgcgcgggaaatccgaccttttcttcctccggggttacatttcttgaaaaagagtcccccgttgatgtgatcaacgacccccccctgttaaagaaacaataacatgttgtcaagaagcatgggtagagtaagaaacataaaggaggatgtcctgcactaccaataaacacttttttttaaaaaacttaaccaccacaaaaca

SEQ ID NO: 719837 - DNA, 788 bp, Homo sapiens
  misc_feature (12)..(12): n is a, c, g, or t
  misc_feature (157)..(157): n is a, c, g, or t
  misc_feature (199)..(199): n is a, c, g, or t
  misc_feature (217)..(217): n is a, c, g, or t
  misc_feature (220)..(220): n is a, c, g, or t
  misc_feature (291)..(291): n is a, c, g, or t
  misc_feature (451)..(451): n is a, c, g, or t
  misc_feature (513)..(513): n is a, c, g, or t
  misc_feature (653)..(653): n is a, c, g, or t
  misc_feature (680)..(680): n is a, c, g, or t
ctgttttattcnacagtcaaggcgggagccaattcacttcctctaactatcttccccgccttaaccccttttccacctgcatttagtgcagcccaatttccaccttgtaacccccccttggcccgaaaaaaaattctcccaccttaccccctcgggnccaagggggacccaaagttttttatcggggaggggggcgccncaataacccccacccccnccnatatttcgaggcgcgctacaccctttctctccgcggtttggagggttttctcacatttgttccccccggcncttatattttggccccccctctccccaaattttctttgaaagacccgcccccgcgcccaaaatgaaattatttttcgggggctctccccccacatttggggtcgtctcccctaaaaacacgcccttttttcttttatagggtgtttattactcaaaaacnccttctctctttgttttttattataaggggcgcgctccacccccgcgcgcttgtttctttcncttccaaagagagaggcgtatgagagagcgccgccccctctatatttataatagaagcgcggccctctcccacgcgtctttttcttctcttaaaagagacaagctcctccttctcgtgctccctctgtttatattatccncccacataacctctccccccctctctncttattttctctgcgccggcgcggggaggagagctatatttataaaagagagcgtatttggaagagagagaccctgcgcctccctcattatatttttgggggaagtct

SEQ ID NO: 719838 - DNA, 650 bp, Homo sapiens
gatgcggttgcccttgtaacatatagtctgtgcctgtcctccctgtgcaggggtatccgtgtagggtgacctggaattcgaattctgtttcccttgtaaaatattggtctgtctcttttttttagaaaaaaaaaagggcgggaacggtggtcacgcgctgtatacccagcatattagggcgaataccaaggcgggggggaatcacctgagggctagaggagattcgacgaccagaccgtgaccagaaagtggagaaaccctcagttctcgtacataggaaggtaaaaaaattaagccgggggatatagggagtgcgccttgtaaatcccagctactcaaggaggctgaggcaggagaatcgccgtgaacccagagggcgggaggtggaagtgagcggaaaatccacaccatgggcactccagctggggaccacaattagcaaacctccatctcaaattaaaaaagacaatgccctacgccgccgcttcaaaaatgcaagggatcacactaaaattagccaaactgaacggggttgagatgcatcacacctctgggacaaacttgcttggccaacactcatggtagctacggaatacaaagtacgaccaaaatctacaagaacacacaacaacaacgagcaagagaaaaaa

SEQ ID NO: 719839 - DNA, 98 bp, Homo sapiens
gcggccgcctactactactactactgctcgaattcaagcttctaacgatgtacggggacatggttcacattagaataaaaggtagtaattagaaaaaa

SEQ ID NO: 719840 - DNA, 483 bp, Homo sapiens
  misc_feature (34)..(34): n is a, c, g, or t
  misc_feature (75)..(75): n is a, c, g, or t
  misc_feature (79)..(79): n is a, c, g, or t
  misc_feature (81)..(82): n is a, c, g, or t
  misc_feature (107)..(108): n is a, c, g, or t
  misc_feature (113)..(113): n is a, c, g, or t
  misc_feature (122)..(123): n is a, c, g, or t
  misc_feature (125)..(125): n is a, c, g, or t
  misc_feature (127)..(127): n is a, c, g, or t
  misc_feature (254)..(254): n is a, c, g, or t
ttaagctgactgaatacaagatcaacaagagcantgtactcctggcaattaggacagatgggaggaacagggagngggnannggagagaagcgagtgtggagagcannagggnagggggganngnantgcggtgtttatagagagttcaaaataaagatttattttcgaaacaagtgactttggtttatttcatacattacaatttttcttgcagaaaaaaataaaattgtacaactgcataaatataaaaatnttccaccatgaaaatggttaaaacattcataaagacacagcaccagcatgtgatgcctccagaaaggaaaaaaggaaagtaaaagaaaatgtataaagcaaattaattagccctgtcactagccaaagtgatgggcagatccagatctcagacacagctttaaaacataccggaggacaaggcaagagatgtcaagacagcattcaatacaagcataacacaacccatc

SEQ ID NO: 719841 - DNA, 132 bp, Homo sapiens
ctcccaattatgaggaattggtatgagtatataccagaattctgcatggcagcaagttttattaatcagaataacactaggttgtggaagtgactcatgctgaaaaaattgattatttttattagacagttt

SEQ ID NO: 719842 - DNA, 146 bp, Homo sapiens
aaccagggtcatcgcgtgcaggatagtaaatctggggctgcccggtggtcttaggttcgagaagtagctgtattttcagtattttctacataatatggtacacagtagagcacatgcactgcatcaatacaatgggtacattttct

SEQ ID NO: 719843 - DNA, 569 bp, Homo sapiens
ggtcgaaccacgcgtccgaccaccgtagccgggaccctcgggacaacggctccaggtccggggaacctcccctatgatgtggcggctactggaggaggctgtgaggaagaacggggtcgcgaggagaggaggagagctccacaatggacgtgacggacgtcgaccgatggcggcctactatcccagccctgcgccgaccccacgtactcgtgacgaccgaactcgcacgggtcgtcccgaggagctgcatgtgctcaagaatcactcttggggcccgtgaagtccgggagacacgtttaaagttcggctcctcggattcctatgcaccgtttcgtgcaccttaaccgggatacgcccgtgttatgcctactttgtagccccttccagcctatcaactcactgcaccaccgcaaacccaccatgtcatgcacacaccccccgtgaccacaataacgcccgcctccccgcagctcctagacttacacaacagcttataacgtcaccgaaaacacacccctcaaaaccacgacacaagaggggccacgtgcacccgacgcacttcccagtgc

SEQ ID NO: 719844 - DNA, 572 bp, Homo sapiens
ctatcctcactctattatttgcaaaagggttatacacagtaacaccttctaactgaagtattaaacaaagtttccattgctgtcgtattttgcttaattattatccttatagcagggataatagttactaacaaaaaggaagcatgaaagttttactatcactgagcctggtaagactttttattgggtttagtgatgcagttttaaatgaaacatgccgcttttggattaatacctctagtaaaggaaaatttacagatacttaaaaatcaaatcaaaattattgataggctcaggaaaaatgccagcttcagccctgagtggctacaaaccctctttaataaattccagtcttctttatggaattggttaacgcctttattaaaccctctcttgcttatatgacttgcattgatattgggctctgtatatacaatactataacttgaaattgttttttcttgcctagaaaccatccaactcccaatggtggtttaaaccggaccaaaaaaggaccagggcttttttcccaggaccctttaatttatcccaggggggaccctaactgttat

SEQ ID NO: 719845 - DNA, 850 bp, Homo sapiens
tccttgaatgtgtgtctggtcatacaccagtactacaaggacagctttattcctgcaatgatcttgtcacctacagcaataaaaaatggccagagtgatcagtgtcctgatgagtgaaatgatggagctcagagaagctttatgccaaagttgatacttgatggcaagtgtgatacatacagcttcaatgagttgaatgactatgttcaatggctgcttgctatgcctatatgcctaggtgtatatgatgtactgatgaccactctacatgaacaaccttgatgtgctacatggtgatactgtgaccaatgatgtgaatgtgatcatgctttgatagagtaatatcaatgatacttccattgtgcctcaaagaatgcacaggatagtattgccaatgacctattagaacaatgcaatacacataaatgaatgtgaatgtgtgattttgttgcagaatctgtgtgtgtaacttacagatgcacatcacgaatagcataaagagcgatcctctattgtgctctgtaattcttgatgcgcgaaaaattgtgacatcctgtgagtgcttgatgtgaatgtgaagatcgaatatccctagtgaaaattgataccttagatattgtactgtgcaattgtacactcgccgaacgtgagaccccaaaacactggacattgatgctactatctaaattgctatgtttgggaggatagggatattgtacccttcttgtaacacactgactcaacctttgtcatgttgccagaccacgaatggtgaattgacatggaacaattctaaccaacaaatgaagctaaaccccctttccaccacttcctgggaacttctgaatga

SEQ ID NO: 719846 - DNA, 922 bp, Homo sapiens
ggagcaagagaagaaaacacaaagggcggaaggaagcgggagacaggtggggtactcgggaagctgagcgggccggcggtgcagcacgggggagcgaggcctgtgtgcttggcaaccgagggactcgcctcggaggcgaccccagaccaacagacactgggtcaaggagtacgcagagcatcaacacactgacggcagagcacgcacaacagtcatcatggctccagcgtctgctcgtgaaaccaagatacagatgcccattttccaccaccaagcaagcagagccgtgttgttttgtccacacaatcaaacatgcacatccacaggagcagagctctcaaaagattattggccgagaacatgtcacgggacgaaaggtttctggaagaacgaagctcgtgccttttctctctggtacagcattgtttgtcacccaggggacgtaggtctaaccaaggtttattgtggcgcagctaaatccctagattgtcggttcatgggcccaaaagtggacttgggggggtctcctgggggattggggctttggccaaggggtatccatacattcggagtttgcagagtaaatcccattttttttgaaggatcagtccgtggggcgtgtttgtgctccaacagacataacagggctgcctctttacctgttgggaatggcacaatacaggatgttcagtgcgacgggagaccctcagcttcactcctaaatctgtgtcttggctttccgaagttttaaccttgaatttgtcctttaattccagtgcccttacactacaaactctatggccaacaaacaacaaacaaatttgtggcgcgcgcaagattttacacactggggcgccagacagaacgcacgttcaaaccggcggaggtggtcacaaacggggggggcaccagttgggttgga

SEQ ID NO: 719847 - DNA, 133 bp, Homo sapiens
agcacctaaccagtagacctacccaggtagacccagctattggttgaatgagtaggctgatggtttcgataataactagtatggggataaggggtgtaggtctacctgggttaggttacctgggttaggtcta

SEQ ID NO: 719848 - DNA, 255 bp, Homo sapiens
  misc_feature (17)..(17): n is a, c, g, or t
  misc_feature (36)..(36): n is a, c, g, or t
cgtcttgttttcatttnatttatgttaaaaatacantattacaaagtctaaagcaatttttgtttccttaattaacataattttcctagttgttacatccaaaacatacaagtgacctcaaccttaaacttttgttcctactcccaccctcatcgaactagacagcacgaaaagggtttgactacccctgcccatccctgatccaggtaccaccattgtaagtaaacactttcagaaattcagctggttcctcca

SEQ ID NO: 719849 - DNA, 1748 bp, Homo sapiens
tgttatccagccatagaaataatgaaggtgttaatataggcacaaggatgaaaaaactgactagtggaacagcatacagcattcaaaagtcagcacccacgtgtatcccatcacctgcagttttgcagcaacaggtgaccattgcaagtgtcagtgggggcaacagggtgtacttatcccagtcaacatgtcactttgccaatcaaaatttagtcaatttgcatcacaacacagttcatttgcgcaggtggcattgccagcatcttgcacatcattgcaccatgttgcaacagctattcaccacacagacacacatctctcagggcaccagttctgtcacaatcttggcagtcaaccgcaaccagcgtcatcattcgcagacaccaccagacaaaacagcgcatttccaacacccattcacagacattacagccacaccttccaacatcaattcaaaccattctgcagccacacctctactccatatatcaattcacagcaaacagaaacccgcaccgcagattcacaggtcacacaaataggcagacccaaagacaaacactcaccatcggacgcgccaggccagcaaaggccatcatttactcgacaccgaatatgaccattcgttacatttgattagcaaccaaaacaagggcaaacgccagcaagctaaatcacgccaccgacaagctagtcacgcgcacacacaccttataacataccccaaagccaaccgggcccaaccaaggacatcgcgttcgcacaaacgcttctttacacaggacatatacaggtaccaccacacactaggctacacatacctatcacgggcatacattacaggtcggttagaacaacagcacattaccaacaatcaaccgacacacaaattggccaattttcagcaagcgacacaataacacgatagcacacaccgttgagacattcagccaataccacccaagctacaaacaaacaacccgattatgaccacccaaaatccccccatcatgtccgcgccaccgtccaactgagcaaatatacgagagcctcgcacacctccacaatttacgcatcatctccgacagcgaatcagccctagcaccatccacgcacaaacacaagagtaaacacggagcagccacgctgaccacacacatccacacacgaacggaggcgccacacaacattgcggcaacacacggaccacaccacgaaagcaatacacaaaccgaaatcacaacgcaagcgccacagaccggcacagacgagaacagcagccccagaacgagaccacagacgagaaccatgacacgacgacaacgagcgtcagcacaacaccccaaagaaccacgtccacgccacaaatgcccaaccgcaacacagacgcacaactctacaccagcgccaccaacactaccaggcaaacaccgcaacaacaccgaagcacacccgcacacagcacaacagagcaacagcgcagagcaagtaagccaacgaacgcaacaagcaccacaccgacgggggaccgatccacgcgatagcaacagcctagcgaccgaccacacaaccacaagcaggaaagtgaacccccaacgccgacgatgagctcagtgacacggcacacgagcaccataacgacgaggccaaccaagccgcggcgcaacgcgaacacaccacgagcacaagcaaccacagcccgagcaatcacgcgaaaacaacataaaagaccgaacgcactttcgacc

SEQ ID NO: 719850 - DNA, 127 bp, Homo sapiens
tcccaaggataagaaattgtataggacggtatcggaatctaggacacatggtaactggaggaataacatagaggagactgtaataatagctactacataataagtaggcactatactatagcagaca

SEQ ID NO: 719851 - DNA, 213 bp, Homo sapiens
  misc_feature (155)..(155): n is a, c, g, or t
gggttgtgggcgcgccggtcggcgaccatcgtcatgatacgcggctgggggagaagtcacggatcaagtgtgatcagtattggcccaacagagtgcacggagacctacggcttcatccaggtcacgttgctagtataccatcgaggctggccacnattctgcgtccaggacattctgctctgcacaagtaatggctccagctgagaaacgcga

SEQ ID NO: 719852 - DNA, 375 bp, Homo sapiens
ttaagttcctgttagtctagaacggtcgccctctggtgcttttctcatggcaatgatgtttttgcaggtcaggccaggtgttaagtggaatgtgtctcagtctgggttgtctccttgtttccttgaggtccgatcagggctaaacatctttggcaggaatgtggcagggtatgtgtgcctatccttgcttcacgtggtacaagtttatccctgaaccttttaatatatatatataaacttaatttttaatacatctgaagttagtgtggggtaaaatgaggatttcatcagatttttttttttttagaacagcttcaactgcatttaatccacaatcctttcaatgtcttttaaaattcttcatttacaacagag

SEQ ID NO: 719853 - DNA, 259 bp, Homo sapiens
caccctctctgctcacatcacactatccatcatgaccagccacacacccaccccaccgaccaccaacaccgccgacctgaaaaatacttcgggcggtatgtgggttaccctcctacctccccattgggttcagaacataaagcaaatagacacagtcatactgtcactgctctggactgtgtggagcccgctaaagtcatggtcatggcaggaacccaagctggccgcccttctcatccattctaatcactcgtatgtg

SEQ ID NO: 719854 - DNA, 248 bp, Homo sapiens
aggcgcactgatcagataatggggcaggagcatggcttagtggagactggaccgttgactggctcttgcgctttgaatttatcttgacctttaactgaaacttgtcctttaacgggatcttgtcctttgaatggaacacggcctttgactgtgtcttgacctttaactggtactcctgtgtcggctgcctctagaaccagcgtcccagcgtatgaggaactaccaccacgatgggaagagctgctgac

SEQ ID NO: 719855 - DNA, 987 bp, Homo sapiens
ggtgatgtctcacagaaagttctccgctcccagcacatgggtcccgcgaggttcctgtcctcggaaatcgcagcagcagcgcattatgtgaaggtgaatagcttccctaaggatgacccgtccaagccggtccacctcacagaccttcctggagatacaatgggtgccctctgaaatcatatcgtgcgggaagtcgacaggccggagatccaaggctgaacaagcaagcgagcgtggtgcgagtgctgtgtacacattgctggagaagacacaccgcatgcgatggattggtcgcagcgttgtagccgttacgctggaagactccctggatggtctgcgggaagttttgtgactgtctgtgctgaggcggcgtccctgatcactgagggactcttccctatgtgagttggcctgacagtctgacaaagaaaggcacttggaccggggtacccggcgtgagaatgcgcgcggagtagaggaatcggcgagagcgcagggcgccagagaccgatctccccagggggccctaattcaagggagccagtcaaggacgaaaccgatggtgcacatggccaagggatgccgggagtctgcgcgggggctgctcccgacggcacgaagagcactgggaccggactgaagtggaggatccagggtgacaccgggagggctgggggcgagaagcctggactgcgtcgcgcgagaaggcgttgaagcaagcaggtacctcgctgaacacaaggtgtgaggggcagggatgaagagaaccgacgtcaaggggcagaccaaaaggcgaagcgctaaccacgggtcaccagacggggaccacaagacgcagacccgacgaaccagcgagggctggccaagtgggccggcatagggctggcccggccgggtccctcgtgggacccggcgcgggcgaaaggccagaccgcggaggccacacaaaagggaacgagggcgggcacaacgcaggaaaacacaaac

SEQ ID NO: 719856 - DNA, 769 bp, Homo sapiens
  misc_feature (580)..(580): n is a, c, g, or t
tagggggttaatttggcgtattggggtcatggcagggggtttaatattgataattgttgtgatgaaattgatggcccctaaaataaaggaaacacctgctaggttgttaaggaaaagagtggttaggctcctacggaggcctccagggtgtgggagttagttctcccgtgctaagggagggtaaactgtctcacaccgtgtgtcccgtgcctccggccctccacatattatgcagatgtcgatcaggagttaggaaaaagggaggtaaagatgctcaaaacgctatatttagtttgttatattcgcgtgggaaaccgccatatattctggtggtgccaccggactatatatatgtggcgaaacttagctcaagtttcgccaaaaagccctccagaattatagattgcggtattttactatttgaaagaacgatttatttcacacaattggcatcttgtgcgctgttggacctcgatatatcacctgtgtcgtaagacttgttgtgctcggttcaccctcttatagaaatgtgttttcgccctgtgggctttgtgcccccacgctctctgtgctctcgcanatataacagtgggacgcgccgtataatgacgctggctgtggcccttaagagcaaccctcccagacgcctctatttgccgcgctctgatattttaactacgcgctatctgcgctgtgttccccacagtgctcttattggtgcgggtcagctggtagaacagacttttttggacagcgccgtgggatttgg

SEQ ID NO: 719857 - DNA, 165 bp, Homo sapiens
tgctatgacagtgagagcagtgcaaaagccaggagcagggacgtccaggagcctggagccattgccacagtcttcagtgcctgatctgtgtcagtgcactgaatcctcctgttaacagatgcctaatcgcgatgaatctgcccttattaatagtaaagaacgcta

SEQ ID NO: 719858 - DNA, 152 bp, Homo sapiens
tcttccccgttgaagaccacgagtatgattgggaacatgggggtgaatgacatctctgggaactagtggcaaagacagggctagaggtatgtggagctggtactgtctctgcgaatctgaagtcactctaaagtttgtcgcccgttatcgag

SEQ ID NO: 719859 - DNA, 1597 bp, Homo sapiens
  misc_feature (1597)..(1597): n is a, c, g, or t
gtcgttgtgctgcctgggagacaaggtgctaacatagatgttaagtgagatacattaacgagtggctcacataaatgaaagatatgctgagaaccctaatggacgattggacgagttcctctagctgtcaacattacacatatatagggccctctgttccgacaaccgccattaagatcaggtcccgatgtgtggtctcgttgccaagtatagtaagcgtgtgcctcgatggttcgtacagttggcacaatggcgtgcgagcacgggactctagctggtgtggctacttgcgcttataaaaacaaacgagcattctagtcaggacttgtcagatcttatctactcgtctatacttagttactcgaatgtcgagagactcaatacttacacgcaggtcagacgttagtggtatcagttgcatttcgagagggtcttgcgcgttgccacctgatgggcgtgtccccaagtgtcggaccttagtgcaggttggcgccatagagggcaagtaaacaagaacgacgacgaatggtggatccacaggcatgggatattaagcgagcacttagcagagctcaagatagggtaggggaagaagatcctctttgagagaaacacactaatcgaacgcaaagaagcagtaggattaatggcctagaagagtctagtaaagcttgtagagacaaaggaattctgggggcgcattgtacgtttcatagacataactatgaggatatattctgcacttaaaggccccgggtatcaagtcgaccgatctgtacctccattttgaccatttgttcgagtgcaaggtgctcatttgtatcacgagttagggctagtcttggattgcaaaaacttatattgtgcgagacaacgggacctggctcaagattcctcgggggaaggctggggtcacacggcgatggtttcctggccaggggcgtttcattcccggcccctcgtggtcccttattgggaagcaaacccaagggacttctgtcttccagggggcttctaagggaaccggccaaagggtgtggctcacaagagccaaaggcaagggcccaagatttcccgacgtctgacgcatgggtcggcacaccgttgcgaatttccgcaacaaaagcgtgggggacttgggggggcaaaaaccacggaggagatacctctacacccaccattttggggggcgagcatggacaccacacaaaaggggcttggtaaaacccatgtgttgccaccacccagacagttaaacagcgcgtcgcccctgtggaggtgcttctcgagataaacacccacgacagaacagtccaaccacgaccacgggggggggagagaccaacaccacaccgacgaggggcaatacaagggtccacccaccaccaacatctgtgaaacaagccgacttcacaacagacgaagctccaccccaggttgaagggacgaactcagtacagattccaaaagacgacatggtaacaacaacaaaggcgggccgcacactcaaccacacacaacaaactcatactcacagccgtaaaagccacagggaagctagaacgactcgactacacgaacagacgcaatcaccacn

SEQ ID NO: 719860 - DNA, 311 bp, Homo sapiens
aaaccagaggtcaagatagggtaatataaggggaaaatcaaagagcaggaaagctagtgtcaatagggagacatatatctaaagaagagctaatatagatagagtatgagatatatgtgatattatgcaaatataatctcaccatgatagatcatcatctaaaagcgtgtatggaatgttatgatgatagagaagtatcaggtgagattgataagaggtgacatctagaaataaaatcatatgagtctctgaggaaatgatgcataagaaggacgtctcaaagagataacctgagtatgtacataaagagc

SEQ ID NO: 719861 - DNA, 307 bp, Homo sapiens
ccccatgcatcagtttccagaaaatttaaaaattagccaggtatggctgggcatggtggctcacgtctgtaatcccagcacttgggaggccgaagtgggcggatcacaaggtcaggagatcaagaccatcctggctaacacggtgaaacctcatttctactaaaaatacaaaaaattagctgggcgtggtggtgggcgcctgtagtcccagctacttgggaggctgaggtaggagaatggcttgaacctgggaagcggagcttgcaatgagccgagatcgcaccactgcactccaggctgggcgaca

SEQ ID NO: 719862 - DNA, 207 bp, Homo sapiens
gccgagaagacatcatagctggttacggctcttatgacaccaagatcatccaagtcctgacatttcgacaagggatgtcacggccgctgctaatcagatgcgcaacttccgggtgcgatcctcctgatgccttcgctgcgaaccgtgggagataatatttgactcatggggtctggatggggacagctatgaactcgagggacatcc

SEQ ID NO: 719863 - DNA, 313 bp, Homo sapiens
atagtgcacaataggaagggtcccaggctggagagcccaagttgagaacaataatgaacaattattgtatgaacaattgttagaaacagctaatcacaaacaacctgcgggcacaatgacctcattccacacgtagcacccttcagcaggaccctataaaactttcctccagcccctgcctctttgcaggtagccccttctctgctgagctgcccactgcaacatattttcacaatttctctaataaatctgcccttctttacctacaactatcttggtcaatggctttaccacctgcaaaactgaccctagg

SEQ ID NO: 719864 - DNA, 212 bp, Homo sapiens
tgcgtttatagaagattagatagctaaagaataaactaggccgggcacagcggctcacacatgtaaccccagcactttgggaggccgaggcgggtagactgcctgaagtcaggagttcgaaaccagccttgccctcccaaagtgctgggatcacaggagcgagccaccgcacctggccaacaatgtcttttaaaaaataaaattgctctatg

SEQ ID NO: 719865 - DNA, 261 bp, Homo sapiens
tgtcagacgtaactatgtggaccatataaacagatacagcagtgtctctgccattaaaataaattattgtgttatcacaaactctgataaaaacaatgatttgcactgcataaataaagtccacgtcaagcatataaacatgttggtttacctctggggattcttttaattgcattgtttccacagggtgttgtctgagtatttggctaacccatgcttctgtgctgagttacttgacacatagcttcagtcgttctgaca

SEQ ID NO: 719866 - DNA, 810 bp, Homo sapiens
gcttacgtatgagtgctatgaccttttgtccaccatggatatatctgactgctttattgatggtaatgacaaactggaagacctgcttagggatatttatgactgaaaaccttgcaagctttaatgccacaagcaaccaccttgatctcagagcaggagcttggggaaagatctacaagagccttgaatttagtgctacacgaacagaggggaaggtccttcttaataatactctgagtttcatagtgacttgaggcataactatcaatcacaaacgtatatccaacaaattcactatcctgaacaactcgaatcactcatttatttccatattaaaatcacaaactcatccattaatgtagatacacagcactgtatgggactctgagatgtagccaattccaatacattataggacttccatcatggacatcatatgggatactgctggtcttatcctgtccctcctccaggtagagagaccacaagcaggctcaccatacacataagctagaaccactcagatgactgcactttctatggcatattggatccttaaaattcattccatttgctgcttgtctgaactttctagaatactaattaacataccttctatggatccttataagtgacgaatgcaccatatccaagtacattggaaaacaataggccgtgagataactgaatattgtcccgtcatgtataagaaccacattaaacctaggacaccgtcaccccaatgtggtccacacactctaatagctattacactggtaaaattaagccctttagaaattacaaattatt

SEQ ID NO: 719867 - DNA, 256 bp, Homo sapiens
  misc_feature (40)..(40): n is a, c, g, or t
  misc_feature (42)..(42): n is a, c, g, or t
  misc_feature (98)..(98): n is a, c, g, or t
  misc_feature (152)..(152): n is a, c, g, or t
  misc_feature (194)..(194): n is a, c, g, or t
  misc_feature (199)..(199): n is a, c, g, or t
  misc_feature (220)..(220): n is a, c, g, or t
  misc_feature (228)..(228): n is a, c, g, or t
  misc_feature (250)..(250): n is a, c, g, or t
gggaccatctcatgctaccagtcgagaagcaagctgggcncnggcagctgcctttgacatccagagaaaccgctgtcacaggcacagctctggatcangaatgggctacactgaaggctcttgctccctgttgcaacaagtccacttgctanaatgcatgattcccaatctaccttctactctcactgtgaaantcttncaaaatgctaaaatatcacanaagctttnaaaatcaatgtgtggatatatntgcttt

SEQ ID NO: 719868 - DNA, 107 bp, Homo sapiens
ctggggtgtgggtagcataggggctaatgaggtgttgctctatcttaaggctccctggcagaacctgagctggcttacgggaccctcctcacctggttccagttcgg

SEQ ID NO: 719869 - DNA, 361 bp, Homo sapiens
  misc_feature (46)..(46): n is a, c, g, or t
tgtcccatggggccccgggggccgttttttcagttttaacccccanttttgcgggcagaaaggattaaccccccccccccggggggatttttaaaccgggccccccgaacccccccccccccggggaacccgggacccctgggttctgttttgggggggcgaatttttaaagttttccccaaccttgaacttggggaaagggtttttccaaagaaaggggatccgccccaaaaaccagggggcccccccgggtttttttgtttccccccccccccttcccccttttacccccgtttttccccccctttttcccccttccccgtttactttttttgttttataaagggcaatttttttttta

SEQ ID NO: 719870 - DNA, 1052 bp, Homo sapiens
  misc_feature (16)..(16): n is a, c, g, or t
  misc_feature (38)..(38): n is a, c, g, or t
  misc_feature (45)..(45): n is a, c, g, or t
  misc_feature (51)..(51): n is a, c, g, or t
  misc_feature (62)..(62): n is a, c, g, or t
  misc_feature (88)..(88): n is a, c, g, or t
  misc_feature (137)..(137): n is a, c, g, or t
  misc_feature (139)..(139): n is a, c, g, or t
  misc_feature (141)..(141): n is a, c, g, or t
  misc_feature (146)..(146): n is a, c, g, or t
  misc_feature (149)..(149): n is a, c, g, or t
  misc_feature (151)..(151): n is a, c, g, or t
  misc_feature (160)..(160): n is a, c, g, or t
  misc_feature (167)..(167): n is a, c, g, or t
  misc_feature (174)..(174): n is a, c, g, or t
  misc_feature (177)..(177): n is a, c, g, or t
  misc_feature (181)..(181): n is a, c, g, or t
  misc_feature (190)..(190): n is a, c, g, or t
  misc_feature (194)..(195): n is a, c, g, or t
  misc_feature (200)..(200): n is a, c, g, or t
  misc_feature (203)..(203): n is a, c, g, or t
  misc_feature (206)..(206): n is a, c, g, or t
  misc_feature (218)..(218): n is a, c, g, or t
  misc_feature (226)..(226): n is a, c, g, or t
  misc_feature (237)..(237): n is a, c, g, or t
  misc_feature (239)..(239): n is a, c, g, or t
  misc_feature (263)..(263): n is a, c, g, or t
  misc_feature (265)..(265): n is a, c, g, or t
  misc_feature (297)..(297): n is a, c, g, or t
  misc_feature (308)..(308): n is a, c, g, or t
  misc_feature (323)..(323): n is a, c, g, or t
  misc_feature (407)..(407): n is a, c, g, or t
  misc_feature (450)..(450): n is a, c, g, or t
  misc_feature (452)..(452): n is a, c, g, or t
  misc_feature (459)..(459): n is a, c, g, or t
  misc_feature (485)..(485): n is a, c, g, or t
  misc_feature (497)..(497): n is a, c, g, or t
  misc_feature (514)..(514): n is a, c, g, or t
  misc_feature (526)..(526): n is a, c, g, or t
  misc_feature (540)..(540): n is a, c, g, or t
  misc_feature (554)..(554): n is a, c, g, or t
  misc_feature (567)..(567): n is a, c, g, or t
  misc_feature (575)..(575): n is a, c, g, or t
  misc_feature (581)..(581): n is a, c, g, or t
  misc_feature (601)..(601): n is a, c, g, or t
  misc_feature (603)..(603): n is a, c, g, or t
  misc_feature (638)..(638): n is a, c, g, or t
  misc_feature (666)..(666): n is a, c, g, or t
  misc_feature (670)..(670): n is a, c, g, or t
  misc_feature (676)..(676): n is a, c, g, or t
  misc_feature (690)..(690): n is a, c, g, or t
  misc_feature (730)..(730): n is a, c, g, or t
  misc_feature (745)..(745): n is a, c, g, or t
  misc_feature (747)..(747): n is a, c, g, or t
  misc_feature (756)..(756): n is a, c, g, or t
  misc_feature (778)..(778): n is a, c, g, or t
  misc_feature (786)..(786): n is a, c, g, or t
  misc_feature (797)..(797): n is a, c, g, or t
  misc_feature (809)..(809): n is a, c, g, or t
  misc_feature (814)..(814): n is a, c, g, or t
  misc_feature (825)..(825): n is a, c, g, or t
  misc_feature (831)..(831): n is a, c, g, or t
  misc_feature (838)..(838): n is a, c, g, or t
  misc_feature (845)..(845): n is a, c, g, or t
  misc_feature (851)..(851): n is a, c, g, or t
  misc_feature (864)..(864): n is a, c, g, or t
  misc_feature (891)..(891): n is a, c, g, or t
  misc_feature (893)..(893): n is a, c, g, or t
  misc_feature (902)..(902): n is a, c, g, or t
  misc_feature (904)..(904): n is a, c, g, or t
  misc_feature (924)..(924): n is a, c, g, or t
  misc_feature (931)..(931): n is a, c, g, or t
  misc_feature (948)..(949): n is a, c, g, or t
  misc_feature (969)..(969): n is a, c, g, or t
  misc_feature (981)..(981): n is a, c, g, or t
  misc_feature (1042)..(1042): n is a, c, g, or t
gttggtgggaagcgcntcgaaaagcgatgccgattctngtttccnggggcnggcggcccacntgcggtggacccagcgcggaggcggnggcggcgaggcgcgcgagaggaaagtaagaagcgggggtggcggcgggngngnggcgnggngncgcgggggngtggggnggggtgngcngagnggcctgggngagnnggggnggnggngcagggggcggngacggagnggggtgggcgngnggtggggcgaggagggcgcccgananggggaagagacgggctgggcggtgcggggggnggagggggggnggcgccagagggganaaaagagggggcgtgggacgagacagaaaaggaggagacgcgagagaggtcgcgaggagaggagaggtccacgtggcgtgtgcntccagaggagacacgccccgtgtcggggggtgtgggacgcgtncnagtcacntacgggaggcagacgagcgatgcgcnagaaaggtcgcncgtggcaccccccaganaaaggacgggtnacgtgcggcgcacnacacaaggggtccncgcgaaacggccnaaaagganagcgtngagaggcgggggagaggggngngaggcgtaatggggggcaggaaagcgtggggcgcnaaagcgcagggggcgggaggcgtggccncgcngggggnagggtggccgcccnggggccccccagggccccggggcatcgcctccgaaccccntgtcgtggcgcaacnanaggggcccnaaagccccggggggcccccccnaggggacnaccggtgtagnagcggggccccntgtcntaacggaaccntcctgngggcccntcgcagnacaaanccccccgtagggnacaagggcccggtttggggtttgggcncnagggaatgnangtttttttccctggggagcnaggaccnaaggaaagaaaaagggnngtggaaagcgggccccagcnacgcccgtggcnacaaccaaaagcccggtccccgagggcgcccccgcccggtggggaagggtggggcgccctngcccggggag

SEQ ID NO: 719871 - DNA, 187 bp, Homo sapiens
tcttttgaaacataccaacgattgtaaactgtccagtttattattattattatttagatggctacagacaatgctgggctctcacacctagcactagccttttctggctgaaagaggcttgcggcacatgatcagaccgcagggtcttctggtttttcctttttttttttttccttttttccgttat

SEQ ID NO: 719872 - DNA, 1276 bp, Homo sapiens
tggaaccacgctgctatgagagctctggactgcatacctaccaccaactcgatgcaactgacaaggcctcttgtcgccgtgcctctccaggatgtctacaaaatagagtggtatttggtactgttcctgttaggccgtagttggagactggtgttctcgaatactcgcggtatggtgggtcacgctttgctccagtcatagctgttacgaacaggaagttacaatctgtcgtagaatgcaccatagaagcgtttgagtgaatgcgtcttcctgggggacaatagtgtggacttcagagtgtcacagaactgtgtctgtacacaccggatgattcagtcagtgtgctagacagattgcttggtgacaagcaagaatagattgacgcctacctaattgtgagaagctatgcgtagcgtcattgcactttgcctccagggtgactttatcctttgataccgaatcctaggcgcaaaatcaggcgccggggcgtaactgctcccctggtacttcgcgatttggccacgagcgggctgtcacatgttgcatctgacaaaggttctgcgtgagctatgcaacggacacaacgattgactcagcccggtgtcatgggtaatgagcagtcctgagaaacgaaatgggccctgtaacacacttctttgcaaagtctctgggactggacatgctgtgccagttggttatcgagttacttggtgtaccctgtgtcaaagggccacattggtgatgggtgtagaacgtaaggcctctcctcagggaacttaattccaagccgtttgggaggtttcggccttctttgcatgttatacggtgaactacttgaagaccgaggaaccacggtttgcccgggatgccgcggttgttccagtcaaataggcaaggttgggaaccacacgtacacggcttgtgctgggaaggcattggggccacaggggtcaaccccgaaaggttccttgtcgccacggaaaagtggctttcaatggaacactggggcgtttgatcgcagtcggcacactgtcagtattattcccccccgtataagtaagccctttgcgaccaagaccccccaaccgatcgttttaaactccaacggttcgggttggcgcaccagaacatcggggttccgcacacgggacaaccgttgggtttagtagcgtttatcacaaagactctggggcggcccaattttatcacacgtcttataaagagtcaaggttaacacacacacgaacatttgggcgtctacagttggcacttaacc

SEQ ID NO: 719873 - DNA, 152 bp, Homo sapiens
tgagtgatcagaggatccgccatgtggggctcactggtctcaacatcctgactcgagcaatccatctgcctcagcctccctagtagctgggatcacaagcatgtgccaccacaccgggctaatttggtatttttaatagagacggagttggt

SEQ ID NO: 719874 - DNA, 242 bp, Homo sapiens
gaccacgcttggccccagtttcatcctcagtgaagtggagataacaacaggatctgaagcacgcatggtggctcatccctgtaatcccagcactttaggaagccgaggcaggaagattgcttgagcccaagactttgagatcagcttaggcaacatagcaagaccttgtctctccaaaaaaatagccaggtgtgatggcacacacttgtggtcccagctactcaggaggctaaggtgggaga

SEQ ID NO: 719875 - DNA, 334 bp, Homo sapiens
acacctattattaatttattctcctcttttcttaaaaatgccaacttcctgcttagggattctttccataccaatccaaattcaacacatttccctctaaatttaaacagttcaagctggaactgttttccaagcccttggatgaatgacccaaacttctgttttcaacagaagactgcttttaaaagtaaacattgaattgagactatctctccattagtacaagttttaataaaaatgtaaagtggtttgatttcagatattttgcatctgctttggaggcaaagatttgaatttcatgataaaataaaaaagattttgacatttcatgata

SEQ ID NO: 719876 - DNA, 184 bp, Homo sapiens
acgatatatggcggtcagcacggtagctcacgtgtcagacggaacttgtacagagaaggcatgcaccgcagtggtgaatacacgtcgaccaggctccatcttaacgatattgtggtggtcagcacggtgctcacgtgtcgacggaacttgtccagggaggcatgcaccgcagtggtgaatacac

SEQ ID NO: 719877 - DNA, 427 bp, Homo sapiens
agctttatgtactgtgtaggaaagcgaagatagacttgacctacaagagatgtagacagggtcaagtgtaaccaagaaataggatacttcccctggtggccaaccaaggaacggaggagccaagcatacaagagatatagcctggccacctagttctatcctgtcactcataaacgagaagtgactaccaaaaaaaaaaaagattgggggagaagaggaacttatcaaaaacattaacttggctttaaaagaaccacaaaggcgagtttaagacaattaattttaccagattacggtcaacaattcaaattttagaaggccaattaaggaggctcattaattccccagagggtccaagagctcacctaggacctctatgtatttccatttcaaagtgcagttaagtcactaaataacagctggagag

SEQ ID NO: 719878 - DNA, 857 bp, Homo sapiens
  misc_feature (5)..(5): n is a, c, g, or t
  misc_feature (67)..(67): n is a, c, g, or t
  misc_feature (75)..(75): n is a, c, g, or t
  misc_feature (79)..(79): n is a, c, g, or t
  misc_feature (110)..(110): n is a, c, g, or t
  misc_feature (112)..(112): n is a, c, g, or t
  misc_feature (114)..(115): n is a, c, g, or t
  misc_feature (157)..(157): n is a, c, g, or t
  misc_feature (173)..(173): n is a, c, g, or t
  misc_feature (178)..(178): n is a, c, g, or t
  misc_feature (261)..(261): n is a, c, g, or t
  misc_feature (266)..(266): n is a, c, g, or t
  misc_feature (454)..(454): n is a, c, g, or t
  misc_feature (548)..(548): n is a, c, g, or t
  misc_feature (689)..(689): n is a, c, g, or t
  misc_feature (694)..(694): n is a, c, g, or t
  misc_feature (696)..(696): n is a, c, g, or t
  misc_feature (702)..(704): n is a, c, g, or t
  misc_feature (706)..(711): n is a, c, g, or t
  misc_feature (713)..(713): n is a, c, g, or t
  misc_feature (717)..(717): n is a, c, g, or t
  misc_feature (725)..(725): n is a, c, g, or t
  misc_feature (740)..(741): n is a, c, g, or t
  misc_feature (756)..(756): n is a, c, g, or t
  misc_feature (762)..(762): n is a, c, g, or t
  misc_feature (857)..(857): n is a, c, g, or t
gggtnttctttcaattttccccaagaaaagatggactgcgtttttgaaacatgatgatatcattganaggggttnaaanagaaagtgcctgggcctccttctaagtgttnanannaaaaaaaggaaaaagaaaagatcttctcagttaaaaattttnggaagggagactatanatggntcttgccctaagtgagaggtcttccctcccgcaccaaaaaatagaaaggctttctatttcactggcccaggtagggggaaggngagtnactttgagtctgtgggcctcatttcccaggtgccttcaatgctcatcaaaaccaggcatggggaaggccctggcaaactgctccacccgttgcctgaggttggccagacgctgacttgtttctgagtccttaagcaggaaggatttgaaatcctggagcttggcagttttgctcttcacctctaagcnaatgttgaccccttcatctataaagtccacaactctccggaagtcatcctcacggaactgtcgagaagttaaggctggggccccaagccgcagngcccggtgtgatggcacttcggtctccaggacaggtgttcttgttggcagtgatggatagaagctctagcacccgctcagcccgagctccatccaggcccttgggcgcaggtccaccagcaccaggtggttgtcagtacanctgananaaaaannnannnnnntntagnaggggatntgccatgggccgggnnttcttcagacctgcnggagtntccggaacatgggggtgaggcctgctttagggcacagctactgcagcaatggcatgattgtgggggccccctgcaggatgggaaacggaaagttn

SEQ ID NO: 719879 - DNA, 128 bp, Homo sapiens
tcgcgctctagaggacccagttctggcccccactgttcaacctgcagactataggtttcctttccctaaaaataaaacaaacaaacaaaatatcttccaagtctactgttctctctcactttcttttt

SEQ ID NO: 719880 - DNA, 378 bp, Homo sapiens
agagattgcagatgcgaggtgcggtgttggtggtgcgcgagcctgggttggccgcaccagcaggaaagtgaggatgcacagcagctaggcagaagagtgacagcgccagtcccaccctggtgatcaggctcgcttccatgtcctccacgtcataatgagccatacggtgcgcaaagctgctcaggtggctgcattggcaggtggtgctgccgttcttgctgcccagcacctggcagccctcggtggcccagtgccctcccctgtcgctgtcactcttccagaaggcacagagcagctcctgccgtggcccaggcatcacgtccttggcaggagggtctcttcccgcctccccatcggaggactcaaggtgggagaagg

SEQ ID NO: 719881 - DNA, 257 bp, Homo sapiens
gggctgcaggattcggcacgagctgaggtcaggagttcgagcccagcctggccaacatggcgaaaccctacctctactaaaaatacaaaaattggcctggcgtggtggcaggcacctgtaatcccaactacgcaggaggctgaggcaggagaattgcttgaacccgggaggcggaggttgcagtgagccgagatcgcgccaatggcactccattcagcttgagtgacagaggtgagactcccatctcaaggtaaaaa

SEQ ID NO: 719882 - DNA, 112 bp, Homo sapiens
atttcatttagttattttcattaatatatgataggtagttaaaaaaacactagatgtgcgtattaatgccagacagacttggtaatggaataagcctgagtagaatttctgt

SEQ ID NO: 719883 - DNA, 142 bp, Homo sapiens
  misc_feature (3)..(3): n is a, c, g, or t
acncttcatagtgtgtatgcaaagcttgttgactctagcgtctcagagaggactttgctgagtttctttctgtgaatatctccgtgctgaccatgctggaacatgcattattctgctattcggcacctactgcaggggtcca

SEQ ID NO: 719884 - DNA, 133 bp, Homo sapiens
tggtcttttggtttttctagagcagcaccggcccccgcggcttttagaattcccgggctaggggtcaaatcagagctgtggttgcgggccatacaccaaagccacagaaacgcaggacccaagcatagggcaa

SEQ ID NO: 719885 - DNA, 220 bp, Homo sapiens
  misc_feature (78)..(78): n is a, c, g, or t
  misc_feature (176)..(176): n is a, c, g, or t
tagaaatcctcttctacttgtttagttctttcaccacttttcaacccccaccccccaagtcttatttctgtaattttnctttttaaaaaaattatggaacaacaattttaaattaggtaaaattttaccacatacaattttttacacaaaattatttccttctaaattcatatttngattaatagacacaaatgtatttagtctttccataaaatttaaa

SEQ ID NO: 719886 - DNA, 390 bp, Homo sapiens
cacctgtccaaaaaggccttcgatacgggataatcctatttattacctcagaaggttttttcttcgcaggatttttcttagccttttaccacttcaggctaggccctaccccccaattaggagggcacttgcccccaacaagcatcaccccgctaaatccctagaagtcccactctctaaacacatccgtattactcgcatcagagagtatcaatcacctgagctcaccatagtctaatagagaacaaccccgacccaataattcaagcgctgcttattacacatttactcggggctctatattacccccctacaagcgtcatgagtagcttcgagtgtcccttcaccatattcgacgggatctacggctcaacatattttgtagcacag

SEQ ID NO: 719887 - DNA, 381 bp, Homo sapiens
  misc_feature (371)..(371): n is a, c, g, or t
gatgcaagtccctgatatggccccccacaaccatggaaaaacccctggaaaaaccatatccaagtgaagaatgccccagacatgaaaggcccacatattatatgatttccatttatatgaaatgtcccagaacaggcgaatatatatagagagaaggcagattagtggttgcttaggctgaagggttggggaggacaaaggggtgactgctaattagtatggggtttcttttttggggtgatgtaaacgttgtaaagttgattgtggtaatggtggcacaactctgaatatactaaaaaccactgaattgtatactttgaatgtttgaactgtgtggtatgtagattttatctcaagttgttataaaatanttaaattaca

SEQ ID NO: 719888 - DNA, 344 bp, Homo sapiens
ccccccttcctgggtgggggggtgggggggatggggccccccccccccctcccccgggggggtgtttttttggggggtggtttccccccctttaaggggggggggcccccaaaagggggttttttttttggggggggggcccccccccccccccggggggccctttttttttttttttttttttacggcccccctttttttccccccccaaaaaggggaaaaaaagaaaataatgggaagggcgtaacagtcgcgcagagattctgggtaacattggatgaggaaaaagggggacaggatgaagaagaaaagaacttgtgagaggaataaagaaaataaaaaaa

SEQ ID NO: 719889 - DNA, 134 bp, Homo sapiens
gtcagtgttatcattcaactacaaaacacttaaaagtacagctcaggtgagaaacagcagccttggtgacagagcaatgacactatctcaaaaaacacaaacaacaaaagttgggtggaatttttgggaaagac

SEQ ID NO: 719890 - DNA, 421 bp, Homo sapiens
  misc_feature (11)..(11): n is a, c, g, or t
  misc_feature (52)..(52): n is a, c, g, or t
  misc_feature (54)..(54): n is a, c, g, or t
  misc_feature (69)..(69): n is a, c, g, or t
attcggcacgnggggagctggggtcactgcgcggtgggaccatggcctcgantnagccgctgcgacgtncacttgtacagcgccggtcaacatcgcggtcatcaagtacttggagatggggtttcaccgtgttggccaggctggtctgaagctcctgacctcgtgatctgcccacctcagcctcccaaagtgctgggattacagactgtcactgcgacacccaggctggagtgcaatggcgtgatctcggctcactgcaacctccgcttcccgggttcaaccgattctcctgcctcagcctctcgagtagctgggactacagggggcaagcgcgatgaagagctggttctgcccatcaactcctccctgagcgtcactctgcaccaggaccagttaagaaaccaccacaacagccgtcatc

SEQ ID NO: 719891 - DNA, 297 bp, Homo sapiens
aagcgatttgatccctcaaatatacatccctggcccaaccagtggcctgagcctccctctggtggagactcctaccacccatgagctaccccagagggtccaagacagagtgcacagagacctggggaaggaagctgaactttgcagagatgtggacaggtgcatgctacggtacaggctggtggtagaggagacccagtcttatttccaggcccacagtctctccccaaaagcccccatgaattccagatggagttctcagtgcccccggacaggcctctccagcttcacactctt

SEQ ID NO: 719892 - DNA, 1171 bp, Homo sapiens
atttagttactttgtttctgttggttctttttttcacttgtctgttgttgtgttaagtaagtgtactccttcggttttgcttatttgttgttttcacgtgcttggccgccggttgttctcgtcccttttttataggagggcctccctctgggggctgaccacctcttggtggagcctccggggttgaatttttttatggagcgcccgtctcgcgtggccccggggttgtcgcctcctcccctcccctcccctgtcctccggtgggaacccaaacatgtcccgccgtggagttaagccgttcccggggtttgaaaacgcaacccccgtgttgcgtgtccccttctctcctgttcacacagcctgtgccgtcccccccgccctgatggccttctgtccctgctggtaaaggaaactggtggacgcccatggatgctggaagaattccggcagcctcatggaagagattcccccggccattttggattaccgggtatgcgttgaggacagttggtacggtgctggtcaacccttgtgagaacgccgtattccgccttcacccggatataaatgtggccactggaaccaccctgtgcccctggtccctactgaagagctgcctccctggagccttttcccaagtgtgagccgccccccccgcctgtgtgctgaatccaaggactggaagaaggtggaagtgaaaagtcttcccgctgctctgggcccctcctggggagagcccccgctccccgggcttcgcttccacggacctcttctgtgacccagatgaacttgcttcgcctgtgtacctcgctgtcccccgtgctcttttctgagaaaactatcccaattatgggtgggaaaaagcttctgtattgagaagggtcataattgctctttctaggaggtttgttgttttgcctcgcttaattttgaggagccacggaagctccactgggggctttctcgtagcccctctcccaaaggagtctttattctgagaatttgaagctgaaacctctttaaatcttcacgaatgattttattgaagagggcccccagcccccaatgggaaactgtttttagaaaatatgatgagtttttgattgcttttgtatttaattctgcaggtgttcaagttttataaaaataaagatttataaccagaacccca

SEQ ID NO: 719893 - DNA, 215 bp, Homo sapiens
  misc_feature (119)..(119): n is a, c, g, or t
  misc_feature (149)..(149): n is a, c, g, or t
  misc_feature (177)..(177): n is a, c, g, or t
acaggcactctgccatgtgtgttgaatgaaagagaaagtgcagaagagatattagaaaaaagtacagtgataccccatgaccagcatacaaatccagaaaacataaacatcagtgtctngtgtcccatgtgtcatagtcaaagattttnggtactgctcaaaacctaccaaatagantttaaataaagtgagataaagaacacaagaaaaaaaaa

SEQ ID NO: 719894 - DNA, 168 bp, Homo sapiens
gaggaattcgatcacgtgcattgtggggaggcgaggatacttactggagaggcagagagacaggatcgagaaggaaacttcagaaggagctactcagagtcaggatgatgagttctggagaccttaaggcttagcagtgagtgttcatcacacaaatggcacgtggat

SEQ ID NO: 719895 - DNA, 317 bp, Homo sapiens
aggccttgaactctggatctacctatttctgcctctctctgtctctctctgtctctctctgtctctctctgtctctctctgtctctctctgtctctctctgtctctctctgtctctctctgtctctctctgtctctctctgtctctctctgtctctctctgtctctctctgtctctctctgtctctctctgtctctctctgtctctctctgtctctctctgtctctctctgtctctctctgtctctctctgtctctctctgtctctctctgtctctctctgtctctctctgtctctctctgtctctctcgtcgacgc

SEQ ID NO: 719896 - DNA, 958 bp, Homo sapiens
  misc_feature (822)..(822): n is a, c, g, or t
gcacacgacctctgccccgttgggcctcccacgtcccatggctctgggcggtccagaaggagcaggccctgggcctccacctcggtgcagggcacagaaggctggggtggggggaggagtggattacctccgcgcaccctggtcgccaggacagctccacatgatccgcatgatctcccgtacctgagtgtctagaaatgtactcaagatggcaatgccgccctccgcctacctttaccgaggtacaggcctgtccatctggccacagcagaggcttgtgcggggtcaaagctggaataggccaggcagcgcttccatgtggtcttactcccaagcactctctgggtgaccaacatagtatttaactggttaacgggcacttgtcgccaaggtctgtacagtcaagagcgtctagacggggccagtcggacctcctcaggcgatcgtttgtgtctactcttaggactggagccacgagggatggtttacctgtcgatccagttgaacgtctaggtatacgtttaaaagatctgtacacgctgtgacaaggtatttttggaaagagcagaagatacaggttcttcattgttgtgtcccacgttacgtatgctagatacacagtgcatagaagagtctcctgaagtcgttctcatcaaccttgcccttgtggtctctcacggagaggagaaagtcagctgcggtaccgtccacattgggtcgtgacaacttgtgttagcccggacattttacctttggtacttgcctgaagctgtgctgggttagtattgcttgacgctctggaaggaacgtataccgggccanaggaaaggggccatttgtagagtcccgttttagaaggggaagaggcacaacttctgtcgaaaattcattggaacgttggaattctagagaggttgctcttatggggcatatgtaacgtgttctgaaattcacgggg

SEQ ID NO: 719897 - DNA, 560 bp, Homo sapiens
agggaggtaaggcatagttattattagtactgaaacatgctcttttacctaacagtaaccaagtatgtctggatatatatctggtaaatatgcttatagtaggtaagaaagggacttgaggtcccaggagatttcatttaattcacccgggtcagatacaataaaggctatgagtataaatccataacttcctaaccaggtgtagggcatgttcatgactatcaaatctttggatgcgggacccaagacaggaaaagtggtagctaaaggtggatttactaataactagacgtctatgtgagaaaatatatgtatacatatatatgatatgcagaagtcacttatttaatcaggctttattctccttacaaagccacagtttaactggtctgcaacagtgggtttatgttaatggatagacaattacccagtgtaggtaactttttccaactaccacggtaatgataatctttctcacgtatatacatgcaacttctgggcttcatttccatgaagctggtatcagtatatccagtatacttggtcctcactacatgcca

SEQ ID NO: 719898 - DNA, 147 bp, Homo sapiens
  misc_feature (97)..(97): n is a, c, g, or t
aacgtgggcgagggcgcggttttttggcggcagcgctttcccccgcccgccaaccccgaggccgccttcccgtctttcgggtttgaattgccccccngcagggagcgctgggaaggggccctcgcgatgggggaggggccacggggc

SEQ ID NO: 719899 - DNA, 342 bp, Homo sapiens
  misc_feature (12)..(12): n is a, c, g, or t
cagctcggcccnggtgaggctgcagtgcattccagcctgtgctacgagagtgagatctgtctccaataaaaacaaaaaacaaaacaaataaaaaaacaggctgggcacagtggctcatgcctgtaaacccagagctttggaaggccaaggcgggtggatcgcttgaggccaggagttcaagatcagcctagccaaaatggtgaaaccccctctctactacaaatacaaaaattagctgggtgtggtggcatgcacctgtggtcccagctacttgggaggctgaggcaggagaattgcttgaatctgggagatggaggttgcagggagccgagattgcgccac

SEQ ID NO: 719900 - DNA, 753 bp, Homo sapiens
gcttcggctccctgcgttaggtctggctggcggtcaatgcgcttcctgcgaccctgcggatcacgagtgtgtggatcgctatatgggggaggggagctcagtgtatcaccatgtcaacagccagccctccggactcgtgactgtcacccttctgatttcgcgcttagatgtgcctctgcaggatgaaagctggggacgtcctcgaatggtgggcgcacctctgcctccttcttgtgcgggtggcggtcccgccctgatcccttggcagggctttgtttcttcttgttctggcctacggggagagtcgggtgccgggccccgcctttgcttgtccaccttccaggctttaacgctctgcaaaacagtgtgtagatcacacctcaggcgatgttgcaagacttccctgccagggggagtcagacattctgagtcctagaccgagataccagctgaagggaacgctgcctgtgtgaacccctgtgttgtacaagtttccagaggaaggggatgagctcctgagatggaagatctgtcctctccagactccacccttctccaagggggacataatctactctcattcagcccgttttcaggacatcgggcgactttccacggcttgtgctgggggactttacccgtgcagatggacaccgctgggccttgcccgggcgactgtcccgggttccactgggcactttcgccgggcctctggacccccgtttaccctgtttcccggggcgggcaccactt

SEQ ID NO: 719901 - DNA, 974 bp, Homo sapiens
agcgtaagtgaccatcgggacccctgcgcaattgaaacataatccacgtcactgggacgaaggggaagtggctccacctgtgccttcacggaatgtatcctccgaagctatggcctgaagacgggattctttagctactccccacctgtgtgcaggttcggtgagcggatcctgcatcaatggggcagcccatcagtacctgagctcttcaccaagtacttactggcgcctctaccaccggctggaggagaccaaggatgtgcagctagtgtactaccatgcccccctaacttaccgcttccttgacactgcataggccttccacgtcttacctaccaagagaaggtaggaccttggcagtaggtaggaggtagggcatatggctgtgtggcttaatagacttgcaccaacatacatacaggaagccctaggttggttgtagccggagtactacctactactttggcatacgaccacaccaggcctaccctggggggataaccgggtggagaagatacagcatggcagaaacgggggcatctattaagcaaggtgtaccctgcctatcactgtgctccaacctgaaggtcccctggcagtgctgagggacctgagcccagcagatctcattgtaccttctatacctagtgttccgatgctgggaggccctcgaggacagggtgggccggcgctgaccctgggcctggcaggggggagcaaccagcgggtccaaacgccgcaagggcctagcagatggaccacaggatggctagacgcgggaggacccgccatggtgctggggagccaaggcatccggcaagggatctgaggcagcatgaccaggagactatgtacagccaaaatcaaatggcggccgggctcgaacacgagaagtcgggcgagacccgtcatgaaacgacgcccacatgacctgagcctcaaacgcacacgccgatcaagttctagaccagacg

SEQ ID NO: 719902 - DNA, 178 bp, Homo sapiens
gctttgagacagtctgcacgtgccaaggctagagtgcagtggtgcgatctcagctcactacaacctctgtctccgggttcaagcaattctccttccctccctcccttccttttttttcttttttttttttttttggggcaccccccattttaaaagttttttaaccaaaagggttacc

SEQ ID NO: 719903 - DNA, 108 bp, Homo sapiens
aattcggcacgatgtttttaattaaattaaaaactgtatatacatacatatatatatggtgcttgcctgggcaacacagcaagacgtcatctctacaaaaagtaaaat

SEQ ID NO: 719904 - DNA, 265 bp, Homo sapiens
  misc_feature (229)..(229): n is a, c, g, or t
ccatgctcagctaattatttgttttttgtagagaaggggccagggtgtcttgaagtcctgggctcaagcgtcttcctgccttggcctccccaaatgctggaattacaggcatgagccattgtgctttgccagataagtaaggtttggataagtaaagagaagggaagggtattccaggctaggagaaagagagtagtagggttgaaggttagtgtgaaacttttatgtntgtgggtagggagattaatttgtcaggagcagaggg

SEQ ID NO: 719905 - DNA, 325 bp, Homo sapiens
  misc_feature (36)..(36): n is a, c, g, or t
  misc_feature (100)..(100): n is a, c, g, or t
  misc_feature (111)..(111): n is a, c, g, or t
  misc_feature (122)..(122): n is a, c, g, or t
  misc_feature (167)..(167): n is a, c, g, or t
  misc_feature (180)..(180): n is a, c, g, or t
  misc_feature (192)..(192): n is a, c, g, or t
  misc_feature (197)..(197): n is a, c, g, or t
  misc_feature (205)..(205): n is a, c, g, or t
  misc_feature (271)..(271): n is a, c, g, or t
gatctagaggatcccaggtcgacggagactctcccnccatttaggttttgtctccgtcacttcaacaaaacttaacagttccctccacgcagctaaatgnagtggtcagtnttgttggtttngttttcgtttggttttttttttttggtttggtttggtttggaganggagtctcactcngtcacccagggnggagngcaggggngcaatctcggctcacggcaacctccacctccgggtaacaggtgattcttcggtctcagcctctcgngcagctcagattacgggagcatagcaggagagtctccgtcgaacggggtaccga

SEQ ID NO: 719906 - DNA, 943 bp, Homo sapiens
ggtgcgatgcgcttgtgtccccgtggtctgacaggagcagcctgtggtcacctgcggcgtgtagttggagtgctgtggagaggtgtccgtagcctgcgccgccctgcccctgccatggtgcctcctgtctggacccgagttctgccgtgcgcgcgctcgccctgcctagtgcttgcgcctcaacgcgccgttgtgcagtgcttgagctactggtggctgtggcatccgcctggttcttggcgctggttttcccgcctgctgacccagctgcaccttacattgtctggaggaacctgccatgggctccatcatggtggaggagcagtttgcgcggcggagacccgtgcccgggcttttgcccgggacttcgccgcccacctgcaagaagtcgggggctctgccagtggcctggcttgaacggacgatgcggtcagatagggctggaggtctacacgcagagtttctcccggaaacttgcccttcccagattgagacccacgagcgctatatggtgtcgggcaccaacgttgtacgggatccttgcgggccccgagttgctgacagcaccgagtcgcttgtgctcacccgtgcccttgtggctctgactctaccaacagacaggctgttggggctgctgcttggcacctggcttgcccacttccgggggcaagatatattgcgccaaagatatcgtctaccttggtaacagaccatgaccttctgggcactgagggcttggcttgaaggcctaccacgatgtcaatgtcacctggcattgcagtcgtcatccccatgcaggtccgagctggtgccattcaggcagaccgtggacctggaagctgagcaattgaatgtgggtcaccaagctcgatgtggacgttgaggggcttacggggaaggtgccaaacttgaacatgccaaatctcttcagaccttcttgcaa

SEQ ID NO: 719907 - DNA, 1231 bp, Homo sapiens
ggcagaaggaacgtgataacagaagtaagcgatgatgaggctgaacgaacacaggaagacaaagcaagaacgaaacaagaacacacacgaacgagaacagagctcgcgatagacaacacctgcaacacttgacacgatgcttggcttcctgactgacggaacgacacgaaccacgaacggactggctgatcacacgcaacgcaaccgaagacacgcaagacttaacggacacaacgctacagtcgcatcaacgaatgtaggctcagacaataacaacagccccagtctggccaccagcaaactcccgcacgactattagctaactgacggagctacgcgagaacttcctataacgcagccttgacccaactgcacatggagaaggaatcaccttgcggcagctgcacacgcactttacgtccgctctgacacgcgacgagctgtgggaagttcacgcaggcgccgttcctactcttggtccacaacgcacgcgtgcctccgcttctctgcacttcttgcgttctgaagcaaccacgcagagacgcaacaacacgcacacaagtattcacacactctgctactggctaccgccacggaagctcttctccacttcacttggcaactaaccatgctgcacgcgacggcctaatctctccgtgcacactaactcgtggaagcctgtcaaccttcacgcaagcgcgggtgaggataagaaccctctcgggcagcggatcttccccctcctaagagcaatactccgcgctgcacgcattgcttgccaaaccacacacgcacacaacactctctctgcacacacgccttctatcaagtgtacacgcaaactatagggctccaacacaacactggctattacgcaaaccgtcctgttttaccttgacacctgcgcccgcggcaacagcactcacccggaggcaaaccttaccgacgacacacttcctactgacggcccaggtctccctcttaaacaaacaccacttaccacggccttgcggaaactaccaagcggaacgtaccctcatcctatcgaacttcgcggaaaaaggaaaggccttttcaaggaaggctggcatagagcggtatacctaaccaccagattctgcccctctggcatgacttgacaactgcggttccactctgccacgagaacctaacctggccgcccagcacatagaagcggacaacccaccaaccacctatctcgtacatatcg

SEQ ID NO: 719908 - DNA, 165 bp, Homo sapiens
ctggcatccctgcaagtcgacctcgtaaagcatccccgtctggagcatgttagctattagttagctactgtcgtgactggtaggaccctgggcgtacaggactaggaagcagataaggaaaatgattatgagggcgtgatcatgaaaggtgataagctcttctat

SEQ ID NO: 719909 - DNA, 391 bp, Homo sapiens
caaaaatagttgttatagccagtctctgttattggtgtttatgaaatagattcatgatggagatacataggtggtggttgtcatctcgagagagtattcagttgaaggagaggccaattccagagtagacatttgctactgctgatgagactggtaacttttttagagattaatggtttccattttaacacatactaaaaagatacacactaaatgggaaataaatggttgacgtttaaaaaaaatttaatttgagtttttaattaatgaaacttttaataacccagagaagtgcagaaaagtatataacagatgtttgtgtgtgtagtcactctcagaattaaacagatgtgaatatttatataagcttccgatttttttcctttctctt

SEQ ID NO: 719910 - DNA, 393 bp, Homo sapiens
gtgttagcattcatcaggatcatctgaagagcttattagaaaacatatctggggccggctgcagtggctcatacctgtaaacccagcactttgggaggccaaggcgggtagatcaggaggtcaggagttcgagaccagcctgaccaacatggagaacccccgtctctactaaaaatacaaaaattagccgggcgtggtggcgcatgcctgtaatcccagcgctttgtaaggccgcggcgggcagatcacgaggtcaggagttccagaccagcctggccaacatggtgaaaccaagtctctactaataataaaaaacaattagccaggcatggtggcaggtgcctggaatcccagctactcagaagactgaggcagaagaatcccttgaaccca

SEQ ID NO: 719911 - DNA, 748 bp, Homo sapiens
  misc_feature (1)..(1): n is a, c, g, or t
  misc_feature (103)..(103): n is a, c, g, or t
  misc_feature (114)..(114): n is a, c, g, or t
  misc_feature (116)..(116): n is a, c, g, or t
  misc_feature (140)..(140): n is a, c, g, or t
  misc_feature (146)..(146): n is a, c, g, or t
  misc_feature (249)..(249): n is a, c, g, or t
  misc_feature (251)..(251): n is a, c, g, or t
  misc_feature (339)..(341): n is a, c, g, or t
  misc_feature (344)..(344): n is a, c, g, or t
  misc_feature (346)..(346): n is a, c, g, or t
  misc_feature (352)..(352): n is a, c, g, or t
  misc_feature (354)..(354): n is a, c, g, or t
  misc_feature (364)..(365): n is a, c, g, or t
  misc_feature (367)..(368): n is a, c, g, or t
  misc_feature (370)..(370): n is a, c, g, or t
  misc_feature (379)..(380): n is a, c, g, or t
  misc_feature (382)..(382): n is a, c, g, or t
  misc_feature (385)..(386): n is a, c, g, or t
  misc_feature (389)..(389): n is a, c, g, or t
  misc_feature (392)..(394): n is a, c, g, or t
  misc_feature (403)..(406): n is a, c, g, or t
  misc_feature (408)..(410): n is a, c, g, or t
  misc_feature (421)..(421): n is a, c, g, or t
  misc_feature (424)..(424): n is a, c, g, or t
  misc_feature (430)..(430): n is a, c, g, or t
  misc_feature (439)..(439): n is a, c, g, or t
  misc_feature (459)..(459): n is a, c, g, or t
  misc_feature (461)..(461): n is a, c, g, or t
  misc_feature (464)..(464): n is a, c, g, or t
  misc_feature (478)..(478): n is a, c, g, or t
  misc_feature (485)..(485): n is a, c, g, or t
  misc_feature (488)..(488): n is a, c, g, or t
  misc_feature (531)..(531): n is a, c, g, or t
  misc_feature (549)..(549): n is a, c, g, or t
  misc_feature (557)..(557): n is a, c, g, or t
  misc_feature (586)..(586): n is a, c, g, or t
  misc_feature (592)..(592): n is a, c, g, or t
  misc_feature (628)..(628): n is a, c, g, or t
  misc_feature (631)..(631): n is a, c, g, or t
  misc_feature (646)..(646): n is a, c, g, or t
  misc_feature (746)..(746): n is a, c, g, or t
naattcccgggattgaaacaagagggcggctgaagccgatcctgagtggggccccagcaattcggaatgagccttttccctccacccgcttctgccgaccggngccctcccgcncngcctcgcaggcctccccacccgcncccgtncctcctcctccgctttcccttctcccccgtcctcggctccgacattaggggcaggcggggcaggcagcccaagcagcctgcagcttccgctgcggaggctgcncnccggaacctgcaccggaactctgcaccggccccgccgccgccgccgcccaagtccggacccatcggggggctcagctcgcggcaccgnnncantnaggggnantttttttttnntnntngcctaggtnnangcnnccnccnnnccgtggctnnnntnnnccaggggggancancagtanccggaggangccgccgctggtcccccaancnccngcgcccgggtgganggggcgnggnggcgggggcggcggcggcggcggcggccccctggcccggcccnccgcggcccggagggtgnaaacaaantggtgtacgatgaccacgggagctaagangaagangacggcgacgtcgaggagacccaggagtctgagganaangaggagcatgagatngaggaggacgaggctgattccgattatctggaggagctggaagacgacgacgacgccagttactgcacagaaagcagcttcaggagccatagtacctacngc

SEQ ID NO: 719912 - DNA, 141 bp, Homo sapiens
catgttggcagtggagcaaatagaaagtcttagtgcaaggatcaggatattgaaggtggttcagtgttgttacaaaataaatgaggtaacatgtgtgctgactgtgactgtgtgtcagatgtgtcatagcgtgtgagtcat

SEQ ID NO: 719913 - DNA, 494 bp, Homo sapiens
  misc_feature (428)..(428): n is a, c, g, or t
aaatgtcctgctgctctgtgatatcttgcattcaagtcatcaattttgttaaggtccaatgttgtcatgaaccgcttttcatggcctttggctgcgaagcccatgttccgtaagacctccgtgttggtgtgcgagttcttccagcgcttcttcgctggaactcgatggtggaaagggtgccatccacctgagtgagctgcttctcaaacctcttctttcttttcaagtgcctgcaaggcagctcgcttgttctgggagccgtgcttcttggctaaggcgagctccctctggattcggttctccaggtactcttgcttcttggccagcatctcctccgtctcccggaggcgagccagggcttccttggccgttgggagccgcccgggcccgggaggagcgggtccctttaaagaacttacccaacttgntcatggctgagcagtggggacgagcgtcccagcgctctggagacaggtaagccacagtcggagccg

SEQ ID NO: 719914 - DNA, 885 bp, Homo sapiens
ggagtgactatatggatgccccccaccctaccacacatttcgaagaacccgtatacataaaatctagacatagaaaggaaggaattcggaaccccccaaagctggtttcaagccaaccccagtggtcctccagtgacttttccgaaatagaatcaagaagaatgaaataagatgtaaacaacaagctttggggggtgactgcgtgagccccgtagaaaaaatgtcttctaatagacaacctctggtggggtggggagagcggcgagggcttcctccaagaatgtgagttaacaggaaagtgtggggctcatggcgtgtatcttcggctaaggagaaactcggggtctatggactctaggggtaggtgggtattcttcccaccatttgttaaaaacatcgccgcgggggagactagccaagactggggttttcgcagaagataacttactcacagacatagagagagtggttccgagggagggtacacacgttaacagcgtgggggatgattactaactagggaggagctgccactcagaggagagatcgcttcgctatactttgacacgaaattttttgcccctccccggcgctcggggacgagtagaaaaatcaccaagagtacctgggaggttcgaccagcgtggaaacattcacaacgaccgcgtgatcaacagttctcccaggccaagtacagggagtggagccccttgaacgcggttggggcgaacgcagaattgcgggcattcagaaagcttcccaaggggaggttgtctggaagcacctatagcccgtggggggcaaaacaaaccgggcttgagcaatttgctcgaacaacccaaacaaaaggaatcacagccgggggcccatttgggtgaactgttg

SEQ ID NO: 719915 - DNA, 451 bp, Homo sapiens
  misc_feature (13)..(13): n is a, c, g, or t
  misc_feature (376)..(376): n is a, c, g, or t
  misc_feature (391)..(391): n is a, c, g, or t
  misc_feature (438)..(438): n is a, c, g, or t
taatttggaaaancatttttaattaagctgagcatgccttaaaaaaatccttttaactcccttactatctgactctagcagtgccaagtggccaatatttatggctttcaaactttattaaaggctcacagaagggaaaatccaaagtggttcgtggaggggaagagaattaacagatagcaaaggtcgcacagatatcaaaccagaaagcactcattccctaagctgggattgaacccagggccgccattgtaaaatggcagcaggctagaacaaaatattgccaggtggttgtaggtcttggtttcaaggacttaaaacaagatgggagggcctgcggaaaagtttgctaggggaccatatagaaagttcaggncaaaacacaccagantgggctatagttttaagggccaacctcacaaatcctttcttacattnaaaactctaccgt

SEQ ID NO: 719916 - DNA, 788 bp, Homo sapiens
cacggggtaggatagagagagcgcgtagaagagagaggatgtctctctcagactggcacctggcggtgaagctggcctcgtagccaggccacttactccatcagtctattcttcggtctgccagagacagaactgggagtagatactcgctagggggctatagtactttcattttcttgaagcaggttatctgctggccacaagctccaggaggtctggttcgcagacacctgcagtctgagtatgactctgatctacgtgtggtcggaagctaaaagatgaccgagacacttgacttcgtatggccattcaacactgggtccactgtccatgttctgcgaaatgtcctggtccttgaagcctgaagtacatgcaaatcgcggaaccgtgtgggatcacaatgtgtgcgtgctcactgtatgagagttcccgggttgttgcgcatctggactcctgcagcaggcagacatcctgcttacatgggatggcggtctttaagatgctacagtcaactaaggagtctctggatcagatcattgtggccaccccgagtgctctcagtcgagtgaccctatcgctcttggggttctccagtgacaagggacctcttctctgtcttcgctgatcccaatatgcttgaatacgttggtgcctgctctacccaagcctcgtcatgccgttgtcctggttctgcactccgtacaggcgtgcccatgcctgggactgatcctcttcccgggatgcctccagctcatccggggttgcccgtggctctgttgaagggccca

SEQ ID NO: 719917 - DNA, 491 bp, Homo sapiens
  misc_feature (2)..(2): n is a, c, g, or t
  misc_feature (208)..(208): n is a, c, g, or t
  misc_feature (218)..(218): n is a, c, g, or t
  misc_feature (291)..(291): n is a, c, g, or t
  misc_feature (298)..(298): n is a, c, g, or t
  misc_feature (353)..(353): n is a, c, g, or t
  misc_feature (358)..(358): n is a, c, g, or t
  misc_feature (376)..(376): n is a, c, g, or t
  misc_feature (421)..(421): n is a, c, g, or t
  misc_feature (472)..(472): n is a, c, g, or t
gnaattcggcacgaggccactccataccactccactccattccactccactccattccatttcactccaatccattccattccactgacgtccattccattccactccagtcaattccactccactcacgtccattccactccatttcactccactccactccactgcattctactcccttccactccataccattccattccactcnactcatctcnactcccctccactccactccattccactccattccattctgcacctttctactccattccactccactccacnccactcnactccactcaactccattccattccattccatttcattccatgacaatccccacnaatcnattccacttccactacantccaatccaagccattccactcccactacactaaattccattaanattccgattctaaatccatttcattccattgctttctttcggaaggatctnactgtggtaacccagtaat

SEQ ID NO: 719918 - DNA, 362 bp, Homo sapiens
ctctggaattacaaaagtcgtattttaaatcttctaacagatgaagaagtaaatattgatttgccaacacagtccattgttccaagaacttttgagcttaaaccaggaatggttctgattttgggtgctataggccgtatagatttcctgcagggtcagtcagcttggtttacagacttggcttccaacatcctcactgtgcatatcacctacttggacagggcagacgctttgtatcagaagcatgcaggttatacgatacttcagattctaatgggtacagatggactgggtgcatctgaagcaagtgccgacatgaaggttgcctgtgcatgttgaggttcagtaacacctaattttgg

SEQ ID NO: 719919 - DNA, 97 bp, Homo sapiens
cttctttcacaggtcttggcctgttgtccaggcaagagtgcagtggcatgatcatggttcattgcagcctcgaacatcctaggctcacacaatcttc

SEQ ID NO: 719920 - DNA, 215 bp, Homo sapiens
gacaaagttggcaaggaaacctggctgcccagaagccacagcctgcttcaaccgtctggatcttccaccctacaagagctacgaagcaggtgagagagaagctgctgtatgccattgaggagaccgagggcttggacacggagtagaccgaggcctgccctcccacgctccccagcgctacattgtagtcctgagtcctcccgtgcctgagaggc

SEQ ID NO: 719921 - DNA, 669 bp, Homo sapiens
caggtgtacatttgtaaaccttcatgctgtaaatggaatttgttttatctctttgggatacatttgcattttagtgtacatttacgtccctgccctctttgacctggcaatatagtgttgtataatgtaaatttatttctccaaatcgagagtgattttttaaacaacttttttatccttctatatggctttcacgcaagctatgaaccagctttctttcttacttacttgtgacgatcactctttgcttttataacactagcttgttgacctgcttaactatggacctgctagcaacttctggactcacctttcaacttgaagctcagggtacttgtgcataatagaaacgtattggactgacgactactttgcgttaccatgggaggccacatgccttcttctctcactccttattaaactgtgactgtgacttctctcttcctcttgctacacgaacgacgctactgtactctcctttgaatagccctactcccaagtaacgcagcaaatctgtatgataacattttttcctctggacattaagacataacagtaacacgatgtacatttacaagcggccttatgtacatttcccaacaatccttttctaagcgcaacacttgtgaccatatgtgtataattcaacaatcgttctttaactccctt

SEQ ID NO: 719922 - DNA, 300 bp, Homo sapiens
  misc_feature (83)..(83): n is a, c, g, or t
gttaccgcttttcccctttcaaccccatttgtggcctttgtccagggccccagattaaccatgggttcccccctgcatccccnccgtggggtgttggcctcccccttgcagcaactgggcagtgattttaaaaggccccccgtcccccaagctatgtggcaatgaaaagccaacttttttgtgcccgattgttttggcataggcatgataaatggggattgggacgtttttaatcagcctttgccaaaaaattgtcttgaattttaaaataaacccccaaaatttgttccttgggggcca

SEQ ID NO: 719923 - DNA, 285 bp, Homo sapiens
  misc_feature (8)..(10): n is a, c, g, or t
  misc_feature (80)..(80): n is a, c, g, or t
  misc_feature (169)..(169): n is a, c, g, or t
  misc_feature (178)..(178): n is a, c, g, or t
  misc_feature (193)..(193): n is a, c, g, or t
  misc_feature (195)..(195): n is a, c, g, or t
aaagaatnnnacattccagactattcagtatcatcatcccaggaatctagtaacattccatggggacttctacagcactntcttagtatagaacactcttgaatccacatgtacactgatttatcttgtcctttgttgagtagtcagcccattagcattattctggtcnaaatccatnaacacaggaaaactncnagacatattttctagttcttgaatatctcccaatagtttttcttctctgtataggtcatttgtagttgtctgtccacaggattatttata

SEQ ID NO: 719924 - DNA, 372 bp, Homo sapiens
cgttgtcccggatccccttcgacacgtgtgtggccttcattctctcataccgattgctggtcgaaccacaccattgctggatgctgttccccagctgcacgatgatgcagtcgccagttctgaagctctcacatgacacagattcttcgttggcacggaccacacgccgccctttgacttggatgagtgtctgcaccaccacgtacttgggtatctcgttcgtgaatcttgctgacacacgtccgtttttgtaatgcaggccagacttgaagtggctgaggaaggtggccgtctcgaagctatgggcctcatgttggtccacggcccggccgttgagctactctgccacatgcacggtgaagttggcggccg

SEQ ID NO: 719925 - DNA, 147 bp, Homo sapiens
cgctctcaccacccctctgcacagccatggacagtcacacactcggtgcagttgggccgtagcggcccagtcacaacctcacaggcgttccatggaagccctcgtggcagtgcactcccccgttgccaggaacctgtccttggactg

SEQ ID NO: 719926 - DNA, 432 bp, Homo sapiens
tccggcttgggatggacctccctacccatgtgatggatccctggtctttcctatagtttgagcaacagttgaccaaaaggttatggtcttcagcgttttacttagatccacgactagatacttgggtctgtattcttcaaagtgtggggctgcctattctcccaggaaccaaatggcctccgtcttaagaaagtatgcttactaggaaataccctgcctaccttaggaataaatgctacttaaggaaaaaataagagagctgaaaaagctggtgccatttgaaaaaaaagggaaggaatgagatttaactggtgctcaaagcttctccgatacaaaatatttggtcatgtattcataatttgcttgacatttccagcaaagcgaagatggcaataacaaaaggaacttcttacaagagaagagaaagaccca

SEQ ID NO: 719927 - DNA, 149 bp, Homo sapiens
ccttctacgtctcatcactgacagtgtcctgtcaggcctgatgaagacactttgaatttattgcagggaccaaggtaacagtcagaagccttggatttcagccgctcctcttatgctgcctacctcggccagtgatgagacgtagaagg

SEQ ID NO: 719928 - DNA, 284 bp, Homo sapiens
aaggggtgagagaagtaagttactatagtgatgagaagactgcagctaggaatcaacgatacgttcacatagagactctaagagaagcctgcaaactagggaagggaagaaagtctgagcggagagaagagcagccccacggcattgagtgacatgaagaaaggggttgctcatggaactttcaggatctctaagccagggctcctagaagcaaactgaataactaagtactggcacctatgacacaaaccccttctaacgctccttagctctcgcttatttaa

SEQ ID NO: 719929 - DNA, 513 bp, Homo sapiens
cgcatgtgtctacgtttactgtgttcaggagaatacaggcatgggatcatttcggtggctggaagtatatgccaggcaagggagataaggtatacgacaagactgatgtgttcatgtacctctcatgaggtggtcagagaccttcatgtcttcaaagactagtcagcacatgaagtggtttagtgtagagataagatgggttgtgtagggataattgaagctaggcatggagtacatgtggttttggctgtcgcacacatacttgtttcagagtatccatggctcacagtggcatggtagaaatgaagctgtgagccttctcgctttacatctgatgtaagatactcctgttaccaaatagtacgtctggtttagttagcccttggatcaaatcctagcttaacatggtataggatcttgggaaaaacaattggttgggttgcccactttccgtaggatcaagagcagaacctttcccttggcacagaagaacccaggttgcgctgcatacct

SEQ ID NO: 719930 - DNA, 111 bp, Homo sapiens
ttaactggaggtgacttcttccgtggctgagacttctgtctctcctgggccctctgagggatcttcctccggcctctctggtggcgctggacccagccactcaactcgtca

SEQ ID NO: 719931 - DNA, 231 bp, Homo sapiens
gcagtcacatgacccgaatgcccgccttaacctcccaggctttaaaactcttaaagggcagagaggcggtcagcgcaaggtggttaaaggaccctacctattttactggggagaaaaaaaaaagtcttgttgcagcccgtgttccctctcacttcctgtcaggataggaagtgatgggaaatctttccaatggtgtcacagggattctgttatttccctaatcaaaaacca

SEQ ID NO: 719932 - DNA, 619 bp, Homo sapiens
tcaccgctttatactggagatgctaagcgtgaagaaataaactatggaaaagtctaagttcagtggtctattaaattaatatgagagtcaagtatttatgcttgagatgaaaaaatgtcaccagactaaattttgagtcccattgctaaaacagagatggatagtagtaacgtggggctcttttcaactgaaggaaatgtataaaatatttaaaaagaaaactggctgatgcctttaacctttcagctttaataatccttatccttttaggcttgagtgatagcaattataacttaagaggaactggtaccttcaaattacaataagaaatcatcttgcaaaagagagagaaagtcggtgtattggtgatttcttagcgggtaataatggcaatccacttttccaccctcagtttctcttctgaccggcaactctttccccataatatgctgcacaaggcaatggaatgaccacttcattcctgtgaggttttgcctctactagagatcgtgacatccctcagaacagcattgcttcctccagtcctccttggtaccagcagtgcactacagagtatcaattagctacatggtattcatttcctccaagatcaggctct

SEQ ID NO: 719933 - DNA, 665 bp, Homo sapiens
aaatgaagtaccaggctgcagtaataggattttgtccataataagggatatgatattcattccagtgtgggataggacacatgtacaatagtagggcttatatctgaaagctacactttaagtgaagagtaaatgaaaagatagatatgtcaatgaggagggtaatccctagtgagaaccttatgaagtgaatcgagagtgacttattgtggagcaaggaagtagattgacaggaatgagtggaggagggaaggggacagtatgttttcaggtaatgcatgggctgttaatgagttgttctacacgggtagaattagatccaggataccaccagacttttgttgatctctgagaagctaagatattgctcttaactgcagttaccagtgatcaaaattaggaaacttaaccatgtaagtaccgattatgctaattatacagtgccacaagtcaaatggtgtccaatgatcctaataattatttatcatagcttgttcacaaatcgaagatcatacatggcattatgattgtcatgtcatctccagtctccgttctaatctggaacagttagtcaacattgtgacacctcaaacaaatgcagatacgggaagaccgggagtcgcaccggggtacccacagactgggaatggcagagggccgggaca

SEQ ID NO: 719934 - DNA, 104 bp, Homo sapiens
gcctctgcggcattgtggggcgtactggcggacacctgtggggtgtactggaccgaccacctggaggggcatctggacggacccttgacggcctactggacgga

SEQ ID NO: 719935 - DNA, 287 bp, Homo sapiens
caagagaatacaattcctagtgaatacagtatggagggatgtgaaggacctcttcatggagaactataaagcactgctcaaggaaatgaaggaggacacaaacaaatggaccaatgattgcgagtctcatggataggaataatcagtatcacgaaaatggccattactggcgaaggtaataaagagattcactgctctgcccatcagagaactagttgacactttacagtagaagtagaaatagctacttgaaagttaatatgagagtcgaatcttggcagtcgggc

SEQ ID NO: 719936 - DNA, 591 bp, Homo sapiens
  misc_feature (38)..(38): n is a, c, g, or t
  misc_feature (76)..(76): n is a, c, g, or t
  misc_feature (98)..(98): n is a, c, g, or t
  misc_feature (100)..(100): n is a, c, g, or t
  misc_feature (102)..(102): n is a, c, g, or t
  misc_feature (109)..(109): n is a, c, g, or t
  misc_feature (156)..(156): n is a, c, g, or t
  misc_feature (158)..(158): n is a, c, g, or t
  misc_feature (165)..(165): n is a, c, g, or t
  misc_feature (167)..(167): n is a, c, g, or t
  misc_feature (169)..(170): n is a, c, g, or t
  misc_feature (182)..(182): n is a, c, g, or t
  misc_feature (184)..(184): n is a, c, g, or t
  misc_feature (198)..(199): n is a, c, g, or t
  misc_feature (231)..(231): n is a, c, g, or t
  misc_feature (252)..(252): n is a, c, g, or t
  misc_feature (256)..(256): n is a, c, g, or t
  misc_feature (263)..(263): n is a, c, g, or t
  misc_feature (268)..(268): n is a, c, g, or t
  misc_feature (277)..(277): n is a, c, g, or t
  misc_feature (288)..(288): n is a, c, g, or t
  misc_feature (290)..(290): n is a, c, g, or t
  misc_feature (297)..(297): n is a, c, g, or t
  misc_feature (324)..(324): n is a, c, g, or t
  misc_feature (339)..(339): n is a, c, g, or t
  misc_feature (343)..(343): n is a, c, g, or t
  misc_feature (345)..(345): n is a, c, g, or t
  misc_feature (372)..(373): n is a, c, g, or t
  misc_feature (388)..(388): n is a, c, g, or t
  misc_feature (401)..(401): n is a, c, g, or t
  misc_feature (403)..(403): n is a, c, g, or t
  misc_feature (417)..(417): n is a, c, g, or t
  misc_feature (420)..(420): n is a, c, g, or t
  misc_feature (428)..(428): n is a, c, g, or t
  misc_feature (434)..(434): n is a, c, g, or t
  misc_feature (457)..(457): n is a, c, g, or t
  misc_feature (525)..(525): n is a, c, g, or t
  misc_feature (533)..(533): n is a, c, g, or t
gaggggagttataagacagagggagtggggtgacgctntgggtcagggtggtgcccacccagacccctgtgctggnagctgcggtgaattttcagagntntnttttttntcaggtgagcagcctctgaccaccacggctgcagaggtctccgggantncccttcntntnntccccagagggntncgcaggggtggatnntgcacaaaagaggccaaagcgctcgatttttnaggaaggaggaaaagcactanttanaaaaaantattnaaaatgcantcgcccagctntnagcttcnttgtcactccttaccagggacagagtntgaggagaaagccgntttnantgagacgccgctccccagcgggcaggnnaagggggcccccttnagacacccccgantntttatttggaaggntgntttttttngggttntgccaccacagcttccacaagtngaggggcggccgagctgttgtgcagcagagtgtgagctggcctgccactcggggcagcagcgcctttncggaaggnttctggcctctgtccatgttctggccggggtagaaatagggacatgatttcaagtgaa

SEQ ID NO: 719937 - DNA, 148 bp, Homo sapiens
gcaagagatagcgtgcaacagccaccctggcgccaaggaggatagctcagccccagcaactacagtcgggatgccaaggccagccagatgtcagggcccagcagggtcaaccttgaacatggctccacaaccaggagtgggccaggta

SEQ ID NO: 719938 - DNA, 433 bp, Homo sapiens
agataaaatttgaaatctggttaggctggtgttagggtaggggctaggctggagtggtaaaaggctcagaaaaatcctgcggaagcaaaacaattctctgaggtaataacataggattatcccgatatcgaaggcctaccaggacaggtgccgcagtgcggcgcacacggcacgtgacacaacggccacgtaacaagagcgcgcgactgacgaccagacacgacagacgggagaacgcgagggagagtaacagaaagcgacaaataaagcaaacggagacgagacggcagaaggaagagcacaggagagacagaggaaaacactagcggaccgggaccaacacgaaagaaaagaaacacgaacagagcaaaaacgcacgaaaagcgacgaagacaaacgacaaagcagccccagccacacgacacaaaaaaca

SEQ ID NO: 719939 - DNA, 373 bp, Homo sapiens
  misc_feature (337)..(338): n is a, c, g, or t
  misc_feature (363)..(363): n is a, c, g, or t
gactggagaaataggaacacttttacactgttggtgggactggaaactagttcaaccattgtggaagtcggtgtggcgattcctcagggatctagaaccaggaattaccatttgacccagccatcccattactggggtatatacccaaagggattataaatccaggcttccaataaagacacctggcacaggtatggtttaatccgggaactaatccccaataggcaagacattgggaccaaccgaaccaattgattggttgtggataaggaaaaagtcgtggcacatattatcaccatgggaatgagtattgcatgcacataaaaaatgggatganngttcatgtccatttgtaagggacantggatggaag

SEQ ID NO: 719940 - DNA, 200 bp, Homo sapiens
aaatttttttttttgtttgtttgttttaaaccagcccgggggggggggcccggagctccccccccctattgggggttttgggaaagccagccctcttgaatttgggaattgggttttttttataaaggggaaacccagtttttttttttcccatgcggcccgggccccatttgttttttaataaaaccgttttccttcca

SEQ ID NO: 719941 - DNA, 273 bp, Homo sapiens
gtttcttccagtacatccaagtttaaaattattagcgaaatggtccatgttttttcaattactgctgacacgattctaagctaagtgaaggggaagatctgagagcatgctgtttggactgttgatgcatattcatgatgtaacaggtcctgggcctcactttaccccattcgtaaaatggggataatgtcacctgcctcttacctacctcagagggatttgcgaagcaaactgttaatcttcgaaaacgaccatttacttttaggatatcaa

SEQ ID NO: 719942 - DNA, 460 bp, Homo sapiens
gtcaatactccttaatcaactcccctttatatatacatctatccgttagttcggtcccattgagaaccctgactaatacagtaactactggtgagtcttccaactgttctctgtcctgtgttctgcatatgtaaactagggaataatgatgcttctgtcgttatgataataaccattgtgaaaatcaaaataaatcatgtccatcaaatgctaatggaaaatctgagcacataataggttctcaggcagcatttcccccttctacttttccctccattcttctcagtctaattatttattaaattgtgactctattcttcatggatcaaagaggataatgtaataggtaaaggcttgtgaaattactgtgtttatcaaacaaaaccaatcgaatatgcatgctaccacacaattcaacatgatatataaaagtgctttggaaagtgaaaaaaaagaaaaa

SEQ ID NO: 719943 - DNA, 804 bp, Homo sapiens
  misc_feature (1)..(1): n is a, c, g, or t
ntcgttcgaccgctctcctcgtcgccgcggggaggttggtggccctcccgcccctccgctcgttctgtctgttggtcggtcaggcagcacccgaccacgttcggtgctccctttttttgggcgccccgccccccacacttacgctccacaccagagggcgccaactttttttgatatcgcgcctctctctcctcgcacacacaggagcagcttgtcgcaccccaccccccactcatacacacgttgtttttgtatctgtttcccccctccgtactagttgctccctctctcgcgtcgtacacactccccttcttttcctccccccctctgcggagtatagaagaggggggctccaccacaccaggtggtgttcgcacaccctctttttctgtgtgaaattggggggaccccccgccgccccatacgattgggacgcaccccgctggttctctccccacactactgtggtttgttcttctgtggatctgctgtgggtaatattatttataaatattgtggtgaatcctctcccccacttctctcccacgcgtgcgtgtgagagagatttttttcgcacagcgcagagtatctctcctccccacaaacccttctttgtgagagaattatgtgcccaagcaatagccccctcccccgcccggtattatgtgtgggttctctctcacccccccaccacgcgcgtggagttgtatgtgtgggggcgtcccttcttttgtttccccccccccccacaaaaaccctctttttttttcccacacaaaaaacccccacaatttttctggggga

SEQ ID NO: 719944 - DNA, 848 bp, Homo sapiens
ttccgtgcgtagagacagacttcccgactctatgcgtgaggagatagggacacctggagaagagaatcacaccacacataccagtcttgacctaatgggctcaatatgcgatttctaggcatgatcgagggcagtggacacataaactttggtgatagcgtcagagacaaagacccaaagcttcccaacactgtgacccctggcactgatctctgcccatcgcccgatgaataaaacaggccctcctgatgctcggatcacatatacgacctcgtctacaccactaggcacatgcagcaactgcataattctggacgccagcccataactgatctcaaacccaatactctagtcgtaatatacctcacagaaatgcctgccattctcttgcacctacatctgggttagacatgctattaccatgttagcaattccaacagaccctgaggaaagaccctgctaccaactgctgtttgcgccaacgaggcccgaagaggcgacgcctgccactgaaattgggggtcttagactacttatgagactggcattctgcctgattacccccccccttatccaccgttctccttggggcctagggcaaggtaagaccttaccaaaccatcagtggcaaattcttcctgaaacatccgggacctttaaaaggaattgaatgcttgagaagcttcccgaaatcactaaatctttctatcccaaccatgcctatattctcaaccacccgcgggtatcgtcgctttttggaggatgtcaacgggtccctcccgccccatcctccgctttagaacctcggcaaagtggggaaataacaagctccgcccccaccctcagag

SEQ ID NO: 719945 - DNA, 219 bp, Homo sapiens
cgcccgaactgcaccatattaccgggcgtgctacttcgcgcgtgtacgatacggccaagggcatgctcactcgaccccaagaacacgctacatcgtggtgagctggatgatcgcgcagaccgtgacggccgtggccggcgtggtgtcctaccccttcgacatggtgcggcggtgcatgatgatgcagtcggggcgcctaaggagctcacatcatgtaca

SEQ ID NO: 719946 - DNA, 368 bp, Homo sapiens
gggctcacagcttctcaagtttccgggattacaggtgtgtgccaccaagcccaggtatttttgtatttttactagagatggggtttcgccatgttggccaggctggtcctaaactcctgacctcaagcgatccgcccacctcggctcccaaagtgctgggattataggcatgagccactgcacccggcctgtgtatcattttttatagtagtctatgatcctttgtatttctgtggtatcagctgtaatgtctccctctttcatttctgattttaagcatttcctctttttttattaatctaactaaaggcttaccaattttccgttgttgttttttttggttttggttttttggagacagagtctct

SEQ ID NO: 719947 - DNA, 358 bp, Homo sapiens
gtgctcttggtggcactcggtcgagagccatctgggggttctggcgcccaagaacgtctagcagaaagacgcccagattgagcgcacctacgtggacgaggtcaacagcgagctggtcaacatctacaccttcaaccatactgtgacccgcaacaggacagagggcgtgcgtgggtttgtgaacgccctgaacaagcagaagggggcgccgcagctgttcgtggcccgcccgaaggaggctgaggtgtccttacaggtgcccctaatccttggagggatgattaacccaatttcctctaccacaaaggggaacaaaccctttttcagacccccaccaagaatgcgttcaagatgcaac

SEQ ID NO: 719948 - DNA, 462 bp, Homo sapiens
atcccagattacttatggtgatgggtgtggcgtgtggatcacgaggtcaggatggattgagatcatgctggctaactcggtgaaagccccgtctctattaggaatacgaaataattagtcagcgtcgtgtatgaggccgtggagtgctctgataatccccatgacatcacggcgggagcactgatggacacggagaatggcatgaaccccccggtggatgggagacgccttgacaagtggtagtccacggatctgtaccaactgctacttccagcctgggtgtagggatcaagactctgtactcagattatagaataacatacatatgataatgggttatgaacttcacgctaggttgttctacttatgtcccttgctacttcctcagactggtacgcaccaaggtgagactaactctatacactcacgactgactctcttccatacacaccataacaaatg

SEQ ID NO: 719949 - DNA, 1088 bp, Homo sapiens
  misc_feature (14)..(14): n is a, c, g, or t
  misc_feature (131)..(131): n is a, c, g, or t
  misc_feature (158)..(158): n is a, c, g, or t
  misc_feature (280)..(280): n is a, c, g, or t
  misc_feature (396)..(396): n is a, c, g, or t
  misc_feature (549)..(549): n is a, c, g, or t
  misc_feature (605)..(605): n is a, c, g, or t
  misc_feature (610)..(610): n is a, c, g, or t
  misc_feature (645)..(645): n is a, c, g, or t
  misc_feature (685)..(685): n is a, c, g, or t
  misc_feature (708)..(708): n is a, c, g, or t
  misc_feature (744)..(744): n is a, c, g, or t
  misc_feature (749)..(749): n is a, c, g, or t
  misc_feature (751)..(751): n is a, c, g, or t
  misc_feature (761)..(761): n is a, c, g, or t
  misc_feature (782)..(782): n is a, c, g, or t
  misc_feature (784)..(784): n is a, c, g, or t
  misc_feature (795)..(795): n is a, c, g, or t
  misc_feature (824)..(824): n is a, c, g, or t
  misc_feature (867)..(867): n is a, c, g, or t
  misc_feature (884)..(884): n is a, c, g, or t
  misc_feature (899)..(899): n is a, c, g, or t
  misc_feature (904)..(904): n is a, c, g, or t
  misc_feature (927)..(927): n is a, c, g, or t
  misc_feature (929)..(929): n is a, c, g, or t
  misc_feature (1017)..(1017): n is a, c, g, or t
  misc_feature (1034)..(1034): n is a, c, g, or t
ggtacacatgagcngtggctgcattccacacagaagccgacacacctcgcaggaatgccccacaaaacagagcgcaaacaaatcacccagcaggcccgcttcacctggctgtcaccgccgaactccctacncctaagagcacagaagagaacatcgcnttgaatctacagacaagcgagggtggggcgagcggcagccagggctgccgggatgggagcggccacagacacaggcccccgggtgtctgtctcgagacacaggtggagaagccgcccaaganattccagccagacgggagcggccgggggatgccccagcacagtagcctgcctacaggactcccctggctccctcagtcctggcagactctggcatgacaccaaggccagccgtccnggctctcggccctgtcactgtgtctgtctcatcccggggccccacagcccccctcccgggcaggagccccgcccctcccctctccatcaccccctcggcccccagccaacccacagcgagacccacacaggtctcgcccagctcttaaatgtnttgccctcaaaggcctggagattgaaggcagtttccagaaacttcttcagttacancaggngagttttcctgtttcctgtggctggtgcagccgcnggggtcccggccaacaaaccaaaagggccgtgcgcgcctnaggatggtcatgaagcgtgggcngatgttgttatagtagcccatgttcttgttctcctnctganancaggacagcnccgcacctgggttcttctctncnttctgcttgancaggtcgaaggggaatggagaaaactgcnccaggcgcgttaaggccactttctcctccaggtcctggctgcnccgctccttcaccaggncaaagtacacctttnccgtncagaagatgagccgctgcacctncncaggggcccgttctgcggccccatcttcaggaattacccgctggaagctggtcccggataccatttggtcaaagctggacttggcctnttggttctttaacaganaattaggtgttaagaaaaatagcggcttgcgggagggcagccggtcctcccggc

SEQ ID NO: 719950 - DNA, 306 bp, Homo sapiens
tggcctgatccatacagaaatcgtagttgcttagatatgcttatgttttcatccaatattgtgggggtgtgcgtgtgtgtgcgcactgtatgtgagcaggtgggtgctaagcgtgtgcaaggtgtgtgctgcgtgttggtgtgctgtgagctgtgttcatgtatttgctgcgcatgagtgtgctgtgctggagtgtgcatgtgtgtgctgtgtgtttgtagttgttgatcaagggccaaggagcacgcggacatgggaacacggacggggctcacaccatgacaacatcggagaatcttagcggga

SEQ ID NO: 719951 - DNA, 1579 bp, Homo sapiens
cccgatatgtgcccgaaggaacccgaagggagaccccgacctcattccatcacgccagagctccagaaacccgaacatccttatcacagagcccgtcatgatacccacattcgggtccaaagctatataaggcatccatcacttgattcctgagacccgcaaggccgcgccaccattcacgatacatcgagcgctcgagaatcccagatgatggaccatggaacctcgacaatcccgatatgccagagcatcgacgactcatcaggatctctgacataccggggaccttacttccacatgccacgacccacgggtggaccacatgaaaacaagtgggcacttctatcccacaggacctgcatcctgccgcaagcacctgtgccggcgagcccgccaccagccaccggcagccaagcgcagagcacagcccgcagcgagcagccgccgcctccgcgcgcccgcgccgcagcagcgccgatcgcggccgcgcaacccagcccgcgcccgcccaccagcccgcgacgcccgcgccccaagcgccacacgcgccacagccccctcaccctgcacccgcgccagcccagccccacccaccaccaccaccccaccggctcgcccccctggccacacccacacgcgccaccccccaccccccaactgcgccccccccccccctccccgtcgctcccccaacacagcccaccacaccggccgcccaactcacacccccccaccaccacgcacacccacccgcccgcccacccccaacgccgccgcccccgccacacccacccacacagcgccgcagacacgccccacgcccccgcctccgccacaccaccccccagccccccccaccccacccccccagccccccgccccgccaccactacgccagcgaccgcccccacccaacccaacacccaacacacgctaccacgcccccatagcccagcccccacacgcagactccgcaacccccgacatccacaccgcatcccaagacggacgcaacacccgacagccgccagccgacgacccccccccaatacacaccaacagaccggacgaccccacaaccccaccacaaagcaccacccacatcgcgccacacacaccgaccacccacaggccacagcacacaggacccccaccggccccacccctccccaccccctcactcccgcccaccccggaccaaccccaccacccagcacggcccgcgccccccacgacccccatcgcacgggccccccccgcctgccccacccacacgccccccaacaccaccaccacaacacacagccacacaccaccccagcacccacaacccacggccaccgcaccgccaaccaccgcacccacacccccaccggacgccgcacccgcctcgcgcaccccagatcgaaaccgcccccaccgacacccctcgccagcgccgggcacgccacacagcgaccacgcaacacacgtgcaccccacagccgacatcccaccccacggagcgcccccacccccgcgcgagcacaccacacgcacagacagccgacccaccacagccacgcgcaccacaacatcc

SEQ ID NO: 719952 - DNA, 508 bp, Homo sapiens
tcgcgaatgtgttcacagatgcaaagatggatccgaacagagggcagatccatgatctggtgatctcttgattgccaggctgtgctcttcgaacataagtggatatgtgagattcacacattcgagtagtattttatgcatcctcatttgatggggctgtaggcatgagttgttagaacaggttaaattgacatgacctttgccttgtgctggtttgttgtctagctctggtttgtaatcatgcttctggttgattactgcgcgagaaactattttttttttttcctgggtattgtctattcagcctatgccaagtccttcacacttagagggaaataaaccacagctacagtgcaccttagccctactttcctacttaaatgttacaatgttcctctttctctgcaacagtaatgagatttgccagtgacttgacgggaaaacacaccggattctgggactttggattttcctgctctttcgaggagaatcggtggataactctaga

SEQ ID NO: 719953 - DNA, 370 bp, Homo sapiens
  misc_feature (1)..(1): n is a, c, g, or t
ntggtgcacaggagggacaataacggagtgagccaggagcaagactgtccacagaagcctggtgcctggctaggggcctcagcgaatgtctggggcagagactctggccagttcctttccattcccctaggaaggttacccttgcatttcagactcccacctttgcaaggatgactccaagcactggagctggtttcgggtgccagagaagagcttcttgcgcagtggcggctgagtggccccgacccgtgctcggaatgggacggatgacgttgccgaggtgaagtcgcgcccgagtcgcgaaatatctatagttctcggtcactattctggccgagactctagcacagggagtcgccctgtcgtcgga

SEQ ID NO: 719954 - DNA, 253 bp, Homo sapiens
gtatatttagtagagacagggttcaccatgttggccaggctgtctcgaactcctgatctcaagtgatctgcctgcctcggcctcccaaagtactgggattacaggcatgagccatcgcgcctggacagtttttgactttttggagagatggggtttcaccatgttgtccatactgctctcaaattcttgggcttaagcagtctgtcgtgcttggcatcccaaagtgctgggataattggcgtgagccatcaca

SEQ ID NO: 719955 - DNA, 722 bp, Homo sapiens
gttgtggctggctgaatggcaatagatgtctaaggtggattcagtgtctggcacactaagacacctccaagaaggagatgatgcatcaggttcagtttaacctggaatatctgactaccccgtgaatccacccagaaagggggcccaacacccttgtccatttatgggtatttttttcgaagttattaagcatattccttttccacgaacctcttctgtactctgatgtaataggtgggctcttacaccccattccaaatgcagtttatctttctagacccgattgcaaatagtgatgtagtctctaaccagtcatggattccagttcagggatgaactgctccctccagccttacgtgcctctgatccacagggtttggtcacgttcgtctccggccttcggttctaagtcgagatataaaaactgaacacgatcaacacttactcttaacatcaagcatcaacactttttctccccgtgttagaacttcttctgcatcctccggtgtctcgtaacagataacgccttaagaccacctatgtgggggactactaggaaacctatgttgtgtcccaccggtacatcccctgtaaactttaactcacttacaaaacggctttttccccgccttttgggcgcttacgggcatctcctgaaaagccacattggtgtcattcacttgggctttgtgcttatcaggcaaaatcggtttctgggctcc

SEQ ID NO: 719956 - DNA, 732 bp, Homo sapiens
  misc_feature (392)..(393): n is a, c, g, or t
cgtttctccctcggtgcgggggtgtgtgggcccacttcgtctttcatagtgttacctcctccctccgcttgcggggggcgggggtggtggggtttcatcaatagcgcttttgtcccctgccttggtgggccgcctcccctttttttttctcctataaacccgggtgcggcctcctcggtgtttttttgcggcgggggggggaacttttttcccggaacactattccctttggcctttttggggctcttaagaccggttgttcaaaaacggggggggcggggcggatttccgggtatttttcccccgcgggcttggtgtttttctaaagggccaacccccttccccgttgggggggggggcttttaccccgccgtgggttcaacccccacccnnattggggggggtgtccccacgggccccccccctaattttggggtttttggggggaaatttttgttgtttttttaagcaaaaagttttttgtcccaaggggggggggaaccccccggggggcctcccggcccccccccccccttttttaaggggaccccttttgggggggttttttccccggggggcccacttttttccaagcccgggggcccttttttttttccccccccggaggccccggttttacccttttttttggggggggttgggggcccccctcccctttccccctctttttttcccccgggggcctttagggggcgggggtttcccggggga

SEQ ID NO: 719957 - DNA, 365 bp, Homo sapiens
  misc_feature (90)..(90): n is a, c, g, or t
  misc_feature (125)..(125): n is a, c, g, or t
  misc_feature (143)..(143): n is a, c, g, or t
  misc_feature (157)..(157): n is a, c, g, or t
  misc_feature (183)..(183): n is a, c, g, or t
agccagttcctgccttaactgatgacattcccacccattgtgatttgttcctgccccaccctaactgatcaattgaccttgtgacaatanaccttccccacccttgagaaggtgctttgtaatantctccccactcaccccangcccgcacccccgnacccttaagaaggtattttgtaatantctctccgccattgagaatgtgctttgtaagatccaccccctgcccacaaaaaattgctcctaactccaccgcctatcccaaacctacaagaactaatgataatcccaccaccctttgctgactctttttggactcagcccacctgcacccaggtgattaaaaagctttattgttcacacaa

SEQ ID NO: 719958 - DNA, 320 bp, Homo sapiens
gctcgcgcgcgaaaatacggctcatgttaatgagttacattatcagccagcccagccttgcccaccatttaaggatatcacagagccactagatctcatatggatctccttccaagccattatttactcaagaaactctagagagaaagtgagagtcatgttgaagaagatgtagaatgtgtcagacatcagagatgatatgagagatctgatatttaaatagtgacatcatccagcgaaatgaatctacattaaatgttgttttactgccctatgattaagccattcatatggagttgtcttcaactactattctgtat

SEQ ID NO: 719959 - DNA, 172 bp, Homo sapiens
tcgccagccatcaggatgctggggaactctttcttcattgccttgttcttgatggggatcagtcgcttctgatgggcacctggagagaggctgatgtgcaaatttggtctggaactcacattacatagctctgcaggtaatcatcagagacaaccaccaccatccggcgaca

SEQ ID NO: 719960 - DNA, 600 bp, Homo sapiens
gtttatgaaataaaaattttatttcagattacggttatttttttataaacctagcactgcaaacatctgtgcatgagaccctcttttatgcactataaaaaggctgccatgaatattacagttgctgtttggcataggagcctatgcctacatacaggctgaaagcttctggagccgttattttggagcaatgccagctgaaagggtgctagcgtaccgttgggtgaaacatgatccattccctcataaaaagctggatcattaaagctctgagaaggaaatgacaacatgttcaagaaaataaacatgcgtgggttaaacggcagcttacttttaatactaatatacatacatgaggtgtcatgaaaggtcaatctttataagtcatcttactagaaggctaaaaactcacttggaactcaatgctccctaactagagacgcaagcattgattagcatatggcactgacgcagcacagagcaacccgaggcaccattctggtcctgggaacccacggagttaaggcacggccgagacaggaaaaacattcaggctgcacaattgtgtgacagctgtgtgccccagggcaccatggcaat

SEQ ID NO: 719961 - DNA, 1114 bp, Homo sapiens
  misc_feature (1114)..(1114): n is a, c, g, or t
atcagcgcgttggcgcgccgctgattcgtccctagccacgcgtttgtatcagccccagaaattctaaatatccgtgcaggtttcacgtgagctctgcgactcgaattcacagctgccctcagctgacactgaatctggcgcgtggtcctggtgccgtggcgaatcagcggcgcgcaagagggagcatgtggcctcggctctgaagcatgctggccagaggaaccctgtaggagtggttggtccagtcggggctgcagtgtcctgccttgcagcatggccagttcccatacgagccgaaggcctcgtgtttagggggctgggtgctaacctggagctgcagacggaggaggagttttagttattgcaccctggcaagccactcactcatccaactatcagtgggtttgacagaggagacagccacagtgcaccggtgcagtccgggactgaagctctgtcagatcatcgggcaggcgggaaacccggaagaaggacgggagagcgtgagtgagattgtgagtgaagcgcctggaagcgcagaaccctgttctgcaggatggacccagccctgtctgctgtccggctcaccgtccaggaagccattcacatcctttcatcctcagaggatgctggccatattctttctacctggggaactctggaacgataactctgggggacccgaggatcccgttcttcctgaggagacagagaggtttggcgcaggtcccttttcagccggctccttgaatgtctggtctccattggaccccggtgtctgtgctgtgcccccggtgccctgtgcccgcttggggagccgtcctgggggccccgtaaaaaacttcctgtggggggatgaacccccttacacacgctgcgtgggtgcaacgcacagtacacaacagcgccaatgtaaggaggcgcgccccataaatgtagggcgaggccgagccatcaaggcggcccctcttacgggtgagagacaactactacgatgcacacccaaccacgcacccagggagagacagattacgccacacgtgcagccgcagcaactaagcggctagtagtgctcggaacactgcgttgccctggatgatgtggtggcgcggcn

SEQ ID NO: 719962 - DNA, 117 bp, Homo sapiens
tgactctacaggattaagttgtcaggcatgtagggggcaggtataggtaaggggcatcagatcagctcgaaacgatgaactctagccggacacaagtcaggagagcgtcagggtgat

SEQ ID NO: 719963 - DNA, 217 bp, Homo sapiens
gccaaggcaacttgttcggtggtgacaatgtaccctgctaagggccaagatcaactcacctgttataaattcgtccctcacgggtcccctacacacagcacctggaaacagacaagagggctcaggatggcacagaacactacttcatcttgagatctgttacccggtaccggggcagtgccggatgcccctatgttaatatagggacatatctcat

SEQ ID NO: 719964 - DNA, 170 bp, Homo sapiens
  misc_feature (63)..(63): n is a, c, g, or t
  misc_feature (67)..(67): n is a, c, g, or t
  misc_feature (73)..(73): n is a, c, g, or t
  misc_feature (82)..(82): n is a, c, g, or t
  misc_feature (88)..(88): n is a, c, g, or t
  misc_feature (95)..(95): n is a, c, g, or t
  misc_feature (99)..(99): n is a, c, g, or t
  misc_feature (136)..(136): n is a, c, g, or t
  misc_feature (149)..(149): n is a, c, g, or t
aggcccgtcccccgccccgccccgcctcacagctgacagggccagtcccaggtccccgggccnccancccgtnaggtccgtnaggttntggccgntttnacaaccccggcctccccgggctccaaaaaaggcccgngtttaaataaagngccagcgcaggatgaaagcga

SEQ ID NO: 719965 - DNA, 362 bp, Homo sapiens
gaataaaaatacttgggattcagttcctgcgcaggccagtcccctgagactgattgtaaggggggtaaacaaagatttcaaagccaggccccatggctcaggcctgtaatcccagcactttgggaggccaaagcgggtggatcacttgagcccaaaagtttgagagcagcctgggcaacctaacgagactgtttttccaaaaaatactccaataagctgagggtggtggtgctggcctgtagtttgagctactcaaaggctgaggtgggaggatcgcattgaccctgtgaggttgaggctccagtgacccatgatcccgctgctttactcaagcttgggcaacagagtgagcccctgtctca

SEQ ID NO: 719966 - DNA, 324 bp, Homo sapiens
  misc_feature (304)..(304): n is a, c, g, or t
cagctacttcctggcgacaaggaacggtcagttgtgctgacgcaggtgctgtctcaccctttactgtgtcctgtggccccaggtgtagaagcgactggaaaagaaaatgaagttgggggtttccgacacgtcacctcctttcacgtttctgcagtagccgaggtgctcacagaagctccttggaggcgctgggcctttgttctcagcagcgcagttcgcgcaatgagtaggaagccctcaacctgcttaattggttcggtctgctgagtagaaaaccaggctgggcacactgcagcccgccttnttgttaaagggtttcctccc

SEQ ID NO: 719967 - DNA, 707 bp, Homo sapiens
taagtgattaatccaattaatctatatattaatttacaaatattatcattatagctcctacatgctatagtatgtattaggtaattctattttgtgcacaatttgcatttggtccaaatcctatatttgcatgtttagctgaaattactagatttttttcctgaatcttcatgtatgtatgtgagcattcacatggttttctcctagaatctcaagtggaatttggaatcataaataatgcatgagatttgaaaactttcaccgagattataaatgtagttagtttgatactccttagccataaaaaaactgaaacagtgaccacttttagtgtatatgaaattttacataagagttagcatctttagctttataatctgaaaggaacccaatttaacaaatgatggattatgctctgtgaaatgaaaagttcaatcattgcctttgaaaagatgaactcaagttaggtgatctcttgtacttggtaaagctacttttgtcctaaagaacagagtggagtggatatattcactttttttttttctaaaacatacaatgtgataaaataatcgtgcctaatgtcaaactttactggtttgagaagaataatcaaaaggacttataccataggacttactattgttttttaaggatctcctctcacagtggtaatgaaacataactgtaatacatcttaggatttatgt

SEQ ID NO: 719968 - DNA, 271 bp, Homo sapiens
gccccatgtctctgggaacatggagccttggtgtatttttcttttctttcagtaatgaatcaataccagtgtccagtcccccaggatagcttcctgcaagcccatacgtgtttttgtaaacaggctcctgcgaccagtgtgtcagtacagagccacgggcagtgtcagtgttctggtgttttcatctgtgcatagcctaagtggatgacaccgggatcatggggcaacccatttggtcttttcaataaaggtctaagatggtttctcaaaa

SEQ ID NO: 719969 - DNA, 388 bp, Homo sapiens
  misc_feature (74)..(75): n is a, c, g, or t
cgcagcccggccaggtcctggagagacaggagttggagagcctcatctgccaggcagtccacacccagatgganntcctgcaggagctgctgcagcgccagatccagaacacattcgccatcttggacctgaagcttcagaagaagactctgaacctcaacgcccccacccctatcccgccccccatcaccagccacgcaggccaggaggaagccctgaagccccaaagagcgagcaaaggaaagaaagcgaaggcaaggaagtagaaggtcccgactgccacacgagactgactggggaccagccacccataaccatgacttgcggcacggtgagctcagcacccacagagagacttcttgtgattaaaagaaacaaacccataaaa

SEQ ID NO: 719970 - DNA, 136 bp, Homo sapiens
agcccggggcggcggcagctggggcggcggggggccttcgcggctgtcctcctccgtgctgaagccgttcatctcacccgccccgggccggtacctctgggggagggtccccaggataacgactcgcgcggcccgc

SEQ ID NO: 719971 - DNA, 604 bp, Homo sapiens
  misc_feature (57)..(57): n is a, c, g, or t
ccaatgtgctggtacggccggagtacgggatgggccatggcactcttaacaccccanggagtgaaagaagtcttccaatttcagagaccacaaggtcgggagcgcctgcggaggcttctgaactgggaggagtttgacgaacagagagactcccggaggagcatcctgctggacaccctctacgagagcatcatctttgcagtgggcaaaggcttcccatgggtggaggtggcccaggtggtcaagttcacagaagagctgctaagggaaaccaaagtgacaaagagaaaggaatactcttacagggaagaagctgacagctgcctccttagtcaaatgatccaagtggacattgtcagtaaaaggccacacacagaatcccgtgtgcctggtcagacgcagtgagcagccagcattctcctgtgatggttccaacaaagactcatggcccgaatctaatcaagagaaaacagcaaagtaggaccatggctcaaagtagccctcctgccagcttcaaatactcgaaggccataagagcccagcaaagactgataaacctttccaaactgaaagaggcgaagggatgtcttcacacgtgaaaaaa

SEQ ID NO: 719972 - DNA, 141 bp, Homo sapiens
ttctggtgctcttagagtccttcttcatccttgagtccaccaccttgtaaatgacctctgactccagctggccggcgcacttatgcgagccacaccttattataggctacaacgtagtgtacatggcgtttctccttgcga

SEQ ID NO: 719973 - DNA, 182 bp, Homo sapiens
atgcaagtgctcaacactctgctagcgctactactaatcaccattacatgcaagactaccacaactgaactggctacatcaattcgtacattgaagagcagttagcagctatgacctacttattaagcgacctactacgtgcgcttgtaatacacgtaccatgagctctaccaactcctgcc

SEQ ID NO: 719974 - DNA, 968 bp, Homo sapiens
  misc_feature (71)..(71): n is a, c, g, or t
  misc_feature (75)..(75): n is a, c, g, or t
  misc_feature (158)..(158): n is a, c, g, or t
  misc_feature (178)..(178): n is a, c, g, or t
  misc_feature (242)..(242): n is a, c, g, or t
  misc_feature (256)..(256): n is a, c, g, or t
  misc_feature (291)..(291): n is a, c, g, or t
  misc_feature (293)..(293): n is a, c, g, or t
  misc_feature (424)..(424): n is a, c, g, or t
  misc_feature (442)..(442): n is a, c, g, or t
  misc_feature (460)..(462): n is a, c, g, or t
  misc_feature (470)..(470): n is a, c, g, or t
  misc_feature (486)..(486): n is a, c, g, or t
  misc_feature (488)..(488): n is a, c, g, or t
  misc_feature (496)..(496): n is a, c, g, or t
  misc_feature (501)..(501): n is a, c, g, or t
  misc_feature (547)..(547): n is a, c, g, or t
  misc_feature (570)..(570): n is a, c, g, or t
  misc_feature (596)..(596): n is a, c, g, or t
  misc_feature (601)..(601): n is a, c, g, or t
  misc_feature (670)..(670): n is a, c, g, or t
  misc_feature (686)..(686): n is a, c, g, or t
  misc_feature (724)..(724): n is a, c, g, or t
  misc_feature (741)..(741): n is a, c, g, or t
  misc_feature (748)..(748): n is a, c, g, or t
  misc_feature (752)..(752): n is a, c, g, or t
  misc_feature (757)..(757): n is a, c, g, or t
  misc_feature (817)..(817): n is a, c, g, or t
  misc_feature (819)..(819): n is a, c, g, or t
  misc_feature (825)..(825): n is a, c, g, or t
  misc_feature (849)..(849): n is a, c, g, or t
  misc_feature (869)..(869): n is a, c, g, or t
  misc_feature (872)..(872): n is a, c, g, or t
  misc_feature (964)..(964): n is a, c, g, or t
cggctgccctctcgctcagtaccctggccagtcccaaggggggcagtggcacagcgggcaccgaggcccangcgncaatcactcattcccttacggactacagagaacaactactgcccccactatgagaaggtgagtggggactacgggcaccctgntctacatcgttccaagagantgccggccccaagaagcccggcgaaacaatctaactaacacacggtcctgagtgcccggcacgncctcaggcccccgnagggacagtcggcctggaccggacctctcctttcncncccacaccccctccccttgccagctgtgcccacctttgtatttagttttgtagtttcttggcttttataatccccctttttccctgccccctgggcttcggaggggggtgcttgtgccccctaacccccantgcctcattgttgccatnccccccgtggccaggccnnntgtggcancgttgggggcgccccntntttggaanggcangggcgtggacacatgaatggacaagcacggcacgggagacaagtcncccgtggcccctgccccctcccntcgcccccccttgccacccttcccanggacntgcattgttccgctaatcaatcacctgttttttaaatgcgttttgatgttcaatttttttaggcatgtnaacatcaatttttcantctgttttttttgaaagaaaaaaatggaaaaaaatgtnaaaagagcagccccccnccccagnggcntttgntgagcccttggcccaaagccagatacaaagaaggggccctgggggcaccgaatgttggtnangccagngaaagcaataggagtgccaatttncttttaatagaattcctttngtnatttcctgggtgggggtaagggggcagggccaggggcctgttcacgccccactgaggggaaagagggaaaagtgccacctggggcaagggtngtcc

SEQ ID NO: 719975 - DNA, 697 bp, Homo sapiens
  misc_feature (57)..(57): n is a, c, g, or t
  misc_feature (350)..(350): n is a, c, g, or t
  misc_feature (386)..(386): n is a, c, g, or t
ccaatgtgctggtacggccggagtacgggatgggccatggcactcttaacaccccanggagtgaaagaagtcttccaatttcagagaccacaaggtcgggagcgcctgcggaggcttctgaactgggaggagtttgacgaacagagagactcccggaggagcatcctgctggacaccctctacgagagcatcatctttgcagtgggcaaaggcttcccatgggtggaggtggcccaggtggtcaagttcacagaagagctgctaagggaaaccaaaggctgctccattactgaggctgtgacgatcctggggaacaagcttagagattaccggggccatttcaacaccanccacctgctggccctctgtgactacttccaccacancttcatccgccactacaaactctaccagtatgtcctgggccaggaccagcaggtcgacctgaccgttgcccacctggaggtgtgcatgccacccctatcccgccccccatcaccagccacgcaggccaggaggaagccctgaagccccaaagagcgagcaaaggaaagaaagcgaaggcaaggaagtagaaggtcccgactgccacacgagactgactggggaccagccacccataaccatgacttgcggcacggtgagctcagcacccacagagagacttcttgtgattaaaagaaacaaacccataaaa

SEQ ID NO: 719976 - DNA, 136 bp, Homo sapiens
gggataatggcgagtctcgaccgcgtgcgcgacaggcatcgaacagcaccaacagcaagcgtacgcggggtcgcacgtgcaggtgcgcgatgcgcggcccgagcacgcgcagcacctcgtagtgccaggtggtggt

SEQ ID NO: 719977 - DNA, 889 bp, Homo sapiens
  misc_feature (57)..(57): n is a, c, g, or t
  misc_feature (542)..(542): n is a, c, g, or t
  misc_feature (578)..(578): n is a, c, g, or t
ccaatgtgctggtacggccggagtacgggatgggccatggcactcttaacaccccanggagtgaaagaagtcttccaatttcagagaccacaaggtcgggagcgcctgcggaggcttctgaactgggaggagtttgacgaacagagagactcccggaggagcatcctgctggacaccctctacgagagcatcatctttgcagtgggcaaaggcttcccatgggtggaggtggcccaggtggtcaagttcacagaagagctgctaagggaaaccaaaggttcagtccaggagcccacacagcccaccagctgtgtaggaatgccagcagaggcctgatgatggcaatgacggtgacaatggcattacttattgagtgtttactgtgtaccaggcactgtggaaagcaccacatatgcatgctgtcgcctaatctcacgaggtagagatttttattgcctctattttacaggctgctccattactgaggctgtgacgatcctggggaacaagcttagagattaccggggccatttcaacaccanccacctgctggccctctgtgactacttccaccacancttcatccgccactacaaactctaccagtatgtcctgggccaggaccagcaggtcgacctgaccgttgcccacctggaggtgtgcatgccacccctatcccgccccccatcaccagccacgcaggccaggaggaagccctgaagccccaaagagcgagcaaaggaaagaaagcgaaggcaaggaagtagaaggtcccgactgccacacgagactgactggggaccagccacccataaccatgacttgcggcacggtgagctcagcacccacagagagacttcttgtgattaaaagaaacaaacccataaaa

SEQ ID NO: 719978 - DNA, 200 bp, Homo sapiens
gttccattggattgtattaaaaaacagaaagacaactacacacgcactgtttcccaactactatcagccagacattatcaacacccaagcacaactggggtgaaaaaatgcaccaatattttaaaacacatttcaggcacttatacacagcaggaaggttatgtgggattcaaccttgcaaatggacccataaacatgta

SEQ ID NO: 719979 - DNA, 465 bp, Homo sapiens
  misc_feature (41)..(41): n is a, c, g, or t
atcagtatgatggaatcatgccagctgtagcctgggtgacnctgtcccagatccacacctgtctgcagctgtaaaggctcatgggcattgcagtcggtggtgaagacgcatacggattaagcatcatcccgtaatgagtagtggaagccatcggtatcaccaaatggctggaatctcgctctgctctccggagctggtctctggccctgaggtcgaggtgcagttctaatcgtgggatcctggggcttctggctccctcgtccataaagcgggacaaccttctctctgctgatcccagcttaccaccctggacactcataccgttctggccgtgtctccagtctctgatgaagacatggtcatcagtacaggtggccactcacactggccccagcttatcgagcagtctccagacatatagtacattcgaaggtcgcgaccgctgcgcaccgctcgccatttggc

SEQ ID NO: 719980 - DNA, 105 bp, Homo sapiens
gacgctctctcggtgggggcatatatctgaacaaaccggtggatgacatcatcagggagaacggcaaggtggtgggcgtgaagtctgagggagaggtggcccgct

SEQ ID NO: 719981 - DNA, 1128 bp, Homo sapiens
  misc_feature (5)..(5): n is a, c, g, or t
  misc_feature (135)..(135): n is a, c, g, or t
  misc_feature (159)..(159): n is a, c, g, or t
  misc_feature (201)..(201): n is a, c, g, or t
  misc_feature (272)..(272): n is a, c, g, or t
  misc_feature (288)..(288): n is a, c, g, or t
  misc_feature (308)..(308): n is a, c, g, or t
  misc_feature (344)..(344): n is a, c, g, or t
  misc_feature (376)..(376): n is a, c, g, or t
  misc_feature (379)..(379): n is a, c, g, or t
  misc_feature (382)..(382): n is a, c, g, or t
  misc_feature (456)..(456): n is a, c, g, or t
  misc_feature (482)..(482): n is a, c, g, or t
  misc_feature (500)..(500): n is a, c, g, or t
  misc_feature (583)..(583): n is a, c, g, or t
  misc_feature (698)..(698): n is a, c, g, or t
  misc_feature (703)..(704): n is a, c, g, or t
  misc_feature (785)..(785): n is a, c, g, or t
  misc_feature (801)..(801): n is a, c, g, or t
  misc_feature (805)..(805): n is a, c, g, or t
  misc_feature (827)..(827): n is a, c, g, or t
  misc_feature (830)..(830): n is a, c, g, or t
  misc_feature (833)..(833): n is a, c, g, or t
  misc_feature (845)..(845): n is a, c, g, or t
  misc_feature (853)..(854): n is a, c, g, or t
  misc_feature (995)..(995): n is a, c, g, or t
  misc_feature (1014)..(1014): n is a, c, g, or t
  misc_feature (1028)..(1028): n is a, c, g, or t
gtgantgaaactgactgagagagagactgtgacacagcacactgtgtgtgtgtgtgtgtgtgtgtgtgtgtgtgtgtgtgtgtgtgtgtgtgtgtgtgtgtgtgtgtgtgtgtgtgtgtgtgtgtgtgtgtgtgngtgatgtgtgtgtgtgtagtgtgngtgtgtgagagagagagagagagtgagagagacagagcaganagagagagagagagagagagagagagagagagagagagagagagagcagagagagagaaagagagagcagngcagagacacagacanagacaaaaaaagacacacanagagagtgacagacagagagagagacacacagaganagcagcagctgagagcagcagcagcagcagcngcnganacacagacacagcagcagcacagagagagagagagcagcagcagcagcagcagagaagagcagcagcagcagcngagcagcagcagcagcagcagcagcngcagcgctgcagctgcgnagcgcagagacagagagcagagagagacacagcacagcagcacacacacacagagagcgcagcagagagagagcagcagaggnagcagcaacaacaacagaagaacaacagcagcagcagcagcagcagcagcagcagcagcagcagcagcagctgctgcagcagcggcggagcagcaacactgcagcagcagaacanaacannacagcagcagaacaacacaacaacagcacacagcagcagcagcagcagcagcagaacagcagaacaacaacaaaaaaagancaaaacaacaacaacntcancaacaacaacagaacaacaacnagnagnagcagcagcacnaaaaaaannagcagcagcagcagcagcagatgactctatcacacacacacagcgcgcgagagagagagagagacacactgcacacagagagagagacagagacacacacacacacacacacatacacacacacacagagtgagagatacncgacacacacacacagcgngagagagagcgcgngagacagagacacacacatcacatacacacacacatagagacacacacatacacagagagagagatatagagagagacacagacataaacacacacatat

SEQ ID NO: 719982 - DNA, 1382 bp, Homo sapiens
  misc_feature (1031)..(1031): n is a, c, g, or t
  misc_feature (1062)..(1062): n is a, c, g, or t
tgcctatatatttttagaacactccctcccattttcccctcattttcaacagggcagtcggatattggaggaattgtaatgaagacttacttatacatatttcttgaattctaaagacttatatgtatttcttgaattctaattgtgtgtgtattaaagggattgaagttgtagtcacagagaatacttagataaaagcaaaatatcttgatcttatggtataggtagaaacagtcattcagatttagctgggggagataaaccataatatattatggttagaatggtgcattcccttgaaaaaacattccaaatagcttggcatctgctttttgatgtaattcttttgaaatacttttgagcctgctgtgtaatataatggccaagaccttgaattttagagactaattgatctatcctggaatcctaggttcacttcttaactaactctaagcctcaattttctggtcaattaaaaaatatgaaagaatgataacagaacctatttcagaaaggttaaatgaggtaattatcaagtgtttagtacaatgcctggacccatttcaagccctcaaaagttagttgttaactaccttcttttgttatctttgggagaatctagaatcctattgattgccattgaagattttttacggattcagtgacagccatgccttttccaagtaaaatatagcaatatagagcttatcctgctagagcagatgacagaaccaaaggtggattggattaaaaggaaagcaaacatgggggaataatggtaagaaaacatataaacaatagaataaaattaaagaaaccaaaggtaaaaattagatgaagatgtattttgatttgcttattacaaatgccccttgatatttagtgtcatttaaatatataagtaaattgtaagtacttcattatgtctggtatcattacagaatggaaacactaatgcagatgtgttacttccatatttcctcagtgaagttgtgtaactttaaagggaagaggtattggtatacacaaanttagatggcaattctattgtagtaaatatcnaaggaagattatataagtttacacatgaaatatgaaagctccaacataatgctgttgcatgctaatattaaagctactatccccaacaaatatattgtttgctattactactttgccagattaagtgacttggtgtccgctggaaagcagccagtgctgagagtacaattggtacttgtatctcagctattttctagtttgctcgtgtttgtatgccttcctagagtcatttgtgcttctttctgaacttgttgattccagtcgtacttgttttgttatgaaatttaaatatgtaagttgataaaatgtgacggaaaaag

SEQ ID NO: 719983 - DNA, 128 bp, Homo sapiens
  misc_feature (96)..(96): n is a, c, g, or t
gctgcgggtcactctagagcgatcccttatatgctgtctcagtgaatgagagctggcaagggcaaatgagaaaccgtccgcgtatccagcgcaggngcccgtgcatccatctataatgaggataatgg

SEQ ID NO: 719984 - DNA, 128 bp, Homo sapiens
agacatcttagaggctgaactcaatttctgcagaaagattctcccagtttttcctgtttggttagtttttttacaaagacaggatcttgctgtgttgcccaggctggtcttgaactcctggcctccca

SEQ ID NO: 719985 - DNA, 366 bp, Homo sapiens
  misc_feature (276)..(276): n is a, c, g, or t
  misc_feature (309)..(309): n is a, c, g, or t
  misc_feature (337)..(337): n is a, c, g, or t
agggttaagattgctgtttttctgtccttgctttggcacaacacactgagggtttttttttattgcgggtttgcctacaggtagattagattaattattactatgtaatgcaagtacagttgggggaaagcttaggtagatatattttttttaaaaggtgctgcctttttggatttataagaaaatgccgtcatcgtgatagaacagagttttcctcatatgataagaggaaggacttcacttcaatggaacagccatcactatcagatcagctcnggaaggagtaaagttctcaaagagacaacgaantttgttttttttatgactaagtttggcnctgcagactatacctatttaaggcgtgat

SEQ ID NO: 719986 - DNA, 370 bp, Homo sapiens
  misc_feature (152)..(152): n is a, c, g, or t
aattcggcatgaggtgcagcccgcctgctgggcaggccggcgcgcgacacctggagtcctacgacatcatcgccaaccagcctgtggtcatcgacaacgtgaggcccggcagccagggggagggcgggcgaccgcccagggggcgacggcgncaggcgcagagcgagagacccccgcccgcctcgggcgtcctccgctcactgcgtggccgtcgcccccgccggccgctggtatcgtccgggggcagcgcctacttggtcttgtaaggcggccatggggcgagcccctcgccggcgtcgcagagcctcttccccgacccctccccgagtcgggcggggaagttcaggagagcttgagtgacagccgggcg

SEQ ID NO: 719987 - DNA, 146 bp, Homo sapiens
gtcatttctacacctgactggactacagtggtttatctgatgcactccgtgaaggtctactacagtacgtcctcgccttcctccagccgagatgccagagtctctgaacgaagaagctggggttaactcaggtagttagatcaaga

SEQ ID NO: 719988 - DNA, 1064 bp, Homo sapiens
gggcttccccccccctcactctttttgttggtgcccgcgcgtttcatttctattctgcggggagccttcttgtttgtcatggattaacaccgtgtgttttccgtgtcgccacacttgcttcctcgggggaggaatcccccccgctgtctttttttttggcgtggtgtttgatttgcactccctcccgcgggggtgtgtgggtcacgctcctcacactactttttttttctctctggggcggctctcacctttttttatggtgttgcccctcccctcttcactccacctctattggcgctcgggtttttgtgaccccccccagcgtgttttttcttctctcgtctgccgcgatataatttggtcgtgggacaggttgtgctcccttctcctctctctcgtcgctctccctcaccacatcacggggggtctcttctcctctctcttgcggggcgtgtaattatatgtgtgtgcggagatctatttctggttctcgcggagaaatttttttccgcgccacctgcgcggcgcgcgccctttttctctctctcgggacacactcctcgcgccggcgcgtgagctccttccgcccggtatgttggatcttctttccacacagagagcttctctcataagagagagattgtataaataaagaagacaccgcgccttcctctctctagagaaagacctccttctccccacacacaggggtattttcttcgctggggagtgagaggacttctctccccccctctcgcggtgtttcccgccttttcctccccgcgcggaggtgccccgcactcgcgtgtctcagagagagggcctccaccgcgccctctctctctgtgcctctcttttccccctcttctccctctccataaaccgggcagcgccccccccaccccccccagaaaacttttgtttccccccccccccctccccgccccccagacagggggagggaggcgcccccccccccgtgtgtttataaacttttttctcacaaagagcgttttttcccccccgggcaaaaggggggggggaaaaaacccccccttttttta

SEQ ID NO: 719989 - DNA, 195 bp, Homo sapiens
tgagttgtaaggggatagattagttgtgtctggtttggggagatatataaatggaattatggattgttggtatgtggtttgttttgaggaatattatgtttgtgagatttttgttggatgtatttgtagatggattttgattgtgatggttgtataatatttgattgtgtgaataaaaggagatagtgtttatgt

SEQ ID NO: 719990 - DNA, 349 bp, Homo sapiens
cgcctcccgggtctcaagaaattctcaagaaattctcttgcctcagcctcctgagtagctgggaccacaggcacatgccatcacgcccagctaatctttgcatttatagtagagataggggtttcaccatgttagccaggttggtctcgaactcctgacctcaggtgatccgcccgtctcagcctcccaaagtgctagggttacaggtgtgagccaccatgcccagcctgtggttgtatcttaaatgctatcttaatgtaactttatactctctactagccaacttgttaatgtcttacataaaatcactctctggtgatgattattatgcctaatactttgtaccata

SEQ ID NO: 719991 - DNA, 556 bp, Homo sapiens
tggcgttctagaggtcccgaaaatgacatagaggcaggagaatcacttgaacccaggaggcggaggttgcagtgagccaagattgcaccactgcactccagcctgggtgacaagagcgaaatttcatctcaaaaacaaaaaacaaaacaaaccaactggttaaatgacaaagtatagaagaaaggggatggtgtgctgccatttattcctagcttttatttgtgaagacggcctcgggaaagacaatcaaatggaagagagggtgtggggcggggaggacacttggggctttgagaggagaaaggcagatgagagacgtgttttcaccgaacatcctcttatatcttgcgaaactgaaccataagcatgtatgacccaggcatacacacatacacatgtaaataaaacaatcattgaaaaagaaggccgagcgcagtggcttacacctgtaattccagtacttcgggagatggaggtgggccaactgcctgagcccacgagtctgagaccagcctggacaatgtggagaaacctgcctctatgtcattttcgggta

SEQ ID NO: 719992 - DNA, 244 bp, Homo sapiens
tagaggatccgtctcacctgctgacatctcctttgtcgtcttctcgagaagagacagaagggtcaaatggtaaagaaaaacttttgaggaggaagcagacgttacgcagtgatggtacaagtctacattaaacaagcaaggaatcgcagaaatcattcgtttcggggcatatggaacaggtagacagtgtcaggacttggtccttgggcaccatcaggttgatgacccgggaagtccttcctgc

SEQ ID NO: 719993 - DNA, 936 bp, Homo sapiens
gtaatgggatatgtcgaccaggcgtcgagcggcatcaccgggagtagcagagtgaagggagcaaaagcagtgggtcacccggatgcagccgccgggccccgggccgtgagaaggagcgtcgggcggcgggagctgggggcagtggcagtgaatcggatcacacggcaccgatgtggtggtgtgtggatgcagcttggctgaagatgctgtcctgtgcctgtgccatgctcatgcctgtgtgcatgcatgcccactgacagtcatgtgcctctgtgctacctgctccctggtggcttcccccctgtctcccacaacccattgatccaatgtgcctatacaagttggtgtgtgggtgtgcctacccagtgggtgaaccccacatgtcctgggcagcttgagctgcctgtaccccccgtgacattgactatgtgccagcccctgcacaagtacgcttcccatggaaacgcgctaatggcggaaaccccgtgcaggacgttcacttcgctgcgacatcgatgttgacctcgctgcgcgccatggcccccatgtcccctgccctgcacggctcgcgcggcagcttggcctgtgtccttgcccgctactgcacgacgctcggcgttggtgcgttgcgcttcgctggtgtgtgccacggacggggcaggtgcacggtgtgcggcgggcgcacgcgcctagggaccacccacgcatactgacccctggcacgcctgagcttgtctcacagactcctagacaagcacactagtgtctagacgcagaccgtgattatgcgagcgcgactccatcatcattgcgcacgtcagccgagacgccatcgggaccatccccaagcccttgttgtctggtggggatcccttcctgggattgaaggaagaaccccatcgaggctactcgcgcatagacccccacctcctgcac

SEQ ID NO: 719994 - DNA, 294 bp, Homo sapiens
cccagagtctggtggccttcagacgacacctaatcaagagaaaatatttcccaggtggggaggtccggtctggcatcagtccaccctttgtcgggccggcttcttcctccaagggcctcaacctctacatgctcactctcctccccttccctcagcccatctgggtctaagcagctttcacaatccaaaccaaacatcaccagccaccggctgataagtcaccagcatttacttgccggagttactttttctccatgcatggagactatggatccatcccaattctttctaaat

SEQ ID NO: 719995 - DNA, 168 bp, Homo sapiens
ttagtaaatgaatttgctccagttaataaagaagcccgattgctgtggaatgatgctttggccacatctgactggtttctgcaggtattttctatatcgtcattgtttgcagttaggacactgtattttctcttaactaagtgactagcagctgtgattttaatcccc

SEQ ID NO: 719996 - DNA, 768 bp, Homo sapiens
  misc_feature (4)..(4): n is a, c, g, or t
  misc_feature (96)..(99): n is a, c, g, or t
  misc_feature (105)..(106): n is a, c, g, or t
  misc_feature (162)..(162): n is a, c, g, or t
  misc_feature (175)..(175): n is a, c, g, or t
  misc_feature (233)..(233): n is a, c, g, or t
  misc_feature (336)..(336): n is a, c, g, or t
  misc_feature (438)..(438): n is a, c, g, or t
  misc_feature (442)..(442): n is a, c, g, or t
  misc_feature (449)..(449): n is a, c, g, or t
  misc_feature (527)..(528): n is a, c, g, or t
  misc_feature (624)..(624): n is a, c, g, or t
  misc_feature (626)..(628): n is a, c, g, or t
  misc_feature (672)..(672): n is a, c, g, or t
  misc_feature (720)..(720): n is a, c, g, or t
tgcncccgtgttgtgctgccccccataagatcggtatgcagcggtgtggtttacacggcagggcacaggtaggcgattctgcagcatcaacgcgannnnggggtnnttgagccgtcgtgggagatctggcccaagaccagctcctggctggtgtcgccagcnccggctgcattgntgggtgaggcaggtctggctggagtctgggtctgcaggcctggccggggcaggttgtnggggaccaaggagccctgggtgtgaaccccactgtggaggcagcaggcacctagtggtgccactgggacacccggctccaggactccggatgtcacacatgcntgagttttggcgtctacacccccctcggggccagttggtgatcagtggcccgtggtcccacaggccgtgccctttcccagggggcacactgggcatttctcnatgncctttanttgtctgctaagttgccacatatgcatttggaagctggagttcttgggctggcagggaatggtggcagccttcttagnnaaaaaaaaagggctggcttgctgggctaaggtcacagtgttctgaggtccccacacgcactcagactagaccctccgtacacacccaggctagacncnnnatactcacccaggctagaccctccatacacacccaggctagacnctccatactcacccaggctagaccctccatacacacccaggctagacnctccatactcacccaggctagaccctccatactcacccaggctagatc

SEQ ID NO: 719997 - DNA, 840 bp, Homo sapiens
  misc_feature (623)..(623): n is a, c, g, or t
  misc_feature (652)..(652): n is a, c, g, or t
gtggggtctcaggaggcagcactctcgggacgtctccacttgcctgggggacagagccagactccgtctcaaaaaaaaaaaaaaaaaaaaattcaaattcctcattcgggctttacttatcattgagaaattagcgtggtgggaaaagaaccgtgaacccaggccttattttaatttccccaagaattttaatttcactttcccactgtgaatctccgctcccaataaccattgtctgggacattggggtggcgggagcttacccatttcaagaagtgaggaattggggtgtgggggacacagccaaaccattattcacgagaatttttccacggagaattaatctcggggaacgtggaaattatctccagcgggggaagcccgggaactcgtggaatgtgtgtgccgaagttagtggcagttacgtggggttattccacgagaaattagcagagggaattttccacattccttagtggcgaataccagttgagggatcccgtgaacaggggcggtgaattattctcccccaatttacccctcgggtgaaaaaccgcgctctcagaggcttacttaaacaattggggcgtggtgatattgcggacacatattgcgggcggggnttccaaggatatgttcgggggtctggttnacgccacaactctcggtggacgcatatccccccggcttaaatttttacactctgggccaaaggatatttttcccttcttcggcacactgggttttttttttggccacaccccacggggccccgcggaaacggcgtcgcacccttggtctcaccctttgggggggcccctttggaaaccctattggggc

SEQ ID NO: 719998 - DNA, 425 bp, Homo sapiens
  misc_feature (240)..(240): n is a, c, g, or t
  misc_feature (308)..(308): n is a, c, g, or t
atgttgctatgtaacattttagcattgcttactatgggtatatatatttttcttcttctaataagccatctttccagcataactaaatttcttcttttaatttccttttctctctcaattacattaatttaagtgaatgaaatcttcaaaacctttctatgatctggcccaaacatttaaaaatatctttctttcctttctttcttccttttattctctctccctctttccctttctgtnacattatcacttactgtatgttatttgagtcatttgatattcacttaccctgagaggtaagttctgtntatttatgtggaacctgaggcttagagaacttaggtaacttgcccaaggtcccacagttagtgacagagctagtattcaaatgtggagcagtctgattccgtcgctgcactccggaa

SEQ ID NO: 719999 - DNA, 434 bp, Homo sapiens
ctgtcgcccaggctggactgcagtgctgcgatctcagctcactgcaagctccgcctcccaggttcatgccgttctcctgcctcagccttctgagtagctgggactacaggcacctgccgccacgcctggctaatgttttgtatttttagtagagatagggtttcacatagccaggatggtctggatctcctgaccttgtgatccacccgcctcagcctacccgtaatgatgtgtttttaatggtttggttttgttttttgggtttttttttttttgagacagagtctcgctgtgttgcccaggctggagtgcagtggcacaatcttggctcactgcaacctccgccttccaggttcaagcaattctcctgccttagcctcccaagtagctgggattacaggtgcccgccaccatacccggctaattttttgtat

SEQ ID NO: 720000 - DNA, 1290 bp, Homo sapiens
  misc_feature (10)..(10): n is a, c, g, or t
  misc_feature (65)..(65): n is a, c, g, or t
gtagcgcagncatggctcgtggtcccaagaagcatctgaagcgggtggcagctccaaagcatggnatgctggataaattgaccggtgtgtgtgctcctcgtccatccaccggtccccacaagttgagagagtgtctccccctcatcattttcctgaggaacagactgtaagtatgccctgacaggagatgaaagtagaagaagatttgcatgcagcggttcattaaaatcgatggcaaggtccgaactgatataacctaccctgctggattcatggatgtcatcagcattgacaagacgggagagaatttccgtctgatctatgacaccaagggtcgctttgctgtacatcgtattacacctgaggaggccaagtacaagttgtgcaaagtgagaaagatctttgtgggcacaaaaggaatccctcatctggtgactcatgatgcccgcaccatccgctaccccgatcccctcatcaaggtgaatgataccattcagattgatttagagactggcaagattactgatttcatcaagttcgacactggtaacctgtgtatggtgactggaggtgctaacctaggaagaattggtgtgatcaccaacagagagaggcaccctggatcttttgacgtggttcacgtgaaagatgccaatggcaacagctttgccactcgactttccaacatttttgttattggcaagggcaacaaaccatggatttctcttccccgaggaaagggtatccgcctcaccattgctgaagagagagacaaaagactggcggccaaacagagcagtgggtgaaatgggtccctgggtgacatgtcagatctttgtacgtaattaaaaatattgtggcaggacaaaaaacaaacacaaaaaaaaaaaaacacaaaaaaaaaacaaaaaaaacaaaaaaaacaaaaaaaaaaaaaaacgtgtggcggcgcggccccgcgccgcgccccgcgaagagagacctttcaacccacctccgtggtgggggcggcgggcggcccaacggaatgggaaagagcaaaacaggagggcgaccaaaatggtgtttcactaatgaaaacgccctggcgacaacaacaagaagcggggggagagttcctctcacaaaaagaaaaaaaaagcgcccgcgggggggaagacaaagaaagggtgttgcacagaaaacaactaccagagaggagaggcttcctagggaggaactataagagggggtctactcaaagggggggccccacaaaggaggcgcctgaataataaaaatacgcccccg

SEQ ID NO: 720001 - DNA, 415 bp, Homo sapiens
ctatgcgaacaacacttattttacactgtctaggtttatattattgtttctatcccatttttaatcctttacatgtaaaggaaacaatgtttttgtgggctaacttaagaaatcctaattactacaataatagcaaagagttcaggacctacttaccgtttaagactgatgatctctaatcattgtttcagagagacgcttacttcggcttctactgatcattatattgctgagtggtttagagaagggattctcaccttgtgtgaaagccataagtcacatgacggtgtaatgaaaatagagataaggtaaaaagttgcttttagctctcttggaggtattgttattgggaagtgcagcagactgctctcagagaatatcatagagtttaccatggtctgccagtctgcctgat

SEQ ID NO: 720002 - DNA, 956 bp, Homo sapiens
  misc_feature (17)..(17): n is a, c, g, or t
  misc_feature (71)..(71): n is a, c, g, or t
  misc_feature (83)..(83): n is a, c, g, or t
  misc_feature (94)..(94): n is a, c, g, or t
  misc_feature (101)..(101): n is a, c, g, or t
  misc_feature (115)..(115): n is a, c, g, or t
  misc_feature (133)..(133): n is a, c, g, or t
  misc_feature (166)..(166): n is a, c, g, or t
  misc_feature (199)..(199): n is a, c, g, or t
  misc_feature (202)..(202): n is a, c, g, or t
  misc_feature (211)..(211): n is a, c, g, or t
  misc_feature (230)..(230): n is a, c, g, or t
  misc_feature (251)..(251): n is a, c, g, or t
  misc_feature (254)..(256): n is a, c, g, or t
  misc_feature (409)..(410): n is a, c, g, or t
  misc_feature (663)..(663): n is a, c, g, or t
  misc_feature (687)..(687): n is a, c, g, or t
  misc_feature (707)..(707): n is a, c, g, or t
  misc_feature (750)..(750): n is a, c, g, or t
  misc_feature (774)..(774): n is a, c, g, or t
  misc_feature (776)..(776): n is a, c, g, or t
  misc_feature (780)..(780): n is a, c, g, or t
  misc_feature (784)..(784): n is a, c, g, or t
  misc_feature (797)..(797): n is a, c, g, or t
  misc_feature (857)..(857): n is a, c, g, or t
  misc_feature (946)..(946): n is a, c, g, or t
agtgtttattgctaggnggacacccgcacagcctccggaccccagaggttttgacacaaatgacttaaagncactggcttctnttcagctcctnctctgcncggtaggtgttttntggcggagaccccatcancacgcagcctcgacccgccccctcctccagggntgcagctccgcccagtggctgaagatagcaaantcnttgttgggngaaggttcccaggatgcanttttttggggtggccccaggntgnnngggaggtggagtaagggggctctttccgcggaagggtgagggactatgaaacgctggggggcaggcgggcagccgcggtcttctccaccacgaagccgtagttatactcctcctcaatgtccgccagaaacttgatggtcaggtccccaaaannagaaaaggccagggggctgcagctcttgccctcaaatcgtgggtggagtttgaagggaaccccatccatggctgaaatgccataaaggctggaggcctcgtagatggagtaattcctccgcagaatggatgcccgaaagctcagccttgacgctgttcgctccaggaggccgcccttacttggctggctggctgcatccagaaaaaggccctgcatgtaccggctgaaacctcggggcttgggcactggcctnggggccttggccttcttgcaccanaaggcaaagccgcccatgtnccctattcgaaggtatccaggcactgtcttggtcttcccactnagccggacatcaaacacagccgtntncgtngctnccaggggcaacancttcacacacatgcgtttcttcttggacacagaggccttggaatccatggggtcgcagangggggagaagccagcggcagggggctcttgttcaccacgatctggatatcggccaccacgttctcctgcgggttctctaggctgcccanagaactaagg

SEQ ID NO: 720003 - DNA, 250 bp, Homo sapiens
attcttttttaaactgctttgccccttcctctccctgccttttatagcccatataaatgtctctttgccccccttttgttgtggttttatattggaaccccctttttctttggaactattggatttaaagtaaggtttcctattatgtcagcaagtaattaacttatgttttaaagggggccctatcctggacccaaagttgctgaagttttttttctagctggtaaagtaggagtttgcctgccttcca

SEQ ID NO: 720004 - DNA, 144 bp, Homo sapiens
taaagctgagaggagtggatgggtagatgaatagctgaaacaacattcgaatgcggtgtagacaggtgaaatgtagttttattcagcagctctctcatcagcagttctctcacactagctcttttatactgttggcccttatcg

SEQ ID NO: 720005 - DNA, 377 bp, Homo sapiens
gtcttagtaccaagtcccagtctgtcctatggggagcagtttggccgcgggcattcaggagcctgggaaagaggccctcgccaggtgatggcagggcagtgtggcctggggtaccaggaaatgcgcttagtatttggtcaccagccgtcatcctgtgcttttcctactgtgtcttgttacaaggcctcagcaatccatagaactctctctccttccttctttctgtcagcttctctgcttcagagatacgcaaccatttgtgtacacccaaacacttaaacttcagaaagacatgcattatgtggtgtaatcaaacccgatgctttcagatgacctacttacatcttcaatgtggataagatcaagaacaaaacaca

SEQ ID NO: 720006 - DNA, 536 bp, Homo sapiens
  misc_feature (337)..(337): n is a, c, g, or t
  misc_feature (470)..(470): n is a, c, g, or t
gagacgggggtctcatgaagaaggtatacacatgggcaaataaacatatgtcatcagggaagtgcaaataaaaacaacaattagataccactacacacctattgagaaggctgaaatccaaaacatgaataccaaattcgggtagaggattgggagcaacagggactctcatggtgggggggaatggcaaaaggatatagccacttgggaagacaatggggcagttttctataaagcaaaacatattcttaccataagatctagcaacagaacacctggatatttacccaaataagcggaaaacttacatccacacaaaaacctacacacaaaggtntatagcagcttaatgcataatggccaaaaaccgggaagcaaccaagatgcctttcagtaggtgacagggtaaataacggggggtacatccagacaaagaaatattattcagcactaaaaacgagggaggtgtnaagctatgaaaagactgggagggaccttaaatgcatataactaagctgaagaatcagtctgaaaag

SEQ ID NO: 720007 - DNA, 1642 bp, Homo sapiens
  misc_feature (94)..(94): n is a, c, g, or t
  misc_feature (130)..(130): n is a, c, g, or t
  misc_feature (154)..(154): n is a, c, g, or t
  misc_feature (173)..(174): n is a, c, g, or t
  misc_feature (215)..(215): n is a, c, g, or t
  misc_feature (228)..(228): n is a, c, g, or t
  misc_feature (1494)..(1502): n is a, c, g, or t
gcgcatgcggtcggggttgttcactggctgtccggggctccgcgcgcgtcgccggcccagctgctgtcgctgatcgggaggatctgaagccggncgcaggtcaaagagtaaactgaagtacattctggtnactggtggtgttatatcaggaatnggaaaaggaatcatgccanncagtgtgggcacaatactcaagtcatgtggttacatgtaanttcaatcaaaatngacccctacattaacattgatgcaggaacattctctccttatgagcatggtgaggtttttgtgctggatgatggtggggaagtagaccttgacctgggtaactatgagcggttccttgacatccgcctcaccaaggacaataatctgaccactggaaagatataccagtatgtcattaacaaggaacggaaaggagattacttggggaaaactgtccaagttgtccctcatatcacagatgcgctctcacccagggacacctatagtgacaggagtggaagcagctcccctgactctgaaatcaccgaactgaagtttccatcaataaatcatgactgatcttgtagcggatgattcttcaagagacccttcaaacttgggtagagtttacagctctgactttacactcggctttggagactttctttaaattatgtttttattaagattattttattatgcggaaaggtatttgggaaacttgtcacttgcatgtcccatcacgtgtactggctcctctgtggtgtctgcctgttgcgtgacactctccttgcagttcttgagttgcggcagaacatcgcgatgggaaccgatggtgggtggggctgcagagtgccccatcggtcaccttgtttctcaactacctcgcatcattgcagatgctagcgcgttgcctgtcgctttcccttggatacctagaccgttataaagtgtgccacatggacttaccgagcatggagagaggattttagctaggatttgaacacttggtgctgggaacctcagggtattgcttgccactaagccatgaaaccagagacaaaatctctatactgccctgagttggggggaattctcagtgccaactgtggctggtcctcattcaaagggacggtcagtttggtgtcaacatgaaacaccaagatgtctgtctctgaagcgtgattttaaaatccccatgcctgtggctgcgcttcctatttctagggctgggaaacactccttgcatcaaggggtcacttacagaacaaagaatcttttgggggaaacttcctctaaaaccctctcatatatagacagctttgactggagggtccatttttcttccaggatggtgttactgcagttgaaagggcaatatgaagttactttcttaatgtgacctagcaataggcatagctacgtggcactatattctggccagactcgatgtgtactctaacttaagaaataaatcagtaaggcagaacaagaaaaaaaaaaaannnnnnnnntaaattatccttgagggccagttttcggtcccgtttttggcaaggggccaaaggggggggttaaaaaaaaggaggcggggttaaacctggtgggaaagccttgggctgggggcccttctggggatggaaccaggatagtg

SEQ ID NO: 720008 - DNA, 907 bp, Homo sapiens
cctggccctggaggtgactgaaggaagtgctgctgggcctggggattaggagaccggagtgctggactctgtgagccagtgtaaccagtgtgtcctgggctagagctggagtctgtgatgcgctgctgcccgcccctgctctgtggagtgacctgctgagatgcccgtgctgaatgcagctgtggcccctgctgcagcccaatgaatgcgtgcctgatctgctgtgcgccctgtccatctcctgctgcctgctctggcgacttcctggcacactgctgcactgtggtggctgctggctggcgacgctcttcggggacacctctgttccttgatgccgccactggcgggctggggcccgggccagtccgagtaggaacccgtgggagtagctcgtcatagtatgattgagtgtagtcctatggaggcgtcgcccacgaacgggacgagtagagcgaacaaaaagcagtgaggtacggagtaagaagacagagtcgagatatagttagtgacgacttagagttggtagatacaattacaaacagtttgcataatagaggaaaggaccagctagcgagtgctgttgtgctcccggggtggtacggtgtgggcgaatgaaatgggccgtgacggaggagagagcccaggtgaggagcgggagttggagggatagataggattatcagttataggtatgatggatgtacatggtgttgattgaggggaaggttagagatgtggattctagatgatgacgttggagatggaatattagaatgaagaagcgggtggatcagttgagaatgttttaaggatggtagggatatagtatattgtatgagggaaggtgaagtggagagagggggggggtatgtggttgggtggagaaatagaggtgtaggaggatggg

SEQ ID NO: 720009 - DNA, 1878 bp, Homo sapiens
  misc_feature (94)..(94): n is a, c, g, or t
  misc_feature (130)..(130): n is a, c, g, or t
  misc_feature (154)..(154): n is a, c, g, or t
  misc_feature (173)..(174): n is a, c, g, or t
  misc_feature (215)..(215): n is a, c, g, or t
  misc_feature (228)..(228): n is a, c, g, or t
  misc_feature (1863)..(1863): n is a, c, g, or t
  misc_feature (1876)..(1876): n is a, c, g, or t
gcgcatgcggtcggggttgttcactggctgtccggggctccgcgcgcgtcgccggcccagctgctgtcgctgatcgggaggatctgaagccggncgcaggtcaaagagtaaactgaagtacattctggtnactggtggtgttatatcaggaatnggaaaaggaatcatgccanncagtgtgggcacaatactcaagtcatgtggttacatgtaanttcaatcaaaatngacccctacattaacattgatgcaggaacattctctccttatgagcatggtgaggtttttgtgctggatgatggtggggaagtagaccttgacctgggtaactatgagcggttccttgacatccgcctcaccaaggacaataatctgaccactggaaagatataccagtatgtcattaacaaggaacggaaaggagattacttggggaaaactgtccaagttgtccctcatatcacagatgcaatccaggagtgggtgatgagacaggcgttaatacctgtagatgaagatggcctggaacctcaagtgtgtgttattgagcttggtggaaccgtgggggacatagaaagcatgccctttattgaggccttccgtcagttccaattcaaggtcaaaagagagaacttttgtaacatccacgtcagtctagttccccagccaagttcaacaggggaacagaagactaaacctacccagaatagtgttcgggaacttagaggacttgggctttccccagatctggttgtatgcaggtgctcaaatccacttgacacatcagtgaaggagaaaatatcaatgttctgccatgttgagcctgaacaagtgatctgtgtccacgatgtctcatccatctaccgagtccccttgttgttagaggagcaaggggttgtagattattttcttcgaagacttgaccttcctattgagaggcagccaagaaaaatgctgatgaaatggaaagagatggctgacagatatgatcgcttgctggagacctgctctattgcccttgtgggcaaatacacgaagttctcagactcctatgcctctgtcattaaggctctggagcattctgcactggccatcaaccacaaattggaaatcaagtacatagattctgcggacttggagcccatcacctcgcaagaagagcccgtgcgctaccacgaagcttggcagaagctctgtagtgctcatggagtgctggttccaggaggatttggtgttcgaggaacagaaggaaaaatccaagcaattgcctgggctcggaatcagaaaaagccttatttgggcgtgtgcttagggatgcagttggcagtggttgaattctcaagaaacgtgctgggatggcaagatgccaattctacagagtttgaccctacgaacagtcatcccgtggctcgtagacatgccagaacacacccagggcagatgggcggaaccatgaggctgggcaaagaggagaaccctgttccagaccaagaactcagtcatgaggaaactctatggagacgcagactacttggaagagaggcaccgccaccgatttgaggtgaatccagtctggaaaaagtgtttggaagaacaaggcttgaagtttgttggccaagatgttgaaggagagagaatggaaattgtggagttagaagatcatcccttttttgttggggttcagtaccaccctgagttcctgtccaggcctatcaagccctccccaccatactttggcctcctcctggcctctgtggggcggctctcacattacctccagaaaggctgcaggctctcacccaggtaggcgcactctttgcttcagtaatccattagtcttctctagtcctttaggtggtcgcngattcattacagnga

SEQ ID NO: 720010 - DNA, 870 bp, Homo sapiens
tccttgcgttttctttcgccttcgtctgccttgctctcgactttcttataatgcgttctttttgcacctgtctgtctccccatgttccatatgggtgatttccccttgcccgtccttagtgtcgccttttctctttctcgtctgtacccgcttttctttacatcctcttgtgccctaattctcgctctatttgtcattcaatcatttagtctcccttcgttcccgtactgtttcctgcctccgaaggattgtaagttgtggcattagcctagtactatctttccttagggaagcgccatactggcgtcttcaatgctcttgggtcattttaataggggtattagagttcaggtctgacgcatcgattgtctgttgatctaaatgatcgggccatctgtgcagggtccagatgtcgaggcttatcagtcgatcagtaacgactctcaacggggtcatatggttttgtggtgaactcatctgttcccgcttctaggttggtgcccagggggtctggagtcaccttagttatatagtattcagtaagaccgccatgtgtccacgctcagcccccagtgtcttagtgtgaacatgcgctgtgtcgcatggcttgctgttggaatactgggtctctgggtccagggctcgttagtggtgagctcaactgtcccgtacaaacacaagatcagggctgagggtaaggcaatagaatagagagctaggaaagcgtgggcccagaactggagactgtttctctttcctggagatgcagccctgggcgcagtggagtcagcagtgtcagcatcagggcaggaagccattaaagcagcagcgggtgtgcacatacacccgagggtacttccttatgggcca

SEQ ID NO: 720011 - DNA, 149 bp, Homo sapiens
tattgcctagcatatcagcaccacatcgttagcgctccttccttcttcctagcttcctgcagcaaatcgcacgggctcctggacatctgttcctatctacaccacgaagctgctgcatgctcgcttgctcctcagatcctagctacatc

SEQ ID NO: 720012 - DNA, 965 bp, Homo sapiens
acgagttctttgcgcgttatgtgtccgggacctcccgtgtgaccgccgtattatcagattgctctccccgcggtgcgcctcgttgctatggggcccccaattctacaacttaagatctccttgctgcccgaaaatccgatgtgccattctcccggggttcattacaaatttttacagacggttctattgcccccgtcgccgccgagtagttggtcaggccggggtgtcacacgcgttccccggggaccaggaccgggttcgaccacccatgtgccagcagcatgcgtggatggtccccgtatatcgcgcctctggttggggacgccccacctgcggccaccgtaaattatcggcgtgccaccggggcaccgcagggaaggcaggccccgtggtccccagcccactatgggacagttctaatgggttgctgccctcccagtgacctcaatagtctctcggataatccatggagcggcctgttccgctgcgaagaagcaatatctccacacgagaaaggggggcgcaaacaaatcacccaccaacattcctcaggtgccctcccgaaatcgagagcaagaagcgcggtgcagactactacccccaacggtggcaccgccccggtaatgtgagccccccgggggtcgcccccgctgtgcgacaaaaacgctgggggtcctcgggcccccagggtaaatctcgggagatctataatagcggggcgcggtaggaagcccacactgcatacacagtttcgccgcccccaacaagttatgatgcgagatatcaacagcggtcgcacactactggtcgtttccacccgccactgtgggtgccccctgaaagtcaagtgttggtttcgaagaacaaatttttatgttcttttgatgagacagaacaagcgttgcaccaacaaccgttgaaagacctttgaaacctcaaaaagacaacccgggcgaacaaaaaca

SEQ ID NO: 720013 - DNA, 816 bp, Homo sapiens
taaactttccgtgccataatacacacgcagccatcagcccacaaagacatgtgactaccaagcgcgtggccccttggcacccatacgtggcctcagccaccataagacgtggacaaccttgggtaccataagtgaccgccccaccgtggcatatattacgtggcgtggcctctttctcgtggtcacagggggctctatagctcggtgaccaacatgtggggtgtgtgctcaggttcgtgtgcgtgcggtgtgtcccatgtgggggagacctggggcgggcaagcgtggtcccgtggtgccgtggtattgtgacacgcgtggtgtgtggggtctcattttcacccgtggtgtgcactcgacgggggcgtggttctcggtctcctcataacatagcgaaagaacccgtggctgggagaaccccaaagggccttctcttttattctctccaacgcctctgtgggacacaaggagtattcgtggcccacaggggggacagaaccaggcgcagaatataacatcttcctgtggggtgtgacccacaccctctatcaccaacgtgttgggtccgatgtgggaaaccccccaatctcaccaagcctttgtgccctgtgtgtgggagaccccaacctacagcccgtgggtggggtcggcggcagattcggcgcattattcatcgcggccccaaggaaattcccgcgtcgcgacgttcaatctccataacacggcttggggggaccatcgtggtgggggcacaaaactctaggggggggagagttgctccaaaagtcacccgggaaaggaagcaccggggaagcg

SEQ ID NO: 720014 - DNA, 185 bp, Homo sapiens
ctgacagaaaaaggtaggcggatggcaggggcagagtatatagacagactaatttggtcacacagtgacacaatttttctttcattagaggctagacatgttttactcgggccagtgctgcttctgaaaaggccagaggtggcaatagagagacaaagaatgctctcttccctagatgccaaggg

SEQ ID NO: 720015 - DNA, 117 bp, Homo sapiens
catttagaatgattgcctttgattttttttttaaattctgggtgtgtgtgtgtaaaatgccaattaagaaccctggtttcattccatgtaagcattaaacagggtatgtaggtttca

SEQ ID NO: 720016 - DNA, 846 bp, Homo sapiens
ctaacaccagtatcttcagatcatctattttctctatggagcggattaaccactgataaggagagtcactaagtgatgcctggcacttactgcatcagtacagatgaaggtggatacgaaatataatcatgcatataccgaaaaagcaaggtgatggcacacagtctttggtgttgccagctgactgaaggagaaagctaatggtgtgcgggctggagtgctgaccaacgagcatttgctctgatccagtcacggagacgtgtcggcacagctaaagtgagggattactaaactagtgtgtcagcttcaaccaaaactcctctgtgatacggactaagctttaccacagtcagttcgatttgcctgttagagagagacatggttcatgccatacgtcatggcagacatagcgctctaccgagagacaccacttgaacttccacagtcgttacactcgacgagtgtaacgtgcttatgctaagcaagcgacgttctaggcagtactgtgaagcgctatcataatactaatggccttatgatcaccattgacatgggaacagggaagtcctgtaaacatcacagagtggcaatcgttgagatataatgtataatgcattgcttgctaggttttgcagcctgtagtgatcattaggatgtgcatgatgagatggggcttagagcaaaccctagtaattggggtgatcctaacaacgatttgcagcaaacttaaaatggtacttctaacagccaaaacagatggaaccacagacgcggcgggctgcgggggacgaataaaaattgtgcccgccgcacaggggcgcccccaccacgttacacctggatccc

SEQ ID NO: 720017 - DNA, 129 bp, Homo sapiens
atcgaagactaccacacacttgtgtccattgtggatgttaaagccaacaagcacccacattacacaggctgtgaccaacctgtatgacattgatgtgacccaaagcgtcaacaccctgaatatcggccc

SEQ ID NO: 720018 - DNA, 139 bp, Homo sapiens
cggaccgtaccagcggcgttgtaggctgggccgagttggcttccacgaacaactggccatcggagccctgcttgatctcgatttcgccttcgatgttcttccacttgccgacgaagccggcgggcggctgcgggttgat

SEQ ID NO: 720019 - DNA, 545 bp, Homo sapiens
gtgagattaccacgtggggaacgcccctttgcggggtgtaacaagaggcctaacgttgtgggggcagcaaggtgtaggacggccaatcccggagtcctctttagccgcccttcttcctggttcagaacgaggacttttgggactgtatctctgtatagtatagaaaaagctattgtcgtgaacgactagtagtgaggcagatcgcttttttggaccttttctcttttcccccgtgtagtttagccacactctggcacagagattagtgcttccgtgggaaacagggtgttatcgagagcgccctctgcgggacaggggttttccacccgcggtgctgtttcttcccacacacaagtattcgttcttgtcagggagggcctcaatcttaatgcccaacctcagacacatgtttgatcctgcttgtagaatacaatcttgcgcaccccttcttggtggtggggacaggagttgtaggtccacgaaagacccctcttgcgcatgtaaagcatggaagccaaaaacaaaagagttaaaagaaaaataac

SEQ ID NO: 720020 - DNA, 420 bp, Homo sapiens
tgattcatggtgcggtggtcctttaatacatggtttgattttgtttttctcttcctgggtttgggtcacatccctcttctcattgccagtgtttttgttgttgctgttgttgttgaacacagtacattttaattaatacattttaataactctagatattgactccctctcctccaacgctcgctctaggttagggaattgttttccttttttaatttagctaagctattttaggaaagcctatttccctatgtcctccagagtaaagccttttgtattgctcaccctgaggtgagagtaattttaccccagctctctgtggtcttccctatctctaggttagcaatagcttcatttggtgctgctccctgctggagaggctccactaaatagcagttggtcgctgtattgtttttggac

SEQ ID NO: 720021 - DNA, 932 bp, Homo sapiens
tgtggctgtcctgccgtggtacctgctactgtcactacctgttcgaaaggcttcatcttaaaggaggtagaagtcttcgtcgtaaatcggctaaagaagtgctatgatgcggcgtatagggcgcaagaatatgacagagtacgtgggcccagattcccaaatctctggaggatctggggcttgtttatagcaagatcaggaagtgcttgaagctcttttggtgggtttggtatatctgacctctcatccatctccagcatcaatcgggtggagagagcgattgcgtgccccaggctgcatccccacaaggtctttaaatctatcggaatagcgttgaactgtgagctttcacattctaggatgagccacgagttgccttctggtctccccgtgttctctctccctaacttctctacttcagtactgacaataagatcacgggagaatagtccctggatgaggttatcaaccagcgtttaaaatgcttccgcagtaattctggggtgaatctcagcaagaaacagttgatagcgtttagtacctgagaacagttctcttcaatgtgtcaattccctggtttgagctggtctgttcctataacaatagcctataaaacgtatcgactgtacttgaaacctaggaagaatttaaccggggtgcactccactggggacgtttgtaaatgacggagatccgtggacgatcgggggcataatcctatccagtactgggttggcgttgaaggaacggcctcaaaaccggtccgcgcatgatgatgcaaggtggcaccacctaaaaattagtacgggcacatatagagggtccggagaataatcattaaggtagggcaaaataaaacggaaccttgaaagaaaggaataaaaacaagaacaagaaatataagaaaggacatattctcctcttctcacaca

SEQ ID NO: 720022 - DNA, 163 bp, Homo sapiens
  misc_feature (28)..(28): n is a, c, g, or t
  misc_feature (109)..(109): n is a, c, g, or t
  misc_feature (129)..(129): n is a, c, g, or t
  misc_feature (155)..(155): n is a, c, g, or t
gaattgcatactggatctgatattcaangtatacacacacagccaggacccatagtgcccatttcccacagaagaagaaaaaagaaggcgtgtaacgtgttcattccanaagctatcatctacttttangctcacatttccatgtgggaaattcnagtttctc

SEQ ID NO: 720023 - DNA, 895 bp, Homo sapiens
ccaaagatgaatggagccctcccttcggatgctgtggtgctacaggcaagaacgtgagtggcttcctgcccagtcgtggtcctgctcctgggagcaagccggtccagttcatggatttcgaggggaagacatcgtttggaatgtcagtgttcaacctcagacaacgcctatcatggttgcagctggcatcctgtgtgggctaggcctatgccatggcccacacaggggtgtcatcttcttccttggccctgcttgcttgtgcatttgcgcttctgtctgtcctactccatccacctccttgcttgaccttgtgctggtattgcatgtgcatccgagcctatgagcagctggttgacagagggcattctgggcctgctggggaaggtatgtggtggccacatgtcatctgtctgcacaatgttgggtgccatgtccagtttacctgttcatcatcaaatctgagctccccctggttatcggcactttcctgtacatttgaccactgatgggggactggttcttgaatgggaaactcctcaatcatcatacgtcagtgtgttaatcatcactgtccctcgcccctcattgaaaacacttgggctacccctgggggttaccacctaggtggatctcgtcctcgtgagcatagcaatgcatgtagtcacatggacaaacgggcagatcttaaagcagaaggtccaaacattgggctggacacatacgggcaaaggagagagaccaagcacggacgacgtgaaagcccccgaggacatttcacaagcgaggagaaaaaaagaaggagaggaggaccaactgtaccaaggtagacacacagatgcgacacaaggggcccgcaacgggagaagagagggagggcaccagatagggtgccagg

SEQ ID NO: 720024 - DNA, 103 bp, Homo sapiens
  misc_feature (27)..(27): n is a, c, g, or t
cagcagcctctacagccggtccaccgntccgagtggacatcgtgcgcgaccgagggaccctggcccgcgtggtcgatgaaggctttgtcgaggatgtttaccg

SEQ ID NO: 720025 - DNA, 441 bp, Homo sapiens
  misc_feature (26)..(26): n is a, c, g, or t
  misc_feature (30)..(30): n is a, c, g, or t
  misc_feature (41)..(41): n is a, c, g, or t
  misc_feature (43)..(43): n is a, c, g, or t
  misc_feature (51)..(51): n is a, c, g, or t
  misc_feature (73)..(73): n is a, c, g, or t
  misc_feature (81)..(81): n is a, c, g, or t
  misc_feature (101)..(101): n is a, c, g, or t
  misc_feature (106)..(106): n is a, c, g, or t
  misc_feature (125)..(125): n is a, c, g, or t
  misc_feature (135)..(135): n is a, c, g, or t
  misc_feature (150)..(150): n is a, c, g, or t
  misc_feature (156)..(156): n is a, c, g, or t
  misc_feature (165)..(165): n is a, c, g, or t
  misc_feature (168)..(168): n is a, c, g, or t
  misc_feature (178)..(178): n is a, c, g, or t
  misc_feature (196)..(196): n is a, c, g, or t
  misc_feature (201)..(201): n is a, c, g, or t
  misc_feature (217)..(217): n is a, c, g, or t
  misc_feature (226)..(226): n is a, c, g, or t
  misc_feature (242)..(242): n is a, c, g, or t
  misc_feature (267)..(267): n is a, c, g, or t
  misc_feature (293)..(293): n is a, c, g, or t
  misc_feature (299)..(299): n is a, c, g, or t
  misc_feature (311)..(311): n is a, c, g, or t
  misc_feature (340)..(340): n is a, c, g, or t
  misc_feature (361)..(361): n is a, c, g, or t
  misc_feature (366)..(366): n is a, c, g, or t
  misc_feature (374)..(374): n is a, c, g, or t
  misc_feature (429)..(429): n is a, c, g, or t
tattattttaaaaattttaatgaaantcancgttgtatatnanaatgtcanaaatttcattaggacaacaatnaaaaaaancgcctatgcacgggaaaaangaaanaggagttttcacagcaggnaattagtgcngaatcagtgactccngaagtngttacagcngcncttgcgagangttgcattttcctctgcnagggnacactgcttggggggnttaatattntttttttctcccttanaatttgatgttatcaaagccaccantaacattttacttaaagtttttaggngaaacncttcacaaagtnaaaagtgcagaacttctagtaattaagancatttcagaagtgcctgaaangagtnccacaagnggatgagtttgctttttccattccattaagttcgggagaaattttaaagagaggnatgccagtaacc

SEQ ID NO: 720026 - DNA, 286 bp, Homo sapiens
ttttggggggggccgggaacaaggggcccttaccctgtgtggtgggcggggcctgcccccagccccccagcctggttttttccctttaggtttggggccctgggtggggtaaccttcccttttgtttggccctgggctggcccttaaggggggggatgggttttttaaaagaattccccttttttttggccaaaaatcccggttatatttttatgtggaattaaccccggttggcccccggtttgtttgctgaaaatgtggaataggtaaaatgaaataactggga

SEQ ID NO: 720027 - DNA, 453 bp, Homo sapiens
  misc_feature (41)..(41): n is a, c, g, or t
  misc_feature (133)..(133): n is a, c, g, or t
agggtaaagctctataaggaacccaaccttgggcgaatttntggggtgatcattaacacacccaagcgaggggggcgtcttggtgtattttgcttctcccaaaaaaacataatttggtccaatctccagtatnaatgcaatcacccagggcctgaggactttgacccattccggaggcagttgctccagggaagggtgtgaggaggaggcccccaaattcaaaattcaaaattttaacccctttggccttggggtccatcctggagaccctgaggtttaagctacagcccctcagccaaccccagacccttttttggctcccaaaaggagttcagtcccaaaggggtggtccccccccccttcaggggatgagaagttttcaaggggtattactcaggccctaaccccaggaaaaatgacagcccattgccataaagttttggttgtttttta

SEQ ID NO: 720028 - DNA, 653 bp, Homo sapiens
cggtgtcggaacttcgttgcttgcttgcctgtgcgcgcgtgcgcggacatggcctcaaagcgattatacccaacaatgtaacccaaagctatggggcctaccccacccatgccgggcagggactattcccatgcagagcagtcagccctacggacagtcgagagttacacgtggttatagccagtccacggacacttcaggctatggccagagcagctattcttcttatggccagagccagaacagctatggaactcagtcaaatccccagggatatggctcgacatggctggcatatggcaggtagccaagatgctcccaagtcgtcgttacgaggcagcgagtcctctctaccctggcctatggccagcagtccagtgctccctgacagtcacctcgggaacgttaccggtagcgagttcgtcagtagcagacagctattggcgcagccccaggatgtcgggagcttacagtcgcaggcagctctaggctacttggtggtacacgccagcgagagcgtatgcgaccacgcatgtcgaagagcgtattcatgcccgccctcacggcgcttattggaccgagtcgaggaactcaagttacgaatcacgcaagccagtgggctgagtgcgacggatgtcaccgtgcgacgtgtg

SEQ ID NO: 720029 - DNA, 145 bp, Homo sapiens
gaatctggacgtgacatggtagatatcacccaggagccaggttttggataccatgttagaagagagcatgcgtgaggatcaagaaccatgtgtcgtgcctcaacacatattgcagtcttcactgggaattaatccacacgtcata

SEQ ID NO: 720030 - DNA, 222 bp, Homo sapiens
ttttttttttttaaagggaaaaaaattttaaaagggggccccatttgggggcccaagggataaattgttttggggggggtaaaaaaaccttttatttgggggtttcccttttttaaaaaacccaccccggaaagcggcttgggcggattaatttgttttttttccccggaaatttttttccccccgcaaaaaaaccgggggggttttttaacccctccaagg

SEQ ID NO: 720031 - DNA, 1786 bp, Homo sapiens
  misc_feature (498)..(498): n is a, c, g, or t
ctgctgtggtggtgtgcttacttctttgctacttgtcgtcttttgttttgcggtgtttctgttttgtttttgtgttttggtcgttcattgtttttcgttttcgtgtgttttttctttccttgtcttcttgttcttcttggctagttcttttattctgtttgtgttgtgtgtgtctggtgtctgtgttgtggtgcgtgtggttgtggttgtctgtgtgtggtgtttgtttcgtcgttgtgctgtgttgcttttttgttgttgttctgtttttgttgttcctctgtcttgccgtctgtctttggcgatttgttatatttgtgtgtttcgcgttgcttctttgtgtgtgtatttgtggtttattgttttcttgttgtgtttttggttgtgggtgtgtgttgtcgtgtggctgtgtcggttctgtgttgtgtgtgtgggtttggtttgctggcgtgtcttgtgtgttcgtcttcacacagtcggtctgaggtgagtagtgcntccggggtcacctttgtttagttatatctacgcctctctgtgtgttgtgggtggttactattccgacccaccctcgcctcgtttgttgtgtggtgcgcgcccacactcttaatttttgggtgtctcctctctgttggtgttgggtcctgcacaccactccaaccgttgggtgtgtgttgttgcagcccatattatatggtactagccgtggctggtgtggtttgtgttgtctgctcgctgtcgtcccccctgcgctgtgttgttttttacctgcgggtgtgctccttttggtggtttgtgttgcgttgcgctctcggcttggggggtgtctgacgattttttttgtcccgcccctcgcgtggcggtgttgtgattagatgctgtgtggtgtgttgttttggtgttttgtgtcgtggcgctccatccgttgggtgggcgattcacttggctcacacatgaggtgtgtggtgtggggagacgccccgccgctgtatatgtagttgtcttctggtcgtcttctattttgtggttgttttctcccccctctttctcgctgcgtgtgtggtgtgcgcccccgtgggggtccgctgcctctgttgtgtgtgtgttcattcctctctcttgttgtaccacggcggcgctcctccctctttattatgagagagagaggtggtgtttacacacctctgtcctcgtgtgtgtgtgtggagagtctctcctccgcgtgttgtgtgtcgccaccacaccaccccttgttctccccagcgtaagagtgagagtggaggttcttgtgtgcccccgctggggtgttgtgttgtttttgtgtgggacacaccccctctctccctgcgtgggtgagcgggcggagcacccttcttccgcacgggatttctctccccttttttttttctctctcgcgcgcctcttctgttttcttctagagtattctctccacccctgctgtgtgtgagagagaggggtgtgtttctgggggggtgcgcgcggtgggtgttgtgtgtggtggtggcgcgccacatgggtgttgtgctctggtttttgtgtgggagaagggatacacacacacatgagtgcgccccatctttgttcttcccggtcttccaaagagagtgttttgtagtacccccgcggcaccctccccccatttttttttttttgtgagagagagagatgggcccaggcgccccaaaaagaatttttgtctttttggggaagagtggtccccgcaccccacaggtaaaaaatagtgtaggtggcccccccacaaata

SEQ ID NO: 720032 - DNA, 399 bp, Homo sapiens
ttctaagtattttacttagaagtaagtggtattgtaaatgggattgttttcttaatttctttttcagaaagttcactgttagtgtatagaaatgtactgacttttgtaagttgattttgtatcctgcaactttcctggatttgtctaattcaaatggtgttttggtacagtctttgagattttcaatatgtaagatcatgttgtcagcaaacagagacaatttcatttcactctttcctatttggatgtcttttatttctttttcttgcctaattgctcgggctaggacttctggtactatgttgaacagaagtggtaagagcgggcatccttgtcttgttctaggtcttataggaaaagccttcaacttcttaccactgacaacggggtaccgagctc

SEQ ID NO: 720033 - DNA, 302 bp, Homo sapiens
  misc_feature (5)..(5): n is a, c, g, or t
  misc_feature (25)..(25): n is a, c, g, or t
  misc_feature (56)..(56): n is a, c, g, or t
  misc_feature (94)..(94): n is a, c, g, or t
  misc_feature (113)..(113): n is a, c, g, or t
  misc_feature (182)..(182): n is a, c, g, or t
  misc_feature (244)..(244): n is a, c, g, or t
  misc_feature (268)..(268): n is a, c, g, or t
  misc_feature (293)..(293): n is a, c, g, or t
agtgntggaggtggggcctaatggnaggtgtttgggtcatggtggaagatccctcntgaataaattaatgccctctctggattgaggggtgagntgactatcgctctgttaanttttgtgagagctggttgttcaaaagaacctggcacctcctccctcaccctcttgtttctctcttgccntgtgatgtctgcatacactggctctcccttcatcatctgccatgagtggaagcagcctgagncccttagcagaagcagatgctgcnccatgcttcttgtacattctgcagnacagtgagc

SEQ ID NO: 720034 - DNA, 104 bp, Homo sapiens
tatctcgatcgttacagcaagcttgcggggtaactgagcccccctctcctccccttcctcaaccactggacgtttatatattattaggcagggatgaaatggtg

SEQ ID NO: 720035 - DNA, 816 bp, Homo sapiens
gtttcacccaaggctcctgtgaccactacatggctatcgcctgtgttccctcaaggccctagccctgtacagtcagcaggtggcaaagccagacaggcttatgtccttctccttaggacggtgagttccccaggcctcaggttggtatacagatgccatccatgagccagggattggagtaaaaatccttagaaatctacctggtgttcctttgcactgcagctgagctggcactcaaactacaagctagagcccttcccactcttccatcccctttccacaggcagagcagcctcactctgtggccaccaccagcacgggcccacagggagtgctgtcagactaccactgaggttccattaagggctaagagctcttcagtcagcttgtggtgaatgttgcctggtctgaggctgactcttcaagactcacccagggcaggtccagcaatgtcatccacgagccaaggcctggaatcagggaccccaagaggcttcttggtgctctatccctctgtggttgagctggcagctgaggtgcaagacaaggtcccctttactttttcctctgttattctcaagcaggtggggtctctgaccgtaaccaccacagctggcaagtgtgctgtgttacatctgaagctggcatgtctcagagtctcacccagtgccatcgcatactacctggggtactgctgctagttattcagggtcccaagggttgtttagtcagaaaggcgatgggtcctcgcattgaatgattcttcgcttcaagccagcaaggtctggttggtccagaatgtgtcttagaaatctc

SEQ ID NO: 720036 - DNA, 901 bp, Homo sapiens
gagtcttgacgtgagctagctggcatggcggcctgcattgcagcggggcactgggctgcaatgggcctaggccggagtttccaagccgccaggactctgtccccccgccggctctatctgcctgcaggggtccaccgcggggcctgtccgggcagcaagagcactgggccttccagagcccgggtgcgtcccaaccctgcgcgccgaaaaaccggtcatccgtggacaagcaccgccccgtggaacccgggaaacgccaggtccttggaggtcctgaaattcatttcctcgaaaggggaaagaaccagaatcctcttgaaattttcacaatacgacaccgcacacaggatatgtttagaacagggagaaaagtactccaacatctccagaagttctatgttgtggaagtttttctgtcgggtgttaactaacaggttggacctattatgcccagtggaaaaaatcaagccagtttttctggggattttgcattcaggagatcaggaaagacggactgtgggcctactttcaatcctttagggaaatgttactcgaagggacacggttgtcgaagaattgtggttggaactttataatcctcgggttcagggagattccgggtggtcaaattaagagaaacgggtgggatgatagctggctatacttaagaggatgccttcctgaatataggcactttgggtgttgatatgaagaccgttgtaaagagcttaacaaaaaggttccgtaagagcgaaagtaacatgaagctagcctgggtaaaaggggacgccacttttatattaagaacacattgccttggtgactgagcatgaagagtccagtgggcccagggtatgatgtggggggatatacaagaagggtgagagaggaagtgttttaa

SEQ ID NO: 720037 - DNA, 405 bp, Homo sapiens
agatgtagcatgagccagtgagatgtacagtacgtgataggaagatgaacgttccttctgggggagtatgtggatcacagaggacttcacgagtgaagctgcagacttacacggtgagtataacatctcttaaggcagcgcgtctggagttactcattcctcccatgggttcatggtcgtcggtggcctcgaggatggaggctgcagagcttcacgaagagtattacagctcataaactcagtgtgtacccaaagaatgagcagcagcaagttatctcaaagatcaaaaaaacaaaactcccatagcgtgagcgtggaagagaacctgagccagttgccactactagcgcaggcagcctgcttttattcccttttctgaccccaaccaaatcctgctgatggtgc

SEQ ID NO: 720038 - DNA, 638 bp, Homo sapiens
  misc_feature (171)..(171): n is a, c, g, or t
  misc_feature (638)..(638): n is a, c, g, or t
cggtaccggttcagtacggatgtggggacagcgtctgtcccacagaggctggctagccccagtgggtatggggtgagctgggcaggtaagagggtggactcccctctccctgtgggaggagtgtgctgggacccatgaggcacctcatccactctcagccaccttcctgtnggagccctaagcctcgcaaggccacacgtatgagtgcaaggcaggccacccacagcgactgctcccgcgttcgacaggtggggaaacctggcccaggtgtcttgatggcagcccagcacgcctgccctcgtgcttccccgcagagccttctaggggaatgagaccttcgttacacgctggcgctccttacagccctacagactttaagctaaggcctccagccccatcgctgtaagaattgtatgctaggcattctgaggacatagatgggggtcccatgtcggaaggagccaaggtgttggaactgggtccagttcctgggctggctctggtgggagatctggaaccctatgctggggctcctggacagccctggaggcatggcatggacagtgtgtcagccgcacaccgaggccctggggtgtccttattcacataggctggcagccatctatccctagcccggn

SEQ ID NO: 720039 - DNA, 187 bp, Homo sapiens
ggttctgtcaaaatgcgcaccaaatcagacaccgtcaattcatccaaaaccgtcacaattggcaagcgaccaattaaattctggaatcaaaccaaacttgattaagtcttctggttgcacatatttgagaacattgtcatcgtccacgctgcggcattttcattagcaatgcgagccaaagccaatc

SEQ ID NO: 720040 - DNA, 278 bp, Homo sapiens
  misc_feature (3)..(3): n is a, c, g, or t
ggncctcccactggttgctggatataaaatcaatgtatacaaaaatcaattttatttctttttttgatggggatggagtcttgctctgctgcccaggttggggtgcagtggcacaatttcagctcactacaacctccgcctcctggtttcaagcgatcctccaacctcagcctcttgagtagctggaacaacaggtgtgcgccattatatcctgctaattttttaattttttgtagagaccgagtctcattctattgcccaggctggtctcaaactcc

SEQ ID NO: 720041 - DNA, 266 bp, Homo sapiens
agaatctgctgcatagcaatacatcgatagtcggaggcttcggcaagagactaggtgcgcctaagtaatcggtgcccccgatatggcgtttcgccgcataaacagacataagcttctgactcgtcagctccctctctcctactccaggtcggcatctgctataggggaggccgggagcaggaacagggtgaacagtctaccgctccgcttagcagggaactactcccagcctgaagatggttggtgggcctgaagatgttggttgg

SEQ ID NO: 720042 - DNA, 138 bp, Homo sapiens
agggtcctagagatcccacactgggtcgagtctctgttccagtaacagatgctggttttgttttgtttttttttaagacaggtctcgctctgtcacccaggctggagtgcagtggtaccatcagagctcactggagcc

SEQ ID NO: 720043 - DNA, 116 bp, Homo sapiens
gcgagggcagaaaggcagaccagtaggacagatagctatagactttagtataccaacattccattttaatgtgggattggcacagtagttttcaagatggattgcttcagacttat

SEQ ID NO: 720044 - DNA, 116 bp, Homo sapiens
gcatctaataagaaaacccagcccaagaccccaacaggggccccctcagcccccccaatgacccccggcccagccaagtgatgtcacttccaccccaaaacgcgcctcatactagg

SEQ ID NO: 720045 - DNA, 131 bp, Homo sapiens
ccgaatctaactacacagggttgactgtacttatcccctttccatatttggagctctcttttatgaccatgagaaacttgactccattatcctcatcataatttatttcctgaatgcgtccgtcgaagttg

SEQ ID NO: 720046 - DNA, 289 bp, Homo sapiens
ggcccctttcagagacctcaccctaaaaagctattgggagattactgatacctccaactcacgtgattcattgaggccatgccattcaatgctatgttctcaggaaatgtctatgagtcctctcaaccattgctgttgataaaataggtgaatgtcaagtgggggttagcatttgataaggtgtatgtttgaaataatattttatcgtctcttgttcacaaatacaacatataattccaagaagaaagagagaagtagaaattcagcatccttaagatgacagcaagaa

SEQ ID NO: 720047 - DNA, 1127 bp, Homo sapiens
  misc_feature (763)..(763): n is a, c, g, or t
  misc_feature (1124)..(1124): n is a, c, g, or t
gctaaatgtcatgtatttttcatggcccctccaggtattgtcagagtcctcttgtatggccttctaggaaggctgtgggacccagctttcttcaaccagtccaggtggaggcctctgccttgaacgtttccaagtgaggtaaaacccgcaggcccagaggcctctctacttcctgtgtggggttcagaaaccctcctcccctcccagcctcaggtgcctgcttcagaaaatgaagtagtaagtctgctggcctccgccatcttagtaaagtaacagtcccatgaaacaaagatgcagtcgggcactcactggagagttctgggcctctgcctcttatcagttggcgtttgggggcaagatggtaatgaagaaatgggtggtattacacagacaccatataaagtctccatctctggaaccacagtaatattgacatgccctcagtatcctggatctgaaatactatggcaacacaatgataaaaacataggcggtgatgaggatgataaaaacataggcagtgatgaggatcacctgtcactgaaggaattttcagaattggagcaaagtggttattatgtctgctaccccagaggaagcaaaccagaagatgcgaacttttatctctacctgagggcaagagtgtgtgagaactgcatggagatggatgtgatgtcggtggccacaattgtcatagtggacatctgcatcactgggggcttgctgctgctggtttactactggagcagaatagaaaggccanggccaagcctgtgaccgaggagcgggtgctggcggcaggcaaaggggacaaaacaaggagaggccaccacctgttcccaacccagactatgagcccatccggaaaggccagcgggacctgtattctggcctgaatcagagacgcatctgaccctctggagaacactgcctcccgctggcccaggtctcctctccagtccccctgcgactccctgtttcctgggctagtcttggacccacgagagagaatcgttcctcagcctcatggtgaactcgcgcctccagcctgatcccccgctccctcctccctgccttctctgctggtaccagtcctaaaatattgctgcttctcttcctttgancat

SEQ ID NO: 720048 - DNA, 1574 bp, Homo sapiens
  misc_feature (1210)..(1210): n is a, c, g, or t
  misc_feature (1571)..(1571): n is a, c, g, or t
gctaaatgtcatgtatttttcatggcccctccaggtattgtcagagtcctcttgtatggccttctaggaaggctgtgggacccagctttcttcaaccagtccaggtggaggcctctgccttgaacgtttccaagtgaggtaaaacccgcaggcccagaggcctctctacttcctgtgtggggttcagaaaccctcctcccctcccagcctcaggtgcctgcttcagaaaatgaagtagtaagtctgctggcctccgccatcttagtaaagtaacagtcccatgaaacaaagatgcagtcgggcactcactggagagttctgggcctctgcctcttatcagttggcgtttgggggcaagatggtaatgaagaaatgggtggtattacacagacacgtgagtttattggtcttttatttatgccctgtctgaggatgcagattggtgggtagatgagaaggaactgattgagagagattaaccccaagaactgatatcttcccagcattgcattctcaactccattttagaaaggttccaaatagggacttctgtgggtttttctttacatccatcttacccttcccaagtccccatgtccctgcgtaaaccctaaagccacctcttaaaaggttctctagttcccttcaaggttctctagttcccttcattccacatatctcctcttccacaccctctagccagtagagctcccttctgacaagcaagtctaagatctagatgacagatgacttcctgcatttgggtggttcttttgtcactaatttgccttttctaaaattgtcctggtttcttctgccaatttcccttctttctccccagcatataaagtctccatctctggaaccacagtaatattgacatgccctcagtatcctggatctgaaatactatggcaacacaatgataaaaacataggcggtgatgaggatgataaaaacataggcagtgatgaggatcacctgtcactgaaggaattttcagaattggagcaaagtggttattatgtctgctaccccagaggaagcaaaccagaagatgcgaacttttatctctacctgagggcaagagtgtgtgagaactgcatggagatggatgtgatgtcggtggccacaattgtcatagtggacatctgcatcactgggggcttgctgctgctggtttactactggagcagaatagaaaggccanggccaagcctgtgaccgaggagcgggtgctggcggcaggcaaaggggacaaaacaaggagaggccaccacctgttcccaacccagactatgagcccatccggaaaggccagcgggacctgtattctggcctgaatcagagacgcatctgaccctctggagaacactgcctcccgctggcccaggtctcctctccagtccccctgcgactccctgtttcctgggctagtcttggacccacgagagagaatcgttcctcagcctcatggtgaactcgcgcctccagcctgatcccccgctccctcctccctgccttctctgctggtaccagtcctaaaatattgctgcttctcttcctttgancat

SEQ ID NO: 720049 - DNA, 196 bp, Homo sapiens
tgagttccaagagggcctcaggcctccaaccacaaagtgcagagaagtcagccccagaatgctgacagctgccggcggggaggctgagagtgcttgtgttgtttgacagactgagtgtttgtggtgtggatgtgagtattggagtcacacatgagtgcttccacccatgcaatggccatcatggccatgggagcta

SEQ ID NO: 720050 - DNA, 388 bp, Homo sapiens
agaaaggaatgagcaatgggtttctagaaggcaaggtctttgaaggaggaaaagtgctgctgctttcagaaggcccctagccttgagaaggttccctgccggtattggtttctacctgggaacaggtggggctaaggagggaaggaaccaccctgtactgatgtctcgtgtgtgctgggtattgtcaggcactccatggacacaaacagcccaatgtggtgggcactgtccccttttccagatgaggaaactggcccagagagggtgggtgacttgtctggaggtcacacagccagggaaggggcagaaccacaatcagcacagacaggcttaaatggcagatcttcacagcttttgcccttgagggagcaggaacagcggggcagtg

SEQ ID NO: 720051 - DNA, 1381 bp, Homo sapiens
  misc_feature (593)..(593): n is a, c, g, or t
accaactttgggcacacccattccacatcaacaggtggccatctgcaaatgcacagggtggcatggcacacaagcattcatccaagcaaacagtcttgcacaagcagcacagcaggcaccaggcctctggggctgtctggcaggcacacaacagcccatgcaatggccatgcagagggcacacacaaccagctttgtcagcacagcagcacagcagcacagggcaggtgccagggctaccccaccacacatccaagggcaggcagcagatctcaaagcacagagcatccacactgtcacaccatgccacacacagcacacatcacccaagcacaggcatgcacagggctctacacaacagccgttccattgcatcacagggccacatctcatctctgtgcaacctcctctaaagccaagtgcgcacaatctatatcaagctcagactggcggctctcacaagcaggcgcaacacacgcccagagcatattacagaaaacatcagcacacaccgtggtgcagacctaattgcaagtctcattatcccagacaaatcataggtaggatgcgtggacacagaacagcaggcaaccnagcaacccacacatagcacgctcaaggtcgagccccatgggccacacgttggcattctcacccacaacaggctcaagcaaggggggccacagaccaatgtgttggcgttccccagctagcagggcggcttctcttctgccaacaaaaccaaagccacagaccgcaacgcaacagaattgcacgattggacgggacaacactcggcgtcaccgaccccaacacatggagcgaccaacgagcaacgactataacagctacaacttccgacccttccaaacgcccaccaggaggggcaggaacaaaccacggccaacacagacacacgaggcaacaacacagcgaacatcggggcgggacgcaacggggcgcacaatcgacacgaacagaaccggagggggcaacacacccgccctgggcgtgaatcgggaggcgaccaccacacaaacacaacgtgggttaggtcgcgcagcatgcggagggtgggaaccgtaccatggacacaccagcacccaacggcgggcgccagcggcaccaaccgtataagcgtcgacagcccaccacaattatcacacatagggtacaccatgcatatctgtactaacgaacacacacgacagagtgcgggtggcgacagtcaccaccaggcgaaacatcggcatccgaccacaacccaccacaagccagagctcaccacagaagacggatgcccagccacaacacgacaccacagcgcggtgcccacccaaacacatacggctgcctcatccgaacctactacaccaaaagct

SEQ ID NO: 720052 - DNA, 185 bp, Homo sapiens
caaaaagaaactaatcatctggaaaacgatttcaaaggcgatggcatgacagagctagagctcgggcccagcacaggctgcagcccattcgcaggcacccgaaagaacttccccagtatggtggtcctgaaaggacaattttgaagatcaactatatcttccagtgcattccgatggaatttcag

SEQ ID NO: 720053 - DNA, 573 bp, Homo sapiens
gatctcaccttaaatggctggcggcaaggctgtaaaggactccggaaaggccaagacaaaggcggtttcccgctagcagagagcccccttgcagttcccagggggccgtttttttttcgcgcggaggctaacaccaccagccatggacgtaaaagcgcgactgccgttttatacagtggggcatactggagtacctcaccacagaggtactttaactggccggaaatgcataaaaagactcaaaggtcaatctcatcacccccttctaaatggcaatttgctatatttgaaggttatcaattgtactctttcaacaagggcacaaccaccaagggccaacccccttcataatgccatatagtttttattggaaatatgaaaaatatcatcctttcctatagaactcctcgtttcttgttatccacggccctttaaactagcagacgtgtgaaaatttctaatattataatcacctaacttttccgaccataaatttttttactctctctcccatcccccgcgccgctcttttttctctttttcttgtcctcatttattttatttaacataaaa

SEQ ID NO: 720054 - DNA, 1183 bp, Homo sapiens
ggagtgcaccgatggctgagcttggctgcttctgggtgcctgtgtgtgccctgtgtgtcggaaagatggagcaatgaagcctgagcccgaggggtggctgagacccctctgacctgagatcctgctgctttctgcatgccagtgagcactgtcacctcccctggattacgtgcggtacgagctgcccagtgccctgggcctgtgagagtggaattggtccccgatggcccagtggcagtcgatgcttactgcagctgcacctgtgacaggaaacatggggagtcattgagaggacccccgactccaatgcagcgaaaaccccggatggtgaggagcaatggcaaatgtgcaataccaacatgtctgtacctactgatggtgctgtacaccagcctcacaagattccagcttcggaacaggagacccatgagttaagaaacagaaggaacaatatgctttatgaaggttactttaaatgtactgataaggatgacacaaaagatgaagaggttacttacttatgaacaagaagggtaacatatagtgtatactttggggcgagataattagttactagagctaaagagggaattaaattattgcattgcgggaaaaggcagagaaaagaataaattaggtaatagtatggtacagaagttgaatgcgttcatacgggacgacgtaaggaagtgcagcgagtgaccaaaagaatattcggatattgagaagagagaagcaggcaaatagaggaaacacaataattattacacaaatgaagtataagaaggagaaagatgatgagaaaagataaggaaaaaaagtaaagacaaaggaaaattaagatcgagaaagttcaaagggataaaaataattagatagagattgaaagaaaaagaaggaatgatacgaaacaccatatggacaaaaggcatattggaagaacaggatgaagatccaaaacgaagaagaacaaccaatcagagcacgacacagagcaagagcatatacacaaggaaaaaagaaaacatacaagcgatagcaacacgatacaaacgaatatcaggaacaaagaagaaggacacaaaactaataacagacaatagaaaaagatagaacaaggaaaaaaagacaaaaaaaaggtaggagacaaaaagacaagaaaaaaaactaaacgacaatcaaa

SEQ ID NO: 720055 - DNA, 273 bp, Homo sapiens
tgtcatttgggccccgagctttgaccctcgtgtttgacccggccccctctttttggaggggctgaggacaaatgtgcctgcttgtggaaaccaggctgggcctaaacgaagggtcatcccagccccagcccggagggtggagcccttggggggtggtcgggtgggatgagcgttttccgctcgtggtgatgtcaggagctcctcggagggaacaaagcggctgggtatgcagcctgcaggtttccataccctgaagcttttccccccccttta

SEQ ID NO: 720056 - DNA, 85 bp, Homo sapiens
taaaaaaaaaaccccccccccgttatgctttcctttggggggaaaactcccttggaaaaaaccccctttttttttttgggcccca

SEQ ID NO: 720057 - DNA, 164 bp, Homo sapiens
tgttatcgatgccaccggcagcctacatgcgcaacggtgagttgttgggtatatacactgtggtccatacagtggaatattacaggcaataaaaggtatttttagagggaaaaaaaaacattggaacacgcttatgatataatgttagggggtaccgagctcgg

SEQ ID NO: 720058 - DNA, 272 bp, Homo sapiens
  misc_feature (10)..(10): n is a, c, g, or t
  misc_feature (13)..(13): n is a, c, g, or t
aattcgcggncgngtcgaccatcatctttgtccatttcctgtaaaacagcttcaacagtgctatttactagttgatcaaataacaaactctggttcacactttgaaatctgtttttcctggaacgacaattttttctgacttccatgtcaccatttatacaagaaaggcccccatctcctttctatgaccatcgaaggggatggcttctaagggataagccactatgtccattaggtaatgtattactagtctgagaagttaacctgttctg

SEQ ID NO: 720059 - DNA, 501 bp, Homo sapiens
gtgcatactgttcctgctcctggtgtctactctgaagagcacagagtagacgtatgtctgccatttcaccggcagtaagatcagcagctgctggtgagcaaatgaggtagtagttggtgtcactggactggtgtgtgctgcctggggcctgctgcgctatatggagaggtcatgctgtgctgaacccagctccattgcctagtctacgtcagaccgagcgcggaccctgccggcctccgttctcttccgcttgtctacagatatcatctactatctattttgatacacttgtatccttgatatgttgacatattgttgcaagtagttaaatttgtgtgcctttttgttcctgaagaaagaggtacctgggatctttgaaatgctaagattcttggataccacagtatacactaaaatatcctactaaattgcatattggttgctacgcaataccccttactacttgtctaggcctactggatactagccttgagagttacc

SEQ ID NO: 720060 - DNA, 118 bp, Homo sapiens
atttccaaagcactctgggcatgtctaaacgtggctgactgatggctaattcatagattgcccgtgctttagatgtagactaccgaaatattacactctggctgaaatacgcagaaat

SEQ ID NO: 720061 - DNA, 167 bp, Homo sapiens
  misc_feature (13)..(13): n is a, c, g, or t
  misc_feature (46)..(46): n is a, c, g, or t
  misc_feature (80)..(80): n is a, c, g, or t
  misc_feature (95)..(95): n is a, c, g, or t
gttcgatccctgnccttgctcagtgggttaaggatcctgtattacngtgagctgtggtgtaggtcgaagatgtggctcanagcccatgttgctgnggctctggtgtaggccagcggctacagctccgatgggacccctagcctgggaacctccatatgccgtgggtg

SEQ ID NO: 720062 - DNA, 345 bp, Homo sapiens
accatggcagttttaaaaacaggccggatatggtggctcatgcctaataatcctagcactttgtgaggcagaggtgggaggatcgcttgagccctggagttcgagaccagcctgggcaacatggtgagatcctgtctctacaaaacatccaaaaattagccaggtctcagacatgagtgtacagaagccatcttggagcctccagaccagtccaaatgacaagtagataccaccaagtgaccctgtcaatgtcatgtgaaaaagaagaattgcttaactgtgctctgcctgaattcacgatcgacaaaattgtaaaatataataaaataatcgttttaggccaaa

SEQ ID NO: 720063 - DNA, 200 bp, Homo sapiens
acatcgctggggagagtggctgcccccacgcaccctggctgggaccaggaccatcagcacttctccatcaccaggctgagccaggatggggtgggtggtcgcagtatgtgaaaaggggccaaagatactctaatgaaagccacaggaagccacaccccattaggctgctgcctgggccgtaaggccctagtaataccccc

SEQ ID NO: 720064 - DNA, 348 bp, Homo sapiens
  misc_feature (5)..(5): n is a, c, g, or t
  misc_feature (13)..(13): n is a, c, g, or t
  misc_feature (109)..(110): n is a, c, g, or t
ccccnccctcagnccacaaaaaggtaccacctcatccacagacaaagggataacaccccattaattggtgggcgatggctcgtgttatttttgaggtgatgcttgttgnngttggaatgatcatcttaatttcttactgtattcgatgactgataaaggcatgaggatgtggcctgcatgctgcctgatcttgcctagaaccagctgcacctgctgttctcttgcttatgcaaactggctgcacctgctattcctttgcttatgccccaacccttggctatcctaactccctgttctcctgcctattactgtattctctacttctaaataaaaataaaacaaaataca

SEQ ID NO: 720065 - DNA, 359 bp, Homo sapiens
gtgtttttcacatttgcgaatggttccaccctctctcctgtactttctccagacacttctttgagtggatgatcttccgtgaagtatactgcattctcaccttttcccttccttatcaccgacacaacaagtagatccaagagacgggtccgacaaggtccttccctttcacatactgctgtccatgtggccctatcttgttttcccactctcgctaccacaactacatcatcatcccaatgctgtcattcctctctggcggagatacagacttcttgagttttgttttaaaactaacgctaaaccatccgtaccgcattccatatacctatcacacagtgccttacgtgcccctgcat

SEQ ID NO: 720066 - DNA, 214 bp, Homo sapiens
atcaaacccgggaggcggaggttgcagtgagctgagatttctccactggcatccagcctggtaacagagcgagactccatctcaagaaaaaaaaaaaaacccccattttatgtccttcataagggtggtccataataaatagatttatgaaggcctaggtagaactgcagaaggaaaagctcccatctgtgtgtcgcgcgataacatcacgggg

SEQ ID NO: 720067 - DNA, 1535 bp, Homo sapiens
  misc_feature (333)..(334): n is a, c, g, or t
  misc_feature (365)..(366): n is a, c, g, or t
tgagatcagcagacctcttgtttaacgtgagagaatgcctgtgctgcaacactcatggagagggacacttcctggccccatctgctaaatacctccaaactctgggcaggctcctgcattctcaatcgacaggacttcccttaacagtttccggatcaatgagcaccaccacgttcaggtttctgaatgcaagacctcgaccacgatgtgtgatggattcctacaccgtcacgcgctcctgttgctagtagtacgagtgcggcacaggctagtgcactgtgcctggagagaacagctctctgagcagcagcacccttggagccctcaccccgnntcacgatcctcaccagtgctgatgatgccgnncatgctgctggcctgagacagtatcccagctacaacaggacgacaccgggttcaggaatatgtggctatcaccttgagcactgacagtggccttccaggctagttgccttccaaacgcaggtagccgacctgcaggagggcctacaaacgggcccagcaagagctgggcaacagctggcttgtgaaatgagacaccttgaccaatatgctttagggtggacggtctcctaccatgtacagtgcgaggccacacagagagcatccatgagcaggggacaggggtccacacaccttacatggcaagtaagatacagatagagggtagcttggtgcgatgggccatggcaggtccgtagaagctggaactggcgcacacgccatacccagagggctcaggatgccccagagaaggaaagaagggcaaccagactacacgataggacgtagtgtggtaagactgcgatgcacactagcgagccgaacggcgcacgggaccagacagcgcagcatggtaactgactcccagaggaagcgaagagcaagaaagacctacatggaacacagaatgaaaggacagacccataagacaatgcccaaagggaacaatcccaggcactacaggaacacacacgtgaaacaaacacgaaagaaagatagacaaggccccagggaacgacaacacacagcagacaggggacaccaagaaaaaacaatagaagaggaacgacaaaacaaccagagtagacaaaaggacccagatccaaggcagggagaaaacaaagaccgcacaaagagagtacaaacaaaacaaaagccatggatggagaagatccagcaaacgacggcaccgtagccacaagggacaacgaggacacggaaacacggaaccacaaagcgacatggacgatatggaagccaaacgagggcaaaagcactcggagaatacacagtgaaagagtgaagtacacaaaagagggatgataaatgagaaagagattaaaaatgagtaacaacaagtgtgaacacaacttaaacacgatgctgacagaatgcgatcacaaaacaaccacatacatgaacatctcataaaaaaacaactatagagaatgaatataaacaacgacgtgtatacagaacaaagagatggaggagaagtaccgcgacaaaga

SEQ ID NO: 720068 - DNA, 264 bp, Homo sapiens
cctgagtaactcattagagagtagctgtgagtgttccctttctctcagtctgtgaggagggaacacacattacacagcctgctggaccatttgacatgttcctgttcacattccccttggcaaactagcctgtgttcttctcaaatgccccgcggcatgctagcatttcattccaattgatcgcatgtatttgtgattacattcgaatgagttaagttaacccaagctgacaatcaaaggctgctgtcaaatgtgtgtagacgc

SEQ ID NO: 720069 - DNA, 829 bp, Homo sapiens
aaaaatattgtatttttaatcattcatagtgctggtaaaaaaaaaaaaaaaaaaaaaaaaaatggggggggggccgggcgccaggggctcacacctgtaatcccagcacttgggaaggccaaggggggcggatcacctcacggcctggtaatcccagctaccgggggagggctgagggcacaagaaattggcgttgaacttggggagggcaagagtttggtaagtagaggccaaagatcaccgccactgggattccaagcctgggccagacagtggtgaagacgggtgctcagaaaaacaaaaagaaagaaaagaaaagaaacaaagaaaaaacacttgggggtaaattattatggtgccacagcttaaagtaacctggaaacaagtttccgggaaatatggtgtattatttttatttttctggaagagaggcaagaaggagtcgtaaaaccacgagcgcttcataaagagatagcgcattataaaatggtgtctctggtaccagagacaatatagaggtttaatctccctttgataaccactctggtgaggaaagacgagtttacaatataacacggatattctataggattaattaaaatatttgggggggctcattttatatataaagaaagacggtataaacccctttatagcacacacaataagagcgagtggcacatcaagggggagatttagaaacacatcaagaaacttgggggaaaaaaacccccaaaatcaccgtgagaaccatcccccaccaaaatcacgtggcgttaaacaaaagagaaaaaaataacacagacgatgtgaatcacaaaataactgg

SEQ ID NO: 720070 - DNA, 358 bp, Homo sapiens
cccatgatccctttgaattgttttactttccgggaacggcttttgcttttaaaaattgaagaagttttaaaccgggctttcatttggtcatccctgcaatcccttggggtttagtttggaatttgcccactggaacaaaaagaccctttaatccggggcctgccttggttttggtgctgctgctgcttcccaagatcctcagcagggttttagaaggaacccggtgtgcccaccagatcccccaaattggtgggctttccctcctggccaattgttgggtctttcccctttctgttcagggcccctaaatgtttaaatgtggatgcatccccaaattaaacccattccttgtgttcta

SEQ ID NO: 720071 - DNA, 105 bp, Homo sapiens
tcccgaggagggtgtccttgggcagagctgtgcagcagagaacctggagatgttgaaaagagtatcaggatgtcatatacgttcctacactctcgaccaatatag

SEQ ID NO: 720072 - DNA, 132 bp, Homo sapiens
  misc_feature (7)..(7): n is a, c, g, or t
  misc_feature (107)..(107): n is a, c, g, or t
  misc_feature (126)..(126): n is a, c, g, or t
tggcagngggagtcgaagcgagggtctgaagttcacgactactagaaggggaggggagtggaaaggctctcagtgaggtatggaacccttcagatcgcttaccaatnaattcagtatgtataacanattcgt

SEQ ID NO: 720073 - DNA, 145 bp, Homo sapiens
ttcattatcgtacttacgatataattaatttcttcttcagtcgttaatgagctgaaactaaatcttacagattgcttcactctattatcttcaccaaacatcgcctctagtacgtgtgatggtaatgttgaaccggctgtacatg

SEQ ID NO: 720074 - DNA, 633 bp, Homo sapiens
agcagtggctcacatctgtaaccccagcaccttgagaggccaaagcgggaggatcgtttgagcctaggaattcaagaccagtctgggcaccatagtgagaccctgcctatttacaaataattttaaaaattagtcaggcatggtgatgcatgcctgtactggggcggctgaggtgggaggagtgcttgagcccaggagtttgaggctacagtgagacgtaatcccaacagtatactccagcttgggtcacagagtgagatcctgtcaaaaacaaaacaaaacaaaaaggatcaatcttgctgggcgcggtggtcacacctataatcccagcactttgacttaggtttcaaaaagattaattggccgggagcagtggctcacatctgtaaccccagcaccttgagaggccaaagcgggaggatcgtttgagcctaggaattcaagaccagtctgggcaccatagtgagaccctgctatttacaaataattttaaaaattagtcaggcatggtgatgcatgcctgtactggggcggctgaggtggggaggagtgcttgagcccgggagggcggaggtgcaatgagccaagatgtgtgcctctgtagtcagcctggtgacagagcagactctatcc

SEQ ID NO: 720075 - DNA, 190 bp, Homo sapiens
gtaatcctgtactctgggaggccagaggcaggagccacaaaaattcgaggccagcctagacaacatgacaaaaccgcatctctacaaaaaatacaaaaatcagccaggcctggtggcacaggcatgtagtccctgccactggggggtgtgagatacgaggatcacttgagtctgttcggttgagcggaga

SEQ ID NO: 720076 - DNA, 1062 bp, Homo sapiens
atgaagtactcctatttgccgcacatattccctgagatatgacttgatcactttctgatgatcactgtcttctaatgttctgactatatcaggagccaaataccttggttatgatccatcctccgtagaaggtgcgatacaaagggactgaaattgaaatagtaaatcactctgcatgactgctcgatggagtagaaataagactcggatcgtggcaacctaatccataggcacaatggcatacaatcacgtaagtccatcaatacagccgcgtcacatctcagctaagttggatcattctgaacataaaagaaaagtgcatgatcgatcagaaccccgtatcgcgttgagctatccaaatctaattgggagcatccattagcggtgagtgatcacgtgcagacagttacaacaggcagaacatgcggaggttacatgtctataaataggaccatgatatcccccgatgtatttgctgaaatattgctagggcgccgcgtgttgacatcctatagtagcgttgtggacgcaatctgccgttgatactcccagaaaatgattgggctccacaatatatgataataaattaattaacatcccattgcacgtcattgcactcatgaagcttgtccccaacattaggcttaaaaaccagatgcaaattcccggacgtctaaaacaaaccatttcaccgtaacacgaccgggggtatactacggtcaatgctctgaaatctgtggagcaaaccaccaagtttacatgccccagtccgttccctaagaaatttaaatttcccccgtaaaaaaatcttttgacaagtaggggccccgtaaatttaacccctaataagcaagcccgcttctaaccccttcttagaaggcgaaagaaaaaaagagaaaaaagcaaagagggagtgcactgaacacaaacagaggggggggcggtgcaaaaaataacacccacgggggcgcaaataaaacaacatacaacggtttatagaaaaaagaggggcccacaaagaggggggacaaaaaaaaggggggggggagaaaaaaacagacg

SEQ ID NO: 720077 - DNA, 418 bp, Homo sapiens
atgggtttctgcggcttcagaccctaattcttgactgccttcgacgttccttctacctatgttagacttccctgtgctcctcacgccctatctgtatagaccagcactcctagagccagcctgaggatctgtaagctacctgagcgagctcattcaccactgttgcaaggtgacacagcccatcacagacattgaccttcctttctcctagtctccatagtcctagccttaagtacgtcagcatgacccgaggacgttttctgtagaattctgctatgcctgagagtggctctgtgtgtaccagcctctttcgaccattcttttgttgtcgcaccctgatctgatgccacgattcgtcccacagatgcactgctgcttggattctcattggtcagagatctgcacagcatgactttcc

SEQ ID NO: 720078 - DNA, 303 bp, Homo sapiens
taggtcggacctctccctacggtatcctaaatcatctctctcaagttcaaagttccacagatctctagggcaggcgcaaaatgccaccagtctctttgcatagcaagggtgacctttactccagttcccaacaagttcctcatctccatctgagaccatctcagcttggactttattgtccatatcactatcagcatttgggtcaaagccatccaacaggtctctaggaagtaccaaactttcccatcttcttctgagccctccaaactgttccaacctctgtctagagatacagtagggaga

SEQ ID NO: 720079 - DNA, 629 bp, Homo sapiens
  misc_feature (270)..(270): n is a, c, g, or t
  misc_feature (281)..(281): n is a, c, g, or t
  misc_feature (451)..(451): n is a, c, g, or t
  misc_feature (464)..(464): n is a, c, g, or t
  misc_feature (473)..(473): n is a, c, g, or t
  misc_feature (518)..(518): n is a, c, g, or t
  misc_feature (528)..(528): n is a, c, g, or t
  misc_feature (628)..(628): n is a, c, g, or t
gtcattcccagcgctgccctgtcttgcgttccagtgttccagcttctgcgagatgaccctcaaggcgagcgagggcgagagtgggggcagcatgcacacggcgctctccgacctctacctggagcatttgctgcagaagcgtagtcggccagaggctgtaatcgcaatcacaattgaaataactgtgaaccgaggacaatgtaacaaccaaacgggtctcctgccccaaggtaagccactgcccaaggtcaaagggacaaggaaggtgcnggaaaagtgcngaactcaataacaagtttgaagaaaggtcacaagaaagaagcccaatgggaaatcactctgaagagctgaaatgaaaaacgaagtcctgtacggtggccaagaagttcttcatggtggcaatgatccaaagacaaggctcccttcacgtgggggatgagatcctagaaancaatggcacaaangtgacaaancattcagtggatcagctgcagaaggcgatgaaagaaaccaaaggnatgatctcantaaaagtaattcccaaccagcaaagccgtcttcctgcactacagatgttcatgagagcgcgtttgactatgatcccaaaaggacaatctgatcccttgcna

SEQ ID NO: 720080 - DNA, 707 bp, Homo sapiens
ttgccgtggggctccttagctgactctattccatgtccagggttcacgttcgggcacattcaccaccatgagttttcggtatgctgatcacccttgtggccatctactgtgtggcctcaggcctaggaatgtgtgtgggtctgcgctgggcccctgagtggacgtactactttggccagttggttggttaatgatatcttggtcaatgtgtgtgcctagtgctcctggatgtagggtgggctgggttcctctgctagactattctactcctagctttcataggggctgtcaagtgccgtagctatggtgtccctggctagtctcatatgtcctggcaactaggagggggctacctagtgatcagactacattcgctatctggttatgtgtgctctggggcctgtctgtagtgccgtggtatgccctattccctaggtgtgctcctatcctctggtctcccctatttacataggagctctatctctaggcctatggctttgcactagtatacctagcttagttatttggtaagtacccatacctatggctcaaggtggctgaactcaaaggtcacacatcccgggtcctgagtctgaccatgagcccagatggggccacagtggcatccgacaaggacagacaagaatgagaacatgaggatatgagacagaatgattattagaaattgatacatgaaaagaacaaga

SEQ ID NO: 720081 - DNA, 563 bp, Homo sapiens
  misc_feature (33)..(34): n is a, c, g, or t
  misc_feature (445)..(445): n is a, c, g, or t
gattactgtagcaccgaatgtccaagcgaaggnnaacagaattcttcgtggagcaatttacaagtgcaactcttgccgtaaggcggtcacttttttgcgcgaggaggctttgatcgacaaaaacatcaacgtcatccccaagcttttcgtcagtactgcggattcgccacttagtgacgcccacatccgtcagatcgccggcatgatcattgaacatcaggtaatggcgctggtggctgatccgttaatgaaggtggatgcaaaacttgggacgttggggaagaccttgagagtttccgaatcggcggtaactcggcacacaaacccgagcaccctcccaggtggcgttacccatgccattatcttcggagactgccaagttgagcgtcaacagagggtggccaaggcattcgaacagcgaggcgtgattgtgcgaaaagtcagnattgcgaaggcctgaggtttcactctttacagaacaatgtccgacatcccttggtacttaataacgctcaggagagccatccgatgaatgcattgactcaatctacatctcacgacag

SEQ ID NO: 720082 - DNA, 737 bp, Homo sapiens
  misc_feature (199)..(199): n is a, c, g, or t
aggctggcttatttgtcaggaggagtgagctacactctctcaaggtcattgcaggtgaatgtcgacgcggcgtcctggctcgggagtccccgcgctctttacaacgtgggcttctgtcactaactgttaggtttcttctacagcatgtgagtcatgggttgttgcctgctggagcatgtttagatcggggcagcattcntcagtcaatgctcacgcatattcgaatgcatcatccccccacacacgctattgttaggttgcttatgtacaagatgggcctcagacctgatacagctcagctcagtggtgtctcccggtgcatctgtcaacctgagctgcatcgtgttcttcgcgctctatgatttaagcaatgtatgtatcaccgcctatgctatcatcgtgagcgttatgtggctcagtatccgtaaggtccaagaacctcaggtcaaggctaacaggcactgagccctctacactagccagtctgacctcatctgcttgactttggcatgtgagccctcctaaggggacagtatctgggtccctagaaggccttacatgtgcgccttctaatgtgccccctcctcttgccatacccgcacatcacaatggtccaaatgtgcaacacgctcgctcttttttacacacagagcctatggctctgtccccatggtctggtctcaaaagctctttccattgcccagaaaggaaaggttctgaccaataaagtttcttag

SEQ ID NO: 720083 - DNA, 307 bp, Homo sapiens
  misc_feature (53)..(54): n is a, c, g, or t
aacccccctccccccctgggaacccccctgttttttttttcagcctaaacctnntgatccagggtgtgttttaattaagggtgggtggaggggtttccagtgtgggaatttggccccccagtttacctaagctgcttcccatggttgtccattttggggcttaaaaaattgggcccccaccaagtaaaggccttggtgctggttgggggggggcccccaaagttttagttactgatttctttttcaataaatgggggtttgttccctgggtttcccctttaaaaaaaaaatggctttttgtccccca

SEQ ID NO: 720084 - DNA, 626 bp, Homo sapiens
atctataacattacgacccattctcactcttccacttgatgctgtggaagttactatgcatctaccacaaatagaactttgtatctatacctaacatcctatccatcctttaatacttatggacctggacaggcgtaggtggctcacgcctgcaatcccagcaccccgggaggccaaggcgggcagatcacttgagatcaggagctcaaaaccagcctagccaacatggcgaaaccccgtctctaccaaaaacacaaaaatcagccaggtgtggtggcgggcgcccacagccccagccactcaggaggctgaggcaggagaatcgcttgaacccgggaggtggaggttgcagtgagccaagatcgcaccactgcactccagcctgagcaacagagcaagactctgtctcactcaatcaatcaatatcatgaggaaaaagtcttctttaaaatttgaaaattaatttttatgtcagtagcttttgaggtaccagtataaattagtaatagggatgaattatgtagtggtgcattctgagatcttagtacaccagttattccagtagtgtacattgtaagtaatgtatagtgtaacatagtgtacattgtcgctaatgtaagaagata

SEQ ID NO: 720085 - DNA, 155 bp, Homo sapiens
  misc_feature (23)..(23): n is a, c, g, or t
  misc_feature (45)..(45): n is a, c, g, or t
  misc_feature (48)..(48): n is a, c, g, or t
  misc_feature (51)..(51): n is a, c, g, or t
  misc_feature (91)..(91): n is a, c, g, or t
gctgcggcaacccagaggattanaggcaaagctctacacccccantgntangaggagggtcctggcggctcacagcagagcaggcactgcnttccttcccaaggccgagaggccatgctgtgacatggcacacacacctgcccaggctgcccggt

SEQ ID NO: 720086 - DNA, 1509 bp, Homo sapiens
ggggcggtgggaccctgtatacaagtatctgaaaactggagggccttcaaggctctcatcgctgctcagtacagcggggctcaggtccgcgtgctctccgcaccaccccacttccatttagtgccaaaccaaccgcacccctgaatttctccgccaaatttcctgccggcaaggtcccagcatttgcagggtgcatgcatggcattctgtgtgtttgcagcagccaacgccatatgcctactcatgtgagcacatgcaggagctgcggggcaagtacatccagaaggcacgcagcccaggatggatgcagatgggtgagccttctgctgattccagatctagtgcccccagcacagatacctggagatgtaaccaccaaccttgaggccatcatgcacccaccaagcaacagcacggccacatgacgaactgcaaacggacggaaagtgacgcgcgacactctctcggcggcctgctgggcactgcctctacctctgacacgaccgacggacgcttactcctcggatggcgcagaacagcgaacgctgaccactaagagcctagaaccatcaacagcatagtcctagacaaccacacaagtacggagagactacatacataaagccacggctactcaagcagacccttacctaaaaccggcacaagggacctaaaaaccccaaactaacaccaaaaccagaaactgggctaacccataccaccacctggccacatgtcacaaccccacagaacaccacaagatcaacacagcgggccatatggtcatagtgcgagcacgaaaacggtggaacacaactcggctgatgagcaccagaattggggaacccgaaagcacggaatgcataaacaaaaaaggatcatggccaggcaagaaccccacaagcaaaccgttaaacacacgacccacacaacagcaccaaccgtgggacccaaccgcaccaaacagggcggcatcgcaccacgggagcacaacaaccggataaacaccagaacaagaccaccccacagggcccatgcaacgcacagaacaaagcgccaacgcaaggcacaacaaccaagcggtcgggaatcgcgccaccacaggacatcaccctgtgcaaagcaggagcagcaccagtggacatgacacactggacgccacccagggcacgacaatagaaatataggtcgagaaagccaaccaactggggccaaaacgagagaaccccacacacacgcagcaacaccaccatagtgagcaaacaccaaaggatacccacatatggagggtacagcgcaactgcaaccacaaagcaggcgcaaagagaagcagacagaccgaacacgacaaccgaacagacacacaaggatgagaaacaaacgggaacaaaaccaacacacacggcaagccaactacagaaacaaaggaagcgacgatagagacaccgcgagagacacacagacgaaaaaatggcacaccagagaagaaccaccaaaccaagaagcatg

SEQ ID NO: 720087 - DNA, 479 bp, Homo sapiens
ctctagaggatccgaatatgcaggagcagacaggcagctgcaagtgtctgctcttctgcctgtatgcttgcccgccacatcatcccagcgactgggcgtggagtgactggattagaacagagcatttgtgctgaggtatggaaaatactgccaggcctcctagtacagagaggctaggctgaggtgagggataggggtggggttggaaaaaactccaactcccctaagctggggcccaggatgagaggccaggccacaggaaatggaaattcttcactctgagacatagccccattgtgaaatgcgagaggcagaaggaacgagggccatgcctcagacacacacacatactttctctcctccacaagggctgggattttaagcacagacgtttccaagcctgtttaacccctaacacccaaccaggctctgggaaggcctcagccttcctggtggagtgaaagaacatttgtccgatt

SEQ ID NO: 720088 - DNA, 553 bp, Homo sapiens
ttggggctccattcaggacacggggggagggtgagcacctctccccaacacaggataaaactcatctccggtgcagaaaggatggctaaagacctttctcatgtcaacgggaaggccacacccagccccctatggactcagatgggaaacaggcctacgattggcttcatacttatccggaagattcctaagctctcagggcaggactatcacgagatgcatgttggtacttaattcactgaaagcctcggttgggaccggctctcgggaagcccagcaacataaaagcggggagggggaagactgaagtgaaaccatcatccggggtgcggtgtgtgtgtggtgtaactgggtgctgaccggttcgctcctggcaggggctccaggggggtgcaggctgagccccccacctgcagctccttgaggccacggtcaggggctgtctatggacagaaaccttgccacaatgagccactccagggtgcaggggtcacagtcccttgagtacaaactcttgtcccctaaagataaatgtcatcaggcctcaggatta

SEQ ID NO: 720089 - DNA, 178 bp, Homo sapiens
ggtttaattgacagctctgccacatcctcctcatttttcacaggggagtagcgcaccaggaagttggtcagttcaatggatggaggtggagcccagtgtgacacgtatcgtatcaggaccaacattggtaaatcgcaggtcagtgggaggagggacagctggtttcaaacaagaagga

SEQ ID NO: 720090 - DNA, 189 bp, Homo sapiens
cctactgattgtcaaaggtaatccctgggactaaaactctaacaagtgattccttaaattgccacacgggggttctggggtctataacttttaatcggagaaactgacctttctcttgggacataaacaagatgagaagaccctatggagctttaattcattaaggcaaatagaaactcgcactaaccc

SEQ ID NO: 720091 - DNA, 346 bp, Homo sapiens
ctcgagctggagatgtgccgagatcactctcactattcctataacaggtgctgtgagtgcctgcacgcagcacgacattgcattgatggatgcacacaccggtgctcagatgactagcagagttcacatgcccgggcttgcacttggccaatacatgactgtcatccagtgttcacagacccttagtcttgaagatctacgagacattccattacaccttaatatatgggaagcttaagattcaggccaacctattgcgtgtgcacagcctgaaagtgaagaggccgctgacttgaggattgctgtgcaagtggtgccgattgccatcagcttgggcatgtggccc

SEQ ID NO: 720092 - DNA, 516 bp, Homo sapiens
agtagggacgtgggagatgagtgtgtctgaaacccctggtggttgggattgggaggctgggtgaaactgtcatccttgggtgctgactacatctgagatccatggggctgactgtgtctgagaatcctggagctcccaagctagaatctgggtgagtatgagacttcttatggatgggagctgagtgagtttgaaccgcgtagcagctagggccaggagtctagtcgtgcctgagatcttgtacgctgggatagaggggttgactgtgtctgaggcccctgagggtagtgacctggcgtctgggtgaacctgagattgctgttggctggatagtctgagacccacaggtgctgagaacatgctgctgggtggtcaaacagagagtctgtacggttatatgcaccccaggagaggctgaggtgtaaaatgggctcccctggtctccacagagcttggcagagctgagagatcagcggcagggggagcgcctggaacatgcagcagctttgcggccgc

SEQ ID NO: 720093 - DNA, 350 bp, Homo sapiens
cgagtgataccggactctggttatacctgtagcctgagtcgtaacaggacggctgagtagtatctgagacttgattataagtcgctgccgtaggtctggtatactcgtccgggtggtaccattggcgggcaattgatttgatggtaagggatagatcgttgaccacgtcagtaatgtaaaggacgcgtacggatgggagtggcgatgaggactaggatgctggcgggcatgatagttcagacggtttctatttcctgagcggctgagatgttagtattagttagttttgttgtgagtgttaggacaagggcatacaggactaggaagcagatgaggaaaatgattattag

SEQ ID NO: 720094 - DNA, 150 bp, Homo sapiens
  misc_feature (144)..(144): n is a, c, g, or t
ggctctttcaggtccacctggcttatgtgtgagagatttttttgggtttttttgttctgtttttttgaaaagccagtaccaaaagcttacataattgtatgattgcattcaaataacattcttgaaatgataaaattataaaantaccga

SEQ ID NO: 720095 - DNA, 499 bp, Homo sapiens
  misc_feature (179)..(179): n is a, c, g, or t
  misc_feature (218)..(218): n is a, c, g, or t
  misc_feature (246)..(246): n is a, c, g, or t
  misc_feature (264)..(264): n is a, c, g, or t
ttccggcccgactcacgaccccgcgggacccggccggaacccggcccgaccccggcgcgcgcgcggcggaggacgaggaagagttgtggcgaggcagatcctgccccgtggccgcggccgtctcgtaggtgaccgggctggtccacaagtgggcatggaccaaagacgacgtgatcctncacgtgctcccgctgcaccacgtccatggtgtggtcaangcgctgtctgtcctctctgggtgggagncacctgtgtgatgatgcntgagttcagcctcagcaggttgggaaaagttcttaagttctgaaacgccgcggatcaatgtctttatggcagtgcctacaatatacaccaagctgatggagtactacgacaggcattttacccagcggaggcaggatttttgggtgacgttggaaaaaaatcgcggaggccgggacgtgcctgcccccccttggggaatgggaaatccggcccccgtggcgtgttgcccacccgc

SEQ ID NO: 720096 - DNA, 1373 bp, Homo sapiens
  misc_feature (1053)..(1053): n is a, c, g, or t
  misc_feature (1092)..(1092): n is a, c, g, or t
  misc_feature (1120)..(1120): n is a, c, g, or t
  misc_feature (1138)..(1138): n is a, c, g, or t
ttccggcccgactcacgaccccgcgggacccggccggaacccggcccgaccccggcgcgcgcgcggcggaggacgaggaagagttgtggcgaggcagatcctgccccgtggccgcggccgtctcgtaggtgtcccaccggccttccgggttccagcgccaggcctggtgcctgccccaggaggatgagcatttgcattgcctgcaccttatcgtgcccttccacctgctgaagcagctgtgcctgccgctcttgtgaactgcgaacttccccttacctcctctctctggctcgggagctggctcggccccaggaggctcccgggagcgcctgtcagtgcaatgccgccccatgtggtgctcaccttccggcgcctgggctgcgccttggcctcctgccggctggcgcctgcgagacacagaggaagtggtcttctgcacacagccccagtggcccgctcggacaggagcgccccggtgttcacccgtgccctggcctttggggacagaatcgccctggttgaccagcacggccgccacacgtacagggagctttattcccgcagccttcgcctgtcccaggagatctgcaggctctgcgggtgtgtcggcggggacctccgggaggagagggtctccttcctatgtgctaacgacgcctcctacgtcgtggcccagtgggcctcatggatgagcggcggtgtggcagtacccctctacaggaagcatcccgcggcccagctggagtatgtcatctgcgactcccagagctctgtggtccttgccagccaggagtacctggagctcctgagcccggtggtcaggaagctgggggtcccgctgctgccgctcacaccagccatctacactggagcagtagaggaaccggcagaggtcccggtcccagagcagggatggaggaacaagggcgccatgatcatctacaccagtgggaccacggggaggcccaagggcgtgctgagcacgcaccaaaacatcagggctgtaccgggctggtccacaagtgggcatggaccaaagacgacgtgatcctncacgtgctcccgctgcaccacgtccatggtgtggtcaangcgctgtctgtcctctctgggtgggagncacctgtgtgatgatgcntgagttcagcctcagcaggttgggaaaagttcttaagttctgaaacgccgcggatcaatgtctttatggcagtgcctacaatatacaccaagctgatggagtactacgacaggcattttacccagcggaggcaggatttttgggtgacgttggaaaaaaatcgcggaggccgggacgtgcctgcccccccttggggaatgggaaatccggcccccgtggcgtgttgcccacccgc

SEQ ID NO: 720097 - DNA, 1354 bp, Homo sapiens
  misc_feature (1034)..(1034): n is a, c, g, or t
  misc_feature (1073)..(1073): n is a, c, g, or t
  misc_feature (1101)..(1101): n is a, c, g, or t
  misc_feature (1119)..(1119): n is a, c, g, or t
ttccggcccgactcacgaccccgcgggacccggccggaacccggcccgaccccggcgcgcgcgcggcggaggacgaggaagagttgtggcgaggcagatcctgccccgtggccgcggccgtctcgtaggtgtcccaccggccttccgggttccagcgccaggcctggtgcctgccccaggaggatgagcatttgcattgcctgcaccttatcgtgcccttccacctgctgaagcagctgtgcctgccgctcttgtgaactgcgaacttccccttacctcctctctctggctcgggagctggctcggccgcctgtcagtgcaatgccgccccatgtggtgctcaccttccggcgcctgggctgcgccttggcctcctgccggctggcgcctgcgagacacagaggaagtggtcttctgcacacagccccagtggcccgctcggacaggagcgccccggtgttcacccgtgccctggcctttggggacagaatcgccctggttgaccagcacggccgccacacgtacagggagctttattcccgcagccttcgcctgtcccaggagatctgcaggctctgcgggtgtgtcggcggggacctccgggaggagagggtctccttcctatgtgctaacgacgcctcctacgtcgtggcccagtgggcctcatggatgagcggcggtgtggcagtacccctctacaggaagcatcccgcggcccagctggagtatgtcatctgcgactcccagagctctgtggtccttgccagccaggagtacctggagctcctgagcccggtggtcaggaagctgggggtcccgctgctgccgctcacaccagccatctacactggagcagtagaggaaccggcagaggtcccggtcccagagcagggatggaggaacaagggcgccatgatcatctacaccagtgggaccacggggaggcccaagggcgtgctgagcacgcaccaaaacatcagggctgtaccgggctggtccacaagtgggcatggaccaaagacgacgtgatcctncacgtgctcccgctgcaccacgtccatggtgtggtcaangcgctgtctgtcctctctgggtgggagncacctgtgtgatgatgcntgagttcagcctcagcaggttgggaaaagttcttaagttctgaaacgccgcggatcaatgtctttatggcagtgcctacaatatacaccaagctgatggagtactacgacaggcattttacccagcggaggcaggatttttgggtgacgttggaaaaaaatcgcggaggccgggacgtgcctgcccccccttggggaatgggaaatccggcccccgtggcgtgttgcccacccgc

SEQ ID NO: 720098 - DNA, 166 bp, Homo sapiens
gcacgagctatgtttcagggaatctcagtctctgaggagattttaatctcacatgcaaattcagtggcttagtcagattccccaccctgcaacttcttccaacaaacttcctagaggaagaccatcagccggagacattcgcgtaaagattagacgggagaaaagc

SEQ ID NO: 720099 - DNA, 1158 bp, Homo sapiens
  misc_feature (255)..(255): n is a, c, g, or t
ggacaatccagagaagttcatggaagtcgccgagctggaccgttgaaatgagcgaatcattgaggcagatgcacgtggtgtgccaacattgccagaccctgtagccatcttcttgggtggacgcgtgcaatgcttggttacaggcgcgttcgtcgagcattgcgtcggatgacgataagtacaggactgtgtcgcataggctgatgggtcgattctagctctcgaggaactataactaggaatagtagacacccntccattgagagatgaacgaagggaagcagaaagtgctcatcgactgctcatggtggatggggcaggatggtagtgactgcgtggttagagaatgctggagtcgcgcatggcactgagtctgtggaatagaaggtagggcagatggcagtctacagacaagtctggtcctattgcttggagaaagcatggtctgagttccgggcacatgatggactgttgttactagaagggggttgccccgagcgagggtcatctacttactatgtggggactcgctaggaatagaatggacttgcaatggtgataaggatgcgcatatttcgaaatgacgccatgcgaataggatgctaagttttgcacgctggatacgttgcatgggcctatcatttgggttctcacgggaacaagattgatgggatgagaggacgaggcatagtgtgcctttgggggtgacgactcgtcacttcgggaattcagtagtggatgcggttcttcttcagaggaggtataattatgggggaatttgtaaaagataggaaaaggaaatgtgcaccgatgtctcgggattggacgcgaaggaagaggcacgaaatggagtgggcacgaaaaattgcttgggtagggatattgaacgcctcccttaaccttaactgctactttcacattcgactctaggctgtaccaaaaactaatgttcgtaggggcaaggcttaacctctcttggaaaaatgtgggccggacacggtgtgctacttgggcatggagatcggaatttggagatgtggtccaattcgtaattccgaaggaggtacataggtggcaagatgaaataatacccccgggggaaagtaatgctgggacggcctggcaacaaaagtcggcttggagagattcaaatcgtct

SEQ ID NO: 720100 - DNA, 308 bp, Homo sapiens
  misc_feature (41)..(41): n is a, c, g, or t
  misc_feature (83)..(83): n is a, c, g, or t
  misc_feature (90)..(90): n is a, c, g, or t
ctgtcattttagatactcttatctaggataggaaatatacntcgtttcctgtctctccactggccatgagctcatcacacctncaatttncttcttcagggccaacacgaggaaatacgttgaacaccggctgttctggaccaggccactcaaaggccaaggcactcatcaagaggtatatattaaatgtattaaagctttttcttatatcagtaaggaagagaggaggaaggaagagagggaggaaggaagggagaggaagtttaacatatcttgtccagggttttccacaaagtgattttgttgtc

SEQ ID NO: 720101 - DNA, 135 bp, Homo sapiens
gctctctgtcggtctctctgtctccttccccaaggccctagtgtgtatcagccaggagccgaaccttgctttccgccttgtgagtcgcgccctactcgccagtcacaacggcatcattcacaccccgataggccg

SEQ ID NO: 720102 - DNA, 163 bp, Homo sapiens
gattaagatggtcacgctgagaagaactcgctagatcattaccagtcactcatcagttccccacaccccacctcagtccctggacaactactaacttgtttttttgttcttagtgatttagctgatttgccacagttccatgtaaatggaatcatacaggatg

SEQ ID NO: 720103 - DNA, 349 bp, Homo sapiens
gtacacagataaacgacgatgatatcatttactgggggaaggcgctgtgtgaagtagtgccttatgtctctgtgtcctttcgttacagggaggaatttgaagtagatatgacaccgagcttggattactccggtctgaactcagatcacgtaggactttactcgtggaacaaacgaacctttaatagcggctgcaccatcgggatgtcctgatccaacatcgaggtcgtgaaccctattgtcgatatggactctagaataggattgcgctgttatccctagggtaacttgttccgttggtcaagttattggatcaattgagtatagtagttcgctttgactggtgaagt

SEQ ID NO: 720104 - DNA, 128 bp, Homo sapiens
tatgtcgtaccatcagaatggggcaggcagctggaatcagtgtgagtgcatatcctcgtggagctgacaacagccaggctacaccagtgcacccgcctctcaaaatcacctgggagtgccatcacggt

SEQ ID NO: 720105 - DNA, 441 bp, Homo sapiens
cagctcggggttgggtcagatatggatcttggagaaattaaagagctgatcagcaccacaccagaggaatgaacagaagacaacctgatagagatgagcgtttctgaacctgtgccagacaatgaagaagaagatgtagaagaagcggtgcgagaaaacacattgacattaggcaatttagcagaagggttctgattattcaagattgctcttgatttcttttatgacatgtacccttctacgatgcatgcactgaaactaaagcaaactgtggaagaattggtactgtataggcacatttttagagaaattaaatagcaaaaaagacagaaatttccacgtatttaatctccataaagttacactaagtgtgcctgtgtctcctgactacccttccacctcttccacctcagcaaccccgagctgggggtaccgagctcg

SEQ ID NO: 720106 - DNA, 266 bp, Homo sapiens
atcagttgatgactagacagaacacacagaacaggcataaaccgggaatgtcgggcacactgggatgtatgtgttgtctgtaggttggtgatagtcttaccacctatacaaagatctccttgtgattactcactggtgtctatttcatttgctttggttttagcaaaatcagtcaaggtgaaaattaagctcaataaaaaagatgacaaaggccgggacaaagggaaaggcaagaaaaggccaaatcgaggaaaagccaaacctgt

SEQ ID NO: 720107 - DNA, 125 bp, Homo sapiens
tgctgggattacagggcatgagccaccatgcctggctcaattttggtgttttgtgtagaggtggggtttcacctatattgcccatggctggtctcaatacaccttgggtaaaaggcagtgatgcc

SEQ ID NO: 720108 - DNA, 653 bp, Homo sapiens
tttcttacactgacctacatttccctgactccagggccatgtttcccttcaggacgattttacgatggcggaatccctaaccttaacgatccgaagcagaatctgctacagctcatatatactttacacgctgtcaaagtcccctgacgaaaccctagctgcctgagattgctcgactgcctagatccacttcggccaccatcatctagaacccaagacacaggacactagcaactaccacacactctgactaatggcacccgtaccagtaataacatgcccttcaaagatcaaagacagcgcgcacaccacatcttagcgtcgatgacttcagagatagcgtcaaatattgcctacacacaatactctgcatctactaataagtcactcactatctcacagccacaccaactttgcacaacaacactccatcgtcaagaatccatcaagactatctagcaacaccactacgcaagcctactctaatccatatcccatacatccataacatctcatactcgcacactaatcaatcatagtctcatacccccttcacaacttctccttcagataatccctctaatccgactctcgtacatcatcacaccaacgacttctacttaatccacaattacataccacgtactacctcc

SEQ ID NO: 720109 - DNA, 146 bp, Homo sapiens
tagagcgtatcacatgcggaccaaccctgccccacggagacggcatggaaccgctcaatcagaaggtgttctatgatgcggccggcaccagcctaaggatgtccccgatcttcttctagccagtaggcgatgtcctatggacaccg

SEQ ID NO: 720110 - DNA, 793 bp, Homo sapiens
  misc_feature (793)..(793): n is a, c, g, or t
atagggtcttactctgtcccctaggctggagcacagtggcacgttttcagctcactgcagggctcagctcacctcctgggctcaagcaaccctcctacctcaggctcccgagaagctgggactacaggcacaggctacctaccacatccagcaaatttttgtatttctagtagagacggggtttcgccatattgcccaagctggtctcaaattcctcctgggctcaggtgaccctcccaccttggcctcccaaagtcctgggattataaatgtgagctaccatgcccgaccactacattcacattgttgtgaaacagatctctagatttttcatcttccccaacagaaaccctgtccccattgaccaacagctccccatttcccttcccctagccctggcagccaccattccactttctgttgcagtgtttgtctactttagatacctcgtggaattgtacagtatttgtcttgcgactggctaatttcactaatgtaatgttctcaaggttctctggtgtagcatgtgtctgaatttctttttagggctgaatagtcctagagtaacacaggggagtaaagaacccataaaaggctggatcatattctgttgtgtgtataaaccacattctgatcatcttttcatccatcagtggacagtcgggttgcttctggcttcttggctattggtgaatactggtgcattgaacctgggttgtgcaaatatttaaacaacttttaaacaattaccttgtttcttggccgggtgcagttggctcaccagctgtaatcn

SEQ ID NO: 720111 - DNA, 193 bp, Homo sapiens
gatgaacacagtgcagttagtgctccccacactatatcccactttcgggcgcctggtataggacattgaatatactatcagaagtacgctgaacgagatctactttcgaaaaacaaagggtatcgtctatgggctgaggtcttgtgcatacttttgcagaccagtcaatacaagaagctctgaatggattgct

SEQ ID NO: 720112 - DNA, 970 bp, Homo sapiens
  misc_feature (390)..(390): n is a, c, g, or t
tgaggcaggagaatggcgtaagtaaacccaggaggcggagcttgcagtgagcccagatgcaccactgcactccagcctggacaacagagcgagactctgtctcagaaaaaaaaaaaaccaaaaaaaaaaaccagtcttggtttctcccttgtgttcctggccctggggccttctagttcactttcctgtggcattcccaccaagcgagtttctcctttacccccacccgagggtccgtggagtggtcgcgcggcccacggggggggcgacggggaggtaagggctccggaattgcgggagccactggacagcccaggcagttgggagacagacgacaggagaggggggctgggtccattggaccctggtggccgggcagctggtggcccnacacagggttggctgggcgcccaaaggggaagggccccttcctggtggcctggccccttgcaaggggacgtcaggggaacaggatctagcccgggcccctggcttaggcctcaagtggtggctgggcggtttggaccaaagagcggtctgggagcgggaagatcctgggccctcaggcaggcgcggaggccgggtgcccccagaaaggggcccagcagtaccagggactcaggcaaggcagccaggggcagagggcacagctggagcaggggggtgtggggcatccgaggggaataccgcagcccagtggagcggcaactgcagtctacagtgaggctgccggggctgggcaccgatgggcaggatgctgccaggaggggccataaggggagactggtgacagtgggcgtacggccccagtgtggcgccaggggggggcgaccccaaaagggggcagggcgcgaacgggggaacgccaagccgcaccaagcaggacactatgggaaccggttggagacccacaggggcccacggcaagccggcgcgcagggaccacgcgcacaatgaccaccaagggcga

SEQ ID NO: 720113 - DNA, 94 bp, Homo sapiens
cattactcttctataacatcacgaatattaagtaccaggcttagtcttactttagcaatgatagacaaaagcgaattaactacatcacagccag

SEQ ID NO: 720114 - DNA, 209 bp, Homo sapiens
gacagcatggcccacctaaatattgtagttgccattgcaggaaataaaatgtgatcttatcgatgtaagagaggtaatggagagagatgcaaggacctacgccgactctattaatgcaattttgtagagaccagcgcaaaaacgcgataaacataaatgactctctatagaattagtcgagagtcactccactgacgccacctgccatc

SEQ ID NO: 720115 - DNA, 262 bp, Homo sapiens
tcagacaccatggaggacggtaagaacggcagagaaagggttttattcaagagccaaagcaggcaacattcatccagcatttccataaaggttcctcttgttgggccagcagtcagcaggcatcagcattcagcagcacaaccaaccccaccaggcacaagcaggcagcacagttccagctagcgtcatgtgtgcagcagtttcagcacagcagcagcaaccactggtcttaacaccgcaaaggcagttgcaacccagcaag

SEQ ID NO: 720116 - DNA, 358 bp, Homo sapiens
acgtgggactcagctctcctgcatctcagtcattgcctaatcgccagcatagcgaggatagatttccaggcacttcccatcatgctccagtagcagagggcagtgctgagagagcacctagaagggaaggcacccaggcaccaggagggtccatgaaaatggaaaagggctggaggggacctgccaccttccataaatgtcatcccagcctctgaaagatcacagttccccaggaaagtccaggacaagtggaggcagagtgcgcagagaggacagccaggccgtgggagcagctctaacttacgcctaggtcagagccgggagttcctttgagtggccagcctccctaccagctgaa

SEQ ID NO: 720117 - DNA, 400 bp, Homo sapiens
  misc_feature (2)..(2): n is a, c, g, or t
  misc_feature (164)..(164): n is a, c, g, or t
  misc_feature (392)..(392): n is a, c, g, or t
anattcggcacaggggagttccttcagatctccagtaaacttgtttgtggaggtctggggagtttcttcagacccccagtaaaacttgtttaatcctaaacgagtcctgttaagaatccttcgttatcatgtcatgcttcaaggcccaggagaggcctgggcanaaactcctgatgggcttttgttccattccagcctttgtatgaggacactggctctttcagcttttaatagtaacttcaccactcggtcagtgccgaaacagatgtcatggaggcctgcgttagtgagacctgggcctgccacaacccgactccaagacgttaagagggagcttgtgctaggatacttaatattgattttaaaaatattttagtacataacgaaagttntggtttgc

SEQ ID NO: 720118 - DNA, 384 bp, Homo sapiens
atctagaggatcgctgctgctcctcttcatcaatcctgcgaggtcatttcattattacttttactttacattccaagaagcctgaaggcccaggagaagcaagtaccctcacttcaggtcacacaaaccggaaggggtacaagtgggaatccaagcttggaatgctgggccacagtgtccccctttagacaaatgatggaataaagtgtgtgtgcactgggcgagattatagggagtgggacacacagtcaactgctgaaggatttcactttagtccaaagggtagccagtaacaaaaccaatgcgtttatgtccccgtggacattcagagagactgaagtgtgggctggccaggtattgtggctcatgcctataatcccagca

SEQ ID NO: 720119 - DNA, 105 bp, Homo sapiens
cgagtcggtaccattgatacacgggctcagaacctgggccaggattgctatgtcagatggcgagggcacgaggtgacaaattgctaaggcccttcccacatgtcc

SEQ ID NO: 720120 - DNA, 391 bp, Homo sapiens
gagctgacatgggagttgttggattctttgtttcatagctttttctatgccataggcaatattgttgctcttggaaagtttattatttttttaactcccttactctgagaaagggtattttgaaggactgtcatatatctttgaaaaaagaaaatctgtaatacatatatttttatgtatgttcactggcactaaaaaatatagagagcttcattctgtcctttgggtagttgctgaggtaattgtccaggttgaaaaataatgtgctgatgctagagtccctctctgtccatactctacttctaaatacatataggcatacatagcaagttttatttgacttgtactttaagagtatgtccaccatccacatgatgcactgagctcttgt

SEQ ID NO: 720121 - DNA, 426 bp, Homo sapiens
  misc_feature (5)..(6): n is a, c, g, or t
  misc_feature (59)..(60): n is a, c, g, or t
  misc_feature (174)..(174): n is a, c, g, or t
  misc_feature (281)..(281): n is a, c, g, or t
  misc_feature (348)..(348): n is a, c, g, or t
  misc_feature (362)..(362): n is a, c, g, or t
  misc_feature (378)..(378): n is a, c, g, or t
gagannccccagtctccactgaggatgcaaaggattggccgggcgtggtggcacatggnntgtgattcccagccactcgggaggcgggggttgcagtgagccgggattgcgtcattgcactccagcctgagcaacaagagtgaaactccatctaaaaaacgaaagaaagaaaanaaaggcaataactacagttacaaaccattgttacaatactaggttttataattacccgactatttatctttattgagatccttatttcttcatatagcttctgcttncttgtctaagtgttcttttatttcttctttttttaaatttaatttttgtctcatttttccaagaaantctccactctgtcnaccccaaggtttgganatgccagttggctccaatcctttggctccacttgcaaaccttcccggc

SEQ ID NO: 720122 - DNA, 677 bp, Homo sapiens
  misc_feature (157)..(157): n is a, c, g, or t
tcttgtgatctcttctacacaagcaagacctgctgctgagaagtcccggtggcaaatcgagattgaggactactttccagagttcgctcgctacacactctgtagggatgcgactcccgagccgggagaggacccacgcgtgacccggccaagtacnttcattcgggatgagtttctgagaatcagcactgctagtggagatgggcgccactactgctaccctcactttacctgcgccgtggacactgagaacatccgccgtgtcttcaacgactgccgtgacatcatccagcgcatgcatctccgccaatacgagctgctctaagaagggaacacccaaatttaattcagccttaagcacaattaattaagagtgaaacgtaattgtacaagcagttggtcacccaccatagggcatgatcaacaccgcaacctttcctttttcccccagtgattctgaaaaacccctcttcccttcagcttgcttagatgttccaaatttagtaagcttaaggcggcctacagaagaaaaagaaaaaaaaggccacaaaagttccctctcactttcagtaaataaaataaaagcagcaacagaaataaagaaataaatgaaattcaaaatgaaataaatattgtgttgtgcagcattaaaaaatcaataaaaattaaaaatgagc

SEQ ID NO: 720123 - DNA, 246 bp, Homo sapiens
gagatcctgtttagcatttaggatcgtcagtttgtttgattttagctattccaataggtatgtaatggtgctgcattggagcttgaatttgaatttgtctaatgactaatgaggagcatcttttcatatgcttatttgccatctgtatatctttggtaatttttccttggacattaatttctctaaaggagagagaaaacccagacagacggtgatggagctaccaagagggagagtctccgtcga

SEQ ID NO: 720124 - DNA, 896 bp, Homo sapiens
  misc_feature (34)..(34): n is a, c, g, or t
  misc_feature (73)..(73): n is a, c, g, or t
  misc_feature (84)..(84): n is a, c, g, or t
  misc_feature (93)..(93): n is a, c, g, or t
  misc_feature (105)..(105): n is a, c, g, or t
  misc_feature (196)..(196): n is a, c, g, or t
  misc_feature (231)..(232): n is a, c, g, or t
  misc_feature (291)..(291): n is a, c, g, or t
  misc_feature (293)..(293): n is a, c, g, or t
  misc_feature (325)..(326): n is a, c, g, or t
  misc_feature (337)..(337): n is a, c, g, or t
  misc_feature (367)..(367): n is a, c, g, or t
  misc_feature (371)..(371): n is a, c, g, or t
  misc_feature (415)..(415): n is a, c, g, or t
  misc_feature (421)..(421): n is a, c, g, or t
  misc_feature (442)..(442): n is a, c, g, or t
  misc_feature (463)..(464): n is a, c, g, or t
  misc_feature (469)..(469): n is a, c, g, or t
  misc_feature (476)..(476): n is a, c, g, or t
  misc_feature (493)..(493): n is a, c, g, or t
  misc_feature (495)..(495): n is a, c, g, or t
  misc_feature (507)..(507): n is a, c, g, or t
  misc_feature (517)..(517): n is a, c, g, or t
  misc_feature (524)..(524): n is a, c, g, or t
  misc_feature (526)..(526): n is a, c, g, or t
  misc_feature (575)..(575): n is a, c, g, or t
  misc_feature (596)..(596): n is a, c, g, or t
  misc_feature (713)..(713): n is a, c, g, or t
  misc_feature (778)..(778): n is a, c, g, or t
  misc_feature (803)..(803): n is a, c, g, or t
  misc_feature (886)..(886): n is a, c, g, or t
gcatcttagctgtgaaggagaaagcagtgcacgngaaggaatgagtgggcggaaccaacggcctccacaagcngccttccagcngcctgccanggccatggccgngagagactgcaaacaaacaaacacaagcaaacagagtctcttcagcgggcgtggagtctgaaagctcatagtggcatgtgtgaatctgacnaacttaaaagtctgcatagtccattacatgcatannacactaataataatcctgtttacacgcgcctgctgccggcaggtccagctccaccactncnctcctgccacatcacatcaagtgccatggttnngagggtttttnatatgtaattgttttattctgtaaaaggtngcanaattttcagaacaaagctttccctttttaaaactaatgttacanatctgngttatcacttgtgtataaatngtatatagctgatcattaatnnggggnataagtncaatgtattctaaaacngntaagcaaaaaanaaaaaaaaanaaaaaangnaaatccaagtgtcctcctccccccctcccgctggtgatcactgtgctcnctgccagctgcgtggggtganggggggggggaatcactgtgtgtgcgagagtgcttcagactcaatttccaaaataattttcacccctctaagcatgtaaatatacaaagatggatccttcatagaaattaaaaaatnaatttgagctcatttcgaatacagaacaagtatggcacagatggaagtcctgccacgtttccttnaatgatgctgactcttgtatcacanaggccagcatgaagtttcttactcagactttacaggcattttccgtaattcacacagtcctgctcccgcacaacacaggaggngattcgagat

SEQ ID NO: 720125 - DNA, 342 bp, Homo sapiens
ataatttggggataagaagtggggacattggccgggcgcggtggctcacgcctgtaattccagcactttgggaggcctaggtgggcggatcagctgaggtcgagagttcgaggccagtctgaccaacatggtgaaaccccatctctactaaaaatacagaaaattggctgggtctggtggtggatgcctgtaatcccagctactcgggaggctgaggcaggagaattgcttgaacccagggaggtgggacggtgcagtgagctattactccagcctggggcaacaagagcgaaactctgttctcaaaaaaaaaaagggggggggggacatttaaggagattg

SEQ ID NO: 720126 - DNA, 829 bp, Homo sapiens
gcaacatgtccccttctcggttttgttctcccccgtatactccgggttcctcattttccgaacacaccacacaaacctcgctcattccaacactcattgctcccgccctcgaaaagttttcgtcaccccccctaaccgaagggattcccacaaagattctcgttataaacacccttgtatgagggtcgccccccaccgcgaaagagttggaaaatattctcgtggtccccacacatttcttgggcccactttgcgcccccccctaagattctcgggccccccactggggttttgttttccccaccaataaaaaatattttggttgataggaccattgcccaccagggcccacacgggtgtgactttgggaaaggcgcctctgaggagtttaccacgtggagatacttgacaccattccaggcaccatacaccacggccccacagattttgaaggttggtggccttcttgcgctcttgccctggatccatcctaagcgcctcactagggaacccaccccagagcaccagaagatagtaacaccaggagaaacaccatttgaacacaccacgatgggaataatcaccatttgatgcagaattcgtcccaccattgctccgaccagatgccggcccccgatcctttagccccgagaacatctttggaacccttaaagagatcctggggactgccccctccatgggctgtaatagttgatggcccccctcctcatgacatcatcgatgaccatccaccgtggtgctgtggaatgccccgcccacgttaagccccaagggaaacctttccaataaaggatccatttgaccactg

SEQ ID NO: 720127 - DNA, 484 bp, Homo sapiens
ggatgatgtgggcgagagtgtccacgagctggagaagtacaagcgggccctagagcagcaggtggaggagatgatagatgcatgtggaagagctggatggacgagctgtaggccaccgaatatgccaagctgcggatgttggtcaacctgcaggccatgaaggcccagttcgagcgggacctgcaggggctggacgagcagagctgaggagaagaatgaagcagctgtgtcagagctggtgcgggagatggaggcagagctggaggacgagaggaagctgctgctctgatggcagtggcctgcccggaagacgctggagatggacctgaaggacctggcggctgcgcatcgactcgtgccaataagaaccgggacgaacccatctaaacagctgcggaagctatgtagtgccagatgaaggactgcattcgcgaactggattaccaccctcgcctctcgtgaggagattcctggcccatgccaa

SEQ ID NO: 720128 - DNA, 343 bp, Homo sapiens
catgaaggcagggactgtgtatgtcataaatctatataggttaccattatatcctggtaaaagccggcttcctgggtatgctaccagtgcagtcacagaaatcctgtgctaagaagggcctccacacttggtctgacgctatgctgttgctgtcttgaaattcactttaaaaagttttaagggaaactgcattttcattttgcactgggccccataaaccatgtggccgtcttattcccagcacctatcacagtgctggcagatagcagatactaatatgaattgatgaatgaatgaaaaaattagtgaataaaatttatgctgaattcttaccacaaaaaaa

SEQ ID NO: 720129 - DNA, 449 bp, Homo sapiens
  misc_feature (319)..(319): n is a, c, g, or t
aggggaagtttcccctgcacaaaggtcctccttaaccttgtctgctgccatgtgagaacatgcctttcacccttctgccatgattgtgaggcctccccagccacgtggtactgtaagtccaataaacctgtttctttttttaaaaattgcttagttctcaggtatgtctttatcagcagtgtgaaaacaaactaatacagtaaactggtgccagtagagtggggtgctgctaaaaagatacccaaaaatgtaggagaaactttggaactgggtaacaggcaggagttggaacagtttggaggactcaaaagaagacagnaaatgtgaagaaatttggaatctcctagagacttgttaaatggcttttcccaaaatgctgatagcgatttgcatgataaagtgcaagcgtgaggtagtctcatggtggaaagtgaggaacattgttggaa

SEQ ID NO: 720130 - DNA, 778 bp, Homo sapiens
aaggctagtagaggcctgggtgttaatcaggagaggccctcggccttacctcctcttcccggcgcggcccccggcttccgcgcgcctgcctgccaccaatcctcttgctaccatgtccagtggagctcgaggagtgccctgccagtgacgacctgcccgagggaatgtgccaatgaacggtgaccaatggctgtgcggctcgtgcggctgttgtccccatctaatgaagatggaatgaatagcaaggaatgaagaaccagccgggcaagtacagccagctggtgtgtggatgaccatccgtagtgctgggcgagcgcaacggctcgtcgctggccaagatctacaccgaggccaagaaggttccgtggttcgaccatgcagaatgtggctgcacctacctcaatgtactctgatcaatggctgctggtgcatgaacgacactgcttctgcaggtgaatgggcaccggctgccaactggttccttcaagctcaacctgcaagaagctggagggcggcgagggacgcagtgccgcgggagccccgtgcggcgccacacggccccggaccccacctggcacaaagcgaagaatggcatgccccgtggtgcggccggctcccggcgcgcggacaagaagcccgccagggggcccagaaaccggaagaagcgctcgcacaaagaagggcgctgccgcccagaaggaccacggcggcaggccagcatacggcggccgccggggccagacgctacaaacgcggccacccagggtcccaagtccaa

SEQ ID NO: 720131 - DNA, 102 bp, Homo sapiens
atattctggcatacatagatatctccagataaatggcagaagcaggaagcagccgtcctacctcccagagaaacagacctcagccctggcagaagcaggaag

SEQ ID NO: 720132 - DNA, 191 bp, Homo sapiens
tgtgcattcactgcgtagtcccatgcatataagcatgtacatattattattaatattcacatagtacatatcattattgctcgtacatagcacatatcatgtcacataattcccagtaacatgcgtatcagcaccattagatcacgagcttcaattaccatgactgcgtgaaaccagcaaaccgcttggca

SEQ ID NO: 720133 - DNA, 213 bp, Homo sapiens
ctctacccgactagcccgacagccggtggtggttagcagcgggcagcctgcagagacaggaggcgcaactccccaggccaggagttgcttcagcccgaagtcttgcacctggcagcaccatcgcaggtagaggctgcggagggacgacattgggtggacaagataggctgaggccatgtgtcctggtgatgcgtacacacccgtgtcggggct

SEQ ID NO: 720134 - DNA, 160 bp, Homo sapiens
gagacgcgggttaggggcttcatctctctgcgtcctcagttctgggaggccttggtgattcggccacaaccttagcctccgtcgttttttaccctccgggtattggatgattggtagctaagacttcccaatacttcagaagttggggaaattgaacctt

SEQ ID NO: 720135 - DNA, 169 bp, Homo sapiens
cgtacaggcgtcgttcgaggattaagaggagttaaacatatgtaaagtgcatcagaatcatacctggaaacaacagtaagtgctatgtccgtctaggctgttattcattcattatctgtagggtttttagagcaccagtcttgcaactccgtgtgcctcaagttgattc

SEQ ID NO: 720136 - DNA, 215 bp, Homo sapiens
tgggggagaggaaatgtatgcaactgtagtcccagctactggtggggtagcggggagttgggaagccaacggcagcttatgtgggaggatcacctgatcccaaaaaggtcaaggctgcaatgagctaaacttgggctactgcactcagcctgggcaacagtgagcaaagtgagacccccatctcgaaagagaatttcaacaagcaaaaaatgaac

SEQ ID NO: 720137 - DNA, 905 bp, Homo sapiens
ggggggcgggaactccttccgcccttctgaggaggggctgcatgaggtgagagtgactgaccagactcagtcactgaagagggaaaggggtgagatgacaagcgtaaagccccaaagtttgtattgctccagcccggtgcataccccggagctcccgaggcactggctcaatcttgtggaacacgccagtacttgattgataacaggaggctatgaagggaccctgtgagtaagccagtacagttcctttcttttctggaggatgccatcccagaactggatctgtcggagctggaaggactgggtctgtcagatacagcacctaaaagtcaaagacatgcgagcgtgcgcaccgaatgatcggggcaagcatcgtgcaggcatgaccaggagcaaacaccccttgaggtgattggccctcctatgagttacagcgcaacctttcaacttctggaggagctccccatctgccagcattccatccttcgaaacgtggagctggctctaaggccaacgattttcttctcccataacacttgcctcatggcttccactctaaggcccgttctttccagtcctatccatgttaatctttgttctatacctaaatgtgtggagatgatgaggaaatttgacagagttgaagtaaggaataatgaacgtaatcgaacagtcaattgtgtaaaagctaagtacaaggttagtgtcagcaaggagaagtggcaaggattccgtaccgccaaataatcacaaatggtatgggaatgaaaataatgatgaaagcacagtgtgacataaagggaagtgtaatcaatggtgggggaaacattgcgggacaggattggctgaattagaagacgtgagattaaagggagaagatatgatgctttctttaatattatttt

SEQ ID NO: 720138 - DNA, 450 bp, Homo sapiens
  misc_feature (26)..(26): n is a, c, g, or t
  misc_feature (86)..(86): n is a, c, g, or t
  misc_feature (141)..(141): n is a, c, g, or t
  misc_feature (409)..(409): n is a, c, g, or t
  misc_feature (438)..(440): n is a, c, g, or t
ggatcctattaaaagctgtttacccntatgcctaaaagcatcaataaacctaaggaaagtgcccccagtaattgtccccgtacccnatattgtaatattccttgcaaaactctgttttgaccctacctagtcactgtttcnataagttttcatcctattaaaagaaactgggccgggcattgggtcgtcacgcctgtaatccccagcactttgggaagccaaggcgggcagatcacgaggtcaggagatcaagaccatccctggctaacacagtgaaaccccgtctctactaaaaatacaaaaaatcagctgggtgtggtgcgggcgcctgtagtcccagctactcgggaggctgaggcaggagaacagcatgaacccggggggcggagcttgcagtgagccgaaattngccactgcactccagcctgggtgatagannngggtccgtct

SEQ ID NO: 720139 - DNA, 109 bp, Homo sapiens
accacttcagccggaacagcggcggcatggcgagatagacgaagccagcctcgatgagtccgcgcatgtaacggaacagcagcgtcagcagcagcgtcgtgatgtgctg

SEQ ID NO: 720140 - DNA, 750 bp, Homo sapiens
cgctacaattattttggattagtaccggactacattgtggaatgccaccaccagagttgtgggcatttctaggaaaggggtctcatcccccggggttaagagggctgtaatagaaaagccgagcgcaggggtgtgatcgaatcccagaacaaaatgagtacgcgcccttatatgaaggagtaaagtagcaactgggtgtaaggagttcccggaaaagaaaggcccataggttaggggctggacttttaataaacccttcaactgaaagataggcggtttcacctgagggcacaggggatgttccctaagtggggggcatatatgtgaaattcctggattggcgatctcagagttattggttgtgccggagtatgggtcctgtcgctggctcaaattatgtcttaaataaggtcctacctggttcctcgtaatgagctcgcataaagaaagcaccagtagaggggacgttttgtaacaataggctcgggagactgtcaaaaccttttggggtgatggaaccgcaatgctcggctccacgggacaaaaaaagccagattatttgtttagatggccggtctgactacaaaaagtgccacctgcaagacaatgcaaggcatagaaacccccacactccccatcctccaacccactggtctcatgcccaaagaagagttgaaggcatgggagccaacattttattgaagaaaccacagaggctgaaattcaataaacgcaagttttgtcagtaga

SEQ ID NO: 720141 - DNA, 435 bp, Homo sapiens
  misc_feature (139)..(140): n is a, c, g, or t
  misc_feature (199)..(199): n is a, c, g, or t
  misc_feature (201)..(201): n is a, c, g, or t
  misc_feature (204)..(204): n is a, c, g, or t
  misc_feature (345)..(345): n is a, c, g, or t
  misc_feature (353)..(353): n is a, c, g, or t
agcgggccagcgagcgagcagagcacatcgctgcgggctcacaaagcggccagacgctcggcggcggcgtgtggcaggagcgcaggggcgcgagccggcgatcagccttcccggcgaccgtgccgcgggagctcgagcnnctcggactaggggacccgggccggcccccaagatgccggcgatcgcggtgttggcggcngncgncgcggcgtggtgcttcctccaagtcgagagccggcacctggacgcgctcgccggaggcgcgggccccaaccacggcaatttcctagacaatgaccagtggctgagcaccgtctcccagttacgaccgggacaagctactgnaaccgctntcgagacgcatgatgcattgcagaaaactggcaatcccaagaagcccctatgaccacagccctggaacccatccaaggaccc

SEQ ID NO: 720142 - DNA, 513 bp, Homo sapiens
  misc_feature (1)..(1): n is a, c, g, or t
  misc_feature (140)..(140): n is a, c, g, or t
  misc_feature (225)..(225): n is a, c, g, or t
nagtgatcctctgtgaatagctgttcttgaactcctgactcaagtgatccacccgctcagcctcccaaagtgtggggttacaggcgtgagcacacgcccagcttagttctatttgtgagtgaacaacactctccattggnagggaaagggtcaccttggtatgtggctcgcttacggagtagagtttctccagggcctctcccagggctgttcaaatgacccagnacaacccttcaagtgacttccccttctctaaagaactcagtttccttatctgtccaatggtggaattggagtaaatatttgctaagtttccatccagctctaagtgtactaaaaatctatgaaaatcgggattttcccatttccagacaagccgtggtactacttcaacttaatctacaggcaccaagatgaaaccctggtgcagagccaatcgctgacaccaggaccatgagcttcagttcacaagcaccattctcactggagccccaacagaactcgatggactgt

SEQ ID NO: 720143 - DNA, 342 bp, Homo sapiens
aactatacctattttgatggctttcggttgagcaagctctgcaaggcatcctgagaccaacaccccaggtcgggtagcgtaagcagcctcagcacaggggctttcttcaactttctttgagtgcagctgcttgtctgccaagcccgataccacctccctaatgccggtgggccaggcccgagcctgagagcctcttcttctcttcttgtcaaggggtcaatgacccggggcactaagaaccctcccattgcgttgacaccttgggacttatctagaaacacacacatatagtagctataatatatgtctcatggttttaagtgtgtgagagctacaagaccc

SEQ ID NO: 720144 - DNA, 81 bp, Homo sapiens
tgcgccagcagcttagtagcgggggggccaggtacccagtacttcgggccaggcacgcggctcctggtgctcgaggacctg

SEQ ID NO: 720145 - DNA, 152 bp, Homo sapiens
cattctcgttattgcttgtagcagatgctcatatcgacgaccaggtcacggataaccggcaatcctggcagcggacgaacgatcagcttgttgcctttgaccacggcggacagcggcgtgatgcacgccagcgccgtattttgccgttgatg

SEQ ID NO: 720146 - DNA, 136 bp, Homo sapiens
gatatgtggtgataagtaatttcatgattaaacaatgaatcttcttaaactaaactacactgcctctgacatttgcacctgaccgatttgataaatctttaagtaaacaacggctttactacactccctgtagcct

SEQ ID NO: 720147 - DNA, 183 bp, Homo sapiens
gttacagagcagactctcaaaaaagaaaaaaattttttttaacagtgagctgggtgtactggcatgcatctgcggacccagctacttgtgaatggctgaggtgagacgatcaccttagcctgggaatttgaggcttcagtcagctatgatggtatcactgcagtccagcctgggcaacaaaga

SEQ ID NO: 720148 - DNA, 199 bp, Homo sapiens
atgtatcgcccaacaccttcctcaatccatcatcctcactgtcaccataattgcacttctgaaataatcatatttacaagtctttgcctaatatgacttggtacatcatgcgatggagcttgaattgtctttaaaatgcactggaggagttcccgtcgtggcgcagtggttaacgaatccgactgtgttggggataaca

SEQ ID NO: 720149 - DNA, 168 bp, Homo sapiens
tcgacactaggccgtttagaccagccatgaagggaatctagcattattctaggcttttcggacctctggagggcatttgagagaggagatatacccgagtccaagaattcaccaaggttttaaaggaaataactgattctttaaacccgcaattagaattcgtttcaa

SEQ ID NO: 720150 - DNA, 393 bp, Homo sapiens
tatcatgtagggatttaaaaagcccaaatactaattatttctttggagggggtaaaggaatggttttaaaagaccaaaaccccactctttgtgggtttttatcaactctttactcagagcccctctccaatgcaggtccccctcccattatgatggaagatattttttatacttaattgcagtaggggctcctttcccgacaaagccatagtcccggcttcatggaacccatccatggattgttttttgaagactggccataaaactgtcccttcaattcccaaaactgggtttaagggaaagcccctgatattctttcatggttagaaattctttctggtattattcaagaaaatggttttaatcctgctaataaacttttttggggatgga

SEQ ID NO: 720151 - DNA, 352 bp, Homo sapiens
  misc_feature (60)..(60): n is a, c, g, or t
  misc_feature (101)..(101): n is a, c, g, or t
  misc_feature (166)..(166): n is a, c, g, or t
  misc_feature (331)..(331): n is a, c, g, or t
ccaatgggcctgccagaataccacattccttttttaggcacatgtatcattcctcaaggntagacccatatgttaggtccacaagtccttaaaacattaanaaagttgaatacccatcaagcatcttctctgacccacagtggaatacaactagaaactaataacnagaggaatttttgaaactacaaatacatgaaaattaaacaatatgctcctgaatgaccattgagtcaatgaagaaattaagaaggaaattgaacaatttcttgaaacaaatgataaaggaaacacaacataccaaaacctatgggatacggcaaaagcagtactnagaggcaaattgatagctatt

SEQ ID NO: 720152 - DNA, 417 bp, Homo sapiens
tttgtgtctcattatccatgtttttcagttttctcaccatattccaggtcctaaaatgtgcatttttcatttttcatttttcagtttcctcgccatactccatgtcttacagtgtgcatttcttattttcctcgtttttcagtgtttcttgccatattccagctcctacagtgtgcatttctcattttccatgcttttcagtgtttctcgccatattccaggtcaaacagtgtttgtgtcttatttttgacctatttcactttcctcgccataatccaggtactatagtgtgtttttctcattttcgatgattttcagatttctcgccatattcctattcctacagtgtgcatttctcatttttcacgttttttagtggtcgacgcggccgcgaatttagtagtagtaggcggccga

SEQ ID NO: 720153 - DNA, 284 bp, Homo sapiens
  misc_feature (29)..(29): n is a, c, g, or t
  misc_feature (46)..(46): n is a, c, g, or t
  misc_feature (79)..(79): n is a, c, g, or t
caactcaaagcaagtgcttccgagctatnaagtaaatgtaaacatnttcttggcagataattgggttgagcttgtctanaagactgggatcgatacgacagggaaatgttcaggttaaaaataaaggattgtggagaccaagttttattgtgcagaggaagtgctcagatagcccaacttcagagaacagagggttgtaaattgtttcttaatgggacttaaaaggggtgcctggctcttaatttggattattttccttccttgcaaatgttggggggtaccga

SEQ ID NO: 720154 - DNA, 112 bp, Homo sapiens
tgtctcgctcacgtcggctggccgctccggcctgctgctccttggtcggggctgctttgctgcaactgtccaccccgcacagacgagccttactccgccaagtattctgctg

SEQ ID NO: 720155 - DNA, 187 bp, Homo sapiens
gcttgattgccttggcagtcctggcgtgcttttctgtttcttctcattgttggctttaacttccggtttaagaagcaaacttctctatccaaggcgtctctgtgactcgcgctctgcgcacatactcgtgttctctgtgggacccagggacctctgtggacctctaggtgttcccaaggactttcag

SEQ ID NO: 720156 - DNA, 1111 bp, Homo sapiens
cggacgcgtgggtcgacccacgcgtccggacccacgcgtccgatcgggactacccgggcaatgatggccacaagctcatcatcttcatttacatggtgcaacggtatggctctgtaagcggactccggcagttgccgaggatgtattgacagacgagctcacgtaatacggtaacagcgtatggtatcgacgaaagagctgagggtagcgacgataacggacgatagggagcccgtcgaagttggataggtcgtagtaggctgagcacgacacaaagagaagacaaaggaccaaaatatacaaacagaaaacaacagagacaaagagaagaagcatagaggaaagagagcaaggggaccacagaaacaaacaaacagaaacaaaagatagaagaaagcaaaagagcaaagcaagagaagaggcacagagaggaacaaagagaaggcgacaaggaaagagacgacaaaccgacacagaaagaagaaaaagagacaaccacaaagcgcagagacacaacggcaacaggaagacaagtacaaagaaaacaggaaaaaaaagagagatcaagacaaagaggaaaaaggcagaaagaacacaaaacgagacaacgaacaacaaagacaagagagacatgagacacaaaagacacaggacaaaaagacacaacacaaacaagaaaggaaaaacaaaaacagagaagaggaaaaagaaaaagaacagcacagaaaagaaaaagagaaaaaaaagacaaaacaaagaaaaacaagaaggaaacagaaaagaaacaggaacacaaagaacaaaagaaacgaaagggacaaaaaaagaagaaacaggaaaaacaaacagaaaggagaagacacgagggaagcagataaaagaaatagcgaaagaggacaagagaaaagaagacagagcacaaaaggaagaacacaagaagagacaaggagaaaagagacacacagcgaaaaaacaaagcaaaaagaaagagaagagaaaacaagaatacaaaagaagaggcaagaccagagaaagaagaaagagaagacaacaagaagaagagaacaagagaaagagaacaaaagataggaaaagaagaaaaagagaaaga

SEQ ID NO: 720157 - DNA, 554 bp, Homo sapiens
  misc_feature (225)..(225): n is a, c, g, or t
  misc_feature (399)..(399): n is a, c, g, or t
aggtagccacctgtacttctgtcttccagtttgccactgcaaacgtctatcttcgtccaaatagtttcatcctaccacgtcccagattaatctgttcgcattgttcgtctgcgtatagtagatgcgtaactaggctgaaatgacgcgattctccctgcgtcatggattcaaggtctgcagtcaccttcggtcaatctctcctaaaagatcgccttcaaattatgntaatcacctacaagtttaaactaaactttagctgtttaagtcaccttcagtttaatctagaagcgtgccctgctataggtatgaatacggggctcagtagtcctttctctcaatgttcttttaaagtacatttttgactccatgaagaagcttcatctcaagctccgtcatgtntgagaaaaaccattttatctcttccttcctcatgctactcttctaagtcttcatattttctcttaaaatcttaagctattaaaattacgttaaaaacttaacgctaagcaatatcttagtaacctattgactatataattgaagtagtagtatca

SEQ ID NO: 720158 - DNA, 386 bp, Homo sapiens
ctagaggatcccccacttgagccccttgatgcagctggctgcttctgaaaacaatggaggagaaggaattcactacattgtgattgagatagtggccactattctttcattggacaggcttgggactactaccatcagggcgtcctaaagatgaagtgttatgcaaatcgattgcttgatttcgctaatgaaacatgtctttcagtcctaaaaagagctgtgtttagacgcaatcttgaaattataaagaccctatgtcgagtgctggaaggacttgtttatccttcccttataggtccatatttgaatagtttcccggttctagatcctcattctaatgactactcactccggattcgtttgctaagcctcccggggcctctctg

SEQ ID NO: 720159 - DNA, 475 bp, Homo sapiens
  misc_feature (9)..(9): n is a, c, g, or t
tctgagcanagctgggaacaccgtgagcccaggagtacaagaccagccttgagcaacagtggcaagaagctgtttctacaaaaaaaaatgaaaaattagccaggggtggtagtgcacacctgggtagtcccagctactggggaggctgaggcaggaggatcccttgagaccagcggtcccaggctgtagtgagctggtgatcggtgccaccatactccagccggggtgacagagcgagatcgtctctaaaaaatacaaaaacaaaacaaaatcaaaacagatcaggacagtgaccggctaaaaagccttcaaactccggtattttaaacccagcacccttccgggttgggtcccccctcttctagcctcatacacttctccctatggacatgattcacgggggccgttctaaacttccgggagtgcccagatgcagttggtatcttacaactctccaccttcccactggctcaga

SEQ ID NO: 720160 - DNA, 338 bp, Homo sapiens
tactgggactacaaggtctcacactgtcaaccaggctggagtacagaggcacaaactctgactacactgacagcaccaactgccaggctcaagcaattctcctgactcagactcccgagtagactgggattacaggaagtgacctcacaatgactcaagctaccacatgctgttgctagtgaaatgccagtagacgcatatgtcctgcgcgcttaggggtgctacaagttgaccactgcaacagtacagatgactctgaagaatggcgtgggatggatccttccgcatgcacttgaacagcggtctccaaacacagggacacagagctggaggtgagc

SEQ ID NO: 720161 - DNA, 188 bp, Homo sapiens
ccccccaatgttgaaaaagtcaatatccgaggataaaaactacaaggaagttatctgagaaactgctttgtgaggtgtgcattcatttcctagtgttaaaactttccttttattctgcattttggactcactgttttgcagtaactgtgaagtgaaatttgggagcacattgaggtctttgatgatat

SEQ ID NO: 720162 - DNA, 212 bp, Homo sapiens
gtcaaggtggttcgtcgggcagaggctcatgagagaagacggactctccctgaggagcacgtagagctccgggtgtcgggaaagctgggggagtactggtccagtggcagtggacagagtccagcgtactcctggcctggaggtcaaggccacgactgcggtccatggtcttccaccgagctgcttgaacggtgggtctctgatgagggcac

SEQ ID NO: 720163 - DNA, 141 bp, Homo sapiens
caatatcacccgcaggcataccaaaacagccatacttgttgttcactagcttccaggaaatgctgcacactcattgagttttgggttttttcttttccgcctcaccgtgcttctgttcactacttcttccggcttatctct

SEQ ID NO: 720164 - DNA, 160 bp, Homo sapiens
cgctttttttaaagtccagctgaattcttgccctttagacgccttagccctgcatcagtgagtcccttattcacgatctgactcacgaccgtcagtttaagacacactgcgactgactccggcaaacacgtagcgtcacactagcacagcaggcagcact

SEQ ID NO: 720165 - DNA, 168 bp, Homo sapiens
aggtggctaccctgccaatggcagagtcacacgtaggaaattgtgagagagggtgggttggaagttgaggccaagaagaagaaagtgatctatatacatagctgtgatggagaaggggtgagaagcaaaaagaagggactaagtgaggggcagggagaagcacagaga

SEQ ID NO: 720166 - DNA, 977 bp, Homo sapiens
  misc_feature (29)..(29): n is a, c, g, or t
  misc_feature (67)..(67): n is a, c, g, or t
  misc_feature (184)..(184): n is a, c, g, or t
  misc_feature (192)..(192): n is a, c, g, or t
  misc_feature (203)..(203): n is a, c, g, or t
  misc_feature (208)..(208): n is a, c, g, or t
  misc_feature (213)..(213): n is a, c, g, or t
  misc_feature (230)..(230): n is a, c, g, or t
  misc_feature (270)..(270): n is a, c, g, or t
  misc_feature (275)..(275): n is a, c, g, or t
  misc_feature (281)..(281): n is a, c, g, or t
  misc_feature (301)..(301): n is a, c, g, or t
  misc_feature (314)..(314): n is a, c, g, or t
  misc_feature (356)..(356): n is a, c, g, or t
  misc_feature (379)..(379): n is a, c, g, or t
  misc_feature (412)..(412): n is a, c, g, or t
  misc_feature (426)..(426): n is a, c, g, or t
  misc_feature (453)..(453): n is a, c, g, or t
  misc_feature (522)..(522): n is a, c, g, or t
  misc_feature (545)..(545): n is a, c, g, or t
  misc_feature (547)..(547): n is a, c, g, or t
  misc_feature (551)..(551): n is a, c, g, or t
  misc_feature (576)..(576): n is a, c, g, or t
  misc_feature (660)..(660): n is a, c, g, or t
  misc_feature (671)..(671): n is a, c, g, or t
  misc_feature (699)..(699): n is a, c, g, or t
  misc_feature (710)..(710): n is a, c, g, or t
  misc_feature (713)..(713): n is a, c, g, or t
  misc_feature (749)..(749): n is a, c, g, or t
  misc_feature (782)..(782): n is a, c, g, or t
ggcccgggccggggccgaggttgccttanggctctctgcccagtaacaggcatcgaacggtgcagantgaagacgccctccgtcagcgacgccgtcgcaatggccatttgtcaattcttccttcaaggccggtgccgctttggagatcggtgctggaacgaacatcccggtgctaggggtgcanggaggagngacggcagaanccgangcagngagccttcaggtaatantagacgtggatggaatacaactagccagagatattccaantgtcnatccangccatccagtttctccaaantccacaccatggngggggcagcagagatcaagaaaagccatatttcagttcttcngattctggagcttcaactaacanggaaggaaggcttgggattgtctgagaacccantttgcttcacttangtcctgatgagcagaacagatgaaaangaacacttctggaacgacatcgtcacagatatgcgagggttgggcaatcatcagggcagtggatgttcnctgtatattcacccagtgaaaanangaancctaatatttcaggttttacagacntttcaccagaggaattgaggcttgaataccataacttcttaaccagcaataacttacagagttatctaaattctgtccaacgtntaataaatcantggaggaacagggtaaatgaactgaaangtctaaatatntcnactaaagtagctttgctctctgatgtaacaggatgnagtacatcaagcagcacctgcatttggatttgncagcagtcaagcagcaacatttatgtcgccaggctttccagtcataacaggcagcagtgataatggctcagaactttagtgttcaaacaaactctggatttgctgctgcctcttctggaagccttggtggtttgggagtcccccagcattgggagctgcagcctctaccagttcaaggtatctctaattctggtc

SEQ ID NO: 720167 - DNA, 791 bp, Homo sapiens
ggcaatccggagtgcccaacatggcggcggccgtaaggtgcatgggtagaggtctgcaagggaaaacaaaaaaaggtgctaaagaaaaaaccaccaggatgagaaaaacgatgaatagaaaaaataaaagcatatccctatatggaaggcgaaccctgaggatgatgtctatttaaaaggcttatacccgagacagatatattgaggtgagaaagctgtcacttacttaagaaattcaaattcttgattaattagtccaaagcaaagtgtaatctttgatttgacactgatatggccactgggaaagacagaaaacggttggagcccatttaccagtgttctaagttcgccatacccattgtgcttccgaaatcaactaaagtggcggtatttcacagagaatgcatcagaaggtcaaaatagcggagaaaatggagctgcattggcggaggcctagtctgatacacgaagatttgtgggatgactgaaattgttgcagaattttacgtagctgtccagaaataattgcctgaacttactcgatagggaaagaaactgattaaaaatatcaaaaggttctcgaaatccaattggcgtgattccccaagaaggttgacttatctaacactggcttgaactacggtcgatcaacaacaggagacttctccagaccaatagcacttggatttgcacgtacccgataggtgcatctcgagcacgtattaatgaagcttgtagcagacgtgatggcccttgtggaagcgctcttcgaatcacaaggggtttcagag

SEQ ID NO: 720168 - DNA, 148 bp, Homo sapiens
ctgcgtggtaggtgatgtctgcgaggcccggtgtcatcaggcgcaggaaggtcagctggatggccacatcggcagggtcggagctcttggcgccatactcgaactggaatccatcggacatgctctcgcagaaccagacttgcgtctt

SEQ ID NO: 720169 - DNA, 462 bp, Homo sapiens
cagggtgggatggattttcacagttcagctcttgcaaagtgatttccccaggagagtaggccttttcatggagaaggttctatgaatgttttacaacagttacactccccattcctctgccaggaccaggaggggatctattttggatccttaccatgagaatctggtggaacgcttgaagaaaagttcagtaaagtgtaggatctcccttaaggcagggtcccacagtgttttctgactctcaagctagtccacactcagcctccagcaagtcatcatttcaattcccatctctacaaaaattaaaaattagctggacatgatggtgtgcctgtggtcccagctgcttgggaggctgaggtggaaggaccacttgagtctgggaggtcaaggctgcagggaactatggtcacaccactgcactccagcctaggtgacagagcaaaaccctatctcaaaaaa

SEQ ID NO: 720170 - DNA, 674 bp, Homo sapiens
  misc_feature (164)..(164): n is a, c, g, or t
  misc_feature (303)..(303): n is a, c, g, or t
  misc_feature (432)..(432): n is a, c, g, or t
  misc_feature (639)..(639): n is a, c, g, or t
ggctccaccaccgtgttccacagtcctgggctcccggctcagtatccccacctatggctctgcagtgcacccgactctgcgccccttgacgatctatccacacgtcctggcgtggctacatagcatcgatctgcagtcagcgcagcgtgacagaccctgaaggnctcccatagccgtcgctgtgtccgcgctaactcacttactgtgtgcggcctagcagttggtcgcttttggaacatttgttgcttcctcagacttgccagtgcccaggacagtagtcccagggcctcgcacgccagcaancaaggccgtgctttctcttgattgcagaacgtgactatcgtcgcacaatgcatagctggtacctagagtcacttagcaactcccaggaaggcctaacacgggtggccaagacgacttgtagcctccaanggttcttgttggaagggcgttgaagggccttgaacgagccgggagtgccctatgagttgcctttccttcccgtgtgccacgcgaagcttccaccgtgtacccagtgtggggagacccactaaacaagtgggttgcctgagaagtggcggcattgtcgttgcgcggcgtgcacatggggcccttagcatggaagccggattgtgtgcnaggcccggcctgatggggaacccttgtaatccact

SEQ ID NO: 720171 - DNA, 248 bp, Homo sapiens
tgttcataggtgtctggtcgaagagtgcggggagttgctgatgggggacatggaagacagactctcctgatgggaggtcctcgatagcggaagctgcagtcgtccaggtctggctcttggaagaagggaaggcagcgatcagtgtgaaggagtggtagctagctcaggatccccgaccccagaatgcatatgggattgggacctcaccgtagatccctttccccatgaatccccaatcccagactggc

SEQ ID NO: 720172 - DNA, 270 bp, Homo sapiens
agaagagcatcctcatcttctataagggagcgaccacctaagaagttgcagctcgccttgcacaacaggaaaaacaggaccaggttaaattgagtttatgtaaaccagacagcttcttagggatttgggtcatctcccagtggctctcttcttaactatcagcacaggttggtcatctatcactagtgtggttctttgtgctgcggtgttttgatggcatgcttatcatcacctcattcatctaactctctaccagggacaggctttctg

SEQ ID NO: 720173 - DNA, 288 bp, Homo sapiens
tgctttggtttttgatgaagtcttgcactgtcacctgagctagagtgcaattgcgcgatctctgctcactgcaacctcgttcacgcaattctcctgcttcagcctcccgagcagctgggattacaggcacctgccaccacacccagctaatttccatttcttctagattctttagtttatgtgcatagaggtgtttataatgttctctgatgtttgtatttctgtggggtcagtgagaatattcccccttatcatttctgacggtgtttatttgaatcttatcacttt

SEQ ID NO: 720174 - DNA, 843 bp, Homo sapiens
gcaaagagaaatggtgagtaactgttcaaagtcagaaatgaaacttgaagactaaaaacccatctctctacgtgagtctcagatgtttatgatgaagcattttttaaaaagagtgagacagacttcctcatttattattacaaaaagtgaatccttggcagaatgtgttgtccaaaaatgtaccatttggtttctttgaggattggagttccagtggagtgatgagattttcatttttcaagatagaaagctgctggaaactctgcaagcaaaatgtattcgggtctctagtacgtgccaccactcaagatgtaatcgaaaccgctcgcggagaaatttcgacctgatatgcgaatgctgtcctctcccaagtattgcactctgatgaagtgcagtgtcagcggaggtcaggtatacaggaagggtttgtagaggcatgactgagctgtgaagagacagttgtccagggtcatgtggtcatgtcaggttacctgtcgtctccatctttcttctcttatgggggtaggagagtagctggaggctgagaagactgtgcatgtcgtgggaaggtgtgcttataagtcactggcacatatatctgttggaaggtagaatgaatatattaattttgatatgctgatttctccaagatagtaacgtaccatttatccagcgtattgggggccaataattgggtagtatgctactggtttgggaaggttaaggggtctatgatgagatatattattatatgtccacgtgaatataaggggagacacaaatggggagatatggcgtgggaaaaatcatgtattggaagaaggaagataagaaacagagata

SEQ ID NO: 720175 - DNA, 889 bp, Homo sapiens
gcgggattggggtcgcagtgctggtcgtggatcggctgtgatcgtcacttaacaatgcagatcttcgtgaagactctgagtggtgagaccatcacgcctcgaggttgagcccagttgacagcatcgagaatgtcaaggcagatggatccaagataagggaaggcatccctcctgaccagtcagaggctgatctttgcgggggaaatcaagctgtgaaatgatggagcgcagcccgtgtctgactacaactatccgagagaagagtccaccctgcagctggtgctgcgcctcaggaggggggatgcagatctacgcgaaggagagtgacgggcaagtagcatgagccttggaggtggagccagagtgatggcatcgatcaatgtcgatggcccgagtatccatgcatggggactggcattcactcctgaccaaggaagagcggtttgatgcgttagcagggaatgcatggttgggatgatgggcgcacgcggtgttgcttgaactacgaactacttcacgagaaggagttcctgccgtgcaaccattgagtgtcatccgtctgcacatggggggaaaatcgcgaaattcttcctctggcgactactgtaggagggtaagacaacaatcaatgctacggaagtaggaagacgcagtgagcacgcagtgggcggagatggtcgacgtgcaaagggagcctacgagaaggggacgggcatcaccgtccctggaaccacaaacctgtgaactaccgccatgggaaaggacatgggcaagatcgggcgagcacccttggtgtgattcctgacagtccttgagagagtgcagagctggctgtggttggcaatgtaagggcggagaccaattcacggagaacgataggtcgcaatcc

SEQ ID NO: 720176 - DNA, 408 bp, Homo sapiens
gaatctaaatatatttaatggattcaagccatatatcacttggccaagaaattggaatttcaaaatgttcgtgcggggataaaccaaatgaggacagtgagtagttatgtatccccagactgggttattgccaagttatatatcaccaaaagctgtatgactggatgttctggttacctggtttacaaaattatcagagtagtaaaacttttaaatatatgaggaaattaaaactaccctaaggatcctttgattcgattcaaaaaggactttgatatctctcagtgcttcagtgctatcattgtgagcaattgttttttaaaaacgggactgtaaccaaactaggcccgtctgtggcattctttaaatgttttttttttacccaataaattccttaaatcaccttta

SEQ ID NO: 720177 - DNA, 364 bp, Homo sapiens
ttcctatttttttatgcgggaacttaccccccatttttatttttggattttttctctttaaattttgaagttggccagccttttccaaccttttttttaaacccctgtcttttatattaacctttttttatttttctttaggtaaaaatgattgatgttggctgatattggggtggtccttccccctgaagtggataaattcttttccagacctcccccagggtgggtccatcaaggagggaagcccccagccgactgcccccgtttttagggtcaggtgagctgtgtccccaaaaccccccaaaaggggtggaaggaggaatgaacgtttctttttcgtttataaaggccttttcctttttta

SEQ ID NO: 720178 - DNA, 195 bp, Homo sapiens
  misc_feature (41)..(41): n is a, c, g, or t
gaggactcccacggtaatttctccaccatccaccggaatgnaaggcgtatctgctggccgtcattggcgcggaatacgtctcaacatgctcccgcgcggcacgcatgattacgctaaattcatccgcccgtcagagctgagcgcgttcgtacgcacggccggcctccaggcgcaagagatgcgcgggctggaata

SEQ ID NO: 720179 - DNA, 702 bp, Homo sapiens
  misc_feature (53)..(53): n is a, c, g, or t
tttagcttgtcccccagttcaggttaccctctaaataggcaaaactgaggccncacgtgtcgtcgatcttggcagtgtttctcaggccgcctgatcgcctcatgggaaatcaggtcttgacgttgctctaagagagtgtctaggctcgttatcaaccacctctgcaaagcttccgcctaagcacccgcaactcagccctgactacctgcctgagatctgtatagaccttaactatctctgcccgtgaccacggaatggtctctccttacgatgtcttgcactctgttgattttataaacacaaagtcgcattctgtgccccatactaaagtgcattggtggcatctcaggtccctgtttcctccgcctcccctggtcttgtgatcctgcaacctcagcttgtcaagtaggtagaaggtcaggcactcgccggcatgagtgggtaacttttgtattcattgagtaccgttcgggtttaagcacattgaccaggctgtagtgtctactcctagcttcaagtgatgcatctgccgtagcctcccccagtcctgagagtgcaggcgttatcccttacgcagtagccgacacgttgtatttttaaagaaaaatgttcattttaccagccgagtcttttgtcatagatgcatatttttatagtaaagacgcttcacattacagaaatgcggaacaggcaaaatcactc

SEQ ID NO: 720180 - DNA, 703 bp, Homo sapiens
ggacgcgtgggcagcagtattctgaaatggctatccagatgatgatgctcatgcatggatcagcaactcgcaaggagatctgggcgctggttgggttctgtgatgaggtgaaagagatgcccatggagagtctggtccccgcgcaaagtggactccaagaatgtcatccctgccctggaatctgggggagcccatgaagaagcacgaggtcccagcgaaagtcggatgtggtacagtgaggtgtgtgaagttccgggtgaatggaggtgaccaccgcatgatgaccaagaacaagacggtgagaaagaaatagctcgacgctttttgacaacaatgtgcgtcgaacggctgccgaagtcccatgtcggaagagtggcaggaggtggggacacgttacggcagcgtacctctcgctgtccatccatgctggaggagagtcagcgccctgagtctggtgtgcaagcaatgcatgacaccacatctgcatctggcatcgcggatgcctggacctgaccgttcacgtgacgtcagccaagggacggtggacttctgcgagaagtgtgcaagaagctggtgggttattcggactcgcaaagcctggagcaaagacgaagcaccaagcaggagatccgtggggctccttgtggacaaggctgcagcttgctggcgagaccctgtaccagaagcaggtgatccagagggc

SEQ ID NO: 720181 - DNA, 266 bp, Homo sapiens
atcgtagacctcgacgggagtccaggacgccggggccgagccgcttctatgcgctcctcctcctcgtactccttcatggccttctcgatgcgcagcttggcaaggccccgacacacgctccttgaaggcttccagctcgtcgtatgaagccctccatgtactggcgatcggatgtcttaatcttagtgaagaactgccggaagcacggcccgggggtccaccattataggctcttggccagctccaggatagaagtgcgccgggtg

SEQ ID NO: 720182 - DNA, 126 bp, Homo sapiens
tgctagaattacaggtgtgaagcaccatgcccagccagatctcccctgctcttaactggcccaatcctagcactcttttttttttcccgaattttaagtagaaatggggtccaccatttgggcaac

SEQ ID NO: 720183 - DNA, 351 bp, Homo sapiens
  misc_feature (251)..(251): n is a, c, g, or t
  misc_feature (265)..(265): n is a, c, g, or t
  misc_feature (326)..(326): n is a, c, g, or t
gcaaaattggccttcccttcccggacacaaaattcactgttggtgttcagtgtttccaacgggcccctccaagacagtcccagttccttaaggaaaatttcgggcaaaaggaggcttaaaaagtggcccgggtgaaggccctatattaggagctggatttgccaccagtgttcttgcaatatgaggaagacagttccagccccattatggctttcattgaacagtacgcagcccccctgcccccacccgtntttttggggcttgngcgcaaaatttccaaacggagaaagtgccctaaagattgcaagggcggggaaaggaggctntcaataaataatcgtgtacccttta

SEQ ID NO: 720184 - DNA, 304 bp, Homo sapiens
  misc_feature (59)..(59): n is a, c, g, or t
aggttggcgattgcagccacgcattctagcgtctgggaaagaggcacgtgggccaggtngtggtggctcatgggaggatcatttgagtccaagagtttgagaccagctggggcggcacagtgagacctcgtgtctacaaaaaaaaaaaaaaaaaattagacgggcatggtggtacactcctgtggtcctagctacttgcgaggctgaggtgggaggatcacttgaggccaggaggtcgaagctgcagtgagctatgatcgtgccactgcactccagcctgggcaatggagtgagaccctgtctc

SEQ ID NO: 720185 - DNA, 653 bp, Homo sapiens
  misc_feature (44)..(44): n is a, c, g, or t
  misc_feature (220)..(220): n is a, c, g, or t
  misc_feature (331)..(331): n is a, c, g, or t
  misc_feature (503)..(503): n is a, c, g, or t
  misc_feature (539)..(539): n is a, c, g, or t
  misc_feature (623)..(623): n is a, c, g, or t
cttacagtgactggggaggcctcacaatcatggcagaaggtganaagcatgtctcacatggcagcagataagagaagaagagcttgtgcaggaaaactcctattttataaaccatcaaatctcgtgagacttattcactaccaaaagacatattcactaccacaagacagcataggaaagacctgctcccatgattaaattacctcccacagggtccctnccataagacatgggaatttaagatgagatttgtgtggggacacagagccaaaccatatcattcttcccctggccttttcatgtcctcacatttcaaaaccaatcatgcctncccaacagtcctccaaagtcttaactcatttcagcattaactcaaaagtccgtagtccaaaatctcatccaagacaaggcaagtcccttctcctatgagcctgtaaaaccaaaatcaagttagttacttcctagatacaatgggggtacaggcattgggtaaatacagctgntccaaacgggagaaattggccaaaacaaaggggatncaaaccccatgcaagtcagaaatttagcagagcagtcaaatcttaaagctcccatgaatcttctttgactccatgtctgatatncaggtcatgctgatgtaaaaaatggggtac

SEQ ID NO: 720186 - DNA, 184 bp, Homo sapiens
cgtggcgactattcatagggggggcgcctgacctactcagacagcataaactcagcaccaagtcacatacacggaaaacagcagtaaactatgtcagcagtatcaacaaacatcagtatcactttttgttccaaagtatatctcagatggaaaaaatgaggtttatcaccactcagtgcgtatt

SEQ ID NO: 720187 - DNA, 104 bp, Homo sapiens
gggggggggattgggggaccggggcatttttcttacttttttaatttttggggggtggggggaagggtggttttgggggggtaataaacccccttcgggaccca

SEQ ID NO: 720188 - DNA, 1006 bp, Homo sapiens
  misc_feature (68)..(68): n is a, c, g, or t
ggtcgaccagcttctgagggtgaggaccgaggagcgcgagcagatcaagaccctcaacaataagttgnctccttcatcgacaaggtgcggttcctggagcagtaacaaggttctggacaccaagtggaccctgctgcaggagcagggtcaccaagactgctgaggcacgaacctggtagccgttgttcgagcagtacatcaacaacctcacggaggcagctggacagccatcgtgcgggaacggtggccgcctggactcagagctgagaaacatgcaggacctggtggcaagacttcaagaacaagtatgaggatgaaactcaaacacagcgctaccactgctgagaatgagctttgtgcactgctgacagcacacggactgtagcatgctgccctacactgacacacaggctgggaggcctgcgcggccaccggcctgactgcactggactggatgagcactgaaccttcatgcaacgatgtatcttccgaactgccggcaggcttgtccccaggaatgcagcacgccatggtcctctgcaccacccttcagatgggtccattctaccaatggaaccaaccaaacgcgccacacccttgggaaccttgggactaggccatgtcacttccgccatgaacgggctcacacggagtccgccaaggataatggcagcgggaagaaatacggccccaactcgcgacgtgcccccgggaaccaggcaacgacccgcaagtatcacagggggattatattgatgggaaacccaacaggatggactgtgacaagaggcaaggcctttggcccaagcagacgtacaactaacgcgcctggggcacaacagagcactgtaggaggcgactaggaacccccatacccagggtaaagacaccgtccacaaagcacaattgaacagacaattctctcgtatgagaagagaattgagataacccggggcgaaataggaaatacacacaagaaaaacggctatggttagtgatagccacc

SEQ ID NO: 720189 - DNA, 181 bp, Homo sapiens
tgggctgactagaggaccccctcctatctgaatccagataaaaagtacaaggcatccgtctcattttagtcatcatgggcggtctggattcagataggaggcctcctatctgaatccagatcctcctatctgaatccagaccgccaaaagtacaaggccatccgtctcatttttgtcatca

SEQ ID NO: 720190 - DNA, 447 bp, Homo sapiens
gaggacccgccgacggggattcatcaagctaaaaagcttctacacagaacaggaaacaacaaagtgaaaagataacctacatatggaatgggagaaaatatttgcaaattatttgaccagggattaataaccagaatatatgaggaattcaaacaactcaatgggccaaataccccagataatccaattttaaatgagcaaaagacctgaatagacatttatcagaagaagacacacaagtggccaaaaggtatgtgaaaagatgttcaacatcactaatcatcaggaaagtgcgaatcaaaaccataacgagctatcatctcacctcagttacaatggctattatcaaaaagacaaaaaacaaatgctggagaggatgcaggaaatggtgaatgctcatacacttggtgggcactgtacaattagtacagacatcatggaaaacat

SEQ ID NO: 720191 - DNA, 223 bp, Homo sapiens
agtctcttatgtataattaccttgtttggtaatactcactttgacatgtgttaattccattattttttcatgattgtttatacacatttttagtcacaggttttgtcttggtaagagtactatttatgaatacaggagaatggtagaaggaaagggccagtaacatgaaagattctcttcattagcccatgaatgttaaacgttgatttgcgacagtggtggg

SEQ ID NO: 720192 - DNA, 100 bp, Homo sapiens
aggcttccagtgcgtgcaccatgcttcatgtgccaggcagcagggcacgtccaggcttccagtgccgtgcagggtccctgcagctcgcaattcgtcaatc

SEQ ID NO: 720193 - DNA, 177 bp, Homo sapiens
ctctcccctgacaaagccctcaacagcctcccaggtatcagtatcctgcaccacaatggtacatttgttacaatcaatgaacctactctgaaacatcattatcatccaaagttcatggtttacattagagtcccctcttggtgttatacatgctagaggacaaatatatgatgatat

SEQ ID NO: 720194 - DNA, 116 bp, Homo sapiens
gtcgtgcctcagcttccggagtagctgaggaccacaggttcatgccagcatggccagccaactttcgcatgtttgtagagatggggtctcacagtgttgcccaggctggtctcaaa

SEQ ID NO: 720195 - DNA, 450 bp, Homo sapiens
  misc_feature (141)..(141): n is a, c, g, or t
  misc_feature (196)..(196): n is a, c, g, or t
  misc_feature (206)..(206): n is a, c, g, or t
  misc_feature (239)..(240): n is a, c, g, or t
tgtcgagaaagggcgccaagggaagaaaaaaaaaccccccccccccccccccccattctttaagtacaaccccttttatcaataaatggcaacggggggaatataagcaaatatataataagcaaatgcaatggaagggangaaggaaaagataatatttatatgtacacttcccccagatgtggagattcaccancccagacggnaagcaacagccctgggctccagagtcggacacnnaaacactcaccagatacaagaggattctcatgaagtttccgcatggtctgggacccctagctcttattgtaacaagttgtttggcatgagacccagtcacaagggcccttcccgactggactcaaggaacacaaaaaggtcaacttgtgtttgcgattgtctgttgtgtttcaataactaacaaataggaatttaaatagagatttattt

SEQ ID NO: 720196 - DNA, 103 bp, Homo sapiens
  misc_feature (76)..(76): n is a, c, g, or t
taaacatgtttgagaaccatgacgaagctggccgggcttgcaattcccaagcacagagggggccctcaccatgaanctcggcccacggattgggtcacccagt

SEQ ID NO: 720197 - DNA, 277 bp, Homo sapiens
gcccccagcaaaagcaaataataataatattaataataataaagagaaataaaatattaaaataaaaaccaatagcccagcccttgttgaggtcaccagggagaaggggctgcccggagttgggtccttgcctggattttgacccagcaacttcctgtagtgagccctttgtatgaatcgtggccttcctgttttcaaggcgcaggtatttattttgtatttgtttagagccccccccaaaatccacccttttaataaacatgagggggcagtccca

SEQ ID NO: 720198 - DNA, 372 bp, Homo sapiens
tccacaaaaatacaaaattagccaggtgtggtagcgtacacccgtaatcccagctacaggaggttgaggcaggagaatcacttgaacccaggaggcagaggttgcagtgggctgaggctgcaccactgcaccccagcatcggtgatcgccagactccgtctcaaaaaataaaataaataaaataaaataaagtgttctcgctgggctcggggactcatgcctgtaatcccagcactttgggaggccaaggagggcagatcacttgaggtcaggagttcaagaccagcctggccaacatggtgaaaccctgtctctactaaaaatacaaaaattagccgggcgtggtggcagatgcctgtaatcccagctact

SEQ ID NO: 720199 - DNA, 330 bp, Homo sapiens
acatatactcacgctattataaaccaaaggcactcccaccacttttccttacttaaaaattttacagttggacatcaggtgcctgatgatgagactatttaaaattcaaacacgctgttaatgggttttttgaaagaaaatagagatattgataaacttattgggtgcccactgtacccatggtttaaacagggctggctacctcatttgcagatatttgatttatgtagagggcgtgaggccagatgatgcaattgaattattcaatagggtccggggacatttcttagaagacaaaactacattgaggacctccagaatggtccctca

SEQ ID NO: 720200 - DNA, 265 bp, Homo sapiens
gagccggcagggccgatacgcagggcatggtcgcccagccgggaatggcatggtcttgtaagctgcacttgcacaaggactggcagcgggcgctggggacacgtggttgaaccagtcggtccggcaagatccgcagacgtatgggccaggacgaagacccgaaggggcgacacgcatcgcgtccgcgccaccgcggctcgcggctcccgatccgcggcctatcgatgcggctgccaaccgagggtctcggctcaccaaggacgca

SEQ ID NO: 720201 - DNA, 1110 bp, Homo sapiens
ggttgtgtgttttcggggtccccacttcgggttgtacgtaaggccccctgcgcgttttttgctgcccgcccacaccgcctttggggtttctttgggtgaggacatattgggactccacagcaccccggagtgatttggagccctcgcgttactccaccggggtcactggccacggagctcttggcggctggttgtgccgcccaccgctctttgccgtgcggcccctgtaggccacccttgggcccacacttgccgctggccccacagggagggatattcccccactttggggccacgaggacttttttctgttcaccaggtggggccccccagagctgattaacccgtcgtggtccctcacgcggctttgtttttctttacaggctggggaagtgatgtgggttcttttcaacggcgctcgctcttgtctggtgcccccgtgtgtggtgcccctctcacacacggcaccttaggtgaattgtgccactggtgtgcgcacgcacccccaccttctcacgctcccccgtggagaacctcttgttggggagacacccacgccccgagtgttcacaccctggagggcacgggaccacttctggagaaaccccctgggaacccacgcgtggtctccacaacacatggtggctacacgccccgcgccacaggtaaacacaccgcccctggcccaatcgcgctgtcccctcgcccgcggtataaacacacgcccctgccacaaagccgggcctcgccccgtataacaccgccctgtcacaaaccctgcctggcccacacaacacacggtttcacacgctgcacggttcacaggaaaggccctgaaaaggaagcccttattctgtggctctcacggatctcacgaagcccttctgggccacatggtccacattcccgggaacgcacgtcacggaggccacggccggcgagccctgtggaatgagccctcagaaacccttggcttgcccacacgtggaaaaagggatatgaaggttgggtttccccccttttatagatggtcacgcacctgggtgcttcccaagttgtatgtggcatgaatactttttgtaatgattgattaatgccagattgtttatc

SEQ ID NO: 720202 - DNA, 540 bp, Homo sapiens
attgcacccgtgtttgttctcatggaacagattactcttaagaagatgagaaagatcgttggatggtcaaataaagatggtgatgggatattttctcctgggggagccatatccaatatgtacagcatcatggctgctcgttacaagtacttcccagaagtgaagacaaaaggcatggcggctgtgcccaaactggtcctcttcacctcagaacacagtcactattccataaagaaagccggggctgcgcttggctttggaaccgacaatgtgattttgataaagtgcaatgaaagggggaagataattccggctgatttagaggcaaaaattcttgatgccaaacaaaagggctatgttcccctttatgtcaatgcaaccgcaggcacgactgtttacggagcattcgatccaatccaggaaattgcggacatatgtgagaaatacaacctttggctgcatgtggatgctgcctggggtggtggactgctcatgtcccggaagcaccgccacaaactcagcggcatagaaagggccaat

SEQ ID NO: 720203 - DNA, 208 bp, Homo sapiens
agcagatgagcttgagattgtgccactgcactccagcctgggcacagagtgagactctgtctcaaaaaaaaaaagaaagaaagaaaaaaaaagaaatgatgctgggagaagggaagtgagggaggagagtgtcacccttgagaattacggtttccagaatcaagtctgcttgagacccaaagcataactctggaacccctagggcatt

SEQ ID NO: 720204 - DNA, 609 bp, Homo sapiens
gggtttcacttctggacccacagtgtattttttggggcaagcatggataactgctggcttgcactattggggtccagtgaactgaccatcaggcatctgaaaagttaggactgcaggtgggtgccaccacccctagctaaggtaaaaaatatacattcgtagagatggggggaaactgagttgcccagactggctcaaactcctggactcaagcgagtcttctgtcttggcccctcgaagggtcggtattattggggggaggcaatgcacctggtctcacgtgaataatactgcatgagtcagatgtaagctgactttaataactaaatattagacatttggttcatcccgctcaatctttagaagtacacttttaggaatggttaaaaattcactgttaactttatgctaccaaactaaagaccaaatcattcatttttatttaacactggcacagaatagagcaatgggaagcacagtttcttgtctgggaaccccctgtgtaaaggacaagttaagactgggtttaaaataaatctccaaatgctgtgaccgaagtatggcccgtgcaccatggaaacaagggagaaatagggaagtggaagaaat

SEQ ID NO: 720205 - DNA, 1771 bp, Homo sapiens
  misc_feature (286)..(286): n is a, c, g, or t
  misc_feature (295)..(295): n is a, c, g, or t
  misc_feature (305)..(305): n is a, c, g, or t
  misc_feature (318)..(318): n is a, c, g, or t
  misc_feature (889)..(889): n is a, c, g, or t
  misc_feature (1042)..(1042): n is a, c, g, or t
  misc_feature (1565)..(1565): n is a, c, g, or t
gctggctcccattgacctatcgccgcagggcctggcactggtccatacggagattgatctcggtgaaatacctgtagctggtcagtgtctcaccctagagtatggccatgtagaagatccgtgtttcagatcgaggcccattactcgtggactcgttgtctgttgccacttcaggcaccatggcgagtagcaagaagctgctgcctgcagtgcttccttcttatggagtgttgcgacatcattaggcgctcccccacacatcatgatcgcgcgctcatggtatccntcacaaggntatccacacnacctgcacaagcnctgtgatatgtgctacctccggggtcctggtcccaatagacatgatcctccacatccccatgatttgtcagataggtcttgtgcagtcgcatgcattggacattgccgtgtcaagcgttatccagatattgccatagaggatcatatttggtcttagatgagcgtagcgcaagggcgccattcaatttgagcagacgctcaacacgggcatactggtagcgtaacactcattcgcttaaagttagacttatgccatttcgcttaataaatcgtctcatcaaaataggacttcctcttttggccctatttattctgcggaattgggggtcccgaacgtatgtgggccgaaaggttccctataatgaggaaggcccctattaaaaaaaagagtcactatagcgcgcctacccggctaagttaattcacgttatagacactggaagccaatgtgtgttgtctcaacacacatttggcgccttggccaatttgttatgcgcataagaccgcattttttaaacaacgccacattggttatggaaagcatatcatccaagagggtctacccacaacncgctcgcggaatagcggtccctttaggaagagaatacgcgtcgcgtttacgagtggcgaaacaaacattggtagcgagtaccgagccgatattgaggggttctgagcattcgaaacatataggataagaagcatgttaggttaggcccgtttnttacagaggttgggcacagttggggggagaagcttggtttaatcagatgacgccatattcccatttgaaggtaggcttcagaaggcatagtttcaatacattaacactataaattcaggactggcgtgccacacgtggaggtttaggcacagaggaaagaaaagcattaccgcttgacttgagacttccctaaggacaaacacaaacattgtgagcgttggtttcttaacaatgtggacaatgttggtaggacatacagtactaggggcgactctccaacggttagccacacacacacctcgttccgggagcaacgaaatcagtagagaacttcaaagcatggcaacaataggtaacacgaacggagagcccttgagggcagaaacactgggggccagccgcataattgaaggacaaactgcttaccgggagaacagacggacacacagacgcccctgtagcaccaacacgatgtacaaagggaccttgcgcgggagagcagaactaggcagagggacgccanggaagacgagcgagcgaacaaccttgagaaagacagccgctacgagacggtataacaaccacgaggccacacagaaagacaaacggcgatcacagagagtgaacgcaacaccgataccagcccgcggacaacacagacagcaacacatgcagaacgacacgacaacagaagcaggaaacacagccgaaacaacacaacatgaagag

SEQ ID NO: 720206 - DNA, 185 bp, Homo sapiens
ggatgatataccagctacagctagataccttgcttctgctaaatgagaagtgtattgtgtggcacgaaaatggaggccaggaagcaggggtcagagatggaggctgacctggtgcagagagtcacggtgagcctatggtggtggtgaggtggaggacatacgagggcctggtagatatgcctgct

SEQ ID NO: 720207 - DNA, 172 bp, Homo sapiens
ttcttatccagttgattgtcagatcactgctgtcgttgtcttctattcaccatgcttcttctgatatccaggtgaaagactgagagggtgctcaggccagcttttgagctgatctcagcctcggtcaaagatctgtccagattcccctttcccttcaagagagatcttcctg

SEQ ID NO: 720208 - DNA, 277 bp, Homo sapiens
aactgctacccctggggccttttgccccccggggtggggcctcctgcctgcctggggccctgttccagcccccggttttgtgcagggcccctgggtgggttcacacccggttttttctccccccgggggttgccagggcttccaccccgccccccccttttaaagatggggctgcctttttgccgggggcctttttttttgggccagaggagtccccctccggcctttccgaattcccttggggttccttttaatcccgtcccccccccccccccca

SEQ ID NO: 720209 - DNA, 142 bp, Homo sapiens
agaggaccaggaggggtgtagggtgggagggtaggaaagagccagagtagaccaaagtcaggggaggtaatggtgacagatgtaagtgtacatctggctagatttggtactgagctgggctctgtactcatgccctatgggg

SEQ ID NO: 720210 - DNA, 327 bp, Homo sapiens
  misc_feature (257)..(257): n is a, c, g, or t
aactttggaggggacaccatcactcaaaccatagctgtaaatctattccttgagtccagatcacaaattaccaaatgaacacgttctccatttttagtacttttttacctgtaaccctctgtctacctaagatgaatatttattcattgaatgaatcatttaattttggtgccccaaaattctcagtgaaacaatttctggatacctctccatcactaagataatcactatagcagtgtcatattcttcaacttagnacaaatctaaaggctccatttatccctactagaagtgttctgttgtctttttcactctcaaaatatcctc

SEQ ID NO: 720211 - DNA, 524 bp, Homo sapiens
gtatattatattctggtcgttccttgggttttaaacattggaaccaagcagttttcgctcttttaaaagtacagtgccttatttatcctttttgctatctttaaatttacaaaagctaaaaagctgatctatgtgattaaaggcttgtatctctatacttgatgcacatagcacttgtactgtagccgagaagaccaccatcatgcacatcaaaggagctgttctcagcagccagccctgcagcatctgccgcacgaacagatgcccttctatggcaaacccacagcagtgaacttccctctctgtcttgcattgttctgtttagatgatgtttgaaaggctaaacccaaatcattttactggtatgcagaggagtatataattatataaagattactatcttctgttacccccttttaaaaaagatcatgttcattgttggtccctcctctcaccgtttgatgatttgtcatttgagagcatgtattctaaattatgttaccatcggagccgagatctgtcat

SEQ ID NO: 720212 - DNA, 404 bp, Homo sapiens
tcaggatctcattcggccgggcaatgggaccacagagtgactgagatgtaatcagaagactatagacagctggccctccccacaccctacaactacaccaacaggactccagtgtacaacagcaggtgaaagctgggagagctgcacgacactcactctgtctgaggaagggaatttagggaagcccagagccagaggacaaaaacaagggcactgcaaggatcggaatacgccggcactcacagctacaacaaacattacacgtagcccacagccagattaacagaaaacctcacgttaaaggcctgtttacctcagttcccatcaccctatacatcatatctagcttcaaataacttacaaggcatgctagaagacaaaaaggacaacatgtttcttttttt

SEQ ID NO: 720213 - DNA, 167 bp, Homo sapiens
agatcggccgtgtcgggcgatcacatcgaggaggatcaccatcagtactcttggcaggatgaaatcgtgcaggggactcgaagggggacacagaaggacggtgcagtgggcgagaaggttgtgaacgcccttgtatgtcccagcgccctactctggaggggggacct

SEQ ID NO: 720214 - DNA, 609 bp, Homo sapiens
  misc_feature (84)..(84): n is a, c, g, or t
gaagttcggcggtcccgcgggtctgtctctgtgcttcaacagctgttgggagggaacagatccggggacctctcctttccaagncttccggaccggccctccggattttccttctccgtgcttggaaacccttccggggaaccaatcttctcgggccatcctcctggcattccgtgggacctgtgcacagcaaccgggtataaatggtggagtaaggcatcccattctcattgtgacccagaagacccaaaagacactaagttggaaacggcgtttccaccccagaagggaccacgttccaccggggcattccacagaggaacacattgttttaaatttttcccacaaaagcgcgtggaaaccgcatgtgtgttgcacacaggggcgcaccaaggggccgcccgtgtgttcacaaaaacagcgagaaggtcccccctgtgggggccctcccacaaagtctgtgggggggttacacccctgttgtgccgggggccctttcgcataaagaacttaaccttctctcgggggcctataatatttgcggagcggcgattgagtgtgcgctcctggaaaggccgtttgaacccaattatcttctccgggaaaaat

SEQ ID NO: 720215 - DNA, 750 bp, Homo sapiens
  misc_feature (32)..(32): n is a, c, g, or t
  misc_feature (61)..(61): n is a, c, g, or t
  misc_feature (65)..(65): n is a, c, g, or t
  misc_feature (79)..(80): n is a, c, g, or t
  misc_feature (86)..(86): n is a, c, g, or t
  misc_feature (118)..(118): n is a, c, g, or t
  misc_feature (120)..(124): n is a, c, g, or t
  misc_feature (137)..(137): n is a, c, g, or t
  misc_feature (167)..(167): n is a, c, g, or t
  misc_feature (203)..(203): n is a, c, g, or t
  misc_feature (274)..(274): n is a, c, g, or t
  misc_feature (313)..(313): n is a, c, g, or t
  misc_feature (345)..(345): n is a, c, g, or t
  misc_feature (384)..(384): n is a, c, g, or t
  misc_feature (396)..(396): n is a, c, g, or t
  misc_feature (423)..(423): n is a, c, g, or t
  misc_feature (437)..(437): n is a, c, g, or t
  misc_feature (454)..(454): n is a, c, g, or t
  misc_feature (464)..(464): n is a, c, g, or t
  misc_feature (479)..(479): n is a, c, g, or t
  misc_feature (604)..(604): n is a, c, g, or t
  misc_feature (624)..(624): n is a, c, g, or t
  misc_feature (663)..(663): n is a, c, g, or t
  misc_feature (668)..(668): n is a, c, g, or t
  misc_feature (724)..(724): n is a, c, g, or t
atgtcagtaaataaagtaaaaacagaactggnatcacacctctgtccagcaggcacttgtntcangtgaggcagttttnnaaagangctcccaggagcagcatctcaggacacctganannnnnggggctgcaaggnacacctctgtgtgcacacgcctgttctgtnctggagatgagctgtcaccttgaggtggcgtcagancttgactctggcttgggagccccaaggttaagggaaggttaagacatgatcaaggtgcccatgagattgtnacagggacatgctgggtttctgtggcttgactgcttggntgaacatctcatttttcaatcacacagttgcngttcagataggcatcaggaggcttggtctggtattaggnactgaagatgcngcccaatccctgaccagaacggtagcntcaaatgccttgtngtttccaggtggctgtngtagttactnaggagttctttagtntgttctcgtgaacaccaggttatgtggatggcaccttatacttttcaaagctctttcaatctgtccgctcattctcttctaggcattgtagcttataccccttcctctcaccgacgctggtttanacctgttaagttcttgatcntcacttctgctcccatgagttcttgcaccagttcctctnctgtngactttacctgcttggcagtttggcccatgttcattgcatcattaacccggttttncaggaagcgccaagtgttctcaaagt

SEQ ID NO: 720216 - DNA, 280 bp, Homo sapiens
ggagggtgttgccatttacagaaatcaggagatgagacagagaatatatgcaagtttggttttgaatattagattgaggggcaggtgggtagttgaggtagccatatccagtggacagtttaaaagctgggtctaagattggggccaggttgttttttgatatttagaaggtcattggtgactttagaaagtaatttcaggagagtggtggaggaggaagccatgtcagaaggataagaaatcggtggttgctgaagtggaactgtgggagtgggaaggg

SEQ ID NO: 720217 - DNA, 908 bp, Homo sapiens
  misc_feature (2)..(2): n is a, c, g, or t
  misc_feature (67)..(67): n is a, c, g, or t
  misc_feature (104)..(104): n is a, c, g, or t
  misc_feature (126)..(126): n is a, c, g, or t
  misc_feature (145)..(145): n is a, c, g, or t
  misc_feature (219)..(219): n is a, c, g, or t
  misc_feature (252)..(252): n is a, c, g, or t
  misc_feature (263)..(263): n is a, c, g, or t
  misc_feature (269)..(269): n is a, c, g, or t
  misc_feature (279)..(279): n is a, c, g, or t
  misc_feature (281)..(281): n is a, c, g, or t
  misc_feature (285)..(285): n is a, c, g, or t
  misc_feature (293)..(293): n is a, c, g, or t
  misc_feature (295)..(295): n is a, c, g, or t
  misc_feature (302)..(302): n is a, c, g, or t
  misc_feature (306)..(306): n is a, c, g, or t
  misc_feature (310)..(310): n is a, c, g, or t
  misc_feature (314)..(314): n is a, c, g, or t
  misc_feature (316)..(316): n is a, c, g, or t
  misc_feature (336)..(337): n is a, c, g, or t
  misc_feature (340)..(341): n is a, c, g, or t
  misc_feature (343)..(343): n is a, c, g, or t
  misc_feature (366)..(366): n is a, c, g, or t
  misc_feature (432)..(432): n is a, c, g, or t
  misc_feature (442)..(442): n is a, c, g, or t
  misc_feature (454)..(454): n is a, c, g, or t
  misc_feature (461)..(461): n is a, c, g, or t
  misc_feature (465)..(465): n is a, c, g, or t
  misc_feature (520)..(520): n is a, c, g, or t
  misc_feature (588)..(588): n is a, c, g, or t
  misc_feature (682)..(682): n is a, c, g, or t
  misc_feature (905)..(905): n is a, c, g, or t
gngcgggtaacaacgggatggctaggaagctacatcacctatttggttatgaacacagcattttcanatggctgggggaatagatgccacttcccactcaaganagggatttgctcagcgggaaancaggtaataaaggcagcanatcctgcactttgaactgcatccgtctcatcctgcagccaccctgtagctcaaagcacagttctggagcctatnaagtccaaatctcaatctacccttgagtcagcnaagccttaagnaaaaantccctcaaantntgtnttcctgtngnaaataangacngccncacnanaaggcattcgctgggccggnnccnntntccgaggtggcagtgtgcttggnctccatttgcctagcccgtgcgtgtgttcatcactggcagcggtgactgcgtgctgcttggggganagcacttganctgcctcaaaanaccctgntaancggaggacacttgcatggatggaagcaggaccgaggcaccgtgttggtccctgtnaaactctgggtgcactgaactttggggaggggtggtggcacagacctgggcctttctactctcctggnacacagaaataagcgctcccacttcccttctccactacggtgtttctctctggtgtggtttgggtggaagttaccagaaacgcaaagccctggncactgctacttctcctggggggagaacagatttgtggcctgcctttcgccaggagggctcctggccttgccttgctgatcggcagagacttgctcctcaaagggaaggggtagttggtccttctgagccatgtttccaacccatctggtaggctggtccctgcccgctctcactgcagcctgggccgcttttctctggcctgcatggaaggctgaccactggntta

SEQ ID NO: 720218 - DNA, 201 bp, Homo sapiens
gggcctggctgggtggggggaggcctttctgggaaggcgtttggtgcaggcctgtgctcactgtggcaccagcaaccctgggtttccctctttgttgctcccccgaaccccggggccctcctgttttcctcaactgtccctccttaccccatgtagctcgatccgaagccggggtgtcaattaacctgttttccgtgcgga

SEQ ID NO: 720219 - DNA, 480 bp, Homo sapiens
  misc_feature (313)..(313): n is a, c, g, or t
  misc_feature (323)..(323): n is a, c, g, or t
  misc_feature (362)..(362): n is a, c, g, or t
  misc_feature (436)..(436): n is a, c, g, or t
ccaggtgtaatgggcacagaggggcatgcctctggagggtgtacagccaggtggaatggacacagagggatgtgttctccggaggtgtatggccaggtgttatgggctcagctggggggaatctcaggtgtgggatcaggtgagggggtcaggcaagcttcatgaaggtgagttgatctaatacctgaagttcttcaaggtctcgttctattgtttccgctggtttctggtcatggtcctctctgggggttctggagaacgggcaggatgtgagtgctctacctgaaggcaccctggaggagcaggggtgggnctgtcacagnccaggcagaggttggtagaaacacagttagcaccctganttccagaggtccagtgagcaggagaaggtgagtgcagggcctagaaggttgtgttggagactctgagacttctngctttcatctttagctcccctgcaagcttggaaccactgtgcac

SEQ ID NO: 720220 - DNA, 269 bp, Homo sapiens
ctagaaggaaataccaaaataccattatatgaagagcagttgtctcaggttgggggatttcaggctagtgggtttttaaattttattgtttattacttccctgaaacctccaagtttcttacagcaaacaaacattacttttaaaatctagggccagcgtggtggttcatgcctataatgccagcactttaggaggctgaggcaggaggattacttgagtccaggattttgagaccagctgggcaacatagtgagactcccatttctgc

SEQ ID NO: 720221 - DNA, 262 bp, Homo sapiens
tagaggatccctgagagacgtgtgcaatgccttttcttggctatcatttgggatgtgaataattcatttagataggtccctttggacagactttctcgtttttcactaaaaagaacatatttttggtcttttaagggccatacccatggcatatgggaagttctcagactaaggggttgaatcgggagctgcagtggctgacctacaccaaaaccacagcaacgagggatccaagccacatccatggcaacagggtctctca

SEQ ID NO: 720222 - DNA, 225 bp, Homo sapiens
ttttgtaatcttgctgctaatgaacatatgtatacatgttatttaaaatagatttatattcctttgggtgtatgcccagtaatagtattgctgggtcaaatggtatttctgcttctaggtctttgaggaatctccacactctcttccacaatgcttgaaataatttacaatcccaccaacagtgtaaaagtgttcccttttctccacaacctcactacatgccat

SEQ ID NO: 720223 - DNA, 336 bp, Homo sapiens
tctgacgggtctctgttctgtagcccctattgaaatcatgtgatgtgagacagactcctaaacatggaccttgattctaaacctgtgccagtctatagcctctgcctcctcaatcagagctcaagccaaacgcttctgtcctctttccttctgcattaaccttttgctgatcctcacgggccatctcccccaacactccctgaacttgaggtgaggcgatgtttggactagagcctgtatttcctgttactggcatgatgggggttgttgctagactatgctttagctctttgaggctgattgtgaacaagtgggactagaagggcccagggggaa

SEQ ID NO: 720224 - DNA, 132 bp, Homo sapiens
ggtcagttctatgatggatccccccgctgtaccccatttgctgcgatattggtactgtgccctggtgctgagcatatacaccactctaccccctggattttcaatgggccagctgatgagcttcacctggac

SEQ ID NO: 720225 - DNA, 1343 bp, Homo sapiens
ggacgcgtgggcgacccacgcgtccggactccgtctcgaaaaaaaaaaaaaaagagttcttccatgctgacgcccccatgtttcgtcatgtgggttgttgaaccatgtgagaagttttgacaacagccttcaagattcattcagcaatgtgcctccgtgcaccaccaacgtgcttatagcacccctgtggccagggttcattccatgtgacaactttgggctactcgtggggaaagggacttctattgaaccaacaagtctcccagtgcccattaactgtggcaacccaagaaagaactgtggtgcgaagtggcccctctccgggggaaacactgtgggtggcgtgtgaagtgggccagacgggggctctcttcccagaaaacaatcattcccttggccttctacgtgggcgcgctggccaagggcttggtggtgcgcaagggtcattcccttggagcttgagaacgggagaagcgcctcaacttgggcattagggcctttccggtggtccccaattggccaaacggtggtccagtgggtgggaccttggaccttgccggtcttaagaaaaaccttggccaacattattcgattgacattcaaagaagggtgggtagaacgcagggcgtgtcggaggggcccccttcaagggggcgcatccttggggcattaccacttggaggccaccagggtggctctccctcggacctttcaacagcggaaaccaaattccttccacctttcgacgcttggggcgggcattgccctcaaggaccactttggtcaaagctcaatttcctggtatgacaaccgaattgggcgcttcacagccaaccagggtggtgtgggaccttcatagggccccaaattgggcctccaaggcagttaaagacccctggggaccaccaaagcccaaggcaaagagcccaaagagggaagcagagagacccctcaattgctgagggagtcccttggcaaattaagttccccagcccaagttgaaatttttcgccttcttaaaaagctacccatgggtaaaccccttgaatacggggaggggcgccgagggaaagcggacccgtttggttggtgccccgcaataaacgtccccggtgtgtcaaccaaaaaaaaaacataaaaaaagacaaaccaaatacgacaatactatacgaaaacacaaagcgggcggggggacgaaaaaaataagggggaccgaatacacccctattatagaaggccactaacgcagtaaaaaacagagcgggcaaaatagggagaaaaagctgcactaagagcctttgggcaaatccacacatcgacaatatttatacggatgggaaaaa

SEQ ID NO: 720226 - DNA, 177 bp, Homo sapiens
aaactcacgcagggaagtaatgtacgctgaggatcctcatgaatgctatgccaaagtgttccatgaatttaaacctcttgtgaaagagctttaaaatttgataaaacaaaaccgtgagctttttgagcagcttgaagagtacaaatgctaaaatgccttatcagttggttatactaa

SEQ ID NO: 720227 - DNA, 242 bp, Homo sapiens
caaagtgctgggattacaggcgtatatcattatttttgagacagaatctcatgttgttgcccaggctggagtacagtggtacgatcatatctcactattgcctcaacctcctgggctcaagcaatcctcccacctcagcctcccaaatagctgggactacaggtgtgccccccgcccagccagttgttaaaattttgtagagactgggtcttgtttggttgcccaggttgatcttaaactcc

SEQ ID NO: 720228 - DNA, 255 bp, Homo sapiens
atagctcactcacatggacttccgtcatgaaatgcctgcacgggtatcctcgtcttatcagcgcgtcggtagggacgcgcggcaatgcccgcaacttgcccgccgatgttcagtgcatccagtatttattcaatttgatcattcccaagatggggtttgccttgctggaaaacggcaagtgcgacggccagttggtgcaatgcatcagccagtatcagtttcgccatctcaagtacgcccatgggtgtgctttca

SEQ ID NO: 720229 - DNA, 369 bp, Homo sapiens
gctatccaattttagaaaccacttgccaaaggaatttgtactcattctcagtctcttcggtcaatttcgtatgacaaagaaatttgtgtcattccattctctaagtgcctatattgagccctgttattttgagacttcctcatatgcttgaataaagccaatgcttaccaaaatccaattgtcatgtctcactggacccagccagagggtacagaggcgcattaagcgtgtttggaattcactgaaagtaaagccaccactttcttctgtcaattgtaaatacatatattttcttctctctcttttttctcttttctcttttttttttagacagagccttgccgtgttgcacagtctagagtacagtgg

SEQ ID NO: 720230 - DNA, 671 bp, Homo sapiens
  misc_feature (573)..(573): n is a, c, g, or t
agtatgaagacatctcttcatcgaggactaacccctacagcttatgcaatgagtactgaataagccagagtttcttacctaccatatgtggccattaactttttgtcagcatcagaattggcaagagctggtttttattatatagggccctgcgagatacggatagctctgctttgccgtgtagggtgggacagtcttcgagtaagctgaggaaaccatagaggtatgatcgctatgtcatgagacatccggaggcgttttcccaactgtaccatttaggggataaattctctggaaactctgaggtattagcatctgtcaaatctgaggcatgcagacgacatgcagactctgaatgagcagacattatatgtacgtggccgtctattgtcacagttcagcctgagcagcttgcaagtgctggtcagattatgtgggtcgcaatgatgatgtcaaatgcttttgttgtgatggtggcttgaggtgttgggaatctggagatgatccatgggtagaacatgccaagtggtttccaaggtgtgagttcttgatacgaatgaaaggccaagagtntgtgatgagattcaaggtagatatcctcatcttcttgaacagctgttgtcaacttcagataccactggagaagaaaatgctgacccaccaattattca

SEQ ID NO: 720231 - DNA, 401 bp, Homo sapiens
gggatgcgtgcacgaggtaagctggcctatccctagttctgtgcacccgccatgagggcctgatcctgttcccaagaggagctctcagatgggagctaatagatgaattagcaccttcctgcacgtctgggccagcgctgagttgggaaatggccttcagagttactccggggcagatcaggaaatcctggccagcagaacagacagtctgctgtagggtaaaccttgtaaaacccaggagcctgcagaagtgacagtcattaagcagaatcctcccccaaagctgcagagaaatgtgactttgtctctgacaggaggtgggggaatgtgggggtggcaggatttatataaatgtgtggtgaggctttgggggcttcacagtcagggcctcagcagcaacc

SEQ ID NO: 720232 - DNA, 227 bp, Homo sapiens
atcaagctgagcgggccccgcgcgccttgggagctgaacaataaatgcaccaagttgcggtcggccgtcgagcgtatcgcggcgcaacatgcgggtgcgccggatgccgtaggggcgttggtccggctgctcaatgtcagcggtacgagtattgaatggggttacctcaatagcggtgtgcacgacgctcagcgcgatcatgagtttgatcgggcgacggtaagaac

SEQ ID NO: 720233 - DNA, 157 bp, Homo sapiens
  misc_feature (120)..(120): n is a, c, g, or t
gctgggatcagtgcgtgagcactgaatctgtcgtagcatatcttatatacatgttatatgccagccaggtcccatgctgaattcttcatgtatgatctggccttcatccgcagcaccatnttacacctattgcctgtggcttcagacacatctagtt

SEQ ID NO: 720234 - DNA, 310 bp, Homo sapiens
cagtccccgtcccaatgagaaacaagaaggagccccctccacatggattcccccctgcaagtggacagggacattcagtcctgcactgttcccctgggtttattgatgattcctgggtgcccccccatcctttttgatttgtgagaaacaggtaagctgctgtgacttccctttaggacaatgttgggtaaatttttgaaggaccccccgaagccctttatactgtgtttttttccccctttcacttttggcttttttatgttgctttcatgaatggaatggaaaaaaaatgactcagttaaggccccca

SEQ ID NO: 720235 - DNA, 144 bp, Homo sapiens
accgtatagggcgatagaaattgaaactggcgcaatagacatatagtaccgcaagggaaagatgcacaattttacccagcataatacaatagcaaggactaacccctataccttctgcctaattgaattaactagaaataactt

SEQ ID NO: 720236 - DNA, 845 bp, Homo sapiens
tgcgcataccagacttcgctcgtcactcgtgcgcctcgcttcgcttgtcctccgcttagcatgtctgagccaaacccgatattggctgagatcgagaaattcgataagtcgatactgatgaatacatagacgccagagagaattccacctgctcttcctataggagaatagcgattgagcaggtagagcgctcacgcaggcgaatcgtaatgaggggtgcgcgccgttcaatatgcactgtacattccacaggctatagccttcttatcttattttcttttatgctgtataacttttgtaagtatgcaaaacgtagtgtgagtggatccatgtttggttgactgttctgtcccctttcactattcaaatgaagctacctgttatcacatcgtagacgtgcctgtcgtcctgcctcttcgcacatctgtctaatactaatctggcttgggcagggaaaggacagaaacttgcatgttggtgaagggacagaatgtggggtggaaagacatgtgcgaggtgtagatcgactagtgaaggatctagagtaagaacctaggctgacccaaaggtgtcctgcaagagctgttagtgcagctttactcagagtgccatcgttttcctgggtcccagatgacttctagtctatggggtagtgcccagaatgagttgaatatgggcatgtccttcggttcatactcctttgagtaacaaagaacaatgaacaacctttaataaccgtactaggtggggaacacactaacataccctaaacgtcaaaatgcatagaaggaaaataatacaacaaaaagaaatcaagaggtcccacaccaaacaaaaatacacag

SEQ ID NO: 720237 - DNA, 809 bp, Homo sapiens
gttgcagtgagccgagatcgcaccattgcactccagtctgggcaacagagtgagattccgtctcaaaaaaaaaaaaaaaaaaagggaaaaaaaaatagctttatacctctttccttggtctcaaccggccatgaaatttcctggaaacactccaaatttcaggtggaattaatcttccaaaacaaattttataggtataaaatattttactctcttataagtaataggtatacttaaaaaagcgcctcaggggtatatttatcttctaaacaggctacaatccaggtggcagcttactttacccaattaatgtcctctagtggagaacaacctagtggcctattttcactggctgggtgtatgcctcagtggcctaaaacttgggcggtgccaaataaattattttccgtagattttacacctggaatttggtaaaaacccattccgtttttggtttacaattggccaaaaattctcaaaaggcgccctgtattttaatgtaatcccttggacaatcatacatttaatttggaaatttctcagttatggacgggagtgggggggggctttagtacataagtactcaaatatttattaaaaccctcaaatattgggacttggattttacacaagatctttcccttttctacaagttattttttttacaaattcatgggggttatctcctaaataggtatatataatgggttctagaaccatgtttcaaattatggtgctttatcagaatacatggtataaatatatcccaaacaatttcatagttttcaaagactaatttctggatgaga

SEQ ID NO: 720238 - DNA, 195 bp, Homo sapiens
  misc_feature (123)..(123): n is a, c, g, or t
gttcgacggaagcatggtctttgtaaggagtgaaaggagtcatgaagaatgatgacaaagtgctgcaacccttccaggtcccaagacgactgaagaccactgccgtgctctttacctacgcantccttaatcaggggagggggctggtcccgggcaacaagcagtctcctaggagcagaaggtgatggaggggca

SEQ ID NO: 720239 - DNA, 974 bp, Homo sapiens
accagtgttaggaggttaccctctcaatcaagatactcaatgcatttccactacttgcactcattttatgagtgcacgcatgaactatgtacagaagagcgacatccatatggagatcgcagtctttccttatgtaatatgttcctagatgaaatggccaaaccaagctcgaaatctcatcactgatattgcacagaacagtgtaccttagtgaccagttgctacccaagcattgtgccaaaactccatcagtcacagcagtgaataagcacatcaaacaacagcagactggtaagcaaaggggaactgaaacagggagacaccaggtgtgagagcatgaggcaacaaccccggctggttgtgacacacttgatacaatcgcacgactgcactttctgagttatgcttctctataacattatgtaccaaacatggtggtactgggaacatactttacccacgcgaatctttcgacttctcatctggaaactacgctttaccaagtcactgtgggatgactatgtatcatcaagccacacaggaaattgccaaaccttcagacatatctaacaacgtgtcaagagcataatgcacgtagtccagtcaatagaacaactctgtgcacgatgatactacagagtattcatcactgtgcttcttccacaccaccacccacatgtagaacagctctggagagcccagccactccaggtctattccgcacattgctaccggaacacttgtttagcaccgttagcacggccacttagcattttcccgccagcacaggcgttgcgacctcctacgcgctgtatccatccatgtcgagacttcggcacccaaccgagcacaccactccaggcgatggataccatccgcagacaggattataacggacgcaccgcggcaagctccacagcaccacaccaacgtccagcaatcccagcgccaagtcaagcacctggtccatcaca

SEQ ID NO: 720240 - DNA, 417 bp, Homo sapiens
tcacaagtccggattcagaccttgtttagacaaggtagattggcgtataaaatagaaacgcagtgactcatctcttatatggtgttttgtagccacgtgtccagtttatagatatgagatggcaaggtctagaaactctgttaaatatcaatgttcccttccaagaagggaaaacaagttccaattttgttttaaacaagaagtatgtagtcttagagggactgggcatgaatggccatatgtgtaacctgtaccaaattaagctctcctaaatttacagacgacaaggaactgaacccaaatgtctaaatgtacaggctttgctgtactacatttcagctaatattggagaacgtgatgacaattttaaaagttgctattaccaattctgtctactgtagcaagataccttaagtt

SEQ ID NO: 720241 - DNA, 302 bp, Homo sapiens
ggtcagacacttgtagagataatactggctcagccggcctgcagtggttcatgcctgtaatcgcggcactttgggaggccgaggtgggtggatcccttgtggtcaggagttcgagaccagcctggccaatatggcgaacgcccgtctcttctgaaaatacaaagattggctgggtgtggtggctcgcacctgtaatcccagctactcggaaggctgaggcaggagaaccacttgaaccagggaggcagaggttgcagtgagctaggatcgtgccactgcattccagcttgggcgatggagca

SEQ ID NO: 720242 - DNA, 821 bp, Homo sapiens
ggctaggtctgaggctggtttaattggccgagtgtgggatctcgtgcggttgcggtgcagtgaggccgggcagtgggtcggatgggaccgacggactgcacgggctgggcgtgctgggagccattgagcgcggcccttggtgcccggggtgcgctgggcctggtggtagtgcttcccacggcactgacatgatgacctgtgttgcgaggctcccttgggtgctcgtgctttgtgaccgcgatggggctgggccctgagcctcctaactggggctgctgtctgggtgcgtgtagcttggggtgtgtggctgctctcccccctgcccgctgactcggagcacccccacccctccccttgcctgggccaggccgtgggcggcgttgttggcgtggggccccggtggaggcccggccttgtggctggtgcccgccatgaatgggcttgtcgctgagtgagctctgcctgcctcgttctgctgcccggccctgcccctggcctgcatcagctgccaaggctcgccattccttgcctgcggtaggccacctactccctggttgcctgagcccgagccggggccttgttgttggccggtggcctgcccctttggggaccctgagagcctcctcggtgcgcaacccggggcgctggaagctgcaccttgactgagcgtgccgagtttcccagtaacagccagcggcgagctggacaccatcgaggtcttccccagcgagagcgccggtggaacagagtctcttgcgtgtatttcgttgggtcttgtgcggttcccggtcctcttttcgggggaatcggggctgggcgta

SEQ ID NO: 720243 - DNA, 161 bp, Homo sapiens
ggctgaggacgcacggagagacagtagacagaatgccagtgtcggaacgcagaatgtacgaacctcgcatgcacgagtagttcacagtagctacgctagtctgacctcgcgtcgaaggttcgctgagctcggtatgatccgtgcgatcgcccttgaccatg

SEQ ID NO: 720244 - DNA, 114 bp, Homo sapiens
caaagcccagtataacaggggtgagctaggaaaggatgaagccaaagtcgatgtaggatagatagtggcctatctagcgtaccacaacaggctattcccactagtagtctagtc

SEQ ID NO: 720245 - DNA, 468 bp, Homo sapiens
gcatagcatggtggatgttacgtgaacacatggttctcgtatggtgacctggacaggttcggggaaggagcacgagctagtgggcagggggacactgatagttctcttgggcctatttcaactttgatatgtccatgggacagccaagtgcatggcttcaggaggaataccagtggacaattcatgatagatccattaatgaaacatcaaactttgaaaattattagcatattgatgatattctaaaccatgctgggatatctgcatagaaagagaatttcgataacgaagataggaggatttagatagaaccctaagggagtccaacacttaggggcagcctagcaaataagactgacagggaaagatgggagaaagtgtggtgtcatggaagctgggaggatcaaggcatttcattaaacaagacagagtggtcaactgttcaaaacgttgtcaagagttgagaag

SEQ ID NO: 720246 - DNA, 279 bp, Homo sapiens
tggacaaacccttgttctgttgcccaggctaaattgcagcctctgcctcccggtttcaagcaattctctttcctcagcctcccaattagctggaatcacaaacatgtctccaccaggttccagctaactttttatcctctggcagagacgggtttcaccagtgtggccaggttgttctcaaactcccgatcctaagtgactcgcctgcctcggccccccaaagtgctagattatagcccacccaattccttttttttaaaagtgctgtccataaggtgc

SEQ ID NO: 720247 - DNA, 990 bp, Homo sapiens
  misc_feature (163)..(163): n is a, c, g, or t
tataatctatcggataggccatcttcatttctaggagtactagtatgatcggtgacctctcattatcgtcccgtactatgcctatgaggcataatttaatattgtcgatacacacagaactactgtcataaacctcattaccaaacctctctcattaggcgantgattgtcgacccttaatatgcgcttatctagggcatataggccggcattgcaatatactgggggggagggccacatggcctatgtgagatctgcgaatcgtccaatactattcattgggcccgagcatatagtgtatcataagccttgaatactacatgcccaggtgactaaagagacttatattcgaacacgacatcacacggtatattcactatctcacttgtcatgacttgggtacccataaaggttccatggcatctttgaggtgtgatgatgccggcgcctccatgactatgtgtatcaagacatacatgcgttctggctcatgtttcaaagctgatgcgaacatcctactattgtagactgttcgcctcgcccttgggacatccgatcccctcttactgccacgactctactcctaatgcctcggaaatacctatacctgacatttgttcgtaaatgggcacggcccttcggtgacgctcagacattggcaaagacaacctaaattataagctctgcgaaagggagcaggcacctctcactatcattaattatttaatgttcgaaaaccgggtccaagtatcgtagttaccaagttgtcttggccaacgacaggtgttcgcagcctggaccaagtctcacgcgaggcggcagcgggccactggcctgcgaccgctggattcacaagcacacccaaacacacgcgcctaccgtggaccatggaccacagacccaagcgatgagacccgtgcccctgggcggaatcaacctccggctctgagacccacgtagggaccaggagagcacacgcgacacggaacg

SEQ ID NO: 720248 - DNA, 124 bp, Homo sapiens
ccgtgctcgccgcctgcgacgcggctcgggcggggctggccggggccgcggtcgaggacgccgcggccggggtcgccgcccggtgccgggtgctgttcagcgtggagaacctggaacggctgcg

SEQ ID NO: 720249 - DNA, 1615 bp, Homo sapiens
cgttttggttgtcgttgttgctctctttttccttcttgtttgtggtctgctcttcgtctctctcccccttgttgttgttctctgcttcctcttatgttttctgttttcctctcccgcggtcgtttttttctcggtttggtctttcactcttttttttgggtggttcttttcctaacttcctgtctgtcttgtgtgctctttttttctcttttcattctgtcgcttgtgtgtatggatgtttgtcttcgttccttttattatgttcctgtctgtgtgcgtgcgttcttattctcatcgatgctcttctgtgttggtagtagctcgctccgctccctgcatctatcttgtcgtgtcgttcactctcttcttgttttccatcctcttttcgccttgtggtgcgctctctgtgtgtcgtttcttcaactgccgtttgtgtcttttccccgtttgatttttgtggttgttcatacatttctatcctctgctgtattttttgttttgttgttttcttcctttcgtgtcgtcgggtgactccctttctcttttttttgtggtgtttctcgatcctctctctgtgttctcctcctcctgttgttgttgttacctcctcctgttttcgctctctctcggtgggggctccccctcctgctgtgttttgcctccgctctcttctattaccctcttttgtttttctttgttttcgatttctgtcttcccccccctttattgttggggtggctcctcccctctctttttgttttgttgtttttttttttatgtttgatttattgtttccctcttgtggtgtgcgctctgtttttttccgtcgtccctaatttttgtctcgctttcttttctgtacggttgggttcttctcccccccctttctatcttctcctcttctctctctccacacgcatcctctctctctcgcacacacctcccccacggtgctccccgacgggggccacacaccggggctctcactaaaagccacaccgctctctcccctccgccacccgcgcggtagagaataagagaggtatcctccccctcactagagagagagtgcgcacacaccgctgcgccgcgccccctcgtgtgtgggactctttgtgtggtcgttccctcccctccttcctctctccctcctcccccctctccctctcctctctctctcggtggctcccccacatatttttttttgtgtggtgggctcccgcggcggggtgctccctctgtcatcccctctcttccgccgccccgcggggcccccccgcgcgtgggctcctcttgttatcccccttcctccctcttgttgggttccccctcctctcttctcttctctttatctccccccgttttctcgcggcggccccccacagcgcggggaacataaagggcgcgcgggagctcacagcggcccccccttttacccccccccccccgcgcgagacataaatcaaggtcccccccccccccccccaccacctttgccacacccaaaacagggggccacccccgccgcggggccccgcgcgcccccccccctgtggggggggggacaaacgccgcttgtgtgtttataagaagaaaaaaaatttttaacccccca

SEQ ID NO: 720250 - DNA, 169 bp, Homo sapiens
gcgagcttcataagatgagaatgggaagtcaaggggtgttgtgtggttaatgttcgatgttgccagaggtgtgcgagagagcctgccggatgatgaatggcatgaacgcgaggttgctttggtggaggaagaggaggtggcgtggtgggcgggtgtataggaccgacgt

SEQ ID NO: 720251 - DNA, 753 bp, Homo sapiens
  misc_feature (753)..(753): n is a, c, g, or t
ataccaggcctggcacagtggcttgctcctgtaatcccagcactttgggaggccgaggcaaggggatcacttgaggccaggagttcaagaccagcctggccaatatggtgaaaccctgtctctaccaaagatacaaaaactaactgggcgtggtggcatctgcctgtagtcccagctactcaggaagctgaggcaggagactcccttgaacccgggaagcggaagttgcagtgagccgagattgtgctgctgcactccaacctgggcaacagagcaagactccatctcaaaataaaaaaggcttggcatggtggttcacgcctgtaatcccagcactttgggaggccaaggtgggtggatcactacagcccaggaattcgagaccagcctgggcaacatggtgaaaccccgtgtgtaccaaaatacaaaaaattagttgggtgtggtggtacgcgcctgtaatcccagctaccctggaggccgaggcatgagaattgcgtgaacccagaggcggaggttgcagtgagctgagatcacgccaccatactccagcttggacgacaaagctagactctgtctcaaaaaaaaaagaataccttaatacatgttccacctaacttaggatagattagctgtgccaatacaaatgaatcccattcttttccttaaccacagaggtaaccactactcaagtcgaattctcaatgttggtcaacccggttgcttgattagctttgcttacttcagggaaan

SEQ ID NO: 720252 - DNA, 154 bp, Homo sapiens
tttaactagatttgtctccaaataggagactctgcgatagatttaactcatattactacaatagagccaagacagtagatcaaaagatattctacgatatatgctcaagcctacaagcaaaacgccaggccaacaacaagcgtcaccgagctcc

SEQ ID NO: 720253 - DNA, 696 bp, Homo sapiens
  misc_feature (13)..(13): n is a, c, g, or t
  misc_feature (83)..(83): n is a, c, g, or t
  misc_feature (115)..(115): n is a, c, g, or t
  misc_feature (131)..(131): n is a, c, g, or t
  misc_feature (133)..(134): n is a, c, g, or t
  misc_feature (137)..(137): n is a, c, g, or t
  misc_feature (142)..(142): n is a, c, g, or t
  misc_feature (157)..(157): n is a, c, g, or t
  misc_feature (165)..(165): n is a, c, g, or t
  misc_feature (174)..(174): n is a, c, g, or t
  misc_feature (177)..(177): n is a, c, g, or t
  misc_feature (216)..(216): n is a, c, g, or t
  misc_feature (225)..(225): n is a, c, g, or t
  misc_feature (236)..(236): n is a, c, g, or t
  misc_feature (243)..(243): n is a, c, g, or t
  misc_feature (257)..(257): n is a, c, g, or t
  misc_feature (266)..(266): n is a, c, g, or t
  misc_feature (268)..(268): n is a, c, g, or t
  misc_feature (270)..(271): n is a, c, g, or t
  misc_feature (275)..(275): n is a, c, g, or t
  misc_feature (279)..(279): n is a, c, g, or t
  misc_feature (282)..(282): n is a, c, g, or t
  misc_feature (292)..(293): n is a, c, g, or t
  misc_feature (297)..(297): n is a, c, g, or t
  misc_feature (300)..(300): n is a, c, g, or t
  misc_feature (311)..(311): n is a, c, g, or t
  misc_feature (385)..(385): n is a, c, g, or t
  misc_feature (440)..(440): n is a, c, g, or t
  misc_feature (547)..(547): n is a, c, g, or t
  misc_feature (602)..(602): n is a, c, g, or t
  misc_feature (605)..(605): n is a, c, g, or t
  misc_feature (630)..(630): n is a, c, g, or t
  misc_feature (634)..(634): n is a, c, g, or t
  misc_feature (675)..(675): n is a, c, g, or t
gagggggggacgnggggggttagtactagttgaatatgatttaaatatgtctgcatttagatgaacagaacagggtaaaaggnactttgccaagccaagctcaattcctggccanatggggggggggggcngnnggngcccncgcccatttctcggnggtcggtntcggcggcngtnggctgaggacaaacgggctcactatgttcttcacaaagntcatttttnttaagtggggnaaatgtntcggctctcttgcntttccttcngngnntggnatgnggngggctggggnngccnggngctcgggcgcngcgagggcgcatggtgcaggctggcgtgcgcaggtagccaaacagaattccccaagaccttttatttgtttaanatactttggtgtcagcagagtctgagcagacacgttactcatgatgctcgggagnccaggcagggccctgctgagctcttctgaaagtatgtggaactattcaacgcgtggcactaaaagggtacagactcccgaattagagttcattaatgcagttgggcnaccggcttttctgtttagccactggttacttaaggtttccaataaggtttgggcnaanggtcacacgtcctcatagatgaganacantgtaccagccttgagagttacatcaagtgtgtttaaaaacncccaccccatcaacagcagct

SEQ ID NO: 720254 - DNA, 338 bp, Homo sapiens
  misc_feature (7)..(7): n is a, c, g, or t
  misc_feature (41)..(41): n is a, c, g, or t
  misc_feature (64)..(64): n is a, c, g, or t
  misc_feature (179)..(179): n is a, c, g, or t
  misc_feature (334)..(334): n is a, c, g, or t
cagtttnccccccaccaagagtcccctaaccaagggttgancctggcctagaatgaccagaatnccagtatatgggcagaaaccaaagattattgagatttggggagggaagacaaaaccccaatcccaaggaataagaatccacaataatgtgatacaggagctgaaggatgaaatancccagtattagaaagaatttaatgggtctgacagagctgaataacgcaatacaagaatctcacaatgcaatcacaaggattatcagcagaatatactagtctgagggaagagtttcagaacttgaagactggttttctgaaataatacagtctantaaa

SEQ ID NO: 720255 - DNA, 166 bp, Homo sapiens
tatctgaccagaagccatttattacagtaaccaatttatttcttagagttcaaaaccttctgtgagaatgttctctggcctggttggagatccaccttcttcttttttttttttgagacggagttttgctcttgtggctcaggatggagtgcaatgacgtgatctc

SEQ ID NO: 720256 - DNA, 289 bp, Homo sapiens
tgaagcctgcacgcggcagttttttattaacgatctgagggactcctcagtcttggggggtcaccgcctgcaacctctgccaagccctgcgtccagcgagcgtcacagcacagcctgcaaaaacggagttgggcttcagctggggctggcatggactttcatttcagagattcggtttttaagaagatgcatacctaatgtggtcgttttttgtgccaatgacctctaatccacattttatgactggaaactttgtttgtacaacactccaataaacatcttgatttta

SEQ ID NO: 720257 - DNA, 377 bp, Homo sapiens
tacgtcctcacccaggatccaggttctgcagcccagccccccaacttttttttgttgttttgagatggagtctcgttctgttgcccaggctgaagtgcaatggcgtgatctaagctcactgcaacctccacctcccgggttcaagcgattctcctgcctcagcctcccaagtacctgggattacagatgtgtgccaccacgcccagctaatttttgtatttttagtagagacgaggattcaccatgttggccaggctggtctcaaactcctgacctcaagtgatcctcccatcttagcctcccaaagtgttgggattacaggagtgaactgccacacccagccagagaatagtgttctagacggtaagggagatgag

SEQ ID NO: 720258 - DNA, 138 bp, Homo sapiens
cctacgtgcgctgcgtgggcgaatcctgtgccgtgacgctggatcgggcgcgcatcgaagcggaaacgctgcgggttcacggcggtttctgcccgcggcatacggtaaaagtcttgcatcacgatcccgaattggcgg

SEQ ID NO: 720259 - DNA, 1556 bp, Homo sapiens
cttattaaggtgttcccgtcggaggtcttcagaacgggggggggttcgctatgttgcttggcgtcccgagcgtgtgtgtatgtgcccccgcggtggtccgccctgtctgcgacaaggcttgtggtgtgttggggagagtggtggtggcccctgttgttgtcgccacgtacgtcgtcttccaggggagcgccgtggggtcacatgtggagacttggacggattgttgggcggtgatttctacccgggcgagtgatgagtttccgagcgggtgtctcctcttgtggccctcttgtctcgctggagcgcattgttttgccccgctggggggggccgccacgcgttgggggtttgtctgccacgacgaggcgtttgtgcagacaccccccgtggtatgtagagcacgcttgtgtcttgttatacactgggggggggagaatatgtgcgccgcagattgggcgcgcgagtagatttcgttcggcgccctttggcgcacatgagaggttgctttgccgccgtggcggaagcacgaaggcgctttgcctaatgtccgggggggccgtgcgtggagcgccctgaattctgttgtgtagtagcccctaagcaggtgtggccgttggtgtgattttcccctccgttggccccccccctctcggcgaaaggagggttttaattatgagggggaaaacaactgcctcccacttatgggttgagcacccgctcgtcaccacaccgctctggggatagaaaagcgcgctttgggcccgctatagccttgggcacaaaggacaccacaggggcttctcacaggggtagagtatttgccctctgctgtgtgtgagcagtttcggggggcgcgggccacacacggcacttggggttttcgaggcgtattagagtgtggccacagacccccctcggtgcgctgtcacctctgttgggtgagacacagagacacccttttctattgggagccccgggagagcgcgcactctcgctctgtgggccccctcggtgttgacacatggcgcctatagacgtagacgctgtgggtgtgtgcacacaaatatatcacgacagatggcgtgtgcacatgtgtgtgcgcacataacctgtgtgacacacacgtataagagccacgcgtaatggtgcgcacatggcacattctgtgtaagccacacacacaatgacacagcccaccacggttttcacagagcacaaaatgtgttcacaggtgttgagggtgagaggagaaaacacatggtttcacggtgagaggagataaaacacacattctatgagcacacaatgttgtcacggtgagggagaaaataaagggggaaaattggggatatggcacgaatgttgaacttgaggaggttaaatgtgagtctttggggagagaatacacttcttaataagagttatgagaaatatgaaatctgaaattttctaaaagggaagaatttctggcttgggaagtacatgtaggagttaatccctgtgtagactgttgtaaagaaactgttgtaaaataaagagaagccaatgtgaagcca

SEQ ID NO: 720260 - DNA, 154 bp, Homo sapiens
  misc_feature (4)..(4): n is a, c, g, or t
taangacacttaccaccactcttctgggccagacagacacgcaattctcatcttctttaggccaggctcaggtattccacagtcctttctccgttagataccctcaggtccttcctccaacttctgcccctcattaagcattatacttgggtcc

SEQ ID NO: 720261 - DNA, 135 bp, Homo sapiens
agagtcttgctctgtcgccacgagtgtagtggtactagcaatctctgcctacccagattcaagcaaatctcctgcctcagactcccgagtgactgagattgcaggcacctgccaccaaacctggactaatttatt

SEQ ID NO: 720262 - DNA, 211 bp, Homo sapiens
tgcttagtacccgcgtgttcgcggcggcgattggacagtcactccggaacacacacaactcgacggcttcaacagccttggcaccagccagtcaggcagcaagggaaaccccaggccttgttgtgcggcgatcagctgtgcgtcgagctcgttgatgcggatagcgtctttattgcaacagcggcgacacctcatgcctggggtaccgggc

SEQ ID NO: 720263 - DNA, 191 bp, Homo sapiens
cggctcgcggaaaaaaaaaaaaaaaacgaagaaaggaaaaaaattagccgggtgtggtggtgcatgtctatggttcctactcaggaggctggggcaggaggaacacttgagctcgggaggaggtcaaggttgcagtgagctgtgatcacacttttgcattacagactgggtgacagtgagaccctgactaa

SEQ ID NO: 720264 - DNA, 380 bp, Homo sapiens
  misc_feature (24)..(24): n is a, c, g, or t
  misc_feature (48)..(48): n is a, c, g, or t
  misc_feature (58)..(58): n is a, c, g, or t
  misc_feature (62)..(62): n is a, c, g, or t
  misc_feature (76)..(76): n is a, c, g, or t
  misc_feature (109)..(109): n is a, c, g, or t
  misc_feature (142)..(142): n is a, c, g, or t
  misc_feature (149)..(149): n is a, c, g, or t
  misc_feature (151)..(151): n is a, c, g, or t
  misc_feature (218)..(218): n is a, c, g, or t
  misc_feature (233)..(233): n is a, c, g, or t
  misc_feature (250)..(250): n is a, c, g, or t
  misc_feature (255)..(255): n is a, c, g, or t
  misc_feature (260)..(261): n is a, c, g, or t
  misc_feature (265)..(265): n is a, c, g, or t
  misc_feature (276)..(276): n is a, c, g, or t
  misc_feature (280)..(280): n is a, c, g, or t
  misc_feature (284)..(284): n is a, c, g, or t
  misc_feature (311)..(311): n is a, c, g, or t
  misc_feature (325)..(325): n is a, c, g, or t
ctatccaccaggggttggagttgnctttgtatatcaaccgtggaaggnctgttttggntcancattctgtggtctncctgggtagacctgatgcagccgtgtttctgangaaaggaagaacagcttttgttttgtgatatgntaatggnanatgtagtgccatggaatgatgcagatttcattcagatattcttggatcttggccccaggactgcacncattcttccctatantgagcattggtagttancaggntttanncctncctttaattgnaagncttntgaagccaaaaactgtatccaatttgncactgtcccctaanagtacttagcagtgtctgatgcatcacagggagtttgtaaatgtttggataaata

SEQ ID NO: 720265 - DNA, 425 bp, Homo sapiens
atctcattcgtggtcttgttagagctaccatttaggataccattggattaagtttctcctaatctccattggagtagtgatctgtttccatgtctacatcattactggtgaagtttttaacttgttgtgatctttacttcttaatactgtttagttctggtacattcaagttggatgactggtgtttattactattgcaatatgattgatgtgctttatttgatattacaccattactacgactttcaaaacctgaacaatgtgcggtgcttcctttgcctgatgctaatttgctggatattcattccatggctggggctcatacttggactactaaaaggtcgaggactaacaggataactgtcttgagactttggacttcggcctcccaaacatcgtacttcactatctgtaccattcaccat

SEQ ID NO: 720266 - DNA, 379 bp, Homo sapiens
acccccccaggggaaaaaaaacttttttggtgggttcccaaaaaaaggtaggggctcaccccttttttttaaaatttttaaatccatttcccaaagggtccctttttttttaccggtttttccaaaaattccctttaaaaaccaaaaaccaaaaatggaaattttaagaaatggccctttttaacccccccggtttttttttcgggggggaatttttagcgcccaaaattaaaaaaagggtttgggtttttccccccttgaaaaggcaaaaacccaaaaaaaaaaccccctcccaggccaagggtttggccttttctttttaaattgggtttgggggtttttttcccaaaaaaaaaaaaaattaaccccttttttttta

SEQ ID NO: 720267 - DNA, 138 bp, Homo sapiens
accctgaataattatgtaactgcctttatttgaacgtagctacatagctaccagattacatcacttttcagagttagggtaacataataccttgaaaactatagcaaacagcttgacaaagcaagagtacattaattt

SEQ ID NO: 720268 - DNA, 1124 bp, Homo sapiens
gtactcacaaacactgccatttccttacgcagactggcttgagcaggagtaacactactggtctctacacacgcttgcagtaacaacatgccaaacactggtagtacccttggcaacccagctttacttcttgtgcctaagcagaacctgtacaacactagttacaacactgtccttactccacagctaactttcgcccgaatttaacaacagcacaccactctcgctctcttctctacttctcactctccttcggcttctctaaccttcactgctggctagctgcactaatttctcacactaccttcttcctgaatccaaaaccagcgcttcacaacgctacaacaccgttctcacaacttttcaacacttctcctcttctacaaagcaaacctctctacacagctgttaaacaagctctcaacgcccccattaccctctccaattacacgcctggggcttacaaccgcaaacacgggctactacacacacttcttgggcacacaaccaaatttctgtggctctgcgcgccaacttaggctaccctgcaacttctggcccgcttgcacaccccaccgggcacctaccaaactttctactctacttcccaactacacctggccacgcaacacttggttgccccttggtttaaacctttgggcgaaaaccgcttacgacgcgcaaggcccttacacacgcgggaattgggcttctctccctttatctccaagccttctcctaaacgctcaagcgaaaaaccctgggggcgaaaaaccgggcctctcgtttcaacccctaactttcttaaagagcacccccaattggggggccccttcttcttcacctttcacccactctttgggccaatttgggggtttcccccaaaagattaaaaaacattttctctcaatttttcccaacccttgtggtgtaaaacgggcatacactttctctaaaacagttcttcccaaaccattgtggtttccaaagggccctctcttacactttctaacacattgggcttgttcatatcacccctgtggcataaagcccccccaacgtttctaacacgtttggacacacacttctctctcaacacaactttttaacccaaaccacacaaa

SEQ ID NO: 720269 - DNA, 1228 bp, Homo sapiens
  misc_feature (349)..(349): n is a, c, g, or t
agcggacactctgagtgcagcccggtggatctctcagcaagtgtcatcttcctatcagtcacaattgtcctctgcctggatccctgatctccctacacgcctgtgtgtctgctgactgactggctggcgcccgcctgtaagctccctgaggccgtgtcccattgcctagtcagattgttattcatccacgtatggtacttggagcttcatggatgtgacccatacgtcagtgatgtccctctgcgcctgtggtggtgtgctgcgtcttggacgtgattactcctgatgtggtgtgtagaccctacgtagtactacgtgtacctggtatgtgcaacgtcatataccctgntgcggaggcagactgttccacacagtggtgcatttacattgcatgcacataccttcggcgtgggagaacctgttacgaacgtcttactaggtgagtacccttggattcgaataagacatacctactgtgcttccagatgatgattggctaagactgagtatgtacccaaactacatacaatcgtggcctatatgctataaagtgggagtctggctgtacatatatgcaccagttttgaactgaatatggcgagaatcgagtagcatagcaaccggtggagagggctcccatgcgaaaacggagcccagatgttctcccaggagacataaattagcaagccaaaaacagtgtctccagcgcagcgtaagaccggagaaaaaagaccccccgtacttgaccttagagaagaatggagctaggagtcacaaggaacctcttgtaacaccaaggcattaagccactcaaggcaatttctacgtggcactccaggacttgccaaggacttttgggcctttccttttggcgggcctgagccgccccgaatttctaagattctttacacgaggaaaagcacatttatggttctcggcaccaagaaggttgggctccgtaacattcggtttggggggaactttctggggaaacccagaaaaacgggaaccacaaacgcacattgtccgtgagctccttcttgcttcgcgaaaggcccacgtgggggatatgcaattcccgcaatgaaaataagtagatttttttagactctgggaacgaaaaacctttttagcctatccacgccctaaaatcgaattggttgtccagggtttgcgccactaacagggacaagtacggctgtccagaaagggggagtactttcccgaa

SEQ ID NO: 720270 - DNA, 161 bp, Homo sapiens
ggtaagtcacaaactcgtgaggctcagtaccccatatcccaccttggctataagtcttttggaccagatttggtatttaattgacaccttcttcgtaagagaggggaggggagtgtccctagagggggatgtcagagaagaaaactagagtcgtaaccacc

SEQ ID NO: 720271 - DNA, 195 bp, Homo sapiens
ccgctgccgatgcgcattttttcatcgagatgctgggtttgatggatgttgagcggcgtcaggccgggcgcggggtttgcgtggcttcggcgccgttgcgcactttgcgcaatttgccaatttcattcagtttgttgatgtcccggcgcgcggtggccggagagatgtcaaacgccgcgatcacgtccgccacgg

SEQ ID NO: 720272 - DNA, 809 bp, Homo sapiens
gtggtggcacatgcctgtaatcccagctacttgggaagctgaggcaggagaatcacttgaacctgggaggtggaggttgcagtgagccaagatcacgccattgcactccagcctgggcaacaagagtgaaactccgtctcaaaaaaaaaaaaaaaaagatgttttctcattttttctcatgttatctatccaagcactgtcccagtggctcagcaagctcatatttccataagtgtggatttcccaaaataattatggaatacggctatcctatggctactttaagtgtttcgggggcatgtggtgtgggacgtgtttatggaattacccagtatcttaaattttccaaaggaacccttggaagtctatcactctaattgaacgtctgtcactctacattgaattatgtgctcaaattttgaccaactcagctttaagacacaaaaccagtacttttgaaccagggaacacacttgacgagagtttctagttaaaggggttaacacttttggttgttgcaatagtaagttcagtcttcttataatatttctaaatgaaaaatcataggtattggtacccatgttgtgacgattacttgcgttaaaagcaaaagtggtcgtgtgatatgctaaatgtcacttactgattcatatgttaaattcacgccaaacaaatttatgtctgtgccatcccagggtctgtgagtcaatcttttcctgagtacttggattggggataacggggcttgtacctatgcacttttcattactgcactacttaggaaaacgttaagtacaacaacagcaaaa

SEQ ID NO: 720273 - DNA, 301 bp, Homo sapiens
  misc_feature (193)..(193): n is a, c, g, or t
  misc_feature (197)..(197): n is a, c, g, or t
gaaaaatttttgggttttttttttttaacaccggccggggggtggtttttaaaaaacctttttccaaagccccgggggggagtgtgttcccccccccaaaggttttcccccttttttggggcccggggttgggccaaaaagtttttccccaaacccggattccttgaaaaaaggggtttttttggggccaaantggnaaaagggtttttgtgccccccccaccccccccgggccttgccaaatttttttttttttttttgccccccttaccttttttttaaaacccccttgggcccgttca

SEQ ID NO: 720274 - DNA, 199 bp, Homo sapiens
tttttccccccccccccccccttgcccggccatggcccccgttgggggtggggggttgttgtggggggattgggtaatttacttttttcgggcccgggggcgggggtttttttcccttttgggtcccgcccccgggcccccccgaggggcctggttccaaattttgggttccttgattgattgccccctgatggattta

SEQ ID NO: 720275 - DNA, 685 bp, Homo sapiens
tcaaggcaagtgaccggaatgggtcggaagcgcgtcccgagtctccctctgatgccgaggcgaagctggactgtactgccgccatctcggctcactgcaacctccctgcctgattctccatgcctcagcctgcccagtgcctgtgattgcaggcgcgcgccgacacgcctgacgtggttttcgtatattttttttggtggaaacggggtttcgctgtgttggccgggctggtctccagctcctaaccacgagtgatctgccagcctcggcctcccaaggtgccgggattgcagacggagtctcgttcactcagtgctcaatgttgcccaggctggagtgcagtggctgtgatctcggctagctacaacctccacctcccagccgcctgccttggcctcccaaagtgccgagatggtagcctctgcccggtcgcacccggtctgggaagtgagcgtctctgcctggccgcccatcgatctgggatgtgaggagcccctctgcccggctcccagcctgggaagtgaggagtgcctcttcctggccatcatgtctcaggaagtgaggatcatctctgcccggccgccaatcgtctgagatgtggggagtgcctcggccccgacgccccgtctgggatgtgaggagccgcctcttgcccggaccgagaacccactctgggaacgtgagg

SEQ ID NO: 720276 - DNA, 253 bp, Homo sapiens
taggatcgagcgaggagggaggagaagaaggagaagaagccccagaatgcggcagacaagttactcctgggttccagagcgagctgagagcatgggccatggagaaccagtacagtccgacacctgggacagactgctgaaagtgaggtggccctggtagacactagagtcaccagtccaccatcctcagagctttgaactccccattccagaggggcacccacatttttttgaaagactggactggaatctt

SEQ ID NO: 720277 - DNA, 89 bp, Homo sapiens
gagcccgggaggcctgcaggccttttcctgaagaactggggacttggcatcaccaccacggctaagtcgctcctgggtccccaacgccg

SEQ ID NO: 720278 - DNA, 253 bp, Homo sapiens
  misc_feature (26)..(26): n is a, c, g, or t
  misc_feature (158)..(158): n is a, c, g, or t
tatggtaaaatgtaacgtaaatatantatttgaagcatttttatatctacaatgcagtggcattagtacattcacattgttatgcagatcatcactactgtccatttccagagcttttttcatcttctaaaactgaaactctgtaccccttaaacaancagttggccaggcatggtggctcactcctgtaatcctatcactttgggaggctgaggcaggcagattgcttgaacctaggagttggagaacagct

SEQ ID NO: 720279 - DNA, 238 bp, Homo sapiens
gggcagattacttgaggtcaggagttcgagaccagcttggccaacatggtgaaaccccgtctctactaaaaatgcaaaaaattagctgggtatggtggtgcacgcctgcaatcccagcaactagggaggcggaggcaggagaatcgcttgaacctggaagggcagaggttgtgacgagccaagagccaagattgcgccactgtagcctagccttaggtacagagcgagaccctgtctc

SEQ ID NO: 720280 - DNA, 1147 bp, Homo sapiens
cagggccagtgaggcaactactgctatcaggatgtaccactgagggcatactgtgtgagacgcaccccctactccacatagcagtaacatataaatacctacacagaccataccagcccagggatatacacacatcagcacatggagcatgaaccccacatggcatcgcgacgtggaccaatgctgccaacaagcccttatctcccacggatcttattgcctcaagacgctagaccaacaccatctgccttcctgcggcacataccctcatacaccataaacaagaccaacagcaacacccacgcagaacaagggatccaagaacctcacaagggacgagatagggaccacaaaacaacacacccacacataccaagagataagagcaacagggaaccctgacgaacaaaaccaatactaaaacccacaaccacccccttgcccctaaacacggggtccccaacctgatgaactattgctctcaacacacgccaacacatgtaaccccataaacttacacttcaacaatccaacatctactaccaccactacctgctcgctaagaacaattaaaaaacctacatccacactacactcaacttaataagctactaaacaatcgctaaacacaacatacctactcacaccaccgcacaaacctaacacataccctaaataccaaacaccatacacaaaaaagcacatccactctccaccacctcaccaaccaaacccccaacaactacataaccctactctctgctcatactatacctccctaacactcacacacctcactccaccaacaacaaaaaccctatactaactccatcctcccttactacacacctcacctccaccccccactacacccctcaaacaccctttcaccccacccgacataccccaaaccccactcctccctacacccccaaaaaacaatcacaacataactaacaacaacactaacaccacctcatctcctctcccacccaacacacctacctccatacaccccacaaccccccacactacaccccgtcccacccccacacactctcctccaaccaccaccccaccaccactcactccaccaataacaaacaaacccatccacactacaacacacctacatcccccaccccca

SEQ ID NO: 720281 - DNA, 143 bp, Homo sapiens
ctctacacggataccccgagtgggtccctgcctagtgggtccctgcgggaaggcggaggttgcagtgacgctgagatacgcgctcactgctaccttctcagcctgggtcgcttagagcactgattcctgtctcaacaaaaaaa

SEQ ID NO: 720282 - DNA, 653 bp, Homo sapiens
  misc_feature (526)..(526): n is a, c, g, or t
  misc_feature (529)..(529): n is a, c, g, or t
  misc_feature (550)..(550): n is a, c, g, or t
  misc_feature (560)..(560): n is a, c, g, or t
  misc_feature (579)..(579): n is a, c, g, or t
ctccgctccgggttcaggtgattcacctgcctcagcctcctgagctgctggaacctattccctatgaattcatggcataataagtgttaaaaaaaaaaataaaggacctctgggctacaaaaaaaaaaaaaaaaaaaaaagttcggggggatttggccaaagttcccaaaaaagtgggaatccgcggaaaataggggacccggttaatgggggcctccctccgggaaatggggtggaagaaaatttggaaatcagcgccaggcacggccaaatgtacactggctctcttctggtgggcaaaccccaatgatagaaaagacgagacgctggtggggagatctggcgcactggtggtgtctccttgctatgaaagacaggtggcgttgggcggtgtcgccgtggagaccgtgtacaaatatacccatctttccggctgtggtcaccggggataaaagggctccggccattcaagagaagagacttggaagggagtttagacaagagacccagggatagaaggccttcnctnttaaatacttcttgtgggagnacacatctcnaggtggggaccttatatanatatacacgtgggggttaaacattttcatgtgtgtttaacaaagaagaaaaagataaaaagagcgaagagacag

SEQ ID NO: 720283 - DNA, 451 bp, Homo sapiens
tcgagctcggcacccgtcagacgctgaactatgtgcggacacccgatcggcatagcgcactacagcccagaactcctgggctcaagcgatcctcccacctcagcctcccgagtagctgggattgcaggcatgcaccaccatgcccagctaattttgtgtttttagtagagacagggtttcgccatgctggccaggctggtctcaaactcccaaccttaggtgatccacctgactcagcctcccaaagtgctgggattacaggtgtgagccaccgggcctggccaacacactggattttaaaatgcaagtgttaagtggaaatagaaaacacggtaacaatcagcagacaaggagggtttggttgaagttacttgacaataagaagaatatcatgcacattactgcaaccctagaaagacagattaacaattatatgaaagtatatcagaaa

SEQ ID NO: 720284 - DNA, 196 bp, Homo sapiens
  misc_feature (167)..(167): n is a, c, g, or t
agaagtggagaaggtaagaatggatctcccctagatctgaaggcagcaggttagtgacagataagttggccagtgagacccattaagatactgacttctagaacagcaagataaaaacgtatggcttaagccactaaatctgtggtaattagtggtaatacaattcncatcattagtatgggaacaccacagtacg

SEQ ID NO: 720285 - DNA, 439 bp, Homo sapiens
agccaagaaagaaactgtttcctcctcctagaaagtcctgctgggtggctgccttccaacaaccacacaatcccctccctcattcactctaatgattccaacaccccttcccggagggctcagaatccccactgcccctgcacctgggagtcctgcccaccctgtttctgaaccactgagtgactctgtttgggtgtctcagtgcgccagggcctgtgctccatacagtgagagcaggtttccatcagagaccttcagcccaccccaggggactatgaggcatggcttgggcgtagggggagccatggacgctctcaaatccaaagccactgggcagatgggtgagcttggctcaaatccatgaacccaggtgtgggcaacggggcttgcgaggctgggtgaaggcctggggactctgaggtggctggactgcggacgc

SEQ ID NO: 720286 - DNA, 1487 bp, Homo sapiens
ggcccgcctcctgcgccgccccttccgaggctaaatcggctgcgttcctctcggaacgcgccgcagaaggggtcctggtgacgagtcccgcgttctctccttgaatccactcgccagcccgccgccctctgccgccgcaccctgcacacccgcccctctcctgtgccaggaacttgctactaccagcaccatgccctaccaatatccagcactgaccccggagcagaagaaggagctgtctgacatcgctcaccgcatcgtggcacctggcaagggcatcctggctgcagatgagtccactgggagcattgccaagcggctgcagtccattggcaccgagaacaccgaggagaaccggcgcttctaccgccagctgctgctgacagctgacgaccgcgtgaacccctgcattgggggtgtcatcctcttccatgagacactctaccagaaggcggatgatgggcgtcccttcccccaagttatcaaatccaagggcggtgttgtgggcatcaaggtagacaagggcgtggtccccctggcagggacaaatggcgagactaccacccaagggttggatgggctgtctgagcgctgtgcccagtacaagaaggacggagctgacttcgccaagtggcgttgtgtgctgaagattggggaacacaccccctcagccctcgccatcatggaaaatgccaatgttctggcccgttatgccagtatctgccagcagaatggcattgtgcccatcgtggagcctgagatcctccctgatggggaccatgacttgaagcgctgccagtatgtgaccgagaaggtgctggctgctgtctacaaggctctgagtgaccaccacatctacctggaaggcaccttgctgaagcccaacatggtcaccccaggccatgcttgcactcagaagttttctcatgaggagattgccatggcgaccgtcacagcgctgcgccgcacagtgccccccgctgtcactgggatcaccttcctgtctggaggccagagtgaggaggaggcgtccatcaacctcaatgccattaacaagtgccccctgctgaagccctgggccctgaccttctcctacggccgagccctgcaggcctctgccctgaaggcctggggcgggaagaaggagaacctgaaggctgcgcaggaggagtatgtcaagcgagccctggccaacagccttgcctgtcaaggaaagtacactccgagcggtcaggctggggctgctgccagcgagtccctcttcgtctctaaccacgcctattaagcggaggtgttcccaggctgcccccaacactccaggccctgccccctcccactcttgaagaggaggccgcctcctcggggctccaggctggcttgcccgcgctctttcttccctcgtgacagtggtgtgtggtgtcgtctgtgaatgctaagtccatagccattaacccccgcagcatctgccagtataaccagctagtccg

SEQ ID NO: 720287 - DNA, 726 bp, Homo sapiens
gatcctctccgacctctcgagataagagcatcatcatgtggaaactgaccagggaatgagaccaactatggaattccagagcgtgctctgcggggtcaagtcccacttcgtaacgtggatgtggttatctacctcagaatggccagtttgccctctcaggctcctgggatggacaccctgcgctctctgggatctcacaaggggcaccacatcgaggcgattgtgggccataccaaggatgtagctgagtgtggccttctccgtcttgacaaccggcacgattgtctctggatctcgagataaaaccagtcagatgctatggaataccctgggtgtgtgcacaatacactggccaggatgagagccactcagagtgggtgtcttgtgtccgctttctcggcccaaatcagaagtcaaccctactcatcgtctccgtgtggctggggacacagctggtcaaggtatggaacctggcctaactgcaaggctgaatgaccagtcacattggcacacaggctatctgaacacggtgactgtctctccagatggatccctctgtgcttctggaggcaaggatggccaggccatgttatgggatctcaacgaaggcaaacacctttacacgctagatggtggggacatcatccaaggcctgtgcttcagccctaaaccgtactgctgtgtgctgcaacaggtcccagatcaagatctgggatttagagggaa

SEQ ID NO: 720288 - DNA, 1451 bp, Homo sapiens
  misc_feature (20)..(20): n is a, c, g, or t
  misc_feature (46)..(46): n is a, c, g, or t
gaggggtgcctcaaccacantccgtccacggactctccgttatttnaggaggtccctggccaaagatttatttctcttgacaaccaagggcctccgtctggatttccaaggaagaatttcctctgaagcaccggaacttgctactaccagcaccatgccctaccaatatccagcactgaccccggagcagaagaaggagctgtctgacatcgctcaccgcatcgtggcacctggcaagggcatcctggctgcagatgagtccactgggagcattgccaagcggctgcagtccattggcaccgagaacaccgaggagaaccggcgcttctaccgccagctgctgctgacagctgacgaccgcgtgaacccctgcattgggggtgtcatcctcttccatgagacactctaccagaaggcggatgatgggcgtcccttcccccaagttatcaaatccaagggcggtgttgtgggcatcaaggtagacaagggcgtggtccccctggcagggacaaatggcgagactaccacccaagggttggatgggctgtctgagcgctgtgcccagtacaagaaggacggagctgacttcgccaagtggcgttgtgtgctgaagattggggaacacaccccctcagccctcgccatcatggaaaatgccaatgttctggcccgttatgccagtatctgccagcagaatggcattgtgcccatcgtggagcctgagatcctccctgatggggaccatgacttgaagcgctgccagtatgtgaccgagaaggtgctggctgctgtctacaaggctctgagtgaccaccacatctacctggaaggcaccttgctgaagcccaacatggtcaccccaggccatgcttgcactcagaagttttctcatgaggagattgccatggcgaccgtcacagcgctgcgccgcacagtgccccccgctgtcactgggatcaccttcctgtctggaggccagagtgaggaggaggcgtccatcaacctcaatgccattaacaagtgccccctgctgaagccctgggccctgaccttctcctacggccgagccctgcaggcctctgccctgaaggcctggggcgggaagaaggagaacctgaaggctgcgcaggaggagtatgtcaagcgagccctggccaacagccttgcctgtcaaggaaagtacactccgagcggtcaggctggggctgctgccagcgagtccctcttcgtctctaaccacgcctattaagcggaggtgttcccaggctgcccccaacactccaggccctgccccctcccactcttgaagaggaggccgcctcctcggggctccaggctggcttgcccgcgctctttcttccctcgtgacagtggtgtgtggtgtcgtctgtgaatgctaagtccatagccattaacccccgcagcatctgccagtataaccagctagtccg

SEQ ID NO: 720289 - DNA, 818 bp, Homo sapiens
  misc_feature (23)..(23): n is a, c, g, or t
aaggctagtagggacgcgtgtantcacatctccattcaccgataagtcgtgcttacgctaatggcggtggtcttgctgagggcaacttccgcaccggccgattgcctgaggccacctccagcgcagtggaaactgcttcttccagaatcttgcgctgcgcttcaactggagagattacttctcatgcaagtgccataactgtagagagtttctctgcaccgtctacaacagagaaccgtgttcgcagtgcgcatcttaactggtaacattagcctctttttttaaggagcctgagatgactaagcagcccgaagactggctcgacgacgttcccggtgatgacatcgaagacgaagacgatgaaattatctgggtcagtaaaagtgaaattaaacgtgatgccgaggagctaaaacgccttggcgcggaaatggttgatctggggaaaaagcgcgctggataagatcccgttagatgcggatctgcgcgcggctatggagctcgcccagccgtattaccgatggaaggtcgccgtcgccagtggcagctcatcggtaagatgctgcgccagcgcgacgtagagcctattcgtcaggcgctggataagctgaaaaaccgtcacaagcagcaggtggtgctgttccataaactggaaaagctgcgcgatcgtcggatcgatcgaggtgatgacgccactcgctgaggtattaaatctgtggcccagatgccgatcgtcagcaaatggggtactctgatccggaagcggaaggaagaaacaagaaggggattaaagccggcgaaaattccggaggccaaat

SEQ ID NO: 720290 - DNA, 1408 bp, Homo sapiens
  misc_feature (1392)..(1392): n is a, c, g, or t
ggcccgcctcctgcgccgccccttccgaggctaaatcggctgcgttcctctcggaacgcgccgcagaaggggtcctggtgacgagtcccgcgttctctccttgaatccactcgccagcccgccgccctctgccgccgcaccctgcacacccgcccctctcctgtgccaggaacttgctactaccagcaccatgccctaccaatatccagcactgaccccggagcagaagaaggagctgtctgacatcgctcaccgcatcgtggcacctggcaagggcatcctggctgcagatgagtccactgggagcattgccaagcggctgcagtccattggcaccgagaacaccgaggagaaccggcgcttctaccgccagctgctgctgacagctgacgaccgcgtgaacccctgcattgggggtgtcatcctcttccatgagacactctaccagaaggcggatgatgggcgtcccttcccccaagttatcaaatccaagggcggtgttgtgggcatcaaggtagacaagggcgtggtccccctggcagggacaaatggcgagactaccacccaagggttggatgggctgtctgagcgctgtgcccagtacaagaaggacggagctgacttcgccaagtggcgttgtgtgctgaagattggggaacacaccccctcagccctcgccatcatggaaaatgccaatgttctggcccgttatgccagtatctgccagcagaatggcattgtgcccatcgtggagcctgagatcctccctgatggggaccatgacttgaagcgctgccagtatgtgaccgagaaggtgctggctgctgtctacaaggctctgagtgaccaccacatctacctggaaggcaccttgctgaagcccaacatggtcaccccaggccatgcttgcactcagaagttttctcatgaggagattgccatggcgaccgtcacagcgctgcgccgcacagtgccccccgctgtcactgggatcaccttcctgtctggaggccagagtgaggaggaggcgtccatcaacctcaatgccattaacaagtgccccctgctgaagccctgggccctgaccttctcctacggccgagccctgcaggcctctgccctgaaggcctggggcgggaagaaggagaacctgaaggctgcgcaggaggagtatgtcaagcgagccctggccaacagccttgcctgtcaaggaaagtacactccgagcggtcaggctggggctgctgccagcgagtccctcttcgtctctaaccacgcctattaagcggaggtgttcccaggctgcccccaacactccaggccctgccccctcccactcttgaagaggaggccgcctcctcggggctccaggctggcttgcccgcgcaatcnatcggtaccgagctaa

SEQ ID NO: 720291 - DNA, 243 bp, Homo sapiens
  misc_feature (211)..(211): n is a, c, g, or t
gaggtgtgctattagttttcttttatttaagaaaaacaaagcatggtttaaatatttcttacaagtacaaatataatttaaatttaataaaggtccaaaaatatcggtaatggatgtttcattcaagcagacatatgtctaatagaagaactggcataagtcaagatataaagggagtgattacagtgaaacaaatcacaataattatcangaaagagtcttaaagagtcagagaagagaccc

SEQ ID NO: 720292 - DNA, 1085 bp, Homo sapiens
ggcccgcctcctgcgccgccccttccgaggctaaatcggctgcgttcctctcggaacgcgccgcagaaggggtcctggtgacgagtcccgcgttctctccttgaatccactcgccagcccgccgccctctgccgccgcaccctgcacacccgcccctctcctgtgccaggaacttgctactaccagcaccatgccctaccaatatccagcactgaccccggagcagaagaaggagctgtctgacatcgctcaccgcatcgtggcacctggcaagggcatcctggctgcagatgagtccactgggagcattgccaagcggctgcagtccattggcaccgagaacaccgaggagaaccggcgcttctaccgccagctgctgctgacagctgacgaccgcgtgaacccctgcattgggggtgtcatcctcttccatgagacactctaccagaaggcggatgatgggcgtcccttcccccaagttatcaaatccaagggcggtgttgtgggcatcaaggtagacaagggcgtggtccccctggcagggacaaatggcgagactaccacccaagggttggatgggctgtctgagcgctgtgcccagtacaagaaggacggagctgacttcgccaagtggcgttgtgtgctgaagattggggaacacaccccctcagccctcgccatcatggaaaatgccaatgttctggcccgttatgccagtatctgccagcagaatggcattgtgcccatcgtggagcctgagatcctccctgatggggaccatgacttgaagcgctgccagtatgtgaccgagaaggtgctggctgctgtctacaaggctctgagtgaccaccacatctacctggaaggcaccttgctgaagcccaacatggtcaccccaggccatgcttgcactcagaagttttctcatgaggagattgccatggcgaccgtcacagcgctgcgccgcacagtgccccccgctgtcactgggatcaccttcctgtctggaggccagagtgaggaggaggcgtccatcaacctcaatgccattggccagcgggggtaagagctcgattctatcagta

SEQ ID NO: 720293 - DNA, 208 bp, Homo sapiens
gacaaagtgagaccccatctctacaaaaaaattaaaaaattatccagatgtggtggtgtttgcctgcggtcctagctacacaggaagttgaggcaggaggattgcttgagtgcaagagtttgaggctgcagagagccaaggttgcacccttgcacttccggcttggtgtcaaagcgcggacctgtctcaaaaacttagggaattggct

SEQ ID NO: 720294 - DNA, 1281 bp, Homo sapiens
ggcccgcctcctgcgccgccccttccgaggctaaatcggctgcgttcctctcggaacgcgccgcagaaggggtcctggtgacgagtcccgcgttctctccttgaatccactcgccagcccgccgccctctgccgccgcaccctgcacacccgcccctctcctgtgccatgctgctgacagctgacgaccgcgtgaacccctgcattgggggtgtcatcctcttccatgagacactctaccagaaggcggatgatgggcgtcccttcccccaagttatcaaatccaagggcggtgttgtgggcatcaaggtagacaagggcgtggtccccctggcagggacaaatggcgagactaccacccaagggttggatgggctgtctgagcgctgtgcccagtacaagaaggacggagctgacttcgccaagtggcgttgtgtgctgaagattggggaacacaccccctcagccctcgccatcatggaaaatgccaatgttctggcccgttatgccagtatctgccagcagaatggcattgtgcccatcgtggagcctgagatcctccctgatggggaccatgacttgaagcgctgccagtatgtgaccgagaaggtgctggctgctgtctacaaggctctgagtgaccaccacatctacctggaaggcaccttgctgaagcccaacatggtcaccccaggccatgcttgcactcagaagttttctcatgaggagattgccatggcgaccgtcacagcgctgcgccgcacagtgccccccgctgtcactgggatcaccttcctgtctggaggccagagtgaggaggaggcgtccatcaacctcaatgccattaacaagtgccccctgctgaagccctgggccctgaccttctcctacggccgagccctgcaggcctctgccctgaaggcctggggcgggaagaaggagaacctgaaggctgcgcaggaggagtatgtcaagcgagccctggccaacagccttgcctgtcaaggaaagtacactccgagcggtcaggctggggctgctgccagcgagtccctcttcgtctctaaccacgcctattaagcggaggtgttcccaggctgcccccaacactccaggccctgccccctcccactcttgaagaggaggccgcctcctcggggctccaggctggcttgcccgcgctctttcttccctcgtgacagtggtgtgtggtgtcgtctgtgaatgctaagtccatagccattaacccccgcagcatctgccagtataaccagctagtccg

SEQ ID NO: 720295 - DNA, 1370 bp, Homo sapiens
ggcccgcctcctgcgccgccccttccgaggctaaatcggctgcgttcctctcggaacgcgccgcagaaggggtcctggtgacgagtcccgcgttctctccttgaatccactcgccagcccgccgccctctgccgccgcaccctgcacacccgcccctctcctgtgccaggaacttgctactaccagcaccatgccctaccaatatccagcactgaccccggagcagaagaaggagctgtctgacatcgctcaccgcatcgtggcacctggcaagggcatcctggctgcagatgagtccactgggagcattgccaagcggctgcagtccattggcaccgagaacaccgaggagaaccggcgcttctaccgccagctgctgctgacagctgacgaccgcgtgaacccctgcattgggggtgtcatcctcttccatgagacactctaccagaaggcggatgatgggctgtctgagcgctgtgcccagtacaagaaggacggagctgacttcgccaagtggcgttgtgtgctgaagattggggaacacaccccctcagccctcgccatcatggaaaatgccaatgttctggcccgttatgccagtatctgccagcagaatggcattgtgcccatcgtggagcctgagatcctccctgatggggaccatgacttgaagcgctgccagtatgtgaccgagaaggtgctggctgctgtctacaaggctctgagtgaccaccacatctacctggaaggcaccttgctgaagcccaacatggtcaccccaggccatgcttgcactcagaagttttctcatgaggagattgccatggcgaccgtcacagcgctgcgccgcacagtgccccccgctgtcactgggatcaccttcctgtctggaggccagagtgaggaggaggcgtccatcaacctcaatgccattaacaagtgccccctgctgaagccctgggccctgaccttctcctacggccgagccctgcaggcctctgccctgaaggcctggggcgggaagaaggagaacctgaaggctgcgcaggaggagtatgtcaagcgagccctggccaacagccttgcctgtcaaggaaagtacactccgagcggtcaggctggggctgctgccagcgagtccctcttcgtctctaaccacgcctattaagcggaggtgttcccaggctgcccccaacactccaggccctgccccctcccactcttgaagaggaggccgcctcctcggggctccaggctggcttgcccgcgctctttcttccctcgtgacagtggtgtgtggtgtcgtctgtgaatgctaagtccatagccattaacccccgcagcatctgccagtataaccagctagtccg

SEQ ID NO: 720296 - DNA, 808 bp, Homo sapiens
aggtactctacaggatcttcccgctggcgcaatggcagtatctgccagcagaatggcattgtgcccatcgtggagcctgagatcctccctgatggggaccatgacttgaagcgctgccagtatgtgaccgagaaggtgctggctgctgtctacaaggctctgagtgaccaccacatctacctggaaggcaccttgctgaagcccaacatggtcaccccaggccatgcttgcactcagaagttttctcatgaggagattgccatggcgaccgtcacagcgctgcgccgcacagtgccccccgctgtcactgggatcaccttcctgtctggaggccagagtgaggaggaggcgtccatcaacctcaatgccattaacaagtgccccctgctgaagccctgggccctgaccttctcctacggccgagccctgcaggcctctgccctgaaggcctggggcgggaagaaggagaacctgaaggctgcgcaggaggagtatgtcaagcgagccctggccaacagccttgcctgtcaaggaaagtacactccgagcggtcaggctggggctgctgccagcgagtccctcttcgtctctaaccacgcctattaagcggaggtgttcccaggctgcccccaacactccaggccctgccccctcccactcttgaagaggaggccgcctcctcggggctccaggctggcttgcccgcgctctttcttccctcgtgacagtggtgtgtggtgtcgtctgtgaatgctaagtccatagccattaacccccgcagcatctgccagtataaccagctagtccg

SEQ ID NO: 720297 - DNA, 630 bp, Homo sapiens
tccatatgtgtttcctccgcttggaagattagaaatggtttggagaactgatacaaatggctattacttcatatattaattgcatgtgtttactttgaaggtgaaatacaaagtacctttgttgctaggaaaggaaatgaatgagatacacagttccatacacagcataaagaagttgttctaagaacacttcctcaagcagttcattgggctgaatttcctcttttgaccttgttacttgtaagagtatgggcctaagccaaactgtttgggatcagatcccacctaagcctcttatcagatggataagcaagctatttaacctctgtgagcttcattttctcttctgtaaaaggcaatgacaaggtccctaccttcaggattgctgtaaggatgaaatgaattactagatgtaaagtgctcagaacactggtccctgcatatatttaatgttcaaaaaaaaaagtgagctactattattcagtgcttacagcctcctgggccaaatattttaaaaaagcaaattaattaatttgcttagaagcaacttaattacgctacatggcagtggagactgaagtttcttactagataaccaaatgataggggttaaaggattaataagggtaa

SEQ ID NO: 720298 - DNA, 112 bp, Homo sapiens
gcacgagatcatgattatctaccgggacctcatcagcacgatgagatgttctccgcaattacaaggatccgggggatcggcggacgggttttgcctggaggtggaggggagg

SEQ ID NO: 720299 - DNA, 810 bp, Homo sapiens
  misc_feature (22)..(22): n is a, c, g, or t
  misc_feature (29)..(29): n is a, c, g, or t
atacgaagtcgagcttgtaccnccgctgngccaatggcagtatctgccagcagaatggcattgtgcccatcgtggagcctgagatcctccctgatggggaccatgacttgaagcgctgccagtatgtgaccgagaaggtgctggctgctgtctacaaggctctgagtgaccaccacatctacctggaaggcaccttgctgaagcccaacatggtcaccccaggccatgcttgcactcagaagttttctcatgaggagattgccatggcgaccgtcacagcgctgcgccgcacagtgccccccgctgtcactgggatcaccttcctgtctggaggccagagtgaggaggaggcgtccatcaacctcaatgccattaacaagtgccccctgctgaagccctgggccctgaccttctcctacggccgagccctgcaggcctctgccctgaaggcctggggcgggaagaaggagaacctgaaggctgcgcaggaggagtatgtcaagcgagccctggccaacagccttgcctgtcaaggaaagtacactccgagcggtcaggctggggctgctgccagcgagtccctcttcgtctctaaccacgcctattaagcggaggtgttcccaggctgcccccaacactccaggccctgccccctcccactcttgaagaggaggccgcctcctcggggctccaggctggcttgcccgcgctctttcttccctcgtgacagtggtgtgtggtgtcgtctgtgaatgctaagtccatagccattaacccccgcagcatctgccagtataaccagctagtccg

SEQ ID NO: 720300 - DNA, 929 bp, Homo sapiens
ggcccgcctcctgcgccgccccttccgaggctaaatcggctgcgttcctctcggaacgcgccgcagaaggggtcctggtgacgagtcccgcgttctctccttgaatccactcgccagcccgccgccctctgccgccgcaccctgcacacccgcccctctcctgtgccaggaacttgctactaccagcaccatgccctaccaatatccagcactgaccccggagcagaagaaggagctgtctgacatcgctcaccgcatcgtggcacctggcaagggcatcctggctgcagatgagtccactgggagcattgccaagcggctgcagtccattggcaccgagaacaccgaggagaaccggcgcttctaccgccagctgctgctgacagctgacgaccgcgtgaacccctgcattgggggtgtcatcctcttccatgagacactctaccagaaggcggatgatgggcgtcccttcccccaagttatcaaatccaagggcggtgttgtgggcatcaaggtagacaagggcgtggtccccctggcagggacaaatggcgagactaccacccaagggttggatgggctgtctgagcgctgtgcccagtacaagaaggacggagctgacttcgccaagtggcgttgtgtgctgaagattggggaacacaccccctcagccctcgccatcatggaaaatgccaatgttctggcccgttatgccagtatctgccagcagaatggcattgtgcccatcgtggagcctgagatcctccctgatggggaccatgacttgaagcgctgccagtacgacctttaaacgctgccagtcacaacatgataacgcagccactctagcgatgacccacacgcttacatgtagagaccaccctggcccatcatgatcagcaagggaccgagctcaatgtcgaatatga

SEQ ID NO: 720301 - DNA, 1376 bp, Homo sapiens
tatatgcgtaccccccccttttgatgtagtccttctttattaatagagatattatttccgtgcttcgttgaagaagattttgtcgttatagatggagccccccaacttagaatcccctctgaataatgggcgggggcccacaataataaaactactggtgggggtaaggacggcacacgggcaacgtataacgtttggaatcaaggggggggtgcaatagaatacctcaaactgtgtgatggcgccaccttttcaacattgtggggaagaagccctctgggagatgtaacacagtttggggggtggaccaaagtcacaacacagcccccacatagttgggggtctttaagacgctacgccctctactgtccacaaaggggggagttggcgaacgccacagctggctgtgcaccgagtatgtagtctgtcatcgtgtgttgtcgtgcgcactcaagaagagttgttataatgccccaactagtttgttttgctgtgtgtgcgcgccttccacccctcttttggtccttcttctcaaactcccctttgttttttcacgaccacataacccacagcccttggggaaattatagtattggggcgaaatatcccacggagataagatgggagacttgtgtgcgtatacccaccataggggattggcccctacaacattttgcacaaccgtggccgctaaatcttcctcccccccaccggtttttggaccgcaaggcggtcccctgttggggccttccccccccggcgagaggggagagccacacagaaatttttctacacataatagtgtttcacgagagacccccacggagagcgcgcctccttgtatagacccctatattgagagccctctcttgggaaatcggggaacctgtcacacactttccctcgagctattttccctcgagataatttggagaagaacaaggagacttttgtgtaaatttctttcttccccccacatatggcttctgtctggcgctataggttctacacacattctctagactgcacgagatcacccgatacaccacattccctgttaagtgcttccctccacagctccacagaggccaccttgggagcacaaaatgcctttatattgagaaacgtaacaatacactataatacaccaccacatgagagagtgaaagacacaatattatgaaagtccgcaatatgtcatcactaatcccgttccttggcccggttgagggcacagctcacagtggctgaggcccatgtccaagccacaacccgcacagcgttcactcacgacttcaagatttgatgctatattcctctttggatttctcaccagttattaaataagtgtctgagtgggaaaaaaaaaataaaaa

SEQ ID NO: 720302 - DNA, 939 bp, Homo sapiens
ccccaatggttcctggcccagcttatgccaagtatcttgccacgcagaatggccatttgtgcccatcagtggagccctgagattccctccactgatgggggaccaatgaccttgaaagcgcctgccaagttatgtgaccgacgaagggtaaatggcctaccctgcctgaccaagtgcaaggtgggcatggccggggaacactggggctaacccctatcctctcctccaccccactatccacccgtgcgcctgctgtgaccgagaaggtgctggctgctgtctacaaggctctgagtgaccaccacatctacctggaaggcaccttgctgaagcccaacatggtcaccccaggccatgcttgcactcagaagttttctcatgaggagattgccatggcgaccgtcacagcgctgcgccgcacagtgccccccgctgtcactgggatcaccttcctgtctggaggccagagtgaggaggaggcgtccatcaacctcaatgccattaacaagtgccccctgctgaagccctgggccctgaccttctcctacggccgagccctgcaggcctctgccctgaaggcctggggcgggaagaaggagaacctgaaggctgcgcaggaggagtatgtcaagcgagccctggccaacagccttgcctgtcaaggaaagtacactccgagcggtcaggctggggctgctgccagcgagtccctcttcgtctctaaccacgcctattaagcggaggtgttcccaggctgcccccaacactccaggccctgccccctcccactcttgaagaggaggccgcctcctcggggctccaggctggcttgcccgcgctctttcttccctcgtgacagtggtgtgtggtgtcgtctgtgaatgctaagtccatagccattaacccccgcagcatctgccagtataaccagctagtccg

SEQ ID NO: 720303 - DNA, 126 bp, Homo sapiens
gcctagagttcccctggtaggaggtggaggctgagtagctgagattgtgcactacactcagcctggcacagagcggacttcatctcaaataagtaataactaataagcctttcacatcaaaggaat

SEQ ID NO: 720304 - DNA, 383 bp, Homo sapiens
gaaaattccctggattaccaagcagagactcttgttctcttctctcactttcccccaaacaaatagagtctctctctctctctctctttctctctctctctctccctctcattctctgccgacctgcctgaatctggggtagggatgacacaatcacatttgtagtcaacaccattgggactgtgctaggtcagacccaaagctgcacagcactgagtctcgcccaacgcccacagagaccactccctgggtaatgtctgtgtttgctcaaagcctaagggctatacaatcagtcagtggtgaagccagcctgtcttatgtccttaccttcagggtgatgagttcctcaagcaggtccagggatggtgtccaggacgcaaggc

SEQ ID NO: 720305 - DNA, 941 bp, Homo sapiens
  misc_feature (408)..(408): n is a, c, g, or t
gccctcacgcctctgatccccagtacagtagaagaagtactacttcccggatccgttgaaggctgggagcgctcagcgtgcgcttcgagtatgaaagggcggacggacggtgagtcggtcttccttggcacatccatgaaagatctggtgcgcgtacgcaccattcgagccgccaactcgatagcaagaacagtactgccatcagtacggtgcccgtgcagactgcacggcccaggccgagaaagaacagtggcaaccctggctaaccagcgcgccaatcagcctgctgaagtacgtgtggtgcatcattgtctcacgcggtctcatcacatacgcagtggttgtggaagcttagtctgggagccttgcaactgcacatgacttagggaaccagagacgtgcaacccngaaacgtagctttcgcacctcggcacgttgcatggcgggaccttgcctgcggtaagtgcgcagcactcgtcttgccttgccgccgaatgctcccacgtgggacacgttactgacatatagcattcgacacacttgtcttagggaagacccctctggtggtccgcggcagtgacgcatggaagctggacgatgtgccaggggcaagttgttgcaatccacggggggtgtggcccctacagttgcgcagaagaacggtacagattgcgataattgttgttgcagttgagtgcttgcgactgcccgaagggcactgtaagggcaggctgctcggccctgcctgacgcgagggggcaccggtgagctgtggttccggcgcgcttgcgacagcggtaccatagggacgtttctactcggaccttggcctccgtaacaaacctttgcgtcaagtcaataccggtccagaggttggagcatgtgtctgggccaagccttgaagccctgggttggtggttgcatagcacccttgtcccttc

SEQ ID NO: 720306 - DNA, 594 bp, Homo sapiens
  misc_feature (536)..(536): n is a, c, g, or t
cagagcagacagtgcctattgacactccgtttgaagtatcaccttctcataactgaaagagcagaaaagctaacagataagcttctcatctgaggacactctaggcatacattatgaccgtcttgtttttcattgtatgttaggactttatcactgcatctatgggtacggtgattagaacattgtagatgtgtatgccgatagagagcacaaaaatgggagaaaatgcaaacatgagcagaaaatattttcccactggtgtgtagcctgctacaaggagttgttgggttaaatgttcatggtcaactccaaggaatactgagatgaaatgtggtaaatcaactccacagaaccaccaaaaagaaaatgagggtaattcagcttattctgagacagacattcctggcaatgtaccatacaaaaaataagccaactctgacatttggattctaccatagactctgtcattttgtagccatttcagctgtcttttgattaatgttttcgtggcacacatatttccatccttttatgtntaatctgtttaaacaagttctagtaacacatctggttagtcagttttttatggtgtat

SEQ ID NO: 720307 - DNA, 1040 bp, Homo sapiens
  misc_feature (1032)..(1032): n is a, c, g, or t
tgcgattccatctggagcgacaaatgggatactatctgatccagatgtacattcccagtctcctgattgttattctatcctgggtttcgttctggatcaacatggatgcagcaccggccagggtagctctggggataaccaccgtgctaacgatgactacacagagttcaggatcacgagcttccttgccaaaagtttcatatgtcaaagctattgatatttggatggcagtatgcctcctttttgtgttttcagcacttctggagtatgcagctgtaaattttgtatcaagacaacacaaagaacttctgagatttcgacgaaagagaaagaataagacagaagcttttgcactggagaagttttaccgtttctcagatatggatgatgaggtaagggaaagccgattcagcttcacagcctatggaatgggaccatgtctacaagcaaaggatggcatgactccaaagggccccaaccaccctgtccaggtaatgccaaaaagtcctgatgaaatgaggaaggtctttatcgaccgggccaagaagattgataccatctcccgagcctgcttcccattagcttttttgatttttaatattttctactgggttatctataaaattcttaggcatgaggatattcatcagcagcaagattaagtctctgggggcatgcaaatgcaaatggtcaattcagaagaaagtgtctctgccataggtgtgtatgtgtatatgtgtgcgtgtggtatacaaatgatgaccattgtattaaaatggcatatggaaaagctttgtattttggttagctatgcaaagtcatgagaaagatgagattcttttaatgaatataaaatatttattaggggattctatttcatattaattccaggtgatttgttttttcacagtaaaccatgtaagtggaagctttactgccaatgtgtttatatgttatataatatctcataatagtagacatgaaaactactttgaaattccttgatttgtaattcaatgctattaaatcatncaaaagca

SEQ ID NO: 720308 - DNA, 198 bp, Homo sapiens
agaggttgatgagttaattaaaggagaagattcctaaaatttgagagacaaaataaatggcaagaatttgagaaagtaaatttatactcaggttctaattttactttctcaaattcttgccatgagaggttgatgagttaattaaaggagaagattcctaaaatttgagagacaaaataaatggaacacatgagaacc

SEQ ID NO: 720309 - DNA, 219 bp, Homo sapiens
aaagcagaggcagccggcataggatgtagacgtcctttcccaaactcaatcgcagagatgagagacgtgagaaattagagaaaggtggaacaaaaaaattaccaagcaacaaaaaaagtctaggaccagatggattaacagctgaattctaccagacattcaaagcagaattggtaccaatcctttagacactattccacaagatagttgtacatggcg

SEQ ID NO: 720310 - DNA, 548 bp, Homo sapiens
aagatagaggacgttatataggcggttattatctgcctgctcatacacgtgctgtgagctccacacactagtctgagatgcgcctgaaccagctgttgcatccatccccacatgacgtggactctgccttcagctatgtgcccgccttgcactactcacagaacagccacgcccgcttctgcggcctcaagccatcagcctgcctgagcctggtggcgggcgaccaaacatggcctgccactcagagaacacaccaccgccttggccactgaggtctctgcctcccagccggctccgctcctctcagcagcagcttgctggtgatgagggtcgagtcctcctggacacgtgctatgtcatcaagcccgggaatacaaaggagaaggtggccttctttgtggcccaccagtgtggtgggggcagccgggcccagctccatgaaggtcaaggggcactgggcagcgatagctccaaggccaagcggcgaggcgctgtcttgacccaccaaggtcctcctgacccagggccggagggccccttctgctgag

SEQ ID NO: 720311 - DNA, 732 bp, Homo sapiens
tgagcgcgaccgatccttaatagagtgtgggagcaaagggaggacagagccttttaaaacgaggcgggtggtgcctgcccctttaaggagcgggagcgatccggacagagtgtatctgagccccagactgccccgagtttctgtcgcaggctgcgaggacaggcccctaggctgggtctgggtgcttggcggcggcggcttcctccccgctcgtcctccccggtggcccacgaggcgacctcgggcttcaggtcgatgctgagcagagctgtggaagcacctgactacgaagtgctatccgtgcgagaacagcgtattccactgagaggagtccgcgagtgtataatatcatgcacttcgtgtttgcaacacgtgtgtacatcctctgccacatcgttccttgacccgcttcaatgaagcctgctgagttcatccatcagtggtgtgatgaagatgccaccgtgaacgagattgcgctcgagctgtgcagctttaccctggctagtgccctgggtgctgtcctgctcctgccgcttctccatcatcagcccatgagggtgtcgtgctctcgctgtgctcggaactatctatcatccagttggctcaacgggctccctccattccactgtgctctgggggaccttggtttggtcttctccaactgtcctcatcgttcctcatgccccttgggagtattcccttcacctgggtctaagggttgtggacccgaag

SEQ ID NO: 720312 - DNA, 107 bp, Homo sapiens
tggtgtgaggtgactgtggagggaataggggatctggggacagtgtgggacgtaccatggggacaggaggtcacagaacacacacacacacacacacacacacacat

SEQ ID NO: 720313 - DNA, 206 bp, Homo sapiens
ctcttgagtatccccgctgatccgcttaagtggttaccttccctgaccactgctgcctccctccctgcatttgccaggtactgtcattgccttagtttattattttctgttttgttttttttttgtcgtttttgttattccttttggtttttacttttttttttctttttttttttcttgcatcttctcctcttttttttttaatt

SEQ ID NO: 720314 - DNA, 1101 bp, Homo sapiens
  misc_feature (220)..(221): n is a, c, g, or t
  misc_feature (242)..(242): n is a, c, g, or t
  misc_feature (259)..(259): n is a, c, g, or t
  misc_feature (310)..(310): n is a, c, g, or t
  misc_feature (334)..(334): n is a, c, g, or t
  misc_feature (397)..(397): n is a, c, g, or t
  misc_feature (831)..(831): n is a, c, g, or t
  misc_feature (960)..(960): n is a, c, g, or t
  misc_feature (974)..(974): n is a, c, g, or t
cagataaatccagcctccaccctttattcagaccatctttcatacttctgtttcattggtccttttattgtcctggcactatttcatggaaagtttatcgatactggtttctctttacccttctaccagcctatcttaagtaaaaaacttactattaaggatttggaatctattgatactgaatgttattactcccctatctggataagagataaccacnntgaagaatgtggcttagaaangtacttttctgttgacntggagattttgggaaaagttacttcacatgacctgaagttgggaggttccnatattctggtgactgaggagaacnaagatgaatatattggtttaatgacagaatggcgtttttctcgaggagtacaagaacagaccnaagctttccttgatggttttaatgaagttgttcctcttcagtggctacagtacttcgatgaaaaagaattagaggttatgttgtgtggcatgcaggaggttgacttggcagattggcagagaaatactgtttatcgacattatacaagaaacagcaagcaaatcatttggttttggcagtttgtgaaagagacagacaatgaagtaagaatgcgactattgcagttcgtcactggaacctgccgtttacctctaggaggatttgctgagctcatggtaatgggcctcaaaagttttgcattgaaaaagttggcaaagacacttggttaccaagaagccatacatgttttaatcgcttggatctaccaccatataagagttatgaacaactaaaggaaaaacttctttttggcaatagaagagacagagggattnggacaagaatgacatgtggcttcttattttggaggagctcttgcatttaaataccccagccaagaaaaattgcacagatagtgtatataagctgttcattctgtacagtgaattttccgaacctctcanagtatgtttccgtncttccacagaaatatgcaaaacagttcatcctttctactttattgtatgtcccttgaatgtgtgccaggaaaatcttcttaatttggagcaggggaatttataaaagaatttttttttactttttag

SEQ ID NO: 720315 - DNA, 388 bp, Homo sapiens
tgctgttccattctgtttaccagccttctgtatcataactttcagaatccattctctcacctatgtctttgcccagagtcatcaagtcatgccagcacctcctcctggctcagtgccttctgtagagatgtgtaggcaggcagggctgtttgtgtccaccatgcacactacgactcctgcaggtggagttctgtgagcaacactgagcttcttgaagtccttgagcttctctgcttccttctagactcacaataagaaagatacaagatttcaggttggaatttccagctgatgctaggtctgcaactgaaaggagaaactaggatctagaaagttaacctttgagaaggtcgacgcggccgcgaatttagtagtagtaggcggccgc

SEQ ID NO: 720316 - DNA, 277 bp, Homo sapiens
  misc_feature (23)..(23): n is a, c, g, or t
gccaaacaaggctctgggctctncctactggctactctcaaacctgggccttccctcttagcactagcctcctcctaagggggcagcccccaaagcctttcccaccaggcctgttctccatagagagttcctaaagggttactggctcatgttgtaagaaattatgaaacataactttcttgttttttcttttcattaaaaaaataaaatattcaagactatcagcttctcttttgctttgcttttcttttttatataaaatatcagcaagctgcaa

SEQ ID NO: 720317 - DNA, 190 bp, Homo sapiens
tatctatacgatccccttagagacacaggcgatgtctgtctccctccttccctctccttttctgtcacctttccccctagctggctcctttggacctacccctgatcttgcttgacttgtgctgcatacagactgtccatttctttgtggccagagctcctgtcctctgcacctgtcgggctagtcgggg

SEQ ID NO: 720318 - DNA, 221 bp, Homo sapiens
catcatcggggtgctggagaaaggagaccggctgcccaagcctgagtctctgtccaccggtcctttataccgctcatgtagccgctgctgggactactgaccccctgtgatccggccccgctttcaccgaagctgcgtgtgcagccgtcggtgatcgtttatcgagatggaggaaggacaattgccatgtgagcgggattaggagatgctcgcgtaccgag

SEQ ID NO: 720319 - DNA, 379 bp, Homo sapiens
ctaggatccatcctctctctcattatatagtgctagtctcgggacttttttattatctatatactatttacttttttttttggcttaaaaacaagtgtgatgccatatcaagtccatgtaatcctctcacagtgtactctcataagaggtgtgggtgtctgttgggtcaggatgttagaaagtgctgataagtagcatgatcggtgtatgcgaaaaggttttacggacagtactggcaaaaagtgtggtatggggctatgatggtgcacttgatatagtcagcgtgcctttaaagaggtctaatctgtccagtgtcaagtgatttaaaaaaaataataccctgttttctgactagttcaaagatggatttgaaaatggt

SEQ ID NO: 720320 - DNA, 143 bp, Homo sapiens
acgtatgtgtcgtggaaaacagagttatcctacacctaaagaaagaccaaactgagtactttgagcaacgaagaaataaatgtagattgtgaagaaacattctcagtttattggatatcccattactcactgtggtggacggg

SEQ ID NO: 720321 - DNA, 696 bp, Homo sapiens
  misc_feature (260)..(260): n is a, c, g, or t
  misc_feature (696)..(696): n is a, c, g, or t
tggagggcgaaaaccgggtagtgttaattggccaggaggacacccgcacagcctccggaccccaaagggttttggacacaaatgatcttaaaggcacgtggctttcgtgctccagcttccagccctgtgccgcggcagggcgttggggcgcggaaaccccattcacacacgcagccttcaacccgtcccccttccttccagggctgcagcttcgcgcccagttggcttgaaagatacgcaaacgctctttgcagggcaanagtgttcccaggagattcgcagtagactgtgggtgtgtgtgcccccaggatctgcacgtagacgtggggtgtgtggccccaaggcttggctgggaacggtgcggatctacaggggcgcatcatttccaggagagacaggcgtagatgggagacctattcgagacaacgcatagagagtggtgaccagtgcgtgtgagacaccgcctgggagagatctgttcaatcacacgcaagagatagcgcctgtaggctatatataccttcacatctcttacaaagtgttccgcgcagagaacactctgagacattgagctccaaggtcccccccatacaaagcacagaataaaagggcccaagaggcggctttcgcaaggcctcatgtgcccctttcaaaagatccgtgggggttaggagtggtacaaccggggaaccccan

SEQ ID NO: 720322 - DNA, 352 bp, Homo sapiens
  misc_feature (47)..(47): n is a, c, g, or t
  misc_feature (125)..(125): n is a, c, g, or t
  misc_feature (235)..(235): n is a, c, g, or t
  misc_feature (289)..(289): n is a, c, g, or t
aagtagttgggattacagttgcctgccaccatgcctggttaattttngtatttttagtagagaggggatttcaccatgttggccaggctggccttgaagtcctgacttcagataatctgcctgtntcagcttcccaaagtgctgggattacaggcgtgacaactgtgcccagctgagatctgatggttttaaaaagaggagctcccctgcatgaggatctcactttttgcctgcnaccatttatgtaaagatgtgacttgctccttcttgccttccatcatgactgtgnaagctttccccagccatatgggaattgtaagttcaatttaaacttcttttcctttgtaaattt

SEQ ID NO: 720323 - DNA, 359 bp, Homo sapiens
ccttgggggttccaaatagggacccaagattgcagggtgtccctttttgggggggaatgttgaataattattttttttccacccttgttgccgcgggccagccccccggggggccctttatttgagatgtttttcccacccagatggtggtaccctatttcctttccccttggggggttttgtttgggaagttttttggccccatgtcagttttttttgctttgagggcccaaaggcccctggtcagtcgggtttccttttggcagggggtttgcagggtttccccctgttgtggcatgggtcagattttttttccttttttggggtgaataaatttcctttgtttgaatttcccccca

SEQ ID NO: 720324 - DNA, 131 bp, Homo sapiens
ttacggcatcgagtcatcggatagagcacttcggtgtgtccacaaaggacagtgcactgcggcatgcaatcacagcttcagcagacagcaggggagtacatcatgcccagtcaggcgctcaaacagacggt

SEQ ID NO: 720325 - DNA, 394 bp, Homo sapiens
cacacagccatggctccaaagccgcagccctgggtacagactgagggccctgagaagaacaagggccgcccggcaggaagggaggaggaccccttccgctccaccgctgaggccctcaaggccatacccgcagagaagcgcataatccgcgaggatccaacatgtccactcaacagcgaccccgggacccaagcgtatgaggactacaactgtaccctgaaccagaccaacatcgagaacaaccacggcaagttgtacatgatccaactgcttcaagacagcaaccggtttttcacctgctggaaccgttggggccgtgtgggagaggtcctgcagtcgatcaaccgacttacaaggcttgaagatgcctagaaggactctgaggactttcggc

SEQ ID NO: 720326 - DNA, 178 bp, Homo sapiens
taggagttgtgaggctctgggaactggctagtggcaatggtcagtggtgaaactcttccaatcccagcagcttgtgtccctcaagatcccatggggagaatcgccgtgaaccttggctggccaaagaacaagcatcagcaccacctagtggtgtctggagggggtttgtgtggtgagt

SEQ ID NO: 720327 - DNA, 567 bp, Homo sapiens
aggacacccctggtatctagtgaggagttgaaatgatgaaaggatcgtacaacacattgatgtcactaatagtcacaagagagaaaaaatagaagagacatgccaagttggaatgaagcctcctgtccctggtggttatactttacaaggaacatggataaacaacattttgcaaccaggttcagttagacacaattaagataaatggctgtttgaaaggcaaactcatttacctcctgggagactctacactacgtcagtggatctactacttccccaaagttgtaaaaacactgaagttttttgatcttcatgaaactggaatctttacgaaacatttgcttctggatgcagaaagacacactcagattcaatggaaaaaacatagctatcccttcgtcactttccagctctactctctgatagatcatgattatatccctcgggaaattgaccggctatcaggtgacaaaaacacagccatcgtcatcacctttggccagcaattaagaccacttcccatagacattatattcgcagggccatcggtgtcacaaggcattgcag

SEQ ID NO: 720328 - DNA, 351 bp, Homo sapiens
gccggggtttttttttccccggccgcgggtttttgcggcggggggggccccttggtttcaggtttcccccttccggccacaagggggcggggtccgggccgccgcccaccggcccttccgccaggtcctcagcctgttccctggggggcaggctcccgaagccccccgacggggggcctttttaagtgggggaagcctttccagggggttttccccgtgtgtcctcatttgcggccggccggggggggggggcaaaccgggaattccccagttgcctccgggaacattaaccccccctctttagtcttactggtattttttgtttcctttataaagcccccgtttccctca

SEQ ID NO: 720329 - DNA, 261 bp, Homo sapiens
gtggtggtctgtctgggcaggtcccggtggtccccacagggtgcacaggcggggctgggtgtaacagctggtcactgtggcatttggtggctgtgcttgtccagccactggcaagggtggttgccagtccttggcactggcggcaggccagtggctttggcaactggtggctgtgggtgtggtggccgtgctggtccagcactttgggcagggggcagctgcgtctggggcatcctctcagcgtcgcacctgccaggccat

SEQ ID NO: 720330 - DNA, 218 bp, Homo sapiens
gttgatcctctaaagtccaccaggctcatcttaacgaatattctggaggtcacgcacggtgctcacgtgctcgacggaacttgtacagcgtaggcatgcaccgcagtggtgaatacacgtcgaccaggctccatctttgcgatatttggaggtcatcacggtgctcacgtgtcgacggaacttgtctagggaggcatgcaccgcagtggtgaatacac

SEQ ID NO: 720331 - DNA, 189 bp, Homo sapiens
tgtggagacggggttcagcaccggccgggggtgcaggtcacaggcaggggtccggggcatcatgggctctcaccaccgctagcacttgtacctcctatctccggtctctccttgaggtctggggattttcaaacggtcttttcctccctcctggtcttctcttttctggtcctgtgtccatatgccaca

SEQ ID NO: 720332 - DNA, 158 bp, Homo sapiens
tagcttaagtatttcgttctgtgcttgatccacaagtatttagcctgggcacctgatgtgtaccaggcgctatgctgctcactgcagaagagaggctaccaaaacggccatggtctgccccaagctggagggcctgattattcttctctctcttccca

SEQ ID NO: 720333 - DNA, 156 bp, Homo sapiens
cgacactgtattaagcaggcagtgaatcacaagctccgggtggataaggcagctgctgcagcagctggtgactacaagcgccaatcagatgagaaggcgtgcggatgcagtgcaagaatgcctgtgtgtagtgtaatgaaatgtgaacagaacgtg

SEQ ID NO: 720334 - DNA, 320 bp, Homo sapiens
  misc_feature (76)..(77): n is a, c, g, or t
gcgacggtgaggtcgacgccggccaagacagcacagacagattgacctattggggtgtttcgcgagtgtgagaagnnagcgccgcggcctgtatttctagaccctgcccttcgcctggttcgtggcgccttttgacccccggccccttccgcctgcaagtcggaaattgcgctcctgtggctggacttccttctgctgcccaacttgcttgcaagatgaagctctcccttgttgccgcgatgcttcttcttctcaacgcggcgcgggccgaaggaggaggacaagaaggaggacgttggcacggttggtcggcatctacc

SEQ ID NO: 720335 - DNA, 451 bp, Homo sapiens
  misc_feature (154)..(154): n is a, c, g, or t
  misc_feature (339)..(340): n is a, c, g, or t
  misc_feature (380)..(380): n is a, c, g, or t
  misc_feature (390)..(390): n is a, c, g, or t
  misc_feature (415)..(415): n is a, c, g, or t
acgagggctcttgtgctcagaatggcgctgtgctgtgttcttacaggcctgagcctcctacctctgctgtaagcccagatcccatatgtgtgccaacctagtaccgcggcccatataccaacgccaccctggaccggatcacatggcaagtggntttatatcgcataggcctttcgcgaggagtacaataagtcggttcaagagatacaagcaaccttcttttactttacccccaacaagacacgaggacacgaactttctcagagagtgccacacccggcagaaccagtgcttctataacttcaggtacctgaatgtccaccgggagaatgggaccgnnttcagataccagggaggccgagaacatgttgctcacctgntgtgccttanggacaccaagaccttgatggttggntcctacctggaccatgagagctgtgggctgtctttt

SEQ ID NO: 720336 - DNA, 425 bp, Homo sapiens
  misc_feature (154)..(154): n is a, c, g, or t
acgagggctcttgtgctcagaatggcgctgtgctgtgttcttacaggcctgagcctcctacctctgctgtaagcccagatcccatatgtgtgccaacctagtaccgcggcccatataccaacgccaccctggaccggatcacatggcaagtggntttatatcgcataggcctttcgcgaggagtacaataagtcggttcaagagatacaagcaaccttcttttactttacccccaacaagacacgaggacacgaactttctcagagagtgccacacccggcagaaccagtgcttctattgcaccacctacctgaatgtgcagcggggtgagactcaaggacaccaagagctacatgcctgcttttgacgtgaacgatgagaagaactgtgggctgtgtgtgtatgctggcagtcagagacgacgg

SEQ ID NO: 720337 - DNA, 264 bp, Homo sapiens
ggtggattaacggttcctgtggttaatgtgtgggtgagtaaccccattgtgtagtagatacatatctagagtgagtatagggctgtgactagtatgttgcgtcctgtaagtaggagagtgatattagatacaggagaacgtgatatactagcacagagagttctcccagtaaggttaatagtcggggggtaagacgagtttcagcgaggctatgctaggaagtcatcacaaaagctatatagtgggagtaagagtatcgaagtc

SEQ ID NO: 720338 - DNA, 327 bp, Homo sapiens
tgccgctgttctcaccgtggcacgaagtggacacccagcctggtctctgtccgcaaaccctgtctttgtgcagcgacaccttttgtgaacccgttcgatgactcactgctggaggaggacttcccgtgacacccagtaggatcctcacacgtcaagtgaccgaggctggcggctgaagagcagacagcatgcacaggggacggagacccacttttatttgcttgtcttgggtggactggggcagtgaggggctgatggtgcctgtcccatgacaactaaaggtgcccctcagctggatgtggtgccattgtcaccaacaaaaaaaaa

SEQ ID NO: 720339 - DNA, 427 bp, Homo sapiens
gttatgtagtaggcctttgagtattctttttttcttgagacggagtcttgatctgtcacccaggctgagtgctatggggcgatcttgcgtcactgcaacctccgcctcccgggttcaagtgattctcctgcctcagcctcccgtgtagctgggattacaggcgcgtaccaccaggcctggctaatgtttggtatttttagtagagacgaggttcaacatatgggccaggctggtctcgaaccccttaccttgtgttctgcccgcatcagcctcctaaagtgctgggattacaggtgtgagccagtgcgcccagccccggccagactttttaaagtaaaggaactcttctattcatcactgaccaactttttatttttttttcggaaactccatctcaaaaaaaacaaacacagttccagcactgggg

SEQ ID NO: 720340 - DNA, 193 bp, Homo sapiens
tatttaatatggcttacctcctatgggtggtcaccaaggctaggtgctatgggttatctgctcttgtccacaccagagacccaggctacaagagaaaaagcagaggccaggagttggagggagaaatagtcggtgaaaaaccggtatccataaagacccgatcccaccaaatggtgcggggtacggagctcag

SEQ ID NO: 720341 - DNA, 310 bp, Homo sapiens
  misc_feature (6)..(6): n is a, c, g, or t
tggcangagtagggctgtaactcagctcataccaaccaatcaggtagtaaagagggctcactaaaatacaaattattctaaagcaggaggtaaagaaatagtcaaatcgtatattgcctgagagcacagtgggagggacaatgattgggatataaacccaggcattagagcagggagcggcaaccccctttgggtcccctcccttgtatgggagccctgttttcactctattaaatcttgccactgcacactcttctggtccgtgtttgttacttctcgagctgagctttcgctcgccaagccccagctg

SEQ ID NO: 720342 - DNA, 322 bp, Homo sapiens
ggtcgactccaggttggaaaggaggaagtcaaatgacctcaaaaatagcaaaataattaggaataaacctaacaaaaagaattgcaagacttgtaaactgaccaccataaaaacatcactgaaagaagttaaacaagacctattaatgtaaagacataccatgctcatggatcagaagacttaatattattaagatggcaacatggccgggcgcagtggctcatgcctgtaatcccagcactttgggaggccgaggcgggtggatcacgaggtcaggagatcgagaccatcctggctaacatggtgaaaccccgtctctact

SEQ ID NO: 720343 - DNA, 837 bp, Homo sapiens
tccggtttgcccgcccccctcgttggggcatcgctccccatcttgggacggctggtggtctctactgggtcatcgagctcccttttagagggacctccctttacccccgggccccccccgctccacatgttgccagattaagacccatggatgaccgcgagctccatattaggggggagccacaccccctatgagaaaggtgtttttaagctaggaagttatcattcctgaggaggtgacccattggacctcctcagatgccggtggtctcccccgattttatcatcccagccttgattctgctggaaggattttctggatgttctccgattgccccccaaaggtgcttggagaccctccctcacatcgccgctgtgttgacctctattcagctgctcatgtccgagaccccaccctgatgacccgctcctggctgacatatcctccggattttaatattattagcccgccttcctccagaatgcccgaccgtggacagagaagcatgccagaccagaaaccaaaggctgatgaggaagagatgcttgataatctacccgaggctggtgactcccgagtaccaccactccacaccagaaaaggagaggcccagtcagctagtaggcatagaaaagaaatttcatcctgatgtttaggggacttgtcctggttcatcttagttaaagtgttctttgcccaggtgatttaagttgcctaccctgaatttttttttaaatatatttgatgacataaatttttgtgtagtttatttatcttggacataagtattttggaatcttttaaacctggaaaataaatagtccttttaatgttgga

SEQ ID NO: 720344 - DNA, 457 bp, Homo sapiens
tgctctagaggatcctatgctaactactggaaatatttctagccgtgaatgtagacatggagaaattctaagcaacatggacaacaacggattctaaaatcacagatcatttcatgagactgccccaagtagaggacagaagaaaagaacagtgggaaacccaaacctcaaagaaccgaaaggaagatccctaaatacgttccacctcacctttctccagataagaagtggcttggaactcccattgaggagatgagaagaatgcctcggtgtgggatcccggctgcctctcttgaggaccatctgccaatcacacaagtaactattcgggtagatcttttgcgcgcaggagaagttcctaaacacttattccaacacacttataaagatatgtgggataacaagcatgttaaacatgcttgttcagaacaacaatttgtaacccgtggaagactga

SEQ ID NO: 720345 - DNA, 214 bp, Homo sapiens
tgatggtggattgggtaaagcatagtacatcactgtgtcctaaaataaccacccagtgaaaactccagccagtgaactggagggtgtcttttgggcacggtaactgagggattattgatgaaagctgaagttcaggatgactgagaaaattgttgaacttcaaaagccatctcagaaagttgcaataggagaggacgctgggctacagcacatg

SEQ ID NO: 720346 - DNA, 271 bp, Homo sapiens
aatattgcagaaacatgggtaagaactggcgcctgtggaatggtcttcagacactccgagatttaccccacgtctgttcgttacttgcgaatagagcacaaattttcatatagaattcaaagcaaaaatgagctgttatgttttaaaaaagagtctcatcaatatgcaaatgtttgactgttttattttatttttttatagagacagggttttgccacgttgcccaggctggtcacgaactcctggactcaaatcatccacccgcctcggc

SEQ ID NO: 720347 - DNA, 213 bp, Homo sapiens
  misc_feature (210)..(210): n is a, c, g, or t
  misc_feature (212)..(213): n is a, c, g, or t
actatcggggaatgtggcggaccctattggtatttccaaatattcaatatgttcggcatagaaatacctgtaatgtataaatgaaaggaagatagttgtcagtggggaatacatagggaaggactgttgttccaacagtatatatagaatagggagatatagcatcaacgatctacatgatatattgtatgtgcgatttatagatttggncnn

SEQ ID NO: 720348 - DNA, 442 bp, Homo sapiens
cattaagcaaatgtctgtgtaacaaaaggtgtcatcaataaagttttaacaagttttttaaaaaagcaaaagctgtatctcagaagaaaatacctgcaacaaagcttagggacaaaggattacagacgaagtattcatgtttatattattatttttatttgagacatggtcttgctttgtcgcccaggctggcgtgcagtggcacaatcacagctcactgcatcctcaaacatcggggctcaagcgatccaccccacctgagcctcccatgtattaaaactgcaatacttttgcaccagctaatagctggggattacaggtgcatgccaccatgccagtctccttttaaaattttttgtagagacagatctcactgtgttgcccaggttggtttcaaacttctggccatcttcctgccccagccttctgaagtgctgggatt

SEQ ID NO: 720349 - DNA, 108 bp, Homo sapiens
  misc_feature (54)..(54): n is a, c, g, or t
atgacacgagacctgaagcagtgacatcgacagactgtcatctgtgagaaaaanatttcgcctaataagtaactgatgcacactgatgtgctttggtctggaatcatt

SEQ ID NO: 720350 - DNA, 392 bp, Homo sapiens
  misc_feature (35)..(35): n is a, c, g, or t
  misc_feature (126)..(126): n is a, c, g, or t
  misc_feature (389)..(389): n is a, c, g, or t
agacccccgggttgagtacagggccctattgttgnactgaatttggtctccggcagaaagagcgagcagatttccctttacaacactattcccagttaaagagtagtggccgggagtgatgggtgnatgtcacgcctgtaatcccaacactttgggaggccgaggagggtggatcacttaaggtcaggagtttgagaccagcctagccactatggtgaaaccctgtctctactaaaatacaaaaattagccaggcgtggtggtgggtgcctgtaaactcagctacctgaaggctgaagcaggagaatcacttgaaccccggaggtggaggttgcattgagccgagattgctctactgcactccagggcaacagagcaaaactctgtctnatt

SEQ ID NO: 720351 - DNA, 297 bp, Homo sapiens
ctaaaaaaaattggggggtcctaggggggtttttttgggtttttttccaaaacaaagggtgggcttttgaaccaggggttttttatccaaggtggcttttttggggggggttaatgtttccccccctttttttaaaaaattagggggggggggtttttgttttaataggcccccttttggggagtttttagccttttgggaaaaatgggccccttttggccacccaaaatggttggggaggggttttccgttgttaaaaaaaaaatttttttccattaactttggttccccccccca

SEQ ID NO: 720352 - DNA, 360 bp, Homo sapiens
tgaatctgcaatcgtcaatactcgacgctgatggagttgtgggaatccctccaaggactgaatccatttcaataactagacttatctttctgctccacaagatgcctccaagaaataatcaccagacaggcagggaggcccatcttcatgatctcttacagctctaccatggggccaactcaaagacctagagagggaacattcaaagcaaccactaggttttttattccccgtgaaaccaaagataaattggaagatagaggtgaaggacactcgggaactagggcaaagacagggctagagataagaggaactggtactgtctctgagaattttaatcacaataaaatttggcaagga

SEQ ID NO: 720353 - DNA, 101 bp, Homo sapiens
gagctcgcccggttatgcgtagggatgggagggcgctgaggactagatgatggcggactaatcttcaactcctgccataccccctggcttcccccccgccc

SEQ ID NO: 720354 - DNA, 201 bp, Homo sapiens
gtcgagctgggaatgattcgaacatcgactcgtcccgtccctgcagtccggatactcacgccagaagtgcggctggtgatcccggcgggcagctgcacctgctgtatctctcgtggccgcccttcctgagcgggctcccccgaggcctccctgccttcaccggggctctgttccaggctgtccccgtacggcgtccaggtc

SEQ ID NO: 720355 - DNA, 974 bp, Homo sapiens
aactgaggaggaaaaaaaaaaaaaaagaaaagacccaacaagcctcaagctggcctatctccaaagaggtgggtacagttgtaattgttaaaggggaaaaatttccagggtagtggccagtggaggtgtccaagatatgctgggcagacttttcagcaaagcatcatttctcccagcgtgttataaggaggtcaggggattatacgtgccatatcactctcatagatctccacgatacggcactccagtgtgactcctttaccgaagttatagaaaaacattaattctttctgtgccttctcatgtgactccaaccttaatgtgccctatactctttcttgtgaacatttagaacccaatgtgatctacttttccaggggtgccctgtgcaatatagtgtgtgctccagtgttaagcattacacgacagataccctctcgagtgtgcccttctcgcgtggtcttttatcaccaattttatccgcatttttccccaaaatctacgcggactcataaacattcgagacgaaacttccggccatatagagggtcctacaaggcacgccactctccgctggaaagaaccacaaagaatgatctaaagaacatctatttcacaattggacccattaagttttgttctcacatgtggcgtgtgtatatacccgtgaaccctccgtggaagactcttaaagagagcgtctcgtcgggtgaaaagcactccaacacttgcgtggggcccgtctaccaatcctgagggcacaaaacccattcataaatacactccccgaaaaagcgcggggcgaactaggtgggcctgcgacaaaactataagccaccccaaaggcaaaactgggacaaattgtacgacaggtgtgaaccccacaacaatagggggcccgtgaaaccatcccatagagggcggagaccgccgggggacaagatcccccgtaggggcaacgaaaccacacagac

SEQ ID NO: 720356 - DNA, 113 bp, Homo sapiens
gtttatgggcatatgtcgaccgcgcgctcggaccgcttgtgctggcgtcggagttgtaacgctccactgactgatagagcgaccggtcgagcatggcgcccggagtggcccgc

SEQ ID NO: 720357 - DNA, 357 bp, Homo sapiens
tttggggtttttttgggaaggggaaagggacccccttaaaaaccctttttttttttccaacctaaaaaatttcccccaaatttttgggggggcatggattttgggggggcaatttcccccggggtttttttttttaaccccccctttaaaatgggccccctggttaggggggacctttcccaaaaaaaaaaaaaggttctttgggatttttgggggaaaaaagccccccccttaaaaaaggggaaggtttgggaaaaccgggtttttgggaaaaattttgggaggggggccaaagggttttttaaaaaattttaaaaaaagccctttggttttccccccaaaaaaggttttttttta

SEQ ID NO: 720358 - DNA, 162 bp, Homo sapiens
gggaacaaacgatgaaagagcatggctgggccccgaacctgcggcgccccagcagcccacgagcggaggaggaaggccctgatcgagttccaccagctcctaccagagaggtcttacgagttcttactagcaagcaacacccaccataccaacggacgccat

SEQ ID NO: 720359 - DNA, 122 bp, Homo sapiens
tataccaacaaatttacctggttgggtatgcaaatggttatttcctttttataagttgttcattgggactttctgttcatgcaaaagcactattcccacgattaatagtgttcgttccattt

SEQ ID NO: 720360 - DNA, 193 bp, Homo sapiens
ccagtcatagtgtcaccccaggagcatagattatagccagcatgttcacttcatgctgttgcaaaacatagtctttctttcacacattatgtagtcattgtcttttctaggtgtcagaagtagaccttcatgtggttgagtggcatataaatcctccaacttgttataaacagtcgtgtgggtagaaacagca

SEQ ID NO: 720361 - DNA, 175 bp, Homo sapiens
cggcacaccattgattggcctagcgtcgtccgggtttggccatcattgtaaataagaatgtcttaacggacttgcctagttcaatatataaataaaataaagcagtgcccgacctcactaattcttgtggctgaatggaagcaagtccccatggcaatgttccaacatggagtgg

SEQ ID NO: 720362 - DNA, 274 bp, Homo sapiens
tacctttgccccaagcccccccaaacttttatggtcatgttttattaaagcaggggctccctggaatctctggggcctttttgaggcctttgaagcagaatatagagtggtctcatctccctccttaattttcctggggggtgggatgttccccttggatcatagatttttttattacagatatggtcccctggttttaaatgtgaacttgggggcaaatgggcagattcaatggtcttgttacagattgaataaattttttttttgaagatga

SEQ ID NO: 720363 - DNA, 243 bp, Homo sapiens
tatgatgctcacaaaatagtatttgtgcatcttcagggcaaccatggtacagagagcatggaacaccagcacaggatacaagagcacaaaacaccatcacaggacaccagcacaggcaccaccagcacggacccacgattgtcattcacaaccccaccaccaccagccatggaaacgtcacagttcatccaacaagcaatagcactgccaccagccagggaccctcaactggcacttgctcag

SEQ ID NO: 720364 - DNA, 202 bp, Homo sapiens
acactaccatgcagagaggtcggaccaaggagtcagctctactgatcctcgcggctcagtcatgggtacccgcacagaagtctccgaggtcacgtagaagtgttgctccttgggtcgtcttgtgttaagcgttgtctcccacttagctttaaagaagatgttattcaccatgatcacgaccgctttggaacacggtctctca

SEQ ID NO: 720365 - DNA, 143 bp, Homo sapiens
ggccttttccccccccatttttcttttcccccgggattaggccaagaaggcaaaaaaaggcccccccctgggggccccccccccggggtaaaattttttaaaggtttcctttttaaaaaaaaaacccaaaggggggtttttta

SEQ ID NO: 720366 - DNA, 229 bp, Homo sapiens
tttggtccccaaaacccatttttattttcttttttaaataaaaagtgttagaggccaaaaccccccctaatttaacccaggcccgataaaggaaataaaaattagaacccgggtttgtgtgggggtatatgggggggggtatatgtgggcctccccatagggatagttgtgtgtgaattttagtgaaccccctttctaatttaattaaaacccgtaagggtttgtttta

SEQ ID NO: 720367 - DNA, 519 bp, Homo sapiens
  misc_feature (127)..(128): n is a, c, g, or t
  misc_feature (184)..(184): n is a, c, g, or t
  misc_feature (195)..(195): n is a, c, g, or t
  misc_feature (233)..(233): n is a, c, g, or t
  misc_feature (235)..(235): n is a, c, g, or t
  misc_feature (237)..(237): n is a, c, g, or t
  misc_feature (319)..(319): n is a, c, g, or t
  misc_feature (351)..(351): n is a, c, g, or t
gccgaaggacctgtgctgcctgtgactttgctcctaagtacctactgccgagatgtcctgccagcagagccagcagcagtgccagccccctcccaagtgcactcccaagtgccctcccaagtgtccnnccccaaatgccctccaaagtgtcccctaagtgccctccagtctcttcctgctgcantgtcagctccngaggctgctgtggctccagctctgggggcagctgtggntncnagctctgggggctgctgcagctctgggggaggtggctgctgcctgagccaccacaggcaccacaggtcccaccgtcacagancccagagctctgactgctgcagcagccctcgnggggctccagactgctgtggagggggcagcggacagcactctggaggctgcttgctgaagtggaccttgacttcctcttccttcatgattctgactgaatagctgagaggtaccagcaaaagcttgaagtcttgcctggagaatccctctgactctggtgtcaggaac

SEQ ID NO: 720368 - DNA, 113 bp, Homo sapiens
gaagagaaacacgctgaatgctggccaggatcctctgagagagaagagggacagatcagattatggagcctgtccaggtcactgtaggtactcggtaataatatttccacccc

SEQ ID NO: 720369 - DNA, 1715 bp, Homo sapiens
ggcactgggtggcaaatacatagaagaatgatatttggcccctaatctcaaggaagcaaagtaaagcttatagtattataatatcagtgttatatgtgttgcagtaagctaagagagtaatattggaaaagaagattaacactaatttatagataattatgaatgtctacttagaaaattcatgagaattaaaagtattagcactaataggagttcattgtagtatccagattgacacctatataaattccatttaattttatataaacaataaaaatatttaggaaaaaacctagtaagaacatatataacaaggccaggtacagtggctcacacctgtaattccaggactttgggcaggccgagacaggtggattacttgagtccaggagttcgagcccagctagacaatgtagtgaaacctatccctacaaaacatacaaaaattaccaaactattggtaatgtgcatgcctgtaatcacagtactcaggaggctgaggcccgagaatggttgagctgcgagtggaggttgcagtgagctgagatcacaccattgacccagtctggtcacgattgagatcggccaacacaaaaaaaaaaaacaagaaaacggcgatttcaactattcccattgggagcccgggagacatcaggatcagcatcacaaccggcgcttcacagacaagacaaaagatgtgcgccgccaaagtcaaacgggcgccaagagagtcgtcaacggacagtgcaacgggccactgacaacgaacccgacggatgtcgcatcatccgcgccacgaccacacgacgccacacgacagcacgacagacacgcacgacgcgcacgagccgcagcacacaacgccacgagcacgagagacggaagcagaggacggaaaaaacgaaaaagagacggagcagacgagatcaggcaaccagacgacggggcgcacggcgggcgggcgcgggagatgagcgatcaggagagggagaccggcacagcagagcgacgacaggaaggggcaaagaggagaagcgcaagccagtgaggagggcgagaacacgcgagcagaagcgacaagacgccggcagccagtacaagacagcgcaagcaggcaggaagacaacagaaggacgcaagagagcaggcggaccggaagcgaagggagagcgggaatgggggagagaagaaggaaatgcggagaagaacgggcagagacgaaggacgcagcgagggagagggcggtggcgggagggggaacgagacagccgcaggaggcgaggaggggaggaggagaggaagcgatgcgcggcaaggcggagacgcggagagaagcaagaggggaagggggggaagcaaggaggaaagaggaggagcgtgccgagcggagaggagagcagggcgcgggcgggcggggggaagagaggacggcacgggcagacagacagcacggcggaggcgagagcaggaccgcacggaacgcgacagaggacgacaggcgacacggacaggaacgagcgaggaggaacgagagaaagcgggagccacagcgggggccggaacgcaacacaaggaggaggaggagcagcagaggcgagagacacggcgggaggaggggagcagggaggagagaggagagcgagcgcagcagcggcgcgagaagcggcgcgaacggcgaaccacgacacgaacaggacgcacggacagacagcacc

SEQ ID NO: 720370 - DNA, 226 bp, Homo sapiens; identical to SEQ ID NO: 500189

SEQ ID NO: 720371 - DNA, 1015 bp, Homo sapiens
gctgaacagacagcatggaggctgcgtctacgtaacacgacgaccttagctgagatgggctcgcccctgagggctgcaagaaaaactcggtcgatcgagtctctcgtcaagtaaagcaccttggtgaatgtattagttgcacaatgaccatccgttcgcttatgttaccagttagtactgataactcacttgtgaatggacggctcgctcctccagagatgccgatgcgcaatactaggagtagcctatgctgcatgagttgcgtacaacaggggtcgctcgtgatgtagaaaagcaggagttcttgtactagatcttggcggaaactggagtggactgccctagcactaagcaaacagtgtcaggctcggatttcctggaaagcagtgatacaaggagctgaatgatgggtgcaccgtgccactagaacgttacactggagcggtgattattcctcttgccctgtgatttggatatgctgatatgcaaggggttctttaaaaacactggaagtcctgatgtatcccaatggtgtgcacgagtcggatttccaatacgtgacccgaaattggtctacttggacgttgggtctgcatgacatcgtgctggtggtggtttcttcatctattccaagaagtgatcgaagagtacacgaattgcgtgcaccactatccctcctgtaatgttcccctagcccactgaaatagggaaccggcctgaattccgagttggaagatggaatgtggctgttgcatgacctctgggtagtcgtcgaagagatttacttcgaatttggataaagactgtggttcgaagtataggtttgggtttgctaaaaatgcggaatttgggacaaaaggacgtttctaagaaaaggatttgacgaggccttaatttagtacttttttccagtgtagtgtctttgcggtaaggaaaaaagttaaataatgttaggaagataggcttcaagatgtgaatttgggggaaaagcttattgggagcaacattgggttga

SEQ ID NO: 720372 - DNA, 119 bp, Homo sapiens
aacagcaacggaatccagagagcaatgaaaaagctaatccactacacgcaagtaggcttgatgccttgtgcatgcagaggttgattcagacacatgcaacatacaatacactatgatcc

SEQ ID NO: 720373 - DNA, 217 bp, Homo sapiens
cgctactatacgcctatggcgcactgcgatgggtgaccattatatctcttctcatgctctctagcacgccttatattcacaggcgtgagtcggcctgatgcgcacctgagagagggcgcgtgttgggttgagttgctagacgaatttgaaggttatggccaattggcgcaaggagtatctgagattggctgaacatgcggtgctggagacacctgtt

SEQ ID NO: 720374 - DNA, 701 bp, Homo sapiens
acccttgaggattaaaacgacaataacttagaggttttcaaccctgaaattaccttaggagtgtggtgtattacaggggctacacatgatttagttaagatcatgtattaagttttgtttgtataaaatgctgggttgcacctgaggtgtatactacttgcacctcaggtggcagtccttcagaatccacacccacccagcacaaacatacattatttatcgttgggcggatgttgcactgggcagccaaagcactcaagttgcttggccacctgaggtgtatactacttgcaagtagtatacacctcaggtggcaacctggcatttggatcaaatgttattattgtactaacattgtttaggttagacactcaggtctcccgttctggaacacagactaaggttaaggagagatcagatcaacttcctgatcacaagagaggtgggtggcgtccctgacatggtttgacgtcatctgtttgtggagtccaccgtttgtaaggcacctgaggtgtaaacattgggatcgggcacgtacaataataggacatcaaaacaagagaagaaacccttttttctcttaattctattttcttactttattttcttaacaaccctcattccatcccccacctccccttcatcattctcactatcatgattctatcttctcctccccaccttcctacctctaatcccca

SEQ ID NO: 720375 - DNA, 338 bp, Homo sapiens
  misc_feature (20)..(20): n is a, c, g, or t
  misc_feature (65)..(65): n is a, c, g, or t
ccagtacaaggcagtatttntgtgtgtttgaccaaagcgctttacttcatgtaagagaaaaaatnaagcaaaacaaggccaggttccagtgtcacgcctgtaatcccagcaccctggaaggccaagacaggcggattcccagaggagttgagaccagcctggtcaacatgcgaagccctgtctctactaaaaatacaaaaataagccgggtgtggtggcacatgcctgtaatccctgctacttgggaggctgaggcaaaagaatcacttgaacccaggaggcggaggttgtagtgagccaagattgcgccactgcacttcagcctgggtgacagtaca

SEQ ID NO: 720376 - DNA, 258 bp, Homo sapiens
aaatagccaaaggttgaaatagcacaaggtgagtggtgatatagtcagagagtttcagagcatcatagagagcaccatgattagggcaatactagaatatgagcgttcaaaagaagaggcaaacgatagggcaactagcaaacgcacaaacaagcaaggtctctgaagctctcagacgcagtctctctctcgtctctctgtctgcatctgtctctctctcactctctctcactctctctctctctctctagctctctg

SEQ ID NO: 720377 - DNA, 392 bp, Homo sapiens
gcactgatgatgcaattcgttctaaggctctttctcatccagacaggctccctgctgagcctggcaaaaagtacgtgaacagtcaagaatgaagccagggggaatcagaaaccacacagccccagactagatttcatggactaacataacggaactgtctcaacacgaacacggacagatccattagtgaggtaatgaattctcgccttttatgtcgggatagaacagggccaggtagagacagaatgaaagcagcaacagatagggagagggagcagcagcagagagagcagagcagaggaaaaagtgcgctcagcgcaatgggccggcgtgacacactgtatcaaggggtccaaggacactctagagttagtgcccgtcgggacacacta

SEQ ID NO: 720378 - DNA, 189 bp, Homo sapiens
caggcacagagaggtgtctatttgtaactccaacacttgacaaaaaacaaaactgaagctgtgatgggtttaggcagcaaggggccaggtgcaattggttggtttttaattttggtttcccccaacagtactgaggtcactggcacttttcctcatttcttaagaaaattccagtatgctcggggcggg

SEQ ID NO: 720379 - DNA, 254 bp, Homo sapiens
acagacagaactataaaatactacataaggggcataacaaatgtgaacaaataagtataccatgtgacattaagaagtgtgcgcaaacttacgtgaatgtattaatttactgtgatcttggtcgggtgctaagattacaggcatgaaccacggtgcctggccgaaccatgtataaagcacgcaagcaaaggcagagagagagaagaaagaaaagaaaaaaagttcatgcccatccagagagagattggtgtaca

SEQ ID NO: 720380 - DNA, 853 bp, Homo sapiens
gttggctgctgtcatggcgggtgtactgaagaagaccactggaccttgtgggattggctgtgtgcaatactcctcagcgagaggctaccgaatattgtccaccaagattcttgatgtgcttgaggaaatccctaagaaaagtgcagcattatagaaagtatagcagagacacggattacaagatgagaacgctcgcgcatagtggatctaaacgcaggagacccaggatgatctaaacaagattacaagaccaactttcatacgtgacggtcaccattagaacgatgcgtgagtatcgttcagggctgatacatgagactaaatctggtccagaataatgagtggtaatggcatacctagtgggagtcctattatatgtggtaatgaagtccttccctgaccgcactcacgtggcgtagaattgggccaaactaataaaatctattaaaggtgaactgttgggtgtgtgtgcatgggtaaaactgatgataaattaagatactgtctgataattacttaacgagcgtgctacttagttactgacagtgtttgtagtcaaggagaacaggtgagtagtaggacaagactagtgctaggggagactggctttcacaattccgcgtgacttactggtttaactatgtgtccatgttgcaaagtcgaaaggtgacggtgagttgtattgaaacgtacctccacacacagatcgtcttctcgaacagtgatgcatcatcgtctgttgaaaactgtagaagggcccatgggggaaaggattgtggacaacatctacttgaaagtataggacattcctaacagcaatctatcaaatggggagaagcacccatagagtcat

SEQ ID NO: 720381 - DNA, 369 bp, Homo sapiens
tgtttcatgcactaccagctgttttcacctgcacgatggggctggtgtactgtgggctgccaccggagctgcccttgtcaagtgttctggcgcccacggtgcgctatgaggtggacactgtgcttcgctaccggtgccgggacggactggtccagcgcaatctgtcgctgatccgatgccaagagaacggtcgttgggaggacccccagatctcctgtgtgcccagaagagctgtccgagctctagacccagaggaggacccagaacgacgtcagggaaggctactgggacgctggaaggggctgttgatccccccttccagccccatgccaggtccctaggaggcaaggcctttgaagacaccacgga

SEQ ID NO: 720382 - DNA, 220 bp, Homo sapiens
aggatccccaatctttatttctatttcgcttttgtacgagacggggttgtcgctatggtcgcccaagtcactattgaaactgctgggctcaagtgatccaccaacttcaggctctcaaaatgctgggattacaggtgtgagctgccatgcctggcccttcttagagcggtcttgctttgttgccccacctggagtgcagtagagtgatcatagctcagat

SEQ ID NO: 720383 - DNA, 965 bp, Homo sapiens
gaaaagaaggatggtgacaatgaagaagaagaagaagattagggcaaaatgtacatcgatcaagaagagctcaacgaaaacaaagcccatctggaccaggaaatcccgatgatattactaatgaggagtcacggcagaattctataagagcgttgacaatgactgggaagatcatcttggcagtgaagcatattatcatgtttgaagggacagtgtggcaattcatgagcccttctatttgtcccacgacgtgctccttttagatctgttttgaaaacagaaagaaacgagaacaacatcaaatttgtatgtacgccagagtttacatcatggataactgtgaggagctaatccctgaatatcttgaacttcattagaggggtggtagactcggaggatctccctctaagacatatcccgtgaggatgtagcaacaaagcaaaatttggaacagttatcaggaagaattaggtcaaaaaatgcttagaactctttactgaactggcggccgataattgagaagcatacaagaaattctatgagcacaatctctaaaatccataaagctaggaatacacgaagactctcaaaatcggaagcaagctttcagagctgtacaggtactacacatctgactcttgtgatgccactggttactcttccaggcctactggccagaactgcacgggaaccaggaacatatctatactatcacagggtgaagaccgacgggaacaagaaacgtaacactacgacctagggggccacgagctcccgaaacaataggggtacacaccagagcaaaaagaggagaggccccaatgagcgaacacaggggccaacaaagagaaggagaatgaaggcgcaacacacagagtgacacaacaccaagagaagccatagagaccagcaagcgcaaccacaagaagcagagcgcacacgacaacaccagcgaacacacgcac

SEQ ID NO: 720384 - DNA, 389 bp, Homo sapiens
agctcgggccggcatactggacttctacaataccttctcacattctctctttgaacccagacaacaaccccacaaagcaggtggtattaaaaggtaagactcccgaccaggcacggtgactcacacctgtaatcccagcactttgggaggccaaggtgggcggatcacttgaggccaggagttcaagaccagcatggccaacatgacaaaaccccatctctattaaaaatacaaagaaatttagctgagtgtgatggcaggtgcctgtgataccagcaacttgggagtctgagtagtgagaatggcttgaacccgggaggcagaggttgcattgagctgagatcgtgccactgcactctagccttggcgatagagcgagacttcatctc

SEQ ID NO: 720385 - DNA, 157 bp, Homo sapiens
ttgctaatatatgtaatcacattccttaggaggacttggtaatggttttatgcatgatggttttttttttctttttggccaaatggactgtcacgcggcagcttcagggagctcgcattctctggtgtcgtgtggccctcgtgcccatcaagtgcag

SEQ ID NO: 720386 - DNA, 178 bp, Homo sapiens
gcaccgcagatatcattttattcggcttccgtaccagtgttgggagtcagctcatactctcacgccgcgctcgggatcgcgatgattatagtagcggaggtgaaatatgctcgtgtgtctacgtctatccctacggtgcgttggcccaggatatccgagctcgatatcgtgatcgttg

SEQ ID NO: 720387 - DNA, 159 bp, Homo sapiens
tgagcccgacctttcaaagcggaatgctgcccagaagacagatacatcccagcatgatcaggatcacccaagcttcaacaagatcaccccaaccatggctgaggttcgccttcagcgctataccggcatgctggctacactcagtcgcaagcagcatct

SEQ ID NO: 720388 - DNA, 265 bp, Homo sapiens
ctagcaggatcctccaggaagccccatcctctcgggcaccagcaaagcatgcatgggggcagggcagccacaggtccagcgtgggcaagcagggtccagtggtgccactgcagcgtgtcaacattcgttccgttcccttcattcaaacattcagcacacctggcagtcatgcaatttcactttatctccaacattcgtgtgcccaggcagcaggttggcatgcagtttcaattcacacaggggtaacctgcagactccgcacata

SEQ ID NO: 720389 - DNA, 388 bp, Homo sapiens
ttacttcgcgataaatacatacttcggaaaagtcctcccctacaaagcaatttgaaaaattagaaacagcaaatatcacatcagatgcacagatatcaacttcaggatgcaggaaacgtgaaaaaacaagaaaatatgataccaccaaaggaacacaataattctccagcaacagatcccaatcaaaagtaaacttacaaaattctgggaaaagaattcaaagttgtgatattaaaaaagctcagggaggtgagatacaaactttaaaatttgttttaaaaaaatacaaagaaatcagaaaaacaattcaggatattaatgagatgtttatcaaaaaaagatacatataaaagaaccaaacaacttctggaaataatttattgatgaa

SEQ ID NO: 720390 - DNA, 231 bp, Homo sapiens
tatcaggaagacacattactagggtgttaagaatgaagtaaaaatggtatttttatttcatatttatgtgtaattccaactcaaatgactaataagttgttaggacataaatactatcagctgtttaaacccaactaattaaaaagaactgctgagtgtgttttttggctcagggggtactatgaaaacattactgagacaaaattactgggaaacgcccgaacggtgggg

SEQ ID NO: 720391 - DNA, 360 bp, Homo sapiens
  misc_feature (26)..(26): n is a, c, g, or t
  misc_feature (31)..(32): n is a, c, g, or t
  misc_feature (35)..(35): n is a, c, g, or t
  misc_feature (49)..(49): n is a, c, g, or t
  misc_feature (62)..(62): n is a, c, g, or t
  misc_feature (65)..(65): n is a, c, g, or t
  misc_feature (276)..(276): n is a, c, g, or t
  misc_feature (332)..(332): n is a, c, g, or t
tatatgttctcgatccgttaaaatantacanncanaaaaagataaagtnctcagtaattccnaantgctatccaataaacagcaggaaagtgatctgctataagcagctgtaactcacaactctcaaatcaaatgtactaaaatgtactaaatgctcatcttaaaggtagactgaatttttagggacaactaaagatctgaagctgcctattatgaataaggttaagtattcaaactgctcttgattcaaaacaaactatgactacaacagaaatnggatcttaatgtagtttacctcctttcccacctcccaatcacctaatctaaacatngtatcacaatgtctagtctaacttagtc

SEQ ID NO: 720392 - DNA, 1025 bp, Homo sapiens
gatatcccgggatattttttactaatgaatatttaatattccttattgaataaatgctgtaacttgtttgctatggaacttattcttaaagttctagttaaaaataatttttccacatgcatgaaaatatgtattaatcagaggtggcttaattacattgaaattgcttttttgttgtgttagccactgatgtaactcatgtttgtgtatgacataatgcctgttactcagagtttatattgtccttcagtctatagttttaagatcaaaaggtcggggtaatgtgatacttttggatcttacttagttatacttttttataaatgacactagaaaaactacatgtattggttatatagctagaagatgtgccacactttccaagtgtcatgatacacatcatgtcaccattcaggttcacacagcaatgtgtgtttcataatgcaccttctaacctggtcatgacgatattacttgcacgatgtgtacctttgactcgtctcgcgttcactcctgtacctctttctgccagtctccgcgtcgtcgttcttgtgttctcccactctacgctctcgttcttacgtccggtccctctcctcacatcacttctctccctcctcgaccaatctgtcccctccttcgccccttctggcccctctctcttctccgcgggataaccacttcgtccgcggcgccgacgcgcggtctcgctcgccaccctcctctgcccccgattcgagtctcgcgctcgtcgttccagcgagcgcccttcaccccatccctcgcgaaacctctgtcgttcttctttcgcgcggtccccttgaccgatgtccgcctccaccgacacagtcgacgctgccctctgctcatcgcctttctcctcttgtgcgtccggatgcgccttccatgctacctttcgcagtcttttcctcgcccgcccgctccctctgatggcctcacttcccccgcctctcccttcgtctcttccgcgcccctgtcgtcaccactcccgactgcctcgtctg

SEQ ID NO: 720393 - DNA, 621 bp, Homo sapiens
  misc_feature (68)..(68): n is a, c, g, or t
gcccggtgagggggattattccatccatttatcattaatcgtggaattatcattcaatttaaaggaancctgcactcctgaagaggggaaaaattattaacatcaagttaatccaagttccccagatgcagccaggagttaaggagttaaagaaaaaagattatgtggagggcacaatgagaaggctgaaacataaatgtcatcagtatttgagaagaaaaagtgcagaacataggggggcggatagaggagaaaaacaaattgtgggggtcacagcagaaataatagaagctaaaagactggataataacaccttcaaagtgctaagaaaaaaacaactggcaactcgtaactatatacctgctgtgcctcctgggttcaagcgattctcttgcctcagcctcccaaggtgccagccaccacatctggcacatttttgtattttaagtagagacagaatttcaccatgttgggcaggctggtctcaaactccttgtctcaagtgatcctcccacctcggcctcccaaagtgctgggattacagacgtgagccaccgcacccagcctgaaaaaatttttgtatagaaaattaaaatatttaaattgtgaaattaaaaaaaa

SEQ ID NO: 720394 - DNA, 162 bp, Homo sapiens
  misc_feature (162)..(162): n is a, c, g, or t
ggttggttttcttaggcgcagacgggggaagcgggagcaaacaattccaggtgccccggagcttgggtttttctgcaaaacttatgttaaccccgcggagggaccccttcgaggaaattctcgttctcgtaccaggagcggatggcggattcgtcgagaatn

SEQ ID NO: 720395 - DNA, 175 bp, Homo sapiens
tgtgggagggcttctgagctctcttctttttggggtcctcggaggctaggttcttgccttggtggcgcctaagctgctctgaaggctcagactgagatgaggtagttgaagtgcaccgcggcggctgctgcccatcttctcccaactgggcatgctcagtgccacacatgccttc

SEQ ID NO: 720396 - DNA, 410 bp, Homo sapiens
ccagaagtgagaagatgtctatttgtctttctgtacctggattatttcacttaacataataagtctccaattctgcccatgttattgcaaatgataagatctcattctttttttctttttttaatttttaatttttattttttttttgagacagtcatgctctcgtcaccccagctgaagtgcaatggcatgatatcggctcattgcaacctccacctcccgggttcaagtgatttctgcctcagcctcccgagtagctggtataacaggagcccgccagaatgcccagctaattttggtatttccagtaaagacgaggttccaccatgttggccaggctggtcttgaactcctgaccttgtgatccaccctcctcggcctcccaaagtgctgggataataggcgtgagc

SEQ ID NO: 720397 - DNA, 944 bp, Homo sapiens
  misc_feature (71)..(71): n is a, c, g, or t
  misc_feature (83)..(83): n is a, c, g, or t
  misc_feature (270)..(270): n is a, c, g, or t
  misc_feature (278)..(278): n is a, c, g, or t
  misc_feature (408)..(408): n is a, c, g, or t
  misc_feature (422)..(422): n is a, c, g, or t
  misc_feature (483)..(485): n is a, c, g, or t
  misc_feature (569)..(569): n is a, c, g, or t
  misc_feature (582)..(582): n is a, c, g, or t
  misc_feature (588)..(588): n is a, c, g, or t
  misc_feature (595)..(595): n is a, c, g, or t
  misc_feature (603)..(603): n is a, c, g, or t
  misc_feature (635)..(635): n is a, c, g, or t
  misc_feature (653)..(653): n is a, c, g, or t
  misc_feature (715)..(715): n is a, c, g, or t
  misc_feature (760)..(760): n is a, c, g, or t
  misc_feature (788)..(788): n is a, c, g, or t
  misc_feature (915)..(915): n is a, c, g, or t
taaagtttatttattgtacagaagtaatttcaattcaggttttaagtctgaaccttcaaacttgggaagtntttttccaagtnatcagcaagcgccttatcaacttcacgtaggattttaataaaatcttccaccacagggctatagaaaggaagaaggttttgaaatgcagaggaacacttctgtttgctcaactggccttcctttactccctgagccaccgtctcctttgttaatgcctgaaaaatattagaaagaaattcacattanatatcctntaagaattgtcaagtggaaatcatcttgggttaaatcagtccttttagtttcctctgtgttagactctgccgagttctctggttttttctgaaactgttccatattttgtaagacccgaatgaggctgtnaattagaggaaganctactttttctatctttagatactcttgctcagtctgtgagggatagatggcagaaaacannnaaaaaacagaggctagcactgttttctgttcttgaagaatgatgggtggatcatcagactggcagaattcatggcagaacaggncaaaaagtaaatnccaaangtctttnccagtgtnaggacaatgtacaattgcttgaattccatcanccactgtagtgagcagtngtgaaatgtgcatgttaacatcaagccattttggattttcagaacgtacttgtttggcagcntcaagtatacagggcacaagccgaaacactggctgctcttcagantcttcctggggttggtccagaggctgancagccccatttctgacccattctaacattagtttctcatccaaattaaagagcttgttcacaacctcccccaccttcaccagccagttaacatttgttgaacttgaaataatgaagcaaattctatnataaatagctggatgtcctgggatccttt

SEQ ID NO: 720398 - DNA, 206 bp, Homo sapiens
caggtcacatataatcacggctatcattcctgtaggtatgtactatgatcttctgattaagtcactcagaatatcttctggctattttggccaggaatcacaaagattattaagagtggttggaatcaagaagatctatgatggaacattgaatgaactgggattatagagccatggagaagagaacaccgagggtcaacccatgg

SEQ ID NO: 720399 - DNA, 491 bp, Homo sapiens
  misc_feature (71)..(71): n is a, c, g, or t
  misc_feature (83)..(83): n is a, c, g, or t
  misc_feature (270)..(270): n is a, c, g, or t
  misc_feature (278)..(278): n is a, c, g, or t
taaagtttatttattgtacagaagtaatttcaattcaggttttaagtctgaaccttcaaacttgggaagtntttttccaagtnatcagcaagcgccttatcaacttcacgtaggattttaataaaatcttccaccacagggctatagaaaggaagaaggttttgaaatgcagaggaacacttctgtttgctcaactggccttcctttactccctgagccaccgtctcctttgttaatgcctgaaaaatattagaaagaaattcacattanatatcctntaagaattgtcaagtggaaatcatcttgggttaaatcagtccttttagtttcctcttcgtcgcaacccctcgccgccgccaccgagtcgcgacaaggaggaggaggaggaggtggccggtggagaacatgcatagggagcacggtgtacagcaaacacatggctattcggcgtcctaagcggactcatccagattgattagcgcgtgctgctg

SEQ ID NO: 720400 - DNA, 414 bp, Homo sapiens
cggcttcacggaacttttctcttctttacttgcttaatgttgctaatggtcaatcaattttgtttgtgtttacagaaaactggctttttgatttatcttttgtggtatttttttgtttattttgtttgaatttcatttagttctgctctgatgctcgttattacttttcttctgtatgggtttgggtttgattcgttcttgtttctctggttacttcaggtgtgactttagattgtctgtttgtgctctttcagtctttttgatgtggccatttaatgctgtgaacattcctttaaacatcactttcgctgtgtccttgaggttttgatatgtagtagtcactattactgtccagttgtaggaattaatttccatctagatttcattgttgacccaaagttccgttgaagccgt

SEQ ID NO: 720401 - DNA, 204 bp, Homo sapiens
  misc_feature (106)..(106): n is a, c, g, or t
  misc_feature (194)..(194): n is a, c, g, or t
  misc_feature (196)..(196): n is a, c, g, or t
cctccgccgcccgactcacacacaccctcccccgggaacggcaagtctcctcgggttccaaggacagggtcaaaagacagggtcaaaagacaagaggcccgaggcntcccgccgtgatttgcagccagataccgttgggagcgcagcccagagagcgttgggagcgtgtgtacctccagcccaacgatttgtcngnagcggtcc

SEQ ID NO: 720402 - DNA, 149 bp, Homo sapiens
atccaagatgttctcttcccattagcacggttaattttggtcacgacttcggcaatgataatctttgcttcaatggcatctttgagtttcttatacgttggggttcttgtagatctccaggtgagccccttgaaatggtcgccaatccg

SEQ ID NO: 720403 - DNA, 314 bp, Homo sapiens
tgactgagtctgctgtgcgcactggctgacgcttcttggcctggcacgtatagagctccgctgtacttctcagtgatgttggagcataacgagctcttgtgtgtgttgctgcctgttcccatcaatcagccaagaatactgtgcacgtgggtcagcggctgcatggcaggagaggctgaggttcacccctggacggtactaggtgtctgaggggtaaatggtgggctctctgcagtctccacctcccgggtccaagcgattctcctgcctcagccctcccgagtaactgggactacaggtgcgcgccaccaagc

SEQ ID NO: 720404 - DNA, 665 bp, Homo sapiens
  misc_feature (36)..(36): n is a, c, g, or t
  misc_feature (100)..(101): n is a, c, g, or t
  misc_feature (106)..(106): n is a, c, g, or t
  misc_feature (151)..(151): n is a, c, g, or t
  misc_feature (325)..(326): n is a, c, g, or t
  misc_feature (329)..(330): n is a, c, g, or t
  misc_feature (345)..(346): n is a, c, g, or t
  misc_feature (392)..(392): n is a, c, g, or t
  misc_feature (427)..(427): n is a, c, g, or t
  misc_feature (488)..(488): n is a, c, g, or t
  misc_feature (493)..(493): n is a, c, g, or t
  misc_feature (553)..(553): n is a, c, g, or t
acgcgttctcctcacagctcttatgaagcaagaagnaagagagaaacagtattacaggaacttgataggggattatattgggatggaagagcacccaganntccgncagttcgtgggcaagaggtgagaagattgatttcgcagacacagncaccaagtatgacaggaggttcaaggtgtgtaaagcgagaactgctccttaccccaaagtgcttgtactatatcggacgagaaaaacgtcaaacagggtcccaggggagggcctggtgaaagacgtctgaatcggaataatcgagatcagaacggatcttgtttgtgttcgttnntgnnaggcaggatgacatnnttattctccatgagcaagagtatgacagtttgcttgaatctgtctncaaaactgaattcctaagcctcttagcaaagcgtnacgaggagaagacccagaagcaactacctctgaaattcagcaatacgcttgaactgaagtngaaanaggaaaactggggcccctggagtgcagggggctcccggcaagtgcagtccaccaagggtnaggggacctggctgtcctcaagcccagtaacaaagtgctgcaggtcagcatcggacctggaatggccaagaactaccgtccttacagaaagaacactacccaaaatacaggt

SEQ ID NO: 720405 - DNA, 380 bp, Homo sapiens
agggtggccggctttcccaaaaagggggccgggcccatgggctttttttgggatccgagaggggggaacaattcccggaggtccctccaggccaaagtgaaggggttaaagggggcccgccccaaatttttctttttccccaggaagccctgggcccccaaaaagggaaacatttttgttaaaaaattaaaattggccccccagtttcccggccggttaatccccttcgggaagttttttaaaaaggaaaaggctcggttcttccttggggaaaaaaaaatttttaaacccttcgttattttccgtatggcccgtcccaacccccggttttttggcaaaggggcaaaaaaacccaaggaaccccccaaccgggattttta

SEQ ID NO: 720406 - DNA, 288 bp, Homo sapiens
  misc_feature (71)..(71): n is a, c, g, or t
  misc_feature (90)..(90): n is a, c, g, or t
  misc_feature (159)..(159): n is a, c, g, or t
  misc_feature (232)..(232): n is a, c, g, or t
  misc_feature (255)..(255): n is a, c, g, or t
gggaagctgaggcgggcagatcacgaggttgggatatcaagaccatcctggccaacatggtgaaccctgtntctactaaaaatgcaaaanttagctgggcatggtggtgcgtgcctgtaatcccagctactcgggaggctgaggtgggagaatcgcttnaacccaggaggtggaggttgcagtgagctgagatttcgccactgcactccagcctggtgacatagtgagactncgtctcaataaaaaagccatgtntgcatttagtcattacacttttaaagggtctgt

SEQ ID NO: 720407 - DNA, 1285 bp, Homo sapiens
tgactggccaatttacatttacaatgaccctggcgttggatgttggtttaattcaggaaagtatttaatccaaacaagaccataggaagaaaaaaaagaaaaaaaaaaaactcatttatcccagcgttaaaagctttataaaaccattttgccagtctcatgtcactatttaaatatcggaagtggtgacccaaagagtctttctacaatatctcttgtactggctactgaattacagccaggattcatactattggacaaacgtgtgcctgggctgtggacctcctggatttggggctttaaacaaccatgtcaaagaaaaaaaacggctttacaaacgaaacactacaaacccaaacacaaggccggattgttgtgcatagtgggccccttcaccaattaccccatatcccccttttaaaaagtgcatattttatagagacaacgggtggcgactataaaagaggggtatatcaccccctattagtgcaacctccttgtgagtaccccccacggttgtggaggccctaaacacacatagtcccttttttatcacaaggcccaaacacaagacgagtggagcatgtgttagctgtgtggctacaaggaaaccagtggtgtgtgcatcagacaccgcgggccttcacaatgtgtcgcagcccgcatacgacacatctgttatgacatccttaaaattactaattatagacgagagaacaccaattattcaccaaaaaaacatgtactttaaaagcgaattgatatatccgagaaaaaatgactttattacccacaacaaatgtacttatcctatatgacccccttaagattatacacaccataaccttaaattatacacgattgaaacagattcccgcctatttatttacgacgtggttaactacaccaaggtgggatatgtgcaaatacaatcagaccgacgaggggccaattatgccgcgatatggttccacagaagtagaatagaatatggtcagctagctgggataatgatcacataacaatgatgggggatcacccacaataacaaccactgtaacaagtaggattgataccacagcccacaggtcgctacctcatttccatcttaatattaaaacaattgttaaaacccccctcatagtttgtagaaaaaaaatacttcttatcctatataggccccgcacataattatattatccctactaaaactaggatccatggtgaattcttgtggatgtccactcatcattattgtgtgagccaaccacaactaatacaaccc

SEQ ID NO: 720408 - DNA, 908 bp, Homo sapiens
gggggccgcgcgtgtgtgcgctcgcttcgtggaggtgtgctgtggcggagcagcccctgtcactatgaatctactgccacacgccattttctggggaccttacagaaattgcctcttcaggcaggtgtcagaaatttccatactgctcctgtccgatccttgttcctgctgcgccctgtgcccatcctgttggcaacaggtggagggtatgccgggtaccggcagtatgagaagtacagggaacggaagcttgagaagctgggcttggagatcccgcccaaacttgctagtcactgggaggtgtccctgtataaatctgtgccaacgcgtttgctgtcacgtgcctgtggtcgcctcaaccaagtagaacttccttactggctccggaggccagtctacagcctgtatatctggacctttggggtgaacatgactgaggctgcagtggaggacctgcaccactaccgcaacctcagcgagttcttccggcgtaagctgaagcctcaggcacggccgtatgtggcttgcactgtgtgaccagcccatcagatggcaagatcctcacctttgggcaggtgaagaactctgaggtggagcaggtaaagggcgtaacctacttccttggagtccttccctgggccctcgagcccagtacagaggactgccttcccttccagtttcctccagtgactccttccagaaaccagctggttcacccgggaagggaatgagcgtgtaccctgtgttcatcttactggccccagggacttcactgtttcctctcccccatgatggacctctcacattggggccttcccagttcctgtgttctggacccggctggccgatggtgcagagcctttgggcagggcgtgtccacgcgacggaacagggttctcaccggggcc

SEQ ID NO: 720409 - DNA, 236 bp, Homo sapiens
tctgcgttggttctggtcaatagatagagaagatgcagcatgacagaacgacaagatcttgtatactataggacatcaagcccatcacatgccagccagtgaaggaaggattccagacctatgccctcaatcacaataagaccaccagactaccaacatcttcctactgcaaactacattgcatttctcgacctttacgatccacactcagacattcctcgcaaacagaggggaat

SEQ ID NO: 720410 - DNA, 864 bp, Homo sapiens
  misc_feature (1)..(1): n is a, c, g, or t
nctccgcctatggtgcttcccgtctggtggtgggggtcgcttatcgtctcgcgcgacaaaagaggtgttggtgtatattggggcgcgccgaacaacctctcccggtgcgtgtggtggctgtggggtggtacgaaaaaacaaatcgggcgggtttgtggccggcactcatgcgtgctgcgttagaaaatatgctgggtgcgccggatataaatactactacttgggtggtttgaccgacccaatgtctttagagaatattttttttcttgtgcgagaatagtggatggggtcttgtttatgtgatttctttgtctcttttctttcaggaagaagagcgactcccccctgtgtctgtgttcacacgacttcagggatggggcgtgcgtcacacattgtcagctaatttgtttgggcttactcatgtgtcgtaaagactggctcgcccctcctcccacgtggacggcccaaaccgcaatcctgtttgtgtcgtccccttggtcggccctcgcaccagctaaagcaccgtggagtatatatcttatgcgccacccccgcccgcacacgccccctggtgctaggaattcagtgggtcttcaacatattctcttacaatgattttcataactccccaacattgttcaatttttagcatcgccttttcccacagtgatttatgaactgtgtgcgattaatacgaaattacacacacaattgatagattctacttattctttggatactcatgtaacagtattttatctagcactgctgctaacccttgtggacaaccctttaatacagaacaagacaacaacttcttccccatcccgcatccaccaccggctttcccccccagcctagaca

SEQ ID NO: 720411 - DNA, 751 bp, Homo sapiens
  misc_feature (40)..(40): n is a, c, g, or t
  misc_feature (81)..(82): n is a, c, g, or t
  misc_feature (111)..(111): n is a, c, g, or t
  misc_feature (118)..(118): n is a, c, g, or t
  misc_feature (167)..(167): n is a, c, g, or t
  misc_feature (177)..(177): n is a, c, g, or t
  misc_feature (188)..(188): n is a, c, g, or t
  misc_feature (206)..(206): n is a, c, g, or t
  misc_feature (217)..(217): n is a, c, g, or t
  misc_feature (222)..(222): n is a, c, g, or t
  misc_feature (229)..(229): n is a, c, g, or t
  misc_feature (234)..(234): n is a, c, g, or t
  misc_feature (329)..(329): n is a, c, g, or t
  misc_feature (443)..(443): n is a, c, g, or t
  misc_feature (523)..(523): n is a, c, g, or t
  misc_feature (534)..(534): n is a, c, g, or t
  misc_feature (613)..(613): n is a, c, g, or t
  misc_feature (631)..(631): n is a, c, g, or t
  misc_feature (678)..(678): n is a, c, g, or t
  misc_feature (685)..(685): n is a, c, g, or t
  misc_feature (716)..(716): n is a, c, g, or t
atggagctcgaaaaaatagtagaagaaaacggtgctaatnaaggcacgggaaggtggcggtggaaatagcaaaggcaaaannaaaaaatggcggcaaatgctccagttccntcacatnagccagtgcgaagagctgcggctcagcctcgagcgtgaatataacagcntgtgcgagcngcagcccattnggcgcttgctgtttcganagttctgtgcnacgangccgganctganccgctgcgtcgccttcctggatggggtggccgagtatgaagtgaccccggatgaaaagcggaaggcatgtgggcggcagctaaagcagaattttntgagcaaaacgggtactgaactaatcactaaagtcccccggaagctggtgacgaactgcacccagcggctggagcagggtccctgcaaaaaaattttcaaggaaataaaacggntgaaccacgagtacctgagcgtggccccttttgccgactacctcgacagcatctacttcaaccgtttcctgcagtggaantggctggaaangcagccagtgaccaaaaacaccttcaggcaataccgagtcctgggcaaaggtggctttggggaggtgtgcgcctgccangtgcgggccacaggtaanatgtatgcctgcaagaagctagagaaaaaagcggatcaagaagcggncaggggnggccatggggctgaacgagaagcagatcctngagaaagtgaacagtaggtttgtagtgagcttggc

SEQ ID NO: 720412 - DNA, 203 bp, Homo sapiens
tggggggggttttttttttcaaaaaaattttataaaggggggggagggggaaagggccccgcgggggcccccccccaaaaaaaacccgcgggggggggtaccccccccgaagaaaaagcccgctagtaaggcggcacgtctgtgccataatagtacaagatggcagtgagtgaaacacgaaactgagggtgcttctcctctta

SEQ ID NO: 720413 - DNA, 639 bp, Homo sapiens
gtaaaagctgtaaatggacataaggagcgcttagaggtctactgtggaaagaggaaatatcttcacatagaaaactagacagaagaattctgagaaacttcttggtgatgtatgtgttcatctcacagatttgaaactttcttttgattgagcagtttggagacactctttttgtagaatctgcaagtggacatttcgagtgcttggtggcctgtggtagaaaacgaaatatcttcacataaaatctagacagaagcaatctgagaaacttctttgtgatgtgcgcattcatctcccagagttgaacctttcttttgttggaccagctttaaatactcttttggtagaatctgcaagtggacatttcgagcgtcttgagtctatggtggaaaatgaaatatcttcacataaaaactagacagaagcattctgagaaacttgtttgtgatgtgtttgttcatctcacagatttgaacctttcctttgatggagcagtttagaaacactctatttgtagaatctgcaagtggatatttggagcacgttgtggcctacagtagaaagggaaatatcttcacataaaatctacacagaagcaatctgagaaacttctttgggatgtgtgcttcatctcacaga

SEQ ID NO: 720414 - DNA, 244 bp, Homo sapiens
aactccattggagatgctacactccttcacatttattcaaaactaaagtaatcctttatatgtattttatggctgtattttcaaaataatcctgagaaaagacacagcagataatcgctatcttacaaaagaaaaaagctgaggcataaacattaggagcagtgtttaaactagattctcactctgtatataatagcccttcatttaaccacacctgcacatactaaatgcagaatttaaattt

SEQ ID NO: 720415 - DNA, 257 bp, Homo sapiens
  misc_feature (227)..(227): n is a, c, g, or t
atttacctttgtttcatgatagttaagataatctaactggaatttctctcacacagcactccattacttcatgataatatccgcttggttatgtcctttaccccattatttattacttctttaagtgtttctgtagtaactttttgacttttttttaacttataaaagatgctcattaaaagagtttgaaaaacttggatatgtattaaatgtggaaatagaaattncttgtgagtccaccattcaaagaaagtttt

SEQ ID NO: 720416 - DNA, 192 bp, Homo sapiens
ccatgaatatggatgggcaacttttcctatccttaagttccacagggccaacttgtactgtgggacttcattatgttcagatttggggatctggaggagttctgcaaccagtctcccatggataacacaggatggctttttattcaaaactgcagtgactagaagtccttgccattgcaacacggtctctca

SEQ ID NO: 720417 - DNA, 514 bp, Homo sapiens
  misc_feature (495)..(495): n is a, c, g, or t
tagaataggatagaatagaatagaatagaacacagtagaatatattagaacagattagaatatattagaatagaacagaacagaacagaatataacagaatagacagaacagaataggacagaataaaatagaatagaatagaatagaacagaatagaacacaacactacacaacactatacgacagaatataatagaatagaacagaaccggatagaaaagaacagaacgtaagacataaccgcggccgcggttatgtcttacgctgcccttgctcagtgggttaacgatccggcgttgccgtgagctgtggtgtaggttgcagacgcggctcggatcccgcgttgctgtggctctggcgtaggccggtggctacagctccgatttaacctgaactctaacacgtagcagtgtcaacaactgctgctttaagatgtgtctacctacagagtgccagccaggtgcccaaagtcaggtcctgactaagctccgtangacataaccgcgggtccgc

SEQ ID NO: 720418 - DNA, 207 bp, Homo sapiens
ggtgaatgcatttatatattagttatataattaaaagttaaggaaggagttcccgtcgtggcgcagtggttaacgaatccgactaggaaccatgaggttgcgggttcggtccctgcccttgctcagtgggttaacgatccggcgttgccgtgagctgtggtgtaggttgcagacgcggctcggatcccgtgtggctgacattatctc

SEQ ID NO: 720419 - DNA, 323 bp, Homo sapiens
  misc_feature (46)..(46): n is a, c, g, or t
  misc_feature (111)..(111): n is a, c, g, or t
  misc_feature (282)..(282): n is a, c, g, or t
  misc_feature (287)..(288): n is a, c, g, or t
ggtatttctgttgttgttattttcattgtgctttgatgatatattntgaaggtgtgctttccaaagcttcaagctgcagtttaaaatgactggaccaacatatgaaggctntcccagctgggctgtggagtagctatgtatgtcgcaacttttgggggctcagtcttttcactataaagatggtggagtggagttcccgtcgtggcgcagtggttaacgaatccgactaggaaccatgaggttgcgggttcggtcctccaattcaatcccgggccgctcagngggtnnacgatccggcgtgagttcacgaagcggtccgagct

SEQ ID NO: 720420 - DNA, 210 bp, Homo sapiens
cgaataccaggcaaggacccaggtcaactgtatcctgtctggtaccttgatttagaattactgatgctggagttcccgtcgtggcgcagtggttaacgaatccgactaggaaccatgaggttgcgggttcggtcccccctgtcctcgctcagtgggttaactttccggcgttgcttgagctgagtgtataccacacgggcagtgtcatgg

SEQ ID NO: 720421 - DNA, 291 bp, Homo sapiens
  misc_feature (21)..(21): n is a, c, g, or t
  misc_feature (100)..(100): n is a, c, g, or t
  misc_feature (133)..(133): n is a, c, g, or t
  misc_feature (253)..(253): n is a, c, g, or t
  misc_feature (255)..(255): n is a, c, g, or t
  misc_feature (259)..(260): n is a, c, g, or t
  misc_feature (262)..(262): n is a, c, g, or t
cgagctccgtacccccagcgnacatgcggcctaggagtatgattgctgtgttgtggtaagacatgcttagctttgtaagaacatgacagactgtcttccnaagtggttgtactattttccattcacaccatcnatgaatgagagttctttttttttttttaacttttaaaattacagtgtaggagttcccatcgtggcgcagtggttaacgaatccgactaggaaccatgaggttgcgggttcgtcccccgcntnatcnntnggataaggatctggcattgttatgagctg

SEQ ID NO: 720422 - DNA, 204 bp, Homo sapiens
cccagaaagatcttattcctgggactgtgggatttaggccattggggattacaatccaggctcatcatattttatttcatgtgaatgtgttctgaagaaatagaaaaagagggagttcccgtcgtggcgcagtggttaacgaatccgactaggaaccatgaggttgcgggttcggtccatccagtaattcgtacgaggggatcc

SEQ ID NO: 720423 - DNA, 406 bp, Homo sapiens
aagtccacttggtgatggtgtatatatggactggatgcagtttgctagtattctcttgatgacttttctattatttgaaaggaatactgctctatagttttgtgtgtgtgtgtgatgcttttggctttggtgtcatgatagccttgagttcatagaatgagttaagaactgtttcctggagttcccgtcgtggcgcagtggttaacgaatccgactaggaaccatgaggttgcgggttcggtcctccctgcccttgctcagtgggttaaggatccggcgttgccgtgagctgtggtgtaggttgcagacgcggctcggatcccgcgttagctgttgctctggcataggtctggtagactatcagttactgagtttcggagcattatcaggatacatcaagagtcag

SEQ ID NO: 720424 - DNA, 418 bp, Homo sapiens
ggcaatttttacttccccaatttaaaaaaaaaaaaaaaaaaatcccaactcaacatcagtcttctgccattccagacccagccaaagatagtcaaaggacaaaactgaatgaaaatcatcctcaggagttcccgtcgtggcgcagtggttaacgaatccgactaggaaccatgaggttgcgggttcggtccagaccgctcttactaagagcggtctccagctcttggttttattaattttctctattgttttttgagtctctattttattgatttcttctttgatctttacaatttccttccttctgctgactttaggacttctttgttcttctttttctaattatttaggtggagggttaagttgtcaatttgggatctttcttcttttttgagaaagccgctcctaccagacctac

SEQ ID NO: 720425 - DNA, 227 bp, Homo sapiens
cgtacaaggccccgccatcctatataaagaatgctagtacattatgaggaagataaagactttgaaaccttcagcaaagctctaacggcccttaaatataggaacaggagttcccgtcgtggcgcagtggttaacgaatccgactaggaaccatgaggttgcgggttcggtccatacctgcccttgctcagtgggtcaaggttcccatgtgccacgggccttgtacg

SEQ ID NO: 720426 - DNA, 348 bp, Homo sapiens
ctgttgtgttgtctgtctgttcattggtgttgactgtatgtgttgtctttcagttgttgggtgttgactgtgtgtgttgtctttcagttggtgggtgttgactgtatgtgttgtctttcagttggtgggtgttgactgtatgtgttgtctttcagttggtgggtgttgactgtatgtgttgtctttcagttggtgggtgttgactgtatgtgttgtctttcagttggtgggtgttgactgtatgtgttgtctttcagttggtgggtgttgactgtatgtgttgtctttcagttggtgggtgttgactgtatgtgttgtctttcagttggtgggtgttgacgtcgacgc

SEQ ID NO: 720427 - DNA, 182 bp, Homo sapiens
  misc_feature (144)..(144): n is a, c, g, or t
  misc_feature (146)..(146): n is a, c, g, or t
  misc_feature (150)..(151): n is a, c, g, or t
  misc_feature (153)..(153): n is a, c, g, or t
cacacacacacactcactcataccccttttaaaagccttcaggccccctagtcgtgtttagaaataatatcaggagttcccatcgtggcgcagtggttaacgaatccgactaggaaccatgaggttgcgggttcgtcccccgcntnatcnntnggataaggatctggcattgttatgagctg

SEQ ID NO: 720428 - DNA, 454 bp, Homo sapiens
ttctttgcgtcgccagccgagccacatcgctgagacaccatggggaaggtgaaggtcggagtcaacggacttttggtccgttaaatttgggtgcccgtccctgtgggttccaaccccaaggggggcccattggccccttttttttaaaaaccttaccaattggggctttacaaccaagggcgattggggggcaacttttaactttttctggggcattttacatgtgggggggcccccccccccaaaaagtttttcccccaaaaaaattttgggtaaaacgcccccccctttgtcccaacttttttgggaaaacccccctttccgaaaaaggcctttaaccccaaatttgggcgttttttaacccaagttggtttccaagataattgaatttcccacgccatgggcaagatttcccatggcacccggtcagaggcttgagaactgggacagcttg

SEQ ID NO: 720429 - DNA, 478 bp, Homo sapiens
gaggaaaagagcatcagactctacacacctgttttggatcctggttccacctcttccatgctgtgtgatcttgggcaggtcacttaacctctctgagcctcaggtcccatatctatagaatgagagtaattgtagtacctaccttacacagctattgtgagtattaaatgagctatttcatgtgtagcacttagcacacataagcacttactaattattagctttaattaggaattattagcttcaattaagaattattaacaactagcttggacaagctttgaacctctctaggactcattttcatctgtgagatgggattaaagtgccaaccttgtcagtgttgtcatgagaattaaattagatcatgtatgtgaattgtctggcccagagctggttctcagcaaatgctggtttgcccctttcctgctttctcgctcctttccaacacactggcttaagacctcgcttggaaaaa

SEQ ID NO: 720430 - DNA, 1713 bp, Homo sapiens
ctttgtcaactcctgtggtcaagccacctcgtgacgtccggaggaggcaggaaaagtttggaacgggaggagcagctgtccctgagaaaatcaagatcaatgccagcccctgtaccccatgggaagcatgccatgcttcctgccagtagcatcatgctttaaccccatgccctgatggagccgtgctatgatggcccaagcgaccagacagtgaccacttggcaccagctggtcacgcacgcactgtttcctatgatcctagtgaaacccactgtgaagaacaattgccccactgatggccaacgaccaattacacgctcttcaagcaacagattctcccgacgatacaactgagtgactctgccctctgcgcaatggcatctggcgagcgcaggacatacaacggaccgtggcgggtcgggcgacctggactcctacaacgagacttgcagtctatgctcaccgtggacaccaatatggtactccgaagatcatgcagtctagcaggtgcctgcacctggggaaacctgctgtgccacagccccgcacctacccatgcctggagccacacttccacgaactcactgaccacactgcacgcctcctgcacacacatgaccgcataccaacggcgcaacaccacaccaccagcccgcccccccaaccactacctgccaccccataagaacgcagcacgcactcaaccaatattgcccccaacacggccccacacacatcccccacctaggccacagacccccgcaccatacacaacaaacgccccaacacacccgcaccacaacacccacgacccataacacccaacgaccaaagccccggagccctggccccccgcccgacccaactcaccctgcgaagcccccagtcccaccgccacccaccactcacaccaaccaccgaaagacgcaaccatatccgccaactctctaaatcacatccatcccacgccccaccccagccacccacacacgcgcacaacacctcaccccgaccacccacaccacgccaacccacaccccccgcagcaccgccgcgcggacaagcagctgaatggcagcacgaggaactcggagccggcacaccatctgccaccgagggccccccacctgacgcgagcccccgccccagtaccaacagccgcgaccaccaacagacccccaccccagccacacacaacgcaccacacagcaacgcgcccactcacaaccaccgcaacaagacacacgcgcgcttccaaccccgccactctcaaatccgcattccacagcaacaccacacgacaccaaaacgcacacacaccccccaactcacaacccacaccacctccccaatcccaaccccaaccaccacactacacaacaacccacaccacatacacgacataccaaccatccatcacacataatctaacaactccatctcgtcactactacagactcaacactactccccccccaccccacacacgcacaccaaactcataaccaccccacccgcgcacgcaacataatcatcccaccacgtgatactcgcacctcctctcgacgactccctccttcgtcacacaccacgcccaccctccaccacacacctccgcccaccccccccactctacccatcaccacaaataaccagctccaccacactcctacttcatattgatcctcatcctcttgcttacaatctaacaca

SEQ ID NO: 720431 - DNA, 742 bp, Homo sapiens
tggaaacaggctggagtgcaggggtgcaacctcggtccgttgcaacctctgtctccccaggttcaagtgatcctcctgcctcagcccccccaaatagtctggtatattacaggcccccccccccacgcctcggcttaatttttggttttttaagataagagacagggtttcacttattgttgtgcgccaggctgtgctcctttgaacctcctgtgaccctcaggttgactcccgcccacctttggccctcccaaagttgcgtgggaattcagcgcattgagattaccccagcctgtggccaatgtggagatttttgagacgcgccacttctcctgaggtagaaggccgctttgtcgcattgggagattgtgagaaagaagccaccccacaaccttctctatagtctccggctctccaggagacagggccttgagacgcattgtgtgaagacattgggcttagtgtaaaatagcggcaaaccctgtgaaagttgaaagcgcccgagggggctttctctccaacgagacagaaaaacagcacttgtggctttggggttcccatgtgctgaggagacgggggcatagcgccttggtgtgggggcgccccatttcacaagagaggcccggccactcggatggctaaagcgcctgtctctcccaagcactttgtgggcagcacccacggtggggcagcgatagctttgaggccatagatttgcaagaccacccttgttcaactttgt

SEQ ID NO: 720432 - DNA, 178 bp, Homo sapiens
ggctcggacctgttcgctgggctgctgtggaaggttgtcgattgttgacaagggatgaggctgtggtactgccagggacagtgttgcctctgttgagcctccctgccagctccacaaccccctgccataatgagtaatacggatgtgtttaggagtgggacttctaggggatttagcg

SEQ ID NO: 720433 - DNA, 416 bp, Homo sapiens
  misc_feature (93)..(93): n is a, c, g, or t
ctagctacttaaggatccataggcgtaggagccaggaacgtgcagtccgcgctgcggtgggtgtgcttgacttgcaggactgggctgcggacngggtgcaggagctcagtgtgctgtcatctctcctctagctggtgctgagtgtctgtctgctgctgcgactccgaggaagcaggagatctgaagggtcagtgatgcgataggatgtgtgttgtactatagtagccaggataagttcatggccttggcagtgattctcattgaatgtacctgtatgtttccatcacatttatgttggccaaatagccaatagtcttgcatggggaaaccaccgtatagccgatccagtccaggagctgggcgaacactgtccatgcggtactcacacgctgtggccgaccctatcgtatcatggg

SEQ ID NO: 720434 - DNA, 1694 bp, Homo sapiens
gactgtacgcttgagaatgctgcgggcaggcgctgtgttcaggcgagacttgacgccctaatgaggaccggagaagaagtggcagttggactgaggacaagcgtccagtagtaactggactgagggatacagaaacccgtgcaatggtaaaatctacctggaacgccatgtcttaatgtcatatccatatgcctcggacaggatatacaagatgggcttcatgacaccatctgactgtatcatcaataagggacctaaggcacgtataagaaggcttcgccgcgaggtgtattggttctgttggaagcaagctctcttggcacgcttgagtcgacgatgcggggagcctgtgcggaatcgaagcgtagttgctggactctaattttaggcagcttaaggttagacgcacctgtgtgagcccttttgtgtggaacataacccccgagaattgaccaatatagccacctagagccaaggagagaaggtcgctagggcacagacagactaggaagggctggccagacatcctagtcgaggacatctacaggcgtgcacaggtccattcttttcacccaattcggtgcagtcctttgtggaccggtaccagagggaaaactgaaccagattgtagttcgcacaccattaacgtctctgagtgtgtagaccatgaaggacggatgcgtgtcgacggaattgggtggaaacatcgtcacggtggaaagcttatggaacaggcaccatatcattcatcttgacggacgttgatcgtagagcggtgaacaaatcaattccaagggggaccgaaaggcatgggaagggcaggccaggaaaatgcaagggcctgccatgggtacaagatgagatataccatgacgtttctgggcgcggatgcaacaagtacgcagaagaacgtaaagagggaattaatctagagtcacacttgtttgatgcgaagggaagcaccatgaggagttgaatgtggaggtcgctggaatgggtgtaggtagacaaggcacgtttacgtaccatggtggctaatacgcaaggcaagaggagacaggtatttagaaggaagagaaaatacaccgctagataaagaaaggaaagcaacaagccctgtagaatataaaggaagatgaggggtaaaacaaccaggcaagggtgtgggcagacgacgtctcggcaaagcagccacgacaaaaaggagccactcgggagaatacgtacctatcgcggcatcaacagggagcaacggggaacgccacggcgacgcagtggcatgcaacaacagcaggaagatgttgcccccccatcaaacagctggtgacacagcaaggcgcaggacccaacacacacaggaaaaggcaagctccaacgacgcggggcaaacaggtacgatggtggtcccaaatcgcgaccacagtgaagacgcgctgtgggaggtcacaacgggtgagacagcaccccaggaacgtgaggaccaggtgggggacaggagaacaacctagaggacacaagttcatgccgcatcaactaaccgaagaatgagattgccggaaacggggcagcatgccgtgcagacagaagacgtcaccgccagagagaaccagatcacaagaagaggcagaccgtcaccgagaccgagcgacccccgatggtcaccagaacaaggggacagcgagagcagccaaaca

SEQ ID NO: 720435 - DNA, 488 bp, Homo sapiens
cttagatgggtcagctggactccctggtacagtaggcatctggctgagctggtgggacaaaactctacaaaaagaaggacaaatgatctgagtcccatgagctgaccagagttgctagggagctgcaaaatcacatcctggcctggcacatcagaaaggaatgggggcctcttcaaattagaagacatttatactctttaaaacatggacactttgaaatgtgttactgtataaagcctgtattctcaaacacagttacacttgtgcaacctctatcccaatcggcagcctgggtttctagcccatgaacttcacatacgctcagaatccaagtgaacactagccagacactctggtctgcccttgtaccctaggggcacacttccctctgtttctctttccttggctcccattcacttcttccagaatcctaagtatcccgggtccaggcaaatcagttactacgcagaaaattgctgtgcctccca

SEQ ID NO: 720436 - DNA, 380 bp, Homo sapiens
ccaagaattcggcacgaggagaaggacgtggtcgaaaccctggctggccgcgtgcccgctgaaggctggaatccggccgagctgtcgaaggaattcggcgagctggaataccgcaccatgcgtgactcggtgctggacaccaaggtccgtatcgacggccgtgcgctggacaccgtccgcccgatcgcggtgaagaccggcgtgctgccgcgtacccacggttcctcgctgttcacccgcggcgaaacccaggccatcgtgaccatcaccctgggcaccgcccgtgacggccaggtcatcgacgccgttgccggtgagtacaaggaaaacttcctgttccactacaacttccctccgttctcggtgggtgagtgcggccg

SEQ ID NO: 720437 - DNA, 170 bp, Homo sapiens
agatagctggcaatctcagcacttctgtacagctgcgcgcatcgttgctcgatgtggagtcaggaagaaggacagattcctgggttccgccaccagcatgttgtaccaaaggatggaggcccaaccgctcgggagctggctgacgttggagatcaccacaacgggcagag

SEQ ID NO: 720438 - DNA, 158 bp, Homo sapiens
tttatataattgctcatatccaggacttaacgaatactcatcttatgtgttgctgaaggttctctgttccacagattttcttgctgtcatttcttatttctagtcctcaagtctataggtttcactgtttgcctcagaggagttttactccattaggg

SEQ ID NO: 720439 - DNA, 237 bp, Homo sapiens
  misc_feature (6)..(6): n is a, c, g, or t
  misc_feature (135)..(135): n is a, c, g, or t
  misc_feature (156)..(156): n is a, c, g, or t
  misc_feature (159)..(159): n is a, c, g, or t
  misc_feature (234)..(234): n is a, c, g, or t
acaatntgcttcacaactcatctgacatcccatcagttgttttatgactccacttccagtttgccacgagcgggatggagcagatgagcaccaccagggaggtggcaatgagtaagatgaccatctggatctcgngcgcccgatgcggcggaagcntcngcggcgccgaaagtcgctgaggcgcggcaaggctggggaggcagcggggtggccccgggaggcaaccgaggcggncgc

SEQ ID NO: 720440 - DNA, 455 bp, Homo sapiens
cgttagaaatcctctttagtagttgctcctgtactggaagttgtagagcgagggtcctctctggctccattcagcaattggacccgtgtcgttctccatctatctcagtcagtagtttcaagtgtgcctgataactcctctccttctgttccatcatctgctcattctttcttagcatttcctgcaacatttttgctgaagcatgtgcagactctgctttcacacgttccactgaggaggaaaaggaagaagaaaaattcgtgtggcggttatcttgtcgcctcattcttccttatacacttacctgtcgtagctgtggcctgcatatgccctaaatacagagatgacctcggcaagtaagacacacctttgtgggatcttgctctaagttcacgggtcccatgtacatccaatccaagttatctcactgacgggagctcctgaggcccatctaa

SEQ ID NO: 720441 - DNA, 295 bp, Homo sapiens
  misc_feature (198)..(198): n is a, c, g, or t
cttccttgcccaaacagtgcattacggaggtggttactatttgggcagtaagtgcagcttttagggagggaagtttttgaactggtgcgtgaatagtaagtagcagttcagctggtggaagagagagggtagatttgagaagaagtttaggcagaatgacaagtcagggatttggcaatttactagtgcgaggtagtnctgtagcgaattcgagggtgcagacccagtttcccagcttgggcctactgggttggggtttggtttaatgggctctttactggaaataggagaatac

SEQ ID NO: 720442 - DNA, 302 bp, Homo sapiens
ggtaacttaaggtcagtgctcttctaataggagaaatagcaggcctggagccatggagttatcccagatcctaattaccggcacacactccttcccagcaacatgaacgggggtccttggggtggcgggtcctctatgccaaggtatgctggggccaggtacagagaggggtgggtcaagattccggtccttaaggagtgcgttcctggtcctcaaggagggcatggttaatctggaacatcggggcagaacaaccaaagcgagaatgagggggtcctggtggagtaatcggggtggcctgg

SEQ ID NO: 720443 - DNA, 507 bp, Homo sapiens
catcatcaccgcacccgagtggagtcgacacgtcaataacaaatcatctggcccgtcatcatctaaaggaaaaaagggttcatcttacacagcaagacaacacaaagacagaggcattgacttctacttctccaagaacaaacatttttgaggaggagatgaggtgaaattgcacttttactcaagtgacactgcagcatctgctcaggccacagtttacattgctgaatgaggaagaggaaaatcaaaaaccagtgtggttttatgttgctctttctgaatctgttttcatacacatacagaaatggctacttgctttctttttttgttcttacaaaaactgttactctatttttcatgtatttatttgtattgcattaagttcagtatgacagttttagtggtagtatcccttaagatgtccttgtttagtaaaaaagtaagatcatttataatcatttttcattatgctctacctaaaaataaaaccgttgggcctttgttgga

SEQ ID NO: 720444 - DNA, 160 bp, Homo sapiens
tgtatagtgcaaggtgtaagctaatgtttaatacggtggatatgatccgcaaagttagcttatagtgcgacaaggccatgactgatccagctaaaatctccgctaaatacaggccaatgattagcgttagtagatatggccagctgactataacgctgtt

SEQ ID NO: 720445 - DNA, 149 bp, Homo sapiens
gcgttcctgtgctggtgtgtctgtctcattccttcaggttatgttgccttttggtgagatctcatcctctcttacttgcctcgtgtcgtcctgcttgctcttcttcctgccgtcggtcgctggtcctgttggggggtggcctgcttgct

SEQ ID NO: 720446 - DNA, 258 bp, Homo sapiens
  misc_feature (215)..(215): n is a, c, g, or t
gtcgccatgggccagccagccacagcccagtttgttaccaggtatttgtaagcacacgccagtacccaaagtcttcgctttctgccagaggtgttcattgattgccaagacttcgcattttttgaccataggggcggaaaaaaggaaaaagtcgattgagttttcagctttattggcacataggtctaagatgatattaagagctgtcctatgangcctgagggctgcccgatttttagcacaaagacatagaaaaaa

SEQ ID NO: 720447 - DNA, 147 bp, Homo sapiens
cagaccactgttcgatatcggaataaccagacaatcgctgttgaagtcagaggagaccacctggtgctcagatgtagcccaggatgcccttgagtgggccctccgacgcctgttcaccaccttcttgaatagtcaatcatatttggc

SEQ ID NO: 720448 - DNA, 274 bp, Homo sapiens
  misc_feature (81)..(81): n is a, c, g, or t
  misc_feature (110)..(110): n is a, c, g, or t
  misc_feature (168)..(168): n is a, c, g, or t
  misc_feature (197)..(197): n is a, c, g, or t
  misc_feature (223)..(223): n is a, c, g, or t
  misc_feature (228)..(228): n is a, c, g, or t
aaacgtttagcatcagtgactcacaaaatcagcaacacagaatttctgcaagtaattgaaatccataaccatcagccttgntcaaaactttttagtttttatgactacgnagcaagtgaatgaagagagtttggacaggattcttaaagatcggagaaagaaagtcantggggtggtcagattccggcgcaatacgnagcagaagatgtcctacagagagcanggtcntcacaagcagcttacccgcatccttggcgtgccgacctcggccttc

SEQ ID NO: 720449 - DNA, 971 bp, Homo sapiens
ggcaggtggcgcgctatggccgccgggacctgccccgcagcgccaggagagccacgcggaggtccagaggcggcggtacggacggggagcccgagtacgggcggggacccggccccaggggggaaacccgatagccgatcccgggggtccccaggttgactacaaggtctcccgaaagccgaatccttcgctaataggggggttcctccgccataataggcgggttctcaccataacaggccagtattcttcctttaacgaggccgggtcgcgccatacagggcgcgctttctccccttacaggaagaattcttccgctaacggggaaaaattcatcggcatagggagagggaattcttccactttacagcttcattctggtacacaaggtaactctcttcggtgaaaggcagaattcatccaccaggcaggcgtggtcttcaatacgaaaagtctggggttccctccaaattaattacttcggttctggattcaactctcacagaatcgagttcctggcggagaaggaatcccgagttccttccatcggaacctcacagggttctggcacggcgggacacaaggtcctacctatctatgaaaccagggtagtcccctcccccgggtatattaccaaagaagcaaatcccaaagttcacagggtcgacgaatccaagagggcccccaaggtctcctggaacagcacaggaaccggtgttcctcttcacgaaacctgcttgcttccaggcaccaccgttgtgcgaggactgggggaacagggaccaatactcaggtctggcgaagcacgtcctggaagaggaggctggctatgaaaagggccggttggtagccactgagtatgcgggcagccatacggtggccggtcacggcgatgcagcgatccgtactgcgatgatcgtgggaaccagcttgctggaaaaatgtgcccttttaaccgcaggctcaaccag

SEQ ID NO: 720450 - DNA, 360 bp, Homo sapiens
gggccaagggggggggcccccccaagggcccccttttccaaaaaagggaaattttgcctaaaacctttgaaaccaggttttcccccctttaaaggttttccataaagggaaccccgagccaggatgggggggcgccttaaaaatttttttggttaagccccctttttttatttgggccccctttaagccctaaccggggaaccaaagccctaaggggttttttcccaaaaaaaccaaaaaaagggccggccccggttaaattttttagcccaaaaaccaggttttggtgggctttaagggccctaaattaaggccaaaatttaaaaaaattttttccccctggggtgggtttttttttta

SEQ ID NO: 720451 - DNA, 294 bp, Homo sapiens
accacccagtgcatcaagactgtgaggcagaacctggagccgttgtactgagcagtacatcaacaacctcagtgaggcagctggacagcatcgtgggggaacggggcctgcctggactcagagctgagaaacatgcaggacccggtggaagacctcacgaacaagtatgaggatgaaatcaacaagcctaaccactagctgagaatagagttatgtagatagctgaagaaggatgtagatagctagcctacatgaacaaggtggagctaggaggccacggttgatagccctggg

SEQ ID NO: 720452 - DNA, 171 bp, Homo sapiens
tggaacttctgtccacgatgacttatttcgccctctgtctttttaaactttttcacaataggtctctaaggaacaccagcagaacattagcctgtgcagaaccatctgtctggggcgcacactcttcattatgcttggcacatagatctccctgtggtagagatctttttc

SEQ ID NO: 720453 - DNA, 697 bp, Homo sapiens
  misc_feature (184)..(184): n is a, c, g, or t
tgctccttccctactggtcacccctttctaggaggcgccaattaggtcaatttttgtggaccttccgttgtttgcgacgtcatgggttcccattggctcccccctgcccagctctctcccctgtttccctaagagctccgcatctgtcccggtgtccttacatgtccttgagtaggtgggtacncctgatgggggtccctctgtctggagcataaccccccggcgttttttctgcccccccatccctgcatgcctgatcccccaggtcctataccctacccctgaccttttggagccgcctctgaagagccctagggccccccccctgtactcaccccctggagaattttgggagctagtctgccctgcccggagtcactggacatgttcatcctagatcctgtcaccctaccgtcatttcttttcctctctctggcccttgggtcctgggagatgctgctgtgttcaacccccgagcctaagcatggcacccctttcttcaccatgttgagagatgattcttttttggccctggccctctcgggaagcttgatggccatcctcggaagggtttaatctccttttgtgagtttggtggggaagggaagggtatatagattgtattaaaaaaaaaaaaggtatatatgcatatatctatatataatatgacgcagaaataaatctcatgagaaatcta

SEQ ID NO: 720454 - DNA, 121 bp, Homo sapiens
tcgagctcggtaccggagtgtcgtcgattagtgttcttgatgtgggtggctaaggatacagatgatgcggataacctggtccaggcttccgcacacggtccgggatgtagctggggtcaca

SEQ ID NO: 720455 - DNA, 182 bp, Homo sapiens
aacaggcagatacacaaatatatatgggaatatcattcatattaataccaagattatattctcaaatagtataggcgggtttcttatacatgctatattatattatgattttatttatagacggtaggagtcttactatgttgctctggctggtctcacactcctggcctccagcgatgttc

SEQ ID NO: 720456 - DNA, 239 bp, Homo sapiens
ggggggacccccttccccccccccccagcccagttcaaggaagccgccggggtaaagccatgtctccggggtccccgaagccgggcccgcctttaaaaagaggggctgccccgccggggccgctgcctttttttaagaagggtttcctgatttttcttcccgggcgggccctttaataagaaattggttttttcttccgccaggggggccgccccttaaggggttttagaaatttgcca

SEQ ID NO: 720457 - DNA, 233 bp, Homo sapiens
atcctaaccagccctcaaagtcgtaagttaagcatcaagcttcctaagtggtcaggataaaattcaaatgattttggctgaatacacaagtctctttatgaaagaggtgtggtcgggccgggcgcagtggctcacgcctgtaaccccagcacttggggaggccgaggcaggcagatcacgagctcaggagatcgagaccatcctggctaacacggtgaaaccccgtctctact

SEQ ID NO: 720458 - DNA, 354 bp, Homo sapiens
aagcgccatttgcaagaaaaaacaacaatctgggcactgaggtcttgtcatctgaggccaagtaaataattattagcgctacgctaattgtatgtatttttaagggccttcatagcactggaaaaaaattaagtgtggagcacgtcaaaaccctatacattcataacataaaaaatagtcctttatcggttggcagtcaaaagttaccttccaaaacctataatgcatgtcataggcggaaacccaactcgaagtcctaggtgctggcaggaaggaaccttccccgtgccagcaatgtgaggcataaagaaaacaccttgatgtcagaggtctagatatacatgtttaaagcca

SEQ ID NO: 720459 - DNA, 493 bp, Homo sapiens
ggtccccaatcctactggtcccctaccctgggccccattttgtttccttttcctacacgcatggtgagtcagattcatcatgaatgtaaagatgcttaacttcaggggccctcctttgtatggagcccttccagggtccagagaaagtctgatcatagtgttaacagggcaggtgttttgaaaattttgcctaaaaaaggtattttaggccgggcgcggtggctcacgcctgtaatcccagcactttgggaggccgaggcgggcggatcacgaggtcaggagatcgagaccatcccggctaaaacggtgaaaccccgtctctactaaaaatacaaaaaattagccgggcgtggtggcgggcgcctgtagtcccagctactcgggaggctgaggcaggagaatggcgtgaacccgggaggcggagcttgcagtgagccgagatcccgccactgcactccagcctgggcgacagagcaagactccgtctcaaaca

SEQ ID NO: 720460 - DNA, 1067 bp, Homo sapiens
  misc_feature (835)..(835): n is a, c, g, or t
  misc_feature (839)..(839): n is a, c, g, or t
  misc_feature (848)..(848): n is a, c, g, or t
  misc_feature (851)..(851): n is a, c, g, or t
  misc_feature (866)..(866): n is a, c, g, or t
  misc_feature (959)..(959): n is a, c, g, or t
tttctgtaacactttttcttttttcttttgatctctgttttgtatttactcttctttttgatatctttcatgttgcctctttctttctccttttgttttcactacatcttttgtctcatcttctgtccgaagggtcatctttcgcttctttccagttttcggatctccatgccggtttcccgtggtgctctggattcctctgtcattcccgcattcttccatcgtatttggggggtttttccgacacatccaaccatagcgtcaatgtgaacctgggatattgacatttggttgcaccatgtgggacttggagcccgtccagattcgcttcttgtcggcacttcttcccggacactcaaggcctcatctttttggtcacactatatgacccggatcgggtccaagaatcttctgatgatctcccgaagatgcttcagtgaggacgatcttcgggatccagttcttctggtatttgcccactcagccggacatgctccctactgccatgcccctgatcgatctgttctgaccagctcggggctacagcacttatcgcactcgcacctggtatttccaggccccctgtgccaacccacaggcacaggtctttacgatggtctggactggctttcccacgagctgtccaagcgctaacccaccaggggcaggcccctgatgccccggaagctcctgcgtgcataccccgggatgacccagactccccggacatcctcaggccagtgccctttcccgcccaccttttcctcccccactagccccacggcctctgctcctgctcctgcctgcatgttctctctgttgttggagcctggangccntgctctctnggncacagaggggtccanctctcctgcctgctgggacctatggaaggggcttcctggcccaggccccctcttccacgaggaggaccacgggatctgggtttcctttttttnttctgttttgggtgtactctaggggcccggttgggagggggaaggtgagggcttcgggtggtgctataatgtggcactggatcttgagtaataaatttgctgtggttt

SEQ ID NO: 720461 - DNA, 219 bp, Homo sapiens
atgcacctgatgcctgtggtcgaatctagagttatccccattcaatctgcggtagccatccagcagagccgcattcagtcagctctgcaggctcatcttacacagaataatccctttgccagctacactctccatacatggggtttcttctggcagctcttcctcgggaggaacaccagtccagagttctgtttctgggagcctggtccctggcataca

SEQ ID NO: 720462 - DNA, 1442 bp, Homo sapiens
  misc_feature (835)..(835): n is a, c, g, or t
  misc_feature (839)..(839): n is a, c, g, or t
  misc_feature (848)..(848): n is a, c, g, or t
  misc_feature (851)..(851): n is a, c, g, or t
  misc_feature (866)..(866): n is a, c, g, or t
  misc_feature (959)..(959): n is a, c, g, or t
  misc_feature (1068)..(1068): n is a, c, g, or t
tttctgtaacactttttcttttttcttttgatctctgttttgtatttactcttctttttgatatctttcatgttgcctctttctttctccttttgttttcactacatcttttgtctcatcttctgtccgaagggtcatctttcgcttctttccagttttcggatctccatgccggtttcccgtggtgctctggattcctctgtcattcccgcattcttccatcgtatttggggggtttttccgacacatccaaccatagcgtcaatgtgaacctgggatattgacatttggttgcaccatgtgggacttggagcccgtccagattcgcttcttgtcggcacttcttcccggacactcaaggcctcatctttttggtcacactatatgacccggatcgggtccaagaatcttctgatgatctcccgaagatgcttcagtgaggacgatcttcgggatccagttcttctggtatttgcccactcagccggacatgctccctactgccatgcccctgatcgatctgttctgaccagctcggggctacagcacttatcgcactcgcacctggtatttccaggccccctgtgccaacccacaggcacaggtctttacgatggtctggactggctttcccacgagctgtccaagcgctaacccaccaggggcaggcccctgatgccccggaagctcctgcgtgcataccccgggatgacccagactccccggacatcctcaggccagtgccctttcccgcccaccttttcctcccccactagccccacggcctctgctcctgctcctgcctgcatgttctctctgttgttggagcctggangccntgctctctnggncacagaggggtccanctctcctgcctgctgggacctatggaaggggcttcctggcccaggccccctcttccacgaggaggaccacgggatctgggtttcctttttttnttctgttttgggtgtactctaggggcccggttgggagggggaaggtgagggcttcgggtggtgctataatgtggcactggatcttgagtaataaatttgctgtggtttncaaaaaaaaaaaaaaaaaaaaaaaaaaaaaattgtgtgtgcggcgcggcttggggccttgggagaaagagttttttaagaaccatatggtgttggggcggcggggggcgccacagtgtggtgttaatgtggaaatgtgtgggatatagggtggtgccaaaaacagaaaaccgcggggcgaaagacaacaagagggggaaaaggtttacacacaaaaaaataaaaaacaccgccgggggggagaaaagcagaacgtgtttaaaacaaaccccaaggggggaccacaagaaggcgaaataaggggcgaccatatcaaaaggggaggccaaggggaggcccggattccaaattaacccccggccggggggggagaac

SEQ ID NO: 720463 - DNA, 225 bp, Homo sapiens
cccgtctctcagcagctcgtggcaacacatacactgttgctacgatatattaatgccacctgcaataaattgcagagatccacccaggacctgcaccacctgcaatttcactgcccactgctcctccttcaatgataagggcacaggctgtgcctgccagtgcccctactgctgtcagtagttgcagacgcatcgcctgctttttgctgcagccagactggacca

SEQ ID NO: 720464 - DNA, 381 bp, Homo sapiens
ggctcctataaaaaaggtagaagataaaaaattttggagaggatgtggagaaaacagaatcctgtgcattgccggtataatcgtgaaaaagtaaaactgtgatggcaaacagtatggagcttcctcaaaaaaattaaaactggaactaccatataatctagccatcccatttctggatatatattcaaaagaattgaaaacaagattttgaaaagatacggttacacttgtgttcatttcggtgtgattcacaacaaccaagaggtagaggcagtgtaatatccacggacagatgaatggataaagaaaatggggtatatatataaaatggaatattattcagccttaaagaggaaaattgtgccaaatgctacaacatag

SEQ ID NO: 720465 - DNA, 427 bp, Homo sapiens
  misc_feature (13)..(13): n is a, c, g, or t
gcttgattgtacntgctatttttgtagttttaacagaaatggggtttcaccatgttagccaggctggtctcgaactcctgaccttgtgatctgcttgtctctgcctcccaaagtgttgggattacaggtgtgagccaccacgcccagccgaggttttcttttcacacaattctttgtttattatttttatttttgtagagacagggtctcactctattgccgaggctggagtgcagttgcacaatcgtaactcactgcagcctcaaactccaggctcaagtgatctttctgcttcagcctgctgagtaactgggaccacaggcttgcaacaccacacccagctaattcttgggggctttgttgttgctttagatttgtgggtctttaaaaataattttaacttattttagattcacagggtacatgt

SEQ ID NO: 720466 - DNA, 144 bp, Homo sapiens
gagattgcgccccaacatggtcttgattccaaacttgttgttcataaaagctttcaagggcacaggctgtgcctgccagtgcccctactgctgtcagtagttgcagacgcatcgcctgctttttgctgcagccagactggacca

SEQ ID NO: 720467 - DNA, 98 bp, Homo sapiens
aggtttgtgtggacactgtcttcagttctcttggatctatactgaggactggaattgcgggatctgccagatcgacaataccgtcagattacgacgtg

SEQ ID NO: 720468 - DNA, 361 bp, Homo sapiens
aacccagtgggcctcaaagaactcaaatgaaaggaagacttgcaagtctctcactttaagtccagagctagaaatgattaagcttagtgaagatgcagaattttcatagctagagagaagtcaacgcttggcttcaaaacttcaaaggatgggctgactctctttgaggagcactgcagctggtgactttaagttacagccagtgctcattgaccactctgaaaatctcagggcccttaagaattatgcaaaatctattctttctgtgctctagaaatggaacatcactgtctgggtgacagcacatctgttaatagcatggtttactgaatattttaatcccactattgagaactgctca

SEQ ID NO: 720469 - DNA, 280 bp, Homo sapiens
atctcgctcatcctgatgacacttgagagtagcattacctccttgtgctgggagaatggagcgctttctacttgggctcaacattgagacaggtctgttgagcgaccgtaagaaggtgactttgggcacccagcccacgtatgaggaactttcgtctcttcacacagtctttgcttgtcctgacgccatgtcatctaaagcagcacaaaatgtctctcaatgtcaacctcaaggaagtgaactacatgtgtcccctcatcaatggtatcctgaagctggg

SEQ ID NO: 720470 - DNA, 186 bp, Homo sapiens
tcttatcgtgttgcacggatcaagaatgaatgagcccttacatgtcctgtccttctctatgtatagactacctaattagcaccattggactccccaagggaacctggaaatagaatattcctttctaatgctctgaaagaaaaaaggtttctcagaatttctgagatgttaacactgagaaatgtc

SEQ ID NO: 720471 - DNA, 673 bp, Homo sapiens
agcggagtggaccgggaccggtaggggtgctggtgccatcatggctgaccccgacccccggtaccctcgctcctcgatgcgaggacgacttcaactatgggcagcagcgatggcctccgccaccgtgcacatccgaatggcgctattctgagaagagtctacagcgagttctttctctgcaggttctcttaactacagtgacttcaacagtttttttatactttgagtctgtacggacatttgtacatgagagtccggccttaattttgctgttgccctcggatctctgggttggattcttggcgttgactttaaacagacataagtatccccttaacctgtacctactttgtggatttacgctgtaggaagctctgactgtggcagttgtggttgagtttctatgatggtatattttaattctggaaagttttcttatggattattagagtatgtgtgggtgagagtgtgtatactctacaatctaagaaggatttcagcaaatttggagcagggctgttgtgatcttatgtggatattgtgccgtgtcaggattcttgaagttgttttttattgatagtgagataactggaggtgggacttagcggttgcaggagcccttcatttacgggggattcagtcatctatgagacagaatcactgatgcttaaaa

SEQ ID NO: 720472 - DNA, 206 bp, Homo sapiens
gcatggagttctggcagttctgtgggcagctggctcagcatgtgtccagccatcgtccaggcgggggctggtgcccacggtgccggaaactgctgggagctgagcacgtggctagggatgggcaacccgagttcatgctagtagcaggacattgcactccacgaattgaatacatagactgaagtaacggacattccaaacgcctc

SEQ ID NO: 720473 - DNA, 386 bp, Homo sapiens
gtctacttgctcttgctctaccttgctctcgctctaccttgtctctctgctctaccttgtctctcggctctaccttgtctctcggtctaccttgtctctctgctctaccttgtctccagtcttgatcagctgcacatcaccactaaaatctccagtggcaccattgaaatcctgagtgattgttgcagctgatcaaacacttgtgacaaagtgtggagccaacgaagccaacgctgttgaacattctcaaaatttccccctttctcctttgtgctggtcatccagcaggtattcgacaatggcagcatctacaaccctgaagtgcttgatatcacagaggaaactctgcattctcgcttccgtagagggtgtccggcaatgtttgc

SEQ ID NO: 720474 - DNA, 308 bp, Homo sapiens
ttctcctcctccttcgagccgtatcatgactatcttgttgatctccctgaaaaaaaactcgaatatgttcctcttctttccatttagaaaactacccccacctggctcaaatcaccatcttctctgcctccccgcttccagcctggcccccgacactcccttctccagacagcagccagagagctcttcaagactgagtcaggctgggcgtggtggctcacacctgtaatcccagcccttggggaggccaaggcaggtggatcacctgaggtcaggggttcaagaccagcctgcccaacatggtgaaa

SEQ ID NO: 720475 - DNA, 336 bp, Homo sapiens
  misc_feature (1)..(1): n is a, c, g, or t
ngtattcttatccttcccgtggaaaaggttgcttacacataggcttctcaatcaaagcttctggcttgtctggttccaggctcaagagtagggatcccacactgttcatcacactttcaactatcttaatcatcttccttcagacacacttcacaggcttcaataatttgagttaactcaccatagagtccaccttccaagttctcttctgaatatctcagctcctttagatttcagataagcacgaagctcacacagcgtgatcttcctcactgatgtctataaagcccggcgcgctcatggcacaggcgcgggcacagcgcacactacactcgc

SEQ ID NO: 720476 - DNA, 168 bp, Homo sapiens
acggactactcagctgtttcctcgacctcagaacctgaagattattttataaagagaaaggtaaattcatctggcaggatttttttatgttttttttgtggggattaaaaattgactttaatcccttaaatccccaataaaaatttttgaggcctgagcaatcccact

SEQ ID NO: 720477 - DNA, 1769 bp, Homo sapiens
  misc_feature (1196)..(1196): n is a, c, g, or t
  misc_feature (1484)..(1484): n is a, c, g, or t
tcagggggaaaataatcttttattggaaaccccaccaacggcaaaatctggtcccgggctataaagctctcttcttctcttggcaattgggttcttttcttccagtgggtcccatggaatggcttttctttctcctcccatgggttctgggaagcgggccagggccaaatctgggagggtgggtggtcaatgagaatcttaagggtacaattctttctcacagagcccgccggcttccggtctctggacgaccacaagacaaggagatctttggcgggagggtgtggacgcaccccgcgtcttttctgggtgttccccacaacacaacacacaaagctcttatacaggactctgagaacaaaagtgtccatgtggtgtcacatctatacacaccaatatgtggagacacaaacagagccacacccacagagagaggggcgtgcgagagtgcgctctgtgtgtgtcagagacaatgagggcgtcacactaagtctcagagggtgggagagcgacaatagtggggtactctgtgagagactcacagactgtgtggcccggacatcctgtggggatatacagagggggtgactccccgctggggggcccaaaaacctctcttttactaacaaactctctctctgtgaggggtgagagaactcctcttcagaaggagtaggcgagagggtggaaagtggtgtgttgaaggccccttctttctcttgtggcgacccagagagagtggtggggtggccccacaacagagagaagaaaagaagggcgtctcaccaaagaggaaagtccgcaagggagtagtggccccagaggtggcgccgcccaaaaattaaacagagggcgcaaaccctgtgtggaaaaagataatgtgccctgacaacagaggggcaaacgagacaagaggtgcccccagggggggtggccacaaccacgcaagaaggggggtgggccctccagcgggaggcacctcccagaaagagttacggcctcctggtttggaaaacaaacaacaagcaggaggggaggaggggccattaaacaccaaaaaagagggtggggggtggaaaaaaattccccttctcgggggtgctcggtggaaggaaacaacaggggggcgtcctcaaagaaacacttctgggcgggacctacttgtgggcaccacagaggcaaccactccacagganccccaaaaaagaagagaaaaacctctcacacacccggggtttctgggtgtggccaacagcgggggccccccccgcgataaatatcaaaccacaggggttgtgacgcagggcgcgacacacaaaagaaaagacccaacatcccatccgtataaaaaaagaagcgagggggagaaagaaaggggtggcaccaccctggtggagacataaaaacccacgggtcgtccacccccacaggaggacccctgtgggaaagccggagcccaaatagcgagaggaaccacccacaancggagtctaacaaaaagcgatggggtcacccacaaagagttacacacggacccccgtagcagcactagaccacgacgaaccaacacacaaccgacacacacttgcgtgtcgatcaccccgatgcgacgagcaaaacaaaacagggagcgtgggtcaacatgagtggggaggcacccacagagagaagagagcaatcccaggtgaatctacagagaagaggaagacaataacgcgcgcaacccactcgtggtgtgaaccaacacgacacgcacggcgagacaatac

SEQ ID NO: 720478 - DNA, 174 bp, Homo sapiens
  misc_feature (4)..(4): n is a, c, g, or t
ctancaggcagagagactgtgcacgactgttgtgagaaaggaaacagaccacgaaatcctgagacctgccactgaactgtggaggtgtgggactaggccactgaccaacgtgccacctacaaaaagcagcagttggctccagtggcttggaaacacacaggtcttggagcttgg

SEQ ID NO: 720479 - DNA, 103 bp, Homo sapiens
  misc_feature (87)..(87): n is a, c, g, or t
gatcctggagctggcgggcaacggggctcggaacaacaagaagacgcgcatcatccctcgtaacctccagctggccatccgcaacgncggaggaactgaacaa

SEQ ID NO: 720480 - DNA, 959 bp, Homo sapiens
tcccgccgccatgtctctggcccgctcggtttttctcctgggggcaaaacccgtctattttttttttgatgctgtccggtggcccgggcgtccccttcccgattactgggccctccccctctcgcgtgggagtcttccccggcgagggccccaattgcagacttcaccccaattgggctgtgatttccaacgtgggtgttcccgcatatatttctgcggccatttcacacttcctattggtgagactttagtgagcacgttccggaagcgggtggtacccacaacacgcgttcccaccgaggtggtgtccctgcgcaaatctctcgtcttggggaggaccctttctttctttctggtcgtcccccaagtgtcttcctaactattggcctcccagcgataattgattaccccagtttcttccgatgagatgttttttctaattgccccgcccccatgcacggatagacaggtgaaatacttctttgaggcgcccaccgcccagttaggtgtttgttgttatacaacgagatagctcctgtgcccaaatacacgcacatcatcggggtttgcccttctgcgctctggtgcccaagtgggcgcggcggcgcccaccccgcgtttctgtctgcgggcagaccccccttcccctccccgggcgttgctagaataccagggcgtatcacgggtcgcttcgagtatactagcaaagccccggtatgttacgtagattggcttgttatacactcgtatgccccccatccccttgttggaataaccaacggaactttgtcatatagtaggacgtaaccactagtatgaatttgggggggctatacaaggtacaccatgcttgtcatgatagagattatccgttgtggggaattctcttttgcaaaaaaatttcgaaggcaaagccctcttttgccacaaaaattttttttttttctgcccacaaaaca

SEQ ID NO: 720481 - DNA, 117 bp, Homo sapiens
ctaggtgaccctcggtgctgcagggatctgcaggactgcagccatgggggcgcacctggtccggcgctacctgggcgatgcttcggtggagcccgaccccctgcagatgccaacctt

SEQ ID NO: 720482 - DNA, 1031 bp, Homo sapiens
agcgggggcggcggtgagcacggtgcgcggcctagtacaatgaggcagccagcggatcttggagcctgagcccttgtgaagccggctaatgacaagtctgtatggtcgcatgccgagaaaagccacgtgacatgccgagaaactatcagcccctaaagtgcacgtgcatgagtgtccgttgtccctgatgataccaatcgccattcattgtctcggcgaatccgggccgaggaggaggaggaacgaggcaggaggcagttccaggggagtaccttgcgggaggggcttggcattgaccaagagcattggtacaccacgcggctggaaagccaacggacagaacctcctatcattgaagcccccaagtttggacccatgcaccccctgacggcacctgcctatgcacatcgcacaatggtccctggccacgactggacactgtcacgtagtacacaggcccccgtggcgcaagttttggacacgaaactccaaacgaaacaacttggtacaaacgctggtatggaagttcgccatactttccaaggcagcaacacacgtatcgacacgtaacaagtggccactatgggctggtgtcagcccaaggggtccagtacgtaccgctcagaagggccctttacggcatacgcctcttcacaaggagggtggatagatgcccacatttgtcaattgagacccaggcaacacaccacagaggtactaccgcgtccgcccaatgtgataccattccattcccgttatgctaaacagggatcataccgccaatgtgccagtagcatcctagtgtgcagaggatggcgcattcacaacaccatacacaaggcaccatgatgcgcaaggatagggcgaagcagacgccctgtgtaccaatggcaagaccccttgtgtggtgacaacggtgcccctgtgttccgaacgccgacagaggtgagaaaacaccgaagagaggaacatcccacacgaagaccacacgggcaaagggtgcacacacggcacaccatgtgacgcgcaca

SEQ ID NO: 720483 - DNA, 511 bp, Homo sapiens
  misc_feature (445)..(445): n is a, c, g, or t
ccaggaagggaaattaatttgttgagtacttaccagcactccaatagtgggcattttaatatatgtctgtcaaataagtggaagttgataatagatttgtggagagtttggtagtattggagcatagtgtttaaagcagagggtggcagaagattcgaagagtaaatggcagatgctgtgagagcctaacacgttaagactttgttctggaggctttgtagattcagtaaaaggctttcatcaggtagtgatgcagtcacatttgtgttagcaatgatagtagcaggtggtcattgcctactatacagccttgtactgattgctgtacatgcatgatctcatttaatcttgacaacaattgttactaatttccattttacagttgaggaaatggaggttgagatagattgcacaggtcatagtggagctgtgattctcatctagngagtctgaccagagcacgcacaggacacctgtacagttgggatgagagggaagaattgaaggatgt

SEQ ID NO: 720484 - DNA, 558 bp, Homo sapiens
taagctaggtacgaggctgggttgtactctactaaaaatacaaaaattggccgttgtgttggtgcacgcctgtaatcacagctaacttgggaggctgagacacgagaatcacttgaacccaggaggcggaggttgccgtgagcagagatcataccactacactccagcctgggcgacagagtgagactgtctcaaaaaaaaaaacaaaaaaaaaacaggggattgggactctctagaagtggtccatgtgtaaatgtccgcaccaaccttatgggctggtcctaggaagcatttggcagctaggattgctggctcgccttgagagccacatcctggtgacctggagccggatgccggcctccacctcccagctggctccgggagtcacagtgggcccacccgttatacatttggactgggcagttctcccgagcccgccccaacagccatgacccacaggggtagattttttttttaccacgggagttctattaaggcaccttttaacttgaaggtttttaaaagaggaacaggggtctatctatgtggcccagggcg

SEQ ID NO: 720485 - DNA, 105 bp, Homo sapiens
cacacgagacccctagcaactctgcacagctgacacacactgcacgagtgagcccagccacgtgtttctgctcagcatgtggggacctgaagccagccacctccg

SEQ ID NO: 720486 - DNA, 413 bp, Homo sapiens
cttctctgtggggtgacggtggggatagctggagccggagagaacggggcagagccaagtatgtccgcagggagtgggtacaataggacctggtgatacgggcagttacttggaggtcaaaggagaagatgtccaatataccgctcaggtttctgactggggaaaccgggtggggcccgttactgagattggaaaacccacagagagaggcgtcatgggcttggaagcctaccccagaggtgtggcaggtgctgaagacccagcccggagaaccccgcttccagtgcagtctctgggatctctattcccacagagagagcgtcgacgctctctctgtggggggtgtgggctctggggactggccggtgagtacgaaaagggagagggaggacaatatccaggctcctggattg

SEQ ID NO: 720487 - DNA, 248 bp, Homo sapiens
ctgcatttattgtagaccttgcgtgtcctcaaatctttctgatccatcttattctcaatggccatgatgtcacttattcgtggggtaatctatcacttccccttaactctcattaaccgacattctctattttgcaaagaagatgtgatcttcaggcaaagagttctctcactccgtacacagtccttcaaatcttgtttgtgtccacaccaatcctcttctccattcctctcctctgaaaaaaaaaa

SEQ ID NO: 720488 - DNA, 258 bp, Homo sapiens
gctctggcggagaataactggcaaacatacaacatacagggggcagatgaagaagggactgagtacacacatggacagcaggcttcagaaggacgccagcagaatgaatgtggagtggatagtactcactctgcatatgctccagaggacagggtaagaccccaggctgcaagtcatgcagaagcaagataaggccacacacaagctccgcacagggagaaacttcttagcaactcagcgggctgggtaacttcatta

SEQ ID NO: 720489 - DNA, 122 bp, Homo sapiens
aagctcgagagcagcagctgtaatcaggtacgatctgatcaagaagatgaccaggcgggcatcctgatccagagcaagttccgaagctactatgaacagcaagcgatttcatgcagagccgc

SEQ ID NO: 720490 - DNA, 424 bp, Homo sapiens
aaatagaagtgcttaataaatagttgctattgtaagtggatgtcagaggagctgttacaatatatcccagaaagtgagccctgggaaggcgccgattttccatagcaatcctgtttctgctttacagttgcttcctcttacgtgcatttacctgcctggtcatcctgcagggcaatgccacctgcgcagtggtgtgttgcatccagggaacaatgtccacatgatcagtgtcaggcacagagtgggcatggggcatcctcaccattctgtctccagtcccatccgtgggacaaaatgccccctgggaaagttgaacagagattgcttcaaatggggccaaatatggcattagtgaggaactaaactgctttgacagctcctgtgtctcctgggatgggaagttggggagggagtcatgggagtt

SEQ ID NO: 720491 - DNA, 166 bp, Homo sapiens
tatgtgaagatgactcggacattatacatgctctgaagatggatgtggtagatatctatcatctaccggttacaaggagagacaaagacgaacaaacattataagagaccatggattaatcaaccttagacagttacaattaatggaacggcggaatcccaaggag

SEQ ID NO: 720492 - DNA, 244 bp, Homo sapiens
ggctccgggacggctggagtggtaaaaggctcagaacaactatcctgcgacgaatcaaatacttctgaggtaataaataggcatgatcccgcatcagccaacagccctctgccgacagaagctgaatgaagagcagtcacactgcacaatgctacactattcacctgcacctccactaaccgcacgatcaataacatctcgctattcactaaaccaccccccaacacctcaccacactctcacc

SEQ ID NO: 720493 - DNA, 319 bp, Homo sapiens
gagatctctggatccatgaccatccttttcctttgttcttcttttttctttttaacttccggcaagttatcatagattctcttagatcgcatatgaatctcctgctcgtgaaactgatccggaacttccgcgatctatcgattgagaccatcgcgattacggaatactactctgtgatcaccctaagccactgccgtatcggccgtaaggacttctgtacgtacgcactcgtacgtgtgactacttcctcggacgaagggtcccagtcactatgaatatcttgcttaagagtacagcatactcggcacagtattcacag

SEQ ID NO: 720494 - DNA, 310 bp, Homo sapiens
attcagaggtcagcctgaggtgagtttgggactcgaggattgtccgggtgtaaaagagaaggcccattcaggatcccacagcggaggtggtctagaggccaaggcaaggcccttttcaacacgctggaaggcacacgcaagtgcaaaggcaggcaaaggggctagggtgggtccatctctcgggacaggaccttgcaccgagtttacctgcccaggagcagagtagagctgcacccaccagagtggatctaggccggggcaggccagtggaaatccaaggaaagccccagtagacacagctccactacac

SEQ ID NO: 720495 - DNA, 1313 bp, Homo sapiens
  misc_feature (784)..(784): n is a, c, g, or t
  misc_feature (1313)..(1313): n is a, c, g, or t
tgggaaatggatttggtggcccaggcgggattgagtggcacagtctcggcttcacgtgcaaccctccacttctcccggggttcaagcagtttctgcggtgccgcagccctcccaagttagcgtgggactacgggcattgcgccaccacgccaaggctaattttggtattttatagatagagagtggggtttcaccagtttctcaaacctccgtgaaccctcggggcgattccacccaccttcgaggcgtctcccaagaggtgcgtgggaatatattagggcgtgtaagcccacgcgcaccgtggcctagtaagtgtggctctttatataattatagggaaacaatttctagtgtggaaagaaggagaagttgtgaacgtgaaaagttgtgcgccccaacagggatgttggtgaccgctgtggggcagggtcgcctttcagtgtgaacgggcttgtgccacctatgtgggagacgcgcccaggttttaccgggggggagtgatctatgcgcgagacggtgcaaaaagggctatatacagtggacaggatgtgcccgtggggtatttggcgccaagacctctgagctctacacctcatacacccggcgcggggcaaaaacccctcttaatgtaccccctttactgtgtgttctaccccattgatgcggctatacaccagggggtgtaagcgcatgagaatgtgacactgagagagacactatttaaagacctctggggagcaacaagacacaacgcatgggggaggtccccacctagtgggggaanatataagcgagagcagggagcaggcaaatacataatttgccgtgaggaaaccattactgacggggatatagtccccaagaagagtatagtaaaataggaacacccccccacatatattatatttacccgcccaccgtgtggtgacgagcacaattatttgcagaccggatggtctacaattaagagaggcaataggttatacacctttaaggaaattcagcccctaatgaggatgtggacacgttagaagaagagaaggctcggtacgttcttcacaccgaggaaggaagctgggcagggtcaagaggtagacgccccctgatgggacacacaggtgtggccccccatttggacatattagggcggcactgcgggtgttatcagagagtatatggtacctgaggatgcaaaatatcaaccgttttgggtatcaaaggaaaacaaaaaaatattttttttagcccgcgagtattgggaggagtcaccagcgggaaaaagtatattcttttgagaaggagagtccccccan

SEQ ID NO: 720496 - DNA, 120 bp, Homo sapiens
ggtttagtagaagagaatgtacacggatgtcatgcaggcttaatacgaccctctgtgctgctgagtcgtgactagacatgaaccctggcagggacagccaagcgaggggcgaggtgacag

SEQ ID NO: 720497 - DNA, 244 bp, Homo sapiens
cccccccccctggggggggggttattttttctttccttttttggttttttagggaggcccggctttggttttaaagggcggggtttcccccagggtttttttggccccctttagggggggccccccccttttgggggggcccttttttttggggggcccccccttttaagaagttgggttaagttgggcccctttttcctttccccgggtttgggtccccccattaaatttgtggggcccttta

SEQ ID NO: 720498 - DNA, 189 bp, Homo sapiens
ctgcccgtccattacaccacccagacgtatagtgatcacattctgtgcacttgacttagccacatgaggcggctcacgcctgtaatcccagcactgtgggaggctgaggcagacaagatcacctgaggtcaggagttcgagaccagcctgaccaatatggtgaaacactgtctcttatttgaaaaaaaa

SEQ ID NO: 720499 - DNA, 547 bp, Homo sapiens
  misc_feature (78)..(78): n is a, c, g, or t
ctactttccacaggccacaggtgaaagacatacccacagaatgggagaaaatatttacaaactatctatttgaccagngcttaataacaagaagatataagagatcaaacgactataggaaagaagctaataatccaatcaaaacacgggcaaaagatttggacagacatttctcaaaagaagaaacacaaatggcaatcaggcatatgaaaaggtgctcaacaccactgaccaatagagaaatgcaaattaaaactacattgagatatcatcacaccccagtaaaaataccttatatgcagaagagaggcaataaaaaatgctggcaagtatgcagagaaaagggaacttttgtaccccacagggtgaagagacatgcccacagaatgggagaaaatatttacaaactatctatttgaccagggcttaataacaagaagatataaagagatcaaacgactataggaaaaaagctaataatccaatcaaagcacgggcaaaagatttggacagacatttctcaaaagaagaaacacaaatggcaatc

SEQ ID NO: 720500 - DNA, 271 bp, Homo sapiens
ttgggcccccgggggggggggggccttttttttgggaagggcttggttgggaagggcccgtttttggtttggggccaattggggggtccagggttcccaaagggtttcggggggcctgggccccccccggggttgtgggcccggttcctgcccttttttttggggtttctggggggggcttggggtgggggtggttttggcccccccccccccttttgtgggtttttttggggggtttttaacctttcccccccccccccccccaaaccca

SEQ ID NO: 720501 - DNA, 932 bp, Homo sapiens
ataagctgactgatgggacatggaaaacatcatagctggatcagagatgcgagaggatgttgattctgaagtcactatcgcatagggccaagattgaaggattcgatgtactgaagaaagtgaagactctctgcctccgctcaaaatttaattaagtgcagtagataatctggaggagctaccgagtcttcgacagctgaatctttacgacaaccagatcaagaagattgagaatctggaggctgctaacagagctggagattctagatatttcttttaatctgctgagaaactatcgataggggttgacgaagttgagcatcgactgtagataaaagcgtctatcttaggctggcaacagatagcacattcagtacacatattgaggaacttacagcgaacttacatcaactacagatgctagagctgggatctaaccgtatccgcgcaatcgaatagatatcgacaccttaaccaacctggagagtttgtttttggggaaaaacaaaattactaaacttcagaacctggatgcgctcaccaaactgacagtcctcagtatgcagagcaaccggtgaccaagatcgagggtctgcagaacctggtgaacctgcgggagctgtatcttagccacaatggcatcgaggtcatcgagggctggagaaccatgtgcacgacaggctcacgtaactgagggaagtgtgctcacagagcccaaccttcctagtggctccaagtcaacctggtctgcccagtgcgtgtcccgaaccattaagattttcctccaacaaaaaaaggcgcgggctaaatatcccagggccagtacgacacctgaacaggccgcccagagggtaaaaggacggggaaccgggaagactgtttgaccctttcggtagcaccacaccgacaaaatgtacccgggttgtaaaaag

SEQ ID NO: 720502 - DNA, 119 bp, Homo sapiens
caggagccatccggggcagggacgctctggagagtctgtggaagaggtcccgctgtatgggaacctgcattatctacagacaggacggctgtctcaagacccagagccagaccagcagg

SEQ ID NO: 720503 - DNA, 270 bp, Homo sapiens
  misc_feature (133)..(133): n is a, c, g, or t
  misc_feature (166)..(166): n is a, c, g, or t
  misc_feature (211)..(211): n is a, c, g, or t
  misc_feature (248)..(248): n is a, c, g, or t
  misc_feature (254)..(254): n is a, c, g, or t
ctctgtccggccgccaccccctctgggaagtgcggagcgtctctgcctggccgcccattgtctgggatgtgaggagcccctctgcccggctgcccagtctgggaagtgaggagcgccttttcctggccgcatnccatttaggaagagaggagtgtctgtgcccggntgcccatcatctgagatgaggggagcaccttagccccgccgcccngtttgggatgtgaggagcgcctctgcccggccgtganccagantgggaggtgaggagcg

SEQ ID NO: 720504 - DNA, 195 bp, Homo sapiens
cctataatcgaagtttatcctagtgaggcgtacagaatgctattgttatacatttaagtatcataacataatgtagctataaagctttttaaaattatggtaaagtgtatgtcaaatttaccattagtgacattgagtaccttcaccatgttgtgcaatcatccccatataagtagttccagaacattttcatca

SEQ ID NO: 720505 - DNA, 122 bp, Homo sapiens
ccggtccttcaaccaacagccctgggctgtacgcctacgctaacattactgcaggccacctactcatgcaccgtattggaagcgccaccctagcaatatcaaccaactagccctgtccgtac

SEQ ID NO: 720506 - DNA, 1065 bp, Homo sapiens
gagtccgagtggagagagcgagctgagtggttgtgtgttctcgtcgtcggaaaccggtagcgcttgcagcatggctgaccaattgactgaccgagcagattgctgaattcagttgaagctttttcactatttgacaagagatggtgatggaactataatcaacacaatggaattagggaactgtatatgagatctcttgggcagaagtcccagcatgaagcatgacgttatcacggacatgacttaactgaagtatgatgctgtagtggtaagtggtagcaagttgacttccctgaattgtctggacaatgactggcagatgagaaagagtgacaagacagttagaccagtgaaggaagaagagttatgagaagcattcctgtgtgatttagatcatagggagtggcaagtggctactatttaggtgcatgcagaacttcgccacaatgttgatgtagcgaaacctttgtgagtaggaaggttaatcagactgaatgagaggttggatgaccattgattcgagggcacagcaggataatacgatggtggcatcgtgtccatgtaacactattgcagagaggtatgttaacaatttgattgacatgcagaagtgagagaccttgtaccatgaattgtgtcaaaaatgttctttgtagcaaaacattggttgtattgtgcctttgtctttagtctcgtaaacctatatcttggtaaagaaggttaactccctaacttgtcgacacaacagaattattgcattgtgatagtaacttaagggacttcaatttccttccatgtttttgctttccctttactctttacctgttccatttggtaccttaaaagacactgtaatatgttaaggaaacaactgtggatcccagggttaacacatggtttgcacatttgttgggatttaacttctctggaagtaataattactaaagccccttttctggaacagttctaaaacctttacacttggaagtttggatcaacactggaggggcaaacattctaggggtttatggccgcttggctaaacggtaagttaccttatagaaa

SEQ ID NO: 720507 - DNA, 708 bp, Homo sapiens
gaggttttttgtttctttgattttctgagtgggagaggatttgtgagaatcttttccagggaaatgggttccttcacgaggtaaggatgtgttccctgtatcgatctgcagaccaccccgaaggtgggtgccaccctgcatgcttgggggtgcccagggattcgagacctcccacagtactctgtctgaaggtggtgattctggccctggcccctctgcccagcctgtgtgcgatgcccctggtgctttagtgccagaagcctaggctcagaagcaccgccgcgccatctttccgtttcaggggttgtgatgaaggcccaggaaacaccgtttaatctgttactattttacctacgtataaagttttagttcaacttgggtgtgcgaaacaccccttttatcactctttaaatttgcacctttattttttttcttccaacagcttgttctctggacactttggggaatgtgagtgttagagctggtgagagaggagtcacggtggccctcccacccgatggtcctggcctccaccctgccctctcttccctgcctgatcacccgctttcccatttgcccttcagagaacttaagtcacaggagagttgaaattcacaggcccgggcacatcttttatttatttcattatgttggcccacagaacttgattgtaaataataataaagaaatctgttatatacttttcca

SEQ ID NO: 720508 - DNA, 1053 bp, Homo sapiens
ggagagaactagtcttgaggttttttttttttatttgtaaagttgagtcggctctttaatggacaccgcccatttgtctgcacctgaactgaggcggaaacaggaggggtctggaaaatggtgccattgggcctgggtgctcgcaaagtctgctccctggggacagaaacccatggggtcgagcccttgtaggcctctccgttccaggaggggccacaattagtcagccgccgtgccttccgtcagtgcccatgggagggcacccgatggcttggtgtgtgcgcccagtgggccaggcgcccttagcttgggccgcaggtgagcaattgagccgcctttggaggtccgaggtccggtgaaggtgggggaggcgggttccaatgtgcatgggaggccagggttcaccctcaaagtgttgtgcgtccatcccggggaatggttgtagagatgaaagttcatgacttccccaagtggtcccttctgtgagagggggaggacatgtgacaatgagaatctgagtttgaaggacacaaagtattgccgacaattcatcagtggaccgttggacgcggcagcctggaattctcctttgccccgtgtagacgaagagatcactcacaaaagggtggtcgtgctgcgctgatccaacatcccagggcgaaaaggactaattgctggtgtgagtcaacacgagcctttgtttagccccccaggataaggggagtcagaacgatcctcaagggggccacgggggatatgaaggggccggcaaccaatggaaagtcgctgaacacgtagggctgtacacacagtgtgcaggcacggctgtcaactgggtgataagccgcaaggcggcaaaaagttcgagaacagtgccttattccacaagatttggaaacgagcgctgtacgaaatgcctgacctctttcctggcccacacaacataaatattgcccaagtagaccacgaaatcacaaacaaacacattgaaataatatcaaacgcagtactctatcaccacaaagtggatctcgacgtacactctacgatccc

SEQ ID NO: 720509 - DNA, 351 bp, Homo sapiens
  misc_feature (149)..(149): n is a, c, g, or t
caattgtgatctttttttttcttttgagatggagtctcgttctgtcacccaggctggagtgcagtgggtcgatcttcgctcgctacagcctccacctcccaggttcaagtgattctcgtgtctcagcctcccgagtagctgggactacnagcgcccgccaccatgcctgattaatttttgtatttttagtagagacggggtttcaccatgttggccaggctggtctttaactcctgacctcaagtgatccgcccacctcaccctcccaaaatgttggattacagtgtgaaccactgtgcctgctttagcgttgtgtctaatagtctcatgtctattgtttttgtaatagat

SEQ ID NO: 720510 - DNA, 935 bp, Homo sapiens
  misc_feature (11)..(11): n is a, c, g, or t
  misc_feature (63)..(63): n is a, c, g, or t
  misc_feature (82)..(82): n is a, c, g, or t
  misc_feature (84)..(84): n is a, c, g, or t
  misc_feature (93)..(95): n is a, c, g, or t
  misc_feature (100)..(100): n is a, c, g, or t
  misc_feature (132)..(132): n is a, c, g, or t
  misc_feature (156)..(156): n is a, c, g, or t
  misc_feature (170)..(170): n is a, c, g, or t
  misc_feature (172)..(172): n is a, c, g, or t
  misc_feature (190)..(190): n is a, c, g, or t
  misc_feature (192)..(192): n is a, c, g, or t
  misc_feature (197)..(197): n is a, c, g, or t
  misc_feature (200)..(200): n is a, c, g, or t
  misc_feature (202)..(202): n is a, c, g, or t
  misc_feature (209)..(209): n is a, c, g, or t
  misc_feature (257)..(257): n is a, c, g, or t
  misc_feature (264)..(264): n is a, c, g, or t
  misc_feature (277)..(277): n is a, c, g, or t
  misc_feature (319)..(319): n is a, c, g, or t
  misc_feature (333)..(333): n is a, c, g, or t
  misc_feature (350)..(350): n is a, c, g, or t
  misc_feature (354)..(354): n is a, c, g, or t
  misc_feature (433)..(433): n is a, c, g, or t
  misc_feature (695)..(695): n is a, c, g, or t
  misc_feature (842)..(842): n is a, c, g, or t
  misc_feature (870)..(871): n is a, c, g, or t
  misc_feature (916)..(916): n is a, c, g, or t
ttatcccagtnacaggatttgagaatggaaaggacaatctttggatgacatagcttaggacanttgctcatttatttaaaanantcccttcannnttttncagataaaagaaggcaagatcataggattgtngcatgttctgggtagctgttagangttactcatgaaantnggtagcctagtaaattantngtaanttntntgaaggnaatcagcctccctttccatttcattcccttccccctcctttttttttnattttgnttgatttgttganccaccatccctatgaatacaccttacatctctttcaaatgtngagatggttttttnatcttacagtgtgtggnaccngagtcagtaatcaaagctccctgtcccaagccatagacagacaggacaacaatttgatttcctgtactcttggtctggnacccatggggttctgagaaaaaagctgaggtcttagagcactggctttaaaaaatattttcaccagttcagagtaaatgaaaacccgattccttagaaataatattgtgtctatttctacccccaccctccaagcatggtgttttttaaaaaattaatttttcccttacactttaaaaactctcacctatgtataaaagaaactgccacactacaataacactgctgttgttccaagtattcctctgagcccctcaccagcnctccctcaccatcctcaccctgaccacccttcccctctgcccagcacctaagagcagggatcacgccgcggggtgatgagcagtttcgcagtatcgcctggccttctgatactaggatgtggctctggagaaggctgcgaggatgcntgcgaacacgacatcgggggtctgggannatcgatggcggagtggatccccgtgtcctgtagtctctatgagtngggtggttgagtttggaag

SEQ ID NO: 720511 - DNA, 249 bp, Homo sapiens
ggtatgtggtgatgacagtgatgataatggtgatgatggtggtgatgatgtatggtggtgatgatggtgatggtgatggtggtggcagtgatggtaggtgataggaatggtagtggcaattggtggtgatgatggtgatgataatggtgattattgttgtgatgatgatgtggtggtggtgacttatggtgatggtgatgatggtggtgagtgatggtggtgatgagtcattctacattagcgaggatg

SEQ ID NO: 720512 - DNA, 530 bp, Homo sapiens
  misc_feature (18)..(18): n is a, c, g, or t
  misc_feature (31)..(31): n is a, c, g, or t
  misc_feature (135)..(136): n is a, c, g, or t
  misc_feature (165)..(166): n is a, c, g, or t
  misc_feature (227)..(227): n is a, c, g, or t
  misc_feature (312)..(312): n is a, c, g, or t
  misc_feature (316)..(316): n is a, c, g, or t
  misc_feature (320)..(320): n is a, c, g, or t
  misc_feature (322)..(322): n is a, c, g, or t
  misc_feature (332)..(332): n is a, c, g, or t
  misc_feature (336)..(336): n is a, c, g, or t
  misc_feature (338)..(338): n is a, c, g, or t
acgggcttccatcacctnttagctcctgaancaggcccgatatggtcaggccctaaattgtaaaattttttccacctccccgatcttggatttgagaggcagaagaagtgacccaactcagctctggaactgacnnggatgatattaagaagtggcattgttccnntcgttatgttagtttcagaatgttaacgtgtaactatatttgttcagtcgaatcaggtgantggaaacaacagatttcatattttacttttattggtactccgtccggcaacaatatgatgacttcaaacgagtagttggcaaaangganaagncnctaaggtacnaaananactggacaaccatattgcaatcagatctacagctcctggataattgcttgattctcgccagagactgtcaatgtttcattcattgccattaccaataaatcattgcttttgttcagatggtatcactagtgtttccattgtaatcttgacacatgcaattgtaaataaaagtcaccacttttgccaagcttc

SEQ ID NO: 720513 - DNA, 192 bp, Homo sapiens
ctagtccgagtaggcgagcacgccgtagcatgctgcgcattgggacccacgcgttctgcatagccctgtatttatgtgctctgggtaaatcatccacaaccttaacaatgaacaagatattcgaaaaataggaggactactcaaaaccatacctctcacttcaacctccctcaccattggccccttatcgag

SEQ ID NO: 720514 - DNA, 406 bp, Homo sapiens
cccccaggtgcccttaaaagaaatcttttaccagaagttgggggacctgctcttccgagacttctgggggaaccacttgcaggagttcagcgcccttgctcttaattctatgaggagatcaagaagtacgagaagctggagacgaaggaggaccgtgtgccccgcacccgggagatcttcgactcatacatcatgaaggagctgctgtcctgctcgcatacgttcttgaagagcgccactgagcatgtccaaggccacctgaggaagaagcagttgcctccggatctcttgcagccatacatcgaagagatttgtcagaacctccgaggggacgtgttccagaaattcattgagagcgattagcacacacggattggccagtggaagaatgcgcagcttagcatcc

SEQ ID NO: 720515 - DNA, 283 bp, Homo sapiens
  misc_feature (38)..(38): n is a, c, g, or t
  misc_feature (44)..(44): n is a, c, g, or t
  misc_feature (53)..(53): n is a, c, g, or t
  misc_feature (65)..(65): n is a, c, g, or t
  misc_feature (69)..(69): n is a, c, g, or t
  misc_feature (73)..(73): n is a, c, g, or t
  misc_feature (75)..(75): n is a, c, g, or t
  misc_feature (85)..(85): n is a, c, g, or t
  misc_feature (89)..(89): n is a, c, g, or t
  misc_feature (91)..(91): n is a, c, g, or t
aggagcgccgcccctggcccgccgggttccgttttttnccggcngtggcggtngattggcaaaangganaagncnctaaggtacnaaananactggacaaccatattgcaatcagatctacagctcctggataattgcttgattctcgccagagactgtcaatgtttcattcattgccattaccaataaatcattgcttttgttcagatggtatcactagtgtttccattgtaatcttgacacatgcaattgtaaataaaagtcaccacttttgccaagcttc

SEQ ID NO: 720516 - DNA, 366 bp, Homo sapiens
aggtcgctctagagcctcccccgctatttacaactatctacaaataaaataaaatatctaggagttaactaaaataaatagagtgaaatgatctctacaatgaaaactataaaacactgatgcaagacattaaagaagagtaatctcatttacaatagtgataactaaaataaaatgcctaggaattaactcaaccaaaggagtgaaagatctctacgatgaaaactataaaacactgatgcaagaaattaaagatgagtaatctcatttacgacagtgataactaaaataaaattaccaaggaattaactcaaccaaaggagtgaaagatctctatgatgaaaactataaaacactgatgcaaga

SEQ ID NO: 720517 - DNA, 244 bp, Homo sapiens
aacgacagacctggctctcagctattactgcgcatctgataccttgagaggggtgtggaaggaagtctgacgtgggatgtggaaggaggtgagtgtgagaggtgggtgtggaggtgtccggtggatgtggaaggtgagagtgaaagatgggtgtggaaggtgaaaggtgggtgtggaaggaggtatgaagtgggtgtggaaggaggccagggtgcatcggttggaggccagggtgcttcggttg

SEQ ID NO: 720518 - DNA, 502 bp, Homo sapiens
  misc_feature (15)..(15): n is a, c, g, or t
  misc_feature (88)..(88): n is a, c, g, or t
  misc_feature (227)..(227): n is a, c, g, or t
  misc_feature (266)..(266): n is a, c, g, or t
  misc_feature (349)..(349): n is a, c, g, or t
  misc_feature (393)..(393): n is a, c, g, or t
  misc_feature (458)..(458): n is a, c, g, or t
  misc_feature (494)..(494): n is a, c, g, or t
  misc_feature (496)..(497): n is a, c, g, or t
attttggaaaaaccnatatcattgcctgtaaatgtattatattttaaaaatttttttgaccctaagttttattgtttgtatttcaaanccattttcaaaataactatcttggggttaaaagaagaaggagggaggaaaaaggggtcaggcacactggacagggtcctctaagcagtgaggctggtgtgtatgattgtccttaaaattttttaatagatatggccgancgtgatggctcacccctgtaatcccagcactttgtgagnccagggtgggcggatcacttgaggccaggaatttgaaaccagcctgggcaaaaccctgtctctactaaaaatataaaaattanccaggcatgatggcacatgctggtaatagcagctactgaggtgntgaggcacaagaattcttggccctggaggtagaggctgcagtgagccaggattgtaccactgtanctcgcctggggctggacagtgagacttttgacaggnannctgtc

SEQ ID NO: 720519 - DNA, 843 bp, Homo sapiens
cacggtggctcacgcctgttatcccagcactttgggaggccgaggtgggtggatcatgaggtcaggagatcgagactgtcctggccaacatggtgaaatcccgtctctaccaaaaaatacaaaaaaaattagccgggcgtggtggcgggcgcctgcagtcccagctactcgggaggctgaggcaggagaatggcgtgaacccgggaggcagagcttgcagtgagccgagttcgcgccactgcactccagcctgggcgacagagcgagactccgtctcaaaaaataaataaattacttaaactaaaatacataatacagaagagagatatagtgaaactacctcaaggaaagtatatagggatgtcaaagagcccaaggagaggaagagagtactgcctcgcctcatgctatcccgagctgggattgcagtgtagtggctcttcctgtcttccagagccaaatgacatctgttcattctccctttcatgatcaggcaatttgactcattttttttcttttttttctttgcagagatgggatctccctgtgttgcccaagcgggtctccaaacttcctgggccttaaggggatcctatctcctacaaaaaaaacaaacaaaaaagcaaaaaaatgttgggggcctgacctgaaaattttcaaacctcggcttggggcgggccagtggttagaaactggccacgtgtgcagggaacccggcggagtgtgtggtccccaaaaagccgccacggttggacctgcaggtcggctggctaaggccagactacccgcggcggggaaaagagtacacgacacaggatacagcaacaacagtgaggcaggaac

SEQ ID NO: 720520 - DNA, 123 bp, Homo sapiens
tggactcagtcggctcatgatcgtgctccacatagttcatcacgatgtagatcttgtccatgttgctgcccaccacaatctctctaacggtgacgatgttgggatgctgggccttgaggatgg

SEQ ID NO: 720521 - DNA, 681 bp, Homo sapiens
  misc_feature (30)..(30): n is a, c, g, or t
  misc_feature (32)..(32): n is a, c, g, or t
  misc_feature (50)..(50): n is a, c, g, or t
  misc_feature (63)..(64): n is a, c, g, or t
  misc_feature (70)..(71): n is a, c, g, or t
  misc_feature (95)..(95): n is a, c, g, or t
  misc_feature (101)..(101): n is a, c, g, or t
  misc_feature (123)..(123): n is a, c, g, or t
  misc_feature (128)..(128): n is a, c, g, or t
  misc_feature (131)..(131): n is a, c, g, or t
  misc_feature (144)..(144): n is a, c, g, or t
  misc_feature (187)..(188): n is a, c, g, or t
  misc_feature (198)..(199): n is a, c, g, or t
  misc_feature (202)..(202): n is a, c, g, or t
  misc_feature (212)..(212): n is a, c, g, or t
  misc_feature (234)..(234): n is a, c, g, or t
  misc_feature (238)..(238): n is a, c, g, or t
  misc_feature (240)..(240): n is a, c, g, or t
  misc_feature (254)..(254): n is a, c, g, or t
  misc_feature (262)..(262): n is a, c, g, or t
  misc_feature (265)..(265): n is a, c, g, or t
  misc_feature (277)..(277): n is a, c, g, or t
  misc_feature (286)..(286): n is a, c, g, or t
  misc_feature (289)..(289): n is a, c, g, or t
  misc_feature (293)..(293): n is a, c, g, or t
  misc_feature (304)..(304): n is a, c, g, or t
  misc_feature (307)..(307): n is a, c, g, or t
  misc_feature (322)..(322): n is a, c, g, or t
  misc_feature (363)..(363): n is a, c, g, or t
  misc_feature (374)..(374): n is a, c, g, or t
  misc_feature (378)..(378): n is a, c, g, or t
  misc_feature (398)..(398): n is a, c, g, or t
  misc_feature (412)..(413): n is a, c, g, or t
  misc_feature (432)..(432): n is a, c, g, or t
  misc_feature (444)..(444): n is a, c, g, or t
  misc_feature (457)..(457): n is a, c, g, or t
  misc_feature (473)..(473): n is a, c, g, or t
  misc_feature (494)..(494): n is a, c, g, or t
  misc_feature (502)..(502): n is a, c, g, or t
  misc_feature (533)..(533): n is a, c, g, or t
  misc_feature (547)..(547): n is a, c, g, or t
  misc_feature (609)..(609): n is a, c, g, or t
  misc_feature (658)..(658): n is a, c, g, or t
tcatttaaattttttaatgggtctaaaaantntgtgaaaaatttttggtnaagttgtttccannaaaaannaatgattttaaaaaaaaaaaaatnaaaaangccaaaagaaaaaaaaaaaaanaaagnggnccaaaaaaaattntcctttccttctgaaggttttacgatgcattgttataattaannagttttttannaanaaaattaaanggccaattgaaaaaaaaagttntganancgttcttccaccantgattaanagnggggggggaggnattaggganaanattnatttagccttntgngctttctggggaganttggggaccttgccagccccagcagcctttttgtccactgntttgatgaaanccancgcaaatgtttgttttaaanaaagaaaagaaaanngacccaaagggggaaagtntgagaagctctnaaaaaaaatgggnttgccaggaaccaaanaaaaaatgggagcatcaccanaattcaanaatttagggccatcttccagctttttaccanaacggggattaatnttttccttcagctcagcaaaattgcatgcaatgtgagcggtgtgggaatccaatacaggggnatagccggcgcttatttggcctggatggttcaggataatcacctgagcngtgaagccagccgcttccattgg

SEQ ID NO: 720522 - DNA, 495 bp, Homo sapiens
  misc_feature (260)..(260): n is a, c, g, or t
  misc_feature (314)..(314): n is a, c, g, or t
  misc_feature (322)..(322): n is a, c, g, or t
  misc_feature (345)..(345): n is a, c, g, or t
  misc_feature (414)..(414): n is a, c, g, or t
  misc_feature (440)..(440): n is a, c, g, or t
  misc_feature (470)..(470): n is a, c, g, or t
  misc_feature (488)..(488): n is a, c, g, or t
tatggattccaaaattagttgtggaaatctgcaattataggtaattcatttttttagtggaagtaaattcaaaggtctatcatgagttaatgttaagtttgcttatattttaaagaaaaatgtagatatttaaaaactattctactaatcccagtgttaaatcatccacatctttgaaaatatatgtagtaatttggaatattcattagacataaattctcttttatattttaaaacacataatcacaaagaattatgtngcttggataattttacttgtagttgattgtgttcaaatttacaaacatagtctnctactatntatactttaacttttgttctatntgtgtaacctgccttacagattggaaacgtattatcaaaagttttgcatttggtgctacttttaaacanaatagtgtataaagaataagaattcntatactttgctcatatctatcacctctttntcagtcacactgctagcnaatttac

SEQ ID NO: 720523 - DNA, 193 bp, Homo sapiens
aagcatacacgacgacgtgctatagatacctcctgtggacgaaacagtctataatccttctccctatcctataaggagtctcataaaacctttattctattactgttgggtttacaggctgtgcattaagatcagctgctatatggcaatatgaatcactgaaatcccagggtccagagttattttgatggtc

SEQ ID NO: 720524 - DNA, 148 bp, Homo sapiens
  misc_feature (111)..(111): n is a, c, g, or t
  misc_feature (121)..(121): n is a, c, g, or t
cttcagatcacttagtttggttctcatggtgtatatcagcctcgtggtttggtatttcatatgattcgcctgattacacagatgaatcttgcactttcaagatatcattgngaaatttccngtccatcttatcatgggaattaaaaaa

SEQ ID NO: 720525 - DNA, 126 bp, Homo sapiens
tattccgcgccgctgtgggcttgttgagcccggttatcgcggctgcggcaatggcctttgctcgatcttcgttgtcacgaactcgatgaggctggtgcgttggcatcctgggatgagcgattcaaa

SEQ ID NO: 720526 - DNA, 502 bp, Homo sapiens
tcgactcggtccgtgttatcgatgccacttccatcagtcggaatagctattactaaaaagtcaaaaaataacagatgttgcggagaaaagggaatgcttatacactgttggtgagaatgtaaattagttcagccactgtggaaagcagtttggagatttctcaaagaacttagaactatcattcaacccagcaatcccaaaggaaaatgcattgttccaccaaaaggacaatgcactcgtatgtttatcacagtagtattcacaatagaaaagacatggtggaatcaacctagacgcccatcaatggtagactggataaagaaaatgtggaacatattcaccatagaatactatgcagccataaaaaaagaatgaattcatgtcctttgaagcaaaatgaatgcagctggaagccattatcttaagtgaattaatacaggaaaggaaaaccaaataccacatattctcacttataagtgggaatatgtggcatcgataaaca

SEQ ID NO: 720527 - DNA, 505 bp, Homo sapiens
tactactctgtgaatgccctagatatttgactcaaattacactcaatcttattaggtatattcgtaggattattagaatctacaaaccaaccctagaatatcatgctattccagtcacacctgtggaacaatgagcagtgtacgaccatgccgcatcacaatccaagccttggtaccctagatagtgacgacctcctcacaaaggtattaaagctgagccaattcaatctatattttgctttcagactaaacataatacatgctttcaaataacgtaacttttaaggtatctgaacaaagggcatgtaaggttcacttcacttctcaaactgcaattacacactcatcaggcttatggctgtctggactaattgctaacctcagtacctcctacaaattagcagtcttcaccttaggtttccacagtactcattacactttactcgtaatcacagtacaaacgttttgcgtctcacccatttcattgtaaacaaaccaattacac

SEQ ID NO: 720528 - DNA, 453 bp, Homo sapiens
ggagggtcaaaaagggcggtcggcggccggtcaggaacttaattctgaagatataagaactagacagtcagacctccaggactaagatgaagtgagccgagaggaaatcagagggtgggaatgcttctgtcgttagccgggtgcagtgctgtgtgtatctagttccagctacttgagaggctgaggcaggaggattgcttgagtccagaaagtggcaattgcagtggagtggaaatcgcgccactgctctccagcctgggtggcagagggagggggtgtctcaaaaaatagacaataacaaaatgcttgtgtcagttaacaatctttattagagggtttttagtctttctttcgtagctgtatgttaaagtggggggacaaatgcgaataaacgggtttattatgctttaacaggaagaaagaggggaaataatggcctcgtttggctgaccg

SEQ ID NO: 720529 - DNA, 86 bp, Homo sapiens
ggacgcgtgggcgacagagccagactgaggaagaaattgtatatcaggctgggcacagtggctcatgcccgtaatcccagcacttt

SEQ ID NO: 720530 - DNA, 497 bp, Homo sapiens
gatctgtgccctatccagaagatcatccacagagactatcaattcacatgaagcagcagctgcaagtctaactatccatctccaagagggaatggtcacaaacacaatgcctcatctagctcaacaataatcatccccaacaccacatgacctctaagtatcagtacgtggcatgcacaaataatttctcgtgaaaggcctcaacaaagcacaacccttaacttagggagggaagagacaaccacaaatgtaaagactccattaccttcggaggcaaagtgctggaaagtaaatgcttcatttctcttatggctcaatgtggtggccatgcgggctgtctgagggtctgcatgtcctgaaagtaatgaaagcactcctccctgatgtacagtggggaaaatatgtccatatctaaccagtgatacgagctatatagaagtattcaggacagccagtctatacatatctcactctgatgtaaatgaagtaacttgtct

SEQ ID NO: 720531 - DNA, 1003 bp, Homo sapiens
  misc_feature (2)..(2): n is a, c, g, or t
  misc_feature (341)..(341): n is a, c, g, or t
  misc_feature (346)..(348): n is a, c, g, or t
  misc_feature (354)..(354): n is a, c, g, or t
  misc_feature (356)..(357): n is a, c, g, or t
  misc_feature (568)..(568): n is a, c, g, or t
  misc_feature (630)..(630): n is a, c, g, or t
  misc_feature (677)..(677): n is a, c, g, or t
cnggagtgggaggcccgatagtgttccttctcctctttccctttgtcgtgagtccttgtgccgtcctgtcttctttcctaataatggtgcgcggattccttttccgcgactaatttttgcccctcgtggtccccgggtgttctggcgtgggcacccttctcctgtcacgtcagcgccggcgttctgcttctgcgcccaacttcctgtgcttcggtaatctctttggagagagaaaaagcgttcatgagttttgtaccttggaaaccattggatggtaggatttgtaacacgtcaaccattttgaagcttctgaaaagtaactttcaacttgcgaaggtcantcttnnnaaagantnncctaaacaccgagggaaacttaagaacgtttaaaatataggagtccgtgatttccctgtgttttcagtttctttccttctgtgaacgatgagacttggagaacgggctggtccttcaccacttcctgttggcctggcctggccggggaaggtggcagcggcaccggactgacctgcagtgacccgcgatgccgcgccacgagggacacttnatggcttcattcgagagctgctgccacaaaacgcctggcgccgccaccgacgggggccggcntcgaggacgcccgcctgcctcgcgggtcgtcgtccgcgggactgtgntcgtacgtgcatagtttcgatatcacatcgcggggctgtgttcgtagctgcgtcgtttcgatatcacaccctctgtgtgccgccttacttcctgcttcgagaatgtataacgtggaaatccacgggaccaaatttctgcagaggccttgccggatggttccataactgtagagtctaattgctatccattacagaaattaatcgttcagttgaaagaagtactgatgacttttcaaaacaaatgaaccaccgtagctgacagagaaccgtatcgtagaggtttgtagttagtgctatttaagcacctgtggtgtgactaggcttaa

SEQ ID NO: 720532 - DNA, 729 bp, Homo sapiens
catgtgtagcccgaggctggacctgaactgctgggctagagcaagtctctgcccctgcgagcctctggagtagctgggcctacagagtgtgctgccgcatccagctaatacagtctgtctaactcccgtctctctaattccccggttgtctatggccgcagaggcagactcctgtgccagcgtcatgtcaataccgcatccagcatacaggatctctgtatagataaactttctcgttttctcgttaagcacaaaatagatgaggtaggtactactatacggagctaagcagcgacgaactgtgcctaacgcttatacacatagggtagaataggacaagcgatttgtctcagggcaagggacgtcgtggttggtcgcaaatgtcctggtaatattcgccaagacagtatagggtacgggccatcggctgggtgaaatcaccctgtgatgtcaggcagtttgcagaggaccagtctcctgtgtgtaaacaccgggtgaaaaatacccatcgtctacgtagagataaatacatgtataaacttgtgccactgggtcagtggctgtgcagggctgcctgtggtcccagactgctcgggaggttgaggccacagtaatggcgtgatcccgggcagtgtggagtgtttgctgctggcaagcctacgatggggccaatgtgacttcaccagctcatggcgggacacggagcgtagacgtccgtcgttaacatga

SEQ ID NO: 720533 - DNA, 1307 bp, Homo sapiens
  misc_feature (411)..(411): n is a, c, g, or t
  misc_feature (733)..(734): n is a, c, g, or t
  misc_feature (739)..(739): n is a, c, g, or t
  misc_feature (822)..(822): n is a, c, g, or t
  misc_feature (835)..(835): n is a, c, g, or t
  misc_feature (865)..(865): n is a, c, g, or t
  misc_feature (868)..(868): n is a, c, g, or t
  misc_feature (893)..(893): n is a, c, g, or t
  misc_feature (896)..(896): n is a, c, g, or t
  misc_feature (902)..(902): n is a, c, g, or t
  misc_feature (931)..(932): n is a, c, g, or t
  misc_feature (941)..(941): n is a, c, g, or t
  misc_feature (943)..(943): n is a, c, g, or t
  misc_feature (953)..(953): n is a, c, g, or t
  misc_feature (955)..(955): n is a, c, g, or t
  misc_feature (966)..(967): n is a, c, g, or t
  misc_feature (974)..(974): n is a, c, g, or t
  misc_feature (1052)..(1052): n is a, c, g, or t
  misc_feature (1055)..(1055): n is a, c, g, or t
  misc_feature (1066)..(1066): n is a, c, g, or t
  misc_feature (1073)..(1073): n is a, c, g, or t
  misc_feature (1076)..(1076): n is a, c, g, or t
  misc_feature (1080)..(1080): n is a, c, g, or t
  misc_feature (1087)..(1087): n is a, c, g, or t
  misc_feature (1091)..(1091): n is a, c, g, or t
gataactgctggcgcaccgtcgtcgcgcagaaggtggttctgtattctagctccgagctgtgcttagcgatggcctggaaatccggcggggccagcgactggggagctcctccacaatctccgcaccacatggaatcaatcacagcacagatcaagtatagggagagtgatgcgtggctacaggaccgctcccagtatgctactatgtacccccagtacatggattcatccacaatcaataggtttccaagcaacaatcagttgctccacacatgcatgcatatgcgctaagaacttctatttgatcagttgcatgaaggagctaaagctcttgcatgtaggatctggaagtggaattccttactgcatgtttgcacgtatggttggatgtactggaaaaggtcataggantgatcacattaaagagctagtagatgactcagtaaataatgtcaggaaggacgatccaacacttctgtcttcagggagagtacagcttgtagtgggggatggaagaatgggatatgctgaagaagccccttatgatgccattcatgtgggagctgcagcccctgttgtaccccagggcgctaatagatcagttaaagcccggaggaagattgatattgcctgttggtccttgcaggcggaaaccaaatgttggagcagtatgacaagctacaagatggcagcgatccaaaatgaagcctctgatgggggtgatatacgtgcnntttanacagataaagaaaagcagtggtccaggtggaagtgatttatcttgctgctctttcttcttcccacaacatggcaggggttgantggtaaaagcaanatcagttgacagtataaaattacagtggantgntcatctcagtcctcaaagcttttgnaanaccaanaccatcacagctggtttggacttgttacnnctgttactntncagcatgaanantgtgtgtcttnnagggttnctgattcttcaaagaggcacagagccaaatggtcagaggaaggatgcaccagtataaatttgtgtaatattactttgncantgccatatttnacttggnaantatnacaagangggntctgacacatggaaagactgtagtctggtgaatgtgatcttgaggagtggtttagggtttactaggacggcttaattgctgtcctgatatgaattgatcagatggggtttgtgcattggataagacaccattacaagttaggattcttggattggtatctggagcatgtcttagacactggatgactttctttaaagttggagggggataatatgg

SEQ ID NO: 720534 - DNA, 654 bp, Homo sapiens
  misc_feature (47)..(47): n is a, c, g, or t
  misc_feature (383)..(383): n is a, c, g, or t
ctttcgcgtctgcggtgttcggagtgtggtacttctcctagttgcantcaggcttcatacgctattgtcctgcccgtaagttcccgttttgtgtgtggtgagtggaaactccatgttcttcgttggagacctctggtcctcccttcccttctttgtgccgtcgtctctgcggccagccctaatctccttctcgtggcttctccgtctctgaccccaaataggccttaagggcgtgggagaaatgagtttctggagctggaaaagccactgccttctgcacgggcctgagaagcccttggctggtgttgatgacttcacttttttccccatcagatcgacaatgctgacgtcttatattttgccagttagttctgatacatcgncctcggcccggccttgttcgtttctgaccgtgggaagatgtcggtaacgccctttatttgttggttaccagttagagcagccagcgggtccagaatggatttggaagacgtagccaccactgtaccttcatgggaagccagctcagacctcctacaaccttcgtacttctgacgagtaagcctttgtttcctaagtggtttactggtggacatcacgtgctttgagaacttttaattttctaggtatacttcggtcttcctcctcctcttc

SEQ ID NO: 720535 - DNA, 1359 bp, Homo sapiens
  misc_feature (47)..(47): n is a, c, g, or t
  misc_feature (837)..(838): n is a, c, g, or t
  misc_feature (843)..(843): n is a, c, g, or t
  misc_feature (874)..(874): n is a, c, g, or t
  misc_feature (887)..(887): n is a, c, g, or t
  misc_feature (917)..(917): n is a, c, g, or t
  misc_feature (920)..(920): n is a, c, g, or t
  misc_feature (945)..(945): n is a, c, g, or t
  misc_feature (948)..(948): n is a, c, g, or t
  misc_feature (954)..(954): n is a, c, g, or t
  misc_feature (983)..(984): n is a, c, g, or t
  misc_feature (993)..(993): n is a, c, g, or t
  misc_feature (995)..(995): n is a, c, g, or t
  misc_feature (1005)..(1005): n is a, c, g, or t
  misc_feature (1007)..(1007): n is a, c, g, or t
  misc_feature (1018)..(1019): n is a, c, g, or t
  misc_feature (1026)..(1026): n is a, c, g, or t
  misc_feature (1104)..(1104): n is a, c, g, or t
  misc_feature (1107)..(1107): n is a, c, g, or t
  misc_feature (1118)..(1118): n is a, c, g, or t
  misc_feature (1125)..(1125): n is a, c, g, or t
  misc_feature (1128)..(1128): n is a, c, g, or t
  misc_feature (1132)..(1132): n is a, c, g, or t
  misc_feature (1139)..(1139): n is a, c, g, or t
  misc_feature (1143)..(1143): n is a, c, g, or t
ctttcgcgtctgcggtgttcggagtgtggtacttctcctagttgcantcaggcttcatacgctattgtcctgcccgtctacagcattggcagcgggtacagaatggatttcggaagacgggagtcagcactggacctccaaggaagccacgtgcagacatctacgaccttcgcatctcctgacgagtttattgttggccaaaaccaggctttgattgagccaggatgaatgcgggtgttggatagtagaatattatatatacatataacattggttgtgagagccacgtgtaccacgattgtgtgttagtatctctggcttgcattcagtctgccttgtaacagaaactggcgatggattatgacgatgggtagccctctggcatacgtataaggatcagaccctgtgacttgcatgaaagtgaagatctggctatacatgcagttccacaacgttactgtatacatagcctgagttgaaagaaggctgtgcgccacttcaagaatgtcatggctagactttgagctttctaactggcctacctgcttatgtgaagagtaaggatctttctcaaatcttctgtcttcagggagagtacagcttgtagtgggggatggaagaatgggatatgctgaagaagccccttatgatgccattcatgtgggagctgcagcccctgttgtaccccagggcgctaatagatcagttaaagcccggaggaagattgatattgcctgttggtccttgcaggcggaaaccaaatgttggagcagtatgacaagctacaagatggcagcgatccaaaatgaagcctctgatgggggtgatatacgtgcnntttanacagataaagaaaagcagtggtccaggtgantggtaaaagcaanatcagttgacagtataaaattacagtggantgntcatctcagtcctcaaagcttttgnaanaccaanaccatcacagctggtttggacttgttacnnctgttactntncagcatgaanantgtgtgtcttnnagggttnctgattcttcaaagaggcacagagccaaatggtcagaggaaggatgcaccagtataaatttgtgtaatattactttgncantgccatatttnacttggnaantatnacaagangggntctgacacatggaaagactgtagtctggtgaatgtgatcttgaggagtggtttagggtttactaggacggcttaattgctgtcctgatatgaattgatcagatggggtttgtgcattggataagacaccattacaagttaggattcttggattggtatctggagcatgtcttagacactggatgactttctttaaagttggagggggataatatgg

SEQ ID NO: 720536 - DNA, 1255 bp, Homo sapiens
  misc_feature (411)..(411): n is a, c, g, or t
  misc_feature (733)..(734): n is a, c, g, or t
  misc_feature (739)..(739): n is a, c, g, or t
  misc_feature (770)..(770): n is a, c, g, or t
  misc_feature (783)..(783): n is a, c, g, or t
  misc_feature (813)..(813): n is a, c, g, or t
  misc_feature (816)..(816): n is a, c, g, or t
  misc_feature (841)..(841): n is a, c, g, or t
  misc_feature (844)..(844): n is a, c, g, or t
  misc_feature (850)..(850): n is a, c, g, or t
  misc_feature (879)..(880): n is a, c, g, or t
  misc_feature (889)..(889): n is a, c, g, or t
  misc_feature (891)..(891): n is a, c, g, or t
  misc_feature (901)..(901): n is a, c, g, or t
  misc_feature (903)..(903): n is a, c, g, or t
  misc_feature (914)..(915): n is a, c, g, or t
  misc_feature (922)..(922): n is a, c, g, or t
  misc_feature (1000)..(1000): n is a, c, g, or t
  misc_feature (1003)..(1003): n is a, c, g, or t
  misc_feature (1014)..(1014): n is a, c, g, or t
  misc_feature (1021)..(1021): n is a, c, g, or t
  misc_feature (1024)..(1024): n is a, c, g, or t
  misc_feature (1028)..(1028): n is a, c, g, or t
  misc_feature (1035)..(1035): n is a, c, g, or t
  misc_feature (1039)..(1039): n is a, c, g, or t
gataactgctggcgcaccgtcgtcgcgcagaaggtggttctgtattctagctccgagctgtgcttagcgatggcctggaaatccggcggggccagcgactggggagctcctccacaatctccgcaccacatggaatcaatcacagcacagatcaagtatagggagagtgatgcgtggctacaggaccgctcccagtatgctactatgtacccccagtacatggattcatccacaatcaataggtttccaagcaacaatcagttgctccacacatgcatgcatatgcgctaagaacttctatttgatcagttgcatgaaggagctaaagctcttgcatgtaggatctggaagtggaattccttactgcatgtttgcacgtatggttggatgtactggaaaaggtcataggantgatcacattaaagagctagtagatgactcagtaaataatgtcaggaaggacgatccaacacttctgtcttcagggagagtacagcttgtagtgggggatggaagaatgggatatgctgaagaagccccttatgatgccattcatgtgggagctgcagcccctgttgtaccccagggcgctaatagatcagttaaagcccggaggaagattgatattgcctgttggtccttgcaggcggaaaccaaatgttggagcagtatgacaagctacaagatggcagcgatccaaaatgaagcctctgatgggggtgatatacgtgcnntttanacagataaagaaaagcagtggtccaggtgantggtaaaagcaanatcagttgacagtataaaattacagtggantgntcatctcagtcctcaaagcttttgnaanaccaanaccatcacagctggtttggacttgttacnnctgttactntncagcatgaanantgtgtgtcttnnagggttnctgattcttcaaagaggcacagagccaaatggtcagaggaaggatgcaccagtataaatttgtgtaatattactttgncantgccatatttnacttggnaantatnacaagangggntctgacacatggaaagactgtagtctggtgaatgtgatcttgaggagtggtttagggtttactaggacggcttaattgctgtcctgatatgaattgatcagatggggtttgtgcattggataagacaccattacaagttaggattcttggattggtatctggagcatgtcttagacactggatgactttctttaaagttggagggggataatatgg

SEQ ID NO: 720537 - DNA, 345 bp, Homo sapiens
  misc_feature (35)..(35): n is a, c, g, or t
  misc_feature (77)..(77): n is a, c, g, or t
  misc_feature (95)..(95): n is a, c, g, or t
  misc_feature (293)..(293): n is a, c, g, or t
  misc_feature (342)..(342): n is a, c, g, or t
caggctggaaagccggcgcagggaggtcacctttnatgtagacatcgtcgtcggcgcgcattaaccactcatacttntccagaaatcagcatganaagatgatcaaaattcatatattgaaacatgaaaaggctctgaatgggttggatgatgccctcccatattgcggtggccaatatgctttactcagtctacagattcaaatgctaatctcttctggaaacaaactcacagacacactcaaaaataatgtttaactagatatctggacatccggtgctcaaggttgaagnagaaataaagaagcacgggagtaataacatgggattatcagaaacctgnctt

SEQ ID NO: 720538 - DNA, 660 bp, Homo sapiens
tgatgtgttggttttctcgatgagcgttaggccgctggtttggtgatcggtctgatgcaatgtctggacgtggtaagcaaggaggcaaagctcgcgccaaagcgaaatcccgctcttctcgcgctggtctccagttcccggtgggccgagtgcaccgcctgctccgtaaaggcaactactgcagtagcgggttggggcaggcgcgccggtgtacctggcggacggatgttagagtacctgaccgtcgagatcctggagctggccggtaactgcggtcgggaggacaagaagactcgcatcatcccgcgccatcttgtagctgtgcatccgtaatgacgaggagctcaacaaacgtgttagtgtccgggtgaccatttgtctcagggcggcgtccttcctaacatccaggccgttgcttctgtctaagagtgaccggatgagttcacccattcatgggttcatggtgtccgttggagtttgacccgcaaagatgtcttttctgatgtgtctgattcgtgtgtgtctcacagtcttgttaattcccagctcatttggtgtctggctgggttggctatgagccttttcttttttcctgagagtttgctggttcctatgtgtctgtcctttgtgtacacttctttatgcttatgtggctggtgg

SEQ ID NO: 720539 - DNA, 377 bp, Homo sapiens
cctgagtagggtgtgacctccgcagcggcagaggaggagcgcagccggcctcgaagaactttcttgctttggggtgggcttgaacctcttgattctttgaccctaggaggtcattgggcccattggcaacccaaaagggagggtactgttcaaaagctggctttcagggatttcaattgcccatgggaaggatgccccagacccctgagggaagggccatgtaaaggggctcgggcacccatggaaggacggcatttatttaggcgtttccttgtcctaaccgcaacaacggcccagcggccagggaggatcaggggcaggcctatcaagaggcaccattcgggcaggggactttatagaggagcctgaggtcagga

SEQ ID NO: 720540 - DNA, 858 bp, Homo sapiens
  misc_feature (164)..(164): n is a, c, g, or t
  misc_feature (167)..(167): n is a, c, g, or t
  misc_feature (170)..(170): n is a, c, g, or t
  misc_feature (178)..(178): n is a, c, g, or t
  misc_feature (182)..(182): n is a, c, g, or t
  misc_feature (187)..(187): n is a, c, g, or t
  misc_feature (201)..(201): n is a, c, g, or t
  misc_feature (204)..(204): n is a, c, g, or t
  misc_feature (219)..(219): n is a, c, g, or t
  misc_feature (233)..(233): n is a, c, g, or t
  misc_feature (236)..(237): n is a, c, g, or t
  misc_feature (241)..(241): n is a, c, g, or t
  misc_feature (251)..(252): n is a, c, g, or t
  misc_feature (261)..(261): n is a, c, g, or t
  misc_feature (277)..(277): n is a, c, g, or t
  misc_feature (283)..(284): n is a, c, g, or t
  misc_feature (291)..(291): n is a, c, g, or t
  misc_feature (431)..(431): n is a, c, g, or t
ccggacttcgagccatggcggtgacggaagcgagcctgtgcgccagtgccccctgcttcggccccagaaccggtcgaaaaccgtgtatgagggattcatctcggctcagggaagagacttccaccttaggatagtgttgcctgaagatttacaactgaagaatncangantattatgnagtnggcanctgagaacaatacntantggataccatcgaanagtacaacagagantgnngcantctcctgatnnaatgagctntatgatggagttgaanatgctnntggaagntggcttagagaatagacaagagctgtagtagcagcgtacctcctcgctcgcaccagattctacatcaagaccgtgtatgaaagagataggaacgtctgggtggggagtaaagcttgtgtatgcggataccgtgcttcagntaccatcaagttaaagagcagaagagtgctatctggtagagagcactttaatcgactcatcaagtggaaggcaaagtatcctgcagaatcaccagatcatcgagtggattttcctgttccattttgtgcctcctggacagctcaggtaaattctcctcagagctccttaagtaagcagttgatagtcagttttttggcagcaagtagaatcgctaaaggcattctgggatgttatggatggaaatcgatgagaagaccgtgggtacttgaagcctagaaggaagctccacggagtgcaacagtaccgcagaatttgctttcggtaataactgtttccatcaatattagaggtagaaccccaggcattcctactatgcttcctggagtgctcttcctggaacctgaccctgtgggaaaaccccgtgga

SEQ ID NO: 720541 - DNA, 1199 bp, Homo sapiens
gttatttgctatcgaggaggacttcgtaacccagattgtggagtgtgcctatgattgatagacacgagtatgaccatcgtagttgtgaatacgagtagtgacctttggcactagatatagttttattcgatgcgagatcctggagcttagagttctagacgaggaatcaaggtgagcgttgctggaatagatgtgtgcgtaagtaatgaagtacgtattaatattatgctatagatgaaagagaataataataggcctaagtgaggatgaatgacgagtactgcctagatgtatggagtactcaggagctagagtaagcatttgaggaacgcagacactattggtcgatttgtacttgttcaccagttagcaatcgagtggaatttggtgaggaattgggagtctgcgaaaaactttacgtcgttttactgtaaggtacaaaattgatcgtgagggagttaatgctcctacaatgagggaattggtttgtttcacgcataagtccctaatgataggaatatgtagtagaggtgcgatagatggggtaaaaggctgtaggtgacttgattcttcgctaaactggtaaaggaataccagagggaaggacggctagcacagggtaggtatggagatcgcatggtactgcgtgtagttctgtttgtggaaaatgtgaagcgtaagaggacgtgtgtgtagcggcacgcgttgtacgtcagtggcgtgggtacgatctacagtaagggaaagcgttctttgcaagggacgcaaatgtgagggttatccctataaactagttgctggttggattatcaattgaggaagtggggcaagccgtgacaacagtatggaagtggtacaacagtattggaaagacacaatggacacagaaggaggtatattcggtgagagtatacgcaaacaaaaagtcggtggaagttcattatagcgggcgtgttgacaacttcccaggtgaattctagatggttggcccatggcacaaaatttggttgaacagagtagggctggcgggagatggctctgaattctagttacagattggaactatggtactgagaggtatacgtgggagacagaaggatccaacaccagtgcaggactttgaggagggagaacattgatagagggaccatcacggatagagatagataacggttattataacaaagatgtagttactg

SEQ ID NO: 720542 - DNA, 893 bp, Homo sapiens
  misc_feature (133)..(133): n is a, c, g, or t
  misc_feature (199)..(199): n is a, c, g, or t
  misc_feature (202)..(202): n is a, c, g, or t
  misc_feature (205)..(205): n is a, c, g, or t
  misc_feature (213)..(213): n is a, c, g, or t
  misc_feature (217)..(217): n is a, c, g, or t
  misc_feature (222)..(222): n is a, c, g, or t
  misc_feature (236)..(236): n is a, c, g, or t
  misc_feature (239)..(239): n is a, c, g, or t
  misc_feature (254)..(254): n is a, c, g, or t
  misc_feature (268)..(268): n is a, c, g, or t
  misc_feature (271)..(272): n is a, c, g, or t
  misc_feature (276)..(276): n is a, c, g, or t
  misc_feature (286)..(287): n is a, c, g, or t
  misc_feature (296)..(296): n is a, c, g, or t
  misc_feature (312)..(312): n is a, c, g, or t
  misc_feature (318)..(319): n is a, c, g, or t
  misc_feature (326)..(326): n is a, c, g, or t
  misc_feature (466)..(466): n is a, c, g, or t
ggtacccgtaaaagcgagaagatgctgtctggtagagagcactttaatcacatctcaagtgtgaaggcagaagtatcctgctagaatcacctagattatttgtgtggattttcctgttcattttgtgcctccnggacacctcagggaagagacttccaccttaggatagtgttgcctgaagatttacaactgaagaatncangantattatgnagtnggcanctgagaacaatacntantggataccatcgaanagtacaacagagantgnngcantctcctgatnnaatgagctntatgatggagttgaanatgctnntggaagntggcttagagaatagacaagagctgtagtagcagcgtacctcctcgctcgcaccagattctacatcaagaccgtgtatgaaagagataggaacgtctgggtggggagtaaagcttgtgtatgcggataccgtgcttcagntaccatcaagttaaagagcagaagagtgctatctggtagagagcactttaatcgactcatcaagtggaaggcaaagtatcctgcagaatcaccagatcatcgagtggattttcctgttccattttgtgcctcctggacagctcaggtaaattctcctcagagctccttaagtaagcagttgatagtcagttttttggcagcaagtagaatcgctaaaggcattctgggatgttatggatggaaatcgatgagaagaccgtgggtacttgaagcctagaaggaagctccacggagtgcaacagtaccgcagaatttgctttcggtaataactgtttccatcaatattagaggtagaaccccaggcattcctactatgcttcctggagtgctcttcctggaacctgaccctgtgggaaaaccccgtgga

SEQ ID NO: 720543 - DNA, 1245 bp, Homo sapiens
caatccgactaatcaccacccaacaatgacgtattcaaactaagccaatagccctgggccgtacgcgctaaccgctaacattaccatgaaggcgcaccttactcatgcacctaattggaagcgccaccctagcgaatatcaaccattaaccttccctctacacttatcatcgttcacaacttctaagttctactgactgatccgtagaacatcggctgtcgccttagatccaagcctacgttgttctacatcgttgctagatagagcctctaccttggcacggactagacgagcatagatgacccagccaatcacagtgcctatcatatagtagaacccagcccatgaccccttaacgaggggccctcatcagcgccttcctaatgacctccggccttagcctatgtgatttcactttcacgacatcctagtaaggctccttcatactaggcgctacttaaccaaggacacttaaccatatacctaatgatggcgcgatgtaacacgagaaagcactgtaccaaggccaacagcacgagtcacctgtccaaaaaggccttcgagtacgggataactcctatttattacctcagaagtttccgatcttcgcatggatttttctggagccttgataccagctccagtcctaggcccctaaacacgcctaagtaaggagggcactgggtcaccaaggagggataaagcccggatagatccctagaaagtccactgctagaaacattgcggtatttactcggcatcagggagctatcaatcagcaggaaagacaccagagatcttgatgagaaaacgaacccgggaaccaataaattcaaggccatggttatttgcacctgtgacggggccctattataaacagcctagaaggtcaaaagacataaggacccctaaccaatccgaagagacctacagcggcaaccattatttggtagcaccagaaggcccccgcgacaacagcacattgggggcgaacacccgcaccaaaggtgtaacacgccacgcaaaaaattacattgagaccaccacacatatgaggtgagaagccacggaatagataatgaaagaacaggaaaccacacacgccaatgccgggagtcaacgacgaaacacagagaaaaacaaggacgcccgccccgccgtacctagacaagagacgacaatattattctaatcgtctcttactatgacccagcacacaagcaagcaagtgtagggaggaggggc

SEQ ID NO: 720544 - DNA, 368 bp, Homo sapiens
agcactatgaattctattgcccccacccccccgactcacaccaactattcctcagctcagtaaatgacaccacaaccaactgatcattcattcaaatctggctcatctatgactcattcttaaactcttctgacttgtctttaagtctctcccctgacatacagtctcgaatcagtaagtcctatttgttctactatcaaaatatatatagaatatgctaactctttttatattccctgccatgatcctaacagcaactactgtcactagctgtttcccagatgaaaatacatattaaaccttctccttcctattattcatgccctcctaaaacacatacttcctactgtagccataatgccttcttc

SEQ ID NO: 720545 - DNA, 217 bp, Homo sapiens
aaaacgctacatcgttgggggaagggaaagacttagaggaccccgggcccctccctgaggctcagaccaggcctcccggccccggccggcgtgagccgttcaaaatttacggtccccttggggaaaaaaaccaaaaccccgaaaaggccacgccggccgctctgaccggccgacacggtcaccttcgggccctggggcctttggggacgctgggctt

SEQ ID NO: 720546 - DNA, 1332 bp, Homo sapiens
cggacgcgctgggtcgacccacgcgtccgggcccccgcaaggtccccggccgtgcgcgagggagccatgatgaggcgcaccctggcaaaaccggaacgctcaacacgaacacaagctgcaaagcagcgtgctctcgaacatagtggagacagcactcacgggacgacactggtgccaaactctcgtcgcatgcctactgctgcggacaacactgccaggcttgcacgcagaccaaagtcagacccctcctggctgacactgcaacatctaaccgcgctactgctgctaacagagtaccctcgcactttaacacgctggcgcctgactgaacctttctgcacgattgacgttattgccagtcaccctctcacgggactctactctgagcacaggccaggaccgggttcgaacaggacctcttctgcaagatcgccaaaaggctaacgcattgaaaccccccctttggcaacacaccgttacatgggaaacccagctatgctagcacaccccttggacatatccgcgcgaaatggaccgcttccaataacgcccatagttatccttcaccaaggacaaacggggacacttccgaatgaagaaggcccttacacgcccataatctattacaccttcccacgatctttcagtcagaatacgtgacatcaagcgctatcacagcgcgaacaaacccctcaattccgtggaatcgcgaaccacgttgctataactctcattcaaccatggtggtcccaatgtaaaaaaacccgggggcaccaattttgtacccatgtcaaggaaacggtcttgcccaatctcttcggcactatttggccattaaagtgcctccgcaatacttctaataggcatccggtgtacgaccttccgtgtgggcaagtcggaagaagatctcttcacgttttaccaaccgacaaccgcgtttatggcaaagatatgcggttcacagcaacagcacatctttgcaaccacgtcggcacttcacttacaacaactgaaaccgctaacttaacgttttgcgtgctcccgccttggactacaagagtttctatacgtttcaaggccgaaaacttttccgggaatcagaatcttgggactataaagtattgttatcgagacacgtgttgacccaaaagcaacggcgctattgtcatcagcacacaagcgggatttccctataaccacaacgcttggtgccgtgttgcgtcgcccgttatatcaccccatatggcgaagagaatatagagttttaactgatataactagagtccgcatcatctagtcggcagccctgtcccagcaacgacaacttctttg

SEQ ID NO: 720547 - DNA, 490 bp, Homo sapiens
gctgcagccccgtgtccccatgctggcttaaatggaccccacgatgctcgtgcggatgtgggtgatggcctgcatcctgtgctccaacgctgtctcttgctgcgccatccagatgctccactcgatcaccgccgatcgcatataccacgtgacattcgacctttagaccgacactgcacagaggtcaccgcgcattactcgcggaacttgacaccggacagggccacacaagagtaagactgacagatccgagttatgcacaccgctacaaccaacacacagaaacaccaacccaccccgcgccgccggcgtcgcaacggcaggccggggccgccggcgcgcgaggggcggaccagggcggcagacggcaggaggagggaagggaagacaaccgagaaccaggggccgcacacggaagaccaccagacgcggagccagcgcagccaaacgacagcgtcgcgaccggcgcccgacggccacgccagcgcca

SEQ ID NO: 720548 - DNA, 638 bp, Homo sapiens
cttcccgtctcagaatctaaacgtggtcaccttcgagtagagaggcccgcccgcccaccgtgggcagtgccacccgcagatgacacgcgctctccaccacccaacccaaaccatgagaatttgcaacaggggaggaaaaaagaaccaaaacttccaaggccctgctttttttcttaaaagtactttaaaaaggaaatttgtttgtattttttatttacattttatatttttgtacatatgttagggtcagccatttttaatgatctcggatgaccaaaccagccttcggagcgttctctgtcctacttctgactttacttgtggtgtgaccatgttcattataatctcaaaggagaaaaaaaaccttgtaaaaaaagcaaaaatgacaacagaaaaacaatcttattccgagcattccagtaactttttgtgtatgtacttagctgtactataagtagttggtttgtatgagatggttaaaaaggccaaagataaaaggtttcttttttttccttttttgtctatgaagttgctgtttatttttttggcctgtttgatgtatgtgtgaaacaatgttgtccaacaataaacaggaattttattttgctgagtgttctacaacaacaaaacaaaaaaca

SEQ ID NO: 720549 - DNA, 177 bp, Homo sapiens
accgtcgctgcgccagtgggatttcccatgcggggagatggtggttttgacagaatgcctcctggtcggggtgggcgtccatgcctccatctagaagagattatgatgctatgagccctcgtcgagcaccatctccctctcctcccggacgagttggccggggtggtagcagagctc

SEQ ID NO: 720550 - DNA, 470 bp, Homo sapiens
gcgactacgttatttttgaagcctttatctgcaaagtagtcaggaattacatcgtctgcaaagcggtgtagatgatcataccagactcccacggacatccggcctggctcgtcataccgataacgccgaagctatgtggagcgggctgcgtacattttgtacgttgatgatgattggcgcatggagtattgcttcgcatggggatgccggtgccaatgcattaacgctggcagcaattagctcgtactctactccgccgtcgcagcaccgtttaagtcgttgtcacttctgatgcgcacgtgggtgttactttcgctattcagctttgtggtcaaatttggtctgatggtccagattagcgatctgtggcaatttttactggtttctctttccactgctgggcgacaatgcagcttcttaaattgcagatgccaaatttccgcattgtggggcactgatgttttagggct

SEQ ID NO: 720551 - DNA, 894 bp, Homo sapiens
ggcctggaatcgagcaggccgtttctgccgcgtccaccacaacctctgctgtatcagagggggccttcgccgccgcgacccacagctgcgcaacgcactcgcgactgcgcctggggtcttcctccgcccatacaaccaccatctacacgacactaggccaattgtcccggagaagaagcaatagatccagactacaccagagggagaccggggcgcagaacaatgagcggacaggcgagagccggagagaggagaacaagagagcgacaagcggaggaggaaacaagacaaagacatcaagcagtgacagaacaaagcagcaacccggcgcgagcagggcaggaggacacaagcagacagggccaaaaagcaaacaggagcaaccagaaggccaggatgcacgcacaacgggagaacgaatacacgagcgggggacgcgaggcacggcagcagcacgcgacagaaggccgcaagaggcacaacacagccagatgacaacagagcggaggccagaacggagacacccgggaccaccaaaaggcgacaacgcaagacacgcacacaggagcaagaacgagagagacgaacaggtcaggagaaagcgaggaaccgaaagaagaaggacgcagacaaacagacagagcaaagaggagagacgagcagaccactacggaaaaggcaggagggaaggaagagggcaagagcagaacgggacaagacgacagccggcggcacgagcacgcacgactagggagcgcagggaagggagaaacgaacgaggacggagagcagaccaacgcaaaggagggaggagagacgcaacagaggcagcgaggagagagagaacaagaagggcaagcaagcggaagggagagaggacaaaccagagagggc

SEQ ID NO: 720552 - DNA, 285 bp, Homo sapiens
tggccagacggttctgaactctttattgcccacctagcggctccaaaaatgtggggatacacgggtgtgagcacccacaccgtggcccctttggtcattaagagagacaaggcagcagagataaagatcatgtatgcgggagcaaaacttcgtcatgcaaatcccagctctgtgggaccttgagccattaacccaacctcccgtgggtctcagtgttgccatacagtacaatgggaactaggggtgctaagctcataaggatggtggtcaagatcacatgagata

SEQ ID NO: 720553 - DNA, 575 bp, Homo sapiens
  misc_feature (90)..(90): n is a, c, g, or t
acttgtgatcattccttcctcctgcaggagcttcccagcttggtcacagagtctcctgggcacaggttatccagacccgagccccattcncatctactgacacagggtctccacacgaggcgccagggaatatgggtttttaacaagcgtctcaccaaacactcctctatcatcccgccggagagctggctgggagccctctcgcttcagcacacacatcctccagcagctcagaaacgaccacgactccatcccaaccgagctgccattaacattcatctaaaactcttaggctctacatggacgacaaatcctctcgccatcttaatacccaaataaactccaaactcccgacccaacgacactgcgttataagaggcgtgcgctcccctgctggctgaccacgccagctgccctggccctgcacccctctgcatgccgcacagcagggtgtgaccatgccctcagcaccactctcgtccccactgcacggcacactgcgactgggtcacctgcgagatccctgaacgtgcccttgctgtggttttcaaaatcataacagatttgtattcaca

SEQ ID NO: 720554 - DNA, 246 bp, Homo sapiens
taaatcaagttccgggacccttcccacaggggggttaaaaaattccttgtgcccagagaaacctaccgttttattgggaggagcacactgaattgtaaaacacaggacccagacttttccggggaaggggggcaccaccagggagggccttgaaagaggtgttggttgtttaagcagccacgccttcggtttctttggagccagagcctttgtttaattgggttttttggccttggcctctttggg

SEQ ID NO: 720555 - DNA, 283 bp, Homo sapiens
aagccgacgcctttgacaagagattgagtggagtgatgggagggagagaatggagagaaatacagatggggttaggtgcagaccacaggttcaggggctctgtattacagcatggaaaaagactggcaattactaggtaggggtagcagaactggaacaaggtcttttgtattgtctagttttttaatggaatgggaaggtctagatgaagtttgaagacaggaatataaggagccctaaatgaaggaagaaatgatattactagcaaaggaggtcgcgggtt

SEQ ID NO: 720556 - DNA, 926 bp, Homo sapiens
  misc_feature (11)..(12): n is a, c, g, or t
cggcgtggcgnnttacagctcccctcctttaatgggatcctgggcgctctgtactatgacctgttcgggtgtctttccctatttgtccccctggcacccgcatttgggtgtcccttgttttccccccttctcccgttagtctgtttatgtctcgtcccgatcccccctgttgtgatttcccgtggtaccgtccccgacgctctccagaatgttgttaaattgggccccaccaggtttccgtactcgtgggtaatgcccccccctgttttttttctctgaaggccccttctcgttgcatatacatcctctgggtatcttcctcatgttaattctccggtttcacacaaggcacaaccctctgccgatagaaagtttccaaagtcccctgttgaaacacatgtggtgtcttccaaagcgtcatatgctccctcaattacacagtaattggcaggttgtaccccctctatactttgttgtataaagatgctccccctgtttaacattcttctagaaaagactcccgtacaccctcatcacaatcttctcccacaacgtgatgttaatatctctgttacaacacacaatgggtgtcttacaacattcttttctgacccccaaaatttcgcacgattattttaacacctcctactttcaatactaatatttctgggggcattatttgagtacttcccgtgtacaccaactccgttccattgctgtgttcaccactccgaccaccagccaactgtccaacattcatgcttaccacacgctctgctgttaacccacacccactcgccttaatccttaatgtccagtccaccccacaatacggaacaatcagtcgaaggaaatacgaggttcctagaactaactgtagtgttccacacaaggtaaaaaaaatgtggaaacggcccaacatgaca

SEQ ID NO: 720557 - DNA, 907 bp, Homo sapiens
  misc_feature (22)..(22): n is a, c, g, or t
  misc_feature (96)..(96): n is a, c, g, or t
  misc_feature (106)..(106): n is a, c, g, or t
  misc_feature (113)..(113): n is a, c, g, or t
  misc_feature (121)..(122): n is a, c, g, or t
  misc_feature (135)..(135): n is a, c, g, or t
  misc_feature (152)..(152): n is a, c, g, or t
  misc_feature (196)..(196): n is a, c, g, or t
  misc_feature (203)..(203): n is a, c, g, or t
  misc_feature (238)..(238): n is a, c, g, or t
  misc_feature (240)..(240): n is a, c, g, or t
  misc_feature (275)..(275): n is a, c, g, or t
  misc_feature (290)..(290): n is a, c, g, or t
  misc_feature (303)..(303): n is a, c, g, or t
  misc_feature (314)..(314): n is a, c, g, or t
  misc_feature (331)..(331): n is a, c, g, or t
  misc_feature (343)..(343): n is a, c, g, or t
  misc_feature (347)..(347): n is a, c, g, or t
  misc_feature (372)..(372): n is a, c, g, or t
  misc_feature (376)..(376): n is a, c, g, or t
  misc_feature (386)..(386): n is a, c, g, or t
  misc_feature (388)..(388): n is a, c, g, or t
  misc_feature (403)..(403): n is a, c, g, or t
  misc_feature (405)..(405): n is a, c, g, or t
  misc_feature (415)..(415): n is a, c, g, or t
  misc_feature (430)..(430): n is a, c, g, or t
  misc_feature (432)..(432): n is a, c, g, or t
  misc_feature (434)..(434): n is a, c, g, or t
  misc_feature (448)..(448): n is a, c, g, or t
  misc_feature (452)..(452): n is a, c, g, or t
  misc_feature (526)..(526): n is a, c, g, or t
  misc_feature (564)..(564): n is a, c, g, or t
  misc_feature (581)..(581): n is a, c, g, or t
  misc_feature (596)..(596): n is a, c, g, or t
  misc_feature (623)..(623): n is a, c, g, or t
  misc_feature (636)..(636): n is a, c, g, or t
  misc_feature (661)..(661): n is a, c, g, or t
  misc_feature (670)..(670): n is a, c, g, or t
  misc_feature (684)..(684): n is a, c, g, or t
  misc_feature (773)..(773): n is a, c, g, or t
  misc_feature (800)..(800): n is a, c, g, or t
  misc_feature (818)..(818): n is a, c, g, or t
  misc_feature (842)..(842): n is a, c, g, or t
  misc_feature (906)..(906): n is a, c, g, or t
atgtttcataatagccaaggcntaaaaactacaaaaatatctggctctcgagtgtgggcagctcagtgtgggacctggtctgagtcatgacttggnctgccctgcnggccagnggccgagnngattacctgccantccccaaagaggtccgnggggctgagggggtgaggaagttccttggctgcttccaaagcgngaaggcnaaggctgaggtggagctgggctggagtggttccananaaggcttcatcgatgcccttcaaggctgatggcanatccagggtaggganacgcctggatgtngctgccctggntcaactggctcctggancaaggccctaanccancagtttttttctccaaaaaccctgntggntctcccatancnaagtgggtggagaananccctcctgangctcccagtgcaganananctccacccaaccanagtnatccggaggacctgctggctgcatggctggtgtgatgctgggaggagagctggggatggaggaggatggtaggnaggaacatgcctcagcacagatgggcaggtgggttgancttccctgccctcaggnctgggcaccattggnacccaacagggccgtcttgcggaaganctgcagggttggnttgtgcagcagcgtgtaggccagancccagcttnccctgccgcggctngccccgggcctagctcccttggccatggagtcctttgtctgtagcagctgcatcccttcctcttcctcccctggtctgaggctgtcctngggggctgccatggtcctgggtaggangctctgcgcttgcaggancagggagcagaaggctgtcatggntgggatgcgactggctgacttcaatcttcaagaagtttcggtacgtgtagtagccgggggcgana

SEQ ID NO: 720558 - DNA, 779 bp, Homo sapiens
  misc_feature (170)..(170): n is a, c, g, or t
  misc_feature (172)..(172): n is a, c, g, or t
  misc_feature (179)..(179): n is a, c, g, or t
gggctcgtcgtctgggccgccgagagtcttaatcgcgggcgcttgggccgcatcttagatggcgggagtaagaggaaaacgatgtgaggcgggaacggctttctgctgccttttttgggccccgaaaagggtcagctggccgggctttggggcgcgtgccctgaggcgcngngcgcgtntgctacgatgcgggggctgctcggggctccgatcccctgggtctgggggacgcgcctgaatgtgaccgtgctcccgtttccctcaccctgccgcggggaaggaggagcgggccgaagaagctgcgcgcgaacgacaggactgttggggcggcctggctccctcgaggttaaagaatggtagaagctgcatcaatggagcacaatacagggagcttggaagacggatcagcaagtggttttggattcaaaggatgccgtgttatgatggctccagatgcaatctctcgttagcaatagttcagcagttatggtatacaagcgccgggacatcagatgatggcaaattcatcagatccttctaagacaagcaaactatcgggtattctgtgcgggaacaagcaaagaaacagtgggtcaatgtgcgaaatggaatgagctgcattgagtggcttatgaaagcaactcacggtgaggggcctgaaccaggagtgctgtagaagtgggtaagacttctcaaggaacacaagggtaaaaaagcagctttagattgacatactgatgctgggtccttgattgggaaagacttcaagtaaattctga

SEQ ID NO: 720559 - DNA, 545 bp, Homo sapiens
  misc_feature (170)..(170): n is a, c, g, or t
  misc_feature (172)..(172): n is a, c, g, or t
  misc_feature (179)..(179): n is a, c, g, or t
  misc_feature (262)..(262): n is a, c, g, or t
  misc_feature (309)..(309): n is a, c, g, or t
  misc_feature (315)..(315): n is a, c, g, or t
  misc_feature (322)..(322): n is a, c, g, or t
  misc_feature (347)..(347): n is a, c, g, or t
  misc_feature (399)..(399): n is a, c, g, or t
  misc_feature (421)..(421): n is a, c, g, or t
  misc_feature (450)..(450): n is a, c, g, or t
  misc_feature (457)..(457): n is a, c, g, or t
gggctcgtcgtctgggccgccgagagtcttaatcgcgggcgcttgggccgcatcttagatggcgggagtaagaggaaaacgatgtgaggcgggaacggctttctgctgccttttttgggccccgaaaagggtcagctggccgggctttggggcgcgtgccctgaggcgcngngcgcgtntgctacgatgccgcgcgcgcgctcgccccgcgcgcgcccccgcccccccgcgcgccgcgcgcgacgccgcccgccattgccgnccccccccccccgccccccccccaccccgcgccgccgcgcgacgcgntgcgcnccccccnaccacaccccccccccccccacccnccacccgcgcccccccccgccgcgcccccccccccccccccccccacccccnacacacacacccccctcccaanccccccgcaccccacaccccccccccccncccaccnccccccccccccctcccacaccccccccccccacccccccccctcccccccccctccccccctccacacaccccccctcccccgcccc

SEQ ID NO: 720560 - DNA, 224 bp, Homo sapiens
agagacttctctattacttacttgaacgtattgacctttatgaagaatgcttgtcaggaccattcaacctttaaaaactattctcggtaaggggtatattggcacctggggagcccccaagctgtgtgcctctggcattttctggttcttgtccatgccccggatgatcttctcctcctatgggcttctcgccaatcttgccaacagcttcatctctatctcta

SEQ ID NO: 720561 - DNA, 716 bp, Homo sapiens
tcaaagcaaaagcggccacaggtttattaagacattacgggctcttaagcacagcgggatctataaatcatttcccatatattatcacatattcaggaaagttcctgagaatgatatatcaagacgggcttctctggtgactcaacgggacttcaaatagtctctttagaagtctggagtaatgggtggcacacctatactatcagggcctggccctatttcattccccaagggcaaagtatccacttctcgggagaaaaatccagggtatgaacatgagaaatattcttatttttaatggactggggaagtttggaaaatcactggtcacaggacgggaagatgaaccaatctggacggcttctttcattttttctggaagcaatggccaagatttcggtagtaggatggagggtcagagaagtaacaccggtaaccaagttcattatagctttaatgggcttggggttggtttctgggagcacaagaatctggatggtatatatttaccactccacaattagaaccacaagcaacatacggtccattcctagatgtgggcaaggcttaatccatataaaggggcttcatcaacaaatcggttagggcacttcctgtgagttcacatcccaaagataaacttctccaatccccgcgaagagcggtatacttgcttactatctgacgagatgtgggtgctgcaaccttccataatc

SEQ ID NO: 720562 - DNA, 419 bp, Homo sapiens
  misc_feature (36)..(36): n is a, c, g, or t
ataaagcgctgtcaccttaacggtccttaattgganaaaccctgccgcagaaagaaagcatcccatggcttacctcaaaggaagatcactgtgtggctgggcgcggtggctcatgcctgttatcccagcattttgggaggccgaagcgagcggatcacctgaggtcaggagtctgagaccaggatggccaacatggtgaaaccccatctctactgaaaatgcaagaattagctgggcaagacagcgacactctttatcaaaaaaaaaaaaaaaaattcccgggttgcagggcctcatgcttgtatcctaaccttttgggaggcctgaggtgggcaaaccattagaaacacaggtgtgcagaaccaccctgaccaacttgttgaacccccgttctctataaaaaatataaaattaacccg

SEQ ID NO: 720563 - DNA, 340 bp, Homo sapiens
agatatgaactgtatctatgtttctgatgcacacacgtgtttagacaacagcacatatcattggactgttcctactgtggaagtagctactctttgggcatgctgactgcagtttttcatagccttacggatgagccctttctacgggagtgactccatgcttgtatacagagtatctatacaaatgttttagcatcttcatatgcggtgttaacccctagttctgtacagcatattctgttcaagtatttttttacaagctttggctgtaggcacatgccttctgccctggaactcgtgcaggtacgtagtagctggtactgtcacaacggctacacca

SEQ ID NO: 720564 - DNA, 490 bp, Homo sapiens
gtgaccgggaggatgataacttcctctctgggctcaggctctgaaactcaattatcaacatttactattgcatctggtagtgtctctaccagctttattaatagcagtcgcagtataccaggcatgaatcttggctgacagttggaatctgattttaatgggctgctactcccttggttccttcaattctgattttgggatatatatgaggcacaatgatgtcactgtgtatcaaccatacaatgtcagggttggggttacccgtagctctgactttcatttcaagtcgggaaccttcctttatattgacatttttcagtttttctacaaacatcggttttacctgatgtaccacagcttccacagttaaaatcactgaaatagaagatctgcctgccctgtttggggcaaccacagtccatacaccagaatcactgggtgtggcagggacaatatttagtgattgagtaccatcttctttaatgactac

SEQ ID NO: 720565 - DNA, 840 bp, Homo sapiens
  misc_feature (2)..(2): n is a, c, g, or t
  misc_feature (82)..(82): n is a, c, g, or t
  misc_feature (136)..(139): n is a, c, g, or t
  misc_feature (154)..(154): n is a, c, g, or t
  misc_feature (193)..(193): n is a, c, g, or t
  misc_feature (195)..(196): n is a, c, g, or t
  misc_feature (199)..(199): n is a, c, g, or t
  misc_feature (204)..(204): n is a, c, g, or t
  misc_feature (208)..(208): n is a, c, g, or t
  misc_feature (211)..(211): n is a, c, g, or t
  misc_feature (214)..(216): n is a, c, g, or t
  misc_feature (219)..(219): n is a, c, g, or t
  misc_feature (221)..(222): n is a, c, g, or t
  misc_feature (226)..(226): n is a, c, g, or t
  misc_feature (237)..(237): n is a, c, g, or t
  misc_feature (254)..(254): n is a, c, g, or t
  misc_feature (259)..(259): n is a, c, g, or t
  misc_feature (261)..(264): n is a, c, g, or t
  misc_feature (282)..(282): n is a, c, g, or t
  misc_feature (290)..(290): n is a, c, g, or t
  misc_feature (296)..(296): n is a, c, g, or t
  misc_feature (300)..(300): n is a, c, g, or t
  misc_feature (306)..(306): n is a, c, g, or t
  misc_feature (315)..(315): n is a, c, g, or t
  misc_feature (322)..(324): n is a, c, g, or t
  misc_feature (333)..(333): n is a, c, g, or t
  misc_feature (337)..(337): n is a, c, g, or t
  misc_feature (341)..(341): n is a, c, g, or t
  misc_feature (343)..(344): n is a, c, g, or t
  misc_feature (363)..(363): n is a, c, g, or t
  misc_feature (367)..(367): n is a, c, g, or t
  misc_feature (372)..(372): n is a, c, g, or t
  misc_feature (377)..(377): n is a, c, g, or t
  misc_feature (389)..(389): n is a, c, g, or t
  misc_feature (394)..(394): n is a, c, g, or t
  misc_feature (396)..(396): n is a, c, g, or t
  misc_feature (411)..(411): n is a, c, g, or t
  misc_feature (427)..(427): n is a, c, g, or t
  misc_feature (433)..(433): n is a, c, g, or t
  misc_feature (446)..(446): n is a, c, g, or t
  misc_feature (491)..(491): n is a, c, g, or t
  misc_feature (507)..(507): n is a, c, g, or t
  misc_feature (627)..(627): n is a, c, g, or t
  misc_feature (647)..(647): n is a, c, g, or t
  misc_feature (667)..(667): n is a, c, g, or t
  misc_feature (672)..(672): n is a, c, g, or t
  misc_feature (682)..(682): n is a, c, g, or t
  misc_feature (691)..(693): n is a, c, g, or t
  misc_feature (776)..(776): n is a, c, g, or t
  misc_feature (832)..(832): n is a, c, g, or t
tnaagcaaataaaataaaataataatactagagtaatactaaaaatataaaaatgcgactccagacattagcttaatctgtnaacatgataaaccctgtaaacatacatttactacattattgtcccagtgtcaannnntatctagtaaaggcnagtgctatacacttcatttagttcttcaaggcatatttngnnatnctgcnttgnggntcnnnaangnntgcngaaggcattcntctaactacactaaaanatganannnngatgactatcccaatggncaacaggntatgcnggcnagaganaggctttantactttnnncccattgcnaatntgantnngcttcacatgtcttatganccanctgtntagtnaaactgcatatnaacanangccaaatacttcganagtgaagaagtaaacngttttnctgtgagtcagtnggctagaaatataggtaacacactttccaaagttttttcccaaanatctaggcagtaaggngcataaggcaggtctacaaaataataaatagctgcgagtagcactaaatatattgtagtttactcaatagtaaagtatttctttttccaaatttcagttttccatctcaaaatgcatcanacttttcacacatgacacgnatcacaaatatttcacagtnatcanctcagtcgtntaagcacannnctgcctggcagatactatacaagaggtaaatgttaaggacaaaattcactatttaagtcatacaggacttatatcctattgtntgaactctaaagccaggtgtgggtggtgcctggctttaggcaggcacctaactctnaagacaga

SEQ ID NO: 720566 - DNA, 168 bp, Homo sapiens
cgcctcgacagttcacagaggtctttcagctcatttaatcccaggaaagaggcatcaagctagaatgtgatatacttttgtggaccatactagatacagagccagtggtgaggaagtgcgttctccagcactgcctctgtttttctcctctcatgtcctcaggaaatg

SEQ ID NO: 720567 - DNA, 159 bp, Homo sapiens
gctaaggcacgtattatgctgttaactgcccgctgcgagacgcgattgatgacgagtgctatgaggccattttcaagccgggcatgctgaaagaactggagacggccgagcatagcgcgtgaccatcacagtgacacgcacactcgctatatggctgac

SEQ ID NO: 720568 - DNA, 250 bp, Homo sapiens
cgcgtaagtgaacaccatcacaggccgcaggggccttgatcccatgataacacatcaacacccgtggcggggctacgtgaggactaccagcactgaatgaggagagaggcccatgcagcagattagatccgaagcttgaactaccacaaccacctcgaccgctgattgagtcgaatcccgtggccgagccttatccggtccaggcactgggcgggattcttgggcctgcggtcgagcgcatggccgaggt

SEQ ID NO: 720569 - DNA, 183 bp, Homo sapiens
ccccaaaaaaaaaaaaaaaaaaatttagtggggggggggggggcaggcctggggtccccgctccttgggggggtggggggggccaattgcttgggcctggggggtcagggttccggggggccaaagattgggccccgtgccccccaggtttgggcgccccagaggggggttccgtgtcccaca

SEQ ID NO: 720570 - DNA, 940 bp, Homo sapiens
  misc_feature (5)..(5): n is a, c, g, or t
  misc_feature (7)..(7): n is a, c, g, or t
  misc_feature (39)..(39): n is a, c, g, or t
  misc_feature (68)..(68): n is a, c, g, or t
  misc_feature (75)..(75): n is a, c, g, or t
  misc_feature (92)..(92): n is a, c, g, or t
  misc_feature (109)..(109): n is a, c, g, or t
  misc_feature (149)..(149): n is a, c, g, or t
  misc_feature (158)..(158): n is a, c, g, or t
  misc_feature (161)..(161): n is a, c, g, or t
  misc_feature (164)..(165): n is a, c, g, or t
  misc_feature (180)..(180): n is a, c, g, or t
  misc_feature (194)..(194): n is a, c, g, or t
  misc_feature (206)..(206): n is a, c, g, or t
  misc_feature (208)..(208): n is a, c, g, or t
  misc_feature (221)..(222): n is a, c, g, or t
  misc_feature (224)..(224): n is a, c, g, or t
  misc_feature (230)..(231): n is a, c, g, or t
  misc_feature (245)..(245): n is a, c, g, or t
  misc_feature (253)..(253): n is a, c, g, or t
  misc_feature (270)..(271): n is a, c, g, or t
  misc_feature (288)..(288): n is a, c, g, or t
  misc_feature (291)..(291): n is a, c, g, or t
  misc_feature (294)..(294): n is a, c, g, or t
  misc_feature (299)..(300): n is a, c, g, or t
  misc_feature (311)..(311): n is a, c, g, or t
  misc_feature (321)..(321): n is a, c, g, or t
  misc_feature (323)..(324): n is a, c, g, or t
  misc_feature (328)..(328): n is a, c, g, or t
  misc_feature (330)..(331): n is a, c, g, or t
  misc_feature (393)..(393): n is a, c, g, or t
  misc_feature (405)..(406): n is a, c, g, or t
  misc_feature (408)..(409): n is a, c, g, or t
  misc_feature (414)..(415): n is a, c, g, or t
  misc_feature (435)..(435): n is a, c, g, or t
  misc_feature (441)..(441): n is a, c, g, or t
  misc_feature (446)..(446): n is a, c, g, or t
  misc_feature (449)..(449): n is a, c, g, or t
  misc_feature (457)..(457): n is a, c, g, or t
  misc_feature (485)..(485): n is a, c, g, or t
  misc_feature (501)..(501): n is a, c, g, or t
  misc_feature (526)..(526): n is a, c, g, or t
  misc_feature (530)..(531): n is a, c, g, or t
  misc_feature (540)..(540): n is a, c, g, or t
  misc_feature (546)..(546): n is a, c, g, or t
  misc_feature (551)..(551): n is a, c, g, or t
  misc_feature (559)..(559): n is a, c, g, or t
  misc_feature (569)..(569): n is a, c, g, or t
  misc_feature (571)..(571): n is a, c, g, or t
  misc_feature (582)..(582): n is a, c, g, or t
  misc_feature (643)..(643): n is a, c, g, or t
  misc_feature (713)..(713): n is a, c, g, or t
  misc_feature (832)..(832): n is a, c, g, or t
  misc_feature (842)..(842): n is a, c, g, or t
  misc_feature (932)..(932): n is a, c, g, or t
gaatntncggattgctattggactttggagcgtatggcnccaaatcaactcattggctaaaacttganggaaaanggtggttaagtggccanaatggatttgtggccangggcatggatgctgctgctgctgctcttcctgctgctgcncttcctgcngcncannctgtggttctgcagncccaatgacacaantacttcttcaananggccttctacaanngntggatnntcttcctggctgtnctcgccanccctgtgtagtgccgtnngaggacgcaacgtcganatnatnaaaannttgcgtctaangctgctccanannaaananntgtacgggatccgagtggaggtgcgaggggctcaccacttccctccctcgcagccctatgtngttgtctccaannannaaaannctctcgatctgcttgggatnatggangtacngcnaggccgcngtgtgcccattgccaaaagcgagcaaangtgggctggctctgcngggctggcctgctggctggcaggantaannttcatcgancggaanagcangggggatnccatcagatntnatgtctgaggncgcccagaccctgctcacccaggacgtgagggtctgggtgtttcctgagggaacgagaaancacaatggctccatgctgcccttcaaacgtggcgccttccatcttgcagtgcaggcccaggttcccattntccccatagtcatgtcctcctaccaagacttctactgcaacaaggagcgtcgcttcacctcgggacaatgtcaggtgcgggtgctgcccccagtgcccacggaagggctgacaccagangacgtcccanctctggctgacagagtccggcactccatgctcactgttttccgggaaatctccactgatggccgggggtggtggtgactatctgaagaancctggggg

SEQ ID NO: 720571 - DNA, 487 bp, Homo sapiens
ccagtgagaggcaggcttcaagcttgcttagggggtgaattaggtgccttatcagacactgcatctccaaccaggggtcgatgccaaatgctctagttctttcgtggacacaagaaaagtccataaagagaaggggttctccatatacactctgtgaatcacctagtaaaactatgaaaatatcctgatcgcccagactcccactacagacactgactgtcagacagtatgggagtacatacctgggtctcccagtgttaattctacttatgcagacaaggtattgcgaaccacatgcccatagttagaacgaaatctgcagccttgacctgatagtttccgtgcccccgtacacgttctgaacaggcacgttccatcttgcagcagctcagacgcagcacataaacacagtgcagacggcctttcacctgacagtgatgaactactccacatgttcaaccatcttcaacagtcaagtagaaccacc

SEQ ID NO: 720572 - DNA, 474 bp, Homo sapiens
gcaaaattaacccctaataaaattacattaagccactcattcatcgagctccccaccccatgcaacatctccgcatgatgaaacttcggcgtcacatccttgtgcgcactgccgtggatccggtcacaagagttcaccgaacagagcactagttacctagaccaatgcacatacgtcaaccagacgcgctcaaccgcgcttttcatcacatcgcacgccaccaatcgacaatcgggaagcacccgttgcacacagtttcaattggggcattggcacattccaattctccggacggttaaccctttttctacggtccccaaaatagggcggcccattccaaaatcatttcctgtttcatacatgggcccttcattccttaggcaacgaatccgggggaccgaaagaggcccccttcaattattttcaacgggagaattccaattaattttacctttccgttaaaccatttccgaa

SEQ ID NO: 720573 - DNA, 318 bp, Homo sapiens
tacgaaatgcctcagcctcccaatgtagctgagtacaggcttgtcgcaccacgcctggtaattttgtattttagtagagacaggtttctccatgttggtcaggctggtcttgagctccagatctcaggtgatcctcttgcctctggctcccaaagtgctgggattataggcatgagccaccacgcccagccagcttgcattgtatttctttcttggacattgggagacggattgtgccctctgttgctcacggtgaatgtgcaatgggacagatcttgtgatcaccagaacctccgactcccgcgttcaagcaattct

SEQ ID NO: 720574 - DNA, 213 bp, Homo sapiens
taaagtgagtaaaagatctctgagccaggtgcggtgcaatgcgcctatagtcgcagccactggggaggctaaggcaggaggatctcttgagcccaggagttcaaggttgcagcaagctatgatcactccactgcactctagcctgggtgacagagcaagaccctgtctccgaaaataaaaaataagaataaaaagatctctgggatagcacta

SEQ ID NO: 720575 - DNA, 1599 bp, Homo sapiens
  misc_feature (156)..(156): n is a, c, g, or t
  misc_feature (208)..(208): n is a, c, g, or t
ctgtgtgctgctgagctgagctggggcgcggtcgcctgtctgcaccggcagcaccatgtcgctcatggtcatcatcatggcgtgtgttgggttcttcttgctgcagggggcctggccacaggagggagtccacagaaaaccttccttcctggcccncccaggtcacctggtgaaatcagaagagacagtcatcctgcaatgttggtcngatgtcatgtttgagcacttccttctgcacagagaggggaagtttaacgacactttgcacctcattggagagcaccatgatggggtttccaaggccaacttctccattggtcccatgatgcctgtccttgcaggaacctacagatgctacggttctgttcctcactccccctatcagttgtcagctcccagtgaccctctggacatggtgatcataggtctatatgagaaaccttctctctcagcccagccgggccccacggttcaggcaggagagaatgtgaccttgtcctgcagctcccggagctcctatgacatgtaccatctatccagggaaggggaggcccatgaacgtaggctccctgcagtgcgcaagcatcaacggaacattccaggccgactttcctctgggccctgccacccacggagggacctacagatgcttcggctctttccgtgactctccatacgagtggtcaaactcgagtgacccactgcttgtttctgtcacaggaaacccttcaaatagttggccttcacccactgaaccaagctccaaaaccggtaaccccagacacctacatgttctgattgggacctcagtggtcaaaatccctttcaccatcctcctcttctttctccttcatcgctggtgctccgacaaaaaaaatgctgctgtaatggaccaagagcctgcagggaacagaacagtgaacagcgaggattctgatgaacaagaccatcaggaggtgtcatacgcataattggatcactgtgttttcacacagagaaaaatcactcgcccttctgagaggcccaagacacccccaacagataccagcatgtacatagaacttccaaatgctgagcccagatccaaagttgtcttctgtccacgagcaccacagtcaggccttgaggggatcttctagggagacaacagccctgtctcaaaaccgggttgccagctcccatgtaccagcagctggaatctgaaggcatcagtcttcatcttagggcatcgctcttcctcacaccacgaatctgaacatgcctctctcttgcttacaaatgtctaaggtccccactgcctgctggagagaaaacacactcctttgcttagcccacaattctccatttcacttgacccctgcccacctctccaacctaactggcttacttcctagtctacctgaggctgcaatcacactgaggaactcacaattccaaacatacaagaggctccctcttaacacagcacttagacacgtgctgttccaccttcctctcagtgctatcttccagccttctgccagcagtaaaacttataaattttttaaataatttcaatgtagttttcccgccttcaaataaacatgtctgccctcatgg

SEQ ID NO: 720576 - DNA, 309 bp, Homo sapiens
aagccattctacctatgaaataatatatgaaagaggtgtaatgaatggaggtagtgaacaagacgaagtaaactgagaggtcagtgagggagacaggagccagatagtgttgggtttcatggatcattgtaaagatttcagatttattctgatttcacttggaatccattggaggatttaaaataagggagcaatattatctgttttacttttccataagtcacttcagctgccactggagagtcaactacggggaaagaaggacaaagtggaaactattgaagtatccagatgagaaaggggctttgg

SEQ ID NO: 720577 - DNA, 284 bp, Homo sapiens
aaaaggggggggggggggggggggggggggtttttttaaccaaccttttttttttcaccccccgttttcgggggggccccccccccccttttttttctcccctttaaaaacccgggggggttccccccccccggttttttttttgggcgggggggggggttttttttttccccggggaaccgttttcccccttggccctttctcaaaaattttttttttgccccttttaggggggccccccggggggggggccgggtttttcggggggcccccccggggcccca

SEQ ID NO: 720578 - DNA, 1503 bp, Homo sapiens
  misc_feature (156)..(156): n is a, c, g, or t
  misc_feature (208)..(208): n is a, c, g, or t
ctgtgtgctgctgagctgagctggggcgcggtcgcctgtctgcaccggcagcaccatgtcgctcatggtcatcatcatggcgtgtgttgggttcttcttgctgcagggggcctggccacaggagggagtccacagaaaaccttccttcctggcccncccaggtcacctggtgaaatcagaagagacagtcatcctgcaatgttggtcngatgtcatgtttgagcacttccttctgcacagagagggaacctacagatgctacggttctgttcctcactccccctatcagttgtcagctcccagtgaccctctggacatggtgatcataggtctatatgagaaaccttctctctcagcccagccgggccccacggttcaggcaggagagaatgtgaccttgtcctgcagctcccggagctcctatgacatgtaccatctatccagggaaggggaggcccatgaacgtaggctccctgcagtgcgcaagcatcaacggaacattccaggccgactttcctctgggccctgccacccacggagggacctacagatgcttcggctctttccgtgactctccatacgagtggtcaaactcgagtgacccactgcttgtttctgtcacaggaaacccttcaaatagttggccttcacccactgaaccaagctccaaaaccggtaaccccagacacctacatgttctgattgggacctcagtggtcaaaatccctttcaccatcctcctcttctttctccttcatcgctggtgctccgacaaaaaaaatgctgctgtaatggaccaagagcctgcagggaacagaacagtgaacagcgaggattctgatgaacaagaccatcaggaggtgtcatacgcataattggatcactgtgttttcacacagagaaaaatcactcgcccttctgagaggcccaagacacccccaacagataccagcatgtacatagaacttccaaatgctgagcccagatccaaagttgtcttctgtccacgagcaccacagtcaggccttgaggggatcttctagggagacaacagccctgtctcaaaaccgggttgccagctcccatgtaccagcagctggaatctgaaggcatcagtcttcatcttagggcatcgctcttcctcacaccacgaatctgaacatgcctctctcttgcttacaaatgtctaaggtccccactgcctgctggagagaaaacacactcctttgcttagcccacaattctccatttcacttgacccctgcccacctctccaacctaactggcttacttcctagtctacctgaggctgcaatcacactgaggaactcacaattccaaacatacaagaggctccctcttaacacagcacttagacacgtgctgttccaccttcctctcagtgctatcttccagccttctgccagcagtaaaacttataaattttttaaataatttcaatgtagttttcccgccttcaaataaacatgtctgccctcatgg

SEQ ID NO: 720579 - DNA, 1488 bp, Homo sapiens
  misc_feature (156)..(156): n is a, c, g, or t
  misc_feature (208)..(208): n is a, c, g, or t
ctgtgtgctgctgagctgagctggggcgcggtcgcctgtctgcaccggcagcaccatgtcgctcatggtcatcatcatggcgtgtgttgggttcttcttgctgcagggggcctggccacaggagggagtccacagaaaaccttccttcctggcccncccaggtcacctggtgaaatcagaagagacagtcatcctgcaatgttggtcngatgtcatgtttgagcacttccttctgcacagagaggggaagtttaacgacactttgcacctcattggagagcaccatgatggggtttccaaggccaacttctccattggtcccatgatgcctgtccttgcaggaacctacagatgctacggttctgttcctcactccccctatcagttgtcagctcccaggagctcctatgacatgtaccatctatccagggaaggggaggcccatgaacgtaggctccctgcagtgcgcaagcatcaacggaacattccaggccgactttcctctgggccctgccacccacggagggacctacagatgcttcggctctttccgtgactctccatacgagtggtcaaactcgagtgacccactgcttgtttctgtcacaggaaacccttcaaatagttggccttcacccactgaaccaagctccaaaaccggtaaccccagacacctacatgttctgattgggacctcagtggtcaaaatccctttcaccatcctcctcttctttctccttcatcgctggtgctccgacaaaaaaaatgctgctgtaatggaccaagagcctgcagggaacagaacagtgaacagcgaggattctgatgaacaagaccatcaggaggtgtcatacgcataattggatcactgtgttttcacacagagaaaaatcactcgcccttctgagaggcccaagacacccccaacagataccagcatgtacatagaacttccaaatgctgagcccagatccaaagttgtcttctgtccacgagcaccacagtcaggccttgaggggatcttctagggagacaacagccctgtctcaaaaccgggttgccagctcccatgtaccagcagctggaatctgaaggcatcagtcttcatcttagggcatcgctcttcctcacaccacgaatctgaacatgcctctctcttgcttacaaatgtctaaggtccccactgcctgctggagagaaaacacactcctttgcttagcccacaattctccatttcacttgacccctgcccacctctccaacctaactggcttacttcctagtctacctgaggctgcaatcacactgaggaactcacaattccaaacatacaagaggctccctcttaacacagcacttagacacgtgctgttccaccttcctctcagtgctatcttccagccttctgccagcagtaaaacttataaattttttaaataatttcaatgtagttttcccgccttcaaataaacatgtctgccctcatgg

SEQ ID NO: 720580 - DNA, 732 bp, Homo sapiens
tccgggattgctgctgtcgggggcccgcaccttccgtctggcgccgcccagtggttcctacgggagggcctgctccttcacctgccctgtgccgcctccaccttcagcctgctcttcactgcagtggtgagcgctttgccaccatggtgcggccgtgtggcctgagagctggggccaccaagaccagccgcgtatacggcttcatcggcctctgctggctgctgttccgcgcatgcatggaggatagaatgacatttgactggcgctggaactgccctgtgcagcctttgacctgaagatccagactatctgcccatctaatccaagcgcatacatcctcttactgcctggttgactcttcagacggcgtcacatggacacacatcactggaccatcctactgggcgacatccttccgactgagtagcagaggccacacgacacaagaaagagccaccaaagcaacaagcatagaacctaccagacaatagcaagacctgacaatgactgaaacaacgtgcatgcatgaaatgcagacacacgcacagaagacaaaaacaaaagagacacaaaatccatgcaagccatcccaaaacaactaaacaaacaagcccagaatggacccagacagtcaacacagcaataacagaacaaccaaagagaacacagagaacaaaaacattgcacatggacaaaatccacacaagcaatcacagagcaaaacaaaacaaa

SEQ ID NO: 720581 - DNA, 601 bp, Homo sapiens
  misc_feature (427)..(427): n is a, c, g, or t
gcttaagacagtgtaaatggttcgaatcacacacattttaagattccattgtatacataagcattttaagaatattgttttaacataattattaggcatactaagttatcatgaatgaaaatgtacatgtgacctgtagtatgttatatattattatggctaaatgttaaatgccatttttttgctttttagttttatgtatttttgcatgtatatacccacatttttacattgatttatgttctaaataataattaaaacacagtattataaaatgaatgaaatatttttgtgttccatggtcaaataattaataaattcaggaaataaaatctgatgataaatctgatataaataccagattaattatcattaatataaaataatattttcacatatgatggaatgtctccatactacaggattnctgacttgaataatatctaataggctttaattcattaccataccaaatgtccttaggaatcaatgtggcattttaaggaattcccaatttttgaaaattggtttttccatgtgtccctaatatccctttagctttaataaagcctatttttttggttttggaaatggagtggaa

SEQ ID NO: 720582 - DNA, 1832 bp, Homo sapiens
  misc_feature (175)..(175): n is a, c, g, or t
  misc_feature (203)..(203): n is a, c, g, or t
  misc_feature (265)..(265): n is a, c, g, or t
  misc_feature (1069)..(1069): n is a, c, g, or t
ggtcggcgcgagcttgtggggcgcgcggctcctaggggccggggcgctgaggccgggggaggcaggtgtccagagcccatcgaggggtggcgggtcttgacgtgctggccctggtaggggctacgctgcaattcctctcatcccataagcgctggggcccggggagacaacatantacggtgctactgttacacttgtagcgnccatcatcgaatggcatggagacgcacagtagaggccgatattcggggcgatgtactgaggntcgtagagcgggcagctccacggccgcaaaggacccacctcgaagacgaaatgtacagccatggactactcgagtacctgggtaggggacgccacgaagcggcgcatgagatcgcatgagtccgtgggtaacgtttgccaagcgaccaggttgttcgacacgtggccaggcaagggctcgacgcgtgggcgtgccctggatgaactctggaggcttagccggcgcaacttgaggcgcatcagcgtccctaacagatggcaccgctagtctgtagaacagacggggggagataggctgcagtggtttcccccgtaccttggacaccagatcttggcaccgtgcatatttctgcttgaagacggtcggaccgcaaaggaaaaccggaggttccaggctgtgggggctttccgaacttgaggggtccgctccgcgagggggcgaacttttcccaccaccaggcgccctggcatacccttgtgtttcggccgacagggcttgggcgcctggaaagtgttggattccggggcccttagatggggcttatgttccgtgtccggcaagccctggagaagaccgttgggtgggtataccccaacgacgaaggctcgccacggtggataggtctgggcggcgcgggcttggtggggccaacccacttttccgtgcccaattccgttcaccggcgcttgccagaggggccttcgaagaacgggtgctggtcaccctggggttgggttctcccccatcgccaggataaggggggccgccaatgagcagccaggttcacaccctttgggggagtgnttcggtcctgtcacggcggcgacgcgggggccaccggttccttgtacagaagcgttctggtctcccgtatagcgcattcgcgggggggctaggagagctgggtcccgcctcggtgtgagatcgctcgcggacagctggcggggccttccgttcggacagcggtctgggcgcgtttcgtgttacgcccacgctgagtgcagaggctggcattgacacacccgcaccgcgtcgcggttgcacaccgggggccgcactttccatctgggtggttttccctctggggacgccttcgctaccggggctggcccctagcgtgttttgcgctggctgtggccgccggtactcccggtgcggcaccttcgggggggaaaccagggcggaggtggactgcggcgggccccacggcacaggcgggggggtcaaaaccacggcggcgagcggcgagcaacggggcggcgacaaaccactggcgagaaccgtgctctgcgacgacgacccaactgcgagagcacgatagaaacgtcggtgtacatcaggagacccgcccaaaggaatgggcgcgtccggcagaaagacttcaccacgggcgctgcgagccacatggtcttgctccacaagggcgggcgtagccagcgagcgcgcacaaccaagcagctgactgttcgcaaccccacgggaattgtctcagactcgacacaacagacagacggaccagcacacacagaggacatcgctatgggtggagaccacagactaacaagat

SEQ ID NO: 720583 - DNA, 1440 bp, Homo sapiens
  misc_feature (156)..(156): n is a, c, g, or t
  misc_feature (208)..(208): n is a, c, g, or t
ctgtgtgctgctgagctgagctggggcgcggtcgcctgtctgcaccggcagcaccatgtcgctcatggtcatcatcatggcgtgtgttgggttcttcttgctgcagggggcctggccacaggagggagtccacagaaaaccttccttcctggcccncccaggtcacctggtgaaatcagaagagacagtcatcctgcaatgttggtcngatgtcatgtttgagcacttccttctgcacagagaggggaagtttaacgacactttgcacctcattggagagcaccatgatggggtttccaaggccaacttctccattggtcccatgatgcctgtccttgcaggaacctacagatgctacggttctgttcctcactccccctatcagttgtcagctcccagtgaccctctggacatggtgatcataggtcaacggaacattccaggccgactttcctctgggccctgccacccacggagggacctacagatgcttcggctctttccgtgactctccatacgagtggtcaaactcgagtgacccactgcttgtttctgtcacaggaaacccttcaaatagttggccttcacccactgaaccaagctccaaaaccggtaaccccagacacctacatgttctgattgggacctcagtggtcaaaatccctttcaccatcctcctcttctttctccttcatcgctggtgctccgacaaaaaaaatgctgctgtaatggaccaagagcctgcagggaacagaacagtgaacagcgaggattctgatgaacaagaccatcaggaggtgtcatacgcataattggatcactgtgttttcacacagagaaaaatcactcgcccttctgagaggcccaagacacccccaacagataccagcatgtacatagaacttccaaatgctgagcccagatccaaagttgtcttctgtccacgagcaccacagtcaggccttgaggggatcttctagggagacaacagccctgtctcaaaaccgggttgccagctcccatgtaccagcagctggaatctgaaggcatcagtcttcatcttagggcatcgctcttcctcacaccacgaatctgaacatgcctctctcttgcttacaaatgtctaaggtccccactgcctgctggagagaaaacacactcctttgcttagcccacaattctccatttcacttgacccctgcccacctctccaacctaactggcttacttcctagtctacctgaggctgcaatcacactgaggaactcacaattccaaacatacaagaggctccctcttaacacagcacttagacacgtgctgttccaccttcctctcagtgctatcttccagccttctgccagcagtaaaacttataaattttttaaataatttcaatgtagttttcccgccttcaaataaacatgtctgccctcatgg

SEQ ID NO: 720584 - DNA, 1305 bp, Homo sapiens
  misc_feature (156)..(156): n is a, c, g, or t
  misc_feature (208)..(208): n is a, c, g, or t
ctgtgtgctgctgagctgagctggggcgcggtcgcctgtctgcaccggcagcaccatgtcgctcatggtcatcatcatggcgtgtgttgggttcttcttgctgcagggggcctggccacaggagggagtccacagaaaaccttccttcctggcccncccaggtcacctggtgaaatcagaagagacagtcatcctgcaatgttggtcngatgtcatgtttgagcacttccttctgcacagagaggggaagtttaacgacactttgcacctcattggagagcaccatgatggggtttccaaggccaacttctccattggtcccatgatgcctgtccttgcaagggacctacagatgcttcggctctttccgtgactctccatacgagtggtcaaactcgagtgacccactgcttgtttctgtcacaggaaacccttcaaatagttggccttcacccactgaaccaagctccaaaaccggtaaccccagacacctacatgttctgattgggacctcagtggtcaaaatccctttcaccatcctcctcttctttctccttcatcgctggtgctccgacaaaaaaaatgctgctgtaatggaccaagagcctgcagggaacagaacagtgaacagcgaggattctgatgaacaagaccatcaggaggtgtcatacgcataattggatcactgtgttttcacacagagaaaaatcactcgcccttctgagaggcccaagacacccccaacagataccagcatgtacatagaacttccaaatgctgagcccagatccaaagttgtcttctgtccacgagcaccacagtcaggccttgaggggatcttctagggagacaacagccctgtctcaaaaccgggttgccagctcccatgtaccagcagctggaatctgaaggcatcagtcttcatcttagggcatcgctcttcctcacaccacgaatctgaacatgcctctctcttgcttacaaatgtctaaggtccccactgcctgctggagagaaaacacactcctttgcttagcccacaattctccatttcacttgacccctgcccacctctccaacctaactggcttacttcctagtctacctgaggctgcaatcacactgaggaactcacaattccaaacatacaagaggctccctcttaacacagcacttagacacgtgctgttccaccttcctctcagtgctatcttccagccttctgccagcagtaaaacttataaattttttaaataatttcaatgtagttttcccgccttcaaataaacatgtctgccctcatgg

SEQ ID NO: 720585 - DNA, 600 bp, Homo sapiens
tctacctgatctacctagatgcaaagctcctttcgcgaggtctcggctggttcctctcacgatcaaggactccgctccagagcatcatagagtacgtaataagcgtgtgaacttgtctgatcttctggaaagtttgcttaaatgcaaatgaaaatgagagagacgggaaggaaaaatcattgaaaaaattcatggacggctgcaggagcctacctgaaaagtcacagcaccaggtcataaaagtaacacaagcttgggacatcctcagggggcacctggagagatagactgctctaagctcagataaacgagcagagtagtgggagagtctcgacttcatactcctaggttgggtcccaaggggaatactgtgagacttaataggtacattcgctttccgtggaggccacgaagatacggaagctgagagagctttaccaggaagggtggggggatgcctgccgctgcaagaaaatgtctgggaacagacacagaaacttaagcgacacaaagcagcacagagcagcataaactagaagcctgcttatgtgatcagggaattgggtaaaggctgttaggaactctgctctatgccgatag

SEQ ID NO: 720586 - DNA, 662 bp, Homo sapiens
  misc_feature (150)..(150): n is a, c, g, or t
  misc_feature (380)..(381): n is a, c, g, or t
gatggcattggggtgatgttaccccaggtgcttaaaggtatgacttcagagtctgattccattgggttgacaccaggagagaaaagtgaattggccctctctgctctaggtggttgtgtcttctacctcaaaaaatggctttattttggnatcacggagcttttatcaatggctaattttgaagaatatattcccttggattctgacacagtcagcactacaagatctggtgctatcttcaccaaagcctatcaacgaatggtgctagatgcagtgaccattttaaaaaaaaaccaaaaacttggagatttttctgaatggaacaaatggttctactgaaggaaccctactagagaggcgttggatactttgccatactnnccttttttggtaaggcggctccttaaagcaaatggctttgtgccccactctgtaaccatttatggctattaatgatcgtctagatgccatagaagacctcatggttgtggccccttggaaccaaaaaaataaaaaattttcccttccccgaagttgtagagcttctaaagaagcttccagatcttgagaggctactcagtacaattcataatgttgggtctcccccctgaaagggaagtcagaaaaccaacccaagacagcagggctataactgtcctgag

SEQ ID NO: 720587 - DNA, 494 bp, Homo sapiens
cacgagggacgagcgtttcgctcggcaagggcaaatcgttcgtactcagcgattcctcgctggccggcaaggcgtgaggagtctcgcgaactcgcgttgttagttgagttgcgacgcccccggagctgatccgggggcgttgtgcggatgccgggttcacgccgccccaggaggcccccggttcggccggtacctcaggtcttggggtacttggtgaagatcgcggccaccgcgtccttgatcttcttgtcagccttgtcgccggtcacgccattcaggttctggtccacggaggcatgccagatggcctgtttggttttgccgtcgtagatatccacgccgatgattccttcctggtaggcgtacgggtaatcccagccccaggcgccgtaaccaccccagccgccgtggcgccagccatagccatagccccaaccgtaaccaccatagaagccgggataaccgtccaccacgtttcgctgaccgatgccgta

SEQ ID NO: 720588 - DNA, 113 bp, Homo sapiens
  misc_feature (70)..(70): n is a, c, g, or t
  misc_feature (102)..(103): n is a, c, g, or t
tgagccggtacccttatgtctgaccacaatggaagcagctggcttcactgctcaggtgattatcctgaancattcaaggcaaataagcgccggctatgcccnnctgtattgga

SEQ ID NO: 720589 - DNA, 190 bp, Homo sapiens
ccaacggatttgccgatcgtgttccccattgtcgtggcctcagctaattggggcacgctattctgcgagcagctagttgtgtgtaccatactctactcccaaactatctgggcggaggccccgtggtgatgtcacatatggctagaacatgtatctcatataccaccgaatgtgatcatttatgggtgcg

SEQ ID NO: 720590 - DNA, 464 bp, Homo sapiens
gaaattctgatctttgatttccagctgccagattgtgctaccagtgagtttcctcacaatttacttttttctcaagcttaattgaagttttagaaaatgaaataatgtctggatgaaactcgatgacatttggcagttttatgaagtgggacacgtggaaatgtcctgtggcaagagatccatcaagaaagaatgcattctcctttgggacagaagggaaaacaaatgcagactttaaagcacttgacgattttcaggcagactcatcactgctggagaagctgctggggagaggaaagtgtgatacttcccagtctagactagtgatgaaaactagaattcaggatttaaaactattattatcccaggaggtgcttttgggggaaaaggctacagaggcaagtccccgaaggcactgagcttcccttctgttctgtattaggttgtgatttaacagtacttgg

SEQ ID NO: 720591 - DNA, 611 bp, Homo sapiens
gtaggatcataccatggtctaaggaggtaaaaattattaaggatatcaatactaagggccagtatcactctaatataatagggatcagagcattaatttgggggaggaaaccaggggggattaccggcatttaattaaacttaaaactttgtagaaggcaaccaaaatggttcttgggagaaaatcaacttttagattaaaaaaattttaggtatctaggagtatttaaatccttttcccataaataaaggtccagttttcttgggggcagaatgaaaatcagcaacttctagcatatagactatataatcagattgccagcttatggaatatattatcagccaggatgaggaggtccaaaggttactatggctcataaggacttacaggctaaaattagttttaaaatactatattaaatcctgaaggcaattttttttggttcccttgagacctttaggttaacggttgctggcaggctaggtgtaaatgttaacagcaggagaagttaggaatggagcagttctgttgcttgatttcccaaatgaaatactgccttgcctagagtttgtaggggtttcaaggtattggagttccaggattccctccct

SEQ ID NO: 720592 - DNA, 596 bp, Homo sapiens
  misc_feature (49)..(49): n is a, c, g, or t
  misc_feature (55)..(55): n is a, c, g, or t
cccccataaggatttccaatggctggcattttttattggtcccttttcnataccngatatgtttagattccacagacaccactgtgttacaactgcctacaggtattcaggtacagttagcatgctgtataggtttgcagcctacgaacaacaggctgtaccatatagccttgcagcctacgaacaacaggctgtaccatatagcctaagtgtgtggtaggctataccatccaggtttgcgtagatgaaccctatgatgctctcacaatgatgaaatcacctaacaatgcatgtttcagaatgtatccctgttgttaaatcatgtgttaagtaacacatgatggtgataacatcaagtgctgatgagaatgtgaagaaactgatcactcaaacatagctggtgggaaagtaaatggtacagccactgtggaaaacagcgtggcagtttcttagcaaactaaacatacacttaccatatgacccagcaaccgtccacgcaaaatgcgtgcatgtaaaacggtgaaatctgcgtcagctcactgtcaatgtcctggctctttatcgtatcctagtgttgtaaaatctcgtgccgaatt

SEQ ID NO: 720593 - DNA, 1784 bp, Homo sapiens
  misc_feature (190)..(190): n is a, c, g, or t
gagtgtgtgctacccggtcgccgcatattttttgttcctcccccgacgtgacgggtgtggaacgtttgtcgttgctctctcctgcgatgtggggacacggttgttgtcatgccgtaataagctgcggtttggttctctatctgtcttagattggagaggtgtgttctgtgtgatcagtcattcactcgangcgggaggagtgatgcatctgttgcctcctgtctttagaaaggaggtgtgggtcccgtcaatctatctctgctgctggcgagaaagtatgtgtgtggtggggttgtgggctcgtccaccgttgtgggtatgtcactatctctctctccttcttcactcgtcgggtcccgaccgacgttgagtggttgtctcctacattattgttttggtttgtgtggttcaccccaacctaccgccgcccgagcgagatgcaccccgaccgcaacgaagagagtgttgtttctgtcttgtagtggtgtagaaggaaaaagaggagccgccgcgccgcagcggcggatttcttcgtcggggcacatatcagtaggcacgtttctctcgttggtttgtctttctcctcgaaagagagaggaggagtgtttgttgcgcgtttttcctcacccaaagagaagcgcgcaacagatagttttgttaggatgagtcggcttcttgtttatatattatgggtcgtgagaacaaaagtagagtggtcgcccccccaccactatgatgaaggagagttgtgttgtgttgttgtcgccccccactgtttgcgttcaccacgcagcgcccggtagtagtggttcttttgtgctcttgtggggtcgtttccgcatctacaccctgcttctctgcatgaggaggagaggggcgtcgtcgtcttctgctactgctccgcatcatgcagaggaggagcccacgccttctgcttgtatgttgtgctgtgctgtggtcctctccccggggcagtggtctcctctcctctgctgcgcagagagcagtgtgggggtcgaccccacacacagccagcgcgcttctgcgcagcagcgcgttgtgctttgtgtgatgtgtttgctgtgtgaggataacttctctctgctggggcagacaccagcagcaggggggggacgattactactacacgctcggcggagtagagtgttgtgtgtgtgagtaggggcgcacgcgtgcagggaggagtgcccccaccctgcgcgaggagagaactccactcgcgtgttgtatattatcatattatagtacgcggtgtgagacatcacgcgtcgcgtgtgtgtgcgctcacacacgcgcgtgtgtgtgggcgcacagcacacacacgcgcgcgtgtctgtgtgtggcgcatcacatcatcagagcgtgtgagagacatacacactgtagtgtgtctctcagctgtgggagacacaccacacacagtggagagagagagagtgtgcgacacctctgagagagagacacacctctctctctctgcgcacaccaccgctgagagacaccagttgtggtgacacacaccacacaagaagagaaatatctctgcgccccaccacccccccgtcttctccggcacacacaaagaggggggagacaccacacaaacccacccagcccacacgcgcccccaccccactcctccccccgcgcacaacatcacaagggtttctctcttgtgcccacccgatttttgtggaggcctgcggaagtcctttttttaaacacccctttataaaaattgtgttccacaaacacaccacaca

SEQ ID NO: 720594 - DNA, 425 bp, Homo sapiens
ctgtcctgagcaccaggaaaaccctaaggcctgtctgagtagcagcccagtttcagagagctcttccaagctctcccccacggaatcaataagagcttgttgcatgctctaggaaagtcgcatcacaccctatgactgcaaaagagaccctgtcctctcttccaccctaagaataagaacccacttctccagcctcatcttgttcctgacaagacgggcttggcccataggcaaactcagagacctggctcttcacctttcacagggccttctctggcatcttggaggacaccctccactgtactggttctggctgccttggccacagtccagtgtccactccgaggacatttctgtccaaatgtggttcacatcgcctgtttaaactctcccagacacattcagacttcacatggacagaaatg

SEQ ID NO: 720595 - DNA, 1282 bp, Homo sapiens
gcattgacatgccggacatccggctaccgtcatgtcgtgtcctgcagcagataggattcgattcactgtgcagaaaatcttctcaagtgccagtacatcgtataccggtagacatggcgcggcacggccaaaggaccacggctgagaacgaccactacgtcgtgtggctcgcgtagcagtccggcacgatagggacgcgcagcgagatagcacagtgtggaccttgggaatgactggtgtcacgtgtgttccgctcggacggtagctggagttgagtgccaggatccaaagtttggcgtacggtcgctggaggtggcgaccagatgacttcacggaggtgtccctttgcgtgggtctacccattcactcgttcctactggtcgccccctttcctgaccgcagcagcaatgtgggggctttcaaaaacacagcccaagcccggcgattgccagcggcaaggttctcctgggcgcccttgcaaactaaagtctcgcgaatcccgcggatgactagtcctcgtccccgaggaggcaaagaacagtcaaggggaacatcccgagggttgcaggataatagcgatccccctgatccagcttctcgagacccactaccacggtaacacgggtgacttccaccgccacatatgtgagcgatctggacgatcttttgggctacctggggcttttcgacatatggcggcccactccctaatgagagaaaccacgagtcgaacgggcgatagaatgtggcccccccctgtgttccccccaatagaaaaggggggctgacccaaaggctggaaccccaaaaaaggcctttatggacccccccaaaggtgctaccccgtggtcggcgttccggcaacaacggcgcacgcgggcaccggggcaatcctgcaacggaaaggcgggctgccaaaacggttccgtacctttcgcaacgcggccccgagaggagggtgcgccttacacttaccttgtgcgtgttccaagagccccgcgcgggcactcttccagaacgccgacaaacgggaacccacattctccgccgacaaagggagtttcgcaaccaaaggtacaccaaagggaccggaatcctcccctaacggtccaacgaaggaaactccctttaataggcctcattacagtggccccaaagggcggctatggcctacttaagcacgcgcccaattcccccaaaagcgggtgctgtgtgtcaccttaaagccgctggccataggacaccgtttcgcccattccaacaggccaccccatacctttca

SEQ ID NO: 720596 - DNA, 690 bp, Homo sapiens
gtttctcataatgttttacatgatgacaccaaggacacttgagcatcactgtgcactgcactctgcttatttgagactggtttttagttgcagatttatttcaagtttttggaatgggtggtttcagagtatattgtttagatttctactttgtaacaggagtaattcaataaatgatacggaataccagatacgattctaagcatattatctcatttaagccttgcaaaagtgctgtaaagtagatgatattatacctatgttacttttatccttggatgtcacacctctctcattcttttctccctttttctctctaatcgccccaggggtggagaggttcctctatattaaatcaatataaatatagttcctctataataaatcagtcacatgatttagttctactatgtctgctgagtgctgatagtcccattcttctacttagaacctgcagttcatgtccatggggatgccctcctctgccatgtctagccacaaatttctcttctttttttcctgtgttcatcagctcaggtagcttggtgttgaaattctcagactcttcctctcctcacttgactttcagtctgcataggttcaggatggcgaaccatgagaccggatgtgctaagggacagcgcagagtgcctatcagaagctgaggcctttcattccaactttcctgtg

SEQ ID NO: 720597 - DNA, 330 bp, Homo sapiens
  misc_feature (26)..(26): n is a, c, g, or t
cccggaaagcaagttgatgaccaggnaatcagtgcaaacacatttttttgttaaacccatgtggtaaacacagaattattcctgggcccccacttaagtgtcaatttataattttacccatttatccaagattttactaagggtaaaattatttaaaaatgtctattaaattgatatttatatcttgcatcctatatcatgtcaatatgtgaaatagaaaaaagatacgtgaattttttagctaagcttgacagattgaaaaacaagggtcatttttttttgtagagggtgatataacccatgtaaatgaataaagacattttaaattta

SEQ ID NO: 720598 - DNA, 191 bp, Homo sapiens
ccctttaggaacccccccccttatgcctgtggcagtggcacggtgctgtatcctgcctggggtttggcctttactttttcctccctttgggtttgcctcccctgtttttcagggggctggatgcctctcgctttgggtaaatgccttcaaaaaaaatgacttcccagtccgtcagggagacccttcctgga

SEQ ID NO: 720599 - DNA, 437 bp, Homo sapiens
gcagtcaaggcagatgccacagttggccaggggcctgccctgttggaggcttgaggaggcaggggggtttccccaggccaggactctgctggagttctggggctggggaccccagacagttgctttgaaaggtgatttggggctgccatggcagaggctgccctttctttgaatgggccggcccagcacggaaaggaggaagggagtaaggtaggaatgctggagctgccatcttggcttccagggacttggtgtccatgttgtaacacatctgtcaatgtgtgggggtggatgaggttgccacaggctgtgccctttcctgatgcagcttgtgatgcgtgagatgctggaaatgtatttaactcgcagcaaaggtgtatttaatgttttcttcaccccaccccaccccccgactcattaataaaaacagctccgca

SEQ ID NO: 720600 - DNA, 184 bp, Homo sapiens
cgctcacaacattgctagcgggagaaagggcatcattataagctatgagtggaaaggttctggtcaagatgtgtctcacatctacacggggctgggaggctttaatgggggcccggtccaggtagaaaagaatgggtatgtagagcttagatgtccctatggtgacagagccatgttgtgagcg

SEQ ID NO: 720601 - DNA, 190 bp, Homo sapiens
ctcacccactccacagcctcactctccttcttctgtcggaccatctccagctgggagattcgagctgtcagctctgccattctccaaggccagctgatcctgagtctttttctggtccccgtgtaggcctgcagcacggcctccttgacctcttcagcttcttgacgctccttggcacagcttttcagga

SEQ ID NO: 720602 - DNA, 165 bp, Homo sapiens
gcgggaggcccgggcgttccccgagcctcgggaagctggccgttccggactgaacttctcggggagaggcaacaaaagacacaattgggcttggccaaggccttacaggttttaggtttggtttcgtcacacgcgaaaacacctggggccccgggggattgcaca

SEQ ID NO: 720603 - DNA, 323 bp, Homo sapiens
gacaaaattgggactctaagtattgcgcttttttttcctctccaacgactcgttccctttcaacaaatagcacttcagtccactgtgtacagaagtaatacatctcctatcgttagttgaataaattcacacaccgcgtttaagagatgaaaccacgacttcgtcaagccacattcgattgccataagattccaaagaattctatcctcttaaagcgaaccacatgtaacccgaaggtccccacctatcaaggttagaactgatattcaaattatagactcattccactaagcaagtaagctctaagctacaggttgatcata

SEQ ID NO: 720604 - DNA, 624 bp, Homo sapiens
gctaattgtcagcttacatatcattgtatagagactgtttattctgtaccaaactgatttcaaaagtactacattgaaaataaaccggtgactgtttttcttcataaagttctgcgtttggcatcttcactctttccaaaatgtatctgtacatcagaaatgtcactattccaagtgtctttttagtgtggctttagtatggcttccttttaatattgtacatacattgtatctttgttttatggtaataagtaataaaaatgtagacttcatattttgtacaaaatgtcctatgtacagaataaaaaaggttcatagcaaccagcacactataggtaagtcggcaccacttatttttctcttagacaaatatctcgtaacctttatcgcattaagtgaaactgttaagtaccgcacatattttcttaacattcttgtaacttcaacaactttcttgttgttgacaattgttctatgaaagagaaaccttcactacaccttgcccattctaataatgcgtattactatcgtaattgttcaaaaactcttaaaagaacggtgttatcataatggactcaaaataaagagacactgtgacattttataagctacattcatgaaaca

SEQ ID NO: 720605 - DNA, 916 bp, Homo sapiens
  misc_feature (27)..(27): n is a, c, g, or t
agtgtgaaactttagatggctacaggnagtattttaatcaaattgtaggctttttgtggttgaagatcacattctacatacaacccagggcttagtaaatagagcctacattgatgaactgtgggaaatggtacttgttaataccatgtctagcactgcgtacccactcgtattacacgttatcgatgaaaccttcgcgtcatatcctgacacatccctttttcgtgattttttgttgaccttctttcacgagtagtctctcgactcgcgtcgccaggtgtcttctgcacgtcgcgttgtagctcctttatctttctcgtagggcggcggttgttttttactttgtcctccgctccttcgtacttcttcctcttattttgcttcgccctcctccctcccgtcttgtattacttgttacctctaccctcttagtgttgctgctgacgccctctaccctccgccctcatatctgacccagcgctccatcctcgtccgttcatatgtgaaattttttttttggcgtctcctgcgccccttgcgctctccgatacttgcctttcgtagactatgcaggcgagatctattccgcaccgatctatctatgcattctcggatcctattgcatacagtccctgttctgcactcccccctgttactatcgcccatccgtcagtatcccgttctctgctggttatggtctagccgacgattatatacaactgcacagtctcttctggtctctcgcctgtcgacgtgtcttctgcccccctttgcttatttgcctcggtcgcgcgccctcccctgctggccgcgcttttaatctcttgtggcccctctcgctcctcacatccacgtccgatggtcatactgtttggacgccatcatcactatcgtctcctcgatatcccgtatcatg

SEQ ID NO: 720606 - DNA, 1861 bp, Homo sapiens
  misc_feature (1314)..(1314): n is a, c, g, or t
  misc_feature (1358)..(1358): n is a, c, g, or t
  misc_feature (1615)..(1615): n is a, c, g, or t
  misc_feature (1832)..(1832): n is a, c, g, or t
tcctgttgtctggtgttgttggttcgcagtgcagcaagagacgagaacaagaaagacgggactagaaacctatgatagtgcggtctatagatttgcggccgacctatctatcgtgaggtgttttgttcgtttttgttagcaacagagtggtggtcctgatggaccactacagattgttattccactccgcaggggtgtataaacgtgggttgatgggttcccggacgcactgtattctaattacggcgcccacccgtgtgtccgatgccgcgggaatgtgtctgtacacgccatccgggccccattatttccagaggggtaattgtagagaggagtcccccccggaagagaaacaattgggtgtgtcaaccaggaaaaagagtggaaagtggtgaccgcgttaagggctcctctccgcggacgacaacctgggcaatggagaattgggccacagtaacccacgtggagcccctctctctccgtcttcttggggaagaaaaaagggccccccggggttagaatcccactacagggtgtggagaaaaattggaagggggcaacacatggtccaaggggacgcaggaagttgggtaaagttgttaaaaggttgataggaaatgtttctccttgggcagaggacgttttataaacccccctggggcgctttgtgtttggtatagtacccttggcgggggaaccactgtcgaaaagttttgtaacccccggggcgcgtcaatgagacctcaggcgtgtgttgtggtttaatgacattgtctccctcggtcccaaagaaggaagaagggtgatatgttgggggatagtcccacattgtgcctcttggaagaggatttttatgagcccgcgcatatgttgactccacacggagagattttctcgtccgtggggggggaaacccacccgcggcgatagatatataaagagggaggtttaatatccccggcgcgttgtttaattaggcataagagtttgttgtgggcacacgaggcgttatttttaaaagggatattatatgctgtttgctctaaccgcgtagaatagacgttttggggtgtggacacacaccagagatgacagtcgtctgatagacataatattttggaagagagagacccccccacggtgggatatgtcgctggtggaaatattgtgtttcgccagagaatactgcattctcccgtgagtagcgcacacaccaatagggccccccacgagtggttttatagggaagcgcgcgccacgacagtatgtgctcctggtgagagatattaatatgtgtgttagcacagatatttngggaggacccaactagtttgggcggcgttggatagagccacacnctgctctcggggatatgagagataagaagcctctggctggtttgatagtgagctcgccatattatagtctgtgtcacccgagtgtttgtcgctgaaaagtgtacctcgcgccaaagagatttgtctggccactgttggtgttgtccgtggccacgcgattattgaaaatgggctgcctcctctcgaggtgaccacatccggaaaagctcgtggtggaagaaggcacacttctgcacactgtacactgtaagtgtgtnggattctcccctgtaaacaccacatgtttggtgttctttagaatgtctattctgtcttggacccacaacgaatgtgctttgtaagaatgttttgtgtatacacccaccgatagtttgttttcttgtttgatttttaaccggagataaataattaatagggggttatagctccctttgtaaagagaagaaaaatagtactcgagcatataactcgggnccgagaagagtagctaccgcccgtctttg

SEQ ID NO: 720607 - DNA, 1056 bp, Homo sapiens
  misc_feature (13)..(13): n is a, c, g, or t
  misc_feature (64)..(64): n is a, c, g, or t
  misc_feature (77)..(79): n is a, c, g, or t
  misc_feature (93)..(93): n is a, c, g, or t
  misc_feature (96)..(96): n is a, c, g, or t
  misc_feature (110)..(110): n is a, c, g, or t
  misc_feature (126)..(126): n is a, c, g, or t
  misc_feature (131)..(131): n is a, c, g, or t
  misc_feature (292)..(292): n is a, c, g, or t
  misc_feature (425)..(425): n is a, c, g, or t
  misc_feature (430)..(430): n is a, c, g, or t
  misc_feature (434)..(434): n is a, c, g, or t
  misc_feature (552)..(552): n is a, c, g, or t
  misc_feature (654)..(654): n is a, c, g, or t
  misc_feature (661)..(661): n is a, c, g, or t
  misc_feature (757)..(757): n is a, c, g, or t
  misc_feature (763)..(763): n is a, c, g, or t
  misc_feature (770)..(770): n is a, c, g, or t
  misc_feature (775)..(775): n is a, c, g, or t
  misc_feature (821)..(821): n is a, c, g, or t
  misc_feature (843)..(843): n is a, c, g, or t
  misc_feature (848)..(848): n is a, c, g, or t
  misc_feature (850)..(850): n is a, c, g, or t
  misc_feature (855)..(857): n is a, c, g, or t
  misc_feature (864)..(864): n is a, c, g, or t
  misc_feature (868)..(868): n is a, c, g, or t
  misc_feature (871)..(871): n is a, c, g, or t
  misc_feature (882)..(882): n is a, c, g, or t
  misc_feature (889)..(889): n is a, c, g, or t
  misc_feature (895)..(896): n is a, c, g, or t
  misc_feature (905)..(905): n is a, c, g, or t
  misc_feature (911)..(912): n is a, c, g, or t
  misc_feature (915)..(916): n is a, c, g, or t
  misc_feature (934)..(934): n is a, c, g, or t
cttcgagtgggcnacctaaagcccaagtttaaagatggtggtcgaggggccaactactccactncggccatacccgnnnagatgaaatttcantgnatccgggtgaaacncacccatgtgcccaanggttngataaagggcaatgccaatgacatcggcatggattatgattatgccctcctggaactcaaaaagccccacaagagaaaatttatgaagattggggtgagccctcctgctaagcagctgccagggggcagaattcacttctctggttatgacaatgcaccgnccaggcaatttggtgtatcgcttctgtgacgtgcaaagacgagacctatgacttgctctcaccagcaatgcgatgcccagccaggggcccgcgggtctggggtctatgtgggggtgtgggggggacggcggcnggggngggngcgaaaaattattggcattttttcagggcaccagtgggtggacatgaatggcttccgcgcacaggatttcaacgtgctgtcagaatcactcctctcaaatatgcccagatttgctatnggattaaaggaaactacctggattgtagggaggggtgacacagtgttccctcctggcagcaattaagggtcttcatgttcttattttaggagaggccaaatngtttttngtcattggcgtgcacacgtgtgtgtgtgtgtgtgtgtgtgtgtaaggtgtcttataatctttacctatttcttacagttgcaagatgactggcttnactatntgaaaantggtntgtgtatcatatcatatatcatttaagcagtttgaaggcatacttntgcatagaaataaaaaaaatantgatntnggggnnntgaggantatntgncaattaagttnatcttcncgtttnngcaaacttngatttnnatnncatctgaacttgtttcanagactttatattaacatattgggcatacaagagatatgaatgcttatatgtgtgcatgtgtgtaacttcatgagatacctctagggaggagggataaacgggtacaaaaattcagtgcctga

SEQ ID NO: 720608 - DNA, 1205 bp, Homo sapiens
  misc_feature (209)..(211): n is a, c, g, or t
  misc_feature (517)..(517): n is a, c, g, or t
  misc_feature (912)..(912): n is a, c, g, or t
cagtgttgtgtgttgtggtcttttgtcgttttggtgtcttgtagcctcttttcctgtgttgtttgctttgttgtgtttgtcgtttttcgtatgtggtgttggttttgtgtggcgatgaaggtagtagtgttggtcgtgtcgtcgttgtattctgatacgagacggtgacgagaataagagagcaggggacgctcgatccaggttgggcnnntgagttgctcctcccgccatatgatccccgcgtcgggtctcctctcttctctctatttgggggacaacttgggttgtcgtctcctccttcttggcgcgcgtcttgtggcgccgccgctggtttcagagtggcgccgacaagtttgtaaaaaaaaaaaaagggggtcccacacaatgtctatttttgttgaaagcgccagagggttgtcgcgcagcactcagaggggtgtggaggtgacaacagacacgcagctcgggtggggttgatttatgaaaaaagaataaatagcctcctgggtggttgttnaaaaaggcgcacacatgggttgcaaaaacaagcggtgtgtggtggtcgccgcccgctcgttgttagagaaaaggtgtagcaagacccaacaaggtggtggcgcggaagatttgtgccgccgcgtatgtgtccgcgacaccgcgggaattggttgagatggtgttgtcacgagcgcccacatatattatggcggcccgcgcaatatatttgtgtagatagctcgatgtcttgaaaaggagcgtatctttgggggcgaaaataaaatcttctgtgttaggcagcttataacgcgctttagtatgggaataggtctctccacagagaatatagggggtggaacaaacaatcaccctgtctccatagaattgtcgccctggtgctcgctctatttaganaggagcgccccaaataaagcgacgctgtgtggtatgatctatagatagataaagagtatccgacgagatggggttatagagagacctctctcgatagagagagagagtgtatatcgctctgtggccactatttatattcgcgccaccctcacagttatatttgggattgtaaatatacacccccaccccctctgcctttttatatataaaaatatttccctctctgtggaaaattacacaacggttaaataaaaattttatataaaattgttttcccccgcgccaaaaaaaaa

SEQ ID NO: 720609 - DNA, 915 bp, Homo sapiens
  misc_feature (24)..(24): n is a, c, g, or t
  misc_feature (66)..(71): n is a, c, g, or t
  misc_feature (80)..(80): n is a, c, g, or t
  misc_feature (85)..(85): n is a, c, g, or t
  misc_feature (88)..(88): n is a, c, g, or t
  misc_feature (94)..(94): n is a, c, g, or t
  misc_feature (100)..(101): n is a, c, g, or t
  misc_feature (103)..(103): n is a, c, g, or t
  misc_feature (106)..(106): n is a, c, g, or t
  misc_feature (108)..(108): n is a, c, g, or t
  misc_feature (112)..(112): n is a, c, g, or t
  misc_feature (114)..(114): n is a, c, g, or t
  misc_feature (124)..(124): n is a, c, g, or t
  misc_feature (126)..(127): n is a, c, g, or t
  misc_feature (138)..(139): n is a, c, g, or t
  misc_feature (145)..(145): n is a, c, g, or t
  misc_feature (159)..(159): n is a, c, g, or t
  misc_feature (165)..(166): n is a, c, g, or t
  misc_feature (175)..(175): n is a, c, g, or t
  misc_feature (180)..(180): n is a, c, g, or t
  misc_feature (195)..(196): n is a, c, g, or t
  misc_feature (198)..(199): n is a, c, g, or t
  misc_feature (209)..(209): n is a, c, g, or t
  misc_feature (217)..(217): n is a, c, g, or t
  misc_feature (220)..(221): n is a, c, g, or t
  misc_feature (240)..(240): n is a, c, g, or t
  misc_feature (245)..(245): n is a, c, g, or t
  misc_feature (260)..(260): n is a, c, g, or t
  misc_feature (296)..(296): n is a, c, g, or t
  misc_feature (359)..(359): n is a, c, g, or t
  misc_feature (371)..(371): n is a, c, g, or t
  misc_feature (406)..(406): n is a, c, g, or t
  misc_feature (896)..(896): n is a, c, g, or t
acaaaagagtagcattccattttnatgaagtgcacatgaaattatgaacaatacaaatgcattaannnnnncattaatantctantcnttaatnatctcnnangtnantgcngngggtgggatngnngtgggtggggnntctgtncacaatgttcagtnttttgnntatgttganttttnttagttgtgcatttnngnntgcgtagttnttgttaanttnntggtgcataggttgttgtnaagcnattactctcattgtnttgtcatacatgctaacattttggtaaatataaatntacaagtttcacagctgcatatatttctgaagtggttagaacagaggaggatgctggttagtngagtgctttaanatcttcgttcaaaacaagagattttcatctatgtnctcttctttaattccaaagcagtggccccactccttcagggtgatgtgcttatccttgttggggtcacactcctcaaagaaacgggttatgcagtgttccatgggcaccagagatgctcgcagaggagcaagttcagaatgtgtcaagactctatccatagggtgttggtcaagttcactaaactgccagtgcacaggatacacatacatgtggtagtttttcttaaagtcccttaagagaagatcaatgggatggtccccagccaaaagcctcttttcatccaggtaaattttcttgactttatttctctgcttctcatttagataaccagcgtgttcagagttggcttcataaagctgcatgaggatattcttgagccagtctctcatccgtagaggaaactgaatcacttcaaagtccgtacaagtaggaatagatttgcaggctccaaaataatccagctggagttgatgccctttttggtccctncagtctgcatttagtagcg

SEQ ID NO: 720610 - DNA, 902 bp, Homo sapiens
gcggtcgtcgtgtgtgtcgttgttgcggtgaggcgcggtgtcggcgggtggtctccagtgggggtgcatctggtgctggcgtcagttttcggcggggttacccggtgtcggtggtaacgcccgtgtgcgcgctttcggtgtggttgtaaccgccgccggcggtggattggtgtgataagcgcggcctccgcaaatggcggcgcgtatgtggtgtcgccccgtgcggtggtgttgcgcgtcgccgtcggtgggtgcgccgtggtggcggggagagtggcgggcccccccaggtctccttgtgtgggccaacccttgattatcggggggtgtatcgcgctggggcggttgccgcggggagatattggccgccggggtgttcggccgccctattgtgtcgcggcgagcgcctctgtgttacctcgcctgaggtggactgcacatgggcgctcgttggatagtttagcgcacgtcccggggccgatgtatgtgttgcagcccaggcctctttgttacgtgggtggccgacccctcgccactagatcgcgcactccgccctgggtgtccaccactcgcacgcctctggcggccgcctgagttgtgtcttcgacgcgccgccctggtatgcacgaggccgcggttatggaccaacgcacttgcgtcacccgggggtcggcgcagcgcaatgtcgctaaactggccgtccgcatagtgggtcgcgcatcggaagtgcagataggccgcgccccacgtttcgagatgtgaaccacgcccgctcggcctatgttgtacgtgtgccaccacgtagtagaaagaacggcctccctgatgtacctcttgctcgcctctttttcgaccgtaaccgcgccccttgtttcccccccctcgcccctggcccccaaaca

SEQ ID NO: 720611 - DNA, 199 bp, Homo sapiens
  misc_feature (84)..(84): n is a, c, g, or t
  misc_feature (109)..(109): n is a, c, g, or t
  misc_feature (127)..(128): n is a, c, g, or t
atttccctacagaacaagataatccccaacacatacaaacacacacgggttaagtcaaatgggatttattggcccaggccatgnatgctcacgccttctaattcccagncactttgggaggccaagnncggtggattcactcgagcccaggagtttaagaccagcctgggcaacatggtgagacctcatctctactggg

SEQ ID NO: 720612 - DNA, 308 bp, Homo sapiens
ggctcggtcccccatcagctatcagagggagacaggaaaatgtcagcctgcacacccaaaacccagtgatctggagggtgagcagggtgcagtgagagtgcccatgtgaggcctctgcacctggagctgtatgggtctcacgatgctccgtctgcagtgggagttgcacccgtttgagagatgaggaaacagacccagagaggtgggcacatttactctagtagtgctgggactgaagccacagcctgtccaaatgcaaagcctgcgtgcccactcatcacagcaccacttgtattcatcctcccacc

SEQ ID NO: 720613 - DNA, 1118 bp, Homo sapiens
tgtgaaactaggaggctatggacttatactcctacacagtcatggctccttacgcacgtcctcacaatcatcacctctcgctaatgctcgtatctcttgatatcactgcgctaaccttacggactagacttgcattactatgccatccatcgtgccgtacgacatcgcagcctcgctgaattcgttgtcgtttggattactccgtcagatacaggacaccatatcttctggtgtgtgaccagatcggtatctcgagtcgcgactaacgctcatgaaagatcttaattctgggattgcgatatcgtttacgtcgataagatcggcccgaggggactaaaactatctctgcaagtacagtaatgtgcctggccgtagggcggtagctgcgaagagcgtttcagccatctgcgcaatgcatttccgtgatctattcggtaacttacctacgttcctatatcaggaggatgtaatcctctactctctggtaattagcgctgtcagatagacctatgatagcaattgcgttcgattaaatcgcgtggttatcgcagcgcaataattttttgccgtacttgaggaagatggctcactggtgcgtatcatagatccaagcgttcctgctgaggtcgaactatcatgacttcttacttagagtgactcatggatttgtagtctgaatgctcgtctactccctctagatctatagcattaatagagaggggggtcatttcacctatacccattaggtagttataacggtcattacacgagaacaagacctcgtggtcatgggcgtattgccccatgttgtcctataccattcaaagggcggaagtcattacgtggttggcgttctctcagcctagaaatgaccctcccccgcctagagaaagggtcaagcggcagggcgtggaatccccagcctttcggggacgcaggcaaacccgggtgcgccccttggcctaatgtgcgcacggttttacgttgtattccgatgaaggcgcccggaaaagcgctttcggaaagcccgcctgtgtgttggggaacccccgtgttgaaaaacccgtccgccccaatttcccaagggcgtgcccttctctgtagacccggtggcatag

SEQ ID NO: 720614 - DNA, 936 bp, Homo sapiens
gggagagaactagtctcggtttttttttttatattttttggccactgggcattaattcacacggagcaggtggtcctcattgccccgttggccaaggcacacagggaacggggctctgcctgaaagtagggtctccgtctccgcgcgtatccaggtttgcaggctgtcttccgcgaggttcctgcgagggcgcgctgatttgaactcgaaagtgcttggaagctccacgctgtgggcggttcttgtcccgtgggacggcatctcccggagggcctcgggcgcgggcccggtcgcccagaagggcacagattcagtgagcagctgacagccgagcgagtcggagaggcgtggggctggacctatcgggggcactcgggcacgcgccgcgggatgggggggtgcgtcccttgtcacacctcacgaatggggcatctgtggggcctgcccctcgcggtttccccagatctccgagttctccggagaggatcttcctgagggccctagaggaaggccttttaaatgttccgtggcccccgttaattctgttaagaaaaaaaaagggacccaatttttgcgggaactgcccgcggtagaaccgaaccgcgtaccacattttaacgccgggaaggggttctaggaggggaacaccccccgtggtggaacacgtcggttggaagttgagaaactttgtctgtcccagaagtctcccccgagagggttctctccctccgagagtcctgtggggagaagggtctcctcacaacaggagaagaccttctgttgtcaagagacagaacgcaacaacaagagagacaaagacaaagaacaacttttttgtttaaaaaactccctgtgtctttttctcgacacagaagtttgcgaacataaagatctttaaaagaggggaacacaagaacttgccccattatatagaaa

SEQ ID NO: 720615 - DNA, 102 bp, Homo sapiens
atcagtcgaccgggagcatgctttagctgggaggtaaaggctgcagctgaactgtgatggcaccactgcaccctagcctgggtgacagtgagaccctatgtc

SEQ ID NO: 720616 - DNA, 606 bp, Homo sapiens
aggggctgcctggaaaagcttgtactactacacttcctctacttctcatacctgccaggattaatatgttgccctgaggtaggctatcctcagacagtataacccttcaaggggctctggcttcccacatttctttctttatccctttaaatgaaatctcttgattcccttggtatggctgatgcctttattccttaggagttaaggggaagaagtctgtttcatacagtttgtagagggcacagcagcaatcccttaacctccttcttaggtgatactttatagccctaaagtactcactgggtgatgaaattctaagtggtggtacaaacgtgacatgaaagccaccactgtaccaaaagtaaagtaatgggtgctaggacactacagaggagccacagcaatctcccctatatctggcccaagctgcacaggatgacagcaatctctcagatgagatttcaactccggcttgctttactcagcccgtcaatcacaacatgataccttactgaagagaagtatcataagagctggatggcacatgcaatcttgtcaatgcagcggaccacgcgtactgactgtagctctgacaaccgcatgtgg

SEQ ID NO: 720617 - DNA, 130 bp, Homo sapiens
caaaataaagcttcaggcaagaggcaaagatccagtgggaatatgggagaagggtggaggaccaacacctgctaccccagagatgcttttctaaaaaaagcaagaaatgcagtcatggaggggtattcac

SEQ ID NO: 720618 - DNA, 1375 bp, Homo sapiens
  misc_feature (1375)..(1375): n is a, c, g, or t
taccataattacttgggcattatattcacaatccgggggcacacgacggaatatataacagggcttgaaaacaccacttggataattcccttggtgagattcactaaagatggcgtcaccatgggtattcctggtgaacataaatattctcactaaggaaaaccccacagttataaaacaaagtcacacaagaaataaacgctaagctggtatccaccaatggaatatggacatggatattccaacatatcatgttataaaatgtcaagggacacaggttatattctgtcccatggtgtcaacactatttcccactcttatatggcgaatatccccaattgtgggcttactattttaatatctacaacacagctggaggtgtttataaagaggtcatttcaaaatgtggccagtgggtgcacaaatatcactatactcttctcacatctccagggacggtgttttccctggaagctgtttggggccctttggggacacggcggtctaaccccccatattggggcttaggggtttctggccttgggcgcgagatggtacacacagggttaaaaaggccctaaatacacggggggggcgggaggcggcactactacccgggggggaggacgcttaccacaccctggcatgtgtaccgggagtcccccacaaagggtggcacggggaagggacgcaaacgggggccacagccggccggggcccgctgggcgccccagttgggcaggagaaaagacgtcctaacccggggtgctctgggaaaggcttcttggaagttcccccgaccaaagatggtattatttttacaaaaaccggttttgggtatacgattttgcaaagctcgcaagtcgagaggggccctctccacagatagatttgcaaaacgaccaagagtgcacggaacttgcggatcggtacgcccaaaattaattcccaacggggaggaaccccacaatctataaaaccaccacaattgggcctgggactcgaaacacccgaggaggcggcgagagaggaaacaggggcgcgccgaaagacaactcgcggacaacggcaaaaccgggacacacaaacacaaccacgagtaggctcgcccaaggagcaccggtaaacctcggggtcctccccggagccacacacgtccgggaaaaagggtcgaaaacactaatgctgtgggacacaataaaaggccgcagacaccccgggcacctaattggaatgtcgagaacaaatcatccaacaacgcccgaagagacgagtgtacacacgacaagatgccagcattggagctgctaaacaaacaacgaagtcgaacaggcatctcctctcccccacgctcgcttgtctctctcacgagagn

SEQ ID NO: 720619 - DNA, 384 bp, Homo sapiens
cagaacctggactcaagcgatcctccagacctcagacctcccgagtagcataccaccacgcctgcctaatttgtgtatttttagtagagacgaggttcgccatgttggccaggctggtcttgaactctgggcctcaagtgatctgcccgtctcggccgcccaaagtgctgtattacaggcatgagccactacagctggtcccagcttctatgtcttttcttcattgattcaacaaatatttatgtagctagtaaatgccatatactattctaagagctggtgaaacagcagcaacccaaatattgccttatacggcttacattctaatgggagacatagcaaataattcaatgtataatggtctaggtagcaggaagtatcagt

SEQ ID NO: 720620 - DNA, 482 bp, Homo sapiens
  misc_feature (22)..(22): n is a, c, g, or t
  misc_feature (412)..(412): n is a, c, g, or t
  misc_feature (460)..(460): n is a, c, g, or t
ctcagacagcggaccccaaagntactattataccacgcctctttggcaaggatactctgtccgggatctacttattattacttaactcatctctgatccagagttttctcttgaattctttattattcaggtaccaggaagtattctccctgcatattctaacttttcaatttgagagtgaccttcctaagaccacagcctgtctcctaatcatccttccatgttacagagtcaggggcaagattattcagacaataaatgtttaataacttttactggctcacattcctggaggatagcacatactttaattccaggctccgaaaatttgtggtacatggataatacaagtgttaacaactgtgtgtgtatgtgtgtgtgtacaggtaactttactaggggagtgagaggnaagaggagataaaaatgcctggtactttttttttttcttcagtttttngagacagggtctcacttagggg

SEQ ID NO: 720621 - DNA, 302 bp, Homo sapiens
  misc_feature (205)..(205): n is a, c, g, or t
  misc_feature (223)..(223): n is a, c, g, or t
  misc_feature (247)..(247): n is a, c, g, or t
  misc_feature (280)..(280): n is a, c, g, or t
agggaaaggatggttgtccctggggagggccctttggccccaggcaaccttagcccctcaaaacagggagtcccaggacccagggaaagtgtggggacaggacagcctgttttttgtagcttcctggggtgggaggcccaggggcaaaacaataccccagggaaagtgggaggtggtgttggtgctctttccaggccccccatgntgggaaaggcggccaaancctggggcctccagcctgggactnctgtgatggggtatcccggtgatggtccccttnaacttcccctttgccaacctta

SEQ ID NO: 720622 - DNA, 1209 bp, Homo sapiens
  misc_feature (91)..(91): n is a, c, g, or t
gggctttctcgccagacatgtttttccggtgtgttctggttatattgtggtgcactacctttgtagagaaagtgggtcggacaattccacnacgaggtagggcttccctcgctagctacaatgagggggttctgggcgggggaaatttttttttcttgggagggggggacatcaggtttgtgcacttggtgcggcccgtcgttcgtcccaccatcgggggttatcctcccctgccaaaaacagctttgggggtcaaaggtcttgttcttttggggaacgctcctttggttaggttggcgccaagaacagagcaaaagtgcttggggggccttggaggaagcaaagtaaaatttgttggcccacgcagagattgtttctctctgtggccgtttgccagttgtcagaagaaaaatttcatcgagatcccctggggcaatctttcgacagtggggaaccacaatttcttgggggagaaaaagggggagacttctcctcttgtgaaaagcgcccccctgtaaagggtgttttaagaccacatgtaggcttgaaaacactgtcccccccctctctcccacggaatgaaagtgtggatttgaagaaccacacagtggcttcgagaagagttgaaaaggttgtttttctccacagagggaaaagtctttctggaatgggcacaacggggctcacaccctcggcttgagctgcacaacgctgtttggccaacaagttaacaacacataggtaccacggtggttgtgtaaagaagtatcccgggggaattcaccacaatccccgagggccttccggggagagtgcaatcggtaacttgagagcacaatgcctatacgcccgggagagaaattctggttccacaccggtccacagagatgaatgagaggaggattcgagagctcgccctatgagccaagtggcacaaggccctcaaataagcccctccctgggaatccctcaaccccctccattttgtctccacacacaagggccctggtggtttccacattgctatcccacatggacacacctccacaaatggccacgtgggcacgggaatcctggaggcaccttgttccgggatggtgtggtggaaagaaggggaatgagggaaagaaatggggggcctgggtcagagtttttatttttggggtgggatgagtaggacaacatatttcagtaataaaatacagaata

SEQ ID NO: 720623 - DNA, 729 bp, Homo sapiens
aaggaagacttccagaaggccaggttagttgtttagccaaaaaagtaccccaggtgcacctcctgctcctgtagaggtttctaaaagtctttgcaaaagtggcagcagtggttgtagccttcttaagcaaccatattccgtgcttcaggaaacaccagatgagtggtcatgggccacttatgtgtgttgaatatgacacgccagtaagtccggagtcaactagtgatgcacagaatctctggtgaacaggtgctcagcatctcagcctgtgtcatgtcgatgtggtcatgcggtcagagatagttctaatgctgcatcattcaccttcaagcgtgatatatgccagagttttatcagcgatcggccaatctagagggtgtctgcactggtgcagctgttggaacgcaagttgaagccaccactggagcatctgaaagctgttatgtatgatttgggagcttttgaatactagcgctgcatggctaccgataagcacacctcctccttgctggaaggtaaagaccttgttggctgaagcatatgcctttgtggctgatgaccttgtgtttgtaagcatctcagctgctcatgataataatacagcgacagttaaggttaaagcctagtaaaagtggttgtagtttgggctggtgtatagacctcggtctctctaaataacctccatttcgttaataatttagcctcttttatgtgtgattcaagtaatta

SEQ ID NO: 720624 - DNA, 440 bp, Homo sapiens
  misc_feature (248)..(248): n is a, c, g, or t
gctatatatgaaatttgtcttaaggtaaagaagtccaacaaaaaaggaaaggttgaatcacttatacactgctcccaatgtgagaatagtggcatccttcttgcctggatatgacaatggagcttgtttctatgattaagacctacccatggcagtgtatggcatgtaaaacatgcattatatgtgacaacccccatgaagaagaaatatgttttatatgtgccaacgcacaactttgcgccccgtgntattccatcaggtcgctggatttgtgactgttgtcagcgggcccccccaacacccaggaaagtgggcagaagggggaaaaacagcaaagagggataaaatagtttttgactctaatactgtatatgcatttaagtggaatatttggtgccatttacaacattattttcatgccaataaaagattttttttgc

SEQ ID NO: 720625 - DNA, 808 bp, Homo sapiens
atcaaggaatgtcaataacattgtaagaggaccaataaacagcctcctataaagtaaacctcttccctgtgagaatgcacactctactacataaagggaaggcccctgggctctgatttgtcgcgtttgtcattgagaacgtgtgtggaggatcagtgtgtgtgtatgtgattagtgattgagttggctatggttgttttagtttttcttttaaaaataaagatcacttccttcccatgttactaaattaatttatgtttgtgagaggttgagtctcatagtgtaaacaagtaaaccgtccattcataaggtggatgttgtaagcttgatggtggttgtgaaagtgatttagcttgtgaccacttttcatcctacagcttcaatatcaaactggttaggaaagcccaggggaacgggagggggcaggggaggaggcaacttctgaatgaatgaactggatttctgtttgctctgcaatgttaactatagaagttcccctcgtgtccttgggagatgatggcctttgaatatgctgacaagctttgaattgtgcctactaaattatagcagggtgactttggcacccaaagggagttctgactttctggggattataatagtaatttcccatgccataactctggactttattttgctaaaacaataactgagcagagtgtaaattattgtatattaaattgtttaaaaggcactgggatagtctaaattctaacgttgtaattaattatgttggccaagtaatctgtgtgaaataaatttgggctgaaaggtattgaaagtgttaagt

SEQ ID NO: 720626 - DNA, 1258 bp, Homo sapiens
  misc_feature (341)..(341): n is a, c, g, or t
gttgcccaggctggttgggtctcaaactcctggtctcaagccatccacccaccttggtctcccaaagtgctgggattacagatgtgaaccaacatgtccagcctttttttttttttggagacaaattcgggctcgtgtcacccagaacgggagtgcagggggtgccatctgggctcactggcaaccttccaccttccggaggcctcaagcaattctcttcaccccgagccttccgtggagatagctgaggaccacgagggtgcctcaccaccaaggccgtggtaaacttgtgggtgttttgtggatagaagagtggggtttgtgtgccgaggtgttctccntagtgcgtggctcgtggagaacctcagtgaaactctcaacgagattgggtccccacctctcaagccctcttcaaagaggtgcgtggggaatttcacggggttagtggagccccaccacaacttccgagccgtgcccccaagtttcatagacacacgtgcgcataataagagctcgagttgtggagacactcttctaaaagacaacaaaaaaaaaaaaacaacaaaaaaaagagagggggggggcgggcccatcccaagagaagatactccccagtcagagggggggcgcccacaaagcgctatacaccgcggaatacccacagggtcttccactgtgggggccacacaagcggtgggccccccatataagggagaggagcgcgcgaggtaaatattatataagaggcatagggagacaatagggggcccacgcaacgattactaaccacacagccgtgccacgcgcgacgacagtcgggggcgcgacacaaacccacggtgggccacaacccggcgggaggcgagcacaccctagatgaggcgcgcaggaaaggagcaacaccccatactaacacacccacgcggggggggggcgggcgggaggccgacacccaacaaccgagcggggcgccccaaaacagcctactcccccgaacaacgcacaaacgcacatctatcacaagcgggcccaccaacgacggggggaccaacaacactatcaacaacactgatctataacgacacggggacaacacaacacgggggcgtgacacacacacaaacaacagcgatggacaataatacgcacggcgctcgtgctactctgaggaagagaagagctatactgggcgacaagacggagagcgaacacaagacagtcacgtcgacaagcccgaatattaaacaacaccgcggcg

SEQ ID NO: 720627 - DNA, 647 bp, Homo sapiens
gactgagagacatgacacctcgagaagcgttacagaggtgtctccaattgatgacaacgctgagaacttctaccatatgcactaccgcgcgtctgggtatgacgcagtagacatcacttgcgagttgtcgccgtactgatgtgacacagatgaattgcggcactatcgcgtagtcgactccgaagcgctactagggctacgaggaaaagatacgcctgacttggacccgctacgtgtggcttggacatcaatggcgaagacgggttagactcggtcgagtcccggaaagctcccagcctgagtaggagcaatccgggacaaagagagaggttagaacgccatcagatggaacagggccaggggattgatatttctgaagcagggtaggatcccgttcgatccaggcatgggaattactagaaggtaacaggaggggccattacgcctgtccaatcgaatggacccaacagggcacgcacgacgtgggccggcagaaacgaccaaggattcaacacattcggagtgaacgaggaggatcggcggataggtgtcaatgccacgcactgctcgcatactgtagcaagatagcacctagtggtgccaggggtcacgaacagaacgggggagagaaggggatagtcaccatg

SEQ ID NO: 720628 - DNA, 343 bp, Homo sapiens
cgttggcgcgctgaaaccaaagtgcgcggtgggttcacataggcgttgcccaacgaccgttcagtcgggataatccctcgcatcgggtaaatcgtatcgccacgtatccgtggccctgcgtaaccctccctaattccgacctctgcagacctcttcctcatgcacaaagaaccccgtaaggtccgtgagtttcgccgccgtgagcaggaaattctcgacaccgcgctcaagttgttcctcgaacaaggtgaagacagcgtcaccgtcgagatgattgcggatgccgtgggtatcggcaaaggtcgacgcggccgcgaatttagtagtagtagtaggcggccgc

SEQ ID NO: 720629 - DNA, 102 bp, Homo sapiens
ggcctgtcagctagacacgatctgaatgaaaaactctacaaagcataattcataagcgtgtgacttggttgcattctgtgtggaatggaaggatcaagatgt

SEQ ID NO: 720630 - DNA, 107 bp, Homo sapiens
tcatcgtgcgggcttttctttgcctgtatttggcctgcaggttgtcactagattcgctgcggcggtgagccggtgcaagcgccctgctccatgcagaatacaaaggg

SEQ ID NO: 720631 - DNA, 395 bp, Homo sapiens
gctgcctttgcttttatcgctttgcaaaacaaaggggacatgttgggaacaggccccccaatgtggccataaactggctccaaaactggccataaacaaaatctctgcagcactgtgacatgctcgtgatggccatgacgcccatgctggaagattgtcggtttaccagaatgagggcaagggacacctggcccacccagggtggaaaaccgtttaaggcgttcttaaaccacaaacaatagcatgagtgatctgtgccttaaggacatgctcctgctgcagataactagccagagcccgtccctttgtttcccataaggaatacttttagtaaatcttaccactggcttgctgtcaataaatatgtgggtaaatctctgttcaaggctctcagc

SEQ ID NO: 720632 - DNA, 682 bp, Homo sapiens
  misc_feature (494)..(494): n is a, c, g, or t
ggtgttacccaggccggagtgcagtgactacttacaggcacagatcatacgtgcgactagagccttgaagctcccggtgtccagtattactcctgcctcaagcctcctgaggtatctgggactataggagtgcaccaccattcctggcataatcctctttgatgtagagttgaagaaaggtcaccagacgtgagacgctttatgttgcagttaatggtctcttcctcccttttctctgttacctgcaaatggacaattattccttctcgacaaggttttaggcttcccactttcagcatgcctccagacagtgtcctagaattactctagcaattgcgcaaagtaagagcagacagatgctcctaaatctatttccaggacacccgtctcatgatcaaggacgagtggggtccaaactccttgtgctgccagatgagcacctactggagtaaagatgctgcgcaaaaggccataatgatgtcaacgcagtgtcnactgatacagagtcagagaaccggagtgtcccattgcgcgcagggatatgttggcggttctgtagtgggccgcgagtactctgaacttctccagcaggtcgctagtggcgtggtcaagacgaagttacgtctcgtatgtctgctcttttgccttgtacccgcatggttccacgagacaatatgtgggt

SEQ ID NO: 720633 - DNA, 116 bp, Homo sapiens
ggtcgtacctgaggttgtagtagtcgggcatgtagggggcaggtctgtaggggcatcagatccagctcgaaacgaatgaactctagcccggacaccaaggtcaggaagagcgtcag

SEQ ID NO: 720634 - DNA, 302 bp, Homo sapiens
tggtccagagatcagttacaggtctgtatagacatgtgttactctctctgggtattaggagtggaatgaccggatcacaggacaggtgtaggtttaacttttgaagaaatggccaaactgttttccaaagtgactgttccattttacactcccaccctcagtatatggtataagatttctagttgttctccattctcaccaatactttgtagggtcagtcttttcaattttagatatttcattaggtgtgtagcggtattgcacaggggttttaatttgcatttccctaatgactaatgatg

SEQ ID NO: 720635 - DNA, 1507 bp, Homo sapiens
  misc_feature (437)..(437): n is a, c, g, or t
  misc_feature (1313)..(1313): n is a, c, g, or t
aacacaccatcattatgcaatgagccggcagtcactggcgtgactgatgtggcaatagagcgaacttgaagtgtggatgctctcgatatacctccatccattcgaggcacgactctcctcgttctgtcacgcgataaggcgtgctctagtgaatgtcgtcagagcagtaaggtttatagtgcttcaacttattaccttaaagctgtatactctctacagtagcaggtgcttacgagctgtgaccgtccatcgcgtactaatggatatgctacagtatcctctagaatcgttgcacgtcccagtacgtatgtctggtcgcatatatgtagactagtaggggctggtgctagatatgtccctcgtagagcacgtgtagcttctttggccgcgagtaatacgtcgtcagagagccggtgccgtgttgatgattagatacnttgcacttctaggatgttctaaaggatcgtattaagcccactttgtggtactcggcgttggacttgcgggcaatcggtcggaacgaacgtctggataccggcgtactcaattgtttacggaaaagggaattttgaccgctgataccggtcccgcaaaagacacgcaggcggaatttatggcgctgtttttagcaccgagaaggacaccttggagagaacaatacaaaggcaacaagcacgcagacaatactatgtaataataggaggtacaaacagttacgtggtacgcggaggcagccacgggttccggacacccctccataatacacgaagaacgcatttcatcataccgcacccttcctgtattcagcaacagctttatggttgcggcgacaacctctcgggacgagtacaggctggcttccgtaaatacaagcacgaccgttgcggtgttctgtaaatccaccctaaagagtatgccgagcgcacttgctacaggacaccatttggtcgagagcatcaaattacggcaaggagaccatagtgcgggcgttggtgggggcacctaacccgcccccacatacgagtaggaaaactctccgccagacagggtcacaaataaaccgcagtaagtgttctacacgagttgttgcaactcgcttataatggaggcgaatctacgggagaaaggttccccaaggtgaataggcggctaacaaaacagcacctgcgttaagggaggggtgcccccactgcggagggatggaaacgtgtagttcggccgtttatggtgatttaccaatcagccaaggatataagcagcgaggccctgctcattacaagcggagattataattatgatgccacgatgacgcngagtctgggtgggctacgagataaaacgagggattcatgtacacccatctttgagtgtggccagcccatcgctatgcaatgtgcggacactttgtgttgcgtattgtgaccggagcgacctacaaatacacttgcccaacagataacttagggcgagcggtgttggaatcaggcaccagaagggccgatgtctc

SEQ ID NO: 720636 - DNA, 265 bp, Homo sapiens
ctatacctattattcggcgattagcttggaggtctaggcacagctcttaggccttcttattcgagcgagcttggccagccaggcaaccttcttggtaacgaccacatcttcaacgttatcgtcacagccattcatttgttattatcgtcgtcatagtataccatcataatggaggcttggcacttactggttccctatatcggtcccgcatatgcgtttccggataacacatagcttgtactttactcctgtttcactcgctcag

SEQ ID NO: 720637 - DNA, 548 bp, Homo sapiens
acagagttctcgttgttgctgtctgttcgcactttctctttcggccgatgagaaaagtagccatcctgagtctccagggtgatgagcggacttgggtgtggatccagagcccgggcgggcagtgccccccggctggccggctgctgtcaccgcggttctccggggccgcctcaccgcgcccgcgcctggggcccccgtcctcctcctcctccgccgccgcctcctcctcctcctcgggctgcagccggctcggcgggcaggtcccggcgctcccggcgcggggccggggccgggggcggctgctccccgccgccgaccgctgcgcccccgcggcgctccccggccccggagtcgaggctgctgaaattccacacgaccagcgtctgcagcagcagcaccgtgagcgccgagcagcgccgagtgagcgccgggccagcctccgggcgcacggcgccgccaccatcttcggagcgcggccggcgagcgaggcgcggggaccccggcacgctccgggccgcccccgcgctccccgcagctcccgcggccgc

SEQ ID NO: 720638 - DNA, 307 bp, Homo sapiens
cccccttttttttttttcgggggggggcgggggggggaaggccccccccgggggcccccttttcttttttttggggggtttttgggccccccccccgggggggttttttttttttgggggggggggggggggctttccccccgggaaggggttttttttttttttttgggggggttttttttggcccccttttttttttttttggggggggccccccctttttggtttttttttttttttgggggcccctgggccccccccccccgctcttggggggggggaaaataagggggcccccgccccccca

SEQ ID NO: 720639 - DNA, 135 bp, Homo sapiens
agcgtcgggtgcgtatcgtcgcgggggggatctgactagaggtctcataatcccaagatggtagcttcgccatggctcctcagccaacgtggactagtactagtccagggttggtagtacgctggaatggaattg

SEQ ID NO: 720640 - DNA, 427 bp, Homo sapiens
gctcagttgatcctcacggtcaaatggctgggccagcatccggggaaaaggcagagtattaagtatctcatccggttactcagatttcaaagtatggcattctctctatcccattcattttctcaatattcttagaaagcaagaaagggataattagactcatcttagagatgaaaaaacggagacttggagatgacaacggaagcctaaaactctcaggttagataaataacagaggcggggccggggggttcatgccggtaatcccagcacttggggaggccgaggcaggtggatcaccggtggtcaggagttcaagaccagccgggtcaacatggcaaaaccccgtctctactaaaaatacaaaaattagcggggcatggcgggggcgtgcctgtagtcccagctacttgagaggctgaggcag

SEQ ID NO: 720641 - DNA, 491 bp, Homo sapiens
tggtcccgcgcaaagtctccccacaggtaaagtgtggaaaatactaaaaaagatgagggctacagagaatggctccaaacattctggacctaagtaagaaacacattgtacagctgtgacccaggaaacacacgactaccaaagcatagcaaagcgaaaacgaagatccctgaagcgccatgctgcgtgcccgtggcggacacacaccgctttctatgacattctgtcctacatttaaaacaacgttggtcataactcatgatactgatttccagctccagtaataagctgggatttgcagttgaaaacacactagcctagagtcaggcgccgtggatactagctttgccactactacacgtgaggcctcggccaattcagttaagcaggattgctgtgaagattcaaatgaagtcagtggcatattgaagtcaaatctacaagcgtagttttcctccttcctaaaaacatattttgtcccgcgttgtaat

SEQ ID NO: 720642 - DNA, 356 bp, Homo sapiens
gaagagggctcagatatagccctactgttgaaagggatgtgctatagcaattttgctggcttggcctggggacactgtgaacatggtggaggtatgatttatgatgtctcagtatcaagcttgtgactatctcatttacttcaggggaatcacaagttcaaacttccaggcagagttggatcagtctgttcctctctggtcaggcaggcaaggcgacggtgtcatgcgagtctactcagacactttgggactgtgacttcccaacccaaagaacaagtgtgcccactcttgagaaacggtgtactctcttgtttatgctggctcgcttctttaacagacgtgacgggatatgtagc

SEQ ID NO: 720643 - DNA, 613 bp, Homo sapiens
  misc_feature (191)..(191): n is a, c, g, or t
  misc_feature (202)..(202): n is a, c, g, or t
  misc_feature (220)..(220): n is a, c, g, or t
  misc_feature (273)..(273): n is a, c, g, or t
  misc_feature (275)..(275): n is a, c, g, or t
  misc_feature (278)..(278): n is a, c, g, or t
  misc_feature (285)..(285): n is a, c, g, or t
  misc_feature (298)..(299): n is a, c, g, or t
  misc_feature (332)..(332): n is a, c, g, or t
  misc_feature (347)..(347): n is a, c, g, or t
ccgcggtgctgacatcccggttgttcttctgtgccgggggtcttcctgctgtcatgaaggacgtaccgggcttcctacagcagagccagagctccgggcccgggcagcccgctgtgtggcaccgtctggaggagctctacacgaagaagtgtggcatcagctgacacttcaggtgcttgatttgtgcaggntccgtgctttncccaaggagatggtctcnttaagctttatgaaaactttatcagtgaatttgaacacagggtgaatcctctntnccncgtgganatcattcttcacnngtagttaggaacaggaattggaaccgtgggaanttccccgttaaaaantgggttgggggccgttcccgtttttaaaacccttttttatttttcccctttgggggggggaaaaaacacaggactcgtgacgaacggtgaacaagtagtgatgaggcagtgatcctgtgtaaaacagcaattggagctctaaaattaaacatcggggacctacaggttacaaaggaaacaattgaagatgttgaagaaatgctcaacaaccttcctggtgtgacatcggttcacagtcgtttctatgatctctccagtaaatacta

SEQ ID NO: 720644 - DNA, 240 bp, Homo sapiens
acgcattaaaaaatatcaatttgaagattgatgaaggtgagactgttgtgttggttggcccatctggtcaggaaagtcaacgttgattcggacaatcaatggattggaagacattcaagaaggtcagttgctggtcaatgactttgatctacacgatccaaaaacggatatgaaccgtatccgtagaatgttgggatggtgttccagcatttcaatttatataacataaatcaacattag

SEQ ID NO: 720645 - DNA, 833 bp, Homo sapiens
tccccactgtcagccacctcttctgtgatggtgagtggagccgcttaccccagctaggctgaagatgtcagcccaggagagctgcctcacgcctcactcaagtactatcgctcttcgattatacaagcctctatcttcttcgtcctcggcagacctgatcttctgcttcggccatctggaatcgctcactcgacgcagttacctacgcttctgtagtcgcttctgcttgggcgttgcgctctttcgtgcctcgtgcatggatctgtgtcctagtagtcctggaccatctctagtgactcttacaccagtgggcatcgccctcctgggttgtgtgggggccctcaaggagctccgctgcctcctgggcctgtatttggggatgcttgctgctcctgtttgccatcacagatcaccctgggtaatcctcatctccactcagcgggcccagctggatgcgaagcttgcgggacgtcgtagagaaaaccatccaataagtacggcagcaacccctgaggagaccgctggccgaggtagagctgggactatgtgcagttccagctgcgctgttgcggctggcactacccgcaggactggttccaacgtcctcatcctgagaggtaacgggtcggaggcgcagcgcgtgccctgcatcctgctacaacttgtacggcgaccaacgacatccacaatcctagcatacggtgatctttgccccatactcagcagggcttggcaccccctggcgcggccagactacagtgcagacatctgcgctgttccttgcaagaagagccagcatctacccggagggcttgccgcaagggcctccagaa

SEQ ID NO: 720646 - DNA, 119 bp, Homo sapiens
ggctcgcgagcagatacctaggtacacacaccactttttgcttgggaatgctgaaccatttgagaagagaaacttggcttctgttttcaaatggttcagcattcccaatcaaaaagtgg

SEQ ID NO: 720647 - DNA, 206 bp, Homo sapiens
ttctgaagtgttgggattacaggcgcgagccactgcccctggcccaggtatgttttttactgatggttgaatgttcctttttcactgtatcctgttcttgcaagatgtcatgctttctttcgtctctctgaggaggttttcctttccttcctgcctgcctttctttttctttcttttgtttccttcctcccttctgtcgtcttctc

SEQ ID NO: 720648 - DNA, 490 bp, Homo sapiens
cacaaggaaattgtatattctatgacacaagctcacaactccctgctttccactgcaagcggtggctcattactggctgggacgtatccttggattaatgtatgcacgcctctcttccttgtttcagagaaccataacaccctgagtgcagaacccctgtaattagagctgtcgttgttgcctccccacagcaagaaagcttttgcaagtttaatctcatcactgagaaagcttttagagacttcaaagaaagtatttgatgctgggcttttccttccacccagtgaaaaatgtgtcgaaggaaacgtaactaagttttaaatattcccctccttttttgtgtgtgtgcggttttgtcatttattgtgtagcataagtctacaactgtttatttattttgttgtttggtaattatattattccataagccttttcacaatcaatgagctataaagatgaaagtgtatccaataaaaactaagcttcctta

SEQ ID NO: 720649 - DNA, 413 bp, Homo sapiens
  misc_feature (380)..(380): n is a, c, g, or t
  misc_feature (406)..(406): n is a, c, g, or t
atttacctccagtgggacatataaagggtaaacaaatttaaatctaccaaagaactgggacttcccataaaaaaattaaacatcaaaaggagaactttcatatctgaccatagtggaatactggatattagaattattttcctgctaccaacagctataaaactggacaaaatatctgaagcaactatttttgggtctcagaaaacaagacagacatgtgattgtggataaaataaaaagatgtgaggttaactcaaaactcctcttggctttctgcctgagagcactttacaaatcatggtacaggaaactggagcccagtgagcagcatcttgccttgcggagtatcttagttcgttttctggcttgctgcaacagantacccagactggggtaattttttaangaggttt

SEQ ID NO: 720650 - DNA, 334 bp, Homo sapiens
tgaggagtcttacactctgcagcccaggcgggagtacaccggcgcattctcggctcactgcaacctctgccttccaggttcaagtgatactcctgcctcagcctcctaagtagtagggattacaggcatgggccaccatgcctggccaatttttgtattttcaatagagacagggttttgccatgttggccaggctggtctccaactcctggactcaagtgatctgcctgtctcggcctcccgaagtgttgggattacgggcgtgagcctctgaacctggcctgtctccatgcttcttccacagcctgaagaactgtgagccaaatgaacctct

SEQ ID NO: 720651 - DNA, 281 bp, Homo sapiens
gggcacttagagagagtagggccaggctggtgagctacatggacaggatattccctgacagtttcccactgtcacttgcagatcagagggtgtgattaactccattttctccagcagccataaaatgaatggggttctctccatattttgccagaagaggcagttatgattccacttctcctaatataatcattttaaattgagaacaactcatgatcacaattcataaaatccatattttaagacaatagttcttcatgtcacaaacacaatctattcta

SEQ ID NO: 720652 - DNA, 107 bp, Homo sapiens
tcggctcggtaccatcttgcgtccatcagctttgagaaatgaaggtgaaatgatgacttctcagatgaaaagaagaaaaagtaacttgctgatgggagaagactgcg

SEQ ID NO: 720653 - DNA, 831 bp, Homo sapiens
gagaagcggcaggaataacagaaaccagcagcgagcttcaagcagagactgagcaatactttaaatctttctgctaaacatgctcttctaacttctgatcaagatacgattgaggacttggtaactggctgtcttctatcagcaagagggctcgagagggccctgtgacactggtctgactccatcgcttctgactcactcgctaatccatgaggaggatgagtggcatgtcgcgcgcagacttcgcgccgtatcgtcgccagatcaccacgataagcgaatgaggccctaagaccgaacaggacaacccgtatccgattggggtgacgccgacaagttctgtctcgcccaagagacaggcaatgcctgagccttggtgccacccactgtggcatcgagccagacctcggtgtctgggctctgccgtccgctgtgatttacccctgagagacttgggcctggtacccaacatagaaagtaccaaccgacggcgcaactcctttgcattgagacagaggtcaaaaatttcctcgtcccacaaataccttcgtgcgccacttcctgtcggtactttgggtcgaataagtctccatccagcgcaaacaccctaacccccggagtgaactgagaaccgcgcttggcaaccttagcgggcccatatcgaacagcatcgctcgtgacaactagctaacaccaactccccaaaccgctcttgcgaccgcggtttgaaatcccgcttcgcaaccaacgaggcccccgcttcgtgcacagaggttctatacatccccaacctcgctccaggaccacccgcttgcggaccacccgttccac

SEQ ID NO: 720654 - DNA, 1128 bp, Homo sapiens
cgctcggagcttgtaacttggtacactatgtgcctcattgcggtcctgagcttcgttcgagaacaactgtgagatcggctgctattgccaagctcaccaacacctactgtctggtagcgatctggagtgctcagagaacttctacagttgtgttctgatgtgcgagctctccgataccatcccctgtgtgtgcactgctgtactatactgcctgtgctgcctgcatcatacgggctgcatgtgtgtgtgtgtgaacatgtgcactgtgtctcctggtacccaacaataccaccgaccagtgagctgcaacacattcgcaacagcctcccagacacagtgcagattcaggcgtggtggagtgagctggctctcagccttgggcaatgtcaccacctgacaattgactacgtggccttggtccacccagactatggacagtggagcacgagcaagaaattcttggcagcatgtgctcaaggtggcaagtcttcagcacacgaccagctggcctgaccactgtgctcagctagtgaatgctacttgtgtctctcacccaatccaatggactggcttgcctccatcccacacactatcaacttgaacacaccaggcatgagcttgtcctctacttcttcaagtccaaccctctgcttccgcggctacacttgctgcaccctacacccacctgacagctaccccgcctcgcttcccacatcgccgccatcgaacctgaccctgctctcgccctctctatgtcacccctgcacatcaaaccccccaccaccaaacttgctaccaacacgctgccacaccctgtccatccaacacctcaactacaccccccatcctactcacccacttgccaattcaccatcctgtcaaatctcacttcatttgcaccatccctcaccttcagaccgccctaaccaagtttgttccccataggcagactacttcggccctctgcacaccttaccggtccaaaccctcttctcccactccccgctcccagctctgcaacccgacttacatcaccaccgccactctgccatacaagcctccctctcacatcaccgctattctgccccctaaccctatacaaacgctaactacaccacttaaaccaca

SEQ ID NO: 720655 - DNA, 292 bp, Homo sapiens
aaggatccccggagggcaggtctcgtagggaagacatcagacaatataatatggtatggtaagaaggttggtgtgaatgcattaattatatgtgtgtctctggctacttacagcagcataggagcaggcatggagtgggtagagagctagattttactaggacagtattaatggggcaggagaggtgcgggcgtctgtcagaacactgcttataactgactggcccttgacccttaaacctgggatgaccgacggactccgggacactactccaggacccccatcaacggta

SEQ ID NO: 720656 - DNA, 553 bp, Homo sapiens
ttgcgtagggggcgggactaaggctgtcaattggtctgttttttgtgccgatcaatgagatgggtgcggtgattggctgactaccttgagagtagcgggttgagtgtgtaagccctgagtgagtgcagcgttttcttgggctatctgtctggtatctctctctaccagaagtgttctgccgtgttcccccagctctggtgtaccctggctctgcatctgcgtcgccatgatgtggccatacgtccagtgctcgtgctcagccagaacacaaagctgtgaatccgtgaagaaaagttcaatcttggaaacatcaatgcttgccaagactatttgcagatatcatccgaacatgtttgggacccaagtccatgatgacagatgcttataggacacccaatgggaggcattgtgatgaccaatgatggcaatgccattcttcggagagattcatgtccagcatccagcggacaagtccatgatctgaaattaggcgggaccccaggatgaagagggttggagaatgggaccaacatcagtaattcatactttgcag

SEQ ID NO: 720657 - DNA, 815 bp, Homo sapiens
  misc_feature (117)..(117): n is a, c, g, or t
ctgggcccccggcaacctgcccccgggattcacagagcagccccccccgttgcccccacagccgcccaccgcctcccccagaagaaaccctgcccggggcgacaaagtccacccccnccgacccacaaaggccacccgagaggacccctggatctctctgcacacggaagactctgggtcctctgtcccaagctatggtcctgcaggccccctgcacccaaagccctaggaagtcgcaggcacacccagttgaagcctaaccgggtgaaacccctcttataactgtgtggctgccaacccccgatgagcgtcacccttctccgagggggatagtgatccatcgtggaccggggaggaggaccccggagtggtggattggcccaccattgatggagatcctggtccgccaaggcggccattccccggtgtccaattgtgccaacatttatcgctgactgaattgctactggaccaagcacttacacgttatgttcccgtttcgttattggtacccaaactcttgccacgataacccgtttcatgagactgtttgtatggcaacgcccactgttctctaaagcccctgctctgttttaaaaaactccacgaggccatttttacatatcacgtaaattgtttttataaatttgtggttttcatgagaaccttgctaagcatttattaggaaaactgaatttccccaccggtgaactgaaaagttattttaactattatacataatcaagatcctgcctttacgggattagcttaacctaaaaagtttgcattaatgaataaattcttcctgcattcca

SEQ ID NO: 720658 - DNA, 393 bp, Homo sapiens
  misc_feature (317)..(317): n is a, c, g, or t
  misc_feature (327)..(327): n is a, c, g, or t
  misc_feature (357)..(357): n is a, c, g, or t
tgattggagaactaaggatgtaagaattctttatattctatcctgaattctgaaaattatagtgtaaaaggatgtgcaggctgggcatggtggctcacgcctgtaatcctagcacttcgggaggtcaaggcagaggattgcctgagcttaggagtttgagaccagcctggggcaacgtgggtgagatcctgtctcaaataagtaaataaaaagatgtgcagaattacattttgcataatatatgggggagcagtaagatctaggaatatggaactgttgttcactctgggatttttccacctgggtacttctggacntgaatttaantattctccaattgaggccaggaccaaaccngggggtttcccccaaaactttaaggccaaggaatta

SEQ ID NO: 720659 - DNA, 620 bp, Homo sapiens
  misc_feature (13)..(13): n is a, c, g, or t
  misc_feature (69)..(69): n is a, c, g, or t
  misc_feature (72)..(72): n is a, c, g, or t
  misc_feature (101)..(101): n is a, c, g, or t
  misc_feature (111)..(111): n is a, c, g, or t
  misc_feature (116)..(116): n is a, c, g, or t
  misc_feature (118)..(118): n is a, c, g, or t
  misc_feature (123)..(124): n is a, c, g, or t
  misc_feature (126)..(126): n is a, c, g, or t
  misc_feature (138)..(138): n is a, c, g, or t
  misc_feature (148)..(148): n is a, c, g, or t
  misc_feature (161)..(161): n is a, c, g, or t
  misc_feature (184)..(184): n is a, c, g, or t
  misc_feature (190)..(190): n is a, c, g, or t
  misc_feature (193)..(193): n is a, c, g, or t
  misc_feature (196)..(196): n is a, c, g, or t
  misc_feature (203)..(203): n is a, c, g, or t
  misc_feature (211)..(211): n is a, c, g, or t
  misc_feature (232)..(232): n is a, c, g, or t
  misc_feature (255)..(255): n is a, c, g, or t
  misc_feature (295)..(295): n is a, c, g, or t
  misc_feature (380)..(380): n is a, c, g, or t
  misc_feature (508)..(508): n is a, c, g, or t
  misc_feature (589)..(589): n is a, c, g, or t
gtcctggtactgntggtactcggacaccaggtcgttcatgttgctctcggcctcggtgaactccatctngtncatgttctcgcccgtgtaccagtgttggntggttttgtnccggnanatggnngngaactggtcggngatgggcttntttagctcctggntgggggtgctgttgctgatgttngtgggnganatnttcaggncggggggngggatgttgcacacggccgtnttcacgttgttggggatccactncacgaagtagctgctgttcttgttctgcacgttgagcatntgctcgtccacctccttcatggacatgcggccccggaagatggcagccaccgtcagtagcggccgtggcgcgggtcggaggcggncatcatgttcttggagtcgaacatctgctgggtgagctcgggcacgtgagcgcccggtactgctggctgccccggctggtcaggggcgcgaccggggcatgaagaagtgcaggcgagggaagggcacntgttcaccgccagcttgcgcaggtctgcgttcactggcccgggaagcgcagcaggtggtgacccgctcatggtgggcgacncaggtggttgaggtcccgtagtgggggtggt

SEQ ID NO: 720660 - DNA, 1716 bp, Homo sapiens
  misc_feature (196)..(196): n is a, c, g, or t
  misc_feature (217)..(217): n is a, c, g, or t
  misc_feature (1332)..(1332): n is a, c, g, or t
  misc_feature (1631)..(1631): n is a, c, g, or t
  misc_feature (1633)..(1633): n is a, c, g, or t
  misc_feature (1636)..(1636): n is a, c, g, or t
  misc_feature (1640)..(1640): n is a, c, g, or t
  misc_feature (1647)..(1647): n is a, c, g, or t
  misc_feature (1653)..(1653): n is a, c, g, or t
  misc_feature (1663)..(1663): n is a, c, g, or t
  misc_feature (1672)..(1673): n is a, c, g, or t
  misc_feature (1681)..(1681): n is a, c, g, or t
tgcgccccgtggacgcctgggtccgagcccgctcccggcttggcgcggacctgcatcccggagccgctggcggctcgggcgcctgcaccccgctgaggagctccggagggcgccggggtggcggagcggaggcggccggcaaggtgagagcggcggctgcgcgctgggaggagcagcaggtgcaggggcggccggnggcgcgggcagggggcaccgngagccgcgcccgtacctgggacccgacgccgcccggtgcccgcgctggccggcagagggcagcggcagggcgccgcgggccacacatggctgcgtgaccgcgggatgctgtctgtccccttgctcagggcggcgtgccggcgatggagcgcgcggtagagccttggggcccagatctccaccgcccggaggagagggagccacagagaggcgcccgcacaggtctagggagtgagaacgtgatttctcagccgaatgagtttgaacataccccacaggaagatgacttggggttcaaggaagaagatttggctccagatcatgaagtaggaaatgtctctctcaaacctgaaggcatccagaactgggatgacttatgggtccagagagagggtctaggaaagcctcagcctcgggacagaggcccccggctcctgggtgaaccacgctggggccaggctagtagtgatcgggccgctgtgtgtggtgagtgtggcaaaagcttcaggcagatgtcagatctggtgaaacaccagcggacccacacaggggagaaaccctacaagtgtggggtctgtggcaagggctttggggatagctctgcccggatcaaacaccagcggactcatagtggggagaagccctatagagcccggccaccagcccagggtcccccaaagattcctcggtcccggatccctgctggtgagcgccccactatctgtggtgaatgtggcaagagcttccggcagagttctgacctggtgaaacaccagcggacacacactggtgagaagccctacaagtgtggcatatgtggcaagggctttggcgacagttccgcccgcatcaagcaccagcggacacaccggggggagcagcccccccgaccagtggtgccccgaacggcagccatctcgggcagccacggcagctacccagggaccgaaggcccaggacaagccatatatctgcactgattgcggcaagaggtttgtgctcagctgcagcctcctgagtcaccagcgtagtcacttggggcccaagccctttggctgtgatgtgtgtggaaaggagtttgcccggggatccgacctggtgaagcacctgcgggtncacacgggtgagaagccctacctctgcccagagtgcggcaaaggtttcgcggacagctccgcccgagtcaaacacctccgcacccacagtggcgagaggccccatgcctgcccggaatgcgaccgtaccttcagcctcagctccacccttcttcgccaccgcctcactcacatggagccccaggacttcagcttcccaggctatcccctacccgctctgatccccagcccaaccccagctcctctgggcaccagcccacccgctgacacctcgaagtccctcacactcgggtgagcctnanggnctgnctggctntggagncagagcctgngggcccagnnggctgggnagccagcagccacactgcgcgggggaaagccaccg

SEQ ID NO: 720661 - DNA, 1515 bp, Homo sapiens
  misc_feature (1131)..(1131): n is a, c, g, or t
  misc_feature (1430)..(1430): n is a, c, g, or t
  misc_feature (1432)..(1432): n is a, c, g, or t
  misc_feature (1435)..(1435): n is a, c, g, or t
  misc_feature (1439)..(1439): n is a, c, g, or t
  misc_feature (1446)..(1446): n is a, c, g, or t
  misc_feature (1452)..(1452): n is a, c, g, or t
  misc_feature (1462)..(1462): n is a, c, g, or t
  misc_feature (1471)..(1472): n is a, c, g, or t
  misc_feature (1480)..(1480): n is a, c, g, or t
tgcgccccgtggacgcctgggtccgagcccgctcccggcttggcgcggacctgcatcccggagccgctggcggctcgggcgcctgcaccccgctgaggagctccggagggcgccggggtggcggagcggaggcggccggcaagggcggcgtgccggcgatggagcgcgcggtagagccttggggcccagatctccaccgcccggaggagagggagccacagagaggcgcccgcacaggtctagggagtgagaacgtgatttctcagccgaatgagtttgaacataccccacaggaagatgacttggggttcaaggaagaagatttggctccagatcatgaagtaggaaatgtctctctcaaacctgaaggcatccagaactgggatgacttatgggtccagagagagggtctaggaaagcctcagcctcgggacagaggcccccggctcctgggtgaaccacgctggggccaggctagtagtgatcgggccgctgtgtgtggtgagtgtggcaaaagcttcaggcagatgtcagatctggtgaaacaccagcggacccacacaggggagaaaccctacaagtgtggggtctgtggcaagggctttggggatagctctgcccggatcaaacaccagcggactcatagtggggagaagccctatagagcccggccaccagcccagggtcccccaaagattcctcggtcccggatccctgctggtgagcgccccactatctgtggtgaatgtggcaagagcttccggcagagttctgacctggtgaaacaccagcggacacacactggtgagaagccctacaagtgtggcatatgtggcaagggctttggcgacagttccgcccgcatcaagcaccagcggacacaccggggggagcagcccccccgaccagtggtgccccgaacggcagccatctcgggcagccacggcagctacccagggaccgaaggcccaggacaagccatatatctgcactgattgcggcaagaggtttgtgctcagctgcagcctcctgagtcaccagcgtagtcacttggggcccaagccctttggctgtgatgtgtgtggaaaggagtttgcccggggatccgacctggtgaagcacctgcgggtncacacgggtgagaagccctacctctgcccagagtgcggcaaaggtttcgcggacagctccgcccgagtcaaacacctccgcacccacagtggcgagaggccccatgcctgcccggaatgcgaccgtaccttcagcctcagctccacccttcttcgccaccgcctcactcacatggagccccaggacttcagcttcccaggctatcccctacccgctctgatccccagcccaaccccagctcctctgggcaccagcccacccgctgacacctcgaagtccctcacactcgggtgagcctnanggnctgnctggctntggagncagagcctgngggcccagnnggctgggnagccagcagccacactgcgcgggggaaagccaccg

SEQ ID NO: 720662 - DNA, 1434 bp, Homo sapiens
  misc_feature (1050)..(1050): n is a, c, g, or t
  misc_feature (1349)..(1349): n is a, c, g, or t
  misc_feature (1351)..(1351): n is a, c, g, or t
  misc_feature (1354)..(1354): n is a, c, g, or t
  misc_feature (1358)..(1358): n is a, c, g, or t
  misc_feature (1365)..(1365): n is a, c, g, or t
  misc_feature (1371)..(1371): n is a, c, g, or t
  misc_feature (1381)..(1381): n is a, c, g, or t
  misc_feature (1390)..(1391): n is a, c, g, or t
  misc_feature (1399)..(1399): n is a, c, g, or t
tgcgccccgtggacgcctgggtccgagcccgctcccggcttggcgcggacctgcatcccggagccgctggcggctcgggcgcctgcaccccgctgaggagctccggagggcgccggggtggcggagcggaggcggccggcagaggcgcccgcacaggtctagggagtgagaacgtgatttctcagccgaatgagtttgaacataccccacaggaagatgacttggggttcaaggaagaagatttggctccagatcatgaagtaggaaatgtctctctcaaacctgaaggcatccagaactgggatgacttatgggtccagagagagggtctaggaaagcctcagcctcgggacagaggcccccggctcctgggtgaaccacgctggggccaggctagtagtgatcgggccgctgtgtgtggtgagtgtggcaaaagcttcaggcagatgtcagatctggtgaaacaccagcggacccacacaggggagaaaccctacaagtgtggggtctgtggcaagggctttggggatagctctgcccggatcaaacaccagcggactcatagtggggagaagccctatagagcccggccaccagcccagggtcccccaaagattcctcggtcccggatccctgctggtgagcgccccactatctgtggtgaatgtggcaagagcttccggcagagttctgacctggtgaaacaccagcggacacacactggtgagaagccctacaagtgtggcatatgtggcaagggctttggcgacagttccgcccgcatcaagcaccagcggacacaccggggggagcagcccccccgaccagtggtgccccgaacggcagccatctcgggcagccacggcagctacccagggaccgaaggcccaggacaagccatatatctgcactgattgcggcaagaggtttgtgctcagctgcagcctcctgagtcaccagcgtagtcacttggggcccaagccctttggctgtgatgtgtgtggaaaggagtttgcccggggatccgacctggtgaagcacctgcgggtncacacgggtgagaagccctacctctgcccagagtgcggcaaaggtttcgcggacagctccgcccgagtcaaacacctccgcacccacagtggcgagaggccccatgcctgcccggaatgcgaccgtaccttcagcctcagctccacccttcttcgccaccgcctcactcacatggagccccaggacttcagcttcccaggctatcccctacccgctctgatccccagcccaaccccagctcctctgggcaccagcccacccgctgacacctcgaagtccctcacactcgggtgagcctnanggnctgnctggctntggagncagagcctgngggcccagnnggctgggnagccagcagccacactgcgcgggggaaagccaccg

SEQ ID NO: 720663 - DNA, 341 bp, Homo sapiens
  misc_feature (6)..(6): n is a, c, g, or t
  misc_feature (55)..(55): n is a, c, g, or t
  misc_feature (104)..(104): n is a, c, g, or t
  misc_feature (185)..(185): n is a, c, g, or t
  misc_feature (208)..(208): n is a, c, g, or t
  misc_feature (285)..(285): n is a, c, g, or t
  misc_feature (298)..(298): n is a, c, g, or t
  misc_feature (312)..(312): n is a, c, g, or t
ttgcgngtatacgcccagatggcctgaagtaactgaagaatcacaaaagaagtgnaaaggccctgccccgccttaactgatgacattccaccattgtgatttgntcctgccccaccttaactgagtgattaaccctgtaaatttccttcttctggctcagaagtcccgcactgagcaccttgtgncccccgcccctgcccaccagagnacaaccccctttgcatgtaattttccattaccttcccaaatcctataaaacggccccatccctactccctttgctgnctctcttttcggnctcatccggcctgnacccaggtgaaataaacagccatgttgct

SEQ ID NO: 720664 - DNA, 823 bp, Homo sapiens
tatgagctacacatctgtctgattaacatagctctataagaagtcatgaaatcacatagtggagaccactttttctttttaaaaatgttttgctattacaagactttcgcatttttatataggttttagaatcagcatgccagtatcttaaaaaaaaaaaaaaccggctgggggatttgggtggggattggggttaaattggaaatcttaacaatattacgcccatgagcattggtctatctcttcattaattaaggtcttcatttctctcagcagggtttgggtagctttcagagtggtagtcttttccacatctttaactaagtttttacctatgtgtggaatagaatggttctctaattttctggattaattctgcgtatacagattggcttgtttcattacaacttgtaaagtcattattcttataaatatgtggggaggattctatgtagatgatcatatgtggaaaacagttttacttcatccttcaaagtttgcttccttttcccttggagtacctgtgaatcagagactaggtgacgtggtagattccttcgtaggttgaaaactttattaaccacagttgcttacaagtggatgatgggttttgacatgtgtcagatgcccttggtattgttgacttgtgtacagtcacggggaattatgccactgtatgcctatagttgaaatcgctggggtggcaagtacagaggggaatgaaggctggggtaaggaggaatcctatgtagggtaaacagatatataaaaccagatcctataaacgtatgcgagcggccaaacggaaacaaaataataaagg

SEQ ID NO: 720665 - DNA, 279 bp, Homo sapiens
gttggagatctcttccttagagtaatgatttccaacatttttttttttggagacagagtctcgtcctggtcgcccaggcgggagtgcaagggggtgatctcggctcacggcaacctccgccggccgggtccaagtgattctccggcctcagcctcccgagtagcgggaactccaggcgtgtgccaccacatccagctaatttggtattttaagtagagagggagttccatcatgtgggccaggcgggtttcaaactcctggactcaggtgatccaccgg

SEQ ID NO: 720666 - DNA, 120 bp, Homo sapiens
aagctctgtctctgcaagtctctgtatgtctgtgtgttttcacccaggtttcacagtggctctcagcaggagagctggtctgacctgtgagtcccgcccagcacatggcacgcgacatcg

SEQ ID NO: 720667 - DNA, 138 bp, Homo sapiens
aaatttaccatcagcatatcacaactacaatcacagcttattggtcactatacatgtcgcacaaaatcactacaccatcattctcacaatgccactgacatcactactgtgtggatcagaccacataaaatgcctcca

SEQ ID NO: 720668 - DNA, 700 bp, Homo sapiens
  misc_feature (212)..(212): n is a, c, g, or t
aaggatgagaaccctgaaatgcatactctctccgatataagtctgtgtattatggcttagaacatctcgtgacgtggatcaatatcaagagtgccatctatcctacaaatacaatcgcatatagtccattattacccgtcgactgtctcagcgcaaacgacaatggacaatgctcaattacaggtaacgcgtataacttagaagacgtaacnatgggaagtacgcgcaatactctcacacacctgacgcgtagtgtgtatcctaatagagacaatccagcgtctcatgaccagtccacccaagtcatagcacgcaagggacatcagacgtggtcgcaatgatagacgacaaatgtttgctaaacaggcgcacgcgcgagtgcactctctacatctgcttgcattacaggcgatacagcgtctctagctctcgcagttagactcccttttgctacactcagcgtgcatcgcttgtcaattgcacatcgcggcatcgcaacggaaaggagggttctccaagacatagttcatacttttacgtttctctaagccatcttggacaaatgggaacctgggcctcggtgaacagaaagggctgcgcgtcaatgtacaacaagggctagcgagcagagaagaggagactcgtaatgggagcctcttccatatgaaatacagctggcgcatacacgtaaccatacacc

SEQ ID NO: 720669 - DNA, 323 bp, Homo sapiens
  misc_feature (3)..(3): n is a, c, g, or t
  misc_feature (135)..(135): n is a, c, g, or t
  misc_feature (275)..(275): n is a, c, g, or t
ggnaagatctgattaaggtcctggaggatatgagacaagaatatgagcttataataaagaagaagcatcgagacttggacacttggtataaagaacagtctgcagccatgttccatggaggcagccagtccagcncactgtgcagagcaagacaaggtgacatttccactgaactgaatgcgcacatttccatgtgccctggatgatttgaccctgcatggcgcaggtacaatgcactgaaattcttgcttgtggaaaacattgttatcgcgatngacccatgtctctggtactccttgcaaggctccatggaccattgcaag

SEQ ID NO: 720670 - DNA, 214 bp, Homo sapiens
tagacacgaaccgtgcctcgatgccggcgtcggcgtagggcttgagggcctcgaacaccatgaccggacccaggtcggatccgccgatgccgatgttcacgaccgtcgcgacccgcttgtcggtgacgcccgcgaactctcccgagcgcacccgctcggcgaacgcgcggatacgcccgagcacctcgtgcacgtcggtgtcgatgtgctgtcc

SEQ ID NO: 720671 - DNA, 666 bp, Homo sapiens
  misc_feature (191)..(191): n is a, c, g, or t
gggcccaatttaccttcctaaacaagttttggagtgtggcatagaacatgttttaagcacctgtatggccattctatgtatgtagtgcaaagacctctccatgtcatgaattctcatcacaccatttttgcttcctaaaaaggttgacgttatggaccaaaatgtcatgtcattgtgtagctcccctgacntatctttgtgcaagtgtgagtttgctacacatgctgactgcatggggcctgatttatccacaggacttgattctagaaatacaaaagcactgttgtttcacagcagcccgacgagtaggccctgcatggaatgaggcttttgctatgtcttcctgcatggtcacctctagtcatttgagagcttccattgcatgcagatcacacatagtaggagatgccatcaatttatcaattatttcaagcacactttaaattcatcttccctctgtctacctgagaattgctaatgttatattattcactgaccacaaggaaaatgagaaaattggttgctatcatttcactatctatagaagacaaagcactgtctttatttttacagtagaagtgctctaaagaatttctgtgtcaacttgagatacttttcacaaagacaagaagcattttactttgtgagagaaaagagaataattaa

SEQ ID NO: 720672 - DNA, 556 bp, Homo sapiens
  misc_feature (249)..(249): n is a, c, g, or t
  misc_feature (403)..(403): n is a, c, g, or t
tgatagctgactctagaggtatcccggtaaccacggctgaaactggattgactgatgcttgtaggatagacatgccgcagatgggcagagctggtggtgggctctctggttgggtgaggcactggcagggatgtggtctcattgtcatgatttgcatactgtttgctgtgagccccacccccttctttgttcctagctgactccagtggtctagccctcccatttcttccctatgaggcaagacagacntggatctcctggaaagcaccctggaaagctgggaaagttggggaagctgaatgtctgccttgggctttctttttcccactgcagaaactataggcccaggggatcactctctggccccatgtgggcctggtgaggggcgatgcagtcaaaaagncaagccactcttacccgtctaatggggctgttggtatttgtgctccaagggagtgcttaagccctaggctctggaattttcacaaaggtgtccttgtctgtggataattactaattgacatttctgtgatagtgactagaacctggacctcct

SEQ ID NO: 720673 - DNA, 358 bp, Homo sapiens
ccctgaatatgatcctgtcaatcggtgcctgtctgcatgcactgtagagggtctattgttctgtgagctgttctaagagctcaccataacatagactcatgcacatataggtagtactctagtgctagacgatagttattactaggctctatccttcgttctgacactatgcgtttcatatatgcatctcattatgtcgtagggtcatagagtcctgttccactcataacaggtctactcacatatgtgccaagatgcgtagaatattagtgcgtcagtgatcatcagcgacagcatgtagcagcaggtagctaacgttatcaccatggttttagataactatcgctgagcgtcaccg

SEQ ID NO: 720674 - DNA, 421 bp, Homo sapiens
ccctgctcgagcggcccctcggacaataagacagtggacatcatgacgaggactccgggtggggacctgaactggtacacctgaccctgcaattctagccctcatttaagatttgagtggtgaaaccaaatgaaaaacccctacagtgagtggaatcttttaatatactgttggctttagcaggaacagaactacaggagccatctctctcccctctcctccgtaccgagaggaggggtgggtctcagacgttattcctatggacttatttcttccatgtccagtgatttgcacaactttggtttcaaaagctgttgaaacataggaaaaccaagggcattgttcacagataggtgccaagtctcaccttgcatgtgtgcctctgttctgtccctgccccaacgtcacttctactaactcc

SEQ ID NO: 720675 - DNA, 190 bp, Homo sapiens
cgcgtagtggtctcatcaaggtgaacgggcggccgtggagatgattgtagccggcacgctagtagtacaagctgctggagccagttctgcttctcggcgaggagcgatttggtgtgtagtacattcgtgtcgtgtacagggtggtggtcacgtggccgagatttatgctatacgtcagtccatctccaaa

SEQ ID NO: 720676 - DNA, 1758 bp, Homo sapiens
tggttcttggtacaaaattttattaaagggtcttttagaaaagcaacattccaaatctccaaaattacagctgtgccaaggaaaaccctgtgttaagtgcgtggtggggacgtggctgtggggcatgtggcagggcggtctcgtggctttcccaccctttcgtgtctctgaaagtggcgggtgtgggtgggcagatattctctaatctctttgtgggttctcacacaaatgtgcctcaccgtgtggtctcagggccaagggcgctctctctatatagggcgccaaatctcttttaccacacggtaggggtctccacagaggggccacgcatgtagatctccttttcacacctgtttgagtagtggcccccaaagacaacacacccgctgtgtgctctgtagaaacccaacacacaccgtgtgccgcgcgccacacagaggcagcagtgtgtctcacacagcgtgttagccgtcaagtctatacacagaggggcgctccctcgcgggagctgtgtgggacaactcacactcaggagcgcccaaactccccaacgcacacactttctacacagtggggtactcttacgacgccccctctgctgttgtcgccaccacttcgcgaagaaaagtattttctccccccagaggaaaagacaacccacaacaaacactctcttccggactacagccccttttgtcggggcccccccacacttcctctcccagagtgactaagtgaccaaaccgcggctaagcgacacaaccccaattgagcggaggggtccccctccgcggcccaaaccaagcacagaaggcactccctccccatgacgggaaagatctctgcgtctaccaccgcgccgacgacacgaaaccttctgatgccgccgtgggacccccaaacttgtgcgcccccaccaccagaagaacacacctctcctattagctggtgggcccccaccaccttctattcacccacagcccatattacagcaagcccttccatacaccaccggtggccccccatcccgggcggacaaagccgccccaaacaccccctctactctctgtgaagaacttaccaagcgccacactacagagctactccccgcgatcaaacttcaccgccaccggggcccccttttctctccacccccacacgaaacaccctcccgcggcatgccaccgcgcgacgtggcccaccaagcaaacaacaccgagcacctcacctcgtcggacccccgcgtactcttggtgacgaactaacactatcgccacacccactacaaaatctccccgcacacacgatgaccccaacttcattacgaccgcagggtcccatcccacggatcaaaaaccaagcctcctatcttcacgagtatcaaccgcacatgctgcatcaaactagctccccactccgcagcagcacaaacacttccccccctactctgtgaagaccatattctgggcacagtgccaccatgttgcacccttattaactccctctagcctgcctaagccgcgcgactacactgtctgttacacacatcgaccagagaacaacgagctctgacggcacgcgacaaactctgcccggtagctacgacccggcgctcacaagacgagacctcctcctccgatcgtactgcacacaaccccacttttcgcacgcaccgaacacgtcatcgcaccatcagatgccagccgctaagcacacaccacactcaacacacacggccgcctgcgccacttatttatg

SEQ ID NO: 720677 - DNA, 87 bp, Homo sapiens
acatctgtgtacttctgtgccagcagttttcctggtacaggcgtaggaggctacaccttcggttcggggaccaggttaaccgttgta

SEQ ID NO: 720678 - DNA, 826 bp, Homo sapiens
ggcaacaacgcgccgcggcgacgggggctcaaggcccccggacaagagaagctgagtcgtgacggagaagagcaccacgtagtcttatcgagcccatatcgtcttggaggcatctcttccacggaggagatggacctgaaggtacatacagttcaagaacagacgaaactggcacgagcggctgggcacaagcggcaggcttgtgaagatgaactccgagaagcgaattgagaagttggagaagcggcaggccacagatgatgccacattcctcatcgtcaatcgctactgggcccagctggatgacactgtggaagcccattctccgtagtgcctatgagagccatggggtgatgctgtgcttcagacgacctgatggcacactgggacccatggaagggagccaacatgtgatagtggactgcctactcccagagccggggacatcagagctgagagaagccctgtgatgagtgcaggatgcagagacccctcatcaagtgagacacggccatatggcattgagagatgcgtggcactgaggatgcaaagaaaggcacgtgaaggaggctggaagcatggaagcatggaaggacgcaatggcaatacagcacaaaggcacgaatgtgtctcgtgtggtagacggactcaggaccgactacagagaccgggatggacggaaacatcagacaagagacgtgtacagcacgacagggcacaggagccccgcagtgaggcgggccaagcaaagacccagagaatgggccgagaaaaccgacgaatgaaggactggccaccaactggaaaaaacaccacgaaccaagga

SEQ ID NO: 720679 - DNA, 163 bp, Homo sapiens
agtgtacagcagagaaggggtgcagcaggtcctcggccagtgtgatgcgctgggcagggtcaaattctaacatcctcctacatacaggtcaaacagctgcacgtgctccagggtagtcttggtagcatgtaactcttcagaaggttttgggtaccggagctcg

SEQ ID NO: 720680 - DNA, 711 bp, Homo sapiens
  misc_feature (1)..(1): n is a, c, g, or t
  misc_feature (683)..(683): n is a, c, g, or t
nagaaaatgaaagtgattagcaatatgcaaatgttgacatttttgttgcttagcaatgtagctcttttgcatagtaaaaaataaaataaaataaatggtttccagaagcctggaatttaaaagtaaaacagtaacttctcttcacatcaaacaaaaggcatttggcttcttccaaacatacagagtaaaaagcccaagattgtttcttctatagctttctaacttcacttatgtattcctgtgttctttcacactcttttggtggagctgtatgctgctacacaatggtgttattttgatgtcatttttttcagttattcctaagggtgaccagactatgattacggtctgagttcccttaggcctggcatacaattcattatttttcctcaataattctaagtgatagttgcattaggtaattaacttagagtcaaattgaaagagagcttctcttttcatctgtgaacaaaatttataagtttatgtaattatgttattgcaaccatatcactacatgctttggccatttaagtaacaaaggcaaatattaaaacagttttcacatttcatgctaaatcctcaggtaaacaattcttatgtaaactgtaagtactgtcttataacactttgttttgccccgtatccattagagattgtggaaatgtattgcagcttacaanatttttaaaatgctttgagcctcaaaaa

SEQ ID NO: 720681 - DNA, 327 bp, Homo sapiens
  misc_feature (20)..(20): n is a, c, g, or t
  misc_feature (52)..(52): n is a, c, g, or t
  misc_feature (55)..(55): n is a, c, g, or t
  misc_feature (84)..(84): n is a, c, g, or t
  misc_feature (205)..(205): n is a, c, g, or t
  misc_feature (240)..(240): n is a, c, g, or t
  misc_feature (270)..(270): n is a, c, g, or t
  misc_feature (310)..(310): n is a, c, g, or t
  misc_feature (317)..(317): n is a, c, g, or t
aataatttgccaaaggtcantcagctgactagaatttaaacctgtctaggcnggncgcagtgctcatgcctgtaatcccagcantcgggaggccgaggtgggcaaatcatctgaggttggcagatcatctgaggtcaggggttcaggaccacgctggccaacatggtgaaccaacatctctacaaaaatacaaaaattagccggnatgatggtgggtcctgaatctcagctactcagagntgagacatagaatcgcttgacccaggaggnggaggttgtagtgagccgagattgtgccattgcactccancctgggnaacagagtga

SEQ ID NO: 720682 - DNA, 855 bp, Homo sapiens
tgaactaatacagaagttggtaccaagagtggggcattgctgaaaagatacctgaaaatgtggaaggaattttgaaactgggtaacaggcagagattggaacaggttggagagctcagaagaagataggaaaacatgggaaagtttggaacctcctagagacttgttgaatggctttgacaaaaatgctgatagtgatatgaacaataaggtccaggctgaggtggtctcagatgaagatgaggaacttattgggaactggagcaaaggtgacacttgttatgttttagcaaagacactggtggcatttttgcctctgccctagagatttgtggaactttgaacatcagagagatgatttagggtatctggcagaagaaatttttaagcagcaaagcattaaaaaggtgacttggatactgttaaacattccattttaaaagggaaataggccgggcacagtggctcacacctgtaatcccagcactttgggaggctgaggtgggtggatcacctgaggctgagttcgagaccagcctggccaacatgaagaaaccccgtgtctactaaaaatgcaaaaattagttgggcataatggctcatgcctgtgatcccaactagggaggctgaggcaggagaatcacttgaacccgggaggtggaggttgcagtgagccaagattgcgccactgcactccagcctgggtgacagagcaagactccgtctcaaaaagatttttggtggtgttaaagaggaaaacagagcgtaaaagttcagaaaatttgcagcccaatgatgcagtagaaaagaaaacccattttttgaggagaaatttaagctgactgcagaaatttcc

SEQ ID NO: 720683 - DNA, 263 bp, Homo sapiens
tgacttagaggacccaagctccaacaagacatgctgaaggaatagcaattcacctacacagttctggaggatggttgcacgaaacacactgggaatggagcaaacaggtctttgagttttcgaacacgcaggctgtgagactacctattgtagatattgcaccctaatgacattggtggtcctgatcaagaattttggtgtggacgtgggccctgtttgctatattataaagcaaaaattctatcttgaaaattccaaaaaaa

SEQ ID NO: 720684 - DNA, 339 bp, Homo sapiens
  misc_feature (182)..(182): n is a, c, g, or t
ggcacctcagtcaatctgattttgatttatgtagaccccccaagacatataccacaccatctctgacataggcacctgagttctggcctgggtttacgctgtggagatcacatgactggagcggatgggtggacagaccaggaatggagctcgtgagagcaggctgcaggtgatggagcttncagaagtgggcggctgtggtgttgccttctggagagtagcagagatacagctgccatgttccgcatgagggtcttgccaagcccctcaggctgagattgggttcagggagggagatgggggtgacatgtagcttagggaaagcaggagcctctctgg

SEQ ID NO: 720685 - DNA, 138 bp, Homo sapiens
tgcaccccagcttgaacaacagaacaagactcagtctaaaaaaaaagccaagttatagtggccaggcacagtggttcacacttgtaatcccagcactttgggaggccaaggtaagaggatcacttgaggccaaggtaa

SEQ ID NO: 720686 - DNA, 193 bp, Homo sapiens
aaaatgaaaagctgtggattccttccagactaagaaggtttgatcaagcaagaccccctgaagcattggcccaaataatcctacatttgaaatagatgagatgatcgagtcatagaccactacagcgaggatttctgtgttttatcatgatacccattgtatggacaacaccccaaccagcaggaacgatttg

SEQ ID NO: 720687 - DNA, 127 bp, Homo sapiens
ccccttgtttcccccccgttttgggggggggggggccccccaattaatcccccccctccttggggggggggggggttttgggggtccgcccggcccggtttttttaaaatttttttaattttcccca

SEQ ID NO: 720688 - DNA, 104 bp, Homo sapiens
ctggatgctttaataattagaactattgcactcttataccgctattcatacaaaacagataattcaactatagtaggaaagagttcatagtatgtttgaccaca

SEQ ID NO: 720689 - DNA, 141 bp, Homo sapiens
  misc_feature (65)..(65): n is a, c, g, or t
  misc_feature (75)..(75): n is a, c, g, or t
  misc_feature (134)..(134): n is a, c, g, or t
gggttacagaggaggggagcttccgtggctccctgaattagaaggtggctgcagcctcagccggntagggatgangaggcttggttaacacctagccgttgcaggcagagagaggaggcgaggaaaggcctggngtgtggg

SEQ ID NO: 720690 - DNA, 236 bp, Homo sapiens
tggcccgaggtaattcattatttgtatgaagttataaaagtagctgtaaatggttaggaattatgtcatttgtattaaacccagatttatttttaagaaaggggttcaagctgttgtgaaaaaagttttaccttttacctttgtcagtttgtaaagaaaggatttccttttaccctttgtaggtcaaagagcccccgatgtatcatttcaaacccaataaacagggtcgtgaagga

SEQ ID NO: 720691 - DNA, 158 bp, Homo sapiens
tctgtccaatcataacacagggaggttagaagtaggctggtgacaaaatatgttgtgtagagttcaggtgagagtgcgtcatatgtttgttcctaggaagattgtagtggtgaaggtgtttattataatacatgtttgcttgttcccgctgggtggac

SEQ ID NO: 720692 - DNA, 1559 bp, Homo sapiens
gcaagaggtatttctgctgtggaatgtggcccagtgccgaggagacgccttcagacacatgaatctccagaagtcctgtgagacacagcattgatgcccaccagggcattctggtgtgctgtgaccccccaggtgacatggtggacttcgtggcagctgagagcactgagtgaccttacgtgccctgagcagctgaggaggaagaagacatgggcaggttgccgccagtgagcctgagagccttcttgcaccatcctgtgcttggaccagtgccagctgtcaatttgctggacgctgacttatgtcgagcaaggttctcatcagtgatgtgaagcatgcatgtgtgcacatggcagtgacatgcaatgtcccagagtggcttatcgcggacgccctgctgcggattggtcatgcctgtgaggcagacgtagacctgtttgactcaaggcccttgggtaggggccaagaaccgacagaaagtgtgaccttggggactcgggaattttggccaggtaggcacaacaagaaacatccacgtcatggcattggtaccatgacatacttacacaccaaagacaacgattggagacacacatccaagattgatcggagtgtcgttgtgcccaaacacagacggtgaaacaacacgaccccgttaagacagtggatccagaaattggggggacatgggggcaaggacccagccccaaacatgaagcacgcgaatgggcaatgggagccacgaaggattggggaagggccacttagaacaccgggggattccatatcgccataggaccgatgagaacaaaggacacacgggggaacagttctcaaggacagacgaatacgattccgacaaagccgcagggaaagaaaaaagccgcgggcactgtgtgttaggagcaatgaatgacaacgcgaagaggcacactatacaccaggaacggcccgtcacgtttagtgttggcacacaacgaacacgtttggcgaatgacagaagcacaacacgaccacgagtgaacgattggccacgagggcacgataacacatgcacaggtagtgcccaggaagaacagggcccagggaggggacagacgaagggacgcgcgcacaaccacgagtaacaacgaattagacacccgagcaacaagggcggtacaccgctggtgcggtcagaagaatcaaacgaaagcgtccaggacaagtagctaccgagcagaggggttaacccaagagcactggacacataacaacacacaccgggggaagccgcaacgaaaaccgcaaagatagaaagcgcagacgggaacaaccacaacacaaagaacgagggacggaaatagagaccgaagagaaaggaaaaacggagaggagagaacatcacacagggggacacacagaacaaaacagaggcagagaggaccaccaatggaaatcgagacggaacacacgaccaaagggcaaggacgaagaggaagaagcgggaagaagagcaaaacacaagaggagggcgaacacagacacaacgacgaaaacaaaggcatcgacgaagaaac

SEQ ID NO: 720693 - DNA, 455 bp, Homo sapiens
  misc_feature (139)..(139): n is a, c, g, or t
  misc_feature (270)..(270): n is a, c, g, or t
gtacattgtatgggcttagacaaatgtatgatgatatctacaattatagaatcatacagaatagtttcactgccctaaaacttctctatgcttcacctgttcatccctttcttccctaatcccctggcaaccactttanaaaaaaaaattaggttcagggggtacatgtgcaggtaaactcggtgacaagggggtttgttatacagattatttagtgacccaggtactaagcctagtacccaatagttacttttctggtcctgtcccttntcccaccctccaccctcaggtaggccccagtatgttattcctttgtgtccatgttatttcactcccacttgtgagaacatggaatatttggtttcctgttcctatgttagtttgttaaggataatggcctccagccccatccatgttcctgcaaaggacatgatcttttctttggcaaccacttt

SEQ ID NO: 720694 - DNA, 1123 bp, Homo sapiens
ctactacacgacacagacttacaacactgagcacacgctggcctactgcgcttaacacgcggaaacccagcactgctctacaacacaacttacgaacgactcaacctctcaacggcccgcgctcaactctacgcacagcacggctgagtttcgttcagaggctgaaacccactgcaaccctacacactcctgcgcccacaaggcacaacacaaactgcacgcgggcaaactgcgcacaccaccgttacgttgcgccggaacgcgcccgaactcttcaagtcgtgcgctacagcaacgcctccgctcgcctttgtgccccggaaatttccaaggccctcgcgcacaaaaaaaccttggcggcccccccccacgagcacctcaaccttaccaccctcctccgtccccaccacgtccttgcaaacccgtgttgtggagggcttggtggtggtttttcccacacctttggggtcgccacctacccaccccttcggccaccctggccctccccacctttccctcccccccgctccctcgcaccttcctccccattcggccctcgctcaccctccacctcctccaccccgccaaccgccccggcctggcttctccccctccctccacctctcctccgaccccctccggccacaccccctaccccctttcctctcctccccggggccccttccccccccccttccctcccccccccccccccaccccccccccccccgccccccggcccccccctcccccttcccccgccccccaccctcaccccttaccccctgggccttcccccgccgcggcacgcccaacccccctggccttccccccgcccccccccttcccggcgcccctcgccccccttccccaccttggcggcctccacgcccttcaacccttggcggcgacctcccccacacccttcgcgccccttcggccccacaccccccctttctccccccacagcccgctccctctatccctcccctgtcccctcctcctccggcggcccacccccctcttcctccgccgcctaccaccgctcctccccaccgcccaacaacactcgcgcggccactctctgcaacccgcctccttttccctcctaaccgccccccta

SEQ ID NO: 720695 - DNA, 517 bp, Homo sapiens
ctgcttctccatggcacttattacattgacatatttatgtgtttattgtctacctcccctaactagaccaatagctcctcaagggcagggactgtttctgtgcactgctgaaatcctgtcactaaaaacaacggcacagagtatgaacttaaatgtttaactgtgttttcataatgatttaaaaaaaattccagctgggtgcggtggctcacgcctgtaatcccagcactttgggaggccgagatggatggatcacctgaggtcaggagttcaagaccagcctggccaacatggtgaaaccctgtctctgcaaaaaatacaaaaattagccaggtgtggtggcgggtgcctgctttcccagctacttgggaggctgaggcaggagaaccacttgaacccgggaggcagagattgcagtgagccgctccagcctgggtgagagagtgagactccatctcaaaaaaaaaaagaaataaggttggagaaaaacgcatgcaatggatcagggtgacgggtg

SEQ ID NO: 720696 - DNA, 104 bp, Homo sapiens
ctcgcgaacgtgttatccacagtgactataagatactctcgttgtgaaaactagcttcttatagtcactgtggattacagtaagttatctttctaccagatgta

SEQ ID NO: 720697 - DNA, 508 bp, Homo sapiens
taaatagcaagttttcggaagacatcttttttttatcctagatggacatatttaagttttcacggctgctggaagagatgacattaatggtctggtcatgaacgcgttcaaacacagcattatggagaggactacctcttcactccggtgcaggctccatcatatacctattattcggaaccagatatccgtcaacgccctcatactgcatgtacatgtctcggatgacgatgcccaaaccctccagaccgttgtcttgtccaccgacgccacctaggctctaattcttgcaccgctcactgcccacgtttgctcgttagtgctcgaggactaggtcgatgtgacgatacttgtactgcatacggtagcgctaagttaggaggttccgacgatcataaaggtaacgattgcgggctttttcttctggacgaagggcctggacatgatcctaattttttttgtggaatcccatgacccgtttattgaatccgtgctaccccattttctt

SEQ ID NO: 720698 - DNA, 499 bp, Homo sapiens
ttcccaccagcaagaccacgatagctgaaggctatgctattgaacactgtaactcaacttttacgtgctaccttatagatacatttataagtcaccataacaaccacttatttttcaggaacttggggcagatcctgtcctgttcaaaccagttgagactgccaacccttcaactgggcctgtacacatgcccaagaggtggccttttgacatcagagggccaaaaactccaccctcagatcatgttaacgccaccattttctgcacatatgtcatatgaaccccaattatgactgcatttttccccactgccaatcacctttccccatgcctcagaccaccctacttctctaacctataaatctctctaagcctcatctttggggaggtgaatttgagagccattctcccatctcctcactggacagccttgtgaataattcttctctcttttgcaaaacccatgtcacagtgattgatttactgtgtgagaacagaa

SEQ ID NO: 720699 - DNA, 1207 bp, Homo sapiens
gacccacgcgtccggaaggaaggaaggaaggaaggaaggaaggaaggaaggaaggaaggaaggaaggaaggggagagacgagagagaagcaataactgaatagaaaaacacgacagaaagacacgcagaacacgaacactactctggacacgaacacgaccgacaccggcacgaaagaaatgaacagacacgaacacgacaacacgaaacgacaacgaacagaaacgacacacgaaatgaatagaacagaagagaagagaagagaagagaaaggaagagatagagaagaacgagagacagagaagtagaagaagagatcaagtcttaagttttggttatcattataatcgagaatgtggttgagtcgcaggggggttgctcctcgttaatgctcatggtcgttggcgtgtgggcccatgttagtgttgcttctagacaatacagagtccgacttaagagcagtttgtacatgaccatgcgcaagcgacgtagagcaatggtctgggtaccgatttggcatcacagcgtgtggcaaggtaaatgccctggtcttcgcactgaaagaaggatatggcgtgttggacaacgcattggtcccgtagattcgcattggcgtggtagcgtgtgacggacgcttcgctctattagagcagggtctgtgcatcagtccttgtatgccaaggctccgcctgggactacccgacatgtatgacagttgctgtcccttcagcctcactccattttcacgtatccgtaggcctaaagacttgtgagtttgccaatcctgatgtacgaactagctgcatttagtctgcctctcgccaaggttgtccgcagcgtcccttctttactcaatacttagggaaagcaggtccaacaacagactatggtgatgcgagcacatctgcgtaccacactagacagtgagcccttgcggacagagactatctctacctcaggagggctctcagcacctagcgtatgtcacgcctgcccaacaatgctgagtacatcactgacacgaatggcgctgaactgctggcgccttgcacggaacccgagaattgagagcgcaggacgtggcaactagcagcacagactggaaccacctggccagtgggaaacccgtctaccaacccacacgccggcgcgtgggcaaaacccaaacgcgacgccacacacaacacacgcttccagaagacaccag

SEQ ID NO: 720700 - DNA, 312 bp, Homo sapiens
acggtctgctcgaacccttcataaacagacagtatcggtatggctcctctttcctctcccgtccctctcctttcttctttctccccatccctcctctttccttcccccttcattttggtcttcccttcctccaccttctctttcctttttttttttttttttttttttttttttttttttttttttttttttttttttttttttttttttttttctttttttttttattaaaggggggggggggggggggggggggagaggggaaaaaaaagggggggggggggggggggggggggggggggggggggggga

SEQ ID NO: 720701 - DNA, 182 bp, Homo sapiens
ctgtgagtgttgcatgctctccagtgcgggtgaactcccgcatgatgtctcggagtgacatctgaactccccgtcctccatcttgaccctggagctggtcccgttcatatagggtccacgcttgttccactcatgagtgagctgtcgctccagtgctccctgtccacgtccacctctgcccc

SEQ ID NO: 720702 - DNA, 237 bp, Homo sapiens
gcgagcagaactggtgtggatgagtacagaacatagtataagcaattttaaatgtgccagggagtgatcctatttagaagagtatcaacagtcatgaaacagtagataatgggtaacttgaattacatatctgtacatcagaagtatctttaaaagttggatacgagaaatattctcgctgatagcttttagtgaaataatgctctgtgtgagcaaatactgctattataccattct

SEQ ID NO: 720703 - DNA, 1331 bp, Homo sapiens
ccatgctgcctcgcggtggctatcgataagagcacaaacagagaagacacaacagaaagagaacaggaagcgagatgccgtgccccactggacgaccgctgcgaggattggtgcccgcgcccaaaagcgagggacgcgctttcctacccctccgatggggcggccactacgccccgcgatgtatttcttctcgccaagcccaccaagcggaaggggccaatggtcacccgccgcgacgggcctaaccaaagatctaaaagaggcttcccctcggaatccggggatctgattccttggaggctccccccctcttggtgtgcccccgcgggtggtatagatgcccagttcgttgctttatggccccatattccggtgttgtaccgagcgggccgcgcgtcccgttctgggaccaatccccaggaggaaataattgtttaacacacaaattctgggaaaacgcaaatgtgttatgtaagtagccttcttagacacaactgtataaagaaagggaggggatctcccccccgccgatccccacctgttttaaggggtaaaaagccttttttttaagagagtgaaatcaatttgctgggttgtttatatttcttgggacaccaccaacggaaattaatgtgggataattgaaattatgggagagctcctgacatgtctccgggtgttccagcttacaccatatcccaccagaatggggggtttttaatcttttgataatccctcattaatgacccaagccattatattaaataggccaatatatgggagatccagtgccccgcgcatattaatagtctcttggaacccatatgttaaatatacattctttatatgacccaacagttgttttttagataggaattggtttctcctaaaggaaaacccacactctctttgatccaaggcctcttcttcttgcccagaaattggtggtgccacactctctggtaacaatctctcctgtgtgggtaatctcctggttttctcctaaaatacacttgtgttactgtgcctgtgaaagattcaccagatttgaacacatagttagtggtgacagtggctgttgagttgtggaactggtgggcccgttatgtgacaccagctgagccccacagtgaagaatatacatggtgacattgatagcctcttaagggaaatttgcttcccaattttaagctgggaagtcaactgggataacttttaaaaagaattaccaataaccatggctttttagaatttcgttacgtatgttaagaattgtgtaccaaattgaaaagtctgtactgatcctccacccattaaatttcagtttatga

SEQ ID NO: 720704 - DNA, 1015 bp, Homo sapiens
gggtggcagccgctgtggtgcttggctctctgagctatccggtgccatccttgtcgctgcggcgaccctcgcatcaactgcagccatgaccgagcagatgacccttcgcgggacccttaagggccacaatggatgggtaacacagatcgccaccacaccgcagttcccggacatgatcctgtctgcgtctcgagacaagaccatcatcatgtggaagctgaccagagatgagaccaactatggcataccacagcgtgctctgagaggtcactcccacttcgttagtgatgttgttatctcctctgatggtcagtttgccctctcgggctcctgggacggaacgctgcgcctctgggatctcacaacgggcaccaccacaaggcgatttgtcggccacaccaaggatgtgttgagcgtggccttctcctctgacaaccggcagattgtctctgggtcccgagacaagaccataaagttatggaatactctgggtgtctgcaagtacacggtccaggatgagagtcattcagaatgggtgtcttgtgtccgcttctccccgaacagcagcaaccctatcatcgtctcctgcggatgggacaagctggtcaaggtgtggaatctggctaactgcaagctaaagaccaaccacattggccacactggctacctgaacacagtgactgtctctccagatggatccctctgtgcttctggaggcaaggatggccaggctatgctgtgggatctcaatgaaggcaagcacctctacactttagatggtggggacatcatcaatgccttgtgcttcagccccacattgtagatgaattgaagcaagaagttatcagcaccagcagcaaggcagagccaccccagtgtacctctttggcatggtctgctgatggccagactctgtttgctggctatacagacaacttggtgcgagtatggcaggtaactattggtacccgctaaaagttttatgacaaagtcttagaaataaactggctttctg

SEQ ID NO: 720705 - DNA, 144 bp, Homo sapiens
ggttgccggccgcgtgagctcgagatatgaatattagtgaggaagatacattctttctttttctttatttgagacagggactcagactgatccccaggctggagtgcggtggcgcagtcacggctcactgcagcctcaacctcc

SEQ ID NO: 720706 - DNA, 815 bp, Homo sapiens
  misc_feature (20)..(20): n is a, c, g, or t
  misc_feature (93)..(93): n is a, c, g, or t
  misc_feature (115)..(115): n is a, c, g, or t
  misc_feature (123)..(123): n is a, c, g, or t
  misc_feature (169)..(169): n is a, c, g, or t
  misc_feature (172)..(172): n is a, c, g, or t
  misc_feature (199)..(199): n is a, c, g, or t
  misc_feature (209)..(209): n is a, c, g, or t
  misc_feature (218)..(218): n is a, c, g, or t
  misc_feature (235)..(235): n is a, c, g, or t
  misc_feature (237)..(237): n is a, c, g, or t
  misc_feature (242)..(242): n is a, c, g, or t
  misc_feature (252)..(252): n is a, c, g, or t
  misc_feature (267)..(267): n is a, c, g, or t
  misc_feature (332)..(332): n is a, c, g, or t
  misc_feature (363)..(363): n is a, c, g, or t
  misc_feature (368)..(369): n is a, c, g, or t
  misc_feature (381)..(381): n is a, c, g, or t
  misc_feature (405)..(405): n is a, c, g, or t
  misc_feature (427)..(427): n is a, c, g, or t
  misc_feature (446)..(446): n is a, c, g, or t
  misc_feature (448)..(448): n is a, c, g, or t
  misc_feature (455)..(455): n is a, c, g, or t
  misc_feature (459)..(459): n is a, c, g, or t
  misc_feature (479)..(479): n is a, c, g, or t
  misc_feature (483)..(483): n is a, c, g, or t
  misc_feature (487)..(487): n is a, c, g, or t
  misc_feature (591)..(591): n is a, c, g, or t
  misc_feature (790)..(790): n is a, c, g, or t
tttgctggaattctgctgtnggtggggttttggctgatggacagggaaatctgcacaagtatttcgggtcacaaagaaggacgccccaggaancccgcactccctctagactacntccctggncaggacccggagccctccgcttctaggcactaaaaggaggctgtcnaangagggcaggctcccggccctgcctgtncaggctaatnaggtttgcnaagtctgtgccgccgcntnaaggnctcgggcgtnccttcctcccttgcngggatggggatggagaccaggagcacagccctgagcgtggtgggtcgcagacgcactgaggccangcgcggggaaaggaggacgcagggatttgtnttttnnaaaggagatgtnaggaagtgttatgaatcgagagtngcctttgctaaggtgctgcgcncgggcggagaccgggcggncntgctgcnaccncgcctcgcaccccccgcgcncctnatcngggtacagaagatagctcgagaacgtgctgtacttgttattattgcctccgtgagccttcccgccatccagcttcacatacacttcgtcccctgaatccaagtncagcaccacgctgttactggcgtagtcgtagttctggtcggcgtcctgtgcaatggcgctggcccggacctgcccgttcttgcagaggtccgcccacatgctggtgccgtcgccgccgcgcatgaggatgtggtaggtgaagaagtagatgccgcgcacctggcagctgaacttgcccgtggtggggtcatagtgattnctgaggttggtgaccacgtcatcga

SEQ ID NO: 720707 - DNA, 558 bp, Homo sapiens
  misc_feature (6)..(6): n is a, c, g, or t
tttttnggcctctatttcctggtgatgagatattcataattttatattaacccgagagctgacaacctcattaaactcatctattagtaataataattatggtcttttagattttcaacatattttcttttccaaaaagggattttcagaacaatcaacatattttttattggctataaatgaaaagaataattctttcttcctttccagtcagtatattttttattctttttcttgccttactgaattggttaagacttcagtaattggctgggtgcggtggctcacgcctgtaatcccagtactttgggaggctgaggtgggtggaccatctgaggtcagaagttggagaccagcctgaacaatatggtgaaaccctatgtctactgaaataccaaaaattagccggacatggcagcatgcgcccgtagtcccagctactcagggggctgagacaggggaactgcttgaacccaggaagcagagcttgtagtgagctgagattgcaccattgcactccagcctaggcaacaagagtgaaactccgtttcaaaaaaa

SEQ ID NO: 720708 - DNA, 1079 bp, Homo sapiens
gggtggcagccgctgtggtgcttggctctctgagctatccggtgccatccttgtcgctgcggcgaccctcgcatcaactgcagccatgaccgagcagatgacccttcgcgggacccttaagggccacaatggatgggtaacacagatcgccaccacaccgcagttcccggacatgatcctgtctgcgtctcgagacaagaccatcatcatgtggaagctgaccagagatgagaccaactatggcataccacagcgtgctctgagaggtcactcccacttcgttagtgatgttgttatctcctctgatggtcagtttgccctctcgggctcctgggacggaacgctgcgcctctgggatctcacaacgggcaccaccacaaggcgatttgtcggccacaccaaggatgtgttgagcgtggccttctcctctgacaaccggcagattgtctctgggtcccgagacaagaccataaagttatggaatactctgggtgtctgcaagtacacggtccaggatgagagtcattcagaatgggtgtcttgtgtccgcttctccccgaacagcagcaaccctatcatcgtctcctgcggatgggacaagctggtcaaggtgtggaatctggctaactgcaagctaaagaccaaccacattggccacactggctacctgaacacagtgactgtctctccagatggatccctctgtgcttctggaggcaaggatggccaggctatgctgtgggatctcaatgaaggcaagcacctctacactttagatggtggggacatcatcaatgccttgtgcttcagccccaaccgctactggctctgcgctgccactggccccagcatcaagatctgggacttggagggcaagatcattgtagatgaattgaagcaagaagttatcagcaccagcagcaaggcagagccaccccagtgtacctctttggcatggtctgctgatggccagactctgtttgctggctatacagacaacttggtgcgagtatggcaggtaactattggtacccgctaaaagttttatgacaaagtcttagaaataaactggctttctg

SEQ ID NO: 720709 - DNA, 713 bp, Homo sapiens
gccgccttggcctctcaaagtgctgggattacaggtgtgagccaccacgctcagccagtctcatgctctttaactactgagttgtattccactgtagaaatgtggcatgatttatatgttcaatgtcctcttgacggacatttaagtttcaatttttttttttggccttcacaaacgatgttacaatgaacatccttatagatgtatttggtagtatttatcccatggttttttctttctttttgggagacggggtttggctgtatctcccagcatggagtgcagtggcacaatcatagctcactgtaggctcaaactgggctcgggcgatcctcccgcctcagcctcccgagtagtgggacttcaagcactaaccaccaaccccaccagataatattaatgtttgggtgggtgggttggtagtttggtttttttggaggcggagtttcgcgctgtgttgcccaggctggagtgcagtggtgccgtctcggctcgctggacctccagcctctcaggttcgggcggttctcctgcctcggcctcccgagtggctgggatgtgcgggctcctcccaccagcccagctaatttttcttgtcttcagtagagatggggtttcataatgttggccaggctggtcttgaacccctggctcggtgatcctcccacgtagctccccggtgctgggattgcggcttgagcccccctcctgct

SEQ ID NO: 720710 - DNA, 494 bp, Homo sapiens
  misc_feature (4)..(4): n is a, c, g, or t
  misc_feature (13)..(13): n is a, c, g, or t
  misc_feature (31)..(31): n is a, c, g, or t
  misc_feature (95)..(95): n is a, c, g, or t
  misc_feature (99)..(100): n is a, c, g, or t
  misc_feature (107)..(107): n is a, c, g, or t
caanaaaaaagcnagccttttaatattttgncgcgggacggaaaacggcaacaccccgcccatttttataaaaaaaacggaggagccccccccanaatnnaaagaanttttttcactatttgacaaagatggcgaaggaacaataacaacaaaggaattgggaactgaaatgagaactcttggacagaatcccacaaaaacagagttacaggacatgattaacgaagcacaagctcatcggaatggcacaatagacttccctgaaactctgacaatgatggcaagaaaaatgaaagacacagacagtgaagaacaaattagagaaccattccgcccgtttaaaaaggatggcaacgcctaaattaaggctgcacaaccctaccatgtaatgacaaaacctgcacagaactaacaaatgaagaatttatgaaataaccacggaagcacaaattgaatgttatgcacaaaaaaaccatcaaaaagctccacaaatc

SEQ ID NO: 720711 - DNA, 1066 bp, Homo sapiens
  misc_feature (369)..(369): n is a, c, g, or t
ggaatctgccgaagactagaagtgtgaatcatgatggaacacgcacacagagcataaattatgagattcatccctgctactaattatggaataccaacattgctaacatgggatctagtgaagaagtagtccctcatcgttatttgcatggaagttcataaagtaccagcttctaattgaaactaactgagaactgtgaccattctgatctcaatggaagcctccacccggcagtgcatagcctgtgacaacgtcattagccattaagaaaaattcatcacacaattccttcttatctgaattgtccctaaccccatcattctttgtctttctcaaatattgcactgtgaacagatcataatggtaatnaataatatcttaatgacgcataacacacagcatatcattgcaccttcatctgcgataggatcaagtccgtatcgaaggcccatgtagcacagtcagccgacctgtaagtgccccgtgtagtaaatctactaccacgtagcaagttaaatgagagtctgcttcctacatagcaacgatggcagcatgagtccatagcaactacacctagaagcccccacggactacaagctaaaaacagtggactaacttacatcaatgttcattggcccctgaagaatcgtaatcccctagagatgtaacatactatctgttatgctgtaagcttatcacaaattagtgtttcatatatatgggatcacctactttacaggaactcctggatatagagtcgccatatttgcctcaatgtaggtttgcacccctatgcgtctgggtcaaaatagtagcgtatgcctgagccttcctcttcttttccgcgcggtcctggtcttttttcgccatttcttgcctgtctttgcccctgtgtaggaaagaatatcttatctcttccctgggctagcctttgtcgggttattgacccttgtggtttgctctgacaatggggcttaagcgtccttgaattgccgggcaggggttgccttattccgcttgtaacagcgcgggaatccggggggggttggaaagccgcgatgtaccg

SEQ ID NO: 720712 - DNA, 480 bp, Homo sapiens
  misc_feature (75)..(75): n is a, c, g, or t
  misc_feature (79)..(79): n is a, c, g, or t
  misc_feature (114)..(114): n is a, c, g, or t
  misc_feature (117)..(117): n is a, c, g, or t
  misc_feature (427)..(427): n is a, c, g, or t
atgagtgtgggagcacttcagctctgtaaggggccagcgttctgacctttaaccacatgaactaacctgcgtcanattngcagaaagtagcctgttaggacagcagctgctaangtntgccctggtattttagtggggagaaggctgggactcttcatggcatcaacacttgcatgctcctgaatctttgatcagagatgaggtgccatttttggcatttccaccgcgtctcgtggtagcctttaaaagtggtagaaagatgctgcctaattcccccgaggatgattgtcattccatgcaagcataaatgtgccgtgaggaagttttctcattccagtttctttggacttcgtaacattggaattgtttttccataatttccggcattccataaatatttgtcaaggacaaagaaaaggaatgtggntgtttatcctttcatatgaatgactttgtacacatgacttcctgccttcaata

SEQ ID NO: 720713 - DNA, 402 bp, Homo sapiens
taccctctctcctctttgttctctcattgttgttattttaataaatgctcagtagtctgtatcagagtctctggctcataggaatttggaaaatagaggttttgtagggaatcacttcgtaaagaaaccacatttggttgagtactttttttatatgttacatgtttatatgtcatttcctgtgggaaaagacatgaatgctttggaagacggtctatgacaagatttggaaagttggggcggctaagattcagtggacaaagctaaaacctgcagagcaatgaactctgggtggtagtggaattatgggtgattcttagttttttaatacgtttctgtattttccaaattttctaaaacaagtatatgttactttaataatcagaaaagacccaaacttta

SEQ ID NO: 720714 - DNA, 105 bp, Homo sapiens
acttcttataggacaaagtcccagtttctctggcagcatttcaatctttcccaattcatttcatttttctgggtaccgcagctcgcacattcgtacatccatggt

SEQ ID NO: 720715 - DNA, 199 bp, Homo sapiens
ggccgttagcagccagcatgtaattcccccttcctccagagtcacattgactccggaacgtggcgggtactgggctgaggagatccccaggcgatcccgaacctccgcctcaaatccagtaccaccagagtaaccaccctctgccccgatcccagctcgaccctattgatagtgtgctgcgctgctacgtgtgggatcc

SEQ ID NO: 720716 - DNA, 278 bp, Homo sapiens
gcaatgaaatttaagagagatcataagagagagactcaccacaaattgctccaacatgtgacaaatagttgcagaacacgagaatcgttcttcacaaaatcacacttgagtcttgaagagcccgctctgataccaattgattgttgcgctgcgctgctacgatccccaggcgatcccgaacctccgcctcaaatccagtaccaccagagtaaccaccctctgccccgatcccagctcgaccctattgatagtgtgctgcgctgctacgtgtgggatcc

SEQ ID NO: 720717 - DNA, 195 bp, Homo sapiens
agtgttgggccaggtgttaacccatgtccagtgctctcaagacgtgacttatcccattggtcacagtgggcactctactccactttatgtttttaaacgataataataccacatcactctgtggcagtacaccttcagcaatttcaaacaggacgtgataacaccacatgtacggggtaccgacgctcgagattc

SEQ ID NO: 720718 - DNA, 2270 bp, Homo sapiens
  misc_feature (1948)..(1948): n is a, c, g, or t
ggctgtgtgaagttatcatcagtgcaaatagccgagacgggaggggagtggagatggggaacagccgagatcagcattcatgggcatccacggtgccgaggtcacagaaggaactgacccgagagccgtcacagggcggccttaggttagacttgaaggagaacttccaggtggcagctgctgaggccaggacggattgacaggagacgcctgggccacgtgcccaggctcacgcctggaatcccagccgtctgggaggctgaggcgggtggatcacctgaggtcaggagtttgagaccagccggagcaacatggtgaaaccccatctccactaaaatcacagaaattagccgggcatggtggcgggtgcctataatcccacttattcggaggctgaggcaggagaatcgcttgaacccgggaggcggagcttgccgtgagccgagatcgcgccactgcactccagcctgggcaacacagcaaaactccatctcaaaaaaaataaaaataaaaaaagagacagctgacgtgctgtaactcagcaccatccgacagcggccaggcctgtgggcgcaggtgctggggacctccacacccctcccccggaggttcctggatgcttttctagtttttaaaaaaaacaaaacataaccaccctacagctcctcctgcaggacatcatgatagctgtgcttctgatttgccagatagcttgctatttatcctctccctgtcctgcagaccggaggtctgagatcaaggcatctcagggctgtgctccctctggaggctctaggggaggatccttcctgcctctcccagctcctgggggctccgggtgtccctgggcttgtagccgcatcactccagtctctgcctccatctccacgtggccttctcctctgtgtgtctcctcttctgtctcttagaaggacacctgccattgcatttagggcccaccctactccaggatgatcccatctccagatccttaattacatctgcaaagaaactttatccaaatgaggtcccattcccaggttctggggcttaggacttggacagatcttttggacgtcaccacccaacccattgcagttgtgtttgattctttctgagaggctctaggggaggatccttcccgcctcttccagctcctgggggctccaggcgtccctgggcttgtggccgcatcactccagtctctgcctccgtctccacgtggccttctcctctgtgtctgtctcctcttctgtctctgacggacgtatctcgttttgtctttaaaccaggtgactttttcagggaccccctccccagcgctgagctgtacgtcctgtgccggatcctgcatgactggccagacgacaaagtccacaagttactcagcagggtcgccgagagcgttctgagctcctgttgcctgctgtgtcccctgtgtcctgctgaaggatccccgcctggctggccaggactccagctctctgctgtctccctcaggggccggcctgctgctggtggagacgctcctcctagcaggcagacggctgctgtgacggtgccgtctaccaggcagggtctcagtccttctccgcactccagcctgcatcttcccatcttctgcacgatttccagtgtgtttcctccatgggacgccatcgctgccgctcacccctggatgcccacaggctatggagtggcagttctctgggcggcttccatctctcctgccttggtgcgtctgtaaacaccccccaccccgagcccaggcaggccagactcacacccaccccgtgaggccctcctgggcacatgctcactgcggttgtagggagctcagcgcatccacgtttcccccgtgctccgctcccagctgctgttcccggcctgtgtcccgaccctcagacctcagttcaccctctggtgcccacacagccccctttcctcnctggcccctccaccagggaatggctgggccaacctggggctgggctggggtgagccctttaactcacagccttgaccttagaggcactgaggttcaggaggcatctgcaaagcgagaaccggagcaggcctaggtgctgttttcacggcgcgtgcacccagcttacctgttcctgggctgggcgtcagtctcctatatttcagctgttttcctttttctgagacagactctggagtttagctcttcttacccagactggagtacaataatgcaatctcggctcactgcaacccagcctgggcgacagagtgagactccgtct

SEQ ID NO: 720719 - DNA, 279 bp, Homo sapiens
  misc_feature (113)..(113): n is a, c, g, or t
  misc_feature (117)..(117): n is a, c, g, or t
  misc_feature (193)..(193): n is a, c, g, or t
  misc_feature (242)..(242): n is a, c, g, or t
  misc_feature (245)..(245): n is a, c, g, or t
  misc_feature (267)..(267): n is a, c, g, or t
gacgctgagccgagaactggagcccgagctgcgccgccgccgctacgaatacgatcactgggacgcggccatccacggctccctctacatccttaggggctcagcccgttatnactnctcccatgagatccttcgggatgaagagtccttctttggggaacgccggattccccggggccggcgcatctccgtnatctgccgctccctccctgagggcatggggccaggggagtctggacagncgnccccagcctgctgacccccagntttctacagaca

SEQ ID NO: 720720 - DNA, 802 bp, Homo sapiens
gtagagagtggggacgtccggcttcgcagcggaagtgttcgttgtgccagcgactaagaagagaattaatatgggtgatgtagagaaaggcaagaagattatatgatgaagtgttcccagtgccacaccgttgcatcacagggcggcaagcacacacgagtgggccaaatctccatggtctctttgtggcggaagagccggtcaggcccctggatactcttacacagccgccacattatagaacaaaggcatcatctgggcgagaggatacacgtgatggagctatttgcagaatcccgcaagaaggtacatccctgtggaacaaagaatgatctctgtcggcattacgaagaaggaagaaagggcagacttagtagcttatctcaaaaaagctactactgcgtacatacatgccacctgccttattttattacaccaccagaaatgtctcatgactattttatgtgtaccatcctttactagatctcataccatcagaattcagatcatgaatgagtgacagaatatttgtgggcagccgtgattaaaataaagactgcttgtgcgttaactgactattgtcagtccatgaatttctagtagtaacccaattcagtaaatgctatcgctgttacgccttataagatctgatgaactcgtacgtaatgtccattctcacaagatgggactgcacttaaacttacgggccggtgcattaggatcattacggtctcggccactaatctgggcagggccggttaaaccacagtcacggttggacgcactgccaagacgggacaaa

SEQ ID NO: 720721 - DNA, 528 bp, Homo sapiens
tgtctctctcccctcccctacctgtgtgggccccctggccaagggttctcagcagcctctgctcaccgttctgagctcctgttgcctgctgtgtcccctgtgtcctgctgaaggatccccgcctggctggccaggactccagctctctgctgtctcccttgcaagccaggggccggcctgctgctggtggagacgctcctggatgaggagaagagggtggcgcagcgcgccctgatgcagtcactgaacatgctggtgcagactgaaggcaaggagcggagcctgggcgagtatcagtgcttgctggagctgcacggcttccaccaggtgcaggtggtgcacttggggggtgtcctggatgccatcttggccaccaaagtggccccctgaagcccaggcagcatgttcattatagggatgtcctcccccaggctgcaggtggaccgcccggtccccaagtaccataggacagtcacataggagcgtgtagtcgtgactgaataaagaaagcaaaagcctgaaaaaaaa

SEQ ID NO: 720722 - DNA, 785 bp, Homo sapiens
  misc_feature (724)..(724): n is a, c, g, or t
cctgtctcagatccctgatgcacaaattaggtcttattaataagtgtgggaaaagagaggagagtccaccttcttggtcaggcccctgaggcatgcatttctaccaaggaatatggacagatgacagaggagaagagcccaaagccaaatttatacatgagtgcaagtggatgcaaatttgttgctccctgcatctgtgtatatgctttctgttaaatacagaaagaaggaacaataggcttgcacacttttctaactacatgtttaagtggcagagtccaggctgtcgagtcacggttgggtttgaatctgactccaccagtaactttggttggaaaaaatcacttatcctctttaagcttgattttatttattttattttatgtaagagtgagacagtagtagcttaatagggttgcttttaaattagagtgaacatgaggcatttattcggtgccagacagataactgcctataacaggatgtgatcagcacaagtaacagaaaattagcctgacggtggcttaagcaatgggaatgtttatctcacatagcaaaaagtctgtaaatagatggttctagagttgggtggaagccaaaatgtcatcaggatttccttggaaccgtctgctttgccatcctcagtattgcagaatggctgctcctgcgccaagcatcattctgcaaatgatggtgtccacagccagagtggacagtagtacanggagccttctcattctgcccttatccgggaataaccgtcagcagctccaggcaacctcccc

SEQ ID NO: 720723 - DNA, 990 bp, Homo sapiens
  misc_feature (581)..(583): n is a, c, g, or t
  misc_feature (600)..(600): n is a, c, g, or t
  misc_feature (684)..(684): n is a, c, g, or t
  misc_feature (702)..(702): n is a, c, g, or t
  misc_feature (711)..(711): n is a, c, g, or t
  misc_feature (728)..(729): n is a, c, g, or t
  misc_feature (742)..(742): n is a, c, g, or t
  misc_feature (750)..(750): n is a, c, g, or t
  misc_feature (769)..(769): n is a, c, g, or t
  misc_feature (862)..(863): n is a, c, g, or t
  misc_feature (875)..(875): n is a, c, g, or t
attggacccccagagtttgaatgctctctcggagtatgccgccatctgaatttcttccaaggcccctgttaaagaaggcttgcaaaagtgctgccagaagggacaccgtccttttgcgggttggcacatgtccaccggattgcttcaccatgttcctgctcaagcatctagcacctcggatgaaccgtaccgggtgctcctttctttggaagatctctcgacaagctggtatcttttgcatgtccccatccagagcagatgatgcggtacactaggcatgccccagctgtgcacagtccctgcccgtagccttccggtggctatcttgtccccaacttttgtacactggcagtctgggcatcgcggatgttcacaatgtccacctgaggctgcgtcctcctatggaggggttgccaggatcttctgttttcgctctggatctgcgctgtagatctcctggatgatctgctcagccatagtttttggggaggggcttcccatgcccagactccttgatcattctacccccgtgatccctcggcccttgaaggtcttggcaatgatggctgttggctggtgcnnngcctggccaaaggcctngcacagctcctccacgctgtgtccatccacgatgatggcatgccaaccgaaggcctcgcaccgcttctggtagatgtccatctnggtgctgcagtggggccngggtcactntggcccaggcgattganngtctagaatgccnacaagttngtccagcttatagatgccngccgaaggccatggcctcccatacagagccctctgacagctccccgtctcccagcaagcatagactcggtagctggccttgtcgaagtatttnncgcgtgtagccnatcccacaagcgggccccgaggccctggctccagggagccacgtggccacgtcggtgaaagcattgtttcgggaccgggtgcccgtccaagtcggagctgatcttcctcaggttc

SEQ ID NO: 720724 - DNA, 2113 bp, Homo sapiens
gcctcgcggaggcgggactctggccgcctgttttttttgcatgccgcgctgcgcgcaccgcgggctccgggctcagaagtgcggacgcccggctcccggcgtggacgccatggtgctgtgcccggtgattgggaagctgctgcacaagcgcgtggtgctggccagcgcctccccacgccgtcaggagatcctcagcaacgcgggtctcaggtttgaggtggtcccctccaagtttaaagagaagctggacaaagcctccttcgctactccgtatgggtacgccatggagaccgccaagcagaaggccctggaggtggccaaccggctgtaccagaaagacctgcgggcccccgacgtggtcattggagcggacacgatcgtgacagtcggggggctgattctggagaagccggtggacaagcaggacgcctacaggatgctgtcccggttgagtgggagagaacacagcgtgttcacaggtgtcgcgatcgtccactgctccagcaaagaccatcagctggacaccagggtctcggaattctacgaggaaacgaaggtgaagttctcggagctgtccgaggagctgctctgggaatacgtccacagcggggagcccatggacaaagctggcggctacgggatccaggccctgggcggcatgctggtggagtccgtacacggggactttctgaacgtggtgggattcccgctgaaccacttctgcaagcagctggtgaagctctactacccgccccgcccggaggacctgcggcggagtgtcaagcacgactccatcccggccgcggacaccttcgaagacctcagtgacgtggaggggggtggctcggagcccactcagagggacgcgggcagccgcgatgagaaggccgaggcgggagaggcgggacaggccacggcagaggctgagtgtcacaggactcgggagaccctgcctccgttcccgacacgcctcctggagctgattgagggctttatgctatccaagggcctgctcaccgcttgcaaactgaaggtgttcgatttgttaaaagatgaagcaccccagaaggctgcggatattgccagcaaagtggacgcctctgcgtgtggaatggagaggcttctggacatctgtgctgccatggggctcctggagaagacagagcaaggttacagtaacacagagacagcgaacgtctacctggcatcggatggcgaatactctctgcacggcttcatcatgcacaataatgacctcacatggaacctctttacatacctggagtttgccatccgagagggaacaaaccagcaccacagggcgttggggaagaaggcggaagatctgttccaggatgcgtactaccagagcccggagacgcggctgaggttcatgcgggccatgcacggcatgacgaagctgactgcgtgccaggtggccacggccttcaatctgtcccgcttctcctccgcctgcgacgtgggaggctgcaccggtgcactggcccgagagctggcccgtgagtaccctcgtatgcaggtgactgtgtttgacctcccagacattatcgagctggccgcccacttccaaccccccggaccgcaggcagtgcagatccacttcgcagcaggtgactttttcagggaccccctccccagcgctgagctgtacgtcctgtgccggatcctgcatgactggccagacgacaaagtccacaagttactcagcagggtcgccgagagctgcaagccaggggccggcctgctgctggtggagacgctcctggatgaggagaagagggtggcgcagcgcgccctgatgcagtcactgaacatgctggtgcagactgaaggcaaggagcggagcctgggcgagtatcagtgcttgctggagctgcacggcttccaccaggtgcaggtggtgcacttggggggtgtcctggatgccatcttggccaccaaagtggccccctgaagcccaggcagcatgttcattatagggatgtcctcccccaggctgcaggtggaccgcccggtccccaagtaccataggacagtcacataggagcgtgtagtcgtgactgaataaagaaagcaaaagcctgaaaaaaaa

SEQ ID NO: 720725 - DNA, 299 bp, Homo sapiens
accgccttgccgctcacttaggtgcttcgcgagcgataggccgaggcctaggccgccgagttcccgtgtagtgggtttttccacccgcgtgaagcgatcgaaaatcgtgatgagctgatcttcggggattccctttcccgagtcggaaacctgaatgcgcgcccgccccgcgaatcgggaaaggcataccgtgttcttcctccgttcggcgtgaacttggccgcgttcgcgaggaggttccagacgatctgctgaattcgcacggcatccgcgcagataaacgagctcggagagccgag

SEQ ID NO: 720726 - DNA, 337 bp, Homo sapiens
tacaattttatttgtctgtgatctcacgacgaatttcgttactctggacgttgaagttagggaatgtcatttgacagctttctatcagagcattattgtccacaatttgagttacttatgattttctcgatcctctgcccttataggagataccatgtctctgtcattgatcctgtagtcacagtccctattttgagtacagatcttttcttgtgtactgtgttggccacctctgtttgcatcgagttatttgcattcagcctgatgttgcagacaactccgttatagttggacagttcctgcttacgtgctacttgccattaccttgcctattttc

SEQ ID NO: 720727 - DNA, 2253 bp, Homo sapiens
gcctcgcggaggcgggactctggccgcctgttttttttgcatgccgcgctgcgcgcaccgcgggctccgggctcagaagtgcggacgcccggctcccggcgtggacgccatggtgctgtgcccggtgattgggaagctgctgcacaagcgcgtggtgctggccagcgcctccccacgccgtcaggagatcctcagcaacgcgggtctcaggtttgaggtggtcccctccaagtttaaagagaagctggacaaagcctccttcgctactccgtatgggtacgccatggagaccgccaagcagaaggccctggaggtggccaaccggctgtaccagaaagacctgcgggcccccgacgtggtcattggagcggacacgatcgtgacagtcggggggctgattctggagaagccggtggacaagcaggacgcctacaggatgctgtcccggttgagtgggagagaacacagcgtgttcacaggtgtcgcgatcgtccactgctccagcaaagaccatcagctggacaccagggtctcggaattctacgaggaaacgaaggtgaagttctcggagctgtccgaggagctgctctgggaatacgtccacagcggggagcccatggacaaagctggcggctacgggatccaggccctgggcggcatgctggtggagtccgtacacggggactttctgaacgtggtgggattcccgctgaaccacttctgcaagcagctggtgaagctctactacccgccccgcccggaggacctgcggcggagtgtcaagcacgactccatcccggccgcggacaccttcgaagacctcagtgacgtggaggggggtggctcggagcccactcagagggacgcgggcagccgcgatgagaaggccgaggcgggagaggcgggacaggccacggcagaggctgagtgtcacaggactcgggagaccctgcctccgttcccgacacgcctcctggagctgattgagggctttatgctatccaagggcctgctcaccgcttgcaaactgaaggtgttcgatttgttaaaagatgaagcaccccagaaggctgcggatattgccagcaaagtggacgcctctgcgtgtggaatggagaggcttctggacatctgtgctgccatggggctcctggagaagacagagcaaggttacaggacccagcgggttttgctctgaggatctttgcaggtggaagtcactgagggaaggtgacctggagcctgggcagagcaaggaaggagggccacaccttctgtccctctgccctcaggaatgctgcttttcccgaaagggttaacacagagacagcgaacgtctacctggcatcggatggcgaatactctctgcacggcttcatcatgcacaataatgacctcacatggaacctctttacatacctggagtttgccatccgagagggaacaaaccagcaccacagggcgttggggaagaaggcggaagatctgttccaggatgcgtactaccagagcccggagacgcggctgaggttcatgcgggccatgcacggcatgacgaagctgactgcgtgccaggtggccacggccttcaatctgtcccgcttctcctccgcctgcgacgtgggaggctgcaccggtgcactggcccgagagctggcccgtgagtaccctcgtatgcaggtgactgtgtttgacctcccagacattatcgagctggccgcccacttccaaccccccggaccgcaggcagtgcagatccacttcgcagcaggtgactttttcagggaccccctccccagcgctgagctgtacgtcctgtgccggatcctgcatgactggccagacgacaaagtccacaagttactcagcagggtcgccgagagctgcaagccaggggccggcctgctgctggtggagacgctcctggatgaggagaagagggtggcgcagcgcgccctgatgcagtcactgaacatgctggtgcagactgaaggcaaggagcggagcctgggcgagtatcagtgcttgctggagctgcacggcttccaccaggtgcaggtggtgcacttggggggtgtcctggatgccatcttggccaccaaagtggccccctgaagcccaggcagcatgttcattatagggatgtcctcccccaggctgcaggtggaccgcccggtccccaagtaccataggacagtcacataggagcgtgtagtcgtgactgaataaagaaagcaaaagcctgaaaaaaaa

SEQ ID NO: 720728 - DNA, 2205 bp, Homo sapiens
gcctcgcggaggcgggactctggccgcctgttttttttgcatgccgcgctgcgcgcaccgcgggctccgggctcagaagtgcggacgcccggctcccggcgtggacgccatggtgctgtgcccggtgattgggaagctgctgcacaagcgcgtggtgctggccagcgcctccccacgccgtcaggagatcctcagcaacgcgggtctcaggtttgaggtggtcccctccaagtttaaagagaagctggacaaagcctccttcgctactccgtatgggtacgccatggagaccgccaagcagaaggccctggaggtggccaaccggctgtaccagaaagacctgcgggcccccgacgtggtcattggagcggacacgatcgtgacagtcggggggctgattctggagaagccggtggacaagcaggacgcctacaggatgctgtcccggttgagtgggagagaacacagcgtgttcacaggtgtcgcgatcgtccactgctccagcaaagaccatcagctggacaccagggtctcggaattctacgaggaaacgaaggtgaagttctcggagctgtccgaggagctgctctgggaatacgtccacagcggggagcccatggacaaagctggcggctacgggatccaggccctgggcggcatgctggtggagtccgtacacggggactttctgaacgtggtgggattcccgctgaaccacttctgcaagcagctggtgaagctctactacccgccccgcccggaggacctgcggcggagtgtcaagcacgactccatcccggccgcggacaccttcgaagacctcagtgacgtggaggggggtggctcggagcccactcagagggacgcgggcagccgcgatgagaaggccgaggcgggagaggcgggacaggccacggcagaggctgagtgtcacaggactcgggagaccctgcctccgttcccgacacgcctcctggagctgattgagggctttatgctatccaagggcctgctcaccgcttgcaaactgaaggtgttcgatttgttaaaagatgaagcaccccagaaggctgcggatattgccagcaaagtggacgcctctgcgtgtggaatggagaggcttctggacatctgtgctgccatggggctcctggagaagacagagcaaggttacagtaacacagagacagcgaacgtctacctggcatcggatggcgaatactctctgcacggcttcatcatgcacaataatgacctcacatggaacctctttacatacctggagtttgccatccgagagggaacaaaccagcaccacagggcgttggggaagaaggcggaagatctgttccaggatgcgtactaccagagcccggagacgcggctgaggttcatgcgggccatgcacggcatgacgaagctgactgcgtgccaggtggccacggccttcaatctgtcccgcttctcctccgcctgcgacgtgggaggctgcaccggtgcactggcccgagagctggcccgtgagtaccctcgtatgcaggtgactgtgtttgacctcccagacattatcgagctggccgcccacttccaaccccccggaccgcaggcagtgcagatccacttcgcagcaggtgactttttcagggaccccctccccagcgctgagctgtacgtcctgtgccggatcctgcatgactggccagacgacaaagtccacaagttactcagcagggtcgccgagagcgttctgagctcctgttgcctgctgtgtcccctgtgtcctgctgaaggatccccgcctggctggccaggactccagctctctgctgtctcccttgcaagccaggggccggcctgctgctggtggagacgctcctggatgaggagaagagggtggcgcagcgcgccctgatgcagtcactgaacatgctggtgcagactgaaggcaaggagcggagcctgggcgagtatcagtgcttgctggagctgcacggcttccaccaggtgcaggtggtgcacttggggggtgtcctggatgccatcttggccaccaaagtggccccctgaagcccaggcagcatgttcattatagggatgtcctcccccaggctgcaggtggaccgcccggtccccaagtaccataggacagtcacataggagcgtgtagtcgtgactgaataaagaaagcaaaagcctgaaaaaaaa

SEQ ID NO: 720729 - DNA, 560 bp, Homo sapiens
aagtagaacaccactcagaatgcgtgcgtgcgtgcacacgttgcgttgtacatgagtgtgagctgatttgcacccacaccctctgtaagtgcctgctgtggttttggttttgattattccgttaatgctgagtctgtttcacaaacgagattagcagaattaattattgaagatgcagtatgctttatggttttaataacactgttaaaaactaaacaaggaagttaaatatgttgatgattatcggtgactgctcaccacacagcatccctcaggccgagtcagttggcccagtgactcccacatcacaaactgccctttcttggtcagaagaagcagagtggagccttctcatccccacgcgcgcagctgtggggccccgtggtcacctggccacatgggagtttgcatactgagtggttcatcttttccaatgtgttgtgtcctttaatttacatttatatttcattgccctttctaatgatcagaacagcacatcttgttatagaaaattaggaaaataaataaaattacagtaaaattacacaaacacaacaaaa

SEQ ID NO: 720730 - DNA, 178 bp, Homo sapiens
  misc_feature (50)..(50): n is a, c, g, or t
  misc_feature (145)..(145): n is a, c, g, or t
aggatctcacactgggtcgagtctagaattggcatcatgggtagcagctntggaaggaagcataagaaagggacacacgaggactccacacagccccaatgtcactttccaacaacaaatattctctttaatttctgagagtatncaaaggagtttaaccccattcagtggatgatac

SEQ ID NO: 720731 - DNA, 383 bp, Homo sapiens
aaactacatactagtgtggctatatatgacaaaatgcagtcacacaggaaatctgctaacagagcagtataatatatgctatagaaataacctatgtaaggctgggcaaggtggctcacatctgtaatcccagcactttgggaggccaagatgggcagatcatctgaggtcaggagttagagaccagcctggccaacatggggaaaccctgtctctactaaaaatacaaaaataagctgggcgtggtggcacatgcctgtaatcccagctaatgggaaggctaaggcaggacacatcacttggaacctggggacacggaggttgcagtgatccaggatcgcactagtgtactgaggcctgggcaaaagagcaagactccatct

SEQ ID NO: 720732 - DNA, 1990 bp, Homo sapiens
gcctcgcggaggcgggactctggccgcctgttttttttgcatgccgcgctgcgcgcaccgcgggctccgggctcagaagtgcggacgcccggctcccggcgtggacgccatggtgctgtgcccggtgattgggaagctgctgcacaagcgcgtggtgctggccagcgcctccccacgccgtcaggagatcctcagcaacgcgggtctcaggtttgaggtggtcccctccaagtttaaagagaagctggacaaagcctccttcgctactccgtatgggtacgccatggagaccgccaagcagaaggccctggaggtggccaaccggctgtaccagaaagacctgcgggcccccgacgtggtcattggagcggacacgatcgtgacagtcggggggctgattctggagaagccggtggacaagcaggacgcctacaggatgctgtcccggttgagtgggagagaacacagcgtgttcacaggtgtcgcgatcgtccactgctccagcaaagaccatcagctggacaccagggtctcggaattctacgaggaaacgaaggtgaagttctcggagctgtccgaggagctgctctgggaatacgtccacagcggggagcccatggacaaagctggcggctacgggatccaggccctgggcggcatgctggtggagtccgtacacggggactttctgaacgtggtgggattcccgctgaaccacttctgcaagcagctggtgaagctctactacccgccccgcccggaggacctgcggcggagtgtcaagcacgactccatcccggccgcggacaccttcgaagacctcagtgacgtggaggggggtggctcggagcccactcagagggacgcgggcagccgcgatgagaaggccgaggcgggagaggcgggacaggccacggcagaggctgagtgtcacaggactcgggagaccctgcctccgttcccgacacgcctcctggagctgattgagggctttatgctatccaagggcctgctcaccgcttgcaaactgaaggtgttcgatttgttaaaagatgaagcaccccagaaggctgcggatattgccagcaaagtggacgcctctgcgtgtggaatggagaggcttctggacatctgtgctgccatggggctcctggagaagacagagcaaggttacagtaacacagagacagcgaacgtctacctggcatcggatggcgaatactctctgcacggcttcatcatgcacaataatgacctcacatggaacctctttacatacctggagtttgccatccgagagggaacaaaccagcaccacagggcgttggggaagaaggcggaagatctgttccaggatgcgtactaccagagcccggagacgcggctgaggttcatgcgggccatgcacggcatgacgaagctgactgcgtgccaggtggccacggccttcaatctgtcccgcttctcctccgcctgcgacgtgggaggctgcaccggtgcactggcccgagagctggcccgtgagtaccctcgtatgcaggtgactgtgtttgacctcccagacattatcgagctggccgcccacttccaaccccccggaccgcaggcagtgcagatccacttcgcagcaggtgactttttcagggaccccctccccagcgctgagctgtacgtcctgtgccggatcctgcatgactggccagacgacaaagtccacaagttactcagcagggtcgccgagagctgcaagccaggggccggcctgctgctggtggagacgctcctggatgaggagaagagggtggcgcagcgcgccctgatgcagtcactgaacatgctggtgcagactgaaggcaaggagcggagcctgggcgagtatcagtgcttgctggagctgcaggtggaccgcccggtccccaagtaccataggacagtcacataggagcgtgtagtcgtgactgaataaagaaagcaaaagcctgaaaaaaaa

SEQ ID NO: 720733 - DNA, 2660 bp, Homo sapiens
  misc_feature (2338)..(2338): n is a, c, g, or t
gcctcgcggaggcgggactctggccgcctgttttttttgcatgccgcgctgcgcgcaccgcgggctccgggctcagaagtgcggacgcccggctcccggcgtggacgccatggtgctgtgcccggtgattgggaagctgctgcacaagcgcgtggtgctggccagcgcctccccacgccgtcaggagatcctcagcaacgcgggtctcaggtttgaggtggtcccctccaagtttaaagagaagctggacaaagcctccttcgctactccgtatgggtacgccatggagaccgccaagcagaaggccctggaggtggccaaccggctgtaccagaaagacctgcgggcccccgacgtggtcattggagcggacacgatcgtgacagtcggggggctgattctggagaagccggtggacaagcaggacgcctacaggatgctgtcccggttgagtgggagagaacacagcgtgttcacaggtgtcgcgatcgtccactgctccagcaaagaccatcagctggacaccagggtctcggaattctacgaggaaacgaaggtgaagttctcggagctgtccgaggagctgctctgggaatacgtccacagcggggagcccatggacaaagctggcggctacgggatccaggccctgggcggcatgctggtggagtccgtacacggggactttctgaacgtggtgggattcccgctgaaccacttctgcaagcagctggtgaagctctactacccgccccgcccggaggacctgcggcggagtgtcaagcacgactccatcccggccgcggacaccttcgaagacctcagtgacgtggaggggggtggctcggagcccactcagagggacgcgggcagccgcgatgagaaggccgaggcgggagaggcgggacaggccacggcagaggctgagtgtcacaggactcgggagaccctgcctccgttcccgacacgcctcctggagctgattgagggctttatgctatccaagggcctgctcaccgcttgcaaactgaaggtgttcgatttgttaaaagatgaagcaccccagaaggctgcggatattgccagcaaagtggacgcctctgcgtgtggaatggagaggcttctggacatctgtgctgccatggggctcctggagaagacagagcaaggttacagtaacacagagacagcgaacgtctacctggcatcggatggcgaatactctctgcacggcttcatcatgcacaataatgacctcacatggaacctctttacatacctggagtttgccatccgagagggaacaaaccagcaccacagggcgttggggaagaaggcggaagatctgttccaggatgcgtactaccagagcccggagacgcggctgaggttcatgcgggccatgcacggcatgacgaagctgactgcgtgccaggtggccacggccttcaatctgtcccgcttctcctccgcctgcgacgtgggaggctgcaccggtgcactggcccgagagctggcccgtgagtaccctcgtatgcaggtgactgtgtttgacctcccagacattatcgagctggccgcccacttccaaccccccggaccgcaggcagtgcagatccacttcgcagcaggtgactttttcagggaccccctccccagcgctgagctgtacgtcctgtgccggatcctgcatgactggccagacgacaaagtccacaagttactcagcagggtcgccgagagctgcaagccaggggccggcctgctgctggtggagacgctcctggatgaggagaagagggtggcgcagcgcgccctgatgcagtcactgaacatgctggtgcagactgaaggcaaggagcggagcctcctagcaggcagacggctgctgtgacggtgccgtctaccaggcagggtctcagtccttctccgcactccagcctgcatcttcccatcttctgcacgatttccagtgtgtttcctccatgggacgccatcgctgccgctcacccctggatgcccacaggctatggagtggcagttctctgggcggcttccatctctcctgccttggtgcagagactgtcacgagcgggacctccccagcccctgctgcggggctgaaatgcgtctgtaaacaccccccaccccgagcccaggcaggccagactcacacccaccccgtgaggccctcctgggcacatgctcactgcggttgtagggagctcagcgcatccacgtttcccccgtgctccgctcccagctgctgttcccggcctgtgtcccgaccctcagacctcagttcaccctctggtgcccacacagccccctttcctcnctggcccctccaccagggaatggctgggccaacctggggctgggctggggtgagccctttaactcacagccttgaccttagaggcactgaggttcaggaggcatctgcaaagcgagaaccggagcaggcctaggtgctgttttcacggcgcgtgcacccagcttacctgttcctgggctgggcgtcagtctcctatatttcagctgttttcctttttctgagacagactctggagtttagctcttcttacccagactggagtacaataatgcaatctcggctcactgcaacccagcctgggcgacagagtgagactccgtct

SEQ ID NO: 720734 - DNA, 2661 bp, Homo sapiens
  misc_feature (2339)..(2339): n is a, c, g, or t
gcctcgcggaggcgggactctggccgcctgttttttttgcatgccgcgctgcgcgcaccgcgggctccgggctcagaagtgcggacgcccggctcccggcgtggacgccatggtgctgtgcccggtgattgggaagctgctgcacaagcgcgtggtgctggccagcgcctccccacgccgtcaggagatcctcagcaacgcgggtctcaggtttgaggtggtcccctccaagtttaaagagaagctggacaaagcctccttcgctactccgtatgggtacgccatggagaccgccaagcagaaggccctggaggtggccaaccggctgtaccagaaagacctgcgggcccccgacgtggtcattggagcggacacgatcgtgacagtcggggggctgattctggagaagccggtggacaagcaggacgcctacaggatgctgtcccggttgagtgggagagaacacagcgtgttcacaggtgtcgcgatcgtccactgctccagcaaagaccatcagctggacaccagggtctcggaattctacgaggaaacgaaggtgaagttctcggagctgtccgaggagctgctctgggaatacgtccacagcggggagcccatggacaaagctggcggctacgggatccaggccctgggcggcatgctggtggagtccgtacacggggactttctgaacgtggtgggattcccgctgaaccacttctgcaagcagctggtgaagctctactacccgccccgcccggaggacctgcggcggagtgtcaagcacgactccatcccggccgcggacaccttcgaagacctcagtgacgtggaggggggtggctcggagcccactcagagggacgcgggcagccgcgatgagaaggccgaggcgggagaggcgggacaggccacggcagaggctgagtgtcacaggactcgggagaccctgcctccgttcccgacacgcctcctggagctgattgagggctttatgctatccaagggcctgctcaccgcttgcaaactgaaggtgttcgatttgttaaaagatgaagcaccccagaaggctgcggatattgccagcaaagtggacgcctctgcgtgtggaatggagaggcttctggacatctgtgctgccatggggctcctggagaagacagagcaaggttacagtaacacagagacagcgaacgtctacctggcatcggatggcgaatactctctgcacggcttcatcatgcacaataatgacctcacatggaacctctttacatacctggagtttgccatccgagagggaacaaaccagcaccacagggcgttggggaagaaggcggaagatctgttccaggatgcgtactaccagagcccggagacgcggctgaggttcatgcgggccatgcacggcatgacgaagctgactgcgtgccaggtggccacggccttcaatctgtcccgcttctcctccgcctgcgacgtgggaggctgcaccggtgcactggcccgagagctggcccgtgagtaccctcgtatgcaggtgactgtgtttgacctcccagacattatcgagctggccgcccacttccaaccccccggaccgcaggcagtgcagatccacttcgcagcaggtgactttttcagggaccccctccccagcgctgagctgtacgtcctgtgccggatcctgcatgactggccagacgacaaagtccacaagttactcagcagggtcgccgagagcgttctgagctcctgttgcctgctgtgtcccctgtgtcctgctgaaggatccccgcctggctggccaggactccagctctctgctgtctccctcaggggccggcctgctgctggtggagacgctcctcctagcaggcagacggctgctgtgacggtgccgtctaccaggcagggtctcagtccttctccgcactccagcctgcatcttcccatcttctgcacgatttccagtgtgtttcctccatgggacgccatcgctgccgctcacccctggatgcccacaggctatggagtggcagttctctgggcggcttccatctctcctgccttggtgcagagactgtcacgagcgggacctccccagcccctgctgcggggctgaaatgcgtctgtaaacaccccccaccccgagcccaggcaggccagactcacacccaccccgtgaggccctcctgggcacatgctcactgcggttgtagggagctcagcgcatccacgtttcccccgtgctccgctcccagctgctgttcccggcctgtgtcccgaccctcagacctcagttcaccctctggtgcccacacagccccctttcctcnctggcccctccaccagggaatggctgggccaacctggggctgggctggggtgagccctttaactcacagccttgaccttagaggcactgaggttcaggaggcatctgcaaagcgagaaccggagcaggcctaggtgctgttttcacggcgcgtgcacccagcttacctgttcctgggctgggcgtcagtctcctatatttcagctgttttcctttttctgagacagactctggagtttagctcttcttacccagactggagtacaataatgcaatctcggctcactgcaacccagcctgggcgacagagtgagactccgtct

SEQ ID NO: 720735 - DNA, 141 bp, Homo sapiens
  misc_feature (24)..(24): n is a, c, g, or t
  misc_feature (31)..(31): n is a, c, g, or t
  misc_feature (113)..(113): n is a, c, g, or t
gaaaagatccaggcgtggtggcanatgcctntaatcccagctgctcaggaggctgaggcaggagcaattgcttgaacccaagaggcggaggttgtggtgagtccgagattgcnccgtactccagcttgggcaacgagcaaa

SEQ ID NO: 720736 - DNA, 2609 bp, Homo sapiens
  misc_feature (2287)..(2287): n is a, c, g, or t
gcctcgcggaggcgggactctggccgcctgttttttttgcatgccgcgctgcgcgcaccgcgggctccgggctcagaagtgcggacgcccggctcccggcgtggacgccatggtgctgtgcccggtgattgggaagctgctgcacaagcgcgtggtgctggccagcgcctccccacgccgtcaggagatcctcagcaacgcgggtctcaggtttgaggtggtcccctccaagtttaaagagaagctggacaaagcctccttcgctactccgtatgggtacgccatggagaccgccaagcagaaggccctggaggtggccaaccggctgtaccagaaagacctgcgggcccccgacgtggtcattggagcggacacgatcgtgacagtcggggggctgattctggagaagccggtggacaagcaggacgcctacaggatgctgtcccggttgagtgggagagaacacagcgtgttcacaggtgtcgcgatcgtccactgctccagcaaagaccatcagctggacaccagggtctcggaattctacgaggaaacgaaggtgaagttctcggagctgtccgaggagctgctctgggaatacgtccacagcggggagcccatggacaaagctggcggctacgggatccaggccctgggcggcatgctggtggagtccgtacacggggactttctgaacgtggtgggattcccgctgaaccacttctgcaagcagctggtgaagctctactacccgccccgcccggaggacctgcggcggagtgtcaagcacgactccatcccggccgcggacaccttcgaagacctcagtgacgtggaggggggtggctcggagcccactcagagggacgcgggcagccgcgatgagaaggccgaggcgggagaggcgggacaggccacggcagaggctgagtgtcacaggactcgggagaccctgcctccgttcccgacacgcctcctggagctgattgagggctttatgctatccaagggcctgctcaccgcttgcaaactgaaggtgttcgatttgttaaaagatgaagcaccccagaaggctgcggatattgccagcaaagtggacgcctctgcgtgtggaatggagaggcttctggacatctgtgctgccatggggctcctggagaagacagagcaaggttacagtaacacagagacagcgaacgtctacctggcatcggatggcgaatactctctgcacggcttcatcatgcacaataatgacctcacatggaacctctttacatacctggagtttgccatccgagagggaacaaaccagcaccacagggcgttggggaagaaggcggaagatctgttccaggatgcgtactaccagagcccggagacgcggctgaggttcatgcgggccatgcacggcatgacgaagctgactgcgtgccaggtggccacggccttcaatctgtcccgcttctcctccgcctgcgacgtgggaggctgcaccggtgcactggcccgagagctggcccgtgagtaccctcgtatgcaggtgactgtgtttgacctcccagacattatcgagctggccgcccacttccaaccccccggaccgcaggcagtgcagatccacttcgcagcaggtgactttttcagggaccccctccccagcgctgagctgtacgtcctgtgccggatcctgcatgactggccagacgacaaagtccacaagttactcagcagggtcgccgagagcgttctgagctcctgttgcctgctgtgtcccctgtgtcctgctgaaggatccccgcctggctggccaggactccagctctctgctgtctccctcaggggccggcctgctgctggtggagacgctcctcctagcaggcagacggctgctgtgacggtgccgtctaccaggcagggtctcagtccttctccgcactccagcctgcatcttcccatcttctgcacgatttccagtgtgtttcctccatgggacgccatcgctgccgctcacccctggatgcccacaggctatggagtggcagttctctgggcggcttccatctctcctgccttggtgcgtctgtaaacaccccccaccccgagcccaggcaggccagactcacacccaccccgtgaggccctcctgggcacatgctcactgcggttgtagggagctcagcgcatccacgtttcccccgtgctccgctcccagctgctgttcccggcctgtgtcccgaccctcagacctcagttcaccctctggtgcccacacagccccctttcctcnctggcccctccaccagggaatggctgggccaacctggggctgggctggggtgagccctttaactcacagccttgaccttagaggcactgaggttcaggaggcatctgcaaagcgagaaccggagcaggcctaggtgctgttttcacggcgcgtgcacccagcttacctgttcctgggctgggcgtcagtctcctatatttcagctgttttcctttttctgagacagactctggagtttagctcttcttacccagactggagtacaataatgcaatctcggctcactgcaacccagcctgggcgacagagtgagactccgtct

SEQ ID NO: 720737 - DNA, 126 bp, Homo sapiens
gacgatgtattcacttgccaaagctgggacagattgagcattaaaaggatcaggaggctgagtgtggtagctcccagcaccaggtaggaatcaagggatgtgtgtgctccttctaaagaaccaacg

SEQ ID NO: 720738 - DNA, 1173 bp, Homo sapiens
cctccaagtcccagatcatgtctctgtggaggtctggtctccaagatgcccccagaaaaagtgcagctggctctatgtcgacattaccccaacacctagaggcgatcttctgggtcactggctggagagccagacctgggcagttcctggtcggctccagacgccttctgctgcaacttggctcagtgccctacttatcagcacactgtccagcacctatcagagcctcggtgggcagagcagggggcaggggagcaccatcttgcaacacatcagacacccttgagagcatctcatcagagggaccccctgaagctggtggccacattacagacaaatacttcaaggcagagaaaacagctagttcatggaacagttccgccacttgcccaatgccttaacactggaagccggcacgcaactcaagtcaaagacaggcttgcgagaggctgcagcaccgagataggggagatccaacatactccgagcacgccctgcagacagtgcgcgccttgaacgctcggcccaaggatggtctcttgaacagccttgcatacgaacactcctagctaatagggcactgtgacccaaacatcgagcgccctgggcccctagcccactcgccactgaagaaccacttgggacgcaagacaaaacagcgccagcccccacacgccaacacaagctggcttgaccaacagacgatacccaagcactaccaggcacacacagagcaagcaagcaagagctggcacaggggaaaatgcggcgacaccgagaacgaagcgccacagccatgggaccaccccaacatacaagaggaaccaagcggagatgccaaaagaaccacgagcgggaacaccagacaaaaagacaccacaacaatccaagacagaacagccacaacggcgcgcagaacaagaccacggaagcaccaccaaggaaaaaccacacaagagcacaaccagaacaaacggcaaagcactgaggagacgctcacaggcaccgacagggcacgcgaacaaaccccacagcgcaccctccagaaagacacccacacagaagtgagaaacaatagacagaagcaccgccaagggacagcagacaaaaaaaaaacaaaaccaacaatacccgcacaacgcgcacaacacagaacaggcacaaggcacaagc

SEQ ID NO: 720739 - DNA, 101 bp, Homo sapiens
ccccccccccccccctttttttaaacaaggggttcttgggcccgggaaaattttccgtttttggaatttttaaacctttaaaaaaattgggaaagggggga

SEQ ID NO: 720740 - DNA, 1800 bp, Homo sapiens
atggaccccgagcactgcgcgcctttccgcgtggggcctgcacccggcccctatgtggcctcgggggacgagcctccgggcccgcagggaacccccgccgctgcgcctcacctgcaccccgcgccgccccgcggcccgcggctgacccgctttccggcctgcgggcccctggagccctacctcccagagccggccaagccgcccgccaagtacctgcaggacctcgggcccggcccggccctcaacggcggccacttctacgagggccccgcggaagctgaggagaagacctccaaagctgccagcttcccccagctgcccttggactgccgagggggccccagagacgggccctctaacttgcaaggctccccaggcccctgcctggccagcctgcatcttcctctttccccgggactccctgactccatggagttggccaagaacaagagcaagaagcgtcgtaaccgcacgaccttcagcacattccagctggaggagctggagaaggtcttccagaaaacccactatcctgatgtgtatgcccgggagcagctggccctgcgcacagacctgactgaggcccgggtacaggtctggttccagaaccgcagagccaagtggcggaagcgcgagcgttatgggaagatccaggaggggcggaaccccttcacggctgcctatgacatctctgtgctgccccgtactgacagccaccctcagctgcagaactccctgtgggccggtccaggatctgggagccctggaggcccctgccttgtgtctccagagggcatcccctccccatgcatgtctccatattcccacccccatgggagtgtggctggcttcatgggggtgccagccccttctgcggctcaccctggcatctactccatccatggctttccccccaccctggggggccacagctttgagccttcctcagatggtgactataagtctccaagcctcgtctcgctcagggtaaagcccaaggagccacccggccttctgaactggaccacgtgatcggttgcatggacctgcagaatgagctgcccacctctttttccattcccagtcgctcccagcccacccccgcctggacaccacggaggaagcacctctgcctccaagccccagatggttctggaggctgcgagagcagctggcactgtcagcccccagcagggaacacgttacagggtcttttctcttagaacaaggtggggctgcctaggagaaggggcttcgaagcagccaggactcttcctaccacaaactgagtcccctcacctgaactctgggctggaggcagggagacactgccctgcttcctccagactttgtccaagtccattgtcatctctccagctaagacagcttacttggctcatcgttcagggaacccaggaaaatgggaggagaacgccccgtggactgaagctcttcatgatgagatggaaaccaaaagggagtctcccatgatggggtggagtcagccctgcttcccctccccaccagcagggggcgcactggtgtctgacactaaggagggtgtaaaggccaaggtcagcatagactgaggcacactggctcctcagctccagccaccctcactcctgccatgtgcctgcactcccagcatgccatgcagtcatcttcccctccaagggggcagaaattccaccagaaatcaccacatatttggaatcttcttccacgggaccagcccagagctatgccatggaaatgatattggatgttggtaagaataaaacagatttctacagactg

SEQ ID NO: 720741 - DNA, 446 bp, Homo sapiens
accctggcaactgcttcggatgctccacctggtggcggaggccctgggaggcctgcctttgctgttggagggtctgtgctagctgggcctgctactctttggcctgctgctgcaggccacccaatacttgatcctgctgctggatggaggcattgagtgcggcgactctcaagttcatataggccacctgggcagtcaaccgggcccaataaccttgggaggcctgctccaactcttccttggcctggctgaggttggagatggagctctgcaggtcagtgatcaggctagacagctgctgcttttcttcttcgaagtggccccgctcaacatgcagcttgtcttcctgctggcctcgatcagtctccagcatctctaccctggcttggagctgtgtgttgtttgcggcaagagtggctgcctcttgcttcaaggtttccagctgc

SEQ ID NO: 720742 - DNA, 95 bp, Homo sapiens
ctccttaattgatgggcaaacactctccaaagagtccccaagtcatggccttgaactctcagctccagagaaggcctcaccatcaaatgcctcag

SEQ ID NO: 720743 - DNA, 122 bp, Homo sapiens
  misc_feature (93)..(93): n is a, c, g, or t
tcgggtgacagggctgccactgccagagacagaacgtggttgaaagtgcagagacacaatactgtcaacctaaaatcttacacacgctaaggnaaaacaagtcctttaagaacgaggataaa

SEQ ID NO: 720744 - DNA, 368 bp, Homo sapiens
tacagagtgaatgtcaggagacctacactggcacatcattatcactcaaagacgtccatagtttacgttagtgttcactcttggtgttgcacattctacaggcttcttgacaaatgaacaatgacatgtatctatcatttagtatcataaagaatagtttcactgccctaaaaatcctgtgtgttctgcctgtttgttcctttctctcccctaacctctggcaacccgtaatctttttatggtttccaaggttttattttttctggagtgttctgtagttggaatcacacagtatatcaccttttcagtttggctcatttcccttagtagtgtgcattttttcccatgcgtttagatggattggtagt

SEQ ID NO: 720745 - DNA, 399 bp, Homo sapiens
  misc_feature (180)..(180): n is a, c, g, or t
  misc_feature (256)..(256): n is a, c, g, or t
  misc_feature (309)..(309): n is a, c, g, or t
  misc_feature (350)..(350): n is a, c, g, or t
tctctaagcaaaaagaaaatgatgaaagaagcaaacttggagcatcagaaaggaagaaagaacatgataaaatgaaaatatgagctcctattatgaacatcgtattaccattcattgtgaaacttaatcgtatatttatatataagcatccttcagagatgctgtgggttcagtttcagnccactacaataaagtgaatatagcaataaagcaactcatatgaattttttggtttctcagtgcatataaaattaancttcatgctatactgtagtcatttaagcatgcaatagcattatgtctaaaaantgtacatacctttatttaaaaacgcttttattgcttaaaanaggctaaatggcccatctgagccatcggcttttttcctggcagaggggg

SEQ ID NO: 720746 - DNA, 245 bp, Homo sapiens
gatcacatcgcagtgagactcgtgccgacatgtgtctggtcctggtaacacctcttatgaacactggtggctgggcttcatagcattcgactactccgtgaagtctacggacaggaagatggttggcgacgtgaccggggccccagggctattgcctccaacggccaaggttgcgtgaacaatctggggccctgcatataggggcatcttcaattgaacatttttgctcggtcaatcattcccca

SEQ ID NO: 720747 - DNA, 284 bp, Homo sapiens
tactctaagatcccgtagcgcgcgcacatcacttattatatgatagaaactgaggcagaagagcttgatgtctattgtgaatagctgaggggacaagctgcacaggaagatctagcatgagactgtaatgcttatcctagagatacctgtgttcgtttaaaaccatttttcaaaaaggatgtacaaagccattacatgggactgatcaagaatgcttccatatagcagatatatcagcaaagatcagaggatgcttagcaggtactttgacctgtatttataga

SEQ ID NO: 720748 - DNA, 572 bp, Homo sapiens
ccgggctgcggcctgggagtccgatggctgcagaggacaacccggggcgtggtgccactggaggcacggagagccttccatatgaccaaggacatgttgccggggtcatatcctaggaccccagaggaacgcgccgggccgccaagaagtataacatgcgagtggaagactacgagccataccccgatgatggcatggggtatggcgactacccgatgctccccaaccgatcacagcatgagagggatccgtggtatcagtgggaccactcagaactcaggatgaactggggtgaaccgatacactgggacctagacatgtacatcaggaatcgtgtggacacgtcacctacccctgtgtcctgggatgtcatgtgtaaacatctcttcggctttgtggctttcatggttttcatgttctgggtagggcacgtgttcccttcctaccagcctgtgggtccgaagcagtacccttacaataatctgtacctggagcggggtggtgatcctaccaaagagcctgagcccgtggttcactatgatatctgaggaggcttgatgggctttttgccc

SEQ ID NO: 720749 - DNA, 164 bp, Homo sapiens
  misc_feature (24)..(24): n is a, c, g, or t
  misc_feature (36)..(37): n is a, c, g, or t
  misc_feature (115)..(115): n is a, c, g, or t
ataccgcgtcgataccctgcacgnccgctcgcgcgnncgattgctcgccctcgccgcctgccggcgctggcgctggaaccgttcgtcgccagttaccaggcctggcacgagggcnagcagctcggtaccgcgaccctgcaggctaagccgaccggcggcaacca

SEQ ID NO: 720750 - DNA, 968 bp, Homo sapiens
  misc_feature (315)..(315): n is a, c, g, or t
gcggaagcgggctcgcaccgacgaggtgcctgccggaggaagccgctccgaggcgtgaagatgaggacgactgaggactaccgtgaccctatgtgccgtggacggcggcgaccggcagcatactgactccatgaagctgtctgcacgcgaagcacgccacagggagctgcggaggaaggagcagccagggacatgacgcgtagtgaatccccggtggtagaatgagggacgcacactccccgtctaggccctcagtgccaaacgggtccagtccctccgtggcatccagaacgcagagacccttaagagagaagngctggaagacgcgcataagaggtctgaccaacggagaacgcatgctgaaagggacacgaagagagagatccttggacgatgtgttgatgcccgatgggactggagctattgatggtcatggtgacaggggatgattggcgggcagagggcaagttaccgtcatcgtatagtgactcgagtatgaaaggccctgggcgtttggaaagatgagaggcgtactggggaaggttggtggcgaagaggcacattgtccttggagcgaagctgcaccattgaaggccagcacgctggcagtgagcaaacaaacataccagcaactcgcgtggctcgccgatggggaccgatcacgtaatccgccataccatcggtcaacctcaaatagatgcattctaaaggggcgcctactcgaacacattttccacggcgacgcttgagcatttcacagtagacgtcaatgtgccccgtggaaccgtacaacagcaggggagggcacttacagcacgaatcgccatggggccgacagatttcaacgggtcgccaagggtgcaattccacccagaccgaatatccagatactgcgccccgtgccccttgttgcatactggagcatcccagaaaagcgccgggtgccatctaggggaccagaaggacaa

SEQ ID NO: 720751 - DNA, 418 bp, Homo sapiens
tatatcgttctcacgtaacgaggacggtacgataccgatggctagtcgggaattaacgcctgtagagagccatgcaaacgatagtagccttttggcgaggtcgggttcgttgaaacaggaacactctaaaaatataggtttgtctatatttttagtagcaggacatataatggcagtaactacaactctaaacgtgcatgggggttctcgtatgaaccgatattatgaaggcgtaaaggatgttgaatgggaaaatgaaaaaggacgttatatcattcgcaatgttccttttcatgtatatgaggaatacacaaatgaagccgtgtatagctctgatgtgacattaaagctgttacttctgaaagaattaatggaagagaacgaaattccatctgaaatcgattttatgaaagcaaag

SEQ ID NO: 720752 - DNA, 479 bp, Homo sapiens
cttgccaagagatcattcattgctggtgcaatcacaaaatggtaccgccactttgggagacagtttaacgctttcttactaaaactaaacatactcttaccatatgatccagcaaacatttccttggtatctacccaacaagtttaaatcttgtgtccacacaaaaaccggtacgtggatgtttataatagctttatccataattgccaaaacttggaagtaatggagacgcccttcagtaggtcaaagttgataaacttggtacatgcagacaatggattattattctacactaaaaagaaatgagctatcaaaccatgaaaggacatggaggaatcttaaatacatattactacatgaaagaagtcaatctaaaaaggctacatactacatgattccagttatgtgacattctggaaaaggcaaaattatggaggcagccagaaggttgccaggaagtgggggaagggctgaatagg

SEQ ID NO: 720753 - DNA, 411 bp, Homo sapiens
tttaaagttatataaaaaaaatattaataaatatttaaattttggagaaaatatttataaaaaaaaattttaagaggagcacatttaattatcgccttgggttccgtgtttttgctaccctggggggcttttcctgccctgcggttttttggctcccttctctttttttgttttgccgggttttggggcctttttccccggtgcccctttggggggccctttttttggccctggggggggtttttccctgccccgcttttggcaaacctcggggttccccccttttggccctttgcgcagctcccctgtttccggggtttcggtacttttctggggtccctacctggggggctttccccgggttgtcccctctattggtccctcgttttccgccgggggtaacattttgtc

SEQ ID NO: 720754 - DNA, 134 bp, Homo sapiens
  misc_feature (30)..(30): n is a, c, g, or t
  misc_feature (41)..(41): n is a, c, g, or t
  misc_feature (111)..(111): n is a, c, g, or t
agaaactgaagcagctgatggagcaggatnctcctcctacncgtctgctcaggtcattggtctgaagaacgccctgtcatccgccctagcacaaaacacagatcttaaagnacacttacgcagaaatccatgcc

SEQ ID NO: 720755 - DNA, 851 bp, Homo sapiens
  misc_feature (522)..(522): n is a, c, g, or t
gaagcatgataatcgcttgaacctgggatgtggaggttgcagtgagctgtgatcatgctgctgcactccagcctgggtgacaaagcgagactctgtctcaaaaaaaaaaaaaaaatttttttcccagggaattttttaaacgtggatggttaaacacaggccattattaaatactaaatttacattaaacttaaatgattcagaaacaaagttactaatattaaaaactcgtaactttctaattaatttactaggttttatggtctatgctctggaggttacttatgtctatggtatgtgtatagaagaaatactatgtatcagggggcgggggtacatctcttcccaattctacatttcaaggacttcacattgggtagatggaaattggactgggtagcagtatggcagtgttggaaataagcaaacgctacaaatctgggctgatttatgtggtggtttatgtccagacgtgagaaagtgctggacgacaatgtatgatgcagcttaaacttgagatgnttgactgtagctgtgactgtgaatagcacaattaattgggcaaataatcttcccaagtttggaaacctattatcagattcagcaataacgtcttcatatggtggttacgttggcacagacacacacacacaaaaaaaaaaaagtgggggggggcccgcgcacccgaaaaggtctcaaaccctcggggcgcgcgcgccccagggaaggaacaggccaaccgcccaaggagaaccgggcgacagggtggggttccccaaaaaagcccggcggcggcgggtggaacccagggcgggcgcccggctaacagcagcgagcccgccgccgcgagg

SEQ ID NO: 720756 - DNA, 1303 bp, Homo sapiens
ggcgcccgcgggcagagcgaatcccgtcccgcgcctcctcaccctcttgcagctgggcacaggtaccaggtgtggctcttgcgaggtgcgcgggcgtctgcaaaccaggtgacagctggcgagtggctgcatgcatctctggccgctgctgcagtcgcgggcgcagaagagggtccggtcccaggaaccccgagcaaagcttccgcgatgcgaggggaccgggcttctgggggtcctggaaatcacaacgggagctgggcgcgggaggggcccaggcttggcccctcctggaagcgcgggctctggtctccgaggggaggccccaaccgtccggcggagccctccaggcccctgacatttatgggatcacagactaagcgagtcctgttcaccccgctcatgcatccagctcgccctttccgggtctccaaccatgacaggagcagccggcgtggggtgatggcaagcagcctgcaggagctcatcagcaagactctggatgccctcgtcatcgctaccggactggtcactctggtgctggaggaagatggcaccgtggtggacacagaagagttctttcagaccttgggagacaacacgcatttcatgatcttggaaaaaggacagaagtggatgccgggcagccagcacgtccccacttgctcgccgccgaagaggtcgggaatagcgagagtcaccttcgacttgtacaggctgaaccccaaggacttcatcggctgccttaacgtgaaggccaccatgtatgagatgtactccgtgtcctacgacatccggtgcacgggactcaagggcctgctgaggagtctgctgcggttcctgtcctactccgcccaggtgacgggacagtttctcatctatctgggcacatacatgctccgggtgctggatgacaaggaagagcggccatccctccggtcacaagccaagggcaggttcacgtgtggatagggatgcaggctgtcgccggctcttgagccaaacactgtgtttcgtttggctcaatgacgaatgttgaagatgcttttatgttctgagccacatgcacttggaggccgctggtcacgctgctcaggagtggtgcccagaaaaggaaagggcttggtggtacatgaagtgggggcagtgggcagggtgccctgggggggaggcatagagggccctgggggtcatgggaagcgagcacgcagcaggcgtgcccaggagcgtgtgcatgtgtcagagccatttggtccatcatctcctgcaataaacccatcgcaagaatgaccttcaaagcaaaatt

SEQ ID NO: 720757 - DNA, 1059 bp, Homo sapiens
  misc_feature (57)..(57): n is a, c, g, or t
gggcccccgcactttaagaggctgtgcaggcagacagacctccaggcccgctaggantccgcgccatggaggccgcccgggactatgcaggagccctcatcaggcccctgacatttatgggatcacagactaagcgagtcctgttcaccccgctcatgcatccagctcgccctttccgggtctccaaccatgacaggagcagccggcgtggggtgatggcaagcagcctgcaggagctcatcagcaagactctggatgccctcgtcatcgctaccggactggtcactctggtgctggaggaagatggcaccgtggtggacacagaagagttctttcagaccttgggagacaacacgcatttcatgatcttggaaaaaggacagaagtggatgccgggcagccagcacgtccccacttgctcgccgccgaagaggtcgggaatagcgagagtcaccttcgacttgtacaggctgaaccccaaggacttcatcggctgccttaacgtgaaggccaccatgtatgagatgtactccgtgtcctacgacatccggtgcacgggactcaagggcctgctgaggagtctgctgcggttcctgtcctactccgcccaggtgacgggacagtttctcatctatctgggcacatacatgctccgggtgctggatgacaaggaagagcggccatccctccggtcacaagccaagggcaggttcacgtgtggatagggatgcaggctgtcgccggctcttgagccaaacactgtgtttcgtttggctcaatgacgaatgttgaagatgcttttatgttctgagccacatgcacttggaggccgctggtcacgctgctcaggagtggtgcccagaaaaggaaagggcttggtggtacatgaagtgggggcagtgggcagggtgccctgggggggaggcatagagggccctgggggtcatgggaagcgagcacgcagcaggcgtgcccaggagcgtgtgcatgtgtcagagccatttggtccatcatctcctgcaataaacccatcgcaagaatgaccttcaaagcaaaatt

SEQ ID NO: 720758 - DNA, 259 bp, Homo sapiens
tgcttggattatagtcgtgagccaccacacccaacctcaatacttttttttttttaaaaccgagtcttgctctgtcacccaaattaaagtgcagtggtggcacaatctcggttcattgcaacctctgcctcctgggttcaagcgattctcctgattcagcctcctgagtatcggggattataggcaggggccaccacacccagctatttttttattttccgtagagacgaggttccaccttggggggccagctggaggg

SEQ ID NO: 720759 - DNA, 1121 bp, Homo sapiens
ggcgcccgcgggcagagcgaatcccgtcccgcgcctcctcaccctcttgcagctgggcacaggtaccaggtgtggctcttgcgaggtgcgcgggcgtctgcaaaccaggtgacagctggcgagtggctgcatgcatctctggccgctgctgcagtcgcgggcgcagaagagggtccggtcccaggaaccccgagcaaagcttccgcgatgcgaggggaccgggcttctgggggtcctggaaatcacaacgggagctgggcgcgggaggggcccaggcttggcccctcctggaagcgcgggctctggtctccgaggggaggccccaaccgtccggcggagccctccaggcccctgacatttatgggatcacagactaagcgagtcctgttcaccccgctcatgcatccagctcgccctttccgggtctccaaccatgacaggagcagccggcgtggggtgatggcaagcagcctgcaggagctcatcagcaagactctggatgccctcgtcatcgctaccggactggtcactctggtgctggaggaagatggcaccgtggtggacacagaagagttctttcagaccttgggagacaacacgcatttcatgatcttggaaaaaggacagaagtggatgccggagtctgctgcggttcctgtcctactccgcccaggtgacgggacagtttctcatctatctgggcacatacatgctccgggtgctggatgacaaggaagagcggccatccctccggtcacaagccaagggcaggttcacgtgtggatagggatgcaggctgtcgccggctcttgagccaaacactgtgtttcgtttggctcaatgacgaatgttgaagatgcttttatgttctgagccacatgcacttggaggccgctggtcacgctgctcaggagtggtgcccagaaaaggaaagggcttggtggtacatgaagtgggggcagtgggcagggtgccctgggggggaggcatagagggccctgggggtcatgggaagcgagcacgcagcaggcgtgcccaggagcgtgtgcatgtgtcagagccatttggtccatcatctcctgcaataaacccatcgcaagaatgaccttcaaagcaaaatt

SEQ ID NO: 720760 - DNA, 604 bp, Homo sapiens
gatggagtctcactctgttgcccaggctggactgcagtggcatgatctcaactcactgcaacctctgcttcctgtgttcaagtgattctcctggcttagcctctcaaatagctgggattacaggagcctgccaccacgcccagctaatttttgtgttttcagtagagacagggtttcaccatgttggtcaggctggtctcgaacttctgatcttagtcacgtgatccacccgcctcaggcttccaaagtgctgggataacaggcatgagccaccgtgcctgggaccacctgcattattcttttgccttctccacttactagccctgaggctgaaagtatttaagatcaatgaagagtgacttaggtcctgagttgcagccttcccttatcctacagaatacgataatatctgcctatgagaaggatacctgagacattgaaataagatgattatataaagtgtatacaagcacaacataactttcttctcacatatccatcacagtgcaaatctaaccccttaactctgtaaaactagattgcaaagaatattgcatgtaatatttttcctttgcctcagaaatgggtaaacaaaatttaagaa

SEQ ID NO: 720761 - DNA, 1128 bp, Homo sapiens
  misc_feature (201)..(201): n is a, c, g, or t
  misc_feature (220)..(220): n is a, c, g, or t
gccttgctaagacgcaaaaaaacatccaagtccaaggctattactccaaagcgactcctcacatctataaccacaaaaagcaacattcattcttcagtcatggccagtccaggaggtcttagtgctgtgcgaaccagcaacttcgccctattggatcttacacattatcattgtcttacagtaggaaatactaagtttgtnctggacaaggtcccctttntatcatcattctattgcgcaaggtcatcatttcattataaacaatcacacacatgtcacagtgcaatacccagctgtctgcaagcaacagcaggcttatccctcaacccatcatttgcaagccatgctctcagctggttcttggctgccctggccatctgcacagccatggatgtagtatctatatctagcgcaaacactgtacataatcatatcatttgcgccactttatccaagcatgccatagcagcacaactgcgaagcacattcccccatcaaggcacaggcatcacacattctgtggccttcacattaggtaacacaaagtcgctccgagcatcagcaaacccagacccaaaccagccagcacattatacagtggcaacgcaagcccaccaaccttctctcgcacactctcaattaaccttgttacacggaaacccaagcttacaagaagcaaagcctttggaccccggcacgcacgcatctcctttggttcccacgccccaacttggccgagaggccaccacccaacctcctagataggttatacacccacaggcaacacttggggccttgctctttggccaggacttccttcacacaaggccagcaccgcggggcatcctcatgagcaccttgccaaacagcagaacttcacaatccatcagctcacccttggtacgacgtccataccagcccatactagggggcaaacccattgaattggcatttggataaacacaaccgttatttgggaaacagcgcctttctaacccccaggggagacacagactacccagtgccatataccctaccacaagggtatatatcaagatcgactcatcctcaacaggaacaccaccagcccattaagcaggcactaccaactataacctgaccttgccc

SEQ ID NO: 720762 - DNA, 428 bp, Homo sapiens
atagcaatggtgatgtgttgagctaaagtggtgcaagtcgagactgcttcaggaggagggctagctagccagagaaagcaaccacatattttttttttaaacgggagttagggctcttgtagcccaggctggagtgcaatggcacaatctcagctcactacaacctccacctcccgggcccaagcaattctcccgcctcagcctcccgagtagccggaattacagggctgtgccacaaggcccagctaactgttgtacattcccagtagaaccggggttacaccatgttggtcaggctagtctcaaactcctgaccccaagtggtccatgtgcctcagccttccaaactgctaggatcacaggagcgagccacagaacttaggcccaaccacatttcaggaggcttggaacttcagcctcacctgctg

SEQ ID NO: 720763 - DNA, 156 bp, Homo sapiens
aaaaaaaaaaaaatggccccggcccttttctttcccctttttttacaacctttttttgggggggggccccttccctcccctggccctctttttccccccggggtggggttccccctccttttttgtgcttttggcgggcctccattaacccccctg

SEQ ID NO: 720764 - DNA, 321 bp, Homo sapiens
  misc_feature (201)..(201): n is a, c, g, or t
  misc_feature (220)..(220): n is a, c, g, or t
gccttgctaagacgcaaaaaaacatccaagtccaaggctattactccaaagcgactcctcacatctataaccacaaaaagcaacattcattcttcagtcatggccagtccaggaggtcttagtgctgtgcgaaccagcaacttcgccctattggatcttacacattatcattgtcttacagtaggaaatactaagtttgtnctggacaaggtcccctttntatcttctttggaaggtcactaatttatttacacaaataaaatgtacaagtgaattccagtgttgacagaaagaggtcacctaacccataatttgaacgat

SEQ ID NO: 720765 - DNA, 123 bp, Homo sapiens
cattactgagtctggatggagggatggtaatgtggatgccagatcattctcagccagattggtggtcctcccagacccctcatgtcatgtcatggggttgctcagaatgaatttaggtggtgt

SEQ ID NO: 720766 - DNA, 278 bp, Homo sapiens
  misc_feature (52)..(52): n is a, c, g, or t
aatttagcggtcctatctacctatggtaccccttttattgttactgaaaccnctaggtttaggctaggtcccgcttctcactgcacagaaagctgctcactgagacagccagtattgctaggctttaattgggtgctgcagcagaggagatgggagatcagtctcaaatctgtctcctcactcactaaagataggagtttatacagcagaaatgtaacaacatgcaggaaaacggcactgcagcctggtcagtcttttgtgggtggcatcgataaaca

SEQ ID NO: 720767 - DNA, 337 bp, Homo sapiens
ccacaggctcccagacgaaccgcacctgcacgtgggcgcacacacacacacacacacacaggggaggccacaggctcccagatgaaccgcacccacacgtgggcgcgcgcacaccacacacacccccacacaggggaggccacaggctcccagacgaaccgcacctgcacgtgggcgcacacacacacacacaggcaaggccacaggctccaacacacgctccagacagtgtctgttacgagtggcctcggtttctccccgtggaaacggcacgatgggttattttgtgtttaaaatcacctgctttccataatatgagaaatacatgaactatctt

SEQ ID NO: 720768 - DNA, 484 bp, Homo sapiens
  misc_feature (392)..(392): n is a, c, g, or t
tctttggggggccaaaattcaatcccctaatccatgttagtaaccatgcagtgttccttcttatttctatgttgacctttgcagctctttctatttgatgtatatttgggagatagagtttcaatcttgttgcccagggtgcagtgcatttggtgcaatcttggctcagggaacctccgcctcccaggttcaagcaattctcctgcctcagcctcctgtagtagctggtatgacaggcatgcaccatcagtgcccagctaattgttatatttgtaagtagaggcagggtttcgctgtgttgccagactgtctcaaactcctgatcttgggtgatctgccctcctcagcctcccaaagtgctgggattagaggcgtgagccactcatgcctgnccagctctttctaatgtacacacttaatactaataataataaccaatagaagatgatacgttgcgaatagaaggcatctgaactaaaagtaa

SEQ ID NO: 720769 - DNA, 177 bp, Homo sapiens
aggtatcagagaagtcggtcaggccctcaaattctgtacatttcctagttcgcaattatatatctggagctgggaatagcctgtctgaatatacggtccgcatttttcatgttcccctgaggaagcataaaatttactccaccagtccacgatttcttcccccttttccagaggcta

SEQ ID NO: 720770 - DNA, 310 bp, Homo sapiens
gggtccacagtgaggtagatgctgcgcgtgaagaatttgctgagaggcagacgttgggactgtagaggctgacaggaggcagaggttgtgcctggaggggccaccaagatgcatgagctgctccttgagaggtcgacttgagaaagttcagggtctgcagagaaggctgggaggcagtatctgggtctaaagagtccattgtaacgatgaagctgtgcctgtggaggctgttgtgaggcagtagcctcatctgcggaggctgccgtgacgcaggatatgcgtgctaaataggccattgtgagtcatgagc

SEQ ID NO: 720771 - DNA, 433 bp, Homo sapiens
  misc_feature (39)..(40): n is a, c, g, or t
gggggttctccccctacccccccgggccggtttttcccnncggggtttcccaggggaaaaaaggggggtggggtggggttttgcccccccgggggggggcttttcccccccaggggggccaggggtccccccctaggggtttttttgggtccccccccccatccgggggtcccccctttggttcccccccgggggttaaccgggggggcccccggggggccctaaggggttcccccccccccttcccctggaagggggcgggcccggggggggaaaattccctttttggggagggcccccggggggggggtttctcccccccggttttttttttttttccccgggccttttttaaaatttttttttttttccccccgggggcctttttttttttgggaaaaaaaggggggggggtaagggtttcccccctgga

SEQ ID NO: 720772 - DNA, 1100 bp, Homo sapiens
cttgtgtgtgtgtcgttgagggggctttttttcacaagagtgttgtatccgacggagggttctttgtggcactcgggagcaagtgtactctccgcaagatggggggcgccgggacacactgcatgatcgttgccgcccgattgggtggtcaccgagcggttctcacacaccacaaacagggaggcccggctctgttggtgttgtcggcgcgtgatctggacgcctcgacctcagaagtgtgattctgctcggcgcagcagaaggtggcgcagaacttctgtctctgtccacgcttggatcctctccgtggagggcctttcgggtgacaccccaaggggagcgccgcagtagcccgcgcacatttgtttcacagcgggggagtccaccaccagcggacaacagcacaccacacgcgttgagtcccacgctcgctgtcccgcagattttttcactccgcgccaactcctcggccgatttactttcgtgcaaccacttctcgctttgttctctcgctctgtgccgcgtccacgaggacatctctcccggcgagtctctgtccccagagtgggcgcgaagatttctctgtgtgcacacactgtgtggcgcactctagggggcgccggcgcgcgcactctcctcacagccgcccttcttttcgtggaggacagccacccgttcgcccactagtgtctcgctcacacgcgctctctctctctcactctctggacccggttgtgtagatctctcgctgcacctttgcggggagcaccgacattggcgccacggccggcgtgtgcgcccccacgcacaccgccacttgcacccttctctctctgcgccctatatatctccccaccccgagcctatgtggggcccgaccactcttttctcctgtgacctgactctctgagacacattcctccgctttgcggcctgtttctctctgtgaggggcgcccggacggcgcgcgcccctgccaccaccacctggtttatgagccacccgtgtggctgagccgccgggccacgccccccccctatggcccttgaccttcccccctgccttttgaggggccattaacccggacccaatttccccca

SEQ ID NO: 720773 - DNA, 124 bp, Homo sapiens
gacggattagcatgttacaacatagtgaatcaatcaggactggtgattcaaatgaagattttaaacgcaaaaatgggtcgaggtggcagtgtggagagttgggttctccagtcaggagctctta

SEQ ID NO: 720774 - DNA, 837 bp, Homo sapiens
agcggggtggcggaggctgctgctgccaggtggggcgcgggccggacgactagctgaccgagacactcggcgggcgcggcgggactgcggcccgttggcggcgtgcgcggggacctgcgtctgactaggtccggggaagtttcctgactttctgagaagcccgtggtttccccaatagaagtgatttctgatagaaactctgaaggtcatcgtccgaatgaaaagaagagatctatgtatagtcaataagaattaagagacacatgaaggtttccaatcggtccctgcgtatgtggtatattctggtcagcaatgactgcatgtggaaactacactatgcagattttattgcttcaggaagaacgcggtagaagaagatgcgatacatgatatcctggttccctctgcaggatggcaacagcaacatgagttagccttgacatttagcaggtcttgatttcaatcatagtacatgacaggtgaagatagatgcacaatcgaaggttctacagaagcaaagtggggaagcccagggagaagcagcaaaatctgaaatgctaacatcgccactttgatcctcgatcatacctgaaaatgtctcaaatctccaggagtatctggaatgcatttgtctgccatgtagtgagtaagatggtagattgaaattggctgtgctgcattgcaggaacctgctcatgatcatgttaactcatgagggcagaggctgtggctgcaggcagactttgtcctacctctggcagtgaccgaatgggttgaacatcatgtgggttgtgttgggcgttcattcgtatgggatccttccattggatccttgac

SEQ ID NO: 720775 - DNA, 156 bp, Homo sapiens
agcggccgcctactactactactgctcgaattcaagcttctaacgatgtacggggacatgagaattgcttgaacccaggaggcgaggtggaggttgcagtgagtcgagattgtggactccagcctgggttacgaagtgacagtctgtctgaaaaaa

SEQ ID NO: 720776 - DNA, 453 bp, Homo sapiens
ggccggggggggcacggctttatgttcttttcacattgggtccggcgtgttggccgggattgtagaccgcccggctccctgggaaaaacgataatagtgcacatgcacggtgatcttgcaggaaaggggagcagaaagagcattaccaactaccggcttctattaatgttatcaagagctgttggggcccaagccttattaggtgacatacgaaaggacgcagagctagcagtttaagctgaccggcagatgctaaacttgaaaaaggggaaatgatgactgttctaaaagaacttatttaggcagggcaacgggggggcgacaactcgcgctgatttacgacgagcgcatgttaacactatctgcaatttcgccagtccctgccaattgccctctttcaaaaaggggcgcttatacggctgtgttccttaaacaatacacggtacgggcccg

SEQ ID NO: 720777 - DNA, 910 bp, Homo sapiens
ggagccagattggtggctgatcccgggcgaaaattctgaggtgtacaccgtctaggaaatgaaagactagttcagaaggaagcctgtatagtctcttacaaatacgtaggtaattcaccatgaggtagcgaagcctaaagagggtatatctcggagctcaatgctcaaggaaaggcctagtgagaacaatgctgcgaggacaatcagggccggcagcggtggatgtggggcttgcctatgcgataggacgcaagctgcagtaagactcagaagaagcttggattggacaagaccgctataaatgtacctgcaatgtgacaaagagttgacctgtctgagttcaacgtcttgtctccaacacggagaagatgccatactggatagagatagtcccgtaattggtgatgatggtgggaacatgtggcttgtcagagtcctaaggcctcattgcagcatgctgtgggatccagtacgggggaaaaaggtccctaaaagatgtgatgagtgtggacgaaggcgtgcaaacaggagtaaaatctcattaagcaacagagaatacatatgatgaaaaagttatcagtgtgatggagtgtggcggtgtttgagaccaggagctcccaactgattcagcatcagagaaccgcacgactggtgagaaaccctaaccagcgcagtgaatggttgccagggtcaggcgagagcctcaatcggaggcgcgccataggggcattccaagaccgcatgcctgttaagaccgggccaaaatagggggagagtcacattcccttggaaacggttaggaagaaacgtgggcgtccggacaaaatagagttgagggcgtgggggacccccaacataagtgcatagaagcggctaaaaaagggggggcacatacgcgtgccgacgggtg

SEQ ID NO: 720778 - DNA, 827 bp, Homo sapiens
tatggcatacagtaccgcgcagcgggcacggagggccccgtgtcaggaggtggatggtgtggccaccaaccgctacagcattggcggcctcagcccatttctcggaatatgccttccgcgtgcgggcgggaacagcatcgggacgagggccgcccagcgaggcagtgcgggcacgcacgggagaacaggcgccctccagcccaccgcgccgcgtgcaggcacgcatgctgagcgccagcaccatgctggtgcagatgggagcctcccgaggagcccaacggctggtgcggggataccgcgtctactatactccggactcccgacgccccccgaacgccgtggcacaagcacaagcaaccgacgcgggggctcctcaacgaccgtggggcagcgtgaaccctgactatgcgtggcagtgggtgcacccatgccctacgtgaagtgggatgatgggggccgaggagctcaccaaggaggatgagatgccagttggacgcaacgtcctggagctcagcaatgtcgtacgctctgccaactacacctgtgtggccatctcctcgctgggcatgatcgaggccacagcccaggtcacagtgaaagctcttccaaagcctccgatgactctgtggtgacagagacaactgccaccagtgtaccctcacctggagactctggggaactcggaagcctggtaacctactatgtgcattacactataggcgtgcgcgtgcttgccttcaaccgccgtgggcgatgggcctcccagacccacacatcaggccagacgcagcgggagtgctggccagccggggactcaggcaaagtgg

SEQ ID NO: 720779 - DNA, 153 bp, Homo sapiens
cacaggttgatgtgttaaaacaaataaatattggctctctgagaataatacttctgagcttgttctcgatattacagaacaaattatttctgaactcaacaccatattctttcaagcaccaaaatttattgtgtggataattttcctctgcag

SEQ ID NO: 720780 - DNA, 441 bp, Homo sapiens
aaaaccatgtattgaagcatactactaaagaaagttgactttttgattatcgtctctgcatagaacatctgtaggaatatttctttagtaattttcaaatcttcccatggcctctctgttcacagaaatatcatctttgaaacaacttgtgtgagttacttaactaaatcaaaaattgattcacatgaccatcttaccataatcaccaattttaacagtctcctacatattttctatatcacttttcttgattactaaatgtctgtaataagaacacgctctttatataacagaatattttattacatcagtttcccatgaacacaccagagtcacttaataattatattggccatttccactgatcggcaggaggctcttccactaatggctcccatagtttccattccctcatttttcttgcccgatttagttcatgtc

SEQ ID NO: 720781 - DNA, 308 bp, Homo sapiens
attagatgacccttggtgggctttgattagatcagatgcttgagatctgtaattactctgtcagaaatctgtatttatagcagtgccctacctcttccatcaatgtctgttggaaaactgcacaaatagaaagacaacactgatggaaacttctttattagcttagggtgtatatagccacttagctgtgccacctcttcaagggtaggagtaatacagattccttgcactgtttctaaggcaacgtactgcaaaagtgtgttctcaagaccagatgtcagtcttaaaaagaaaaaaaatcaaagaga

SEQ ID NO: 720782 - DNA, 134 bp, Homo sapiens
cttagcaccattcatgtgacactccaaatatgactatgaaagactctcgtcagttgagaaagctaggagcagctaagagaacaagtgagatgacctctttgatcggaaatttggtgatgctcaaagatcttaga

SEQ ID NO: 720783 - DNA, 796 bp, Homo sapiens
gggctgcgtcgggctgctggagaagatggcggtctccaacagggagttaaagttcctcgtaatgtgtcgcttgtggaaagaacttgaagacggacaataaaggagtaggcgacggtacagttagcgtggggccattgaagatgatgaagatatgacagttagaaggtagacaggcatgatgactgggcgaccgaagggacaaattatgaaaataagaatatatagcctgaaagtagaatgtggacctaaatactcgcagaagctcctccgtcgagtatagattgtgtaacgataaaattaatatgaacggaataacataattccgagtgggatggtggatgcctcggagcataccagtgttaggaaaatggcgggaaattcgatataggcattaacagttgtatcttcaagagctaagacgtctaaatgagtgtacaaagacagaatatgaagcttccacatgcagcagagggacaaacttgcaacaagtaatgttagtggatcgtcagagtgtgtcttaaatcaacaagcttctagctcatgttaatgtcttgattaagtgatcacaactgtctgaaatacacatttaatgtagagagatttccagcttggtaaacatgactggacattggtaagaatatatgtaactatttgtacacccataatgttttcaggtaacaggagggccactgcggcgaaatttcttgttcttgaagggcactggtcattgtaaataaactgggttcgtccaatgcgatccgggtcccgatgaaggcgctgggaagtgcagatgtcg

SEQ ID NO: 720784 - DNA, 741 bp, Homo sapiens
ctttaggggggaggtgtctaaaggcgagtgaacaaggggttttgtcagtagttcataaacgaggagagtggcctgcctatatacaatatgtgttcgtctccacatttaaatttgccaaacttatttaatcaagggctgtttcttttgggttttccagtggaaattaggctccctaaagaatttgtcattaaaggggattttggccaacttatatggccaccatatggtttaccttgtgtatgtgttgcgatatatgtgaaattccgcaatatgccgcgcagtgacaatttcaggtcagatctattgtatgatctgtatgcacgaaatgctttttattactcctaccaaataggccaatcaagtcgcatttcacatcaggtagcgcccatgctcgtctatcgaacagcaggttcgctggattgaatcacaagcaagaactgcagatgatccattgctatccttctgataattgggcatgccaattcaaactgtctgtgagaagacagggacaagtattgacatagaatatttcaggatatctcccccgagcatttcccgatttgggattttgccatcaagtccacatctaggagtgatgtcacaaaagggcctttcaaaataacagagcagttgttctgtaaaccacagagtgatccgtgtgtaggagactttcttaccggacgtgtaaatgagcatcttgaacatcgcaagatatccaaatgcattgaatgggccactacc

SEQ ID NO: 720785 - DNA, 378 bp, Homo sapiens
ctaggaaaggctctctgtaggaggtacatcgtgaaggtggcctaaatgacatgaagggtgagcctgcgagtgttgctttctggggaagagcatcaggtcgaggaaacagcgacagagggagccaaagagggagcgtgtagataggtgatcatgggcctgacaaggtagaacagccatgagaaggttcctgggggcttggagcaggacgtgcaagtgagtttaagagtgatctctgacagctgtgcccagactgcagtgtagggccctgaatggaaatgaggagagccatggggaatccagtgcaactgtccaggaaggagagggatgcttccacactctgaccacggacggcacaaaaagcaccaggaaagaaccaca

SEQ ID NO: 720786 - DNA, 191 bp, Homo sapiens
agtgagctggcgacacaagttggagaaactatttagcattccttctgtgggccatcactttttttttttgggcagggggagggtcacgggggatgaaaaaatttccctcttgttgctcagtctcgctctgtcgccaggctggagtgcagtagttacgacctcagctcactgcaacctccgcatcctgggct

SEQ ID NO: 720787 - DNA, 364 bp, Homo sapiens
tcggcacccagaaaagatgccccagacctagcaactgatgttatctctagattatataaagacattgtaaaacttcccggtctgttctatttcactctgaccaccgttgcatgcagcccctgtcacgtaccccctgcttgctcaatcgatcatgaccctctcacgcggaccccccttagagttgtgagcccttaaaagggacaggaattgctcactcggggagctcggattttaagacactagcctgctgatgctcccagctgattaaagccactcccttcactatcttggtgactgaggggttttgtctgcggcttgtcctgctacatttcttggttccctgaccaggaagcgaggcgattaa

SEQ ID NO: 720788 - DNA, 140 bp, Homo sapiens
gataaacagcctcaccagtacatatcttcctaggataaacatagtgaggcactctcccacgaactctacacaacatattttgtcagtcaagacccgtacttctaacctccctgttcttatgaattcgaacagcatacccc

SEQ ID NO: 720789 - DNA, 218 bp, Homo sapiens
gaaaaggagaaatacggtaacttcgcacactctgcctccggagctgagggagctcaacgactatgccggcgcctgcaccctgcgagttatctgcgggaacttgggcgaagtggagcggcccatgggtccgcgtgcttgcgggagtagctgcggtttctcggggtgaagggcgcatctcttctgaggtctggatttcttcttggtcttgactcatttcc

SEQ ID NO: 720790 - DNA, 521 bp, Homo sapiens
  misc_feature (390)..(390): n is a, c, g, or t
catgtcgtggccagtggcagcctaatggtgaacgggattacagatagcacatactgttgctttcagaagaaaatgggtaattcccttaaaatgattaggtatatactgtaatttgatttttggctcccttcaaagatctctgtagaaataacttatttctcagtattctacagtttaatcaaattactgagacaggacttttgatctggtatttatctgccaggaatatacttcattcactaagtaatagactggtgctgtaactcaagcatcaattcagctcttcttttggaatgcaagttttgcctaaacataaaaaaaaaaatcctcagtatagcttgccatttagaccttgatcacagtatttaagtgtttagcgttttatacctnaggtcagtgctacagccatctagcatgaactaacccagattccacctccataaagttacctcgagttgttgagttggaatatgttctggcatataccttacctgccaatcattagggagaggcacaaggta

SEQ ID NO: 720791 - DNA, 906 bp, Homo sapiens
tatccgtcatctactctaccatcttagcgggcacactcatcacagcgctaagctcgtcactgattatttatacctgagtagggctagaaataaacatactagcttttattccagttctaaccaaaatacaatgaaaccctcgttccacagaagctgccatcgagtatttcctcacgcaagcaagaccgcatccataatccttctaatagctatcctcttcaacaaagtatactctccggacaatgaaccgatagaccaatgaactaccaagtcaatgactcatcattgaataatccatagagtggcgtatagccagataaagctaggaatagccccagttgcactgctgagtcccagaggttacccaaggctaccgcctctgacgatccggcctgcttcttctcgacatagacaaaaattaggcccccatctcaatgcatgatgaccgaaatctctccctcactgaaacgtaagccggtgtctcctcactctctcaatcttatccatcatagcaggcagtctgaggtggattaagccaaaaccagtacgcaaaatcttagcatactcctcaatgtacccacataggaggtgacctaatagcagttctacggtactagacccctaacattaaccattctttaattttacactatgttatatatatgccgtaactactaccggaattcctactactcaagtgtaaactccagcgaccagcgaccctactagctatctcgcgccgtgaaacaaagcgtaacatgatgatcaccctttaattccatgccacccttcctctcctgaggggagggctggcccccggtaacgggcttttgtggcgcaaagggcgcgtatcggagaaattcccgaaaaattagggtgtgaaaccccaacataaaggggcaattc

SEQ ID NO: 720792 - DNA, 117 bp, Homo sapiens
ccgctgctgggcttggttaatagagtatcttgcgtccttttgtactcttctgactaccttcactcatgttttagcacctgccagccacagcccccagatgcgggggtaccgagctcg

SEQ ID NO: 720793 - DNA, 81 bp, Homo sapiens
aaattcattttgtaaaaaatttaaaagggctattttgtttggatttgaaaatctctgggaaaaaattctctctttggtcca

SEQ ID NO: 720794 - DNA, 1391 bp, Homo sapiens
  misc_feature (137)..(137): n is a, c, g, or t
  misc_feature (725)..(725): n is a, c, g, or t
caatatactctccggacaaggaaccataagcgaatactcagcaatcacatagctcatcatatagataatcataactggtatactcagacaagtatagaacataggaagtaagctcccctttgcagcgtatcatgagngtcctcgagagcgtataccgcgaaggggcgaccaccgatctgatcaatccaggctctgctctgtacttactcacaatgacaagaagactaagacctcaccatatcaacctacagtactgccaacagtgctcgtcgccttcacgtaatcctggtatacgccctttcttccgtcaccgtctgctcaaagtctctaatgcgcaatcagtagtgcagagtcagctcgagtgcatggaatgtaatagccaaagaccgcagtgtatcgacaagacaatcatgtaccggggtaccgtccaatcgaatgttagcccagcatgtaggggagtgggagtacatgtatgccaaggtatactagcacgatagaagacgcgccgtaaggcagtagatccaagtgtcttctacactattagatcgtagatataacatacttaattcccgtaacataacctacccgtcgatcccctctacagtacgtcgaacctctaagacttcacaagccactcatcgcaccactcacttacctatcctcgacgaccttgccaaaaacaagggctaacagtgcacgtagacaaccccatatatagttcccantcccatgcgctgctcttctctccataggaagggccctgacccccgcagacttaaactccgtgcgtttattgtgcccctaaacattggcgccgatttagtcgacacgtagaatttcccacataaaaaagcaaattaagcactacatacaataccacacaagacaatgccataaagacccaaaccaatacaacccgcttccatttaaaaaccattcctaaactataataaaaacttaaccgcccctaaaattcttaacttccccaaccctacaaaattcaacaattaaacatacccgcgaataattccaaacaaacggtaaaaaagattaaaaatggacaagttggaacagtttctcgaagaaaatcccaaacacccaagttgttcgtgccccggtgaaaatcaatcggggcccatttaccaaggccttaattcgtaacctaattattcccccatgtagataggaagaaaaccctatgagaggacaaaagaacaaaagggggggaacggcacagaagtatcccccagggggccacgaaggggaaacacagagtaagagaaacagagggccccaaaaaggagagagaataagacacggacgggaggcgatacacatgaggaaaagcgcgagaggcaacaaggacaaccacagagtggacaaagaaaaca

SEQ ID NO: 720795 - DNA, 353 bp, Homo sapiens
  misc_feature (39)..(39): n is a, c, g, or t
  misc_feature (77)..(77): n is a, c, g, or t
  misc_feature (96)..(96): n is a, c, g, or t
  misc_feature (248)..(248): n is a, c, g, or t
  misc_feature (266)..(266): n is a, c, g, or t
  misc_feature (337)..(337): n is a, c, g, or t
ccggaagataactaaagttccaccataactctagtcagnccaggcaaacctgagagtccagtactgatcatcacacncgcatttgttattcttaancacatcactaaattaaggccgactttttctttcttttcctatttttttgagatggagttttgctcttgttgcccaggctggaatgcaatgtgcgacctcagctcactgcacgccagcctgggcaacagagcgagactctgtctcaaaaaatnaaataaaataagacacangataacaagtattggtgaggatatggagaaaaaggaacccctgtacactgttggtgagaatgtcaatcagnacaaccattatggaga

SEQ ID NO: 720796 - DNA, 1508 bp, Homo sapiens
ttccttgttaaccaagttacttttaaaaagatcctttttaaactgattcttcctcagctgttcttcagccctctatactttttcataaaagtcaccagtgactgcccagttgccaaatagaatgaatacctttcagtgctcagctgtcttgacctctccgcagcatttcacaccacccaccaaccctcagtgaaacaacctcctcccttagcttttatgacaccacaagtctctggattctcagagaatccagaaaaacaagtctctggattctctcctcttacctctcagcccacacaggctgagctgtccttgaaacctagatgggggaaatgtctgtggctgtctgtggtctcttcttttcaggagttgggtagggaggaagaatcacagctgctcctgcttcctctgtctgtctctctatttcctgagtcccttccttttcctgaactcagttctcctcatgccaaccatgtttatgagctcctgctgggaggacagcatctgtgagtccttccctctgtctctcccagacaacacagaggttttagcctgtttgctaagagaccccatctaagtcagcccaagggtgtggattaggttttacagcatccaggccgcagtctggctaaactggattaccaggctggtgggcagctcctcaccatgatcctgcaccagttagagcctgctgtagttgggaaggagcctgggattgtggtaagatgtgtttccgtgcatgtcagtgctgctaaccaggaggagaacctggcagggtgggtgcctgctgctgataacattcggatggagggagactagggagcgcggtggctgctcccttgctggggctcagctggagtcagcatgactccttatatcagggcctttcccacctgtgctgatcaccaccacctgcttgctccagttgtttctggagttggaggcagctattggttgctttcttggaggtaaggaggtatatactagaaagatatctgatttgagagtctgaacaccaaaatttttggctctttccattatgagctgtgtaaccttggatacagtttcctcatctataaagttgtggtgggagaatggctgagaacagtgatctctcagctctccagctgtaaagatgttaattatgattttaactctcaagatcaggccacataaggaacaggggaattccaggggtgggacacagctgggggagtccagaccagggcagggaaaggagactcacaagccaaacagagctgctttggggaaagttcttatcagctggtgctgcttcctgagccatatgcccattcctcaagctgtacccctttcttggctatgtaggatgagttcctcctaggcccttgttaggagtggctattggattctaagcggttggggcatgagggaggatattttaaagggaagtatagctgattttaaaagaacctatacattcaagaacaaataaaaaacagcacttttctttaccaagaaaaaaaaaa

SEQ ID NO: 720797 - DNA, 1154 bp, Homo sapiens
ttccttgttaaccaagttacttttaaaaagatcctttttaaactgattcttcctcagctgttcttcagccctctatactttttcataaaagtcaccagtgactgcccagttgccaaatagaatgaatacctttcagtgctcagctgtcttgacctctccgcagcatttcacaccacccaccaaccctcagtgaaacaacctcctcccttagcttttatgacaccacaagtctctggattctcagagaatccagaaaaacaagtctctggattctctcctcttacctctcagcccacacaggctgagctgtccttgaaacctagatgggggaaatgtctgtggctgtctgtggtctcttcttttcaggagttgggtagggaggaagaatcacagctgctcctgcttcctctgtctgtctctctatttcctgagtcccttccttttcctgaactcagttctcctcatgccaaccatgtttatgagctcctgctgggaggacagcatctgtgagtccttccctctgtctctcccagacaacacagaggttttagcctgtttgctaagagaccccatctaagtcagcccaagggtgtggattaggttttacagcatccaggccgcagtctggctaaactggattaccaggctggtgggcagctcctcaccatgatcctgcaccagttagagcctgctgtagttgggaaggagcctgggattgtggtaagatgtgtttccgtgcatgtcagtgctgctaaccaggaggagaacctggcagggtgggtgcctgctgctgataacattcggatggagggagactagggagcgcggtggctgctcccttgctggggctcagctgggggagtccagaccagggcagggaaaggagactcacaagccaaacagagctgctttggggaaagttcttatcagctggtgctgcttcctgagccatatgcccattcctcaagctgtacccctttcttggctatgtaggatgagttcctcctaggcccttgttaggagtggctattggattctaagcggttggggcatgagggaggatattttaaagggaagtatagctgattttaaaagaacctatacattcaagaacaaataaaaaacagcacttttctttaccaagaaaaaaaaaa

SEQ ID NO: 720798 - DNA, 983 bp, Homo sapiens
gcgggagcgaggggcgccggtgcggtgtgtgctcctgagctcttcagaaaccaggctgcttcaggaacatgctgtggattcccaggcctattccactagaagcaagatggtgaactcaatactcatgtgaatgtcaaggaaaagatctatgcagttagatcagttgttcccaacgcaaagcaataatgaaatagtcctggtgctccaacagtttgcattttaaatgtggataaagccgtgcaagcctttgtggatggcaggtgcaattcaagttctaaacgaatggcaatatgacaggaacacccagcacgcacaataaacagaccaaagaagcaagtccaagcagcatcaaggcaacaaagatgctaaagacaaggtggagaggcctgaggcagggcccctgcagcgcagccaccactagattcaaaacggcccatgaaatggctgcgagaaggacagctcgtgacgaaaacagatctcgatacttgaggacccttcaaaggcacttcgtggggtcaccacggcccaaatattgcgaacctcagtgacaggatttgcaaccgctgcagcgtttctctaactagatatcgcgtccttgatttacggaaagcaagtggctagtcccgtgaacgacgatcacaggctgctgttggtgaatttacccaaacttgcattcatctgcacaacagacagtttccttaactgggccgcacttggctactgttcacagcaacgacagccctggcaatcctggactggttcgtcacaaaacaaagcagacaactaaagaaacatcactgactcgccagtcagatggcgcagtgcacttggcgcacccaggcagcaaatagccttttgccggaccgtcaatttgacgcgcagccgccacagtgccggtcttggcattgcagtgaggccaccttctcgggggataccttccaaactattcagatcccgacgccggtcgggaggcacgcttgaca

SEQ ID NO: 720799 - DNA, 367 bp, Homo sapiens
gaaaaggagtggggtggtgtcaaaccctggaggccccaaccctgtcctcccgagctccttttccatgctgtgggcccaggggtgggaggaaggacttccctgtgtagtttgtgctgtaaaaagttgctttttgtttatttaatgctgtggcatgggtgaaaaggaggggaaaaggcctgtttggcctttttgtcctcttttcctcttcccccaaaattgagctttttgcccttgatcagcccccccctggcctagaccagcagacaaagccaggaaagggtcagctgcattccgcagcccccccccccaaggttttccaacatcacagcccagccccccccctgggtaataaaagtggtttgtggga

SEQ ID NO: 720800 - DNA, 853 bp, Homo sapiens
gagcgtgcgtgagcgggccggaagactgaccccttcctttcgcagctgcaccaggtgcaggtgccccgatgtgccagcagatgatgcacgcctgcgcacatcaactcgcaccatggaccgctgatctgctgcatccacaccggcggggcacagcgagagcccagcgagccaggtgatcgccaccgaagaccgagaggcacgcgggcccaaggggacacatcgaccagaaccgagagccatagcaggcaggcggcctgtcaggaagacagcatcaggacagctgacatgcacggacaaggacgaccaccggagcggacagagcgagaaggcacgacagaaggcggccagaagggctgacggaccgaggcaccgcaaagaacagacagagacaacaagcacaccgaagcaaggcacgccggagaggccaaacgccacgacacaccgagacacaagaaaccgaagagcacgacaagaccaccggacaacatcgaataacacccaggaaagaaataaaccacgaggaggcaccacagcaaaaaccagtaagacggccgagcacgagcacaacagccgaaaaaccgcgagtccaccaagggagggcacacacagcagaggacccgagctacagaggacacaaggcaccagagcaccgtgcacacgcgcacgctaagataaagcccacacacccaatgacactcccacgtcgtagcccacacaacagacgcgtaagacgacacgaccacagacagtcggcaatcggtcacgaaacacggggacagagccaagcggacccacggaagaagccagagaagacgagaccacaacaaccagccggcaaacgacacgagacaac

SEQ ID NO: 720801 - DNA, 361 bp, Homo sapiens
gcttaattggaatcttgccttacagtccttggcccttccttcaccttgtatgtaatagctgtctccccacactttacagaatgtaggttaggggtgagtcatctctgtttgtctttcctttagagcccctctcccaccacccttgggaaaggagagtctagaggcgttttcttaccaggcctgccgacccctgcaccatggctcggtgctgctcctcagcaacagcagcagcaacagcaacagcagcagcagcagcagcaggcaccgccggcttcacagccacagcagcagccacagacaggccctctggttcccccacggcaacccacggttggctctccagcagagtcagatgagggaa

SEQ ID NO: 720802 - DNA, 946 bp, Homo sapiens
gcggtcgcgcggagtgtttacttgcggcgggctgcgtgggtgtcctcgggacgtccctttgggcccgtggtacaatttgccggacccgtattttggcccctccgtgtgtcgcgctttctgcgtgactgtgggcatattcgccttggggagggtttttgtgtcgtccggggccaccagtttttccggtttatcgaagtatgttacactgtgctccgccgtccgtgcccccacccgtgtgctgccgtgccagtcggccccgcatttgggtgtctagaaactagcgtttggtagttgacgggcaaaagcgcctttccctgtggccccactttcagttgttgcccgctgatggggagcgcttcgtgccagctaacccttacctgaagtctgtctacgttacaatctgctaaaaacacatttattctttccggcccacaaactgtaattttgcgtcttttagaaaaaatctttttgtctgcctacaaaacgccccccacatgcaataaattggtctcccctaatttccgccctgatcaccccaaggaggtgaaaatagcagtttataatacacactgggtctaccgactcaaaaggcatgacgacaatatttttactgaagacaacactctgttattacctcaccttattccctcgcttctataatacttctcaaattatatctcccccttcacaaagaacccttccttaaaacgggataagacatctctgaatgagatcatttggtgcgcatatcgtcagatattcaccccgccaaaatgtcttttccccctaaacctcgaggtcattacatacacgccccctttttgtaagacaattttccctcattaaccccatgttccctcccttggataacaagatggagataaatcccttgtatagcctctaaaatggtgtaccctctttttttggtaataacgaccacaaaaca

SEQ ID NO: 720803 - DNA, 246 bp, Homo sapiens
ttccggcgccagaaactttgccgctccggccgaatacaaaccaacagactgtagccattttctgatcactctcctagatcatgtgaaggcacaggttcagagcctccaggagagttccaggcgccccggcagggggactgggagtggggactgtgcccagattgaaggctcgggacaaaggcacgatgggcaaacgcgtcaaggtgtgggcgtcgagtgaccgcgggcggagatcgccagcggccg

SEQ ID NO: 720804 - DNA, 713 bp, Homo sapiens
  misc_feature (64)..(64): n is a, c, g, or t
  misc_feature (166)..(166): n is a, c, g, or t
  misc_feature (183)..(183): n is a, c, g, or t
  misc_feature (203)..(203): n is a, c, g, or t
  misc_feature (218)..(219): n is a, c, g, or t
  misc_feature (231)..(231): n is a, c, g, or t
  misc_feature (251)..(252): n is a, c, g, or t
  misc_feature (300)..(300): n is a, c, g, or t
  misc_feature (303)..(303): n is a, c, g, or t
  misc_feature (337)..(337): n is a, c, g, or t
  misc_feature (349)..(349): n is a, c, g, or t
  misc_feature (367)..(367): n is a, c, g, or t
  misc_feature (378)..(378): n is a, c, g, or t
  misc_feature (380)..(381): n is a, c, g, or t
  misc_feature (404)..(404): n is a, c, g, or t
  misc_feature (422)..(422): n is a, c, g, or t
  misc_feature (430)..(430): n is a, c, g, or t
  misc_feature (432)..(433): n is a, c, g, or t
  misc_feature (442)..(442): n is a, c, g, or t
  misc_feature (456)..(457): n is a, c, g, or t
  misc_feature (462)..(463): n is a, c, g, or t
  misc_feature (480)..(480): n is a, c, g, or t
  misc_feature (503)..(503): n is a, c, g, or t
  misc_feature (509)..(509): n is a, c, g, or t
  misc_feature (520)..(520): n is a, c, g, or t
  misc_feature (530)..(530): n is a, c, g, or t
  misc_feature (558)..(558): n is a, c, g, or t
  misc_feature (596)..(596): n is a, c, g, or t
  misc_feature (598)..(598): n is a, c, g, or t
  misc_feature (624)..(624): n is a, c, g, or t
  misc_feature (628)..(628): n is a, c, g, or t
  misc_feature (630)..(630): n is a, c, g, or t
  misc_feature (633)..(633): n is a, c, g, or t
  misc_feature (637)..(637): n is a, c, g, or t
  misc_feature (640)..(640): n is a, c, g, or t
  misc_feature (660)..(660): n is a, c, g, or t
  misc_feature (666)..(666): n is a, c, g, or t
  misc_feature (668)..(668): n is a, c, g, or t
  misc_feature (682)..(682): n is a, c, g, or t
cgcctcaaaggggtcattgacctcattttgagaaggccatttcagagcccaacttctctgtggnctatgccaacatgtgccgctgcctcatggcgctgaaagtgcccactacggaaaagccaacagtgactgtgaacttccgaaagctgtgttgaatcgatgtcanaaggagttgagaaaganaaagatgatgatgaggtttntgagaagaagcaaanngagatggatganagctgctacggcagaggaanngaggacgcctgaaggaagagctggaagaggctcgggacatagcccggnggngctctttagggaatatcaagtttattggagagtngttcaaactganagatgttaacagaggcantaatgcatgantnntgtggtcaaactgcttaaggaancatgatgaagagtccctngagtgccntnngtcgtctgntcaccaccattggnnaagannctggactttgaaaaagncaagccccgaatggatcagtatntcaacncagatggaaanaatcattaangaaaagaagacgtcatcccgcatccgcnttatgctgcaagacgtgctggatctgcgagggagcaangngggtgccacgccgagggggatcaggntccnangancatngancagatccataaggaggctgngatggnanaacatcgagaggcncatcaagtgcaacgccgcctccatggcccag

SEQ ID NO: 720805 - DNA, 199 bp, Homo sapiens
taggagggaagatcatggctgtgaggtcaggacgggggtggtgggagagatgctgaagcactgtgaagaggggtctgtctctactttgcagagagagaggagccagtgaatatttttcagcagctgagatgtgtgatcagataaggttgggaagagataaatttttccctggctgatacgtacagagcacactcctagc

SEQ ID NO: 720806 - DNA, 403 bp, Homo sapiens
cgatcaccggggtgctgatgactgctgcgccgagctgccgatgtcatcatgaccttcgcacagtatggtgactatcctccgagccgtcgagctgtctggagaagcagcgagcagctggctgccatctatgccgtcctggagcagcttccagaagccaagcacaactccctggagagactcatcttccaccttgtcatggtggccctgctcgagactgtcaagcgcatttcgccttggggcgctggccataatcttcgcaccctgcctcctgcgctgccttgacaattcggacccgctgaccagcatgaagggaggtcctcaagatcaccactgtcgttggctgctggagcagccgcataaatcaggcataccaaggattgccctggggaactaacgacgataa

SEQ ID NO: 720807 - DNA, 206 bp, Homo sapiens
  misc_feature (11)..(11): n is a, c, g, or t
  misc_feature (27)..(27): n is a, c, g, or t
  misc_feature (41)..(41): n is a, c, g, or t
  misc_feature (105)..(105): n is a, c, g, or t
tttcaccttantggtcaggagttccanaccggcctggccantgtggcagaactctgtctctactaaacaaacaaacaaaaaaattagctgggcatggcggtgcanacctgtgatcctagctaatcgggaggttaaggcaggagaatagcttgaacccgggaggtgaaggttacagtgagctgagatcgggccactgcactcctgcc

SEQ ID NO: 720808 - DNA, 205 bp, Homo sapiens
ggcccccccttaaaagtgggtttgttccttcaaccaacaaaatttgggggtccccgtagtaaaccccgtattaatttttccccgtttggccctccaaaaaaatcccggaggatatttttaatggggggggttctaaatgaataggaatcccccccctgggctgttttttagggccagtaataaacataaggactgggttcagtta

SEQ ID NO: 720809 - DNA, 489 bp, Homo sapiens
  misc_feature (451)..(451): n is a, c, g, or t
  misc_feature (467)..(467): n is a, c, g, or t
tggtgctgggcaaagggagaggaaatgccactgtggaaattgtggacggttcagggagatgagatcttgggttgtacacgcagcttatatacagagcctggttcataatagacactaatagttctgttatttcctagaagtttcccctgcactgctcatcttgcatcatctggaatggcgttggagattagccggaaggagcgcaggagagagtgtatatatatatttatacatatataaaattgaagggatcttgcagctaaacaacttaaagggatgattttacaactcatttttttttaaatttagtgttcttaaatcaatccagtaaatattaatgtatatagatttatgaagcctggtgtaatgttgtggcttatcttcatgatatcatatgcctaaatcaagccaatcaacctggtctgttcccactataagaaaattatcaccnaatatatatatatatntatatatatatatatatatata

SEQ ID NO: 720810 - DNA, 1664 bp, Homo sapiens
gtgatctgtagcatgagggctgcgccatgaccagggcactcgctggaacgacaaagctgaggagaataagcgataaaggacgagaagagaaagacaagtagcttctgagatgtggtacaagctctgccgtctggtccccgaaccttcaccaagagaccaaacagcagaacgtcatactcgaggcactcaaagcagttaagtgatggtgaacaagctgcctccaggtatctccgatttcctgatctgaggcacccaagctcacctcagggtcaagagcaacagggaccaaagaggatgaagtggtcttgagtggaacgggaccaaacctcgccagagaatcacacagcgaaatctatacgcagtcacaacactccgattgaccggcgcgcatgaaccgtggatccagaatagcaccacgatcaggattgatacggaagcacccatgccagacgatgatgtacacgaactaccacactggaaccaaacacaacaataagcacagataatacaacaaaagcaaggaaacccaaaagaagcaataaaacagaaaagcaagcaccggcagacatataacaacacaatagcaagaacaaacaaccccccaagagaaacaaataaaaagacctcgaacagaggaacacgaacgagtacaactagaacccaggcagcaatagggaacaataaacaacagaaaacaacacagaaagcgacacacaaacgaacgaaacagaatcacaaacaaaccaagacataccaaaaaaataccgaaacaaaggccaagacgagaacaacacgaggaagaaaccaaatacaaacacagacaacaaacatggacacacgcacacacaacacaatggatcatacaacagccacaaaaaccacaccaaacatagaaaaagaacaacacacacgaagtggatacagcgacacagacaatgcaaagcgacaagcgaacacaaaatgagagacacataggtcaaagatgaacacacaaacagaaagcataccaaccaccaaatactactacagcacacacacgaaacaagagtagacaacacaacacagcaaacggcactaagcaacacgaggaacagaatgacaacacgcatagaacaacaatagcgacaccatagaacacacaactacgtggacagtacaccaacaccatcgacaagaacaaagagagaacaatacaacaagacacaaccaaaacacaacgggacaaaaaaccgacaaacaacaaccaacgaccaaaagcgagagagacacaaagtcacaacaacaaacaaaaagaaacacaacacaaagatacagacaactaccaaagccgaacaaaatacataacacacgcacgtcacacgaatgcaaacgaagagaaagtactgaagacaaaagcaactgacaatcacaccagtcaatcaagcaaaacacaataagagagacaagaaacaagaaaaaatacacgaacaacaagagacagacacagaaagcacaacaaacatgaaccacgcaccacaacgacaacatcaacgagacacagaagtcgaaacgagcatcactcctatcaaacaaacgacagcacaaaacataaggatcacaaaaatagctaacaaaaacggaacacaacagaaggcgagcagaagaagaggacagcgaaaaacgaa

SEQ ID NO: 720811 - DNA, 319 bp, Homo sapiens
aataacataccagtccttctgtacctcatgtatggcagagatatctactctgaagcctttgtatgggcctgggtacgtatgggagacctgagatggaactgaagctggggctgcagcctgggcacttgtgttttgataccatggcactatggcctatggcctatggcctttggcactgtgcacagcctgagccccttgtgcaatactgggcacgagcacgcttcccaagcttgtgtgtgggcaatgtaatgcaattcgatcgagcttgcggcttgacaacctaaggtatcttgggcttaaactccttgggcttcacgat

SEQ ID NO: 720812 - DNA, 265 bp, Homo sapiens
  misc_feature (72)..(72): n is a, c, g, or t
aaaaactttccaaaaaaattttcaaccccttttcccccttccttggggggggagggggttctgaggggaccnactttccccggccccggcccctttttaaaccttttcccccctgcccctttgggtcccaggggcaaaagaaacaagggatttttttttccccccccccccggggggccccccccggtggggtttttttttaaacccccaaggggggttcccgggccccaaaaaaaaaccaaaattttctttttttccccgggga

SEQ ID NO: 720813 - DNA, 302 bp, Homo sapiens
tccagattcatgattgtaaaaggatcgcgagtctgacatgttcaggttggtcctgatctcggaagtgtggtagtctgtaggtgtggatgtggtatgtggatgtgaagtggtgcatagtgctctgggaagatgtaagcctggcagcaggggagtgtgtgcaggagcagggctacgggtggtctgcgcagtttgtaacaggggcctggccaatagctggggttcaggacacagttcagattagcaggggagggatcccggggatggccagggtagatgacacttccaagcacttccgagtgagt

SEQ ID NO: 720814 - DNA, 115 bp, Homo sapiens
  misc_feature (4)..(4): n is a, c, g, or t
tatnctgggtataggtggaagaataatgaggcaaacaggacatgagtcagacgctggagccagagaccaagaaacagtttctgactcatgtcctggttgcctcatcgggtgatga

SEQ ID NO: 720815 - DNA, 283 bp, Homo sapiens
acccccccccccccttttttttgggggggggggggggggtcccccccctttttttttttcggccccccttttttttggggggaaaagggggggttttaaaccccccgccggtccaccccccccggggggggggggggtttttgggggccccccgtgtttttttttttgggggggggggggttttggtttttttttttttttccccgggctttttttgggggcccccccccccccccttttttcccccgtttttgggcccccccctaaggggttttggggggga

SEQ ID NO: 720816 - DNA, 1500 bp, Homo sapiens
cgggccgtacagcggcttgcggtgagaaatgccccttccgggctaggagcgacggtgccgtgccgctatactcgcaccacctcccacacctcccgcgctgcgatgaaagctgctgtataggcctgccgtggcctccgcagagtgatgagcgctcgtataacaccctgaccgcacatctgaccatgtgctcggcgaggttctatgtgggagatctagcaaggaaccattcgtattcctgagaggtacctcagtggcacggcaagactgagagagtggatccgagcagggatgcctccgacgatccatggctagcgtatgcgatcctccgagatttacaagcgatacacgaccacttctgagcctagggaccaagtctctcaggagactcttgacacagggcaacgtgtcatccgcttccgcgatctgtcctgagatattctacccactttttccctagtgcattgattgagaacccaggggttccttcacgcctaagaaacgactctcgtaggacaagcaacaaacacatccgccatttactgattaggctaaattgagtacgacgaagaggtcattacggccgctaagtcgatcgtatctcccaggtcggtgttaccctctgtgtgaattctggtagccaatacagcacacaattgtcggtattcaaaccagccactatgggcctagagacgaggatttgtcccaccacccgaagatgagtacacgtagagtgagagagaatcgagattcttgctagtggtttgacaacaagtagggggtacttagcaacggagccttaggtttccacaaagcaatctttgtggcggcatttgacccaaatagataagtcaatttccatagtggggttggtcaaatattccatatcagtggtgcatcccagtgaaatttccagcacagcattttgggaccttacctattccaaaagaaaggaaacgcattggacaagacgcactgcccattagggatcccatcctgaggaagtggtgtttgacccatcctccccgaagttgggtgcacctgcgtctatccaacgaagaaactgcgtgtgcagttccacaaaaaaggctatgcacagaaagagttgtattcacggttcgaaataccctttgtattaacgatcacgtgcacacgaccgtggatagagcatttaggagtaaaagggcactaagcaatcgcaccaatgtaatagtggagaccatccataggtccagtgcgaaacgtagtaaagaccctttgcggggacagattattatccaccaatgcgcacacgactaaacactctacgtgtggcgcaaccagatctatccaatgcgggccccatattagatgctagccttgataggttcattcaccatttcaatgggcccatcgcaggtggtgagccccattagtgccatgtaactcgttcgcactccaatatatcccgccattgtggtattaccgcatattgagaatgggacattgaagcgtgacagatcc

SEQ ID NO: 720817 - DNA, 327 bp, Homo sapiens
aaattaccaaaatttgggggtgaagcctaaagggcttgctttttgccccttggcccaaaaaaaaaaaccatttgccttttttaagcagccagggggttttattatttttccccaaaaacgctcctttttgggaaaaaccaacgggttttttaaaaaaacccggtttttccccaaacccccttaaagggttttaaaatgtttcaaatccgggccaggtgagatttttaaaaacctccttttttatttgtaaaaaaaggttccccctttattttttcaaaaaagtcccccaacccccagcccccgttaataaaggtttttaatttttta

SEQ ID NO: 720818 - DNA, 398 bp, Homo sapiens
tcatcgacgaggagtggagctggagcggctcatgtggcggcggccggcggggaccgtgatctccggcgcacgggggagcatgcgcctcggggagcgggaccttctcctcatccgtggcggagacctgcgccacataggcggtggtggcaacattcccctgggagggatgaatctccatggggggtggcctaggccagggggccagcacggcggtggcagtgatctcctggccatcaatttgtcctccatccatgtgcttcagcgccttctcggcttcatctggattctcaaactctacgtacgcatcgcctttggacagatggggatgcatcctttccacgggcatgtcaatcattttaattttcccataggtggaaaatatctccatgatgtgatcg

SEQ ID NO: 720819 - DNA, 1039 bp, Homo sapiens
gttcttctcttctcgtttgttctttctctctgttcttcctgtttttgcttctttcttcctcttttgttctttttttgtcttttttttttcttggttggtttttttcttcttgttgttgcctttgcctccttctttctggtatttttgttttttcttctctttttttcatctcttgccttcatcagatcactgtgctgtttcgcctttctcccgtgtcttcgctcccctcttgtgcccgttgttgtttaacctccccttttttgaagcccttgccccgttgatttgtgtaaacattcaagacctgcgagcgctctgggagttagagtattatacttggaaaatcccgatttttgaaggaataataggtatcttgtgctttaataccttatgcacggattgtactataagccaatgaattaaaccgctatgtgaatcataaagaaaacttaaaatgaacccaagtgaaaggataacttcccgccagtatctttctattggaacccgttatttaaggaaatactagtgatttcttctaaataggatgttaaacttctttccaattactcttcctcagtcctgcctgcccagaactccagtgtaactgtgataaaatacacctttccccaggtatattggccaggtatgtgtgtaatctccagaataccccaggtgacatagatatgatatgcaccaactggtaatggtggattccatttcaccattgtttcaccacattctttatgcacccaggcccttaagggaaggtccagttttttaaaaaacccagtagtgtcttcctacctatctcccagataccatgtccaaaaaaagaaaggtgtttgtgcttcccttttgtttctgctccagtaattatagtccagccagtttgttcccagtgaccccttgagctgtgtatcccatttttgtttatttccaataaaaaataatttgtattatttgtcccttccatactatcccatccataccacactatcttctgtatcaggtagtctaatagaaaaatacctgttttgttcta

SEQ ID NO: 720820 - DNA, 1673 bp, Homo sapiens
  misc_feature (1)..(1): n is a, c, g, or t
  misc_feature (92)..(92): n is a, c, g, or t
  misc_feature (1069)..(1069): n is a, c, g, or t
  misc_feature (1236)..(1236): n is a, c, g, or t
ntctctgagcatatatattttcataatgtttacattaccatgcgttgcttcttcttgtctccacgtagagtgttgggttctcgtctggtgtnttgggctagcctttgttgtttggtgtgttgatcggttggtacacgttcttttgcttgtcatgtgtcttcctctcggtggtactcttgttcattctcctgttgttgtggtaggctctttttttctactattggttcaattttgatatcccgctgctcctcgtcctttccgccgtggtttttccaacacaacgtggggggtatttgtggccatctgtctccgtggtgcccctgtgtgggcactccggtggttttctagcacccgctcggtttgttggggtgccacaccgtcgggtcatccaagtacagtccgtgtttgactcctcggggtgagttgaatgattcttgtgttcgggtgaatgcgcctcgtctctgtgacgcgcttgttgtgaatgagaacgttctttgtccgctggggggaaccacaaatgatggggcgcttcccaaaaatgtgccagaagagaatagtgtggtctgtgtccaaaagagggaaatgtttctgtttctggttgcgcgaaaaacacatttcttgtgggttggtacctccgcctctgagtaagtggtgctgcccgcaccccaaactgggggaagctaagtcttggtgcttttctatactgtggcttccacaggggttgagtttattctccttgggacccaattctccagggcgcccaaatattatggcgcgccccggcgttagttgtcccccccctggttaattttggggagttggcgcacaaccccgcggcggtctaacccaatttggcatatggccagattgtttggcgtggagagcttgtagaagcgagacaaaagagttttgagtgtcccccgctgtttcttgggtataaataacgcgctgggagatagagatgggccccctctgaaatgtgtctctgagagagtgctcggtgtgaatgactcgccccactctggtctagaataatggtctttctcttgggccacaaggccccacatgntgctgtttgaagaggactgttctcacagagctatatctcaccctctgtgggggtacgcgcttgtgtctcgtttctctgtgaatatatgtagggaccacagacacacacgttgtacgcggtgtgggtggttcacatccagaagccacgcggggaccacaagaagaggnctcgcttggagagactggccaaaggtgcaccccaagttctgccccacgaaaggctccacgagaagggctataatgagatatttatttcccttaatagcctcgccacaccgccacctgtcttaaatccacgctggttggaaagagaccggtgtctccacgagacctcgtgttgtgttcacaattggccacatttaaagtttaagtatgtataacagagactgggtataatgagtaaccacaatgcactcgtataaccgtctcacgagaaggaaaaggaggaaatgttttgtggagccacctttggttttcttttttgcgtgtgcgcagttttaagttattagtttttaaaatccagtgactttttacacatggagaaccacattgagccccaaaatgttgtcaccagaattttgagaccccatttaaaaagtttaatg

SEQ ID NO: 720821 - DNA, 223 bp, Homo sapiens
gggagggagggaggccgcgggagctggaagtgctggcggaagctgtgtcacagcgcgcccctgcgcccaccacccagacaagagagatctaagtcaggcgttgggcaggagatggagctgaggcaggagactcgcttgggcccaggaggccgaggttgcggtgagccgagatcgggccattgcactccagcctgggcaacaagagcgaaactctgtctcaaag

SEQ ID NO: 720822 - DNA, 272 bp, Homo sapiens
tgctattattagaacactgacaaacattcttagagctaaaatctttgcacacatccatgtttacaaacttagagtaaatccatagaaatagagttactaggacaaagatcatgcaaaatgataaggcatattggcaaatcactctccagaaaggctgctccagttcattcttccaccaatagtacatcacagtgtttgttccttgaatccctgtcaaccctatacaatgtaaattaagaaaacaaatttaaaccaatttaatcaggtcgacg

SEQ ID NO: 720823 - DNA, 107 bp, Homo sapiens
  misc_feature (32)..(32): n is a, c, g, or t
  misc_feature (73)..(73): n is a, c, g, or t
  misc_feature (75)..(75): n is a, c, g, or t
  misc_feature (100)..(100): n is a, c, g, or t
ggcacaaaggccagaccgtaaaggcccgtgtngcgttttcatagctcgcccctacagatacaaaatgcctaananaggtggcaaccgcgactttaaatcnagcgttc

SEQ ID NO: 720824 - DNA, 214 bp, Homo sapiens
actctagcaggatccccctcaaaccctgtcatcaaaccctaccctgtgtattacaatggatgcctctggtgagtggaatactaaatccaaaatactcttcaatagcagccaaagtggtatttctaaaaagttcctaaagaccccagtgctatgtggcacaaagaacaggaatgataaaagcagcacttgtctgaatcagtgagggtttcgatga

SEQ ID NO: 720825 - DNA, 438 bp, Homo sapiens
ccacatatgttggctgggtgaggtggctcatgcctataatccccagcatcctgagaggctgaggcaggaggatctcatgaagcctggagtttgagatcagccagggcaacacagtgagattttgtctctacaaaattttccatgtgtttgtgtgtcaaacagggtcttgctatgttgcccaggctggtctcgacctgctgggctcaagcaatcctcctgcctcagcctcccaaagtgccgggattataggcgtgagccaacatgccccgtctctacaaaaaaattctaaaaatcagccaggcatggttgcttgtacctgcagtcccagctacccggaaacctgagacgggagaatcactcaagcccaggaattcgaggctgcagtgagcaatgactgtgccactgcacttcagcctgggtaacagaggggacttcatt

SEQ ID NO: 720826 - DNA, 1133 bp, Homo sapiens
agcgggccgagacagctgcacgcaactagtggctccggatctcttcagtctttgcggtgtagcccgagtctgtggtcagcaccgggatgagctcgagctagccactggtctgaagcctccagtagctgaaggcgcggcgtgcactgccgtatcagtatcaagatcccagcgagcatgatactgcagtgcattgtgaatgacatcacttccgtgggagcatcatgtgctcggtctggacattgattcatgcgacctcgatcgactacgtgccgtgaacacttggcgatcactcatgtagccatttggctccatgcttcgccgaatcagtggatgacagtatcgaacggacagatgatttaaggtcgtgagaacgtgaattgtcgagcgtcgatcatagaagcgttctcgtcagtgtgaactcagtgcacggtaccaatgcaggataatctaacttcaaatgaactcgttggcagcaccagacacgacgcgaataggcgatagtgactttacttgatccacgcagttctcttcgtacgcagggcaacctcgattagctgtagcgcatcgtaatgaaccacgtgaaaaagagacctctagatgattccccggaatctcgtgggacatcgatcacacggggggccatggccagcggacaaccgtgaacaggaacgtgattgcgaacgcatagcacaccgtaccaccggcggtagcgcgaacattcattcctaatcagattcaaccttacgttagtggaattataagtgcgcataacgaatggccacccattgcgttgttcggcaccgtaggcaaggcatttccttgttgggacattgtgcaccttagcgaaagaagctgtggacttccattggcggaacctgcttgtgtcttggacgacggattgctggaccaaccgccagcgtccaatacgtacccgggttggcgtcgttggagtcgcgaggcctcataatttgccagtcaatcgcaaagcggttggtaaaggtcgcatgcacagcatgggttcgcctctggtaacatacacaccgtatgtgcctggaactcggacggctgttgggacgaccaacgaatggaatgcgcaatccagttggtgtgtcgccccggcgcacagtacacgc

SEQ ID NO: 720827 - DNA, 187 bp, Homo sapiens
cacaacaccccagtcaacccactcgactgcagacaccactggccaagccaaacccaagatttctcaagcattcttcagccaaccctgctctccttatggacctcagcttaatcacattggtcttagcttcaaatgggcacaccacagacagcacttctggaccatgacagtcctccgtgattccttg

SEQ ID NO: 720828 - DNA, 1193 bp, Homo sapiens
cggcagctctgctggtgcgtgggtccggcgagcccgggatctgagtctacctgtcggccgagtcgccgccggtcaccgcctgcaccgcctttccgtccgtcctcctgcgacggtgggcagtccctgcgtgtctcctctctcagacgcacggaccctgcgtgaccacggacgccgtctgtcgtgtccaggcatcttctcgagaaagaccacaaggttgctcgactgaatcgggcctgttcctaacacgctcatagcctccgacgtgggcacgagtattgactcgaggtacgctctatccgttgtctagaataataaagcacgctaggtcgtcgtaagtgaagctgacgcttcgaagctagtgccgttaatagagaagcttcgagcacgtgtgcagtagtcacccatgcgcttcggctgcgaaagtgtgacagtaacgcctgacgtgaagccttgactcaatcgtatacgggtagaccgttgcatggcctcccaatataatccaggttgggatgcagcatgggttataatttgagcctgggatacctcactcttcatgggggacgacatttattgagaccgcccttaatacaagcgactaaacatgtacttggacatgttccccccgaatccggtggcataattatgccggtggcgttgacaataaccctaatgaattgcctggataactgccctttgggcctttgaccccgtgtaccaatgtgtgttgtcctgttactcctatacatgggagagttccatgcgagttgtccatgtggagagcccattactttgagttaaaccacaccatttggagtggccattatcggttggacagtaagggccttccaaatataacccgttaagcacagctttcgcggccgttccccttttgcccgaccattcctatggaccccaaacttatggtcccccgggggaacacaattattccacatttggggatttacggcgcgctgtaaacacggaagaagactttggcccttatatgtcgcttaccacagtagtggccttacctcagcgaaatgggggaagccgccttatcaaagcgccccccgttaggagagcgccacagtgcgccttttgcaaataggagagaaagaaacctttaaagactgtgggccacacgtttaccccttgggagggggtttcaacatttaaacaccggaacacttagg

SEQ ID NO: 720829 - DNA, 972 bp, Homo sapiens
aactggggagtgatgaagatgatattgatgaagatgggccaagcacatcatttggcagcattctggctcaagccaggctgcacagcatggagcatgcatgcaagcattgggcaagcacagcatgcatagctgaagcagcactagctctggcacaggctcattcctaccaatccattgcatgcatgcacagcatcaacccgtggttgcatgcagtcatcgagcatcatttcaacagctcatctttcgaaacgtcattccaaaatcggtcaatccatgtagtggtcatcgagggcactgactacacggtacttaatgcaacggaaccacaaggacaaacacagagtacacgaggcactatcagacacactcgtgcgctagcatccaacaggacagcagccagcccaatgaaatcccaaaaatgcatctgagcaagccatggcaggcatcaccaacattacagtggctaccagtatgtagccaaagtatcttatcaacattatacgggcaggcccagacaaccagaggatgaattagacgttaatcctacttttctattacactggctagtggtgctatgtaagtggaaggaagcattggtgttatccatcctaagtacgtgggttccagaacactgggttcaatggttaactctagttcgtaagactacactaactcaagtacgattgggacaacaacgaacgcaacagaaagcccaaggcagactggggaccatggatccatgccaaactgggcactgggacccacgacaattaagcgaggaattatggggacggtgaggggaggcgatggggcaggtacctttaagagcggacgtattaaactctacattcgtacggaagcacagtaagattcctggacttctgaaagctatcaagtgacactgaggaaaatctggacacgaggggatgtcatgacgtgaggttagaactaacctgaggaaacttaggatgc

SEQ ID NO: 720830 - DNA, 195 bp, Homo sapiens
  misc_feature (1)..(1): n is a, c, g, or t
  misc_feature (5)..(5): n is a, c, g, or t
  misc_feature (104)..(104): n is a, c, g, or t
ncccngtgcgaaggataggagtatggtggggtgttgattgtggtaaactttaatagtgtaggaatctgaataatttatgaaccagaggggtcagggtttattcncaaagaacctattaccactaccaatctctattactatttttacaccaactatactatgttcaaccattaactattactaatcaactcccat

SEQ ID NO: 720831 - DNA, 394 bp, Homo sapiens
cagcagagaggaagggagaaataagaaatcaggactcggaggagactttgtcctgttgctgcaccccttaggtcatccaagagagctgcggaagtatctcccgagggtttctgaaagccccagaggaactggcagtggtgcgttgcaagtggtcagaagctggaggagttgaaggcagaggagccagataacttcagcagcaaagtagtgcagaggggccgagagttctttgacagccacgggaagtacctgtacagaatttgagtcggtgcttgcgcttatggagatgcctcgtgaaacacagctgggcgagtatttatgtgtattgaacaggctggatttctgcatatggattagccaccttggaataggaagaggtgttgagcctggactg

SEQ ID NO: 720832 - DNA, 228 bp, Homo sapiens
ggggggggaaaggggccgggaggggggggccgtcccgcccgtttttttttccctgggggccgccccccccgcccggggggttgggacccaatggggttaaacccggggggcttggaagagccccgggggtttttgttttggggcacccatacttttatttctttaaagtggttttttttgtaaaacttgcaaagatttagaacaatgccccccttgcccggaatttga

SEQ ID NO: 720833 - DNA, 197 bp, Homo sapiens
  misc_feature (34)..(34): n is a, c, g, or t
gtgctgggtatctaaggatccgtgggtgaggccnaccgtcatctatctacatcttgcaggcacactcatcacagcgcaagctcgcacgattttactgagtagctaaataacatatagtttatcagttctaaccaaaaaaataacctcgtcacagaactgcatcagattctcagccacgttggctcagcacggtacga

SEQ ID NO: 720834 - DNA, 676 bp, Homo sapiens
tggaggggacggaaagaggggagtcggagatttggggcgagagggaaaggggtttacgaaaaggggcgttgtggcaggcgagaaggggtaaattgggcatgtaaagtttgttaaagaggtaggtgttggggaaaggtaaagagagggaggggatgtaaagagcaagaagtgaagtggttatggaaagtatttgtggtaaaaagaaaatgcgggaaaggataggggaataagtaaagataataagggaaaatgcaataattgcagaaagagagaatttgaaagagggggggtgaaagtttttttggaaaaaggtgttgtagaagttatttagggcaggttgaggaaataagagggttttgcattaaagagggagtaggaaggtgattgagtattggagaaagtttgaaaaaagaggtggaataaagtgaagaaaggaaacttaattgaggaagaggggtaaatagttggtgaaggagttaaaatggaatggggatagtttaggattatttgtattatgggggtgggccctgaggggaaggggattatcttcgaacatgaggagtggggatttggttttatttttttagggaggagaggattactttttaaaaaaaccgcctgcaattttgaataagaaacagagaaagaaaaaaagggtgtagggattaataaaaaa

SEQ ID NO: 720835 - DNA, 190 bp, Homo sapiens
tatcagtcagtcttctttcttatttgtttggccagtttagctaaagttttgtcaattttgtatgatcctattcaaagagccaactttaggtttagtatagtgttctctgttatatttctattctctagttcattagttaattaatgtaggttaattaattaattaaggtttgacgttgctttttttgttc

SEQ ID NO: 720836 - DNA, 254 bp, Homo sapiens
acgctcaacataacctggtgggggtattcgctcaacctacttcttccctaggtcaaagccactatcatctgatgtgtaagggatgggtcctgattggcagaaattaatcagctcccaatggggacaacggaactaagtagggtcccaagaaaaaaaacgggagctattctcacagagctgagtttctgccaaatttcattcctcaaacctttagtaggagggttaatttgggcgggtaccgaggctcgaaattc

SEQ ID NO: 720837 - DNA, 96 bp, Homo sapiens
  misc_feature (12)..(12): n is a, c, g, or t
attcggcacganggagaagaggaaacacaagaagaaacgcccggtccacctagacccccacgtttggagattcaaaacttctgtcttcgtcctctc

SEQ ID NO: 720838 - DNA, 902 bp, Homo sapiens
cggagtagccgggcacctgtaattccagctacttgggaggctgaggtgggagaatctcttgaacctggggggctgctgtgagccgagatagttccattgcgcttcagcctgggtgacagagtaagactctgtctcaaaaaaaaaaaaaaaaaaaaaaaacccatccctggacaattcaaacagtttcccgggaaattctggcccagggggcttaccaatttggagacccattgggttcgtggttagcattccccttttcatttaattattaccttactccattcacttccttctctaatatttttagcaagtttcacttagttagcaagttggttttgccgggagctcacgtggaggacctttatttaaaaatgtgcgggctctcgtgaatccaggggagccgtggggtgtgggggcccttgagaagttcgtgcatttctcctcccagggcctccctgggtttgctgccaggtggttgcttgcctctgagttaccaaggggggttggggaatgtgatgtattggaccccgtccatttatttactcccattcgtgacaaattgagttcacagaggccctttagggataacttggagggggggacccagggctcgtgattctctgataaggctggtgttttctcagcgccacaacattttacttggcaactgtgggaggtagcggtaaccttaatagaaggtccctttataacctttgctggggagagggtttgaattgaggctcttaagaagtaagggggctccggaaacccccgggtaccgggcccattgggcctgttcgggaaccagggccacccgcagcagggatgtttgacacggggggggggtagagcatagcagaaggctaccatcgtgtatgttgtaccaggcaattcccccaatg

SEQ ID NO: 720839 - DNA, 158 bp, Homo sapiens
tataactaggaacagtagcaccctggccttcaggtacctgtttcccccaactgttcccatcctgaaccagcaagtatgtgcccaattctactgcatagtcctggccctgactcagatttccacatgcagactgtccagcaccactccacccccagact

SEQ ID NO: 720840 - DNA, 873 bp, Homo sapiens
acttcaattagaccgtctaaggtgatctccgtgtctagccatgtcattgcacttccactccctaacgctcctcatactaggcctactaagccaacacacgtagaccatataccaatgatgttgcgcgatgtaacacgagcaaagcaccataccaacggccaccacacaccacctgtccaaaaaggccttcgatacgggataatcctatatattaccctccagtaagctttatttcttcgcaggactttttctgaggccgtttctacacacgtccagcctagcaccctacccacgccaacttaggagggcacatggtgccaccaacaggcatcaccccgacgtaagatcgccctagaaggtcccagcgtcctaaacacatccgtatgactcgcagtcgaggagtagtccaactcaagcctgagctcaccataggtctactagacagagcaaccgaagaccaaataattcaagcacgttgcatattacaattatactgggtctctattgtgaccctcgctacaagccgtcagcagctacttcgagtctcccgttcaccatagtccagacggcactctacggactccagcattcataagtagccacaggctgtacacggaacttcacgtacattagttggctcaacttccctcactatcctgcggtcacccgccgaactattacttcactgatccatccaacgcatcgactttgcgtccgaaggccccgactgagtactgccattttgtacatgtggatacgacctatgactgtatgtctcctactatgtgcggtctcaaagcactgacaccccccgagtaccaaaaccaaagaggagcaaaacacgcgaaacataggacacacaccaaggacaca

SEQ ID NO: 720841 - DNA, 266 bp, Homo sapiens
tgactctatgcaatcaccgtttcagccttccaaagtgttgggattacaggcgtgagccaccatgcccggccaattttttggtattttttgtacgagacggggttagctatattgcggtgctggtcttgaacccctgggctcaaacaatttacccatctcttcctccccaaatagctgggaggtgtgagtcactgtgcctggcccagattgctatatagccttgacttgtgaaggtctgttccccctttggcttaatctgatttggt

SEQ ID NO: 720842 - DNA, 1002 bp, Homo sapiens
gaaacaaggtcaggaaggagtggcccatgaagctggaggaatatcaggcagtgtggcattctgcaagccaagtgaagaaactcttccaaaaaaaaaaaaaaaaaaaaaaaaaaaaaattgttggggcgccgcttcggcctcgggaaaaggtttttgacgaccattcgtgggggggggggcgccccataggttagggcgacgtggccacaagggggtgccaaggaagacccgggccgaggaaacaggcgctggggttctcccccaattaaaaaaagcgcgcgggggacaccggggcggtctcggacacaatcccagagaggagtcccgaaggcacaacggggtctctcacccggggctccacgaggggggctcggatattaaatttacgccccggcggcgtggataccacacgcaagacacacgagacagataagagacaagcaagcaggacacagaatggagaagcagcaacgaagagaagcagagacagtaggagacaacacagaacaaaccacgagacagcgaagacaacgaagacaaagtagcagaagatagaacagaacgaacacgacacgccaagcagacgaatacgtgaaacacagagtagcaaggtagagacatcataaaatcaggcagaaaccaaaaagaggaaggaaagcgaggagaagaggaggagggaagagagaggaaaacagaaacgaaaggacgcacaggcagcaggacaacacacaacaacgacgaaggcaaggacaagaaccgacacagggagaaaaaacacacagacggaccacaagaagaagaagacgaggtacggcaacaggaaaagcaaaaaaggagaaagaaaagaagacgaagaaaagaggcacaacgagagggagaaaagaggacaagaacaggaagaagacagcgagacaacaccaggagagaaacaacagacgagaaaagaagcacgaaaaagagagagacaggagacagaacaaggaaagaagaaaagagagaagg

SEQ ID NO: 720843 - DNA, 931 bp, Homo sapiens
tcctttaatgacaattgcccaggggaaccggggtgtggaaagggaggagctctatcactaggcccttttgtggagtgggaggggcctggaaaaaagggaccagtgcccaggctagaggtaagatatggccaatctctaagctgctgggagatgcttgtttacccacaacccttggtgccattccccgctccaggggaggatgctacaagggcaaggggctgaaaccatcaagggcgagtgggcaaggctgggtgtgaggaagaaacagaagcgtgggcggttgagggacacagcgtgggtggtaaccactagtgggctattcccattctagtaccaagagtggcaggtgggcatcggagccaataacaaggatcccagaagtcaggcaaccgctgagaaacacctcccatgcggggcatcatcgagggaatcaagggaccacgtggcaccaggccagaagtgccccgaacacggtgctacgcccaatattaccccattacgtgcctcccagagggtgggggaaacacaagagtgtggggccaagaggaaagagcaaaagggcccaacaaacttagccagcctcgtatacaaccaatggggcgagcctaaagggcgccaaagaccacaaaagcaaggggagaatctcgaagaacgccccaagaagggggcacacacaaacaagttactcacaggtgaaaaggaaaacgtgggggatcccaaggcaaataacaaggtggacctcccaaaattggataacacacacagagacacaaacgggcgttttgacacacaaacaagggaaataccccccgccatacaatggggcaagacagaatcacaaaaattcgaggggcgccccctgtgaccgtggggaaaaagggacaggaggatcaagggacccaagggtaagcgaccaggactacctcctagc

SEQ ID NO: 720844 - DNA, 853 bp, Homo sapiens
  misc_feature (315)..(315): n is a, c, g, or t
gggagctgaaaaccaacgtgttcggtgacagaccccagcgccgactgagcctctaaagcgacttcagctctgccccaccaacaccacctgcgctgccctgggaacagcctgctccgggaagaaacctgatggggactgcggggggcacgagggacagctgagggaagggaggacgcgagagaaacagctgctgatgcactgctgacgggcctgggggttgccatgtgacgaggtggcccgctgtgaccctgcatgagcggggagtgaacggtccgggagaacaacggggctgggacgtgaggacgaatccgggantcgcctggcacgaaaacacgacgaacgggacgtttctgaactcctgggacacgacggaggcgtgggtacgggaccgcttagcccgagactccgaccagcacggggaaccggagcgctccgaggcgcgcaggggcttaatgctgcggcgaagggcatgtcttaacaacgcaggaagcaagcttttaaattcacgacgatcgcgcgcaaggctgaacgggcaattgcttatgaaacgcggcgacgcgcgagcctggaacgtgtaacgcacggtcacctcacttctagaaccacgctagcaatccggcgaaaatgccggtccgacagcaaacttcccactttccataccttccactcctggtcatcccatcttcccaacatttacaaacccatcccaatattctccattacatcacaaaacagctataaaacacgcgcactctcccaaacgtatttgcccaccagactcaccactgcataccttacctccacactaaaataaactcacttcttacatcccgaccacacacagaaaacacac

SEQ ID NO: 720845 - DNA, 739 bp, Homo sapiens
taagggacagtgtcattcaagaatgtgtgcagtttctagagcactgtgaactttatggtagaaacattccagctgttatagaacagcccttggaggaagaaagaatgcacactgggaagaatacagtcacatatgaatcaagaaagttgagggctctgatttatgagataattggatggaatgtgtaattaccgctgacaatttgtatcatgatgactttctatgtacattttcagtttttcctgtatctagcttttgctatttgtatttgctacttgtgagactttgtacactttagtgtaacaaaagcactattcgatataacctgcacttttaaatcctgtcaagtgagattgtgtaagaacccaggccctagaaagtactttggaacttttaaaactgagaaagatgttgtttctatcatgttttctccatttttgtttggttttgatgtatcttggacaacctttgctattatgttatccagggaccagacactaagttcagaacttagtcgtccataacgtcttcttgtaatcactccaacgactgtgttttctctttgcacaactccccatgattttatagagaatttagagtgtttgacagttttccaatacagatataataatttgtacagattaaatttcttaggtaataattggttttgctagttttcaagattcagtaaattcacttaataaacactaataaataaataatcactaataaataatga

SEQ ID NO: 720846 - DNA, 192 bp, Homo sapiens
ttacccggaaaacttgcccccccccaaatccccccccttttgggaaaaacaaagggttaaaccgggggagcccgccggcccctttaatgggttaaacagttcccccccctttgagcggggggggagggaagggcctttaaattgtgggtgggaattttgggccccccaataaaaaccggtttttccccccca

SEQ ID NO: 720847 - DNA, 403 bp, Homo sapiens
attcacatagtggtgcaactatcatcaccatccacgtccagaattttttcatcaacccatggtgaaacgcctgtaaccagaaacatctccctattccctccacctccagcctctagccaccaccattcgctttttgtctctgtgaatttgcctactccgggtatctcatataagtggaatcacacagtattgtgttttgtctataaagcgactggcttattccacttagcataatgtcctcaaggtgtgttcacccatgtagtagcatgtggcaggattaccttccttttcaaggtagaataatcactgtatgtctatgccacattgaacggacatagcagttgattctacctcttggttactgttagatgttgttgtcatttcgttgggttttgttgttgtt

SEQ ID NO: 720848 - DNA, 321 bp, Homo sapiens
cacgaggtcgagctcgaacgtctcgccgttctcgttcagcgcgcgcacgcgcacacggtcggggcgctcgacgcgatcgtagacctcggggaccgacaggcagccctcttcccagaccttgcgggtgtcgctggcccagacgatctcgggattgatgaagacgcgcagcccgtcgcgggtctccgatatgtcgatcacgatgacctgctcatgcacgtcgacctgggtcgccgccatgccgatgccgggggcttcgtacatgggttccgccatgtccttgaccagctgttgtatgcggtcgtccacctgcgcgatggtctt

SEQ ID NO: 720849 - DNA, 459 bp, Homo sapiens
caggcactcatttatattgctctgaaagagctttccaaagtatttaaaaataaaaacaagttttcttacactcaaaaaaaaaaaaaaaaaaaaaagagaaaaaaaacattgtgtgtgggcgggcctctggggcccctgggagaagagactttttaaaacacattgcggtgtggggcggcgcggggcccaagagagaggggaaaggtggaacagatggggcccaaagaggggttccccaaggagaaaacacgggggcaagagagaaaaggggggggggattctctctcacaccaaaataaaaaagagccgggggggaaaccgggaggggttctgggacaaaattcccagaagtagggattctccgggaggcgccatatccgggggactctttcttaacaagagggagctcccaaagggagagcccgaaaattcaaaattagcgccccggttatgggggag

SEQ ID NO: 720850 - DNA, 287 bp, Homo sapiens
  misc_feature (219)..(219): n is a, c, g, or t
tcaggtagcacagtcagcaggttcaaggcagggtgcatggtggctcatgatggtggggcatgcatgcaggctcattgttttagtgaattcttcgataatggccccatttgggcacaaaagccgtgttcagcgggggccaggcctctctagggcacaggcagggtggcatggcaattcaaggtgtgttcagtccattgttagctatgtttcccaggtgcngcagcatcagtcagtcagggtccgtggtagctggcagtttcaagtttgcagtcagtcaggcacatgcg

SEQ ID NO: 720851 - DNA, 303 bp, Homo sapiens
gcaaatttggattttcccccaaattttgaatttgtagacaaacttggaggctcccttgccccaaaggcctcctttgtcctcatttttttttcccccccaagcagtttttttttacagccagtaaggcagctttgttgggggagcaaatggtccccttattttagggttttcctctttgtatgataaaaaaaatgtgttatgaatgggggctgtcagccctgctgtcagccctttttccccagcaaataaaatgtatgcccaaagcgggtagaattaaaaaaaagtaaaatgggtgttgaagca

SEQ ID NO: 720852 - DNA, 112 bp, Homo sapiens
tggacatgggagtcacctctatttctggcaaggacagtggtgctgagtgtctatgataagggtccgttttccctgggatctggggggaggcattctttcaggaccggttcag

SEQ ID NO: 720853 - DNA, 351 bp, Homo sapiens
attagagtagacagtagttcacttttaactgcatacttttgaattatagtcctaatagaagggtttagctaatatctcggaacagctatgcgaccctacatatcactcgatcttggccctcgtagatttatttcaaagtcctagctctttttccttcttacactgtttcagtattgcagactaagaaaacctctccctctgtcacactgagaattcccactgcagtgaatgggaggtccatgtattaaagcccacgtagagcagtggcggttcaagcccagagaaagaaggtgttgagttgccttggtaaagaatttttatccccatgtgttctcaggttcttgaccggta

SEQ ID NO: 720854 - DNA, 153 bp, Homo sapiens
  misc_feature (2)..(2): n is a, c, g, or t
  misc_feature (102)..(102): n is a, c, g, or t
  misc_feature (128)..(128): n is a, c, g, or t
gnatgacacaaaaaaatagtaataataagtattatcaataatagtaataaacgatgcaacataataaactatgggagagggctctgcaacatcctcctcccngaactgggtggggcacatttgtattncttagtttccaccattcattttcag

SEQ ID NO: 720855 - DNA, 1617 bp, Homo sapiens
ctcacgctgttcggtgcgcccgcgagtgaatcacagcagatgccgcacggtcgtggggtgttgtaggtagtgagtgctgcggagccgtgcgagaattcgtcgagcggtccctgcacggcgtccactcgatcgcgcgagtcacttgcaccggcacaggccgatcggatcaacgcagctagactcagccacaggctcggcctagaccaccagcgctagtactgcatatatgagacatcacaatggtgcaagaaatggttgtggggatagatgtcagactcgtcatatccatcgatgctgttcggccgctagagcgcaattcgtgtggccaggttgcctaataagccatagataccctgtagagatggcgagagcaagacaacgtggtgtgggatcgcatcgtcggcaagtgtatcgaaatggtgatggatagtaagtgtactagtgcacgcagagaccaggacagtcggttgcccatgtgccataatcatgatcgatatccaccgcaaagtggggattccttgcacggagaccacgaatcggtacgtgcatcgatggtacgggatggacactctggcgtatagcctcggtgaaccgagcagagtcgcgcaacataccgagtgaaaaattgctggaatgcaaagcgaagtgcctcgcacaattgggcctacctagcataggtcgtattctagcgcggaaggtcccccggaaatgggagctatctacatgcgcatgaggggagtgtgtcacccgcaactggagaattgtgcccttgggcgttgtggctgggaacgaggtggccgaatttgccaatgaaaacggcatcacatgaagagaggcggcagtaagagaagttaccgggtaaaacaatgcttcctagaaaccaggttggccacccctaggggaatacccaccggtggttccatttgtaaccatttacaaccctggagagcaagtgtgcagtacaaaacgtgggaacccatacctgggagtaaaggacgccacagcagtgggaagcgaacccggacacgatggataacaagggagaacgtgtaaaaaggaggacaccccaaccacatgacacgtggtgagcacaaccgcatccaaagagaggataacacgagaaaaagatggggggcacccatacaaatagggacagcgccgcggagagacacccgtggagagccaaaggacaaggacgaaccaccatgggccacggatgaaaacaccccagggtctaaatgaacacataaggagttggcaaatcccccaaagaagaggcaccacacaccaggatagcaatgacacaggaaaacaggcaccactcaccgagtagaaagggagcaacgaatacaaaagagaggagaacacagcaagaggagaacaactcagaacgagaaaccagcgaaagggcacaacgacgggaagcaagcaaaacacgcgatacggacggcaaaacacagcccgagagagatagtcgacatgagagagaacaccagccaaacaaaaggaggaccgaagacaagtatacaaagagagcctgaaccagccgacagaccgcccaccccaagatacaaagccgcgaagcggccacgagcagaaaggaagaaaaaaaacgga

SEQ ID NO: 720856 - DNA, 118 bp, Homo sapiens
ggctactgacaacttccgtaccccactgtcacactcttccttcgctctccctccacagaagcacaggatttaaagtgccagttctatgtaggtaaagacactgggattaattacattg

SEQ ID NO: 720857 - DNA, 339 bp, Homo sapiens
tcgagctcggtccccaagtttattagaaaaaaaagaaaaaaaaaaaaaaaatttagcggggccttgggggcacgcaccctgtagttcccagctactcgggaagctgaggcaggagaaatcgttggaacccagaaaggcgggggtgggaatgagccgagatcacgccacggcactccagccgggcgacagagctagactccatctcaaaaaccagaaaaccaaaaaaataaaatcaccaatcagcttatttggtaggggtgtccctcaggcttagcgtggtttgtcccctcttttttttttttgtacaattttttgggttttttggggtaaaaatggggt

SEQ ID NO: 720858 - DNA, 948 bp, Homo sapiens
tgcggagcgttcggcatgtaaagattgatcatcttcacgtgggctggtatcagtccacatactatggttcattccgttacccgggaactcctggactcttcaggtttagtttaccagcatgccatatgcaaggaatctgtcgattatcatttagtgatcccataaacaacatgtcccaagggatctctctcactagaggctatacggacgtgacttcttatactgagtggaagtgtgtaaatgaaataggattatttcccgcatggaagtcattgataagaagtaaatatcaatactttgatgatacaatgtttgtagatgaagatgtacgcattgtaattaaaagattcacatttgatcaattgtcctaaatgtgggaacttgaaaagaagtcagtctgttgctagatgaaacaagtgaatatgcatctagatctatgtccgagcaggcaattcatttggggaagtaatcttacagttgcctgatggactgagtggatgaaatgggccaagatatagttacattttgggacaacatacatgagtgaatactagtgatacaatcagcagtagaaacatcagtgatcgagctagcgtcgcacgatgtgggagaatgatgccatggcgcccagatgctctgagggatgaaacccccggtccctgcagtgagcgaccctgtccctagactcggttcaaaccactcatcaagcccgttctgcctagtggagttggatcttcagcttgctcattatgcaggccgagataaattcacttacttgccagaaaacatcaaggagttcactggccaaaactttagggcaagctcttcatgggccagggtcctttcacgaatacaacaacttcagaaaaagggaagttcccgcaaaaaggaagttaaccattgaactctttgaactcacacccagggcgactctttggaagaaatttt

SEQ ID NO: 720859 - DNA, 175 bp, Homo sapiens
gataaggaccgctggcaatcgacagattcaaggcgagcgtcgacctggagttacccgccctgcaagaagatcgagagtgctctggaggaggtggaacacgcgagaaccaggggcttaaggtctcccggcgggaaatggagggcgcatgtggagtcacacctataaggacctccat

SEQ ID NO: 720860 - DNA, 1099 bp, Homo sapiens
ggtttccggtggcagggtctggggaagcggcggaggcgcatgtccggccgcgaaggtggcaagaagaagccactgaaacagcccaagaagcaggccaaggagatggacgaaaaaaaaaaaaaaaaaaaaaaaaaaaaaatgggggggggcctggccgaaaagagttttctaagacccttccgctgtggggggccgcggcgggccccttttagttacgttgaaatctgggccctaagagctcgtgtcgccaagaggaaggatgctgggtcatatgcattagagtgcttgggtttcttccaccaattaaaaaaccgcccgcggggcacaccggagctgcgttcggaacaaattcccagatagggagtcccggaggccaatcacgggcttcctatcacgggagttcccagagacgaagcactcgatataaattacgcgccccggccggggtcaggcaaagaagaaagaagggggaagaacacaataaaaggagcatctggccagcaagtgagcgagcaacacaacaaagcagaggcaagaagagaagctaaaaaacggcaaggcaggactaacagacaccgtcagagacgaggggggcaataacaaattccgcacgtacggaaaaaaacggggaggcacaaacaacgtagcaacgcactgcgacccggtaaagcgacaaaacacagggaaaacacatacacaagaagaatggggaggaacaaacaaaaagaatctcaacacaaaacccccacgcgaaacccggccagacacaccagaacaggcaacaaaccgggtaaatattgacgtaaaccagcagcgcgaacaaggagggagatcaacaaccaagagagagaacgtgcaaagttcgcataggaaacgggggaaaagggaagaacagcccaagacgaaagagacgcttcatggcaacaaaaccgaagagaagcacagcgacgaaatgaaaaaccgccgaacacgtggaatcgatagctaaaggcgaaacacaaaagcggaaaagaacgacaaggaagaacagagtaccgaccgacacatcgaacaggacagccaccaacacagagataagcagcaacaacatagacgacag

SEQ ID NO: 720861 - DNA, 101 bp, Homo sapiens
aaaacaagcaaacaaaaaaacacaaaaaaacctgagaaaatctgctgccagcgagatgtgcatacacaacaaaatactaaacgggaacttcttcacggtag

SEQ ID NO: 720862 - DNA, 159 bp, Homo sapiens
ttgttttaaaggaaacaggttttcgatgtgggtgggattacacgcacgcgagccgatctatgcactgggtaaatatgttgtatttttggtagaggtggagtttcaccagtgttagccagactggtatcaaactgtacctcaagtgattgttccccgcct

SEQ ID NO: 720863 - DNA, 876 bp, Homo sapiens
  misc_feature (133)..(133): n is a, c, g, or t
ggtttccggtggcagggtctggggaagcggcggaggcgcatgtccggccgcgaaggtggcaagaagaagccactgaaacagcccaagaagcaggccaaggagatggacgaggaagataaggctttcaagcaanaaaaaaaagagaggagcagaagaaagtcgaggagctaaaagcgagaggcgggggaaggggcccttgggcacaggtggaattaatgaaatctggcaaaaagtaagctgttccttgtgctgaggagatggtgaccctttatttcatctgtatttaaactctctattccctgccataacatcttttgccacgtatagctggaattaagtgtggtctgtggagctgtgtgtacaatttaagaataaacttgtgtaccccagaagaccactcttacagtggctcatcatctctttagttttgtgtttcactaaagtcgttcctaccataactgtgaacttacaagtaacaaccagtcaagaatcttgccagagtctgtgccttgtggtccttgttctaccctaaagttgtgtatcacctgaaattagaccaactcattttgcaagaatacagataagacttgtacaagaaggcaaactttgcgtggcggcgtcgaccttagaaagaattctcgacaaccctcgtgttggcggcggacgccaccatgtagtgagagcccggcgaagactggggcgaggagacccgcggccagaataaggggggggtgccccagaaaaaaaagccccgggggaccgaggttcgaacaatcacgatgagcgtcggggctactgggttaacaagagcagcagccgttagccggcccggtgagaacgcacacaaaaacggcacaaacacacaacacaagagaa

SEQ ID NO: 720864 - DNA, 116 bp, Homo sapiens
tcacaatagcaggcgcagcagggtagccagtggcaacacagtcctggccatgcttgtgcatgccatgggcacatggtgcccagcgcggcagggcagcaggcataccacaggcacac

SEQ ID NO: 720865 - DNA, 102 bp, Homo sapiens
gatctccagcggagatgtacggggcaagtaccagaccacccttcttccgtcccctctacttagctcctctttggccttgggccatatgactttcaacggggc

SEQ ID NO: 720866 - DNA, 375 bp, Homo sapiens
gggcgagatacatcctacatcacgtgaagatgatgtggtctacagaccaggagacggtgtgtatatcgagagtgggaggccaaacacacggtatttcatctgtagcattcaagacttcaaacggtgaaatacctgaaaaagaaagaagaaaaaaaacatgatggcatcaaaaatatgaaaaacaaggaggggcaagatcggtacatggaaaaactatggaaaatattaaggacacaaattaaagaagatacaaataacgggaaagatatcatgtgttcaggggtgggaagaattagtattattaaaatgcccataatacctaaagatatctgcagattcagtgcaaactctattaaaattctcaagacatttcaa

SEQ ID NO: 720867 - DNA, 148 bp, Homo sapiens
tattttgactgcagagccatgtacattggagcccgttcccatcagatttacttacttggagagacatatgtctgaatatatggagtgtaattaaatgaactagaatacatagtctgcgtgccttaagagagacgctatctgcagaaca

SEQ ID NO: 720868 - DNA, 1014 bp, Homo sapiens
gtctcttcataattgaccccaatggagtcatcaacgccattctgagcgctcaacgactctcccagcctgggccgaagccgtggcaacgaaaccctccgctatggctgaaggcgttccagatatgtagaacacacatggcagcaacgtctgcccagcgcaactggcacaccgcgcacttctccctacgactcaacgccacagctccacgcctgccttccacaacgagctacctcttcacgcaaggctcaacactcacgctagcactcaccccactgctgctatactgcacgcttcgtcaagcgtgtagagaaacgaacccgacgacgctccgcacacactcctgccctctcctcattcaactcttctctcaaacgcactgcgctctaactctcagctacgcaacagtgcacaggtaaaccaaagttagtgcaatttgcctctttttcaacttaccaccgctaactatcacctccttcacacccctgcttccccggctctctcctggccaccacctcccctgcgccctcacccccaccccctctccctacacacccacctgcgcccctccgcccctgccctacgcctatccacccgcgccacccttccccctctcctacctccggccgccaacaccccactcccctccgcccctcgcgcgccctctgcctcccttaccgcgcccttccgccgctccttcctagccccgcctccaccccacccgcacccctcccaacccctactctctacactcgggcactccccttccccttaagctctaccgccaccatcgcgggcaccataaacttccgccgcccgctcctccgccgcagcacgtctccctcaactcccgggggcccctctcccctctccccccgccgcgcaccgcccctccgccgctcgccctccaactcaccccgcccgccccgccgttcgccccctcttctcctccccctttactcgttctcctcccccctcctttctcctgtccctcccctcccccctcgctccccgctt

SEQ ID NO: 720869 - DNA, 334 bp, Homo sapiens
  misc_feature (258)..(258): n is a, c, g, or t
agtgaatggctggggaagctgaggaaacttcctattatcattattttttggagacagtctcactctgttacacagggctgaagtgcagggcacaatctggctcactgtaacctccatctgtcaggttcaatcgattctcctacctcagcttcccgaacagctgagattacaggtgtgcgccacccgcccggctaatttttgttttttcagtagagacaggtttcgccatgttggccagactggtcttgaactcctganctcaagtgatctgcccgcgtaggtctctcacagtgctgggattacaggtgtgagccattgcactccggccgggtac

SEQ ID NO: 720870 - DNA, 162 bp, Homo sapiens
ttttggattaaggctgggggatccaaaaaaaaccaaatggccaggaggttaaaaagccggggaagggccggaaggaggaaacctaggaggaaaatcatggctaaaggaggaatctgaccttggattgtattggaattaatctaataaatcatccataggatc

SEQ ID NO: 720871 - DNA, 278 bp, Homo sapiens
ggtttaaggaaggtttaccctggctcaagttggaggttttgattaatctctcggattgtactttctatgactgaatttggagtttgtttttgagggtggacctgcttatagcctaagaatacactgaacagttacagggcctgccatggctgtatgtggtggcaggagaaaaatctctctcaatgaataaaatttacaaggagtagaaggaaatacaaaccaaagctttgttttgatcatgtcacttgtcttcttgtcccacaaaccaggtaccagtg

SEQ ID NO: 720872 - DNA, 448 bp, Homo sapiens
  misc_feature (15)..(15): n is a, c, g, or t
  misc_feature (78)..(78): n is a, c, g, or t
  misc_feature (81)..(81): n is a, c, g, or t
  misc_feature (84)..(84): n is a, c, g, or t
  misc_feature (86)..(86): n is a, c, g, or t
  misc_feature (91)..(91): n is a, c, g, or t
  misc_feature (94)..(94): n is a, c, g, or t
  misc_feature (100)..(100): n is a, c, g, or t
  misc_feature (106)..(106): n is a, c, g, or t
  misc_feature (112)..(112): n is a, c, g, or t
  misc_feature (115)..(115): n is a, c, g, or t
  misc_feature (256)..(256): n is a, c, g, or t
gaaatggaaagattnattgggagtggtagggtggaaccatttgggggagatagaagtttgaagtgggaaaatggaagncanaantncgggnagncgaagnaaagantagagnagntagggaaattagaagataaaaacatacttttagaagaaaaaagataaatttaaacctgaaaagtaggaagcagaagaaaaaagacaagctaggaaacaaaaagctaagggcaaaatgtacaaacttagaagacaattggangatagaaacaagatagaaaatgaaaatattgtcaagagtttcagatagacatgaaaacaagctagacaagtattggagaagtatagaagctagaaaaatataacccttaacggatacatagcactgaaaaatgagcgaaattattggtaaccaatttatataaaaagcccatcaatttaatttctggtggtg

SEQ ID NO: 720873 - DNA, 104 bp, Homo sapiens
attaaagagaataaatcagtgaaggagaaagaagaggtacaaataaagcaacaaaacctaaagtttggttttttgaaaagattaataaaatcagtcttggccgt

SEQ ID NO: 720874 - DNA, 322 bp, Homo sapiens
accttctgtacaaatccacaaaactgaacaaacatgtaagaaagcacaaagcaacatgctttttcaacagtaaatattgactatacccctaaaatatctaccataatgacttacaactaaaactatggtctttggctatataaaagaaagtcaaaaattttgactttaatgactgcacattctaccagagccagtgtttacctggtatcttttgtcacctgttgttgacatttccctgctactgttggtgaaacagaattctacagtatccaattctgtatattgtctttcaaggtttgtcaatcagactcactactactgc

SEQ ID NO: 720875 - DNA, 1051 bp, Homo sapiens
ggtcacaatgcatgcattaccttttaaaagaatgcgatattgataccgatgcttacttttttttttttaaactactgggtttatattcctttccagaaaagttatagcccgccttttcatatagcatagtttctcttatagggtggaagtgattcctataagaatttctcattattaaatcagtgcattttctcaagaagtggaactcaaatattggattataatctaagcgtgatattcctcattgtggttagaagaacaacctacagtgctagaagagaagaggaggaaatatacccagcgaccacacagccgagttagctatccagtggggtgcgtggacttccgagccgagggtgttccgtggccctcaaggggtagcttaaaagtggacttttctagaaaagaggttacaatttttatcaaagaaaataattctatctaagtatatattccgtattaaaacatttttaagaggggtaaccgagcattagaaagagtggctctaattttgtctccaattttccaaagaggttaaaagggcttaaaggcatgtgggttaaagtataaatgggaaaggcgagttaactttcggggactttgagatatttgtggacaattttctgtgaaagtttagatctctaaaaccctccatttgggccacatacaatgtgtgtggctcctctccccttggggggacaatcacggggggacgcgcactatgagacgcggatttgtgggacaatatgtaagagcaagcctacgaaaggtggccctgcgggccttaagagcgccccgtgggggagaaacgccccgaagccgtactagacaaacagacgggccattaatatatgcggggacgtcggtcacgggagcaacaacgaagggaagacaaccttggggggcgcccaattgttgtgcggtaagagagcagtacacttcacttaacaagggggacgagaaagatggggtggacacagacaatgtgacgccccgagcagagacagacacactcactaacaagagaggggacacaaaacagagggcgcaa

SEQ ID NO: 720876 - DNA, 563 bp, Homo sapiens
gatggccacccgcccacagccaggccgagagcagacaccagcagccctgtcacgccgggctctacgtcccagggagggaggggcggcccacacccaggcccgcaccgctgggagtctgaggcctgagtgagtgtttggccgaggcctgcatgtccggctgaaggctgagtgtccggctgaggcctgagcgagtgtccagccaagggctgagtgtccagcacacctgccgtcttcacttccccacaggctggcgctcggctccaccccagggccagcttttcctcaccaggagcccggcttccactccccacataggaatagtccatccccagattcgccattgttcacccctcgccctgccctcctttgccttccacccccaccatccaggtggagaccctgagaaggaccctgggagctctgggaatttggagtgaccaaaggtgtgccctgtacacaggcgaggaccctgcacctggatgggggtccctgtgggtcaaattggggggaggtgctgtgggagtaaaatactgaatatatgagtttttcagttttgaaaaaaa

SEQ ID NO: 720877 - DNA, 153 bp, Homo sapiens
tccatgcatgctcatggcgctccagctgaacagcaaggccagatgagggcagacatcgcatcagccgggatttatagcattattccaagcacctaacacggccaggcaggttataagtgctaaaacttttctttttttttttttttttttttt

SEQ ID NO: 720878 - DNA, 308 bp, Homo sapiens
aagctctgtacagccgtgtggggattgatgagtggccctgggccagatccctatcatcgccgaggtgctctcaggtcctggggaaccccaagagtgatgagaggaatgtgatggtgctggactttgagctctttctgcccatgctgcagacagtggccttgatcaaggaccagtggcacctatgagcgattatgtcgaagcgacttcgggtgtttgacaaggtcggaaattgcaccgtcgtgggtgctgaaatccggcatgttcttgtcacactgggtgataagatgacaggaaggtggctaggtgta

SEQ ID NO: 720879 - DNA, 206 bp, Homo sapiens
ttaggtggtttccaagtttctgctattacaaataatgctgtagtgaataatcttgtatatatgtaaagatattgatgtggaatttatgggtcaaggagtacatgaacttgaaattttgacagatatttccaaattgccctctctagaacatagaggttatattcccatgagcaatgtaatgtatataaactgagcctgaaaaaaaa

SEQ ID NO: 720880 - DNA, 129 bp, Homo sapiens
tgaacagctgccaggtggtagaggacaccctcatggaaggttccatatatgccatgcctctgctgctatgcccaaaagcttacccaagcccctaacacgagatactgaccaaaaatagggtctggctgg

SEQ ID NO: 720881 - DNA, 397 bp, Homo sapiens
ctgaaaaaaggggggcccttttatttccccatttgccctttggcaggattacctcatctatttcccctttaaatagtttggaggcagaaaaaatttggcccaaaaattttttttatggttcccattggtctccccaaatgaatattggaaaacctggaaaaaaaatattgcctattgattcaagcccccggagactggatgggttttatgacgccccttttccgtttttcttttaggaaaggatttttccgcaaggtttaatggtgctggaaatgaaatcagttttccccctttcatgtaggggacccccagccctttttttttttgtaaaaaagtttttttggataaagcagccttttgccccccctttggaataaaaatgggttttattaaggga

SEQ ID NO: 720882 - DNA, 678 bp, Homo sapiens
  misc_feature (23)..(23): n is a, c, g, or t
  misc_feature (72)..(72): n is a, c, g, or t
  misc_feature (348)..(348): n is a, c, g, or t
  misc_feature (556)..(556): n is a, c, g, or t
gcggcggtgttgaggttgggtcngggatgcggggtctttgactgaaggggtaggccaagtggaggtatcagngacgtcgcgcggcacagaagaggaccagcctggacgccggggacgctgtcatgtacggcgcgatgctggtgtgtgcctgctgccaagaccctgatgatgtgaaaatgctgtgctgctgaatgtgagtgatgtgcctggtgccatgtgctgtgtgcctgtgctgtgtggtgtgtgcatgcctgatgtgtgagctcttggttttctgtgctatgcctgcaagctgttccgtgtgacgactgatgctgtgtgccctgtgctcaggaacagggacagcanctcatcccctggatgggggaccacaagatcctcatcgacagatatgatggacgtggtcacctgcatgacctttctgagtacgatgctgagtattccacgtggaacagagattatcagctgtctgaagaggaggcgcgaatagaggccctgtgtgatgaagagaggtatttagccttgcatacggacttgcttgaggaggaggcaaggnaagaggaagaatacaagcgattgatgtgaagcactagccagagtgatgggagctacaatgccgtggagtcacttacggtagcgactattacgacccgtcagagccgaacggaggaggaggac

SEQ ID NO: 720883 - DNA, 650 bp, Homo sapiens
  misc_feature (23)..(23): n is a, c, g, or t
  misc_feature (72)..(72): n is a, c, g, or t
  misc_feature (320)..(320): n is a, c, g, or t
  misc_feature (528)..(528): n is a, c, g, or t
gcggcggtgttgaggttgggtcngggatgcggggtctttgactgaaggggtaggccaagtggaggtatcagngacgtcgcgcggcacagaagaggaccagcctggacgccggggacgctgtcatgtacggcgcgagcgggggccgcgccaaacccgagaggaaaagcggcgcgaaggaggaggccgggccaggcggtgcccggcggctggggggcagcccgagttgggaagctcctggggatatccgggttaatgccggaaaacgcggtccccggacacagacagagcggggcctctggtctcaggaacagggacagcanctcatcccctggatgggggaccacaagatcctcatcgacagatatgatggacgtggtcacctgcatgacctttctgagtacgatgctgagtattccacgtggaacagagattatcagctgtctgaagaggaggcgcgaatagaggccctgtgtgatgaagagaggtatttagccttgcatacggacttgcttgaggaggaggcaaggnaagaggaagaatacaagcgattgatgtgaagcactagccagagtgatgggagctacaatgccgtggagtcacttacggtagcgactattacgacccgtcagagccgaacggaggaggaggac

SEQ ID NO: 720884 - DNA, 239 bp, Homo sapiens
acaaaggcaatattcgtgaagcgtaataaagcgaagcatgataaagtgagatatgcctgcaactgaaaaacattccttctcctttcgagtctatagctcatggtaaggagagggtatgggagccaagggtgagtttcatcttagctcagtgttaggctctggtctgagccgccgctttaaccgtccgacactctcacttgtatggctctgagaagctaaggttcctgagtactaaaagt

SEQ ID NO: 720885 - DNA, 521 bp, Homo sapiens
ccctgctggccagctgtccaatgtccccccgtacctgctgaacatcgtgtgattgaggccaactggtctgactggttactctggatgctgctggacggactgtcccccaggaccttctggtatttctggacctcctgtgtccccctagtcctgctgcgaaagaagggcttcgtgatcctcgtgatgactaggatagaattgagcgaactggagaagtaggtgcagttggtccccctgccttcgctggtgagaagggtccctctgcagaggctggtactgctggacctcctggcactccaggtcctcagggtcttcttggtgctcctggtattctgggtctccctggctcgagaggtgaacgtgttctaaccaggtgtagactggtgctgtgggtaaacctggtcctcttggcattgccggccctcctgggggcccgtggtccctcctggtgctgtgggtagtcctggagtcaacgggtgctcctggtgaagctgggcgtgatgggccaccctgggaacgat

SEQ ID NO: 720886 - DNA, 288 bp, Homo sapiens
gacctggaatgagctgctgctgtgtagccagtggctgatccctggtcagcacttccctggctcaggcatgcctggaaggtgctggcccccatccagctgagccactggggcctggccagatggcaggcagcaatgcaagagctggctctaagccacaggcctggctgtgaaaactgagcaacgggtggcccaagggaggcagatgccctcagccacctagggcagagctcaggtgcccagccccatcctgctgtggctcaccagacttagactgcaggtccactgagt

SEQ ID NO: 720887 - DNA, 1152 bp, Homo sapiens
agcgggccttccagcctcctcattcccacttttctcactatgtaggctttcgtttaggtctctgaaccctccaggctacctctggccacagacttgaccacctggctagctccctctgccatacccctagccatcatgagagcctttctgcctcctctgatgaggcaccaatcccctagataaatgatcttatttacaacagtccgaccaaatagaggctacgaatgcatattacaaacacttaaaaatatctggacctaaatttcattaatctctacaataaatcaactgaatactcttaattctcaaacgatgcatatatagccgaaatagatccaccatggcacattcaatcaatctatcgtcaagcaaatctacacacgatatccaaaacaacattaccacaactacatgaaccacactaatgcacgaatccgaaatacggtataaaaccttcaaaagatcaaatcaaatataaacccactctcaaacaactaccagataaccttgcaactcggcaatcgtgcctcgatgcaacatacctatacgaaccccaccgcgacctacgatatcccagcaaataaatactccatccatggaagaccgcgataattaaacgacacggcccaggaactggcctaaactgactaggaataataagccacatcattacgaatcaagggccagaaacccgccaccaaaacaatcccctccacgcgaatcataatcccaagcaagccattcgccccctacacgggtaccaaagcgtccgcactatggcacccaaacaatgggcccattcaaatggaaaaatgtcaaaaaacaacacaggagcactcaatgcaagaagcagcgcaccttaaacacgcttcccaaaacttctgtcgcgcccactttcgatttaaaacgctatttccgagagaaccttggaatcacggcaactggaacttggcccccgctggctccccttagccttaataaccctccctgggaaaaacactattcacagcatcccagcccaatcgcgggaaacccgaagacgccctcaactggctcccgtaaactaccactttaacttacctctcgccctctacaccccctgaggaggaacgactcacatgacggggacgggcggcgggtggtaaccagcgg

SEQ ID NO: 720888 - DNA, 219 bp, Homo sapiens
  misc_feature (106)..(106): n is a, c, g, or t
  misc_feature (133)..(133): n is a, c, g, or t
  misc_feature (138)..(138): n is a, c, g, or t
  misc_feature (188)..(188): n is a, c, g, or t
  misc_feature (216)..(216): n is a, c, g, or t
agccccagccccagattccggggcaggcagaagggctccctagagggaagagaggttctgaaaggccggccctggatcctgcaggactcgaggaactcagcagtgncaagggcttcccactcagccctccctntaatnccatcccttggcacaacctgacaggcaggagtagggcccagtgtccacangcccaggcttgaccaccttctcttctcnagc

SEQ ID NO: 720889 - DNA, 613 bp, Homo sapiens
  misc_feature (16)..(16): n is a, c, g, or t
  misc_feature (65)..(65): n is a, c, g, or t
  misc_feature (71)..(71): n is a, c, g, or t
  misc_feature (151)..(151): n is a, c, g, or t
  misc_feature (163)..(163): n is a, c, g, or t
  misc_feature (196)..(196): n is a, c, g, or t
  misc_feature (261)..(261): n is a, c, g, or t
  misc_feature (270)..(270): n is a, c, g, or t
  misc_feature (275)..(275): n is a, c, g, or t
  misc_feature (282)..(282): n is a, c, g, or t
  misc_feature (286)..(286): n is a, c, g, or t
  misc_feature (289)..(289): n is a, c, g, or t
  misc_feature (311)..(311): n is a, c, g, or t
  misc_feature (315)..(315): n is a, c, g, or t
  misc_feature (343)..(343): n is a, c, g, or t
  misc_feature (350)..(350): n is a, c, g, or t
  misc_feature (361)..(361): n is a, c, g, or t
  misc_feature (387)..(387): n is a, c, g, or t
  misc_feature (440)..(440): n is a, c, g, or t
  misc_feature (444)..(444): n is a, c, g, or t
  misc_feature (502)..(502): n is a, c, g, or t
  misc_feature (516)..(516): n is a, c, g, or t
  misc_feature (529)..(529): n is a, c, g, or t
  misc_feature (575)..(575): n is a, c, g, or t
acacgtgatgctcggncacaaacgggacgcagctctgcagcctggccacacacccttcgcgtatnattttnttttttagggtttatggggttgtgtacagagactctttctgctgacacgatgggcacacgcccttcgtgtatgactccantcctcagggttnacggggctgtgtacagagactctttctgctganacgatggccatatggccttcgcgtatgactccactcctcagggtttgtggggtttggagattttnttgatatgntattntagatantttnttntttttttgtggttgctttttgnatgntaaaggggacaggattaaagttcttgtntgatganaaaaactctanacgtgcaaaataaaactaaaaaaatnaaataaaagagctgaaggtggtctagagttaggtcttggcagaggccgcagtnctgngagactgaagaaactcataggggtcgtgggtgacgtctggctgctccccgacactcangcgagaagggcttnccaggtggtgctngtcctctcggaggcgttggacagggagctgaggttggacgacggcngagagccgccgcgctccgcctgtgcttcgtgcaggtct

SEQ ID NO: 720890 - DNA, 272 bp, Homo sapiens
gctaggtgtgtgcagcatcctcttggtctgaggggccctttacattccagcctcactggcttatggagcgcccatagccactcgggggcagaggccgcagcacgcgcacagcacagcttctctcccaaagcatgcacagcctgcttcattaagtcggtcccgtatctgttcctcctcactgggtggcctctccaaaccaggttctccagccaatcccaccagtgttctccagcggacagaggtttaaaaacttcccaagacaggccgggaac

SEQ ID NO: 720891 - DNA, 232 bp, Homo sapiens
tgcctgagcatgatgaacctcatggttcgcgatggcaatgagaagctggacctgctgaagatcaacatcctgtgccaccgcatccggaattacctgtacatcttccggaagtttgacctggataagtcgtacagcatgagagcctacgagacgcgtatggccattgagcacggctggcttcaagctcaacaagaagctgtacgagctcatcatcacccgctactcggagccc

SEQ ID NO: 720892 - DNA, 445 bp, Homo sapiens
cgctacttcccaacctcttttctgcagaacgtggtacagtggtgtggtcaaagaatattttcaaaggggctctgtggttgatgatgtggggaaatactacaaaaagcaggactcgtagtgctcggcccagcaccacatgacgcttcacgttgtcattcatccttggtccccccgctgtgtggtgctccttagcatcctgcagagcgcttggtgagtccttgctcaaaaagtgtggttgctgcacccccaccttcactttagcagacatctgctaatgaaaggatgaactgcttttcttttttttaaattcagccaaattcaaaaagagccgtaacactgggattagcttcttgagagcaggagccacattcattctttgtgtttgccctgtgattatccagggagtagttggacttcctcataataaagaatgttgtgatagcca

SEQ ID NO: 720893 - DNA, 539 bp, Homo sapiens
  misc_feature (391)..(391): n is a, c, g, or t
gggaagagttccccttatgataacacctgcaactgcgatataggattttgtgttaacgagaacactgctgctattagagtgtggcgacgctagagttctagcgaaatattccagagcagcgacacataagatggcgaccgttcattcttgatgaaagacttggacataaagtttctacgactgagatcaatcatataccgattgtagtaacggttgtagaacactcactcactgcacagagagtgtcttaagacatgccgtatatctctttgttttccaaatgttcaaccaattgcaattttcacgcaaggcgtgatgatgtttagaagaagagagaatcgttcaatgagcgggactacatttgttgagttaaacgaacctctcaccaggnccactatatttgatccaacggtggccctttagaatttggcgtcacatttgggaaccaatgatgaactcacctgatgagtggacttattagacgtcctttttactatcgctgacccacaggggagcccattatgggttgttcagtgggc

SEQ ID NO: 720894 - DNA, 408 bp, Homo sapiens
aagtcactcagaaagaagagatcacaaacatatgagatacttagatttctctttcttttaattcctatattaaagtatatacatacattttctgagacagaatctcgacttccctgggctcaggtgattccccctgcctcagccttccaagtagttgggattacaggcacaccaccacacccagttaatttttatatttttttgtagagatggggtttcgccatgttgcccgggctggtcttgaactttttgaagccatccatctgcctcagcctgccaaagtgcagggattactggagtgagcctccacgctcagcctatattaaataatttataaagtattaatgctgatagtcatatcaccagagattggtaatcctctaaaatagggttctaagttatttctct

SEQ ID NO: 720895 - DNA, 389 bp, Homo sapiens
  misc_feature (189)..(189): n is a, c, g, or t
  misc_feature (228)..(228): n is a, c, g, or t
atcatagaagacctttcttcctctcccgttttctttttctttcccttgtattttgtaagtgccacttataaacaagataccaggactcaggacgttgaaaatgccacttcagaaaatgtgtcggccatccatccctctgtccttttaatgagatgcatccgggactgcaggaaaccaagactgctgcgnaggcaggattgtcgttgggcaaccaagcatccttccagntgccccagaaagaatctcacaatgtcctgcaatccctggtcttctcaccacctcagggggcggtccttgaatccacccccatccttgttccaggctcacaagttaaatttaccaggagctgatattgcaaaatagattgctatttcgcaactgaaaaaaaa

SEQ ID NO: 720896 - DNA, 108 bp, Homo sapiens
catgcagaccctgcctcaagtggcatcacttcttaattgaaaagaggccgaggcgaggcgggaatgaaggccacgttgaagccctgcaagaacaggggtgtgtgtgtg

SEQ ID NO: 720897 - DNA, 554 bp, Homo sapiens
tcatgtactacactgcatactatcaacatcactcaataaaatagacacaattaacaaaaacatgtgacaaggctgtactataaaacggctctgctataaatagtatagaatatacagaattacaacgtcaagtattacattatcaaaatatacacccctccctgaaactaacacaagctatcaacattttaaatgaatacaattatcgaacatatttgcaaaattataaccacatgtataaatattctgccatatttacttaggtctagaattatcagcatcacaagtccacttaaaaaatatccacatataagggctgggagagagacatcactaacaggtaattttatattaggggttaactcgaatcaaaatgactagaatatacagtaatgtctatgattcatattattacctgataaaaccaattagtggatcataggattgcttatacaatattctaattatcacttcacaaatgattttcgtaagccctatgtgactatctctttaataaaacccaaatgaatagtgtagggtgtacatatatacag

SEQ ID NO: 720898 - DNA, 746 bp, Homo sapiens
tgcatatggcaaatctgtcttgaattatatcatttctctccctctctctctctctctgtgtgtgtgtgtgtgtgtgtgtgtgtgtgtgtgtgtgtgtgtgtgtgtgtgtgtaggtatgtgttgggggtagtagttgtattaatgataataaaattctattaataaaagatcgtgtggtgataagagaagagtaatcatcgtcgagtagtaccgtagttcgtacttactcttaataatcaatcatcagagtgtgttgttatcactacaataatataatcagcagtactaataataaggggatggtatgttagttgtagtatgtgtttgtgggtcgcactattattattaatattattgtgtatggtgatgatgttggggtcgttgtgctgatgtttcatcagcagagaaattactccaatatattgtgtgtgtagaatcataactactatactatatgttgatttactaaaatgctgtgtggagtgtgtggggatgagatgagagagtagagcggggagtgattatagtagtataggggtctctcagagatggtatattttcataaagagtgtgtgatgagagtgtgtgtgtgagaagaacatgagagtgaaagcagaaagacgtcagtgtgtgttttttatatacagaacacagagtatgtgagaaagatgttgttgggaacgtgtgttctcggggagagattatcttgtgaatatggaggggggtcccaatatattttataaaag

SEQ ID NO: 720899 - DNA, 1608 bp, Homo sapiens
ggcccagcagcccagccacagaggagccagcgaacctctcccggcgcctgtgctgggggctttctgttccagcgtcaaggatggaggagggggagaggagccccttactgtcccaggaaactgcaggccagaagcccctctctgtgcacaggccacccacctcaggctgcctaggtccagtgcccagggaggaccaggcggaggcctggggctgcagctgctgtcccccggagaccaagcaccaggccttgagtggcacccccaagaaaggaccagccccttccctctccccagggagcagctgcgtcaagtatctgatcttcctctccaacttccccttctccctgctggggctgctggccctggccatcgggctctggggcctggctgtcaaggggtctctgggaagtgatctgggggggcccctgcccgcagaccccatgctggggctggcactgggagggctggtggtcagcgcagtgagcctggctggctgcctgggcgccctctgtgagaacacctgcctgttacgtggcttctctgggggcatccttgccttcctggtgcttgaggccgtggcgggggccctggtggtggccctctggggcccgctgcaagacagcctggagcacaccctgcgtgtggccatcgcccactaccaggacgacccagacctgcgcttcctcctcgaccaagtccagctcgggctgaggtgctgcggagctgcctcctaccaggactggcagcagaacctgtactttaactgcagctcccccggggtgcaggcctgcagccttcccgcctcctgctgcatcgacccccgcgaagatggagcctctgtcaacgaccagtgcggcttcggggtcctgcgcctggatgcggacgcagctcagagagtggtgtacctggagggctgcggcccgccgctccggcggtggctgcgcgcgaacctggctgcctcgggcggctacgcaatcgcggtggtgctgctgcagggggcggagctcctgctggccgcccggctactcggggccctcgctgcccgcagtggggcggcgtacggccccggagcgcacggggaggaccgcgctggcccccagagccccagccccggcgccccgcccgctgccaaacccgcccggggctgagcgcacgccccgaggtccgagaccgccacgcacagggatacagggggcgcctccgcccggctaaaaagcgctgcctgcgccgccgccgccgcctgatttcgctcgggcttcgggtgacttcgccgcaggacctacccagctcgctcacttcgctcgctccgcgtcccccatgccagcccccaacgcagggcgcccggcgaagccacgggactggcgggaggagcacgcggggccggaggaaatcctggagctgaccctcacctccgagcccccactcccaccccagccgcacagttcccacctcctggcacctccctcccctggggccgccaccccttctgggctcgtgatggtggagctaaggtccaggcctctccctcccgagtgcatttttggggagatagtaaatgttttattcgggtgtatcattcatacagtaaagacaccaatcttcaaaaaa

SEQ ID NO: 720900 - DNA, 829 bp, Homo sapiens
gatgctggtcatggcgccccgaacgtcctcctgctgctctcggcggtcctggccttgagccgagtaccttgggccggctcccactccatgaggtatttcgacaccgccatgtcccggcccggcgggggaagccccgtttcatctcagtgggcgtacagtggacgaccacgcagattcgtgagggttcgacaggcgaggccgcgagtccgagagaggagccgcgggcgcgggattagacgcaggaggggccggagtatgggaccggaagatcacaggatcttcaagaccaatacaccagatttgaccgagagagcctgcgtaaacctgcgccggtatttagagactctatgatgcagaagggccggggttctcaaaaatcccctcttccacgaatgcatttgtacggggctggcgaacgtttgagggcccgggacctgggcgcgccttccccttcctggcggggcatttaacccaaggttagggccgttaacggaagggcgcacgcgcatttacattcggcgccttggaaaccgagggaccccttggcgcttcccttggacacgggcggggggaaaaccggggggggctcaggatttaaccccaaggccggccaacggtggagaagggcgggccccggttgtggcccggaattcaaggggcagataaggccgtaaccttggggaggcggccacccgttccgttttgccacgggtggggttcccgacgggaattaccttgggagacaccgggacacgcgcctacgccttggaaacgcggcgggacccctcgcaaaagaggaacacgtggtggcccaagcaaccccaattct

SEQ ID NO: 720901 - DNA, 603 bp, Homo sapiens
  misc_feature (581)..(581): n is a, c, g, or t
ctagtgtgttgggtggtcatgcccccccgcccggccagccgccccgtccgggaggtgaggggcgcctctgcccggccgcccctactgggaagtgaggagcccctctgctgcggccaccaccccgtctgggaggtgtgcccaacagctcattgagaacgggccaggatgacaatggcggctttgtggaatagaaaggcaggaaaggtggggaaaagattgagaaatcggatggttgccgtgtctgtgtagaaagaagtagacatgggagacttttcattttgttctgcactaagaaaaattcctctgccttgggatcctgttgatctgtgaccttacccccaaccctgtgctctcgtgaaacactgtgcgtgtgtccactcagggttaaatggattaagggcggtgcaagatgtgctttgttaaacagatgcttgaaggcagggtgctcgttgggagtcatcaccaatccctaatctacaagtaatccagggacacaaacactgcggaaggccgccagggtcctctgcctaggaaaaccagagacctttgttcacttgtttatctgctgaccttccctccantaaagctcccgggccctgccaa

SEQ ID NO: 720902 - DNA, 112 bp, Homo sapiens
tacaagaaggcatagctggttagaatgtccctgtgtttctccaaatatctgcagtttcctagacgacccctccctcaggagtgtagcgagagctggctggtgtctgacagcg

SEQ ID NO: 720903 - DNA, 139 bp, Homo sapiens
cccgagttatgtaatgtggaggggtcggtgcagtctggtgtgagtgcatctccaggaggtcttgggaaagaggggcattccttcctgaggccatgttggttctgttctgacttcattcagagcagaactgccaatgtcc

SEQ ID NO: 720904 - DNA, 517 bp, Homo sapiens
taaaaatggtttatttcatggccattgtaaaaaataatgacctgatgagtaaatattggcttaaggcatatagcagagcatctcgcttcctctctaacataatgtgtaacaaggtggagagccagctgctctccaaggataggaggttaaaccattacgtccattttgaaatgctactatatatacacacccaaactactacatacatatacaggacttaaaaacaacaagcccagctcagaatgcttacagcctggcacctaagccttattcacacctcaccataactttgcagggtgacacctcgaatgttcccaccacaaaatttctctgtactggcttttaccccgagaaaagcaaaatgtgaaaatgttggtaagagagttggttgggaacttcagttgccgggttttttcatgttaaaaagccactttaatgggagggctttcattaccttttgcgggaagaaggtttgagcaccattaaggccccccaggggttgagggtgggggaaaat

SEQ ID NO: 720905 - DNA, 996 bp, Homo sapiens
ggcccagcagcccagccacagaggagccagcgaacctctcccggcgcctgtgctgggggctttctgttccagcgtcaaggatggaggagggggagaggagccccttactgtcccaggaaactgcaggccagaagcccctctctgtgcacaggccacccacctcaggctgcctaggtccagtgcccagggaggaccaggcggaggcctggggctgcagctgctgtcccccggagaccaagcaccaggccttgagtggcacccccaagaaaggaccagccccttccctctccccagggagcagctgcgtcaagtatctgatcttcctctccaacttccccttctccctgctggggctgctggccctggccatcgggctctggggcctggctgtcaaggggtctctgggaagtgatctgggggggcccctgcccgcagaccccatgctggggctggcactgggagggctggtggtcagcgcagtgagcctggctggctgcctgggcgccctctgtgagaacacctgcctgttacgtggcttctctgggggcatccttgccttcctggtgcttgaggccgtggcgggggccctggtggtggccctctggggcccgctgcaagacagcctggagcacaccctgcgtgtggccatcgcccactaccaggacgacccagacctgcgcttcctcctcgaccaagtccagctcgggctgaggtgctgcggagctgcctcctaccaggactggcagcagaacctgtactgcctctcaagccttgctcttccccagtaagacctgtggaccattccagaagcctttgccagaagttccatccaacctccccggtccaattttactttctcaatgacgtcagaggctctgcggagggaggtctcttattcaatgcttggtggtcccctttaacgtctccttaataatctcctgtgtaagaagcacacctatcgggagcgagaagttgcgggcagggatcgtatgaagc

SEQ ID NO: 720906 - DNA, 256 bp, Homo sapiens
gctctacaggatccttagggctgtcgggggcgggcgggcggttgctccccgcggaggtgtgaaccacatcctgccccaggccactgcaggagcgaacctacccctcagagacgcgagagaatgagtagcaacaaagagcagcggtcagcagtgtacgtgatccgtctttgcgctcatcaccatcctcatcctctacagctccaacggtgccactgaggtcttccattacggctccctgcggggccgtagccgccga

SEQ ID NO: 720907 - DNA, 271 bp, Homo sapiens
ccaggcaggattctgttcctagtgggaggtaccacagctgacagaaagtgacagcggagtccatgccttgcggagggggcttgaacacagcacgggggcaaggacccagaaaggtcacccttgattgtccacatgtgattacgagccatcatggggaagagcagccaattgccttgagactccaaaatgggtttcattctgccctatttggtcccagattgcctgcattatgccaggttcttccaaatttcgtacccatttcgaagatggg

SEQ ID NO: 720908 - DNA, 264 bp, Homo sapiens
  misc_feature (2)..(2): n is a, c, g, or t
tngggtgccatagagagtagaccagtttggagatggaaaggttagcagtgacttagcccatatgttctgtgttggaatttgtgctagcagtttgagcactagctctgcgtgcctatgaactgaatgctgcttgtcccattcccattttatgtcatggagaaataattccacttggtaacacaaaggctaagttaatgttattttctgtacagaaattaaattttacttttagccttttgtaaactttttttttttttttccaag

SEQ ID NO: 720909 - DNA, 457 bp, Homo sapiens
  misc_feature (130)..(131): n is a, c, g, or t
  misc_feature (192)..(192): n is a, c, g, or t
  misc_feature (203)..(203): n is a, c, g, or t
tcaaatttagataatttaaaaataaacatagatcacagaaggctacactatcaaccttctctgtccagacgctgtactctcagttcctagataaatcacagctacattttttttcatttaaagatgtaanngtgtaacctggggtttagtaaactacagtcctaaaacatccagccagccacctggttttgnaaataaagttncattggacagaagccatgcccacttgtttacattattgtctggctgcttttacactacaccaaactgagtcactggggcagagaccttatgtggtgcaaagcctaaaacactgtaaatcttcacttaatatcatgacaggttcttgaaaattgtgaccttatgtgaagcaacgataaaccacttttttctcatcaatgttataactaaacgttaaaggaaactattattggaggacctgctgtatgtcattatg

SEQ ID NO: 720910 - DNA, 114 bp, Homo sapiens
gcggccgcctactactactactgctcgaattcaagcttctaacgatgtacggggacatgtgaaataaaactcagtattttaataaagtagcacggtttctattgactcaaaaaa

SEQ ID NO: 720911 - DNA, 303 bp, Homo sapiens
aggcattccagccccgaagctgctccaggatgcagtggctcattgcctgtaatcccagcactttgggaggccaaggtgggccaactgcttgagcccaggagttcaggaccaccctgggaaacatagtaggaccctatctctacaaaataaccttagccaggcatggtagcttgcacctgtagtcccagctacttgggagacccgaggtagatcacttgaacccaggaggttgaggctgcagtgagccatgatcgtgccactgcactcccgtctgagtgactgacagaatgagaccatcttaaa

SEQ ID NO: 720912 - DNA, 203 bp, Homo sapiens
agtcatcttaaggcttactggggctggaggatcctcttccaagatggtgtactcaaatggctggcaagttggtgttggttgttggtgggaggcctcaattcctcctctatgtgggactcttcacggggttgagtgtccttatgacatggcagctgcactccccagatcgagcgatgcaagaaaacaagacagaagcttcagtg

SEQ ID NO: 720913 - DNA, 161 bp, Homo sapiens
ggagaaactgaggcttgctagtgtggagtgaccaggttcccttagagtgcagtgcgtacaaggcctgacttactctgttccctttccccaggaactcttggtcctcagaagcccctctggattgtctacctggtcgtaacccataccacggtgctattacg

SEQ ID NO: 720914 - DNA, 330 bp, Homo sapiens
  misc_feature (310)..(310): n is a, c, g, or t
aatgagatggagtttcactcttgttgaccgcctaggagtatgcagtggggcgatctcggctcactgtaacctccacctcctgggttcaagtgattctcttgccccagcctcctgagtatctgggattacaggtgcctgccaccatgcctggctaatttttgtatttttagtagagatggggttttgccatgttggccaggctggtctcgaactcctggcctcgggtgatcagccaccttggcctcccaaagcgctgggactacaggcatgggccaccgtgtccaagctgggaaatgctttccttgacttnagtgctaggaagtaggatgg

SEQ ID NO: 720915 - DNA, 331 bp, Homo sapiens
atccccccggtaatgtagatgctgtgtggtgggattgcgtgagataccatgcggtacaggatggtctggtgagaaaggaaggcttagagtctctccaggtatgatcggcgaacccagaactccatctttttacagatggaacgtttctatggtgcttatgcacgcagacccgctactgctttaaaatcgtacatatgctggagatccaagttcgacgctctcaacctttctcccgttgtcctccagcgtcatctcccctcttggtccttgggttgttctgcacttcctgcgtatttacatgcattacacatgttatctatcatttccgggg

SEQ ID NO: 720916 - DNA, 100 bp, Homo sapiens
ctactggctcatgggcgccaaaaaatactggatctgctgaactgaaggctcagcccgatgatctccgcagatcttcagctgcattgggcccgaagtaagg

SEQ ID NO: 720917 - DNA, 457 bp, Homo sapiens
cccgacgccgacgaccgatatgcctatgagtctggtttcggagcccagcgtcaccccagacccggcatggagccgatcatggcggcgctgcaacggcaggacggttggtatcgagcttacctcgccaacatgaccaaggcagtgtccgcgccagacctcgccgaactggcagcgctcctgtcatgcgagatgccgctggatcttgccgttcagcgcggcaagacggcgctgatggtcgccgccgagctgggccaccaggccgtcgtcgacatgctgctcgtccacgccgaagagcatggcatgcggcagttgaatctgggcgcggcggacagcggcgataccgcgttgatgctggccgcctttcacgggcatgttgccgtcgtggagcgcctgctcgccgcctctgcggccaccgaggtgccaagccagtgcggcgacacggcgctgatggcggccg

SEQ ID NO: 720918 - DNA, 125 bp, Homo sapiens
caccagccattcaaagtacaaatgaagaataacgatctaacaggattcttgtgagacacattatcagactaatttaatccagttaacacatgaataaagatttagagtttttaaagaaatacagt

SEQ ID NO: 720919 - DNA, 155 bp, Homo sapiens
agacctcaggccaggataggggccatactgcccctactgcaacaccacagagctcagctgcacttccacctgccttcagaagcccaggaggtggcccttagtggcctataactcagctcggaccctactcgccgaacggggatcctactagagta

SEQ ID NO: 720920 - DNA, 152 bp, Homo sapiens
ggcgcgagtagccgacagccggagcgcccggcaatggcggcctcgacggcctgcgcaccggcccatcaaggggatcttgaaggacaagacctctactacttcctttatgtgtggcgtcgggcgacacaggccccaagggaatgtccgcacga

SEQ ID NO: 720921 - DNA, 302 bp, Homo sapiens
ggcggcatgattgaatgcagtgatttcggtgcagattggtgcaatgtatctctatggaatgaagtgtattccatgcagcttggtgtaattgataccgactgaatgcagtggattccatgcagtgtgatagaatgcactggattccatgcagcagtgtgaaattcatgcagagtgaatgcagtggattgcatgcagcttggcccaatggatcctgattgaatgcagtggattccctgcagcattgtgtaattgatacaaatagaatgcagtggattccatgcatcaagattcaatgcagtgga

SEQ ID NO: 720922 - DNA, 304 bp, Homo sapiens
  misc_feature (44)..(44): n is a, c, g, or t
ggctgctctgaggattacttcgattggcgggcactcacatgtgnattagtgtgcgtgatctaggccaggcatggtggctcacactggaaggatctcttatggagatgggtcccctccccaatagagaaaatgagggtatcatgcctccttgcctcaatttggctgataaggagactttgaggagacacctacatacctgttggttcccaggcacttggcgacagggtgacctgcaggagcgtcaagctgcgtgtgtttgggtagcacaacaaaggcaaacaaggtaagttgcccgccaatcgaa

SEQ ID NO: 720923 - DNA, 207 bp, Homo sapiens
  misc_feature (135)..(135): n is a, c, g, or t
tcaagcttctaacgatgtacggggacatgcacaaacggtagttttgtgtgttggctgctccactgtcctctgccagcctacaggaggaaaagcaagagcttacagaaggagtgttccttcacggaggaaagcagncactaaaagccactttgtagtcaaagatgagcgggaaaccatctcaataaacacattttggagaaaaaaaaa

SEQ ID NO: 720924 - DNA, 337 bp, Homo sapiens
tatgtgagctggtcaggagggaagtagtgcagcagtgccggatgtagtcgagtactgcgtgtgcagtggtggaggcccaggtcacgcagtcagcccaggtctgtggtcgctgcagcaccaggctgcgctgaacagcctccagcacctccaatggctgagtgcctgccagccgcggtgttcgctccacaaacttggggtctgtgaggtactggttgacattttctgctggctgcttgaagaggcctttcaaactcatcccgagcccactgcaggatgtgctcgatggcattagggaagttcttcagggtacagatgggggatggaccttctcaggtgg

SEQ ID NO: 720925 - DNA, 638 bp, Homo sapiens
atctctccagggttgaagcggggcaatgccatcttcaccttcccaaatactgcagtgaagtgtgctgcagccccgtagaagatcatgtacttatcagaagcctactggaggaagacagggaagcgatccaaggccaatatcattttcaacacttctattttttccgtggtgtgggttaagaagtatgcagatgccctacaggagatcatccaggagcggcacctcactgttaactacaagaaaaacctcactgaaggccgagccgttaaacaagaggctgaatttgagaacctggacataccaggagagacccaagtggtttcttatcgaattgcttcatgttacacctccaatgagccccaccatttgtcctcacgaccaggcctgagccttatgcttctgaattggtggatggggctaagatactcttcaccccggcggtccctaaacagttttgggtgtgtcccctgtccatcctttgcctgtaatatccgtgtcgccgtacttctccacccccctttcctccccgtgacattttttttcttttggccactactcccggcccggggattttcgttcgttcccatctcgtcccttttgccccttctccaccgtcttgccctccagtggaaaaaaaa

SEQ ID NO: 720926 - DNA, 286 bp, Homo sapiens
cctgtggtctcagctgcttgggtagtgctgggacagtaacataatctcttgggcatgaggggtggaggctgcatgtgggaccgagattgagccactgcactccagcctgagtgacggagcgggactctgtctcagaaaataaataaataaataaaaatgaataattggctcggtgtggtaatgcatgccttggtcccagttacttgggaggctcccttaggcctgggagtttggggctgtactgagccgtgagtgcacatcagcatgcgtgcctggtacgagcacc

SEQ ID NO: 720927 - DNA, 186 bp, Homo sapiens
atgtgaggagctcaagacacttctgacgtccagcaccttcagactgcctgcattcctgcgctgcatgaactcctttcaggtggcctacatgcggatgtgatgtgacatgatgtcatcatcttattgggtatgaaacatgtgaaaccaacacattaaatacctttttatataaaaagtaaaaaaaaa

SEQ ID NO: 720928 - DNA, 398 bp, Homo sapiens
agggcaggcgtcctgggtggtggtgggatggtcccctgtggccccgggcacagggccgggcaggcagcctggtgccggaaaggcggtgcgtgctggtggtggtttaaatgcccagaacagccccagacagcgcaggccgggcagggtggggggatgggagcaaaggatcaaagctttctttttttcaagtgcaataaatctatcagggaactggggcgggaacaaccggcactccgggacccttctgtcccaggccattggagggtgcgcccttaaaggccctacagccctttgggggcgagtggcatgggtgtgggttagggtgggcaaagggctggggctactcccgtcggggcaactctgttccccccttttttaataaactggggctgggttca

SEQ ID NO: 720929 - DNA, 902 bp, Homo sapiens
ggagccttaatgcttcaaggtgtagaccttttagccgatggctgtggcgcgttacaatggggccaaagggaagaacagtgattcatgagcagagtcggggaagtcccgaacagtaagcaaagagatggtccactgttgcaaagtcaatgacttaaaagataaatacaagaacatggagctaaacttgttcaacgatgtgccaataacacaaatgaaggaagctggggatggcactaccactgctactgtactggcacgctctatagccaaggaaggcttcgagaagattagcaaaggtgctaagtccagtggaaatcaggagaggtgtgagtgttagctgttgatgctgtaagttgctgagacttagaaagcagtctaagaccgtgtgaccaaccccgtgaagaaattgcacagggttgctagcgatttctgcatagaagggagactaaagaaattggcaagtatcgatcatcgtgatgctagagtgaaataggaaagttggaagaagagggtgtcatcacagtaaaggatggaaagaatactgaatgatgaattagaaattattgaaggatggagaggatcgaggatatatttctgcgatactgttattaagtagatgcaagtaggttcagaagaagtggagtcgcgaggatagcataatgtggctgtggtagcgcagagagacacctagcgacggtagtgccacggcacagggggagcgtgcctcgttgaatctaggcaaatgtcacgaaacgccctttgggcaataagtcggttgaagatcgtgatgggagaaggcacccgatgtacacatcggtcgaaggacagtaggctaaaagggggggcgtcagggttgaggcaccggaaggggccacgggctcggagggaccgaaggaacagga

SEQ ID NO: 720930 - DNA, 351 bp, Homo sapiens
  misc_feature (89)..(89): n is a, c, g, or t
  misc_feature (112)..(112): n is a, c, g, or t
  misc_feature (148)..(148): n is a, c, g, or t
  misc_feature (150)..(151): n is a, c, g, or t
  misc_feature (156)..(156): n is a, c, g, or t
  misc_feature (159)..(159): n is a, c, g, or t
  misc_feature (171)..(171): n is a, c, g, or t
  misc_feature (205)..(205): n is a, c, g, or t
atcgttaacgtgcacgatcccctgtcccttgatctagcctatgatacctggcagttcttatagtgcatgattcacatttgtgaactganaacactaaagatctttatggtanagtcaaacctacactcagtgaagagtagtgtgactntnncttcngcnatagttgtggcntgcttttgtataaattcttgcgaacttctaacantagtagtctagttattctcagatctatcttctatccttcaagtattatctctgctctgaattatgcagtgggcctgtgaataggaagggcttgtgtgtgtgagcttctatggctgataaggcagaggggattccgtgcacggttaa

SEQ ID NO: 720931 - DNA, 105 bp, Homo sapiens
aaacgagctcttacaggacaggatcttcacccgggagccccagcatacctaccactacctgcccttcaacctgccccaccggaggcctcacttattctttccctg

SEQ ID NO: 720932 - DNA, 647 bp, Homo sapiens
  misc_feature (154)..(154): n is a, c, g, or t
  misc_feature (272)..(272): n is a, c, g, or t
cctgcaagcgctgtttctggtccgcccaccccctccacgagatttctaaaaattgtgtcataattgtcattcgtggtggtaattttaataatataaaaaattgtatatgtagaaatatgtgaaagatattctcgccacggggaccacgagaacncccaggccccgaggctccacgggcacacctggtgctgtggtgagcttcttccacggaggccacccttgccaccccactttcttcgccgtttcttaactttgagaccactaaagggtgnccacggttctgggtgaaaagggataacttttatgcacaccactaagacccaacttcctgagaaatgcccagtgcctgcttagtagctttggaaaaggtgccctctatgtgaaccactttctatgaaaggggtggctgggtcttcaaggatctcctgtttttttcaggctcctaaagtaacatcagccactttttagaattggttctgttttcgtaccttcccacctggcctccaagtgagccacagaaaccctgcctgccctctgtctgtcttctcctaattctgccaggtggaggttgctagtttagtttcctttttgagatactattttcatcttttgtgagcctctttgtaataaaatggtacatttctata

SEQ ID NO: 720933 - DNA, 203 bp, Homo sapiens
tataagcagagcactttcaggattaggtatctccttctaggaactgtccctaaatcataccaacccccttcatcctttgactatttccctaagccagggtcaacccacaagccagggtcaacccacaagccagggtcaacccacaagccagggtcaactccaaaagccagggtaacccaaaagccacgggtcaacccaaaagc

SEQ ID NO: 720934 - DNA, 918 bp, Homo sapiens
agtatattgatagacggaccagcgccgtcttttatggtgagagaggcacgaatcttgaccgcccttgtgtaatcgtgctgtggagctcaatactaagtgttgtttcatcagtgtgtgtccccaggatgtgtgtccccacgcccaaggggtcctgtgtgccccgggtgtagtgaagacaactttgttgccccgggccccgaggtgtataactgttcaggccggggggtccaccacaagctgggttaaagatcattatcccttcgtgaaccttcgagggcttttatcgacagctttgggaagaattagtccgagagcaagggatgttcgcccacgttggccagaagctaatttttttcagccccgggggactcccctgatcgcccgtctgcgaactggctgtctcttaaaaaccggcagttcttcaagtgggagcacacagcacccgggttatataccacgtgggattctctctgcgcggcgccaaacaaagaatcatggggagtttaggttttaaataaataatcggctgtaagcgaacatcataagatgcactgtggctgccgacaaaaacggctcgtcaaaacgataggcgacaaccaacacgagatattcttgaataacaactggtagattcaaacattgttaaaaatccgcacagaaatcttgaaataatgcagtctttaaaggcaccgaatttgtcccgaccacttcttctacaggcggaacaggattcagaactcatgacaaaattcagtaggtggggtggcccagttgctgtaaaaattggtgaagagggtgctcgaaaagagcggacaaaagaaacccgcttttgtttgcaagcaacgttggtaacgactagtcttccccctcttaaaaagtggaaaaaaacatgttgagaccttcttctccacaaaaaca

SEQ ID NO: 720935 - DNA, 455 bp, Homo sapiens
ggatgatcccatcgacattgccctattattttattagataatgttaacagatacggactcggttatcaaccacttggtgtagatactgacatccttcaaattgaacaaggtatgttacctaattagtctttacgtattcctcccacacttaatggataatttgtcaagcccagggaatctttcctttactttgacttcccgagttgttcattcatccattgacacataaacttattctggattttgaaatcttcctcgatttccctcacaaacccgacgtatcttgcaaggtattattctcaagataccgataccctcatcaaaggatttgttgataagtttgtgctagatcctcatgatttaactcctccaatcggtcttcccaagcaccttggaggactcattatcttattccttctctccacctatatgagaaacaatagggcaatgtcgat

SEQ ID NO: 720936 - DNA, 497 bp, Homo sapiens
gcaaaagaaactaaccccggagcagttttaggtcacaagagaaaagggaagggacccccctttcagtgggatctacttgaataacaaggaagcaggaatgtatcattgggtgtgttgggacagtccatttttcagttttgagaaaaagtactgttttggcactgggtggctttcgttttccgaggctcatggtaggtctggttttgatgaaagccacacagggatcttgagaggtttggatacctcgttaggatcagctcgcacagaggttgtttgcaagcagtgtgaagttcatttaggtcaggtgtttcctgagggaccggggcccaatggtcagaggttttgcatcaacagggtggctttgaagttcaaaccaaggaaacactgcccattttcaagagtccggttcccttgccaccccttcaggggcaccctcaatttccacaattcacttgaatgacttgttttatttgcaataaaactgggctgaatttgca

SEQ ID NO: 720937 - DNA, 159 bp, Homo sapiens
cttctctccgagtggtcaattgctgagaacattttgtgctgaattcatcgaagacagccctgtgttaattcatatttagacaccccaaccatttccccccagaagcaagcacagctcagccaaccagccagccagcacagcaggccagcactggccaat

SEQ ID NO: 720938 - DNA, 357 bp, Homo sapiens
  misc_feature (7)..(7): n is a, c, g, or t
  misc_feature (58)..(58): n is a, c, g, or t
  misc_feature (108)..(108): n is a, c, g, or t
  misc_feature (238)..(238): n is a, c, g, or t
  misc_feature (320)..(320): n is a, c, g, or t
  misc_feature (348)..(348): n is a, c, g, or t
ctgcaanctccgcctcccatgttcaggctgaggcaggagaatggcgtgaacccgggangcggagtttgcagtgagcgagatcgtcacttgtactccagcctgggcgancagagcgagactccgtctcaaaaaaaaaaaaaagaaaataaagaaaagggatgaggagttcctgggcatttttatttgtccccttttctccctctctaggctctattaagacaaagctttttcagatttncacttaaacatttaaccatagtttaggaaatttttaattatgcaccctatggacagaaggtaccctttcttgggtacataantttcaagctatttaggggatttttcttncttgcattt

SEQ ID NO: 720939 - DNA, 377 bp, Homo sapiens
  misc_feature (74)..(75): n is a, c, g, or t
  misc_feature (101)..(101): n is a, c, g, or t
  misc_feature (117)..(117): n is a, c, g, or t
  misc_feature (126)..(126): n is a, c, g, or t
  misc_feature (163)..(163): n is a, c, g, or t
  misc_feature (210)..(210): n is a, c, g, or t
  misc_feature (226)..(226): n is a, c, g, or t
  misc_feature (281)..(281): n is a, c, g, or t
cggggaggaggtctctggcagagaaggatgtccgttccaggagcacacggccctgcccaatcctgggccttaannctctgctagggctcgggcgctgtggntcctgcattgatgaancccgtgtcntgcccttgatgaagcctgtgccacctgcaagtgccancctgccccatgccccaacccccaccgaagagcccctgagctcaggcntgagccaagccacctnccaaggactttcagtgaggaaatggcaacacgtggaggtgaagtcctgttctcanctccgtcatctgcggggcttctgggtggctcctgcaatgacctcacctggcatgctggctgtggaaggcctaggacctcaggctggggaggaggaa

SEQ ID NO: 720940 - DNA, 323 bp, Homo sapiens
  misc_feature (303)..(303): n is a, c, g, or t
gcactgtggtccaggatggattctcctgccccagcctcctgagtagctgggattccaggtgcctgccaacacactcggctaattttttatacttttaatagagacggggtttcactatgttggccaggctggtcttgaactcctgacctcatgatccacctgcctccttatccaaaagtgctgggattacaggcatgagccaccgcacccggccacacctgggttgtttttttcttttcttttttgagacagagtctcattctgtcacccaggctggagtgcagtggtgcattcttgcctctntcccccgggttcaagctatt

SEQ ID NO: 720941 - DNA, 354 bp, Homo sapiens
cagggcgggaggggaaggagctgtgcaaacatggtggtggcccttccctgcccccaccttgttgactttggttgtggttgggggatgggctttgatttgggtggcagtgtctgtgcttgggaaaaaatgtcagagaaaagacaggaagcggattgaatgcaacagtgttgggtgcctggggctctttcttgtgtcttccggcccctagagcagatggaacaataagatgctttagggggccgggcgcagtggctaatgcctgtaatcccaaaactttgggaggccaaggcgggtgggtcacctgaggtcgggagttcgagaccagcctggccaacatgaaaccccgtttctact

SEQ ID NO: 720942 - DNA, 758 bp, Homo sapiens
ctgataaagaacctgtggtatacatacaccaggaatactatgcagccataaacaggatgaactcatatcctttgcgacaacatggatgcagctggaggctatagtcctaagcaaattcaccacaggcaagaaactcaagtactgctgcatgtatctcacttataagtgggcagctcaaatcatgagtcccacaggggcccttacaagcatgggaacaatcagcacactgcaggcaactagtcaagcaaatggcgggggcagtcaggacaggccggaagtgtggggctgaaaacatgctattggggtgtatgcttaactaccctgggtgcatgggcctccatctgtacccccaaacatccaccattaccaaacttgtattcccacagtacacaacacctgcacatgtaacccctgaactcttacacatacacaacgtggacattaatttcacgctggaaccaacatacaaaagaaatcacgacaacctggccagtcgattcttttgacaacaggcacgaccaacatttggatacaacctgtagcccagattaccccacggaacacaacaacgttgcgacgaccccaaactacacaaaaatcagactcccaacccaagggccttacacctgataccatggaatacacaaagttactcagacctgtcatgaacaactatactatacacaaaccaaaccagaaaactaaagggaattgttaaattctaagcccaaatacatgttcatccgggagcacccacc

SEQ ID NO: 720943 - DNA, 398 bp, Homo sapiens
  misc_feature (107)..(111): n is a, c, g, or t
  misc_feature (352)..(352): n is a, c, g, or t
  misc_feature (372)..(372): n is a, c, g, or t
  misc_feature (378)..(378): n is a, c, g, or t
  misc_feature (381)..(381): n is a, c, g, or t
actcttaacccaaagctgcccatccccctatgagcgggcgcagtgattataggctttcgctctaagattaaaaatgccctagcccactttttttcccaaggcacacnnnnnggcccctatccccatctagttattatcgaaaccatccagcctactcattcaaccaatagccctggccgtacgcctaaccgctaacattactgcaggccccctactcatgcccctaattggaagcgcccccctagcaatatcaaccattaaccttccctccccccttatcattttcccaattctaattttactgactatcctagaaatcgctgtcgccttaatccaagcctacgttttcccncttttagtaagcctctaccngcccgncancccataaaaaaaaaaaa

SEQ ID NO: 720944 - DNA, 413 bp, Homo sapiens
cagtgaaactttgcaggatcacccttaagccaactcaacgcatcaaaaagtggggtcctgatagttccccccaaccttttcctcccaaagtttttcctgcctcagtaaaaaggtatttcattttcccagttggtcaagccaaaaaagggatcaatttagtttttttgcatcccggatttgatcacaagtcctgttagccctgcttttaaaaaacatccagaaccctgccatttgcccgttttttgttgccatcacggttgtccacaccctccttaccccttgtttgggggattgcggtggtttcccaactgccctgccagggtttgccctggtccctttttttgactatttttgacccagcgcccccatgttaaaaaacaaatttgatcggggaacgcctttgctccctttga

SEQ ID NO: 720945 - DNA, 121 bp, Homo sapiens
tgtgctgcggcgttctagaggaccccctcccaagcatgaggaattgatgacagatcatatagggttgcaaatcggattttctaaaatgagtaggaagttggatttttatgtgcaaaagttt

SEQ ID NO: 720946 - DNA, 389 bp, Homo sapiens
  misc_feature (298)..(298): n is a, c, g, or t
  misc_feature (323)..(323): n is a, c, g, or t
  misc_feature (382)..(382): n is a, c, g, or t
cggaggtaaaaagaaaatataatgagaatttaattttaaaagggaataaaatttttaaaggaaaagcgagttgaaaaaaggaaatagagaaaaggttgggtggattacttggttaacttaagggagaaaaagagtataaaaaatttgagaaagaaatgggagaagagtgatggagtctaaacgttgatatagaggtggggaaaagttaaggacaggagtatattaaaatagagagaaaagagtttgagaagtagataaatatagaaattaagtgtggggtaaaaaaaagaatgtgaantagtttgggggggggggggaaaaanagaaaaagaaatacaacagccgcacacactctctctctctctctctctatcttctctcntcgtgca

SEQ ID NO: 720947 - DNA, 359 bp, Homo sapiens
  misc_feature (103)..(103): n is a, c, g, or t
tcctaaaatgagatgtgcttatgcactcaactgtgcactcagaaatgggtaacagggtactggggactgacttgtgtctccccagaaattcacatatggaagncctaaacagcatgtatggtatttggagagaggcctttgggaggtggctggggttggatggggtcatgagagaagggccctgaataatgggatttgtgcctgtataagaagagaccagagatgctgggcatggtggctcacgcccgtaaccccagcactttgggaggccaagacgggcatatcacaaggtcaggagattgagaccatcctggctaacacagtgaaaccccgtctttactagaaatacaaaaaattag

SEQ ID NO: 720948 - DNA, 413 bp, Homo sapiens
ctcaagaagggcctctttttttacaatgtcttttagggggggcccccttttttccttgggtttttccgccgaataaagaagggggtttcgggccttgccccccgccccattgagattgagattttttcccccccgggggggaaaaattttttttgggggggggggcccctcctggcctttttgtccccctttccccaaatgtgggttagcaaacagggatttaattaaagcgggccttcctttttcccccccaaaaggtttttaaaaccttttttgttttttttttttttttaccccccccttttaattttttttgggattttgccctccgttttttttccaattttttttaaccaaaatttttttttttttccttttttttttttttttaattttaaaaaggggcttgggta

SEQ ID NO: 720949 - DNA, 372 bp, Homo sapiens
ttgcccaggctggaggccagctggtgcaatctcggctcactgcaacctctgcctcccgcagctcaagtgcgtcttccgcctcagcctcccgagtagctgggactacacgcgcgcgccaccatgcctcgctaatccttgtattattcgtagagccggccttcaccatgttggccaggcctgctctcacactcctgacctcgtgatcctcctgccttggcttcccaaagtgctgggatcataggtgtgagcccacccccctggctgttagtcgctattttaaaaaattatgtctacgcatctacaataaggctgtatgtattggattgctgtgccgagtcactgaattcctacatgcaaactacctccaactgt

SEQ ID NO: 720950 - DNA, 347 bp, Homo sapiens
ttttttttgagatagagtctcgctctgtcatccaggctgcagtgcaatggcacaatctcggctcactgcaacctctgcctcccagattcaagcaattctcctgcctcagcctcccaagtagctaggactacaggcatgtgtcaccatgcccggctaatttttctatttttagtggagatggggtttcaccatgttggccaggctggctcaaactcctgacctcagagtgatccacctgcctcggcctcccaatgtgctgggattacaggcgtgacgaccgtgcccggcccatcctgttcgtttaatgtgtcctcggcactagcggttaagttccttcacggctgggg

SEQ ID NO: 720951 - DNA, 227 bp, Homo sapiens
aatagccacacgcatgtggatcagatgaagggacatctcagtatttccccttgcatctacagaaaaatataatccatatgcaacaatagctgcaacaacccgctattccaacgggtacgaatggtgcctctttagctataacgaatgagttttgatccctgatcttcctcatatgaaggaacgggaaacacctgatgtctgttgacatagtgattgctatcgaaact

SEQ ID NO: 720952 - DNA, 958 bp, Homo sapiens
  misc_feature (455)..(456): n is a, c, g, or t
  misc_feature (475)..(476): n is a, c, g, or t
  misc_feature (488)..(489): n is a, c, g, or t
  misc_feature (492)..(493): n is a, c, g, or t
  misc_feature (497)..(498): n is a, c, g, or t
  misc_feature (501)..(502): n is a, c, g, or t
  misc_feature (505)..(505): n is a, c, g, or t
  misc_feature (509)..(509): n is a, c, g, or t
  misc_feature (511)..(511): n is a, c, g, or t
  misc_feature (534)..(534): n is a, c, g, or t
  misc_feature (536)..(536): n is a, c, g, or t
  misc_feature (540)..(540): n is a, c, g, or t
  misc_feature (562)..(562): n is a, c, g, or t
  misc_feature (564)..(564): n is a, c, g, or t
  misc_feature (578)..(578): n is a, c, g, or t
  misc_feature (608)..(608): n is a, c, g, or t
  misc_feature (632)..(633): n is a, c, g, or t
  misc_feature (639)..(639): n is a, c, g, or t
  misc_feature (664)..(664): n is a, c, g, or t
  misc_feature (666)..(667): n is a, c, g, or t
  misc_feature (703)..(703): n is a, c, g, or t
  misc_feature (718)..(718): n is a, c, g, or t
  misc_feature (746)..(746): n is a, c, g, or t
  misc_feature (807)..(807): n is a, c, g, or t
  misc_feature (821)..(821): n is a, c, g, or t
  misc_feature (861)..(861): n is a, c, g, or t
cgtgacctgctggatgaattcttggggtgggtgcctggcaagtacgctcatgattactgactgtggctctttctactgcgggattccctacacttggtttccccttaacgaatctctcctatggaggaactctttctggaacctttccttcgtgacacaactcaggcttgcatagaaggggcatacgtatcgtagattcgggtgtttacaagatgggtcacgattaccgcgggggcgttctcacggtcaaggcatgacctggttaccgggatcgaccaccgcctagtatcctctgtatcgccatccaccacggccttgctcccttgcccctccccacggaagtgtgcttaatatatgagtgtagatatatatgtttagctagtgacattccccagagagccccagagctctcaagctaccttgtctgtacagggtggggaggttcagcctgtccnngtcacctctgaggtgcctnntcggcatcctcnnccnnccanngcnntantaanancattcccttccccatagccatcnanaacntggaccaactggcctcttcctntnccctgggaccaaantttaggggcctcagtccctcaccgccatgncctggcctattctgtctctccttnntccccntggcctgttctgtctctgagctctntnnctccgttcattccatggctgggagtcactgatgctncctctgccttctgangctggactggccttgcttctacaagtangcttctcccacagctgtggctgcaggaacttaatttatagggaggagcctgtggcagctgntgccccagccacanctgcactgactgtgctcaccacacatctggggcagccttncctggcaggggccctcgtggcttctcattttccattcccttcactgtggctaaggggtggggtgaggggatggagagtaacgctgcagaccatggtc

SEQ ID NO: 720953 - DNA, 689 bp, Homo sapiens
gcacagtccacagctgaagagcaaggtttcgtggcatgcacggcccgtgccctcaccctctgtccccacgaggggacccatgggggctgtctttgcaggggcacagatgaccaaagtcccttcctgcttccctgttgtacctggtctttgctccctggggagcacagcgaggggccctgatggagacgtccacctcaggtgcacagcatcaccaggtgcatctgcaggccaccgggctggctgctttgcagcccagggagaaggtcagcgagacaggagtgtatgagtgtggagtgtgtgtgcatggaagtgtggggcaactgggcgtcgtgactccctccccagccaagagaggaaggacccttcacaacccccaatggcgagacaagtcacttgggccgacttgccagtggtttgtcgccaaaaccaagatttcgaaggaacatgagtgggccagcgccaaggggcccagggccatggtggcctgtggccgcaggccttcaatggtcacctgtggtgcggcgggggtgcgcggtggccgcgttgggcaagcagggattcgccagccttgaagattggcttccacttttcctttctccttgtaaccaggactttgtgcacacactttggtgcggtttccatccaggctcctggtccctcaaagtgcgcctttgtggctaagggtgccc

SEQ ID NO: 720954 - DNA, 888 bp, Homo sapiens
gacgtctctctcctcgggtctgcgcgggccctgggcccccaccagacgggactccccgccccaattggcggcgaagagtctcctcgccccagagtcatcttcgggacgcccaggcccgtggtgatttcgggctcgccgcggcccgggtgattgtggggtctccgtgtgccgcggtggtcgtaggtctccgagaccgcggactcccgtagggtccccgtggacccgagttgtagtcgggacaccaccggacggggtgatcgtcggagtctccacgcgccgggtcgcatgacgcggatccggcctcggcgccttctcagggcgcctgcaaggcgcgcaggcaggatgaacattctggcaaccgtgcggagggatcgcgtcctggcggagcctgccccagctgcctgaggacaaggaggccgcttagcacgggcacaaagacttccaacacccgcgtcacctgacgccctgccaggacgcaccgagacaggctaccgatggtcatgtaagatctccaatggtcaatcgctggtggggagacctgtcggtgccgaagactcgcctcataacatagcgttctgcccagacaccttgcatcacgaatcttacttagcgcccaaccatttgggccgtggcactctccgaagacttcggcccgcattctgcgggtgcctgcgccttccccgcttcacgcttggcccctctgggattcccgctgcgccaacgcgaccgctcaaactgcattgccttccacactactactaacttgcgtctcaagccatttatcattgatctacacactggactgctgcggctactcgcaccatacacacacccgcagcaacgacctacagacattaccctccactgcactctcctccgtccccagct

SEQ ID NO: 720955 - DNA, 128 bp, Homo sapiens
tcgagctcggcaccccccgatagcctcggagtcatgacgctcgccgtgtaccccggaaccttcgatcccatcaccctgggtcacgtcgacatcgtgcgccgcgccctaaccgtgttcgatcggatcgt

SEQ ID NO: 720956 - DNA, 1842 bp, Homo sapiens
  misc_feature (161)..(161): n is a, c, g, or t
aacccattaagtgaacactaacctctcgctccgaatagtcaagacgtaatacagcggcatctcagacactgttgcagaacactgagctggaagcagatgacccttatcctggggcgagccactacgaaggagcacaatacatcaggctcgaggtatacccnatgatgcagctgagcttaacccccgctaattaccctgcgtagattgattccgtcttccagctctctacgtaagattatatgacacatgcgatcactcgtgagaatacattgacccgacgcggaaatagacgaagccagaacgtcatgcgcataatatgccaacaggctgatgacttcatggccagcgagcgctcgatccttcactcgatcatgtctagtctaatgatggagtggtacgggtatattactaccgtgctagattggcggcacggatatattgctaccttgcatgcaagcgtgcgtacgctgtgagacacttgggctaatgctccctagacgactccatgcataagtcataattacgttcaaccaaaaactgtgtggacaaactcaatcgccacccgaacgaggacagaactctcttgctgaagagactcactcacctctgaatggggaaattgtcttgacatcgtgagttcgcattgtggccccatatagctaagccgcatacatggagaactaaacatctccgtgggcagccaatctcgattgttacatagagcgaatccttcgtaagagatagacacagcacagctcattaacacagatcttaaatagggaacactcaactccacttgcaagagttgccttgatggaccagaaccattggaaccaatcttgggatctcctaaaggcgcacatcgaagcgcagtgtctccaaacttgctatcgaaaggtatgggcgctaagtttctatctcggttagatacaccagaattttttccttacggccacctaaattcaaggtttgggagaaatatcactctctaattacaacctccagaatatattcgcggaatggctagaggtccttgaagtggcaaccaacaccggtcatttgagggtccaccgcacggctgttaattgtgggaaagcacgtgttgatgccttaaagatacttaggagtagaaggagccttggcacattgaactcacaacttacccagcaatattaggagggccccattgacccgatttggcgtaattttctatagaaaagcacacttgatgtatgacacgtaagggcagaatctctacccaagggacatcggggactttaacccctaacctagagatgcacatatcacttagagaaaggaggacaatggaaatgtggacccccattggcccgactgttagcataacaccgggggagaactccctaacgagagcagaatgacggcgacaaacaccagcgccctatcgcgactaacggcataaagaatttgagaggcgagccaccatcacaaaaacgtagacccccagggtggcgtggttaggtacccactaaaaagcaggggagacaacggggcgcaagagggattacacgcaggcacaatatggcacgcccacaacacctatacagcacaccgcgtgggaacactagatctgaggcgacagaacgcacaagtggcaacaatcaacggcgcacagacgacaaaagaactcagagacagcgacaaacaaagtggggaaacagacacacagggagaacaccacgagcaaaagaagggcaaatagaagaaccaaacgacagaatgcgcggcacagcgcgacacgcggtgacgaagtcatagcagctacgaagcgcaccaaggaataagagaagaccacaaaaacag

SEQ ID NO: 720957 - DNA, 397 bp, Homo sapiens
  misc_feature (36)..(36): n is a, c, g, or t
  misc_feature (55)..(55): n is a, c, g, or t
  misc_feature (58)..(60): n is a, c, g, or t
  misc_feature (130)..(130): n is a, c, g, or t
  misc_feature (132)..(132): n is a, c, g, or t
  misc_feature (177)..(177): n is a, c, g, or t
  misc_feature (272)..(272): n is a, c, g, or t
  misc_feature (293)..(294): n is a, c, g, or t
  misc_feature (332)..(332): n is a, c, g, or t
  misc_feature (350)..(350): n is a, c, g, or t
  misc_feature (356)..(356): n is a, c, g, or t
  misc_feature (358)..(358): n is a, c, g, or t
  misc_feature (364)..(364): n is a, c, g, or t
  misc_feature (375)..(375): n is a, c, g, or t
ggatcctggtgacggtaccaacaggaataggcctgnagtgatcagactagcaaangtnnnggcagagggtcaggacgcaggtaccacatccaggacttcactttggcctttaaaaattcagccgtaactngngctcaggacttccccttgagctggctgtccctgggattttctccngctttagagtttggtttcattttttaatggtctggatttcccagtagcagcctggccctaaagctggactgagtttatggctcctaaggagcttncctaagactctggactatttnncttcccccttcagtcaagtgtctttacagttaagaatnaattggtaactgcatacntgcccngncagtcngtcccggggtngggtaccgtcgacggggaaccg

SEQ ID NO: 720958 - DNA, 774 bp, Homo sapiens
atcctagcactttggaaggccaaggtgggatgatgcctgagcaaaacggcgaaaccccatttctactaaaatacaaaaaattagctgggcatagcggcacatgcctgtagtcccagccacttgggagtctgagagaggagaatcgcttgaacctaggaggcagaggttgcagtgagccaagatcgcgccactgcactgcagtctgggcaacagaatgagactccgcctcaagaaaaaaaaaaaaatttcccaaaggtataccgaggaaagcagggaagcagcctcattctagaaatctatcatggccggttgcgggcagtagctcacgcctgtaatcccagaactctaggagtctgaggacgcggggaccaggagggcaggacgtcaagaccagcccgggccaagagggggaaaccccatacgtcactaaaaatcatctccaaattaggccagatggccagggggatcacaccggtaatcccagaacttcactgaggccgaggcgggtgatacaccggaaagcgggcgagtccgagaccaagcctgaacaaaacagtggaagaaaccccagtctcatacaaataagccgggcaatgggggcgcatggctagggacacgaagccacccggggacggctgagcgaggcaaaatggttgacccacacggaggcggaggtagggtgacccaggcacgggactcgcacccacgcctgagcaacagagagaacccgcccaaaacacaaacaaaaaacacatcaggaccgcccaccccaaa

SEQ ID NO: 720959 - DNA, 120 bp, Homo sapiens
cagccttcagcaacttctggaactgtttcttggtgccggcagccttggtgacctttagtcacgttgaagcgcacctgtcttgctcagaggccggcactcgcccactgttacgatttctcc

SEQ ID NO: 720960 - DNA, 621 bp, Homo sapiens
aaaaaaaaaaaaaaaaaaattttggaaaaaaaaaaaaaaaaaaaaaaaaaaagggaaaaaattaaaaaaaaccaagaaaaaaaaaaaaaaaaggggaaaaaaaaatgtggcccgcttggcccaagcggtttttaacctgggcaaggtttagcctggggccccaatttggggttaattggcccaatcgcccttatggggggcggtttccaatttactggcccgcggtttaacaaggccggaatgggaaaaccctgggggttcccaatttaaacgccttgggagcaaacccctttttgccaggttggggtatacccaaagggcccgccccgagtggcctttccaaacggtggcaaaccctaatgggcaagggaaattggaaggcgtaaatttttggtaaaattcggggtaaatttttggtaaacccagttattttttaacccatggggcgaaactggcatcctttatactccaaggaattcccccggtatgggttggggtgttgtccaagtttggaaccaggggccccttttaaagaaccggggcctccaacggccaagggcgattttttggctcccagtccccaaaggcctcaatcgggcccctggggcgcctcccttttgg

SEQ ID NO: 720961 - DNA, 100 bp, Homo sapiens
tttctgggctgttctctgtctgttgtctggccccgtttcttgggtggtccttggttcctatcctggcccgtcctgttagtccggtatgtttggcgtatta

SEQ ID NO: 720962 - DNA, 355 bp, Homo sapiens
  misc_feature (71)..(71): n is a, c, g, or t
  misc_feature (335)..(335): n is a, c, g, or t
  misc_feature (349)..(349): n is a, c, g, or t
ttgaggatcgcggtgttgtgggtggaggacattataaatataaaagatagataagcatctgggggtctgtncagaggatgggaatgagctaagagattgaatctggagcagactaaactggagggcacttactgtgtgtgggacgcagactgctcacttaagccccctgtgcttcagtctcctcatcttggtaaacaaggattatactagtgcccatttcaaaaggttgctgtgaggatgaagtaagctagtatgtgtagtgtggcaggcacatagtaagggatatgtggatatttgttgatcttactgtgtggttgttgttactcctcccccancccctaaccacaancacctg

SEQ ID NO: 720963 - DNA, 229 bp, Homo sapiens
gagctgactcctagaggatcccctggatcttcccgggggtggtgtgtaggtgtgcctgtgtaagaattgggctagggcatttgaaatcctagagcgaaagcctataatcacgtgcgcccgctcatcacggggatggccatggctatcgtttatagcatatcgcgggctggttggtgtctcatcgagtgaggcatggagatccgaggtatggttagttgtgagtcaataa

SEQ ID NO: 720964 - DNA, 781 bp, Homo sapiens
gggagggccttcaaggctctcatcgctgctcagtacagcggtggctcagtgtccgcgtgctctccgtaccacccacttccattttggccaaaccaaccgcaccctgaatttctccgcaaatttcctgcctggcaaggtcccagcatttgacgggtgatgatggcattctgtgtgtttgagagcaacgccattgcctactatgtgagcacattgaggatgctgcggggaagtactccagaggcagcagcccaggtggttgcagtggtgtgagcttagctgattccgatatagttgcccccagccatgtacctgggttgtaccccaccttgggcatcatgcaccacaacaaacaggccacttgagaatgcaactgtgaggaacgtgaggcgaattctggcggctgctgcatgcttacttgaagacgagtgcactttcctggtgggcgaacgcagtgacattgggctgacatcaccagttcgtctgccaccctgtctgaggcctctataagcaggttctagagcccttctatccgcccatgccttatcacaataccaaccgctggttcctcacctgcattacccagcccacattatctgggcatgtctcgcggcgaacgtgaacctgtgtagcaaaggatggcccagatcgactgcgtacacacagtttgccccagacccgaacactagaaggcaacaccacggacaccgaccgggtcacgggaccacgaccccgaagcccccaggatgcaccggaccgacgagcaaacaccgcggtgctcctc

SEQ ID NO: 720965 - DNA, 154 bp, Homo sapiens
  misc_feature (4)..(4): n is a, c, g, or t
  misc_feature (79)..(79): n is a, c, g, or t
attnggacgaggggaatggaatgctgtataagcactgaaaacaacaacaaataacactaaaattttaggaactctgaantgatctgcctctaacagcgttggatgtagcattatggaattaggattttccttatttgcttcattgtactacctg

SEQ ID NO: 720966 - DNA, 177 bp, Homo sapiens
  misc_feature (79)..(79): n is a, c, g, or t
  misc_feature (92)..(92): n is a, c, g, or t
  misc_feature (163)..(163): n is a, c, g, or t
ctcttcgtgagatacgccgctgagtcgagtgaacggcacggtagcgtcacactgattaatgttctttattaagtcaggngtctaagaatgtntagcgagataatttctaaactgcctaccgcaatgtgtttgttgcgaccgggcaggacgtaataagctatgnaaagggccggctcg

SEQ ID NO: 720967 - DNA, 269 bp, Homo sapiens
gtcgacgtctggtggttggtttgtttgttaaatctgtgttggtctgtgggtctcagaatctgcaagttctactttcagctgctcttaaataaactaacagacttactcttcaaataattagatagttacaaaaaaccccagcaaatccccatcacattaatggggggaaaacacttcttatttataaattcatgctatataaaatttcctataatagagtatgcaatgtctggcccatactagtactccaataatagcctttgttattg

SEQ ID NO: 720968 - DNA, 303 bp, Homo sapiens
taagagctatctgtataatgattttttttcccccatataagaaatgaaatcatgggaggccaaggcaggaggcttgcttgaggccaggggttcaagaccagcctgggtaacatagtgagagctcgtctctacaaaaacaaaaaacaaacaaacaaaaatggctaggtgtggtggcacacacctgtagtcctagctacttgggaggctgcggtgggagaggatcacttgagctcaggagtttgaggttactgtaagctgtgattgcatccctgtctccaacctgggtgacagagccagactgtt

SEQ ID NO: 720969 - DNA, 304 bp, Homo sapiens
gctcgacaaatgtggtatatataccccatggaatactatttggccattaaaaaaactaaattctgttattctcagcaacatgtatgatcttagaagacattatgttaagtaagccaggcacagaaagataaatactccatgtactgtacttatgtggaaggtaaaaaagatctcatagaagtagagagtggctcatgcctctaatctcggtgctttgggagtctaaggtgggaggatcacttgaggcctggagtttgagaccagcctgagcaacatctctcaaaattaaaaaaaaaagtcgacg

SEQ ID NO: 720970 - DNA, 604 bp, Homo sapiens
  misc_feature (380)..(380): n is a, c, g, or t
ggcattcttctagctggggcaggggggccgagatgtctcgctccctggccttagatgtgctcgagatactctctctttctggcctggaggctatccagtttacttcaaagatctaggtttactcacgtgatccaggaggggatgcattgtcaaatctcctgaattgtttatgggggggggttccatccatccggcattggaactcggcaaactgaagaaaggttagagaattgtttcatcttttcatcataaacttgtttctcattacggtctagggttttctgtctcttcctctacactgcactcacccccacgggagcaggttcgtagcctttacgttttaatcatgtgtctttcttcctgcctctggtagctggggnggtgtcgcgccctgtcagcatgatgaggatcgacctgtatgattccccgttgtggattcgataatcttgaaatcccctcctcagccgggtttctgcgatacgaccccacgtaatgatctactcgttgttattcagactgcaagcccttacatcagtcctcctcttcaacatcgaatcttatgacaaaaagtgtatgtaaaactggatatgtttttaataacgtc

SEQ ID NO: 720971 - DNA, 642 bp, Homo sapiens
ggaatgatcctgtgagtatcaactcagtgtggatgatcatttgtagatagtctagtgctatgcggtgacagttgcctatgcgctcctagcgtaactatgtcggatgcagcaacgttacctcatgcgcatctgccaatcacatccgtggagaatgcccctatggtaggtagacggctgttcttcaggtactctagccagctcttacatacgaattttgcaatccgacgtaatttcttagtgtgctagccaactctatgttggaccgagcgcaatggacatctgacgcgggatgaacatgtgctgtttgaaattagtgaccatgcctagatggacttctgacatcctactctgcatcggagtggcacagagacaggaccggtcttggcacacaagggacttggctatcacaattagtgtccgatgagaatgatgccaagatcctcaatgatgagcaggatcgctttgaggtcaataatagtgagctgccagatgagaaagacatctcctcctacattgaacagacacggtagaagactcgcccattatggaatgtgaccgtctgtccttcaggagagacacccagggtgggggtgaaggagacactactgcccccacccatgacagcccccaccccatggcttc

SEQ ID NO: 720972 - DNA, 457 bp, Homo sapiens
  misc_feature (160)..(161): n is a, c, g, or t
  misc_feature (262)..(262): n is a, c, g, or t
ccccggggttcccctccccaaccaccccagggcccggagtttttttttaacacgggtttgggttggacccttgctcgggggcccaccggtgggaggaaatgggggttgcccctgttattgtttacatgggccccccccccctgaaggaccaaattttttnncccccccctccaggggagggtttggggtgggccccttatttggttggggaggaccagggccctgggcagggcagggcaccctttcccccgtgtgaaaaaanagggggtttttctctccccgccccctcgcggggttttttaggaatattaaaaaagtttgggcccccttttggggaggggggggcaggggggggggggctcctgccccaaaatttttccctttccccggggggccccccccccccagggccccctggggggcctttgttttaaccccattaaaaacctgattttta

SEQ ID NO: 720973 - DNA, 421 bp, Homo sapiens
aatcatcagactccttgaactcccccactctgctggctctgtaacccagtgcacctccctccccagctccggagggggtcctcctcgctcctccttcccagggaccagcaccttcaagcgctccagggccgtgagggcaagaaggggaccctccaacaaggagcttcctggctcttggggacccaggttggacttagcagtgtagtatttgaagactcttgggtgatctctctagaagccatatggacctcctccctcatatcatctctgcacagcgcaatcccctttctctgagaagcctcttgagagctctcgtgtttgtagactctggacatctctctcgcgtctgaagagcctctagctcgcctcgaccactcctctccccctgttaccacactctctctcgagtgatggtgtctcc

SEQ ID NO: 720974 - DNA, 315 bp, Homo sapiens
gtattgtccacacggctgtgatcccagctgacaaggaaactgagaggggacaatcgcttgagaccgccagagctggttgctgtgagtcccaaaatacgagcgcgctcgttagctccacacatgggcgacgggagcacagtctccgtactcgtatcatacctaaataaataacagtgtggccgcaaagagcacacgccatttccacgcccgcatgactgacccttcctaccgctctctgttgacacgacacggggccatctttgacaaatgcaaacacactctctgcaggaggttgtgaggttcaatttactggat

SEQ ID NO: 720975 - DNA, 392 bp, Homo sapiens
gtatagtcataccatggccagtagatgggaagacacaacacagagtacagatgtcgagtcttccatagatttgctgcaatacctatcaaaatcacagcatgatttctttctagatacagaacatgtgtatgctcaaatttatctgagagagacacaggaactagaataaccagaaacaattttgaaaaagaaaatcaaggggcaatcatcagtgtacctgatttcaaagctcattatcatagctatagtaatcaagacaatatattatcagctgggggacatacacagatcaatgaaatagagtcgaaaatgcaaaaacagatgaacagatatgtccaagtgattttagagagaggtgcaaaaacaattccatggagaaaaaataggcttat

SEQ ID NO: 720976 - DNA, 371 bp, Homo sapiens
  misc_feature (20)..(20): n is a, c, g, or t
  misc_feature (30)..(30): n is a, c, g, or t
tttcctgcaacgactcacgnaacattgtanacatcaaaggatcgccatggaaagggtccctcctgctgctgctggtgtcaaactgtccgtccagacgtgccctgccatcgtccggggggtgccgatgcaggacttcagacgttgacgcccgcgtcgtccataatccatactctcctcaaaagtcaggatcgatacgttaccaggcggggtcattacaagcctcaacagtgcaacttctcctgcacccgaagacagacagccacagataatcgattcgaccgtatcgatatggtctgaatggctcgtatatcgtccggagtcggttgcagaagccggagtatcatcaagtgtgagagaacaaggtttggatg

SEQ ID NO: 720977 - DNA, 453 bp, Homo sapiens
ggcctcccgaagtgctgggattacaggcatgagccaccgcgcgcagtcacacttaaaagtcttcttaaaaagaaaatcagagacaagttttgtttcctagtcttgtaacaaaatggaagttgctacactgagtttccgtttaatttatagttaattgccttttaccatgccagcactaggaaaagtgtagtgagggatgagaccgccatggagtcatcgctgcctggggagagatgtactctggcatttgtcgggatgtcgatggctgcccctgggacaacagggatccctcatgcctctggtgaggaagaccagccaataactggatgttcaacagagctttgcttcttcccaaattgttaatggtgatttttatagagcctaaaagtggcatccttcagtgacattccaagtatcttatgtaacacttgaaggtttacacagaggggaccc

SEQ ID NO: 720978 - DNA, 668 bp, Homo sapiens
  misc_feature (393)..(393): n is a, c, g, or t
aggagtcatggtgagagccgcagccgcggggcgcatatcgcgatctataccgggacacgtgattgcgatacctgggctatgccaatgaggtgggcgaggctttccgctctcttgtgccagcggcggtggtgtggctgagctatggcgtggccagctcctacgtgctaggcggatagccatcgacataggcaagaaggctggagaggagcccagccctgaagcaggccgcatcgccagggtgaccgtggctgaggtggacacctttgtatggcatgctctagcctatgtggacattccgggctataccattaaacgcacgtgtgctgcctctatctatgtcctgggcactgccacccgatggcccctggatgatcgcaagtggaccaccaccgngcttgggctggtgaccatccccataattatccacccgattgacaggtcggtggatttactcctggactccaggctgggcaagctctaaccaacatgggggaaagccagcttattcagaacataatctgggaccctggcctagagaaaggacttctgcttaatgagagactcctatatctgccaggggatggggacaaatgggttcctgggggacaaagaccctggccaatgggcggggtttaacctggccaaaaaacttaaaaaaaagggccaaa

SEQ ID NO: 720979 - DNA, 453 bp, Homo sapiens
cccacgcgtccgcggtggaaaggggccaaaccgggcttcccctggacctccactttataaaggcaccttattccccctccactgagcacctccaccccttgtcattctaattccccttccccacgattctcttaaaatcactgccccttgggaatgaggatttccagcataataagcttgaggagagaaacaccattccaacccttagccaactaccactttttctgaagcttaggataatccccatatacttaaaccttaccaagattgtgggggtgggaggagctccaatcatttgtaaaagtagttgtaaataaataccagccaacccaattctatacagtttttaaagttgtcccagccttgtccatgttagttaccattttagaaagtaaatttgattaaatatatcattcccagttaaacccatttaaagatattttttcatcccca

SEQ ID NO: 720980 - DNA, 424 bp, Homo sapiens
ctggctggctggtccccatggtcttgctaaattgactatgtacagaccagctctgtgctggctctctatctctccccactttattttctattagtttcagtgtttctggttttatgtgaaagtccttgttctacttggacttgagctttgtacatggagataataatggtcaatttgcattcttctcaaacgctgactgttcaaccagcaccatttgttgaaaaccctatcgttttccactggatggttttggctcctttgtcaaaggtcaagtcttcataagtgtgtggattcatttctggatcttcaattctcttccactgatacacttgtctgtctctgtaccaatccgattagacattatcactatttattgttctgtagtatagcttgaggtcagggatggtgattcccccgtcgacgc

SEQ ID NO: 720981 - DNA, 214 bp, Homo sapiens
tgcgaaatgttgtttgatatacgatggaatactatttagattcagaagagaaggaaatcttgtcattcgcaacagcgtgaagaagcctggaagatactatgttaagcaaaataagccaggcacagaaagacaaataccacatgatctcacttacgtcgaatctgaaaaagttgaattcctagaagcagagggtcgactgcttggattacaagga

SEQ ID NO: 720982 - DNA, 143 bp, Homo sapiens
  misc_feature (24)..(24): n is a, c, g, or t
accaaataataataatgctatacntaaattacttgtgaaaaacaacacattttaaagattacgtgctcttggtacaggtttgtggatgacagtttattcgtcatgctgttagtgtgcattctaaataaatatatattcaaaca

SEQ ID NO: 720983 - DNA, 404 bp, Homo sapiens
  misc_feature (2)..(2): n is a, c, g, or t
  misc_feature (197)..(197): n is a, c, g, or t
  misc_feature (204)..(204): n is a, c, g, or t
  misc_feature (216)..(216): n is a, c, g, or t
  misc_feature (218)..(218): n is a, c, g, or t
  misc_feature (220)..(220): n is a, c, g, or t
  misc_feature (222)..(222): n is a, c, g, or t
  misc_feature (224)..(225): n is a, c, g, or t
  misc_feature (228)..(228): n is a, c, g, or t
  misc_feature (233)..(233): n is a, c, g, or t
  misc_feature (257)..(257): n is a, c, g, or t
  misc_feature (276)..(276): n is a, c, g, or t
  misc_feature (279)..(279): n is a, c, g, or t
  misc_feature (288)..(290): n is a, c, g, or t
  misc_feature (293)..(293): n is a, c, g, or t
  misc_feature (295)..(295): n is a, c, g, or t
  misc_feature (316)..(316): n is a, c, g, or t
  misc_feature (342)..(342): n is a, c, g, or t
  misc_feature (391)..(391): n is a, c, g, or t
anttagaaaaaaaaaaagtggggagagaaaaaagtgacagcgctctttagaccaaggacttagaagagaaacctccacccttccggagcacgtaagtcccttccctctctcactgcccaacctccctgggcttccagagcaagaaaaggctacgtcccccgtcgaaggagagtcgacggtgaaggtgcctggaaacngccaganaaaagacctagncngncnanntcnccgtngaggacactgtccagcacacccanacggggtccacccccaccnccnccccccccnnngancncccgaatgaagcgaccccgcnctgattggaagatgaacttctgaggnaagggcccatgctcccggagaaaaccccagacactgagcagcagcagangcaccttgaaagg

SEQ ID NO: 720984 - DNA, 199 bp, Homo sapiens
  misc_feature (17)..(17): n is a, c, g, or t
ctggcaaggcatatgcnatattgcaatctcagacaacaggcaaagtccaagagttggtgtacaggctgctgaagatctatagagtcccatgatgtctctactcaagtggtctccgtcgaaaggtgatcgtctcagacacggttgtcacgggcagcttttgctgcaccgcgagtcttctcccccttctgtcgtcttctcg

SEQ ID NO: 720985 - DNA, 121 bp, Homo sapiens
gtgtcatcccccttcgtgctaccaggagtcatgcatatgccgactccaagacatggagataacgtgatagacagactgtccaccatctgaaacttcattcaacaacattcggataaacctt

SEQ ID NO: 720986 - DNA, 214 bp, Homo sapiens
gccggtacccttaggaggctgcagtgcactggcgctatcatggtaacttagctttgactcctgggctcaatccatcctcccacctcagtctcccaagtagctgggatataggcatgagccaccatgcccagccagtttttgtgctttttgtacagacaggatcttgccacgttgcccaggcttgtttagaactcctgggcttaagggatccacc

SEQ ID NO: 720987 - DNA, 432 bp, Homo sapiens
tcaggtcctactcttccatcatcactacttcctgatgccttcatttctacggctcccgggactcgagaatgcgacttaacagagagttcttttacaaacgagatcaaaacagagacactgactttttggctaaagtgactttttgcattataatgctttgttggattttaaaaattcagggaaaaaatcggcagaccattagttactatggattctattttttttcctttcaaacactgtacggaaacaatctattacttttttccttataaggagaatttatagcactgtaatacagcttataatatttttagactgatgtacatcgttcaccttcagtagtctattaaggcattaatacttctctggacattcgcgtttgagggtggaggggtcctgtaaggtgcttcatcgtctgtgattactgcttgg

SEQ ID NO: 720988 - DNA, 760 bp, Homo sapiens
gtgaagaccccaggccgcccgttgcactcttcccctttcacttgggtgcccctgggccacccgcaccacccccttcagcagccatctggggccagcaccctgcgcccccacccgccttctaccccacactccagccacgatggcgagcacccgcagttagctcagtcatgtgagggagtgtcccagtgcgtcgcactcatgtcttgcttcccatcacacggtgcgcccatcaggtcaccctctgctcgcatcgccaggattctgatgccacctacggtatgatgtgcagccactgtcgcaagacgttcagctcccggaaaaactacaccaagcacatgttcatccactcgggggcagaagccgcaccagtgcgccgtgtgctggcgatccttctctctacgcgactacctgctcaagacacatggtcacgcacaccggcgttgcgcgccttccagtgcgccgtctgcgccaagcgcttcacgcgagaagagctcgctcaacgtgcacatgcgcactcaccggcccgagcgcgcggccctgcgcccgcctgcggccaaggtcttctcgcaccgggcgctgctggagcgccactggccggtgcaccctgtgccctgatggcgctggggcctggctcgcccacggtggatccggggcctcccgcacatgtcggccacgcgcgctgcgggacccgtggttccccgacactagacccgctccctcctgagctgcaggtcctctctctcccttcgccctttctcca

SEQ ID NO: 720989 - DNA, 110 bp, Homo sapiens
tagcttatattaagagttacatatccggtattttgagtccgtccaactttgttatttttcataattgtttaggctattcttagttcttgtcatttccatataaattgtgg

SEQ ID NO: 720990 - DNA, 422 bp, Homo sapiens
ctggggctttcgagttgctggagattacggcgtgcaccatcacgccagctaattatagtatgtatagtagagacggggtatcccatgtgggacaggcgggtcttgaatctcactggacctcgtgaactgcccaccttggactcccaaaaacgctggggttacaggcgtgagcaaccatgtcctggatccgcatattctcaactaccaagcggtatgctctcgtgggatccttcagaaaacatgaagtgtcactgctctgctgtatgcctgccagtctccccatctctcctctccgtccatcatcataccttttccagcctgtcccttgtgcagttcttggctcaccatctgagtatctatgagactgcttaaagtctctctgcctggaactaaaacttgcaagtcgaaagccccaagcggga

SEQ ID NO: 720991 - DNA, 555 bp, Homo sapiens
ttaaacgcggtggaggagacacaccgcgcttaaaggacccaatgtactgtaggatcacgtacataatgcttactagtaagccctggatggaaaaacttacctggcggaaataagtgtatagtcccacatatagccggacattcctgtagggatggatttagtacgaggccaaatatgtgcacttgcccatctagtcagatagctccttcctgtggctccagatccatacaacactgcaatattcgctgtatgaatggaggtagctgcagtgacgatcactgtctatgccagaaaggatacatagggactcactgtggaacaacctgtaagtgagagtggctgactcaatggaggaaggtagtgtggaccccaatcgatgtgcatgcacttgcgaatttactggaccccagtgtgaaagcgataacaggacaggcccatgtttaactgtgatcagcaaacagatgtgccaggacaactcagagggattgtctgaacaaaaaagctctgatgtgccacagtcggccgagcctgaggcacccctatgagatgtgtcct

SEQ ID NO: 720992 - DNA, 180 bp, Homo sapiens
gctacagagttcctggaatgattgctgcagattgtgggttagacttctattttaatatatgggctgggtacggtcgtcacgcctgtaatcccaacattttgggaggccgaggtgggtggatcacttggggtcaggagttcgagaccggcttggccagcatggtgggaccccatctctact

SEQ ID NO: 720993 - DNA, 162 bp, Homo sapiens
acaggtaacgtaacgtctttaagtgagtacgtgtcgcttactttgtacctgtcatcagagttagatggagatggcggtatatagggtagagacaagaggtggtgaggttgatcggggtttatctgattactgaacaggctcctctaggttaggtctacctgg

SEQ ID NO: 720994 - DNA, 862 bp, Homo sapiens
agcgggctcttccaagatggcggcgcgtcgtcgcgagcgaccgggccgacggtggaggccagcgaatgccgacgtaaaaccgccgcccgggacgaacgactgaatggatgcagttgccgccgtttggcgagtggccctgatgcagttttcgctgctgctactggctgttgccatgaggcgaggctaggtgatggacctcacttccccggggtgtaatagtgttaactgaggccagtctatcctactagtggggatggggaatgccttggtcagttgtcctttttctgataacctttggaccctttgtaatattccatttgacattttatatcctctgctttgtgggtgggggtaataagtggttactctccgtgtttggaaaaagcaagagcgtcaggagaagtaccgtagaacagtgttgaacacgtcatttcttcctcaaacatcacctggggttcctaagatgcttagaagacatgaaacggggaagccaggactattaagattgctagaagattgacgggtgccaatataattgatgaacctctccagcaagttatccagttttccttgagggattatgtccagtattggtattatacactaagcgatgatgaatctttgcttcttgaaattaggcagactcttcaaaagcgcactcattcagtttgctactagagtctcgcctgtcgcccaggctggagtaccatggcgcaatctcggtcactgcaaccttccggttcctggaaccctgtattgttttaacaaaaaccttgggtctcactgtgttctcctagaatatggttacttttacattctggatctgaaatttccgggaattgtgggaggatttgaagaaccc

SEQ ID NO: 720995 - DNA, 863 bp, Homo sapiens
  misc_feature (795)..(795): n is a, c, g, or t
  misc_feature (799)..(800): n is a, c, g, or t
  misc_feature (812)..(813): n is a, c, g, or t
  misc_feature (818)..(819): n is a, c, g, or t
  misc_feature (827)..(827): n is a, c, g, or t
  misc_feature (840)..(840): n is a, c, g, or t
  misc_feature (848)..(850): n is a, c, g, or t
  misc_feature (857)..(857): n is a, c, g, or t
agaagatgggacagagaggatgggaggttgtctgagcctttcccggactgacggaacctgtgtcttctctcttttgtggacaggatggtgattgctcacaccaaagccttggacccctcccagcctgtgacctttgtgaccaactccacctacgcagcagacaagggggctctgtatgtggatgtgatccgtgtgaacagctactactcttggtatcgcaactacgggcacctggagttgattcagctgcagctggccgcccagtttgagaattggtgtaagacatcacaatcccattattcagagcgcgtatggagtggaaacgcttgtagggtttcaccagtctttcccaggtaactccgatgaagtgttccaacaaaatgagcgagtgaaccaagaagaggatgacattagatccaggagatacaacagaggagataatctccaggatgcctgtgaagaaagatccctggatcccaggatgattataggacaagttgttcataatccagcaggccagaagacttccagggaaactcattcaaggaggtgaaaatgatggatgactcctccaagatgaaaatggaccagccgcagtggctcacgcctgtaataccagtaacactttgggaggccgaggcaggtggataacttgagctcaggagtttgagactagcctgggcagcatggcaaaaccttgtctctacgaaaattagctgggcatggtggtgcacgcctatagtctgagctacttgggatgctgaggctgggagaattgcttgaacctgggaggcngagnntgcagtgagccnngatcnngccactgnactccagcctggntgacagannnagactcngtctca

SEQ ID NO: 720996 - DNA, 423 bp, Homo sapiens
tggatcccccgggctcaggaattcttctcgagagagagatatagagagagagagagagagagagagatagagagagagagagagagagagagagagagagactctgtgtctgtttttgtgtgtttgtctgtgtatatttctttcttgttttggttatattgctctctcctctctgacttcctcttgctctctttatttcttcttcttgtcttttaccacctgccccccttgcgcctctccccgtcaccctgtgactctctctttcttatgccctcctccacctttcctatctgccttccctctcttccgcttttccctatttatctatttctcttcttccctttccacacttcccttcctctttctctttttcacttccgctgtttcctttttcttttttctttttttctcttccctttcccc

SEQ ID NO: 720997 - DNA, 892 bp, Homo sapiens
  misc_feature (824)..(824): n is a, c, g, or t
  misc_feature (828)..(829): n is a, c, g, or t
  misc_feature (841)..(842): n is a, c, g, or t
  misc_feature (847)..(848): n is a, c, g, or t
  misc_feature (856)..(856): n is a, c, g, or t
  misc_feature (869)..(869): n is a, c, g, or t
  misc_feature (877)..(879): n is a, c, g, or t
  misc_feature (886)..(886): n is a, c, g, or t
aagcctgtactcggtgggatgacggctgacagcacagaagtcactggggcctttcgacttctacacactccctgtgcgctccgcactgtgcccgtcacctgagagcctgtgggatggtgattgctcacaccaaagccttggacccctcccagcctgtgacctttgtgaccaactccacctacgcagcagacaagggggctctgtatgtggatgtgatccgtgtgaacagctactactcttggtatcgcaactacgggcacctggagttgattcagctgcagctggccgcccagtttgagaattggtgtaagacatcacaatcccattattcagagcgcgtatggagtggaaacgcttgtagggtttcaccagtctttcccaggtaactccgatgaagtgttccaacaaaatgagcgagtgaaccaagaagaggatgacattagatccaggagatacaacagaggagataatctccaggatgcctgtgaagaaagatccctggatcccaggatgattataggacaagttgttcataatccagcaggccagaagacttccagggaaactcattcaaggaggtgaaaatgatggatgactcctccaagatgaaaatggaccagccgcagtggctcacgcctgtaataccagtaacactttgggaggccgaggcaggtggataacttgagctcaggagtttgagactagcctgggcagcatggcaaaaccttgtctctacgaaaattagctgggcatggtggtgcacgcctatagtctgagctacttgggatgctgaggctgggagaattgcttgaacctgggaggcngagnntgcagtgagccnngatcnngccactgnactccagcctggntgacagannnagactcngtctca

SEQ ID NO: 720998 - DNA, 331 bp, Homo sapiens
  misc_feature (60)..(61): n is a, c, g, or t
  misc_feature (177)..(177): n is a, c, g, or t
  misc_feature (272)..(273): n is a, c, g, or t
ccactctttcattaatttgttttaagccccgtgttagaaaaaaggggtagtgcatagtgnnttgaccttcatacgcttttaaaataaagcaaatggacttgataatgtacctttatttgatctcaagttgtataaaaccaataaatttgtgattctgcagtagtaatcttatgcacncggtgatttcatgttatatatgcaaagtaggcagctgttttgttagttacagaagtttcaagcttcgcttttgtgcagtaaaaacaaaagtaggnnacagtgtgtgccatgttgatgtacagtttctgaaattgttttacaagactttgataat

SEQ ID NO: 720999 - DNA, 512 bp, Homo sapiens
  misc_feature (8)..(8): n is a, c, g, or t
cttcacangtagcccagggctatagcccaggcttacagtgattctggtgtttggagtcatgagtcacactacatgcccctgtgtaattggtgacatcccaatttgtccttgagtaataaaagcatacatttcactgtctggttaaacttgtggaatttgttgtgctaaaagtgttatgctttcctaatgctttatatctctgggctcttaagtgtccacccaaaactcaggcccctagcatttgttcttttctcttgtcaggccagactggggatagatccccttgctttcttgtcttgcagatttcgtggatattgatgctattggaattgaagccttcatgtctgaattattcatcaatcatatatagaaatttcattaagttttgatcctgatctttattctgtggccttacttcttagccccacttgttttgggggtgattactctgagatagtttgtatacaatcaacctatctgaaaataaagataattttactccaaaaaaaaaa

SEQ ID NO: 721000 - DNA, 210 bp, Homo sapiens
aaagtggctcttatccgcatgactgtacgatgagccggattccagctgaccagcgctcgaggctacgcaaaatgtgcttatcgccgtgattcgacatcacccgggaagagggtgtccttacactgtggcggggctgcatccctaccatggctcgggccgtcgtcgtcaatgctgcccagctcgcctcctactcccaatccaagcagttct

SEQ ID NO: 721001 - DNA, 80 bp, Homo sapiens
ttagagtgcccctccggcctcgcatgaggtcttcctgtcgctcccggtcctggtggtggttctgtggatcgtcttggaag

SEQ ID NO: 721002 - DNA, 359 bp, Homo sapiens
  misc_feature (22)..(22): n is a, c, g, or t
  misc_feature (225)..(225): n is a, c, g, or t
  misc_feature (281)..(281): n is a, c, g, or t
  misc_feature (347)..(347): n is a, c, g, or t
cagacaggcatttttagtctcngtgccagtggaaaggagatctccactcagccgtgggtctctctttctataggatcagcttgagaaaatagccttgccattggaggaatacacaggctgcctggtacaagactgtctgaatttgagatgccagcaatttaggaattaactaagaatgttgcctctttagaatttaggcccatgagatattgcagttgaccctgnctgcagggaggaaatctcttgacccatgggaagtagagcttgggtgcagcctttcnctctggaagaagagaccctagtttactgctggcttcattggttcaatgaaggttaaggccaggcgnaggggatttcat

SEQ ID NO: 721003 - DNA, 125 bp, Homo sapiens
tggctgtgggaggaggtgatggtcatgggtggtgacggttgtgggacgaggtgatggccgtgagaggtgatggttgtgggaggaggtgatggttgtggaaggtagtgatggttgaggaaggaggt

SEQ ID NO: 721004 - DNA, 741 bp, Homo sapiens
aaggtctgaaaaaataccacgtgtatttctctgaaatgaaagtagtcaatgctataaatcttctaatcaagaattctacgatatcatcagcagcaggtgcagcccatatggtctgtctgaagattctactttcctggaccttaccactggtgactatgatagcactcataaatcctaactggtaagtgggtggttaccgaaaatattttccttattctggggacatgcttattagcaagttttaggcgttatgatgtaagcatagtgcagagcaagatgggaaatgattcatttctcccaactgctctctattatgggtgggtggggcatttagagtcccccgctataatccagaaagtctccttactttgcaatttggacttgtccttgcatgtgttctatgctggtcaagtattttactggcagctgcatctcaaggccatctgcaatcaagaagtgtgtctaagattggcaggtgtaaggtgttctggtaaatgaagaggacaaggaaggatttgccttacaaggagatcccttcttggcttaccgtggcagaacaggttcccaatgcatgatcgtcctgcctcgacgagctggatggtatgcaaatgaggacgtgcacggcttgatggatgaattggggggcgcaaacagtttttggcgctttatggctcagtatttaaagtggacacttgctctttaatccggccaaagtgaacggcctcttggttactgctgggt

SEQ ID NO: 721005 - DNA, 440 bp, Homo sapiens
aactagatctcagaatggacagacctgatgttggacattataaacatggctccatcagcatgagttctctaccatgtcgatggccagctacagacgaatgcactgtcgtttagagcttgaggacagacatctctgtgaccgcggatgaggcagtcccatctctgaggacctatacgatgttcacaggacaccatactgtgtgaagcacataagttacagtagtggaccattcatgtaacagtacgcatggcaacattttgactatatgctccaagaacgtgacgatcatatagacagttagttgatgatgcagatgctgactgtatcaatcatacggactgacgatgacaacggcgtgctgccatgtatatcatcacctgtatgcacataggcagattagttcagagcttgatgatatacatgcctcgctttatccgtgc

SEQ ID NO: 721006 - DNA, 491 bp, Homo sapiens
cgcacagccgggctgcagggaggcagcagtgcagccaggtggtcctgtttgggggctgagagggttcagcacagcaatcgatggtttagtcgcaggtggatcagggaggttagagctgtcaccatagaagagggcagagacatgcttttcccagagctgggagaactgggctggactcttagaagcaggtaaggtgggggacgtaggcttaaagtccccaccagatttcttagcacttccattagccttgcaaaattaagatggcgggagacattttgtcagacaaggcggtcacatgatcaacccacagggcctggcaacatagcccttctgagaatacttcactcaaagaaaaccaaccagacacagttcaaggcctgagctaagtcttgtggtgctctactggccctggtagaaaccccccatgtacatagcaaaggatggacgggaaaggaggaatgtgagaatacatttgtgagaggagtcccatc

SEQ ID NO: 721007 - DNA, 449 bp, Homo sapiens
agcatggataggatttttaaccaatgaaaattgaggtgagtaggaaaggtccccttccaagtgaaggaaaagcaaaagcaaaataggaaaatgggtgtatagggagtgttaacctaaggatggaattggagataagactagagaaggtgggttgaaggcaaattgtggatgcttttaaatgccatagaactgtttatattgatttattctctggagagtcattgaagtttttttgatcacaggaataacatgtttagatagtaaatgccaacagaagtttctcatctataatcagtagcactaaactcttggtttgaaaaatatttagtatgggtaatacttggagtatcagttttcattaaaatgtacattggttatatacacttctggtctgatgtgttacctttttaaatatgcttatcctgctgaataaagaccatccaacctga

SEQ ID NO: 721008 - DNA, 1023 bp, Homo sapiens
  misc_feature (205)..(205): n is a, c, g, or t
gcgccaagaaaccgattgaagacgcgcggcagcagaccgcatacctgtcatcgagtaatacgatatctgtcctccatcatggacctgaatcttcgaatcgccggacctgggcatggcggacagcacggcccaaacggatgacaactacaggtcgttgcgctgcttctggaagcgaataggccgaattgcagtttacatttcgacnagtacgtgtggcaagagactgctacaatccagtaaacacctggcgccgacgcacggaaagccattgcgctcgactggcagagctctcgagtctagacttcacatatacgcacatcgaacgtcggtcgtagacaccgagcatcagacacatagggctaggtcatgcgtgggacgacgtgacgcgttgtgaccatgaacgaactcggagggagcatgtatccatcaggatatggtcccatctcatggaatggtgcccgtgcgcagacgcgtcctgaaccattccaaggggtaccctagcgactgtgcattcctggtcaccattatcttcgcaattgacatctggaggcacagggaccggctcctgcttattgtgggcatgcactgactggacgggttcgaatacgatggagtcccagaaacgtctaccattcctgatcgtgtggcctgaggccattggttggaacccggcctccacctgtagttcttctcgtggtggtcccttcatcctattgctggttgtccctgcatacgcaatttgaaacccccaacgtagtactttttcaccctagaatgattcaaagtggaggggaggagagcccccacgtcaagtcgtcgcacgccaggtaaccccgcagtgacatccagtcgtcttctcgagagctggtagccggctagcgttggtgcgaattgcctgagggggtcaaagggtttcttgggcggttccctgggatgtcgacgttgggcaatggatgtgccctgaccctactgtgccctccttcataggggcgtcgtggtgttacttggttcggtggcttgtgg

SEQ ID NO: 721009 - DNA, 292 bp, Homo sapiens
tgcgatgctgatctagagtatcccgaggaggagtagtggtgatggcagtctctaaagctgtcttcaaggaacagaaacaaggagtggggaaacggatgtagtgaactatggcggtcagctcaggttctctatttatgtcgcagtttatattactggtttcagttcaggataggcacaaaccaggctatctaagagtcgcaaagtatcccaaccatgcgctaggatgtagaacggtgttggggctttgacgacgatcagttcagtacacgactcagtcagggcagttgcacat

SEQ ID NO: 721010 - DNA, 127 bp, Homo sapiens
agcgcgtcggcccgttcaactaagcactctactctcagtttatctgctaaatcctgccacgagccacacgattgagccacgcgaagagccccccacgatgccacgcaaactgagccgggtacctgag

SEQ ID NO: 721011 - DNA, 709 bp, Homo sapiens
  misc_feature (10)..(10): n is a, c, g, or t
  misc_feature (46)..(46): n is a, c, g, or t
  misc_feature (59)..(59): n is a, c, g, or t
  misc_feature (61)..(61): n is a, c, g, or t
  misc_feature (65)..(65): n is a, c, g, or t
  misc_feature (93)..(93): n is a, c, g, or t
  misc_feature (110)..(110): n is a, c, g, or t
  misc_feature (115)..(115): n is a, c, g, or t
  misc_feature (121)..(121): n is a, c, g, or t
  misc_feature (123)..(123): n is a, c, g, or t
  misc_feature (125)..(125): n is a, c, g, or t
  misc_feature (143)..(143): n is a, c, g, or t
  misc_feature (158)..(158): n is a, c, g, or t
  misc_feature (170)..(170): n is a, c, g, or t
  misc_feature (208)..(208): n is a, c, g, or t
  misc_feature (226)..(226): n is a, c, g, or t
  misc_feature (251)..(251): n is a, c, g, or t
  misc_feature (267)..(267): n is a, c, g, or t
  misc_feature (286)..(286): n is a, c, g, or t
  misc_feature (299)..(299): n is a, c, g, or t
  misc_feature (355)..(355): n is a, c, g, or t
  misc_feature (360)..(360): n is a, c, g, or t
  misc_feature (382)..(382): n is a, c, g, or t
  misc_feature (385)..(385): n is a, c, g, or t
  misc_feature (388)..(388): n is a, c, g, or t
  misc_feature (402)..(402): n is a, c, g, or t
  misc_feature (445)..(445): n is a, c, g, or t
  misc_feature (453)..(453): n is a, c, g, or t
  misc_feature (488)..(488): n is a, c, g, or t
  misc_feature (520)..(520): n is a, c, g, or t
  misc_feature (605)..(605): n is a, c, g, or t
  misc_feature (619)..(619): n is a, c, g, or t
  misc_feature (621)..(621): n is a, c, g, or t
  misc_feature (643)..(643): n is a, c, g, or t
  misc_feature (649)..(649): n is a, c, g, or t
  misc_feature (699)..(699): n is a, c, g, or t
tatcattcanattttattaccatggttttcccatcttctatctaanagtagcatgcaanancttntaaaatgctttattggaaccaaaaaatnttgcgcttaaagcttanaaaanaaaaanancnaaagctttctttcaaaancaacaattgtcttcnccatccccaccncattggaactgacatgatgaaggatttgaaagtttcanaacttaactcagcgaacncagtagtacatttagtattggttanacaacatttgtttaanaaatgcaatgaacaaagcnacacaggaattanatattgaagcagaaaaggtggttttacagtccctgcattaacccctaattcttacnacccnggccaaaaaagcattttcaccnccngcnctttccttcctgtnttcttttggttggttctttcttctcaggctttctcattctgangctgaaanagttctgttcacttagcaacttgggacagtaacanagggtttgttctgtactttcttttccaccccnccccccaccgcaatcctcagtccccttcctaggaccattttctactcctagcattaagaggactcatcgttatatacttggaganggtccagttctgananagtcccctggaagactcaattntacgtnaccctcatgatttcctgttaattccactacggctaatgttctaggaaganacccttatct

SEQ ID NO: 721012 - DNA, 364 bp, Homo sapiens
gtcatctctcgtatagtatttctctcatcatcatatataatatagattagatgtggtgtcgtcgtgcgcgatcatcgtattatatagaagattatgagacaacaccaccacatcttcatcatcatcacatcatagacacgcgcctcgtcacatcatcatcatcatatgatgagtgtgtgtgacgactctctctgctgtgagacgacacacacagagagacacacacacaccgctctccacacacactgtgtgtgagagagaaggtatactactatatttgtctccacactctctactactctccacacaaaatattgtatattttttattaataaaaaccctctttaataaaccacaaaaaaaa

SEQ ID NO: 721013 - DNA, 209 bp, Homo sapiens
tccctaattggttcttcgatgacgtcgtggctcggtggaaacgaatctgaccagcgtccatgaggatgcaggttcaatccctggcctcactcagtgggttaaggatccggtgtgcagtgactgtgatgtaggcccgtggctacagctccaatttgacacctagcctggtaactttcatatgccgcaagcgtcatcgaagaaccaattag

SEQ ID NO: 721014 - DNA, 282 bp, Homo sapiens
tatccctgagagaccgtgttgcatgtcattaaggagagaaggaagagaagtaagcctgaggcgatctttgattgtgtagtaagggtggaaggtgattttattggaatgggaggtgatcctagggggttgtgtgatcccgtttcgtgcaagaataggaggtgaagtgctgctagggttgcaataatgaagggtaagatgaagtgaaagtgtaacgaatcgtgtgaggttgggcactggtctactgagtagcctcctcagattcattgcaacacggtctctcag

SEQ ID NO: 721015 - DNA, 397 bp, Homo sapiens
  misc_feature (4)..(4): n is a, c, g, or t
ctcncgtcggcgctgaccccccatccacacacccgtgggaacactgggagcctgcactccacagaccctctccttgcctcttccctcacctcagcctccgtccccgccctcttccggcccaaggcgccggcccacccttcccatcgccgccactggccgcggggaggacatggccgcgcacaggccggtggaatgggtccaggccgtggtcagcagattcgacgaacagcttccaataaaaacaggacagcagaacacacataccaaagtcagtactgagaacaacaaggatgtctaaatacataattccaaatacaaattatatatagttataagcggccaaaactacatacttttaaaagaatgaaaacaaaatgagaatatttggaaaagatga

SEQ ID NO: 721016 - DNA, 640 bp, Homo sapiens
catgaaccccatggttaatggactggtcaccagtttgttattttattcctccatgaatctaccttgtccacttgagttgatcttaagttcaaggcctcactcttgtctgtctcttgtatactcggttacatgtgtgttatcttgtgtatgatagagctgtaagtgatggcattttttcaaacagcctgttagcacagccgcatgcctgattattgtatactggcgcggacagggttcccctgtccattctagagtcagtatataagggagtagaaggctgcttgtattcctggtattggtaaccttcagttctccctgtaagacctcctaccaacatggcgacgctatacaccaatacaggagatgggtagactgcctgtcataggagacctcgcttcgcagagtgtagttcccttcccaatattattcactccagatattagccacagtgcacaaaagcaaacctgtctagtacgagccagtgaacaccacagcttctctcccagctaggtgcctttaacatcgggtttgttctccttccatggtgtgtagcatgacattgtcactagagtcccatgtgaagagctggcgagtattacctttcatctgtaccatgctcatagaatacgacccggatagg

SEQ ID NO: 721017 - DNA, 164 bp, Homo sapiens
ctgggggttgtagcgcttttctttttcgttgttctgttgatttttggttgcgcgtctggggggagagatttactgggatgggggaaggacgcttcggtgttcgtggactttgatgggcgggcgatggggagcgcgacaagggcggcgccgggacccgggatccc

SEQ ID NO: 721018 - DNA, 301 bp, Homo sapiens
gtgtactagatgacgtgtgctggctagcgcgtattattcctgattacacagtgatgctgctgtgcaactactaatgatatactagagccaggcacgccgcgcttattacacagcacaaagggtgagctctacggtgagccatggggtgctggtgctgccacagaaagctctggaggccaagagagcagagatgagcttggtcatcactcatctcccagggttctgattctctgaaagaggaatgagccccttggggtcaggaaacagaacgccttttttcctcttagaaacacagcctccc

SEQ ID NO: 721019 - DNA, 349 bp, Homo sapiens
gggactaaatgtgtcaccaccacactcagctcatttttttattttttggagtcagggtcctgctctgtcgcccaggctggagtgcagtggcatgaacacagctcactgcagccttgacctcctgggctcagatgatcctcctgcctcagcctcccaggtagttggaaccacaggcatgtaccatgatacatggctaattttttaatctttttgtagagatgggggtctcactttgttgccaaggctggtcccaaactcgtgacctcatccgagtctttggcctcaggccagccccggcccctcgccctcaggccttctttcttatccaaataaatgtttcttaatgaga

SEQ ID NO: 721020 - DNA, 169 bp, Homo sapiens
attgaggatctggcacaccccgcttacgggaggtcccatattgatgccgaacttagtgcggacacccgatcggcatagcgcactacagcccagaactcctggactcaagcgatcctccagcctcagcctcccgagtagctgggactacaggcacgcgccaccgcgcccg

SEQ ID NO: 721021 - DNA, 104 bp, Homo sapiens
gtcaccctgaagaccctccagcagcagaccttcaagatagacattgaccccgaggagacggctgaaagcacttaaagagaggattgaactctgaaaaggggaaa

SEQ ID NO: 721022 - DNA, 447 bp, Homo sapiens
acggggagccttagaggtctttaactcatgtggtctcggctgcttctctatcgttatgctctattagcgcctcggaaataggtattcacttgctctttgaactgtcagtcaagatctgaagactaggcttttcctggacagcctcagacaaacacaacaatcgttgtaggtcatttgcactctatctcaggccataggttgcagtttgcttctaccatggatgcctaaaggctgcgaatgggatcctcgatggtaactataggatctctcgaatgtcgaactcgttcctttgctgcattcctttttcttcacttacaagaaaggcctgaatggaggacttttctgtaaccaggaacatttgttaaggggtctaaagtgctaactaattaagctcaacctaggtctgacttatttaatggctttcataacacttaactcataaggtta

SEQ ID NO: 721023 - DNA, 147 bp, Homo sapiens
  misc_feature (59)..(59): n is a, c, g, or t
  misc_feature (108)..(108): n is a, c, g, or t
agctcggtaccccttactttcacgtaatacttctttcccctagtcagtccggtaattgnctttgatgtattcttatatccggatatcttgactttctttgttgtgctngaggtaaaattcttattggtcgaatatagtacctgatag

SEQ ID NO: 721024 - DNA, 124 bp, Homo sapiens
tgtaaaactgactggccagtgtaaaactgacggccagtgtcacacgacggccagtgtaaactgccggccagtgtaaacctgacggccagtgtaaaacgacggccagctgtccaacgccggccag

SEQ ID NO: 721025 - DNA, 1569 bp, Homo sapiens
  misc_feature (158)..(158): n is a, c, g, or t
gagagagagagaggccagcgcacgcgcagtccgggagcggagtccgcgcccgacgccgacatgccggacagctgggacatgtatgtgtaccctgtagcccccgcgccggacgccggtgcagctccaaatcccattcgtcatacatgattgaaaagcgnttcgatgcttcattcgttgttacctgaccgcgtgactccttcggtgagacgaagtttatacgagcggcaggcaccgagcaatacgaagcacggtagttacctatcgtactcaccgctggcaacgtagccagcctagcagtgcctaggagcattcagctggatgttgcaaccggagggacgagacactcattgctgcattagtacttgtaaggcccgacgaagtgccaggtgtgatagtagccggactaccaaccgttctgacccgaaggcaacactttgatcgaagcaatttatttgcacgcgagtcggtggctcgaaaacgctcgtgatcgaagcagcgagtgggaaacgggactggaatgttagccagagcagcgaaatcttgttatcacagaggatatcgttaggaaagcaggtctcgacacccatgggtagtgaccgaggggccttacctcgacgggaccggcttattctagagaacccttgtcgggggcctcataacggtttcgtagccaagggtaaacgctgcccttgtgggcaaaacaaccagaagaggctaagaggagtaactcgcgtcgtcgaaacgcaggaaggcatcagaaggcttggccttcaaaaggagggggcccggagcggccttaggctcaacgcctttccccttgaaagggggccaacgcgttcgtgagggattgccccccccgttggcattgttggtggggcttccgtgggttcactagaaccctcgttttgggctgcgcaacattttataacactggcccgctatgacaaaaaggcctctggaacgattacacgaacgcgactcggatacagagctgcgcgtgtaacaaaaaactagagtgtccccggaaaggcgggaacctcttcctatatgtgccaggagcgcgtgcaccggcgggagaagacaacacactgcggcgatcctatgtacgactgcatgcttgtgcggctcttttccggcagccaacagtaagacggtatagtctctgctgtatgagaaacccaccccactgtgctcttattgtcggttgttccaccgaagcgggggggacagcaaatctcagaccgaacggggagctcctccccccagttgaagcaggcggacttgcgcaacacttgatatatacgcgcgaaaaaagagggcacagagtctttaccggtgtagaatgaatgagcagtctgcgtgcctgctactgtacctaggacaacactcccctgctacatggagaaatcctcgtcagctgtctcatggcgacctaccaatcaccaggtgagcagacgcgttgtacccattgaagtaggcagaaggattatgcaagcctgcatgaacactcgtgactgtccgatctgacaagcattcatcacacaatatagagactgacccacgcacaac

SEQ ID NO: 721026 - DNA, 355 bp, Homo sapiens
actaaccatcctggcccgggctgcctgtctgacctccgtgcctagtcgtggctctccatcttgtctcctccccgtgtccccaatgtcttcagtgggggctcctggctggcctgaggctggccggaggggaaggggctagcaggtgtgtaaacagagggttcccctcctctgccatcacctgaagacccccacgccaaacactgaatgtcacctgtgcctgccgcctcggtccacttgcggcccgtgtttgactcaactcagctcctttaacgctaatatttccggcaaaatcccatgcttgggttttgtctttaaccttgtaacgcttgcaatcccaataaagcattaaaagtca

SEQ ID NO: 721027 - DNA, 198 bp, Homo sapiens
gcttaaagagctttcacatcagtactctacagggagaagacgagatcgccccgattagttttgagagtaaatcgggtaccagaggaagagctaagcaacattgccaacgcccttgccagcgccacttgcgagcgctgcaagggcggctttgcgccccatgagaagatcgtgaacagtaatggggagctgtacccatgt

SEQ ID NO: 721028 - DNA, 1428 bp, Homo sapiens
aaccacgacggtgttgtgtaccaccacaagaaaagccgactgaggcttggtggtatacccccgggtttccccgcgggagaatttgtgcctcccgcggcgaagttatattttccttgtcgggaggtccccccaccgcgcgggttttctccctgccgtgtgaacacagtgcccgtttgtggtgtgcccgggggacacagcccgctgttgtgggcgccgcagaaatcgctttttgaagtgtatttgtccccccctttgtgtccctggggcgagggacctggtagagagagttgttagacgacgagaagaaatgttgtttggacaaacatgtgtcacagcaccgcggtgttgtccaacttgttggagaagagttccggaaagattggtggccacaaaaggggtctccccggaaaccccttggagatgtattgttcacgcccttgtgccccccctggcggttgggagatgttcccaatgtgggaagaatgggtcagaaatccgagggcccacgtgttgtgacgcccaaagggactcccggggggagaggaaggaaaattttttcccccgttgctttggaatatgctttaatagtgaagccgcaccccacacagggggttgcacgcctcttttggcctgtgtgagacacttgtcggttatttttgacaccacgcgccttctcaagaggggagaggggccacaccagcggtatacacccaacagttgtttggtgtcgccccacaaagttttgaggaggcgagaaaggattttcctcttcttgtggtggggggccacctcacaaaatggggagattccccccctctactctcttgggtgagaacctcccataggagattcgccccgcacccccacatctcccgcgtattcccccccgatggcctcccccctcactatcacaaagaggtgtagaatgtagttatccacctttctcagaggttgtaattttatagagagatctcggccacacgagtgtattctcgagtttttcactccacaattttccgacacacctggtgataaccctcgtgtaattggtggaacttggaaggtggctaaccctataggaaagaaatttggttgtgagtgcaccccaccacgaggaagagggcacccctggattcttttgaacctggttcacacgtgaaaagaaggcccaatggccaccacgctttgccacactcgagactttccacaccacatcttttgttatattggcccagggcacaccaaccactggagtttctcttccccgcagggaaaagggtaatccccctcacccacttgctgaaagaaaagagaccacaaaagactggcggcccaaacacgaggcacagtgggtgaaaatgggtccctgggtgacctagtcagatctttgtacgtaatttaaaatattgtggccggatttatagccca

SEQ ID NO: 721029 - DNA, 879 bp, Homo sapiens
ctgcctgtacttccttgatatgtattagaccccctgttcaggtgagtacttgccataatgaacccacggctccaatcgtgcccaagagaccctcgctaacggaaatatacatacctttccataatcacctcacccaaaggaggacggtcacagctgacctacttgacactatatgcggcttcatcagaaactatcaaattgtcttcccaaacttctagaccaggatgtattcaaaatctaaagtgctcagcgatggtaattatattacagacttaaatccctccaccctcagctgacattatgcatgcatgtgatatcgtataacatgcacatattgattatcgatataacaacattcagacgactctgccgataacttactccatagctactaaattttctcttaataagctcactgaactgtttcaacatgacatgtcagccgattgcttaactgtatcactgacctgcgccctgtgctaccattaagatattgctgataaactacgtgcggatatctctgcgactaaggcatgccacataagtaatcctattgcacctggattttacgtggtactcactacccttctatctgaccttctgaagaccatatcatcggatcacgagattccccgtgcactcgaactaggttgaacctgtgcattgaacagaagaatctaatcagacgtgcgcgcaaaaaacttcagacttttctgtctgctattacacagaatcctgggttgggatcgttatgggctgcatgacggattatgccgatcctcaaggcctactctgaacacagggtgataattgataaagcattaaagggctgttgcttcccggcgatctctatactttccaggacaaacgccgaacccg

SEQ ID NO: 721030 - DNA, 296 bp, Homo sapiens
  misc_feature (75)..(75): n is a, c, g, or t
  misc_feature (153)..(153): n is a, c, g, or t
  misc_feature (156)..(156): n is a, c, g, or t
acgtgctgggagggggtggtgttatgacgggggccaaggcacgcggggtttgagtgggacaattaggagctttanatcactgagaaaagaagaagaacaagctacagagacacaacccattgtttatggtgggcccgcgggggatgctgacancangacccagtgttgccgtccctccccaggcaccttttggttatggttataccgcaccaccgtatggacagccacagcctggctttgggtacagcatgtgagatggagcgctgatcctgtagtcacctattttggggggggga

SEQ ID NO: 721031 - DNA, 261 bp, Homo sapiens
ctcatagactgcgcgttgttaccgggtattgtaagaacaagtcgtacgcaaagtctcgcttctgccgagttgtccctgatgccaagattcgcattgttgacctgggggcggacacaagggaatcgtggatgagtttctctgctttgtggccacatggtgtcagatgaatatgagcagctgtcctctggagccctggaggctgtccgaatttgtgccaattcgtacatggtaaaaagttgtggcagagatggcttccatatc

SEQ ID NO: 721032 - DNA, 142 bp, Homo sapiens
ggatttggcattccgttccgtttttgccaagcactcccgaaccagtcctttagcgtgaatgatgccgcgcttcagcctctccatggcactcttgctccctgggtacgtgggtttgataaaaacatttggaagaaaatgccta

SEQ ID NO: 721033 - DNA, 191 bp, Homo sapiens
  misc_feature (14)..(14): n is a, c, g, or t
  misc_feature (21)..(21): n is a, c, g, or t
cggttggtcttgcngtctgangggtggcagaggcagaaaaaaaatccatgggccgagcacggtggctcacacctgtaatcccagcactttgggaggccgagacggacagatcacaaggtcaggagattgagactatcctggctaatatggtgaaacccgtctgtactaaaaatacaaaaaattagccaggt

SEQ ID NO: 721034 - DNA, 264 bp, Homo sapiens
aactatgaccatagctcactgtggaggaataacatcataatcctacctgtcatagctatttgaatatttcaaacatttcaattgaaatagtacatcttatgaaaataacacagtcaatgaaatgatactagaagaatatatctaaatgcaagcatgagaaatgtgaaaactcaaaacagcctgacccccagcaccacatagcctaaccccacttcctgtcagttttctacttcgtgatgtgcccactgcctcttctgtcgacgc

SEQ ID NO: 721035 - DNA, 395 bp, Homo sapiens
ggccaaacaattgttttaataatgtcaattcaaagttacagataatttcagaattcttaaatccataattaactcatcactttctttttgccatttctcatcaggctggaagaatttcctgaaatcagacttctgtttgcacctaaacaagcctttttttacacaatatagtcttttacttaaataactttttgtagaatactctactgtcaaatgatattaactgaacagtctgttcaaaccaaagggtactcaaatcataatcattacagagatattttaaaatatctttatcatgtaatatttaatccatagaaacatgtaagttataaagcatatattaaaacatcatccagcatccattcagttggagaaatgggacatcggcaatacca

SEQ ID NO: 721036 - DNA, 546 bp, Homo sapiens
tcagacatctagagagctcccccgattatagtactatgagcccgggtcacgcgtgagatcctactccggactcgagagatagcatcctcagagagtagatgtagcgaagcaaattactaggaaaatagtcctacaatcatcaatttcccaacaaggactttctcagcgagcagatcttgctagtagaggaaccggctccccgagatggtgcgcagccatctgttgtccagctgctcttgaagaggttccgagcctcctgcaggcggttggtcaggttgtcctcccggaatgaccatgtagtcgctgatgctggccaccacgaagatgatggcaagtcacatcgttgaagcactggatccacctgcggcgtacatcgcgctggacacccacgtcaaacatgtggaagttgactttgtccacctggaacttggtctcaaagattccagcagtcaggacacggcagcgaagcaggtcctgaatcgctcggaacatagtcagcctgcttcatcacgtcgatcttgtccaggaagtactgggcacagtcaa

SEQ ID NO: 721037 - DNA, 119 bp, Homo sapiens
tggtcggtaccgactacaagggcgactcctaggatagtcagtagaattagaatggaagagtgagagtggggttccaacttgaagcttgcgggtgatcttctggccaattgatggggaac

SEQ ID NO: 721038 - DNA, 254 bp, Homo sapiens
gcgatccaacgccgctgactgaagtcaaatacgttctcgacctactagcaacatctatactcttgcctccaacagtatgtcaatcaaatccatgtcctgctgggacgggagtctccggcgagcggcagctccaagtccatcatgatgagctgtggaccgtgtgttggggctcccagatagcggccctgttccggctgccgaggcgcggcgcggacagaggcggctcaggtggcggcggcggcgttggatgcagt

SEQ ID NO: 721039 - DNA, 268 bp, Homo sapiens
gcacgaggctactcaggaggctgaggcaggagaaccacttgaacctgggagatggaggttgtggtgagctgcgattgtgccattacactacagttgtactccagcctgggcgacagagacaggctctattttaaaaaaaaagaaaaaagaaaagcagaatgttctacacggatgaacctgcctccttggtagctccctacctctttacccaggaaggaggatgggggctggtgattggcccaaatcaggaaagtgtgccctgaccttt

SEQ ID NO: 721040 - DNA, 283 bp, Homo sapiens
aggctagcaggcagatcatctgaggtcgggagatcgagacccacctgcaccaacatgtagaaaacccgtgtctactacaaaattagccaggcgtggtggcgcatgcctgtaatcccagctactcagaaaggctgaggcaggagaatcacctgaacccgggaggcagaggtcgcagtgagctgagatcgcaccatttcactccagcctgggcaacaagagaaactccatcgcattaaaaaaaagggtagccttcccttaaggaaaaaattagttaacccggtgt

SEQ ID NO: 721041 - DNA, 626 bp, Homo sapiens
gatccgctaaacacagtcgttcggccggcgcggcaccaagtcctctgaccgtgagcagtgtccgtacgcctgtttcactaccgcggatgcctggtcatcccactgaggtgattgggtatccgtcagccgaattagataagataccagcacgggggtcacagcgcgatgctgctactggacaccgagaattccgagagtcggaagttacttggacccgtcgttacctggtgatttcctattcttcaaatggatgtcgcacagcgccgaaggggtcagactaattcgaacagttactgcctcgcgccacttgttcacaaaaggatttccctatggtggggcagactgaagggccccaggaaggccaaagaagaagggccatccattcaacccctgtgaaatgtaaccccaatcagacgccacgggcaatcgggtccaaccaacgtggagagaaccgcaccatttgtgagacaacaattcgttgggacacccaacgacctttttcttacaaaaatgaacgcttggcacgttgtgggggcctccccactgtaggaaagacacccccccggttgtgctttgcttgagaccagggaggggcccccctccctggaaaccccacaaagggccaa

SEQ ID NO: 721042 - DNA, 237 bp, Homo sapiens
  misc_feature (13)..(13): n is a, c, g, or t
  misc_feature (103)..(103): n is a, c, g, or t
  misc_feature (216)..(216): n is a, c, g, or t
ctggaaacgagantcttaattgaggagatgggagactcgaactctagccctggatctgccttcctgctgaaacttgttccacctcagtcccctcatctgtcanacgcatgtggggtggagtagggagatgcggggagcagggtgggcagaatactgttatctatgtacggggagtcgtgaggctgaagatgaaaatgggggttaaaaatgcctgcngtgctcaccagtacaccaaaa

SEQ ID NO: 721043 - DNA, 913 bp, Homo sapiens
caagtggaaagagaaacacttgtggacttgtcctctgacctccatcttcccaccatggcatcctcacccacatacacacaataataggtacatatttttaaatgcagaacttcagattcactccaggtctgcttctggagtcttcctcttggtaagattccggcccttggggacattaagcttccccggtcccacacttggcttagtttgttcttgctcggttgctcatgacttagttcacactgagcatttcagaagaacatatactgagataaaggcatttttcattttcttgtgtcaataaagtacccagtggacatacttcatgcttgtcatgcttgaagggacatagcagcccatgcatgttatgtgagtcattaggtatgcaaaagggggtgggggtgggggaagaaccgggatgattgtaagaaaagcgagtgtgccatttgaactctgaaagcaggcatatttttgctaaatttggaactctttaaactatgataacttatcttgattttcatgtggttcaaaatcgcttaaaaatagttgctaaaagatagtatgctcttgacctccagattcaaattatcctaaactgagatttttttccccagtgatttattgtcaggaattctgtccctttaattatttttatattttaagtataaaattaacccccaaacattaactttcctagccttcttaggctataatacaccttctattttccacacttgaattcgccccggcgttttcctctcacagacttgcgaagcatttttccctctcgttcttcaacaggcagcctttttccccgcgctgtgcccacggccttgggaactccccttcccaggggagacctgtcaggaacacatttatctgcggaaacaacccctttaattcacacggcgcc

SEQ ID NO: 721044 - DNA, 314 bp, Homo sapiens
caggattactccacaaacagtgtatacccgtggaatgtggtaaacttatagtgtacgcagctgcatcatttatgaaggagaggggtcacgcttgattcgggaggatcctattggtgcgggggctttgtctgattatgggcgttgcttcgtagtagttactggttgaacattgtttgttggtgtatatattgtaattgagattgctcgggggcctaggttactgtgattaggagtagggttacgactgcgtgggaagacacgacaagacgaggacacgtaaagtttaattatgcctgtttgtggaggtacgcact

SEQ ID NO: 721045 - DNA, 535 bp, Homo sapiens
aggctggatgagctctacataaaagtatcggtgaattattgagagctagacagtcatcctcagagatgtgagacctcagtcccagcgtaggataatgagggtgttcctatcggaaaaggcttagtccagctcatacttagagatgtatctttcaacaccattggccaggtgctatcaggtcatctgtgtcaggagcaaagccagtcatcatggatttgtcctctatagtcttagttttgtccgggtctccccggtacctggtacagatctcaaggatcatagtgttcttggcatcctgaggcctcttttctgtttccggtgctggttttatggtgaccttgaggtcgaatttattacaggtgagttgatctttggccttagcatgatacattgtcaccaccgagaaggtgccttggccttttccttcagctgtgactgtaaaaccctcattttccttggtctcttctgatcgcaggaggctggcagattcccagtggatacggtgggtgatcttggagctacgttctgctgagaa

SEQ ID NO: 721046 - DNA, 107 bp, Homo sapiens
cgaaagcgaggggagagcctgcactcagagggaggtcttctgggcatttgcagcaggacatttgctacaagaagaggtagtggtgattgtggggcttagggatgagg

SEQ ID NO: 721047 - DNA, 1162 bp, Homo sapiens
gtttgtattttgcctctggtcgtgccttttctctgcgtttttctctgtttcctttctcctgttcttttttgctggttgtgtttttgctttttcgtgtttctgttttttcctctcttcctttttgtttttctccttgttgtcttagtcatattttgcctccggttttggccatttgtgcttggcactgatgcttccgctgttgtgccatgttccgttgttccgttgtttgcatcgtcttctgtgagtgtgtgtcgtcattggtctccggttcctctcttcctattgggttcccctattggggttgctcgtttcttgtgctttgcacctttctgggccttcgtcttcggggctctgcattccgtgcgtttcccgcccccttgtttgagtatccttgtgtggtcgtgtttcttgtgttgtacaccctttctagttcgttctttggtgtaccctggctttctacttctgtcaggcccctccaagccgttctgatcctgtctgcatccgtgggcatcgttgttgatgtgctttttttccgcaagtctgtgaccctggcctctcctgggagatcgttttctgtgtctacctctcgcctatagtcctgatgaggggatcgtgttctgacccctctcgtatcacgtgtcttccgtgacaatcttcccctagataccctgtgggcaagttcttccaatattgacacctggaagcagtccatcccagcgcactgcgcatggggcactgcctgccctccggcgtgcccgctaggggtcacgtgctcgccaatggagtctcgatggcgttcagggatggccaaacgtcaccgtctccctgattgctctacccaccacaagaccccgcccacgggggcgcacaccacccatgagatggccagcaatcggaagtgtagcaaaactgcacagcaagtcagcagcacacaggcgccaccatcctgcagcctcctccttgaccacaggacgtttccatcaggttccatcccgaaaatctctcggttccatcgtccaccctggggcttctcactgacccagtccccgtgccccgcactccaccagaaatcaggctactctcctcggccccactcacatcgggctgaggaagcatcagcagcatcttcaaacatgtacatataacgactgggtatatacaa

SEQ ID NO: 721048 - DNA, 760 bp, Homo sapiens
  misc_feature (104)..(104): n is a, c, g, or t
  misc_feature (154)..(154): n is a, c, g, or t
  misc_feature (259)..(259): n is a, c, g, or t
  misc_feature (324)..(324): n is a, c, g, or t
ggcggacctcggctctactgtctttctgttagaggttactgctttatatgtaagtgctaactcagcacagtctacatcacatagtaagagctcaaaaaattagntattactacaacgattacactactgctgctgctgctattattactgtganataacaaaaggcagaatggttaataagacaattttttttgtgaagtcttaaagcaatatacatttttttcctctgacaagatgcagaccgatggaggaacagaanaaaactgctgaaccaacccataaataatgcaaataattcagagaaaagagtatacttgtacaatntgtacaagggacttagcagggtcttcagtgctggcccaactagctgctgatcttctgaatgtcactgtgaagggggaaggactgaaggagccttgacagagtagcaggcagtggcctagggtggtggccaaaggctactcgagtggtagggggctttctccttggccacactgcacaccagactgacctgatgccctcccacgctgtcttggctgtcaggttactccagcaattctgtaaatcccatggcagtctggagatgagactccttaaaccactggtttactgactgccttgaaaaagacacatttacaatgggatttggagccaacaaagggcttaaattctagaatgccacttatttttagtgtggccttggatgggttttattttatgctttttttttgacagagtctcactccatcactcaggctgg

SEQ ID NO: 721049 - DNA, 725 bp, Homo sapiens
  misc_feature (65)..(65): n is a, c, g, or t
  misc_feature (79)..(80): n is a, c, g, or t
  misc_feature (99)..(99): n is a, c, g, or t
  misc_feature (150)..(150): n is a, c, g, or t
  misc_feature (306)..(306): n is a, c, g, or t
atatatgcatttattgaaatgtctgtaagtctctttccatcacagagtttagcacattgaacgtngctgggtgaaatcnngggtgtcattgacatggtnctctgacttatcctttcctataaatggtagtcagatcggagggtctgattntgtggcaaaaatacttctataggtggtgctgggtacttcttgttgcatcctgtcaggaggcagataatgctggtgcctctctattggtaatgttaagactgctgggtgggtttggagttcttggctttaatcattcattacaaagttcagcatttnacctgatcgtttcagtggtcattgatgatcattgctgagatccacactataattaggggcggcagaacaggtgtttttctaattctgctatccctttggcatttgttagttggaattcttctataaaaaacataggccgggtacagtggctcacgcctgtaatcctagcactttcggaggccaaggcaggcagatcacgaggtcaagagatggagactatcctggccaacatggttaaaccccttctctactaaaagtacaaaaattagccaggcatggtggcacacgcctgtagtcccagctacccaggaagctgaggcaggagaatcgcttgaacccaggagacagaggctgcagtgagccaagatcacgccactgcactccagcctggcaacagagcgagactccttctcaaaata

SEQ ID NO: 721050 - DNA, 438 bp, Homo sapiens
  misc_feature (137)..(137): n is a, c, g, or t
  misc_feature (159)..(159): n is a, c, g, or t
attctaatctaactttatctttctagtggatttattcataccagttacattggtagagttgtctttcattgttacttaataaatgggtagtcttgttaatttaaattaaaattttaaaaatggagaaagaggatganaaagccaataaggagataaagnccagatgactgcgaaatcaattctaactttgtaaatctctaatcttgagatgctacatggcagatgagtgaaacatttcaggtctttaaggcgatatttattcaaaaggctgctttttattttataacagctttattaagatgtattttacataccatacaatgcatacatttaaactgtataatttagtggatttaatatatgcacagatttggccaaggtgctggggttgcaggcgtgagccaccacatctggctggtagtggacctttatggattt

SEQ ID NO: 721051 - DNA, 430 bp, Homo sapiens
  misc_feature (125)..(125): n is a, c, g, or t
  misc_feature (379)..(379): n is a, c, g, or t
cggactcagcccacctgcacccaggtgattaaaagctttattgctcacacaaagcctgtttggtggtctcttcacacggacacacatgaaatttggtgccgtgactcggatcgggggtcctcccnttgggagaatcaatcccctgtcctcctgttctttgctccgtgagaaagatccacctacgacctcaggtcctcagaccgaccagcccaacgaacatctcaccaattttaaatcaggacctacccagtctgccctgctcatacttgatctggatgagactgataccctgcgaagaccgcaacagaatcagctcctgggattgtgttagcagaatgaccgggagtgtggagatccaccacatggcgaggcaacccangaacctgttttcttcttgaagagcaaccggggaactaatttccaaggttta

SEQ ID NO: 721052 - DNA, 131 bp, Homo sapiens
tgtgtcgagtaagaataaacaggcactagtcgacacgatgtcagtaagagtaagagagagagagagtgagagcaacgcccggtggaaaatggggaatgtggttttgcagggtctgaatttttttcgtgttt

SEQ ID NO: 721053 - DNA, 273 bp, Homo sapiens
acacgccacgtagaaggtatatggaggttcctagggctaggagtcgaatcggagctgtagacaccagcctacgccaggccacagcaactcaggatgcgagctgcatctgcgacctacaccacagctcacagcaacacagatccttaacccactgagcgaggccagggatggaacccacaacttcatggttcctagtcggattcgttaaccactgagccatgaaggaaatttcgctccatctttaatggtgaatcccttctccggtggcgtggt

SEQ ID NO: 721054 - DNA, 620 bp, Homo sapiens
gccaggcctctgctgccctttctgtgccccccaggttctatctcctccgttcacaccctgatggcctgtgcttcagcgagtggagcggagcagccattctccagtgccccgtggttgcccctgtgacgtgtgcgtctgcgtgctccgcgggtggagctgcgggttgttgggatgcagcggcctcgtggggtgcctgaggccgtcctccagccccagctgctccctggccagcccccttgtctgcttgtcgtgtcccgtctaaccatgatgccttaacatgtggagtgtaccgtggggcctcactagcctctaacgtccctgtgtctgcttgaggcatgtggcctccccgatcccttccccggatggctgaagcccacgctgactccagtggacacgtggggtgtgctgctgctgctccccagcccaccagtgccgtggccatgccttggccccttcgcctggacatgggctgtgtgagattggctcctggcggcttgggcgagagccaatattgccatagctcaggtcacctcagtgccatccacggaggctgggtattgtcctgcctctgccttgtctgtctcaccgggcatgtgccgcagagccccaaagtcccctag

SEQ ID NO: 721055 - DNA, 349 bp, Homo sapiens
ttttctatctgactgctagggatactagtgtgtcgctcacacctcatatcctccctactgtgcctagaaggaataatactatcgctgttcattgtagctgctctggtggggcgtgaacacccactccctcttagccaatattgtgcctattgccatactagtctttgccgcctgcgaagctgcggtgggcctagccctactagtctcaatctccaacacatatggcctagactacgtacataacctaaacctactccaatgctgaaactaatcgggccaacaattatgttactaccactgacatggctgtccaaaaaacacataattgggatcaacacaaccaccgtcg

SEQ ID NO: 721056 - DNA, 759 bp, Homo sapiens
  misc_feature (227)..(227): n is a, c, g, or t
  misc_feature (245)..(245): n is a, c, g, or t
  misc_feature (247)..(247): n is a, c, g, or t
  misc_feature (371)..(371): n is a, c, g, or t
  misc_feature (475)..(475): n is a, c, g, or t
  misc_feature (502)..(502): n is a, c, g, or t
  misc_feature (527)..(527): n is a, c, g, or t
  misc_feature (550)..(551): n is a, c, g, or t
  misc_feature (573)..(573): n is a, c, g, or t
gaagctgacgaagtccctgtcggaagagtgcaggaggtggtggacacgtacggcagctccatcctgtccatcctgctggaggaggtcagccctgagctggtgtgcagcatgctgcacctctgctctggcacgcggctgcctgcactgaccgttcacgtgactcagccaaaggacggtggcttctgcgatacgtgtgcaagaagctggtgggttatttggatcgcaancctggagaaaaaacagcnanccaagcaggagatcctggctgctcttgagaagaggctgcagcttcctggccagacccttaccagaagcagtgtgatcagttcgtggcagagtacgagcccgtgctgatcgagatcctggtgganggtgatggatccttccttcgctgtgcttgacgaattggagcctgccccctcggcccataagcccttgttgggaactgagaagtgtatatggggcccaagctacntggtgccagaacacagagacagcagcnccagtgcaatgctgtcgagcattgnaaacgccatgtgtggaactaggnnggaggaatattccatcttgggnagaaaccacagcattggtttttttctacttgtgtgtctgggggaatgaacgcacagatctgtttgactttgttataaaaatagggtcccccactcccccatttctgtgtcctttaattgtagcatggctgtctgcaagggagcccctagcccctggagacatagctgttcatgcccctttacttcg

SEQ ID NO: 721057 - DNA, 105 bp, Homo sapiens
tccggcggtaatcacctcatggaaggtgtactttagggccactgggtcgtcatgggctcgctggtgctggtaccagtgaatatggccctggtccgcggggttgat

SEQ ID NO: 721058 - DNA, 1109 bp, Homo sapiens
  misc_feature (311)..(311): n is a, c, g, or t
gggcggactcaagccttggacactgtggagcttgacgaagctggcttcttgaaagttgagactagatgctagtgaaagcatgaggattgctgagaagctctatactcgcagggtacatcagactatccccgtaacaagattcaacggaatacatttgtcctcagatgacgtctaacaacatgacggttgtccgtggtgagacaactcagcatgaccctcgcgatccatgcttcgcgaggggctcgtttgccacagagcattctagacgcggggtggtcccaacgcctagcagccaactgggaacaatgtcntgaccaaaggcatcaatccctccccaattactactctccaagcgaagatacgaatcaactaacattaacacgagggatgagtgaagcatggccgagctgtcatgaggtatctattgtgtcgccactatttcgctggtcctttgcatgcatccaccagggaattgctccatgtgggggccatggcgatgatgcaacgaggtgggaaggaatccgaaccaatcggtctactaaggtacatcgcgttcgctcgtgctcgcattgagtccctccactcgatgtctcggccacgaggagacgtagtctcgcgaattgtggtagtcccagtaattgatccacctggaagtgtacaaagatcctcccctgttctattgaggccaaggtaagccccaagtattcaggtccagcaaacggggcgtgcccgattgagtgagattggggggaagaacacgatgcgcacaggacccatacagttgagcctcaacctgacgagtcacgacactcttcattgggcaccctccacttgggaacaaatgccagttagtgcggagtccggcgtcaccgtgggagattagcccatcgtttcagtggtcggagaggcgacaagttcgggaggatcccactcaaaaaaagccactcggaattcagctcacggtttgcgtatcttcgagccgcctaggaacaaagggcctggttttccctcacacttggcggataccccttgggggccatttagggagagtaggggtacaacgtgggcgatgagtctcccatcggggggcactccacaattggtcctag

SEQ ID NO: 721059 - DNA, 746 bp, Homo sapiens
  misc_feature (214)..(214): n is a, c, g, or t
  misc_feature (232)..(232): n is a, c, g, or t
  misc_feature (234)..(234): n is a, c, g, or t
  misc_feature (358)..(358): n is a, c, g, or t
  misc_feature (462)..(462): n is a, c, g, or t
  misc_feature (489)..(489): n is a, c, g, or t
  misc_feature (514)..(514): n is a, c, g, or t
  misc_feature (537)..(538): n is a, c, g, or t
  misc_feature (560)..(560): n is a, c, g, or t
agtgtctgatatcctgtcttgatcatctgctgtctgatctatcctgctgtctgatctatctgctggaggaggtcagccctgagctggtgtgcagcatgctgcacctctgctctggcacgcggctgcctgcactgaccgttcacgtgactcagccaaaggacggtggcttctgcgatacgtgtgcaagaagctggtgggttatttggatcgcaancctggagaaaaaacagcnanccaagcaggagatcctggctgctcttgagaagaggctgcagcttcctggccagacccttaccagaagcagtgtgatcagttcgtggcagagtacgagcccgtgctgatcgagatcctggtgganggtgatggatccttccttcgctgtgcttgacgaattggagcctgccccctcggcccataagcccttgttgggaactgagaagtgtatatggggcccaagctacntggtgccagaacacagagacagcagcnccagtgcaatgctgtcgagcattgnaaacgccatgtgtggaactaggnnggaggaatattccatcttgggnagaaaccacagcattggtttttttctacttgtgtgtctgggggaatgaacgcacagatctgtttgactttgttataaaaatagggtcccccactcccccatttctgtgtcctttaattgtagcatggctgtctgcaagggagcccctagcccctggagacatagctgttcatgcccctttacttcg

SEQ ID NO: 721060 - DNA, 658 bp, Homo sapiens
  misc_feature (645)..(645): n is a, c, g, or t
tccattgtaccggcacaagcgtgcgtctcggccaagatgcatctaaactggagtgatgtgagcagacccagcttagagttctacgttctttcttaagccctgtgctctggaggaagttctccagcttcagctcaactcagagcttgtgcaagcatcaccctgcgagtgctctgaggcgttacccataaatgaggtctgcacattgcctgttctgcttcgaagtattcaataccgctcagtattttaaatgaagtgattctaagatttggtttgggatcaataggaaagcatatgcagccaaccaagatgcaaatgttttgaaatgatatgaccaaaattttaagtaggaaagtcacccaaacacttctgctttcacttaagtgtctggcccgcaatactgtaggaacaagcatgatcttgttactgtgatattttaaatatccacagtactcactttttccaaatgatcctagtaattgcctagaaatatctttctcttacctgttatttatcaatttttcccagtatttttatacggaaaaaattgtattgaaaacacttagtatgcagttgataagaggaatttggtataattatggtgggtgattattttttatactgtatgtgccaaagccttaaacatgnaaagacgggtacc

SEQ ID NO: 721061 - DNA, 300 bp, Homo sapiens
taatctcatcaactgtactccaccctgggaggcacgtgcatgacactgtctcgaaaaaaaacaaaaaagcaaaaaacgcttggttctgatccacagctttgcttgccaacggcttcagtatacccgtggtcaacagaggtctgaaaatattaaatagaaaatcccgagtaagtaaagcatacaaatatcaaatgtaaatggcaggccagtctgagtagcaggatgatgtctcaaaccatcccgctgttctgcctgtggatgtgaataatccctttgttctggcatatcctgcactctgga

SEQ ID NO: 721062 - DNA, 710 bp, Homo sapiens
cgtggtgtcttcttttcttaatttgggggagggactcttcttctcgtcgccgaccattgggggccccattgctcgagtattctgcgcgtagcgccaaacaccccccccccggggggtcaacgacaagttgttttgcgcgacgccccccacacagttgggggatcaacggcctggtgcccacccacttcgccggcgcgaaatttttgttgattttttagaagaggccacgcgtgctcccccctgtttaccccaccgcgctggggttctcaaaacttctgtgcccttcacgccatttgccccccgcgggggtcctgtcataacacttctgggggtctcactgccggggcccccccctttgccccctgcgcccccagcgcgttttttaaatgggagcccccccttgctttttttaggccaacccggagtctatcgagacgcctcctcccggaaaatattacctttgtgattaggcgccacaaataatttttctccgtgtgcttgaagtaaataaaaacacgtatgtaacctttgtcccggtaaagtttaattattgacgtttattcaataaaataactaatactcttttcaaaaccactttttcttaaaggaccacttattattatgaataaaaagtctcctttttttttcccaagggaaaaaaaatgtgtttttttttttttttttaaaaaaattcccccaaccaaaaaaaa

SEQ ID NO: 721063 - DNA, 209 bp, Homo sapiens
ttttttgggggggcggtccttgggaaaaggggccccggggcccccccccccccctttttttagggggggggccctccattggttccggtctttttttttaggtttgggcccttgccccctttgtgtttcccgccctttatggggggcccccgggggggctttttttttttcttttttgggggtttcccttcccccccccccccccccca

SEQ ID NO: 721064 - DNA, 406 bp, Homo sapiens
  misc_feature (90)..(90): n is a, c, g, or t
  misc_feature (112)..(112): n is a, c, g, or t
  misc_feature (226)..(226): n is a, c, g, or t
  misc_feature (389)..(389): n is a, c, g, or t
attggggccctaggagatgaaatcactttttaaatttttagagatttttttttttaattttggaggttggggtgcaatctttagaatatnccttaaaaggccgggcgccggntgtcacgcctgtaatcccagcactttgggaggccaaggtggcggatcgcctgaggtcaggagttcaagaccaacctgactaacatggtgaaaccccatctctactaaaaatacnaaattagccaggcatgatggcacatgcctgtaatcccagatacttgggaggctgaggcaggagaattgcttgaacccaggaggtggaggttgcagtgagctgagatcgtgccattgtgatatgaatatgccttatatgctgatatgaatatgccttaaaatanagtgaaatccacccctg

SEQ ID NO: 721065 - DNA, 314 bp, Homo sapiens
tgcaattctacacttactggtttaagttggttatcgtcactgtataagtattataatagagctacttagctgtggttattaatacccttctgttaacaagtttgcaggcagattaatggccttgtctaacatagttcaacccaccaaagacctcgacaccatcgtgaccgtgaaaccgattatggatcatgcccacaaggatccaagctacgggctgcatcgaggtgaggggtgaaagggtctgtgctatgatcaaacaggcacggggtggccgatgtggcagaaaagtatgctgtggggagacctttgtgtag

SEQ ID NO: 721066 - DNA, 1258 bp, Homo sapiens
ctgctgtatcgtagctataccttctacagccaatatgaacaaggcctaagttaacagaaagcaagtaagacgcatgacctgccataacgcggctataaaatccaacaaaaaggttcgagaacatcagtcgaagaactcaagaaaggagcgctacaaaagcggggtcacaagaagcctaggaacagacccaggagcttccaaacagagctccctttaaggaggctctctctcaagggaagctgagctaaggaaacagaggcttgaagaactaaaacagacagcagaaacttgacaggcagaaggaactagaacaagcaacaagaaaacttgcacaactaatcctagatacttaagccatcaaatgtggaacctatggcaaccaggagtttgggcttcgcaacacactgagcaacacatagccaagctcgcggcaaacagaacttcaccagaagctgtacatgccaagaacttaacacaggtgattgaagcctccgatgctgtcctagcaggtgtaggatgccagcagatcctctaggtagcacgatgtccatcaggtagaacgaggccattgtccagagtggacagcacaaaagctggtaacttatattaacataaatcagatctggctaccactaggagacacctcgccacgaagcatgcgcataacactacactccgcacagaaacgaaataagccacaccagacggactcgctccagaagccctcaaccacagtacccacacggactacaccgggcaaccaattagccaaacgcagctgttgacagagcacacagcaactacactgctgcctccccacctacacatgaaacgactagtactgctactgcactcagtgtccaccaaaaatcggagcctcaggacacaaacttgcaatgtgaagcgctcctccacaagggtacatattggaccagccacaccgccatgacacagatttcggaacagttcaacatgagctcgttcccacacaactgtgtcgtcgtgctacccacactaacaactacatcttcatcgagactgctcgccaccaccgatccataaatggataatacatgctagacacgccatacacttagagtataataatacacagccacccagtactgataggtatacaatagagcaactaatatcatcaagcaaatataagataatcagaacatccgctgatcacccgataccactctatcgcactatgactccgtaagctcacctatcatgcaaaatagtataaacc

SEQ ID NO: 721067 - DNA, 179 bp, Homo sapiens
aattatagaatacgatgaaacacaatgttagtaggaataattcaggcttgcttgaaaagatgtaatcgataatgtcagcccgctctgttttccctgaaccaggagtctccagatgtcaacacagaagtagctgttcacaattgctcagttacctggggcatggtgggtcagaacataag

SEQ ID NO: 721068 - DNA, 234 bp, Homo sapiens
tggacatttgtcatgaaacagtctagtgtgtgccacccggcttaatacacagggcgtgatctggtttatactggcatgagcagtgagcaaagattccaagggcatccggtttcaccagcaagaaataagatggaaaaagtcttttggtaaagtgggtagcgggaaaatcacttaaaatttatattgcttggataataaggagggtggaatagttaaccagaagggggtgggggg

SEQ ID NO: 721069 - DNA, 132 bp, Homo sapiens
ggagtatataattaactgctagaaaatactaatacaaccatttctactgaactaggaaatacatttctaagaaagattttacatgatgccatcgctattgttttttttgagacagggtcttactctgtcacc

SEQ ID NO: 721070 - DNA, 1026 bp, Homo sapiens
taaaccctgcgtggccattccctgacgcaccgccgtgatgcccagtgcaatcacagggcgacctggatagtccaatctacttccttaatgatcactccaactattgtgatgattatcctgaaatgtttcacttgctgggatgcagacaagtgtgggctccagagcatgatgcagcaggatccgcatgtccctttcgcgggaaggctgtggtgctgatgggcaagaacaccatgatgcgcaaggtgcattccgagggcacctggacaaacaagcccatgctctgtgagaaactgctgcctcagtatccggggggaagtgttgcggcttatggtgattcaccaaggtacgtgacctcacgtgagactcagggacatgttgctgtgccagtaaggtgccatgcatgctgctccggtgctgtctgccattctgccccatgtgagagtcactggtgccagcccatgaacactggtctcgtggcccgcataagacctcctttttccaggcttaaggtatcaccactaaaatctccaggggcaccattgaaatcctgaggtgatgtgcagctgatcaagactggagacaaacgtgggagccagcgaagccacgctgctgaacatgctcaagatctcccccattctcctttgggctggtcgatccagcaggtgttcgacaatggcagatctacaaccctgaagtgcttgatattcacagatgaaactctgcattctcgcttctggagcggtgtccgcatgttgccaggtctgtctgagattggtaaccaactgttgctcataccccattctatcatcacgggtccaagagtccggctggtctggtgcacggttaccctttccagttgctgcgaggcagggcctctaggcagttcactgcattgtggtgagccctttgtttatgccacaagtgcctgtgtcttagccagaatgtagccgaaaacaggaaccaagaatgatagcataaaaaccaagaaaagatcactttacacagcaggtattaacaaaaacaaac

SEQ ID NO: 721071 - DNA, 332 bp, Homo sapiens
tagcacccagatgttaaccggcataaaaaataccccagtgttgctccagaaagttgaaaaaaaaagtgtatatcacgtcttatacggaacacagtgccgtgctagtttcatgccactgaatgcataccattgcgattcttcaagctcatttcgattacaattcacggagtgtatttttacggtgagggcttctagaactaacctagatcgaattcgcttagagctggactgcaagccccgtttatcagcggtcaccgatgaggcggaaacacatgttgttttaaaaggggtgtaacagatcactaggtagaccctgaaaacctgataaagcg

SEQ ID NO: 721072 - DNA, 85 bp, Homo sapiens
cccgggggggtttacccccccctttgggggttgcccggccggggggggggcccctgtcccccctttaatttttccccccttttga

SEQ ID NO: 721073 - DNA, 326 bp, Homo sapiens
gaataatggaacccttccggttcataataggtagtttggatatttttgtccttgatttgatgtgcctttttttggtataatgtttaaatcaggtatggtatgatattgtttaaaatccagtttttgtatcttggggccaagcccgcacccttttttatatcttttggttattttaagccctttccccccaatgatcctatcaattggcagtgcctttgtatagagaatttaagtagaaaagttgcaaatgttttgactgtcccccagccccaatatgtatgctttttccctagctggtagcataaataaaactgaatctcaccata

SEQ ID NO: 721074 - DNA, 150 bp, Homo sapiens
ataacagagacattacataaatggagatttgactgaagactttgttctttgcttcactcttcagagattccctctcaatcaagaaagtagtcttggatatttcctagtgtagcccctccccttcccctttgtatacgccacagcagaaaa

SEQ ID NO: 721075 - DNA, 634 bp, Homo sapiens
ctcggcggcaggcttgctccccgtccggcacgcctgctaacttccccgcgctagtcccgttcggccgcgcgaggccggcccgatcttcgcgcgggccctccgggtcgagtcctccaggagcgccaggtaagcgtgccggcgtgtgaccctccgccgggtcgcctgcgcggccctgaggcatctgcccgaactgcggcgctcaacgacgccacgtgggacccgcggcgcgcgcaggtcgcgtcggggcgggtcagtgcgtgggcccgtcgtggccgtcggtgggccggccccgtggcgtaggatggtcacggcacggagccccggagcacagagccctgtggccgtacgcaagctctagtccactgtcacggcgctgtctctcgagggagaagctgggcagacgcatgaccgttcctgcgcacggtgcgtgtctgcggaaggtagacgtgagtgcagagaagctcagtgtcgtggccggcgctgttgtagctgccaacattagcagcccacgtggaggcgcgtatgggggagtatgcgcacatgactgggggtgtgtcacgaagcctctcgccggatttcgccggggatctcccgcggtgacccacttgagcagggccttttgagccattaaacc

SEQ ID NO: 721076 - DNA, 271 bp, Homo sapiens
gtgaaacatgaaatagtcttttgttataattagggcatgtaggcctcaagaaacagaatctctctggccttctccgtgcctatcctttcacctgccccaaagcaggactctaatcttcccctgcctttttattcttatttttgtttttgagacagggtcttgctctgtcgcccaggctggagtgcaacggcatgatcatggctcactgaagcctcaacctcttgggttcaagaaaccctcccacctcagcctttcaagaagcaggaactgg

SEQ ID NO: 721077 - DNA, 385 bp, Homo sapiens
acgctggataggggatgtaagcagactatgtggcaaatttagataccgttccactaaacagatgtctctgcgacccttccctcctccgatcagccaggaaagtcctctgtacctaacctttcaatggccaaatacttgcaccagccccagatctcccagccactgtccatcattcacaacatctcttatcctcaatcactgggcagacatgtcagggaaagaatctactaagattgtgctacgcatgttcaggaggatgttttctctggagacacacccccagtagagagtcagacaccctttggaggaagaacacagatgaaaatccactgaaacgtggggcagggagatcctattgcatctcatgcctggaaagggaccacag

SEQ ID NO: 721078 - DNA, 2076 bp, Homo sapiens
gacagccaatggaggacacatcgggctccgagtaagagacgtgcgccggggcggagtgtgagagccagtgaggggtcgctgggctgactgctgtcgcctcgcgggacgcgaccacaaataacttaacagatggcgcgataaggatgatccgtgagatgagcgcccggagaggcgagagatggtcgatgcatcatgcattgattatgtcgcgaacatagtccgggtacgggagcattaggaatacgaagccaccccagatagcttccagtcatactgtcataccatgacgtttccataagaaagttgctctagaagcaggtagtggaagacacatgtcttgcttaaagagatagggcaagagtttagcaccgatatgggctagaagtcggactacagggcctcgcgtctatgaaaatgaggataggtgacaaaacgctagtaattcccgtacccatagcggggaggtagctacataaacgtagatgttcaacgggaatctcccagatgcaacccaaagaagagcctccctttcggaccttcttcctccttactgactctgaggttattcggccgcagacatagattccaaagggagaagcagtccgctggggcctggtgcccaatagggtgcagggtgccgggaagaaaaactggggacgaaggacccgccggaacacgaaacacggggatgtgaggatgcaccgagggacaggagctccgtggacaaacgaacggggtggggggaaactcggcaacggcaacacgcactacgcaacaaaggggactttgggccccgcgggtgaatccgaggccctagaaagggcgataggccctgaaattggacggcgaaaacacagcgggaggattgcgcaacggggcgcgaacacaggggtcagcaaaacaagcaggcagcacggcggggcagctggtgcggaggaagaaaaaaagagcgacaccaccagagcaggagcaagtaacaaacaagacacaccgcccgacaacgcgcgctgccaaatcaacaacgcgcgccgagacgagcgaacaaactgcgagagaaagagaacacacccacttgaaacacccgcacacacccaaaccatgagcgccccaagaacaagagtagggagacacagaggttaacaacaaaaagtgacaggtacgcgggtcagacacaccgactcgtcagagagaggagatggtacagtgaaatccagaataagtagttgtggtatatacattttgctgttggtcatcttctctttcgtctcgctagcaccatcaccaagagcctaccgcgcagagaaacacgcaaagatgacacagacgcagaccagacacgcacagaccactacgtaccgatccagcgagcgcataccaccgacagagagtacagacacgtcacgcaatcacgaagaacaccagagaagagcgaccacacatgagcgcctacacgcaagcgaagaaagaatagagaggagcggacgagcgaggtgagcaggagcgaagtgtagaggcgagcgcgcaccgagtgagggcgagcgcagcggaagaagcaagaagaagaacagagagaggggcagcgagagcaggggagtagagcaggaggagacagagcaggagagcagcagagagcgaggagaaacgacaagcagacaccagcaacggaagcagcgacaaagaaagcggcagagccaccagacgatgagatgctagagtaggttagaatgagcgtggaggagaggcaagcgtgggagaagtggacgtgagggagtgcagaagccgcaaggatggacggagaggatggaggggagagagggaagagagaaatgagaaaaggcagggagcaggagcgaagatcgtgcagaagcggcacactcggacactgcgaggacatgcgagaggaagatacgagaccgacacagaccacagaagacaactccacagcgaagccaacgcacacagccgcgctacgcaagcgacgaacgacagcagcgcaacggcagccacaacacacaccccagcacgcatgccagagcacaacacagcacagaacagcaggacgacacagcagtcaaa

SEQ ID NO: 721079 - DNA, 959 bp, Homo sapiens
  misc_feature (1)..(1): n is a, c, g, or t
  misc_feature (3)..(4): n is a, c, g, or t
ncnnctgtacgattgtgatggcgtacgatgagcggacaagatgaaaacagacactggcgcgcggttgacctctgtaattaagatccagtgctgcctatacttgagcgtttatttagagagtttaccaccggagacgagacttgtttgcaagcatcccctcccggcaatggttgccctacgcctcccatgcgggcccacgcgatgcccacagaaccgcggtatgttgaattcccgtgcagccgaggttacacctacgttcgccttggctggcatgtacggaacgggaggtcatatcctttttaaaaagccgcgtctcttctcttcttttatgacgacggggtctatactaccagccctatttcccgcgtggactacaactgacaataaagtggtcggccaaacggcccctccccacggggccaggggatgtgtggcacaccgcgccgtcgccccgcataccagcgggggtacaccgcgaggccccccacaaatcccggggaaactcatggattctttagatataacacgggggtcatatcaccaaaagtttcagcacgcaccgtgcttcctagcgctcgccccgcccaaggagtgttggtccccccccgcggctttttacaaagcccagggagcaatcaaacaggacgtattttataagccccccccctaatgtgggctaataatgtcggaacatataataggggtacaaagaaagatttttttataccacgccgcccggtccccaaggggcgtctcctcccctgttattctcctagcaacaaattgggaagtttcttggcggggagcaatctaaaagttcaagagtatcgagacacattcgcttgggctaaaacattggagaatatccccactcccggtgggggaaatactccaatattatctcgctcgtaggtagcacccagtagggggataacccgccatcccccccccacatgaca

SEQ ID NO: 721080 - DNA, 483 bp, Homo sapiens
gctgttctcacgagagtagatataacgcgatacatgtataatatcatactcagcaaatatctcaataacgcaagatgtaatatggatatacatcagcaacatgtagtgccacttcactatagccggggtgacagaggaagaccctgtcttatacatacacacataaatccaacaaggaagacaagaaatgtaacctctttctcttctccagagccaagaatgcctaaatgatgacagtcaggatttagaacactgggcttcaaatgcttgctctcatcttttctccgagtggtgtctgtccaccctgttgctccaactaattttctaatggaagcagcatttatcaatctgggcccttggctaacaacatgataaataatttagtgcattcctccttttgaatcacttttttccccaaatgtcaaaagggggtatatggggaacaaaaaagatgggctcaagttgctggaggccacggaggct

SEQ ID NO: 721081 - DNA, 359 bp, Homo sapiens
ccttggaccctctcaatgcagcttcttgctggtgagcacgcttttgatgctgcatggctgcatgcttctttccttcttctgtccccagcaccacttgtttgaagttatgcacatcattgcaggaaaggggcgtgcccacagctgctaagtccttggcgtgcaaggtgaggactctgcttcatccagcatgcccgattctggtcctcaggcagctgcccattgagctcttgccaatgccgtggctcttgctattatttgatgattgtcataaagggaccacctattggtcatgccggccactcatttcctttttgcaagaaacccagagtgtggcttcttattttgcattacgtttagtc

SEQ ID NO: 721082 - DNA, 111 bp, Homo sapiens
gtgcaaccaaggcaacacaacttccagtttcctattgttgttacaaccatttggcggctttaaaatgcaaattgtcctcccggatttacccacacaccatacggcctgcaa

SEQ ID NO: 721083 - DNA, 93 bp, Homo sapiens
ggggggggggggggaaacataatgacaggcccccctcccccttttcctgcacctgtttttgtaccaaaatattatattactgttttcttttta

SEQ ID NO: 721084 - DNA, 1194 bp, Homo sapiens
acttgctgaagctgagtgctccagcctgagggctccaggcctctgacctgtgcccagcagtgagctgcggatgccctgacgcttcagtggcctggtgagcatgtggatgctgtgatgtctgccatgtgctgactgcctgtgctgggtcttggagctgctggtgttcatgtgactgatgcttgcactctggttgtttgtggtgcttgagctgacgctgtgcactgtctggcccagtttcttgatctggtacctgcacatggctgcatagcaacccatacttgcactggaaggaaggttctgttgcaatgctggccatactggaagaacaacattggattaaccctattgtgaattctacaagttggtgagcacctgtgcccctgggtgaaccttctgcgcccatagaagagactcatatggaaaaaccaaattgtgtatacaccgacaaggaaaaaaggtggccatggtatgtggtatacagataaatatggccccatcgacgtacagttgagcccgatgtacaatgcaatgcctgaacggatggtggcccccttggtgtgacacgacgttggcagattggcggagagagcaaaatgaacaacacatgggattactttttaacttaacggtggtttacacctttcgggggaaccagggaagccgatggtgtggaccaatgcgatggaaacggacgaatggctacggcatcgtggcacagcacacatctggtttaggaacgacgtttaacagcgtggtggctcttttggtggaaaaagcgcccaaacggtccgccgtaccagcacaatgaaataacggctaacacacactgggttcaccacacgaagaagggcctgttcgaataagcataccataccccttaccgaggtggtacaaatgccaccacgccggactgtagtgaggggagaaacgaaccaacggaacggtggaaccgcggcacacacgacagcgatggcacttataccttggacaccgcaacacgatacggcgtggctaaagtctgaacaccgggacacagacacacccacaagtgcggagctgcgtgtcgaacgcgtctacacgaaacaccacgtgtgaccaagtgaaaaccacacgagaaggcgacacaatgcgcccccaggaacaggcttcccggtgcgaagcagcgaaatttgaaacggtcttgcggtgaacagc

SEQ ID NO: 721085 - DNA, 279 bp, Homo sapiens
tggacgacggggtctcaccatgtggccagggcgggtctcgaactccggacctcagggggtccgccggcctgggcctcccaaatggctgggaattacagggtgtgagccacggtgtccagcctagttgggaattcttcataataaaaagctttttaaaaaggtaatattgggacttcggctccggggaagagggaataggacttttcctaattctttcttctaactacaactaaaagcccggggctatacataaggaaaacacggggagcctctgaaaag

SEQ ID NO: 721086 - DNA, 156 bp, Homo sapiens
  misc_feature (93)..(93): n is a, c, g, or t
ggtaacaacaattataagattatatcttctgtaggggaagttgtaactataaagagaagtgataccaggtgccatggctcacacctgtaatcncagcattttcggaggccgaggcagtaggacagtttgagcccaggagtttaaggccagcctggc

SEQ ID NO: 721087 - DNA, 352 bp, Homo sapiens
tttgaggcttagattcgtggtccactgtcgcttatcgagctgagagacggggcggggcacagagtgctgggcagagatcttggaggactgatttaccattctgagtacctctgcttccaacccttcgaataatcacccgtgcatatcgatgtgcaatcctaataaccaaaggaggccagacagcaatgtcatgaggaatatcctgttagaaatgatgaaacattctccaaaccattctcagagtacatgcttcgtaccctggaggcttatgctgtgaaataggtaataggaagccttggcaggtgcttcccctacagaatcaggatgcaaaagtaagacctactgcgaacaa

SEQ ID NO: 721088 - DNA, 100 bp, Homo sapiens
ccgtccacgcgagtccagactcacatctgaaatcataatggacgaagtggtgcgcaacaacttcgtccatggtgatttgtatggatattcggcgtgtgca

SEQ ID NO: 721089 - DNA, 169 bp, Homo sapiens
gggggcccccccccccccccccccgtttgccaagcatgggtattatttgggcccccacccatgttttaaggccggggggggggggcctgggttgatgccctccagggccctggggggggcctggaggggggcccttgtttgtttgaacccataaagcaaccggtcccga

SEQ ID NO: 721090 - DNA, 136 bp, Homo sapiens
ggtatgaataaaccacatgatccttctatgttgtccaagagcagaatcctgttttctacagtgcttcaaatcatctgagagtgtctaagcctcagtttcctcatctgttaaatggaaccattaatactatctcata

SEQ ID NO: 721091 - DNA, 110 bp, Homo sapiens
tcagcccggtccacgatctttacctttcacttcatcttgcccttcattattgcagccctagcagcactccacctcctattcttgcacgatgaggtgatcttctgcacgat

SEQ ID NO: 721092 - DNA, 138 bp, Homo sapiens
gcatgataccatcgattcggtacccgcattggcagcccactcgatcttctggatccagctatgccggaggcactgtcaccctaggagattacaattatcgtttatgaaagctaataaattgactttggtgaaatttaa

SEQ ID NO: 721093 - DNA, 472 bp, Homo sapiens
cgatacaatatacgtatatgtcgtccatcatccgaaaagtgctatatgatgaaggttattcactaatcacatatctttaatagaactgtacattgttagcgtgcagagccagctagtgaattagaattacacttgctttcttgtttagtctttcctagaattaacaactgccttgtttttctatttgcttcattttctaagtatctttattatgttataaacacattactcggacctgtaagataccgatcaatattctttcccaaagggcaaacaataccagataactttacaattcctttcccaccgcgttcgtgatcacgagatgtactagggcaaaggggagcagaagaccagggacaaatacgcaatgtggtacctattcaatttccagcctggattcatacaccggggcccacacaccagtgccaacgtgtccacagggcctataattccagggtcccttttatca

SEQ ID NO: 721094 - DNA, 360 bp, Homo sapiens
ttgactatggctattggtggtactagtatgactgtcaagtcgatcaggtggctgaggagcagtacatgggggtatacagagtgcaggcctcagaactgcagaacatctgcacaatctccagcaagctaacctctctggacatcgtattcctcatctataaaagggagacttcaatcttatttaatggcaaaagtcacaattacttttgtaccaacgtaatagaattaagtaaaataaggctagacatgctggctcatacctttaatcccagcactttgcgaggccaaggtgggcagattacttgagcccaggtgttggagaccagcctgagcaccatggcaaaaccccatcgctaccaaa

SEQ ID NO: 721095 - DNA, 1024 bp, Homo sapiens
gaggccagaagcggtggctcactcctgtagtcgcagcactttgagaggcatagatgggcagatcgcttgagtccaggagtttgagaccatcctgggcagtgtgtgtgtgtgtgtgtgtgtgtgtgtgtgtgtgtgtgtgtatacagtgtctatatatatatatgtacacacgtgtgtatatatgtacacacatatatatatatgtgtgtgtatatatatatatatgtatatatacacatgtgtatatatatatatatttgagagacagagtgtggctctgtataaaaaaaaagcaaaataacaaaaaagaagaacaacacgacaaacataatcacgtggatagaaacgatgcacgcaagtagagaggtacaccaatactagaaagaagtaatcggcgaagacccacgaagccaccaacgcagaaacaccatatagtataacaacaacagcgagataaatcacgtagcagaccaaatactactacaaggataatagtgaccctgcgccgacagaaagagaaagtgaagacaaagaggcaccgacgccctccattaagatcccgaagaggggaaatagcaaagaacccgaggaggtatagaagaggccgccgatagtgggaccacaacaaggggaacgaatacaggggaggcacgagagagcaaccaaacagagaagacagcaacggaagtaagagagcagctcagcggcaggcagcgcacttgcatgagaggaaaacaggaaacgagcgaggggactaggagcggcagctgcagacggcagccgaagagcaaacaactgcgtgacaacgacagacacaaaacgacgacacgggaacacgcacacgacagagtgggggcaacaggtcacacagggagggcgaacgcagccgacgaggccatgccgcagccggccgagcgacgaaaccacacaacaggcaactctccatcagcgccggcagccgagaagcagaagcgagcggcgacaacagaagcggggaccaacggacaaagagaggaggcaggcg

SEQ ID NO: 721096 - DNA, 291 bp, Homo sapiens
  misc_feature (250)..(250): n is a, c, g, or t
  misc_feature (287)..(288): n is a, c, g, or t
gcacatcctgcaattgccgagagccaggtatgcgtgtgtgtatctggggagcacgccccaaacatgagcagggacggtgttcccagctatccgagaggtcatgccaagccaaaaggaaggctctagcctctataaacatgaataacgtttattcctattacatttccacatgtgtctatatgcttgcttcctgttttctcgcaaggaagtatggtgcccaccatactcctccagcctagacgatccatgntgagggttcctttgttcccccagcccaattcttcatnngtc

SEQ ID NO: 721097 - DNA, 1137 bp, Homo sapiens
  misc_feature (874)..(874): n is a, c, g, or t
tcattaaggaagaatttccaaatgaaaatcaagtagtgttgccagagttgattgtgatcagcactctgacatagcccagagatacaggataagcaaatacccaaccctcaaattgtttcgtaatgggatgatgatgaagagagaatacaggggtcagcgatcagtgaaagcattggcagattacatcaggcaacaaaaaagtgaccccattcaagaaattcgggacttagcagaaatcaccactcttgatcgcagcaaaagaaatatcattggatattttgagcaaaaggactcggacaactatagagtttttgaacgagtagcgaatattttgcatgatgactgtgcctttctttctgcatttggggatgtttcaaaaccggaaagatatagtggcgacaacataatctacaaaccaccagggcattctgctccggatatggtgtacttgggagctatgacaaattttgatgtgacttacaattggattcaagataaatgtgttcctcttgtccgagaaataacatttgaaaatggagaggaattgacagaagaaggactgccttttctcatactctttcacatgaaagaagatacagaaagtttagaaatattccagaatgaagtagctcggcaattaataagtgaaaaaggtacaataaactttttacatgccgattgtgacaaatttagacatcctcttctgcacatacagaaaactccagcagattgtcctgtaatcgctattgacagctttaggcatatgtatgtgtttggagacttcaaagatgtattaattcctggaaaactcaagcaattcgtatttgacttacattctggaaaactgcacagagaattccatcatggacctganccaactgatacagccccaggagagcaagcccaagatgtagcaagcagtccacctgagagctccttccagagactagcaaccagtgaatatagggtataactctaatgagggatcgaggatgagctttaaaacttggaaaaacaggtgtaagccttcaaaagagaataacctagtggtggaatgtaacctttattttcgtactcctagggggaattaaaattcggaatcaacggaaggaaagttttacaaagaaacaaagaggg

SEQ ID NO: 721098 - DNA, 213 bp, Homo sapiens
tttttggggccccccccagggtttcccgggggggggattttttttgggtaacttttcccccccccccccccccctgggggggcccagggggggggcccccccccggggggggaaggggggcccccccttttgggggggggggggtttttttaatttttggggggttccttttccccctaaatcccccggttttttttttatttaatttgttta

SEQ ID NO: 721099 - DNA, 546 bp, Homo sapiens
aagtatgcctccagaacacaggagaagaaaagctccaggatccctgtccccatctgacctcttgatgccagagagactctgaggcttcttccatcgcaatgacctgtattaaacacaagccccccaagcaaaagaagaggttgagtttgctgccaggattcagatcagcccttcccagggtctgcaggtgtcacatgatcacagttcagcgggaggctttccgtacccacactggctgtagccacttcagtccatctgccctccagaggaggggtttcttcctgatttttagcaggtttagaggctgcagcttgagctacaatcaggagggaaattggaaggattagcagcttttaaaaatgtttaaatattttgctttgctaatgtgctgatccgcactaactcatctttgcaaaaggaactgctccctcggcgagccccagctggggcctctgaagggattcctcactgtgggcagctgtcctgagcttcaggcagcagtgttcatctctggccagatgtctggtttccatgtattctaagcca

SEQ ID NO: 721100 - DNA, 231 bp, Homo sapiens
agccgaggcgacctagaggatcccagaaagggctcaggacaggtagcctaggtcatgagatcagagcagtgggagaaggggctggatcatgtaggccctatagtaggagatggtaaggactaagatagttgtctagagtatactcagcataaagacagaaaaagccatagggaaggtattgagtatacggagtaagtagaaatctagatactatagatatgacatgagact

SEQ ID NO: 721101 - DNA, 838 bp, Homo sapiens
tctctcgtccggtgacttgcactctcgcgtactgtgctcgctgtggtgcacttctcgtgtatggttgcccgctttcgtcaggaggcacaagcactggggccttagcactggggggtttaatcctttgcctcgaccgcggggtttaggtcgcccgctgcgccgtttgttcgggtcacgtcgcacgctcttcaagctgcctgggccgtacagttttgtttcgtcccccttcttggtaggtggttctcggcacgcccgtggcaacatcagttgttctccccggacgtggtttctttgcaggagcagccgagttcggtatggcctgtggtcgcagcggtttttcataggagatgggtaggtcagtgattcctcttaagtgtgccctcctttggtcgtatagacgaggtttccccccccgtgttctccgcctccgtgtgacactcatgctcccccgcgacgaaagcggttactcaatagttgtatccaccgagtgggagttacgtactttttgaaggctgagggagaatgttccggtctgatcaacgcccctgcttgagattacacccggggtctaaggctggaactcgcttgatgcacgcccttacctggcctcctagtattaggcgccgtgtttatttttctgtctccctggctctaatattccggacacggccttgtttacaacatctgcacttgtccccccgggtgccaaaaggagcctggtgcctcacgctcttttgggaactttgtcccaaccgcatactgaataagagggccaagccgccaactacattttgggcccccctcttcctgttcccacccggaaaaacacccaaataac

SEQ ID NO: 721102 - DNA, 485 bp, Homo sapiens
cgaatatcacaacactccactgaatatcacagcacctcaaatagttgctataaatgaagagaggcacagaggcggtgccctaggttatgcagctagtgagtcctacagctgtgtttgatccaagcacctgtggctttgaccatccactgtgccagctggctgcaggcggcctcaggcactgtgctgaactctgggagtggatcagacagctagtgtgtgtcttgtcctcccctgaaatcctgtctcctttctcctccagagcactgccaaggtttgcctcctccaagaagcctgcctctccgggatcagttaggttctccttgcacttgaccgtgccctgagctacctccgttacagcccgtccctcggtatttcggctccagagtaggggccctggttggtggggcctgggttgaacttcagcctgggtcccagcattgcctggcacctgggaggtctcagagatgtcatgatagaatcaatga

SEQ ID NO: 721103 - DNA, 619 bp, Homo sapiens
taaagtcagagtctcgctctgtcacccaggctggagtgcgggggttgatctcagctcattgccacctctctgccttccaggttcaagcgattttcatgtctcagcctcccaagtagctgggattataggtgagtgccaccacgcccagctggttatgtattttagtagagacggggtttggccactgttggccgggctggtctcgaactcctgacctcaggtgatctgcccacctcagcctcccaaagtgctgggattcacgggtgtgaggcactacgccccagcctttgggggtcttcggggctatatcacactctggtgtgatgcaagagcagtcagagcaaaggcagttcctaaaataggcatccgggtcagcactgaaaggtagtccacgtttggtaatattttcacactgtttaatcactatttatatatctaatgcattcgggttaaacgggtctgtgtcagatggtcttgaccaatgattagtttgggagccattttgaaattgtattctggtgctatcacaaaaagcgggattaggccgggcacggggggctctcaccctgtaatccccagcacttttggacggctgaggcgggcaggatcacgaagtcag

SEQ ID NO: 721104 - DNA, 349 bp, Homo sapiens
ggactgcttacaggctgtaaaacagagcccatagaactatgacctctgagggaccattggaatgaaagtgtactgtgcattatgcattacagtaaaggatttcattggctacaagatacataagtttattataaaaggcacagggctagaactaagctgacttggcagtgctcattctgtgagccaaacgagttatgctattgcttccctaaataatacctgtgaattatctaatgtaacataggtacttgcggaaggagttagactgtcatgaagaatatgaacatttactgtggtgctttaggaacatgcatttgcattatcctatggttagtgcacaccaactgtc

SEQ ID NO: 721105 - DNA, 744 bp, Homo sapiens
gctagtctcgagttttatgtttttttatttccagggtacgttgggagatagattctcataaaattattcggcgtcatataatatatagatatatgcttatatacctttttttttaaatacaatctatatacccttcccttccccaccaaattcacaaagggaaattaaaccctcccaggatggccatcaagttctcccgaaagggccagggccaagaaaagaactcatctctcaacgagggtaaaaaagggcgtgccattctttaggctcgggggttggaacgcacacagcattcccaggacccaggggccagagagaggaaaagaatgtgacggtagggcggcacgggatccataggagtgaacagtgctccagtgaccccgggcatgtggcagaagggcctcccagaaatctcagggtgagagtaaccagggtggggccccataaggggcctcatctcaggaagcgcggcccaaaaagggctcagggggatagggaagatacgcaaacgggggatcaaagagcattgccaggggacatgggcggctggcaagacaaaccacgcctagaatggcgaatatggaacgaaaaccgcaagcgacccacaaatagggagcacaccaccctacacattgcattgtttggcaccggcacagaccgccgacgcctaaggcgaaccgaggcacaacgactgcaagcggaccacaggacactggagcacaaaaaccgaagaccacaaatacc

SEQ ID NO: 721106 - DNA, 996 bp, Homo sapiens
tgggccggctctactctaccatctttggaggcacattcatcacagcgcgtggctcgcactgatgtcatatctgcgtaggcctacacgataaacttgctagctataattccagttctacccaaacgaaataaaccctcgatccacagaagcagtcatgaagtatttccatcatgcaaagcaacctgcaatcccgataatccgttcgtaattggctatcctcttcatgcaatgatacatctccgcgaacacttgaacggcatcaatgcgaactgacatacctagatctaatactcgatcatttaataaatcaataatagtgcataataggacaatacgaaccggatagggcaaataggtcccccgtttccactctcttgagatcacgcagaagtgttacgccataggagaccgccctcatgaccagtccggctctggtttcgtgtgctcacactgacgacaccaatctgatgaccccgcatgatccaggtcatgtatccaaaagtgttctccctcaggtaatacgtgtgatgctcttcgtcgctctaagtcttcgtcacattccttagtctcagtcattaggccaggcatgttatgatgggtgggagttgtaacccagacatcccaagcataccgacttgtaactctttagcagtacctcccctacacattatcccaccatagggactagggtaagtcgcacggtacctagccggatacaacccccttaaggattaacacgttcctgtggatggaacgcgtattcactatttggctcctgaatcctaactatccggattgaccataactaggggcaagtttaaaaggtccccaggcaccacagaaaccattgaatacatatactctgacagctggacacaagctcaagcatgaattgaacaaccctataattcaatcgaacttacctttgccttatgatggcttgaccgcggtagcgggcttttgcccaagtgggcattccgaagattccccaaggag

SEQ ID NO: 721107 - DNA, 330 bp, Homo sapiens
cggatatctgaccaggtatggcggttagatatccccgagtccttcaatgctagatatcccgttgatacgggatcctagatatcgtaccgagaaactagtgcggatatctgaccaggtatggcggttagatatccccgagtccttcaatgctagatatcccgttgatacgggatcctagatatcgtaccgagaaactagtgcggatatctgaccaggtatggcggttagatatccccgagtccttcaatgctagatatcccgttgatacgggatcctagatatcgtaccgagaaactagtgcggatatctgaccaggtatggcggttgggt

SEQ ID NO: 721108 - DNA, 426 bp, Homo sapiens
ccacaggacggtgatgactcgaggatattgattgtgattgattgattgattgtgaaacagagtctcgctctgtcactcaggctggagtgcggtggcacgatctcagctcactgcaacctccgcctcccgggttcgagcgatcctccctcctcagcctcccgcatagctgggactacagccacgagccgccacgcgccaccaatttttgtatttttagtagagagggggcttcatcatgccggtcagtctgagctcaaactcccggcctcaagcgatctcccgcatcggcctcccaaagtcctaggattacagacgtgatccactgtgcctggcctcttctttctttttttgtagacttgatatcgttctgcctcttaggctggagtgcagtggcatgatcacagcacactacagcctcagcctcca

SEQ ID NO: 721109 - DNA, 140 bp, Homo sapiens
cttgacaacaccttacacgggtacctgctacgcggtttgttacggcctcctatactacgtctacgtctactacgggctactaactcacgacacacaccttaccaacttgactttcacctttgttacctacacttaactac

SEQ ID NO: 721110 - DNA, 292 bp, Homo sapiens
tatacaagtcagctcggtacctgatcattcgtgtctcagaagcaggttgtcctcagtttgacgtgtcattggctgtctttgccactcgaacaatgtcttcagcttcctgtttatagacgttcatctaagctgtcgagcctcttctgccaataagagtcatgtttgttcgggtcccctgtagatactggttgcctgaaagacacattggcagcagcgacttttgctttctcaagttctctggatgcgatttcaatcaaccgctctgtgttctctacatggacacgaatgttca

SEQ ID NO: 721111 - DNA, 205 bp, Homo sapiens
ctagacaaccttgggatcaagatgttctgtgtatcatgaacctcgttcatgccaagaccgaaagtgctggtccagtgtgagtacattcagttcatgccgtgacaattttcctggaactcctttttattgttagttctcacttgtttccatatttagtgaatgtacatttaattgcaaagctgtcattaataaaaattcttatagt

SEQ ID NO: 721112 - DNA, 619 bp, Homo sapiens
  misc_feature (130)..(130): n is a, c, g, or t
gaaattaaattttttttgaacacagcaccatttttgggtaatattgaaattaccggtcttaaaccctttagtaccaaagccaagtaaaagaatgaaagccctactcacacagttatcatatggcgcatgnatatgtcaaaaagagtattttcaaatcacttaaacaaaagcggaatgcaaaaacgaaagcacacaaccagcatttaatttccatttgaaataaaatcattgggcctattttcaataccccaagattcaaaagaatacccccccccatgcaaggtgtaccagacaatcccattgtctgttttagccgtgtaggggcggctgtattatcccccattcaggtttgcagagtgacacctgttaacccacaagcaagagtgatcttttttggcgcagttcccttaatagtggtcatgatttcggtcccacgaaatgaattccattctttgaaactagcacatccgccgctcttgagtatgaaattaccccgaaagggaatctccacctgtcccagaatatcccccaatatccacctcgtagaatttctttaaatctccaactttgaatttctcatattgtgcataacgctaaataaaaccctggggccgaattc

SEQ ID NO: 721113 - DNA, 553 bp, Homo sapiens
  misc_feature (5)..(6): n is a, c, g, or t
  misc_feature (330)..(330): n is a, c, g, or t
  misc_feature (404)..(404): n is a, c, g, or t
gatgnntcacctgccacctacaggttcataatagtcaattttgtggagactatacttcctaaatgggtgcctgggtctgatttcttactaggagttagtgttcatagaattaaaaaaactctaccctctacagtggtctctgaaggctttcagaagtcctgatgtttcttcccaaggtatctgaccctctctccataatccacccaactcctcacccccagtgctcccccactgatccaccctgcatctccttccagttcctgtcgggagtggatgcctggtgcaagatgtgcagtgaaggtggtctgccatccgagatgcaagacctanagctggcaatccaccaccaccagaccttgtatgagcaggtgacccaagcctacacagaggtgagaatggagcanggcaaccatggttcttgggcatgtctgcatgtgggtggggtgatgagggcactggcctgtgccctgtgaaatagcctggggtgggactaagaagaagaagctggtttttctttttttttggtgacatctttaagaacctttgactattt

SEQ ID NO: 721114 - DNA, 181 bp, Homo sapiens
  misc_feature (43)..(43): n is a, c, g, or t
  misc_feature (73)..(73): n is a, c, g, or t
ttgctcctgtagctagacaggttgctggcaggagggggtcacnaacacggcagggaagtctcgtcgctcgaangggacgcggcatccatctctcctcgggaactttgaaaatgctcagttctggcctagtctccgctggggccgccgcccgagcctccccgggccaccccgtcgggtggag

SEQ ID NO: 721115 - DNA, 145 bp, Homo sapiens
  misc_feature (26)..(26): n is a, c, g, or t
  misc_feature (135)..(135): n is a, c, g, or t
  misc_feature (141)..(141): n is a, c, g, or t
aattcgcggccgcgtcgacgcgagangacgacagaagggatgacccaccaatcacatgcctatcatatagtcccagcccatgacccctaacaggggccctctcagccctccttgacctccggcctagccatgtgntttcanttcc

SEQ ID NO: 721116 - DNA, 172 bp, Homo sapiens
gggaaatctagctcaaatatccttgaattttcattaggattgaagtgtacagcttaatcaaaggtaagactgtagtaaacattgttatattaactgatacttaattggaacaagtgtcactaggatgtgtaactgtataacacgtacactatgaaaattaagacaagttatc

SEQ ID NO: 721117 - DNA, 660 bp, Homo sapiens
gcggccctgtgccctccaaattcacagggtggtacctagtgagccagtgtgggtgtactgacatgtgctgggtgcacacatgtctccccccgtgccacctcgtgggctgcctgggcctctggcttccagtgccctgctctccacggcctccctctggccctgttggagtggtgcagtgctgatggctgtggagtgggacaatgcactgccccccagaactgcatgtctccactgagtggcaccgcctatttggtgtcctgtgggaggtgcgagctgagaacacatgtgactagctgagtggtagctggtagttgggacgagaagctggggtagttggatctagtgtagttcctcaatgccccactgctcctagtgaggtccccctgtgggtgtggctgggctgggcctggggcactccgtctgcctttgcagaaccacctgggcccctttctgtcagtattattagggttacgaattgcagctgtttaacttgaaagacactgtcggaggtgagcatcttgggcgccgggacgctgcagtgatccccgccagagcctgtgcccttcctgctccgtctttgggggtcctcaaggctggctccttccttttgccaatctcttggactcagtttgccggtgatgcgtttctcatggaggtctg

SEQ ID NO: 721118 - DNA, 191 bp, Homo sapiens
tacaggacctttctcttttaagacttcttgagtgtgatgcatgagggaagtgtatctgaaacactcatgtttctcatggcactgatatagggctcaagggaacttggaccatcattgtgttttactgatgtttaatcccaggcctgacagtggccctgccctcagatctcacatcagatgtgtggcaggtg

SEQ ID NO: 721119 - DNA, 720 bp, Homo sapiens
  misc_feature (601)..(601): n is a, c, g, or t
ggcttccggacctcactcctcactcagatttctgtacatcacgtccctttatgtctataaatcttccaccatgtagctgtgctggagtctcaccaaatcttctgtgattctgggggctgcctgatttgtgaatcattcatttctcaattaagttcctttaaatttaattcagctgaagattttcttttaacagatggtgtcagaagtgggatctgtgggagcaggactgctagggcctccggagctataatgtggtgagcagtgttcctagggcttctaatgacccccaggagtgctgaagtacaagaaaggcacctgcaaggactgctctgtgatggcagcagtggcccatgtggagcagttgctacggagacactggctgcagtgaggaggagtggctggggctgtgcgctcctcgaagctggtgggagtcaggaaagggtgggagccccaccccttctaaattggcaggcaggagccccgccctcccaggcacagctgcagccatccagccatgactgcaaacccgggcatctttgcactctcagaggcccagcaagcccccctgccccgcaggctcagttgtacctggtcccaccanctggcgtctctccactcccagagcccactccaaccttcaggaattccccgaaaaaaggggtttttgggaaagggggccttggaaaaacccccaaaggggcaacaaggtccggaaacccg

SEQ ID NO: 721120 - DNA, 947 bp, Homo sapiens
tttctctgctccaccggtgggacgacacgatctccgggtttttttccaggctttcggccgccctccgggtccttgcccgtggcgaccttccgggaccatttttcggccatttccgctttttgggacctgcccgcccccggtttttgtgggttactccgtgtctgtgcccacccacgcgtgggttcccccaggttctccccagagattatgtcccggcgacctggggaggccacccggtctaccgccctgggtccaagtgggtgacactgccggccctctctacaaacctacctctctctggcttttattctgccccccattaatgtggctctggaaaggcctgagccccttggttcccccgaattggcccaggaaaagccccgagggctaccgagcctcttcctgaagaatgccaaaccccgccgtggcggccgcgcttttctttcccggacacttcagagaagcccgcctgaagatgaagtggggtaaaaacccccgaaccccctgaaagctgccctggccctcggagagaaaagcgtgagacccggcccctttggattttcacatgccctcgggttctgcccgccaccggagcccccacttctctgtgaactttcctggagggctcaccttcctaagaatggggaaagtgaagcttattccaagaaagatgggtgaccccctgagcccacctccacccggctgggtggccccgaggctgggctgggcgaagtatcttcttcgaaaaggctcactttcacagcccgactaagagccttttgaggccccgcgactttctgaagggccccctgccaagtaatagggcttctgcctaagacctctccctccagcccataggcagcttttttaactatcctacccagccttggacccaatggaaataaagctttttgatgcccaaaaaaaaatacaaaactcgagactag

SEQ ID NO: 721121 - DNA, 565 bp, Homo sapiens
  misc_feature (30)..(30): n is a, c, g, or t
  misc_feature (63)..(63): n is a, c, g, or t
  misc_feature (65)..(65): n is a, c, g, or t
  misc_feature (78)..(78): n is a, c, g, or t
  misc_feature (80)..(80): n is a, c, g, or t
  misc_feature (94)..(94): n is a, c, g, or t
  misc_feature (96)..(96): n is a, c, g, or t
  misc_feature (98)..(98): n is a, c, g, or t
  misc_feature (101)..(102): n is a, c, g, or t
  misc_feature (114)..(114): n is a, c, g, or t
  misc_feature (136)..(136): n is a, c, g, or t
  misc_feature (141)..(141): n is a, c, g, or t
  misc_feature (143)..(143): n is a, c, g, or t
  misc_feature (157)..(157): n is a, c, g, or t
  misc_feature (161)..(161): n is a, c, g, or t
  misc_feature (184)..(185): n is a, c, g, or t
  misc_feature (192)..(192): n is a, c, g, or t
  misc_feature (196)..(196): n is a, c, g, or t
  misc_feature (205)..(205): n is a, c, g, or t
  misc_feature (316)..(316): n is a, c, g, or t
  misc_feature (339)..(339): n is a, c, g, or t
  misc_feature (356)..(356): n is a, c, g, or t
  misc_feature (488)..(488): n is a, c, g, or t
  misc_feature (508)..(508): n is a, c, g, or t
  misc_feature (548)..(548): n is a, c, g, or t
ccgtcttccagcctccccatcagcctttgnctgccttcctctaggtcctttaggaggtgatantnatcgctgttcgangngtcatacaccaggntntnggnnaacatactcctnaagaaccgcacggactccagcnacgantngatgagcagcaggnagangcggacagctctagattggattnntgttgcntttnctccatgtnggagggtgttggaatagagtttgagaagcagaaggaggtctgggagttatgcaggaatgaatacttctggtcctttgggatataggtttcttcaaactcctggtaggtgtnaatggccagctggtgcgcgcgangggcttggagcatagcntggtcaaaaagcctggataacggaacggtttggacggcaccagcctcttgaagccagggcaggcagagcagggcaaaagccaggagcagggacgtccgggagcctggagccatttccactaggtgagctgtncacaggaccctgagtggttnggggagttgggccttgggatcctagagccggtctcttgtnggccctttttataccct

SEQ ID NO: 721122 - DNA, 283 bp, Homo sapiens
tgactatgtactcgacagaagaaaaaaaaaggtataaaaggccgaattcactcttggccttagggactacgagtggatgacgtcaaagatctcttggccctctggatataagccacctgagtgcagggtactaccttcactagagttaaacagtattggaggaaaattaggggtgatggtgctaggtaagaaggtgacgatataatgaaataaatttaagtcatgctcagtatgagacatctataagatacgcaagtggagatgtcaaatagccagtagcatt

SEQ ID NO: 721123 - DNA, 126 bp, Homo sapiens
aaatatgattagtttcgtggtgtgaatgttataatcaaggagatcgtagggagattagtatagagacggtagagtttttttcgtgatagtggttcactggataagtggcgtggcttgccatgagtg

SEQ ID NO: 721124 - DNA, 284 bp, Homo sapiens
agccaaactcaggatagcgagctgggtagacaggccagcagtatatgaaaccttccataagtgtgcagctgtattggatgccttctgtagaagagcagagatacacgtgccatgtgcagcacgagggtttgatgtacctcgtcagcctgagatgggagccatcttccgagcccaccatccccatcgtgagcatcgtaggtggcctggatgtcctgtctgtcctatctgtcctaggagctgtgatggctgttgtgatgtgtaggaggaagagctcagcgaaatcg

SEQ ID NO: 721125 - DNA, 402 bp, Homo sapiens
aggcgaggagagtgtagtgagccaagatcgtgccactgcattccagcctaagcaacagagccagactcccatctcaaaaaaaaaaaaaaaccccgcgcaaaacccaaaaccacagggccctttgttcttgctctttcaaaaaaccaccccattgaagggaacaccagggttaacccaatgcttcctgtggatttgaccactcagttggcctgccacccgcgttgtccacctcccaatgcccctcggtttcccctcaccccctccggtgctcagatagaactacagctgtttggtggagattccccttgtggggttcgccagcggccccagcgtttttgtaccagattctctgctcttagcttccccttcaaaaaagaggccccaggctccttgtacttctcc

SEQ ID NO: 721126 - DNA, 480 bp, Homo sapiens
ttctttcctactttttatttgggggttttatgattttagatcttatatttaagtctttaatccattttgaggtgatttttgtatatgcagttggacaaatgtccaattttatatttttgcatatggacatcagtttttgccaatataatttattaaagagactatcctttcccctaatatattcttggtgtcattgtcaaagactggttgactctgtatgcatgagtttatttctgtattctcaattatgttccacatggttctatgtctgtttttatgctagaactgactgttttgattcctataactttgaaatatcatttggcattagaaagtgtggtgcttccacctttgttcctatttctcaagatttatttggatgtttgagtttttttttattccatgtgaattttagaattttttttttctatttctgtaaaaaatctttttggaatttaataaagatgcattcaacccaaa

SEQ ID NO: 721127 - DNA, 337 bp, Homo sapiens
  misc_feature (193)..(193): n is a, c, g, or t
  misc_feature (231)..(231): n is a, c, g, or t
  misc_feature (253)..(253): n is a, c, g, or t
  misc_feature (293)..(293): n is a, c, g, or t
ttcagtaactgtgttacagtaacgactggatcaatcacaactctgtaacttgctgtacggttgattggcagtaataaacgatatatttgttgctgtaattctgataactgccagcgttgttcttttcgtccgaataagttgagtgtaattgataccgtgccttgcaacgatgacttgttaggtagcaattgtnatgatacgtcaccgcaatagacataaggcatttttgtnaatgttttcttgatgtcgggcncgtgaaaccaagtcatgccgttatcatcagcttatctganccgtttcataaaattcttggcctggtcgctcttttatacccctt

SEQ ID NO: 721128 - DNA, 385 bp, Homo sapiens
gcgcttagtaaataaactgctactactcctaagtgccagggtctcaggtcccatgtagggtttattcatgagtggccgattacaatttccactcttggccgaaacgatactttcccttcagcgcagaataagctcactttctaggatatgcaatctgtggcagtcgcaagatatattttccaaaacccgaaaggaggataaatggatgatttctcaaatgccctgaagtaaaatgaacaactctgggctgtcataaaatcagagtgagatgacactcctaagtgattaattctttgagattggtaggacatttttaaacacagaggggaaaaaagcctacatatcttctagaatttgtagtctaaccctgaagatggttggctgg

SEQ ID NO: 721129 - DNA, 228 bp, Homo sapiens
cacatacaaaaatttcatgtttttttttattaaaaacaaaataatgcttgctcgtttaaggtttcaatatatacaccaagataattatttggaattgttgcaccagaattagtaaaaatttcaaattttttctcaatatcttaatgacttaaataatttagcttttttcaggcattttttgttaaaaataaacttacttaattttcaacttaggtcaatgtgcttttt

SEQ ID NO: 721130 - DNA, 112 bp, Homo sapiens
ggtggctcacaccgtaattccagcattttgtagagactatagcagcacagatttacttaagcccaggagttaaaggaccaaccctgggtcaaatggtcaaagatcatccatc

SEQ ID NO: 721131 - DNA, 358 bp, Homo sapiens
  misc_feature (227)..(227): n is a, c, g, or t
  misc_feature (285)..(285): n is a, c, g, or t
aaagatttttttttttggggggggaggtggggggaaattttaggccccccttggggggggcaaaatttttttgggggggggcccccccccgggggggtattttaaaaaaattttttttcccaaggaggaaatgagggcggcccccaagaccattttagggagccccccttccccccatatgggggagaaatacaaaacttgggggggggtgaaaaaaaaagattgtnatcccagctactctggaggctgaggcaggagaattgcttgaacccaggaggcagaggntacagtgagccgagatggcaccattgcactctagcctgggcaacaagagagaaacttcatctcaaaaaaaaaa

SEQ ID NO: 721132 - DNA, 975 bp, Homo sapiens
catggagtgtgaatcatagctcatgtgtctgccataccatgtgcctcggggcatgttgctgttcaggaccgtcatatgacctagtagcatcacgcgagtagtgttgcggagatgccatgaagacgaagatgaatattatggatctcagatgtctaattaaacctagtggtgtggcattaggagtcaagatagtcttgtcagaagggaggatataactgggtagtgggatatgtgatctctggaaagaatgatgtacctttgatatagtttgatgcgtcacttcactgacattgatggagtacacctatattcaaagagtgatctagaaatccaatttgtatttggtagttgaatggatccggtattgagggattggaagaacgtcgagtagttgcacaggtgaccaggatgggactgcagcatagtgcatgccgacgagaatggcactcgtgccaaaggcacatctatagggatacggagcatatcactagggagtcgtgcttgaggtccagaggaatagctctgatgttcccctggtatacttagtgataagcctgggtgtaggctgtcttggctgtagtctggatcccatagttggttatacgttggaacagcaaggtctaaccgcatcttaagcgggtatcactgctggggctcatcagtgcagtggaccactggtgacagggattcggggatgctataatacacataggctgtgggttaggctgagggatcttccatgttataggactgacggtgaacagaaaggaagcatgtggatgagggacagtgttgttaacattgtagccgtgggacaaccatggtttggatgacaagttgacgcaagatataactgtgggttggatataatttgcatgtaataggactgtatcccatgaaaataggaaagtttgggaagtggagggaaagttgttagaatatccattaaggattcagtgcatttcaacattggta

SEQ ID NO: 721133 - DNA, 327 bp, Homo sapiens
tttctctctttgggttttgatgactttttggtaaactgaatgcaaaatccccaagggtcccaagggacagaccccccccctcaatgtttggttgccctttgtttttagtgtgaaaaaaaaggggtgggtttgaaaaaacagggcctagcaaacagacgggggggctgttccctcagcccctttcctgcctttgttcccagagaatgccccctgtaagggtccctgagacccaacccttttcttcctttgggcaactccctcccttccaaaggaaagggtttgttgtttggtcaatttccaaagctgggaatttccgaagaagaaaga

SEQ ID NO: 721134 - DNA, 119 bp, Homo sapiens
taccgttggatatgaagcattaccacttaaagaggatcagagcttctgcccaactgtcaagccttgacaattgtggacttagatcagtgaacatacacgggtgaatgcgtccgtcgaag

SEQ ID NO: 721135 - DNA, 114 bp, Homo sapiens
tgctacagtattatgtagaaactcttagaagtctgacgttgctagagtgagagagaggtacttggagaaaagccacaatctgggcttcatttatcaggaccttgattatctcat

SEQ ID NO: 721136 - DNA, 327 bp, Homo sapiens
atgcgcagctgaagcgcaaatagaaagataggcaaggtccaagtaaaccgctagcttgttgcatcgtgtaggccacaggagcagaaacatggaatgccagacgctgggggtgctggtacaagttgtgccactgcatgctactgtctaaagcttgtctcaatgcatctagaacttcatcgccccctgatcgccgatcacctctgatacccaccttgctcatccacaaaatgcccatgttggtcctctaccctgggcctgtcacattctgcactatttctgtgtttattcatggcactatgtactaccaccatgtcactacttacaaca

SEQ ID NO: 721137 - DNA, 240 bp, Homo sapiens
attctttgtctaatatattggagtctttaaaagtgttgaagaataaaatattaattagaccaccttcaaatgctaaggtgatgttttccgggacttaattaaatacaactttttcctttcgaaaagactgttcacatttgctccaggtgtaattatcgctctcatcctaccccctcagcaaatgtgaaagtatactgcctgagattctcatgagtttgagtctaaacggatgtaaatgtt

SEQ ID NO: 721138 - DNA, 729 bp, Homo sapiens
  misc_feature (12)..(13): n is a, c, g, or t
  misc_feature (20)..(20): n is a, c, g, or t
  misc_feature (167)..(167): n is a, c, g, or t
  misc_feature (206)..(207): n is a, c, g, or t
  misc_feature (301)..(301): n is a, c, g, or t
gccggggggggnngtttttncccaagtcttgctgtggggggggtttctcttctcccccttcttctttctttctctggttctctcgtgggtcttttcgcttttctcttgtgtgtttttttttcgcccctcgtctctcctggccccccctgcccctcgactcgtttttnccgccggcctccccttttttctgtgggtgttggggcccnnccccggggcggcgcccccggcgatagcgtctcccgcccggttctgtgctccccgttggcgccgccctccgctccgtggccgcctctgtgggtcnctgtttcggccgcctttgcctcgcgcctcgtgcgtttccgtttgtttgcctcgtccttgtccgcccctcctgccggttcttttgtttgtttgttgtgcccctgtcgccgttctgcgggctccgtggtgtgtctctgccggcctgtgtggtgtcgccgttttcccgccgcctctctcgttctgggtgtggggtgggtctttttcgcgttgtcctctccctgtgcgctccggggcccgtctcttctcccttgtcctctgtctcctttccgttctccgtgttccgtgctccttcttcgtctgcccctgtttgctttcttcctcttgcgtgtgtttgtcctgtctcgctgccttccctctcctctccgttcgccttcttctctttcctctctctgcctgtttctctctttaaacaggctttgcattctgccg

SEQ ID NO: 721139 - DNA, 253 bp, Homo sapiens
gggggggccccgccccccccccccccctggggggggtttccccccaaagaattttagaccaagggggtcggaaaaacccaaacccccctttggcccccttggaaaaccggccccccccgagaaacaaatttggggggggggggggttaaaaaccccccccccccaaaatctgggggggggttaatggccccgggtttccccccccggggccccccgcccccccgggggggaaaaaggtttttttgggttttta

SEQ ID NO: 721140 - DNA, 247 bp, Homo sapiens
atgcatttccatagccgcgtgatatcggggtacttgtccctcgctatctccaccatctgtaatctacaattatcatattactgccttagcaaacatagcagccatttcctcgaacattatcaccatatacgggaattctgcactctaattcgtcttcctcatctcatctctatcctctgtgtaaaaagaactagattaattttcatcttaaatcttcattgcattattttaaatttctaaggatcag

SEQ ID NO: 721141 - DNA, 608 bp, Homo sapiens
acgtctctgaggaggcaccattgagaatgattcgattagctaagtggatcccactggtgaatggggggaccacgcaggggcccaggtgcccatcatcctagtgggcaacaagtcagacctgcgtgtcggggagctccactggcagtggtccgttgcttccccaatcatgagccagtttcccgagcacttgacgacctgcacttaatgaatcgtgcaaacgttctctgccttttattcatcctccttcccaccccactccccctccatccccactcaacccaacccactcctcccctaccctcactccaccagctcccccccctccacaccgtcgcacgcacgccaaaacgcctcgcatactaatcaataccctctggcatcatctctctctaaaactacaactctctagcatgctcccccacgcttccaccgcatctcatactatctcctcgtacatacccgcgacactccttcccacccagactcccatactcacttccgcccaccctccccatattcagtccatcgacaacccaaataataccctaataactaacaccccaccattcccaccccagaacacatccaacaccacccttactacccga

SEQ ID NO: 721142 - DNA, 125 bp, Homo sapiens
catgtccatatacagaaacaagtttatttataagttctttttctttatgggtcatgttttttctatcaacaaaaccccagcgcgcctcatatagcttaaaagctacatcagcatggtatcattct

SEQ ID NO: 721143 - DNA, 269 bp, Homo sapiens
cttacgggacagcgataatgtcttgtgtgagagtagacctgggactgtgcctacagaaggagctgctgtgttccccaagtggctgcaccgattcacagtcctgccgccatgtccgagagttgcatctgggccatgtccttgtacacatttggtatagtcagcctgcacctttcagccaccccagtgggcacagagccccatctcactgtgggttgaatttgcatactccctagactgtggggagcacaggtcataagctagcaggcgca

SEQ ID NO: 721144 - DNA, 282 bp, Homo sapiens
catcccgggagacagctgacacaaggacaagagtgctgtctcccagcacgtcctatacaccagtagtactggaatgtccggccaggcagtcaggtaagagagagaaataaagggtattcaaagtaggaagagggaagtcaaactacgtctctatgcagatgacttaattctatatctaataaacccatagtctcagcccaaaagctccttcagctgataaacttcagcaaagtgtcaggatacacaatcagtatacaaaaatcactatcattctatggttgt

SEQ ID NO: 721145 - DNA, 1040 bp, Homo sapiens
  misc_feature (25)..(25): n is a, c, g, or t
  misc_feature (184)..(184): n is a, c, g, or t
  misc_feature (503)..(503): n is a, c, g, or t
  misc_feature (869)..(869): n is a, c, g, or t
  misc_feature (1006)..(1006): n is a, c, g, or t
tgcaacaaccttctaataaatagcnctgggccgcgtgttttagcctgcagattttaaatctacctcctctctcaatatgaacatatgccggatgaggaactttgcgaagtgacttacttgaaagcgctgacgtgaacctcttggcttggccagactcaggccgtacgtagactattagaattgngaacaaagcttgtatgctatgtggtgtccgaaattgcagagcctacacatgaggcacatatgtagacccatactagtgagagtcgtgcaattaataataccatctggtgccagccggtattaaacaaaggtagacagatctaggataatctccctctggtggtctaccacaaactatagatgcgagttgtgatagaataatacctccacttctacccagagtctaggaagacatataagcagaatggaaggcctcgatacactgatggcgctctctctctcacatacgaggtgtgcagccgagctcatatgagtgagcnctaatggcgaacagtcggcaacgctcgtaatatttgatttcgtgaagatatccggcaggtaaaacttcatgggtacactaaagcctcactgtttctataacgcacatcgtggcccgatatatcagcgcagataatcccctctctatacaaatataacaaagagagtgtcacccgctggctccggtctctagaaggggtttgttcctccatgctctgtgaacacaagcaggcctctagcttaattaaaactaaaccggaggcttctctcgagacagtttaaaagggggcgtgaaaaacaccggtcgtattagaagggggtagattgggacaacagatacttgagacaccattatccagccttaatcncataggttttttttagaggggtacgttgggccgcccaatgctttgcatgagagaaacccaaccctcacttggtaagagacgggagtggatctactgctgaatggtggcgccccccttggcagcccttgtgaatgatnacagtgctaaccttatagggtaacctacaattag

SEQ ID NO: 721146 - DNA, 178 bp, Homo sapiens
  misc_feature (80)..(80): n is a, c, g, or t
ggaagttgacgggcatcagtgacccgtgactgtcaagacctccgctcgaggttcggatcctggatgacagaccctctcgncctgaaggcgataaccgggtgtggtacatggacgactatcacaacaaccgattcgtacgtgagtacaagtgccatggttgacttcatgaacacggaca

SEQ ID NO: 721147 - DNA, 364 bp, Homo sapiens
tgtgggtatcacctaccatgggacctgcattctcacctgaatcccttctttgatcatcttccctctgcttagcactgcctttaccaaagtcctactcaccaaaatcttactacatgatactggtattgtgtttatatcaaaacgaaaaaaagcatattgaggtattcactaaaaatttagagatataaagtgaaaaatttagagattaaaacattttaaaaatagtactaggactttaggctctatatcaaatacctattcctttatgaaatgaatactaatgactcctaaccttcgacacaatccctggtgctctgtgctatgctttaccgtaggttctgggtaaactacacagttacgtctt

SEQ ID NO: 721148 - DNA, 155 bp, Homo sapiens
aaaaaaaaggggggggggggggggggccctttttccccccccccccaaagggttgggggggaaaattttttttttcccggggccaaggggttggtttgggcccggggtccccccttttcccccccgtgggggggaaaggggggccccctttccca

SEQ ID NO: 721149 - DNA, 689 bp, Homo sapiens
ctcgggcgatcgtgaccggcggacctgggtgttttgctccttgtcgtcctacgactcatccatagacttcacgtacgaccaatagtggcagctggatgaagcgagtactccagtccatcggtgtagtgaccgaggcgtagagttgtccagcactgggtcaatgaccgtgcttggggagcatctaccatggctcatgagaggcactagcagtccgagcccgcattgccacgatgcgcaaaggatgatcaaagatacaataggtgtggaacggagattgacatccttgtacttatcaaagtcctctacctgtgcgacagatatggaatgcaccagtagtgtccgaccttctgggtccccaaaatgggcgagccatgagtatagtgcaacacgcctgtgggggacaattgggcaagggttgggattcgggaattatgcggaaacctttgtcgaggaagaaattgccccaaggaacgagtccaatttacgtaattcggcaaagggttatagccgaggaaacaatggggctcatacctttaaacaacggttcccaaggattgcgtgtgccgaatcgccttggaggccgaccgttgtacgataccacgctatgggtcgagaaggctacacggattgggctagtgctccatatcaagctaatagactcgcggaaggagcgactagaggagcacacg

SEQ ID NO: 721150 - DNA, 275 bp, Homo sapiens
tcgaatctgtattgctttgtgtaatatacctattttaactatattaattcttccaatccaaaaacatgggttggctttccatttcttttgaatcatcttcagagttcccgtcatggctcagcggaaacaaatctgaccagtaaccatgaggatgcaggttcaatccctggccttgctcagtgggttaaggatccggtgttgctgtgagctgtggtataggttgcagacgtggctctgatcccacgttgctgtggctgtggcgtgggccgtcatag

SEQ ID NO: 721151 - DNA, 174 bp, Homo sapiens
gatcgacggaggattcaatcttaaaatatcgttacacattagctcatgaatttcctataagttgtatggcacataaaagttcgtgatgtggccaggtgtggttgttcatacctgtaatcccagcactttgggaggccaaggcaggagaatcactcgagctgaggaggtcgacgc

SEQ ID NO: 721152 - DNA, 350 bp, Homo sapiens
  misc_feature (209)..(209): n is a, c, g, or t
  misc_feature (318)..(318): n is a, c, g, or t
  misc_feature (326)..(326): n is a, c, g, or t
tttccaaatagtccatttcattaggaacttttttgtttgaatgaatgtcacataggtatcctcagtaacacagaacgaaattacctttgtattattgtgattagttggtgcttatttttttatatcaggtaataatgtggtacactgttaatttttttggttttgtaattattatttaaattaatggcaaggtttcttaccatttgtcnacatttaattttcgggctggaaataaaaatgaaaaattcttggtacccttgaaggaattgaatttcccggcagggccaaaatttttttggaaatagatagttttagtanaattaaantttcgggcttataataaaaaaaaa

SEQ ID NO: 721153 - DNA, 118 bp, Homo sapiens
acagacctgtctcaaaaaaaaggaagaacaaaataacaaaaagagcggaaaaaataaaacattttgatgacctctaaaatgtagtcatcaactgctaaatgtttggcagaagcaggaa

SEQ ID NO: 721154 - DNA, 901 bp, Homo sapiens
  misc_feature (17)..(17): n is a, c, g, or t
gtcccggaaagtttccncggggaatctggcaaaccatcctggccatacccggggatttcaaagcgaattctccacctcagctcccgagtagctgagattacaagctaatttttgtattttgtagagacagggtttcaccatgttggccaggctggtctcgaactccttgatctcaagtgatctgcctgcctcggccttccaaagtgctggaattaataggggtgagccaccatgcccgcccagtatattctttttttttttttttttttggaaacggagtttggctctggtggcccaggctggagttgcaggggcatgatctcagttcaccaaaacctccacctccggggttcaatcaattctacctcagccctcccgagtacctggaattaccggcttgtgccaccacacccagcctaattggtattttagcaagggatgggttcctccatgtgggccaggctggtctaaaactcctgacctcaggtgatcacgcctgcctcagcctcccaaagggctgggataacaggcgtcagccaatatacccagcagtatattcttaaactattcacggtgtgagccatatataccgacaaggggggacttttgaatgcccgacccatcgtgtattaaacatgcaaggctaccttcattcatcggtgggtatgcgctaaagaaatttcaacgtatctccccttgttcaaacccaacatacggtcggcgtattcacatgcggctgacacccattcttccccataggtatcgcgtgcactccgttctgaggcgaacgaaacattgcggacacttgtcgcaacagaaaaacccggtccagtcgacgttccctgtggggatcaacaaagggggtgacataccaacggggccggccaaggcatgggtcggc

SEQ ID NO: 721155 - DNA, 606 bp, Homo sapiens
agttgtatacctagaactgatgtgagcacaggtgctctaagcaatatgtataaagctgttcatagcaccatttttcttaatagccccaaactgaaacagcccaaatgtccattataaatagaaattgataaattgtaacattttgtacaatattatatatcaatgaaataagcaaattacagcagtatgccacaatgtggattgatttcatgaatatacgtgaaaaacagcacagaagaataccatacactatgtgattttaattttataaagttcaaatataggcaaagcaaagcaatagttttatttaccttcctgtatcataacaccgtgtattatactcatgcatatatatgtagtcccagctggtagaagtataaaggatagtaaaacaatgtgttcaatatggtaagcagagttccctctaattaaagggatgtatagaaaagtaaagtaaaacgggcatcaatgtagtaggtaaagtcaatgcaaagtaacattttttggtttattaaatgaatgtgttcttattaagcagttattaaaagaaggtttatattacccaggcattccgttttccattaaataaaaaaaccaatagcaaaa

SEQ ID NO: 721156 - DNA, 132 bp, Homo sapiens
atttcagacattcccctgtgcgttgcaatcatgctatactgtgtaccagcaggaattaatcctctgaaaggctggcttacttgtgcagagacgactcacactctgatgcctgtgcttggcggagtggtatgc

SEQ ID NO: 721157 - DNA, 141 bp, Homo sapiens
ctattgcttgcttcgtttttttaaacttgaactttactttgttagatctcataatactttcttggcattctagtaaggaggaccctgaggtgggagttgtggggaacggggagaagggtgacagcttggcaccggtcccgt

SEQ ID NO: 721158 - DNA, 704 bp, Homo sapiens
  misc_feature (56)..(57): n is a, c, g, or t
  misc_feature (84)..(84): n is a, c, g, or t
  misc_feature (638)..(638): n is a, c, g, or t
tattggtctcgacgatctaccaagcaaatggaaaacaaaaaaaaagcaggggttgnnatctagtctctgataaaacagactttnaaccaacaaagatcaaaagagacaaagaaggccattacataatggtaaagggatcaattcaacaagaagagctaactatcctaaatatatatatgcacccaatacagaagcacccagattaataaagtaagtccttagagacctacaaagagacttagactcccacacaataataatgggagacattaacgccccactgtcaacattagacagatcaatgagacagaaagttaacaaacatatccaggacttgaactcagctctgcaccaagtggacctaatagacacctacagaactctccaccccaaatcaacagaatatacattcttctcagcaccacatcgcacttattcaaagttatttatctttcagaactttgaaagtactgttccgtgatcttctagaattaaatgctgcatatgagaaatgtgattttagtccagttcctgcatgttttgtcacttatttcttccctctagggaaatatgttggtatatatatatatattttttttctatggagttctaaaattttactaggaataattgagttnttgacttttttaaatcatgtgattcaacacatagtgagccctttcttcgtccaggcaatatgcgtc

SEQ ID NO: 721159 - DNA, 127 bp, Homo sapiens
aacgaacaggttcagtcctcctactgtactgtcagccttccaagatagctaggacccactatgcccagctaattttttatttttttgtggagacaaggtctccctatggtgttcggttgagcggaga

SEQ ID NO: 721160 - DNA, 341 bp, Homo sapiens
taagacggggaataaagcggagcgaggacagcaaggtgagcaagtgcacccctatggaccctgggcttaggcccttgcgcgcgctgagttttcaagaaaaggtttcttgctttgagggtggccaagggatgccaggtgtgggctccgtgccttttctgagtgacttggaaaagaaagggccaaccatgggtctgggtgctactttggtactctggttctttgccggactggtgctgcggggctgggaggataggcttcttattttctttcccaagcgcccaccggcttcccgtgcgttttggaggaaacctacaaattggcgcaccggctcattgagaaaa

SEQ ID NO: 721161 - DNA, 564 bp, Homo sapiens
ttgttgtgcttatagctattatggtatagtactctctaggctttactaattatattatagtactattagtgtgccctggcacccttcctacgtgctctagcttagtagtggtaaggcataccaataatgatctcctaggatattctccttcgtatgctggttgatgacagtcgctggttcgtgggtcctactaggtaaaatgtatctcgtcctatgtgcagagcccgtgtcttataaggtacgtgtaccctgtagcctcatataggggttattctagtagagtggtagtatgatctttggcccctactgcatcagatcgggtggctaaatgctcaagattctgtcatataagctatataagaatagggtgatctacccccgaggctagtaggggcctagcatttgctaaaggcacagtagctaagtggagctgggcaaagtaaggaaagccagggaaggtggtgggtgatgagtctcaaagctaagtagtggaagctgggcacagtggctcatgcctgcaatgcccagcagctttgggaggccaagtaacggcggtgactgagg

SEQ ID NO: 721162 - DNA, 404 bp, Homo sapiens
  misc_feature (37)..(37): n is a, c, g, or t
ccggatgctatagagcacgaatgtccctcgggacatnacgcggggaatcaccatcaaaccatcggcgccgactttggcggcatgggctgcgtgggatacggcttcacggctgttcaccgcccccgtaccgacgatggtcggcacacccgtagccaccaggcgcgccacgccttcctggcgctgggcctcggtgagcagcggccagtcgcccatggaaccgcaatacaccacggcactcatgccgatgtcgatcagctcgcggcccttggccaccagtgcgtcgaagttcggttggcgctcggcggtgcaaggggtcatcagggcgggcatgcagccggtgaagatgttgtcgctcatggtgctaactccggtttcagttgaatgaataatgggctcagatgccc

SEQ ID NO: 721163 - DNA, 269 bp, Homo sapiens
gggctaagtgatctctagcaagagagacggacattggtctgagtcccaaactgttcatcaggtttctccgggccactgaatggtaagggggtccggtagccaggtgggggcggcaggttccactgggcacttgctgagagcttgcggcttgagcagccgctggtcagtgaagccgtgtccggcttcgttggctcccggcttgggacactcaagggctgtgccacagggccaaggatcctccagcccacagctgaagcactgggagtgac

SEQ ID NO: 721164 - DNA, 395 bp, Homo sapiens
ggtctctccagagctagtatacagcatcttggtcaccattcgtgctccttcaggagctccaggttctccactaggtgtctctttcctagctccaatgtctagatgcgacgtggtgctttgcacaggtccatccttctgtggcagccagttcgtctttcatgtgtgcaatggtctgagtcagcattagcaatgtcggccaacatgtgagtctctgcagcatacacgtttgagagtcgtccgagagagttcaagctcgagactaatgcgtcatcggttcccttgatctgttgaagcgagcctccctcttcagggagatatcaggcacggctcggctgagttcatgatcccctgtgactccgctagcgatcgcgccagcgtctgcggctggaccgtct

SEQ ID NO: 721165 - DNA, 805 bp, Homo sapiens
ctggtcggcacgtcgtcgttaccaggccgcgggggcgtcagtgcccgagccgcggcccatcgtagactgggacctgagagcatcctgggcagctactgtcccgcgctcctgcctccgtgctgcttctgctgctgctcctgcgccgggccgagcagccctagcggggcctgagctcactctatcgcagctagccggcactaacgccaagctagtgcttcctacgaggcaggtggcagcagggccgtgcaagttctccctggaattacgcaggtccatccattggccacggccactactgcatgcttagcactgctcatgctcaccaggcaccaccccagggcgcacaccacccatcgtaccagcaggcaacacgcacaccacagcacgtcacgcaccatgcgttcaccgtcaccagggggcttgcacagtcacagtgggccgtttcaccatcccagctatttagccttctcagagctcacacagccagcttccatcccgcaccccttaccgtcgtcaaccgacagcacctgcttcctccacttacatgccactcctttcccacagcttcgcgctgccgccattgcaagcctttccacgcataatacttcacgcatacggccaccattagggcgcggcacacgccagagggggctccacgcgcaggcactccgtctcccacccccaacgcactaggccacgctaccctgcccctttggcacgttaagcagcgcgattccccaactagcagggccttcttggccacaacacgtgcggcggaatcaggcaaataccgaatatcacacag

SEQ ID NO: 721166 - DNA, 111 bp, Homo sapiens
actctaagactagtatgctgccagtgcttactcctttggttaggcatttgtatttcctaccaatgctcttaagggataccaagtaccaaaagttggggggttgtttttttt

SEQ ID NO: 721167 - DNA, 161 bp, Homo sapiens
acaatcttgcagcatagcacagtccaatgtacaacgcacagttccagcatccaacccaccatccacagccatttccagtgtgccacatccagctactccaatccaagtcaacatcacacagtttcacagcttcgtcagtaacatcacacacacacacacac

SEQ ID NO: 721168 - DNA, 363 bp, Homo sapiens
  misc_feature (240)..(240): n is a, c, g, or t
tgtaatctaacataatctgctactgtacactagtttgggatgctatcagtggggttttcagacaagcatgagcactagaccagcttgcccttcttcagactccctatcctctggggcagtgtgacagtagcagaatttttgtgtcagagtcagtggtttttgacattgaaatgtgccaccatcacggcctttgctctgagttttgtacatgtctatacatgtgtgagtgtttgtacctantgcttgtgtgtgggaaggggtacatgtgtgtggtgggtgccagcatatgtgtgcaggagtgtttaggtcacagaagaggaccgcactctgggcctagacctttaacttaaatgatttgaccag

SEQ ID NO: 721169 - DNA, 83 bp, Homo sapiens
gatctcattcatgggaaaaaaaaatcctgtcttgttcataaattgacaatgtcataaattgaatatggtcactgttactcttg

SEQ ID NO: 721170 - DNA, 904 bp, Homo sapiens
gagatgctctcagtggcgctcctcgagaatggccttcccggagccgtacggttggctccaacgatggagagggactctccttggcctttacagaaattggaacggcgaatacatagtccctgatctgttcgatctttccgcatcgctatgcatgtgggggacgtgactaggtaatcagttcacacctcgtctcacatcaacagagttccgtgaaagacttcgatcgatagtaacgggagacttgagcatagtcctttcgaatagataggagccctatgaaggcacgcgtgtgctgtccattgatgctgtgtgatgaagaaattggggcaactcgtgccgtgactggtctccgtgtacttgctcgacaatatcttgttctgaatggtgagggctacgactcatgggtatatgctatagtactctctgtgctctaccatgggtcgtgtcctcgttcaccagaatgcggacacatgttggagcaccattggaccgtggactgacgaaatacaatccgctcgttcggtttgcaatgcactttctgtcatcatcttgactgcatgtccatgccctgagcagattgaaacatattgtgcttgtcctaacctgtcctttagtattgggatcattgtgcaacgatgcttttatccaccaatattgataggcctgtgcttgccttctacccccatccccgtgggggtttctacaacgtgatttcaaaaggtggtaaacctaagtttttaagaagcagcgtggtgctggcgtaaggtggggatacctgaaggggcgtattggggtggagttcactttgcctaacattggctcagtgttggggggcgtccccagggggggcacaaattgccttaaggataacggccattctttccaaagaaaaacccggggatgg

SEQ ID NO: 721171 - DNA, 361 bp, Homo sapiens
tgagtatattagatgattgtgatagctgttgcgtgatgatagaatatgatgggaagtatttaggaattgatgattagtaccggtgtagtccagtgtacatcgtatgttcagtatgtattggtgtggcaaatgatatgagggtgagggagggatcgttgagctcgtttgtaatgtaaaggatgtgtatggatgggagtggtgatgagagataggatgatggcgggcaggatagttcagacaggtttctatttcctgagacgtctgagagtgttctgtattagttagattttgtttgtgatgtgttagtgaaaatgggcatacatggactatggaagcagatataggaaaagtgattatgatg

SEQ ID NO: 721172 - DNA, 179 bp, Homo sapiens
gcctcccctttaagtaggttacacgaacgcgagaatagggagttggagaaggggaaggaagtgttgaagagtcagagctggctccggagtgggggagattggctcttcttttctttctccctctgtatttatcttgggtctgttgcttccttataaagagggaagcagctgcagtcctt

SEQ ID NO: 721173 - DNA, 222 bp, Homo sapiens
ttcattcccgcaatatgacatcaaagtggttaccctgtgctgtacccaactggattgtcatcttctgaggatgcaaacgtgcagaccccatatctttgatgatcctttcagtatcaactctggaaagaaaatgactacatcagctgatcatctcaaacgaggcacaattctggactgcaatacatgtaaatttgctaccatcacatgtaatctcacttcttc

SEQ ID NO: 721174 - DNA, 310 bp, Homo sapiens
ctttgtaaaaggatttttccatcaaaaatgggaaaaccattggggaggattaggacccatatgggaattattacctttcagggccgagaggacagaatggaaataatttgaatcctgttaaattttttttaaactgttttttagcggccctgtttatggaaaaaccaggcccagtttatgtttggggttttgggaaaaattatttgtgttgggggaaatgttgtggggggggggttaagttgggggtattttttaattttttttggacatttggaacagtgacaaaaaatgagacccctttaaactgtca

SEQ ID NO: 721175 - DNA, 650 bp, Homo sapiens
caggagaatggcatgaacctgggagacggagcttgcagtgagcaaagatcacgccactgcactccagcctgggccatagagggaaactctgtctcaaaaaaaaaaaaaaaaaaaagccccagccatagttgcccttgggatctctctgactctgaaattccacaccctattattgagggcatcatctaaacttttaaggatccgctccaattcttccgtgtcccccaagaaatttcccccgacccttcccttcttctttctagctgggggccctcaagtcaattaccatgcggaaggtctcaatgctgtgaaaagctttccttcagcaggcaacccctgtcaaacacacggcgcccaaataaagctgacttctctggttgatgcaaaaaaaaaaaaaaacaaaaacaaaaaaaaaaaaaacaaaaaaaaaaaatcaccacataaaaaaaaacaaaacaaaaaattaaaaaacaaaaaaacagcataaaaatacgtgtaacaacaaaacttctcatcccactaaatagagcaagcaaatccttatcatactatcgtctccacaatactatatccaataaatacaccgcttatgctaagcgtaaaaataacactactacactaatgaaactctgttactaatcaatcatata

SEQ ID NO: 721176 - DNA, 236 bp, Homo sapiens
cactgacaggaaaacacatttggcacgctgacattctctggtctcacagtaccaacttttccaagagaccttaaggctgtggtgtgtagcgtagcgtatttctacccagatcggagctctttggtgaagactcctttcgggacacagttttttggcttcttcttcacggatggttggaaggaccatcacactattcccatccttccaatcaactggggtggcaacccttttttctg

SEQ ID NO: 721177 - DNA, 144 bp, Homo sapiens
caagattacgatgtcatgtgagaagaatgcaggcggatgtcagagggtgtgggcttttgtatgtacaaactagtcattatatttttacagttgttatgatactgggtgagtagtagtgattagagagtggagtagacttaggcg

SEQ ID NO: 721178 - DNA, 125 bp, Homo sapiens
tatctttgttgaaaggccagaaataaactcacacatttatagccaagtgatattggcaaaagcatcaactgcacacaactggggaaaagacaaccccttctataaatggtgctaggaaaactgca

SEQ ID NO: 721179 - DNA, 531 bp, Homo sapiens
ttttgctattattgccaaacagtttgattaaacagtccagttatctttcagagacatttcattcaattggaagaacagcctcattgtgtatccatatacttaccatttccggagctcttttttccatctgtgatcattctccccccaccttcacgccaggcggggcagggttcggagcagagagtgtgatcaggagtggagaggccatttcgcagtgtttatcggggggtcggaggactctcgggcgcgtatgcgcctgatggtagagcttcgggggacatgaagcaaggatggatggaactgtgggcagacatggacaaatccataaagttggagatttcaataatggataaagcaggtagatagaaaatggggaagaatgtagaggagctgaaaaacactactaaccaacatgatctaattaacatttataggcagtttgtgacaatttgattatttgtcaatcaaactacaatcaaagtgatcaatagtgtcatattgtcatgcagtaaaatgtgaccatttggttaa

SEQ ID NO: 721180 - DNA, 154 bp, Homo sapiens
cctatcagatatgtctgggtgtccaacgccccttctgcacaccttgagagtcactttgcttctgttccagtgttacggccattcgggatggtctggactgtccctaggagaaccagactgatccataaggacctctgatggggagtgttggacc

SEQ ID NO: 721181 - DNA, 556 bp, Homo sapiens
ggctcactgcaacctcccgggttcaagcgatccttgtgtctcagcctcctgagtagctgggatcacaggtgtccactgccatgcccggctaatttttgtatttttagtagagacagggtttcactatgttggccaggctgatctcgaactcctgagttcatgtgatcagctcacctcagcctcccaaagtgctgggattacaggcgtgagccaccacatccggcctggttttgttttttttgaaacagagcctcactctgttgcccaggctggagtgcgaggctcaatcacagctcactatagcctcatcctcccagtctcaagggatcctccaaactcagcctcccaaatagctgggactacaagcatgtgccgccacgcctggctaatttttttatttttgtagagataggttctcgctatgttgcccaagctggtctcaaactcctggcttcaagagatcctcccactttggcctcccaaagtgctgggatgacagggatgagccctcgcgtctggcctctttcctctactttctctcccaaggacacccgct

SEQ ID NO: 721182 - DNA, 878 bp, Homo sapiens
aactatgcctgttcaggacaagatttatgcttttctccctttgcccagtacgccagactctggtctactcaggcaggatctactaagaaatgcagctaacctgctatctctctgtgacatggtcgagtgtacagcttattttcccgtatgaatctccagatctgtgagtcgagcagatatcatgttgcagattcagctttacatgcaaggatggtattatcctcacatgcacttttgacttgtcttgctgtaccttaagaggtgatagagtcaatactgtcatttgctacacgggaagattcaagagcgagctgacatgtgttatgcgtgtcctgcacgaatctgccctgtttaatgcattgtcctagtcctagtagttgcggttccctatatgtgatgtactgccgatattttactgtgcccgttagggcgacgctcttttgtggactagttgtttcatagtcctctcacggagacttccatgttcccgactcgggtggttcccgctgtgttgttggcagtgttgtctcagccgtctccctaggactgacttgagccctgggttcatctaagtgtgctttgtccttacggtctcacgatagagggcacacgttaggtcacacgctatgagggtcgcgagttaaggtatactacgaggcactttagggtgcctatgacttggggattatcgctcctacttgccactcccagtcctggagtgaagcctgctagtctggacagctctattccgggtgaaataggccgccaggcctacgtgttccccttgtttggcccgttgttcggccttgggccggtctccttgagactttgggccggtccgccttgtcccgatggggcgccttttcccaccccgctcc

SEQ ID NO: 721183 - DNA, 314 bp, Homo sapiens
actagaggatccccatgtgggcattggggtgggttccaggtcttggctataaagacacatgcacacgtatgtttatggcggcactattcacaatagcaaagacttggaaccaacccaaatgtccaacaatgatagactggattaagaaaatgtggcacatatacaccatggaatactatgcagccataaaaaatgatgagttcatatcctttgtagggacatggacgaaacgggaaaccatcattctcagtaaactattgcaagaacaaaaaaaccaaacaccgcaatattctcactcataggtgggaatcgaa

SEQ ID NO: 721184 - DNA, 290 bp, Homo sapiens
  misc_feature (36)..(36): n is a, c, g, or t
  misc_feature (53)..(53): n is a, c, g, or t
  misc_feature (60)..(60): n is a, c, g, or t
  misc_feature (73)..(73): n is a, c, g, or t
  misc_feature (178)..(178): n is a, c, g, or t
  misc_feature (284)..(284): n is a, c, g, or t
  misc_feature (287)..(287): n is a, c, g, or t
  misc_feature (289)..(289): n is a, c, g, or t
cagggtgtgagccatcatgcccagcccaaatgttgncctttttgaagcataanggagaanggattatttttancaagttaggtggcaaagcatttttttaaattatgcaatgacagtatagctgtgctaaaggaatacagtgtactttggacattcccagactaagcactcactatgntcttcctgactcataggacagcaacagtgagaaaaaatagaaaatttaaaacagagtatctcatcccataaaatttcttcataaagaaaaatgttcatgcaggctntantnt

SEQ ID NO: 721185 - DNA, 90 bp, Homo sapiens
aacacagggggtgcagcttttattttcccaaatacttcagtatatcctgaagctacgcaaagaattacaactaggccagatttaccatat

SEQ ID NO: 721186 - DNA, 183 bp, Homo sapiens
ccccattcccctaggcccctaactcttctgctattctgacccagccaggttggagtctctggcatcatttatctaaggactgacagagtcacacagaaaggagctgtcacctcttgccatctgctccagggcctccatccagcattcctcgtgtgccttgattggtgggcacatatggcagca

SEQ ID NO: 721187 - DNA, 584 bp, Homo sapiens
ctggggcacgatctttgtggcattgtcttcattgatcccggtgaggatttcaagctgggcaccatcaagggccagcttacttttgtccaggtgatttcccccggcgggactacgagtgcaacctggtgtccctgcagtgaaggaaagacatggagggctttgtggacaccagcgtggccaagtttgtgtttgaccgaaacctgccttttgtgggccgccagatggccctgcacgcaaatatggcctcacaggtgcattatagcgggtccaacccccccgacatttacccctccaagtggattgcccgggtccgccacatcaaggggttccgccagcggatttgggaggaagccgcttactcaaccccaggccaccctttggtgcaccctccgtcccatagcaaagcccctgcacagactccagccgagcccacacctggttatgaggtgggccagcggaagggcctcttttcctccgtggaggatttcaccgagtttgtgtgaggccggggccctccctcctgcactggccttggagggtattgcctgtcagtgaaataaatagtcctgcccccagggcccaga

SEQ ID NO: 721188 - DNA, 168 bp, Homo sapiens
ctcattgtcaaatgagtgaatgagacacttaccatcagtctcaggttgtttcttaaagacctaatatacaaatatatttgttaaaaacttacagagggcctattttgaatgctttaagatgtatgccacgtaatgtatttttctcttagtgtagaacgttaagagaaa

SEQ ID NO: 721189 - DNA, 800 bp, Homo sapiens
gggttggtctagcacaccagcatataatgagatgcttgatgaatggtgctatatggaatgtataaagcccacgcggtcctgagcagttgctcgaactggagacttgctggagatggagtctcgctctgttgcccaggctggtgagtgcaagggcgcgatcttggctcaactgtaaactccacctccgtgggattcaagcgatactcctgccgtcgagcctcccgagtagtctgggatcacaggtgggtgtcaccgacaggccagctcagctattgtattgttagccaagagatggggtttcacgcatttggcccacggctggtttggaactcctgatcttgcaaattacccacctgcctcaggcctcccaaagctgctggcatttcaggcgctcgcaggcgtttctgactgtgcggcgtgctgctgctcagcaatggtccgttgctcctgtgaaccagcctccttgccatgtccctggcaggcttgtgcctctaggctcccacctccctgtggagtcctgctggctttctcctatctcctatctgaatcctccctgctgtgtgggctcccctggtctcatccgtatcacagcccagtttagtgggcctctgttcctgcgggtggccagcctgtctgtgtggctgggctggggaggccacgtctggtatctgaatgctatcggtgggttgggggtgggaggaagccaggagagggctgcgagggagggagatggtctcagcccacagagtttgcagtctcagtgtgctgagcaaagtggagacccatttccctctctagac

SEQ ID NO: 721190 - DNA, 348 bp, Homo sapiens
ggcatcatgggtctggacagtgtgtattaggctgttttagagggaagtgcgttcacattgatttcctctctcaggcatacatgccctaaaaatgcctcgttgatcttaaaatgagcaactcagaattgttctgaggttgtgctgtggtgggaaatccgcttcttttgagtcttttgtggcttttttctttctttgttcttttggtataaggagaaccttggattaagaagcaagccatctgtcttgtagtcttgggccagcatcacggtccaggggaagccacttcttatctaaatatgtttcattcctgaaataagaggtgaccttaaatgacttctcagggacccc

SEQ ID NO: 721191 - DNA, 312 bp, Homo sapiens
ggacagcttcattaatagatttatacgcacctgtttctattgctccatttagtaataacaagagtcttttgagataaacagtctttggtttctacaaaaggtttttcttaaatttaaacacgattttgagcaatcggttaaattgcctaacaaataggtattatggttaagatacttttaaactgaataccgtaaaatgaaaactttataactactaatggctattaaaaaaaaggatatgaaaagcgaattaagaagcagaggttggtttggaaaaaaagataaggatggaattatttacagaagctgtcc

SEQ ID NO: 721192 - DNA, 283 bp, Homo sapiens
  misc_feature (121)..(121): n is a, c, g, or t
  misc_feature (131)..(131): n is a, c, g, or t
  misc_feature (259)..(259): n is a, c, g, or t
aagatccctgctgctcctcttagaaaacaggtgtggtctacgcagctccactctgcggctcaggcctttgaggcatatgcactcagctcctggagctgagagatgtctcttctcttcactntaccatcagnaaaaaaacaacttttatccagatccttctctgtgttagatgccaggagtgtgatgaagactctgctctggaaatgtcctgaggctgagggagggagggtgatacaaatcccaacccaggtcccactgngaagtcacatccttcaaatgcagg

SEQ ID NO: 721193 - DNA, 204 bp, Homo sapiens
atcggtaccaaccggggacacctttggtaaagtagtccctctcatgaaacttccgtagtcaccatgagttctcatctccattcttccaggatactgagtgacagacatatgcttgccatctagcagtcatattgaatggaaccctataagcgaactaatcctggcatggacattttctgagtatattgacggcctggaagcgag

SEQ ID NO: 721194 - DNA, 321 bp, Homo sapiens
gatgcttgttgctcgtctctcgcaggatcccctctgcatcgctaatcctttgtagttgccctattatctctcttccattcagagactatatagtcccgctgcaggctagcgatctggtgtatacatgacgaacctcaaccacagtaaaacactgtacagagttctttacaggagacaaaaaatgttactccagtctaaatattctaatttgaattttattttgaaatagggtctcactctctcgccctggctgaagtgcagtgatgctgccatcatatggttttcctttggtaatggcaccttcaaatgctcgtattgcag

SEQ ID NO: 721195 - DNA, 795 bp, Homo sapiens
gatggaggctggtctctgtctgaaagcagtgctctaccaagtcctggagatgaagggaattcactctgtttgcagaaaagattctgtggattaatacagaagcaccagcaacaccagaggggtggagactcctttctctcccgattctacagtctggctctaagcccagtaaaacagctcccgagcactgcttcagctgggtccagtcttgacaaaggcaggaagccagctagggtgggggcgatagggtcagcgggtatgtcccactgttggaggtcactggtattctgtggtaaggttggttcgtggtttttggagacagggtctcggtctgtcgcttagctggagtgcggtggcgtgatcatggcactgctattcttgaagcatccacccacctggctactttttctttagtgcagaggtgcactgtcttctttaaggtgggatcgcgtaagcatgagctggtaaggagcacggagaggcaggcagcagggttacgaaagactaagccaattattcactgaaagtcaatccttcctctcctcccaacaattcgattgtgatctacctctaaagccagggttgtgaagacaaagggagggcactttaaaaagacctcagcagtgtggtactgtgtctactttccatgagcgtgtacctgagtattttaagccaggcaagcttaggaacaccaccagttacttggaaatctatgtatataggtgttacagaggcacatgtgtcttcattatttgggccctgtggtccggtgatctgacactttgggaacatggc

SEQ ID NO: 721196 - DNA, 697 bp, Homo sapiens
  misc_feature (422)..(422): n is a, c, g, or t
gccacctggggccgaggagggtctcaatacgcgagttttccgggcaacaactggtgggctacgcgcgcagcgttgcacgaggattttgagcgcccgtctgcgccccggcccgccccccaaggcacccccgggcgcctctcgggtgactccgggctccgtggctgtcccggaccccccccctgttcccttgccgcccagccacaccggccgtaccgaccgcgggctgcccccgttgatgaccggcgtgtcccctttgcagcgcgcaccccggcggggctttggctgtgaccccgtcggggcgccggctgggctgtggccccccggcgcccgcctcctcctggtccctcgaaatcgtggcatctcacttctgagaacgaaatcttcgcgttcagtcactctgccgaaggcgctgacggcatccnggccggaacctcctgggcccggcccctcccaggggcccccgctcccgcttgggagaaacccgctcctccctttccctctgaaaactgagacgattattaaaatagattaaacttcgctggaaatgagtagccccggaagttccacggggagggtccccggtccttcccgggcctggcgtttcggaccaccccggtcccgcactgccgctgaggaaatgccaatatttgttgtgaccagaatcacaaacatttactttaaaaatagttgcccttta

SEQ ID NO: 721197 - DNA, 187 bp, Homo sapiens
cacaagcgcaagatctccaaatgagtacacactctctgtgagcactgccataatactagggagcactttgatcaggacggcatggtcacatgatggtactcagagtatcgcttcccatgaagaactcacatcagaacctacatgacgcagcaaatcacatcactggatctgtaccagcgacctggac

SEQ ID NO: 721198 - DNA, 1679 bp, Homo sapiens
tctctgctgcctctgttctgttggggtgtcctcaccagtacgtttttcgttttttggtgctgattcgcttgctggtgggttggtccgcccgtcgtgtgcgtctcccccctgtctatataaagtgcgtctttatgtgtgctcaccgccagttgcctggtggtggcgtctcgttttcccctgtgaagggtggcgcccgcagggcggtttgttttcatcgcgcgctattggttgtagtttttctttcacactgtgtgctcgtcccacgtggtgattaatatgactggatgtgttgttgcccccctcgggtggctcgctcacattggtcgcccccgctgcattaaatggttgtcctttgggtgagacccccatgtgtcgtaccatttgttgtcgtgttggtggcccctccgccaggttaggggggcgaccacacaagaaaccaactttggtcgccccaagtaagaagttgtttttgtgtttggaaacacacatctgttcttgtggggcttcttttagtctgcggtagtcccccatacatgttctgttgccccccctcctgctctggtttgtaaagtgggagtaaagttgtcctcgcccccccccggcggatatgtagatttctcctcgacgtgatattaatgagttgtgggggagacacccctcatcttgggacagaaagaaagcgggatcacccacttctttataagatggaggcgacacctctgtttcctcctgtgttggtcgcgaattatcccacttctggggcctttttttatccgaccacgtcatcgacttatgcgggggggataacacccccttctgtgagcaggagcagtggtggccacatcacatcacgccggtgggagaccccctcacgtggtcgttgttttcctggtgaagaatgttgataattgtttctcaacccctctggggaacaatatgtggagaccctcttggagaggagaaggttgttgacgcccacgagtctcattaatttgtgagagtgttcgccactctggttgaaattatattccctcttggggtgcgacacactatcgcacagtgtgtgcgcccggacaccacacagatagagattcttgagagagtggggggatatatacacacgcgacacactcgggttcctgcgcgcgagagtgagagagagagtttcatctgcggacacacagctggagcaccccgcagagaagagagagagtgttctacacctctccgcggcgccctcggagaatccgcgggctttctcttgtgttctctccacgccaccacattgtggttaacactctcttgggccgcaagagattttctcacacatgtccacaatgttctccccacagagattctcccacgcaagggttctacccacagatatctctctaacacacattcgcagaggaatagtcctccactctccacaattgttcacggcactattactcccaggagtatgccacgagaacacactcgcgggaacgcgccgcgaggcccgcgaatttccgcggagaaacgagccacaagcgcactccctcggggcttgctggaggaaactttctagaggcacccctggccctgcgcatcctggactctttccgcttccctcccccggatccctttttaccaccactctgtgtggcttttggacccaattaaaagctagttttggt

SEQ ID NO: 721199 - DNA, 225 bp, Homo sapiens
tagagaaacagaacagtggctaagtagccaagagcaagacatgagagtgtatagcagagtgccttgattagagtggtaacctagtcttggaagcaattcagtggatgtttcataaagaggactagaacttcaagaagcctcctgtgctggctgaggtgagcccttttggtatatgtacactactgggttgcctagaagccaattcatgaagaaaagagtgcttgg

SEQ ID NO: 721200 - DNA, 117 bp, Homo sapiens
tccccactgttgctcatcctcactgtgttctccatttccacccgtgaaaagctgaagaatgcattctctcttcagcttttcacgggtggcatcccccctgtgtgctcctgtgtgctc

SEQ ID NO: 721201 - DNA, 718 bp, Homo sapiens
gtccgccgaggtgctcggtggagtcatggcatgtgccctttgtggaagactgggaccttggtgcaaaccctgggacgaccggtgcctactggagaacgttcaaccttgctgtgaactagagtaactgaagacagcagtcgcagtgaagacttgtacgactatgaacgcgtgcccggtacgacctggtccacgagaacacctacttacacgacaacgacgactactggtactcaacgtaacacactggctaaactcactgacacacactggtacggtaccacacttgctatgcgatcaccacgcggacgacgaacggccagactacatcgcaaggtactactgaactatatgcgtcgggaagggtaccgtcgttacgttgggaccgggacggacggcttcctatcgtggaccgacgaaacgtacgaaagccgcaatgagagcattacgggcacttgaaccctggaggcccaggattgccctcccgaacgaactggcttgtccacgtcacagccttccagttggaaccacgggggtgcttgggccttgtacgttacgttggcacgttgcgttaacttcggggcaacattcacacccttccacaccaggtggaccttagtgaacacaacgcacgaacacaaaagtccgtgtccgtgggtatcgcgcactggcaccaacggggcacatacaccagccttccgcgacaaatactcttccatga

SEQ ID NO: 721202 - DNA, 177 bp, Homo sapiens
atggttatagagaaatggcaggtatagttttgggcaatgtgattgcatatgcaccttactaggagaagggaatggtgggtacccggtagtgctcttttgttcttgcttcgttttttttatacttgaactttacttcgttagatttcataatactttcttggcgctcgtaggacgcga

SEQ ID NO: 721203 - DNA, 226 bp, Homo sapiens
tgtgcgacgtgtacccacttacagcaatggatagatcaacagacagaaaatcaataaggaaacacaggcctgaatgatgcattaaaccagatggacttaatagatatttatatgcacattccaatccaacaagcaacagacatacacacttattcccacagtgcacacgtgaacattcatctaagacttgatcatatatctggtgacggtaacaccaccagtactg

SEQ ID NO: 721204 - DNA, 218 bp, Homo sapiens
gttctgggtcactctgaggatccccccgactagccgacagccggtggtggtagcagcgggcagctgcagagacggaggcgcaaactccccagtgcaggaggtgcttcagcccgaagtcttgcacttggcagcaccatcgcaggtagaggcttgggagggacgacattgtggacagatagcttgaggcagtgtccgtgatgcgtacacaccctgtcggg

SEQ ID NO: 721205 - DNA, 119 bp, Homo sapiens
gaaggtgaccctagagtatccccaggcaaagctcctactgtttgccagagcacctggcgaaaggattcatagctctgtaacaccaggcaggagtgcagtggcgcaatctcagcttactg

SEQ ID NO: 721206 - DNA, 160 bp, Homo sapiens
gcagcaggagagccttaggctgaggccagccgtgagtccacagatgccagctcagcttccagcttgggaaaatgcaggcaacagggaatttccttgggggagttttcttccactgtagagatttgatcaacccatggaggaggattcattatgatctttt

SEQ ID NO: 721207 - DNA, 470 bp, Homo sapiens
cgcggacaagtcttagcaaatatcagagttatacttactttgcataatgagtgaaaactagaagattggtcacgcctgtaatcccagcacttatgggaggccaaggtgggcagatcgctggaggtcaggagttcgagactagcccggacaacatggtgaaaccccatgtctactaaaaaaaagtacaaaaattagccagacctggtggcgcatgcctgtagtcccagccacttggcaggctgaggcaggagaatcgcttggacccgggagacagaggttgcagtgagccgagatcacgccattgcactccagcctggtggacagagtgagactcagtctaaaaaaaataccgactataccaataacaaaaaagggcagaaaaaactatatacgcttgtaatcaataaaaagatgatacatctcagcaggaaacaaacaaacaaagaaacacatgagggtcagccactgtg

SEQ ID NO: 721208 - DNA, 553 bp, Homo sapiens
gatgtaggcctggtagttcctcatacggagtagggtgaggccctagtcactgtctactgttaaccaaaagaggtgggcaggaacccctggcctacacacctttgccattgtaggaaatatagcataggcattacatctaaagcaagctttcctaatattactaccctgttcctaactaccaatggttctttttttttttttttttttttttgagatggagtctcactgttgcccaggctggagtgcagtggcgcgatcccgactcactgcaggctctgccccacggggttcacgccattctccagcctcagcctcctgagtagctgggactacaggcgccaatggttctttatttatgaaaagccccttgtaaaacctggttcaagtaaaacattttgtgatttatttaattgttgcatatgaataaatatagtttttaaaaagtatcagatgaaaatgtatatctatgaacttaccactatacttagaagtaaagttatcaacatctttcactcctctacatatttctccttttacccatttttctgtcctt

SEQ ID NO: 721209 - DNA, 943 bp, Homo sapiens
gatgtgggaataacatagagtcacgatcctgtaagtgccaaagccaagttggttggaggatgtggattttgaatgagagtcagagaaaaagctgggtatatcactccagttcctggagttgtgtcccatgataggggcactgctattgatgaatagccatgtatgttgcaagaagaggtgctgaggcttgaagagcgagaagtgcgtgaagtctaaaagagcttggggtaggcacataattaacatactgtgtcttcgtgtgtcacaaacgagtacgtccagtggcaggtcaagaagcaaagaaggccaaatagaaatgcagtattttgaatttatgctactgaagatggttgtacaagtgatgccttgtattttcatttgagaagcttaaagtgggtggggtgtactgcgcatacctcttgcgagtaagctcaccagggagcattccatgtatcatgcaagggtcctgtgatctagccaggagcaagcattaacctagtgattcaatatgggagaccattaccatatggaggatggattgcgtacatttgtcgagcacgtcagttgacaacattcgccttttctaggaatgatttcccaagtgcgtatgaataacagttggatactcatatgaggtacccaaacctttgaggttccactgatcaaaccaacaggcaaccgggctggtagaagaaacgttcgggaacagggtggacaccgcacacatggacgtactggggcaacaaaccataattctgattggtttggttggaccccagttcctccaagcacgggtgggctcggacaagcgaaacgggtgttcaatcccaggcgctcgggcgcagaccatgcgaactacgagatactggcaacacacgagtcccacagatacaccagtgccggaagagcacacacggcgggagggcaacaacacatgagggca

SEQ ID NO: 721210 - DNA, 326 bp, Homo sapiens
ttgccggtcctcagtcctctttttttttctcttccatgttttgttttggaattttaataagtactaagacagccgggcgtggtggctcgagcctgtaaacccagcactttgggaggcccagatgggtggatcacctgaggtgaggagttcgagaccagcctgaccaatgtggtgaaaccgtgtctctactaaaaatagaaaaattaagtgggcatggtgacacatgcctgtagtcccagctagtgaggtggctgagacaggagaatcacttgaacctggggggtggaggttgcagtgaaacgagatcacgccactgcactccagcc

SEQ ID NO: 721211 - DNA, 833 bp, Homo sapiens
  misc_feature (1)..(1): n is a, c, g, or t
  misc_feature (68)..(68): n is a, c, g, or t
  misc_feature (71)..(71): n is a, c, g, or t
  misc_feature (85)..(85): n is a, c, g, or t
  misc_feature (87)..(87): n is a, c, g, or t
  misc_feature (93)..(93): n is a, c, g, or t
  misc_feature (115)..(116): n is a, c, g, or t
  misc_feature (136)..(137): n is a, c, g, or t
  misc_feature (147)..(147): n is a, c, g, or t
  misc_feature (170)..(170): n is a, c, g, or t
  misc_feature (186)..(186): n is a, c, g, or t
  misc_feature (207)..(208): n is a, c, g, or t
  misc_feature (216)..(216): n is a, c, g, or t
  misc_feature (223)..(223): n is a, c, g, or t
  misc_feature (235)..(235): n is a, c, g, or t
  misc_feature (269)..(269): n is a, c, g, or t
  misc_feature (281)..(281): n is a, c, g, or t
  misc_feature (291)..(292): n is a, c, g, or t
  misc_feature (304)..(309): n is a, c, g, or t
  misc_feature (312)..(313): n is a, c, g, or t
  misc_feature (330)..(330): n is a, c, g, or t
  misc_feature (333)..(333): n is a, c, g, or t
  misc_feature (339)..(339): n is a, c, g, or t
  misc_feature (344)..(344): n is a, c, g, or t
  misc_feature (350)..(350): n is a, c, g, or t
  misc_feature (380)..(380): n is a, c, g, or t
  misc_feature (391)..(391): n is a, c, g, or t
  misc_feature (655)..(655): n is a, c, g, or t
  misc_feature (813)..(813): n is a, c, g, or t
nactattcttctacttagttgctatgttaatctatttgcttcttcagcaagttatcactgactcagtngtnggataatctaacanangatttnccttcttttggttctgtgggtnnggggtttgagcattggtctnnctgggctaangaggtgccagctgggctgccttnctttctggggactctnatggtgtttctgtttccttgnnttttcggnctttttntacaggtccccntctattccttggctcaaggtgtcttcctccttcnaagccacctttnaacttccttnnaaagtggttgtnnnnnnggnncaggatcactctgaccnccncttttnttttntttttnaaattttaaaaatccctaaaattatattangccctccaaantaattcaggataatctccccatctcaaggcccttaataacattttaaattaatcacttctgcaaaattcttttgcaatgtggcataacatattcacagttcctgagaattaaaaacattggcatccttaggcaaatctgcttaactttttcaatttagcttcatatctttttttactccaagatagaagagtgatgtttaaagtactcaagttacagccagcatttaccaattctttgattcgactttttaaagtacttatgcntgaatccagaacccgaggattttcgattatttgtgaaatgctaatgttttcttccatgagggagtgtattttatcattaaactttttctctgccaagaagatcacatctggatagcttaagaaaaacttctgtacctcttcttcagtacatccaaganaaacagctctctttgacgtt

SEQ ID NO: 721212 - DNA, 871 bp, Homo sapiens
  misc_feature (871)..(871): n is a, c, g, or t
gatctcggctccctgcagccttggcctcctgagctcaggtgatccttccacctcagccttctgagtagctgggaccgcaggtgtatgccaccatgcctggctgtttaaaaaattttttgtggagacagggtttctctatgtgctcaggctgggctcaagccaccctcccacctcaacctccaagtatgggttaaaggtatgagccattgtgccctgcctgatatgctatgtaaatgaaactgtgtaaataatttaaaatcaaaattataaactttggctgggcgtggtggctcatgcttgtaatcccagcacatagggaggctgaggcgggtggatcacttgatgtcaggagttcaagaccagcccggtcaacgtggtgaaaccccatctttaccaaaaaatacaaaaattggctaggcatggtggcgtatgcttgtggtctcagctacttgggagcctgacgtgggagaattacttgagcccaggaggtgggaggttgcagtgagccgaaattggaccactgccctccagcctgtgtaacagagtgagaccctggtcttcaacaaaacaaactaaaactttttacatctctcttcagaggcacaagcctggtaggtgtcaggcagaaaaaaggtgcgtactacaactctgggcgcacgcggatgttggcaaacaaaccgcggggtttcagtgcacgaactcaagcaaatttgccgtaagaagataaccgctgtatcttgacagctgtgtcccgtctccaggggtcacctggtcggacatggctgttccaatggcgaccatggccatgttctgggcatggtcacccagggtaaggttgcacgatacgacgagagccgtatgtaggatttcn

SEQ ID NO: 721213 - DNA, 509 bp, Homo sapiens
  misc_feature (200)..(200): n is a, c, g, or t
  misc_feature (272)..(272): n is a, c, g, or t
  misc_feature (305)..(305): n is a, c, g, or t
  misc_feature (318)..(318): n is a, c, g, or t
gcacgactagtctatatgcttgattatgtcagaaaggtcctttgacttcaactctactcatttgaggatctacctcgagtggaagtgtcaagtcattcttcaaaagggatttatctttacaattcagttttcttttgttcagaaatggcaaggcaatattttcatttcacactcttcgctggcgtttctgattctgtggnctgtctcccatctgtccaggcttcccgggtactctttagagccaaggtcttctgttggtcaacaacaacatnatccactctctcatctgctacactgctgcctgngccactgctcttntgctaaaacacaaagaaaaaacaaaaagtccaacatataaaggagtgttcctgagtacaactcagtcttaaaacacaaaacacatccactgtgaatactttttttttttgagaaggagttttgctcttgttgcccaggatggagtgcagtggtgcgatctcagcctgggcaacagagcaagactctgtctc

SEQ ID NO: 721214 - DNA, 792 bp, Homo sapiens
  misc_feature (82)..(82): n is a, c, g, or t
  misc_feature (192)..(192): n is a, c, g, or t
  misc_feature (198)..(198): n is a, c, g, or t
  misc_feature (223)..(223): n is a, c, g, or t
  misc_feature (375)..(375): n is a, c, g, or t
cccctgaaacaagtttcgagacaggaatcaagggttaaaagccacagtttcccaaaataggccttaagccaggcataacttnccgccagtggtgcctgaatgtgttcttcaagacctccacttggcggtgtccagaatgctcagcttgtagcccccatcgttgaacagctttataaagactcaagcaacccntgcacntgccaggtgttgaatgggcctaagnacacctgaggaagtgccgcacacggggtctaagactggcagtgatctcaactttgaccgacggctagagggcatcctgaagggccttggcctgcgtgaacacttcgactttgtgctgacctccgaggctgctggttggcccaagcgggaccnccgcattttccaggaggccttgcggcttgctcatatggaaccagtagtggcagcccatgttggggataattacctctgcgattaccaggggcctcgggctgtgggcatgcacagcttcctggtggttggcccacaggcactggaccccgtggtcagggattctgtacctaaagaacacatcctcccctctctggcccatctcctgcctgcccttgactgcttagagggctcaactccagggctttgaggccagtgaggatagtggctgggccataggccatggagataaccttaaacataccctggagacagggagccccttctttctccacagctctggacctttccccctctccatggggcctttgtcacctactgtgataataaagcagtgagtgctgagctctcacccttccc

SEQ ID NO: 721215 - DNA, 344 bp, Homo sapiens
gtcaaaagcaagcatgtaggtcttggtgtccctgaggctcaccgtctgcacattcaggtaggtggtgttatatatgcactggtcctgtcgggtctggtactctctgagaaagatcgtgtcctctgtcttgttgggggtaatgtaaaaagaggtcgttgtatctcgtgaaccgacttattgcactcctcgtttcaaagaggcctatgcgatataacccccttccagtattgtccagggtgctggttatgggcagcggttctaggttggcacacatatggtatctgggcttacagcagaggtaggaggctcagctctgtaagcacacagcacagcgccattctgag

SEQ ID NO: 721216 - DNA, 1237 bp, Homo sapiens
  misc_feature (408)..(408): n is a, c, g, or t
  misc_feature (708)..(708): n is a, c, g, or t
gacaggtttatctttctctcaccactcaatctatatatacctcttgtgggcaaggccagtttttatcactggagcctttcccctttttattatgtacctctccctcacagcagagtcaggactttaactttacacaatactatggctctacatatgaaatcttaaaaatacataaaaattaataaattctgtctagagtagtatattttccctggggttacagttactttcataataaaaattagagataaggaaaggactcatttattggaaagtgattttaggtaacatttctggaagaaaaatgtctatatcttaatagtcacttaatatatgatggattgtgttactcctcagttttcaatggcatatactaaaacatggccctctaaaaaggggacaaatganatgagaaactctctgaatgtttttctcccctaggtgaattcacctgctgcttagaagcttattttctcttgatttctgttataatgattgctcttaccctttagttttaagtttcaaaataggagtcatataactttccttaaagctattgactgtctttttgtcctgttttattcaccatgagttatagtgtgacagttaattcttatgaaaattatatagagatggttaaatcatcagaaactgtaaacctcgattgggaggggaagcggatttttaatgatttcctgaccaagcttnaccagtatattaatcctttgtactgttctttggtataaagaaaaaaggtactgtccagcaactgaaacctgctttcttccatttagcataccctttttggagacaaattatgcacagttgcaactcttcgtgaaacctatggtgaaatggctgactgctgtgcaaaacaagaacctgagagaactgaatgcttctttgcaaacacaaagatgacagaccaagactcccccgatttggtgagaccagaggttgactgtgatgtgcacttgttttcatgacaatgaagagacattttttgaaacaagtaagtaatcagatgtttatagttcaaaattaaaaaagcatggagtaactccataggcaaaactcttataagaattaccataacaaaaatattttcaacattaagacttgggaagtgtgggtcatgatgatcttttaaagaagtaggtattgatacgcaaaaatgtctacaaagcaaaacatctgatcaaggatattcttgaagtttattggaacagcgatccat

SEQ ID NO: 721217 - DNA, 249 bp, Homo sapiens
gccttcgggtgtccgggacggtgttttccactgggcgagggaactcataggacatagtggtccttctgctaagccgaagggctgccacgagtgacacagtagccagatcctgcaattccaatgagagcagccaatacagaagaaagcatcgcacatcgtttgccacagttttcatggccacagcagccacagcagtcatcctgttccagcccaatgaagacaaatgctggcaggagcaccaccaataca

SEQ ID NO: 721218 - DNA, 653 bp, Homo sapiens
gattaggtgaaagtacgtagtctgtcttgcgtaggttaaaatgataagtgggccgaaacttactgtccttacctaaaaggcagcgcagtcaggatatgggctaggtcgtggggcgggcttcggtaaacccttagagtttacaagcatgcgcggactgtgcagtgctcattaggtcgccgggcgtcctacgtgcagctcctggaccctgatgcccgggcgtgcgtgggccggtgggccctcggggaaaggttgcgtgcactcggggactccggtgaagcctgttcagccgtctgtgtcatgtggccatcttgagtctactctgtcgctctggtgccctatgataccctgagaacctgtcagttgtgagccagatggaagctgagctgaacacgattactgatggatgatggaaacataagactatcaaggaaatccaagtggtaatgggcgaagttgattcgagcatccggcaatggacttatcgtgagttgggggaaacgggtgtgccgaataatatcctggaagtaatcaggaggagctatgtcagatataggcctggaatatcgtgagaagtaatatttaaggtgggtccgtgagtcaattaaagtaagactgcttaattcataaaaggagctaatgcgagagaatcgaag

SEQ ID NO: 721219 - DNA, 954 bp, Homo sapiens
ggcggccaagcaggcaagaagaaaaagaacaggagcaaacggcagacgaaacgcacgaagacaacgcgacaagagacgcacgactgcacgccgtggggcacagatcagggctcagggtaacgcccctcagcgatggggcggcccgcatgtgcacgaggccgcccggtacacggaagtccgatggaggccagcggcggcccggaggtaccgcaggggtcacggtgtgccgccaaggcggccctctccaggtcaagacatatgggccaacatagttggcgggagcgcgaagacacaagccgtctgcaaacagggatggtttgtcaccttctcgatggagatacgaaatgtccgtcgtcaccgccaaggggggcccgccccctgaagacccaggaccaggagcacgcgagtaaagaaacaagacgcgtgacttctggatcaataccaaacgggtccacatgtggaagcccgagagtaggtgcgccccaagggagagatccacaacataagcatggcacctattgcctaactcatctggggaaacatggggtggaaatatggcagacggaccaggtgcccgccagcatgccccggcggggaagatgccgacggagatcccagttcaacccgccgccgagcccccgaccctatgggaaggggccccgcgaccgccaccatgagagggcttggcgaccccaaggccaacccctaagtgggcgacggctcaccacctcagcggagaccacaacgatcaggggcccctttacttgagggaaaccaaaagacttctatggtatgaggagacacagtggggcccacacacgtgggagctcgcaccacatctaggcggggcacgaaggccgcagggcgagtcaaagatgggggcccccaacctggcgcggttagccccacgcccggggcaaaccagcaccccggattttcccacaaacatgacaa

SEQ ID NO: 721220 - DNA, 412 bp, Homo sapiens
gttacagctcacttggagctgtgggtatgggcttccacaactaccaccactacctattccctatatactactctgcctagtgatgataccgctgtgcatatcaatctattcaccacattcttcattgattgcattgtcgccctctgtctggcctatgatcggaagaaagtctccaaggccgccatcttggccaggattaggagaaccggagatggcaactcctatagtggctgatctcaggtgtccctcaggttcctttttcataaaccagtcaggcagaggtttcaagtgtctgttgtattacctgactgcatactgctaccaggatgctaatgatgatcattttatctcattccagtacagtattcttttataattctagagtattgaatgccggctattctgcctttat

SEQ ID NO: 721221 - DNA, 92 bp, Homo sapiens
gaatccttggttatctccgttacccttttcttgctggatggaacagaaagataatcagggtgcgtgtgaacatcagacttccgcagacagag

SEQ ID NO: 721222 - DNA, 262 bp, Homo sapiens
gtcggggagggggaggcgggatgagaacccccccaccctcctcaaattattcagagggaaactcagatgtccagactaattttaacaaatgaccccccacgttcactcgggcacctggcccagcagtggcactcgccccgccacccccaagagaacaagagcgccgatgatttctagcaggcaggaagtcctgtgaggtgtcaccatgagcacctccccaatgtactagtgcgattggaataataaatttgataaggtggtg

SEQ ID NO: 721223 - DNA, 98 bp, Homo sapiens
  misc_feature (46)..(47): n is a, c, g, or t
  misc_feature (52)..(52): n is a, c, g, or t
  misc_feature (56)..(56): n is a, c, g, or t
  misc_feature (58)..(58): n is a, c, g, or t
  misc_feature (61)..(62): n is a, c, g, or t
  misc_feature (65)..(65): n is a, c, g, or t
  misc_feature (70)..(70): n is a, c, g, or t
  misc_feature (83)..(83): n is a, c, g, or t
  misc_feature (86)..(86): n is a, c, g, or t
  misc_feature (93)..(95): n is a, c, g, or t
gccagcaccaaccagacatctatgtacctctgtgccagcagccacnnagacngggncnaanngancagtncttcgggccaggnacncggctcnnngtg

SEQ ID NO: 721224 - DNA, 274 bp, Homo sapiens
atgctgcagtcgatctaaggatctccaccgcatctcagcatcaatataaatatcaaaatagtacttattttttttattgggccgggggtggggcccacccttgtatccccagcatttgggaaggctgaggtggaagaataacttgagtccaggagcccaaaaccagtcggggcaacatagtgcccccccttgtctaaaaatattttttttaaaaatatatgggctgtgaaaaatggtaattttataggggcaaaatgttggcagttagagcaag

SEQ ID NO: 721225 - DNA, 192 bp, Homo sapiens
gacgactctcggggtcagaatgtctggttgtccagcagactcgccgcgcgctccaaccctggataatcgcgtagatcgattaaagacacgcaagagggtcgatttgccgcagccggacgggccgatcagcgcggtaacgcgattggaagccagttcgatattgacgttgttcagcgcctggacacccttgta

SEQ ID NO: 721226 - DNA, 211 bp, Homo sapiens
cattaaaggccttggtagttttccttatgactgattgtggtaccttacacacacccggaaggcacgagggaatgggatgtactttggttctctcagtatttggaaagtggggcaataaccaaaacaactaacatttgtaacatcaccaaggaggggaaagaggtgtttgaactatttgaacaagtaatggctggaccttctccaatttagc

SEQ ID NO: 721227 - DNA, 427 bp, Homo sapiens
ggctttgcataggggcgaagccgagcgaggtgagcagatggcaagaaggcagaagcttccagctgtaccaagaggctgctcagttggacatgctgtagagaagctgcccaggtgcagaggaaacagtgtcccttgattcagccaataagatcacactgtgtccagcggcagtgggaccatggcggcagccaaagtgactggggaagtactggacattctaactcgcctgccaagagagtgtggaaagactcacaggcgtgagcatctcccaggtgaatcacaagcctttgagaacagcctgagccttcagccctcacagatgcccagcctcatagctgaatgttgcctgaatgatcctcctgttgcatgtaacccactgggctccctgagcatgtccattgacggtgaggtcccacccctcatctct

SEQ ID NO: 721228 - DNA, 134 bp, Homo sapiens
ggctagaagtgcccatagcagaaacactgggtacagctcctcagggttcccccccatccagattatagtaacctgatcgacacctatcacagcgtactccagttgacatgctggcttgcagatcacacgcggcc

SEQ ID NO: 721229 - DNA, 545 bp, Homo sapiens
agtttcattaggtcccatttgtcaattctcgatcttacagcacaagccattgctgttctgttcaggaatttttcccctgtgcccatatcttcaaggcttttccccactttctcctctataagtttcagtgtctctggttttatgtgaagttccttgatccacttagatttgaccttagtacaaggagataagtatggatcgattcgcattcttctacatgataacaaccagttgtgccagcaccatttgttgaaaatgctgtctttcttccactggatggttttggctcccttgtcgaagatcaagtgaccacaggtgtgtgggttcatttctgggtcttcagttctattccattggtccacttgtctgtctctggaccaataatatgcatgcagtttttatcactattgctctgtggtatagtttgaggtcagggatggtgattcccccagaagttctgttattattaaaaattgtttttgctatcttgggttttttgtttttccgtcgacgcggccgcgaatttagtagtagtaggcggccga

SEQ ID NO: 721230 - DNA, 354 bp, Homo sapiens
ggaagcagagacaggtcggtggggcgaggcctcagaacacccaggaggcttggacccacgtctcaggagaggagagactgcctgcccgggttggggagggcgcctctgtcctttaggagcccaaggccccgggagcttcccagtgctcacttgggctgcagcctgcagtgtgtgggtttcacttcctgccctgcccagggttagggatgttctgtcagacaggccatctccctgccagacctgggtctccacagactgtttcctgccatcttttcgctctgttgtgtggctccctcccgccaggtgtctgctgtgagacagaccacaggcctgcagacagttgccagccagaga

SEQ ID NO: 721231 - DNA, 746 bp, Homo sapiens
agggaaggggcttctctgtgctccacacttaccaggaccacttgtggcggtctggaaactacagtcctctaccaccttccatatgctccactggcctctgtgattccagcgagatcgttcagtgagagagaaggggtctgtccatatggactccaccctggcagggatacatgaggcacatgaccctggacgggggaagtaggagaatggggaggttcaccaggcacgtgaagacattgtctcctctcagaagccccataagacaccgggcatccaggggcctgaatccaatgactcctagcatgagtattggaaaacgcttcaagaacaaatggatgaagctgttagcagcaatgcttcttacgatgccttgaaggtagccgagtcaaaaaggctgacctccctttactcaccagcatctttccttggtcagcgccacatgttctccgtgctgccccgaaggacgacaagctggacataaagaagtcaagctacaaaaagctctctaatgttcctgcagcaaatgcagcaggagcgagattgatacaggtgaaggagctgagcaaaggggtgtgagagcattgtggctgtggactggaaacacccgaggattacatctttcgtcatacccgagccctccccgactcccagactatccaggagggtagcagggaacagccctatcaacctccaaatataaaaccctctaatgtgtccaacagatgacctgtcttccaggagttgga

SEQ ID NO: 721232 - DNA, 219 bp, Homo sapiens
gtcagtgggatgatgtggttgaatgggtgatgcggttgaacgggtgatgcggttgaacgggtgatgcggttggcaagtgtggagcaacccccttcaatgacaaggcacaaactattctgtgcaatggagacgatgaggggtgggacctcacgtgtcaattggacatgctcatgggaggccatgtggtgaggatctgcttgcagcccagtgagttcttgg

SEQ ID NO: 721233 - DNA, 122 bp, Homo sapiens
cagccacctgacgtgcccacctggacgtagcccacctgacgtagcccacctgaatgtcactacccccaggcggttggggtccacaagtgctcatgatgcgggcaaattctgcttctccctgg

SEQ ID NO: 721234 - DNA, 163 bp, Homo sapiens
cactctaccgatcttatgtagaccaggctgagtaggctaagtcgtagctggctgtaacgaggtcagcacaatgaccacatctcccttcttgaagaagcctcggggcttgccaacattcatggcaaagttcacccggaggtccacgtcctcagcgctgggtctc

SEQ ID NO: 721235 - DNA, 567 bp, Homo sapiens
gggggagaaaaccgcggaactaaggactgaagatgcctgtggacagaacattcaggtctgactcactggtggtgtgcgaggtacacccacagctaacagaaaagctgcggaaatcccgattccgaaatgagacagacaccgcagccataataatgaaggcggacatagaccgtcacatggtggtgctgaccgtagaatgctcagaacatttacccataggagctcaaaatggctgacccggtaagacacgccaagttcgaggattacagctacaaatgcccacatgacaagcggtaccaatgacctaccatttgagtcaagtaatatccagtcctgtggactggatgccacaacaaatcatgatgaatgcagggtgtacaaacaagctagtgcatacagcagagcttacaaaagtgttctacgcaccacttatgacctgactgaggactggctgcaagaaacgccatcgttcatgcgtagatctacgatctgaagactgaattgacgatgtgctaaacctcgtgactggtgacttggaccctctaggaccttaacaaccaagactta

SEQ ID NO: 721236 - DNA, 384 bp, Homo sapiens
  misc_feature (384)..(384): n is a, c, g, or t
gaaaatatgcctgaccttcctgagtcaaaaaaccttcacaaaaaacttcgaactcacagaaacaagtcagggcaccctccccatagggaaaaaacgtaaagtggcccacgaaatgggtgtcacgcctgtaatccccagcactttgagagcccgaggcaggcagatcacttgaggtcaggagtttgagaccagcctggccaacacagcaaaaccccgtttctaaaaaaaaaaaaattggccaggcgtggtggcacctgcctatagtcccagctacttgggaggctgaggcacgagaatctcttgaacccaggaggcagaggttgcagtcagccaagatcatgccactgcactccaccctgggtgatagagcaagactgtatccan

SEQ ID NO: 721237 - DNA, 368 bp, Homo sapiens
tttcacccaggctggagtgcagtggtggcaatctcggcttactgcaagctccgcctcccaggttcacgccattgtcctgtctcagcctccctagtagctgggactacaggcacccaccaccacgcccagctaatttttggtattttaataagagacggggtttcaccatgttagccaggatggtctcaatctcctgagcttgtgatccacccacctcggcttcccaaagttgctgggattacaggcgtgagcaaccatgccctgccgtcagtgaagagttgccttcactgccaccgtgtgaagaagtcttgggtgggctccaaattagtcacggataagggatgtggctctatgtagttaatggggaa

SEQ ID NO: 721238 - DNA, 305 bp, Homo sapiens
  misc_feature (305)..(305): n is a, c, g, or t
gatgactccgtgcgctttcgatttctcaacaatatcccgcaacggtgtgatgtatcttgactgggagcgcccccccttctgactttggctcaagcgcctggaatccgagcgattcaaaacatcacctgacgccaccgacgaagcgattgtcctcaccgttcaggaactgaactggttactcgactggtttgacctctggcgcaatcgcccgcatcaggttttgacgccgcgattcgtcgcctgattcggtataatccgaggcatgatttccatgcccgaagaccttgccgatgaccccgtggagn

SEQ ID NO: 721239 - DNA, 1258 bp, Homo sapiens
atcctcaacagcaccttcttcgaacccggcggacggcaggagaccccatactataccaagcacctattctgattattcgagttcaccactgacacagttatactacttccttcatacctagcgcagcgacttacggacaataatacttcaccatagttgataccacttgaaactagctgccgagagataaacaacgaagcacaatgtctggattaccatagggctcatgcgatctgaacgcctctgattactcaaatgggccttcgcatagggggtgtatattcgctcgtagaagcaatcaacccattcaataatatgttacagttagcgtatactacgaagcggattagtatctacctagcaggacgcctattattatctccaacctcctccacgcccttaacgcacttcacattaccactccgcccgtaaattctcacgcgaacgcgggggcagctcgagacacgcttactatattaaaggcgtgaatcctacagccccagacaatcagtacactaaccgcgcataaggcaaaagttactcgcaaacattcgcatttactaggcactcgacttacgctggcattctgcatgcgccccattagcgagattatacctacttcttattttctatctccttgcaaacacgtttcaacgcatggagcctcgaaacttgaggcaatatagctaatctcgagaacaaacaaccttctatactatctcaaagaaccattcggttcacttatccacccgaaacaccgcatcacgtgactggtttcgttaaatggcttcaaccctcttccccagtaatcaataggttccccttcaattcaaggacttatacgtgtacaggccagtgttcatttgtcgcggtctccaaatccaattaaggtgcaccgagaaccgtggtcaagtttcctagcctggaactttctaccgccggcttatatataccgccaaggggccatacacgaggccctttaggaagcgcgaaaaagttcctctaaccggtccaaaataaacactttccggcagttttctcacaacccttaaatttccacattccttttccaaattccgtgggccgtttacaaaatctccggtaacacctgttttcattttcccttcaccaaacatataatgtagtcttccgagacccatacttcccgtgtagaatggtcccccggaagggattgtacctcccggaacttacctccggaattgtaggatccggaccggacgatgtataggaccttcct

SEQ ID NO: 721240 - DNA, 442 bp, Homo sapiens
  misc_feature (155)..(155): n is a, c, g, or t
  misc_feature (267)..(268): n is a, c, g, or t
  misc_feature (278)..(278): n is a, c, g, or t
  misc_feature (285)..(285): n is a, c, g, or t
  misc_feature (296)..(296): n is a, c, g, or t
  misc_feature (367)..(367): n is a, c, g, or t
  misc_feature (383)..(383): n is a, c, g, or t
  misc_feature (432)..(432): n is a, c, g, or t
tcatagtcaaagccagttaatatttcttagaggaaagttttgctttttgtggcaacatttttatagcttgtgtgagttcttttttatttaatgatttgaaagcagtatttttgcacagtcgtgaccgtgtgtggtggcgtcactgtaaccaaagntatatgcaccagccccttgtgcatttattggtttctgcctgattttgtggcatttaaataggtccaaaatgcagaacctttgtgatcttctctttggaggactatggcagcnnacagacatgncccccgntgacctgcctngctgtggtatgagcatatgaccaaagagcaggacttctctgctctcatggagttcctgaagttgctctggnggcagggcgattacgnttatgaaacactaaccactgtgtaacatataaatctacccttagcaganaaaaaaaaaa

SEQ ID NO: 721241 - DNA, 142 bp, Homo sapiens
tgagctcatgctgtatcccagcactctggaatgctacgcgggtgggttgcttgaacccaggagtttggccaggctatggcaacatggcaaaaccgacctctacgaaaaatacacaacattagccaggtgtggtggcatgcac

SEQ ID NO: 721242 - DNA, 144 bp, Homo sapiens
gaagtgcaccacacgcatttcattattcatttcattatttcatttcatcatgttcatatcatgtcatttcgagccaggtgtggtggcgcactccagtcctgggtgatagagcgagtctccatcttgaagtgcaggaaacaagag

SEQ ID NO: 721243 - DNA, 209 bp, Homo sapiens
tgacaccaggaagacggatctatctttctgcagcataccccattgagttatctggatcccctgagactgacgaagaaccattaggcgaggagcaccagcacaatagcaccagcacgaatacccttagcaccagcacgaattcccttagcaccagcacgaatacccttagcaccagcacgaattcacttagcaccagcacgaattccctt

SEQ ID NO: 721244 - DNA, 628 bp, Homo sapiens
tcttatttaagaaaagagagggtctttttttttacccctgtcatcgcccggtgctgttccctctaacaagcccccaagattgtttttaaactatttgcacagagtttgtttcagtccccactccttgtaatcatgcgtgtggttgagaccctcccaggcgtccgcctccctttattcgaggaaaatttatttttacaagaatttagaaaggacaaacaaaaatttttctgcctgagatactctagcctctcaaacccgctgttcaccgcgaagagataaatgtgagagtttgaggaacctgttacttttattgtcgcggcacacctttttgtgtatggagattgatgcccagtttttcttccagcctgtgggatgcttgtgctgctgtccgccgcgtgtggaccatcccgccccctttgtttggaaatgtggctgtgcagccctgcttgcattgtcacgcccggtggagattccccggccacgggtggtgaccccagaaaaaagaattttttgggtttgcggttaatgggttcaggttcaccccacggaaaaaacccccctttggtttaacccataaaattttttcggcctggttttttttttaccaaaaaaattctgtaaaccccca

SEQ ID NO: 721245 - DNA, 1140 bp, Homo sapiens
aatttcgaagaatgattagtgagcctgaatacccagcatgccaaagtgttattgtcacatagcattttgaaaattttcattgtattgtagttgtgttttttgagacaagtctctctctgtctcccatgctcggagtgcatggggtatgatctcgagcgtcactggcagcctttgcctcctaggttcaagtgattctcctcccttagcctcctgagtagctgggagctacaggtgtatgccagcatgcctggctaattattgtatgtttttgttaaggtagagatggcgttgcaccggggtagggccaggctgatctcaaagtcctgagctcaagtgatccacctacctcagactcccaaagagctgggactataaggtgtgagccaccgccacctgccattaggatgggcaatctgcaagatttcattacttcaacatgcaacagatgttctcattcatggtctctgaagcttggagtaccaatgaacaacattaaggtggagaactgagttcaacaaaatgcccatctacacgggtcaacgatacaaagcaaagaaactaacactacactcgctgacatgcacacgaacaaaggccctacacactcaaacacacacacgcggcaagaaaggagatcccaccacagacgcaaagacacagcgcacacaatccagcgcacacgccaacacacaccccagacaaaccccgtacccggcaaaaacacactgcccagagcaaacggccccaactcacacaaacgaccgacgcgaacagaacgtcacaaagcaacacacacgaacgaaggcaaacaaccagacaaaacagaggccaaacgccaaaacacgcaaaggaacgagaggggacaccagagaaaaagcacgcacgaaacacgcaaacagggacgcaacgcaacaagacagaacagagaagggcagagaccaagacaaacgtgggagacgaaagccaacccaaaagaagaagcacagaacagcgaggcaaagaagcgaaaaaaggtataaaagcagcgagagagagcagagagagaaaaaaacgagcacgaacccaaagaccagcacaagagacgaaaggagagccaaacagaagcgacaccgtagccaccacagagacccacgaataccg

SEQ ID NO: 721246 - DNA, 664 bp, Homo sapiens
gtcagcaccagcggaatcaccccgggcaggcagtgccatcgcttcgacaccatcatggtgcccttcggcctgatctatatcgttcttcgccgtcccagttctaccgctcattgggtttagccataagatgaccgacagttccgggagctcaagcgagctggggagagtaggcccgcttaccaggaccagctggaccacgagaggggcaccaacccttgacgccgtggaaggcagtatgcctaaggcccattgtgttctggggcctttccatgttgcttgtggccttagcgcccttcccccttgactcttgtcctggccccagcctcaggggacagccttgcgccaggggggctgagccctttcagcacacggggcgcaagacgccatgggacgggaaaagaaggcacttttatacacgacgaacattcttcctggcacctttgtgaacaaaccgttggttctcttccttaaaacgaaaggaacaattttaaacaggggccaatttttttccccccatgtggattttcccttttccccccaggggtctttccccaaggtgtgtttccccaaaacatctatttcccattggggattgtgggcgacaaaacgcggccgagagttggttgtgtgcccccaacgagggtggggccccacaacaactccc

SEQ ID NO: 721247 - DNA, 187 bp, Homo sapiens
ctaagtacataacgggtcgaactgaggcgcggtctagaactgtataatacaacaaggtgacaggaatacgctgccagtactagcctggctaacagcaagtgctatcgacagctgggccagtatcagcaccggcggccctagggctaccgcagctacgagatatcgtaaatacataggtacataagtc

SEQ ID NO: 721248 - DNA, 430 bp, Homo sapiens
ggaggttgtggctgtaatgagctgtgattgcaccactgcgactccagcctgggagacagagtgggaccttgtctcaaaaaaaaaaaaggtttgcacatttcattgtatggaaattttaccttaaaaagaaaggtctaggccagagtgtagtgggtcactcgcggtagccccagcacttggtggacggcaggacgagtgaatcagctgaggtcaggagtttgagaccagcctcgctaacatggtgaaaccccatctctactaaaaacgtaaaaattagccgggtgtggtggtgcacacctgtaatcccagctacttgggaggcccgaggcaggagaatcgcttgaatccaggaggtggagattgaatgagccaagattgtgcattgcactccagcctgggcaacagagcgtgactccatctcaaaaaaaaa

SEQ ID NO: 721249 - DNA, 843 bp, Homo sapiens
  misc_feature (792)..(792): n is a, c, g, or t
taggacaccggtttactagctagctttacaatttgccaaaaaaggatttctcccggaccccatccggggttcaccctcttttccccccaggcttttggccctagtttataacaaaggaatgatgatgatttaaaaagtagttctgtatcttcagatatctgggtcttccagaaccctcgggtggggaaaggggactcattttgcacgggtcatttcccttgggagtgtaggctactttaacaagatggaaagaacctcttgggccagggaaacagccgagggtgtgtggcgcccagcagtgcttggacaccgtctcggacatcgggctgtgatgggtcgggctgccgttcatggtcagcacagtggccagggacaggggaagacttgactgcacagccaagggttttcatgatgattacagaatacacagggatcacttacaagcgatgacagatatggggcacacaggccatgcgcttacatgcctcgatcaggatgggatacatgcttggttagaaaagagacgagaaccctatttgtattaagagcaagaaccccgaagaatacggtatttccaagtaccggaacccgaatcttcactaagacatatacacatacacaacattggtttacaggtggatcacttcctctaatcccgtggttgtggcaggttcccccagtcacaattcgttttacggaaactgggttgggcgcaatagagacagactggactatgggtggtcacttcctgattgggggtgcaccattcgtgagaccccggaaccgtgtctncacgctggtacatccatgtccgcttcgggaaacacaggggtgcgcattctg

SEQ ID NO: 721250 - DNA, 1710 bp, Homo sapiens
tggtggggctcaattttaattgggaatcatttaaaaaaaaatttcacagcagccataagtgtggggtctcaaaaggaccagaagggtgtgggtgtggggcccgaagggagagggccaggtggaggtgtgggtgccaccagccacaggtgtggacaggcccaagggtgtggccagggaagacacgagaggcgcaggaagccgtgtgggcaagccgcaattgttccactctcaagaggcgggcacacctcctttttgtgcctataggagaggggagacagtggtgtgtctcccaaggccccagaagagcgacgccgctctcttctcgagggtcttcattctccaccgcctgttgggctctgtgtttatcgccccctctctatatggtctttctcccccccccaactctctgtgggaggccctctcctctctgttgtccaacatgtctccctctctgtatctctctctctgtggcgcgcatgttgtccttctcaacagcccctctcgccggtgtgttgtgcgcggcgggtcgccccagcatcatgtggggggcctcttcgagagagttctcctctctccctctgatggtgcggcgcacaacccatagtccccccgcggcgatagagctgtgtttgtcaaccgccggcccgcacaaggtggtgctgctcctcttccgcccgggacccatcttcctcctgcttcctccaaggcagggaggtctcctacttggtggtggtagttaggcggtcccccaccacaccatagtcggtggttcgttgttcgagtgacacccggctctttgttgcgtctcttccctcaccccccggcacacaagcaggcgccacccttcttgcctgaggcggccattctcaagcgaggaggacgacgtatgttgatgggagggcccccctggtttgtacgacctcccccccctgattggttggacggcagctacttctcttctctctggcggccggcgcccaccactccgtgtgaggagagcggtcttcctacacagcgtgccgtcctccctggttggttgtcacacccaaccacacctctatgttctgttcttcctccctcagtgtgtgtggagggcacccctttcggtgggagggcgttcttcccccgccccgacacgatttcatacaaactagtggttgtaatatcccgcgccgcggactcttcatctcgttgtgggcggggctcccttactccacctacgaacagggcgtggtggcgatcttctccccgcggggaataacaaatccccccccctcgtagttgccatgctagcggccgttgctcttattaattttccaccaaccaccatggcgatccgccaccaaacacaaagagcgggccgcccagctctccaccgtttgtgggcggcacgaggcaaacatttggatgcgagcagacaaacaacgtgcccccctatgtgcgtccgttttgctgaagacacgaacaccgcgttcccccaagactgaggtagtggggcaggttggcttatgacaccaggcggaggactatagagaatgacgctagtggcaccttagtcaacatgaggctcaccaagtgcaataaacgtgagaaaacagtcctgtgggaggtaaactattccatcacccccttgttgtgaaatcaaaaacctgatgtgcatagcgggctacgttagtagcacgacgcagtggtggtgaactctatcaacag

SEQ ID NO: 721251 - DNA, 696 bp, Homo sapiens
  misc_feature (485)..(485): n is a, c, g, or t
  misc_feature (606)..(606): n is a, c, g, or t
  misc_feature (644)..(644): n is a, c, g, or t
  misc_feature (693)..(693): n is a, c, g, or t
tgcatttctaacagcaatgaatgagagttcctgttgctccacatccccaccagcatttggtggtgtagtgttttgaattttggctattctaataggtgtgtagtgctaccgcattgttttaatttgctgtccctaatggtatatgatgttggtcatcttttcctatgcatatttgctatctgtatatattttttggtaaggtgtctgttaagattttttccctttttaaaataggatttttttttattgttgaatttaaagagttctttgtatattttggatacatgtcctctatcagatatatgttatgcagtattttttcccagtgtgtggcttgtcttttcattctcttaacaatgtcttttgcagagcagaagtttttaattttaatgatgtccagcttatcagttttttctttcatgagtcatgcctttggtgttgtatctaaaaactcaatgctaagaccatggtcacttagattttcntgtatgttatcttctagaagttttatgttttgcattttacatttatgtctgtgatccattttgaggtaatttttgtaaaagatgtgaggtccatgtctagatttttatattttattttaantttgttttgcacgtcaatgtacagttgttccaagtacnatttgttgaaaagaccgtccttttccccattgggatcgcctttgcttcnttg

SEQ ID NO: 721252 - DNA, 767 bp, Homo sapiens
  misc_feature (20)..(20): n is a, c, g, or t
  misc_feature (22)..(22): n is a, c, g, or t
  misc_feature (24)..(24): n is a, c, g, or t
  misc_feature (28)..(28): n is a, c, g, or t
  misc_feature (31)..(31): n is a, c, g, or t
  misc_feature (35)..(36): n is a, c, g, or t
  misc_feature (38)..(39): n is a, c, g, or t
  misc_feature (42)..(42): n is a, c, g, or t
  misc_feature (693)..(693): n is a, c, g, or t
tcggcatggtgcgtggctgngngnctgnttncggnncnnagngatggggcacagcgaggcgctagggggaacgctggcctctgaaactagctctgggaccggggtctgcggccggcccctagctggccccgtctcccatccccagaagggtattcactggggattctgagctttggctactccagtttcccacgacacgatgttccctttctacagctgctggaggactggactgctactactactcctggctgtggcagtgagagaatcctggcagacagaagaaaaaacttgcgacttggtaggagaaaagggtaaagagtcagagaaagagttggctctagtgaagaggctgaaaccactgtttaataaaagctttgagagcactgtgggccagggttcagacacatacatctacatcttcagggtgtgccgggaagctggcaaccacacttctggggcaggcctggtgcaaatcaacaaaagtaatgggaaggagacagtggtagggagactcaacgagactcacatcttcaacggaagtaattggatcatgctgatctataaagggggtgatgaatatgacaaccactgtggcaaggagcagcgtcgtgcagtggtgatgatctcctgcaatcgagacaccctagcggacaatttaaccctgtgtctgaggagcgtggcaaagtccangattgtgtctacctctttgagatggatagcagctggctgttcaccagagatctcaacctcagtgtggggttcca

SEQ ID NO: 721253 - DNA, 153 bp, Homo sapiens
gagttgccgtcatttacataaatattatacacatttaacatctcacttctaggaatactagtatatcgctcacaccgtcatatcctccctactagtgcgctagaaggaataatactatcgctgttcattatagcaactcgaaagccccaagcg

SEQ ID NO: 721254 - DNA, 367 bp, Homo sapiens
gcctagcttacttgagtatcccctccttctgaccacgcgaagatgtagagacctatcacttgctgggccagctcgtatcgccgaggatcagtgcgtaaagcgcaccgctcttgtcggcttcttgaactggctcttgaagctaccagcgccggcattgatctgcaggcgcaggttgggcaactggtcacgtactttttcgctcaaggccagggccgccagttcggcagcctcgccgaaaagcgcacaggtacacgtccacctgacgggaaatcacttccggaacctgctccaaaggtttccagcagcaggatcagccgctcgatgcccatggcaaatgcctacgcccgggtgccttggccagaaagga

SEQ ID NO: 721255 - DNA, 140 bp, Homo sapiens
ttcggcacaggcctcgctgcatcccaagcatgtgtaccgcgtgctgcagtggtgacgcctcctcctggcactgacagaaacttgtgacctgggtgaccgtgtagtccttctcttccatccggtctttgatgatgcggatc

SEQ ID NO: 721256 - DNA, 380 bp, Homo sapiens
cgatgggtctggcaggcagagacactcctcacttcccagacgggatggcggctgggcagaggctgcaatctcggacactttgggaggccaaggcaggcggctgggaggtgtaggttgtagcgagccgagatcacgccactgcactccagcctgggcaccattgagcactgagtgaacgagactccgtctgcaatcccggcacctcgggaggccgaggctggcggatcactcgcggttaggggctggagaccggcccggacaacacagcgaaaccccgtctccaccaaaaccagtcaggcgtgcaaccgggtgcctgcaatcgcagggcatcggaaggctgaggccagagaatcaggcaggaaggttgcagtgagccaaga

SEQ ID NO: 721257 - DNA, 872 bp, Homo sapiens
ctgtgaccttgccttgacctcagactttacataaagagcaaaaaaaaaaaaaaacaacaacaacaaaaaaagccaccccaagaaaatctctacaaggaatgcatttctctgaagtcctaagcagtgtgagtttagtggtgataaactccagaactttctctcatttgatggtgtgctgccatcccagttcattattttaatagtgggctttaaaactagaattaggtttcgcaagaggtaggggtggtttggataaaaatggtacaaaagaagtcagagaacataagattgaaatgtccctaccttaggagaggtaccagatgcccttatgagcatctaactctttacaccaattttctctctttgcaactgaccaggccgtggtggctacgtatggtccctgaaaactctgctaatccccccatgaaaagatgaactggagtgtccacctgtggtaaaacaggcaaacataatctcacctcagaaaccccaagcctgtgtactcaaaggtcccctgggggtcacaggtttcccagcacgtgaggctgcacatagagcactggacggagaactgacggagtcccattttgccaagatctagtttacctccactgcgatccatcttttcctcttcctaaacccccccttttcatttttacggaatacccgattttgtctcactttctgtgtcacaggtttattactgcccggagacgaattttgcggccatgtatagacctgtccacccgtgcattctgtccggacccctttaacctgttggaaccccaggcgagtttcgatgccgtcgcactttggattaccccagacctgggtgatgctgcattgctgcggtgtggtcctgtcttctgtcc

SEQ ID NO: 721258 - DNA, 234 bp, Homo sapiens
cgctagaggatccgccttcatcatacctaccctcacacacacacacacacacacttcacaaggactgatatttttactatgtccatagttttgcctttgcagaactgccacgtagtggaatactacactatgtaggtctgcttagattgaattctttccattagtaatatgcacttagggggtaggtatgacgaaggaggtaggtatgatgaaggacggggtaaccgagctcga

SEQ ID NO: 721259 - DNA, 128 bp, Homo sapiens
taactggggcccggttatgtcatcatccaagatttccacagacactcataccagttgggattaaagtctcgagacaatactctatcaaagtattcctataccactgggctatgcagagcaagcgagga

SEQ ID NO: 721260 - DNA, 821 bp, Homo sapiens
tgaggtgccgccgccaataatcaaggtggtttgccaggttcgccccacattttcagggctttttatgggcccccccacgcgtagtaagaagagttgaaaaaagtggccctccagcacccgcgaatgtgtctacgtgcgaggttactggagggaccccaacaatttctcgcgagccagaggcttttctccactgggaggagagtagacctcccctcgcagtggacttatgccggttcaaccgtggttatccctcagcgctcccccaacacacatcaagagggagggatacgtgcacctctcccccaaatggtgagggagaaagatggagcccacccgggccgcccaccgatgcaaaacagaccccaaacaggggggccccaccacacatggggggggggtcaccacacgctcccgtgcacgagctctaacatgtaggcaacaacagtctctgtgcccacacgttattgtatgtttaataacccgcacaattttccggcgggtcgctcacccactatggggaggtcctcgtgcaaaaatccttgtcccccgggaggcatctccccccacgtagcgctccacacacgggggttggaggaagagacggccacgagtcagataactcatagtcgggaattcccacgcgtaagccagaaaggttagtggcgcacagactttgaggctaaaaaagcgataaattttagtatagtttgagaataataccaagggtagtcgcctacgtggtacaaaagcagcaacaccccgccaggcttgaagggggaaagtagccaaaacaccgccaccctccggacaatacaaagaca

SEQ ID NO: 721261 - DNA, 1022 bp, Homo sapiens
gggccggagcgtggaattcttcttgggaggcagtgtgggatcttcttccagcagggtgacctatgacaaggctagtatacagccggggtgcgccactccatagctgtgcgcctgagtttgcgagaaggacccaatatccaggatttcaaggagtggcttcactactcatgtgcatccatgtaaccacgctcatggcgtttctctttgatcatagaacgaatcttgagatgacaccgtttgcttgcgccgtctggggacgagtgtagttgtcgaaataggagttgcatcgaatttgctgcattctggatcactggtctggatccggggatccaatataacgttataaactgtgtggccgtcatgagagggcaggagcgcaatgaagatctctctagggagatgcagatgaacacatgtagtgaaaatcctttctctctaactgtaggtacaagaggatgatatgactcgcgtgcagagttaaaggtggtgatgatataggaaggaattaccgttccgtagcacatgtcttggccatcgacacgtgaaggtatagggttgaccactgagagacgattgacacaagatgtaatggcgccatgttgcacccttgcatgtgaacttggggaactttggggtacgagagatgacctgggctgtgacaataaatcatgccaaaggaagaacgacaagcgactacaggtagagtgaggctcagcatgatggagcactgaggcggctcgataattggatgaagtggtaccctagtccctgatctgtgtcacgcggagttcacgtcttctgtgcctcactagtcagtagcatgggggtgccttgtaatcacactaccatttgctatgacgctggtgcatatgggaactcggggacgacaatcctacagttggatctcacaaaggccagtaccagaaacaggagcaggaaggcaggattgacgaaaagagagaaagacaaagaatggcggcacacacgagaaataagccgatagggcagacgatagaaagaag

SEQ ID NO: 721262 - DNA, 416 bp, Homo sapiens
accaagaaacacgtccattatcctctcttccccagaggcaaacccttttcctcctttgccgctagataccacttcgccctctgactgtgtcccacctccagccctcatctgccagtgaagtccagctccatgatctgacaccaccataaaacgagccccactctggacgcctgaccctatccacccaacgtgtgcccagagcacagggagttccgtgtagaggtgcaagacctggggtcttagtgggactaggacgtgtgcatctgctaccaggtggagccagccccaggtatgtacttgaaggtaggctagaagcaaacgtgtggagtctgaggtcctggccagctaccgtgagagccccaatttcactgagcttgtcaggcatctgacagtggacttgccggagcagccttact

SEQ ID NO: 721263 - DNA, 639 bp, Homo sapiens
  misc_feature (105)..(105): n is a, c, g, or t
  misc_feature (134)..(135): n is a, c, g, or t
  misc_feature (137)..(137): n is a, c, g, or t
  misc_feature (169)..(170): n is a, c, g, or t
  misc_feature (185)..(185): n is a, c, g, or t
  misc_feature (222)..(223): n is a, c, g, or t
  misc_feature (227)..(227): n is a, c, g, or t
  misc_feature (232)..(234): n is a, c, g, or t
  misc_feature (266)..(266): n is a, c, g, or t
  misc_feature (280)..(280): n is a, c, g, or t
  misc_feature (293)..(293): n is a, c, g, or t
gtatgtgtttaaaaaacaacttttaagtgtggacactggatccccaatatctaaaaaatcatttctaataacaaacacaagtttttgaggaaaaaaaactgtttnaaatatagacaatggatccccaatacctnnanaaattatttctattaacaaacacaagtcttgnnggtggggtggtgggnaggaccagaaagagcagcttcgaaatgcagggaagcnnagtnaaatnnnaaagaaaaagtaactcaagtttactaatactnaaactttcaacagncaaagtttcaccnttttagaatctagagcaactcatttggaattttaaataaataagcttaagtttatttatttagaatctagagcaactcatttggaattttaaataaataagcttaagtttattcacatcttctggtccaagcagagttctaggaccatgactctgcttgctgttggtcaaattcacctattagccttttgatgtgagccagcttgttatgaagatattcacatctgtatttttcttcatggttaattgggactagactgctttatcttctgatattcttgtaagacttcttcatgaacattctgatactcttttgagcctggagaaaggcgctttctttgtgcatc

SEQ ID NO: 721264 - DNA, 580 bp, Homo sapiens
  misc_feature (105)..(105): n is a, c, g, or t
  misc_feature (134)..(135): n is a, c, g, or t
  misc_feature (137)..(137): n is a, c, g, or t
  misc_feature (169)..(170): n is a, c, g, or t
  misc_feature (185)..(185): n is a, c, g, or t
  misc_feature (222)..(223): n is a, c, g, or t
  misc_feature (227)..(227): n is a, c, g, or t
  misc_feature (232)..(234): n is a, c, g, or t
  misc_feature (266)..(266): n is a, c, g, or t
  misc_feature (280)..(280): n is a, c, g, or t
  misc_feature (293)..(293): n is a, c, g, or t
gtatgtgtttaaaaaacaacttttaagtgtggacactggatccccaatatctaaaaaatcatttctaataacaaacacaagtttttgaggaaaaaaaactgtttnaaatatagacaatggatccccaatacctnnanaaattatttctattaacaaacacaagtcttgnnggtggggtggtgggnaggaccagaaagagcagcttcgaaatgcagggaagcnnagtnaaatnnnaaagaaaaagtaactcaagtttactaatactnaaactttcaacagncaaagtttcaccnttttagaatctagagcaactcatttgattttaaataaataagcttaagtttattcacatcttctggtccaagcagagttctaggaccatgactctgcttgctgttggtcaaattcacctattagccttttgatgtgagccagcttgttatgaagatattcacatctgtatttttcttcatggttaattgggactagactgctttatcttctgatattcttgtaagacttcttcatgaacattctgatactcttttgagcctggagaaaggcgctttctttgtgcatc

SEQ ID NO: 721265 - DNA, 348 bp, Homo sapiens
  misc_feature (84)..(84): n is a, c, g, or t
ttgagcagttcttggagtccccgaaggtctggcagctggcccaagtgagcatgttgatagtctgtgcagagctgaggtggctgnagggcagggctgaggtgggccaggggcaggtggtggtggtgcgtcaagagcaggtccaggtggaaagtgagtcacgacaatggctgcagcaggagcagcagctctgtgtgacaggtaggtttaaccaccgcgggccagggagaaaaatcctgttggcaggtacaggagggagagcaggcctggtaaagagcaggacaacatcagctacctgtccttggacctagtcccataagtacccccagagcagcccaccagtcagtacac

SEQ ID NO: 721266 - DNA, 270 bp, Homo sapiens
  misc_feature (101)..(102): n is a, c, g, or t
  misc_feature (186)..(186): n is a, c, g, or t
  misc_feature (246)..(246): n is a, c, g, or t
ggtagtagttctcaggtcggcgggctgttgtggtgatcagagtgggagtcaggcgggcttggccggacccggagggaggaacacgtcccacggggtgtttnngcggctccgacggctctttgaccttttttttttcccggcagagagagaccccgagtcccccgtagtccgactcgctacgcggcncttgcgagatatctggccgcctctgccgcagctggaggcgcccctggtgtaggccctgangccctacgagattcacaccgtctt

SEQ ID NO: 721267 - DNA, 177 bp, Homo sapiens
ctaaggatccggtcgacgggatacaggcgtgagcactgcgcaggtggaagttattacttctgatttcccagataggatttgctctacatgctgttgatagtcatcgggtgttttgtcttctgcatactcagataagggattttgtctctagggcctgttcagtggtcaccaagtgat

SEQ ID NO: 721268 - DNA, 425 bp, Homo sapiens
  misc_feature (402)..(402): n is a, c, g, or t
cacaatcacgcaaccatatcaagctgaaaatgtcacccctatctggagagttggacatgttttattgggaatatattttttatctctgactctgttaccgaacgcattggttggctaggttcggtaataaatatgtgaaacattttatttaaaaaaaaaaaacgtcgtgagccactgcaactggctcttttaaatgtaattttatttatttatttatttttgagcctgttttgcagcctttacaaaaatcagggttttcccacaagatcatgaagattttcatataagggacctctgaccatttgtgttgggcgttggcagtaaaggtcaaggcagggattaaggtaattaacattccaagctccccacctttgggccagggttcctgcctttctagttccnattttgggccaaacctagctact

SEQ ID NO: 721269 - DNA, 224 bp, Homo sapiens
gggatgagactggctgttactacgcgggctagtgtgagtgctagaagagtatgcaatgagcgcttttcggtctgtttgtcgtatggcgatgagcttgttctaattatgcctcctagggatcgtacaaggcaggggtaggctatgtgttttgtcacggggttgcgactgagtgtgaggtgtattataccatagccgcctagttttaacgagtactgcggccagtg

SEQ ID NO: 721270 - DNA, 1715 bp, Homo sapiens
tgaggtccaagagtttggagtttgtgaggtcacgaacttcacaaactccaaactcttgggcatcagtgctgaaggtgaggtcatagcctagtgtgagagacagtcagtttgccagcgagatagaccagacctaggatagcaagtggtaatcatctcattcgtccactatctgctatactctgacgtgagcgttgacgcacagagtttggagttttgttgaagctacgatgaccctcaaacagcgccaatcggggaccaaaacaatcaaagagcagaacaagagggagcaataacgaaagagagaagtagatacaccgctgcgacatggccagaactaagagagactgacaaggagcacactacacgccaacacacgaaacggacagagacaacaaacgactaagaaaacgcgccataacatactgaaagcactccacataccagcaaaaagacaagaccacaaacaaaaagaaccagatacatatacaatacatagacgacacgcagaagacaatacgcacgaccagcaaacaaaaactacaaggagacaatgcacacgaaccgacgagctgaccactacgcaatagcaatcatcggaacacacattcacacacacacagtgaaaaaatacacacgaacaaaacggataacacaaagaaacacaaggtatccgataacgatcacaaagccaagtcacaaagaatgacaaaccaatagggaaagcaagaaaaaatagaagaattacagttagacaggcaatcaaaaagcacatgagaccacagaagaaaccaacacgaacagcaccaatcacacacagccacaacggactcaacagacggagcgaaaacacaacaacgccaacacgggaaacaagacccacatatgaacaaacaggagacaaaaaatggcaaaagaggccaccaaacaaaaaaaagaggcaacatgcagaaaatgagaaacaatcaccaacaggcacacagcgtacacacacagagaacaccgaaacaacaagaaaagaacacagcaaccacagggcaccaaacacacaaaaaaaaacgagagcgaggcacccagactcaagcgagacaagcagcacaaacagcagccagcgacgaagacagtagcagaacacaacacgaacatagaagaacaaacacagacaagacagtaacacagatcaaaggaacaaacaacagacgaatatggcacagcaaagaaccacaccaccagaagcagcaggaacgagaagcaccaacacgaccgacgacaggcagaaacacatactacacgacaccagcgaaagaagcacaaccaaaaaccgaagagaccacacgacgcaggaacgacagaaggcacgacacataagaggacgacacaacggaccgcacaagagatcacagacatgagaaagactgatacaccgaaataacaagaacgaacagagaccacacaatgcaggaacaaacgaggtagaagaaaacacaagacgagaacacactgactaagagagacaaatatacaaacaaaaccgaccaatacaaacacaaagcatacccagccatcggtcagaacaacacacactctatacagcagcagcccaacagaacgacaaacagtacatatggcacagaacatgcaagcaacggacacaacatgtgaaccacaaaaacgagcaaactaagagccgaacacagaacacacatcaaccacagcat

SEQ ID NO: 721271 - DNA, 379 bp, Homo sapiens
  misc_feature (53)..(53): n is a, c, g, or t
  misc_feature (62)..(62): n is a, c, g, or t
  misc_feature (83)..(83): n is a, c, g, or t
  misc_feature (95)..(95): n is a, c, g, or t
  misc_feature (117)..(117): n is a, c, g, or t
  misc_feature (138)..(138): n is a, c, g, or t
  misc_feature (269)..(269): n is a, c, g, or t
  misc_feature (276)..(276): n is a, c, g, or t
  misc_feature (303)..(303): n is a, c, g, or t
  misc_feature (308)..(308): n is a, c, g, or t
  misc_feature (338)..(338): n is a, c, g, or t
  misc_feature (343)..(343): n is a, c, g, or t
  misc_feature (375)..(375): n is a, c, g, or t
ccaaccgaaccccctttgaccttgccgaaggggagtccgaactagtttcaggnttcaacatngaatacgccgcaggccccttngccctatttttnatagccgaatacccaaacattnttataataaaccccctccccnctacaattttcctaggaacaacatatgacgcactttcccctgaactttacacaacatattttgtcaccaagaccctacttttaacctccctgtttttatgaattcgaacagcatacccccgattccgttangaccaantcatacccctcctatgaaaaaacttcntaccnctccccctagcattacttatatgatatgtntccanacccattacaatttccagcattccccctcaanccta

SEQ ID NO: 721272 - DNA, 113 bp, Homo sapiens
gtgctctggaacttctgaccaagcagcttcaagttggggttctcatgagcccccgcgttgggttcaattaattttgctacagcagctctcagaacttaaaaaacacaagcacg

SEQ ID NO: 721273 - DNA, 191 bp, Homo sapiens
ggatgaccttgcccacagccttgcagcgcagttagaggcagggatgatgttcttgagagccccgcggccatcacggcacagtttcccggaggcccatccacagtcttcttggttgcagttattgcattgacttttgtcatgagtgccttccaggtaaccaagttgtcatggatgaccctggcccagggtgc

SEQ ID NO: 721274 - DNA, 112 bp, Homo sapiens
aaggcagttatacagactcaaagctgtcacgaataagaatgtaatgctatgcatgcgactgttgattctagttctctaaacctccacatgtacactcctacctttccactcc

SEQ ID NO: 721275 - DNA, 480 bp, Homo sapiens
  misc_feature (10)..(10): n is a, c, g, or t
tttgggtttntctccccccctcaccaaatctcgcccggcttgtttcacgcccctttccccccccgcccaggggcgggttgttccccaaatggttttccaaccccgcgggttccaaaaacgggtgttttccggggggttcccaatccccggggggggttttttaaaaccccccagagccccctcgcgaccccttttttgccggttgtttcccccttagaggggcccgcgcccaactttggcaccccttcttttcctaaagggggtggccccattttgaggggggaattttctcccttgccccccctcttgaaaggggttttccgggaaaaaaaaaaaagggagatgtggccaagaagtatccctttgttgaaggctctggggcccccctttttgaggggggttaacctctaaaaaaacatttttaaaaatttttgggccgggggggttttccttttaaaaaaagtccttttttttggccca

SEQ ID NO: 721276 - DNA, 814 bp, Homo sapiens
tccacttcagactaaatttaattaaatatgtggtcttgggctacaatgggtttgtttttataaaattagttacacttatttggtgttaaaaacaaccccaacccattgcccctcttgtggcagcccttgaaaactcagttcaaagctaggccgggtctccctggccagtggccccttgtgcttagtcggttcacgcctgctggagcgctctaggaagccttcccaatgtcccaagtgtccaggcccccggtagttccatcacgctcttgcctcgaagacagctcaagcccaggggcttgggggccgcaggttatgacggcccctccgagtgagccacactctgtgtcagggctgtgccctggggtcctggcgaaatccccccgtccccttgaaccgtcaggaacggggacaaaatcgcgcaccaaaggtgttgagcacagggggcgtgacatccccattctgagccggggagaccctaggggacgctggagaagccgggcagagaaccccgggtggggctagtgtacacgggatgtcgcaatggcacttgggtccatcaagtacaaaccccccacactcttagccagaatgtctgaaacctccggcactccccctggaacttggtgggggcagaaaaaagggctccaaggacaggaatggaacaaacccggggggggacgccccacaaattgagggcgctctgaccgtggtacacccattggcaaccccacccagaaacagcctcaagtggacgaaggcaccaggaagccaggaatgtccagaccaaagaagcgcactctgtcataccacactg

SEQ ID NO: 721277 - DNA, 254 bp, Homo sapiens
ccggtagattggacctcccaaataccaacactttcatttttcactcttagctggaatataaatacatctgcagtattcctaatctttttctattatattgtgattttttggaaaaatcccctccaagaacccctggtggatgggcatggaataataccgggtgcaacggaaacatgtgcttgataggttaatcccatttcgcgggccaaagcccccccaagttgctcagacctttagtgcgccgcactttttgc

SEQ ID NO: 721278 - DNA, 396 bp, Homo sapiens
tacaaactgaaggtttgtagcaaccctgcatcaagcaagtctatcagcaacatttccaacaccatgtgcttacttcatgtctctgtgtcacaatttgataattctcacaatatttcaagctttttcaatatttttataactgttatggtgatgggtaatcagtaatctttgatgttactattttaatagtttcagggtgccacaaacagtgcccatataggatggcaaacttaatccattaatgtatgtattctgaacgctccactgaccagtcattcccctacctctctttctctccttgggccttcctattctgagacacaacaatattgaaattatgccagttaataaccggactatgggctctaaatggttaaaggaaaacaagaagtggca

SEQ ID NO: 721279 - DNA, 142 bp, Homo sapiens
ccagatatgcggaatgaacaatgaaaagaaattgtgaaagaaggcgctacccgtgaagcaggaactaatgaactcctgtgagtcacgtggtgcgcacgcgccaaaggcacacggcagcgttccacaaacagcgtgccacaag

SEQ ID NO: 721280 - DNA, 133 bp, Homo sapiens
tgttcatgagcaaacacactgaaggccaaacactcacagtaaggagatatgcaaatattaaagactataattcaacgttggtgtaactgatcccatgaattttcctagtttaaacagaacctatgttatttct

SEQ ID NO: 721281 - DNA, 1664 bp, Homo sapiens
  misc_feature (597)..(597): n is a, c, g, or t
  misc_feature (829)..(829): n is a, c, g, or t
  misc_feature (948)..(948): n is a, c, g, or t
  misc_feature (1182)..(1182): n is a, c, g, or t
cggagagtgtgctgctgtgtctcttgctagtctgcgctgctgcatatcaccgagtgagtcaaaccaagaccgcggtgtgcgggaccctttgacgctcgtgggggactccgctggtggttggcaccagacagcggcgtcgttttttgagccccgtcgcgcccctcttatctttagtccgcgtttcaattggtgtagcgcggccgcgtttgtgggtgagcaactattttgcggccaaccaggggctgaaggcacagcagcaccccaccagcggccggtgcggttggccagaaaaagaaccacggcccggttcctttttctcgcaaatcgcgccgcgcttcaataagggggagccccaccgaacaagaagaaaatggggtgaagaacacacccatgtttttttacagaaaaaagaagaaattggttgataatatagaattgagggaagaccgaccacccctgccctaatgggttcgcgaaactaatataagagaaatattattttggggaaagaagacgaccgccttgtctgtcccacccccgtgggtgctccctcaggggggacaccccaacagaagtgcgcacgatcgtaggagatgngttctatcacaccagagggttctctcgtgtggttttttggaaagcgtgggagagttccctgtcgccttggaaatttttgcccagagaaagatggaggtggaaggtttgccacatttttaaggaaaaaagtgttccacaagaccgtcgtagttgtatccctggaaagaaaatgtttctcccacagcggtgtataaaaaacactggccccctcgagcctataatgactgtctcnccacatcggcccacatcgggagttttgtgtatgacgcgcgcgtggggaaccgacaaatagtggtttccccaactagggtccccacaccaatatatggggcgcacagaccccacataggngatgtgtgatagagcttctcacacgctctggaataggtctcacagagagactctacaccccgcgataggggtttacactctggcgtcttcggttctcgtttttcctggtttggtttggggtttttgtatacttatataatatatccggcctacccccactctctagagagatactctgggagatagagcgctctcttgtattatggccgctctatagcgacccacacacacagngtctccgcgccacatatctctccgagatagagaagagatggatagtgtgagaaaatcacagtgagacgcgccgagagagagtgccagacgacacacaatggacattgtgaaagaagagatgggtccacataaaatatggattctccagagaccagcccattgtggaaaagacacacattagaaaaaagagcgcttgcccacatctttattttatctctttctcccatagagatagttctttcgcttagaaaaagattaataatgtgctgtaagaaagctcccagatttgtaattgtggaaagagcttcactggagactttcatggtgtaaggccacgactagtttctgggaaagacccctcggggaagagaacaccggtgctaaagattgaacgagctgatggatatgaacccccccccccagaatctgttttaagttccagacttccaattagtggccaaattaaaagtgctatttgtgaa

SEQ ID NO: 721282 - DNA, 314 bp, Homo sapiens
acccagttacagaagtatctgtacagaagtcaacaacaccactggcataacccactctgaaaagaatgacaaagagcgcggaatccctacaagtctccatttaacacccaagcccatggctgcgccctgccatagggtctgcgagcatcttctgcactcagaatgtgctaagtacatcaaaagcacgacggactgacagagcagcaggtccagataacagaaatcaaagtgatatgcaaaaaaagacttacaatatcacacatgaaaatactagtttacaattacaaacgtaaaccttacattataaaaaagag

SEQ ID NO: 721283 - DNA, 197 bp, Homo sapiens
ggccaccctataatgtaatgttatcccacaaaataaaatatatcttatccccacgcaactatagaatgtatgtattttttctgtactataattggagatttcctataatatctgtcacatcctcacaaagaaaagtgtatattggtttttttaaaaagaaagtgtatttgggaataaagtccagatgggaaattcca

SEQ ID NO: 721284 - DNA, 174 bp, Homo sapiens
ggatttgctggtgcagtacaactaggcttaatagggacatggtgacgcacacatttgtagacccagctactcagagggatctcttgagcccaggatttcaagactggactgagctaggatggtgccactgcacttcagcctgggcaacagagcgagaccctgtctcaaaacaaa

SEQ ID NO: 721285 - DNA, 811 bp, Homo sapiens
  misc_feature (30)..(30): n is a, c, g, or t
  misc_feature (103)..(105): n is a, c, g, or t
  misc_feature (183)..(183): n is a, c, g, or t
  misc_feature (188)..(189): n is a, c, g, or t
  misc_feature (195)..(195): n is a, c, g, or t
  misc_feature (212)..(213): n is a, c, g, or t
  misc_feature (225)..(227): n is a, c, g, or t
  misc_feature (245)..(245): n is a, c, g, or t
  misc_feature (259)..(260): n is a, c, g, or t
  misc_feature (271)..(271): n is a, c, g, or t
  misc_feature (277)..(280): n is a, c, g, or t
  misc_feature (289)..(289): n is a, c, g, or t
  misc_feature (313)..(313): n is a, c, g, or t
  misc_feature (321)..(321): n is a, c, g, or t
  misc_feature (327)..(327): n is a, c, g, or t
  misc_feature (338)..(339): n is a, c, g, or t
  misc_feature (346)..(346): n is a, c, g, or t
  misc_feature (350)..(350): n is a, c, g, or t
  misc_feature (353)..(353): n is a, c, g, or t
  misc_feature (356)..(356): n is a, c, g, or t
  misc_feature (378)..(379): n is a, c, g, or t
  misc_feature (383)..(383): n is a, c, g, or t
  misc_feature (402)..(402): n is a, c, g, or t
  misc_feature (418)..(418): n is a, c, g, or t
  misc_feature (440)..(440): n is a, c, g, or t
  misc_feature (447)..(447): n is a, c, g, or t
  misc_feature (514)..(514): n is a, c, g, or t
  misc_feature (523)..(523): n is a, c, g, or t
  misc_feature (532)..(532): n is a, c, g, or t
  misc_feature (555)..(555): n is a, c, g, or t
  misc_feature (577)..(577): n is a, c, g, or t
  misc_feature (811)..(811): n is a, c, g, or t
taaaactacttggggtctttttagtagttnttttagggctgtagccacagaacggtcattctagtgattctgagcagggtggagaggagtggagcatccctgnnnaggtgggtcagtgaagacacgcccagttcacctgatattctgtgactggttgcagaacacaagtccctctcgaaattntttanntttttngggagatatttgtaagnnagagtgagaaannnttatggaaaaggggaagnagtgctgaggaggnntaggagaaggntcaggnnnnccaccgagngcatccctcatttttgggtttttnttcctggnaatttnagggctcaganntgcatcnaggnggnggnggacggcagtgcttctgaaggnntctnccagtgggacctggggggntagtgtgcccacaccngcttgggtgagagaggccaatnagttgtnaagcttatgacttccaatcagagtggtggggggctgaaatgacttggtctttgggtcactgtatgtnaaggaattnggagctagnggcactgggggggtgagcctgcntgagcccagtgaggaggaggtngtctgcgtggggtgcttccaggacctgtttggaggggaccacaataagaacgggttcaaaatgttcgactcctccaactatcatggccaagacctgcttttcaaggatgccaccgtccgggcggtgcctgtcggagagaaaaccacctaccgcggctggctggggctggactacgtggcggcgctggaagggatgtcgtctcagcagtgctcgggcgcaggtaggacaggcccn

SEQ ID NO: 721286 - DNA, 243 bp, Homo sapiens
  misc_feature (218)..(218): n is a, c, g, or t
aaagcaaaaacaaaaggattttgagatcagtgtggacaacttagcaaaacaccatctctaaaaaaaaaaaaaaaaaaaaagattagccaagcttggtggtgtaagcctgtagtcccagctacttgggaggctgaggtgggaggattgtttgaacccaggaggttgaggctgcggtgagctgtgattgtgccactgcactccaggttgggtaatgcagncgagctgcgtctcaaaaaataaata

SEQ ID NO: 721287 - DNA, 939 bp, Homo sapiens
  misc_feature (15)..(15): n is a, c, g, or t
  misc_feature (182)..(182): n is a, c, g, or t
  misc_feature (194)..(194): n is a, c, g, or t
  misc_feature (210)..(210): n is a, c, g, or t
  misc_feature (213)..(213): n is a, c, g, or t
  misc_feature (258)..(258): n is a, c, g, or t
  misc_feature (264)..(265): n is a, c, g, or t
  misc_feature (270)..(271): n is a, c, g, or t
  misc_feature (372)..(372): n is a, c, g, or t
  misc_feature (389)..(389): n is a, c, g, or t
  misc_feature (424)..(424): n is a, c, g, or t
  misc_feature (436)..(436): n is a, c, g, or t
  misc_feature (438)..(441): n is a, c, g, or t
  misc_feature (474)..(474): n is a, c, g, or t
  misc_feature (485)..(485): n is a, c, g, or t
  misc_feature (622)..(622): n is a, c, g, or t
  misc_feature (694)..(694): n is a, c, g, or t
  misc_feature (696)..(696): n is a, c, g, or t
  misc_feature (700)..(701): n is a, c, g, or t
  misc_feature (704)..(705): n is a, c, g, or t
  misc_feature (792)..(792): n is a, c, g, or t
  misc_feature (811)..(811): n is a, c, g, or t
  misc_feature (852)..(852): n is a, c, g, or t
  misc_feature (871)..(871): n is a, c, g, or t
  misc_feature (932)..(932): n is a, c, g, or t
gtgaaggtgggaggngagatgtttcctccccttttcctttctccctcatcttatttcctccaagggcgtaaaaaaatatggcctgtgaccccaataacctacccaaataaaaaatcaaaaaactgaggttccaaaaagttacagcatcttatttcctcatagaaaaggggaaggagccaganggaaggggagtncctggggtgggggggngtntcaccccgcagcccggtgagacatcccctccccttaaatagctgncccggnnggggnnagcccagggctatagcatttaaaaactcccacatcccattttatcaaaaccaaagagaaaaaaaaatttcccttttcccccaaaacccaaatatatatatntttttttttcttaaaanaaccaaaactttgaaggcatttagcgttaaagtgnatcttgaacttngnnnngtgatattccctccttccttcccccttcctgtnggggttcattngtgcatccccagcagagggaccggccccaaggggatggcagaggggaaggaccaaagggagagaaggggcgggggcctccccagccaatcagcagccagtgtgtgtgtgagcagggaagccacacccccttggagtnttccaagtgagatggggagtgggaacgatgcattcctgtgtagtcttcagccaattccaagtcaaataaaancngggnnagnngggtgacaggccgggtgtgcggaaaggagaagcgggtcttctgggtcctgtggtcagagagaacccgctttctcagctctggacgangcttcaaatgatttctctntcactctctgcgattcctcttcacctcttccagaagctctngtttcacctctgtatgtcngagtgatcactggagctgtgcgtgcagggttgtgtctcgggaagtggtcacgaagaagacncttcatc

SEQ ID NO: 721288 - DNA, 287 bp, Homo sapiens
  misc_feature (62)..(62): n is a, c, g, or t
gcactcgaaaaagtgggaataaaacagattgttgtctttgtaggacagctgggcaaaacaantggtgtgatcttgccccccccgcaggggacattaggcaatgtctgaatatattctgattgtcacaactggaggggccgggcgcggtggctttttcctgtaatcccagcactttgggaggccaaggtgggcagctcacctgaggtcaggagttcaagaccaccctggccaacatggtgaaaccctgtctctattaaaaatacaaaaattagccggctgtggtagaa

SEQ ID NO: 721289 - DNA, 116 bp, Homo sapiens
aattgggggggggggccaccctttttttgaaaataacctttttttttttccccttgggggggtgaaagcccccctttaaatggaaaaaaagtttttgggctcgggcctcccctcca

SEQ ID NO: 721290 - DNA, 679 bp, Homo sapiens
attgagacaaagtcgcgctttgtcacccaggctggagtgcagtggtgagatcttggctcactgcaagctctgcctcccaggttcaagccattctcctgcttcagcctcccaagtagctgggactacaggcacgtgccaccaggccaggctaatttttataattttagtagagacggggtttcaccgtgttagccaggatggtctcgatctcctgacctcgtgatctgcccacatcggcctcccaaagtgctgggattataggtgtgagccaccatgcctggcggaccgtgcgaggtatgctgccccacaaaaccaagcgaggccaggccgctctggaccgtctcaaggtgtttgacggcatcccaccgccctacgacaagaaaaagcggatggtggttcctgctgccctcaaggtcgtgcgtctgaagcctacaagaaagtttgcctatctggggcgcctggctcacgaggttggctggaagtaccaggcagtgacagccaccctggaggagaagaggaaagagaaagccaagatccactaccggaagaagaaacagctcatgaggctacggaaacaggccgagaagaacgtggagaagaaaattgacaaatacacagaggtcctcaagacccacggactcctggtctgagcccaataaagactgttaattcctcaaaa

SEQ ID NO: 721291 - DNA, 1512 bp, Homo sapiens
  misc_feature (1)..(1): n is a, c, g, or t
natttcggcacaagcggctgccgaagatggcggaggtgcaggtcctggtgcttgatggtcgaggccatctcctgggccgcctgcgtcgtggctaaacaggtactgctgggccggaaggtggtggtcgtacgctgtgaaggcatcaacatttctggcaatttctacagaaacaagttgaagtacctggctttcctccgcaagcggatgaacaccaacccttcccgaggcccctaccacttccgggcccccagccgcatcttctggcggaccgtgcgaggtatgctgccccacaaaaccaagcgaggccaggccgctctggaccgtctcaaggtgtttgacggcatcccaccgccctacgacaagaaaaagcggatggtggttcctgctgccctcaaggtcgtgcgtctgaagcctacaagaaagtttgcctatctggggcgcctggctcacgaggttggctggaagtaccaggcagtgacagccaccctggaggagaagaggaaagagaaagccaagatccactaccggaagaagaaacagctcatgaggctacggaaacaggccgagaagaacgtggagaagaaaattgacaaatacacagaggtcctcaagacccacggactcctggtctgagcccaataaagactgttaattcctcaaaaaaaaaaaaaaaaaaaaaaaaacaaaacaaaaaaaacaaaaaaacaacccgcgagggacccaataagggagggggggggacaaaagaggaggcacagaaagagggacaaggggcacacaagagggatctccggcacccaagttttgtggtgcgacaaaggggggcgaacaactaggagagggggaccccaaataaggaggagagaggagagaaataaatccgagagaaaacgccgagggtgaacaccggggtttaagtggctccgctccgaaacagcagcagaaagagacaagacgagaggagagacagcaggaaaaaagaacaagaagagaggggggaactcaccaaaacaaagtggtggaaaacacaaacaaaacaccgtcggagggaaaccagcaagaacaaagagatgactcgacacagctagcacccagacagacaaacaaacacagagacagcacagcacatccagaccaccagccaacaagccaatacagcacagacgaacgaggagaacgataacgatgaagaaagagaaacacatgagctaaccaaatgagcagagactgagaagcaatagacggcaaagacagataaaggagaagaagagaagaagggagacagggaagaggagaggaggcgcgacgcaagagaccgaaggagaggaggggagacagagagtgaagagagaaaacgaagaagaagaaaccagggaagaacaagagaagaacggaggagagcgagagcggcaacagaggactcagcagacacagaggagagagaggaagccaggagcagacgagcgcaaaggagacgacaggaaggcagagcgcggagagggaggcagaaaa

SEQ ID NO: 721292 - DNA, 753 bp, Homo sapiens
  misc_feature (1)..(1): n is a, c, g, or t
natttcggcacaagcggctgccgaagatggcggaggtgcaggtcctggtgcttgatggtcgaggccatctcctgggccgcctgcgtcgtggctaaacaggtactgctgggccggaaggtggtggtcgtacgctgtgaaggcatcaacatttctggcaatttctacagaaacaagttgaagtacctggctttcctccgcaagcggatgaacaccaacccttcccgaggcccctaccacttccgggcccccagccgcatcttctggcggaccgtgcgaggtatgctgccccacaaaaccaagcgaggccaggccgctctggaccgtctcaaggtgtttgacggcatcccaccgccctacgacaagaaaaagcggatggtggttcctgctgccctcaaggtcgtgcgtctgaagcctacaagaaagtttgcctatctggggcgcctggctcacgaggttggctggaagtaccaggcagtgacagccaccctggaggagaagaggaaagagaaagccaagatccactaccggaagaagaaacagctcatgaggctacggaaacaggccgagaagaacgtggagaagaaaattgacaaatacacagaggtcctcaagacccacggactcctggtctgagcccaataaagactgttaattcctcaaaacaaaacagaggcgcacaggccgcacagagacaaaaggacaaaacaccgcagggggcgcacctcagcgggggcgggaaaaacgggacacacg

SEQ ID NO: 721293 - DNA, 488 bp, Homo sapiens
  misc_feature (351)..(351): n is a, c, g, or t
  misc_feature (392)..(392): n is a, c, g, or t
ggaaggggccagacgggttcagatgcgttcatggggctgttcggaaagacccaggagcagagccgccctgagaactggtcaatgaggggtcattgaagataagaaaggaagtgagagttgttgacaggcaaataaggggatatccaagagagaatgaagaaaataggtgaaagcgactctgtgaaaggagtgctgccagagaagggccagaaggatgtctgcgtagttctggcgaaggagatgatcaggtcaaggaaggctgtgagcaagctgtatgcatccaaagcacacatgaactcagtgctcatggggatgaagaaccagctcgcggtcttgcgagtggctggttcnctgcagaagagcacagaagtgatgaagccatgcaaagtctngtgaagattccagagattcagggccgacatgagggagttgtccagaagaaatgatgaaggctgggatcatagaggagatgttagaggacactttcg

SEQ ID NO: 721294 - DNA, 664 bp, Homo sapiens
  misc_feature (1)..(1): n is a, c, g, or t
  misc_feature (584)..(585): n is a, c, g, or t
  misc_feature (588)..(588): n is a, c, g, or t
  misc_feature (591)..(592): n is a, c, g, or t
  misc_feature (603)..(603): n is a, c, g, or t
natttcggcacaagcggctgccgaagatggcggaggtgcaggtcctggtgcttgatggtcgaggccatctcctgggccgcctgcgtcgtggctaaacaggtactgctgggccggaaggtggtggtcgtacgctgtgaaggcatcaacatttctggcaatttctacagaaacaagttgaagtacctggctttcctccgcaagcggatgaacaccaacccttcccgaggcccctaccacttccgggcccccagccgcatcttctggcggaccgtgcgaggtatgctgccccacaaaaccaagcgaggccaggccgctctggaccgtctcaaggtgtttgacggcatcccaccgccctacgacaagaaaaagcggatggtggttcctgctgccctcaaggtcgtgcgtctgaagcctacaagaaagtttgcctatctggggcgcctggctcacgaggttggctggaagtaccaggcagtgacagccaccctggaggagaagaggaaagagaaagccaagatccactaccggaagaagaaacagctcatgaggctacggaaacaggccgagaagaacgtggagaagannatngannataacagaggnctcagaccacggatactggtcgagccattaagatgttctcctcaacaaaaacacgatatgg

SEQ ID NO: 721295 - DNA, 288 bp, Homo sapiens
tctctgcatggatattgtggccaagcagctacagcaatagctccttactttcttttcccaacttcagctccgtcacacaacatgaaggcctccatagagatgtgtgcggccatgatgccagtcatcatatgaaagctccatcaagacccttccatctaaacaggggctcccaacacctctcaggtctagagacgcacgcactggaaaccccattcttcttcaggaagatgccaacacattctctagaagcagattcaaggctctgaggatacggtctttccagaagtc

SEQ ID NO: 721296 - DNA, 782 bp, Homo sapiens
  misc_feature (122)..(122): n is a, c, g, or t
ggtatttcgcgccacgggtacgatacgtattacacactcgtcattctatcgtcatttgtccctatggattataaacgacgggagctgtgttgttccttgcctgctacgcgtagctcagacanttcagtctcctgtcacgttgcaggtgtagagcgaagatgatttagccttccaatatagaggtatatttcgttctgaactggccgtcgaagagcgagataccgtcagtctagatatgtctttgaggtagaatatatgatggaccacatagtttaagattacaaggtactttccctcttctctcaggccatgcattatgaataaagtgcctcccttagcctgagctcctaaagacctcttgtacttggttgcaaacctcagatctctagtctagtctaagtctagatctagtctagtcatgtgtgacatgtgtactagagataccactagacccagtattgctgggtctctatagtttaggaagattgggggtttaataatatttaatgtcttttaggatcataagacataaataggttaggcgatattcaggccttcagaatttaagggtttgaaagtatagcattcagattgtaataggatatgtgaagcacatcatggtccacatcaaatagtatatgtatcatatatgcacaaaacaagcccaaaactttacgtttacgatagcgtatttgttccgataccatgtgtgaattccccccagaaggagtagtctcacaaaaacaaaacatgccagaatggaatggtcgcgtcttcaatgg

SEQ ID NO: 721297 - DNA, 663 bp, Homo sapiens
  misc_feature (1)..(1): n is a, c, g, or t
natttcggcacaagcggctgccgaagatggcggaggtgcaggtcctggtgcttgatggtcgaggccatctcctgggccgcctgcgtcgtggctaaacaggtactgctgggccggaaggtggtggtcgtacgctgtgaaggcatcaacatttctggcaatttctacagaaacaagttgaagtacctggctttcctccgcaagcggatgaacaccaacccttcccgaggcccctaccacttccgggcccccagccgcatcttctggcggaccgtgcgaggtatgctgccccacaaaaccaagcgaggccaggccgctctggaccgtctcaaggtgtttgacggcatcccaccgccctacgacaagaaaaagcggatggtggttcctgctgccctcaaggtcgtgcgtctgaagcctacaagaaagtttgcctatctggggcgcctggctccagacggttggctggaagtaccaggcagtgacagccaccctggaggagaagaggaaagagaaagccaagatccactaccggaagaagaaacagctcatgaggctacggaaacaggccgagaagaacgtggagaagaaaattgacaaatacacagaggtcctcaagacccacggactcctggtctgagcccaataaagactgttaattcctcaaaa

SEQ ID NO: 721298 - DNA, 582 bp, Homo sapiens
  misc_feature (1)..(1): n is a, c, g, or t
natttcggcacaagcggctgccgaagatggcggaggtgcaggtcctggtgcttgatggtcgaggccatctcctgggccgcctgcgtcgtggctaaacaggtactgctgggccggaaggtggtggtcgtacgctgtgaaggcatcaacatttctggcaatttctacagaaacaagttgaagtacctggctttcctccgcaagcggatgaacaccaacccttcccgaggcccctaccacttccgggcccccagccgcatcttctggcggaccgtgcgaggtatgctgccccacaaaaccaagcgaggccaggccgctctggaccgtctcaaggtgtttgacggcatcccaccgccctacgacaagaaaaagcggatggtggtggaagtaccaggcagtgacagccaccctggaggagaagaggaaagagaaagccaagatccactaccggaagaagaaacagctcatgaggctacggaaacaggccgagaagaacgtggagaagaaaattgacaaatacacagaggtcctcaagacccacggactcctggtctgagcccaataaagactgttaattcctcaaaa

SEQ ID NO: 721299 - DNA, 668 bp, Homo sapiens
  misc_feature (1)..(1): n is a, c, g, or t
natttcggcacaagcggctgccgaagatggcggaggtgcaggtcctggtgcttgatggtcgaggccatctcctgggccgcctgcgtcgtggctaaacaggtactgctgggccggaaggtggtggtcgtacgctgtgaaggcatcaacatttctggcaatttctacagaaacaagttgaagtacctggctttcctccgcaagcggatgaacaccaacccttcccgaggcccctaccacttccgggcccccagccgcatcttctggctggacctgtgcgaggttatgctagcccacaaaaccaagcgaggccaggccgctctggaccgtctcaaggtgtttgacggcatcccaccgccctacgacaagaaaaagcggatggtggttcctgctgccctcaaggtcgtgcgtctgaagcctacaagaaagtttgcctatctggggcgccttggctcacgacggtctggctggaagtaccaggcagtgacagccaccctggaggagaagaggaaagagaaagccaagatccactaccggaagaagaaacagctcatgaggctacggaaacaggccgagaagaacgtggagaagaaaattgacaaatacacagaggtcctcaagacccacggactcctggtctgagcccaataaagactgttaattcctcaaaa

SEQ ID NO: 721300 - DNA, 766 bp, Homo sapiens
  misc_feature (507)..(507): n is a, c, g, or t
gctctgattcattttacattgtctaccagctattaatatttaatttgggtcaacgatgcttaagcttctgcacagcactactgtttttcatcacgtaaagtgaggatactagcataaccaactccatagtcattctgacatgattgagagcgaggaagactcaggtgtgaacgtgcgtattcgcaaagggtctgacatctggcatgtgctcaacatgttatcatccttatcagcatggttcacaccctctggttacactagaggcctgatacatgtgggaagggagtctggtctctggagtcaaacaagctgggtgcacattatggttccagtattatgaccatgcgcaaacttattattacctctcgtgagccttaattttctctatttgcaagaatacagataatgaagtaatacacagctgtgggatcctgcaggatcaagatgaatcgacatgtctaaaattccaagcacatcatgcagcttcataaccatatctcaaggtgnttagctatcgtgactcatttatacatgtgcactgaggcagtaagggagttactgagaggtatgtggagccaggaatgtgctataatccaaacctaaacgcactgattaactagatagagaagctatgcttagcactgtttgagcagcatacttatataggacccatgcaatctactgtggaaatgtcctatgagcagtaaggtgtctggatgaggcaggagcaaggtacaagggatgccttggtagtctttccaaagga

SEQ ID NO: 721301 - DNA, 521 bp, Homo sapiens
  misc_feature (498)..(498): n is a, c, g, or t
acttcctctcctcccacctctactaaaaatacaaaattagccaggtatggtggcatgtgcctgtagtcccagctactcggaaggctgagataggaggatcacctgagtccagggaggtcaaggctgcagtgagccatgaattgtgccactgtactccagcctggcaacagagactgtgcctcaaaaaaaagaacatttgtgattcatagaagaaggctaaaatattaacaggaacatgagtttggaataagttgattccaactctcatgaatgattttgaggggattcaagacttcagtggaggaagtaactgcagatgtggtacaaatagcaagagacctagaattaggctaggcacggtggcttatgcctgtaattccagtactttgggaagccagggcaggaggatcacttgagtatgggagtttgaaaccagcctgtgcaacatagcaagaccctggtctacaaaccattttttaaaaattagccaggaggtgngaggagaggaagggtaccgagct

SEQ ID NO: 721302 - DNA, 121 bp, Homo sapiens
ctctcatactggtgatagctagaggtgatgtttttggtagacaggcggggtaagatttgccgagtacctttatacttattattataaccttataccttataagcatagcctagtgttaggg

SEQ ID NO: 721303 - DNA, 326 bp, Homo sapiens
  misc_feature (1)..(1): n is a, c, g, or t
  misc_feature (218)..(218): n is a, c, g, or t
  misc_feature (305)..(305): n is a, c, g, or t
  misc_feature (323)..(323): n is a, c, g, or t
natttcggcacaagcggctgccgaagatggcggaggtgcaggtcctggtgcttgatggtcgaggccatctcctgggccgcctgcgtcgtggctaaacaggtactgctgggccggaaggtggtggtggcccctctgtcatgggcccccgctggaggtcagtgatgagcaacattcaccatctttcgtttgagtctcacggccatgagattcaaccccantgcaccgttcttgagaaccttgcaagcaactctttcccaagggttggggactccagggcttcaaggagtaattaatggaattagggntaggttttcaaatttaancgg

SEQ ID NO: 721304 - DNA, 968 bp, Homo sapiens
atcaagttagagatgtaactgccttaaaacatgccagcttaggctgggcacggtggctcaaccggcctgtaatctcaacacttcaggaggctgaggcaggcagatcacttgaggtcaggagttcgagaccagcctgaccaacatggagaaattctgtccctactgaaaatacaaaattagccggatgtggtggtgcatgcctgtaatcccagctacttgggaggctgaggcaagagaattgcttgaacccaggaggcagaggttgcagtgagccgagatcacaccattgcactccacctgggcaacaaaagcaaaactctgtctcaaaaaaaaaaaaaaaaaaagggttggccgggcgtatgaggtaattaaatgggttctccccagaaggtaacctgccagaaaagaagaatgctatagatgttactcctatacggtaaacccttgggtgaaaatcagattcactttctaagaaggatgttttccaacggttttgcaaaaaacgcagtggtgactatggaaagcccaggtttatatcccagctctggtcttacactaaattgtggcgtacaggggttcccactccggtccataaatgggagctaatatctccaacctgtgtgcctgacatgatggttaagggcttaacgcaacaacaatagtgggtatttcattctgtgcagagcaaatggtgggtaaattagaggggctaggtggacgacaatagttttagaaagtaataaaccagctcgtatttttactggttccacttaacagatgtgccacaaaagaaaaggggggggggtaaattcctcagggcaagtgggtaccggttttgtcaagggccaaggggggataaaaggaggcggggtcaagcgtgaggaaggtgggcttggagcaccttcgtgggttggcacccagtaggggaaaatagtagggaaggtggggagtggtataaacagagcact

SEQ ID NO: 721305 - DNA, 207 bp, Homo sapiens
  misc_feature (198)..(198): n is a, c, g, or t
ctggtgatctaaggatctccgtcgagctcgccagtgctccacgtgcacgggtacgtgcagcagcacgttgccttggctcctcataagcagcgcaggactcctcgtcagtggatctggagctcccgccgctttgggaagaacacgttccttcggaactgcaggaaaggctcatccagacagaggggagaccaagccagnagcgcgcga

SEQ ID NO: 721306 - DNA, 370 bp, Homo sapiens
cgtctgaccctagacatgggcttcagtgacactacagcactgaccactgtgcaggtaaaaacgtgaatcatgtgatgatgtctcccgtctttgggtttctaacctgatactcctcttcgcaaccagagagattgggtaagtgtgtatagttgcttgtgattaggcctggaactttgtccatgcttattactgacgcagtccttcccatagtatctgagaatgaatcatttggggcccagatatcttgctgagacaatctgactttgtcttccttcctatgagatttctctcattctgtcacaatgttgtcttcgcgccggcccagccctgaaaatgtgtgagtttctagcattttcattttttctctatt

SEQ ID NO: 721307 - DNA, 1192 bp, Homo sapiens
acggcgtctgagaactcgctggaagactcggtccgggatggctcaacagttcgcaaagtccgggacttgcaggccgggcggcgcagaggctccccgggcggctgcatcccggggactgccccggacatgccccgaaccccttgtcggacgcccgcgccgcttcaccggcatgccactccccgaagtgctctgggactagagcgccctccggcccaacttctgactttggggatcccccagacccatagaggaacgggcgcccggcatggccggagccccgaggcactggtgctgaccgggcgccacgatcagcgtaagcattctgccggcgcccaccaaacatccagcccacccgatcagactcatccgtagcaccatccagcaactgaagctgcctgaccccgcggcacccccggacctccacgccacagcagccctccgaccaccatccagggcactccaaccacgccacacatcaccgccgctcctcatcagcgcaaccccgcccgaacgctctccgcgcctcccccggacataccaagagctaacgcggacccaccgcccgccctaccgcgaccatccgcgcgacatccagaccagccggacccccgaccaacccccacaggcataccagcacacctagacaccccggctgcctcccccccaacacacccccagcagactccccagccccgaaccgacctccagcacgacaaccctggaaggcaatccaagcccagccagcagacacaaggataccgccgccccaccaggaccgcagcgcccacccggcccaacaacccccggccgcgcccacacagacgcccccaggcccggaggcccacaccaagcccgctggcgacaacataccccggcgggccaccacctacgaccgcgccaaccgctccaccaaacgcccacgaaccatccccacgacaggccaccgccagcagcaaccacacacgaacacagcggacgcggtcagagaaggaaaagccacgaccaaacgccgcgcccctacgcaccccaggccccatccccgcaccgaaatcagacccaagcgccacacaagagcccactacccgcccacgcaccccaaagcaacgcaacagcgcacagaaagacacatcacacgcggcagaccgaacaccacacggagcacccgcacaccactcccccgccgacccaccct

SEQ ID NO: 721308 - DNA, 318 bp, Homo sapiens
attcgcggccgcgtcgacctggtgatgaattgtattggcatgcacctgagctggggtctagatacggtcctcgtcttctggggagagggtggcagagaggataatgtagaggtcatgccaagttagttcataacactgggtgaggtactgaaactctaatataagaggtagggtcttctggaaatgaactgagtctttttgttaatttgagagatatcagtgagggagaagggaatgtgaactctaacaacatgttcagtttctgccacttcctgaagggggcagggactgcttcagtttctgtcgacgcggccgcga

SEQ ID NO: 721309 - DNA, 286 bp, Homo sapiens
ggggatggtccccggggcccccacccccaaaatttttaaaaaagcaaagagggaaaaaaagggggcggggggccggcccctgaacaggggggccccgaagccccccccgcagaatggggagggttttggccttttggggatattgggccccgagggggaaactataaattttgtttttttttgggaaaaggtttaagaaatttcccctaaatcttgtttggttggttgggatgaaaagttaactttttttcccaaaaaaaagggggaatttttcttgttaggttta

SEQ ID NO: 721310 - DNA, 142 bp, Homo sapiens
aggcctcatctgacactgtgtgttctgtgcgccaagggcatcatcatcgtcctgagtgcgaaatgcaaatgcaagctttggccacgaagtcctggtcagccatccaggggcagactccaccttctcatcaccccgaggctca

SEQ ID NO: 721311 - DNA, 494 bp, Homo sapiens
gccgggcttcagctgtgtggctggttcggtggtgcctccgctgagcgtgcgggagctggcccaggctgcaatggacaaggatggccatcctgtgctgcacggggcgggcgaggcggtgctgagcgtctagcctgcctgggcgatgcgcagggcgcagggtcccgggggccggggcggaggctgtgtggcggtggcgccgtgggttcccccggaggccctgctggcgcccctgatgcagaacggcttgggccaaggccaccgctgctgcagggctgggccccacgacactggactcggggctgctagcccacggcccgatgcagacgccggcttggggccgcaaggaagggctggccgttgcccccagcttccccgggaaagagcgggaaagcacggagaggggaactgagggagaggcggggaggggcgattagggacacgacagggtagaagggacagagggagagcgcgaggcagagcaggaagagtgaagg

SEQ ID NO: 721312 - DNA, 231 bp, Homo sapiens
tactatccttagaggttcatctctctcagaattgaggacacgcacgctgggggatgaacgctcgctttgccggtactatatcttccggtaatcccagtagtgctgtgagttcctctagcttgcctaggagacgtaggaacctctagtctcatcctacctaggaaccttgctagtcctagatctagtgataagttacaccccctggagaatcccctagagggcccagggtag

SEQ ID NO: 721313 - DNA, 258 bp, Homo sapiens
catttcagaaaaaatacttatatgaaattgccagaagacatccttactttcatgtcccggaactacttttctttgttaaaaggtataaagctgcttttataaaatgtcgtcaagctgctgataaagttgcttgtctgttgtcagagttcgatgaacttcccaatgacgagcagaccttaactgccaagttaaaactaaagtgagcaatttacacaaaaaaaaaaacaacaatctaagcgcacgtgttgtgcatatgct

SEQ ID NO: 721314 - DNA, 317 bp, Homo sapiens
  misc_feature (49)..(49): n is a, c, g, or t
  misc_feature (154)..(154): n is a, c, g, or t
  misc_feature (246)..(247): n is a, c, g, or t
  misc_feature (293)..(293): n is a, c, g, or t
gataccgttctgtagatctggtccatagggttggtgtactcttaaacangaacataggttgttgtacccgttctacgtacgagagagagtcagtaggtgttggatagacacttataattatatgtaacgtctgtgtttagttcgtagactgatngatgatactcacagaaagtttctctgtacgattgaatcatatcgaaagactatcgaagagtggtcggaagagagtattctagcctcaaaaanngacggacgacctgtggacgaagacctaaagggtgttatggagttgnagttcttctattctatgtcgaaaa

SEQ ID NO: 721315 - DNA, 286 bp, Homo sapiens
catcaggatgtgcacacacacatgcgctcacaggaacatagactggctctcatagcgtctacagacccagactgtgacatacataggctgtgacgtcacatatactgaactgagtgtctcacagtgtcacacacacacaatgacttggagtatcagtgtctctcacacagactcacatatacacagagtatcacatacccgtgtctatggtgtcgtcacacatgggatctagacacacactctcacacacaatgtcttagagttcttgacactttgcatcctggga

SEQ ID NO: 721316 - DNA, 618 bp, Homo sapiens
  misc_feature (607)..(607): n is a, c, g, or t
agaaaacaacagtaaatgtgaaaatttcattaacatgataagaaatgagaaaaagtagctaagcataagctgacagtgttcagggtgtatattcacggttcatgttaaaacattttaatattattaatgtatgtatttaattgtatatagccatttccttaatagcttggtatatggtagagtttttagaaaataatatattgtaaatgtactagcgtttttatgtgattattcagtatattacaatgatgcgctgttatttatgggttaaaatatgcttaattgcttccttccttgtagcatttattttaatattctttgcagttgcattttctggcaaaaatgttccctttcaagatatttaagatagaaaataatacctaatatattttatgtcctcattataataattttgttagctacttctctttaatattacagtcctatttaaaaattctagcattaatttgtagataacacatatcttctatttgcataacatagtttttttgttggtgctattaattcaaaggaaaatgttctgtaggattaaaagatgttttaatgtttttataaaataattgtttgaaattaaaaaatgatttangttactaaaaa

SEQ ID NO: 721317 - DNA, 141 bp, Homo sapiens
  misc_feature (8)..(8): n is a, c, g, or t
gcactagnctcatcacttcttcaggtctggaaaaaacatttggaagcaaggaaagaggagaaaacacctacaccagagagccatttgggtatttggcctttaaataaaaagcctcctttatctggctgtgcagcctgtgct

SEQ ID NO: 721318 - DNA, 431 bp, Homo sapiens
atgctgtgtgcaaacatgtctgtgcctcaggccctataaggccacagacctcacattcgtggagcgcaccatgtgcactgtgggtcctggaaaacaccaactctggcacaaaactctctgacatttgtgacacagaaacaaggtatattggagacacactgcgatcaggtgccatatcactgatcttctcacttaaagagaaagttggtgcaatggccaaagcattgcgcctaattgaagagaaagatgtgaacctggaccacattggatctagacctcttcgattaaagaaagattagtatgaattctttaaccatttggataaacacaacctggctgctctgacaaacattatctagaacttgaaggatgacatttgggccactgtgcatgagctttcacgagataagggacacacggccctgtgtccc

SEQ ID NO: 721319 - DNA, 223 bp, Homo sapiens
  misc_feature (64)..(64): n is a, c, g, or t
  misc_feature (192)..(192): n is a, c, g, or t
aattcgcggccgcgtcgaccgcccgttcgtgccccgtatccatggcggcgcactctatggcttntcccggcccacgcaacgcgctaccggggctgccttgcgcgcccgtagttcaactggatagagcacgagccttctaagcttggagttgcaggttcgaatcctgccgggcgcgccatttcagtacagacntgcgaaccggcaaggccggttttccgcccgc

SEQ ID NO: 721320 - DNA, 127 bp, Homo sapiens
catagatgactggggcgtttgggtactagaaataacgcacggtctccttgctacgcaccgtatctaggccacgacagacctcatgcttaccatatgacaccagtgtctcactccacaacaggtagac

SEQ ID NO: 721321 - DNA, 259 bp, Homo sapiens
aaattgactgtatgtatattaataaatctaccttcatcacgaaggtgtgcgggccatggtaacttccaacaacttacatatacctatagtcaatttattttacccggcttttaggaagcctaacgtgaaaataaaggaatttggcctttttttccttcagaaggaaaattagggataattcatttaatcaaaaggacaccttgactttacagggtcttaaaatagtattcagcggggtgcagttcctcatcctggggag

SEQ ID NO: 721322 - DNA, 373 bp, Homo sapiens
aaaatgagttgagcttctatccccattccagagagcaccacaacttgaggcccccatgaattcacacacaattgtcaatttctatatgccggtttaaatgttaattgacgcgggtaagtttattatctcaaagcctactctcgtgtaagagtgagaggcatttaaagaatccatacgtgctttcaaaccccgagttcttcctctggccaatgccatatcccagaaaacacagattttttttgaaataatttgtggggaaaatagaaaaatgcctgccttcggcttccctctcttcatatatcctctctctccctcgcgccctctctcatttccccatctcctcctctctaagagtactcagcacatgtggtct

SEQ ID NO: 721323 - DNA, 394 bp, Homo sapiens
tgcaagtcactgctgagtttttgtgtctgcattgacactgctagtgactcacctgtcattccttggtataaggcttcagcttccctgtgctgtgaagaccccatttgtcatcactttgcactttagcactgtgtgacagcgctggatatcatgcttgggggggggcctgtccttgactcccatccccttaataatgtgttttgcttggagttgttctacgtaatgcagtgcatggtttagaaaagttataaatatttgatccgttgtcctctgtgaaaaaaattgcgcccggttttctctttgaaaattttgttgcttcgttgtagtaatgtcattgttggttttgcctgcttttttctaagaaaataatgttacataattggtgacttcaaca

SEQ ID NO: 721324 - DNA, 572 bp, Homo sapiens
  misc_feature (13)..(13): n is a, c, g, or t
  misc_feature (41)..(41): n is a, c, g, or t
aaccgcggctttntgctttaacccgtgccgcctggtcatgntgctggggcttttcgtcccgcccgtgttcgtggtgactacgccaaggacctggcgtgcccgacaccaaggccgccttcctgctcaccatcctgggcttcattgacatctttcggcggccggccgcgggcttcgtggcggggcttgggaaggtgcggccctactccgtctacctcttcagcttctccatgttcttcaacggctcgcggacctggcgggctctacggcgggcgactacggcggcctcgtggtcttctgcatcttctttggcatctcctacggcatggtgggggccctgcagttcgaggtgctcatggccatcgtgggcacccacaagttctccagtgccattggcctggtgctgctgatggaggcggtggccgtgctcgtcgggcccttcgggaggcaaactcctggatgcgacccacgtctacatgtacgtgttcattctggcgggggccgaggtgctcacctcctccctgattttgctgctgggcaacttcttctgcattaggaagaagcccaaagaccac

SEQ ID NO: 721325 - DNA, 410 bp, Homo sapiens
atctcttcgctcatatatctctcccgctggccgtggccttagcaggcgacttagaactggtgcggaccaggtgaatccgactggtatacttaaagcaaagcatcgcagaaagccctgcggagggtgcttgacgcgatgttatttctgcccaatgctctgactgtcctcttgatgacattcaatgaagcgcgggtaaaccgcgggagtaactatgactctcttatggtaccctaatgcctcgtcatctaattagtgacgcgcatgagtggctcatcgatattctcactgtacctacctagtatccagctaatacacagccaagggaccggccttggcgcaatcagcggggaatgaagaccctgttgagcttgactctagtctgacactgttcagagacgttagaggaaaga

SEQ ID NO: 721326 - DNA, 128 bp, Homo sapiens
gataatattccttaaagacaactagaaagaaaagggtccccccaacccacctttatttttttttatactaggaaaatcggccagcaaaacaggatttctggaggtaaatctggtcttcttgtaaatcc

SEQ ID NO: 721327 - DNA, 108 bp, Homo sapiens
  misc_feature (42)..(42): n is a, c, g, or t
cgaggccgtcccggagccccacacaggcggtccgacaatganaccgcagtgccggcgcggaaagtggggcagcggctgctccggtccggtcgtgcgtacggcggccgc

SEQ ID NO: 721328 - DNA, 808 bp, Homo sapiens
ggatctcagctcaaatgtcacctcctcagtgaggctgctctgacctctgtctataagaggctcttcagtgactttctctcatatctctgcattatgtcttcatcgcactcatccctctctaaaatatcctgtttctttctttcttttttttttttttggaaagggagttatccggacccaggtggagtggggggtgatctgttaggacctgtgatcccaaacaaaagtgattctccggcctcagcctcccaagtagcgggaactacgggcacgcaccaaaacacccagctaattgggtatttcagtagagacggggttcaccatgtgggccaggagggtctgatctctggacctcgtgatctgcccgcctcggcctcccaaagttcggggatacagacgtgagccaccatgcccggatatatgaagtttcaaaaaatcagaatacagacacaaaatttatggggagatgagcttcttcttctctctcttcaacaccatcgccagatcacctccagttatacacacactgaaaagatactggaaagacttaatacccaggggaatgggcgatacacgggatggtcaatggtcctttttggcgctgtcactgatattctcataagcttgggcctagttagtgaacccggaactttattttggataggcaaaacatttttttacgcttgacacttgtacagtactagaaggttgcttccaaattgtagaaatcatatccactagtggggaaagttgttttaacccacacctgatatggccccactggggaaccttttgactcaaatgttaa

SEQ ID NO: 721329 - DNA, 820 bp, Homo sapiens
gacgacagctgataccatgcatcgttcaagtctctcttcatcctgccgttcctggtctaagtcatgaggtctccctaagatgagctccgaatcagtctgacgtgaagctctttcactgtgcgagggtcgagctttgagactagactgatgatgagcctgatggagccatttgtgagccgtgccggaactgctcgtggagtgtgtggtaggagagatccactccccaagtgctccagcgccgcttgggggttatgtcacttattgccattggttggatggtagtgtgagattgcactgattattggctggggcacgcaagaggtgggtcggactaggttgttggatatccatagagagatgcttgtctcccaagagagacgatttcgctaagacccaggtgcccaactttaactgtgaaaacagatatttggtggtggcattaacaggaagacactgaagaacatcacctaaggagatttatcttgaaacaagtatggacaaacatttgacagtgattggacgatcatgacttgaccgaggcagtggcaagaaaaaggggctttgcctttgtaacccttttgacgaagcatgactcccgtggataacgattgtcatttcaagaaattacccataacttgtgaattgggccaccaacttggtgcaagttagaaacagcccctgtcaaaagcaagagatgggtaaggtggctacccttcccacccaaagaggtcgacaggggttcttggaaacattttggtggtggacgggaaggtggcttccggagggcaattgacacacttccggcgggcaaggaaactcc

SEQ ID NO: 721330 - DNA, 294 bp, Homo sapiens
tttatccaaataaatattactaattgatttttttatgagggcccattcccaatatcctttgggataataataacttagtgtaaacctttatatttgctgatccagcatgtccccctttatggagtagctaaaggagttgagatccttggaactaaaaaaaaaaaggttgagtggaagttgatagtgtaaggtagtggcaattttccctttgtttttagaattccccccccctcctcccgcttcatccctttcaagtaatgggtcagctaataaaggggcccatgactcccgtca

SEQ ID NO: 721331 - DNA, 740 bp, Homo sapiens
  misc_feature (32)..(32): n is a, c, g, or t
  misc_feature (332)..(332): n is a, c, g, or t
  misc_feature (361)..(361): n is a, c, g, or t
  misc_feature (370)..(370): n is a, c, g, or t
  misc_feature (387)..(387): n is a, c, g, or t
  misc_feature (445)..(445): n is a, c, g, or t
  misc_feature (477)..(477): n is a, c, g, or t
  misc_feature (482)..(482): n is a, c, g, or t
  misc_feature (527)..(527): n is a, c, g, or t
  misc_feature (539)..(539): n is a, c, g, or t
  misc_feature (550)..(550): n is a, c, g, or t
  misc_feature (560)..(560): n is a, c, g, or t
  misc_feature (645)..(645): n is a, c, g, or t
gcacgagaagccatctgtgaagggaatcactnttcttttctggacttgtttccaggtgcagctgcaggggatgacaccgaagatacaagcactgagttcactgacagtattgaggaggaggctgcacaccatagtcaccagcaagtaagtcagtgtcagggtctgggacttccagggtggacagcacacagcccttctgaggtctgatagtctcctgcagcccttgcggacttagtgagaagatatctttttacataaactacttctcagtcatctacctgttctccttgaacttcccagctgcctttccaacccatatcttcactccattnttctctccaatccaccctttggttggatnggatctctntcttctgcttccttccncctcctacccacctttgcccctaattattctctgtagctatagcttcagaagcatttntacttgcaagacgatggacacattcccctggngcttnttgaactgtgaccacagaagacaggagtcatcgaaggctgctcgngaggtgcaggcngaggactgctnggagaactcnagagatggatgcttcaagcagatcttctagtgaattatatccaaggacctatgcactgcaacactgagcatgtactagtgtcagnatggactcacagcatccttgcaacctagactgagctgactatcttcacacataggagatgactgctgtcagatgatatctgactgatagcactgg

SEQ ID NO: 721332 - DNA, 246 bp, Homo sapiens
ggttacagatctagaggatcccgccgattgtcatatgacggccgttgtcagtgtggtgggggacatgagtgtggcagtgactccccagcagtgagggtctctctcttacctacttgtgctcttgcatggggatagatatgtccatggggttcttacctccttggaggccatgttgggccagtgaggtccaccacctgtgttgctagtagccacaattcgtatgtcataccagtgaacatgagcttg

SEQ ID NO: 721333 - DNA, 1525 bp, Homo sapiens
ctttggtgggcggcctaatttatgtatagcctcgtgttgtttcgctgccgctgtgtcttgctattttcgtggttcgtgttcctactctctgtttgttggtttactgcggtgtcgtaataattgtgtacttgccctctgcttctttctcctcctggggggcccacttgtttttcttcccgtgggcgccctcatggggggcccttttttttatagagaatctttttttcccccaggacttagggaggcttgtgggggccaccaccaatgggttttttctcttctcggggcctcttccggggagatgttgtcatgaacatggggcgtcctctggtgtcgccagtcggtgctccttcgggggggcaccacacgcccacatagtatggtgggttctttttggcgggggtactttctctccccgccgccttgttttgttgacaccacgagtctcctcgttgggtttttttttgtgcacacaccccggccccccttttttgtattggtgggggtggcctcccccccccactatattgttgtgcttcccgccacggcgcgtcgttgttgctttttgtgggcaccgatctaccaccccccccgccgcctgggggggtttacacaacaccaagcgagagtggggaatctatttgggggtgctcaccgatgttgtttttgtctcccgcgcgcgctactctaatcttgcgtctcttgccctgggccctccctctctttattgtggggggggtaatacccccccccccctccctccctttgttgggggggcgccacccacttctagtattggtggttcttctcctcgcggcgagtaccccccccccgcgacgttatgctctcgtcggtcgcgttgttgtcgcgcgctggtggcgctcccccccgcgacacgatatatatttgtgcgcgcgccgcccccactactctacgagaggagatgttttctcgcgcgacgacgatgtgtattatattatacacacagatctatattttctatacacgcgcgtgttctttatgtggggcacacatatatatatatatgtgagagatataccacatacacacacgcggggtgttatatgtgagctagttacacacacacccgcgcgggaggagagatattgtgagggcatatagcgagagttttgtgtgaggagagaccccctccccggcgcctctttttatccacggcgcgctctctcactctctggtgcgcagacagaagggcgcgaccacacagagagaggggcgccacccccacacaatactccttaagagagagaaacaccacaccctctcttctccggagagataagagattcttgtttcacaccgtgtgttccccaagagcccgggggcattttttataaaaaaaaaaaacatggtttgtgggctctttttttttttttatagaaaagataagaagagtgtgtttataccacacaaagtttatatttggggcgggtatgttaccccctcacttcccctgtgtggtgggaacagggatttgggggttgta

SEQ ID NO: 721334 - DNA, 198 bp, Homo sapiens
gagagcgagtaagcgagctacagtcagtctactcgacagagagagtgcgacatatcactgcgcgtcagaattgaagtatcccatttagacggatgtactcagttggtctacgcacgatgagcatacttcgaacacttagtgacgtagcttgcacggacgtgtatctccaggagcagcgagactgcacatgagactcac

SEQ ID NO: 721335 - DNA, 135 bp, Homo sapiens
  misc_feature (44)..(44): n is a, c, g, or t
agtggggcccaacttcacagcccaggtctggcctcagtctttgnctatgttgcccagatccacccctcccctggacacgaaggaggacaagcggaaattatagagagaggttatcttcttgggagcatttgcaaa

SEQ ID NO: 721336 - DNA, 1382 bp, Homo sapiens
tgctcgtcttcacgtcggctccctactgtgacatgcgtctctggtggtagtttatctctcttccttgtcgtctctagtcttcgtcttgattcttgctcctatgtttgccgtctcgctcttgcatgcctgctgtctccctgtcgtgggatctctttcgctcctctcgtcagctatatggggccctttcctctcttttcctcggctggcccattgtgttgtataccttcctcttgatggggttctttacctctgcggcgatcttcctgattctgcccatcgatggaggcgcaccttgtttcaaggactgcctaaattgcttccctggccagctgcttgtggaatcccttgataaaccatggggcccactttttagtatgtctaaggtggtgattcgtaggggtctcgatctgcttccctgggacacttccgaaaagtgtaccaccctaccagattgtactatgttgtgttcattcgcctttctttccctgcaaactttttggtcaactgttacctaattgattcgttctatttagttatgtcgggatgagggctatatttatagaggaccatggacactgggaaacatatgccatagtgggactcacgagggcctgggtccttgtacacttacctggctgtataattcaggctcattgcacagcagttgcttgtgtttcttttccccgtgtatcggccctcccctgcggacatccgtctcgtgaggtagtaggcttgcattccactgcgaccctactgcccgtcttacaatcaaggtaggcctgtgggcagggccatgtccctttctcctcgtcccctcgtacctcttactgcatgttctccctttctccgtcagtcatggaagccctgggagataaaccatggcttcctggagttcgatggaatataaggttggcggtggcacataatcgcgtcttgttgtggagtgtcgagggtaaaataacccacagggtacaccagaatgattattgttgttcttcttgtctttctttgctgtaccatagtcaactgcacgtgtttaatatttttaagagatcgtaggcaacttacgagatcgacagcctcctatctccacattctctgatagacacgcttcgaggggtcggggagacgaaaaagtgatattctagcctttcatctgcagtaatcggggggaccatatactgacctcttcagcagcgcgaattagcaacaagtttctaggctgtggttggataaatctcacaagagacctgacgatcatcttccacgctcagcttaaccatgaccgtgaaacctccagcgtgaactttgggggatctttcagtggaaacgtcgcccgccaaatgtcgaccagcccccaaatgtaaagatttgtctctgca

SEQ ID NO: 721337 - DNA, 119 bp, Homo sapiens
tctcgttcagtgcattgcgttaggatttcattgagtcgctcctctgtccccagcatagccgccgcctctgtccccaccatagccacccccacttctgtctccaccacagccgcggccgc

SEQ ID NO: 721338 - DNA, 144 bp, Homo sapiens
cccccccccccccccccggggggatggggggggccccccccccccccccccgggtgggtttgttttcgggtttttttttgagccgtccataaaaaacccggggttttttttccccgctttcccataaaaggggggaaaccggga

SEQ ID NO: 721339 - DNA, 216 bp, Homo sapiens
aacgtcctgggctgaaatgatcctcctgcatggtgctcccgaagtgctgggataacaggcatcagccactggccctggtcaggctccataaacttgacgtgtcttgcaatacactgtttactcttagcccaaagcacccaatgacatatcttaccctacctgtatcaccagatttttctggccctgactctgttctactgtcactcttggcccaat

SEQ ID NO: 721340 - DNA, 426 bp, Homo sapiens
  misc_feature (426)..(426): n is a, c, g, or t
ctgacttcaagaatgaagttgcggaccttcacggtgagtgttacagctcttaaagatgacacagacccaaagagtgagcagcagcaagatttattgtgaagagcgaaagaacgcttctacagcatggaaggggacccgaacaggttgttgctgctggctggggtgaccagcttttattcccttattggccccgcccatgttccatttctgtcctatcagagtgcccttttttcaatactccctgcatttggctacttttaggatcttgctgatcggtgcattttacagagtgttgattggtgcattttacagagtgctgattgttgcattttacaatcctcttgctagctacagagcactgattggtgcattttacaatcctcttgctagctacagcactgtttggtatgtttttacaggcgctgn

SEQ ID NO: 721341 - DNA, 944 bp, Homo sapiens
tcgacccaccaatcacatgcctatcatatagtaaaacccagcccatgacccctaacagagcgccctctcagccctcctaatgacctccggcctagccatgtgatttcacttccactccataacgctcctcatactaggcctactaaccaaaacataaccatataccaatgatggcgcgatgtacacgagaagcacataccagggcacaacacactgttcaaaagggctttcgaatacgggataatccttatttatttaaccttcaagaaattttttttccttccggcagggattttccttggagccttttaaccacttccgagcttaggccctaacccccccatttaagggaagggcactggcccccaaaaaggggattcaaccccggttaaatcccctaagaaagttcccactcctaaaaacattccgtataactcgcatcaggagtatcaatcactgagctcaccatagtctaatagaaaacaaccgaaaccaaataattcaagcactgttattacaattttactgggtctctattttaccctcctacaagcctcagagtacttcgagtctcccttcaccatttccgacggatctacggtcaacatttttttgtgagccacaggctttcacggacttcacgtcattattgggtcaactttcctcactatctgcttcatccgcaataatatttcacttacaatccaacatcactttggcttcgaagcggcgctgatactgcatttgtgaagtggttgcattctgagtgctccccattgtggggtggtaaacaacaaaaacaaacaaaaaaaaagggggggccgaaaaccggggcccacccccctttgaaggcccaaggggataaaagagcgggtacgggaaagcgctctggaccccgcggtggcacccaaccgaaagtatggacgcgcggcccctaaacaagc

SEQ ID NO: 721342 - DNA, 314 bp, Homo sapiens
aaacccggggggggttccccccccgggttttttccttggcccgggggggggtaacctttttcccccgggaacccctttttccctttggccctttttgggggcccctttaaccccgttttttccaaaaaaccggggggggccgggccgggatttcccgggtttttttccccccccgggccccttttttccttttttttttttttttccccccgggggccaaggggaaaactttttttttttttaaggggcccttttttccccccgggggggggccctttttttttttccctttttttttttttttcggggggcca

SEQ ID NO: 721343 - DNA, 1640 bp, Homo sapiens
  misc_feature (859)..(859): n is a, c, g, or t
  misc_feature (1057)..(1057): n is a, c, g, or t
  misc_feature (1118)..(1118): n is a, c, g, or t
ggatgttgtgtgatgttggtatgtgctacggtgtgctgctctgcaagaagaccgtgcttgatcaacaccgcacgctgggtgtggctcactctatattcctccggagaggtgccgcccaggtggtggtcacaaagagccccggtgcgtgttttttaccgcctcggcctcctgtttttatctcccggttctcttaagtggtaaccgcgcccctcgtggggcccagattttcttggcccacgagatggttggcgaccgacgaacacacatcggccgcggctggcacaaagaacccaacgccgcctcttttctgtataatgccccgccccaccaaaaggggggacaccacacgaaagagaagagggggatgggaaccaccacatttgtttgctgagaagagaaagcaatttggggttaaaaggaaaaggggggagaaagcccacccccgtgccttaatggggttcccaaataagtaagagaagaaatatattatggagaaaaggaacagccttctgttgccacgctccacgggggacacccccaaggggggacacccccaacagagtgggggccacttactcggaaggggttccttccccacaagaaggtttctcctttggtgggtttttgggaaagaaagggggaggttcttcttctgcccttggaaatattttgccgccccgggagaaatatgggggattgggaaagatgtcggccgacatattttaagaaagagaaaatatttctccacaaccgcttggtgattatttacccttggagagaagatatgattttctcaaagagggtgtataagatacactcgcccccctgggactttaaacatttcccctcagggccatangggatatttttaccccccgtggcacccacaaataagtgggtgtgcccacataaggtgccacaagaaataggcgccacgcacccacataggagtgtgtgagagcgttccaccgtgtggagtatgtgccacaggacatttacccgcagtagggtgtgacatatggcgttgtgtcgtgtctctgtgttctctgtggtgttngggtgttttttacattataaaaaacacgccccactctcattctcacgatataccgcgagangcacactctctttatatgctctccacgcgcacacaccacacacggtggcccgccccacatatcccgcgaagaaagaatatgtatggggaaaataccatggacaccgcgagagagagtgtcccagacaccacaataggacattgtgaaagagaagatggtgcccacatataagatatgggatatccccaggaccagacccattgtggaaaagaacacataaagagaaaagagccttttccccccatactttatattaatcctcttccacttgaagttcttcgcttatgagaaaggtataaaaatggctgagaagaaggccccacagtttgaaattgggagaaagctcactggaggcttcactggtgagaaggcacctatagtttctgggaaaagcccctcggggaacgagagaaccggtgctaaaattgaacgagctgatggatatgaaccccccctcccagaaatctgtttataagattccagacttccaatagtggcccaattaaaagtgctatttgtgga

SEQ ID NO: 721344 - DNA, 179 bp, Homo sapiens
  misc_feature (98)..(98): n is a, c, g, or t
tcacacaggtaactcggaagacaaaggcgctttggctaacgttgatggaagcgtcgcgcatatgcgcgagcttccatcaatccctacaggtaccaggnagagcaggatccacttcagcacctggaacctggatcacataatagaaaagaaacgcaccatcattcctacactgatggaag

SEQ ID NO: 721345 - DNA, 537 bp, Homo sapiens
tggccgcacgtggtcacacgtcgggcttgatgaactgcattgtgtcgtaatcgccatgccggccctcacgctgccacccggcagttgatgtaaacgagatgtcctttccgggtctcgcttcgaggaacagcaactggcaccacgagttggcggctggtcgtgcctcgccaccaggaaaatgatgcgctccttgagcaggcgcgagtgattcataagaccgtcgccggcccgattgctcgacgaccatcgggatcatgccgaggccttgaatttcgtttgcgatcatgaattagctctccgggaagatgaaatcgttcgctgtattgaactgtacgcctgagtgaaatggggctcgtgccgcaaagcacaagccccattggcgatgcgggcagcgacggaaatcagccctgttgctgctcggccaatcagttcgtcgaacgagaccgacttttcattgaccttgggccttccggagcacgaagtcgggtacgttgtgctcgatcacaacgggttcgacttccgccaggcagtatttgt

SEQ ID NO: 721346 - DNA, 801 bp, Homo sapiens
  misc_feature (29)..(29): n is a, c, g, or t
  misc_feature (84)..(84): n is a, c, g, or t
  misc_feature (88)..(88): n is a, c, g, or t
  misc_feature (91)..(91): n is a, c, g, or t
  misc_feature (99)..(99): n is a, c, g, or t
  misc_feature (105)..(105): n is a, c, g, or t
  misc_feature (108)..(108): n is a, c, g, or t
  misc_feature (129)..(129): n is a, c, g, or t
  misc_feature (138)..(138): n is a, c, g, or t
  misc_feature (140)..(140): n is a, c, g, or t
  misc_feature (177)..(177): n is a, c, g, or t
  misc_feature (185)..(185): n is a, c, g, or t
  misc_feature (210)..(210): n is a, c, g, or t
  misc_feature (217)..(217): n is a, c, g, or t
  misc_feature (225)..(225): n is a, c, g, or t
  misc_feature (246)..(246): n is a, c, g, or t
  misc_feature (250)..(250): n is a, c, g, or t
  misc_feature (255)..(255): n is a, c, g, or t
  misc_feature (277)..(279): n is a, c, g, or t
  misc_feature (288)..(288): n is a, c, g, or t
  misc_feature (291)..(291): n is a, c, g, or t
  misc_feature (298)..(298): n is a, c, g, or t
  misc_feature (304)..(304): n is a, c, g, or t
  misc_feature (358)..(358): n is a, c, g, or t
  misc_feature (454)..(454): n is a, c, g, or t
  misc_feature (542)..(542): n is a, c, g, or t
  misc_feature (547)..(547): n is a, c, g, or t
  misc_feature (619)..(619): n is a, c, g, or t
  misc_feature (644)..(644): n is a, c, g, or t
  misc_feature (647)..(647): n is a, c, g, or t
  misc_feature (674)..(674): n is a, c, g, or t
  misc_feature (711)..(711): n is a, c, g, or t
  misc_feature (713)..(714): n is a, c, g, or t
  misc_feature (740)..(740): n is a, c, g, or t
  misc_feature (778)..(778): n is a, c, g, or t
gggagagaggggggaggggactggggggnggggacgaacttataaaactgaaagggccaggacagaactgatagcaccctcccngggnggngagggggnggaggnggngggcacagaagttcaccagcngcccaaggngncctttccccaaatgtccatggggtctgcgtgcttggnagccaagnagggcgtgtggcccttcacgctggncttgggntgcctggnccctctggcccttctcacacngggnggggnggtttctccctgaatggggggnnnggggggggnttnggggggngggggntcccacctctgctgagccttcacccagggggtccttgacctttgctctcagganggagcccgtgccagctgatactggagtaggagtgggtgaagaccctccgggctcccgagctctagaggaaggtggtcctgacatggtttgggagcngagaagaaaggaggttgaggttggggaatccacccctgttctgggctgggaagcacttgcagaccacagagatttccagtgggaagtnatgtngcccctccctggctatgttcctggctggcccctgcgctgatcagagccacagaaagtgggccacttttgggncccctagtccccctagtgacaaaanaanagaaggtggtggcaggatggtggtcangcaggacgtgtcaatccttgcccgctggggccaggcngnnggggagcagcttggtgtggccaaaangcgacagagcggtccctgcaggggagtccagcttcacnttgtccaggatggtcttcttgat

SEQ ID NO: 721347 - DNA, 419 bp, Homo sapiens
cattattcatgcttgtggtgatgctggtgtaaacaaacctccggctctgccagttagataaaagtatagcatatagaattatacatataatacataatacttgccagtgataattatattattgatttatggacatgctctactttttattgttattttagagtgtacctcttctacctattaaaaaaaggttaactgtaaaacagccacaggcaggtttttttgaaggcattgcagaaaaagacattgttatcatataaggtaacagcttcatgcatgttattgcccctgaagaacttccattgtgacaagatttggaggtgaaagaaaattatattgatgaccctgattctatgtagaactaggctgatcagtatgtgacttagtttttaccaccagcaagaaaaatgtaaaatcca

SEQ ID NO: 721348 - DNA, 519 bp, Homo sapiens
  misc_feature (519)..(519): n is a, c, g, or t
tcatgcatcttgttctaggaatcaccatgatttgatgacttttttttttcattgtacgtgcatgggggataggcctgtgaacaagaccaacccaaatgaattccctcttgaccccgccggctccgataattactcgaaccgggcacaacaaccaaggttttctaacacccttaaaaaaagccacaaacttttggtatcgaaaagaggggggaaaaaacccccctttatttgaacaggtaaatgtttgccagcgctttccttccactagggggagagtcaccaaaagcccacccttcctgttgggaaaaaaaaaggggtttggggtaaagcggctctaaacgccccccaaaacacaaggaaaatggggaaaaaaaaaacctttggccccccctttggcgggggggtttaaaagggcggttattccccaataatttggtgtgactcttggaaaaaaacgttgttaaacaccggggggaaacaaagggtttaagccaagggggggctatttctgtaatggcn

SEQ ID NO: 721349 - DNA, 232 bp, Homo sapiens
cacgaggccactgttcactgatggagagcaggggatcccaaccgcttgcgctgcctttatgcagaagccggggggcggccacgtcggggtctgcattgggaacgagagggggggccccagtgcagttgggtgacctagcgttggacactggagtttctggtgtctttgcttggaactgaactagctcgtcgtaaggagaattcggctattggtcccagagaccctgctgacg

SEQ ID NO: 721350 - DNA, 1773 bp, Homo sapiens
  misc_feature (1)..(1): n is a, c, g, or t
  misc_feature (1019)..(1019): n is a, c, g, or t
  misc_feature (1053)..(1053): n is a, c, g, or t
  misc_feature (1262)..(1262): n is a, c, g, or t
nttccgtaccctgaacgtgttatcatctattcgcgcggggcgcagccgcgggtgattgctcgcgccctccactgttgatcgtggggcacagcgggggaccacagataagtgctcccccgaagaggatttctctgcgggagggatcaatagttgctccccagcagggatatattagtcagggagcgcgtgtgagtagtgtctccaccccttgttttctatctacaatcaatgtggtgggagcgcccgcgccttttgtggtttatataacgtgaatgtcctctcttcttattagataagtgatgttactacagttagtttcgccttctccgtagtagaggtgagtaagggttggctagtttagtgtttttgtctgtgtttttgctcccctcgtcggcccatccaccttttatttatgaggggagtgatgtctccgcgacacggaggtaagttgcacctctgtgaggtggttggttcgttgttgcttcccctctgtgggggggaggcctcgtctcttttttctgttactaaagatgatgatggtagtgagcgtgctgctgttgtaggtaagacgtagtttatttgttggtgccctagcgcctgtcgtctcgtcatgagttacgtctacagtatgatcgctccgtttgtttctcccgcagtcgtctacgtagcgtgttgctaacactcccacgacgggttgtttttacaagaggagcaacatattttgtttgttgcggcgctcttatataatcggcggcgggggtgattagtatctatcaacaactaagggggatgagccaacaactattcttcggcatacttctcttgctggggcggtgttatgtttttataaggatatgctgcttgttccaccaccaacacggagaggatgttggtgggttcatctacacaccgcctcgcacattactacgctgtgggggcgcacaacatacttatatctcctcatgtggcgctacacagtatgttattctctccattatactgtgtgctactctcaccgntggtggcacaacagagaggggcgctattcttctngtggggggggggacaccacacaagagattactcgtcgcattataagtctgctccatcacacacaactagtgttgctcactctcgtgtcatcacgagtggaatactacacgggtcgcttctctctgtcagcggtgtctctgctgtgtgtgtgtggtgagataacgcatcttcttctactattctctctcgtgcgacgacacacacagcgngggacgacactctgcggcgtactaatctgtgtctctcctcacccacactactctgtgggcgtcttcacatagagatatactctgtgtctcacattgagatgagaggtgggggtgagttccgagagtgagactcggttatacacacactctcacacctccgcggggtgttgtcacactctgccacacacactcgggcgacacactcttttctccacaaggcccacacctcttatgagagagccactcttttataagagacctctcacggtatcctgagacccccgagactctcttgtgagaagagagagagccgtgaattttcccacaagtgtgttccctatattcaagagaggtgttacttgtagcgcacaccttctttcaaagaacccacacaccccagagagtgtttccgggcacacggagactcacgggcccacacccggggggaccacaacacataaggggttttaataaccacaagaaaaataaaagggagaaataaggccggaga

SEQ ID NO: 721351 - DNA, 1192 bp, Homo sapiens
  misc_feature (636)..(636): n is a, c, g, or t
gacccacgcgtccggacgcctaccatgggactggctgtcactgggagcgcttcatgtgcaaccttgactgccaggaagagccagattcctgcatcagtgagcaagctcttcatggagatggctagagctcatggtctcagaaggctgcgaaggatgctggtctatgagtacctctgcattgactgactgtcaggcatggtatccccaacatgatgattcagacaaggccatgacttcaggcagacccctcagcgctttcctcactgggattcagcccagcctatgctaatatatgttcacgaggcaaaggactgaagctagggatttatgcagatgttgtgcatagatataaacctggcgcaggcttaccgctgggcagtttgtggataacgtacgagcattgtatgcccccagtaccttatgctgtactggcgcgagtctgcatctgagtaataccattatcgagtggtcgttcactgctgacgagtagccgtgaatacactttggccatgcatcggttcatatatgccctattgttccttaggcccttggaatatggacttggcacgaaagccattagtgtaactccttgtgcagtggcgctcgtcctataatgtggcccctttcgaggaagcnccaattgatactagaaaattccgacaggtactgcaatcactggcgaaattttgctgaacattggtgattcccggcaaaagtataacgaggatcctgggacctggaccctctatcttaaccccgtgggaggacatggttgcttgttgcctggacgccgctggttcgtggcactatacgcccacttttgttggcgaatgggccacaattgggcacaaagggtggaactcccaacactcaaatggcccactgggcacaataaggagacaccaaacagacgttaaggcccccgcgaaaaatagcgaaacaacaccccctacaaaaaagggaagctaccaacaaggcccctgtagaccaggcgcacacacggggaacgactacgcggggagacccacccacatcgctgctggtgtacaccacgcggggatggtctctcaatacccctcgaggaagcatacgaaccccctacagctcgtcgacgccacaggacgtccgcgcttcgggttctcctcttttgcttttctcttgagcaagatgagagaaaaaagaaagaaagaga

SEQ ID NO: 721352 - DNA, 159 bp, Homo sapiens
gataagacctcactgccagggtgataagcgcgtcatcacgccagctattttgatttagtaagatgggttcacatgtggcaggctgttcgactctgactcatgatctgccgctcacttccaaagtgctggatacagtgtgagcactgtgccggctaggac

SEQ ID NO: 721353 - DNA, 885 bp, Homo sapiens
  misc_feature (9)..(9): n is a, c, g, or t
  misc_feature (65)..(65): n is a, c, g, or t
  misc_feature (72)..(72): n is a, c, g, or t
  misc_feature (102)..(102): n is a, c, g, or t
  misc_feature (115)..(115): n is a, c, g, or t
  misc_feature (132)..(132): n is a, c, g, or t
  misc_feature (136)..(137): n is a, c, g, or t
  misc_feature (139)..(139): n is a, c, g, or t
  misc_feature (143)..(144): n is a, c, g, or t
  misc_feature (147)..(147): n is a, c, g, or t
  misc_feature (157)..(157): n is a, c, g, or t
  misc_feature (168)..(168): n is a, c, g, or t
  misc_feature (182)..(182): n is a, c, g, or t
  misc_feature (188)..(188): n is a, c, g, or t
  misc_feature (193)..(194): n is a, c, g, or t
  misc_feature (196)..(196): n is a, c, g, or t
  misc_feature (199)..(200): n is a, c, g, or t
  misc_feature (208)..(209): n is a, c, g, or t
  misc_feature (212)..(213): n is a, c, g, or t
  misc_feature (216)..(216): n is a, c, g, or t
  misc_feature (221)..(222): n is a, c, g, or t
  misc_feature (225)..(225): n is a, c, g, or t
  misc_feature (227)..(227): n is a, c, g, or t
  misc_feature (230)..(231): n is a, c, g, or t
  misc_feature (233)..(233): n is a, c, g, or t
  misc_feature (236)..(236): n is a, c, g, or t
  misc_feature (239)..(240): n is a, c, g, or t
  misc_feature (245)..(245): n is a, c, g, or t
  misc_feature (248)..(248): n is a, c, g, or t
  misc_feature (255)..(255): n is a, c, g, or t
  misc_feature (269)..(269): n is a, c, g, or t
  misc_feature (278)..(278): n is a, c, g, or t
  misc_feature (287)..(287): n is a, c, g, or t
  misc_feature (300)..(300): n is a, c, g, or t
  misc_feature (303)..(303): n is a, c, g, or t
  misc_feature (306)..(306): n is a, c, g, or t
  misc_feature (311)..(312): n is a, c, g, or t
  misc_feature (314)..(314): n is a, c, g, or t
  misc_feature (323)..(324): n is a, c, g, or t
  misc_feature (333)..(333): n is a, c, g, or t
  misc_feature (339)..(339): n is a, c, g, or t
  misc_feature (344)..(344): n is a, c, g, or t
  misc_feature (459)..(459): n is a, c, g, or t
  misc_feature (479)..(479): n is a, c, g, or t
  misc_feature (495)..(495): n is a, c, g, or t
  misc_feature (573)..(573): n is a, c, g, or t
  misc_feature (586)..(586): n is a, c, g, or t
  misc_feature (732)..(732): n is a, c, g, or t
  misc_feature (884)..(884): n is a, c, g, or t
catttatancttaaatgtttcattgatgtcatcaatattacaaaaaaggaaaaaaaagtgtaggnaaagtgngagcacaggggccagcgcacacctaaagtngaccatgcttctntccttccactgccaggntatnntnccgnnttnttccccaccncctcgctttcntcctccgctttctntaattngtctnntnggnntatcttcnnttnnttntcgcnntcntnctnntnganctnnccttnttngttggcngttgtgtcctggtncttttggtnctcggtcancaggttgtttatnttnttnttggnntnggtgaattnnatcttgttnatgttntcgcncgtgtaccagtgcaggaaggccttgcgccggaacatggccgtgaactgctcggagatgcgcttgaacagctcctggatggccgtgctgttgccgatgaaggtggccgacatcttnaggccgcggggcgggatgtngcacacggccgtcttnacgttgttggggatccactccacgaagtagctgctgttcttgttctgcacgttgagcatctgctcgtccacctccttnatggacatgcggntccggaagatggcagccaccgttagtagtggccgtggcgcgggtcgcaggcggccatcatgttcttggagtcgaacatctgctgggtgagctcgggcacgtgagcgcccggtactgctggctgccccggctggtcaggggcgcgancggggcatgaagaagtgcaggcgagggaagggcacatgttcaccgccagcttgcgcaggtctgcgttcactggcccgggaagcgcagcaggtggtgacccgctcatggtggccgacacaggtggttgaggtcccgtagtgggggtggtcagnt

SEQ ID NO: 721354 - DNA, 284 bp, Homo sapiens
cagcaggagacggcaagtgctggggggtgcagtggacggcttccttcctgcgcaatgtgacttggagctcgctgcggtggaagacttccttggcgcgctgtgacaacgagtttgatacagttgtggaagaagggagtctgccccaggtgagccagcaaatgacgacccactgttccaccaattccagaggggtgactggggctgctctgagggacgactggcctcctgcatcactcagagaacaatgcacgggtcacagccactagcacttaagacacgctacg

SEQ ID NO: 721355 - DNA, 643 bp, Homo sapiens
ctgttcccaggttctagctttgtctccctgttgctactgccaggctctggtctggccaccatcatcttctcccgactctgcccaccagccttgtcctaataaaattaagttgcatcatttaaaaaaaaaaaaaaaaaaaaaaaaaaaaaaaaaaaaaaaaaaaaaaaaaaaaaaaaaaaaaaaaaaaaaaaaaaaaacaaagaaaaaaaaaaagaaaaaaaaaaacaaaaaaaaaagggagcaagcagcaccaccgagagcgagagcagagaaggcagagaagagggggtaatcaacagagagctcggggcggggcagcaagaccgaaggggtaggataaaccacgggcaagaatacgaaacggacgaggggcgagagagagaagagaggtggaacgacaagacaatcgcccgaagaggttgggacaacacgcaggagaaagcaaaactaggacgcgcggtcgagtagaagaccagacggagaggaagatccgaaagagcggacgacagagaagaaagagagaacgagcgaacgcaggagaaggagaagagagaagagagagcacaggaagagggaggacggagacaggcagagggacgagaggagagaaaaaaaagcgcgagcggcgcgaagcggaaggaga

SEQ ID NO: 721356 - DNA, 213 bp, Homo sapiens
gtacggtccggcacagtatattcagcagcaaaacaagaagtggtacgaatttattagagaacaaattcaacaatatggcattattatgcgggatcggacgtttcttttgtttgtagttgccggtattttagtagcgcaaatgtttatgcagctcgatttgctcacgccgggtgaacttcggggtaccgcagctcgacattcgctacatcatgg

SEQ ID NO: 721357 - DNA, 1073 bp, Homo sapiens
acatgagtgctagaggagggggccgaggaatggatagtggctctggccatcttctggatataaattctactccggaaaaattaaacttcacaattggaagaataattaggactctcaacgtgaatagtatctccattactaaaaaagtagatacttaacatgatgacagtcaaacagttccgtgatgcaaagctggtacgctaagtgtaagagtgatgcactactatttcctttatctacactcattcaacagggtggcaattaattggggctgccagattcaaataggcactttcaatgagcattatactggaaggacctagcttgaagtcggagaggcctgggtataggacacagtggtggataacgaggccgattgctaaggacacttaacatgtgctggttgggatttgagggttccgccccaccgatgtcaatcaattgattcaaactcggttagcaaaatagatgagtacgtaagtgcggattatggattgtcggaacattgcctagtcagagagtgatcatatataaggaaattgtgggatcatccctgtgggaatgttaaggactaaatattcgaggaacaccatgatacgtactggtgaaataatgcggggatatatgaagggtccatgcttcaagaaatgtacagtctagcgaggatgtgatataggctcccaagagaaaggggttgggattacgggaagtagattatctaggaaatggatgatacttcttgactaactggagtcgtacaggtagctgtgagggaaaagttaggcatgagatcgttaatctgcccaaggtttaaagagctgcattgtggagaatggacatattgttaggagaagaacaatcatgagtggattccggcaaggctgattgggtggcctgggcagaaagggtaagaagagaagaggggttgggtctgtaataggattccgagtggatgtgggtggagtgacagcatgtcatgtcgctagaatgaggagaaaggactgttggggaggggaaattttacgagaggggattttggagggaagtgtaggtatagggctagaggaaaatta

SEQ ID NO: 721358 - DNA, 304 bp, Homo sapiens
cctaatcatatgctgtcgaatatgatactttgaggagagagtgtgctcgaacttagacgggattgggtaggccaagtatgctaagtgtacaagtatattttttaatttcacacctgaaacaaagaaatgtggtcactaaacaataaaagtatatatagtaggaattaatgtactcttgcttttgtcaagctagtaggcaatagtttccaaggtattatgttactctaactctaaaaagtgatgtaatctgttagcaatgtagtatttcaaataaaggcatttacataatacatttagggttgat

SEQ ID NO: 721359 - DNA, 141 bp, Homo sapiens
ccaaatgcgcgaccgacgacgccggaggggttcgtgttttcgctcaaggcgtcgcgctatgcgaccaaccgccgcgaattggccggcgccaaggattcgatccagcgcttcgtgaacagcggcattgccgaactgggaccc

SEQ ID NO: 721360 - DNA, 819 bp, Homo sapiens
gtattatttttctctttcccccccacccaccccaaaagagtctgctctgcgccacgcgggtgcgtgtgcagcttgctcactgggctccgtttcccgggttcgggcagttctcgtgcctcagcctcctgagtgttggagatacgggtgctcaccattataccgggctagttttgtatttcgaagagatggggttccgtcatgttgcccaggtgtgtctaaaactcctgacctcaagtgatccgccccggctttggccttccagggttgctgggattacaaggcttgagccaccaaggcctttcttttgtctaaggagtatagtcagatacttctagtagtatatatttcctaatacatggaggatgtaccgtaaggattcaaatcttaaatcagtatactgcattttgtcattccagagataaatcttagaccctttctgtggctcttctgacataattctatcctacagtctcagagatgttgttgtatctggccccccaacccatgatagtgatagggtttgccttgaaggaattgctggaatttagctattcccccctctagatttctagttccctttccagtatggctgggcttgagactttgatacctagtactccaggttcagatgctcgcctctttgcaatttaccactcatcgaccatacgtccgtaccacccacacacacaaaaaatgttggcgccgcccgaaattttaacccttttgggccggcccaggaagaaactggcagtgtcaagaccggcgcgagggtgtgccaaaaaccgggcgcggtacacaagggtggtggttacggcgaac

SEQ ID NO: 721361 - DNA, 570 bp, Homo sapiens
atggctttgccttttgctttactgatggccctggtggtgctcagctgcaagtcaagctgctctctggactgtgatctgcctcagacccacagcctgggtcacaggaggaccatgatgctcctggcacaaatgaggagaatctctcttttctcctgtctgaaggacagacatgacttcagatttccccaggaggagtttgatggcaaccagttccagaaggctgaagccatctctgtcctccatgaggtgattcagcagaccttcaatctcttcagcacaaaggactcatctgttgcttgggatgagaggcttctagacaaactctatactgaactttaccagcagctgaatgacctggaagcctgtgtgatgcaggaggtgtgggtgggagggactcccctgatgaatgaggactccatcctggctgtgagaaaatacttccaaagaatcactctctacctgacagagaaaaagtacagcccttgtgcctgggaggttgtcagagcagaaatcatgagatccttctcttcatcaagaaacttgcaagaaaggttaaggaggaaggaataa

SEQ ID NO: 721362 - DNA, 239 bp, Homo sapiens
aaacggcacctccttcaggatgacgcgtggttctgcaattggatctccgtgcagggtccgggagcaaacggggacgagttcaggttcccctgctaccgctgggtggagggcgaccgcatcctgagcctccctgagggcactgcccgcacagtggtcgatgaccctcaaggcctgttcaagaaacacagggaggaggagctggcagagagaaggaagctgtatcggtggggtaactggaa

SEQ ID NO: 721363 - DNA, 473 bp, Homo sapiens
cgtgacgcgtgggtcggacgcgtggtgtcgaggactggaaggactgagcccagccagaggcgggcatgggcagactgacggacggacgacggacaggcggatgtgtccgcagcttctggacactgcctacgagtaccggccagagaccacagctatcgagacacgccgatagaatcgttaccctggtggactcctcggtacagcaaccgcctataatctccggtgcgtgacccactactctgggcgccacatgtaccaacggaaatttaacaacgtcctatatgctgatcaacatgtaaaagatgtttctaaagctgtttctctcacggggcataacaaccctacagcgcggcccattatgtggcctggcccgcctcttgagctacgtcctgtggcctttaccccgtgacaatattgccttatatagcacaacactttctttctcacccagcgagacccaagcggaaaataag

SEQ ID NO: 721364 - DNA, 741 bp, Homo sapiens
gaggagtacggaaggatgctgcaggctgaccccaataaagtttctgcaaggggcgaagaaaagaggacttcctcagatggggacccgtgggagcagcatactcattgaaaatctcatccacaacctggacctcgtgccgaattcgtgcactgaggccggactacgtcggcatgcggcatcttcaaagacggagccgggagttcttggactacagtgtttcgccaccatgatgtcgcagctataatagatgagctgcagatacttggatgaagatcaataaaaagctgctggatggatcaagaatgggctgtctttgcccaacagtgcacggtggaaaagagtgtgctgctatgtgactgactgctctggcagaaaatgagtgctcagacggacataacgaggaagtgcctgtcgaggcggctgcgcgttgggtggctacctgccatgccattgacacagattggcacaagtggcaagcccttgccttggaattagtccagtctgatcgtatcaggtcgtttccttgattgtccaattcatgtgatctgtgtgtttgcatactaggggaacatgagcaagccctgcatggatattgcattgacctatgaaagcagtaagtatacccacaggggggtgtacgggtatgccatcagaatgatcgtgtacgcttgcaataaactacttcgatgaatgtgtgtccagactgtgagtgaccactggccgagcatgtggacacatact

SEQ ID NO: 721365 - DNA, 127 bp, Homo sapiens
ctttttccggggcccccgggcgggagtggggaagggtgggcgcacgaaaaatgggggcctctgtacagttgttactgactttgatttttaaggagccaataaaccccgtttcagagaaaaaaaaaaa

SEQ ID NO: 721366 - DNA, 650 bp, Homo sapiens
  misc_feature (465)..(465): n is a, c, g, or t
gccttgggcccgcacccccgggggtggttcactcacgctttgtggagagccacatcgctctctcggaggccgcactgccgctattgaagggccttggctggcgtttcacaggtcccaggcccactgggcctggtatgcaccacatgtctcgtgccctccacagagagccacaggggcgcccagaatagattttcctccctggtttgcagctgttttccaaagcccccgataatcgctcttttcccactcccagatgccctccattaacccattagtggccagactactggacttctatccatggtgactctaatccagtccctattgatccccgcttgctgaggggcagggagagcgcctcttcctctgggcagcgctatctagataggtaagtgggggcggggaagggtgcataactgttttagctgagggacgtggtgccgacgtcccccaacctagttaggntaagtcaagatcaccattccagggttggtaatgttggatgatgaaacattcatttttcccttgtggatgctagggctgtagagttccctgttggacccagtctgttttctatttgttaagaaaaactccagcatccttgcataatttttgatggtaataaatttgaataatcagattttttacca

SEQ ID NO: 721367 - DNA, 109 bp, Homo sapiens
ggagtgcagtggcccaatctctgcccactacaacctccgtcttctgagttcaggcgattatactgcctaacccttccgagtagctgaaactacaagtggccaccgacga

SEQ ID NO: 721368 - DNA, 382 bp, Homo sapiens
  misc_feature (46)..(46): n is a, c, g, or t
attgttaaaagcttcgcccgcctcattgagttttataagcacggancttgtggccagtgtccccaaccccgtgagggtgtggatggttaaacaaggttatggcctttttgtgaggggggatcccggccggccaaatttcctccttgtgggggatagcaagcaaataaagggccatacattttgtgttttgggtgcgggggccccctggcttgtgcagggtttgatccccccctttgggggggggtttaaggaggggattcaggggttttcccaccagctttggggcgggggggttgcttttttgccccccccccggggctgttgttttgggtttttccttgtggaatgttgggcatttaagggggttttgccccccttccca

SEQ ID NO: 721369 - DNA, 136 bp, Homo sapiens
taccctattgtggtgaaacccatctctactaaaaatacataaattagccgggcgtggtggcgggcgcctgtagtcccagctacttgggaggctgggactacaggtgtgtgcatcacacctagcaattttttttaat

SEQ ID NO: 721370 - DNA, 972 bp, Homo sapiens
cggaggactgcatggcaggatgacgcagaacacggtgattgtgaatggagttgctatggcctctaggtcgcatcccgagtccacccacgtcgacgtccacaatccaccaggagtcagactttgacacaactgctgaaagctggaggttctctgaagaagttatcttttctcaccctggaggtacacgtgtgtcgcattcgcagcagccaggattggttatgaggcatgctgtgctctaggggtgactctagtatattagctggtgggtttgtgatgttggtcgttcattgtgagtaagtgtctcgagtcttggggccctggactgtgctgagtgccgtcaggctgatgccttctgggcggggtcgtgtggatgatcgcaggcaggagctggggccatggtccatgagaaggcacccgggacaagactgtgctggctatatatccagacctgcatcgaaacactggcgatggcttgtgtgctacagcctatggcctgcctgttgtccgtcgtgccggtgaactagcgtgtacatctggcagaagctggaaccctttttatacatcgacgactgtgctgtgatcgcatcaggaccctgtccttcccgtacctactgggcgtcactagcatggatgcgggcagaagtccaacgaggaaccgataatgggcccagacaggcaggaagtgtagagcttacttgcagatgctgaggaagttgttcgacaaagctaatgcgtgcccatgttccctggctgtgtgtgtctcggcaaggtcaatggggtgcgttgcgtgtcctttgggcagtaggtctgcggaaacgttgtgtagggccagaagctcccagccggctggaaatgagggaagggactcggagcaaagaggctaaatgggggagaacttcagtgcacgccctacgcccctcaagggaggcgagaacctcccagtgcccatgtcctgggagctggcatagaacc

SEQ ID NO: 721371 - DNA, 1177 bp, Homo sapiens
  misc_feature (433)..(433): n is a, c, g, or t
ggcggagtctgggcctgcatgccgtctaggtggtcccgtcccgaggcgtcccgcgcatctccgtgcccgaatcccggagtgccagggtcgcgcctgcacctggaaggtcccggctcctgtgccctccctgcagcctgtcagggacctgtcgccccaactccaccatattccgctcagtgcagggtcctcgctggaccatgctaggacactgctgtgggaccctgcgcagcccagaccgttcccaggtgccggcacagccggccaccatggtggcccatgagtgccttgtgcagcaaatccagggggggctaaagggctcagagtgcagtgcctgttgggtgtggcgcagagggtccctgggcctgagccccgcagccatggccgggggcccatcgcttaccccgcactgatgcttcagctctctcacagaggngaagcaagccaagacgttcacccgtggaggatcgtacacaatggaacaggccggagaatgggaagttcaaattggcagaagaattgaaggtgggaaaaggggagagggacactaattgtgaatatgggttggttgcgcagggaaattctggggagctccgaagaaaacatgggtatacttttggggaaattgacaaataaggagcaatgaagggaaaaccgaggtaggggaaccttgggagttcgaaagaatagtacgagagaacagggttaccgtgtgaatcacgttgaagtgtttatcaaaaaggggaaagaaaacccaagaatcaacgcataattaacagtatagctttggggacactaacgaattagtgaattcgcatgtgaggaaattggctaatgaagtggacgcgaaaggcatggggttagacagggagggaattacaacgaagaaaaaaagtataaaacttacgttacctattaccacgagggtaaaaagagacgaaacaggaagtgtagacacgaatcgagaaaagggagatagtatgctggtacagatcattgggagggcttatatattgtggcaatagattgggttgatcattttacggctggtaacaaggtagccaagagttcttggggatgaagataaagaagagcaagtgagggaatagaaaaatgtgtgtagagataaatgtggggaacacaggacaggaaaatggttactgaaaaccgcggatacatt

SEQ ID NO: 721372 - DNA, 377 bp, Homo sapiens
ccgcgttgggccgtccacagtgctgggatcacaagcatgagctaccacgccaggccgatttattcctttttggttactaaattggaccggaggcgcggtggctcatgcctgcaatcccagcacccagggaggcggaggcgggtggatcacccgaggtcaggagcttgagatcagcccgaccaacacggagaaaccccgtttgtacaaaaaaaaaaacaccaaaattagctggcatggtggctcatgcctgcaatcccagccactcaggaggcttaggcaggagaaccacctaaccgggaggtggaggccgcggtgagtcgagaccggaaaacactctagcctggaaaacaagagcgaaactccgctcaaaaaaaaaa

SEQ ID NO: 721373 - DNA, 600 bp, Homo sapiens
agcgggagcggaacatggcgtcaggtctaagcggcgtccgtggaaagtggggtccgcagccgcggatcccccagtccagcgcgacgaggaagaggaaaaagaagtcgaaaatgagatgaagacgatgatgacagtgacaaggaaaaggatgagaggacgaggtctgacaggagtgaatatgaatgaacttatccctatcagataatgattatgacggaatttaagaaattactgcagcagctttttctaaaggctcctgtgaacactgcagaactaacagatctcttaattcaacagaaccatattgggagtgtgattcaacgccaacggcatgtttcagaagacagcaatgatgatctggatgacagatgcggtccggttttcataagcctttaaaatttaactgagagcaagggtaccagtgtgttgaccgaacttcaagagttggttctacgccttctgtgagaagaactgggagaagagcatggttgaacagctgggacaagttttaaatgacaccaccaagcctgggggcctctcctacagtgaacgattcactatgtcctccacagatagtctgcccatgtaccagagctcaaa

SEQ ID NO: 721374 - DNA, 405 bp, Homo sapiens
tggcaggtgaaggtggcttgagccaggatggcgccactgcactccagccgggaacagagcgagactccatctcaaaaacaaaacgaaacaaaacaaaacaaaggccaggcaatgcagccaaccctctacaggaggaacataacttccccccagaccattatggcctccctgcagttggtgatctcttggcctgtatgcagcttaaagtggataaagagaagtggttatatcgaactcctctacagatgtgagggaatggacaagagtggagcagcctttctgctgattatcacacatcatgagctgagggactgcgagtggccaaatgcttggggtgtctggggtctgaccaattaagcttagttcttctccggccagctggctcagccctgccagctggctcag

SEQ ID NO: 721375 - DNA, 675 bp, Homo sapiens
acttctgtatttcaatcatatcatgaacatttgattttgctaaagtcttgtgtcatgtgtatgagcgtgtaactatggtgtacaattgatgtgtctaaggagaaataatgaaatcccaacatggccgcgcgattttcactgaaatcgataattctgcagttggaatgtgaggaggaaagatagcttctatgggtcagacagtccatggctataaggacccgtggtgacgtggtacactttctgcgctgcggcggacaataaccttaaggaaaattgcagaaaaatctttatgcggttacaaccttgggaaggaacgcgtgtccctttccccaaggccccattcctttcccccttaatttgggggacaaagttcgccaacaaaaagtgtgggggcctttccccgttgggtgcgcccaaggcatttacacgggcgggacaacatgaatcaaccgaacacaaacaggggttttttcttaacaaaagaagccgtttgaacccagatttttgccgaattgtgtcttttcgcccttgttggcggtatctccccttgggagtgtggtttttccagccgtttccccggaggaccccaccagtgggggccgcattaaagtataccgtaaaccccaagttttataaccgttttccaagcgcgccacaaaaggcttgcccttgacc

SEQ ID NO: 721376 - DNA, 1557 bp, Homo sapiens
  misc_feature (523)..(523): n is a, c, g, or t
  misc_feature (534)..(534): n is a, c, g, or t
  misc_feature (543)..(543): n is a, c, g, or t
  misc_feature (604)..(604): n is a, c, g, or t
  misc_feature (697)..(697): n is a, c, g, or t
  misc_feature (902)..(902): n is a, c, g, or t
  misc_feature (1557)..(1557): n is a, c, g, or t
ggttcatggttcggcacgtcgctgggtagtcggggcgcgtgcgtccggggctgccagtggtagtgatctagtcatccgacgcgtgccgcgctcgatcggcgaccggctgccgcgtgctgcttcataggtccggccgtctgggcgtcctaatcccggtcgcgcgccgtcgtccggtgctctgccgctcgcacttgcttgcgtggcgtgctcaggggaccgcggcggtgcaggttgcgtccctaggagtcgcgtaggcgctccacgtaatcgtgggcgctagttgccgtgcccaggagacggctaggacgggagtcttccacgccttggtagggttaccctcattgcgcaggcggccggcagtgcgctgacgcagtctcgtagcacctagcctcgtccgatagccttcttcgtgacctgaccagccatgtctctgactgagtcggagcgtgcggtgctgggcgtctcccggaaggacggcacagcctgactgagctcgcagtgcagctcgcaagaacacctcacntgtacactggnaaaggaccnatatcccaccgaacgcacacgcatagacgctcaatgaatctatgtgctcaccggagtcacncaatgtctatacgacacggcacgggaaacgatgtggatatcggaattggtcattatttcctaagagtctctgaaaggctcaatcacgcatagntgaccgcctgtgcgtggagattcgcgataaataaataggtgagaacagaattcggtggcgatttagaagaattctctcctggtgattagaaagaagcgtgggtacagaaaactaccaggcataggtagcggctcaaattcatatcggggaaagggtagcgatatttttgtctctatccctcacacaacatggaacggaattcgcntggaacgatcgatagggaggggggattggaagattggggggagtccgagggagtaaggccatgagattggttggaggtttaaaggagttccaattggacaattggattttaccacttaaaaacagggaagattaggcaggagaaatagcaaagggcgtttaattggcttaaccattggggggcccaacaggcgggtagataacaagtaagaaggataggtttaatagaagtataatacagggagaagaggcatgaaatgagttaccaggatcgcagctccattaggggaacatatcaggcagtctgaaacaaggaatagaagcacactagggatatgttgtttagcaagcacaatccgcttcaccggtggggagggggaaaaaggagctttaagtaaagaggttggtgcctctgaaataggagcgaatagatgaatttaagacgcaaatttagggggaattatagagaagcgaatcacagggaggggcagctgaagaggaagaatattatcttacacgagatattacatataactatgggagggagtgagagaagacatgaggtggggggtcagcacgcaaaagagaacgtagaaatatcgagcaaaagaagagggacagagaggaaagagagcagaagagcagtagtaggatan

SEQ ID NO: 721377 - DNA, 1066 bp, Homo sapiens
gctcagatgtcgcgccagtagtatggttcgtagcccgtcttgtgcaagaagcccacagactagcggattccaagcctggcgtcgtgatctagacggtgcaatcctgacagtcgtcctgtcgagagaagaactaagagtcggattgttcctatgcatgacctcgtgggaggacctgatggaaagatggagaatgactgactgattgcacctctaatagactgatttttcctcaactagtgattgcatgcgaacgaccgaccggcacgtcctgtcgaccgtgaatgtacacgaatcaacagcgaacgttccggcaggactccaaaagcctaccatggtcgcatctcatcgctacgtagcgtgcaccgctagtgtgataggatacggaccataccgatgcgaacgcgtagaaaggagccaaccataaaggtacttatgaaaagcgtaccacgtatcgcagaacccaaagctgaccgtaactgtcgcgaagttgtgggcagagcacgctcgacttggtttgtaatgcatatttcgaagggactcgcgatgacccccatacatactcgcacgagaagttgctctaacacgtagtagggaaggtgagtctgtccgtcggtgtcttggtgcattctacaccaacggattggtggacattgtgaaccatgcgctagggcaaaccgcgttgaagctccgaagttgccgccctcgttgcgcaacaagggcgatcttgaaccctatggcgagcccagccgttggaggcttcttgggccagccattaaatttgagataacgctaggcgaggtaactatcgatttaacccgtgctctatgggccagttccctcccatgaaatagccggcgctagggcccattcatgccccgtgccacattcggtttgtcttggcgacaggggacccatacggggcgtttccactttacaagcgatttggttcccccctcacaattgtaaacttcgacagagtgaggacactaagggtttgagggagaaacctaatataggtccagttcaggggggtttaagaacaaaaggcaagggagcctgacatgcg

SEQ ID NO: 721378 - DNA, 436 bp, Homo sapiens
ggccgggttctggggctcgcaaaggtggcgcccgtggactacctgtcacaatatgggtacctacagaagcctgtagaaggatctaataacttcaagccagaagatatcaccgaggctctgagagcttttcaggaagcatctgaacttccagtctcaggacagctggatgatgccacaagggcccgaatgaggcagactcgatgcggactagaggatcccttcaaccagaagacccttaaatactctgctgctgcaccgctggagaaagacgcacctgacttttcgcatcttgaacctgccctccaccctttcacgccacacagcccgggcagacctgcgataagccttacaagactgtagcaatgtggctcccttgaccttccgaggtgcacgctggtgcggctgacatccgactctacttcctggccgtcgctcg

SEQ ID NO: 721379 - DNA, 882 bp, Homo sapiens
gcccccgccagtgtctggcgcccgcgagcgaggccgcgcgccctcgcctccgccgccactatcgccgtggggcggcactgcgtcgtagccccaagctcgacggtcgccgtggcccggtcgcgtctgccttggagaagaagacaaagatgcaaggtggccctactagtctgctgctctgtgcgccaatggagttcaagaacggctacaatctccggaggcacgaagccatccacacgggagccaaggccggccgggtcccctcgggtgctatgaagatgccgaccatggtgcccctgagcctcctgagcgtgccccgagctgagcggagccggcgggggagtggggacgcatggctgcggtgcctggcaggctggcgctgcctgaatttggcctgccggtggctgtggttgaccacgacctgcctcggggaagcggcatccggaaagaaaccatgcctgcgagatgtgtggcaaggccttccgcgacgtctaccaccttgaaccgacacaagctgtcgcactcggacgagaagccctaccagtgcccggtgtgccagcacgcgcttcaacgcgcaaggaccgcgatgagctaccacgtgccgctcaccattgaccggcgcttgtgcacaaagccctagaactggctccaatggtggcaaagagcttctcccggccgggatcacctcaacagtcacgttcagacaaggtgcgattcaacagaacgtgcctttcgaaatgtgagaaaatggtgaggcaggttccggcacgaaggatgggttgggggcgccacacatacgaaccggagaagaacgtgcctgtcacgtgtgtgcaagatgctgagctggtttattttcggaccaattgaagtgccagcaaggtctcc

SEQ ID NO: 721380 - DNA, 353 bp, Homo sapiens
tagagctgattctagaggatcccaatcagcggaacggaactgcacagctcattcaggcaggcagcacccgctcgttcatcagcgggagatgctcctgaacacgcgcttcagatctctgtggactgcgcaaactgctgcagcgtcagttgtccctcgggtgccagctccgtggcccgctcttgcttgctcagaagtgtggcacagcaccacttttgtgctttgaggtagggttgcttttgtccaccgtcaatggctgctgccaggtcatgcccatttggccaacagggagggcagcgggtgcacgccgaggggccttgtcaagcagattctcgggccaattaatggtggcaccg

SEQ ID NO: 721381 - DNA, 490 bp, Homo sapiens
ctagaggatccccatggaacaggctgatgctctatttatcatttgctttaccactctcattctctcacaagcgtacagtgttgttaggctaaggtcatgtgatacaggaatgactgaatgcagaacaagacacgagaattcacgcatggcttctattaagagagatcttataaagatctgaaaaaatgtaaaataatcactcctttccctggtattttttagcaaatataattggttttcattaaaaatgttatgttacgataattgcatgaggtaatggatactaactaccctcatttgatcattagaccaacatatacatctatcaaaacatcaaactgtatcccataaatacatacaattacaatgtgtccatttgtaattttaaaaatcttttttttttggagatacagtctgtcacccaggcttggagtaatctcagctcactgcaacctccgcttcccgggttcaagtgattcttgtgcatcag

SEQ ID NO: 721382 - DNA, 172 bp, Homo sapiens
gggggggggttccccccccctgggggggggggggggcccccccccccggccccttttggaaaaaaacagggggttttttttaacccccccttttttttttttgggggggggcccggggggggggggggggttttttggggggggggcccccctttttttttttttttcccca

SEQ ID NO: 721383 - DNA, 476 bp, Homo sapiens
ggacggcagaggcctctgcggcgcggtcctcggagcggcgcggttctcggagccacgcgtctgtcttcctccgtggtcatggcggactacctgattagcggaggcacctcttacgtgccggacgacgggctcacagcgcagcagctcttcaactgcggggacggcctcacctacaatgattttctcattcttcctgggtatatcgacttcactgcagatcaggtggacttgacgtctgctctaactaagaagattacactaaagaccccattggtttcctcacccatggacactgtcacagaggctggaatggccatcgcgatggcgcttacaggaggtatcggtttcatccaccacaactgcacacctgaattccaggccaatgaagttcggaaagtgaagaaatacgaacagggattcatcactgaccccgtggtccttagccccaaggatcgtgtacgcgatgtatttgaggc

SEQ ID NO: 721384 - DNA, 272 bp, Homo sapiens
ggggtactcgtatgatacagacacgcagtccacaatccgtcttcaaatcacgttgtatagtggacataaaaaacacagtttaagcctacgaagtcaaccataataacttcttcagctgtcccattagatttttgggaacttgctactagggggattcactgggtttcttataaagggcaaattcagtaaagatcattctctagcaatggttctcaaccagaggtaccatccctcaaggggtagctggcaatatctggagacattctatggtt

SEQ ID NO: 721385 - DNA, 394 bp, Homo sapiens
tctaactaatcttctatcaacgtcatatgagaattggtggcaataaaacctggaacaaagcctaagatggaaccatttttgcttattagaactccacgtccagtcattgtggaaccacttgtacaactagatgatgaagatggtcttcctgaaaaatcttgcccagaagaatccaatgtatcaaaaggagagagaaacccctcctcgttttgcccagcatggcacgtttgagtacggatattttaaagccgattggaaggtcctttggatgaaattggaaaaccaagcaaaggggaccaggttgaaaaaaccatgaaagatgcaaaagacaaattggaagtgaaatggaagatgcctatcatgaacatcaggcaaatcttttgcgccaagatct

SEQ ID NO: 721386 - DNA, 112 bp, Homo sapiens
  misc_feature (25)..(25): n is a, c, g, or t
ctctcgaggacacgctataataggngtaggacagtgactagcagcacctgctaggtacggccaggtgtctgcgcacttggcggcggctcacgtgcgagctactcttactgct

SEQ ID NO: 721387 - DNA, 835 bp, Homo sapiens
  misc_feature (79)..(79): n is a, c, g, or t
  misc_feature (84)..(84): n is a, c, g, or t
  misc_feature (97)..(97): n is a, c, g, or t
  misc_feature (101)..(101): n is a, c, g, or t
  misc_feature (104)..(104): n is a, c, g, or t
  misc_feature (130)..(131): n is a, c, g, or t
  misc_feature (133)..(133): n is a, c, g, or t
  misc_feature (139)..(140): n is a, c, g, or t
  misc_feature (150)..(150): n is a, c, g, or t
  misc_feature (167)..(168): n is a, c, g, or t
  misc_feature (209)..(209): n is a, c, g, or t
  misc_feature (212)..(212): n is a, c, g, or t
  misc_feature (222)..(222): n is a, c, g, or t
  misc_feature (231)..(231): n is a, c, g, or t
  misc_feature (240)..(241): n is a, c, g, or t
  misc_feature (249)..(249): n is a, c, g, or t
  misc_feature (255)..(255): n is a, c, g, or t
  misc_feature (267)..(267): n is a, c, g, or t
  misc_feature (269)..(269): n is a, c, g, or t
  misc_feature (278)..(278): n is a, c, g, or t
  misc_feature (287)..(287): n is a, c, g, or t
  misc_feature (291)..(291): n is a, c, g, or t
  misc_feature (330)..(332): n is a, c, g, or t
  misc_feature (338)..(338): n is a, c, g, or t
  misc_feature (380)..(380): n is a, c, g, or t
  misc_feature (386)..(386): n is a, c, g, or t
  misc_feature (388)..(388): n is a, c, g, or t
  misc_feature (399)..(399): n is a, c, g, or t
  misc_feature (404)..(404): n is a, c, g, or t
  misc_feature (415)..(415): n is a, c, g, or t
  misc_feature (424)..(424): n is a, c, g, or t
  misc_feature (428)..(428): n is a, c, g, or t
  misc_feature (438)..(438): n is a, c, g, or t
  misc_feature (441)..(441): n is a, c, g, or t
  misc_feature (444)..(444): n is a, c, g, or t
  misc_feature (447)..(447): n is a, c, g, or t
  misc_feature (453)..(453): n is a, c, g, or t
  misc_feature (472)..(472): n is a, c, g, or t
  misc_feature (542)..(542): n is a, c, g, or t
  misc_feature (547)..(547): n is a, c, g, or t
  misc_feature (563)..(563): n is a, c, g, or t
  misc_feature (565)..(565): n is a, c, g, or t
  misc_feature (570)..(570): n is a, c, g, or t
  misc_feature (572)..(572): n is a, c, g, or t
  misc_feature (576)..(576): n is a, c, g, or t
  misc_feature (581)..(581): n is a, c, g, or t
  misc_feature (593)..(593): n is a, c, g, or t
  misc_feature (595)..(595): n is a, c, g, or t
  misc_feature (599)..(599): n is a, c, g, or t
  misc_feature (634)..(634): n is a, c, g, or t
  misc_feature (636)..(636): n is a, c, g, or t
  misc_feature (641)..(641): n is a, c, g, or t
  misc_feature (789)..(789): n is a, c, g, or t
ggcttctctgagtcaccaacctgaggctgccccggccgcctgcgcacccggcagcaccatgacagatcaggcctttgtnacacnaaccacaaacgangccnacnccaaagcgcgccccggcccccgcggnncntccccnncccccccccngccccccccgccggccnncccgccgcccccccccccccccgccccccccccccctccgnccncgctttctcnccccccccncccgactgnngtcactcntcggtngactgtcttggncncgcggccgnttctgcccntccnaccttaatgaagaggccagagttgggtgtcacgctgacnnngctccnctgctggtcgcttacacagtattcaaaatgtgtattcatggntgccgntnctctggtcctngcccntattgatgatntttttgacngagnagaattgtcngcngcnccngacccngggtggcctgactgcttcnattccggagtcttcgtttatcagccttcagttgaaacatacaatcagctgttgcatcttgcttctgagcnaggtngttttgatggtggggncnaggcntnctgnacacnttttttagcatntnggcnacaacagatatcagaaaacacctgccatttatttntnacctnagcagcatctctatatactcctacctcccggcatttaaagtgtttggtgcaagtgccaaagttgtgcatttcctgggacgagtcaaaccatggaattatacttatgatcccaaaacaaaaagtgtcaaaagtgaggcccatgatcccnacatgactcatccagagtttctcatcctgtgggtggacatctttac

SEQ ID NO: 721388 - DNA, 175 bp, Homo sapiens
gtgtcttattgtagcattttcacaggttgtgcaaccatccccacagtcttaattttagaacattgttatctcctcctcaaagaaaccaaagcaaggagaaccccatacccgttactagtcatttcacattccgtcctgccctaactcctccctgaccagtacaacctgccggtgg

SEQ ID NO: 721389 - DNA, 434 bp, Homo sapiens
acgacaaggcgactcctaaagctgactccttacatatttttagtttttcctaaaggtctcctggtacatagtgaactgtgagctaactggatctgtaaacagacattagggagacataatctcccagcaatcaccgagtatcagccaatcacagcagccagctgttcaaatcatgttcaaataaggcaaatgccgggctgtaaccaatcggctgtttctgcacctcatccccattttctgtgcatcactttcctttttattaacataaatctccaaccatatggcagcacggagtcactctgaacttattctggtttggggagctgcaggattctcgaattgttctttgctcagttaaactctgttaaatttaaattgccttacatttgtgtttggttgtcgtttttgttggttggtatgtgtgtttgtctgaa

SEQ ID NO: 721390 - DNA, 446 bp, Homo sapiens
  misc_feature (103)..(103): n is a, c, g, or t
tcaccgctttatacttttcgatcccgacttcgagatctggttttctttctgatcgatcatggcttcgcttcttcgtcgatctctacttctgctccgccttctntctccctcgctcatagatgtggatagtctgcaataggtgatattcttctgactcctacttcagtgctctcctactcagtgaaactccatgtgtttctaaaaggacttcggagcaactgagacacacatagatagatagacagacagatagataaataggtaggtaagtagatagataatggatggatcgattcatgaaagggcaggagacattgtgtataggtttgtgtgtggtgtttgttcatgttgtgaagacagaggcataagctatcataaggagagaagaacaatgggaaaggaggaggaggacagattttatctgagcaacgcccagtaacaggtcc

SEQ ID NO: 721391 - DNA, 116 bp, Homo sapiens
ttttggaaacaactcaatgttcattgatagaagagtggatcaagaagatgtggcatatactcacatggaatattacttacgccattaaaaaagggaggaaataactggcatttgca

SEQ ID NO: 721392 - DNA, 849 bp, Homo sapiens
aacacgcccaatagaaaacattggctatggataggcgtggttaaatggccgaggacgggccgcaggagcgctcccactccaggcagcccacccggcggacgggccccgcgcgcccaggcgatggcactgggctcccgtctgctccccgtggtccgctccccgcgtgtggccactgcccccggccccgccatggtgcggatttcaagagcccaagacgtttcaggcctacttggatgattgtcaccggaggtatagctgtgcccactgccgcgctcacctggcaaagccacgtacgagcctctagtctccgaagtccttccagggcagtcagggcgcgtgcgctaccttctttcagagctcagtggttgaacgtgggctgcgggccatgccgaggagcggcgtgctgctgaccggcctccgatgctgtcgccgacatccattgcggagaactgcagagaccactttgggctggacatatatgactcatgggcctttgagagctaggccagaagtacaaagagggggacagtacattcattgaaggtcaagcactatgcatcaaagactaagcggcatgggactgactccccgttccccctgacgcattgtggtctccagcccggcgcttgtgccgccgggggaggcgccaattggctttccgcgccatccgaaggggcagctcgtggatccctcgagaagtccccctgcagaggacggagtctagctcgctgtgtcattctatgttatagcattgcgactgtgaccttggggggggagaacagaaggagggacgatgcccccgacctcctgcgatctggcttggcttgggatctccgtttaaaagcccgt

SEQ ID NO: 721393 - DNA, 314 bp, Homo sapiens
  misc_feature (142)..(142): n is a, c, g, or t
  misc_feature (173)..(173): n is a, c, g, or t
  misc_feature (299)..(299): n is a, c, g, or t
  misc_feature (304)..(304): n is a, c, g, or t
gtggcaaaatcaaaggcttttaaatcccttatttaactaaaataaactaaaagtatgtagatactacctcctgggccagggagactaattaaaaatgggagggttcgggaaacacttggctcggcggacgcggtaaaggtgntttaaaaggctaggtgcggattaaaagtggntagccttaccagtcaggggtggaaaaccacgactcagggtaactttttacctttaattttttctctttaaacgtgaaagtttacaaagcaaagtgagttgaggatttggcgttcgtgggacctggntcagncaggtgaatt

SEQ ID NO: 721394 - DNA, 91 bp, Homo sapiens
gaagttgtacatggttccctggccactggtgttaatgatctttaacatcagcgccaccgttctctacatcaccgccttcatcgcctgctct

SEQ ID NO: 721395 - DNA, 201 bp, Homo sapiens
gaggattcatcacacgccgagtcccagacaagtcggtatggacgaagttgttgcgcaacaacttcgtccatagagaccgcaacaacttcgtccatcgtagaccttgaccaaattagaggagaacaagtctgggcactcggcgtgtgcagcaacaacttcgtccatactgatttgatgtagtttggtgattcggcgtgtgca

SEQ ID NO: 721396 - DNA, 106 bp, Homo sapiens
gcctgcagctcttggggttttttgtgggcttccttcgtaatgtggagccaggctacaccccaagccaaccatgttccaaggcccctccagttggatttgtctttgg

SEQ ID NO: 721397 - DNA, 144 bp, Homo sapiens
cgacgggggggctgtaggtgtgtccaccgttagtaccggttggactaggactctgctctcatggtaacgcgtccaagttggaatggtcttccagtctccatggcatccacatgctactggcgttaccatgagagcatatcctat

SEQ ID NO: 721398 - DNA, 1530 bp, Homo sapiens
  misc_feature (45)..(45): n is a, c, g, or t
  misc_feature (664)..(664): n is a, c, g, or t
ggctcctcacacataggcgggaaaacggcggggtgcatcaaatangatattttgctccaacaaagtagtttaatagggatatagcgctcccaactgcgcgtcctttagtctttcctgttaggtaaaacccacaccagctgttttttaaataccacccccctcacgaccccgtgaatacgacgctgctggttggtgttgtgtcctgtgcctcccataagtcacacacgtcgtctttgttgctctcgttaatgacgcgaaacatattttcctccttgcgctcttttctctgtctgtgatttaagtaagtgccgttgctctttataatagacggttctccttctttgtggcgaaaaacaggtgggtttgatattggttcgcaccccccagtgtttgccacctaggggcttctgtccacagaaaactgctgtgtgtgtggaagagccttctccatcataggaagcaggtataatagtatgtaacacgaccccccttcggctgttttgtcattagcaaccttctgtaatagacccccaaccggcagcagtgtggttgtggttttgtgtatttgctcctttgtgcttctgtatatataatactactcgcctcaccacaatccgttcaccaacattgtaatatatgaggaggtaagagtatgtatatgagnctctggaagcaacacacacaaacagggggggagaatataagtgtgagtaatatggggggggctccctcggtggatagagacctcaacaccaccagcggcggaagagtgaccttcgttatgttcttcgtttagagtagttgtctccccccaccccccacccctggtaagatgctcccacaggagatgctcctctccactcccccgcagggggtccacacggctcgtccacggcggaagattacattgtggagaatagggggcccacaccacatgtgtgcgcccctcttcctcgtaggagattattcttgtggaggaaaattgctcgcctctcccctctgtcgggatatataattgtgatataccctggagagaaacccccacagcgttttgagatgtccccacatgcgcacagcccacagggagtagcacagcccacagcggcgggagacacgctgtgcctgtctcccacagcgagagagagagtttcggctcacacaaacaccattcacacggccgcacaacacaccgctttggcaccaccacacacagctcgtgtgagagagagagagggctggcacaccacacgcgagagagttctcttgtgttcttcccctctttgtggccacactgagtatacctcttgtgcctctatttctgagcacacacacgctatcccctccgagtccttctcctctccacacccccaggggctgtggcacgctgggctggaggctcttgtgtcacccctctgcttctggagggttgaggacccccactttgaggccacactcctttttttttgttcctttgatcccttggcatcgtcaccaacccaccggtgcataatctaaaacttgctgagtcca

SEQ ID NO: 721399 - DNA, 393 bp, Homo sapiens
  misc_feature (13)..(13): n is a, c, g, or t
agttcagggggcnttcccaccattccccagaactgatccaaagtagcttactatatctaaactgtaaaacaatatagtttctcctgaacacctgactttcttctgggagtctggaattttggtatgtgccaggcagagactacctttgtgaccagctcccagtaaaaaccccaggcactcagtctctaacaagcttttctggttgacagtgtttcacaagtgctgttacaactggttgctgggagaattaagctcatcctctgtgattccactggcggaggattcttggaagcttgcacttagtttcccctgacttcaccccatgtgtcttttttcctttgctgattttgttttgtatcctttcactgtaataaatcatggccgtgagcagaa

SEQ ID NO: 721400 - DNA, 191 bp, Homo sapiens
agcgggcttgcgtgcctcgcctcggtatcagcagcgggtcgtctctatctactccgggctctcgcctgcgccccagtccccgcgtccgtgtcctagccgaccatggccggagcaccctgtagctgccccgtttgctcctgcttggtgccatcgctggcctgtggccctggtccgtgagtcgcccgctggcc

SEQ ID NO: 721401 - DNA, 894 bp, Homo sapiens
gtcaaatcaggttaacaagcataggcaggcagtgttgtgcgatcagccttggtcaagaggcatttacggatttccttatgaacaatcaggaagacagttcataacgacactgatgctaggtttctgtgagtacaggcgatccaggctgctactgggtaactagtggacgtccgttgatctgcgatacaaggcttctcatacgatgggactacttgacacacatcatatggattcttctgcgtcggtgacccctctacatgtaatcagctgtagtttggatcttggtgctgggggttcatgtgtcaaactgactgactatgtatcccattattctgcaggtaatcgtccgcgagccaattacaactcagaggacttttctcatacggagcaatagcatcactaggtgcatacatgcgcctttgccagctggtgcgtgttgagattctatcactccatgtcaacatactatgctagaagtgtggggccacaacaagtcaggttacgacaactgtttccatatcacaggtatgcagtacagtgtgcagatgccgtacaggaaggaaggcctttacaacaggcacacttggtttgcaccaatatgaattattcaaccgacgtcatcgaatagcctacaattagtcgctatggggacccttgtggaactggactgcgctgcatggtactgtaccacgagagacgaactctcccctagaacttactatccgactgggagtgcaactggccacagccttttatgtccaatttcaatccactacttcacgtggtccagcgaaggtgcacatccccaagggtggacaggggagacccccccattcagcgccgaacaaactaataggctcacactcacgcggaatgcatcggatacatatccag

SEQ ID NO: 721402 - DNA, 785 bp, Homo sapiens
  misc_feature (178)..(178): n is a, c, g, or t
  misc_feature (443)..(443): n is a, c, g, or t
  misc_feature (676)..(676): n is a, c, g, or t
  misc_feature (682)..(682): n is a, c, g, or t
  misc_feature (690)..(691): n is a, c, g, or t
cctcgtacctcacgcagcgggcgcgcttcttcagcgccaacgagggcctggacgactatctggaggcgcgcgagggcatgcacctgaaggacgtagacttccgcgagtcgctcatggtcttcgccgacccccgcagcccgccctggtacgcgcgcgcctgggtcttctggctcgtgtnggcggccacgctgtcgtggcccctgcgcgtgtggccgcctatggcacggctcacgtgcactaccaggtggagaagctctttggcgccagctcgcccccgccgggggccgtgcccagcgggcccccgctgtcccgcgtggccacagtggacttcactgagctcgagtggcacatctgctccaaccggcagctggtgcccagctactcggaggccgtggtcatgggcgcgggctcgggcgcctacctcagaggctgccagcgctgcngcgctctgtcagcagcaactcgctgcccccgcccggccagcgggccccgcctgcccttcagccgctagccgcctctcgctgggcgctggcggccgggccacgccaggggtcttccgcagcctgagcggggggccgctggtggcgccgtggagaggacacggaacccctggagagcccgcctgctatgaggacgcctctacttcccggtgctcattgtccacggagacagcggntgcagngcgatggnnaggtgctccttgaaaccacgaaaagcacacacaaaagaaaaacacaaacaccaaaaaatacacgaaaagagataaaaattcgaaaaaaaaaaac

SEQ ID NO: 721403 - DNA, 956 bp, Homo sapiens
  misc_feature (217)..(217): n is a, c, g, or t
  misc_feature (474)..(474): n is a, c, g, or t
gggcgacaagccacgccaggtgccaagggcaagagacgtgagggcacaagctgtcccagtataataaagaaaatatatagaataagaatagttcatactcagaacatagattcagtaggatcatgatgtgtatagtgacgtatcgattagatccatgtcagatctagtagcgagtcacgtcgttctattccgaatcatgtagtaactacatctcttngtgtcgtatcaagttatcaatcccagtgaagataaccaggcgcactagcagcggatagtgagcttgaaaggggcaccggatgcaggaaggtgcacccagtatgcagatgttgatgcgccttcgtgtttgacggccgtgggacgagggaaccacttagcagggactccgcgtggctctgaagtgtgtatacagccgagtcgaactctggtggaagggtcgatgccatagtacctaagaacggaagctcttgcgttctnaggggcgttagtctatcaagtggcgctggcgtgataggcatcccgtttgagcttatgccagcacctggtgtaaagcgtgaagttctcccgcgttttccatggcgcggaaggcttagcaagcaaagactcctgacttccaagcacgaggctcttggtgtgaaaggcctgaactatcagatcagggcccaacctacaagccaatcatggatggccatggtctccgctgtgaatgctagatgcattcaagcgagtcactggtccctgtattcacagttcaatgttaatgctgctgttacacgctggcctctggccgttcttacgatagcatgatagcagtaatttagtcgaaacgtacttaccatggtctttcgcatgcgtgttcctgaagagagcagcatcacgaagaccataagtgatgctaaggcttgtccatctgttcttctccgggcttggccttacctaacagtggaaacagggccccc

SEQ ID NO: 721404 - DNA, 283 bp, Homo sapiens
taaataagtattatagctatgtatttttagttattgccaaacattgaacaattcaagccagcacccttgtttttgttagacttttaatagctacttaactgtatgtgattgtgtttaataatttgatataacaggacaaaattcagtaagacttttatattttagtttagaatgtgactttaaaattcaatgggattaaagtatttacattttgataaaaatgaatacaatgaaaacaaaatggattcatggaagattttttaataaaaaccattttcccatc

SEQ ID NO: 721405 - DNA, 154 bp, Homo sapiens
  misc_feature (6)..(6): n is a, c, g, or t
accccncacgggggcgacatatacacacaccagaaacaaggctggtgacaacggactgcaacaccacggaacagggaaaacgagaaccatcgacatcacggccacacacgggcacagcccccacacagagcagcggcacccaacccctacagcc

SEQ ID NO: 721406 - DNA, 130 bp, Homo sapiens
gtcctttctccgtatgcccactgacatacattgtataataattgttcagtttactgtattgttactaacatcttgtatgttagatagtaaattccttgaagacaagagctatagatagttgtaaatggcg

SEQ ID NO: 721407 - DNA, 269 bp, Homo sapiens
ttacacctggtatcccagcactttgggaggctgtggcaggtggattccctgccgtcaggagttcaagaccagttgggccatcatggcaagggcccgtctctactaaaaatgccaaactttgttgggcgtcttgacgcacgcctgtgattccggctactgaggatgctgcgacatactaatcacttcagccctgggggcaaaggttggggagtgccaatatcacatgactgcactccagcttgggtaacaggatctcgacttctgtcttt

SEQ ID NO: 721408 - DNA, 869 bp, Homo sapiens
caggtgtggtggggtgtgcttgtagtcccggctgctcgggaggctgaggcgggggaatcgcttgagccctgggcagtggaggttgcagtgagctgagatcacatccctgcactccactccagcctgggtgacagagcgagattctgtctcagaaaaaaaaaaaaaaaggaaaaagggttttttcccattgacccaagcgggaattaaggaaaaaaggtttttttttcattgacccaagcaggattttcccggttaattccggaaaatacaagggttgactcaaattttgaaaggcccccttattgtaattacttccctttaattagacatgggggggcacaaacttgaaaccttgatgtcattggtgtgaagagaaccctttgggactttttccaccactctttcataatgaggctatgcccttgtgataaattcacctggtgtaacgaaattagagcggaaccctacgtcagttgtattaaaaccccatttttgaaaattaatacaggctaaatgccgacctcggggtaaaagaccggaaaagttatatcaggcataatatggaagttttaggcctgagaaataaggcataagaaatataataagggttacaggaatgggcggaagtgattttgggggcctatatgatttattgttgaaaaacactaaagagttcatccataaaaaggctggaatcaatggggtcggaggggggaataacaattcaaaccaaagtcgtggttgtttttctacagaaaagaaagaaaaaaaaatttggggggcggcgagagtttaaaaccgggggggggcaaagtaggaatgaaggtcaagaacggggtagggggtcccaagagggggtgacaggtgtc

SEQ ID NO: 721409 - DNA, 960 bp, Homo sapiens
  misc_feature (3)..(3): n is a, c, g, or t
  misc_feature (23)..(23): n is a, c, g, or t
  misc_feature (49)..(49): n is a, c, g, or t
  misc_feature (57)..(57): n is a, c, g, or t
ctngaggcccaagaattcggccncgagatttattaggacctttcttttnttcctctnttcattaaaaaaattaaaatattcaggactatcagctcctcttttgctttgctttttcttttttatataaaatatcagcaagctgcaaaaaaacaaaaatccaaaaaaaaatttttttaatggggttggggggaacaaaaaggaaaataattgctgaggtaacttcataccttgaggtagtttacttcgcacacagcattgcctgactacgcccacatgttgcggttgtcttgttgttactgttgttgcaatgttgaaaggaggggaactccacgcatgggcttttccatatgtagagaggccttcctcccttcccagcacacttgatagcattgtccagggtagctaaagtgcattacctggctaatatgcattgtcaatcagtatattaggaggagaggcctaacctcatttaactgatggcttctgtctcccacaagggctaaacactccatgggatcttaattaagcctggtaaattaataaattaagcttatttaccccttgctgtacaatgctgctggtattctgaattgttttttagacacacctttcatcatgctgataatgattcatggagacagaagccgtcagttaaaaattcctctcagatacaaacagaagcaagtactctccaattactgaatttgccagatgatggactttagctttatcgggagctcagggttgggttccaagtcccaccaccaaggtaacagtgccgtggctgggagtgccccacaacccctgcctctaggaaccagcccttatgggagcacatgggctggggtgagggcaccgtggcagcctttggggccactcaagtcctccatggaaccgagactttatcaaggggagttagcgtccccttcccagtgctcatatccaatcattaaaataaac

SEQ ID NO: 721410 - DNA, 482 bp, Homo sapiens
  misc_feature (140)..(140): n is a, c, g, or t
cggcaacattcccccgatgcccaattcatggcagacattgtctggatccaggctgtacattgaataaaagattcgaaatgcgcagttagcccagtataacttccttttagttgttggtgaaaaagagaaaatcagtggcnctgttaatatccgcacaagagacaataaggtccccgggggacgccccctttttgaaactatcgagcgggtacagcagctcaaagagttccgcagccaacaggcagaagaagaattttaatgaaaaaattaccccgattggctccatggaaaaggaggaacagggtttccgtaaaattggctttggactctgaaaacgtccatttatattgaacttggaggggtttggcaaagtttgaataggtcaacctgcagggggaactatttttggcctagtcagtttttaaacaatgggcatttgaaggggttaattaaaagagagcccataaaatggtttttctcca

SEQ ID NO: 721411 - DNA, 394 bp, Homo sapiens
gtgaaacgttgatgcttgtaatgcagtgtcttttgaccgtgcatctgtgttcaacagttggaaccgtacttatggtatccctgtacgttaatatgcgtaccaggttatgaatgggacctattaccacatgtagtgcttggtaccagctttggcagagctctgtatatctgctccctgcactgtgaataagaacacattgcacatgatctgtaacaggtgacactgtgtaagacgcctggaggccatatttggactatgactgatacatgctgatgaactttcgattaagctgacactgtatgacggatggtcgtgtttggacaactgtgatataggtagtagtcctatatgaacagctcacgctttgttggacatcggctgcacgtggggttgg

SEQ ID NO: 721412 - DNA, 144 bp, Homo sapiens
  misc_feature (135)..(135): n is a, c, g, or t
  misc_feature (138)..(138): n is a, c, g, or t
tggggggggggcggggtccgtcgtacgcctacgtagcataaatttttctaaaaatcccccatataccccgggccccacccaaccgcacacttttttctgcggtttcttatccacgcatggctttctaccttacanctnccgcgc

SEQ ID NO: 721413 - DNA, 122 bp, Homo sapiens
gagcagtgcgccataggtgtggtgctccagcacaccctgtggctagctgctgccagtgaagagctgccagccctcgtgccagtgacagtggtgcctcctgcagctccctgccacagtgaaca

SEQ ID NO: 721414 - DNA, 310 bp, Homo sapiens
actagaacatacaaacctgttcttttcccacagatctgatgtccatacttgcggacacacagatgcaactgctttatctcattcaaatgccccaagttatttgctctcaagataataaggtcatttccattatgaaagagaagctgatgaacgactgactgcagcgacaaagaatgatccttgtatattagaaaaatctgttaagaggaattaaaaaaaaaatgctaagacttgtttaacaactagagctgtacaaatggagaataattttgtgggacggataccaaagtgttattttctaaacgtacta

SEQ ID NO: 721415 - DNA, 820 bp, Homo sapiens
gaccagaggttaggggtcctctctccctggttgtgcccgcgccagcccctcacagcttataatgcaaacccagcaactctcttgcccctcttcccatattttacatcttccattgtgacccatttttctttttaattaaaaagaaacccttaagagaaaaatcatgggctcttaggcgggccattctcacttgagaaaaaaatctctttaacaagtgccactgttcgtgcacagcggctaatcatagcttcaggtggcatggatactgacttctacctgacctcgccctccttacatcctgatctcttggaacgagtcacgcatgccccctcggcactggccacgttcaccaaggcgcgatgcgcacaataagcgccgcaaagctcccctgacccacggacgccaacaactgccacacgtcacgggcccctctcctggctcctggcctggcccagaggtcaaagggctaacccccggtctccaagcctccggcgcccccgctccctatacagcggccgcgcttcagcggacaacaaaacgctcaggctcgttcacactacctctctcacagcgcgccagcaaaccaactgtgtgccatcgtacttgcacactggcacttcccgcactcttggttaagcaacacggccccgtccggcctctcacactgcaccgctctccccggccagcgggtggctcctccgcccatccctggcaagccccggctggcttcccctttcccgggctctgtctcccacaattttcactttcctttcccacttcacctctgggctgtcgccctgggtctcggccgcggcaagcg

SEQ ID NO: 721416 - DNA, 155 bp, Homo sapiens
cgatacgacttttttttttagttctccttttcttctcctcctcctcccttcttcttcctcctccttcttccttttcttctttcttctctccttcttcctcttccttctcctcctttagttcttcctcctcttccttccccttctgtcgtcttctc

SEQ ID NO: 721417 - DNA, 370 bp, Homo sapiens
  misc_feature (350)..(350): n is a, c, g, or t
gatagtcgttcgtatctcccttgtgacacgtctttaagcacatgaaagtagacttcggaaaatgacaatttttattttaaaaattgaaatgtttggaacctttagcacagatttgcttaggtgaaggacacgtgtcttcgtagttctcgcctttttaaggtttttgtgccatgataggatattaaccatgatttttctgttatgtaccaaaaactaaagataaagtccacatagaagacagattctgactacacaattttggatataactaggaaaaatggcgtaataccacttttgattcgttagagtactatatccatattgttatcttgctggttcagctattttanactcactgtagggggaaggg

SEQ ID NO: 721418 - DNA, 86 bp, Homo sapiens
cttgtgttctgtgcattgtagaatattgaatgatttgtattcattggtaaatagctgctgtcctgacccttctgtcgtcttctcgc

SEQ ID NO: 721419 - DNA, 428 bp, Homo sapiens
ggaacagcaggcgcggaggagggggcaagcgtgtgtgagattcagtggtccatgcgtgcgttgtcgtgtctggtgatgggtgtgaatcagaacgagtagcactgttgatgtggctacggatataggactgacatcggaggtgtcatcagcaatgaaggatgtatgcacccgacggcccgatagcttctgaagatggacatgacgcagatggagtttcctgatgcctcgttccaggtggtgttggacaagggcaccctggatgctgtcctgacagatgaggaagagaagaccttacaacaggtggacaggatgctggctgaggttggccgtgtcctgcaggtgggcggtcgctatctctgcatctccctggctcaggctcacatcctgaagaaagcagtgggccacttctcccgggaggggtggatggc

SEQ ID NO: 721420 - DNA, 1595 bp, Homo sapiens
gtgatccggggctcccggaacctcgagctgagtagactgaagcgcaggctgcggggtgctggagtccgggcatgtgaaggccttgagtagttccattccgagcatggtccgagagggggcagtccctagacaagtaacattgagcagtatggttacagcagctcaacaggtcagaatccgtactatcattctagtctactcatagtgctcttgtacagtcaaggttagagtcaacccatactcctagttaggatccgtgcacgagccatatccgtgccagacgtggcatcttcacgccgacgcacgcgtaaaagaaagacaggaagagctgcacaggactgaggtccgtgtagacttctgtggatagaagctcgcctcagtggtcgtgcctgcatgtgctatgaacagtagcgctgcatgcatagcatgaggtgcacatgtcatacgggcaatactggtaatcacagcgtgtgagtacgggaccacggtgagcactgagcactggaggcgcattgggaaactagcaagcaaggcaaagtgtggtatgaagcggtggttagatgtgaaaattggacagaggctacctgagggtatggccgtccttcgcgagatgcggccaccacgtaaaggcgtcaaccgacattgtcgcttgccccatgtgaacgaggcaaataaaagggggatgtgcgggtgtcctttcgggtggctttcagggcattaacacgttcgttggcactatcccacagatgtggggccacgtcccacttccatatccaaacactagttctggtctataacacataggctatttataccaagcccagagcaacttaggttctgggggtgccgttggcagccaagtttttaacacccaggaaaaggaagaccccacatgggggtgcgctcaacggggggcgtctcgaatttgtacccggatagaatcccaatcgaaggtcacgaagttaagccacagatgggttccacggtcctggtggtgtcaagcccttctcgatggtacagtgcgccacacgctatgtgcgctgcgtataaggcaccatggaaactccgagcacgaacatccggcagataccctagcaagaagcgaaatacggacagctcggaaacagcctggcaaaagacgacgggcaggccagatgggggcacacaggaccgccttttgcggtgtgccgaaccaaccacaagagtcccgaatcagtgcaactggccccgcgatacagcgcacgatatcccgtttgtgcaagccgtccacgttgggttggaagcgccccgcgcgccacaatgttgcacatcccgcaaagtgggggaacaaccgcgatggagacgacgtgtggttggacacacacgcggaagtcccgtgttaagatcacccgacgcgggagccaacgcggggaaaccgtcccaggtccacacagcaacgtggggcgcgaccgagtcgggggcagtccccgcggacgaaagcgacaaatcgagacaacaagcagcatggggggaacaagcacctcggggctgcgcgcggggaccacggagcgagccggacaagcgacgggacttcaacagccgtgcgcggtagagcg

SEQ ID NO: 721421 - DNA, 118 bp, Homo sapiens
  misc_feature (95)..(95): n is a, c, g, or t
atcagagtcaacaacatgtacgtcacatgtcaaccgggaattgccagagttaacctgaccacaacacgattgctgtgactcaaactctccctaantgctgcctatataaccgcttttc

SEQ ID NO: 721422 - DNA, 639 bp, Homo sapiens
tacagtggttcacgcccgcaatcccagcacctggggaggccaaggaggtggatcgcttggaggtcgggtactcaagaccagcctggcaacacggtgaaaccatctccactaaaaatattaacaggcactcagtagtggcgtatgcctacaatcccagccacttgggaggctaaggcaggagaatcgcctgagcctggaggtggaagctgcagtgacctaagattgggccactgtactccagcctggtgacagagaccctcccaaaaaaaaaaaaagggggggggggccctggtgcccggttggggttcaatggcttttatccccaccattttgggaaacctctgaggggggtggcaacaagaggggctcaacgatgttcaataggacatatgctgtgtccaaatgtattgaaaccctgttgttttcctatttaaagaaattccagaggggattaaaccgggacatggttggcagggcccttgaatccccaagacactaggggagggtgaggggaacaatttggttgtacccgtgagaatgttgttgcgttgagcaaaagaccggcattgtttcaagtggggtacaaatgtgagattggttcacaaaaacacacacagtgggtggggtaactatgttgtc

SEQ ID NO: 721423 - DNA, 178 bp, Homo sapiens
agagaaggcagatggggacaggagccggctcagttcagcctggcttgagccttgcccttggctggaagggtcccccggcttgggtagtgtcctcgtctaagtacggagaagagcagttaagggccccagccttgcataagattgaaagattaattgattaaattgatatgggtaaaag

SEQ ID NO: 721424 - DNA, 1024 bp, Homo sapiens
  misc_feature (564)..(564): n is a, c, g, or t
gctgagtccaaagagggtgtattgccgctgacggctgcttccgagcgtgacccgaatttcattcgggcttcactcgcacgtccgggacggaccgtggctgacccgagctcgggcagacggcggcgtcggccagtcctctcggtagtgaggaccacggtaatttcttgagaaagcgctggtgaagggagggagcttgcaggagctgttgacgtgcccagtgtaggcgcctgcgatggaccctcgctgcatcccctttgagtccataactgtgcagtcgcagggcagactgagcagtcccggacctgcctggagggcagtccatcatgatagctggggccttgtgcggatggggtggtgtcgccaaggtctgtgagaggagctcaattgacggtacagtccatccgtaatgtctctggacagtaggacgatgagacagtgcgggagtgctcgacacgccagcggcttcggcatagttccttccaatggactaccagaaaaaggtcactggcgaacaccctggtcggtgtgcacgtggagtgcagaccagcagaaagccgcgtggtnctggagtgactagcgggccagcagagcgaggtcttacagtttaattgcagtggctgggttcccccccggtgggtagggtggctaagtgggagctggggctcaagtgtcttgtggcggggggcacttggggcctgtggatgagccttgtgcagcaatcgtgaccctcgggagcgcaacgccttttcagagtcgactggtatggtgagaggcacccgggtgtgcaacactcaattgaaggggccccaaaaggtgggatctacgggcggcctgagggtggctcatacggctttggaacccgtgagggttcccccaaggagcccattttgaacccctctcattgtggggcaccctcgatccgccgcaagttgccctaagagaacccatgaattgacggaatggcacaaagatgaatcagcattaaggggaaacgaatcaagcttcttcaaccggtgcttgggtt

SEQ ID NO: 721425 - DNA, 246 bp, Homo sapiens
cacatgtgatataaagttcacaagtgtggcaaaataacaattttgatttgcctgtgaactcagcgtactattatatcatggaggatttttatatcaatgtacacccaaaataatggcatatagttttgttgttgttatcatcactagacttcggtatcaagatgacacaggtttttatgttattaattaatatatattgagatggagtttcactcattacctaggctggagtgcaacactgtctca

SEQ ID NO: 721426 - DNA, 690 bp, Homo sapiens
gttgtaaccctagggcagtaaaattctttttcaaccctgggttcttttatgatagacaggaagatatgattatgtatgagtttctacagtttagacaatggggtggaggtgcgctcaaggtaatatgattagttggctacatgtatactcaagacaggcatcacagtctcaggtctcctaatccacgtcctgtctgtccccccactgtgctcctcaggccttgtggatccattgactgtgatctgtgtggttcagctcccacttcaggcagataggacagctcgtgggtgtgagatcccacactgcctccaacccttgcttcctagctggcctcacagggcacctcgagggtctggtccaggttgctgttgtgcacgtggcagcagtagggggctgtgtcttgcgggggcattgccaccaccacccaggactggtaagtgccatttccattgtgaagaacatctccccgtaactcaggctcgtgcacctcgccggcccgagtccagtgcacatcaattttccctgggtagaagtcgtaggccaggcacttcagtttcttcttttctcctggggcctggtggctggtgaccaccacagagggaggctcttgccggtccaggatatttttgctgtatctcaggtatttccgcagagtcgcagggctcgtgccgactcctgcagcccggggga

SEQ ID NO: 721427 - DNA, 951 bp, Homo sapiens
  misc_feature (1)..(1): n is a, c, g, or t
  misc_feature (4)..(5): n is a, c, g, or t
ntannacatgatgacagcaaaactcaacacaggaaagatgacgcatgtcatcaccggaccgtatactgtcaccgcgctgttggccgccttgtaatatattctccccaatttcttccttccgccctcccaattttgaccccggtcagcgtgccccctatgacaacaagtgggcaactctgaaaattactccacacgggtcctaattcacgaacccttccgggctcacaataagcaacacgtgttggcttaacacgcgtcccggaacatgccccacctccatgtaagcctgggggaggccaaccttctattccccctgcgggtaggccgccttcccactacgccccggttgttcccgccccccccatcactccccgggatctggtcaataggacaccgagttagaatggttgctccaccgccgtatgacattacccgccgggtcgccacctgttagttgcgacagcggcacctcacaaggtggtgcacccccggttcacctctcatttctccaggtggggcacaacacactttcgatgcttttcagggacgcgccaatgaaccccgagctgaccgaccccactgtcctcggggggtcccgctatcgataccccgcgcggcaagttgtgaacccctcaccccgggcaagaatccccgaccaacagtgcttcttcttgtctcatcctggagggacggcacacaggagtattcgccaccggggatgatcatggacggccccgtgggctcacagagggaagactccccagaaagtgttacccagggcaaaaggcacaccccccacaaggagacagcccgtggggtcacacacacaaggccacacaacgatcgggtcaggcatcagcgaaacccggatcagccgccccacagtaaacccccggtgcgccccctccgaatttgatacccaaagaaggaggcctccccgccaacataaaa

SEQ ID NO: 721428 - DNA, 243 bp, Homo sapiens
aacactgttcagttcctcacagccaacagtgtatgtcttgagtgaacgcccctgcgctgagctaggctcaggctgttccagggagccacgagactgcaggtagtgatatgcaagagtccatcctgcagtttaccagcaatgataaactcctcgctgtggttgtgggacctgtggaagtttctgcttacacaatccatggcgggcgtgtagaccaaccgtatgtcagcggcaaccccgagctgg

SEQ ID NO: 721429 - DNA, 199 bp, Homo sapiens
gcgtgatagtgcacacctgtagtcccagccactagggaggctgagatgagaaaatcgcctgagcctaaggaggtcaaggctgcagtgagccatgactgcactccagcctgggtgacagagggagaccctatctcaaaaaaataaaaaataaagaaaaatttaaaataaaataaaaatgaatcagcaagcagaattcaat

SEQ ID NO: 721430 - DNA, 327 bp, Homo sapiens
cggtagtgtcagctacggtgctcacgtactcgacggaacttgtacagagcaggcatagcaccgcagtggtgaatacacgtcgaccaggctaccatctataacgatatataggaggtcagcacggtgctcacgtatcgacggaactatgtccagggaggcatgcaccgcagtggtgaataacacgtacgacctgcaggcatagcctagcatagctcgggtacctaggaggatcctcaagagtacgaccaggctccagcttaacgatatttggagggtcagcacggtgctcacgtatcgacggaactagtaccgggaggctagcaccgg

SEQ ID NO: 721431 - DNA, 168 bp, Homo sapiens
ctagaggatccccgcatcggctcccatcagagaaatgcaaatataaccacaatgagatatcatctcacaccagttagaatggcaatcattaaaaagtcaggaaacgacaggtactggagatgatgtggaaaaataggaacacttttacaatgatgggagaagactgcg

SEQ ID NO: 721432 - DNA, 419 bp, Homo sapiens
taagaggatcccctctctgcccacgttgaacatatctggctccctagggctagcccattttctgttggcacacccgccagcatttcccccgtccgagcttccaggtttgtcttatctatctctgcagctcgattgttcatgcgctgctctttgtcacaaatgaaattatttgggggctgcttttcattcaaagggcaatttcgccaaggactctgttgcccttattatctgcctcaataattactttcaacttcctgtatcagcaggagcagggcagagtcatggaatctgctttgtcacggccacagcctctccctgctgttctgtggctatcaggctctggggtttggcttttgggtccatcgaatcacactctgtgctgagcatctccggagcatcgagagccactatggcttgaa

SEQ ID NO: 721433 - DNA, 376 bp, Homo sapiens
tttttttgtgaataagtggattaaacttcaaagatttgctaaaatggcttgaaaacaataagctggccgggcgtggtgactcatgcctgtaatcccagcaccctgggaggccaaggtgggcggatcacctgagttcagcagttggagaccagcctggccgacacggtgaaaggctgactctactaaaaatacaaaaagtagtcagatgtgctgttgggcacctgtaatcccagctactcaggaggctgaggcaggagaatcacttgaacgggggaggcggaggttgcggtgagctgagatcccaccactacactccagcctgggcaacagagtgggactctgtttcaaaaacaaaacaaaacaaaacacaaaaacg

SEQ ID NO: 721434 - DNA, 349 bp, Homo sapiens
cgcagtggctctcgcctgtaattccagcactttcggagaccgaggcgggtggattacctgaggacaggagttcaagaccagtctggccaacatggtgaaaccctgtctctactaaaaattaaaaaaaaaaaaaaagtagccaggcatggtggcatgtgcttgtagtcccagctacgtgggcggctgaggcagaattgcttgaatctggagatggaggttgcagtgagccgagatcgcaccactgcactccagcctgggtgacagagtgagactctctctcactctgcttaatatgcaacctttggcacagactcagactcagtcactctcagcttcatgtccttctcct

SEQ ID NO: 721435 - DNA, 138 bp, Homo sapiens
ggtgatctagaggatcccttatattcatgtcttgggaaacatgttctgtggtgttggaaaaaaatctcttttaccagcttgcactcggaccaacttggaaaaaaaaaagcttaaattgtggtggcagggtgcttccgg

SEQ ID NO: 721436 - DNA, 497 bp, Homo sapiens
gcgagtgtgtcatggatgctagcgtgatggtctgtgtcatccaacgtcatgcgagagaaccgccttagggctggaggtgagacatgctggcggcaatactgctctttaaggcattgaggtgtttacatatgtgcacatcaaaagcacagcacctttttctttaccttgtttatgatgcagagacattggttcacatgtttggctgctgaccctctctccactattaccctgtggtcctgccacatccccctctccgagatggtagaggtaatgatcaataaatactgagggaactcggagaccagtgctggcacgggtcctccgtatgctgagcgctggtcccctgggcccacttttctttctctgtactttgtctctgtgtctcttggttttctcaagtctcttgttccacctgacgagaaacagccacaggtgtggaggggcaggccaccccttcatctggcgcccaacctggggctaagggatctatgctatct

SEQ ID NO: 721437 - DNA, 313 bp, Homo sapiens
aactgcttgtgactcttgctatatccccagcatctagcacagtaaatgtttactaaataacagtagttgtattaacactggcttgtatgtattgaacacttactcttttttttttttcaagacagggtctcactctgtctgtctaggctggagtgcagtagcacaatcttggctcactgcaacctcctcctcccaagcaattctctctcttttttttttttttcagacagagtctcactcttgcccaggctgcagtgagccaagattgcgccattcccatccagcctgggcaacagagtgagactccatccca

SEQ ID NO: 721438 - DNA, 546 bp, Homo sapiens
gtaaatcatctttccaattccagaggaacaagcttgtctctctggccaggaatccatctaaacgggagttgatgtaagcagacccagctaagagtcctccttccttcctaaagcccttggctctggaggaagtcctccagcttcagttcaactcacagcttctccaagcatcacccggggaagtcccggagggtttcctcataaattgagggcggcacattggccggtccggcttcgaagttatcattaccgttcagtatttaaatgaggtgatcctaagaatgggttggggatcaataggaaagcatatgcagccaaccaagagtgcaatggtttggaatggatatgaccaaaattttaagtatggaaagtcacccaaacacttcggctttcacttaggtgtcgggcccgcattacggtaggaccaggcatgatctggtgacggtgatattttaaatatccacagtactcacttttcccaatggatcctagtaatggcctagaaatatcttcctctaaccggtaatccatcattttttcccagta

SEQ ID NO: 721439 - DNA, 243 bp, Homo sapiens
tcttagttatggctccatggaggtgctttgtaacataaggtggtaagttctccacactcaaatcatatgttcagacaatatttcatgtcataacattttttttcaatgaaaataatttgatcagtcctggaattccattgacatccaggattatacattttaatgcaccgggacacgttgcaaaccaccacagacactcacacatactcttaagtagcgtgtacttcttcccgtggtgtttgg

SEQ ID NO: 721440 - DNA, 808 bp, Homo sapiens
  misc_feature (8)..(8): n is a, c, g, or t
  misc_feature (125)..(125): n is a, c, g, or t
  misc_feature (416)..(416): n is a, c, g, or t
  misc_feature (450)..(450): n is a, c, g, or t
  misc_feature (491)..(491): n is a, c, g, or t
  misc_feature (541)..(541): n is a, c, g, or t
  misc_feature (564)..(564): n is a, c, g, or t
  misc_feature (593)..(593): n is a, c, g, or t
  misc_feature (622)..(622): n is a, c, g, or t
  misc_feature (681)..(681): n is a, c, g, or t
  misc_feature (701)..(701): n is a, c, g, or t
  misc_feature (713)..(713): n is a, c, g, or t
  misc_feature (736)..(736): n is a, c, g, or t
  misc_feature (746)..(746): n is a, c, g, or t
  misc_feature (749)..(749): n is a, c, g, or t
  misc_feature (763)..(763): n is a, c, g, or t
  misc_feature (791)..(792): n is a, c, g, or t
gctgcagncgtccacgggggtctgagcagtactccgacgtacagcataccggcaccaacccccccaaataccccagcaagcaggtaggccagccctttcagctcagcacaccccagcccctaccncacccctaccacggagccatctggaccgaggtgtgggagtgatggagcaggtttactgtgcctgcccggtgttgggggccagcctgagccagcagtgggaggtggggccttagtgcctcaccgggcacacggattaggctgagtgaagattaagggagggtgtgctctgtggtctcctccctgccctctccccactggggagagacctgtgatttgccaagtccctggaccctggaccagctactggggcttatgggttgggggtggtaggcaggtgagcgtaagtggggnagggaaatgggtaaagaagtctacttcaaacctnaggtctttattgtcagaccaagaccttaggtgctttctttnaggagggaaacaagggaagaccttggggtccttgtggataacttgagttngggagtttttccaaggggaaggnaactttcccatttgtgccttcttgtgtgnattgtcaattaaccttttccttaacaatnaggtttttgggcttgggcccaaattcccttaaccttacaataaagtttttaatttttgnaaaaaaaaaaaaaaaatttnggggggcccgtnccaatttgcctattgttggtggnttaaattaanttnccctggttttaaanggggtacttggaaaccctgggttcccanntaattgggtttaagga

SEQ ID NO: 721441 - DNA, 148 bp, Homo sapiens
ggcttggctggctgagctgtactaagttggcctggctgggctgagctgtactgagctggctgggctggttgactgggctgagctggactaagctgggctgacctgggctgggatgggatgggctaggatgacttgggctggactgggc

SEQ ID NO: 721442 - DNA, 270 bp, Homo sapiens
cggagcgcagtcccgagatgataatgaagatattcaatgatggaccagccatccaaaggggccgattggcttaggagatagtcttagggatgttgaacttcaaggcaagatcttggtttagttacttccagcagaaacttgatagagtacaaatggcccctgatgaacaggggattctttttcttcaaggccaagtcagttatattttgggtgccttccttaaaggaattcccagtttggcgacgggggtttctacaaggggaccttact

SEQ ID NO: 721443 - DNA, 857 bp, Homo sapiens
acaacggctcacattgcatgcgagtttcgctgagctgagggaaaagatggatcgccgttctggtaaaaagctggaagatggccctacatgtcttgagagtctggtgatgctgccattgtagatatgagtgcctggctagagtccctactgtgtgtcgagagctgtctcagaactatccaccatttggggtcgctatagctgattcgtgagtactgacgacgaggacaggttgcggaggagtgtcactcaaagcagatggcacaagcaaggcatgactggcacgtctggcaaggttccgaccaaggtctgcacctagacaagactcagcaaggctacaagtagaatacttatcgcctaatagcctgctcaccccactcttaatcagtggtggaagaacggtctcagaactgtcagtctcaattcggccaatctaacgctctaggatagcaataagaccggttctaactgactagacaactgcatcgctaaacaccttcatggacacggcaaaggacgaatgtgcccgtcggtacccactctccggtgtcacctggtttcccgcgatgatggcagacctcacacgcttactcagcctgcgtaagcaccttcatgtcactttagccaaagtggcacatagcaacctttggacccataaatactttggtcaccagcgcttcacgaagacccaatacaaccacaaggcccacaactagacgaggacaagccaccacacccacggcgcgcccccacaactggaaaccaacccgacaggacaacggcccgacaacaatgccgcctcccaccgagccaacccgggaccccgacccggcccccaaaacgaacgcccgcaaagcaaa

SEQ ID NO: 721444 - DNA, 991 bp, Homo sapiens
ggtcgaccgtgacgtatagggcgtcgagaacacgggtgttggtgacgcattacgctatcatcgatagtgggaaagtgaaagattcaatagtcagggatgtcgtcattggggacgtaaattgcgggtatgaccagcgagtatatggtgcatctgagtcaatagtaactggggtggtagtctcagctcattagaagccatgtgtatacgagagtttgagcaaggtgatggactgatgaagtatgagagagatggtgtcgtgatagggtatgaacttgtgggtcctaggggttaaataagagagaggggttgatgcagatggaagggtgagtattcaccgatggtgattgatcttaactttgttggagaatcgaggatgcaatgtgggatgtagtgtgagtgctgaattgagtgcaagtgggagtgcgtcgtaggtagggacgaagagacttgtattgtggacataggaatgaggatttttgacaggggggaggactctttcgaggtcttggaacattgggtggcgtgctggcgtgaattgattgggctgggctggtgttggtgggggaacgaagagtttgtagaaaggacattgggggaataggtcccctggagcaattcggggggaaagaaaccggtgtaggagaccactgggccgcccttttcagtgggggagttatattcacccaacggtgaggagtttgtgcaaagcgaaaaggcggtcaactctggtggaccgggttgttgtgacacccattgggcgttcgtaaatttacctaaaccgttggatggttcggagacccccaattatgtagaggactcggtgagggggacgaaattctttggatggcggaaaccacttcggtttgcagcgggacacccgattcgagtgagcatttacccagtttccaggcattccaggtgtgggctttgcgcctttactccggacccacagagataaaccattgtactggagggcagaggttcccttggg

SEQ ID NO: 721445 - DNA, 106 bp, Homo sapiens
cggtcttttctttacttttttctggcttacccgactgacgcggtcctacggacgccgggccgacgcctcgggtccccggcccgtcgctttcccctacggggtcccg

SEQ ID NO: 721446 - DNA, 525 bp, Homo sapiens
cacgacggacacttctcttttcattgtgacggtgccactaaatggatgcagtgtccagctgctcgcgtgtctattttattctgtatgatcactacatactgctctcctcttggggaccattctactatgtgagcattcggtttgatattttttatgaatgctgatcttccttctacacagcattccaacgttctgcaaaaacaggaagctccacttacggtgtgatcaccacactaacttttactcaagcgtcaacagcaacacgcatacatgaagcattaagtgcacattttcactcaacatattggctcattcgcagcactgctatcttccttacagccctatttggcacacatcattatgaggccaggcattaagactcgcttgattcccatcatccctttaacatctcgtatccatagtattttcacaaggttccctttctaaaatcttcaattcacagctatgatgactgcagcataattgcatgtttgacaacggagcttgttggctggcgcgtgacag

SEQ ID NO: 721447 - DNA, 884 bp, Homo sapiens
ggccgctcgaccggggaaaattcctaaggcctttccacaggcgccccgggcccgaagtctggcaggcccctgtcgagcttcccgtgctctaagccgggagacttcccccccaaggaatgaaaataatattggactagggatcgcggaccaccggaggcccatggagaatgtaaggatacaggattggcccaatccattgggggtgtcaaaaattcaaccgcaggcagctggaggatgatccctccaccacccaggactccagtacaagccgtcggcacaccaggtagaatgtcaccgtatttcaaccggagtaaattgctagatttctgccagtcgaaagatattgttctggttgcctatagtgctctgggatctccacgagaccaacgatgggtggacccgaactccccggtgctcttggaggaccccggtcctttgtgccttggccaaaaagcaccagcgaacccccagccctgattgccctgcgctacccagctgcagcgtggggttgtggtcctggcccagagctcaccatgagccagcgcatccagaccagaacgtgccaggtttttgagttcccagttgactgccgaggaccatgaaagccctagatggcctagaccagaaatctcccactattttacccagtgatagttttgctagcccaccctaattatcccatattcaagatgaatattaacctggagagctttgcctgatagtctacccgaagccctgtgtgtggatggtgacccagaggacgtctctatgccggtgactggacatatcacctctacttaaatccgtcctgtttagcgacttcagtcaactaccgctgagtccctaggcccagaaagaccataaatttttatccttttgaaata

SEQ ID NO: 721448 - DNA, 973 bp, Homo sapiens
  misc_feature (1)..(1): n is a, c, g, or t
  misc_feature (10)..(11): n is a, c, g, or t
  misc_feature (14)..(15): n is a, c, g, or t
  misc_feature (21)..(21): n is a, c, g, or t
  misc_feature (448)..(448): n is a, c, g, or t
  misc_feature (571)..(571): n is a, c, g, or t
  misc_feature (591)..(591): n is a, c, g, or t
  misc_feature (616)..(616): n is a, c, g, or t
  misc_feature (961)..(961): n is a, c, g, or t
naaggggggnnaannaaaggngaggaggggaaaagggagagaaaaaagaaattatattagcataaagcctaaattataagaatctgggaaggcagacaataaatgtgaccctgtgaaaaaatatattatgagaataaatataggatgacattaactgacttctgaggaaataacacgttgactgtgatgatctgagatgtacattttgtggatgagcttgcaatagatggataaaagtgataccatacatatagattaagagtagtgatgaggaaaaaagtgaaataataaataaggacccataggtagacgcgttgacagccccgtggtcccgcacacaagtctatagatagtgccagtatccagagaagaatatctactcccagtcaccacccgagtgccacgtctcacgttcttctatagttccccgtccccctgagaacgcccntgctccctccgcccatccaccacagccacactcagatcccctagcctccccgatcccacacatacgccacgtatcacactcccacccactccacctagaccccgcagatcacccaccaccccnccccagactcataatatttncacatacacagcatgccacacgacncgccctccaccacctacctctcctcctcctccgtcgcgtccatgacacagcccgcccgacgtcgctaccaacgagtcccacacatcttcagccaacacgtgcctagtgcacgtccccgaatatcaaccctacaggacccctctcgcatcccggccacttctcaacacgccacattcccaacctgcccgcgatccctcgcagattcccacctatcccattccgacagctctcccgcgcaccgcagcccatcattcccgaccacgcccgaccgaacagaaaccgagtcacgcgcacatgccatcgcccactacgacccgctattcccccacagctcctaccccgtcnccccacaatccg

SEQ ID NO: 721449 - DNA, 119 bp, Homo sapiens
ccggtctcactgtagcgtcgacctactgggcattgatcctcccaccgcagcctcccgagtagttgggactacaggcttacaccatcatgcccaactatttttgtatttttagcagtatt

SEQ ID NO: 721450 - DNA, 578 bp, Homo sapiens
  misc_feature (519)..(519): n is a, c, g, or t
ccttgtgaatgtggagccagtgagaaaagtgatcgtggcaggaggccatgctgggtcttctctttcataaggatttgggtctaagaataattaggtaaccactaatgttagatggtgtaacatttgcattttggaataaagtagaagagttcaggtgatagtgatagcctgaaccgggatcctgggaatgaaggtgaagagaagcagatggattcaagaacaatgcagaaggtaaaattagccccagatggtagcagggaaggagagacggaacatagtgatttagagaggttggtaagacgcaaaggtttttcttcaggtggagaacacttgagttcattcataggcaaagagaaagagcaatggagagagacgactcaaagaaataagagcaagtggggaaaatgtacgtcttggaatcagaaacactgatcctctgagaagaaagggctgatggctatgtaggtacatttataggtgggaatgagggaatttgagatttgaagccttgatccacanaatggggctcagatatgttcttggagtgaggccatggtctcctaagtaatggggtagca

SEQ ID NO: 721451 - DNA, 107 bp, Homo sapiens
gacattacttaaaagttgcaagatgtgggttctgatcttagttcttatggcctgtcagccagggaactcctggccagcagtctcatccttgaacttcttcttttttt

SEQ ID NO: 721452 - DNA, 732 bp, Homo sapiens
  misc_feature (169)..(169): n is a, c, g, or t
gcccaaggcatttccatgcgtgaaagttcactctaaaataggcctttgaaggctcaacaacttgcttaaatgctgccaatgcatacacgttccaactgctatcgcatttgataaattcataattagtaagatacttgttcattgcttatctcttctctaggcatgtcanctcgacgacgggcaaagatctctgatactttggtatgctaatgtctacgccctaggagtgtgcctgtcttttagtagctattaaatgagtgtaatattgcatagaagaactctacgcattgcggtatgagagttgagtctgtacagagatccataacttctgcagtgttctcagccattgatgcacgttgtttcatgttcagattgaatgaagcaattagtattgatgcagttgcagccgtgtgtacacatagtcaaattttctaggcatgtcatgtttctaaggtgccttggaattgcagctgagattaacaggtaatagagagtaaggataaagacagtatcaaagaaagacagagtcagcttcagagtagaatactagtatatagcccagactaatacaatgtgtcatacttacatattcaatatgaataacgtatctttaaacatcaattctgtaagattgaatatcgagaagagagcatgaaaggaataagcactgaagaatgagagctatgaaaaagttaaaaactcaataacgaacgtacagagattcagtatcat

SEQ ID NO: 721453 - DNA, 1417 bp, Homo sapiens
  misc_feature (717)..(717): n is a, c, g, or t
ttcgccgtgtctttccgtgtccgttgtggtcgagtgtagacgttgtccaacacacgttggcgcgtgcgcgttgcccgtatttcttgccaccacgctgccgtgtttttttcagcgttgtcgctgcgctctccccgggcctttgcgccgtgccccgggttccgggagtgttgccctgggcccccgccttttgcgaggaccgcttgtgttgtttcccccggcggcacccgacaacgggggtttctgggacctttccaacccggccccttagtgtgctctgccgcccaagaaggatgcccagcttttagaaaaggggcctgccctctagcacccgctgtcccccacgggaagggccccaaactgctttggaaaagggaacacattgggggtttaagggaagggaattacccctgagacccgtgtcgccccctgtgcgcctccaaagtttgtcttcgcaatctttgggttaaaatagggaagggttgtgaataagttaattacacatggggattctctcctcccgccgacgggatttatcttgggggaggaggcgtcgtaaaggtaagaagagttgaatggtgtgtgttaaaaaaggggcccaaagtatgtctctttatcgcgctcctgaggcgcttgtatattattaagagaaaagttttatatatgggagagcgcccccgggggagcaccttgggtttgggccctttaaatcgccactgntagatatccccccccgcacaccttgttgagagaggggccttgagaggtgttctcctcggtgttagagagatttaagcacaccagcattgtggcccgccccccagctttatataggcgccaccatagcgcctccgctcttggcagcgcttttagaagaggccaatacccaggggacacgctggttttctctttacgctgtattggaaaacatctctctatagggacccagaatttgcaccccacggagaaagccttctcccagatagaatatctctccactttatggaaagacaccctgggcgctttagacaccacgatttggcgacaccacagatgggagaatttatccatgccccactgggaagaaccggaatattggggtttgtaaatatcctcggataataagatagctgttaaaagatttaatagtgtgcccaccaagagaaatatggtgaggattcaccattgccagatataagaaaggatagtatatatggaataaaagttatccagaccccttggctttgctgagagaggactccagatgatagtgaccgaatgtctgcgccagtgaggacacaccattttggccattctttgctgacatctgaccagagtgattcttgatggacatctgtatttaaattgtatgtgttttactctttgaaaataaatctataaaacccaccttttcccccca

SEQ ID NO: 721454 - DNA, 822 bp, Homo sapiens
  misc_feature (21)..(21): n is a, c, g, or t
  misc_feature (43)..(43): n is a, c, g, or t
  misc_feature (85)..(85): n is a, c, g, or t
  misc_feature (486)..(486): n is a, c, g, or t
  misc_feature (537)..(537): n is a, c, g, or t
  misc_feature (579)..(579): n is a, c, g, or t
  misc_feature (596)..(596): n is a, c, g, or t
  misc_feature (815)..(815): n is a, c, g, or t
cagaacattctgctgctcttnaagaccctcatccctcccgtgngagccccctttggacactctatgaccctggacctcggggganctgaacttgatgcgatgggaggctgtgcaggctcgcggcggcgcttttcggattccgagggggaggagaccgtcccggagccccggctccctctgttggaccatcagggcgcgcattggaagaacagcggtgggcttctggctgctgggccctttgcaaccaacttctcttatgtggtgatgctgagtgcccgcccacgacatccttagcccacaagaggacatcgggaaaccagagccatgtggacccaggcccaacgccgatccccccacaacagctcatcacgatttgacctgcaacctcctgtctcctacggctgctgtgctccctggcggacatccctcccccacactcgtcatcaaattgttggcctccctccttggcccttccaccctgcctgnccctacagccccccgggttcctccgtccagtggcgattttgtgcctgctgngaagcttccgtccctggcttgcctttttctcatttctgtggnggaccagcctgctgtgngtgtgggtcttcgctagcatcctcatcaggccttgtgggaggtcaccttcctctccctcactgccttctaccccagggccgtgatctcctggtggtcctcagggactgggggagctgggctgctgggggccctgtcctacctgggcctcacccaggccggcctctcccctcagcagaccctgctgtccatgctgggtatccctgccctgctgctggccngctattt

SEQ ID NO: 721455 - DNA, 180 bp, Homo sapiens
  misc_feature (9)..(9): n is a, c, g, or t
  misc_feature (68)..(68): n is a, c, g, or t
  misc_feature (98)..(98): n is a, c, g, or t
  misc_feature (102)..(102): n is a, c, g, or t
  misc_feature (108)..(108): n is a, c, g, or t
tcttcccancagacctcttgaaaacacttcggtactcagctgcagctgtcaacactctgctgacaggnttcggtttcttcgtggtgatatataacatnccantgcgtnttcagggcgtcaatggacaaagtcctgtccaagcgggaattgccctgctgccattgctgggctcctcagcac

SEQ ID NO: 721456 - DNA, 143 bp, Homo sapiens
  misc_feature (39)..(39): n is a, c, g, or t
gcgtggttggcatgtgactgtggtcccagccccttgganggctgaagttggaggtttgcttgagcacagcaggtggaggctgcagtgagccgtaaccgcacatctgcactccagcctgggtgaccaagcaaaaccctgtctca

SEQ ID NO: 721457 - DNA, 130 bp, Homo sapiens
  misc_feature (92)..(92): n is a, c, g, or t
  misc_feature (118)..(118): n is a, c, g, or t
gtccggttgtgatcccagcctcacaccacccacaactggcactccaaatttgcaacagttctttccccaggccactcgccaggtccttgctngggacccctcctcctgttggggtccnccatgaaccgct

SEQ ID NO: 721458 - DNA, 549 bp, Homo sapiens
tgctgtcgtagatcagtagatcttataacaggtgccattgttattttttaaaagtgatcttcaacagtttgtttgacaggtcatgctgtcattgtagctccagggcctgcagtggtactcaataaatatttattgaatgaggcagggcgtggtggctcatgcctgtaatccctgcacttttcgaggctgcatgtaatccctgcacgtttgggaggccaaggcatgtggatcacttgagttcaggagtttgagaccagcctgggcaacatgatgaaaccctgtctctaccagaaaaattagctgggcatgtgacttatgcttgtggtcccactacttgggacgtggaggtgggaggattgcttgaacataggtggtggaggttgcagtgagccaagatcgtgccggtcactctaacctgggtgatagaatgagctctgtccccaaaaaaaaaaaagtattggctagcatggtgctcacactgtaagccaacacttggaagctaggtggcggttccttgagtcagagtcagacagctgacacatgagatcc

SEQ ID NO: 721459 - DNA, 406 bp, Homo sapiens
agctactctccttccagtccacaaacgaccaagccttctctgcctcaacatggccaacaagggtccatcctacggcatgagcgagaagtgcagtccaaaattgagaagaagtatgacgaggagctggaggagcgactagtggagtggattgtagtgcagtgtggccctgatgtaggccgcccagatcgtggcgcctgggcttccaggtgtggctgaagaatggtgtgattctgagcaaattggtgaacagcctgtatcctgagggatcgaagccagtgaaggtgcctgagaacccaccctccatggtctttaagcagatggaacaggtggctcaattcttgaaggcagctgaagattatggagtcatcaagactgacatgttccagactgttgacctctatgaagg

SEQ ID NO: 721460 - DNA, 1105 bp, Homo sapiens
  misc_feature (919)..(919): n is a, c, g, or t
tctctgatccatgttcaactcccgttcgttaagttccctgttctttgacgtgatggtctcaaatatatgctgatatggtataataccgctgcccactacaacctctacccctgagaatacctctttgcgataccaccctatccttcgatgctggtcccgttatggtgcgttcatactatacaacgactctcatgcgtcttgcaacggatcataccttaatgactcaggcacttgcctatgcctctctctttcaacgttgcccacgatcgtaccggccgttcgtcgattctgatcaccctgaacgttttcacacaggtgcctcacacttctctgtgctctgcccacggatgtataatatcctctgttactctatctgtgcataacgtttttctcatctatagcaacggacagtcatcaagtccccatacattcctctatctcttcataagatcttgcattactactagatcgcctataagtatgttagttagagtagacctcactgagcaacgtctacgttaatctacgtacttgtcccgccagctatttatgtctatcgcggagaacatctctgtggctagttacacacgtgtctgcctgtatgctaaattcgatgcgacgcgattgcaggaggtccgtcatctgaagtcttagccctatgatgtgctctgaatttttccacacgtctatggggtgacgtcttcgcttctgtaacaaccataaaatcgatcttccagttttgacgtaaatatggccttattgtcctaatcctcattacacgcattgtgtctcgggatacgtacaagccagtattccttgcccggggttgccgcccatcaaaggcattcttagacacgcggtcaattctcgtagcgcagtgcgtcgccgagagacattcacgggtttcttggcggtcgtngcacctggtggtgcacaacgcgattggacgcacgtgaatcttctaggaaattaggcgagtcgccagaacagcggcgagcagaagataatccgatgcgagaggcagcagacacagccaagtagatctctcggccgggaggacacatcaagccggatacaccaaaggaaggcaacgacatatcgcata

SEQ ID NO: 721461 - DNA, 269 bp, Homo sapiens
gcccatggctgagaactcccactagatgctactggctcaaagcaagtcaatcatgatcagcccagagtcgaaagtgtagggcaaatatgactcttgcctcttgatatggaagatgcttcaaaactattttgcgcaaccataccacaggaaagccacggtagttttaacagaccactaacgaataaaaataagatctgagaagctttggcagcaaggaatgaaggttgaggtcttcagtgataccagaaatgtatcataaggtcattgga

SEQ ID NO: 721462 - DNA, 204 bp, Homo sapiens
cggctgtttttcccagttgttaggctcttccacgacgtgagcggctgtgtgcatgagccgggcgtgtccccggtgcgcagcgtgagctagaacttcagtctggcaggagttgcccacgagtgctgtcgttgcgggttgagcgttgcgggctgctgacgactgccgggggacgtaagatatccccatcatccgatttatccaatg

SEQ ID NO: 721463 - DNA, 512 bp, Homo sapiens
  misc_feature (40)..(40): n is a, c, g, or t
  misc_feature (141)..(141): n is a, c, g, or t
gccaccatgacccagaatctagagacattaattctacacngttgtatgctaataaatgagtgatttcatatagggaaacaggatacaaatgaatatatatacatgggtataaatctctgtagctagtgtagtcatactagngaatgtttatggatcccacttgtatatgaaaatatggttagaatattaattggataatgtatatataagaagttaaaatatgtaaaatataacttcaaccaaatttttagaacactgtttaacatttttacaaaaccttcatgtaggaaaagagaactctctacataaagatgaattgaattatattacaaaatttattttaaaagcaatgactgatacacacgaaaaaacacaaaagaactccagattactggtaaatcattctgaatacataaacactttttcaagatatctattttaatgcataaactaattgttaactaatcatagaacagcaaacgcctgtttaataaaaaactttgaacaagaca

SEQ ID NO: 721464 - DNA, 279 bp, Homo sapiens
aggaattgtactgcacttgggtgggcaagctgtaatattatttctttgtaaattctgcagatttaaagtaccacattaccacactctgtaatcagacccattgaattaataaggactggggattcattagtgtgacttactgatgccaaagtactatgttttaagatgtcctacatggaaaacgctattccaggagctttaaatgtccatggatgcatataggatgttggagaccatcatacgtgaagaaaaaatcacttaaatcattgtgttcaacag

SEQ ID NO: 721465 - DNA, 492 bp, Homo sapiens
actagtccacggttggctagtgtttgttcacagcagttaacaataattaatggcatatttcaaaatagttataaaaacaattgtagttaacaataattaattgcttgtttcaaaatagctagaagatttggaatgcccccaacacaaataaatgataaatgtttgagatgatggctatcccaattaccctgatttaatcattacacattgtattcatgtatcaaaacaccacatgtagtcccagcaatttgggaggccaaggtggatggatcacgaggtcaggagttccagacgagcctagctgatatggtgaaaccccgtctctactaaaaaaatgcaaaaattagctgggcgtggtagcacatgcctgtaatcccagctactcaggaggttgaggcaggagaattgctggaacccgggagtcagaagttgcagtgagctgagatagcaccactgcactccagcctgcgtcacagagtgagattccatctc

SEQ ID NO: 721466 - DNA, 160 bp, Homo sapiens
  misc_feature (34)..(34): n is a, c, g, or t
ctgatttttttttaaaaaaaaaaggggctgtttncccttcttcccctgggctgttataaagttggatttgaaagggaatgttgtttttattaatcttttgtcttaaaaaaatttaaagggctttggatttttaaacctttaaccaatcctttaataacca

SEQ ID NO: 721467 - DNA, 168 bp, Homo sapiens
acgtatacacatatgtagccataaaatgcgtccagaaatttgactcatacttgtactgtactcttcgcatggactgggcaagttcttttaaatcattaaatattaagacgaccatctcttctattcacattacatgtacatgtacagagccacatacagggtaccgca

SEQ ID NO: 721468 - DNA, 311 bp, Homo sapiens
ttcggggttggtttttttggtttggttttttttcttttgtaaaggcaatgagctagtcccagaaaggatccttcagttacaaccaatttgtttaatgaaatgtcagggctcggttcaaatttttgtcttgttcttccaattgggaaaaacaactttcaaaccctcttgtatttggaaggctggaagggcccaaactttggaaaagggtcttggtttcccggtttttgttttgatttttttttggttttgattttttttaaactaaagcaaaataaagcttggggattaaccagaataaatttttaaattta

SEQ ID NO: 721469 - DNA, 302 bp, Homo sapiens
gtgccaatctactagagcatgcacattgttcgatttgctcaggctgttgaacgagaataccccttcagtcatacgtgacatggatgagtggttccaggactttcccgccgatgccgcatggaacgtttactccgattactgcgttggcaaccccgataaggcgaacgatagtttttctttcgtcattacgttgaatcatgacaccgacgagaatttcagcgagtacgtttcgagtgtcgctccgaaggatctcaaaaatactcggcaagcctctgagggcctgatttcctacctcaactcgc

SEQ ID NO: 721470 - DNA, 417 bp, Homo sapiens
agctgagaagctggagtggggccctccaggaagtggtgcccttctgaaagattgggcaggcaggtcaactgcaggccacagcagcagcaatcagctggagccccccagcctaggggcagtcccaccatgggttccccccctggtacccatggcccctcacctgttccccaaacaacaaactcctccctaactgatgccaggggcagttgccaggcagcggacacccaggcgtgacgggtaatgctccttggggttggcctttgggcatgccgcctcctcctcttcctcctgctccatccatacatcccaattgggaagtctagctgactccatcagtattaaccctccccgttcatcctaccttgcatggccatcacccaccatttcccgtcggcccggggaactctccccccacct

SEQ ID NO: 721471 - DNA, 582 bp, Homo sapiens
tgaggacccctcaaagttgtgcaatccatagtctgacacacctgattaggcatgcatgtcacgtctctgactctgtacatggaatagtaggaaacgttgtcataaataacaacgtgtgctgtgttgcgatataaagagacgttacagtactttgaaaaatgtcttgactggtgcgattataaccgtctaatattattgacattcttttctactttgtttccatgatttgtctcgcattctctgcaggggatcgtgagacttgaccagatcggtttgtcataacacctcaaagacgctatccgatccatcaggcccagtattcctgtctgggggtacttcccacagtgtgctggaatggttatcacaagaaggctgtgctgtcccctcgtcaactccaggatggtgtgtagccctgtgactctgaggatcgcccctcctgacagaagattttcgcgttctgcgatgtgagtattatcgttggaagaatactctcccttttcgtgtccactttattcttctccagttgttcctatgacaacatgactacaacgcaaaaaagaaaggacgaatctgcttgtttgg

SEQ ID NO: 721472 - DNA, 141 bp, Homo sapiens
aaaagttttgggacctgatgattcaacaaaagatggacaaaaaggcatatttctgggggatgatgaatggagagagactgcatggggagcttctcaccattcaatgtcccagcctattatggtacgcataaaaattctgca

SEQ ID NO: 721473 - DNA, 575 bp, Homo sapiens
  misc_feature (32)..(32): n is a, c, g, or t
  misc_feature (35)..(35): n is a, c, g, or t
  misc_feature (56)..(56): n is a, c, g, or t
  misc_feature (118)..(118): n is a, c, g, or t
  misc_feature (133)..(133): n is a, c, g, or t
  misc_feature (152)..(153): n is a, c, g, or t
  misc_feature (176)..(176): n is a, c, g, or t
  misc_feature (192)..(192): n is a, c, g, or t
  misc_feature (204)..(204): n is a, c, g, or t
  misc_feature (232)..(232): n is a, c, g, or t
  misc_feature (245)..(245): n is a, c, g, or t
  misc_feature (274)..(275): n is a, c, g, or t
  misc_feature (282)..(282): n is a, c, g, or t
  misc_feature (291)..(291): n is a, c, g, or t
  misc_feature (335)..(335): n is a, c, g, or t
  misc_feature (356)..(357): n is a, c, g, or t
  misc_feature (369)..(369): n is a, c, g, or t
  misc_feature (381)..(381): n is a, c, g, or t
  misc_feature (387)..(387): n is a, c, g, or t
  misc_feature (404)..(405): n is a, c, g, or t
  misc_feature (417)..(417): n is a, c, g, or t
  misc_feature (426)..(426): n is a, c, g, or t
  misc_feature (432)..(433): n is a, c, g, or t
  misc_feature (442)..(442): n is a, c, g, or t
  misc_feature (447)..(447): n is a, c, g, or t
  misc_feature (449)..(449): n is a, c, g, or t
  misc_feature (521)..(521): n is a, c, g, or t
ggatggtctggccagttctgggaggaacctgngcnatacctcactggtgctctacnctgacgtgtaggagctgaagaggagtgtgggcaagctccccagcaccgtggaatcactccanattgtgcaagagcangtgcacacgctgttgcacnnggaccaatgccagggctggcgtntgtctgctaagacttnctggacagactntcttctatagacaaactgaaagcctcantgagccaagtggnggcggacttgaaaatgctcaggactgctnnggacagnttgtgtgcntactcggtcaacatagaaaccaacgagaacaatctggaatcagncaagggttactagatgacctnncgaatgatctgnatatgttgcttngtgaantggctaagatcacagannggtctgaattgngtgtgcatngcgccnnattaaagtnccacntnttattaacaatgagtggttttttcccatgtgttccatacccaccaagtttttggccctcttaaagagctgantgtacctcctgaacaacgcattgttttatatgccccggttacctaattacttct

SEQ ID NO: 721474 - DNA, 983 bp, Homo sapiens
  misc_feature (376)..(376): n is a, c, g, or t
ggagaagcgagtactcgcgtctggtgctgctgcgaggggacgaatctggtctcgaatgacagtagagtggacctcctcccaaagatatctggtattgctcgagttccacttgctggagctgcgcgtggggtcccagggaatctggcagggcatgcttggcataggaatcctcgatgctgtgggttcccatgtcgcccacggctcctgcgatggtacttgcatgtggtccatgtcctgtgggtgttggaagggccatccacaacaggtgatgacactcgcacgaaggaagaggtactgtaggcatgccagtgtagcatcctagcatggctaccagagcaagtatttgcacgtggtgcgttccgaaacgcgcaagtantctcatccatgtggccgttggtggtgctccgtacgcgcccgaaccttatggggctcgagggagcacccccgctaccaaggcattgatgtggccgcacctctctggatatgtagagctctctattgggtccccgcaattggcggagtccccgctcgtgtgaacgagcggacttccagattgggtcatgccgcccgtctcgggggatgctggactcgctccacccgtgtgggcattgcggagtggccttcgtttgaagcgcttgtggcacaagagatatgcgaagtagctccgcgagaaggcgtgggctcgaattcctcagggtcgcacgttagcacagacctgtttgtgagcttatgcatgttgttcgtggaggtctcatgggatatgtctggatttccctttacaaggggccccactccccgcgggaatgcgacccagccaaggccctaagactcgtcgtgggcccgtcctcaggttcccttgccatgtttcccagtaaaggcttgtagtatagtccttatatctcctttgtggcctatgaaaactggtgtaaatagtaaaacgtctttaagaagaacatttatccattaatagaacagacagaact

SEQ ID NO: 721475 - DNA, 540 bp, Homo sapiens
  misc_feature (32)..(32): n is a, c, g, or t
  misc_feature (35)..(35): n is a, c, g, or t
  misc_feature (56)..(56): n is a, c, g, or t
  misc_feature (118)..(118): n is a, c, g, or t
  misc_feature (133)..(133): n is a, c, g, or t
  misc_feature (152)..(153): n is a, c, g, or t
  misc_feature (176)..(176): n is a, c, g, or t
  misc_feature (192)..(192): n is a, c, g, or t
  misc_feature (204)..(204): n is a, c, g, or t
  misc_feature (232)..(232): n is a, c, g, or t
  misc_feature (245)..(245): n is a, c, g, or t
  misc_feature (274)..(275): n is a, c, g, or t
  misc_feature (282)..(282): n is a, c, g, or t
  misc_feature (291)..(291): n is a, c, g, or t
  misc_feature (335)..(335): n is a, c, g, or t
  misc_feature (356)..(357): n is a, c, g, or t
  misc_feature (369)..(369): n is a, c, g, or t
  misc_feature (381)..(381): n is a, c, g, or t
  misc_feature (387)..(387): n is a, c, g, or t
  misc_feature (404)..(405): n is a, c, g, or t
  misc_feature (417)..(417): n is a, c, g, or t
  misc_feature (426)..(426): n is a, c, g, or t
  misc_feature (432)..(433): n is a, c, g, or t
  misc_feature (442)..(442): n is a, c, g, or t
  misc_feature (447)..(447): n is a, c, g, or t
  misc_feature (449)..(449): n is a, c, g, or t
ggatggtctggccagttctgggaggaacctgngcnatacctcactggtgctctacnctgacgtgtaggagctgaagaggagtgtgggcaagctccccagcaccgtggaatcactccanattgtgcaagagcangtgcacacgctgttgcacnnggaccaatgccagggctggcgtntgtctgctaagacttnctggacagactntcttctatagacaaactgaaagcctcantgagccaagtggnggcggacttgaaaatgctcaggactgctnnggacagnttgtgtgcntactcggtcaacatagaaaccaacgagaacaatctggaatcagncaagggttactagatgacctnncgaatgatctgnatatgttgcttngtgaantggctaagatcacagannggtctgaattgngtgtgcatngcgccnnattaaagtnccacntnttattacccacttgagcttaatgttaacacgctgcacaacaaggcatttgtgtttttatgccccggttacctaattagaatattctagctc

SEQ ID NO: 721476 - DNA, 356 bp, Homo sapiens
aacttggcacacacatgctagtgtcagcactccaacacccactggcagatgccatggcgatgcgcgacatctacagcgtcttcaactccaacggcgcctataaaaccggggcccacgcccatgatgaattcatgctgatggtgcccgagcacggtctgttgcgttacaaggatgaagaacgtgggcgcaccacctcggtgatcgaccgccagttcgtactggtgccgccgcaatccagccattcctcttcgtcactcaccgccagccagggccacgtggcgttctacgtcgaccccgactacatgcactacgccttgcgggatctttccggtgacgccaaccgcttgctgcgcgtg

SEQ ID NO: 721477 - DNA, 390 bp, Homo sapiens
cgctactatgcctatagagcgtaatactctcgctgtgcattatagctactctcatatgccctcaacacccactctctctctagccaatattgggcctatatgccatactaggccttggcgcgctgccaagcaaccgagggcctagccctactagactcaatctccaacacatatggcctatactacctacataacctcctacttcaatgctctaatcttgccaacgcattatattactaccactgacatgactttccaatcccctactattggttaacccaatcaacaacaacctatttagctgtgccccaacctctttcctatcgacgcccctaacagacctcaccttctaagactcctacactgactctctacacccttacacatctg

SEQ ID NO: 721478 - DNA, 265 bp, Homo sapiens
cgatggcttgaacactgcgagcagccctcagactggtttctgtcactgaccgagccgaacggaggggtgctctgagggtgagttttctgcccaaaatgaagagaggttccagggagtggacagattcaaccggcatacacccccgccccccttctccccaaggcacctgaggtgtatactacttggggatccgtgcacgttaacgattactaggactatgcagaaaccagagagtataagaataccgcatgggctcctttccctt

SEQ ID NO: 721479 - DNA, 630 bp, Homo sapiens
  misc_feature (120)..(120): n is a, c, g, or t
tccgggtgtttaataaccttcagaagtttcccacaaaggctcagactctgggcaaggggtctggggcttccctggactgatggggagggggtggagagagaagagggtgcctggagctgncctggccccccaagtcacagcccaagagtgaggccttcccccatgccagcaggatgacggggagctgagggggcactcctagggcggcaagaggacatgtgaggacctggagtggctctggggagggtgtgaatgatggtatgagggtgacagtgcacatggatatccacccttccaccgtatagctctcctctctctgagtcgggcctgggcaactcagtctccgagattctaccccacagggtgctggttggtttgagcaccatacgaccccatggcttgctgggagtatgttgtaagagccagggggattcctgcgggtgctgttaaggcggttgtgacactttagctttggtttccatgaagtcccttggcaggtcggctcattttcccagttgcctagaatggacagttccctgggaccgccccgaagaactgatcttccagcaggaataatacttacttccaaccacctgctccacataattcattgcctaacccctggggtcg

SEQ ID NO: 721480 - DNA, 1176 bp, Homo sapiens
  misc_feature (266)..(266): n is a, c, g, or t
  misc_feature (711)..(711): n is a, c, g, or t
  misc_feature (714)..(714): n is a, c, g, or t
cgagagaggcggcgtccattagttagcggctccggagcaacgcagccgttgtccttgaggccgacgggcctgacgcgggcgggttgaacgcgctggtgaggcggtcaccctgggctactggctggcctgtgcatgggtggcatgtggctggcctgttgtctatgggccctggagtgtggggcctgcgctgcctcgtggctgctacgaaccctggctgtggcccactgcttgtgcttgcgtgcctggtgtgctgtgtgctgagtgcncatggtgctgatcctgctgtgcatgtctccctgggctgcctgtgatgtgaccacgggatctgctgtgcccatctgactgccatctgtgctgtgctcggctgtgtgctcttgcgtgccgtgctgggaacgacgtcacgtggtgctggtgacctgccctgctttgctgtggtccccctggacggttgcggaacgcctgctgtgcggtgcactgctgcacatgcaccacgtgacccaccaaagacaatgtgactgtgatggactgcactgtgctgatgtgtgacaagactgtgcccacattgtgcgacgccttagacgtgattgcccaatcgagccattagcaagcgaatttcgtcttaactatccaaggcgtccttggacgatgatgtgactatccatgaccagaacatcacaccgtctgagcctactctcttaacaccgtgcgctngtngcttgcgctgcactcgcgtagcactcgtatgacacgcccacattgcacacgggatattacttatcatgcggagcagacacgtccaatccaaacgctacttcggacacttcccttgcgttgtgaacaccccgagttcgcaggggctgaggtatatcagtcgttgatatcgcatcgtacagggtagtccgccgttagttaggacgttgtgtcaccctggacacgcagttgctccatgcgatataactcttggcagggctcatagtagttcctatatgccatggtcgggcatggccatttcccacatgtggtctcgcagcgaactgccgtccctagggctcgcgctcggtgttgacaccatgtaactgggacgtcacgtcgcgtgtgaacatgtcctggctctgccgactgtcgagaccctaaccctgtggtcccaacccagatttccggcttgcttaacgccta

SEQ ID NO: 721481 - DNA, 1368 bp, Homo sapiens
  misc_feature (298)..(298): n is a, c, g, or t
  misc_feature (1324)..(1324): n is a, c, g, or t
gggaagcagcagaactcgttcaggaaaccaggaaaagttgtgtaatgagggcaaagagtagcagatcctcatgagactaggaagggatggagtagacttcggcgtcgaaggacatcttaaacattttagtattaattttgtgatcagtcagagtgaacgaaggataaaagaaaggaaaagtaacataagattttcatttgtaaagagaattggccgacatagagcagagcgagtgacctggcttagtcccgggttatgctgtcatcctgcagagacagactgcttatatttgctgatngttgtgaaaatgagagaaagaatgcatacaatttagaagatccatggaaatcactggtaatgatcagtattgtgatgggcgcaaagagatgacttttgcggctgatagccagatctgtctgcatggaacgactccataaacgttaacctcggagacaaatggggagggaatccaaagagcttgttaggacacagcgcttcggttaaaatctgtcttggcaagctactgcaccgatggatgctttcataatcagtttgagttatgtgtctaggactatttgctgtgtaacatactcccaattagtggcataagcagcaacctttttggttatgccagggcccatgggggtcagaatttcaaaagggcccagcggagtggcttctttctgcccacaatgtatagggtttacagtggaagccccaaaggctggagctggcctcatccacaggctggtgcatgcctatgtctggcacttgggctgaggcatggaaggaacacttttcagcctttacactcagcctgctccctcactctgcaatgctctcagggcctgggtgctacgactcctgagaacaggtagcaggtgtgtcaccttctcaaaaataatgtcaacagtcatgcagtccacactttactcattgcaggagattcacaagcctccctcccagattcagggaaggagatgcagcccccaccccttgactggaggaggaccaaggtcaccttgcagagcaccgtgagatgtggaagatgccagaactgtctgtgggaaatgggatttgacttggcttgtctgcctcttgcaaccagagtcctggttctcagggcctcacctgtgcatctcttgttgagcacagaggaggcactcggcataaatgaagaggatgcttgctgagctggctggcccatcctctcttctttcccttgtttttctattttatctttcaaagcagtgtttcaagtgtttataaactaatctatgtataaaatattatgtggcataagatttgcaaaatattaaagatntaaagaatcaaataaaatatttgtatgataccacaaaaaaaaaa

SEQ ID NO: 721482 - DNA, 1103 bp, Homo sapiens
  misc_feature (19)..(20): n is a, c, g, or t
  misc_feature (25)..(25): n is a, c, g, or t
  misc_feature (33)..(33): n is a, c, g, or t
gtggtcgttgggttttccnnccccngggtgtanggatatagtcgaccgggcctctgcgtgacgcgtggggtgctcctcccagtactcaattggctgtgtgtcctgctcagtgtctcatatccccagtgccaagttacaaggacagcagccctttgtgaggcgctcttggccctgggcctggagggagaactttaagcttttatgctcacagtggacgtggtatgtgtgccctgtggttgcagtgtgcccacattctggctaatgatgagcttatgtctagatcagtccatgtggtccatcagtttgtccatgtgtcctggcatgccaagccccgtcccttggggatccttaccccctggggggtgtagcccttgttacattagtatatactcattaccttcatgctttcctcagaagaagcacttccacttctgaggtgaggctttatgagcccatgcccttcctccacaggttgttagcctttacataaagacctgatagcagaatacattggtgtgatcccttgtagaagcccagcaaccaatttcttgtgtggcgctaggagatattggccccttcaacgccgttagaggtggcggcaagtgagtggctctgcagagacgtgaacccctattccatttcatcagttgggttaaagggtcacattttgggcttgacaaggcccttaaacttggccacagacatcatggcttggcgttttcatagaacgagaattgggccagggaacggattgacaacccgaagatttaccaagagacaatttggagccaaaggggtatagagcaacccccaatccgtccgtatattggaaggagccattaagtaggggggcacaccaacgtagtttgcaagttatggtcaagcctattttaaggggcaacaagttgacccttggtatattgggcgtttttacagagggggtaaacggacgcttggcagaggttgttgaaggaaaggccataggtggttaacattggagtggggaattacaatttgtacgatgtggtaccgtttcaaagagattagcaggacgtcattagaggggggatcacgttgaatggtgatggcaagagtttcgcgtc

SEQ ID NO: 721483 - DNA, 144 bp, Homo sapiens
ccattcctatcatgcagaggctcatctttgcagggcaggcagctggaagatggtcgctactctttctgactacaactatccagaagggagtcgaccactgcagcctggttccgtgcgtctctgagaggtggtatgctagatctt

SEQ ID NO: 721484 - DNA, 420 bp, Homo sapiens
  misc_feature (327)..(327): n is a, c, g, or t
  misc_feature (366)..(366): n is a, c, g, or t
gtcactcaggctggagtgcagtggtgcgaaaacagctcactgcagcctcgacctcctgggctcaagtgattctcccagcttagcctcctgagtagctgggattacagctgcacgccaacagtcctggatgatttttttttttttttaaattttttgtagggatgggtccctactgtgttgcccaggctgatcttgaactccggcgcccaagcaatcctaccaccttggcctctccaagtgctggcattacaggtgtgagccaccatgcccaggcgagagtctgcatcttaatggtgaaatcaatcctcatcacttactgtaatggtnaatatatgtggggtaatttctgctaccatgcaggtcaanaatcaagcgttgctgttaacccagatcccttcttgaaccccttctgtcgtcttc

SEQ ID NO: 721485 - DNA, 290 bp, Homo sapiens
ctgggaacagagcaaaccgcatctcagaacaaaacaaaacagaagcaaagaagttgggggaggaaggagcgtatcaggaagaatagctaatggatgctgggctgaatacctacatgatgggatgattggtgcagcagaccaccagggcacacatttacccttgtaacaaacctgcacatccggtacatgtacccctgaacataaaaatgggaaatcaaagaaaaaaaaaaagggagtccaggagggggggacgcaatcatggggggtaccggagctcggaatccggtagt

SEQ ID NO: 721486 - DNA, 314 bp, Homo sapiens
gcggccgcctactactactactactgctcgaattcaagcttctaacgatgtacggggacatgtaaagtacttacttagcagaatatctggcacatagtaagttctcaatcattattaatctatgttttcatggtgaacccccggctctactaaaaatacaaaaaattagctggatgtggtggcgggtgcctgtaatcccagctactcaggaggctgaggcactagaattgcttgaacctgggaggcagaggttgcagtgagctgggatcgtgccactgcactccagcctgggtgacaaagtgagattctgctca

SEQ ID NO: 721487 - DNA, 318 bp, Homo sapiens
  misc_feature (30)..(30): n is a, c, g, or t
tcattgcctaatggataggcgtggtggaantggcaccgaggaggacatatcacgaccgggcgcggcgcgcccctcgccaagtggtcttccgggatcgtatcggtttaagaagcggacggagctgtcatgcgcaggcatcacacggcatgtgtatgcggagaggccagctcaacatggcatgtgctccctgtggcaccagcctgaggtacaatcgtgtgctgctggaggagaagcctgagaccgtggcagctgccggcatcaggaactatccagttattccccaacctgagaccagaagacccggagggggggcggggg

SEQ ID NO: 721488 - DNA, 712 bp, Homo sapiens
  misc_feature (106)..(106): n is a, c, g, or t
  misc_feature (109)..(109): n is a, c, g, or t
aacgatggtcctcagcttcttttctgaaaagaaagctgactaccaagctgtcgatgatgaaatcgaggccaatcttgaagagttcgacatcagcgaggatgacatngangatggattcaggagactgttggcccagttggcaggagaggatgggagaatctcgtgccttgtgagctggagacccatcctgaggaagggttctagcaaaagggcaaagatatcaagtcagattggttcagcattcgagacatgcaaaattatggttgacatgctagattcggaggggaggtggcaagctgggcgttgaaggagtctacatttctctggaggaaggattcaaaattacgcaaaaaaatttagcgagaaatcgacgttgacaggtctgttaccatgaatttcctatgaaatggggaaggcattcagaagaagcaggtttcaagatgccctgtaattcaacaagtcatcgtgctcggttggaagatgaccagtcatcatcgattttgatacttttgcagggtaggtcagggtgaaaggcgattaaggatatttacgcagtggatcccgagaatactgaacaaaagagatgacttatctctgggtctgtctcagtacttggagtataataatctgctgaggattctctgatggaataagacaggatagttcattaaatacttgtatttgggtaaatttggacattattaaggtgcca

SEQ ID NO: 721489 - DNA, 113 bp, Homo sapiens
gtataggctgaagcgcgaactcagccaggttggggtgatcttgtcgaaggtagggtgatcctgatcatggtgggatgtatctgtcttctagggcagcatctccgcttcggaaa

SEQ ID NO: 721490 - DNA, 144 bp, Homo sapiens
gagtcggaggatcccaggaagccatcctctctagggtctcagttacccatctctgaaaaattaggggtttctcaaggccaaaaagggtacaacctggagggtcaggtgttggagtttttaactgaaggcactcgggattgtcaa

SEQ ID NO: 721491 - DNA, 549 bp, Homo sapiens
tgggaggattgcttgaggccagtgcttcgagaccagcttgggcaacataccaagtctctacctcagctgagtacggtgccttacacctgtaatcccagcatatttgagaggtctgggccgggggattgcttgagcccaggagttcgagaccagcctgggcaatggggcaaaaccctgtctgtacaaaaaagtacaaaaattggctgggcctggtggtgcatgcctgtggtcccagctaccaggaggctgaggtgggaggattgcttgagcccaagaagttgaggctgtagtgagccaaaattgtgcctctgcttttcagtctgggcaacagggtgaggtcctatctcaaacaaacatacaaacaaaaatcgtctctgcaaaacaataaaaacaaattagccaggtgtggttgtacgtccttgtagtcttagttatttgggaggctgaggtgggagagtgcttgagccctggagtttgaggctgcactgagctatgatttttgcccctgtactccagcctgggcaacagagtgagaccctgtctcttaaa

SEQ ID NO: 721492 - DNA, 240 bp, Homo sapiens
tgggactagtacttgttgtagtactactagatccacccaacgactccgatatgagccacgacccctgcataggaataatcatatccggagccaccctgtgttcataaaccatctgccattctgatgtgctccatgtatctctagcagagtcccaagtttcatcagcactgaaaccaaacatgccgtcgtaacggtctccaggtctccctcttctgccattgcgcccgcgaggggtaccga

SEQ ID NO: 721493 - DNA, 150 bp, Homo sapiens
agactcgccgaccacggcaaagagcagggctgccatatagtgagccagcatgggagacgctaagggccataggcgcaaagcaggggcagcagctccaaaacgacagcgccacgtccctggcaggaaggtgatgcccaggcactctagtct

SEQ ID NO: 721494 - DNA, 903 bp, Homo sapiens
gactcgcgccttgccgtgcaccgaaccccgccatggagcggccgtcgctgcgcggcctgtcctcgggccgtgggctgctgctcctgctcctgccccctctcctcttcctcctcttcggacacctgcggccctgcgagcggcctcctgccccgcccctgccccctgtgggttgcctgctggggcgagaccctggactgcgttgcggttgttgcccctatgtgcgccccgtggggagggcgacccggtgccggggggtggcggcccccggaggggcggtaacttgcggcgcgggggcaattggaagttgcgtgaagaacccgcaagagtgcgaagtgcgttaacacgccgtgggcagcaacgcgggcgggccgggtgaaacacgccggacgttattgccgttgtgcaaggagccggtctaacccgtggttgttgctgcaagcaaagggcccaacttaccggagcgggtgtatcacagttggcgcgccgccagcaatgagggcgccgagaaacccggggggaggaggcgcaatcaccccgggtcggacaggggcacaccttgagagcaagtttgccttcccatagaacacgtgtgtgaagaagggacccccgttgatgccaccctttcccatcggagcaccggggatccatcttgctggttaccagcgcggccccttccaagttggtgacgccccccaaagggaaccttttgcgaattgtcctgtcggccccaggtggtatcctgacctgtggaggcacatgcggaaacaccgaagacttgtctgctattgtggaacaggtcaacgggggctccatgtggtcaacaggacaagaccctgctggagcgcggaacggtgcccttcaaccggtgtggcaaaacgatatacgggggggcgcacccaagag

SEQ ID NO: 721495 - DNA, 218 bp, Homo sapiens
  misc_feature (3)..(3): n is a, c, g, or t
  misc_feature (17)..(17): n is a, c, g, or t
  misc_feature (25)..(25): n is a, c, g, or t
  misc_feature (163)..(163): n is a, c, g, or t
atnccttctccatccanttagttancagaaactaatcaaaagaaagtctgacaactgcactcccccttgcatgccattctctcaagcccataatcttggagtatccacaacgtgcgaaggcctaccctttgtgtgtactcatctcacgtttacgtattttgtngttgaggagctcctctacaaatgttgcgtatcttccgaatcactcatttagaaaa

SEQ ID NO: 721496 - DNA, 120 bp, Homo sapiens
gctggtgcctcctctgtagtaaaggaaaggtaacagtcctgccaaggctttgaagctttacagcgtgcttgcccttaagattcttgtgttgtgttctgggtcagcaggaatagctcgcca

SEQ ID NO: 721497 - DNA, 134 bp, Homo sapiens
agacccgcacgacacggcgactcctatcaataccatatgccgacagcaagatatccaaaatgctataatagtagtactttgtaggaagctttcagatagcttatgcagctttctaagatttcatacaatcacta

SEQ ID NO: 721498 - DNA, 228 bp, Homo sapiens
tcgcttaggaaggtgcagaggttggcagcttcgattgaagcacatcgacgcgaagagcagatctgaagtggtgggtagggtgtggtgtgtgtagtctgtggtaggtttgtgtgtgtgtgtgatatgagtggtggaggtgggtgggtggtgtgtaggtgtgtgtgtggtgtgggttgtgttgtgtgatggttggtgttgtgtgttgcgtgtgtgtgggtaggtgttgtg

SEQ ID NO: 721499 - DNA, 119 bp, Homo sapiens
tgcacttgaggtcattattcacccgggccctcatcatatggcatcccaattgcccatgcatccatccatgcaccagcatctgcggcgcgcatcgcatcatccaggcgctttcacacatt

SEQ ID NO: 721500 - DNA, 689 bp, Homo sapiens
  misc_feature (5)..(5): n is a, c, g, or t
  misc_feature (90)..(90): n is a, c, g, or t
  misc_feature (112)..(113): n is a, c, g, or t
  misc_feature (125)..(125): n is a, c, g, or t
  misc_feature (127)..(127): n is a, c, g, or t
  misc_feature (155)..(155): n is a, c, g, or t
  misc_feature (162)..(162): n is a, c, g, or t
  misc_feature (170)..(170): n is a, c, g, or t
  misc_feature (172)..(172): n is a, c, g, or t
  misc_feature (175)..(175): n is a, c, g, or t
  misc_feature (177)..(177): n is a, c, g, or t
  misc_feature (179)..(179): n is a, c, g, or t
  misc_feature (191)..(192): n is a, c, g, or t
  misc_feature (198)..(198): n is a, c, g, or t
  misc_feature (202)..(203): n is a, c, g, or t
  misc_feature (210)..(210): n is a, c, g, or t
  misc_feature (212)..(213): n is a, c, g, or t
  misc_feature (215)..(215): n is a, c, g, or t
  misc_feature (223)..(223): n is a, c, g, or t
  misc_feature (226)..(227): n is a, c, g, or t
  misc_feature (230)..(233): n is a, c, g, or t
  misc_feature (238)..(238): n is a, c, g, or t
  misc_feature (241)..(241): n is a, c, g, or t
  misc_feature (251)..(251): n is a, c, g, or t
  misc_feature (264)..(264): n is a, c, g, or t
  misc_feature (266)..(267): n is a, c, g, or t
  misc_feature (271)..(271): n is a, c, g, or t
  misc_feature (274)..(274): n is a, c, g, or t
  misc_feature (281)..(283): n is a, c, g, or t
  misc_feature (290)..(290): n is a, c, g, or t
  misc_feature (313)..(313): n is a, c, g, or t
  misc_feature (315)..(315): n is a, c, g, or t
  misc_feature (329)..(329): n is a, c, g, or t
  misc_feature (340)..(340): n is a, c, g, or t
  misc_feature (349)..(349): n is a, c, g, or t
  misc_feature (352)..(352): n is a, c, g, or t
  misc_feature (377)..(377): n is a, c, g, or t
  misc_feature (399)..(400): n is a, c, g, or t
  misc_feature (412)..(412): n is a, c, g, or t
  misc_feature (416)..(416): n is a, c, g, or t
  misc_feature (430)..(430): n is a, c, g, or t
  misc_feature (493)..(493): n is a, c, g, or t
  misc_feature (554)..(554): n is a, c, g, or t
  misc_feature (598)..(599): n is a, c, g, or t
  misc_feature (603)..(603): n is a, c, g, or t
  misc_feature (665)..(665): n is a, c, g, or t
ataanaaaaaaggaaagaaattgtaaatgaaagaaaaaaatgctacaataaaaattaaatgatagaccacaacttttcaatgtttaaaanagaataagcttccctgtaaaannagaacctttgtnangttttaaatttagtattcctctccttcntcctcancctctccntnaananantcaacaccaacnncctcanaatnnttctcangnncngccatgtnctnncgnnnntttgngangtgcacttcntccatcccctccncnngggnccngggggcnnnggggggnggggggtagatggggggaaggtngnggtccaggggggcncaggcctcagnaatggctgnggngttgctcagcatgcacacagctctntgtaccttgggaaggtttccannagggaaaaaagngggngggtggtagttganggaaaccttgaagccagtgggggaccaatccacaaactggatggtaggcttggtcttgatggnggcaatggcagcattgacatttttgggaaccacgtaaaaaaggtaaaaaaggaagaaaganatgtatttaccatggcgagggtcacatttcaccatctgggtggnnggcncaaagcaagcattggtgatctctgctacagaaagctgttcatggtaggctttctcagcaganatgacaggggcatatgtggccaga

SEQ ID NO: 721501 - DNA, 851 bp, Homo sapiens
  misc_feature (427)..(427): n is a, c, g, or t
ggggggctggcggggcgaagtttggggggtgttttgtggtggctccccggacatactctctggctggtggctcagatgcaggttgtgaagggtgccttgctgagatggcgcaaggaccgagctgttcccagcagggtggaagaaacccttcacaccccaggacccttcaggaactggggctttgccttgcggtccacatggccccatcccagttggggaagccaggtgagctcctgcaaccgcttgttggcctgtggtcctctgccccgtcctccatagccctagccgtcgtctccctcgactgtcgcccctgctgtcttccccactgcgagtcaccacctaccccgaatagtgccactgtggtcactgtgcactgccctgttcatgtgcctctgcggggcagaggcctttcctggttttgtacacntgcttgtaccctaagatgcctacaacccatccctgccacatacagggtgcgtcaataatacacttgtagaagcaatagaacaataaggccaagtatatcatagcatagaaattaaaggaactcatataccagggggcactccgcttaaaagtactatcaccctcgagggggccccgaggctgtgagccgatcaccccgtgagtgtttctttgcgtacacgctgggtccccccttcacagaggagtggctccgttgtttattatgggactggcgtggcgtggacccggttgtctcaacgctccctgtcgtggttacggcggggcgcggaaccggtgtgctttggcccgtgagtcgctttctggggggagggagaccctttctacttggggcggggtcgcaacccctttgggcggcctcctctctg

SEQ ID NO: 721502 - DNA, 609 bp, Homo sapiens
ccagttacacgcggacagctcagctctggatgtaacaagagggcactacatgtgaccacgaccttactctgctatggctgatccccgtaaagtactacaagtcttaatcggtaagtaataattcgactactatgtcgagcttgtcagatgctactgcgtgggggtagctaatgtctctaagtatgaagatgctcaattttctctggtacaagtcaccgatgaactatatgctagtatacaggactggcttgcgctaaggatcagattccccagtgtaaaatatatactccttatagggtggtaagagcggaagcccttcatagcctgtttctttttgctctctcttcagccagcagttggcctggatctttgctggtagacacagggaatgttctccttgacgagtggttcccaccctggcagcctcagatcccaccatgttggcagggatgctgaaatccacctgcctatcagcctttgtaaataacaaaaaatcacaagtggctctagcatttatgtattctatgatattgggctcgtgatataaataatacaaatgctttacatgcatattcaattatactatgttatctttaatactggatataa

SEQ ID NO: 721503 - DNA, 998 bp, Homo sapiens
ggatgttaccctgatgcccattgattgtgaagctgtctagcttggtcctcttggaccacagtgtgacccctgtcagaagaaaaggtacaggtatgcctacttgctccaggccctctcagttccatggggaaccgtgcaacttctctgacaaggtaagtcgaatgactgtgttaccaacagaccatgcagaagtcaagtgcgatgtgaaggctttgtgtgtgcacagacaggaaggtgtgtaaaccgcagacttctttgcaatggggacaatgactgtggtaggaccagtcacgatgacagcacactgtagaacggatttatacccataatgtcacgcatgaaatggtaccaagtactggggaattgtgcatgtctggccagtgggatacagtttgttcacaaacagttttgagggcccagttcttgatcacaggtattatgcaggtggatgctccccgctttacatcctgaacacgaggtttaggaagccctacaatgtggaaagctacatgctactgatccaaggtcactatacgaattcagtattacaaagagtatgacatcatactcaggattcttgaacgcaagtgtcacagcagacacagtggcaagcaagtctgggttccagttatcggttttaaaatacctggaatattgaaccttgggcctccagttagtcaacagtgattcgaggcaaacactatattaggagaaccaaacgatctcctcatactaaaagcgtatttctgaatgcacgctctggcccttgaagttagcacattacaagctggaagccagaaggctaatgcgtccgttacgagtttccttccaagagttaagcggttgcccctgggagtaacgctacggggaatatcggaaatttcttcagggaattggggacgcgtttattccagaagagtgtatgggggatttgaaataccgctgttttgacaacagccatggaaagggatatccttaaagtcgagagatgtccaagt

SEQ ID NO: 721504 - DNA, 280 bp, Homo sapiens
  misc_feature (141)..(141): n is a, c, g, or t
  misc_feature (143)..(145): n is a, c, g, or t
  misc_feature (149)..(149): n is a, c, g, or t
  misc_feature (166)..(166): n is a, c, g, or t
  misc_feature (170)..(170): n is a, c, g, or t
  misc_feature (173)..(173): n is a, c, g, or t
  misc_feature (183)..(183): n is a, c, g, or t
  misc_feature (190)..(190): n is a, c, g, or t
  misc_feature (193)..(193): n is a, c, g, or t
  misc_feature (196)..(196): n is a, c, g, or t
  misc_feature (225)..(225): n is a, c, g, or t
cgagggctatccgtggataaaatggttctgaacttgattgtgtatccttccgtagtgctgtggagcgtattcccggagaggtgcctctgtgaatgtgctatatctcctacgacactcctgagggctgtatggtcccggggncnnntgcngaccgcctggtgcttcngganctnggtgctgggnaagccanatncantgcggcgtccagaggcagaagcacaaccnacaagaaccacgaaggaggcgcctttcctcctataatgcctgttcggtttatact

SEQ ID NO: 721505 - DNA, 166 bp, Homo sapiens
cgttcctgttgtgggcagcactctctcgatcactgccccggtgttatccaccgtgcgattgattacaccgctgtgcggcaagcgtgcgatgctttcctcaaccagctgcgacaaggtttagccgcgttcgccaatcagctccagcaccagcaaccagggcatcatg

SEQ ID NO: 721506 - DNA, 849 bp, Homo sapiens
taatggcggagcgtggcggggacggaggggaaggcgagcggttcaacccgggggagctgaggatggctcaacagcaggccttgaggttccgaggcccagctcccccaccaaatgccgtgatgcgaggcccgccacctctcatgagaccacctcctcctttcggcatgatgagaggccctcctccaccacccaggcccccctttggacggcctccttttgatcctaatatgccaccaatgcctcctccaggaggaatacctccacctatgggcccacctcacctacagagaccacctttcatgcctccacccatgggagctatgcctcctcctccgggtatgatgttcccaccaggaatgcctccggggactgctcctggtgctccagcactgcctcccactgaggagatatgggtagaaaataaaactccagatgggaaggtttattactacaatgctcggactcgtgaatctgcatggaccaagccagatggagttaaggttattcagcaatcagaactgacgcccatgcttgcagcccaagcacaggttcaggcccaggcccaggcccaggcccaagcacaggctcaggccaggccaggcacaagcccaggctcaggcccaggcccaggcccaagctcaggcacaagcccaggctcaggcccagggcccaggcccaggctcaaaggtcaaggccaaagccagcgccagcaaaagcccaggcccaagccaagggcccaggtccaggccaaggacaattccacgcaccaaagcagtagggggtcccaccctaacaacagtagcccacctcgatggtccaggtaatccgaatttaaccttttcacaatac

SEQ ID NO: 721507 - DNA, 110 bp, Homo sapiens
tattgctccactgctccatctggaagctggagcataatgctgcagtttgggcccagtgctatgtgctcttcttggtgccctagtggactgctgtggccagtgtggatcct

SEQ ID NO: 721508 - DNA, 875 bp, Homo sapiens
gtgggccccgatcactattgtggtgggggcaccactgtggttctctctgccagacattgggttgcccgctgtgtgtgaacggtgcttcaacggtcttgcctgtcgccgcccttgtgaagcggcggccaaattcccaggttcttcgtctgccctggcggtgtattgttcgccgcgttcttgcggcccccggaagttttgtggcgctaacgccgccgctgggcccccgagattgggtctgcgaaacatgggcgctgggtttccccgcggacttttttgtgtggtataccacccagggtctctttcactcacattgtctcggaaaaaaacaactgttgggaatcaccacgactgggttggaaaaaaactcttcttatactgtggaccctcgttcctccagtctttagtaaatacttgtatgacgcaccacgcgtgaactagcacccccttgaataaaattctctcccgatccaacatgaacaagttgtgtgtttgataacaattctatactgccacatggggggagactgtcccacgtacaaggctttccccccctggcgcacccaccagagccgacgggctacacacgagggtgcgaccaccatggatgttggcgctccgcgacgcccgtgctcgacccacgagggatttgccccctatgcacgtctcggcttttctcacgatcgatagggggccacgaggaaaagacggacccccacataggtagaacaagacaaaaaaagtaatgatccacaaaagtttgttgaatctagaccctcctttgctaccgactggcgggtgaataattttgtgcaaacttctatactttctttcgagggagacaacaaaaaaaatcccttgttaaacgggaacataac

SEQ ID NO: 721509 - DNA, 254 bp, Homo sapiens
  misc_feature (42)..(42): n is a, c, g, or t
tattgtgacattatatgtaataaaatatattgtgacattatntgtaataaaatatattgtgacattatatgtaataaaatatattgtgacgattatatgtaataaaatatattgtgacattatatgtaataaaatatattgtgacattatatgtaataaaatatattgtgacattatatgtaataaaatatattgtgacattatatgtaataaaatatattatgacatatataataaaatatattatgacatta

SEQ ID NO: 721510 - DNA, 271 bp, Homo sapiens
ggactgtactctagacaggcaacagataatgcaaaaatcatcggaaaggcgatgctacacatgtctcatacaatgaaactaaatatatcagatatgagagggtcgcccatcagttcagtcaagccactttcctagatgggtcatactctgtccgtgatgtcttccacgttcagaaagctcagaaatccacctgaagaggagcccaaagaacatatatctgggctgcatgtggatctgtttcatatcactctgcataactagacactatgac

SEQ ID NO: 721511 - DNA, 195 bp, Homo sapiens
catgagagctgagtgggcaggactgactgaaccatatagtaaaaaccaggtccccggcactctagccgtacacagtgtcctacaccccaaggtaaccagcagtgcagtgcaccaggtaggctgcccgtgggacagagggagctgaagcgcacactcctcagagcctgggagccatttccctggggccaacccagg

SEQ ID NO: 721512 - DNA, 504 bp, Homo sapiens
  misc_feature (38)..(38): n is a, c, g, or t
  misc_feature (94)..(94): n is a, c, g, or t
  misc_feature (106)..(106): n is a, c, g, or t
  misc_feature (476)..(476): n is a, c, g, or t
attcgcgggcgcgtcgacctttgagaacaataagcatntcatcttgtcttggatttagaataaggatgttaaaaagaagagatgcagctctatntacaattttttnttattacttagactcagaatttcagagctgataaaaggtactttataagtcagcatgttgtggtccattactggactcaacataggtaatgaaatatgattacaaggctgggcgctagtggctcacacctctaatcccagcactttgggaggtcagggtgggaggatcacttgaggctaggagttcaagaccagtatgggcaacacagcaagaccacatatttacaaagaatttttttctttacctgtctgggcctgatgttacccgcctgtagtcccagccactctagagactgaggtgcaaggattgcttgagcccaggagtttgaggctgcagtgagttgtgatcataccactgcactccagcctangtgacagagtgagactctgtctcaaaaa

SEQ ID NO: 721513 - DNA, 973 bp, Homo sapiens
  misc_feature (681)..(681): n is a, c, g, or t
ccactagtagtaaacaatagttcttttttttgagacggagtttcactctgtcgcccaggctgaggcagagaattgcttgaacccgggaggcggaggttgcagtgagctaagatcgcaccactttactccagcctgagcgacagagcaagactctgtctcaaaaaaaaaaaaaagagagagagatttggcagatattgggtaaccctaggctttaacacctatagctccagctctttcccgggtctgtgctaaaacatggggatgacattgtgactgccttgatgttccacatattcatctccgttgtgactcggactacaacgggtgccagtgggctcacaccgtgagggtaagccttagctctaaccccgggggtctcctaagggcaaccaaatttgttgcgcatgaacatgctgggaagtgccgctcccattgtaccgtgcggcaaaacagagcccacacgtggacctcctaacattgagacgacacaaggattcccacaagaagaatgatttcacactggattggacccgtgaggtttaaaccccagacaatattgtggggccaataaaagaccgtcacgctgtgaacagtgtacaccagtggggcccccaaaggggtgctattagcccactataaagcgtgcgcatcgtccacgtatatcacagtcatttttttcgnacacaaaacaggtcgctatgaaaagtacggggggtggtccataccacgcgcccctgtggttggtcatattcactccgacacgcacacgttttgtggggggacagggtgcccgacgacaggttgagggacacagaaatacacccgaaggtgtcccggggaacaactcgggagacaaccatagtcccgggggcgctaaaaccagtggtggagaaaagcacgccccacgagtcgtagttagtctaaagaacgaatgctcccaaacacaatttgtcgtgggaggagcatgatggga

SEQ ID NO: 721514 - DNA, 125 bp, Homo sapiens
gcttagcgatcagaactgggcgtcctctcgattctacagtaacgtcgaccgtcaatcctgtatgatgatcgactgccgcttgacattaaagtaaactttaagcattagccgtgagacctcccagc

SEQ ID NO: 721515 - DNA, 382 bp, Homo sapiens
ttagcctcatacgagtcccaccgctctctctgtggggagctgttcttgggggacgggtgtacgcccgggctctgtggacggactctgcccttagcctgtcgcctcctggacacacctcccgtcgtgctggagagtcccacgtggggcacagaggagaggaggtgcccggggctctgcatgccatgagagccaagcccgggctgggacactgactgtccggctctccagccagccatgtagtactactaatgcctcaacctctctgtgcctccagtttccccatctgtaacgcaaacctagtaccagctacaaagagtccacctctctctgagtcttctcagaccctccgggggctcctgccccagccccacagagagcgcgt

SEQ ID NO: 721516 - DNA, 465 bp, Homo sapiens
cccgaaagcacgggcattcctcgagccagcattcatgtagtttccaaccagcagggttatctccagcaggctggagaagctctcactcttgcgcagctcctcgcaggcagcagtgacagacacgatctcgggcttgatattctctacttgctcactgaattgtagtttgaagaggatggcgttgaggcgaggccgcagacggggcacagtgcccatcaccacgccgaactgctctgactcggctaggtcatcgtattcatccttgagttcagaaagcattttcaactgctccggctctggcatctgcttaatgagattctggatcatggactcggtgagaacagcttcattcacctccaggatgacattcttaatctcttgatagggcatgcggaaggaccccagaaagattgagagattctgcgccgtctttgagtccagcacctttaactcttttactttttt

SEQ ID NO: 721517 - DNA, 208 bp, Homo sapiens
gccacggagaagggatttgctctgttttgttgttttgtttgtctttttgctatttctttggaccgctccctcggcacatggaggttcccaggctaggggtcaaatcggagctgtagccgccagcctacaccagagccacagcaacatgggatccgagccgcgtctgcaacctacaccacagctcatggcccttctccggtggcgtggt

SEQ ID NO: 721518 - DNA, 279 bp, Homo sapiens
  misc_feature (82)..(82): n is a, c, g, or t
  misc_feature (106)..(106): n is a, c, g, or t
taaaggggtccccccagggtttttggggggagccgcctttttccacccccgccttcttttgggggccccccctttccataanaaagcccctgggaaaatttccacngaggcccccccctggtttttgggggggccccggggaggcccttttttccttgggggggggttttcccgggtttttttggggccggggccccccccccccccctggccttgggggggtttgcctgtcggttgaattaaaaaatttcttccccccggggccccccattgggggca

SEQ ID NO: 721519 - DNA, 347 bp, Homo sapiens
  misc_feature (18)..(18): n is a, c, g, or t
  misc_feature (47)..(47): n is a, c, g, or t
  misc_feature (55)..(55): n is a, c, g, or t
  misc_feature (112)..(112): n is a, c, g, or t
  misc_feature (312)..(312): n is a, c, g, or t
  misc_feature (325)..(325): n is a, c, g, or t
cttgtttgttatttgccntggtgaaatactgcaggtcagacactganttggacancgatttccttttctctgcgccaaaatgtcaaggaaagtcgcaagtctgtgattttgnctttggttttttgcatgttcgcttctatggaaaaacaaccacaacaacagcagacctccctgcccaaagtgttaaaatgcctccttcataacctgagacttacttttcattttctaggtgctgggagaatctggtaaaagcaccattgtggaagcagatgaggatcctggcatgtttaatggggttttaatgggagagtnaagtgttcaaatntgtggcaggggggggaccaagt

SEQ ID NO: 721520 - DNA, 729 bp, Homo sapiens
gggagtacagataccttttatatactgatttcctttctcttgggtatatacacagtagtgggattgctggattatagttctatttgttgtgtttttaggaagctccatactgttctctgttgtgactgtgccagtttacatttccaccaacagtgtacaagggttcccctttctccacattctcaccagcatctgatattgactgccttttcgataaaagccattttaactggagtgagttgatacctcattatagttttgatttgtatttctctgattattaataatgtggaacatttttttcatatgcctgtttgccatttgtatgtctttttgagaaatgtctcctcagatcttttgcccattttaaaatcagatttttttttcctattgagtcgtttgagattcttatatattctggttattaatcctttgtcagatattagtttgaaatattttctcccattctacatgttatatcttcattttatggtttctcattgctgtgtcagaaagctttttggcttggagagatctcatctggtcggtcattttattttattttcttgctttagattgcctggggtttggaggtcctattcagaaagtctttggcctagaccatggtccggggttttgcctaatggttcctggatttgttcctacaattcaggcttcgcctttcctgactggattggccgttgggttccctgggggccgagggggccc

SEQ ID NO: 721521 - DNA, 588 bp, Homo sapiens
agcgggctccggcgcgtgcgcgcgttatctccggccgacccgagcagccggttccctcctctccaggcccctcataaacggtaggaatggaggagaccggtcgacaccacaccggcggcaagaggggcacggagggccgcctcagggaatcgacggggaggctgttaaccaccttcgactcacggacggacgagccgcgacggaaaggcgagcggaaacgagagtcgaagcaagcaatcagaagacagcgagaacacaaccagaccgggagaacgaaacgcaccggcacaacccgggaagacgacagagaccgcggaacgcgaaggcagaaacacggaagactccgtgatagaccaaacctgcgggcgaacccgcggggcgagcgaaagaaatcagccacgcggcgcgtgcacgacgaatagaggaccgccacacacggtgatagaagtgacgcagagacacacacaaatcacgcaccacgacaacgacgaagcacgagaagcactagatgcgcgaccgagaactggcaaccgaacagacgacaagggtcggcacccaagagggggggacagtccgcacagaaaatta

SEQ ID NO: 721522 - DNA, 365 bp, Homo sapiens
tacgggatgatcatacatgaatcctgtccattccattcctttcccctcgggttgtcagttgtgttctactctatccattctatccattccattctatatccattccattccgttctgttcggctctgtgttgattcaataccgtttcgattcgattccattccattcctttccattccgtgcgattccatttcattcgggttgattcgatttgattcgtatgccattcgtttccattccattccattgcattccattcaattgcattgcattgcattggactcgagtgcattgaattgcattctatgccattccattccattccattctactcgtatggatgccattaatttcatttccattcga

SEQ ID NO: 721523 - DNA, 508 bp, Homo sapiens
tagcttattaagtatgcttttttcccgaaattgcatattaacaaaatcttggatatgtcagagaatgcattctaagttcactcaacctaggagggagaaacataattttaaattaagagctgaagcattcttgtcctaacacaaagcaaggaaaacgaaatatcacaccacaggagggatttcacaaatttgcgtcaacatcaaaaccttaaaataggcaaggagaatgcagattcacaatgaactcctgtacttgttttgttcagagaagagatggttctgagagaatgacagtgaaccaaccccagctggtttagttggtgctttcaactgctgcttctgatcaactcctttagctagaataaattgatgaggattttggcatgtggtattagagatggttattaattttttcctcttatttgcattgttcaatgtagtaaatactagctgctacttcaattcaaattaattacaatgaaatatacttaaatgttgaattttttaa

SEQ ID NO: 721524 - DNA, 204 bp, Homo sapiens
cgatctcatacgggtgctgtcccggcgtatactgtcgcgctcgcgccgtaagtgtgcggaactggtatacgcacgcggacgtccagaatccgtccgaccccttaaaacgcgtgatgaggttctacatcccacccttccggcaccaatgcttgagtacttagtaaacgattcgattccgccaagactataaccctcgcccaatcg

SEQ ID NO: 721525 - DNA, 972 bp, Homo sapiens
accacagctgtcggtccgtcggcctcgtggaggcatgccatgtgcccgaaaagatcactcggcctattcctatgaagaacacctgcgaatgatcgaggagtgtgtgaagatggccaccgagcaggtctatgaccaaggtcacaggccatcgcgactcccgtagaaccgagtacgttgcctgagaggagacaagagctcgggaactctactcgcgattatcctgtacgcggctgggtgtcgtggtctgccgtgcactgccgcatcatactcgaaatatggcctcgctcgtgtgatacagcaggtgtagctggcatgcgccgtggagtctcatccctactgaggggacccacgtagtttgcgtgacttcgagtaagcatacctttgtgaagcagtggtgaatcagcagagtgggcaagcaggcgaatggcgtgtcgcgaaaaggttgcgctctctgacgggccgtactggcatggcgtgcacgctggggaaagagcacatcccgagggacgtaccccgtggagctgcaacctgatatgtaggatcgcgtgtgccacgaaccacccaatccaatggaggcggagcctctgttatccggctgccaaagcgattcgcaggttggtcccagcgcagccgaagttagaggagggtaatcagtaccgggtaacccacgttgggagtcgtgcgtcatgctctgctcaaatgcttcgcggtgatgctatcaatgggcaagccactgagaggagagattcgggcgtgcctgttgtcctgcccgtggttgactgtgcggccctgtctgcgcgccctgtggtcaagggtgcctgcgttggaccgtaggacgatgtgacgccactaaccgcgctttcgggtcgcgtttcccctggctggtgcccctgggggcgtttctccaattgggccttgtagcggtccatctgctttgtggcactggttgtagggcgggcccttggggccccg

SEQ ID NO: 721526 - DNA, 210 bp, Homo sapiens
ctaaaaaaaaaaaaaaaaaagaaggggcagctcttgtctgcttctcacagagttgctagggacaactgctgaggcaggcacctgcccttcgggccccccggggggggcgtgctattggccatgtgggcccttgccttgcccgccttgtccaagtcgggtcccagagctcgaaattcggtaatctgggctcatagcgtgttccctggtgtg

SEQ ID NO: 721527 - DNA, 129 bp, Homo sapiens
  misc_feature (64)..(64): n is a, c, g, or t
gagtgctggtaagttccactcctgcaccataatacactcaacaaaaaatccaaaatgatcttgnataaagtataaatggaatctctagtttaagatccttcaggtgactctcttaccactccttagaat

SEQ ID NO: 721528 - DNA, 106 bp, Homo sapiens
tttttaagggatgcccaaacgggtgattcagggtccaaagatggtggccaggccaccccatcattgtccagcacctccgtctccagcattagctttgttgtcgacg

SEQ ID NO: 721529 - DNA, 139 bp, Homo sapiens
gcggccgcctactactactactgctcgaattcaagcttctaacgatgtacggggacatggaggatggtgtcctgaggcctccaaggacggtccccacccctctacgtttccccaataaagccttttaaaaacccaaaaa

SEQ ID NO: 721530 - DNA, 437 bp, Homo sapiens
  misc_feature (1)..(1): n is a, c, g, or t
  misc_feature (41)..(42): n is a, c, g, or t
  misc_feature (44)..(44): n is a, c, g, or t
  misc_feature (359)..(359): n is a, c, g, or t
  misc_feature (382)..(382): n is a, c, g, or t
  misc_feature (405)..(405): n is a, c, g, or t
naagcgatggcttgagctgtggagctccaggtttcggtgannangatcacaccactgcattccagcctgggcaacaaagaccctgtctcaaaaaacaaaacaaacaaacaaaaaaacccaaaaatgtatatatatatatgtatacatatatgtatgtgtgtatatatatttcaaatacataacataaaagcacctttccaaaaaatattagattgacaatggtgtattaaaataaacaatattctaattttcccagtcctttctgagtatatcagtaaacaagctgtctctaagttaaagtgtaattgcttttaattggatagtcatttgctaaaccttgggcaaagtctttttgggcntactgttaatcacccaacggttncttgcctgcccactggcacaggncaaatcagttaaggaaggagttttaatttaag

SEQ ID NO: 721531 - DNA, 489 bp, Homo sapiens
  misc_feature (22)..(22): n is a, c, g, or t
gagagaactagtctcgagcttnctcccttccttcttactttcctccctcccctacaaaataatttattggaacacacagttacagcactctatgtacaagcacattgacgctcctgactatgctcaactaggggacccttttcttaccccttggcttgcggacctattctattctttgaagcactggatgtcctgggccagggaatccgccctctcttttagagactcgctcttattttccagctcttttgactcaccagtaagagcctgctgctccgccctcttcatttggcggtacctataggctgctgtcttgatctgatacatttttttcaagttcttatccaaatcctgaccgtctatttgagtgagaccatttcgctacataggatcgtagggtttggacgggcacacccacggaaacacctgtggatgggggtttctatttggagagcccttggttgggctgggctgatgcccatccccctt

SEQ ID NO: 721532 - DNA, 518 bp, Homo sapiens
  misc_feature (121)..(121): n is a, c, g, or t
  misc_feature (123)..(123): n is a, c, g, or t
  misc_feature (125)..(125): n is a, c, g, or t
  misc_feature (131)..(131): n is a, c, g, or t
  misc_feature (138)..(138): n is a, c, g, or t
  misc_feature (141)..(141): n is a, c, g, or t
  misc_feature (143)..(143): n is a, c, g, or t
  misc_feature (179)..(179): n is a, c, g, or t
  misc_feature (190)..(190): n is a, c, g, or t
  misc_feature (199)..(199): n is a, c, g, or t
  misc_feature (209)..(209): n is a, c, g, or t
  misc_feature (219)..(219): n is a, c, g, or t
  misc_feature (281)..(281): n is a, c, g, or t
ctactactactacaaaaaaagcggccgctacgacatctcgccgtagttaccgacctgggaaacgatcttgacgacccaatccttcggcagtttcaggtccttgccgtactcgccgtcggcncnancagacnagcaacntcngngttcttggtcgacttggcttcttccaggacgttttncgaagtgatancggcttctncggtgttgancagcgcatancgacccaacgaacgatcttggtccactcttcgtcgccgttacgcaccactgggcccagaggntccttggagatggtttcaggcagaaccacgtagtccttcggcgaggcagcttgctgcgctgggcaacagctgggatttgtcgaggtcagtacgtcgcaacgaccggattccagcgacttgggcgctttcgtcggaggtgtcgaaggtgataggggtgtacttcaggccattggagcggaagtagtcggacacattcagctcggtggtggtaccggcctggatgcagatggtagcgcc

SEQ ID NO: 721533 - DNA, 1429 bp, Homo sapiens
cgtgacgcgtgggtcgaaccacgcgatcgcccacgcgtccgaccacgacgtccggcgccgttggcatcgtagagtgaacacaaaccaaaaacgatacgccatctgtatctgccctggaatgccatcagaccctaccagcaaatggatcatgtcataaaggtcatcgctatagaggaagttcctgaactatcctatcgcgtagtaagaagataaagttgaaaggctacaagaagaacaaggaaagctagtacaagctccttaaagaaacttacagacctggaaatgatatcaaaaaaggtctatagcctactcagccgaactgagagctggcaaaggcaaacactgacgaacaaccgtcgccgaaataacaagagcaggggacccagagccatcatactataactgcagggcatacatggtactccatacaaaggccctatcaggaaaacatccacatgagaaaataaactacatgcacaatacatgataaggcaaagacatgaaacacatacacgaaagactaggcacacccgagagatgcgagcaattagaggagaaccagctaacaaagacaataagagcgcaacacagacaacaaatggacgcaaaacacccgacgaaacgacacaagcgacccgacacaactaaagaaacacggaccacctcaagcagaccggcaccaacgcccgccaaacgaccaagcaaaggaagggtacaaatacacgacgagacatggtacagccaaaggacaacgaagagagatggacgtcacaaggagacagacaactacataacacgacgaagacacaaagacggaacaaagagcacaacaggaagaagagacagaaccgggacgaagccctaacagaggagcagaaacgagggagagaaaagcagacaagacaggagcgacggcacccacgaacacggcaaagacaagccacacagaggaacacacagcgatgggaagaaacacacagtggacagagcaacgagtacgaagcagcaagatgtggcacaagagaacacccaaagagagcacggaaaacaacaaaaaacactagagcaagggagccaacggacaacacacaagagcaacggagagggaacacaggaagccacaccgagcacgcgcggcagagcaccaacgagccacagcacagaagaacaggcgcggaggagatgcggggagccagcgcgaggcggaaggacaaaaggggaaaagaagcacagacgagaaacaaaaaagaagaaagacaccagaacggcaagaggacggacagacacaacacgcgcggaggcaaacgaggcagaacaaacaccgagagaaaagaataatacccaagaggcccaagcagagaaatagacaacggcagcagcgagagagacagaaagaacaacaagaacacaaaacaaacaaaagagcaga

SEQ ID NO: 721534 - DNA, 300 bp, Homo sapiens
  misc_feature (56)..(56): n is a, c, g, or t
  misc_feature (74)..(74): n is a, c, g, or t
  misc_feature (101)..(101): n is a, c, g, or t
  misc_feature (284)..(284): n is a, c, g, or t
tgatatgttgcccattccttatattccgactataatatttaatttgaacactattntttttaatcaggtatttnatattatgtggataatctgaaacatanaagtaggcctttagtggcattttaaccaaagcagagagtcaaacataataaaaaaaatgtgagaatttttaatgccatgtacaaaatcttttttgggggtgtttacctcataaaatgtatccccacaaattacaaaaaaatagtttcaagtgttttaaaaatatatattgcccatttgactcncaaattttatccccac

SEQ ID NO: 721535 - DNA, 241 bp, Homo sapiens
ccgcctgtcactcccaaggtgcagggattacaggcgtgagccaccaaacccagctgatacagtgtgttttcttggtatatccatgcatgtcgcatgtattagtacttcattccttttcattggtcgactattatccttgtatggatcaaccacattttgttatattcatatcatggtcaacatttgttgtaatatccatcttttagctgatatacacatagtgcttgccgtgaatctttat

SEQ ID NO: 721536 - DNA, 306 bp, Homo sapiens
tcctttaatcccattttatatttttttttcccaattttaccctttgaaaatattataacgggatattttttcaaccagatgtcctggatgatggtccataagaataatgaagaagtagttaaaaatgtatggccagtttttccggccaaatttggaggcttatgttttggctaaaaagccaaggggtaaaatgggcctgttgtttagggtttccttcctaaagagcccttttgtattgtaatttattttttattatgctttaacccctatgtaaataaccctttagtaataaagaattatcagtta

SEQ ID NO: 721537 - DNA, 371 bp, Homo sapiens
tgtgtgtgtgtgtgtgtgtgtgtgtgtgttctcattttcgttaacaagcatttggaagctctgttctgaacatgggaaatgcagtcatgggcaagagagagaaggggcctgttctggaggttgtaggcagtaggtaaacaagagtgtcaggtggtggtgatagctatgaagagaataaaaagacagtatgatagtgacttcggggggtgctgcttcggaatggtcatgaagatgagccctcttgggaagcccttgctgccagcagggcagtcaagcttaatctgtgggatggatgaaaatggcattaaacaaagtaagtgatatgctttagccctgagcatcttgagacgttcatccaaagagtagaactg

SEQ ID NO: 721538 - DNA, 350 bp, Homo sapiens
aagtgggggggaggggggagaaaaaaaaaactctggcgttagaggatatagaaaaatataaggcccattgtttccaataacgcaggcttcaaaaacaaaaaaatccccaccccaaccaacccaaattttaatggtcagaattggcagcccaaagaaaacgccctctcctgacttgtattgtggcagtttgaacgcccccagaaaattgggcccaagagtttagaaaaataaatattccattaaagttaacccataccccccaaacagccaacttcagggaactattttgggttgccaacaggataatttaatgttccaaccatttgataaaataaccctttgggaactga

SEQ ID NO: 721539 - DNA, 296 bp, Homo sapiens
gaaaccctaacttagggtttgaacaccctactacggagggcgtggagttgtgtccacttgagggcgattatggatcaagccatcatggaagtcgggatgtctcaaaaagcttttaccaagcaaaaaagaaattcaaagaatgcatttgggaattgattcacgtagtctagtcaccagcgtttattgtctccggtgtaaaagatgatgttgcaggggttcatggagcaggagaggaacctcgcgtgtgatctgtgctccagtacatgcctgtgtgttaccaaatagtgtgtgagatg

SEQ ID NO: 721540 - DNA, 204 bp, Homo sapiens
tgctgacaccacgacgcaacaagtcagcaatcatgaacaaacgatcatcacgagcaggcatcaaagcatcacgcaatgcttcatctgtcatatcatcataggtgatgtcatttaagccagttgtcccccattttcaggcgagcgcaccgcttttaacatggcttcttccctgtttcggaccaatcgccatgactttcgccggag

SEQ ID NO: 721541 - DNA, 135 bp, Homo sapiens
  misc_feature (44)..(44): n is a, c, g, or t
agtgctacctccacaaacagccctggcgacactgaaacacactncttactgacgacaccataacctcaggcctcgtggaggcatctacacccacccacattccactggctatacactgtttgtggaggtagcact

SEQ ID NO: 721542 - DNA, 405 bp, Homo sapiens
tccacaaaaaatacaaaattaagccaggcgaggtggcacacacttgtggtcccagctactagggaggttgaggtgggagaattgcctgtgcctgggaggtcaaggttgcagtgagccgtgattgcaccactgcactgcagcctgggtaacagagaaagaccctgcctcaaaaaaaaaaaaaattattttttaagtgccaagtaatactcaatacagaatatggtacttttaaagatagaatttctattctccgcctgtttccaaattaagcaaattatgagtacatattttaaattacagtctgggagaagaaaggggagaatataagttttaataaaaatcatttgtgcctctctaatctgtttggaatttgtcaaaaatactaataaattcctttactcattt

SEQ ID NO: 721543 - DNA, 816 bp, Homo sapiens
tgggctctagaagggggtacagggggtgctatagggtaaatacgggccctatttcaaagattttaaggggaatataattctaggacgatgggcttgaacctgtggtttggctccacagatttcaagagcattgaccggtagtatacccccggtcgtgtagcggtagaaagtggttgggtttaaacgtccgggaatggcactctgtttttaagcctaatgtgggagacagctcatgagtgcaagacgtctgggtgaagtgtaattattatacaaagtgggggctctcaaatcgggagttacatactcgaatgtgtcaagcgttcaaggaagttcgaaggttcgccgtggtctctaggaaataagtgggggaacgtatgtaggacgtcgaacaatttagttcccgacacgaaacatcacgacgcacacccccgaaaagcgctaacacgacacccacatgagcagcgagccccaactcacgaccaacagacgcagagcaaacacggcacgcgagaacctccgacaacaaccaccagaccacgagcccacccgccaccaccgagacccgccaaaacacgcactggaagacccacaacaccgcagaccccagcgaccaggaaacagcacgacgaccacgcccacacccgccacacaaccccgagccaccacccacataccccaacaccaccccgcccccaccaaaacccggcacccccaccatacagcaccccccacagccgcccccaaacacaaccaagacacaaccagccccccacccccacccaccccaccgacacacaccaaaaaaacgccaacacc

SEQ ID NO: 721544 - DNA, 150 bp, Homo sapiens
actagaaggaaatcagaactaagtcagtgtaagacagactgaatcatacgactgtgatgtgctacgttctgaggctcttgggataactccattagtagaaatcttgcataagccatcagtgttttgtggataacggcacctttaaggctc

SEQ ID NO: 721545 - DNA, 294 bp, Homo sapiens
gccatgggcctctgcgaaggcgccggcgtgcccacggcttaagaaacttcctctttctgctcccgggaacgaaggctgtagcagagaaggccttcaagtttcgagaccagttccagccgcagctgagcacttggtgaccttgaattaagtctaatgttgggattggaggcggttcagcatccgtgccgcctgggaagcgaccagtcaaggttacccacaggacggtctctggtccaggtccatgctctttgtcggtagtttgtattgtaaatggacatggtgtgtggaagtgtt

SEQ ID NO: 721546 - DNA, 385 bp, Homo sapiens
  misc_feature (16)..(16): n is a, c, g, or t
  misc_feature (69)..(69): n is a, c, g, or t
  misc_feature (155)..(155): n is a, c, g, or t
  misc_feature (195)..(195): n is a, c, g, or t
  misc_feature (330)..(330): n is a, c, g, or t
  misc_feature (358)..(358): n is a, c, g, or t
  misc_feature (382)..(382): n is a, c, g, or t
aggcccagaagctggnaagcctctgcgggttccgggaaaaggagctctgctgccactgctcttccgganctgcagcatggggccctgcgcgcaccgtggagctcttctatgacgtgctgtcccctactcctggctgggcttcgagatcctgtgcnggtatcagaatatctggaacatcaacctgcaagttgcggnccaagcctcaataacagggatcatgaaaagacagtggaaacaaagcctccaggtctgcttccccgcaaaggactatacattggaaaatgactttaaagctccttgagacaacaatttccagaattcccaatccantttccccaaggatttcttgggcctggtnatgcttgaaaaaaggaagtttgtntgc

SEQ ID NO: 721547 - DNA, 665 bp, Homo sapiens
agtagactgtacctgtgaggctcgcgggggcatgtggccatggatggccgtgctgaacgagctggtgtctgtggaggacctgctgaattttgaaaagaaatttcatgctctgagaaggcagtcaggctcggttgtccacagagctacgctaacgtttggagctactgcctggtgcctggtcgctgcgagccaagtacaatgactgacatccgtataaggcatcgtgctgctcgaggagctgctgcccagagttgagcaaggaggatcagcgggattacgtcttctagcctggccctgtgcgggacacgtacctgtgctctaatggaataacgcagacaggctcttacacagtagcagtcccgacggtgctttgcctagcaagagcgagcatgcccctcagacacatagccacggcgcaaagggaacctgcgacgcgcgctccatttcgtactagcgcgccattgcatcgcaataggatcgcgtactctgtcgggcatgggccatccgtgggcatgcgcatggcccctctgggatgctgtgcgtggactggggcggcactcctttccggagccctgtgcctgtgttcccaaagttcccaaatccctgagagggaccacgccgggagccccctcgggaaaccgcctcccaggaggggcctgtccatc

SEQ ID NO: 721548 - DNA, 414 bp, Homo sapiens
cactcgagatcccagtagtcggacgagatgcagattcttacgctcccctttgtgacttcagaagctctggcatctctttctgcaaggcactgaatgtgtctgcgtcccttttagcataatgtgaggaggtggaaaacggctcaaccccgtgtcaccggtgaccctggttccatgctgacctgtgtttcctccccagtcatctttcttgttccagagaggtggggctggatgtctccatctctgtctcaactttatgtgcactgagctgcaacttcttacttccctactgaaaataagaatctgaatataaatttgttttctcaaatatttgctatgagaggttgatggattaattaaataagtcaattcctggaatttgagagagcaaataaagacctgagatacacggtaaga

SEQ ID NO: 721549 - DNA, 271 bp, Homo sapiens
gtgattacagtcgtttgccactatgcctggcccagagtcctatactggaagtaaaatgtacccccgaacttggcgcaagaaattatggatgtctgaatggaggtttccatactagtttgtaaaccagaattagtggaaaacagttcagaattgagttactcacaaagggtagaatgaagatagttaaggatgtgtgtatcccaaatattttcgtagaaaatgaaatgaaagacactgtgtatcttacctgtgcagtcatagaaggagcttt

SEQ ID NO: 721550 - DNA, 459 bp, Homo sapiens
tagctgtgacggcgtggactaggtgatgctgctacctctgtctgctgcactcacaggcacacttgatacacgatgacacctgcttgttaggaaacatctaaacatctagtagatgactagcaggctgttggctaccagtttcctgtctgaggtgtatatgttaacttcgtgatcagttagtatgtttgggactcttgtcctatgtaaagttaagggtgggccgggtgcagtggctcacgcctgtaatcccaaaggtgttctttgtatattctggatattaaccctttatcagatgcgttatttggaaatattttgtctcattctgtaagttaacttttctctctgttgattgtgtcttaggatgcacaaaaattcttaagtttgatatagtcccatttatcttattttgcttttgtttcctttcctttaggcgtcatatccgagaaattcttgccaaat

SEQ ID NO: 721551 - DNA, 267 bp, Homo sapiens
tcttgaaaccgtcctatttctgtggagttttattttaaagaaaaccttatttcccattataaaattatgcatcatttctattaaacaacacagaaaagcataagtagaaaacactgtgaaacaacatcatttatgtactttttttgagacagagtctcactctgtcaccaggctggagtgcagcggcacgatctcggctcactgtaacctccgcctcctgggttcaagtgattctcctgcctcagcctttcaagaagcaggaactgg

SEQ ID NO: 721552 - DNA, 858 bp, Homo sapiens
ggctgcgggagtggtgctgtgccgtggcctggcggatgcgaacaaagtgagcagtgtgctgccgccgcagtggaccctgcacccacctcccggtggcctgctgcagccggctctcgtctactgccaccatgaccgccaactggcacagcctgagtgctggtgcagatccagttctggcctcatcaactgcggcaacaatgtacctgacgtgcctgagtgcgttcgggttcaaggtgaactgcgtccgccagcagcctgaagaagaagcagatctggacgctgtgagcagccccctgactgagtgctgtggcatgctgctgggcctgtgtgccttgctgcagccacctgggccgctaccttggcggtggacaaggactggcaacgtgacctgcgagcgctgatgtgtgccctgtgtcccgactgcctgtttcctcatcgtggcgcacggacgactggtcgctggtctgctgcagtcctgaggcgcacactggctgctacttctggacgtgaccgaggaccgcctgtccttgcttcgcgcaggaggtgtccccgccgagaagttggagcttagcacatcgccatgcacctcaggtacagcgatcttacagtgtcaccctgtaagtcgctaagctgcaacctgaagtgcgcgtgacggacgaagaagatctgccgtgggccgcagaatgtgcccctgttgggctttcgacttcgctcataaaccctcgaccttccaaggaccagtgataacggggtggaaaccggcgacaccgattcctttgccccataatgctcacttttttggtgagcccgatcttgcattggaaacgcttagattcagtccggaagtagactccggag

SEQ ID NO: 721553 - DNA, 223 bp, Homo sapiens
tgtaataaaagcaatttcgatctctcagtactttcgtctatgcagcatcagtaatattgcctatacctccacttgcggatcctgttcttcatcgtcaaagagtaatctctttatccactgtgaaagcttccaagttgacttactctatgtcaaactgttcatcaataggcagcgtctccccattacgccatctgttgagctcatttacaagccactgaatagt

SEQ ID NO: 721554 - DNA, 113 bp, Homo sapiens
tcgtactgttctgcttctgccttcctgcttctgctgcttcctgttctgccccccccacgcccagtcccacatcgaggtttagttctggacttctgtgcaggctcttggtgagg

SEQ ID NO: 721555 - DNA, 463 bp, Homo sapiens
cctgtaagtctgaatctagagtatccacccctgcactggtgttcttagagagaaaagaattaatatgcaaaggaagttttacaaaaagacatgctccctcatgttggtgtcagtgatttgtgtgagaccaacaaaagcctatttcttgggatacatggttcataggttacttctggccagctttgggtagaagagaactatattacagagcatcactatggaaacgagagattggatcttgctgggccgctgcttgccattcttatttacgaggtatgtttagagaatttgcttaaagaagtgcggatctatgcacagaaatttcacttcgatcgaggaaatggatttctaacttgccagttggctcttatcacacggatcctatctgatggcctaaaatactctttagctactgcaaactggggtgatcaaaagaaagctcctcgtgccccagctggagtat

SEQ ID NO: 721556 - DNA, 135 bp, Homo sapiens
ccggtggtttgggttgctccccctaaatctggaaaggtgaacatgaacatccttcacaggaagagcttcgctcagaagaaacggaattgagcaaatgacgaagcagcagatcagcgcagctagccacatatgcga

SEQ ID NO: 721557 - DNA, 769 bp, Homo sapiens
ccggtgactgccttcattcagacccagtcagtctgcacgcagaccgatggctgacacatccctggagcacatgtgccgcctggacattgattcagcacccagtcagagggccggaacactgagcaatacatctgtactcatttgggcccagcttcccgaatcagtggagacgttgaacggagattgattaaagtctggaatgaatgtgcgctcgtctgaacttctctcatggaactcatgagtaccatgcggagaccatcaagaatgtgcgcacaaggcggcggagaagcttgctacatagagccccatcctcgtaccggcccgttgctgtggctctgaggacacattacaggacctgagatcgcgagaggtgggggtcatcaagggccagggaatctgcagcaggtggaggcggaagaatgggaatgccaggtgcctacaaaatcaccgtctggataacgtcctacgatggaagagtgtgacgagaacatcctgtggtggactacaagaacatctgcaaggtggtggaagtgggaggaaggatctacgtggatgatggggctaaattgtcttttccaggtgaaaggggagctggtgtcgaacttacctggatagacggaggtggggagacgccggttccttgggcagcaagagggtgtgaacttcgtggggctgtggggactgcctgtgtgtcgagaaggacattcaggaccggggtagggggcgacaggacgtgaaaggggtgcgattctcccggttctgaggcatg

SEQ ID NO: 721558 - DNA, 684 bp, Homo sapiens
aaacagcctcgcacaaaaagccaccgcccccgaaacccgcgggaaatctgtttcctgtgaaaggcctggacctccgtggcattggcgtgtttccctgatcctctctcccaaattttccgtgcagggtgatttgatcagatggctgacatttatggacttggtgtgtgtggctgatgtggatgtgtgctggttctctgtcccaatgttacatgtgtgatgtgactgttcagtgccaatggctgtagccacagatctgcagcctgcaccatgtagctctgcatggatgtgctgcctgtgtgacttctgacaccaatggctatgtgcaccaattcactaatgccactgcgatggatctttgtgtgaacctgcacatgacaccactactttgtgttttgtcccagagcacagttgagccagtggattgagttccagttgcttgacatctgacaacaacatcgaggcgagtttttgtagaacaacaacacatctatttctggaccagtggatgacggagaccactagttttgggaacctccagacaccaaggggacccccatcaccaagaatgtgggttgacctgcatgtgcagatatacccacacaagaattcaatccctggtggtcattcccatgcgttggagatcccacgtaattcaagtggatggtcctctctccaagatcggcc

SEQ ID NO: 721559 - DNA, 276 bp, Homo sapiens
  misc_feature (7)..(7): n is a, c, g, or t
ttccagnttaatttatattttttttggtaaaggacggcatttcacgatgtgggtcaggcgggtctggaacttctgacctcaagtgatccacccgcctcagcctcctgagtagctgggattacagacactagccaccatactcggctaattttggtatttttatagcgacagggtttcaccatatgggccaggcgggtctcaaactccggacctggtgatccgcccgcctcggcctcccaaagggcggggattacaggcatgaggggtacggagctc

SEQ ID NO: 721560 - DNA, 454 bp, Homo sapiens
gagttgggatgagattagaagggggtctggggccagactgtggaaggcccaaatgccgggctaaggagtttgtacttaattcagtggtcaacggggagtcattggaggctgttgagcaggagagttgctttctttacagctgtgccagactaaattaaacctaaacagtactttatagctggaaagggaaggcccaggaatagctcttgactcagaaacaggcattggggaaggtaatgagaaacagccgtgactgatcaaagcagagaggttaattaaatttgtaattattgtgaaaggccattaaaaaccctagttcactagagataactgctctagtggggcttcaaagacaaatgcttcttttaaccttgaatagggggatgtttgcttctctgtggaggagatatgattaagatacttaataaatggtagataaacatgaaaaaaaaaa

SEQ ID NO: 721561 - DNA, 883 bp, Homo sapiens
gggagtctggttggatgtcatttgaggtccattgtcacttgggtgcttcatgttgtcctccgatttttagatgattatcctgtctagagatgtcctactctgctcactggtctggtggcggtagggtaccctgctggtcctcgacaagccagagggtgcacctacgtacagacgacgactcctggaacagtgcttgtggtagggcctgcaatctgttcgctgctgcacccacacgccgcatctgctgctggtcgatcaactgtggttcgtgaggcagctgccgaaccaccagcctttctggtgctgttctcctagttcacgtctgccgagctggtgagggcggaggcgagacctggtcgagacccagcgcccctcctccctgcatggagcatggtgcagcctcacacttgaagagacggtgttgggtgtcccatctaatcaacttaagggagagccggcgatgttacccttcaaggaccgctgttggatcacctattttcctgatcagctggtaataaactgagggtggcttttagagacccagacttggttggcagcgctgccatggaacaccccagcaagcagctcccagcctgcctttcggagcagcagccacgaggggatgccgcgctccagcagacaccaggtcgtgcctgtgctgaacccctgccctgccgctgcagaaaatcctgaagcatcccttaatgcttctcagtcttcagcccagcacggagggctgttgtttccagaggtgcgctgtttatgtactataggctagatgtggctgcttcttgtggctttatcattaatccccatgttgcgcctgagtttcacgctgactccaaattttgttttttaacaaaaagggggcaaaccccagggg

SEQ ID NO: 721562 - DNA, 432 bp, Homo sapiens
  misc_feature (8)..(8): n is a, c, g, or t
  misc_feature (25)..(25): n is a, c, g, or t
  misc_feature (53)..(53): n is a, c, g, or t
  misc_feature (59)..(59): n is a, c, g, or t
  misc_feature (62)..(62): n is a, c, g, or t
  misc_feature (64)..(65): n is a, c, g, or t
  misc_feature (110)..(110): n is a, c, g, or t
  misc_feature (119)..(119): n is a, c, g, or t
  misc_feature (123)..(124): n is a, c, g, or t
  misc_feature (133)..(133): n is a, c, g, or t
  misc_feature (156)..(156): n is a, c, g, or t
  misc_feature (167)..(167): n is a, c, g, or t
  misc_feature (173)..(173): n is a, c, g, or t
  misc_feature (176)..(176): n is a, c, g, or t
  misc_feature (182)..(182): n is a, c, g, or t
  misc_feature (184)..(187): n is a, c, g, or t
  misc_feature (190)..(190): n is a, c, g, or t
  misc_feature (194)..(194): n is a, c, g, or t
  misc_feature (199)..(199): n is a, c, g, or t
  misc_feature (206)..(208): n is a, c, g, or t
  misc_feature (216)..(216): n is a, c, g, or t
  misc_feature (219)..(220): n is a, c, g, or t
  misc_feature (226)..(226): n is a, c, g, or t
  misc_feature (232)..(232): n is a, c, g, or t
  misc_feature (235)..(235): n is a, c, g, or t
  misc_feature (245)..(245): n is a, c, g, or t
  misc_feature (253)..(253): n is a, c, g, or t
  misc_feature (255)..(255): n is a, c, g, or t
  misc_feature (258)..(258): n is a, c, g, or t
  misc_feature (261)..(261): n is a, c, g, or t
  misc_feature (265)..(265): n is a, c, g, or t
  misc_feature (286)..(286): n is a, c, g, or t
  misc_feature (299)..(299): n is a, c, g, or t
  misc_feature (328)..(328): n is a, c, g, or t
  misc_feature (333)..(333): n is a, c, g, or t
  misc_feature (336)..(336): n is a, c, g, or t
  misc_feature (342)..(342): n is a, c, g, or t
  misc_feature (352)..(353): n is a, c, g, or t
  misc_feature (413)..(413): n is a, c, g, or t
cgaccgcngtctcggagcgaaattngatctccttggacttgaattatgaggangaggcngcngnngcggcggcggcggaggcgctcggctggggaaagctagctgtagangctcagctncggnngcactcgcnctctgctgctagctcattttttngacgctacctnctggtnctnctgatncnnnntgngctnctgangggaggnnnggggggcncanngagctntgtctngcntactgagctntgctgtgntncgngancttngtggcgatctgagctctgttngttggggtgttcnttgtttgctgctttctttcttcatgttgngtttnatntttttntttttttttnnttttttttttttttttttttattttttttttttttttttttgttgcttcttttttatgtncttctttatttttttaaat

SEQ ID NO: 721563 - DNA, 834 bp, Homo sapiens
  misc_feature (1)..(1): n is a, c, g, or t
  misc_feature (3)..(3): n is a, c, g, or t
  misc_feature (11)..(11): n is a, c, g, or t
  misc_feature (14)..(14): n is a, c, g, or t
  misc_feature (16)..(16): n is a, c, g, or t
  misc_feature (18)..(18): n is a, c, g, or t
  misc_feature (20)..(20): n is a, c, g, or t
  misc_feature (36)..(36): n is a, c, g, or t
  misc_feature (49)..(49): n is a, c, g, or t
  misc_feature (55)..(55): n is a, c, g, or t
  misc_feature (60)..(60): n is a, c, g, or t
  misc_feature (67)..(67): n is a, c, g, or t
  misc_feature (85)..(85): n is a, c, g, or t
  misc_feature (104)..(104): n is a, c, g, or t
  misc_feature (107)..(107): n is a, c, g, or t
  misc_feature (134)..(134): n is a, c, g, or t
  misc_feature (138)..(139): n is a, c, g, or t
  misc_feature (143)..(143): n is a, c, g, or t
  misc_feature (172)..(172): n is a, c, g, or t
  misc_feature (174)..(174): n is a, c, g, or t
  misc_feature (182)..(182): n is a, c, g, or t
  misc_feature (186)..(186): n is a, c, g, or t
  misc_feature (191)..(191): n is a, c, g, or t
  misc_feature (215)..(215): n is a, c, g, or t
  misc_feature (222)..(223): n is a, c, g, or t
  misc_feature (225)..(225): n is a, c, g, or t
  misc_feature (231)..(231): n is a, c, g, or t
  misc_feature (266)..(266): n is a, c, g, or t
  misc_feature (269)..(269): n is a, c, g, or t
  misc_feature (271)..(271): n is a, c, g, or t
  misc_feature (275)..(275): n is a, c, g, or t
  misc_feature (278)..(278): n is a, c, g, or t
  misc_feature (286)..(287): n is a, c, g, or t
  misc_feature (293)..(293): n is a, c, g, or t
  misc_feature (298)..(298): n is a, c, g, or t
  misc_feature (307)..(307): n is a, c, g, or t
  misc_feature (314)..(315): n is a, c, g, or t
  misc_feature (317)..(317): n is a, c, g, or t
  misc_feature (319)..(320): n is a, c, g, or t
  misc_feature (323)..(323): n is a, c, g, or t
  misc_feature (334)..(334): n is a, c, g, or t
  misc_feature (337)..(337): n is a, c, g, or t
  misc_feature (370)..(370): n is a, c, g, or t
  misc_feature (382)..(382): n is a, c, g, or t
  misc_feature (389)..(389): n is a, c, g, or t
  misc_feature (408)..(408): n is a, c, g, or t
  misc_feature (437)..(437): n is a, c, g, or t
  misc_feature (466)..(466): n is a, c, g, or t
  misc_feature (476)..(476): n is a, c, g, or t
  misc_feature (690)..(690): n is a, c, g, or t
  misc_feature (727)..(727): n is a, c, g, or t
  misc_feature (743)..(743): n is a, c, g, or t
  misc_feature (808)..(808): n is a, c, g, or t
ngntcatttanatntnantnaagagcggggcccagntttaacatctcanaagaangaagnaaggganaaagggaagggccacgcncccgggccacgggggtccnggnaagcccccagccactaggggccaatcncccnncaanggaccccttcttccccagagggcagaagngnatgaaganaggnatganagggacacatgcaggagcgaatanacaaaannanaaaagnggattctggcatcaccacatctgggctcaacaggnggngngaanggngggggggnngggggnacagncagcctcgntcaaagnntngnngancacggggctanatnccagagggaccttcccagggccaacggccacanaggacagggggngcttccnccagggccccccaaagggnttcttctgtggcccctggatgggcttggnggaatcggactcatcaatccgcacctggnagtcttcccnggcatgcgcgccccgggactccttccgggcctctgctccggagaggggctgcagcgcacacagcatcagggtctgcagcgccagggtctccaccaggtccgtgttccagaccattccccggtcgaacgtcttcaggtgctttaggtctccatagagcttgctgattttcccacaaccttcttgcaacacgcttcccacacggaacacggcagcntgattttgcattgacttctgcatgctgagtcgcagtnccgatgttcttatgcntccatcagcaaatctcaatttgtcaagattcatgacagattcttcccagcgtttggttaattggngggacttatctcaggcctgcatgact

SEQ ID NO: 721564 - DNA, 142 bp, Homo sapiens
  misc_feature (2)..(2): n is a, c, g, or t
anagtggtagagagcgagggagtgagtgaatgagtgggctaaagagggccgggtgcggtggtcacgccttgtaatcccagcactttgggaggccgaggagggcagatgatctgaggtcagcacgttcgggagcagcctggtc

SEQ ID NO: 721565 - DNA, 850 bp, Homo sapiens
ggccgggcgcgtggctcacgcctgtaatcccagctctcagggaggctaagaggcgggaggatagcttgagcccaggagttcgagacctgcctgggcaatatagcgagaccccgttctccagaaaagggaaacaaaaaaaaaacacaaaggaccaaaaaaaaaaaaaaaaaaaaacaaaaaaaaaaatttggggcgcccgctcgggcccaaaaaaagtttttaaaaaccaattgttgggggggcgggcgccccaagagtggttagatgaacacgtgaggcagaaggcgttgtgcccaacaaagagaaacctcggcggcgccaaaacacaacggcggtgggggggattcctccccaatattaaaaaaagggccgcggggggacaccgcaaggcgtttcttagaacaaaaatcaccaagaatggagacccagaggaggacacaaaaccggggaggacaataaacacacaaggggggggcggccacaagggagagaagccagcccagagtaatacaacaaaataattaaacaccccccccgtgccagggggagggagtaccccaacaaccaacacaaccgacaggcgaagcaaacgagcgcggacgagcgccacggagccagaagacagaggagtaagcaaatagcagagtaggaggagagaagcagagagcacaggcgacagcagatagaacaggcagacggcagcgggagcagggcaagacagagagggcagcgcgagacgacaagagaagaaaaccgccacgagacgaggaagcggaaagacagcgacgggacgcgcagagcacagaggccgagagacaagggagcagcgaagaaaagagaagaaggccca

SEQ ID NO: 721566 - DNA, 729 bp, Homo sapiens
  misc_feature (422)..(422): n is a, c, g, or t
  misc_feature (424)..(424): n is a, c, g, or t
  misc_feature (584)..(584): n is a, c, g, or t
  misc_feature (601)..(601): n is a, c, g, or t
  misc_feature (609)..(610): n is a, c, g, or t
gtaataacatatctttctataccttttttcattattgagccagaaattacgattgaagaattgatttcagtgtttggctgaagcaagttttgcttcatttttgttattggttaatttcaggaaactatatttcatttacattgttgagcctcttgttcagcctactaatgtggttggtgcttaacaaatgttgtatggatggatagatggatgaataactttttaacccgatttctcccactttgtccttcacctgatcctatccttaggaatgaagaaggtggttgattgaaaagcaagcactattagccctgacacaggataatttatttcccacacccatgcccaagtcaaacgatgaatgagcaaaaagtagcatatcagtaaagttgccagatttagcaaacaaaatgcaagatatntngttaaatttgagttgcagatcaataatgaatcatttcttagtacaagtacatgccaaatgacacacttgtatttgaatggcagttttgcataccaactaataccaatggtctagagaactgtgagctccttatagctggtggacttcgtgtcatttattntactttatggcaggttngcctattnnatcagatccttgcaactttctgcatcatatggcagtggttctcagcaatgtggcacttggcataagtacgcatcagcatcgccttggaactgatccgcaaatgtgagttcttgagaccc

SEQ ID NO: 721567 - DNA, 542 bp, Homo sapiens
ggcagcctatgtcacattctaatccctactccccatacctgtttcaactatattgggcaaactatgtatactagctggctgtcagcaatatctgacttctgcaccatagcgatcaggctatattactacaacagaatcttctctatatctatattatatgtgtacgactcgcttggcctctagtgacactacactggctaggcccaacacgctttgcctacccacaccctgcctccttacacgcgcaccacttacactctcaatgatcaaccccatatatcttcaagcctaactttctttaccaccctcttagctacctcttacttcccacgcagctccataatctctccaacaacaccttaatatctaactctacgctttgcaccctaccaggctaacccactggaacgacccacacaacaccggcttccacactacgcacccaacttaacccactacccctctccaaacacgcagctttcacctcgcactcaactcgctaggctattctcactcacttcgatgccccctctaaccctacg

SEQ ID NO: 721568 - DNA, 565 bp, Homo sapiens
  misc_feature (21)..(21): n is a, c, g, or t
  misc_feature (75)..(75): n is a, c, g, or t
  misc_feature (125)..(125): n is a, c, g, or t
  misc_feature (134)..(134): n is a, c, g, or t
  misc_feature (149)..(149): n is a, c, g, or t
  misc_feature (159)..(159): n is a, c, g, or t
  misc_feature (171)..(171): n is a, c, g, or t
  misc_feature (174)..(174): n is a, c, g, or t
  misc_feature (188)..(188): n is a, c, g, or t
  misc_feature (191)..(191): n is a, c, g, or t
  misc_feature (235)..(235): n is a, c, g, or t
  misc_feature (286)..(286): n is a, c, g, or t
  misc_feature (292)..(292): n is a, c, g, or t
ggaaacccccccacaaggggnaacaaaaagctgggagcctcccaccccgggcggccctttttagaactagtggancccccgggcttgcagaattcgcgcccgcgtcgactacggctgcgagaagnccgacagangggatcccaggtgancagaaggagntgttggaggctntgnccttgtagagcccnccnccctggtggttgtgggcattgtgggctacgtggaaccccccggntgccgagaagacgacagaagggaggggagatgcctgtgtgcgtgttctgangggttncccactaatggagagactgactctctccataagtatttgatttttactttatctcctcgttgacttcacagtgtaagtgcagtttgtctctactgggtgatgcatgcagataaatgtttatgtgaacataagaagtctgcatgtgtgggtgaactctccacatcatgtcatttattgtccatcattacgtatctgtggtgtctagcacattcctctaccttattttctgtcattgtacctacttctacctgaacacgtattaaatatcttatt

SEQ ID NO: 721569 - DNA, 867 bp, Homo sapiens
  misc_feature (229)..(229): n is a, c, g, or t
  misc_feature (314)..(314): n is a, c, g, or t
ggcccgaccggctatgttttctgtggccccccctttcctagtcctggaaaccccccccgctcggtttttttgggacacgcgccgccgttttgtcccttggtgcttgggaccgccccccttctgtaggagggcggtcccaacgagtggcgcagtcacagagattgcccgcagacgttcttgctcctcgagcctctacttaagggaacctcctctccttgttgctcactcncgcggccgcgctttgtgtcactctgcccccacgacgattgtggcgcgcgctctcaaggaggaccgacgcgtatcatctctctatntggcgagatgccgtcgccgctctcgtagcaatctcattcgagcgaatactcttcttgtcggaacacccacacatacgctccctcaccataactctcgcgcatttgccaggacttgcgcatgatggtatgtggaaacacaccattcgttctttttgcacccgccgcctatatacaaccatcacacatgtagtgcatttcctgtcccacaacatgtagcatccaccagctccccacgcgcgaacaaattaattttgttgcacgacgctccatatccacaccactcgcccgcgacaccaacttgtggagaacccacctccttcggcgcccactcctctgcttcgccgcccaccattatcctacgcactgaggccacccaaaaattctgtgccacccatgatcaattcaccaccaccttattgtcgatttattgacaaaccactgcgtcattttaatgcatcacaacaattctactttctttacacaacaacaatcgccctgaactaccatatgaccacccacaaattgcaaccagaaaataacaaaatagacaaca

SEQ ID NO: 721570 - DNA, 292 bp, Homo sapiens
tctagaggatcccgtgtgtacgagataagggaggagacttgagcccaggagtttgaggctgcaaggagctatgatcatgccagtgcatcccagctctaggtgagacagtgagatcctggtctccgaaaataaatcaatcaatcaaatcacagaccaaagtcacaaccgcacatcatggatctctgcacaccccttccacattttgccagtctaccagcgacttagcataaaccctatctccctatctcttccaccagtgaattcactcctttcaacaaaggctaagtgtctt

SEQ ID NO: 721571 - DNA, 539 bp, Homo sapiens
gagcccttaggggaagagtcctgctctggctgttgatgctccagctccagaaatcccagtacctgcatctgggactcggcagaggccagtactatggcagggtccctgccccaaacgctgaaaccatgcatcgcggagatggcaccactggacctgcccttccaagaccccgcttccagatccgtcggtgcctggacaacaccagccagtgaccacactcggcgaacccatgagggctgagtggacagcggtgtaccgggaagcgtggccggcatcggatccccacaccgcacggcacccatgtcagatggacaaagcacggcacggcaggcccgacagcctgcacccattatggcaacaccaatgggtaaccgttcgttcaaccgcaaacccacggcccggggaaccaagccacaaggcccttgggcgaagcacaaccgggaacccaaaagttgtccttggaacccatccccgggaccaccttggtaaatcccaagggaaagcgatgacactggcaccgcccacgacaggcaggccca

SEQ ID NO: 721572 - DNA, 244 bp, Homo sapiens
agtcggtaccctgtgaaccctgcgtgcgatatcgatacgccatggaagcccacaccacttacggtgtgatcggtgtgaaggtttggatcttcaagggtgaggtcattggtggccgccaggaagagctcaagcccgtcgccccggctccgcgcaaaaaagctgctgctaagtaaggagtacgcaacatgctgcaacccaagcgtacaaaattccgcaagcagatgaccggacacaaccgtggtct

SEQ ID NO: 721573 - DNA, 710 bp, Homo sapiens
  misc_feature (104)..(105): n is a, c, g, or t
  misc_feature (376)..(376): n is a, c, g, or t
  misc_feature (383)..(383): n is a, c, g, or t
agcgggctgatgcggccagcgcccgggcctgcgggcccgggcggcggctgtgttgcgcagtcttcatgggttcccgacgaggaggtctctgtggctgcggcggnngctgctaactgcgccacctgctgcagcctgtccccgccgctctgaagcggccgcgtcgaagccgaaatgccgccaccccggaccggccgaggccttctctggctgagtctgggtctgagctccgtctgcgtcggcctcggatccgaaacgcaggccaactcgaccacagatgctctgaacgttcttctcatcatcgtggatgaccctgcgccctccatggcttgtatggggataagctggtgaggtcccccagataggaccaacttgcatnccacagncttcttcttcaaaatgcctttgggcagcaagcaatgtgcgccccgagccgcgtttctttcctcactggcaggagaccttgcaccaaccggctgtacgaattcaaactctacttgaaggtgcacgcttggaaacttcttcaacattccccaggactttcaaggagaatgggctatgggacccatgtcgggtgggaaaaagctttcaacctggggatatcttcttaacaataccgatgaattctccggataacttgggcttttccaacctattaatcctttcctttgagaagtttgaaaacacttaagacatgtccaaggcccaaatgg

SEQ ID NO: 721574 - DNA, 215 bp, Homo sapiens
  misc_feature (22)..(22): n is a, c, g, or t
tacatttccagtgttcctgagncaatcttcaggtattccaacatagcattatcttggagcatcccacggtgttccgcatgccacgacctggatccggtcctcgcactggtccctggggaagtttggggtggtccatcactctttgagggatcagccgctcagagctgaggtacccggacttgtgcacttctttgttgtagtccccaaacttgggc

SEQ ID NO: 721575 - DNA, 246 bp, Homo sapiens
tgctccccgacccccagccgggacccctcattcccctccccctacagggatcaagtgccctgggaagaaccgagtttaaccccaggatgtgtttccttagatttcctttcctaggcgatttccagggagagccctgattggccaatcccatcccagatccccctgcagtttccatgttagccctggggatgggtttttaatcaataaaaactgggggttttttttccccgcctctccccttgccca

SEQ ID NO: 721576 - DNA, 541 bp, Homo sapiens
  misc_feature (499)..(499): n is a, c, g, or t
cactgcactccagccagggtgatagagcattatctgtctcaaataaataataataaagaacagggaaaaagaaagattatttaatatctcactaccctgaggaagtcagttaccctttggctatcagatatcggaggaaataaggttgtagaggaaaaagtcgttaaggtattttaaacagacatttgtttcattatttggaactcaataatagagactttaagtacaaattgtgagtctaggagaatttttgatttccacagatgagaaataaaataagaatatagacattgttggactttgaaagcttacccaatgtttaatagtttgctgaacaattgccaaatgaaatgctttcaaagtttctgaaaggcacaattctcttcttcctgagctcagaacattttggtcataatcatgagcttagaaatgttctgaagggagtacaggaccttcattagcaataaaataatatatatttccaatgacactgaaagtntcctatcctagctacatatacaaactaggaaacagagggggc

SEQ ID NO: 721577 - DNA, 630 bp, Homo sapiens
  misc_feature (320)..(320): n is a, c, g, or t
  misc_feature (348)..(348): n is a, c, g, or t
  misc_feature (352)..(352): n is a, c, g, or t
  misc_feature (355)..(355): n is a, c, g, or t
  misc_feature (389)..(389): n is a, c, g, or t
  misc_feature (392)..(392): n is a, c, g, or t
  misc_feature (414)..(414): n is a, c, g, or t
  misc_feature (416)..(416): n is a, c, g, or t
  misc_feature (451)..(451): n is a, c, g, or t
  misc_feature (471)..(472): n is a, c, g, or t
  misc_feature (475)..(475): n is a, c, g, or t
  misc_feature (481)..(481): n is a, c, g, or t
  misc_feature (495)..(495): n is a, c, g, or t
  misc_feature (497)..(498): n is a, c, g, or t
  misc_feature (505)..(506): n is a, c, g, or t
  misc_feature (510)..(510): n is a, c, g, or t
  misc_feature (513)..(513): n is a, c, g, or t
tgggagggtatttttaattggggggtccaaaaaatctgttatatccagtctatgtgtttacaattggtgtggtaagtaaactacagcttggagtgggaaagaagtcacgggtggtaaaaccattgggattttttataaaacaaaagtattaataatcgggaagacagtgttggcccaggtcaggagtgtttcctggggggtcccagcccccatcaattgaactggttccggggctcagtcagacacagacatattcatctgtgtctgaccaaatcaggggacttccccacctgtggtgggaggcacagcttagatgtttngtacacctggtcttttctagaaatcccngctnggngctgcagaagggttgccttctgtaggtcggaggnatngaggcttactaacccaggaagncntctatgcatccacaccaaaatcctcagaatgtaantaagctctgcttataagatnnggntcaccntcatcgcagactgnanngttcagnntttnatnttttgtcagagagcacgcgaaaattatttataatagtctcgagacaaaacacactgtaatatttcagtgtatgagtagaatgtactgtaactgggcccttccccatgtctaggttcc

SEQ ID NO: 721578 - DNA, 120 bp, Homo sapiens
cagtgccatgcaactcgtataaagcatgtggaagcaaggtgggatagagctagtatgctgagtctaccacctttcgtctttctcctgtgctggatacttcttgcccttgcacaggcagcc

SEQ ID NO: 721579 - DNA, 767 bp, Homo sapiens
gacagtgaccgccaccgttgccaagggatgggtccctgagacttggcgaagtgggagccctgtgtgatcgtgcgtcagagtcggggctgagaccagccccggccaggtagttaccgggacggtctccggaggccgggattcgcggagggtccaccagcaggaagaaaccccaggaggaagaaacctcagacagatcgccggggaggcagcgcgggatcccagcctcaggcgtgcgcggacggtgtgcggagtctagcttgtaccaggctgcagtgcagtagtgccatctcagctcactgcaactctgcctcccgggttcaagagatgtcctgcctcagcctcccgagtagctgggattacaggcacatgccaccacacccagctaatgttgtatttttagtagacacggggtttcatcatgttgcccaggatggtctcaatttcctgacctcgtgatccgcacatctcggctcccaaaatgctggattacaggcatgagccaccagaaaccggacatgctttcccttaaaagctaaatattttaggcttgtgtgcattaggctctgttacaactacttaattctgtttgtaattctatagcacccatgtaatactaacaaatgagcatgaatgtttctcagtgaaaatttgttcacataacaggcgggcaccatgaaggattaggctgtgaccctggttaaacatcatggttccacgaataacgattttttttgacagtgaacattccaggcttcacccttgtgaca

SEQ ID NO: 721580 - DNA, 566 bp, Homo sapiens
aggaagcgggtagtcgaccgtgtctgcgcgcctgggagacgctgcctcggcccgtgactgcgcgggggccccctgtggctggagtgtgtgtgtctgccacatgtgtgacactgtgaaccacggagtgatgtctggagctgcctgcgctgcccaggccatgtgacttgtgagtgtcaacaactgtgttccagcctcagggatgagtgcatcacaaacctactggtgtgtgtggcttcctccaaagctgttctgacaacagcttcctgcagagagctggacgcactgtggccacgatgctgccagtgctggctccccatgtgggatgtggctacgatgagctgcagactgatggcaaccctgcagcatgccactcccgcttgggaagaatagatggcagattctgaaagtcaagaagacatcatccggaactattgccatggcaccatcgcccagtgtctggggacagcatggacctgtagcatccctccgggcctggtgaacgggcctggccctgccagctcagtgaacaccagcctggtcggaggaggaccggaacagggaccttc

SEQ ID NO: 721581 - DNA, 766 bp, Homo sapiens
aagtagcattgctttgagtcacataaggatgaaatattccaggttcaagctgggtcacctcacaatgagacgtagttatagcttccaggtggtactgatcgcagactgaatgtctgggatttaacgtaaaattggagaggaacaatgccctagaagatgtcagacagacgggccagcagagtagtgtttattcacaggtggtcatactgccaagatatctgatttctcctggaatcccaatgaaccttgggtgattcgttctgtatcagaagacaatatcatgcatgtgtggcaaactggcagagaacatttataatgatgaggaccctgaacgaagcgtggatccagaaggacaagggtcctagatatgtcttcacttgtcgtgattgtaggactcccctttgaacttctgcaatccatgagagtgattgaacacttggttctgagacaggactttattcagcgtatccctctgatataataggtaccaccgatcatgctgatgagcccaaacccggggtgtgactaacttattaataggggggcctgatttaatcaacgccacagtacttaacgttgaccattttcttcagcgaatcttctagtaccccaggtctacaagtacctacgccaggcgactatgatgtgtgacattctgctcttatgctttatcgccaggttctcagactccattaagtaacggctagagtgacgtcggactcgagcccctgacgtaggtagcggatcctgacgctaatactggaga

SEQ ID NO: 721582 - DNA, 992 bp, Homo sapiens
ggtccaggtgtttgtgggacgtagcgttgtacctgcaggctccgccacctgcgggacccgcgcattctgtccctcagtcaggcagacgctctgtcccgaccgggcagactctgccagcgcaagcgtgctggagagtgcgataccacctgtggactgtgcacgcccggagtttggatgcctcttccatcaagtggacgctgatgtgggaggatcaggatgaagaacgctgaatatgttgaagttgagcctgaagctaaacaggaagattcttgaaaataaagatgtggttgttcaagatgttgattaggatggacttggaaggactgaagatgatatcgtcatgagtgcaaatatggcagatgtttagaaggccatatagacctagttgaggtatatgcgtgagaagtctacactgatgcccgtgaaacaacttggtccgtctatggaaacctttccacgactagtggatgtgtgatcgacacatgtcaaggtgatgacgcacttaccgagatgggcttagacgcttacccttaggaatgtaacttgagatcgaggagattaacgggcaagttagtaataacgcatgggttgtgaccacgaatgaattggcattctgcgtgacttgggcgaccaagcgttccttaatctttcgtatgcgtctggtgcacgcaaaccatggtgagcttttcagccttgccctatggaaagaaaagaaagccttcggtagtagggtcctgtcactttcttcaacaaccacggtgccgggagcacttcctgaacgaaaattcttctgttagcttgcttttaaagctttctggacagttccctggtatgcccaacctgcgcgcacgagcgacgtatgaatggcctcagtcgctccagttattccattatgaggcccgcccctgtaaggggagacgcaattgcgggaccggtgctctaagcaggggcttcttcgaagaaaggattacgacgatttgccaccgtccact

SEQ ID NO: 721583 - DNA, 158 bp, Homo sapiens
gactgctgcagctgggactgaccgggagctctgattgtttaccaccacaggtaggttgcgtcctgagtctcaggttcacaggttaaggctacagcttcctcatcctccacgggcttggagttgttgctggtgatgaagggtttgggtggctctgcaga

SEQ ID NO: 721584 - DNA, 702 bp, Homo sapiens
  misc_feature (344)..(344): n is a, c, g, or t
  misc_feature (479)..(479): n is a, c, g, or t
gtactccaggctcggagccttagtgaccatcacctgcccacctaagcccacggtgctccctcctggtgaccccactcctgaaaccccctgcccctgcctcccccagccctggtgcgccggggctctcctgccctgctcccgtcggtcccatcctcccgttgcagtgcgcctgtttccctgtgcattctgacgtccaccgctgcgatctattcacctcgtccgtcctcgcgacgaagctttctgtgtggcttgtcaatgtcttgtcagatcttatcatgggccaagtcagcaaccactgatgcgtgcgatgtgcctggcagacgctggccaattagtagaagcanagcatgcgcctgagctgtgtgtgcgatgtggatgtgaccctgtgagctgcccgtggtgtcgcccagccgggcctgccggatgctgtgatcgctgtgcctgtgccagtgccatgtgttccttgttgtgcgcttgantccacacacgtgacgtgaagcataactcgtgtgggtctacccatagaagaagaagaacctttgggatgtgccactccagcgtccacgtgtggacttctccttgtagtggaacagcgctcagacgatgtgcgccccacccgaagagttgagccccagtggcaagggactcccaataagtgccgcaaggaagcaggaatgttcgctcttactagtggaacgagag

SEQ ID NO: 721585 - DNA, 226 bp, Homo sapiens
accaggacttcacattaatttccaaaagtatcatagggactagtgacactacaagacataaatctattataaaatatatcggcctttctcatataacctactctagtattatagtattgtgtgtgcgtgcgtatgtagatgtcaggctagccaacgtaaaacttcaaagaaaaatctatcaaagcagaccatccttattttgcatgctctattctacgtagaatgt

SEQ ID NO: 721586 - DNA, 1562 bp, Homo sapiens
  misc_feature (277)..(277): n is a, c, g, or t
ggcaggttcggccggccggccctcagccacgcatgtgcggcgtctgtgacccgcggaagccacgtcgccagcattggtgaggatcgtgatagtttacgagcctaggtcgtacccagagagcgagtaagccggtgctagcgagcggggcgtgtgcgaaggcggcggatgaatggtgttccgagagcgagcttccacactcacatccggtagaaggcttcactcacagaagctaatcagtctctcaactcggtggaggacctgggtcaagaaggcgatngacgtgacctgctgcgtggatggatggcgccgaggagagcagaggagaggtgcatatcatcgaacgcgagagaccatatccacgaatcaatcgcacttgcggcattcggttagccagaactagagcgagaaaatcagggtgcaggcatatgagatctaagttcgagaccaagaacacttgtgcataatcccatttcgtacgcatcgccgctttggtcgtggtttacctccccgtaggcgaatccaaatttcacgcagaaagaattgcaatagaagccccgaatgggagctcggggattgcaaattccttgaacgagggccaaaggtcgacgaaagcacacaagtggagggccacgcaatactagtggagtgatgatggaggcgatattcaaacaattccaccattaatttatcggtaactggggaggggtactcctgaggtccaaggagcatgtcaaacctactgttggaatgtcccatacctttgtgtcccgtaaactccaagttgaaacggatcagattgtagtagaggaacatttctggggaaggaatagtagggctctttggaaccccttgacattaggttacgcacccctttttgagctgatttcctggggaagaagaaccgtaaggccacgtattgggacattttgcgtagacagattaaagggttatccataaggcccttggtgtccaggagcgaggcgtatggaattgggtagggaactccgtccgagattagagaaaaagagtcttttatttgggcttagacaagaatgggcggttgagagacaaggggatttctttttgagacttatttgagagggttgggcaaccgtggggagaaagcaaaaggttagcgtgtgtgacttcggtgtggacacgagaagcagaggactggagaggagaatacagaggagagtcacgggaatggagagcaatttggcgattgcggcaaggataggttggcgcgcccccgggattggtttgtataccacacacgagagagccactccccatcctggtggagaagaaaaacaagcgtgatggacagagccctggtgcatagaacaagtcggcaaaaggggtaacaaaccgccgagatggcaacacggagaggcagcgatctcagagaggggaccacaaaccagggataattcatacagacattatactatattcggggaaagggaaggacgagtagacagaacacacgacaagagacgacgcaaaaacaagggcgagcagacagtacaggaagaaacagcgaagagaagaccagctat

SEQ ID NO: 721587 - DNA, 173 bp, Homo sapiens
  misc_feature (63)..(63): n is a, c, g, or t
tgcagtcatgaaatactgaacaattgccttaagtctttgcttgactcactgggatatactgangctgtgggtgtgtctgtattagcatttcaatacttctacacatgcttttgatgtactctagagagtgctttaaattttgtattgaaacaacaatactatttgcactgtag

SEQ ID NO: 721588 - DNA, 724 bp, Homo sapiens
  misc_feature (89)..(89): n is a, c, g, or t
  misc_feature (97)..(97): n is a, c, g, or t
  misc_feature (261)..(261): n is a, c, g, or t
tctgaaatcaagcacctgtaccggcagttagatatgattcttgatggcagagaagatatgtctctttccctcacagaggaaatctctanaagaggancaggaatcctgggccacatgggcacgattactccaccagaactggatactgttgtgaaaacttccgcctgagattctgagaccagtaaatgaaatggaaaattccccatgggagtgaaaccgtccagactggtccagtggaatagccagccaaccctggctctngctggaggccgtcttaatgagcaccaaccccagcccttccattgcaccatccaagagccacctgccaccatagtaaaggagggaccatcagataaacattagtgccagccgaaataatagcccatccaaatgaaaagccgaaatgccccagaactacccacccatttcccatcatgtttgtctacggtcccacttccattatatttgttgtggtcgccaaactgtattattccattggttatatccatgtataggtctccagccagaagccaagctcgccccaaaaattctttttgactcacccattttcctgtgtacttcatctatttgtgtaccaaatgatgtcgttttgagggaatttaagtatttaaattgcttcatagtctaaattattaattttcttaattaaataactgtttaaaccttgatttgccgttaagaataaaccttaagccaagactta

SEQ ID NO: 721589 - DNA, 481 bp, Homo sapiens
gaccataatgaggttccaccgccctgggaggagacacactatggaagcccatctcttcctatgcgggacgccacacgcgtgtgcaggcagtgagccggagtctcgaggctcgctgtggagtcaggcaagccaggaaaaggcacatgcaccccaagtcccttatgtgaagttctacaagagacaaatatattcattttacttaaattaatattttaggctgggcacggtggctcacacctgtaatcccaatactttgggaggccaaagaaggaagattccttgagcccaggtgttcaaggtcagcctgcgcaacatggcaagaccccatctctacaaaaagtaaattagctggacgtggtggtacctgtggtcccagctactcaggaggctgaggcaggaggatcactgcagcccaggagttggagaccagcctggctagcaaagcaggaccctgtctctaataatgacaaggtttggcggt

SEQ ID NO: 721590 - DNA, 221 bp, Homo sapiens
cgcactagatctagtaccgcatgggacagatgataaattatcaccaagcatactgtagcaaggactaacccctataccttctgcataatgaatgaactagaaataactttgcacggagagccaatgttagagacccccgaaaccagacgagctacctaagaacagctaatagagcacacacgtctatgtgacaaaaaatgatggatatatagaagacatgt

SEQ ID NO: 721591 - DNA, 145 bp, Homo sapiens
cagtgcagcttgctgctgaggtgattctataggatccccgtttctgctctggctgcttcctgtcttctgcccctcaccaatatccttcctcaccaatgaccctgataccaatgaagacccgtgatgaagctgtcctccgtgatcc

SEQ ID NO: 721592 - DNA, 129 bp, Homo sapiens
aagcttttaccgctgaaaggaaggagagaaccacacaaaaagagagattcattaagtgatgaataccaatctcttgcagcacacaactgtctgttctaagcggcatttcgtcttaaaaaaaaaaagctt

SEQ ID NO: 721593 - DNA, 413 bp, Homo sapiens
  misc_feature (8)..(8): n is a, c, g, or t
  misc_feature (22)..(22): n is a, c, g, or t
  misc_feature (37)..(37): n is a, c, g, or t
  misc_feature (49)..(49): n is a, c, g, or t
  misc_feature (70)..(70): n is a, c, g, or t
  misc_feature (87)..(87): n is a, c, g, or t
  misc_feature (104)..(104): n is a, c, g, or t
  misc_feature (156)..(156): n is a, c, g, or t
  misc_feature (162)..(162): n is a, c, g, or t
  misc_feature (182)..(182): n is a, c, g, or t
  misc_feature (341)..(341): n is a, c, g, or t
  misc_feature (343)..(343): n is a, c, g, or t
acctaccncaaacgttttccanactgtgggcaaaaantgcctccttccnagtggaaaaaatgcccccagnttcctcctgaagaatgnatgtaaagtggccatgnatgttaccctaaggccttaggccttagccttgaaattcctgggccccactgnctgtgntcttaagatgcccaacctgntgctttttttttttttttcccccatttaaaaggatagtacctactccctctaaccacctcaccccattcttgaatgacattttatcttcggaaagaacaaggctgtgatgtagtgactattctctgtgtctcctgtgtgtgtctgttcttgtcacaaangntagttgttctatccttagttatgaaattttctgtaataaagtttcttaatcactcttcccaaaaaaaaaa

SEQ ID NO: 721594 - DNA, 126 bp, Homo sapiens
  misc_feature (108)..(108): n is a, c, g, or t
ctgatgaggacgaaatccttcccgttcttctggatgagcatcctatcttcgtagttggtttggacttcgataggttgatgaaagggaggggttctattaaccaaatanaatctgtttacaaaaatg

SEQ ID NO: 721595 - DNA, 254 bp, Homo sapiens
gtcgacgacaaatcctttttgcctgtatgttacttaagaatgtacatatactggccgggcagggtggctcacgcctgtgatcccagcactttgggaggctgaggcgggcggatcagaaggtcaggagatagagaccagcctggccaacatggtgaaacccgtctctattaaaaatacaaaaattagctgggcatggtggtgcatgcctgtagtcccagctactcgggaggctgaggcaggagaatcgcttgagc

SEQ ID NO: 721596 - DNA, 200 bp, Homo sapiens
  misc_feature (86)..(86): n is a, c, g, or t
acaggtcagttttgttacagaggccaattagcagtgctaaccttcgcctgcggaaaaagccaagtaatgaccgggcaagcctgcgnaggggtgatgaataactcggagagctgtaatttgaaaggggggctttgaagcatttaccttacatgggacgccattgtcctgcagggtgtttgatcttaaaataatttcttaat

SEQ ID NO: 721597 - DNA, 148 bp, Homo sapiens
ctccccgactattacaactatctgtaaaatgaaggtaatcaggccaggagtggtgcactcctgtaatccaaacactttggcaggctgaggtaggaggattgcttgggccaggagttcaaggccatcctgggcaacatagtgtctctac

SEQ ID NO: 721598 - DNA, 198 bp, Homo sapiens
atcgacgtggacatccctggcgccagtgtgtaggtctgcgtaccggatgccctcgcgcacgccttgtgcgctctgtgagccggacgcgtatgagtccgtgtactcgcctgaagagtgcagcgacctgggaccggaccttcctaggcggttgattagacatagggcacggggtggacgtgttcagatgaagctcgtgcc

SEQ ID NO: 721599 - DNA, 307 bp, Homo sapiens
catggttgactcacagtcaatacatatatattcgaaggcacgcaacatttcaactgtagttaccagtggaaaaaatactgaggagatgtttattagcttgatctaatacttacacattatgtacctgcaatgcattacactgtattccataaatgcaatacaatgacttgtcgattacaaatacaagttagaacatatccaaatccaaaacagtgaaaaactgctacacgtattcaagacaggtttacttgatgatctttagggcatgcttccttttcatctactcctttttctttttttttcctgg

SEQ ID NO: 721600 - DNA, 404 bp, Homo sapiens
  misc_feature (9)..(9): n is a, c, g, or t
  misc_feature (94)..(94): n is a, c, g, or t
  misc_feature (116)..(116): n is a, c, g, or t
  misc_feature (122)..(122): n is a, c, g, or t
  misc_feature (128)..(128): n is a, c, g, or t
tacctatanggaaggtgtccttgcatctctatctctcaatctctgtctctatatatcattctctttgtgtatttctcttatttgtccaaattancaataagtaatctgcacatganaaaccntttccntcatcttcatgtcaatatagcttttgtagaaaagtaattgctattttggaggtaggggattaaataactttggcgactgacatgaagacttcggctttcagtaatatgtaacagactgtacaaattcatcgagagacaattattctgatgaaaacagaatgggcaaactgcagtatctcatgtctataaatccaacactttgggaggctgaggcaggtggattcctgaggccaggagttatcgaccaccccggccaacacggcaagatcatgtctc

SEQ ID NO: 721601 - DNA, 1752 bp, Homo sapiens
tacggatatccatcacctcaaccactttattatttgaacttacaaagcaatccaattatgttcttttagcttatttacaaatatataattaagttattatgactataactcaccctcttgtacagctcagactagctagatcttattcattcatattatatattggacccattaactctccccacctcctccccccctcacgcctcccacctaccttctcccagcccatacgtggaatagaaccacctccctgtcgctacacactccatacagcacagaggcagcagctataacggatacccaacacgccaccccgacgacaccaaacacacaaggcagtcaccgcgaccacagactcgcggcctcgacagcacccgcactgcccacacacccgacgcccgcgcctccaccgccatacctgggcacgaacggcacgcaagcgagccagcccaaaccaccggacacagcacaacctcacactaggaccatacactcaccccgcagcacccaaccccccaacctcccactaacgtgcagtccaggacaaccggcagacacccacccgcgcacccatacaccgccaacaacagaccccagacacacgcagcacacgacacaaacccaacgccgacatagaatgcaggaccacaacagcgaccacgagccagcaacaacagaaaaggaccagaccatagactgagcgtcgacgtaaagagcgacccaagcacaagcgacaccgacgcccacaccactccacacacatatcgggaccgccgtgccgcgccacgcccgcacactggaggcaaaccccgacccctcgggaaaaggacatcgcgcggccacacaccacgccgggacagcagctccaggacctagccacagcgcactagaagcagacaaggcgacacacagacacgaaaccgcaaacaggacaccagagcgcctgcacgcacgtagcgagcggcacgacccgcaccacaacgacacaagtctacgtacccaccgcacggcctccccatatacgccacagccccgccaaccgcagcaacaggagcaccgacccagcaaaccgggagccaacaccgcacccgtgacgcgggcgcgtcgcgcggctagacgtcgcccccaccctcaccgcagccagtgaccgcgcaacggtactagacactcccagccagagacacgagagcgcaaccgacagcacgcacctcgcgacgcaaagtcgacgcccgacaagacggacaacgagcgagcgcaccgcacgggcatcgccgcgcacgcaaggctacggtcgagcgcacccagcggcgccgaccgctgggcacgcccaacgcgtcgcctgatcagcacgccggacggcgcgagagacgaagacagcacggagacaagcaaggacgaacgaccgccgcaacagcgtgccgtggcatcggtcgaggagacacgtgcgcgcacgctgcccccggaggccagccgccgcccacgaccgccctaggcgagcagcaggcaccacacacgagcggccgagggacgcggcgcccagcgcggcggcgacgcgcacagccgcaggcgcggcggccagcacacacaggcgcggcgagcgaacgggtgcacccacgcacaagagcgagacggcgataccaccaactgcacgagaaccggacgcgcaacaagccacaacacatcacacacgagacgagaagcccgacgaacggcaggacggccgcgacagcgagtgggacgcacagacgcgga

SEQ ID NO: 721602 - DNA, 542 bp, Homo sapiens
ttaactctatatgaaaaacagctgactcttaggcaattgctgagttcgtgaggtaggagcatcttggagtccattttggaaaggcctttgagctagacgtggtgaagtgcagtgagagtttgcactaggcagggaaggagtagcatagcacgggtggtccctgggtgagccaagcaggtctgcactgactgcctgggctgtgggagtgtggtctggaccagagccaggccaggccatccagagctatgcagagggttgggctcattcattgagtaccagggaaccactaagggcactaagtggtggggtgacaccatccacttggctccgtagaaggtcattctgggcagctctgcagacatggcgagtctgtcaggacatccctgacaggctgctctagggctgcagcagcaccttctttcctcggggctcacttgattcttcacaccctgggcacatggtctcagggtgccatactggggggactcagacagccgtggcctgagatcaagctgctggcagggttggttccttcgagagct

SEQ ID NO: 721603 - DNA, 1126 bp, Homo sapiens
  misc_feature (2)..(2): n is a, c, g, or t
tncaatttccctccaaccataatagcgggcttttaaacttgctctctccctgtcctctgttgcttcaaacccatttttaggtccggtctcatagtctttatcctgccttgtgttctccctctggtttggtccctgtgttgccgttactgcctacctgtgttttaacgggcactttttctccctccgcgagtcctacgttttcaccttcgctgctgcccctagcttaatgcttgtctggaggctgccctcttggtcttctcttcccgcatccgcgtcatgcaaccacattgttggtattggcagcttgcccccccgcttggaattaacttcgcacgcttctgtctttcacgatggcgctcgggggatcctgaggcacacccccttaggtacctgttgcgaggctgtggaggtgcaggccagagcacgtttgtgcgtagcccccgcacccaggttcttctgtcagaccctgtgacctgcgatgctgctactactgtataggagggaaattggatgaatcctggctcgtttctaaatcgcgttttctgacgaatcctttgccccttcacctttaccccgcccgctagcccctatggccctctcgagccttcctagtcatcccagcgtgtctacccagacccttgtgcggcccatgccccggggcggcgtcctgtccctgagctgggaggcggctatggatggtccgggcgtcaagagacaggggttggcccggggaggggtccttgcggtgagctatgtttacatgacacagtgtgccaaagtgacttactgcggttgcgttagtttctagtcatcaggactatctcaccctcccactcctgtttttaaaagctcagaattctttcctaagagcccttcgagcaaagcgtgccgaaggtcagttcgtcttctctgtggtggtcctttcttatgtcctcataaaagctcagatgatggtatctgtgagtatgtgtgttgcaaattccaaatattagtttggtaattttttctttccagttgatttttccaaagactgctgtacagagcttgaactcttgtcccttttatagatggaaccatctaacgcatgttactaattatgagccctggtcgcctggtctgagttgtg

SEQ ID NO: 721604 - DNA, 474 bp, Homo sapiens
aaccaggcggttttttgttttacaaaagagattttttaggaaatatttgttgaggatccacctttaattcaacctgtttggataaagccatgtagaatccactttagttttttccgcgaggtgaaaaatccaaaaaccctttttgaaatcaaaagtttcttagcaagtgaagtgctcaagtttttcctttttaaaaagaagcccacccccaaacccatttggcagaaaatttttaattttggaaaaaaaaaaaaagcccgagtggtttttttttttttttcggaactcccttagggggaggcccagttgttttattatttataagaataagtttttttttaaaatccacctaccccccgggtttttttagcccctgttcaaaaaaattttttttttttttaatcaaatcaatgaaaaacaggggaaaatttttttttttttccttttttcaattaattctacccttgagtgtta

SEQ ID NO: 721605 - DNA, 729 bp, Homo sapiens
tacgggctaggtacgaggctgggtgttaatcggccgagggtggggcagaggttgggatagatggcgtggcgaggtctgggcgctgcagaggctggggctgcggccagcgcgtggtggtgcgtcggtgggcggccgctgctgcgaggagctcactgcggttcctacccccgcccgctacgtctcctcggcatcgctggttgaacgtgtctttattcaaccacaataatagctggtattacaggacagatagcgacccacgcgataggttagaactctcgaatggatcagcacccagggcacaagtggtgaagcatacaagagaagtgctctgattcctcctgtggaagacacagtcttttatccttctccctagtccctataaggaggtctacctgaaaaaccattctagttgtgtgatactgattgaggtttacaggcctgttgcagtcttgcgaatcacgctgcctatttggcaactatgaattcatctgaaactccaggggatccaggagttatttgtcgataggatatcaaagatgctgcattggttggcatagcataacgacgctactaatagaagaaggacacttcagaacggagattaacaatgtggtggaataacctaagtgatggccagcggactgtgacaggtattgatagctgcaaatgtccttgtattctgtgtatggacagtaccttctctgcaacggacaatgatcagatatttcc

SEQ ID NO: 721606 - DNA, 120 bp, Homo sapiens
  misc_feature (14)..(14): n is a, c, g, or t
agtggagagagaantcatcgtatcctttcatcaatcccaaagcctgtgctaccggcttttttctcatatcagatgtagccacggatggaaagtcgttgtgcaatctcattctctcccact

SEQ ID NO: 721607 - DNA, 459 bp, Homo sapiens
tgtggggtctacagtgctcccccatctccacgtcccggctgggccccagagcccagcttcctgccctccaccgggagtctgcatggttgggagtcctgggtggaggggcctttgtgaggctggaccggctcagggcaggtggaggagctgggcctcccacagggtgcccgggcagtgccatcctggtgggggagggcagcttcaaacgtgtggggtctacagtcctcaggtctaggcagggctagccggttctccacctgcccagccggcccaggacccctgcctgatgctgcttgacgccctctgcttggggcatctggttgtctctgtcattgcctgcggttgttgccttgcacctcttttcttcccgcgcgcccctgcacattcggggtctacagccccaggctgtgagctccttgggggcaggccctacaataaatgtgaactgctgctagccgc

SEQ ID NO: 721608 - DNA, 119 bp, Homo sapiens
atgggggtagtgtgtaacctgcagaacgtcgagctgggtgccacagtgtcatcagcctcttccatggcaacagggcacttgtactgagctgtgttgaaaaggcagatgtctgcatactg

SEQ ID NO: 721609 - DNA, 828 bp, Homo sapiens
accttatattgcgggataaaccaaatggctcctggggtgggaacacggtgtctgctggaatatatagtgcccagttcggtgttccccctggtaagtggtgtgttccctgcccgccccggtacccagcgtgtgttcgatgtgaaccgggctgagttgcgccaaagtgggtgcaaactcagcggcttgttaacagcaaagatcatgatccaccgggtgctgctgcagacaattgtctagggcgaagcagtgctctaggttgtgcatactgaggacagctggacgctgctctctgctactttgggggaaaatagcagcgtcaactcgtgggcgccgtcagtagaatgttaaagcacgagagaacttgcttttttgcttgcggcacttctgtcagttctgtctcagagatctcccccggctcaccaggtggtaagaaggtgccgcacgcagcgccgcaagacacattagttcctccgagttactgggtcccccacccagggtgatcatccccggctctctcccaaaaatacaaggtctaatcaaagtagcttcaaatgaattaggggaaattcccctaccctctcctagaacgaaccttctctttagtcattgacacctagttgtaagtttctcgaaaatgtttccatcatctggtggatccaaattcaaacaaatgatccttgtcatgagttctgtaaataccccgtttactctgttctgtctctcaccatgtagtccccttgccaatgagattccccctggggttaaatctttcgctattcaaaacaaggagatttgaacccaaattattgaattttcggccacaagaca

SEQ ID NO: 721610 - DNA, 785 bp, Homo sapiens
gagagagttagagagagagagagagagagagagagagagagagagagactcagacagagtgcgtgtccctctctctcgctctctctctttctatttctctatcctcactgctccttccacttctactcccctctccctctttcttccttccctgtcctctctctcctcccttcctcctcttcctctctcctctcctttttcctcctctccttttcatctttccttactctctctcttcttctctctccctcttccttcttctcctcttctccctcttctatccttttttctccctctctcgcccttctcctcttcactctctccttattttttctctcctttcttctctcctctcttctttcttctctcttccctctcttctcccttctccctcctttctcttctcttgtctccctccctactctttccctctccttttccttccgttcatctttctcctttccttatccctctcttcttccccccccctcctttcttttctctctctccttctcccctcttctcctctcccttctcttccctacttcttctcttcccccttcttcttctccttcttcctccttctttttctctttcttctttctctcttcttctcctctctttccgccttcttccctctctttcttctctattcttcttcccttctctttcttttctcccctttctcctctcttttccctctcttctctcccttttccttgccttttctcttctctaccgcttcttccctttccctctctctctcccccctatcttcctcctcc

SEQ ID NO: 721611 - DNA, 406 bp, Homo sapiens
caaagcacttcagcttcctgtttctgagaatttgttcacaggcagaattatgtcacggtccatgtactaggaccggttcccctctgccacagtgatttgatgtgaaagtgtgccgtcttttagggaaaactgtcagtacttacaccgtggctctgcatagctcatcctgaaactggttatagaaatctatttagcacgctcagctgctatttcccttctttgacatagactctattaggggccacaatttccctcaagggtgagtactctttaaatatattttcagtttctgatttagagacattgttcaccactggactaagactaaccttggatgccggtcagtgacgactttgtcacactaaataagatggctgttctaggcctaagacactgtcttgagggg

SEQ ID NO: 721612 - DNA, 187 bp, Homo sapiens
  misc_feature (54)..(54): n is a, c, g, or t
  misc_feature (59)..(59): n is a, c, g, or t
  misc_feature (92)..(92): n is a, c, g, or t
  misc_feature (167)..(167): n is a, c, g, or t
aagacataaatttgctgtgtgttcccgcacaaccaactttaataataatgtctntgcangccatctattctctcatgggcaataacacaganacaaacggtcctgagtgcacagcgctgctgggttttggggtctgctttaggggaaacaccaccaaaacctgccanccggtgcgattggtgcttct

SEQ ID NO: 721613 - DNA, 466 bp, Homo sapiens
  misc_feature (6)..(6): n is a, c, g, or t
  misc_feature (79)..(79): n is a, c, g, or t
aaattngccaacccggccaaacctacgggaccttttccccttaggggaaggggaatatagacgcttgttaggatcaaanggaacacatataaatgttggacaatgttttttcctaatttcccaaatgtttttctgagtagcctaagtgactgttcacccagagttttagacatttcccttctcctattgacagcattaattagagccaacacactaaaattctaaaaagtcatggaaacctctgaagggccatttatcttcccacatctctcccacattgccccatctcgcaaaggcatgcaattactaaagagaagaactgggtgaaagagttggatggattgttcaaatccatcactatgactgaaaaacaactcaaactagccaatggattgtttctcctccctaaaggaaggtatcatgctcactcaactctcccatcctggattcctggttcttccattat

SEQ ID NO: 721614 - DNA, 90 bp, Homo sapiens
ccaagacagagacagaggcgccctgggtggtggaaggcagccgccgtcccgaagttggcccccacgtgggaaggtggagttcggaattat

SEQ ID NO: 721615 - DNA, 402 bp, Homo sapiens
  misc_feature (398)..(398): n is a, c, g, or t
aaaaaattaaaactaggactattgtggcttcactggggatggttctcaggcctcggactactcaatttactcatgggtttgtggcatctgcagctccagaggacacaagtctcacacttaggccaaaacccgttttcagatggaaaaacatggacccaggagggatgtggggtttacgggctggaaccctggactctggccactctagcagggttctctcttggcatgggctttttgctccaatgataggtttgagataaagaagggtcctggtggctctcctgggagtgacctgttggagaagtgccacccacttaattccatctatatgcctttaggccatttctggttggcctccaattttatttatttatttattgtggacacggattctcccntgtt

SEQ ID NO: 721616 - DNA, 377 bp, Homo sapiens
tgatgtaatacttgtaaaatttccttaacattactgtacaacaatgacaattatgctattgcgacaatagtggcatttcaggttactcttcataactatggtcagcgttatagttagatataataataaccatagacacattcttcccactaatttagttagcgcacatggtcagttctagtcgcagcagtcaaaagaccaaatagttctaatcccttctaattggtactatgtttctccgacttaaagataagagatataaagtactactaatagcagcaaatcatagaacagctttcgagaaacgcttaatttctatatacaggcatcagctcaatattagaggacttttctttcccattctaaatgagtccttt

SEQ ID NO: 721617 - DNA, 163 bp, Homo sapiens
atcgctcgagcacggttgcatcctcgaatgagaccatgatggtttcaagctttagatctaagcagccacttgggctcagtattgctgaggagaatcaaagccgaagataaacttacctgtataaactgtcctgcataccttgtgcagatagggtaccgagctc

SEQ ID NO: 721618 - DNA, 1295 bp, Homo sapiens
gaatcaggctggccatcgaactcccgacgtcaggtgatccggccgtctcggcctcccaaatcggtgcgattacagtgcgtgagccaacgcgccacggccaggagagcaagtcttgacggagtcctccactgcagggagcgggcgcgttcatgaggagctgagagctgagagtccggagcatatgggcgtgacgcgtggagaccaaagaggctgtgtagagaacttccgcagtctgtcttgggcttgtgtgactgagcaatctgcgggcccaggtctcgacggggaaacatacggtctgatggtaccgcaaaggccccacatggagcccattgggcttgcccgggagaagccgagggtgagagtctccagataagtcgtctgaaggatgcacgctcgaacgttctcacctgacgcctggaatcatgaggcatggagatgacactccctcgccgacgggatgttccacaggagtctgttcatgagagcactgcttcttccagagggctcggagcggtagtacagtaaatatcccttggcaggggagaactgtgcatgggtcagacaatgtaccagggaaggtctagtaaccaatccgcttacctgttcaccggactggtgatcggcatagcagtgatgcctcgtatatctgatcaagacatttctggggcatggcgaggaacttcatgatagccttgggtcacataccctatagggaagaaagtgaagccgtgataggagactggctagacatctaagggtggaggtacccaactggaagaacagcggttgcagcaatcaccaaaagagggaatccaaggctaaagcactcgccagggcaagtcattcaccagagggccaagacagtcagagagaaataaaaccttcacacactaaaggggaagaggtagatcacgaccgtggtttcatagagctaagccacaccaacccagaagacagcacagtcgagccctaaggagtccgagtggtatccacataggggcttggacttgaaggggcattattggaataggccgtgaaaggaccacgacactaaatgtcctattggaaggcattccaggtttgggaagacgttccaaattcggaaaccatgatacggaaaagaacgattccccacgtgatgttacacgggtcatgaaactgtgtacagcaggttcacccttaccgtttcctgggagcacattcggagtctcagaagattcgtaggaacgcataagcgcagggagaccggctcaacgggatatcccttggtgcccccgaggtattatccccttgga

SEQ ID NO: 721619 - DNA, 248 bp, Homo sapiens
cgagaagacagaaggccccggcttgggcttatgcatgtcctacccttgaccccagcatcaaggggcccctcaaaggccctctctggggcctatggggctcagcacagctttcatcatggatctaagcccctgtctttcccacctgactgtgagtggatcttctgggggatggcccctgtggggaggagcttccatgccgcccgcctgctcacggcagaaggttgctattaaaatgacataggtctgca

SEQ ID NO: 721620 - DNA, 253 bp, Homo sapiens
gctgacttagaggatcccatgatattctggtcacatgctttatgcccatggaagcctcgttgtctgggggcccttgtacaggagctcgcagtggtacttctgggcctgtcacaggggatgtggcaggtggatggtgatcatctgcaacaacgcgtctccgccacccacccagctgccccatcaccgccttcaccaggcgcttgcctctctttgtccttgtcttcgcctgtcccagttggatgtccagtttctc

SEQ ID NO: 721621 - DNA, 107 bp, Homo sapiens
ggatccccctcgtccagtcatcatgaatctaaagtgcggggtggacatcggcaggtcaactggtatagctgcaggtcgttggtgtcacacagataaacttgtgtctt

SEQ ID NO: 721622 - DNA, 317 bp, Homo sapiens
  misc_feature (9)..(9): n is a, c, g, or t
tcttgtatnttatcttcccagacttccaatttatgtatagaaaaatgtgactattatagagtcttgtgaaccataatccaagtgtcaactcccaatcagtataacatttcagaaatttctttccattctcactaagcccagagaactaatctggcagacctattaggtcctggtactttattttttttagggaaaaagtctcactctgtccaccccagcttgaatttgcagtggttttatcttcggtcaatggaacctcttaatcctgggctcaaggaatccttccaacttcaggctccccaagttaccttgactac

SEQ ID NO: 721623 - DNA, 123 bp, Homo sapiens
tctgggcaacctacaaactaatatcgtttatgtcttggggtcggtgttggagatgccccaaggtttatacatagtaggggcggtagtttgactcgtcctacaccaggtcatggacaaatactg

SEQ ID NO: 721624 - DNA, 888 bp, Homo sapiens
ggagagagagaactagtctcgagttttgtttatttttttttcaggtaaacgggtcctttattagcaggggtccaccggttgggcataacgggttcccagtaaataggcttggagttgcttgggggtgacagagccaggcgcaggtgcaggcgcaggccagcatctctcacttcttccactcgttcttttcgtagtcccacttggaggcctaagcccgggatggggttcaccttaatgtccagcatcctctgggtctgctgtggccacccactcttggtcaaagcttggcggggatgggggccagtacacatagtggcttctggccacttggatacccagagcggcggtagaaaccggatggaaagaacatgggcacctgcccaagaaccggttcttccacctcgtcagagccccgtgttcatctcacgcaaagctactccttgaaactgtaagtgcgaatacaactgcgaatttttctcatccagtggagaaggctgctccagagaggccttgctccttactccttagagggccttacgggctggcaaacaggtcgcttgacaatggggccacctccggcaaggggtgggtccacgcggatccatataagctggggagcgaaaagtctacgctacttacacaacactttcatgagcttggtacccattctaatcgcaagggcattcctaaatggcttaccgaacgaaaaattctaggctatatacaagtagcaaaggcccaatgttgtaggcccctaggggctagtaaaacccttgagttgaggccataaaagtcttcaccagagagcccttaaaaccggcaaatttacaatacagcctttagatcacgggccagacttagacttaacatagtcttctaatatgaacc

SEQ ID NO: 721625 - DNA, 810 bp, Homo sapiens
ggagaattcggccagccagatctcacagcgttgagcagcagctgagcgccaaaaacagcacactcaaacaactggaagaaaaactcaaaggccaggctgactatgaagaggtgaagaaagagctgaacattctgaagtccatggagtttgcaccatccgagggcgctgggacacaggatgcggccaagcccctggaggtgctgttgctggagaagaaccgctcgctgcagtccgagaacgccgcgctgcgcatctccaaacaagacgaaccctgaagccgcaacgcgtgcggagctgcaagtccgtatcactgaggctgggcacagcacgagcagagagagcgatcgcccgcggagcaggactgagcatcatcagtccatccagcggccgagccgagggtgccgctgagcaccgctggcagaagatccagagcccatcaaagaggcactgcctatctacggacctgagcaccagccagggtgccctcccagagggcagggatcacgcttccatcatctccagcagagggacgtccgtgccgaaccagactgaggcgagaacgctgccagacacctcaggcctgaaggagctgacagctgcgcgcgacagtcagctcttgaagataagtcctgcgagtacctgcgggcagggcaggatgacagagtgggtactgtccatagagaggcctgactttctcttacaaggagggaaagaatactagtgagtctggaagcactagatggggttgtttctcaaagaggggacatggttttaaagttcttgctgttctgggttaaatgttagaactga

SEQ ID NO: 721626 - DNA, 507 bp, Homo sapiens
  misc_feature (20)..(20): n is a, c, g, or t
cgccaatctgttccaggagnagaaagtggacctgtctaagccactggtggccacgtgtggctctggcgtcacagcctggccacgtggcactagggccctacctctgcgacaagccagacgtgcccatctacgatggctcctgggtggagtggtacatgcgcgcccggcccgaggatgtcatctcagagggccggggaaagacccactgaagctgggcaggacacaggcgagctcaggtgatgccggccaccagcaatgcctggcctggtacgtccgcttctgctttcaccaagagagtgtttcttcactcaactcaggtggcatttggggtgacatctcaaaggccaggaattccgttgacttgttggctgccagtaggggcgggaggaaaggcggaggcgagccctggaggagggaggccacaactccgagctgcccaactggtgctgagctgggccccgcctcctttctgtattattttaaaggaaataaaataaccaagtgata

SEQ ID NO: 721627 - DNA, 1133 bp, Homo sapiens
  misc_feature (1133)..(1133): n is a, c, g, or t
gcagttcctgcgtgtggggatgctgcagtgaggcgctggtgtccgggagcagccctggcccctgcggacttccgagtgcctgtgaaaacccctgcgctgcgtgccttcccagtgccccctgaggcctgttctgcctgttaccctgaagccctgactgcggggaacgacgtccgagcgaccaaatgctggactgttctcaggattcctgttattctgttctgggaggccaccggagagactgcctcctgtggtgttctaggaacgctcccccgtgcgtgctgcccaggtccctggcgttcagttctgtgggcgtcgcctccgatatagccccagctccgtggttgcaccggcgtctgtctggcggaggcctgcgaaccgcggtccttgtgcgctgcatcccgatagactccggttgtgccgggaacttcaccgaagttgccctggccgccgagacagcttcaaatgggcacctttaactctttgacaggctctaccggctcccccgtgtgaccgtgacatgttcacgtgccggcacattactgggtggacaccccagggatacgaaagtcgaatcgcagaccggacacgcgtcgcacgcactgcccccttggggggcccttccggtgctggaactgatggctctctctgtacgagacatgcgggctggcccacccaagcgggcctggactcctatttaccaagttaccacacccgcggctatggtcgctactgccgcatcggtcgttcagcattttatctggtgacggaaatagtagagtgcgtgcccctatgggcacagacaaatgcgccccccatctacgtgagaaacgtgcccgaaacgcccatacacccccgctttattcgagcgacgtccgcccatatatggtgacataagcgcagcacaaacaccgttttggcgcacatttggtttccggccagttcactttgagtggaggccgacgggcagcttggtatacaatggagaagcgtaatcagaaccaccgatttacggctacctacaacgtactgtggggcattgtgacacaccttcggtgaggtcaccccacattaggctgaagacacgccatccctattggaaacagtaacaccatactttatgaaagcacgccgan

SEQ ID NO: 721628 - DNA, 252 bp, Homo sapiens
tagaggatacataatcaacataaaattgtcgtgacaatggttaggcgtcaaaaatactaaacatatttgctggcataaataccgcttttgccatattcaggaaatcttcctggttgggtgattgccagatattgcttcgcaaataattacaaaagtggatagatactaccagtgacgcgaattaggaagtctaacaaattgtgcagtagatggcggaagcccaaccaattaagggcttttaaagcccaataa

SEQ ID NO: 721629 - DNA, 421 bp, Homo sapiens
  misc_feature (66)..(66): n is a, c, g, or t
aacgatggtctcaggctcacttgatctgcaagtgagctgagagaacaaagtagaaaccataacctntggccgggcatggtggctcacgcctgtagtcccagcacttttggaggctgaggcagttggatcacctgaagtcaggagttcaagaccagcctggccaacatggtaaaaccccatctctactaaaaaatacaaaaaaaaaattagccgggtgtggtggtgggcacctgtaatcctagctgctcgggaggctgaggcaggggaatcacttgaaccagggaggcggaggttgcagtgagccgagatcgcgccactgcactccagcttgggcaacaagagtgaaactctgtctcaacaacaacaacaaaaaaacgtgtaaccttttttatgacccagcctcagaagctgaggaccatcg

SEQ ID NO: 721630 - DNA, 1101 bp, Homo sapiens
catgatgagtatctcttcaagactcacttgggcaactaccaattcttaggaattgggaagaatttcacacacacagcacacacaacacacagcacacacacacacacacaacactcactcctcattttcactacgtggaacgttaataaagaaatctgatcaagtaaccagtccagaagatgacaatacgtacctgttgcctctggagcaagcagatctctgaaaaactgaaaaatgcaaaagccagtttttcccaaagtgacaactgtgtcacatatctatgatgtgtgtgtgtattccagtaaaactactaggtagttggaagagtaggtaggatggattttactcacagaacatggtttgccaacccctgctctacaccacaagccccactctagatttaagaaatgatctctagatcttactggtggccaatgactagctttgtgtgacaggtagaaaaagtacctgaacgttgctattatatataacgtgctctcagtgaaaattagagtatataaactagtcgattatgagaactctagtttccatagatgtctaaaagtttcgctttccctaaatggctggtttaaaaaattatcgggttattctagtagttgtcagggataatcgtcaaaaacagtggatctaggcctaatggtagaggcacatgtacaattatctacccagttctacggtctgctgtctaggagccaggacttggagtcagacaccttagaatgtacctgatcgcctcaacgagaacgacgaagggacgaccgggcgtggacacccattggggagaaagacgaaccccataagctgagacccaaaggagccacgccaaaggcataaagagacaagcgatggcacagacataggaaaaaactccgacacacaaggaaaaatccccatgtaggccaccaaatatgggtggcacccccccgtttacagacacacgaaggaggggtagcgcaccacattaagaaccagtgatccatggagaaaatgaatctaagacaacatcaaccgacaaacgacgcaacacacaagcacagacgagagggccacacccagccacacatcaacatgaagcgaaga

SEQ ID NO: 721631 - DNA, 81 bp, Homo sapiens
  misc_feature (15)..(15): n is a, c, g, or t
gtgacccggggccanagcgggacctatggctgcagagttgaggattacgacgtcgcagatgacgtgcagctctccaagacg

SEQ ID NO: 721632 - DNA, 150 bp, Homo sapiens
ctgtatcggggagctgtatcccggggaggaaaccaagttgacaagaactcaaagtgccttttctccggtctccttcagccccctgttcacaggtgaaactgtgtcgcttgtggatgtggacatttctcagcggggcctgacctctccaca

SEQ ID NO: 721633 - DNA, 171 bp, Homo sapiens
agctttgttactgcttcggatgcccaggaaggaggtctgcctgggggggctgcggtccaacggccggttgaggctgcagaaccagccagcggaagaggcgctcgtagtgtggccttgtgccagtgcctccagctgcgaagtcagccatgttccttacgtctgggctttctg

SEQ ID NO: 721634 - DNA, 1283 bp, Homo sapiens
agtcttggttgaggcgtgtgtgtgtgctgcgtgagcggcgtcgttcttgttctctctcctctttctcttcatctgagtttctgtgctagctggacgcgagctagcgctgtccctgacctagtgctgtgtagttctagactcgcctgtgtgtgtcggcgggcttcgcttctctctgccgctctctgctcatacctgtcttcgtttctctcctgtcttgctctctgcttcgtctccttctagcttgctttcgtcttgtctgctgttcgtcggttggctgtgtcttgtgtcctctgctacgcctctggcttctgccgagcgcttcgtacagctctcgacgctactcgtcttctgctccgcttttgtcgctgcgacgcatccactcgtcggcgtgtacaaggagctgtgtggctgtctctgtcctttgtttcttccttgtttgtggttcttctcgttgtctcttcttcgtcttctggtttcggtgtctgtgtaggtgtagtgctggtgtggtgctccgctcttctttggtcggctatctcgcgtctcggctcttcgcgctctactctgcttcctctttactctgcttcactcagctctcgcgctgctacacgtcttgtcgcttctcacgtcttctacactgcttcactgtcgctctctctgttcagctatgtgtgtcgcgtatctatatcttctgctctgcttcgcgtctgctgctgctctctgcttctctctactctacttctcgcgtctgcgcaacgctactacgtgacgctactgctccgcactctctctccactacacgcctgctctctcctttccttcccttctgaattgtttgtgtgtggtcgtattttctgtttttgttttttttgatggtcgtgtgtggttctctgtctctggtctctctctctctctctctctccgcgacactctctctctctctctctcgctcctctccttcacgctggagtcgagagcctctttctctgcctgcgctcggtgtgttcgttgttgttgtgtgttgttgtttgtggtgtgtgtgttttttttctgtcctcctcttcttctgccttgcctccctcctccccctgctgacgtctctcctctcctcctcctcgctcctcttcttctctccttctttggggtggctgccttattttataaaataaaaatataaataaataataaaataaatatataataataataaaataatataaatatatataataatataatatatataatagaaataataataataaataataataaataaaaaaatt

SEQ ID NO: 721635 - DNA, 175 bp, Homo sapiens
  misc_feature (74)..(74): n is a, c, g, or t
ctcagataaacatgctgaagctataaacatgtccacggccaaataactgacaagaagaaggccaaggcatctanaaaccatggcttgggggtcacagttgatcatatttttctatcacctttgataaggcataaaatattattttgatgagtaaataaaaagactttggacacct

SEQ ID NO: 721636 - DNA, 811 bp, Homo sapiens
  misc_feature (100)..(100): n is a, c, g, or t
  misc_feature (143)..(144): n is a, c, g, or t
  misc_feature (152)..(152): n is a, c, g, or t
  misc_feature (160)..(160): n is a, c, g, or t
  misc_feature (174)..(174): n is a, c, g, or t
  misc_feature (192)..(195): n is a, c, g, or t
  misc_feature (210)..(210): n is a, c, g, or t
  misc_feature (217)..(217): n is a, c, g, or t
  misc_feature (224)..(224): n is a, c, g, or t
  misc_feature (227)..(227): n is a, c, g, or t
  misc_feature (229)..(229): n is a, c, g, or t
  misc_feature (252)..(252): n is a, c, g, or t
  misc_feature (259)..(259): n is a, c, g, or t
  misc_feature (275)..(275): n is a, c, g, or t
  misc_feature (280)..(280): n is a, c, g, or t
  misc_feature (289)..(291): n is a, c, g, or t
  misc_feature (295)..(296): n is a, c, g, or t
  misc_feature (300)..(300): n is a, c, g, or t
  misc_feature (308)..(308): n is a, c, g, or t
  misc_feature (334)..(334): n is a, c, g, or t
  misc_feature (340)..(340): n is a, c, g, or t
  misc_feature (344)..(344): n is a, c, g, or t
  misc_feature (357)..(357): n is a, c, g, or t
  misc_feature (361)..(361): n is a, c, g, or t
  misc_feature (366)..(366): n is a, c, g, or t
  misc_feature (368)..(368): n is a, c, g, or t
  misc_feature (376)..(376): n is a, c, g, or t
  misc_feature (379)..(380): n is a, c, g, or t
  misc_feature (384)..(387): n is a, c, g, or t
  misc_feature (399)..(400): n is a, c, g, or t
  misc_feature (404)..(404): n is a, c, g, or t
  misc_feature (444)..(444): n is a, c, g, or t
  misc_feature (499)..(499): n is a, c, g, or t
  misc_feature (549)..(549): n is a, c, g, or t
  misc_feature (555)..(555): n is a, c, g, or t
  misc_feature (582)..(582): n is a, c, g, or t
  misc_feature (585)..(585): n is a, c, g, or t
  misc_feature (593)..(593): n is a, c, g, or t
  misc_feature (595)..(595): n is a, c, g, or t
  misc_feature (600)..(600): n is a, c, g, or t
  misc_feature (602)..(603): n is a, c, g, or t
  misc_feature (605)..(605): n is a, c, g, or t
  misc_feature (607)..(607): n is a, c, g, or t
  misc_feature (618)..(618): n is a, c, g, or t
  misc_feature (625)..(625): n is a, c, g, or t
  misc_feature (629)..(629): n is a, c, g, or t
  misc_feature (662)..(662): n is a, c, g, or t
  misc_feature (665)..(665): n is a, c, g, or t
  misc_feature (707)..(707): n is a, c, g, or t
  misc_feature (762)..(762): n is a, c, g, or t
gatatatatatatatttacatatatatacagtcttgctgttttcatgtgcactatatttagcagcacattatttaatcaggcggcattttaatggggttnttttgacacttggcattattaagatacaactatagccccgccnnaatttcancgtttganttccacttctccgncttttaatagtagctaannnnggggggggggggggntggggtnccaaggntgngnattaggttaaacacaagaatttnaaagggncaaggtagcaaagggnagggnaaataattnnnattnnaggntatctganaaacaacccagagaaacagttagttnccttcntttngggctatgggctntgtnccctngntgctcacntcnncctnnnntgtccttttccnntccngttcttgtgttgttcctgtggttctgccctctccgttcantccctccacccgataaatttgctaccaccaaaatctagagctatagagccttgtngcaaattgggtagctaaatagttgttccttggtctaccttcccacaagtnttttgngggcccaatgttgggtagggaagtganaanactgttcncngcaantnnangnttttttttttntggcttngttncacaaagtgaattgcatcgagttactgtcaaanganaagctgcgggttgtttcatctgtcgtctaaccggccctgcgntttaacccggccctctgagggcaaattgctgctgaaaacattatcatcatctttnttttcttcaccatttttctccacaggaacccattctccataaacactat

SEQ ID NO: 721637 - DNA, 1701 bp, Homo sapiens
  misc_feature (1114)..(1114): n is a, c, g, or t
  misc_feature (1119)..(1119): n is a, c, g, or t
  misc_feature (1468)..(1468): n is a, c, g, or t
  misc_feature (1482)..(1482): n is a, c, g, or t
ctgtccattacagataacagttcatcctcagacattgtggagagctcaacttcttatattaaaatctcaaactcttcacactcagagtattcctccttttctcatgctcagactgagagaagtaacatctcatcctatgacggggaatatgctcagccttctactgagtcgccagttctgcatacatccaaccttccgtcctacacacccaccattaatatgccgaacacttcggttgttctggacactgatgctgagtttgttagtgactcctcctcctcctcttcctcctcctcctcttcttgttcttcagggcctcctttgcctctgccctctgtgtcacaatcccaccatttattttcatcaattttaccatcaaccagggcctctgtgcatctactaaagtctacctctgatgcatccacaccatggtcttcctcaccatcacctttaccagtatccttaacgacatctacatctgccccactttctgtctcacaaacaaccttgccacagtcatcttctacccctgtcctgcccagggcaagggagactcctgtgacttcatttcagacatcaacaatgacatcattcatgacaatgctccatagtagtcaaactgcagaccttaagagccagagcaccccacaccaagagaaagtcattacagaatcaaagtcaccaagcctggtgtctctgcccacagagtccaccaaagctgtaacaacaaactctcctttgcctccatccttaacagagtcctccacagagcaaacccttccagccacaagcaccaacttagcacaaatgtctccaactttcacaactaccattctgaagacctctcagcctcttatgaccactcctggcaccctgtcaagcacagcatctctggtcactggccctatagccgtacagactacagctggaaaacagctctcgctgacccatcctgaaatactagttcctcaaatctcaacagaaggtggcatcagcacagaaaggaaccgagtgattgtggatgctaccactggattgatccctttgaccagtgtacccacatcagcaaaagaaatgaccacaaagcttggcgttacagcagagtacagcccgnttcangttccctcggaacatctccttctccccaaaccacagttgtttccacggctgaagacttggctcccaaatctgccacctttgctgttcagagcagcacacagtcaccaacaacagtgtcctcttcagcctcagtcaacagctgtgctgtgaacccttgtcttcacaatggcgaatgcgtcgcagacaacaccagccgtggctaccactgcaggtgcccgccttcctggcaaggggatgattgcagtgtggatgtgaatgagtgcctgtcgaacccctgcccatccacagccacgtgcaacaatactcagggatcctttatctgcaaatgcccggttgggtaccagttggnaaaagggatatgcnatttgggtaagagacttagtctatttcggactttattccgtaccacaatatattttacaaggtaacatttgttatttttcttcctaaccaaaatcagtatttgtccaaggtataaacttaaggaatatagaaaaaagtggaagctattgtccattattctgatacttggagatagaacaccctactttgcattatgtttttgatgtgcacctcgtgccg

SEQ ID NO: 721638 - DNA, 265 bp, Homo sapiens
ccaattagcaacaacttgtcagattctttccaataagccacatgaatttgttttccatttaaaaggagggatgaactaagaaacaatatattcaaaataaggttagaatacctttaaatgtcataaaattataagtataattcataaaagattgcatatggtatgatttaagaactacatacttaataagtgatttcttttcatattcctgtcacataaaaaacgcaaggaattatatgacagcaaaaatatactccaacatatt

SEQ ID NO: 721639 - DNA, 437 bp, Homo sapiens
cctgagtatgagtaattacaccagagcatagaaaccagcaggagcagcggccgccacgcacacacagcaccgacaacaccacgcaataaaggagaggcccgcagggacagcagcggaaacacacaagagagcaccacagaaactcggaacacacaggcgcaagagagacaaagagagcgtataaaacaccaaaactacaagccacaagaacaacaacgcacacacaacaccacaacagccccgaggaagaaggcgaagatacacgaaccagacacaagacaaaggcacacaaagccaacaccctacggaggcgggagacacaagagccaagcgacacacaaagactgcccccggcaaacaacaggcaaaagacggacgaacaaagaacgatgacaacgaaagaaccgaaaccaaaaggcacagacaaaaacaagcca

SEQ ID NO: 721640 - DNA, 633 bp, Homo sapiens
gatccctgtggtaccaggcaggaatggcctgctaggggacccagcgagctcccaggcctttctgctgcttcgtgtaccactgtatttctcttggctctctaaacttgactcagctttaggtaaaatcagaaacttctcccacgaacagaccttcagcctctccagtgggagtgtgtttgggagaggaggctctccctttcccacttccgtagttggggcactcacagtacttgaggtgtctcctgggtcctccgggagcagtccgcttccttcagagggtctgtgggtcctctcgggattgctgatttgttcttgcagtcaatctggagctaaaatttacaatgaaaagttttcattagaatgaagtgaattaaactgcaacatatcagtatgagttatttgcttattcaaagccaataatttcctcctttgtgaattgattgattgatttaaattaaattctctttttaaagattcccttgcaattattttacttcctattggaaggcagaaaaggaaaacataggttgtcttggtggtctctccttattgaactatgaaccttatcagtgggcaagcctccatagaagcaataacctatttcactccttaaagaaattcaacataatacaa

SEQ ID NO: 721641 - DNA, 297 bp, Homo sapiens
aaaacttcttgaccgaatgctaatttttccttgtgttgccgaggaacaagcattctatttctgaataaacattttacatataacaataagcaaaacccactgtcctggctggtgccactatgttgcctgcctccagctgaggtcactccttttgctctctgccagacttgcaatcacaaggtggagaagctgtagctgctggaagtcattttgctgccttggagagagacacttttggagaatggggcccagccagagaagctagtccctgctggcatttgagcctctgcctcagca

SEQ ID NO: 721642 - DNA, 578 bp, Homo sapiens
gatccctgtggtaccaggcaggaatggcctgctaggggacccagcgagctcccaggcctttctgctgcttcgtgtaccactgtatttctcttggctctctaaacttgactcagctttaggtaaaatcagaaacttctcccacgaacagaccttcagcctctccagtgggagtgtgtttgggagaggaggctctccctttcccacttccgtagttggggcactcacagtacttgaggtgtctcctgggtcctccgggagcagtccgcttccttcagagggtctgtgggtcctctcgggattgctgatttgttcttgcagtcaatctggagctaaaatttacaatgttgcttattcaaagccaataatttcctcctttgtgaattgattgattgatttaaattaaattctctttttaaagattcccttgcaattattttacttcctattggaaggcagaaaaggaaaacataggttgtcttggtggtctctccttattgaactatgaaccttatcagtgggcaagcctccatagaagcaataacctatttcactccttaaagaaattcaacataatacaa

SEQ ID NO: 721643 - DNA, 334 bp, Homo sapiens
atattctccccatattacctcaggtgccaacccaacaattggctggagttttttcttaccaaaaaaaaagtctaccagaggaattagcatccagcagcagcactcagacctgccagccactgtcaccgagcgggtgcaagcactcggggtccctggagggcaagccctgcccacagaaagccaggagcagccctggcctccatcagccctgatagacgcaccgcctgaaggcacagttaaccacttcgcacacacccatgtaaccactgcactttccaatgccacagacaactcacattgttcaactcccttctcggggtgggacagacgagac

SEQ ID NO: 721644 - DNA, 898 bp, Homo sapiens
gagggcggggattgcgagtctcacaccctgagactccggatgctccttatcctaagtccacatggctgccggcatctgtgggaaaagtgtgtgctgggtcttcgaggagccgcaccaatggcttccgtgctgtcctacgaatagcctggtccacgccgtggccggagtccgtgggaagcgtgacagcaatgacaggtgttttattcccctggatacagcctagacttcgaccttcaggttgatgacgaacaagaaaatccgaataactacacacgatggtgctccatggagatcattaagagaagaaggactccttggcacgcataatacgagggttggtttgccatgtgatttccagtcgtcatgctagctcgccattgtgggtctaatttcgtacaagcatctttaatcagcctacaaatgcactctagggtctagaaggtcaacattcctacccacttgatacaagatctaggtagttgcggtatccgtaaggtacggcagggtgggttctaatgtggtgactgggacgttaaaacaaagcgtcccaacatccttgagggttgggtgaatgacagaccaagtaaccgtgcaaggccatatcctacaggggccaaggctccatatacctgttatacagaggcaataacgttggtcaccccggaacccaaattgtgggattaagggcccacaatgtcgaaaagaagccgttaaagccagtgaacaagcgggggtttaagtttcccaaccttctggaggaattggcccgttagtgtgtgtgacaaattcccggagctgaacgttcccacattatccggacccggcgaacttgggtgcacaggggggaaaacattcccttcggagggcctattctgtgactggtggtgaccattggtcg

SEQ ID NO: 721645 - DNA, 447 bp, Homo sapiens
cacgaggtgaagcattctttttgcaacatacttactttcctgttttcttggagtggaaattatgaagaaaaaacccaaagagatacctaaagagcttaccagtcagggaacaatatattgctgtatttgtgactagtcagtgtaaaataccttgattcattttgatgtaaggaaggagaggttgttggcttctggtgtagcccttttgcagtggattttaagaagcatttgtctgtggttgtaactttttttttttttttttggagacggagtcttgctctgtcgcccaggctggagtgcagtggcacgatctcggctcactgcagcctccacctcgcgggttcaagccattcccctgcctcagcctcccaagtagctgagattacaagcccccgccaccacgcccagctaatttttgtatttttagtacaaacggggtttcaccaa

SEQ ID NO: 721646 - DNA, 145 bp, Homo sapiens
cgagctggtaccctcgatagggcaattgggtgtaggagtcagttatatgtttgggatttattagagtacgtgggtgttgagcttgaacgctttcttaagttggtggctgcttttaggcctactatgggtgtctggccttatcgag

SEQ ID NO: 721647 - DNA, 969 bp, Homo sapiens
  misc_feature (706)..(706): n is a, c, g, or t
agcggataggtcagggttccgggggtcgcgatgggctgctagcgggaggcccgcggtggctgcgctcctgacggcggcccccgcgatgtaagagatctaggggaacccgagagagtccagtaggttaatcgacacgagcgtcggtgagacgagtgggccatgcacatgctgctcgaggctctcgcgcaaatattcgagtttctatgacaggcagacttcgtgctgttatgacccggctgctgggctacgtggaccccctggatcccagtgcttagtggctggcgtcatcaccagtcatcttcaatccgctctactggaatgtggttgcacgactgggaacagaagacccgcgaagctgagtcgagggccttcggatccccgctacctggcctgtctactctctaagcatcaccatcctgctccatgaagcgttccgtagtcgcatcgacatctgctatcactgctagtgcctatgctgagccagtcgccaggcatggagagccgtggacactcccacgtctgggcctacatgagctgggtcctcgtcgctcctaggacgtgggcgtcgtgctcgtgctctccagtgttctttgcactggggttcgctggaactttcctaggtgattacttcgggattcctcaaggaggcgagagtgaccgtgtccccttcaacatcctggacaacccatgtactggggaagcacangcaatacctgggctggccatcatgcacgccagcccacgggcctgctcctgacggtgctggtggcctcaactacattatggctctctataagaaagagcccttaacggtgagaatctaccggcagaaagctccgggtcccacaagaggagctgattgagctgcaacagtttggtgaagcctggacaagctcctggctggccaagtggaggcctggccagggagattggggcctgcggtccaaggtcgcccggggtgggtgccag

SEQ ID NO: 721648 - DNA, 208 bp, Homo sapiens
ttttttccccccccctaaggccttttttgaatttaaaaggggaaaatctttttgggtccaaattttccccctttatatgggcctagttttaaatgggttttctataaattttttagccctttttttctggcccccgtagtttaactagatttttttacctttgttttttttttaaataaaccccaaaatttgttaaatccaagggtta

SEQ ID NO: 721649 - DNA, 998 bp, Homo sapiens
gcttgaaccggcttcgtatgctgccgtgtcgtctccgagaaagtactccgcccccggagatgagatctttcgctgtcctgcttggctctcccatagatgctctcgtgcatggtggatgccgctaccctaggggattaggcgatctccaatccgggtagaactctccatctttcctgcggattccacacggcttggctctcccaatgcacatcagtagtgcgcgcatcgtcgcatcgggcccagctcatccaccgggtggtccgggaacgcgtccggttgtgtcggcctgatggacctatggtagtccgaccccacgctcatggggggtcgttcgttcggatgggtgacgcgcctgtgctataaggtcgtcgggggtccatcgcgggcgggtatcgccgcagttgttgttttgattgagccccaacgactccaagtgaatagcacatgggaacctaacgcgacggtggggtactacaccacttgggggattaccatacgttagcgtaaggaacgtgcctctctatgcacgctattcgtaaacacccccggggactttccttgtggtaatcatggcggcatgttatgacggcatttccagtcagctctggaacgtaacgtgtctggcatggttgtccgcggtaattgtccaaactcatgaaggctttgtgcttccccttctgcaggcctaagaagtcgccaatcttgattcgtggtatccacggtctggcgccgggtgttggtctaggaagttgggccttgggcgtgcaagaagcttgacgctccagggtcctcgttaccggggggcttggaccggcttctattggcccattggttcaggggtctggggcacgtttccagggttccacgtttgggctccctgagttttccttaaggcaacgagccggtggtgtttcatgtggtaccccccttcttgtgggtctggcacctgtggagcccccttttcgccaccattttttttgttgccaattggcgccctt

SEQ ID NO: 721650 - DNA, 312 bp, Homo sapiens
caacttaagttttttcagtttttcaaggccgggccttgttcctgattcctcaaaaaattttgactctaaggcctattttattgtctgtctttgaatccctataaagcttcaagtctgtatgacatttttaacgcccaattatatattgttttgtactgttcctagctgggacatgtatattagtcttgtttccctcatgagaatgtaagctccttaagggcaggggccatgttttaatttttgtatcccccccagtgcctagcccagggcttggcccatgggggctgaataaaaacctttgttttttgatca

SEQ ID NO: 721651 - DNA, 235 bp, Homo sapiens
catgagctcatgaggggtcaacattttagagaaaccgccccgcgcaatcgatcaacttcattgcgccaggcgtgagaagatgagcgcccttattggagacctgccccggatgtacgaactcaaaccctgcgaccccactgcctatcgccaacagacccgccgtagcacgttgatcgtcgcggcgctgttcctggccttggccatgctgctgtcgagcctggcggtgatgctgttc

SEQ ID NO: 721652 - DNA, 134 bp, Homo sapiens
ggtttcagtagcacaccaaaaagaaataatatcttatgatgtaaaagatgctatgacacttctaaaactaggtatagaaacttctaaaacgggaagcaacgatgggtgatgctatggaaacttctaaaactagg

SEQ ID NO: 721653 - DNA, 655 bp, Homo sapiens
  misc_feature (632)..(632): n is a, c, g, or t
  misc_feature (642)..(642): n is a, c, g, or t
agcggggacccgagaagcagagagcgagagggggaagaggagcgtgcaagcggaaaagacgggcctcttcctccgactcccgagcgcgaggccctcattttgggttctcagcgaacggcggcagcggcggcggctggaacaatcactcggccaagggcgacagccaactgctgtgagtgcacggggagaggcccaggcagcggcggcggcggcggctctcgggttgcggtgaagaatgtcagccactagcgtggatcagagacctaaagggcaaggaaataaagtttcagtacaaaacggttcgattcatcaaaaagatgctgtaaatgatgatgattttgagccatacttaagtagccagacaaatcagagtaacagctatccaccaatgtcagatccatacatgcctagttactatgctccatccattggatttccatattctcttggggaagcagcgtggtccacagctggagaccagcctatgccatatctgacaacctatggacaaatgagtaatggagaacatcactatataccagatggtgtatttagtcaacctggggcattaggaaatacccctccatttcttggtcaacatggatttaacttttttcctggtaatgctgatntctctacatnggggacaagtgga

SEQ ID NO: 721654 - DNA, 583 bp, Homo sapiens
  misc_feature (560)..(560): n is a, c, g, or t
  misc_feature (570)..(570): n is a, c, g, or t
acaccacctgagtcgagggctggctcttcaaacaaaaataatactcattatacccccactctcatccctgaaagaaagccatataggttagtttgtaagaaatattttaagatgtgactactcatcagcaaatttttctgttgataaaactggatttgaaattttaattttgtttatctagaataggtacatcttttattttcatttacttaaaacttcttgattttaatctttcagatttcttttttgctcttttaagaggacatttcgctactgattgtgatattttgttttgcagagtaacagctatccaccaatgtcagatccatacatgcctagttactatgctccatccattggatttccatattctcttggggaagcagcgtggtccacagctggagaccagcctatgccatatctgacaacctatggacaaatgagtaatggagaacatcactatataccagatggtgtatttagtcaacctggggcattaggaaatacccctccatttcttggtcaacatggatttaacttttttcctggtaatgctgatntctctacatnggggacaagtgga

SEQ ID NO: 721655 - DNA, 572 bp, Homo sapiens
  misc_feature (549)..(549): n is a, c, g, or t
  misc_feature (559)..(559): n is a, c, g, or t
agcggggacccgagaagcagagagcgagagggggaagaggagcgtgcaagcggaaaagacgggcctcttcctccgactcccgagcgcgaggccctcattttgggttctcagcgaacggcggcagcggcggcggctggaacaatcactcggccaagggcgacagccaactgctgtgagtgcacggggagaggcccaggcagcggcggcggcggcggctctcgggttgcggtgaagaatgtcagccactagcgtggatcagagacctaaagggcaaggaaataaagcagagtaacagctatccaccaatgtcagatccatacatgcctagttactatgctccatccattggatttccatattctcttggggaagcagcgtggtccacagctggagaccagcctatgccatatctgacaacctatggacaaatgagtaatggagaacatcactatataccagatggtgtatttagtcaacctggggcattaggaaatacccctccatttcttggtcaacatggatttaacttttttcctggtaatgctgatntctctacatnggggacaagtgga

SEQ ID NO: 721656 - DNA, 773 bp, Homo sapiens
gggaagcagggtagcggagccatgggcggacgctcccagccctgaagagaagctgcaccgtatcacccggaacctgcaggaggttctgggggaagagaagctgaatggagatactgaaggagcgggagacttagaaatttacgtgggtgaactggcaaccacgggcaataccacatgtggcttactttgtgcccagtgtcgagagattgcagacttcttaaaggcagggtgtgaggtacactaattctgtttgcgtgacctccacgcatatcctggataacgatgaaatgcccctatgggaacttctagaactccgagtcagcttactatgagcaatgtgatcaatggcagatgctggtagagcgacgggtgtgcccttggagaagctcagagttcagtctaaaggcagctgattaccagctcagcagaagagtacacactagatgtgtacagactctcctccgtggtcacacagcgcggattccaagaatggctggagctgaggtggtagagcaggtggagcaccctttgctgagtggctcgttataccccggaggtgctggcttgggactgaaggagtctctcacacgtcgatgcccattttggaggcgtgatcagcagaaggactttcacctctgcgaggagtactcctgtcttgggtattccaacggtcctctggtgaaccatggttccggttaccgcggaagggccttgaggggtcccgtggcctggccgcggggctgtcccgaggttggcccctgggaggggggccc

SEQ ID NO: 721657 - DNA, 144 bp, Homo sapiens
  misc_feature (50)..(50): n is a, c, g, or t
cggtctagttggtggagcgatttgtctgattaattcttaccacgacgacnaatccggccggacacggaggtgattgtcgccagtaagagcgaggagcaccaaggccattcaaactcctccccacgacactctgaagcaaccacg

SEQ ID NO: 721658 - DNA, 616 bp, Homo sapiens
gcacgagccaagacctcatgaacaagagctgcgctgaggcggtcatgaatgcagcaatggctcataagcagacatgcattatctgatcgctgtagtacctgctcgtactgctcagctatgcgtatcgcctgcaggtactgatatgtgcctgtctatgcatgcactagctactggatacgtgttgactgtagagtcatcgtgtgaggataaggtagacagactaacttagaatatctagttgtgagacatcggcctccctatgtccgaatgtacgaacatcactctagatcttgcttgctgaagagacgaagggcatgaaagatgactacttgaccgatatgtttgaagacgctgcttaaggagtgagactatgacaggacgcagcgagggtcctctgactgcatgtacatgcgacaatgtaccttcccatgacacgagctagacatgtcacgaccgatgctagatattctacgtcagagtctgtatcagttctgagaggtgatgagaccttctacggcgtacgcgtagctgtatcagagttgcactagatgacagcagctggctacgatgaccgacgtctgatatcacctgatgacgtacgaccatcgactgactg

SEQ ID NO: 721659 - DNA, 151 bp, Homo sapiens
  misc_feature (18)..(18): n is a, c, g, or t
gtacggctgagcttgttncttataagaccgctttacttacgtcctttgtgccctataattacccgattccaaagtagaaaaagtagtttcccagcttttgtggtctttgtacacatgctgtcacaatgcagttcttcctttgtctctttat

SEQ ID NO: 721660 - DNA, 934 bp, Homo sapiens
gttagaatgcaggagggaggaacttacctctttctcccacctctagtctctctcctgcgctgtctggtgtatctagtccacatattatgtagtgcatatactatatgactgtacataatatatatgagatacagattccaatgtgcgtatacccaatcatacacatatgggtaattatcgagaaatcataagaagtggtaggtactaggagcattaacactcagtgtgtagtggttaacgtcccaagattcttggtgtctcacatcgaggatgatattatctatgagacggactagtttgccgagttgctcagtctaatctaccagagtaatcagaggcatgctgttggctacgaccgttcactagtgatgggcgccacactctcttgctcggtcgtttaccaaactgtgtaatattcatatgatccataatatgatcattatctcttgtgaagccaagaactcacttatttagaacatcgataggacgctgcgataaagcccgccttctaatccttatatacaagaaatctctatcatacatggttatggatgttatgcgagaccaatccttgataatccaggataattactactatcaggaagcactcaatcgaggctagtattgacgatatagcgacattgtgagcgatggtcgacgtcagaggttgtccaccctaccggatgtagccctccggcggcagtccgggtgtgcaggcattcaactccatgatgcctgtgccgtcgctctcgttcatcgtccgtgatcgtcgctcgttggataatgtcattggtcaactgttttcccatgtgggtctttaagtaccatacggggggttccggtgtataatatctccctggccggggcgcgggcggtttagctaccctcccggtttttttcccccagtttggcctttggttcgtttttcccggac

SEQ ID NO: 721661 - DNA, 814 bp, Homo sapiens
  misc_feature (752)..(752): n is a, c, g, or t
ctctatataaaggaaacgatttgagatcccagaaatgagacaatctatctgcaatggactaagattatatgtggtcagtcactctcgtgaaatcactcttgatatgatagtacttatcgatagcttagagaaaatggatggtttttagtatatatgacggtcttgcacactgatgtgctgtcatatagtactgtggggtgggtggtggagtgcccgattggttgatacaatggatatgcctatagaggggtagcgaaggtcaatggtgctatgaactgaatgtaaagtaaacattctgtgggacataatagtatttgtgcactgtaagtcatatgtaacagtataaacgccctttcacttctgttctaggcgttgaggcctatacaatgtatggtccgctatccttgttcctttgggttgcagcaaagaccatggtgtgatcgggcaactagctagaacagcttcgggcaaagggggacccctgccatgttggccatgtgaagacaaatgaggtcctcgagttcataatggcaaggtagagaaacaaattctggtcataactgaatagaaagcatgagttgttgcagcagcattcactggatttcttaggatgacgggggttccttgcaacgacttacttccctggtaaacgccaaggtcgtaccgaagaatgatgagggaacatggccctaaggggaaggaactctacttcccttggtgagactaggcatacactcgggctggaagttagncgccaaataggtgggacacgctaagactcaagccttcctagggtttcccaagtgttggtgag

SEQ ID NO: 721662 - DNA, 780 bp, Homo sapiens
  misc_feature (255)..(255): n is a, c, g, or t
  misc_feature (310)..(310): n is a, c, g, or t
  misc_feature (313)..(313): n is a, c, g, or t
  misc_feature (315)..(315): n is a, c, g, or t
  misc_feature (382)..(382): n is a, c, g, or t
  misc_feature (406)..(407): n is a, c, g, or t
  misc_feature (593)..(593): n is a, c, g, or t
  misc_feature (607)..(607): n is a, c, g, or t
  misc_feature (641)..(642): n is a, c, g, or t
  misc_feature (670)..(670): n is a, c, g, or t
  misc_feature (686)..(686): n is a, c, g, or t
  misc_feature (702)..(702): n is a, c, g, or t
  misc_feature (731)..(731): n is a, c, g, or t
  misc_feature (744)..(744): n is a, c, g, or t
ctgcagtcaggactctgggaccgcagggggctcccggagccctgactctgcgagccgaaccgtgcacggtttcgatggcgacccatggctatgcagaagctgagcgagtcattgttctactttcttctctcaccttcttagagatcacttactagaagatgataggactctgtggctgcgagcgggtgcagtctatacgctcgggtgctgtattgtgcggtcggtaattggcgtttatggcaggagctgtggctnctgtccgggtcggtagccccaatccccctccattagtcgtagtgtggaacgtttngangncgggccctcgaacttcctatggaaaaatcctaccaggagggttttaccatttcataagatttcttancaacgaggaaacttggaccttaannatcctaagaaagttaaaaaacctccgtgtgttggcccccccccaccaactataaggctctccgtggtctctcttggggtcggtctcgggggcttggctttttgacttggggggtggtcaaattctcctccccaaatgaggggtgctctttcccttattggccacaaaacgggatatccccaaggcnctggtcctcctganttggcacccacggcgggagaacacctgtcccctnnttgtctcacaccactcctgttggccgcncccttgtgtgctgagnaaaaaaccctttatanaccgggcttaacctctccaactgttagcnaccccaaattttntatgtgaaaagagcccatataatatccattaacctc

SEQ ID NO: 721663 - DNA, 525 bp, Homo sapiens
caccacggaacgtctgtctcatatcacgaacagcgaagcgacccaaaggtggatagtctgagaagctctcagacctcactaagcatccatgaaaaagtgatgtcagaggccaaacgtggtgacccacacctgtaattccagcattttgggaggttgaggctggtggttagcttgaacccaggctggtctggaactcctgggctcaagtgatcccaccactcaggctccagaagggctgagattacaggcatgagctactgctcccaaactagctgcctaattttttagtttttttgagacagagtctagtcctgtcgcccaggctggagtgaaatggcgtgatctgggttcactgcaacttctgcctccaagattcaagtgattctcatgccttagcctcccgaatggtgagaattacaggcgcccacaaccacgcccggctaatttcggtatttttagtagagatgagtcttggccatgttgtccaggctggcctcgaattcctgacctcaagttatccacccg

SEQ ID NO: 721664 - DNA, 134 bp, Homo sapiens
gctttaccacataccagtggataacaaggtcatattcccgaagaaggagccaattgaggatgatgtatttcagaaaatttgtccttgagcaagttcatagtgaccgatttagtcataatgatggtccgagcgga

SEQ ID NO: 721665 - DNA, 280 bp, Homo sapiens
ccaagggggagagatttaggtattttatttcccaaattctctggtccccgggttttgccccggggaaattttgagaaattcccaattttttcccagataaaacatgaaaagtttgccgttggttcccccccccccccccccctttttttagttttaatttatgggttaaactgagggcaccaacccatggggggggtcaaagagggtacaaatgtatgggggtatattgaatgctaaacatattactgaaagacccattttaataaagatttttgtcata

SEQ ID NO: 721666 - DNA, 180 bp, Homo sapiens
cgggggggggggggggggggcccccttttttttcccaaattcccggggggggaaaattttttttccccccttttgggggggccccccccaggggggggggggaggggtttttttttacccctttgggggccccacccccaaaaaaaagggacccctaaaaaaaagtttttttttttttta

SEQ ID NO: 721667 - DNA, 126 bp, Homo sapiens
ccgattccagagacaatggccccgatgggattggagcccgaaggcgttcattcgagaggtaacttggaattagatttttttacaagctttattgacatgaacctctcggagtcccttcttccgtgg

SEQ ID NO: 721668 - DNA, 392 bp, Homo sapiens
  misc_feature (2)..(2): n is a, c, g, or t
  misc_feature (313)..(313): n is a, c, g, or t
cngcctgctgagtaactgggactacatacgcccgcccgccaccaagcttatctaatttttgtattttttggcagagatggggtttcaccatgttgtgcaggctggtcttgaactgttgacctgaagtgatccacctgcctcagcctcccagagtgctgcgattacagacatgagccactgtgcccaaccttggtagttctgagatctttaaaaaatctccaaactgcttcccacaatggctaaccttatctacattcccaccatcagtgaacacgaattcccttttctctgtagccttgccagcaactgtttnttttattttaataggcattctgaggagcatgagagggtatctcattgtagtttcgatttgcatttctctgatgattagt

SEQ ID NO: 721669 - DNA, 542 bp, Homo sapiens
attgaccaggccggcctgcagagggagaaagatttcaggcccaagaaagttgcggcattgggatcccgtggcagtgcagccacttaagtggagaaggagacccagaggaagatgaccatcctccagacatacttccggcagaacagggatgaagtcttggccaccctcttggcttttgtttgtgacattcggccagaaatccatgaaaactcccgcataaatggatagaagagagaagcccctgtgctgtggagtggcattttagatgccctcccgaatatgaagcttagcccagctctagttacattcttatgatagggcctttaatttttttccaaatattaaataataggcccttcccctttttggagaggagcaaatctagcttttttggacagacttagaaattatctaaagatttcatctttttccctcaaattttttaggaatttaagggttaaatgttgtctttttttcctatgtcttttggcccaagcaacatgtaaatcagggttgactttttcttttttagatctagttta

SEQ ID NO: 721670 - DNA, 321 bp, Homo sapiens
tgtgtgtagtagcaagcatagggatcattttgcatgtggtaagccatttaccaagattgttgtaggtaagaagggcagattattagagaaattgtgaaaatatgttgcagtgggcagctcagcagagaaggggctacctgcaaagaggcaaggtgctggaggaaagttttatagggtcctggtgaagggtgctacgtgtgaaatgaggtcattgtgcccgcaggttgtttgtgattagctgtctctaacaattgttcatacaataattgttcattattgttctcaacttggggctctccccaacctggggacccttcctta

SEQ ID NO: 721671 - DNA, 272 bp, Homo sapiens
gagggtcgtgtgtgccgtctgtgtgtctgtgctgcgggcttgagtcttcttcttcgacgcatggccccaggctgtctactgcaggttcctgtgacaagtctgacgccacgcgccgccatcctacacatgatttgctctaaggcagtgcagcagtgtggtggtggctgtccatgtcccggccctcccgagctcttgtcttcttccctgctgctcttcacctacgctcctccacatgctcgtgggatctctagagtgactgagcatagctgact

SEQ ID NO: 721672 - DNA, 280 bp, Homo sapiens
gatcgagccggtacccctagtttagaagtttcaatagcatcatgccacgcactctagccggggcaacagagtcagacccatctcaaaaaaaaaaaaaatttatttgggagtcaagagaagacccaattatacccaagacaatcctaagcaaaaagaccaaggcggggggcttcaggctaccggatttcaaactatcctacagggctacagcagccaaaatagcaggctatggaaactcccaaaacaaggggggaccctcaaaagtcgaccggcgggcagg

SEQ ID NO: 721673 - DNA, 306 bp, Homo sapiens
atcagatatcctttctattattgattctaggtctttacataattacttaactctttcaaccaattgccaatcagaaaatctctgaatccacttatgaccttgaagcctgcactttgagttgttccaactcttcagaccgaagcaacgcgcatcttacatgtattgattgatgtctgattgaagcttctgtccccctaaaatgtataaaatcaagctgtaaccaaccaccttgagtacgtgttcacagaccctcctggggaatgtgtcttgggccttggtcacttatatctggattcagataggagg

SEQ ID NO: 721674 - DNA, 520 bp, Homo sapiens
atgtacaggactgatcaggagaaggacatatgacgggacagattgggtgactacggcaagctgatggttgcccgtgggaaatggtgtaaagagcagaggatggttctgtcatcgataatgaacggattgaccaagatgctcggaatctcaatgaggctggattgaagaggaaatggaactgatgtccccaatgttggaatcaccattatgaccgagcggagcgctgccaatattcgagaaagtatctgagaggtacaagagttacagcccttatgacatgtgggaaagcatcaggaaagaggtcaaaggagacctggaaaattgctacctgaagcggagtcagtgcactcagaacacgcgcctgtatcgggcggatcggttgtatagactccatgaagggcaaggggacgcgagatagggtccttgatcagaatcatggtctcccgcagtgaaggtgacgtgtagaaacttaggtctgacttcaagagaacgtacggcaagtccctgtactattatatcc

SEQ ID NO: 721675 - DNA, 596 bp, Homo sapiens
  misc_feature (470)..(470): n is a, c, g, or t
ggccggcctacccagccatttcatgacattaagatggagcaagttatttcgcctcagctaggcctgtgagatagaccgcctgaggcctgagctctgttgtactgccagatcaattcatatttggcagtgatacgtgcgcacgctgttttacagatgactatattttcttacctgacatacagcatatacttatgtcgcacacaatgttgtgtagacaacctgctagcgccaggtagtcaaattgcccctgactatctaatgtttattacatgtgcagacactgttgttgcttactcagctactgatcaatacaccctgcacattgtgctaccatgcaattggctactagacgacactccaaagcatctatggacactgttcccgaatttttacacaagtcactagtatgacctagttaatggtcacatcaggtctcggctataatggtgcgtctctcctagacccagaangtgtgtttattttgcatcccggccatagatccctaatacctcgtgccaatagctagtaggtagcaccaacgctgcctcatggtgtagatttagtataaccgagtatgcaattgactatttgctctc

SEQ ID NO: 721676 - DNA, 223 bp, Homo sapiens
  misc_feature (154)..(154): n is a, c, g, or t
aacactcagaccggacgggacgagggattcccctgccttcgcttccctccctcgcttgctttgtagttttcccgcaccagcccgctgccctgcgccatcctagggcctcgaagcccggggaatctgtcccatcctgtaacgggccgcccccttngatttttctgcccgtgccaccggaggttgctgcgacgcgcaccgactcagatcattactactgaactcg

SEQ ID NO: 721677 - DNA, 925 bp, Homo sapiens
  misc_feature (526)..(526): n is a, c, g, or t
attctagaggccgaggcgggcggatcacctgaggtcgggagttcgagaccagcctggccggcatggagaaaccccgtctctactaaaaatacaaaacaaaattggccgggcgtggtggcgggcgcctgtagtcccagctactcgggaggctgaggcaggagaatggcatgaacccgggaggcggagcttgcagcaagccgagatcgcaccactgcactccagccagggtgacagcgagactccgtgctcaaaaaacaacaagcaagagaaaaaaagccaaaaagaaaaaaacccttaagtttttatgcgcctaaaagccctaaaaagacaaaagcaacaaccaaattggcccagggcgtgtgtggcggcattgcccgtgtgtgtccccccagcatattgggacagcgcgtgaggcaggagaattcatgttgaaccctggggggcgcgacaggtacgtgacgtgtgaggcaaagcagcaatgtgccaattggcaattccgggaccgggggacagacgggaaggacgnacacatgtcatttgctcgagaagaaccatacagacacgaactgaaaaggcccctagaaaaggacacgaggggggggcacaaaggcgggcagggggtttccgccacgtcgtggcgtggtctccccccatcccaggggggtttgggggcgcgaacaaggggcgacacattagcaacacagaatgaagaaaaggggtaaccacaacgggggcgaacgtgtgtgcaaggcaaacagatgtgtgctcagggaggggctggtgaacaccgtatcaaatgagaatggctctgaacagcgggatcatcacgcgaacatatattggccaaacgagacacggggacaaatggggtcgggagtggtgataacaccacgagggcgggtttacgggcgcaacccccgtgggg

SEQ ID NO: 721678 - DNA, 1041 bp, Homo sapiens
ccgtcactttgtgccgttgtcatcctgacgactgatcttcgatctggctggtacttggtgacatgatgccggtgatttaccagatgtcatctgctgcgcggagtatgagtgagcctgagtggtaggccgcattggactgccggtgtattttccatgctcgcgtccagcatcggagcgcgacagtcagacatggttctccccgggcttggtgaacagctgcggttgggagcaaagaatcttgtgagacgtcgaaggtcacagtgcgcgcggattgcgatgcagcactgtcgaaagcgcgggtcgctgtgcccgcgttgcgttcgagctcaatcactgtttgttgcgccttgtcacggagcagatacgatgttggcgccgctgtgtgagtagactcgtgcacagagatcgtgagagcacggaatgcacaactacggttggtcaatggggggatgcaataatcgaacattgtggcgccgacgacaggttcgagagtagcggtgagtgacaggctcagacacgtagacattcaatactggtgagcaagacactggtagagatgtagaaacatattggtgtgagtgggaggggtggcgacggtctcatacaatgggtagagcagaggcgtagacagccttatagaatagacaggagcgaataggagaataatccaacagatgtgagcgattaagagaggagacgatgagaatgcacgcagcgagagtacagaattgtggccacccacccgtggtgaggggggacgtggaagaagaagaagagagatgaatttttttgagcgatggaaaagggaagaagatatggggtggagagagtacaaggatagcagtaagtaccacaagtcaacaagattgataactagtatgagatgtgaagaaataatagtagcaacgtaaaaaaggaatcatagacaataaatagccatgggatataagtgaaatggcggcaagtaaacagacaaatatagtagaaatgcgaatcagtcatcagtgaatgaaaatcaaaaagcaccccaacattatacac

SEQ ID NO: 721679 - DNA, 309 bp, Homo sapiens
aacaaaacaaaacaaaacaaaaacagtatggagtttcctaaaaaaattaaaaatagagctaccacatgacccagcaatgctacttctgggtacatatccaaacaaattgaaatcaggatcttgaggagatacctacactcccatgctcattgcagcattattcacaagagctcagatgtggaaacaatctatatgtccattgacagataaattgctaacaaaaaatgaggtatctgggtgcagtggctcacgctgcagtgagctatgattgtactactgcactccagaatgggcaacagagcaagactc

SEQ ID NO: 721680 - DNA, 448 bp, Homo sapiens
  misc_feature (165)..(165): n is a, c, g, or t
  misc_feature (223)..(223): n is a, c, g, or t
  misc_feature (261)..(261): n is a, c, g, or t
ccttaagtgggagctggggtaaaatagggttgaaaacctactgggctgcattccccagatagttaaggcattctaagtccacaggatgaagataggaggtcagcacaagatacaggtcgtaaagaccctgcctgatgaaacaggttgccaggaaagaagcccagnccaaaacccactgaaaccaaaatagtcacaaccagtgacctctggtcatcctccctgnctacattccccaccagtgctgtgacagtttaccaatgnccgtgacatcaggaagttaccctatatggtctaaaagggggaagcatgaataatccatcctttgtttagcatataaacaggatataaccgtaaaaataggcaacaagtcagcctcacggctactctatctatagagaagccattcttttattcctttattttaccaaataaacttgctttcacttta

SEQ ID NO: 721681 - DNA, 364 bp, Homo sapiens
gggtgctacaagagagtatcagaaaaattcttctagacatgccttaggcaagagtatatcatgactaagaccccaaaagcaaatatacaaaaacaaaataaatgggacctaaatatactaaaaagctcctgcacagcaaaagacataatcagcagagtaaacagacaacccacagagtcgaataaaatattgacgaattatgcatctgataaaggactagtaatctacaaggaattcaaagaaattagcaaaaaaaaatcctatcaaaaagtggacaaaggagatgaatagacaattctcaaaacaagacatacaaacagccaacaaacatatgaaaaaatgctcaacatcactaataatcgga

SEQ ID NO: 721682 - DNA, 317 bp, Homo sapiens
ctccagagttgagttagcttactggtaaaagagggggagagagagagagagagagagagagagagagagagagagagagagagagtgtttttttgtaggatgattggtgcttcatgagagtgagagattgctacatacagttgtgtgcgatgtgtgccgctttgtttgagaagcattgctcagggagcgtgcgctgagagactgcttggagtgagtatgtggggtctagagtagcgatctctgagctctccagtcagtgtgtgtgtggttttggctctacacagagtgtgccctggggagatatttactatattttc

SEQ ID NO: 721683 - DNA, 339 bp, Homo sapiens
gaagatcctggtgtcgccatgggccgccgcccgcccgttgttaccggtattgtaagaacaagccgtacccaagtctcgcttctgccgaggtgtcctcatgcaagattcgcatttttgacctcgggcggaaaaaggcaaaagtggatgagtttccgctttgtcgccacatggtgtcagatgaatatgagcagctgtctctgagccctgaggctgcccgaatttgtgccaataagtacatggtaaaagttgtggcaagatggcttcatatccggtcgctcacccttcacgtatcgcatcacagatgtgtctgtctggctgaaggtcaacaggatcaggtgc

SEQ ID NO: 721684 - DNA, 114 bp, Homo sapiens
aggcaaggtattgagccccagaagcagagcccacgggccttgggatgggcctgtagtatgtcagctcaccccatctgtgccaacctgggagccaccagcagccatctccatgat

SEQ ID NO: 721685 - DNA, 100 bp, Homo sapiens
tttaaggctcagaaaactgtaatcaacaaggcaattaattctcataataaaaataacccttacaaatagccaaggtgtcagtcagatccatagtgagtgt

SEQ ID NO: 721686 - DNA, 297 bp, Homo sapiens
  misc_feature (39)..(40): n is a, c, g, or t
  misc_feature (108)..(108): n is a, c, g, or t
  misc_feature (150)..(150): n is a, c, g, or t
  misc_feature (173)..(173): n is a, c, g, or t
  misc_feature (179)..(179): n is a, c, g, or t
  misc_feature (240)..(240): n is a, c, g, or t
gacttattctattgagttaatctccagtctcatatcctnnctttcgcgtgattgatttggctattgatacttgtgtatgcttcgcagagttctcatgctgtgtttttnagctccatcaggtcatttatgttcctgtctaaactgattatnctagttagcaattcctctaaccntttgtnaaggttcttagcttccttgcattgagttagagcatgctcctttagctcagaggagtttgtnattacccaccttttgaagcctacttctgtcaattcgtcaatctcaattctccgtcca

SEQ ID NO: 721687 - DNA, 732 bp, Homo sapiens
atcaggctgttctggcccggaagttttgggcatgcagcgtggtgagccttgacactgcttggctgcccaagccgtcacggactgtgtggtgcccgcgccctggcgctctggagggacgggcgtctgcgccccctccgggagtgccgggggtgagctggccaacctcatgccaggcggagctggtggacctagtacaatggaccgacttaatcacttttcgactacctgacggccaacttcgaccggcttcgtaagcaacctctttcagccatgcagtgggacccgcgcgtcacgcagctgtgccaccagcaacctgcaccgcgtgtccgggcgtgggcgctggtctttcttggacaatgagagcggtgcttgagtgcactgtgctaccgggtagcaggcatgtgggacaagtataacgatgccgctgttgcagtcatgtgtgcgtgttcctgctgagcggacctgcgcggcgcggtcctagagctgcaccgcggacaggacgccgtcggccggcttgctgcgcctctaccggcgccacgagcctcgacttccccgagctggaccagccctttgcagaccaccaacgcatcagcctgactacaggcagcccgcactcgacatacctcgcccaatgcagcattattagcaacgttgtaagggccaaagttaccggccagtccgagtcatgggacctttaggtgtcacgcgggagggaagaagaggagagaatct

SEQ ID NO: 721688 - DNA, 169 bp, Homo sapiens
tattctgctgcttaaagagtttggaattggagagcagtctatttgggattggagaccccttcgtggggttttgggagggcctggtcggcttgttggcagaggagatagctcatgagggagactgttgggaggtattctcctagctgagagttagaagtgcgcctgggtg

SEQ ID NO: 721689 - DNA, 1751 bp, Homo sapiens
  misc_feature (76)..(76): n is a, c, g, or t
  misc_feature (1057)..(1057): n is a, c, g, or t
gaagaggtgtgatgtggctaccagtgatcaatggtggtctgagatgacgactggtgtgacctgcgctcactcttgngtttttacagcggaacgcgttgggtctgtttggtggcctcacgcagttaaaggcggtgctgtttcacgctaatctagtctacgagataacgcccctctggtgtgtttaatgggggggggccatcctgtgatgtatatattctcttctgaggcggattgtcgttgttgaggggattctgttgccgttgttgatgatttgctctgaggaggatcacacattgttggtttgtgtggctcgagaatcgagtatgtgatagcggacctcaccatcaggggggatgtgactctcctctgctatgaatgattgagttgtgtcttcgcgccacgtgacaattgacgatccgtttagagagtttgttgtgtcaacacccgctcttgccacgatgtgggggaggctgccgcttcaataaagagaggtgtgttgaaaggtgagaagatgtgcctccccaatggttattagccgccttgtgtgacgatgatgctagcggcggccactacagtgttgtgattcaatagaagaatagatgtacgaccgtgttgtgtatatatggattctagattgtgccacataaggggcggggcagtcgtcgtgcgttgttttgtgtcgctcctgctatacatccactgtgcccactgggggtgtctactcccccagtgtgttgtgctgtcctactgcgaggaggggattcgatcgttcgcgctattgtctgtggttttttcgtctggttgtggtgttgtgtgctctctctaccgccccgtgggtagatgattttatgattgggtggtttacatctgctgttttacgatctcgttatgttgtgttgtcgcgccttcgctggctgttaggttgtctgtttctttgcttggtgtgtctcttcgtggtagtgtcgcccccctctgtggatatcgttaggttttagtaaagagggggcgccgcacgttgatgttatgtggtttgcctctacgaagagatataatgttncgcgcccatcatataggggcgtgttttgatggtctgagaagatgggccaccagaatgtgctgttgtggcggcagcagagagagggcgtcacaacttgggtggcgcggcgtcggtcaactagattgtttgtgtctgtttggagagtgggcacaatatttgtgagacacttgctgcgtaaagagagtttttgtttgtgataagagtggcggcaaatcgtggggtgtgtggaatataagagatagagtttttgggcagctgtgtgtgtagagagagagtgttgtaaaaatgtgtgtaatggaaggtggaggagatatgaattgtacaaaagtatgtggtgatgtgtgtcaccctctctgtgtagagagagagaaaatttaaaagagaggtgttgtctgcctagtgtgtccctctgtggttcttctgaagtgagatgtgttgagctctgtgtgagctcgtgtcctctcggcgagattcgatgtaatgctcgtgcataagtggatctggataagccttaagggccaaaaaaagaaaaaaaaagatgtgttcttgttttctgaacttcgtggccatattttgtgtcctgatgggatcaacttaatgtttaagactttagatgtcttgtatttaaaattaccccatgaaagtagaaactttttatacgttacccttttaactctatagaagaaataaaaaa

SEQ ID NO: 721690 - DNA, 1167 bp, Homo sapiens
tgttgctggcccaggtgagctggtgctcgctgagttccaggtgatgcgtggcgctgtccccgcgacggacgctgcctgcccgatgcggttcacgtaaagacagcgagatccttgagggccagcctgggaaggagggcgtggaatatggagctgtgctgctgccaagtccgggtgcccgcagccgggtgaccataggcgcagatcctggagtgactctggtgagggacgcgcccctggggaccaggcaggattcgtgtgactccgtagacagcaccggctgctagtaggcgcattgggccctctggctactacgggctccacgcgctaaaccctttccatagataccttcccttcaataggcctgctatggttgtacagagtcgcacaaggaagcagggcccaaggaacaaccggagctggggaggaaaccatccccttgtaagaaccattcacgggaaatgggccgtctcaattaacgaattaaggccagcggttagcctttgaaacaggccaggctccttatgagacccctccagtgagaacgggcagacagggacgggggtctcttgccgacgataatacaacttggcacgttgagatggattcgtaaaggcccgattgcccgcagggttacgtggttaattaaaagcctgtccccccaaaccgaaatgtggcaagagtgttgggcgatcttcccgaagatgagataggggcagtgtacactcgttaaaccatgggggtattccctattcaccgtagaacaaaagtggtatgacaacgccaaacatacggaccaggtgttccttgtgatgcaccctggtgtgggcgacaacgccaaagaattgacctgtgccatgaaagacagttccaaggtactgggccgtcttccagagaagttcttgccgaggaagtgtacccagacacagcgccgttgtgtagctacagctacgtacacggtttccagggccattgtgaaagaccgatccagagtggagacccttggtaggggaccgcggcgtggacacgatgcagggctcggcaagagcgcagtagtctggaagccggcccacaacggcgccgccattgccgggtgctcataatgcatgacgcccaccgtagcctcttagggagaagaggacgcacacgatagtgcccgcaagcaacgag

SEQ ID NO: 721691 - DNA, 580 bp, Homo sapiens
atattaattatttcatttatttatttccttaactcatcactttcctttacataatattatatataatcatcccccccccacaaacaacacttctaacaccacaagatccaaagaaacacatcccccaaaaacaactcaaataaaacttttaatataaactacccacctacatagagacataaaatcaccattacagcaaaaagaaacctgtatcaaaaaaaaaaaatattatcccgagaaaacgttccacacccacctttacaccaacaaaacaacaacactaaaaaataatgctatccacctacactcaaaaaatcaacctcaaatataccccccacctaaccatcaaacaattataaaatacactccaacacaaaaatacaataaacatattttctcacactaacctctaaatcaaacacataccaacactccaatactattctcttctcaataaataaataaaaaacacccaccatccttattaataactaaataatcaaaaatatttacttatcctaccacatactcaatctcacctataaacaacaaaacaacatttcacatttataacgacact

SEQ ID NO: 721692 - DNA, 429 bp, Homo sapiens
cgtgcggtgcagcaagtggagcggatcatcttgagccatgcagcgggtgggacgcagcctcttgtcagcaaaacagtctgtgcctgtgacgctgcggtttcctgggccttactgagatgcaggacgggaaggtatgcgcagagcccaggaatctagcaagatgtaaaagagccctgccttttcagtaattaaaccctgggcatttaacagtgcttaactcgtacttagaaaaagtagtgcagagatgcttgtagagaagccagatcgcctccggcctaaagcagaaaacagctcccacctcctgacttccccactcccagtttgcctctagaggaaggagcccctccatgcactctttggggttctccctggttctaggtaaagagctcatgaaattgctttgatcgttgccaatctaatgggaggtga

SEQ ID NO: 721693 - DNA, 1275 bp, Homo sapiens
cattgtcaggaatgggcaagtctacttcctgccattctctgaaggccccgcggggaccagcttctagagctgagctgcctagataggctagaagcgttcaggactctgcaggtcaagggatatgtgatagagcacgtgactagaggtagttatgctcgttcagcattgcctagaggtatgcacagatgactttagtcacgaatctgatagggctataccaagcctgggatcactctttccatcccaagcctgagcgagtcagatgcactctggacatcttcattagtcggctatactgtacagtccgaagacagatcggctcccgggctggccccttcaacaagagagcgtctctgccgatccagcgctggataagtcctccccgaatgccattggaccaggggcatcatcggtcattgagtgcgcagacttaatttactacgcctaagttcgcgatgccgtcaactgtgcgaactgtaagccatcgctgcacaggatcccctattaaaccctaaatcgttcagtgcgtggtaaacccacctaccttgtccaaagtcactccgtgcctgcgcctggcgggcacaaggcaggcgcatggagtggttgtattccctaagggcgccttggcttgccgtggcaacacttcaacctggcgcatttagaagggtctccatcccatgacatgcctgcccaagcaacaacgggaacggcggaagggaccaccccgcgggaaacgcccagggcgacacgggtcggcccttaacagtctcgccacgccacagtgcggcacacggccacgcaacacggaacccgggggcaatagagggagaccccgtggcaccatccggcgggcgaaccttcccataaggtggaccacgaatcaaattgtaccttaaaaactatgctcccgcgtataaagttcgctcgtaacgtaggcacatacccccaagtgcgtcatccccaaatgtgggccacaaccagggggggccttccccaagggatacgccgttctttcttctaaaagttgggcccccactattcgttataacaacacttcccttgggaactttgtagcactcgtgaaccaggccgggccgatgttccaaaccactaccgcttaacactgtgatgctagacccctgtgaggagatgagtccagattggcacaccataagtgcgtctaaaagcaactggatgcgatattataactccatggggctctcaactagagtgacccgacgtaaggtgttacatacccatgtggtcgctcctaac

SEQ ID NO: 721694 - DNA, 138 bp, Homo sapiens
agattctggcatgtggaaataggagagaatgccaacacagcccaacatccagctgagtcctccgtggcggagcccactgtcacaaacatcctcaagacgatggacgcagaccactctaatgtcaccggagtggactgc

SEQ ID NO: 721695 - DNA, 364 bp, Homo sapiens
tggagcccccggccttaaatgttttgggtttaacaaaacggggacagggtccaaccccagtccccgaggagggatgtcagccctgggcccctgtgagcgctgcaaatttgtcccaggaaagggtgaccggggttgctgctccgggattaccagctaaatacctgtattaggatcctcaggccgccctgggagacgcaggtcaaggccggtcccctttttggccccttataaatatttgggggaaaaaggggaaccttttcccctacggttggggaaaaaaatatgtaaataaagcctttaaaaaggggttccggcccccttttccccttgcaaaaacattggctataaatggtgataattccca

SEQ ID NO: 721696 - DNA, 842 bp, Homo sapiens
gagcccagctagtgccgggcggagggtgtgcccatgccgtggacgagtactccttaaagccagtggctgtagaagtcaaatctctgctgggggaggatgtcatgggctatgacatggactgtgaataggtccagaaagtggaggaagcactgttgcacgaaccactagctgctagggttcatgtcaatcctgcatgggacgaacggctcgcgctattcatgtggaggggcaagaagggcaagggacaaagatggcttcttggtgaacaatcggattcagacgcctgagccagccgaagagagtagcaaagcttatccgcagctctcagctttccaacgtctatgggatgtcctacttgtcgaatgcatgcgttctcgggcaagctgctttccatcatcatggcgccagcagcttgccaattggctaaggtgaagtccaactcctgtcccatccatcaatggctggatggggggttcttggaatgaaagtaaaggaagtcgtcgcagactcatctctgtagcaaaagggcccttttgtgacgcacaccccgaagtagtcgtacactctttccttggtgcctaatcacatggagggggaggtttaataggttgtctacgcacgagtagaatctcaagtcttcattcagaatacattatgggcttggatcgagaaaagtccaactagatgagtgatctagtgtgggttgagttgggagagtgtggctttttacccattttcctttaaagggttgtcgtcaaaactaactatgggatgattggtcaacttctctggtgttgattgaaagaaggggagtccaggatttgtgtaatgtacctaatgtg

SEQ ID NO: 721697 - DNA, 152 bp, Homo sapiens
tatgcgtgcaggcaggcgggagaggctcatgccccgacgatagcgcaccgtgttgccggcgcaccccgatcatgaccagcggccctgggtggcagcattcggtggcagcggccggcattcgggcagcgggcgcgctgcgccggtgcatggcg

SEQ ID NO: 721698 - DNA, 1048 bp, Homo sapiens
gctgaccactatcatggctggttggcaagaacaagcgccttacgaataggcgaggataagaagtggagccaagaacgataagtggttgatccattttctatatgaaagagttggtattgatgtgaaatgcaccatgcttatgtgcaattattaagaaattacttggagatacgactgcttcgttgcaccagggaccccagagggaaaccaataattgtgcactcgtgacgtggctctacaaggcgatcgttgctgtttctcgagaggtgagatctgtgcgtgcattgtgctagacatgcactcgcaattgtgcatcttacgcaacaagtatcatacgcttgattcacctgcagagcactgtctcagggctaacaatcacatgccgtgacttaaaacttccattggtcatggatgcttaactccgttgcacaacactgtcgttcccatgggtctaacaaacatgggccagaccgacactgatttcgaagactcaacgtcgcatagtccaagaccttacccgactggattactctagcttcagtactagcttctagtgctaagagttgtaacatacacgaagacacgcaaccaaatcagcattacgcgacagacacttctctatgcctccaggcaaccaaacaaggtcactgccaacaatcctggacagaacgatcgcaccgggaccactccattggacccccgaagaagggtagcccacgaacaacactgaccttggcccaacgcaacgctggaccaactcaaacccagaatctcccaacacccagcacaactggcacacacaaccatagcacacacgagctagccccacacccaaccatacataccctaccttccaatcaactggtctattcaccgttcacgaaaacacgttcacacacactgccttgcaccctaccagcccccacagcttcgcccatcggaggaaacagctcaataggctaactatcaatgtgcgcactcggcacactaagtcacgggcacacaacccacatcgcacaaccacgaacagcgtggccacacgcacacc

SEQ ID NO: 721699 - DNA, 146 bp, Homo sapiens
atgcttatatgtggacgtcactattgtccacctggtatggcagcaagcataccctaccctcctgggtgagatctgagaatgagaaacaccatgctatcacaacggatgctctcctatggcattctaccccagtgccctcaaactga

SEQ ID NO: 721700 - DNA, 192 bp, Homo sapiens
cggcacgaggtgtaagataaaatacatgtgtaaacttgcatgtatgaaaacccagccaggcacagtggttcacgcctgttatcccaacattttgggaggccaccacagagggaagatcacttaagcccaggagttggagaccagcttgggcaacatagcacagtgggacctgatctctataaaaaaaaaaaa

SEQ ID NO: 721701 - DNA, 179 bp, Homo sapiens
gcgagcagtgtcactgtgtaatacaccaaggaatacgtatgcaatccatgaaaagaatgaaatcatatcttttgaaacaacatggatacagctagaggccataatcctaagcaaataaacacagaaacagaaaataaagtaccacatattctcatttgtaagtgggagctaaacattgg

SEQ ID NO: 721702 - DNA, 402 bp, Homo sapiens
  misc_feature (402)..(402): n is a, c, g, or t
gcgcctttctgtgctctcgcgtgcaggacctgtgcagcatcgtgcgccgcgccgaccgcgcacacgcgcccatatggaacctctaaggacgagctgctgtgttcccagatgtgagagcgtctgtgtctcaagctctgagaggtccgctgaagacccggggcacgcatcttcttctttgacggcaaggacagttctgaggcgaccccacactggccccagaagaacgtgtggcatggctcggacacccaacgggcgcaagctgaccgcagagcgtactgggagacagtggcggaccgaagcttccttgggcacgggccaagccttcttgctgttggggggcaagctctctggggcagagagccgcgagctggcattacgcctatttgtgctctgtgttgtgcn

SEQ ID NO: 721703 - DNA, 419 bp, Homo sapiens
tgtgtgagtgtctgcgcgcgtgcacccgtgtgtatccgtgtgtgtgtcagggtgggtttgcttgtggtagtggtggggtgtgtctgggtgtccgtcagcccctctttcccgggatgaggctgccggggctctagtgctggcgcggggcaaagcagagccttcctgccccgttggccacggcgggtccttgtcggaacaagcgacgattgtgtaggcgttgtaagaaaaactgcccgcggggctgggccggctgttcaccccggtcagcctggcggctctgggtgtgtggggcaacagggggccttgcaggaggggcagcaaggaatccaaaatattttttccgcggcaaagcggaggaccggaggggacccaaggacagtggccctgggccctgacgcctcggagcacaccccttcctg

SEQ ID NO: 721704 - DNA, 236 bp, Homo sapiens
ggtccgtatacaagacggttcgttgctcactaggcgaggtcagacgtgtgcgaaaatgctacaagataggcacaagacgaggttatcaaggctggttttggttgtgtgtttgacttgaaggttgattcaacatttctcgtcctttgatgggcaacatctacacgaggattgacccctcaaccatgattttggacatgggttaggcgaacaaggttatacgtattatcctctctgcg

SEQ ID NO: 721705 - DNA, 206 bp, Homo sapiens
ccctttgaaattttttttttgtttgtttgtttaaatcaagcctgaggctggtgaacagtagctacacaccccaaattgtgtgttctgtgaaagctagcttttttgaatttggaaattggttattttttaaaaagggtaaaccaagttttatattttgcaatgcgaacagggacctatctgtttttaaaaaaaactgtttacattca

SEQ ID NO: 721706 - DNA, 1125 bp, Homo sapiens
gtcaaagacatgcgactttatgaggagcgcgggcgccgtgtcagatatagctgcgccgatgtagtgagatagcatttaggtctcagagtcactgtcttagcagccggttcatgtctcctatgtaggccaatcgaaggttggcattggctgagactgagtacagtccgtggtagcaatacaacgacttagggcaagagccagggaggtatgagacgcactgaatacgcggatatcgggtctgatgggcagacgatcgcctgcgtttccttggatagtgcaggcagttatggtctcctgtgtacgcctgagatggctggcgactgccgcagacggataagtaccattcgagagcgaactggcagggatagagagcttgaactcgaggcaatacatcggtttagctctaatgcagttcggccggaactctcagtttagacttgacgtgctcccactgcagctaaatacgcggatacattagtaattcaagcggtagatcgagcggcgtagaaagtactccgagggccacctcggtagtatcgcattgagaagttgtggctcctttatgcttaagcggttgcacacacgtctgaaaccgttaaggcacagttgcccaatgccggaaatgctgtggacgaatggcgggttgactaccaatcggaatgttggttcgaaccgttctcagtgttttcaaagtcactagttgcggccaccgatatatgtgcaaccttaggctgcggcactatcagagcgagagggccacacaaaatatttgtgaccgccagatgtgggaaatacctccggccctcggttgagaactaaccgcgtccgtttagacgataacggcaagcctaattccgggtttgcgacagtgtgggccagcaaagtatgtagcgtctacaaggttattagagacgacaccgcggtatgcccttctgcgaggaggttagacgccttataggggagccaccgacgaatagagagctcgttagtgtgtgtgaatatcccaactccgcgatagttccacacctgaaacgcggtgccggccatatatgttcaacacaaattcacgcccaatatgtggccgcatttccggagaatataggcgcttgaagattattacggtcg

SEQ ID NO: 721707 - DNA, 184 bp, Homo sapiens
  misc_feature (95)..(95): n is a, c, g, or t
  misc_feature (126)..(126): n is a, c, g, or t
cattgagtcggaaagtactaatgtgttgataattagttagttgtggcttcatggaaactcccgtaaataaagcttcaggttatgtctatgttcanttctctatagaagaaatgcagaaacctaaanctcactgtattttaatattgtgttattctctcatgaatgaaatttatgtagaagcaaa

SEQ ID NO: 721708 - DNA, 429 bp, Homo sapiens
atggcggcggcccacatcggcataaccttgaggctgaggcagtggctccttgcacagcagctgcacgggccgtggttccggatctcttcgtctttgcaccgtaccccgagtcggtcaccgccgaaaaaccttatcagccatgtccaagccccatatagaagccgggactgccttaattcagacccaccatttgcacccacccatggttggcactggtaggttgggacaccagggaagtcaacgcctcactgaaacatggctgtgtttgcagcctgctctaatgggacaccccaaagcctgtctgcccatcatgtggccccacccaatcaagggaagaaggaggaatgctggactgaaggcccccgcaccctgccaagagggagacagcttcctttcctgcgtgtactcgtgccagctcctttagccagc

SEQ ID NO: 721709 - DNA, 306 bp, Homo sapiens
ggaaacgcacagcatcaatggagaagtgagaaaaatctctctgtggggccaagcgcggtggctcacgctgtacttgctcatgcctgtagtcccagcactttgggaggcgagacgggctgatcacgaggtcaagagatcgagacatcctggctaacacagtgaaccccgtctctactaaaacacaaagattagccgggcgtggtggcgtcgctgtggtccagctgctcgggagtctgaggcaagaaatggcgtaaccgggggcggctttcagtagccggtcacgcattcactcagcttggcgaaaac

SEQ ID NO: 721710 - DNA, 122 bp, Homo sapiens
ataatataatattagtaataatatgatctcacaatataaataagtataagatactttgagactgtcatttcatttattcaaatgtgcatatcattgtcctttttttttggagaccgagtttg

SEQ ID NO: 721711 - DNA, 104 bp, Homo sapiens
actacagttatccaaaatgtcaataaagcgcaaggtgaagattcgagcgaagaaagataatgtagcaggtgttactttgccagtatttgaacattaccatgaag

SEQ ID NO: 721712 - DNA, 82 bp, Homo sapiens
aattcaagcttctaacgatgtacggggacatgaaagcagcatataaaatttgcaagcatttctttatgagaagatagaaaaa

SEQ ID NO: 721713 - DNA, 246 bp, Homo sapiens
ctcaggattatccccgtacgcccaacaaccaaaaagtatcaattctgcagtggacactagctgggtgttctgtaattcaattccaatactatctacctggagataacatcagaatccacaggttgaaggctcagtccccaagactgccccccttcttcagacaccagtcacaagccccagactctggaacttctgactcacctgcttgaagatgagtttcccatactccctccttgggcgtacggg

SEQ ID NO: 721714 - DNA, 709 bp, Homo sapiens
gctgggatggtgccgcggcatgttcctcctcagatgctcaacattccgcagacctctctgcaagcaaagccctgtggcctccacaggatgcccagcgccagagtggcagcccgcgggtccatgggtccatacccgtgacagcctctctgagccagcacctctcactttggacacgagcgggaagaatctgacggagcagtaacagctacagcatactagttctctcagcgatggggaagtcacacagccgtctgtatgagcggtcctcgcccatcaacccggcccagagcggcagccccaaccacgtggattccgcctacttccctggctcttctacatcgtcatcttccgacgacgacggagggcagcggagggtgcgacaaagcatatcaggcgggaacaagattggctggggatgatagactggtgaatgccactcagagacctcaggcacgaggagacccaggagaccaatgcaaaggcagaaggctctgtccactgcctcttcagagaacgccaactagccgagggctatgggaagccagatgggcactgtccagccaatcccgtgcctcctgtcgatgcccaccatggaaccacatggacatcagcatgagctccccgtgtccccccgatcgcacctgaggtgctgagaggtggtccgagcacaggcacaagaaggggctgatgtacccctacatcttccatg

SEQ ID NO: 721715 - DNA, 128 bp, Homo sapiens
gcatcatcatccgaaaatgctggtgattacaggcatgagcaatatacccggcctattttttgcaaagattgggtttcaccatgttgcccaggctggtctcgaactcctgagctcaagcgatccaccca

SEQ ID NO: 721716 - DNA, 209 bp, Homo sapiens
caagacatatctctaagtgtctaaaccatgtcacttcttatcttagacaccccagaatagcccctgttgtatgtagtaactattttagtaaaaaaaaaaaaaaaaaaaatcaggtaacataatacaaaagcaagcagcttagggcctgaaaggaacttgacggttggtagtctgggaatcccataatgaaaaacagagattactggcaa

SEQ ID NO: 721717 - DNA, 275 bp, Homo sapiens
gagagattgttccagattggagtggcagagatgtgctttggtttgggtggcaaggatcacaaagaagaggatgcccagcccttatttattcattttattttatttaaataaaataatgtggagaatttgattgaattttttaacaactgttcacttggagatgattggatttgtagagcaggaggatcactcgaacctagattcgagctcagcctggcaacatagcagacccatctctacaaaaattttaaaaattagccagcatggtgctgtgt

SEQ ID NO: 721718 - DNA, 1656 bp, Homo sapiens
cggggagcgtcataataatgagctttctgtctcacgttgactgtgccctgatatatgctgatcgatgcgtatgtgctcctaagcgctagacgcgtcttacatgttgtaaagcgctccgtgaggcgatatgtgcgctggcatcagtcatatataaacccgctctttcgtgatgttatgctacatgatactcactgtatatcgtagtccggatacgcgctttaatattcgaaggtttccgactcccgggtgttattccccctgcgattccatgctatattggtgccccgcgggggaaaattcttcctggtcatcaaaattttaatctcgatgcccctccggtgcgaaatctttggaatcctgctgagtcctctgaggattcgcacacgaattggcccccgttgagtcgaagttgacttgaaggttgtttacatatccctcctcgagagtcctcctcttattggtaaacctcccgtgtttatcatcattaggggcgggcctccctccttcgcttctgtaagctcccgtctgttccgtcgtgtgagaacgtatgaaccgctttcctcttggggccggcttgtaagatcactaaatccggtcggtgcagttcttttccaaactgtcttctccaagccttcctccaactttatatctgtcgttcgctcctgcaagatgagtcattagggggccactttacctttatgtaggtctcctatatgccagcatatgcgtaaagccctctaagtgtaattttagccctcattgaattttggaatcttggggctctctgctctggaactttggtttaaaatcatctctgtaacggatcagtattgtctaagcaagctaacgctccacatggggtcgcattctcatcaatcatcctcaatccgcttggttgctccatatagtataggtgtcctcttttcggtattagccggtgcgaattaaagtgcgcttagtgttttacgtgtagcctcctgcaaggagtaggttgtgtatctgtgtgtcttttgtcgtcagggggagtgtgtgtttgcttgaggcccgtgtgtgtaacgcaagctttcgcaggtcctagggcgccctcgtaagccgctcgcgccaagtgtatgggtaccggtggcatctgggcctcctcgcatatcatgggtcagtgcagctcgctcggtcgtataatttgcgccgcttaggagagtccgccagctgcgcgtataagcacagtgctcgtagttagtcttcgcagtgcatgcgatgtagtcagattgcagctctgaggcgtcagcgcagtatgttgctagagtatgaataagtcaagcgcggaagagccaaagagtaagtgtcaaggcatctgcgttagttagcaagttgttagctgggtctgcgtattgttagcccgtcgcgtagcaaggcgctgcagaggtagcgtgtgcgaggtctcgcgcgtgtgcacgcagtgttcgcgagcgggagtgctacggcgtcaagcagtgtgttttgtagccacaggcttccacggacttgcagcgtcagttattggctcaactttccgtcactatctgcttcagtccgcgcaagcgtaatatgtgtcagcgtttagcagtccaaagcatcactttggctgtcggaagccgccgaactgactagcgggcattttgg

SEQ ID NO: 721719 - DNA, 186 bp, Homo sapiens
gtagagaccaggtgaggtaatgatgttaatcaagatgctactgtatcatttgccataaatggataataattttatgcatatcatacccaaatgttcctaaaaagtaatctttcaaaaaagttattaaagaagaaactggaaagtatctgtgatgaagcttctttctttaaaaaagaaaacaccaag

SEQ ID NO: 721720 - DNA, 265 bp, Homo sapiens
tataggcgctaggtgacaggcagacttcatcttaaaaaactaagccctatattagggtcccccttctcttccttctttctatgaatgatctgtattcctggcattcctggctttctaagtttccatgtatggttctgggggcgtgagaataatccaacatcatgctcctgagccatatatatttttaatggctggctttaaaactaagttctctgcactttacaggtggacgaatattggaaccttatatacaaattcttcacac

SEQ ID NO: 721721 - DNA, 283 bp, Homo sapiens
caggaaaaacttgcggggtcaacacccagcaccatcacttactagctatgtgaccttgcgcaaggtaacttaatatctctatacccatttcctcacttgtcaaaatggggatcaataatagaacctaactcaacagagttgatgtgcagtttaaataagttaatcatgtaaaaaaatatttcaaaacaatgtcttgttaccttggtaaatactattataaatgttaaactggctaattcaacatgttcaaagcttggccctttcctattctgggggagtcatg

SEQ ID NO: 721722 - DNA, 86 bp, Homo sapiens
  misc_feature (15)..(15): n is a, c, g, or t
ggagcgcggcgagcnagaggatcccggcaccatgtgcggcgggacacttgggtcactttggaagcatgttaataaatgtcacgatt

SEQ ID NO: 721723 - DNA, 1610 bp, Homo sapiens
  misc_feature (193)..(193): n is a, c, g, or t
tgcttggcgccacgtggtaacatgccttggtccaagggatggaagagtcaccctcgttaaggactggtcaatgccagtgggagaccatcggcatgactctgagaagcaatcgtggacgtgcattcactatgcaccagagattcgatcacaaaaatgaacgatgactcgcgtagcgtcacttgctctacatccnatgagtggtcgtactaagatttggtggattacttggtacatgttcctgctaggacacagaggtgggggatctgtgctagtgtacttcagaacctcggtaagtggatggttgcacgcatgtatggcttcgcacgcttcacatcggtttaagctaaacggggaaaagttatagatattcctgatcctgcaacaatttgagacacgaatggaagagccttgtagcaggtgggaaatggctacctttccgtgggtggggtaccaacattaggtagggcggagtgttacacatggctatcaaaagcgaaactaggttggggcactaggtacgaaatgggagaattggataaaatcggtacacggatggggactcggacactggtatggaccttgaggaggtagagatcgctagattatcacaaacattggaagcttccaacgctatacatgggcgcaataaagacgccaggacagttggcggacatgttactaacgatgggggttgccacaagaggtgacagttataagtgcgcaatggcaataaacactaaatttcgcccaatgtgggcagcacaaacacagtttcaaaatggacctggccccgggggcgactaaatgtggccaccccctatgggattaaatttgggggaacaattgggacagcctagggacaatcggtggtgtttacacaacgcagattgtgccacaggttgtggaccacaacggtactcatcacggtgccgtatggaaacagaccagtcgggcgacaacgtgggcacatacaccaggcacacttggggacagtgtccgggcccgagggagtggtaagccatcggcgtctgcacaccaacatacacgggtccaggggaggaacaaggacaaatggagggtaccacgccgttatgacagagtatcatctcatactgcgaaaccaggatgccgctggcgcactgcaacgtaggaccatggcgcacacgatctgtgagagtggcaggacacacacgcggcgggcaacaaacgccctggggggacaccactgtcgacacccacagtgggcggtggagctggcgctacgacgacaggaacacagggaccttgcgaatcccgaccagaacagatgaacattgccccaccgacacactgatagcggggaggttaccgccacagccaacctggccgcataggagaagcacacagagacgcgacatacaagctgtcgacgggcacacccacagttaacacacacgaggcatttgtacgcgataggcaagaggcgcgaatggatactcaacgaggcagagatgcgcagtgcacaacgatacaagcggacaggacacacagaacaccaacagggggcttggtgaccatctgtggtaacaagcaccatatggcagcaccacagaggcgatcgccaacacaaa

SEQ ID NO: 721724 - DNA, 1178 bp, Homo sapiens
ggaacaggaagccctgaagggtcaaagaaatacaaaagcataggctattttctttttttttatcctttctatcacttccttccttcctctgttctttctttcttcctttcatttgtttttcctttttgaatagcgagcggctctgctgttggcggtttggggtgggcgccgcctaggtgaggtcgctctcgcctccctgcgcgccggtatattggtctgctttcattcaatggatggaggggatgatggtaaccttattatcgaaaaatgaggtttgtgctcctgaggctagaactatgatgacacggtgcaaaaggaggcaagaagaatgggagaaagtccgaaaacctgaagatccaaagaaatgtccagaggaggtaatagaccctcgatctctatatgaaaggcttacaggaacacgacggccaggaagcgagcaggagctacagaggaacacgtccaaagtccaaaaacatggtcagaggcttacatgaagatgagaccaacttccttgatgaggttctctcgacagctcggaactacttagcacactgcagcgacgagaagacgacctgaaagaactgagggacatccagaaataacctctagaaaggttggacttcctcaggagaacacgacggattctggcctgtgacacactgatctgtgaagcctatgtgagaacctaggaacgagttctcccaggcgaagctgttggccaggacgctgtgaaggctatacgacctcgagacattggcaacagtgttcacccagcactgagctctgtgtccttaagccaaattgaccaagacatacagaaagccccttcagtcctggaaaagtcttctcggaaaacaacctcacctagaagttgggccccttcaaaatcacaaatggcccctatcttgctcgaagtaatgttattcagacaattcttgccccccagggcatagtgagttggcactaacatgatggaggaacaatagtgcagacttcggaagtctcggattttctataaaaggacaaagtgaacactagtaataatgtgcaacccgggtcgatggaaattgttcacaccaatcacaaattatctcgagaacacaacataccgttatacacacgaaagagacccatcgttgtattgtttccgatcacattacgatggcgattactgtgat

SEQ ID NO: 721725 - DNA, 442 bp, Homo sapiens
ggcgcgcgtttctaccacggactctcgggagcctatggacgcagataacatctggcagtcttggatatctaattgtatatctcttaatctcaacatagaggccagttcatctattttatcagcttttcattcttgcaagattctcagcattatgttttcagtcccattttagctttacatagtccttgcaaaaatacattcactgtataatgtggacaattctgtaacagagcacttattcacttgaatgaataatcctcaaaattttcaatattttagctgcacagtttgcagatttgtggaatgaacaaacagcaattcagaaactttcatctgttcactttgtttcagtcatctgcaaagtctgcaagctgtcattctgaaatacacatccaagtgaatgagaattcaaattttctaaatattaatactaactgggaaa

SEQ ID NO: 721726 - DNA, 466 bp, Homo sapiens
ttaaaggcgagccgggtatacacgtacgtaacttcttgaagattgaagtcagcagtcgcatacagccatgacagcttctgctccctgctcctgaggcgcaaagctctaccaggaccatggcagcccccaggacagctcagaccaggggaggaagacgaagggatgcagctgctacagaccaaaaggactccatgggcaagggagctaggccggggcaagcgcggaaggctcgccggggtctggcctacacgctgctgaacaacccaaccctgcagggtcttcccgcaaggacgggccctgttgggtgccaatggtgcccaagccctgagggcagggaaaggtcaaaccacctgcccatctgtgctgaggcatgttcctgcctaccatcctcctccctcccggctctcctcccagcatcacaccagccatgcagccagcaggtcctccggatcactgtggttgggtg

SEQ ID NO: 721727 - DNA, 494 bp, Homo sapiens
  misc_feature (138)..(138): n is a, c, g, or t
gaaccccacatccccattaggtcctgtgtggcaatttaccactttgaagggtcaagcgagggccctatctctatggccgagggtgaagacctcagttttatggaaaaacacaaaggggccggctggacccgggtcagncgaaaaaagggaggcgagggttacgtgcccacctcctacctccgagtcacgctcaattgaaccctgccaaagacgggaaaaggggggctgtcggtttttgtttttgggccacggggagccccaggacctatgcactttatttttgaccccgtggcttgggttgagacctgtgtaacctgttgccccctccccccccaacccagtcttacctgtcacaccggagggacccgttgtgccttttaccatcgttcccccattgatggacaaactcatgttttacattttttttttttgccgctcggctccggccattttgttttatccaaaaatgggaaaaaaaaaaaagaatttatata

SEQ ID NO: 721728 - DNA, 201 bp, Homo sapiens
gggaagcgtctccgttggggccggccgctctgcggacctctgaggagaagctcgcaccaagtggacgcggatctgtcacatgggtaaaggagacccaacagccgcgggcaaaatgtcctcgtacgcttcttcgtcagacctccgggagagcacacgaagagacaccagactcttccgtcaatttcgcggattctcagagtg

SEQ ID NO: 721729 - DNA, 169 bp, Homo sapiens
  misc_feature (27)..(27): n is a, c, g, or t
ttttttggggccccccccgggaaaaantggggggtcctgttcctttgttcaaaaaaaaaccccccgccctgtttttgttccccaagaattttaaaaaaaaaaagctttccccgggggggggaatttgggttttttttcccctttttaaaaacccaagggccagggttta

SEQ ID NO: 721730 - DNA, 889 bp, Homo sapiens
gggtgggacccggtgaattggggcattatgggccggggcgggtaaggagagtaagagtgagaaaaccagggtagcgagcgcacttgtgagagggggccgcgtcgtcgggcgtggcccttgccgcttgttacacatcgcttctcacgtttataatcaagagaaccagttcaaacaaccctcctcccccgacacattccgtactaccggcgacatatcggcgtccccagcgccgcagtgggagagagttggcgtgggagcgataggtagtagagtagtgaatgaggcagctgagcccctcaacgggcatatctcaattatccagctctcaagacgggacatgacacccgacaccacaaaccacaggatagtgggaaatgagggttaatgggtgacgtttgattttggtggtgtattcggcttattagtttcttcactaactaacaacaccacattccacacccacaaccccgcactccatcagtatgaccacgtcatacatcagattactgtctgttccgtcagttccacctatttttacacacggagcaacgcatcgcggcgttcgtatgtaggcgcaattcataacattgtatagtagagttctaatactctcgaatgagcgtagaaatcgatagggactggtggcacgcgatccgcacgtgcagtacaccccgtctctcgccgatgcgcaacgtcttgatcgttccacggcgttgtcggcgggctactaatgaacgaactgtaacgtagtgagatcgtctttacctgtgtcgctctttgaatatgcgtgtttgtgtaagcgggtggtattccgtcacggcgatattcttacttaggagttctagtttattttctacaatcactcaacgcctgtctgtcccccatttcc

SEQ ID NO: 721731 - DNA, 127 bp, Homo sapiens
aaaaaaaaggacaagaataaaagaaaaatttctggagctggatgcgagtcacgggactttaaatcctagcagattaatttcattcactcaagcaaatggatatggagaacttcttgggtgccttggg

SEQ ID NO: 721732 - DNA, 156 bp, Homo sapiens
ttggcaggacatgctttcatggatactgcctgggtgggggttcacaacacttataagttagaagagtttcgagagccacgtggacaagtacagtggacagttgttactgacaataacgcccctggcaacttttctcgcatatgaacaaggagcaga

SEQ ID NO: 721733 - DNA, 99 bp, Homo sapiens
ccattcgggttttttcccccccccttttttggggggggaccttggtttcccccattttggaggggggggttttcccctttaaaaaatggatttcgggga

SEQ ID NO: 721734 - DNA, 943 bp, Homo sapiens
cagttaaagtcatgtcacccatgtaggtcgcggtggtagatcttgatacggtcgatgttccacagatttgggaatgcgttgggtcattgaccctcgcgcattgagaacggggtgtctcctgttgacctttcaatacataggaagcacaatgtccaggctcggtgttactgcgctatgtgcactcctgtccattcctcctcctccccgtcatatgaccctcagagtaggtggcattaaaatgagacctaagtgggatttgttgatacttgcgaatcgatctttgctctacagggcattgctactcaatgtcactttatcagtccctgcgatgtaatccgttgtcgtggcgcaccgtggaaagttcctataggacaccaaggcagtagtaaacctaaagactgatccttcttggggactcaaacaatccttcgtagtttattgcgcttgaacaagggtctacccacagtttgcttcgcgttactaggctgtggacacttgcctagtggggaggtccactcgcatgtagactagtagataatgttcaactgtacatctcatatactaaaatctatcatgggaccgtataaagcaggatgaaccgctcgtcgtatttgctcatgggacacagggttgccgataacgcacataccgtcttgtcctaactcggcctggaagggacatctatctatggacaaaagtatgaaccccatgctcttagcttattttgaggaattactacacgtggcagggaatcgcgattctttgctccgtaccagaacaaggccatcacagtagcgagcactcacattgagttggagaaatccataggtatcagcttggaatcggcggctccgggtggcaggggtggtaccagagtctgcttcccgtgagcccagatgcgggtcaaccccgtcgacaagtggggggccatccccgttccact

SEQ ID NO: 721735 - DNA, 530 bp, Homo sapiens
cccctcctatcatgcaccagaatttcatcacttccagaagcaaatgcagatgttcagcataaaccagacttgtttgtcgcaaacagtccaggcatagcgagcctactcttatcagttagggaaagatatataacagtgcaggaaactgtttcccagctaagttcccagacaccagccacaggctgaccttacaagcaggccttttctaaggataacaattccaggcctgctatgttaagtcttctttgaacagctctgtgtctctcccattcctgtctttacctttctcttcaaatatcttccaggatttctttccctatatctcagacctgactcagtcatgcctctgctcagagaccatcgatggctctcagcctgggctgagcattgacctgggaacccaaaaagtggatttgtggcccagccctatcactaactcactatatgacctcaggctaatgacattccttgcttaaccctcagtgtccccatctctgaaatggacaaggatagtggtatcagcgaagggc

SEQ ID NO: 721736 - DNA, 157 bp, Homo sapiens
accgattgcccaaatgatacgccccgcgcatcagttcaaaggcattgtcggcggtgactttggtgagggtttgcggtttggcaaaaatttgcactaggtgcgcctgacgcattttgtaccacgtcaccgtctttgagcgtacctgtgcgtggtaggt

SEQ ID NO: 721737 - DNA, 822 bp, Homo sapiens
cgaggctaggcttaaccccagcacagaggtcaagggcttccggaaaatttgttgtgtgtcctttggagtcgtttcgcggggaagacaaacgtcggttctgggagggaaacttcagtgggtcctggtggctttggtggccaccctggtggtgagtggaaataggtggccactggggatggctaaaactggaattggtaatagatggtggttatggagagaagcgcgccggttacttctggaggaacccgaggctatggaaatggtgtgaccgggttatggaaacccgggcaagtggcttatggcgggagtggccagctatgaaccagcgtataacgaacggaggcggagccggcctttggccggtggtagtggaagccaattttggaggtggtgtgaagctcaccaatgattttgggggattcccgaagcaattccagtctttccaaatttttggaccccatgaagggcaggaaattttggaggcagaagctgtggcgccctatggcggtggaggcccataactttgccgaagaccccgagacccaggtggctatgcgggttcccaccagcagccgtagctatggccagtggccagaagattttaattagggaggagtctgctactagtcgttatccagctctttgaaaaccagaaactcatctgtcgccagtttgtggccagaaagggaccgtccttgtgaagacccttatttgagcccctgtactttgttatcactgccaagccgtttacatgagctgttttgcaggtccaattcccttttgtgaatgggtttttttttttaataaactgtatttaactta

SEQ ID NO: 721738 - DNA, 546 bp, Homo sapiens
gccggccgcctgttttttttatacgggggccaccggggtgggattgtgggttttgccccaccaaaagagccctcccgggtggtgtccccgtcgggggcccccaaagggaaagtattttgtgtccaaaggcctccccgttaatgggtgcggcccccgcctgggtgtttggtgttgaggggaagaagggacccctgcccctgttttccaacaaaggcagttgggcccaaagggaaaagggggggggggccctggatgtctttccagcctttttaaaggaattggtcccctttcctttttttttttttagagacccaggccgggggccttccccccttgcccaaacttggggggccctttaaagggggggggggccctgttttttttttccttttatttgggggggggacccaaggggggggttttttttatggggggggggggggtttgggggtcccgttttttccctttccaagtttttgggggggggaaggggggagggattttggtttaagttttttaaaatggtaataaaatattttttcccga

SEQ ID NO: 721739 - DNA, 658 bp, Homo sapiens
  misc_feature (18)..(18): n is a, c, g, or t
  misc_feature (108)..(108): n is a, c, g, or t
  misc_feature (120)..(120): n is a, c, g, or t
  misc_feature (132)..(132): n is a, c, g, or t
  misc_feature (141)..(142): n is a, c, g, or t
  misc_feature (146)..(146): n is a, c, g, or t
  misc_feature (159)..(159): n is a, c, g, or t
  misc_feature (162)..(162): n is a, c, g, or t
  misc_feature (174)..(174): n is a, c, g, or t
  misc_feature (188)..(188): n is a, c, g, or t
  misc_feature (204)..(204): n is a, c, g, or t
  misc_feature (343)..(343): n is a, c, g, or t
  misc_feature (592)..(592): n is a, c, g, or t
  misc_feature (636)..(636): n is a, c, g, or t
ttttggaaaatggccgtnaaatgctcggagatgcgcttgaaaagatcctggatggccgtgctgttgaaaatgaaggtgggggagatttttagttcccgaggtgggatnttacagaaagcngttttaaaattnttggggatnnactnaaaaaaatatttnttntttttttttttnatattaagtatttntttatttatttttttnatggaaatgcggcccctgaaaaagggggaaaacgttaggtagcggccatggcgggggttgcaggaagcaatcatgtttttggcatcaaaaatttgctgggtgagctcgggcacggtaagagcccggtaatgttggatgntcaggttggttagttgggtaaagctgggcattaagaactgcagccggggaaacgggaccatgttcacagccagcttccgcagtccagcattgagctggcctgggaagcgcaggcaggtggtgacccactcatggtagcagacaccaggtggttcaggtcaccataggtgggcgtggtcagctttagggttctgaagcaaatgtcgtagagagcttcgttatcaatgcagtaggtctcgtctgtgttttntacgagctggtggactgagagggtggcgttgtaggggtgcacantgtgtctgaaatttgggggagg

SEQ ID NO: 721740 - DNA, 135 bp, Homo sapiens
ataccccgggtccgacacagtccaagcgcgagcccggagacacttcaagcaatccttcctaacttttattctcagttcgcatgcctcaacaggtaaacaaagcaaaaagcctacgctggacgggggccgcgcgga

SEQ ID NO: 721741 - DNA, 250 bp, Homo sapiens
gtcggcttcttatagaagacaacatgaagaggggaagacaacgaaaatcgaagtaaaactagatcaagaacaaacaaaatcccatagcccatattgcaaacatcagcagtgtaaaacttaggaacctaatatctatgacggtgagcgtcaatcccatacagcactggtaaaccattggtcttgtccatcagatcaccctcctccttcaaatctcctagcttatctccatcaaacgtacccttgttcttct

SEQ ID NO: 721742 - DNA, 152 bp, Homo sapiens
gtacggaagatggcgttgttgcaaggggatgatgtctggagctcccagaagatgctgcgcgtgtggcggtggtagtagtgtctcaagggaatgtactccaggccctctctgtgctgtccagccctctgtgctgtccacctcctctgtgctgt

SEQ ID NO: 721743 - DNA, 503 bp, Homo sapiens
  misc_feature (221)..(221): n is a, c, g, or t
  misc_feature (253)..(253): n is a, c, g, or t
  misc_feature (271)..(271): n is a, c, g, or t
atgcagcgaatggcaccaaccgcagtgagggtctgtggctggtaaacactccgaacaggacgtatgtttattgcagtgtgcaacacgaattaacaacacctatttcccagatgttagataaatgtagatatttgtcacaggatcaggcacgaggatgtagaaaacaggtgtctcatccataatcacatcgataacctctggacaaaatgaagtcaaattcncaccaagaataacgttaagtaactggccatcnccagtccccaagaataanacagtcctgttcattaccacggtgccataaacggatgtcaggtcggaatggatcaaggtagatgatgcgattggttggactctttcaggatgatccccttcactgcagtggctatcggccgtcatgaagtcccagctgaccctcgtggcgcgcacctgtatctcactcattatgaagaggcagagcgccgtggtggtgggggagcaccgctcatggccctcgccagcggccg

SEQ ID NO: 721744 - DNA, 144 bp, Homo sapiens
ttatcttccaagtttgagtgcaccagcttcaggttgttttagggtggcgacaaaaaccggcttcctttatcattttcagaacctggtttggggtgtgcaattagcatacactgggtgtcctgtaagaacggctggtggacaaaa

SEQ ID NO: 721745 - DNA, 343 bp, Homo sapiens
tttttttttttagaaatcgctaattaattttattcctttacagaatgtgctctggagatttaaattttcccagcttaagggatcttcagatgatgggaaaactcgagtaaagctgctgtttcagaatctggacaccaaacagattgagatgaaggtatgcggcatggggcatgggttattctgccaccacccacacataaagtacagctcagagggtccgctggtaaaaatctccacccctcccatgcacacaaaaataaaccaataggtcctgaagcacgagtccttcctgaaaattaggcaatagataacccgaaagagcctgtcgagcccacgcgtccgc

SEQ ID NO: 721746 - DNA, 111 bp, Homo sapiens
gctgccggctgactcttgagtatccccggtcatttgtctacacttatcaagtcaatggatacaatacagacttcatgctggttttctctttgaaagtttattgttttcttt

SEQ ID NO: 721747 - DNA, 1914 bp, Homo sapiens
  misc_feature (1909)..(1909): n is a, c, g, or t
  misc_feature (1911)..(1911): n is a, c, g, or t
  misc_feature (1914)..(1914): n is a, c, g, or t
cacgagccgagccggagccggcagaggggcgcgggcgggacgggcgcctggcggggccctgggaggctcggacggggtcctggcgttgagctcggccggcccggagcgcggacccagccgcagggcggcgaatgggcaccgagggacccccgcccccggccgcctcccgcggacgccagggctgcctgctggtacctgcgcggacgaaaaccactattgctctgttgtatgatgaagagtccgaaaatgcctatgacatccggctgaagctgacgaaagaggtgctgacaattcagaaacaagatgttgtctgtgtgggcggaagccaccagggcaggaatcgcagaactgttacactccgcagacagccagttggcggcttgggcctgagtataaagggaggttctgagcacaacgtccctgtcgtcatatcaaaaatattcgaagaccaagcagctgaccagacagggatgttgttcgtaggagatgctgttctccaggttaatggcatacatgtagaaaatgcaactcatgaagaagtggtgcatctgctgagaaatgctggcgatgaagttaccatcaccgttgagtatctcagggaagcgccggcatttctgaagctcccgttagggtccccagggccatccagcgaccacagcagtggggcctcctctcccctctttgacagcggtttgcatctgaacggaaactccagtaccacagccccatcgtcaccttcctcgcccatagctaaggacccgaggtatgagaagcgctggctggacaccttgtccgtgcctctgtccatggctcgcatctcaaggtacaaagccggaacggaaaaattaaggtggaatgcgttcgaggtgctcgccctggacggagtcagctctgggatcctccggttttacacagcccaggatggcaccgactggctgcgggcggtctcagccaacatcagggagctgacacttcagaacatgaagatggcgaacaaatgctgctctccttccgacctaggttgtgcatatggggtgggtaaatgagaaactccaaggagctgactcctctcaaaccttcagacccaagttcctagcactgaagggcccgtccttctacgttttcagcactcctccggtgagcacattcgattgggtgcgagcagaaaggacctatcacctctgtgaggtgctatttaaagttcacaagttctggctcacagaggactgctggttgcaagcaaacttgtatctgggtcttcaagattttgactttgaggaccagaggccctattgcttcagcatcgtggccggccatgggaagagccatgttttcaacgtggagcttggcagcgagctggccatgtgggagaagtccttccaaagagccacgttcatggaagttcagagaaccgggtccagaacatacatgtgcagctggcaaggagagatgctgtgtttcacggtggatttcgcgttgggatttacctgttttgagagtaagaccaagaatgtgctctggagatttaaattttcccagcttaagggatcttcagatgatgggaaaactcgagtaaagctgctgtttcagaatctggacaccaaacagattgagatgaaggaactcgagttccaggacctgagggctgtcctgcactgcatccactccttcatagcagccaaggtggcctccgtggaccccggcttcatggacagtcagagtcttgccagaaaatacatgtacagcagctaaaggttgtttctgttgagtgctgaaaaattaaattattttcgtaagaaatgattctttcctgcagaatattgcaactttgtgttgttttatgatgagcctatagttgtgataccaataaaacaatggcctcgttggcctcagcggtggagctctgcgncnagn

SEQ ID NO: 721748 - DNA, 105 bp, Homo sapiens
aactcggccccgtttacggaacaggcggatgtcagaggggtgctagggtacctctgggactcagaagtgaacagggggcatattcctagattttattgctcatag

SEQ ID NO: 721749 - DNA, 811 bp, Homo sapiens
  misc_feature (72)..(72): n is a, c, g, or t
  misc_feature (806)..(806): n is a, c, g, or t
  misc_feature (808)..(808): n is a, c, g, or t
  misc_feature (811)..(811): n is a, c, g, or t
acccgatggcctagccagccgctgactgactgttgacggcaagccgctgaccttgaacttcagtgctcaggntttccagtcgtatcaacacactgcgatccacaagttctggctcacagaggactgctggttgcaagcaaacttgtatctgggtcttcaagattttgactttgaggaccagaggccctattgcttcagcatcgtggccggccatgggaagagccatgttttcaacgtggagcttggcagcgagctggccatgtgggagaagtccttccaaagagccacgttcatggaagttcagagaaccgggtccagaacatacatgtgcagctggcaaggagagatgctgtgtttcacggtggatttcgcgttgggatttacctgttttgagagtaagaccaagaatgtgctctggagatttaaattttcccagcttaagggatcttcagatgatgggaaaactcgagtaaagctgctgtttcagaatctggacaccaaacagattgagatgaaggaactcgagttccaggacctgagggctgtcctgcactgcatccactccttcatagcagccaaggtggcctccgtggaccccggcttcatggacagtcagagtcttgccagaaaatacatgtacagcagctaaaggttgtttctgttgagtgctgaaaaattaaattattttcgtaagaaatgattctttcctgcagaatattgcaactttgtgttgttttatgatgagcctatagttgtgataccaataaaacaatggcctcgttggcctcagcggtggagctctgcgncnagn

SEQ ID NO: 721750 - DNA, 433 bp, Homo sapiens
  misc_feature (12)..(12): n is a, c, g, or t
  misc_feature (83)..(83): n is a, c, g, or t
tctggagctganaagccattatccctaactgaacttaaccacaggaactgaaaacggaaatactgcatctttgtcactttacnaagtgggagcttaaaccactgagtacacatggatgcaaagaaaggaacaacagaccttggggcctacttgacgatggatggtgggaggagggtgagaatcaaaaaattgcctaccagatactgtgcttattacccaagtgacaaaatatctgtacacacgcaacccctgtgacacacaatttacctgtttaacaaagctgcacatgcactcctgaacctaaaataagagttaaaaagaaataaaaaccaaataccccaggagaattgcttgaacccaggggacagaggttgcagtgagccaagatttgccactgcactccagccagggtgacagcataggactccatacc

SEQ ID NO: 721751 - DNA, 471 bp, Homo sapiens
  misc_feature (466)..(466): n is a, c, g, or t
  misc_feature (468)..(468): n is a, c, g, or t
  misc_feature (471)..(471): n is a, c, g, or t
gccattaggtaatgattgggaaaactaagaacccaggatggctgctcatcggaggggccagtcatctcacagacactttgtgacaaatgtccagcagtttgtgcactgagacggaaaaatggaccgtgccgtaaggaggtgtgatttccactggaggagattgattgaggacatttggaactcgagttccaggacctgagggctgtcctgcactgcatccactccttcatagcagccaaggtggcctccgtggaccccggcttcatggacagtcagagtcttgccagaaaatacatgtacagcagctaaaggttgtttctgttgagtgctgaaaaattaaattattttcgtaagaaatgattctttcctgcagaatattgcaactttgtgttgttttatgatgagcctatagttgtgataccaataaaacaatggcctcgttggcctcagcggtggagctctgcgncnagn

SEQ ID NO: 721752 - DNA, 134 bp, Homo sapiens
tgatagaggatctcggtgatgatgtgatggggactgtgtgcagtatgtacaaagggagaggtcactgtcacagaggctgggtgaggtggggtgctggaggcgaggctgctgggagatagtcaaaagtagatctc

SEQ ID NO: 721753 - DNA, 411 bp, Homo sapiens
gccatgtgaagcctcccaacaggaagtaggcacgtgaagcctcccaacaggaggtgcatctgctgagaaatgctggcgatgaagttaccatcaccgttgagtatctcagggaagcgccggcatttctgaagctcccgttagggtccccagggccatccagcgaccacagcagtggggcctcctctcccctctttgacagcggtttgcatctgaacggaaactccagtaccacagcactcaccttatttcagaagaagaaggcagatgggctctatagtagtcataatggaaacagacctactacagataagcagattttgaaaagtgatactgcaagtcagaattatactgctaaatactctaatttgttttgcaaaggagagtatcatgtttaaatagtcataccaaaaa

SEQ ID NO: 721754 - DNA, 772 bp, Homo sapiens
  misc_feature (1)..(1): n is a, c, g, or t
  misc_feature (77)..(77): n is a, c, g, or t
  misc_feature (99)..(99): n is a, c, g, or t
  misc_feature (104)..(104): n is a, c, g, or t
  misc_feature (111)..(111): n is a, c, g, or t
  misc_feature (136)..(137): n is a, c, g, or t
  misc_feature (139)..(139): n is a, c, g, or t
  misc_feature (141)..(141): n is a, c, g, or t
  misc_feature (144)..(144): n is a, c, g, or t
  misc_feature (149)..(149): n is a, c, g, or t
  misc_feature (151)..(151): n is a, c, g, or t
  misc_feature (156)..(156): n is a, c, g, or t
  misc_feature (170)..(170): n is a, c, g, or t
  misc_feature (210)..(210): n is a, c, g, or t
  misc_feature (312)..(312): n is a, c, g, or t
  misc_feature (346)..(347): n is a, c, g, or t
  misc_feature (357)..(358): n is a, c, g, or t
  misc_feature (420)..(420): n is a, c, g, or t
  misc_feature (422)..(424): n is a, c, g, or t
  misc_feature (426)..(426): n is a, c, g, or t
  misc_feature (446)..(446): n is a, c, g, or t
  misc_feature (456)..(456): n is a, c, g, or t
  misc_feature (471)..(472): n is a, c, g, or t
  misc_feature (476)..(476): n is a, c, g, or t
  misc_feature (489)..(489): n is a, c, g, or t
  misc_feature (525)..(525): n is a, c, g, or t
  misc_feature (535)..(535): n is a, c, g, or t
  misc_feature (541)..(541): n is a, c, g, or t
  misc_feature (543)..(544): n is a, c, g, or t
  misc_feature (548)..(548): n is a, c, g, or t
  misc_feature (554)..(554): n is a, c, g, or t
  misc_feature (560)..(560): n is a, c, g, or t
  misc_feature (564)..(564): n is a, c, g, or t
  misc_feature (569)..(569): n is a, c, g, or t
  misc_feature (571)..(571): n is a, c, g, or t
  misc_feature (576)..(577): n is a, c, g, or t
  misc_feature (587)..(588): n is a, c, g, or t
  misc_feature (604)..(604): n is a, c, g, or t
  misc_feature (606)..(606): n is a, c, g, or t
  misc_feature (657)..(657): n is a, c, g, or t
  misc_feature (659)..(659): n is a, c, g, or t
  misc_feature (671)..(671): n is a, c, g, or t
  misc_feature (690)..(690): n is a, c, g, or t
  misc_feature (734)..(734): n is a, c, g, or t
naaagcaaggctcagtactggaggtaagcaactgaaatgtctgtctgacttcaagtgtacaaggttgtatgtagctnttttagcagaagtagaacaagnaagcnaaatttnttcacctggtttatcgagtgtttgnntngnctnaaaantnaacangtatataaattcanatgtcagttggtggctgtacttcctctagatctaagatangtaccctacctagttacatacattccattaatcatgggccaagataaaaaaagttagtggatcatttaacatagtttttgagtgccaaacagtaactacgtntttacagcagaaacatacatgctcataggattcnncagccaaaanncaagatgacagtatatttctgaatttgaatcttgaagcaggatgaattattgaaatcaactntnnngngaaatgtaataaatgaaaanagcattcgancagaaaacgcatagnncccncacaatccaaagngccataaatgtcccctccatgatcataatacctctnattcaactancgggantnngtcnaatggngttgcnatanccacncngcacnntcctgtccanncacgcccacagcagcntncttccagatccatatagacaaaaacattctctgtagcttaaatattaatcncngaggtatttgcnttaagtctcccttattaanaacagtagcttccaaaaggtctttaataccgatggtttattgtngactataagctcctgcagctagaaccaggtttcttcga

SEQ ID NO: 721755 - DNA, 405 bp, Homo sapiens
tccttgatgtatacttgtatacccggctatcccagttcatgagagttgaacagagatggtccccatccttctccactacaggtggcctgttcctggtcatgcatagcccagtgccccggtcccttcgccactccttcatctccagttcgaagcgctggcagttcagagagactgtggtgtggacgcttgtgtgtccagaacctgtgctggccgcctggaggtgcacccagtcctcaagcagccagtagacttgtacagatccccttctgtgtgcaagactcatgctagaagctgcaggggatctaaagaagcactgcctgccttgcatcgaacccgagacaccagaccgactgcgtgggggaccattgctttctttcctgtcaaggaaagaagtgccctgacagt

SEQ ID NO: 721756 - DNA, 1796 bp, Homo sapiens
  misc_feature (1791)..(1791): n is a, c, g, or t
  misc_feature (1793)..(1793): n is a, c, g, or t
  misc_feature (1796)..(1796): n is a, c, g, or t
cacgagccgagccggagccggcagaggggcgcgggcgggacgggcgcctggcggggccctgggctgcctgctggtacctgcgcggacgaaaaccactattgctctgttgtatgatgaagagtccgaaaatgcctatgacatccggctgaagctgacgaaagaggtgctgacaattcagaaacaagatgttgtctgtgtgggcggaagccaccagggcaggaatcgcagaactgttacactccgcagacagccagttggcggcttgggcctgagtataaagggaggttctgagcacaacgtccctgtcgtcatatcaaaaatattcgaagaccaagcagctgaccagacagggatgttgttcgtaggagatgctgttctccaggttaatggcatacatgtagaaaatgcaactcatgaagaagtggtgcatctgctgagaaatgctggcgatgaagttaccatcaccgttgagtatctcagggaagcgccggcatttctgaagctcccgttagggtccccagggccatccagcgaccacagcagtggggcctcctctcccctctttgacagcggtttgcatctgaacggaaactccagtaccacagccccatcgtcaccttcctcgcccatagctaaggacccgaggtatgagaagcgctggctggacaccttgtccgtgcctctgtccatggctcgcatctcaaggtacaaagccggaacggaaaaattaaggtggaatgcgttcgaggtgctcgccctggacggagtcagctctgggatcctccggttttacacagcccaggatggcaccgactggctgcgggcggtctcagccaacatcagggagctgacacttcagaacatgaagatggcgaacaaatgctgctctccttccgacctaggttgtgcatatggggtgggtaaatgagaaactccaaggagctgactcctctcaaaccttcagacccaagttcctagcactgaagggcccgtccttctacgttttcagcactcctccggtgagcacattcgattgggtgcgagcagaaaggacctatcacctctgtgaggtgctatttaaagttcacaagttctggctcacagaggactgctggttgcaagcaaacttgtatctgggtcttcaagattttgactttgaggaccagaggccctattgcttcagcatcgtggccggccatgggaagagccatgttttcaacgtggagcttggcagcgagctggccatgtgggagaagtccttccaaagagccacgttcatggaagttcagagaaccgggtccagaacatacatgtgcagctggcaaggagagatgctgtgtttcacggtggatttcgcgttgggatttacctgttttgagagtaagaccaagaatgtgctctggagatttaaattttcccagcttaagggatcttcagatgatgggaaaactcgagtaaagctgctgtttcagaatctggacaccaaacagattgagatgaaggaactcgagttccaggacctgagggctgtcctgcactgcatccactccttcatagcagccaaggtggcctccgtggaccccggcttcatggacagtcagagtcttgccagaaaatacatgtacagcagctaaaggttgtttctgttgagtgctgaaaaattaaattattttcgtaagaaatgattctttcctgcagaatattgcaactttgtgttgttttatgatgagcctatagttgtgataccaataaaacaatggcctcgttggcctcagcggtggagctctgcgncnagn

SEQ ID NO: 721757 - DNA, 160 bp, Homo sapiens
  misc_feature (156)..(156): n is a, c, g, or t
cttcgttacccttcctctggcttcgaagcgacgctgcgtgcgctgctcgtccaattgcagcatggataaggagcgagccgtggctgcagggactgcgaggcggaatgccatcctcgtcatcgaggatgagccggtcatgcgcctcatggctgtcgncctc

SEQ ID NO: 721758 - DNA, 153 bp, Homo sapiens
tcatagattcaaggtttatgctttgctgttcattgggtttgaaggccaggctttcacaggaaggcacacgatttatatgtaacttcggttataagcttctatgaggtttgtggagaatcctcgttcaaatggacagacacctatcagcaactg

SEQ ID NO: 721759 - DNA, 322 bp, Homo sapiens
cggaccggtcatactggatgaggatgtcattatgatctccttcttggaagcctcataccatgatatattctaggtaataggccaccagggctttggcagcatggactgaccgatagcataaatctgggccacgtgacctgacacccttatacacggacacggctgtctacaccagcgaatcgccccttgcccgagaagcagaactaggctccagcagcttgtactgtagcgtgcgcggtcaatcatctccaggggccgcccgttcaccttgatgagaccattgccgcgtatgcagtgcgccacagctgtcgctgtcttcttg

SEQ ID NO: 721760 - DNA, 1218 bp, Homo sapiens
cacgagccgagccggagccggcagaggggcgcgggcgggacgggcgcctggcggggccctgggctgcctgctggtacctgcgcggacgaaaaccactattgctctgttgtatgatgaagagtccgaaaatgcctatgacatccggctgaagctgacgaaagaggtgctgacaattcagaaacaagatgttgtctgtgtgggcggaagccaccagggcaggaatcgcagaactgttacactccgcagacagccagttggcggcttgggcctgagtataaagggaggttctgagcacaacgtccctgtcgtcatatcaaaaatattcgaagaccaagcagctgaccagacagggatgttgttcgtaggagatgctgttctccaggttaatggcatacatgtagaaaatgcaactcatgaagaagtggtgcatctgctgagaaatgctggcgatgaagttaccatcaccgttgagtatctcagggaagcgccggcatttctgaagctcccgttagggtccccagggccatccagcgaccacagcagtggggcctcctctcccctctttgacagcggtttgcatctgaacggaaactccagtaccacagccccatcgtcaccttcctcgcccatagctaaggacccgaggtatgagaagcgctggctggacaccttgtccgtgcctctgtccatggctcgcatctcaaggtacaaagccggaacggaaaaattaaggtggaatgcgttcgaggtgctcgccctggacggagtcagctctgggatcctccggttttacacagcccaggatggcaccgactggctgcgggcggtctcagccaacatcagggagctgacacttcagaacatgaagatggcgaacaaatgctgctctccttccgacctaggttgtgcatatggggtgggtaaatgagaaactccaaggagctgactcctctcaaaccttcagacccaagttcctagcactgaagggcccgtccttctacgttttcagcactcctccgcaacctacctcctatctgaactacaagctacgcagaacctaaccaacacacgagatgctcttcttggataccttggacatggttttatcttaaataacccccttctgttacatggtcatgttcggccttgaattgttgtagcctagatattttctagagctataactcgtgaaataaaaagtgagaagagccctaatgg

SEQ ID NO: 721761 - DNA, 90 bp, Homo sapiens
acatctgtgtacttctgtgccagcagtccgggactagcgggagggcctaacgagcagtacttcgggccgggcaccaggctcacagttgta

SEQ ID NO: 721762 - DNA, 760 bp, Homo sapiens
gccatgtgaagcctcccaacaggaagtaggcacgtgaagcctcccaacaggaggtgcatctgctgagaaatgctggcgatgaagttaccatcaccgttgagtatctcagggaagcgccggcatttctgaagctcccgttagggtccccagggccatccagcgaccacagcagtggggcctcctctcccctctttgacagcggtttgcatctgaacggaaactccagtaccacagccccatcgtcaccttcctcgcccatagctaaggacccgaggtatgagaagcgctggctggacaccttgtccgtgcctctgtccatggctcgcatctcaaggtacaaagccggaacggaaaaattaagattgtaaaggagctgaaaatccctactgcctggtgacatcaaccatcgtaacctcacagtgaaagatatgactcacgtgtttgtggtgatgctgacgtagacaaacctactgcactgccaatcatataaaaggaaacagtaatgtcctggaccttcacattcactcactcctcactcatggcttcacccagaacaacttccagtcctgaaggctctattcatgactcaccttatttcagaagaagaaggcagatgggctctatagtagtcataatggaaacagacctactacagataagcagattttgaaaagtgatactgcaagtcagaattatactgctaaatactctaatttgttttgcaaaggagagtatcatgtttaaatagtcataccaaaaa

SEQ ID NO: 721763 - DNA, 991 bp, Homo sapiens
gggttcctgggctccgggctctgggtagcggctggtgtgagcggcggactgcgtgtgcagcgggggaggccatgcggtgcgccgtcgtgtgtgctggccctgtcggccgcgggatgaggaagcggaccgagcccgtcgccttggagcatgagcgctgcgccgccgcgggtcgtcctcctccggctcggcctgccgggcgctggacgccgactgcacgcctgaagcagaacctacgcctgacggggccctagagtgacggctgacgccgccgctgcgcagaccgactgcgggaatgaagcgggcgctgggcaggcgcaaagggcgtgtggttgcgcctgaggaagatacttttctgtgtaagaggtagaacattgccatttccatttcctcatcacactatgtcctgtaataccagtgccaaacttgacttttacttgaaacttacgtaaagcagtttccccctaatatccatctgcatttcagacaaaacacccagcaaggaatcgaagggttttgacatcaccaacagtgtaactaacttaccctgcacgccaagagagaaaggacgcttggaaccatttgcgaggtcttggcaaacaccgtaccctgaaaatcgtagagtgcaacagcaccccgccgaaagggcacaatgaccacatgctggaatggaggattgccttggctttccaggcaaaccatatccattctgtaccctggcattgggaaagcacgcatacccgaggagggaaaccaacctagttgaagctacacaaaggtgcaacagatccatggtaaccatgtgtcactatagactacagaagtatgaggtactcaaagacacggcaaatcaaacgagattacttaaaaggatccagataatgatagataaacagacgtgtagccaccgcggttaacactggacaatacaagacaagacgagaaaaaacaataaggcctataacaaacccaaaccttttggactctcaaaaag

SEQ ID NO: 721764 - DNA, 1009 bp, Homo sapiens
gccatgtgaagcctcccaacaggaagtaggcacgtgaagcctcccaacaggaggtgcatctgctgagaaatgctggcgatgaagttaccatcaccgttgagtatctcagggaagcgccggcatttctgaagctcccgttagggtccccagggccatccagcgaccacagcagtggggcctcctctcccctctttgacagcggtttgcatctgaacggaaactccagtaccacagccccatcgtcaccttcctcgcccatagctaaggacccgaggtatgagaagcgctggctggacaccttgtccgtgcctctgtccatggctcgcatctcaaggtacaaagccggaacggaaaaattaagattgtaaaggagctgaaaatccctactgcctggtgacatcaaccatcgtaacctcacagtgaaagatatgactcacgtgtttgtggtgatgctgacgtagacaaacctactgcactgccaatcatataaaaggaaacagtaatgtcctggaccttcacattcactcactcctcactcatggcttcacccagaacaacttccagtcctgaaggctctattcatgtcctcatgggtcaggagtccggcagctcccggctggtcctctgcttgggatctcaccaggctgaaaccaaggtgtcggctgggctgtgttcccatcttcaaggctcactcagggttgctggcagaattcagtcccttgactttataggactcagttccccacctttgtcagccaagggctgctctccaccaccagagaccaccatgttcattgacatggtcaccctctgccctcaagccagcagcaggcactcaccttatttcagaagaagaaggcagatgggctctatagtagtcataatggaaacagacctactacagataagcagattttgaaaagtgatactgcaagtcagaattatactgctaaatactctaatttgttttgcaaaggagagtatcatgtttaaatagtcataccaaaaa

SEQ ID NO: 721765 - DNA, 1590 bp, Homo sapiens
cacgagccgagccggagccggcagaggggcgcgggcgggacgggcgcctggcggggccctgggctgcctgctggtacctgcgcggacgaaaaccactattgctctgttgtatgatgaagagtccgaaaatgcctatgacatccggctgaagctgacgaaagaggtgctgacaattcagaaacaagatgttgtctgtgtgggcggaagccaccagggcaggaatcgcagaactgttacactccgcagacagccagttggcggcttgggcctgagtataaagggaggttctgagcacaacgtccctgtcgtcatatcaaaaatattcgaagaccaagcagctgaccagacagggatgttgttcgtaggagatgctgttctccaggttaatggcatacatgtagaaaatgcaactcatgaagaagtggtgcatctgctgagaaatgctggcgatgaagttaccatcaccgttgagtatctcagggaagcgccggcatttctgaagctcccgttagggtccccagggccatccagcgaccacagcagtggggcctcctctcccctctttgacagcggtttgcatctgaacggaaactccagtaccacagccccatcgtcaccttcctcgcccatagctaaggacccgaggtatgagaagcgctggctggacaccttgtccgtgcctctgtccatggctcgcatctcaaggtacaaagccggaacggaaaaattaaggtggaatgcgttcgaggtgctcgccctggacggagtcagctctgggatcctccggttttacacagcccaggatggcaccgactggctgcgggcggtctcagccaacatcagggagctgacacttcagaacatgaagatggcgaacaaatgctgctctccttccgacctaggttgtgcatatggggtgggtaaatgagaaactccaaggagctgactcctctcaaaccttcagacccaagttcctagcactgaagggcccgtccttctacgttttcagcactcctccggtgagcacattcgattgggtgcgagcagaaaggacctatcacctctgtgaggtgctatttaaagttcacaagttctggctcacagaggactgctggttgcaagcaaacttgtatctgggtcttcaagattttgactttgaggaccagaggccctattgcttcagcatcgtggccggccatgggaagagccatgttttcaacgtggagcttggcagcgagctggccatgtgggagaagtccttccaaagagccacgttcatggaagttcagagaaccgggcaaatacatcactcacaaatttgaatgtataccatgtgaagggatgaggaagaatgcattataatcctccttatcctaaatagcgggatgatccttcagggaggatgtgtgctgcaggaatgaagagtgacaggagataaatgaggcagcgcatcccagaggagctctgacttcacaccaaagtccagggctcccgcctggctgagcgcggagaatgctgagtgtgaacttagtaactaaagatggctacttcatttccatatccatatataccttgaatgtgaaaaaaaaa

SEQ ID NO: 721766 - DNA, 294 bp, Homo sapiens
acgcacgtctcggtgcgtgtttcagaggcgaggcggcttcccagaggcggtcatctcaaaggcggggttgggttgtgattcagaggcgaggcgcagtcccagagacgagagttgcctgaacttcggggcgtcacacttgctgcgggtagatcccgggcttcagccgacacatgcacatcagtcagaagacgcacacggtcatggacacccagatccagaagtcctcgtagggctcggcgtgcggcctacggcaggcacggccagggcgctcgtcttcctcccgccggaaaggct

SEQ ID NO: 721767 - DNA, 122 bp, Homo sapiens
gcggccgcctactactactactgctcgaattcaagcttctaacgatgtacggggacatgcagaccccacaaagagctctatcttgtcgtgtaccatcaataaagtcctctgtacccaaaaaa

SEQ ID NO: 721768 - DNA, 200 bp, Homo sapiens
tgtttgagtttccatctttcacattagccatgttcctcagctctcccatagtccctggtccaaaggaggggaataagaagcagagaggtcactctaggctcatgggggaggcttgttaactgaaagctttcctataggatgatacagctgaacttttaattagggaaatggaaaatccacattttagggtttttttcctc

SEQ ID NO: 721769 - DNA, 203 bp, Homo sapiens
ggggccggccccccccagggacgccctacaaaactgtggccaggaaatggccgggataaaggatgccccagggctggacgtgtgtaggagttagcgggtttgaaattggtaaaataataataattattaaaggaccgcttttggatggatgttgaacagggtcccgggttttaaagcttgatataaaaccgaattccaaagtg

SEQ ID NO: 721770 - DNA, 267 bp, Homo sapiens
ctattcctgttacagcaataacactggtctacgtgggatagcttttaggctgataagtcaaagaaaccaaatcccatatctcgtccgactcctccgacctcttccttggcttcaaccttagctggggctgcagcagcagcagaagcagctgtggtggcagcagccacaggggcagcagccacaaaggcagatggatcagcccaaaaaggccttgcaccttttccagcaagtgggcaaggtagtaatccagtctcccacagcacacag

SEQ ID NO: 721771 - DNA, 842 bp, Homo sapiens
gttaggtcggtatcgtggggcggtgctaggtatttcgctcgtcgactgcggctcttcctcgagtgcagtgggaagcggcgcggcggtcggagaagtggtctagaacttcggcgtcgggtgaaagaaaatggcccgaaccaagcagactgctcgtaagtccaccggtgggaaagcgcccccggaaatatcacgctggccagcgaatcgtcgcgctcacggaaaatgcgctccctctaccggcgggcgtgaagaaagcctcatcgctacaaggtccgggaccgatggcgcttcagagagattcgtcgttaatcagaagtcgatcgagctgctcatccggaagctggccttccagaggttgggtgagggagatcgcgcaggatttcaagcaccgaggcctgaggtttacagcagcgcgagctcatcggtgcgctgcaaggagggcatagcgaacgtggtagctgggtgggtcgtgtgcgaagatagccaacctgtgtgccatccacgctaagagagtccaccatcatgcccaaggacatccagttggctcgccggatacggggagagagagcttccctgaaggcagggataggatggcagtggggtagtagaattcgtgtcacatacttgggtaaacgttgtgcgaccttattggtaatgacaggtggtttaatacatatgtgagcattatgtacttaagtcggttccatctttcacctccaggatgaatgcgaaatgtcgccttggttcgcagaccctcaggcattgtgagccacagtagactccagaatgacaagctgctcattatgccgacgggatgggtcgcccatctaggcgcccaagct

SEQ ID NO: 721772 - DNA, 511 bp, Homo sapiens
cgatggcacgcctgccttgacgttcagtgtaaagagcggccagacgctgtgacttggctgtacacatataacaacgctgtccatggcagctcccataagtatcagtgttaatcactctaagttgcgtgcacctagctcaacaatgagccctgggaaatttcgtggaatggattattaaacatgagagtctgttagcacttagaaaagggcacggtgagtcccaggggccagcactgttcgcaatgtacggcattactctttgtaacaggattagtagcctgctgtgcccagggagaacatgcaggacagcgcatctcgagtcagcaggattttgacggcttctgacaaaatcttgtagacacgatggagctaataggggttggaggagagaacatataggaaaaatcagagccaaatgaaccacagacccctaaggccacagttgaacaatggactgattccaggcttgaaccggggggaatctggcagaagtccatcccgttcattcaac

SEQ ID NO: 721773 - DNA, 91 bp, Homo sapiens
  misc_feature (65)..(65): n is a, c, g, or t
cagctcagagacccaaagatctcggcaaagctacccccagcggccagccttagccccccaagacnaggtagcgctccagcttctaccaaag

SEQ ID NO: 721774 - DNA, 310 bp, Homo sapiens
cggacctctccctactgtatctaatgcatacttagtgcactaagtaactgttaagaaaccccacctaggtcctgtttatttcatggtggaaaacaggcttcttcaagtcctgtatacaaagagcttgtatctgaattgcagaaaactgtcaccctaaagcagcaatccccaatctttttggcaccagtgaccagttttgtggaagacaattaaggagcatgcaacctagatccctcgcaggcgcagttcataatagggtttgaactcctatgagaatctaatgctgctgatctaggatacagtagggaga

SEQ ID NO: 721775 - DNA, 423 bp, Homo sapiens
ttcacttgtgcctaagcatcgcttgtgtacacgtactagtacctttcaggaacacgctcatccccctatatgggttctggatcggaatcagatataatcaggtgtatgctggtaggagtgtagtctagaattggtagtcatgaagtctgattgtctggatcggaattgcatcattaatctgatgtaattttaaaatcaagataccctaatagtatgagtgagaattggactaagtatctggtgagagtaggaaagagatgaaatatttcttcttcccctaaaggaatttataacctaactgagcaataaagcttaaacacacaaaatgtttttaaaagtaagaagaaaatacgcattagaaatcatattcctacttcagtagaaagtgaactaaactacatgaattggtctgttagaaactgg

SEQ ID NO: 721776 - DNA, 263 bp, Homo sapiens
cccccccccccttttttgggggccccctggggggggtccccctttttggggaaagttttttttccccccccccccgtggaaaaaactttttttttgtgggccccccttggggggggttttttttttgtccccccccccccccccccccccctttttttccgggggcgttttttggtttttcccctttttttcccccggcggaccccaattcccaattaatatccaaaatttttaattaactttacccttttgttcccctggga

SEQ ID NO: 721777 - DNA, 165 bp, Homo sapiens
gacagcatgagcaacatggtgacaaccccatgtctactagaaatataacaatacagacggatgtggtggcacggtacctgtacatcccagctacttggcaggctgcggcgggaagactcccttgaacccaggcgatggcggttgcagtgatccaagatcacaaca

SEQ ID NO: 721778 - DNA, 941 bp, Homo sapiens
ttgcctacatctgtgtatgaacaactttacggtcaatacgcgccgagagaatgtcatatgcgactgatgaaaatcactgtagaacaataattaacgaatggtgtgaacgcaacttttacatacggtaggcgcctgggaatctctggctcgaatcattcaggaggttgagttcgattagcgtggctgaaggacatctctctctgaagaaggttgtgaaaatgcaatgttagtgggatattatcaatacgactcagcaatcgtaaagagtagcctctcaggaggtgtgcacgcagcaacgatcgttgcttggatgcaggacaggttgaactgaaattggtgagggaactgtacgcagatatgcctggcctatggttcaccaggtataacctgccgcgggaaactactgatatacctgggatatttctgaggctggtgcctgggcctctattgtccgtcgcggttgcactgatcaatctgtcaacttttactgtgactggcccgtgatctgcgttcacgcccgctaacccctttgtcctgtgcacttgagctctactcaggcgaccacttcttccgaaggcgatgacattattgcctccctttgtcatttgttcttctgtcggtcaccaccttgggcctagggtatgcgcagtaacttttgtgtccggaggccttttcgtccacttctgtttcacatatcttgctttcctgtggtggagttcctgttggacccacgcgtgtccatcactgaatttgtccctgaaggctcgctagtggttcaatctacattcgtaactatggtctcgtcggcattaccaataacctccctgggcccgtttctacgaatgcgttgaccccctgcgttctcgcttggcgttgctcgacggggtcttcgaccagcaccttcccttgcgactctgatccgcctggttcccccgccaagt

SEQ ID NO: 721779 - DNA, 1382 bp, Homo sapiens
ggagagaactagtctcgagttttttttttttaatgtttaccctttccttatgaccatgcctgtagtagggttgacaaaagtaaaaggacccccggcaaattcttaccccgccgtgttataccaaaaacattcaccttctagcattcaccagtatataaaggcaccgccttgcccaggtgacacagtgttataacggccgcggaaacccttaaccggtgcaaaggatagctataactccacttgtgttcctttaaatatgagggaaccctgttcagtacaagtggcactcccacgaaggagttatccagccgtgatcctcatataattttatacacccagggaacaattgcaccgtgtccccggtgaaagaagaggcgtgcgccacatacaccccgagccagagaagcgagaagagaacccctatagtggaggcccttaaatcttatactatacagtcgcacaacgagaatcacctgtatacaacaaaaccccgcaagagagaacactataaaactgtcacccaaaccacgtgacatctctcacacatactctcacgcggaatgaggagcggcgacacactctcgcggaggaccagcaaaccgcccagacacctctcgcgaaaggacgagaatacacaagtgccgtcagagacacacgtaatcaccccaagtgtacaagagcagagaacccatcaaactatatcacgtaccaaaagaggggaaacaccaccacaaataacaccatgtagaacaccaccagcgggacacacaacaaggtgtataaaccccccttaggcgagcaaataaaccaacgcgcacacaacacacacccctagatatccatagacgaagatcacccaaagtaatacaacaacaaactaagggggttcatatagcaagacgccacagagaacgagacgcaggagaactaccagggaaccaactccccacggaaaggagagagaacacgcccggccaacacaaaagagcggtcccgaaatcggagcacaaccccgaaataataacaggggcccccaacaaagaaaaacaaacaacaacaagacacacaaacaaaagacaacacaaaaacaggcaaacaaaaacaacaaacacgtacgaaaaaacagatacccccctatcgacgcgtcacacccacacaagcaaagagaataagcacaagaagaaaacaagcagagatgaacaacacgacccaaaaacacctcgcgacgaaaaataagaaaaagaagaaccacacaaaccacacaaagaagcaacacaaaaagacacaaccgcggagaggaggaaaaaagaccatcaaatagggagcaacccacgcaattcgacgaaaaaaaaaaagagcgcggaaaaaacaacagggcacaa

SEQ ID NO: 721780 - DNA, 109 bp, Homo sapiens
gctcgtccaggagggactatttggacgggattttggaagactggcatgttaaagcctagatggtgtttacacaggtgcttgctatataattatattcctttataactag

SEQ ID NO: 721781 - DNA, 897 bp, Homo sapiens
ttgtgaacatagactatgtgtgcgcgcgatgggtgccgtgtgtaactaggcaggccgattaaccttgtccccgacccctttttggcgccgcattttcactattcgccgtccgctcatatcggggtcccttcccgcggggccccatttctctcctccgccccgggttccttgtttctccccttctttttggtgccccttccattagcaggaaaacctttgtgcatagcggggtcccccttttccggctgctaagttgctgcccctagagggcctcgtgtcgttggcgacacccccgggtctctcccctcgtccggggcattccggctactctcatatcctgggcgggttctattgcagcattgccaccccctttatccactgtggcgaggccctcctcccctggaaccatcaggtcttcctcccaaaggccccaatgttcttcccagccccaccgccttgtccccacccacgtacctcctgggcggcaccctgggggaagaagcaaaactcggaagtgccaacagaggacgccacagatgtgtctccggggagccccatctcttcacatagtcataagctcttttcgcgagtgctgtcccccactccccccccccgcgtttgggagcacccgtcgcccccggccacagaggagttaaaatgggcgtggggggacaccaccgacacccagctcaaggagggccccaaaccacgcccaggcagactaaaaatagtggacctcgggaggcttttctacacaatgctttcttgacgcactataatttgttaacagagtcatctgtcccctccccccagtgcgaaggcggcaggaaaattataagaggctcttgttcccccccccaaaaaaaaaaaggaatccttttcaaaaaaaaacataac

SEQ ID NO: 721782 - DNA, 1391 bp, Homo sapiens
tggaaaaagtcatggaggccatggggttggcttaaaaccagctttggggggttcgattccttccttttttggtctaaattttatgttatacgggttcttcgaaatgtgtggtaagggtgggggtgcatccatatagtcactcccaggttatatggagggtttctatctatctattaggatctttatcgcttcgaaagcgaaggtcttctcaaatcatgaaaattctattaaatattacgtgctgcttgaaaaaattgaattgaccctaacagattgaaataggattgtttacagtgtgtggggttagtgcactcgagggatagctccgagtataacgttcggggcattctccggaataggccgagaaaagtgtgttttgtgtgggaaagaaagagttataaatttatcacgcccgaagtgaaatatattgcattaggtgaaaaagtggatttagggggcgataggttatgggctcatagggtgtgttagcccttgaagacaatctagggggaaacattctaagtgagaaatttgacacgcctctggcgtatttgagtggggcaaaattaacaggctctcccataattgagaatgagagcacatatggtgtggcgaaaggtgacgctttacaacacgtataaaatacagattaattaaggagataaataacgagaagtgtatctaagggtgaataaaagtaggagcgaaaataaacaaattggacacaggtacaaggagaccaaccaaacacgggtggaacacaacagaaacagaatagaaatcccataaggggcccaagaggcaacatggaagcagacaatacataacgaaaaaagagagccaccccagtaagaaagtttgttggacaaactacaccaaaaaaaacagaacgaaacaaccagcataagagagcaaaagaggaaaggaataatggggcaaccagagaaggggaccaaaaaggccaccgaggtggtacaccaggctcaaataccaacataggaaaattaaagtgatagttgatacaccagacaacaacaccaaagaccagccgaatggatagataacagacgacacacccaaaacaatagaaacacaaacgaggagataaaaacccacggaagaaacaacgacacaaaaagagagcacaataacagacaaaagaaaaaacaaaaaaataaacaaaagacacagaagaaaagaacggaaaagaaaataagggacaacacccaggagaagacacaatcgaacaaaaaataaaacaacaaatagacgaatcccagaacaaaaagaaaaaataacacaaacagagagaaaagaagaactaataaaaacaaaaaagacaaaaaaaacacaaacccagacataaaaaaaagaaagacacctatataaac

SEQ ID NO: 721783 - DNA, 81 bp, Homo sapiens
ctcgaggacacggctgtatattattgtgcgaggggcagggcgtccagtaacttcggggggtctgactactggggccaagga

SEQ ID NO: 721784 - DNA, 790 bp, Homo sapiens
tctgtagctccttggtactatcttgtctcgcgttttctggtatcccatgaagggttcacgaaagtcccgctcgaactttgagaagttccttctgtgcgtcctagatcgtatacccattcatgcgctggcaccaccggaccaacggtcagcaatcctctagatgatcatcctgtcctacatgaggcggcagtcagccctagggattcaagaggaagtaactgaaggtccgtctcatcccatgtccaccatgtaggaggagggactttgctcacggatagaaatccgtgtctcctacaccacactatctacccatcacagacccctttcctatcactcaaggccccagcctggcacaaatggatgcatacagttctgtgtactcgaccaggcattgtgcggtgtgcggtgcatgtgggtcgtttacacacatgcctacaggtatgcgtgattgtgtgtgtgcgcatgggtgtacagccacgtgtctacctatgtgtctttctgggaactgtgtaccatcatgtgtgcctgcagctgtgtagtgctggacagtgacaaccctttctctccacgttctccactccaaatgataatagttcacatcacacctaaatcccgaaaggaaaaaccaggctctaggctcgcaattgttctgctctaatctgataccatcaaccttggggccagcatctcccactgcctccaaatagttagtaactatgatctgacgtccaccagaagattctgggtctaccacactccccaaccccctgctccttcggaggacgtgcca

SEQ ID NO: 721785 - DNA, 289 bp, Homo sapiens
aaaaaaaaacaaaaacgacaaaaaaaaacaaaacagaaaaaataaactaagggcaaggacagtcccgggcaaaggctggggagggaggcagcacggggtcagggaaggtaaccctgaagcaggactggtaaaggcaaataagatggggaggccaagggggggggatcacgaggtcaggagttcgagaccagccgggccaacatagtgaaaccccgttcttttactaaaaatacaaaaaaattagccaggggtggtggtgggtgcctgtagtcccagctacttaggagac

SEQ ID NO: 721786 - DNA, 355 bp, Homo sapiens
cagctgggactacaggtgtgcaccaacacacccggttaatgtttatatttttagtagagacggggtttcaccatgttggccaagctggtcttgagctcctgacctcaggtgatcacctgccttggcttcccaaagtgcagggattacaggtgtgagccaccatgcccagccaggaatctttttgtttatttgttttttattttttggagacagagtcttgctttgttgcccaggctgcagtgtagtgcacagtcttagcttactgcagccttaaactcccaggactcctcctacctcagcttcctgagtgatcctcctacatcagcctcctgagtagctaggactataggtgtgt

SEQ ID NO: 721787 - DNA, 415 bp, Homo sapiens
  misc_feature (320)..(320): n is a, c, g, or t
  misc_feature (329)..(329): n is a, c, g, or t
  misc_feature (338)..(338): n is a, c, g, or t
  misc_feature (353)..(353): n is a, c, g, or t
  misc_feature (364)..(364): n is a, c, g, or t
  misc_feature (367)..(367): n is a, c, g, or t
tagggccatggttaagagtccaagaatccccctttttaaaattttatagttttaggccccgtagttttaaaactccaatgttttaagtttttaagattttaaagggccccaggtttagactattaggggcaatttcaaggttctaaccctaaactgtagtattttttggggggcccctctcctttttagctatcattgcttcctcctccccaactgtgggggtgtgcccccttcaagcctgtgcaatgcattagggatgcctccttttccccaggggatgggcgatttccccccctttcgggccatgttgcccccgtgancccatcccnccccttttnagtacaaagtgtggnctttggggccnccnaagggggtcaggtcccataaaactttgtttatccccgaaaaaaaaaaa

SEQ ID NO: 721788 - DNA, 286 bp, Homo sapiens
  misc_feature (76)..(76): n is a, c, g, or t
  misc_feature (127)..(127): n is a, c, g, or t
  misc_feature (215)..(215): n is a, c, g, or t
  misc_feature (237)..(237): n is a, c, g, or t
  misc_feature (257)..(257): n is a, c, g, or t
taatccaaaatatgcttatcaacttgagtcttctggatgagaaactaaagtggaaaatgttatcatctcttaaatnataaagtgcagatcttagaattttaaaagacatactaaaaaagaaaaattntttctattggtcttacttttttaatttttatttttggcagaaggtatcctctatcataaaaagaaaccaaatcaggcttaaaaagggngtgaggtattaatgactttatntataaaaatcttggaggttnagcttttaaacttggccgtttcgccattt

SEQ ID NO: 721789 - DNA, 303 bp, Homo sapiens
tggggggccagggccccccaaaatttgggtcacaaaggggggggggggttgggcccccattcccccccccccccctttggggccccccccccccggggttggggggggggggggttttcccccccttttggcccccggggtttagggggggggggccccccccccccgggccccctcccggggtttggggggcccttgggctttccccccaccgggggggggtttttcaaaatttttccggggggggggggccccttttgggttcccccccccccccccccccccgggggggccccgcccgga

SEQ ID NO: 721790 - DNA, 862 bp, Homo sapiens
  misc_feature (27)..(27): n is a, c, g, or t
  misc_feature (64)..(64): n is a, c, g, or t
  misc_feature (72)..(72): n is a, c, g, or t
  misc_feature (78)..(78): n is a, c, g, or t
  misc_feature (94)..(94): n is a, c, g, or t
  misc_feature (97)..(97): n is a, c, g, or t
  misc_feature (103)..(103): n is a, c, g, or t
  misc_feature (105)..(105): n is a, c, g, or t
  misc_feature (108)..(108): n is a, c, g, or t
  misc_feature (116)..(116): n is a, c, g, or t
  misc_feature (118)..(118): n is a, c, g, or t
  misc_feature (126)..(126): n is a, c, g, or t
  misc_feature (158)..(158): n is a, c, g, or t
  misc_feature (162)..(162): n is a, c, g, or t
  misc_feature (165)..(165): n is a, c, g, or t
  misc_feature (175)..(175): n is a, c, g, or t
  misc_feature (182)..(182): n is a, c, g, or t
  misc_feature (187)..(187): n is a, c, g, or t
  misc_feature (194)..(194): n is a, c, g, or t
  misc_feature (196)..(196): n is a, c, g, or t
  misc_feature (206)..(206): n is a, c, g, or t
  misc_feature (212)..(213): n is a, c, g, or t
  misc_feature (217)..(217): n is a, c, g, or t
  misc_feature (219)..(219): n is a, c, g, or t
  misc_feature (223)..(223): n is a, c, g, or t
  misc_feature (233)..(233): n is a, c, g, or t
  misc_feature (240)..(240): n is a, c, g, or t
  misc_feature (248)..(248): n is a, c, g, or t
  misc_feature (256)..(256): n is a, c, g, or t
  misc_feature (265)..(265): n is a, c, g, or t
  misc_feature (267)..(267): n is a, c, g, or t
  misc_feature (281)..(281): n is a, c, g, or t
  misc_feature (285)..(285): n is a, c, g, or t
  misc_feature (293)..(296): n is a, c, g, or t
  misc_feature (300)..(300): n is a, c, g, or t
  misc_feature (307)..(307): n is a, c, g, or t
  misc_feature (328)..(328): n is a, c, g, or t
  misc_feature (331)..(331): n is a, c, g, or t
  misc_feature (340)..(340): n is a, c, g, or t
  misc_feature (344)..(344): n is a, c, g, or t
  misc_feature (348)..(348): n is a, c, g, or t
  misc_feature (353)..(353): n is a, c, g, or t
  misc_feature (357)..(359): n is a, c, g, or t
  misc_feature (361)..(361): n is a, c, g, or t
  misc_feature (387)..(388): n is a, c, g, or t
  misc_feature (390)..(390): n is a, c, g, or t
  misc_feature (404)..(404): n is a, c, g, or t
  misc_feature (439)..(439): n is a, c, g, or t
  misc_feature (445)..(445): n is a, c, g, or t
  misc_feature (459)..(460): n is a, c, g, or t
  misc_feature (463)..(463): n is a, c, g, or t
  misc_feature (503)..(503): n is a, c, g, or t
  misc_feature (512)..(512): n is a, c, g, or t
  misc_feature (521)..(521): n is a, c, g, or t
  misc_feature (616)..(616): n is a, c, g, or t
  misc_feature (690)..(690): n is a, c, g, or t
  misc_feature (717)..(717): n is a, c, g, or t
  misc_feature (719)..(719): n is a, c, g, or t
  misc_feature (828)..(828): n is a, c, g, or t
attggtttgtttgttgctgttggctcngtgtctccctcggggcaggcggctctggggtttcctnctcccccntcttcncctcttgctgaggtcnccncctttncntcntatcttgntnagttgtcnacttctctggattgggagcctttgggggattngggntcntgctgtctcngtgtgcnccggntttgacncngatgcttgcnctgtcnnggcncngccnattgtctccnttgctcngtgtgacntccttcanacgcttctncngaggtgacagcccnacanattccccnnnngccntgattgncatccctttgcctccctggcnggngaaaactgntgantccntaganaccnnnanagcccgcctgctctatgagagccganngnggggaatgttgganaactgccttcttcttagtctttttgctaaacaacntctgcngcacatgacagacnngcngctgaacctctatgaccgcctgattaacgagcctagtaangactggganatttactantgggccacagaagctaaaccagccccagaaatatttgaaaatgaagtcatggccctgctgagagactttgctaaaaacaaaaacaaagagcaganactgcgtgccccagatcttgagtacctctttgaaaagccacgttgagctgtgctccacggcctggcatgggggntcagtctgtggatggtaactacttatnanggacgttagccttgcttccggcttcttagatgcccagctgccctaccccagaccactggtcctgcctcaagtgatggacataaccctctcctaggacatacatgtaaangcacaatgtgactcattctcatactttttgttca

SEQ ID NO: 721791 - DNA, 222 bp, Homo sapiens
ggaaactctgttatatgatgataccgtgagcactctctttaatcaaggacattccttttcagcgaaagcagcgctctgatttaccaagtctgtgcggaccgcgcgcgctttaaaggaatgaggttccagcggtcgcgccaagcagcgtacgcagcctattttaagttatgctaccttcgccacagaaacccagaacgtttgtaatggtcctgaggcggaacg

SEQ ID NO: 721792 - DNA, 395 bp, Homo sapiens
tgttgtgagtcagaaccattccgcagggctccactcctctgactgtccatctactagagaccatgcggctgaaagtgcactttcagtgtagtgcagttgaggctaatatacaaacaaaaacagcataaaccagcactagaccaaggtgcagaagcaaatcattacaccctcgttggcaatgaaaacatccacggcacggactagttagatatatttgggtgccaagttctctctcccgcactccatcacttgttggactgagcaagaactaatctgtcttcccaaagtcgatctcacccctgaaatgagggaggggaacaaaaatcacagtttaagcgcacaacaaggacgaaaggtcccccagtacaatacaaactacatttaaagtggtcaca

SEQ ID NO: 721793 - DNA, 627 bp, Homo sapiens
gggctggggaggaagacgaccagaaaatccacattgtatagctcttcaacgttgggcatttgataggcattcaggttttctccatgaaaagagggacagtcacccaactattaatatggtgtcatctgtagttggaacatcaaattgaagcatattgcgttgagtatttgtctctaatctaacaaatgactgtgggacacggggacacgagaacaaaatgacttggttcatcttttacatacagtgcatcttaagaaaagtcaaatcattcccactattacccaggctgtgacaacacaaatagcacaaatggccgaaagccataatgctgcggggcgcgtgccctgcccggccaacgaactcttgcacctaattggtgggcgccgcccgtaccaagtattggaaacataaacctgtgcccatcctacggttcactcagtacaacacaggtggctaagtgcctacgtggcttggtctaccacaactcgatggaagaccgtgcgcgcggggcctacggtggttcttcggcataacaagtcaagaaggctaactggacgacaacacgggattctaacacaagggggttcccaagagaaagccaaatttaaaaatagccccccccggggg

SEQ ID NO: 721794 - DNA, 1039 bp, Homo sapiens
ggacgcgcctgaggaggaggaggaggcgggggcggcatggtgctgtggtggtggggactgcggttggcgcgggaccggcggtctgcaggtggccgtctctaccgggcctgtcgcgttgtgcacccgcgcccgtgggacttgggctcggtgtcacccagagcaagttgcgtgttcatccccaaggttggccccgggattggggcacgacagagtagagtagccccagatgaaggagagggcacaggtcgaccaaatggcagatctatcaacgagccaaaccttttaataggaagggcttacacgcgcagacaaacgatccccaagggtgtattagacgaatgtatcaagcccccaggttgaattgagcaacatcccgacattgaaagaaaacgtgcgagagtgtgaatattatgaggaaagcaaaagaccaagttgggtgatcactccagaggagcaaggggtgtaataaacgaccaggtgtttgtggaaacagaacaaacatgaataggcagttggggaacaaacgagttgttctgtaaaacacgagagaggatctacgaataagggccgaccggaccttccgagttcacaattctttaagaattggcgcattggcataagaaggaacatgttgaggaaacaagtataagacagatgggggaagccattttgagtgcagcaaacaggaaagagcatcacacgcagattatcttcgctgagaaacacacaattatgattcgatctctgtgcaacgcggcactcagtcactggaacaacaacatcatatgttgccccgcccaaagaagcgacagtgtacaagattgtagagacacacgaggcaacgtactgacacccattcagtggcattaatacaatatcgaaccctgtgggaacagtaacgaagcaacagtattataatcaacacgtgcacatagcgaaaaggaatgggtaacgtagcaaaacgtcccgatttatctattttgtaggcctggcacgacacagtccttatacatgcggagcaaagagagtggcaaagcta

SEQ ID NO: 721795 - DNA, 480 bp, Homo sapiens
gtagacttcatacaatagagcttatacgctaatgagacgacaggaagaaacagcaggaacacatatagctgaaatgcatacgggatctgagctacttacgctagccatgggatgataagaacaagataagagacatgaggaagactacttcaaggaagtgcttaaggcatgttttggaaaagagaactcaaggtctggcatggagaaaggagcaagggcaagtgatagctgcagctgtctggcgtcactgtaacgctgactactactctgagtgagttcaacctgcatcttctccaatgtgacatgcacaggtattacgtatacatgtttcactgatagaaatttgagtccaatgctgggatgacaaggaagacatgggatacctaatcctaggtgctgccactgggacaaacaagaagcaccagacacagtgctgcattagtgcggtgcagctatgctgagggctatttctacccgtgc

SEQ ID NO: 721796 - DNA, 215 bp, Homo sapiens
tgtgtgcagtactctagtagagtcagaatcaggcctagatcagtggtcgctggcagatctggcgctagtcccagtgctggatatctgtcactgctttgaaacaggacctcacggacaggagcatgaaggatccacaggaaggctggaccagatgtacaatttcaacgctgggcaggctaaggtgggccacattatggcggggtacgagctcgaat

SEQ ID NO: 721797 - DNA, 168 bp, Homo sapiens
tgtcatcaggtggctccaggccagactctgtgctgagtgctgaggctgagggaccctggtgcaccccaaatggggagacaacgggtgagcgagcagtctgaggagacagagagggtgataagctgggggacatggccgctgtagacagggagccttcatggctgatgg

SEQ ID NO: 721798 - DNA, 464 bp, Homo sapiens
aggcccacccgttttcatggccacatctgtccctgtggccacatctgtcttggtggccacacatggctgcaggctgtgcagcacctgttccagccggaccggcagcctcagcgctttcggtggcgccttggaacagacgttccctccctgtgcacttcccctcacatcagggcccggatctcatgtctggcaaggccaatggctcagagtgggcccgcatcaacatgccaaagtcatcgtattacaagctcaggggccttctaccatgggctgggtcggtcctcccgtaaggcacggtaggcggacaagccaggtggaagatcaggagtaaagaacaatgagcaatggaaaccttctctccgttcgtaagagtgaaagagcctctgccgctcatggtcggacggcttcgggccctgcccaggcgggccaagataggccagtagacagcgtaagaacaggcctat

SEQ ID NO: 721799 - DNA, 1752 bp, Homo sapiens
  misc_feature (1752)..(1752): n is a, c, g, or t
ggaatgccggtgaacgagagcgggctcggggtcgccctgttgacgctgggatggaggcagccgacggtggagactatccgcagtacaggtgatcaggacaaggagagacaatccggggagcccgggagttcggccgtgacgagagagcggtcgccggcgggccgtcgggcagcgtgatgtcgtcgtcagagtcacaggctcgtacagaataagcgcagtggaatggacgtgtgaagcgaagataggagagcgtcctagagtctgaggtgaacagtgaagagaactcagaaatcccgtgaggagcgtggtactctcatcatacatgtcctccctgcacttcatcaccgagaactccgagaagagtcgagtagtccttgtactctcctggaggtgcgcgtgctcctgagatgaatgaagggcttttcggtacatcattaatggcccatgatgtccaggaagtcatgaacctggttgctccggagcccatgaagacaaagcgagggatatacacacgagccagattggataagccataatccgagaggggagctatggaatgtgaggcgcagcgctgcgctgtgccaggagggtgtatggagaaattgccatcacgacatgcaaggggtggagacccaattcgagccaattccacgctatgtgtggtcccagtccacatactcggtgggcctcgaaaaggcgtgcatcttcgaaatcgaattcgcgctcggataggctgccgggcatggacttatcgatggggaggcgaccccccagaagaaatctagggcataaagagggacaaaaatctttgttttcccattttacttctggggtgtagcccgggggcaaggtttggcaaggatcctggctcgactagaggtgacaggcgctcaagtcgcgcttggcaaccgcaaggctggggcaagcattggggacacttcacgactggtccacaggggatgcctgtggggggcgcctttaaccgaaaaggctgtggcgagtccaatggaaactcagggaggggagcccttccggaaatgaaacttgtgtgtgacacatccctttaaagagacccggggggagttttgaacctggtgggcgaacccctctttgaggggaaaatactcccggaccatcaggggcccacgggttggagtgggccagctctccctaacgaaaacactttaacaggattaccttgtggaacccccccaggacttctgtgcgaacagggaacctgggtggtttccccaaagcgtcccggcatctcacagggagtacagcttagcacgcactcttgtgtgagacacaccagccagcaaagttctccgccaccagaggagaccaagggcctcagagggtggagcaccccaggcgcgttattttacccagaaacagaccacaagcacactccatcactcacaaagggagacagaagaaagacccccactggatattattctctcggagggacaaaataaagaactagtaattcggatggacacctacaaaaagaggaggcgccgacaatctcgtacgacactgatgcatgcaacaatactactagctagtgcgtcccatgatatcgtgggactgaataaatcagtcaaatctacttacagccgtcacacaactcaacgtgcagaagagacagcagaaaatagacactacagacagatagaagcagcggacacaagacgagccgagcgaccacgtcgagtcacacacaggaatcccacgcacagagtgagn

SEQ ID NO: 721800 - DNA, 267 bp, Homo sapiens
acagacataagtaaatggccacatactatttattatgaataggaagactcataaaaatatctgtttcttcaaactctacaaattccgtgtacgtccaatgaaaatactcacaggctttttcctggaacctgatggttgaatcacacaatttatatcggaagagtaccggaccaagaaaagttaaagtgatttctgatagataagaggagcaggacgcattgacatacaaatggtgcaggcttataaaaaacatcagtgacacgaggc

SEQ ID NO: 721801 - DNA, 618 bp, Homo sapiens
gaacattaaagactggccggaattgggtgcgctgaccttgaatatcgtcctgaaagtgtgctcgaagatcctcgacgaagtgaccaccaccgacgaactgattccttccggtgaaacctcttcttatcgttcaaatccgattggtctggcggagtttaccctgtctcgccgcgatcccggttatgttagcagaagtaaagcgactgctgagctggaaaatcagcgtctggcggggaatgtcagcgagctgacagaggtgtttgcgcgcattaagcagattgctggtcaggagcatattgatccgctgcaaactgaaattggcagcatggtctatgcggtgaaaccaggcgatggttctgcgcgtgaacaggcggcgagctgccagcgtgtgattggcggtctggcgaatattgccgaggagtacgcgactaaacgctatcgttctaacgtcatcaactgggggatgttaccgctgcaaatggcggaagtaccaacctttgaagtgggggattacatttacatccctggcattaaagcggcgctggataatccgggtacgacgtttaaaggttatgtgatccatgaagatgcgccggtaacagaaattacgctctatat

SEQ ID NO: 721802 - DNA, 183 bp, Homo sapiens
cagcaggggccatgctgggggatttctgaaggctgattccaagcagaatatagaactgcggcacgggagaccaggggctgtggatggtgctctcctgggaaccaaagaatgtggttctgcaattggcttggtctagactattctccagaaaaggataaaacatgtttttgagcaactgcctag

SEQ ID NO: 721803 - DNA, 164 bp, Homo sapiens
aataagcggcatggtggtaacattgcatcaggagatagtctagaggtctctaattctgcaggactataccgacgtatcaggattcagtgacctcattcacgatgtctgcattgtttacgacctatgtccgctctagggtatgtagcctccactagcgtctgtta

SEQ ID NO: 721804 - DNA, 153 bp, Homo sapiens
tcccttcacaaaactttagctgagaaccaagtggcatcagttttcatctaatcagctagaagttaaatagcccctgattaagtttcatgggcttaaaataatttgtaagaattagcagaatgttccccctttttttttgagttttaatatgta

SEQ ID NO: 721805 - DNA, 752 bp, Homo sapiens
agtggtcatgcgacgcacagggttggccccgtcaccttcaaaaccgacaagaccttcaccactgtcgcccgaagaaaggttcatggtgacatgctcaccagaggtcatcgagcgcgcggtttcattgatgaccttagccggcaccaaagcagtagcctcagcgtcggtggcgctgggattccaggtgatttccttgagagccatccggtaacggtctgtagccagcagcgagagggtctctccgttgatttcgacgcgcacacccgtaaagaccggcaatagctcatcacgaccagcagccacgacgacctgagcaacagccctggagaaaacactagcgtcaacagtgcccgttgctgcaggcatgtgcggcagatcaggatactcatcaacaggtagggcctgaagggtaaagcgagcagacccgcacaccagatccatcttggcggggtccgtcgtgatctgaaccggcttgttaggcaagctacgagcaatatcagcaagcagcttgccagagacaagagattctcccggctcgtcaacttgagcggaaagggtaattcgtgcgctggtctcattgtcggaggccgacatcaccaccgagtcgccctcagctcgcacgagcagtccagctaaaatcggcactgtcggccggttcggcagactgcgagcatgccaggcaacagcttcggccatgacatcgcgttccagacggattccactgcgtccccttgatttggcgtctcgcactc

SEQ ID NO: 721806 - DNA, 331 bp, Homo sapiens
ccccagtatagcccaggtacacagcgagactctgttcaaaaaaaaaaagaaaatttaaaaaagcagaatcacgcagggcctgtgtaaagccatatacctattccatattggcctttaaagaaaatttgaattgatttatttaaatttaatttcacttaaattgagttattaaaacagtttcaacacagggtgaaccaaaaatctcaaaaaacaaaggcacaaattagatgtggcatttaacaaccagaaaaaaaaccttcactcttcagaatttgtgaattaacatttttacctttaatctctttcaagccttataaggtttcaaggtctc

SEQ ID NO: 721807 - DNA, 535 bp, Homo sapiens
  misc_feature (352)..(352): n is a, c, g, or t
  misc_feature (362)..(362): n is a, c, g, or t
gttaaactctagattaaattcctcccgcggttagcctgacccatgcccgggactcagtggggacagccacacaagttagactctagattaaattcctcccgcggttagcctgacccatgcccgggactcagtggagtcagccacacaagttaaactctagattaaattcctcccgcggttagcctgacccgtgcccgggactcagtggggacagccacgcaagttaaactctagattaaattcctcccgcggttagccttgacccgtgcccgggactcagtggagtcagccacgcaagttagactctagattaaattcctcccgcggttagcctgacccgtgcccggaagtnagtggagtcngccacgcaagttagactctagattaaattcctcccgcggttagcctgacccatgcccgggactcggtggaatcagccaccccagacctctctcactgttatcatttttgcacaggtggtttcagcagcttgatgccaaaaaaaataaaaaaggaaaagtattctgaaaagcca

SEQ ID NO: 721808 - DNA, 525 bp, Homo sapiens
tctgcaccacagcagtatcatcacacacagacgtatcatcaccacagccgtcatacatcacacacagcactcatttggcacgggagttaagtgtgattatcggaacaggaggacacgtctgacagaccacgcggaaagaagaggccgtcacagaggccacgtgttttgattccgcttttatgaaatacccagacgaggcagatccacagacacagacagcagggaccggggacggtggggtgtctgctaaaaagacggtttttctttctgggggatgaaaatgcaccaactttagatcatggtgttggctgcgcaattctgtgaacatgctaaagaccaatgaatgacacattttaaagggtgatttgagggtatatgaatcacatctcagagaaagctgttatgaaacacctatcgggcggggtcctaaagtggagtcacagatcatccctcagagggcactggcccagaaaccaatggagggagacgaatctcccccaaaccctgtacttttccagggacagg

SEQ ID NO: 721809 - DNA, 137 bp, Homo sapiens
cctagaacccctgccagggctgggggtgagaaggggagtcattactcaccattatcataggccccccccaaaagagtccaaggaaataaatgagttatttcggtgcaaaaaaataaacaaaaaacgctctgcggccg

SEQ ID NO: 721810 - DNA, 670 bp, Homo sapiens
ccagaccatggatttctcagtaacttagaattgctggtaagcttcacatggcctataaggtataggtcgctcagtttagctccctcattggcaatgtcttgcatactgtctcagcgatatcatggatatgcatcgtgtctttgcaaggttcgtgtcgctgagctgctagctaggctacattctcgccagtgctaactatctcatgattatctgggtcatatatttcctgcagatatcatatacttgagtcatgtgtcattctcgatgcttcatacttcatcatctcttataccattctcctggccgtctaagtagcagcgtctttcatatttggtcatgatcattcatctggattataagtgagttggagtactcctatctgctgtttgtcttctgatgcattgttttcaccatgatgtaagatgtctctcacagcctgtagatcctagtatcctttggtctgatcagtagtcagtgctattcgcattagtcatggtagttgctctaaaactcctgagtctattcatcttacattcagcagttgtcgctggtcgctatataagctacacatgttctagagagttatagtagagcatagaagtagagtctttcatagagagggtgcatgatcccgcgcatcatgtaggagtgcctgcagcttcaaccctag

SEQ ID NO: 721811 - DNA, 334 bp, Homo sapiens
gctatgttgcccaggctagagtgcagtggtgcaatctcacctcactgcaacctctgcttccgacgttcgggcgattctcctgcctcggcctcccaagtggctgggatttacaggcgcctgccaccacatcctggctaattttttgtgttttgggtggagatggggttttgccatgttggccaggctggtctcaaggcaagtgatccacctgccctggcctcccaaagtgctgggattgcagatatcagccaccgcgcctggaccagaaatgtttatttatttgggttcacaaaaacaatgaggttcaggaaagcaatgagaattactctgagtc

SEQ ID NO: 721812 - DNA, 539 bp, Homo sapiens
ggctgtatactatcaggatcacttagcagagtctacagcatcagatacagaggaagcttcaattcaactttcagaaaagattccagctcgcatgatctcatcaacccagaaaattgtggggggcaccagtgcaggaatgaagaagctgtttctttacacaatcgttatccccataatgcctggttcttgtgctaccacgggctcaactaaaaggcaacaaagtaaattcagtcaataagaaccaacaatattgtgtgtggctaagcttatcaccgatgactcatttcctccagtataaactatgggaatacaaagcttctctgatagcccaattttctactctaaaccatgacccctatccacaatatttgcaggagtgtctgacttcaacttagaagacctgaacgccctctctccttctggatacctttctgtttacccatactaaagtacagcactgcaactctaatctggctacaatggactgctcatttccctcattccagacatcttttttattacatcataatgatttctgg

SEQ ID NO: 721813 - DNA, 418 bp, Homo sapiens
  misc_feature (347)..(347): n is a, c, g, or t
gtttatcggaggcacagtacagttcctttgtcccgggacgggatgtggcaccttcaattcctctcagatcgattaaatcaaggtttgactttggtgttccattttgttttcaacatttccatgaattaccaagacacagctttctacagagaagcacctttctccagatcttcatggccatttgggacacacagctccaaacccaaaaggtgtccacgggatcaacccacaaggcaaacaacggctttctaaggaaaagccgagtttctaggaggcagcccacttcggacgtgtccttcagttaacaggctgcagtggacagcgtgtggtgggtggaggaagacggnagatgagaaattcaaggagattcaccacagagcagctttctggctcagctgttctagggtggcatcgataa

SEQ ID NO: 721814 - DNA, 85 bp, Homo sapiens
ccctcccccgcgcgggccgaggccccccccccttcccccatttttggaaaacccaaaaaaacccctgggggcaaaccaaaaaaaa

SEQ ID NO: 721815 - DNA, 592 bp, Homo sapiens
tacgcgcactttatgtggatataacaggatttccacatataggtaggagtatccctaaaccaaaaatcgtgaaattgaaatcctgggccaggcaaagtggctcacgcctgtagtcccagtactggggaggctgaggtaggaggatggcttgagtctgggacgtcagagctgcagtgagctgtgatggtgccactacattccagcctgggcaacagagtaagacctgcctccaaacagaaagcagccttctccgtgtcagcaataaagctgctttgctttattattatttatgtcttcactggagtagcagttttaatttccctcaagaacctttctttggcattcacaacttggcaaactggtgcaggagggctagcttttggcctgtcggcttttgacatgccttcttcactaagcttaagcatttctagcttttgatcgaaatgagagacaggtgactcttcctttcctacaggattaaattgacctaacgttattacgttattactgttgtgtctcagggagtagggagccctgaggagagggggagagactcagggaaatggccggacagacaggtgcagcgtagaat

SEQ ID NO: 721816 - DNA, 103 bp, Homo sapiens
tatacctctagttagaagttcaatagcacattgctgctggggtcagagggaggcggctgcttcctgccccaccctttccccgggctgctgtgctgcttttgtg

SEQ ID NO: 721817 - DNA, 631 bp, Homo sapiens
gagctgggggcatgtccgcggggggcgccgtctagaggaaggccaagcagccgcaccacgctgtcggtcgcggagagacgcaagtcgagccaggccgaggcccgtggcggtgaattgctgcgtaacggggttgcccgtcagcggggccaacctttccggatgcccgatgagctttgcggaggtaacggagcggcggtgaccatcgaaggtggtggaaggtgcgctgtttccggccggcgatcgggctcgtgcggcgcgggtgccggggcggtcagggggcggcggtcccatgcgtcttccaccggaggtgggcacgcgacaaagctcttggagcgtgtggcctcttcgggggacagactcgttgaggggctgccggtgaacgacggggacaccgttgtcggtattgagggggttgaagcccgaaggcagaaaaagacatgttgcgacacactttctcgcttgacccacgcagtaattcactcggcctacagtcgtgtctgcccagtgggggaccaacactcggggaagtgacttggatccataagcccaagaacgtacgtggcggccccttggtggattggttggcatacattttttgtgggacactcacgatttgggggacagttgccat

SEQ ID NO: 721818 - DNA, 383 bp, Homo sapiens
cagccaaaaggggtgctggcctaatcccaggcagtattctgactcccaacccaaacctattgttggtccactagagactttggatagaaaccagaggagaattggaagggccaggaaaaactcaggcatgtaaaacaaggaaccaattttaagggtggaaagctaaggtggagatacatagcatgtataaatacaactaaagagccacggcgatttggcacattttagaggacagttaagactcttactatcctccagttagcagtagatttcctcctattcgcacacctgccattgccattttccctttctgttccaaacgacttcagaatggcttacaattacacccagctaacatctgtatcaggtttatattcagtgtc

SEQ ID NO: 721819 - DNA, 588 bp, Homo sapiens
  misc_feature (8)..(8): n is a, c, g, or t
  misc_feature (11)..(11): n is a, c, g, or t
ggcgatgnatncggccaaccgcgccgcgcacctgacgcagcgactgctgacgttctcgcggcgccagccgatcgatccgcagccgttctccgtgaccacgaccctgcaatcgatggccgacctgttccggcgctacaccggcgaaggcgtgtcgctggcgttcgagctcgatgcggacctgtggccggtgcgctgcgaccgcaaccagttcgagaacgcgctgctcaatctggtgatcaatgcccgcgacgccatgccggacggcggaccgttgacggtgtccgcggccaatacttatctggacccggcgttcctgagaccctatccggaggcgcaggcgggcgagttcgtggaggtaggggtgacggatgtgggctgcggcatgacgcccgacgtattggcgcacgctttcgatcccttcttcaccaccaagccgctgggagaaggcaccggcctgggcctgtcgatgatctatgggttcgccaagcaggcgggcggcgtcgtgacgctggaaagccaggtgggggcgggcacgtcggtgcgcatcttcctgccccggcaccagggcacgacggccgatgcggccgc

SEQ ID NO: 721820 - DNA, 223 bp, Homo sapiens
  misc_feature (33)..(33): n is a, c, g, or t
tttaaaggcaggggctattcagggaagcagtgnacatacatgtcaaagggtgctgggacttagtgctgctgaaaagcgtgggtgaatttctctcaataatagctgtggagcctgtggagtcagtgttgtggattggctaggcctcttttcatgcacgcctggggagactgcgttatctttttggcaggtgggtgaaaatgtgagggctcatgccccttcaagg

SEQ ID NO: 721821 - DNA, 176 bp, Homo sapiens
tgtcccattcacaatataacgcactgaccgagatccaatagaggtttctcatgttctctcaccatcttcatatgagttcagtgtctagaggtgcaggcatctgaagtctggtggagtgggtgcagtgatggctcaaagtgtgcaatgctccgagcagaataaagcagtgcgccgtc

SEQ ID NO: 721822 - DNA, 321 bp, Homo sapiens
ctggcggcgcaagacgtgctggcaaatggcggcgcgggtgtttctccattctggctggtaggcagtatcctgatgcttacgctcggcgagctgtgtctgagcccaattggtctggcgaccacgctgttggcaccggaaagaatgcgtggacagatgatgggtctgtggttctgcgccagtgcgctgggtaacctggccgcgggtctgattggtggtcatgtgaaggccgaccagcttgatatgctgccagatctcttcgcgcgctgctcgattgcgctgcttatctgcgccgcggtactgatcgttctcattgtccgattc

SEQ ID NO: 721823 - DNA, 319 bp, Homo sapiens
tctacaggatcccctcagatctgctcagttccatacatattaagtatgtccagtaactgggactcagctcagctcatcattggcgttcagcgcaccccttccatcgtttctgtcagcttataggctatattaccaccgaatgatccacaagcaaggcttgattaagtccagtcgtcccttacgggtcctctcctttgtcgcagcagccttttttctctgctggtccccatatcaggtggtgtcccttatcgccacagtctgaatccgtgagttattgcaaggcatgtactatgaaattggtattgctgtgcatctgaca

SEQ ID NO: 721824 - DNA, 318 bp, Homo sapiens
gcgttacctgatcctgctgccggtcgcgatttcctacgtgggcatcagcaagcgcgccatcgccaaaagcaagaaagacgcgaaccgcgaacatagcttctggcgcctgctgtccaaatttgccagcccgaaagtcgcgccggtttcggtgttcctggcgttgatcgcctttggtggcggcctctggtacagccagaacctgaagattggcgacctggaccaaggcgcaccggaactgcgcccggattcgcgctacaacaaggacaacaacttcatcatcagcaattactccaccagctccgacgtgttggtggtacg

SEQ ID NO: 721825 - DNA, 190 bp, Homo sapiens
tggacccaaggttcagtccctttgctttcaggaccccctgtcctgactctctcctgatggtgggccctttgtgttcttctcttcctgtgggatctctttcctttttgacctggatacgctttggtttttcaacttttctaccccaaagaaaagattattcaataaagtttcctgcctttttgcaaacata

SEQ ID NO: 721826 - DNA, 483 bp, Homo sapiens
  misc_feature (28)..(28): n is a, c, g, or t
  misc_feature (285)..(285): n is a, c, g, or t
  misc_feature (291)..(291): n is a, c, g, or t
  misc_feature (451)..(451): n is a, c, g, or t
aaaaatctgccagccaatacagaagacnacataaaagctgccatcaaccctaggttggaggatggagaccaaaatgggagcctgtaatcatccagtcagccctcaaatcagtttgaggtttaaatatatacttacctacatgtccagaaattaaccaaaactaagtggtcctaggcaatgatactcttaggtgccagagcaacgcaaatagctcaggcactatctcaacccggccatgtgagattcccacgataagccttactcacaaactgatgtacaaacgcncgaggnactaatcaaacagaagaaagagccaacagggtcaacagacataactatctctaaaaatgcagaaaagatggtggtgcatgcctatagtcacagctattcaggaaagcttcagcctgggagttcgaggctgcagtgagctgtgatggcaccactacactcnatcctgggtgacagactgagactctgtcatta

SEQ ID NO: 721827 - DNA, 214 bp, Homo sapiens
tagaggatccctttgctggtgaggtcagctgtatccagacttcagaggcatgtgatcactgaggtcaggagtcgagacagctgacacatgtgaaccgtctctataaaatacaaaatagcagggtggtgggggtgctgaatccagctatcggaggtgaggacgagaatcgttgaaccaggaggggaggttgactgaggcaagatcgtaccgttgc

SEQ ID NO: 721828 - DNA, 133 bp, Homo sapiens
gttcccactgtaaacttagtccatatctctgtatatgtaagtctgaattattctataaaaatcacattaaaaaggtaaaataacttaagtgcaatataacctgatctgtatcttataaatttcaatccataaa

SEQ ID NO: 721829 - DNA, 678 bp, Homo sapiens
agatctttgataagtatcccatgctgcactgacaaagctactaatggtgaatcatacggagtctgcgtctcatcagttcatgtgatggtacagcgttagccattctgtgagcttaagattcaagtgctagcatcctttcactcgactaaattcaatatctgacagtgagatagggtcaaagcatgtcggaggcctgctaatagactgctgccactaggtgagaccaccctctgcacttacaaagagctgtactttacgcaggaccattgatctctgtgcacatagtggtgcacacctgtagggatagcttgcttaagcagctgtggcaggacacttgtacccatacttaacggccacagggagctatgaacagtgccactgactacatcatgcttgagagaagcgttcgcctgtctctgaaacggacagctctcttttttttgccaaaactgtccaggtgttctggagggtttttaagacattgtcacaagtggtaacttaaattgcgccactccagcaatgctaatgttcaccgctttttaaattcattgcattttcttgaggtagtccactgaataactttggaacccgctgacatatgaacggttttgtttacaatttaaggagggatctcaacaccccccttaacgttttccaaaaactgtggaaatgtattac

SEQ ID NO: 721830 - DNA, 202 bp, Homo sapiens
gaggttttcacctagtcacagagcagcacctaccacgtcctcctttccacacctagcaaactctgttacttcggctgaatatttagtgtaattacatctcagctttgaggtctactgtggcaaatttccggattaagaggttccctggttgtgaaaatacatcagataaatcatgagggccactatcatcctccttctgctt

SEQ ID NO: 721831 - DNA, 475 bp, Homo sapiens
agctcagtgaccacgagttcatcgaggaaaaggaaaacagattgctccaattgtgtcagcgaactatggctcttcctgtaggacgaggaatgtttaccttgattttcgtaccatcctagttccaacatgagccattgccatattccatcaattgaatctagactgtggcgtgccccttcctcaggaacacacacagtagacctctaatagctggaaacatcgagtgtgcctccacaatatgacaaggctgggccgagctttcataagtggtagtggctagctggcctagaagatagctcctagcctcccagaatcgactcaggcttggaattgtttacaaataagcccaagacatgctgacgttggccaatgagtatgctggctttctcatggctctgggtttgaatgggcaccttaccaagctggcgactctcaatatccatgactacttgaccaagggccatgaaatgacaag

SEQ ID NO: 721832 - DNA, 591 bp, Homo sapiens
  misc_feature (591)..(591): n is a, c, g, or t
ttttttttgagacccattcttgctcttttgcccttctttgttggagtgcaatgcctctatcttggggcgctgctttctacacctcccggttccttccttttttctttctttttcttcggggacaaagtttttcctttttcccccccccccccggggggcacttgcgttttccgggaccccccgaatcccccccccccgggtgtttaggagttttccccccccccccccttcggccgcagaatccgggggccccccccccccccccccctattttgctctttttgagagagacgccgttttcccccattgccggcccaccccggggggtgttcctcccccccacccccccgggggtccccctttgtgatcccccccccggttcttctttttggggaacctgtggccccctccttcttgaagaaaccccaataaccttttttttcccccccccgaacccccttaatattttccccctcttcccccccggggcgggcgccgctcccctgggaacctccccccccgacctttttggggggcccctcttttatttttctgccccccgctcgcgggcataaacccctggggggcccn

SEQ ID NO: 721833 - DNA, 169 bp, Homo sapiens
tttggggggggggggaaaaaaaaattggccctttttaaaaacggggaaaaaacctggggtaggggggggggtccccctccaaatgtttttttttacaactggggcatgggcctttgggggaggaagttttttttcccctaaggggcccccataaatgtttgttttttta

SEQ ID NO: 721834 - DNA, 458 bp, Homo sapiens
  misc_feature (382)..(382): n is a, c, g, or t
  misc_feature (385)..(385): n is a, c, g, or t
atgtgggtgttctgattttgggttggtggttggttggttggttggttggttttggttttgttgagacagagtttcgtgtatcccaagctggcctcaaacccactgtgtagcagcagatgaccttggacttctaagatcatccgtgtgtgttcctgacagtgtgatgagtgtataggtcagagccctgtccccacagttctccatggagcatcaacctgaattgaggagcgaggaggggaatgtcctgtgctgtacagaacttggggttttgttctaatttcatctctggtttggttttgttttctggctccttccctctctatgtgtgagagaagttttttaaattgtctgaattgtatgctaagtagcttatctccaaganagntgtgtttaactagtgatttttgcagaaaccatgctggatattaggtaaaaaaattaaagggtttagggttttg

SEQ ID NO: 721835 - DNA, 776 bp, Homo sapiens
atgtgtcgtactttcatagcccttattttttgttctgcaataggaaccctttttccctacggacaacatgggttcggtctacaacggcggtgtgttccatttcccgctgcacttgtgtgatcggcccatgtccgcatttgacttgcctgcgtctcctgatgtttcccaaccctcattttctactttggcgcctcaatgggataccccatagtgtcggccaatcgtgtatcgccctttgcttagtgcctttgcgtaatgacaaaagagttttgcgtcagtgcacgtggatgacccttccaagagtgcttgatgaccacgcgtgacactggtgtcgtgtctcccttactcccatcacgtgaccacttcgtcgcaacatgctttgtcacaagaccatcttaaacccaaatggcttattcccaaggaccaggaagattgactccaaacatctctctagtgagcagtccctcacgcagtcgctccctatgtgagttcgtcccactgtgctaagatgacgagcatcttcgttgctgtctcccattcccgtgggtgtcatgagagcgtgtggtacgtgggtcctcaggtccccctgaactccctgtataatctgctataaatgatcgggagtcattcactggcgccgccccacccgcacttatgcactgtgtgagtggtctcagtcagtctcctactctgtctccactctcttccgctctactttagtgttcactctcattgttcgggtctaccctgcacccgtcggtccccttgccagctta

SEQ ID NO: 721836 - DNA, 220 bp, Homo sapiens
  misc_feature (1)..(1): n is a, c, g, or t
nttaagctaatacgtcgggatgctggtgtttagttgcaagagaaacatcgggtcctactgaagcccgcgggccatcatggcacagtggtgcattccccagtagtacttcaatcacgtgcgacaggcccggtccggtttcagttcctgaaagtcccacgtcagactaaagtgttgttacaacgatccgaagtttgcgccacttagtgatcacttaagcgcc

SEQ ID NO: 721837 - DNA, 417 bp, Homo sapiens
ctgaggcagaagaatcgcttgaacccgggaggcggagtgagtagtgagctgagatggcagctgggcaacagattgagtgagactccatttcaagaaaaaaaaagaaagaaagaacttatgttccaacatcgagggttcctggtccatgatggatataactagccaaaacgattactaaaaatattaaaactggtaactgtcacaatctacataacagtccatggtcacagtgtactattctcctcacctatagtatcggactccttgaaaccaatgtgcatttacctggtaatacggtgaggtgacctaaggtggtattgctagaaatcagggagtagcaactagatgacgtgtcatggtgaactctacctgtgtcaaaccagaatcatgtctaggcctgactggttgatcaaatgg

SEQ ID NO: 721838 - DNA, 817 bp, Homo sapiens
gagagaaggcccggaggggttctgcggtctgtagtggcgctgttgggcccgtgcggattgtaagctgctggtttgcggctgggaagagcggcgagagggtcggcatcttcgtcgggatccccgcgaaggatgtagtgcgtgccatgagagtcgtcacccgcatggtgttgaagcgttcatgcctccctcagagacgatctgggatctagcaattgggcaggcagcgagactgtgggtcatgaagagagcaaacacgaaaagttcttgagacttatgcggtgcccgcgaccggaaagaacatactggtcggcttgtcatagggagatcagaaatcaaaatctcacttccgaaccgggggaagaaagacaagaacattactgaagaactgagtctccaatatcagcaaagtatggaccagtacattatcacggaagatatcgggatattgtggacttggttcagtgaggtagaagaccatgatggcgaaggtgatgtggtggagatgatgatgatgacgatgattgattcacgtgatcctgaaaggttccagatgattcctgaaaggcgaattcagaagtcaggaggaagcgaagagtctggttgaagaaactccatgtttgttgaggcccctgattgaagtggagggatccaaaaacaatacagctgtaaaaagcgattataaaatggatgtgtggtaaatacagtggttcataatcccaaaggatatggtatggattaagaagtaagcctatggtacaatgcactggggaggactggtttgagacaagagcttggttttattttaaagggcttatta

SEQ ID NO: 721839 - DNA, 753 bp, Homo sapiens
gagtatctgtgaggtaggtaccattatcccattgtatagaaaagaactctaaataagtgattctagagacggggtctcaccttgtgtctgcccgagtgctagctgatgatcccccatagctcacatgttagcactcgacgctccctgcggctgaggcataacctcgctgcctcagcctctagaatatctggggttactatggcacatgccataatgcgccagtctaatttactagaaatgaatttggataataagaagacaggggtcagccgtatggcacttcccataatggtgctgggagtttacaggggctgtaatgccaactatggcctaagctatggtaaacttgtatatcttaattctctctactcttggtataacttaatgagaacatacggttgtctgcgtcgtggtccgagcgcgtgagctgggagctgcagccgcgaaacaggatcattttggctgcgagtatgcgaagcacatctggataacgttaattggagtcccctagggatgggatttcgattcgtgtggctttaaagactcttctcgcggtagtttaagtcgtttgtggaactatacaatgggggtgaccctaggagtgggggggaagggaaaacttgaagtgggcgagtgaatatgaggaagattttaaaggaaaataacttttaaatctaatttagagggaagttattaattggatagtgggtaaagaagaatttaagaagttcaaagggatttgcgagggaagtg

SEQ ID NO: 721840 - DNA, 1969 bp, Homo sapiens
  misc_feature (1914)..(1914): n is a, c, g, or t
taattattatataatttattgaaaaaaaacccgttctttcttaacaatattcgccattattctccccgactgtgccccagggtggagtgaagggctgtttggcatctggacacactgtggaggggagcccaaaatgtgcctcttgcaggcgcccatagccccgatgtgccacagggactagagcctgtgctatgcatgccaataaacggagtgcctcacaaacctctataaatgtgcccaattgagagaagcgcatatgaggagaccagtgacagccccagagaggagagaggaggagaccaatacaccaaggagagcaagctacaacaaagatcgtcgggctcacacaaggttccccaccacctcggtgcgcgcgtgtgcgcgcccaaagagaactataaaaatcatcactgtgagaacacccccacaatacacgatgcggagaaaccaataaacgcggcgagacatataaagagcgacaaagtggagcatgagcccacagtagacacgcagcgcgagcaacaagaaacagatagagaagacggacagacgaggatccacacaagagcaacagagagagaggcaacacaacaaaacaactggacagacgagaaacaaaccaaccacacagacgagaacaaaacaaacgccacatacaaccacccgcacaatgacgccaaccacacaacctagagagatagaaaacacaccaagcagaagaacaacaaaccaaagagacccaccaacgcacacacaacacccgaaagcaacaagcgacacaaacaaaacacaacaagaccgcgaacaacaacaacacacgcacagaggaacaaccacacaaaacaagactagaaaagcgcacacaaacacatactaatctaaatagaaaacaccaaaccacacaacatcatatacttactacaaacataaataacatccatacatacatacacccacacacacatactacaaaccataaaaaaaatacaatacaatagtattcatatccaacaatcgacaattatacaaacagtctacacaaaaaacaataccaataacattaatcctcgaatcaacagcactgacaataaacaaaatgataatcaaacattatactacgtaacatagaacactatatctacaaaccaatacactacatacacaatctcgccgaatctgataaacaaaaaagacgtacaatatctcgtactcactccacgcaccataatagagagatacaccacccataatccaacatgatagacaaccacgacaacgcacacaacgagaagaatcgacatcgcagtagacctaacatacataccacacagaaatatacgaagtagaaaacacactgatacaagcaccgagaaccagtgcacaaaatgagatacacaacacaacacaacaacaaaaagagaacgaaaatactatacacaataacgcaaagagaaaacagcagtacgacacaagaaagcaagcggaggacacaatacacgtggaaatccaggaacgtccaagaaacgagcacacaccacgagaacaattcgatgagtcaaaagcaacactaacatgagtatgacacaacatcaagacagacaagctggactaacaccacaaatcagacgacgaaactccataccataaaatcaacgaacacaatcaaccacacaaccaaacttatgaaacacacagtacacagtgctacaacacacatgcaaacaaccaagaaacaacatcacacacatctactatagtcactcaatctacaatatatgcaaccctacccaacactacactaacaaaatacacttcacatgtcaccaaaacgttatctcaaattcactacacataatactcaatactatctatcacaactgagaatacacatatacgacatacaaaacaattaancaaacacacaaactacaaacagctccaaaaacaaaatataacatacactcatata

SEQ ID NO: 721841 - DNA, 929 bp, Homo sapiens
  misc_feature (617)..(617): n is a, c, g, or t
ggcgcacggtgcctggcgcaccccactggcctgcgcccaagtgtctggcactccctagtgagatgaacccggtacctcagatggaaatgcagaaatcacccgtcttctgtgtcgctcacgctggagctgtagaccgagctgtcctattggccatctgtggctcctcccctaatgattagttgtagtagcaacctcctgttgatgacactatggtcatccgtgggaggggtcttattaaatgaggtgaacccttgagctgaagatccacggagaaagtacttttcttctcccaggccacctccaggttcaagtgctgtgggacccaataccatttgcattgagactgggtgagcctgactccgtatttcatcacatggcgagacaggtgaaccaaatgtgaaagtggatccagaacaagatttgaaacaagacatgtgggatttcaatccgtgtcacaggcaagcaggaacatagaaattttctgttcgacttaataagaaggagtctaggcgtgacccagaagtggccttcattatctgcagggattgaaaatgaagcagccattgtggagatctccacagatcttgagaatttctggaatggccattatggacttncgtgcacgtggattgatcggaattcaggattgttgcgaagggagggtagcccgtggtaccccgcatttccgaggatattcgtcacgcggacgcatgcacaccaggtcacacatggtttttagttgatgacattttccgatggcggtttggatttaccctacaattcgtgtcaatagggcgctttatcttactttacgcttgccatcaggagtgcccctttcacacgttgcgtgacataccttgttgctctaaacaatctaccttgccaagacctaggctttgcttttccggcaaaacgcacagaagtgacaa

SEQ ID NO: 721842 - DNA, 905 bp, Homo sapiens
  misc_feature (120)..(120): n is a, c, g, or t
gctggtgtcattgattaaccacattctcctagcacaccattgaatccactatggatctaagtgtgtgggggactcttgggtggaagggttctgaatgatctccctcgttcatccctcccngataatcgtgtgaatacttgattctagttgagctattacaccagttgtaacaccttcctcgtgttactgtttgaaaaaacatgaaagtaagatctacatcaatacatccattgttataattatactgctaccacgttgcggcctggaggagaacttgatggtggcgcctgtatagtatcaagtattcagcgaagcttgatttgggtggcatttatccgcatactagcgtgaatgtgcgtgaatccactttggcctgtgtactgtgactgacatatagactgtggatctgtgtgaggccctatgaaattctgcactttacattatatactctaccttcattaattgactttctggcaagatgttctgccttagcactcagttgcattcttttcctttttcttcctgttcattatgctttaattctgaggaccatatgagggtagaatatattatcttttaaaaattacaaaaatttgtataggcaaaccatttcttaaagttgatggccaaattttaaaatgttatttttcatatcgtttatcatcttgtcacaatccacttaaagaagttaggttataatttccagtgacaagattttcttcccagagtagggttataaaacgagggctggggggggtaactttacctacaattagtaagtatggtgcagaatttcatgccaaatgcggagtggcagcagtgttgattatttaaacattatttaaacaaaacaaaaaaatgaatgccccaattgctgatgttagatcccggcgttcttagacccg

SEQ ID NO: 721843 - DNA, 297 bp, Homo sapiens
  misc_feature (72)..(72): n is a, c, g, or t
ccagactcacgaatgactgcgagacgatgcttcaggagtgacattattagtctatctctactcactggacantctatgctgagatagttttaatacgctatgataggagtatatggatctaataattgcattcttgtagctagtgaatatatagtatatgtgtcaggcattatatatcctccttcataaaatggttatttcttttgcccatttatctgttagagtcagtatttttggcattgatttggatgagctctttgttgagaacaaactcagcaactctttaggttgtcattt

SEQ ID NO: 721844 - DNA, 348 bp, Homo sapiens
tatttagttcaggaagaggaatcttgatcttcattccagggtgtcttctgccttcttgcgtgccctcaattcggttctcccagttccatgctgctcagctacacgttctcactcacacacttttgctcacataatacccatattggcctgctgcatctgctgaagctgttatttctaaagatctccagtaataaccacgtagtctgttatgcaaagttcggcaaatacaacgtcaggaccacagcaaggtggctagcagaggtctttcagaggaagagggagggcttcctttgtggagtgctgaccacttctgtttcctgttctcccctcagatcctttatagtcaat

SEQ ID NO: 721845 - DNA, 303 bp, Homo sapiens
ggctgtcaccgcagtggtttcagccggggaacatgcgcctataggagcgatgtgggttgggaccaggagggtcgcaggtcctgatattggtcgggatgtggatggctgtggtcccctggtgatggggcctcttatggcctgtggcttctccccctctccgtggagcgagggagggggagaggggggagtccgggtgccagggtggtgtgtgacatgtgtgggacttggttggtgtccagtgtgatgggggcttgaatggtgcttcgtgatcgcatcgcctgtcctggaatctgaggagatact

SEQ ID NO: 721846 - DNA, 449 bp, Homo sapiens
ctcagttaatccacccaccttggcatcccaaagtgctgagtatacaggtgtgagccaccacgcccatccgtctctgatatttcacataagcccattgctccagctactgtcatggtatgtagattaccttagctgtggcttaaaaataactatcctcagaatttagttgtcaggagaaagcaggacaattaagctgggtcgagattgtggcttgactaacagctgataccatttctcaattgggatcatttggtatatgtccccaagagacacctctgaatagtcagaaggaagaaaattgtgcaatgagttacgacggaatgggatgacagatacagaaacattgtaaacacatttgtcacgtaccctctgactgaaatcctggaaagagagtgctcatatcctcctttccttgaagacagttcttacttattcttacagaaagattt

SEQ ID NO: 721847 - DNA, 123 bp, Homo sapiens
gggccaacccaaaatggactggattggccattcgacttctttcccttcaaagtggcattcatcagaggagtatggggggaaaaatgctcagtctctcccatccttatcctgtgcctcttacta

SEQ ID NO: 721848 - DNA, 688 bp, Homo sapiens
gctctttctcagtgaccgggtggtgtgcttaggtgaggcgcagacggggaagcggagccgacatgccaggtggcccggagctgggttgtcgcaagaacttatgtgagcccgcggagacccttcgagaacatctcgtctcgaccaagagcgtgaagctgatcggcgagtatgggctccggacacaacacgtgaggtctggagggtcaacatttaccctggccaagatcgcgcaatggccgcccgggaatctggtgacgctctgatgagaaggacccacggacgtctgtctcgaaggccagacgccctgttgcgggggcttggtccgctatttgggggttgcttggatgagggccaaggatgaagactggaattagcatctcttggggccgtgaagagtagaggattctcttaggaggagaccgccttgccaggaaccccgagggtccttctggcaagtcgtgggcgcttggagcccaatgtgcctatcacaacccaaggcctcggcagttggttagagtcccggcgcaggcaggccgattattccaaggtggtcccggcaaagacagagtggagtggaacacgatcaccgggtgccttttaatttggtgacagtccttggattgtccccaggaaagacaacagtccgaatttcttcattcggcgacttctccccttacgggggtctggc

SEQ ID NO: 721849 - DNA, 364 bp, Homo sapiens
tgtgccatcatgcccagctaatttttgtatttttggtaaacacagcatatcagcatgttatccaggctgatctcgaactcctgggttcagtctgcctgcctccgcctcccaaagtgttgggaaccaccatgcccacccttattattgctttttagtaagttttttttttttttttttttccatttggttggttggtttggtttttgttttgttttgttttgttttgtttttgagactgagtcctgctctgctgcccagcctggagtacaaagacgttagcactttgggaggccatggcaggaggattgcttgagctcaggagttggagaccagcctgggcaacatagctaaaccctggctctac

SEQ ID NO: 721850 - DNA, 545 bp, Homo sapiens
  misc_feature (111)..(111): n is a, c, g, or t
ccgcagatcctgggaattaaaggctcccccttttgtcccttgtatttagtccctgttccattccaggcgttgttctaagtttggggactcacaaagaagcccctccttcanaaactacaacaagggggttcgcttatccccacctaacaacccgtcaatgtgaaatcttttcctttattaaaacaataatgataatggattggtttatataaccctatgtttagacaagttcaaggcgagcgtgtctttctataaaaagttttgttagtgagggaaattcgtccatggggccctctattaaagcggggaatagggttatgtggatggttcgcctttaataaatgagccgcttgctgaatgtattaacccgcgagcgtggagcaatccgttccctctttgggcgtggggaacccgctcatgtaaaatgcccgcccttaatgaaggagcaaggggtgggaccctttctgtaagtaccgcgtaccccgggtgttaatatcttgtcggggtggtggaataaaaactcccgcccacgtgcagggtttaaa

SEQ ID NO: 721851 - DNA, 709 bp, Homo sapiens
aatgaaaataattaaatggttggaaaatgtctgtctaaataaaggtcacagacactgggcctatttaatgcagaaatatgaaggggcaaacctatccacattcctcaaggatgtgaaaagaaataggcagagagatcattttcttcagtttttcaatggaaaaaaaaatacattcaaaagacgtcttcaccatacaaggaattcgttggtgtcagactggctactgaccaattccaagacaaaccgtacactcaagatagaagttatcctctcggaacactcagacattttttgttttctgcgttccactataattcaattggccaacaattaaagggcagttctcacatttaagacacaaggggggttgggattgcaaaaatggcatatttaaaagataggattactggtaagggttctgcgcctggggttgggttctggtataagcatcccggattaatgcatgtgctggtcagcatgagagtgggaacgccaccaaataagtagctatggtcggggaaacggttgaaatacgagtcttgaattatcaggtggtccagtacgagggtgtgggtgaaaaagcaggacttcccaaattggacctgttggacccatatttgaagtatctggaaccttacaggagataggcaaaaacctttcttcgggacatcttaagtagccttatgaatgatgatatatacaagagaga

SEQ ID NO: 721852 - DNA, 227 bp, Homo sapiens
gcatcgctattgcggtgctttcctgctacgtgatgatatagcaatgtgttttctccccctgctttgcagtggggtattgatctgccatctttttcaagaaccagtttagggccaggcacagtagcttacacctataaccccagcatttcgggaggcagaggtcgcggtgagccgagattgcaccattgcactccggcctgtgcaaaaagagcgaaactccgtctcac

SEQ ID NO: 721853 - DNA, 190 bp, Homo sapiens
aagtaacagcagcatcaccaccacccacaccagtgccaccgagcccttcctaagtggatgggccgaccctgggggcccagcacctggaggcaggcggttcccccacacggcatgtgacccaggagtttgtgagcaggacactgaccaccagcggaacccttagcaccacatggaccaacagttcttccca

SEQ ID NO: 721854 - DNA, 877 bp, Homo sapiens
  misc_feature (307)..(307): n is a, c, g, or t
  misc_feature (487)..(487): n is a, c, g, or t
  misc_feature (749)..(749): n is a, c, g, or t
  misc_feature (856)..(856): n is a, c, g, or t
gcgaaagatggcggcggaaacgctgctgtccagtttgttaggactgctgcttctgggactcctgttacccgcaagtctgaccggcggtgtcgggagcctgaacctggaggagctgagtgagatgcgttatgggatcgagatcctgccgttgcctgtcatgggagggcagagccaatcttcggacgtggtgattgtctcctctaagtacaaacagcgctatgagtgtcgcctgccagctggagctattcacttccaacgtgaaagggaggaggaaacacctgcttaccaagggcctgggatccctganttgttgagcccaatgagagatgctccctgcttgctgaagacaaaggactggtggacatatgaattctgttatggacgccacatccagcaataccacatggaagattcagagatcaaaggtgaagtcctctatctcggctactaccaatcagccttcgactgggatgatgaaacagccaangcctccaagcagcatcgtcttaaacgctaccacagaccagacctatggcaatgggtccaagtgcgaccttaatgggaggccccgggaggccgaggttcggttcctctgtgacgagggtgcaggtatctctggggactacatcgatcgcgtggacgagcccttgtcctgctcttatgtgctgaccattcgcactcctcggctctcccccaccctctcctccggcccccacccagtgctgcaccgagcccatcctctgtcaccnttccctacagcctgaggagtacatggcctacgttcagaggcaagccgactcaaagcagtatggagataaatcatagaggagctgcaagatctaggcccccaagtgtnggagtgagaccaagtctgggg

SEQ ID NO: 721855 - DNA, 187 bp, Homo sapiens
ggtgatctttgcgagcgtgcttctgtaaatattctatacactttatcctttttgtgagatgccgtttcacgtctgtgctcgcccaggcaggactgcaatggcgcgatctcggctcagcgtgcaatctccgcctcccgagttcaagccgatcctcctgcctcaggctcccgagtagcttggattacag

SEQ ID NO: 721856 - DNA, 195 bp, Homo sapiens
ctggcaccctggtgctggtgcatcgactacggcaggtagggggtgggcagggagggtcgtgaacacatttaggctgcttgggctgctgtgtgccggtgttgcctacactgtaactagcagcatagtgcttaatttgttcacaagaaatgctgcttccctttgaattgttgcgggggtctagaagttgcacttttt

SEQ ID NO: 721857 - DNA, 549 bp, Homo sapiens
  misc_feature (461)..(461): n is a, c, g, or t
ggctgcattcctgcgcacgcccgaatccatgaaaacgggcacccgaaaaccaacactccttaaaatttccactttggggaatttcccaagggttttggggggccccaagggggggccacaaagtggaaaaggcgtttttttttgggaaagggtggtttttttggaaaaaaaattttttgggggcgctttgggggccaaaaaaaacccccggggaaaaatgccctttctcccccgcggggggttttttttttttcaaaagggattttttttaaaaaagagtttggggaaaaaaaaaaaaacccccccccggtgttttgccccccaaaaaaaaaaccccgcccccccatagtgggtgggggggaaaaaaatatttttttggggggggggagaaaaaaaaaaaaaagggcggggttttttttgggggggggggggggaaacacaaaaaaaggaggggggggggnccccccccccccccaaaacccccccttctctttttcttggggtgggggggagaggggggttttcccgcccccccccgggctgtgtgtt

SEQ ID NO: 721858 - DNA, 366 bp, Homo sapiens
tgactgatagcagctccccccactaagcaatggcaggcaccttgacggacagcagctacccactaagcaagggcaggcaccttgactgacagccagccagtgcactaagcaatggcagagcacttgacttatagccagcccataccactaagcaaaggcagggcaccttgacttatagccaggccaacgcgcaacaagcaatggcaggacacctgacttgcagccagcccactcgactaagcaatagtaggacaacttgacttgtagccagctcaacccagcagcaatggcaggataccttgacatggagccagcctacactactagacaatggcagggaaccttaacatacagccagaccatacc

SEQ ID NO: 721859 - DNA, 277 bp, Homo sapiens
ggcgtcgtaccctatcatactattcacccttttctgcctactgatagtgatatctgaaagggttatcaaatcagctctcctctagaaataaataggttggtatctctaaacctggacatcagataacacactacacatgtaacattctgaatgagcagctaattcacgtgctcacaatgtccacagggaccaccacggctcttttacctgggaccttgtacacggacggacggacggacacttcgaccgggtacccgagactcgaacttcgtacatc

SEQ ID NO: 721860 - DNA, 388 bp, Homo sapiens
acgaggaggacaggggcggtgggcgggaggcttgccagcttcaacactcatgcgatcgcctaatgtgtacacatcatgaccaactcatcatcactgtggatattctttgtgttataaagaataaagatgtccatgtgtctgtctagatgatttgcattccatcccggctgaagctgtccgaatgagactatgggctgtgcctccgcctatcatgtagacacctgatagaatgatgatgatgcccagaacgggtcttactaccacaactgacatgagttttgtgatgagtattggatcaaactattggcataggtctacatgatacatggcgcgcaagaagagcataccatcgcattcatgaaccacgagatcttggcatagtgccgct

SEQ ID NO: 721861 - DNA, 337 bp, Homo sapiens
  misc_feature (274)..(274): n is a, c, g, or t
aaacctggaagccttaaggggctcagatttccactatagaaaagaaaacattctggccaggtgcagtggctcatgcctgtaatcccggcactttgggaggcccaggtaggtggatcacctgaggtcaggagtttgagaccagcgtggccaacctggtgaaacctcatctctactaaaaatacaaaaattagcagggcatggtgacgtatgcctgtagtcccaggtactcgggaggctgaggcatgggaatcgcttgaacccaggagatggaggnttgctgtgagccaagatcacaccactgcactccagcctgggcaacagagcgagactccgtctc

SEQ ID NO: 721862 - DNA, 894 bp, Homo sapiens
  misc_feature (134)..(134): n is a, c, g, or t
gtttcctccgccataatcctgtccctattccggcttctccccattgtgtggaccccccgggcgcccgtgtcccccgtcttgtgtggacccaactttgggacccacactcttggagggaattcctccccccccgncgccttgattttggcccaactttcggggtcccctcataagcgccaaagggggtcacccgtccgtaccaagtcccctcaagttcacctgggggcccccccttgtacttcctcgcgggggttgccccctctactaatccctccagtttttccccgccccccctagtccccccccggggttttggccaaaatggccaacctcgggttcaaagctgtttccttccacccccggtttccaatttccgcctggtttcccccccatgttgttggcacccggcccccctccaagcggggggccgccgggtccctcattttccccgtgggccccacaccccttgagagattctgggtcccgacatacccaggacggagagcctccgctgctccctgggatgcttcccctctgtgcgtgtacaccccgcgtggagtgctgggcaccccctctctccccggggcagggtttcccgccacacggtttcctctccgggcttcccttgaagggacggcacaagagtttctgccaccggtgattttcttggtgccccccgtggtctcccgagggggaggctccccagaattgtttcccgggctacttgtgctgctccccccgaaggaccacgccctgggttcatcacccacgggtccacccaaccaattcgtgagccggcattcagcaccccctatccgtcccccccaggcttgagcccccggtccccctcccatttttaaacccaaaaaagggccccgctctccaaacaataac

SEQ ID NO: 721863 - DNA, 845 bp, Homo sapiens
  misc_feature (845)..(845): n is a, c, g, or t
gtttgaaggaactgaggactggatagttgcaaacaaagatctgattgacaagaggaagtgcaccatcacaggtctgccaacagatgcaaagatcttgtgcgtgtgaaggctgtgaagtgctagcgtggtgccagctgagctcgcaagatactattctcagccgcattctcgtgaaggaaatcagtagagaacctccagagattcgcatcccaagacagcctgaaagcagatctatatccgctagagatgggaggaggctgtcaatctggttataccctttccagggaaaaccaagaccagaattcacttggaagaaggatggtgctagaaattgagtgaagaatcaagattaccactattcgccaactctgagagctgatgcaatcatattatattaagaaaagcagagaggagccatctctgggaagatatgatctgccaagtcaaagtggacaaatttcgtggtagaccgcgatcacttgacatccagatcattgagcgtgcgggtccaccccaaattggggaagattgaggatgtccggggagacaatgttcgtgtcacgtgggactcaccatggctgtggcatgctggttcccggctttaccatcagagggtggcaggagacctggagggtcgccttgggctttcttgaaccgggcccatggtggtgggctggggggattctccggcttctggacaggtggcccggggggccggttgagggttggccggggggagccaaacggtgtgaggtcgcggcttcccggtgcctctgggtgccccgcggggcaccagcaagtgtgtacaaggtgtgcccgcgccgttgtcggtgttgctccttggn

SEQ ID NO: 721864 - DNA, 148 bp, Homo sapiens
tgtgccagctgcttcagtggccggtgtgcaggtgcaccaatacagggctgccactaagatgatattttcatggagctgtctggggaaggagtagattcaagttaaagtgctcttaggcattcagtgtagacagagttctacagtcatg

SEQ ID NO: 721865 - DNA, 356 bp, Homo sapiens
gggcatcttgcccatgaatgcattcatggatcgtggccagcatagagtttgaatagcaaatccttggacacgggcgcttctgtttcatgcacgatccgcagaacatgtgtacgcgggtccagtccttaacatgtttggccgagttcgatctttcccttaatgagcagaggctcaaccactgtggggtgcacagtaatgtccacatgatattggtgcacagtgcagggctcctctcgagccctggcgcggtagagctcgcgcgccctaaggttggccgcgttcatgggcagactgaaaatgggcctcgccaaggtgctcgcggtagaagtagcatgcagtgcctcgctctgcgccat

SEQ ID NO: 721866 - DNA, 226 bp, Homo sapiens
gtgggtgaccgtggcttgtgggttgaccgtggcttgtgggttgaccgtggcttgtgggttgaccgtggcttgtgggtgggccagatagagaataaagcggctgcccgagtcagcgttggcaacccgctccagtccccctccacactgtggaagctttgttctttcgctctttgcaataaatcttgctattgctcactctttgggtccacactgcttttatgagctg

SEQ ID NO: 721867 - DNA, 291 bp, Homo sapiens
gcacaaataaacctagagcccggagacaggaaggacatataaaagattagatgagaataaatgaaatagagtgaagaaaagtagagacacatcaatgcaaccaaagagttgattctatcaaaagatcagtaaaactagacacaccctctgctagactgaccaggaaacaaggagactcaacattactaaaatcagaacatgccggagggaacatttcaactcgcacttggagaaataaaacagattatgacggcatattatgaataactacatgtcactaaattatccatg

SEQ ID NO: 721868 - DNA, 1265 bp, Homo sapiens
gcttggaggagtttgtcctccagtctggagctgtctgggatatagtcccgaagacctgactgctgcctatggcagcatcttggaagccattatagcccatgggcttgtttccgtgtgattcgacaacggaggatctgcgcatacggttctcggacttggaaataggcaggtggtcggtgcgcaccaagcacattcgcaagattgcgatccaggccctcctgtgagcagcatcagagtgctggagagtcggtggccaacacgtgcgcgcctggatagccatgggctctgcctggaccttggatcactgacactccgtgacggactgaaagacagcagaagacgccgagcatccagagagaagaacacccaggccagacaccactggaggggtcttccagtgaggacagacccccacgaagggcaggcacctccttctcacagaaacccggggacaccaagaggcgcgccagacatgggccagtgagaatggggagaccgaagccgagggcaaccagatgaccccatgcaagaggacagagctcccaggactcaaatctggaccacagcctatggagcccggctgctgaagaatggggcaggaagccacaggacccatctcacagaacccagactctcgaagacaaccgcctgcaacgggagccagccaaaggaacgaccaagaagggttgtcaagagaagttcaagataccacagggaccaagaagcacgagctgcagccggaccaaggcggcagacatacccagagggggatcattgaagaacccccagaaggttacacacgaagaagaccacgcgaagcttgacaaccatctccccagggcagccaaggggacaaggggacctgtaaaagttgacaggataacaaccagaccagacacagaagcgaacgaggcagtgaaacactgggacacatcctaggcctgcgaaggggaatgaaggaaggcacacgaggctaccaaaatatgaaccacacgagtgtacagcacgtaggtaacacgattaaggaacaaaaaaggagagtcgagaacaacactacctacggaacaaccaaagatgcgatataccagtgatacagaacaacgatgaaatcagggagtagaagataactaacaggggagaaagaaaagagaaaaccaactaaagcagtggaaaagaaagaaagcaagagaagatcagagacaaggagaagacgagatgaacagtaggtacgagacacaaacaactgaaacagccgatcctagagg

SEQ ID NO: 721869 - DNA, 843 bp, Homo sapiens
  misc_feature (2)..(2): n is a, c, g, or t
  misc_feature (103)..(103): n is a, c, g, or t
  misc_feature (114)..(114): n is a, c, g, or t
  misc_feature (119)..(119): n is a, c, g, or t
  misc_feature (164)..(164): n is a, c, g, or t
  misc_feature (175)..(175): n is a, c, g, or t
  misc_feature (197)..(197): n is a, c, g, or t
  misc_feature (242)..(242): n is a, c, g, or t
  misc_feature (281)..(281): n is a, c, g, or t
  misc_feature (361)..(361): n is a, c, g, or t
  misc_feature (387)..(387): n is a, c, g, or t
  misc_feature (392)..(394): n is a, c, g, or t
  misc_feature (506)..(506): n is a, c, g, or t
  misc_feature (514)..(514): n is a, c, g, or t
  misc_feature (528)..(529): n is a, c, g, or t
  misc_feature (572)..(572): n is a, c, g, or t
  misc_feature (600)..(600): n is a, c, g, or t
  misc_feature (700)..(700): n is a, c, g, or t
  misc_feature (794)..(794): n is a, c, g, or t
  misc_feature (800)..(800): n is a, c, g, or t
tntttttgcatgctgtttgtatttgtgtttttactggtgagacactagttgttcagggcctggctttggttcaccccctttagtgctttcccacacttcactnaaccctctccntttcntcgctgctaatagtctttttattttaaagcaattcctggaactgntttaggggctnaccatggttgctgggtgtcccncctcagataggaatgctgctgggcgattgttttatagtcttgttntcacaggccggactaccaggtggcccattactccagttnaccttctctactggctttgctgacctgctaccctacccctcacattgtttgccttgcccagcctgtgtacactctacttntgctgtcagttctcgtactttgcctnataannnagtccttcctgttcttttataggtggggtctgtctggggattctctctctctctctctctctgtgctctctctatctctctttctcgtgctcgttctgcctcccttatggcnggacggtngctccggtgaagcnntgagaaaactcttttggcctcatgtcaatgttctattgcattnagagcccaagaacccatggtcagttganacgggcatggcagtttcaactcgattttcctgtcacacgtttaacagtggtttcaaatttatatccagtgtgttttcaatatacccaaacatttaactgnagcttttggtagatgtatagttcttttttttttctttctttccccaagatggagtctgctctgttgctcaggctggagtgttgcagtgagctgngatcgngccacttcactccaacctgagcaacagagcaagatcctgtctc

SEQ ID NO: 721870 - DNA, 478 bp, Homo sapiens
  misc_feature (443)..(443): n is a, c, g, or t
  misc_feature (459)..(459): n is a, c, g, or t
  misc_feature (468)..(468): n is a, c, g, or t
attcggcacaggggttattttaaaaaataaacgtatttcgggataattttaggtttacagaaaagttgcaaagtgagcgcagagggtcccttctgccactccgcagcctcccctctgtaacttcaaagcccacaggattggctgttgtagctgagaaaccgtcgctgggtgtccctgtgaactccggactttgaatttcactatcaatgtcctgtttctgctctaggaccttgtccccgctgccacctgtgggagacagcctcccgtgcaccatttgcccagcaccctcaggcctgtgacggtctctcagtctttccttgtcttccatgccctgcagttctgagagggcctggccaggcaagtttgtccaggtgccccgatccaggcttgtcttgtgctttctcgtgggggtggacgacaggtttcagggagggggtgctgcngcctgtctcaccccantgttggcgntccctgacat

SEQ ID NO: 721871 - DNA, 162 bp, Homo sapiens
tacgatgtcaccgaggggttatgtgcccaccactactatttgatctagcaaaatgtctcagaactattattagcactagggcttggatatcaaggactctcatacatttaactcagtacccactcaaggccttacacaaggggacccagcacattcgaccca

SEQ ID NO: 721872 - DNA, 1229 bp, Homo sapiens
tctctggtatgccaaatatttaatataaatcttggaaacaagtccagatgaaataaaattcaaagttggcaaaaccgtgaaaatatacctaaatggtcaaatattcctcatggccccaaatcagtaatttttttaattcctaatgcacaagagttatgccttcaaacggcttaaatgactatttgatatgatcacacaaaccagtttccaaatagtaaagccagtcatctggcaattggtagggacaatgggtaacaagattatagagacaccttacacacacacacacaacacacacaccgcgtgtgtgccgcccaattgacaaaaaacattgtgggcctctcctaaaataagaagctgtgaagaccctataatggctgccgagggagggcacccctgggtgtcccccctccataagattccgaggtagttccctatgaacccaatagcaattgcggggcatattggacggagggagtgactctgaacagccaggttgtgacactccgtggtgcgggaacccttatcatgtaccccccatgtggttgcccctgaaaaaatgttgccaatatattttggcgccccccatattgcttgcgcgcgtgtctctttccaacattccctcaataataagacaccaaaaacccgggttgccccttggggtgggggcatccgcattggctggaacagacgcaacgtcataggtcacaccgtttggagacgtcagaaaaagggacataacccaatgtggcctgggtgggccattggctaaaccccgaagaatgtcattctttgcccccgtgaactgcggttctaaaccggaggtgctcacccccaatctccaaaaaatattcgtccggggggggcaataaagagaaacccggggcggcaaaactaataaacacgacgcgagtgttgggagtatgcctcgtatcaccccctggtccacatggtgggcggcagagagttacatatcacaggccgcaaaccccgacccagaagccgcgcagaggagagactaccggcaaaaaaacacagacggtggtgcctaacacgggagtcacaaagcaagggggccccaaaaaaaagcgcgcgccacaaccgaggaccggcccccgagagaggggaaccccacaagggcgaggagaggcacaccaactgccccgacaacgagctgacaagccacccagcaggggcccaagtgccgaccagcacactataaaacagag

SEQ ID NO: 721873 - DNA, 671 bp, Homo sapiens
  misc_feature (671)..(671): n is a, c, g, or t
tagaatattggtgaactttatactggttagaatcactgtccattaaatgatcactagctacgggtcactaaatttacaaattagggaaattatatataaaatactgcaaaaacacagtaaaaagactagaagttcgcccatttctggctcaggaagtctcttcactcctaagcttacatatggttggtcctctctgggcttcaaaatttctggctattattactggtgtttaccctccttttggatcttccttttggtcccccagtgccagaacttccagagccttctacgctccagatggccatctttttggtgtatgccatttcggaacagtcttcaatggatcgcctggtctggaaagagaggatgagctggcctggtgctcaattattttctccctggtgcacgctggtcttttctaagccaggagctccctcatttgggaaatctcttctttcagctggtggcactcatcagcaggtaatgggccctgtgaattctcccatctgggtatctcggtgtcgtgaatgattccttcagcctaatattaacggcttcaactcgttccttcttatcgccaggtcttcttcagacatatttactcggcaatttttaaccattttttcaatatcatcttgggttaatccaccagaagactggtttaacaactn

SEQ ID NO: 721874 - DNA, 208 bp, Homo sapiens
ggctgaggcaggagaattgcctgaacctgggaggtggaggttagcggtgagctgagatatgagccattgcactccagcctgggcaacaagagtggaaccctgtctcaaaaaaaagaaaagaaaagaaaagaaaatagcgccaagtccattttcaaagtggttgtaccagtgtacctatcccaccaccatgtatgagtgttacagtcgt

SEQ ID NO: 721875 - DNA, 103 bp, Homo sapiens
  misc_feature (25)..(25): n is a, c, g, or t
tgctgggattacaggtgtgaaccancacacccagcccacttctgccatattctgttggccagtgtgacaaggattgctactgtcctacccaccctcctttcac

SEQ ID NO: 721876 - DNA, 592 bp, Homo sapiens
tccattttttattaattgaagcacagtgaaaagaggcaaaatgttttatgaagtttatgttttttagacagggtgttggctgttcaccaacggaaaagaaaaacagaggaatgagctctcgatctttattatctttctcttattctcatgcgaggctgagaggcttttaaatgtgatgttataagcctaaggcaggttgacttgcatcaacaagggttttaccctgctcggcagagcaggtatacttatcgacaggcttgcaggacttttatacaaaagctgcgaaatcattcataacagctttctggtgctctctagatgccttgggcttgtgtttcacaagctcaacaagtgcagtttggcacatgagttgtctctccttctcagaaagtgtgcatatatctgcatggaaggtgaatgtttcagcattaaactcttttggaacggatgtttcatcgactttgacacctgaaaagtatggttcgctgttcaccaaggattgtgtgaagcatttgctgactctgggacttactggacgttgttgagacgaaaaactggagggcggggggtccaataactcctagaaggttgg

SEQ ID NO: 721877 - DNA, 225 bp, Homo sapiens
ccgggggcccccctttttttaaggtttttaaaaaagccaaacccggttttgggaagcaaggtttcctcggggccccaaggctttaacccccccccccttccagaattttttgggcggggcaaaacctggggaaaaaatttttttaaaaaattttgggggaaagggattttttttttaaattttccaaaagcctttcctttccaaaaaaggttttttttgggccca

SEQ ID NO: 721878 - DNA, 341 bp, Homo sapiens
  misc_feature (37)..(37): n is a, c, g, or t
gaaaagccaaccccggggccctttttttgaacccccnctgggaaaaagggggttaggtaacacccaaaccgggctttcaggtggggggggcccccccccccctttgggaaaagttccggtttttgtagggcaagcaaaaaccaagcccggttggggttatggaaaagttaaaaatttttttgtcccccctaagtttaaaatggtaagaaaaacgattttaaagaaaacttttcaaaattcccgttgggggaaaaatttcaaaaaccccttttttctttacaccctaaaacgcccttttcccagggttttgtcaaaaaaacccaaaaaagtgggttttttta

SEQ ID NO: 721879 - DNA, 1439 bp, Homo sapiens
ccacgcgatcggatcaagcctcagatgacttgacaccataaagccacagacaaggtactatgggggggagggcagggaacatttacatacttttactagtggattcttaagaacatactaacacttgagtattagcaactaattacaggaaccataacgtgcgaccacatatatcttaaacattactgaagttaaaactatggcttctaagtccttatccaaactcagtcatccaaactagtttatagcattacttccaggttggactattcttgtaatcttttaaatctcgcgctaaacggtggcattaactgtagatagttgctgatttctgttgtaaacccaaacacgtataactacagtagtacgctaactaaactattatactactagtagtatagattaagacccccatgcccccatctatcttatacctacactaagtcacatgcagacccgcggtaacactccagtgacacaccaaacgcgtgctctgaacaccatagctatacccaggcaacggctaaactctatcaatcacgactgttatgccactctacgcactccactagacaaaactggccccctgcgactaccgctgcaccacacacacaccgcgcatcagccagccaccacctacgaccccacacacacggccacaacagtcaaacacccacccacaccaccaactacccagcatcactgcggcggtacctcaccccactaccaacactccaccacacagacacaacacacaaccggtcactaacaccggcacaactgcgaccaccaacccaacaacccgaacccaccatacacatcctaccccaaacaacacaacactcacagacacaccacccgccccacatcacacaagcgaaagacacacatcgcgtccagcacgcggcactcacatcactcagcctacacgaacaaactcgcccctcacgagcaacgccacccccggcggcaacaaacacgaaaccaacggacgaaaccaaaggcccgatcgccaacattaacactctcaccttgagcaaaccaagaaaacaagggagcagcacacatgcgacaacagaacaaacaagagacaccgcccagcacaaacacaatggccacaacagacactacgagcacaaacgcataacaacaggaggcacagatagaggccaacaataatgacaacacagaagacaacgatgaacaaaacagaagcacccacagcaacaaccacacaagaccaggcaacccagagaaccaaacgcatcacaacacagccacaacaaacgcaactagacaacacagcaatcccgcacacaacgccgaaagactaggaaacgcgaacacacagcacacaatcaacaacacacacacacaaccatagcacacaaccgcaacacaagacacgaaatcgaaccaaagaaaacagacaacgaaga

SEQ ID NO: 721880 - DNA, 980 bp, Homo sapiens
gagaggtgagacgtcgcgcccgggagtccgccggctgcgccaggatggagtcggtgaaatgccttggccacccacctgaagtaagttcatacaaactggtgcgcttccggatcgcgggcaagcgaaatgtgaagcccaaagatgcgagcaggacctcggtcagaagcgagcctggaaaagttgcgtaaaagatatcgtcaaactcagaacccaggtcgcccaatctgcggcacgcctgttgatccaggcgctggcatgcggggagaatgcactatggcacgggtggcattattttcatcttggttcttcccgagctctgggaccacaactggggaaggatgagatggaccaatcaagtgtggagaacagaaggtcccactggttgagccagagatttacatctggtccttggatcagtcgcaggactgggggtgttcatggagagcaaagggggaaggatcgcaggggtggcgtgtgaaggagcttgcccataagagtctcacccttgaggtttagaagatctgggtgagaaatacagagaacagtgatggggcggactagtttgccggtatcaatgggggatgggattggaagagtttttgggtaaggcatgtgacctcgtgaaacgggaagtgggacgaaggtatggtaatagtgtggctgggagtgggccggaactgggacttttcccgcctgtttttcaggccctcagaaggttggacgacccgctcagtgggtgaaggaattaaagaccgtgccactgcgcagggggcgggtacctgcgaaaagcaggctcgggaccatttggagagcccggggccaaaaaagttgcagccacacctgaggcgcgtctcaaaagatggggatgcccacgagaatgcttccgaacgaaaaaataaagttggggcccaggtaaatatgggaaacggggatcagcagagcaagggcgtaacacaggagggacaggtcaaacaaaagaa

SEQ ID NO: 721881 - DNA, 942 bp, Homo sapiens
attccaataaagcacgtttccatagcatgttgcagatttcacatgcaagtatgtgggtttactgaatgaatttagagcacactgaaagtagttttaccaggaagtgcagagctgttctggttgacttaggtattacaggcagacagctccaaccagccagacaacaagcgacaagaatcgatacataaatatcgttgcctatgatcatagccagggttaaagcgtagccacagcttgctgaaataggatgtgcaatagcgtgactgattgatatcaatgccaattatgttgagtggctacatacatgaccaattagcttatattgcgtgcccaaggccctactgaatttccacagttctgaagatttctggagaatgatatgggaacataatgtggaaggttattgtcatgagtaactaaaccatcgtggagtaaaggaatggataaaatgttatcaggtactgggcctgccgagtgggagtgaggagtacgggtaactttctggtcagtcagaagagtgtgcaatgtgtcttgcctattatactgtgaggaattttactctatagaaacaccaaatgtaaagaagggctccctgataggaagatccggtggacgtgatggactgcgcagtatcacgtacacgcaggtggcctgccttgggtagttgccgtagttatcccttgcctgttgctgtcctttgtgagagggtgcctatgccaggctgctgccgtggggcctgtgttcgccactgctgtgctgggttgggagaaccggccttttttgtgcctaacagtttgtgggggatccagacgaggggctgtcaccagtttgggtcttgagactcggccctgaatttttgggcaccgggggcatgtgttctcctgaagggtggcggttcaatcggggcgtgggtttccctgttggcgcctttggagggcagaa

SEQ ID NO: 721882 - DNA, 188 bp, Homo sapiens
gctcttatactcctggatgaatgcagtaaggtggtcctagataatatccatgggggttccttaagaatatttatcaacatatttcagtcccgcaaaggcctccagtaccactatttgggtctttttaaagggctttccgattatttttggctcacaccttttgggcaaatttgaagttcacaaaaagg

SEQ ID NO: 721883 - DNA, 1384 bp, Homo sapiens
tctgttgtggatgtcctttgtttcgcttgttttggttctcttcttggtgggcggttgtcttccactcgttggtaggcgctggttcttaattcttgtgggatctgtcttttatagtggtttcgctttgttgtgcgctctcggttttctagtttgggatgttttccgggttttattttttctcggttcccctgtggttatttttctcgtgtcatcttgggtgattccttggtcatgtcccttttttcacgggtctccccacggggggtttttttctggtgtctcttcttgtcgccccgggtgtcttcgggggggcttttgctgcgatgtgttttccctgctctctttgtcgtggagttcctccgtgtttttgggggggattgtatttttttcatcctggggtggttcttctccctgaaggggggggttctcctcgaggcgccgctgtgtttcgtagaatgttcttctttcgatactgcgcttcttgtgcgtctaaaatgtgcgccaacacccaagattgtggttctcctttgttccctagtgtgttttttttactaggcgcgtctacatttgtgtggctccccggcgcccaaatatggtgtggggggcgcgtcacataggggggtttctacatatgctgtgtcggggggagaatctttaaatattccttttttcttcttccgtgaaccctgtggtttttgggcgcgctggtgcaccgggggcacagagtctcaaagaatttggggtgcccccactgtgcgcagaattttgatagcgggttttggccacacgaatctcaaccctggtctcctcacgagaattgtaaaggggaatctgggccacctcaagaggtttaaattttttccgcgccacgcggaatttccgaaaactccctctggccccacataagacattgttggggcacagggcaaaacccttttggtgtcacacccgtttgtggaacaccacagagagcccttccccttgggggtgcacagctctacggcgaccggttcgagaggccccccggcccacacacactttcacaggggtgccctcggtgatagtgtataggcgcgtccccctccccctgggagagtgtttgtgtccgccgtttccttagaaaatgttgtacacgacgagatcccaggcgttccctgggagaccctcttgtgggcacgagctttaggcttgtgtcagacttgggtaaatgggccccacattcatcttgttttttttgccctccacacttttccacccacacatgttgtagagagcaagggagaccccgggtcaattccggggggggcccccgggcgagaaacccccgggggtttggtggctccacaaaaaaaaagacccccgggaccccaggaggaaaaaaaaa

SEQ ID NO: 721884 - DNA, 828 bp, Homo sapiens
tgggaaacagtttggctcttgtattccccggttggattgcaggggttgatctcaattctaaattcattgtaacctcggcctccgggatactcttggcttcagcctctggggtagctggggattaacaagcacccaaccaacgcccagttaattttggtatttccggtagagaaggggtatttcaccatgttggcgccaggttgggtcttgaactcttgacctcaggtgatcctcttggatatggggctcccaaagtgcttgggaatctccaggctttgagccattgcgcccagtctacacactatttctggttagcccaacagttggtcggttcatatttacccctcattttcacgctcagggagtcatacctagaatagttacacacaagagggaactgggaacgccaaacatttggtacagtatggtgtaagaaggtcacctccatactcctttaatttcacatgagtgctgatgtgtttggcagatgagcttaacgttgaggctgtgggaattgggatacgtggaaaagactttaccggtatttagggaggttatatctaagttctggaaaattggtcacttgcttgggttggcactattttttttaaatttatattttgtcaaggtaatcacaggtgtgcaatattgcaagagtgggtaaaattttatttttcagaggttgattgggagacattttgtttaaccccagtcctgagaggggagacacttggaagagttggacagttaaggttgggagaaaggtattgggacttggaagaaaagataaagggtatgcgcaaaaaggggtgccaaaatagtgaaggg

SEQ ID NO: 721885 - DNA, 118 bp, Homo sapiens
ttgtacgttttcaattcatcatcagtgttatgtcagcagcatttgcattgagcagctaatgttctgaactttacttactaattttcagtgtccttaagcggatcagcggtaccgagct

SEQ ID NO: 721886 - DNA, 135 bp, Homo sapiens
acccggattttgtggtctgggcttgtatgtcccacttctctgcgaaagctttccaggtattcaaagaaacttgggtatagtcatctaagtttttggtcactgcagccatagctgcattagggggcacccaagaag

SEQ ID NO: 721887 - DNA, 754 bp, Homo sapiens
gaaggcaagaggaagcaagggaaggaggaacgaaaaacgaaacgaggagactgaaacgggggacgaaaacgactacgacacgacaaaactaacttgaacgggagaactcagaaaaataaagagaagaaacggacaagacaactacaacgagagaaacgagaacagaacgaaagacgcaaaagaacacaagaacagaaacgagagggagaaagagagggacgaaagggacgcgaaaaacaattgtataaagtagggagggaaggcgagaggaagcaagggaaggacggaagaaaacgaacagaggagatgaacagggggagaaaagatacgaacgaaaaatacacttgaagggacgaactcagaacacacataaagagaagacaaggacaccgacaactccacgagagaaaagagaaacgaaggaccagagcaacaagaacacaagaacagacaagagagggcagaacagagacgggcgaccagggagagaacaaaaattgtataacagtagggaggggaacggcgacgagggccgcaagggaacggcaggaagcacaaacgaaacgaggagatgaaccggggggacgaaaaaacgattcagccccggaccaacttcaccttggacacgggaaggaatcccagcaaccaattaacagggaggacacgacccaggaaccagcacatttctcaaggagaagcaacagagaacaagacgcacaagcagcaacccagaaccacaaggcacgacacccgg

SEQ ID NO: 721888 - DNA, 136 bp, Homo sapiens
ggtctctggttgacaaacatatgttgctgtagagttcaggggagacgtgcgtcatatcttgttcctagtgttgaaagtagtggtgagggtgtttattataataatgtttgtgtattcggctatacgtgtccggcca

SEQ ID NO: 721889 - DNA, 1065 bp, Homo sapiens
gacttgcccaagccactgctgttggagcttcccaggaaaaaaaaaaaaaataaaaaaaaaaaaaaaaaaaacacccatttttcccaaccttttatttggaacttaggataaattcccggtgttaccagaattttccggaaaaagggtaccactggtcggacaaataaattttgacacaagtgcacagaaacacaaagggggtgtgtttaagaatgcttttactcacaaaggccaggaggggcaaatcccctatattgccttctttagattggcccccactccagtgcctcttattgcggggttgttgccccgctgtcgtgtgcacgtgcggcacaattaaaagcgctatttctgtggaaacctgttgtccacacaattctcgtgacaacgccttacctttgagagaatgtgcgccacaaaccccgtggcgggaacaaccaccacctggcgcaagttgtttctcacccccaattgtactgcaccaatctctttacaacactatgtgtctaactcacaccggagacaatttccgcacaaccgtgtagcgagcttactccgtatcggggtagttctaagtggccatcatattctcatgacgccacaggcagagtgggcgagagaaaacgagggttcttccatcctctcaaacacaaaagtgggagcgggccctcccattacgaaacaaatcatctccgctcctcatcagtggcgggggacatcttatcccacaccagaaacacgcaacccccaaacgctttgtgtgtgcgccaaccgaaacgtggttcttgtcgcgacacagacccggttcgtggtgggatcaccccaacatacactagctgcacgcgagacagccaaatgaagttatcctgctaacctacattttgagtgcggcgcaccagtaggaactcggagacactatcaacgcagcgtgttcaacccacacccttcacaccactgagcgaccagcagatgtcgcacacagttgttgtcctcatgtccacaaatcaccgtccgggttggagcacaccaaacatttgttgcccccgggcaacaacccacagcaaa

SEQ ID NO: 721890 - DNA, 156 bp, Homo sapiens
cacgaggggaagctgagaagcgggcccctgacatcagagaagaaaaaacttcctgtcagtatcaggtacaaactgagagacaattgatacaaacagaatttgatcagcttataatcatcctaaataatgaggagcagagagagctgcaaagattgg

SEQ ID NO: 721891 - DNA, 273 bp, Homo sapiens
ccctccatgaaattcaagacaaagaagaaaaaaacctcaatgttattggacctaaataatcaaaaggataatgttttcataattttttattggaaaatgtgctgattctttgaatgttttattctccagatttatgaactttttttcttcagcaattggtaaagtatacttttgtaaacaaaaattgaaatatttgcttttgctgtctatctgaatgccccagaattgtgaaactattcatgagtattcataggtttatggtaataaagttat

SEQ ID NO: 721892 - DNA, 768 bp, Homo sapiens
tttgtctgggcagggcgctcactgttgcggcgtctactaaagattgccgaagccagaaagatgtgagtttctattcaatagatttgaggccactcatctcctgaggctacattgtcaagtagtaactgagatgcagcttcaaccaaagaacttgaccatatgttatttgcaccagatgttcacaaacaaattcaagcctggtgagacctgcatgcagtccgacctattgaaaagtctctaacacatagagtctgttgactataaacaccgacgtggtgtgaaatccgagatcgagccactgtcctgtagaaggactgccaaagactcctttggcaccaatagatggggactgttgaaaactgaagttgaaggtgacctaaaccgctccacatgcctttaatcagtgggacggggtttcagtgtttcgaaggccatcttttaaaaagagattacttccgcgggcgacttaaacacccttgaaattcatcacgcacaaagctattgcttcatgtcaagcttggttaacccattgcctatccgcccctaatagtggcagattaattggaagtggccggattaacaacgtggagaagggggaaccccgagtggaacaccgtaaacacattgccggaatgccacttatagaatgtggagtattggaaatagaccttacaactcctcttcaacaaatagaaaccttaaacccaaatggaaatgtaaaattaatatttttgttccccggactttgatttccactatttacttggg

SEQ ID NO: 721893 - DNA, 123 bp, Homo sapiens
ccacaatgaataccacttcacacccactaggatggctataatttaaaacaatggacaatggcaaaagttggcaaggctaggacgaaatcagaacattcatatgttgcatgataggagggggga

SEQ ID NO: 721894 - DNA, 920 bp, Homo sapiens
agcggctctttcctttcgctgctgcgagccgcagacatgagtatgctcaggcttcagaagaaggctacgcctctagtgtcctaccgctgtggcacgaagaaggtctaggttagactcccaatgagaccaagtagaaatcgctcaatgccagactcgccgtcagtcagatccggaagtctcatcatgagatgggctgatcatccgcaagcctgtgacggtccattcccgggctcgatgccggaaaaacatgcttggttccgcctgtgacatgggcatggtcacatgggcataggtaagcggaagggtatcagcgctaaatgcccagaatgtccagagaaaggtcatatggatcgaggagaattgacgtgatatctgcagtccggctcgctcaggaagataccgtgaatcttacgaagatcgatcgccatcatgtagtcacagggctgtacctgaaggtagaacgggtgacatgtgttccaaaaacaagcggattctcatggaacacatccacaagctgaaggcatgacaatgccctgcaatgaagtctcctggttgaccaggctgaggtcccgcaggtctaagaccaaggaagtcacgcaagtcgccgtgaagagcgcctctaggtcaagaaggaggatgactcatcaagactttatccgaggaggaaagacgatcaagaactattcactccacttttgtctgttcatactgtccttctgtgattacgtagatgaggcattaaatgaaaacaagcttaatctgggcatgcagaggtgctgtgtcttccatgcatggatcgcgggcaaaggggcttaatgctacaaggggggccccggttcaaccttgtgtgcctaaaaggaggtcaattccagttgggaacacacggcaaacggttccggtttccatggtaccggtgagtc

SEQ ID NO: 721895 - DNA, 530 bp, Homo sapiens
  misc_feature (54)..(54): n is a, c, g, or t
  misc_feature (67)..(67): n is a, c, g, or t
  misc_feature (76)..(76): n is a, c, g, or t
  misc_feature (96)..(97): n is a, c, g, or t
  misc_feature (131)..(131): n is a, c, g, or t
  misc_feature (137)..(137): n is a, c, g, or t
  misc_feature (245)..(245): n is a, c, g, or t
  misc_feature (285)..(285): n is a, c, g, or t
  misc_feature (319)..(319): n is a, c, g, or t
  misc_feature (401)..(401): n is a, c, g, or t
  misc_feature (463)..(463): n is a, c, g, or t
  misc_feature (523)..(523): n is a, c, g, or t
cctggggctccaggccccaagcccagcagcggagagtttataaataaataaatnacaaaagcgggcngggagtggnctggccagccctcccggggnnatggctcagtgcccagtgagtgacagcggcgggntccgcngtgagtcctcccccccccgccgcccgcgccgctcccgccccccccgcccccgtgaagacaaccccagggccaggcgcagggcgctgcaaagcagggtggaccgggggnggggggggtgcggggaggggatcctgggcccctgggcgcngtggacagcggcgggcttgccgggagggcccgcnccagcggaagcggtgcctcaaaaaccgtggccgggggaggagggcgggcaccgggccgggtgtggggcagggctgcccaganggtcacctgccccgcctcagtgcccgcctcaagcaggcgctgccggatggcgaacggcaggngggcatcgtcctcgtcccggagggctcgtggcgccccacgcccagcacgccgtacccgtngggcact

SEQ ID NO: 721896 - DNA, 222 bp, Homo sapiens
gccgcggatgcagtatagaggatcggaacgttcttctgcaggatacctctaggctgcagccatctgatcacgatggccaacatctttcaattcctgtagtcttatggctgccataatgttcagcttatccacttcaggttttagaggctttatactgggattcctaagctcttgtctcattgccagacattcctctaacttcaagcataccatcgttccaca

SEQ ID NO: 721897 - DNA, 695 bp, Homo sapiens
  misc_feature (689)..(689): n is a, c, g, or t
ttaatcctgttgctttctctcttcccagcacctgctgtggtccctggcacaccttgccgtacattgaatgaaggcaaagggagagatttcatcttagcaaaatgtcatgaactgcctggagaaccatgagttttctgttggtggggagttacgtcttggagggggcgccacttccaggactaaggcagtgtcggctcagctcgagaatgcagtgggtgacggggtcagcagccctaaaactccctccaccccggctgtgggaagcacccactgggggctccatcccgatgggcttcctgagctaaaatgggtgctttgtccatgctggataaatatgtggcgatgttggtgggttgggcaagtcagttacacgactctgtatgttcttcagatgatttggggatatcactgttattttaataagttctagaatttcccccattgacattgctacaaggcaattaaattaaattaaagttccttcttaataaaatgttccagtaaaacactttcctagtccccttgttgatacgtttgtctgcagtgactggattagctggcgggagaatagaagaaaagtggattttgaagggagattgtgcttgagtcacgcttccagctcctagtcattgtgggaccccagtgggctccccagagctttcgggtcttgatcatcctgtaaaaatganggtcct

SEQ ID NO: 721898 - DNA, 197 bp, Homo sapiens
cgaacgtcgagttcttctgtaaggacacacagaacaagacgcaggaatagccaattaggggggtgcctggtgatgaggaggggatgggtttgtcttgtcttctatattaaatttatggactagtctcattactccagaattatgctcttgtacctgtgtggactggagtatcttagtcgttggtttggtttgctggg

SEQ ID NO: 721899 - DNA, 100 bp, Homo sapiens
agtacagtcacaccttcattaattcattacctatatatattaactatgaactaagaatagaataataagagagaaactaaccaaaccaaaagttggctct

SEQ ID NO: 721900 - DNA, 142 bp, Homo sapiens
cccccccctccccccccccccccctttttggtaggtttgaattcttccagaagctgttgatgcgggttggccaggtttgagtcaaattgtactttgccccattgttaattgagaaacggtttcaataaaaaattctttttta

SEQ ID NO: 721901 - DNA, 180 bp, Homo sapiens
tacctcactaaagactccaaagcaatcctgccggtatctacgctcaacctcttcttccctagctcaaagccactatcatctgctgtgttagggattggggtacctgattggcagaaattaatcagctcccaaatggtacacaaggaaactaaagtgggtacccaaggaaaaaaaacggga

SEQ ID NO: 721902 - DNA, 1473 bp, Homo sapiens
aatatgtgggtgctgctggtggagtggcgctgtggcccgtcccgctccaaccatcccgtgccgttgctgcaagctcagtggcgtttgcaaaaaccacgtctggtgagtgacttgtgccgcaagcgcgggcgaaccgtggcgcgctcggggagtgtgggctggcggctgaatgactgagcgatgtgatacgaatgcacgcccgcgagagcgcggggtgaccgcgtggttggtgcgcgcctcccggggcgccgctgatagacgcaggggtcagcgtgcctgtcatggggtgcactcatgagcgccagtcaggtggtccaggaactacactgtgaggaggccgccagatgctggtttgaattcctgtggatgcctggtcaggttcaccaatctccagcacagcacggactgccgagggatccacagcacctgaagcacacagcatggcagcaaccctgtgacagtcacaagacgccacgctcacggcacggtgacagcacatatacccagacccagagagtccattggcccgagggaccctcaaacaaaacaactcatgcggagaacacgggccaatcaaggggtccatgcaggagcacaatccagaggtgcacaagatgacattccacagacttcagtacacagcaagcaaaagttcccgaaacctaacatggtaccgaccttggaccaactaggaactaggtcaaccctggaacagatgcatagaagcatggccaggagtggataatagaacacagtcaaacactaactcgacttgggaaattcaatacacagaggcacaagaacatgaccgatgagaaataattgagtccgcacaaatagacaaaagaaacagaaggagcccaagaaagcaatcacctacgaggagaacaacaaaaagaccttacagaggagcatataaccagagacacgggatgggacagaacccctgtagtagcaccaaagacacccaggaagctggaaaccgacaatagacacaagagagcaacgaacagggagagcccacacagggcaagcagagagaccaaagacagccatggggtacaacacccacgagcagggagtaacagaagaaacagtagaagatcaatgaaaaccatgaaaattagaaaaagacagaaccgaacaggaatacaaacagaacccgaaggacaaagagaagattaacgatgatagaagaagagagaaaggagagaacatgtgtcgactgacagcttaaaaaaaggatatagatatataaacaacatgggatgacagaacaaagagggatgaagtaaaagaatgaatctgtaacagagatgaaagcgactcagcgacaagcgattgacgagaccagagagacgaacgaagcaatgaacagaaatgtgatattacaacataatcagaagaacgagagaagaagaataaatcgaatcactaattgacaggcaaagaaggaagatacatcaatatcac

SEQ ID NO: 721903 - DNA, 1176 bp, Homo sapiens
  misc_feature (1175)..(1175): n is a, c, g, or t
taagggtaaaaaatgttcatttaaggattatcacttccactaccactgaggcctcgtgaaaagtgttcacaaatttctcaaaagcagcgagggggtacacaagttttttcaccacaaccacacaagcaacaaacgaaatctgtgccattggtggtcatctcgtgcatgaggtgcgtaatagtggggggttcaaaggtttctccatttggtttcaaatggctggattatgaatgtttccatgaaagaataaaaaggtatgggtagacacattttatatccaaggtacaaagggctgaggacttgggtattaaacaccaaggaagaatcctgtgaatcacaaacgccaatacccccaggaggtcaccccaatacacacaccacagctcataatcacgggcacggttcaaacattgattggtcctcgcgagatgtctcccgtggacagacgtgttccaaagacgttggtgtacagtggaggttaccagacacaaaagcataataccctgataaaccgaacccttataacgatattttacacaaaacctttaaggcaagtaaggagaatggctcgctctgatcgcacggagaactacgacatagcgactcacaccgtgggatccaaccacaaccctggcaacgtgtacacaaaaaggactgcatagtacacaggtggccccacacacaccacaaaacttgggaaaaacaggatggacacaaaccatggacagcgggacatcggggaaactaggacaccacgagagacgcggcaaatcaaacaggagagaagtaccaaatcacagaggggagggacaaaaaaacacagcgagaaccacacaacgggagaacacccaagaggcgccacagaaacccacaatgtcaacaaaagagaatgaaaaaagtaacaagcactaaaaaaaaaggccacaacggtgaaccaaacagagagaaaaaaacggcgtcgatcccctcgtatcgactctcgaagcatgtccctcgagagagagcgccattcagacagactagctagtgatgaagagacgatcaaacccttgcaagattgcacaatcaatgaaacgataacctacggaaagaagtgatcacaaaaagatctacaaaaacatgccagcgagctactacaagaccgctgaatgtactcggtgcgaggcacagcactnt
